United States Patent Application Publication US 2017/0009304 A1 - sequence listing, part 38

SEQ ID NO: 798697 - DNA, 100 bp, Homo sapiens
cggcgagtatacatgcaaagcttccaatgagtatggcagtgtcagctgtacagccacactaactgtgacagagcctggagaaagttcttgtggaattcag

SEQ ID NO: 798698 - DNA, 98 bp, Homo sapiens
cgggcgtcaccggagccagccagcggcgatgtacagttacccagcacgtgtacctcctcctcctcctattgctcgggctgtagtgccctcgaaacgtc

SEQ ID NO: 798699 - DNA, 99 bp, Homo sapiens
aggacttcgtgaaggattcgggcgcctgcttcagtgggaaattcaactactgaggaggttacggcacaaaaatgtcatccagctggtggatgtgttata

SEQ ID NO: 798700 - DNA, 100 bp, Homo sapiens
ggagtgtaatgaagtcttccaggacgagacatcactggctacacatttccagcaggctgcagatacgagtggacaatgatcattcaggatatgttcgtcc

SEQ ID NO: 798701 - DNA, 100 bp, Homo sapiens
cgatccgttggtgcatgaaagtcttctaaccattccaaaatctctttcagattcagaatggacagtttagaagaacctcagaaaaaagtctttaaggctc

SEQ ID NO: 798702 - DNA, 100 bp, Homo sapiens
ggagtcccccggagacagctgccccagtggaggacatggctcggaggaagcaggacaggctgctttggtttgtgacctccaggcaggacggccatcctct

SEQ ID NO: 798703 - DNA, 98 bp, Homo sapiens
aagtggaaaaattatgcaggtggtggatgaaaaattggagggcctgaggctatggcaggaggagcaggagaggaaggtgcaagccctctcggagatgg

SEQ ID NO: 798704 - DNA, 98 bp, Homo sapiens
tcctcagtctcatccatctaccagtagcagttcatctgatgggcttcgtgataatgtaccttgtttaaatttaggtgtggcgctttccagaggtcatg

SEQ ID NO: 798705 - DNA, 99 bp, Homo sapiens
gccgctgggcctgcaggtctctgtcgagcagcggacgccggtctctgttccgcaggatggtcagttcaccgggacctggaggcccagattgcgatcgtg

SEQ ID NO: 798706 - DNA, 100 bp, Homo sapiens
atgtcatccttgcagacctcaacctctcaggatggcatagtcaatccaacaataagaaaagatttgaaaactggaccgaaattctactgctgtccaattg

SEQ ID NO: 798707 - DNA, 100 bp, Homo sapiens
cccggccctgaggatggacccaggagatcccgctggtgaccctgccgctggcgagcgccaccgcatggtgttctaagaacggaagcatctgggctggatg

SEQ ID NO: 798708 - DNA, 100 bp, Homo sapiens
tgtttctaacccgagcaatgtctggcacctgtatcaagtgcaacaaaggcatctatgggcagagcaatgcctgccaggccctggacagcctctaccacac

SEQ ID NO: 798709 - DNA, 100 bp, Homo sapiens
ttaaagatgcatgctgatggcgataagtcattaccacagggacgatgatgacattaatgatgttgcatcgatggctggagtaaacttgtcagaagaaagt

SEQ ID NO: 798710 - DNA, 98 bp, Homo sapiens
gaaggcgtgggcgacccggtgtgtggcgcgcccagagccccgcgtttcagccctagggaagatctgggacatgagcgatgatgagaccatctgagatg

SEQ ID NO: 798711 - DNA, 99 bp, Homo sapiens
agccagtttggctgaaaataaaagggagtaactattcccagtcagaggcgctatgtgtattattatagctacctgttaaagaatcatctggattataga

SEQ ID NO: 798712 - DNA, 98 bp, Homo sapiens
ggtcaggacaattccatttggggaccagagatggacggtcactcagcctatggagcagcgatggattttgggtggggaagtcctccttgcggagttgg

SEQ ID NO: 798713 - DNA, 100 bp, Homo sapiens
atacactgaggccctggcccagagggacaagaaaggcagactacaagttactgagcacctccctgagaaaattgaaagtagtttacaggaagatgaacct

SEQ ID NO: 798714 - DNA, 100 bp, Homo sapiens
cacatcttgtaaaattggacaatggctctttagagagttatctgagtggatcatagacggtatttctatgtaaacgaacagtcgggcgagtctcagtggg

SEQ ID NO: 798715 - DNA, 115 bp, Homo sapiens
ttatctggaaaggctggattgatctccaaagactggatggtatgggctgtctggagtttgatgaggagcgagcccagatcccaagcagtattgaagatatatttaatgatgatcg

SEQ ID NO: 798716 - DNA, 98 bp, Homo sapiens
cggagagcgcgcgggagcgagctcaaggcggcgcggcggccactgggcgcagcacccaggtacaggaagaaggaatggaatcggaaggaagaaaattc

SEQ ID NO: 798717 - DNA, 99 bp, Homo sapiens
cttttttcgttgactatcctgcccctgagatccacccaagttgtgaacctctgtattactggcaacagactgaagatgatttgacagtaaccatacggc

SEQ ID NO: 798718 - DNA, 100 bp, Homo sapiens
agaagctggtcgccgccggcagccagcttgatgcccgaaaatctgcagttgctgggtttttgctgctcctgaagaactttaaagttttaggcagcctgtc

SEQ ID NO: 798719 - DNA, 100 bp, Homo sapiens
cgacactaactatactctctactattggacacagcattgttggttttgccatgtactattttacctatgacccgtggattggcaagttattgtatcttga

SEQ ID NO: 798720 - DNA, 98 bp, Homo sapiens
gctgcctataatcaagtaaaaacaatagctcaaggaaacctttccaacacagatgtccaagctgccaaggacctcatgtcttggatcaatggaatacg

SEQ ID NO: 798721 - DNA, 99 bp, Homo sapiens
agaaagggaaaaactaccagaacggagatgtgtttggcggttcaaaccttgtactactcagctgatcacaagctgcttgatgggaacctactagatgga

SEQ ID NO: 798722 - DNA, 98 bp, Homo sapiens
ggcatcattgtggccattgagcacagcagccgtcctatcaatgtgattaacaatctgcacatcgtgctgccacacgaggcttcattcgttatggctgg

SEQ ID NO: 798723 - DNA, 100 bp, Homo sapiens
gcatatgaaagtggattatgggtgtcttcagtgccctgggtttgcctgtgacccaatgcccactgggactgaatgccaaaggactccctttaggcatcca

SEQ ID NO: 798724 - DNA, 98 bp, Homo sapiens
cgagctggagaaggccatcaccacgcagaacgtcaacaccaagtgcatcaccatccccaggttttaaaatcaaagatgggaaaatcggagaaaattgc

SEQ ID NO: 798725 - DNA, 100 bp, Homo sapiens
gacatttctttgtggtttatctaaaaaccaaaggtggccagtctgatcttggatataattcattatctaaagatgaagttagaagaggggatacatctac

SEQ ID NO: 798726 - DNA, 100 bp, Homo sapiens
tgtgacctccctgtggatgagcaatttctggaagacaagagtgttgactttaaggtttcgctggccaaagggtcttgggcgtctttggtactggcttttt

SEQ ID NO: 798727 - DNA, 98 bp, Homo sapiens
atactactctgaggggcttagaaattaacaggggcaatgacatcattgcagcagccaagcgcatggctctgctgatggctgagatgtctcggctggta

SEQ ID NO: 798728 - DNA, 100 bp, Homo sapiens
gcttacttctgttgggacaggccttgcatcctgtgctgccaactccatcaatcagactgctgtgattgcacctgccatcttatgcagaaatgacctgaag

SEQ ID NO: 798729 - DNA, 99 bp, Homo sapiens
tgagaagcaagaaggccctggacacagcaatatctctgggctttcacagacaaagccacagacccaagcatgtcggaacaggattggtcagctatccag

SEQ ID NO: 798730 - DNA, 99 bp, Homo sapiens
actggaggtcgctgctgcacccaaactttgcaaggaattcggtccagaggattacggcgaagagtgtgagccactgccccatgttgtgttgatgccaat

SEQ ID NO: 798731 - DNA, 98 bp, Homo sapiens
aaaccacaaatgtttttctgttttgcctgaatacatgatttaaacaagagatttccacagaagaattacggatccagatcaggagatttgaggagctg

SEQ ID NO: 798732 - DNA, 106 bp, Homo sapiens
gaacaatgggaaccagtctttcaaaatagtgaagatagtccaagtcctaagagacagcgcctctctcattcagtctttgattatacatcagcatcaccagctccct

SEQ ID NO: 798733 - DNA, 100 bp, Homo sapiens
cacactggtgacaactcaagagcaatcagtaccatctgattggcccggatcctcgttcgcctgccggcactcaggctgatgagctccaacataacagaag

SEQ ID NO: 798734 - DNA, 100 bp, Homo sapiens
ggcgaccggagcggtaggagcagcaatttatccgtgtgcagccccaaactggaaagaagatgctaattaaagtgaagggccgcccagtatgcttgctctc

SEQ ID NO: 798735 - DNA, 100 bp, Homo sapiens
ggacccttattttatgccataatgggtggagagattcaaccagttagcgtgaaagttggagataaagttcttctcccagaatatggaggcaccaaagtag

SEQ ID NO: 798736 - DNA, 98 bp, Homo sapiens
tcctgcccaaagtcctggacctcattgtcaatggcatttctatcaacagtgcttatacctccaagattctgaaaaagtcccagactctccagaaaatg

SEQ ID NO: 798737 - DNA, 100 bp, Homo sapiens
cgctgacagagatgctgcagagctagacaagggttcaccatgttgcccaggctagtcttgaactcctgatcgagagattcacccacctcggcctccaaaa

SEQ ID NO: 798738 - DNA, 100 bp, Homo sapiens
caaggattctcgctgtgacagagacaacaccgagtatgagaatattgctgacagacagaacgccttggaggctgagtggaggacggtgcaggcctctcgc

SEQ ID NO: 798739 - DNA, 50 bp, Homo sapiens
cacaactccagtgctaactcaacagtgggtgaatttgtaagtgatgtcct

SEQ ID NO: 798740 - DNA, 100 bp, Homo sapiens
gaccctctgcccctagaataagaacatactagaagtcccttctgctaggacaacgagttccgagagaaatatggggacgtcttcacggtacacctgggac

SEQ ID NO: 798741 - DNA, 100 bp, Homo sapiens
ctcgatggaaaggaatatattactccagcccaaattagtaaagaaatgagagatgagctacatgtccgaggtgctatttgaactgctgggacctgaagga

SEQ ID NO: 798742 - DNA, 100 bp, Homo sapiens
ccatggcctggactggcacccagacagcgagcacattcttgctacctccagtcaagacaattctgtgaaggctcaggtacacgccaatttgaaagtaaac

SEQ ID NO: 798743 - DNA, 100 bp, Homo sapiens
tggactccttcggcagtccacccaccgccgccgcctcccaggaacgtgttgtgggctttcacgtactgggtccaaatgctggagaagttacacaaggctt

SEQ ID NO: 798744 - DNA, 100 bp, Homo sapiens
gaaattccatccaagagatccaaatcttctcctgtcagtaagtaaagggaggagctttatctttatatactgcccttaccacacagcagaaactggcagg

SEQ ID NO: 798745 - DNA, 100 bp, Homo sapiens
gccaaaatatggtgtgaaggttggcctgacaaattatgctgcagcatattgtactggcctgctgctggcccgcagggacgcgagaactcttggaactggg

SEQ ID NO: 798746 - DNA, 99 bp, Homo sapiens
ggaggggatgcggcctccaatcttctttataggtatgacccccgctgtaaacagtggatcaagtcctcctccgcctcctcctctctgcatgcgcgtcag

SEQ ID NO: 798747 - DNA, 98 bp, Homo sapiens
cctgctataagagcattatgggcagacagcggcatacagaatgcctatgaccggcgtcgagaatttcaactgggccacaggagaatggtatgctgctc

SEQ ID NO: 798748 - DNA, 98 bp, Homo sapiens
cagtcatggacaagagctattgatagaaggttattctggtacaagttaacccaggagaagcatttacaataagaagagaagatggacagtttcagtgc

SEQ ID NO: 798749 - DNA, 100 bp, Homo sapiens
tcccggactggaggcgcccgcggcctcgggtgcgtccgctgcgccagcttctcagcagtggaagccgatacctcattcgatcagatgatatgatagaaac

SEQ ID NO: 798750 - DNA, 98 bp, Homo sapiens
ctcaatgccttgaaaccagaaaaagatgtggatgggttgcactccaggacttgcagacgaactccaagattggggcactcctgccttactttgtttat

SEQ ID NO: 798751 - DNA, 100 bp, Homo sapiens
aagaagaatttcgatctccgccctggggtcattgtcaggaagatgttaccgagtacttcagtgaattccttagtgcaggggaacggagtcttgaattcca

SEQ ID NO: 798752 - DNA, 99 bp, Homo sapiens
ctaaacaaagctctgctgctgggggccctcgctctgaccaccgtgatgagcccctgtggaggtgaagacattgtggaatggtgaggttctggagaattg

SEQ ID NO: 798753 - DNA, 100 bp, Homo sapiens
accagcgctgccacttgtacccgcagacattatgaaagacgtgaacgatcaagagagagggaccatagtagatcacgagaaaagagtcgacgtcataaat

SEQ ID NO: 798754 - DNA, 100 bp, Homo sapiens
agccatggaggccaactggaccgcgttcctgttccaggaagagctaaggagcaaatccaagatctgtgccaatgtgttttgtggagccggccgggaatgt

SEQ ID NO: 798755 - DNA, 98 bp, Homo sapiens
tcctcctcatctgtccccaccacaatcaatacgattggaaccagcacaagtacaatgagcatgcccaccagtgagaccgagtccgtcaacaccgaaaa

SEQ ID NO: 798756 - DNA, 102 bp, Homo sapiens
gagatgaaattctcaccatggaattaatgattatgaagatgagtgatgtgtctgcaggaggagccactgtttttcctgaagttggagctagtgtttggccca

SEQ ID NO: 798757 - DNA, 100 bp, Homo sapiens
cggacagttcattcgggagcaacactgtctgttccggagcatcccccagccagatggagaagaaagatcattgctcctcttgtaactcgtcatggaaagc

SEQ ID NO: 798758 - DNA, 98 bp, Homo sapiens
tcacatcgtggagatggacaggagacctggaatcattgttggcagcagagaccacactggctgtgcgcagacgcccctccgcagcgtccctcatgttg

SEQ ID NO: 798759 - DNA, 100 bp, Homo sapiens
catacttggaatgaatccttctagagacgtccacgtctgaaccggacggcttttctcatttccacttgtacgtgtgcgctgcttttctcgtgagatggag

SEQ ID NO: 798760 - DNA, 111 bp, Homo sapiens
agagacggcgcgactactcattatcgccagcattggccagctgaagacgctgaacaaatgtgagatatgcaagtttcctcatgggaatctcaaggggatttgggctcatcg

SEQ ID NO: 798761 - DNA, 98 bp, Homo sapiens
gggcgtggagggcgacttcctcattagggacagcgagtcctcggtagccctaatggagaaccttgtggaaagacttgtttggaagagagagacaatca

SEQ ID NO: 798762 - DNA, 98 bp, Homo sapiens
atggcagcttccttgtcacagacttggcagccgcatctacgagatcctcccccagcgcatccagcagtggcagcagagcccttgcattgctgaagagc

SEQ ID NO: 798763 - DNA, 100 bp, Homo sapiens
tgccaaaatattttgcttggtacacaaaatggatctggtacaggaggatcaacgggacctgttttcctcacgggagaaaaagccaattccatattaaaac

SEQ ID NO: 798764 - DNA, 101 bp, Homo sapiens
attgtatctgtttttctcagaagagaattccacaagatgctgagatgaatcgtcacctgtgtgtttggctttttagacatccatctcttaatggttacctc

SEQ ID NO: 798765 - DNA, 98 bp, Homo sapiens
gatggcaggagatagtacgttgtcgactgtgacacatgttatcgtggtgactgggtacctggatatgtgatcgagtattcttctgggtgtttctatga

SEQ ID NO: 798766 - DNA, 100 bp, Homo sapiens
agtctttggaggatgcggctttgatggggacaggtgcctggtgctgctcttcctaaccctctcaacatgctggggcctcaggccagccagctaccttgcc

SEQ ID NO: 798767 - DNA, 109 bp, Homo sapiens
aaaagtttggtgtctcgttttgaggtgaaaaatgaatgagataagtgctttttaaaaagatgtatagccatggaattgaattggcttgccaaaagcagaaagagtttgt

SEQ ID NO: 798768 - DNA, 100 bp, Homo sapiens
catcagaaatggatctggacgcatgataacatcataaggctaagtgctatttatggaggtacctatatgctgaataaacccattgaagaaatcattgtac

SEQ ID NO: 798769 - DNA, 99 bp, Homo sapiens
acatctttacgattccaggacaagcttttgtccccaaaccagaggtcttagaaaaataccccaatacacccatgagtcataaagaaattcttcaagtta

SEQ ID NO: 798770 - DNA, 100 bp, Homo sapiens
aaaaaagtgaatcagcagccaaatacaggcatgagccagaaggagagctctaagtctgccatgatgtatattcaggagttgaggtcaggcttgcgggata

SEQ ID NO: 798771 - DNA, 100 bp, Homo sapiens
ctgttggagactttggaagacccttctgcctcccatggagggcagactgacgcttacctgactctgaccaggttctaatattctcctggctagaatggca

SEQ ID NO: 798772 - DNA, 100 bp, Homo sapiens
ggaagatcagatccgtttgaggcctggctctgaattacatctgacccccaaagctcagcagtgcatcacatatgattgtctctttagtggaagattatcc

SEQ ID NO: 798773 - DNA, 98 bp, Homo sapiens
cgagctgagtggttgtgtggtcgcgtctcggaaaccggtagcgcttgcagcatgactcggtgaaatacctggagtgctcagctctcacccagagaggc

SEQ ID NO: 798774 - DNA, 100 bp, Homo sapiens
ctgcgctgttcgtgctgctgggattcgcgctgctgggcacccacggagcctccggggctgtttctctcctgtcacaatggcatgatctcggctcactgcg

SEQ ID NO: 798775 - DNA, 100 bp, Homo sapiens
ctggccatttattgctgtcttgttccatggactgtaaaattaaggaacttggcattagaattcctcgaccactaggacagggaccaagcagattcatccc

SEQ ID NO: 798776 - DNA, 100 bp, Homo sapiens
cagcgattgcgagaatgaggaggacaacagctacaaccggggtatcctggtgtgaaccagctatcctccagtataggaggattgagtcttcagagttctc

SEQ ID NO: 798777 - DNA, 100 bp, Homo sapiens
tttgagaggaacacgaggaacccccaggacccagctggctcacaaccgcatgactttgaagaagccaaggaaattttgacaaagatgagatacttttcaa

SEQ ID NO: 798778 - DNA, 100 bp, Homo sapiens
agtctttatttcagggagctgatcgtcactccttccttaaggctctttattaccaagttggtgagtttgtaagtgatgcccttctcgttcctgacaagtg

SEQ ID NO: 798779 - DNA, 100 bp, Homo sapiens
ctcatctccaggacagtgggaagagtggctggaggaattcagtttcttggggatttattcaggagattgagcatgctctgggtcttggcccagccaaaca

SEQ ID NO: 798780 - DNA, 98 bp, Homo sapiens
aaaaatggcgactgtggcagagttgaaggctggtacctgtttcccaggcaactactgatcaggcatttctggaccccaaaacaacaaactgatttctt

SEQ ID NO: 798781 - DNA, 99 bp, Homo sapiens
tctcgctgttgctggtctctggctccctcctcccagggccaggcgccgctcagaacggtcattcctgcacaggacagtccaccatggcctcagatcacc

SEQ ID NO: 798782 - DNA, 100 bp, Homo sapiens
ggaagatggacgtactttgtctgactacaatattcaaaagggagggacattgcttgggcctccagactctgtggttgatgtggggagtacagaagtcaca

SEQ ID NO: 798783 - DNA, 146 bp, Homo sapiens
acggaatctatctctgagaatgacccgttctggaatcagcttctctcattttctttccctgcaccaactagcagaacattgacatcaccaatttcagcagcagctggagcgatggcctggccttctgtgctctgctccacacctac

SEQ ID NO: 798784 - DNA, 50 bp, Homo sapiens
aaggccaatgttggtgctggcaaaaagggtccaccaaaatatactaaatc

SEQ ID NO: 798785 - DNA, 100 bp, Homo sapiens
taaggtgtcggtggagttctgctcggcgtgcgcccggaaggcgtcgtcttctcttaaaatcaccagcagacgtttttgaatcaactgagagaaattacgg

SEQ ID NO: 798786 - DNA, 100 bp, Homo sapiens
tgcactctgcacttccattcctgcagtgaaattaactcgagcttggcagccgggtaacagatcttgtaaaccaacaacaaaccctggaggagaagatgcg

SEQ ID NO: 798787 - DNA, 100 bp, Homo sapiens
ggccccggaggagcacccagtgctgctgaccgaggcccccctgaaccccaaggccaacagagagaagatgactcaggaagtactcccactaccccaacct

SEQ ID NO: 798788 - DNA, 100 bp, Homo sapiens
ctggagagtaaaggactcctactgaaaacaatgttctaggtagattaaaagatgaagaaattcgatgtcgaaaatacctacatccaagttcatatactaa

SEQ ID NO: 798789 - DNA, 98 bp, Homo sapiens
ccatggtggactacctggtgcctctagtgaaaagaacaagaagtcttaccctcaggtcaaaataagctgtcattggaaggaatagtggtacaaagagc

SEQ ID NO: 798790 - DNA, 100 bp, Homo sapiens
aggagagaatgtatgaagaacagtcacaggacaggacttgcaattgtgaccaaatatattacaaagggctggaaagaagttcatgaattgtataaagaaa

SEQ ID NO: 798791 - DNA, 100 bp, Homo sapiens
aggcaaaggagtggaagtttgagagaagtttaagagaagaaatggacatgattgcctaaatcagccaaacacaggtgtaatggagagagggctaaagaag

SEQ ID NO: 798792 - DNA, 100 bp, Homo sapiens
agaagatcaggtacacaaatgcacgcgacaggaaccaggttggcgtgcagtggtgtgatctcagctcattgcaacctctgcctcccggactcaagcaatc

SEQ ID NO: 798793 - DNA, 99 bp, Homo sapiens
ggggcaggggcggaggcggaggcagaggtggaggcgctttgaaagggaccactgacaattagggatgtgactgtagaattctctctggaggagtggcat

SEQ ID NO: 798794 - DNA, 100 bp, Homo sapiens
gaggaaagttgggtgcgactaaggggtatgcggtgcccacatgccactgggtcctcagcagtaccacctggagccgacacccgcactgccaggatccaag

SEQ ID NO: 798795 - DNA, 100 bp, Homo sapiens
ctttactagatgctacatacaagtggttagatgaacgtcatgcacaatctcactttattccagctttattccgaccttctcctcttgagcggataaaaac

SEQ ID NO: 798796 - DNA, 100 bp, Homo sapiens
aagatgacgaaagactcctgctgaaagaagacagcactctgaaagcagctggaatcgaagccaaggctgcccccaaagattgtttcattgaagtgaattc

SEQ ID NO: 798797 - DNA, 100 bp, Homo sapiens
aacggggagccgagctggagctgccgcggcgcagccagatttgaacatggaattcaatccttcagatcatcctcgggccagcacaatattcctcagtaaa

SEQ ID NO: 798798 - DNA, 100 bp, Homo sapiens
ctggttgttccgttgcgagctgcagctgcgatctctgtggtaggcccagcgcttctctgaagtagctttggaaagtagagaagaaaatccagtttgcttc

SEQ ID NO: 798799 - DNA, 100 bp, Homo sapiens
actgggccaaggtgatggtggagaagagcaggataaggaagcctgtgtgggtaccaacaatcaaagctacatctgtgacacaggacactgctgtggacag

SEQ ID NO: 798800 - DNA, 100 bp, Homo sapiens
aggatcagagcatgaaggaagggacgttacatccaagaggaaataatccaggcaaggaagcacaagctgatcaagatgtgtagttctgtggctgccaagt

SEQ ID NO: 798801 - DNA, 100 bp, Homo sapiens
ctcgatcgctgcccgccgccagcatgttgggcgccccggacgagagctccgtgcgggtggctgtcaggtttacccagggttgatgataaccgctggcctt

SEQ ID NO: 798802 - DNA, 100 bp, Homo sapiens
tgaactatagagtttgtggacagatttatattgatgtttctattgatatgccagacctacttgatatcaaccatctccgagccagggggttacagccagg

SEQ ID NO: 798803 - DNA, 100 bp, Homo sapiens
cttccgcaagctgatggttgccctggcaaagggtttggaaatcccttgtctccaggttgctgggattgacttcttgctcaattgaaacactcattcaatg

SEQ ID NO: 798804 - DNA, 100 bp, Homo sapiens
aatggtgaaatacttcagatcagtgtggggaaggtagatgtcattcaagaaccagaattaaatatgggtgatgttgagaaaggcaagaagatttttatta

SEQ ID NO: 798805 - DNA, 100 bp, Homo sapiens
caaggtggaagattcttccaaggaaccagtgcgaaggtccattgcaaaagaacttgcagactggcttattagcaacaatgtggtggagcatatatttgga

SEQ ID NO: 798806 - DNA, 100 bp, Homo sapiens
tgccctcacctgaaaactctaaaaagtaatgggatgaataaaattggactcagagtttccattgacactgatatggaggactcagagagagtaatgataa

SEQ ID NO: 798807 - DNA, 100 bp, Homo sapiens
acagtgacacagaacagatagctgaagaaggtgacgataatttggctaaaactatgttccaacttcctgtcaacaatcttggcagtttaagaaaagcccg

SEQ ID NO: 798808 - DNA, 100 bp, Homo sapiens
gctgtggtgatggatgaggtggtgctgacaatcgagcaaggaaacctggatacccataatatctgccgaacatctgactagccacaagtatgttacccag

SEQ ID NO: 798809 - DNA, 98 bp, Homo sapiens
ggacttccataaccattcagtgaagaattatatccagatcgagagacagaagattctgaaagggttcaatgaaatgagagtcatcttggacaatgagg

SEQ ID NO: 798810 - DNA, 100 bp, Homo sapiens
acctaaccatgaagacttgaacttaatacagcaagaaagaccatcaagtttaccagttcatatccagctttcagagtggcaccgtgcaatttttcttcca

SEQ ID NO: 798811 - DNA, 100 bp, Homo sapiens
ttggcgaggacggggcgccggcgccgccgcccccgggctcgcggcctgcagtcctcatcaccgggggcatcgtggccacagctgggcgcttcacccagtg

SEQ ID NO: 798812 - DNA, 100 bp, Homo sapiens
gtgcgggttcaggaggtacccaaactgaaggctgaggccctgacgtggatgggcaaactgcaggcctgggaaggcagcaagccgggccgtccgtgttcca

SEQ ID NO: 798813 - DNA, 99 bp, Homo sapiens
ctagtggaagcagagtgggaagcaggaaacctcgacctgtctcccagttggttgcacagcaggttactcagcagtttgtgcctcctacacagtcaaaga

SEQ ID NO: 798814 - DNA, 98 bp, Homo sapiens
ggctgtaagcgccggtcgcggctgtgtcggtcgccgctgctcccgctcctgctgggagaggattaagatgttctacgaggagcatttgcacttggacg

SEQ ID NO: 798815 - DNA, 100 bp, Homo sapiens
gaatctgtagctgctcctataactgttcgtgcttacttaaatcagacagttacagaattcaaacaactgatttcaaaggcaggaaactgcatatcttctg

SEQ ID NO: 798816 - DNA, 98 bp, Homo sapiens
ggttggaggagtgctggtggagcgaactgtcaaagaggtgctgcccgctttggagaacaacaaggagcagaatatcagctgcatccagtgtccccaga

SEQ ID NO: 798817 - DNA, 99 bp, Homo sapiens
gaccttccggagcttctcagaagacagagggttttcttttgagatggcgtttaatgattgcttcagtttgaactaccctggcaacccctgcccagggga

SEQ ID NO: 798818 - DNA, 103 bp, Homo sapiens
aagctccagcaccaacaacaatggggagtaactattcccagtcagaggcgctatgtgtattattatagctacctgttaaagaatcatctggattatagaccag

SEQ ID NO: 798819 - DNA, 100 bp, Homo sapiens
ggaagatgtaccaggagaccaggtcaagcccgaccaatacactgaggccctggcccagagggacaagagcagtatagcatcaagttctagaggaattggg

SEQ ID NO: 798820 - DNA, 100 bp, Homo sapiens
ggtgctgacagattttggtctgagtaaggagtttgtggctgatgaagataccatacttgcagagctccttcagatacataaagaacacattgtaggatac

SEQ ID NO: 798821 - DNA, 100 bp, Homo sapiens
aagcttttgttaattatcttaaatacttgctttactggaaagacccagaatatgccaagtatctaaagggtcaggagagtgctggtattgtgactagtga

SEQ ID NO: 798822 - DNA, 98 bp, Homo sapiens
caactgcgaggaaaatgagcagtctctgcccccgccggccggcctcaacactccgacagttagttaatatgtgcatcaacccagatccagagaagcga

SEQ ID NO: 798823 - DNA, 100 bp, Homo sapiens
agttgatgggcacctcccgggacgggtgctgataagactgtgaaaggcccagatggactgaccgcctttgaagccactgacaaccaggcaatcaaagctc

SEQ ID NO: 798824 - DNA, 100 bp, Homo sapiens
gctcaacttcggtgcctctctccagcagactgcggcaacatgagtgagaatgaggaagaggaaatttctcagcaagaaggcagtggggactatgaagtcg

SEQ ID NO: 798825 - DNA, 98 bp, Homo sapiens
tcagccatgccagctctggtgcgcactctcgagtggaccctgaggagctcttcaccaagctcgaccgcattggcaagggctcgtttggggaggtctac

SEQ ID NO: 798826 - DNA, 50 bp, Homo sapiens
gtacgaggtcacttaccgcaagaagatgacggtccttcgctacccaccaa

SEQ ID NO: 798827 - DNA, 100 bp, Homo sapiens
ctgaagttccctgatgatcagactcagaaaattttggaaagagaagatgctcggctgatgtcgaggattactggtttgaaacaaagatgtcagccctaaa

SEQ ID NO: 798828 - DNA, 98 bp, Homo sapiens
agccgggggcgccaactccaacgtgttctccatgttcgaacagacccaaatccaggaatttaaggaggcccggctggacattttgaagattcattctc

SEQ ID NO: 798829 - DNA, 111 bp, Homo sapiens
tacttctcatttaagctactcaagaaagagtgcccaattccaaatgtacagttccgccatggagtcatagttgcagctgactccagggctacagcgggtgcttacattgcc

SEQ ID NO: 798830 - DNA, 98 bp, Homo sapiens
ttcctgaagatgtttacagtgcagtcttatcgaaggatgtgcatgaaggacagcctcttctcaatggtgaagatgcaatgaccggggacacagacaaa

SEQ ID NO: 798831 - DNA, 100 bp, Homo sapiens
aactcatgcaccatgaaaagctgctgttttgcaggagatcgtgaccagagttgtgccttttactggggatttacttcttggattgcctactacattaatc

SEQ ID NO: 798832 - DNA, 100 bp, Homo sapiens
ctcgagggccctggctgaacttcaccttttggctttcttggcctgatgctgaactctcgaggctgagatctgtatctgtggacctgaatgttgatccctc

SEQ ID NO: 798833 - DNA, 98 bp, Homo sapiens
gcacattggaggcgtgatgcttaagctggtggagaaactcggaggaagacaatggtcctataatgcccttggataagaaaaggaaacttttgagctgc

SEQ ID NO: 798834 - DNA, 100 bp, Homo sapiens
gaggatggttccacccaggccagacagcctgacagattttgaacacagcacgaaaacattttggagctggtggaaatcagcggattcgcttcacactgcc

SEQ ID NO: 798835 - DNA, 99 bp, Homo sapiens
atggccagaacggcgacttcacgcgcgctctcaagaccgtcaataagaaacatctgctcaaattaatgaccatgggggatatgaagaccccagactttg

SEQ ID NO: 798836 - DNA, 100 bp, Homo sapiens
cagctagtaatttgccttctggattagcattggctgtgatgactacttaggctccgacaaagtcgtggacaaatgtggggtgtgtggaggagacaacacg

SEQ ID NO: 798837 - DNA, 98 bp, Homo sapiens
ccaacaatggaggccagtggctggtctcaggtaagtaaggaggtctctgtaccatggctcgtacaaagcagactgcccgcaaatcgaccggtggtaaa

SEQ ID NO: 798838 - DNA, 99 bp, Homo sapiens
tcagccaggagcacgtagagtcactctgctggttgctgagcaagtgtaaagacctcagccaggtggagatgcttatagaattttatgagtcaccagatc

SEQ ID NO: 798839 - DNA, 100 bp, Homo sapiens
tgctttcaactgatttgggaagcctacaccattcaccttagggttttggatattattgcaaccataaacaagggatccattgtctggcaggaggtttttg

SEQ ID NO: 798840 - DNA, 99 bp, Homo sapiens
ctgactgtcgctctgcctttgacaggagaggctgcttcttgtagagaaggcagacggtaacaagtactccttgctggattgaacttcatctgaatggac

SEQ ID NO: 798841 - DNA, 100 bp, Homo sapiens
gaggagctgcgggaggagatccacaaggtcagagtggtgctgggaacaactgggccaaggggcactacacagaaggcgcggagctggtggactcggtgct

SEQ ID NO: 798842 - DNA, 98 bp, Homo sapiens
acaaattgagatttgctgatggaagcataagaacatgagaactgcgactcagcatgcagaagaatcgcctaccagaggaatgacgatgatgaagagga

SEQ ID NO: 798843 - DNA, 51 bp, Homo sapiens
gagcgcctcgacctcggtctgaggatgttgagaaagagaaggaaacccaca

SEQ ID NO: 798844 - DNA, 100 bp, Homo sapiens
cgcgccccgccgctgagccgccggggagccgtccagtcttcgaatcccagtgtgcttcccgcacagctgcagccatggggtctgaggaccacggcgccca

SEQ ID NO: 798845 - DNA, 98 bp, Homo sapiens
acttttggacagtccaagctatatcgaaggtctgtttatgatggtgaagaacatggacgtttcatggagaagcttgaaactcgtatccgtaatcacga

SEQ ID NO: 798846 - DNA, 100 bp, Homo sapiens
attcaggatatacggtgcaccttggaggtgaattagttatccctcttcttgtagaagaccctttagctacccctcctattgctactcgtgcaccttccat

SEQ ID NO: 798847 - DNA, 100 bp, Homo sapiens
tgacgaggagacagagccccagcactcacagacctcaatgtctagtggaggtgttccgttattacggcttatttcaaaacctttgtccctcagttccagg

SEQ ID NO: 798848 - DNA, 100 bp, Homo sapiens
taattacttaaaacaccacgatgaaaagaaatacctgtgatttgctttctcggagcaaaagtgtcaagtctggcaccatctttgacaacttcctcatcac

SEQ ID NO: 798849 - DNA, 98 bp, Homo sapiens
gggaaaacctgaggtgcttggaggtccagacacaagaagaggattggaaccagttccgatacagcacaatggtcctcagtttgcagaagacccctccc

SEQ ID NO: 798850 - DNA, 100 bp, Homo sapiens
aaagattgacatccagaggaaccgagtcaagcatgaagagtttctcactcttattaaaggcttatgcatctggatgtgacattgtaatactgggaagcga

SEQ ID NO: 798851 - DNA, 100 bp, Homo sapiens
gataggcctgtgacgaaggtgctaccatcgtgagagtaaggtatgaggatacatgggctgcacttcacagaagagccaaagactgtgcaagtgctggaga

SEQ ID NO: 798852 - DNA, 99 bp, Homo sapiens
tattggatggaatgatatatgccattggtgggtatggtcctgcccacatgaacagggcagcccaatggatccaatggtgatgaagagacctcagttgta

SEQ ID NO: 798853 - DNA, 116 bp, Homo sapiens
acgaggaagttttctactgtaaagtcaccaacgagatcttccgccactacgaggttcccttctggagaagagtcaccgggtttggttctgtttcccctttctgctcgacacttctg

SEQ ID NO: 798854 - DNA, 98 bp, Homo sapiens
ttgtttcttatatgtgatgccattccagcactggactcatggaggctgagcatttattcagctaaaagatggcggcaaggcagcccaggcaaatgtaa

SEQ ID NO: 798855 - DNA, 100 bp, Homo sapiens
tgaagggttagcggagcacgggcaaggcggagagtgacggagtcggcgagcccccgcggcgacagattatgactgtacccaatgacccttacacttttct

SEQ ID NO: 798856 - DNA, 100 bp, Homo sapiens
cttgagtgtgtatctctacatgcgctctttgaaagcgccccggaatgacctgtcgcctgccagctctggacagtcattttgtttactcattcagccctgt

SEQ ID NO: 798857 - DNA, 100 bp, Homo sapiens
tgcaaacagacttcggagtacctgcgctatgaagacacgcttcttctggaagaccagccaacaggtctgctaccgctgccacggccccccctgctgcccc

SEQ ID NO: 798858 - DNA, 100 bp, Homo sapiens
cgcgtctcaacccattcccaggagatggactctgggactgaaacaaagacctgcggaccaagggcttcagcctagagtcgtgccgcagcatggtgaacct

SEQ ID NO: 798859 - DNA, 99 bp, Homo sapiens
ttttctctgctgggtttttgattgtggccacctggactgactgttggatggtgaatgctgatgactctctggaggtgtctcactttgtcgcccaggctg

SEQ ID NO: 798860 - DNA, 98 bp, Homo sapiens
acatcacaacaataagcattcctctcttgctggtacatgatatgtcagaggattgtctcaaagcttgccaggagcagattgaggcggtgctcctcaat

SEQ ID NO: 798861 - DNA, 99 bp, Homo sapiens
gcagccgcccgcttcaaccccaggggaccagaggaactcagccctgattgcggtgttcactgttggcagaatttgtgccagccgtaccagaatttatca

SEQ ID NO: 798862 - DNA, 98 bp, Homo sapiens
ggctgagctggccatgggctttctgggcagcaggtttccccacttgctctggagcgggactgtgctgaagaccatgctggacatcctgcagaccctgt

SEQ ID NO: 798863 - DNA, 99 bp, Homo sapiens
ttgaatactacatatgtcgagggaatgcagaaagagttaaggaaggcagggctaagttctaaaaacatcagttcatctccaagcgttgagagtttgcct

SEQ ID NO: 798864 - DNA, 98 bp, Homo sapiens
gaccgtgtccgcgcgcctgggagacgctgcctcggcccggacgcgcccgcgcccccgcggctggagggtgatggggacccagagcctgctcttgggaa

SEQ ID NO: 798865 - DNA, 100 bp, Homo sapiens
gccttgcccaagatgtattgcaggggaatctgcctgggaacactccgtggggatcatctgctttcccagtctccaaaggctggctgaagacgtgtctgac

SEQ ID NO: 798866 - DNA, 98 bp, Homo sapiens
gaaagtggtgaatcccctgtttgagaaaaggcctaagaattttggcattgacataaatatttcttcaacccacccaaattcctttgacttcaaacttg

SEQ ID NO: 798867 - DNA, 100 bp, Homo sapiens
gtcacgaaatggattggagtgaaccggagaccccgaaaacggaagcgcagggagaaggaagaggtgtttgaaaaggtgggcaccatgtccttgaagcttc

SEQ ID NO: 798868 - DNA, 100 bp, Homo sapiens
actgactagcagcttcattttgaaaatctgtctatgatcttctcccaaaggagttacagttacctccatctagagaaacatctgtagcatcaatgagtca

SEQ ID NO: 798869 - DNA, 98 bp, Homo sapiens
cgaaaggccacaagaccccttggggaaaatggaatctgaaccctcagcagttttataccatgttccatgatagtgtcgaaccaagtggaacaaagaaa

SEQ ID NO: 798870 - DNA, 100 bp, Homo sapiens
agataaaatccattgctgctaagtactccggttcccagcttctgcaaaagattccagaggggtgactaccatattgatgtctgtatcaatgactacctgg

SEQ ID NO: 798871 - DNA, 100 bp, Homo sapiens
ctgaattaccatcagctgaagggaaaatgaaggttaatttggagtggcccctggagtcagtttcctacaccatccgaggccccacccagcacgagctaca

SEQ ID NO: 798872 - DNA, 100 bp, Homo sapiens
ggaggtggacgcagagcagctgatccaggaagcctgtcggagctgcctggagcaggatcaaaatacttgctggatggtggactcagagaccaataaaaat

SEQ ID NO: 798873 - DNA, 100 bp, Homo sapiens
tccaccaagcatcccattacagatagaagaggtgtgccttgaaggggagatttctcgccagtccatcttgaacagtctgtctcgaggcaagaaggcttca

SEQ ID NO: 798874 - DNA, 100 bp, Homo sapiens
aagaaaatatcgtgcagagcccaagagcatttacgaatatcagcctggcaagtcttccgttctgaccaacgaaaagatgcctgtggatgtggacaaagat

SEQ ID NO: 798875 - DNA, 100 bp, Homo sapiens
tgagacaatcattgttttccactccttgcttactgggtcctacgccaacagatatgggaggaaaatggtgtgaatggaacattaacttcaaatgtagcag

SEQ ID NO: 798876 - DNA, 100 bp, Homo sapiens
agaggtgtcggaggtctcatctttgaactactgccggagcttctgccagacttcacagagaatgcagttgtcttgacttcaggtctgtctgttctgttgg

SEQ ID NO: 798877 - DNA, 98 bp, Homo sapiens
ctcactcaaggatcagttggctttagcaattggaggagcaccgaacagccagttccctgagcagtggtgcccttacgtggacaaagaaattcagccta

SEQ ID NO: 798878 - DNA, 100 bp, Homo sapiens
gggagagctgctgaagtcaaaggagcaattgctggtcctgagcctgaggagactttgaatgtgattgatcctggcttgatggacctaaatgggatgagtg

SEQ ID NO: 798879 - DNA, 100 bp, Homo sapiens
gcagaagcttctgttaaggattctcagaagaatggtgtggaaacaggaagagaactagaactggaagtaaagcattgaagatgtgactgaattgctgcaa

SEQ ID NO: 798880 - DNA, 98 bp, Homo sapiens
ggcgctggagagagacaagatgtccgccagagctgcggccgccaaggttctgaatgatgactgacgcgggtttgggtgatacccctcacagcccctgt

SEQ ID NO: 798881 - DNA, 98 bp, Homo sapiens
aagtgttggcgtggcccagcatctaactaacacggtttttattgacagagctctgatagttgttccttgtgcagaagaatgtgacagtgatgataaca

SEQ ID NO: 798882 - DNA, 98 bp, Homo sapiens
gaagtggcgaggaggctgtggccctggtagaggagctgcagaaagaccttgatggaccagcaatacaagtaaagtgttgagagaggagaaccagtgca

SEQ ID NO: 798883 - DNA, 99 bp, Homo sapiens
aactggacagcatgattcaactttgtagtaagcttcgaaatttgctacatgacaatgagctgtcaggactatgatttaatctccaaagaaccaaagcct

SEQ ID NO: 798884 - DNA, 100 bp, Homo sapiens
acgcataatggatgaaaggaaccgacaggctctctatgagaacatgctggtggagctgccctttgcaggcttctttctttccaagttgcttggaaccagt

SEQ ID NO: 798885 - DNA, 100 bp, Homo sapiens
tgcttttgaaccactggaaagtgaggaattttgaagtacaccgtggtgacattgtatcattggtgtgggacgctcgtccctgctggtggggaatctcaag

SEQ ID NO: 798886 - DNA, 99 bp, Homo sapiens
tcatcttccatgatggcaccaggccccaatccagagctgcagcccaggactcctcgccctgcttctcagtcaggttacactcctcttcctgggtccaat

SEQ ID NO: 798887 - DNA, 131 bp, Homo sapiens
cgagagtcaccaacagataagaagcagaaagttgagcgcattgcatcacatgattttgaccccacagtgaacagagtatctgtcaggcaagagctgctgtgatggtttatgatgatgccaataagaagtgg

SEQ ID NO: 798888 - DNA, 99 bp, Homo sapiens
tactcgcccgccaccctgcgctgccgccgctctgaggagttaaaggttaaacactttaagatgagaaaaattgatctctgtctgagctctgaagggtcc

SEQ ID NO: 798889 - DNA, 98 bp, Homo sapiens
tccggccaacttccattgaacttcccagcactcgaaagggaccgaaatggagagcaaaggaagctatgaagcagataacccagctcctaccagaggac

SEQ ID NO: 798890 - DNA, 100 bp, Homo sapiens
acaagattcaggcgatcgacgccaccgactcttgtatcatgagcattggatttgatcacatgggtgtttttggggaaaaaaatcacaatctggacgtgag

SEQ ID NO: 798891 - DNA, 99 bp, Homo sapiens
gactctccctggaaaacttcccttccctttcggaaaagagcactggttgccattggtacccatgatttggacactttgtcgggcccatttacttatact

SEQ ID NO: 798892 - DNA, 100 bp, Homo sapiens
tactgacccttgttttccaacgcgttggctctttctgccgtctgagactgtgtgatgtgctgaagccaagaaggtatgagaatgagctggccctgcgcca

SEQ ID NO: 798893 - DNA, 98 bp, Homo sapiens
ggacacttgtggagagctcgaattccagaatgatgaaattgtcggggccttttccgaagtggttttagctgaagagaaggcaactggcaagctctttg

SEQ ID NO: 798894 - DNA, 98 bp, Homo sapiens
gttcaggaggggagtctgatattgaagaggaagaactgaccagagctgatcccgagcagcgtcatgtacccctgtggtatgggccaagacagagagga

SEQ ID NO: 798895 - DNA, 100 bp, Homo sapiens
aactgtgtattgcatcaggctgagagcagacacgatgtgaagatccattgctcccattgaggcagacaagttctcgaggctggacagtccaagatcaagg

SEQ ID NO: 798896 - DNA, 100 bp, Homo sapiens
agcggaaaatgatccagtcacagaaagcataacccctactgtagaactaaatgcactgtgcatgaaacttggaaaaaaaccaatgtataagcctgttgac

SEQ ID NO: 798897 - DNA, 116 bp, Homo sapiens
attttacgaggaacatttaatgatggcttccaaatagaagtacagataccctcaaaaagttatggataaaatacttagtatggctgaaggcatcaaagtgacagatgctccaacct

SEQ ID NO: 798898 - DNA, 100 bp, Homo sapiens
acaaagaaggtctttcaaaccagctccgtgtacagacagagcctgtttctggaccagtacagagccagccttgttgatgcaataaagagattactccagc

SEQ ID NO: 798899 - DNA, 101 bp, Homo sapiens
agttactccagatgaaaaactgggagagaaagggaaggaaattatgaccaagtacctcaccccaaagcttcagctttagctgcagctgcctctgttcagcc

SEQ ID NO: 798900 - DNA, 100 bp, Homo sapiens
gaggctgctgccaaattgaaaaggatatggagtctggagaacggttaccatcctcagcagcctcctctactacaccaacttcatcttcgacaccttctgt

SEQ ID NO: 798901 - DNA, 99 bp, Homo sapiens
gcttttggtcagggtcttgctactggcatgccagaccggttggagggtgacagatcagaaggctctggtcaagagaatgaaaatgaggatgaggaataa

SEQ ID NO: 798902 - DNA, 99 bp, Homo sapiens
catattggagactacaatatggatggctatccagacgctctggtcatactaaagaacacatctggaaggtccagcagtttaagcaggatccacgcccaa

SEQ ID NO: 798903 - DNA, 100 bp, Homo sapiens
cgtggcgctacccgcctccggctggctgacgacgggcgcccccgagccgccgccgctgtccggagccccacagaaaccagcaaatatcctagtaatggga

SEQ ID NO: 798904 - DNA, 98 bp, Homo sapiens
ctgggtatgatctggaccatcatccttcgctttgctattcaggatatttcggttgaagccaagcaggttgagtatctggtcaatgaaaagcacatcta

SEQ ID NO: 798905 - DNA, 100 bp, Homo sapiens
cggctcggcgggtgcgccccgggggcatgtccgcgcgctaccgccagggctgcagtggtcccggcgaggtgtgtgtctggggaagagacttacagaagtg

SEQ ID NO: 798906 - DNA, 99 bp, Homo sapiens
tccagttgaaaatgtacctattgaacagattccacttgtgaaggaattgaaagatgttggccatcgtgatcagatggctgcagctagaggaatcctgca

SEQ ID NO: 798907 - DNA, 98 bp, Homo sapiens
gagaggaggtggaccagaacttttggaactagtgccggcggctctccaccccccaggtagcagcaattgcagagacagatgaatctgcagaatcagaa

SEQ ID NO: 798908 - DNA, 100 bp, Homo sapiens
caaatatgcaaggagattcttccatcacttgctcagattcaaccctatgaaaagataaaggccaggggcttgcctgataatatatcttccgtgttgaaca

SEQ ID NO: 798909 - DNA, 98 bp, Homo sapiens
caagatcgaggctgtcctctggtgagaaggtggtgaggcttcccgtcatattccaggccaaagaggtgctgaaaaaatatttggagtccaaggaggat

SEQ ID NO: 798910 - DNA, 100 bp, Homo sapiens
gttccggtaactaggctacaggaacagggactgcaaggctggaagtccggtggggaccgtggctgtcaacgcacctcttgctttttcctccaaagtatgt

SEQ ID NO: 798911 - DNA, 100 bp, Homo sapiens
gtggaggtctgcgttgctcttgcttttcctcgctggggtgtacgattggaacgtgggatccagccagtggcctgaatatgacagaaagtcaaaagggaaa

SEQ ID NO: 798912 - DNA, 99 bp, Homo sapiens
ccaacaacagggacagctcccaggagccagtcaaggttgtctgtctgtccatccactcaggacatctgcaggattttcaagaaagacatgtctgacaaa

SEQ ID NO: 798913 - DNA, 100 bp, Homo sapiens
ggggggtgcagatgactctgctgaggagggggacctactggatgatgatgataatgaagatcggggggatgaccagggaatgaaagctactggttgattt

SEQ ID NO: 798914 - DNA, 100 bp, Homo sapiens
actgtatgaagacagcttgctggatcattgtattactcatcacagatcggaacggaggcctgtggtggtgaagaaggtgaagtccatgcagatgttccac

SEQ ID NO: 798915 - DNA, 100 bp, Homo sapiens
cgccctcagccagaagggctacgccagcggcgtcgagaggaccatcctgggtgctggccctgtgctggaggatcagtttgacaacttagaaaaacacaca

SEQ ID NO: 798916 - DNA, 100 bp, Homo sapiens
actgtggggtgctgaatggcaatggcacaaagttctctcgatcagggcatacatctttcttcgacaaagggtgaaaatggcattacggacatcaggacat

SEQ ID NO: 798917 - DNA, 100 bp, Homo sapiens
tgaagaagcttgggctcacttccacaaatggtgttggtgccagaagaaaagaatgattgatgggaaacagacaccgggctatagacactcatccttttgc

SEQ ID NO: 798918 - DNA, 100 bp, Homo sapiens
tagctgccctttccgtttccagggttccgaccaggttccgaggtgcaccgattatacccgtggcggccaagccggggggaccagaggcccccgaaactga

SEQ ID NO: 798919 - DNA, 100 bp, Homo sapiens
tctgcgatacgaccatcaacagagactgactgccaaagaggccatggagcacccatacttctgaggagatgttaaagtaacccatcttgcaggacgacat

SEQ ID NO: 798920 - DNA, 100 bp, Homo sapiens
gaaccaagctgcaagtcctgtggggctcactttgcaaacacggccaggaaggtgaatgaaaactttgccattgatttgatagcagagcagcccgtgagcg

SEQ ID NO: 798921 - DNA, 100 bp, Homo sapiens
ggtacccgagggggcttacgggaacttttttgaggaacactgctatgtcatcctccacaccagcgccaccgcctccgacagtgtcctcgctctacctctg

SEQ ID NO: 798922 - DNA, 100 bp, Homo sapiens
cggagctatcggcgccgcggcaagagccaggtgtaatggataggtaacagagaagacctcgtcccttcctagtcagggcatcagcatgactgagtgcttc

SEQ ID NO: 798923 - DNA, 100 bp, Homo sapiens
cttgtatgcaccatcccataaaaactatggagaagaccagtccaatgtgggtcggaagcagttcatgaggtttgagtgggcaaactacgcagctgaggcc

SEQ ID NO: 798924 - DNA, 100 bp, Homo sapiens
caagagagaaagagtggatttcagcctgcacggatggtcttgaaacacaaatggtttttggctccatctactctttgaagcttctgcccagcttgcattg

SEQ ID NO: 798925 - DNA, 98 bp, Homo sapiens
cactggctgcaggcctcctgctgctcctgtttgtgggatccactagttcctggactatgggaactgatgactcgcccaatgtcacagatgatgcagct

SEQ ID NO: 798926 - DNA, 100 bp, Homo sapiens
ctaacactgtcgcagtttgaaaggcaaacaagcatgcatttaggatccttatgcacgggagatatcaaacggagaagaaaagctgcacctttgcctggac

SEQ ID NO: 798927 - DNA, 98 bp, Homo sapiens
ttgtttcttatatgtgatgccattccagcactggactcatggaggctgagcatttattcaggttgcacgttttcaaaaaatacctaatggtgaaaatg

SEQ ID NO: 798928 - DNA, 100 bp, Homo sapiens
tagctaagactctacgacatccctgaagccgggaaatggttctctacttaaaagacaatgactactgatgaaggtgccaagaacaatgaagaaagcccca

SEQ ID NO: 798929 - DNA, 100 bp, Homo sapiens
gataagaacccagaaacccgacccagtgccgcgcagctgctggaggtctgtgggttctggcaccacctgagcccactgggcatctggtcatccctggcac

SEQ ID NO: 798930 - DNA, 107 bp, Homo sapiens
gccaggcccaggaattcccataccaaccacagagaaggaaggggagttcaccctgcacggccgggccatcctggagatggagcaatacatccgggagacgtaccccg

SEQ ID NO: 798931 - DNA, 100 bp, Homo sapiens
aagttctaggcgtgcagagacatgcctcacccgaggatattaaaaaggctgacttttttgaacgaaccattctgtgcaacagccttgtgtggagttgtgc

SEQ ID NO: 798932 - DNA, 100 bp, Homo sapiens
cgcctccgcccctgtcccgacactcggcctaggaatttcccttatctccttcgcaggtagtgaaaagagaatactgaagaataggatctcaagatgagta

SEQ ID NO: 798933 - DNA, 100 bp, Homo sapiens
aaccaagcaatcatcaagcacctcctcgctccccagtcctggtctcctgccctacacagtccaagcaagtgggccaagagattgcagcaaaggagagggg

SEQ ID NO: 798934 - DNA, 100 bp, Homo sapiens
cctgccccggtgcgcagacagagctattccagcaccagcagaggaaggatctgagtctctccctgcggagacagccctgaagaactcctgtaacgtcaag

SEQ ID NO: 798935 - DNA, 99 bp, Homo sapiens
cgattcagagactgaaaaacctgaggctgatgacccaaaggtctccaggaaacctagagaaaaaccgttatggggatgtaccctgcctggaccaaacta

SEQ ID NO: 798936 - DNA, 100 bp, Homo sapiens
ttcaagaagttgaaaaacgcttttcacgtcacctggagagatgcacaggctccatctactctttgaagcttctgcccagcttgcattgtttctaggagaa

SEQ ID NO: 798937 - DNA, 100 bp, Homo sapiens
gatccgcccacagacctcaaattcaaagagtgaagatagtccaagtcctaagagacagcgcctctctcattcagtctttgattatacatcagcatcacca

SEQ ID NO: 798938 - DNA, 100 bp, Homo sapiens
tcagaggctggaccgcgtcatgctcagaaggctgtgcaagaagaaagacagaggagccgagagcgagctgagagtgaggcagaatgtgctaccagtggtc

SEQ ID NO: 798939 - DNA, 136 bp, Homo sapiens
ccaggacccctggggagagggccccgctgggctggccctgcagggaccatggaatccagagctgagttacatccactaccagcctgcccaggaccggctgcaaccccacctcctggagatgctgattcagctgccg

SEQ ID NO: 798940 - DNA, 100 bp, Homo sapiens
ctttatggaaacttctttgtgaacatcaattcactatcattgtggcagaacttcagaagcaggcttatggctatgggccatacggtggtgcgtacccgcc

SEQ ID NO: 798941 - DNA, 98 bp, Homo sapiens
gagccccggaggcagagcggctgccatgccccagtggacaggaaagctaaggcctcagcgatgccggactccccagcggaggtgaagacgcagccccg

SEQ ID NO: 798942 - DNA, 100 bp, Homo sapiens
gtcatttgcttccctgttctcattcaggaaatctggaaaggagacttcaaagcttccatcactgggacagaaaggaaatgcacagcggtattgatgagta

SEQ ID NO: 798943 - DNA, 100 bp, Homo sapiens
gagccaagaatttacctgtgcggccagatggcaccttgaactcatttgttaagggatgatgcagtttgcttggcagagctataagcgttatgcaatgggg

SEQ ID NO: 798944 - DNA, 98 bp, Homo sapiens
gacccctcctggttcaacgaggcatggctccagggcatctcggaagatccaggtcccaactggaagctgaagatgggcttccccaaggatttattgac

SEQ ID NO: 798945 - DNA, 100 bp, Homo sapiens
atagaggacatacctttggttaaaggagctgccgtcagcaataatgacgatgaggacctgacaccagagcagaaggcagagcgtgagaaggagcggagga

SEQ ID NO: 798946 - DNA, 98 bp, Homo sapiens
agcctgagtttgaagaccagaccttggatttctctgatgtggagcagctgatgggctccattaacaccattccaggacagtatttatgatgaaatgga

SEQ ID NO: 798947 - DNA, 100 bp, Homo sapiens
ctaccatgtccgcccaggcgcagatgcgggccctgctggaccagctcatgggcacggctcgggacggatttctctctgatcaaacggacagttcaggact

SEQ ID NO: 798948 - DNA, 98 bp, Homo sapiens
cgctgtagccgcccaccggtttttctgccacttttgcaagggcgaggtcagccccaaactaccggacttgtcttacaaggaccggcactggcatgaag

SEQ ID NO: 798949 - DNA, 100 bp, Homo sapiens
tgtgtcccaaaaattggtatcaccttcaaggagcacaagtagctgctcttccaagcaaggaagtcgacaggatttggaatgccctgacagataattatgg

SEQ ID NO: 798950 - DNA, 99 bp, Homo sapiens
ggggactctgtgtgagggaaagaaaacaatttctcctgctctgcagcttctgttcagatgtggaagagctgataccagcattggatttactttgctcgg

SEQ ID NO: 798951 - DNA, 98 bp, Homo sapiens
ttcagactacattttcctcacaactgttctttccatgagattacgtactataggtgaacttttagctcctgcagctccttttgacaagaaatgtggtc

SEQ ID NO: 798952 - DNA, 100 bp, Homo sapiens
tgttacttgatgaacttcagaagggtttgtgtttagtgaatcagagggatctgcattagaacagtttgaaggtggcccctgtgctgttattgcacctgtt

SEQ ID NO: 798953 - DNA, 100 bp, Homo sapiens
aaaattctgaactcaggacttggcaagaagatgagaagtttttgtctgaagtttttgcacaattaacagatgaggctacagatgatgataaacggcgtga

SEQ ID NO: 798954 - DNA, 100 bp, Homo sapiens
ttgggacatgaaggtgctggaattgtggaaagtgttggtgagggagttactaagctgaaggcgggtgtcattccacacatccacaaatctctgattggga

SEQ ID NO: 798955 - DNA, 100 bp, Homo sapiens
tcagaagcaccactggaaactcagatacaaggcagatccaaccatccccaccgtggtcctacgatcagtcctaccaatacctgggatccattgcctctcc

SEQ ID NO: 798956 - DNA, 100 bp, Homo sapiens
actgaacaggaagaagtcttcaatacagcagtagcgccactcataaaaggtgtatttaaagaggacctgactggaacactgaattgtataatgaacggag

SEQ ID NO: 798957 - DNA, 100 bp, Homo sapiens
ggaagagatagagcttcgcggagacggcggaagcggagagcaacagcgcgccgaatgaccgaagaagcatgccgaacacggagtcagaaacgagcgcttg

SEQ ID NO: 798958 - DNA, 98 bp, Homo sapiens
agccggccccggctcatcgaatgcagctacgccaaagccaagaggatgaagcttcactggcagttctctcagggggcagctggcattttatgctatgt

SEQ ID NO: 798959 - DNA, 98 bp, Homo sapiens
gacataccagagattgattgcttcttattgtaatgtaggagatattgaaggtgccaggctctgttgcaagagggggtccctctgccacgcttcccagg

SEQ ID NO: 798960 - DNA, 100 bp, Homo sapiens
tggagaggaggccgtgacccttctagaagacttggagcttgatttatcaggacaacaggcagttggccagacagcaggctgataaaaaaaaagaagagca

SEQ ID NO: 798961 - DNA, 99 bp, Homo sapiens
aacaatcatgggaatttccaaggggattcaaacttcaacagaatgtggcaaccaggatcactactcttggaatcaaagataaatccaaatactgcatat

SEQ ID NO: 798962 - DNA, 100 bp, Homo sapiens
aagggctggaaacttcgctatcatggagatcatatgagggaaggcaccattggagatatggctatcctgggtataacagaaagttttcaagtgaagcgac

SEQ ID NO: 798963 - DNA, 98 bp, Homo sapiens
actccaagatacaccccttagaaaatggagaggaagatgatgttgatgttaggcctgcaagaaaaagcgaggctccatttactcacaaagtgaatatg

SEQ ID NO: 798964 - DNA, 100 bp, Homo sapiens
catccaggttatggattcctttcagaaaacaaagaatttgccagatgtttgcaaaaatattttgattctggggattacaacatggctaaagcaaaaatga

SEQ ID NO: 798965 - DNA, 151 bp, Homo sapiens
agcgacccaccagctcccagtgacaaaagcgttaagattgaggaacgggaaggcatcactgtctattccatgcacttctggatccagctgtgtgatagccgcactaggaaatacctggagtcacagtgtgaatacccggctgatcctccag

SEQ ID NO: 798966 - DNA, 100 bp, Homo sapiens
aagacatcaactcactgaagtaggttgctggtggtaggaatgttccacccgcagtacagaaagtatcacaggcttccattgaccagagcaggcagatgaa

SEQ ID NO: 798967 - DNA, 99 bp, Homo sapiens
ttaaagacaactcctacacaaccatctgaacaaaaagctgctttccccccacctgaacagaaaactgcatttgacaagccagagactgctgctactttg

SEQ ID NO: 798968 - DNA, 100 bp, Homo sapiens
acatggttgacgttgcaaaggcgcttaatcggcctccaacgtacatctgtgcaggttccatcaccagcaaatggcgtgattgaagctcttttggtacctg

SEQ ID NO: 798969 - DNA, 98 bp, Homo sapiens
gggttgctgacccagaggagagttctccaaacatgatcgtttactgcaaagtgcaatggatgagcttcatagtctggatccaagaaggcaagagttat

SEQ ID NO: 798970 - DNA, 98 bp, Homo sapiens
caccactgtttctcatcatcaccaaacgccatgaagctcatgactgctctggtgaatgttgccttaaacctcagtattcatcaggataatacccagag

SEQ ID NO: 798971 - DNA, 100 bp, Homo sapiens
caagaagggcgctatttgtacttctaaatactccagtccttttccatgcactggaggagagtacaaacctccagggaacctggctggctagaagggactc

SEQ ID NO: 798972 - DNA, 98 bp, Homo sapiens
accgggaaagtacaggattgagagcaactatggcgtacacacactggagatcaacagaaacacaagttcctgagaagaaaaaaggaatcttcaggaga

SEQ ID NO: 798973 - DNA, 100 bp, Homo sapiens
gaagtttgcacagtccccagcagctggcagaagaagcaacacgcaaacgagagctgaggctaatgaaaaacaggtcctaggcctacttacaagcctccag

SEQ ID NO: 798974 - DNA, 100 bp, Homo sapiens
agctcatctggaattttgccgatttcatgactaaccagtgtgaaaccagcccagagaagttacgggatttgcccccggggctcctgcccagcaagccagc

SEQ ID NO: 798975 - DNA, 101 bp, Homo sapiens
ggccgggggctcagagatccaagtgcgcgccctggcgggtccggaccaagacaggtgatttggcttctgcacagttaggaggagcaccaaaccgatgggag

SEQ ID NO: 798976 - DNA, 100 bp, Homo sapiens
cctatctctgcctcctgcgtagcatccggaaacatgtggccctacatcaggaatttcatggcaagggactggcattgcggactgacctccagggagaggc

SEQ ID NO: 798977 - DNA, 101 bp, Homo sapiens
aaagcccagaagaatgtggctaccagcgaaggcaattcgaagttttcaagtagcccttcacatctatccaatgaaccctgaaatatggaaagaagacctct

SEQ ID NO: 798978 - DNA, 100 bp, Homo sapiens
tggataatgacgacagcaacccgaagacagggaaatttaggtgacctaccagttgaagattccgtgtactgctttatgcactgttttaatgttaaaccgg

SEQ ID NO: 798979 - DNA, 98 bp, Homo sapiens
cgggcggcctgccccgccggagcagcatcatcaagtttcaccgcaaatgtgaattatcaacgttgtgtgacggtggggaactcagagaccacatctta

SEQ ID NO: 798980 - DNA, 98 bp, Homo sapiens
acgccagagcccaggtgcccagaggactttcttccagcttctgctgtccttctttgtggagagcaagatcaatgagctgagcaatgttcctgttcctg

SEQ ID NO: 798981 - DNA, 100 bp, Homo sapiens
aggatgatatatgaagattacatttctatactatcaccaaaagaggttgtaaagaagaaagttctaccctttctgtcaaaatgaagtgtgattttaattg

SEQ ID NO: 798982 - DNA, 99 bp, Homo sapiens
ggaaggcgcgagtgaggaaaggaggtactgtagtgtgacaaacagtggcaaaacaacactggctaagaatttgcagaaacacctcccaaattgcagtgt

SEQ ID NO: 798983 - DNA, 99 bp, Homo sapiens
acagattacgccccctatcctatccgcaaacagtaacacaagtggcaagacagccgggaacccctaccccatccccttattcagcacatgaaataaaca

SEQ ID NO: 798984 - DNA, 155 bp, Homo sapiens
accgacacatggacataactgaagacctgaccaataaggctcggggcagtaacaaatcctttctggcggcagctaatgacatgacaatggatgaagtccgagaatttgaacgagccactcaggaagccaccaacaagaaaatcggcattttccca

SEQ ID NO: 798985 - DNA, 100 bp, Homo sapiens
gcatacaccgagagagtgaggagccagacgacaagcacacactatggcgctgaaacggattaataagcatttgacattgtgcagcaaagaaatggttatg

SEQ ID NO: 798986 - DNA, 98 bp, Homo sapiens
agccaccagttcaggagcacttgggagtgatctagcttccatgcctatggctgttctaaaattgggccaaatatatccatttcagagaggctttttct

SEQ ID NO: 798987 - DNA, 98 bp, Homo sapiens
ttccatctggggatggacaacctgcattggacccagctattgctgcagcatttgccaaggagacatccctcttaggttggactccatgaaagaattgc

SEQ ID NO: 798988 - DNA, 99 bp, Homo sapiens
gggaactgtcgtatgcctactacagcaacattgccaccaagacaccccttgaccagcacacactgcaaggagatcaggccacaattgctgccagtcggc

SEQ ID NO: 798989 - DNA, 99 bp, Homo sapiens
gctctcagttgcacttctcaaaggtgagatttgtggatttaaaattcacgggcagaatgtcccctttgatgcagtggtagtggataaatccactggtga

SEQ ID NO: 798990 - DNA, 100 bp, Homo sapiens
ttgtgaacatcaattcactatcattgtggcagaacttcagaagtgacgttcaagtgtttctcacggatggaattctagtcagctgcaggcgggaagccag

SEQ ID NO: 798991 - DNA, 99 bp, Homo sapiens
agtacgataccgaagcgggctgtgtgccccttctccacccagaggtggtccgtactgagaagaacagtttgaacaaccgattcttaccctggaatgaaa

SEQ ID NO: 798992 - DNA, 98 bp, Homo sapiens
cagcagttgcaccctgttttgcaaaaaccatcagtgtttgggaatgattctgatgatgatgatgagggttatgataattcagagagcagtgttcggaa

SEQ ID NO: 798993 - DNA, 100 bp, Homo sapiens
gtaaaacatgaacggaagagtggattatttggtcactgaggaagagatcaatcttaccagagggccctcaggtacctactgtcaacaacgggaagtggag

SEQ ID NO: 798994 - DNA, 100 bp, Homo sapiens
ctcccggccaaacatcttcatcctgaacaaccgctgggatgcatctgcctcagagcccgagtacatggaggagcaggttcaggagaagtggcacctggtg

SEQ ID NO: 798995 - DNA, 99 bp, Homo sapiens
tggcagctgctctgaaccaggacctggacccggacccaaagtgccatgtctttaatggtgcagtactagccgctgtgtcaagtcacaaattcaactcat

SEQ ID NO: 798996 - DNA, 100 bp, Homo sapiens
tggaaaccacatgtgtaccttgtttgcaacagtatggaaacagccatggagtgattttgctgttctgaatgggggaaagattaatagtgacatttggaag

SEQ ID NO: 798997 - DNA, 98 bp, Homo sapiens
ggagcaggagaggacgggactgccaagagacatgttagaaggacaagatccatgttctcacaagctatgaagaaatgggtgcaaggaaatactgatga

SEQ ID NO: 798998 - DNA, 100 bp, Homo sapiens
tcccaatgccgaactgggaggcccctttgaccagatgaacggagtggccggagaactgatagtgcatcagctgacccaggtaatttaaaatattcttcat

SEQ ID NO: 798999 - DNA, 100 bp, Homo sapiens
gcctctgcgggtctattatgtgcaagaagtgtatggagctcatcagccttcccttggcaagttaatagcaatgaacttacaaatggggtaataaatgctg

SEQ ID NO: 799000 - DNA, 99 bp, Homo sapiens
aaacacagcaatggatgcacaggaagctttagctagaaggtacgacaacaattccacgatgccaaattcatggcagacattgatctggatccaggctgt

SEQ ID NO: 799001 - DNA, 100 bp, Homo sapiens
tcctcctgctgctactgtgtccagcgcagatttgcctgaagacctggataatctccatttttgtcatggactgttaaaacgtttgaagttccaattctgg

SEQ ID NO: 799002 - DNA, 99 bp, Homo sapiens
gttggttggctggttactgggaaaagatatcctggaaatgtttactattagtgtaagttttgattacgaagatgcaggctaccagactgcagaacttgt

SEQ ID NO: 799003 - DNA, 100 bp, Homo sapiens
agtgccttctctaaaacagatgaaaacaacttcaaaatgtttgccgtcttttgtgctttagccttacactgtgctaatgccaagatgctgaattatcagg

SEQ ID NO: 799004 - DNA, 98 bp, Homo sapiens
ttctatcttcccatcataaaaaagtaaaacttccttttcctgtagatcaaatcacagatcttccaaggaacgatttccagatgatgattaaaatgcac

SEQ ID NO: 799005 - DNA, 98 bp, Homo sapiens
ttaaactcctgctctgtttactgtggattggatattctcaaggaaccacacatgtattaagatttgaccccagaggaactggaggatgtttctgacct

SEQ ID NO: 799006 - DNA, 100 bp, Homo sapiens
ccaggccgctccatgagtgctagcagtggcttgtcagcaatgccggtggtggtgtgcacattgagccccggtatagacagttcccccagctgaccagatc

SEQ ID NO: 799007 - DNA, 127 bp, Homo sapiens
cggtgtagctgccgtggttgccaggagagctgcgccggcgagaagcggccgagccagcagcaggattatagctggacagacatccgctgcccctttgaaaaacgaagagatgcagcatgcgtgtttt

SEQ ID NO: 799008 - DNA, 100 bp, Homo sapiens
ggagagtgtggcagctgcccttagccctctggttgccgaacaagcaaccggaaaagcttaataggcaatgggcagtcaccagcattgcctcgaccacact

SEQ ID NO: 799009 - DNA, 100 bp, Homo sapiens
gtgttttagaaacttttgccagcacattcttacgacagggagcccagaagatacatatgaaccagatggttacaacccagaagctcctagtattactagt

SEQ ID NO: 799010 - DNA, 101 bp, Homo sapiens
cttagagccaggcaccatggacagcgtgcggtctgggccttttgggcagcttttccggcctgacaacttcatctttggtacaagggatttaaaggcaactg

SEQ ID NO: 799011 - DNA, 100 bp, Homo sapiens
tctgaagaagcagcgtaccaagaaaaataaagaagaggctgcagaatatgctaaacttttggccaagagaatgaagctgcccccagggagctctgctgcc

SEQ ID NO: 799012 - DNA, 98 bp, Homo sapiens
gtatggcttagtggttcctggatgttcctggatgcctgacatcacattgatacatgctggaggtctggctcagggcttccgagtggacctgccaatca

SEQ ID NO: 799013 - DNA, 100 bp, Homo sapiens
gaaggggaaccagcaactcaacgtcaggatcctgcagctgctcaggagggagaggatgagggagcatctgcaggtcaagagaatagtgacagtggtacag

SEQ ID NO: 799014 - DNA, 98 bp, Homo sapiens
gggcctcagcagacttgcatatatttgactgcaaggtgaggacgcttgagcggaagttagaagcaaaaatgatcaaggaggaaagcgactaccacgac

SEQ ID NO: 799015 - DNA, 100 bp, Homo sapiens
aaccctcctcctgaggcaccacgtctctaccgagcacaaactccacgaagccaacgcccaggtattttggcctctccccagtctgctcctggaaacttgg

SEQ ID NO: 799016 - DNA, 100 bp, Homo sapiens
accgtcaaatcctccctgtcctgaacatctttaagaatatgaatgtaccttctccaggcaaattccgttcccctgcagcaccatctcctttggctcttcg

SEQ ID NO: 799017 - DNA, 101 bp, Homo sapiens
tcttccagtttgctcatcacttagaactttggcgactgggatccacagttgcaacagtttgcattgagactccttgcattccgccagatacacaaagttct

SEQ ID NO: 799018 - DNA, 100 bp, Homo sapiens
catgcccaacatggtcttcattggaggtatcaactgtaagaagaggaaagacttgtctcaggtatgacagcagttatctgtacttaccctcttgacatgg

SEQ ID NO: 799019 - DNA, 100 bp, Homo sapiens
agttatggcagagttagctaaagaactccctcaagtttcatttgtgaagaatctacctgttactcgtattttggacaatcttatggagatgaagtcaaac

SEQ ID NO: 799020 - DNA, 100 bp, Homo sapiens
aaagaaagcatactgcgagccctgctacattggccgccttcaacaacaacgtgagcgtggcctacgagtgcctgagcgccggcgggcgcaggaagaggcc

SEQ ID NO: 799021 - DNA, 99 bp, Homo sapiens
tttgatactgacctgtaaatcatcctttagaatttgaaagacatattggctgacctgatacctaaggagcaggccagaattaagactttcaggcagcaa

SEQ ID NO: 799022 - DNA, 99 bp, Homo sapiens
aggacctgaggcaagacgagcacaccaggagagagctggccaagatgaagcagcgtggtgatggtggatgaggcacacgaaaggaccctacacacagac

SEQ ID NO: 799023 - DNA, 100 bp, Homo sapiens
gctttccctctcgcgtctctggctgcaggatgcagcccatgagactgttcccattatgctggtaggaaacaaggctgacattcgtgacactgctgctaca

SEQ ID NO: 799024 - DNA, 100 bp, Homo sapiens
gcatgagtggcaggcccttcagccaggtacaagggatttaaaggcaactgttccatgaccttcattgatcagtttaaagcactacaccagtgtaacaagt

SEQ ID NO: 799025 - DNA, 98 bp, Homo sapiens
ggagatgcctgacgcatctgtctgaggagcggtcagtgacgcgatggagcgggcaagacaaatttacatgtattggagaccagaccagaagcccttct

SEQ ID NO: 799026 - DNA, 100 bp, Homo sapiens
ttgagggcattggaggggatggattttttaccatgaaatatgaggtttttcgttggaatatacgttgcacatttatggcgattctgagtgtgagggcaga

SEQ ID NO: 799027 - DNA, 100 bp, Homo sapiens
gtgaatgcacattgtgttctgcaaaaaacaaaaaggatagcctccggcattccagggctgttgataatcaggtgtatgtggccacagcctctcctgcccg

SEQ ID NO: 799028 - DNA, 98 bp, Homo sapiens
ttacagatggacctgtacgcgctgctaggcattgaggagaaggcagcggacaaagaggtgtccggctttgctggcccagcaagcctgataagcatgaa

SEQ ID NO: 799029 - DNA, 100 bp, Homo sapiens
gcctgataatcgattgcattggcaatgagacagctgggaatggaggaagaagatgtgattgaagtttatcaggaacaaacggggggtcattcaacagttt

SEQ ID NO: 799030 - DNA, 100 bp, Homo sapiens
ctaatttctcttgctcctcctgttcttactcttcatttaaagagatttcagcaggtcccaatattgaagcccatggatcttatggtagaagcgagtccac

SEQ ID NO: 799031 - DNA, 99 bp, Homo sapiens
gcgggggtggaggacatcgacatccaggcgaactcggcctatcgctaccctccgaagtccgcggctatgtgactacgtttgtgacctcctcttagaaga

SEQ ID NO: 799032 - DNA, 98 bp, Homo sapiens
gatggtcagctaggactcatgactactgaggattctgtggcagtgcccaggattccagctttccctcctggccagaaatgttcagcctggactcattc

SEQ ID NO: 799033 - DNA, 99 bp, Homo sapiens
aacattcaacgaccaaccagcctccccctgaagattctgccgctgattgctatcacttctgcagaatccagtgggacaaatatcagtggatgggttcat

SEQ ID NO: 799034 - DNA, 100 bp, Homo sapiens
cacaccggagacttttggggggaaactaggtcgatggtcggcggcgcccggatgggcagctgagggctgaaaacacagttaaatcactttcaaagttaaa

SEQ ID NO: 799035 - DNA, 100 bp, Homo sapiens
ttcctgaaatacatccaggaaagacatggagattctcttaaaaagatgcgtctgttactagagtggagagtctaccttcgtctcacatgtgccacaaagg

SEQ ID NO: 799036 - DNA, 99 bp, Homo sapiens
tataattaatgcaataaaacgcttccatctttatccagaggttcaaaccttgtactactcagctgatcacaagctgcttgatgggaacctactagatgg

SEQ ID NO: 799037 - DNA, 100 bp, Homo sapiens
gccataacctgatctctctgttggaggtcctctcaggcatcaaactggcaggactgcaacaccagccttgtgcgggcctgctggaatgagctcttcaccc

SEQ ID NO: 799038 - DNA, 100 bp, Homo sapiens
acagtaatttcaacagaagagtgagagatggaacccgaagaagaaaggattcgttacagccagagattgtatgaaaacaaagttgcagtacgtgacagag

SEQ ID NO: 799039 - DNA, 99 bp, Homo sapiens
tggaaatggcatccagtgcacagatgttgatgagggtaacaagaaggggcccttaggccgttgggactttgatacccaggaagaatacagcgagtatat

SEQ ID NO: 799040 - DNA, 100 bp, Homo sapiens
tcataagaacccacacaatggacaagtggtgctggaggtggtgagagccaactatgacacgctcacgctgaagctgcaggatggcctggaccagtatgag

SEQ ID NO: 799041 - DNA, 99 bp, Homo sapiens
cgttgctgcagctcgttcctcacctgcatgagagaagaatgaagagattcagagtggacgatttccaaagactcatgttacgtgaggaagccaccaaga

SEQ ID NO: 799042 - DNA, 98 bp, Homo sapiens
caagagactcttccaaggcactaccaatatgttatctccagatgccgcgcaactgtctgatctcagttcatggtcctcagaatggttggaatgaccct

SEQ ID NO: 799043 - DNA, 100 bp, Homo sapiens
ggttcttcatcgtgctattcctggtctacatcctgcgggtgcctttgaaaatcaacgacaacttgagcacagatcgaaagctgctttgcgtcgcagttgg

SEQ ID NO: 799044 - DNA, 100 bp, Homo sapiens
ggcttctcaagctggctgttctggatgggggcagcaggataccgcctggcacccacttagccaaacagctgtccctttccccccaacacatcgcttgaca

SEQ ID NO: 799045 - DNA, 100 bp, Homo sapiens
gacctttgagcatacaccgagagagtgaggagccagacgacaagcacacactatggcgctgaaacggattaataagaggacaagaattttgggcagattt

SEQ ID NO: 799046 - DNA, 98 bp, Homo sapiens
ataaagagaagaagtttaattgtctcagagttcttcaggctgtacaggaaatgtggtgccggcatctgcttctggaaagaccacagcaagattctttc

SEQ ID NO: 799047 - DNA, 98 bp, Homo sapiens
tgaaattagccgactggatggcaactctgccggagagcatgcacagcatccccctcaccaatttagccattccaggtgtacaagggagaagaagccac

SEQ ID NO: 799048 - DNA, 100 bp, Homo sapiens
gtctacaaagaacatttccaagatgatgtctttaatgaaaagggatggaactacattcttgaggttacacacttattccatcagctaaatctgacaactt

SEQ ID NO: 799049 - DNA, 100 bp, Homo sapiens
acttggtgaattttattcaagcaaattttaagaaacgagaatgtgtcttctttaccaaagattccaaggccacagttgtggaaagtaaaaatgtagccct

SEQ ID NO: 799050 - DNA, 98 bp, Homo sapiens
atatggaaatgtcgggggcctcatcagaaatgttacacacggagtatcaaactctgctgccaaggttggtacaggtcttgggcctacactggagtttt

SEQ ID NO: 799051 - DNA, 98 bp, Homo sapiens
gtgagcccagccgaggtaccgctgaagaggaatcaattttggaaaatatatgcagatgatgaacattcttaagccaattgcctttgatgttattcatt

SEQ ID NO: 799052 - DNA, 98 bp, Homo sapiens
ggcgcagccccaaagcgagcgaagctagggtcgccgccactgccgcaggaggcgtgagaaaatgatgcatcctgttgccagcagtaatccagctttct

SEQ ID NO: 799053 - DNA, 98 bp, Homo sapiens
tcgaccacactcacctctctctgctcatgcagcatatcgcacggatgactgccatccctgggttttgccagtagtgaagaaagtggagcagaagattg

SEQ ID NO: 799054 - DNA, 100 bp, Homo sapiens
ctgtggttcaactggatttctagatagaagctggattcatgtgatgccagaggtctttttggttcatcacgggtgcaatatgttgtagatcatgcaatga

SEQ ID NO: 799055 - DNA, 100 bp, Homo sapiens
ctgcccttgcaacaacatgaaacagcatctcagacttctttcccagatgtttataatgagggcacacagggtgatcagcccatgacctaaacctccagac

SEQ ID NO: 799056 - DNA, 100 bp, Homo sapiens
aaaggaagaagagtccaccttgcgaccgtatccgctagcgcggcctgggatgcgcttgggctccctggtgccttggcatctcccaatggggtggctttgc

SEQ ID NO: 799057 - DNA, 100 bp, Homo sapiens
gacaacagaagactggactgaagatgcgcatattaaatttcctattgactacccctattcaccacctaccttcagattcttgaccaaaatgtggcacccc

SEQ ID NO: 799058 - DNA, 99 bp, Homo sapiens
tcatggctgggatcttgcccttcggcgccatgttcatcgagctcttcttcatcttcagtgagctggctgctgaatgtaagagtgcaggctaccccggga

SEQ ID NO: 799059 - DNA, 98 bp, Homo sapiens
catcgctaatgccactgttcttttggattatcacctgaactatttaaagtcaggtcaattcagtgaagatatgatacccacagtgggcttcaacatga

SEQ ID NO: 799060 - DNA, 100 bp, Homo sapiens
actacaattgtattggcagctagagaggacatggatttgattgacatactttggaggcaagatatagatcttggagtaagtcgagaagtatttgacttca

SEQ ID NO: 799061 - DNA, 100 bp, Homo sapiens
gggagttcaagaagaacactccagaggactttgccattgatattattaaaagcactcatgaccattggaaagcattagtgactaagaaaacgaatggaaa

SEQ ID NO: 799062 - DNA, 50 bp, Homo sapiens
cttggatgacagtcaccgacagaaggccctgcctggcctcctgcatgccc

SEQ ID NO: 799063 - DNA, 100 bp, Homo sapiens
actctgtattcagatcttcatgtgtctcttctaagctgaataaagctgttttggaactgtcaggtacctcaaagcacgccatcgtagtagaagcagggag

SEQ ID NO: 799064 - DNA, 100 bp, Homo sapiens
tcgggaactcctgcttctccttgcctcgaaatggaccccaactgctcctgctcgcctgacctgtcgcgaaatcgcctttcagaaattcctatagaagcat

SEQ ID NO: 799065 - DNA, 100 bp, Homo sapiens
tgcaacatggctagagactgccgggactggtcagatgaacccatcaaagagtgcgacttcccaagtaagaagcggaagaggagccgctggaaccaagaca

SEQ ID NO: 799066 - DNA, 100 bp, Homo sapiens
ccgcagatgttgtcaaggtggcctaccaggaggccaggggtgtcgccatggccaagaataaggagacgggtgctttggctgcggccaaagtcattgaaac

SEQ ID NO: 799067 - DNA, 100 bp, Homo sapiens
ctgacctcgcccacgcccagcagcagcagcaacagtttccaacatggctagatccatcagaaactgaagccgtggagaacgctctcggggcctttgccac

SEQ ID NO: 799068 - DNA, 51 bp, Homo sapiens
gcatttggtaatttagcagaacttggctgctctttggcgtaaattgcaatc

SEQ ID NO: 799069 - DNA, 100 bp, Homo sapiens
ggaggggccgcgccgccaccgtctgaactaggatgtcccgacatgaagattgaggagatctttaagaaagctggccaccccttcatgtggaaccagcacc

SEQ ID NO: 799070 - DNA, 100 bp, Homo sapiens
ctccaggagttcgtctcttacgtctgcggaagtgcagctgcctcagttcttagcgcaggtgacggccacccacggactctgtcacttgctgggattcaca

SEQ ID NO: 799071 - DNA, 100 bp, Homo sapiens
gtgtcctctctcaccctgctcatgctggtcatcatctacgtgtccgtgtggagagtctcactctgtccttcaggctgtgagtgcagtctcctgatcttgg

SEQ ID NO: 799072 - DNA, 140 bp, Homo sapiens
aacaggaagtccaccagctacaagaaaagttagcaatgatggaaagtggggtgagagactatagcaagcaggacccctatggtgtagccgtgggtggaactgtggggcactgcctgtgcacgggattggcagtaattgga

SEQ ID NO: 799073 - DNA, 98 bp, Homo sapiens
tccctgtatgcatggtgtggggttggtgtgattagcttcgcagtctggaaagctttaggagttcacagtgatgaagatttgataaagtggaaggcact

SEQ ID NO: 799074 - DNA, 100 bp, Homo sapiens
cggcacctggcctccagctttcggccaaacgtaccaagaaagtcgggatcgtcggtaaatacgggacccgctatggggcctccctccggaaaatggtgaa

SEQ ID NO: 799075 - DNA, 100 bp, Homo sapiens
cagaggtggaggggaggattttgaggacacttgtggagagctcgaattccagaatgatgaaattgtagattcagttgtggaaattctttttgaacaagat

SEQ ID NO: 799076 - DNA, 100 bp, Homo sapiens
agggtgattctgaagagggtctggaggagccttctcaagaacagagtgtgtcccggcatggatatccggaacaacctcactaggttgcatgagctggaga

SEQ ID NO: 799077 - DNA, 98 bp, Homo sapiens
ttttttggagcttccatcctggttcttccaaagtgcccggacccaaaacaggaagtaatatatgctttaaacactaaaaatgatgagcatgaatctgc

SEQ ID NO: 799078 - DNA, 99 bp, Homo sapiens
gggtgacgggttaagattcggagagagaggtgctagtggctggacttgacctggaaagcggttaagaagattgtctaccaaatatagaacagaaaagat

SEQ ID NO: 799079 - DNA, 98 bp, Homo sapiens
gcagagcagccacgatgatgattctagcaggttcctgagtcctcgagcgcgggaagaaagacgcaagatggctgtcctctctaaggaatatggttttg

SEQ ID NO: 799080 - DNA, 100 bp, Homo sapiens
aacagagattcgggttctgccgcttatcttcaggagcgaagagctgcttctgtatcttaagctctttcaccatgcctggatcacttcctttgaatgcaga

SEQ ID NO: 799081 - DNA, 100 bp, Homo sapiens
aagaggatgatgtttttggtgaaggccccttcacagatgtagtcactacaaatcttaaattgcgaaatccatcggatagaaaagtgtgtttcaaagtgaa

SEQ ID NO: 799082 - DNA, 98 bp, Homo sapiens
ctaaaacattttaccaattttgcattgtttgtttgaaattgcattgacgactggtgacaatccttacccttccaaggaggacacccctaccagcagtc

SEQ ID NO: 799083 - DNA, 98 bp, Homo sapiens
ggactgccccggcaactccagggtgtctggtccacgacctatcctaggcgccatggagtcttttagtcctgctatacagctgcaccttgtacatcaag

SEQ ID NO: 799084 - DNA, 100 bp, Homo sapiens
ttcgtggttcacccgctgccgggcaccgaggaccagctcaatgacagtttctgatgaagaattgaaaagaagagtagctgaggagctggcattggagcaa

SEQ ID NO: 799085 - DNA, 98 bp, Homo sapiens
aacgttatattttgtcttctgtgtggattcttcagaaagtgaacttggcattttagatctaattcaaggcagcccaatggatccaatggtgatgaaga

SEQ ID NO: 799086 - DNA, 98 bp, Homo sapiens
cttgtagtgagatttctgaccaaacggttcatctgggaatatgatcccaccctcggcctccgacatccaggcaaggacagtagtacttacctggtcac

SEQ ID NO: 799087 - DNA, 98 bp, Homo sapiens
ctataaatgcggtggcatcgacaaaagaaccattgaaaaatttgagaaggaggctgctgagagtacaggggctcaggtccaggtggcaggggatatgc

SEQ ID NO: 799088 - DNA, 98 bp, Homo sapiens
tttacatcatacttggacatatcaagcattggtgcacgatgtactggttgaatgcctttgagaacttgatgcataaaatttgcatgactcctcactcc

SEQ ID NO: 799089 - DNA, 100 bp, Homo sapiens
ggcgccctgcaccgcgcctcgcaaactgcctgtggaggaaccgattgtgtccacagatgaggtcatcttcccactcaccgtttcactggatagactgccc

SEQ ID NO: 799090 - DNA, 98 bp, Homo sapiens
atcatcctaaggacgcagctgtctgtgagggtccatgcctgcatcgggtctccaactgaattccttgaagagaaaatggcctaccaggaatacccaaa

SEQ ID NO: 799091 - DNA, 100 bp, Homo sapiens
actggaagggctacagcagctgctgcagcacctgaactcctggggggaccgtcagtcttcctcttccccccaaaacccaaggacaccctcatgatctccc

SEQ ID NO: 799092 - DNA, 98 bp, Homo sapiens
ctcttcaggatctgctttcagagtacatgaacaacaccttttcaagcaagtggcaagttcaacaggattttgtgaccagcgcaggctgggcctccttc

SEQ ID NO: 799093 - DNA, 98 bp, Homo sapiens
caccgcttcgagtctattgccattgcccaagaacgtttattgaagatgaccttagaagagagacgcaaagaatacctaagagactatattcccctgaa

SEQ ID NO: 799094 - DNA, 100 bp, Homo sapiens
ggaagaaaaaagacgaggaggacaggggcggggggcgggaggcttgccaccttcagcccccccgcgaacgcccaagtttgcagttaacatgtttcgaaca

SEQ ID NO: 799095 - DNA, 98 bp, Homo sapiens
ggagcgcttcgtggctggctccctggctggtgccacagcccaaaccatcatttaccctatggagtccctcctggtgcatcacagtcgccaagccgtgg

SEQ ID NO: 799096 - DNA, 100 bp, Homo sapiens
gctggtgaccatcagcctttgtagttactctgctgcagcaaaaaattattcctgatcaggaccaactgatggcaatagcactagagtgcatctatacctg

SEQ ID NO: 799097 - DNA, 100 bp, Homo sapiens
tgagtggcatataaccaaaggcggaaatattggggctaagtggaggtccagattcccactatggcacaaaaggattgaagaaagtagtgcatgagacacc

SEQ ID NO: 799098 - DNA, 99 bp, Homo sapiens
acagggcctggtccgtgtccggtcccccaaatctgtcgtccctgcccccagggtggaaatggtgtattcattgttgtcaatgcttggtactcatgataa

SEQ ID NO: 799099 - DNA, 99 bp, Homo sapiens
ttcgaagcaagggctgggtgcccaaagtgggactcaagtacgggacagatttacgtcacgagaagagaatgccttctagatgcaaaatcacctccaaac

SEQ ID NO: 799100 - DNA, 100 bp, Homo sapiens
agcttcgagggccgggagctcctggtcatcgagctgtccgacaaccctggcgtccatgagcctggtcaaaatgcagatcttcgtgaaaacccttaccggc

SEQ ID NO: 799101 - DNA, 100 bp, Homo sapiens
attattactgggttcctatactgagttgaagtattgataacaccaaggaactctatcacaatttgaaaagataagcaaaagtttgatttccagacactac

SEQ ID NO: 799102 - DNA, 98 bp, Homo sapiens
gcttgagggggactggcctggcgtgcactccgcacctcggggacattattgcgcgtggaacggctgcttttggaaggagaacgtatttaccgggcagt

SEQ ID NO: 799103 - DNA, 100 bp, Homo sapiens
tgtattcattgggaatctcaacactcttgtggtcaagaaatctgatgtggaggcaatcttttcgaagaacattaatcctgatgttctttttgaagtacac

SEQ ID NO: 799104 - DNA, 129 bp, Homo sapiens
gggattcgtggtgaaggtccggggcttgccctggtcttgctcggccgatgaagtgcagaggtttttttctggagttattcctgatgaagctaaagctttgtctctgttggcaccagctaatgcagtggc

SEQ ID NO: 799105 - DNA, 100 bp, Homo sapiens
attcagtggtgtttttctcaggtgaaaggagcagtagatgatgatgtagcagaaggttgttagcgacatgagtacagggtctggatcttacccattcaag

SEQ ID NO: 799106 - DNA, 100 bp, Homo sapiens
ctccataaactattggattcataacctgctccatgcttgaaaacatggggattggaattcggctgaagtttctctttggctcatcagccacccaggcctt

SEQ ID NO: 799107 - DNA, 98 bp, Homo sapiens
tggggaggacatgagaaatgcctcacaggagacagtggccaccatcctcaagcaattctgtggtgttcttggtcacacatttatggagtttctgaagg

SEQ ID NO: 799108 - DNA, 100 bp, Homo sapiens
ctcatcgctcgcatcgctgccgccaacggggagtccaaaactacttacctggaagaccttccaccaccccctgagtatgaattggccccgtccaagttag

SEQ ID NO: 799109 - DNA, 55 bp, Homo sapiens
tgccccgccccgctccacccgtgagggtgtgactgcacagaaaagttacaaaaca

SEQ ID NO: 799110 - DNA, 99 bp, Homo sapiens
ggaagggcgagactggagcagagccgctgggcgccggagccgaggcgagcgccgcgcgcaccactgaggaatttcagattgtcttaagtggaagaggat

SEQ ID NO: 799111 - DNA, 100 bp, Homo sapiens
gaccagcgagcagatgcggacgcttttttccttcctaggagaaatcgaggagctgcggctctaccccccggaagaacatacatatttaccttcctactca

SEQ ID NO: 799112 - DNA, 100 bp, Homo sapiens
tcatcagaaaaatgactgaagaatttgatgaggtctattacaatggctaccatggagacacctctgaaacatttttggtgggcaatgtggacgaatgtgg

SEQ ID NO: 799113 - DNA, 98 bp, Homo sapiens
gagagcaatacccagaggtaaaagctgcagacttcgctaggcagaaggccctggccaacgtcaacattgggagcctcatctgcaatgtaggggccggt

SEQ ID NO: 799114 - DNA, 99 bp, Homo sapiens
ctggagtgggcgcggaggcgaccgccatggcgttcctcaaactccgtgaccagaaatacactttcgggaaatggcctctaaatcctggctgaatttttt

SEQ ID NO: 799115 - DNA, 100 bp, Homo sapiens
ttatttgcaaggggcaccgtattacttgaaagacggagatactattggtgttaagattgtccagaacatcgtgggcacagctctgatgattttagtggcc

SEQ ID NO: 799116 - DNA, 100 bp, Homo sapiens
tggtgtttttctcaggtgaaaggagcagtagatgatgatgtagcagaagcaattctgtggtgttcttggtcacacatttatggagtttctgaagggcagt

SEQ ID NO: 799117 - DNA, 100 bp, Homo sapiens
tggaacccaagcagtggcgaagggaatcgcaaggctcttccctgaccattttctactgtccctgcgcgagctccatggctacatggaaaacaagcctctg

SEQ ID NO: 799118 - DNA, 98 bp, Homo sapiens
ccatggagacagtcatggggttgataactcgcatgtttaaacaaactgctattgccaagattatctcctgctgcatactacgcccagaggatgatcca

SEQ ID NO: 799119 - DNA, 98 bp, Homo sapiens
acaagtcggcgccccagagcggacgagttaatgtccatcagtgtgttggcagtttctgcttggatgagggactacctaaataatgttctcactttaac

SEQ ID NO: 799120 - DNA, 100 bp, Homo sapiens
aatttcaacttgccaatgtgcaaagctgcagaaaccacagtggtagagctagagaccgttggatggcagcttaaccttcagatggctcactctgctcaag

SEQ ID NO: 799121 - DNA, 99 bp, Homo sapiens
cgacgtgatcgtgctgggcaccggcctgacgtctctgctggatgaaccgaatcctaacagtccagccaatagccaggcagcacagctttatcaggaaaa

SEQ ID NO: 799122 - DNA, 100 bp, Homo sapiens
tgaaattcacacctggtactcctccccatatcctcaagaatactcaagttttcggctttgtgagaaaccttaccatcaaacacgatggccagcaacgtta

SEQ ID NO: 799123 - DNA, 100 bp, Homo sapiens
aagaccaggaactcctgctgcaaaaatggaacaagttccagcacaagtggttgcataccctgtcctgagggcgcggcacggagtgcatgcgggccgctgc

SEQ ID NO: 799124 - DNA, 100 bp, Homo sapiens
gcgggtgctgaaggctgcagccgcgaatgccgtagagtaaaattagggaacctttcggaatttctcaccacatcgttctacacatatctgacttttctgg

SEQ ID NO: 799125 - DNA, 101 bp, Homo sapiens
ggcgcagccggagccggtgccgcagctgcgatggccgtggccgtggggagaccgtctatcctaattatctcatggctaatgaacgcatgaacctcatgaac

SEQ ID NO: 799126 - DNA, 100 bp, Homo sapiens
ccatggctcagctccaaacacgcttctacactgataacaagaaggtaccgtgagggttttctctggaagcgtggccgggacaacgggcagtttttgagcc

SEQ ID NO: 799127 - DNA, 100 bp, Homo sapiens
cgacgtcttgcctgtgtcccacttgttcgcggcctataggtctggcggcttctctgttgacaactcagctggttccacaccctggcaattgtgaagagtt

SEQ ID NO: 799128 - DNA, 98 bp, Homo sapiens
cactttgcattgactggaaacaatggcatttacagaaagagtcaacagcagtggcaacagtcattgaaattatgagactatcattcaaatggaagcat

SEQ ID NO: 799129 - DNA, 152 bp, Homo sapiens
atttggaatgtaatcaactgggagaatgtaactgaaagatacatggcttgcaaaaagtaaaccacgatcgttatgctgaagaagagcaagttagtaccttgtaccaaaacatcaaccttgtggagccaagattaattcagccatatgaacat

SEQ ID NO: 799130 - DNA, 112 bp, Homo sapiens
gaatgatctctccaacagggtctggagtatcagccaggagcccgatcctgtccagaggcttcaggcttacatcaaaatctatcaaggagaagaacttccacatccaaagtcc

SEQ ID NO: 799131 - DNA, 100 bp, Homo sapiens
aacaattgacagaagagctccagaatgtgaaacaagctactgttggattgattcgaaatcttgccctttgtcccgcaaatcatgcacctttgcgtgagca

SEQ ID NO: 799132 - DNA, 100 bp, Homo sapiens
acaagcacctcgtgaaccactactactgcaagcgccccatctatgagttcaagatcacatggtggaggaagagttcatcgattggtggagcaaattcttt

SEQ ID NO: 799133 - DNA, 100 bp, Homo sapiens
gtgccgtgcgccgcagcccgggcccaggccccggcagcgcctgggacaaggttgtagcagataccaatataagcgccatagcagctcagcttgaaaacat

SEQ ID NO: 799134 - DNA, 98 bp, Homo sapiens
gccgagcctatgccctggcttttgcagaaagaggagcgttagttgttggcagacttcagagacagtaaattacagtgctgtcctggcccgacttcccc

SEQ ID NO: 799135 - DNA, 99 bp, Homo sapiens
gaattcagaaggagctggcggacatcactttagaccctccacctaattgcaggtatgatctcgtgaaatcttgagagaaactgaatgacgaatgaaact

SEQ ID NO: 799136 - DNA, 100 bp, Homo sapiens
caatggggacttatcaggcctttcccaatattcatccacctcagataccagcaactcccccatcgtatgaatcttttgacaacttaaatgctgcgcatga

SEQ ID NO: 799137 - DNA, 98 bp, Homo sapiens
agagaaacctgggtgaactttcacggacaacctcagaggacaacgaagtgttcgcctcaatcctggtcctctggatgctccaaggctcccaggcagct

SEQ ID NO: 799138 - DNA, 98 bp, Homo sapiens
acagaagcataaccgttggtcgtggggaggctctctccatgggagccctagcatccacagtgcagaactttccatgactggatcacagggaaaaaccg

SEQ ID NO: 799139 - DNA, 99 bp, Homo sapiens
gaacacattacgatggatgatggaaacataagcttattctaccagattccatgaaagtattgccagtgtacatgaattgcttgttgaaaaactgtgtac

SEQ ID NO: 799140 - DNA, 98 bp, Homo sapiens
ccctgcgaccgccgcggcgaagatggtttgctgtaatggcacaagagtatttgtgcagaaagaaattcttgataaatttacagaggaagtggtgaaac

SEQ ID NO: 799141 - DNA, 100 bp, Homo sapiens
aacacagcagcgggagcagcaacaccagcactgccaacaggctctggatggccagaatatctataatgcatgctgcactctgcgcattgacttctccaag

SEQ ID NO: 799142 - DNA, 100 bp, Homo sapiens
cattctgaaggaaattgatatcctcccgacccaattagtaaatacctcttcagtgcaattggttaaaagctgacttttcccaggtccctcgtatcaaaac

SEQ ID NO: 799143 - DNA, 100 bp, Homo sapiens
ccgattttctgcagaagatgaagctttgagtaacattgccagagaggtcagtcatatgaaattcggatgctggataatcggaaaatgggtgatatgcctg

SEQ ID NO: 799144 - DNA, 98 bp, Homo sapiens
tgctggaacagcactatgcccagtatgatgccgacgatgacgaggacccagatgatgtggtaccagttggccaaagaagagcctggtgttggtgcatg

SEQ ID NO: 799145 - DNA, 99 bp, Homo sapiens
cgccgaagaagcatcgttaaagtctctcttcaccctgccgtcatgtctaagtcagagatctaattatcatggacctgcgacagtttcttatgtgcctgt

SEQ ID NO: 799146 - DNA, 100 bp, Homo sapiens
aaatgacctgaatgaactaaagcctttagtgcattctcctcatgctattgtggttctgcggcatgaggaatttgaagaaggctgcaaagctgcctgtaat

SEQ ID NO: 799147 - DNA, 100 bp, Homo sapiens
agaaagcaatgataattcccaggacagtcagtctggtactaacaatgcaggctgtaccagtgcaggtcctcactttaatcctctatccagaaaacacggt

SEQ ID NO: 799148 - DNA, 100 bp, Homo sapiens
taaaggtcttgctcccagcagcctccgcggtggatacgtcgccatcttggatccgcgggacaagaaaattcatgcgaggcggggtttcaccatgttgccc

SEQ ID NO: 799149 - DNA, 120 bp, Homo sapiens
acacacagcagaaagagcatacgggagagatgaagcagtccactccaagaacattctcatcctacggattacgaggtgctgactgggttacttttttaaacactaggaatggtaatttct

SEQ ID NO: 799150 - DNA, 98 bp, Homo sapiens
ggtaacaccgttcacagagctagccggacgtcctccgactcaagtgtctctggagaatggttcgactgttgcctgataccatcaatagcattaaccta

SEQ ID NO: 799151 - DNA, 100 bp, Homo sapiens
ttttcctcttgatcgggaactcctgcttctccttgcctcgaaatggaccccaactgctcctgctcgcctgaaagcgtggatacccatcaacgaagttttg

SEQ ID NO: 799152 - DNA, 100 bp, Homo sapiens
gatagtttgcggctgagaatgcacttactggctcattcagggtatgggatgatgggatcattgatccagcagacaccagactggtcttgggtctcagttt

SEQ ID NO: 799153 - DNA, 98 bp, Homo sapiens
agaagaaaagaggcattttccccaaagtagcaacaaatatcatgagagcatggctcttccagcatctcacaaaagaatcttcaagagggagacatagg

SEQ ID NO: 799154 - DNA, 113 bp, Homo sapiens
tttgttattggagaaacatgcagattatatcgcatcctatggctcaaagaaagatgattatgaatggttttagggaagactgttgccggatgacaaggctgtcactattgttc

SEQ ID NO: 799155 - DNA, 100 bp, Homo sapiens
gcggaggccagacgccatcaggctgggcctggggaaccacaactactgcagattcgtattttacatggagaagtgaacaaagtgaaactggatcagaaaa

SEQ ID NO: 799156 - DNA, 100 bp, Homo sapiens
cgggatcctctgctgcatagtttcggtcatctaaaggaggttttaaacagtataacaggtccacagttttatgtgtgagcaagatggaggctgacctgtc

SEQ ID NO: 799157 - DNA, 100 bp, Homo sapiens
gaatctgcacagaaggcccttaagggcacaggagctgcaagttttgacgaatttggcaattctaagtaccagaatcggagaacaatgagcagttctgatc

SEQ ID NO: 799158 - DNA, 100 bp, Homo sapiens
ccagtcaagttgtaaactgaaaaagaacgtgttgaaacaaggaattgccccatagccttcacagagtatctcccatattcatgttgcactttgtagaagg

SEQ ID NO: 799159 - DNA, 100 bp, Homo sapiens
catttcggctctcatgttcctccatgataaaggaatcatctatagggcggcgactggcggcgcgatggacctgaccgggctcctgctggacgaagaaggc

SEQ ID NO: 799160 - DNA, 100 bp, Homo sapiens
cagtaagcgggattttatgctgatcacaaacaaatccttgaaagaagaagatggagaagaaatagttacctatgatcgtcacggtctagatcacattctc

SEQ ID NO: 799161 - DNA, 100 bp, Homo sapiens
cagctgttgcatcttgcttctgagcaaggtagttttgatgatttctgcacctaatgaatttgatgtcatgtttaaactggaagtccccagaattcaacta

SEQ ID NO: 799162 - DNA, 100 bp, Homo sapiens
ttcttggggatgatgaatggagagagactgcatggggagcttctccccatctgctggcaaggctaagattagaacagctcataggagagtcatgattttg

SEQ ID NO: 799163 - DNA, 98 bp, Homo sapiens
aaacccttgggtgcagatcatgatgtttaagaacatgacgccgtcacccttcctgcgattctacttagaatcctggaagcctactgatactgaaggta

SEQ ID NO: 799164 - DNA, 99 bp, Homo sapiens
ggatagcgagggcggccgcgccggctccaggacttgaaaatactggaaatctgtccggatccaaattattttgcaagccagatgagtaaccagagggca

SEQ ID NO: 799165 - DNA, 98 bp, Homo sapiens
accaggcactccgtcagtgagatggcctccaacaaggctgcaaggtgtgactgttgtaaatctcaaggaactcttaaagagcgagttcagtggcgtgg

SEQ ID NO: 799166 - DNA, 100 bp, Homo sapiens
aaggcgaggagctcagcatggtcatcctgctgccggatgacattgaggacgagtccacgggcctgaagaagttacgacacgtggatcccagcgagtgaaa

SEQ ID NO: 799167 - DNA, 100 bp, Homo sapiens
cttagaggaacgaggattatacagaaatttgaagaatagccaggccagaagaaggaaggcctgtggtgagtgggacaggaaatgacatcaccaccccacc

SEQ ID NO: 799168 - DNA, 100 bp, Homo sapiens
ggggtgagggtggaagctgggaaacccacaggaggcaaccacactagtttaggtttctttttggagacaggcccttttggtgggtccatgagtctggtta

SEQ ID NO: 799169 - DNA, 100 bp, Homo sapiens
ggcgaagccttgggtttctttcttaaaggactgatttttagaactccacatttgaggtacaccaggggttggaaaaaccacactaggcaaagaacttgcg

SEQ ID NO: 799170 - DNA, 101 bp, Homo sapiens
ggtgcgagtaactgtacagtgatgaaaactttcggaagagaaagttgcctgtggtaagttcagttgttaaagtaaaaaaattcaatcatgatggagaagag

SEQ ID NO: 799171 - DNA, 100 bp, Homo sapiens
gtgaggatggtgtgaccccatatatgattttctttaaggatggtttagaaatggaaaaatgtgatttgcctcaaagggcactgcaaaaattgaacagagg

SEQ ID NO: 799172 - DNA, 100 bp, Homo sapiens
tactatcaaaaggagcggggtcgacggtccccactttcccctgagcctcagcacctgcttgtttggaaggaagcagtcaattatagatttcttcaaacca

SEQ ID NO: 799173 - DNA, 100 bp, Homo sapiens
gggaccgggacctgctcctggacccggcctgggagaagcagcagagaaaggccttgaaccggggcattgctgctgtcaaggaggatgcagtcgagatgct

SEQ ID NO: 799174 - DNA, 100 bp, Homo sapiens
tgctgcacgaatcgccgcagcccccagccttgcgcgtcgtcgctacctcctcggacagaaaacgttgtgtgacgtgatcctcatggtccaggaaagaaag

SEQ ID NO: 799175 - DNA, 98 bp, Homo sapiens
tttttctaatatgggcagtaacacatagcgtcaaagagaacactgagctgaaggttgaagtggagagcttgaaacgagaactccaggacaagaaacag

SEQ ID NO: 799176 - DNA, 100 bp, Homo sapiens
gcccgggatatgagcctgtttctggggcaaaaacattcaagaatgagagcgagaacacctgtcaaggtgacagcgggaaggtgaccacagtcgtagccac

SEQ ID NO: 799177 - DNA, 100 bp, Homo sapiens
cagccacagtcaagatgttgccaacattcgtaaggtccattcctgatggctctggaaagtgatgaagcattgggcccaacaatgatgagttggaatgcag

SEQ ID NO: 799178 - DNA, 99 bp, Homo sapiens
aataacatttagagtggactgtgcccccagcagcccccaagcagcggctgcttacctgtttcagagacagctttcaccaactccaggttacccaagtca

SEQ ID NO: 799179 - DNA, 100 bp, Homo sapiens
atctggccttgcggaattttgatggcctggaggagattgatagagccttaggaatacccgaactggtcagccagctccagtattactgaaaaagatccaa

SEQ ID NO: 799180 - DNA, 100 bp, Homo sapiens
gcaagcactcaatcagaaagagagctccaaggagaaaatccagaagagcaaaggcgatgatgccacattacctcattcttcaggtcatctgaaccttctg

SEQ ID NO: 799181 - DNA, 113 bp, Homo sapiens
cagccgagaacctcggcatcaccagtggcttcgtgaagcccaagctggattcttaatgcttttcggactcctgatggcatgcctgtaaagaacttgcagttgaaggagtataa

SEQ ID NO: 799182 - DNA, 101 bp, Homo sapiens
ctcgctgttcgcggtgacggtggcgccgcccggggcgaggcagggccagcagcaggcgggagttttctttttaaaagcggaaggagagttttacatggaag

SEQ ID NO: 799183 - DNA, 98 bp, Homo sapiens
tcattccaggcactcgccgcagcagccaagcaatggcagggctgatgtggagaatctcaacagtcagaatgaagctgagctccgacgccagtttgagg

SEQ ID NO: 799184 - DNA, 100 bp, Homo sapiens
agctgcttagacgctggatttttttcgggtagtggaaaaccagcggggatctgatgagcttctttcttctggcatcattaacggaccttttaccatgaat

SEQ ID NO: 799185 - DNA, 98 bp, Homo sapiens
ctcggagcgcggtccctgtattggtctcctgctcctagagatggctctgagagattcctctgcgaatctgtttttagctatcaagtggcatccacgct

SEQ ID NO: 799186 - DNA, 100 bp, Homo sapiens
gacctatttaggcgaccccattccgtatgacccacagataacagcggaagaattagctgaaaagggtgctgacacctttacggcaaaagttaatattgaa

SEQ ID NO: 799187 - DNA, 100 bp, Homo sapiens
gatgaagatcatgacattgtagtacagtatccaagtggcaataggacaaagcagttccaattccagagaaaatgagtgaatgggcacctcgacctccccc

SEQ ID NO: 799188 - DNA, 100 bp, Homo sapiens
tgtggatgctttacttttagacctcagacaaaaatttccacccaaatttgtgcaggccaccaccacctatcatgacagatggtgaagatgcggattacac

SEQ ID NO: 799189 - DNA, 100 bp, Homo sapiens
cctggcgctactactcatgacccttggacagcaggatgtttccaaagtcctgctaggccctctctctccctacacatccagctccaggtcccacaggggc

SEQ ID NO: 799190 - DNA, 98 bp, Homo sapiens
aggtctccgtgcagcccaacttccagcaggacaaggtagatcatgccactaatcgtacccagtttggggagaaaattcacaactttgggctgatccag

SEQ ID NO: 799191 - DNA, 100 bp, Homo sapiens
cttcaatgtccgcatcgcaaccaccgccctggccatctaccatgtggacgagcctgtggagtgggagacacctgacctttctcaagctgagattgagcag

SEQ ID NO: 799192 - DNA, 100 bp, Homo sapiens
ggaccgctctcttctctcgccgacaggaatcctgttcacgatgctggtatttggaccagcctgcgggtttatcctgggctctttctgtaccaaaatctac

SEQ ID NO: 799193 - DNA, 100 bp, Homo sapiens
agaagggagactacaaggacagcagcgactttggggcccgtcaccctcagatgcggacctgtccgtcaccgaagccagcagctccgacagccgaggagag

SEQ ID NO: 799194 - DNA, 98 bp, Homo sapiens
agtcagacacggggcaggctgagttcctcttgctcacagagctctgtaaagggccatgctgcaccttacaaaacggtctccgtccgcgcggccatccc

SEQ ID NO: 799195 - DNA, 98 bp, Homo sapiens
acaagcggcgccgcgccctcggcctgcacggggtgcccgggaaacatttgagaattactaccgaaaacagaggcgaaaacaggctcgtttggtacttc

SEQ ID NO: 799196 - DNA, 100 bp, Homo sapiens
tggagtatcgttctatttctctagctattgccttattttttctcatggatgttcttcttcgagtatttgtagaaggtttgcaggcctttcagatatatcc

SEQ ID NO: 799197 - DNA, 100 bp, Homo sapiens
caatatcagtacaatgtccgctgagtgggttagtaaagctaatgccaaacagagaaaaggtcgagctggaaggtgttatcttcaggaaggcacactggac

SEQ ID NO: 799198 - DNA, 98 bp, Homo sapiens
agtggtggcgaggacagctggccgccgatattcaccaagcgcttcgctacaaggcaatgaatcgctccctggctaatgtgattcttggaggctatggc

SEQ ID NO: 799199 - DNA, 100 bp, Homo sapiens
caatcctgcatcccccatagttaagaaaatcatcgaaaagatgctgaacagtataacaagaggattgcctgatccagccaagatgcagagcacttctaat

SEQ ID NO: 799200 - DNA, 98 bp, Homo sapiens
accaaactttccagatctttccaaagctgatatcaatgggcagaatccaaatatccagcatctagtaagtcaacagaaagatccagatacagaagaat

SEQ ID NO: 799201 - DNA, 100 bp, Homo sapiens
atattcatctcaaaaacaaaattctgaactcaggacttggcaagtggaacttgcagaaatctgtgccaagagtgagcgttacattggcactgaaggagga

SEQ ID NO: 799202 - DNA, 100 bp, Homo sapiens
ctctgccagcaggttgggagatggcaaagacatcttctggtcagagatacttcttaaagctgaccggttccctgatgtgttacctgcttctgctactgat

SEQ ID NO: 799203 - DNA, 100 bp, Homo sapiens
ctccccagaagaggaagtttctcaatctgaaattgaagtgtctgtctctgcaaggaatatcagaaggctactaagtttccagcgatatcttagatcttca

SEQ ID NO: 799204 - DNA, 100 bp, Homo sapiens
ttcagggcctttgcctttgttacatttgcagatgatcaggaaagtgactattttaccccacagggagaattccgtgtagacaaagcaggatcccctactt

SEQ ID NO: 799205 - DNA, 100 bp, Homo sapiens
gcccagccagcattccctgcaggagccctacacagcctccgtggaatatgcttttaaggctattaaccagggtggccttacatcagtagctgtcagaggg

SEQ ID NO: 799206 - DNA, 99 bp, Homo sapiens
caagtccagccccagcatggcaagccagacccagggccctccagattaccccaggtttgtggagtctgtggatgaatatcagtttgtggagcgcctgtt

SEQ ID NO: 799207 - DNA, 98 bp, Homo sapiens
ggcccagcagatggagaatagaccctctgtccaggcagcattaaaacttaagcagtatgaggttgatgagctacgccgaaagaaggagattacagtga

SEQ ID NO: 799208 - DNA, 100 bp, Homo sapiens
aatgatggggcagcaagtggccaaaaagctgtatgtgatggcttctgtgtttgtctgtctactcctttctggattggctgtgtttttccttttccctcgc

SEQ ID NO: 799209 - DNA, 111 bp, Homo sapiens
aatcccaagaagcaggaatgaaagtggcgctttctccgccccaggacctcaatacagtctccatcttcatatggtaacagctccccacctctgaacaaaatgaacagcatg

SEQ ID NO: 799210 - DNA, 100 bp, Homo sapiens
tcataaggcaaatgcttccaattcacctgaaggaaacaaaaccaaaggccgaagtacaagatctaaggctcttgtctgatggaccacacatccccgacct

SEQ ID NO: 799211 - DNA, 98 bp, Homo sapiens
aagctttggggcagtgaagaagaaattctgtacctttcgagaaggcatctgggtcacaggccccagttccaccccctgaagcacggatttgatgagtg

SEQ ID NO: 799212 - DNA, 98 bp, Homo sapiens
gaaaagaagatgatacaaatgaatttgttagtgctgtgtgctggagggcactaccagatgggatatacctgtgtttcccacaatcacagccactgtga

SEQ ID NO: 799213 - DNA, 100 bp, Homo sapiens
atgtcactcccaccgccccaccgtacttgcaagaaagcagccccagagggaacaatggcaaaagcctttgatgaagcattttcctctgagacaacagcgg

SEQ ID NO: 799214 - DNA, 98 bp, Homo sapiens
cgagagaggccggtttcccccaccgacttgacacagcaagcaaaagacatacagaacataacagtccaggaaaccaacaaaaataactctgaaagcat

SEQ ID NO: 799215 - DNA, 98 bp, Homo sapiens
caacgagttcatctacctggtcggcctggaggaggtggtgcagaacctactggagacacaagtgtcttgggacaaggtgcgcattcctggtgtgctgc

SEQ ID NO: 799216 - DNA, 98 bp, Homo sapiens
tcaagaaatgcagtaaccagcatgtcaataaggggtcataggtggaaaagacatggtataagtgtgctagcggagtgtctagattgtcctgaattgaa

SEQ ID NO: 799217 - DNA, 100 bp, Homo sapiens
ccctctgcaagagcaacggctggatcctgcccactgtgtaccaggagacagcaatatgttgggaaggtcaagtttgcctccttggaattttcccctggat

SEQ ID NO: 799218 - DNA, 105 bp, Homo sapiens
ggtcatcgggcactacgctggagaagatgcaacgttcctcagcactttgtttgcccccttaaactttgtcatggagaaagtggagagcatcctcccatccagtct

SEQ ID NO: 799219 - DNA, 100 bp, Homo sapiens
attccacagtgtcctctggaaaatggttttgaacgaagaatgtgatcagaactggtacaaggcagagcttaatggaaaagacggcttcattcccaagaac

SEQ ID NO: 799220 - DNA, 98 bp, Homo sapiens
agcgctgcactaacgcaggatccggctgccgaaggtcctcgccagaggaaaaagcaagttgctccagaaaaacctgtaaagaaacaaaagacaggtga

SEQ ID NO: 799221 - DNA, 50 bp, Homo sapiens
ggggagcattggagctgcagtgggccagccgaacgcacggccggcgacgc

SEQ ID NO: 799222 - DNA, 100 bp, Homo sapiens
ctagtatatgacatcaccaatggtaaaagttttgaaaacatcagcaaatggcttagaaacatagatgagatataaagacctgatgccacatgatttggct

SEQ ID NO: 799223 - DNA, 99 bp, Homo sapiens
ttacttctggatgccaatctgaatatcaaaatagcagctcttgcaagcttaggatatgaaaagagctgtgtgttgttcaattgtgcagccttagctagc

SEQ ID NO: 799224 - DNA, 98 bp, Homo sapiens
aacagtgaccattacgtgccagtattttgacgatcgccgaggcctagcgcttggcctgatttcaacagctggttggtggagaatttgaactggagatg

SEQ ID NO: 799225 - DNA, 98 bp, Homo sapiens
ctggatccagatgatgtcttggcagatgttgttgaagataaagacaaggtcaacggcagagacttatccagagcaactcatgaccaggctgtggaagc

SEQ ID NO: 799226 - DNA, 51 bp, Homo sapiens
caggcacagttgccgattacaggataaggagccccgtggaatcatcccttt

SEQ ID NO: 799227 - DNA, 101 bp, Homo sapiens
agaaccgcgacctgcgcaaagccagcgtgaccatcgaattctcaagaaatttgaggaagaagatttggatgacattttaaggaaaagattgaaggactcaa

SEQ ID NO: 799228 - DNA, 137 bp, Homo sapiens
agcgcctgggctggaggacagagaagccttttccgttgccggtgccggcctagcgtcctggaattacttcaatcaagaatggcggcgctagatagtaaggcatcagggaagatgggaatgcgagctgtagtctatta

SEQ ID NO: 799229 - DNA, 104 bp, Homo sapiens
tgtggagagcccgtccgacagcgctgagtcatccctttcaagccctgatatcttcgactccccaagtcccgaagaggataaggaggaacacatttcacttgcgc

SEQ ID NO: 799230 - DNA, 100 bp, Homo sapiens
tgtagcgtccctccctctcaaccacaataacaggcggagggtcggcgtaggttccgaggtttggcaccccatctgcaaacaggcagcccgggcagagaag

SEQ ID NO: 799231 - DNA, 98 bp, Homo sapiens
ttcggtggactgagagatggctattatatccaagggactctctttctgtggatgttttggcccagctttaactcggccattgctgaacctggagacaa

SEQ ID NO: 799232 - DNA, 100 bp, Homo sapiens
ggcagtatcaacggagtctccggggttgctgaaaagccaggagtcaaaatgactgagcgctttgactgccaccattgcaacgaatctctctttggcaaga

SEQ ID NO: 799233 - DNA, 99 bp, Homo sapiens
ctgatttctgcagctctgtgtgaagatacacatttggaggagacgtaatccagcattggaacttctgatcttcaagcagggattctcaacctgtggttt

SEQ ID NO: 799234 - DNA, 98 bp, Homo sapiens
accaatcagatcagtcttggctccctcagaagcatcgtgaaaagcctccttctggttccaaatggaatcaagagagacccggccaaggcttttgtgcc

SEQ ID NO: 799235 - DNA, 98 bp, Homo sapiens
ggaaaccacgcaggcaaacgagaattaaatgccgagaaggccagtacggtctcttttattcaaaaccttgtattttgtgtggaaagagtttaccgtgt

SEQ ID NO: 799236 - DNA, 100 bp, Homo sapiens
cgcccaggagtcatcggacgccagaatctgcttgccttgcgccatggactggcagccagacgagcagggcctgcagcaggtcctgcagctgctcaaagac

SEQ ID NO: 799237 - DNA, 98 bp, Homo sapiens
cttgctagaggttgaggacgctcattgcagagtgggcaggatcttaagacccgataggtgcagaacccatctggacacggagaccaggaatggagttc

SEQ ID NO: 799238 - DNA, 100 bp, Homo sapiens
agctgtacagccacactaactgtgacagaattagcaagagaactggatttcactgaggagcaaattcatcaaattcgaattgaaaatcccaactctcttc

SEQ ID NO: 799239 - DNA, 100 bp, Homo sapiens
gggcctgaaccgtatccagactcaggacttggatgttgtgggtgatggtatgcagtgtcctccttcacctttgctttttgatccttcactaacccttgaa

SEQ ID NO: 799240 - DNA, 99 bp, Homo sapiens
gccttattacctctatggatccaaggcaactttttgctccttcctacacagaaacccattatacttcaagtggtaaccctcaaaccaccacacggaaat

SEQ ID NO: 799241 - DNA, 101 bp, Homo sapiens
caacgggctgtccgtggagcggagtaacacacagctgggtgggggcacagtggatgcctggactttggccttttctcctgattcccagtatctggccacag

SEQ ID NO: 799242 - DNA, 128 bp, Homo sapiens
gaaaatggcctatatgccaaaaaatggaggtcaagatgaagaaaacagtgaccagagggatgacatggagatccagtttgctgaccagaagcaagaattcaacaaacgtcccaccaaaattggacgtc

SEQ ID NO: 799243 - DNA, 100 bp, Homo sapiens
atggcccaggttcttcaaaagatgtgaccaagaatatggcccaggtgaccaaagccctggacaaggccctgagcaccatggacctgcagaaggtctcctc

SEQ ID NO: 799244 - DNA, 98 bp, Homo sapiens
cgcgttgtgcaggttcgtgcccggctggcgcggcgtggaatgtcgtactctcaggaggctccaccatgttcagggatttcggacgccgactgcagagg

SEQ ID NO: 799245 - DNA, 100 bp, Homo sapiens
gtgggggtgtgcaaacccgagagaactggcatttgatgaatacagaaatatcagccaaaaggacattgtggacagcataaaaggagaattatctgggcat

SEQ ID NO: 799246 - DNA, 100 bp, Homo sapiens
gacagcccgcagagagttaacttctgtttacatggaactcagacatctgcaaatcatggcagaatccagagaccacatttgaagtatatgttgaagtggc

SEQ ID NO: 799247 - DNA, 99 bp, Homo sapiens
agtagtgtctcccggacctcttcattgcctaaaccttttattggaagactgtgaagaagcttttctgaaaaaccctgaaggaaaacctcgattaatctt

SEQ ID NO: 799248 - DNA, 98 bp, Homo sapiens
cactgccaccctcatccggtgtgagagcgctgcttccgcttcgcaagccgattttttcagttgatattcaccctgacgggaccaagttcgcaactgga

SEQ ID NO: 799249 - DNA, 100 bp, Homo sapiens
aactccaagccaaaatcacagctttgagtgagaaacaggtgacagagctgaatgaacctctctccaatgaagatcgaaatctcctctctgtggcctacaa

SEQ ID NO: 799250 - DNA, 100 bp, Homo sapiens
ctcagggaaggggcagcacacattttccatgtgctgattcttaatctaattattgtgggagctggagtgatcatggcctgtttctacccaaacataggag

SEQ ID NO: 799251 - DNA, 100 bp, Homo sapiens
ggaggcgcggaaccatggccgatgggggcgagggcgaagacgagatccagttcctgcgaactatgatcagtagaattgaatatgtgcatacaaagaattt

SEQ ID NO: 799252 - DNA, 99 bp, Homo sapiens
gcggggcgggccctgggggtcctcagcgtggtctgcctgctgcactgctttgaacaaattggagctctggcagatcagcatatcattcatgtggcatgt

SEQ ID NO: 799253 - DNA, 98 bp, Homo sapiens
aagcacaaggattctcgctgtgacagagacaacaccgagtatgagaaatggttctgtgaagggaaagaactgcacaacactcctgatattcaaatcca

SEQ ID NO: 799254 - DNA, 99 bp, Homo sapiens
cctcggccccatggacgccctgtgcggttccggggagctcggctccaagttctgggtgaaaggtgtagcagtcactcggcctacacccacagcatcgac

SEQ ID NO: 799255 - DNA, 100 bp, Homo sapiens
tttccctgatcgcgaagtaaaggtcccgggattcttgagctgtgcccagctgacgagcttttgaagatggcacaataaccgtccagtgatgcctgaccat

SEQ ID NO: 799256 - DNA, 98 bp, Homo sapiens
ggcgaaatccatagagatgaagttcctcaccggctacgaggtcaaggacatcatccacgacccgggccgcggcgcgcccctcgccaaggtggtcttcc

SEQ ID NO: 799257 - DNA, 98 bp, Homo sapiens
gatcaaacactgcaaggaccccctccggctcaagtgtgtcaagcaagcacttttccagccattaactccaggctctcgagaatttgaagatgttgtaa

SEQ ID NO: 799258 - DNA, 100 bp, Homo sapiens
tcctcgatcgaggacgacttcaactatggcagcagcgtggcctccgccaccgtgcacatccgaatggcggcaacctttggcactgcatccatgagcatgc

SEQ ID NO: 799259 - DNA, 98 bp, Homo sapiens
aggaatggtctctgtgcttggatacaagttcctgactgtacaggtttgcagattccgccagcagcacagcaagctctacagatgagtggctctttggc

SEQ ID NO: 799260 - DNA, 98 bp, Homo sapiens
ccgcgagagccaggtttgagtccaaagtaccctccttctactaccggcccacgccctccgactgccagaagcaggagctggccaacagctcggatgcg

SEQ ID NO: 799261 - DNA, 98 bp, Homo sapiens
accatcagcgacaccatagcacggttccagaagatgagagggatgcaggtcttcaatgaaatttatccagtatggacttactcttacctggtgctact

SEQ ID NO: 799262 - DNA, 100 bp, Homo sapiens
cgcggctcggagccctggaagcagcagctcaccgaggacggggactcggtccctctctgtcctgctcgatgacctgcaggacctgagtgaagccatttcc

SEQ ID NO: 799263 - DNA, 99 bp, Homo sapiens
tggacctaaatggcgcagcatgactttgctccagcctggcttaatttccctactccaccatcatcaacaaaggactcagtggcctctgaggatgtggct

SEQ ID NO: 799264 - DNA, 99 bp, Homo sapiens
tttcagcctgcacggatggtcttgaaacacaaatggtttttggtgaccattgtgaggtagatattttgttctaattttccagatgaggaagctgagacc

SEQ ID NO: 799265 - DNA, 98 bp, Homo sapiens
atgagtatggcagtgtcagctgtacagccacactaactgtgacagctctgtatgaaaaagctgatatcaaggggcctgaagacaagaagaaacacctc

SEQ ID NO: 799266 - DNA, 99 bp, Homo sapiens
gcaatcctaccatgtcagccttcccagtagctggaactacagatcctggcatatggcgacatgaaccacgagtgggtggggaacgactggctgcccagc

SEQ ID NO: 799267 - DNA, 110 bp, Homo sapiens
gccgggaccgggaccgccgccgccgccgccaccatgcatactggagcatagtgaaagagtctattttgaagcttcaaacttagtgctgctgcagaccaggaacaagagag

SEQ ID NO: 799268 - DNA, 100 bp, Homo sapiens
agcgcctgtcgctgctggaggacatcgtgtaccggcagctgaatggttcgtgagccacacatctccccacaccaagctcctccatacaagacctcggact

SEQ ID NO: 799269 - DNA, 50 bp, Homo sapiens
ctgaggaagaagcaggacttgccgcttacaaacacgcagatggcaagaag

SEQ ID NO: 799270 - DNA, 98 bp, Homo sapiens
gtccggcgacagggtctacaagaacgagtgcgccttctcctacgactctcccggaacctcagaacctgttctggatccacagcaaatccaagcatttg

SEQ ID NO: 799271 - DNA, 100 bp, Homo sapiens
tatgcatccatgaaggaagagtctgtcttccgggaaagtatggaaaacccaaattggtgtttgatcagtatgtaaagaccagggcagaggaagaacgcag

SEQ ID NO: 799272 - DNA, 99 bp, Homo sapiens
aaagctaggccatctgaataactttactaagtctcagaccagtatccttcaggggttctcttactctgatttgcggaaatttggcatcgtcttgtctgc

SEQ ID NO: 799273 - DNA, 107 bp, Homo sapiens
aaaaaccacacacaccagcaagatattgacgacctcaagcggcagaatgctcttctggagcagcaaggtgaggcttgtaccattgttttgcgtggtgccactcaaca

SEQ ID NO: 799274 - DNA, 100 bp, Homo sapiens
caatattgcagagcatcttggtggaattggaggggatctgtactccgcagctattgtctgggaggagcatcttactactttgaccgcgatgatgtggctt

SEQ ID NO: 799275 - DNA, 100 bp, Homo sapiens
caacttgctgcctatcaagaggaagcagaacgtctgcacaagcggcatgcttttcacttccactgcatctctcgctggctcaaaacacgacaggtgtgtc

SEQ ID NO: 799276 - DNA, 100 bp, Homo sapiens
gacactgaagccacccaggtgtaccccaagctgtacttgtcacctcgaattgagcaatttgggccaggcttagtcatctattggtatggatttatccagg

SEQ ID NO: 799277 - DNA, 99 bp, Homo sapiens
gaggatcacagagccagcatgagcctgtcatagggaactgcatggatagaagttctccaggacaagcagtggagctgccggatcacaatgggctcgggt

SEQ ID NO: 799278 - DNA, 100 bp, Homo sapiens
gcttgccctgtatgaacagcccccatcttcccatgcttgtcaaaaatcagaggcaactaacactgcggcttcctgaggatacttatccgctttttcccct

SEQ ID NO: 799279 - DNA, 99 bp, Homo sapiens
tggaacacatattactcaaatacagaggtaaaataccatgaagattttgaaaaaacaaaggggagaggctttactcccgtcgtggacgatcctgtgaca

SEQ ID NO: 799280 - DNA, 99 bp, Homo sapiens
ccaacagttgctggacagtttgaggatgcagatgttgatcactgaaaatgatttatgcaagtttaagactttatattcagagcaccaatcaaattaagc

SEQ ID NO: 799281 - DNA, 100 bp, Homo sapiens
acttgctctaattaaaaaatattatggaacgaaagatcctgttccaggctattctgttccagcagcagaacacagaccctgcacttgatggaccagctgg

SEQ ID NO: 799282 - DNA, 99 bp, Homo sapiens
cgacggtcacccgaatcgcagggagtcgccgctggagaggggctcggcgcccggcggggactgcagggctgctcttcacctatcgtggtgaagtttgct

SEQ ID NO: 799283 - DNA, 100 bp, Homo sapiens
tgtggggtgctgaatggcaatggcacaaagttctctcgatcagggcatacatctttcttcgacaaaggaatattgtgggtaatgctaggcctaaagaaac

SEQ ID NO: 799284 - DNA, 122 bp, Homo sapiens
gccttgtgtcaatggaggcacctgtcggcagactggtgacttcacttttgagtgcaactgccttccagattgtgaaacacctttacctaaaagacctgcttttctccctgatgaatgtaaag

SEQ ID NO: 799285 - DNA, 98 bp, Homo sapiens
caacccaagagcgctacaaggatggggtggtgaccatcggctgtgtgggtaagccaagatgggtgcatacaagtacatccaggagctatggagaaaga

SEQ ID NO: 799286 - DNA, 100 bp, Homo sapiens
tgagagggaaggaaacaagccagatcatggagctttgtggtgcaacaagacttggttattttggaagaagtcagttctacattgctttgaaacttgtagc

SEQ ID NO: 799287 - DNA, 98 bp, Homo sapiens
taattcatgaagaaggggctggatccgtgggtcagagaacacaggaccagtttgccatcccaaggccgaagatgttcctcctgctgatcaagagaagc

SEQ ID NO: 799288 - DNA, 100 bp, Homo sapiens
aggagttcatgtgggccctgaaaaacggagacttggatgaggtgaaagactatgtggccaagagaaacagcacccaggactatcttccaaagagttctgg

SEQ ID NO: 799289 - DNA, 100 bp, Homo sapiens
gcgcccggcgtgccgagcggcaacggggctccgggccctaagggacacaactcaaggctcagaacagcaggatccagcaactcttccacaaggtggccca

SEQ ID NO: 799290 - DNA, 100 bp, Homo sapiens
gctcagctggacatacagaaattgttgaatttttgttgcaacttggagtgccagtgaatgataaagacgatctcgtgtgggcgctcgtccacaaacactc

SEQ ID NO: 799291 - DNA, 101 bp, Homo sapiens
tttctcagactagtctgaaagggaaaacccccattcattctggattggtggatctgaagtacaaaatattttccaggtggaatgaatcttacttgttgaat

SEQ ID NO: 799292 - DNA, 99 bp, Homo sapiens
aggatgaaagcggtctggtggagctggagctgcggggttttggatacatgacgcagcaactgatgaacctggcaggaggcgcagtggtgctggccttgg

SEQ ID NO: 799293 - DNA, 100 bp, Homo sapiens
cctgagcaagcggaggacctacgccggcctggggggcagtacccaaaggaaacgctacgaaagaatacatggagagcttgcagctgaagcccggggaagt

SEQ ID NO: 799294 - DNA, 100 bp, Homo sapiens
gctaatgacaacaacatagagaatgcatctctttcaggcagcaactttggggaaacatgatgaaagtattgagggggcatcagaattgggtgtacagctg

SEQ ID NO: 799295 - DNA, 100 bp, Homo sapiens
cttggtggatgactacagcaatgatcgtactctatcatcacccccaacatcttgcggctggagagcgaggagaccatggtgctggaggcccacgacgcgc

SEQ ID NO: 799296 - DNA, 100 bp, Homo sapiens
gaagtccagagctgaggactgcctgtttgcagccctccagaatacccatcatatagcccctgaggtggcatggtgatgtctccatgagggaaccccttcc

SEQ ID NO: 799297 - DNA, 100 bp, Homo sapiens
accacgtccagcttcaccacgcggctgcacaactgcaggaacaccgtcacgctgctggaggagaatactctggagcagtgcaatgtgtgttccaagccca

SEQ ID NO: 799298 - DNA, 99 bp, Homo sapiens
cattgagcttgggtcaggacaattccatttggggaccagagatggacggtcactcagcctatggagcaatggaagagttaatagttgaacttcgtctct

SEQ ID NO: 799299 - DNA, 109 bp, Homo sapiens
tgcatcgagcgctgccatgtgcctctggctcaagcccaggctttggtcaccagtgagctggagaagttccagctgagtcatccaatggtggctattcctgaacatgaag

SEQ ID NO: 799300 - DNA, 100 bp, Homo sapiens
ggtgagggagatcgcgcaggatttcaaaaccgacctgaggtttcagagcgcagccatcggtgcgctgcagcaataccaacaagatggcttcccagagact

SEQ ID NO: 799301 - DNA, 100 bp, Homo sapiens
gccacctcccggcaatccgcttacttgcaatcaagggttcaggtgcaagcagatgctgactcagcctgttccattaagattcttcccctggaggctggag

SEQ ID NO: 799302 - DNA, 98 bp, Homo sapiens
gtgtgttgtgaaagtttggaaggtcagacctttttctccaagaaggacaagcccctgtttcgatcctttggtacagaagacagaccgacagatcgtcc

SEQ ID NO: 799303 - DNA, 100 bp, Homo sapiens
cagatcatcggtcaggccaagaagcatccgagcgaaatccaggatgagtcagctgtgttatggttggatgaaattcaaggtggaatctggcagtccaaca

SEQ ID NO: 799304 - DNA, 100 bp, Homo sapiens
ggaagcgatggcttcagacagcatatttgagtcatttccttcgtacccacagtgcttcatgagagtctccaaacgtccacaactatcccgatatggaagc

SEQ ID NO: 799305 - DNA, 51 bp, Homo sapiens
ggctggagcatctcttgataaaggtatttataacagcaatgatgtagcagt

SEQ ID NO: 799306 - DNA, 98 bp, Homo sapiens
cctcggcatcaccagtggcttcgtgaagcccaagctgggctcttgcagccaatgccggaacaggatttgctgttgctgagcctcaaatcgcaatgttt

SEQ ID NO: 799307 - DNA, 100 bp, Homo sapiens
gggaaagaaaacaatttctcctgctctgcagcttctgttcagcgcaaatctgtccaaggctgcctggggagcattggagaagaatggcacccagctgatg

SEQ ID NO: 799308 - DNA, 100 bp, Homo sapiens
ttagagtatgtgaagaaattagggacctcagcagccatgtcgaagccccatagtgaagccgggactgccttcattcagacccagcagctgcacgcagcca

SEQ ID NO: 799309 - DNA, 100 bp, Homo sapiens
ggcctaacctgccgacgctgagacagcgggtgctggagggccgcttccgcatccccttcttcatgtctcaagtaaaggcatgacttcctggcaccacagg

SEQ ID NO: 799310 - DNA, 98 bp, Homo sapiens
tacttcatcgtggtaggctatgaccacgagaagccaggtattgaaattgttggcggagatgagttcattttgtggtgacatggaaaaactagaaacaa

SEQ ID NO: 799311 - DNA, 100 bp, Homo sapiens
tttaaaatatgtccaacgccaaacaatcagtttatgatgggaggccggtattataacagaatggtagctgagtggaggttgtctcgaggtgttgaagaac

SEQ ID NO: 799312 - DNA, 100 bp, Homo sapiens
agaaaatgaatgccaaatgggacacgaccttcactgcctggtgtaactcccacctaaggaaagccggcacccagattgagaacatcgaggaagacttcag

SEQ ID NO: 799313 - DNA, 98 bp, Homo sapiens
tgcatgtaaacaagatttctgtaaagatcattttccatacgctgcacataagtgtccgtttgcattccagaaggtaagaatgattgatgttggctgat

SEQ ID NO: 799314 - DNA, 98 bp, Homo sapiens
cccatgaggacgtggaggtgggaaggtgtgtccggaggtttgcaggggtgcagtgtgtctggtcttatgagctctggacttattggacaaaatgttga

SEQ ID NO: 799315 - DNA, 100 bp, Homo sapiens
ctctgtctctaccgacatttctcttctaagagaagtagtaaaaccagctgcagtgttatcaaagatagtcagaacattatgcctttttctgactccagca

SEQ ID NO: 799316 - DNA, 111 bp, Homo sapiens
gctgcgagcggggacttcactgctctgctgtctcctgcaagaactggctcaagaaatttgcctcgaaaaccaaaggccacaagaggaagctgaatgaagaggacgccgcca

SEQ ID NO: 799317 - DNA, 100 bp, Homo sapiens
gatggattactgaaagttttgaaattagagacgcagacaggtgtctttcaggttgcagaaaagatggaaaaaaggacatgtgcactctgccccaaagatg

SEQ ID NO: 799318 - DNA, 100 bp, Homo sapiens
cttgattgtgacctctgtggaaaatgagccatgaaccaaccaataatggatgcactgagctgattatgaatttagccctgatgaagacttgtgttgctgt

SEQ ID NO: 799319 - DNA, 100 bp, Homo sapiens
actcgacagcctacctgcctggcagctatgggatctcgaggacctggaagaagcagaggagccagacatggaggaagacgatgatcagaaagctgtgaaa

SEQ ID NO: 799320 - DNA, 101 bp, Homo sapiens
cgacaggtgtgcaggtttcggcacatggagattgatgtgggagagttcagagcacacgctgctgagtggacagccaacgtcacagccgaattcaaagaaac

SEQ ID NO: 799321 - DNA, 98 bp, Homo sapiens
gggagcaatggttcacataaagaaaggcgagctgacccaggaggagaaggagctactggaagtcatcgggaaaggtgtgatgaatgcagactctgcta

SEQ ID NO: 799322 - DNA, 99 bp, Homo sapiens
ttcaacaagacctgcgggctgtgtggcaactttaacatctttgctgaagatgactttatgacccaagaaggtcttgggcgtctttggtactggcttttt

SEQ ID NO: 799323 - DNA, 99 bp, Homo sapiens
aagctcggagcgggagtagacagtggccggcagggcagccgggggacagctgtagtgaagaacattcctgatgtagatgaagaaggctacagtattaaa

SEQ ID NO: 799324 - DNA, 100 bp, Homo sapiens
aacaacaacaaatacttttattaattcggggagcctggtcaccaactggatgctcaggtaatctttagatggtggaagatctctctaaggagtgagtatc

SEQ ID NO: 799325 - DNA, 100 bp, Homo sapiens
ggagccccttgccaggagtgttcaagatgctctctctggaccgatcccactaaaatgagatcatcaccccaggaagatgtctgcactctcatgttctccc

SEQ ID NO: 799326 - DNA, 100 bp, Homo sapiens
cgacatttccacacccagacccaaagtttgcaacaatcagtcagtcgttccccatcaggaagtcctcgcagaagtgcaagtcctgaaagaatggactgaa

SEQ ID NO: 799327 - DNA, 100 bp, Homo sapiens
cagaactgctaaaggagagaagtttgtcatgcaggaggagttctcgctcttacagcactactttcagatgatagcaagtttggattcattgtaatagatg

SEQ ID NO: 799328 - DNA, 100 bp, Homo sapiens
cgccggctactgccgcttcagttctcccggtgtggccacgagtcggcctaatcacacggatgctacagagagatcccaagagaagggcttctttagaaga

SEQ ID NO: 799329 - DNA, 100 bp, Homo sapiens
tggaaattgtcacagataaatcacaagaagggtctcagtttgtgaaaggatttggtggaattggaggttgtgaactaaaggccgacaaagattatcactt

SEQ ID NO: 799330 - DNA, 99 bp, Homo sapiens
tcttcttcaaccccacaagtgttttgccaccctcagtagaaccgttctcaacacgcctgtcagtcactagctataggtaacctgtgtatggtgactgga

SEQ ID NO: 799331 - DNA, 130 bp, Homo sapiens
ttatatcctaaacttttcaagcctgaaggaaaggcagaactgcctgattacaggagctttaacaggtctcataacaacaaactgcagtctacagcttcttaaagttcagcgtgttaacctaacataaaac

SEQ ID NO: 799332 - DNA, 99 bp, Homo sapiens
ttttgtggccttagctacaggagaggcaatgatagtaagaaatgctaaagatacagctcatacaaaagcagaacggaatattctggaggaagtaaagca

SEQ ID NO: 799333 - DNA, 98 bp, Homo sapiens
atgattggccgaccgcaggagaagcccccagaaccaggcccccaactcagccatctgcggaggtcaagatcacaatgaggacctagggcatctgtctg

SEQ ID NO: 799334 - DNA, 99 bp, Homo sapiens
tacggccacagcagcgtggaggagctcttgggagcaattccacagaacccttaggagaaatcttgagagtggacagcaattgtgaagatcgccagagag

SEQ ID NO: 799335 - DNA, 100 bp, Homo sapiens
cagcggttcttttataccaagtccttcgtgaagcactccatggagcaaaatgatgcttcaacacccaggccaggtctctgcctcggaagtgagtgcttct

SEQ ID NO: 799336 - DNA, 100 bp, Homo sapiens
ttttgccagacattactacttcctaggcagaatgcttggaaagggaatccgagcccgcattttagagactttggtcatgcttcttcttcttgcgttactc

SEQ ID NO: 799337 - DNA, 99 bp, Homo sapiens
cctgatgtgtcctgcagatgagacaagaacaattatttctttggacacttcacaaatggacatggatttgattgacatactttggaggcaagatataga

SEQ ID NO: 799338 - DNA, 100 bp, Homo sapiens
gccatggccgccgccgatgccgaggttggaatgatggctcactgaaaactgaagatgacatggaagatgaaaagggagatgagaaagtcctgcccattaa

SEQ ID NO: 799339 - DNA, 100 bp, Homo sapiens
tcagagggaagatctttttcctcaattggtgtctgcaattgaactccaaggtgcagaatggtttggaaagtagctgtattcctcagtgtggccctgggca

SEQ ID NO: 799340 - DNA, 100 bp, Homo sapiens
gaaaaattgactgtatcctatgatgaagcagagcaacttatgactctcatctctgctgcacgagaatatgagatagagttcatctatgcgatctcacctg

SEQ ID NO: 799341 - DNA, 98 bp, Homo sapiens
gatcagcgacactatggcagtgtctggtatgcagagaaggagaagaaaaatcttagatacgtcagtggcatatgtgcggggagaagagaacttagcag

SEQ ID NO: 799342 - DNA, 99 bp, Homo sapiens
gcgtgtggtatgcggccttctatgccaagaagatggacaagcccatgctgaagcaggccggctctggcgtccacggtgctggagaatctggtaaaagca

SEQ ID NO: 799343 - DNA, 100 bp, Homo sapiens
gcttccaatgagtatggcagtgtcagctgtacagccacactaactgtgacagtgttgctgtggatgtatggtcgacgctggctgatttctgtaacatact

SEQ ID NO: 799344 - DNA, 51 bp, Homo sapiens
gatcgatctaagatggcgactgtcgaaccgtgaacagtgagagagttttct

SEQ ID NO: 799345 - DNA, 100 bp, Homo sapiens
ctcaattacacttcgactctcaaagcaataccaggatagctgttgtttcagagaaagagcccccctccatgcgcctgaaggcccgacccagcagccctgg

SEQ ID NO: 799346 - DNA, 100 bp, Homo sapiens
ttttcaaaaggagctatataaggaagtgctactggaaaacctcaggaacctagaatttctggtttctttctataacacaagcctgaacatattgctctcc

SEQ ID NO: 799347 - DNA, 98 bp, Homo sapiens
ggcaggcacttggagagaggctttatcctcgtgtacaagcaatgcaaccaggagaaattggctttacgatgaacatgttagacattggtggaggattc

SEQ ID NO: 799348 - DNA, 100 bp, Homo sapiens
gggcacagaaacacagcagcgggagcagcaacaccagcactgccaacagatatgggcacggttatgaaatattttgtgttacttgtaacagttcaaagac

SEQ ID NO: 799349 - DNA, 98 bp, Homo sapiens
tcccgtgatgagaagtcatggttcagggaaacggaattgtacaacactgtgatgctgaggcatgaaaatatcttagtgagaaagatcagtctaaagaa

SEQ ID NO: 799350 - DNA, 100 bp, Homo sapiens
gcggcgccgagaggccgtgcgggacgcgggcgccaggaccggccgaacgcagaggctccatgacaattcaaaaggtgaagggattgctgtcacgtcttct

SEQ ID NO: 799351 - DNA, 100 bp, Homo sapiens
aggcatcttattgatcctccagtcgagtgtgtcccggcatggatatccggaacaacctcactaggttgcatgagctggagaattgctctgtcatcgaagg

SEQ ID NO: 799352 - DNA, 101 bp, Homo sapiens
tgattgaggagctgcagctgtttgaccaggagcccatgagaagcctggtgctatctcagagcaagctcttagcttctgccagctatgatgacacagtgaag

SEQ ID NO: 799353 - DNA, 100 bp, Homo sapiens
atttgccagatctgcagagatcaaaacaagccctccaggaactcacgccatttcataattctgaatcatgtctgataacggagaactggaagataagcct

SEQ ID NO: 799354 - DNA, 99 bp, Homo sapiens
ggaaaccgggtctgctgcggaggaagctgatgagtttgatgcctacatcattgtgtctttcgtgaatgccaccctagtgttgtccattggagaaactgt

SEQ ID NO: 799355 - DNA, 99 bp, Homo sapiens
ctcgttggagcttgaacccattgtcacccctccggaggcagccatgcataaagacgagtttcatctgaaatttttcatgtgtgtgattcagtctcgcca

SEQ ID NO: 799356 - DNA, 100 bp, Homo sapiens
aacgcaagcatgagggcttcgagagggaccttgcggctctcggtgacaagcagtacctgacacgtccacttaccagtatgatgaatcttcaggatattac

SEQ ID NO: 799357 - DNA, 98 bp, Homo sapiens
ggtacggtttggacggcgctgtggacgggcgaaggaaagtacaggctgtgtggttccgggtgctggtgctgtggaagtggcaatggcagaagccctga

SEQ ID NO: 799358 - DNA, 100 bp, Homo sapiens
tatgccatccctgaggacatcatgcgaggcagtggcacccagagtgatcagcagctggactgtgccttggacctaatgaggcgcctgcctccccagcaaa

SEQ ID NO: 799359 - DNA, 101 bp, Homo sapiens
accgaggccaaatcccaggtctgcagagggtaaacagacggagtttatcatcaccgcggaaatactgagaggtgaagctggtccccaagggccccgaggct

SEQ ID NO: 799360 - DNA, 98 bp, Homo sapiens
attaaacttctcaatgaaactagagacatgttggaaagtttcacaaccaaagaggagctggggaagacagtgcctcagctactgactcctgggctgat

SEQ ID NO: 799361 - DNA, 100 bp, Homo sapiens
atgaagaaaaacaaattccgcgtggtaatattccaggtgggatagtaacatctttttgagggaagaattggcttcctttcttgaaagtggtgaaggtaca

SEQ ID NO: 799362 - DNA, 100 bp, Homo sapiens
atatctgagattatatgaagcagttattgatgctaagaaacttttatctgagctttctaaccctgaaatttctgtggtgaaaacaggaatgagaacgagg

SEQ ID NO: 799363 - DNA, 100 bp, Homo sapiens
ggcgggctgccggctgtgcgggcgctccggagagaccgacagaagagatcttgatgacaagctacttatgaggcctgggtccagtaccatcctttcaact

SEQ ID NO: 799364 - DNA, 98 bp, Homo sapiens
gttctgcagatatgaccattaaactatgggattttcagggctttgaatgcatcagaaccatgcacgggctagtgaatgttcccgaggaacccattgaa

SEQ ID NO: 799365 - DNA, 100 bp, Homo sapiens
caggcagacttcctagtgtgtactttttcatcccagggatccagattagatgatcaaagatgtgctccaccacctgctaccacaaagggtccgacagtac

SEQ ID NO: 799366 - DNA, 98 bp, Homo sapiens
ttctcccggaagtcaccattggagctcatcagactgaccgtgtcttacatcagttcagagagggaagtcgagacaacatgagtgtgattttgatctgt

SEQ ID NO: 799367 - DNA, 100 bp, Homo sapiens
atttagaaggaggttcaggctacggaaaccgcctgtacgtccacccggactcccccaacacaggagcgcactggatgcgccaggaagtttcatttgggaa

SEQ ID NO: 799368 - DNA, 100 bp, Homo sapiens
cttcattgagcgcctggagatggaacaggcccagaaggccaagaacccccaggagcagaagtccttcttcgccaaatacctcgggttcatgacgctctcg

SEQ ID NO: 799369 - DNA, 99 bp, Homo sapiens
agggatgtgctctccgcggtgctttccggcatggggaccgcctacccacagaagtgaaatttgtctgtcaaactccagcaattgctgacattgtaatcc

SEQ ID NO: 799370 - DNA, 98 bp, Homo sapiens
gacagagctgagggagcaagaggtgtcggaggtctcatctttgaactactgccggagcttctgccagcttgcaaaccatactgggtacatcaaagttg

SEQ ID NO: 799371 - DNA, 100 bp, Homo sapiens
tggcattcctcagggaatactttgagaggttggagaagaaatcttacaggctggtgttaaaggaacttcggaatcccttaaaggtgtgaaacgcaaaaag

SEQ ID NO: 799372 - DNA, 98 bp, Homo sapiens
acgcacggtgccaggaccaagtatctgggagagatgacatgctggacgtggagaccgatgcctacatccactgcgtcagtgccttcgtcaagctggcg

SEQ ID NO: 799373 - DNA, 100 bp, Homo sapiens
gaatgtcatccagcgagtgattagccagattctcctgaatataaagccgcttgcaaactctgggatttgtaccttcgaacaagaaatgagtttgttcaga

SEQ ID NO: 799374 - DNA, 100 bp, Homo sapiens
cggcggggtccgggccggagtacgtcgttcccgctgcgctaggggaagcgggcagaagaagtaccgtcagcatccagatgctttgaagtttaccagtatt

SEQ ID NO: 799375 - DNA, 100 bp, Homo sapiens
attttctattgtgccagacctgacgaagagccttttgtgaagccttgaaaagatcttttgaggtcgaggaggtcgagacacccaactccaccccaccccg

SEQ ID NO: 799376 - DNA, 99 bp, Homo sapiens
gaagacatcacatccagtgcacagttgaatccttggcctgaatatatttacacacgtcttgagatgtataatatactaaaagcagaacatgattccatt

SEQ ID NO: 799377 - DNA, 100 bp, Homo sapiens
attagatttaatctcacatatgttagggaaatttacctaaatattctcataactccctgatggttcaagcaataaagacaaacctaacagacccggacat

SEQ ID NO: 799378 - DNA, 100 bp, Homo sapiens
tgcaacaacctcttgaggatcgaatcttcactcccgctgtctcagcagtctacagcacgagtctcactctgttgtcacccaggctggagtccagtggcag

SEQ ID NO: 799379 - DNA, 100 bp, Homo sapiens
gggagagagaatgagccagagggacacgctggtgcatctgtttgccggaggccacagcgtcctgtgtttactcatgaaaatattcaaggtgggggggaac

SEQ ID NO: 799380 - DNA, 98 bp, Homo sapiens
aagaagcaaattgagttgaagtctcgaggtgtgaagctgatgcccagcaaagacaacagccagaagacgtctgtgtctgcgggcgcttacctgccccc

SEQ ID NO: 799381 - DNA, 100 bp, Homo sapiens
ctagataacagtctgcactttcacccgtttcagttgagccccatatgggggttggcaggcagcagagaggcccctttcaaggtgttcgggtaaagaactc

SEQ ID NO: 799382 - DNA, 98 bp, Homo sapiens
ctgtgtgctgctttcgagaagaaaggagctgggactgaagagcaccccaagatctggctacctcgggccctgaggcagacctacatccggaaggttgg

SEQ ID NO: 799383 - DNA, 100 bp, Homo sapiens
cgggaactgctgacgcttgatgagaaggacccacggcgtctgttcgaagggatactacatcaacctcgctaacgcctgaggacactgaagacatgcccgt

SEQ ID NO: 799384 - DNA, 100 bp, Homo sapiens
gaatgatcatcaaacagctatggtgatgattagagacatactaatgtacatgaaagctgtctgccaaggagaaggagacgacacatttgaaaacctagta

SEQ ID NO: 799385 - DNA, 100 bp, Homo sapiens
gccaacctatgttgccctgagttacataaatagtgtatgtggtagaagaccaaagaagagatgagctaggaccatccacctgcctcacagcctgctggac

SEQ ID NO: 799386 - DNA, 98 bp, Homo sapiens
tggatgaaaactgggctgaaggaatgctggcagacaaaataggaatatttccaatttcatatgttgaggtgtctggaaatgaagtatggaaatgaaat

SEQ ID NO: 799387 - DNA, 100 bp, Homo sapiens
ctccatgcaataaacagttcctgagtcaatttgaaatgcagtccaggaaaagccagtacacaacaggccggggctcctcaggagtggggcttacggcagc

SEQ ID NO: 799388 - DNA, 100 bp, Homo sapiens
ctgcctatatgctgtggaaatgaacggggagcagcagcttgatgcagaaaagcagcatctgttatagcaaaatacccacacaaaataaagagtggagctg

SEQ ID NO: 799389 - DNA, 100 bp, Homo sapiens
atttctaagtactttctcctactccataaagacttcaagtcttcaatgaaatttatccagtatggacttactcttacctggtgctactgtttcctgtgtt

SEQ ID NO: 799390 - DNA, 124 bp, Homo sapiens
agcagctgtggccctccacccggaatctttcttcagcaaactctataaagttcctcttgacaccacggaataccctgctgtcaccactgactaaagaagagaaaactgcggcagagcaattcaa

SEQ ID NO: 799391 - DNA, 99 bp, Homo sapiens
gcggcgggggacaagtcggcgccccagagcggacgagatgttttactgtgcctggctaactatagtcgagggggtgatggtcctatgtgtcgcccagta

SEQ ID NO: 799392 - DNA, 100 bp, Homo sapiens
attgcattgctgggcgtctggacatctgtagctgtcgtttggtttgatcttgttgactatgaggaagttctaggcatctcgtccccggtgaagaagacag

SEQ ID NO: 799393 - DNA, 98 bp, Homo sapiens
gaccatcctgctctcaactacaacatcgtttcagggctgggagtcctccgtcagcatcagctccggctccggtgtcctccttctctcgcacttctatc

SEQ ID NO: 799394 - DNA, 100 bp, Homo sapiens
agatgctacactcaggcaccctggtgcccagccgggaactccccatcgcgttttgccagcgataatacgcctcaggtatgataagtattatcagcaacat

SEQ ID NO: 799395 - DNA, 100 bp, Homo sapiens
ataggagcaaccctgtaaaaccagccttagactatttttcaaacaggtcctgatgaagaagctgttgtggatcttggcaaaactagctcaactgtgaaca

SEQ ID NO: 799396 - DNA, 98 bp, Homo sapiens
cccggaggagcagctcctgcccctgtccgggggatgactgattctcctccgccagactttgggtcacttggaaaaagcagtggttcttgaacttacct

SEQ ID NO: 799397 - DNA, 100 bp, Homo sapiens
cctgcagagcgcgcagtacctccgagagaagaagaaggaggttcctgctgtgccagaaacccttaagaaaaagcgaaggaatttcgcagagctgaagatc

SEQ ID NO: 799398 - DNA, 99 bp, Homo sapiens
tgtggcctctgcagaagcaccgtcacccatggggcaggacttaccgagaaggcaaattggccagtgaagtgcgccacaagcaaaccagctttctttgca

SEQ ID NO: 799399 - DNA, 100 bp, Homo sapiens
gccgtcggagcacttactggagtccaagatgctaatgaaatcagtgtttactgcagagaacacagaagccagcaagcagcagggaagggaggcgaaccaa

SEQ ID NO: 799400 - DNA, 100 bp, Homo sapiens
cggcagtcggctgccctggaccctgctgactggccagatggttcttacccaacgtttgatggctcatcaaactgcaatggaatgcagagagcaaccaatg

SEQ ID NO: 799401 - DNA, 100 bp, Homo sapiens
acctcatggctggaagaaaactgtgacacagcccagcagtctcagtgcccagaagggttgcagtgtaggattttggaagtcctccctccatcacatcaaa

SEQ ID NO: 799402 - DNA, 100 bp, Homo sapiens
cacaactcatggcaccgtgcacgtggtcgtcaacaaccagagttaaacatgaagtttctggagagacagtggtatttcaagggggagctcttggcaaaac

SEQ ID NO: 799403 - DNA, 100 bp, Homo sapiens
ctggtttctacagggattatgacattccatttactcaggtctggaacaaaaagaatgcaaatgaaaaaggaagaagccagacttctaagcttcctccaag

SEQ ID NO: 799404 - DNA, 98 bp, Homo sapiens
ctgtccctcatttcagattattgccgctccgacccatagcacgctgcctactgcacacacatgggaaccattggaggataaactgagaaatggcccag

SEQ ID NO: 799405 - DNA, 100 bp, Homo sapiens
ctgccctggcacccagcacaatgaagatcaagagctggaagtcgagtgtgctactcaactcaggagatttggagacaaactgaacttccggcagaaactt

SEQ ID NO: 799406 - DNA, 98 bp, Homo sapiens
aggatcgctactattcaggactaatctatccaaaatgaagtttaatccctttgtgacttccgaccgaagcaagaatcgcaaaaggcatttcaatgcac

SEQ ID NO: 799407 - DNA, 99 bp, Homo sapiens
ctaaacaggagcacctgctggcgctaaaagatatcacaatttctggctgtagtctctttattattttcacatcagctgtcttccttaggcttggcgtgg

SEQ ID NO: 799408 - DNA, 100 bp, Homo sapiens
gccgcagcagcagcggcagtcacaggcacatcagcaaagagggccaacattgcctagacaaaactcacaactacctgctcaagttcaaaatggcccatcc

SEQ ID NO: 799409 - DNA, 100 bp, Homo sapiens
cccatcccccaggagggagacgtcatctttactactaacagccaaagcttacttgaggattgctgtggaagtggtaagaagattgccatcaccttcagaa

SEQ ID NO: 799410 - DNA, 98 bp, Homo sapiens
tctctgggagggcgctgctttccccggccacccggcgcgatgatccagaatgtcggaaatcacctgcgacgggagccaagttacaccctgtttaaccc

SEQ ID NO: 799411 - DNA, 100 bp, Homo sapiens
tgtcaagacaacagtgatgaggaaagctgtgaaagttctcaaggttttgcacactagggaccaagaagccctcggggacactgctgagaaaagactgccg

SEQ ID NO: 799412 - DNA, 100 bp, Homo sapiens
ttctatgatcaggcagttgtcagggtgtgtttgaccatcgaatgaagtgctggcagaaatgggaagatgctcaaattactttgctcaaaaaacgtgaagc

SEQ ID NO: 799413 - DNA, 100 bp, Homo sapiens
acaaacgagaagaagctatccagaatttcaaagctcttctgtctgacatggttatcaatactctggctgaccatcatcatcgtgggactgactttggtgg

SEQ ID NO: 799414 - DNA, 100 bp, Homo sapiens
tttacatctttgccaagaagaacgacattcccttcgagctgcgcatcgtggatctgattaaagacacgaccgacttccaggagagctttgtcacctccgg

SEQ ID NO: 799415 - DNA, 99 bp, Homo sapiens
tttgatactgacctgtaaatcatcctttaggtgtggccgacgacgatgccctcgctgaggagcgcatgcggagaggccagaacgccctgccagcccagc

SEQ ID NO: 799416 - DNA, 100 bp, Homo sapiens
tatcttttaagaggttatcttaggtcttgcgtggagtctaggatgatagcactgatggtggcagctggagtcttttgtgcaattgtttctcaccctgctg

SEQ ID NO: 799417 - DNA, 100 bp, Homo sapiens
gagaaagtcatcgatggcaccccctgtgaccagaacggcacggccatctgtgtgtctgggcagtgcaagctagccacagtgcagcctggccagaatttcc

SEQ ID NO: 799418 - DNA, 100 bp, Homo sapiens
cgcagcttgggaggtgctgccaccacagtgctgattcctaaagaaaagcccccaatcacggttgtgggtgatgttggaggaaggattgccatcatcgtgg

SEQ ID NO: 799419 - DNA, 100 bp, Homo sapiens
acgacttcgaccctgcccagcacgaccagctcatgcagatcatcagccatgacacccggcgcttccgctttgccctgccgtcaccccagcacatcctggg

SEQ ID NO: 799420 - DNA, 100 bp, Homo sapiens
gtccacctttctcttcatgtcgacgtccctggaaacggccacacggatgccatggttacttttgccacgggggattcccgaagtcttccgttttctgaga

SEQ ID NO: 799421 - DNA, 100 bp, Homo sapiens
cagcagtatgacaccttccacaatggcagctgggtccacctcaccatcaacggctaaaataaatgaagctgtagaatgcttactgtccctgaaggctcag

SEQ ID NO: 799422 - DNA, 99 bp, Homo sapiens
ttaacacctctgaaattgaggaagaagaggggcccagctggagtaagagcccaggccctggatagagatggaaatctggtagaagattttgtatttgat

SEQ ID NO: 799423 - DNA, 100 bp, Homo sapiens
ggagtgaacaaaagctatctctacttgtctcctagtggaaattcatctccacccggatcacctactcttcagaaatttgaaaagtcctccatacattttc

SEQ ID NO: 799424 - DNA, 99 bp, Homo sapiens
tataaccggagattctcagggcaacccagatctgatccagagctggtgcggaacatctgccgctgggttaggcaagctgttcagattcctttttttgcc

SEQ ID NO: 799425 - DNA, 99 bp, Homo sapiens
gcgactgagtactcaacatattgactgtatttgggctgcagcacagtcgagcaaaagatgtgataataccagcaaagccacctgtcagctttttctcct

SEQ ID NO: 799426 - DNA, 100 bp, Homo sapiens
ggaactcagagtcaaagaagaaaccgtgctcagaaactagccagattgaagtgatggaatggggagaagatattaaagcagtttcaaaagatgaagcagt

SEQ ID NO: 799427 - DNA, 100 bp, Homo sapiens
tgggcgagagatcatccagcccaccgtagtggatcccgtcagcttcatgttctggaagctggttcccttcttgccaagcaacataccccatgctctggag

SEQ ID NO: 799428 - DNA, 100 bp, Homo sapiens
tgtcccttcttccacatgaaaaggataaggcagacagtccagaagacatgcacagctggattaaggagattggcgcagctgtccaggccctcaagtgcca

SEQ ID NO: 799429 - DNA, 100 bp, Homo sapiens
caatccaaaagagtctcaaggatccttcaaataacttcaggtcggtggtggggagcggcagctggcagagagtcaacgcccagacggctgtgagatcccc

SEQ ID NO: 799430 - DNA, 115 bp, Homo sapiens
acagattactttgtgattgttagtggaacttctacccgacacttacatgccatggccttctacgttgtgaaaatgtttgtgaagaaatatgggaacctttttagcttggagcttg

SEQ ID NO: 799431 - DNA, 100 bp, Homo sapiens
tctgctgcggcgcggggaccgctgtgctctcgagatgtcgccacaatgaatgagcagggcttctgcaagatcgtgggccgctctaaggatatgatcatcc

SEQ ID NO: 799432 - DNA, 100 bp, Homo sapiens
gtactggaaacccacaggcacacccaaattccctataaggagcccctgctggtgcaccagaactaccgggggccatctgcccaactgccccagactctgg

SEQ ID NO: 799433 - DNA, 100 bp, Homo sapiens
cttgaaagtgaccccagaggagtttgctgttcgatctggggctaatgttctaatttgtggtccaaatggctgcggaaagagttcacttttccgtgttctt

SEQ ID NO: 799434 - DNA, 108 bp, Homo sapiens
caagcaattaatcccaagttgcttcagttggtcgaagacagaggttcaggacttaaagagagatctacttcagagccagcagtcccgccagaagaggctgagccacac

SEQ ID NO: 799435 - DNA, 98 bp, Homo sapiens
tgctttccccggccacccggcgcgatgatccagaatgtcggaaatcacctgcgacgggtggtgctgtgggtcggcctgggcgtcctggtggtgagcac

SEQ ID NO: 799436 - DNA, 75 bp, Homo sapiens
actttacatcacactctgcatagcttttgccttatgaacagtcctctcttttggaactcataaagactgaaaaca

SEQ ID NO: 799437 - DNA, 99 bp, Homo sapiens
gaccggagctgttcctgttcggccatcttggctcctccctgccagatagctcttattttgaggaattgaatgatctggcacgggaccctccagcacagt

SEQ ID NO: 799438 - DNA, 98 bp, Homo sapiens
gaactatggcaacatcaggtgactgtcccagaagtgaatcgcaggtgctgcgacaagagactttggacaaaaattgacttgagtaggtgtaaggccat

SEQ ID NO: 799439 - DNA, 99 bp, Homo sapiens
ggggaacagggtcacagctctcacccagggagaagaagagtttgatatgcctcagcctccacatggccatgtcttacatcgtcacatgagaacaatccg

SEQ ID NO: 799440 - DNA, 100 bp, Homo sapiens
agttacttagaagaaagaaaaccttacagcagcaggctagaaaaggatgactcaactgactttaaaaagcactccagttctcgcctgaattaccaaagca

SEQ ID NO: 799441 - DNA, 100 bp, Homo sapiens
gttagagaagaattttccaaatgaatttgcaaaacttactgtagaagtcagaggtcccagaagagtcagctcaaaaaaatacctttgtcagttattgaag

SEQ ID NO: 799442 - DNA, 100 bp, Homo sapiens
ccgagaccacagccaccactattctagcatccgtgaaggagcaggagattacctggggcaattgatgttatcggtcagactataactatcagccgagtag

SEQ ID NO: 799443 - DNA, 98 bp, Homo sapiens
cacactcctggaactgtacacctattggaacccttaagacgttatcaggactaccagaccaagacaccttctacgacgtcgtggactgcctggaggag

SEQ ID NO: 799444 - DNA, 99 bp, Homo sapiens
gcagttgagaaagaatttgagcctctgctgaattggatgaaagataaagcccttaaggacaaggttgacagtgctgtgggaacactccctgcaacaagt

SEQ ID NO: 799445 - DNA, 99 bp, Homo sapiens
tgagggtgccgaaccagatctaatcaggctgtcggctggcctgctgcgtcaggccacctacaccactacccgccttggcatctataccgtgctgtttga

SEQ ID NO: 799446 - DNA, 100 bp, Homo sapiens
cttcagatggaatggtaggtgggggtcctcctgcaccgcacatgcagaaccagatgaacggccagatgcctggagaggcagatgcgaaccagaacaatgg

SEQ ID NO: 799447 - DNA, 102 bp, Homo sapiens
tgcctggaaaggaagtaccaggacttgcacaggatcaggggggtttgggtattgctatcagcgaagaagatacactcagtggagtcatcataaagagcttaa

SEQ ID NO: 799448 - DNA, 99 bp, Homo sapiens
tcaccaaggagctagccctgggccaggaccggaaagttcacatccttggctccttccaaaatatcaagatggcaagaactgccatttgcaacctaatct

SEQ ID NO: 799449 - DNA, 98 bp, Homo sapiens
aagaagaaacgaattagtaaacagtgcaagttgatgcgtcttccatttgcaaggaaaggccgagggggacggcaagatgcacatcaccctctgtgact

SEQ ID NO: 799450 - DNA, 100 bp, Homo sapiens
tgcttcacctgctcctgctgctgcctttacaagacgtgccgccgaccacgtcctcttcctaaggaatggaagcccagactgcctgggaggcaggagacct

SEQ ID NO: 799451 - DNA, 100 bp, Homo sapiens
caggacgtgaaggggaagaggcccaccctggagtaaccctcactggagaatccagagagcagcccgacggccatggaggctgaagagacgatggaatgcc

SEQ ID NO: 799452 - DNA, 99 bp, Homo sapiens
gaagatgaccaaaaacaaagggctggatgtttgcaattggactgatggggatgagatgcaggacgtgagcagcaacgagctccaatccctgccctcgga

SEQ ID NO: 799453 - DNA, 98 bp, Homo sapiens
ttttctccagccgagaggacgcggctgtgatatacgaagatttcctccttcttcacccctgaaaccatatccaaagaagcccccaaaccaaaaggatg

SEQ ID NO: 799454 - DNA, 100 bp, Homo sapiens
attttgcagagcatcccccaaagacagattgaagaaatgcagagacaggtggaaaaggattattcatacctgaaggagatatgtgatcaccaagccgaac

SEQ ID NO: 799455 - DNA, 99 bp, Homo sapiens
ttacatatgaccaaaggactcgccctctgggaggcttaccgagagtttgaaagtgcgattgtggaagctgctcgggtggggtggaagacaacccgtgag

SEQ ID NO: 799456 - DNA, 98 bp, Homo sapiens
gcctcagcaacctgacaattctgtcgtgtcccggtgctggagaatctggtaaaagcaccattgtgaagcagatgaggatcctgcatgttaatgggttt

SEQ ID NO: 799457 - DNA, 100 bp, Homo sapiens
gcttgacacagctataagtgctgtaaagctggaatagtcaaatgatttcagttcgtgaagccaaagccattccaaggcctgatggtattgaatggagaaa

SEQ ID NO: 799458 - DNA, 100 bp, Homo sapiens
aggagataaagcattacagatcctgagacgcattgctaagtgcaatgggaaatacctctcatcaaattactcagagtggaagacttataaccctgccttc

SEQ ID NO: 799459 - DNA, 100 bp, Homo sapiens
ccttcccaatggcaactatgtttggatgttggatctacactttctcaagcactgtgatcttcaaatgatgcattcagtctactagcatattcagatccct

SEQ ID NO: 799460 - DNA, 100 bp, Homo sapiens
agtggaacgtgtactaccgcaactgaaagtcacgattaggactgacaataaggaatcctgttcacgatgctggtatttggaccagcctgcgggtttatcc

SEQ ID NO: 799461 - DNA, 105 bp, Homo sapiens
aataccaggacctgctcaatgtcaagatggctctggatatagagatagccgcttacagagattaagaattcagtgtccagcagatcagcagctgaaaaggaagat

SEQ ID NO: 799462 - DNA, 100 bp, Homo sapiens
agtgcctgcaggatgtgagggagtgatgatcaggagaaacagtccaagaagaaacctcgcctcttctgtgacatttgtgactgctttgatctccacgaca

SEQ ID NO: 799463 - DNA, 99 bp, Homo sapiens
cgctttggagaactacatcaaccgtaggtgcacgtctcatcgcacatgctggcagcctcaccaacctggccaagtatccagcatccacagtgcagatcc

SEQ ID NO: 799464 - DNA, 98 bp, Homo sapiens
ggctctgaccaaccagaacctgtctgtggatgtggtggaccagtgcctcgtctgcctcaaggaggagtggatgaaatcctccaggtcctattgacaat

SEQ ID NO: 799465 - DNA, 99 bp, Homo sapiens
gttcctcaggtgcctgctcttccccgtgagggaagcccaggagaccaggcagctgcgctcttgacagccaggtaccagaacctaggtccctctgtcctg

SEQ ID NO: 799466 - DNA, 100 bp, Homo sapiens
tggctacttgccattctcacaggactaatagctggcaaatttctgttccatcagcgtttgtttggtttctaagcatgaattgaggaacagaagaagcaga

SEQ ID NO: 799467 - DNA, 100 bp, Homo sapiens
gcaagaccagaaggggggctttcgcagctccttccgcaagctctttaaaaagaagtggcacaagaatggctcaactctccaaatagagagaatttctatc

SEQ ID NO: 799468 - DNA, 98 bp, Homo sapiens
agaaggcttttgcttcaagagtagataaatccacacagactgaactactatgctatgatgctggcaaacattcagcagcacaccctctcaagattgtt

SEQ ID NO: 799469 - DNA, 98 bp, Homo sapiens
gtccctggagcggcagctcagcgacatcgaggagcgccacaaccacgacctcagcagctaccaggtacatccagacactgaaggaccacaggccccgg

SEQ ID NO: 799470 - DNA, 99 bp, Homo sapiens
tcggccgtgcagacctcctgtgtgccctgttcttcttgttatctttccttggctactgtaaagcatttagagaaaagtgagataattcgagataatact

SEQ ID NO: 799471 - DNA, 98 bp, Homo sapiens
ctcatctcagatctggagcatcggctgcaggggtcagtgatggagctgcttcagaaattccgggatttctttaatcaaaatgaaaccagtgatccagc

SEQ ID NO: 799472 - DNA, 100 bp, Homo sapiens
gcctcttggtttgcgtcctgcactgaaaggaaatgacggattttgcacagtgaaggtgaagagttctaacatccaagttggagaccttatcatcgttgaa

SEQ ID NO: 799473 - DNA, 100 bp, Homo sapiens
gccggattcaccgtttggctcgatattataagaccaagcgagtcctccctcccaattggaaatatggtatgttcaagccacttgtgcaacacaaggaact

SEQ ID NO: 799474 - DNA, 100 bp, Homo sapiens
tttactcgaattgctgtggatgaagttcactgctgtagtcagtggggacatgatttcagacctgaaactggcaagatgtttacctggggccgagcagact

SEQ ID NO: 799475 - DNA, 100 bp, Homo sapiens
ggcgagaaggtcgaggagtgccagaggtttgcgaaacagtacatcaacgccatcaaggactactgttcgaagatttttggaagaatactgagaacggcat

SEQ ID NO: 799476 - DNA, 100 bp, Homo sapiens
gatacatttggtcctggagatgatgatgaaattcagtttgatgacattggagatgatgatgaagatattgatgacgtaacacgtacacagacctctcggc

SEQ ID NO: 799477 - DNA, 100 bp, Homo sapiens
catgtccagcatgaatcccgaatacaagagcctcctgatctagcagccaagactccccctgacctttggccatgtaccccaaccctctcatctactgcac

SEQ ID NO: 799478 - DNA, 98 bp, Homo sapiens
gaggcttatctgaggccaaacccgccactccagaaatccaggagattgttgataagaaagtgaagtcactgcttttgctgtcttggatcaagaccaga

SEQ ID NO: 799479 - DNA, 126 bp, Homo sapiens
gtgttttgagtttctgactggcgtgccggaaagatcatgttagcacacccagaaacttcacacgatgcagaccccagatcaaacagatgatggaggcagcaacacgacaaatcgaggagaggaaaa

SEQ ID NO: 799480 - DNA, 100 bp, Homo sapiens
ggtttagctgcattgtcattttctatcagttctctgaccttgattggaatgttggcagctataacttacacagggttattatcgtccccagtgctggtgt

SEQ ID NO: 799481 - DNA, 75 bp, Homo sapiens
agcggccaaggccacggtgtttctcttcaagaagcccagccccttcatcttcatcagccagcgtccctccccaga

SEQ ID NO: 799482 - DNA, 140 bp, Homo sapiens
ccagaggtggaggggaggattttgaggacacttgtggagagctcgaattccagaatgatgaaattgtgtgctgctacccccgtatgatgatgccactgtgaatggtgctgccaaggagccaccgccaccttacgtgtctg

SEQ ID NO: 799483 - DNA, 100 bp, Homo sapiens
gcatgttggacgatatctaatattacagctggaaatagggcacagatccagtggtatcctgaggtgcggcaccactgtcccaacactcccatcatcctag

SEQ ID NO: 799484 - DNA, 50 bp, Homo sapiens
ctcctcactcgcctccgcgcagagagccccctgatgctgaacgacagtgg

SEQ ID NO: 799485 - DNA, 100 bp, Homo sapiens
ttcaactagcctgcaaagagagagatgctgctaaaaagctgcacagttggggatcttcaaaccaagatagatggcttggaaaagactaactcaaagcttc

SEQ ID NO: 799486 - DNA, 98 bp, Homo sapiens
ctacgctgaggctctccgctcagatatatgcaagttgccgaaagacgaaggaacttgcagggatttcatattaaaatggtactatgatccaaacacca

SEQ ID NO: 799487 - DNA, 98 bp, Homo sapiens
gagacaagctgagcttgccgcacaaaaagctagagaggccaaagcctcactgtttcaattgtggttctgaagaacaccaaatgaaagattgcccaatg

SEQ ID NO: 799488 - DNA, 98 bp, Homo sapiens
aatgaggttcgagacatgtgttcttttgacaacgaacagctcttcaccatgaaatggatagatgaggaaggcttttaaagaagcagttttttcaccga

SEQ ID NO: 799489 - DNA, 99 bp, Homo sapiens
tcagaagcatgtgtcttccccagctctgcagccacatactatccgtttgttcaggaaccaccagtgacagagtgcccaacgctctgggagagccccagg

SEQ ID NO: 799490 - DNA, 130 bp, Homo sapiens
aaacacaacctggaggaggaggagccggaggactatgagctgctgcagattctctcagatgaccggaaattcaaggaagccttctccctatttgataaagatggcgatggcaccatcacaacaaaggaac

SEQ ID NO: 799491 - DNA, 99 bp, Homo sapiens
gaaggcagagcgtgtggcatctccacctcaaggcgagtaaccagctcataaatcacatcgaacagtttttggatactaatgaaacaccgtattttatga

SEQ ID NO: 799492 - DNA, 100 bp, Homo sapiens
gctcttccctggctgggctggcggaggccttgctgatgaacctgactgagaaaaactgcttaaggttgaaaagagaaatttaagaaattgctgacggaat

SEQ ID NO: 799493 - DNA, 98 bp, Homo sapiens
gctcgtctgcctggactgttgcgggccccgggacctgggctgggaacccgcggtggagcgggacacgaacgtgctgtttgcagacaaggtcccaaaga

SEQ ID NO: 799494 - DNA, 100 bp, Homo sapiens
agtggcacctgcgcgaagctggccaaagcctgcccagacggctcacctgtgcgggatggaacaaaaggtggacccccaaaagtacaagggcatatttaac

SEQ ID NO: 799495 - DNA, 99 bp, Homo sapiens
tttttcccccggacttggaaagtcacccaaagccgccccaagtgcaggtgaaaggtgtagcagtcactcggcctacacccacagcatcgaccttgtgaa

SEQ ID NO: 799496 - DNA, 100 bp, Homo sapiens
agaaagcggcttatcgaacagagccgggagttcaagaagaacactccagaggctgggatatgaagaacaacagcctgaggttccaattctttatcatgat

SEQ ID NO: 799497 - DNA, 98 bp, Homo sapiens
cgaactcagggcattaaactcttgaaaaccatacgtttcaggagacggcagcgaggctaccttgcatggtgtggtggacgagctggtgcggttccggc

SEQ ID NO: 799498 - DNA, 100 bp, Homo sapiens
tggtggtgtcccacctttttgggaaggacacagcattgttggttttgccatgtactattttacctatgacccgtggattggcaagttattgtatcttgag

SEQ ID NO: 799499 - DNA, 99 bp, Homo sapiens
tggctactatggaaggcgccgtggccctccccggaataaatttgcctgtaatggtactgtgattgaacatcctgaatacggagaggttattcagcttca

SEQ ID NO: 799500 - DNA, 98 bp, Homo sapiens
aaaaagacagagaaactatgggacacagatatgttgaaggcatccagggcattgtggatgcctaccgccaagccctgccccaagttcgcctctatggc

SEQ ID NO: 799501 - DNA, 100 bp, Homo sapiens
tgtgcttggtgtcgtttttccttgagctgaacgtcttgcaacagtggccgcacgcatagacaggggcaagtgtccgagtggtgaatcagctacttacaga

SEQ ID NO: 799502 - DNA, 144 bp, Homo sapiens
ccagccgcgaggtggccaagggcctgctgcgggagctcctgccgcccgccgctggcttcaagtgcaagaaccttctgaggaaaggaggccatacagaaattgaacctcagcacttctgtcaagctttccacagagagaatgata

SEQ ID NO: 799503 - DNA, 99 bp, Homo sapiens
aaaatgatacctggaggcttatctgaggccaaacccgccactccagaaatccaggagattgttgataaggcaacttcagagtggacgttggattacccc

SEQ ID NO: 799504 - DNA, 99 bp, Homo sapiens
aagaagataactatccaaatagtctatgtataaaagtaaatgggaagctatttcctttgcctagtgaagatagtccaagtcctaagagacagcgcctct

SEQ ID NO: 799505 - DNA, 100 bp, Homo sapiens
ccggagcagccccagcagcagcattgaggtggaggtgcagattcactttataggaacagcttcagcttcagtgatgaaaaactgaattctccaacagact

SEQ ID NO: 799506 - DNA, 100 bp, Homo sapiens
gcttctttcttctggcatcattaacggaccttttaccatgaatagttctactccttctacagatttgaacatggaattcaatccttcagatcatcctcgg

SEQ ID NO: 799507 - DNA, 98 bp, Homo sapiens
gcggcgcgctgctggacgaagagctctcctccttcttcctcaactatctcgctgacacgcagtgggttgtatcccctgcagaaaaagctaaatatgat

SEQ ID NO: 799508 - DNA, 100 bp, Homo sapiens
aaacgagagtatatgcgatgagtttgcacttgctctgaaatttggggactgagtacaccaaatacgatagatcagtgggatacaacaggcctttacagct

SEQ ID NO: 799509 - DNA, 99 bp, Homo sapiens
tcagtggcagaaaagtggccaattttttctggaatcaatagcacacaatataacctgggatcccacagccagtcggatgatgattctgggtcagcttca

SEQ ID NO: 799510 - DNA, 100 bp, Homo sapiens
ggacacaagcacttcgattagtcagaaaggttttgatgatgatggttcagaatttcatgaacatatatttctggagaaacacctggagagctttccaaaa

SEQ ID NO: 799511 - DNA, 100 bp, Homo sapiens
tacacgatacctttttcttggcgattatgtggacagaggttattttagtatagagacatatctgaagagatggattaagaatgctttggattaaggattg

SEQ ID NO: 799512 - DNA, 99 bp, Homo sapiens
cagggttcatggggacatggcaaaacgctgatactaacctcttattcagaatgtcccaacagcaagtaactggcagaagttttggtgataaagattttc

SEQ ID NO: 799513 - DNA, 99 bp, Homo sapiens
gatcacagagcctatttacccagaagtagtccatatggaaagtatgcctcagactcctcccttttcagcaatgtttgacagcagtggttacaatcgaaa

SEQ ID NO: 799514 - DNA, 98 bp, Homo sapiens
atgaccctagccagactcagggatcaaagagcaaacagattcagtggcctgcattggtcatacttacctggttgcttgcgcatctagtaatgttggat

SEQ ID NO: 799515 - DNA, 112 bp, Homo sapiens
tggagcctcagttggaagcagccgatccagcctgcggagcctgtggggcagatgacctcttggtacttcatctctctgacctcattcgcatggcattcatggctgcaactga

SEQ ID NO: 799516 - DNA, 98 bp, Homo sapiens
aatgtgcatactcacagagttagagagagggatggtgttggattggatgctgctggcaagacaaccattctgtataaactgaagttaggggagatagt

SEQ ID NO: 799517 - DNA, 100 bp, Homo sapiens
gacaaccgccccctaaagaaactggaggcccaagggagagagatggtggattacatctgccagtacctgagcactgtgcgggagagacgtgtgacgccag

SEQ ID NO: 799518 - DNA, 107 bp, Homo sapiens
tcccaagaagaactctgaagatgattcagccttctgcatctggatctcttgttggaagagaaaatgaggaagaaatctgtcctcaaagagaaaaaaatgcaacccag

SEQ ID NO: 799519 - DNA, 99 bp, Homo sapiens
tgggctccctagccggctgcggtgtgagaatggagtgggcaggaaagcagcgggactttcagagactctccaacatgtgccttctgaccatacaaatga

SEQ ID NO: 799520 - DNA, 102 bp, Homo sapiens
tgcattggagactgagcaaaaggaaatgtgaaacgaataacatgatggaatatagaacgtttgtctgcctgatgagagccacttgggttaagaaactacctg

SEQ ID NO: 799521 - DNA, 100 bp, Homo sapiens
taacctgtaatgggcaaggagccacaaagaagaaaacatttcttttaatttttaaacttggtttgaaagttaatggaatttctcagtgacaacaacgaag

SEQ ID NO: 799522 - DNA, 100 bp, Homo sapiens
cacaactccaggaaggaaaccaaggggcagacccaaaaaactgcattgcagtgtcgagatggctatgaaccctgtgtaaatgaaggaatgtgtgttacct

SEQ ID NO: 799523 - DNA, 130 bp, Homo sapiens
ttcaggctgccctcaaactcctggactgaaacgatcctctcatctcagcctccaaaagtgctggcattacaggacgccaagagtgccgaggatgaggctccttccagacacttgggaaagcaccagcccc

SEQ ID NO: 799524 - DNA, 98 bp, Homo sapiens
tgcagccgtccttttggatttctttttaataatgtgtgacccttcacctttgatcccctgacctgcattaccttgggaccattgcaatttagagatgt

SEQ ID NO: 799525 - DNA, 100 bp, Homo sapiens
gtacacagacgagcatggggaaggtccaaaagcttctttgcatgtgtccagtggatttccatgggatcttccagttagatgaaagacggagagatgcagt

SEQ ID NO: 799526 - DNA, 98 bp, Homo sapiens
gagccagtcttgaggtcctacatctccgaaagcaagctcttctagaagttggctgatcccaaagaactaatcaagatggtcaccaggcatgtgactcg

SEQ ID NO: 799527 - DNA, 100 bp, Homo sapiens
gatatggaacccaagcagtggcgaagggaatcgcaaggctcttccctgaccattttctactgtccctgcgcgaggttctaaatggcttctaagaagttgg

SEQ ID NO: 799528 - DNA, 99 bp, Homo sapiens
acctgttcaagcaacgactagataaagatggcatccccgtgagctcagaggctgagcggcatggtgaggacagcaatgacctcatccgacacttcctca

SEQ ID NO: 799529 - DNA, 99 bp, Homo sapiens
tgtcttctgagtcaacactcccgacctggtaaacaacctgctcagggctctggtgaacaagctgtaggtctcctaaaaacccagaacagaagatcatta

SEQ ID NO: 799530 - DNA, 100 bp, Homo sapiens
aggcctcagcaatgagccagggcaaaacagctgcttcctcaacagtgccctgcaggcagtggagctactgctgtggttcaggcagccctatgcaaaccca

SEQ ID NO: 799531 - DNA, 100 bp, Homo sapiens
gcccaagagctatcaggggaagatatgcatcagttccatcgagccattactacagagtccagcctctgatgaagcaggagagaaagaagccaagtctgat

SEQ ID NO: 799532 - DNA, 100 bp, Homo sapiens
atagggctccctctgacactgggtctctgtcacctccatgggaccaggaccgtaggatgatgtttcctccgccagggaatcttttaactgagccagtcgg

SEQ ID NO: 799533 - DNA, 98 bp, Homo sapiens
gtcgtagatacaaatttttggatgatgatggatccatttctcctattgaggagtcaacttatctacatctgcagctcccctgatgccttcagaaccct

SEQ ID NO: 799534 - DNA, 100 bp, Homo sapiens
gctgcctctgtcactcctggtgaccagcattcaagtacctccctgcacttggctattcaaaacgggtccatctgatgaatcctatggttccaggattaac

SEQ ID NO: 799535 - DNA, 100 bp, Homo sapiens
agctgattactcatcctagagactacagtggagaaatggaagggaaacattcccagatcctcaaactatcgaaggatttccatcaccaaggagtaagaag

SEQ ID NO: 799536 - DNA, 100 bp, Homo sapiens
accctcttgccctcctaacatcatgaccacaattttcatggagtgataatgaaaggagcagcagccgcattaatatcccagagagagcaagtggaccaga

SEQ ID NO: 799537 - DNA, 98 bp, Homo sapiens
tgctgaaggatttcatgcaagattacaggaatttcagaattttgaacaaatctttgaggattccagtggaatgacactggtgatgcttgccgccgccg

SEQ ID NO: 799538 - DNA, 100 bp, Homo sapiens
gaagaaacttgcaaaagtatctcatatgaccagtggaggagagacttcagcatgcaaaccttcatctgttcggcttgcaccgtcattttcattccatgct

SEQ ID NO: 799539 - DNA, 98 bp, Homo sapiens
tgaatgactatagtgccctgacacctgttcttcccggagcctatcagcaaagccattcccaaggctatggctacatgcaccagaccagtgtgtcatcc

SEQ ID NO: 799540 - DNA, 100 bp, Homo sapiens
ttcggagattaaaaacaaacagcggcgacacttaatgttcacgcggtggaaacagcagcagcggaagattgccttgcaatttccgtatagattttgggac

SEQ ID NO: 799541 - DNA, 98 bp, Homo sapiens
gcggaaacaacgttctcccgcaaaagaagtttggggctcaagggtcacgacttactggagcaggatggggaggctgcacagtatcaatggtacctgcg

SEQ ID NO: 799542 - DNA, 100 bp, Homo sapiens
agacacgtttagcttaaaaacagctcattctcctaatgttttccttcagcaaggacaaagaaacctgtggatttttgtatctaagtttactgaatttgat

SEQ ID NO: 799543 - DNA, 100 bp, Homo sapiens
gtaggacatctccatcaattcaggaggctccctccgggttacccccactccagaggtgtgggatttgatggaggcaatgataaagattgggaagccaatg

SEQ ID NO: 799544 - DNA, 100 bp, Homo sapiens
cttgcccttagtggccgtcttttgcctctttctctcaggctttcctacaactcatgcccagcagcagcaagcagtgttgaacttgaccctcatcgacctc

SEQ ID NO: 799545 - DNA, 100 bp, Homo sapiens
cagaaggcttatgaggatggctgcaagactgtcgacctaaagcctgactggggcaaggggtatagaacaggctatgcttacaggcatcctctcattcgag

SEQ ID NO: 799546 - DNA, 99 bp, Homo sapiens
ataacttcccatccagccaggagtctgcactcttcagtctttgcagcacaacctccaagagggaaaacatttctccagattatccactcacccttctag

SEQ ID NO: 799547 - DNA, 98 bp, Homo sapiens
gctcctgcaagactctggagccagtcttgaggtcctacatctccgaaagcaagctcttctagaagttgatgtttcagaaagaacaagtggatcctctt

SEQ ID NO: 799548 - DNA, 98 bp, Homo sapiens
gagtgcatcaaaggtgtgaacacagcaacttgagttggtggaaccaagtggctggattcatgttcccttaactgacaatcataagaagccaactcgta

SEQ ID NO: 799549 - DNA, 100 bp, Homo sapiens
tgtttgaaaagggccccaggcagttttatgatgacacctgtgttgtcccagaaaaattcgatgctataatgatccagccttttatgaagaatgcaaaatg

SEQ ID NO: 799550 - DNA, 100 bp, Homo sapiens
gtactctcaggaactattccagctttctcagtatctacagtcttactactttgaccgcgatgatgtggctttgaagaactttgccaaatactttcttcac

SEQ ID NO: 799551 - DNA, 100 bp, Homo sapiens
gactctgtcatccacatccctctccattcctgagcggtccccctcggagacgtcggagcagccgcggtacaggggcactatgaacgaagaggagcagttt

SEQ ID NO: 799552 - DNA, 100 bp, Homo sapiens
ctcctgggtagctgggactacagttccatcaccgggacagcttcaacacagggtccacagcgtggggcatttcccagtgtctatccgacagcctcttaaa

SEQ ID NO: 799553 - DNA, 100 bp, Homo sapiens
gctggtgctgccagatggacaaggagaccaaagagaacaacctctctgaagaaggcacattgcaagcaacccgtgccttgatggtggttggcatcctcct

SEQ ID NO: 799554 - DNA, 100 bp, Homo sapiens
cgcaaccggggcgaatcatggcggccgccaaggtaagaccatgaattatggcatttcttaaatgaagcgttcaagaagtgagagaatgtcatagaaaata

SEQ ID NO: 799555 - DNA, 99 bp, Homo sapiens
catcatcaaagaaggagacgtggggtcactggtgtatgtcatggaagatacactgcctctaggactgggacagatagccactgagtacctgcttcaaat

SEQ ID NO: 799556 - DNA, 100 bp, Homo sapiens
atagctttgcttacctctgaagatcacattaatcgcaaatatgcttttaagaatgctcagcatgtggaagtggagagtattcctttgccagatatgccac

SEQ ID NO: 799557 - DNA, 98 bp, Homo sapiens
ctcgcgagggttggagttttggcgagagtttgtggaagatggcgcctgttgtgacaggacgttatgaagaggacatgtactggaggagaatggaggaa

SEQ ID NO: 799558 - DNA, 99 bp, Homo sapiens
gagtcgttcttgctcttcgagggcgagaagtcgccatgggctactcacactccttggtgatagcaagagatgaaagtgagactgagaaagagaagatca

SEQ ID NO: 799559 - DNA, 100 bp, Homo sapiens
gtgggggaactatacaactatggagttgaccacttaggagaagagaatcctgaggttggcttgaagcctgtgtggtatagtcccaaagttttcattgaag

SEQ ID NO: 799560 - DNA, 99 bp, Homo sapiens
aagtcttccaggacgagacatcactggctacacatttccagcaggctgcagatacgagtggacaaatttgcttgtaaatgcatcacgaagaggcagccc

SEQ ID NO: 799561 - DNA, 100 bp, Homo sapiens
aggaagccaccattcttcagagggcaatgaaggcacagaaatggaagtaccagcagaagctctgaacagcaacatggggtgcaaagtcctgctcaacatt

SEQ ID NO: 799562 - DNA, 100 bp, Homo sapiens
agcaagcagggctctggcagcagccagaagaatcccagacttcttagagaacccagtgactttttgcaccttaaatctgtgaaatcctcatgttttcttc

SEQ ID NO: 799563 - DNA, 100 bp, Homo sapiens
agtatcttcaacaagaatacctgccctccttgcaagtagctccagaaataattcagaaaactggtgatttatttgctatcaaagtatttaataacataag

SEQ ID NO: 799564 - DNA, 100 bp, Homo sapiens
gctcgctgggcgacatgatcttcttccattcctacaagaacccgggcctggtcctggacatcgttgaggggaacccagctgagttcgtcgtgaacacgag

SEQ ID NO: 799565 - DNA, 99 bp, Homo sapiens
agcggtgtagtttgccaccctcctattgcagcaagttggttaaagtcatgctggatcttcagatacttgagcgttctctaaagctgctatttgaaacga

SEQ ID NO: 799566 - DNA, 99 bp, Homo sapiens
ctggcaggcatatctagggagagtttctgtgtgatttacctcaactggatagagtactgctcttcccgaagagcaaagcatttatgagaccagtacaaa

SEQ ID NO: 799567 - DNA, 98 bp, Homo sapiens
gagacccaggggaagacccaaaggcagcaaaaacaagagtccctctaaagcagctcaaaagatggactcaccctgtcacccaggttggactgcactgg

SEQ ID NO: 799568 - DNA, 100 bp, Homo sapiens
agaccaaaagtatgttgtaccttgtgacagaatatgccaaaaatggagaaatttttggagaccaagacacattccaccccagtggggggtcccataccac

SEQ ID NO: 799569 - DNA, 115 bp, Homo sapiens
gcgtcacctccttctgccccaccctggtcacttccccaccggaggtttatcacaagatgataccacgagtcaacccaaaagttgctggggagaagttgctctttaatgaattgca

SEQ ID NO: 799570 - DNA, 98 bp, Homo sapiens
tctgctcaaatctcctgctgtgaaccagcagaatttttgaacaggtcactttagacaactgtgttgaagttggacggattgccaacacctacaatcta

SEQ ID NO: 799571 - DNA, 98 bp, Homo sapiens
gatgctcacctccgccatgacgaaatcatgtttgggttccggtatcagtcagagccggatctctcattggctgttgcagcagggatcagacctgagtg

SEQ ID NO: 799572 - DNA, 100 bp, Homo sapiens
taaaccaaagacagcatctgagcacagaaaggcaaagtgtttcatggatttcaaagctggaggcgccttatgtcacattcttggggctgcttacaagtat

SEQ ID NO: 799573 - DNA, 100 bp, Homo sapiens
tttttgagccttacggagccgtctaccagatcaacgtcctccgggaccggagtcagaaccctccgcagagtaaaggctctccagcagaactatctcctac

SEQ ID NO: 799574 - DNA, 100 bp, Homo sapiens
gaaatgatggccacgcgtcggactggtctgtctgagggagatggtgacaagctcaaggcctgcgagcatgcatatgcgctagaacttctatttgatcagt

SEQ ID NO: 799575 - DNA, 99 bp, Homo sapiens
gccgcgtgtacccggttgtcctcaggcgctgtcaggacaaacagaggatgtgcagatgctcctgcgctttggggcagatcccactttgctggatcgaca

SEQ ID NO: 799576 - DNA, 98 bp, Homo sapiens
gaagcgattcctgcaggcgttggttcccctctttgacctggtaaagtcagtgataaatcttttgtttgctgcatatactggagatgtgtctgcacttc

SEQ ID NO: 799577 - DNA, 100 bp, Homo sapiens
gtgggatgtgaaaactctgttactgaagatgaatgatttcggaatcaagaatatggaccaggtagcccctgtggctaacagttacagagggacactcaag

SEQ ID NO: 799578 - DNA, 100 bp, Homo sapiens
gctgatagagcaattcaacagttcggcggatggcaggatgaaacctggccagatggttggactgcggtgacaagagacggaaagcggtctgctcagtttg

SEQ ID NO: 799579 - DNA, 98 bp, Homo sapiens
gtcatagacagcaccatacaatcagatggctacgaattcctggagatcctgaaacaggttgcccgggacaatactgacaaccccgatctgagcatcct

SEQ ID NO: 799580 - DNA, 100 bp, Homo sapiens
ggcggtttccttgcccggggccgcgggaaggccgaccgactgccgcgctttgtaggcagccaatcccagagaagcagacgggatggctagttcagcccgg

SEQ ID NO: 799581 - DNA, 99 bp, Homo sapiens
atagagacaacgactatgtccaattttcatgctcagcaaaacttagagagtaacctcaccaaccttattaagaggaacacagaactggagacccttttg

SEQ ID NO: 799582 - DNA, 100 bp, Homo sapiens
gtgggctttaagttcgccaccaagaccgtcatctacctgctcaacccctgtcacctggtcaccatgatgcattgagagaaccaccaccaatttgccttga

SEQ ID NO: 799583 - DNA, 100 bp, Homo sapiens
cctggtcaccgccttccagcagtcaggcagccagagccctgactcccgaatggcaaggcatctttacatatgtgattatcataaaaacttaattcagagt

SEQ ID NO: 799584 - DNA, 100 bp, Homo sapiens
tgttcccccaccccagaagaggatggcaaaggtggctaaggacctcaacccaggagttaaaaaggccctttgaacggacgattaccatgcataaggatag

SEQ ID NO: 799585 - DNA, 100 bp, Homo sapiens
gccctcctactgatgaacagttgaacatgaagaatactggaaagttgctatgttttggtgcctcatctccagacatggagcccagctatgggggaggtct

SEQ ID NO: 799586 - DNA, 100 bp, Homo sapiens
gaatgtgtggctcggaattcttttggccttgctgtgaccaacatgtttcttacagtcacggttgctgccaaacaaggtgaatccgacccagagaggaaag

SEQ ID NO: 799587 - DNA, 100 bp, Homo sapiens
gaaattcgagaagctgcaaatgccaatcactgtgtccactactatgatcttcgtaacactaaacagccaatcatggtattcaaaggacaccgtaaagcag

SEQ ID NO: 799588 - DNA, 100 bp, Homo sapiens
aagtagccgttcttcaggcacttgcatccacagtaaacaggcaatctgcacatcgtgctgccacacgaggcttcattcgttatggctggcgctggggttg

SEQ ID NO: 799589 - DNA, 100 bp, Homo sapiens
tttcctcataatagaagatgatccttactattttctccagtttaacaaggtgccttagctggaccaattattgtggagccacatgtcacagcagtatggg

SEQ ID NO: 799590 - DNA, 101 bp, Homo sapiens
cacgcccctcaccccccgagagccggacttcagggccacaggtgctgccaagatgctccagggcacctgctccgtgctcctgctctggggaatcctggggg

SEQ ID NO: 799591 - DNA, 100 bp, Homo sapiens
ccacgtgggaatcccctgagctgcgccatggccagagtgagtcacccctttccagccagcaaacaaggcagttgtgaaaaacttcaggacaaaaatgttt

SEQ ID NO: 799592 - DNA, 98 bp, Homo sapiens
gcaggctaccttccccgggcaggggcgctcaacccaaccggctccagggcactgtctccagagaatacagagggcaaagatggatccaaagtaactaa

SEQ ID NO: 799593 - DNA, 98 bp, Homo sapiens
gtggattaactcagagtgaaaatcctgctttacgagtgaatggaatttgggctttaatggagtcagtggatcggtggggaaaatgctgcttaccctgg

SEQ ID NO: 799594 - DNA, 100 bp, Homo sapiens
caccaagggcgcccttcccctggatacggtcactttctacaagaggtcctgggcctatgtcaagaagtgcaaaaacaacatgtgtccaaatcggggattg

SEQ ID NO: 799595 - DNA, 100 bp, Homo sapiens
cggggtgaccctgccggagcctccgctgccagcgacatgttcaagcgtggagattggtgaaagcgtgagaggggaagatgtctacatcatccagagcggc

SEQ ID NO: 799596 - DNA, 100 bp, Homo sapiens
ggtttatcaagagctataagaaatttggtggtcctctggaaagagctggaagtcgagtgtgctactcaactcaggagatttggagacaaactgaacttcc

SEQ ID NO: 799597 - DNA, 99 bp, Homo sapiens
acggactgtgtccggcgatgggcacgggctattgtggacgatgaaaggctctctgcagaggagatggatgagaggaggcggcagaacattgcttatgaa

SEQ ID NO: 799598 - DNA, 100 bp, Homo sapiens
ttccaatgctggtcaccccagctcctcagcagcatgaagaagaggacctggatgatgatgtcatcctgacagaagtccctagctgttggtagtaagtccg

SEQ ID NO: 799599 - DNA, 100 bp, Homo sapiens
acccagagaagttcagtgcccagctctactgagaagaatgctaccgagtgtgtcagcagccaggactttctctctgggtccccttccaaaacgcagccac

SEQ ID NO: 799600 - DNA, 98 bp, Homo sapiens
tagcggcagcagccccagcctcaaggccagatggaaatcctgtatgaatgtggaagccattagcagagtaattgctgtctgttaccatgacaaccagc

SEQ ID NO: 799601 - DNA, 110 bp, Homo sapiens
caacgccaccttggaacatttctacctgaccagtggcaagcagcccaagcaggtcctgagaagtatttctcgttttcattggagatcacagcatacaaaagccaatcgac

SEQ ID NO: 799602 - DNA, 100 bp, Homo sapiens
agctttgaccttcatcacgaggccacccagtcccacttcaaacattcgtctcggaaaccccgcctcttacagtcacgagtcctggacgcacaatatccag

SEQ ID NO: 799603 - DNA, 98 bp, Homo sapiens
aaccctgagaccacagctgctacagaccacaaacaccccatcagccaagagagacccttgaggctgaggggatctggcggtggagcgctaggatcaga

SEQ ID NO: 799604 - DNA, 99 bp, Homo sapiens
tctaccctccaggggatgaggaagaatgtccctcttccagtggaaagcccaaccatgcagacatcttgctcataaacttacagtatgtttcagaagtgg

SEQ ID NO: 799605 - DNA, 99 bp, Homo sapiens
cggggaagccagagctgactgaagggttatgtaccgaaggactctaccgtgtcagcgggaataaaactgaccaagacaatattcaaaagcagtttgatc

SEQ ID NO: 799606 - DNA, 98 bp, Homo sapiens
caaatgtgaaggtgatgaggttgaagatctctatgagcttttgaaacttgttaagaacatccatgatagcagtcttctgtaaatcgaacttttcaaga

SEQ ID NO: 799607 - DNA, 100 bp, Homo sapiens
gaaaatggctctgtcggtgtaaaaaaggagaaacttattcgtcttcagcatgagaataagatgttaaagcttaaccaagaaggttcggacaatgaaaaaa

SEQ ID NO: 799608 - DNA, 100 bp, Homo sapiens
gtttcctgaggcctccccagccacgctttctgtacagcctgcagaactgaggaagacagcgaacccctcccaccacaggatgcccagacctctgggtcac

SEQ ID NO: 799609 - DNA, 99 bp, Homo sapiens
ggataagcatgccctgaaaaagtatcgtcgagaagcctatcatcgggcatatctggaatctgaagttgctatatctgaggagttggttcagaagtacag

SEQ ID NO: 799610 - DNA, 100 bp, Homo sapiens
ggggaggaggcggtggccctgctggaggagctctgggttctgatctacaatggccaactggacatcatcgtggcagctgccctgacagagcgctccttga

SEQ ID NO: 799611 - DNA, 98 bp, Homo sapiens
cctcccacctcagcttcccaaggagctgacactacaggtcagaagacatgtcttcatctacatggcatctttccttacctctatgtgccatacgatgg

SEQ ID NO: 799612 - DNA, 100 bp, Homo sapiens
aaaggaaaaacatcttgatctggagaaaaactggatgttggtagaaaaagcaagagtttgttatatagcaatgcctgaggaaacccagacccaagaccaa

SEQ ID NO: 799613 - DNA, 100 bp, Homo sapiens
gagctgttccgggccgcgcagctgccgaacgacgtggtcctacagctgatgttctaatcatgtcagataaagatgatattgagactccactgctaactga

SEQ ID NO: 799614 - DNA, 98 bp, Homo sapiens
caccgcctcctcctgctgctgctgcgctacctggtggtcgccctgggcttttttccagaggcctcaaatacagcctcctagagctaccatcccgaaca

SEQ ID NO: 799615 - DNA, 100 bp, Homo sapiens
ctgacttacatggaggagacgtgtcgtcactatgtggcccatgtgaaggaatagcgggttttgcagcaattgttgcatatggattatataaactgaagag

SEQ ID NO: 799616 - DNA, 98 bp, Homo sapiens
ggcggtgccatgttcttcatcggtttcaccgcgctcgttatcatgtggcagaagcactatgccgagttcagcatctggacccgggaggctggcgctgg

SEQ ID NO: 799617 - DNA, 101 bp, Homo sapiens
tgttagtcaccggtgcaggaagaggacatgctggcaggatcattcacaagctgtttgtgaatgcccagagggcataacctgggtcctggtttacaggacag

SEQ ID NO: 799618 - DNA, 133 bp, Homo sapiens
atggcaactgtatgatagaagctatataaagtcaagtgtccattttctttcaactatatttgagcatacccaggtacgtcttcaaataccatctcagcaggctgggagccaaatgaagaaaatgaagatgaaa

SEQ ID NO: 799619 - DNA, 100 bp, Homo sapiens
aaatggaggtgaaggcggcatcattatcaatatgtcatctttagcagatgaaatcgtggacactttgggtgaaggagcctttggcaaagttgtagagtgc

SEQ ID NO: 799620 - DNA, 98 bp, Homo sapiens
tcacctgctgcagcaacgtgacagccaggatgccagtgctgagcaaaggccatggagaagtgtaaagatgcaggattggccaagtccatcggggtgtc

SEQ ID NO: 799621 - DNA, 109 bp, Homo sapiens
tacagtcgaatggccaactatcggaacacgagcgagattcctctggttctggtgggaacccagggagctgactgctgggcaggaacgtctctcaggagaaagagtggaa

SEQ ID NO: 799622 - DNA, 99 bp, Homo sapiens
gggcccggctgccggcccccgctctgccctggaatctcaccagtgacacgcgtttgtgaaaagctgtgaatattcagtgccacagggttaaacctcggt

SEQ ID NO: 799623 - DNA, 100 bp, Homo sapiens
gattcagaagaactgttgaaactagcaacatctataagtgaaaccttggaagagaagacacgaagatcgattgagaagttattagaatgggaaaacaata

SEQ ID NO: 799624 - DNA, 98 bp, Homo sapiens
agactcagaccaccaccagaaccatcacctcggagacccagacaatcacaggtggggagcagcctattcctctctggaacgaacatgatggaacagca

SEQ ID NO: 799625 - DNA, 100 bp, Homo sapiens
agctggtggaagtggttggaaatggcacctatggacaagtctataaggtgaaggcatcattttattacagcctggaaaacatgaatttccatttcgcttt

SEQ ID NO: 799626 - DNA, 118 bp, Homo sapiens
ctttgaaaattggttactgggtctcctctcaagaaatctcaagatattaaagttactgctgttaaaaagtggtcccaggctgcacccatggcagaaggaggagggcagaatcatcacg

SEQ ID NO: 799627 - DNA, 100 bp, Homo sapiens
acccgctgcctggccttgcaccaagacgtccaggccatgtggtatttcggatcagcccagtccgagaaatgtggtttgtggtaggaaggaatggtggcct

SEQ ID NO: 799628 - DNA, 98 bp, Homo sapiens
taccagcaactaccccagtgccggggagggttctgctgcttcgaaagctgattccccgccactgtatgtctgaagatagcaaatatgttttaatacaa

SEQ ID NO: 799629 - DNA, 100 bp, Homo sapiens
gaatacatcaagattctgaatctggtgatgaacttagcagcagctccactgaacagataaggatgaactgtctcattgtgttgagcctgagccatctcag

SEQ ID NO: 799630 - DNA, 98 bp, Homo sapiens
tgatgctactgagaagatacagagtgagaacttttcttagaaaagtctgaggttgtaaagaagaaccaaggaaagaactggcgggggcacacagaacc

SEQ ID NO: 799631 - DNA, 100 bp, Homo sapiens
caggaaggaaggccttggatggaccctcagattgaaggacccggtggaccttggggttgctatcaagatcatagataagacccagctggatgaagaaaac

SEQ ID NO: 799632 - DNA, 100 bp, Homo sapiens
ccagctaaccatggagttatgggccagcaggagaaacactcagaatatgaagacaaggctggaagacctagcaagccaccctctccaaagcagaatgtga

SEQ ID NO: 799633 - DNA, 99 bp, Homo sapiens
aggatttctccgcctcagcccaacggggagaacccttaggagaaatcttgagagtggacagcaattgtgaagatcgccagagagttctgtgtttcatca

SEQ ID NO: 799634 - DNA, 98 bp, Homo sapiens
tgtgcccctgaagaagcgcggatacgatgtcaccaggaaccctcatctcaacaagggaagacccgaattttctgaagttgtcatgaagttagaagagt

SEQ ID NO: 799635 - DNA, 100 bp, Homo sapiens
gaaagagtgtgcagcggattaaagctaaagacatagttcctggtgatattgtagaaattgctggtttaagaattgtttaagctgcatcaatggagcacat

SEQ ID NO: 799636 - DNA, 98 bp, Homo sapiens
ggttgaaggggaccaggaggttggacacagaccattgcaatggaaatgctgggcagatgctcaaactcaaatccaaaacattgctgcatcttttgacc

SEQ ID NO: 799637 - DNA, 100 bp, Homo sapiens
gacaagttcaccccgaagtctgccgatatggctcgtggacagcagaaaattcagtctcagcagaaaaatgccaaaaagcaagctggacaaaagaagaaac

SEQ ID NO: 799638 - DNA, 146 bp, Homo sapiens
gcaacttgcccaagctatgtttgaccacattcctgttggggtggggtcaaaaggtgtcatcccaatgaatgccaagtgcctgggagaacagcaggcagctgtgcatggtgggaagagctccgcccagtcagccgagagcagcagcg

SEQ ID NO: 799639 - DNA, 100 bp, Homo sapiens
cgcgggatcgtgcgtcgtcccgccgcgtccctgaagggaaggaagcgagcgtctggatggttccatcaagggagaaatccgaaaacaggcactggaccac

SEQ ID NO: 799640 - DNA, 100 bp, Homo sapiens
gggagaatatttaatggaaaatcgcttggttaaaacctgacacttttaacaggctatgagctcttatttcagccagaggtggttcggatatacatctcac

SEQ ID NO: 799641 - DNA, 99 bp, Homo sapiens
gagagcggactcccctcgccaccgcccgagcccagtactatactggcaattgctggagaagattttgcaattgttgcttctgatactcgattgagtgaa

SEQ ID NO: 799642 - DNA, 100 bp, Homo sapiens
accctgggcacctgtgttccatgtcaatgtaatggacacagcagcctgtgtgaccctgaaacatcgatatgccaggtcccatgccctacagaggctgata

SEQ ID NO: 799643 - DNA, 99 bp, Homo sapiens
ttggattgaaacagctaatcgagttgctcaatgaactacagaaatttctggaaactgaaaaagatgaattaattttggaagttatgaacccacctccca

SEQ ID NO: 799644 - DNA, 100 bp, Homo sapiens
ctgctggggtggtggttccaatgagacagggcacaccaaactccatctggggtcgtgattccaaattcttcagcagaaggctgagattggcagagatgag

SEQ ID NO: 799645 - DNA, 100 bp, Homo sapiens
ataaatcagacagaacagttaatcctcaatttaagcctgatctaacccctagaaacaggtcccctgacaagcccaccaggccccctgctgagatggctgt

SEQ ID NO: 799646 - DNA, 98 bp, Homo sapiens
cgccgggattgagaactacacgtccagattcggccctgacctgcctgaccagtgcacgcccaacccctgcgataggaaggggacccaagcctgccagg

SEQ ID NO: 799647 - DNA, 99 bp, Homo sapiens
gtatctatcctgcttatttaaataataagaagaccatcgcagagggaaggcgaatccccataagtaaggctacctcttggaagaaagtccttgtccttt

SEQ ID NO: 799648 - DNA, 99 bp, Homo sapiens
agtaataaggacctttgtgcttcgagatctgcagaccagacagagttattttaagagctccctatgttgctaaggaatttttaaagaggaatcaatata

SEQ ID NO: 799649 - DNA, 99 bp, Homo sapiens
agtagtgcccgccccacccgcatgctctttgtcactccccggcggcagcacgaaagtaccatgaaagttcacatccttggctccttccaaaatatcaag

SEQ ID NO: 799650 - DNA, 100 bp, Homo sapiens
agttgtcatctttcaacaggagcaggaggtactcatttatgacagatttggccaagatataatctctcctctgctatctgtgaaggagctaagagacatg

SEQ ID NO: 799651 - DNA, 100 bp, Homo sapiens
agccccagaaataaaagcatcagagagacgaacagctgtggccattgcagttgcagtatccagtttattgggaccatctcgagttctgtgatggattcag

SEQ ID NO: 799652 - DNA, 100 bp, Homo sapiens
acagtaaatcacagagccggagacatttgtcagccaaggaaagaagagtccataaaacagacctggaacgagtgttagaagcaaatgatggctcaggaat

SEQ ID NO: 799653 - DNA, 100 bp, Homo sapiens
tgacatccattccaaagaatttggcagcggtttccctgtcagtgacagtaaacggcacctaacccccgaagaggagttacttgaagaaatctgtaatctt

SEQ ID NO: 799654 - DNA, 100 bp, Homo sapiens
tacattcaacccaggacacaagaaactccttcacatctggaagaacttgaaggaagatattttcgattcagataaagaagttcctatcgaatccactttt

SEQ ID NO: 799655 - DNA, 99 bp, Homo sapiens
tggaaaagtggacgaagctctggtgagaagtgccactgtgcactcttggcctcacagcaatgcaccacccagctatgcagaagtggtaacagaggaaca

SEQ ID NO: 799656 - DNA, 100 bp, Homo sapiens
agagaagaaatacaggatgcctctcagctgccacctgcctttgacctttttgaagcctttgcaaaatttcaggcgacctccaagaagggtatcagtcgac

SEQ ID NO: 799657 - DNA, 100 bp, Homo sapiens
acatcataaataatgaccatgaaaatgtaaaatatcttcctggacacaagctgccagaaaatgtgtctggaaattatgatgcctgtctacaacaccttgc

SEQ ID NO: 799658 - DNA, 74 bp, Homo sapiens
agtctcagtgctgcaactactactatgaactctggtgtgaaaataagtcccctcctcgcccatgtggcttgaat

SEQ ID NO: 799659 - DNA, 100 bp, Homo sapiens
ggatgaaacaggaaacaatccttctgtttctttaaaactggaagaaaattatcttgacaatggtaataataaaatggcaattcagcaagcagataaactg

SEQ ID NO: 799660 - DNA, 100 bp, Homo sapiens
ctcattcaattgatgggagagtagttgagccaaaacgtgctgtagcaagagagacggctttttttcgccaacatggatgcacagccaatgatgccaacac

SEQ ID NO: 799661 - DNA, 98 bp, Homo sapiens
cagccttatgacgaaatgctgggcctatgaccccagcaggcggcccaggtttactgaacttaaagctcagctcaggttgattcctgtgttagtgaatg

SEQ ID NO: 799662 - DNA, 100 bp, Homo sapiens
gggggtgtgcaaacccgagagaactggctatatgttctcctttcagccaagacctttcaccagtgcaggggatagaagattcattccacaaacttatact

SEQ ID NO: 799663 - DNA, 100 bp, Homo sapiens
aaagaatgacagcaagaggcaaaacttcggacatagaggccaaccaacctttggagtcttgtctcaagaagaaaacgaactgggaaaatttcttcgatcc

SEQ ID NO: 799664 - DNA, 100 bp, Homo sapiens
gcctcccaagcagctgagactacaggtgggtcctgaataccatcccaagtgtccttataagagagaggcaaaagaggcaatagagacacagaaaagaaag

SEQ ID NO: 799665 - DNA, 100 bp, Homo sapiens
tgaggaatccagaattaaaaagctccacaaattgctcagttacaatctgcccttggaactggaaaacctgaggtaaattgggatattcacaatgtatgga

SEQ ID NO: 799666 - DNA, 100 bp, Homo sapiens
gggacccgcggtccccgctcttgctggatgatgaagataaactgacctggaaggatcgtttcccaggttacctgatgaactttgcctccatcttattcat

SEQ ID NO: 799667 - DNA, 101 bp, Homo sapiens
ccggagtgtatgtctttggagaacttctggagctggccaacgtgcaggagttgtgctatattgactcccaaactgatggtggaatcccttcttactgtttt

SEQ ID NO: 799668 - DNA, 100 bp, Homo sapiens
ccagcaccggctccagtgggctctgggatcccaacaagccctcaggattcagaagtgttaaagctcctgtcactaaagtggctgcgtcgattggaaatgc

SEQ ID NO: 799669 - DNA, 100 bp, Homo sapiens
tacagggaagtctataagctttgcaacagaattacagagtatgatattcaaccctatgaaaagataaaggccaggggcttgcctgataatatatcttccg

SEQ ID NO: 799670 - DNA, 100 bp, Homo sapiens
gaggacctctcgccaagggccccaatgagtggcacacagtctactatcaccgacaggactttttttatgaagacatggagtccttgacgcagatgcttag

SEQ ID NO: 799671 - DNA, 100 bp, Homo sapiens
ccaccagaacccaagaagattccgataagaaacacggaatacctgaacagtattttgcaacatgcaaaagattttaaggaatatcatcggtctgtggccg

SEQ ID NO: 799672 - DNA, 98 bp, Homo sapiens
gattgatacctgtgtctcctacccaaggacagggggacagggctctgtctcgcacttcccagggttcagtttggcaaagacttggtgcagatgtgaca

SEQ ID NO: 799673 - DNA, 100 bp, Homo sapiens
ctagttttctcttaaatccagagaaatatactgatgaacttgccactcagccaaggcgactgcttaacacactgagaatgaagaatccctccattgttgg

SEQ ID NO: 799674 - DNA, 98 bp, Homo sapiens
ttcacggtgaccttcgcttggtgtcctcctggcctcagcaacctgacaattctgtcgtgtcccgggtctccaactgaattccttgaagagaaaatggc

SEQ ID NO: 799675 - DNA, 100 bp, Homo sapiens
cccgttgtgtttgtgaaacagagaaagataggcggccatggtccaaccttgaaggaaaagaagatttttcagatcccctggatgcatgcggctagacatg

SEQ ID NO: 799676 - DNA, 104 bp, Homo sapiens
gggagaaggggaggatgcgtttccacaagctgcagaatgtccagattgccctggactacctccggcaccgccaggaagtgtttggattgtgagctatttcagaa

SEQ ID NO: 799677 - DNA, 100 bp, Homo sapiens
cctttttcctggtacctagagaatatatatcctgattctcaaattccacgtcactatttctcattgggagagataaaccgagaaaactggtgtacaatag

SEQ ID NO: 799678 - DNA, 102 bp, Homo sapiens
cacgtttattgccttgatgattgggtcctacgcctcctcggcagtcacctttccaggaatcaagtatcaagtggggcagctgtattctgtggctgaggccag

SEQ ID NO: 799679 - DNA, 100 bp, Homo sapiens
gaagatccttcaaaattaaaagaggagcagcatggcatttcagtcactggtttgcagagtccagcttctcagggcagcaaggagcttgttaacatcacca

SEQ ID NO: 799680 - DNA, 100 bp, Homo sapiens
cgtgagcaccatgttcagtttcaccgggatgtggaggctaaggcagctggataagcacagccaggccacagcccagcagctggtgcagctcctcagcaag

SEQ ID NO: 799681 - DNA, 100 bp, Homo sapiens
ctgacaccgccgccacaccgccgccacaccgccgctgcctcagtcatgccgaacactctgctccagccaaggtggtgagggcagctgttcctaaacagcg

SEQ ID NO: 799682 - DNA, 100 bp, Homo sapiens
ctgtcctgctgatgaagtctacgttcattcagggcctgctgtggaagaccagccccaaaggttcgaaccagtgtcctaccagaacataaggatcccccgc

SEQ ID NO: 799683 - DNA, 100 bp, Homo sapiens
cttcatcaaaaatagtgatagctttgataagggtttgttaaagttgttaagaataaggcctactttaagagataccaagtgaaatttagaagacgacgag

SEQ ID NO: 799684 - DNA, 100 bp, Homo sapiens
ccctcgagatgattatcgtaggaggagtcctccacctcgtcgcaggtgacctaaagaattaatgaccattcagaaataaagcaaaaagcaggccacaacc

SEQ ID NO: 799685 - DNA, 100 bp, Homo sapiens
agtgaagctcaagttgctactcgggacgctgcacctcccgcgccgcacggtggacgaggtccgggttgctctccggcggcctccctcggaagtgttccgt

SEQ ID NO: 799686 - DNA, 98 bp, Homo sapiens
tcaaggtcaacagaatgactatattcttctttctctggtacgaaccagggcagtgggccatctgaggaaaccgtatcacccaaaactggaagctttca

SEQ ID NO: 799687 - DNA, 98 bp, Homo sapiens
ccacaacagccgcaccactacgtggaacgacccgcgcgtgccctctgagggccccaaggttgactatagtcaatggggccaatggagccaagtgtatg

SEQ ID NO: 799688 - DNA, 98 bp, Homo sapiens
aacacttcctataaatctcgcccaaacaggaaaggacacttgggttgaattcagtaagtttcctctgaagcaccctgaagggtgccatccttacagag

SEQ ID NO: 799689 - DNA, 100 bp, Homo sapiens
aactctttgttaaagaagagaataagatttttggaagaaaagtctattatcctcccagtccacaacgctgaaccgtggctggacgaatgtttgaggtctg

SEQ ID NO: 799690 - DNA, 100 bp, Homo sapiens
tctcagatgattgcatttcatgatccagagctgagtaatcatctcaatgagattggtttcattccagatatcctgataacttaagtgactctctcttttc

SEQ ID NO: 799691 - DNA, 100 bp, Homo sapiens
gaagacaaagaacctttcatcaactttgagaatcactacaagaaaaactccttgtggtgaaggttctaagacgtgggatcgtttccagatgagaattcac

SEQ ID NO: 799692 - DNA, 100 bp, Homo sapiens
ttgaattatggcatagatcttgggaaaattgcggttttcctttggaatatggataaatacaccatgatacggaaactagaaggacatcaccatgatgtgg

SEQ ID NO: 799693 - DNA, 100 bp, Homo sapiens
ctcagaagagtgagagagagctattagagattgtgaagaagaatttcgatctccgccctggggtcattgtcagtaaaataaaacagggtctgttacctag

SEQ ID NO: 799694 - DNA, 98 bp, Homo sapiens
gctgtggcccgagggaggcagatgagtcggagctgcagattgccctcattgccctcttctctgagatgctctatcggttccccaacatggtggtggcg

SEQ ID NO: 799695 - DNA, 98 bp, Homo sapiens
cgggagcaggagccccaggaggggggaggctgctactttcaaccagtttggatgccaaggatgagttagaggagtattctaccttgtaaatactgtta

SEQ ID NO: 799696 - DNA, 99 bp, Homo sapiens
ggaagccaacgaccacacgcactcctgtccaaatatgacccccagaaggaggcagagctccgcacctggatcgagggactcaccggcctctccatcggc

SEQ ID NO: 799697 - DNA, 100 bp, Homo sapiens
caaagaacacaagaaggagaaggaccgggaaaagtccaagcatagcaacagcctgaggaaatgacaagattgagaagcatgaacagacaactccagataa

SEQ ID NO: 799698 - DNA, 100 bp, Homo sapiens
gaccacttaagcaaacttaatataccagacactgcaactgatgggtgttcctgataaagaagggttaccaagacgtcgacacctccctgcagagtgctgt

SEQ ID NO: 799699 - DNA, 98 bp, Homo sapiens
cgttgtttgcgtgcaatgttcaccagtcagtgtttgaaggagaagagagcaagctgagtcatccaatggtggctattcctgaacatgaagctcttgat

SEQ ID NO: 799700 - DNA, 100 bp, Homo sapiens
gttccaggaggacacgctgcagttggccttcatcgacttgagacaaccccccgaatccaagcccaacttcacccctctcgccatcttggcccatgttctc

SEQ ID NO: 799701 - DNA, 100 bp, Homo sapiens
aaaaatcctggatctgtatgctttgagcaaggctaccacatactgttgattgtgatgaaatgccagttgaagcacctgtcctgcgagcttaggggtgcta

SEQ ID NO: 799702 - DNA, 98 bp, Homo sapiens
accatggagaccctcacggagctgggcgacgagctgaccctgggagacatcgacggtgaaatgacaatggatgctctgttggctcgattgaaacttct

SEQ ID NO: 799703 - DNA, 98 bp, Homo sapiens
gtcaggtctggagctcgaccgggccaggtctgcccagaacaatctgacaaaggcagtagatgcttttagtaagtattttctgtatctgaaatgcaaga

SEQ ID NO: 799704 - DNA, 100 bp, Homo sapiens
gagatgaagaacctgagtcaggacgtaaatggaaccctgcaatggtacaacagctccatgaacgtgatctgcacctggttgacggaccggatggacttac

SEQ ID NO: 799705 - DNA, 100 bp, Homo sapiens
ccggaacctgtttttcttcctgtgcctgaacctctctttcgcttttgtggaactactctacggcatctggagcaactgtcatacagtttgtcaagaaaga

SEQ ID NO: 799706 - DNA, 100 bp, Homo sapiens
ccagctcctggagatctggcatatcccgataagttagtcatgatggagaaccttcggctcgcgtgcttctgagctgctgtggatggcctcggctctctgg

SEQ ID NO: 799707 - DNA, 99 bp, Homo sapiens
gcggccacagctggggccggtggctccggaacggtaaagatgatgattcttttgatcggaaatcagtgtaccgaggctcgctgacacagagaaacccca

SEQ ID NO: 799708 - DNA, 100 bp, Homo sapiens
gttgctcttgcttttcctcgctggggtgtacggtatcattgcccagtgcctaagatcttttatgttcagctcactgtaggaaataatgaattttttgggg

SEQ ID NO: 799709 - DNA, 100 bp, Homo sapiens
agaaaggtgaaaggggtactggatcttcaggacctcgggggctgcctggccccccaggccctttctggttactgtggctttatggcagccaacctttatg

SEQ ID NO: 799710 - DNA, 100 bp, Homo sapiens
catgaggtctattatctttgcaaattatattgccagagacacacgtcgccttggcgcaacaaggaaactgaacagccaagactcctataacaattttacc

SEQ ID NO: 799711 - DNA, 100 bp, Homo sapiens
tttcgggaatgctgagaaaacagacagatttgtcatgaagaaactcaatgatcgtgtcatgagagaattgaatgatctggcacgggaccctccagcacag

SEQ ID NO: 799712 - DNA, 100 bp, Homo sapiens
gatgaaatgctgtcccaaccttactgggtcttagtggtgcaatggctagtataagcgtgcgttcgagtaccccaggctctcctacacatgtaagcagtgg

SEQ ID NO: 799713 - DNA, 100 bp, Homo sapiens
ttgagattttccgccttggctatgagcactgggccctgtatataggagatggctacgtgatccatctggctcctccaaatggagtgaaggtacctgagcg

SEQ ID NO: 799714 - DNA, 99 bp, Homo sapiens
ttctccagcagctgattgtaatgaatttgcccaatgttttgatgattggcagagacccactgtctgcttcgggctcagaatcaggttctgaaaaaaggt

SEQ ID NO: 799715 - DNA, 98 bp, Homo sapiens
tggagtccacttccaattccaagtgttcccagctgttagatgaaaatctaaaggatgaatactttgaggaaatcatggaagaatatgaagatattaga

SEQ ID NO: 799716 - DNA, 50 bp, Homo sapiens
caactgtctgatctcagttcatggcacgtggaggagttcagccccagagc

SEQ ID NO: 799717 - DNA, 100 bp, Homo sapiens
gagtggccgcgggcgccatggagggggtgctgtacaagtggaccaactatctgagcggaacatggcaacccgtgtgtgtctcatcccagaaagagaagac

SEQ ID NO: 799718 - DNA, 98 bp, Homo sapiens
gtcctcatgattctcctggcagttgtcatatgtactgtgtcagccatcatgtgtgtcagcatgagagagtctgccccaaattctccaagaattggaag

SEQ ID NO: 799719 - DNA, 98 bp, Homo sapiens
attgttttacagtctgttccgcatgatcgttataataaggggcccagaagacacctgctttgagtttggtgtttttcctgccatcctgagtttcccac

SEQ ID NO: 799720 - DNA, 100 bp, Homo sapiens
ttacaccatcctggattctggaggcatcattgtggccattgagcacagcagccgtcctatcaatgtgattaatgagaaagatcagtctaaagaaaaggag

SEQ ID NO: 799721 - DNA, 100 bp, Homo sapiens
ccagagctgtgcctcccagcaccacagtccttctgcagtccctcgtccagccacccccaggcacagttggcgggcagctcccaggtctccatgagtacgg

SEQ ID NO: 799722 - DNA, 100 bp, Homo sapiens
acccgacagcaggaagagatgctggggcttcaaattcctgccgtttgttcatcgttgtgcctaaagcatgtcgatgtggcgtcaagtacatcgtccaaat

SEQ ID NO: 799723 - DNA, 98 bp, Homo sapiens
cagtgtgggaatcacagcctgtgaactggccaacggccatgtcccctttaaggatatgcctgccacccaggttctgtcagtgtgtgtggaagaagaaa

SEQ ID NO: 799724 - DNA, 100 bp, Homo sapiens
cgctgcgcggcgcggcggccgggccctcgagacggggacggttgcactgctgtgatccatcctcatctcctaaagatgcatcctgacttatctccacact

SEQ ID NO: 799725 - DNA, 139 bp, Homo sapiens
aaaggtataaataaagtgatggcacaaaacaatctgggcatgccaccaatggtgatgagcaggattatattccatcacaacaagatattctgcttgccagaagacccaccaaaggcatccatgaatacgactttgaaat

SEQ ID NO: 799726 - DNA, 98 bp, Homo sapiens
cctgccccatatccagaatgaaatccatgctcagagatgccaagaagaatctagacagacaggcctttctagcctctaggaaacgacataaaaaagat

SEQ ID NO: 799727 - DNA, 98 bp, Homo sapiens
cagacccttcacccctcacctcgatgcagccagtagcttggatccttgtgggcatgatccataatcggtttcaagtcctcctcatgcagaagtaccgg

SEQ ID NO: 799728 - DNA, 99 bp, Homo sapiens
gcgcacatcccgcggggcccggccgggtggggttgagcggaccctggtgcttcctgggagtcagacagcattcgacttggatgacgttcaggctgggct

SEQ ID NO: 799729 - DNA, 98 bp, Homo sapiens
aggtacttggatctccagtgggagctgccctctcgaaggcaggacagcggtggcggcagagtggtggatatgttcttggctttaaaatagatcctgtg

SEQ ID NO: 799730 - DNA, 100 bp, Homo sapiens
gtgcagtaccgcaggcattttctggtggacaacagtgtgtttcatgattttaggtgatgggcaagtcagaaagtcagatggatataactgatatcaacac

SEQ ID NO: 799731 - DNA, 100 bp, Homo sapiens
atattagcagctcagcaactcaggttatcaatactctggctgaccatcatcatcgtgggactgactttggtggaagtccttggttacatgtcattattgc

SEQ ID NO: 799732 - DNA, 100 bp, Homo sapiens
aagtcccttctgctaggacaacgaggaacttctacttgcagaaaagtgggctaaaatgaacaagctcccctttccaaagattgatccttatgtgtttgat

SEQ ID NO: 799733 - DNA, 100 bp, Homo sapiens
atgatgccatcaaacaaatgaagaaacacctaaagctggccaagactgtgaatgaaagctggaatgccttagcaaccccatcagataagctgtttttctg

SEQ ID NO: 799734 - DNA, 100 bp, Homo sapiens
caccatcactgcccacagcttggaggagggtcactatgtcattgggccaaagatagagattccggtacattatgcagatctgctttaacgttggaagtgg

SEQ ID NO: 799735 - DNA, 100 bp, Homo sapiens
gcataatggagaacctctctacattccagtaacccaggtgatttgaagatattaaagctagaaattggaactagaaaatcaaaagaattcaaggcatctt

SEQ ID NO: 799736 - DNA, 99 bp, Homo sapiens
ggaactttgctgaaagcattcagatgctgactcctttggcaacaccatcatgacatcacaacctgttcccaatgagaccatcatagtgctcccatcaaa

SEQ ID NO: 799737 - DNA, 98 bp, Homo sapiens
tttcttcagcctatgtagacagccacaaatgggaagcaagagaaaaagaacattactgtcttggtatgttcgcaattcgtgctgatcatgattttgta

SEQ ID NO: 799738 - DNA, 99 bp, Homo sapiens
acaagtttaatgtcaccaaacccatccatgcgctgaataaaaagcttgtggtgaaggggggcaaaaaaaagaagcaagttctgaagttcactcttgatt

SEQ ID NO: 799739 - DNA, 98 bp, Homo sapiens
cagcttcaggagtttggtcaaagcaaccgaaaaggagagtttcctgcatcagcgagagctttctaactgtcaaaggtgctgccctttttctaccacgg

SEQ ID NO: 799740 - DNA, 99 bp, Homo sapiens
gctccagtcaggccgatccgctccgctcacggctcattggtgggcagtattacttatgggaattgctctgatcatgctaatggctggatttattaagat

SEQ ID NO: 799741 - DNA, 100 bp, Homo sapiens
gatgttgtcaaggtggcctaccaggaggccaggggtgtcgccatggtggtcttttggtgccttaatgaagagtcggattttgaagcagccttcagcgtgg

SEQ ID NO: 799742 - DNA, 98 bp, Homo sapiens
ctagtggattaccttacgcttttccatcctttcaagacttcctataaggcccacttaagttgggaaagattaagatgccacctcagtatggacagcaa

SEQ ID NO: 799743 - DNA, 98 bp, Homo sapiens
gatggagatgaaggaggacgacgtttcttttctcatggtgtgatagcagtggtgatatttattttgctttgcatcactgccatagccatacgcatcta

SEQ ID NO: 799744 - DNA, 100 bp, Homo sapiens
aagagaagcagaattatacctagaagtctactaatggacagttagtcacccacctacatgttgaggttccagcaacagatagaaatgctttaagttcact

SEQ ID NO: 799745 - DNA, 98 bp, Homo sapiens
cgggaacttttcaactgacttttacttttgacgaccaccatgactgagatcactgctgaagtgcggagcttgttaacagacgtgcatgcctggcctgt

SEQ ID NO: 799746 - DNA, 100 bp, Homo sapiens
ttgctgctcacctagataaccaggttccagttgagagtccgagagctatttcccgcaccaatgagaatgacccggccagccagctgggtgtgtaccgggc

SEQ ID NO: 799747 - DNA, 100 bp, Homo sapiens
cttccagctgccagggggcttaatgaactgcaaagatcgagctgggagcattagtacccttgattctttagactttgcaagatattcagatgatggtaac

SEQ ID NO: 799748 - DNA, 100 bp, Homo sapiens
gatggatgggctggcacgctcagaagatctcgtatttgtcttagcagcttctaacctgccgtgggttattatattatgcaggacatggttatgaaaattt

SEQ ID NO: 799749 - DNA, 107 bp, Homo sapiens
cgagcaacagtgtagtggcgtattccacatagcaaacagaggacaagaattttgggcagatttgaatgccatgaacgtgtatgaaacaactgaatttgaccaactac

SEQ ID NO: 799750 - DNA, 100 bp, Homo sapiens
ccagcctcaggcgtgcgcggacggtgtgcggttggtggattcaaagtgggattggaccttcttgtagaatttgaattccgcacaactacaacgactggag

SEQ ID NO: 799751 - DNA, 98 bp, Homo sapiens
acatcacaaagatcctggaatatataaatgtgttgtttgtggaactccattgtttaacttcctggacaagatcgacgtgatcaagcaggctgactatg

SEQ ID NO: 799752 - DNA, 100 bp, Homo sapiens
gcagcacttgttccccaaacaagtgctcctacattctggaatactcccccagttgcaagaggcgcaggaccgtggaagacttcaacaaattctgcacctt

SEQ ID NO: 799753 - DNA, 98 bp, Homo sapiens
agccggcgtcttcgtttgggacgaggagaggatccaggaggaggagttgcagagatttatactatggtggggaagctttctctgtagagcagccacag

SEQ ID NO: 799754 - DNA, 100 bp, Homo sapiens
gagattagacgtagcagattagatgctgtctttgcaggtgccatgcctacaatggcaagcatcaagctgtctacacttcatcccattgtgaatcatccac

SEQ ID NO: 799755 - DNA, 100 bp, Homo sapiens
aacccagacagaggggagcacagagaaagagaatgatgaagagaaaggcccggagactgtagtggtagcagagaattttgatgaaatagtgaataatgaa

SEQ ID NO: 799756 - DNA, 100 bp, Homo sapiens
tgaatcctgcggcagaagccgagttcaacatcctcctggccaccgactcctacaaggttcacgcaaagaatctgctccacaagttttgcttccagaagaa

SEQ ID NO: 799757 - DNA, 98 bp, Homo sapiens
ccagagagccattctatgtcaaacattccaagtactctttgaggtgtggcagctctcagaaaagaagcaaataaacgtgtgctcccagttggattgga

SEQ ID NO: 799758 - DNA, 100 bp, Homo sapiens
agagcatatttgaaacttacatgtccaaggaggatgtttcagaaggcttgaagagaggaacactcatccagttccgcctggtggtgaagacagccctgaa

SEQ ID NO: 799759 - DNA, 100 bp, Homo sapiens
acagtgaaaaatgatgaagagcagatggaaacacatgaaagacttcctcaaggactacagtatgcacttaatgtccctcaagccagggctgagcaggaag

SEQ ID NO: 799760 - DNA, 98 bp, Homo sapiens
gtcatcaagaagaatgacgatggttaaatggaagctgatcggcgttcacatggaatcctcctcacgtagctcagatggatggccacagggagcaacat

SEQ ID NO: 799761 - DNA, 98 bp, Homo sapiens
gatgaacaggagaattctcacaccctcctcagtcacaacgcatgcaacaagctgcagaaccttggcctgaaaatgctacattatatcagcaattgaaa

SEQ ID NO: 799762 - DNA, 100 bp, Homo sapiens
gagaattgcttgaaaacttctgcaggtccatgttttgttgctctttggtgtaacgggaaactgcgctgcctgtagtaagctcatccctgcctttgagatg

SEQ ID NO: 799763 - DNA, 100 bp, Homo sapiens
aataatatccaatcagtacaacaatgagccttcaaacatatttgagggtagaatggttttgaagaagaaaaaacctgctttctgactgattttgccttga

SEQ ID NO: 799764 - DNA, 100 bp, Homo sapiens
ctctcactgtgtctttctgtgttacaggtgcagcttcaagcttaggaccacccaccatgcctatccagaattccgttgatgcagcaaagccgctgctgcg

SEQ ID NO: 799765 - DNA, 100 bp, Homo sapiens
taaagaagattacaacagactgagaagagaagtggagcaccaggagactgcctatgagtcatcctttttgaacttccatgactcagactgcgaacccaag

SEQ ID NO: 799766 - DNA, 100 bp, Homo sapiens
agtggaacatcctgttactgagatgatcacaggaactgacttggtggagtggcagcttagagagttacttaaagatccactctacattggactacggcag

SEQ ID NO: 799767 - DNA, 98 bp, Homo sapiens
tctgggtcattacaagtgggagaagtttgtgtacctctatgacacagaacgagctgaagaatgttctgctgactctgacctcaactttcttattcctg

SEQ ID NO: 799768 - DNA, 100 bp, Homo sapiens
ctgttttatacttgcttttgcttcagcgttctgtggttgtcaacaggacatggtccggcgaggagagatcatcgacaatgacaccgaggaggagttctac

SEQ ID NO: 799769 - DNA, 99 bp, Homo sapiens
tggagcagggagaggagctgtggataacgggaggtgaatttccatgtcaacatagtcctggcatttcactgaaagcagaagctgtctcagtcaagaaag

SEQ ID NO: 799770 - DNA, 99 bp, Homo sapiens
tgaggacgtgcttcctgcttcatagataagagctctattaccaggttttaaacttcgccatgatcgtgtcttctgcactcatgatatggaaaggcttga

SEQ ID NO: 799771 - DNA, 100 bp, Homo sapiens
aaaacatcgtggccaacacggtcttgctgaaagccagggaaggtgggcaccatgtccttgaagcttcaggcaagcaatgtaaccaacaagaatgacccca

SEQ ID NO: 799772 - DNA, 99 bp, Homo sapiens
aaagagtggatttcagcctgcacggatggtcttgaaacacaaatggtttttgatgagttttgatcatcctgagaaaaatgggccttggcctgcagaccc

SEQ ID NO: 799773 - DNA, 98 bp, Homo sapiens
cattcaggacacgggcttttctgtgaagatcctcgcccctgggatcgagcccttctccctgcagcacctacaggacttgggctgcttcaggctgaacg

SEQ ID NO: 799774 - DNA, 98 bp, Homo sapiens
caagtcattgaaccagacaaaaacagaaaatattgtagtgcaaaagcaaggcattcgttctacttagccaaacacagtggtcgacagctcacactcca

SEQ ID NO: 799775 - DNA, 120 bp, Homo sapiens
ggctctagaccaagatagaacagcccttcagaaagtgaagaagtctgtaaaagcaatatataattctggtcaaggagaagaaactgaggcctggaatttgattaactcattcaaggttac

SEQ ID NO: 799776 - DNA, 98 bp, Homo sapiens
aggaggccagaaagttgttttcaaacctaagcggattaaactgcaaatatctcatgaagctgctgcctgtatcactggtctccgggcagccatggagg

SEQ ID NO: 799777 - DNA, 98 bp, Homo sapiens
cgcgaggaggcgcgggaggtgttcgagaacgaccccgagacgctctggcaggctgccctgagcacgctcaaccccaaccccacggacagctgtcccct

SEQ ID NO: 799778 - DNA, 100 bp, Homo sapiens
cgatgaagcccagacctgcagggttcgtggataataaactcaagcagcgagtcatccaggttgctaggatactgggcgttaccaaggagatgcagaccct

SEQ ID NO: 799779 - DNA, 100 bp, Homo sapiens
tgtctttgtgttgtctgcatttggaggagcaacaatgtgggactatacggagggcttatcgagacaaattgaagttttggacccattgtgtactagcaac

SEQ ID NO: 799780 - DNA, 99 bp, Homo sapiens
ctgatattaaaatctcaggcataaaatttgttcagcatgatgctgtagagggaatcttaagagccgacacccgcactgccaggatccaagatgcagggc

SEQ ID NO: 799781 - DNA, 99 bp, Homo sapiens
tctgttcccatgcaaaccaatgagggagaagtatcggaagaaagcagttccaagattgtggatttcttaaagaagaagcatgattttgtagaccttatt

SEQ ID NO: 799782 - DNA, 100 bp, Homo sapiens
agagaggcctagaaaggaatgatagctggggttcttttgacctgagggctgctattgtatatcacactaaagagatgaggatgacatcaatgatgtgact

SEQ ID NO: 799783 - DNA, 98 bp, Homo sapiens
ccagagcagagaccatatagctgccctcagctgcactgtggcaaggcttttgcttccaaatacaagctgtataggtaaaatgaaaggcctggcattta

SEQ ID NO: 799784 - DNA, 98 bp, Homo sapiens
ttcagctctattctgggaggcatgaaacatctgctttgacggtggaggcaaccagtagcatcagggaaaaagttggaaaaggggaagatagtgatgta

SEQ ID NO: 799785 - DNA, 98 bp, Homo sapiens
cttgaattttgatcaagataagctgccttaagttctcttcattacacttttcggctttgtgagaaaccttaccatcaaacacgatggccagcaacgtt

SEQ ID NO: 799786 - DNA, 100 bp, Homo sapiens
aggagctgtgcatcgcatcccactccatcgccaggatctccttcgccaaggagccccacgtagagcaggctcagtagatgaaggcgtttctgagggcttg

SEQ ID NO: 799787 - DNA, 99 bp, Homo sapiens
gcaatattagaccatcaacagtttgactacataataaggatgatgaattgtactctacagattaaatctcttgatgaacagtgtgtggttggcaaaatt

SEQ ID NO: 799788 - DNA, 99 bp, Homo sapiens
aaatctgttactgcagacagatgggaaaaatatttgatcaagatacagtttatgtaacttgatggaagaaaatggaattactccaaaaagacaagtgct

SEQ ID NO: 799789 - DNA, 99 bp, Homo sapiens
ttttagaaaaacaagaattacagcagccaacctatgttgccctgagttacataaataggtggaagatggatgcctgaagtgtagactgctgctagctga

SEQ ID NO: 799790 - DNA, 99 bp, Homo sapiens
ttagattcatcagcaactcctataaacacagtggacgtcaataatgaaagctcttcagagggagatgaagaagcaaatcttggtctgcccatcagtcca

SEQ ID NO: 799791 - DNA, 100 bp, Homo sapiens
ctggcacgtcacttccgactagtggagtttttagccttttaacattcaaggattagagaagctcgcagaggctcagcgcaggtttgctacacttcagaat

SEQ ID NO: 799792 - DNA, 100 bp, Homo sapiens
tggccagatagaagaatgccggatcctccggggacctgatgggctgagtcgagatgttgctatgaggacagattcatcaaaaatgactgacgtggagtct

SEQ ID NO: 799793 - DNA, 100 bp, Homo sapiens
caacgacctcacccagcaggagatacggaccctggagaatccttgagcttgatttgattgtcagagatgaagacggaaatatcttggaccctgataatac

SEQ ID NO: 799794 - DNA, 98 bp, Homo sapiens
caaaatatcggagaataatttctttctcgctgatcgcctaacttctactgacgaagcttggaagttgcagaagagacttgaggtttaacagaataaga

SEQ ID NO: 799795 - DNA, 100 bp, Homo sapiens
tacatcactgcaataattgaggagcagcccaaaaactatcaagtttgactaagaaaaatggctttgtcagcccaacagatacccagatggtttaactcag

SEQ ID NO: 799796 - DNA, 100 bp, Homo sapiens
tccgtgcgagaggaccaacggagcgctgaggcgggcgttttcttggatgaattgcttgctttggaggtgaagctttgttctaagaatatttgtttcatct

SEQ ID NO: 799797 - DNA, 99 bp, Homo sapiens
aggtttgtctcttccagatcagaactgaggaacaaaaacccccatcctgggaaaaatggggaagctgctgcagacattcaatactgcctcaccttgtca

SEQ ID NO: 799798 - DNA, 98 bp, Homo sapiens
gcgcatgctgtcccagctggctgctgctgagagcaggcaccgaaagttggcttttgaaacgatgagtgttatatctgtggtcactaactgtgcgctga

SEQ ID NO: 799799 - DNA, 120 bp, Homo sapiens
ggcccggcccctgcggcccgcgcggagcggacgcgcgtggcgctgcccgcattagtgccagcagtagttcccaagggctgtctcagccatccacccagacgactcagtatctgagagcag

SEQ ID NO: 799800 - DNA, 100 bp, Homo sapiens
ccatcgcccacccgaggacgtccccccagccggagtcgggcatcaagcgactgatgatgtgaggcataaagttcatctgaacacctttggcttcttcaag

SEQ ID NO: 799801 - DNA, 100 bp, Homo sapiens
agaactactagcagataatttggggggacttcatattcagaagtctatataaaggcagtaacgtgatgagatctattcatggcgtgggagagctgatgac

SEQ ID NO: 799802 - DNA, 100 bp, Homo sapiens
gacccagagtgtgggggaaatatctctggagaagccctcactccaaaggctgtccaggcgcaatacattcactactttcactgcctaagaatcctggacc

SEQ ID NO: 799803 - DNA, 100 bp, Homo sapiens
cgtgtcaaccactgggatattagcgggagtgaaggataattctggcctcatagaacaagttgggaagtgttccctcctcccctattttctgaaagtttgc

SEQ ID NO: 799804 - DNA, 100 bp, Homo sapiens
ccagaggacctcagaaaggagctctatgaactttgggaacgggtcacagaaagtcgagagagccaaatgacgattgaggagaggaagcagctcatcactg

SEQ ID NO: 799805 - DNA, 100 bp, Homo sapiens
tcatctcgtccaacgtcggggaagttgtctgctttgtgtccctggtgatgttggaacattaatgatggaacatggccaaacttcagtcatgatcctgaag

SEQ ID NO: 799806 - DNA, 100 bp, Homo sapiens
gattcccgcccgcttcctcctgcttcccatcgaagctctagaaatgaatgtttccatctcttcagagatgaaccagtctccagagaatacagagggcaaa

SEQ ID NO: 799807 - DNA, 101 bp, Homo sapiens
ctttatatcctaaacttttcaagcctgaaggaaaggcagaactgcctgattacaggagctttaacagagtggccaaatcaatgaaggtccctgtatatgag

SEQ ID NO: 799808 - DNA, 100 bp, Homo sapiens
ctgagagaatgggggcaggagctctagccatctgtacgtatttcattagctagtccacgtcagctttttaaggcttctaatatgacccagcgatggcaac

SEQ ID NO: 799809 - DNA, 101 bp, Homo sapiens
tgtacctgctggaacatctgcatcccttcctgcagaggcagcagctggattatggcatctacgtcatccaccagccaccgctggagtcgctggccacagtg

SEQ ID NO: 799810 - DNA, 100 bp, Homo sapiens
actgcagctggacgtcgccgactttgccaccaccatctggcagcagtttccccctttctagggtgaggatggttctacacagccacccggagttccttag

SEQ ID NO: 799811 - DNA, 99 bp, Homo sapiens
gaagtgatccgaaaatctgggctaagtgctggcaagagcgatgtctactacttcagggctgcccagggattgccaggagctgttccaggttggggagag

SEQ ID NO: 799812 - DNA, 98 bp, Homo sapiens
agataaaagcccggatgaacttcaggaaaggtctgggttcctaagcagaagccactggatcctgtgctggaaagtgtgacgctggaaccggagctgga

SEQ ID NO: 799813 - DNA, 100 bp, Homo sapiens
gaaagctcctcccccgtcctccgttagctaattaaaacatttttcagggacgtagccatccagagggcagactttgacgacactgcgacatactcagcag

SEQ ID NO: 799814 - DNA, 100 bp, Homo sapiens
cctgaggaggcgagctagccgggagttacaccgccaccgccaggtcttgttcagcgttgcgtaatcatccagaaagatgacaatggatttgggctgacgg

SEQ ID NO: 799815 - DNA, 98 bp, Homo sapiens
ggcggtgacggcgcggggtccgcgcccggagcgccccgccgcgcacacttcctgcctgacacagctcacttcaagaagtgcacaatgtcagaacgtgg

SEQ ID NO: 799816 - DNA, 100 bp, Homo sapiens
ccgcagccgagccagcaagatccgagtgcactcgcgaggcaacctctgggccaccgagagcgcctgctcgctgtgcccccgggttatgacgacccccaat

SEQ ID NO: 799817 - DNA, 99 bp, Homo sapiens
ctcctgatgcttttgcagaccgcggtcctgcaggggcgcttgctgctggacgtgactctggacccagacacggcctaccccagcctgatcctctctgat

SEQ ID NO: 799818 - DNA, 100 bp, Homo sapiens
aaaccaagaattatctcttcaggaaggctaagaaacctttccagcttggacctacgtcatatcactgaactggataatgaaaccgtgatggaaattgtca

SEQ ID NO: 799819 - DNA, 100 bp, Homo sapiens
agatgatacaggaaaaacagtgaggtcatggaaattagacatgagagagggagtgttgacattcagggatgtggctgtagaattctccccagaagagtgg

SEQ ID NO: 799820 - DNA, 100 bp, Homo sapiens
tccggcccctgcggaagcaggtggagctgctcttcaacacacgatacgttttgggaggtcatcagcgatgagcatgggatcgaccccacaggcagttacc

SEQ ID NO: 799821 - DNA, 100 bp, Homo sapiens
gcaggaggacatgcagaatgtccttcagagactgcagaaactggaaacgctgactgctttgcagattgtcactgctgttccaagggcacacgcagaggga

SEQ ID NO: 799822 - DNA, 99 bp, Homo sapiens
cgagccttccttgtaacagcgcgaatccccaccaagacagcaatgttcttactcctctcctgctgtaaagccactcatcttcgatttccctgaggactt

SEQ ID NO: 799823 - DNA, 98 bp, Homo sapiens
agaattcaaagaagctcctggcagcagcaaaactcttagctgactccactgctcgcatggtggaagctgcaaaggtgaatgaactggtgcaggtagaa

SEQ ID NO: 799824 - DNA, 100 bp, Homo sapiens
gacagtggggaggaagaatgccggtcacagcccaggagcttcagtatcagacacagcacagcagccatctgaagagcaaagcaagtctcttgaaaaaccg

SEQ ID NO: 799825 - DNA, 100 bp, Homo sapiens
acggaaagtggaaattacaacagagactattaaattgcaacaggattcagaaatcatggaaagcaggcgagtgttgtgtataaaggaagttgaaatcctg

SEQ ID NO: 799826 - DNA, 98 bp, Homo sapiens
ggccttcgtctgtgccggcttatccgatgtggtgctcaccttgggcacatttttgatgatgggcctcgtccaactgggaaaagatactgcataaattc

SEQ ID NO: 799827 - DNA, 100 bp, Homo sapiens
tccgccctggggtcattgtcagtgtttggtgctggcaccaactcgggaactggcccaacaggtgcagcaagtagctgctgaatattgtagagcatgtcgc

SEQ ID NO: 799828 - DNA, 100 bp, Homo sapiens
gaaaccccgcctcttacagtcacgagatggatttgcagccgctgcaagtgtgtggaagggccgtgttcgtgttggcaaagaaggtcggctgctgagccag

SEQ ID NO: 799829 - DNA, 99 bp, Homo sapiens
tactcatctattttgaataaatcagaaactgccatcaggaaatatggccgagattttcaggcaatctcagacgtgattgggaacaaatcagtggtacaa

SEQ ID NO: 799830 - DNA, 100 bp, Homo sapiens
aaagacgaaataaagaaaaaagatgaaaagatccaactattagaacttcagcttgtaaagatggctttgcagcaggaaggatttgaccgaaaaaagcgag

SEQ ID NO: 799831 - DNA, 147 bp, Homo sapiens
catcatcaaccactttaaccccaaaattgagtcctacgctgctgtgaatcacatatcccaactgtcagaggagcagcgtttgctgccaattgatggggcaaatgatctcttttttcagccacctccactgactcctacctccaaagt

SEQ ID NO: 799832 - DNA, 100 bp, Homo sapiens
tcattaaatggatcttctgctggcagatcttcagtcgtgctggtgaagcctgcaaaaaggtgatacttaatgtaccttctaaactagaggcagacaaaat

SEQ ID NO: 799833 - DNA, 100 bp, Homo sapiens
ctgcccggtgcccgaggaggcagccaagctcgtagcctgccactccgtgcgattgaaagaaggtggcaagaggaagaagcagaagcagagagaggagtcg

SEQ ID NO: 799834 - DNA, 100 bp, Homo sapiens
acgtgtttgcggttcagccctttgatgaccgcagcaggtattgttgcagcatctggcagtgagactgaggatgaggacagcatggacattcccttggacc

SEQ ID NO: 799835 - DNA, 99 bp, Homo sapiens
gcacccacgcccctcaccccccgagagccggatcttagtaagagccctaagaccatgaaaaagctgctgcccaagcgcaaacctgaacggaagccttca

SEQ ID NO: 799836 - DNA, 99 bp, Homo sapiens
ctggcggagctggagctggagctctcggaggtccctgactccacctcttctgccacaaacgtcagcatggtggtatcagccggcccttggtccagtgag

SEQ ID NO: 799837 - DNA, 99 bp, Homo sapiens
ctcctgagtagctgggattgcagggtttatttttatcccaaaccccttcctcccaggttaccagtggcactgggtgaaacagtgccttaagttatattc

SEQ ID NO: 799838 - DNA, 100 bp, Homo sapiens
actgttctccccatggaagttcttcaaggccaggcagtacatgcagatgctacccaaggaaaagcagccagtagcaggctcagagggggcacagtaccgg

SEQ ID NO: 799839 - DNA, 100 bp, Homo sapiens
gtgtcaaaaggcaaagtgtgttttgagatgaagcactatgagatgcttgctaatcgaacagctgcaaatggtcactgcattgatatttatgcttgtgccc

SEQ ID NO: 799840 - DNA, 100 bp, Homo sapiens
aagtatggggtgcagaaggatcggatggataagtacactcagaagaagccttgtttttactggcaacctgttattaccgctcaggaaaggcatataaagc

SEQ ID NO: 799841 - DNA, 135 bp, Homo sapiens
gcgaaatgatccagaaatcggtgtcctccgatctacagccttatctccaaactctgccagctggtgactcactgatacaattatcaagccacccagccagcaccaggttgtagcgtccaaggaacagaaggattc

SEQ ID NO: 799842 - DNA, 100 bp, Homo sapiens
caaaggaagacttgtaacctggagaagaggtgaatcaaacatcccttctggaacaatacagagtaggaaaggtttgcagaataagagtcagtttaggacc

SEQ ID NO: 799843 - DNA, 100 bp, Homo sapiens
aaacttggacagctctctatgaaagcgtggatacccatcaacgaagttttgatattggaattcagattggctatcagcgacgcaataaggatgtgttggc

SEQ ID NO: 799844 - DNA, 98 bp, Homo sapiens
agaagaacttgtacagagatgtgatgttggagaactatagcaatctggttttcttgggctgaccggttccctgatgtgttacctgcttctgctactga

SEQ ID NO: 799845 - DNA, 100 bp, Homo sapiens
agggtcagagcattttctctgtgccaccagagagtttcgtgtgcgtgccatctgggattgacagctcagcctgaactctatcttctgaacaccatggacg

SEQ ID NO: 799846 - DNA, 100 bp, Homo sapiens
ccatgaattcacctttgattccagtgtgaactgtcaatcataagactccatcaagaatgctggaggaagggtgtttgtccactgccaggcaggcatttcc

SEQ ID NO: 799847 - DNA, 134 bp, Homo sapiens
ctagagctattcagagcctgaaaaaaatagtcaatagtgctcagactggtagcttcaaacagctcacagttaaggaagcccagggaaggctgtgcagggacgtctcatctcccatgtgtgatgctgacaccagc

SEQ ID NO: 799848 - DNA, 104 bp, Homo sapiens
ccagaggacagctctgtgctgatccccaccgacaattcgaccccacacaaggaggatctaagcagcaaggttgttgcttagaatatgctaccatgttggataaa

SEQ ID NO: 799849 - DNA, 98 bp, Homo sapiens
atggatatcccagatatccttcgagccaagaggacatctgaaatctatagccaggccgggtgagagcaaaactttcagcaccacttgctggcatggga

SEQ ID NO: 799850 - DNA, 105 bp, Homo sapiens
atgtggaccccgtgctcaacatgctggtctttggagaaagtattctcaacgatgcagtctccattgttctgaccaaccatgaagaactgtactcaagtcgccctt

SEQ ID NO: 799851 - DNA, 100 bp, Homo sapiens
atcttcatggtgcggctcatcttcgagagatttaatccagagactgacttcactatagaacccacagttgtatcaatggttggggaaagatagtggcaac

SEQ ID NO: 799852 - DNA, 100 bp, Homo sapiens
ctgggcgcccaccaacaatggatggcaactccctgctctcggtaccaagaactgttcattatgaaggtggcgctgtgtctgttcatgcacgttccctttg

SEQ ID NO: 799853 - DNA, 119 bp, Homo sapiens
cagagtctgatggcagcggccactctgaggacgccaactcaggcatggaagaggagatggttcgtgttacgcagtggccgtttaactggagatccagatgttttggaatattacaaaaa

SEQ ID NO: 799854 - DNA, 100 bp, Homo sapiens
gaagctccgggaacaagtgaactccatggtggacatctccaagtcttcttgcagaacaaagctcgccgagaggacttctgtcctcggaagctgcggcaga

SEQ ID NO: 799855 - DNA, 136 bp, Homo sapiens
tgaagaaaatgtatgtactgacgggaaaaggaggataagcaagtcgaatttttgtcttacgagccaaggagcaataactgaacgtttaagaagcttcagtatgcatgatttaacaactatccaaggtgatgagcct

SEQ ID NO: 799856 - DNA, 99 bp, Homo sapiens
acatattgctgaaaggcatggtcacaaagaactcaagaaaatcttcgaagacttttcagtttattttaggacagtggaacttatagaagagcctataaa

SEQ ID NO: 799857 - DNA, 98 bp, Homo sapiens
ttcttatactctagaatatacaaagacaaaaggagattctgatgaagaagttattcaagatgattccagaagcttatttcattagagacccccacact

SEQ ID NO: 799858 - DNA, 100 bp, Homo sapiens
aacaactgaaacctactgcttctgtcaaaccagtacagatggaaaagttggctccaaagctgctggccttcctgcaaggactcttcactttctatcacca

SEQ ID NO: 799859 - DNA, 98 bp, Homo sapiens
aagaaaaacagaggagttctattaagacggcatgtactggcattgaaaacattgacgaagctattacattgcttgaacaaaataattgggacttagtg

SEQ ID NO: 799860 - DNA, 100 bp, Homo sapiens
cttcgcgctgaggagccctcgttttcgagatcaggcctgaccgggataagctccagctacttgaaggaaattttgccaaagaagtgagccatgaaatgga

SEQ ID NO: 799861 - DNA, 100 bp, Homo sapiens
gaagagttcaactttcccagaagttgttctaacgctgcctttgctttaaaacagtattacttgcggtcctcgaggccacacgggttaatcgaagaaagag

SEQ ID NO: 799862 - DNA, 100 bp, Homo sapiens
tcataaaatgattcgactcattacgcatgggcttggtggagaaggctatctcaatttcatggtctaccctgatgggagagtctgcatttccatcctccac

SEQ ID NO: 799863 - DNA, 100 bp, Homo sapiens
ggagaaagccagcctaatccaaagactgtggaacttttaagtggagtggtggatcagaccaaagatgggccttattccactgctggggattgatgtgtgg

SEQ ID NO: 799864 - DNA, 101 bp, Homo sapiens
cctggcacccagcacaatgaagatcaaggcttggccggtacaggtgtgagaaagggactactgcagtcctcactgagaaaatcactcctctggagattgag

SEQ ID NO: 799865 - DNA, 98 bp, Homo sapiens
tggatccgcgggacaagaaaattcatgcggaaagggggctgtatacagctttgatccagtagggtcttaccagagagactccttcaaggctggaggct

SEQ ID NO: 799866 - DNA, 100 bp, Homo sapiens
attcacatctaaaccaaccactgccacaacctgcgcagcagacaggttaccagccagtcttgtctggtcaacagggattccaaggcctaataggagtgca

SEQ ID NO: 799867 - DNA, 98 bp, Homo sapiens
cagaaggagaatagaggaagaaaagaaggcgtttgctgaagcaaggagaaatatgaccacactccagacagatgaggtgaagaatgtaccttgtggga

SEQ ID NO: 799868 - DNA, 98 bp, Homo sapiens
gtaaatgccctccaggacccgttcgccttgtcatcggccggcaccctaatccaaaggttccatgcctctgcagcggtgcctcatgtttgctgtgtagt

SEQ ID NO: 799869 - DNA, 100 bp, Homo sapiens
tcagaatgcattgccattttcacatagttggagtcattcgttgcccagtttgcagccaagaatgtgcagagagacacatcatagataacttttttgtgaa

SEQ ID NO: 799870 - DNA, 100 bp, Homo sapiens
gacagatttgtcatgaagaaactcaatgatcgtgtcatgagagttggactccatgaaagaattgcacaaaacaaatcgacagcagcatgagaaacatctg

SEQ ID NO: 799871 - DNA, 99 bp, Homo sapiens
tccaggtccgacccgcgaacccctctgggatccccgccgctctgtctacaacccgagaccagcatctcagacatgtcgaaaaagatgttttgatcccta

SEQ ID NO: 799872 - DNA, 100 bp, Homo sapiens
cagcaccaggggtcagcagggggccagctcaggacacacagacccagctggaactcgcttattgcaggagtgaccaggacactacctcctagaagtaatg

SEQ ID NO: 799873 - DNA, 99 bp, Homo sapiens
tttcctccaggacagcacctagtcgtggccggaggagtctcagagctgtcagaaagacctttaccagaagatgatagtattgaagcagatatactagct

SEQ ID NO: 799874 - DNA, 99 bp, Homo sapiens
gatgttcggtgcagctgccagatccgctgatctagtgcttctcgaaaaaaaccttcaggcggcccatgggatgtacagttacccagcacgtgtacctcc

SEQ ID NO: 799875 - DNA, 105 bp, Homo sapiens
caggcagaaggtcaataaaaatggaggcaagctcttctggaatcactaatggaaaaaccaaagtcttccacccagatctgcttgacatttacctggaaggatgct

SEQ ID NO: 799876 - DNA, 100 bp, Homo sapiens
aatgagaccaatgaaatcgccaatgccaactcccgtgttcaagcagccctggccagggatcatgcgcacagtctatgggaaccacgaacgctttgagaca

SEQ ID NO: 799877 - DNA, 99 bp, Homo sapiens
atggttgccggctcccctctcaggacaacccagatgtgcaacaaagtgcgatggacatggatttgattgacatactttggaggcaagatatagatcttg

SEQ ID NO: 799878 - DNA, 99 bp, Homo sapiens
tgattctccagcgacaggacccggcgccgggcactgagcaccgccaccatggggaaggggatacctgatcagagaagcagtttgatgtactaaaggctt

SEQ ID NO: 799879 - DNA, 98 bp, Homo sapiens
ccaattaaaattagtatcccacgctacgtcctctgcgggcaaggaaaggatgcacacttcgagtttgaggtcaaggtcacagggattatggacccaga

SEQ ID NO: 799880 - DNA, 98 bp, Homo sapiens
agaggaaaaggagggcagcgacctgagaccagtggtcatcgatgggagcaacgtggccatgagacaatacaatggtgggtgaagagaagatgtctcta

SEQ ID NO: 799881 - DNA, 100 bp, Homo sapiens
gttctcctggagttcgctgaggagcagctgcgagccgaccatgtcttcatttgcttccacaagaaccgcgaggacagagctttaccactcctgaaggccc

SEQ ID NO: 799882 - DNA, 108 bp, Homo sapiens
gtacaactgtaaccgctataatgaggatgatgcaaaggcagcaagagatgcacaggagaaaagagtagttgaacagctacggaagaacctgatagtaaagcaagaaca

SEQ ID NO: 799883 - DNA, 100 bp, Homo sapiens
ttggttcacaacatcatcaaatggttccagcaacagatagaaatgctttaagttcactctggggaaagctggcctctgaaatcttaatgcagaattggga

SEQ ID NO: 799884 - DNA, 100 bp, Homo sapiens
cacaaatgtacccccagtacacttactactatcctcattatctccaaaccaaggtggtactgtgaaggcaaggagcttgaaaattccccagatattcaca

SEQ ID NO: 799885 - DNA, 100 bp, Homo sapiens
gtagaggatgacttctctaatcagttacggtgaatctggattgggaaagtcgacattaatcaactcattattcctcacagatttgtattctccagagtat

SEQ ID NO: 799886 - DNA, 98 bp, Homo sapiens
atagttcaaacttctatatcacagaaaagtgccggtggtggtgtgcacattgagccccggtatagacagttcccccagctgaccagatcccaggtgtt

SEQ ID NO: 799887 - DNA, 100 bp, Homo sapiens
taccttccagtgcagtgccatcggcaggaccgtggcaggagacaggctctggttacaggactttatggacagcagcctgctaaccaagtcatcattcgag

SEQ ID NO: 799888 - DNA, 98 bp, Homo sapiens
acgaggtgctcacggccgagcagattctacaacacatggtggaatgtatccgggaggtcaacgaggtcatccagtgccgccaagctcctggacaagaa

SEQ ID NO: 799889 - DNA, 100 bp, Homo sapiens
tgggatatgccaaagatgttgatcaaggaagtctgtgtacatcttttgtgggaacactgcagtatctggcagactgccagattcacttacagccccagct

SEQ ID NO: 799890 - DNA, 100 bp, Homo sapiens
aagtggctgacatggccaccaacacacgtgaagatgctgtggacaattatcgagatagactaacagaataccccttctacacacccagctggacctccac

SEQ ID NO: 799891 - DNA, 100 bp, Homo sapiens
catctttacggctctggggatcgtgatgggacaggtggtcggactcagatggatatggcagtggacgtggatttggggatggctataatgggtatggagg

SEQ ID NO: 799892 - DNA, 98 bp, Homo sapiens
gaagctggatgcagaatttgatcactttgtggttgatatgaagccctttgttctaaaattacctcataggacagtttccagagatgaatgatatgctg

SEQ ID NO: 799893 - DNA, 100 bp, Homo sapiens
gaattgctgcacagcgctgtcgcaagagaaaacttgactgtatacagaatcttgaatcagaaattgagaagctgttagcttctggaatttataattttgc

SEQ ID NO: 799894 - DNA, 98 bp, Homo sapiens
ctttgtttcttggagtccacttccaattccaagggcactgtgtttagtcttgagtcagaggaggaggaataccctggaatcactgcagaagatagcaa

SEQ ID NO: 799895 - DNA, 98 bp, Homo sapiens
aaaattgcacgattaagagagctgatgcttgagcagttcgttactatcttggaaggagtgctggcaaaattatccagatatgacgaagggactttgtt

SEQ ID NO: 799896 - DNA, 100 bp, Homo sapiens
ctgagatatgatgattttgaagtcatttcacatcgaagccatgatttaaatatcggcgttaaggtttgatgaacttgtgaaaaaattcaaagtcgaatat

SEQ ID NO: 799897 - DNA, 98 bp, Homo sapiens
gaagactcgggaggaccagggaagcagtgaaaatgatgagagatggaggagagagcgatggcttttttcacccagaaggccagccccagcggcttccc

SEQ ID NO: 799898 - DNA, 99 bp, Homo sapiens
ggcaattcaccgaattcgaatcaccctaacaagccgcaacgtaaaatccttggaaaaggagcaggcagatggcttgtgcagaagattggagaaggcttg

SEQ ID NO: 799899 - DNA, 100 bp, Homo sapiens
ctgcaggagaccggcttttgggttggatacactccagattggatatttctgctgagaaatgtaatgcgaatcagtccagatcagggacagcagtttgccc

SEQ ID NO: 799900 - DNA, 99 bp, Homo sapiens
ttgacgtgtcaagcactaactggtcttgctctatcgcccaagctggagagcagaggcatgatcacatctcactgcagccttgtcctcctaggctcaggt

SEQ ID NO: 799901 - DNA, 99 bp, Homo sapiens
tctgagggaattgggaggtcggcggccccaaaaacactggcttcatgtcctattgaccgtaaaccttttcaggcagtgtttaaattcagtgcattggaa

SEQ ID NO: 799902 - DNA, 98 bp, Homo sapiens
ccgcccagagcgagcgggtggaggctctcaatgccgctgccctgcgcttctcccagctgcaggatggcctgatatgaaggagtcacgcctcccgcctc

SEQ ID NO: 799903 - DNA, 100 bp, Homo sapiens
tgctatcaaggaaccacgctctcgtctggtttgatcacaagacgggcaaggtgtgtgccctcttcctgattctggagaaaaatgccggtccggaagcaag

SEQ ID NO: 799904 - DNA, 99 bp, Homo sapiens
cttgatcctcctcctaattgcagatcttcctcagaactgtgatcctaacattcccctagttgctcaggaattaatgaaaaagatgatacgtcaatttgc

SEQ ID NO: 799905 - DNA, 99 bp, Homo sapiens
gaaaactggataacactaagtttagatctcatgagagatgtggtgcaattgctgaacaaaccccgattttgttgttgttcctccttaggaattctagga

SEQ ID NO: 799906 - DNA, 99 bp, Homo sapiens
agaccctgaaaaactggaccaaattagacagagtgtttgattgcatcgaggtctatgcccctggcttcaaggactctgtggttggcagagacatcctca

SEQ ID NO: 799907 - DNA, 99 bp, Homo sapiens
tctaactgggcaaaagaagtacaaggaatttcagaacaaattggcagagggggtcgatttgggaggaaaggtgtggctataaactttgttactgaagaa

SEQ ID NO: 799908 - DNA, 100 bp, Homo sapiens
acatggcatcacacaaaatgtgctggttgatggtgttaagaaactctcagtttgtgtttctgagaaagagtgcctggaagagctgggatgtctggttgag

SEQ ID NO: 799909 - DNA, 99 bp, Homo sapiens
gcagatatgcctgctaacatggataagcatgccctgaaaaagtatcgtcgagaagcctatcatcgttggtgatgtatattggccaagtggccaaggatg

SEQ ID NO: 799910 - DNA, 98 bp, Homo sapiens
gctcggattctcgtagctgtgccgggtggcccggttccttcaaggggcacaggatgtctttgcctttttatcagaggtgccaccagcactatgatctc

SEQ ID NO: 799911 - DNA, 100 bp, Homo sapiens
gcagtgagaaagcaaaggctgctctgaagcgcacgacctccgactactttctccttcaagaaatgcactcggtgatggaaagagagccactattctgaag

SEQ ID NO: 799912 - DNA, 100 bp, Homo sapiens
tcccggggggcagcaacggcgacatccagcaagatggctacgaattcctggagatcctgaaacaggttgcccgggacaatactgacaaccccgatctgag

SEQ ID NO: 799913 - DNA, 98 bp, Homo sapiens
aatttcaagaacaaaggccgcgacttggaggtacaattttgtgatgctggccctgtcctcctcattcctggtgttatcctatctcttgacccgttggt

SEQ ID NO: 799914 - DNA, 100 bp, Homo sapiens
ggagtggagcgaggagcgcttccgcgtggacaggaagaaacttgaggccatgttacaaggtcaaggtcagcatctcctcgacgatcaagatctatctctc

SEQ ID NO: 799915 - DNA, 106 bp, Homo sapiens
atgatgaggaagatgacgatggtgaagaggaagtgaagagttttgaaacttgaccttgaccagatagtcttcaagatgccaaactggggcggaggcgcaaaatgtg

SEQ ID NO: 799916 - DNA, 99 bp, Homo sapiens
tgaagtggatggagagaagtcatggaactgaaaaagcactgactgctctgcttaaggcaacgctccccagtccccccacccccgaccccggaatcatgc

SEQ ID NO: 799917 - DNA, 100 bp, Homo sapiens
agaaggcagccgaggggctgtcaaagctccaactggaggccaccctgtggttcaggattctcagtaagttaagtcaggaaatcaacaagaacgaagagag

SEQ ID NO: 799918 - DNA, 99 bp, Homo sapiens
accaatgccagcctgtccttcctgcagatatgaaaaacagtagctccgtatcgaatacattgacaaatggatgtgtcatcaatggacatttggacttcc

SEQ ID NO: 799919 - DNA, 132 bp, Homo sapiens
cgacggagggggcggccgggtccgcatcgagaagatgagctcagaggtggtggattcgaatccctacaggtgtgaggtgggcacagatagctggtcgcagtgcaatgacacacctgtgaagtttgctcgttt

SEQ ID NO: 799920 - DNA, 98 bp, Homo sapiens
ccaggactatcggaacaaatacaaagcacctacagactattgtctggtgctgaaggtaaactttcctgagaatggctttctctctcctgataaactgt

SEQ ID NO: 799921 - DNA, 99 bp, Homo sapiens
ttacatcgatgaccttggacacctccatgttatggacacggtctttcttattcaggtgctccatacttgcttgcagtgcctacgtggctctggctttgg

SEQ ID NO: 799922 - DNA, 100 bp, Homo sapiens
catcgatgtcaccttccccagcgtcgctcccttcgagcatggctctctcaaccgataccacaacagccacccgcttcgggagcgggctcggaagctgtca

SEQ ID NO: 799923 - DNA, 98 bp, Homo sapiens
tggaagagcggatgaagagcacagaggtcctgcctgagaagacggatgctgtcaacgaagccctggaggctgctttgtaccgcctcagtggagactgg

SEQ ID NO: 799924 - DNA, 98 bp, Homo sapiens
tatccatatagtattttactaggtcatgaagggaagatggctgtggaaggtgttttaaaggagtgtgctgatgctgcctccccagctctgtccctagc

SEQ ID NO: 799925 - DNA, 98 bp, Homo sapiens
cctttggatgggctgtctcacgcggatgtggttaatctgctgaagaacgcctacgggcgcattatcctgcagttttttggctgcaggattaagtaatg

SEQ ID NO: 799926 - DNA, 100 bp, Homo sapiens
cattggtctaaagtctttccaaaaggtcaaggttcacaaggtgtgcctacaggggttgtggaaggagacgctgcccccggtctatgccctggaattgctg

SEQ ID NO: 799927 - DNA, 100 bp, Homo sapiens
aaagcttctgtgaaagttctagtggagcagtttttgcaagaaaggatcaaagtgaacggaaaagctgggaaccttggtggaggggtggtgaccatcgaaa

SEQ ID NO: 799928 - DNA, 98 bp, Homo sapiens
ggcgaggaggcgcggaaccatggccgatgggggcgagggcgaagacgagatccagttcctgcgaactgccgagtgatagctactttcacatgttcagg

SEQ ID NO: 799929 - DNA, 98 bp, Homo sapiens
gagctcctcaagaataacggaagggaggcgagtgttgtgtataaaggaagttgaaatcctgggccttatgtgtgtagactggcaatgtccatttgaag

SEQ ID NO: 799930 - DNA, 50 bp, Homo sapiens
ctttcgcatttgggaccctgcaggaatcttgtggaagaagaatgaagttg

SEQ ID NO: 799931 - DNA, 100 bp, Homo sapiens
ggaggcagtaaattcttcagctgctcggacagatgaagctccccaaggagctgcagataggaaccaaggctttagccttctcaactcattgactggaaca

SEQ ID NO: 799932 - DNA, 100 bp, Homo sapiens
agttcctgcagtaccccactctacgatcagctctttcaccatgcctggatcacttcctttgaatgcagaagcttgctggccaaaagatgtgggaattgtt

SEQ ID NO: 799933 - DNA, 100 bp, Homo sapiens
attggtgtccactgtacccatggtttaaacaggactggctacctcatttgcaggaaagagacatagatctttcctgtggcaatggatcttcaaaagtgaa

SEQ ID NO: 799934 - DNA, 75 bp, Homo sapiens
cccggagcacccgacccctgagcctcggcaagacgcgcaggaagaccagcgcgcgggatgcgtcccccacgccca

SEQ ID NO: 799935 - DNA, 98 bp, Homo sapiens
cggctcccgtcctgcggcggcggggcgtgcagactatggaaatgatgttagacaaaaagcaaattcaagcgattttcttattcgagttaaaaatgggt

SEQ ID NO: 799936 - DNA, 99 bp, Homo sapiens
aggaactggaccagccagcagcctctaagagctcctagacgacctgcaggctgggacaatgaaaagaaaatagctattttacatgaaaattttacaacc

SEQ ID NO: 799937 - DNA, 98 bp, Homo sapiens
atttcttcgaggtggagtcggagctgggacgttgattatggaagattcccacaagagtaccacgtcagagacagcacctcaacctggttcagcagttc

SEQ ID NO: 799938 - DNA, 100 bp, Homo sapiens
tacacagacactgacctgtacacaggtttacccaaggtccagcctagcccctaggcaccatgtcggacagtgatctaggtgaggacgaaggcctcctctc

SEQ ID NO: 799939 - DNA, 50 bp, Homo sapiens
cgacaacagcctaagagtttgaaggcatgttatttgaaagcaattgagac

SEQ ID NO: 799940 - DNA, 100 bp, Homo sapiens
gcgacactatggcagtgtctgctgaaacagaaccgcatgagggaaagaggaaagtggaatctctgtggcccatcttcaggatccaccaccagaaaacccg

SEQ ID NO: 799941 - DNA, 100 bp, Homo sapiens
ggcctgctcatgactctcccgcacttcatctcggagccataccgctacgacaacaccagccctgaatatggctcaagcctggaagatgacgtggtggggg

SEQ ID NO: 799942 - DNA, 100 bp, Homo sapiens
gcagaagttgactgagatcagaggccctgtgatgatcgtgtcagacgccttctggcaagaggggagagcctctggaacagtgtacagtggggaggagaag

SEQ ID NO: 799943 - DNA, 100 bp, Homo sapiens
cccaaccctttcagtaaatacttggaagataacagcgacctcttttctgaacagaaatcacctgctaagaagctgactaatgcattaagcaagtccctga

SEQ ID NO: 799944 - DNA, 100 bp, Homo sapiens
cgaaaactccaccgtagcccttgccaaaggtattatagctgcaaatgtccttgtattctgtttatggagagtaccttctctgcagcggacaatgatcaga

SEQ ID NO: 799945 - DNA, 100 bp, Homo sapiens
ctggcctgcagcttccagcacagctaccgcctgctggtgcctgttggactaaatgctcttccttcagaggattatccggggcatctactcaatgaaaaac

SEQ ID NO: 799946 - DNA, 98 bp, Homo sapiens
tacagggactttctgcagtgcctctgagaacttacgcagatcagccgactgtcactgaagtgtagagctcctgaagtctctcaatacatctatcaggt

SEQ ID NO: 799947 - DNA, 100 bp, Homo sapiens
tgtagccatcaacccgagtgcagtttcgatggaaaatgaagtgggaaagaagcctaaggaataaagtcatctctctagaccataaaaataaaaaacatat

SEQ ID NO: 799948 - DNA, 100 bp, Homo sapiens
aggatgtcatctatgaccgagactcactccagagacagctcaattcagccctgccacaggcccttgagggaaagctacttgatcaaacatccgatagtca

SEQ ID NO: 799949 - DNA, 100 bp, Homo sapiens
gtcccaccatcttccatccctgatgcttggagaagctgaggacacacaggagttttactacccttggatgctgctgttgacatggaaaagattgaggaac

SEQ ID NO: 799950 - DNA, 99 bp, Homo sapiens
gccacacaactaggagagtgtccccatccggtgagactttgcagacggtcttgggcgtctttggtactggcttttttaggggtctgcctggggattacc

SEQ ID NO: 799951 - DNA, 100 bp, Homo sapiens
cagttcatccctgagccttgagctcccagtcgcaggccttggaaaaccattgcagagtgaatggaggctattcaggcctaagggatgtttaccttcttca

SEQ ID NO: 799952 - DNA, 147 bp, Homo sapiens
ctggagccacgggaaggaagtgtgacggctgcaagcactggcatgcacgcgagggctgggagtgtgtttgcagattagctgatccaacccgaaggacaaactgtggctatgaatctggagatcatatgtgcatctctgtggacagtt

SEQ ID NO: 799953 - DNA, 100 bp, Homo sapiens
tctgcttctgttttttcaccatcatttggtctgaaacagacagataaagttccaagtaaaacggtagctgctaaaaaggctctagaggacaaaatcccag

SEQ ID NO: 799954 - DNA, 100 bp, Homo sapiens
gctgaaaaagaagaatcagcaaatactactgaaagtgcaatatttgagtatcactgcgaggaccttctaccgctttgaggctgtgtgggatagctctctg

SEQ ID NO: 799955 - DNA, 100 bp, Homo sapiens
agagattccgcgagccgacaccatgcgatccaaggcgagggcgaggaagctagccaaaaagatcctgaaggagctagacgagtgctacgagcgcttcagt

SEQ ID NO: 799956 - DNA, 100 bp, Homo sapiens
gagaaaaagttcagtgggaagcatgtcgtctttatcgctcaggtcttgtggatgagcagcagaaagttcggaccatcagtgctttggccattgctgcctt

SEQ ID NO: 799957 - DNA, 101 bp, Homo sapiens
tggatgcctcatccgccatacgttatgcaaccaacaataacgaaggaggcccaacttcattcaataaggagcctgacggatttatcccagacggtagaaca

SEQ ID NO: 799958 - DNA, 100 bp, Homo sapiens
gggctgtgtgccccttctccacccagaggtgagcatgggtttatgcgtcttaggcattattgtgatggcgagcaccaattctctgatgtggaccttcttt

SEQ ID NO: 799959 - DNA, 101 bp, Homo sapiens
gccgcgatgtagccacccggcgctcgctgggctacgcctacatcaacttccagcagcccgcggacgtggcagaggacgacagcagctgtgaggtgaacggc

SEQ ID NO: 799960 - DNA, 98 bp, Homo sapiens
aagctatcaaatctgaggtcttattttgttgagtcgaaagtgaaattttcctttggccaacgtgacagctaaaagatggcggcaaggcagcccaggca

SEQ ID NO: 799961 - DNA, 100 bp, Homo sapiens
tccaggcccacagccgggagatccgagagctcttcagtgccggtggtggtgtgcacattgagccccggtatagacagttcccccagctgaccagatccca

SEQ ID NO: 799962 - DNA, 90 bp, Homo sapiens
accgctacatgcaggtctggttctcaggccttactgggctcctcaaggaccatcagcacgtgcccatcgacatccagaccagcaagctgc

SEQ ID NO: 799963 - DNA, 100 bp, Homo sapiens
cagatgaaatggcccctcctcgatgtcccctccagcgccacagtcaaggacacgaggtcaccatctccagcacacttggaaataagatatgtggaacgga

SEQ ID NO: 799964 - DNA, 100 bp, Homo sapiens
tgtggcagtggaaaatgcgctcgggctggaccagcagtatcagatgtagaaggtggtgatggactgcagctcagaaaggaacatactctcaaaatattta

SEQ ID NO: 799965 - DNA, 98 bp, Homo sapiens
aaagaccaggttcaagggtctctccagaaaatcttgtggacaaatccaggggaagattgccaacactcctgatagctgaatgtgtgctggtttacatg

SEQ ID NO: 799966 - DNA, 99 bp, Homo sapiens
agcttcgccagcaagcggcggagctgcgcctcggcccgctcttctccctgcttaacgagaaccataggtaagaatgattgatgttggctgatattggag

SEQ ID NO: 799967 - DNA, 98 bp, Homo sapiens
gggccgagggctctgggcgccgagatggagccgaccatggccaacctggagcgcaccttcatcgccatcaagccggacggcgtgcagcgcggcctggt

SEQ ID NO: 799968 - DNA, 100 bp, Homo sapiens
caacttccatgggcgcgtcacacaggcctccgtgaagaacttccagatcatccatggcaatgaccgcttctccagggaaagtgaccgaggcagtgaaaga

SEQ ID NO: 799969 - DNA, 100 bp, Homo sapiens
ctcaagtcctgtcctcttctgaccaaagattgtggaagaaggactctgggaaaatggcctttcctatgaatgtaggacgctgctcttcaaagcgatccac

SEQ ID NO: 799970 - DNA, 100 bp, Homo sapiens
ggaagcaagtggctgttcttgtagttttctgcatagataataggataagttctgaacgtcgaaaagaaaagtctcgagatgcagccagatctcggcgaag

SEQ ID NO: 799971 - DNA, 100 bp, Homo sapiens
ccacgctgtccgtccgcagtaccgacgcctgcaggcaatagccctctggaacaagacaattcatgtgagataagaaagaagagcccacaagaccaaggat

SEQ ID NO: 799972 - DNA, 100 bp, Homo sapiens
ctttcccttttggagaatgtatttactcctatgttctgccatagtgatgagttatggctgcagcttcgattgccaatattgtaaaaagttctcttggtcc

SEQ ID NO: 799973 - DNA, 99 bp, Homo sapiens
cttgatgttctcatcaagcccacgagtttagaaagtcccattacagaatcctcccattaagtgggctgaaggacataagggagtatttaatattgaagt

SEQ ID NO: 799974 - DNA, 105 bp, Homo sapiens
tgtgaccaatgctttccacccacaaagattgaacgacatgccatgtactgcaatggtctgatggaggaagatacagacagcatcgcacagaattattttaaaaaa

SEQ ID NO: 799975 - DNA, 99 bp, Homo sapiens
catgttaaaaagtctttagataaggatcccttacttctatcaggtaacatctgccggcacctgctgccccgggtccagtgccccgccttgattgtgcac

SEQ ID NO: 799976 - DNA, 100 bp, Homo sapiens
tgttagtcaccggtgcaggaagaggacatgctggcaggatcattcacaagctgtttgtgaatgcccagagggatgctgaaaacgccattcaacagatggg

SEQ ID NO: 799977 - DNA, 99 bp, Homo sapiens
gaaaaccctgtacctcacgtattgtgccaatcacccttctgcagtgaatgtcctcacggaacacaggttcgatacaagaggctgttttcctagcgtggc

SEQ ID NO: 799978 - DNA, 100 bp, Homo sapiens
gactcagtgcagacctgcacaaacccactggacaccttcgtcccctttgatccctgtgtgctgaagagtttactaataaaacagtagcccacgtagcttg

SEQ ID NO: 799979 - DNA, 98 bp, Homo sapiens
accagcccgaccgggcgctccgcttcctggagaaggcacagcggctgtatccgacgccgcgagttcgcgacatcacggctgcagccctggctacgggt

SEQ ID NO: 799980 - DNA, 98 bp, Homo sapiens
cgggatcgtgaccgagaccgtgaccgagagcgtgaccgagagcgcgaatatcgtcatcgttagaaggtcccaaaggcaagcagttagaaggaactgaa

SEQ ID NO: 799981 - DNA, 100 bp, Homo sapiens
cccccacgcccaaccctcgtgcctccctgaaccactccactgcctttaaccctcagcctcagagtcagatgcaggaccaagatcactccatggatgaaat

SEQ ID NO: 799982 - DNA, 98 bp, Homo sapiens
ccgcgcccgggtctggccgcctgggcctcaggagtgcaagtagctgatgaagtatgtcgcattttttatgacatgaaagttcgtaaatgctccacacc

SEQ ID NO: 799983 - DNA, 99 bp, Homo sapiens
tttctttgtgcagcagagtggcttacactgggtctcaatatgcccctcttggcatatcatatttggaggaggagatgttaaagtaacccatcttgcagg

SEQ ID NO: 799984 - DNA, 100 bp, Homo sapiens
agaactggagttccagaaaggccccacccctgccattctagaatctctcatcagaagctccaccatgaggcgaggtggatggaggaagcgagctgaaaat

SEQ ID NO: 799985 - DNA, 100 bp, Homo sapiens
ctggagatgctgagctgaccagaactggaaggccgctcattgctatggacagtgctatcaccctgtggcagttccttcttcagctcctgcagaagcctca

SEQ ID NO: 799986 - DNA, 100 bp, Homo sapiens
acccccagatgtcattggagggtacagtggacggaaagtcccgggattctttgcgagccttcacccggacattcattgctgttcctgctagcaattcagg

SEQ ID NO: 799987 - DNA, 110 bp, Homo sapiens
ctcaggaagttgtccatcacttgatagtcctttggatggttgcaaagcctcattccttttgttcagctgccccctagtgactccgtgtgtgaagagtacggtttgagctg

SEQ ID NO: 799988 - DNA, 100 bp, Homo sapiens
tccgcgtgttcccaggcccgtggagagattctacaagggggttgctcctctctggatgagacagataccatacaccatgatgaagttcgcctgctttgaa

SEQ ID NO: 799989 - DNA, 100 bp, Homo sapiens
aacccataccggggcaccgtggtgtggatggtacctgagaatgtggacatctctgtgaccctctacagggctctgtgtgctccgggatggagcaggtgtg

SEQ ID NO: 799990 - DNA, 99 bp, Homo sapiens
gaaatgtccatgagaaaaagcttggagataaagttgctttttactggatagaccatgaagctgaaggaacttgagcggccagctgtccaggcatggagc

SEQ ID NO: 799991 - DNA, 99 bp, Homo sapiens
tgaattaaaaggtgtcaagaagctcagaatggatattttgctcgagtccatggtgtcagtcagcttataaaggcatttctacggaagacagaatgtcat

SEQ ID NO: 799992 - DNA, 100 bp, Homo sapiens
ctcccgaggctgagcagggcggggctgagtaaatgccggcttaccatctctaccatcatccgggatggagagcaatacatcatcatctttggagaattta

SEQ ID NO: 799993 - DNA, 98 bp, Homo sapiens
ggcagagtggaaaaaagagaggatttgcttttgtaacttttgatgatcatgatacagttgataaaattgttggatggctggctgtggtgaaattgatc

SEQ ID NO: 799994 - DNA, 100 bp, Homo sapiens
cttttagaggctttatatcctaaacttttcaagcctgaaggaaaggcagaactgcctgattacaggagctttaacagagattactgcaatgacctgaaaa

SEQ ID NO: 799995 - DNA, 98 bp, Homo sapiens
gggacttgggacttgcctggcgactttggccggacttttgctaactgcggcgggcgagacgttctcaggatcagttgtgtggccgggaccctactctc

SEQ ID NO: 799996 - DNA, 99 bp, Homo sapiens
cctcagttctgcgctgctcccgttccccctccccagagcaagggtgtgggccgaagatatgctcatgtggtgttgaggaaagcagacattgacctcacc

SEQ ID NO: 799997 - DNA, 100 bp, Homo sapiens
agccttaaactctccacactcagagtcctttgtttccccagaggctgttgcagaacctcctcagccaacggcagactataatgtaactgcaaactccaag

SEQ ID NO: 799998 - DNA, 100 bp, Homo sapiens
cggggctttggacgccggtggagacgcaggcgagcttcagacagcaaagtcctgacatgtgcagccgtgtggaggatgccgaaggaattggaatcaggca

SEQ ID NO: 799999 - DNA, 99 bp, Homo sapiens
gccaactagtcagcctgcgcctggcgcctcccctctccaggtcaccctgccccatctccatctcctatgagatgagtgactcccaagaccccaccactt

SEQ ID NO: 800000 - DNA, 98 bp, Homo sapiens
attggtgggctgttcttgatccaaaggaaaagcagaaatacacagacatggccaaggaggaaacttggatttaactggccagaagcaggtattcaaag

SEQ ID NO: 800001 - DNA, 100 bp, Homo sapiens
gccaccggcgccatgggccagtgcggcatcacctcctccaagaccgtgctggtctttctcaacctcatcttctggacatgccttgaattggaacgctacc

SEQ ID NO: 800002 - DNA, 100 bp, Homo sapiens
ggagatgctactgatgtcagggtgaaggttggaaaccacactgcagaaggaacgggcaccaacaagaaggtggccaagcgcaatgcagccgagaacatgc

SEQ ID NO: 800003 - DNA, 121 bp, Homo sapiens
ttccagcagcagcagtagctatggcagtggcagaagattttaattagaaagatcaactgaaatcggcaaacttctgagttcctacttgcaaaagaaaagtgacgtggaggatcactcggtg

SEQ ID NO: 800004 - DNA, 100 bp, Homo sapiens
tctggtgaccagaaaccaagacatccacgtttttcggctgggagaaacaaaggcagcgctgccctcgggggagcattggccctggcggaacgcagcagcc

SEQ ID NO: 800005 - DNA, 100 bp, Homo sapiens
ccgcgcagccgccgcagagtccgcggcgccaccgctcgccctccaggatgtttcgtctgaactcactttctgctttggcagaactggctgtgggttctcg

SEQ ID NO: 800006 - DNA, 50 bp, Homo sapiens
cttgaagaatgtacagtctatgtttggccacagagaagatccgcgaggtt

SEQ ID NO: 800007 - DNA, 99 bp, Homo sapiens
tttggaaacgcggagtgagtttttccgtgctgtgtagtttcgtgtggctgatcaaagaaagaaggcatacgcagatttctacagaaactacgatgtcat

SEQ ID NO: 800008 - DNA, 98 bp, Homo sapiens
ttcactgcttggaagtgtgagtgcgcgaagatgcgaaaggtggttttgatcaccggggctagcagacatttctcttgggaagttgtgcatctgacagg

SEQ ID NO: 800009 - DNA, 114 bp, Homo sapiens
ctccactccgtcccccgcgggtctgctctgtgtgccatggacggtttaagctatgaagaaggacatccctcacactctgaaacagatctccttcagagacagagttttgcagcc

SEQ ID NO: 800010 - DNA, 100 bp, Homo sapiens
ccacgcagctgggaaaaaggctttggcaagagaactgcgacacatcaccaagctgaagccctggagcctctttgatgtacttgtggaaaagtatggctgg

SEQ ID NO: 800011 - DNA, 100 bp, Homo sapiens
gttctcaaggagaaggcagacctgggttgaagttcatgagttcgcccagcctcagtgacctgggcaagagagagccggccgccgccgcggacgagcgggg

SEQ ID NO: 800012 - DNA, 100 bp, Homo sapiens
ctgaagatctctaccatttaattaagaaagcagttgctgttcgaaagcatcttgagaggaacagaaagtgtcttgggacaaggtgcgcattcctggtgtg

SEQ ID NO: 800013 - DNA, 100 bp, Homo sapiens
gcggataagaaagccgctgaggacaagtgcaagcaggtagctacagcaagctgggtagcaggcagatccaaaggatatcatgaagtttccagggcctttg

SEQ ID NO: 800014 - DNA, 100 bp, Homo sapiens
ttggcccagctccttggggtttccggctgcagggcggtaaggatttcaacatgcctctgacaatctctagtctcagcaaaacccagcagctcagattcct

SEQ ID NO: 800015 - DNA, 100 bp, Homo sapiens
cttgggatacctgtgcagccgttcatgatgtgaggctttcattattacagcgttattttaaggatattaagtattggagccatgggaataaaggttcaac

SEQ ID NO: 800016 - DNA, 100 bp, Homo sapiens
gaacggctagctttttgacctgttattaatgctgcactggctttagcagcaaaaccacagagtaaactggcccaagagaacatggatctttttaaagaac

SEQ ID NO: 800017 - DNA, 98 bp, Homo sapiens
aagttcctgtgatacaagaggagagggcaatgcctgcccaggctgtgtttgatgtggacaagaagaaagggttgactctgattgagctctgggaaggc

SEQ ID NO: 800018 - DNA, 98 bp, Homo sapiens
tcagtccttcctttccgacttagtcctcgggaagaagtttcagactacaagaaggccttacgaccggatatgggctataatacattagccaactttcg

SEQ ID NO: 800019 - DNA, 100 bp, Homo sapiens
tcaaagaattgaaaccctccaaaccacgtcatctgattcaattctgtggtgttcttggtcacacatttatggagtttctgaagggcagtggagattactg

SEQ ID NO: 800020 - DNA, 98 bp, Homo sapiens
agaaacttgttaaagacattattggtacatcaggaacgtctctatcaagaatacaatttcagcaaggctgagggccatctgaaacagatggagaagat

SEQ ID NO: 800021 - DNA, 99 bp, Homo sapiens
tctgtcgctcttgtgccctagcaccccgagaaccgtcagtttgagccagatggtgtggtgcagatagtggaggtggtcttgaatgggatggttctcata

SEQ ID NO: 800022 - DNA, 100 bp, Homo sapiens
gggctccgtggcaatgaattcttctgtgaagactccaggagcagaggctgagcagcaggatacagctagcgtggagcagtcctcccagaaggagtgtggg

SEQ ID NO: 800023 - DNA, 99 bp, Homo sapiens
taccctctactttgtattttgtgtggattcctcagagagtgaacttggaatcttggacctcatccagtctattatcctcccagtccacaacgctgaacc

SEQ ID NO: 800024 - DNA, 100 bp, Homo sapiens
gggttgtggaaaaacagtgatcgctaagaactttgccgataccttaggatacaacatagaacctattatgctctatcagacagaaagaatttactttcag

SEQ ID NO: 800025 - DNA, 98 bp, Homo sapiens
aaatttccgtggccagtgttcagctacagcttccttaatggtccttctgtacagtattttctccaaggtacactccgatcggaatgtatacccatcag

SEQ ID NO: 800026 - DNA, 99 bp, Homo sapiens
tacgatttactattgttgcttgcttacttactcttatcaatttctatgagaggggaagctgctcgctgatctggccaggcgcctgggcctccactatgt

SEQ ID NO: 800027 - DNA, 132 bp, Homo sapiens
gctggtttgtgctcaagggggatcagctctattatttcaaagatgaagatgaaaccaagcccttgggggacttgatctcatcttcatgccaggccttgggtttgacaaacatggcaaccgactggggagggg

SEQ ID NO: 800028 - DNA, 98 bp, Homo sapiens
ccaaacatgcccataagttttgtaacacagaagatgaggagactatgtatctgcggaggcatcacgttgggtggtttccatttagaccgaggccggtt

SEQ ID NO: 800029 - DNA, 100 bp, Homo sapiens
cgtgtgcttacttcatgtctctgggtcacattttgcaaactctggcctgttctattctgactgcgctattgagtgaattttcaagttcaagtaaaactag

SEQ ID NO: 800030 - DNA, 98 bp, Homo sapiens
gcttttgaagaagcagctgaacacttccagccttacatcaaattctttgccacctttgacaaaggggtaggataattgcggactgaaccctcgggctg

SEQ ID NO: 800031 - DNA, 100 bp, Homo sapiens
gtgggagctgaggctgatcagaactatcagaactacatcttaaggggaatagccaggccagaagaaggaaggcctgtggtgagtgggacaggaaatgaca

SEQ ID NO: 800032 - DNA, 100 bp, Homo sapiens
tggaactgcagtgctgcatcgactggacccatgtcactgaccccctcataggatccacacacatcctcaccccacagaaactgctggacacactgaagaa

SEQ ID NO: 800033 - DNA, 98 bp, Homo sapiens
cgggcagctacacatcttgaaagagaagctcttcctgtgaggggaacctgatctctccgacaaggaccgaaaggacctggagggccggctaaaggctc

SEQ ID NO: 800034 - DNA, 100 bp, Homo sapiens
agctgaggaactgcatgaggctgagcaggagctgctctctgacatgggagaccccaagatccaacttagaaataatgtttcattcaagataaggctcgtg

SEQ ID NO: 800035 - DNA, 100 bp, Homo sapiens
tgacagttgccagctgtttactggaagcaaatgcggtgtcatcacagcctacacaaacagatttacaagcagcacggaaatcagggatcctcttatgcag

SEQ ID NO: 800036 - DNA, 98 bp, Homo sapiens
gcgcgaccagaccggcccccccgagaccttcactgcctggtgtaactcccacctaaggaaagccggcacccagattgagaacatcgaggaagacttca

SEQ ID NO: 800037 - DNA, 100 bp, Homo sapiens
ccgctccattgccaaggtgaaggagcggctggagcccagatgtggacgagtgctcactagcagaaaaaacctgtgtgaggaaaaacgaaaactgctacaa

SEQ ID NO: 800038 - DNA, 98 bp, Homo sapiens
tgctcacctatgtcatggaggaagaggaagtaaaaatgttgagtagttcaaaatctatgaaggaactcactgaagaacagcagaatttacagaaagag

SEQ ID NO: 800039 - DNA, 100 bp, Homo sapiens
tggtggaatatgccaaggaaaaactggagagcttcatcaaaaatagtgatagctttgataaaccttatcagaagcttttagagaagcaaatcttgctgcg

SEQ ID NO: 800040 - DNA, 100 bp, Homo sapiens
acagaagagtgagagatggaacccgaagaagaaaggattcgttacagccagagattggaaatctgaaatagagtactatgctatgttggctaaaactggt

SEQ ID NO: 800041 - DNA, 100 bp, Homo sapiens
gcttacgagggctcctcccttcagctttggtccctcggggcgtctgggcagcctacgctttccgacaagttggatggcttgaggactggtactaaaagga

SEQ ID NO: 800042 - DNA, 100 bp, Homo sapiens
aagagtttcaagatgcaggtgaacagacatcactgggcagggaggggaatctacttgatgccaagagaaccatgtttcttaaagccagaggacccgcctt

SEQ ID NO: 800043 - DNA, 99 bp, Homo sapiens
tgacgcatctgtctgaggagcggtcagtgacgcgatggagcgggcaaggctctccgtgtgaaatggtcccatctcagactgccctgggtagacctagac

SEQ ID NO: 800044 - DNA, 100 bp, Homo sapiens
aactccctcctgaattgcatccgcgcctgtgggcccagagccctagtggtgggcgcagattctggggagcaggtcctggtggatgtggagaccaagagca

SEQ ID NO: 800045 - DNA, 100 bp, Homo sapiens
ctgggatccagtacgagttgaatcattgttcaaataagaatcaggaaacccaggcccaacggcaggtggatgcaagaagaaatgttccccaaaacgaccc

SEQ ID NO: 800046 - DNA, 98 bp, Homo sapiens
taccgcatagccctatttggaggctctcaaccacagtcttgtagatattttaacccaaaggcactccagtgcacagaagctcttcagtgccctgagcc

SEQ ID NO: 800047 - DNA, 100 bp, Homo sapiens
gggctgtcgcccgaatgcaggaagaccgtgatgggagctgcagcacagtcgggggtgtaggttatggggtgctgaggaatgtaaacaagtttgctgggcc

SEQ ID NO: 800048 - DNA, 98 bp, Homo sapiens
tgactcctacttcctctgtatagagcaactgttgaactcagctgcctgtagacattcacggcatggtgtaactcccacctccggaaggcggggacaca

SEQ ID NO: 800049 - DNA, 100 bp, Homo sapiens
gggccatggccgccgccgatgccgaggtacctttgacaggagcgtgaccctgctggaggtgtgcgggagctggcctgagggcttcgggctgcggcacatg

SEQ ID NO: 800050 - DNA, 99 bp, Homo sapiens
tacaatggaatctggtccaaacaatcatgggaatttccaaggggattcaaacttcaacagaatgtggcaaccaggaagctgagatgatttccaagaaca

SEQ ID NO: 800051 - DNA, 99 bp, Homo sapiens
cacagctgaaggctgcgagggactaagagcagaagccctaatttgtttagaactgtaatatgcacagttaaaacaacttgtcctctcaggaccttttgc

SEQ ID NO: 800052 - DNA, 100 bp, Homo sapiens
tacattcgatacattcagcagggactcgtgaaacagcaggatggcctgaaccaaaatggaagttattccttgcgtctgaagtatagcaccatcaccttat

SEQ ID NO: 800053 - DNA, 98 bp, Homo sapiens
ccactggctcctccccgtctcctgtgctaggccaggagctgctaagccgcacatctcttgagacccagaagctcgatctgatgactgaagtgtctgag

SEQ ID NO: 800054 - DNA, 100 bp, Homo sapiens
tacaagctgaccagtgagaactgcgagcactttgtgaatgagctgcgctatggagtcgcccgcagtgaccaggaaagtccatcagcttgataatggagga

SEQ ID NO: 800055 - DNA, 100 bp, Homo sapiens
tccagtcagcaactacaaggctatattccttctaactacgtggctgaggacagaagcctacaggcagagccgtggctgtacttttgatgatggtccaggg

SEQ ID NO: 800056 - DNA, 98 bp, Homo sapiens
agaatacacacatcacaaagatcctggaatatataaatgtgttgtttgtggaactccattgtttaagcaagacatctgtatagattctgcttcatccg

SEQ ID NO: 800057 - DNA, 137 bp, Homo sapiens
aagggaccatcatcctgacagctgtgtactttgccctcagcatctcccttcatgtctgggtcatgcccctgcagatcaagtcagtagtggcaccagagcatgtgaagggctacatctacgtggaggcctacaagcag

SEQ ID NO: 800058 - DNA, 134 bp, Homo sapiens
ttctcttggcaggcaaggttgtgcggatatgagtgtccagtctccagcttcgtgggtgcctggaggcaggtgcggagataaactcatcctgaaagtcgctgttgttctcctgctgagcaagaatggaggcccca

SEQ ID NO: 800059 - DNA, 100 bp, Homo sapiens
tgtcttcggtggactccttcggcagtccacccaccgccgccgcctcccagattatcgaatgtctgaaagaaaacaagaagcagctaagcacccgctgcca

SEQ ID NO: 800060 - DNA, 98 bp, Homo sapiens
gacgttattctgatctcaccaccctggtggcctttccctccagctctgtctatcctaccaaggtgttcctccaagaaaagctggttatattgaagacc

SEQ ID NO: 800061 - DNA, 100 bp, Homo sapiens
tcgcatcatccacagcagcagctggatattgagccggatagacctattggatatggagcctttggtgttgtctgagatccgtgctcagctcacagagcag

SEQ ID NO: 800062 - DNA, 100 bp, Homo sapiens
taaccctcactggagaatccagaggaagatgagaatgtgcctactgctcctgatcctccaagtcaacatttacgtgggcatgggacaggcttttgctttg

SEQ ID NO: 800063 - DNA, 98 bp, Homo sapiens
aataacaaggcttatctctaggatccataaggacctgaaggagaagaaggagaaggtggaggagaaggcaagccggaaagagcgaaagaaagaagtgg

SEQ ID NO: 800064 - DNA, 99 bp, Homo sapiens
ggctggagagcggcgaccactgcggatctcggaacattgacatcaccaatttcagcagcagctggagcgatggcctggccttctgtgctctgctccaca

SEQ ID NO: 800065 - DNA, 101 bp, Homo sapiens
ccgcccacaacggccacccccataaggcataggccaagaccatacccgccgaatgtaggacaaaggaaaggagctctctgggcttggcagtgctctaaaga

SEQ ID NO: 800066 - DNA, 98 bp, Homo sapiens
caggatgcagacaggagctgcctgctggcacacgtccaccgcctccaccacgagggcaggttcagagaagtccctggtgctgaaccgcctgcgtccag

SEQ ID NO: 800067 - DNA, 100 bp, Homo sapiens
cagaatcgatggagtccaacatatgatgtatcttctatcttaacatcaattcaggttgaagagctaaaggaaacggtgaaagaagaatttatgccttggg

SEQ ID NO: 800068 - DNA, 100 bp, Homo sapiens
tgggctacctgcattcactgaacatcgtttataggctcgtggtcccaagaagcatctgaagcgggtggcagctccaaagcattggatgctggataaattg

SEQ ID NO: 800069 - DNA, 100 bp, Homo sapiens
ctgaaagtgacaagcattttagaaaggagtctccccaggacagtgctatcacccgggatattaaccgaacattcccagcccatgactactttaaggacac

SEQ ID NO: 800070 - DNA, 100 bp, Homo sapiens
ttcaccacactcagtgatctgaggaagcacattcgaactcatacaggggaaaagccatttcggagctgttctatgaagaccgccatttccacgagggctg

SEQ ID NO: 800071 - DNA, 100 bp, Homo sapiens
gaaggtggtgatggactgcagctcagaaaggaacatactctcaaaatatttacttatatcaattcctggacacagaggcctgatggaattgggactgttt

SEQ ID NO: 800072 - DNA, 100 bp, Homo sapiens
cctccctcttctcccgactatttggcaagaagcagatgcgcattttgatggctcttttggaagaagaaagaaaagcctatcgaaatcaagttgaggaatc

SEQ ID NO: 800073 - DNA, 100 bp, Homo sapiens
gcctacatcctaactcgatttgctacccctgaatggttggacagtgattcctgccaaaagtgtgatcagcctttcttctggaacttcaagcaaatgtggg

SEQ ID NO: 800074 - DNA, 100 bp, Homo sapiens
tccaccatccgcgaggtggcggtgctgaggcacctggagaccttcgagcaccccaacgtggtcagacccaacatgagtgaagtttcctgcaagaaacggg

SEQ ID NO: 800075 - DNA, 100 bp, Homo sapiens
gcaagcaaaatgcgttaggaaaatgtgatgcatgtctcagtgaattagtgcactgaaaggctccaaaggaaaagactgtgaaatccctgtgcctgtgggt

SEQ ID NO: 800076 - DNA, 99 bp, Homo sapiens
acatcttgaattgggcaagaaattacttgcagctggacagctagctgatgctttatctcagtttcatgctgccgtagacaacagtgattgactacgtga

SEQ ID NO: 800077 - DNA, 100 bp, Homo sapiens
aatggacagttagtcacccacctacatgttgagtactactgctaaagtgcagcagaggctgataggattcatgcgtcctgaaaacggaaatccccagcaa

SEQ ID NO: 800078 - DNA, 148 bp, Homo sapiens
acaggccgaagtggctaaccaagaaactaaagaagacttacctgcggaaaacggggaaacgaagactgaggaggaacatacagtggcataagagagaccaacttggtgataactgatcataggattagaccaaggtgcagaagcaaac

SEQ ID NO: 800079 - DNA, 98 bp, Homo sapiens
aaagactacatggagaggatggcagcgcagcctagttgggcactagctgacatgaataatgatggaagaatggatcaagtggagttttccatagctat

SEQ ID NO: 800080 - DNA, 100 bp, Homo sapiens
caaggtccctcctggacttccgcagaatgaactctggaagcccagccagggacaatgcaccttcacagagattctgcactaatctgagtgaaggtctaag

SEQ ID NO: 800081 - DNA, 100 bp, Homo sapiens
gactccttgctgaatctgagcatcagaaccttcaggaaggggagagtggctcatgggctgagtggataaaccacaaaatgggtaatatactataggtgag

SEQ ID NO: 800082 - DNA, 99 bp, Homo sapiens
aaccaaccagacgaaagaaagatctctgggttgtggtggagagctgtctggggccacaggctccttcagcagccccgggttccccaacaggtatccacc

SEQ ID NO: 800083 - DNA, 100 bp, Homo sapiens
gctgctgctgctgctgctgcatgtctaccaggagaggagggaactgcggagcggggtgaagaagctgaaggagacctttgcttttattcagcagttggac

SEQ ID NO: 800084 - DNA, 100 bp, Homo sapiens
acattgctcacggcaactcttcagtgttggctgataaaattgccctgaaactggttggtgaagaaggatttgtagagctggactggccattatggaggag

SEQ ID NO: 800085 - DNA, 100 bp, Homo sapiens
tcgtctatcattggatgaagtggctccggagatggaggaatgatcaattggaatcgtctttttcctcctttacgtcagcgacaaaacgtaaactatcagg

SEQ ID NO: 800086 - DNA, 98 bp, Homo sapiens
tgttggaaccggcggcgttgcgtctaaaaaggcgaaagccttgaggttgaaggtgggacgagcctaatgaagtggtctttcagagccttgaagaccac

SEQ ID NO: 800087 - DNA, 100 bp, Homo sapiens
ctgtctcaaattggaagagcagagctgcagacaggaataagaagaacggtaaatttgaagaatgctggaagccaagcttgcacattctaggcagccattt

SEQ ID NO: 800088 - DNA, 99 bp, Homo sapiens
ccgatcatggcggatggcccccggtgcaagaggcgcaaacaagccaatcccaggaggaaaaacggtgaggccgcaggcggtgctctgggtccgggagcg

SEQ ID NO: 800089 - DNA, 99 bp, Homo sapiens
gtggcagaagatggctgtggagagcccgtccgacagcgctgagccgattacacctcaacaagaaggcaactgacaaacagccttatagcaagctcccag

SEQ ID NO: 800090 - DNA, 100 bp, Homo sapiens
aaattttgagccatttcgaatcacttaaaggagtggacattgctagcaatgagctcccaaagccatccaggcgaggattaaatccaccacacagggtgaa

SEQ ID NO: 800091 - DNA, 100 bp, Homo sapiens
aataagagcagaggatggaacacttcagtgcattcaagttcatagccctgatgaagcaagttactctgctctcctaataaatgcaagaaaatgaccttgg

SEQ ID NO: 800092 - DNA, 133 bp, Homo sapiens
cagaggcagaaggagccccagagctcaatgggggaccacagcatgcacttccttccagcagctacacaggaatgaggggagaatcatacttcatcggaatgaggagcccagggcagcagggacacgtccctga

SEQ ID NO: 800093 - DNA, 100 bp, Homo sapiens
gggaaccctggtcaccgtctcctcaggcccagctgagagccagcctggaggttacccagcagcaggccacccaggccgaaggccagctactagagctgcg

SEQ ID NO: 800094 - DNA, 100 bp, Homo sapiens
gtgctctcaaactttactttgcctcatttgaggagtgggaacaggcttcggcgaacacaaagaaaatgtgctctcactggccagagtaagtcctgtaaac

SEQ ID NO: 800095 - DNA, 100 bp, Homo sapiens
agccttacggagccgtctaccagatcaacgtcctccgggaccggagtcagaaccctccgcagagtaaagggctgtcttcatcggtggaatacaacataat

SEQ ID NO: 800096 - DNA, 60 bp, Homo sapiens
cgcgctcgttcccgtcggccggggtgcacagtaattgcctatccctgcaggaggtggaag

SEQ ID NO: 800097 - DNA, 98 bp, Homo sapiens
aagagaggaaacaaaaagttaaacaagcaagcctgccataagtgagaaggtgtgactgcacagaaaagttacaaaacaaatttgactttttgcgctca

SEQ ID NO: 800098 - DNA, 99 bp, Homo sapiens
gaaggacaagtgaatctgatgaagacaagaggaaagctgaagccagagtggccaaaattcagcaatgtcaaggtacaggtttgcagattccgccagcag

SEQ ID NO: 800099 - DNA, 98 bp, Homo sapiens
aacagactgagaaactctgttgttactcaagatgactacttcaagcagctgctgaaatgggttgcggattgaacaagttagagaaacgtgatgaaaaa

SEQ ID NO: 800100 - DNA, 100 bp, Homo sapiens
ctgttggtgcacaaaaagacacttatactatgaaagaggttactaatctggatgacagtaactgggcagctgcattttcatcacagcgttccgggctgtt

SEQ ID NO: 800101 - DNA, 100 bp, Homo sapiens
aggactcagttgtaaatggcacagaggctgaagttaaagagacagcaatgattgcgctgtattcatcaccaaagaaaaaacttacaccaatgcagaaatc

SEQ ID NO: 800102 - DNA, 99 bp, Homo sapiens
tcaaataatgaagaaggtgtaaagcttgttcgaatgtctgcaagccagttagaagccctctgtcctcagcaaccccaaggtccaggtggaggccatcga

SEQ ID NO: 800103 - DNA, 100 bp, Homo sapiens
aaaagttgcagaatagaaatagccacactcctctggagtctttaattcatccacagccatcatataaaggtaagaatgattgatgttggctgatattgga

SEQ ID NO: 800104 - DNA, 99 bp, Homo sapiens
gcaggtctaccgggccacgcaccgcctgctgctgctgggatacaggtgtaggtaaatcgagtattgtgtggcggtttgtggaagacagttttgatccaa

SEQ ID NO: 800105 - DNA, 99 bp, Homo sapiens
gttactccactgactctctcttttcctgataacatggccagcaagaaagtaattacagtgtttggagcaacaggcgaggaaacgagacctctttcgttc

SEQ ID NO: 800106 - DNA, 98 bp, Homo sapiens
aagtgaagaaaaagcttgagatgtagaaatgagtcctctggaaaatgcaattgaagtgctagaaaataagaatcagcagctgaagactctgattagtc

SEQ ID NO: 800107 - DNA, 99 bp, Homo sapiens
tcaagctcatattttgaagtgtttacgggtgcagcggaactgctgcctgacgctctgcaacttcagcatccccgaggagctggaattccagtaccgccg

SEQ ID NO: 800108 - DNA, 146 bp, Homo sapiens
ccatttaccgaagcctaggcattttacctcctctccgcacggcgcagtacaactccaaatggctcaatggtgaagatgcaatgaccggggacacagacaaatatcttgggccacaggaccttaaggaattgggtgatgattccctg

SEQ ID NO: 800109 - DNA, 98 bp, Homo sapiens
ctacaacccgaccaccggagaattcctggggcgcaccgccaagagctgggattcaaggcctcttccagatgtagccctgactgggaagtgcactcgtg

SEQ ID NO: 800110 - DNA, 100 bp, Homo sapiens
ggcaggccaggcggacgccggggagtacagctgcaaggccggggatcagcggctgtccttccacctgcacgtggcagattcagcgccctataaagaccag

SEQ ID NO: 800111 - DNA, 99 bp, Homo sapiens
gacctcaggtagtggctgtcgacatcaatgaccttggtaccatcaaactgaacctggaaatcacctggtagatttagtcgtccgtgttgtttttattct

SEQ ID NO: 800112 - DNA, 100 bp, Homo sapiens
agaaggaggatcaaaatcagacagtgaagatataacaagatcagcaaatctaactgaccagtcagccataatggcaggtgaagaaattaatgaagactat

SEQ ID NO: 800113 - DNA, 100 bp, Homo sapiens
gacttcctataaggcccacttaagttgggaaagattaaggtagttgtcctgggaacccctgcagaagaagatggtggtggcaaaattgatttaattgaag

SEQ ID NO: 800114 - DNA, 100 bp, Homo sapiens
tagactttcagctacttgaagatagccatcagccgctacgtgactcttttctccaggtttcagagttggtgaagcggtataatcgagaacacttaacagt

SEQ ID NO: 800115 - DNA, 98 bp, Homo sapiens
taagtgcatctctttccacaccggaggcctggagcatccagtcagaagtgtcctttgagggagcctatgggaacctcaagcggctgtatgacaaggca

SEQ ID NO: 800116 - DNA, 100 bp, Homo sapiens
tgcgtgcaatgttcaccagtcagtgtttgaaggagaagagagcaagatggatcctgagcttgaaaaaaaactgaaagagaataaaatatctttagagtcg

SEQ ID NO: 800117 - DNA, 99 bp, Homo sapiens
aattctgcatgccccagatgctggctggggaaatctggtgtatgttgtcaactatccaaaagacgtgctatgggaagagggcaaggcagccttggagca

SEQ ID NO: 800118 - DNA, 101 bp, Homo sapiens
ccaggaactgtctttatctgctgtcaaggatcttgtgtgctccatagtttatcaaaagatataagagttcggaccgcccagcacacaaggtcagcatgctg

SEQ ID NO: 800119 - DNA, 98 bp, Homo sapiens
gcaccggaaatgtgcctaccaggatcctcagtcttccacaatgaaccctgtttacagccccgtgcagcctggggctccttatggcaaccctaagaaca

SEQ ID NO: 800120 - DNA, 98 bp, Homo sapiens
ctgcgttttcccttttcgaacattatgatgacagctcggcaagaagtgaccagatgttaaaacaagtggctgaaatctcctttacagacaataggtga

SEQ ID NO: 800121 - DNA, 101 bp, Homo sapiens
tgattaataagcttaaacctggcgtcattaagaagatcaatagactgtctacaccaatagcaggattgcccgagcagttcagtgatgaagtggaaccagca

SEQ ID NO: 800122 - DNA, 99 bp, Homo sapiens
gaacgggcctgtcgaagtgcgcctgacaggagtccgctccccatgctgtcctcaccacattgctcatttctgaggcctggatggtgggcttgcaaggga

SEQ ID NO: 800123 - DNA, 98 bp, Homo sapiens
ggccaccgcctggctcaccttctacgacatcgccatgaccgcgggaatttgccatctgccttagtaagtcatgtactaaatcctcaacctggagagaa

SEQ ID NO: 800124 - DNA, 100 bp, Homo sapiens
ctcaggcctctcctctgagcgctcagactcagaccaagtaaaatgatcaacctgtcagtgccagacacaattgatgaaagaacaatcaacaaaaagaagc

SEQ ID NO: 800125 - DNA, 100 bp, Homo sapiens
gctctgggaatcttgaaaatctgtgacattgcaagggaaaaagtaaataaagctgctgtttttgaagagtcccttcagtctgaatatgttcattactaag

SEQ ID NO: 800126 - DNA, 100 bp, Homo sapiens
gaaattccgtggggaagaaggtttggattacggtggtgtggccagggacagaatgatgctgctaaaattagaacaggagattctggaatttattaatgac

SEQ ID NO: 800127 - DNA, 99 bp, Homo sapiens
ttgtgggccgccgtcggcagcaagaacagagagagaggtggacagatctgagagatactgaggaaacatgccctgaactgtcacagaatgaaaccagcg

SEQ ID NO: 800128 - DNA, 100 bp, Homo sapiens
ctccagaacaactcttcttcatagttacgttatactgcccctgcattgttggtattgaaagttctgtacagagtaatgagatgtgtgacggctgcaaacc

SEQ ID NO: 800129 - DNA, 98 bp, Homo sapiens
tgtgggcgctgctggcgctctggctgtgctgcgcgacccccgcgcatggatgcagcagtctcggccctggctgctctatgcagtgaatattacatgaa

SEQ ID NO: 800130 - DNA, 100 bp, Homo sapiens
aaaccagcagagttccacacggcatttctcaaaatcagagtcctctcataaagtgtgtatgtacagagaaccatcgctacatgaaattggagaaaaacaa

SEQ ID NO: 800131 - DNA, 100 bp, Homo sapiens
gccatgtgactgatcttcgtccaagaatatgtaaagaaaaagtgttgagttggcttttagttacccggctgtatgtgaattcttacagcacaataacttg

SEQ ID NO: 800132 - DNA, 101 bp, Homo sapiens
ctgattctggaaaccctcttgacactgtgttaaagaaaagtcctccatacattttctccccaattccattccttgggcatgccatagcatttgggaaaagt

SEQ ID NO: 800133 - DNA, 100 bp, Homo sapiens
acaacatttatccagaggtgtatgtgccagaccttaatcctgttatatctggatacattgctgctgcagaaaacaatggaaatgaatcaggtgtaagaga

SEQ ID NO: 800134 - DNA, 100 bp, Homo sapiens
aactgcgaggaaaatgagcagtctctgcccccgccggccggcctcaacaattgttcagagattttcaatgatgggtataagctcagtggattttacaaaa

SEQ ID NO: 800135 - DNA, 96 bp, Homo sapiens
aacgcccagcagctggatgtccagctgccaattcatcaatttgagaagaactaccactgctggaatgaagcatggatgacaaggcctgaccttcct

SEQ ID NO: 800136 - DNA, 98 bp, Homo sapiens
ccgcggctggccgcgtgagtagggataaacacacttgttacctatgatatggttccagagcccaaaatcattgatgctgctttgcgggcatgcagacg

SEQ ID NO: 800137 - DNA, 99 bp, Homo sapiens
aatacttcaagaatagcagaggagcagttgtggaagctgatcgaggaagcctaagcaggctctgtgaagtgggaatagtggtatttgagtcaaggtttg

SEQ ID NO: 800138 - DNA, 100 bp, Homo sapiens
aaaatttggacattgaccccaaactgcaagaatacctcggcaaattccgacgtcttgaagacttccgagtagatctgagtccagattggcaggtggacta

SEQ ID NO: 800139 - DNA, 100 bp, Homo sapiens
cgccaccaccaccgccgctgccccggctgcctcctccctgaggaagaggcagccagaattctcgcccaccagccaatgtccgtcggcacatgtgcagctt

SEQ ID NO: 800140 - DNA, 100 bp, Homo sapiens
actgcctgcgcagctccggccgcctggctccccatactagtcgccgcgcccccatggacttcgccctcaatacctacatgagccatgctgggatccgtct

SEQ ID NO: 800141 - DNA, 100 bp, Homo sapiens
ctacattacaataagcagaggctgtttgacagagcagacttaccctgaagtagttagaatgggaggacatgtatgcccaggactctatagagctactaac

SEQ ID NO: 800142 - DNA, 100 bp, Homo sapiens
tggaaagtgaggaattttgaagtacaccgtggtgacattgtatcattggtctcgagatttctgtggctcctcaagatattggtcataatcctggtacttg

SEQ ID NO: 800143 - DNA, 117 bp, Homo sapiens
actactatgtccagcctatttgcacaccatccaggagtcagtttattactggaaactaaaagaccagcttcaggacaaaactcgatttctgttatgcctgctcagaaaattacaaag

SEQ ID NO: 800144 - DNA, 99 bp, Homo sapiens
gggagcgtccggagctagctggatcctctaggcagtgaacagagtatctgtcaggcaagagctgctgtgatggtttatgatgatgccaataagaagtgg

SEQ ID NO: 800145 - DNA, 98 bp, Homo sapiens
ccgacttcgatgatcgtgtgtcggatgaggagaaggtcttcaaagcttcacctttctccaaaggcagatgtgaagaacttgatgtcttatgtggtaac

SEQ ID NO: 800146 - DNA, 99 bp, Homo sapiens
acaatttgagatacataagctggccttagaaaataaattgcctctaacttggcagctgcaatgactctccgcacggtattattgtcattgcaagcacta

SEQ ID NO: 800147 - DNA, 100 bp, Homo sapiens
ccaggagcaccgccgaggactccagcacaccgaggcagttcgacagaagtgtacagaggcttctggcaacacggattgccgtctacctgatgacctttct

SEQ ID NO: 800148 - DNA, 98 bp, Homo sapiens
ggtggtgaccccgcccagttggcccagaggatctcttctaacatccagaagatcacacagtgtttctgagaataaaggattagaaactaccaagaaca

SEQ ID NO: 800149 - DNA, 98 bp, Homo sapiens
gctccaacaggattccatggtagctgggatgttagggctcagaagactgtgcagtctttgtaactgatgaagagcaaggctttgtctctaattctgcc

SEQ ID NO: 800150 - DNA, 100 bp, Homo sapiens
ggcagagaccatgtttgacaagacgcggctgccgtacgtggccctcgatgtgctctgcgtgttgctgggtgtgcaactgaggaacatggctcaagaaact

SEQ ID NO: 800151 - DNA, 99 bp, Homo sapiens
aaagtggtctgtttagtgctggatgtgtccagcaagatggcagagtatgtccgtggttcagaccctgtattaaagcttttggacgacaatgggaacatt

SEQ ID NO: 800152 - DNA, 98 bp, Homo sapiens
gaagtcttcgagcagcacctgggaggtcacatcttgcaggtacttctaagtcaggagtacaatacaaaggacatgtggagatccccaatttgtctgat

SEQ ID NO: 800153 - DNA, 129 bp, Homo sapiens
ggaatcatattcatcatggacgtgatgttggtgtgttcacatttgatcatggcatgacccctttgctgatgcaagtaagggtgatgacctgcttcctgctggcactgaggattatatccatataagaat

SEQ ID NO: 800154 - DNA, 98 bp, Homo sapiens
tacaagcggacacgggaatatatccgaagcctgaagatggttccaagtattccctatctaggaataaacatcatcctgaccttcatctctgggcttgt

SEQ ID NO: 800155 - DNA, 99 bp, Homo sapiens
gaaaagaaactttatgaatataatcagtctgatacatgcagtattcatccacaatgcgatacctttcatagggtttggctttttggataatgcaattat

SEQ ID NO: 800156 - DNA, 99 bp, Homo sapiens
ccaacacagacacgaaggttggaaataataccatccatgtgcaccgagaaattcacaaggcactactgcagtcttcagttaagcaacaagtagaagcta

SEQ ID NO: 800157 - DNA, 100 bp, Homo sapiens
gtgattttcgcagggaaggagctgaggaatgactggactgtgcagagttcaaagaggccttttcattgtttgaccggaccccgactggagagatgaagat

SEQ ID NO: 800158 - DNA, 98 bp, Homo sapiens
atttagagctgcggaacaggacgccctctgatatgcgtctgttactagagtggagagtctaccttcgtctcacatgtgccacaaaggatggcatggcc

SEQ ID NO: 800159 - DNA, 100 bp, Homo sapiens
ttctacctgagcccgctgcagctctccgtgagcaacctgcagggttaaagcacgaattgggagctctcagcgacatcaccagtcagcagccaaagaccta

SEQ ID NO: 800160 - DNA, 142 bp, Homo sapiens
ttatagatgatgacaaagttacctttgaagtctttgtacaggcggatgctccccatggagttgcgtcagccatgtcatctgagcctcccccaccaccacagccccccacccatcaagcttcagtcgggctgctggacacccc

SEQ ID NO: 800161 - DNA, 100 bp, Homo sapiens
acaatggccatgtcctacgtgaaggatgacatcttccgaatctacattaaagggcatcaagttatcagcagatgtcaaaccatttgtccccagatttgcc

SEQ ID NO: 800162 - DNA, 100 bp, Homo sapiens
actcaagcttggagctgacggcagtgagacgagttgtactgctgtcacaggaaatggacgctggattacaagcatggcagctcaggcagcagaagttgca

SEQ ID NO: 800163 - DNA, 100 bp, Homo sapiens
gaggactcgctgcagtacaaagattcaattagcagagcctcacagacaatggccaaatgtgtcaaagctgtcacagagggtgcccaggcagtagaggaac

SEQ ID NO: 800164 - DNA, 134 bp, Homo sapiens
tcgtgaagaagcaggaggctaagaaagtggtgaatcccctgtttgagaaaaggcctaagaattttggcattggtgaaacagatctcaatgatgcaataacagaagcaggaaagacttatgaagaaattgccagt

SEQ ID NO: 800165 - DNA, 52 bp, Homo sapiens
cctggatctttgctagaaagagaggtgcatcacctggatcatgaggtcaccc

SEQ ID NO: 800166 - DNA, 100 bp, Homo sapiens
accatggcaaccttgtccctggcccggccctccttcagtttagttgaggataccacattagagccagaagcgtccagaggaccagaggttaatttattct

SEQ ID NO: 800167 - DNA, 99 bp, Homo sapiens
tcccaagggaacatcagttctacgagaccctccctgctgagatgcgcaaattcactccccagtacaaaggtccctgtgcgttttattgcgacctgccgg

SEQ ID NO: 800168 - DNA, 100 bp, Homo sapiens
attgaattatggcatagatcttgggaaaattgcgacagggaaaaatgcattttttgtgggagatcttggaaagattgtgaagaaacacagtcaatggcag

SEQ ID NO: 800169 - DNA, 100 bp, Homo sapiens
caaagaagtgctatctggaaagagagacaactgtggaccccaaaaaaaggccacactttcaaactttggctctcaaagtattgctgcccacaacttccaa

SEQ ID NO: 800170 - DNA, 100 bp, Homo sapiens
gtccaagtcaaacgcagaaggactgcctcactgagcaaccaagaggtgtttgtgaaccgaagtttagcaatggaaaagataaagtgttttggttttgata

SEQ ID NO: 800171 - DNA, 100 bp, Homo sapiens
gatgagcagccccccaatgtcgaggagtggaattaaacaaccaccatgtcgagcaaaaaggcaaagaccaagaccaccaagaagcgccctcagcgtgcaa

SEQ ID NO: 800172 - DNA, 100 bp, Homo sapiens
gtgtacatatcccacgtgaggaaggagcacgggaaggggtatagaacaggctatgcttacaggcatcctctcattcgagagaagcctaggcacaagagtg

SEQ ID NO: 800173 - DNA, 90 bp, Homo sapiens
gaccgggacagctaccggcgcatccttatgagtcacagggagaagacgtccacccacacatcaggagacaggcctggaacagagccttcc

SEQ ID NO: 800174 - DNA, 100 bp, Homo sapiens
ggatttgcttttgtaacttttgatgatcatgatacagttgataaaattgttgaccttgaagctgatgatgttaagggcagtgtaccactgtcttcaagcc

SEQ ID NO: 800175 - DNA, 100 bp, Homo sapiens
tgctggagaagtccccttatgaccagtataaggatgcatttatgaaagcaaatcctggctacaaatggtgtcctaccacaaacaagcctgtgaaatcccc

SEQ ID NO: 800176 - DNA, 144 bp, Homo sapiens
cacgaggcgttcatcgaggagggcacattccttttcacctcagagtcggtcggggaaggccacccaggtcaaaatgcagatcttcgtgaaaacccttaccggcaagaccatcacccttgaggtggagcccagtgacaccatcga

SEQ ID NO: 800177 - DNA, 99 bp, Homo sapiens
cattcccaaatgccccaaggatgaagaacggagacgttagagatgtttatgattacttccgagctgtcctgcagcgtgatgaaagaagtgaacgagctt

SEQ ID NO: 800178 - DNA, 100 bp, Homo sapiens
cgcaaggagccgaaggcggcgggagccagagtcgccgccggcgtcggcgccgatgacagcgcttctgctgcaagtagcatggaggtgacagaccgcattg

SEQ ID NO: 800179 - DNA, 101 bp, Homo sapiens
acctggtgctcctggcagcaaaggagacactggtgctaagggagagcctggtcctgcaggtgctcgtggtccagctggccctcctggcaaggctggtgaag

SEQ ID NO: 800180 - DNA, 99 bp, Homo sapiens
tcaccataggagaaggggagtcaatacctccggatactcagtttgtaaaaacatggcggatccagaattctggtagctacagcaagctgggtagcaggc

SEQ ID NO: 800181 - DNA, 100 bp, Homo sapiens
acatggcggagctgacggtggaggttcgcggctctaacggggctttctacaagcaatgcagtcaaccttttaagcaatgttccagtctcttgtttggatg

SEQ ID NO: 800182 - DNA, 100 bp, Homo sapiens
ctcttggaagaagaggccagtatgagatgctgtcagaggtgctgctacccccgtatgatgatgccactgtgaatggtgctgccaaggagccaccgccacc

SEQ ID NO: 800183 - DNA, 98 bp, Homo sapiens
tcaggggaacgatggccatggagtccacagccactgccgccgtcgccgcggagctggtttctgccgacaagtggctgtaaatggaaaacatactctgc

SEQ ID NO: 800184 - DNA, 101 bp, Homo sapiens
agcacagaagcattaccatgacgctctgaacatcatcgacatggccctgagtgaatacccagaaaatttcataaaacatccagtacagacctttctgatat

SEQ ID NO: 800185 - DNA, 98 bp, Homo sapiens
ctagccagactcagggatcaaagagcaaacagattcagtggcctgcattgctggcgttgcagacggggcgtgaacccccacccatctggcgagtccag

SEQ ID NO: 800186 - DNA, 127 bp, Homo sapiens
gatgagcctcccattctcccagacatggggaacagggtcacagctctcacccaggcctcaactccatatagcatagattcagattctttgggaatggagtgtattatttcgggaagtgcctctccaa

SEQ ID NO: 800187 - DNA, 117 bp, Homo sapiens
agttaatccaggtgagactttcacaataagagcagaggatggaacacttcagtgcattcaaggtgatgcagacagaaagcattgtaaatttaagcctgatcccaatatccctccaac

SEQ ID NO: 800188 - DNA, 98 bp, Homo sapiens
aaagaacctttcaatgcactgacacgaaggaggcatcattgtcgagcatgtggatatgtaatcatagcctcctggtattgcacattcatgggaataat

SEQ ID NO: 800189 - DNA, 98 bp, Homo sapiens
gatgcatgctgatggcgataagtcattaccacagagtcactgctagttggattgaagcacacctgccagatgattctaaagacacatggaagaagagg

SEQ ID NO: 800190 - DNA, 123 bp, Homo sapiens
ctcgacttggttacctgcctgtccagacagttcttgaaggtgacaacttagagactgttgctgtggatgtatggtcgacgctggctgatttctgtaacatactgactgcagtgaatcagtctg

SEQ ID NO: 800191 - DNA, 100 bp, Homo sapiens
ggagggaatgacaataactttgttagcagggaggattgcaaacgtgcatgtgcaaaaggatcaaccacaggtttgtctgctaccccccctgcctcattac

SEQ ID NO: 800192 - DNA, 100 bp, Homo sapiens
gtgcatgaaggacagcctcttctcaatgcgcttctctgaagtagctttggaaagtagagaagaaaatccagtttgcttcttggagaacactggacagctg

SEQ ID NO: 800193 - DNA, 98 bp, Homo sapiens
tacctgtgccacctgtgcttcaacaaaggacactacatcaaggactgcccccagagccttgcttcctgttttacatcacaaatctaaaaaaggacccc

SEQ ID NO: 800194 - DNA, 99 bp, Homo sapiens
cgcgggggaccgcggcccccagcagagcccgcctgcccggctagatcctgaaggagctagacgagtgctacgagcgcttcagtcgcgagacagacgggg

SEQ ID NO: 800195 - DNA, 100 bp, Homo sapiens
agctggaaccatgacaggcatgttgtataaatgtacaggttgcttatcaagtgtcccacaaatgaaaaaaatttctacatcttacgaggaaagacggaag

SEQ ID NO: 800196 - DNA, 100 bp, Homo sapiens
attagtcctgaatccaataaagagaggcagcttggaagaagcaagatttccagatgtagcaaatgggtttattgaggaaataattcattttaagaattat

SEQ ID NO: 800197 - DNA, 50 bp, Homo sapiens
agagatgggcttcaaaccctggagcttatattctctgtggaagatgtgac

SEQ ID NO: 800198 - DNA, 100 bp, Homo sapiens
tggggccagggaaccctggtcaccgtctcctcagactatcaagaaatccaagtggtaatgggcgaagtttattcagcatccggcaatggacttatcgtag

SEQ ID NO: 800199 - DNA, 100 bp, Homo sapiens
aatgaggttgggaaaacctactggaataggatcttcatacaaggcttaagcaggtaaagcagtcactgtgaagaaaataacattttaagaaacttttctg

SEQ ID NO: 800200 - DNA, 100 bp, Homo sapiens
aacatgacctatgggaccttcaacttcctcgggggccggctgatgatccctaatacagggaaggaccccacgctcggggccccactcctgctggatgtcc

SEQ ID NO: 800201 - DNA, 99 bp, Homo sapiens
agagatcggcggagaccctcgaagtgcgcaaacttgacactcaccctgaccggagttaaagttcctcgtaattttcgcttgttggaagaacttgaagaa

SEQ ID NO: 800202 - DNA, 111 bp, Homo sapiens
ggcaccacgtctctaccgagcacaaactccacgaagccaacgcccaggtagctacagcaagctgggtagcaggcagatccaaaggatatcatgaagtttccagggcctttg

SEQ ID NO: 800203 - DNA, 100 bp, Homo sapiens
gtctgacatttcttttgtgcaagatgagcctcaagtgcttctgcattacaaatcgagagctccagatcatgagaaagctagatcactgtaacatagtccg

SEQ ID NO: 800204 - DNA, 100 bp, Homo sapiens
tggtttaacttatttgtgattcatcagaacaggtcacggtctagatcacattctcgatccagaggaaggcgatactctcgctcacgcagcaggagcaggg

SEQ ID NO: 800205 - DNA, 75 bp, Homo sapiens
tccaatgccaagtgtgtgacctgtggtgagtgtggtccaagattcagtaaacatatcaggacatactaatacaaa

SEQ ID NO: 800206 - DNA, 100 bp, Homo sapiens
cggaaatgtcactcccaccgccccaccgtacttgcaagaaagcagccccagaggtaaagtcagtgataaatcttttgtttgctgcatatactggagatgt

SEQ ID NO: 800207 - DNA, 100 bp, Homo sapiens
cgtgaagaacttccagatcatccatggcaatgacccacttttccagccattaactccaggctctcgagaatttgaagatgttgtaaatattctccattct

SEQ ID NO: 800208 - DNA, 100 bp, Homo sapiens
aaagagaaagctgatgtaaaatcaacagcatttaccttccggtcttccaaggcagcagtgaggatgccagagttcatgggtttctagaagacaagttttc

SEQ ID NO: 800209 - DNA, 98 bp, Homo sapiens
attgtccaggcctgcagaggtggcttctgcagaacccccaggtcaggccacatcattgaggctgcaggatctctcttcatagcccagtacgactctcc

SEQ ID NO: 800210 - DNA, 99 bp, Homo sapiens
ttcttggaatgtgtttacgatgttgaatgggacttgaacaggaagctggacgctgcagctggaactagcgtgccaagtaataatttttcaccatgcatc

SEQ ID NO: 800211 - DNA, 100 bp, Homo sapiens
cagccatcacctggatttacctgttttctgggagcttcgaagtttggccttggtattaccaacctacagtttttactatataaaagccaaactagaagag

SEQ ID NO: 800212 - DNA, 98 bp, Homo sapiens
cctaggtcaacaagtcagttggaccacatcttatgcagggaaatatgtgccagccattgcacacctcatccattccctcaaccctgtgagagaggtga

SEQ ID NO: 800213 - DNA, 100 bp, Homo sapiens
agtgtgcatcctacaacaacaagccattcatgggccggttttatgagtgggaaccatttgcagaagctctaaagcccaaatttgcagaatctacggaaat

SEQ ID NO: 800214 - DNA, 100 bp, Homo sapiens
cgtgttgctgcaaaaggactatcaggtacaggtgaacaaaggcagagtaaactgtcaccccagatgcaggtacatcaagacaaaaccctgccaccagctc

SEQ ID NO: 800215 - DNA, 98 bp, Homo sapiens
cttcctattccactggattgggaaagaccatggcagtttgtcccgctggctggaagcctggcagtgacacgattaagcccaacgtggatgacagcaag

SEQ ID NO: 800216 - DNA, 98 bp, Homo sapiens
ttgcaacaatattctttaacagtggactatcattgaaaacagaggtttggcttgagcaacaagtttgatactgaatttccctccgttctaacagggaa

SEQ ID NO: 800217 - DNA, 100 bp, Homo sapiens
aacaagctgccaagcaaggccacgtcaatctcacggtgcggcgtaaagtggtttttgcggagacgagttgtactgctgtcacaggaaatggacgctggat

SEQ ID NO: 800218 - DNA, 100 bp, Homo sapiens
tacagccaccaacgcccttggctcggaccaaaccaacattcaacttgtcagcatcagagacagtgtttcacaaaatgattttccttctgaagctcccatc

SEQ ID NO: 800219 - DNA, 98 bp, Homo sapiens
atccacccttaagaaaggagacagaaccacatcatgaacttctgtcttgtcgacggtctcactgatgcctcttctgcattcaaagttcctcgacccgg

SEQ ID NO: 800220 - DNA, 99 bp, Homo sapiens
aaagtgcccggacccaaaacaggaattccaatgacaggatttacacagagagcaactattgatccagaactgaatgaaatacacgtcttatctggactc

SEQ ID NO: 800221 - DNA, 100 bp, Homo sapiens
tatattttattcctcttcctatccaatccctgccttttgagtccaggtgacctctgtgagtgaaagccttcagagggaagctgctaagaagcaggccatg

SEQ ID NO: 800222 - DNA, 99 bp, Homo sapiens
gaatacaaaggcaatgcttatcatttaatgcataaaaactgcaatcatttttcttcagctttatcagagttacccagcatgccacaatctgattgctga

SEQ ID NO: 800223 - DNA, 100 bp, Homo sapiens
agaagacagaagtcagagacaagaagaggctaacatgactgataccactataatttagtatcattgagactgaaaatatgatggaccgaattgtgactgg

SEQ ID NO: 800224 - DNA, 100 bp, Homo sapiens
acacattcagactacaagtccagacccaggagagcaaggcccagaaagagttcagggcgacagctcagtgaagtcttcattcagttaccttcaaggaaag

SEQ ID NO: 800225 - DNA, 100 bp, Homo sapiens
gcctcccgagtggctgggactacaggtgtcctgtttgccggtactgtcaaacgcccgagccagtagaagaaaataagtgttttgagtgtggtgttcagga

SEQ ID NO: 800226 - DNA, 100 bp, Homo sapiens
ccggaagtcaccattggagctcatcagactgaccgtgtcttacatcagttcagagaggttgtggaaaatgcccttaaagtgaacccaatactaggtccac

SEQ ID NO: 800227 - DNA, 98 bp, Homo sapiens
gaaacatggcttcttctcactgacagctgtgggggccaccaacgtgggctccattcgcatctactttgaccgggaagaactcttggatataaaagaac

SEQ ID NO: 800228 - DNA, 143 bp, Homo sapiens
agaaccatgactgtattcaggaaggcacatgaactgaagcttctgtcagaatgccaatacaagcagttggttatcaatactctggctgaccatcatcatcgtgggactgactttggtggaagtccttggttacatgtcattat

SEQ ID NO: 800229 - DNA, 100 bp, Homo sapiens
gatcaccagattcatgtatgacagttttgacaacacctatcagacctttccaaagtgaaactgatgagatttgatgatccactgttggggcctcgacgag

SEQ ID NO: 800230 - DNA, 99 bp, Homo sapiens
ggagatccacagctaagacgccgggactccctggaaacctagaaatgatccaacttagaaataatgtttcattcaagataaggctcgtggcttaggaga

SEQ ID NO: 800231 - DNA, 100 bp, Homo sapiens
gttgataaagccttacaaaactctccacggttaatgcatgctagaaacacagacaagttggatggcttgaggactggtactaaaaggaaacgtgactggg

SEQ ID NO: 800232 - DNA, 100 bp, Homo sapiens
ttaagaaagcagtacctgaagcacctactcctgttcctaaaaaagtggaggcaccaccagctaaagacattgctattttgggagaagtacaagcggaaaa

SEQ ID NO: 800233 - DNA, 98 bp, Homo sapiens
gaaatcattgtttctcagccttgccagctatttcaaaaccactgcctgtgctcgatttctcacattggcaaactgagagattttcttctggaacacag

SEQ ID NO: 800234 - DNA, 100 bp, Homo sapiens
gaccgagaaatgctagaaaaattgactgtatcctatgatgaagcagatactgtggcaagatttttccaaggtctgcaaacctaacacggcacttgagaac

SEQ ID NO: 800235 - DNA, 100 bp, Homo sapiens
gacctcgaggatgccatggtgttctggatcaacaagaatttcgctaaggagtttgtgatcagtgatcggaaggagctggaggaagatttcatcaagagcg

SEQ ID NO: 800236 - DNA, 99 bp, Homo sapiens
cgggatcgtgaccgagaccgtgaccgagagcgtgaccgagagcgcgaatatcgtcatcgttagaagatgggagaatcctcagcacaagtgtctactact

SEQ ID NO: 800237 - DNA, 98 bp, Homo sapiens
tattgatctttcaaacacagccttattcactactcagagacgagttgtactgctgtcacaggaaatggacgctggattacaagcatggcagctcaggc

SEQ ID NO: 800238 - DNA, 101 bp, Homo sapiens
gctatagcagccgcggcggttaagtatgcggcgccaggagctgatcatggggttgacagcagcattttccagaatcctaaaaagcttcatctaactattgg

SEQ ID NO: 800239 - DNA, 98 bp, Homo sapiens
gaggtgtacgacaagatctgcaaggccgccaggcactgagctggagcccgcctggagagacagacacgtgaaagaccacagcaagattctttcattcg

SEQ ID NO: 800240 - DNA, 100 bp, Homo sapiens
gtggcgtttctctcccgataccgagatatgaatttcttgaagtcacacggccgggacaatgcaagagagttaattgttaaatccagtatggccacaggag

SEQ ID NO: 800241 - DNA, 56 bp, Homo sapiens
cgcgaggcagagcgggagcgcgcagccagacccgacagaaaaagtgtggctggaag

SEQ ID NO: 800242 - DNA, 98 bp, Homo sapiens
cccttcttgccatcgccccagacatggggaacgcggcgaccgccaagaaaggcagcgaggtggagagcgttattcagggaccctctcccctggatttg

SEQ ID NO: 800243 - DNA, 98 bp, Homo sapiens
tttatgttgtctctttccgaagggttggagcaaaacgtcccactcactggaggcacctgaggacgacgggggctggtcaagtgcagaggagcagatta

SEQ ID NO: 800244 - DNA, 99 bp, Homo sapiens
ttgatgtcatcacgcagaaggggtgaaagagactcggtgacagatacagatattaataaggcagcggaaagaagaaatatgaatacggctccatcaaga

SEQ ID NO: 800245 - DNA, 98 bp, Homo sapiens
actgtcattcacaaccccctgaaagcgatcctcagtcttccacaatgaaccctgtttacagccccgtgcagcctggggctccttatggcaaccctaag

SEQ ID NO: 800246 - DNA, 102 bp, Homo sapiens
gtcgggcttgtgccgatgggtggtgtgatgtctggggctgtccctgctgcagcagcccaggaggccttggctccttgaacttttggccgccatgtgcttccc

SEQ ID NO: 800247 - DNA, 100 bp, Homo sapiens
ggagacgctgcagacccgcgacccggagcagctcggaggcggtgaagcacaaatcctgaagagcccgtgggcgtggactgctcatctgtaaagaaagtgg

SEQ ID NO: 800248 - DNA, 100 bp, Homo sapiens
cactggaagtacgggcagttgcagtgttggagctaaagacttaaaatctccaaatcagagagatgaaattgcaggagcccgagcttcactgaaggagaac

SEQ ID NO: 800249 - DNA, 98 bp, Homo sapiens
tgctgggcctgagctacagaggactggacgaataagaaagccttgagttttgtgaaaaaccggagaagagaaactaaaaggacagtagaaaaggcttt

SEQ ID NO: 800250 - DNA, 100 bp, Homo sapiens
agctgaagaagccccggcggatcatcctcctggtgaaggctgggcaagctgtggatgatttcatcgagaaattgagtgtgaaccggttggcaatggagac

SEQ ID NO: 800251 - DNA, 100 bp, Homo sapiens
ttggcaggagattatagctctgtatgagaaggacaacacctacttagaaagtgacatcaattacttgctaaaaatggcactggaaaaaattgccttcctg

SEQ ID NO: 800252 - DNA, 100 bp, Homo sapiens
tgggagaattcattaaggagcttgcccgggatgcagaaggttcaggaacaagtgcatcccactctctcagctaatgaagagtctctctattatattgaag

SEQ ID NO: 800253 - DNA, 98 bp, Homo sapiens
gcagaagaagcacacctgaaacatgaatttgatgcagacttacagggtgctgataagactgtgaaaggcccagatggactgaccgcctttgaagccac

SEQ ID NO: 800254 - DNA, 98 bp, Homo sapiens
cgagctttcgaccagctactctcacagtgacaaatttttttaagcagttccctgtattgaacactgatatacaaggaatgaatagaagtcaagaaaaa

SEQ ID NO: 800255 - DNA, 98 bp, Homo sapiens
cccgccgctcctggcgctgctggccgcgctgctgctggccgcacgcggggctgctgcccaagaggcgttggggctgaacctctgctcccatggaaccg

SEQ ID NO: 800256 - DNA, 98 bp, Homo sapiens
ggcatagcgcctctctgatcttcctgcatggctcagaaacttgtggtggagaatgttgatgtgttaacacaaatgaggaccagctttgacaaaccaga

SEQ ID NO: 800257 - DNA, 98 bp, Homo sapiens
tgccaagaagtcgcccatcgcagcagctcggcacaaatcctgaagagcccgtgggcgtggactgctcatctgtaaagaaagtggagacatgaccttga

SEQ ID NO: 800258 - DNA, 99 bp, Homo sapiens
ccatgcccctcaggctggaacttgccctgtctcctcgcagatgagaatccaactcaagtcggaacagctcttcaggttttctataatcttggaactttg

SEQ ID NO: 800259 - DNA, 98 bp, Homo sapiens
atcggcccagaagaaggaatcagttacctaacggacaagggctgcaatatggtcatccagactcagagctctctctacagagaggaaattctccactg

SEQ ID NO: 800260 - DNA, 100 bp, Homo sapiens
gggaaccttaagtaaatcagaatgggaagctacaagtgtccctgctccaattcccgttttgtcagtgacacagactttgaccactggacctgattcagct

SEQ ID NO: 800261 - DNA, 98 bp, Homo sapiens
tagtggaggccgcagcagtcagggacatttctgaagcgagcgtcttcgatgagtgaaattcacatgtctgaagaagctatacaggacatattggaaca

SEQ ID NO: 800262 - DNA, 100 bp, Homo sapiens
acttctgtctgagaagggacttccggcaagaggtgcctggaggaggccgagcccaagagctcactgaagctcattcttggaatcccagaacaggccttaa

SEQ ID NO: 800263 - DNA, 100 bp, Homo sapiens
ctacggtccgccaatagaaaatggattctattatgacatgtacctcgaagaaggatatgagaccttggtggggacaattgggaaaaagtttgccagaaag

SEQ ID NO: 800264 - DNA, 100 bp, Homo sapiens
tctctacagattactttgggtttacatgattcgaattaaatgtgaaagcaacacagctactcagaggatttttagactctgaggagcagttggagctaat

SEQ ID NO: 800265 - DNA, 98 bp, Homo sapiens
cgggcccggcggcggcggcagcggggtccgggtccggagcgccacacctccaagtctattataaatagtatgctacgggacccttctcagattccaga

SEQ ID NO: 800266 - DNA, 98 bp, Homo sapiens
ggggcgagcctggaggattgtcactccaacctcttttcgctggggactcattctcacagttccggtttgctgaggagaaagaatgggatagtgaagct

SEQ ID NO: 800267 - DNA, 101 bp, Homo sapiens
cttgtttcttatatgtgatgccattccagcactggactcatggaggctgagcatttattcaggcctcccagaagttcctgccgaatcgtcttcgtcacccc

SEQ ID NO: 800268 - DNA, 98 bp, Homo sapiens
ttaatatctgattgggacaacattcagacccatttccagtcatgagaaacctcgacctgtctcccagttggttgcacagcaggttactcagcagtttg

SEQ ID NO: 800269 - DNA, 100 bp, Homo sapiens
atcctgggattttgttgaagccacacaaagaacaaattgcagttgtttgagctttgacaattattctgccaatgttatggtagatggaaaaccggtgaat

SEQ ID NO: 800270 - DNA, 100 bp, Homo sapiens
tcaagctcatcgacttcggttcgggtgcgctgctcaaggacacggtctacaccgacttcgacgaatacagattctgttcatcttgctctgaaattaaata

SEQ ID NO: 800271 - DNA, 100 bp, Homo sapiens
atcgagaaaaccatctccaaagccaaagaaaattttcgtgctctgagcactggagagaaaggatttggttataagggttcctgctttcacagaattattc

SEQ ID NO: 800272 - DNA, 100 bp, Homo sapiens
ttttgatgatgatgacatccagtgagatgcctgcagatcacggatctgtacttaaatgctttcagccttatgccttggctcctggagaaaaccacactgc

SEQ ID NO: 800273 - DNA, 99 bp, Homo sapiens
gagacagctggtgtctgaagccgctcgcgcccaggtctataacttgacccaggagttcttccggcacgataaaccagtcaatgctgaaagtcaaaatag

SEQ ID NO: 800274 - DNA, 98 bp, Homo sapiens
caacattcaaggaaacaaatcaactaaaaacaaaattgccagaaaatctttcctctaaagtcaaactgtatgcaccaggacacaacagggtatgcctg

SEQ ID NO: 800275 - DNA, 98 bp, Homo sapiens
gggtcaagtcgtgttctgatcactactgacttgttgatcgtaaaaaggaccttgtaaaactacaggcaggggaatatgtttctcttgggaaagtagag

SEQ ID NO: 800276 - DNA, 98 bp, Homo sapiens
gctatcatactgcaaagaaagattttcttaatgatcaagcaatgctttatgcagctggtgccttggctggagatataataacagagctggaatctgta

SEQ ID NO: 800277 - DNA, 100 bp, Homo sapiens
gggatgttggcagccacttcaaaatcagacctctgtggcagcattttttccagaacacaaaaggtttttagaacttcagccataaaaatgggcagaattt

SEQ ID NO: 800278 - DNA, 99 bp, Homo sapiens
ggacaagtcggcgccccagagcggacgaggccaagtcctgtatctgccatgtctgtggcgtccacctcaacaggctgcattcctgcctctactgtgtct

SEQ ID NO: 800279 - DNA, 100 bp, Homo sapiens
ttttgtgaaacgtgtttcaagaccaaaaaacacaataccaggcatacatttggcagaataaatgaaccaggtcatgggatttggtctgtacctgatggat

SEQ ID NO: 800280 - DNA, 100 bp, Homo sapiens
aatgggagcctattgtccagcccctcagggtacagccaaagaccggagctttggagagatgaagtttaaacagtgtcctacagagaacatggctcgtgag

SEQ ID NO: 800281 - DNA, 100 bp, Homo sapiens
caccgagggttggggactcgaacccccgcttcgcagctcaggagcctgaggtccgaaagttgatgcggatgaaattaaaaggctaggaaagagatttaag

SEQ ID NO: 800282 - DNA, 100 bp, Homo sapiens
ccgggatcgtgaccgagaccgtgaccgagagcgtgaccgagagcgcgaatatcgtcatcgttagaagggaacgtgtgaaagaagaattgtggggaaaaaa

SEQ ID NO: 800283 - DNA, 114 bp, Homo sapiens
gagcaattgaccttgaaattaaagagcgagaagctgaaaattttcatgaggtaccaaccaagaagctgaagaaatatgagaaagaatatcagacaatgcgagagagtcagctgc

SEQ ID NO: 800284 - DNA, 100 bp, Homo sapiens
gccaactccaacgtgttctccatgttcgaacagacccaaatccaggaatttaaggaggctgagactcgggctgagtttgcggagaggtcagtaactaaat

SEQ ID NO: 800285 - DNA, 50 bp, Homo sapiens
ggtgagggcggccccagaaccccagaaacctctgcgccatgagagccaag

SEQ ID NO: 800286 - DNA, 100 bp, Homo sapiens
cagcgggagtacaacctgaacttctcaggaagcagtactattcaagagggcttcctgaagaatgagaaggacaatgccctgctgtctgccatcgaagagt

SEQ ID NO: 800287 - DNA, 100 bp, Homo sapiens
ttacgcagattaagtataaccgcgaaggagacctcctctttactgtggccaaggaccctatggagtcttgctctcgttgcccagactggagtgcactgct

SEQ ID NO: 800288 - DNA, 100 bp, Homo sapiens
cccaccgctctgattagcagaaccaaaccgaacagcatatgccatatatgagctggctgtggcttcatttcccaagaagcaggagtgacttcagtcatcc

SEQ ID NO: 800289 - DNA, 100 bp, Homo sapiens
ttggaattcagttactcaggcactttcttctcaatttcatatggcaacaaactgtcctggcattgatgtgcctgctccagacatgagcacaggtgagcgg

SEQ ID NO: 800290 - DNA, 100 bp, Homo sapiens
aagcagtcggacgcgtctccccaagaaagctacctgaacgacctggagcgtattgcacagagtgactacatccccacacagcaagatgtgctacggaccc

SEQ ID NO: 800291 - DNA, 98 bp, Homo sapiens
aaaaaagccaagatgcaggaatcaggagagcaaactataagttaccggtattgtaagaacaagccgtacccaaagtctcgcttctgccgaggtgtccc

SEQ ID NO: 800292 - DNA, 100 bp, Homo sapiens
agtcatggaacactatgctgatcaagatgatctggttgtcatgtttactgaatggactgttatgaacactatccaacaattaatgatgattttaaattca

SEQ ID NO: 800293 - DNA, 98 bp, Homo sapiens
gtatggagctgctatggtggtcatggcttttgatgaagaaggacaggatgaccccataggaaatattaacctggccatggaaatcgctgagaagcacc

SEQ ID NO: 800294 - DNA, 78 bp, Homo sapiens
gagtggctccgcagatacctggagaacgggaaggagacgctgcagcgcgcggacccccccaagacacacgtgacccac

SEQ ID NO: 800295 - DNA, 98 bp, Homo sapiens
cagcagaacaactaaaacagtatgaaataaacgccactcctaaaggctggtcctgccactgggacaggtcaccatcagaaaagctaagtttgctgtat

SEQ ID NO: 800296 - DNA, 100 bp, Homo sapiens
agagagagctattagagattgtgaagaagaatttcgatctccgccctggggtcattgtcagagatgatgtaacactgctcagacaagaggtccaagacct

SEQ ID NO: 800297 - DNA, 100 bp, Homo sapiens
cataggcaagtggtgtgtggcacaaaatgcaacacgggccatgctatgatagtggaagcttatccaaaataatagatccagaagaagtgacctgaagttt

SEQ ID NO: 800298 - DNA, 100 bp, Homo sapiens
aggtcctacgatgaggccatcctgcacctcgtagtggcagaccaagatcactccatggatgaaatgacagctgtggtgaaaattgaaaaaggagttggtg

SEQ ID NO: 800299 - DNA, 98 bp, Homo sapiens
tctgagaaaccttggacagcagattttggtttaatatctgattgggacaacattcagacccatttccagtcatgactgatgaacttattagtcctaaa

SEQ ID NO: 800300 - DNA, 100 bp, Homo sapiens
tgatgacggcactgttagaatctgggactttcttcgttgccatgaggaaagaattctccgagctcttcagtgggtcatctgtgtgtcacagcctcagaag

SEQ ID NO: 800301 - DNA, 100 bp, Homo sapiens
tccagcattacacgatgcacttaatgaccctaaaaatggcgattctgcaaccaagcacctgaaacagcaggtattgaagcccctgggtgataatttgatg

SEQ ID NO: 800302 - DNA, 100 bp, Homo sapiens
ggacaaagaaaaagattcctttcttggcaactggaggtcaaggcgaatatttaacttatatctgcctgtcaggcccatcttgacgattccaagaccaccc

SEQ ID NO: 800303 - DNA, 134 bp, Homo sapiens
catggatgggctgcctccaggtgacagcaatcagctggcctggtttgatactgacctgtaaatcatcctttagtatgattcatccagccttccagctctgttatttaaagcaagaacacttctgggagccgaaa

SEQ ID NO: 800304 - DNA, 99 bp, Homo sapiens
cacaatggaaccaattgttttacagtctgttccgcatgatcgttataataagatcaatgaactgagccatgttcaaatccctgttatgttgatgccaga

SEQ ID NO: 800305 - DNA, 100 bp, Homo sapiens
tgcaagatgcagaagtcagcaagagtgacataggagaagtgattcttgtgggtggcatgactaggatgcccaagagaaatggaataatcgtatcgctgat

SEQ ID NO: 800306 - DNA, 100 bp, Homo sapiens
aacacattgctgagcttgaaatccaggaaaacgggccttactatacatcatatcccccatcaccagatttgtgacctgccatctttcagtgcttcttggt

SEQ ID NO: 800307 - DNA, 98 bp, Homo sapiens
gcaacacaacattaatttcagagggagatgctctgccactacaggagtgggtctgtttggtggattcaaagtgggattggaccttcttgtagaatttg

SEQ ID NO: 800308 - DNA, 98 bp, Homo sapiens
aggaacatgctgatggtcttcttaaggatttaatgagagcatcttatccttgcatgtctcttcatggaggtcctgtccaaaatgcattgctgtcttca

SEQ ID NO: 800309 - DNA, 98 bp, Homo sapiens
cagagcagcgggatgagttggaaggcttccaggatgacgccgggagggccacacagaagagccggaagcagaggagcaagcccacgaacagcagcccc

SEQ ID NO: 800310 - DNA, 100 bp, Homo sapiens
tgtgttgcaggtgacggctctggacaaggacaaagggaaaaatgctgaagtgctgtactcgatcgagtcagggaagcaggaattgaggaacagattctcc

SEQ ID NO: 800311 - DNA, 100 bp, Homo sapiens
ttggccaatccctaaggacagcttttgatttattaaatttaaatagattagtaactggcatagacaactatgggcagatgcctgtggtctctctgatgta

SEQ ID NO: 800312 - DNA, 100 bp, Homo sapiens
acaggacacttcactaaatcggcttcacagaaaggagtcactgccttctaacgaaagggcagtacagactttggcagccttcacttaacttaagggacct

SEQ ID NO: 800313 - DNA, 98 bp, Homo sapiens
actttcgcagtctacgactgcctgtgactccagaaagacaaactgcagattggccaaggagccaagttacaccctgtttaaccctgccttcaaaggga

SEQ ID NO: 800314 - DNA, 100 bp, Homo sapiens
atgtcagtctaccagtatcctgaaaagtctcagcaggcagtactcacgccacaatttttgcacgtcattacaagtagagatggggtttcgccatgttggc

SEQ ID NO: 800315 - DNA, 100 bp, Homo sapiens
ggctacaggccgcggaggaggaggaggtggagttgctgcccttccggagtccgccccgtgaggagaatgtgctacctgggcgatgccttccgctgtgcca

SEQ ID NO: 800316 - DNA, 99 bp, Homo sapiens
agcagtatagccgcttcctgcaagagtcgaatgttctctatcagcacaatctacgaagaatcaagcagtttcttcagagaaaatacggtacatgtcccc

SEQ ID NO: 800317 - DNA, 100 bp, Homo sapiens
tccttcattttcctgtatattctctgtactatgtcgattcgacaggcgaggattaaatccaccacacagggtgaaatctatctccatgacaacattcaca

SEQ ID NO: 800318 - DNA, 98 bp, Homo sapiens
cgccgctgggcctgcaggtctctgtcgagcagcggacgccggtctctgttccgcaggatggtgttcctccaagaaaagctggttatattgaagacctg

SEQ ID NO: 800319 - DNA, 100 bp, Homo sapiens
taagactctgtggtattgttggaggaatcttttcaacaacagggtgaaaatcctatttataagagtgccgtaacaactgtggtcaatccgaagtatgagg

SEQ ID NO: 800320 - DNA, 100 bp, Homo sapiens
cctgcccaaaggacactgtacagggatgtgatgctggagaactgcaggaacctggcctcactagggaatgaaagctactggttgattttaaagtgcctgg

SEQ ID NO: 800321 - DNA, 99 bp, Homo sapiens
tggactttgtttttcctgggaactgcagataccatgtttgtgtggaagtgccccgtgtttgctatgccgatgctgtcctagtggaaacaactccactgt

SEQ ID NO: 800322 - DNA, 98 bp, Homo sapiens
agaggcctacatcccacagagatacccagacaacaggatcgtctcgtccaagtatccggagtgtgatgcagaagtaccttgcagagagaaatgaaata

SEQ ID NO: 800323 - DNA, 98 bp, Homo sapiens
acggcttcccccaaggaatatacaggcctggagctgctgaagactgctattgggaaagctggctacactgataaggtggtcatcggcatggacgtagc

SEQ ID NO: 800324 - DNA, 100 bp, Homo sapiens
tttctcccttgatccgggagtctttccactggattgctgctaaaattgattcaattcctcacttgaataattccacacctctagtggacccctcagtata

SEQ ID NO: 800325 - DNA, 100 bp, Homo sapiens
cccactgctggggtggtggttccaatgagacagggcacaccaaactccatctgaagtgctggatgaagaagacgacgtcgaagacgatggagaagacccc

SEQ ID NO: 800326 - DNA, 100 bp, Homo sapiens
agtcaatgtgacatgcgtttcatacagaagtacctgcttcagagacatgagaagattcatactggatctaaaatgtccactgaggcacaaagagttgatg

SEQ ID NO: 800327 - DNA, 100 bp, Homo sapiens
ccatgatgccccacttggtgaatggagatgcagctcagcaggttggatggagtactgctcgtgattattacacgtttttatggtcccctatgcctgaaca

SEQ ID NO: 800328 - DNA, 100 bp, Homo sapiens
ctacgagcttgagagaattctgaacaggatttcagaggctttgaaaaaatttggtatctcagcaaatgacacttcaattctaattgtttacattgaagag

SEQ ID NO: 800329 - DNA, 100 bp, Homo sapiens
ccggggacctgcatgtgtgtgcgcgcgaaggagcggaagaatggcagtgctcaaactcaccgaccaggtcccttcaccgatgttgtcaccaccaacctaa

SEQ ID NO: 800330 - DNA, 99 bp, Homo sapiens
caaactgcagtcaccaagtaaaacaatgatgattctgataccgagacgtcaaatgacttgccaaaatttgcagatggaatcaaggccagaaacagaaat

SEQ ID NO: 800331 - DNA, 98 bp, Homo sapiens
caaaatgatcaagcctttctttcatgcactgtctgaggcctgtggtcaggaaataactactaagcaaatgctgcccatcgtattaaaaatggcaggag

SEQ ID NO: 800332 - DNA, 98 bp, Homo sapiens
taaagattgactttggggaagctgccagggcagtgctgctacccccgtatgatgatgccactgtgaatggtgctgccaaggagccaccgccaccttac

SEQ ID NO: 800333 - DNA, 98 bp, Homo sapiens
ttggagaggccttatggtaatgtcggccattgagaaattgttgaggcaggtggagccgccaccaaaatgcagattttcgtgaaaacccttacggggaa

SEQ ID NO: 800334 - DNA, 99 bp, Homo sapiens
cacatttggaagcagttgtgattgggcgtggcccagagaccaagatcactgataagaaatgttctcgacagcaagggtgtggatggcgtcataaaaagg

SEQ ID NO: 800335 - DNA, 115 bp, Homo sapiens
caaagcttccaatgagtatggcagtgtcagctgtacagccacactaactgtgacagacactcgcctatggggacatgaaccacgagtggatcggcaacgagtggctccccagcct

SEQ ID NO: 800336 - DNA, 98 bp, Homo sapiens
tgcatgagaggattgaacaagagattgagatggaaatgaaaggacatggatttgattgacatactttggaggcaagatatagatcttggagtaagtcg

SEQ ID NO: 800337 - DNA, 129 bp, Homo sapiens
gccggcgctggtggcggggcccggtgcatggcggtctgtcggcggagtcgccctcgggggctgtcagaatatcgtatctactccagtgaaaatcaagctgatagacatgctttctgaagcaggactctc

SEQ ID NO: 800338 - DNA, 98 bp, Homo sapiens
atattccagtcgatgtatttgtacaccaagcattatccaattggtttgctatttgatcttcttgcatcaagttcagctcttccttggaacatcacagt

SEQ ID NO: 800339 - DNA, 98 bp, Homo sapiens
ggaatgacctctaaacagcttaacaactgggccgtgtataggttgtcaaaattcacaaggcaaggtgactttgaaagatacgtaggtaacctttccag

SEQ ID NO: 800340 - DNA, 99 bp, Homo sapiens
tgtggcttctgccagccttgcaggaggactctggcacctacgtctgcactactaggatgtcttgtattatgagcagcttaagaccaatgtgatacaaca

SEQ ID NO: 800341 - DNA, 99 bp, Homo sapiens
ttccagaactgctggaagctgaggacatagagacactgcatattttaccaaggctttgactggaatggcatgctttcaaatataaacagacggctttaa

SEQ ID NO: 800342 - DNA, 100 bp, Homo sapiens
aaaaaaaccacaaatgtttttctgttttgcctgaatacatgatttaaacaagagatttccacagaagggcagcaggatgggtgtggaagcagtgatggca

SEQ ID NO: 800343 - DNA, 98 bp, Homo sapiens
ggaacgctgccacaactatctccagaatgtcagcatggaggctgctgggcaggtcatgagtcaccatgccctaccacttatgtcttggatgaagatga

SEQ ID NO: 800344 - DNA, 100 bp, Homo sapiens
ttatggacaccggtgaaaacccagaggttcccttcccccgggacatgattgacttagaggtacttgatgaagaagcagaagtttttatagtcaaaatgtg

SEQ ID NO: 800345 - DNA, 100 bp, Homo sapiens
ggcggatctggacacccagcggtctgacatcgcgacgctgctcaaaacctcgctccggaaaggggacacctgtgttcaagagacctatgaagccaaaaga

SEQ ID NO: 800346 - DNA, 99 bp, Homo sapiens
agggcaaaggcaaggtggtggacctgctggccacggacgccgacatcatcagccgctgccaggaccaagaatcgccttcagccctgtctggtgcatcct

SEQ ID NO: 800347 - DNA, 98 bp, Homo sapiens
gagcttcgtggagctaagcggagctgagcgcgaaaggccgaggcactttcgggaattcacagtctgcagcattggaatacaaacagaagcttgcacga

SEQ ID NO: 800348 - DNA, 99 bp, Homo sapiens
caggagcacctgctggcgctaaaagagcaaaatatgctgtgaattccatcaagaagaaagtcaacgacaagaacccacacgtcgccttgtatgccctgg

SEQ ID NO: 800349 - DNA, 50 bp, Homo sapiens
cttcaacctcacgctcaagcagcagagatggggtttcgccatgttggcca

SEQ ID NO: 800350 - DNA, 50 bp, Homo sapiens
atggcttccgaggagctgtacgagatttcctttgacctcgctgagtacac

SEQ ID NO: 800351 - DNA, 100 bp, Homo sapiens
ttcgtcgctgttgctgccgccatacgcgctctccctgtttagaattaaacaaccaccatgtcgagcaaaaaggcaaagaccaagaccaccaagaagcgcc

SEQ ID NO: 800352 - DNA, 99 bp, Homo sapiens
tttcctctgctgccgctcggtcacgcttggcttccaggcctttgaggtccaactggtgctgaggcaggccctccccaacatctggacggtgctgaaaga

SEQ ID NO: 800353 - DNA, 60 bp, Homo sapiens
gtgaggagggcgcccctgaacctgcaccagggttgcttttgtaatgaagaagcacttaaa

SEQ ID NO: 800354 - DNA, 101 bp, Homo sapiens
aggacatgctacgacagtgaagattcagcaatggcaccagcatgatatcattgatcattcctcccaaagaccagatttcacgagtggcaaaaatgttagcg

SEQ ID NO: 800355 - DNA, 104 bp, Homo sapiens
tgtgtgagcagtctctggacaagatgaccacactccaggaatgccagtgcatcttttgcacagctggttggatgactgcctgcaacaatatgtccacaagtttg

SEQ ID NO: 800356 - DNA, 98 bp, Homo sapiens
cacagttattgacaccgaaaccgttggagagggccagtgggatggagttggtcctatcccaggactgtcgaagtcccccaaaggggttgagatgctgt

SEQ ID NO: 800357 - DNA, 98 bp, Homo sapiens
ttttctcaaacaatgatgaaggccttattaacaaaaagttacccaaagaacttctgttaaggagagattaaacagattctagaaaatgaacttcagat

SEQ ID NO: 800358 - DNA, 100 bp, Homo sapiens
tatcttcgccatcgccagcatcgccaacccggactggatcaacaccggggagtctgcggaaaagtacgaagatctgagctcttctgacgagtcctgccct

SEQ ID NO: 800359 - DNA, 100 bp, Homo sapiens
gacgggcgcccggccggctgcggtccgtgcggaggctgagccggccgcgggcgcgaccggaggcagaccagttggaatgccaaaaatggaaaaagtctac

SEQ ID NO: 800360 - DNA, 101 bp, Homo sapiens
caaacacattagaatcaccatttagtgacttgaacaacctaccaagtgatgtgggtggaataattaatgatagttctgaattaattggtcctgctgaagct

SEQ ID NO: 800361 - DNA, 98 bp, Homo sapiens
gcgcccgcgccgacgcggggcccatggccaggaccaccagccagctgttttccaagagataacttcaccaagatgtccagtgataggcaaaggtccga

SEQ ID NO: 800362 - DNA, 100 bp, Homo sapiens
ggcaaacactggaatcctactttttcttatgaagtgtaacagaacagactttaccacctgaaactgctgcttcaagttcagatcaggcaaggaacaaacc

SEQ ID NO: 800363 - DNA, 98 bp, Homo sapiens
gatgccctgcagtacctgcagaaggtctctggagacatcttcagcagaattatagcgttcagccggcctgtgaaatatgaagatgtggagcacaaggt

SEQ ID NO: 800364 - DNA, 100 bp, Homo sapiens
gcttagctttcagcattctccagaggcgttccatttggaactgtcttgctttgttacgaggtgctatgaagtggtgatgaacgtagtccaccagttggct

SEQ ID NO: 800365 - DNA, 135 bp, Homo sapiens
ttggattttttcactctgctgtaacttacaggtcctgtaaccttgaagcatagtcagctttcgattttcctggatcaataagccgagagctgaggattcaggcgaataccactgcgtatatcactttgtcagcgc

SEQ ID NO: 800366 - DNA, 100 bp, Homo sapiens
aaaagtgccgccctgacttgtgcagcaaagtggcccaaatccatggcattgtgctggagaatctggtaaaagcaccattgtgaagcagatgaggatcctg

SEQ ID NO: 800367 - DNA, 118 bp, Homo sapiens
gcgagtccggagaggagttccgcatggagaagttgaaccagctgtgggagaaggcccagcgagaacttgctactaccagcaccatgccctaccaatatccagcactgaccccggagca

SEQ ID NO: 800368 - DNA, 100 bp, Homo sapiens
ggaagcaaaatgtccctaaaattgccaaggaactgggatttcaacctgaaagtggaggctgcgaaaatagggaaatgaggcaagttatcctttggaaatg

SEQ ID NO: 800369 - DNA, 100 bp, Homo sapiens
aaaaaccatcagtgtttgggaatgattctgatgatgatgatgagctctcttcaatctaattcccgtgggcctgcgtgtagtggccatccaaggagtgaag

SEQ ID NO: 800370 - DNA, 100 bp, Homo sapiens
tcatacagaagtacctgcttcagagacatgagaagattcatactgaatttggtgttcacttggcagaactgactgtagatccccagggggcactggcaat

SEQ ID NO: 800371 - DNA, 98 bp, Homo sapiens
agccccccgctctgagggccccggcccctggatgcacagccccggcgctggtatgaatgctgctgtcagggctgtggttcgagttggtatcttcaccg

SEQ ID NO: 800372 - DNA, 100 bp, Homo sapiens
agctacagcacaaataactccataatgtctgaaaatactgaaattgatagcagtttgaatggaggaagaacgtgcaaaacgtgaggagctagagcgaata

SEQ ID NO: 800373 - DNA, 98 bp, Homo sapiens
attaacagacaagacacttttcagaaagacagatgcccagctctctcctgtttttataagtcgcagctccgcaaactcactgaagcaactcgtttacc

SEQ ID NO: 800374 - DNA, 98 bp, Homo sapiens
ttccaaagagatacagggcagaggaaaatgcaagaagactgatggagcaggcttgcaatattaaagaaggaaaatcacctcggcagtgtttgaaggaa

SEQ ID NO: 800375 - DNA, 104 bp, Homo sapiens
tggctagacttatacttctcaaatcttaatttcctaaagataaactcatcctgaaagtcgctgttgttctcctgctgagcaagaatggaggccccactggtgag

SEQ ID NO: 800376 - DNA, 100 bp, Homo sapiens
cggcgccgccgcgtcttcccggtctcctttcccggccgcacaggattggccatcgggactttgatgtggagaagcgacttcggagagacctcaggaggac

SEQ ID NO: 800377 - DNA, 100 bp, Homo sapiens
gaaacctggagcggtcagagcagtttgcccgaccatctgtaagtcacacggctgcaccgccgaaggcctctgttgccacagcgagtgcctgggcaactgt

SEQ ID NO: 800378 - DNA, 100 bp, Homo sapiens
gattcactaatgtcccagaaaggacacaaatagatgtaggcagaatacctttacagaggttaaaattgtttaattagacacttcagaattttgatcacct

SEQ ID NO: 800379 - DNA, 98 bp, Homo sapiens
gtgtgtccatcttggttttgagctctgctctgcctgtgatgtcgagaacactggaaagcatcatcattcaccagttacgaatgaactccagatgaaat

SEQ ID NO: 800380 - DNA, 100 bp, Homo sapiens
gcaatctcctcctccactgccactacagggaagtgcatcacatgtcagtaacggcacagccaacaagatgaacggagctttggatcactcagaccaacca

SEQ ID NO: 800381 - DNA, 100 bp, Homo sapiens
cttggttgacttcagtgaacagtatactccagaagccgatccctacttcatccaagaccgtccagtggtttacgtcttggatcttgcagatagactgatc

SEQ ID NO: 800382 - DNA, 100 bp, Homo sapiens
acactctacctaatcatggaatatgcaagtggagatctgactgcagccatgagcagcaatgagtgcttcaagtgtggacgatctggccactgggcccggg

SEQ ID NO: 800383 - DNA, 100 bp, Homo sapiens
gatttttcttcaccttttccttactcatgagccagagctacagagacttctgaagtggagagtctgcgacctcctcggttcttcaatgaagatggagtta

SEQ ID NO: 800384 - DNA, 100 bp, Homo sapiens
agcatgaagagataaccaacctcactccacagcagttaatagatctccggcataagctcaatcttcgggtacgaggaacagcaaattcaggaaaaagtgg

SEQ ID NO: 800385 - DNA, 98 bp, Homo sapiens
gatgtagatgtgagagccacatcaacccacctcacagcacttcattatgcagctaagagacgagttgtactgctgtcacaggaaatggacgctggatt

SEQ ID NO: 800386 - DNA, 100 bp, Homo sapiens
gatttcctggggggcatggagtgcaccctggggcagggccatgccacttcattttttggcccagccttggagcgctactcatcctttcaagtcaatggca

SEQ ID NO: 800387 - DNA, 99 bp, Homo sapiens
agaaaacagtctgtggagagaatctgcctcctttaacttatgaccaggtggagccgccaccaaaatgcagattttcgtgaaaacccttacggggaagac

SEQ ID NO: 800388 - DNA, 100 bp, Homo sapiens
atggcaactgtatgatagaagctatataaagtcaagtgtccattttctttcaactatatttgagcatacccaggtttctgttgcagcagacggtgcccag

SEQ ID NO: 800389 - DNA, 100 bp, Homo sapiens
acgtaaacgtgttcaataccatccttaccaccagaagctatccacaacttcgcagaggtgaggggccgtgagacttatgaaatgctgttgaagatcaaag

SEQ ID NO: 800390 - DNA, 100 bp, Homo sapiens
ctatgtacaagttacagtcatagcagtacccgagatggaagacgcgacagggcggcgactggcggcgcgatggacctgaccgggctcctgctggacgaag

SEQ ID NO: 800391 - DNA, 100 bp, Homo sapiens
aatcaagctaaggagaaactgcagcgagctgcaattgcccagaaaaagttactatgcgagtcagaagaaaacatttgaaattaatcccagacacccgctg

SEQ ID NO: 800392 - DNA, 99 bp, Homo sapiens
ccgcaacaggcgttttgcaatgcagatgtagaatatggctcaagcctggaagatgacgtggtgggggacacttcagggtactaccagcggatgttggtg

SEQ ID NO: 800393 - DNA, 100 bp, Homo sapiens
gggctgggccctgcatcacctcaagtgtgtagaggaggggataccaactggagcctgacctatcagaagaagtgtcggcccgactccgcctgggcagtgg

SEQ ID NO: 800394 - DNA, 100 bp, Homo sapiens
attgtgtggccttagcgatctatattccctttccagaagatgattccaacgccaccaattccaacctgctttcaactgacaaaactgtgaaagtcttaaa

SEQ ID NO: 800395 - DNA, 100 bp, Homo sapiens
cagtgactaccatgacgaaaacatgtactacagccagtcttctatgtttccacatcggtcagaaaaagatgacccagatgatgtggtaccagttggccaa

SEQ ID NO: 800396 - DNA, 100 bp, Homo sapiens
agagggactcttggcagctgtagcagcagcagtgaatgtcctcagccagcagagccacgttccttatgagcaccgtgggtttatttcattttcctacacc

SEQ ID NO: 800397 - DNA, 99 bp, Homo sapiens
ctctggagacttgacctaaacagcaaagagtggatccgacctttggcttcagttttcggctttgtgagaaaccttaccatcaaacacgatggccagcaa

SEQ ID NO: 800398 - DNA, 110 bp, Homo sapiens
tccatttctggacaaaatgcctgaagccaaccaactacatttgccaaatctcaattctcaaggaatcagtgcactccactgttacttgctgccacttcaggagcactgga

SEQ ID NO: 800399 - DNA, 98 bp, Homo sapiens
tcctgcagatggccaatgagaaagccctgaagcagaagggcatcaccgtgaagcagaagaggtaaaatagaactgcacgggaaacccatagaagttga

SEQ ID NO: 800400 - DNA, 100 bp, Homo sapiens
caatgttgatgaacagtaccaggaagaggcagaagaggagcttagcagtgtctgcaaaaacgaatcttttcctacaacctgttaactgactggactgttg

SEQ ID NO: 800401 - DNA, 98 bp, Homo sapiens
cccctcatgtaacctcagagatctgggcaggcacaattctgtcttctcttgaactgcataactgagaactctgcaaattccccaaagaaggaggaaaa

SEQ ID NO: 800402 - DNA, 98 bp, Homo sapiens
ccccatcaaaggaagacagtgtggagcagataaggtgtcccgacccaggctaagcttgagcatggctgagcaggagcccacagccgagcagctggccc

SEQ ID NO: 800403 - DNA, 100 bp, Homo sapiens
ttcagtcagaagaaggctgctattgaaagagagtatgcacaggaagacaactgttagttttgtggcttactgctgctccacccagtgtctgcagactttt

SEQ ID NO: 800404 - DNA, 100 bp, Homo sapiens
cgcagcagaaagcatttaaccagcatggctacttcatattttggaaagcagtttttaagacaacagggagaaggttttaaggtgaaaacgaagaaagaaa

SEQ ID NO: 800405 - DNA, 100 bp, Homo sapiens
aaccattgccatcactagaagatttggataatacagtatttggagcagagaggaaaaaacggctatctataataggaggactcacgaatggcagtggaag

SEQ ID NO: 800406 - DNA, 50 bp, Homo sapiens
aggccaagaacgggcacctggctgtggttctgcggcatgaggaatttgaa

SEQ ID NO: 800407 - DNA, 100 bp, Homo sapiens
agaggaagaggaaagcaaaggagtcagggatggctctttctcagcaccttgcagagtgaagtcaagcccatcctagagaagctgacccaggaccaggatg

SEQ ID NO: 800408 - DNA, 100 bp, Homo sapiens
aagccctcagcattattgtggatgaatataaggaaatgggtcctgatgaatatgaagagatggaagaagaggaggaggaggaagaggaggaagacgagga

SEQ ID NO: 800409 - DNA, 109 bp, Homo sapiens
cggttggtgagattacctgggtctagagtgcggagctgctccgtggccacgaggacgtcaccatgaacgaagtcggcctactggagttcttccaaaatgtgataaaaga

SEQ ID NO: 800410 - DNA, 100 bp, Homo sapiens
ccagacctggctgtggtcaaacccacccggcccaactcactacagtatgctggctatgactattcgcagcaaggcagatttgtccctccagacatgatgc

SEQ ID NO: 800411 - DNA, 51 bp, Homo sapiens
gacggtttcgccggcagtctcggtaaaatgtcggttccaggaccttaccag

SEQ ID NO: 800412 - DNA, 100 bp, Homo sapiens
acagctgtacatccatgccatcttctccagccaccccagccagtggaaccaagagcaccaaaactactttggaatagatgaaaaccttggtccagtagca

SEQ ID NO: 800413 - DNA, 100 bp, Homo sapiens
cattttcccctatcttcttgtcaatatcggctctggagtctccatcgtgaagatatggccgccttaaaagatgcagatgctgttgtgatcagcatgaagt

SEQ ID NO: 800414 - DNA, 98 bp, Homo sapiens
cttctccagttagttggagcccagctcaggaatcttgcttttaagaaaattccccagaaatcctcccatgctgtttgtaacgctcaacatgatcttcc

SEQ ID NO: 800415 - DNA, 100 bp, Homo sapiens
gccagctcctgcgaccgccctgcgcttcgtgcaccggggcggtccgttgccaaagccagtctctgctggatgaaccgaatcctaacagtccagccaatag

SEQ ID NO: 800416 - DNA, 98 bp, Homo sapiens
aggtggtcagacatgtcatcaactcagctgaattctggggagacattgccaaggaattttactggaagactccatgccctggcccattccttcggtac

SEQ ID NO: 800417 - DNA, 98 bp, Homo sapiens
gtggatgtcggcgaagccgcgggcgagaacccttaggagaaatcttgagagtggacagcaattgtgaagatcgccagagagttctgtgtttcatcacc

SEQ ID NO: 800418 - DNA, 100 bp, Homo sapiens
gtggtgcgttctgagccgtctgtcctgcgccaagaaatctcctgcaaagaagctgagccatgcaattagtaaatctttggggtgtgtacccacgagagaa

SEQ ID NO: 800419 - DNA, 100 bp, Homo sapiens
ggcactgttagaatctgggactttcttcgttgccatgaggaaagaattctccgagagatgctgcaatttgtcagtaatcaagtgggagagttccctgact

SEQ ID NO: 800420 - DNA, 100 bp, Homo sapiens
aattgtttattgcattggtggagagaatctatctgtagcaaaagcggccaggacgactggaatgggaccaggccgtcgctgaaggcccctcctgctaggc

SEQ ID NO: 800421 - DNA, 98 bp, Homo sapiens
cgaatgcgcccgtgccgtcacggaaaaggctgaagccgacgtagcttctctgaacagacgcatccagctggttgaggaagagttggatcgtgcccagg

SEQ ID NO: 800422 - DNA, 99 bp, Homo sapiens
agtaatcgcctgctttgattcattgaaaagaatggatcttggagaatgtctgaaagtccatgacctggctttaagagcggattatgaaattgcatccaa

SEQ ID NO: 800423 - DNA, 100 bp, Homo sapiens
ctgatgtgattgcaagcatcttttcttctgcatggtgggtacccccatgctgtggcacggcttcagaggtggctggatccaaacaaaccaataaggaagc

SEQ ID NO: 800424 - DNA, 51 bp, Homo sapiens
gccaccaaagacctgcgactttgctcagatggactcaccctgtcacccagg

SEQ ID NO: 800425 - DNA, 100 bp, Homo sapiens
caacggcaccaactattcgcggagctggaatgactggcaacccaggttatttcttatgagggtcatggatatcccctatctaaacttggaaggaccagac

SEQ ID NO: 800426 - DNA, 100 bp, Homo sapiens
cccaggtgaaggccagtgctctcaagtcctggaatcaagatgtgagaccaagaaattatttctgaagaaagaaatttatgaaatagaatcaacccagtgg

SEQ ID NO: 800427 - DNA, 98 bp, Homo sapiens
acccctcctgtaacccagcctgtttcacttcttgtacctggagtagaacagaaaaattattatgtctgtgttcccttgggactcattggaaattgtac

SEQ ID NO: 800428 - DNA, 98 bp, Homo sapiens
gccgaaaacttccagatttcttaacagccaaactgaatgcagaaaagctcaaagatttcaaaatcaggcttcttctcatatcggtaattccactcagg

SEQ ID NO: 800429 - DNA, 98 bp, Homo sapiens
aaactcagccactggttgccttggtaggcaataaaagctgggtttgctgctgaaggtgtggagtcagggacagccttcagtgacattaatctgcagga

SEQ ID NO: 800430 - DNA, 98 bp, Homo sapiens
aggaatgccagcatctgccaagcaaagaagtaccgtcagcatccagatgctttgaagtttaccagtattaaagacactccggagatggtccaggccag

SEQ ID NO: 800431 - DNA, 100 bp, Homo sapiens
aatctctagctgaccagtttgacttcaagatgtatattgcctttgtattcaaggagaaggttgtctgcagagtgagattatggcgaagcattttattctt

SEQ ID NO: 800432 - DNA, 98 bp, Homo sapiens
cttgtgaccctgcagctcctcaaatcttgaaagcgccacaagcagcagctgctgagccatggctgaaggggaaatcaccaccttcacagccctgaccg

SEQ ID NO: 800433 - DNA, 75 bp, Homo sapiens
aggagcggaagaatggcagtgctcaaactcaccgaccaggttgcatcataaatacaaaggactgaagttataaaa

SEQ ID NO: 800434 - DNA, 100 bp, Homo sapiens
tttccattgtgaggtctgcaagatggcactcaacatgaacaactacaaaggctatgaaaagaagccctattgtaatgcattggcagtatggagttactca

SEQ ID NO: 800435 - DNA, 99 bp, Homo sapiens
ctccttcaccgccgcagaccccttcaagttctagtcatgtctcacagaaagttctccgctcccagacatgggtccctcggcttcctgcctcggaagcgc

SEQ ID NO: 800436 - DNA, 98 bp, Homo sapiens
atcatgctcaagtcagagggcttttactcctacctgtgtaccgagccaggatggagtgcaatggcatgatctcagctcaccgcaacctctgcctcccg

SEQ ID NO: 800437 - DNA, 98 bp, Homo sapiens
aagatgccaggaccacctggaagcctagaaatgtcacccacaaaagctgtatataatgccagacattggaatcatccagattcagaagaactgcctgg

SEQ ID NO: 800438 - DNA, 99 bp, Homo sapiens
agacaccagcatctccagccagatactccccagtttctaaagcagtacttggagatgatgaaattacaagcgagttcctggggaaaaccccagggcaaa

SEQ ID NO: 800439 - DNA, 100 bp, Homo sapiens
gtgcatgacctcaatgataaacttgaaaatgaaattgcaaataaagattctatgcatcgacaggataaaagaatcagagtgtctcaacccttgacaagag

SEQ ID NO: 800440 - DNA, 98 bp, Homo sapiens
ttatggctcctgaacagttgcactgtaaaaaacccagctgaagaccactttagaaactcaattaaaaagaagattggcccatgcacaagctggaatgt

SEQ ID NO: 800441 - DNA, 100 bp, Homo sapiens
tacatgcaaagcttccaatgagtatggcagtgtcagctgtacagccacactaactgtgacaggttacactcctggcacaccttacaaagtgtcctgttcc

SEQ ID NO: 800442 - DNA, 100 bp, Homo sapiens
tccaaacatgatcgtttactgcaaagtaacaaacctgaatttggcaactggcatcataaacagaagcagtgcttcagctcccccaaccctccgacccatc

SEQ ID NO: 800443 - DNA, 101 bp, Homo sapiens
ccacgtctccaaaatgagtcgcatcttcaacccccatctggaagagcaagaagagacgtctgcaattcgagtgggttttatcacatataacaaagttctcc

SEQ ID NO: 800444 - DNA, 100 bp, Homo sapiens
ggtcctccacaggctaaactgaatggacagcaggctgctctcgcttcccagtatagagctatgatgcctccttatatgaaactggagcgagcagagtggg

SEQ ID NO: 800445 - DNA, 100 bp, Homo sapiens
attgcttttggcgtggccatgccggcggccctcacagcaaccagcaccagatgaaggagcattcctcttggcatgccaatgaagatgtggaaagaatgtt

SEQ ID NO: 800446 - DNA, 98 bp, Homo sapiens
ctacgctatgcgagtcctgttcccgggcatcgaggaccaccccgtcctgcgggagctggaggccgagcagaagcgcaacgcagagtcggtgaagggca

SEQ ID NO: 800447 - DNA, 100 bp, Homo sapiens
caattatgtcttctgaggaagcagcaaatggaaagaaatcccactgggcagagcttgaaataagtggtgaatcagctcccggccgactttaggattcttc

SEQ ID NO: 800448 - DNA, 100 bp, Homo sapiens
aagactctttaaagaaggcaaggagagaatgtatgaagaacagtcacaggacaggaggaatgccagctcctgagcaggcctcattggtggaggaggggca

SEQ ID NO: 800449 - DNA, 100 bp, Homo sapiens
tgtgaggtctgcaagatggcactcaacatgaacaactacaaaggctatgaaaagaagccctattgtaatgctactatactggcaattgctggagaagatt

SEQ ID NO: 800450 - DNA, 99 bp, Homo sapiens
gcacatctgcatgtttgcactgggtctctgctggatgaaccgaatcctaacagtccagccaatagccaggcagcacagctttatcaggaaaacaaacga

SEQ ID NO: 800451 - DNA, 98 bp, Homo sapiens
attcagatgtggtggaatatgccaaggaaaaactggagagcttcatcaaaaatagtgatagctttgataaggctgtgcttcctggaagtggtattatc

SEQ ID NO: 800452 - DNA, 100 bp, Homo sapiens
agatttggaattttcatcagattttaccctgaaaatcacaaggacatccatgtgcacggtgccaatgggtcatgtttggttagaaggtgacaatctacag

SEQ ID NO: 800453 - DNA, 100 bp, Homo sapiens
agcccctcacgggcaccagggcttcgccagcgggccagcaacaaagtgcaaggtgtcagctgtgatgcatgtttaaaaggaaattttcgaggtcgcagat

SEQ ID NO: 800454 - DNA, 101 bp, Homo sapiens
tttgcagtgacaaaaaaccattatatgctgtacaagaccgtctatgaccagtatttcatcaccctgtataacatcgtgtacacctccctgccagtcctggc

SEQ ID NO: 800455 - DNA, 126 bp, Homo sapiens
cctcacagtttgctctgctcttccaacaccagtggaagatgatcacatcccagattgaaaaggaagatcaggccaaccccaaagaagaagtgaccaaggaggagtttaaactgaatgaacaacctc

SEQ ID NO: 800456 - DNA, 100 bp, Homo sapiens
gagggagttcgtggcggtgacgggcgccgaggaggaccgggcccgcttctttctcgagtcggccggctgggacttgcagacggagtctcgctctgtcccc

SEQ ID NO: 800457 - DNA, 99 bp, Homo sapiens
tagctgtagccatacctaatagacctcctgatgctgtacttacagataccacctctcttaatcaggataatgaagagttgacaattagttgcccagtgc

SEQ ID NO: 800458 - DNA, 98 bp, Homo sapiens
ctaaacttttcaagcctgaaggaaaggcagaactgcctgattacaggagctttaacagagttgctacgatggaagttaaagggaaaaagcaattcaca

SEQ ID NO: 800459 - DNA, 98 bp, Homo sapiens
catggatgacatctacaaggctgcgggtccccagccccaccccagccccaaaggaggctgttcgagagggacgtcctccggagccaaccccagccaaa

SEQ ID NO: 800460 - DNA, 100 bp, Homo sapiens
ccccgccagaacccggcccggaccgtgtcgccgacgccaaaggggacagcgagtcggaggaggacgaggacttggaagacaagttggatggcttgaggac

SEQ ID NO: 800461 - DNA, 100 bp, Homo sapiens
taggaggagtcctccacctcgtcgcagcattagtgaccagaaggatcccaaggatcgaatggttcaggttgtgaaatggtacctctcagcctttcatgcg

SEQ ID NO: 800462 - DNA, 100 bp, Homo sapiens
tcacagtaaccggatctatgattacaacagtgtcatccgcctgtacctggagcagcaagtgcaattttacgaaacgtaccttaaggcaggttctatgaaa

SEQ ID NO: 800463 - DNA, 100 bp, Homo sapiens
tgttgtaccttgtgacagaatatgccaaaaatggagaaatttttgtgaaagaaaggatgtcttaagagaagctgaaattttacacaaagctagatttagt

SEQ ID NO: 800464 - DNA, 100 bp, Homo sapiens
catctgaagttcatcgccaggactgtgatggtacaggaagggaacgtggaaagcgcatacaggaccctaaacaggtgtgtaggttagggggaatcaagca

SEQ ID NO: 800465 - DNA, 99 bp, Homo sapiens
tgggatcagagcctgataatttggtgattacgtggaagcttgacaaaagtaagctgaagccaggaacaagagttgctttggatatgactacactaacta

SEQ ID NO: 800466 - DNA, 98 bp, Homo sapiens
tcctgcccaacaaacagaggacagtgaaaatggacccaagtggggtcaaagtgctggaaacagcagaggacatccaggagaggcggcagcaggtccta

SEQ ID NO: 800467 - DNA, 100 bp, Homo sapiens
aaacttgtccctcgggcccatcgactccagcgtgctctctcggaataagacagaggagacaagataccagcttcttcagttgcgccccacacagcgtgcc

SEQ ID NO: 800468 - DNA, 98 bp, Homo sapiens
cttagccagcccgagcaagtaaagattgttttaaaggacaccttggaaaaaaagggggtattagggcatttaaaagcaaggatccgagctgaagtttt

SEQ ID NO: 800469 - DNA, 99 bp, Homo sapiens
caccgagcaccctgagaacttcaagctttatgaaggcaaagaacagatggagtttgaagaatccatgagacggctctttgaatccatcaacaatctgat

SEQ ID NO: 800470 - DNA, 100 bp, Homo sapiens
gggaaacagtcttcaggagagcctagatgagctcatacagcaagacactaagggcgactaccagaaagcgctgctgtacctgtgtggtggagatgactga

SEQ ID NO: 800471 - DNA, 100 bp, Homo sapiens
cctttgtggaattcgaagatcctagagatgcagaagatgcagtacgaggactggatggaaagttttgagcaaaattttggactgtgaagcaaggcattgg

SEQ ID NO: 800472 - DNA, 100 bp, Homo sapiens
acgtctcaccccacgagacctacttctgcatcaccacagggtgctgtgccgttcctggtcagtgccacctctggcaccactgtgctaggggcctttgacc

SEQ ID NO: 800473 - DNA, 100 bp, Homo sapiens
gcccccctcgcctatgccttcagacatcaccagccagccttcatctcctcgtcctccaggcagcacaagccattgtggaatctccaccaggtgtacagaa

SEQ ID NO: 800474 - DNA, 100 bp, Homo sapiens
atttgtttgaacctcattcaggggaagagtacactcgagatgaaggttcacaatctatacagttgcataaaagtagcagaagactttgtatctccagaac

SEQ ID NO: 800475 - DNA, 100 bp, Homo sapiens
cagcagagattaaaacagaatatcctgagaaagagattcactttataggaacagcttcagcttcagtgatgaaaaactgaattctccaacagactctacc

SEQ ID NO: 800476 - DNA, 100 bp, Homo sapiens
aggcggagctgtagccactgtagcagcaagggttaaagcacgaattgggagctctcagcgacatcaccagtcagcagccaaagacctaactcagtcccct

SEQ ID NO: 800477 - DNA, 98 bp, Homo sapiens
ccaggtgaagggccccgtaaattggaaggatgcacaagttccaaggttacgtttcagtatatgactgatgggatgttacttcgtgaagctatgaatga

SEQ ID NO: 800478 - DNA, 100 bp, Homo sapiens
atctgaggatgtgaaacttaaatttgaagagagcaatatactttgctgcttattcaaactgcaaggaaaagttgaatgatgtatttgatcctgattctac

SEQ ID NO: 800479 - DNA, 99 bp, Homo sapiens
gaaaacaaatgacattgttcgatacagggtgtatgagtggaagatagatgataagcctgtaaaaattgacaagtgggatggatcagctgtgaaaaactc

SEQ ID NO: 800480 - DNA, 100 bp, Homo sapiens
aggagctaatccctgaatatctgagtgaggtcccagcttgaagagaaagaaaacaagaagttccctgtgtttaaggccgtgtcattcaagagccaggtgg

SEQ ID NO: 800481 - DNA, 100 bp, Homo sapiens
aaagctactgcagacgacgagctgagcttcaaaaggggggacatcctcaagggagtaactattcccagtcagaggcgctatgtgtattattatagctacc

SEQ ID NO: 800482 - DNA, 98 bp, Homo sapiens
agggctgtggctaccatgttctctcgcgcgggtgtcgctgggctgtcggcctggaccttgcagccgcaatgatgtggatgaatgctctttgaagccaa

SEQ ID NO: 800483 - DNA, 99 bp, Homo sapiens
aggattccacagtgtcctctggaaaatgtaccttctccaggcaaattccgttcccctgcagcaccatctcctttggctcttcggcaaccagtgaaagca

SEQ ID NO: 800484 - DNA, 100 bp, Homo sapiens
gtctctctgctgcggcgcggggaccgctgtgctctcggtgtggatgaggtcaccattgtcaacattttgaccaaccgcagcaatgcacagagacaggata

SEQ ID NO: 800485 - DNA, 98 bp, Homo sapiens
tcttccaaggcactaccaatatgttatctccagatgccgcgcaactgtctgatctcagttcatgatgagctctgtgaaaatgttacagcctcgtctca

SEQ ID NO: 800486 - DNA, 100 bp, Homo sapiens
gacaagcccttcttacagagttggaaaaccgaaagcagagacagcagtgatcatctcaggccacctcagtgtatactcttccatttgacaacggaattct

SEQ ID NO: 800487 - DNA, 98 bp, Homo sapiens
acctctaggaagaaagtgttgctgaaggttatcatcctgggagattctgggccgctttgaagaggaatttatcaaaatgcgcatggagagacttcagg

SEQ ID NO: 800488 - DNA, 100 bp, Homo sapiens
agggaagatggagacaccctctgggggtcctctctgagtcaaatccagtgtttgtgccattcagggattatattgacagaagtggaaaccacatactgag

SEQ ID NO: 800489 - DNA, 50 bp, Homo sapiens
tacgcagcaaaccatccagaaggtgctgcagggtgcacagctgatcgccg

SEQ ID NO: 800490 - DNA, 100 bp, Homo sapiens
cgcaatgatgagaggatgtggtggtctactctgatgtcaatcttgagggctagttttgagtatccgaggagcccaggaggaggaacccacagacccccag

SEQ ID NO: 800491 - DNA, 100 bp, Homo sapiens
tgagattgtcatgctgaatcctgccaatacccgcagcatttccaacatggttgcacactgggccacagaggatccagcaaggatgaagaaatggagcagc

SEQ ID NO: 800492 - DNA, 100 bp, Homo sapiens
gagacatgagatggtagccaacccctcagaaaattttcgtgctctgagcactggagagaaaggatttggttataagggttcctgctttcacagaattatt

SEQ ID NO: 800493 - DNA, 100 bp, Homo sapiens
tgtggggctctggaggtgggcagcaatctgtcaatcaccttgttaaagagatagcagtcctttcccctcatcaattccacatgccttccagatcaacttt

SEQ ID NO: 800494 - DNA, 100 bp, Homo sapiens
tgtaaggtgcgcagcagaaagcatttaaccagcatggctacttcatattttggaaagcagtttttaagacaacctaccgtatgtgaacgggagctgtgtg

SEQ ID NO: 800495 - DNA, 99 bp, Homo sapiens
gaaaactccagtgattttcaatcaaacattgcatagaaaaagtgtgagcgctactgggctgagccaggagagatgcagctggaatttggccctttctct

SEQ ID NO: 800496 - DNA, 100 bp, Homo sapiens
tcctgcctcagcctccggagtagctgggattacagacatggcagggaggtttaatagacatggataagaagtccactcacagaaatcctgaagatgccag

SEQ ID NO: 800497 - DNA, 99 bp, Homo sapiens
ggcattgcaaggtacattgagcaggctacagtccactccagcatgatcatgaagactatgatccacaaacagtgaggcttggaagtcgatacagtcatg

SEQ ID NO: 800498 - DNA, 98 bp, Homo sapiens
ggccccccggcaccgcgcctgctgccgggttgcgctccgtgcacctcttgcggggagattcttcaagcaatcactatgtcaacagacacaggtgtttc

SEQ ID NO: 800499 - DNA, 100 bp, Homo sapiens
gtcacaaccacatgattgggattgggccagtcttaaatatctacccatggaataaagagctgtatttgatcagtgatgatgatgatgattttgatgatga

SEQ ID NO: 800500 - DNA, 99 bp, Homo sapiens
tcgagttcaaagagaccctcggaactgtgtggaccagttgacaaagatccaaactgaattacaagagacagtgaaagatttagctaaaggcaaaaagaa

SEQ ID NO: 800501 - DNA, 145 bp, Homo sapiens
caggacatgcctccgccggggggctatgggcccatcgactacaaacggaacttgccgcgtcgaggactgtcggggctgggtataagtaagcaagaagagggcctgggagaagagtctgacgagcaaggggaaggtagccaaggat

SEQ ID NO: 800502 - DNA, 98 bp, Homo sapiens
gacacatcatgggttttgtcgactactcagcccttctccagcaccactgaagagtatttgactacagtcattccttatgagaaaaaaaacggaccacc

SEQ ID NO: 800503 - DNA, 100 bp, Homo sapiens
cacaacaagcaagcatgcagcttactgcttgaaagcccctagtccaattcctgacccttcagtagcaactgttgccacaggggaaaatggcataacgcag

SEQ ID NO: 800504 - DNA, 100 bp, Homo sapiens
catgggcctgcgggcctccaagacttcacagagaatgcagttgtcttgacttcaggtctgtctgttctgttggcaagtaaatgcagtactgttctgatcc

SEQ ID NO: 800505 - DNA, 99 bp, Homo sapiens
tcttggaatcaaagataaatccaaatactgcatatcagaaacaacaggatctcccattaaccagtcataatgaagtaagaacaagaagatggggaagag

SEQ ID NO: 800506 - DNA, 100 bp, Homo sapiens
ccatacctcccctgtccagaaaagctgccttatatgcgtgaggaattttaaattggaacaagagcaagaaaaaaacaaaatcttgtcagaagcactggag

SEQ ID NO: 800507 - DNA, 98 bp, Homo sapiens
ccctacacggatgaggcccggcggtcgcgcctcaaccggctgtacggaatccaagcaattacagaaggatcacctttgaatgaaattacttcagacag

SEQ ID NO: 800508 - DNA, 100 bp, Homo sapiens
acatccccattttatagatgaggaaactgaggccccgagtgcgtcttcctcaaggccacatggtgaatgacttcctagcatgggctgttgtgctggagag

SEQ ID NO: 800509 - DNA, 100 bp, Homo sapiens
ttatggaattgtacacagggatttgaaaccagacaaggaaaacttacaaaggttgcttgaagacagaagctttaaggaagagatagtgcattttagcatt

SEQ ID NO: 800510 - DNA, 100 bp, Homo sapiens
tgcggccggatgacccacaaccatcccacagatcgccatgaggttatctccaaagaaatattggaactggacccatgggaaaaccagtggaatgttgtag

SEQ ID NO: 800511 - DNA, 100 bp, Homo sapiens
gaaagtcagaatcagaagatagtcttggaagctgtttggaaaagacagtggagatgaggtgaccaagaatatggcccaggtgaccaaagccctggacaag

SEQ ID NO: 800512 - DNA, 100 bp, Homo sapiens
gacattgtttctgttattgacatgcccccgaaagtgttaagcacatggtggagaggcaagcacggattccaggtaaacactacacgtgaagagtggtgaa

SEQ ID NO: 800513 - DNA, 100 bp, Homo sapiens
gattgtgcagttgctgccagtgccgattgcagtacgcctgcctcacaccttgcgatgcgccaacatcaccatcattgagcaccagaagtgtgagaacgcc

SEQ ID NO: 800514 - DNA, 100 bp, Homo sapiens
ctgctttgaacaggaggattagaagaaggaatcatatatggctcacatgtttatgttctgacttcgtattagatctttctctggaatcaaaggactccag

SEQ ID NO: 800515 - DNA, 100 bp, Homo sapiens
ctgggagccgagatgtgggggcctgaggcctggctgctgctgctgctactgctggcatcatttacagattcgggaactggagcctctcctctgtcacagt

SEQ ID NO: 800516 - DNA, 100 bp, Homo sapiens
ggaactcgagaggaccaacaagttcatcaaagagctcattaaggacgggaagaacctcatcgctgcgacgaaaacagcctctagaagaccagcattctcg

SEQ ID NO: 800517 - DNA, 100 bp, Homo sapiens
gattttgatgtggatgatgccaaagttttattaggccaccagcccctcgggttccaagatgcagctactggagacagagttctcacacaccgtgggcgag

SEQ ID NO: 800518 - DNA, 100 bp, Homo sapiens
aatatccagttcaaccaccggggccaggtcctttttatcctggaccaggacctggggacttccccaatgcttatgctataatgatccagccttttatgaa

SEQ ID NO: 800519 - DNA, 100 bp, Homo sapiens
ggatccacatcttctggacccaactgtggaatatgtgaagctcaggtgcctaaaaggccagaggggcttctcaggccaacctccttttgatggaatccac

SEQ ID NO: 800520 - DNA, 106 bp, Homo sapiens
aggatagtaattatttgttaaccgggggacaggataaactgttacgcatatatgacttgaacaaacctgaagcaggtgttacagttcgagtgcctcaaacaaccac

SEQ ID NO: 800521 - DNA, 100 bp, Homo sapiens
tcacgaaaagtcgaagaatttccaggcgtccatctgattggtgggtggtaaaatcagaggagaatgaatgggacccggccaggcatggcctccaccaagc

SEQ ID NO: 800522 - DNA, 98 bp, Homo sapiens
caaacaggaagtctatgatgagtacaagcctttccgttccgaacgtccacggcgccctggcccccctggccatcccctcggcggcggcggcagctgcg

SEQ ID NO: 800523 - DNA, 100 bp, Homo sapiens
ataaggattactttgtatgcggtgtcaagttgcctaattctgaggacttccaaggattcagtggtcccaatttaaaggctattttattttcaaactggag

SEQ ID NO: 800524 - DNA, 100 bp, Homo sapiens
gcaagagaggcatcctccttgaagtatttggctgaggagttttcaatcccaccccgtgctgatcccattccaatatgtagcttctgtttggggactaaag

SEQ ID NO: 800525 - DNA, 100 bp, Homo sapiens
atgcagatatgctacatgacaaagacagactcctgggctataacgaaaagccaataaatctacaaatgtttattgggacagcagatgatcgatatttacg

SEQ ID NO: 800526 - DNA, 98 bp, Homo sapiens
gacctgctttcggagtacatgggcaatcatactcatgtacccagacttatacctttaataacaagcaattgcacatcaaaatcagttcccgtgaggag

SEQ ID NO: 800527 - DNA, 100 bp, Homo sapiens
agaagagagcctaactgaaaggaagagggagcagagcaagaaaaaaaggaagacgatgacttcaggagacctgtcttctggttacctggatgatactaag

SEQ ID NO: 800528 - DNA, 100 bp, Homo sapiens
gaactgtgaattctacccgggaaactcctcccaaaagcaagcttgctgaaggggaggaagaaaagccagaatatactgatgataatgctctgattcctaa

SEQ ID NO: 800529 - DNA, 100 bp, Homo sapiens
gggctctgatgacttcaacctgtacatgtggagaattcctgcagatccagaagcagttaattcatgggagcctcttctactgccacacaatctcagttcc

SEQ ID NO: 800530 - DNA, 98 bp, Homo sapiens
ctgcatcagattcggcctcagattctacagcatctgactacattcccagcctgccacagtgactcaggtcactcaaggaactatccgaccagctgcca

SEQ ID NO: 800531 - DNA, 99 bp, Homo sapiens
ttgggaggacccgggacaccgcacagccgggaaatgcaccctggaggagaagaggttctgctggaacaagctggtgtagatgcaagtgaaagctttgaa

SEQ ID NO: 800532 - DNA, 100 bp, Homo sapiens
agcactgaaacaacacaaaaccctatctcaagaacttgttaacctccggggagagctagattttaccaaatgttgcaagaactctggagttcttatggta

SEQ ID NO: 800533 - DNA, 99 bp, Homo sapiens
gcgtacgcctatctcttcaagtacatcataatcggcgacacagcatttgacattgtgcagcaaagaaatggttatggagaagcccagtccgctgcttgt

SEQ ID NO: 800534 - DNA, 100 bp, Homo sapiens
tcagccacaaatgtacccccagtacacttactactatcctcattatctccaaaccaaggtgaagatggagctggaaaaacaagcttaataagaaaaattc

SEQ ID NO: 800535 - DNA, 100 bp, Homo sapiens
cgagctgaaacagaagatccactcgattacaggggcgccgatgtgtgttgaaagactgctgcaaaattcttgacaacacagtattacctccagaaactgt

SEQ ID NO: 800536 - DNA, 100 bp, Homo sapiens
tcatcagccaccgattcccagaagatcatgatcccaccattgatgaagcagatgatgatgatgatccagaatataatttcctggaagacctcgatgaacc

SEQ ID NO: 800537 - DNA, 100 bp, Homo sapiens
ttctttcctagcctgagtgttgagcagtgtcatgccttggcgtttcagctcctcgttgtctagtgtatagtctttgctatgacttctggccagatgtgga

SEQ ID NO: 800538 - DNA, 100 bp, Homo sapiens
ggcggcctgtgtgtcaacgacctggcggtggggctgcggcgcctgggactgcaccgcaccgagggcgagctccaggatcagtttgacaacttagaaaaac

SEQ ID NO: 800539 - DNA, 99 bp, Homo sapiens
ggggacatggagaagcccatccaggtcatctgctacgtctacttcacccgcatcatcgccatcctgctgcaggtggctgtgccctttcagtggcagtgg

SEQ ID NO: 800540 - DNA, 100 bp, Homo sapiens
tgactgccatccttgcctcgctcactgcacgccagaacctgaggagagaatggcatgccaggcttttgatattatgagagtgacacatggcagagaacac

SEQ ID NO: 800541 - DNA, 99 bp, Homo sapiens
ccatcagtagatgccagtccctcaaccttgaactttccagacgcagaactgattaaactgcaaatatctcatgaagctgctgcctgtatcactggtctc

SEQ ID NO: 800542 - DNA, 100 bp, Homo sapiens
tttgtacggcaccactgggtacacagacgacgccaggacggcaagtgtcggcactgtgggaaggactccctggaggaaaagcggaagcggcagcggtctg

SEQ ID NO: 800543 - DNA, 100 bp, Homo sapiens
ttcctgataacgaggctgtggagcagcacagtgaaagcaagttgaatacattggtgcagaagcttcatgacttccttgcacactcatcagaagaatctga

SEQ ID NO: 800544 - DNA, 99 bp, Homo sapiens
gaggtacctctccttttccctctccctttccctaaggtgattttcttccacccccacctccacctctagatgattccagtgcccttccatctatctctg

SEQ ID NO: 800545 - DNA, 130 bp, Homo sapiens
tgtgctgtgcctctctcgcccacattttccccaagcactctcaggaacctggcaacaggaactctattttaagaacctctcaaaacgaaacaagcaaatcatggagaagaatggaaataaccgaaagctg

SEQ ID NO: 800546 - DNA, 100 bp, Homo sapiens
ggccaagacacccctgtctgctctgggcctgaaacctcacaacccagcggacatcctgttgcaccccacaggagaaaactccaggtacgtggaaatgaaa

SEQ ID NO: 800547 - DNA, 98 bp, Homo sapiens
acatccgaagacaatgttctccaaagataaggttcaagttctttcttcaaagagtcatcagaataacatggattgaagagacttccgaacacttgcta

SEQ ID NO: 800548 - DNA, 100 bp, Homo sapiens
tccaaagctgggaatcctattttttattatgttgcacggaggtatttcatggaaacttggagagagaaaagtgatgaagtgatgggagagctgactgatc

SEQ ID NO: 800549 - DNA, 99 bp, Homo sapiens
gaaatggccgctgtgtggttgcaacggagataaattcccggaaccgcgattcggcgtgtcagatatgaagagaaggctactaaagacttggaacgatac

SEQ ID NO: 800550 - DNA, 100 bp, Homo sapiens
taatcagttctgcgtttgaaaggaaacccgattctggaaaccaaaatggaggaaatgatgataagactaagaatgctgagaggaactatttaaatgtttt

SEQ ID NO: 800551 - DNA, 100 bp, Homo sapiens
cagaatgcttctcagcagcaacatccccaaacagcggcgtttcacggtggcacatacatgctctttcaccatgcctggatcacttcctttgaatgcagaa

SEQ ID NO: 800552 - DNA, 101 bp, Homo sapiens
gggagggtccgagccagccgctgttttgccggaggagcccctcaggccatcactttgggaagcagtgacatccaacctgtatcaagtcttctaatctgtga

SEQ ID NO: 800553 - DNA, 100 bp, Homo sapiens
aagaaagacttgatggtctggtagaaacaccaacaggatacattgaaaggaaggcgcaatggcgaggaagttatctgtaatcttgatcctgacctttgcc

SEQ ID NO: 800554 - DNA, 98 bp, Homo sapiens
gcacgagtcattgtttggatctgttgctgatgatcagaaacttatgatgcacgtgacacaagctgacctcaagagctccacgttttggcttcgagcaa

SEQ ID NO: 800555 - DNA, 101 bp, Homo sapiens
gttggtcccatgggcctccttgtggtcctgctcgttggaggctgtgcagcagaaggtgctggatatttggatgatgtcaccctggcaagtgctcgtcctgg

SEQ ID NO: 800556 - DNA, 100 bp, Homo sapiens
tggtcctgcattacggtctctataagaagatgatcgctgaagccgacgtagcttctctgaacagacgcatccagctggttgaggaagagttggatcgtgc

SEQ ID NO: 800557 - DNA, 98 bp, Homo sapiens
agagcggatgaagagcacagaggtcctgcctgagaagacggatgctgtcaacgaagccctggagattctggatgaaattgaagaacataacatcaaaa

SEQ ID NO: 800558 - DNA, 98 bp, Homo sapiens
ttaagaatgtgactttggagccagcctgctaggggctgaattctgactcagccatttactaactgtgtgaccttagtgaagcgtgacattcaggaaaa

SEQ ID NO: 800559 - DNA, 100 bp, Homo sapiens
ccgggcagcgccgccaccatgttcctgggcaccggggagccggccttggacacgaagaagctactatggaggaaactgggccagttttagcttttcagga

SEQ ID NO: 800560 - DNA, 100 bp, Homo sapiens
actgtgattgcttgcagtgtttctttataatacattccatgggaggagccaagaacacggtggtgcgggggctggagaatgtggaggcgctggagggcgg

SEQ ID NO: 800561 - DNA, 100 bp, Homo sapiens
gctgcgaggagccggcgcggtcgcagtctccacggcgcaggcccacggtagcgcagccgctctgaggtgtggccgacgacgatgccctcgctgaggagcg

SEQ ID NO: 800562 - DNA, 100 bp, Homo sapiens
agcatcagccgcctgacggcgccctcggaaaacctcacagcacgggtagctctgaacggattcagctctcaggaatgtataatgtccgtaaaggcaagat

SEQ ID NO: 800563 - DNA, 98 bp, Homo sapiens
taaatacccactatttctccatcgatgaggagctggtctatgaaaaagaagcatatgcaattgggaagaaagagaaacctcccttcttaccagaggag

SEQ ID NO: 800564 - DNA, 100 bp, Homo sapiens
ccgaggtggaggtcattcacgtcccctctcctgcgctagaagaaaggaagacggactcgtatcggtaccccaggacaggagttcatgatcaagtgttgcc

SEQ ID NO: 800565 - DNA, 100 bp, Homo sapiens
atgcgttgcctgaagaaatccaaaagacttacaataacagcactaggagaaaagctgaatgattactggaatgaaatgaaagtgaagaaaaatacagaat

SEQ ID NO: 800566 - DNA, 100 bp, Homo sapiens
gccaagggccaggacttcccgtcacaatttcatttgttgatcccggcaccgccaggaggacagtcagtgacccacaccggcctgcccatcatggcctccc

SEQ ID NO: 800567 - DNA, 100 bp, Homo sapiens
agtcaaagaagatgcctcgaactaaacaaattcatcccagaaatctaagagctgcggggtattgaatttgaggctgctctcagcattactgctcatctca

SEQ ID NO: 800568 - DNA, 100 bp, Homo sapiens
tgcagtacctgctggagaagggagactacaaggacagcagcgactttggggcccgtcaccctcagctggatagaacttatactggcttgcagactcttgg

SEQ ID NO: 800569 - DNA, 100 bp, Homo sapiens
tctgctctggacttgggaggctccgttgcctgctcccggagggagacgcgctgccgaggagaacccagcgggtgtggatgaggtcaccattgtcaacatt

SEQ ID NO: 800570 - DNA, 100 bp, Homo sapiens
acaaaacgattgaacaccagattgcagttcaggaatatgtgtgtcttctgatcaaaatcatttccgaggagaaattgaggaaaccatcactgaaagcttt

SEQ ID NO: 800571 - DNA, 98 bp, Homo sapiens
gggcgctgctggcgtgtctcctcctagtgcttcccgtctcagaggcaaactgcaagaaaattggatgtatattttgaatatgaagaaaaaataatgag

SEQ ID NO: 800572 - DNA, 98 bp, Homo sapiens
gctggccacgcccatcgccgccatcatcatcccgccccttggcctcatctacttcttcgtccagaatggtgagagtatcatggttgaactcgcagctg

SEQ ID NO: 800573 - DNA, 100 bp, Homo sapiens
catgatccggaccctgagactcccctaaaggccagaaagagcccactgcggaagagggcagcccggcaagcccgggccctgagcctggacccttagcggt

SEQ ID NO: 800574 - DNA, 100 bp, Homo sapiens
taatccctgctctgtcactaacaagctgcgtgatcttcggagttttctaaagaagtggatgcccaatcttccctgaaatcatctgttctgagtactggaa

SEQ ID NO: 800575 - DNA, 100 bp, Homo sapiens
ctgacctcatgatccaccggcctcggcctcccaaagtgctgggattataggcgtgagccaccgtgcctggctgaaggtgctgcgacaagagactttggac

SEQ ID NO: 800576 - DNA, 98 bp, Homo sapiens
taatgcacgccagctggtagaaattgcagccagggatattgagaaacttctgagcaacagatctaaagccctggtgggtatgagtattatagaacaat

SEQ ID NO: 800577 - DNA, 100 bp, Homo sapiens
agcatattttcacatgggaaaagccaacctggccctgaagaactacagtgtggaagaaggtagataatgactataatgcccttcgagaaagactcagcac

SEQ ID NO: 800578 - DNA, 100 bp, Homo sapiens
tgggccagcatattcagacacttattcctcagctggtgactccgtgtatacttacttcagtgctgttgctggacaggaagaggatcacctagcccgggta

SEQ ID NO: 800579 - DNA, 100 bp, Homo sapiens
aatttgcacatccttcgaaaagctgccaagttgaaaatggacgagtaatcgcctgctttgattcattgaaagacacttggtggggttcccacacaagctc

SEQ ID NO: 800580 - DNA, 98 bp, Homo sapiens
cgttgtagcagcagcgggagccaggactaaggacaagcaggagctgggagccccagggaactgtctgggacctttgctcatctgtgtcagcaagttga

SEQ ID NO: 800581 - DNA, 100 bp, Homo sapiens
gcacaaggattctcgctgtgacagagacaacaccgagtatgagaaccctgtgattgctgcacagttctcagacaatctgattcggccgttcctcatccac

SEQ ID NO: 800582 - DNA, 120 bp, Homo sapiens
gtaatcaagagcatgcttccccatttcgccatggtgggaaatcgtcaggagcccagaaagctccaggaatcggtttgatgaggcggcactctctattcagaaagaaaaaaatatttataa

SEQ ID NO: 800583 - DNA, 100 bp, Homo sapiens
ttagaggaagttctggagatgaagaagcctgtctagcagtccagaggagatgtctggagctgaagaggggagggagacatcctcaggcattgaagtggag

SEQ ID NO: 800584 - DNA, 100 bp, Homo sapiens
cgagaagagcagagcggagggagccccagacacgcaagaggcggagtccaacctgcgcaaggccaagcagggttacgtgcagcgctgcgaggaccacgac

SEQ ID NO: 800585 - DNA, 100 bp, Homo sapiens
tgataccagagtcttgctccggccgcggccagcggagccctgggctggggcaggagccgccatgaaccagagaatcagtcagagtgctccagtgaaacag

SEQ ID NO: 800586 - DNA, 100 bp, Homo sapiens
agataacaaaagctgctcagagtctcaatgaacttgatggcagaagattttttcatttaatgtctggggtaaaattgcaactttttggaacaaggctttc

SEQ ID NO: 800587 - DNA, 50 bp, Homo sapiens
attctgcagctcatcttctcaaaaacagaccaagatcactccatggatga

SEQ ID NO: 800588 - DNA, 100 bp, Homo sapiens
tggatgaccattattctccagatagagacaggatgatgatgctgaagctatccttgctgcagacttcgaaattggtcactttttacgtgagcgtataatc

SEQ ID NO: 800589 - DNA, 99 bp, Homo sapiens
tctcctggtgaccgagcacccgcctccgggcatcttcaactggtgagaaggactggcagaaatacgagactgctcggcggctgaaaaaatgtgtggaca

SEQ ID NO: 800590 - DNA, 148 bp, Homo sapiens
tgtttggattgtgagctatttcagaactgttctcaggactcattattttaacatttgggagaaacacagccagaagagttcttgaagccagcatagcagagaataaagcatgtttgaagaggacacctacagaagtttggagggattc

SEQ ID NO: 800591 - DNA, 100 bp, Homo sapiens
tgctcctccaaagccagagcccaagcctaaaaaggcccctgcaaagcaaatatttccatggttcaagctgcttcagcaggacccccatctctgagaaaag

SEQ ID NO: 800592 - DNA, 98 bp, Homo sapiens
caagatccttaagttcgtcgtcttcatcgtcgcggttctgctgccggacaccatatctcagaagacggtagagattgcatctcctgcaaatatggaca

SEQ ID NO: 800593 - DNA, 98 bp, Homo sapiens
ccagcatcagaaatatgtgctggagagggaagagaaagtctttatttacagcttcatggagacctggtcagatccagctccaggtcccacaggggctc

SEQ ID NO: 800594 - DNA, 99 bp, Homo sapiens
caggatgaaggcagagcgtgtggcatctccacctcaaggttcaaccttcacttgactggagacatccacgccatcaccgctgccaataacttgctggct

SEQ ID NO: 800595 - DNA, 100 bp, Homo sapiens
ggatggcttgaggacttcttgatgggcatggacagcaccctggagccaagtgcaggagagctctgagctcttcaccctgacctatggtgccctggtcacc

SEQ ID NO: 800596 - DNA, 98 bp, Homo sapiens
atatacttttgaaggtgcaagatactatataaattttcggctttgtgagaaaccttaccatcaaacacgatggccagcaacgttaccaacaagacaga

SEQ ID NO: 800597 - DNA, 100 bp, Homo sapiens
cctcccggtaccccggctggagggcgtttctcgggagcagttcatgcagcacctctacccacaggtattgcacatctattacaaatttcctggttatggg

SEQ ID NO: 800598 - DNA, 100 bp, Homo sapiens
ggcgccgcgccctcggcctgcacggtaatctatgccagcaattatgacaatgttagcagaccatgcagctcgtcagctgcttgatttcagccaaaaactg

SEQ ID NO: 800599 - DNA, 100 bp, Homo sapiens
aaggtgctaatccagtggaaatcaggagagggagaaaactggttgtcctggatgtttgaaaagttggtcgttgtcatggtgtgttacttcatcctatcta

SEQ ID NO: 800600 - DNA, 100 bp, Homo sapiens
gagacctctggacgctgcacagagggacctttaccgggatgttatgcaggagaattatggaaatgttgtctcactagcaaaatgatgcttcaacacccag

SEQ ID NO: 800601 - DNA, 99 bp, Homo sapiens
ttcctcacggaccttggtcacggccgcaggtgaccccttagcccagctccagtgggcgggtggcaggtttgatctgtggatgaaatgaatcatgatttt

SEQ ID NO: 800602 - DNA, 76 bp, Homo sapiens
agacatatggaccacatgttcctgagcttgagatgctaggaagacttgggctttcttggctacacaagtagtttat

SEQ ID NO: 800603 - DNA, 100 bp, Homo sapiens
catgtaacaaggatctccagtccacaagttgaagagggcgatagtcgttttcttgcaaatgaagttttacaggaggttcaaaccttgtactactcagctg

SEQ ID NO: 800604 - DNA, 100 bp, Homo sapiens
cttattaaacaagaatttagaggagaaactgacggctatcaagtactagctccaactgcctattatgatcagactggtgccttagtggttggccctggag

SEQ ID NO: 800605 - DNA, 100 bp, Homo sapiens
ctgcacttcttttttgagaaaggaaggaatatatcctgactgattggccctccagaatttccacagcatacacctggacctgttcccaacagtttcagcc

SEQ ID NO: 800606 - DNA, 100 bp, Homo sapiens
atcatcagaaactagaaagagaagctagaatctgccgtcttttgaagcaccctaatattggatgatgtctataaactaagcactgacagctcacagcact

SEQ ID NO: 800607 - DNA, 100 bp, Homo sapiens
ctgggagaatatttaatggaaaatcgcttggttaaaacctgacacttttaacagaagtctggtggagagactctgtggacgtaaagaagggaatgaacac

SEQ ID NO: 800608 - DNA, 98 bp, Homo sapiens
ctggatgagacatttgctacagcatcccacattaagtcaacggtttttgtctgatgaaaatagtctggagtataaatattacaagctgaagttggcag

SEQ ID NO: 800609 - DNA, 98 bp, Homo sapiens
tacaaatcacacgcataatggatgaaaggaaccgacagcagtcccaggaacaaatctgaaaatccaatggtgcagctgttctatggtactttcctgac

SEQ ID NO: 800610 - DNA, 101 bp, Homo sapiens
ggagaactacaagaatctcattatactaggatggtgccatgacaatggtgtgaactacaagattggagagaagtgggaccgtcagggagaaaatggccaga

SEQ ID NO: 800611 - DNA, 98 bp, Homo sapiens
ttgctgttcatgagtggaatccatgtttctggacgcggatttttggcctcatactctgttatagataaacaaggctttgatgcggcctggaagaattg

SEQ ID NO: 800612 - DNA, 100 bp, Homo sapiens
ccaggagcaagaccaagaccgcaggaaggactggggccacgtggagctgctggaggagctagagccggtgcaggccacgcagaacaagacagggaagtat

SEQ ID NO: 800613 - DNA, 99 bp, Homo sapiens
ctagaagtagttacttggaaagtccaagaggcccaagcaaagttaaacctcctccacaaatttcacccagcaaatcgatgggcggagaattttgtgtgg

SEQ ID NO: 800614 - DNA, 99 bp, Homo sapiens
tagaattcaccttatgccatccatgaatcctgatgggtatgaaaagtcccaggaagatctcaggaaacaggctcgacagctggaaaatgaacttgacct

SEQ ID NO: 800615 - DNA, 100 bp, Homo sapiens
tctcagatgttgttgatgaagtaatacagaactgccccatcgatgtgcggcgtccgctgtataagggaactgctgttttctggtataatctgtttgccag

SEQ ID NO: 800616 - DNA, 99 bp, Homo sapiens
tgaaggacagaaatggaaagacgccccttatggagtacaagcgcaagctagccagagtttccctggtgcgcaaagaactcaggtcccggatccagagcc

SEQ ID NO: 800617 - DNA, 98 bp, Homo sapiens
taaggaagaaactgaataaaaaatatccaaagctttctcgaagtagctacagcaagctgggtagcaggcagatccaaaggatatcatgaagtttccag

SEQ ID NO: 800618 - DNA, 100 bp, Homo sapiens
tttgggccaaattgctttcaggtgaagcagaaagagactgtgataacaagaaaatcagactggagaaggaaatcaaatcacagtcatcttcatcttcatc

SEQ ID NO: 800619 - DNA, 100 bp, Homo sapiens
ttggcttctcccagcatagccccagcggacggaatagacctcagcagcggcgtggtgaggacttagctgggacctggaatcgtatcctcctgtgtttttt

SEQ ID NO: 800620 - DNA, 100 bp, Homo sapiens
gaacttcgaaacgtgataagaagcacctggatgagacatttgctacagcatcccacattaagtcaacggtgtgactgaagaaatatcaaatgtttcctag

SEQ ID NO: 800621 - DNA, 98 bp, Homo sapiens
ttttcctctgattgaagccaagaaaaaggatcaagtgactgctcaggaaattttccaagacaagtctcatcatccatgaaggaccctcggtgtaccgc

SEQ ID NO: 800622 - DNA, 98 bp, Homo sapiens
tgtctatggtgaagtcttttgtacagtggttagctgctggaaacgcgttctgccaggctgcacagctgcacctgcagctccagagcaagcacgacgca

SEQ ID NO: 800623 - DNA, 100 bp, Homo sapiens
ttcctcctccatcttcttgaggttggctttctgccagatctccgggcggctgcttctttagatacgagaaccatggagtctggcagtaccgccgccagtg

SEQ ID NO: 800624 - DNA, 99 bp, Homo sapiens
aaaatttggacattgaccccaaactgcaagaatacctcggcaaattccgacgtcttgaagacttccgagtagataaaattgtacaagctggagataagg

SEQ ID NO: 800625 - DNA, 99 bp, Homo sapiens
ttaacagacaagacacttttcagaaagacagatatgtcttctccgactactatgaagaagcctgaaaagccattgttcagctctgcatctccacaggat

SEQ ID NO: 800626 - DNA, 100 bp, Homo sapiens
tacaattgtcccactgagcatgcagacctgcagggaagaactgcacttcacgatgccggtttctgccacctctttctgccagatgaacagtttcctgaag

SEQ ID NO: 800627 - DNA, 50 bp, Homo sapiens
ggcctacattgggagtggggcgacctgcggtgggagcaaggaaaaggagg

SEQ ID NO: 800628 - DNA, 100 bp, Homo sapiens
ccccctgagcccgaggtgctgacgtcgcaaaaaaattggataagtaattccctcctggtcccagacagtctaagaggcacagataaacgcagaaatggac

SEQ ID NO: 800629 - DNA, 51 bp, Homo sapiens
cacccccgccgcccccgacgtttgcactggaaaaactggtctacttcctgg

SEQ ID NO: 800630 - DNA, 100 bp, Homo sapiens
taggagccgctggctgcggcagcaggggactagcgtgagagatggggacattggttttggacctttacaacagaggatgtctgaagaagtttctttccag

SEQ ID NO: 800631 - DNA, 100 bp, Homo sapiens
tgatcgcggactatgagagcggacgggccatacccaataaccaggtgcttggcaaaatcgagcgggccattggaattacatgaacgacagccttcgcacc

SEQ ID NO: 800632 - DNA, 100 bp, Homo sapiens
gaggagttctgcgtctcggggtggtgactgggtccagaatggcttcggattcggggaaccaggggaccctctgcacgtcctcctgtcaggcgccagagag

SEQ ID NO: 800633 - DNA, 100 bp, Homo sapiens
ttacaactcggactcttgacaaggcaacagttctgggtgaatatgctttacccaaaggagtaattctgttccacaggatatctgctgtatggcagctgat

SEQ ID NO: 800634 - DNA, 100 bp, Homo sapiens
caccactagaaagatggcggagcaagaagttgtggaaagtaaaaatgtagccctaccaaaaggaactattgtactggcttctccaggctggacaacgcac

SEQ ID NO: 800635 - DNA, 99 bp, Homo sapiens
gaagatgcattttctaagctgaaggagaagtttatgaatgagttgcataaaattccatgtgaatcaggtctaggaaaatcgactctcataaacagccta

SEQ ID NO: 800636 - DNA, 100 bp, Homo sapiens
gagtattttcttctgtttttcagatgaagaaactgaggttcagagaggttaagagactccactgaggtcacacagccgggaattcggcaccggttgagag

SEQ ID NO: 800637 - DNA, 98 bp, Homo sapiens
ggggttcctcgcccagagcgtcttggcggtatcattgcccagtgcctaagatcttttatgttcagctcactgtaggaaataatgaattttttggggaa

SEQ ID NO: 800638 - DNA, 98 bp, Homo sapiens
gaccactaccccctgcacctcctagtctggaaaaacgactaccggcagctcgagaaggagctgcagggccaggctctacagattctcccctgcccctg

SEQ ID NO: 800639 - DNA, 98 bp, Homo sapiens
cagctcaatgagaaaatctccctgctccgcagcgacatcaccaagctggaggtggacgccatcgtcaacgccgttaccaccaccctgtgaatctgcct

SEQ ID NO: 800640 - DNA, 100 bp, Homo sapiens
ctttgaaggtcccttgtggggactggaaagaggacggtatcgagaaccttccctgcgaacttcagaggaacttccagctgatgcgagagctggaccagag

SEQ ID NO: 800641 - DNA, 99 bp, Homo sapiens
aggtggagcaaaacacaccaagcctggtgccaatcattgacaatattatgtgacaaatggcctacagctgtgagagcaaatggacatctcctcctgaac

SEQ ID NO: 800642 - DNA, 100 bp, Homo sapiens
taataccatccgagactataaggatgaacagggcagacttctctgtgagctcttcattagggcaccaaagcgaagtcctgagaaacatctttgtcctcac

SEQ ID NO: 800643 - DNA, 98 bp, Homo sapiens
gcgcgttgctgcggccgtggtccgcgcccttcctcggcgggccggactggaggaggcaaaacagattcagaatctgcagaaagcaggcactcgtacag

SEQ ID NO: 800644 - DNA, 98 bp, Homo sapiens
atgatgcagatgtacagacacaagcgggccaacaaataggaggtgtatgtggggaaggagacaatgtgcactgtggatggtcttcacttcaacagcac

SEQ ID NO: 800645 - DNA, 51 bp, Homo sapiens
cgagaaaccgcagcactacacatgatgattattccccaccttctaagagac

SEQ ID NO: 800646 - DNA, 100 bp, Homo sapiens
tggacatgcccaatgttagagagatggcacgccccgcatcgtctcgtccttcagcgagaaggtggtcaaccccggggagcagttctcactgatgtgtgcg

SEQ ID NO: 800647 - DNA, 100 bp, Homo sapiens
cctggcaacggcggtggcgcccggagcccgaggcaccttggaagttgttttcaaccatatccagcctttgccgaatacatcctatctgccacacatccag

SEQ ID NO: 800648 - DNA, 100 bp, Homo sapiens
cggggagacgctgtggtgtgactggggcaggaccatcagatatacatcaggggatgtgagagtgtgggacacccgcacctgggactacgtagcccccttc

SEQ ID NO: 800649 - DNA, 98 bp, Homo sapiens
accaagcactctagatgccctcaactatgctctccgctgtgtccacagcgttcaagtacgtagagaaatcgacactcttaatgaacgtttagctgctg

SEQ ID NO: 800650 - DNA, 100 bp, Homo sapiens
ccgcaatcaaccaaggttcccagcctttttgaacgacctgcagcaataccattgacctgccgatgtccccccgcactttagattcattgatgcagtttgg

SEQ ID NO: 800651 - DNA, 98 bp, Homo sapiens
ggaaaaagcagaagctgatgctgcagcctggcatcctcgctacaacctcattgttgtgggccgatacccagatcctaatttcaaaagttgtacccctt

SEQ ID NO: 800652 - DNA, 100 bp, Homo sapiens
gagaaaatgaaggaacaattaaaattattgcaccttcaccagtaaaaagatgcttgtttgctactgatgggtgtgagcaagttagatattctataccgga

SEQ ID NO: 800653 - DNA, 98 bp, Homo sapiens
gagctttcttcagagacctcaggaagaaatgttggctatttggcgatgagaggtggtgaacagtgaccatactggtatacaacactatgggacctggc

SEQ ID NO: 800654 - DNA, 120 bp, Homo sapiens
tggaaatgggcgtgagaatgtggggatttataacctctccaaaggagtcaaccgattctgcctgtccaagcctgtttcattgtactgacaacctcagctggcatcatggaccatgaagaa

SEQ ID NO: 800655 - DNA, 100 bp, Homo sapiens
tgcattttccagttggtgagcactgagagtaatcgctatagtctcgatcatatttcttcactgttcacttctcaggccgaagaacagttgagaattgttg

SEQ ID NO: 800656 - DNA, 99 bp, Homo sapiens
tttcattgaactgtccagcccagacatccaggcctctcagaaatttcttaggaaatttgttggggtggaaatggatattgttgaaaaactggtgaaaat

SEQ ID NO: 800657 - DNA, 100 bp, Homo sapiens
agagagaatgagccagagggacacgctggtgcatctgtttgccggagggtacttaaagctttcaccaaaacacccagaatcaaatactgctggaatggac

SEQ ID NO: 800658 - DNA, 100 bp, Homo sapiens
tccagccggcaccgaggcccccgcagtaatacatctgtgcaggttccatcaccagcaaatggcgtgattgaagctcttttggtacctgatgggggaaaag

SEQ ID NO: 800659 - DNA, 100 bp, Homo sapiens
tcaactacagatactttgaagtagaagaagctgatgatcattcccagtgaccccttctgggtgccaactactgaggaggaatacttgcactttggggaga

SEQ ID NO: 800660 - DNA, 100 bp, Homo sapiens
aacagagcagcagctacgggcagcagagtgtcagttgtacccgaggcgttctcagcagcagcaagtacctgtggtggatttccaggctgaactgaggcag

SEQ ID NO: 800661 - DNA, 100 bp, Homo sapiens
aatgagcagaaaggagttggggcttgatgaaggcgtggatagcctgaaggcagccattcaggtggaggagttactgatggccatggagaaggtaaagcag

SEQ ID NO: 800662 - DNA, 99 bp, Homo sapiens
ctcggtgtctgcagcaccctccgcttcctctcctaggcgacgagacccagtggctaggcctgtcatctttacttcagagtgttactgggaacccagttc

SEQ ID NO: 800663 - DNA, 100 bp, Homo sapiens
tatgagcattctccagggaaaggatgacatatttttggacctgaaacagaaattctggaacacctatatgagacagaatacagtctgcattagaagagga

SEQ ID NO: 800664 - DNA, 71 bp, Homo sapiens
tctggaaactcaatattacttgcgagtcctcaaagaacactcctatgccaccttcaccagctgtacaagtg

SEQ ID NO: 800665 - DNA, 100 bp, Homo sapiens
gcgaggagtcagaaactcagccactggttgccttggtaggcaataaaagctctagaccaagatagaacagcccttcagaaagtgaagaagtctgtaaaag

SEQ ID NO: 800666 - DNA, 98 bp, Homo sapiens
agggcctctgaactttctccggggcgcagcgtgacggctggcatcatcattgttggagatgagatccttaaggaagtacttctgtttcctgccatgaa

SEQ ID NO: 800667 - DNA, 100 bp, Homo sapiens
aaagaatcttgtcactttagccactgctactacaggtttttagaacttcagccataaaaatgggcagaattttccttgatcatatcggtggtacccgtct

SEQ ID NO: 800668 - DNA, 100 bp, Homo sapiens
cagtagtctgggggtgctgacgggaggaggggccagagttttcaaagacgattaaccgaggctcacgtcgcggaggaacttcatgcccacttgaatggat

SEQ ID NO: 800669 - DNA, 99 bp, Homo sapiens
tcttgaacagcagtcaaaatggagctgatgaccaaagggatcaatgtgaccacagcagtatcagaggtcagtgttcccccaaaagggacttctgccgca

SEQ ID NO: 800670 - DNA, 99 bp, Homo sapiens
agtaccgcctccttcccagccgcgcggcttcctccagacctctcggcgcggttacagctcttttgaggaagcttaagcagcaatccagggaaagtgttg

SEQ ID NO: 800671 - DNA, 98 bp, Homo sapiens
aattgggtagtggacacttgtttacacaagacattaggtatgcatcagttaacttttgcccatagaactcgagctcttcagtgtctcttctatttggc

SEQ ID NO: 800672 - DNA, 100 bp, Homo sapiens
cggccccggcgaggaggcgcggaaccatggccgatgggggcgagggcgaagacgagatccagttcctgcgaactgcaccaattgacaacggttcaaaaat

SEQ ID NO: 800673 - DNA, 100 bp, Homo sapiens
attcaaggggatggagtagatattaataccttacaagaggaatagaaggacagtctgtggaagtttccaatattgtggacatccgaaaagtatataaccg

SEQ ID NO: 800674 - DNA, 98 bp, Homo sapiens
aacttctttactggaagattcgtcagtgacttttcctgtggtaataataggagcagcatttctttctattactactatctatgctgagactggttcag

SEQ ID NO: 800675 - DNA, 100 bp, Homo sapiens
cggaaagtggaaattacaacagagactattaaattgcaacaggattcagaaatcatggaaagcagattcttacaaccagtacagaaaatagacatgaatc

SEQ ID NO: 800676 - DNA, 99 bp, Homo sapiens
tggcaaccagaacctcttgttcctcctgtcccaaaagaccatcctgctctcaactacaacatcgtttcaggccttaccaataattctaggatcgtagga

SEQ ID NO: 800677 - DNA, 100 bp, Homo sapiens
cagcgtcaccgtggggggcaagcagtacctcctaggactctatgacacggccggacagaagctcattcacacagaagacccatttaatgatgaacatcag

SEQ ID NO: 800678 - DNA, 100 bp, Homo sapiens
tctatcaaacagcaagcactgacaagcagcacattctcaagagcacacaggtatctcagatgaagacatcatcaacattactcttcctactggagtcccc

SEQ ID NO: 800679 - DNA, 98 bp, Homo sapiens
acttcgtggactaccatttggttgcagcaaagaggaaatagttcagttctttcaaggtacccaagatattgtatttggagaagtagatcggtgagcag

SEQ ID NO: 800680 - DNA, 99 bp, Homo sapiens
acttcacaagctaatggatggttccttgcaaagggcacgtatagcattggtaaagaacgatcgtccagtggaggtcataaaattgctgttatgtatgtg

SEQ ID NO: 800681 - DNA, 98 bp, Homo sapiens
aatgccaattcaggaagaacgttttgtcacttatgttggatgtgcctttgctctgaagttccagaaagctgagtctgatctggattacattcaataca

SEQ ID NO: 800682 - DNA, 100 bp, Homo sapiens
aaaccacagatcctcatgatggtttggagagaagatggcttttatccctcagaacctgtttttgttccagcaccaggaaccaatgaagaagatggtgggg

SEQ ID NO: 800683 - DNA, 99 bp, Homo sapiens
gggttcctccaagatggcggcgcagaggaggagcttgctgcagagtgtcaaaatgcagatcttcgtgaaaacccttaccggcaagaccatcacccttga

SEQ ID NO: 800684 - DNA, 98 bp, Homo sapiens
ttggaaagagcaagatcggcagccctaaaattttacatcctgaagtccaaactctagatctacggagctgcgatatatcagatgctgctctcctgcac

SEQ ID NO: 800685 - DNA, 100 bp, Homo sapiens
ggagacggcggagaaggagtgcggcgccctgggcgggctcttccaggccatagtcaacgacatgaagttgccattacccagggaggagcaatacagctgg

SEQ ID NO: 800686 - DNA, 99 bp, Homo sapiens
ccgtagccgcctccgagcccgccgccacatcctctgagagttgtctgctggttctcagcttgaagaagattctgcagtccttattgatcctttttcttg

SEQ ID NO: 800687 - DNA, 101 bp, Homo sapiens
ctcaaggatgcccggtccccatcaccggcacacattgtcgcaacagcattattgagaaaagcccttacagaagagtgtggccgtaggtcagctattcacag

SEQ ID NO: 800688 - DNA, 98 bp, Homo sapiens
cagccgaccttgagctccaggagttcgtctcttacgtctgcggaagtgcagctgcctcagttcttagcgcaggcaactttagcgagtatagatgctga

SEQ ID NO: 800689 - DNA, 100 bp, Homo sapiens
ctctccaagttggaacgaggagaagaaccatggacaatggaagatgaaaggcacagtcgaatctgtccagagccgtcctggggaggtgtgctctgctctc

SEQ ID NO: 800690 - DNA, 100 bp, Homo sapiens
agagacaatgtcatgtgattcagcctaatatctcatagccggatcgagctgggagatgtgacaccacacaatattaaacagttgaaaagattgaatcagg

SEQ ID NO: 800691 - DNA, 98 bp, Homo sapiens
ctcccgagtagctggtattacagggtactgccagggggatggttaccgcatcggctttggccagtgtgctggaaaagtgctgcctgctctcctgccat

SEQ ID NO: 800692 - DNA, 50 bp, Homo sapiens
gttttattgccacagatgacattactgtgcttcagcgaagagtcctgcgt

SEQ ID NO: 800693 - DNA, 98 bp, Homo sapiens
gaaattttatcttttgaaacacgttctgattaaccaaggggaattgacataggggatagcttaactattccagatgaattcacggaagacgaaaaaaa

SEQ ID NO: 800694 - DNA, 100 bp, Homo sapiens
cgggtccagctctggaaggacctaaaggcaaccctgggccccaaggtcctcctgggagaccagttatttctcaaactctgaggctgcggagttcacacat

SEQ ID NO: 800695 - DNA, 119 bp, Homo sapiens
caagcttccaggtgtcccagaaacccaggaaatcgagactcatgactcccagagaggatggcatctagaagatttatcagcaagactgttgaacgcataactgcccaagatgcctgtcc

SEQ ID NO: 800696 - DNA, 100 bp, Homo sapiens
agaaagaacatgcaactcacagctggatctaaattgagagaaatggagtcaaagctattcaagatctctggcagtggaggaagtctctttaagaaaatag

SEQ ID NO: 800697 - DNA, 100 bp, Homo sapiens
agagatgttatcatgagggaattccggtcagggtcaagtcgtgttctgatcactactgacttgttgcaaaatgatgcttcaacacccaggccaggtctct

SEQ ID NO: 800698 - DNA, 100 bp, Homo sapiens
tgaaggacacacagtccccaagtacctgctctgaggttttaaaatcaaagatgggaaaatcggagaaaattgcccttccccatggccagcttgttcatgg

SEQ ID NO: 800699 - DNA, 100 bp, Homo sapiens
ggaagcagctcttgccaaaaacctttggacagtccaatgtcaacattgcccagcaagtgacgtttgatgcaaatgatttgtatcaggggcagaattttaa

SEQ ID NO: 800700 - DNA, 100 bp, Homo sapiens
ggtagccatgatgccccacttggtgaatggagatgcagctcagcaggtattgggagagttgctgctacatctttaggaaatttgactaaccatggttctg

SEQ ID NO: 800701 - DNA, 100 bp, Homo sapiens
ttcttggacagagtggcgctcatccttgttcctgcaatgaaggacatgccagcctccaggctctttgacaggttcacctttccttgccagtgaagatggc

SEQ ID NO: 800702 - DNA, 100 bp, Homo sapiens
ctacaatttggatacagataccatctcaaagggtaatcttccagatggctctgagagattcctctgcgaatctgtttttagctatcaagtggcatccacg

SEQ ID NO: 800703 - DNA, 99 bp, Homo sapiens
gaaatcccctcgcttatcctgtgggggccgccgggctgcggcaagatctacacagactgggccaatcattacctagccaaatccggccacaagcgtctc

SEQ ID NO: 800704 - DNA, 105 bp, Homo sapiens
caaacaaagaaaacatccggcaagacttctgaaaagacaatttagcaggtccagcccagaatcaaatgcaggttccatctggatatggattgcatcatcaaaact

SEQ ID NO: 800705 - DNA, 99 bp, Homo sapiens
tgaagttgttcattgtttgtcaccacaaaaaggacaggtgaaaaggtgtttgtatctctctatggagctgccatagacatgaatataaggctggataag

SEQ ID NO: 800706 - DNA, 100 bp, Homo sapiens
agctgcctcagttcttagcgcagagtccctgtgaagcaggaagagtgagggcaggttcactgcagctcagcagcatgtctgcagggaattcatctttgag

SEQ ID NO: 800707 - DNA, 100 bp, Homo sapiens
aaacgtaatgaggatgaagattcaccaaataagctatatactttggttacctatgtacctgttaccactttcaaaaggttttggccaaattgggcgaggg

SEQ ID NO: 800708 - DNA, 98 bp, Homo sapiens
cggatagctccctcctggaaaaggcctcattgctacgatttcagagtaccctggtaatagctgagcatgcaaatgattccctagcacccattacttta

SEQ ID NO: 800709 - DNA, 100 bp, Homo sapiens
ataatgatctcatgcagtatcctgtcttcccctggatccttgcagattatgactcagagtacgtagagaaatcgacactcttaatgaacgtttagctgct

SEQ ID NO: 800710 - DNA, 100 bp, Homo sapiens
gaggattttgaggacacttgtggagagctcgaattccagaatgatgaaattgtgactctgcagacagtgggcccatcccatgcccgaacctacactgtgg

SEQ ID NO: 800711 - DNA, 100 bp, Homo sapiens
aagaatggcggaacatgctttgacagtttggatggcgccgtttgtcagtgtgattcgggttttaggggagaaaggaaagctgtgtgaagagacaaaggga

SEQ ID NO: 800712 - DNA, 99 bp, Homo sapiens
gacgagcgggccagggagatcctgaggggcttcaaacttaaatcttgctactgctcactctttgggtgcacgctgcttttaagagctgtaacactcacc

SEQ ID NO: 800713 - DNA, 100 bp, Homo sapiens
agtggatatccaaccctgaagatatttagagatggtgaagaagcaggtgcttatgatggacctaggactgctggctaaagaacgtgccaatggaatggag

SEQ ID NO: 800714 - DNA, 100 bp, Homo sapiens
aaagatgcccaggagaagctggagctggcagagaaaaaggccaccgatgtcagaatggcggcagcggagcatcgtcattcttcaggattgccctgctggc

SEQ ID NO: 800715 - DNA, 100 bp, Homo sapiens
aggccagtcgtccacatcagtggcagacagatgaagaaggcgttcgcaccggaaaatgtagcttcccggttaaggcatagaatgtcaagctaaccaggcg

SEQ ID NO: 800716 - DNA, 98 bp, Homo sapiens
ctgggacaatgagaacagctctgcgcggctttttgagcggtcccgcatcaaggctctggcagcttgcctgggaccagtggcagggaccccggaacctg

SEQ ID NO: 800717 - DNA, 100 bp, Homo sapiens
aattggcaagacatatccttacaggcagagagatttatcagcgatgctggttagtattcaagaaagcttcaagcaaaggtccaaaaagactggagaaatt

SEQ ID NO: 800718 - DNA, 99 bp, Homo sapiens
gagagcctctaggtgtaaggaaggtgatgtcgtaaagccgggagtgtcgtaaaccagaatcattgatcagcgattcgagaaggtttcctactttgtatt

SEQ ID NO: 800719 - DNA, 144 bp, Homo sapiens
tgtgccagacgttcctgtaaaagaggacaccaacagtgtggtggagaaagcaatggatgaaatcaaatcccaagggatgaggcagatgctctctacgaagctctgaagaagcttagaacatatgcagctattgaggacgaatat

SEQ ID NO: 800720 - DNA, 100 bp, Homo sapiens
cgctggaaaaactgaaggaggccaaggttaagaaggtgggaatgatggttagatgctgccgaacatacgaagaagtgtgcgaaggtgatgtgatgttggc

SEQ ID NO: 800721 - DNA, 100 bp, Homo sapiens
catgactggaaccagaacagaggaaactctgatgaggaagaaagtgcttcagaatctgaactttggaagggtccactaccagagacagatgaaaaatcac

SEQ ID NO: 800722 - DNA, 100 bp, Homo sapiens
aaagtcagcatgagcaaaaactccaaactcctctccaccagcgccaagagttgaaatggatgcagtcagaactgaatgttgaagaagtggtaaatgacag

SEQ ID NO: 800723 - DNA, 100 bp, Homo sapiens
cgaggagccgctggtgtcgtccatcacccgctcctcggagccggtgcagcacgaggaggccttcactatcatggaccagaacagggatggcttcattgac

SEQ ID NO: 800724 - DNA, 100 bp, Homo sapiens
agaattgatgaattgcaagtttgtgccccatagctgcacagagccctaatttgtttagaactgtaatatgcacagttaaaacaacttgtcctctcaggac

SEQ ID NO: 800725 - DNA, 100 bp, Homo sapiens
caactccgctgcctttgccgccaccatgcccaaaacgacactcttgcactcctgtaatgagcctggcactgtgatgaaacacttttcccgtgtcgtttga

SEQ ID NO: 800726 - DNA, 100 bp, Homo sapiens
cgctctgggcacagccttggaaagtcaggaccgcgacggcagcagagcagctgctcttggaattgcaaatcttatagttatgtctatggtagaaaatggc

SEQ ID NO: 800727 - DNA, 100 bp, Homo sapiens
gcagcagcagcggcagtcacaggcacatcagcaaagaggtggataggcatgtagacctgctagaagttgcccaggaaactgatgggttttcaggaagtga

SEQ ID NO: 800728 - DNA, 99 bp, Homo sapiens
ggcaccgaggaccagctcaatgacagctcagtgtggaggctgctggccctgccatctgtaagaagatgtcatacggatccatcgcccgtggaggtggcc

SEQ ID NO: 800729 - DNA, 98 bp, Homo sapiens
agcaagtcccatcggaggacctccctgccctgtataccgagggaacaggatggagctatgacattgaagagaggaaggttccaaaacccaagtccaag

SEQ ID NO: 800730 - DNA, 100 bp, Homo sapiens
gggccgctcctggaggaggaggtgggagtgcacttacatttcaatcgaccaagttccaaggacctatgccataatgataagcagacccgcctggctctgg

SEQ ID NO: 800731 - DNA, 146 bp, Homo sapiens
tgggatgcttttggattgcctgctgaaaatgccgcagtcgagaggaatctacatccacaaagttggacacaaaggtattagaaaactactcggatgctccaatgacaccaaaacagattctgcaggtcatagaggcagaaggacta

SEQ ID NO: 800732 - DNA, 98 bp, Homo sapiens
gccagcaataattatcacaattactgatgggagcaagttgactaccaccagtggagtccaggatgagtttccctgaaacctgggctcttgaagacgca

SEQ ID NO: 800733 - DNA, 100 bp, Homo sapiens
cctttcctcaggagtcatttctgttccgcacaggcctgctgaactgggtgctttatatagggaattgccacaagcagtctgtgagatccttgggcttcaa

SEQ ID NO: 800734 - DNA, 99 bp, Homo sapiens
acgattctccctctcctagaggcgatgtgttcagagcaacattgttttgttgacacaagcatttagaagaaagtttgtgattcctgactttatgtcttt

SEQ ID NO: 800735 - DNA, 100 bp, Homo sapiens
gccggttttgagaggggaagatggggacaaagccgctccacctcccatgtcggcacaggcatggattccgtgaaggaacaacacctaaacccaagagggc

SEQ ID NO: 800736 - DNA, 101 bp, Homo sapiens
gaaagaggccaagggtggatttaacccagcattgagaactgatgtgccttcacaggaaacttggcccgtgtgtttccaggattcttgatgtttcttctgag

SEQ ID NO: 800737 - DNA, 100 bp, Homo sapiens
tcggagcatcggttaacagcctatgggtgaaatttggctttcattcatgaatgagctccaagccctcagtgagcctcagcccaggctgcaggcagcaggc

SEQ ID NO: 800738 - DNA, 100 bp, Homo sapiens
ttgaaagacattttcgaaaaactggacagagtgtatacatgcacctgaaaagacatgtgcgagaggaagaggagcaggacttggatggtgagaaggggcc

SEQ ID NO: 800739 - DNA, 100 bp, Homo sapiens
cgctgtcaccagcccggccccaggggtgccctgggctccgcggtctgccatcatggatgttctcgcagaagcaaatggcacctttgccttaaaccttttg

SEQ ID NO: 800740 - DNA, 100 bp, Homo sapiens
aggagatccgcaggagcagccagagctggtcgctggcggccgacgcgggcgtcgttcatgcccaacttggtgcctcccaagatccccgatggagagagag

SEQ ID NO: 800741 - DNA, 98 bp, Homo sapiens
ccggcgcttcggcccgggccgctcaggtgcaggttgaaatgggcatgaagaaccatgaaattgttcccggcagtttgattgcttctatagccagcctt

SEQ ID NO: 800742 - DNA, 98 bp, Homo sapiens
tttcagcaagcctatatcacatgtttatgttctatgctccctaatgaagatgctattaaggaggtcatactactagatattacactggaacttcagaa

SEQ ID NO: 800743 - DNA, 100 bp, Homo sapiens
gaatcactgaaaatacttctcagtaccagggcgtggtggtgtactccatggcagacatccctttgtgagaaagatcagtctaaagaaaaggagaagaaag

SEQ ID NO: 800744 - DNA, 100 bp, Homo sapiens
tgttgaagagtgaacttggatcattcattacagactattttcaggcatcaagcatgatggaaccatgtgtgatacctgccgccagcaaccaatcattggc

SEQ ID NO: 800745 - DNA, 100 bp, Homo sapiens
cgggaagtcactcataagcgcgctcaagacctcagaatattctgttgacaagtgaatctccattgggtgacattaagattgttgattttggcctttcaag

SEQ ID NO: 800746 - DNA, 98 bp, Homo sapiens
tgatgaagatgctgttctgatggatggaatgactgaatctgatacagcttcagttaatgaaaatgggctagaagaagaagatggagtgtgggagaatg

SEQ ID NO: 800747 - DNA, 100 bp, Homo sapiens
cgtccacacgaaaccagatttgcctgaaaatggctcggccaagttcaaattggagcctccctctttgctagtaacattggaagtggccactttgtggggc

SEQ ID NO: 800748 - DNA, 100 bp, Homo sapiens
tgtaaacttcatggttcggctttttgtggtgattgtgatgtttgcctggtctatagttggaggcaagtgaggcctatctggttggcctttttgaagacac

SEQ ID NO: 800749 - DNA, 100 bp, Homo sapiens
gccgcagttctagcttcaccttcacgatgtttcccttggtcaaaagcgcactaaatcgtctccaaggaactcttgaccctagttccccatacactatggt

SEQ ID NO: 800750 - DNA, 100 bp, Homo sapiens
gaaccatggccgatgggggcgagggcgaagacgagatccagttcctgcgaactataaggatgacattcggctgctgccgtcagcattgggtgtgaagaag

SEQ ID NO: 800751 - DNA, 100 bp, Homo sapiens
tgacagatttttttgtattgtggaaggcctccggcacaattcagttcaactgcaagctgaccggttccctgatgtgttacctgcttctgctactgatcca

SEQ ID NO: 800752 - DNA, 100 bp, Homo sapiens
accatctacaagagccaaatcaagattgcgtttctcaaagtcctacaggacactgaagccatgaagagagcattggcctccatagactccaaactgaacc

SEQ ID NO: 800753 - DNA, 100 bp, Homo sapiens
tcaagatgaaccgcaaggagagaagttcttatgactcctccatgtctccaggaatgtatcctgtcaggtataatgtcagtgaatggcaagaaagttcttc

SEQ ID NO: 800754 - DNA, 99 bp, Homo sapiens
ctcagtaaggactcggcggacatcgagggcacacgtgtttcacgttgacaggtttgcttgggacgctagtaaccatgggcttgctgacttagccaaaga

SEQ ID NO: 800755 - DNA, 98 bp, Homo sapiens
ggacgggaaggcgggagacgagaagcctgaaaagtcgcagcgagctggagccgccggagatatccccaaggctcctggcaaaatcatcccaagcagaa

SEQ ID NO: 800756 - DNA, 98 bp, Homo sapiens
cgattgttgcgcgctcatcttcctctcggtctacttcgatgtgggggctcaaggttctgctgctacctgtggtgagctttgctctgtaccctgaggag

SEQ ID NO: 800757 - DNA, 100 bp, Homo sapiens
attattgacctcttcctttatcagccacagtagctacagcaagctgggtagcaggcagatccaaaggatatcatgaagtttccagggcctttggaaaacc

SEQ ID NO: 800758 - DNA, 100 bp, Homo sapiens
atttcaagctgccaaggtggagagagggattacagaaaggagaacaccttatttcaggttctcaacccattttacattttccagctgttcagtgttatac

SEQ ID NO: 800759 - DNA, 100 bp, Homo sapiens
ggtcctggagaggaagtactgcgttgaattgctcaacagcatcttggaagtccttagctaccaggatgcggtgtggatgtgtgggggccgcatggaggac

SEQ ID NO: 800760 - DNA, 100 bp, Homo sapiens
tggtgtacgtgcactactcgtcctactcggagcgctgtcgcggccatgtctgccaggtggtcattatacaaactggactctcaggacaaaacgacaccag

SEQ ID NO: 800761 - DNA, 100 bp, Homo sapiens
aaattgctataaatcatctctgaagctcgtgaaagaaaataacatccgatcagttgcattctggaatttatcagtatagcagtgggcctggtcagcattc

SEQ ID NO: 800762 - DNA, 100 bp, Homo sapiens
gaccaggaattggaggagatacccattttgactcagatgagccatggacactaggaaatcctaatcatgatggaaatgttgggtgaactcttcactcctg

SEQ ID NO: 800763 - DNA, 98 bp, Homo sapiens
ttggcagatgttgttgaagataaagacaagggagaagatccaatttatccgaactgaagggactccaggattggtgcgcctttcaagcgatgcagacc

SEQ ID NO: 800764 - DNA, 98 bp, Homo sapiens
aagatgtattgcaggggaatctttgatcctgaaaacgtgtttattggtcgccacttcattattggactttccacagttacctttactctgcctttatc

SEQ ID NO: 800765 - DNA, 100 bp, Homo sapiens
tgtccagatgctgtgccttcctccgctgaaacagggggaacgaattatctggcccctggggggctttcaggtccctgtgcgttttattgcgacctgccgg

SEQ ID NO: 800766 - DNA, 116 bp, Homo sapiens
agagatatttgaagttgatgtggaaattgccaaacaatctgtgactattaagaccatgttggaaggtggttgtgtcaaaccgattggtgacatctccatgctgtattgtcacaagc

SEQ ID NO: 800767 - DNA, 98 bp, Homo sapiens
ggggggctgtcggtgaacaccacggtggaggacgtgaagcaatattttgagcagtttgggaagggtgcggaggcagcaaatgttacaggtcctggtgg

SEQ ID NO: 800768 - DNA, 100 bp, Homo sapiens
aaatcaggatccactgcaaggaacaacaggagactacctaggtggagaagcgtactgggccggcggcctgcacctctacaccccattacctttccggcca

SEQ ID NO: 800769 - DNA, 100 bp, Homo sapiens
cttcctcctcttgttttccaacatcatccccattaggcattcgtccctacaaatgcaacgtctgcaataaagccttcacccagcgctgctctctggagtc

SEQ ID NO: 800770 - DNA, 101 bp, Homo sapiens
ggggcccaggccgggagccgaccggcacagcaggaaatcagggatcctcttatgcagtggcttgggaaacatgtggactccgagggagaaataaaatccgg

SEQ ID NO: 800771 - DNA, 100 bp, Homo sapiens
ggagaaggaagaggtgtttgaaaaggaagaagcattgcatgcatttattcagccagagattctggatggcccaaatcagtatttttgtgaacgttgtaag

SEQ ID NO: 800772 - DNA, 98 bp, Homo sapiens
cctctaacggctattcatacaccatgcaaaacagaaccttccaaatttccttttccaactaaggggtcaggcccagccccaggcccagtggtattact

SEQ ID NO: 800773 - DNA, 100 bp, Homo sapiens
ggagaggatgtgttcgaggtggagaagatcctggacatgaagaccgaggggttccaggaatggatggaggtgctttaactgatacaagtctcacagattc

SEQ ID NO: 800774 - DNA, 98 bp, Homo sapiens
gagctgaaagacctgcagtgggagcatgaagtgttagagcagcgattcaccaagattatgtttgagaccttcaacaccccggccatgtacgtggccat

SEQ ID NO: 800775 - DNA, 98 bp, Homo sapiens
ttattttttctagctgttggaggtgtttaccacccgaactgcagaactgcttcctgtagtaatgttacctgctggttgaaagacgttcacatgaaagg

SEQ ID NO: 800776 - DNA, 98 bp, Homo sapiens
gctgatgctgctggacgccactttccggggtgcacagcaagtggaagttggtgaaccatctaaagaagagaaggctgtggccaagtatcttcgattca

SEQ ID NO: 800777 - DNA, 100 bp, Homo sapiens
tgacaagaaatgttccaccaggacttgatgaatataatccattctcggattctagaacaatgccttcaattaagttgcagagttctgatggagagatatt

SEQ ID NO: 800778 - DNA, 100 bp, Homo sapiens
aagctcggagcgggagtagacagtggccggcagggcagccgggggacagctgtagtgaagctggccctgaaggaccctgttcatacagtgtcactgcagc

SEQ ID NO: 800779 - DNA, 100 bp, Homo sapiens
ggaaaattggcagaggctaaaaataaaggagaagtatttccaacaactgaagggatgcttgaagatggaaagaaatttgattcctcccgggacagaaaca

SEQ ID NO: 800780 - DNA, 146 bp, Homo sapiens
ctgccatgaggcagagaggaacatagctttgcgttcaagtttagagtggaattcgtgtgttgtacagacccttaagagaagatggcgaattagaagatggtgaaatagacgatgcaggatttgaagaaatacaagaaaaagaagca

SEQ ID NO: 800781 - DNA, 100 bp, Homo sapiens
atatctttcacagaatttgttaagtttgacaacttaaatgctgcgcatgaaacctctaagttggaaattgaagctagccactcagagaaacttgaattgc

SEQ ID NO: 800782 - DNA, 123 bp, Homo sapiens
aagaagttgagaaaatgggagcagttttcatggatgcccctgtttctggtggcagcgagtatgacgaggaggaggtggactatgaggagtcggacagcgatgagtcctggaccacagagagtg

SEQ ID NO: 800783 - DNA, 98 bp, Homo sapiens
aaaagtgaagtctcacattatgattggttttcacagaattccatggactttaactgctgaaccaatgatgcactgattttgtcacttgtaccagctaa

SEQ ID NO: 800784 - DNA, 100 bp, Homo sapiens
gccgccatggagcccgactcggtgattgaggacaagaccatcgagctcatggatattctggaccactgaaggaaattcctcctgaaaaattcaacaccac

SEQ ID NO: 800785 - DNA, 100 bp, Homo sapiens
ttattttttctcatggatgttcttcttcgagtatttgtagaaggctgctacaggagctgagagaccctaccctcactttccgtctgcttggctcccccag

SEQ ID NO: 800786 - DNA, 100 bp, Homo sapiens
ggaggaggatgctcctgcctcccagagaggggagccggcgaggatcaaaatcttcgaaggagggaagaaacatattgccgagtggatgccgccgcgcagc

SEQ ID NO: 800787 - DNA, 98 bp, Homo sapiens
agttttgtcaaagggaaggtaaaggcaacagcattattgagaaaagcccttacagaagagtgtggccgtaggtcagctattcacagtagtgaatcatc

SEQ ID NO: 800788 - DNA, 98 bp, Homo sapiens
caccttcagcggatttggggattaggctcttttaggaaacctgtaggaagtgtcagggactctggaaagaacataatggcctcacctgtgaagagctg

SEQ ID NO: 800789 - DNA, 99 bp, Homo sapiens
attagattcgctggctgttatgatcagcacaaccttgttgcatgccagataaatgatcaggttcaaaccttgtactactcagctgatcacaagctgctt

SEQ ID NO: 800790 - DNA, 98 bp, Homo sapiens
gaggctctccctgcacagcatcgcgcagaacaaagggatcagatctgactgcagccatgagcagcaatgagtgcttcaagtgtggacgatctggccac

SEQ ID NO: 800791 - DNA, 100 bp, Homo sapiens
cttctaaaccaacactcctagccaatggtggtcatggagtagaagggagcgatactacaggccctggagatgtacaaggatgattggaacaaagtgtcgg

SEQ ID NO: 800792 - DNA, 100 bp, Homo sapiens
tgcaaaaccagaggatgtccatgttcaatcaccactgtccaaattcagaagctcagaacgctggactctccctttgcagatgcaggacaagtactccaaa

SEQ ID NO: 800793 - DNA, 99 bp, Homo sapiens
gaaaactgaggaatttgaagtgaccaaaacagcagaggttgacggatatattcagacgttacgacacggatcaggacggctggattcaggtgtcgtacg

SEQ ID NO: 800794 - DNA, 100 bp, Homo sapiens
gacagcgtccatgccaccgctttcatcatcgtccaggagtattctcctgtttgccaaacttaaaaatgctggatggaatcttgaagctaccagaagattg

SEQ ID NO: 800795 - DNA, 100 bp, Homo sapiens
atctttctagaccatatctcttctttggattattttacaaaaccagactaccagggtttcgaaaaaacgatgaaatgaaagctatggatgttttaccaat

SEQ ID NO: 800796 - DNA, 100 bp, Homo sapiens
cagagataattgataacaccctgtaacagctgaaaacattgctgaggctcttgtcagcaaaggtctagccacagtgatcagataccggcaggatgatgac

SEQ ID NO: 800797 - DNA, 100 bp, Homo sapiens
ctgagtgagaagatccccatcccagacacaaaaccggtggggaacgccaagcacaacgtgcatgtcatgaacatctccacaggcaagaaagtgaaggggg

SEQ ID NO: 800798 - DNA, 98 bp, Homo sapiens
tacgtgagattgtaccccacgagctgccacacggcctgcactctgcgctttgagctactgggctgtgagctgaacggggtacaggctcgggagaagca

SEQ ID NO: 800799 - DNA, 100 bp, Homo sapiens
ccacctgcatcatctggggttccaatgcagacatatctgaagagatggattaagaatgctttggattaaggattgtggagcacatttcaatcattttagg

SEQ ID NO: 800800 - DNA, 100 bp, Homo sapiens
aagcaaaaataaatctgtggaactgaaggagcggatcagagagtatttaaagggctgtaccagtgcaggtcctcactttaatcctctatccagaaaacac

SEQ ID NO: 800801 - DNA, 99 bp, Homo sapiens
cccctttgaattaattatggctgttgccaacttggcctgttccatctcaaataatgaagaaggtgtaaagcttgttcgaatgtctgcaagccagttaga

SEQ ID NO: 800802 - DNA, 100 bp, Homo sapiens
gtggtgaatcccctgtttgagaaaaggcctaagaattttggcattggttcgagtgactgtgtttccctcaaagactgtagctcagtattcgggagtacct

SEQ ID NO: 800803 - DNA, 98 bp, Homo sapiens
cgtcagcactgactttcagctatggaatcgcttcatcgctgtggagaacattgacagctactgcgtgctcatctcctccaaagctgtttacttcctga

SEQ ID NO: 800804 - DNA, 99 bp, Homo sapiens
tggtggcttccgtttgttggtggaggaggtggcaggcctcggcgggaataccttggcaagcagctccagtccgagcagccccagaccgctgccgcccga

SEQ ID NO: 800805 - DNA, 99 bp, Homo sapiens
aacaccacaataatccacagccaaggtgccactgattaatgaacttgaatcagcaatacatcagctgtacaaacagcgagcttcccgccttgtccaaag

SEQ ID NO: 800806 - DNA, 98 bp, Homo sapiens
gctacattacaagaccttgacctgactggaaatacaaatctggttctggaacacaagacactggacatatttagatgcaccagcaaggaatactgaag

SEQ ID NO: 800807 - DNA, 151 bp, Homo sapiens
aggataaccaactgggagcattcctgacaaaaaatcatgcaattttctctgaagaccttgaaaatctgaagaccaggtgtctgacttccagcaactgctggcctgtgccagggtgcaagctgagcactggagtggagttttcctgtggaga

SEQ ID NO: 800808 - DNA, 100 bp, Homo sapiens
ctagaaacaacagtggagatattcaataagctcaaccttgaacaaatcggcaaggttggaaaccagaagcgtgttgttggtgtgcttttggggtcatggc

SEQ ID NO: 800809 - DNA, 98 bp, Homo sapiens
cgcactactggcccctgatccggttcttggtgcccctgggcatcaccaacatagccatcgacttcggggagcagataactgtgtccagaggaccccca

SEQ ID NO: 800810 - DNA, 98 bp, Homo sapiens
cccttcgcctgcacctggccaggctgcggctggagatgcgtttagcccagcccctgctggtaaccaaggtcctcctccaatgatgggtatgaatatga

SEQ ID NO: 800811 - DNA, 100 bp, Homo sapiens
agaggcgggcgatgtgaagatgtcagtgggctgtgcctgtcctggtctgtgcagacttttgcagacaaatcaaaacaagaagctctgaagaatgacctgg

SEQ ID NO: 800812 - DNA, 100 bp, Homo sapiens
ctgtgcagagtgggggtgaggaggccaacttactgcttcctgaactgggcagtgccttctatgacatggccaggtggattctccacagttttcctcgtgc

SEQ ID NO: 800813 - DNA, 98 bp, Homo sapiens
gaaggccaccaaggagttctgggctgcagatatcatctttgctgagcgggcttattccgcagtggtttttgacaggtgcaaattgagcatgacccaga

SEQ ID NO: 800814 - DNA, 100 bp, Homo sapiens
gcctccagagtagctgggactacaggagcgagttcagaagacctttcctcacccaattgataaatgggccattgctgatgcacaatctgctatagaaaaa

SEQ ID NO: 800815 - DNA, 98 bp, Homo sapiens
tccctggagctccatgaaaaggagaaaaagaatgccgtgtttcctggatctatggaggaggagagacttcagcatgcaaaccttcatctgttcggctt

SEQ ID NO: 800816 - DNA, 98 bp, Homo sapiens
tttgcatgagacgcttctggacaggaaattgagaggctgactgagcgactagaagaaaaagagagggagatgcagcagctgctgagccagccccaaca

SEQ ID NO: 800817 - DNA, 100 bp, Homo sapiens
actgcgggacaggaagtggccgtagcggcttgttggataaggttgtggattcccagctggtgtgcatgatgaacgaaaacagcattgattacatttctcg

SEQ ID NO: 800818 - DNA, 99 bp, Homo sapiens
agctgcgcgccgccagccagagggccgagagccgcggggagaaggccatcacccaggtacgaaaaacgtttttcaccttagcattttgtgacttttgtc

SEQ ID NO: 800819 - DNA, 100 bp, Homo sapiens
gcctgatgaggaggatatccgtgttcaagtacgtctcagggtcttcagccgagaggagggcagcccagagccggaagtagctacagcaagctgggtagca

SEQ ID NO: 800820 - DNA, 98 bp, Homo sapiens
gcagcccagcagccccgcagcggcgccgaggacagtgcagccgagttgcgtctccctcgcgcgaggtcggatccgcacaagacggcaaagctctggga

SEQ ID NO: 800821 - DNA, 100 bp, Homo sapiens
aacaagtacaagcggcgggtgccccgggtgacggtgacgttgtaaataatatgtatgagcccaaccgggacctgctggccagccacagcgcggaggacga

SEQ ID NO: 800822 - DNA, 100 bp, Homo sapiens
tttctttctgttcccgggctgcgttcggacccctgtcggagagtaaatccgaagtaagttcggggagacttcaggccagggcagtctcctgtcttctctt

SEQ ID NO: 800823 - DNA, 100 bp, Homo sapiens
tccccggggagaatgaggtggagcagctggcctgcatcatggagaacataattgctgagcatgaaattcgtaatatctcctgtgctgcccaggacccaga

SEQ ID NO: 800824 - DNA, 99 bp, Homo sapiens
gcagatctggatcatcaaagacaggatcgagctttggattacttaagtacttgcattgatcaagttcaaacatttggagacattctgcagctggttatt

SEQ ID NO: 800825 - DNA, 98 bp, Homo sapiens
taggacgtcgtttcagaagcaaccttgggcttagtcccaccctttttaggcactcttgagaaatcaggcagaagcaacaaattacccacctgcatgag

SEQ ID NO: 800826 - DNA, 98 bp, Homo sapiens
cgaatttaggagacataagaccgttggttctgacgaggcacagcgtttcttgcaagaatgggaggtctcttgcagctgaatggggtaaatatggaatg

SEQ ID NO: 800827 - DNA, 116 bp, Homo sapiens
cacatcttccggccaacttccattgaacttcccagcactcgaaagggaccgaaatggagagcaaagagtttgccagatccggcccggtgcctgggttccaggaggacacgctgcag

SEQ ID NO: 800828 - DNA, 99 bp, Homo sapiens
tcctctaaaggccccatacaatgaagtagacattggtggaaacatttagtactccaaagattcaggtttactcacgtcatccagcagagaatggaaagt

SEQ ID NO: 800829 - DNA, 100 bp, Homo sapiens
gcaaaattccttctctaccttggtcattctctctctacttggatttatcagcaagactgttgaacgcataactgcccaagatgcctgtccctccccctcc

SEQ ID NO: 800830 - DNA, 98 bp, Homo sapiens
ccgttctggatgctagagtgagtgtgcccacctgcgtaagggggcagagacagaatctccctggaaaaggagacatgaatgtctgcaatgatacttcc

SEQ ID NO: 800831 - DNA, 100 bp, Homo sapiens
ttcacagtcctctccaccaagagcctcttccttggccagaaggagcggcgccggtcagagagagccgagcaacagcgcttcagaactgagaaggaacgcg

SEQ ID NO: 800832 - DNA, 98 bp, Homo sapiens
ggcggatgccctgcagtacctgcagaaggtctctggagacatcttcagcagaaattcattgagtttgaagatgctctggaacaagagaagaaagagct

SEQ ID NO: 800833 - DNA, 100 bp, Homo sapiens
taacaagatggcgaccgagacggtggagctccataagctaaagactggtcgaattgacaaatcttaccctacagtatgtggccacacaggaccagtgctg

SEQ ID NO: 800834 - DNA, 100 bp, Homo sapiens
gctcttctgcctgctgcactttggagtgatcggcccccagagggaagagaaggcattactgtacactgcggtaaatcagttggctatgggaagcagttca

SEQ ID NO: 800835 - DNA, 98 bp, Homo sapiens
cgcgcgccgctgcatcccgcgtccagcacctacgtcccgctgccgtcgccgccgccaccatgcccaagagaaaggtgtcccgacccaggctaagcttg

SEQ ID NO: 800836 - DNA, 119 bp, Homo sapiens
cttcctgagggccgagcaacagtgtagtggcgtattccacatagcaaacagtgggagattttgataagatctggcgagaacactgtgaggatgaagaaactctttgtgaatatgccgtt

SEQ ID NO: 800837 - DNA, 98 bp, Homo sapiens
gcggttcctttttgcgagctttccgagtgccaggcgccggccggctgcgaagacgcggtgggccgcccctccgatgacagcgcttctgctgcaagtag

SEQ ID NO: 800838 - DNA, 98 bp, Homo sapiens
gcgaggagaacgtcccgctggatctgacccgagtgatcaccagcagcttgcaaaacttatccaggagtcgccaaccgttgaactgaaagacaagttgg

SEQ ID NO: 800839 - DNA, 100 bp, Homo sapiens
ttgctgttacctacttctttcatcagggttacacatcattttggaatgactgtatatcatctggattacgtggctgtatgttaattgaattagcattgag

SEQ ID NO: 800840 - DNA, 98 bp, Homo sapiens
caaatttcctgaacacaccattatgggcagcaggatgggtgtggaagcagtgatggcacttttggaggggaccccagataccccagcctgtgtagtga

SEQ ID NO: 800841 - DNA, 101 bp, Homo sapiens
cctccgaaccccttcatgcccaaatcccggaaactccagcgtgtctccagccgtgtcattgaaattatgagactatcattcaaatggaagcattatagttc

SEQ ID NO: 800842 - DNA, 100 bp, Homo sapiens
aatctgggaagatagaaatgtatacccagaagaaatgattgtggcattgagagaagctttgagaatggtctggaacacggacctggtggagaccctggag

SEQ ID NO: 800843 - DNA, 100 bp, Homo sapiens
aagtgaaagagatggcctggtggaaagcctgggagagacagcgtctggagaccatcctcagtctctgtgctgaatacacaaagcctgacagtcgcttatc

SEQ ID NO: 800844 - DNA, 100 bp, Homo sapiens
ctggctttcacttcaatgctatgacctgtgaaggctgcaaaggcttcttcagatgatattgctgataggatgaggatggatgctggagaagtgactttag

SEQ ID NO: 800845 - DNA, 100 bp, Homo sapiens
ctacgacaccatggtggaggagcagtacggccagatgtacatcaaggcctccggcagctatgcaggtgatgtgtccaatctagatcccaacttctcattt

SEQ ID NO: 800846 - DNA, 100 bp, Homo sapiens
gtcattgatgtgggaataaatagagttcacgatcctgtaactgccaaacccaagttggttggagatgtggattttgaagtgccagccatttttggagtct

SEQ ID NO: 800847 - DNA, 100 bp, Homo sapiens
agttctggaattattctccttttggagaatctggtcgagaagtgaactgaaacaccatgccacaaggagagtgatctcttcccctgttttcacaatggag

SEQ ID NO: 800848 - DNA, 99 bp, Homo sapiens
cggctcgccaactcggctgctctgggggattcgtgcgcggtaagaagctgcgcggtagcgcggtgagggccagatattcgaagcttacaacatggcagc

SEQ ID NO: 800849 - DNA, 100 bp, Homo sapiens
atcactaaggaaagaactccagaaagtgaagaagaaaatgtagaatgggaaactaatagagatgtctacatcagcatcagcatctgcgtcaccatttcaa

SEQ ID NO: 800850 - DNA, 100 bp, Homo sapiens
ccgcggcgccatattgcggccctcagcggccgcgaccgagtcatggctgagacctacgtgcccatttcgaggccacaggtgttggtggcttcaaccactg

SEQ ID NO: 800851 - DNA, 100 bp, Homo sapiens
gattggaagcttcctgaggccaccccagagtcagaagccgctatgcttcctggacagcttgcagaaccaaagcactccaaagacctccgccagctgcagc

SEQ ID NO: 800852 - DNA, 100 bp, Homo sapiens
ttccatcaaaaagtgattaagcagagaatggagaagaaggttgattccaggaatgggaaaaggacagcacaggatgccctccaaggatgagctggtccag

SEQ ID NO: 800853 - DNA, 99 bp, Homo sapiens
tggctaactggaggcatcacccagcagtggtggagcagtggagcaaggtcatttgtgcactcacttccagagttgtggaaagtaaaaatgtagccctac

SEQ ID NO: 800854 - DNA, 99 bp, Homo sapiens
gaagagacaacacacacccaaaatggcaagaatccgctggcacggacaggctggacccaggtcaatgaatacatttttgataatttatctagtaattct

SEQ ID NO: 800855 - DNA, 99 bp, Homo sapiens
tctgtgtcgccgccgcccgcggcgtccccggtttggtgttgcggcgcccaccttcgggaggatcaggtttccatgtgatccccactatctcaagcatcg

SEQ ID NO: 800856 - DNA, 145 bp, Homo sapiens
aagctatactccaagcaagatctcagtcagagtaggaaataattttcacaaccttcaagaaattcgggtttattacagaggtcagctgggaagagctaccactttaagtgtaactcctgaaatggaaagagtgaagaagaatcaa

SEQ ID NO: 800857 - DNA, 98 bp, Homo sapiens
tactaaggagactgaagaaagaagttgaatcccagcttcccgaaaaactccttcgagaactcatagaacggaagaccagctccttggatcccaacgat

SEQ ID NO: 800858 - DNA, 98 bp, Homo sapiens
tccgatcaagactacaagagatcagtcattacaatagcaacttctgttgataagttgggttcaatgtggcttaattgtggtggcctacaaagatggat

SEQ ID NO: 800859 - DNA, 98 bp, Homo sapiens
tgaattgacctcgccacgcatgttcacctatggcctccaccgctatgtctggctggtttacgagcaggacaggccgctaaagtgtgacgagcccatcc

SEQ ID NO: 800860 - DNA, 100 bp, Homo sapiens
tggtgtttcctatgatgaatatagatacagaagcgtcatcaaagcatgccaactagaagaggtgtactggtccgttagcaaattctctttcagagaaaac

SEQ ID NO: 800861 - DNA, 100 bp, Homo sapiens
ctttgaacgcactcctcagagtccgactctcccacctgctaagataacaacgaacttgatgcaagtgataggtttgccaaggtcagacctctcatcatcc

SEQ ID NO: 800862 - DNA, 100 bp, Homo sapiens
agggggcgcggggaccttaccgttgtcccaagcttccagcagtctgagcacaacaggtgacagcgggaaggtgaccacagtcgtagccactctaggccaa

SEQ ID NO: 800863 - DNA, 99 bp, Homo sapiens
ggaatgttttccgggagctgcagatcatgcaagggctggagcaccccttcctggtcaatctgtggcttatcaggagggcagacttcaaaagctactaaa

SEQ ID NO: 800864 - DNA, 100 bp, Homo sapiens
ttggccatttcagccataccttgtgtttgatgttggagatggttcagaaagacgggataatgaatattgatatgctggaggaatttgcctacttgagaac

SEQ ID NO: 800865 - DNA, 100 bp, Homo sapiens
tggtggcctatcacgggcgccgggatgtggagcagtatgtcctggccatcatgaacatttagagatgaggtttctccatgttggtcaggctggtctcgaa

SEQ ID NO: 800866 - DNA, 100 bp, Homo sapiens
cgacttggactccgaagatcggtcatcatcagatttgaaatatttaaagtggatacaaaactatttcagcaatgcagacaattaagtgtgttgttgtggg

SEQ ID NO: 800867 - DNA, 98 bp, Homo sapiens
atgtggtggacagtgggctgcacaaggaagaacgctatgacctgaagaccaaggttaaaaaagaagtcggcgatgtttccatcctaatcaacaatgcc

SEQ ID NO: 800868 - DNA, 100 bp, Homo sapiens
actacaatacctcttgggactgggctcgatttgagatagcctgggctggaagctcttctacgtcacaggctgcctgtttgtggctgtgcagaacttggag

SEQ ID NO: 800869 - DNA, 98 bp, Homo sapiens
caagaccctttggctctcagacaaggggaatctcatcactccccagatcttacacgacaggtgatttggcttctgcacagttaggaggagcaccaaac

SEQ ID NO: 800870 - DNA, 98 bp, Homo sapiens
ttggtgccctcaacatctctcagagacgaaagagtcattttttacaggtcagaactgtagaaataatgaggaagtgacacttatacgcaaagctgatt

SEQ ID NO: 800871 - DNA, 98 bp, Homo sapiens
catcgtggagatggacaggagacctggaatcattgttgcacgaggtagaactaacattgaacttagagagaaattcatcctaccagagggagcatccc

SEQ ID NO: 800872 - DNA, 100 bp, Homo sapiens
gtgatgctggagaactacagccacctcgtctcagtgggcaaagatgctggaaggagatctggtttcaaagatgctacgagctgttctgcagtctcataag

SEQ ID NO: 800873 - DNA, 50 bp, Homo sapiens
gggataaggagtccctcatattgcagactgcttccccacaacaaagagaa

SEQ ID NO: 800874 - DNA, 100 bp, Homo sapiens
atgtaccacagccgcgcgctgcaggtggtgcgcgcccgcaagcaggcgcagcccagcctcgaaatgcagaacgacgccggcgagttcgtggacctgtacg

SEQ ID NO: 800875 - DNA, 100 bp, Homo sapiens
agacggattcatttagagctgcggaacaggacgccctctgatgagagcgaagaggaactttactcctcctgtcgccagctgaggaggcggcaagaagaac

SEQ ID NO: 800876 - DNA, 98 bp, Homo sapiens
ggacgaggacctcttcgacatcgaggatgacatcatctacactcaggacttcacggtgcccgctgtgagccgtgagctttgaggcggtgggatgtgtc

SEQ ID NO: 800877 - DNA, 99 bp, Homo sapiens
gaggctagggaggacctcacttccccggggtgtaataatgttaactgaggcctatggcatgtctgcgttacctttaaatctgataaaaggcactagaag

SEQ ID NO: 800878 - DNA, 115 bp, Homo sapiens
tagtgttttcttatttagccggagtgagaagcaagaaggccctggacacagcaatatctctgggctttcacagtttgaacaatttgaaagcaccattgggtttaagctgccaaac

SEQ ID NO: 800879 - DNA, 98 bp, Homo sapiens
tcagagaagaacttatcagagattgagaatgtccatggatttgtttctcattctcatatttcaccaataaagggcacacgtgtttcacgttgacaggt

SEQ ID NO: 800880 - DNA, 98 bp, Homo sapiens
caacaacagcaacttgtgattggcggtgaccggatattcagttgcacatccccacatcaatgcactgccaatgtcagtactgctccccagcctaaacc

SEQ ID NO: 800881 - DNA, 99 bp, Homo sapiens
tctttcctaccatctaaaatacgaaggtttctggctggatcagacactcctctaatttacaaagcagtgcccagctggtttgtgcgagtggagaacatg

SEQ ID NO: 800882 - DNA, 100 bp, Homo sapiens
gcgagggcgaagacgagatccagttcctgcgaactgatctaccgctaccagtctcatgactatgccttcagtagtgtcgaaaaattacttcatgctctag

SEQ ID NO: 800883 - DNA, 100 bp, Homo sapiens
ctaggagctggcggcgacggccacaggggcggcgacggcgcagtgcgaagcgaaacaggaaatgagtggcttatactctcctgtcagtgaggatagcaca

SEQ ID NO: 800884 - DNA, 100 bp, Homo sapiens
tttatatcctgacactatgaatgctacttggatgcctcttaagaagaagacgtaaagcaggctaccagcaattttgagaacttgcaaaaacagcttgcaa

SEQ ID NO: 800885 - DNA, 99 bp, Homo sapiens
ttggaactgctttacaaagtattttatgtaatgttcaagctcagaaatgccttatgtggatcgtcagaatcgcatttgtggttttctagacattgaaga

SEQ ID NO: 800886 - DNA, 100 bp, Homo sapiens
tcaggacatggagtatgaaagacggttcacgcttacatcatcagctacctgaagaaggagatgccctctgtgtttgggaaggagaacaagaagaagcagc

SEQ ID NO: 800887 - DNA, 98 bp, Homo sapiens
agccagagtcgccgccggcgtcggcgccgggcatccgcttcgatcctgaaattccgcaaacactacgactagagtttgctaaggcaaacacgaagatg

SEQ ID NO: 800888 - DNA, 99 bp, Homo sapiens
ttcacttccctcggtctgggcttctctgaggcggcgagagatggtcaggtctggagctcgaccgggccaggtctccatcacatttttgcccagaggtag

SEQ ID NO: 800889 - DNA, 100 bp, Homo sapiens
ggagccgcacgcggcgatatggaagaggagggcaagaagggcaagaaggtcaacattggcatcctcatcgctgtgaccagagtcatctcacagatcagcg

SEQ ID NO: 800890 - DNA, 98 bp, Homo sapiens
gaattctgattatcttttagctctcagcactgaacccatgactgaagagttgctgaaacaacaaaagctgaattcacatgagaccactataactcagc

SEQ ID NO: 800891 - DNA, 98 bp, Homo sapiens
ccgagcaagatggcaaccccggcggcggtcaaccctccgggtgattgcccacagtgagtatcaaaagtccaaaagaatttccatctttctgagcatgc

SEQ ID NO: 800892 - DNA, 98 bp, Homo sapiens
tttcttactaaggacgagctgatcaagtatatgactgaagaaggcgcatattaaatttcctattgactacccctattcaccacctaccttcagattct

SEQ ID NO: 800893 - DNA, 98 bp, Homo sapiens
ttctgccgctgattgctatcacttctgcagaatccagtggatggcttaatggtacaaataactccagagaccatgaatggcttgcggctagctttacg

SEQ ID NO: 800894 - DNA, 98 bp, Homo sapiens
ctggacatggaggagaaggtccgcttcaagtcctgaatctgtgcctccttcccttcttaaagtagtgatgaaacccatagcaactgttggagaaagct

SEQ ID NO: 800895 - DNA, 100 bp, Homo sapiens
tctccagcgccggcctcctcagtgcgaagaagctgcagccgcacctggccaagggtggtattggaatgctatgtaagaaaggacttggtctacaccaaag

SEQ ID NO: 800896 - DNA, 100 bp, Homo sapiens
gggagaccatcccccacccccggagtccaaaatacagagtttgctgagctggctgaccgacccaatccccctacccgccctctgcccgctgacccggtgg

SEQ ID NO: 800897 - DNA, 100 bp, Homo sapiens
agcaaacccttctagacagccggggagtgttcctcgacatgtttctccagtgacacctcccagagaagttgtgtgtgattccagaaacaagtgccattgt

SEQ ID NO: 800898 - DNA, 99 bp, Homo sapiens
gctggaagctgcagccacaatgtgcctttgcaggggagcctgagagccacagacactacaacaacaggagtgcaaacttctctacagccgaaaagaggg

SEQ ID NO: 800899 - DNA, 100 bp, Homo sapiens
tagagatgtgatgttggagaactacagaaacctggtctccctaggagcaggggagagaagacagaagaggttggagaggtcagggaggtgccagatcatg

SEQ ID NO: 800900 - DNA, 98 bp, Homo sapiens
gacgtcgacctgcgcacgcagcttgtgctctacgagaggcatttcatccttcatgaagccattcaggattttgaattgcatatgagtgcttggctctt

SEQ ID NO: 800901 - DNA, 99 bp, Homo sapiens
aaactattgcgcctgccctggttagcaaggtcagatggcaaaaatcaagcaaacccttctagacagccggggagtgttcctcgacatgtttctccagtg

SEQ ID NO: 800902 - DNA, 100 bp, Homo sapiens
gcggcggtggcggcagcaagaggatcaggtttgaaagagaagatagtgaggagctttgaagtctccccagatgggtccttcttgctcataaatggcattg

SEQ ID NO: 800903 - DNA, 100 bp, Homo sapiens
tgatcgagaggatctggtgtaccaggcgaagctggccgagcaggctgagcgatacgacggcatttccggagagttcttttgaagtcacttcagaaggatc

SEQ ID NO: 800904 - DNA, 100 bp, Homo sapiens
cagaagtgtgcatcccaaccttccttctgacaagtcccaggctgacaaacgggctcatcataatgcactggaacgaaaacgtagggaccacatcaaagac

SEQ ID NO: 800905 - DNA, 99 bp, Homo sapiens
tcatctctctagaccataaaaataaaaaacatatccgagggtgtcctgttacttccaagtcatcaccagaaagattttcgacaatgaagccaaagacgt

SEQ ID NO: 800906 - DNA, 98 bp, Homo sapiens
acaatttggattcttaaagtgatgtggttttctccagaagaggcagaaatccaggcagaacttgaacgtttggaaagagtcagaaatcttcacatacg

SEQ ID NO: 800907 - DNA, 100 bp, Homo sapiens
cacagtgcttccatcaacgcaacgggatcagtgttgtgataaggcagctgcaaaaagcggcaggaaatagctcgtctgctggccctggaggaggctaccc

SEQ ID NO: 800908 - DNA, 100 bp, Homo sapiens
atcgaattggagatcaggcttctgttcaaaatgcactgaaagactgtcagaacaaatcacctgctgcagtaacagaaccagagacaaataaatttgatag

SEQ ID NO: 800909 - DNA, 99 bp, Homo sapiens
gtgaccttcgcttggtgtcctcctggcctcagcaacctgacaattctgtcgtgtcccgttggatatgtcaagtgaccagatagctgccaatctgcaagc

SEQ ID NO: 800910 - DNA, 100 bp, Homo sapiens
tcgtaaacaaccctgaagagaacagccaggcctgataatgtacaacggccagccaattaccaaaatggcctgtggggctgaattcagtatgataatggac

SEQ ID NO: 800911 - DNA, 100 bp, Homo sapiens
atggagagaggaggcaccgtcccagccgaccttgaggctgccgccgcgagtctgccatcgtccaaggaggtggcagaccagagtctcactgtcgcccagg

SEQ ID NO: 800912 - DNA, 100 bp, Homo sapiens
tccttgggagttttccatatgtgaccatggatataaaatcacagggtggacagcgccatgtccctgatccaggcagccaagaacttgatgaatgctgtgg

SEQ ID NO: 800913 - DNA, 98 bp, Homo sapiens
gctgtcttctcccttgccataaagctacaaccatccatcatctttatagatgaaataggcctaatgggattgtttgaaaaacgtcgcttcaggaaatt

SEQ ID NO: 800914 - DNA, 100 bp, Homo sapiens
aatccattctcggattctagaacagtcagtactcctgcatttgtaccaacgaaaactcacgtgctgcttcatcgaatgagtggaaaaggactagctgccc

SEQ ID NO: 800915 - DNA, 99 bp, Homo sapiens
ttgatcttcaaaatgctgcagaaatgctcactgcaaaagtgaaaggtcttgctcagtgtgcagaactctgctggcagctgagaggggaagccggaaaga

SEQ ID NO: 800916 - DNA, 99 bp, Homo sapiens
tcggccgatgaagtgcagaggtttttttctgaaggaccatgtctcatacattccatgaatggagacttgttgaggaccttggagggtcctgaaaactgc

SEQ ID NO: 800917 - DNA, 100 bp, Homo sapiens
ggcggcggcggcggctgcggaggcgcaggcagcaactgaggcagcggcaggctcaggtgcagccgctggtgcagaggccaagaccgttttgcccaagaag

SEQ ID NO: 800918 - DNA, 98 bp, Homo sapiens
gagccgcaggagagacacgctgggccgaccccagagcggcgctggacagtctgccttggagatcatttcaccatcagctcagaagatcttctttctct

SEQ ID NO: 800919 - DNA, 50 bp, Homo sapiens
aagccatccaatggatgcaggaaaactgctgggacgatgccggagtgtga

SEQ ID NO: 800920 - DNA, 100 bp, Homo sapiens
gtagggaccacatcaaagacagctttcacagtttgcgggactcagtcccatcactccaaggagagaagtgaattagtgccatcttacgattcagctactt

SEQ ID NO: 800921 - DNA, 100 bp, Homo sapiens
aggcccatttccctttcatcttccaagtggtaagaagttcagaagcaagcctcagttggcaaggtacctgggaaatactgttgatctcagcagttttgac

SEQ ID NO: 800922 - DNA, 100 bp, Homo sapiens
tacggcgtgcgcggctatcccaccatcaagttcttcaggaatggagacacggcttcccccaaggaatatacaggacgtagacaagtttggcaacgagatc

SEQ ID NO: 800923 - DNA, 100 bp, Homo sapiens
gctgaccccagccggcgccgagggcttggaatctcgagcgggaaaaggtatcattgcccagtgcctaagatcttttatgttcagctcactgtaggaaata

SEQ ID NO: 800924 - DNA, 100 bp, Homo sapiens
gacccttcgagaaatctcgtctcgaccaagagctgaagctgatcgccacccaggctactttgggaaagttggtatgaagcattaccacttaaagaggaac

SEQ ID NO: 800925 - DNA, 98 bp, Homo sapiens
agcttctgcagcgagaagtgctttgcggcctgccgacgagcctacttcaagagaaataaggtgcaatgaagggcgtgttggtagacattgtgaatgca

SEQ ID NO: 800926 - DNA, 100 bp, Homo sapiens
agtttgattgtagcatcatgtctttgagtgtcctattggactacagattagaggataataaagaacattcatttgaggcagagtggcatgattccgactg

SEQ ID NO: 800927 - DNA, 98 bp, Homo sapiens
ctgaaccgggaaagtacaggattgagagcaactatggcgtacacacactggagatcaacagagggcagaggtggctcagagagaggcggagaccttaa

SEQ ID NO: 800928 - DNA, 98 bp, Homo sapiens
tgtacctggtcatactgtgggaaacgcttcacacgttcggatgagctacagaggcacaaacgtacacacacagctcctgaatcaattttgcatgagag

SEQ ID NO: 800929 - DNA, 100 bp, Homo sapiens
gagatcttctcagatgagaacaactactcattgagccgggagctgctcatcaagtttttttcaccgctcaaccctgtgagagtacacattgaaattggtc

SEQ ID NO: 800930 - DNA, 100 bp, Homo sapiens
tgtggtgaagaaagtgagcgaggagtcagaaactcagccactggttgccttggtaggcaataaaaggaggtggggaagacagggctccagctaccacagg

SEQ ID NO: 800931 - DNA, 100 bp, Homo sapiens
tatcgttggacccagaattgagagcattggggagtcagcaatgtccgttgtgttaaatcagctgctgcccatgattaagcctgtaacccagagaaccaac

SEQ ID NO: 800932 - DNA, 100 bp, Homo sapiens
gatgaccctagtaagcacatatttggtagcctttgcatacaagaatgtgaaatttgttctcaagcacaacttattctaccagattccatgaaagtattgc

SEQ ID NO: 800933 - DNA, 98 bp, Homo sapiens
tgcattgagcttgggtcaggacaattccatttggggaccagagatggacggtcactcagcctatggagatccagtgccctacctgccaattcgtctgg

SEQ ID NO: 800934 - DNA, 100 bp, Homo sapiens
ctccaggaatgggacctcgagtcactgtggcaggatggggaagcagaatagcaaactggcccctgaagtgatggaggacctggtgaagagcacagagttt

SEQ ID NO: 800935 - DNA, 118 bp, Homo sapiens
tctccttgaaaagtcaaggcttggttcaagccagatagcacctgaggacagaacatatcagatcattggaaattgtgtgtccatcttggttttgagctctgctctgcctgtgatgtcg

SEQ ID NO: 800936 - DNA, 98 bp, Homo sapiens
gccgcggagccgaggcggagccgctgtcctcgtccccagcggtcccgcccaacgcccgactctgtcatcctgtacagttctacagcatgaataggcct

SEQ ID NO: 800937 - DNA, 99 bp, Homo sapiens
ggtgctggcggcggcgcttgggctctaggcggggtttcaccatgttgcccagactggtcttgaactcctgagcttaagcaatccacctgcctcggcctc

SEQ ID NO: 800938 - DNA, 98 bp, Homo sapiens
gaggtgtcggcgcgggagcagcacttccacagccaagtgcgggagtccacggtctttactcacctggagacctgtggcccactccgccagtgtgtgtg

SEQ ID NO: 800939 - DNA, 100 bp, Homo sapiens
aattatagagtgtaatttccttaagccaactcataataaacaagatttcgactatactaatgagtacagaaatttctgaataaattggcagaagaacgca

SEQ ID NO: 800940 - DNA, 100 bp, Homo sapiens
tgaaggaagctgccttgtacccacatctcccgccaggttgtgaccgagattcccgacgagagagactgaggggaagagaggaaggaggggcgggctcctg

SEQ ID NO: 800941 - DNA, 99 bp, Homo sapiens
tcaaggtcacacaatgtcggggatggacctccagatttccttactgtttgtgaagtgtggatatgcaggctctaactttccagaacacatcttcccagc

SEQ ID NO: 800942 - DNA, 99 bp, Homo sapiens
agcagccgcccgcttcaaccccaggggaccagaggaactcagccctgattgcggaataactcaagtcacctgtactggaaatcagtttgctgaaattaa

SEQ ID NO: 800943 - DNA, 100 bp, Homo sapiens
agggctacatgccttatttaaacaggttcattttggaaaagtttgcctgagaatacagatcaacccacagaacaaagcggatttccaaggcatctcccca

SEQ ID NO: 800944 - DNA, 100 bp, Homo sapiens
ttgtcttcattcactttcccccctcagtttctgaaatgattctccagaatttctcctcataaaaaagctcttttgaaacagatggtcaccatgtttagat

SEQ ID NO: 800945 - DNA, 141 bp, Homo sapiens
gcttccaggtgtcccagaaacccaggaaatcgagactcatgactcccagagaggatggcatctagaagaatctatgtactttcatcagcgcggccagtaagtttgcacagctccagtgtctgtggaagacgagagactcag

SEQ ID NO: 800946 - DNA, 100 bp, Homo sapiens
tcaggtggcacctactgacattgaagaagggatgagagtgggggtggccgtgaattaagtgattttattagctatctacaaagagaagctacaaaccccc

SEQ ID NO: 800947 - DNA, 100 bp, Homo sapiens
cccggccccgtagggtccccggcgccaggccacccggccgtcagcagcatgcagggctttcatgagaaggacaagaagccatattgccgaaaggatttct

SEQ ID NO: 800948 - DNA, 100 bp, Homo sapiens
gaagggaatcgcaaggctcttccctgaccattttctactgtccctgcgcgagagtgcctggtgaagaatgtgatgggatcactagcatgtctgcggagag

SEQ ID NO: 800949 - DNA, 100 bp, Homo sapiens
taggcatgaacaccaattaatgctaatgaggcaaggaggaataaacatggtgtgtctcgaaagaagattgctcagatgttggatcgttatgaatatcaaa

SEQ ID NO: 800950 - DNA, 100 bp, Homo sapiens
cagggatatcatgtccatttataaggagcctcctccaggaatgttcgttgtacctgatactgttgacatgactaaggtaaaattaagtattcggaaagag

SEQ ID NO: 800951 - DNA, 100 bp, Homo sapiens
gagcgcgtccaggcctgacagctctgcggctcgggccctgaggtcacctcatcatctcaaggaggagcattcccctgggctaaggcactggggccgaact

SEQ ID NO: 800952 - DNA, 99 bp, Homo sapiens
gcagaacccgggagtaggagactcagaatcgaatctcttctccctccccttcttgctcgagctaatccaagatatggggttccatgtcatttactgaat

SEQ ID NO: 800953 - DNA, 128 bp, Homo sapiens
ctgaatctggagaaggggaaatctccccacaaagagaagtctcaagatcccaggatcagttcgacagcttagacaagcatacacaatggggaattgacttcttggaaagatatgccaaatttgttaaa

SEQ ID NO: 800954 - DNA, 100 bp, Homo sapiens
gatacagatgtattcaaatggatcttcaaaggatcacctgctgttaccagctaccacccataacaagaccacaagaccaaaaatgtcaattgtgttacca

SEQ ID NO: 800955 - DNA, 98 bp, Homo sapiens
tgaaaaagcaatgacaaatcactgcaagagtacacgtcataagcaaaatactgagttttacagctcccagcacagtaggaaagagaaatttgagtcct

SEQ ID NO: 800956 - DNA, 100 bp, Homo sapiens
ctgcccccagggctggctgtttctgtgcttaaagccatcttccaggaagtgcatgtacaggatgccgaggaatgtgacagggctgggagtgtggccacct

SEQ ID NO: 800957 - DNA, 100 bp, Homo sapiens
cacggatcggattcctcagctacgaggaggcgctgaggagaggtgtctccatgcgagaggtgtcgctgtgaagccaacggtgaggtgctatgcacagtgt

SEQ ID NO: 800958 - DNA, 98 bp, Homo sapiens
aaatattgaagcaaactttattaaaccaaactttcagcagttatttagctctgaggatgaagtggatgtgcttttacatggaactcctgaccaaaaac

SEQ ID NO: 800959 - DNA, 100 bp, Homo sapiens
gagatatgtgtgtccatcagcagtgataaaaatcttgggcttgcagatgggtcaagggttgtggagagtggtcagaaaccagcagctgcaacaagaaggc

SEQ ID NO: 800960 - DNA, 136 bp, Homo sapiens
ggacgcgtccggctgtggaagagagcggcggccgctcacaacatgcacagcctggcgacggctgcggagcgggacggtatgcgggccatcctggggtcctacgacagcgagctgaccccggccgagtactcacccc

SEQ ID NO: 800961 - DNA, 100 bp, Homo sapiens
acaatcttgaatcatgaagctactaaccagagccggctctttctcggatggtgattgctcacaccaaagccttggacccctcccagcctgtgacctttgt

SEQ ID NO: 800962 - DNA, 98 bp, Homo sapiens
aggccagcctttgctctatctccaggaaaccaattcgtgctcatggaagaaaagttcctttgccagcagccttgaagtgaatcttacaggagcaatga

SEQ ID NO: 800963 - DNA, 100 bp, Homo sapiens
gaaaattgagaagcggcgtcaggaattgatggagaaagaaaccgcaaaaccaaaaccagatcctttcaaagcatcctggtggggaagaagttttaaggga

SEQ ID NO: 800964 - DNA, 98 bp, Homo sapiens
aaggagggcggcgggactgcactcgagtgtccagacctgctcgatggtccttttggtgtgaaccatggggtggaacttcactcagatgtgatagagta

SEQ ID NO: 800965 - DNA, 100 bp, Homo sapiens
gtgggttcttggtctcactgagttctagaatgaagctgcagaccctcgcagtgagtgttacagctcttaaggtactccaaagattcaggtttactcacgt

SEQ ID NO: 800966 - DNA, 98 bp, Homo sapiens
gaggggacggccgccggagccgcgaggccaagcctgggttctgaggaaaacgcaatggtggccatggacttgggctctccctcgctccctaagaagag

SEQ ID NO: 800967 - DNA, 100 bp, Homo sapiens
atatttgtcacctgaactacttcacattttccccaatatatggggctatctgatgggttagagtgcctttgagaagaaatcagtggatactggatttgct

SEQ ID NO: 800968 - DNA, 100 bp, Homo sapiens
accaggctgcttactggaaactggatgcagcaaggaaataggatttaaccgctctctgcctcccagatagactgtcttcaagctcactgatattttcctc

SEQ ID NO: 800969 - DNA, 99 bp, Homo sapiens
gaatgcctaccgggttataagcgggttaacaacaccttttgccaagatacgtttgaaatggtttctgaagatgaagatgggaaattgggatttaaagta

SEQ ID NO: 800970 - DNA, 100 bp, Homo sapiens
atgagttatctaacgtctatggattagctaggtggttggtggaaggtatatccgcaccatgtacctggggattcagagccagcggcggaaggaacaccag

SEQ ID NO: 800971 - DNA, 100 bp, Homo sapiens
cctgcctccgccggctacagcgggaagagcgccttgccaacattccactaacccccgagactcagcgggaccaggagcggcggattcggcgggagatcgc

SEQ ID NO: 800972 - DNA, 98 bp, Homo sapiens
ctataagatgatccgactcctgattatgtatggcgcggatctcaacatcaagaactgtacagtaacagtttggaggatcaagatgttgaccaacttga

SEQ ID NO: 800973 - DNA, 100 bp, Homo sapiens
ggttggactgtaatacaacatcgtgaagatggaagtctagatttccaaagaggctggaaggaatataaaatgatctttggatataggaaatcaaatgaat

SEQ ID NO: 800974 - DNA, 98 bp, Homo sapiens
ggagatgactatgccgatcttccagaatatttcaagcgactgacatgtgagatctccacaaggggtacatcagaactgaaaagctccatcattggcaa

SEQ ID NO: 800975 - DNA, 98 bp, Homo sapiens
gcctgacagactaagagcaaagctacttccattccagaaagatggcatcatttttgccctcaaaagaaatggcagatgcagagcaaagcggcagtccc

SEQ ID NO: 800976 - DNA, 98 bp, Homo sapiens
ccggccgcgcccgcggaaccagaccagcagtagaagactcagaaagtggtgtttacatgcgattcatgaggtcacacaagtgttatgacatcgttcca

SEQ ID NO: 800977 - DNA, 100 bp, Homo sapiens
gctggatattgatgcgccagtcactgattgctagtgcaactactgctccatcgatcccttcacatttgtctcctggtttacgagatgtggctcttcgttg

SEQ ID NO: 800978 - DNA, 100 bp, Homo sapiens
tcctgagacgttctgtgcaatggtggtggtatcatggatacagaaatgtctgaagatatagaccacaacttaactcctacccttgacagcatgtcttatg

SEQ ID NO: 800979 - DNA, 98 bp, Homo sapiens
actacacacacgtgcgcacccccttcgagatctccctctggatccttctggcctgcctcatgaagatagccttttcaggagccaaaaaaacaaataca

SEQ ID NO: 800980 - DNA, 118 bp, Homo sapiens
gctggacgtgggatccacacagctcagaacagttggatcttgctcagtctctgtcagaggaagatcccttgggagggacattgcttgggcctccagactctgtggttgatgtggggag

SEQ ID NO: 800981 - DNA, 100 bp, Homo sapiens
tcctgaagaaaacccttatttccctacgtacaaattccctgaacttcctgaaatccagcaaacttccgaagcacctgttcttcccggagcctatcagcaa

SEQ ID NO: 800982 - DNA, 115 bp, Homo sapiens
gcatcatcaaagaaggagacgtggggtcactggtgtatgtcatggaaggtcctccacagcctgtgaatccccctagacctttcaagcatagtgagcggagaagaagatctcagcg

SEQ ID NO: 800983 - DNA, 100 bp, Homo sapiens
cactactatacagcaagcgactggtgaagtacaaggaggattatgagagatccagagggaagctcattggggcaaaagatgtacagggagattcgcaaat

SEQ ID NO: 800984 - DNA, 98 bp, Homo sapiens
ctctatggagttgaattccactatgcaaggtttgtagaagactatgaacctaccaaagctgacagttatagaaagaaagtggttcttgatggggaaga

SEQ ID NO: 800985 - DNA, 100 bp, Homo sapiens
cagagctgggaaaattgttgtgaacctcacaggcaggctaaacaaggttcttctagcaagacacaaggcagaagaagtgttctatgcagtcaaagtttta

SEQ ID NO: 800986 - DNA, 100 bp, Homo sapiens
ccttcatatctgtttttttcttatgaagcttcttctggttggaaacttgtcaaatttcatcaggcatctccttggaaacaatgccatctttgaatgtgag

SEQ ID NO: 800987 - DNA, 101 bp, Homo sapiens
agagcgcgaatatcgtcatcgttagaaggtactcagtgcagctgctgaccccggccaacttgcttgctaaaatcaacgggaaggacagcattgagaaagag

SEQ ID NO: 800988 - DNA, 100 bp, Homo sapiens
gcattgtttggcattgactgtgctagtggagacacattcacagacaaagccaacagcggcctttctatgactgctgcacttagagctgtgggcaacattg

SEQ ID NO: 800989 - DNA, 100 bp, Homo sapiens
gtggttctgccagtgaggccaatgtggaggaaaaggtcttggcctccaaccccatcatggaggttattcaaggacaccgaaaagccaacaccatggtagc

SEQ ID NO: 800990 - DNA, 103 bp, Homo sapiens
cttttgcagcgacctgcaagaaactccacgaccacattgagttggagcttcttccagaccagctggtcttgcttctggagcatctcttggagcagaagactct

SEQ ID NO: 800991 - DNA, 100 bp, Homo sapiens
gcggagcccggctcccgcaccatggaggaggacgacagctacggcatgcatgtagggaataccggattcataaagagctggatcatcccagaatagttaa

SEQ ID NO: 800992 - DNA, 100 bp, Homo sapiens
cttcggggcacttagcacagcgcctggcgcaaggatggtcgagtactccctggaccttcagaacatcaacctgtcagccatccgcaccgtgcgcgtcctg

SEQ ID NO: 800993 - DNA, 98 bp, Homo sapiens
ctcagcagggatgaatgcaaaagaattcttcgaaaattggcggacaaacataaattgcagagattcctgactgctgacatggccctggtggcgacagt

SEQ ID NO: 800994 - DNA, 100 bp, Homo sapiens
ctggaacagtcatgggccatggcaagcatgcagtaaaccctgccaagagtatcgagatcgttatgattcagaccggtatcgggatgggtatcgggatggg

SEQ ID NO: 800995 - DNA, 98 bp, Homo sapiens
tttaagaaaggacagcattcctgtgacctctgcctaccatccataaaatactcattcccctctcaggaccgcctggcccggtgcaccatgcattgcaa

SEQ ID NO: 800996 - DNA, 100 bp, Homo sapiens
cgcggggagctgaagctgctgcttttggggcagctggtggaatttttgaagaaaatggaatctcgaggccccctttcgtgcgacacggttctgaagatct

SEQ ID NO: 800997 - DNA, 100 bp, Homo sapiens
ctggagatacgcggtgcagctgccgacaccccagcctgttgctgacactagtcatcagaggctccttgaaatgctagatacagagaaggaactgttaaaa

SEQ ID NO: 800998 - DNA, 100 bp, Homo sapiens
gcagcaggggactagcgtgagagcagagcatcctggccagaacaagccaaggagccaagacgagagggacacacggacaaacaacagacagaagacgtac

SEQ ID NO: 800999 - DNA, 99 bp, Homo sapiens
gctgagcgacccagcccgcgagcgagacagctggaaatgatccctattgttttgtggagtttcatgagcatcgtcatgcagctgcagcattagctgcta

SEQ ID NO: 801000 - DNA, 98 bp, Homo sapiens
ccaatgttggagccgtctgcaaagtgtccccggcaagaaggaatagccaggccagaagaaggaaggcctgtggtgagtgggacaggaaatgacatcac

SEQ ID NO: 801001 - DNA, 98 bp, Homo sapiens
gggggccatcgtcgccaccgccatcctctcaggcatcacctcctccctgactgggaactcgcttggccgcaatgactctctcatcacttttgtgaaca

SEQ ID NO: 801002 - DNA, 98 bp, Homo sapiens
tgtagataagcaactggattttttaactgaagatagtgcctttcagccctaccagagtatggtgtttgcgaaaacttgcggaagctggagatcacagg

SEQ ID NO: 801003 - DNA, 99 bp, Homo sapiens
aggactaagagaagtcacaaaacagcagatttcccaagagcagcggaaaatgatccagtcacaggtgaacctatgggtcgtggaacaaaagttatccta

SEQ ID NO: 801004 - DNA, 98 bp, Homo sapiens
aaggcccagccaatgaagatgaagacataggaggctgtctcctggttcggacatctatgtgacggtctcatccatggctttagcaagatcccagtgtc

SEQ ID NO: 801005 - DNA, 99 bp, Homo sapiens
cttagcccagctccagtgggcgggtggcaggcaggatggggaagcagaatagcaaactggcccctgaagtgatggaggacctggtgaagagcacagagt

SEQ ID NO: 801006 - DNA, 100 bp, Homo sapiens
acaggagagctggctgcagtaaaaatcattaaattggagcctggcactttaaagaggaggagacctccacagcccattcagcaaccccagcgtcagcggc

SEQ ID NO: 801007 - DNA, 98 bp, Homo sapiens
acgccgtcagtcctttcagcttcagcctgctcaagaactgcagcattgcagccgccaagacggtgcctggtagtggatgaggctgaccggatggttga

SEQ ID NO: 801008 - DNA, 99 bp, Homo sapiens
tttcatgtgttttctgcatgggattattaacagcatccattttcttgggcgtcaagttagtgagttgaaactcttggaggaagcaaccatttcagtctg

SEQ ID NO: 801009 - DNA, 100 bp, Homo sapiens
aacgagcagctcatcacccagtacgagcgggagaaggcgctgcgcaagcacgctgaggagctacctgtgagatgtgtgggatggttggcgtccgagatgc

SEQ ID NO: 801010 - DNA, 99 bp, Homo sapiens
aaaatatggtgtgaaggttggcctgacaaattatgctgcagcatattgtactggcctgctgctggcccgcagggttctgtccatgagacctaggattca

SEQ ID NO: 801011 - DNA, 98 bp, Homo sapiens
tgatgattccgttggagtagaagtgtccagcgacagcttctgggagcctcaagtactacagccttccagcagccttcccagacccacagatcacaccc

SEQ ID NO: 801012 - DNA, 99 bp, Homo sapiens
aaaaggtgtatatcggaaaattaaatatgatccttgttcagctggtggagctgtctaaggctcaagatatagaagcaggagatggcaccacatcagtag

SEQ ID NO: 801013 - DNA, 100 bp, Homo sapiens
ggagatcgaggacgccgagaagtactccttcatggccaccgtcaccaaggcgcccaagaaggcttgtgcagacataagagccagttcagtgttttggcag

SEQ ID NO: 801014 - DNA, 100 bp, Homo sapiens
tgtggatgattatcgattacgggtccccagtcccaagcggaagttggaagaaccagttctggagttcaggcctccccgaggagcaatcactcaaccactg

SEQ ID NO: 801015 - DNA, 100 bp, Homo sapiens
gattgtggttcagttggcacaaccgtacatgattgggtcaatacggtcttcaaagcttcacctttctccaaaggcagatgtgaagaacttgatgtcttat

SEQ ID NO: 801016 - DNA, 99 bp, Homo sapiens
ctgcgtcaagcaggtgccccgaataacgttgtatcagagtaagatggacggtagctttgattgtgattgtggtgagctggagccacctgatcactaaca

SEQ ID NO: 801017 - DNA, 100 bp, Homo sapiens
cctcaaccagatgacccttacattgcagacctccttcaagtggctgataacaggcgcagttgtgtagcagttgagtaatgctggttagctgttaaggtgg

SEQ ID NO: 801018 - DNA, 100 bp, Homo sapiens
aacacagatgtgactactgaagaaatgaaacaagaagaaaatttgagtgtaccgtttatgacattaatgctgataagaatatctcttctgcacagattgt

SEQ ID NO: 801019 - DNA, 99 bp, Homo sapiens
caagatggagccaggaggagagcccacaggtgctaaagagagcagtaccctgatggagtcccttgcaggcagttccggcgaggggggagcctcagcagg

SEQ ID NO: 801020 - DNA, 98 bp, Homo sapiens
agatggatgagaggaggcggcagaacattgcttatgaatatctgtgccacttagaggaagccaaaaggtcagaatggcggcagtggagcatcgtcatt

SEQ ID NO: 801021 - DNA, 100 bp, Homo sapiens
aatatacagcttattaaagacaactgggaagacagacaagtaattgttgaaattatttctcaaactctgaggctgcggagttcacacattgaaatctgtc

SEQ ID NO: 801022 - DNA, 100 bp, Homo sapiens
agaagaacaagccagaaaaacatttgagagagccatgaaactggaacaggagtttactgaacatttcacagagttcccgattttgaaatgctgggctcac

SEQ ID NO: 801023 - DNA, 100 bp, Homo sapiens
tgtgtttgtgaaacagagaaagataggcggccatggtccaaccttgaagaacgtgaagctcttggagcaatttgtctgcgcccacacgggtatcatcttc

SEQ ID NO: 801024 - DNA, 98 bp, Homo sapiens
aaaacagttcattcatattcagcgttatatgtcaccacacccatctccattaggagccccagagcacgtctccagccctatgtctggaggaggcccaa

SEQ ID NO: 801025 - DNA, 99 bp, Homo sapiens
tgcaattcataatggagctactgtactggctattggaaggaggagattctgaagataaggagccaggcccagacatgtccgtccttgtaagttaaaagc

SEQ ID NO: 801026 - DNA, 98 bp, Homo sapiens
atgcactaccacctgcgggagatcatcatctgcacctaccgccagatacagcatcatgcaggcctgctgggccttggagcccacccacagacccacct

SEQ ID NO: 801027 - DNA, 100 bp, Homo sapiens
gtttctaatatctcgaaatgcggctgcttttcaagagtcattcaggagagcaggaaagaaaaggccatccctgtggatgtcgcgctgccacagaagtcca

SEQ ID NO: 801028 - DNA, 98 bp, Homo sapiens
ctgcatatcagagatattacagtttacaggctgactactggaaggaggcttttaggcgtttgggtaatggggtgtctgatgacctgtcaagtgaagaa

SEQ ID NO: 801029 - DNA, 100 bp, Homo sapiens
aagtggagcaccgatgatgtgcagatcaatgacatttccctgcaggacttgcaccttcgagatcccctgtgtttacccagctggaggatgatgaacagtc

SEQ ID NO: 801030 - DNA, 100 bp, Homo sapiens
gcgagaacctgccgctcatcgtgtggctgctggtgaaaagcttctccgagagaataccgtagcagtaggcaggacagttccaattcaacaaaaacctctt

SEQ ID NO: 801031 - DNA, 98 bp, Homo sapiens
cggtctctccctgaagcccaccggtccccaacgcatcatgccagggagccaagcgtcctgcccggccagctggagataagatgggtagactgctactt

SEQ ID NO: 801032 - DNA, 120 bp, Homo sapiens
cgacctggagaaggcgaagcccagcttgctcgggtctgcacaacagaaaatggacccaagtggggtcaaagtgctggaaacagcagaggacatccaggagaggcggcagcaggtcctaga

SEQ ID NO: 801033 - DNA, 98 bp, Homo sapiens
tccatcgaaaattagccattgaacgagctaagccttatcatctgtcaacatcatcagtttttcgattaggccgcctgatcttcgacaacctaaagaag

SEQ ID NO: 801034 - DNA, 136 bp, Homo sapiens
ctattgtttatactcccactgtgggtctggcttgccaacaatatagtttggtgtttcggaagccaaggttataaagcagcagagacaacacacaacatcaacaatgcatttggcccaggaactgctaatgaacata

SEQ ID NO: 801035 - DNA, 100 bp, Homo sapiens
ctcaaacttcgatgagtttccagaatctgatattcttaagccaacaggtgctactttgaatgataaggatgatgactctcttcctgcagaaactggccaa

SEQ ID NO: 801036 - DNA, 100 bp, Homo sapiens
aaataatccagagatttccacagaaggactgggatgatacaccttttccacagggaattgagttgtgctcaacaggaaccttggattatattttacaacg

SEQ ID NO: 801037 - DNA, 100 bp, Homo sapiens
aaacagcagatggctcgagaatacagagagaaaattgagacggagctaagagatatctgcaatgatgtactggcctagccgcccgtgactctcacactgt

SEQ ID NO: 801038 - DNA, 100 bp, Homo sapiens
catgcattcgctgcaggtgttggcccaggtcactgggaagagtgtcacggtgatcatggaaccccacaaagagactgaaactgttgaggagcccatggag

SEQ ID NO: 801039 - DNA, 100 bp, Homo sapiens
atgacatcgtgaaggttgaagtctgggatgtagtagacaaaggtgtgctcctggacatcctgcagcggaccggccacaagggctacgtggccttcctcga

SEQ ID NO: 801040 - DNA, 98 bp, Homo sapiens
cagatgacttttcctatgggatgcacagggtggaaacaagctgctctcaggtttaccgacaagactgtgaaactttcgggatggtggtgaaaatgctg

SEQ ID NO: 801041 - DNA, 100 bp, Homo sapiens
ggaaatcttcaagaagatccggaggaaaagggagtttcgggctgatgctcgggctggcagtgatggtgaaagcataggaaactgccccttttcccagagg

SEQ ID NO: 801042 - DNA, 100 bp, Homo sapiens
atctgtactgccggcacctcaaccagatgaggaagtacaactttgagatggtggccagcagagatctgcaaccccaggtctgtgccactgaacatccagg

SEQ ID NO: 801043 - DNA, 99 bp, Homo sapiens
aaagtgaaccagtggtagaaagcacagaaactgaggggacataatcatcactcagtaggacattcagtcagaagaaggctgctattgaaagagagtatg

SEQ ID NO: 801044 - DNA, 98 bp, Homo sapiens
ctcctggaccaatgcatcttcccaccaccttaaaccactgcccactccatgctgggaatagacaactctcctctgaggctgaggctaaccagattatg

SEQ ID NO: 801045 - DNA, 100 bp, Homo sapiens
gtgtgctgcgttcacaggtgtttctgcggcaggacatggatttgattgacatactttggaggcaagatatagatcttggagtaagtcgagaagtatttga

SEQ ID NO: 801046 - DNA, 100 bp, Homo sapiens
cagtgctgaagcctttaaatgcagcatctgcgatgtgaggaaaggcacctccaccagaagcctccccagctttctgaggatgatatctggctaaaaagcg

SEQ ID NO: 801047 - DNA, 98 bp, Homo sapiens
ctgaatccagtaccaaaaacgtcaacaacagttttacggtacctgctggaacaggacttcccaggcatgaggattgggcctgagcccaccacagactc

SEQ ID NO: 801048 - DNA, 98 bp, Homo sapiens
aataacccttgatcctcctcctaattgcaggtgaatctgatcttcataagaactcagaagacttagtaaatgctgaagaaaaacatgatgagacacat

SEQ ID NO: 801049 - DNA, 100 bp, Homo sapiens
gggaataagcaaaagaaacgttatttttcaacctgtggcagagctgaagaagcaaacggattttgagtttctctggaaacccccctggtaagtgtggagg

SEQ ID NO: 801050 - DNA, 100 bp, Homo sapiens
tgtatcagatattacaaggactcgcatttattcacaaacacgttctctacagaaagaaccaatgaacccaataggaacaaattctctgtggaaaacaaag

SEQ ID NO: 801051 - DNA, 98 bp, Homo sapiens
cggccacagtggccggcgtacatgtgaagcagcagtgggaccagcaggttgtccttctattcaggccactcttcgttttccatgtactgcatgctgtt

SEQ ID NO: 801052 - DNA, 98 bp, Homo sapiens
agattttagcataactcaattcgtaaggaatcttggacttgagcacctaatggatatatttgagagagaacagtcacccacaaaagctgtatataatg

SEQ ID NO: 801053 - DNA, 98 bp, Homo sapiens
cggttggagagggcagccagccgagccaacactgtgcgcagcttccaccatgaagtttgaagaaaacaggtctgaaacaaggtcttacccccagctgc

SEQ ID NO: 801054 - DNA, 112 bp, Homo sapiens
aacccagaattcaaacagatatactaaagcaggctaccaaggacagagtcagtgatttccataaattgaagcaaaatgtggtcaaaggtgaaaagattcttccggtatttga

SEQ ID NO: 801055 - DNA, 99 bp, Homo sapiens
ctggaaacaatggcatttacagaaagagtcaacagcagtggcaacaggatgtacagttacccagcacgtgtacctcctcctcctcctattgctcgggct

SEQ ID NO: 801056 - DNA, 100 bp, Homo sapiens
aaaagggaggcgccttggcgctccggctagccgtgggcgcccctctgcccctcgcagcccggctcgattgatgaactcccagagggcgctgtgaagcctc

SEQ ID NO: 801057 - DNA, 100 bp, Homo sapiens
gctggtcctgctcggctgcctcctggcctcgctcctgttctcaggacaagcagataaccatgatgactacacagacttctactatgacatttgctccttt

SEQ ID NO: 801058 - DNA, 100 bp, Homo sapiens
ggatacaatcactacggacacaggattcatgcgagagaagaagaaggaggttcctgctgtgccagaaacccttaagaaaaagcgaaggaatttcgcagag

SEQ ID NO: 801059 - DNA, 100 bp, Homo sapiens
ctagctattgccttattttttctcatggatgttcttcttcgagtatttgtagaaggcaatgtggacctgcaagctgttgtgattttcgaacttgtgtact

SEQ ID NO: 801060 - DNA, 100 bp, Homo sapiens
cgcctcagggcgcctcggaaaccaggagatcatgaggattaaagcaaggagagccaatcatgactggcaaaacacagaccagcaacgtcaccaataagaa

SEQ ID NO: 801061 - DNA, 100 bp, Homo sapiens
cactcatgtctcactgccccactcagttaatacactgttaaatgtgaaattaagtgagacagaaaatggcaagcatgtctctatattggatctacctggc

SEQ ID NO: 801062 - DNA, 100 bp, Homo sapiens
agaagttcatcttcctgtagaaaaagtagatgttatcatatctgagtggatgatgctgcagttggagaagaaacttgaacgtgaacttgaggatgatgca

SEQ ID NO: 801063 - DNA, 98 bp, Homo sapiens
acttctcaatcccaagtggccaaagaccttcactgcctggtgtaactcccacctaaggaaagccggcacccagattgagaacatcgaggaagacttca

SEQ ID NO: 801064 - DNA, 100 bp, Homo sapiens
gaacgcgctaaggcaaagcacctggccaggtcagagcagcccaccatgggatggggagggggtggaggctgcaccccgcgcccacccatccaccagcagc

SEQ ID NO: 801065 - DNA, 100 bp, Homo sapiens
gtaggaaatgaacttggatttcattatactgcaagtggccctttggtgcgttcttcatataaagcaggatccattctggaacagaatgaagaagccactg

SEQ ID NO: 801066 - DNA, 100 bp, Homo sapiens
ttgatattggtgcccagggagaaccccttggatatcgccaggatgattcaactttcacgtatcaaaccaccctgggtggttaaaggtcagcccacttacc

SEQ ID NO: 801067 - DNA, 98 bp, Homo sapiens
ggactgtgccttggacctaatgaggcgcctgcctccccagcaaatcgagaaaaacctcagcgacctgatcgacctggcacagaccccacaggctcctc

SEQ ID NO: 801068 - DNA, 98 bp, Homo sapiens
cggccgggccgtcccggcctgcgcagcctgagatgttgatggcatggacctgggcaaaaaggtcagcatccccagagacatcatgttggaagaattat

SEQ ID NO: 801069 - DNA, 100 bp, Homo sapiens
ttcccttccgttttcgcgtggttcttttgcaagggatcagtgtccttcagggatgtggctatcgatttcagcagagaggaatggcggcacctggaccttt

SEQ ID NO: 801070 - DNA, 100 bp, Homo sapiens
ggagtgacgcatccttacagatcccaaagcgttgaataaacggttgtacaaagagaacaactctgctcatggtgattacatgcaaaataacgagagcagc

SEQ ID NO: 801071 - DNA, 100 bp, Homo sapiens
gcagccctgcgtcaggaattcagcaacctggaagaggttcctatatgatagtggactcttcagatcacgaccctggagaaaaagccagacttcagctgcc

SEQ ID NO: 801072 - DNA, 98 bp, Homo sapiens
gaagggaatcgcaaggctcttccctgaccattttctactgtccctgcgcgaggcacgggcgaaacgcccacgctgggcactctggacttctacatggc

SEQ ID NO: 801073 - DNA, 110 bp, Homo sapiens
gggaagtggaccgccatctccgccctggaatacggcgtacccgtcaccctcattgtcaccaggagactaaagtccatcaaaaacatccagaaaattaccaagtctatgaa

SEQ ID NO: 801074 - DNA, 99 bp, Homo sapiens
atggctgctcttgtggatctggctggagaggaagccagtgccaagaagtaagctttcccgccagagcgccacagagatcccgctgcccatgctgcctct

SEQ ID NO: 801075 - DNA, 98 bp, Homo sapiens
gaagcatgggaaggaggccgagccgggatctcaggtcctcgggggcggcggccacgccaaggacgggaatccatgggaaagagctatgatgggagagc

SEQ ID NO: 801076 - DNA, 100 bp, Homo sapiens
cgggggctcagagatccaagtgcgcgccctggcgggtccggaccaagaagtgtatgctgacttgtaaagtgaagaagccagtggtgctgcgggtgttctt

SEQ ID NO: 801077 - DNA, 100 bp, Homo sapiens
agtacttgcactcgcgggacgtggtataccgcgacatcaagggaccattgcaatttagagatgtggccatagaattctctctggaggagtggcattgcct

SEQ ID NO: 801078 - DNA, 100 bp, Homo sapiens
gcttcaaggtgtagaccttttagccgatgctgtggccgttacaatggggccaaagattcatctgaaaactacattaagatgaagacctttgaaggtttct

SEQ ID NO: 801079 - DNA, 100 bp, Homo sapiens
taacattcagcaagcacatagtggagcaaatggtggctttcattggaaacagacatcgtggtcttcagcatctcatccacagcaccaatggaattctcaa

SEQ ID NO: 801080 - DNA, 98 bp, Homo sapiens
ttgaagctggaaaatatactgctcgatgacaactgcaatattaaggaattttctacttctggtcatgcttacactgatacagggaaagcatcaggcaa

SEQ ID NO: 801081 - DNA, 100 bp, Homo sapiens
gaagctgaatttatcctgagcaggcagagagcagaagatattcacagacatgcggaatttgaggctcagtagatgaaggcgtttctgagggcttgcctac

SEQ ID NO: 801082 - DNA, 100 bp, Homo sapiens
gctgaaggatgaaggagccagtttggctgaaaataaaaggtggtcttcgaggccctgcacaatctggagccccgtggctacgtcgtggggtggatcatcg

SEQ ID NO: 801083 - DNA, 100 bp, Homo sapiens
ggggactctggccgcggctactacctggagatgctgatcgggacccccccgcagaaggcagaagactgatttttggaaatatgtatttgggagacagtca

SEQ ID NO: 801084 - DNA, 98 bp, Homo sapiens
tgactgttgaagtgaagggtccctatgaatacctcacacttgaagactatcccttgatgattgaatgtgccataccgaatccgtgtgcggctgtccag

SEQ ID NO: 801085 - DNA, 99 bp, Homo sapiens
gttgaagagttcaactttcccagaagttgttctaacgctgcctttgctttaaaacagtattacttgcgaggcgtggagctatttcctatgacagttctg

SEQ ID NO: 801086 - DNA, 99 bp, Homo sapiens
tactttcatcagaagcagtaaagaacattaaccaggtggtatttgttggaaatttcttgagaattaatacgatcgccatgcggcttttggcatatgctt

SEQ ID NO: 801087 - DNA, 100 bp, Homo sapiens
ttcgtgacctgaagatactgggaaatccatagctaagatgccaggaccccctgaaagcctagacatggagttaaagttcctcgtaattttcgcttgttgg

SEQ ID NO: 801088 - DNA, 100 bp, Homo sapiens
taaaagcaaccctgacttcttgaagaaagacagatcctgtgtcacccggcaactcagaaacatcaggtccaaggcgtcacaatgtagcagggaccccagg

SEQ ID NO: 801089 - DNA, 101 bp, Homo sapiens
tgcgggtgcgcaaggcgtccaggagtgacctggggctgtggagagcgacccgtggccttgtgtttcagggaaatcctcattgacgattcaatttgttgaag

SEQ ID NO: 801090 - DNA, 99 bp, Homo sapiens
tctggaatgaatgtggctcgtctgaacttctctcatggaactcatgaggtatgccattttgaagactgagacgttggagttttatcctagaggataaag

SEQ ID NO: 801091 - DNA, 100 bp, Homo sapiens
aggagacgcgggcggctagagccggagtggggcgagccgcggaacccggccgggagccgcgcgaggcgggaaaagaagatctcccggagcagtgccctga

SEQ ID NO: 801092 - DNA, 100 bp, Homo sapiens
atctgatgagcttctttcttctggcatcattaacggaccttttaccatgaatagttctactccttctacaggttgattcttcaccacactgaaaccatta

SEQ ID NO: 801093 - DNA, 98 bp, Homo sapiens
agaaactgaggttcagagaggttaagagactccactgaggtcacacagccggtaaatattgcaacttcagcaacttcaaatattgaatatgcccacgt

SEQ ID NO: 801094 - DNA, 100 bp, Homo sapiens
tctggcagtgccaacagtcaggaggaagctcatttcacacgacatgatttctttgaatctttgcatagaggtcaagtggatgatgccttctcacagacag

SEQ ID NO: 801095 - DNA, 100 bp, Homo sapiens
agatgaaccggatgatccagaggctgagagccgagattgacaatgtcaagaaacaggcttcaacggaccacaccaaaatgccatctcaaatggaacacgc

SEQ ID NO: 801096 - DNA, 100 bp, Homo sapiens
ggtcgcctagtgtcatgaccagggcgggagatcacaaccgccagagaggatgctgtggtaaagtcagtgataaatcttttgtttgctgcatatactggag

SEQ ID NO: 801097 - DNA, 98 bp, Homo sapiens
agctagtaatttgccttctggattatcatatactcctatgaaaggaggaatctccaatgtatggtttgacagatttaaaataaccaatgactgcccag

SEQ ID NO: 801098 - DNA, 100 bp, Homo sapiens
ttcaagttaatccaggtgagactttcacaataagagcagaggatggaacacttcagtgcattcaaggtgcggtggctactaaagttcgaaggcacgatat

SEQ ID NO: 801099 - DNA, 100 bp, Homo sapiens
ttgctatcatctatgacagtcctgttacaaacactaaagcaacctttacctataaagaagttctggagcaggttgtcccagttttggtgcatctcctgtc

SEQ ID NO: 801100 - DNA, 100 bp, Homo sapiens
tcagatctggagcatcggctgcaggggtcagtgatggagctgcttcaggaccgaggtgatgagttcacatacactggaagcggtggtaaaaatcttgctg

SEQ ID NO: 801101 - DNA, 100 bp, Homo sapiens
cccaagacttcattttacagcaaggaagtgcctcaaatgtgcatccctggtgctgttccagaattcaaagaagagaaactgcagctgcaaccaaaaccac

SEQ ID NO: 801102 - DNA, 100 bp, Homo sapiens
gacaccccggaaaaccttcgcctcaagcaacagagtgagctccagagtcaggcttttgatattatgagagtgacacatggcagagaacacagcctgattg

SEQ ID NO: 801103 - DNA, 100 bp, Homo sapiens
tggtgcttttgaaccactggaaagtgaggaattttgaagtacaccgtggtgacattgtatcattggtttcctctgtgacgagggtgcaggtatctctggg

SEQ ID NO: 801104 - DNA, 99 bp, Homo sapiens
tctcagtcagagtaggaaataattttcacaaccttcaagaaattcgggtcaccggattgaaactgtctcaggaccttgatgatcttgccattctctacc

SEQ ID NO: 801105 - DNA, 100 bp, Homo sapiens
tgggaggttctggaatgggaggctacggaagagatggaatggcctactcaatttgaagacattgaggatgaagacctttatgatgatccacttccactta

SEQ ID NO: 801106 - DNA, 99 bp, Homo sapiens
cgacatgttgcttttcgtggaggttaatttcacctaccagtttttgaaaaagaagttctatatatttagccaatttatgtatgatgaacacatcaaatc

SEQ ID NO: 801107 - DNA, 99 bp, Homo sapiens
tgacagcacaggtcacagtaaggccaaaaatgtgcatactcacagagttagagagagggatggtggtgaaattcgatgctactgtgatgctgcccactg

SEQ ID NO: 801108 - DNA, 99 bp, Homo sapiens
tcgacgtcgtgatccagaagtccagagctgaggactgcctgtttgcagttaaagccttccatctgaagtatgatgaagttcgtctggatccaaatgttc

SEQ ID NO: 801109 - DNA, 100 bp, Homo sapiens
gcggatctggaggagcagttgtctgatgaagagaagattttgaagacattttggctacaatatattttttgatgcacaagaatcccaaggtccaattgtg

SEQ ID NO: 801110 - DNA, 101 bp, Homo sapiens
tcagctgatgaagcttctgaaccatccacacatcataaagctttaccagagcctggcccaggccccccactgcctgcagctcccttccggacattctgggt

SEQ ID NO: 801111 - DNA, 98 bp, Homo sapiens
ctgagacaaccacttctggtggttgccactcacctgaggatgaatgggggacaagttgtccacatgacttccttggtgcctacaaactacagcatgac

SEQ ID NO: 801112 - DNA, 100 bp, Homo sapiens
gggccgcctgtggagcgctgcggggtcctcagtaagggacttgccatgaggtgttgaagccttgtttcactgagttggagagactggacctaaatggcgc

SEQ ID NO: 801113 - DNA, 100 bp, Homo sapiens
gactcgccggcttttagcactgcaattcactcagcaaactgggactgttggtcaccctacctggcagccagtgataagagctttgtcaagcaagttggag

SEQ ID NO: 801114 - DNA, 98 bp, Homo sapiens
aaaatgtccaaatcattaaagaactacattactattaagtccatctcaggttttgcgcacagctgcttccagtatgccatccagaagaaatggccgct

SEQ ID NO: 801115 - DNA, 100 bp, Homo sapiens
accgctgctaaattgtcaactagtgctaaaagttgcagaggaaagtggtcgcttatggtcagaggagcagcctgctcaccctctccaggtgggggctgtg

SEQ ID NO: 801116 - DNA, 99 bp, Homo sapiens
aggagattgcgagggagcgatgcggtgcagcgcggactaccgaccagactcccggaaatcatgttggtaggatcccagtctttttcgcctggagggccc

SEQ ID NO: 801117 - DNA, 99 bp, Homo sapiens
ttctcgacctgctaacagaactggaccttttcggacagacggcggacaatgcccactgctctgtttcaccggcttctgcttttgcaatagccacagctg

SEQ ID NO: 801118 - DNA, 100 bp, Homo sapiens
ctcaatctctggaaaaacttcttgccaaccaaagtttctcagtttgggtgcagatcatttgctttgctttttgatgatatagaccataatatgtgtgcag

SEQ ID NO: 801119 - DNA, 98 bp, Homo sapiens
gcgcggctgcggggctccagggccgccccgcccgcaggtgctatgctgtgggccccgctcaggtgccttatgcctctggcatgcccatcaagaaaata

SEQ ID NO: 801120 - DNA, 100 bp, Homo sapiens
gacagtgaggaagtccggcagacttgtggctacacttctggccagtttgacctggcagagatgtcggcttatttataggaattgcttgaagccagagtca

SEQ ID NO: 801121 - DNA, 100 bp, Homo sapiens
gacctctacagagaagtgatgttagagaattatgggaacgtggtctcactgggctatggaaagggcaaatggaatggagctggatggtagaagaattcgg

SEQ ID NO: 801122 - DNA, 100 bp, Homo sapiens
gttttttgtaacgttccacggtattcggaattggctacagaacataataagctaatggcagcattagccgctgttgggcctcctaatcctcgggcagatc

SEQ ID NO: 801123 - DNA, 50 bp, Homo sapiens
aattcgtcaagatgcagtaaaagatattctatcctatcacaaaaggagtc

SEQ ID NO: 801124 - DNA, 99 bp, Homo sapiens
tttgacaatctggttatttaaaaatcatcgattccgcttcttgcatgaaactggaggagcaatggtgtatgagttttccgtctgatgaaggttggccat

SEQ ID NO: 801125 - DNA, 98 bp, Homo sapiens
agtacatgcggatccaggcccagcagcagccattgatgtgacctacttgctggaggaaggatcaggcaggaaactgcgaaggcgtactttgtttatcc

SEQ ID NO: 801126 - DNA, 100 bp, Homo sapiens
agaagatcggcttgaaattaccaactgctttcctttccctcagcacacagaggatgatgctgactttgatgaagagcttctcgaaacaagtctgagaaga

SEQ ID NO: 801127 - DNA, 98 bp, Homo sapiens
ccttctggccccagggcagtgtgcagcctggattttctttgctaagaaacagatgattatgctgagattatagatgaagaagatacttacaccatgcc

SEQ ID NO: 801128 - DNA, 100 bp, Homo sapiens
tggagtaggtcctgacactgtccataaatgtgcagaggtaatattaatgaagccaggaatatcttgaaaacatttgaagaatgtgttctaggattggcaa

SEQ ID NO: 801129 - DNA, 100 bp, Homo sapiens
cagaaacagatgccattcggtttttggttgggacgcagtctcttaaatatgataatcagacactggccaaaagaagaccctagacaagaaagatggaaga

SEQ ID NO: 801130 - DNA, 100 bp, Homo sapiens
ccttagcctgcctgtcagcactgagcatgatcacagaaccacatattcttctctttagacgacctcttccaaaagatcaacaaaaatgaagtttatctgg

SEQ ID NO: 801131 - DNA, 99 bp, Homo sapiens
tatgacttgtattcttaaatgggcagaggtaaatcttacaaaccattgtggttttatgggaggactacaaaaaaacaaaagcactggattgaccactcc

SEQ ID NO: 801132 - DNA, 98 bp, Homo sapiens
cttaaatggggatctggtggtcgtgaaactgcttcccgaggagcattggaaggtgtctggagtagatttgcagaatgcctcacacagcgaagcagttg

SEQ ID NO: 801133 - DNA, 99 bp, Homo sapiens
ggctctctgagatgcaagaagaggaagtagaaataagcctccctaggtgggtttggaggatttgggacaacatctacaactgcaggttctgcattcagc

SEQ ID NO: 801134 - DNA, 100 bp, Homo sapiens
tatatgcagagcagcctgcaaaaggagaggtgtggagcgaagatgtccgaaaactggcttagagaagaaaacgcaggttctgcagcctgaggagaagaag

SEQ ID NO: 801135 - DNA, 100 bp, Homo sapiens
cttgcaagtttacgacaaggaggttcagtggacccttggagccatcctctacaggacccgctttctaccattaaggttatacattggctcttcaaagacg

SEQ ID NO: 801136 - DNA, 100 bp, Homo sapiens
gccaaagcctgcccagacggctcacctgtgcgggatggaacaaaagcggaaaccctttctgtgagtgggattccaaatgctaggaagctaggggagccta

SEQ ID NO: 801137 - DNA, 100 bp, Homo sapiens
gcctcctcttctgggctgtgctggtcacagccacactctgcaccgctaggccgtccccgaccttgcctgaacaaggatgataatgaagataattcaaatg

SEQ ID NO: 801138 - DNA, 99 bp, Homo sapiens
tagccctctacttttcaagacaccaagtgagaggccaaccagcctggagcattggtaagcgtcacactgccaaagtgagagctgctggagaactcataa

SEQ ID NO: 801139 - DNA, 114 bp, Homo sapiens
cggacctttgagcatacaccgagagagtgaggagccagacgacaagcacacactatggcgctgaaacggattaataagcactattggaaataattatgaaaaatggaagcacgg

SEQ ID NO: 801140 - DNA, 100 bp, Homo sapiens
ctcaaacaggagctggagcagctcaaagaggaaactggccaagaagcggaaagagaccatgagcagcacccgacaggagatgactgtgatggtgaactca

SEQ ID NO: 801141 - DNA, 99 bp, Homo sapiens
gaccgcctggagaagctgctgcgctgctcgcgttgatattttggtaaaagacctcagtgggattgtagaggggcatcaaatcttaatgaacttcaccag

SEQ ID NO: 801142 - DNA, 98 bp, Homo sapiens
tcacttccccggggtgtaataatgttaactgagaaatgagccgtcagactgctacagcattacctaccggtacctcgaagtgtccaccatcccagagg

SEQ ID NO: 801143 - DNA, 98 bp, Homo sapiens
tgtagggagcatagctgctacactgaagatgaagcaaggcccaatgacccaggcgcgggtcacagaaagtcgagagagccaaatgacgattgaggaga

SEQ ID NO: 801144 - DNA, 98 bp, Homo sapiens
ggagaagcagagtttttgcagaaaatcctgccttgcttcgttgggcctatgcaagaacaataaatgtctatcctaatttcagacccactcctaaaaac

SEQ ID NO: 801145 - DNA, 98 bp, Homo sapiens
tcttttcctccgtccgtggcccgcctgggcggccttgttctttccgcagcagccagatccagaatataagaagtttttagaaacctactgtgtggagg

SEQ ID NO: 801146 - DNA, 98 bp, Homo sapiens
aggacatgcgggagagagaatgagccagagggacacgctggtgcatctgtttgccggagggctaggcagctggaagagaaagaccgagtgctaaagaa

SEQ ID NO: 801147 - DNA, 98 bp, Homo sapiens
gactcttggtgagcgaggagctctccgagaagcaatgagggaagaatggacagaagctatccaggctgtagcagacagactgcagaggcaagaagagg

SEQ ID NO: 801148 - DNA, 100 bp, Homo sapiens
tcgccaggtgctggaggacttcccaacggttcctagaagccaaaccaaactgacaataatgcttgaaaaattaggaatggattatgatgggcggcctcac

SEQ ID NO: 801149 - DNA, 100 bp, Homo sapiens
gcctttctgtgagtgcgacaacttctcctgtgccaggaacaagggagtcctctgctcaggtgggagagataaacgtggaggtcccattttaacgtttccg

SEQ ID NO: 801150 - DNA, 100 bp, Homo sapiens
accttggtcttggacttcttacctcaagaacttcacaggtgcccaggccggagtgcagtggcgtgatctcggctcgctacaaccaccacctcctagcagc

SEQ ID NO: 801151 - DNA, 100 bp, Homo sapiens
aaatcgctgagaagcacctggatattcctaaaatgttggatgctgaaggagaaaaggttctgcaggacgatgagttcacctgtgacctcttccgattcct

SEQ ID NO: 801152 - DNA, 100 bp, Homo sapiens
atacatgcaaagcttccaatgagtatggcagtgtcagctgtacagccacactaactgtgacaggaaaagagcactggttgccattggtacccatgatttg

SEQ ID NO: 801153 - DNA, 98 bp, Homo sapiens
aactcctcttatggcagcatttagaaaggcagtgaaatcaactgtgcagaccatcactgttggaggagtgagcacatcacagtttaagacaattattc

SEQ ID NO: 801154 - DNA, 98 bp, Homo sapiens
ttatgcagatcttcaattccagaactccagtgagatggaaaaaatcccagaaattggcaaatttggggaaaaagactgtttatgaccagtggttcatc

SEQ ID NO: 801155 - DNA, 100 bp, Homo sapiens
cagcattaaaagattatgcactcttgactttaccagccgaattttctagtcagcttcctccagatggctcatcatatgcccgaagctcagtggttacggc

SEQ ID NO: 801156 - DNA, 98 bp, Homo sapiens
tataagcctgttattgaagacttaagcatggaattggccagaaaatgcacggaactcattagcgattttgtgaagaaatatgggaacctttttagctt

SEQ ID NO: 801157 - DNA, 98 bp, Homo sapiens
aataagtgttttaagaaagtggacaaagagaggagtcagtatgactatgaatatgatgaaaatggtgacagagtcgttttaggaaaaggcacttatgg

SEQ ID NO: 801158 - DNA, 101 bp, Homo sapiens
ctcaattgttttaggggccagcagatgcaggaaaatttcgatattgaagtgtcaaaatccatagatggaaaagatgctctgaacagcaacatggggtgcaa

SEQ ID NO: 801159 - DNA, 100 bp, Homo sapiens
tacaatctaccaccttattcagtatttgtgtggaagtaatcgaaaagacaacatatttattgatcctggataccaaacatttgagcaagaattgaataaa

SEQ ID NO: 801160 - DNA, 113 bp, Homo sapiens
gattacagagtataacaatcagtgccgagcaattgtgatgagatattctgctgagtggaaggaattacatgaacgacagccttcgcaccgacgtcttcgtgcggttccagcca

SEQ ID NO: 801161 - DNA, 100 bp, Homo sapiens
ggtctctgtcttggcacctgcaggaaacaagctcctacttccagaaaaagtgctcctgggactccaggataccaggcctgtagtggtggagacacgccca

SEQ ID NO: 801162 - DNA, 98 bp, Homo sapiens
gccagagcacattggatccgagcagttaccaaggttcgactccagctgcaggagacctctgtgagtgaaagccttcagagggaagctgctaagaagca

SEQ ID NO: 801163 - DNA, 100 bp, Homo sapiens
cttggtgctgtggctgatgcatttcatggctatcatctacacgtttagacgtctgtgccacttgccatgaacatgccacatgccagcaaagagaagggaa

SEQ ID NO: 801164 - DNA, 98 bp, Homo sapiens
ttgctgagactcaacatgacactcctggggtctgagcattccttgctgattaggagcaagttcagatcaggtttttgattggtcaaggagcacatgta

SEQ ID NO: 801165 - DNA, 98 bp, Homo sapiens
aatgctgatgtttgataaaactaccaacaggcacagaggagcaattatgtttgcctctccacattttagaagagaaaggtttgagccaggttgcagtg

SEQ ID NO: 801166 - DNA, 100 bp, Homo sapiens
tactaaggacgagctgatcaagtatatgactgaagaagctttcggaaaatgtgattgatcgaatgaaggaatcctctccatctggttcgaagtctcagcg

SEQ ID NO: 801167 - DNA, 100 bp, Homo sapiens
taggtcctgaatatgaaggtatatttaacacttcattgcagtggatcttagaaaatggaaaagatgttggaataagatttgttcccgacaaggagttttc

SEQ ID NO: 801168 - DNA, 100 bp, Homo sapiens
tggctctcctcgcccctcgttcccttgggaaccgcctgggaactccgccatgtcatccacttcgcccaacctccagcttcgttgtgtggaagatcttcag

SEQ ID NO: 801169 - DNA, 100 bp, Homo sapiens
gcactaacaaacctaattgatcagcagcagcagaaaatcattgccctgcagagtggtttacaagctggatgtctcagtggtacgaacttcagcagcttga

SEQ ID NO: 801170 - DNA, 100 bp, Homo sapiens
catttgaggtctgtcggagctgcccttcagtgtggtgaatggagtgaggccctttacccgctgctgaccactctcaccgactgcgtggccatgatgagtg

SEQ ID NO: 801171 - DNA, 99 bp, Homo sapiens
gcatctgaagaagacaaagaacctttcatcatgggaatgtaagacggacttagatattgcatacaaatttggaaaaactgtggtgagctgtgaaggcta

SEQ ID NO: 801172 - DNA, 98 bp, Homo sapiens
gcggcggcgaatgctgggagagtccgacgagcgctgcactaacgcaggatccggctgccgaaggtcctcgccagtgtcctgaatgacagctcatctac

SEQ ID NO: 801173 - DNA, 105 bp, Homo sapiens
tgcagctgacttgggatcacccagcttgcagcacagcagggatgattctttagatctcagccctcaaggaaatttattgtccagcaccaccacaaattgacaatg

SEQ ID NO: 801174 - DNA, 100 bp, Homo sapiens
attgcagtggctggactggtgggtgctgtcaaccaccaccaagtcctgctgttctttccaaaagttttggaaggtctccatcaagaaaacaaaattattc

SEQ ID NO: 801175 - DNA, 100 bp, Homo sapiens
tgcctgggagtcatggctctggtgtttgccatcaagggacacttagtcggtctggatgaaccagcttcgggagctgggcaagaagctctgcttaaacaag

SEQ ID NO: 801176 - DNA, 98 bp, Homo sapiens
ttttctggaggaaggaaaagagtcctggaatatgaagagacatgagatggtggaagaatccccagcttcaggatgagttagagaaaggtgaacgggac

SEQ ID NO: 801177 - DNA, 100 bp, Homo sapiens
atcctccgaagctatggcctgaagacgggattctttagccgggtaacagatcttgtaaaccaacaacaaaccctggaggagaagatgcgggaagaccggg

SEQ ID NO: 801178 - DNA, 98 bp, Homo sapiens
ggattcgttacagccagagattggactgcagcattccagaaatagagcttttcccacaatctgacccagcctgttgtcctgtctacatacagagagca

SEQ ID NO: 801179 - DNA, 100 bp, Homo sapiens
cagggaggtgcgtctgcagctggcgcggaagagtatcatcgagaaaggagaagaacactgtggacatctaattgaggcccacaaggaatgcatgagagcc

SEQ ID NO: 801180 - DNA, 99 bp, Homo sapiens
tttagttcgtctttcctagagagcaaaagtggtggatcttgatccctgtctttccaagaagcctctagaggaaaagccttcccagccatacagtgcccg

SEQ ID NO: 801181 - DNA, 98 bp, Homo sapiens
cggcgcccctcggcctcggagcaacgagcgcagcgccggcatggatcctgaaaaattagagcgaatccagctccccgtgccaaatgcggccgagaaga

SEQ ID NO: 801182 - DNA, 98 bp, Homo sapiens
acgtatcctcctgcctagcgcagtataaaagaacgtgtggatcactttgctgagtacatccaagatttgaagaactgaaataaatcagctttaaacct

SEQ ID NO: 801183 - DNA, 98 bp, Homo sapiens
aacccatcagaactgctagtggggtcacgagaagagaatgccttctagatgcaaaatcacctccaaaccagaccacttttcttgacttgcctgttttg

SEQ ID NO: 801184 - DNA, 98 bp, Homo sapiens
actaatcaccagaacaaaatgtgcagatcagaccccaacaccaacaagattcttgaaaaactgtgaagaagtgggtttgtttaatgagttggcgagtc

SEQ ID NO: 801185 - DNA, 100 bp, Homo sapiens
agttcattgcaaatctgcaaggggtaaatgagggtgttgatttctccaaggatctgctgaaagaatgctttgtgtggaaagcttcagtgtgagaatgtac

SEQ ID NO: 801186 - DNA, 99 bp, Homo sapiens
catgaacccttccctatgtccaaaaacgtttttcctgataactggaaagttcctcaagatggagactttgactttgcataattcttgggtcatcatttc

SEQ ID NO: 801187 - DNA, 100 bp, Homo sapiens
cccaaacaaccgcagccgctgttcccaggatggtgatccgtgtatatattgcatcttcctctggctctacagcgggaatcatcatccagggacgtgccag

SEQ ID NO: 801188 - DNA, 98 bp, Homo sapiens
gactaatcagattgtgatgaattgtgctgatattgatattattacagcttcatatgcaccagaaggagatgaagaacccccagaggacatgactactg

SEQ ID NO: 801189 - DNA, 98 bp, Homo sapiens
tgaaacctggagtcataccttctatctttgattctccatatcacctacaggaaaaacaagaatggtggtggctttacattgcagataggaaggagcag

SEQ ID NO: 801190 - DNA, 100 bp, Homo sapiens
tgcaggaagaaaacgagccagtgatttacaatagagcaaggtttctggctaccctggttcacatggaatcacagccatggctggcagcatctatccaggt

SEQ ID NO: 801191 - DNA, 100 bp, Homo sapiens
ttccaagaggaagtgatattattgtagatctagaagtcactttggaagaagtatatgcaggaaattttgtggaagagtggagtcaacatatcaatggagc

SEQ ID NO: 801192 - DNA, 99 bp, Homo sapiens
cttgtaactgtcaagggggaggggcctgtgatccagacacaggaagagttgggctgtggaaggacatcttcaccgtctccatgaatgagaagtttgact

SEQ ID NO: 801193 - DNA, 100 bp, Homo sapiens
tattatgcccagacaagtccccagggaatgccacagcatcctccagcacctcaggaattgaatgatctggcacgggaccctccagcacagtgttcagcag

SEQ ID NO: 801194 - DNA, 99 bp, Homo sapiens
ggaggccaactggaccgcgttcctgttccagtgttcctttctgccgaaattctccattcatatagaaaccaagtatgaggacaacaaaggaagcaatga

SEQ ID NO: 801195 - DNA, 99 bp, Homo sapiens
tgcctcttcggctgggaagcggagggaaccttctcttccttaaaggtgttgctggaagaagccaaggatttgctctctgactggctggattctacactt

SEQ ID NO: 801196 - DNA, 100 bp, Homo sapiens
atggtggactacctggtgcctctagtgaaaagaacaagaagtcttaccctcaggtcaaagctcattggtgggcagtattacttatgggaattgctctgat

SEQ ID NO: 801197 - DNA, 100 bp, Homo sapiens
atggaccagaacagggatggcttcattgacaagaacgatctgagagacacctttgctgcccttggaaaaccgggaggtgggagactggcgcaagaacatc

SEQ ID NO: 801198 - DNA, 100 bp, Homo sapiens
ggtcacgatctcctgaccagcggtcagagccttctgatcattccaggcactcgccgcagcagccaagcaatggcaggtgagcgagtgctgtgctttcatg

SEQ ID NO: 801199 - DNA, 100 bp, Homo sapiens
agaacccagaaaattgatcagttctaaaaaaccatgccccacgcctcgaaggagctccagcaagcccagacaaccagaccagaatcgacacaaatccagc

SEQ ID NO: 801200 - DNA, 100 bp, Homo sapiens
agatgttcctgtggaccccagtccaggccttacattctaagcttcaagctctgggcaaaattgagtcagaaggtcttttaagtctgaccacccagcttgt

SEQ ID NO: 801201 - DNA, 99 bp, Homo sapiens
gcagtttgaagacttgctagttaggattttattactggcagcatgtatatcttttggtagaatttcagaacaaattctacgttggtgcaggcaccaaat

SEQ ID NO: 801202 - DNA, 100 bp, Homo sapiens
aggcgcggaaccatggccgatgggggcgagggcgaagacgagatccagttcctgcgaactttaacgatgaagaggagaactgacccagaatgcactgccc

SEQ ID NO: 801203 - DNA, 100 bp, Homo sapiens
cgctgacatcgctaccatggtctccggcagcagcggcctcgccgccgcccgtctcctgtcgcgcagcttcctccgattgccaaggatccaagatttgaac

SEQ ID NO: 801204 - DNA, 100 bp, Homo sapiens
tttggatgtagcaaggaagaaattgttcagttcttctcagggtctcactccattgcccaggccagagtgcggggatatttgataagaaacttcagtgaag

SEQ ID NO: 801205 - DNA, 99 bp, Homo sapiens
tgtccttgtgccagctcgccagaggccctcactgtggccatccggaggatgaccagtgtcccagtgaaggaacgagtgaaggtgtctcagaactggaga

SEQ ID NO: 801206 - DNA, 98 bp, Homo sapiens
atcaacatggcaggagagcccaaaccatacagaccaaaacctggaaacaagaggcccctttctgcactttacaggtgtgaaatctaagaatcccctgc

SEQ ID NO: 801207 - DNA, 98 bp, Homo sapiens
tgtaactggaacagaacctggtcagaaatgcatcttctgcagacaccgggttaagagggtctctggagcctgcatccagtgttcctacggtcgctgcc

SEQ ID NO: 801208 - DNA, 100 bp, Homo sapiens
catccgagtccccgggagtgatgcctcttagtcttctcagactgtccttcatctacttggattcagttccaagacagttgttacatttttctccaagaag

SEQ ID NO: 801209 - DNA, 98 bp, Homo sapiens
ttgaggcagaaagtggagattctgaatgagctctatcagcagaaggagatggctttgcaaaagtgagcgagtgctgtgctttcatgggcctcttcttt

SEQ ID NO: 801210 - DNA, 140 bp, Homo sapiens
ttttgtagatttcttctctcagtgcctccatgaggagtataggagcaagggcgtctttgtgcaggtacaggacatctgcttcagccatgactgtcgctgggttgtggtcagtactctccggggtacttcccacgttttcc

SEQ ID NO: 801211 - DNA, 100 bp, Homo sapiens
atggaaaacggggatttccaccatctgtcccaggtctccaggaaacctagagaaaaaccgttatggggatgtaccctgcctggaccaaactagagtgaag

SEQ ID NO: 801212 - DNA, 98 bp, Homo sapiens
gaggcagagggtggcccatgagccggttgcgccacccgaggacaaggaaggttgtgcaggaccagcgttccctgtgcaggcgccactgcgtttcctgc

SEQ ID NO: 801213 - DNA, 99 bp, Homo sapiens
actggtcatccgaaatcaacttggaaagtcaaattacgtgtggcatatggactcctgacgaccaacagatctttgatgatgcgtacaaatcccagctca

SEQ ID NO: 801214 - DNA, 98 bp, Homo sapiens
tttggggcaacaggaaagttggcatctgcagacatagagacctgtacccgcaagatggagtacaagggcagcagctggcatgagacctgcttcatctg

SEQ ID NO: 801215 - DNA, 98 bp, Homo sapiens
ggcttaacagaacaagctatgggcacctccagataaccctccttcctccacctcacaaaaactcacaagctgcaacccttctgatgtccactcccaca

SEQ ID NO: 801216 - DNA, 100 bp, Homo sapiens
gctttgggcattcctgaacttgtcaatcagatcaggcttcagctgtgggatactgcgggtcaggaacgtttccgtagcctcattcccagttacatccgtg

SEQ ID NO: 801217 - DNA, 100 bp, Homo sapiens
ggaatggattgaaatctaatgaaccgaaactttgggtgatgacacaatgactggtgatgggggagaataccttaggcctgaggacctaaaagaactgggt

SEQ ID NO: 801218 - DNA, 100 bp, Homo sapiens
ggcgctcagccatcccctgctctacgtgaagctgctcatccaggtggtgatctttgtgaagtctgtgcagcggtgcattgccttggcccagctactagtg

SEQ ID NO: 801219 - DNA, 100 bp, Homo sapiens
atagacaagatatctgctgctgtcctcaacatggaggaatctaactttcagccccccaaacggcctttcaaacggatgaactattcagatgctatcgttt

SEQ ID NO: 801220 - DNA, 100 bp, Homo sapiens
tggactgaccaagcctgagacctactgcacccagtatggcgagagatccagttgtcatcggtatccaggaagctctcctcttcctcctcctgacgtctac

SEQ ID NO: 801221 - DNA, 100 bp, Homo sapiens
aggtggagcaagccatgaagcaatgggaatacaacgaaaagctagcatttcacatgttccaggtagttgtcctgggaacccctgcagaagaagatggtgg

SEQ ID NO: 801222 - DNA, 100 bp, Homo sapiens
ctctgtgttaaaccaatcagttgcgaccttctcttaacaggtctacagtgaatatagagccagtcttgcttttgaccttgttagcagccgacagaaaaat

SEQ ID NO: 801223 - DNA, 100 bp, Homo sapiens
acagaatcaacccagaacggagagctccctcctagaaaagtcatccgtccttggctcaggatttggagagcttgcaccaccaaaaatggcaaacatcacc

SEQ ID NO: 801224 - DNA, 98 bp, Homo sapiens
gactccagtgttaagagaagaaatgaggacatatcagtatcgaacatgtatcgattcgagggcactgggttttcaaacattcctcaacttatagatca

SEQ ID NO: 801225 - DNA, 100 bp, Homo sapiens
aggactatgtgccagccagccagaataatcatgggccagactgggaagaaatctgagaagggaccagtttgttggcggaagcgtgtaaaatcagagtaca

SEQ ID NO: 801226 - DNA, 100 bp, Homo sapiens
aggagagctgggagtctatgtttaacgatgatggtgactgcctggatccacgtcttctacaagagtaaaactgctgtcaggaatgtctactcaacatggg

SEQ ID NO: 801227 - DNA, 98 bp, Homo sapiens
aataattcagatggagaatatatggctggacagctagctgcttatggctataaaattacagatccagaatgaagagagtgtggtgctttttctggtcg

SEQ ID NO: 801228 - DNA, 100 bp, Homo sapiens
aatcagtaagctaaaaacaaaatcaaccgggaccccagcttttcagaactgcagggaaacagccatcatgagtgagaatgaggctctgtggcgggaggtg

SEQ ID NO: 801229 - DNA, 99 bp, Homo sapiens
aatgggtgaaaaataggaaagatgaaagtcgtgcttttcatgagtgggatgaagatgctgacattgatgaatctgggacttgcaacaaagcattgccag

SEQ ID NO: 801230 - DNA, 100 bp, Homo sapiens
ggaaacaccatggctgcggcggcccagctctctctgacacaggaattgaatgatctggcacgggaccctccagcacagtgttcagcaggtcctgttggag

SEQ ID NO: 801231 - DNA, 100 bp, Homo sapiens
tgccagaactcaccgccagagcctgtgcggcgagggaactccccaggccaccgggttctttgaagtgatggtagccgggaagttgattcactctaagaag

SEQ ID NO: 801232 - DNA, 100 bp, Homo sapiens
atgctctccacccctagagttcttggatgactctgactctcatttagaaatccaaaagaaatcctattagtatcccgtggtgtctgaatgaggtgggctg

SEQ ID NO: 801233 - DNA, 98 bp, Homo sapiens
tctctacatgtaaaaggccactgactcctacttcctctgtatagagcaactgttgaactcagctgcctgtaggcagtcttgattgatatggaagaagg

SEQ ID NO: 801234 - DNA, 100 bp, Homo sapiens
gaaaacctcatgaatagcaatcacagagactcggagagcatcactggaaatggtgctcttgcagaacattctgaaaatgtgcatatttcaggagtgtcaa

SEQ ID NO: 801235 - DNA, 100 bp, Homo sapiens
cgcatccccgcggacgccacagcgctcgtttagtgggctacagatggcatggcatctaaaaccttacaatgcttgattttcatacagaagacactttggc

SEQ ID NO: 801236 - DNA, 98 bp, Homo sapiens
gcagccctggaaaaaccaatggacctggaagaggaaaaaaagcaaaatgatggtgaaatgcttgaaaaagatgaccttgaatgatgccatgaggaaca

SEQ ID NO: 801237 - DNA, 98 bp, Homo sapiens
cattttacaatatgggataagctattggaaagatctcggaaaatgagagaactcgatgccaccgcaacggtattggcgaaccggcaggatgaaagtga

SEQ ID NO: 801238 - DNA, 100 bp, Homo sapiens
acccattatacttcaagtggtaaccctcaaaccaccacacggaaattggagtgcaaattggagttccatgcttgttctactggcaaaagcctcgccaccc

SEQ ID NO: 801239 - DNA, 98 bp, Homo sapiens
aggaggccatcatcatgaaggacgtgcccgactggaagaagtttgccgcgtccaggattgcattctggtgccaggagaactgcgtggcgctcctgtgc

SEQ ID NO: 801240 - DNA, 100 bp, Homo sapiens
tcgccgctgctgggagatgggcctactcgcccgccaccctgcgctgccgccgctctgaggagttaaaggtgaccattgtgaggtagatattttgttctaa

SEQ ID NO: 801241 - DNA, 98 bp, Homo sapiens
cccacatttttactgcagctgattgtgaagatgacctctccgacgacagagaagagcttctgcatgggatttcagagctggacatcagcaactcggat

SEQ ID NO: 801242 - DNA, 100 bp, Homo sapiens
ccatcgctgccgtctttcacacactgatagtttattctccagatatgccttcacggcttccaattcaagacatatttgctggactggttacaagtattgg

SEQ ID NO: 801243 - DNA, 51 bp, Homo sapiens
aaggatccccaaagtctcagacttcattggttgaagccatggataacagaa

SEQ ID NO: 801244 - DNA, 100 bp, Homo sapiens
aagtaaatactctgctctttcaagtgaaccaaacctatcaaacctgtttagaaaataaaccagtggctgccaaatgtttggtgatgaaggcagaaatgaa

SEQ ID NO: 801245 - DNA, 100 bp, Homo sapiens
tcctaccagaccctgaaattcacgcatcaggcgcgggaagcggttgacatcatggacatatgtgagtccatcctggagaggaagcggcatgacagcgaaa

SEQ ID NO: 801246 - DNA, 100 bp, Homo sapiens
aacaatcttttgttggattgaaacagctaatccatcaacaacagcaacttgtgattggcggtgaccggatattcagttgcacatccccacatcaatgcac

SEQ ID NO: 801247 - DNA, 120 bp, Homo sapiens
agtcaggcctctggtatttctttctcttctgcttgcgcattaaagttttaacaggatagcactataatatgcagaaatctacaaattctgatacttccgtggaaacactgaattctaccc

SEQ ID NO: 801248 - DNA, 100 bp, Homo sapiens
ccgaggcggcggcgcccgggagctcggggaccgtgcgcagcggctggaggttgaagatgacagcgatgcagagacctatggagaagagaatgatgaacag

SEQ ID NO: 801249 - DNA, 100 bp, Homo sapiens
aagtggtcccagaaaagaaagtaccggtgcctcctgccaaaaagccagaagctccacctcctaaagattttctactctcccctggccctcttcatacccc

SEQ ID NO: 801250 - DNA, 100 bp, Homo sapiens
gccctccttcaagattgacttctcggaatggaaggatgacgaggtctcggcgcggaagatggccggcggcgtggacggccccatcgggatcccgttcccc

SEQ ID NO: 801251 - DNA, 100 bp, Homo sapiens
gggatggttccatcatggcgtcaatgcaggctttttttacagaaaagtacttgcaggagcatcctgaagaccaggagaaggttgagctgctaaagcgact

SEQ ID NO: 801252 - DNA, 124 bp, Homo sapiens
cgtcccttcccccaagttatcaaatccaagggcggtgttgtgggcatcaaggtcattatccagctcaggaaaacctgatgttccttgttctctgtacatgaaggagctacaaggtttcattgcc

SEQ ID NO: 801253 - DNA, 99 bp, Homo sapiens
ggagtgttggttaccatggtgaagctggcagccaaatgcatcctggcagagtaaagctaaaacattttgagaaatttcaggatacagcagaagcattag

SEQ ID NO: 801254 - DNA, 99 bp, Homo sapiens
acacgagacgctggtgctggtggtaaccagcacatttgggaatggggatcccccggagaatggagagagagaactcgatgccaccgcaacggtattggc

SEQ ID NO: 801255 - DNA, 128 bp, Homo sapiens
ccgccagtcacccggagacccaagaaggacatgcgtggtcaccgcaagtcccagagcaggtgccactgggattgaagaccgcctgcaggacggagtccctgaaactatttctaaattgcgtcaagcgg

SEQ ID NO: 801256 - DNA, 100 bp, Homo sapiens
aaaaatataacatcatggcttttaatgcagccgacaaagtcaactttgctacgtggaatcagtttaagtgctgtggggctgctaactacacagattggga

SEQ ID NO: 801257 - DNA, 99 bp, Homo sapiens
tgaactatagagtttgtggacagatttatattgggttcccttctggagaagagtcaccgggtttggttctgtttcccctttctgctcgacacttctggg

SEQ ID NO: 801258 - DNA, 100 bp, Homo sapiens
tgctgagcgttctaaaggaaggcgtccgttggccttcgtacccgtcttgattgagagcccacccacctttgggttcctgttggacatcgatggagtgctt

SEQ ID NO: 801259 - DNA, 100 bp, Homo sapiens
ccatgaagagtcctgaccacaatggggaggacaacttcgcccgggacttcatggactgagcagggggaggaacatttaagctgatggaagtggaagtgga

SEQ ID NO: 801260 - DNA, 143 bp, Homo sapiens
cagctccacgcagcaagacccgcgccgccgggacccccaggacgacgtgtacctggacatcaccgaatgtggcagatcagattgcatttcaagctgctggtggattaacagcccttgaacacatccttcaagcagtagtccca

SEQ ID NO: 801261 - DNA, 100 bp, Homo sapiens
gcgccgggggtgggtgcccgaaggaattgattatggattaagtttaccacttggagaagactatgaacggaagaaacataaattaaaagaagaattgcgg

SEQ ID NO: 801262 - DNA, 100 bp, Homo sapiens
cccatgaaaacctctcaccccgtcgttgcctccacttggcccgtccatagagccaggtattgttgcagcatctggcagtgagactgaggatgaggacagc

SEQ ID NO: 801263 - DNA, 98 bp, Homo sapiens
cacggctgggaaggatggtggtggccagtgacaaaagcgggcagcctgtgacagcagatgatttggtcatgaatgaaaaacttcagcactgcatggaa

SEQ ID NO: 801264 - DNA, 100 bp, Homo sapiens
ctcatggaggctgagcatttattcaggaagagcttcagcttcaccttctttagatgtccttattactttattgtcacttggatcaaatggctataagaag

SEQ ID NO: 801265 - DNA, 100 bp, Homo sapiens
agcaaaaggaggacgtttgcagccagatatttcaacaatgggatgaacagttggatcctcgactaaatgcaaaacagaaagaggctgttctggccattac

SEQ ID NO: 801266 - DNA, 100 bp, Homo sapiens
ctgactcccacaggcacactccctctgggcgtcctctcaggaggcaagcagactatcgagacagtaccattcagggaaacccccagctatgcgaagcggc

SEQ ID NO: 801267 - DNA, 99 bp, Homo sapiens
cgacaactacgaggatgaccacttcaaatcctcccattccaatcaaacaaatcacaagccctccccagaccagataagccaatggacacgtcagtgtta

SEQ ID NO: 801268 - DNA, 99 bp, Homo sapiens
tcagattggagaaaatttgcctcaaagcgagtctcaaaggtgttcctggatttgggaaccggctggacgagggctcggatgtggagtcggaacctgacc

SEQ ID NO: 801269 - DNA, 100 bp, Homo sapiens
acaataactgttgatcagaaaaccttccatttccagggcagtagaagatggtgaaagaaacaacttactacgatgttttgggggtcaaacccaatgctac

SEQ ID NO: 801270 - DNA, 136 bp, Homo sapiens
gggctggaaagtctggactggctccccgtgtggatcaggagaagtgggcccagcgttcattcagatggagcagctatcagatgaagaaattgatcatggtgctgaagaagacagtgacaaggaagatcaggacctg

SEQ ID NO: 801271 - DNA, 98 bp, Homo sapiens
gagaaccaagtgcggacgctgtgcgagaaggcttatcaggagggcagacttcaaaagctactaaaaatgaacggccctgaagatcttcccaagtccta

SEQ ID NO: 801272 - DNA, 98 bp, Homo sapiens
tctgactccaggttatcatggattcccagcgcgggacagccagtttggcagtcttgaacagaagctggctttggcagaacggattcgaggccacgtcc

SEQ ID NO: 801273 - DNA, 100 bp, Homo sapiens
cattgagcttgggtcaggacaattccatttggggaccagagatggacggtcactcagcctatggagatggcaccgaaagcgaaggaagctcctgctcctc

SEQ ID NO: 801274 - DNA, 98 bp, Homo sapiens
ttggatgcctgtccaccactgtactttcaaacttctcatggaacatctggaccctgatgaagaagaagaagaaggggaggtttcagctagcacaaatg

SEQ ID NO: 801275 - DNA, 100 bp, Homo sapiens
tgcatgattatgatggcaataatttgcttgatggcttagaactctccacagccatcactcatgtccataaggaggtgaccaagaatatggcccaggtgac

SEQ ID NO: 801276 - DNA, 99 bp, Homo sapiens
gggacaaagccgctccacctcccatgtcggcacaggtggtggagattgtgaagaagctggagtctcgccagcggggctgggaggaggatgaggatcccg

SEQ ID NO: 801277 - DNA, 98 bp, Homo sapiens
aagatgaaacaattcacatttatgacatgaaaaagaagattgagcatggggctctagtgcatcacagtgcaataattcggcatagacctgctcttgtt

SEQ ID NO: 801278 - DNA, 100 bp, Homo sapiens
cgcaaggctgtccccttccaggtggcccagaaagaggtagctacagcaagctgggtagcaggcagatccaaaggatatcatgaagtttccagggcctttg

SEQ ID NO: 801279 - DNA, 98 bp, Homo sapiens
tcatcttgcccttcatgaagcatggggacctgcatgccttcctgctcgcctcccggattggggagaacccctttaggctgacccgcggctgattgagt

SEQ ID NO: 801280 - DNA, 101 bp, Homo sapiens
ggcatcatagttgtgtatgatgtgacagatcaggatccagttcactatcctagccttgcagacaagtatgaaagtgctttagaagatcttcattccaaaca

SEQ ID NO: 801281 - DNA, 98 bp, Homo sapiens
agggacagatccagggacacaactgggataaccggtattcctggaagtgtttggattgtgagctatttcagaactgttctcaggactcattattttaa

SEQ ID NO: 801282 - DNA, 100 bp, Homo sapiens
acgggcttgtgttgccccaggtactgtcaaaggtgtgaaggaattacaagtccagaaggctcaaaatctatagtggaaggaatcatagaggaagaagaag

SEQ ID NO: 801283 - DNA, 100 bp, Homo sapiens
gtccgccagcgccgtctacgtgctggacctgaagggcaagaggatgcggctgtgaaggggcggctggtggaatgtctggagactgtgctcaacaaggccc

SEQ ID NO: 801284 - DNA, 98 bp, Homo sapiens
ccgtttcaaccaggacccagaagcagctgggatgaaagcagctccatcagtagtggactcagcgatgcctcagacaatctcagttcagaagaattcaa

SEQ ID NO: 801285 - DNA, 98 bp, Homo sapiens
tcagacaggaccctgagtccgagactggggctgaagccgacgtagcttctctgaacagacgcatccagctggttgaggaagagttggatcgtgcccag

SEQ ID NO: 801286 - DNA, 100 bp, Homo sapiens
taatcctgagtacatgttggaaaaatccttctaccagtttcagcattatagagcaattccaggagtagtagagacttccatgcctatggctgttctaaaa

SEQ ID NO: 801287 - DNA, 98 bp, Homo sapiens
tccacagaggtgaccatgtctgggatggaaacgatgtgcattttgtaagcactttggagccactatcaaatgctgtgaagagaaatgtacccagatgt

SEQ ID NO: 801288 - DNA, 100 bp, Homo sapiens
gctgctgggcgaagcacgctactacctggtgcagggcctgattgaggactgccagctggcgctgcagctgggacgatgccggagtgtgaaggagtttgag

SEQ ID NO: 801289 - DNA, 99 bp, Homo sapiens
cctggttgtgcaacaggcaggcacaaacaagactgatgttgtctgtggaactgtggctgcaccatctgtcttcatcttcccgccatctgatgagcagtt

SEQ ID NO: 801290 - DNA, 98 bp, Homo sapiens
aaactgcagccagttactatggcagttgcaaaatattcaggagaccgtcgttgccttgtatttccagagaacaggtgaccaagaatatggcccaggtg

SEQ ID NO: 801291 - DNA, 121 bp, Homo sapiens
tgaggttcaagacttcctcctccatcttcttgaggttggctttctgccagatctccgggcggctgcttctttagatacgaatggacagcaaattatggatgaacctatgggagaggaggag

SEQ ID NO: 801292 - DNA, 98 bp, Homo sapiens
tggcaacgttgctggtgacagcaaaaatgacccaccaatggaagcagctggcttcactgctcaggatgttgcttcagagtgtgaagtcaaatgcatgc

SEQ ID NO: 801293 - DNA, 99 bp, Homo sapiens
ttgggggtcgcccttctgaggaggctgcggctaacagggcccagctgacaagctctctactgatgatctgaactccctcattgctcatgcacatcgtcg

SEQ ID NO: 801294 - DNA, 119 bp, Homo sapiens
tccacatcaccctgacccccgtgaggcctgacaggaccccacgcccagccagcccaggacccagcctcccagtgaggctgaggttctggaccacagcaagaacccttgtgaagactctt

SEQ ID NO: 801295 - DNA, 100 bp, Homo sapiens
caagatctcagagaaggaggaggtgaccacgcgcgagtttgtttcgacgccggaccgcgtaagagacgatgatgttgggcacggaaggtggagagggatt

SEQ ID NO: 801296 - DNA, 100 bp, Homo sapiens
gagctggctaagcaggtgctgcagacggagctggagcgaccgagagaggtgtgggttgctgaccgaggaaataaaagaatccaagtatttgataaagaca

SEQ ID NO: 801297 - DNA, 98 bp, Homo sapiens
ccccatgaggtgtacctggaccccgcggatgctgctgaccccagagtggcctgtctcctgagaatccactgaagacctacatttcccggaaggttaac

SEQ ID NO: 801298 - DNA, 100 bp, Homo sapiens
ctttggcgttatcggcagccaaaaaggtggtgaccatcgctatgtgaacaactacacgaacagcttcgggggtgagtggagtgcaccggacaccatgaag

SEQ ID NO: 801299 - DNA, 100 bp, Homo sapiens
catctaatcacagactcctatttgaagtatttgacgaaaatagactggtgacttgatggagggtgagctctattctgctctcaaggaagaagaagcatcc

SEQ ID NO: 801300 - DNA, 99 bp, Homo sapiens
tttggccatcctgtcagagatgggagaagtcacagacggaatgatggatacaaagctattttgaagatgaggaagaagattctagcaacgttgatttac

SEQ ID NO: 801301 - DNA, 100 bp, Homo sapiens
ggaatttcggagctcagatgggcggcctgattcagcttgttctcatgccatactgtaaatcactggacatcttcaccgtgggaggttcaggagatggggt

SEQ ID NO: 801302 - DNA, 100 bp, Homo sapiens
acccactgaggagatccgggccctgcatgcagccattgggggaatccccttgctggctggggagggttccgagtctgaggaagacataaccttgtgcctg

SEQ ID NO: 801303 - DNA, 100 bp, Homo sapiens
ggtatttagcacagccttggggataatgtgtgtctcacagaaagttctccgctcccagacatgggtccctcggcttcctgcctcggaagcgcagcagcag

SEQ ID NO: 801304 - DNA, 100 bp, Homo sapiens
actttcacaataagagcagaggatggaacacttcagtgcattcaaggaggagatatttcatcaaatactccagactatgcctggaatagctacattctca

SEQ ID NO: 801305 - DNA, 100 bp, Homo sapiens
cagcctcgtgcggacgctcgtgcacagatacgagccgaggtgacgtacatgaacatgaccgcttacaacaagggccggctgcagtcctccttctggatcg

SEQ ID NO: 801306 - DNA, 100 bp, Homo sapiens
aatccaccgtcaggcataaattgattattcctcgcccacatctgtgccagtcaggtcaattcagtgaagatatgatacccacagtgggcttcaacatgag

SEQ ID NO: 801307 - DNA, 98 bp, Homo sapiens
aatccaagcctgcaactgcagagacgagagatctttctgctgtctatactcttggaaagcacatcctaaggttgatgctatgaaactgggagtaaagg

SEQ ID NO: 801308 - DNA, 116 bp, Homo sapiens
gctgagaagtgttccagatgtggggattctgtatatgctgccgagaagataattggagctggaaagcacgactgaaaatgtagctgtttatatctgggacaacctccagaaagttc

SEQ ID NO: 801309 - DNA, 100 bp, Homo sapiens
tccttcaagagttttcatggattctaatggaatcaggcagttttgtgtccatgtgaacaacttggctgcttcaacccccaactccactgctggtgcagcc

SEQ ID NO: 801310 - DNA, 100 bp, Homo sapiens
attcaaagttcacaacagtaccagattggggaccacaaattcagtgcccaccggattgtcttagcagcctcgatcccgtatttccatgctatgtttacaa

SEQ ID NO: 801311 - DNA, 98 bp, Homo sapiens
agtcctacgatgtgatcgccaaccagcctgtcgtgatcgacaacgaatgtatcctgtcaggtataatgtcagtgaatggcaagaaagttcttcatatg

SEQ ID NO: 801312 - DNA, 100 bp, Homo sapiens
tgcctggaccctgctcagaggactctatacagggacgtgatgctggagaattataggaacctggtctccctgggagattgcatcctacctgatcaccttt

SEQ ID NO: 801313 - DNA, 100 bp, Homo sapiens
ggccgtggaaggcgacccggcggctgtggaggccacgctcagctcgccaggcggcgcaggatgtgtcttgctgaatcagggctctcttatccctgccatc

SEQ ID NO: 801314 - DNA, 98 bp, Homo sapiens
agctcatgtacaaaattacaagtggaaatccacaaggattcttttcaatacatcctaaaacagggaaatctgcttcgccactgaaggtactctgcacc

SEQ ID NO: 801315 - DNA, 127 bp, Homo sapiens
tggaggaggaggaggatggagagctgcccaagacagggatcagatttatagctacattattgagcagggggtgtgtgatttggttttatgtgaagctgccttccctaagacgttggcttttgcctac

SEQ ID NO: 801316 - DNA, 100 bp, Homo sapiens
gacacgaccccctcttgtaaacccggcgccaggcacagatgcctttcttcctgacgtggagtgtggtgaactcagtgcattgggccaatggttcgacaca

SEQ ID NO: 801317 - DNA, 100 bp, Homo sapiens
agataaggtcctgatcagaatcatggtctcccgcagtgaagtggacatgttgaaaattaggtctgaattcaagagaaagcagtataccttaaatggcaag

SEQ ID NO: 801318 - DNA, 99 bp, Homo sapiens
aaaaagatgaacttctgagttacataaagaagacctaaaactgatggctactaaaaagcagagcatttctggtattcaaaacctttgaccacatggccc

SEQ ID NO: 801319 - DNA, 100 bp, Homo sapiens
agagaagaagtttaattgtctcagagttcttcaggctgtacaggaaatgtggtgccggcatctgcttctgatttgaaaaagggcgcatctatacgttcat

SEQ ID NO: 801320 - DNA, 100 bp, Homo sapiens
gggacccggttccccggcccacagtgggggtgtgcaaacccgagagaactgggaattggcagcaatgaaacagattctcgttaagatgcatagtaaacat

SEQ ID NO: 801321 - DNA, 98 bp, Homo sapiens
cacaatgaccagtcacaatggttacaggtaaagagaaatgtgtatgaccttacaagtatccccgttcgccaccaattatgggagggctggccaacttc

SEQ ID NO: 801322 - DNA, 100 bp, Homo sapiens
aactaagcagatttcccgagactacggtgtgctgttagaaggttctggtcttgcactaaggaccaggaagaaacaggctcctgccagcaccgacagcaac

SEQ ID NO: 801323 - DNA, 99 bp, Homo sapiens
ctcaaattgcagcaggagctttttgcttagcactgaaaattctggataatggtgaatgggcactggaggatcgccccagctcactccttgttgaccagg

SEQ ID NO: 801324 - DNA, 99 bp, Homo sapiens
atcaccgcttagaagcctcagctgtgattggctaccttctcccatcaccccaggcaaaactagatggtggaagacagcaatggagacctgtcctcatgg

SEQ ID NO: 801325 - DNA, 100 bp, Homo sapiens
cagaggctctcggaggaagagctcaggagtcagcgtgggagaaattgtaacgagaaaccaacaaatgtcaggaaaagaaaattcattaacagagatctgg

SEQ ID NO: 801326 - DNA, 99 bp, Homo sapiens
gcaagtatgtcagtgaggagacttgtcacatgcatcaggaccagaggtgaatgaaaactttgccattgatttgatagcagagcagcccgtgagcgaggt

SEQ ID NO: 801327 - DNA, 99 bp, Homo sapiens
cgaaaaggggctacagctctgagatgaagacggaggacgagctgcgggtgcggcacctggaggaggagaaccgagatgatgctgtgtatctggacaatg

SEQ ID NO: 801328 - DNA, 99 bp, Homo sapiens
tgctgggctggcgaacccgaaattgggcttggaacccgggagccagatcttggaccctgaactgcacctctgtcaagagaatgccacgggtgacctggc

SEQ ID NO: 801329 - DNA, 100 bp, Homo sapiens
atagcacagcctgccaggacctttatgcttggactgatggcagcatatcacaatttagggcccttggaagaaaatcctcgctgtgtccaggctgaggcgg

SEQ ID NO: 801330 - DNA, 100 bp, Homo sapiens
ggattccagcacagtgactcacttattcaagataactgaaaacattggttgtgtgatgaccggaatgacaggaagtgacctcacaatgactcaagctacc

SEQ ID NO: 801331 - DNA, 100 bp, Homo sapiens
cccagatagcaatgatgatgtgaaaacagaagctgtggctatccaggatgagaagactgataaaagaagaagctagctgaacagctgtaaaatgcccaaa

SEQ ID NO: 801332 - DNA, 98 bp, Homo sapiens
tatttacatagacatttcaacacatcacttgtgatgctgagccctgccatgcaaggggtcatcctggccatagctaaagcccgtcagacctttgaccg

SEQ ID NO: 801333 - DNA, 100 bp, Homo sapiens
tgcagataatgtagttggaaaaaggaggagtattctgatcttttcaggttcttatagagactgctaagaagctaggactccggtgccactcaaaggggac

SEQ ID NO: 801334 - DNA, 100 bp, Homo sapiens
tgaaaggagacgtcagaacgtggcttatgagtacctttgtcatttggaagaagcgaagagatcattcccagtgaccccttctgggtgccaactactgagg

SEQ ID NO: 801335 - DNA, 100 bp, Homo sapiens
gttggagaaaggcgaggagccatggatattagaggaaaaatttccaagccagagtcatctggctgcaggtggagctggagcaagaataccaagacaaatt

SEQ ID NO: 801336 - DNA, 50 bp, Homo sapiens
attgtcttggaaatactaagttggtcctcccaaaccgaaggaccctgtat

SEQ ID NO: 801337 - DNA, 100 bp, Homo sapiens
acggatcggattcctcagctacgaggaggcgctgaggagagggcgaactttctgaccaagtatacaactacccagagggcctaggagaagtgctgtatag

SEQ ID NO: 801338 - DNA, 129 bp, Homo sapiens
cttggtctctaagagagtgggcactgcggctgtctccttgaaggttctccctgttggttctgattaggcacttctccttgctgctgccacatgaagaaggacgtgtttgcttccccttccaccatgatt

SEQ ID NO: 801339 - DNA, 100 bp, Homo sapiens
ggtctggttctataaaaggatcgaggtatttccagtgcagattcactttataggaacagcttcagcttcagtgatgaaaaactgaattctccaacagact

SEQ ID NO: 801340 - DNA, 132 bp, Homo sapiens
gaatttaatcagttacagtttcatgctgttcaaagcaaaggcatgcctcttttggacaaagtaagaccgatccgagagcagaatttacaggacattaagacggctggccctcagtcccaggttttgtgtggt

SEQ ID NO: 801341 - DNA, 100 bp, Homo sapiens
taaattcatcattcctaatgttgtaaaatacagcccgaactgcaagttgcttattgtttcaaatccaggcacacatcaaagaacctcaaggcacctcccc

SEQ ID NO: 801342 - DNA, 114 bp, Homo sapiens
tattaaacaatcgctttattaaggtttattggcacagagaaggaagcacccaacagttacaaactacttctccaaagagagaacatatgatgagctgttactgggagcagccca

SEQ ID NO: 801343 - DNA, 100 bp, Homo sapiens
gagtgggctcggttcgagatggagcgggcgcactgggaggtggaacgggccgaactgcaggattttcctgttgaactggtcataattggaatagctttac

SEQ ID NO: 801344 - DNA, 98 bp, Homo sapiens
gccttattaacaaaaagttacccaaagaacttctgttaagctccttcgagaactcatagaacggaagaccagctccttggatcccaacgatcaggtgg

SEQ ID NO: 801345 - DNA, 100 bp, Homo sapiens
gcaggatcaagttgcggcaccttttcagcagaaactccagaaaatcttgccaaacttctgaccaggatgtatttaaaatcagaagtcataggtgatggga

SEQ ID NO: 801346 - DNA, 100 bp, Homo sapiens
gtgaattcatgacacctttgactcttctactgtctcagaccttagagtcctgtgtatggaaactcacatgagtcagctcagtctagaagggtagtaattt

SEQ ID NO: 801347 - DNA, 98 bp, Homo sapiens
agaactgggttctggactttgggcgtcccattgccatggctgcatttgatgccagaaggcaaacacaacctgcatttgcgttttgcagatgaattcaa

SEQ ID NO: 801348 - DNA, 100 bp, Homo sapiens
caggggtgcctggagagatggagcctgaacctgggtaccgtggggacagagagaagtcaggctgaccccagcccacagcaggaaggccctgcggaattcc

SEQ ID NO: 801349 - DNA, 100 bp, Homo sapiens
atccaaagttctcgcccactatcctcagaatatagaatggaacccttttgatcaagatgcggtgaacatgccattgagacccagagcagcagttctgaag

SEQ ID NO: 801350 - DNA, 100 bp, Homo sapiens
gaatgggaggactgttggaattgttggcaaccaacctaaggtggcctcaggtcatgcaagacaagataatctgccttccgaaaagagtgcagcctgctca

SEQ ID NO: 801351 - DNA, 98 bp, Homo sapiens
cccaatgttttgatgattggcagagacccactgtctggtgagacgtggtcttgtaacacagtggttaagaatgtgactttggagccagcctgctaggg

SEQ ID NO: 801352 - DNA, 100 bp, Homo sapiens
aacacctttgtcatacgctgcctgcagtggaccacagtcatcgagaggaccttccacgtggattctccagacgagagctttcctgctctgggaccctacc

SEQ ID NO: 801353 - DNA, 99 bp, Homo sapiens
agtggcacctgcgcgaagctggccaaagcctgcccagacggctcacctgtgcgggatggaacaaaaggttgcatgatctttgaagttgaaagagacaat

SEQ ID NO: 801354 - DNA, 100 bp, Homo sapiens
actggctgaaccacagatcttcaagaatcctgtctcacgcctgtatcccagcactttgagaggccaaggaagttggtgaaccatctaaagaagagaaggc

SEQ ID NO: 801355 - DNA, 100 bp, Homo sapiens
acagcctccgcgaggctgtgcgcacgctgctggggtacggctacaacttggaagcaccagatcaagatcatgggtgttgaaagcagcaggggcctagaag

SEQ ID NO: 801356 - DNA, 100 bp, Homo sapiens
ggggcaaaatgtgaagaagctggtggaacaacttttgaatgtttctccatcccagagagatgaagtaattcaatggctggccaaactcaagtaccaattc

SEQ ID NO: 801357 - DNA, 100 bp, Homo sapiens
ccctttgatctctgctttgggggccgaaggcagttctgcaagaggagctattctgatcttggccgccatggcatcagatgaaggcaaactttttgttgga

SEQ ID NO: 801358 - DNA, 100 bp, Homo sapiens
cagtgctcagctcgctgctcatgtctgtgggactctgcacactcttcggcctgacgcccaccctcaatggcggatatggtggaatcccaaatttcagtca

SEQ ID NO: 801359 - DNA, 99 bp, Homo sapiens
tgcaaagtagcaattaactggtctggagggtggcatcatgcaaagaagtcctgcaaccctggttccagtctggcaagcattgtagacctggctgctgaa

SEQ ID NO: 801360 - DNA, 98 bp, Homo sapiens
ccttccacaccccctccgtgggtgtgtgtcaccttcaggccattcagaggaggaaagagaggggaatatgaagtcagccaagccccaagtgaaccaca

SEQ ID NO: 801361 - DNA, 100 bp, Homo sapiens
cttggcaggagatcatgtccatcaccgagctgcaggagaccagtatgatgtctgtgccatttgcctggatgaatatgaggatggggacaagctgcgggta

SEQ ID NO: 801362 - DNA, 100 bp, Homo sapiens
agactccctgcctcctgagtcccagatccggagtgttggaacagcagctgttaatatgtgccttgtggcaactggcggagcagatgcatattatgaaatg

SEQ ID NO: 801363 - DNA, 100 bp, Homo sapiens
gtgtcactgaaggagagaagaataaaacctcggatcaattctcagctggtggcacaacaagtggcacaacagtatgccaccccaccaccccctaaaaagg

SEQ ID NO: 801364 - DNA, 98 bp, Homo sapiens
gactccaaatggttgaaaacagatatacagaggcatgaaagtcattgagagtcgagcccaaaaagatgaagaaaaaatggaaattcaggagatccaac

SEQ ID NO: 801365 - DNA, 106 bp, Homo sapiens
agcctccagtactggggatttgccaaaaggaagcctgtctagcagtccagaggagatgtctggagctgaagaggggagggagacatcctcaggcattgaagtggag

SEQ ID NO: 801366 - DNA, 100 bp, Homo sapiens
gatgcggagtgtgcactggagaaacttactaccgatcatgagaaaggagcgggatcgttacgcctacaagattcatcttccagaaacagtagagcagctg

SEQ ID NO: 801367 - DNA, 100 bp, Homo sapiens
ttccttcttagaagacttgactggtcttacattgctgcatcaagaaacccaagctgctgagggtgccaaagcatgctttctgcgggacattcctttctcg

SEQ ID NO: 801368 - DNA, 99 bp, Homo sapiens
tttgtcggatgaagataagacactttctcagttacagagagacaagttggatggcttgaggactggtactaaaaggaaacgtgactgggaggccattgc

SEQ ID NO: 801369 - DNA, 99 bp, Homo sapiens
gtgaggcggccgccgcagcccaggcgcgggggcgacgacagaaaacacgagatttttctcctatttcagcagttggccacaacttcattgctgggaaaa

SEQ ID NO: 801370 - DNA, 100 bp, Homo sapiens
gcagatggagaacctgatcgaacttcgcagcagagacagtggtggatccagaaatgacaccgtacttagacatagctaaccagacaggcagatcaatcag

SEQ ID NO: 801371 - DNA, 100 bp, Homo sapiens
tggaatgatggaagccttattgaagtggttggaataaaaacagggttgaatgagttccagaaagcagggttctcaacctcgtggacagcaatctgcagaa

SEQ ID NO: 801372 - DNA, 122 bp, Homo sapiens
tctctcaactggcctcatgttcttttatcacttcagcgtcttgcagatcctcggcctgattttcttgcctcctgggctccctccacactatcctgtggctgtggcagatatgtcaataccct

SEQ ID NO: 801373 - DNA, 100 bp, Homo sapiens
ttttggaaacattaaagaagccatttatccgaagagaagacaaggtggcctctcattagaagaagaggaagaggaggatgccaattcagaatctgaggga

SEQ ID NO: 801374 - DNA, 98 bp, Homo sapiens
ccctcttcgacagctacacaaatctggaacgggtggccgattactgcgagaacaactacatacaggggagttgctggaagccatcaaacgtgactttg

SEQ ID NO: 801375 - DNA, 100 bp, Homo sapiens
ttcttccactgatatctcaaaaggtgatctggacaaaggaacaggtatctcagctaaaagatggcggcaaggcagcccaggcaaatgtaagaataggcga

SEQ ID NO: 801376 - DNA, 100 bp, Homo sapiens
agcaacggaaagggcgagctggccgagtacggcctggattctgctttcacctgtgcagccgagctcgttttgagagattctggctacattggagattggt

SEQ ID NO: 801377 - DNA, 98 bp, Homo sapiens
aacgtcttgaaaggagtgcttatagaatggaggatttgacagctaaggatattgaagaaattattgatgagctcaaggctggcaaaatcccaaaacca

SEQ ID NO: 801378 - DNA, 99 bp, Homo sapiens
tcagctgcctccaccccagcccccaaccttcccagtactatactggcaattgctggagaagattttgcaattgttgcttctgatactcgattgagtgaa

SEQ ID NO: 801379 - DNA, 99 bp, Homo sapiens
tacggaccttaaaatacccgcaacagccccttcgtcccaaacgttcggtgctgcagactgggaggtcttccagatcggggagaggatcttcctcgctgt

SEQ ID NO: 801380 - DNA, 109 bp, Homo sapiens
aggaaatagcagacagcgggcttgatgtgcttaaaagctgcgcagaaatactcagtgtcctcagtcacagaaacatcatccagttttatggagtaattcttgaacctcc

SEQ ID NO: 801381 - DNA, 98 bp, Homo sapiens
agcagatgctggcgacctatccagaatgatcaaggtattagtcactgtaccactggctttactacagaaaggtgccattcagtttaatccaccgttgt

SEQ ID NO: 801382 - DNA, 100 bp, Homo sapiens
attgaactacaatcagtttctaatccagttcacagaaaggggtttgttaaagttgttaagaataaggcctactttaagagataccaagtgaaatttagaa

SEQ ID NO: 801383 - DNA, 125 bp, Homo sapiens
gaagctttgccagggacctagtggcccagtggaagaagctggttcctgtggaacggtggacatgagcaaagtaaatttggaggttataaagccttggataacaaaaagagtaacggaaatccttg

SEQ ID NO: 801384 - DNA, 100 bp, Homo sapiens
gatgctgatggtgatggagattttgatgtggatgatgccaaagttttattaggttggatttggtctagggagtcccagaaagaagtagaaaaagagagag

SEQ ID NO: 801385 - DNA, 98 bp, Homo sapiens
aagattcaacaaactatttttgaatgaagatgaaagaacacccaggttaatgcctgataaagaaagcatgtattacccacgggtacaacattaccgag

SEQ ID NO: 801386 - DNA, 100 bp, Homo sapiens
aagtctgcaacatggctagagactgccgggactggtcagatgaacccatcaaagagtgcgattaattggcacggcgactgtagccctgaaggacctgact

SEQ ID NO: 801387 - DNA, 100 bp, Homo sapiens
ttttctactgggaaattgatattaggaccacaagaagaaaagggaaagcagcatgttggccaggatatattggagatcatgaatcagacagataaaaatc

SEQ ID NO: 801388 - DNA, 98 bp, Homo sapiens
ggcggccgaacgatgtgcgagaactgcgcagacctggtggaggtgttaaatgaaaacaatgcagatcttcgtgaagactctgactggtaagaccatca

SEQ ID NO: 801389 - DNA, 100 bp, Homo sapiens
gccggttcaccagcctggacaaaggagagaatgggactctcagatggcccactgcgtgaccttggttcagctgtccatttcctgtgaccatctcattgac

SEQ ID NO: 801390 - DNA, 101 bp, Homo sapiens
ggatgttccaaagcacagctgggtctgggggagtacaagaggatgccctgatggcagttagcacactggtggaaggtctcagcatcagaggagcccaggag

SEQ ID NO: 801391 - DNA, 98 bp, Homo sapiens
aacctccaaagcagcaaccaatgatatatatctgtggagaacatccagtcatggataaaaatgagctggttcagaaggccaaactggccgagcaggct

SEQ ID NO: 801392 - DNA, 98 bp, Homo sapiens
aacatctccaaagacccatctttaggttctgtggacaatcacaatgggaatccaaggagggtctgtcctgttcgggctgctgctcgtcctggctgtct

SEQ ID NO: 801393 - DNA, 100 bp, Homo sapiens
ctttgatgtggaagcagtagacaggaaccgaatattgtatctgacgcatcctgtaatactgaagagcaactgaagacagttgatgatgtccttattcatt

SEQ ID NO: 801394 - DNA, 98 bp, Homo sapiens
gaggaagccctttctcctcggcactgtattctttacctgcttcccaatcccactgatgaggatcagcccatgggcaaaaaagtttatcttctggatgc

SEQ ID NO: 801395 - DNA, 100 bp, Homo sapiens
atggaggacgagatgcccaagactctatctggacgttggtggttggctatgtgttgactgtttcattcaagtggaatgcaagcactgaacgctacttgag

SEQ ID NO: 801396 - DNA, 100 bp, Homo sapiens
ttgctagatcagcaccggaggtggaagactgatccctacctgtttcaaggacctgccagtctgagaagcttcttgtcataaggccatccaggggccacgc

SEQ ID NO: 801397 - DNA, 100 bp, Homo sapiens
agtgaagagaggcctctcccaaagcacctgcgcagatggagtcatcagaacccactgtgaggaagtgacttctccttgaggtcacccagacactccaaac

SEQ ID NO: 801398 - DNA, 99 bp, Homo sapiens
cggttggagcccctgaagccacttaaggcgggctgcatgctgttcccccacatctccccctgtgaggtgcgcgtgctcatgctcctgtactcgtccaag

SEQ ID NO: 801399 - DNA, 100 bp, Homo sapiens
ttgggatcagacagttaaactgtgggatcccagaactccttgtaatgctgggaccttctctcagcctgaaaaggttgtttacattcagagctctatcaat

SEQ ID NO: 801400 - DNA, 50 bp, Homo sapiens
agtgtaaccgccttgaagagctgatgaagaaagttactgtggcccatgtc

SEQ ID NO: 801401 - DNA, 100 bp, Homo sapiens
aaatactcctctttcaacaagacttgtatctgtgcaagaggatgctgggaaatctcctgctcgaaatagggaagcagctcgagagtgtcgtagaaagaag

SEQ ID NO: 801402 - DNA, 100 bp, Homo sapiens
ctggagcactcggtcatgtacccggtggactcggtgaagatcaatgaactgagccatgttcaaatccctgttatgttgatgccagatgacttcaaagcct

SEQ ID NO: 801403 - DNA, 100 bp, Homo sapiens
acggcaagatgtccagtaatgtcccggcggatatggtacttcaagcgtagcgagggcctggagcgccaccttcgacgagctgataggcagacccatcggg

SEQ ID NO: 801404 - DNA, 98 bp, Homo sapiens
gaaaggaaagaaggaacaattattaggctctcagatgtaactagagagagaaggaacattccagaaactttggggtgacccagagaagacagctaaag

SEQ ID NO: 801405 - DNA, 98 bp, Homo sapiens
cctgtacagcctgcagaactagaggagttgcttaaaccaatgggactaaaacctgatgggacaataacgcctttggaggaagcactcaaccagtactc

SEQ ID NO: 801406 - DNA, 100 bp, Homo sapiens
agaaaggaggctgggatgaatgtgacatagaccacagcagctctcttaagactcctggtattaccaacataaagagctgttgaatttgtgtgaggctgaa

SEQ ID NO: 801407 - DNA, 102 bp, Homo sapiens
gaaatcctgtcctgaagactgtaagatctgaacagaattaagacgaacgagctttcacaattgcagcagatgaagatccattggtaaattgatcaggatttt

SEQ ID NO: 801408 - DNA, 100 bp, Homo sapiens
tgggagaaattgttgtttttaggatagaaggaagagagattcctatagttcaccgagtcttgaagattcatgaaaacttacaaaacactacacagcaaaa

SEQ ID NO: 801409 - DNA, 100 bp, Homo sapiens
cgttttcattacttcggaggggaggtcactcctcccgggaacagatgctgcttgtgttgctcagagtcacggaatctgtactgaagatgccatcacaagc

SEQ ID NO: 801410 - DNA, 100 bp, Homo sapiens
gtccctctctccacggtaagggggatccaggtccggcacgatcaagacccaggctacatgcatcacaagtttgccatcgtggacaagagggtgctcatca

SEQ ID NO: 801411 - DNA, 100 bp, Homo sapiens
gaggaaaggatcgccatgtgacacactggcatcaagaaactgtcaactaagtgaagaagaccactggatttaccaggctattttggatcagtaccctgga

SEQ ID NO: 801412 - DNA, 100 bp, Homo sapiens
caaatggaagtgttatgatgcccttcgaaaaatgatcaactattgaccatatagaaacctctgtagaggagcaggatgcaaccgacaggctgtggccgga

SEQ ID NO: 801413 - DNA, 100 bp, Homo sapiens
cattgagcaatgcctgccttcacttgaaaactccaagtactgccgtttcaaccaggacccagaagcaggcagtatttggcagtcgtattcagagataaac

SEQ ID NO: 801414 - DNA, 100 bp, Homo sapiens
gttcgaggggccaaggcagaagaaatcttggagaagggtctaaagattgttttagcaaccaatattgcagagacgggtatcactattcctgatgttgtat

SEQ ID NO: 801415 - DNA, 100 bp, Homo sapiens
cactcattacggtccacctcaagcacagattggaactgtggaaggtgcatcagtgaagaaatggaccaatgtgtataatcatggaatctccttgctaacc

SEQ ID NO: 801416 - DNA, 100 bp, Homo sapiens
agtccatcgaagaagagtccttggaacaagcaactggctattgaaaagcatttaaatcaaacggtattgagatggattgggttatgaaacataatggtcc

SEQ ID NO: 801417 - DNA, 109 bp, Homo sapiens
agctcacaaaggagaaagagcactaccaggtgttagatggggaaattgaggcagagaagccaagacatgtgctaaaggtcatgcaggctatgaatggagctggaatgtg

SEQ ID NO: 801418 - DNA, 99 bp, Homo sapiens
gatgatgattataatggacaagccaagcttcttctcagcctgttgataaccatgttagcccatcttccttcttgggccagacaccagcatctccagcca

SEQ ID NO: 801419 - DNA, 98 bp, Homo sapiens
cagttacgacaagaagaaaaacggcaacgtgtaatcagaaggcacagattagaggaaggaagaggtacagagaactacaacttagtacagaaagcaaa

SEQ ID NO: 801420 - DNA, 100 bp, Homo sapiens
gaagcagaaaccagaaactttaaatcttgagaaaagaagattgtctatcatgaaggagatgtatggtctgctggctgtgtgttggctgagctgttactag

SEQ ID NO: 801421 - DNA, 99 bp, Homo sapiens
gaagctggccaaagcctgcccagacggctcacctgtgcgggatggaacaaaagctgccactgcagagccccgccatggaagacacgccgttggtgatat

SEQ ID NO: 801422 - DNA, 98 bp, Homo sapiens
tgtccctttgcctcatcccaggttgccttggaaaatgccaacgccgtgtctgaaggtttgggcaaaactacccctgatccttcagctaacattagtct

SEQ ID NO: 801423 - DNA, 100 bp, Homo sapiens
ccaagacagagcgctactcctggcagtgcgtcaatcagagcgtcctgtgcgacccttggcttctgcgttcgaagagtcctgtaggtaacccccagctgat

SEQ ID NO: 801424 - DNA, 100 bp, Homo sapiens
tcacgtgacatcaagaggaagcggaaaccagtggccacagcatctttgtctagccccagtgcaggtaatcattaccaaatgaggaggaaaggacgatgtc

SEQ ID NO: 801425 - DNA, 99 bp, Homo sapiens
gaagtagaagcatcgaaagcgttggagaggtgttaccggaacggcggcgacaagggtgttcccgaactagagtggacttaattcagtgcacaaatgaga

SEQ ID NO: 801426 - DNA, 100 bp, Homo sapiens
ttcagttggagttggaatttgtgcaatgtttagccaacccaaattaccttaattgttatgatgtgattgctcaagcccaatctgggactgggaaaacggc

SEQ ID NO: 801427 - DNA, 100 bp, Homo sapiens
cagaaaccgccccagcgatggaagaggatcaggagctggagagctccagcggcgccatgagcaaatgaaaaagaatttggaagcacagcacaaagaattg

SEQ ID NO: 801428 - DNA, 98 bp, Homo sapiens
tcaagcctgaaggaaaggcagaactgcctgattacaggagctttaacagatgacaagagcacctcaaaggcagcagcctcaaggagcagccatggccc

SEQ ID NO: 801429 - DNA, 98 bp, Homo sapiens
catgatggtactgaaagtagaggaactggtctatgttaacaatgaatgggcaaccagtgttggggaaggagggagctttggagaacttgctttgattt

SEQ ID NO: 801430 - DNA, 100 bp, Homo sapiens
tacgactgcacgtggaacaacgacaccaaaacatgggcctgcagtaatgtcagcgagaatgtcacccacaaaagctgtatataatgccagacattggaat

SEQ ID NO: 801431 - DNA, 98 bp, Homo sapiens
gaaaaagtgaagaaaacaactcaggtcaaagactacagctttgtcactgaagtctatccagaagttaaaggagagattgctcgtaaagatgaaaagct

SEQ ID NO: 801432 - DNA, 98 bp, Homo sapiens
ctgaaccggcacctgcacacctggatccaggataacggaggctgggagaagaaactgaggcctggaatttgattaactcattcaaggttacccagttg

SEQ ID NO: 801433 - DNA, 98 bp, Homo sapiens
ggagttcgtctcttacgtctgcggaagtgcagctgcctcagttcttagcgcaggcatcttttccacaagtcctgtgttgacccctggcttctagacca

SEQ ID NO: 801434 - DNA, 98 bp, Homo sapiens
gcaggctggcaggcaacaccttaggggtaaccaggagccgacaacaactcctgacgcaatggttcagccttttactaccatcccatttccaccacctc

SEQ ID NO: 801435 - DNA, 101 bp, Homo sapiens
tcactgacatcttcggcgccagccaggacaccctgtccaccgcgctgcagtggctgctcctcctcttcaccagacaaggacgagtgctccaaggataacgg

SEQ ID NO: 801436 - DNA, 100 bp, Homo sapiens
ctctgctattgtctgctgcatccaaatcttctccctggacctcgtgcatacgcatcctggtggggaagaagttttaagggaacaagctggaggtgacgct

SEQ ID NO: 801437 - DNA, 100 bp, Homo sapiens
caatcagtttctaatccagttcacagaaaggaaagaccacagcaagattctttcattcgtctcctcctagcctgggggaccaggctcgaactgaccctgg

SEQ ID NO: 801438 - DNA, 100 bp, Homo sapiens
cgtgtctcttacaattaccaaacagaatggacaagcttaataaaataaccgtccccgccagtcagaagttgagagctggaagtcgagtgtgctactcaac

SEQ ID NO: 801439 - DNA, 98 bp, Homo sapiens
gtcttcatataccacgattaacagaggtacaaatgacctctccgagcagcactggcagtcccatgtttaaattttcatctccaatcgtaaaatctact

SEQ ID NO: 801440 - DNA, 100 bp, Homo sapiens
ccttccacctggccaggaatcagcaattctgtggtgttcttggtcacacatttatggagtttctgaagggcagtggagattactgccaggcacagcacga

SEQ ID NO: 801441 - DNA, 100 bp, Homo sapiens
gggaacttttctgtatacttactacaaccaactcagggatgtatgggctactgtgcggaagactcaagaatgaacaatccgtcagaaaccagtaaaccat

SEQ ID NO: 801442 - DNA, 100 bp, Homo sapiens
ccagaccagaagcccttctgaattaaggagtatggatgtgtccaacagccaaaaactcaagaaagtaaattgaaaattggtggtgtgtcttcagttaatg

SEQ ID NO: 801443 - DNA, 99 bp, Homo sapiens
ttcaaggatatgctgtattcagctcaggaccaggcaccttctgtggaaggtgtatgcaacagcgttattgcaacaggctaacgaaaacagacaaaattc

SEQ ID NO: 801444 - DNA, 99 bp, Homo sapiens
gttacctatgtacctgttaccactttcaaaagaagctgttttaggttatgtgaaagagatgtttcctcatctctaaggcttaccagaagctctgatttg

SEQ ID NO: 801445 - DNA, 99 bp, Homo sapiens
gctgcaagaaggacctgtgtaactttaacgaacagcttgaaaatgtcttatgatgtaatcagcgcgatttcacttcctgaatttcgatgaattctaaga

SEQ ID NO: 801446 - DNA, 100 bp, Homo sapiens
cagctgctgcacagaaattaatgcgaacagacagacttgaggtcagcttatttcggatcaagtggcagaaatcgtatctaaatacgaccccaatgtttac

SEQ ID NO: 801447 - DNA, 100 bp, Homo sapiens
agggccaggtgacctgtcctttcagcttctttctcacacgcagatgaacactggacttcagaaatattcagccagcaacagtccttcgtacagattctcc

SEQ ID NO: 801448 - DNA, 98 bp, Homo sapiens
cttgcctggcgactttggccggacttttgctaactgcggcgggcgagacgttctcagtctggcaagttctccggcagttctccggcgcccccaagcca

SEQ ID NO: 801449 - DNA, 100 bp, Homo sapiens
gatcggaactccaacaagaccctgccctctaccacctggaaggtgggagtcaatcattttgacaagtctcctgaaaggaacagctagcaggaactgaaac

SEQ ID NO: 801450 - DNA, 100 bp, Homo sapiens
ggacctgaaccttgctccgagagggagtcctcgcggacgtcagccaaggtgctggagaatctggtaaaagcaccattgtgaagcagatgaggatcctgca

SEQ ID NO: 801451 - DNA, 100 bp, Homo sapiens
gctgcacgatcagacagtcattcgcaaagggaagcaccactgccatttgtgccacaggccttcggaatttggggaacacatgtttcatgaatgccatcct

SEQ ID NO: 801452 - DNA, 98 bp, Homo sapiens
tttgattattgcttttggtccatggatgaatctaacactacaaaatacgctgtggaaggaggcaaaaccggaagaccttatggattcaaaacttagat

SEQ ID NO: 801453 - DNA, 51 bp, Homo sapiens
accagaagaaaacctgaatctctgagtgatcagggccaaagcggtcagtga

SEQ ID NO: 801454 - DNA, 100 bp, Homo sapiens
gctctccttgcagctgcttagacgctggatttttttcgggtagtggaaaaccagattgagattctaatgtattgccaactgaccagccgacagaagctgc

SEQ ID NO: 801455 - DNA, 106 bp, Homo sapiens
ttacaaagacatccagctctaaggagctcaaaacatcctgaggacagtgcctggaggccaagactaaggggctgcagagcggggtggacattggcgtcaagtactc

SEQ ID NO: 801456 - DNA, 100 bp, Homo sapiens
gcagaggaaccacacgctgatcatgttcctgggcttcccgatggactcgagtttttactatgtgagcatcccggtgcctgcacagcaaggactctcattg

SEQ ID NO: 801457 - DNA, 100 bp, Homo sapiens
agaagaaatgaggacatatcagtatcggaccaattctgattctgctcttcacacgagtgctctgagtaccaagccccaggacccctatggaggagggggc

SEQ ID NO: 801458 - DNA, 100 bp, Homo sapiens
tgagcgcccatatgggggttctggagagcggggtgtggggccttagattttagtgatgatgaaaaagagaaggaagccaaacagaggaaaaaatctcaga

SEQ ID NO: 801459 - DNA, 100 bp, Homo sapiens
ctggaccacctggagaatgtcatcaagcagcacattcaaggatcaaaatggtttcaatcccagaatactatgaaggcaagaacgtcctcctcacaggagc

SEQ ID NO: 801460 - DNA, 100 bp, Homo sapiens
ttagcaaaatgttctttactactaagcaccgttggtatcctcatggacgccagaaatagtgattccaaattgacatggtctcctggttcagttacaaaca

SEQ ID NO: 801461 - DNA, 100 bp, Homo sapiens
caggacactcctggacagtgatcctgatgtctgttgtgagctgcacactcaagggtgtgataattactaaaagatgtaactgaactgcagatccttggtg

SEQ ID NO: 801462 - DNA, 100 bp, Homo sapiens
agttgatgaacaatcatcagctggaactggcaaagcagctacacaaagagggtcatctcttctattgtacctgcaggtaaccttttaaggtggagaccgg

SEQ ID NO: 801463 - DNA, 100 bp, Homo sapiens
catgaaactgtttgatgactggatggcatccaatggaactcaaagaatgttttagctggtgccttgtttgggccatggctggggcttctgctgtgctgtg

SEQ ID NO: 801464 - DNA, 100 bp, Homo sapiens
caggtggggccaggctgactgaaacgccctgcagcatgaactggtgaccactcagcgcctcctgggagaacttgatgttggtgattcggaagaaaatgtg

SEQ ID NO: 801465 - DNA, 98 bp, Homo sapiens
tggatcgaaatgtccatgagaaaaagcttggagataaagttgctttttactgtgccggtggtggtgtgcacattgagccccggtatagacagttcccc

SEQ ID NO: 801466 - DNA, 98 bp, Homo sapiens
atttaattccttttcgaccttcaatccagttccaaggactccacggggttataatcaccaacagatgagtgaaggacacaggcagaaatctgaatttt

SEQ ID NO: 801467 - DNA, 114 bp, Homo sapiens
aagactctgaggctgatatgcaatgtcacttacaacattaatcagatactgcatttaagcatggtgacatggaccagaaggagagagatgttatcatgagggaattccggtcag

SEQ ID NO: 801468 - DNA, 100 bp, Homo sapiens
gctggctttcagagagaacagcgtttcagttttggtcatcggaagtggtgccttcagcacagaacaccgaaaatctctcccagcactttagaaaggggac

SEQ ID NO: 801469 - DNA, 123 bp, Homo sapiens
cttcaattcctgacaaaattatgggcagactgtttgctgacgaaggtccggaccctatttgtcagtggccttcctctggatatcaaacctcgggagctctatctgcttttcagaccatttaag

SEQ ID NO: 801470 - DNA, 98 bp, Homo sapiens
tgattttcctgcatggattgggagatactggaatcttgacaaaacttttggaagtgtcagatgatccccaagtcttagctgttgctgctcacgatgtt

SEQ ID NO: 801471 - DNA, 100 bp, Homo sapiens
tttcactatggggtggagacgtggtactcagcaagctcgagttaaagttggatgtgctggaacagtacgaggatgtcgtccaggaaagattgtgcagatg

SEQ ID NO: 801472 - DNA, 100 bp, Homo sapiens
tggaacagattctcagggtggagatgtcagcccttcagaaacagtattacaagatcaactcactatcctgaaggtccattctcccaagaagaggggacag

SEQ ID NO: 801473 - DNA, 100 bp, Homo sapiens
cttcaggcgaattattgaaaatgtggatgtgatcacaaggcctaagtatgagcccagaggacctggtcggcccttgtaccaaagaagaatctcatctagc

SEQ ID NO: 801474 - DNA, 98 bp, Homo sapiens
ttccgtaacctgcgggagaggtttggaattgatgatcaagatttccagatgaagacagtcagtgttgccttagttttgtgcctgaatgttggtgtgga

SEQ ID NO: 801475 - DNA, 100 bp, Homo sapiens
aggatttctttgcaccgagatcttggaccagacactcgacctcctgaggaatgaaagctactggttgattttaaagtgcctgggcctcacaggtttggag

SEQ ID NO: 801476 - DNA, 98 bp, Homo sapiens
aagaagcacagcatcatcctaaggacgcagctgtctgtgagggtccatgcctgcatcgcagtagaagactcagaaagtggtgtttacatgcgattcat

SEQ ID NO: 801477 - DNA, 100 bp, Homo sapiens
gatgacaggtccacagatcgcctgccttcagctcacacatggaccaagaatcgccttcagccctgtctggtgcatccttggcagaaagtgaggaggaaaa

SEQ ID NO: 801478 - DNA, 100 bp, Homo sapiens
ctggcctcagcaacctgacaattctgtcgtgtcccggttgttattgatgccttcagattgatcaatgctaatatgatggtcttaggacatgaaccaagac

SEQ ID NO: 801479 - DNA, 98 bp, Homo sapiens
cagctctgcctggtccaggactccaacgtccagcactttgatatgcctcatgatattgttgcatctgaagatgggactgtgtacattggagatgctca

SEQ ID NO: 801480 - DNA, 100 bp, Homo sapiens
ggagagctcgccttggagagcccaggagcaggggagacatgactcggtgaaatacctggagtgctcagctctcacccagagaggcctgaaaaccgtgttc

SEQ ID NO: 801481 - DNA, 99 bp, Homo sapiens
gcgcctcggccgccatggtcttcagcgatgggaatttcttagccataggctcacatgacaactgcatctatatatatggcgttagtgacaacgggagga

SEQ ID NO: 801482 - DNA, 98 bp, Homo sapiens
caagttggcgacgtccctgggcgcgtcagaacaggcgctgcggctgatcatctccatcttcctgggtgtgaaaatccttgaacccacccaaatacctg

SEQ ID NO: 801483 - DNA, 109 bp, Homo sapiens
gaaaagctgtggcaaccgaaatgagactccctcagatccagtgataattgacagttcattcggctcctaaagaagtagcagtgtccaaggaacaagaagagaaatctga

SEQ ID NO: 801484 - DNA, 98 bp, Homo sapiens
ctcagaaccattagacacatcagtggagtccatgctacctgattgcccccgggtctcagcagcaatcccacagagtattgatgaggaaactgaagttt

SEQ ID NO: 801485 - DNA, 100 bp, Homo sapiens
tgccaaaatcattgcagctataacattgatgggtcctcagtggtggttgaaaactgtaattgaacaggtacagatgaagtttttagttgagcaaatgagg

SEQ ID NO: 801486 - DNA, 100 bp, Homo sapiens
acctggcaaacccacctcctggctcttggctgtggaggagatgttaaagtaacccatcttgcaggacgacattgaagattggtcttctgttgatctaaga

SEQ ID NO: 801487 - DNA, 100 bp, Homo sapiens
ccggtcccaacttcgcttctctgctgaccctctctcgtcgccgctgccgccgccgcagctgccaaaatcaccagtggcagttcgcagcctccaggacttg

SEQ ID NO: 801488 - DNA, 100 bp, Homo sapiens
tgatgatattagtgatactttctctgaaccagggtatgcagaagttggctagtcaatacctgaagagagattggcctggagtaaaagctgatgatcggaa

SEQ ID NO: 801489 - DNA, 98 bp, Homo sapiens
actctgtccctggccacagatactatgaggactccttctcgacagtcagccaccagcagccgcatcctcagccccagtttctcagctacctcagtgcc

SEQ ID NO: 801490 - DNA, 98 bp, Homo sapiens
tctgaggcggcggcggcggcggggatcgtctccggcaattgcagtgcttttgtccacaaaggctgccgagaaagtctagcctcctgtgcaaaggtcaa

SEQ ID NO: 801491 - DNA, 100 bp, Homo sapiens
cttccactccctcctgcccagatccggccaaggacctcagcaggtggaggaactgcaatgtctggtggagaacagaaaccagagaggtactatgtgggtg

SEQ ID NO: 801492 - DNA, 124 bp, Homo sapiens
aattttgctactgtcagatggattgactatggaaaagttgccaaattgcattgagaactgatgtgccttcacaggaaacttggcccgtgtgtttccaggattcttgatgtttcttctgagctcc

SEQ ID NO: 801493 - DNA, 98 bp, Homo sapiens
tcatggctaaaagtgcggaggtcaaactggcaatatttgggagagcaggcgtgggcaagtcagcataagcagtactataatggatgtagacagcacaa

SEQ ID NO: 801494 - DNA, 98 bp, Homo sapiens
ctgcttggcaaggcaagtagcggcggcgcttcaaggtcctggaccggatcaaaggctcactgctgccccggcctggccacaactttgtgcggcaccat

SEQ ID NO: 801495 - DNA, 100 bp, Homo sapiens
gcccgccgagccacagccacgatgatcgcgggctcccttctcctggttgatgataattagaagcatgctttccactgaacttcccgacaacatttgttat

SEQ ID NO: 801496 - DNA, 99 bp, Homo sapiens
aaaaagctgctttccccccacctgaacagaaaactgcatttgacaaggtgaaaggaagcatgtttacaccaatgccaaaaagcagatgctaatttctct

SEQ ID NO: 801497 - DNA, 100 bp, Homo sapiens
ttgtcttggtatactacatggcaaaatgggaaaggtcgtcatacctcagaagaaaggcaagaaggctgctgcaacctcagcaaagaaggtggtcgtttcc

SEQ ID NO: 801498 - DNA, 100 bp, Homo sapiens
gctgacagttccactcccaccccacacaacgcagacggtgcgcctgtgcagccctcccaggtggagtacacggcagacttttcaccagtgatcattaaag

SEQ ID NO: 801499 - DNA, 99 bp, Homo sapiens
caacgcccccgggacatgcatcgtcccctggactctctcaatgacctagagtcccgcagggatgtgaagagagaagaaggagaggcctttgctagggag

SEQ ID NO: 801500 - DNA, 101 bp, Homo sapiens
tcttagttgatgatttagttgattctctgaagggtcaacatatttcactggcacctattcacaagcttgaagaagctctgtatgaataccagccactgcag

SEQ ID NO: 801501 - DNA, 100 bp, Homo sapiens
tctggacaagtcttttcatgtggtttttctacgcattgattccatgtttgctcacagccggcgcgacctggagattgagcgaccaatgccgggaacccac

SEQ ID NO: 801502 - DNA, 100 bp, Homo sapiens
ctgtcattgacaaatgctctccacccctagagttcttggatgactctgactctcatttagaaatccaaaaggactctcgttggggagatagagattcaga

SEQ ID NO: 801503 - DNA, 98 bp, Homo sapiens
gtcctcagagagtagcagctcacataactgggaccagaggaagaagcaacacattgtcttctccaagtgctaaaatgatgtattttctggacaagtca

SEQ ID NO: 801504 - DNA, 100 bp, Homo sapiens
tttctttgtttgtttttttcgtaaacatctgggtgtatatcaaacggcaagatgtccagtaatgtcccggcggatatgattctgacaatggagatattaa

SEQ ID NO: 801505 - DNA, 100 bp, Homo sapiens
tctttgtacctatgaaaagcagatttgtgataaacttgctgtagaagaaaccaaaggcatgttggagacttgggcaatgtgactgctgacaaagatggtg

SEQ ID NO: 801506 - DNA, 101 bp, Homo sapiens
gtccatgcaaaatgctgtgaatgagcctgcagtgcgcctggagagcgcctgggcggaccgggtccggtacatggtggtggtgtacagcagcgggcgccagg

SEQ ID NO: 801507 - DNA, 99 bp, Homo sapiens
tacagtgttggttcgacaagtggcaacaggtgtgtagtaatgaagccacctgcatttgtgatttcacctgggcagggacagattgcagtatccgggatc

SEQ ID NO: 801508 - DNA, 98 bp, Homo sapiens
tggcgtattcaccacaggaatcatgactcctggagaacggatcaagtgcttattacaggatgagagccactcagagtgggtgtcttgtgtccgcttct

SEQ ID NO: 801509 - DNA, 98 bp, Homo sapiens
aaacaagagatttccacagaaggttcttcacacacccccattcggcgtagtacccagagagctcaagatgtgtggcagttttcggatggaagctcgag

SEQ ID NO: 801510 - DNA, 100 bp, Homo sapiens
gaccctaagactgaaagaaaaaagtcttcatcttccagccagcctgcttgaatttcttgaaactgtgcaaaataaaatattacaattattgccttattca

SEQ ID NO: 801511 - DNA, 99 bp, Homo sapiens
caccagcggctgcagctctgcgtcttccagcaggatgtacagcagacactgtgcatcttagccaacatagcggatgggacaacagcaaaagatcttatt

SEQ ID NO: 801512 - DNA, 100 bp, Homo sapiens
cccggctcgaagcctggatgaaatagatctctcggctctgaggggaaaaagaaatagtggtttcagacagtgcttcttcgggagccagaagcactgcaag

SEQ ID NO: 801513 - DNA, 99 bp, Homo sapiens
gaaccatgacaggcatgttgtataaatgtacaggagtctatggtgatgtacatcgagtgaagattatgtttaataagaaagaaaatgccttggttcaga

SEQ ID NO: 801514 - DNA, 99 bp, Homo sapiens
tttgctgatgtacttcctgaagcagctgctctagtgaaatctttccctagatcattctgacctagttgcagagttgttgaaggagctgtctaaccataa

SEQ ID NO: 801515 - DNA, 98 bp, Homo sapiens
gcccacgggtggacagcagaggcgattgcagaaggagcccaggtgggcaccatgtccttgaagcttcaggcaagcaatgtaaccaacaagaatgaccc

SEQ ID NO: 801516 - DNA, 101 bp, Homo sapiens
aatccagatggcagccagtcagtggtggagaatgagtccctggaacgccagatgcgtgaaatggaagagaactttgccgttgaagctgctaactaccaaga

SEQ ID NO: 801517 - DNA, 98 bp, Homo sapiens
ctgaagaggagcgccagatggtggaggaatacacttatttatgaactttttcctgaaaccaagtacctctggtgacagtttacaaagtggaagcattc

SEQ ID NO: 801518 - DNA, 99 bp, Homo sapiens
ggatctttccggatcaatccagatggcagccagtcagtggtggaggttgtacatcctggagacctgaagaattctgttgaagtcgcactgaacaagttg

SEQ ID NO: 801519 - DNA, 100 bp, Homo sapiens
ctacaacgtcatcacgccctttctcttgctcaagattgcttccaagtatgatcatcaggcagaagaagatcttcgcaattggatagaagaggtgacaggc

SEQ ID NO: 801520 - DNA, 100 bp, Homo sapiens
ccaaggaggccctcaaagaagctgtcattttgccaatcaaattcccacacttgttcacagctctggacatcctgagcccaagtcccccacactcagtgca

SEQ ID NO: 801521 - DNA, 50 bp, Homo sapiens
gcgcaggccgcggggagcacctggcatttcctgtgttacatctgcaagga

SEQ ID NO: 801522 - DNA, 100 bp, Homo sapiens
ggactttctggccgagaccagccagtggagctgctgaatcctgcccgcgtgaaccacatgcccagcacggtgcacttggaggctcctcagctcttcatat

SEQ ID NO: 801523 - DNA, 108 bp, Homo sapiens
gatattatcaaatctactactgttcatggcagcctggagcattggtaagcgtcacactgccaaagtgagagctgctggagaactcataatcccaggaacgcctcttct

SEQ ID NO: 801524 - DNA, 129 bp, Homo sapiens
ccgggcaccccgccacacaagaccttccgcaagctgcgactcttcgacaccccgcacacgcccaaggaaatttcaagagcaggaatgtcctccttcaccagaaccaacacggaaagaaaaagacaagaa

SEQ ID NO: 801525 - DNA, 100 bp, Homo sapiens
tatttggatgcaaatatcgctacctcccagagagacctcatttaaggagattagtgcgagggtcagtctgtggattggagaatccatgttgaccaaatgc

SEQ ID NO: 801526 - DNA, 99 bp, Homo sapiens
cacatcccagcatagccccagttctcaaccgcatggcagggaccgtccaggagttggctgccttcgaccagcgcatgaagacatggcagcgctggcagg

SEQ ID NO: 801527 - DNA, 116 bp, Homo sapiens
cagagagttaacttctgtttacatggaactcagacatctgcaaatcatgtgagacggtttaagcggaagcatcttactgccattgactgccagcatttggctcggagtcacttggc

SEQ ID NO: 801528 - DNA, 100 bp, Homo sapiens
agtgaggattctctgagagcaagagtggatgaggccatggaactcattattgcacatggacggacttcctcgttctgcccatcttcctaacaaggctatg

SEQ ID NO: 801529 - DNA, 98 bp, Homo sapiens
aaatggtggaagatcagggatttctggattctctacgggatctcatagcagattcaaatccaatggaacggaaaacagttcttccttcaaagcatgca

SEQ ID NO: 801530 - DNA, 100 bp, Homo sapiens
tctctatcattcctcaagagccggtgctgttcagtggcactgtcagagaatgaacagccttccctcgtttggtttgacagaggaaagttttatttgactt

SEQ ID NO: 801531 - DNA, 75 bp, Homo sapiens
aacatagagaattctgggcttccacacaactccagtgctaactcaacaggtcctggatgcctcatcccttagttt

SEQ ID NO: 801532 - DNA, 100 bp, Homo sapiens
gtgtccccgcgtgcttcttagacggactgcggtctcctaaaggtgaaaagccatacaagtgtacctgggaaggctgcgactggaggttcgcgcgatcgga

SEQ ID NO: 801533 - DNA, 100 bp, Homo sapiens
tttggcattggatctagaagatgggaacttccttaaacttgcaaataatggcactgttctcagggtgaagcagctgaccgatgaggaggagtgttgtatc

SEQ ID NO: 801534 - DNA, 100 bp, Homo sapiens
tgttttcctcttgatcgggaactcctgcttctccttgcctcgaaatggaccccaactgctcctgctcgcctggtattgttgcagcatctggcagtgagac

SEQ ID NO: 801535 - DNA, 98 bp, Homo sapiens
gtgtcctcagtcacagaaacatcatccagttttatggagtaattcttgaacctcccaactatggcattgtcacagtgtttgaagaacctgaagatccc

SEQ ID NO: 801536 - DNA, 100 bp, Homo sapiens
atgaagagcccaaaacctattacgaactcaaaagtcaaccgctgaagagcagggaaagtacggtggccagactttaaccaggaagcttatgttggaggga

SEQ ID NO: 801537 - DNA, 100 bp, Homo sapiens
ctgaaggagtacatgccctttatgaagatattcttgaggatgaggtggaaagtgagaaatggtacctgtctacagacttcccttcaacatccatcaagac

SEQ ID NO: 801538 - DNA, 98 bp, Homo sapiens
ccgcaggcgcaaggcttcaggcgacccgtactgggcctactctgatgagaccctttttgctcttcctgctgcatctgagcctgtgatacgctcctctg

SEQ ID NO: 801539 - DNA, 98 bp, Homo sapiens
tgaattgagtataagaaaagccttcattacaagtactcggcaagttgtcagggacactcacatgggagtcaagaaggtggagcaaacacaacctctgg

SEQ ID NO: 801540 - DNA, 100 bp, Homo sapiens
ttgagattagccaaggagctaggattggagacctacaaagtgaatgaggttgagcgtctgatccaccatgtaaagcaatcatcctcttccagtggtagcg

SEQ ID NO: 801541 - DNA, 98 bp, Homo sapiens
gctacgtcaggtgcccctgctgcccagacaagtgctgctgccccgaggcccgcctctcggatgaaggtggacccaagtcagaaggagcgccaaaggcc

SEQ ID NO: 801542 - DNA, 101 bp, Homo sapiens
cgaatgcggattcgatcattcacatcggttctctacttaaaagacaatgactactgatgaaggtgccaagaacaatgaagaaagccccacagccactgttg

SEQ ID NO: 801543 - DNA, 99 bp, Homo sapiens
atggccagcccttggaagaggctacaacacaggccgactgcagcagtggcccagggcaaagagtgtgcgtcatcgatgagattgggaagatggagctct

SEQ ID NO: 801544 - DNA, 99 bp, Homo sapiens
ctgctgcgggaggcggcggcggtaggaagccggagacagcagggtgacagctccataatgggagaagtaaagaacaaagacttaaggaacagcttggcg

SEQ ID NO: 801545 - DNA, 99 bp, Homo sapiens
tattagtgctgctcctccagggaccgatccgtatactgcagcaggattggctgcagcagctacattagcagaaaatcccgttttgtcaacctaatgaag

SEQ ID NO: 801546 - DNA, 100 bp, Homo sapiens
gtgcctgggttccaggaggacacgctgcagttggccttcatcgacttgagacaagtatgtgactggtgtaagcacataagacacacaaaagaatacctgg

SEQ ID NO: 801547 - DNA, 100 bp, Homo sapiens
caagaccattgaagagctccgggacaagatgaaatttgtggaatctattctgagcaacaatacaacagatgaccactgccaggaatttgtgaatcagaaa

SEQ ID NO: 801548 - DNA, 98 bp, Homo sapiens
ttctaccatttcgactggatcatatcagaaagatggcatatcagatatgcaagtctgtgaattattactgacagccctgtcctaggagcacaacgtcc

SEQ ID NO: 801549 - DNA, 100 bp, Homo sapiens
aacattccaacgttattgtgcagaattcattaaacattcacaacagataggtgatagttgggaatggagaccatcaaagcactcatgaatagtacacagc

SEQ ID NO: 801550 - DNA, 99 bp, Homo sapiens
acctggagcccatcccctttcatttgcagatggaaagtttttaagcgatagatgatgaggaagatcgcttccatggtgtgcgcctgcagacttcgcccc

SEQ ID NO: 801551 - DNA, 99 bp, Homo sapiens
tttgctcttcagacatttctgtcaagaaccaagaaagcttgatcttattctacatcattttttacctgtaggtccagttacaacacagggatcacaaca

SEQ ID NO: 801552 - DNA, 124 bp, Homo sapiens
ggccaggacctccctggatgccctgaagatcagcatccgccagctcaagtggaaggagctaagatatcaacatggactagggactccagacttgcggcaaacccttcccaacctgaaaaacttc

SEQ ID NO: 801553 - DNA, 98 bp, Homo sapiens
tctgaatcaaatccaaagagtgtctgacatttcttttgtgcaagatgagcctcaagtgcttctgcattacaaataatcatgggccagactgggaagaa

SEQ ID NO: 801554 - DNA, 99 bp, Homo sapiens
attccccattcctctcccctattgctggctctgcagggctctgatcaagcggatccaagccatgattcccaagggactcggagatcatgcagcagaagc

SEQ ID NO: 801555 - DNA, 100 bp, Homo sapiens
ccagccggagtcgggcatcaagcgactaacatgaacgattggatgcccatcgccaaggagtatgatccactcaaagcgggcagcattgatggcaccgatg

SEQ ID NO: 801556 - DNA, 100 bp, Homo sapiens
tttctccttcctgggagcctgggcgcaggctccaggaggccagagctctactgaagcggcggcggccccgggggccagggggccggggactactgagaag

SEQ ID NO: 801557 - DNA, 100 bp, Homo sapiens
gagagggggcgctgagctgttgggactcctgggagagttggctctcaaggttctgatttagattcatcagcaactcctataaacacagtggacgtcaata

SEQ ID NO: 801558 - DNA, 98 bp, Homo sapiens
tatgccaaggaaaaactggagagcttcatcaaaaatagtgatagctttgataagaggaggaggaggaggcccggctggccagcatgcccgcctggagg

SEQ ID NO: 801559 - DNA, 98 bp, Homo sapiens
cccccatgtactacaggggtgcccaagctgcaatcgtggtttacgacattactaatcagcacttggctgctgttgaggaaaggaagatcaaatctttg

SEQ ID NO: 801560 - DNA, 100 bp, Homo sapiens
atgccagaatggttatctacacacccttctcatggcaatcgagttgagtacttggatagacttatacctcaggccatccggctgtccttagagcaagccc

SEQ ID NO: 801561 - DNA, 99 bp, Homo sapiens
ctccctccggtgggcccgggaggtagagaaagtacatgtcccagagcaagcacacggaggcccgggagctcatgtactcgggagccctgctcttcttca

SEQ ID NO: 801562 - DNA, 98 bp, Homo sapiens
ttaagggtactttggtgcatgaagctcaactcaactatttctacatctctcctggaggtccttttggaataaatcatgggattgagcttcattcagat

SEQ ID NO: 801563 - DNA, 98 bp, Homo sapiens
ctgcagctcatcttctcaaaaacaggaggctactcacagtcgaactacaactccccggggtccggccagaactacagtggccctcccagctcctacca

SEQ ID NO: 801564 - DNA, 98 bp, Homo sapiens
aaacaataagatcactgtagtgggtgttggacaagttggtatggcgtgtgctatcagcattctgggaaaggatccttcaaaccaaaaatgtggtggaa

SEQ ID NO: 801565 - DNA, 100 bp, Homo sapiens
atacgaggcgcaaggtggactggctgactgagaagatgcatgccagagacttcacagtttctgctctgagccctatgagtttgtctctctggaatggctg

SEQ ID NO: 801566 - DNA, 99 bp, Homo sapiens
tctgatcaccaaagaggaagcctctggaagttctgtcacagctgaggaagccaaaaagtgtggtagaagaggagacacggcgatcccagcaagctgctc

SEQ ID NO: 801567 - DNA, 98 bp, Homo sapiens
tgaggatggagtggctgcaaacaaaaagacaaatggacacctaccagggaacggagatgtgtatcaagaaaggctggcacgtttagaaaatgataaag

SEQ ID NO: 801568 - DNA, 100 bp, Homo sapiens
ctggtgtcattgcgagccaagtcttggatctcagggcgtctctggccgagcctctttttgtggaaaacgacagcagcagcagtggcctggaagacgccac

SEQ ID NO: 801569 - DNA, 100 bp, Homo sapiens
agtgggatcccagacttgccccaggacacctttatccagtttcctggatggaccaagttatagctgaggtggtaccagtttaagaagtgagaacttcttc

SEQ ID NO: 801570 - DNA, 98 bp, Homo sapiens
ctgagacctccactggctgtttgtttgctggatcatcgcttggtaaacgaggaagactatgaccgtctgaggcctttatcttacccaatgaccgatgt

SEQ ID NO: 801571 - DNA, 100 bp, Homo sapiens
agatccggcccatagccgagcagactggcatctgtaaggtgcggccgccgccggaagatgatccctatgatcttgaagatgtttctgcacagaaatgagg

SEQ ID NO: 801572 - DNA, 100 bp, Homo sapiens
cttcataagaagttgcatcaggtggtggagacatcccatgaggatctgcccgcttcccaggaaaggtccgagcatccagttttggatgaaccaatagcag

SEQ ID NO: 801573 - DNA, 98 bp, Homo sapiens
cagccaacaaaatattcatggttcttgaggaactctattttaagaacctctcaaaacgaaacaagcaaatcatggagaagaatggaaataaccgaaag

SEQ ID NO: 801574 - DNA, 98 bp, Homo sapiens
ggagcgcgatgtggagcgcttctttaagggctacgggaagatcctggaggtggatctgaagaacggggtggaactctggagagaaccaagcaaatcct

SEQ ID NO: 801575 - DNA, 98 bp, Homo sapiens
ctgcccgatgcactctttgcataagctctgtgaaaggattgaagggaatacagtgagtaacctgatcatgattatacctccaatgttcggtgcagttc

SEQ ID NO: 801576 - DNA, 98 bp, Homo sapiens
gaggaacttgagtcataatttgatgttgaatcagagagaacaactgtttgggcttatttgcctcagaggaacacctttgtcctagaatattgtggaga

SEQ ID NO: 801577 - DNA, 100 bp, Homo sapiens
aagtgttattcttcgacgctattttttggaactgacacaaagtttcatcattccattactactatctgaaaacccccccgatggagaaagattttcaaag

SEQ ID NO: 801578 - DNA, 100 bp, Homo sapiens
ggcggctgcgctgttcgtgctgctgggattcgcgctgctgggcacccacggagcctccggggctgcaccacaccccactctggccggagcacgccaagca

SEQ ID NO: 801579 - DNA, 99 bp, Homo sapiens
ttatgtttcagcagcacagggaattttcctctacgtagaatttcagctgcacgttatggagaagttctgcaggacaagttcgagcatcttaaaatgatt

SEQ ID NO: 801580 - DNA, 100 bp, Homo sapiens
cagggcagaggctgtggcagctcaggaagcggcccggggaactccatcacagcctgtaagaaggtggaccttccccttggcttacccttttataaatgga

SEQ ID NO: 801581 - DNA, 105 bp, Homo sapiens
cgtggagtacccgggagtggtgcgtgatgtggctaagatgctgccgactctgggcggcgaggaaggcgtctcccgggatgatcgctgcaagatccctttattcat

SEQ ID NO: 801582 - DNA, 98 bp, Homo sapiens
gagagagaaagtcagatgccccttttaaactccctcttcaaaactcatctcctgggtgactgattaaagagtctattgttggggaaatcagacgggaa

SEQ ID NO: 801583 - DNA, 98 bp, Homo sapiens
cacagacaacaaccgaacatacccttctatccagtggaaatttaatggagccaccatttcagaaccaaaagaaatttggaacaaacttcacaaagctg

SEQ ID NO: 801584 - DNA, 101 bp, Homo sapiens
ccagaggatatggttctcttccacaacctcacccagccaagaggccctgcatgtgacggagcgcaaatacctgaagcgagactggtgcaaaacccagccgc

SEQ ID NO: 801585 - DNA, 100 bp, Homo sapiens
ctgcctggctgcgagcacatgatggcgatacgggagctcaaagtgtgccttctcgggaactcatcccaagaacagtatccataaggaagatggaaaaggg

SEQ ID NO: 801586 - DNA, 98 bp, Homo sapiens
gcctcagcctcccgagtggctgggattacagcacatgctcaccaaaatgcaataccatgctatggtcgctcattctgtccacaaagattgcagctttc

SEQ ID NO: 801587 - DNA, 98 bp, Homo sapiens
agccggcggatgttcatgggcagcaccatcgagccagaagcagtatttgtcctgacactcgcctatggggacatgaaccacgagtggatcggcaacga

SEQ ID NO: 801588 - DNA, 99 bp, Homo sapiens
cggctgcgcgagcggagggaggcggctcctccacccccaccacctgtgatccgaaatggtgccagggatgctccccctcccccaccaccataccgaatg

SEQ ID NO: 801589 - DNA, 98 bp, Homo sapiens
gatgccgagttggcaggcagcccagagctgctagagttcttagcgccatggctacttattctgccacatgtgccaacaatagccctgcacagggcatc

SEQ ID NO: 801590 - DNA, 101 bp, Homo sapiens
gagatcagctgatgccagtcagagaagtttggcatataatcgaatagttgatgccctaaatgaattcagccagtcggatgatgattctgggtcagcttcag

SEQ ID NO: 801591 - DNA, 98 bp, Homo sapiens
gcctcagcctcctgagaagctgggactacaggaccgagtctcctgccattccgagcaggcctggtatgggtaatggtgtgaaggaaggcccggtgcga

SEQ ID NO: 801592 - DNA, 98 bp, Homo sapiens
gcaggtcccggatgttgcggacagtatgaggcaagcgcagggggacggggaccagcagctgtcgccgccgctctcagaattgtgacctggatcagcag

SEQ ID NO: 801593 - DNA, 99 bp, Homo sapiens
acaatccaagttccacaatatattgactactgccacaattccgaacagtccactttggaaagtgaagaatggaatccttgggaaggagatgaaaaaaat

SEQ ID NO: 801594 - DNA, 100 bp, Homo sapiens
tcatcgtgctattcctggtctacatcctgcgggtgcctttgaaaatcaacgacaacttgagcacagaattttaaagttcaagtcctcagcttcctctgga

SEQ ID NO: 801595 - DNA, 98 bp, Homo sapiens
cgccgcgtccttggctggcgtaatttaagaagtgcaacatggccaggggctgcctctgctgcttgaagtacatgatgttcctcttcaatttgatattc

SEQ ID NO: 801596 - DNA, 99 bp, Homo sapiens
tcctctgatagcgacgtggagagcccctacacgctgatcgattctggagaaaactggttgtcctggatgtttgaaaagttggtcgttgtcatggtgtgt

SEQ ID NO: 801597 - DNA, 100 bp, Homo sapiens
atccatgctccttgatgccgaactcttcaaggtggttgatgttatagggtcatcaccgagtggtcttctcacatcatccttcaggcagcaccaagagtca

SEQ ID NO: 801598 - DNA, 99 bp, Homo sapiens
tctgaacttgatatgtctgaaagcaaaacaagaagtggaaaagtctttcagaataaaatggtactgctaaagtcagacagcccaacaggtgatgtttta

SEQ ID NO: 801599 - DNA, 98 bp, Homo sapiens
gaggctggataaaatactgcattgcagctgacacacaagagttcaggaccaaactgcacaaagtatttcgtgagatcacccaacaccaatttcttcac

SEQ ID NO: 801600 - DNA, 100 bp, Homo sapiens
agctacagttcgagaagttgtgaacagactcgatcgttagggaatgagggaagtggaatcccgattgcttgatgattgatggactggtttctcagttagg

SEQ ID NO: 801601 - DNA, 98 bp, Homo sapiens
gggcatcgtagatattctacacaaactgagtcagtcaccagattcaaacctttgtgacaatgcctcagtgaaggagccctctctcctgatgggactgt

SEQ ID NO: 801602 - DNA, 100 bp, Homo sapiens
cttcattcagtgttggcccagaaactacaggctgaaaagcatgacgtaccaaacaggcacgagataaggtgagatgtcccatcatgatactttggatgct

SEQ ID NO: 801603 - DNA, 98 bp, Homo sapiens
taagtgccgtgttcacaccaaccctgaccggagatgcaccgaactggacatggctcgagatgacgaagatgatcctgcagaagctgaaaaggagggaa

SEQ ID NO: 801604 - DNA, 100 bp, Homo sapiens
ccgacttcagccagatgtccaagatgcaaaatcggatggtgattttactttgtaacctgaaacctgcaaagatgaggggagtattatctcaagcaatggt

SEQ ID NO: 801605 - DNA, 100 bp, Homo sapiens
ctctggaggtgcgaaaacgtagacgacggagtagcagattgagggcaatgaggccaaaatacccagagtcaacaaacactcgggtcctatacttcagcat

SEQ ID NO: 801606 - DNA, 100 bp, Homo sapiens
acccccttcgagatctccctctggatccttctggcctgcctcatgaagataggaattactctcacttccaccacccgatgtatggaaactgctatacttt

SEQ ID NO: 801607 - DNA, 100 bp, Homo sapiens
ccagtgaccccaagggttccccatttgagaacaagactattgaacgcaccttaagtgtggaactctctggaactgcagggactatgttcggagtgaactg

SEQ ID NO: 801608 - DNA, 100 bp, Homo sapiens
actttgatttttgtgaaacgtgtttcaagaccaaaaaacacaataccaggcatacatttggcagaataaatgaaccagtggacccatcaacttgtgccag

SEQ ID NO: 801609 - DNA, 98 bp, Homo sapiens
gagatcttccgccactacgaccacgaaggaagacaggaggtccgaggagaaagcggcagccatggcagcctcaaagaaaacagcccctccaggctccg

SEQ ID NO: 801610 - DNA, 110 bp, Homo sapiens
tgacactatgggaacctaccatggtatgacactgaaatctgtaacggatttttttcccaggaagccatcccgtcagaggggttcaagtgatgaaagttggcaaactgcag

SEQ ID NO: 801611 - DNA, 99 bp, Homo sapiens
aaaaatggcggaggggagccagtcggcgcctgaggcagttccatggaaaatgggagaccacctgatcctgcagactgggccgtgatggatgtcgtcaat

SEQ ID NO: 801612 - DNA, 98 bp, Homo sapiens
ctcgcgacgcgcccggcccggagcccccagcgcagcggccgcgcatccacctccagatcgacaggcagtacctggaagaccaggcccctttccctcca

SEQ ID NO: 801613 - DNA, 100 bp, Homo sapiens
tgcgtgttgtccacccaagatggagttcctcctggggaacccgttcagcacaccagtggggcagtgcctcgttccacagcctcctagattagaacctcag

SEQ ID NO: 801614 - DNA, 98 bp, Homo sapiens
tatgagaaggacgttgccaagattaaccaggacccccaggttcctgatcagtatggcacaatcagagctgtagcagaaggaaaggcagatcaattttt

SEQ ID NO: 801615 - DNA, 99 bp, Homo sapiens
gagcctgtggccgcccatcagggggaagaggcgtcctgttcttcctgggggactggcagctcgatgcattctatttctcatcatttggctcataactgg

SEQ ID NO: 801616 - DNA, 100 bp, Homo sapiens
tgaacaatgacactgaagagtccaagcaactcttggccatgctgatgctgttctgtgactgttcgcggcacctcatcactacgctgggagcggactcttg

SEQ ID NO: 801617 - DNA, 50 bp, Homo sapiens
tcgctttccctttccatcttaaagggggacttaggagccattgatgaaaa

SEQ ID NO: 801618 - DNA, 100 bp, Homo sapiens
tgcgagactggaagactgcaccataccagcacctgttcttcccggagcctatcagcaaagccattcccaaggctatggctacatgcaccagaccagtgtg

SEQ ID NO: 801619 - DNA, 98 bp, Homo sapiens
gcgacctggtcttcgccaagatgaagggctacccgcactggccggcccggaatctccgccacctccctactctcggctgtctcctcgcgacgagtaca

SEQ ID NO: 801620 - DNA, 98 bp, Homo sapiens
agcttccaatgagtatggcagtgtcagctgtacagccacactaactgtgacagggtttgactgccgatgtggaaatttgttttgtggacttcaccgtt

SEQ ID NO: 801621 - DNA, 100 bp, Homo sapiens
ccaaagacccctggagacatgtaatctatgccagcaattatgacaatgttagcagaccatgcagctcgtcagctgcttgatttcagccaaaaactggata

SEQ ID NO: 801622 - DNA, 100 bp, Homo sapiens
atccggaccctgagactcccctaaaggccagaaagaacaccttccaccatgaccacctcagcaagttcccacttaaataaaggcatcaagcaggtgtaca

SEQ ID NO: 801623 - DNA, 100 bp, Homo sapiens
gcccagcagcgtgaacacttcatgtcagaactatgacatggtcagtgggatctactcatgtggagatggctatttcgaaaacagcccactgatgtcccag

SEQ ID NO: 801624 - DNA, 98 bp, Homo sapiens
cggttcttggtgcccctgggcatcaccaacatagccatcgacttcggggagcaggcccttaatctcacttgcaacgtgtggggagacccgcctccgga

SEQ ID NO: 801625 - DNA, 98 bp, Homo sapiens
tttcacttatctcgaaagcctatcagcatagttaaggaccacagccgctttgtcaactgtgtgcgattctctcctgatgggaacagatttgccacagc

SEQ ID NO: 801626 - DNA, 100 bp, Homo sapiens
gctcttgcccaaagagaattttatactgtggatggccagaagttctctgtgacagcttatagtgaatggattgaaggtcctcagccagcagagccacgtt

SEQ ID NO: 801627 - DNA, 98 bp, Homo sapiens
atagaaactgatgcagaagatggaatcaaggggtgtggaattaccttcactctgggaaaaggcactgaagttggagagcgacttgcagttgtggaggt

SEQ ID NO: 801628 - DNA, 98 bp, Homo sapiens
gatgttattcgctgtatctgtggcctctacaaggatgaaggtctcatgatccagtgtgacaagtgcatgtcgatctaggtcaaatgaaaggaaataga

SEQ ID NO: 801629 - DNA, 100 bp, Homo sapiens
ttggatattcgcatgcctggggttacacctaaacaggcctggttgcagtatgcctgaaatttgggatgtagaagatcctgccaatgctgggaaaactccc

SEQ ID NO: 801630 - DNA, 100 bp, Homo sapiens
cctcagcctgtgagaacagatgtggccgtcctgcggtaccagccaccccctgagtatggggtaacgaggcatctgtcatcagttctggggaataagtttg

SEQ ID NO: 801631 - DNA, 99 bp, Homo sapiens
actgatcctcatgaacccagagggccggaaggaaagccaagaactcatagtgcagacagatgaagaccgtggggaagaaaacatgacagaaacagatgc

SEQ ID NO: 801632 - DNA, 100 bp, Homo sapiens
agatagtgcctttcagccctaccaggaacctacaagcagcaattggcgcctattatgactttgagagcccaaacatcagtgtgccctctatgtcctttgt

SEQ ID NO: 801633 - DNA, 98 bp, Homo sapiens
gagagcctgcctgcacggaagagacgcctcctcggaggaagaaggcacctacgatcaaactctggagttccgtaggggaggtgatggccagccaagac

SEQ ID NO: 801634 - DNA, 124 bp, Homo sapiens
ccctcgttttcaagaacttgagagtgagactttgaaatcagaggaattccagaagaggctgcacccttataagattgaagataaaactttccaagtccttggtaatctttacagcgagggagac

SEQ ID NO: 801635 - DNA, 98 bp, Homo sapiens
ttcatgggccggttttatgagtgggaaccatttgcagaaggcctggttgcagtatgcttgaaatctgggatgtggaagacccttccaatgcagctaac

SEQ ID NO: 801636 - DNA, 100 bp, Homo sapiens
gaggaacaagcgggaattccgccgcaacctccccatgcacctccgaagggcctacatgagtgctgcgctgaacatcttaaagttgctgtctgagttggac

SEQ ID NO: 801637 - DNA, 100 bp, Homo sapiens
ccaggctcctgtatccccgtttccagagccgcggccctcagggcgtggaagacggggacagggatgatatcgctgatttagtagaagctaaaaagttgct

SEQ ID NO: 801638 - DNA, 100 bp, Homo sapiens
gatgatttagttgattctctgaaggccgaggttgataaaaacatagaacttttgaaaaagaaggatgaagaactcagttctgctctggaaaaaatggaaa

SEQ ID NO: 801639 - DNA, 100 bp, Homo sapiens
atgacgatgatgatgaagaggatgatgatgaagaagttgtctgctggttctcagcttgaagaagattctgcagtccttattgatcctttttcttggcgtt

SEQ ID NO: 801640 - DNA, 100 bp, Homo sapiens
agaaactcagggcggccccttagctcctatgactggaaccattgaaaaggtgaacacagaagactcagccttcccagcagcccggggggagacccacaag

SEQ ID NO: 801641 - DNA, 100 bp, Homo sapiens
gagtacatgatccaggaggaggagtgggaccgcgacctgctcctggacccagcctgggagaagcagcagaggaaggctgaccggttccctgatgtgttac

SEQ ID NO: 801642 - DNA, 100 bp, Homo sapiens
ctatcctctggaggctgtgcgcatgcagcacctgcaaacactgggtgctggctgtatgctggggatacagagatgtacgggacacgcccttgctggagct

SEQ ID NO: 801643 - DNA, 100 bp, Homo sapiens
cgaccttaaccgttccaatggggtagcgctccccccattggacaagtggaagacctgcgaccgcatcaagcagtccgccagcggaaccaagcggcgcgtg

SEQ ID NO: 801644 - DNA, 100 bp, Homo sapiens
ttccgagagaacgagcacctcctcgaagtcatcccagtcttcagtatcagacacagcacagcagccatctgaagagcaaagcaagtctcttgaaaaaccg

SEQ ID NO: 801645 - DNA, 112 bp, Homo sapiens
caatgcgcatggcacggactcccggaccgtcactgtgggcgtggaatgactcagaattcatgattgaagaaatgcaggttagtttaaactttgaaggaaatttttaaggtgg

SEQ ID NO: 801646 - DNA, 99 bp, Homo sapiens
tagactgatgcttattagtcatcaccgttattcctactaacgtcctgtgtcactgaggtctgaagctgcgttggaccaggaacagattactgctgctta

SEQ ID NO: 801647 - DNA, 99 bp, Homo sapiens
aggaggcccctgccgtgtggacccgtaaaataaaatgggaattctatgagcatgccaaggctctgtgggaggatgaaggagtgcgtgcctgctacgaac

SEQ ID NO: 801648 - DNA, 99 bp, Homo sapiens
ggacaagaaactagagcaaataaccgttttgaaatttgagactgagggtgtgcccagtactgccatccgagagatctctctgcttaaggagcttaacca

SEQ ID NO: 801649 - DNA, 100 bp, Homo sapiens
ggcgtcctcaggagctgtggggtcccctgctagaagtgggggactcggcgggaattgcctctgcctcgctttatgatgtcaaagaatgatggtgagatac

SEQ ID NO: 801650 - DNA, 100 bp, Homo sapiens
atttcttcagcctcccggtcaaagtcaactgcaagcgagttatgtggagtttagacccagccagaatccacattcatctcaatggaaggatcctgcctta

SEQ ID NO: 801651 - DNA, 101 bp, Homo sapiens
tcctgaccagtctgtgtgacaccgtcggggctcttctggccagacagctcacaatccaggtgaccgaagaggcctatgtcccagtgagtgacatgaacggc

SEQ ID NO: 801652 - DNA, 101 bp, Homo sapiens
gggagagatgctgtgcataacaagttatggctccaggtatctgaaaactgaagagtggagaatatgttcagcagggaacaagaggattcttttagaaataa

SEQ ID NO: 801653 - DNA, 60 bp, Homo sapiens
atttgattaccagctctacttccaagaaccagaaaatttctaccttgaaccgtatctgaa

SEQ ID NO: 801654 - DNA, 98 bp, Homo sapiens
acgcggatttttggcctcatactctgttatagataaacaagggttgccacaccatttggaggttttgaaaaagcatcaagaatggttaaatttaaagt

SEQ ID NO: 801655 - DNA, 100 bp, Homo sapiens
agaattcacttttactaccccaaagtttgcatttaaatcaaacggtattgagatggattgggttatgaaacataatggtccaaatgacgctagtgatggg

SEQ ID NO: 801656 - DNA, 100 bp, Homo sapiens
ccgggacccagggcccgggatcgccgagcccgacctcgggcgccccgccggtcacctccgcgcggacaccaggatccctccccgcggcggcgatggcccg

SEQ ID NO: 801657 - DNA, 98 bp, Homo sapiens
cgagtttgatgatgaggagcccctccctgccatagggacgtgcaaagctctctacacatttgaaggggttgtgtccactgtggtccccgactctgccc

SEQ ID NO: 801658 - DNA, 99 bp, Homo sapiens
acaggcagcccagtctggtgtttggaatgacgacagtatgggaactctcagactttgataaagatggtgcattgacactggatgagttttgtgctgctt

SEQ ID NO: 801659 - DNA, 98 bp, Homo sapiens
cttttcagcttaaatcaagatattcctgctttcaaggaacatttaagagatttcctagttcaaataaaggaaaaccgggaggtgggagactggcgcaa

SEQ ID NO: 801660 - DNA, 98 bp, Homo sapiens
gaaagccgaggcggtggcgctcaagtaccagcagcaccaggagtccctctccgcccagttacaagtgtgcaaggagcccccctacaaagtagaggagt

SEQ ID NO: 801661 - DNA, 100 bp, Homo sapiens
cagagggtgcatcaattcttcgacaggaaaaaaatttgctggatattgatgcgccagtcactgttgtctgagggaagtcaaaagcatgcaagcctacaga

SEQ ID NO: 801662 - DNA, 98 bp, Homo sapiens
tgcgatcctgaatgggggcggcgtgcccgccggggggctagtggccacgctgcagagcctcgctccccagttaaagatctcagatgaccggctgactg

SEQ ID NO: 801663 - DNA, 100 bp, Homo sapiens
gcgctcggcgttccttgtctgcctcgctttctccttggccaccctggtccagcgaggtggtgatgatgtccagcaactctgtgaagcaggagaagaggag

SEQ ID NO: 801664 - DNA, 100 bp, Homo sapiens
cccgtggctatgccttcatcgagtacgaacacgagcgagacatgcactgcgtccgagctgggccacagcctgaacgagaacgtcctcaagcctgcgcagg

SEQ ID NO: 801665 - DNA, 100 bp, Homo sapiens
cctgcttggccagcgacagatcctttgctgctctgtctgccggttcttgaggttgaagatgacagcgatgcagagacctatggagaagagaatgatgaac

SEQ ID NO: 801666 - DNA, 100 bp, Homo sapiens
agtcaccactgaacaatatcagaaagctgctgaagaggtggaagcaaagttcaaagctgtaggtaaaacttgcctactgatcagttacacaaccaatgca

SEQ ID NO: 801667 - DNA, 100 bp, Homo sapiens
gttatgggctatttgtgtagcagaaggttatgaagacagtatggagtttccagaccatagtagacatttgctacagtgtctgagcgagcagagacaccag

SEQ ID NO: 801668 - DNA, 99 bp, Homo sapiens
cccccagcatgctctctgccggtggcatcacagccaccacagcatctttctgaagccgggagagggcctgtagggcttagcagtgtctgcaaaaacgaa

SEQ ID NO: 801669 - DNA, 100 bp, Homo sapiens
gcgggaacacagagagcgaagccaggcatcccgggcccaaatcctagacaaagccacagaatatatccagtatatgcgaaggaaaaaccacacacaccag

SEQ ID NO: 801670 - DNA, 98 bp, Homo sapiens
cgcgtccccagagagcgccctgagagaacagggtggccgcttggtccagcccaggacccagggatctcccccagccagagtctgtgtgcggaaagttc

SEQ ID NO: 801671 - DNA, 100 bp, Homo sapiens
gggaccaatggggacggtgtgtcacctgccaacggtgtggtcctggacaggagctatccaagttcatagccctgatgaagcaagttactctgctctccta

SEQ ID NO: 801672 - DNA, 98 bp, Homo sapiens
cagatcggcgcccagcaatcacagaagccgacaaggcgttcaagcgaaaacatgaccgctgagcccatgagccaaacaggcaggactcgtgaaattgt

SEQ ID NO: 801673 - DNA, 99 bp, Homo sapiens
caagactggtgtctttgtactttgataccaagaggtaccaggaagcattgcatttggtactatactggcaattgctggagaagattttgcaattgttgc

SEQ ID NO: 801674 - DNA, 100 bp, Homo sapiens
tggggatgtcagaatctggctcggaggaatctcagtagggacaacaggcaggagaattatgggagcgcatttccccaggcccagctccatgaccttctcc

SEQ ID NO: 801675 - DNA, 98 bp, Homo sapiens
gagttgagtgatattgaccatgatggaatgcttgacagagatgagtttgcagttgaggaggcgtctccctattccttacttgatatctgcttgaattt

SEQ ID NO: 801676 - DNA, 100 bp, Homo sapiens
aagatatcggagaaccggatatcccagcagtatctggctacccttgaaaacagctccctgtgctgtcaggaatctacaggacttggctcgtatttacatt

SEQ ID NO: 801677 - DNA, 98 bp, Homo sapiens
aattgtacatttgcccattctcaggaagagcttgaaaaagatgctgcctatggaagttgcaatttctacattacacttcttgactgttttcatgcagt

SEQ ID NO: 801678 - DNA, 100 bp, Homo sapiens
ggatttcgcggtggattcagaggaggtcgtgggggccgggagtttgcggattttgaatatagggatgagaacaagttgagcagtgccaacggccatgaag

SEQ ID NO: 801679 - DNA, 98 bp, Homo sapiens
tgggcaggaggcccttgagacttcactcactagccagctctgtgtgatactcgagcccatgcaagagctcatgtcacgccacaagacctacagcctca

SEQ ID NO: 801680 - DNA, 99 bp, Homo sapiens
ttgaaagaaaggtcaaaggcatctggaggcctttgaactggccacaggtgactatttgtttgaacctcattcaggggaagagtacactcgagatgaagg

SEQ ID NO: 801681 - DNA, 125 bp, Homo sapiens
gtcatttcgtacatatgagagggttgccttttcgtgcaactgaaaatgacattgctaattgcagtcattggagaaatcgatgaagaaacagattctgcgcttgatttggggaatattcgagcaga

SEQ ID NO: 801682 - DNA, 100 bp, Homo sapiens
tgtgggcgctgctggcgctctggctgtgctgcgcgacccccgcgcatggtatcatgatattagctggtttgacatcaagtcatttgtgagtcatcagatc

SEQ ID NO: 801683 - DNA, 98 bp, Homo sapiens
cgagacgttagcaagcggctgggctgtcacggaggcgggactgttgcaaccatgacatctgaagaaaagaaggaacggccaataagtatgataaatga

SEQ ID NO: 801684 - DNA, 99 bp, Homo sapiens
accagtccaggcccagcctctcgaatgggcacacctgtgtagttccaaaagctgagacaagatcttgaaatggtactgtccactaaggagtcaaagaat

SEQ ID NO: 801685 - DNA, 98 bp, Homo sapiens
gagaaggtggtgaggcttcccgtcatattccagcaaatggttatgagccttagagtttctgaactccaagtactgttgggctacgccgggagaaacaa

SEQ ID NO: 801686 - DNA, 100 bp, Homo sapiens
attgaaaatgcccgtctcttcatatttgagactttctgtcgcatccaccagtgtatcagcattaaagatatagatcagctatcaggaagggacttctgcc

SEQ ID NO: 801687 - DNA, 98 bp, Homo sapiens
gtgggtagagcatcagcattcttctgctgtccttgacataggctaatggaggttggcaggatgctactaccccttcatcagtgacctcccctacagaa

SEQ ID NO: 801688 - DNA, 100 bp, Homo sapiens
gattgatacacctaccagtccagttaccagtggacttccattattctttgtgataacagtaactgccataaagcagaatctccaatgaaaactatgttcc

SEQ ID NO: 801689 - DNA, 99 bp, Homo sapiens
acctccctcttctctctggaatgtgtgctgaaagtcatggcttttgggattctggatggccaggccatgttatgggatctcaacgaaggcaaacacctt

SEQ ID NO: 801690 - DNA, 99 bp, Homo sapiens
cctgaccagaaaggaactcccaagcgactgcaggcagaagctgagacggctaaggaggcaggtggaagtcatcataaagtttctgtttcacccgtcgtc

SEQ ID NO: 801691 - DNA, 98 bp, Homo sapiens
agctgtggaggtgacacaggaccataagccagaacttcccaaggaaagagaacgaatcgaaggacttggtgggagatacatggcccctgaagtacttg

SEQ ID NO: 801692 - DNA, 98 bp, Homo sapiens
ccaccaccacctgatataaaaaaagaaattagtgaaggagatgaagtagagcctaaacccaccaagggacgaatgcgcatccactgcttagagaatgt

SEQ ID NO: 801693 - DNA, 98 bp, Homo sapiens
caacttcagggttggcaagaagataggatgtgggaacttcggagagctcagattaggcagaatggctaatgcggatctggtgaagtatggtttggctg

SEQ ID NO: 801694 - DNA, 122 bp, Homo sapiens
ggcggtcaaaccgaagcagacaagaaccatcgcgatttaatattaaggaagagagatgtgaagcctgataacatgctgctggataaatctggacatttgaagttagcagattttggtacttg

SEQ ID NO: 801695 - DNA, 100 bp, Homo sapiens
ccaattttaggtggcagtcgcaacccatactattcggacagatggcacagaaaccgctgcgccttggaatgcagtagccctctgggcctgggatattgtg

SEQ ID NO: 801696 - DNA, 100 bp, Homo sapiens
acaccagatgagtacctggagtattccctgaagctaacgcaagaaaatgtcactgaaattcacaaatgcaaaacggattgaaggacttgatagtaatgtg

SEQ ID NO: 801697 - DNA, 98 bp, Homo sapiens
tactgccagcaagggtgcatccagctatatgtcagaatggttttcaagctggacgaggtggaatacatgttggtatcttttgatcatgaaaataaaaa

SEQ ID NO: 801698 - DNA, 99 bp, Homo sapiens
ggaaactcagcctgtgaccccagcgtgggtgaagataggatcaagatggccatgtggcaggaatggacagcaaattatggatgaacctatgggagagga

SEQ ID NO: 801699 - DNA, 98 bp, Homo sapiens
gactggtgacatcatcacagtggcagctggacttgatcgagaaaaacgcttcgttaagggactcaggcagtacgggaagaacttcttcagaattagaa

SEQ ID NO: 801700 - DNA, 124 bp, Homo sapiens
tgagccacagtgtgatcccagctttaaaggagatgcaggagaaaatacggcattgctaggtcagaatggcggcagtggagcatcgtcattcttcaggattgccctactggccctacctcacagc

SEQ ID NO: 801701 - DNA, 100 bp, Homo sapiens
atcaaggccaagtatccgccagtcaataggaagtacgagtgtgactgtcggcagtactcagtggaagggtgatattatgacactgacactgctattttga

SEQ ID NO: 801702 - DNA, 100 bp, Homo sapiens
atcttctggtcagagatacttcttaaagaattacatgaatgacagtcttcgaaccaatgtgtttgttcgatttcaaccagagactatagcatgtgcttgc

SEQ ID NO: 801703 - DNA, 134 bp, Homo sapiens
tcaggagctgtcagaggaactaagcagaaggcttcagatcactccagactccaatggggaacagttcagctctttgattttgcgcagaagctctgccatcttcttgggatgaatgtgatggagtttactcgggc

SEQ ID NO: 801704 - DNA, 98 bp, Homo sapiens
ctgtctggagaagagaaagaaaatttgcccagtgactacatggtacccattttctcaggacgtgaatctaacattataagcatttggaataatgggaa

SEQ ID NO: 801705 - DNA, 98 bp, Homo sapiens
catcgttgctgccttcttcgtcaagtttctggcccccaaagacaaaccaagtggagacacagcagctgtatttgaagaaggtggtgatgtggacgatt

SEQ ID NO: 801706 - DNA, 100 bp, Homo sapiens
ggagtcggcgccgagaacatgatttggagcaagaggtggtggtggccttcccccgaagaaatttggtaatcctggggagcgtttgcgtaaaaaaaagtgg

SEQ ID NO: 801707 - DNA, 100 bp, Homo sapiens
gctgaaggaagctgccttgtacccacatctcccgccaggacacagcagggcaagagcggtaccggaccatcaccaccgcatactaccggggcgctatggg

SEQ ID NO: 801708 - DNA, 100 bp, Homo sapiens
ctgaccccgtggtgatgggcaagaccaaagccgaacagttttactgtggcgacactgaagggaaaaaggagcagcagccaagctggacagatgacctgcc

SEQ ID NO: 801709 - DNA, 50 bp, Homo sapiens
tgcccgcctgcggctgctccgggccaggtcagagcagcccaccatgggat

SEQ ID NO: 801710 - DNA, 100 bp, Homo sapiens
aggtctgactgataaattaactcaggcccagatctttgactacggtgaaatccccaactttccccgaagtacaggtaacaactccaagtttcctttggat

SEQ ID NO: 801711 - DNA, 100 bp, Homo sapiens
cggcgtgttcatgcccccggggccgccatggcatcagatgaaggcaaactttttgttggagggctgagttttgacaccaatgagcagtcgctggagcagg

SEQ ID NO: 801712 - DNA, 98 bp, Homo sapiens
acaggactgtgacctgagctgtcagatcaccattcccaaaggggccagtgtcattcaaagatgtggctgtggatttcacccaggaggagtggcggcaa

SEQ ID NO: 801713 - DNA, 100 bp, Homo sapiens
tcttcttcgagtatttgtagaaggtcgtcattgaattttgagaagcattctgaaaactttgcatggacagagaatcgttatgatgtgaaccgtcgacgac

SEQ ID NO: 801714 - DNA, 98 bp, Homo sapiens
gctatgatggagactttgtctttgatgactcagaagctattgttaacaataagagcctggagaaagttcttgtggaattcagtcacaaggagttgttt

SEQ ID NO: 801715 - DNA, 100 bp, Homo sapiens
cttgaaatgaaaggagattccaacctacttcaggttatggcacacagcctgtttgggaaaagaaaatgaaataatggtatttggtgggagcaaagatgac

SEQ ID NO: 801716 - DNA, 99 bp, Homo sapiens
ggaactgcagaagaagctgtctctgctgatagactccttccagaataactcaaagtctgcgctcctcagaccaccggcaggtgaacagcctgatgcaga

SEQ ID NO: 801717 - DNA, 98 bp, Homo sapiens
tgaagctaccggccagggttttctttactctggggtcccggctgccctgtggcctcgctcctcggagggagtctgaatatgtttcagctcatcttcat

SEQ ID NO: 801718 - DNA, 99 bp, Homo sapiens
atcacgcccagctagccatcttctaattttcattccttcaaagaccaagatcactccatggatgaaatgacagctgtggtgaaaattgaaaaaggagtt

SEQ ID NO: 801719 - DNA, 98 bp, Homo sapiens
tttgctggagcacttgagccacgtgcatgaaccaaacccacttcgttcaagacaggtgtttaagccctatccctcggccagatcctgtgcataataat

SEQ ID NO: 801720 - DNA, 99 bp, Homo sapiens
cagagcggagacccccaggtcctgcgggcgcggagccttcttcatcccctacttcatcttcttctttgtctgcggcatcccggtgttcttcctggaggt

SEQ ID NO: 801721 - DNA, 100 bp, Homo sapiens
gcgccgcgaacttggtggccagcgccgcgcccggggccgtgcgctctcgggccactcggccgcagtggcccaccctcaggaccctcaccacccatcagag

SEQ ID NO: 801722 - DNA, 98 bp, Homo sapiens
gagcggggtccgatggttctcgaaggcccgcggcgccccgtgctgcagctgtctgtggaagcccgtaaagagatgactagaaaggctattaagacagt

SEQ ID NO: 801723 - DNA, 100 bp, Homo sapiens
tctggagcaaggaaaagatccctggaatatgaagggacacagtacggtagtcaaacccccaggcccagaagaatctgtatctgcatcaacaccagcagag

SEQ ID NO: 801724 - DNA, 100 bp, Homo sapiens
gaaccatggccgatgggggcgagggcgaagacgagatccagttcctgcgaactgtctggacaaagtgccaaaggatcttccccctgacacaactctgcta

SEQ ID NO: 801725 - DNA, 100 bp, Homo sapiens
gatgcagaagaggagtcctttaggaaggaggagatgttaaagtaacccatcttgcaggacgacattgaagattggtcttctgttgatctaagatgattat

SEQ ID NO: 801726 - DNA, 100 bp, Homo sapiens
agtgaaaaaaatagactaatggattaacgtccctgtcgtgtgacattttctggtatatgtctcgagtccacggtatgcaccctaaagagaccacccgtca

SEQ ID NO: 801727 - DNA, 98 bp, Homo sapiens
atggacaatgtcacctggaaaataatatgtacacaatgagccattattatgttgactatagtcaatggggccaatggagccaagtgtatggaaaccca

SEQ ID NO: 801728 - DNA, 98 bp, Homo sapiens
ttgcagaaatcacattggaccctcctcccaactgtaggtatcattgcccagtgcctaagatcttttatgttcagctcactgtaggaaataatgaattt

SEQ ID NO: 801729 - DNA, 100 bp, Homo sapiens
cccggcccctctgccgacctcttgcaatccaagtgacatgagccatgggtacgtgacagtaaaggaggaggacttcatccaacccagcagccgagaagag

SEQ ID NO: 801730 - DNA, 100 bp, Homo sapiens
aggcaccgggatcgtgaccgagaccgtgaccgagagcgtgaccgagagcgcgaatatcgtcatcgttagaagcttccaatcagaagactatacaacctcc

SEQ ID NO: 801731 - DNA, 98 bp, Homo sapiens
agggctctgatgtgtccctcacagcttgtaaaggttggatcgtcaaacgcaggctactaccttggtccatcaaatttttggagggtatctcagatcac

SEQ ID NO: 801732 - DNA, 100 bp, Homo sapiens
cagctctttgcatccggagagtggacaagaaaatttaacccttagtggcttctgaagaaaatggcagaaacatcgccagagccttctgggcagcttgttg

SEQ ID NO: 801733 - DNA, 106 bp, Homo sapiens
aattttccttgacctttaggtgcttttatattcatctcaaaaacaaaattctgaactcaggacttggcaagctcctggatttggatttggaattgcaatatctggt

SEQ ID NO: 801734 - DNA, 100 bp, Homo sapiens
gcttcgttatttcgggcactccacagattctgttgcgaaggcagccatctttagttcgtctttcctagagagggtgatcagcccatgacctaaacctcca

SEQ ID NO: 801735 - DNA, 98 bp, Homo sapiens
gcgaacagtctcgttgctgcctctgtgtacgctgaggggggaggctttgtgccttgggcaaagggcagcttactcctggaagaggactgactcaagga

SEQ ID NO: 801736 - DNA, 99 bp, Homo sapiens
acagctttaggaaacacctctacctcctgcgaggcctcccgggctccgggaaaactacactggccagggtgataaaagaaaatgtggctgaagttaccc

SEQ ID NO: 801737 - DNA, 100 bp, Homo sapiens
tctcattttcctacaacactggtgataacacaacatttcctgatgctgaagataaagtctgaagatgatgagaaactgaaaaagaggaaggagcgatttg

SEQ ID NO: 801738 - DNA, 98 bp, Homo sapiens
gatctatattccctttccagaagatgattccaacgccaccaattccaacctgatacactgcctctaggactgggacagatagccactgagtacctgct

SEQ ID NO: 801739 - DNA, 100 bp, Homo sapiens
tcagaaatccagtactaaactttctgagcttcatgacaatcaggacggtcttgtgtggcagctagactgtcttgcttgcttgctgaagttaatatgccag

SEQ ID NO: 801740 - DNA, 98 bp, Homo sapiens
tccctgcaattaccatctcacctatacgtgcaagaaaggaacagctggggctctcagtgcacataggtatttccgagataatccttccgaattatgct

SEQ ID NO: 801741 - DNA, 98 bp, Homo sapiens
ccatcagcgcggctacctgctgacacggaaccctcacctcaacaaggtctatggaaatgcaggacctagcaagtcctcatactcttgttggaggtggt

SEQ ID NO: 801742 - DNA, 134 bp, Homo sapiens
gcccgtgcggcagagatcggctatgaggaccccatcaaccccacgtacgaggccaccaacgccatgtaccacaggaaagaaggatggtgagatggaccggaactttgacacgctagacctgcccaagcgaactg

SEQ ID NO: 801743 - DNA, 98 bp, Homo sapiens
cacagagaagctgcagctgacttacatggaggagacgtgtcgtcactatgtggcccatgtgaaggcctcaggagtgcaagtagctgatgaagtatgtc

SEQ ID NO: 801744 - DNA, 100 bp, Homo sapiens
atttgaagataagtttaggccagacatggagcggggatctgatgagcttctttcttctggcatcattaacggaccttttaccatgaatagttctactcct

SEQ ID NO: 801745 - DNA, 132 bp, Homo sapiens
gccaatgagcagttaaccagagccatccttcgggagaggatatgtagcgaggaggaacgcgctaaggcaaagcacctgggaggaaataatgctggccatacagttgttgtggattctgtggaatatgatttt

SEQ ID NO: 801746 - DNA, 100 bp, Homo sapiens
tcaccaccatggcctccgtctgccacacgctgatggtgcagcaccgcatgatggtacccaaagtcaggcaccagttggagatgccaggacattactctca

SEQ ID NO: 801747 - DNA, 100 bp, Homo sapiens
agtttacagtctgactactggaagtcaggtcaattcagtgaagatatgatacccacagtgggcttcaacatgaggaaggtaactaaaggtaacgtcacaa

SEQ ID NO: 801748 - DNA, 99 bp, Homo sapiens
agcaacaaggctttttgcatttgggggaacatgatggcagtcttggaaaaaatggtaatccagtggcagagaatttccgaatggaagaagtctatttac

SEQ ID NO: 801749 - DNA, 99 bp, Homo sapiens
agaaggactcgctcgacccgtccttcactcacgccatgcagctgctgacggcagatatccaaacacagcctgtgagcttctgacttgtgatgtgccgca

SEQ ID NO: 801750 - DNA, 100 bp, Homo sapiens
tgttgctacagctgtggagcagtatgttccctctgagcttcgaaaggcaaggaggaagcttatctatgaaaaagcaaagcactatcacaaggaatatagg

SEQ ID NO: 801751 - DNA, 119 bp, Homo sapiens
tttcaggctgcctttcgagctcaggggcccctggctatgctgcagcactttgatactatctacagcattttgcagggcgaatgtgaacatgaagaccaacaaccaagatgaggagacgc

SEQ ID NO: 801752 - DNA, 100 bp, Homo sapiens
ctagtgaaccaaaacctttcctctactatcctgaaatcaaaggtatgatctcgtgaaatcttgagagaaactgaatgacgaatgaaactattgttcctgt

SEQ ID NO: 801753 - DNA, 101 bp, Homo sapiens
caaggaattcggtccagaggattacggcgaagaggtttgagaagatgatcagtgggatgtacatgggggagctggtgaggcttatcctggtgaagatggcc

SEQ ID NO: 801754 - DNA, 100 bp, Homo sapiens
tatatttgaaagaagccatattttcaggtgcgttgaaaactatacaggagctcgttgtgaagaggtttttctcccaggctccagcatccaaactaaaagt

SEQ ID NO: 801755 - DNA, 100 bp, Homo sapiens
aatcacaaaaaatcagttagggctgtggttttacatccaagacagtccccttcccctgagcccatctacaatagcgaggggaagcggcttaacacccgag

SEQ ID NO: 801756 - DNA, 100 bp, Homo sapiens
aagactacagatattatgaatacaaccatgatctcttccaaagaatgccacagaatcaggggaggcatgcttcaggtgctggagaatctggtaaaagcac

SEQ ID NO: 801757 - DNA, 100 bp, Homo sapiens
atctcagcaacccctgtgcttctccccaggtccagccaatgcattcagaagccaaaatgatattgatgatgttaagaagttcaaaccgggttacctggaa

SEQ ID NO: 801758 - DNA, 100 bp, Homo sapiens
ccggcttattgaacacatcagaatccacacaggcccgatgagagaaagggaaagttaaggatgctggagcagaacaatggatttctctttctctttcatg

SEQ ID NO: 801759 - DNA, 100 bp, Homo sapiens
gtcgcgaaggacctggcgtctagagatgtggtgtctcggtccatgactctggagatccgagaaggaagtcagctgtcatgcgagggcactcaagcagccc

SEQ ID NO: 801760 - DNA, 98 bp, Homo sapiens
aacgggaggtgaatttccatgtcaacatagtcctggatatctatagagaaatggggtttggtcactatgaagaagaagaaagctgttgggagaaacaa

SEQ ID NO: 801761 - DNA, 99 bp, Homo sapiens
atggtgacatcaatgaaaggagggttctgacacgttctcacctcgcgggatggcagctgctgatttgtcccatggaccgtgtttcttcgcctcgcctcc

SEQ ID NO: 801762 - DNA, 98 bp, Homo sapiens
ggcagcatgcagtgctttctggggagattcttcaagcaatcactatgtcaacagacacaggtgtttcccttccttcatatgaggaagatcagggatca

SEQ ID NO: 801763 - DNA, 100 bp, Homo sapiens
atgtcagggaccaccctgaggaccaggacaagctgacccacctcaaggacctgattgcatggcagttgaccagatataccatctggcatctccagcctcc

SEQ ID NO: 801764 - DNA, 99 bp, Homo sapiens
gcgctggataaagatgcgcctctgcgatttgcagaaatggaatctagttcatcagactactataataaagacaatgaagaggaaagtttgcttgcaaat

SEQ ID NO: 801765 - DNA, 98 bp, Homo sapiens
ggtggaagtgaatccctttggtgaaactccagaaggacaagggtgtcgtgttaataaacccagtctgatatcccagttggaacaagacaagaaggtgg

SEQ ID NO: 801766 - DNA, 100 bp, Homo sapiens
agttcaacaagtgtcacggcatacaagcagctttaccaacagggacgcttatgtcaactgggcagtgaattttgtgaattggaagtttttgctaaagtac

SEQ ID NO: 801767 - DNA, 100 bp, Homo sapiens
gacccgttctccctccagaacatacacttacatctctagataacagtctgcactttcacccgtttcagatatccctcctaaatgtacaatcaaggatttg

SEQ ID NO: 801768 - DNA, 98 bp, Homo sapiens
gcgagcagaactacggcgagcgggtcctttcccataacctgtgcacggtgctgaaggttcctcatgacccagttgcccttgaagagcacttcagggat

SEQ ID NO: 801769 - DNA, 99 bp, Homo sapiens
ctcgtcattaattggacacagtgccagagtgtatgcactttactacaaagatggacttctctgtacaggtactaggttttgacaagcttgcatcatgcg

SEQ ID NO: 801770 - DNA, 100 bp, Homo sapiens
accaaagaaattgcctggtgatgacagactgatgaaaaatagagctgatcaccgttccagccccaacgtagcaattatggctgcagcttcgattgccaat

SEQ ID NO: 801771 - DNA, 100 bp, Homo sapiens
gggagaagagagaagacgccggccaggcccctgtgcagatgtgatgtttactgggacagcagatggccgggtcgtaaaacttgaaaatggtgaaatagag

SEQ ID NO: 801772 - DNA, 99 bp, Homo sapiens
ctacagatactttgaagtagaagaagctgatgaaaatggtgtgaatggaacattaacttcaaatgtagcagactctccccggaataaaaaagagaaatc

SEQ ID NO: 801773 - DNA, 100 bp, Homo sapiens
cacccttgggaccaatgtgctggggaggaaggtcctctatctgccgagcttcttcacctacgggtaagggacgagtcttctggaaggctctgccatggac

SEQ ID NO: 801774 - DNA, 100 bp, Homo sapiens
gggtgactcagcttcgagcttgtgccaaataccacatggaaatgaattctaagaatggacagcaaattatggatgaacctatgggagaggaggagattaa

SEQ ID NO: 801775 - DNA, 100 bp, Homo sapiens
gtccactgcaccctgcgcgagaagaatggagatgtatgcatttcgattcttcatccgcctgtagatgacccacagagtggagaactgccttctgaaaggt

SEQ ID NO: 801776 - DNA, 100 bp, Homo sapiens
caccgtggtggccgacacgggcgacttccacgctggaggagcaccggaattcacagaagcagatgaagctcctacagaaaaagcagagccagctggtgca

SEQ ID NO: 801777 - DNA, 100 bp, Homo sapiens
cttcaagccaaacatcaagcagaatgtgatttgcttgaagatatgaggagctgtgactaatgagaattaaaggccatggatgaagatgaatttgaattgc

SEQ ID NO: 801778 - DNA, 100 bp, Homo sapiens
gaaggaagatagttcgagagaagaaaattttagaagttcatattgacaaagaaccgtattgctgttaataagaattatccttgaatattgccagtgtgtg

SEQ ID NO: 801779 - DNA, 98 bp, Homo sapiens
tagagctgccaagaagcattcttcatctaaagataaggttgtttacattcagagctctatcaataagaggaatacatattacagtgaattcgacaacc

SEQ ID NO: 801780 - DNA, 100 bp, Homo sapiens
cttctggaggattgaagagtatttgaagtctgtgtcaaacatccatatcataagtggaattttggagatattcaaaggttaatttggagtggcccctgga

SEQ ID NO: 801781 - DNA, 100 bp, Homo sapiens
gggcgccggtgtcctggcctcttcctcaggttcctttggtatcatccacaagtgaggggtacacagcatctcaacccttgtaccagccttctcatgctac

SEQ ID NO: 801782 - DNA, 100 bp, Homo sapiens
gtgaaacggagccagcggctgaggaggggccccagcagcccccgaaggccctatcaggacatggagtatgaaagacgtcagtatctgcagaacagtaagc

SEQ ID NO: 801783 - DNA, 100 bp, Homo sapiens
atttaccaaactagcagtggacagtatatcactccatggattcctttgggcaacccagaccagaagataatcagtcagtagtcagaagaatgcaaaagaa

SEQ ID NO: 801784 - DNA, 100 bp, Homo sapiens
tataccagctgtagcaaaagtgggaagccaagcctttcctcccgaaaatgcttggacagaagagatgagtactatttccactaaggcctagaattgccta

SEQ ID NO: 801785 - DNA, 98 bp, Homo sapiens
cctccacctggccatcgccctgcgcaccaacgcccaggaccagttcctgctgaagcaggcagtcactgaggagaatattgcttctttgcagaagagag

SEQ ID NO: 801786 - DNA, 100 bp, Homo sapiens
gttaaatcaggatggctggataaactctctcctcaaggatttacattggtgcagaagcatacagtggaatttaaccaagtggcgatggctaattcagatg

SEQ ID NO: 801787 - DNA, 100 bp, Homo sapiens
cttcagcagcaacagcagcagcaagttagtggattaaaatctcccaagaggaatgacaaacaaccagctcttcaggctggatcctcattgaccgctgtgg

SEQ ID NO: 801788 - DNA, 100 bp, Homo sapiens
ttctttgcctcaagacccagctattgttcaggtgtttgtggccagtcctcacaaaacacagcctattgtggagatcctgttaaaaaatcagcccaaactc

SEQ ID NO: 801789 - DNA, 100 bp, Homo sapiens
gggaaatctggcacaacggctgggagaggaaacttgatgcttctgggccaccatttgccagggcctcgctcgagggggggccctcagcctcttggccttg

SEQ ID NO: 801790 - DNA, 100 bp, Homo sapiens
tgcatatgattggctctttagctgaaatacttctgaaggatagtgaatattacaactctttgaaatggatcctggagaatgaccctactgagctggacct

SEQ ID NO: 801791 - DNA, 99 bp, Homo sapiens
gagcagatgtcctcttctagggaagagagagcactgggggtgtgctcagacttaattcagtgcacaaatgagatgaatgtgaacatcccacagttggca

SEQ ID NO: 801792 - DNA, 128 bp, Homo sapiens
gaatgttgcacgcattagtgaggataggcagagaagaagggctgaaagcactctactcgggttagggcctagtcaaaattttgaagctgagtcaattcaagataatgcgcatatggcagagggcacag

SEQ ID NO: 801793 - DNA, 100 bp, Homo sapiens
aatgattgagtatttcattgacgtagctcgggagtgttttaacattggcaacttcaactccttgatggcgataatctatcctctgccttgtcaatgttag

SEQ ID NO: 801794 - DNA, 100 bp, Homo sapiens
gtgacgacgagcccctcgtctgtgagaggaaccaccagtggaaccacgccttgcccagctgcgacggtggatgcccggagcataccagtgttagcaaaat

SEQ ID NO: 801795 - DNA, 100 bp, Homo sapiens
tctagttttgaataagtctgggtgaccgcacctaaaatgatgctgcacttaaaaggatgcttgttttgatgtcctgctcattgttttccctatgaagtat

SEQ ID NO: 801796 - DNA, 100 bp, Homo sapiens
atcatcacctaccttttcccagacggacagagaacatggttcaaaaacaagtgcaaaggccctttatggggagcatgtaacttcaaggtttaaaaacgag

SEQ ID NO: 801797 - DNA, 100 bp, Homo sapiens
cctgtaccacactgaggagcgcggccagccctgctcgcagaattaccgcctcttctttagcctatggcatgtctgcgttacctttaaatctgataaaagg

SEQ ID NO: 801798 - DNA, 100 bp, Homo sapiens
ctgagcagacgcctccaggatctgtcggcagctgctgttctgagagcacagcaatggaggaaacagctatatgggaacaacatacagtgacgcttcacag

SEQ ID NO: 801799 - DNA, 98 bp, Homo sapiens
aataacggagcaacttgctaatggcaggcattttacaagtgaagaaaatatttggaagctctgtgaatacatcaaaaaccatgaccagtatcctttag

SEQ ID NO: 801800 - DNA, 101 bp, Homo sapiens
ggaagaaatgatggaaggagaaacaaacttcagctctgaaatagaagatcttgcaaggggtgagaatccttttgaaattcaagaccattctcaggatcagc

SEQ ID NO: 801801 - DNA, 98 bp, Homo sapiens
gaagcgggctgtgtgccccttctccacccagaggtactataagatctccgtggtgctcatgtgctttgtggtccccacgctggtgccctggtacatct

SEQ ID NO: 801802 - DNA, 100 bp, Homo sapiens
aacgaaagcagtgacggaggagcttgtaccaccgggcatgtatatcttcctgcacacggtgaaggggacaccctttgagaccccggaccagggcaaggcg

SEQ ID NO: 801803 - DNA, 100 bp, Homo sapiens
gctcaactcaactatttctacatctctcctggagagcccccctccatgcgcctgaaggcccgacccagcagccctggcttttccgtgcttacctgcagcg

SEQ ID NO: 801804 - DNA, 100 bp, Homo sapiens
gatgtcagtgaagtatcagaaagcagtgtcagcaacacagaggaagtgccagggtctctgtgtctcagaaagcttcctttgctccaataagctttgcaat

SEQ ID NO: 801805 - DNA, 100 bp, Homo sapiens
tcttcggtagctaccgaaacgctctgaaaatcgagccggatctcattttgcccaacggtggtactccagcaggtacttcaagtccagcttcttcatcttc

SEQ ID NO: 801806 - DNA, 100 bp, Homo sapiens
ctgactgctccaaaaaaggataagcagggcttcacagaagaggtgacaggaaaattgcctaagaattatgacccaaaagttaccccagatccagaaagat

SEQ ID NO: 801807 - DNA, 100 bp, Homo sapiens
cagagcatcccccaaagacagattgaagaaatgcagagacagaaaaactaccggcagagggtcgatgagctgaagttcaccagcgtgaccgacagctccc

SEQ ID NO: 801808 - DNA, 100 bp, Homo sapiens
caccacagccacccttggtgatgagcctcggaaagtgctcctgcggctgtatggagcgattttgcagatgctcagatcatcctgcacttgaaaaatgaag

SEQ ID NO: 801809 - DNA, 98 bp, Homo sapiens
atactctgcccaaccgcacggtcaccctggtttctcctcttcaaaaatctgaagttgttgagatggttaagaaacaagtcaaagtcgtaacgcttgca

SEQ ID NO: 801810 - DNA, 100 bp, Homo sapiens
aggggccatcgctgccgtctttcacacactgataggctcatgcacaattagttcgagaagttgatgtggagaaggtgtctgcttttgagaatccatatgt

SEQ ID NO: 801811 - DNA, 115 bp, Homo sapiens
agggatgaaaaggaagcgctggggcagaatgaggaatctcccaaacaggcatcaggacagaaaggtgtccaagtacctgtatcacagccgcctacgcccacctagtggccagtcc

SEQ ID NO: 801812 - DNA, 100 bp, Homo sapiens
atgccggtcaaaggaggcaccaagtgcatcaaatacctgctgttcggatttaacttcatcttctggaagcagctgacacaggatgatgatactgatgcgg

SEQ ID NO: 801813 - DNA, 100 bp, Homo sapiens
gtggccgattactgcgagaacaactacatacaggtacatgtgacagcactgcagcgatgagtggaattttaaagaggaagtttgaagaagttgacggctc

SEQ ID NO: 801814 - DNA, 100 bp, Homo sapiens
acctggtggttgaaagttttccttcttacagagatgtgactctgtttgagatattctctaagccgctttcatcatgggagaaatagagcagaggccgacc

SEQ ID NO: 801815 - DNA, 105 bp, Homo sapiens
atacagatccaagacaaagacaggatgggcactgctggaaaagaatctttccctgaaattaacaaaggacgttgatcaagaagccaggtgttcccacatcagccg

SEQ ID NO: 801816 - DNA, 100 bp, Homo sapiens
gagaagaaatacaagccactcaacacaacacctaatgccaccaaagagatcaaagtgaagatcatcccgccacagcccatccttcccctgcggagtatgt

SEQ ID NO: 801817 - DNA, 100 bp, Homo sapiens
aaaggtcccccttctgggaaagaccgagtgaagaaaggtggatcctacatgtgccatagggcctgaagaagtcagtgatttatagttcactaaaactgca

SEQ ID NO: 801818 - DNA, 99 bp, Homo sapiens
atgaagagtcctgaccacaatggggaggacaacttcgcccgggacttcatggcgagtctgcggacaccagaactgacctgggagcgagtgagatctcaa

SEQ ID NO: 801819 - DNA, 99 bp, Homo sapiens
tttatttataatgacccaaccttggaagtttgtcacagtgaatcaaaacatgtccaacaagcacccatttgtggacagcaatcttctctaccagttcag

SEQ ID NO: 801820 - DNA, 99 bp, Homo sapiens
tagaagcttccactccctcctgcccagatccggccaaggacctcagcaggttatgcatttcacaaatccagaagtttttctttgagaatttcaagaaca

SEQ ID NO: 801821 - DNA, 98 bp, Homo sapiens
gaacatttctgggtgacactcaacaggattcccgctcttccaccaaagccacctaagccaatgacttcagcagttccaaatggaatgaaggacagttc

SEQ ID NO: 801822 - DNA, 100 bp, Homo sapiens
agttttatttgaaggagagctttgaactgatcaagaagctactctagaagtcggagcagaggatggtacagcagaggccgaaccagaagccggagcagtt

SEQ ID NO: 801823 - DNA, 100 bp, Homo sapiens
tgaccctttttgctgtgtggatggtactgagggagagccggatcctttcccagaagaatgagaatgaggaggtgttcaaggagtgcttcacattcccaag

SEQ ID NO: 801824 - DNA, 100 bp, Homo sapiens
ccaaggttttcgtcggggaggtggtagaagaagttcatgcgggagatggcaggggctggcacatgacagtggagcagaaatttggcctgttttctgctga

SEQ ID NO: 801825 - DNA, 100 bp, Homo sapiens
ccagagaatcaagctatccaaatgcgattagttgatgtggcctgcaaggtagatttcgggcagacaacttgaacaagctgaagaacctatgcagcaagac

SEQ ID NO: 801826 - DNA, 129 bp, Homo sapiens
ggcttctgcatccccagcagtaggaacacttgtgaacatatctatgagtttccccagctttcggaggatgtcagaatagccaggccagaagaaggaaggcctgtggtgagtgggacaggaaatgacatc

SEQ ID NO: 801827 - DNA, 100 bp, Homo sapiens
atcccagtggcggctgccaaggagacgaaaaactaccggcagagggtcgatgagctgaagttcaccagcgtgaccgacagctcccagatggagcacgcca

SEQ ID NO: 801828 - DNA, 115 bp, Homo sapiens
actgaatcaacatgggcaatgagaacagcacctcggacaaccaggcagagactccccctaatgggccagattgtggctatggctcctttcaccagcagtactggcttgacggaaa

SEQ ID NO: 801829 - DNA, 100 bp, Homo sapiens
gacatgggtactatgcaggaaagaattaccactaccaagaagggatctatcacctctgtacagcacccagtcagcttgaagagtttcaaatggaccctac

SEQ ID NO: 801830 - DNA, 98 bp, Homo sapiens
aaaatggagcccttcaccaatggggagctcatattgatgtacgtaacaagaaggggaacactccattgtggctagcagcaaatggtggacacctcgat

SEQ ID NO: 801831 - DNA, 99 bp, Homo sapiens
cctttcacttattcatctgtccagcatgactcatccccgggagtgttgagaaattaaggatgcagacactcagggcgtgtgtcttgcacagccagccag

SEQ ID NO: 801832 - DNA, 98 bp, Homo sapiens
gcggcaaaggagcagccatgagggccgggcccagtcaccgaccgcagaagaaatccttagacaagagctggagaaaaaagaaacgcctagtttatact

SEQ ID NO: 801833 - DNA, 100 bp, Homo sapiens
aaacatgttaggaactgggtccccaaagtcttggaacagcgacgacaaggcttggaaacatacttacaggcgagaacgtcagtattctgtatgtaatagt

SEQ ID NO: 801834 - DNA, 100 bp, Homo sapiens
ggacgggctccgtggctggttcccggcgagctacgtgcagttgctggaggtatgaatctccagaaatagctctaaattgtggaataatgttaagagaatg

SEQ ID NO: 801835 - DNA, 100 bp, Homo sapiens
cactgtggccatcattctccttacctgtctgatgagagctgatcttcatgccactgtgtacactttgggccagattatgttgtatgtggatggaatgaat

SEQ ID NO: 801836 - DNA, 143 bp, Homo sapiens
agaaactattgctgtaatgagctggatgaagtcctatccatttgtactttcagcaaacctgcatggaggcatgaaaacagccctggaagtctgccctggcgcctgcactgagactaatccaggtcactttagggaaactgccc

SEQ ID NO: 801837 - DNA, 100 bp, Homo sapiens
actcttgccggccggcttcgctgcgggtttgcactgcccggagcaccccaagatctggctacctcgggccctgaggcagacctacatccggaaggttggg

SEQ ID NO: 801838 - DNA, 100 bp, Homo sapiens
ccaagtttcacatccttgtctgtgaagctaaactcaatgctgctgtgtgggaagaagatttgtaaagaaaactcttagggctacttctacaagtccgaac

SEQ ID NO: 801839 - DNA, 98 bp, Homo sapiens
attggaagaaatatattactggcacagatatattggatatgaaactggaagacatcctgcaaatcctgaaggaacccaaagtggctgcttctgttttg

SEQ ID NO: 801840 - DNA, 100 bp, Homo sapiens
gtttgggaagaaaaacagaggagttctattaagacggtgtattccagagcaaatgaaaaagagccttgctgttggtggttagctaaagtgaggatgataa

SEQ ID NO: 801841 - DNA, 98 bp, Homo sapiens
ggcaagatccagatcgggatttacgtggagatcaagcgcagcgatgatcatggaagggaagtggttgctgtgtatgttactggtgcttggaactgcta

SEQ ID NO: 801842 - DNA, 100 bp, Homo sapiens
atggatatcaacccaggtgatactgttttggaagctggctcaggctctggtggaatgagcttatttttatccaaagcagtgatccgggccaaggtggtgg

SEQ ID NO: 801843 - DNA, 98 bp, Homo sapiens
ggaactgttgacaattgaagacagaaaccgggtttggtgcacctcgatttggaggaagtagggcagggcccttatctggaaagaagtttggaaaccct

SEQ ID NO: 801844 - DNA, 98 bp, Homo sapiens
aaggaatatgcattgaagcaaattgaaggcacaggaatatccatgtcggcttgtagagagattgcagctcgggttatgtatgattttgctgctgaacc

SEQ ID NO: 801845 - DNA, 100 bp, Homo sapiens
tgcctcatcatcttcagtccaacaggttactttttctcgcggcacagatggtatacaaaactaggatatgctggaaatacagaaccacagtttatcatcc

SEQ ID NO: 801846 - DNA, 103 bp, Homo sapiens
aagaggattggaggtgtcagtgttaaaggaacctctacaacgaaggtgaagccacggaagataagatgaatgatttcggaatcaagaatatggaccaggtagc

SEQ ID NO: 801847 - DNA, 100 bp, Homo sapiens
ggcttttgcatgggttgatgagtggtatgggacctcccgaattccctggtaacagtgttcattctcttcaccttggatcattggtatgcactgcttcagg

SEQ ID NO: 801848 - DNA, 100 bp, Homo sapiens
ggacgtgtgtccccatcaccctctcaggaaagtctaagttcatcaaaatcggatacagatacaggggcatttgtaaaggatgttcatgaagattcaataa

SEQ ID NO: 801849 - DNA, 98 bp, Homo sapiens
tactggctatattatttgcacccagtcctgcagcgccagcagctggactatggcatctatgttatcaaccagaacactgagctgaaggttgaagtgga

SEQ ID NO: 801850 - DNA, 98 bp, Homo sapiens
atcctgacatcgaaaacccggacctcgcttacctgcatgctgaagagttaccttgtacatgcccactatgtacctcagacagagggagctgtgttagt

SEQ ID NO: 801851 - DNA, 100 bp, Homo sapiens
atatatggctggacagctagctgcttatggctataaaattacagatctggacgttggtggttggctatgtgttgactgtttcattcaagtggaatgcaag

SEQ ID NO: 801852 - DNA, 99 bp, Homo sapiens
tggctaatctccttaagtcggccttccctcacctacaagagcagcctggcatcctcgctacaacctcattgttgtgggccgatacccagatcctaattt

SEQ ID NO: 801853 - DNA, 100 bp, Homo sapiens
agaagcagtggtcgaatccagtagaaaactggtcaaggaagctgtccaagacaactttgacaagattgaattcaataggatgtgttggaccctctgtgtc

SEQ ID NO: 801854 - DNA, 98 bp, Homo sapiens
agacgctgtggtgtgactggggcaggaccatcagtcacagagatgctggtaaatgtgctcaacatatgctctgatgacgaactgatttctgatgatga

SEQ ID NO: 801855 - DNA, 100 bp, Homo sapiens
agttgcaaaaagaaactggagccaccatcaagctgtctaagtccaaagatttttacccagctgaaccaataacgtttccatctggaggaggcaagtcatt

SEQ ID NO: 801856 - DNA, 100 bp, Homo sapiens
tgatgcaaaagaaggggaaatttgattacatactgttagagaccactggattagcagaccctgtaagtgaaaatggtgatcacctaagcacatggatgag

SEQ ID NO: 801857 - DNA, 98 bp, Homo sapiens
aaagcacacaaagacctcctcctccacaggggagacagaggttttgtgatgaaggaacctgtacagataaagccaatattctgtatgcctgggcgaga

SEQ ID NO: 801858 - DNA, 99 bp, Homo sapiens
tgggggccacagctgcttcatgtccccagccccaaatctgctggtgccagtggcagcaaagatgctcctgtccctggtggtcctggccctgtgctcagt

SEQ ID NO: 801859 - DNA, 100 bp, Homo sapiens
tggctgttgacatggaatttgctaagaatatgtatgaactgcataaaaaagtttctccaaatgagctcatcctgggctgactgcagttcgtcatgaatca

SEQ ID NO: 801860 - DNA, 130 bp, Homo sapiens
taatacagcagccaacttcttcgccaaattaaagttttacaagatttaacctgtcatcaagacctgggattttggtgccatatccagaagacccagcagtttataaaccactctcccaggaagagctgca

SEQ ID NO: 801861 - DNA, 99 bp, Homo sapiens
atggatctggaagctgagggcacgtgtttgcggttcagccctttgatgaccgcagcagagagagtctacaaggagattgaacaggtggttggcccacat

SEQ ID NO: 801862 - DNA, 100 bp, Homo sapiens
tccaaaaagaaacctagcaacaaaaagaaagctgcgttaatgtttgcaaatgcagaggaagaatttttctatgagcttcttggacacttaatgattgttg

SEQ ID NO: 801863 - DNA, 100 bp, Homo sapiens
ctcggagaacaagactgcccacctccacaagggcttcctggccctctaccaaaccgtggcatgaatgtcagcatcatcattcaaagaacaagaaacattc

SEQ ID NO: 801864 - DNA, 127 bp, Homo sapiens
ctaacaacagatttcgggaatgctgagaaaacagacagatttgtcatgaagaaactcaatgatcgtgtcatgagagaggatacgaagcgttttcggcttcctgcccggagctgtgcagcaaacagtc

SEQ ID NO: 801865 - DNA, 98 bp, Homo sapiens
tgggtgaactttcacggacaacctcagaggacaacgaagtgttcgatgatgtgctgactaaagacgcgggtgagtgtgtgatctgcctggaggagctg

SEQ ID NO: 801866 - DNA, 100 bp, Homo sapiens
cagagtgtcagataatagctcattttagtagagggcaataaatgccacatgagatgatcacctcagcagaaaactggtcctcagaagtggaatacagagc

SEQ ID NO: 801867 - DNA, 146 bp, Homo sapiens
cccaacctctcgcacacgggccgcggcatcctcagcatggccaactccgggcccaacagcaacaggtctcaattcccgtgggtgctggctgccaagtcttcgaaggccgacccaagctggccacatggcggcagcgcgtggaggca

SEQ ID NO: 801868 - DNA, 98 bp, Homo sapiens
actgtcggcatcatcgggctggggcgcatagggagaaaactggttgtcctggatgtttgaaaagttggtcgttgtcatggtgtgttacttcatcctat

SEQ ID NO: 801869 - DNA, 100 bp, Homo sapiens
ttcactagaagcactgagagatgcggccccctcgcagggtcctggcattgatgtgcctgctccagacatgagcacaggtgagcgggagatgtcctggatc

SEQ ID NO: 801870 - DNA, 98 bp, Homo sapiens
ctgaactcaacttctgaaatttacagaaacaaactacatctcaggcttcctgcctgacacagctcacttcaagaagtgcacaatgtcagaacgtggaa

SEQ ID NO: 801871 - DNA, 99 bp, Homo sapiens
gggagccacctccgggcgcagaggcctacatcccacagagatacccagacaacaggatcgtctcgtccaagaatgactcgcgttggagccttttgtgcc

SEQ ID NO: 801872 - DNA, 98 bp, Homo sapiens
cttccaacttgactcttgtgtcaacaaatggtagttcaggatgacggaagctcctgttttcttgtcagccgccagctgagggccattcgcagcttctc

SEQ ID NO: 801873 - DNA, 100 bp, Homo sapiens
cttggaaaagtttcatcagtttctagttagtgaaacagaatctggtcggacccacatatttaagattcacgctcgttcaatgagtgttgaaagagatatc

SEQ ID NO: 801874 - DNA, 99 bp, Homo sapiens
gagaccatcgagggcatgctcctcaggctggaagagttttgcagcctggctgacctgaaaatggctctctctacatagtaatggattactgtgagggag

SEQ ID NO: 801875 - DNA, 98 bp, Homo sapiens
aggttccgaattcgcgcttgccgtgcacgccggcatcgagcctcaccaacaccgccgggcaacgtggctggagtagttttcggctttgtgagaaacct

SEQ ID NO: 801876 - DNA, 99 bp, Homo sapiens
gacgatgcaccagtgatctacgggctggagttccagcaggacccagtgctccataaaggataatagtttccagtacactatccctcatgatgactcctt

SEQ ID NO: 801877 - DNA, 100 bp, Homo sapiens
tttgcctggtgaaggggtcccataagaccctgaagctggtcgtcaaaagatgtgttcagagcaacattgttttgttgacacaagcatttagaagaaagtt

SEQ ID NO: 801878 - DNA, 100 bp, Homo sapiens
agaggttcttcaaaatcagtcactaacttctctctcagatgttgaaaagggtgtttataagaatggaagtgttgtttccttgcccgattccttcatgcta

SEQ ID NO: 801879 - DNA, 100 bp, Homo sapiens
aaaccctggtgttcctgacacaaacttcaggaaaggattttgcacttgtgcagaccgggcgagcagagtaagaagcaggaatggcggcgctagatagtaa

SEQ ID NO: 801880 - DNA, 100 bp, Homo sapiens
aaggtcaagatggtggacgagcttaagagagctcagcctcacaggccaaagcatcagcaccagaacgcacacccagcccagccccaaagagaaagaagag

SEQ ID NO: 801881 - DNA, 99 bp, Homo sapiens
ccgggtcatctccagatgctagggttatggattatacagatgaacgggaaaactatgcactacatctttcctcacgcaaggataaaaataacaagagac

SEQ ID NO: 801882 - DNA, 98 bp, Homo sapiens
agcaccggctccagtgggctctatggggaaattgaggcagagaagccaagacatgtgctaaaggtcatgcaggctatgaatggagctggaatgtgaac

SEQ ID NO: 801883 - DNA, 98 bp, Homo sapiens
agaaacataagaaggaggaggaggatgaagaacttgacctcaataaagcctcttttagaagaagcaattcctaatctccacagcccgcctaccacaag

SEQ ID NO: 801884 - DNA, 98 bp, Homo sapiens
tctttgccctgaagaactgcagtgaaggtatcaatgctgtagatggatggaagaggcttcccacaggaaggtgccaccagtcagttgtgcctatgtcc

SEQ ID NO: 801885 - DNA, 98 bp, Homo sapiens
atcatattgattggtgaaattggtggtaatgcagaagagaatgctgcagaatttttgaagcaacataattcatcggtggtggggagcggcagctggca

SEQ ID NO: 801886 - DNA, 147 bp, Homo sapiens
cattgtgaggtctgcaagatggcactcaacatgaacaactacaaaggctatgaaaagaagccctattgtaatgcagtcagctgacatggtcaacaaatttatcaaagaaaccccctggcttttgaagaatagtactttatacatctg

SEQ ID NO: 801887 - DNA, 140 bp, Homo sapiens
gatcctgccagaaaatttcaaagacagtagattgaaaaggaaaggcttggtaaaaaaggttcaggagaacgtatttaccgggcagtcaaagatctattcctacatgagcccgaacaaatgctctggaatgcgtttccccc

SEQ ID NO: 801888 - DNA, 100 bp, Homo sapiens
atgaagaaagtgttagaaacagtagtggagaatcaagtacctggagtagaacagaaaaattattatgtctgtgttcccttgggactcattggaaattgta

SEQ ID NO: 801889 - DNA, 98 bp, Homo sapiens
gaaattgagaagctttgtgagaagggcagaagcctgacagaaatgttcgcttacgcagctagccctgcctcagtttgtacatctacctgtcggctgag

SEQ ID NO: 801890 - DNA, 100 bp, Homo sapiens
agcatactgcgagccctgctacattgctcatgcacaattagttcgagaagttgatgtggagaaggtgtctgcttttgagaatccatatgtagatgcaata

SEQ ID NO: 801891 - DNA, 100 bp, Homo sapiens
ttccgtaacatccaggttgatgaagctaatttattgacttggcaagggcttattgttccttgttctaagaacggaagcatctgggctggatggaatttag

SEQ ID NO: 801892 - DNA, 100 bp, Homo sapiens
agcaacttcagaatgctggtggcaagcgccgactgggggatgcagcaaagaaagccatcagcaaactccagatcaggaccatcaagaagggtgacaaggt

SEQ ID NO: 801893 - DNA, 99 bp, Homo sapiens
agctgctccgtggccacgaggacgtcaccatgatgcagcagcttttttatgagaattacgagcagaacaaaaaggggtacattagagatctccataaca

SEQ ID NO: 801894 - DNA, 100 bp, Homo sapiens
caaggtcatcagcacaggatatgccttgtcagatctgctacttgaactaccctaactcgtgctcagagtcatctacagatgtgcaccgctatcaaaaata

SEQ ID NO: 801895 - DNA, 99 bp, Homo sapiens
gagaagtttgctgctaaaatgaatctgagcaatatggaatattttgtgccacacacaaaaagaaacctccacagctgttgagaaaaaggagaaacctct

SEQ ID NO: 801896 - DNA, 98 bp, Homo sapiens
tttcctttcccacccggcttacagacatatcgctgaccgaatgggaaccccacacctgcagaaggtccttaatcagaaccactcacgaattcttgttt

SEQ ID NO: 801897 - DNA, 100 bp, Homo sapiens
gtctttcctctgcattgctgatcttgtacttggattcagcaaggaaccttccgggtatttgaagtataccatacaactgttttgaaaatccagcgtggac

SEQ ID NO: 801898 - DNA, 100 bp, Homo sapiens
aaagctttgcgcaacgccaacctcaggcgagatggctaacaacagaatatccaggtcactatggtgaggaaatggacatgatttcctacaattatgatta

SEQ ID NO: 801899 - DNA, 98 bp, Homo sapiens
gaccccaactgctcctgcgccactgctcagaattctgcaaatgcagattttgcaaactttgatgcatttggacagtctagtggttcgagtaattttgg

SEQ ID NO: 801900 - DNA, 100 bp, Homo sapiens
gccggatcctccggggacctgatgggctgagtcgagagaagcctgtgtctcccaaatcaggaacactgaagagccctcccaaaggatttgatacgactgc

SEQ ID NO: 801901 - DNA, 98 bp, Homo sapiens
ttgacccaaactttctggatgcttatatcaatttaggaaatgtcttgaaagaggcacgcatttttgacaggtcgttccaggggtagaggaggcatgaa

SEQ ID NO: 801902 - DNA, 100 bp, Homo sapiens
tcgtggcagaagattatgatactcttgcttatttattggcttaaggattaaggatccccaaagtctcagacttcactgcgttcctttgcctgcaacaggg

SEQ ID NO: 801903 - DNA, 100 bp, Homo sapiens
caaacacgtcttagtacacatttggtgcatgtgagggaaccctggcttgttcaacctgtcacctcatctttgaagatcacatatatgagaagttagatgc

SEQ ID NO: 801904 - DNA, 100 bp, Homo sapiens
aagactctggagccagtcttgaggtcctacatctccgaaagcaagctcttctagaagttgaagtttcaggcacctgcaagagagacctgcgtggaatgtc

SEQ ID NO: 801905 - DNA, 98 bp, Homo sapiens
gaaagctgttcttcatcctacagggcccctgtactgcccagaggagaaggaggattctgataatcctgaccttcgagaccggggctatatttattggc

SEQ ID NO: 801906 - DNA, 100 bp, Homo sapiens
gccggctaaacccactgtggaaaaattgagctctgcccctgaggactgcacgtccttcagcatcaacgcctccccaggggtggtcgtggatattgcccac

SEQ ID NO: 801907 - DNA, 100 bp, Homo sapiens
aagaaacatccctggatatgcccgttcagtttacagttcattttttgcttggtttggaaaaatttcattagaggacagtcattttgtttactcattcagc

SEQ ID NO: 801908 - DNA, 99 bp, Homo sapiens
ctgccgacccaaggattataagtgtcttgggacaaggtgcgcattcctggtgtgctgcagcgattgggagtgacatactttgtggttgctgtgttggag

SEQ ID NO: 801909 - DNA, 99 bp, Homo sapiens
gatgggcctactcgcccgccaccctgcgctgccgccgctctgaggagttaaaggaatttgctgattcccttggaattccgtttttggaaaccagtgcta

SEQ ID NO: 801910 - DNA, 98 bp, Homo sapiens
cagatgctggatgacacccaggaggcatttgaagttccagtcccgtcaggaagcccaagtatgtggaaagccccagagtgcctggagatgcagttata

SEQ ID NO: 801911 - DNA, 145 bp, Homo sapiens
cggcttgccccgctatgacgtgctgggggtcatcgacagctgcaaggaggccgtcaccttcaaggccgtcagacaaggaacgagctagagcgacagtttcttgaattgctgcagttcaacatcaatgttccttccagtgtctatg

SEQ ID NO: 801912 - DNA, 99 bp, Homo sapiens
cggcttccgacgtgcagcctggcagtgcagtgtacgaattggagcaatgttggcttatacacctctggatgagaagagccttgctttattactcaatta

SEQ ID NO: 801913 - DNA, 98 bp, Homo sapiens
gtttgttgggaaaggaattacctttgacaggtgtggatgtggaagcagccaagcgggcagaagaggaattgctccttcatgacacgaggtgctggctg

SEQ ID NO: 801914 - DNA, 100 bp, Homo sapiens
gcccagagtggcccagaaaccagttatttctcaaactctgaggctgcggagttcacacattgaaatctgtcatctttttcagagagaaactttcggtaat

SEQ ID NO: 801915 - DNA, 98 bp, Homo sapiens
aagaagacttaaagaaataccccaagtacccctgggggagagaaatctatactttagaaggtgtcagacctgacccaggcagccaacaagaacaacga

SEQ ID NO: 801916 - DNA, 102 bp, Homo sapiens
acccatagaagttgagcactcggtcccaaaaaggcaaagaaaacgttgtgtgacgtgatcctcatggtccaggaaagaaagatacctgctcatcgtgttgtt

SEQ ID NO: 801917 - DNA, 100 bp, Homo sapiens
gatggaattacactgtgatacgactgactgtttgatgaacttgtgaaaaaattcaaagtcgaatatcatgctggtggctctacccagaattcaattaaag

SEQ ID NO: 801918 - DNA, 98 bp, Homo sapiens
aaaactccaccgtagcccttgccaaagcagccaactcttcctgccaaataaatagagtcatcagtcatcctactcttccgatcagcatcactgctcat

SEQ ID NO: 801919 - DNA, 100 bp, Homo sapiens
gcttctgtgctttgatccaccgacaccggcccgagctgattgactacgggaagctgcggaagcttctgaaagtacagagaagcttaacaactccactggc

SEQ ID NO: 801920 - DNA, 100 bp, Homo sapiens
agatttaaactccatgaagtatgtggagctttacctcgtggctgattatttagagcaaaattctgtggcatctctggaatactacctgagaatttttgtg

SEQ ID NO: 801921 - DNA, 98 bp, Homo sapiens
tatgcttggcagcagaaggatttggcaacagactttgtttcttggagtccacttccaattccaaggcagaagaattgtttttatgggttccacgaaaa

SEQ ID NO: 801922 - DNA, 98 bp, Homo sapiens
gctattgtcatcttccttgaattctttgcgtggggccttttgacaactccaatgttgactgctcaaagatttggaaagagacagcttaacagaaaagg

SEQ ID NO: 801923 - DNA, 98 bp, Homo sapiens
gcaatgtttgaacaaactcgaagaacagctgtggaaagaagttgcaaaacactggctaaaagatggcggcaaggcagcccaggcaaatgtaagaatag

SEQ ID NO: 801924 - DNA, 149 bp, Homo sapiens
cccacaagagcttactggtgaaggaatgggacaagacccatctttatgcaaagccagcgttacagtaatgttccagcaactacactgcgctgcatcggactcgacgcccgctggtgacgcacacgctgcgccggaagtgtgaactgtct

SEQ ID NO: 801925 - DNA, 100 bp, Homo sapiens
acctccaccctacaagtactgaaaaggcacaggcccatcaccttcgctgtctgaatgactttgtagaagcccagatgacttactatgcacagtgttacca

SEQ ID NO: 801926 - DNA, 100 bp, Homo sapiens
taaaaaactggagaatgacaccatttctaagcaacttacattagaacagctgagatctgtatctgtggacctgaatgttgatccctcgcttcagattgac

SEQ ID NO: 801927 - DNA, 100 bp, Homo sapiens
ggagggcagacaataggaggcaaaatgttggataaatatatctatggagcacaggtgcaacaatcgaacacagtgtatagtagttactgggtcagatgtg

SEQ ID NO: 801928 - DNA, 100 bp, Homo sapiens
caatcagctggcctggtttgatactgacctgtaaatcatcctttaggtcttttgccaactcctattactcagcaagccagtttgacatctctggcacagg

SEQ ID NO: 801929 - DNA, 100 bp, Homo sapiens
ctttaacccactagaagccaagctctatcaacagaccatttactgcgacattttaggttaaacccatccagagtaatggctgcggccttacccaggaccc

SEQ ID NO: 801930 - DNA, 98 bp, Homo sapiens
atttctgtcatacccacatggagaaatgtattatattgttggaccttcagatggaagtagttacattatagattactatggaaccagacttacaagac

SEQ ID NO: 801931 - DNA, 99 bp, Homo sapiens
aatttatggtcgatcgtcttcctactgtcttgttttttccctgcaacaggcttgaactcaaacttgaatgtaaatatggatatgaacagtattaaagag

SEQ ID NO: 801932 - DNA, 100 bp, Homo sapiens
ttgctcctccatctccagatcggatcacggtgagggaaagatgagcgaggagacggcgacttctgacaacgattagagtccacatcatgtctctctgaag

SEQ ID NO: 801933 - DNA, 100 bp, Homo sapiens
gccttcctggtggctgaaggtggtctgaactctgggttcatgatagctcactgcacggcagcagcccttggtgatcaatgccattgaacaggactaccgg

SEQ ID NO: 801934 - DNA, 100 bp, Homo sapiens
cgcagaaggcggtggaccagccgcgccagaataactgaagtgaagtgatggactccgatttggagagtagtaagacgtgaaaggaatacacttgtgttta

SEQ ID NO: 801935 - DNA, 100 bp, Homo sapiens
gaatatcagtatccacagaaggagcaaatacttcttcataaatgcatcttctgcagacaccgggttaagagggtctctggagcctgcatccagtgttcct

SEQ ID NO: 801936 - DNA, 51 bp, Homo sapiens
aggggagttctctgtgtctgtgaagttatgaagacagtatggagtttccag

SEQ ID NO: 801937 - DNA, 100 bp, Homo sapiens
atttctgggtgacactcaacaggattcccggagtaaaagtccctcgcaatttccgactgttggaagaactcgaagaaggccagaaaggagtaggagatgg

SEQ ID NO: 801938 - DNA, 50 bp, Homo sapiens
ctttgggagacttcgacttgttggcggtaagaatgattgatgttggctga

SEQ ID NO: 801939 - DNA, 100 bp, Homo sapiens
ctttgctccatgctgaagaaaaaacaaagtaatggttattatcactgtgaatcttccattgtgattgatgactatgctcagctgtgtaacatccccgtga

SEQ ID NO: 801940 - DNA, 100 bp, Homo sapiens
catgggtccgtggtcgtttgtttctccaaggtttgaaaagcagctggcctgcaagatcgatctgcaattctacacaattgttgggcagctatgaatgaca

SEQ ID NO: 801941 - DNA, 99 bp, Homo sapiens
ggcatggtcatattacatcggatatctgcggctgatcctgccagaatttcgtcctggtgagccatggaaaggttatccaaacattgaccctgaaactga

SEQ ID NO: 801942 - DNA, 98 bp, Homo sapiens
gacaaggaagtgaaacaccaatgcagctataataataggcggagtcgatctggaacatacagctcgagatcaagaagcaggtcccgcagtcacagtga

SEQ ID NO: 801943 - DNA, 99 bp, Homo sapiens
ctttattgtattcagttacagaacctgtggcactattcctgatcagagaactccagttgcttcaacacacagtatcagtagtgcagccaccccagatcg

SEQ ID NO: 801944 - DNA, 100 bp, Homo sapiens
ctgaagacacagaagcaaagaacccattttctactcagactctctgctccaggttctcaacgtgaaggaaggaacccccagctgaaccagcaatgataat

SEQ ID NO: 801945 - DNA, 99 bp, Homo sapiens
gagaaacacgacgataaactggtaatgttcaccaatcaatctgaagattctgaaaggacagggtgtgggccaatgtggggaagagcctgaactgcatta

SEQ ID NO: 801946 - DNA, 100 bp, Homo sapiens
gcgttctcccgactctggaccgacgtgatgggtatcctgaaacatgccaagggacaagtgttatttgacaaagtgtgtgaacacctcaatctcttggaga

SEQ ID NO: 801947 - DNA, 98 bp, Homo sapiens
tcggctccaggagttccgcaggagggtcgctgcggcccagagccaggtgcaggcctcattgctacgatttcagagtaccctggtaatagctgagcatg

SEQ ID NO: 801948 - DNA, 100 bp, Homo sapiens
agcgcctcgtcgacatgagtgatgtggaggaaaacaacttcgagggcagaacttaattcagtgcacaaatgagatgaatgtgaacatcccacagttggca

SEQ ID NO: 801949 - DNA, 99 bp, Homo sapiens
gcgccttcgcggaccgagcctgacggagccggaggctgggagccgcggcggcctgggagctcttcagtatccccatcagccagtttccgaggtgctgag

SEQ ID NO: 801950 - DNA, 100 bp, Homo sapiens
cccgagccgccccccgagcccgccttctccgaggcgcagaagtggattgagacacgaagatcgattgagaagttattagaatgggaaaacaataggttat

SEQ ID NO: 801951 - DNA, 98 bp, Homo sapiens
tgtcagatccacagagatatccgagttcagaaatgagtggaaaaatacccatggtgggcaggaagagacgcagtaaaacgcaggactcttcccgcttg

SEQ ID NO: 801952 - DNA, 100 bp, Homo sapiens
catcctgtccatcgtgtgcctgatgatcacgcagctggctggcttcagtggaccacactgctcagcacgcaggcatgtgaggaagctgggcttaaaggag

SEQ ID NO: 801953 - DNA, 100 bp, Homo sapiens
gaattggttggccaatctatatgaacaggcatgttatttgaaagcaattgagacgcaaccgaactttgcagtagcttggagtaatcttggctgtgttttc

SEQ ID NO: 801954 - DNA, 100 bp, Homo sapiens
cagcagctcaaatccaagctctcctggaagaataaaggggagggacacagcaggtcaggagagattcaacagcattacctcagcttattacagaagtgcc

SEQ ID NO: 801955 - DNA, 100 bp, Homo sapiens
ctggtatcaaagaatggattttttcagggatataaccgactgacctggatagtagttgttcttcagataggggagtgtatacatcaccacaccagctgtc

SEQ ID NO: 801956 - DNA, 100 bp, Homo sapiens
aacattatgctggacaagaagggccatatcatccacatcggtgttcggcctggactccatcatgggcaacaaggacctgtggcccctgctgctgagcatc

SEQ ID NO: 801957 - DNA, 98 bp, Homo sapiens
ctcccgagacatcttccctgtgggctggtgttccttgactggagacaacctgcagcctcctggcaccaaaggagaatgacatcttcctgggctgggaa

SEQ ID NO: 801958 - DNA, 100 bp, Homo sapiens
agcagaaggaagttggagggacaccgagaaagattattaccactgtctgtcggatatgaagaccctggagtagatggaaagccagaaatttttagcagaa

SEQ ID NO: 801959 - DNA, 98 bp, Homo sapiens
acctggtggccactgtggaggacgagggcaccccaaccctgtcggtgctggtgattgggtgtggcaactcagaactgagtgagcaactgtatgatgtg

SEQ ID NO: 801960 - DNA, 99 bp, Homo sapiens
gcaagcgcagggggacggggaccagcagctgtcgccgccgctctcaggctctgtgtgctccgggatggagcaggtgtgcagagggtgagaacccagctc

SEQ ID NO: 801961 - DNA, 100 bp, Homo sapiens
tggcgctgtcgccggctgcagtggccgccgctggagaccgcgggacctggcgctgcagcgagaaatcaccacccaatgcgagccaccctcctaaattcaa

SEQ ID NO: 801962 - DNA, 100 bp, Homo sapiens
cttcctgtctctctgctgctacctgcgtctggtcagcgccgagatgccatggacaatattaccaggcagaaccaattctacgatacccaagtcatcaaac

SEQ ID NO: 801963 - DNA, 98 bp, Homo sapiens
aaaggaacagattaaaggcaaagtcaccatctttggcaggaagctccggaatccacattcatctcaatggaaggatcctgccttaagtcaacttattt

SEQ ID NO: 801964 - DNA, 100 bp, Homo sapiens
tgataagaaagtacggaccataataatcaggagtgaagtcccagggatattctgtgctgggatgaattgtaaaagcaacatcagcttgaccagtataaaa

SEQ ID NO: 801965 - DNA, 101 bp, Homo sapiens
tcttagttgcaatgtaattacagaactcagctttggaacatttcaggcctggcacggaatgcagtttttacataagttctgaagaagcatctgtagggaat

SEQ ID NO: 801966 - DNA, 100 bp, Homo sapiens
gatattattgttggaacaaggaaaagcaccctggatggtgaagagagagctgacaaaaggcttgtgctcagataacaacgaacttgatgcaagtgatagg

SEQ ID NO: 801967 - DNA, 99 bp, Homo sapiens
ttacatcaaaaattcttcatctggctcagagtcaaggttgcacagagcattgaggatcaccatcaggaagtgattggtttctgcagagagaatggtttc

SEQ ID NO: 801968 - DNA, 98 bp, Homo sapiens
aatccaaatgcatcattcagatgcaaggcaactcgaccaaaacatatgaaccttctgagcacccagaccaggttccctgtagcctcacacgagaacga

SEQ ID NO: 801969 - DNA, 101 bp, Homo sapiens
caagtgttggcgtggcccagcatctaactaacacggtttttattgacagagctctgatagttgttccttgtgcagaagcttccaatcagaagactatacaa

SEQ ID NO: 801970 - DNA, 98 bp, Homo sapiens
cgggtttccacattcaggagaatgaagaaagccattacgaggcctttggcacaaaccaagaagattatgcaagttacattatgaacggtatcatcaaa

SEQ ID NO: 801971 - DNA, 99 bp, Homo sapiens
taagatatgactgtgctcctccttcaccttctgccatgattgtgaggcctccacagccatgtggaactgcctgtctcctccctcctacacatttccagc

SEQ ID NO: 801972 - DNA, 98 bp, Homo sapiens
tctgtctgctgtctatgagggtcatgtttcctgtgtgaaattgcttctgtcaaagagctacattcatgggagcagccaggctcagtttgtggcagaat

SEQ ID NO: 801973 - DNA, 98 bp, Homo sapiens
gtgctggctctggctgtggcaaatgtgactgccatggagtgaagggacaaaaggcttcctgtttgggctgaaaggagcaaaaggaagagcaggcttcc

SEQ ID NO: 801974 - DNA, 148 bp, Homo sapiens
cctgtagcccttgaggaaactcagaagacagatcctgctatggaaccacggttcaaagtggtggattgggacaagttgtccaaccaaaatctagtactttgctattcaaaagtgtctggggaccagcagcatcagcatctcaggtcct

SEQ ID NO: 801975 - DNA, 99 bp, Homo sapiens
gactgtccagagcctggaactgtgcccacaccagaagccatcagcagcaaggtggctgaatccacagaggagcctgctggttctaatcggggacagtat

SEQ ID NO: 801976 - DNA, 99 bp, Homo sapiens
aacaccacaataatccacagccaagaattacttatgtgcctgcagaacatttggaagagttcaaaataagcttgggacaacaatctggaagagtaatgg

SEQ ID NO: 801977 - DNA, 98 bp, Homo sapiens
ggccctcttcgacagctacacaaatctggaacgggtggccgattactgcgagaacaactacatacaggaaatctactttcttcaatgtgttaaccaat

SEQ ID NO: 801978 - DNA, 100 bp, Homo sapiens
tcacaccaacttcctctcgaatatcaagaaatgcagtaaccagcatgtcaataaggggtcataggtggaaaagacatgatacagtttatgtaacttgatg

SEQ ID NO: 801979 - DNA, 100 bp, Homo sapiens
gaggcgactagcggcggcgggagcggcgccgagaggccgtgcgggacgcgggcgccaggaccggccgaacgcagaggaggccccgtgtgggccgcggccc

SEQ ID NO: 801980 - DNA, 100 bp, Homo sapiens
cacggggcctcctccaccgaggaggtgaatacacctctgattttaatcagttctgcgtttgaaaggaaacccggcgtcacaatgtagcagggaccccagg

SEQ ID NO: 801981 - DNA, 98 bp, Homo sapiens
gagctgggcgacgagctgaccctgggagacatcgacggcacaaaacagcgttctcacggctcaccagccccaagcaccagctccacgtgtcgccttac

SEQ ID NO: 801982 - DNA, 100 bp, Homo sapiens
catggcggcccccggcagcgcccggcgacccctgctgctgctactgctgttgctgctgctcggtgctatgacaagcgtctgtggcctcgaatggacctga

SEQ ID NO: 801983 - DNA, 99 bp, Homo sapiens
tttgtctgtttgatatcaccaaactggaggatgcctatgtattccctggggatggcgcatcacacaccaaaggtatgggcactaggaaaagacttcttc

SEQ ID NO: 801984 - DNA, 98 bp, Homo sapiens
gggacaattacgagaagaggttctggttcctgatgttattagcagcataaggcaattatctaaagcggccatgaaagaggatgccaaacccagcaaag

SEQ ID NO: 801985 - DNA, 100 bp, Homo sapiens
tctctcattggcttctttgagactgaaatggcaggcttcttctcatatcggtaattccactcaggccactgtgagggatgcagttgttggaagaccatcc

SEQ ID NO: 801986 - DNA, 100 bp, Homo sapiens
cggcaaattccgacgtcttgaagacttccgagtagataccttcactgcctggtgtaactcccacctaaggaaagccggcacccagattgagaacatcgag

SEQ ID NO: 801987 - DNA, 99 bp, Homo sapiens
gtcctgctgcgagccggcggcccggagtggggcggcggatcatggaagggaagtggttgctgtgtatgttactggtgcttggaactgctattgttgagg

SEQ ID NO: 801988 - DNA, 99 bp, Homo sapiens
ttgggactgccccggcaactccagggtgtctggtccacgacctatcctaggcgccatgttttctgaatttccagatcccatgtggggttcagattatgt

SEQ ID NO: 801989 - DNA, 131 bp, Homo sapiens
cttaattcctgaaaccactcaagagtcataggattagatgatccaagtcaccaagaaattactgtctcaagtgatacggagaagtctggcctaggaggtggaggatgcagcgcaccaagatcgcaccactg

SEQ ID NO: 801990 - DNA, 100 bp, Homo sapiens
tcttggtggattttctattgaagatgtccaaaaggaaattaaaagaggcacgaagctggaggccaacggtcctgctgatggctacgcagccattgcccag

SEQ ID NO: 801991 - DNA, 98 bp, Homo sapiens
taattcttccactgatatctcaaaaggtgatctggacaaaggaacaggtatctcaggtgatcatggaggaagcactttactcccaccaaatgtcacaa

SEQ ID NO: 801992 - DNA, 100 bp, Homo sapiens
cccacttttgagcttcctgaaaaacaagcagagaattcgagaagagaagcgagaagaacggaggaggagagagttagaaaagaaacgtttgcgggaagag

SEQ ID NO: 801993 - DNA, 100 bp, Homo sapiens
tctcatcttggaaatgtcagctcttccgcagtgattgaagctttgataaatgaaatcttcctaagtataggttctaaatgagaagaaacttcaagaggtt

SEQ ID NO: 801994 - DNA, 99 bp, Homo sapiens
ggaactgctggggaaggcgattggcatcgatctctccatcccttccgaggcccgacttcgagcaccataacatggtgtgggaagtgaagacaaatcaga

SEQ ID NO: 801995 - DNA, 100 bp, Homo sapiens
ctggaggctgtaatacaaaagctgcgcgtcccttaatttcctcggcgggcaatgaatcgctccctggctaatgtgattcttggaggctatggcaccactt

SEQ ID NO: 801996 - DNA, 100 bp, Homo sapiens
tgggcgagctgggcgacggcgccttcggcaaggtttacaaggtctggctctgggagaggagtggacagcagctggttgagatacatccccatctggagac

SEQ ID NO: 801997 - DNA, 100 bp, Homo sapiens
caagttcgagggtttcttcctgatcggaacaaagctggggaatggagtgagcctgtctgtgagcaaacaacccatgacgattgtggccaagaagtacaga

SEQ ID NO: 801998 - DNA, 100 bp, Homo sapiens
cagttgctcgaagaactcgagcgacagagacaagctgagcttgccgcacaaaaagctagagagatcaccacgcttattaatcataaagataataccaaaa

SEQ ID NO: 801999 - DNA, 100 bp, Homo sapiens
attttatgggaaaattaagcagatgctccagtttgagaaacctggatctgcgatctgtttgtgctgttgtagcaaacagtgacgaatctcagcttctgac

SEQ ID NO: 802000 - DNA, 100 bp, Homo sapiens
ttggcaatagaaagtcaatcgaagatgaatggtcatctccggttattgaatattgcctgtgctgcaaaggctaagtggagacaggttgtgctgcaaaagg

SEQ ID NO: 802001 - DNA, 100 bp, Homo sapiens
cttgaaagcggcacagcatgaccttccagcttctgagggagaagtctggtccatgcctgtacctgttgaacgaagttatccattttgaacctggagaaga

SEQ ID NO: 802002 - DNA, 100 bp, Homo sapiens
tttggctttgcctttctggacacagaagtatttgtgacagatcactgtgtccactactatgatcttcgtaacactaaacagccaatcatggtattcaaag

SEQ ID NO: 802003 - DNA, 132 bp, Homo sapiens
aaagaagcgcaatcctcgcaaagttaggtggaccaaagcattccggaaagcagctggtaaagagcttacagtggtgaactactgagttcttcattatgtctgatggagattatgattacctcatcaagtttt

SEQ ID NO: 802004 - DNA, 100 bp, Homo sapiens
aacagataactgaggacaatggacctgcctgggcatagacttccttaagaaaattgtgttaaggaatggtactgaggcatttgactcctgggagaagccc

SEQ ID NO: 802005 - DNA, 99 bp, Homo sapiens
cttctcctcctcctcagccaaaggcgccggtcgctcctgccttcgagagcgagcttcggaaaggaggatgaacgaggatatctccggagcatttggata

SEQ ID NO: 802006 - DNA, 100 bp, Homo sapiens
tgaacccaaccctttcagtaaatacttggaagataacagcgacctcttttctgaacagctttatcttcaagccaggatgaagggagactgggcaagactc

SEQ ID NO: 802007 - DNA, 100 bp, Homo sapiens
ccttacggaaaaggaacagattgttcctaaaccagaagaggaggttgcccagaagaaaaagtatatcgggaggccacaagatctgcttgccaggaggctg

SEQ ID NO: 802008 - DNA, 98 bp, Homo sapiens
tgacattaaggaccagccagaaaatgaaacctgaatagagtcaccttgtaataactgggaactcttcccctgaagacacctggttaattcacttgcaa

SEQ ID NO: 802009 - DNA, 100 bp, Homo sapiens
ccatggaagctttggagcagtgtattttaaatttcagcagatttcaaggagccgccatccctgccagggaaggagaagccatccccgaagacagtctgtg

SEQ ID NO: 802010 - DNA, 98 bp, Homo sapiens
aggaggcgcggaaccatggccgatgggggcgagggcgaagacgagatccagttcctgcgaactgacagaactgtaccgctctctttttggccagctcc

SEQ ID NO: 802011 - DNA, 98 bp, Homo sapiens
ctaagatgtgtctgctaatggtgcttaaattctcccaagaggttctcgcttttatttgaaggaggtgattatgtttgagaccttcaacaccccggcca

SEQ ID NO: 802012 - DNA, 100 bp, Homo sapiens
gaaagctgatgtaaaatcaacagcatttaccttccggtcttccaaggtggccccagaagaatttaaaaccagcattggccgtgtgaatgcatgtttgaaa

SEQ ID NO: 802013 - DNA, 100 bp, Homo sapiens
tctctgatgcccgctgtgtttttgacatggggtgctgctctacgttcgaaaggagtcagaagaagtctttgatgccctgatgctcaaaaccccatctttg

SEQ ID NO: 802014 - DNA, 99 bp, Homo sapiens
tatggatttcaatccctccgtatgcacatgtgggtagaggacgtgttagacaagttcatgagtagcaggacccagtgctccataaaggataatagtttc

SEQ ID NO: 802015 - DNA, 98 bp, Homo sapiens
accgggaaactgggtcctccaaaggggcctgccttaagtgtgaaagtaatgactgatgaaagtggaaaatccaaaggatttggatttgtaagctttga

SEQ ID NO: 802016 - DNA, 100 bp, Homo sapiens
gctatttgctgagggacagcgagagcgtgccaggcgtgtactgcctatgtgtgctgaaaaaagagggggcatggctggagcagaatgagaatgagaaggc

SEQ ID NO: 802017 - DNA, 100 bp, Homo sapiens
ccggatcctagtcctgagcgtgtctgtgtgcgagtgggtgaaatgacaatggatgctctgttggctcgattgaaacttctgaatccagatgaccttagag

SEQ ID NO: 802018 - DNA, 98 bp, Homo sapiens
ggcgtgaaccactgcacccggcgagaatgatgctgaaacattgcagaaatgtcttattttatgctatgaactgttgaagcagatgtccatttcaacag

SEQ ID NO: 802019 - DNA, 98 bp, Homo sapiens
tctggcctaccatccttctgctgctgaaccaatgccaacagcatcaaacacttggcttgttccagaaactaaaggagctattgtacaaggtggatatg

SEQ ID NO: 802020 - DNA, 100 bp, Homo sapiens
tgtggagcagcggagaggcagccccatggagcctgtccactatgtcctggtgccttttcatgacccaggaatgggtaccacagaccatgtcatcgtcctg

SEQ ID NO: 802021 - DNA, 98 bp, Homo sapiens
gagaatgagccagagggacacgctggtgcatctgtttgccggagggtggagctggcgtgtggaaaaagcaaccggctggcccatgtgtccgagccgag

SEQ ID NO: 802022 - DNA, 122 bp, Homo sapiens
cggggaggagcgttgcattgcctgcaagctctgcgaggccatctgccccgcccaggctaagctggcggtgctgctggtgacgctggtggcggccgcggtctcctacctgcggatggagcaga

SEQ ID NO: 802023 - DNA, 98 bp, Homo sapiens
ttctgttccatcagcgtttgtttgtggatgacgtagtagatgaaagtgatgacaacgatgatattgatgtagaagctgaaaacgaaactgagaatgaa

SEQ ID NO: 802024 - DNA, 100 bp, Homo sapiens
tacatcgatagctatgagaaggacgttgccaagattaaccaggacccccaggctgcctctaagaatcaaacttcactcttgggagaaccaccaaaagaaa

SEQ ID NO: 802025 - DNA, 98 bp, Homo sapiens
gagcttgacattctcaaagactggtgctatgaagctgtctcccacacattctccaactacccgcccggcgtccgctacatctggtttcagcacggcgg

SEQ ID NO: 802026 - DNA, 99 bp, Homo sapiens
aagaaacctcaggacttgagtaacagcaacatgctgtccccaatctcttcatgctggaaacagtggattctgtgaagttggcagacaaagtgaacagtt

SEQ ID NO: 802027 - DNA, 100 bp, Homo sapiens
agacctctccccagtgtatcagtcgagaatccagactccaaaatgatgcaaatcaacctgactggatttttgaatggaaaaaatgctcgagaatttatgg

SEQ ID NO: 802028 - DNA, 98 bp, Homo sapiens
gaacaagtttgccttctcctatgttttccagaaatgacttcagtatctggagcatcctcagaaaatgtattggaatgatgagtgatgtgtctgcagga

SEQ ID NO: 802029 - DNA, 100 bp, Homo sapiens
cctcgttacctgcaggtattgggagatccacagctaagacgccaggacccactggaagcctagaaatggtacttaagagattatggcatcagaaacccac

SEQ ID NO: 802030 - DNA, 98 bp, Homo sapiens
gtaactctatcggactctcccatcactctgcatggttgaccgttctggaagaaaagaggccagctctgcagccccctcggggacgcccccaccagctc

SEQ ID NO: 802031 - DNA, 100 bp, Homo sapiens
caaggagaggaagaactagtttcccaaacagatgttaagacattcttggaagccttaccgctatcagttgagggatttgcagttgataaaatggctggag

SEQ ID NO: 802032 - DNA, 100 bp, Homo sapiens
caggaacagggacagcacctcatcccctggatgggggaccacaagatcctcatcgacaggtgatgatccaatgccctttgacattaaagctgagatgaca

SEQ ID NO: 802033 - DNA, 98 bp, Homo sapiens
cctggtgtcacctatcagtaaaaggcaaaacctatgtgggtctaaaaattgttcaggccctcctaaccaacgagtctgtttggcaaattagcctccag

SEQ ID NO: 802034 - DNA, 100 bp, Homo sapiens
tggccatggaaatcgctgagaagcacctggatattcctaaaatgttggatgctgaagataataacaaggactgttctggtgtgtccttacacctcacacg

SEQ ID NO: 802035 - DNA, 99 bp, Homo sapiens
agaaagtcctcaacccccaagactgccactcgaggcccgtcggtgtgtcccggcatggatatccggaacaacctcactaggttgcatgagctggagaat

SEQ ID NO: 802036 - DNA, 99 bp, Homo sapiens
ttatgaaccccacagaccaagcccgcattgagtattctgaaacatttgaagtcatacagaagaatttctcctcccgtggatctagaatatcagtatatg

SEQ ID NO: 802037 - DNA, 100 bp, Homo sapiens
acctgctgtagtcacgagggacgggcggcggcctggtcggcagagagtagcctgcaacattcggccgtggttacgatgtactgtgaatatatgcctgatg

SEQ ID NO: 802038 - DNA, 100 bp, Homo sapiens
tcctattttggttgatctcctagaaaaatctcagcaattctgtggtgttcttggtcacacatttatggagtttctgaagggcagtggagattactgccag

SEQ ID NO: 802039 - DNA, 100 bp, Homo sapiens
aaacttcagagcaagttttcattgggcaaaatggggcttcatagagcccagtgtgcaattaaacagactcaggtaactgttcagaaaattggaaaggaaa

SEQ ID NO: 802040 - DNA, 99 bp, Homo sapiens
gtgcctgcaggatgtgagggaggtgttggatcctgaacaaaaccataacttcacagatcattatctaaatgtggcctttgacctttctcaagttctttt

SEQ ID NO: 802041 - DNA, 98 bp, Homo sapiens
ggagtttcatgaagagcccaaaacctattacgaactcaaaagtcaaccgctgaagagcaggatttgtactgtgttcgcagtgacctggggaacctgct

SEQ ID NO: 802042 - DNA, 124 bp, Homo sapiens
ttattgcaagagcccgacttgaagtggaaaatcaagctaagcgcctactagagcagggtttggagactcagttgttgacctcctgtactggagagacattaagaagactggagtggtgtttggt

SEQ ID NO: 802043 - DNA, 100 bp, Homo sapiens
gtgctttccccaagtagtccgatggctgcggctgcgccgaggcgccctactcagagaatggtggcatgaagctcaaaaaaatccaaagataagacctaat

SEQ ID NO: 802044 - DNA, 98 bp, Homo sapiens
atgtcagacgcagccgtagacaccagctccgaaatcaccaccaagagatcttcgctttaacagaatcagagagatccaacctggggcattcaggcggc

SEQ ID NO: 802045 - DNA, 100 bp, Homo sapiens
agcagtccctctctgtccgggcgctgcaggagatgctggctaacaccgtggagaaatcagaagggaaagaagattggcccatgcacaagctggaatgttc

SEQ ID NO: 802046 - DNA, 99 bp, Homo sapiens
gaccgtccaaaccgacacgcgtggtatcctcgcggtgtccggcaagagactaccaagacagacgctatgcctggagatgcccaaagatgagctgcccaa

SEQ ID NO: 802047 - DNA, 100 bp, Homo sapiens
cgacaggaaaaaaatttgctggatattgatgcgccagtcactgtgctgggcctaaaggagataacatttatgaatggagatcaactatacttggtccacc

SEQ ID NO: 802048 - DNA, 99 bp, Homo sapiens
ctgttggagctttgcagctgacctacatctcgaagtcagtttacagacacgagacagaataggaaccggcggctcggtggtggactgcagaggactgtt

SEQ ID NO: 802049 - DNA, 98 bp, Homo sapiens
tacccaagacacccacatggaaacggacctgctcagcagcctctagaagaaccacacctcttttggaatatattaaaaatagaaaattagaaaagcag

SEQ ID NO: 802050 - DNA, 119 bp, Homo sapiens
gaaagacagcaaacacctgaggtggtacctgatgattctggaactttctatgatcaggcagttgtcagcatcaccgacacatttgaagccttcacattaagtcttctgtcttcactctt

SEQ ID NO: 802051 - DNA, 100 bp, Homo sapiens
tcagacactgatggcccagtgggaggcctgggaccctgaagagagcccagtgccttctcccagtgccttgctcgtagacaaccccacacctttcggaaat

SEQ ID NO: 802052 - DNA, 100 bp, Homo sapiens
gcccccttcagccatgactcctccctacccgcagtttgaggcagttgtgaaaaacttcaggacaaaaatgtttcatttaaggacttgtgctgctaagttg

SEQ ID NO: 802053 - DNA, 100 bp, Homo sapiens
aaggttttcaatggtgagctaaagacctgtcgcgaaatcgcctttcagaaattcctatagaagcatgtcactttgtttctctggaaaatctcaacttgta

SEQ ID NO: 802054 - DNA, 146 bp, Homo sapiens
tcactattatgaagatggcaatgttcagttggttagtcataaagatgtacaggattcactaactgtttcgcaatgtgcaggttctatctgtgagaaatatggcttagaggagtgtacgtgtgccagttctgatggcaaagatgata

SEQ ID NO: 802055 - DNA, 101 bp, Homo sapiens
caaatatacgtgtatgttcacttacgcctctcaaggagggaccaatgaggaccctgctgggatctttgagcttgtggaggtggtcggcaatggaacctacg

SEQ ID NO: 802056 - DNA, 115 bp, Homo sapiens
cgggcccacatcttccggccaacttccattgaacttcccagcactcgaaagggaccgaaatggagagcaaagaatggctgcagtctgtccaggccaccatgatcctgtcgatcat

SEQ ID NO: 802057 - DNA, 98 bp, Homo sapiens
gctggctctggtcttcgatgcacaggagtggccgttatggaacgcagaccattcctcaagaattttgtatccaaggcccaaaagtttgttacccaaga

SEQ ID NO: 802058 - DNA, 99 bp, Homo sapiens
ctgacccggcgagcggagccggggctggagagcggcgaccactgcggatctcggagaatggatcttggagaatgtctgaaagtccatgacctggcttta

SEQ ID NO: 802059 - DNA, 99 bp, Homo sapiens
gtggttggagagctcatctggaattttgccgatttcatgactaaccagtggtttgtaccagttgctggagccccgaatgattgttcgttgcaggaaaca

SEQ ID NO: 802060 - DNA, 100 bp, Homo sapiens
gaactcttcttatgtccatgggggattggattcaaatggaaagccagcagatgcagtctacggacagaaaggttttctagtcttgaactactggctacgt

SEQ ID NO: 802061 - DNA, 98 bp, Homo sapiens
ggcacctatggacaagtctataagtttcagtctagaaggcttgacaggaggagctggtgtcggaaacaagccatcctcatctctagaagtaagctctg

SEQ ID NO: 802062 - DNA, 100 bp, Homo sapiens
ctggggaaaccgcagcagccgtcggagcacttactggagtccaagatgctaatgggcggcgactggcggcgcgatggacctgaccgggctcctgctggac

SEQ ID NO: 802063 - DNA, 100 bp, Homo sapiens
atccgacggcctatctctgcagagagtgccatcatgaatccagcctctaaggtgatagctctgaaagggtctgcggaagagggagctgctgaaggagctg

SEQ ID NO: 802064 - DNA, 98 bp, Homo sapiens
ttgttaccgaacatctcataaataaggtatggcatttcaaatatagatacaaccattgaaggaacgtcagatgacctgactgttgtagatgcagcttc

SEQ ID NO: 802065 - DNA, 100 bp, Homo sapiens
gctgtaccggcagatcctcaggggcaagtacagttactctggggagaatctatctaccgccggggagccagaagatggaggaagctgtaccgtgccaacg

SEQ ID NO: 802066 - DNA, 100 bp, Homo sapiens
cccaagaagacctatatcacagatcctgtttcagccccctgtgcgccaccattgcagccaaagaaacggccatcattcaagcaaatcatttcaatcctgg

SEQ ID NO: 802067 - DNA, 100 bp, Homo sapiens
tcctgatttctgcagctctgtgtgaagcactggaagatcaattcttttatcatccatactttagaggcagcaaaatcgaagctttcttcaccagtaaaag

SEQ ID NO: 802068 - DNA, 99 bp, Homo sapiens
gggttcctataggtcattggcctgttccagagtctttttggccagatcaaaattcgccaacactaatctatagcatgatgctgcgattatctgccttat

SEQ ID NO: 802069 - DNA, 100 bp, Homo sapiens
aggaaaaagaagaatttattcactcaagactaaaaactaaaggcctgggcctgagaactgaatcaggacacaatgtttgcacgaggactgaagaggaaat

SEQ ID NO: 802070 - DNA, 100 bp, Homo sapiens
agacccgtagttcctattgattcatcagattttgcattggatattcgcatgcctggggttacacctaaacaggatcagaacataatacctgaaaatttgc

SEQ ID NO: 802071 - DNA, 101 bp, Homo sapiens
ccatgaaggaaaagtagcttcttataaacattttacatgcaatgtactaccaagaatcaaaggccttgattttgacttcagcgttccaggatccatgaagc

SEQ ID NO: 802072 - DNA, 100 bp, Homo sapiens
ttggaaaccaagttaatcgaaaagttctcaattttgaacaagctatcaaggtggccctggtacagtggacggaaagtgtgggcttaaccctggtgggccg

SEQ ID NO: 802073 - DNA, 100 bp, Homo sapiens
cttaattgggatttttaactgggaggagatgttaaagtaacccatcttgcaggacgacattgaagattggtcttctgttgatctaagatgattattttgt

SEQ ID NO: 802074 - DNA, 100 bp, Homo sapiens
aaaccccggagagcgagagcgcgaaggaaatctggccgccgccgccgcgagcgctcccggaaaagggagcgatgttgatctcaggaagcacaaagggacc

SEQ ID NO: 802075 - DNA, 100 bp, Homo sapiens
tccccaaacaaagcatcgggcagttccatgagggggatgcctatgtggtcaagtggaagttcatggtgagcacggcagctttggaaacatgatgagcaag

SEQ ID NO: 802076 - DNA, 100 bp, Homo sapiens
acggaaactagctcatctgtagagactgatttgcaacccttccgggaagccatagctctgcatgaatcccctactttgaaactagtgctgccaatgggac

SEQ ID NO: 802077 - DNA, 100 bp, Homo sapiens
gggatggatgccaattcatgaagcagcttatcacaactctgtagaatgtttgcaaatgttaattaatgcaggtgagaagccttataagtgctcatgggag

SEQ ID NO: 802078 - DNA, 100 bp, Homo sapiens
catctctgaagctcgtgaaagaaaataacatccgatcagttacatacaacagctgtgccagactctgcttaaaccaagaaacagtatgtttagcaagcac

SEQ ID NO: 802079 - DNA, 100 bp, Homo sapiens
tgccttatttaaacaggttcattttggaaaaggctaacctctgctttgtggacattgacaaccacttcattgagttgccagaggacttgccacagttccc

SEQ ID NO: 802080 - DNA, 98 bp, Homo sapiens
tggaggaaggagcctggttatcccatgctggaattcatcattttgccagcaccagagcggatctccaagaaggagaagcttctctcgcagccggagca

SEQ ID NO: 802081 - DNA, 100 bp, Homo sapiens
gcaagaaagaccatcaagtttaccagtttttgagttccagttgactgcagaggacatgaaagccatagatggcctagacagaaatctccactattttaac

SEQ ID NO: 802082 - DNA, 100 bp, Homo sapiens
gtcttcgcggacggtgctggccccgggcaacgatcggaactcggacacggatcttttgccagaaatgagggcatactggcctgacgtaattcactcgttt

SEQ ID NO: 802083 - DNA, 98 bp, Homo sapiens
gttactgcagaatggatggtgtgtgcacagctgtggactgggtttttaccaagctggcagtctctgtttagttggatatgtcaagtgaccagatagct

SEQ ID NO: 802084 - DNA, 98 bp, Homo sapiens
tatggaaacttggatgaataattttcatactctcttaacattggataataagcttttacaaactgatgtgcccctgggcgctgggattgctctagcct

SEQ ID NO: 802085 - DNA, 100 bp, Homo sapiens
ggaaaactgtaatggaaaaatggcaaccctgtctgtaggaggaaaaactgtatcacgttttcgtcttggtcgggaggaacctgccatgtccatggatgcc

SEQ ID NO: 802086 - DNA, 100 bp, Homo sapiens
atttcccggaaggttaacagcccccttctcagttttcctgctgaactaccagcagaaagtaggcatcatgtactgcaaagctggacagagcactgaagaa

SEQ ID NO: 802087 - DNA, 100 bp, Homo sapiens
gagaattacgttttaattgactatgacaccaaaaggatgatcggctgaatgtaacagaggaactaacgtccaacgacaagacgaggattctcaacgtcca

SEQ ID NO: 802088 - DNA, 60 bp, Homo sapiens
acagattgagccagaaggaagacaatgctgaggtgttatgaacataaacagtatagaaat

SEQ ID NO: 802089 - DNA, 100 bp, Homo sapiens
gcctgagcggccggaaactgagggagtttccccggggagcggccaaccacgacctgacggacaccacccgggcggggccgcgatgggcctcttggaacat

SEQ ID NO: 802090 - DNA, 98 bp, Homo sapiens
cctactgatggaagcattgcagcagctgtagaagtgtgtcagtgcccaccagggtatactggctcctcttgtgaagatcgcttcatatctctaaatat

SEQ ID NO: 802091 - DNA, 100 bp, Homo sapiens
agccaatttatatttcctggctcttcttatcttacagaaaccgaaacttcattgccccttcaatgtgggaatccagccagaccctattcttggacagcat

SEQ ID NO: 802092 - DNA, 99 bp, Homo sapiens
gtaacttacgtgtactttaccaacgagctgaagcaggctgctttgtaccgcctcagtggagactggaatcccttacacattgatcctaactttgctagt

SEQ ID NO: 802093 - DNA, 100 bp, Homo sapiens
agagcagagaccatatagctgccctcagctgcactgtggcaaggcttttgcttccaaatacaagctgtataggcagaggtggaggagacactgaagcgac

SEQ ID NO: 802094 - DNA, 100 bp, Homo sapiens
ctgcctttgacctttttgaagcctttgcaaaaagctgcccagaagttaaatctgtcttctaaaaagaagaaacatcggccttccacttcttccgctgccg

SEQ ID NO: 802095 - DNA, 99 bp, Homo sapiens
ttcggcggctgatggcggatcaggatcggaagcctgcgtaactttctcccttgatccgggagtctttccactgggagttccgattctgaagaggcattt

SEQ ID NO: 802096 - DNA, 100 bp, Homo sapiens
ccaagaagctactggacctcgttcagcagtcatgtaactataagcagcttcggaaaggagccaatgaggaaactggcgatggaatatgagaggagccctc

SEQ ID NO: 802097 - DNA, 98 bp, Homo sapiens
aacaggcttggaaccaagctgcaagtcctgtggggctcactttgcaaacacggccaggaaggaagatgagaatgtgcctactgctcctgatcctccaa

SEQ ID NO: 802098 - DNA, 98 bp, Homo sapiens
atttttcctcataaagagtaacaaccatgagaatgtgtctcttgccaaagcgaagtatcaccttttgccatgatagcatttctttcattggacagttc

SEQ ID NO: 802099 - DNA, 100 bp, Homo sapiens
ctccatttgaagctgatgaggaaaattggcaaatctgttactgcagacagatgggaaaaatatttgatcaaggttaacaatgagaatgttgtcaaagtcg

SEQ ID NO: 802100 - DNA, 100 bp, Homo sapiens
gaatttgcctcggggacgcctctccagacatatgttccatatcgagatagtaaaatgacaagaatccttcaagattcattaggtggcaactgtagaacca

SEQ ID NO: 802101 - DNA, 101 bp, Homo sapiens
tctgtgttgtgactgctttggacgtgggagtcacctgaaagccaggaaatggttactcactataaacaatatccacccaacacaagcaaagtttattccta

SEQ ID NO: 802102 - DNA, 100 bp, Homo sapiens
agaagaggaaacctaaccaatgactgtggaataatatggaagaagatggaaaaaacttgtttaatggggaatgacagaggaagaggaagacaaacttctg

SEQ ID NO: 802103 - DNA, 98 bp, Homo sapiens
atctgaaattcatcacctctctggagtcttcaaactgaccaagcattgaaaagggagttcccattagacttgaagttgggccacgtgatatgaagagc

SEQ ID NO: 802104 - DNA, 142 bp, Homo sapiens
ccgctgtcccttcccggactgcgccaaagcctactacaagtcctcgcacctaaagtcgcacctgcggacgcacacaggctgaccccgcactacatctacccaccagccatcgtgcagcccagcgtggtgatcccagccgccc

SEQ ID NO: 802105 - DNA, 99 bp, Homo sapiens
gaagacttagctggtgttgggcttggcgggtccacttggtacgctgggcaaactccaagacatggatttgattgacatactttggaggcaagatataga

SEQ ID NO: 802106 - DNA, 100 bp, Homo sapiens
agatcaatttcaagaagcatgcacttctcctcttgcaaagacccatacatcacagggagctgagcacataacgacttacacgttcaatactcacaaagcc

SEQ ID NO: 802107 - DNA, 100 bp, Homo sapiens
aataatgcagctgcaggctcacagatgatgataattccgaagaaggcttccacactattcattcaggaaggcatgaatatgcattcagcttcgagcttcc

SEQ ID NO: 802108 - DNA, 100 bp, Homo sapiens
gttaatccaggtgagactttcacaataagagcagaggatggaacacttcagtgcattcaagaatttcgctaaggagtttgtgatcagtgatcggaaggag

SEQ ID NO: 802109 - DNA, 99 bp, Homo sapiens
tatgtctcaagatggcggccaatgtgggatcgatgtttcaatattggaagcgctttgatttacagcagctgcagtttcatgatcaacatgggagactcc

SEQ ID NO: 802110 - DNA, 98 bp, Homo sapiens
aggccctgggcctcattcgcttcccgctcatgaccatcgaggagttcgctgcaggtgcagcagtaccgcgtcgccatgactgccaaggactgctccat

SEQ ID NO: 802111 - DNA, 100 bp, Homo sapiens
cgttttgtcacttatgttggatgtgcctttgctctgaagagggcccttgccttgtccacaccatcactggagatttgctgagagcccttgaaggaccaga

SEQ ID NO: 802112 - DNA, 100 bp, Homo sapiens
atgggtcctacagcaatgctccacagcacatattgcttcctccacagtttcctcaggaaaaaccagtgatcagtgtttatccaccaatacgacatcactt

SEQ ID NO: 802113 - DNA, 98 bp, Homo sapiens
atctctacgtgtgtgcagccttcttgatcaagtggaggaaagagatcttggatgaggaggattttcagtgcggaaacaggaaattataaaagtgacag

SEQ ID NO: 802114 - DNA, 98 bp, Homo sapiens
atttggaggtcagaagcagaggcatctgtaaagtcatgtgtccatgaggaacatacaagaggttatggccacaccgtgcccttgtcagatggaggtaa

SEQ ID NO: 802115 - DNA, 98 bp, Homo sapiens
cttcctggcccgaaaggagagcctaaacgctatgtattagaggaagctgagcaactggagcctcgagttagtgctctggaagaggacatggatgatgt

SEQ ID NO: 802116 - DNA, 100 bp, Homo sapiens
agtatttgaggagaaagcatttgtgaattttgaagattgcaccggtcgacaaaggacagcctatttttccctcgacacccgattcaaagtgggcacagat

SEQ ID NO: 802117 - DNA, 99 bp, Homo sapiens
ctggtcttgctcggccgatgaagtgcagaggtttttttctgattggaattccaccagcccctcgtggagttcctcagattgaagttacatttgacattg

SEQ ID NO: 802118 - DNA, 98 bp, Homo sapiens
aactgtgtggattgcaaagggggcatcattgtgagtggctccagggacaggacggccaagattgaagataaaactttccaagtccttggtaatcttta

SEQ ID NO: 802119 - DNA, 100 bp, Homo sapiens
tggaaagcttgaagggggacccccagagactgtggcaatgggttttgaacgaagaatgtgatcagaactggtacaaggcagagcttaatggaaaagacgg

SEQ ID NO: 802120 - DNA, 100 bp, Homo sapiens
ggtggctcacgttgaccaactctttgatgatgcatccaggtctcattcaggaacgtcgcctgataacactgcaccaccacctccccctccaaggccacag

SEQ ID NO: 802121 - DNA, 98 bp, Homo sapiens
aggcctctccggacaagaggactgaagcagatggcaactctgatcccaactctgtttctctgcaggtggatattgttcccagccagggggagatcagc

SEQ ID NO: 802122 - DNA, 100 bp, Homo sapiens
gatcgaatgaaagagaaagcaatgagtgggctaaagtgaaacattcagcatccctgtctggtatgccttctcggtagattggggtcaactggactactta

SEQ ID NO: 802123 - DNA, 100 bp, Homo sapiens
aaggcccgcaagaagtacaaagtggaggtatgttagagcggaagttctggctggctttgtcaatggcctatttttgatcttcactgctttttttattttc

SEQ ID NO: 802124 - DNA, 100 bp, Homo sapiens
gtgagaccctcacttcatccgggatgaggagaatttctgtgccactgtgcccaaggatggacgttcctattccccaactctctttgcacagacagttcga

SEQ ID NO: 802125 - DNA, 100 bp, Homo sapiens
tccgcctcccaggtccaagcgattctcctgcctcagcctcctgagtagctggcattacagagaccatcatgcagacatcagagactgggtcggacacagg

SEQ ID NO: 802126 - DNA, 100 bp, Homo sapiens
aagcaagtggatgaatttcttgcttccattgcttctccatcatctgacgttccacggaagaccgctgaaatttgtggctgtctatgttccaggaagtaaa

SEQ ID NO: 802127 - DNA, 100 bp, Homo sapiens
cgcacagttatttgcaaagtcccaggtgaactcgtggcgagagaaggaaaatgcgcgtcccgggcgcggtcgaggggagctgcagcgggagtcagacttc

SEQ ID NO: 802128 - DNA, 51 bp, Homo sapiens
cgaagagcggctaaaaacgttagtcttcacctgaaccgaattctacaggag

SEQ ID NO: 802129 - DNA, 100 bp, Homo sapiens
agaggccaaccaacctttggaggctattcatgctcttatggaaaatgctgtgcaacccttactcacttctgtgggagatgctatagaggccataatcatc

SEQ ID NO: 802130 - DNA, 100 bp, Homo sapiens
acagaagattctcaatattctcacaaataaacatggtgcttggggagcagtttctcataggactccaagccccctgatccttgatcagaactacattaac

SEQ ID NO: 802131 - DNA, 98 bp, Homo sapiens
tcagaaaggatttgccagtggagtagaacagattattcttggagctggaccagtacttgagaacactgagctgaaggttgaagtggagagcttgaaac

SEQ ID NO: 802132 - DNA, 100 bp, Homo sapiens
cccgaacctctggctgactttggcagggcccatctggcacggcctccgcggcgcgcaggttgctgaaaagccaggagtcaaaatgactgagcgctttgac

SEQ ID NO: 802133 - DNA, 100 bp, Homo sapiens
gatgtttcagttcctccatttaacagataaagtgaaatctttccgtgcagctctacaagaggaggaacaagccagcaagcaaatcaacccgaagagaccc

SEQ ID NO: 802134 - DNA, 100 bp, Homo sapiens
cgaattcagaaggatatcgacgtcgtgatccagaagtccagagctgaggactgcctgtttgcagtacaaaattggacagctgtacatgatcagcaaacac

SEQ ID NO: 802135 - DNA, 98 bp, Homo sapiens
cttggtctcaatgtccacaacatgaccccagctacctccccaataggtgcatcagggtcccgggattcttgagctgtgcccagctgacgagcttttga

SEQ ID NO: 802136 - DNA, 100 bp, Homo sapiens
gaaggaacaagaggcctgtgttaagtcctgttgatgttaagtcctgttgagagcaccaggaatgaatctgaagtctgctgcagtaaaacacagaaggctt

SEQ ID NO: 802137 - DNA, 98 bp, Homo sapiens
cattttcggcaaccgctgctggcagttttgccaggtgtttgttaccttgggaaaagaagatctcccggagcagtgccctgaaagtgctggaccatgcc

SEQ ID NO: 802138 - DNA, 100 bp, Homo sapiens
gaagaacaaagacttagactcggagagtcaagccctacccgtcgagaagctgtgaagagaagaacagccgagtacctcatgcgggcagaaagtatctcta

SEQ ID NO: 802139 - DNA, 100 bp, Homo sapiens
gatgaggctctttgtgttgtagacttgctaaaggagaagtctggtgtaatacaagatgctttaaagaaggaagccaaattggcagagaatgcttgtaccc

SEQ ID NO: 802140 - DNA, 100 bp, Homo sapiens
tggactgtccctgctcatccattctcctgccacccccagacctcctcagctccagagctgtaggtaaaacttgcctactgatcagttacacaaccaatgc

SEQ ID NO: 802141 - DNA, 101 bp, Homo sapiens
cggggatattctgattcagcagtcagtctcagcacgtgttctggtctcagactgtatgaaaacaagggagaggctgacttcgtggaatctttgctgcagct

SEQ ID NO: 802142 - DNA, 100 bp, Homo sapiens
tccatcagcaatgtcacagccttcttcatggccgcgttaatcccaattcccgctctgcgggcgttctccctccagattggccatcgggactttgatgtgg

SEQ ID NO: 802143 - DNA, 98 bp, Homo sapiens
aagtaacttgtggaatgctgagaaaggatgccccaggtgaggatgaggaggaagatggtgtcagtgaagcggccagcctagaggagcctaaggaagag

SEQ ID NO: 802144 - DNA, 98 bp, Homo sapiens
gaaaagaactgctctccatggagagagtaactctgtccttattatcggaccccgaggatcaggaaaaactatggaattgcattttgtgaaaaaagaac

SEQ ID NO: 802145 - DNA, 100 bp, Homo sapiens
gaggctaagaaagtggtgaatcccctgtttgagaaaaggcctaagaattttggcattgaacgacaccgtaactatccgcactagaaagttcatgaccaac

SEQ ID NO: 802146 - DNA, 100 bp, Homo sapiens
ctacaaatcccaggagcacttcacgaactgccattggatgtccagaatcccctgtagttgataatgttgggaataagctctgcaactttctttggcattc

SEQ ID NO: 802147 - DNA, 98 bp, Homo sapiens
cagaggctggggttgaaacaagcagaagaacgcttagaaagagatcacatctttcgacttgaaaaagacagggtgtgggccaatgtggggaagagcct

SEQ ID NO: 802148 - DNA, 100 bp, Homo sapiens
tttaaatatgacggctccaccatcgtccccggcgagcagggagcggagtaccagcacttcatccagcagtgcacagactagacgcttgaagcaaagctgc

SEQ ID NO: 802149 - DNA, 101 bp, Homo sapiens
acaaactacccattttcttttttggaactcatgagacctctccagggcacaccgtattcagctctgagcggtctttgctagtgaggccaaggagccaccct

SEQ ID NO: 802150 - DNA, 100 bp, Homo sapiens
agtgaacttttctctggacttccccagaagaagattgtggttgaattcaggtttttatttcagggcaataatggaactgtcctgtacacaggagacttca

SEQ ID NO: 802151 - DNA, 100 bp, Homo sapiens
ccttgcagatcggtgacacagttcacatcctggagatgtacgagggtatgcgccaggggaacgaccatggcactcagtaccgctcggccatctacccgac

SEQ ID NO: 802152 - DNA, 100 bp, Homo sapiens
aaacagtcctgtacggtggccagaattcttcatggtggcatgatccatagacaaggaaggaggctgcagtgtgccagtagccgtgcatacagctatgaag

SEQ ID NO: 802153 - DNA, 98 bp, Homo sapiens
gcggccggggcgcgcagagggcaggcaggaggtcggagcagctccgcgaggaccgcaccatcccgctcattgtggatcttcttgttccaaccaaagtg

SEQ ID NO: 802154 - DNA, 100 bp, Homo sapiens
ccttcgtctccgagtttgcgactcgcggaccggcgtccccggcgcgaagaggctggactcggattcgttgcctgagggggcttcgccaccttctcctcct

SEQ ID NO: 802155 - DNA, 100 bp, Homo sapiens
tatgggaacaacatacagtgacgcttcacagggtgggcagtgtcaaaccgggaaatgcttatagctcaaaacagctccttggaatttaagctacacagac

SEQ ID NO: 802156 - DNA, 98 bp, Homo sapiens
cttcttgatgttgtccatcctgcagcaaagactttggtagacattgccaaatcccaagatgctgagtattcaagtcaaacaacgttgaaatggattgg

SEQ ID NO: 802157 - DNA, 100 bp, Homo sapiens
cagctttataatggtggcccacctagccatcaatgtttccaaggcccgcaagaagtacaaagtggaggtattgatgaagatgaccctactgctgatgata

SEQ ID NO: 802158 - DNA, 99 bp, Homo sapiens
ccatcttgagtctactctgtcgctcttgtgccctagcaccccgagaaccgtcagtttgagccagatggtaaagagaaatgtgtatgaccttacaagtat

SEQ ID NO: 802159 - DNA, 100 bp, Homo sapiens
ggattcgttacagccagagattggttttttgccctgacatctcttcgtcttgtgtttttacttgcatttggcttgatgatcattgtgtgtattgatcaat

SEQ ID NO: 802160 - DNA, 100 bp, Homo sapiens
gattttgttcctgaaaatcaccagttccgtgctccattatgtcgtgtgcttccccgcaatggtacaacagctccatgaacgtgatctgcacctggttgac

SEQ ID NO: 802161 - DNA, 100 bp, Homo sapiens
attagatcttgtcattcagtggtgtcgaatgctcaagtgcaatgtcaagagctttctggcctttgacgacccctatgccctggtggtgctggctgaggag

SEQ ID NO: 802162 - DNA, 100 bp, Homo sapiens
ctgacctgtaaatcatcctttaggccgacgcctccccccagggtcagctgcgggctcccaggcctaggcgcccatgacccctacgccaacagccgcctgg

SEQ ID NO: 802163 - DNA, 130 bp, Homo sapiens
ttgactttggcagaatatcatgaacaggaagaaattttcaaacttagactaggacatctcaaaaaggactgcagcattccagaaatagagcttttcccacaatctgacccagcctgttgtcctgtctaca

SEQ ID NO: 802164 - DNA, 100 bp, Homo sapiens
cgcctgcgacctgcccgcctggggatgaattgtaaaagcaacatcagcttgaccagtataaaattacagtggattgctcatctcagtcctcaaagctttt

SEQ ID NO: 802165 - DNA, 100 bp, Homo sapiens
gggaaaagaataatgtggaacaggaccttaaggagaaggaagatactattaaacagaggacaagtgaggttcagcttctagggacctattaaaagagttc

SEQ ID NO: 802166 - DNA, 100 bp, Homo sapiens
gatcctcaagtagtatctcctttctcccgaggcaaacagaaccatgtgctaaagaatgtggaaacgcacacagtgaagagtgaatctaccaagaacgttg

SEQ ID NO: 802167 - DNA, 100 bp, Homo sapiens
aactcgggaagcaacctccacccccgagatctccttggaagcagaacccatagaactcgtggaaactgattgttctctggggccggactgagaaatgcct

SEQ ID NO: 802168 - DNA, 99 bp, Homo sapiens
ggaccgacccccgacggtgcgtgaaacctctgtagaggagcaggatgcaaccgacaggctgtggccggacagctgctgcccagcacatggagcctgcac

SEQ ID NO: 802169 - DNA, 99 bp, Homo sapiens
gtgagcccagccgaggtaccgctgaagaggaatcaattttgtgtggacaacagtgagtatatgcggaatggagacttcttacccaccaggctgcaggcc

SEQ ID NO: 802170 - DNA, 100 bp, Homo sapiens
actgggggcaacttggcacttagaaccgcagcagggacgtcggtttgctatcgggactcggcgaggacgaacgacaccgtaactatccgcactagaaagt

SEQ ID NO: 802171 - DNA, 98 bp, Homo sapiens
gctacagggacccagcattaacacagcttacccccagccccacctacctattttaactgttgtgttcgtattaatgagaggtgtcagcgaggaacaga

SEQ ID NO: 802172 - DNA, 100 bp, Homo sapiens
tctgccgcaaggtgaagctgcccatcatcggggtggtggagaacatgagtggcttcatctgtcctaagtgcaaggctcaagcacggacatcagtgaggac

SEQ ID NO: 802173 - DNA, 109 bp, Homo sapiens
gcattccaatcatccagaaaacaagcacaaaaacagatacatcaacattttagcatgacactgatgaaattcaagttaactatcctggaatgtttgaattgatggaaga

SEQ ID NO: 802174 - DNA, 100 bp, Homo sapiens
gcctcgtgcggacgctcgtgcacagataccctcatgtttgactgttggagatttatcctgtgcaagagacctggaagcaacagttattcttccccacaac

SEQ ID NO: 802175 - DNA, 98 bp, Homo sapiens
ctaactccagtgtgctgagttgagacatcagcaagtgctgggcctggaatgtcagaagcagcagtaccaaaagaattggtggagctccatttgaagct

SEQ ID NO: 802176 - DNA, 100 bp, Homo sapiens
ttgaggaacatggcgttgctggtgcgagtccttgttcacagaatgattgcagagttcaagctgatccctggacttaataatttgtttgacaaactgattt

SEQ ID NO: 802177 - DNA, 107 bp, Homo sapiens
gaccgcttcctggaggccctgggcttcagctggcatgacacctgcttcgtctgtgcgcagcagtgttgtactgctacttctataaacggacagccgtaagactaggc

SEQ ID NO: 802178 - DNA, 100 bp, Homo sapiens
ttcagagcaagttttcattgggcaaaatgggttccacagcctcctagattagaacctcaggaaccaaattctgccaccagcacaacaattgcagtttact

SEQ ID NO: 802179 - DNA, 98 bp, Homo sapiens
gagaacctagaaatcatacgcggcaggaccaagcaacaacaacatgccaatttggctggcacgctgagcggccatgcctcctgggtgctgaacgttgc

SEQ ID NO: 802180 - DNA, 100 bp, Homo sapiens
ctgttcaagatgtaaagactaatcctgacatgttgttagcagtttttgaagaatggacagcaaattatggatgaacctatgggagaggaggagattaacc

SEQ ID NO: 802181 - DNA, 100 bp, Homo sapiens
attcccctctacatagacgacaccctgacgtgaacgagataattgggagagacatgtcccagatttctgtttcccaaggagcaggggtgagcaggcaggc

SEQ ID NO: 802182 - DNA, 100 bp, Homo sapiens
tagcaacagagttgccctgtcaccatttctttcacaaaccttgtgtctcaatttggctacaaaaggttgaaaatggttgcttgtgttcaactactgtgaa

SEQ ID NO: 802183 - DNA, 111 bp, Homo sapiens
gctgggcttcctgggcagctcgtcggtgttctgcaaagactgcaggaaggatcttttgccagaaatgagggcatactggcctgacgtaattcactcgtttcccaatcgcag

SEQ ID NO: 802184 - DNA, 100 bp, Homo sapiens
gccgagtctcaatatctgtcttcggtggactccttcggcagtccacccaccgccgccgcctcccaggccaagaagacgctggagggaggctgttaggagg

SEQ ID NO: 802185 - DNA, 100 bp, Homo sapiens
gcagcattgccttcctgtgtgggaaaaccctgccagatgacgtgtactactgtggaataaagtacatcaaagatgatgtcatcttaaatgagccctctgc

SEQ ID NO: 802186 - DNA, 99 bp, Homo sapiens
catctcctaggagctgatgacatgtccagaccaggtctcatgcttggtgcctggtgccaggacttgtgtgggtcccagacatgtgatactcttgggatg

SEQ ID NO: 802187 - DNA, 100 bp, Homo sapiens
ttaaagagctgggcttgaacttcgtgagtttcgctctaaactgcccttgaaatgaagctggacttggaggctgaccaactgactgaagagcagattgcag

SEQ ID NO: 802188 - DNA, 100 bp, Homo sapiens
attctctttcaatatggaacttgaaaagcgtgaaaaaagaagcttattaaacaagaatttagaggagaaactgacggttgcagtattttacagagctagc

SEQ ID NO: 802189 - DNA, 100 bp, Homo sapiens
aaccggcttgttgtcttcaattaaaaaatttattaaaggaagcacacctaagctgggcacattccggtctcatgatggggattattttattgaaccacta

SEQ ID NO: 802190 - DNA, 99 bp, Homo sapiens
gtgagttcaagtacagatcacacgcccactaaagcccagaagaatgtggctaccagcgaaggttgcttcatgtgcgaaatggaaactgcaaatatcatt

SEQ ID NO: 802191 - DNA, 100 bp, Homo sapiens
aggcttcagcagaagaaacacttcctataaatctcgcccaaacaggaaagatggagttttaacattgaatgcggagaacactaattatgcctatcaagtt

SEQ ID NO: 802192 - DNA, 100 bp, Homo sapiens
catggtagttgccttcctgggctgcatgggctctatcaaggaaaacaagtgtctgcttatgtcggtgccagatcggctagggatactcactcacctgtat

SEQ ID NO: 802193 - DNA, 99 bp, Homo sapiens
gtgatgaaaacccagatgccacatatgatttcaaggttgcacgttttcaaaaaatacctaatggtgaaaatgagacaatgattcctgtattgacatcaa

SEQ ID NO: 802194 - DNA, 99 bp, Homo sapiens
atggttcttttttgcctgctgttcctgtacccagaagctccaccatgaggcgaggtggatggaggaagcgagctgaaaatgatggctgggaaacatggg

SEQ ID NO: 802195 - DNA, 100 bp, Homo sapiens
ggtgccaccccacaggagaccagtacgaattggagcaatgttggcttatacacctctggatgagaagagccttgctttattactcaattatcttcacgat

SEQ ID NO: 802196 - DNA, 99 bp, Homo sapiens
cggaacagggcggcactggcccgccacagcgacgccggcgccgagggacaccgcagtatgaggcagaggtggctttctagaagatgaccatagaggacc

SEQ ID NO: 802197 - DNA, 100 bp, Homo sapiens
cagcccatccgtggtgtggagggctctgactacatcaatgccagcttcctggatggttataggtctccggccgaacaagcagacctttaaccctacagac

SEQ ID NO: 802198 - DNA, 100 bp, Homo sapiens
gctgatcgagaagtttgtagacacaccgagagtgttctgccagttctggataatccactgtccaagaaggttcgaggcctcattgatagcttacgggcac

SEQ ID NO: 802199 - DNA, 100 bp, Homo sapiens
aagacattgtacagaacattgtagaagaaatggtgaacattgttgttggagataaaatcagtggttctggaagtaactctgatatgatggaaaacagcaa

SEQ ID NO: 802200 - DNA, 100 bp, Homo sapiens
gtcccaactagtgcctcagccccacctcgtgttaacactcccagcttcagtggacaacctgataaggggtcatcaggagagaacaagactcgaagacgca

SEQ ID NO: 802201 - DNA, 119 bp, Homo sapiens
gaaggacctgctgatgaatattacatcatataccgaaatgtttttgataagagatagaatctcactatgttgaccaggctggtcttgaactcttggcacccaagcgatccttttgcctg

SEQ ID NO: 802202 - DNA, 98 bp, Homo sapiens
ttttagaggctttatatcctaaacttttcaagcctgaaggaaaggcagaactgcctgattacaggagctttaacaggacaatggcgtctcttggccac

SEQ ID NO: 802203 - DNA, 101 bp, Homo sapiens
caattggctgagaaactccttcctgcctttaacacacctactgggattccttgggcaatggtgaatttgaaaaggtggctagaggtgcaggtagctaattt

SEQ ID NO: 802204 - DNA, 100 bp, Homo sapiens
ggagacaccctctgggggtcctctctgagtcaaatccagtgaagatggctgtgccacccacgtatgccgatcttggcaaatctgccagggatgtcttcac

SEQ ID NO: 802205 - DNA, 99 bp, Homo sapiens
caactacgtgcgcgaggtcaaggccagcggaactgcaagcacatgttgaccagataactgaaatggcagcagtaatgaggaaagccattgaaattgacg

SEQ ID NO: 802206 - DNA, 99 bp, Homo sapiens
attgaactacaatcagtttctaatccagttcacagaaaggttcaagattatctaagaagatttgaaagtataccagatatgcttgaattggatcacctc

SEQ ID NO: 802207 - DNA, 98 bp, Homo sapiens
ctgctaaaacttcatcatctcaagttgacctgccacttcacccaaggagggcacaactccagatgttccgagctcagtggatgtttgaacttgctcca

SEQ ID NO: 802208 - DNA, 98 bp, Homo sapiens
ggaaagttcctcaagatggagactttgactttgtgtgaaatctaagaatcccctgccaactcttgagggctcaatccagaatgttgaattgaagtact

SEQ ID NO: 802209 - DNA, 100 bp, Homo sapiens
ccttcacacaaagaaaattgctcactttgatctcaagggtccacatatagcctcagttacattagctgcttatgaatgcaattcagttaattttcccgaa

SEQ ID NO: 802210 - DNA, 98 bp, Homo sapiens
ttgaactaaaacatgctcctggactaattgctgcactggcgtatgaaacagccaatttctatcaaaaagctgttgtggacatcggatacccaaggaga

SEQ ID NO: 802211 - DNA, 100 bp, Homo sapiens
gtcttccccagctctgcagccacatactatccgtttgttcaggaaccaccagtgacagagctggtggttcgtgagcacttctgaggagcagggctgggtc

SEQ ID NO: 802212 - DNA, 100 bp, Homo sapiens
ttaccttgctgcctcctccagcaacttggctggaggctctcaggtcatttttaccaacccattggagatagtgaagattcgtctgcaagtagctggagag

SEQ ID NO: 802213 - DNA, 100 bp, Homo sapiens
cagccatcaccctcgagagcccggacatcaagtacccgctgcggctcatcgaccgggaggctctttaagggtcacccagagactctggagaagtttgaca

SEQ ID NO: 802214 - DNA, 113 bp, Homo sapiens
ccttagctgtgctcgcgctactctctctttctggcctggaggctatccagcgaatgggtaccacagaccatgtcatcgtcctggcgtccacgaaccgagctgacattttggac

SEQ ID NO: 802215 - DNA, 100 bp, Homo sapiens
aactttcgacacacctgtagacgttcgccaggtaaaggccgggtgagagcaaaactttcagcaccacttgctggcatgggaaatgccaaggcagattcta

SEQ ID NO: 802216 - DNA, 100 bp, Homo sapiens
aacctgcccaaggggccggacacgctctgcttcgacaaggacgagttcatgaaggtcagttcaccgggacctggaggcccagattgcgatcgtgacggag

SEQ ID NO: 802217 - DNA, 113 bp, Homo sapiens
gggacactggctggtggaagatcatgttcgaatatgggaagttttaaagacagaggaggtaaaataccatgaagattttgaaaaaacaaaggggagaggctttactcccgtcg

SEQ ID NO: 802218 - DNA, 100 bp, Homo sapiens
cacaagcgtgtgcacagtggtgaaaagccttaccagtgtgaacggtgtcatcaggctgggacctttggcctacaatcagcaaggggctgtgttccctgca

SEQ ID NO: 802219 - DNA, 100 bp, Homo sapiens
tcatccctgtgtatgtaggagtgaatataaaaggacttcatctcctcaacatggaaactaagtatggaaatttcatcgataagctaagactcttcaccag

SEQ ID NO: 802220 - DNA, 50 bp, Homo sapiens
accctcaagagctgccggagacaggaaggccaggcccctgaccccagccc

SEQ ID NO: 802221 - DNA, 100 bp, Homo sapiens
tttctcgcttgtcaccttgccatgtggaagaaactggctgaagaaaaggtgactggtctcatgagccctgaagaatgaactcagaggaggttgtttacat

SEQ ID NO: 802222 - DNA, 100 bp, Homo sapiens
aagcggatttccgattgaatggaacagatggagtcggataactgttcaggaggagatgatgactggacccatctgtcttcaaaagaagtggacccgtcta

SEQ ID NO: 802223 - DNA, 100 bp, Homo sapiens
tggctttcacaagtacagtctacaaaaagacctgctagagccattattgcccctgtttctacacctgtgggttatgacaaagacaactgccaaagaatct

SEQ ID NO: 802224 - DNA, 99 bp, Homo sapiens
aactgctttgcctcaaactcagctttctaccagcagacaggcgctgggccccctgccccgtgaggacggcaacctgatgctgcacctgcagcgcctgga

SEQ ID NO: 802225 - DNA, 98 bp, Homo sapiens
cgaggctcgcgggcggcgggcccgggtacaacttggccaagtagaaatcaaatgccccatcacagagtgttttgaattcttggaagaaacaactgttg

SEQ ID NO: 802226 - DNA, 100 bp, Homo sapiens
gcgaagccttccactagcaaaggtcagcagatccggaagctcatcaaagatgggctgatcatccgcaagcctgtgacggtccattcccgggctcgatgcc

SEQ ID NO: 802227 - DNA, 100 bp, Homo sapiens
gagtctcaaaggtgttcctggatttggaagttggtgaaccatctaaagaagagaaggctgtggccaagtatcttcgattcaactgtccaacaaagtccac

SEQ ID NO: 802228 - DNA, 100 bp, Homo sapiens
ttcgatatatacagagacagtagggacagtcattttgtttactcattcagccctgttgcaggtcccaataaactcttcataaggttgacagaagcaccct

SEQ ID NO: 802229 - DNA, 98 bp, Homo sapiens
gctggtataccctcaaacccctcagacaatgaattcacaacctcaaacccgttctccggtggtccattatggctgacatgcaaaatctggtagaaaga

SEQ ID NO: 802230 - DNA, 98 bp, Homo sapiens
gagagtaaagtcagcatgagcaaaaactccaaactcctctccaccagcgccaagaggtcactggaaggactgagcgcattcaggagcctggaggaact

SEQ ID NO: 802231 - DNA, 100 bp, Homo sapiens
tggtagatcagccccacagcctcctgagtatcctggacgcccagacatggctgtcccagaaggggtgtctgagcaggatggaggcagcacgctgcagcgg

SEQ ID NO: 802232 - DNA, 100 bp, Homo sapiens
gaggctacatgatgtgtgatgacatcctcattgatgttaatgaatggtgctatacttgaattttctaaggtgtcattagtattctaccttgtaaatactg

SEQ ID NO: 802233 - DNA, 98 bp, Homo sapiens
cgcttcagttctcccggtgtggccacgagtcggccagtgtattagctcacaattagatgagcttctctgtccacccacaacagtagaagggagaaatg

SEQ ID NO: 802234 - DNA, 98 bp, Homo sapiens
atacagcaagaaagaccatcaagtttaccaggtatgggatgatgggatcattgatccagcagacaccagactggtcttgggtctcagttttagtgcag

SEQ ID NO: 802235 - DNA, 100 bp, Homo sapiens
gacactatgaatgctacttggatgcctcttaagcaacttgagttggtggaaccaagtggctggattcatgttcccttaactgacaatcataagaagccaa

SEQ ID NO: 802236 - DNA, 100 bp, Homo sapiens
agaaactggaggagtcccgctcgaagctaggttttggaaggtgacaatgaaatgtgaagaagttacatttctcaaacttgaaagttagtgacggcttacc

SEQ ID NO: 802237 - DNA, 98 bp, Homo sapiens
ggccttgacgctatctcccatcacctctgctatccagacaggactcaccgaggtcctcttcctgatggatgggaacaagccatgactcaggatggaga

SEQ ID NO: 802238 - DNA, 51 bp, Homo sapiens
cctccagctgctgaccctcttggctccggaagcctggttggcattgacaac

SEQ ID NO: 802239 - DNA, 100 bp, Homo sapiens
aagatgaccagaggactagacctgaagtttcaaagtttaagctatgaagaaggacatccctcacactctgaaacagatctccttcagagacagagttttg

SEQ ID NO: 802240 - DNA, 98 bp, Homo sapiens
cagagcatgtcttctggttcaccacctctatccacccttcattcgcagcgacaccactttccctggaggtgccagagtttgtagcctattggaggaaa

SEQ ID NO: 802241 - DNA, 100 bp, Homo sapiens
ttaaagacttcaacaaatacgtggcctacatagagtcgcagggagcccaccgggcgggcctggccaagctgatccaccttgagatcaagccggccatccg

SEQ ID NO: 802242 - DNA, 100 bp, Homo sapiens
cagttccaaaacagtgtctgatcttaggggaacaaatagatcagggagctgattttggatggatctttacagttgatccaggaaggtctcaaaagtggtt

SEQ ID NO: 802243 - DNA, 99 bp, Homo sapiens
cgggctctgaacacagcatcaatggcaggaggtttcctgttgaggttggaaaagagactgttcaaaccactgaggatcagattttgaagagagatatgc

SEQ ID NO: 802244 - DNA, 99 bp, Homo sapiens
atgattggtagctaagactcccgaatacttcagaagtggggaaatggtcagttcaccgggacctggaggcccagattgcgatcgtgacggagaaccagg

SEQ ID NO: 802245 - DNA, 98 bp, Homo sapiens
agaaggaagctattgctgctcacaagaatttgaaagacatattggctgacctgatacctaaggagcaggccagaattaagactttcaggcagcaacat

SEQ ID NO: 802246 - DNA, 98 bp, Homo sapiens
cggcctcacagaggctggtaacatcagccccagtcaggaatggcccccagaacatatacaacctttacgagcaagtcagctacaactgtttcatcgct

SEQ ID NO: 802247 - DNA, 98 bp, Homo sapiens
ggaggcacccgaatgctgcccgggtgaggatgggagtcccagcttctggagacggggttcctggggatcttcctgtgccctctgtggacgctgtcaag

SEQ ID NO: 802248 - DNA, 98 bp, Homo sapiens
caaaggctttgccgcagttcatcttcctccctgtgtactttccatttgccttcctggttgttgacctcctgtactggagagacattaagaagactgga

SEQ ID NO: 802249 - DNA, 100 bp, Homo sapiens
ggcctggatgaccggtcaaagctggagctgcctcaagagatccccttgaaattagacacgcaaggacttcttcaaccagaaaaacccattgttctaaagg

SEQ ID NO: 802250 - DNA, 98 bp, Homo sapiens
cccgaggcgaggaggagcgctggcggtgctgtgattctcttgggaagaaccaatatgtttcgctttaaccatccaaaggaagccgccaagctcaggga

SEQ ID NO: 802251 - DNA, 99 bp, Homo sapiens
ctgcgctatgccctgctgtagtcacaggagctgtagagaggaccccggtacatctgaaagccgggaaatggtattgttgcagcatctggcagtgagact

SEQ ID NO: 802252 - DNA, 115 bp, Homo sapiens
cattaatactcatcttgtccagaactctgtcaaatgaagaacactttcaagaaccagagagacaagagagacacctccaacttcgacaaagagttcaccagacagcctgtggaac

SEQ ID NO: 802253 - DNA, 51 bp, Homo sapiens
ttgtcttaacatgcttcaaataaatcagttactgtaaaatggggaaaggag

SEQ ID NO: 802254 - DNA, 98 bp, Homo sapiens
tataaaggtcttatgagacttttgcactgtaaaactttacacattgtgctattcactctgctttacaagtgaagaatgcaaattgcacatcagatttt

SEQ ID NO: 802255 - DNA, 127 bp, Homo sapiens
cagcaccaggccatagaaagattttatgataaaatgcaaaatgcagaatcaggacgtggacagagcatgttactctgaggtttctgaagcaccagcaaatggattaagtaaaggtctggggattttc

SEQ ID NO: 802256 - DNA, 100 bp, Homo sapiens
catgaaggagaacagacgcatcactggccgagcccactggggctcacaccacgcaggtatatttgcttacttaaactaccatgttcctcgaacgagacga

SEQ ID NO: 802257 - DNA, 100 bp, Homo sapiens
gccttttcgagtcatgcccgcctgtctgctgatggtggtgagggctgcacactggcagctgcctgctcagttattggtgtgggctctgatattggtggta

SEQ ID NO: 802258 - DNA, 98 bp, Homo sapiens
cgcagtgccactgcaagcccacaggcccagcagcaaagaaacctggataacatcgtcttgcaacaacccagaataggtagcaagaggaaatctaagaa

SEQ ID NO: 802259 - DNA, 100 bp, Homo sapiens
tccgaacaccgggtggctggtgcagccgaggtcttcgggaattccagcgagggttttgagagattacctgaagttgcactcaaaagcaagatatactact

SEQ ID NO: 802260 - DNA, 100 bp, Homo sapiens
gtccgaaacaactaccagtttggttcttgaaagataaaatattttcagaacctggaagcttatccatggccaccgtcgccaagctccgcgagagctgcag

SEQ ID NO: 802261 - DNA, 100 bp, Homo sapiens
ttttatccaaaatgtttcatccaaatgtcttgactcgtctgctgaacaaatcctctgacctcaggccggctgtgaacgtagttcctgagagatagcaaac

SEQ ID NO: 802262 - DNA, 98 bp, Homo sapiens
ttctctcccaggccacaagacatttcctgctcggaaccttgtttactaattatatccctcctaaatgtacaatcaaggatttgctaccaaaagagaag

SEQ ID NO: 802263 - DNA, 100 bp, Homo sapiens
gagcttgagagaattctgaacaggctgtcggcagcatccagcccctccagtcacagtcctcacagagcttcaggaaaggacccctttgcagagctctctt

SEQ ID NO: 802264 - DNA, 99 bp, Homo sapiens
ctgcgtcctttttcgtttttcggatgatgccttcaatactacctttatttccaccatagtggactcccgaaaaattgaccaggaagggaaaatcccaga

SEQ ID NO: 802265 - DNA, 100 bp, Homo sapiens
gggcttattgggccaatgaaaatatgcaagaaaggaagtttacatgcaaatgggagacagttggtgttggtattaggagatctgcacatcccacaccggt

SEQ ID NO: 802266 - DNA, 99 bp, Homo sapiens
cgtaggttagtgtggggccgtgtctcagtccacccaaggtctcctcggatcgcctggagaggcactcggacctgaccttcacggcatggtgcaactccc

SEQ ID NO: 802267 - DNA, 99 bp, Homo sapiens
ttgtaccgcactgtgggcagcaatattcaggttcagaagctgctgaatgccttttttgattggcagattgctactctggctttactcctgggcggcgct

SEQ ID NO: 802268 - DNA, 100 bp, Homo sapiens
tgaccacaggaattggatctactagtgcagccgcttacaaacacgcagatggcaagaagattgatggcaggagggtccttgtggacgtggagaggggccg

SEQ ID NO: 802269 - DNA, 117 bp, Homo sapiens
agttcgacttcaacgctgagccaccttgggaacctagctgatgataggggggttccatctcccaacttgtccatatttccttgatagctgccgtgccagtactctattggctgagct

SEQ ID NO: 802270 - DNA, 98 bp, Homo sapiens
ctagctcagtgccgagcccttagcgtggactgggctggccccggaagcccccacgggctctacctgaccctgcaggcaaatcgtacttgcccaatttg

SEQ ID NO: 802271 - DNA, 100 bp, Homo sapiens
tgaaagtgagcagtccagaaagcggcttatcgaacagagccgggagttcaagaagaacactccagagttgaagattcctgtctctggatccaaatcagag

SEQ ID NO: 802272 - DNA, 99 bp, Homo sapiens
agacacttcaggcgggaatcttgtttggctgtagcagcaattcctgaaggtctccccattgtggtcacagtgacgctagctcttggtgttatgagaatg

SEQ ID NO: 802273 - DNA, 113 bp, Homo sapiens
agaaatttgggaaactggactatacttcaggacatcactccattaggattctaaagctgaaagtggataaaaacaaaatggtagccacatccggtgtaaaaaaagctatattt

SEQ ID NO: 802274 - DNA, 100 bp, Homo sapiens
ataactcattcagtactgacgtgtacatcgtgatgtgggacaccgtcctcagaatggttggaatgaccctccagctttgaacagagtacccaaaaagaag

SEQ ID NO: 802275 - DNA, 100 bp, Homo sapiens
ctcatatttggggccttcgcggtgggattaaaagcagcgaacctcgagaccaacgtggaggagctgtgggtggaaggtaggtgagctcgtgaaacaatat

SEQ ID NO: 802276 - DNA, 98 bp, Homo sapiens
ggaatcctctccatctggttcgaagtctcagcggtattctggtgcttatggtgcctcagtcaccaccaagtaagcgaagaaaattagagaaaccgaga

SEQ ID NO: 802277 - DNA, 99 bp, Homo sapiens
ccagggaccccgctgtcagtatggccaaacaccagagcaccctagaaggtttaactaaaagaatgctcatgtttgacccagttcctgtcaagcaagagg

SEQ ID NO: 802278 - DNA, 100 bp, Homo sapiens
tatcctgggtagcctctaggaagcgctagacacatttctgggaggtgatcagtgatgaacatggcatcgaccccaccggcacctaccacggggacagcga

SEQ ID NO: 802279 - DNA, 102 bp, Homo sapiens
tcaaaaggctacttgctgtcagctaaagccaggaagccagttgagggaagttctccatgaatgtacgtcacaatgatgatgaccgaccaaatccctctggaa

SEQ ID NO: 802280 - DNA, 99 bp, Homo sapiens
agcccctgctaatgctcatctgaaggacttggatgaagaaatctttgatgatgatgacttttaccaccagattgggaaaatgaggtacgttagtgttcg

SEQ ID NO: 802281 - DNA, 98 bp, Homo sapiens
aagacaggctcttcacctgaagggaaacactactatgaagtatcctgtcatgaccaagggttatgcagggtcgggtggtctaccatgcaggcctcttt

SEQ ID NO: 802282 - DNA, 98 bp, Homo sapiens
atgttctggtgattgatggtcaacagaaaagattttgctgtcaaagttgtgtcagtgaatacaaacagccaaggaagtatcgcctggggatgctggag

SEQ ID NO: 802283 - DNA, 100 bp, Homo sapiens
acctttcctcaggagtcatttctgttccgcacaggcctgctgaactgggtgctttatataggatcctgtttgaccaaactcagagatcaattaaggcaca

SEQ ID NO: 802284 - DNA, 100 bp, Homo sapiens
tgcgggcggagacatggccaacatcgcggtgcagcgaatcaagcgggagttcaaggaggtgctgaagagcgaggaggactttgagtacccagactatgat

SEQ ID NO: 802285 - DNA, 100 bp, Homo sapiens
aggaggaaaagcaggaagctggaaaggaaggtactgcaccatctgaaaatggtgaaactaaagctgaagagtctattatcctcccagtccacaacgctga

SEQ ID NO: 802286 - DNA, 100 bp, Homo sapiens
tctccggaaagagttttctccatttggtacaatcactagtgcaaagaagctccaccatgaggcgaggtggatggaggaagcgagctgaaaatgatggctg

SEQ ID NO: 802287 - DNA, 99 bp, Homo sapiens
ccagagccaccggctgactgtggaggacccggtcactgtggagtacatcacccgctacatcgccagtctgaagcagcaactccattcgagcgtgagaac

SEQ ID NO: 802288 - DNA, 107 bp, Homo sapiens
gcaagcccggtttatacagaagcagatggaacattttcaaggtactgggaacagcttttgatcctttcttaggaggaaaaaacttcgatgaaaagttagtggaacat

SEQ ID NO: 802289 - DNA, 98 bp, Homo sapiens
gggcgtcaagccctaccactgctcctactgtgataagtccttccggcagctctcccacctccagcagcacaccaggtacaggatttctccatgttgcc

SEQ ID NO: 802290 - DNA, 100 bp, Homo sapiens
atttgactgaagaacagaaggcgatcaaggccaagtatccgccagtcaataggaagtacgagtactgctgagaagtcaggccagattgaaagatcaaaga

SEQ ID NO: 802291 - DNA, 98 bp, Homo sapiens
aaaaccaagtcttgtagtggagtggtgagcatatgacggaggaggagatgttggattgctttgcttcactgtttggcctgaatcccgagggatggaaa

SEQ ID NO: 802292 - DNA, 100 bp, Homo sapiens
agcgctcgtctggcggagctggcctctacggcagacacatgcaggccaacccagaaccaccgaagaagaataatgacaaatcgaaaaagatcagccggaa

SEQ ID NO: 802293 - DNA, 100 bp, Homo sapiens
gaggacacagacaccaagcaggtctatttctacctcttcaaggacacgtcttctgggggcccagcacgtgcttatccagttggtggcctttgctattacc

SEQ ID NO: 802294 - DNA, 100 bp, Homo sapiens
acttgaagaaagagaagcagaactgaagaaggaatataatgcattacatcaaagacacactgaggcacggacacttgctagtatgttgagagaagttgag

SEQ ID NO: 802295 - DNA, 99 bp, Homo sapiens
aattaaaaggtgtcaagaagctcagaatggtgagcgaagcaggtgttcacagaccccatgttggtggaattcatggtcgaagtaatgatggggcttatt

SEQ ID NO: 802296 - DNA, 98 bp, Homo sapiens
taagggcccaagacataaacctggagatgcccgagtggtaaaagacatggcaacaggaaagtctaagggatatggctttgtctcctttttcaacaaat

SEQ ID NO: 802297 - DNA, 99 bp, Homo sapiens
acaaagtctgctcaaatctcctgctgtgaaccagcagaatttttgaacagaaacagtatctcacctccctaaactggttaatagtggcatggaagatcc

SEQ ID NO: 802298 - DNA, 133 bp, Homo sapiens
ttcgtacacatggagcgggcagaggatgcagtggaggccatcaggggccttgataacacagagtttcaaggtgtggagggcgcagctttccagagccgacttcctcatgaccggatgacttctcaagaagcag

SEQ ID NO: 802299 - DNA, 98 bp, Homo sapiens
tgggcctcagtgtcttctccatgctctgctgcttctggcctctgggcatcgcagccttctacttgtcccatgaggcgacagaaggctagagagaggca

SEQ ID NO: 802300 - DNA, 100 bp, Homo sapiens
gtactgggggattcgcagggaggatgtcgggacaccccggaagctgggaaatggtatctctcctaaatgtgtgatcaaggaattaccaccaacagagaac

SEQ ID NO: 802301 - DNA, 100 bp, Homo sapiens
ctgaaggctggcaaaaatgcagtcgagaggaggtcgaacagatcatttaaatcaaacggtattgagatggattgggttatgaaacataatggtccaaatg

SEQ ID NO: 802302 - DNA, 100 bp, Homo sapiens
gactcagaattcatgattgaagaaatgcaggtaaggggcctggataccaagaagtgactgctcatctaatccataaagctatgttaacagattggaggta

SEQ ID NO: 802303 - DNA, 99 bp, Homo sapiens
gcgcttcaggactaccgcaagaagttgcttgaacacaaggagatcgacggccgtcttaaggagtgaattacatgaatgacagtcttcgaaccaatgtgt

SEQ ID NO: 802304 - DNA, 101 bp, Homo sapiens
cacaaaatggcgccctacagcctactggtgactcggctgcagggaatgggtactgttcaaaaaggaatgccccacaagtgttaccatggcaaaactggaag

SEQ ID NO: 802305 - DNA, 100 bp, Homo sapiens
gctgaaaaagaaaccatctgttgttgtgcctctggagctccattttcagtccggcagcacacattactctgcgtacaaaacgattgaacaccagattgca

SEQ ID NO: 802306 - DNA, 98 bp, Homo sapiens
agatgaggatgaggaagggaaattacctgaggacatcatgaaggtaaaattaagtattcggaaagagtctatgaagcttgtatggaagcttttgatag

SEQ ID NO: 802307 - DNA, 100 bp, Homo sapiens
gaaacttgtccgtgccaaatttcctgaacacaccattatgaaacttgtggtggagaatgttgatgtgttaacacaaatgaggaccagctttgacaaacca

SEQ ID NO: 802308 - DNA, 100 bp, Homo sapiens
ccaaagcccagaatgcagccccgacccaagtttgtaaggtggcaggttttaagaagcaaatggcagatactggaaaactgaacacactgttgcagagagc

SEQ ID NO: 802309 - DNA, 98 bp, Homo sapiens
cctacggaggtggcagccatctccttctcggatcaccagccttttgcaaatgcacacgatgtgctagcccgctcccgcagtcgagccaacgtgctgaa

SEQ ID NO: 802310 - DNA, 100 bp, Homo sapiens
gacgtggccgaaatgcacaacatcctgaagaaataccaccagggaataggagatacaaatttggcccatcagtgcttcaggctggctctggtcaacaaca

SEQ ID NO: 802311 - DNA, 100 bp, Homo sapiens
cttaccgtcgtggagaggaatgggacccccagaaggctgaggagaagcggaagctgaagccagctgaggtgggtgtcctggttggcaaagaccggtcaag

SEQ ID NO: 802312 - DNA, 98 bp, Homo sapiens
tcgctcacctggatgacaacgagaggaggctccttcgagagcagtggatccgggccaagtacgagcgacaggagttcatctacccggagaagcaggag

SEQ ID NO: 802313 - DNA, 100 bp, Homo sapiens
tctgagaatgacccgttctggaatcagcttctctcattttctttccctgcaccaactagcagtaaacctattgatggcaattttgctgactgtggaagtg

SEQ ID NO: 802314 - DNA, 100 bp, Homo sapiens
tcaccacagccaggccggtccccaagcacatccgggaagccttgcaaaatgtacacgaagaagtagccctaaggattcttctcatcgcagtgctccaggc

SEQ ID NO: 802315 - DNA, 98 bp, Homo sapiens
agcgacaacagcttgacgagcagatacttctgctgcagcattccaagcgagcccacagcctcggtgccccccgagtcggacgtgtaccggatgctcca

SEQ ID NO: 802316 - DNA, 100 bp, Homo sapiens
ggaaatcgggctgaagcgactgagtccgcgatggaggtaccccagagttcatggcccctgagatgtatgaggagaaatatgatgaatccgttgacgttta

SEQ ID NO: 802317 - DNA, 100 bp, Homo sapiens
ttcgacttgagcgaagttttatgcaagggagaagcagaatttgcccgcatcatgagcattgtggaccccaaccgcctgggggtagtgacattccaggcct

SEQ ID NO: 802318 - DNA, 100 bp, Homo sapiens
caccagagtccgttcagcttcaggacagctgggtgctaaacagcaacgtgccactggagacccgaaatgctgagccgattatcaggattagcaaatgttg

SEQ ID NO: 802319 - DNA, 98 bp, Homo sapiens
acacctttcacagctatcagggaaggtggccagcatcgaaatgttcagccttttagtgatgaagatgcatcaattgaaacaatgagccattgcagtgg

SEQ ID NO: 802320 - DNA, 100 bp, Homo sapiens
gcgttcacacaaactggtcagcgtttccctggagaggaagaggcaagatgaatctacgttctgtatttactgtagaacaacaaaggattttacagcgtta

SEQ ID NO: 802321 - DNA, 100 bp, Homo sapiens
tgtgcagttaaaaaatctgcccttttatgatgtccttgatgttctcatcaagcccacgagtttaggagactccatcctctgccaatggcccttcccggga

SEQ ID NO: 802322 - DNA, 99 bp, Homo sapiens
ttttggtctccgcgtcacgggataagactcttcgcatctgggacctgaataaacacggtttctggtcctcataccgtgtggttgagtgaaatcaaaact

SEQ ID NO: 802323 - DNA, 99 bp, Homo sapiens
acagatcctgtgtcacccggcaactcagaaacatcaggtccaaggtgtggcagagaagacacagcttctgaaattgagtgtacctgctacttttatgct

SEQ ID NO: 802324 - DNA, 98 bp, Homo sapiens
gcttcgccggggatgacgcccctagggccgtgttcccgtccatcgtgggccgcccccgacaccagggcgacatggagtccaatgggaaatacatcacc

SEQ ID NO: 802325 - DNA, 98 bp, Homo sapiens
aaactctacatgaaaagtctgttaaaaatctttgcggtacaaacccgtagtgctgatgaaccaatgacaacatttgttgtctgtaatgaatgtggaaa

SEQ ID NO: 802326 - DNA, 100 bp, Homo sapiens
caggatgagccccgcgaccactggcacattcttgctgacagctttggaggaattttttacatcacttgtgaagcaagaaatggtgaatatgcctcgtggg

SEQ ID NO: 802327 - DNA, 98 bp, Homo sapiens
tcgaggcatgatggtcgactacaagaagagggcggagcggagacgggagtattatgaaaagatcgctgaagccgacgtagcttctctgaacagacgca

SEQ ID NO: 802328 - DNA, 99 bp, Homo sapiens
aacatgtggttcaagaaccttgacaagctcatccggctggtaaatgcgcaggacttcgagtaagaaggtgatttacagccagcctagtgcccgaagtga

SEQ ID NO: 802329 - DNA, 99 bp, Homo sapiens
ttcgcggagacggcggaagcggagagcaacagcgcgccggctccagcaggaggaaatggtgcagaaaatgttgctgctgatcagcctgctaacccacca

SEQ ID NO: 802330 - DNA, 99 bp, Homo sapiens
atggcttcagcgtctgctcgtggaaaccaagataaagatgcccattttccaccaccaagcaagcagtatggtggtgatattacccgaaaaatgaagctt

SEQ ID NO: 802331 - DNA, 100 bp, Homo sapiens
ctcggccacctcaaggataatcactaaattctgccgaaaggactgaggaacggtgcctggaaaagccgattcgaagacagtctcttacacctcctcctca

SEQ ID NO: 802332 - DNA, 98 bp, Homo sapiens
gacagctccgggaccggccgaaaggcgaggaaccgggaacccgagcgtcatgttagggtgaagcagaggacctcagtgctgaacatgctaaggaggtt

SEQ ID NO: 802333 - DNA, 98 bp, Homo sapiens
aacgacaggacgttggggcggcctggctccctcaggttaatgttcgtgaagaaattgaagagttttttccaagaatgtggaagataaatcaagataaa

SEQ ID NO: 802334 - DNA, 100 bp, Homo sapiens
cacttgacttactctcctggtccaaggacacctacagccccgacgaacatttctgggtgacactcaacaggattcccggaggctattacttgacaagcgc

SEQ ID NO: 802335 - DNA, 100 bp, Homo sapiens
cagcgacaaatttagagaaacctcggcagttggtacgccttattacatgtctccagagagaatacatgaaaatggatacaacttcaaatctgacatctgg

SEQ ID NO: 802336 - DNA, 99 bp, Homo sapiens
ctctgaaaaactcttcaacactgttattgtaaacaaaggttttataggatcacattgacaaaagtaccatggagttttatgagtcagcatattttattg

SEQ ID NO: 802337 - DNA, 112 bp, Homo sapiens
gatgggggcgagggcgaagacgagatccagttcctgcgaactgcatctgcatctgggaccgacctcctgggctggctgatcaaagaggaagcagcagcaatgtctgctgtgg

SEQ ID NO: 802338 - DNA, 100 bp, Homo sapiens
aagaccaagaggaccatccagtttgtagactggtgtcccacaggcttcaaggctttactcatcagtcttaagtatggttgttttatgtggcaattgggag

SEQ ID NO: 802339 - DNA, 51 bp, Homo sapiens
ccatggaacattttcccaatcaccagcagggtgtgctgatctgcaaaccct

SEQ ID NO: 802340 - DNA, 98 bp, Homo sapiens
gcacatgtctgggaggataattgggatgatgacaatgtagaggatgacttctctaatcagttacggttgtaaagagagagatctttgggaatgtccat

SEQ ID NO: 802341 - DNA, 100 bp, Homo sapiens
ccaaaacccaacagaccaccaaatgttgacctgacgaaattccacaaaacctcttctggaaacagcaacagcattattgagaaaagcccttacagaagag

SEQ ID NO: 802342 - DNA, 100 bp, Homo sapiens
tgtttttccatcgacagccctgatagtttagatgccacagtggagctatccttggacagcacacaaaataatcagaagaaggtgctagccaaaacactca

SEQ ID NO: 802343 - DNA, 98 bp, Homo sapiens
gagtgtgcagcggattaaagctaaagacatagttcctggtgatattgtagaaattgctgttgcacgtgcattatttaatcacatagacaagtcaggat

SEQ ID NO: 802344 - DNA, 99 bp, Homo sapiens
gtagttaagattgtgaatctagcttgcaaatataatctttgtatcataccaattggtggacatggatttgattgacatactttggaggcaagatataga

SEQ ID NO: 802345 - DNA, 129 bp, Homo sapiens
aagaaggtaaccgggtccagacccacgcggcgccagttctccggcgggaaggaaaaccgcgcagagagatgttggggatcagccaggtgaggtaggttattcaggctctcctgctgaagctcctccaag

SEQ ID NO: 802346 - DNA, 100 bp, Homo sapiens
gcagctgtcccatgctctgctgagcacggtgggtgacagcagtattcgctattttgagatcacggatgaatccccgtacgtccactacctcaacacattc

SEQ ID NO: 802347 - DNA, 100 bp, Homo sapiens
cgaaggatccccaacggggaggccaacgtgaagaaagtgagcacaaatggatcagatgaccctgaagatgcaggagctggtgaaaataggagagtcagtg

SEQ ID NO: 802348 - DNA, 100 bp, Homo sapiens
tcttccacatgaaaaggataaggaagatgaagtcctcagtacattctgaagaagatgattttgttccagagctacatagaaatgtacaccctcgagagcg

SEQ ID NO: 802349 - DNA, 99 bp, Homo sapiens
caggatgaaagtgagcagtccagaaagcggcttatcgaacagagccgggagttcaagaagaacactccagagcagcagccgctcttctaaaacattcaa

SEQ ID NO: 802350 - DNA, 99 bp, Homo sapiens
ctgtaaaaaaggctagaggtttcttggaatttgtggaggattttattcaggttcctaggaatctcgttgaagctccaccatgaggcgaggtggatggag

SEQ ID NO: 802351 - DNA, 100 bp, Homo sapiens
gggatgagtcatgtggcagtggaaaatgcgctcgggctggaccagcaggcaggtcttgacgagccctgcccgggccgacgcatgcggaggatggaaacac

SEQ ID NO: 802352 - DNA, 100 bp, Homo sapiens
cgaagccggcagaagcacacagacaaggcagacgccctgcaccagagcctaatgggaggtgactggatcatgggagcagagttctcttggatggtttagc

SEQ ID NO: 802353 - DNA, 100 bp, Homo sapiens
atagaacctattatgctctatcaggctgatcccaaagaactaatcaagatggtcaccaggcatgtgactcgacatgagcacgaagcctggcctgaagacc

SEQ ID NO: 802354 - DNA, 100 bp, Homo sapiens
gcatttacagcaacagcagttccttcagaggcaacagcaccttctcgcggaacagtgggagacatttagtgaacgctcttcaagctcacaaactctgacc

SEQ ID NO: 802355 - DNA, 126 bp, Homo sapiens
tttaaatacttaagagaagaagttaaaacatttcagggcaagccaattatggatcctgatggtgaacatgccaggagagcaatgcaaaaggtgatggctacgactggtgggatgggtatgggacca

SEQ ID NO: 802356 - DNA, 100 bp, Homo sapiens
atggaagacccaacacctgtacccaatatagaagaagtagtacttcccaaaaatggtcctcagaatggttggaatgaccctccagctttgaacagagtac

SEQ ID NO: 802357 - DNA, 100 bp, Homo sapiens
cagtaaaggagaaagcccaccacacacgttctgcaaagtcgacaagaatctcaataacagtatgctcaaactttggaacaaataccgaatttccaacatt

SEQ ID NO: 802358 - DNA, 98 bp, Homo sapiens
gctggcagaagatgccaaatggagggtccgcctggccatcattgagtatatgccgctgctggcaggccagctgaaagacttccgagtgcaggaactcc

SEQ ID NO: 802359 - DNA, 100 bp, Homo sapiens
tacaaaggtctggacactgaaaccaccgtggaagtcgcctggtgtgaactgcagccaaatttgtatcctactgtggggcttcaaacaccaggagaagtgg

SEQ ID NO: 802360 - DNA, 105 bp, Homo sapiens
gaggagaccatggctgactacctgctgtacaccctcaacaaacaccagcgctttggattcctttgtgggtggagtcatcggcctcatttttgcatacatttgcta

SEQ ID NO: 802361 - DNA, 100 bp, Homo sapiens
gtttatataactcaagttgtttggctaaattcttcaggagagcgacttgcagttgtggaggtacagtgtgaacggctgaggatgctctaccgggactgtg

SEQ ID NO: 802362 - DNA, 100 bp, Homo sapiens
ccctgcaggaactctacaacccaatccagatgaggctgtggacccaggctagacagatgggatggtatgcagcaaagtgcatggctgcagcgagttcagg

SEQ ID NO: 802363 - DNA, 100 bp, Homo sapiens
agccactgcagatagagacatatggaccacatgttcctgagcttgagatgctaggaagacttgggagaacatttcaggataggaataggccaagtgctga

SEQ ID NO: 802364 - DNA, 100 bp, Homo sapiens
tgcacaagtcattcctttcctgtcccaagagcttcctgcagatttcacaaaactgcatcttactgacagtctccacccacaggtgacccacgtttcttct

SEQ ID NO: 802365 - DNA, 100 bp, Homo sapiens
tttaaacaagagatttccacagaagcaagggcaagtattttgtaaccttcccatatccatatatgaatggacgccttcatttgggacacacgttttcttt

SEQ ID NO: 802366 - DNA, 100 bp, Homo sapiens
ctcccgagtagctgggactgcaggagttcgcagcacttactaaagaactcaatgtatgcagggaacagctccttgaaagggaagaagaaattgctgaact

SEQ ID NO: 802367 - DNA, 100 bp, Homo sapiens
tgtccagttactctaacaagtctggagattgcagagggaatggcatacatcgagcggaagaactacattcaccgggacctgcgagcagctaatgttctgg

SEQ ID NO: 802368 - DNA, 99 bp, Homo sapiens
ttatggtgggaggattgactgctgctggggctgggctcgccagtcttggggacagtgtcagcttgaaagatgcatgagtgtgatgcagtccgggacaca

SEQ ID NO: 802369 - DNA, 100 bp, Homo sapiens
tccaggctgagcacttatcaccagatgccagctaccgatttattattaacgacagagaagtctctgacagcgaggtggaataacactcccatggatgaag

SEQ ID NO: 802370 - DNA, 99 bp, Homo sapiens
gtgaatctgcccaaggaactgcacagcaagttcattcggctcctaaagaagtagcagtgtccaaggaacaagaagagaaatctgatagcctagttaaat

SEQ ID NO: 802371 - DNA, 100 bp, Homo sapiens
ctgtcctccataaataatatggggctgaacagctgcaggaatgaaaagggctaattgactataattttcattgcttccggaaggccattcatgaagtttt

SEQ ID NO: 802372 - DNA, 127 bp, Homo sapiens
gccggcccagcagctgcagccgcagcctgtggctgtgcagggccccgagccggcccgggtcgagtttaaaattggtggtgaatggtggacatggatcgattataaccgcttccaggagctcatccag

SEQ ID NO: 802373 - DNA, 100 bp, Homo sapiens
cacaagacatgatttctgctggtggagagagtgttgctggtatcactgcaatatctggcaagccgggtgacaaggtgttaaaaagtaatcgaagtacgaa

SEQ ID NO: 802374 - DNA, 100 bp, Homo sapiens
gcagctttgaggaaaagtatagtttgtcccatgaggagcacccccatagccatcctctctatggacatggtgtatgcaagtggccaggctgtgaagcagt

SEQ ID NO: 802375 - DNA, 99 bp, Homo sapiens
gatgatcgagaggatctggtgtaccaggcgaagctggccgagcaggctgagcgatacgacgttgttgacctcctgtactggagagacattaagaagact

SEQ ID NO: 802376 - DNA, 100 bp, Homo sapiens
gggggcaacgaggaagctcttaagagcgcggccggaaagcagtgtcaaatcaacagtgccttgacatctttccacactgctttggaacttgcagtagacc

SEQ ID NO: 802377 - DNA, 99 bp, Homo sapiens
ctcctgatactaacagttttacgatttaaaacttcgccagaatttgtcatcatcagatttgaaatatttaaagtggatacaaaactatttcagcaatgc

SEQ ID NO: 802378 - DNA, 100 bp, Homo sapiens
ccaactctttgatgatgcatccaggaagatgagaatgtgcctactgctcctgatcctccaagtcaacatttacgtgggcatgggacaggcttttgctttg

SEQ ID NO: 802379 - DNA, 100 bp, Homo sapiens
atgacctcaggtttgtcggtcgaagtggaagaggagtcagaaataccatcagaggaggggtactgtgactttaatagtaggccaaatgagaactcttatt

SEQ ID NO: 802380 - DNA, 100 bp, Homo sapiens
ctccactgaccagaccttggagccccctggcccagatgcctggagttactgtaaaagacgtgaaccagcaggagttcgtcagagctctggcagccttcct

SEQ ID NO: 802381 - DNA, 99 bp, Homo sapiens
gcttggtggatggtcacgatgtagttatagggtggatccatgctgtgctcacttctcaggactgtatggcttttggggggaacttcctgcacaacctta

SEQ ID NO: 802382 - DNA, 98 bp, Homo sapiens
gcacatcatcaacgtcctgctccagcatggggccaagcccaacgccaccactgcggttgataacactgatgctgaggggaggctcatactggctgatg

SEQ ID NO: 802383 - DNA, 99 bp, Homo sapiens
acgctggcaagcaagattataatcaggaagtggatgcctccatttttaaggtatatttgaaggctcccatgattctgaatggagtctgtgttatctgga

SEQ ID NO: 802384 - DNA, 99 bp, Homo sapiens
ctgccaagccgggcacatatgtgatctatgtgcgcttcggtggtgttgatattcctaacagccccttcactgtcatgtgtccttcacggttcggttcac

SEQ ID NO: 802385 - DNA, 98 bp, Homo sapiens
ggccccggcgccggcaaggggacccagtgcgcccgcatcgtcgagctagccacagtgcagcctggccagaatttccacatgttcacaaaggaagaact

SEQ ID NO: 802386 - DNA, 100 bp, Homo sapiens
tccttattcctcctcatgctcggattcaagcagctgcttcaacccccacaaatgccacagcagcgtcagtcatcttatcccatgcgtgtgaacagatgca

SEQ ID NO: 802387 - DNA, 99 bp, Homo sapiens
tttgggaaagccactcgaaaagggatcttttatttagtcagatgtatgataaattaagtgagaattcagtggccaaaggagtatttttggagtgccttg

SEQ ID NO: 802388 - DNA, 99 bp, Homo sapiens
cgacattctccacctcctgggaggccagccattcccaaatgccccaaggatgaagaacggagacgattccagaatgactatcttgacttacccctttaa

SEQ ID NO: 802389 - DNA, 98 bp, Homo sapiens
ttgcatttggtaatttagcagaacttggccgctacctgtctgaggaacccgagccctacctggcagtctacctgcactcggagccccggcccaatgag

SEQ ID NO: 802390 - DNA, 99 bp, Homo sapiens
taagattagaacagctcataggagagtcatgattttgaatcacccagataaagatgatagcaagttttcagaggctatcacagtgctgctttcctggat

SEQ ID NO: 802391 - DNA, 100 bp, Homo sapiens
caggactgggcacagcatgagatccaaaggcagggcaaggaaactggccacaaaaagatgttgtgtccctcctggtgagcgctgtcccagtgcacccgat

SEQ ID NO: 802392 - DNA, 100 bp, Homo sapiens
ccgaatcatgcgttcctgggagactaacatcgggggcctgaactgggagataaccctggacagtggcaggaaagtggagaatgaggacatgaataaagac

SEQ ID NO: 802393 - DNA, 99 bp, Homo sapiens
agcaatatccccacataccttctcaagacaaaattgcttacccagtacatattaaatctcggcaagtatgatcaaaactacgacatcagagaccgtaca

SEQ ID NO: 802394 - DNA, 100 bp, Homo sapiens
ggcttttcccactttttgtgttggctctccttaaacaggtatgatctcgtgaaatcttgagagaaactgaatgacgaatgaaactattgttcctgtttca

SEQ ID NO: 802395 - DNA, 98 bp, Homo sapiens
atgagatgcagcgcgtgaagggcatgaccgagaggcactgggaagcggttttcaccctgcagagaagtccccacgagaagaagaagaagaggcggtcc

SEQ ID NO: 802396 - DNA, 98 bp, Homo sapiens
catctataacaagactggttgggccatggtgtctctgatggggaaattgaggcagagaagccaagacatgtgctaaaggtcatgcaggctatgaatgg

SEQ ID NO: 802397 - DNA, 100 bp, Homo sapiens
ccatggaaacctgtatttatcactgccttcttgggaattgcttcgtttgccattttcttatggagaactgtccttgtttcgttccccatcaggaagtcct

SEQ ID NO: 802398 - DNA, 100 bp, Homo sapiens
aaggagtacagggaagtctataagctttgcaacagaattacagagtatgatgtatgagggtgctggttgatgctcgagagaagcttcatattccctgggg

SEQ ID NO: 802399 - DNA, 98 bp, Homo sapiens
caaacgctaggtggctgggtccaggttttacaagatgaattagaaaaccgttctaatcaggtgcgatgtgcagagaaaaaattacaacacaaagaatt

SEQ ID NO: 802400 - DNA, 99 bp, Homo sapiens
gaccaggcaccttctgtggaaggagctttcaagttgtggatggaataaaaaagaaaaatatagttctgcaccaaatgcagttgccttcacaagaagatt

SEQ ID NO: 802401 - DNA, 98 bp, Homo sapiens
aagaagtcaaggttgcccccaggcggtccttcctggggggatatgagactttctactcggaatatcctgagtgttgcgtggatgtaaaacccatttca

SEQ ID NO: 802402 - DNA, 99 bp, Homo sapiens
ttgaaccagtgttgccatttcactctggaagatatgctctatgctgcttcatccataaagatatgattctataacagactcttccagaaatgatatgaa

SEQ ID NO: 802403 - DNA, 98 bp, Homo sapiens
ctgtccgggggcctggctaaggaaaccctattacctccagcttggttctacagccattgggatccagacatcagagggtgtgtgcctagctgtggaga

SEQ ID NO: 802404 - DNA, 99 bp, Homo sapiens
ctccggcttccgtcccggacagagcccgtggtcgcgcagacttatcagatgtagacttcctagatgattcttcaacggagagtttgcttctgagtgggg

SEQ ID NO: 802405 - DNA, 100 bp, Homo sapiens
tgggtattcagaacattttgtggaattcgtgaaacttgtccgtgccaaatttcctgaacacaccattatgctttggggccatttggatcacacgatgttt

SEQ ID NO: 802406 - DNA, 100 bp, Homo sapiens
aagtggaaatcgcccagcgggagggggccaagtatgtgtcccacggcgccacaggaaagcttaccctcttctccacctgctccccggctgcccgcacctt

SEQ ID NO: 802407 - DNA, 100 bp, Homo sapiens
cacaaagtcaagagacagcgattggacagaatttgtgaagactgtatgaaaacaagggagaggctgacttcgtggaatctttgctgcagctcttcaggtc

SEQ ID NO: 802408 - DNA, 99 bp, Homo sapiens
ttgcggcgaaaggaacggctgaaggccctacgggagaaaaccgggcgcaaggtcctcttcctgatggatgggaacaagccatgactcaggatggagaaa

SEQ ID NO: 802409 - DNA, 100 bp, Homo sapiens
cagtcattccagcaccaacaggatccaagcagtcttgattgatatggaagaaggggtagtgaatgaaattctgcagggaccactgagagatgtatttgat

SEQ ID NO: 802410 - DNA, 100 bp, Homo sapiens
gcgatgatcgagtacatcgtgcagcagtgcgcgctgccccccgagcaggaggtgagccgtctcctgattttgggaggggccaacgtgaactacaggacag

SEQ ID NO: 802411 - DNA, 100 bp, Homo sapiens
agacagctcaattcagccctgccacagatgatgactttgaccagtttgataagcctggcgcggaacggtcgtggagaagaagagctgctgatgaggactg

SEQ ID NO: 802412 - DNA, 98 bp, Homo sapiens
ttatatcccaccattgccacgggcattctccatctccttgcagtttataggcaagcaataaacagcaagatgtttgaggtggatatgaaaattgctgc

SEQ ID NO: 802413 - DNA, 98 bp, Homo sapiens
ataaagtgcagaggaactgtgatattgtgactgcctgcttgcaggctgtgtcacagaagagaaaatggagatgtatgcatttcgattcttcatccgcc

SEQ ID NO: 802414 - DNA, 100 bp, Homo sapiens
ggaagagtggattatttggtcactgaggaagagatcaatcttaccagagggccctcaggttcagcctggagaaggaaataaagctgctttcaatgacatg

SEQ ID NO: 802415 - DNA, 100 bp, Homo sapiens
gaagtggctgagaaatacctcgacatccccaagatgctggatgcagaggatgagatccgaaatggcccataccgacagctcttccacccagagcagctca

SEQ ID NO: 802416 - DNA, 121 bp, Homo sapiens
aacgacccatacatgtcaaatggatctctttctccacccatcccgagaacaaatgacagcccatatcaaggcggtgtattctttttgacaattcattttcctacagactaccccttcaaac

SEQ ID NO: 802417 - DNA, 100 bp, Homo sapiens
gtcagccttcccagtagctggaactacagacaccattcgcttttcacccaagatgatttgatgtcttataaaactctgatgaaccatgatggctacacag

SEQ ID NO: 802418 - DNA, 100 bp, Homo sapiens
acacggagattagtttccagctgggagaagagtttgatgaaaccactgcagatgatagaaactgtaaggtaacagttgacaaatgggaacctttgttgaa

SEQ ID NO: 802419 - DNA, 99 bp, Homo sapiens
cggagtgtgaggagcctgtccccaaggaaaccatggaggagcactgcaagcttgagcaccagcagaattttaaatccaagctgggtttcatcaactggg

SEQ ID NO: 802420 - DNA, 100 bp, Homo sapiens
aaataatctgtaatactaaagacaatgacccctatggtgtagccgtgggtggaactgtggggcactgcctgtgcacgggattggcagtaattggaggaag

SEQ ID NO: 802421 - DNA, 99 bp, Homo sapiens
ccagagcccgagaagaggcacgggggccatgtgggggctggcctgcttcactcccccaaactcaaggctataatagatgaatttgagcagaagcttcgg

SEQ ID NO: 802422 - DNA, 100 bp, Homo sapiens
ggaagctgtatgttgcaaatgctggggatagcagggtggagagattcaaccagttagcgtgaaagttggagataaagttcttctcccagaatatggaggc

SEQ ID NO: 802423 - DNA, 100 bp, Homo sapiens
cgccctgtaaggtatattcggaaacctatcgattacacagttctggatgatgtgggccatggtgtcaagtatgaatacttcaatgctgtgctgataaatg

SEQ ID NO: 802424 - DNA, 100 bp, Homo sapiens
ttgatgaaaacttggggcaaactggaaaatctgctgtttgcattcaccaaggatgactcactggttgtgtggaaggaagtcgatttgacccggctgtctg

SEQ ID NO: 802425 - DNA, 98 bp, Homo sapiens
attttgcaccccgagtacctgcagcccctgccttccacgccggtcagccccatcgaggacattgacaagcagtacgtgggcttcgccacactgcccaa

SEQ ID NO: 802426 - DNA, 100 bp, Homo sapiens
acactgtatgctacagacctaggtcaacaagtcagttggaccacaaataacaagcctttgtattcatttgaagataatgcagactatgtttatgatgtta

SEQ ID NO: 802427 - DNA, 100 bp, Homo sapiens
tctgaagactattgtggaagaagcatccattaaggcaggagtgcagtggtacgatcgtagctctccgcagctttgatctcctgggctcctgcaatccgcc

SEQ ID NO: 802428 - DNA, 98 bp, Homo sapiens
gtcatacattcagctgatgcatttgcacctgtggcttatctacgctttttagaattgcacttggaggacaagggccagatgcagatggctggagatgg

SEQ ID NO: 802429 - DNA, 99 bp, Homo sapiens
cttctcccgcctggagaacctgaagatccacaaccggtcgcacacagttccttcttggagggaccactcagtagagcctctaagggacccaaatccttc

SEQ ID NO: 802430 - DNA, 100 bp, Homo sapiens
gatcggcggagaccctcgaagtgcgcaaacttgacactcaccctgaccggcttatcaggagggcagacttcaaaagctactaaaaatgaacggccctgaa

SEQ ID NO: 802431 - DNA, 98 bp, Homo sapiens
gtccctggctgcgtgcacagcgccttgttccagcagggcctgatccagaatcatgtcaaccctgccatggacttcacgcagactccacctgggatgtt

SEQ ID NO: 802432 - DNA, 115 bp, Homo sapiens
tatgatcaacttcaaccctcacttcgatttggaggacagagactgcaaattgtggtggtgccatgcagcaagaatcagagagatgcagagttagagccagaaggcctgacatggc

SEQ ID NO: 802433 - DNA, 98 bp, Homo sapiens
ttcaactgacaacagtaaatattttgaatttactgtgatgggacgcttaaacaaagggaataccttggcaagcagctccagtccgagcagccccagac

SEQ ID NO: 802434 - DNA, 100 bp, Homo sapiens
ccacctcctcctaccaaaatttggtttggagcgaccattctcaggacagcaccacggtgtgacgaaatgcaacatcacgtgcagcaagatgacatcaaag

SEQ ID NO: 802435 - DNA, 100 bp, Homo sapiens
tgtgtttggaagcaaagataacttccacggcttagccatcttcctggacacctaccccaatgatgagaccactgagttgtgtccccaaggaaggatgaga

SEQ ID NO: 802436 - DNA, 100 bp, Homo sapiens
aattacagccttgtgtgtgatggatatgatgactgtggggatttgagtgatgagcaaaactgtggagaaaatgcagaagtctccatggacgtttccctgg

SEQ ID NO: 802437 - DNA, 100 bp, Homo sapiens
caaggatgagtgctgccagagagtctcacccgcatggggtgaagcgttcagcctccccagacgacgatgtcagtgggaccatgtacaacactggaagaca

SEQ ID NO: 802438 - DNA, 100 bp, Homo sapiens
agattagcaccattgaaagaggagcattccaggatcttaaagaactagagagactttacatcatgctgatgacagcttcctggtcctcaccacagatgga

SEQ ID NO: 802439 - DNA, 100 bp, Homo sapiens
tttggattattttacaaaaccagactaccaggttgctgtagtaaaactaaaaaatgcagataaagtgtttgccatgaaaatattgaataaatgggaaatg

SEQ ID NO: 802440 - DNA, 98 bp, Homo sapiens
agaaattttagcacaactccggacacttgttttccagtgtgatcttacccttaaagctattcaaccctatgaaaagataaaggccaggggcttgcctg

SEQ ID NO: 802441 - DNA, 100 bp, Homo sapiens
caacctttaagcagcagaggagcacgaggatcgtgggagctaagaagtgatggcatcagctgagaagggaaggaagcccatgtgaggacactgaagaagg

SEQ ID NO: 802442 - DNA, 100 bp, Homo sapiens
gaggagaacgaacatcttctggacctttgtccaggagctgaggacagggactggcggcaacagcggaatattccgattcattcctgccccaagtgtggag

SEQ ID NO: 802443 - DNA, 100 bp, Homo sapiens
agccaattgtaaaagactgcaaagaggcttgcagccaatttactggagcagggatgacgtagcccagtggctcaagtgggctgaaaatgagttttcttta

SEQ ID NO: 802444 - DNA, 98 bp, Homo sapiens
tgggacacacctccattggatttaaaagacagtcctcgtcagcactgactttcagctatggaatcggtccggaccctatttgtcagtggccttcctct

SEQ ID NO: 802445 - DNA, 100 bp, Homo sapiens
tagatggacgatggtgtgactgcaaacttcctaattctaaggagcttggtgttggtggcacgagtcagtggaaaatctgtggcctagatcctacatctac

SEQ ID NO: 802446 - DNA, 122 bp, Homo sapiens
tcatcctacagagtggcacctactcatatgaaaactttgcccaggtccttcacaaccccgaggagaagtgtgcccagtactggccatctgatggactggtgtcctatggagatattacagtg

SEQ ID NO: 802447 - DNA, 100 bp, Homo sapiens
tgaagtttaacttactcttgcctgaacaaagctctgagctttcccacctaaaaaattttcatgtggatgaatgctctttgaagccaagcatttgtggcac

SEQ ID NO: 802448 - DNA, 98 bp, Homo sapiens
aatacttgctttactggaaagacccagaatatgccaagtatctaaaaaatgcactcggtgatggaaagagagccactattctgaagaacacttggcca

SEQ ID NO: 802449 - DNA, 100 bp, Homo sapiens
atgagacttatatgatgcaagatgtggcagaagaacaagaagttgagaccgagaatgtggaaacagtcactgtgtgcccagtattctgcagacaaacgag

SEQ ID NO: 802450 - DNA, 98 bp, Homo sapiens
ccaagtgtgagaggcaaagtctggagcttagccattggcaacgagttaaatatcacccacggttgattcacaaaaggctgcaacaaagcaagtcaaca

SEQ ID NO: 802451 - DNA, 131 bp, Homo sapiens
gactgcagctatggggctgttactagtccaacctctacccttgaaagcagagatagtggcatcattgatgtgagtatgcagtgctcacaggatatacttcgaatgctcctctctcttcagccagttcttca

SEQ ID NO: 802452 - DNA, 98 bp, Homo sapiens
cacagtccctccacgcggaaagaagtaccttcgccggtcaccggctcctgcagggtgtggtacccacagcccctgaacagcctgcaggtgaaatggaa

SEQ ID NO: 802453 - DNA, 98 bp, Homo sapiens
aacagctatgcatgctgcttttgatgtctgacaacgtggatcgttgttttgaaactctattgcgtctgcagacatggatttcaaccagctggaggcat

SEQ ID NO: 802454 - DNA, 98 bp, Homo sapiens
ttcgttgtatttgtgacatctgtgggtttaatccaacagaagaagttcttccctgtggaacagtagagacctagtctgccttctttcacaagataatc

SEQ ID NO: 802455 - DNA, 100 bp, Homo sapiens
ggaaatccattctgaattctctgtatgagttgctggggcatttgatgtagaactactgtacatagcacagttctttaaaattccaatagcagaaattgct

SEQ ID NO: 802456 - DNA, 100 bp, Homo sapiens
ccgtggtgctctatgaccccctggcgcgggtttaagtggacgccaggtgcaccggacacaggctgtgtttaaccacaccgaggactatgtgttgctgccc

SEQ ID NO: 802457 - DNA, 99 bp, Homo sapiens
gggcatcctgtgttttgcaaacggggctgacctcccttcctggggagcaggaagggtcaggctcagcaaaacccagcagctcagattcctgccaggcag

SEQ ID NO: 802458 - DNA, 100 bp, Homo sapiens
cggagatctctggagcagacctcaaggagctggaggatcttcagaagaagcctcccccatacctgcggaacctgtccagcgatgatgccaatgtcctggt

SEQ ID NO: 802459 - DNA, 98 bp, Homo sapiens
ggtcaacctggccgtccggggcccccaggccccccacctgcagctgttggagccagcagacctgactggagagaactggatgatgagctcatgaaaga

SEQ ID NO: 802460 - DNA, 98 bp, Homo sapiens
aacgcgcttgcttttaggagacagccactttctgtgtggtacgctggattcaaggatgcctggtccggaccctatttgtcagtggccttcctctggat

SEQ ID NO: 802461 - DNA, 100 bp, Homo sapiens
tttagaacctctcaatgaggagaccttcatcaacaacctcaagaagcgctttgaccacagtgaaatatacggccttttaatcatatcaagtcaagcctcc

SEQ ID NO: 802462 - DNA, 100 bp, Homo sapiens
acttcggagtacctgcgctatgaagacacgcttcttctggaagaccagccaacagtcaatcaccttctgctgcttggatgggtggatttggtgctcagcc

SEQ ID NO: 802463 - DNA, 100 bp, Homo sapiens
cgacgaggaggagacgtaccggctctggaaaatccgcaagaccatcatgcagcccgtgtccaggagccccgccaggtgcccgcgccaggccctcagtctt

SEQ ID NO: 802464 - DNA, 98 bp, Homo sapiens
tctgtgccgacaagatggcggacggggagctgaacgtggacagcctcatcacccggctgctggaggggtatgcggaagcgagcaccccagtctgagat

SEQ ID NO: 802465 - DNA, 100 bp, Homo sapiens
ggcggcggagccggtatgggcccgcctgaccctgggcgccgcgccgcacgagcaccagcctagagccagcatcctaatgtcctatgatcacgtggaactc

SEQ ID NO: 802466 - DNA, 99 bp, Homo sapiens
cacagttaccaaaattgaacttgtctttcgcttgtgagcggttgtggtcattgtgagatgaggagactgtccttcctgtttcgcagatgaggaaactga

SEQ ID NO: 802467 - DNA, 100 bp, Homo sapiens
atccttgtgggcatgatccataatcggtttcaaggctgcagaacagctacacggcttcccagcggaccaaccaggagttggaggacaagctgcacacact

SEQ ID NO: 802468 - DNA, 100 bp, Homo sapiens
gtcggatagacaataccacaacaacacattttgcagaggcaggaatgggccacttgtgtgtaacaaaagatggactgcgcttggaaggggaatcagaatt

SEQ ID NO: 802469 - DNA, 100 bp, Homo sapiens
gaccttcaagaatgactcggggcccgccctgagcaatcacttcatggaggaattacatgaatgacagtcttcgaaccaatgtgtttgttcgatttcaacc

SEQ ID NO: 802470 - DNA, 98 bp, Homo sapiens
gacagttcgctacacagcaatgcatcgaggctcacgaggcccagggaatcctctggaccatcagattaccaatgaaagaggagaatcaagctgtgata

SEQ ID NO: 802471 - DNA, 98 bp, Homo sapiens
aaaaggaagtaatccctagtgtcagcagattcagcggtactggtgtataataggtacagcagggaagaactggaaactcagagaaagaaactgccctt

SEQ ID NO: 802472 - DNA, 98 bp, Homo sapiens
gaagaagcgcggccttcacacatcccagccggtgactgcagtgagaaggaccatgtctcatacattccatgaatggagacttgttgaggaccttggag

SEQ ID NO: 802473 - DNA, 101 bp, Homo sapiens
aggaaatgctgcttggggatgagcatatgccatcccgcccactttctacagaccctacttcagaattgttcgatttgacgtctcagcaatggagaagaatg

SEQ ID NO: 802474 - DNA, 98 bp, Homo sapiens
aagtgtgcatcccaaccttccttctgacaagtcccagagctaaaacgtcatcctctcttcagtgatgtggactgggaaaatctgcagcatcagactat

SEQ ID NO: 802475 - DNA, 50 bp, Homo sapiens
tgagagaccgaaatgcgttacagattgttgcctgccctgatgtgcttcct

SEQ ID NO: 802476 - DNA, 98 bp, Homo sapiens
gagtggattcctcagctatggctccagcttcagcacctcacccactggacagagcccatacacctaccagatgcacgactgctgagaaggaagaattt

SEQ ID NO: 802477 - DNA, 100 bp, Homo sapiens
aaggacaacaatgagatcgtggacaagatcatgggcaaaggacagatccagccactgaggcggctcccagctgcgttggcgacatggccgacacccccag

SEQ ID NO: 802478 - DNA, 101 bp, Homo sapiens
cccttctccaggatggcagaggcggaattgcacaaggaaaggctgcaagccatagcaagctacagagacttctgaagtggagagtctgcgacctcctcggt

SEQ ID NO: 802479 - DNA, 74 bp, Homo sapiens
tgtgacctgacggagtatctggaaagctcgggacaggatggccagggagctggagagcagagaggcagagctaa

SEQ ID NO: 802480 - DNA, 100 bp, Homo sapiens
ggagaggacgggactgccaagagacatgttagaaggacaaatctgaagaggaatgattatacgcctgataaaattatatttcctcaggatgagccttcag

SEQ ID NO: 802481 - DNA, 98 bp, Homo sapiens
aagcaggtctaccgggccacgcaccgcctgctgctgctgggaatatatgcagaacatgtcctgcggcccaagaatcttggacttgcacatcagaggca

SEQ ID NO: 802482 - DNA, 100 bp, Homo sapiens
tatgctgcagcatattgtactggcctgctgctggcccgcagggtgggaacatccagttgcaggaaaacaagcttaacacgcccactgattctacattatg

SEQ ID NO: 802483 - DNA, 98 bp, Homo sapiens
agtagactgaatccacatagagaaagtgatgggcctccagggtcgtatagacctccccctcctatgggcaaaccaccaggttcaattgtaagaccctc

SEQ ID NO: 802484 - DNA, 100 bp, Homo sapiens
cctcctcctccagttaccaccctcctccctagcataaagaagaagcattgcatgcatttattcagccagagattctggatggcccaaatcagtatttttg

SEQ ID NO: 802485 - DNA, 100 bp, Homo sapiens
cagggacagccgtggagagaccagggaccagttgcctttccccatcttcctggttctgctccttcgtggcctagtcttgtggacaccagcaagcagtggg

SEQ ID NO: 802486 - DNA, 99 bp, Homo sapiens
ctgtgcggcggccggcgggaccataagggcttaactcatatatttaacccccctccaaaaaccttatacaggatgctgtgttctttgctcctttgtgaa

SEQ ID NO: 802487 - DNA, 98 bp, Homo sapiens
tatcaactgggtccaacagcaggcctatggaatggttcaattagcagaatttctagaaaatttacaagaaaagtccttgaggattgaagcctttgtta

SEQ ID NO: 802488 - DNA, 126 bp, Homo sapiens
ctgagctgttcctgggatggcctctttatcctggtgcttcagaatatgatcaggtggcattgccaggacttacacagatcaatgtgttcagattttaacagagttgctgggtcttcgacaagagca

SEQ ID NO: 802489 - DNA, 100 bp, Homo sapiens
caatcgccggtgtgccttgaatgaagaaatttgccatctgccttagtaagtcatgtactaaatcctcaacctggagagaagattctagacttgtgtgcag

SEQ ID NO: 802490 - DNA, 98 bp, Homo sapiens
cctgatcctgtcatttcaatagcaatgaagccttctaacaagacccttcgcaggtgttacagtcgggtgaaagaacatggtgttgggaaaagaaagag

SEQ ID NO: 802491 - DNA, 100 bp, Homo sapiens
ctgctggcctcggccacccagccgtctcctgtgaaggccatatttgataaacaggaacttgagttcgaaacccagaaggacagataaagctttattccaa

SEQ ID NO: 802492 - DNA, 120 bp, Homo sapiens
cggatctcgcagtgggcagacgaccacctgcgcctagtccgggcctagagtccttacgggacagtgcccattccacaccagtgcgttccacttcccatggggacaccttcctgcctcacg

SEQ ID NO: 802493 - DNA, 98 bp, Homo sapiens
tcctcagaagcatgtgtcttccccagctctgcagccacatactatccgtttgttcaggaaccaccagtgacagagatcaggtcatccagctgatgaac

SEQ ID NO: 802494 - DNA, 100 bp, Homo sapiens
aaaaattggtacccccgacagaaaatatgttacgctaagagaaagttagcaggtgccaatccagcagtcattacttgacgcccctgtcctggcaagagct

SEQ ID NO: 802495 - DNA, 99 bp, Homo sapiens
acttctgatccatggatgccatcagttggcagatatccctgttacaatctgtacatatccatttgtatttgatgcccaagcaaaaactactctgttaca

SEQ ID NO: 802496 - DNA, 100 bp, Homo sapiens
tttctcctaccccttgtcatgcagggtgtgagcagggctgagatgggcaccgcggatctggggccgtcctcaggattttttatcaagcagaaatgcatcg

SEQ ID NO: 802497 - DNA, 98 bp, Homo sapiens
aagatgaaacagagtatggctgcagaggatccatctgtcttagcaaggctgtcatcacagtgaaaggtgtagcagtcactcggcctacacccacagca

SEQ ID NO: 802498 - DNA, 136 bp, Homo sapiens
acactaggcaaagaacttgcgtcaaaatcaggactgaaatacattaatgtgggtgatttagctcgagaagagtggaagtttccagagaaaacagccatcaaagaaggttgagagtgagaattaagagacactggag

SEQ ID NO: 802499 - DNA, 98 bp, Homo sapiens
aacaagttcaaccaggtggagagtgataagcttcgaatggacagagccatccctgacacccggcatgaccagtcctatcagcagtatcctggtgaata

SEQ ID NO: 802500 - DNA, 133 bp, Homo sapiens
cagtaaagagggcatttgctattgattctagtcatccctggcttcatgagtgtatgattcgtctctttaatactggtaatagaggacacatctcttaactgggttgctctaagaactgatgtctaaaccgtct

SEQ ID NO: 802501 - DNA, 139 bp, Homo sapiens
ccgaagtggctaaccaagaaactaaagaagacttacctgcggaaaacggggaaacgaagactgaggagcatggcagcttttcgtgtttggaagccttcagaatcatttcctaccctctcaaggaacccattctttagag

SEQ ID NO: 802502 - DNA, 100 bp, Homo sapiens
ggaagggaaccaacccactttctcggcgccgcggctcttttctaaaagtggtcatgtaggtacaacagcaaccaagaagatcgatgtctacctccctctg

SEQ ID NO: 802503 - DNA, 100 bp, Homo sapiens
gacagtccctggatcaccgacagcacagacagaatccctgctaccagtgccagtcacgaattgcccgaacattacctgctgatcagaagccagaatgtcg

SEQ ID NO: 802504 - DNA, 98 bp, Homo sapiens
ggggataacattcatgcagaacatcagggaaaggtggcccagacagcgtgtatgtcagcttgcaagcatttagccacatccttgatgcaacttttgtt

SEQ ID NO: 802505 - DNA, 98 bp, Homo sapiens
aaaagctgatgatcggaatgattacaggactgcaatgtgccgatcttagctgctgcctgagaggatgtctggggtgtccgagcccctgagtcgagtaa

SEQ ID NO: 802506 - DNA, 100 bp, Homo sapiens
gcctcagcgggagaggagtctccaccaggactgaccgctgccgcccagcacgtccaggcaggacaagcgtttagaaagtttcttccactctttgaccgag

SEQ ID NO: 802507 - DNA, 90 bp, Homo sapiens
ccccgaacgggggtcttcctcctccgccgttgacagcgaatgctgatgtcttaaaggcgatggtagcagataacagcctgtatgatcctg

SEQ ID NO: 802508 - DNA, 98 bp, Homo sapiens
tcaagttcttaattattcagaatgctgcggttttccaaggtttttcccactcggctttcacgtttgggattgagagccacatcagccagtccaacatc

SEQ ID NO: 802509 - DNA, 98 bp, Homo sapiens
ttcacatcaggtgatggataggagcaaccctgtaaaaccagccttagactatttttcaaacagccccagttgtgacagcgttgaggaagatatgaatg

SEQ ID NO: 802510 - DNA, 99 bp, Homo sapiens
ctattcccagaggcaggtggtgctgaccctgtaacccaaaggaggaaacagctggctaagctcatcattgttactggttattgacccagtggctccacg

SEQ ID NO: 802511 - DNA, 99 bp, Homo sapiens
gaagcacgagcagatcctggtcctcgatccgcccacagacctcaaattcaaaggtgtgtgttgggaaacactaccatccttgctgagtttgccactgat

SEQ ID NO: 802512 - DNA, 98 bp, Homo sapiens
gatgaacagatgttcccttgtcgattcattaaaatagataatgagaagcccatgcgagtggtggatgatgaagacttggtagaccagcgtctcatcag

SEQ ID NO: 802513 - DNA, 113 bp, Homo sapiens
gccatagttcacaatgttgattctgatgacctcattagcatgggatccaacgacattcctacaacagcagccagtacccctgatgccgttgacaagtatctcgagacacctgg

SEQ ID NO: 802514 - DNA, 100 bp, Homo sapiens
ttctggattctgccattaggcgaagctttgtgatggtcaacagcgtggcgctgaacggggatggctgtggcatctgctctgaaacagaagcagagctcat

SEQ ID NO: 802515 - DNA, 100 bp, Homo sapiens
gttgcccgcctgcatcagtgcaaaactcctattatccaccgggacctgaagcgggtcacagaaagtcgagagagccaaatgacgattgaggagaggaagc

SEQ ID NO: 802516 - DNA, 98 bp, Homo sapiens
tctcaaagaagatctatgatacaattcatgatatcagatgttcagtcatgatgattcggctggtagcagtgtttgatgagcaggatccacatcacgga

SEQ ID NO: 802517 - DNA, 98 bp, Homo sapiens
tagtttcctgacctctgacacgtattgtctcaagattaaagcctcgatgacttacgagccctcaaggggaagcattttctcctggaccccttgatgcc

SEQ ID NO: 802518 - DNA, 100 bp, Homo sapiens
acccacaggtgcatttcacagcactctgggcgaaaattggatgtgaaaatgaagccagaccgagccgcttgatggcattgaaacgaatgggaattgtaag

SEQ ID NO: 802519 - DNA, 117 bp, Homo sapiens
ctcctccttgccttccaccatgattgtgaggcttccccagccacgtggaactgggtgagcccctccagactccgaataggagatcaagagtttgattcattgcctgctttactggaa

SEQ ID NO: 802520 - DNA, 99 bp, Homo sapiens
tttacgtgagctttgcaccgagcgcctccgaaccactgcctctgggctcaacagaacacagggagactaatagacaagtcacgagttacctgtgtcaaa

SEQ ID NO: 802521 - DNA, 98 bp, Homo sapiens
tttactttgtaggaatctttctcagccaagatttgcccctgttttaatcaatgctgctgaaataattattgggcgagatgtgtgacagaggtggcatc

SEQ ID NO: 802522 - DNA, 100 bp, Homo sapiens
gtgcattggcaggagttcaggaccagctcattgaaaagaattgtgaaaactgctgagagagacttgcaatccagtcacataagtataataaagaaatatt

SEQ ID NO: 802523 - DNA, 100 bp, Homo sapiens
ttcaattggaaaaagctacagggaatcctaaacaccccttcagtaaatttgggacagggaaagaatatggcaaagctgatgcaagatgggtttattttga

SEQ ID NO: 802524 - DNA, 120 bp, Homo sapiens
cgaagtctgtggtttatcattgtaatcagcttcttaccaaatacagaagggaaatctaagttaatttcaaggcattcgaaatggggaaagactattattgcattttgggaattgagaaag

SEQ ID NO: 802525 - DNA, 100 bp, Homo sapiens
agcagcaacatccccaaacagcggcgtttcacggtggcacatacatgttgagccccatatgggggttggcaggcagcagagaggcccctttcaaggtgtt

SEQ ID NO: 802526 - DNA, 100 bp, Homo sapiens
ggttgcagaagtgccgaaagagcactggactccggaaggatatgggccctcacattttccaaacctgtccatctgctaactattttgactgcagagccat

SEQ ID NO: 802527 - DNA, 98 bp, Homo sapiens
atggccaacaaaattggtgaacacatggaagaacatggcatcaagtttataagacagttcgtaccaattaaaaccaactgccagagttttctctgggt

SEQ ID NO: 802528 - DNA, 100 bp, Homo sapiens
ggcaaagagtcacctaaagttaggcggcactccagccccagctcgactcccaggaaggaaattacaagtcagaagtcaacagcaaacccaggaaagaaag

SEQ ID NO: 802529 - DNA, 99 bp, Homo sapiens
gcacagccgccctcagccccggcgcagacatggacccctcgcgagccatccagaacgagatcagctccctcaaaggctgcaagatcaaggccctgcggg

SEQ ID NO: 802530 - DNA, 106 bp, Homo sapiens
ttcccatgaccgggagttcatagaaataattatgtttgagaccttcaacaccccggccatgtacgtggccatccaggccgtgctgtccctctacgcctctgggcgc

SEQ ID NO: 802531 - DNA, 100 bp, Homo sapiens
acatgatcttccttctgaaagactcgcttcccaaaactgaaatggttggagtgcaatggcgcaatctcagctcaccgcaatctccacctcccaggttcaa

SEQ ID NO: 802532 - DNA, 98 bp, Homo sapiens
tctgcagtgaatgtcctcacggaacacaggagagtagttatcttgatggaattagaagttttgaagtcagctgaagcagttggagtgaagattggcaa

SEQ ID NO: 802533 - DNA, 98 bp, Homo sapiens
gcaaatcctcccccagtactggtcaacacagatagcttggaaacaccaacttacgtttactggttcaaagatgggaagcagatttctaagagaaatga

SEQ ID NO: 802534 - DNA, 100 bp, Homo sapiens
actggagggataggatgggcattgctcaaaaagagaccctgaaggaagattgggaatctgaaaaagatttatgtttagaaaatctacgcaaagaactgtc

SEQ ID NO: 802535 - DNA, 100 bp, Homo sapiens
tcctcggtcagtggactcttattcttcaactcagcatgttcctaaaacctcggatcaattctcagctggtggcacaacaagtggcacaacagtatgccac

SEQ ID NO: 802536 - DNA, 100 bp, Homo sapiens
cggcgagtatacatgcaaagcttccaatgagtatggcagtgtcagctgtacagccacactaactgtgacagtgctacacacgcagggccctgtcgatggc

SEQ ID NO: 802537 - DNA, 98 bp, Homo sapiens
attttacccagccgcacgcccaggatttcttgcgtgcagtttgtgaagaaaaaattagggactttgaacatgtcggggatcgccctcagcagactcgc

SEQ ID NO: 802538 - DNA, 100 bp, Homo sapiens
ctgctcaggctcctggtagctcatatccccctcacatgcaggtttggagagaagatggcttttatccctcagaacctgtttttgttccagcaccaggaac

SEQ ID NO: 802539 - DNA, 100 bp, Homo sapiens
cagattactatgtcggaacagctggatttacctgtgagacaggcagggtgtgggccgaagatatgctcatgtggtgttgaggaaagcagacattgacctc

SEQ ID NO: 802540 - DNA, 100 bp, Homo sapiens
gagtagtcttttaccaactatgtggcttggagctcaaaatggctgaacaccgaaaatctctcccagcactttagaaaggggaccctgactgtgttaaaga

SEQ ID NO: 802541 - DNA, 100 bp, Homo sapiens
aatcctgtcctgaagactgtaagagagaactcgatgccaccgcaacggtattggcgaaccggcaggatgaaagtgagcagtccagaaagcggcttatcga

SEQ ID NO: 802542 - DNA, 100 bp, Homo sapiens
aggatctgcagccatttatattgcttaggctactgataattcgtgtccagtccccggatggagtgaagcggatcacagcaacaaagagagaaacagcagc

SEQ ID NO: 802543 - DNA, 100 bp, Homo sapiens
ggcagccatcaggtaggctgcgttgaggatctttgctcttccatccgcctttgatcgtcttcctcttcagccatccagaaaactctcccaccatgtcgca

SEQ ID NO: 802544 - DNA, 100 bp, Homo sapiens
aaggataagggcgacagcaacagctctgccggctggaagggtgtgaagaagtttgatgtgccgtgtggaggaagagattgcagtgggggctgccagtgct

SEQ ID NO: 802545 - DNA, 98 bp, Homo sapiens
agaatttagaggagaaactgacgatgaacgactttcgaagtaaaatgcaatcaatatttccaacaattcccaagaactccgaatcggctgttgagtgg

SEQ ID NO: 802546 - DNA, 98 bp, Homo sapiens
gatatcaacaaaagaactagcagattttgtaagggaacgagcattggggagtcagcaatgtccgttgtgttaaatcagctgctgcccatgattaagcc

SEQ ID NO: 802547 - DNA, 100 bp, Homo sapiens
agaacatgcagaacacacaggccatggagctggctggggccgcacctgagaaggagcaggggaaagagtactaaggctcgtacgtctgcatcgattatct

SEQ ID NO: 802548 - DNA, 98 bp, Homo sapiens
agaaacaaaatgtcaacaaattgatggataccccatgtttccccatcactcgaggagtctgggcagagactggactacaccgtgggagaatctgcaaa

SEQ ID NO: 802549 - DNA, 99 bp, Homo sapiens
accgctgctctttccactcggctggcctctgcgcctttctctcatcccgggtcagtatagaccttctgatttgctgtgccctgagacatatgtttgggt

SEQ ID NO: 802550 - DNA, 100 bp, Homo sapiens
gaggattatacagaaatttgaagtgcctaatggataagaacttcgttaggattgggaaatggtttgtccgaccctacgaaaaggatgaaaagccagtcaa

SEQ ID NO: 802551 - DNA, 100 bp, Homo sapiens
gtcgtccaggaggcctcctccaagccggccaattccccccgcaccaaattgcatcgtttcccaggtgttggcagagctgaaagagtacgcaacagaagtg

SEQ ID NO: 802552 - DNA, 100 bp, Homo sapiens
aacgtggctctcaaagttcagactcttctagtagctgatgtatttgagttccgttatgccaagatgccagatgaaccactagaaccagggcctttaccag

SEQ ID NO: 802553 - DNA, 98 bp, Homo sapiens
tggaagaagaagaggaaatcctcttgaactcttacaccacaccttcaaagtctgaattggagaagcctagaggcaggaaaaaaacgcccgtcacagaa

SEQ ID NO: 802554 - DNA, 100 bp, Homo sapiens
aaaagaggcgaaaggaagcaagcagttcagaagagccaaggaataaacatgcaatgaacccaaaaggtcgtgatgagaggagatggattgaaaagcagaa

SEQ ID NO: 802555 - DNA, 100 bp, Homo sapiens
cctcagcatttttcatggatttcaaataagtgagctccttaataagcatttatagtcagtttttggcagcaatagaatcactaaaggcattctgggatgt

SEQ ID NO: 802556 - DNA, 98 bp, Homo sapiens
ccccgagccggcccgggtcgagggtgatcttgatactgcagcagtaaaagtggaatttgatgaagaattcagtggagcaccagtagaaggtgcaggag

SEQ ID NO: 802557 - DNA, 100 bp, Homo sapiens
tgttcttctatgtccaggccaaaactattgacctgaaaagtggttctggaaaagtgtaccaaggccctgcaaaaggtgctgctgatacaacaatcatact

SEQ ID NO: 802558 - DNA, 98 bp, Homo sapiens
ggtggtctttctgatggtcagttttattcccctcctgaatccgaagcaggtaaatctcacctggctatcgtgcagcgggtaaacaatgagggagaagg

SEQ ID NO: 802559 - DNA, 100 bp, Homo sapiens
tccaggatacagacagccccccttcagcccagcccagccagatgatgattattctccaccgtctaagagaccaaaggccaatgagctaccgcagccacca

SEQ ID NO: 802560 - DNA, 100 bp, Homo sapiens
acctcagtgaatgaagtcatttgccatggaataccagacagaaggcccttacaagaaggtgacattgttaatgaaagatgtagcacttaagcctcaggaa

SEQ ID NO: 802561 - DNA, 99 bp, Homo sapiens
acccaaaacagcgtccgcgcactgaggggtttaggcctgtctccagatctggacaagactgatacactggaacacgaactaagaagagaagttgaagat

SEQ ID NO: 802562 - DNA, 100 bp, Homo sapiens
agactccattgagaagaggttttgctttgatgtggaagcagtagacagggtcttcatgaacactaataggggtaccaggccctcttcctcgttagaagaa

SEQ ID NO: 802563 - DNA, 98 bp, Homo sapiens
aaaacagatcttgactgcatttttgggaaaagacagagtaagaagactcccgagatcttagaaaccaaccatacagacgagccgatgcggtgaggaga

SEQ ID NO: 802564 - DNA, 156 bp, Homo sapiens
caccgacacatggacataactgaagacctgaccaataaggctcggggcagtaacaaatcctttctggcggcagctaatgatatgacaatggatgatgttcgggaatacgagaaaaacatgcatgaacaaaccaacataaaagtttgcaatcagcat

SEQ ID NO: 802565 - DNA, 99 bp, Homo sapiens
ggcacagcccggcggcagcagctggaggaggatcgcactgctcatcttggccatcactatacacaacgttccagatcttagcaaagcaatgtctcaaga

SEQ ID NO: 802566 - DNA, 99 bp, Homo sapiens
agggatgcttgtatggtctccatatcacagtatcccagatgccaaatgtcgggtcacaaatcttcgaagagtgacatatgttgttttagatgaagcaga

SEQ ID NO: 802567 - DNA, 98 bp, Homo sapiens
gccctacagcagtgctgtttactcattggaggaacagtaccttggcttggctcttgacgtggacagcaattaagttggaatatgcaaggttggttaag

SEQ ID NO: 802568 - DNA, 75 bp, Homo sapiens
gtaggcaatcacctgaaggatctgacttccagaagaatctccctggaaaaggagacatgaatgtctgcaatgata

SEQ ID NO: 802569 - DNA, 98 bp, Homo sapiens
atcagaatctgtagcatcttctcaattggacagtacatctgtggacaaagcagtacctgaaacagaagatgtgcaggtgtcctgggtcatgaaactta

SEQ ID NO: 802570 - DNA, 100 bp, Homo sapiens
tgcagagacagctcaacacggcacttccacagatttttcggacgccgcccgatactacattccctgagcccacctgcctgtcagcatcacccccaaatgc

SEQ ID NO: 802571 - DNA, 99 bp, Homo sapiens
ggagagcggcctgcgggcgatcgggccgaggcttgtaattccacatctgaagtcaaagatctattggaacagaaaagcaagttgaccatagaagtggct

SEQ ID NO: 802572 - DNA, 100 bp, Homo sapiens
ggcctgccaggcccgggctgcagccgcgtctgatcgccgagcgcgccgcgtagacctccgctcccccagacaccagaaccatctttgtcgccatcttcag

SEQ ID NO: 802573 - DNA, 100 bp, Homo sapiens
tgtgacaatccaccacatcagcctgtggccattgaactatggaaggagtgtgaccaggtacatgtggaagatgtggcttctgatgacaatggccaagact

SEQ ID NO: 802574 - DNA, 98 bp, Homo sapiens
gaattgatctcgccaaaaaggacatctttggagccagtctgcagcccaggacgctgattccagcagcgccttaccgcgcagcccgaagattcactatg

SEQ ID NO: 802575 - DNA, 99 bp, Homo sapiens
ctatgccttcagacatcaccagccaggtctctctcctcctgggcgagccgttcttcactaccagcctgctgccgtggcacaacctctacttctggtacg

SEQ ID NO: 802576 - DNA, 98 bp, Homo sapiens
aaaaagaacgtgttgaaacaaggaattgccccatagccttcacaggagtctccccaggacagtgctatcacccgggatattaaccgaacattcccagc

SEQ ID NO: 802577 - DNA, 100 bp, Homo sapiens
ctgacagcaaacggttaaacccccagtgcataccctacaccctgcagaatcactattaccgcaacaataggtcttagtggtgcaatggctagtataagcg

SEQ ID NO: 802578 - DNA, 98 bp, Homo sapiens
tgaatcagtctctctccctgctctacaacgtgcctgcagtggccgaggagattcaggatgaagttggtcacagtgctgtcgatatcaccaaggtggct

SEQ ID NO: 802579 - DNA, 98 bp, Homo sapiens
cctatcaaacctgtttagaaaataaaccaggaagctgtagagaaatatgaagaagtgctacataatttggaatttgccaaggagcttcaaaaaacctt

SEQ ID NO: 802580 - DNA, 98 bp, Homo sapiens
acgatcggatgaatgagcctccaacctctcttgggcttgtgcctcaccagggggcagctggcattttatgctatgtgggagcctatgtcttcatcact

SEQ ID NO: 802581 - DNA, 100 bp, Homo sapiens
ctgacggccacgaacttccgagtggttctggacatggcaagacatgtgccactctatcgggcactgctggaattgcttcgggccattgcttcttgtgctg

SEQ ID NO: 802582 - DNA, 100 bp, Homo sapiens
aagaaccagcaggctctgtggttcaggactcccgacttgacacgatattttttgctaagcagatggaggagatgtataagaaagctcatgctgctatacg

SEQ ID NO: 802583 - DNA, 98 bp, Homo sapiens
gggtccgctgagcggggcgacccgagaactcaagacatggctgcccagtgtgtcacaaaggtggcgctgaatgtttcctgtgccaatcttttggataa

SEQ ID NO: 802584 - DNA, 100 bp, Homo sapiens
ggaagtggatttccggtgaaggatgggcggagaaagattctgccagaagaagaggggtctaaattatggataataatggaatacctgggcggtggttcag

SEQ ID NO: 802585 - DNA, 100 bp, Homo sapiens
attgctcgggggagaaacaaaggcacatggattaattgatgtatgttgagtttatggagctgccttttggtggcttgctttatctgcagtttttaagaag

SEQ ID NO: 802586 - DNA, 98 bp, Homo sapiens
aaggatctggggatcttcgcactatcccaagggacccagacatggagctgcgggaagaagcctggtctccggggccgctggattctgaggaccagcag

SEQ ID NO: 802587 - DNA, 100 bp, Homo sapiens
gctgaacggagaggtagccatgatgccccacttggtgaatggagatgcagctcagcagttgagccccatatgggggttggcaggcagcagagaggcccct

SEQ ID NO: 802588 - DNA, 99 bp, Homo sapiens
agaaattgatattttgatgaacaatattgaacgctatcttaagattatttgcatgggtgcaaaagaaaatggtttgccgctggagtatcaagagaagtt

SEQ ID NO: 802589 - DNA, 100 bp, Homo sapiens
ggggcgagggcgaagacgagatccagttcctgcgaactctgaagaagcatctgtagggaatccagaaggagcgttcatgaagatgttacaagcccggaag

SEQ ID NO: 802590 - DNA, 100 bp, Homo sapiens
gaagatgccttgacttacctcatgttggcaaatcatttggttcacacgctgtgtcccgattctataacaatagctgagaggcagttggtgtcaccagcca

SEQ ID NO: 802591 - DNA, 100 bp, Homo sapiens
gaaaagtcccatggttagaaaatatgcatttcatatgatattggcaggccatcgatttagtaaagcagggcagagattcacggatccatccgggtggtcc

SEQ ID NO: 802592 - DNA, 100 bp, Homo sapiens
gtcctcctcacggtcctcctggctgtgctcatatacacctggtgtctgacttccagcaactgctggcctgtgccagggtgcaagctgagcactggagtgg

SEQ ID NO: 802593 - DNA, 98 bp, Homo sapiens
acagactcaccctggacattcagaacaagaaaattactgaggtcgccctcatgggccacctaagcaatatggcttttgtaaggcaacactcagtgaga

SEQ ID NO: 802594 - DNA, 100 bp, Homo sapiens
tgcctgatgatcacgcagctggctggcttcagtggaccaagtattgggaaagggtcgttgtggtgcatagacccagagtatagacaaaatctaattcagg

SEQ ID NO: 802595 - DNA, 100 bp, Homo sapiens
ttaccaagatcctcgacgagagcagatggctgcagcagctgccagacctattaatgccagcatgaaaccagatagtagttcctcagggaagaacagaaaa

SEQ ID NO: 802596 - DNA, 100 bp, Homo sapiens
ggctgaccccgcagcggccgggctgtcgcggcccccacctcagtctatcaggtgtttgaaagtgtggctaagaagtatgatgtgatgaatgatatgatga

SEQ ID NO: 802597 - DNA, 98 bp, Homo sapiens
tcagtgtatgcgacctcactgcagagtgatagtttgctctccaaagctcggggaattgattccagctctgttaaactccggggtagttctctcttcat

SEQ ID NO: 802598 - DNA, 100 bp, Homo sapiens
gaggaggtgaagcagcatgcccaggaactctgggctgcctacagccatcagagggttctcgcttcagcacaagatccggagttttgaagaagcgcgaggt

SEQ ID NO: 802599 - DNA, 98 bp, Homo sapiens
gcttctcaggcacgtaccactttctccggacccagaagatcatctggatgcctcagatggggaggatgagaagcccccgctgcccccgcgctctggct

SEQ ID NO: 802600 - DNA, 100 bp, Homo sapiens
tttccactttgtaattccagcgagtcgacttcccatcctgagttgatgcttttactgactctgctatcagtgctaaagtgaatggcgaacacaaagagaa

SEQ ID NO: 802601 - DNA, 100 bp, Homo sapiens
agcaatgcaggaatatatcgcagtagttaaaaaactagatccaggttggaatcctcagtttttggctttcacccccaaccagtgaccaaagacttgacca

SEQ ID NO: 802602 - DNA, 100 bp, Homo sapiens
tcaccaaataagctatatactttggttacctatgtacctgttaccactttcaaaagatgagttccacccgttcatcgaggccctgctgcctcacgtccgc

SEQ ID NO: 802603 - DNA, 100 bp, Homo sapiens
agttaaaaactaaagtagttcatttatcaaagctacccaaagatactgccttgcttttggacccaaacatatacagacctggaatggccaaatatcaagg

SEQ ID NO: 802604 - DNA, 100 bp, Homo sapiens
aaaccatctgaccttttagaagaaaataagataaattcatcggtgaaattcgcttctggtaatactgtagaaattccctacagagtctcccaaaattcac

SEQ ID NO: 802605 - DNA, 101 bp, Homo sapiens
ccgccaaccccttcgagcaagacgtgggtgctttgtaacagagccagactggtttcctatctcccaggattttgctctttagttaaaagggttgtcaatcc

SEQ ID NO: 802606 - DNA, 99 bp, Homo sapiens
tatcttctcttcaccagctcttcagatcaatatggtactgtccaagaagctggaacattattatccagcaagaatgttcgtgtcaactgtttggacgag

SEQ ID NO: 802607 - DNA, 99 bp, Homo sapiens
gatttcgggcacaatagaggacacgagcggcgccttctcagggctcgacagcctcagcaagctcctactcgacacccagcacctcccccgcaaaccgat

SEQ ID NO: 802608 - DNA, 100 bp, Homo sapiens
tttgatcctgattctacccaagtacatatgatttcagctgcaatggcagagacaaagcatggaggacacaagaatgggaggaaaggcggactctcaggaa

SEQ ID NO: 802609 - DNA, 100 bp, Homo sapiens
ctcagctttgtcgtatttgggttttgaaacttaccaggttatctctcaggctgctgtggttcatgccacagccaaagctccaaaaggaattcttcatttg

SEQ ID NO: 802610 - DNA, 99 bp, Homo sapiens
caggagtgtctcacttatgatggagaaatggctgatgtccaagtgcagttgatcagcaaaggccaaccaaaccctttgaaaaatattctaaatgaaaat

SEQ ID NO: 802611 - DNA, 100 bp, Homo sapiens
accagcctgggagtgggaggatgcgcaggggttttctgcacttctacactcagctcctgcccctcctaaagctgaagccaaagcgaaggctttaaaggcc

SEQ ID NO: 802612 - DNA, 100 bp, Homo sapiens
tttgatttttggaaggatatagttgctgctatacaacacaattataaaatgtcagcttttaaggactggaacgtgagaaacgagcccgcatcaaagcacg

SEQ ID NO: 802613 - DNA, 100 bp, Homo sapiens
tggtcatggtcctggagggcgattaggacatggagatgaacagacatgcttggttcatgaaatatttggaagacagcatgagatctaacaacttgtgaag

SEQ ID NO: 802614 - DNA, 109 bp, Homo sapiens
cgccctcccggggttggggacagagcaggtgcagaggcactgcagctgctcggttgcccaggaaccagtgggcctcctgcatttggtcgctttgtgtaatgagaatcgg

SEQ ID NO: 802615 - DNA, 100 bp, Homo sapiens
tcctgtgtaagactagccacctttctgatacaggattcactccttctccagttgcacagccacacccttcagctggccttaatgttgactttgaatctgt

SEQ ID NO: 802616 - DNA, 100 bp, Homo sapiens
gctgtgggcttccccatgatgatcctgccatgcaggcaggccctgagcacgctgctgtgtgagcagcagtgtgatgccattagtgtattggagaaagaac

SEQ ID NO: 802617 - DNA, 100 bp, Homo sapiens
ggccactccagtcggtgttgagcacggcgagcagtctcaggcctttagtgatgatggccagcgatctgtacatgagacccaggaattatttccaaagcaa

SEQ ID NO: 802618 - DNA, 100 bp, Homo sapiens
cgccaggccggagcgcgaatgtcgtgctcaccctgcctccttcccgccgccccctggggtttggaattcacccagttgcaggccgaatgcctggtcagct

SEQ ID NO: 802619 - DNA, 100 bp, Homo sapiens
ctggaagaacattgtttcctggtacagaccatatggccatttctgatgaactgcactacttggaggtctacctgacagatgagtttgctaaaggaaggaa

SEQ ID NO: 802620 - DNA, 99 bp, Homo sapiens
cgcggagccggactgcggttggggcgggaagagccggggccgtggctgacatggagcagagtgatcagcagctggactgtgccttggacctaatgaggc

SEQ ID NO: 802621 - DNA, 98 bp, Homo sapiens
tccactacgaaggccacctacaaatagcaggtaggagcattgcttttcgtggtgaaagaggcaatgatgaatctgccatcgaaatgattaaagtatct

SEQ ID NO: 802622 - DNA, 98 bp, Homo sapiens
caagtacatcccggtggccacggccgccgcgctgctggtcggctccagcaccctcttcttcgtgttcactgggtaattccagaattgattggccatac

SEQ ID NO: 802623 - DNA, 98 bp, Homo sapiens
cggactctgtttcccacatcctgatgacgttctggaatcaccacaagacctaagtgtccgaagaagtcaagattcaaccctatgaaaagataaaggcc

SEQ ID NO: 802624 - DNA, 98 bp, Homo sapiens
aaggacttggatgaagaaatctttgatgatgatgacttttaccaccagaaagctttggacttggctgacatgataacccgggtgatccaggagggatt

SEQ ID NO: 802625 - DNA, 100 bp, Homo sapiens
tgtattagatgatgacagagaagatctttttgcagggtggttctcttcccaaagtggaagccaaattcatcaattatgtgaagaattgcttccggatgac

SEQ ID NO: 802626 - DNA, 98 bp, Homo sapiens
agggacgcgtacgagctgcaggaggttatcgggccgcgatgggcctcttggaacattggtgtgttcatctgcattcgatgtgctggaatccacaggaa

SEQ ID NO: 802627 - DNA, 98 bp, Homo sapiens
agttactgaaactagaaaccaatgaattccaacaacttcaaagtaaaatcagtttaatttcagaaaaggacttggatgttgtgggtgatggtatgcag

SEQ ID NO: 802628 - DNA, 100 bp, Homo sapiens
tgccagatgctgctggccctgtacgaatccctggccgtgagcattcctgagtccctgaagaaatgcactcggtgatggaaagagagccactattctgaag

SEQ ID NO: 802629 - DNA, 99 bp, Homo sapiens
taaagcctggaatttcagaggggttgccatgtcaaatcttagcgaggctgtgcaggatgcagacctgctggtgtttgtcattccccaccagttcattca

SEQ ID NO: 802630 - DNA, 99 bp, Homo sapiens
ccacttttgattgcaaagtgctatcaaggaaccacgctctcgtctggtttgatcacaagacgggcaagattataaagactttggaacacttgcccattc

SEQ ID NO: 802631 - DNA, 100 bp, Homo sapiens
aaggagctagaatgtggataaacgacatgaagatgaggagtttttccccaaccatggttttcctttggaatatggataaatacaccatgatacggaaact

SEQ ID NO: 802632 - DNA, 99 bp, Homo sapiens
tgacgccgcggacctccctgcgaccgtcgcggaccatgggcgacaaagggacccgggtttgccttcccggattgggcctacaagccagagtcgtcccct

SEQ ID NO: 802633 - DNA, 100 bp, Homo sapiens
ggatcgatgtttcaatattggaagcgctttgatttacagcagctgcaggctgaagccgacgtagcttctctgaacagacgcatccagctggttgaggaag

SEQ ID NO: 802634 - DNA, 100 bp, Homo sapiens
ataatctgtcattgaacaaatgtttccttaaagtgcctcgatctaaggatgaccctggaaagggccctccagaatttccacagcatacacctggacctgt

SEQ ID NO: 802635 - DNA, 98 bp, Homo sapiens
gactccctttaatccagtgactgtcaggtcgatcatatgtgaccctggcagcaaccccaacaaacgccagaggcagccccctctcctgggagatcacc

SEQ ID NO: 802636 - DNA, 99 bp, Homo sapiens
ggctaccgttcggactatttgtagtcatgtacagaacatgatcaagggtgttacactggtcatcactccccaaaatggacgttaccaaatagattccga

SEQ ID NO: 802637 - DNA, 100 bp, Homo sapiens
tgcgcaaacttgacactcaccctgaccggtaaacattataccagtgattgccaaagcagatacggtttctaaaactgaattacagaagtttaagatcaag

SEQ ID NO: 802638 - DNA, 98 bp, Homo sapiens
tccacaccagcggcagcatgcatctgatgctctctctccagtccttgctgaagagactttccgttacatgaatgctaatcctgaggtgacgatgacaa

SEQ ID NO: 802639 - DNA, 100 bp, Homo sapiens
aggagacccaaggaacagtgccaagttagatgccgattacccacttcgagtcctttattgtggagagcgtcctccaggctttgaccgtgtccgaaatgct

SEQ ID NO: 802640 - DNA, 98 bp, Homo sapiens
ctgaggcatctgagtcaacaacggatgaaaatgaagacgacattcagtttgtcagtgcaatgaatcgctccctggctaatgtgattcttggaggctat

SEQ ID NO: 802641 - DNA, 99 bp, Homo sapiens
aggaatgaaactgaaacatacagtcagatctcaggaatggaaggtaaaccgtcctattggcagggtacagatcttcactgcagacttatctgaaatacc

SEQ ID NO: 802642 - DNA, 99 bp, Homo sapiens
ctacttccaatttaaaaacctatgggaagccaacgatcggaacgaaacttggctgtgcttcaccgtggaaggtctatcagccacagtctctgcaagttt

SEQ ID NO: 802643 - DNA, 100 bp, Homo sapiens
gctacggggatgagattggcctggatgcagctgcccttcctggacaggatgtgggaatgagtgacacagcaatgacatctttcctcggctcctgtttgga

SEQ ID NO: 802644 - DNA, 103 bp, Homo sapiens
agagggggaaaagcgagcgatcgagcgagcgcgcgcgcgaaaactccgggcaggcgagcgatatgtgatgacatttttgaatgtattgaactttggtgatcag

SEQ ID NO: 802645 - DNA, 100 bp, Homo sapiens
catgtggtggtgaaaaatgaccctgaactggaccagcaggctgagtcatcactagagagtgggaagggcagcagcagcagagaatccaaaccctaaagct

SEQ ID NO: 802646 - DNA, 98 bp, Homo sapiens
acgaagcaaagagaaacacggcaagaagccagtcaaagagaaccagagtgagggcaagggcattagtgccagcagtagttcccaagggctgtctcagc

SEQ ID NO: 802647 - DNA, 100 bp, Homo sapiens
cgcggaacaattgagcaagaacaaggtgacacatattctgtctgtccacgatagtgccaggcctatgttggaggtctccgtgttggtcctcttcgccctg

SEQ ID NO: 802648 - DNA, 111 bp, Homo sapiens
ctgccgccgcccccagctcccccgcctcggggagggcaccagaactccatccggcacaacctgtcactgcatagtcgattcatgcgggtccagaatgagggaactggcaag

SEQ ID NO: 802649 - DNA, 98 bp, Homo sapiens
atcctcagcggcgccttgcggagggaccccaggtgataaaagaaaatgtggctgaagttacccgaagttcagcttgcagtgtaattcagaagagttaa

SEQ ID NO: 802650 - DNA, 100 bp, Homo sapiens
acaattgctaggcggagacagtgcagggaagagagaccttagaaaggatcaggactggcggggctctctttacctatgaaggcaacagcaatgacatccg

SEQ ID NO: 802651 - DNA, 98 bp, Homo sapiens
ccctgtaacccaaaggaggaaacagctggctaagctcatcattgttactggttttggcttggtttgaagaaggtgaagaaacaattacagcctttgta

SEQ ID NO: 802652 - DNA, 100 bp, Homo sapiens
gcttccacacaactccagtgctaactcaacagcattaggtggtctcttcagtcagcctacacaagctcctacccagtccaaccagctgataaatactgcg

SEQ ID NO: 802653 - DNA, 98 bp, Homo sapiens
gggatatgcactctgcacttccattcctgcagtgaaattaactcgagcttggcagcttctcagatgaccaagatggtgctgcagatggtgctgaggat

SEQ ID NO: 802654 - DNA, 98 bp, Homo sapiens
tgacatggagagaatttcactatattcaggctgagtatgagtttatcagctctggtctctacctagtggtgttattgcacttgtgcgaacaaagcttt

SEQ ID NO: 802655 - DNA, 100 bp, Homo sapiens
gtcaaatttgtcttcgacgctgtcaccgacatcatcatcaaggagaacctcaaagactgtggcctcttctgaggcatccgtgcctatgagcagctgggct

SEQ ID NO: 802656 - DNA, 100 bp, Homo sapiens
gtgggggtggcagtgctgctttaggcccttctggctttggaccttctggaggaagtggcaccaagttgactatgtcattaaggaagcaactaatctagat

SEQ ID NO: 802657 - DNA, 100 bp, Homo sapiens
gccatggcttcaccggacgaccctctgcgcgcaggtgaagctttgttctaagaatatttgtttcatctagtttatgagtccaaatgatatagactgtaaa

SEQ ID NO: 802658 - DNA, 100 bp, Homo sapiens
tgaaactagccagactggaatttgagtctttggaggcactcaagcagcagctctttccaacaactgatcctgtgggtactttgctccaagttccagaaca

SEQ ID NO: 802659 - DNA, 100 bp, Homo sapiens
gaccccttcaagttctagtcatgacaccggcggtgggggccggagcgcaggacagcactgggcaaggctccggggagaaagcgggttgtccctggagcgg

SEQ ID NO: 802660 - DNA, 100 bp, Homo sapiens
tcccggaagtcaccattggagctcatcagactgaccgtgtcttacatcagttcagagaggagtgtgaggaagaggctgtctgtgtcattatgtgtgcgtc

SEQ ID NO: 802661 - DNA, 100 bp, Homo sapiens
gtcattgatttttcaccatttggagaaccaatatttttgaaacctcattgccttctctgaagacggctctgacccctatgtccgcatgtatttattacca

SEQ ID NO: 802662 - DNA, 100 bp, Homo sapiens
gaagagcagcattggaaactctgtttacgttattatcaacacaggaccagatcctgataacttaagtgactctctcttttccggtgatgaagaaaatgct

SEQ ID NO: 802663 - DNA, 100 bp, Homo sapiens
agatacattaaatgcaatagcccttcagtactgttgtacggaaagtcttaatagacatcgatacttgaattctttatttcccagtgaaaactccaccgcc

SEQ ID NO: 802664 - DNA, 100 bp, Homo sapiens
tggagccaaagcagcagtaagaaaggctacgcagtctccagttaccttccaaaaagggctattgagtggccagacttccccaacaaatgccaaattggag

SEQ ID NO: 802665 - DNA, 98 bp, Homo sapiens
gcgtccccggtttggtgttgcggcgcccaccttcgggaggatcagcactgccccccaggtgttgagtaccagctctccagcccaacaggcagaaaatg

SEQ ID NO: 802666 - DNA, 99 bp, Homo sapiens
cgaggtgtcggcgcgggagcagcacttccacagccaaccagtacaggctactctgtcatctttgaagatgttagatgtgggaaagtggccaattttttc

SEQ ID NO: 802667 - DNA, 100 bp, Homo sapiens
cggacatgatggtcgagggccgcctgctcgttcctgacagaatatgctgatgcagagattgaaggagccccagctgctcccttggatgtgaagtgcttgg

SEQ ID NO: 802668 - DNA, 100 bp, Homo sapiens
tgaaggtgctcaaggtgtcccagcccacagctgagcaggcccaggctttcaagaatgagatgcaggtgctcagtccagaatgacagggtccagaaactgg

SEQ ID NO: 802669 - DNA, 99 bp, Homo sapiens
aactgtaagaagaggaaagacttgtctcaggctaatagctcgtcagcttgctaaaatccatgctattcatgcacacaatggctggatccccaaatctaa

SEQ ID NO: 802670 - DNA, 98 bp, Homo sapiens
tgtcaagaaggtgccggtggtgcgagtcttcggagcgaccccggcaggaagtttactggatttcttaaaagatggagaaggaagagctctgaaattac

SEQ ID NO: 802671 - DNA, 98 bp, Homo sapiens
ggatctcaggagactcatttcctatctagcctgtattcccaggttcctgggtggagctacccatgaacagcagcaatggcaatgataatggcaatggg

SEQ ID NO: 802672 - DNA, 100 bp, Homo sapiens
cccccaaatcgggtcctgagctatcgagtaaagcagcttgtcttccccaacaaggagacgatgagagtaaagccatcattaggaatttggactccagaag

SEQ ID NO: 802673 - DNA, 100 bp, Homo sapiens
gatctgtatgatgactttgaatgggtgcatgttagtgctcaagagcctcattatctaccacccgagatgccccaaggtacaacttggccaagtagaaatc

SEQ ID NO: 802674 - DNA, 100 bp, Homo sapiens
gcctcgtcaaccagcagagcttccaggacatcaagcccatgcgggaccagatcatccgcgtgaagcggaccgtataatagacgctggccccaaaggaaac

SEQ ID NO: 802675 - DNA, 98 bp, Homo sapiens
ggagttccaccaggccgggaagcccatcggctcctgcgccgagtgcctgaagttcgaaaagggcccctttgggaagaactgcagcgcggcgtgtccgg

SEQ ID NO: 802676 - DNA, 100 bp, Homo sapiens
gctgctgcctctgctgtacctcctggtccggaagcacatcaacagagcgacaaagatcattccactcagcctgggacgatggggaggaaaaaaatccaga

SEQ ID NO: 802677 - DNA, 101 bp, Homo sapiens
caggaatccgcccgcaagagcgagccgcctgccccggtgcgcagacagagctattccagcaccagcagagcaggatacagacgtccctcaccagtgccagc

SEQ ID NO: 802678 - DNA, 99 bp, Homo sapiens
gccgccacctcctctgatctacgaaagtcatgttacccaacaccggatcaaggcaacagacagtgggcagccaccactctcagccagtgtccggctaca

SEQ ID NO: 802679 - DNA, 98 bp, Homo sapiens
tttcccaatatcgaactgaagaaaggagggaaggatataccagtcactatccacaatttagaggagtatctaagagacctataaaaggcatcaccaag

SEQ ID NO: 802680 - DNA, 120 bp, Homo sapiens
cgaaatgctcaaagaagagactaggtcttcggctgctgctgctgcagacacccaagatgaggcaactttggctttggggattcacgtggtggcggtggaaatttcggaccaggaccagga

SEQ ID NO: 802681 - DNA, 100 bp, Homo sapiens
aactgctggcagagagacagaagcggattgagcagcagaaagaacagaggcgacggctagaagagccccccaggttcgcctaatagtcttggctacttcc

SEQ ID NO: 802682 - DNA, 99 bp, Homo sapiens
tctgtgcagtggcacctgcgcgaagctggccaaagcctgcccagacggctcacctgtgcgggatggaacaaaaggcaggtgacagcagggacatgtctc

SEQ ID NO: 802683 - DNA, 100 bp, Homo sapiens
acaaggccaagagggccaagggcaaaggccgagtaagactttgaccccgacgcaggcttcagtgattgccgcggatcagaagcctgagcactttggctcg

SEQ ID NO: 802684 - DNA, 99 bp, Homo sapiens
ttgtagagagcattggagaaggagtgactacagtgaaaccagtgtttgaaattattctggaatacctggaaacaagagactggcaagaagcatttttta

SEQ ID NO: 802685 - DNA, 100 bp, Homo sapiens
gaacagcagtgtaaatgactcaggccccttcacagatgtagtcactacaaatcttaaattgcgaaatccatcggatagaaaagtgtgtttcaaagtgaag

SEQ ID NO: 802686 - DNA, 100 bp, Homo sapiens
ttggcgtgcaacatggggcttgagaaaggttctggagagtcttggcttctgggaggaagtcagagggattatctcaggatcagagctgataacgggattc

SEQ ID NO: 802687 - DNA, 100 bp, Homo sapiens
cgcatcgtgattatctcgagcaaattaagcactctccgacagttagttaatatgtgcatcaacccagatccagagaagcgaccagacgtcacctatgttt

SEQ ID NO: 802688 - DNA, 98 bp, Homo sapiens
cgcacgccgccttcgccgctggctccgtctgttggggggcgaacacgccgcggtcctcgtcgtggaatgcagacatggagatgactctggagcgagca

SEQ ID NO: 802689 - DNA, 122 bp, Homo sapiens
aggacagcagcattgatcaatcttacagctaacatgttgtacctggaaaacaatgcccagactcaatttagtgagttgtctgggttcatgtctaagcttgttccagctatccagaatgccca

SEQ ID NO: 802690 - DNA, 100 bp, Homo sapiens
ccctgatttggctaggcgcacagcagttatcctaccttgcggatagagaagaacgacttgagaagtgtcactcttttggaggccaaaggcaaggtgaagg

SEQ ID NO: 802691 - DNA, 140 bp, Homo sapiens
gcactgcgggcgcatccctgccccggcgccgtccgtgcccgcgggacctgacagccgggtcagaggagtatgctgctgctgttccgctttgcgtcctcgctacaaacgcctggtggacaacatattccctgaagatccaa

SEQ ID NO: 802692 - DNA, 100 bp, Homo sapiens
ttacctagcttttctgagcctcactttcttggcaattagatgaaccagaggtttatttcactcagaagagtttaaagaacgctgtactcagtgtgctgct

SEQ ID NO: 802693 - DNA, 100 bp, Homo sapiens
gcacatgaccagcttagcttctgtcctaaaggctgaccggttccctgatgtgttacctgcttctgctactgatccaaactgcagaacttctcattcatcc

SEQ ID NO: 802694 - DNA, 98 bp, Homo sapiens
gtacccgccgccgccgttggctggaggttcaaaactggtcaaatcaatggtgatttgctgatataccatgtcttactgactttaaagccatattatgc

SEQ ID NO: 802695 - DNA, 98 bp, Homo sapiens
gcacacagagtgaacagaaaaagaggatacctctgcgatcccgggtcatctccagatgctagggttatgggtctgccatgtgaatctggaggggcagc

SEQ ID NO: 802696 - DNA, 101 bp, Homo sapiens
ctccggcctcgtcctcggcgccgccctgcgtggagccgccgccggccacccggtatggaagctccaaaaggaaagataccagattgatcttgatcacctct

SEQ ID NO: 802697 - DNA, 99 bp, Homo sapiens
tcgacacaaatccattgaactcttttataaattcgttcctttattgccagacaccattcgcttttcacccaagatgatttgatgtcttataaaactctg

SEQ ID NO: 802698 - DNA, 100 bp, Homo sapiens
attgggcaatcaagttggcaaactttatgtttgggatttagaagtagaagatcctcataaagccaattaagtgggcagaccaacatccacctcagcaaaa

SEQ ID NO: 802699 - DNA, 50 bp, Homo sapiens
ctgcctccttcccgccgccccctgggatgcgtttagcccagcccctgctg

SEQ ID NO: 802700 - DNA, 100 bp, Homo sapiens
tggagactctgtccccggactgggagtttgaccgcgttgacgacggctcgcagagacactgcccatctctaagataagaacctggaaaggggactctgtt

SEQ ID NO: 802701 - DNA, 98 bp, Homo sapiens
tcctgtttctatagaaactgggttggaagtcagagctgcacaaagggaaaggttaattggccttggtcctcacagctccaaaaagaaacaggatctcg

SEQ ID NO: 802702 - DNA, 99 bp, Homo sapiens
gctacgccagcggcgtcgagaggaccatcctgggtgctggccctgtgctggagacgcagaccaaactggagcatgcccgcattaaggagcttgaacaga

SEQ ID NO: 802703 - DNA, 98 bp, Homo sapiens
gcagttattggcaggctgccatgacaaccaggcaatgctggatagataccgaattcttatcacaaaggtgtacaacccgagaataagagcaaactcgc

SEQ ID NO: 802704 - DNA, 98 bp, Homo sapiens
acagctagaaggttggctttcacaagtacagtctacaaaaagacctgctagagccattattgccccatacacacaaatccatgtttttaccagtcttc

SEQ ID NO: 802705 - DNA, 98 bp, Homo sapiens
caatatccacaacagtcgcttgaacagattggcacccgaattgccaaagttttggaaaagatggcagaaacggtggacacaagcgaaatggtcaacgg

SEQ ID NO: 802706 - DNA, 99 bp, Homo sapiens
ggtaaccaagaggaagttggaggtgccgacgggacctgaagtgcagacccctaagctgttgcagctaattgcaaaatcccagttaacttcattgagtgg

SEQ ID NO: 802707 - DNA, 100 bp, Homo sapiens
gaaatgtgaatctcaggagagagcagccagagtgcacctgttcttcccggagcctatcagcaaagccattcccaaggctatggctacatgcaccagacca

SEQ ID NO: 802708 - DNA, 98 bp, Homo sapiens
aatgttggagccgtctgcaaagtgtccccggcaagaagggtggcccagttgaaatccttcccttcctctaccttggaagtgcctaccatgcatccaag

SEQ ID NO: 802709 - DNA, 100 bp, Homo sapiens
catcatccagcctggctgcttcaagacaggagtattgtgaggattgagatgactggagtgtgtgtggcctggagagttgctcaataaatatatgttgcct

SEQ ID NO: 802710 - DNA, 100 bp, Homo sapiens
ccggctcctgcgtcgatctccctgtttgacctcagcgcggatgctccggtctttcagggcctgagcctgctgtccgcaggcttgtccaaaaggaaacatc

SEQ ID NO: 802711 - DNA, 99 bp, Homo sapiens
cagatggaagttatcatgaaaaccctgaatagtaatgaaaagagtctcatcgtggaaggcaagagggaaaagaaaaaagtagagaggttgacaatgcaa

SEQ ID NO: 802712 - DNA, 100 bp, Homo sapiens
gcagcctggcctatgtgaaaggcggtctcagtacattcttcgaagcacaggatgccctctcagggcttttttccagacttcaagctcccattccaacagt

SEQ ID NO: 802713 - DNA, 100 bp, Homo sapiens
gcaggtgtgattctttactcagctgagtgtgccacacaggtagccctggacggcattcagtgttttgccacaggtggaattaagaaatctggcaaaaagt

SEQ ID NO: 802714 - DNA, 98 bp, Homo sapiens
aaaactggagagcttcatcaaaaatagtgatagctttgataaaaacctccacagctgttgagaaaaaggagaaacctcttccaagacttaatatccat

SEQ ID NO: 802715 - DNA, 98 bp, Homo sapiens
cagggatgtcctattgctaagtggctcgttttgacaggagccattcaagtagcagacaaagtttcttcagggaagagttcagtgcttgtgcattgcag

SEQ ID NO: 802716 - DNA, 98 bp, Homo sapiens
cgtcatacaatcttggagtcctgcatttggatggcatcttccctggagttcctggaaggaatcaaataaggaaattgagatttggagaagttaaataa

SEQ ID NO: 802717 - DNA, 116 bp, Homo sapiens
cgggatgctgtgaacgagtgtgatattactgaatattgtactggagactctggtcaggtccataattcagcagccaaatctttccctcgaaggtttgttttgcctttaaatgtcag

SEQ ID NO: 802718 - DNA, 100 bp, Homo sapiens
acaagtccagtgacaagcggacttccactcttctttgtcattactgtgacggctatcaaacaggccaagttgatagaatttagtcctctgagggcaaccg

SEQ ID NO: 802719 - DNA, 99 bp, Homo sapiens
ttttggtaatgctgtttctgcttaagttggcaagacactccaagtttggcatgaaaggaaggtgtcttgctgcaggtaactaatgaagaagtggtcaac

SEQ ID NO: 802720 - DNA, 100 bp, Homo sapiens
agggcaaggaaactggccacaaagaagagcaagttagtaccttgtaccaaaacatcaaccttgtggagccaagattaattcagccatatgaacatgttat

SEQ ID NO: 802721 - DNA, 100 bp, Homo sapiens
tggaaaacatgggcagaattaatcataggtcaagcagagaatgttggctaccagggtatttagcctagttggcaagcgagcaatttccacctctgtgtgt

SEQ ID NO: 802722 - DNA, 98 bp, Homo sapiens
ccagaccagcaggaggacaatgttgatgaacagtaccaggaagaggcagaagaggaggaagtggttctgaaagatggaagaattgaaagactaaagtt

SEQ ID NO: 802723 - DNA, 136 bp, Homo sapiens
aaaatggccgccgccgccgccgccgcgccgagcggaggaggaggaggaggcgaggaggagagactggccgttgttcgagagagaactgcaagtatcttcaccctccgacacacttaaaaactcaactagaaattaa

SEQ ID NO: 802724 - DNA, 100 bp, Homo sapiens
cgccgactgtcaatggagctggaaaacatcgtggccaacacggtcttgctgaaagccagggaaggtgaaaggtgtagcagtcactcggcctacacccaca

SEQ ID NO: 802725 - DNA, 101 bp, Homo sapiens
cctggccttcgagtgccctgagaactaccgccgctccgcagccacattttgtacttcagctgctgatatgaaaattagattatttacttcagatcttcagg

SEQ ID NO: 802726 - DNA, 121 bp, Homo sapiens
agaaggcgctgaagggcaaggaaagcagcatagagaatgagatagccgtcctgagaaatgttgctaacaaccacaagcagaatttgatgacggtggcaaaccttggtgtggtgtttggacc

SEQ ID NO: 802727 - DNA, 100 bp, Homo sapiens
aaagtagatcttgtagatgagaattttacagaattaagaggagaaatagcaggacctccagacacaccatatgaaggattttaagagtggacttggtatt

SEQ ID NO: 802728 - DNA, 100 bp, Homo sapiens
gctagaagacttattataaatgaagatctggacagtggcacacagataccgtttattaaaagagctgtggctgctgttcttgccttagctgcatcttgga

SEQ ID NO: 802729 - DNA, 100 bp, Homo sapiens
ggcggaacatctggaggctgggaaatggatgacaattgtgttgtgtaaagagttgtcctctctgtctaaagagttcactacctgcctaacaactgctggg

SEQ ID NO: 802730 - DNA, 100 bp, Homo sapiens
gtataatgaaggtctagtcaaacgcctccacaaggtaaccaaggagcagtgaacagcagctactacagtagtggaagccgtgcatctatgggcgtgaacg

SEQ ID NO: 802731 - DNA, 98 bp, Homo sapiens
atcgcccagctgtacatgatacagggattagaaaatgagtatcaggaagaagggcagcttctgggacagttcacgtatgatcaggatggggagtcgct

SEQ ID NO: 802732 - DNA, 98 bp, Homo sapiens
cgacatcgacctcaagaatcgccgcgggggaccgcccttcgccttcgttgagttcgaggacccgcgctgaataccactagaaacatacctgtaaccag

SEQ ID NO: 802733 - DNA, 100 bp, Homo sapiens
cagctcatcacccagtacgagcgggagaaggcgctgcgcaagcacgctgaggaggaactggcaactttaaagtctcagttaaactcacaatctgtggaga

SEQ ID NO: 802734 - DNA, 100 bp, Homo sapiens
aagcccccaccgaggccccccggcaccgcgcctgctgccgggttgcgctccgtgcacctcttgcgggacttctgccatgggcaagtgatgtggccacccc

SEQ ID NO: 802735 - DNA, 100 bp, Homo sapiens
gccttttcagaagcggctgcgcacggactgctggagatggtggagtccgtcagttacgaaggtgagaatctgatgaaaattctaaaagacattgaaaaca

SEQ ID NO: 802736 - DNA, 100 bp, Homo sapiens
gaaatactctttctgcacagaccacactgcaaaccgtggggaactgtgggtcagagactctccagcatccttggaagtggcctcttcacagtcatctgag

SEQ ID NO: 802737 - DNA, 100 bp, Homo sapiens
ggacttcccgtccgcggcgtggagggtccagcctgatgagtgaagaggctaagcgaggagcacccaacccttggctctttgaggagccagaggagaccag

SEQ ID NO: 802738 - DNA, 100 bp, Homo sapiens
gaaatcctcccagaaggagctggaggccatgggcttgggcaccccttcagaagcgattgaaattgtggaggccctgctggcatccgaagattatggcaaa

SEQ ID NO: 802739 - DNA, 98 bp, Homo sapiens
aatgagtatggcagtgtcagctgtacagccacactaactgtgacagatttcttataggaaagacgtgcaggacacccacacgtacagtgcagaacttg

SEQ ID NO: 802740 - DNA, 100 bp, Homo sapiens
ccatgacaaaggataacaacctgcttggcaagtttgaactcacagacaatgccatccccatcaaatcctggttcagtgaccccagcgacacagcccttct

SEQ ID NO: 802741 - DNA, 100 bp, Homo sapiens
cacacactcaggagctctgtcacaaagctgttcatggaagaggatgttggacttcttacttggagaaccagcagaaatccaccaatgtagtctatcaggc

SEQ ID NO: 802742 - DNA, 100 bp, Homo sapiens
acagctgttccttggccatcccaaagctattctgggggcaacagagcgagaaattaggcaacagctagcagaaaaagctaaagctggagaactaaaagtc

SEQ ID NO: 802743 - DNA, 100 bp, Homo sapiens
aaagactgggcttgtccttgctggtgcatgcgtcgtcggcctctgggcagcagacctctgtgagtgaaagccttcagagggaagctgctaagaagcaggc

SEQ ID NO: 802744 - DNA, 100 bp, Homo sapiens
acagagttcacatccatgtgaaaggccagccaccagttcaggagcacttgggagtgatctaggttggcgtgcagtggtgtgatctcagctcattgcaacc

SEQ ID NO: 802745 - DNA, 100 bp, Homo sapiens
cctgagctggagcgggtgctgcaggcgccgccgccggacgtcggcaacggagaaggtgacttaagagattaaaattaatttggttgctgttggttctgaa

SEQ ID NO: 802746 - DNA, 100 bp, Homo sapiens
cgcctgctcgttcctgacagaatggtcttactgaagtaacacaaagcttaaaaatggaaaatgaagagtttaagaagaggttcagtgatgctacatccaa

SEQ ID NO: 802747 - DNA, 99 bp, Homo sapiens
taagtcgtcgcacgctggactggatttattcagtggtaaaataccatgaagattttgaaaaaacaaaggggagaggctttactcccgtcgtggacgatc

SEQ ID NO: 802748 - DNA, 98 bp, Homo sapiens
gccagtgggctgatagccgggcaaacaccgtttatggattgggattctcctctgagcatcatctttcgaaagatgatgcacgccaactctttgtgcta

SEQ ID NO: 802749 - DNA, 100 bp, Homo sapiens
ctgcgtgaggccgcggagcgccagctcaatgaaatctgtctatggcagtgcagaaattttcccagtcattgcaagatttccagtttgaatgtattggtga

SEQ ID NO: 802750 - DNA, 100 bp, Homo sapiens
ggacatctgctttatatttctctcagaccattcccatcagtgagcattacaggtaagaatgattgatgttggctgatattggagtgctcattcacatgaa

SEQ ID NO: 802751 - DNA, 100 bp, Homo sapiens
agaagaaaaggctgcccagaaggcaaagccagttgctactgctcctattcctggtactccatgggagatgcacttatttacatggaaccagagaaacaag

SEQ ID NO: 802752 - DNA, 100 bp, Homo sapiens
aaattagatctgggtgactgtgatctgctgcgcaaaccatgcaggatgatttactgatggacaaaagcaaaacccagccccagccccagcagcagcagcg

SEQ ID NO: 802753 - DNA, 100 bp, Homo sapiens
tctcctgactcttctatgctgtgttcagtcggagccagtaaagcaattagcctgaggcctgctcagtcgttcctaatgaataaaaatcaagtgccaaagc

SEQ ID NO: 802754 - DNA, 98 bp, Homo sapiens
gcaccgggatcgtgaccgagaccgtgaccgagagcgtgaccgagagcgcgaatatcgtcatcgttagaagatcctgtggtattgtggaaattcccaga

SEQ ID NO: 802755 - DNA, 100 bp, Homo sapiens
tttagttgagcaccggaaagaacgcttatgcatctggatgtgacattgtaatactgggaagcgattttgaaagattacagataatcccaggagctaaaca

SEQ ID NO: 802756 - DNA, 98 bp, Homo sapiens
ccgaggagaagtaccaggaggcgttggccaaggttatacatgggaagctgttgataccaaaaataatgtactttataaaatcaacatctgtggaagtg

SEQ ID NO: 802757 - DNA, 100 bp, Homo sapiens
agcatttccggaccacagttgggagcaagctacaagagccaaatactgatcgacaacttattgaaacttctccagttctacaaaaacttactgagtttga

SEQ ID NO: 802758 - DNA, 100 bp, Homo sapiens
tcaagatgggtacaggtataatgttaatcaacttggtgatgcccatgactggaaccagaacagagatcggcttcaccaccgaccctcggatggcccgctc

SEQ ID NO: 802759 - DNA, 98 bp, Homo sapiens
gtagcacctcttcctcaggaaatgtccaccactgtttctcatcatcaccaaacggtgctcaaaaatgtgataactttgctgaaaaaagacccctcctt

SEQ ID NO: 802760 - DNA, 99 bp, Homo sapiens
aaccctaaaacaattaatccgacggagtcttgctccatcgccaggctggagtgcagtggcgcgatctcgtcccactgctcactgcaacctctgcctccc

SEQ ID NO: 802761 - DNA, 99 bp, Homo sapiens
gtggagctgggaacattcctcataaagcgagtcgtcaaggagttgcaggatcatcttctccacgcccctggccgtcattgcctacttcctcatctggtt

SEQ ID NO: 802762 - DNA, 100 bp, Homo sapiens
gtggagtccgagctgagatccatctgcaccacggtgctggtgtgcaactgaggaacatggctcaagaaactaatcacagccaagtgcctatgctttgttc

SEQ ID NO: 802763 - DNA, 100 bp, Homo sapiens
cacctatagaaagaaatgagcagctttggataatgacgacagcaacccgaagacagggaaatttagcaactagaagccatttgtgtcaaggtaacgtctg

SEQ ID NO: 802764 - DNA, 100 bp, Homo sapiens
gccctgacttacctgaatgcactgcagcattcaattcgtctttctggagtggaagaccacgtgaaaaactttaggtcagtttaggggctggtgcaaagga

SEQ ID NO: 802765 - DNA, 100 bp, Homo sapiens
agagtactccacccccattgatatgtgatattccaggctcagggcagctatagtttcctggtctgtggcgtgatctttggttgtctggcttttaccttct

SEQ ID NO: 802766 - DNA, 100 bp, Homo sapiens
gcagctggaactagcgtgccaaggttctccttactatgacaatgtccgccccctctcttaccctgattcggatgctgtgctgatttgctttgacatcagt

SEQ ID NO: 802767 - DNA, 100 bp, Homo sapiens
tttggagcaagattctcaaggaagcaacaagatcctaaggatcccattgaagataccacgctgcatgtgtccttagtagtcatgtctccttaggctcctc

SEQ ID NO: 802768 - DNA, 99 bp, Homo sapiens
ccagaccctggagcctcagttggaagcagccgatccagcctgcggagcctgtggggcaggtctgctgagaacagacccagtccctgaggaaggagaaga

SEQ ID NO: 802769 - DNA, 99 bp, Homo sapiens
acctccgctcacgagcgcagcacgtggaaaccgtcagtgatttgtgtctgcaacgtgtgtgagagaatggagcctggagcattggtaagcgtcacactg

SEQ ID NO: 802770 - DNA, 100 bp, Homo sapiens
cagtagatggacctcgggaacccagaagtactccaaagattcaggtttactcacgtcatccagcagagaatggaaagtcaaatttcctgaattgctatgt

SEQ ID NO: 802771 - DNA, 98 bp, Homo sapiens
acaagaagcgggccgcatgcctgtgtttccgcagcgagagcgaggaggagggaggtatggaaacattggaacttcaaaaggacatcaaagaagaatca

SEQ ID NO: 802772 - DNA, 99 bp, Homo sapiens
tgatcaccaggataatattctctcattgattaatgtcaatggagtcttttagtcctgctatacagctgcaccttgtacatcaagctccatgtaatgttc

SEQ ID NO: 802773 - DNA, 100 bp, Homo sapiens
tgagctgttactaggacaaccaatatttccaggggatagtggtgtggatcagttggtagaaataatcaaggacagtggtgattatcctcttaccatgcct

SEQ ID NO: 802774 - DNA, 100 bp, Homo sapiens
tcatgtgcagactcagactggccaaaattcaatccctgctttagctcaggtgcttgtgactaaattcactaatttcactggctgtcaaggctgtgttaag

SEQ ID NO: 802775 - DNA, 100 bp, Homo sapiens
ggaggaaaacaacttcgagggcagaaccctctttcccagctgcccgctcctcagcacccgaagattcgcctgtacaacgcagagcaggtcctgagttggg

SEQ ID NO: 802776 - DNA, 100 bp, Homo sapiens
agaagccattagatggtggagaaagatgccttcaattaagttgcagagttctgatggagagatatttgaagttgatgtggaaattgccaaacaatctgtg

SEQ ID NO: 802777 - DNA, 100 bp, Homo sapiens
ctttggagactgggcatccactatatcacagattctgctggccatattctctactccaaagaggatgcaaccaaggggaaatttgcctttaccactgaag

SEQ ID NO: 802778 - DNA, 100 bp, Homo sapiens
cacgtggctgctgccaagggctacattgaggtgatgagctgcatcttcctcccgtgaggctggccgagctccacgctgatctgaagatacaggagaggga

SEQ ID NO: 802779 - DNA, 100 bp, Homo sapiens
tggcagcccagcgggaggatctggagacagccatggagttctacttagaggacctgaaggagaagaaggagaaggtggaggagaaggcaagccggaaaga

SEQ ID NO: 802780 - DNA, 98 bp, Homo sapiens
tccgcttacttgcaatcaagggttcaggtgcaagcagatgctgactcagcctgttccattaagctctcttcaatctaattcccgtgggcctgcgtgta

SEQ ID NO: 802781 - DNA, 100 bp, Homo sapiens
ggacacctacagccccgacgaacatttctgggtgacactcaacaggattcccggtgtgcaactgaggaacatggctcaagaaactaatcacagccaagtg

SEQ ID NO: 802782 - DNA, 99 bp, Homo sapiens
cgaaagagaggcctcccggctcgacaagttcaagcagctgcttgccggccccaacacggaccttgagaaacagcacccaggactatcttccaaagagtt

SEQ ID NO: 802783 - DNA, 100 bp, Homo sapiens
tgaccccagccggcgccgagggcttggaatctcgagcgggaaaagggtctccaactgaattccttgaagagaaaatggcctaccaggaatacccaaatag

SEQ ID NO: 802784 - DNA, 100 bp, Homo sapiens
gtacatatcctgtaagaccagaattgcaaggccaggatgtgatggagctgcttgaagaagatctcacatgccctatttgttgtagtctgtttgatgatcc

SEQ ID NO: 802785 - DNA, 100 bp, Homo sapiens
cagatcttcatgtgtctcttctaagctgaataaagctgttttggaactgtcaggtacctcaaagcgattttgcctaccattttacagtatttgtcttcta

SEQ ID NO: 802786 - DNA, 99 bp, Homo sapiens
ggaagttccctcctttttgcaagaaggagcagtttttgacagatacgaggagatatgaggccccaggattcctggcgaggtcctcctccccttttccag

SEQ ID NO: 802787 - DNA, 99 bp, Homo sapiens
tgatccagaagtccagagctgaggactgcctgtttgcaggttttggaggtgccctgggttaccttttgggtgctatagactgggcccatctggagctgg

SEQ ID NO: 802788 - DNA, 100 bp, Homo sapiens
aaacactggctccaatccaggaacaagccccatgttctgcagcgtggcttcctttggtgccagctctttgtctaggagccctggtattccttgaacatgc

SEQ ID NO: 802789 - DNA, 98 bp, Homo sapiens
actgggctggatggcagctatttgctgagggacagcgagagcgtgccaggcgtgtactgcctatgtgtgctgtaaagctacttcttcttctaatccaa

SEQ ID NO: 802790 - DNA, 100 bp, Homo sapiens
tgattaagatggtccatctactggtcttgtcaggtgcctggggcatgcaaatgtgggtgaccttcgtctcagtgttatgtgccaagaaccttgcaaagaa

SEQ ID NO: 802791 - DNA, 99 bp, Homo sapiens
agaaaacaacaccctggtctggaagtacgcagacgccggccatgtgtgccacctgtgccatccaaactgcacctacggaggtgctgatactcaaagaag

SEQ ID NO: 802792 - DNA, 100 bp, Homo sapiens
attgaagtgtcaaaatccatagatggaaaagatggtgaccttgggaaaggtgttgaaagtgatcgtcgtcatgcggagcctgttcattgatcgaacaata

SEQ ID NO: 802793 - DNA, 98 bp, Homo sapiens
ggaaaatacagcgtgaattagcaaaaagggctgaacagttaattggccttggtcctcacagctccaaaaagaaacaggatctcgataagctctatgag

SEQ ID NO: 802794 - DNA, 100 bp, Homo sapiens
agtggcacccgtcccagacaccatgggaaaggaaatgggaagccaagagggaacacgactggaagatgagctgcagcagaaggccgtggctagtgagatc

SEQ ID NO: 802795 - DNA, 99 bp, Homo sapiens
ggccacaaagtgaccaagaacgtgagcaagcccaggcacagccgacgccgcggggttgtcggggccaaagtggtaacgaacgcccgcagcccgggggct

SEQ ID NO: 802796 - DNA, 100 bp, Homo sapiens
tcgaagtcagccaccatggaggcgcaggcacaagatccagtgccctacctgccaattcgtctggtgttttaagtgccactctccttggcatgaaggtgtt

SEQ ID NO: 802797 - DNA, 98 bp, Homo sapiens
tgcagctgcgatcccaactggatgggtcccgactgctctgttgatctgggttggaatttgcccctgacaaataataaaatgatgagtgatgcaagtga

SEQ ID NO: 802798 - DNA, 98 bp, Homo sapiens
agtcttgaggtcctacatctccgaaagcaagctcttctagaagttggtaaaaatgtctccatcgtatcatcagtccaaaggggatcccactgctaaaa

SEQ ID NO: 802799 - DNA, 100 bp, Homo sapiens
ctcttgcagaacattctgaaaatgtgcatatttcaggagtgtcaactgacttaattcagtgcacaaatgagatgaatgtgaacatcccacagttggcaga

SEQ ID NO: 802800 - DNA, 100 bp, Homo sapiens
atgggtgttgctcttaggatgtatcccctcaagtgtcattccacacatccacaaatctctgattgggaagaaaggacaacagaagactgtctaaaggatg

SEQ ID NO: 802801 - DNA, 100 bp, Homo sapiens
catatctgttttgaggattcattatgaacaaagaagtctcccagttgaatccttggcctgaatatatttacacacgtcttgagatgtataatatactaaa

SEQ ID NO: 802802 - DNA, 98 bp, Homo sapiens
attaaaaggtgtcaagaagctcagaatggtgccaatgaactggctgtgcagaaagcaaaggcagaaatcaccaggctcataaaagaagagctgatccg

SEQ ID NO: 802803 - DNA, 100 bp, Homo sapiens
ctcaaatggtagtcatctggggactaagcaacaggtgtttcaaggaactaattctctggactgcttttcaggaagccttggacgctgcaggtgataaact

SEQ ID NO: 802804 - DNA, 100 bp, Homo sapiens
ggagcctgctgccaatggtgtggacaccgcagtgtgcttgaggagacttcagaaacgagaactggtggccgacatgaaaaagaagatggaggacagtgtg

SEQ ID NO: 802805 - DNA, 100 bp, Homo sapiens
acattgggaattacttggcaaaggatggtaccttgtttgatggtcgaccaatagagtctctgtccctgatagatgccgtaatgcctgatgtagtacaaac

SEQ ID NO: 802806 - DNA, 100 bp, Homo sapiens
agatgctggtggcagggcatgaggacagcaatggttgtatcaactatgaaggcagcctgcttctgcaaagtggtacgatcgaagggactatgtcttcatt

SEQ ID NO: 802807 - DNA, 101 bp, Homo sapiens
cgactggctgctgcggcgcgagggatcaaggtggtcggacattgtgtggtgtaatgaggattggcctggttgcaaaaggcttgctgattaaagatgatatg

SEQ ID NO: 802808 - DNA, 98 bp, Homo sapiens
gtaccaggagaccaggtcaagcccgaccaatacactgaggccctggcccagagggacaagaagcagacagtatgagcatgaccagtggagaaggtact

SEQ ID NO: 802809 - DNA, 100 bp, Homo sapiens
tgagacctcccaaaaggtcccccagcccagaacacgaaaactttctgctctttcctctcagcctggtcctagaccagaaggagcacaggctggatggccg

SEQ ID NO: 802810 - DNA, 100 bp, Homo sapiens
atgatgaagcagagaaaacagcaagcaacagccatcatgaaggaagtccatggaaatggtccctccagctacaaggtgggcaccatggcggagaagtttg

SEQ ID NO: 802811 - DNA, 98 bp, Homo sapiens
gctcaaggccgaagccgagcagaggatctaaatacaagagtggcctattgggatttgaaactggacaacatccttctggatgcagaaggtcactgcaa

SEQ ID NO: 802812 - DNA, 98 bp, Homo sapiens
agccgtaggagccggatcgggggaggggccgggcccaggagcctcagccccgccggcagccctaagggcaaggagatgcgctctgtgctgcggaaggc

SEQ ID NO: 802813 - DNA, 100 bp, Homo sapiens
gaatatataaagcaggtgcacctaggacacattcagctaacgtattttagcaggtggagtgaggttgaagattcctgtgacagcgatgccatagagagaa

SEQ ID NO: 802814 - DNA, 98 bp, Homo sapiens
ccccactctgccccagaatacgaggatgaaaccatgacagtttaccagatccccatacacaaccttcacggcatggtgcaactcccacctgcggaagg

SEQ ID NO: 802815 - DNA, 150 bp, Homo sapiens
cgatatggaacccaagcagtggcgaagggaatcgcaaggctcttccctgaccattttctactgtccctgcgcgagattatctttctcaaggaatagatctttctggaatagaagtgatagaaaatgatctactttttattgcaagagccc

SEQ ID NO: 802816 - DNA, 100 bp, Homo sapiens
agactcgaacttgcccgtgcagctcctcaccatccgtgtggccagcaccaaccctgctgtgcaggcctttgacatctggacctgtgtttcttggtcaccg

SEQ ID NO: 802817 - DNA, 99 bp, Homo sapiens
ccgcggcaggcgaagagagaagaggaaatcctaggagtgcctcatgcatctgaacagagatatgatgctgaattctttaagaaattcagaaatcagaat

SEQ ID NO: 802818 - DNA, 98 bp, Homo sapiens
ggcggctgatttagaaggaggttcaggctacggtgagccgaaggtggagtccacagctgtggtgagcttcttggaggaggcagggtcccgaatgcgca

SEQ ID NO: 802819 - DNA, 99 bp, Homo sapiens
aagcttctctggagagtctcactccccgaggatggccagtgcccccttcactgtgagcagtttaaggaagaaatctctaaacgttttaaatcacatact

SEQ ID NO: 802820 - DNA, 100 bp, Homo sapiens
caagacaagggtcctaaaacaggatcagtaaagaaggaaaaagcagtaaagccagaggaaggagtcagtggatcggtggggaaaatgctgcttaccctgg

SEQ ID NO: 802821 - DNA, 99 bp, Homo sapiens
ggctggtcaatgcatcctacaccaaactgcagggctgtcacatggtgactgaagaacttcattccataacgtttgaaacacagatctgcctctatggcc

SEQ ID NO: 802822 - DNA, 100 bp, Homo sapiens
ctgaaggctacttatagtaataacttcatagatgaacagcatgattcaggaaaaactcattgtatccaacgaacaagaagttttgcgagttcattacaga

SEQ ID NO: 802823 - DNA, 100 bp, Homo sapiens
gctagggtcgccgccactgccgcaggaggcgtgaggagaattcgcacaaccacggggacggtgcagaggacttcaagcagcaggtgccgtataaagagga

SEQ ID NO: 802824 - DNA, 100 bp, Homo sapiens
atgacaagatgcggactggaaaccttccagccaacatgaagaagaaccgtgttttacagatcattccatgtattcctccacctcgtcctggcatgatgcg

SEQ ID NO: 802825 - DNA, 98 bp, Homo sapiens
gcgctgccgccgctctgaggagttaaagctgtcaataccagcaaatatgcagaaagctatcggatccaaacctatgctgaatatatggggagaaaaca

SEQ ID NO: 802826 - DNA, 100 bp, Homo sapiens
gggcgctggtcctgctcggctgcctcctggcctcgctcctgttctcaggacaagcagatggctacgaattcctggagatcctgaaacaggttgcccggga

SEQ ID NO: 802827 - DNA, 98 bp, Homo sapiens
ttagatcattgtaatggcctgccgagaatttgagatgggaagggtttggagaaagccagagccagacgttgcagaccaattatgttgactacttggac

SEQ ID NO: 802828 - DNA, 50 bp, Homo sapiens
tcaggatccactgcaaggaacaacagcatggcacattacacttctgtgga

SEQ ID NO: 802829 - DNA, 99 bp, Homo sapiens
gctagctgaaataacccttgatcctcctcctaattgcaggatagtggccaaagcctccaagaacctcatgtccacgcaaagcttggggattgtatttgg

SEQ ID NO: 802830 - DNA, 101 bp, Homo sapiens
gcacttggaatagtagcaggcggcggcggcggaacgccaggcagggattcaactaatgaaactactgcccattccgatgctggcagcgagcttgaagaaac

SEQ ID NO: 802831 - DNA, 110 bp, Homo sapiens
ctgttactaggacaaccaatatttccaggggatagtggtgtggatcagttggtagaaataatcaagcctcttagcaaatatccggctgtgatcaatgatatttcattctg

SEQ ID NO: 802832 - DNA, 100 bp, Homo sapiens
actcagttcaagtttggctgccatgcttatcgggatactgcacatgagtatcaaaggtgcagaatctgggacaagttgcatgaagagcatatcaatgcag

SEQ ID NO: 802833 - DNA, 98 bp, Homo sapiens
tcgaatgtgggaccccagcccctctccagctcgaaatcctttggacatcagacagtgcaggagaagaatgtgatgcggcagaaggggctgaaaactaa

SEQ ID NO: 802834 - DNA, 99 bp, Homo sapiens
ggggatggacctccagatttccttactggaggaggaagccaagaatctggtgagcgaagccatcgcagctggcatcttcaacgacctgggctccggaag

SEQ ID NO: 802835 - DNA, 100 bp, Homo sapiens
ccaagatgcagttttttgatgctgaggagctcctggtcgatgaagaggatgatgtttttggtgaaggtcagtttaggggctggtgcaaaggatgagttgc

SEQ ID NO: 802836 - DNA, 98 bp, Homo sapiens
tcaagttcacttattgcctatgctgtattccataatatacagaaatctccagagattggttgtgatcgtagccaaaaccttgtggacatttgtagaga

SEQ ID NO: 802837 - DNA, 100 bp, Homo sapiens
gtagctaccatagcctttattattcaattgaaaagcctttgaaattctttcaaactggagccttattggagaggctgcctccattcgaaacattttctca

SEQ ID NO: 802838 - DNA, 100 bp, Homo sapiens
tccccttggattcagacgccgattcgcccagctgtgagtaccagagtgcccactggttccaacagttcttctcagaccacagagtgtcttacacctgaat

SEQ ID NO: 802839 - DNA, 100 bp, Homo sapiens
cttcagctccagctccgctctcttcggctgccccaatccccggcagctctctcagctgttgcagctaattgcaaaatcccagttaacttcattgagtggc

SEQ ID NO: 802840 - DNA, 51 bp, Homo sapiens
gttgtcctcaattgcgtaggaccagaaacccttttccaaagagaaatgaag

SEQ ID NO: 802841 - DNA, 100 bp, Homo sapiens
gcttccgcctggacccagcctcgtgggagccccgcgggtcctgcccaggatgttgcttcagagtgtgaagtcaaatgcatgccaacattccagtttttta

SEQ ID NO: 802842 - DNA, 100 bp, Homo sapiens
cctcgtctcaaaacctggctgctatcagagaagaagggtgtttggggtgtgttttacaaaggtactccaaagattcaggtttactcacgtcatccagcag

SEQ ID NO: 802843 - DNA, 98 bp, Homo sapiens
gcaagactctggagccagtcttgaggtcctacatctccgaaagcaagctcttctagaagttggcacagttggtggatctgaaatctgaactgacagaa

SEQ ID NO: 802844 - DNA, 100 bp, Homo sapiens
ctgaactgggtgctttatatagggcatttgcaagtaaaatcactggcatgttgttggaattatccccagctcagctgcttctccttctagcaagtgagga

SEQ ID NO: 802845 - DNA, 98 bp, Homo sapiens
aagaaacgctcagctcaatacagctatcctgttgataaggatatggagttaagtcatctaagaagtagagaaggatatgagaatttctttgataagct

SEQ ID NO: 802846 - DNA, 100 bp, Homo sapiens
tgcattctccactgccgtctactcggccactccggtcccgacacctagcctgcggagtacctgacaggcttccacaagcggaaggtcgagcgaaagaagg

SEQ ID NO: 802847 - DNA, 98 bp, Homo sapiens
gctgttggatcgtttcatactttacgcttgtgtgataaaactgggtttgtagaagactatgaacctaccaaagctgacagttatagaaagaaagtggt

SEQ ID NO: 802848 - DNA, 100 bp, Homo sapiens
gttcctgtggagcaaagagctgcatcatgaattcaggagcatcgtgtgtgattccagaaacaagtgccattgttcgccaggctataagcctccaaactgc

SEQ ID NO: 802849 - DNA, 98 bp, Homo sapiens
aaaacataaagagagacataaaatgggagaagaagttataccattaagagtgctatcaaagagcatgcaagttgtccccttggacaaacagatcacaa

SEQ ID NO: 802850 - DNA, 100 bp, Homo sapiens
ctggaaactggatgcagcaaggaaataggatttaaccgctctctgcctcccagattgtgttcaattagaccttcaggacctctccaagaagcctccggac

SEQ ID NO: 802851 - DNA, 100 bp, Homo sapiens
ttcatttctggtactccttcttcaatggctactctgcgcaggaaacttgagatggaagcaaagagaaaacaagaagaagaagagagaaagaaaagggaag

SEQ ID NO: 802852 - DNA, 100 bp, Homo sapiens
aagaattacagcagccaacctatgttgccctgagttacataaataggggcaagcattgatgactttatacagtctgtggagcaccagaacatagctttag

SEQ ID NO: 802853 - DNA, 100 bp, Homo sapiens
ggcaataagctgctgttcaggtaccccttccagagaagccaggagcacccggcgtcccagacaaagcctgatccggggatggcctctgcctccaccacaa

SEQ ID NO: 802854 - DNA, 100 bp, Homo sapiens
tcaaaccttgcttctaggagataaaaaggtggccctatgcacccaggtagccctgggcatggagcacctgtccaacaaccgctttgtgcataaggacttg

SEQ ID NO: 802855 - DNA, 100 bp, Homo sapiens
gagcgaggacgacgtggaggcggagtggcgcccggcgaggtagcgccaggcgaggacatggatttgattgacatactttggaggcaagatatagatcttg

SEQ ID NO: 802856 - DNA, 100 bp, Homo sapiens
tgcaagatggcaaatttgcttcagtttttgtgtataagagagaaaatgaagacaaggttaataaagctgccaagacacgttggtcgtcattgcctccgag

SEQ ID NO: 802857 - DNA, 50 bp, Homo sapiens
atgggctttgtcctgcatgtagaaagagaatggatcttggagaatgtctg

SEQ ID NO: 802858 - DNA, 105 bp, Homo sapiens
tctgtcgctcttgtgccctagcaccccgagaaccgtcagtttgagccagatggacatggatttgattgacatactttggaggcaagatatagatcttggagtaag

SEQ ID NO: 802859 - DNA, 113 bp, Homo sapiens
cggcccgaggcgctgctggacctcagcgccaagcgggtagccgagagctgggccttcgagcaggcctctgaagaacacctgaagcagcactacattgacctgaaagaccgacc

SEQ ID NO: 802860 - DNA, 100 bp, Homo sapiens
tgagcagaacataaacaacctcaatgtctccgaagcagatcggaagtgtgaggtgtcagctgacaggggctctggccacagcttgtggggatgacgcgat

SEQ ID NO: 802861 - DNA, 100 bp, Homo sapiens
caaagaatactcattgcagcagccttcctcattatcagaaattaaagattggccaggtgaaacaggagctgtccagaaaggacacagaactactcgccct

SEQ ID NO: 802862 - DNA, 99 bp, Homo sapiens
gcctcccgagaagaagttgaggcgctatgcaaccccattccagctgccattgaagaaatgcgcggtggtgggaaatggtgggattctgaagaagagtgg

SEQ ID NO: 802863 - DNA, 98 bp, Homo sapiens
gacgagactttcaaagatggaatcacaaacggcgcacattggtatgatgtggaagcttctagaattcctctccagagctactctcaagttatatccag

SEQ ID NO: 802864 - DNA, 117 bp, Homo sapiens
ccggtaacgttgctggaccgggacgcacgctcagctgaggaggacccccaaaggacatttgtgaagatatttctgatcatgttgagcaaatccatgccctccttgaaacagagttct

SEQ ID NO: 802865 - DNA, 98 bp, Homo sapiens
tgttctcatcgtccctgccaactttccaagtctggggatggccaggatgctgctggcaaggtgctggaccgctgggccatcatgtctcgagaagagga

SEQ ID NO: 802866 - DNA, 100 bp, Homo sapiens
tggaaggaggagattctgaagataaggaggttattcagcttctcaaggctggaaaagcgaaggaagtttcctacaatgcactagcctcacacataatctc

SEQ ID NO: 802867 - DNA, 100 bp, Homo sapiens
agcaggtgcgctactgcgcgcgcttctcctacctctggctcaagttttcacttatcatctattccaccgtgttctggcatttaaatcaaacggtattgag

SEQ ID NO: 802868 - DNA, 100 bp, Homo sapiens
aggatgctgtagtagcaaatcaggtcaagtctggcaccatctttgacaacttcctcatcaccaacgatgaggcatacgctgaggagtttggcaacgagac

SEQ ID NO: 802869 - DNA, 100 bp, Homo sapiens
acctataaatttaacttcaacaagctggtgatgcccaactacccattcatcaacattcggtcaagtgatggtcagtaggacagaaggtaacattgatgac

SEQ ID NO: 802870 - DNA, 98 bp, Homo sapiens
tgcacttcgcattttggcattgacatttaattttagggtcctttatatagaagggagaccacctaatgatccccatggtatccagagagaagacctca

SEQ ID NO: 802871 - DNA, 98 bp, Homo sapiens
gagagcgttctgggacgtgcacaggcccgtgggccaaggagattaagatcaagttgggaattctcctccagaagccagactcagttggtgaccttgtc

SEQ ID NO: 802872 - DNA, 98 bp, Homo sapiens
gggcaacctgagggagtcttcttatgggcctgagatagacagtcacgactttgtcctcaggatgaacatggtttcatctccagggagttccacaggaa

SEQ ID NO: 802873 - DNA, 100 bp, Homo sapiens
ggatttgtctttctcagcaccttggcgaagccttgggtttctttcttaaaggactgatttttagaactccacatttgagttgtcacaggtagtactgatg

SEQ ID NO: 802874 - DNA, 99 bp, Homo sapiens
ggaacattataagaatttcaagcaggcctgaaggattaacatcaacagggcttttttccagacttcaagctcccattccaacagtaagagcttcttcca

SEQ ID NO: 802875 - DNA, 100 bp, Homo sapiens
aacggatcgctctcgcccaccgcccgaaccgaaagctccaaccatggccatggggctcttccgcgtgtgtctggtggtggtgacggccatcatcaaccac

SEQ ID NO: 802876 - DNA, 98 bp, Homo sapiens
ggaagatgtgacaactaccggaggtggtaataagctgcagtcaacaggaaataaagcagaagacataaaaggaaccgaatgtgttaaaagtactcctg

SEQ ID NO: 802877 - DNA, 100 bp, Homo sapiens
agcttataatccaagctattactcagacctgtggatatctgggctttgggctgtatgatcattgagatggccactggaaatccctatcttcctagtagtt

SEQ ID NO: 802878 - DNA, 100 bp, Homo sapiens
tgagcagtgacaattgctaggcggagacagtgcagggaagagagaccttagaaaggatcaggactggcggggaaacctcaaatgaattctgaaggggaga

SEQ ID NO: 802879 - DNA, 100 bp, Homo sapiens
gaagaagcaagcagccccagggtggaatcttaaaaattaatgaagagcatcggcggggtgccattcaggcttgcagccaatttactggagcagggatgac

SEQ ID NO: 802880 - DNA, 100 bp, Homo sapiens
gaagatgtgggcaacctccctgaagcccaggagaagaatttggatatgtcaagtgaccagatagctgccaatctgcaagcagttattaatgaagtttgta

SEQ ID NO: 802881 - DNA, 100 bp, Homo sapiens
actttgactccgatgagccatggacgctaggaaatgccaaccatgacgagacacagatatttgtggaaaaactttttgatgctgtgaatacaaagagtta

SEQ ID NO: 802882 - DNA, 100 bp, Homo sapiens
tgctctggaaaacctgtatcttctgatgggaagggaactggaatatctagaggaggtacctccaggaaatgtgctaggcttgcattgatgacaatgttga

SEQ ID NO: 802883 - DNA, 100 bp, Homo sapiens
aaactcttcgagatggttcttggtcctgcagcttataatgttccattgccaaagaaatcggatctatttggaaagtcagacccatacctggaattccaca

SEQ ID NO: 802884 - DNA, 98 bp, Homo sapiens
tgcaggccccacgagtgggaggtgctgagccgctcagctctttcagtctcacatggcaacgaaaacaacttgtatgtcttcacaaggatcagatgatg

SEQ ID NO: 802885 - DNA, 98 bp, Homo sapiens
gaagctggccaaagcctgcccagacggctcacctgtgcgggatggaacaaaaggtggcccatcccctgcacccctgcaccccaaacgcagcccgacga

SEQ ID NO: 802886 - DNA, 98 bp, Homo sapiens
gccttcaccgcactcgaccaggaccacagcggcaaggtctccaagtcccagctcaaggagatctgcccaaggagaatccatatgaggatgtggactta

SEQ ID NO: 802887 - DNA, 100 bp, Homo sapiens
aaagaaacaaccaggtcagcttcggacaaggttagcagagattcccaggactccggctctctctgcttctgtttccggtggctgctcatctggttcaaga

SEQ ID NO: 802888 - DNA, 98 bp, Homo sapiens
aattcaagaatgatgaaactgtcctgccctcaagtatgtgttgtatacattggttggctttgtgggttttgtaacccattatgtgctgcctcaagtta

SEQ ID NO: 802889 - DNA, 105 bp, Homo sapiens
tagtgtgctgcagcataagatggaagaacttaaagaaggcctgcggcaaagagatgagcttattgaggctgtattcatcaccaaagaaaaaacttacaccaatgc

SEQ ID NO: 802890 - DNA, 100 bp, Homo sapiens
agaagaagctatggaaactcatctgattccagatatgatgatggaagaggtacgaattggagcaatgttggcttatacacctctggatgagaagagcctt

SEQ ID NO: 802891 - DNA, 98 bp, Homo sapiens
actgatggaaagcattggtgggaatatgtggatcctacagttactctagaattattagatgggtgagaatccttttgaaattcaagaccattctcagg

SEQ ID NO: 802892 - DNA, 100 bp, Homo sapiens
ccggaatatcattgagagattgcagggcctaaggatcattttctcggatgcatcacggctcatcttccggctcagttcctccagtggtgtgcgggccacc

SEQ ID NO: 802893 - DNA, 100 bp, Homo sapiens
acaccaatttctgttgcatatacaccatccttacctgatgatagattgtcagtctcttccaatgatactcaggctggctcacagttggaccaacgcttac

SEQ ID NO: 802894 - DNA, 100 bp, Homo sapiens
cgaaggtctcagagctttacgatgtcacttgggaagcttaaccagctcgaaaaagcagtggaagcagctcacacatttttcgtggctaaccctgagcaca

SEQ ID NO: 802895 - DNA, 99 bp, Homo sapiens
ctgttacttccaagtcatcaccagaaagagccgagactgtctgaagctgggcccacctgctgagggagaagtcgtccaagtcaagtggcccgatggcaa

SEQ ID NO: 802896 - DNA, 99 bp, Homo sapiens
agcagagttcataaatacataacagaggtgtcacgatgggagagcttaatggctgccaaggggtggcactgaatcaacaagacaagcaactcaattgat

SEQ ID NO: 802897 - DNA, 100 bp, Homo sapiens
ctttgtctcctttttcaacaaatggattattgaaactatgccaatgactgagaaagttgaagaattgctgcgtgtcataggtccattttatgaaattgtc

SEQ ID NO: 802898 - DNA, 98 bp, Homo sapiens
attgccttattttttctcatggatgttcttcttcgagtatttgtagaagggagcctccctattaaggaccttgccgtagacagcgcctctcccgtcta

SEQ ID NO: 802899 - DNA, 100 bp, Homo sapiens
tgggtgcggcggcagcggcggcggcgcccgcgggtggtataaaatggcggatttcgaagagttgaggctcaccaaagctcatcgacaaggacacatggtg

SEQ ID NO: 802900 - DNA, 100 bp, Homo sapiens
gggttacgtggaatgtgtttgttatctgcttctatttggaggctggggacctctcaaagactacgtctactttgagaactcctccagcaacccatacctg

SEQ ID NO: 802901 - DNA, 100 bp, Homo sapiens
ggaattgaatgatctggcacgggaccctccagcacagtgttcagcaggtcctgttggagatgataaccattactgggacttccacccccaccacgtgcac

SEQ ID NO: 802902 - DNA, 101 bp, Homo sapiens
agactggcaggagcagattccaaaggcacaggaagaagcttgcagcccagatgaaccaatgacaaatttggaattaaaaatatctgcctccctaaaacaag

SEQ ID NO: 802903 - DNA, 100 bp, Homo sapiens
tgtttgtccttctctgcctgttgcacatcttgtaaaattggacaatggctctttagagagttatctgagtgtttttcgttggaatatacgttgcacattt

SEQ ID NO: 802904 - DNA, 100 bp, Homo sapiens
ccgacaacaggttgtctcagagtgtgtaccatggagcgtcttccgagggatccctgtccccagatactaggtaatttcatctgtgccaaagcctccagag

SEQ ID NO: 802905 - DNA, 100 bp, Homo sapiens
gagagcaagcgtttcagcgcctacaattacagttcacacaaaagatgttggacaatttctacaattttgcttcatcatttgctgtctctcaggcccagat

SEQ ID NO: 802906 - DNA, 100 bp, Homo sapiens
gcagcttcagtagcgcagaggcggcggtggcgagaggtgcggcgaaggaggcagaggcacttatgcttgtcagaatggaacaaaagtgggacttttaaaa

SEQ ID NO: 802907 - DNA, 100 bp, Homo sapiens
gcttctatgaggctgagctctgcccggaccgctgcatccacaggtttttcgttggaatatacgttgcacatttatggcgattctgagtgtgagggcagac

SEQ ID NO: 802908 - DNA, 100 bp, Homo sapiens
gtgatccgcctgcctccgcctcccagtgttgggattataggtgtgagccaccacacccagccactaagatccagggcctggagcaaagagcggatgggga

SEQ ID NO: 802909 - DNA, 100 bp, Homo sapiens
cccatcccatggtggactacctggtgcctctagtgaaaagaacaagaagtcttaccctcaggtcaaaataacggagggcagactttggcagggggtaata

SEQ ID NO: 802910 - DNA, 99 bp, Homo sapiens
tttgtggctgccgtcatcaccatcaccttcaatccgctctactggaatgtggaaggtgggagtcaatcattttgacaagtctcctgaaaggaacagcta

SEQ ID NO: 802911 - DNA, 100 bp, Homo sapiens
aaacctgtcttggaagagaaaccagctgttcctgttccagaaagagcggagtctcctcccccagaaggctcctacccagagattctacccagtgaaactc

SEQ ID NO: 802912 - DNA, 100 bp, Homo sapiens
cgaagaatggaacgaagcttaagtagctacaggggaaaatattctgaggtctcggacagcccgggagacgagccctcggagtccccatacgaaagtgcag

SEQ ID NO: 802913 - DNA, 100 bp, Homo sapiens
aagatttgctcagagagatgatatcatctaacattcaagcaatgatcatcaaagtagcagctttgggaaaaacgtggtcttcgagaaatgcgagttcttg

SEQ ID NO: 802914 - DNA, 100 bp, Homo sapiens
aagaactcacagccttataccagatgcagcacctgcagtaccagcagtttttaatacagggtgtgtggaatgtaccatacatctcccaggcctatgtgat

SEQ ID NO: 802915 - DNA, 98 bp, Homo sapiens
cgaaatccattgtcttccaccgaaagaagaatcttcaggcagccctgaagcagcttcctaggaacaaggtccccaacatggcggtgatgatcaagtcc

SEQ ID NO: 802916 - DNA, 100 bp, Homo sapiens
gctcacctgtgacgatgagccagagacctacgtggcagctgtgaaaaaagccatttccgaaggcggtggaagaagatatccccatagcgaaagaacggac

SEQ ID NO: 802917 - DNA, 100 bp, Homo sapiens
cttcagcttcgactattcctactggtctcatacctcagtgatggcccgctccctctccccacccccggagctggaagaaagggatgtggccgcatactcg

SEQ ID NO: 802918 - DNA, 100 bp, Homo sapiens
actcaaaagtggggggcaggaaagaaaaggttgttgaaagtccagatttttccaaggatgaggactacttaggaaaggttggaatgttaaatggaggccg

SEQ ID NO: 802919 - DNA, 98 bp, Homo sapiens
ttggcccagaggatctcttctaacatccagaagatcacacagtgttttacatgggaataggactctcggctcaaggcgtcaacatgaacagacttcct

SEQ ID NO: 802920 - DNA, 100 bp, Homo sapiens
tgaggctgaaggaatacttgagcccaggaattcaagactagcctgcacaacataaatttaagaagtgcaacatggccaggggctgcctctgctgcttgaa

SEQ ID NO: 802921 - DNA, 98 bp, Homo sapiens
tgcaggatggcgcggccgagtccccgtacggccacccggcggacctctgtgagtgaaagccttcagagggaagctgctaagaagcaggccatgaaaca

SEQ ID NO: 802922 - DNA, 100 bp, Homo sapiens
catcaccaacagaatggagtggaaaacatgatgttgtttgaagttgttaaaatgggcaagagtgctatgcaggcaagaactcccctggagcaggaaattt

SEQ ID NO: 802923 - DNA, 100 bp, Homo sapiens
gcagtgggagtcgaagcgagggtctgaagttcacgactactagaaggggaggggagtggaaaggctctcagtgaaaaagtgaagcctgcctacagttttc

SEQ ID NO: 802924 - DNA, 100 bp, Homo sapiens
agactttatggctaaaaggcttaacccaggcatttggagggtttctcatttggcctgtcttccattaccaagtaaagattcatttttctgggactgagag

SEQ ID NO: 802925 - DNA, 99 bp, Homo sapiens
caaaccgggaaaggagaggatcccggagccggaagcgttgttgacgaccatggacatcatccacgatggatttggattcatgctggcttttggagactt

SEQ ID NO: 802926 - DNA, 98 bp, Homo sapiens
tctccagatgtcactaacattgagcttcagagagacatagagaagcacagtacaggtgttgcatctgtcctcaacctgtgtgaagtcctgctgcacga

SEQ ID NO: 802927 - DNA, 98 bp, Homo sapiens
gggctcttcttggtgtctgtatggttgctggatgttttcactccagaatgcaaattcaaggaatctgtgtttgaaaactactatgtgatctattcttc

SEQ ID NO: 802928 - DNA, 99 bp, Homo sapiens
cttgagctgaacgtcttgcaacagtggccgcacgcataggttcgttccaccagtcataaaccagatgaaatctatggcatgattgaaagactatctcct

SEQ ID NO: 802929 - DNA, 100 bp, Homo sapiens
tcaacaccaaaaagctttctgctagggctacaagagactgtgaaaaggaagttggaaggagctcgatcaccacttaatggagaccagcagaatggtgctt

SEQ ID NO: 802930 - DNA, 99 bp, Homo sapiens
tagttcctctccagctcagccgcgtagggcgtctctggccgagcctctttttgtggaaaacgacagcagcagcagtggcctggaagacgccaccgctaa

SEQ ID NO: 802931 - DNA, 98 bp, Homo sapiens
tttgatttttggaaggatatagttgctgctatacaacacaattataaaatgtcagcttttaaggatgatctcaatgccacccaccaacactgtgtttt

SEQ ID NO: 802932 - DNA, 98 bp, Homo sapiens
agtgccggtcaaaatggaagtgaatccccctaaacaggagcacctgctggcgctaaaagtctgacagcaatgcaagcttcctccgtgctgccagagca

SEQ ID NO: 802933 - DNA, 100 bp, Homo sapiens
atctcatgagactgcagcaaaccacaaagttgctaagttctgtggctcctgatggatctgagaagatggacgtggaggatgaaaatctgtctgattattt

SEQ ID NO: 802934 - DNA, 98 bp, Homo sapiens
catgcagtaggcaactttgcttccaaaagaagttaccaacatttagaatttctacttattctgagctttatagcaggccaaatcgactcttgtctggt

SEQ ID NO: 802935 - DNA, 100 bp, Homo sapiens
atcgaccgcaccatcggcaagggcaacttcgcggtggtcaagcgggccacgcacctcgtcaccaaggccaagagtaaaattagggaacctttcggaattt

SEQ ID NO: 802936 - DNA, 100 bp, Homo sapiens
tcctccaaagccagagcccaagcctaaaaaggcccctgcaaaggaacttagtgatttggcccgtgaccctccagcacaatgttctgcaggtccagttggg

SEQ ID NO: 802937 - DNA, 98 bp, Homo sapiens
ttgcctcagatactattttgaagccacttccggctcctgcgtcgctccggaagcctgcgagttccggaagccttggtaatccagattcggctaggaaa

SEQ ID NO: 802938 - DNA, 100 bp, Homo sapiens
aaaattgagtcctacgctgctgtgaatcacatatcccaactgtcagaggagcagatataaagatgaagcgcagctgtataaagaagagcacctgaggaat

SEQ ID NO: 802939 - DNA, 137 bp, Homo sapiens
gcctacgacaccatggtggaggagcagtacggccagatgtacatcaaggcctccggcagctatgcagggctgacagatgaagagattgatatggccttccagcagtcgggcactgctgccgatgagccttcgtcctt

SEQ ID NO: 802940 - DNA, 111 bp, Homo sapiens
cagatgctggcagttgtggaaactatcaatgcagcaattggagtcactacgtcaccggtgctgccttctctgatccagcacaagctccgggtggataaggcagctgctgca

SEQ ID NO: 802941 - DNA, 100 bp, Homo sapiens
aaataaaaagaagtgttaagaattgcctttgggactctgaaggctgaagaagtgtatgctgacttgtaaagtgaagaagccagtggtgctgcgggtgttc

SEQ ID NO: 802942 - DNA, 100 bp, Homo sapiens
agaaagacaaagatgatgatgaggtttttgagaagaagcaaaaagagatggatgaagctgctacgggaaaagtaatagaacctctgaaagattttcataa

SEQ ID NO: 802943 - DNA, 99 bp, Homo sapiens
tgggaagtctccatggtgaagtataggctgaggctacctgtgaacagtacgcagtgaatgttattggtgaaagacaacaagtgttagtaacagaagaat

SEQ ID NO: 802944 - DNA, 100 bp, Homo sapiens
agtcactggtcccaagaagacctatatcacagatcctgtttcagccccctgtgcgccaccattgcagccaaagaattccttttgatgtagaaactcagag

SEQ ID NO: 802945 - DNA, 100 bp, Homo sapiens
ccctgtccttgcaaaagcagatggaacatgctaaccagcagactggcttctccgactcagctgcggagcttgcagaatacactgccaagattgccctcct

SEQ ID NO: 802946 - DNA, 100 bp, Homo sapiens
tatatgaaattgaaatgagaaaaaaactagaaaagaaaagagaagagatgcatgaaagcaggagacggtttctttagagacaggatttcaccatgttggc

SEQ ID NO: 802947 - DNA, 108 bp, Homo sapiens
gtggaaaggttgaagttcaagagctcagaccctaaaccaaggctaagtcgaaatgtggcccaaccttcttcccctgtgccagcggcatccattgcatcattggtcgct

SEQ ID NO: 802948 - DNA, 100 bp, Homo sapiens
cggcgccgagaatggccgttatgaggaccctaagagatgctcagccagcattgggcagcccccgcttcctgctcccctacccccttcacatggcagtagt

SEQ ID NO: 802949 - DNA, 98 bp, Homo sapiens
tggccttgtgggattggctgtgtgcaatactcctcacgaggactatgatttaatctccaaagaaccaaagccttttgtatttgagggaaaagtacgtg

SEQ ID NO: 802950 - DNA, 100 bp, Homo sapiens
ctgctggtgggtgttccagctggaagtaaccccttccgggagcctagatcctgtgctttactctgaagactcgaatttatcatggcatccagcattgacc

SEQ ID NO: 802951 - DNA, 98 bp, Homo sapiens
ttgctcttgcttttcctcgctggggtgtacgatactgaccgagctttatcattactggaagaatactgcaaaaaattaaggaaaccagaggagcagct

SEQ ID NO: 802952 - DNA, 98 bp, Homo sapiens
caaggagcagatggataggtcctcagcccaggtggtggccgaaatgttattttaacgaggtttctaagcatgaattgaggaacagaagaagcagagca

SEQ ID NO: 802953 - DNA, 100 bp, Homo sapiens
ttttggggctccctcgggcacctccggtaccgctgcagccaccgcggcccccgcggtgtactaatggtcacttgatgtgcgctggctgttttatccacct

SEQ ID NO: 802954 - DNA, 100 bp, Homo sapiens
tgggcctctttgcagtggagctggccggtttcctctcaggagtctccatgttcaacagcacccagagcctcatcttggtcgtttttgatgctcgatgaat

SEQ ID NO: 802955 - DNA, 98 bp, Homo sapiens
cctttttcctcaatgaagttgaggttcaggaaggattcctgagattccaggaggaagtactggcgaagtgctccatgccacagttgaggctattgagg

SEQ ID NO: 802956 - DNA, 100 bp, Homo sapiens
ctactcacagataggaattgaagggtgaggtggctttgaccccgggttgcccggccagcacgaccgaggaggtggctggacagctggaggatgaacggag

SEQ ID NO: 802957 - DNA, 98 bp, Homo sapiens
ggcgatgagctaagacgctgtttcagagcgtttgggtcctctgaggccccttgaccaggagagaagatgactgaggaggaggtggagaccgttctggc

SEQ ID NO: 802958 - DNA, 100 bp, Homo sapiens
acagagaggctggaaaggtcatctcggagactagaggctggataccaaatagcagtggaaaccgattcgttgggcttttgccagctctttttagattgtc

SEQ ID NO: 802959 - DNA, 100 bp, Homo sapiens
gatatagttgacctgcttaaaaaggccaaggtggtatcacggaaaacttgacagaacgatagcagaagaacgcctcaggcaggcagggaagtctggcagt

SEQ ID NO: 802960 - DNA, 98 bp, Homo sapiens
cacctttcggcttctgagacggcggcagcagcggcattcaggtcatagcaaatgacagaagtcccttggtgggcaaaattcactgggagaaaatggtt

SEQ ID NO: 802961 - DNA, 100 bp, Homo sapiens
ggaagaaagaaaacctaaagtatttgccgttggtgattcaaggtactaaggctcgtacgtctgcatcgattatcttacgtggggcaaatgatttcatgtg

SEQ ID NO: 802962 - DNA, 100 bp, Homo sapiens
ttcagctgcagcatggagagatagataaacggacgccacaggtcatcatctggatcatcccattctggttcccgttcaagttcaaaaaagaaataatgta

SEQ ID NO: 802963 - DNA, 99 bp, Homo sapiens
gctgatcacgaacatcgtgaacagcatcgtaggggtcagtgtcctcaccatgcccttctgcttcaaacagatggttggcaatggctgataaatgacact

SEQ ID NO: 802964 - DNA, 100 bp, Homo sapiens
ctggggtacggctacaacttggaagcaccagatcaagatcatgaaaaagaaggaggctgttgaaagcggcaaacgacaaattgagaacactttaaaagag

SEQ ID NO: 802965 - DNA, 98 bp, Homo sapiens
ggctgcctccgctgcctagaccgaagctcaccatggatgatgatatcgccgcgctcgtcgtcgacaacggctccggcatgtgcaaggccggcttcgcg

SEQ ID NO: 802966 - DNA, 98 bp, Homo sapiens
aaacctgagattatttggatacacaacaagttggtgagaccagatgcaaaaaagtttgtacttctaagtctgatctgagatctaatgacttcagcatt

SEQ ID NO: 802967 - DNA, 100 bp, Homo sapiens
tgtactccagttgctggatatccaagcctctcagcttcggagaatggagtcttccatcaatcatatctcacaggattctcaaagttggattggtggaaac

SEQ ID NO: 802968 - DNA, 100 bp, Homo sapiens
agaccaaaaattattggaagatttacaaaagaaaaaaaatgaccttcggtatattgaaatgcagaatcaattctgtttatgggaagagtgacaaatcctg

SEQ ID NO: 802969 - DNA, 98 bp, Homo sapiens
actgcgttttgatgatggagggctactacaggcagaaatactcagtgtcctcagtcacagaaacatcatccagttttatggagtaattcttgaacctc

SEQ ID NO: 802970 - DNA, 100 bp, Homo sapiens
gacagatcaagatcaagaccggcgtggtgaagcgggggaaatttgcagtggtgagaaaatgtataaagaaagattctgggaaagaatttgctgcaaagtt

SEQ ID NO: 802971 - DNA, 100 bp, Homo sapiens
aggaatacaaaagttgtattaagtaaatgggatgaagctctcagttcagagatcaagatgattggtgaaatactttggacgtgacccagccgatggaaga

SEQ ID NO: 802972 - DNA, 99 bp, Homo sapiens
tcaaaagaagatgacagcccgcagagagttaacttctgtttacatggaactcagacatctgcaaatcatgggcctattccctggtggattccagtcaag

SEQ ID NO: 802973 - DNA, 100 bp, Homo sapiens
tcaattggacagtacatctgtggacaaagcagtacctgaaacagaagatgtgcagggtatgtacaagctgtgaggacaacgcagaagccaatgggttttg

SEQ ID NO: 802974 - DNA, 51 bp, Homo sapiens
caagccaatcccaggaggaaaaacgtttctcctggcggcgctggtcctgtc

SEQ ID NO: 802975 - DNA, 100 bp, Homo sapiens
atttatccaacagctcctcccaggtggttagccagcgtttccctcagaacagcatcggtgcagtaggaagtgccatgttcctcagatttatcaatcctgc

SEQ ID NO: 802976 - DNA, 100 bp, Homo sapiens
ccgccgccgcgccgccatcatggacaccagccgtgtgcagcctatcaagctggccagggtaacccgtggctgccatgagtcctgtctggatgaagaggta

SEQ ID NO: 802977 - DNA, 100 bp, Homo sapiens
aaaacagacccatctttggatcttcattcattaagcagtgcagaaacacaggtacaagaatattccacagatgtcctttgatgatacagaaagggagcca

SEQ ID NO: 802978 - DNA, 100 bp, Homo sapiens
ctgcaggtggatcagaactgtgttcgcaattcttacgatgtcttctctttgctacgatgcctttgagtaatggacagatgggccagcctctcaggcctca

SEQ ID NO: 802979 - DNA, 99 bp, Homo sapiens
tgttgttgactaagctgaaggaaactgctgaaaacagcctcaagaaaccagtaacagattgtgttatttcatattctttgaaactggagaaaggagatt

SEQ ID NO: 802980 - DNA, 100 bp, Homo sapiens
ggtgcaggccggagcggcacctacgtcctgatcgacatggttctcaacaagatggccaaagtgtggacgaatgtggaacctcgctctgtggctgtgttcc

SEQ ID NO: 802981 - DNA, 100 bp, Homo sapiens
ccggctttggggtcaagcagattgaaaccaccatcatgggttcgggtcccatagaccccaaagaacttctcaagggcctggacagcttccttaaccgaga

SEQ ID NO: 802982 - DNA, 100 bp, Homo sapiens
tacctgttaccactttcaaaagctggccagctaaactatgtggatccagctactggctatgtggtgctcacacagattgcccacttgcaaagaggtgaat

SEQ ID NO: 802983 - DNA, 98 bp, Homo sapiens
cggctgccgcctgctccccggaaaagggcactcgtctccgtgggtgtggcggagcgcgcggtgcatgatgctgtctttgcaggtgccatgcctacaat

SEQ ID NO: 802984 - DNA, 100 bp, Homo sapiens
cccattatatgttgatgtattaaaagacctgagaacctggtgtactttgaactcaagtaaacaaaagggaagattttctcgttgatactggagactgcac

SEQ ID NO: 802985 - DNA, 100 bp, Homo sapiens
tcatacttggaaatggctgcaggttcagaaagaagttagcggtattcagcaagatgcaggactctctggaagtcacccttcccagcaaacaagaggagga

SEQ ID NO: 802986 - DNA, 100 bp, Homo sapiens
atgacggcactgttagaatctgggactttcttcgttgccatgaggaaagaattctccgagcaattctgtggtgttcttggtcacacatttatggagtttc

SEQ ID NO: 802987 - DNA, 100 bp, Homo sapiens
cttctagtcggacaaaatgcagccgagaactccgctcgttctgtgcgttctcctgtcccagataaaccgagaaaactggtgtacaatagagccatgccct

SEQ ID NO: 802988 - DNA, 100 bp, Homo sapiens
cggcgcgagaagcggcggccgcgtcctcaagccggcacctgagcggcggagacggctgtagcacaagagctgtaggtaaaacttgcctactgatcagtta

SEQ ID NO: 802989 - DNA, 100 bp, Homo sapiens
gtcgactttcctcctcgagaaattgtcacgtatacaaaggaaactcagactccagttatggctcaacccaaagaagcaaacccgctggttcagaaccaac

SEQ ID NO: 802990 - DNA, 100 bp, Homo sapiens
cctgtacagcctgcagaactatgaccacctaagaaaggaggaacagaaaagtactaacattgaagatcttcatgtttctcaggcagtcaacagataatgc

SEQ ID NO: 802991 - DNA, 98 bp, Homo sapiens
gtaggctgcgttgaggatctttgctcttccatccgcctttgatcgtcttcctcttcagccatccaggccggaaggtggtggtcgtacgctgtgaaggc

SEQ ID NO: 802992 - DNA, 100 bp, Homo sapiens
ccgtcagtacgcgaaggatatcggtttcattaaggatgaatgctatcaagtaagacaagtgtttgcccagaaacttcacaaaggcctttcccgtttacgg

SEQ ID NO: 802993 - DNA, 99 bp, Homo sapiens
ttccctcggtctgggcttctctgaggcggcgagagatggtcaggtctggagctcgaccgggccaggcgtgagattcaacattttggggtgaaaatcagc

SEQ ID NO: 802994 - DNA, 100 bp, Homo sapiens
ccgttgccaatggaaccagccggccacaaggaagcaaccagctcatgaacaccctcagaggagatgttaaagtaacccatcttgcaggacgacattgaag

SEQ ID NO: 802995 - DNA, 98 bp, Homo sapiens
agctaatcttcagggggagctgagccacatcatcagacaactacaggcctgctctctggttccagtgcaccaattccagctggacatcactgtgaaaa

SEQ ID NO: 802996 - DNA, 98 bp, Homo sapiens
catgtcgcccatctccgagagccctagctcccctgcctacagcactggtgtgaacccacatccctgcccccagggccacctgcaggacgccgacacct

SEQ ID NO: 802997 - DNA, 99 bp, Homo sapiens
tgggagtcgaagcgagggtctgaagttcacgactactagaaggggaggggagtggaaaggctctcagtgaaaaaggatgtcgtgtcaagatttccaaca

SEQ ID NO: 802998 - DNA, 100 bp, Homo sapiens
tgttctgccctggctgcctcagccctaccagcactggtcatgtctaaaggggtcaccagtcgttggcacaccaagaagctgccccgcaagacccaccgag

SEQ ID NO: 802999 - DNA, 100 bp, Homo sapiens
atattggaattggaatatctggacaggaaggcatgcagggcatgagccagaaggagagctctaagtctgccatgatgtatattcaggagttgaggtcagg

SEQ ID NO: 803000 - DNA, 98 bp, Homo sapiens
ggccactgactcctacttcctctgtatagagcaactgttgaactcagctgcctgtagatgactgtccaagtgcctccaaagtgtacaaagcatcagat

SEQ ID NO: 803001 - DNA, 100 bp, Homo sapiens
ggaagaacccccttcaccttgaagttgacaaaagtgttgaagaactacgtggacggtgctgagaagccgggagtaaatgagcagctgtacaaagccatga

SEQ ID NO: 803002 - DNA, 98 bp, Homo sapiens
gcgggtgacatggaaggggcagtacaagcttacgtctctgctcttcagtacaatcctggttctccaaaaaatgtggaatcctttgcatctatgctgag

SEQ ID NO: 803003 - DNA, 129 bp, Homo sapiens
tcaatacttttcggattaaatctggaaatgaaaatggagagttctacctacgaattcttattgccaagtcccctctggctcccttcacctcatttgtctacaccatcaaggaggaaggcctggttcttc

SEQ ID NO: 803004 - DNA, 100 bp, Homo sapiens
gttgatgaatcaagaggaatgcacatctgtgaagatgctgtaaaaagattgaaagctgcaaaactagatggtggaagacagcaatggagacctgtcctca

SEQ ID NO: 803005 - DNA, 100 bp, Homo sapiens
agtaccgttggttcgtgctggactacaatgcaggactgctctcctactacacgcttaacagagcgttccaaaaagaggactctccagctactttttattg

SEQ ID NO: 803006 - DNA, 100 bp, Homo sapiens
gtggtgtaaagcgcctgtaaaaccagctttgggccagattatgttgtatgtggatggaatgaatggagtaataaaccgcaatgaaaccattcagtggctg

SEQ ID NO: 803007 - DNA, 99 bp, Homo sapiens
attatcgtagcaaggtgctcttctgggacaacgcgtacgagttcaacctcagcgctctgaaaaatgcactcggtgatggaaagagagccactattctga

SEQ ID NO: 803008 - DNA, 98 bp, Homo sapiens
agtatcgggagcaggaaagccagtgttgtggaccctagcacagagccatcagcccacaaagacatgactaccaacgcgggccccttgcacccatactg

SEQ ID NO: 803009 - DNA, 100 bp, Homo sapiens
gtgctcacggccgagcagattctacaacacatggtggaatgtatccgggaggtcaacgaggtcatccaggttaaagcggcaactggggaagaagtatctg

SEQ ID NO: 803010 - DNA, 98 bp, Homo sapiens
atagggctgacgctgctgctgtgtgcggtgctgctgagcttggcctcggcgtcctcggctggcataaccttgacaacagattgccttgaagatagcct

SEQ ID NO: 803011 - DNA, 98 bp, Homo sapiens
tggagcacttcctattccactggattgggaaagaccatggcagctttagcgtcacctccctcactgggcagcatgggggagaagtcagagaactgtgg

SEQ ID NO: 803012 - DNA, 101 bp, Homo sapiens
ccgcctccgagcccgccgccacatcctctgaggtactccaaagattcaggtttactcacgtcatccagcagagaatggaaagtcaaatttcctgaattgct

SEQ ID NO: 803013 - DNA, 100 bp, Homo sapiens
cagctgaaagaaaggtttaaagacaaaaaacatctggataaattctcttcttatcatgtgaaaactgccttctttcacatggagtctcgctctgtctccc

SEQ ID NO: 803014 - DNA, 98 bp, Homo sapiens
gattgactacggcaaagtggccactcaggcgcatattaaatttcctattgactacccctattcaccacctaccttcagattcttgaccaaaatgtggc

SEQ ID NO: 803015 - DNA, 104 bp, Homo sapiens
gttatcttacattcaacccaggacacaagaaactccttcacatctggaagaacttgaagatcctgacattgatgctgccagtgccatgatgcttttgaatactc

SEQ ID NO: 803016 - DNA, 98 bp, Homo sapiens
gatgacgatgatgatgaagaggatgatgatgaagaatctgtccgtttcagatggtaccagggattttaccctgccggctctcagccagtgacatgggc

SEQ ID NO: 803017 - DNA, 75 bp, Homo sapiens
aaaagccccgcctctgccttcggataggtaccggcggacgtcgagaaatgtcaggatcggatggagtgtttcaat

SEQ ID NO: 803018 - DNA, 51 bp, Homo sapiens
aagttctcgtggagtcagacaatgagatcgtcagtatttaaacagatcaca

SEQ ID NO: 803019 - DNA, 100 bp, Homo sapiens
gagttcctgcatgagtatgacatgaccaagatgcccgagtgctacttctactccaagttcggatcgacgagaacgtgctaggagcccagctggacgttga

SEQ ID NO: 803020 - DNA, 99 bp, Homo sapiens
acgaattgaaaaaggaaccccaaaggagtcgattcttaaaaactctgcttctgttggatctagtttgaagcactaagaagaataagacatcagtttgaa

SEQ ID NO: 803021 - DNA, 99 bp, Homo sapiens
agatgtggaaaaatgtttacttcagagaaaggggttgtggaggaatggttgtcagagtttaagcattttctgcattagcaaatatcgacctggctttag

SEQ ID NO: 803022 - DNA, 126 bp, Homo sapiens
ttcagatcttcacagcacagttcctgggaaggtggagccaccagcctctccttggtgtagtcgccgccgccagccgccatgggcaaacagaacagcaagctgcggcccgaggtgctgcaggacctg

SEQ ID NO: 803023 - DNA, 98 bp, Homo sapiens
cgccctggcgggtccggaccaaggtgatgatgaaggaatccaggagacagcagaatcagatggggacacacagtcagagaaaccggggcaacctggag

SEQ ID NO: 803024 - DNA, 100 bp, Homo sapiens
acgcgcttatcagcgctatgagaagtgacttcatggtcatgacgattttcttcaatgtgagcaggcggtttggctatgttgcctttcaaaactatgtccc

SEQ ID NO: 803025 - DNA, 100 bp, Homo sapiens
aaggaaatgcatctttatgtcagaaacacaaagcagcccaaccaaaggctcctctggtgcaagtgtggtagctattgacaacaaaatcgagcaagctatg

SEQ ID NO: 803026 - DNA, 100 bp, Homo sapiens
tgcaggcagcaccggaggcccaggtctccgtgcagcccaacttccagcaggacaagaaagtgcaacagtatacgttaataattcaagctacagacatgga

SEQ ID NO: 803027 - DNA, 100 bp, Homo sapiens
tgaaccagacctggcacccagagcacttcttctgctctcactgcggagaggtgtttggtgcagaagaaactccccaacttttaaatcatttgaagaaaag

SEQ ID NO: 803028 - DNA, 100 bp, Homo sapiens
cggcggggagcacacggagcactgcaggcgccggtgtactaatggtcacttgatgtgcgctggctgttttatccacctactagcagatgcccggctgaag

SEQ ID NO: 803029 - DNA, 99 bp, Homo sapiens
aaggaaaagtattgcaagcaacagtagtcgctgttggatcgggttctaaaggaaaggttctaaatgagaagaaacttcaagaggttgatagtttatgga

SEQ ID NO: 803030 - DNA, 100 bp, Homo sapiens
gaagtctgtctgccattgatagggctggagcagaggtgaagagtagaacaacgcttttcagaaagtgctactatatcggggccacagatgatgcagccac

SEQ ID NO: 803031 - DNA, 100 bp, Homo sapiens
cgtggatgaggctctgcggctggtccaggccttccagtacacagacgagcatggggaaggattgtcaccagacctgcaatctatggagcagattcggaga

SEQ ID NO: 803032 - DNA, 99 bp, Homo sapiens
ggggaggggctggggaactgggtagcagacacaggctgaggatcggcacgggagcatggcagccaacgtctcggattggaaccaaccagatggctgtgt

SEQ ID NO: 803033 - DNA, 99 bp, Homo sapiens
agcctttgtgtccgtgtcccgagaccgcaccacccgcctctgggccccagacagggagactgcattgcttattgatccaaaaaattcctgttcttcatc

SEQ ID NO: 803034 - DNA, 98 bp, Homo sapiens
gcggaccgagcctgacggagccggaggctgggagccgcggcggcctggggaagtgctctctggcgtggtggtcatatcgagtaaggattcagtccaac

SEQ ID NO: 803035 - DNA, 100 bp, Homo sapiens
gaggattcaaatttttcctgttgattctgccattgacactatatctccattgaatcagaaggattctaattctcaggtggatttaagcattcgggttact

SEQ ID NO: 803036 - DNA, 51 bp, Homo sapiens
ttgatggagaaggggcatctggtttctcccactactaagggcagcaaatct

SEQ ID NO: 803037 - DNA, 50 bp, Homo sapiens
tcagctaatgtctacctcgaatcaaaggatcaaaatggtttcaatcccag

SEQ ID NO: 803038 - DNA, 99 bp, Homo sapiens
agtgagcagtacgtgcctgatgtgttttataagggggcagtacccaaaggaaacgctacgaaagaatacatggagagcttgcagctgaagcccggggaa

SEQ ID NO: 803039 - DNA, 100 bp, Homo sapiens
gcagccctggtgtcacctatcagtaaaagtacaagccagctgccatgttgtgagcacataccacatagctccatggagatgcccatgtgactgtgatgaa

SEQ ID NO: 803040 - DNA, 100 bp, Homo sapiens
ctgatcaaacaacacttgttccaaatgaggaagaagcatttgcattggagcctattgatataactgggagaaaactggttgtcctggatgtttgaaaagt

SEQ ID NO: 803041 - DNA, 100 bp, Homo sapiens
agaagagccaaggaataaacatgcaatgaacccaaaagggtgtgccacggaccacaatgtggacaacaccacagagatgctgcaggagtggctggcggct

SEQ ID NO: 803042 - DNA, 100 bp, Homo sapiens
cattcatcaacattcggtcaagtgcaaaatgatgcttcaacacccaggccaggtctctgcctcggaagtgagtgcttctgccatcgtcccctgcctgtcc

SEQ ID NO: 803043 - DNA, 98 bp, Homo sapiens
atggggaaaaacgaactccgtccactaacaaaagatggctacgagggtaacatgttcggtaacggaaggccattggaaatggggcggcgtcacagtcc

SEQ ID NO: 803044 - DNA, 100 bp, Homo sapiens
agaaaggagacccgactgcaactgctggattgctgcaaggctgagggacgagaacgaggatctcatagatcagaacatactggagcctgtaacccgtgca

SEQ ID NO: 803045 - DNA, 100 bp, Homo sapiens
agaagtttacaggccctctattgccaactgttaagaaaattgcctaagaattatgacccaaaagttaccccagatccagaaagatggctgccaatgcgag

SEQ ID NO: 803046 - DNA, 100 bp, Homo sapiens
tcgccttggatgccttttccagtgactccattccactctttgaagtctttcccagggaactccgatgaagtgttccaacaaaatgagcgagtgaaccaag

SEQ ID NO: 803047 - DNA, 100 bp, Homo sapiens
agctcaaaagatctgcagagctcccagggcggacagcagcctcgggtgcaatcctggagccccccagtgaggggaatgaaagctactggttgattttaaa

SEQ ID NO: 803048 - DNA, 100 bp, Homo sapiens
aggaacaggggggaccatggacttcatcagcattcagcagttgatgctgacaagtcggcctacctcatggggctgaactcagctgacctgctcaaggggc

SEQ ID NO: 803049 - DNA, 98 bp, Homo sapiens
tggttcatctggcccctccaaagagtgaatctggaagtgaaagtggagaacaaggcgaaagtggggaggaaggagacagcaatgaggacagcagtgag

SEQ ID NO: 803050 - DNA, 99 bp, Homo sapiens
ttttccactggatatggcgctgctgttaaaactggcaagggcatgcttccaaatctgctccgatgaatggccactgctttgcagaaaatggtccatctc

SEQ ID NO: 803051 - DNA, 100 bp, Homo sapiens
aaggaggttcaccatggagctagcaaaaaagggctttattgtgcctgatcaactttctagcgggagaacgatcatggaggtggtgccagctgaggtgaat

SEQ ID NO: 803052 - DNA, 100 bp, Homo sapiens
agaaaatggctctggtgaaactggcaaataggactttgctataaaacacgtgaccctagggaaacttttgaagttagcggtatagagagtaccaccacca

SEQ ID NO: 803053 - DNA, 99 bp, Homo sapiens
agaaggcggcggctctctggtccgcagcggcaacagtaacgaaaaacagggctcttcgggctcagaatcaggttctgaaaaaaggtgttgtggatgaac

SEQ ID NO: 803054 - DNA, 99 bp, Homo sapiens
gaagacataaatccctgagtgcccgggaggagccttaacaagcgcacggagccctcaaggtattgttgcagcatctggcagtgagactgaggatgagga

SEQ ID NO: 803055 - DNA, 98 bp, Homo sapiens
ctgttgaaagaacccacaggtgcatttcacagcactctgggcgaaaattggatgtgaaaatgaagccagaccgagagtggcagaatttagtgacattt

SEQ ID NO: 803056 - DNA, 100 bp, Homo sapiens
atcgtcctgcgacctcacacagcagctcctgcctcagaccgttctgcagagcacgcccgctcccatggcacagaacatgttcttcaagtatacatggaat

SEQ ID NO: 803057 - DNA, 100 bp, Homo sapiens
gaaaacttttctttggcatgcagattgaagtaacagcatggataggtccagggaaaggaaaacctcttcagcgcaaggtgaaaccacctaagaagcaaga

SEQ ID NO: 803058 - DNA, 98 bp, Homo sapiens
ctgcaagactctggagccagtcttgaggtcctacatctccgaaagcaagctcttctagaagttgttgatttggagcatatgcgaacaataaaacctga

SEQ ID NO: 803059 - DNA, 98 bp, Homo sapiens
tgctctgctgcttctggcctctgggcatcgcagccttctacttgtcccatgaggctgctgatgtgctgttgcaacatggagctaatgtcaatattcaa

SEQ ID NO: 803060 - DNA, 100 bp, Homo sapiens
cgagactgagctggctaagcaggtgctgcagacggagctggagcgaccgagagaggatgaatttttagatgtgatctactggttccgacagatcattgct

SEQ ID NO: 803061 - DNA, 100 bp, Homo sapiens
catgctacgttacggtggttctacaatagctgctggtgttgtcactgaggtggcaatgcagtggtggatggttgtggcaaggcccagaacagcacggagc

SEQ ID NO: 803062 - DNA, 101 bp, Homo sapiens
gccgagtgtttcccgcagccggccggggtccaggtcggaaatgtagccagtggggccgccagaatgtatgacaacatgtccacaatggtgtacataaagga

SEQ ID NO: 803063 - DNA, 100 bp, Homo sapiens
ggctatgaacccagaggtcgtggaggtggccgtggaggcagaggtggcatgggttgagccccatatgggggttggcaggcagcagagaggcccctttcaa

SEQ ID NO: 803064 - DNA, 118 bp, Homo sapiens
tggagattattttgaaaaggctttacaatgggttctaaagcagtcttgcagcccgtgggagtgataccaggagcaacacagagctcagcagcggcgccaaggtgttccctgtttcctc

SEQ ID NO: 803065 - DNA, 100 bp, Homo sapiens
gaccaccaccctcgtgtctgccaccatcttcgacttgagcgaagttttatgcaaggatctatcttgggatcccatggctttctttactgggctctggggc

SEQ ID NO: 803066 - DNA, 98 bp, Homo sapiens
gctcctgaaaggagagacacttgtgaacattcaagtgaagcaaaagcctttcatgattatactccagggattagagctcgatctgcaaggcttcagtg

SEQ ID NO: 803067 - DNA, 100 bp, Homo sapiens
gtccactgaaggttctttccctttaagatatgtgcaggatcaagttgcggcaccttttcagcgacaatcatatcctgattcagcccttcctccacaaagg

SEQ ID NO: 803068 - DNA, 100 bp, Homo sapiens
tactgaaaccctctacaaaggcattagtcctatcttgtaaggttgactacagacaaaaagctgctgcagcaggtagaattcccacaaactatctgagaag

SEQ ID NO: 803069 - DNA, 100 bp, Homo sapiens
agaccggaagcgctccgctgtacctggatcctgctcctctgggttgaaacccgggcgccgccaagatgccggcagcagaacttgctgaattcactgccaa

SEQ ID NO: 803070 - DNA, 98 bp, Homo sapiens
gaacacccagcccatggaggagatcggcctcagcccccgcaaggatggcctttcctaccaggtgggtcatgataactgggtacgtggagttctgttcc

SEQ ID NO: 803071 - DNA, 100 bp, Homo sapiens
aatgacagtggtgaatacaggtgccagagaggtctctcagggcgaagtgaccccatacagctggaaatccacagaggtccccagtctatgtgaggatctc

SEQ ID NO: 803072 - DNA, 100 bp, Homo sapiens
agatagggatatccaggggaagagggtgttgctgtggcccactctctgtctaatctctttacagcaaattgatggtgatggaatttcctgataatgtgtt

SEQ ID NO: 803073 - DNA, 100 bp, Homo sapiens
tcggggacccttcgtgtccggtggttgctgttgcttggcctggtgggcccagtcctcggtgcggcgcggccaggaaatctgaaatagagtactatgctat

SEQ ID NO: 803074 - DNA, 98 bp, Homo sapiens
aggaggcgcggaaccatggccgatgggggcgagggcgaagacgagatccagttcctgcgaactaagactgtgcagtctttgtaactgatgaagagcaa

SEQ ID NO: 803075 - DNA, 100 bp, Homo sapiens
gcaaattccgaccctactgagccgtgagagccgcagtggatggctggaggtgcagggccaggaggaacatgaggtcagaagagatcaattctacagaaat

SEQ ID NO: 803076 - DNA, 100 bp, Homo sapiens
cttcaaggataagggcgacagcaacagctctgccggctggaagattttctaccctagcaaggatggtacgaagattccaatgttcattgtgcataaaaaa

SEQ ID NO: 803077 - DNA, 100 bp, Homo sapiens
gaatggtgccacgtgtggtctgtaagtaggtactccaaagattcaggtttactcacgtcatccagcagagaatggaaagtcaaatttcctgaattgctat

SEQ ID NO: 803078 - DNA, 100 bp, Homo sapiens
ttattcttcaactcagcatgttcctatcttgtagaaaatttcagctgtagcccttggactagaagctgaaataacagaagctgtgtacgatgcattaggg

SEQ ID NO: 803079 - DNA, 100 bp, Homo sapiens
ttggggataaagggatccccgtggatgacactgacaggctaatcaagacaagccctgaactggctgagtcctgcacatggttccctgaatcttatgtgat

SEQ ID NO: 803080 - DNA, 100 bp, Homo sapiens
gcccaaggcgccctgcctgaccaccatggacaccaacgggaagcccctctacatcctcacttacggcaagaagacgtcccgtcaccccctgcaccaggac

SEQ ID NO: 803081 - DNA, 99 bp, Homo sapiens
agcaggcaagctgagatgacggtcaagctggatttcgaggagtgtctcaaggactcaccccgtttccgggaaaccatctgccgtgtgactggtgggatg

SEQ ID NO: 803082 - DNA, 99 bp, Homo sapiens
ccatggcgctcctgctgtgcttcgtgctcctgtgcggagtagtggcaaccatccactgtgggttatgcaagacaaatcattaagaaggaaggctgggga

SEQ ID NO: 803083 - DNA, 98 bp, Homo sapiens
ctcgctggccagacatacttggctccaacaaaagaatcctctgaagaggagtatgactctggagttgaagaagaaggatggccccgccaagcagatgc

SEQ ID NO: 803084 - DNA, 100 bp, Homo sapiens
ctagaaatgactggaaagtttcaagaggcataagatacagggatacccacccaccatcccagggtctacaacatccacagccggaccgtcacccgctatc

SEQ ID NO: 803085 - DNA, 116 bp, Homo sapiens
atcagatcatcaaggacttggcctccatggtgtcagagcaaggagaagctgttgtacacctccagcatgagagccaaatacctcgccacgagccagcctcgccctgactccagcgg

SEQ ID NO: 803086 - DNA, 100 bp, Homo sapiens
ttgcttctgcaggaagcctttttggtggcatggtcctcaagaagttcctaaaaggctggcagtgatggtgaaagcataggaaactgccccttttcccaga

SEQ ID NO: 803087 - DNA, 99 bp, Homo sapiens
taaagaccggaagctgagtttttatccgtacattttgaccaatttaaagaagcattaatactcatcttgtccagaactctgtcaaatgaagaacacttt

SEQ ID NO: 803088 - DNA, 99 bp, Homo sapiens
gagccgtctgcaaagtgtccccggcaagaagaccactaaggcttttcttcctacgatgctggagattaatcatggtcatattgtgacagttgcaagttc

SEQ ID NO: 803089 - DNA, 100 bp, Homo sapiens
aagattgacagtcgatgaagacctcagtgatattgaaagggctgtttatctgctcaggaagtgggaaaactcttgcctttgccatcccaatgattcatgc

SEQ ID NO: 803090 - DNA, 100 bp, Homo sapiens
tttagggcaaggtatcatctggtggataaagatcatgacagctttctgaaacaaagactcattttgaagatgtttaacaaatcatttggaacaccctttg

SEQ ID NO: 803091 - DNA, 100 bp, Homo sapiens
ggaaaaggatctgcttgcagaatagtttgtactcagccaagaagaattagtgccatttcagaggatttgttggtattgaggaaaacggtgaaatcctttt

SEQ ID NO: 803092 - DNA, 100 bp, Homo sapiens
aacccagcctgtttcacttcttgcatatagcactttctacattgtgggtttaatattatcaatgcagataccttttgtgggattccagccaatcagaaca

SEQ ID NO: 803093 - DNA, 100 bp, Homo sapiens
atatgatccatcttagtgaagaattaggatacaggtactctgtggatatccccttggacaaaactgtcgtcaataaggatgtcttcagagatcctgctct

SEQ ID NO: 803094 - DNA, 100 bp, Homo sapiens
caaacccaaagatccccgttcctggagattctgattgagatgcctgaggaaacccagacccaagaccaaccgatggaggaggaggaggttgagacgttcg

SEQ ID NO: 803095 - DNA, 100 bp, Homo sapiens
agaggtgttgcagaacctcggccccaaggacaagggttcccagcaccatgagggcctggatcttctttctcctttgcctggccgggagggccttggcagc

SEQ ID NO: 803096 - DNA, 99 bp, Homo sapiens
tccagggagtgctctgttcacggctccatcgctgttagttcttgggtgtctctggggagtccctgggccagaccttcctccagactccagcccacctct

SEQ ID NO: 803097 - DNA, 100 bp, Homo sapiens
cagagaacccctccgtctatgtgcctggccctggccaacgtcaacattgggagcctcatctgcaatgtaggggccggtggacctgctccagcagctggtg

SEQ ID NO: 803098 - DNA, 99 bp, Homo sapiens
agacctaaagccacagtcttcaagagcccacggacaccacctcaacgctccaaaaggaattcttcatttgtctcctgatgtttatcaagagatggaagc

SEQ ID NO: 803099 - DNA, 100 bp, Homo sapiens
tcctacatccatgagaattacctgcagctcttcgagtttgtggggaagatgctggggaaggctgtgtatgaggacaacctccgtgacaaactccgcccca

SEQ ID NO: 803100 - DNA, 128 bp, Homo sapiens
ttcaaccacagacattctcaaggaaacacaagagaaattctatggcctaccatatgttccaaatactagatcatgatgcagccgtccttttggatttctttttaataatgtgtgacccttcacctttg

SEQ ID NO: 803101 - DNA, 98 bp, Homo sapiens
tgggactcctgtctacagagaaaaagaagatatgtatgacgagattattgagttaaagaaggacgccaggaaagcatgtgcagatgcaactctctctc

SEQ ID NO: 803102 - DNA, 139 bp, Homo sapiens
cgacttcggtttcagttggagttggaatttgtgcaatgtttagccaacccaaattaccttaattgtgatctttagacagtgactgagtatggatcatttgaacgaggcaactcaggggaaagaacattcagaaatgtct

SEQ ID NO: 803103 - DNA, 100 bp, Homo sapiens
cagaacttgaagctaatttaccttggtaaaccagacttgaatacaacattgccaattagacaaacagcatcaattttcaaacaaccggtaaccaaagtca

SEQ ID NO: 803104 - DNA, 100 bp, Homo sapiens
gacaatagcgaacatgctgtgtgggctcagccgggagacccctggagaggcggagctcccctgaacagcagctgcagcagccatggccccgccctgggtg

SEQ ID NO: 803105 - DNA, 98 bp, Homo sapiens
aacctgccgtttacctctaggaggatttgctgagctcatggaaaacgcccactcctggatcttcacattgaactcaatggctacatgtatgattggaa

SEQ ID NO: 803106 - DNA, 100 bp, Homo sapiens
gtccagaactctgtcaaatgaagaacactttcaagaaccagacctagaggatcaagacataatgggagcatttttagacaagccaaagatggaaaagcat

SEQ ID NO: 803107 - DNA, 100 bp, Homo sapiens
aagcttaggatattttgttggtgtggacatgaatttctagaagtggatgaatacccagaacatattaaaaacttggtgcagaaagagagagagttggaag

SEQ ID NO: 803108 - DNA, 98 bp, Homo sapiens
ttggtcaccttcttggccattccctcggcggtcgtcactggcagggcctcctcgagctccacggacatggaccatcagcacgtgcccatcgacatcca

SEQ ID NO: 803109 - DNA, 99 bp, Homo sapiens
tcctgatcaagatgagcccccttttaaatcagcttatagttcttttgtaaatctctttcgttttaacaaagcctaaatgcgatggccaggtattactga

SEQ ID NO: 803110 - DNA, 103 bp, Homo sapiens
tttgaagaactaggacagaggctgcagcattatgccaagatagcagctgacttcagaaataaggaggaccagtatgatcatttggatgctgctgacatgacaa

SEQ ID NO: 803111 - DNA, 98 bp, Homo sapiens
ccaagcttaacttttccaatgtggaatcctgggccttcattggtttctgctttgggacaaccatacatctaattccttaaagtagttttatatgtaaa

SEQ ID NO: 803112 - DNA, 99 bp, Homo sapiens
gctcgctgggagagaggtacctctccttttccctctccctttccctaagtttgctaatccagactttacacaacctatctcagaagttgtagatgaagt

SEQ ID NO: 803113 - DNA, 98 bp, Homo sapiens
cctcctgagcaaaggcagagtatcctgattttaaaggaacaaatacagaaatccactggagcaccttgatagttcaactagagagaaattgagaagaa

SEQ ID NO: 803114 - DNA, 131 bp, Homo sapiens
tgggttgacctgaccatggacgacattcgaaggatggaagaagagacgaagagacagctggatgaagttgaaatcacaaagattagacacctttttagataggtgttcttcagcaccactgacaacacggt

SEQ ID NO: 803115 - DNA, 98 bp, Homo sapiens
ggaggaagcaatacatccagtatgagtattctaccttgtaaatactgttatttgtatatactgtaaatgatgacatcggtgggcactaaccgagcccg

SEQ ID NO: 803116 - DNA, 100 bp, Homo sapiens
agccaccccagccagtggaaccaaggtgggagacctacctgatgcagatattaaacctccagaaaatgtactgtttgtgtgtaaattgaacccagtgacc

SEQ ID NO: 803117 - DNA, 100 bp, Homo sapiens
caaaattctggggacgctgggaacactgaatcaacatgggcaatgagaacagcacctcggacaaccagaaagaagattggcccatgcacaagctggaatg

SEQ ID NO: 803118 - DNA, 100 bp, Homo sapiens
aggaaagcgatggaggagctgagcgctgatgaggtgtttgctgactagcactttggagagtgtatgcttatctgccatgtccataacagaacgaactgtg

SEQ ID NO: 803119 - DNA, 99 bp, Homo sapiens
tggctgtgggtattgctgcggctggtgcgtcgtcgctctagaatctaggtcaacctattaagatacgtttccaggaatctgaagaacgaccaaaattat

SEQ ID NO: 803120 - DNA, 100 bp, Homo sapiens
gcctctgaccctttttttatatcgcggcgacggcgggctgtcgtcacgacgacgtgcggacgcagcggcgggggcgctctccctgcatgtcctatccagg

SEQ ID NO: 803121 - DNA, 100 bp, Homo sapiens
gtcactggctatgtgacgctgctggaaaatgccaacgtcagtcagctctggaactctaatgatccaggacaaagaagttaccctggagtatgtatcaagc

SEQ ID NO: 803122 - DNA, 100 bp, Homo sapiens
atgtcgtcagtaatgcctggaatgatgatgtctcatatgtctcaggcttccatgcagcctgccttaccgttgaagtctgagcgggaattggacaagataa

SEQ ID NO: 803123 - DNA, 99 bp, Homo sapiens
cagggaagcggaggagcctggcggccaccccctcttcctcacttccctgtactctcatcgctctcggcctccgacacgattacaggctgtgccagccct

SEQ ID NO: 803124 - DNA, 100 bp, Homo sapiens
aaagaaggagggtcctctcagtgattaagatcactggggtgatcctgctggctgttggagtctggggcaaacttactctgggcacctatatctcccttat

SEQ ID NO: 803125 - DNA, 98 bp, Homo sapiens
atctctgccccatccaagacagctgaacctttgaaattcccaaagaagagaggtcccaaacctggcagcaaggattttgacacttcatgacatgtcat

SEQ ID NO: 803126 - DNA, 100 bp, Homo sapiens
acttttgctcacgaagttggacataactttggatccccactctattaccaggttttaaacttcgccatgatcgtgtcttctgcactcatgatatggaaag

SEQ ID NO: 803127 - DNA, 98 bp, Homo sapiens
taactaatcctgaggacttcatccggtcaccatctacctattcttcaaatggaggcgtctaaactggatccagtgggcttccctcctgactttatttt

SEQ ID NO: 803128 - DNA, 100 bp, Homo sapiens
ctcagactgtgcttcttgtgcaagtaatcagtctttgacaagtgatgagaagctgtcggagcttcccaagaaaagatgttggtttaaagcgattttttcc

SEQ ID NO: 803129 - DNA, 100 bp, Homo sapiens
ccatgagtgaagacttccttctggatgctttgtctgaggacttctctggtccacaaaatgcttcatctcttcttgtcaaaattcccaaaaatgatcccct

SEQ ID NO: 803130 - DNA, 111 bp, Homo sapiens
agactgtagcagccgagaacctcggcatcaccagtggcttcgtgaagcccaagctggaggcggatttccctgactgaagaccatgttgcaggcccacagctgcctacagaa

SEQ ID NO: 803131 - DNA, 100 bp, Homo sapiens
caaatggagttttcagatgtgctgcatgttaaatggccaagaggtgaggcttactattcactatgaaaatgggttcaccatctcaagggaaaatggaggc

SEQ ID NO: 803132 - DNA, 100 bp, Homo sapiens
aagtgcttttgctggcatcggctttggaaatgctggtgttcatctgtgatcttctgtctacatggtggtctctcgccatctatagatacactggatcata

SEQ ID NO: 803133 - DNA, 134 bp, Homo sapiens
aaggtctcagatgaagcggtgaaaaaagattcagagttggataagcacttggaatcacgggttgaaggtccactggctattctgaggtgatagttgtcgttggaggatgtgagcgagttggaggatttaatctt

SEQ ID NO: 803134 - DNA, 98 bp, Homo sapiens
ccaggattttattcccaacgcatggcagatatgaagcaacagcatgtcatagaaaccttgattggcaaaaagcaacagatatctcttgcaacacaaat

SEQ ID NO: 803135 - DNA, 100 bp, Homo sapiens
accgggacctgctcctggacccggcctgggagaagcagcagagaaaggtaaatttggaaggcaaagccagccctctgtcacttctacaaatggcctcccc

SEQ ID NO: 803136 - DNA, 99 bp, Homo sapiens
ttcactcgagagatgaggacactgaaattcagagaggggaagtgatttgcctcagcttgtactgtttaagggaaaccacaggctccgagagtgatgggg

SEQ ID NO: 803137 - DNA, 100 bp, Homo sapiens
gttgaagtcttggcctcggaggatgcagcctttggactcaagaagcctggaatggtcccccctccgccgggagaagaaagccagacggtcatccttccac

SEQ ID NO: 803138 - DNA, 100 bp, Homo sapiens
cggaaggggtcccgaagccccctgcaggaactctacaacccaatccaggttgaacaaattgaagcagggacaccaggccgactcagagtagtagctcagt

SEQ ID NO: 803139 - DNA, 100 bp, Homo sapiens
atgctttgctctgtggacccgtgagcaagcataagctgccaaaccaaggctcaaactgctttttctgcaaaccctgccaatccagcaattttgtcagaag

SEQ ID NO: 803140 - DNA, 98 bp, Homo sapiens
acagcctcgctggaggcagtttctggcgcatattaaatttcctattgactacccctattcaccacctaccttcagattcttgaccaaaatgtggcacc

SEQ ID NO: 803141 - DNA, 98 bp, Homo sapiens
atcgagctgagcaggcggaggccgacaagaaggcggcggaagacaggagcaagcagggtaatggcagatgagttaaccaactcaagagcagctttaca

SEQ ID NO: 803142 - DNA, 100 bp, Homo sapiens
taaaaggccactgactcctacttcctctgtatagagcaactgttgaactcagctgcctgtagtgttcgactacagttatagagattacattctgtcctgg

SEQ ID NO: 803143 - DNA, 98 bp, Homo sapiens
tacttgggatcccccagttccaaagtgtcttaaaggtttccaatacttatctacaggaatcgccatgaccccagctctgagggaggcaacagcaaagg

SEQ ID NO: 803144 - DNA, 99 bp, Homo sapiens
aaactccagcgagatccgggccgtgaacgaaagcagtgacggaggagcttgtaccaccgcatcaacaacagcaacttgtgattggcggtgaccggatat

SEQ ID NO: 803145 - DNA, 125 bp, Homo sapiens
tggatttcatagccagcaaaggcgtcaaactggtgtccatcggagccgaagtctcgctctgtcgtccaggctggagtccaatgctgcgatcttggatcactgcaacctctgcctgctgggtttaa

SEQ ID NO: 803146 - DNA, 99 bp, Homo sapiens
tcggagattggctgcctcatccgcttctatgcaggagttggtccaggtagcaatgatgagacccttttatctgctgttgccagtgctttgcacacaagc

SEQ ID NO: 803147 - DNA, 100 bp, Homo sapiens
cggatcaggagccgccgccgccatatcaggtgatgggcagaatctgtttacgaaagacgtgacagtgatcgagggagaggttgcgaccatcagttgccaa

SEQ ID NO: 803148 - DNA, 100 bp, Homo sapiens
cgcggccggccagccgaagatggtggcggctactcctcctgaaatcagcctgagcctgagtaccgctaaggctttaatcacgggtcccgagagccctaag

SEQ ID NO: 803149 - DNA, 100 bp, Homo sapiens
gggagacgctgctgcagctccgggacacctggggccgccgaggcaaaggtactccaaagattcaggtttactcacgtcatccagcagagaatggaaagtc

SEQ ID NO: 803150 - DNA, 100 bp, Homo sapiens
gaactccaacatatgatgaaaaccccatgaagacctacaacaagaaaggggcctcccgaaggaaagaccacctgaaggaccaccagaatgggtccatggc

SEQ ID NO: 803151 - DNA, 98 bp, Homo sapiens
aggccatccaggtgctgcggttccacctgctggagctggagaagttcccgaggagagatggatgccgcgtccccttcgcagcgacgagacttccctgc

SEQ ID NO: 803152 - DNA, 100 bp, Homo sapiens
agaaatggaaattgacagaattctctttgaaattacagcagaaaggatctatgtttatgaaaataaaaaggaagcattgcaagctgtcaagatgatcaaa

SEQ ID NO: 803153 - DNA, 98 bp, Homo sapiens
tttgtctctgatgagctgagaaacaaagccacccagccaatgaagaatccagactccaaaatgatgcaaatcaacctgactggatttttgaatggaaa

SEQ ID NO: 803154 - DNA, 100 bp, Homo sapiens
cgatggcctactggggataacattcatgcagaacatcaggctggacgtaaagaaagaagtgatgcactcaattctgcaatagataaaatgaccaagaaga

SEQ ID NO: 803155 - DNA, 98 bp, Homo sapiens
gctcagccttggatgttctttctcagatactagagctggccacactgcaggacattgggaaggaaagaactggcgggggcacacagaaccaataagcc

SEQ ID NO: 803156 - DNA, 98 bp, Homo sapiens
aattcagctttttgtgctgccagcaagaaatgatcagtagcaccagtgtttatgctcatggggcattcagaatgggaccacaaacgagggccaagagg

SEQ ID NO: 803157 - DNA, 100 bp, Homo sapiens
aacccgaggatttgtctgccgtcacgatggagcggtttgaacctcagattaatgcggaggttcatggctcagttccacgaaaagatctaccagatgctga

SEQ ID NO: 803158 - DNA, 98 bp, Homo sapiens
cttaaaggactgatttttagaactccacatttgagagtgcagcagctgccccgagccccgtgcttggcaacattccccccaacgatgggatgccggga

SEQ ID NO: 803159 - DNA, 100 bp, Homo sapiens
cagcccaggtggttggcgtgcttaagattcagggaagcagaaagagtgttttggaaggaatcatagccttcttcagtgcactagataagcagcacaatga

SEQ ID NO: 803160 - DNA, 100 bp, Homo sapiens
ttacagacccagttatcaagaaccgagagctcttcatttctgattacgttgacacttaccatgctgctgcccttaggtcaacaggacatactgctgtggc

SEQ ID NO: 803161 - DNA, 128 bp, Homo sapiens
gtctcaatatctgtcttcggtggactccttcggcagtccacccaccgccgccgcctcccaggaaaacctcacagcacgggtagctctgaacggattcagctctcaggaatgtataatgtccgtaaagg

SEQ ID NO: 803162 - DNA, 100 bp, Homo sapiens
ggctgagatgggaggactgcttgaggccaagagtttgagaccagcctggtcaatatggtgctggagaatctggtaaaagcaccattgtgaagcagatgag

SEQ ID NO: 803163 - DNA, 98 bp, Homo sapiens
gacagaaatcacctatgtttacagcgacagagttatgcccagccaagtcttcagtatatccaggggcaacagattttcacagctcatccacaaggagt

SEQ ID NO: 803164 - DNA, 100 bp, Homo sapiens
aaggcactgctttttcatgacgcttggattccttagcaccaccacagctcagccagaacagaaggcctcgaatctcattggcacataccgccatgttgac

SEQ ID NO: 803165 - DNA, 100 bp, Homo sapiens
acttgagtttcaaacactaaagtttctgaaacctccatctaatgagtttaaaataacctgggtatcttgtggtctgaaagagaagaaattgaaactgcac

SEQ ID NO: 803166 - DNA, 132 bp, Homo sapiens
ttgacttccacaaatgcagaagtaagaggatttatagatcagaatctcagtccaacaaaaggtgactattatatggttaaaaagattttggaggaaaacagttcaggtgacttgaacataaattgcgtagat

SEQ ID NO: 803167 - DNA, 100 bp, Homo sapiens
aattcctcaatgactgccctctaaaggaagaggtctcctctgagcctccggcctccataagacccaaaacagatgacacctcttcccagtcccccgcgcc

SEQ ID NO: 803168 - DNA, 104 bp, Homo sapiens
ggctacatgatgtgtgatgacatcctcattgatgttaatgaatggtgctatacttgaattttctaaggtgtcattagaacccaaagattggatcttctgagaac

SEQ ID NO: 803169 - DNA, 100 bp, Homo sapiens
ctgacacttggcatgacagtgaggggtggtgcacttaagaaaggaccaaatgccaaagcattgcaagtcatgaagcagacattaccctatagtgtggcag

SEQ ID NO: 803170 - DNA, 99 bp, Homo sapiens
ggaaagccagaagaaactcaactggtgtcgagaagtccggaagcttgtggcgctgaaaacgaacggctgtggaaccctactaatattggatccagatga

SEQ ID NO: 803171 - DNA, 100 bp, Homo sapiens
cagcgacctcttttctgaacaggaagagctaaggagcaaatccaagatctgtgccaatgtgttttgtggagccggccgggaatgtgcagtcacagagaaa

SEQ ID NO: 803172 - DNA, 50 bp, Homo sapiens
tgttactccctagcagtgtggtaaggttcacctaaggatcatgaacgtaa

SEQ ID NO: 803173 - DNA, 100 bp, Homo sapiens
ttctgcttaattccctttccttaggttcccgtgtcagtggctatgatgacacctcaagttatcactccccagcaaatgcagcagatcctccagcaacaag

SEQ ID NO: 803174 - DNA, 100 bp, Homo sapiens
atgaattggctctagtcaccattgttaaaactctgggagaaagaatatttgccctggaagagccctatgagtttgtctctctggaatggctgcaaaagtg

SEQ ID NO: 803175 - DNA, 100 bp, Homo sapiens
tcaggagttcattgcaaatctgcaaggggtaaatgagggtgttgatttctccaaggatctgctgaaagaacttagtgatttggcccgtgaccctccagca

SEQ ID NO: 803176 - DNA, 75 bp, Homo sapiens
tgatgtggaggttaacagctatctttctacatatgtagagtgtgtcggtcagaaggaacacctgagaaaccgctt

SEQ ID NO: 803177 - DNA, 100 bp, Homo sapiens
gtgatgagttcccaatgattttaattggtaataaagcagatctggatcatcaaagacaggctgaagggtatgtgattggcagctgtattaaacacattcc

SEQ ID NO: 803178 - DNA, 100 bp, Homo sapiens
ccccatgggccggacatctactgggtcagcttcatcctcggcggcggtggccgctagctccaaggaagggggtcctgatgacaacttaattgaaggtgga

SEQ ID NO: 803179 - DNA, 98 bp, Homo sapiens
ttaattccaaaccggatgagtggtgaatgccaatccccacactgccctgggactagtgcacctttctgagaaaagtctacagcattctttctctgcag

SEQ ID NO: 803180 - DNA, 99 bp, Homo sapiens
gaggatgatgctgactttgatgaagattcgtcttctggatgtctaaaagcctcaactaatcagggtgccatagatgtttatgtcagccaactggggaaa

SEQ ID NO: 803181 - DNA, 100 bp, Homo sapiens
actaccggggtgagaactcgtggttctccactcaggttgacactgtggccaccaaggtgaagagagagcaggagattcggatgggtcagatggctatggg

SEQ ID NO: 803182 - DNA, 100 bp, Homo sapiens
agaagcgactttggtgagactctggacagagcgggatgccaccagcttgtccaaagggaagttccaggagctcctggtgggcatcgttgtggagaatgac

SEQ ID NO: 803183 - DNA, 98 bp, Homo sapiens
cagcagtagctatggcagtggcagaagattttaattagtcttgccacttgcctagtgaggcttttccgaacctggaaggagacgtctagaaatcccaa

SEQ ID NO: 803184 - DNA, 98 bp, Homo sapiens
tgggaagccaagcagatacaagtcttgatagactttctgtaaagaaggaatgatttggtgatggagtgttcccactgaccgatggactcaaagaagag

SEQ ID NO: 803185 - DNA, 100 bp, Homo sapiens
tgaatccaaacaagccactgaggaagttacatttcacttcacttcttaataacataggaaactactaaagttcctggggaagcaaagtagaatttcataa

SEQ ID NO: 803186 - DNA, 100 bp, Homo sapiens
gtcgaatctgagcaaaggcacgggcagccggaaggacaccaagatgcggatccgggcctttccggcctttctggagcaatgcattctcaagtgtttcctc

SEQ ID NO: 803187 - DNA, 100 bp, Homo sapiens
aataattttgatgacatcaagcacacgactcttggtgagcgaggagctctccgagaagcaatgaggactaccgaccagactcccggaaatcatgttggta

SEQ ID NO: 803188 - DNA, 98 bp, Homo sapiens
cgtcacgccaacaacaggggtaccaacaatgtcacttcacacgcctccatctccaagcagctgacagtgaagatagtactgtgtccatccagataaaa

SEQ ID NO: 803189 - DNA, 100 bp, Homo sapiens
cgccttctccgaggcgcagaagtggattgagagcattggggagtcagcaatgtccgttgtgttaaatcagctgctgcccatgattaagcctgtaacccag

SEQ ID NO: 803190 - DNA, 100 bp, Homo sapiens
aattcttgaaccacctgaaggccaagatgaaggtgtgtggaagtatgaacatttaaggagagaagatgactgaggaggaggtggagaccgttctggcagg

SEQ ID NO: 803191 - DNA, 100 bp, Homo sapiens
agctctgatgggctatttgggtgatacccagtgcagtgaactgcagagacagagtctcactctgtcgcccaggctggaacagcggtgcgacagtggcctc

SEQ ID NO: 803192 - DNA, 98 bp, Homo sapiens
gcatatgattggctctttagctgaaatacttctgaagagatgggatttcaccatgctactcaggcttgtcttgaactcctgggctcaagcgatctgcc

SEQ ID NO: 803193 - DNA, 98 bp, Homo sapiens
gaagacgctttacccgactctttgggccgttatctcacgtatgatctcgtgaaatcttgagagaaactgaatgacgaatgaaactattgttcctgttt

SEQ ID NO: 803194 - DNA, 100 bp, Homo sapiens
aggtgatctggacaaaggaacaggtatctcaggttttactgcaatcacagcaaccaaccccatttggcttataaagactcggttacagcttgatgcaagg

SEQ ID NO: 803195 - DNA, 100 bp, Homo sapiens
ccggcccggcggggccgacgagtccggaggggctgccgcgggagaggacgtcggtgatgaaggagaagaagaaaaagaattcatttcctataacatcaac

SEQ ID NO: 803196 - DNA, 104 bp, Homo sapiens
ctcaaagtgattcctcgagatcggaaaacattcctcttctctgccaccatgaccaagaaggctgaattcggtcagaagagaatccatctgaatagccagtttcc

SEQ ID NO: 803197 - DNA, 98 bp, Homo sapiens
gtgttcctgaagagcccagagttccaccaactaaagggcattcttcttgagcaccgagaaaaagaatttggagacaaagtaaacctactttctgttct

SEQ ID NO: 803198 - DNA, 98 bp, Homo sapiens
ggcatgaacttgcagaactttacatcaatgaacatgacatgttggcagataaattgaacatgactccagaagaagctgaaaggtggattgtaaatttg

SEQ ID NO: 803199 - DNA, 98 bp, Homo sapiens
acttcaaagaaacattaagaacttggatcccattcacctgaggcacccgaagaagagaccatccatatttccagggaggtcttcacttcagaaatcca

SEQ ID NO: 803200 - DNA, 99 bp, Homo sapiens
ggacacagagtgcccagaggccaagcggctaaaggtctctgagcggcccctgatgttcctgttggacactcctggcgtgctggctcctcggattgaaag

SEQ ID NO: 803201 - DNA, 98 bp, Homo sapiens
gcagactcggacgtggacgcctttttccggacaggcatacttttttgatgcaccagagatggaccatctcccaacaactacagctactccaaaccaaa

SEQ ID NO: 803202 - DNA, 98 bp, Homo sapiens
accagtacacggcccacgttgccagatggagtttcactcttgttgcccaggctggagtgcaatggcgtgacctcggctggctgcaaccttcacctccc

SEQ ID NO: 803203 - DNA, 100 bp, Homo sapiens
gaatgttccagaaacgatgaatgaagttcttgatatgtctgatgatgaagctggagtcacatcagaagccgcgcagactatcaccacggctcctgatgcc

SEQ ID NO: 803204 - DNA, 98 bp, Homo sapiens
cttcctgaaggaggttcgagatcacatgcaggactctttcttaatgcagcctgagacagttgaatttctgaatgaaaagctggaaaaaagggaggctc

SEQ ID NO: 803205 - DNA, 119 bp, Homo sapiens
cggccccggcctggtcctggccccggagctgttgctggacccctggcagggggagatcttcgagctgaaggcagagctcaacagtgacaagaaggagaagaagaaggaggcagtgaaga

SEQ ID NO: 803206 - DNA, 98 bp, Homo sapiens
tcagattctccttcttctgtggttaacaaacagctcggatccatgtcacttgacgagcaacaggatactccatcttctaaaccaacactcctagccaa

SEQ ID NO: 803207 - DNA, 99 bp, Homo sapiens
agcaggagcaagagagagagggctccaggcctcaggcccaggcccaaggccaagtgagagagcccaggccacaggacatgctgccattctgccaagaga

SEQ ID NO: 803208 - DNA, 100 bp, Homo sapiens
gcacagattagaggaaggaagagaacatccagtcatggataaaaatgagctggttcagaaggccaaactggccgagcaggctgagcgatatgatgacatg

SEQ ID NO: 803209 - DNA, 99 bp, Homo sapiens
aaaatttggagcatatttgtttctctctgcctgatttctcctgaatttggaaactatttctcattatttgtggacttggaaagatagatgttaatgact

SEQ ID NO: 803210 - DNA, 98 bp, Homo sapiens
atgaataaacatcagaacctcaattctgttgatcttcaaaatgctgcagaaatgctcactgcaaaagtgaaagcgtctcgctcgaaccgggatcatag

SEQ ID NO: 803211 - DNA, 100 bp, Homo sapiens
ttcctcatcctgcctttccagaggatcacacgcctcaagctgttggtccaggacttcactgaggatgtcaactgtgcttttgagttcctgctgaagctca

SEQ ID NO: 803212 - DNA, 100 bp, Homo sapiens
tcttctgccgcaccaggctcatcctgtccatcgtgtgcctgatgatcacgcagctggctggcttcagtggaccacacctcaggcaagtaggagtggctgg

SEQ ID NO: 803213 - DNA, 100 bp, Homo sapiens
aaaagagctaccgagttaagtcttcaaggctcgagctggaatcattagcactgtagaggttctaaaagtcatggaggcttttgtgaatgagcccaattat

SEQ ID NO: 803214 - DNA, 100 bp, Homo sapiens
gagccctgatgaaagaaggaagaagacccgctgtctgcgaaggcctaaaggaatgcttccggatcccaagaacactcacatcgtcatcagctggatgatc

SEQ ID NO: 803215 - DNA, 100 bp, Homo sapiens
caaagatgtaatgcaacgttgtgatctggaggcacatctcaaaaacaggtcctcagaatggttggaatgaccctccagctttgaacagagtacccaaaaa

SEQ ID NO: 803216 - DNA, 98 bp, Homo sapiens
ccagggtggctgggagctcatggagcaggtggagagccaccaccgcggagtggccttgctggcaaggacggaagctcctgttttcttgtcagccgcca

SEQ ID NO: 803217 - DNA, 100 bp, Homo sapiens
ctacttttactcagagtttgaaggttgtgaccaaaagaggctccggaactgcaagcacatgttgaccagataactgaaatggcagcagtaatgaggaaag

SEQ ID NO: 803218 - DNA, 100 bp, Homo sapiens
agtctcttcccctttcagagctcacagagacttcaaatgttgttataccacatttgcataagttagccttggtgaacaacttacagattgtggattctaa

SEQ ID NO: 803219 - DNA, 100 bp, Homo sapiens
tgggtaggcctttgtaaaattgacagagaggggaaaccccgtaaagtggttggttgcagttgtgtagtagttaaggtttctgggtgtctctggggagccc

SEQ ID NO: 803220 - DNA, 99 bp, Homo sapiens
gttcacgttcgcggccttctgctacatgctggcgctgctgctcactgccgcgctcatcttcttcgccatttggcactagctgcttgtctcctactatac

SEQ ID NO: 803221 - DNA, 100 bp, Homo sapiens
acacagtcagagaaaccggggcaacctggagttgagacagacgactgggatggaccaggtgttatgtattctctgggacatggaaactgaagaagttgaa

SEQ ID NO: 803222 - DNA, 100 bp, Homo sapiens
attaacgagagcctcgctcagctcaaaaccctcatcctggacgccctcagaaaagagacctaatctgggagcctgcaagtgacaacagcctttgcggtcc

SEQ ID NO: 803223 - DNA, 100 bp, Homo sapiens
agtctccatggtgaagtataggctgaggctacctgtgaacagtacgcagtgaatgttcaacatggccaatctttcctaagctgctcagcttacaagaaaa

SEQ ID NO: 803224 - DNA, 120 bp, Homo sapiens
accggcccccacctttcctcaggagtcatttctgttccgcacaggcctgctgaactgggtgctttatataggggtcacggaaattcaagatttcagttctgtggcagaaatgcttcggct

SEQ ID NO: 803225 - DNA, 98 bp, Homo sapiens
gcatgtagacgcccccgcaggcgcccgcggcagcgaacggcacttcgaggagaaattgcgcctctgaaagagaacgtgagccacgtcaatgaccttgc

SEQ ID NO: 803226 - DNA, 99 bp, Homo sapiens
ttctcggaccagcagtgaccttcaaagtgagcgccaatgtccaaaacgtgaccactgaggatgtggagaaggccacagaaacctctgcgccatgagagc

SEQ ID NO: 803227 - DNA, 100 bp, Homo sapiens
ggatcttggaggtggtgtaaaggaagctcaagtatatcaagcattcaaattgctcacagctgatcctaaggtgcagacccacctcgaaaaccccaccaag

SEQ ID NO: 803228 - DNA, 100 bp, Homo sapiens
ctgttcgagtacctgcccagaggggcccactcgctgtcccgtcttccacgtggcctacgtcctcatcaagtttgccaactcaccccggccggacctctgg

SEQ ID NO: 803229 - DNA, 100 bp, Homo sapiens
accattataagaaacattaccctaatgagagagaaaaggaacagttccgtaagctctttattggtggcttaagctttgaaaccacagaagaaagtttgag

SEQ ID NO: 803230 - DNA, 60 bp, Homo sapiens
tcttgggacaaacttcatttggctgtgggtgagcgtggaggatgctcagatgcacaccgt

SEQ ID NO: 803231 - DNA, 98 bp, Homo sapiens
gttgctcctccatctccagatcggatcacggtgagggaaagatgagcgaggagacggcgacttctgacaacgactcccagcagtaggaggacagttga

SEQ ID NO: 803232 - DNA, 100 bp, Homo sapiens
ggaaactgtacattgaagcagaggtatctttaggtggtgttgatcttacagtccgggtgctcacgacaggatattggcccactcagtcagccacaccaaa

SEQ ID NO: 803233 - DNA, 99 bp, Homo sapiens
acatttctggctctgaaggcgaacgcttcgctggccatttaggagctctgctcaaagccagacgatatgccacacttctgcctgctgttggcaaccctc

SEQ ID NO: 803234 - DNA, 100 bp, Homo sapiens
tatggaggcaaaaacattagttcacacacaaacattgttttcagtctccggagtagagatgaagagagaatttctaaacctggggctgtctcaactcctg

SEQ ID NO: 803235 - DNA, 99 bp, Homo sapiens
tttgaactactgccggagcttctgccagattgccacggcagtgaagtttctacagaattcccgggtccgccagagcccacttgcaaccaggagagcatt

SEQ ID NO: 803236 - DNA, 100 bp, Homo sapiens
accggcccccacctttcctcaggagtcatttctgttccgcacaggcctgctgaactgggtgctttatatagggtacccagctggtttcgtgtacatcttt

SEQ ID NO: 803237 - DNA, 100 bp, Homo sapiens
ggtgtcccggaaccgagatgcccctgaggggggctttgatgcagtactccaggcagccgtctgcaagatgttggccgatgatgcagaagcaggtgccgag

SEQ ID NO: 803238 - DNA, 98 bp, Homo sapiens
acatttttgggaaggtagaagcatttggcacagaagtgctgccaggagaaactaagttgctgaacggctctctatcaatatcagctcacatcattgaa

SEQ ID NO: 803239 - DNA, 100 bp, Homo sapiens
gcatttccagcccgcccacccaggtgagcatctgcctggagtgtaacagcagcaaactgcgcgggctgaagcggaagtggatccgctgctcagcccaggc

SEQ ID NO: 803240 - DNA, 100 bp, Homo sapiens
gctttaacatggagacgggcgtccgggcagcggagttcatcaagaattacatgaagagaaaagttcccaggtttaaaaccatgttcagtaacctgatcca

SEQ ID NO: 803241 - DNA, 100 bp, Homo sapiens
agacttgtctcttatttagttctggggagcgcctcgtcgacatgagtgatgtggaggaaaacaacttcgagggcagagtcacccaacctgcctgcagttt

SEQ ID NO: 803242 - DNA, 100 bp, Homo sapiens
tgagatcaaatggcacttcattggccacctacagaaacaaaatgtcaacaaattgatgggtacctggagtacaagagggtccctaacagcagaccacctg

SEQ ID NO: 803243 - DNA, 98 bp, Homo sapiens
taccgagcagctaagaaattatggaaagtctgtgtagaacatcacacgtttttcaggtgctggagaatctggtaaaagcaccattgtgaagcagatga

SEQ ID NO: 803244 - DNA, 98 bp, Homo sapiens
agatcaccaagatgctgggcgccgagtggagcaagctgcagccaacggaaaagcagatgggacaccaggtccaataccacctccaagccgagtcactt

SEQ ID NO: 803245 - DNA, 98 bp, Homo sapiens
tcctccgcggccggctgcgtggtgatcgttggcagactttgaagattatccaatgagaattttatatgaccttcattcagaagttcagactctaaagg

SEQ ID NO: 803246 - DNA, 111 bp, Homo sapiens
tttagagttcagctgcacatatttactggaagatgccaaagtgcactggcaattttacagttcagagtcgtgacacttcaagaggtgggcagattattcatttgtgaatga

SEQ ID NO: 803247 - DNA, 98 bp, Homo sapiens
tacccctggctatggtgacgctatcaactgcagagattgggttgaaaaataccggccacagaccctgaatgatctcatttctcatcaggacattctga

SEQ ID NO: 803248 - DNA, 98 bp, Homo sapiens
gcaagccgggcggcctgccccgccggagcagcatcatcaagcctggagcattggtaagcgtcacactgccaaagtgagagctgctggagaactcataa

SEQ ID NO: 803249 - DNA, 98 bp, Homo sapiens
aaaagacaccttatcacccacacccacacgtgttcaatacacctcccacctgtcctcaggcatatcaaaggcttctaaccctcctttatgtgactcag

SEQ ID NO: 803250 - DNA, 98 bp, Homo sapiens
aacatcgcggtgcagcgaatcaagcgggagttcaaggaggtgctgaagagcgaggaggtagcagcaattgcagagacagatgaatctgcagaatcaga

SEQ ID NO: 803251 - DNA, 100 bp, Homo sapiens
aatgtgattgatcgaatgaaggaatcctctccatctggttcgaagtctcagcggtattctggtgcttatggtgcctcagaggatgttaagcaagtttttg

SEQ ID NO: 803252 - DNA, 98 bp, Homo sapiens
actctctgcagcgggatcaagctgtgtgcattagtacaaatgacatccctttaaaagtagttggaatgttcccaagtagaggtgagaaaagggcactt

SEQ ID NO: 803253 - DNA, 98 bp, Homo sapiens
aaagtcaagcagatggtcgaggagatggagcagttgaggaatgagctacttcaggagagagctgcgagacaagacttggagtgcgacaagatttccct

SEQ ID NO: 803254 - DNA, 98 bp, Homo sapiens
ttatgaagtattgagtgatcctaaaaagagagaaatatatgatcagtttggggaggaagctaaggcaggaacggatccaaattcagcagcttgggctg

SEQ ID NO: 803255 - DNA, 100 bp, Homo sapiens
catttgatcccactaggagacaatgtgagaaagatcagtctaaagaaaaggagaagaaagtgaaaaaaacaattccttcctgggctaccctttctgccag

SEQ ID NO: 803256 - DNA, 100 bp, Homo sapiens
ttgcttattccaacactgcatccaggctctgggagaggagcatccaattcgggttgtcaatgcattgcaggttggaaaagagactgttcaaaccactgag

SEQ ID NO: 803257 - DNA, 99 bp, Homo sapiens
tcgtgccggcgccgcccggaccgccaggtttggtgcacctcgatttggaggaagtagggcagggcccttatctggaaagaagtttggaaaccctgggga

SEQ ID NO: 803258 - DNA, 99 bp, Homo sapiens
gacgttctacctgccttgaagaagacacctgacctgcggagtgagtgaccaggtgagagaactggagcagaccttgcaggcctctgaggagcagctcca

SEQ ID NO: 803259 - DNA, 98 bp, Homo sapiens
aaatattgaaagctgtgccaccaggcctagtacaccttggcatctgtaagcctttggtggaactgaagctctcttcccacgaggaggccttgtccttt

SEQ ID NO: 803260 - DNA, 100 bp, Homo sapiens
agaggagaacgaacatcttctggacctttgtccaggagaatgaagtttctagattagaagacataatgcagcatttaaaatcaaagaagcgggaagaaag

SEQ ID NO: 803261 - DNA, 100 bp, Homo sapiens
tcacatacagaagaggattgcacggaggagctctttgacttcttgcatgcgagggaccattgcaatgttgctgaggcacagtgcatcgccaaccaagttc

SEQ ID NO: 803262 - DNA, 98 bp, Homo sapiens
agggactctgttctggcagcttccagagactaccggaatatcattgagagattgcaggttggggcaaacacaatggataatcctttgttgaaatacag

SEQ ID NO: 803263 - DNA, 98 bp, Homo sapiens
cgaactgctccaacactgcgggccgcctgggtgcagacaaccgccctgtgagcttctacaaggtggtggccttgtccatgtcacctgtggatgacact

SEQ ID NO: 803264 - DNA, 100 bp, Homo sapiens
tgaatttccatgtcaacatagtcctgctttctctcctttgaaaacactaagaataatgtcactgcatcagtttttactagagccaatcacctgtcatgcc

SEQ ID NO: 803265 - DNA, 100 bp, Homo sapiens
agaaggccctgagtcaaagaagatgcctcgaactaaacaaattcatcccagaaatctaagagcagaagaatcccagacttcttagagaacccagtgactt

SEQ ID NO: 803266 - DNA, 100 bp, Homo sapiens
ctcacgggcaccagggcttcgccagcgggccagcaacaaagtgcaagagaatgtgatcaatgggcaggactacgaagtgatgatgcagattgactgtcag

SEQ ID NO: 803267 - DNA, 100 bp, Homo sapiens
aaggcctaagaattttggcattggtggagtattgctcctggaaaatccaaaaggtgacaataggttggaccttttaaagctgaagagtgttgtcactagc

SEQ ID NO: 803268 - DNA, 51 bp, Homo sapiens
ctttgaccacaacatcagccctactattggccccttggatctcccttcgtg

SEQ ID NO: 803269 - DNA, 98 bp, Homo sapiens
gtgactgtcaaagaccagacatgttcttgaatgtataaaactgagtgaagaaaccactacatcatccagtagaatttttgtcaaaatatttttccagg

SEQ ID NO: 803270 - DNA, 99 bp, Homo sapiens
tggaatccctgtctgggtgcggactcggagaagccctcgagcatccccacagggttctgatgactgtcttgtgaaaatatgggcaacagatgatgggag

SEQ ID NO: 803271 - DNA, 100 bp, Homo sapiens
agtgggcagggtcagcaggcccaaacccccacagatcttagacgaattttacaatgtgaagttctgcatagatgccagtcaaccagatgttggaagctgg

SEQ ID NO: 803272 - DNA, 105 bp, Homo sapiens
tgatgccctattcgacagaactgatattttatattgaaatggatcctccagagatcctacagtaaggaattgtttgaagaagttatttcaaagatgcggaaggca

SEQ ID NO: 803273 - DNA, 98 bp, Homo sapiens
gtgtggcagttcagaatgatggatcaagctagatcagcattctctaacttggctaaagaacgtgccaatggaatggagcttgatgggcgtaggatcag

SEQ ID NO: 803274 - DNA, 100 bp, Homo sapiens
gatgccgtccgaagtcggcgacagcggccggggcgcaggcgcccgtgcggaatggcagaactctagaggaaagcgtctacagcattgctatttctctggc

SEQ ID NO: 803275 - DNA, 100 bp, Homo sapiens
gttttttcaagcccatatcttgccgaaatgtgattgcctacagcgctcctttaaggcacaggttttctcctgccctgcttgccggcatgatcttggccag

SEQ ID NO: 803276 - DNA, 99 bp, Homo sapiens
gaggaggaggaggaggcgaggaggagagactctcctttagcggcagagttttccgagtgaccttcttgatgctggctgtttctctcaccgttcccctgc

SEQ ID NO: 803277 - DNA, 100 bp, Homo sapiens
cgagggcatcctctacaccatcgacaccgaaaactccaccgtagcccttgccaaaggaagtgctctctggcgtggtggtcatatcgagtaaggattcagt

SEQ ID NO: 803278 - DNA, 101 bp, Homo sapiens
gcggggaagcgcccgcgtccggggatcgggatgtccctcctccttctcctcttgctagggaaagaatatggcaaagctgatgcaagatgggtttattttga

SEQ ID NO: 803279 - DNA, 98 bp, Homo sapiens
tagcatggcagcatttattgcccttccatcaatcttgcaaagaatcttacaggaggaataaacatggtgtgtctcgaaagaagattgctcagatgttg

SEQ ID NO: 803280 - DNA, 98 bp, Homo sapiens
ggaacagatcgagaaaatctggcttcggctccgcgggctgggagagaccattctaacacaggtaccgtccagacagtgcctctgagaaagggaaccta

SEQ ID NO: 803281 - DNA, 100 bp, Homo sapiens
acacagacactgacctgtacacaggagcagctgcattggcatggaagaatcctatttcaagctggtttactgctatgctccactgttttggtggaggaat

SEQ ID NO: 803282 - DNA, 99 bp, Homo sapiens
ttctcccggaccccaggagccggcgcccccgccctgtaggtactccaaagattcaggtttactcacgtcatccagcagagaatggaaagtcaaatttcc

SEQ ID NO: 803283 - DNA, 100 bp, Homo sapiens
ctgaagccatgcaggacccctgggcagacctcttcagaaatagcaggtggcccatggcgccctcagtgatggtgccattgatgctgtggagacacagaag

SEQ ID NO: 803284 - DNA, 100 bp, Homo sapiens
gcccgagatgaatcctgcggcagaagccgagttcaacatcctcctggccaccgactcctacaagaatgattgactggctatcctggccattggctcagca

SEQ ID NO: 803285 - DNA, 98 bp, Homo sapiens
ggaatctgaaccctcagcagttttataccatgttccgtatggcctcacaagtcttggtctacccaccatatgtttatcaaactcagtcaagtgccttt

SEQ ID NO: 803286 - DNA, 100 bp, Homo sapiens
gccccccaaggaagcgtgcaaatgccagaaagaggatttggccagagcgttttgtgtgccgtgagcgatgtggagatgcaggaacactatgatgagtttt

SEQ ID NO: 803287 - DNA, 99 bp, Homo sapiens
aattcagcctcagtgatgtccatgaggcggcaaagatctgcaacaacatgctgttagctattagtatgattggaactgctgaagctatgaatcttggaa

SEQ ID NO: 803288 - DNA, 98 bp, Homo sapiens
ccccgaacggggggagattctgctcacggaactgcaggtccacaaggcgattacaatttccagtcccctaaccacagacctgactgcagagctgtctg

SEQ ID NO: 803289 - DNA, 98 bp, Homo sapiens
gcaaatcgagggtctcggggatgcggatccaagaccctgggaaggtatgagagaatcgaaatcccaatccatattgtacctcatgtcactatcgggaa

SEQ ID NO: 803290 - DNA, 100 bp, Homo sapiens
aagtgatgtccaggaaggaggaggaataatatttatggagcatatattatggaacacagtgatgatgaacagtctacacagatggctgcaagttgggaag

SEQ ID NO: 803291 - DNA, 100 bp, Homo sapiens
gtgttgctggaacggttcggataggtaaaaatgcatttgcaaagggagaaaatgaaggccaaacagaagcaggctccagcttctgcaaaaacttggattc

SEQ ID NO: 803292 - DNA, 98 bp, Homo sapiens
tccagatttgatggccttcacaatccaagttccacaatatattgactactgccacaattccggagtttcagaatcatctgtaagaggcctggaatcca

SEQ ID NO: 803293 - DNA, 131 bp, Homo sapiens
agaagttccatgcgcagcatgaaggagaatctgtgtcctatgctaagaggcatcatcatgaagacctttgcaggaaacatgaatgctgacagcgtggtgcaccacaagctattgcactcagtgagagcccg

SEQ ID NO: 803294 - DNA, 100 bp, Homo sapiens
ctccaaataccagctcgacaaagatggggttgtcctctttaagaaggtgttggggatgtcctttgcactgaccctgaactgccagattgacaaaaccagc

SEQ ID NO: 803295 - DNA, 100 bp, Homo sapiens
gccaacctagtagaagccacattcaaacagcgacagagtccaggccctctcctatgcacagcacacgcgacaattgatctcctgtggcggtgatggtggg

SEQ ID NO: 803296 - DNA, 100 bp, Homo sapiens
ctctgctgcccgctgtgagggaaaagggtggttctcttcccaaagtggaagccaaattcatcaattatgtgaagaattgcttccggatgactgaccaaga

SEQ ID NO: 803297 - DNA, 98 bp, Homo sapiens
gagggagtgcgtggaggagctgtgcagccgcgaggaggcgcgggaggtgttcgagaacgaccccgagacggtgaacctgagcaaggtgggcgagtatt

SEQ ID NO: 803298 - DNA, 100 bp, Homo sapiens
ggagtttcccaacacctgtaaaatgagggaggagctaggagaactatcagagcagttttacaaatatgcagtacaaaaatgagccgtcagactgctacag

SEQ ID NO: 803299 - DNA, 98 bp, Homo sapiens
atcgaacttgcaaacatcagggatgaagttggtaatgaatttgggcatcctgaatggttagacttcccaagaaaaggaaataatgagagttaccatta

SEQ ID NO: 803300 - DNA, 98 bp, Homo sapiens
ccagaatcagaaggggagttctgcaggcctagccgcccgtgactctcacactgtctcctgcatgacgggtggcgcctcccgcagcttcccttctctct

SEQ ID NO: 803301 - DNA, 100 bp, Homo sapiens
ccacgctgcagtgctgctgctgtttggaggtctgtgcatgcatgttcagctgaagaaatcaggggagaaacccctgcttggtggaagcctgatggaatat

SEQ ID NO: 803302 - DNA, 100 bp, Homo sapiens
tgggatgtcgacgactgggacaatgagaacagctctgcgcggctttttgagcggtcccgcatcaaggctctggcagggccaaggagatctgttgaagaat

SEQ ID NO: 803303 - DNA, 51 bp, Homo sapiens
atcacaagctcagcctggacagcaacaggaatcaaaggatgaacagtggaa

SEQ ID NO: 803304 - DNA, 100 bp, Homo sapiens
tacagaggacggctgtgtcgcagcctctcgggatgacaccactctgaatgcactgaacacaacaaatttacatgtattggagaccagaccagaagccctt

SEQ ID NO: 803305 - DNA, 98 bp, Homo sapiens
agtgggggttggcttgcccatttcctcttctctggctgatgaacttgctcttgtggatgttttggaagataagcttaaaggagaaatgatggatctgc

SEQ ID NO: 803306 - DNA, 98 bp, Homo sapiens
cgcgacttcttctcccaccaggaggttgaacttcagtttcaattaaatcgattacccctctgtgaaatgcactatgcactagacaggatcaaggacaa

SEQ ID NO: 803307 - DNA, 99 bp, Homo sapiens
gcaagcgcgacgccaggctgagaccgtccaggcaaggaattgttcctcctggtcttacagaaaatgaattgtggagagcaaagtacatctatgattcag

SEQ ID NO: 803308 - DNA, 98 bp, Homo sapiens
agcagcagctctcctggcctctcacgccatacaggggaccctgtcataccctcttgtgtctgtcgtcagccccgccagcaggcgaagcagggagatgt

SEQ ID NO: 803309 - DNA, 50 bp, Homo sapiens
cggcgcttacctctgctacagggatccctgctgccttggtgatcccgggc

SEQ ID NO: 803310 - DNA, 100 bp, Homo sapiens
actgttcgtttctaacgtggctgtagttggcattctctctcataccaagataccttttgaggtactccaaagattcaggtttactcacgtcatccagcag

SEQ ID NO: 803311 - DNA, 100 bp, Homo sapiens
gtggccttcggcctggtctacgtgctgaaccacgctgaggggctgggagccgcgcacaccaccatcacactcggccatgctgttcgtccaggccctgctc

SEQ ID NO: 803312 - DNA, 114 bp, Homo sapiens
cttgtccacgacaccggctacttctcagctttaccatccctggaggagacctggcagcaggcagtggagctactgctgtggttcaggcagccctatgcaaacccaggcaagaac

SEQ ID NO: 803313 - DNA, 98 bp, Homo sapiens
agccattcccaaattatagagctaattacaactttcggggcatgtacaatcagagtgaaagagtttctagccaaagccaaagaagactttttgaaaaa

SEQ ID NO: 803314 - DNA, 101 bp, Homo sapiens
gagatgtctcgctccgtggccttagctgtgctcgcgctactctctctttctggcctggaggctatccagcggtttcgaaaaaacgatgaaatgaaagctat

SEQ ID NO: 803315 - DNA, 100 bp, Homo sapiens
catagaagaaattgcacatcaaattattgaacaacagatgggagaggtgaatgagtggcaggatgactggccgacctttttcgcccggcaccggctccag

SEQ ID NO: 803316 - DNA, 98 bp, Homo sapiens
gcaccacgggctccaccctgctgcagcccctcagcaacgccgtgcagctgcccatcgaccaggtggatcttcttgttccaaccaaagtgactggcatc

SEQ ID NO: 803317 - DNA, 99 bp, Homo sapiens
aacgggcgggtgctggagctgttccgggccgcgcagctgccgaacgacgtggtcctacagagctggactggccattatggaggaggagctgcagcattc

SEQ ID NO: 803318 - DNA, 100 bp, Homo sapiens
gagcgtcccagtacactgacagagtacaaacctccagggaacctggctggctagaagggactctgaacggcaagagggggctgattccacagaactacgt

SEQ ID NO: 803319 - DNA, 98 bp, Homo sapiens
gcacggcctcttgcgctacgccctggatgagatgggtttggaaatcccttgtctccaggttgctgggattgacttcttgctcaattgaaacactcatt

SEQ ID NO: 803320 - DNA, 100 bp, Homo sapiens
tacagaaacctggtctccctagatatgtcttgtcgttcaagacttgcaacactaaacgagaaattgacagcccttgaacggagaatagagtacattgaag

SEQ ID NO: 803321 - DNA, 100 bp, Homo sapiens
tgctgttgaagaagggagccaacaaaaattgttttttctacctgttgacgtgtcaagcactaactgtgatgcttttccttggacgatcagcttgcataat

SEQ ID NO: 803322 - DNA, 100 bp, Homo sapiens
actgtcaaaactttacaagttaattgaagagtcttgtccacagctggcaaattcagtgcagatcagaagctatggagatattttgcatagaatgaaggat

SEQ ID NO: 803323 - DNA, 98 bp, Homo sapiens
cccagacttgtcgcacggatgcagaaaacttaatggaggaggctgagaaatcgaaacgagttggctgagactcttgcactcctgaaagcacaaattga

SEQ ID NO: 803324 - DNA, 99 bp, Homo sapiens
ggagttcgactgcgagggcctgagacggctgcttggcaagactataatgtaactgcaaactccaagctggtcattatcacggctggggcacgtcagcaa

SEQ ID NO: 803325 - DNA, 100 bp, Homo sapiens
aaagacagtgtccagctaaaggaggagaaatatggggagttgatgagcatcagaaaaaccaggacagacttttgagacaagttgaagttaaattccagaa

SEQ ID NO: 803326 - DNA, 99 bp, Homo sapiens
gaaccttacccggatgatggcatgggtgccggtggtggtgtgcacattgagccccggtatagacagttcccccagctgaccagatcccaggtgttccag

SEQ ID NO: 803327 - DNA, 100 bp, Homo sapiens
cgcgagggaagatgcgtgcgcccattcccaccttgggacaccttgactccaagcccagcagtaagtccaacatgattcggggccgcaactcagccacctc

SEQ ID NO: 803328 - DNA, 98 bp, Homo sapiens
tcaagcctgaaggaaaggcagaactgcctgattacaggagctttaacagggccgccgccacaatgggccgcgagtttgggaatctgacgcggatgcgg

SEQ ID NO: 803329 - DNA, 100 bp, Homo sapiens
agaagcgttctcacccagtcatcattgatctagatgaggaagatcggcagcaggagtttcggagagggaaattggattccaagatccatcaaggagcaaa

SEQ ID NO: 803330 - DNA, 100 bp, Homo sapiens
gtgggggacacttcagggtactaccagcggatgttggtggttctccttcagtttggaaattttagcattcaggtgccaggaatgcagatgggacagccag

SEQ ID NO: 803331 - DNA, 100 bp, Homo sapiens
gagggagcaagaggtgtcggaggtctcatctttgaactactgccggagcttctgccaggtccccagtctatgtgaggatctcctgtcttctgttgaccag

SEQ ID NO: 803332 - DNA, 100 bp, Homo sapiens
tggtgcccagccgggaactccccatcgcgttttgccagcgataatacgcctcaggcagtggagctactgctgtggttcaggcagccctatgcaaacccag

SEQ ID NO: 803333 - DNA, 100 bp, Homo sapiens
acaaggcagaaaatttactggttaaggagcttccttcttcttcaacgtggggccagcagtccaatacaacagcatgtcagtcccaggccacgctgtcgtt

SEQ ID NO: 803334 - DNA, 100 bp, Homo sapiens
aggagtgcggcgcggcggccccgggaccaaggaggtgaaaggtgtagcagtcactcggcctacacccacagcatcgaccttgtgaacccagcgacctgac

SEQ ID NO: 803335 - DNA, 98 bp, Homo sapiens
tgattcctatgataacagctatagcaccccagcccaaaggtgtcagcatttgcaggtatacaggaacagtcctagtgatgcactatttaatcaaaaga

SEQ ID NO: 803336 - DNA, 100 bp, Homo sapiens
tccagaaattattattactggtccacaggtcctggctaccctgggaagagacaagaagtaaatgaagaaagaggaagattccaggacctagatatgattt

SEQ ID NO: 803337 - DNA, 100 bp, Homo sapiens
ccaaacacagactgtttgacttagaatcttcccttttttactccattcaagagcagcattcataaatttccaggatttgacgggatctgaactatacacc

SEQ ID NO: 803338 - DNA, 100 bp, Homo sapiens
aaaaaaaccagactttctgcctgatcatcccattgtactgcaaaaaccactatctcagctcagttcagaacccttgctggagaggtggtgcagtcatttg

SEQ ID NO: 803339 - DNA, 100 bp, Homo sapiens
ggacttggttcggagggacgtccgcttctggtggacagattgagcaaaggaagaaggtagataatgactataatgcccttcgagaaagactcagcacctt

SEQ ID NO: 803340 - DNA, 100 bp, Homo sapiens
gggctgcttgccgctatggctggcagtcaggacatattcgatgccatcgtgatggcggatgagaggaatgtgccataccgaatccgtgtgcggctgtcca

SEQ ID NO: 803341 - DNA, 100 bp, Homo sapiens
ttttagttgaagatataaataaggataaaaacctggttcctgaagatgaggcaaatataggggcatcaggcagagattgtcaagaggctgaatgctatct

SEQ ID NO: 803342 - DNA, 98 bp, Homo sapiens
catctgtggaggcggactccccagaccagaagaaaatcattagcctatgacctttccaaagtgaaactgatgagatttgatgatccactgttggggcc

SEQ ID NO: 803343 - DNA, 98 bp, Homo sapiens
ggggctgtccgccgccctggcctctctcaggaatctctatactcccaacgtgaagatcctgagtaacctggtgatggaggagctcctgcccactcttc

SEQ ID NO: 803344 - DNA, 100 bp, Homo sapiens
ctacgtcaagtgagtgaattcttgagtagagtctgccagcgccacactgatgcccaggcacaggcatctgcagtcattttgtccagtgatgatgatgatg

SEQ ID NO: 803345 - DNA, 50 bp, Homo sapiens
cggatgaacaagaaagtttggaaggtgtttgatcagtatgtaaagaccag

SEQ ID NO: 803346 - DNA, 99 bp, Homo sapiens
agacgtggcagcaagcgggagtcggggatagtgtcatcggttcggtaaagtttctgttctctgagatccagttgtcatcggtatccaggaagctctcct

SEQ ID NO: 803347 - DNA, 98 bp, Homo sapiens
gattccagggtcgaacactcgaaatggtggagtcaatgaagaaagtagcagggatggatgtggagctgacagttgaagaaagaaacctcctatctgtt

SEQ ID NO: 803348 - DNA, 99 bp, Homo sapiens
gacggcccggatgagtacgataccgaagcgggctgtgtgccccttctccacccagaggaaattcgaaatgagtcccatgactatcctcatagagtggcc

SEQ ID NO: 803349 - DNA, 99 bp, Homo sapiens
caggcccggaggacgaggactccagcctggatgaatctgacctctatagcctggcccattcctacctcgacggaggaaaccgaggcttggtgttgcaca

SEQ ID NO: 803350 - DNA, 100 bp, Homo sapiens
atataatggccaagaggaatcagaaacctgaagttagaaaggctcaacgagaacaagctatcaggtcagaatggcggcagcggagcatcgtcattcttca

SEQ ID NO: 803351 - DNA, 100 bp, Homo sapiens
ctggagttcccttcccttccacagtgcaaggaagacgccgagaacgagaggagctgaaggccttgagctgcctgcgctgtggcaaacagttcacagtggc

SEQ ID NO: 803352 - DNA, 100 bp, Homo sapiens
agatcgtctagatctactagaccatgggccaaagagggtcgacctgcaaacttgcaagctcagtcagagggcagaccctgtgaatataactccagaatct

SEQ ID NO: 803353 - DNA, 100 bp, Homo sapiens
tctgagcgagccttgaaagagataaaagcggaagtttgccacacggctgtggatctttccattgatgagtccagcttgacaggtgagacaacgccttgtt

SEQ ID NO: 803354 - DNA, 98 bp, Homo sapiens
tttgagtccgcatcgccacagctgaaggctgcgagggactaagagcagatgaaattgtacgctttaacaagccaagtcatcaatggtgagatgcagtt

SEQ ID NO: 803355 - DNA, 99 bp, Homo sapiens
tctaacagccagccactgccctggaggaccagggggagagtttggagtgaagtttaatgttgccaatggaggaagtacttctgtttcctgccatgaaac

SEQ ID NO: 803356 - DNA, 100 bp, Homo sapiens
tatggtgtgaaggttggcctgacaaattatgctgcagcatattgtactggcctgctgctggcccgcagggtcttcaagccaattgttgaaaaatttggtt

SEQ ID NO: 803357 - DNA, 98 bp, Homo sapiens
taccaaaccattgtctactccacatagaccatccactgcctcagggtcttcagtggtaacagccagtgtgcaggttctccagttgctactggaacagg

SEQ ID NO: 803358 - DNA, 100 bp, Homo sapiens
cggaaatgtccgaaggccgcagtacttgaccctgtattttgggagtcgaacggaagttactggaggtgaactgtttgaagacatagtggcaagagaatac

SEQ ID NO: 803359 - DNA, 100 bp, Homo sapiens
gttcgaactacttccaggtgaatccaacaagatcccccgtctgaggactgacctttttccaaacctgtggatttttgtatctaagtttactgaatttgat

SEQ ID NO: 803360 - DNA, 100 bp, Homo sapiens
aacaggcaaacaatggaggatttaatttcactggagtccaaaactacttacctggaagaccttccaccaccccctgagtatgaattggccccgtccaagt

SEQ ID NO: 803361 - DNA, 98 bp, Homo sapiens
tttttggtttgactgtgtatactctacaatctaagaaggatttcagcaaatttggagcagggtcatcaccgagtggtcttctcacatcatccttcagg

SEQ ID NO: 803362 - DNA, 98 bp, Homo sapiens
aacatgtatttaaccaagttccaacaaaagaatgctgccgcagcttctccaaacaggctggtgtacagggagcaacaccggagctggtgcacgctggg

SEQ ID NO: 803363 - DNA, 100 bp, Homo sapiens
ccccgtcctccgttagctaattaaaacatttttcagggacgtagccatccagaggatgtgatggagctgcttgaagaagatctcacatgccctatttgtt

SEQ ID NO: 803364 - DNA, 99 bp, Homo sapiens
attgttgagttgggctccatctttcagcagttggcacacatggttaaggaacaggaggaaaccattcagagaaaacggtattttgtctccgagtacact

SEQ ID NO: 803365 - DNA, 100 bp, Homo sapiens
agaaagtgaagaagtctgtaaaagcaatatataattctggtcaagtggactaaagaggatggacatagaacttccacctctgctgtccctaacctgtttg

SEQ ID NO: 803366 - DNA, 99 bp, Homo sapiens
ttttttggagcttccatcctggttcttccaaagtgcccggacccaaaacaggaagtgccgtgagcgatgtggagatgcaggaacactatgatgagtttt

SEQ ID NO: 803367 - DNA, 113 bp, Homo sapiens
taagcagaggtcgctaactacaagaaatgttacactcgatgagaactggactgatgaccaactgcttggttttaaaccatgcaatgaaaaccttattgctggctgcaatataa

SEQ ID NO: 803368 - DNA, 100 bp, Homo sapiens
atttctctgacttgacataacttcccatccagccaggagtctgcactcttcagtctttgcagacctgattcctcagacctctgccctatcggaagggaag

SEQ ID NO: 803369 - DNA, 100 bp, Homo sapiens
tacaatgaatggacacagtgatgaagaaagtgttagaaacagtagtggagaatcaagataagaatgtgccttttgatgaaagaactttatctttctacaa

SEQ ID NO: 803370 - DNA, 100 bp, Homo sapiens
gttccttcagaggcaacagcaccttctcgcggaacagattatgtttgagaccttcaacaccccggccatgtacgtggccatccaggccgtgctgtccctc

SEQ ID NO: 803371 - DNA, 100 bp, Homo sapiens
ggaaagtcccgctttcgtggagttccttgaatttcttggccagaaggtcaaactgcaggactttaagggttatctccagaagaagaagagaaaaggagaa

SEQ ID NO: 803372 - DNA, 100 bp, Homo sapiens
gatttaggaaagtcctatcggatgctgagatcattcagctgtagtgatcctgtgcagcgaattgagcagtgtacacgaggttctctcttcatgtgtagca

SEQ ID NO: 803373 - DNA, 101 bp, Homo sapiens
ggacaattcacctgcctcctatgtcttccatccagacaatgctggtgggagggatgaaggaaattatctggacgatgctctcgtgagacaggatgcccagg

SEQ ID NO: 803374 - DNA, 98 bp, Homo sapiens
ggtgctgacgcagggccaggaggccggggggcggccaggggccgactgtgaaggtgaagctgtacttcacaaaaacagtagaggagccgtcaaatcca

SEQ ID NO: 803375 - DNA, 98 bp, Homo sapiens
cagctttttgtgctgccagcaagaaatgatcagtagcaccagtgtttatgatttgtgaagctgggaatcatttcatcaatgtaatgttgtctcatccc

SEQ ID NO: 803376 - DNA, 100 bp, Homo sapiens
ccctgatgggaaaccttttcctcaccaccccggatggagaagatggaatttcatctacgtcttccacacacttggttttgggatttgagattgacgcggt

SEQ ID NO: 803377 - DNA, 100 bp, Homo sapiens
actcagtagccaaggagcgcgcccgcctgcagctggagctgagcaaagtgcgtgaggagtttaaggagctgaaagcgcgattccctataaggagcccctg

SEQ ID NO: 803378 - DNA, 100 bp, Homo sapiens
agcttttctgctctattaattgtttctctgcatacagtaaagctaagatggaatcttcttcagtacctgtttgaaaatggtagaatagataacattttta

SEQ ID NO: 803379 - DNA, 98 bp, Homo sapiens
ggaaggcattgctgggagcctgaaaactgtgaatggatgtttgatgtaggtggccaaagatcagaacgaaaaaagtggattcactgttttgagggagt

SEQ ID NO: 803380 - DNA, 100 bp, Homo sapiens
cctatcaagcagacccttaaccggcgcacaggaaggagctgagaagagccccttcacagatgtagtcactacaaatcttaaattgcgaaatccatcggat

SEQ ID NO: 803381 - DNA, 98 bp, Homo sapiens
tcactggaaaccccactcctcgagtcaggtatcattgcccagtgcctaagatcttttatgttcagctcactgtaggaaataatgaattttttggggaa

SEQ ID NO: 803382 - DNA, 98 bp, Homo sapiens
tcagggtgcagcatcgcgaagtttccagaagatggcgtcgtgataacacagactttcaaggaccaagatcgaaagctgctttgcgtcgcagttggagc

SEQ ID NO: 803383 - DNA, 102 bp, Homo sapiens
caggactcttccattggaaagatgtcacacgggttgtggaaaccagaacttcgcctggagaacagagtgcaaccagtgtaaggccccaaagcctgaaggctt

SEQ ID NO: 803384 - DNA, 98 bp, Homo sapiens
acaaatgtttttctgttttgcctgaatacatgatttaaacaagagatttccacagaagatttctccacccaggtgaactcctccctcacctccccgac

SEQ ID NO: 803385 - DNA, 99 bp, Homo sapiens
cccaagcgccggcagcaggacacatccgccagcatgcccaagctcttcctgcacctggaaaagaacttgccttcaaggtgtgcaagtaaggacttatct

SEQ ID NO: 803386 - DNA, 99 bp, Homo sapiens
cagaacataggagaacagggctactcctccacaaactccagtgacagcaggtaaagtcagtgataaatcttttgtttgctgcatatactggagatgtgt

SEQ ID NO: 803387 - DNA, 100 bp, Homo sapiens
ttcattgtttgtcaccacaaaaaggacaggcgaaattacaagagtccattgaatatgaagacttggggaaaaataattctgtaaaaacgattgcactaaa

SEQ ID NO: 803388 - DNA, 100 bp, Homo sapiens
gaactcaaagatgcccttaaaagcacttgctctgaaatttggggactgagtacaccaaatacgatagatcagtgggatacaacaggcctttacagcttct

SEQ ID NO: 803389 - DNA, 100 bp, Homo sapiens
cgagctttgaaagaacttgccagacttaaacagcagggagaaggttttaaggtgaaaacgaagaaagaaatccggcatgtggaaaagaagagccactcgt

SEQ ID NO: 803390 - DNA, 100 bp, Homo sapiens
aagggcctaatgtgttttcagtatcggatgactttcaagaggatgattacatggaagccctggccaggctccacctcacggtgaccagggcctacaaagt

SEQ ID NO: 803391 - DNA, 99 bp, Homo sapiens
ttcaattcttgacttgtgtattttcaactctgggatcacctgatcatttcagttcaagccaaatgttaccagcttctcctctcagtcttccagcattcc

SEQ ID NO: 803392 - DNA, 100 bp, Homo sapiens
ttcctttcgtgctggcgccgcgacctccggatgacccgggcttcggcccccaccagagactcggatgctgtatgattatgttgaaaggaaacgaaaagaa

SEQ ID NO: 803393 - DNA, 100 bp, Homo sapiens
aaaagattttgctgtcaaagttgtgtcagtgaatacaaacagggaacactgactatgccaaatggagactacattgaaggttattttagtggagaatggg

SEQ ID NO: 803394 - DNA, 100 bp, Homo sapiens
tttgcccctcagtggatcttggatactataccccgacgttccccatttgtcccacaaatgggagatgagatattgatgatgttaagaagttcaaaccggg

SEQ ID NO: 803395 - DNA, 100 bp, Homo sapiens
atgcacggaccccccatgcggaagatatggcagaactcgtgattgtcggggggaaagacatccagggctccttgcagaccagagtgaactccgagcagga

SEQ ID NO: 803396 - DNA, 99 bp, Homo sapiens
gatccttgaatgttgaagatgtccttaccagctttgacaatacaggaaatgtttgctgaccggttccctgatgtgttacctgcttctgctactgatcca

SEQ ID NO: 803397 - DNA, 100 bp, Homo sapiens
cgtcatccacaaccatgcggacatcggcttctgcctggtgctctgcgtcctcatcgggcttatgttcgagctgctgtgacttactcgaagcctcgattgg

SEQ ID NO: 803398 - DNA, 100 bp, Homo sapiens
tttgccaattgtgtggccttagcgatctatattccctttccagaagatgattccaacgccaccaattccaacctggtgccacttgaagaatggatgatga

SEQ ID NO: 803399 - DNA, 98 bp, Homo sapiens
ctgctgtgatcaatggtgagaagttgctcattcggatgtccaagagatacaaggaattgcagctcaagaggtggtgggacacacgcaggggccactag

SEQ ID NO: 803400 - DNA, 100 bp, Homo sapiens
aacatgaatgtggtggaataagtgctagtatcggacatgatcctcatcttttatacactcttagtgctgtccagatcctgccagaaaatttcaaagacag

SEQ ID NO: 803401 - DNA, 100 bp, Homo sapiens
ttttccattttatggccacttcctacgtgaaatcactgtggcaaccggggatcgatgctatagaagacaaacaagggaaggttttttttccttttgcatc

SEQ ID NO: 803402 - DNA, 100 bp, Homo sapiens
acctgggccccagaccgtgctgatcttcgatgagctctcggattccttatgcagagtggccgacttggtttatcaggtagaagatgtgtgtgaagaagaa

SEQ ID NO: 803403 - DNA, 100 bp, Homo sapiens
ctttattacaacagaatgaccaacaacttgtgtatagcttgcctttcaaggacatggacaaattttcagatctttacagtgaccttgataagtgttctga

SEQ ID NO: 803404 - DNA, 100 bp, Homo sapiens
ggaagacgacgagtttgaagagttccctgccgaagtaccctgagctgatggtggcttcttacaacaacaatgaagatgctccccatgaaccagatggagt

SEQ ID NO: 803405 - DNA, 100 bp, Homo sapiens
gaactgtggccagacagttcatgatgaggtggccaacaagcagaccatggaggagctgaaggacctgctgaaggcaaggtgcccggcgacgactgcccgc

SEQ ID NO: 803406 - DNA, 100 bp, Homo sapiens
aagtctcctgaagaggaaggagcggtgtcctcttaagaaaatgtgtgtcccggcatggatatccggaacaacctcactaggttgcatgagctggagaatt

SEQ ID NO: 803407 - DNA, 98 bp, Homo sapiens
ggacacagacctgctgtgtgtgcttctgcgccccagcttcgagagctgtgcccaggagtgaacaaccagccctacctctgtgagagtggtcactgctg

SEQ ID NO: 803408 - DNA, 99 bp, Homo sapiens
tatcctcatagagtggccaagtttccagaaaacagaaatcgaaacagatacagagatgtaagcccatgaatccaggtaaaaatggcttgtctaatagct

SEQ ID NO: 803409 - DNA, 147 bp, Homo sapiens
cctgctcaggttccaatgatgtccccaaatggttctgtgcctcctatctatgtgcctcctggatatgccccacaggtaagagcttctgttcgtgtgcagggaaagcagctcacagacgccgttaaaaccagcttcatctttccttca

SEQ ID NO: 803410 - DNA, 100 bp, Homo sapiens
tgggatgttgagcactacagacctcacagtgccaaatggagctggaagcagtccagtggaatgtaattgaccggaaaccataccctgatgatgaaaattt

SEQ ID NO: 803411 - DNA, 100 bp, Homo sapiens
gctctccacgcccctgcccgaagcctgacccgactgcctctctcagtgagatgagaactggactgatgaccaactgcttggttttaaaccatgcaatgaa

SEQ ID NO: 803412 - DNA, 138 bp, Homo sapiens
ccgggtgcggctccaccccttccacgtcatccgcatcaacaagatgttgtcctgtgctggggctgacaggaagtgcccaccgcgtgccccgattggagaggggaccttctgcaggttgtgcaagaggcctttgaaaaa

SEQ ID NO: 803413 - DNA, 98 bp, Homo sapiens
gagacctgcctgaatggcgggaagtgtgaagcggccaatggcacggaggcctgcgtaaggatatggccctgaagccacatgagcggaaggagaagtgg

SEQ ID NO: 803414 - DNA, 100 bp, Homo sapiens
ctcacttgaggtccccagcgggcactaccaccctcaccccgtcctcacaagtgatcaacaaatacaagcgcagacgatttcagaaaaccaagaacctgct

SEQ ID NO: 803415 - DNA, 99 bp, Homo sapiens
aggtatatcaggtgccaccatcagtgcagagaagcattgggggaaccagtgggccccacgtgggtaaaaagtgcgaaaatccaaagcagctgatgagaa

SEQ ID NO: 803416 - DNA, 98 bp, Homo sapiens
ggtgagaccctcacttcatccggagctctccttgtgtacatcatcatggttccccaggagtggatttaccagttaccataccagaagtttcttcagtc

SEQ ID NO: 803417 - DNA, 98 bp, Homo sapiens
cccttcttcgtggaccacaacagccgcaccactacgtggaacgacccgcgcgtgccctctgagggccccaagcaacctcaagcccagcagcgaagagt

SEQ ID NO: 803418 - DNA, 100 bp, Homo sapiens
atgcttcagttcatgatgttggagactatttccccacccttgcggaaaaacagtgcctggtgaagaatgtgatgggatcactagcatgtctgcggagagc

SEQ ID NO: 803419 - DNA, 100 bp, Homo sapiens
gagaccaaaagtatgttgtaccttgtgacagaatatgccaaaaatggagaaatttttgttgtcacaggtagtactgatggaattggaaaatcatatgcag

SEQ ID NO: 803420 - DNA, 100 bp, Homo sapiens
ggagaacaagactgcccacctccacaagggcttcctggccctctaccaaaccgtggggtgatagcacactcagataagaatcgcatgacaccccacaacc

SEQ ID NO: 803421 - DNA, 100 bp, Homo sapiens
gccaaggacctggccgacatcgcggccttcttccgatccggttacctgtcctgctgccgattcctggatgacaatcagatcgtcaccagctctggagaca

SEQ ID NO: 803422 - DNA, 104 bp, Homo sapiens
ctgctggggttgcttgtcagtagcgggcaaggtatcattgcccagtgcctaagatcttttatgttcagctcactgtaggaaataatgaattttttggggaagga

SEQ ID NO: 803423 - DNA, 100 bp, Homo sapiens
ggaacttagtgttatgccaaaagatgaagacattctccaagtgctatgatacttgggtccatagtaatgatgttgatgctgaaattgaagatccaccaat

SEQ ID NO: 803424 - DNA, 98 bp, Homo sapiens
cggatcctgcgagagatcgagagcactgacacggcctgcatcgggcccacgctcagtacatcgcggtgcacgtggtcccggaccagctcatggccttc

SEQ ID NO: 803425 - DNA, 99 bp, Homo sapiens
aacttcctgttgatgttcagaatggatttatcagaaattatactatattttatagaaccatcattggaaatgaaactgaggtttcacttttaaaaagaa

SEQ ID NO: 803426 - DNA, 98 bp, Homo sapiens
gaaatccatagctaagatgccaggaccccctgaaagcctagacatgcacgaaagcaagagattatcaaagtcactgaacaactgatcgaagctatcaa

SEQ ID NO: 803427 - DNA, 98 bp, Homo sapiens
cggggttcgggtgtctcgtgtgtgaacatcacagacgagctcatctgcgcctttgtttagaacgcttaaaagttctgattccactaggaccagactgc

SEQ ID NO: 803428 - DNA, 98 bp, Homo sapiens
caggtggatgaaatctacacagtaccagaggtggggactgttgttggaggaacactttccaggactcaggtacttctgccctccctttggtctccctg

SEQ ID NO: 803429 - DNA, 100 bp, Homo sapiens
cccccgccgccgccatggaggcgctgggacccggtggcaaactctcctctcagttgatgaccttgtggagaaactggtcaagaggctggagttcactggg

SEQ ID NO: 803430 - DNA, 99 bp, Homo sapiens
tgccaagttcccactctgcatggtgttccacatcattgacttactgctttgtgagccttgcagtctcatcctactcaagtgtggctctgtatccaacaa

SEQ ID NO: 803431 - DNA, 99 bp, Homo sapiens
aggaaaagtgtttggggaattggctattctttacaactgtacccggacagcgaccgtcaagagtctgaatttcctgctgctgttcacaaagatgctttt

SEQ ID NO: 803432 - DNA, 99 bp, Homo sapiens
agcgactttgatcaccatcaccaacaacattggctcaatagcaagaatgtgtgcccttaatgaaccttatcctccatttatgcctcggaggcttacagg

SEQ ID NO: 803433 - DNA, 100 bp, Homo sapiens
ggggggcagcagaagtccaagaagatgaagatactcaggttgaggttccagtcgatcaggtttggagaaagccagagccagacgttgcagaccaattatg

SEQ ID NO: 803434 - DNA, 98 bp, Homo sapiens
cagaagcaaatcttgaagagcgaaaagaacaagcctctgaccatggcgagcccagggaaagacaattatcgaatgaagagctataagaacaatgctct

SEQ ID NO: 803435 - DNA, 99 bp, Homo sapiens
ccggcggcggctgcgggctgagcggcgagtttccgatttaaagctgagctgcgaggaaaatggcggcgggagaggggtgtttgatgcttccctcaaaat

SEQ ID NO: 803436 - DNA, 99 bp, Homo sapiens
tggatttcagcctgcacggatggtcttgaaacacaaatggtttttgataggaaccaaggctttagccttctcaactcattgactggaacaaaccatagc

SEQ ID NO: 803437 - DNA, 100 bp, Homo sapiens
ttacataagaagttacctttttcagaatgaacactccatgagagcagggacctgctttgccttgttcaccactttattcccagtggctagaaccacgtct

SEQ ID NO: 803438 - DNA, 99 bp, Homo sapiens
aatttggaaagaaaaagaatggcgtccgtttcagccctgccaaggtaaccctgctggggtcagttatcttcacattccagcacacccagcatctggcaa

SEQ ID NO: 803439 - DNA, 100 bp, Homo sapiens
acgaagttatggcagagttagctaaagaactccctcaagtttcatttgtgaagccacctaatgatccccatggtatccagagagaagacctcatcctgag

SEQ ID NO: 803440 - DNA, 98 bp, Homo sapiens
tttacaaccagaagctcagggagaagttgaaggaggaggagaacacagtgggctatgtatgtcaaaaaggatgttcctttgtggcaaaaacatggacg

SEQ ID NO: 803441 - DNA, 100 bp, Homo sapiens
tcctctggaggctgtgcgcatgcagcacctgcatgcagccagtaaagatcccagagaagttcgagaagctagagatcataaggaaccaaaagaggagatc

SEQ ID NO: 803442 - DNA, 98 bp, Homo sapiens
agagccggatcctttcccagaagaatgagaatgagatgaagatgtgtgtgtctttaagtgctcagtgtcccgagagacagagtgcagccgtgtgggca

SEQ ID NO: 803443 - DNA, 100 bp, Homo sapiens
gccagttttgaaatcgacacacaaagaatagagttgagcctgtgggacacttcggcacatggattaattgatgtatgttgagtttatggagctgcctttt

SEQ ID NO: 803444 - DNA, 100 bp, Homo sapiens
actcgcctttgccctggcaaacactggaatcctactttttctgtggatctccttacgtagcagccaaaataaatgaagcaaaagacttgctagaaacaac

SEQ ID NO: 803445 - DNA, 51 bp, Homo sapiens
aagacctcagcttccctcgggaggggttggctgttgaaggcacgaatggaa

SEQ ID NO: 803446 - DNA, 98 bp, Homo sapiens
tgattacagttcttcctaaaaaaggctatgtatgtcaaaaaggatgttcctttgtggcaaaaacatggacggaacttctgaaacatgtgagagaaacc

SEQ ID NO: 803447 - DNA, 98 bp, Homo sapiens
tggtgggcatagtggctgccctgctggataacgaaggaggcccaacttcattcaataaggagcctgacggatttatcccagacggtagaacaaaagga

SEQ ID NO: 803448 - DNA, 98 bp, Homo sapiens
aatccagtttttatgcagcctctgccagaggaagagattgtcatcagagatgatcaagaccccagagtgaattacaagaaaggctttgaacactcaaa

SEQ ID NO: 803449 - DNA, 100 bp, Homo sapiens
ctcagagctggcaggatgttcggtgccagtccctgcctcagaggcctaatgcacgcctaaatggggggaagaggatttccaccttccgcatcattgtgtt

SEQ ID NO: 803450 - DNA, 100 bp, Homo sapiens
aagatgagaaaggagacccagtgccttacagtatcatcaataattacttttccattggcgtggtttcccttgggggctttgaaataacaccaccagtggt

SEQ ID NO: 803451 - DNA, 100 bp, Homo sapiens
cacacaggatccgcccctggacatggaggagaaggtccgcttcaaccaaacaggcaggactcgtgaaattgtgatgccttctaggaactacaccccatac

SEQ ID NO: 803452 - DNA, 100 bp, Homo sapiens
aaccctcaagacgtattcagtcctgcaagattccacaattgaagggctggaagacatggccactaaataccaggccacatctatcccaaatttctcttat

SEQ ID NO: 803453 - DNA, 100 bp, Homo sapiens
tttcccaagagcagcggaaaatgatccagtcacaggaaacatgccctgaactgtcacagaatgaaaccagcgctcttcagcgtcctgtgtgagatcaaag

SEQ ID NO: 803454 - DNA, 100 bp, Homo sapiens
aagccgtgcaagcctttgtggatgttcgaacaactgccacagcagcaagcaacttgattgaagtatttgttgatggtcagtctgtcatggtggaaccggg

SEQ ID NO: 803455 - DNA, 98 bp, Homo sapiens
agtgtgtgcattttccttcccaacgatgaatctctgaacatcatcataaattccaacatgtttaccgtggctgatgtgttgagtcaagatgaactgcg

SEQ ID NO: 803456 - DNA, 100 bp, Homo sapiens
gaatccttccttgatgatgaagaggtcaggcagttcctgctccgactggggctcctccaggtggtcagccagattatagtgcagcctgggctgagtatta

SEQ ID NO: 803457 - DNA, 100 bp, Homo sapiens
attggccatggaagctttggagcagtgtattttgttatcaatgtcactggtgtctcagtgggattcggcttatcttctgcctgtgacaccctcatctccc

SEQ ID NO: 803458 - DNA, 99 bp, Homo sapiens
ttttcatcatggataactgtgaggagctaatccctgaatatctgagttattgaagatcctatacaagtagagcgagtcaaatttgtgtttgagacagaa

SEQ ID NO: 803459 - DNA, 100 bp, Homo sapiens
tcactccctttcctctgctgccgctcggtcacgcttgatatatttttgccatcatggatcagtttggagatatattagaaggtgaagtggaccattcttt

SEQ ID NO: 803460 - DNA, 98 bp, Homo sapiens
gcgacgacgagtacgactacctctttaaagaactctctttgctcacaagttaccaaaaaaaaaagagccaacatgttggtattgctggctggtatctt

SEQ ID NO: 803461 - DNA, 100 bp, Homo sapiens
ctaaacacgtggaaagaatcaatttgggatgcattatgttcaagataaattatttgtgggtctagaacatgctgtacccacttttaatgtcaaggagaag

SEQ ID NO: 803462 - DNA, 143 bp, Homo sapiens
ccgtgggggacggggcagcggggacgcggggtctcgcggcgcctggcagcagagaccaccagaaggaagtacatccaggaagccaggactatgggcagcactatccgccagcccaaactgtccaacctctctccatcagtgat

SEQ ID NO: 803463 - DNA, 100 bp, Homo sapiens
caaggcccccgcgtggttcagacagacgccgcagccaggatggttgagatgaagtggccattctgcctgcccctcagaacctctctgtactctcaaccaa

SEQ ID NO: 803464 - DNA, 122 bp, Homo sapiens
cctcttctgataactcaggatttacttgaaatgaaaggagattccaacctacttcaggtgctactcgtgagcagtagtcgccatccagacagatggattgtccctggaggaggcatggagcc

SEQ ID NO: 803465 - DNA, 98 bp, Homo sapiens
aaaagttaggaagcaactacgactaaagccattttaccttgtacccaagcatgcaaaggaaggaaatggtttccaagtgagctggagattggatcaca

SEQ ID NO: 803466 - DNA, 100 bp, Homo sapiens
ggatgagttgtatataggattccaaacacggctccagcgggatcctgacatataccatcacctaaacatcctctaccaccttgatgaaaagacaagccgg

SEQ ID NO: 803467 - DNA, 98 bp, Homo sapiens
aggagcagggaagcatggctattgtggatgtaaaagccatgttcaagcttaaagaaagtggttattgtacaggtcatgaaccagattccctggagttc

SEQ ID NO: 803468 - DNA, 127 bp, Homo sapiens
gccaatagaaaagcagaaagccgcctcttggtttgcgtcctgcactgaaaggaaatgacggattttgtggtctacatagcctgctccttcaccacggtctggttgatttatagcaagttcaaagcta

SEQ ID NO: 803469 - DNA, 100 bp, Homo sapiens
aatggaacagatttatccggggctggtgatccagtttccaggatggcttctgcatcaacttctaaatataattcacactccttggagaatgagtctatta

SEQ ID NO: 803470 - DNA, 100 bp, Homo sapiens
aggattcctaccgagagtggatacagcgggtcacagaaagtcgagagagccaaatgacgattgaggagaggaagcagctcatcactgtgagagaggaggc

SEQ ID NO: 803471 - DNA, 99 bp, Homo sapiens
tcttcgttgccatgaggaaagaattctccgaggatctgccagagcatcttttggagatcgaaaggtagaactttccagttcatcccagcacggacctag

SEQ ID NO: 803472 - DNA, 100 bp, Homo sapiens
cctggaacttcatcatcatctacttcacaggaattgccatttttggttgaaagactggaaaagaagagctgaattggaagaaaggcagaatctgaaggga

SEQ ID NO: 803473 - DNA, 100 bp, Homo sapiens
cagcccttatccctcgtgagaaaaagatctcgatacttgaggaaccttcaaaggcacttcgtggggtcacagcgatcctttaatgtggacagctgtgatt

SEQ ID NO: 803474 - DNA, 98 bp, Homo sapiens
aactaagatctagagtatctcctcgaggaagtacaactgctctccttaaggcggcagcaaataggtgaaagattgaatgaatgggcagtcttcagtga

SEQ ID NO: 803475 - DNA, 100 bp, Homo sapiens
caacacctgttccgaaaaaagtggaagcaccaccacccaaagagacccagcattgcattaccatcgtggaataatctagcgcaaacctaggaaagctgaa

SEQ ID NO: 803476 - DNA, 98 bp, Homo sapiens
gagcatcccggctggagcagagccagagaggacatgtactcccaggattccatagatctccttgctaactcaggactacagtttcagaagcatgaaga

SEQ ID NO: 803477 - DNA, 100 bp, Homo sapiens
gaacgagctacatcatttgaggaatcagaacgcaagcaaaatgcgttaggaaaatgtgatgcatgtctcagtggtcatgcagaaggcttttgtatgatgt

SEQ ID NO: 803478 - DNA, 100 bp, Homo sapiens
ggctctctgtgcagtttgagagaacacccatacgcaggaaatgaccccaacgccaccgagagggcgcctggaatagtggtggatatgttcttggctttaa

SEQ ID NO: 803479 - DNA, 100 bp, Homo sapiens
tgctaccctggtatatgcacttttcagattttaggacagcaaattaatgactttacccttcctgatgtgaaccttattggggagcattctgatgcagcag

SEQ ID NO: 803480 - DNA, 98 bp, Homo sapiens
ggcagaacgcgacgggtctgcggcttaggatcttatgccttcattcatccggcatggtccaacaattccaagacgaactgatatctgtcttccagatt

SEQ ID NO: 803481 - DNA, 100 bp, Homo sapiens
ggaaagtctaagggatatggctttgtctcctttttcaacaaatggatgtctcagagcatgtcttcagtatcttcaaggcattctgaaaagatagctatta

SEQ ID NO: 803482 - DNA, 98 bp, Homo sapiens
ggcagaagagaagcagtgaaggagtgcagaggcatcacctgaaagcagcacagtcagcagcctccattcaagagttgattcattagaaaagtcaaata

SEQ ID NO: 803483 - DNA, 98 bp, Homo sapiens
tcccaccactgaggctgttgggccaggccagtcatgctagaacatgactctggggacgacgacgaggctaccaccccagccgacaagagcgagctgca

SEQ ID NO: 803484 - DNA, 100 bp, Homo sapiens
ctgggataaacagaataggagagctgatcccatgttctcctgccctgaagcaggtctatgtacagacatggagcactcagaatctttctatgaccattac

SEQ ID NO: 803485 - DNA, 100 bp, Homo sapiens
aggatgacaagttgggagtcacaggctgaagccgacgtagcttctctgaacagacgcatccagctggttgaggaagagttggatcgtgcccaggagcgtc

SEQ ID NO: 803486 - DNA, 98 bp, Homo sapiens
cttacctgtttttccagctcacccactgccagcagagctgtccgcaggcttgtccaaaaggaaacatcggaatgaccacttaacatctacaacttcca

SEQ ID NO: 803487 - DNA, 100 bp, Homo sapiens
ctgtatgcactacctcctcctccccagttctactcaagccttattgaagagataggaactcttggttgggataatttaggtagaagcttaggctattgat

SEQ ID NO: 803488 - DNA, 98 bp, Homo sapiens
ggaacatgcattcaacatcgccagatatcaattaggcatagagaaactactcgatcctgaagatgcctgtgaggagccaccaacatttgaagctatgg

SEQ ID NO: 803489 - DNA, 100 bp, Homo sapiens
acgtctctaccgagcacaaactccacgaagccaacgcccaggcttgcagccaatttactggagcagggatgacgtagcccagtggctcaagtgggctgaa

SEQ ID NO: 803490 - DNA, 100 bp, Homo sapiens
aggaagaacagggtcgaggatcgaggtagtaaacctattgatggcaattttgctgactgtggaagtgactcatccaaactccatgccagctgtcaacatt

SEQ ID NO: 803491 - DNA, 130 bp, Homo sapiens
gaggttcacattgttgctgatgccacctcatcaagaagcatgatggacaggatgtttgccctcgaggtatacccgaaatcttgtggatcaaggaaatggaaaatttaatctgatgattctctgttggggt

SEQ ID NO: 803492 - DNA, 100 bp, Homo sapiens
atggagataaatggaattcttttaccatcttattaattcactctggtttgccagaacccaataaagatgccatcttccaaggcctgacgcaggaccaggg

SEQ ID NO: 803493 - DNA, 98 bp, Homo sapiens
tcgagagacctgcgtacattcggggtgccagaaggaaagcataggcagccttaagtgccttgaaacaattttctgaacaaggactggatccaatcgat

SEQ ID NO: 803494 - DNA, 100 bp, Homo sapiens
tggatcggcctggagccagtgcccaagtacggtttgctctctgatgtaaaggatggagtaaatcaagcagcacctgcatttggatttggcagcagtcaag

SEQ ID NO: 803495 - DNA, 100 bp, Homo sapiens
agctctgctgctgggggccctcgctctgaccaccgtgatgagcccctgtggaggtgaagacattgtgggcatccgtgtcattctggaccttactcccaac

SEQ ID NO: 803496 - DNA, 105 bp, Homo sapiens
cagcccacctgcaggtgaaaacaaccgatgtccaacttcaagcctttgattttgaagatgaccactttggaaatgatggagtttcactcttgttgcccaggctgg

SEQ ID NO: 803497 - DNA, 99 bp, Homo sapiens
aaacaaagtatgcctccgaaaaccacctcagccgcttcgtgtggttcttttctggcatcgtaggaggtggcctgctgagtccatgttgtacttagatgg

SEQ ID NO: 803498 - DNA, 100 bp, Homo sapiens
ggccctagaagggggatcttgggtgaaggtcagggcttgggcgctagctctccgaggcctgttctgaatcgcccgtctggcatgtttgattatgactttg

SEQ ID NO: 803499 - DNA, 98 bp, Homo sapiens
gaagtgggcagatgctggccatcatagggagctcaggatttaatagccatcggcctttgcaatgtcgtcagttcatttttcagatcttgtgtgtttac

SEQ ID NO: 803500 - DNA, 100 bp, Homo sapiens
actgcatcatgctgtctggagaaacagccaaaggggactatcctctggaggctgtgcgcatgcagcacctgtattctgaagaagccaataatctcattga

SEQ ID NO: 803501 - DNA, 100 bp, Homo sapiens
tcccactgattgtacattatgatgactttgggaaattgctgctggctgaggccctcctggagcagtgtttgaaggagaaccatgccaaaataaaagactc

SEQ ID NO: 803502 - DNA, 100 bp, Homo sapiens
ttagccagcccactccaactctcggaaccatgtttgcagacttggattatgacatcgaagaggataaactaacctgctaaggctgcctcagacctgactg

SEQ ID NO: 803503 - DNA, 132 bp, Homo sapiens
ctcttccttcgctaacgcctcccggctctcgtcagcctcccgccggccgtctccttaacaccgaacaccgctatcaagaattttaatggagctggatggaccaaattggcgggagaagctgtcacctattcc

SEQ ID NO: 803504 - DNA, 98 bp, Homo sapiens
tggctgctgtcacacctgccgttggtctggaccttggaatggacactcgggctgaggagccagtggaggaggcagtgaatttctctgcaaagaatgtc

SEQ ID NO: 803505 - DNA, 99 bp, Homo sapiens
accagcttctccagggagagagaaaccccaggctggaggacgccatcaggacagagcaaatttttcagaacataaaacaagaatatagtcgttatcaga

SEQ ID NO: 803506 - DNA, 100 bp, Homo sapiens
aaaatggttgctgttgcctcagagagtagcatcatcttgtggagtgttcaggatgggggaagtggaagtgaaattggtccataattcagcagccaaatct

SEQ ID NO: 803507 - DNA, 99 bp, Homo sapiens
atgaacgtggacagcctggcttggctactcactcttctgttaacagggtcctggcagaaagctgatgtcctgaccactggagctggtaacccagtagga

SEQ ID NO: 803508 - DNA, 100 bp, Homo sapiens
ctcttatctccaacgcacaagatcttgctcaagagtgacaaaaatgctgagtttcttccgtagaacactagggcgtcggtctatgcgtaaacatgcagag

SEQ ID NO: 803509 - DNA, 104 bp, Homo sapiens
gttgcgtgccctacttcaaggataagggcgacagcaacagctctgccggctggaaggtaagaatgattgatgttggctgatattggagtgctcattcacatgaa

SEQ ID NO: 803510 - DNA, 99 bp, Homo sapiens
tacatttagcgcatcatgtgatccgggtctgtaaacagatttggctaggattatttgatgatagatcttcagcaattccagacttcagggatccacaaa

SEQ ID NO: 803511 - DNA, 98 bp, Homo sapiens
tccagggtgtcaggactaagagaagtcacaaaacagcagatttcccaagagcagcggaaaatgatccagtcacaggaataaaggttggggagactaca

SEQ ID NO: 803512 - DNA, 98 bp, Homo sapiens
gatgaaggggataacttctatgtgattgatcaaggagagacggataaaaagaaggaggctgttgaaagcggcaaacgacaaattgagaacactttaaa

SEQ ID NO: 803513 - DNA, 100 bp, Homo sapiens
atgagagaagaaatacaggatgcctctcagctgccacctgcctttgacctttttgaagcctttgcaaaagccctggagagtgaatttgtttcctgccagc

SEQ ID NO: 803514 - DNA, 99 bp, Homo sapiens
tggaatccatgtttctggacgcggatttttggcctcatactctgttatagataaacaaggatcagctcagctactatttaataaaacaaaatctgtaga

SEQ ID NO: 803515 - DNA, 100 bp, Homo sapiens
tttatacaaatgaagaagttgcaaagaatactcattgcagcagccttcctcattatcagaaattaaagggaactgctcgcagaaagaagaaggtggttca

SEQ ID NO: 803516 - DNA, 98 bp, Homo sapiens
agtcttctaccttggaatagtgaatgaactctcagaaattgagcccaatgtattccttcgaccttttctggaagtgattcgctctgaagataccactg

SEQ ID NO: 803517 - DNA, 105 bp, Homo sapiens
agaaaaagtgcctgggttagccaagagagacagagaacactggatagacttcgaacatttaaacaggaactgcaagcacatgttgaccagataactgaaatggca

SEQ ID NO: 803518 - DNA, 100 bp, Homo sapiens
tgactgcacttcttttttgagaaaggaaggaatatatcctgactgattgtgactgaaaactcctgaggcatttcctggactagaatgggtagtgaagacc

SEQ ID NO: 803519 - DNA, 100 bp, Homo sapiens
gcacttgatgttatcacaagacaccttccctccatgaggatgttgccttatggctgtttagcaacaggagatcgctctggcctcattgaagttgtgagca

SEQ ID NO: 803520 - DNA, 98 bp, Homo sapiens
gcagatgcaacctctgcctttttccgctgtaaataattaagaagaccaagtagcatccaaggcagagatcctacaagaatccaggatgatgatcccag

SEQ ID NO: 803521 - DNA, 100 bp, Homo sapiens
agacccaacagaagaaattgaaattcttcttcgttatggacagcatccaaacattatcactctaaaggatagcaactttagaggtggcagatgccagccc

SEQ ID NO: 803522 - DNA, 100 bp, Homo sapiens
tgaccgggctgaagccaggagactgggtgattccagcaaatgctggtttagcttcaagcacaaatgccagcctgatatctacttcttctacaattgccaa

SEQ ID NO: 803523 - DNA, 98 bp, Homo sapiens
tacagccgtccaccttgccagccccagttctccttgacggagcccatgaaggcaagtatatcgcgtcaacacagcgacctgacgggacctggcgcaag

SEQ ID NO: 803524 - DNA, 100 bp, Homo sapiens
atgtagcgaggaggaacgcgctaaggcaaagcacctgtcaatcctttcccatggtaccgtggcagactgtgctgttgttggcaaggaagatcccttaaaa

SEQ ID NO: 803525 - DNA, 100 bp, Homo sapiens
ttcgacatcgagatcaaccgggagccggcattagtgccagcagtagttcccaagggctgtctcagccatccacccagacgactcagtatctgagagcaga

SEQ ID NO: 803526 - DNA, 98 bp, Homo sapiens
aactgtttaggaaaaaaagaagaagcttatgagtttgttcgtaaaggacttcgtaatgatgtcaagagtcatgtctatgtatgtccctgggaagctgc

SEQ ID NO: 803527 - DNA, 100 bp, Homo sapiens
ggcagcctatgctcacattgtccctgtgtctagcagtttcagagcagaaacagtcctgctccagctgtaacagcagcatctgtgaccaacatacaggcta

SEQ ID NO: 803528 - DNA, 98 bp, Homo sapiens
gtcatgtgcctcttgcaacatgtgtcagctgttagcgtccccaaaatgaaacataagccaaccaggcaacagaagaaagtagcaaaaggctattcctc

SEQ ID NO: 803529 - DNA, 100 bp, Homo sapiens
ataaagggctctgaaagctagaagaaaaggtgtacttgcaagaaacctcaggacttgagtaacagcaacatgggcggcgactggcggcgcgatggacctg

SEQ ID NO: 803530 - DNA, 100 bp, Homo sapiens
cgggcacccagctggtttgacactggactctcagagatgcgccattgaggactcagcaacttacactgtgcgagtgaagaacgcccacggccaggcctcc

SEQ ID NO: 803531 - DNA, 98 bp, Homo sapiens
agcctcttctgataactcaggatttacttgaaatgaaaggagattccaacctacttcaggcaacagtgcatcccgacagcagcaacctgatccccaag

SEQ ID NO: 803532 - DNA, 100 bp, Homo sapiens
atgtccaaaaacacatctgttccagtctctgcagtctttatggacaaacctgaagagtttatatctgaaatggacgtcagacatatttccaacatttggg

SEQ ID NO: 803533 - DNA, 100 bp, Homo sapiens
acagagttacctgcaccgttgtcctacttccagaatgcacagatgtctgaggacaaccacctgagcaatactgtttgccgcagaagattctgtccagtgg

SEQ ID NO: 803534 - DNA, 98 bp, Homo sapiens
ggagaatatgcagagcgacttgcgcgccttgtcactggagtgcaagaagaaattcccacctgtcaaagagatcctgaggtgcagaggcaattcccgga

SEQ ID NO: 803535 - DNA, 100 bp, Homo sapiens
ggctaaaaaccccggagtcttcctgatccatggacccgatgaacatagacacaggcccttgatgagcctccctatttgacagtgggcactgatgtgagtg

SEQ ID NO: 803536 - DNA, 100 bp, Homo sapiens
gtggaagcttttaagcctatactttctaccagaagcttgaagggtttggttaagggaggtcttcacttcagaaatccaagactcatattcatccagcttg

SEQ ID NO: 803537 - DNA, 99 bp, Homo sapiens
aaaagcattacaaatatgaagaggcattatttatgaccttttctatggaaagagactccttcagggtgagcaaaggcctggaaacctgtatgcagttaa

SEQ ID NO: 803538 - DNA, 100 bp, Homo sapiens
ggttggaaagtcttgccttcttcttaggtttgcacaaagaatggctcaagaagtactgacacatttaaaggagcatcctgatgcttggacaagagtcgac

SEQ ID NO: 803539 - DNA, 99 bp, Homo sapiens
ggtggccgtggacaagggcgtgttcgtgctgaataagaagaacaaactgacgcagagtaagttgagaagctgatgtctcctcgacttccaactggaacc

SEQ ID NO: 803540 - DNA, 99 bp, Homo sapiens
taaatggcgccgaagcaggacccgaagcctaaattccaggagggttatttcttatgagggtcatggatatcccctatctaaacttggaaggaccagact

SEQ ID NO: 803541 - DNA, 100 bp, Homo sapiens
tgcgcactgcgggcgcatccctgccccggcgccgtccgtgcccgcgggacctgacagccgggtcagagttgctctaggtcgtaaccagcctttgaaaaag

SEQ ID NO: 803542 - DNA, 100 bp, Homo sapiens
cggttgaaactagagatggacagcagatgcgtagcatttgctgcatgggttaattgagaatagaaatttgcccctggcaaatgcacacacctcatgctag

SEQ ID NO: 803543 - DNA, 100 bp, Homo sapiens
tcagaaaaagaagaaggatgatgatgatgaggagataggaggtccaaaagaagaacttattccagagaaactggccaagagacgaggtcttgctatgttg

SEQ ID NO: 803544 - DNA, 98 bp, Homo sapiens
cagcgactagtaagcctatgtcatttcatccaccacattacttagcagattctgaacacaaactcgagacgagttcaggaagagtactgggaagattt

SEQ ID NO: 803545 - DNA, 100 bp, Homo sapiens
acctcgtcccgggctgaattctctctccactcttcgagattggcacacccaggagtcggatggtcagggctgccctttctgtcgttgtgaaataaaagga

SEQ ID NO: 803546 - DNA, 98 bp, Homo sapiens
tcagatcggcattgctggacccgtgcacaaaacaacttgcagcagcttttcatgaggaatttgttgtgagagaagatttaatgggcctggcaatagga

SEQ ID NO: 803547 - DNA, 98 bp, Homo sapiens
ggagggagacgcgctgccgaggagaacccagcgggccataaaattttgagtagaaaaatccagaaatttgaaaatcagtatcgtggtagagagctgcc

SEQ ID NO: 803548 - DNA, 100 bp, Homo sapiens
gaagaagagaccactagaatctggaattgagatgttggatgacaataaccatcttattcagtgtataatggactctcagaataaaggaaagacctcagag

SEQ ID NO: 803549 - DNA, 100 bp, Homo sapiens
atctccagccagatactccccagtttctaaagcagtacttggagatgatgaaattacaaggggattacagtgacgcaattgagacgctgctcacagccat

SEQ ID NO: 803550 - DNA, 100 bp, Homo sapiens
aactggtgctgtctgggcttcatagcattcgcctactccgtgaaggtgacaacctcgtcaacaagccagacgagcgcggcttcacccccctcatctgggc

SEQ ID NO: 803551 - DNA, 145 bp, Homo sapiens
tatttctcctcagcattctgcagtagacccgttactccctgccacagatcctcatccaaagatcaatgagtccatagaggccactgtattctattgaagaacatgtctaacagtaacactactcaagagaccctggaaataatga

SEQ ID NO: 803552 - DNA, 100 bp, Homo sapiens
tgagagccgcagtggatggctggaggtgcagggccaggaggaacatgagtgcaccaattccagctggacatcactgtgaaaatgggacgggataaagtcc

SEQ ID NO: 803553 - DNA, 100 bp, Homo sapiens
cggcgacctgaggggagagggaacgcagctgaaagcgtgaactgtgatcatcctgaacatggggtcctgtttcttgttcgagagcttctcaacgtgatcc

SEQ ID NO: 803554 - DNA, 99 bp, Homo sapiens
gcggatcgggtggagtgtaggtcatatcgccgcgtcacgccgatgatggagctgaagcccaacgcaggtagcgaccgtgcctgggtctggaacacccac

SEQ ID NO: 803555 - DNA, 100 bp, Homo sapiens
gttgtgcttttacacggttttccaacatccagctacgactggtacaagctggaggaaagcaggaatgttcagaggcaaatgaagattctgcagaataagc

SEQ ID NO: 803556 - DNA, 98 bp, Homo sapiens
aaagaacagtaggatccttgctggggacgtggagacccatgtttccagagctttacctgagaaacaaggagaaattgaagctcaaataaaagaccttg

SEQ ID NO: 803557 - DNA, 100 bp, Homo sapiens
catgattgtgaagccttcccagacatgtgacacagtttattttcttgaaaaggctccaggcttcggcttggaaaatcccaccgccaaaattgagcccagc

SEQ ID NO: 803558 - DNA, 98 bp, Homo sapiens
taccctgtgaagatctctcaccatccaaaaaagaagagagggctcgacgagaggaggaggagaacaggaggaaggctgaggatgaggcccggaagaag

SEQ ID NO: 803559 - DNA, 98 bp, Homo sapiens
gcaggagataaggacacaaaggacatttctgcacccaaaccaggacctctaaaaaaggcacctgctgctaaggaccctgatgctcccataagacagaa

SEQ ID NO: 803560 - DNA, 100 bp, Homo sapiens
agaaggcttgggacaattatttgtgaagctttctttaactgcaatggcttagaagctgcatttaagatccgagcagttggcagactaaaaagagagcggt

SEQ ID NO: 803561 - DNA, 100 bp, Homo sapiens
tttcacaatgttgggttacttaaacgaacatctacaactgaaaaaggaagcagcaaatgcataccaaaggaggagatgttaaagtaacccatcttgcagg

SEQ ID NO: 803562 - DNA, 98 bp, Homo sapiens
gcggtcggtcgagtgtggcctgtgtggactcgcatcttgcccgaagccgggcggaggagagctcaagctaaggcaatgaatcgctccctggctaatgt

SEQ ID NO: 803563 - DNA, 99 bp, Homo sapiens
aaaaaggcagtgattcatttaaatctgagaagatggataaaatctcctccggtggcaaaaaggtcctggaatatgttttgaaatggcaaaatccatgtt

SEQ ID NO: 803564 - DNA, 100 bp, Homo sapiens
catttggtcctggagatgatgatgaaatccagtttgacgatattggagatgatgatgaagacattgatgataggaagtatcattctgcaaaggaggcata

SEQ ID NO: 803565 - DNA, 100 bp, Homo sapiens
ctaccacagagccatcaaaatcacagtggatgggccccgagaacctcgaaattggcggcagtaagcacacaatgaatgatcacctgcatgtcggcagcca

SEQ ID NO: 803566 - DNA, 107 bp, Homo sapiens
atgaccagtgtttactcctctctgagactgtctggggagctctccgaggaggataagatcaatgccctcattaaagcagccggtgtaaatgttgagcctttttggcc

SEQ ID NO: 803567 - DNA, 100 bp, Homo sapiens
agtgcaatgggaaatacctctcatcaaattactcagagggtggttctcttcccaaagtggaagccaaattcatcaattatgtgaagaattgcttccggat

SEQ ID NO: 803568 - DNA, 100 bp, Homo sapiens
gcatcagacacatgatccgcaagaacaagtaccgccccgacctgcgcatgaacaccaccgatagccacaccgaagagttctcccatttgctggttcccgg

SEQ ID NO: 803569 - DNA, 100 bp, Homo sapiens
agctgcgccacattgtggatgaggtcaatggattaataaggttggatggcaagcatgtggtgtttggcaaagtgaaagaaggcatgaatattgtggaggc

SEQ ID NO: 803570 - DNA, 99 bp, Homo sapiens
atggcccggctggctgactacttcatcgtggtaggctatgaccacgagaagccagagctcttcagaaaccaggctgctttcaggaacattgctgtggat

SEQ ID NO: 803571 - DNA, 100 bp, Homo sapiens
gttcttactggccctgagtctttgggggcagcctgcagaggctgcggtgaccaagaatatggcccaggtgaccaaagccctggacaaggccctgagcacc

SEQ ID NO: 803572 - DNA, 98 bp, Homo sapiens
aattacagctactccagcaacatcttgtccataaggctgaaccggcaaaaaaatccagttacactcttaaaggaattgtcagtgataaagtctcgata

SEQ ID NO: 803573 - DNA, 98 bp, Homo sapiens
cctctacatggtcccatgagattcccaccttctttatctgaaacaaacaagttggatggcaagcatgtggtgtttggcaaagtgaaagaaggcatgaa

SEQ ID NO: 803574 - DNA, 98 bp, Homo sapiens
agaatacagagagaaaattgagacggagctaagagatatctgcaatgatgtactgcattccaggatgccttgaagattttctgtaggataaaaggtgg

SEQ ID NO: 803575 - DNA, 100 bp, Homo sapiens
tgtgctggagggcactaccagatgggattctgaaggaagatttccattaggtaatttgtttaatcagtgcaagcgaaattaagggaaaatggatgtagaa

SEQ ID NO: 803576 - DNA, 100 bp, Homo sapiens
tctaccaggagaggagggaactgcggagcggggttcaaaaagaattcttcgctccaacgagatcgtccttccagctagtggactggtggaaacagagctc

SEQ ID NO: 803577 - DNA, 100 bp, Homo sapiens
tcagagagcataatagaagtactgcgttttgatgatggagggctactacagctaatcttccagtaccaacaattgcagcaatagatggactcgctttagg

SEQ ID NO: 803578 - DNA, 99 bp, Homo sapiens
gcacagctaagatgcccggacatcctggaagctgggaaatggaccagtcctgcctctgttgtagaagacatgtggtgtatataaagtttgtgatcgttg

SEQ ID NO: 803579 - DNA, 100 bp, Homo sapiens
gccgttagtcccttaatacaaagggatgaatcttcaagtcatgaatgtaaccagcgcacaatccttctctatggagtcggcaaagagcgtgatgaagcaa

SEQ ID NO: 803580 - DNA, 100 bp, Homo sapiens
atggcccaggaggacgactgggaccgggacctgctgctggacccggcctgggagaagcagcagcgcaaggttcacagtccaacttcatatctctgccgac

SEQ ID NO: 803581 - DNA, 98 bp, Homo sapiens
gaaatgtcccagctccacgggtttccacattcaggagaatgaagaaagccattacgaggctctcaaaattagagagatgtgtaattgtccaccactgt

SEQ ID NO: 803582 - DNA, 100 bp, Homo sapiens
agaagttccgttaccaggatgatttcttgctagatgaaagtggatgcctccattgcacacagattccacatcatgagagaaaaacacccagagaaattca

SEQ ID NO: 803583 - DNA, 100 bp, Homo sapiens
atgacacaactggaaagctcaactagtaaaatgcttaaagcaggcataagagtgctgaacaaatggcagatgaacccatatgacagaggatctgcttttg

SEQ ID NO: 803584 - DNA, 98 bp, Homo sapiens
aagtacgcacagtaccaggcctcatccttccaggagtctctgcaggttctgcggcaaacaccgccacaggtacaacatctacaaatgtcgtggagcca

SEQ ID NO: 803585 - DNA, 99 bp, Homo sapiens
aatcgcttgtacaaaggagagtttaaacagccaaaacagttcattcatattcagcgtgagaagccttataagtgctcatgggagggatgtgagtggcgt

SEQ ID NO: 803586 - DNA, 51 bp, Homo sapiens
cccagcctgttgctgacactagtgattgacttggcctctacttcttgttaa

SEQ ID NO: 803587 - DNA, 98 bp, Homo sapiens
tctacatgtaaaaggccactgactcctacttcctctgtatagagcaactgttgaactcagctgcctgtagccatctgaatgcagttattattcatcaa

SEQ ID NO: 803588 - DNA, 98 bp, Homo sapiens
tatctgaagaaaagtagaaggaaaaacagaacgttgcaaactctggaaaaaaacttgggaccagtccaccatgcctgaagtcaaagacctctcagaag

SEQ ID NO: 803589 - DNA, 98 bp, Homo sapiens
aatggaacgcctacagattgatgaacagctgcgacagattggtatgggctattccatgtatcgggaattctgggcaaaacctaagccttagaagaaga

SEQ ID NO: 803590 - DNA, 100 bp, Homo sapiens
cagagaatatccatgaactctgggttatgaataaaattgagcttggctggcagtatggtccgattattgctcccccagagcggaagtactcagtctggat

SEQ ID NO: 803591 - DNA, 98 bp, Homo sapiens
gcagcacgttggagagggaggagaaggaggacaagctctccagggacaggacaactggactgagcacggaaggcatctaccgggtcagcgggaacaag

SEQ ID NO: 803592 - DNA, 100 bp, Homo sapiens
aacccgcaaacggtgggggtcggccggggccgcttcaccacttacgaaatcagggtcaaggctctgctgaccgagatgatggaaaggtgtaagaaactag

SEQ ID NO: 803593 - DNA, 98 bp, Homo sapiens
gatgcatgccagagacttcacagtttctgctctgaatccttgttgcctgatgactatgtggttccccttgactggaagacactaaagatgatctactt

SEQ ID NO: 803594 - DNA, 98 bp, Homo sapiens
gttgtctcggcagcgcccgcggagacgtgaagaggaaagaccggcagagaccaatgccaatgtggacaactcggcgtccccctcggtggcccagctgg

SEQ ID NO: 803595 - DNA, 100 bp, Homo sapiens
gggtgggcaacttacccgagaacgtgcgggaagagaagatcatcgagcatttcaaacgatcgagcctgcgtgctgccgaagcagggcgccgagtccatgc

SEQ ID NO: 803596 - DNA, 100 bp, Homo sapiens
ggttcaaactctttagaagatggccagaccttggggaccaagaaaagcagcactttggacatcagacagtgcaggagaagaatgtgatgcggcagaaggg

SEQ ID NO: 803597 - DNA, 98 bp, Homo sapiens
ggccgtgaagaccttcaatagcgaggaaacctcgacctgtctcccagttggttgcacagcaggttactcagcagtttgtgcctcctacacagtcaaag

SEQ ID NO: 803598 - DNA, 100 bp, Homo sapiens
cctcctctgatgccaggaatgccaccagttatgccaggcatgccacctgggccagggtcaagccccaccggaccttcagatttaatgagtgtgtctgtac

SEQ ID NO: 803599 - DNA, 99 bp, Homo sapiens
tcgtgtccatcaaaatccagatgctggatgacacccaggaggcatttgaagttccagtaaaataccatgaagattttgaaaaaacaaaggggagaggct

SEQ ID NO: 803600 - DNA, 100 bp, Homo sapiens
tcaggagtgtagaattggcaaagttattgccagcttcctggcattttttactgtctacagaaacttattgtaattcatttttcctcactccagtagtaag

SEQ ID NO: 803601 - DNA, 100 bp, Homo sapiens
tgggccgcctaggcaagacagtcgacgcgctcaccggctgggtgggttcgagcaactaccggcttgttacagcttatcagatgcttcagagagagaagaa

SEQ ID NO: 803602 - DNA, 98 bp, Homo sapiens
ttccatgtaccactggtaattatgacttttggacagtccaagctatatcgaagattcacttgtcatggattagtgactggtcagagttatattttccg

SEQ ID NO: 803603 - DNA, 100 bp, Homo sapiens
gccgatccctcatccacctcttcaggacctactccttcctgaacctcctgttcctctgctatccatgcttcctgaaacttggagagtggcagctgaatct

SEQ ID NO: 803604 - DNA, 100 bp, Homo sapiens
catgaggaactctgagtatgtgaccgaaccgatccaggcctacatcatcccatcgggagatgctcatcagattcatagtgaccacttagtagctagtgag

SEQ ID NO: 803605 - DNA, 100 bp, Homo sapiens
gccaaagaagcagaaatgagcagaaaggagttggggcttgatgaaggcgtggatagcctgaaggcagccattcaggtacaccagaggatcgcttcctggc

SEQ ID NO: 803606 - DNA, 99 bp, Homo sapiens
actttatgagctaaacaaggattctgaactcttgattcatggttacagtcaaaatcatcttcgacaagcacaggtgactctcatagacgctacaacttg

SEQ ID NO: 803607 - DNA, 99 bp, Homo sapiens
tgctgtcgcctgcagctgctcgcctgtctccgtcggaagggagcccaagctttgcagaggattgtttgatggtgggtctccacacttgtggtgatctgg

SEQ ID NO: 803608 - DNA, 100 bp, Homo sapiens
aaaagctacttgtgagtgcaagagtggttacatctctgtccagggagactctgcctactgtgaaggacatagttgacggcaaggaaaaagaaggacaaga

SEQ ID NO: 803609 - DNA, 100 bp, Homo sapiens
caagcaaaatattaaacttttagacctgaagccatacaaagtaagctggaaagcagatggtactcgggtgttaaataccacattatttgaaagctgggag

SEQ ID NO: 803610 - DNA, 100 bp, Homo sapiens
gacactatgaatgctacttggatgcctcttaaggtgctactcgtgagcagtagtcgccatccagacagatggattgtccctggaggaggcatggagcccg

SEQ ID NO: 803611 - DNA, 98 bp, Homo sapiens
atttcagcaacaaggaaataaattagtggcagagtaagggtgacttggacaaaccaattcttgctcccgaacctcttgtcatggataacctggactca

SEQ ID NO: 803612 - DNA, 98 bp, Homo sapiens
gccatcctgcagctgggcaacatctgcttctcctcctcagaggagttgtttaaaggctttgcccgccacctctcacacttgctgactcagaagacctc

SEQ ID NO: 803613 - DNA, 100 bp, Homo sapiens
atgcaactctgcgttccacttcggccaagaaattagacaagaaacattggaaaagaaatcctgataagaactgctttcgctgctgggacatcgccttggg

SEQ ID NO: 803614 - DNA, 100 bp, Homo sapiens
gataaaactgagaaagaattgcccaaaatgagccagtggacatttgggagcaataaaaataagaagaaaggaaaagccagaaaaatagagaagaaaggaa

SEQ ID NO: 803615 - DNA, 98 bp, Homo sapiens
ggagaacagtccgaaatggcggggactgttggtctcggccctgcggaaggtatcatgaactgatcactaaatatgggaagttggagcctttggcagaa

SEQ ID NO: 803616 - DNA, 98 bp, Homo sapiens
gctcttcagtagagttcgaggtggagttcaggttcttttgcagcagtggatcgaatatatcaagagtaattccctcctggtcccagacagtctaagag

SEQ ID NO: 803617 - DNA, 100 bp, Homo sapiens
cggtggaagacgcgtgccgcggcgcctggttgcctgcagcggcccggacccgagagctccttcgagaactcatagaacggaagaccagctccttggatcc

SEQ ID NO: 803618 - DNA, 100 bp, Homo sapiens
aaggaccagaagaaactgcaccggaaatgtgcctaccaggagctgctaagacacatggttgcacagaaggtgaaaccaaatcttcagacttttaatacca

SEQ ID NO: 803619 - DNA, 100 bp, Homo sapiens
tcagggccaatctatatctaacaagctgtctgacaacatctacccggtggaggacctcgccgccacgtcggtgaccatctttcccaatgccgaactggga

SEQ ID NO: 803620 - DNA, 100 bp, Homo sapiens
ttgtcccacagtcaggagagacttgtgaatgaaacccgagagtgtcaaagcttgcggcttgagctagagaaactcagagcatgagaagaggtgttggagt

SEQ ID NO: 803621 - DNA, 100 bp, Homo sapiens
atttatgcccaagaagggggaccttggcctttctaaaaagcggagcgtgctttggacaccatgaattttgatgttataaagggcaagccagtacgcatca

SEQ ID NO: 803622 - DNA, 98 bp, Homo sapiens
ggagtaagcggcgcggtagcgaaggccgccgaacctgcctggctagccggcgacttgagtgacgagcctttccacagaagaaaacctgtctgcctcca

SEQ ID NO: 803623 - DNA, 98 bp, Homo sapiens
tcctgcagaatcacgcggacatcgtctcctgtgtggcgatggtcttcctgctggggctcatgtttgaggttgaattgaccaaagcaatggtgatggag

SEQ ID NO: 803624 - DNA, 98 bp, Homo sapiens
gagatccagttcctgcgaacttgtgccccctaccaccggagccagagaatggtggctacatctgccacccccggccctgcagagaccccctgacagca

SEQ ID NO: 803625 - DNA, 99 bp, Homo sapiens
ccggaatcagacggtgccccatagatggccagctttcccccgagggtcaacgagaaagagatcgggaccagttactctccacaagaaaattcacacaac

SEQ ID NO: 803626 - DNA, 98 bp, Homo sapiens
cagaaacttgtcttcgatgatatttgctgatcccacaccctttcatattcaagctgaagtgacgatgaaaacaaatttctttggtacccgagatgtgt

SEQ ID NO: 803627 - DNA, 100 bp, Homo sapiens
gtgacaaaaaagctgcctatgaaagtctaatattagatgggtttgtcaagggctatttaatgagttactagaaaatgggatttctgtgtggcctggttat

SEQ ID NO: 803628 - DNA, 100 bp, Homo sapiens
tcaagtgtctggagcccgacggtctctacaagtcgaatgagtgatttgagtgtaattggtcatccaatagattcagaatctaaagaagatgaaccttgta

SEQ ID NO: 803629 - DNA, 98 bp, Homo sapiens
ttctgttatcctgtgacctgcaggtactgggagatccatagggaggacggcggaacatctggaggctgggaaatgttgatgtttcatgtggacaatgg

SEQ ID NO: 803630 - DNA, 100 bp, Homo sapiens
gacccagaacaaagcattgccagaaaacgttaaggaaaattgcctaagaattatgacccaaaagttaccccagatccagaaagatggctgccaatgcgag

SEQ ID NO: 803631 - DNA, 99 bp, Homo sapiens
tccaaccccgggctcggcggcggcggccaggtccctgctgaatcacacgccgccatccgggaggcccagggaagcgcttcagcatggaagggatctcaa

SEQ ID NO: 803632 - DNA, 98 bp, Homo sapiens
cctggtaatagaggacttgaagcagaaagcaagtgaatacgagtcagaaggagtaaaatttcaagagactgaaaccagatctgagtttcgctgttcca

SEQ ID NO: 803633 - DNA, 98 bp, Homo sapiens
gccttcttaggagttgactttggctactactggttccatcgtatggctcatgggtgcttattggttctccgttagttggccaacccaaaaacagaact

SEQ ID NO: 803634 - DNA, 100 bp, Homo sapiens
cgggatgctgtactccttgtctttgcaaacaaacagggactttgaacatgtcggggatcgccctcagcagactcgcccaggagaggaaagcatggaggaa

SEQ ID NO: 803635 - DNA, 103 bp, Homo sapiens
cgacaaggagggcaatggcactgtcatgggtgctgagcttcgccacgtgctggccacgctgggtgagagcacagtaaggactattgctatggatggtacagaa

SEQ ID NO: 803636 - DNA, 100 bp, Homo sapiens
cataggaggaaaattcatcatctggtcgcagcagttgtggtagaaatttctgggttagtggactctcttctacaaccagagctacagatttgaagaatct

SEQ ID NO: 803637 - DNA, 98 bp, Homo sapiens
aaaacttgcaaggaaaggaacatgtttgaatttcagatgtgttcctcaatgaatcacggaaaactgaggctgccatcaaaaacttcagtccctactac

SEQ ID NO: 803638 - DNA, 98 bp, Homo sapiens
accaagagtttgctcctggctgctttgatgtcagtgctgctactccacctctgcggcgaatcagaagcatttgacattgtgcagcaaagaaatggtta

SEQ ID NO: 803639 - DNA, 99 bp, Homo sapiens
ggggcgctgcctggcccaggcgcacacggaagtgatgcacagtaatcaaaagggcttacttccagagccaaatccagtacaaattatgaaaagtttaaa

SEQ ID NO: 803640 - DNA, 98 bp, Homo sapiens
tggaccgtggttttgcaggaaatgtgaatctcaggagagagcagccagagtgatgtctcgaagtcggagtccttctccaataagatgtggattgccaa

SEQ ID NO: 803641 - DNA, 98 bp, Homo sapiens
ccagaccaggaacccaccagaaggaaccaattccggacacataacaagcagcagtgaggacaccaaagacccaacatgagtgaagtttcctgcaagaa

SEQ ID NO: 803642 - DNA, 100 bp, Homo sapiens
attgtgctcagtactctgatgcatctcatgatacttgtaaagaaaccaccatcatgggttcgggtcccatagaccccaaagaacttctcaagggcctgga

SEQ ID NO: 803643 - DNA, 100 bp, Homo sapiens
tgcgcttctacccagtggccttcttttgctgctggggcccagtcccaggtgctgttcccactgaatccatacaaggaagtacctttgaagagaagatatt

SEQ ID NO: 803644 - DNA, 100 bp, Homo sapiens
aagactctgaggctgatatgcaatgtcacttacaacattaatcagatactgcatttaaggtactgtgagaatagagatgtttcgaaatatgcagaatgca

SEQ ID NO: 803645 - DNA, 99 bp, Homo sapiens
tgccaccgaggccccctcttcgcctcctccagcccacagggaacccagactggttggaggggacattccctgttctggacgtgttgaagtgaagcatgg

SEQ ID NO: 803646 - DNA, 98 bp, Homo sapiens
cagaggatccagtgttcaccatcctggccccggaagacttgatcctgctccctcggtgtctgcattgactcctcatgctgggactggacccgtcaacc

SEQ ID NO: 803647 - DNA, 100 bp, Homo sapiens
gctactgtgtccaacaatgtgccgggttccgatttcagcatcggggcagacaccgccctgaacactatcaccgacggtacagccaaagaccggagctttg

SEQ ID NO: 803648 - DNA, 137 bp, Homo sapiens
cggctttagtggcagcatgaagcgcaccccgactgccgaggaacgagagcgcgaagctaagcctctcttctagatcaagtcatgtgacaagttcttgccaatgaatggaacatgacaggaagtgatatgtgttattt

SEQ ID NO: 803649 - DNA, 99 bp, Homo sapiens
ttaaccagcatggctacttcatattttggaaagcagtttttaagacaagttgatgctatgaaactgggagtaaaggaaatgaagaaggcatacaagcaa

SEQ ID NO: 803650 - DNA, 98 bp, Homo sapiens
tccagtgaagattgacaaagtgcgcattttcttattaggactggctgataacgaagcagctattgtccagagcttcttcgagacaccttcacttccct

SEQ ID NO: 803651 - DNA, 141 bp, Homo sapiens
atgcacatgtctgggaggataattgggatgatgacaatgtagaggatgacttctctaatcagttacggtagtaaacctattgatggcaattttgctgactgtggaagtgactcatccaaactccatgccagctgtcaacat

SEQ ID NO: 803652 - DNA, 100 bp, Homo sapiens
gagcattgcttctcatacagtaaggagcggacatgataagcatacataatgaagaagaaaatgcttttatactggatactttgaaaaagcaatggaaagg

SEQ ID NO: 803653 - DNA, 99 bp, Homo sapiens
ggaagttacggtttacagcgaagtccacccagcgtttccgaggccgtggagaagtgtaaagatgcaggattggccaagtccatcggggtgtccaacttc

SEQ ID NO: 803654 - DNA, 100 bp, Homo sapiens
tgtaatgattctcacctatgccctcatgaacgataaatgagatgtcgaaggaagtcaccaaattgaaggaggccttgaacagcctctcccagctctccta

SEQ ID NO: 803655 - DNA, 100 bp, Homo sapiens
aggccatttttcttaacagcaattgctttgaacatctcatacgactgctacagaactgcaagaaatgatggaagaattgcatagcctggacccacgacgg

SEQ ID NO: 803656 - DNA, 100 bp, Homo sapiens
ttcgtgaaagctttctgcccagagctcctggaccaatgcatcttcccaccaccttaaaccactgtcggtggtggggagcggcagctggcagagagtcaac

SEQ ID NO: 803657 - DNA, 99 bp, Homo sapiens
gctggagcggatcccacacctccggaccgagggacgcggtacgaggatgtcgtccaggaaagattgtgcagatgactgaagcagaagttcgaggcttat

SEQ ID NO: 803658 - DNA, 99 bp, Homo sapiens
gagcagcagccgcccgcttcaaccccaggggaccagaggaactcagccctgattgcggagatacaactcgtcaacgaatcaaattcagtgatgacagag

SEQ ID NO: 803659 - DNA, 100 bp, Homo sapiens
acaacatcatgcagtggaatgcagttatatttgggtgaacaacaacgggatcatctccttcctgaaggaggtttctcagttcaccccagtggccttcccc

SEQ ID NO: 803660 - DNA, 98 bp, Homo sapiens
caagcgggaccgagcaggaatccgtatctgggaacagttttccaagagataacttcaccaagatgtccagtgataggcaaaggtccgatgatgagagc

SEQ ID NO: 803661 - DNA, 99 bp, Homo sapiens
caagattgtcgcaaattttgcactactggcatcgatggagccatgacaatttgggatttcaagctcttcctgctgcccacattcctgcaccccctcatg

SEQ ID NO: 803662 - DNA, 98 bp, Homo sapiens
tagaggcagggtcatccttgcccttgtcctcccctttcatccctatgtggaaaacgagagacaagagagacacctccaacttcgacaaagagttcacc

SEQ ID NO: 803663 - DNA, 100 bp, Homo sapiens
gctaacacatgagtttctacaaatattggagaaaacgcctaataggttgaagaagattcgaaactggagggttgaaaattggtgtcctcatttaccttgg

SEQ ID NO: 803664 - DNA, 98 bp, Homo sapiens
agccagctgaaaacactgattttggatgctctgaagaaagatactgggaagaagagcaggtcagcagtccaaatattctacgacttatttatcaagga

SEQ ID NO: 803665 - DNA, 100 bp, Homo sapiens
tggttcagcctggaaggcgaggggcaggactccccagacagtggcctcagtgtgaattaaacaaccaccatgtcgagcaaaaaggcaaagaccaagacca

SEQ ID NO: 803666 - DNA, 99 bp, Homo sapiens
gaaggaactttgggtcctgaatcttctgggagctgaggaaccagatatcttgaaaagctgccagaaaggcatttattaatacagcaaaagaaatttatg

SEQ ID NO: 803667 - DNA, 100 bp, Homo sapiens
gccggggacctgcatgtgtgtgcgcgcgaaggagcggaagaatggcagtgctcaaactcaccgaccagggatgtttcagcagcccctgagaaggaagagg

SEQ ID NO: 803668 - DNA, 141 bp, Homo sapiens
gccaaagaaaatgaaaacatccacaatcagaaccctgaagaactttgtacttcccccaccttaatgacatctcagacttcctggctcagctctttatggacacaggttatgaagaagtggtaaacgagtatgtgtttcgag

SEQ ID NO: 803669 - DNA, 100 bp, Homo sapiens
tctccccccgtgaagttcctcatcagcccagagttcttcaccgtgctgcattctaaccctgccttagaaaatttacgtgtatacctgtgtgagaaaatca

SEQ ID NO: 803670 - DNA, 98 bp, Homo sapiens
gactaaatgaagattttaggcggtatcaaatggaaagtttttccaaatattcatctgtacaggatttcagatgcatgccaggtttccactgattgcca

SEQ ID NO: 803671 - DNA, 100 bp, Homo sapiens
gacctggtggaggtgttaaatgaaaatcggtttgggcttggccagccaggaagaatacctggttctgtgaatgccatgagagttctgagcacaagtacag

SEQ ID NO: 803672 - DNA, 100 bp, Homo sapiens
tgggttcggcctccgcgcggtgcagcgcagtctcaggccgcgggacaaggttattaacacggggatcaaagtctggtgtagaaataacagcggtgaagag

SEQ ID NO: 803673 - DNA, 99 bp, Homo sapiens
gaaaatcggcagctgagacggccttggccggtcccgatcacacagcaagaatccaaaaaggtaggtgtattacataagacaggtataagtagtgaagtt

SEQ ID NO: 803674 - DNA, 98 bp, Homo sapiens
agaaatcgacgtgctgttttcatagggactctgaggaggaagaaaatgagctggaagctattaacaggaagctaataagttcacagccttatgtacct

SEQ ID NO: 803675 - DNA, 100 bp, Homo sapiens
atgcaagatctgtggagacaaatcatcaggaatccattatggtgtcattacatgtgaaggctgcaagggaaaatatttatccccaaacagaaacctgtac

SEQ ID NO: 803676 - DNA, 98 bp, Homo sapiens
ttactccctgccacagatcctcatccaaagatcaatgagcttggaccccgattggctgcaatgctgaactttaatcttcagcaactttgtggccccaa

SEQ ID NO: 803677 - DNA, 100 bp, Homo sapiens
ccccaggaagtgccaggaccttccagaccaggggctggcgtcttcttcctgtcctcggccgagggggagcagatcagcttcctgttcgactgcatcgtcc

SEQ ID NO: 803678 - DNA, 100 bp, Homo sapiens
gggatattatcaaatctactactgttcatggcagggatcactacttgtgtgatgtgacatgggcaacacaagaaagaatttctttgcagtggctcaggag

SEQ ID NO: 803679 - DNA, 100 bp, Homo sapiens
ccaggaagaggagctgctgaggatcgccaaaaagctggagaagatggtggccaggaagaacacgtgggtccgccattaggtactcagacagagttaagac

SEQ ID NO: 803680 - DNA, 99 bp, Homo sapiens
gtcaggcagttggttgggacccgctccaaccctcggacagtactgcttttaaagagacagtgttagggatcttggaagcacagccaacatgtgtgacat

SEQ ID NO: 803681 - DNA, 98 bp, Homo sapiens
agccatcacctggatttacctgttttctgggagcttcgaaggtgatgatgaacagtctacacagatggctgcaagttgggaagatgataaagttacag

SEQ ID NO: 803682 - DNA, 100 bp, Homo sapiens
gggacgctcccagccctgaagagaaactgcaccttatcacccggaacctgcaggttgctcggcgctggggcatccagaagaaccggccagccatgaacta

SEQ ID NO: 803683 - DNA, 100 bp, Homo sapiens
ggataacacaagtcccttgccgggccccgagcacgacagccgcagtctccacccagaaccagagagtcccccccaacccgggatgtaccctctggccaca

SEQ ID NO: 803684 - DNA, 100 bp, Homo sapiens
ctccagcctgtgaaagtgtggaaagctcgttccaggaaaattggaataatcacctcattggctggctttcaggcgagattgcatactcaagaagaggagg

SEQ ID NO: 803685 - DNA, 100 bp, Homo sapiens
tgctggatggaggggattttgtcagcttgtcgtcaagtgttgtacagtgttttgggcatgcacgtgatactcacacagtggcttctgctcaccaacagat

SEQ ID NO: 803686 - DNA, 98 bp, Homo sapiens
gctgaacgacttttaactttcattgtcttttccgcccgcttcgatcgcctcgcgccggctgctctttccggggtcggcactcttcaccctcccgagcc

SEQ ID NO: 803687 - DNA, 100 bp, Homo sapiens
tctgagtggaaacaaaataaaagatctcagtacagtagaagctctggaggtgctcctgtaccctggccacagcccaatcctgccactgctgacatctggg

SEQ ID NO: 803688 - DNA, 98 bp, Homo sapiens
ctactgtgatactaactcggactctctgcagtcactgaagcttcttaatgaagaggataactcagaatcatcggctatagagcagccacctacttcaa

SEQ ID NO: 803689 - DNA, 100 bp, Homo sapiens
ctgtcacatatgatgattccgttggagtagaagtgtccagcgacagcttctgggagcccaccaagaaaacacattgtggagcgctatacagagttttatc

SEQ ID NO: 803690 - DNA, 100 bp, Homo sapiens
tgatgcagaaattaccacattgaagacaatctcaaggaccaaaaaagaacttcgtgtgaaaattttcctgggggtgtggatgaatggaacatagctcgcc

SEQ ID NO: 803691 - DNA, 98 bp, Homo sapiens
ttagacccgtttcctatagatgagaaaccatacaagctgtgttctgagccatctgaagatgaagagtcccaaggccttcctaccatggcacgtagaaa

SEQ ID NO: 803692 - DNA, 100 bp, Homo sapiens
acaagatcaatgagttccagtgcgagtgccccacggatggtccatacccttacactctgaagttgtgtttctccactgctcagcacgcctcctaattagg

SEQ ID NO: 803693 - DNA, 100 bp, Homo sapiens
gacaaagaatactataaagtaaaagaacctggtgaaagtcccatattctgggtagtagatcatgcagaagaaaacaagatgaactccaaaaacttggggg

SEQ ID NO: 803694 - DNA, 98 bp, Homo sapiens
gggcagacggcgttttgcgcccaactggcattattggagaccatgtttggtgtaaaagtgattataactggggatgcatttgttcctggagaaagaag

SEQ ID NO: 803695 - DNA, 100 bp, Homo sapiens
ggaaaaacagtggctgccaaatatatcatgagctacatctccagagtgtctggaggagggaccaaagtccagcaagtctggaaaagtttgaaattccagt

SEQ ID NO: 803696 - DNA, 98 bp, Homo sapiens
ctcattgtccaagaaaggaacttgcatgtttccctcaatgttcagagtcgtgacacttcaagaggtgggcagattattcatttgtgaatgaacagcat

SEQ ID NO: 803697 - DNA, 100 bp, Homo sapiens
tgagggaaaagcgaggcaaggcaggcggttgtcggacaagtaaccgcaagagcttgattgtgacctctagcacatcacctacactaccacggccacactc

SEQ ID NO: 803698 - DNA, 99 bp, Homo sapiens
tcatcaaagcttatgaaaaagttggatgtcagttaaggacggaatcagtccccaatgcctggaaattcctcattggattactgtgttttaaacagaatt

SEQ ID NO: 803699 - DNA, 99 bp, Homo sapiens
ccactgaagatcctggtgtcgccatgggccgccgccccgcccgttgggtttctccaaggacatcaaggtgcccaagagccgctacctgggctacatcaa

SEQ ID NO: 803700 - DNA, 100 bp, Homo sapiens
ttttctaccaagtcttgcagagtttcaggaggcaggcattatccaattggtttgctatttgatcttcttgcatcaagttcagctcttccttggaacatca

SEQ ID NO: 803701 - DNA, 100 bp, Homo sapiens
acattcttcatcatgctgaagattccagaggagtgtgttgctgaagaggaattgcctcacctgctcaccgaaaggaaagatgaggtctatcttaatctgg

SEQ ID NO: 803702 - DNA, 100 bp, Homo sapiens
cttctggcaagaggtgctgatatcaacacggtcaacgtggacggcttgacagccctgcaccagtccgatacatacttctgcatgtctatgcgaataccag

SEQ ID NO: 803703 - DNA, 100 bp, Homo sapiens
gtcatcgacagctgcaaggaggccgtcaccttcaaggccgtcagacaagagagaggctgctcacccaacagacgtctccatctccaaaacagccttgtac

SEQ ID NO: 803704 - DNA, 100 bp, Homo sapiens
gtgaaatgtcatgcctctgaaaatgaagcattatgccagtacatacaggcttctaaagccagggatggtgccagccctttcatttcaagtacgactgaag

SEQ ID NO: 803705 - DNA, 98 bp, Homo sapiens
accgcccctccgcttccagacattctcagctgtcagtttcttaaacaattaggtctacatcctaactggcaattcgttgatgtatatggaatggatcc

SEQ ID NO: 803706 - DNA, 100 bp, Homo sapiens
gcgcccatggcagagccagaccgctccctggggaagggaatgcagggttgctggggctgggcccagaagcagcagcaccagggaagaggattcgaaaacc

SEQ ID NO: 803707 - DNA, 99 bp, Homo sapiens
gatggctgcgttgacacgtcttatttaatccacatcataggtaaaccgtcctattggcagggtacagatcttcactgcagacttatctgaaataccccg

SEQ ID NO: 803708 - DNA, 100 bp, Homo sapiens
tctatgatgtcaaggataagtctcatgacaccacctacaacggccagagcgagaacaacgaagactatgagatccccccgataacacctcccaacctccc

SEQ ID NO: 803709 - DNA, 100 bp, Homo sapiens
gaacctttatcaagaaacccaaactagcaaaacctatggagaagataagcctcagcaaatcacccaaatgtatttgctgcagttggaaggggtttatacg

SEQ ID NO: 803710 - DNA, 100 bp, Homo sapiens
cagatggctttctcactgaaagcctgctgaaaatgactgaatataaacttgtggtagttggagctggtggcgtaggcaagagtgccttgacgatacagct

SEQ ID NO: 803711 - DNA, 100 bp, Homo sapiens
caaaaagccgagtagagaagttatcagccctgggcgctgcctatggcacagccaagagcggtaccggcattgcggccatgtctgtcatgcggccggagca

SEQ ID NO: 803712 - DNA, 99 bp, Homo sapiens
cgacgggcagccccggactcttcaggccttgaaaagaggatagaccaggctgtggaggagtggaatattgagaaggctgaggaactcagcaaccagcta

SEQ ID NO: 803713 - DNA, 98 bp, Homo sapiens
ttcagttggcaaaccagatatatgacttgttaatgaaggagttcccccttctgagtatgttcaatatccatgaaaaccttttagaagcccttctggaa

SEQ ID NO: 803714 - DNA, 99 bp, Homo sapiens
caagactatgaatctctgttccaaatgctttgctggtttggacatatttgactcttttccccccaggttgaattgaccaaagcaatggtgatggagaag

SEQ ID NO: 803715 - DNA, 98 bp, Homo sapiens
tgaccatcttcaacctgacccacatcagcgctgagaagaggaaagatacgtaggtaacctttccagagatgtgacagaagtccttatacttcagttgt

SEQ ID NO: 803716 - DNA, 99 bp, Homo sapiens
ctgccatccgggagcagacggtcaagagacctttggccagagcaagacataaaagattcttttcaacaagtgatactgagaagacatggcaaatgtgaa

SEQ ID NO: 803717 - DNA, 98 bp, Homo sapiens
ggcactgttgctgctgcgggaggtatccagctcacatagaagacattgactacgaggaaggaaaagtactcatccatttcaagcgttggaaccatcgt

SEQ ID NO: 803718 - DNA, 100 bp, Homo sapiens
taactttcaaaacttctttttcaagaaactaagaggaagaagtccccaaggagacttcgccataggagttcacaggaaatattgaaatgtcaggttccac

SEQ ID NO: 803719 - DNA, 99 bp, Homo sapiens
cgggagaagccgcactccactctgactcccaggacgggcaccaggctgtcacccttgacccaaactttctggatgcttatatcaatttaggaaatgtct

SEQ ID NO: 803720 - DNA, 100 bp, Homo sapiens
gtcttctgctgcatgacagctatgactacgacctgcaggaacagatcgaaagctgctttgcgtcgcagttggagcagcacccccaccgcaggtggcattg

SEQ ID NO: 803721 - DNA, 100 bp, Homo sapiens
cggaaccatggccgatgggggcgagggcgaagacgagatccagttcctgcgaactgacaacaccatcgacttcctggagtacgtggcagctctgaatctc

SEQ ID NO: 803722 - DNA, 137 bp, Homo sapiens
gtggcagagtgtaatgctgtccgccaggccctgcaggacctgctttcggagtacatgggcaatggtgaaaggttgagccatgcagtaggctgtgcttttgcagcctgtttagagcgcaagcagaagcgggagaagga

SEQ ID NO: 803723 - DNA, 98 bp, Homo sapiens
gaaggtcgcgatggttttcttgggaacacgatagacagcatattctggcagaaactatgttccaacttcctgtcaacaatcttggcagtttaagaaaa

SEQ ID NO: 803724 - DNA, 100 bp, Homo sapiens
tgaaatttatgtccaggattcaaaaagtttaggactgctaagacggtgggcaagagcagcaagatgctgcagcatattgattacaggatgaggtgcatcc

SEQ ID NO: 803725 - DNA, 99 bp, Homo sapiens
ttgttgccgtcccttcgcctccttcaccgccgcagaccccttcaagttctagtcatggttttgggatttgagattgacgcggtgaactctgtccagttt

SEQ ID NO: 803726 - DNA, 98 bp, Homo sapiens
gagacccgactgcaactgctggattgctgcaaggctgagggacgagaacgaggtcgcaatggaagaagagatcgccgcgctggtcattgacaatggct

SEQ ID NO: 803727 - DNA, 100 bp, Homo sapiens
aactgccaccattgctgaacggagaggtagccatgatgccccacttggtgaatggagatgcagctcagcaggtcttcgccttgatcgtgttctcctgcat

SEQ ID NO: 803728 - DNA, 114 bp, Homo sapiens
tcgacgtcgtgatccagaagtccagagctgaggactgcctgtttgcaggagtgcatcatcgacgaggactgtgggcccagcatgtactgccagtttgccagcttccagtacacc

SEQ ID NO: 803729 - DNA, 100 bp, Homo sapiens
ccggagaacaagaagtgtgtccccgagggcatcgaggacccccaggcactcctggagggtgtgaaggacagagcgggatgccaccagcttgtccaaaggg

SEQ ID NO: 803730 - DNA, 100 bp, Homo sapiens
agaagtcagtgtctcgaagaaagtgcgcagcctgcaagattgtggtgcacacgccctgcatcgagcagctggagaaggtcttgggcgtctttggtactgg

SEQ ID NO: 803731 - DNA, 127 bp, Homo sapiens
gccagcagcccggaggcccggcccgcgcaggaggcgctcctccttcccaccggtcttggcagcacctgtctcctttcaccccagggcctgagcctggccagcctacaatggggatgttgtgtttctg

SEQ ID NO: 803732 - DNA, 51 bp, Homo sapiens
ctcccaagaagctgggactacagttccttgaaattcgatgagacttacccg

SEQ ID NO: 803733 - DNA, 100 bp, Homo sapiens
cgtcccgctcgctgggagagaggtacctctccttttccctctccctttccctaaggtccttttccatgtgatatatgtggtcgccagtttaacgacactg

SEQ ID NO: 803734 - DNA, 100 bp, Homo sapiens
ggggcttgccctggtcttgctcggccgatgaagtgcagaggtttttttctgactttgagagttttgacctgcctgaagagcaccagattgcgcacctccc

SEQ ID NO: 803735 - DNA, 98 bp, Homo sapiens
cagacatcaagaagacggccaacaaggttcggtccaaattgaaaggtggtcttttggtgccttaatgaagagtcggattttgaagcagccttcagcgt

SEQ ID NO: 803736 - DNA, 100 bp, Homo sapiens
gattttctgtggcatcctgaagttaatggttctatgaaacagtgtatcaaagtgtggactgagttacccagcatgccacaatctgattgctgacctggat

SEQ ID NO: 803737 - DNA, 98 bp, Homo sapiens
gtggcccttgaaacaaaggatacctcgctagctaggctaaagaattacctccaaagccattgtcaagaccacagcagtcatctgcaccagtccagctg

SEQ ID NO: 803738 - DNA, 100 bp, Homo sapiens
gcatcaacaagatgttgtcctgtgctggggctgacaggttcattctggccaaccgcctctacccagtgtctgcccggcactggtttaccatggagcgcct

SEQ ID NO: 803739 - DNA, 99 bp, Homo sapiens
ttgttgctggcggtgcctatcactgtcctggctgtgctggccttagtgccccaggatcagggaggactgggtctggatggtattattgaatatgatgat

SEQ ID NO: 803740 - DNA, 100 bp, Homo sapiens
aaatgaaactgtttgcacattatggcaagaagggcgctgttttcgacaggtgtgcaggtttcggcacatggagattgatcaaatagtagtgatagtgaag

SEQ ID NO: 803741 - DNA, 140 bp, Homo sapiens
tcatgaatcctaacagaccaaaagtgttaaatgtgatcagccttgaattttcagatacaaaattcaattagcagagcctcacagacaatggccaaatgtgtcaaagctgtcacagagggtgcccaggcagtagaggaacc

SEQ ID NO: 803742 - DNA, 100 bp, Homo sapiens
cgagtggttccatggtgcaatctcaagagatgctatgctggaaaatgagaagaagaagcgtgaaatggcagagaaggagaaagagaagattgaacgggag

SEQ ID NO: 803743 - DNA, 100 bp, Homo sapiens
ggaggaaacagctggctaagctcatcattgttactgagatttacaaacgaggaccacctggcagttcataaacacaagcatgagatgacattgaaatttg

SEQ ID NO: 803744 - DNA, 99 bp, Homo sapiens
caaggatgaatcccagtccctgttacgggctgcaagaaagcgtaagattgccattcgaaaagcccaggggaaaaatgtggaggccattcgggagctgaa

SEQ ID NO: 803745 - DNA, 100 bp, Homo sapiens
tcgtggctacaaaaatcaatctcagggctacaaccagtggcagcagggttttgtgaatagcacaatggaagaagctggactttgtgggttaagagagaaa

SEQ ID NO: 803746 - DNA, 100 bp, Homo sapiens
tctgccatattgtgtcttccccggccggtccctcgcctcccggccgagctgacggtgagcgagtgctgtgctttcatgggcctcttctttatgaagcaaa

SEQ ID NO: 803747 - DNA, 99 bp, Homo sapiens
ggagagaggtacctctccttttccctctccctttccctaaggaattttggagagtaaaaggctgaaccttgttaaagagaaaaccattaatcagaccat

SEQ ID NO: 803748 - DNA, 98 bp, Homo sapiens
cttatacagctaaagccatggaaaggaatcattgtagtcaatcattttccagttctcagccgctcagttgtgatcaagggacacgtggtttccgaact

SEQ ID NO: 803749 - DNA, 50 bp, Homo sapiens
ccctcaacatctctcagagacgaaagtgagatgaacccggtacctcagat

SEQ ID NO: 803750 - DNA, 99 bp, Homo sapiens
ggcaacgtggttggaatgtatctggctcagaactatgatgccggagcctcaacagaaagctcctttagttcctcctcctccaccgccaccaccaccacc

SEQ ID NO: 803751 - DNA, 98 bp, Homo sapiens
ctaccacggcagcctccacagatcacgtgatggcaggatttccctggggaaagtcttcactcagagcttcgctgacagccaaggatggcaagcaaggg

SEQ ID NO: 803752 - DNA, 98 bp, Homo sapiens
ccaggtgtaagcgcagaaagcaggcgaacccgcggcgcaataacggatttttagactctgaggagcagttggagctaatccacattatggaaatggaa

SEQ ID NO: 803753 - DNA, 100 bp, Homo sapiens
cacaaaatgggtaaatgcacaattttctaagttggtgtgaccccatatggttatgcatcccggtttgagatccactttgatgacaaatttgatgtgtctt

SEQ ID NO: 803754 - DNA, 99 bp, Homo sapiens
aagcatatggagcctcaagtaaaacaagtttttcaaagcctaccaaaatctttggtgacaaagttcctgctgatataaggttaacttccatcaaatcta

SEQ ID NO: 803755 - DNA, 98 bp, Homo sapiens
aacgaggcagtttctagctactgcacgtacttcataaagcaggactctaaaagctttggcttttcttagtgacactaaagatcgaggccctccagtgc

SEQ ID NO: 803756 - DNA, 100 bp, Homo sapiens
atgtctggacatacttcagaaccgttggagtccaacctatgatgtgtcttccattctaacatccatacaggtttactgggaaactggtgctcagatcaca

SEQ ID NO: 803757 - DNA, 100 bp, Homo sapiens
ggcagcgacacaattgtctgtgacagtaacagtacttgggatcccccagttccaaagtgtcttaaagaggcagttggtgtcaccagccagcgaccagtgt

SEQ ID NO: 803758 - DNA, 100 bp, Homo sapiens
gaaaagttgaaacagactggcacatgaactttgaccagaataagctggaagaagaaatgagaaagcgaaaagaaagagtagaaaaatggcgagaagagca

SEQ ID NO: 803759 - DNA, 100 bp, Homo sapiens
gatttcagcaaatttggagcagggaactaccactgctggaatgaagcatggatgacaaggcctgaccttcctgttggatttggaggctggcaagctgtgg

SEQ ID NO: 803760 - DNA, 99 bp, Homo sapiens
caaggagtacaagtgcaaggtctccaacaaagccctcccagcccccatcgagaaaaccatctccaaagccaaaggtcgtgccccaaaatttacgcaacc

SEQ ID NO: 803761 - DNA, 98 bp, Homo sapiens
tccagcactggactcatggaggctgagcatttattcagacacagaaactgatgaccagcaacttgaggaagtaccattatataatgatgtaatgctcc

SEQ ID NO: 803762 - DNA, 98 bp, Homo sapiens
aaaactcaacaaagcaactgagagctttgcttggaacattacagtattgaaggatacctgcccactatgtctatccgcaggcttttgtgcagccggga

SEQ ID NO: 803763 - DNA, 98 bp, Homo sapiens
ggcccccacctttcctcaggagtcatttctgttccgcacaggcctgctgaactgggtgctttatatagggtaagatcctgaggaggcaggagagggac

SEQ ID NO: 803764 - DNA, 100 bp, Homo sapiens
cccggtgcaaaagaaatgcgtggacagcatggggccgacttgcttgctgtcaactcggatgggaacatgccatatgacctctgcgaggatgaacccaccc

SEQ ID NO: 803765 - DNA, 100 bp, Homo sapiens
atcgaatgaaggaatcctctccatctggttcgaagtctcagcggtattctggtgcttatggtgcctcagcaacaattgtgttaaatgaactcaactggac

SEQ ID NO: 803766 - DNA, 100 bp, Homo sapiens
tgttgtgtggtgaccctcaccagaggacagcttcatgctcttggacttcccagcctcaagaactatatgagatcctgactccaaactccattcccaaggg

SEQ ID NO: 803767 - DNA, 98 bp, Homo sapiens
gcagctggtggcctcagtcatcgagagggttatgtaccgaaggactctaccgtgtcagcgggaataaaactgaccaagacaatattcaaaagcagttt

SEQ ID NO: 803768 - DNA, 98 bp, Homo sapiens
gagatccagttcctgcgaactaggcagaggaggtggacacggtggacgtctccggcgtgcccgcagaggtgctgtgcaacatcgaggccgacacctac

SEQ ID NO: 803769 - DNA, 100 bp, Homo sapiens
ctattggctctggggctcagggcatagtttgtgagttggactatggatcaggtactgtgctcagcatcagaaaatgggatgacaatgaacagagtaacag

SEQ ID NO: 803770 - DNA, 98 bp, Homo sapiens
tgggcggcgtgcccagcaagagattaaagatgcagtacgccacggggccgctgctcaagttccagatttggccccgcagggtggagcccgtctgctca

SEQ ID NO: 803771 - DNA, 98 bp, Homo sapiens
ggtccagacccagcaccccatacggaagggtctgcatcacaaggatataatcacagatccatttaagcttgcagaagagtctgacagtatgaagtcca

SEQ ID NO: 803772 - DNA, 99 bp, Homo sapiens
gatttgaagctggcagtctggttccagcaagaaaagcctaggcttctcgagcctttggattatgagactgtcattgaagaacttgaaaagacctaccgg

SEQ ID NO: 803773 - DNA, 119 bp, Homo sapiens
aaagccaagaggaggacagttcgctacacagcaatgcatcgaggaccagcattagcagtacagggcccagccatgtttacagagccagcaaatgataccagtggaagtaaagagaattc

SEQ ID NO: 803774 - DNA, 101 bp, Homo sapiens
ttacctttccaagccaatgcccaagacattataaacatgcctgaaaacttcatgcctcctgttcccatcacatcaccaatcatgaacccgttgggtgaccc

SEQ ID NO: 803775 - DNA, 146 bp, Homo sapiens
ctgtattcctgaaaatcatggtgaggacatgaggaaaatgtccttccagcgctgcgcccggacagacaaggagaagctgtctttgctcggtgcttatcatctctgaaggatgagagaattcaagctagcaaaaagctgaagggtcc

SEQ ID NO: 803776 - DNA, 100 bp, Homo sapiens
cctacttcaaggataagggcgacagcaacagctctgccggctggaagaggactttatcagctcagactccaaggtccgcgcagccacccgggaacagtca

SEQ ID NO: 803777 - DNA, 98 bp, Homo sapiens
ccgcagtaagcgaatgcttcaaatgtgaagagtggaccatcgccgtcccagtacgaggatgtcgtccaggaaagattgtgcagatgactgaagcagaa

SEQ ID NO: 803778 - DNA, 100 bp, Homo sapiens
gtcccatcggaggacctccctgccctgtataccgagggaacagaccttcactgcctggtgtaactcccacctaaggaaagccggcacccagattgagaac

SEQ ID NO: 803779 - DNA, 100 bp, Homo sapiens
agatgagagccttcaaaagcagtgcaactggctcagtattcacagggaaagctgtgaggatttgtgaagctgggaatcatttcatcaatgtaatgttgtc

SEQ ID NO: 803780 - DNA, 98 bp, Homo sapiens
tggctatgaagaaagaggttttatgtgccaagttacagctcttttgaggaagcttaagcagcaatccagggaaagtgttgaagaaaaacgacctcgat

SEQ ID NO: 803781 - DNA, 100 bp, Homo sapiens
atgaacccaccttctccttctaatccccgctccagaaacatgacaaggaggactttcctgcctcttggagatcagaggaggaaatggcagcagaagccgc

SEQ ID NO: 803782 - DNA, 100 bp, Homo sapiens
gggcagggcctggggaatgcttttttatctcatattagtgcctgtgatggcatctttcatctaacacgtcagaagagatcaattctacagaaatttccag

SEQ ID NO: 803783 - DNA, 98 bp, Homo sapiens
gaaagaagaaagaatacatggacagcctggagaaaaaaattatatccagatcgagagacagaagattctgaaagggttcaatgaaatgagagtcatct

SEQ ID NO: 803784 - DNA, 98 bp, Homo sapiens
gcctttccactggagttgcttcacttagctctacaatcaacccatgtggtgtttgaaattgctgatatagttgatcagatgtcaccttggggcatgtt

SEQ ID NO: 803785 - DNA, 100 bp, Homo sapiens
gcccttgagtttgtgcccgcccacgggtggacagcagaggcgattgcagaaggagcccagggaaatgtttcaacgtgcgcaagcgttgcggcggcgggca

SEQ ID NO: 803786 - DNA, 100 bp, Homo sapiens
cctgaacatcatgaattcccaagaaggagaacatccagtcatggataaaaatgagctggttcagaaggccaaactggccgagcaggctgagcgatatgat

SEQ ID NO: 803787 - DNA, 98 bp, Homo sapiens
tacataacctgaggagccgggggaagctggccttgggggaggacatgtatgcccaggactctatagagctactaacaacatctggtatccagtttaaa

SEQ ID NO: 803788 - DNA, 98 bp, Homo sapiens
agccgggaggacatctacaagcgggaggctgaggatggcattattgcttatgatgactgtggggtgaaactgactattgcttttcaagccaaggatgt

SEQ ID NO: 803789 - DNA, 100 bp, Homo sapiens
tccaatatgaatgtgtcccttacagggggacacagcgattgccacgcgccattggaatgtccctggccaaggagctcatattctctgcgcgagtcctcga

SEQ ID NO: 803790 - DNA, 100 bp, Homo sapiens
aatataaaaattctacactcgaagcagtttggaaatattctcatccttagtggggatgttagattaatacccctcgaagacaaggaggacttgggccaat

SEQ ID NO: 803791 - DNA, 103 bp, Homo sapiens
gaaatgcttcgtttaccacttcgccgtggcttccttctgaactctccccagctattgaggaagaagagtcaaagagtggcttagatgtcatgcctaatatttc

SEQ ID NO: 803792 - DNA, 100 bp, Homo sapiens
ctaatgagaagcttatgctggcctccatgttccactcggcagctgcaatgactctccgcacggtattattgtcattgcaagcactattggcagctgcaga

SEQ ID NO: 803793 - DNA, 101 bp, Homo sapiens
catcaaggaaatgctatacttgaaaagattcctgaatttgacaacttgtacctggatatgaatggaattatacatcagtgctcccatcctaatgatgatga

SEQ ID NO: 803794 - DNA, 99 bp, Homo sapiens
cagctgctctgtacagactgctattccaacgagtactcatccaagtgccaggaatgcaagaagaccatcatgccagataatatcgtctactgcattatt

SEQ ID NO: 803795 - DNA, 99 bp, Homo sapiens
ccgttacggccatcacggcggccgcagtggcgtcctggagccctcctcaggttaaaaaggccttctttgctttggtagccaacggtgtccgagcagcgc

SEQ ID NO: 803796 - DNA, 51 bp, Homo sapiens
aggggagattacttttctggaagaacacccatctcggctttctcgcaagat

SEQ ID NO: 803797 - DNA, 100 bp, Homo sapiens
ctctcctgaccctgaagaactgtgctccatttatcttaaagaaattggacagcatatgaagacaggacatcacatatgaatgcacgatatgaagagcctg

SEQ ID NO: 803798 - DNA, 100 bp, Homo sapiens
gcagctgaatggactccagagcagccttaaccctgcagcctttgtgcccatcaccagctctacagcatgtgcagtctttgccaacaaaaaaaattaccaa

SEQ ID NO: 803799 - DNA, 100 bp, Homo sapiens
gatcgtgaccgagaccgtgaccgagagcgtgaccgagagcgcgaatatcgtcatcgttagaaggcttgtgagtggcaattccattgaagagaaattgttg

SEQ ID NO: 803800 - DNA, 100 bp, Homo sapiens
aacaggccctgcacccatggcccctccaagagccccagggcccctgagcaagcagggctctggcagcagccagcagaagaatcccagacttcttagagaa

SEQ ID NO: 803801 - DNA, 100 bp, Homo sapiens
gtggatgaaaccctgattcctacaggctatttgctttctagaagagaaggccaagcagggtctcctgaaaagcctctctccgatctgggccgtctctcct

SEQ ID NO: 803802 - DNA, 99 bp, Homo sapiens
gaattcatggaggcagtttcttccaagagtgtacctcacagccttctaggatctccagagtggacaggaatctcacttggagggaccatggagcagtat

SEQ ID NO: 803803 - DNA, 100 bp, Homo sapiens
tcactgacaaagatggggaactttattgcaaagggagcgcttgtgagtgccttggctgatgacaccttacacttatggaatttacgtcagaagaggcctg

SEQ ID NO: 803804 - DNA, 99 bp, Homo sapiens
aatacctcactgagtgcctcacaccaacatgggctccaagataatgcctctacaaagaattcagaaaatgtggatgaattacagctccctgaagggttc

SEQ ID NO: 803805 - DNA, 100 bp, Homo sapiens
ggtccagactcttcctcctcatatcaagagtactgtttctgtacaggtgtggaaatctgtattgcaacacctggaagactgattgactttttagagtgtg

SEQ ID NO: 803806 - DNA, 100 bp, Homo sapiens
ctgggagcagacgtcactcacccccccgccggggatgggaagaagccctccattgccgccatttccagtgggttcaaggagatgtgtgtgaagttcagct

SEQ ID NO: 803807 - DNA, 98 bp, Homo sapiens
ttgtggggcctgtgctgacccctccccaagagcatcctaaacgaccagtgctgggactggagtgcccacagtcagaaattgcccccgaggaattagca

SEQ ID NO: 803808 - DNA, 100 bp, Homo sapiens
catcgtgggcgtccgcaagaccgggcagatctggcccaacgatggcgagggcgccttccatggagacgcagcgagaaccctctgcccacagtggagattg

SEQ ID NO: 803809 - DNA, 100 bp, Homo sapiens
gtgctgggaggagactggagcccggttaggaagaatggagttggcgactcgctaccagagtaaagccaatcccagctgaaggaatcaagtcaaatccttc

SEQ ID NO: 803810 - DNA, 100 bp, Homo sapiens
tgaaaagaatgaacactgtccttcaaaacgacgacatctcgaatcagcgatgcacacttggcagacacaatgattggcaaagcagtggaacatatgtttg

SEQ ID NO: 803811 - DNA, 98 bp, Homo sapiens
gttgcgtgccctacttcaaggataagggcgacagcaacagctctgccggctggaagttccaccaggtgagaagagtgatgaccatccttttccttact

SEQ ID NO: 803812 - DNA, 100 bp, Homo sapiens
actctgtattcagatcttcatgtgtctcttctaagctgaataaagctgttttggaactgtcaggtacctcaaagcaatatgacagatacctagcatctag

SEQ ID NO: 803813 - DNA, 100 bp, Homo sapiens
catggtggattactatgaagttctaggcgtgcagagacatgcctcacccgaggatattaaaaaggcgcatgcatgagagatattccaacgtgcaagtggc

SEQ ID NO: 803814 - DNA, 99 bp, Homo sapiens
aaaaatagactaatggattaacgtccctgtcgtgtgacattttctggaggaatgcaggctcaggttggaatgccaggaagtggaccagtgtccatggaa

SEQ ID NO: 803815 - DNA, 101 bp, Homo sapiens
ggtgaatgtcagtagcctctcactgaatgagcctgaagacaaggatgtgactgtgagaattatgaagatgatgacctagtaaattctgatgaggttatgaa

SEQ ID NO: 803816 - DNA, 100 bp, Homo sapiens
gggaaggcctcgggtgtcggactcccaggaggcacaccgttccggaaggcaaaagccttgtatgcctgcaaagctgaacatgactcagaactttcgttca

SEQ ID NO: 803817 - DNA, 100 bp, Homo sapiens
aattatctctggtgctgcagctcttgtaaagaaagaatgaggcctgttaaagcagctttgaaacaacttgataggcctgagaaaggcctttcagaaagag

SEQ ID NO: 803818 - DNA, 100 bp, Homo sapiens
tgaaagcgaaaaactatgctgaccagacactggccatgggcctctgtgtcgccatgatcgcctttgtccgcctgccgagcctcaaggtctcctgcctgct

SEQ ID NO: 803819 - DNA, 100 bp, Homo sapiens
agcaccatccagatctcctcagtgatacacacctacatctgggcaagtcactgattgtccctgggaagagccccacgaggaagaagtcgggcccgttcgg

SEQ ID NO: 803820 - DNA, 100 bp, Homo sapiens
gggagtaggtggaggaaacctgcatctttacccagcaatccagggaatgaaagctactggttgattttaaagtgcctgggcctcacaggtttggagatgt

SEQ ID NO: 803821 - DNA, 100 bp, Homo sapiens
aagttgccggtggaattggcccaggatgacagctggagaatggagtcagagaacaaactgttgaggagaagaagaagatgcctatggaaaatgagaacca

SEQ ID NO: 803822 - DNA, 100 bp, Homo sapiens
tccgagaggaacctctatgccgacatcgacgccgcctggcaggccctgcgcaccaggcgtctacggtgacgtgcagcgcgtgaagatcctgttcaataag

SEQ ID NO: 803823 - DNA, 141 bp, Homo sapiens
caaagaaggtcttgacatctataagaagttcctaactaggatgacaagaatctcagagttcctcaaagttgcagagcaacggcagcctttaacagttgagcacatgtatgaagacatcagtcaggatcatgtgaagaaaac

SEQ ID NO: 803824 - DNA, 144 bp, Homo sapiens
aatactaaaatgtccattcatctgatccacatgcgtgtggcagcccaaggctttgttgtaggagcaatgactgttgttgagccccatatgggggttggcaggcagcagagaggcccctttcaaggtgttcgggtaaagaactca

SEQ ID NO: 803825 - DNA, 98 bp, Homo sapiens
aacatgacactcctggggtctgagcattccttgctgattaggagcaagttcagatcagtgaatggataccacgcatcagggaccccagcgcaccctcc

SEQ ID NO: 803826 - DNA, 99 bp, Homo sapiens
cacactctgggacagtgggagatttggaacagctttgagaagagcaagaattgtattcctattgaagagcagcttcagttggtgttgggcaatgctgga

SEQ ID NO: 803827 - DNA, 99 bp, Homo sapiens
acgtgagtgcagcttatcgacttatgcaagaagaagaaatgaatatcttgataaatttatccaaagatgactggagctaagtttggtgcgaacgccatt

SEQ ID NO: 803828 - DNA, 100 bp, Homo sapiens
cttatttttcttcagttgagaagattgtattaactacactagagatttgtgaagctgggaatcatttcatcaatgtaatgttgtctcatcccaatcacac

SEQ ID NO: 803829 - DNA, 98 bp, Homo sapiens
cgtgcaatgttcaccagtcagtgtttgaaggagaagagagcaagattcgggaactggagcctctcctctgtcacagtgacaatccatctcagctcatc

SEQ ID NO: 803830 - DNA, 51 bp, Homo sapiens
gaagcaggagccctactcggcagataaggagtcaggccagggcgggatgac

SEQ ID NO: 803831 - DNA, 99 bp, Homo sapiens
aagaatctaaacagcctgcctcacaactccaaaaacaaaagggagatactccagcttcagcaacaggcattgtgtccagatctggcaccctgacttatg

SEQ ID NO: 803832 - DNA, 99 bp, Homo sapiens
aggaggccaaggccgagaaggaggaaagaccacagcaagattctttcattcgtctcctcctagcctgggggaccaggctcgaactgaccctggacatca

SEQ ID NO: 803833 - DNA, 50 bp, Homo sapiens
tcctgatcctgaggttatggcaaagatagatctgaaggagcagggacagc

SEQ ID NO: 803834 - DNA, 100 bp, Homo sapiens
tcgaatcccagacctgtgcttctgactatcttctcttcaccagctcttcagatcaatatgagcatctgctgcacccaagcctgagccggttcctgttcaa

SEQ ID NO: 803835 - DNA, 100 bp, Homo sapiens
tcacaaagaagggattgtacagactgaacagattaggtggacgtctgatttatgaagctccccatccacctatctgagtacctgacttctcaggactgac

SEQ ID NO: 803836 - DNA, 100 bp, Homo sapiens
agggatccgttaagagaaattgccctagaaacagccatgactcaaagaaaactgagggtaaaataccatgaagattttgaaaaaacaaaggggagaggct

SEQ ID NO: 803837 - DNA, 139 bp, Homo sapiens
gttacaaccgcagcagtggtggctatgaacccagaggtcgtggaggtggccgtggaggcagaggtggcatggggaaacttttgagaagaactttgaaagagaaacccataaaataagtgagcaaaatgatgctgataat

SEQ ID NO: 803838 - DNA, 100 bp, Homo sapiens
agtgaattggcaccaagccttcccagttatcataaccttgaatggcgactagatgtacaggtctcctctgagcctccggcctccataagacccaaaacag

SEQ ID NO: 803839 - DNA, 50 bp, Homo sapiens
ccgaggtggcggcggctcctcaggcatctctgccggccttgccacaaccg

SEQ ID NO: 803840 - DNA, 98 bp, Homo sapiens
ttacagtgcagtcttatcgaaggatgtgcatgaaggacagcctcttctcaatggcactcaaggagttgcccctggtcctgtaattggacttcaggcac

SEQ ID NO: 803841 - DNA, 99 bp, Homo sapiens
atgcgtgtatttttgcatatggacagacagatacaagtactggttgaacctgaccacttcaaggttgcagtgaatgatgctcacttgttgcagtacaat

SEQ ID NO: 803842 - DNA, 100 bp, Homo sapiens
tggaatctcactgtacattactactgtttggtatcatctttatcagaaagtgaggagtcccaggactcatccgacagcataggctcctcacagaaagccc

SEQ ID NO: 803843 - DNA, 98 bp, Homo sapiens
acaatgtgggcctttccccagatggctacctatataaatggcttgacaacattctggcttgtcaagatttacgactgcagaagaaagatcagcaactg

SEQ ID NO: 803844 - DNA, 100 bp, Homo sapiens
ttatgaagatctgcgggatggccataacctgatctctctgttggaggtcctctcaggcatcaaactgttcctctgtgacgagggtgcaggtatctctggg

SEQ ID NO: 803845 - DNA, 99 bp, Homo sapiens
cctaggcctccaccctggcaggaatcccaatttgcctccacttagtgagcggaagaatgatatgtcttgtcgttcaagacttgcaacactaaacgagaa

SEQ ID NO: 803846 - DNA, 100 bp, Homo sapiens
tcctaggtgtcattacagtgatcatcataggcttatgtcttgctgcagtacttcatgaccatgatcgtttcccttgctgcggttgcttgggtgggacaac

SEQ ID NO: 803847 - DNA, 100 bp, Homo sapiens
cattttcctaggtgtcattacagtgatcatcataggcttatgtcttgctgcaggtacaggtttgcagattccgccagcagcacagcaagctctacagatg

SEQ ID NO: 803848 - DNA, 100 bp, Homo sapiens
gcaaatgtaatttataaacgtgatgttggagcagaaggagaagacagcctgaagaagatgcagctgatggagcttgcgattctgaatggcacctacagag

SEQ ID NO: 803849 - DNA, 100 bp, Homo sapiens
tcagaggccgccatcaaccgccagatcaacctggagctctacgcctcctacgtttacctgtccatggatttggaaggagtgccaccctctaaaaagatga

SEQ ID NO: 803850 - DNA, 99 bp, Homo sapiens
aagtggtgacaccagctctgaagtaagcacagtagaactgctgcatctgcaacaacagcagtgggagattttgataagatctggcgagaacactgtgag

SEQ ID NO: 803851 - DNA, 100 bp, Homo sapiens
tggcttcgaagtcagacaacaagtttggaaaatggcatcatcccaagaaggaaataatgcaaaaggtgtcccaaggctcctgaccagtgaacaaagattt

SEQ ID NO: 803852 - DNA, 103 bp, Homo sapiens
ttacttgtcctgctcctgctgctcgaggacgctggagcccagcaagaaaacctcggatcaattctcagctggtggcacaacaagtggcacaacagtatgccac

SEQ ID NO: 803853 - DNA, 99 bp, Homo sapiens
cgagccgtcttccccaggcctgcgtccgagtctccgccgctgcgggcccgctccgacgcggaagtattggtaaaggttttcaaggtgtcatgaaaagat

SEQ ID NO: 803854 - DNA, 100 bp, Homo sapiens
gccctggcgggtccggaccaaggtccggaccctatttgtcagtggccttcctctggatatcaaacctcgggagctctatctgcttttcagaccatttaag

SEQ ID NO: 803855 - DNA, 100 bp, Homo sapiens
catcgtggagatggacaggagacctggaatcattgttggcaagatgatgatgaatgaagtcctggcagcttcctgtgtcccaggccttgtagaaataaat

SEQ ID NO: 803856 - DNA, 99 bp, Homo sapiens
aaaaaagagcaggtggaaaaggaaagtctgatgcaggctgggaagaatactttgattacatctttccagaagatgctgccaaccaacctaacctcaaac

SEQ ID NO: 803857 - DNA, 100 bp, Homo sapiens
atcgcttttggatcctaccccagctgtggattggcattaactttgacagactcacacttttggccctgtttgataggaaaaggtggacctggactgaggg

SEQ ID NO: 803858 - DNA, 100 bp, Homo sapiens
gtggggttggtgtgattagcttcgcagtctggaaagctttaggagttcacagttttgacaacttaaatgctgcgcatgaaacctctaagttggaaattga

SEQ ID NO: 803859 - DNA, 100 bp, Homo sapiens
ttgtgctgggccccaggacatggagggcaagctgctcctcaccacgcctgccaagaagtttgaatgccaagtttgtcagaggaatggctgtgaatggatg

SEQ ID NO: 803860 - DNA, 132 bp, Homo sapiens
ttcctgctgcccacaggggtctacctgaacttccctgtgtcccgcaatgccaacctcagcaccatcaagcagaaggaagaggcccagcagaagggactcgctgagccaccccccgccccactccatgttggc

SEQ ID NO: 803861 - DNA, 100 bp, Homo sapiens
gtaattgtgatgtatatgattgctcttcttgctttcctattctacatttccaaagtcccagagcggtactttccagtgcccagcatgcagtttgccaagg

SEQ ID NO: 803862 - DNA, 100 bp, Homo sapiens
ataacataattcacagggatgtgaagaaaatatttacaccagcagctccagttcataccaataaagaagatcctgctacccaaactaatttgggatttat

SEQ ID NO: 803863 - DNA, 100 bp, Homo sapiens
ccatgatcgtttcccttgctgcggttgcttgggtgggacaacaagtccacaacctgcttctcacctacctgataggttgatggacggatggctacatgga

SEQ ID NO: 803864 - DNA, 100 bp, Homo sapiens
tggaaaataccacaggatggagactacgagtttgtggcgggacaggcttcattgggacagccctaacccagctgctgaatgccagaggccacgaagtgac

SEQ ID NO: 803865 - DNA, 98 bp, Homo sapiens
acttcacagttctcaatctggctgtggcaggaatccctggagatagagaaagtcaggctgtggttgacccccctcaagcagctagtactggggctcct

SEQ ID NO: 803866 - DNA, 100 bp, Homo sapiens
agcttctcctcttccagtttgctcatcacttagaactttggcgactgggatccacagttgcaacaggttggttcattctggctccggatgtcgatccccc

SEQ ID NO: 803867 - DNA, 100 bp, Homo sapiens
gagggttcccgggattggaccgacgcagccatggtggaaagccagatgacatcaccgtccttctttcaatagtggctgagtatacagactagctgaggtg

SEQ ID NO: 803868 - DNA, 118 bp, Homo sapiens
atgaagacttgaacttaatacagcaagaaagaccatcaagtttaccagctcctggatttggatttggaattgcaatatctggtggacgagataatcctcattttcagagtggggaaac

SEQ ID NO: 803869 - DNA, 100 bp, Homo sapiens
ttaaaattcagggctaagcattttgggtgattttaaactagtacctcctaaatggctctactttgaacctgctgggcaaggaagagattttcaaggaaac

SEQ ID NO: 803870 - DNA, 100 bp, Homo sapiens
cagcaacaacagagagcacgtggtcagaagttgagtagcaggggcctaggagggctcgaagccttcacagcgatggcagagaagcgacccctgagaaccc

SEQ ID NO: 803871 - DNA, 100 bp, Homo sapiens
ccaaggtacaagctcaggattctccgaatgaagttaaggtcccttgcccatccggagagtgttccttgcctgtatctccccttggttcaatagctaccag

SEQ ID NO: 803872 - DNA, 98 bp, Homo sapiens
ttgtggacggcgcacttcgtttggatcagtccctctgtcgtgaaatcaagcaacgacgtcgaggagttgcctccattctgcgactatgccagcatctt

SEQ ID NO: 803873 - DNA, 100 bp, Homo sapiens
agaacaggaagagatgaagaagcaaaatcaacaagaccagcaccagatccaggttctagaacaaagtatcctcagattacatcgtcagcccaaacatctc

SEQ ID NO: 803874 - DNA, 100 bp, Homo sapiens
ctcactggagatgacacgtgcgtggggtgttgggatgataatgaagataattcaaatgatgggacccagccatccaaaaggaggcgaatgggctcaggag

SEQ ID NO: 803875 - DNA, 101 bp, Homo sapiens
tccagagctgaggactgcctgtttgcaggatgaccagtgtcccagtgaaggaacgagtgaaggtgtctcagaactggagactggggcgctgccgagagggg

SEQ ID NO: 803876 - DNA, 98 bp, Homo sapiens
caccaccttcatctccaccatcgatcttgtagaaaatttcagctgtagcccttggactagaagctgaaataacagaagctgtgtacgatgcattaggg

SEQ ID NO: 803877 - DNA, 100 bp, Homo sapiens
gcaacctgctggactcaagcaatcctcccacctcagccccccgagtagctgggactacaaattgctcttaaacttggtgtgactgctaatgatgtaaaga

SEQ ID NO: 803878 - DNA, 99 bp, Homo sapiens
gaaaaaattcaaagtcgaatatcatgctggtggctctacccagaattcaattaaagtggctcaggatttgaactcagaggatcaaaaagccttcagtgt

SEQ ID NO: 803879 - DNA, 100 bp, Homo sapiens
tatgtggacgttggcactgggaagcaacatggctgacaaggccaagcctgccaaagctgccaacaggacgccccccaagtccccgggggacccctcgaag

SEQ ID NO: 803880 - DNA, 98 bp, Homo sapiens
caagacgactcaataggaggaaggttgacgccgctgtcaccccagaggagcgccacctgtccaagatgcagcagaacggctacgaaaatccaacctac

SEQ ID NO: 803881 - DNA, 100 bp, Homo sapiens
caaggtttactctgaatcccaatcctacaggagttcaaaacccacacatttcatttgatgaatacagttcagaacttaaatctggaaggttggaatggag

SEQ ID NO: 803882 - DNA, 100 bp, Homo sapiens
gtcagcactgactttcagctatggaatcgaaagtgaagtcactgcttttgctgtcttggatcaagaccagaaagaaattattgataccaatggagctgga

SEQ ID NO: 803883 - DNA, 100 bp, Homo sapiens
ttcattagctgtctggcccactgcttgataaatctacatgttggaaggtcacggtctagatcacattctcgatccagaggaaggcgatactctcgctcac

SEQ ID NO: 803884 - DNA, 100 bp, Homo sapiens
caactgttgaactcagctgcctgtaggtggtattaaagataatcaaacattatcaagaagaaggacaaggaactgaagttgttcaaggagtgcttttggg

SEQ ID NO: 803885 - DNA, 100 bp, Homo sapiens
aacacaggcactgaggccccagattatctggccactgtggatgttgaccccaagtctccccagtattgccagatgccggtggccgtgggtccctacggac

SEQ ID NO: 803886 - DNA, 100 bp, Homo sapiens
tgcagcagccttcagcttttggcagcatgaaagttagcatgggacacagcaggccaggaaagatttcgaacaatcacctccagttattacagaggagccc

SEQ ID NO: 803887 - DNA, 100 bp, Homo sapiens
gatgtcaccttcaccattaacggagtcccctataccctcagcccaactgcctacaccctactggacacacacctcctctacgtactggcagctgccaacc

SEQ ID NO: 803888 - DNA, 99 bp, Homo sapiens
tggagcatgtccttcactttatcaccattttcactggaagcatagaaagatgcaagtgctgctggaccaggcgggctgctgtatcgtgggtcagagtga

SEQ ID NO: 803889 - DNA, 100 bp, Homo sapiens
agatgttccaagcaacaaggatgtcacatctctagattggaatattcctctggaataagcagaattgcagatggattcaatggaattttctctgatcatt

SEQ ID NO: 803890 - DNA, 99 bp, Homo sapiens
tagtctcagaactgttccttcagccaaagaaacaagccgtggaataggtgtatcaagtaatggtgcaaagcctgaagtcgtgataaactgtgccattcc

SEQ ID NO: 803891 - DNA, 100 bp, Homo sapiens
tggcgctgcccgagcgcgccgagctggccgcgcagctgggcctcacgcagacacagacagcaaatcacccaccttgaggtcataaaggagctggaagctg

SEQ ID NO: 803892 - DNA, 100 bp, Homo sapiens
tccatcacccactccagtaatgggatctcccagttgtgacccatttaacacaagtgttcccgaagagcgggtcacagaaagtcgagagagccaaatgacg

SEQ ID NO: 803893 - DNA, 98 bp, Homo sapiens
gagagctgcaggaactgcaagatagtctaaatgctgaaagggagaaagtccaggaggagatgttaaagtaacccatcttgcaggacgacattgaagat

SEQ ID NO: 803894 - DNA, 100 bp, Homo sapiens
ggaaaaccctggatcaaatggagccttatctcatagaggcaatctgaatatggcggtgtagtgtttggtggttgggcgcgaatggcccagcccattgtgg

SEQ ID NO: 803895 - DNA, 100 bp, Homo sapiens
ttgatttttaaagcttcaaaatcctaagactcagcactgttgcgggatgcctggaatgatgtcgtcagtaatgcctggaatgatgatgtctcatatgtct

SEQ ID NO: 803896 - DNA, 98 bp, Homo sapiens
aaggagggtcctctcagtgattaaggatatgatggatgatatctgtcaggagcaatttctagagctgtcctacttgaatggagtacctgaaccctctc

SEQ ID NO: 803897 - DNA, 100 bp, Homo sapiens
ttgccatggcaccagggacggtgactgtggttaagcaggacatggatttgattgacatactttggaggcaagatatagatcttggagtaagtcgagaagt

SEQ ID NO: 803898 - DNA, 100 bp, Homo sapiens
ccaaaagtggtctgaagtcagagaagttggtggaacagctcactgaatacaggcttggatgctggaaagatcaagcaggtggggatcatctgtgggcagg

SEQ ID NO: 803899 - DNA, 107 bp, Homo sapiens
agagctttgaagccttgtcggagagagctgtggcagtggttgtggatcccattcagagtgtaaaaggaaaggagatgcttttgacaagttataataagggagagatg

SEQ ID NO: 803900 - DNA, 98 bp, Homo sapiens
agagggacacgctggtgcatctgtttgccggaggatgttcagcctgttgcctatgaagagcctaaacattggtgttcaatagtctactatgaattaaa

SEQ ID NO: 803901 - DNA, 100 bp, Homo sapiens
ccgagttccccacctgcgattgcgtcggtgtcaagctagggatgcggtccattcccattgccactgcttgcaccatttaccataagttcttttgcgagac

SEQ ID NO: 803902 - DNA, 99 bp, Homo sapiens
gctcctagacccatcgctgttacatggagaaggagtttccagatgtcttggaatgcactgtatctcatgcagtagaaaagataaatcctgatgaaagag

SEQ ID NO: 803903 - DNA, 99 bp, Homo sapiens
agcgagcgtcgcggccatggcttatcactcgggctacggagcccacgcggatattcaactcctttgtttacactgagaaaatctcaaatggagaaagtg

SEQ ID NO: 803904 - DNA, 101 bp, Homo sapiens
gtttccccagagctcctcaagaataacggaagggagggaggatgtggagcaagatgcaatagaaagttccactgatcatcttcccacagggacaccaattt

SEQ ID NO: 803905 - DNA, 100 bp, Homo sapiens
agaagaagatgaagaaacccagcttgatattgttggaggacaaagacactgattctaccaaagagcctctggatgaccttttccccaatgatgaagacga

SEQ ID NO: 803906 - DNA, 100 bp, Homo sapiens
acaaacaggacctgcctaattaccttcaaacctggaaacaggagggcgttagtggatcagaagtcatctgtcattaaacacagcccaacagtgaaaagag

SEQ ID NO: 803907 - DNA, 98 bp, Homo sapiens
aatacttgctggatggtggactcagagaccaataaaaataaactgcttgaacatcctttgactggttagccaggctgtggaaaatctctgttctcaca

SEQ ID NO: 803908 - DNA, 51 bp, Homo sapiens
aacggggctccgggccctaagggggaactgtacctggggaatgaattgtag

SEQ ID NO: 803909 - DNA, 100 bp, Homo sapiens
attcttacaaagattctttacttactgaaccagctgctcctgctaaggccaagccggctgaagctcctgctgctgcagccccaaaagcagaacctacagc

SEQ ID NO: 803910 - DNA, 99 bp, Homo sapiens
tgggccgccgaatctccggccgaagagcggcggcggcagcggcggacatcaggaccccaggttctctggtcttgggactctgagacttgcaccaggaat

SEQ ID NO: 803911 - DNA, 100 bp, Homo sapiens
tacccgcaacagccccttcgtcccaactgtgttctcatttcacccaagacctttggctagatcagaacataaaaaattcatttcaaaaagtgatactgag

SEQ ID NO: 803912 - DNA, 98 bp, Homo sapiens
gtcagcagatcctggatgaaaagcccaaggctaggaattatctgtgaatgtaggaccactggatttgcagtcttcatctgacactgtggagagtttct

SEQ ID NO: 803913 - DNA, 100 bp, Homo sapiens
cagaaaagaaggtgcctgaagctattcctcccaaaccggaaagtcctccccctgaaggccttcatgccccgaggactagcagacaaacaaggacctgagg

SEQ ID NO: 803914 - DNA, 100 bp, Homo sapiens
gcgaacattatatccagaatcatggacggacagaggatgcacttgtccaatcctcaatcctggggatcatcgtcttgctcttcttttatctcagtttgtg

SEQ ID NO: 803915 - DNA, 100 bp, Homo sapiens
gcaggttcccgcccggaagaagcgaccaaagcgcctgaggaccggcaacatggtgcggtcggggaataagcccatcaccactgagaatgcaccaaagaat

SEQ ID NO: 803916 - DNA, 100 bp, Homo sapiens
tgagagaatagatgactcaaaggagagctggaagtcgagtgtgctactcaactcaggagatttggagacaaactgaacttccggcagaaacttctgaatc

SEQ ID NO: 803917 - DNA, 99 bp, Homo sapiens
caggaactctccagagagcagacaggagacctgggcacggagcagccagtgccaggtaatgcacaggtgacacaaacaaagtttctccccaatgctccg

SEQ ID NO: 803918 - DNA, 100 bp, Homo sapiens
gaagggggcagcgccgagtcggagggggcgaagattgacgccagtaagaacgaggaggatgaaggatgttgatatatcactacttgtgtcttttaacaaa

SEQ ID NO: 803919 - DNA, 100 bp, Homo sapiens
attccagcttcggaacaagagaccctggagtagaggtttaccactcttaggtgactaagcagtatcacaaataaaccctccagcaagtttaaaaataatt

SEQ ID NO: 803920 - DNA, 100 bp, Homo sapiens
aagaaatgattatatcaactgggtccaacagcaggcctatggaatggagcagcaaatggatttctcatggaagtttgtgttgattcagtggaatcagctg

SEQ ID NO: 803921 - DNA, 99 bp, Homo sapiens
tcaacttccatgggcgcgtcacacaggcctccgtgaagaacttccagatcatccatggcaatgaccgccaagtttcttcctaacagtggtgattctact

SEQ ID NO: 803922 - DNA, 98 bp, Homo sapiens
ggacggtgtgccatcaaggtggagagtggtgaaaccagaacaatatctcactttcattatactacctggccagattttggagtccctgaatcaccagc

SEQ ID NO: 803923 - DNA, 100 bp, Homo sapiens
tttcaacagaagagtgagagatggaacccgaagaagaaaggattcgttacagccagagattggtgtgatgaatgcagactctgctaccattttggctgtt

SEQ ID NO: 803924 - DNA, 98 bp, Homo sapiens
ccaggggtcactgtcgcccctgagatgtgtcccatcagagcaaccgccaggcggcactccagggtccggcccaaggtgactgtcctgaactatgcctc

SEQ ID NO: 803925 - DNA, 101 bp, Homo sapiens
ccccgggagaagtttcccagaaaaaatgcccagcgcggcgcggggctgcggagtcgtccggagccgctgcgcggtcgcaatggaagaagagatcgccgcgc

SEQ ID NO: 803926 - DNA, 100 bp, Homo sapiens
gacaggaggcagtagccaaacacccagattcatgatgttgctatcaaaagttgagaaattgtcagaagaaatcatggagataatgcaaaatttaagtagt

SEQ ID NO: 803927 - DNA, 100 bp, Homo sapiens
atggtggcgcgcaggaggaagtgcgccgcgcgggacccggaggaccgtatccccagcccactgggctacgcaggactctggactgtcttcacactaggtg

SEQ ID NO: 803928 - DNA, 50 bp, Homo sapiens
gggagccaagcgtcctgcccggcccctcttagcaaatatccggctgtgat

SEQ ID NO: 803929 - DNA, 100 bp, Homo sapiens
tcatttgctactatgggaaccgaggggagcctgatcctatcgttttgacgccaggagcatcagatccatgctgctgctgactcggagccccacagcttgg

SEQ ID NO: 803930 - DNA, 100 bp, Homo sapiens
tttgtggctggctggatctctggcatttccggagagttcttttgaagtcacttcagaaggatctacatgaggaaatgaactacatcactgcaataattga

SEQ ID NO: 803931 - DNA, 100 bp, Homo sapiens
tatcttcatcatcatcatcatcgggactgctgagatgtcctctattcttgaagagcgtattcttggagctgatacctctgttgatcttgaagaaactggg

SEQ ID NO: 803932 - DNA, 98 bp, Homo sapiens
tcctctgattggcaacatgttagctttgaagtggatcctaccagcactattcctgatcagagaactccagttgcttcaacacacagtatcagtagtgc

SEQ ID NO: 803933 - DNA, 100 bp, Homo sapiens
cggcgccacagggaatgggggctggtggctagaggtgcaggtagctaatttaacaagtccacagcgctgggtgcagtacctcctgcttcttcaggagtcc

SEQ ID NO: 803934 - DNA, 98 bp, Homo sapiens
tgcagctcactgatttcatcctcaagtttccgcacagtgctgaggtgcctgggcatccctacccgcgtcgtgaccaactacaactcggcccatgacca

SEQ ID NO: 803935 - DNA, 100 bp, Homo sapiens
ccagctgtttggatcacagagagagaaagatgctggtttcgagttttggagatccttgttttttatggaacacagttctgtaaaattttcataagattcc

SEQ ID NO: 803936 - DNA, 100 bp, Homo sapiens
gaacgtttgatgcatttgacctctgaagaactggtaaccaattctgaagggacatgggtgcaactggatcagaacagcatggtagagttctgtgagagtg

SEQ ID NO: 803937 - DNA, 100 bp, Homo sapiens
taggagtcctggacatcgctggcttcgagatcttcgatgggtctagtggggatgagcgggcaatggctaaggagctggccagccttctctgtgatggcag

SEQ ID NO: 803938 - DNA, 128 bp, Homo sapiens
atgcatcctgccgtcttcctatccttacccgacctcagatgctcccttctgctcctggttcggctttccagtttggcagcagcactacaaatttcaacttcacaaacaacagtccatcaggagtgttc

SEQ ID NO: 803939 - DNA, 100 bp, Homo sapiens
agcaagatggctgaactcaatactcatgtgaatgtcaaggaaaaggacccagatgatgtggtaccagttggccaaagaagagcctggtgttggtgcatgt

SEQ ID NO: 803940 - DNA, 100 bp, Homo sapiens
tgctgaaggccctcaccaacttgccgcacacagacttcaccctgtgcaagtgcatgatcgaccaggcacatatgtgtcgtggaggccgaatgtttgcacc

SEQ ID NO: 803941 - DNA, 100 bp, Homo sapiens
ccaggtcccccggaaacctagaaatggacccctcgtccagtcattgtggaacccatggagcagtttgatgatgaagatggcttgccagagaagctgatgc

SEQ ID NO: 803942 - DNA, 100 bp, Homo sapiens
cagagcaagccatcaagcacttgaaggtgacaatctccaatagacttgtgtcttcaccttgctgcattgtgaccagcacctacggctggacagccaatat

SEQ ID NO: 803943 - DNA, 99 bp, Homo sapiens
ttggataagctggagtctattcctggattcaatgtcatccagagcccagagcagaatcaggaaacccaggcccaacggcaggtggatgcaagaagaaat

SEQ ID NO: 803944 - DNA, 100 bp, Homo sapiens
aacttcggtgcctctctccagcagactgcgaatctttggaagaactaccagaaacgagtgggaaaacaacccggagattcttctttaatttaagttctat

SEQ ID NO: 803945 - DNA, 100 bp, Homo sapiens
gtgcccctgctgcccagacaagtgctgctgccccgaggcccaagctgaacatggttatgcctccatgttaccatacaataacaaggacagagatgcctta

SEQ ID NO: 803946 - DNA, 100 bp, Homo sapiens
ggacaagtggtacagcctgagcgggaggcagggggacgacaaggagggcatgatcaacctcgtcatgtcctacgcgtatcaagaggatgcatccgatatg

SEQ ID NO: 803947 - DNA, 133 bp, Homo sapiens
agtacataaatgaagacgagtatgaagtaaatttgaaagactttgagccacagcccggacggtgcgggcttcacagggccccgtctacaaaggagtctgcaaatgcttctgccggtccaagggccatggcttc

SEQ ID NO: 803948 - DNA, 99 bp, Homo sapiens
tcaagctaagcgcctactagagcagggtttggagactcaggtcctaatctacccatggctacagttgatataaaaaatccagaaatcacaacaaataga

SEQ ID NO: 803949 - DNA, 98 bp, Homo sapiens
aacctgagtctgtccagtcaggtaccttcaggccttgaaaagaggatagaccaggctgtggaggagtggaatattgagaaggctgaggaactcagcaa

SEQ ID NO: 803950 - DNA, 100 bp, Homo sapiens
gtttacgtctcttccatctgctgctcacctcagctgcctgggtccccgacgagagccagtatggtttgaagtggtgaacatggatttttctcggcttcac

SEQ ID NO: 803951 - DNA, 98 bp, Homo sapiens
gcagcagctccacgtccgactgtgccatctgtctggagaagtacattgatggagagaagatgggtgtgaacctgacacgcagcaacaaggagacggtg

SEQ ID NO: 803952 - DNA, 100 bp, Homo sapiens
tgaggtcctacatctccgaaagcaagctcttctagaagttggctgctttgtaccgcctcagtggagactggaatcccttacacattgatcctaactttgc

SEQ ID NO: 803953 - DNA, 100 bp, Homo sapiens
tctcaccacggctaatttgatggagaaggttcgaggcctacagaacctagcctatcagctggggctggatgagtttaaagccttccatctgaagtatgat

SEQ ID NO: 803954 - DNA, 100 bp, Homo sapiens
cgggtgccgaggagcgggaagagttgctgggcttcggaaccaaaaagaagcttcccagagccggggccaggagccccaagcgccctctagcagcaaacac

SEQ ID NO: 803955 - DNA, 98 bp, Homo sapiens
tttgatgcgatcctgaccagtgcaaccacgggatggaattgaatgatctggcacgggaccctccagcacagtgttcagcaggtcctgttggagatgat

SEQ ID NO: 803956 - DNA, 98 bp, Homo sapiens
agatgacgggctttctgctgccgcccgcaagcagaggtgccgagcagagagatcgacaaggcggagggcaagttctggacacactggaaccgggagac

SEQ ID NO: 803957 - DNA, 100 bp, Homo sapiens
tatgggaaaattaagcagatgctccagtttgagaaacctggatctgcgatctgtttgtgaggaccattcttagtggcactggggaaatcttggcacccag

SEQ ID NO: 803958 - DNA, 100 bp, Homo sapiens
cccagaggaactcaaagttaaggtgttgggagatgtgattgaggtgcatggaaaacatgaagagcgccaggaagagagggctcgacgagaggaggaggag

SEQ ID NO: 803959 - DNA, 99 bp, Homo sapiens
ctgcgcacccggcagcaccatgacagatacagtttatgtaacttgatggaagaaaatggaattactccaaaaagacaagtgctcaagcagcaaaatcct

SEQ ID NO: 803960 - DNA, 100 bp, Homo sapiens
cggggccttgtgggagggcttaaggaagtaaaatggcggacctggcgaacgaagatcatccccccgaaggagtggaagccgcggcagacgtatgatgaca

SEQ ID NO: 803961 - DNA, 100 bp, Homo sapiens
ctaagacgaaagcatgtcatggaagttcgacaacagcctaagagtttgaaggtgaacctgggcccaaacaaaatggtggttgacctgacagatcccaacc

SEQ ID NO: 803962 - DNA, 98 bp, Homo sapiens
gtgggatacacggtagcatcatggtcgagtgagatgagtcagaaaccggccaaggagggtcccagactctccaaaaaccagaagtactccgaacactt

SEQ ID NO: 803963 - DNA, 100 bp, Homo sapiens
agaatatttgaaagctttttgatcttcacatccttgaggattcagtgcagctttactcaatcaggatcatgcctagattcacctggtaactgaagaggag

SEQ ID NO: 803964 - DNA, 100 bp, Homo sapiens
tgtgctaagagaagaaaaactacctgtggtaggaattggaaagcatctgtgtggtatggcaacaggtcagacatatttccaacatttgggtcaaaacctt

SEQ ID NO: 803965 - DNA, 100 bp, Homo sapiens
agaaagtgcaaagccttggcatgttacacagctgacgtaagagtgatagaggtagctacagcaagctgggtagcaggcagatccaaaggatatcatgaag

SEQ ID NO: 803966 - DNA, 100 bp, Homo sapiens
gtgcacacccaggctgtgagaaagccttcacacaactctccaatctgcaggggaacttacgttactggcttgaagaggcagaatgcagagatcagtacag

SEQ ID NO: 803967 - DNA, 151 bp, Homo sapiens
aatgaagcagccgatcatggcggatggcccccggtgcaagaggcgcaaacaagccaatcccaggaggaaaaacgctgtcttgtcgacggtctcactgatgcctcttctgcattcaaagttcctcgacccgggccagatacactccagttca

SEQ ID NO: 803968 - DNA, 99 bp, Homo sapiens
ttttccctcctcaaactgactttgcagccacggagagttggaaaatggtaccacatggcaaaacccagaaccacccgtggatttcagagtaatggagaa

SEQ ID NO: 803969 - DNA, 98 bp, Homo sapiens
agacatctccaaaacagtcatgtcacacctggatagatttgaacatggaattcaatccttcagatcatcctcgggccagcacaatattcctcagtaaa

SEQ ID NO: 803970 - DNA, 98 bp, Homo sapiens
agatgatacctttgatccagaacttgcagcaacaataggcaaagaaggggaactacgccttcctgtgggatgtggccgtggtggaatacgcagccctg

SEQ ID NO: 803971 - DNA, 100 bp, Homo sapiens
tttgccctggcaaacactggaatcctactttttctaccagatgatgtgcttctgcatcgcactcatgatgagattgtcctcctgcattgcttcctctggc

SEQ ID NO: 803972 - DNA, 100 bp, Homo sapiens
ttggagaagctgaaggacatgaaagtgctgtacaccaaccgagcccaggtttcattgtttgcggaacttttcaacgaaatgcttcaaagagattttggtg

SEQ ID NO: 803973 - DNA, 100 bp, Homo sapiens
accagtccccagtgagggtgtacaaatacccctttgaattaattatggcttggaatttcccgttggttatgctcatttggaagatagggcctgcactgag

SEQ ID NO: 803974 - DNA, 100 bp, Homo sapiens
atgtggatgcaaacaaggttattcttaatcctgtaaatacgaatctttccaaaggagatgcccggaagttttattcagtgtatgggtctggtcaaagagc

SEQ ID NO: 803975 - DNA, 99 bp, Homo sapiens
atcaaggacaaacccaccttcatcaaagggcatgcagccagtaaagatcccagagaagttcgagaagctagagatcataaggaaccaaaagaggagatc

SEQ ID NO: 803976 - DNA, 98 bp, Homo sapiens
actaggatgtcccgacatgaaggacatgatccacatcgcggacaccaaggtcgccaggcgttatggggatttcttcatccgtcagatccacaaatttg

SEQ ID NO: 803977 - DNA, 100 bp, Homo sapiens
ctcgctctccgccgcccgcaccgccgcccgcgccctcaccaggcagaagctcctcctggggtagagacagatcttattgatgttggattcacagatgatg

SEQ ID NO: 803978 - DNA, 98 bp, Homo sapiens
ggctgttcttcgagtagctgggccctgggtggaaattgcaacactaacaagagagaatggaaagacagtaatcagagttctcaaacaaaaagaagtgg

SEQ ID NO: 803979 - DNA, 100 bp, Homo sapiens
gcttgaaaccaagataccattttgctgctttggaaaagacctattatgagaggcttccatatcggcatcagatgccagctctgaaaaactcttcaacact

SEQ ID NO: 803980 - DNA, 107 bp, Homo sapiens
agacctcaggacagtagatccagaaacacaggctagactggaagctttactagaagctgcagggtaaaggagctggaagtgcgaaaattgatgcatgtgagaggaga

SEQ ID NO: 803981 - DNA, 100 bp, Homo sapiens
atcaaatggaaagtttttccaaatattcatctgtacaggtggattctccacagttttcctcgtgcgtactcacggtggaatccgatgtgcattgaagcga

SEQ ID NO: 803982 - DNA, 100 bp, Homo sapiens
accatgggtccaggaaaagtgtttggggaattggctattctttacaactgtacccggacagcgaccgtcaagaattgcattctcacaacacaatacaatc

SEQ ID NO: 803983 - DNA, 101 bp, Homo sapiens
tctctaattcggcaaagacggtgatgactgtatatatgcaggccaattcccataagctgtggccatgactactgaagtaggctctgtgtctgaagtgaaga

SEQ ID NO: 803984 - DNA, 100 bp, Homo sapiens
acgctaccacagccagacctatggcaatgggtccaagtgcgaccttaatgggaggccccgggaggccgaggttcgggacctgtatgaggctggagagaag

SEQ ID NO: 803985 - DNA, 125 bp, Homo sapiens
gaaagtcgcagagctgaagcagaagatcgaggacacgctatgtccttttggcttcgaggtttaccccttccagctttcctgctctgggaccctaccaaggtgcccccacgactgcaggctgtgac

SEQ ID NO: 803986 - DNA, 101 bp, Homo sapiens
gaatctgagccacagtgtgatcccagctttaaaggagatgcaggagaaaatacggcattgctaggtgtcagctgtgatgcatgtttaaaaggaaattttcg

SEQ ID NO: 803987 - DNA, 100 bp, Homo sapiens
ataggagcaaccctgtaaaaccagccttagactatttttcaaacagccacagtgtcttgttatgacaggtgctccaaactcacgtccagctttacttcat

SEQ ID NO: 803988 - DNA, 100 bp, Homo sapiens
gcgcgaatatcgtcatcgttagaagccaaaatgaagtttaatccctttgtgacttccgaccgaagcaagaatcgcaaaaggcatttcaatgcaccttccc

SEQ ID NO: 803989 - DNA, 100 bp, Homo sapiens
ggaagtggtcatttcagatgtgattcatctattttgaatcaggaaattgaagcgttcagtctgtccgaagacacttcatcggggctgcctgaggatcgag

SEQ ID NO: 803990 - DNA, 98 bp, Homo sapiens
tgccccagcccatcctctctaaccaagggctacagaactggctacccttatcgataccctgctctgagagagaagtctaaaaaatacagcgatgtgga

SEQ ID NO: 803991 - DNA, 100 bp, Homo sapiens
agctgcttttgcaccatttggaagaatatccataagcagtactataatggatgtagacagcacaatttccagtgggcgttcaactccagcaatgatgaat

SEQ ID NO: 803992 - DNA, 98 bp, Homo sapiens
tacacccgaggtccctctttggggtggctctttgctaagtgctgctgttgcttcccgtgtagagatattgatgatgttaagaagttcaaaccgggtta

SEQ ID NO: 803993 - DNA, 99 bp, Homo sapiens
tcgtcccgcgcccccggggctcgcggagccaggtcctggctataagtcaccatggcacagcaagctgccgataagtatctctatgtggataaaaacttc

SEQ ID NO: 803994 - DNA, 99 bp, Homo sapiens
cctgtcggcagactggtgacttcacttttgagtgcaactgccttccagaaatgagccgtcagactgctacagcattacctaccggtacctcgaagtgtc

SEQ ID NO: 803995 - DNA, 100 bp, Homo sapiens
cacaccaacttgcgcaaaaacaacagacagccctatgctgtcagtgaattagcagggtatttgaagtataccatacaactgttttgaaaatccagcgtgg

SEQ ID NO: 803996 - DNA, 99 bp, Homo sapiens
tcatggaaaaggagttccctggatttttggaaaggtcattttcttctgaggaagtcattcttaaggactgttctgtccccaaccccagctggaacaagg

SEQ ID NO: 803997 - DNA, 100 bp, Homo sapiens
tatgaatcatttgaagaacttacagggatgagagtccaatgaaagcaaacttccttcaaaacatgatagaagacagaacagaatctgcattatcatatta

SEQ ID NO: 803998 - DNA, 100 bp, Homo sapiens
acagttgcagcttcaacttttacaacaacaacatgctggaaaacagcctaaagaggttggtgggacaagtgatgttgaagtgaatgaaaagaaagacaga

SEQ ID NO: 803999 - DNA, 99 bp, Homo sapiens
ctggatctttgctagaaagagaggacctatctggaagaggagctagtgaaggcacgggaacgtccccgtccccggaaggacatgtatgagaagatggtg

SEQ ID NO: 804000 - DNA, 98 bp, Homo sapiens
aaaaggcaggagagaatcaggagcacaggcgagacaatgccatccccatcaaatcctggttcagtgaccccagcgacacagcccttctcaacctgctc

SEQ ID NO: 804001 - DNA, 98 bp, Homo sapiens
gaggtattaggcagtgctacaagggatcaagatcagctccaggcctgggaaagtgaaggtggaaattctttgtgagcacccacgtttccgagtgtttg

SEQ ID NO: 804002 - DNA, 100 bp, Homo sapiens
gaattatacctagaagtctactaatggacagttagtcacccacctacatgttgagctggacacagagtatagaaaaaaatgggatgccctggtaatcaag

SEQ ID NO: 804003 - DNA, 100 bp, Homo sapiens
acacttgtcagtaccattcaacaagatgctgactgggacagcgttctgtcatctcagcaaagaatgctcatggggcattcagaatgggaccacaaacgag

SEQ ID NO: 804004 - DNA, 100 bp, Homo sapiens
cagcgccgtcccgtccgacagccaggcccgggagaaagttcctgagttggaggtagaagaagaaacccaagttcaagagatgactttagatgagtggaaa

SEQ ID NO: 804005 - DNA, 98 bp, Homo sapiens
cccagggtggaatcttaaaaattaatgaagagcatcggcggggtgccattcagccccctctcccaacaactccgacacctgttccaagggaacctggc

SEQ ID NO: 804006 - DNA, 98 bp, Homo sapiens
gggagaacggaaaactcccaacttcctggtaagtggaggtatacttcgaatttttccagaaggcaaagcccagtttgctgacattgaacccaaatttg

SEQ ID NO: 804007 - DNA, 100 bp, Homo sapiens
cagcagttctccctgccctccttcaagattgacttctcggaatggaaggatgacgagcggctagccttgatgtaccgaatgcaggttgcaaatattgaca

SEQ ID NO: 804008 - DNA, 98 bp, Homo sapiens
caggccaagagggatccttcacccgtgtctgcggggatctgatgagcttctttcttctggcatcattaacggaccttttaccatgaatagttctactc

SEQ ID NO: 804009 - DNA, 100 bp, Homo sapiens
tgtgcctcccagcaccacagtccttctgcagtccctcgtccagccacccccagacacatcatctcagagttggagcacctgacgtttgtcaacacggatg

SEQ ID NO: 804010 - DNA, 98 bp, Homo sapiens
accatcaaatccgtgtcggagtccttacagacagagctgtgaaccaaccccgctcacggctaacaagcccacccaccatggcgagccccactctgagc

SEQ ID NO: 804011 - DNA, 100 bp, Homo sapiens
ggggcttgccaggagacgcaggtcgtgaagggttcccaggacccccaggcaatgtctacttcgatctgaagtctagaggagacaagtatggcaaattggt

SEQ ID NO: 804012 - DNA, 100 bp, Homo sapiens
ttctcttttcccatcatagagtgactgttttgcaggcaatggtcgagacagttaacaacctccttcagccacaagctttgaatgcatggagagacctgac

SEQ ID NO: 804013 - DNA, 98 bp, Homo sapiens
aggacgtccccccagccggagtcgggcatcaagcgactggttgccacaccatttggaggttttgaaaaagcatcaagaatggttaaatttaaagttcc

SEQ ID NO: 804014 - DNA, 98 bp, Homo sapiens
atccagcccaccgtagtggatcccgtcagcttcatgttctggaaggatcttgttcaagatggggtggcttcaccagctacccctgggaccgggaaatc

SEQ ID NO: 804015 - DNA, 100 bp, Homo sapiens
tgctgcctgtgctggtgctgctgctgtagctgctcctggaccgtggcaaggaggtgtacagccctgactttcatagcctcggaggagaaggtcttggtgg

SEQ ID NO: 804016 - DNA, 100 bp, Homo sapiens
tcactgagttttgactagcggaagaaaagacataaccagtgcggtgcaatccaagcgaagaaaatccaagtaaacaagcaggactgcgacttgatacttg

SEQ ID NO: 804017 - DNA, 98 bp, Homo sapiens
agcccgtcttccttcccctcccttgcatgatggaaacaccatggctgcggcggcccagctctctctgacacaggaaccaaagaggttgttgtaaatgt

SEQ ID NO: 804018 - DNA, 98 bp, Homo sapiens
ttggtgaatttacccctctctaccctatgctatttggaggtggacaagaacggaatttcaggccaggcattagtgaccagaaggatcccaaggatcga

SEQ ID NO: 804019 - DNA, 100 bp, Homo sapiens
gccacgccggcgatggaggcggcggcggcggactggcggcggagctccctgggtcctcagcagtgaggctggcctccctgcgtgacctgcccgcccagct

SEQ ID NO: 804020 - DNA, 99 bp, Homo sapiens
tcctctagagctttggaaggctgaatgcactaaacatgaagagcttgaaagcgaagttcaggaagagtgacgtatgtattgggtggaggagcattatgt

SEQ ID NO: 804021 - DNA, 100 bp, Homo sapiens
tgtagaacagctttatgaaacagcttgcttcctacagaagaagaagaggacagtgctccagtgaaagtggaagaacaaaggaagatgagtcaggatagtg

SEQ ID NO: 804022 - DNA, 100 bp, Homo sapiens
ttggcttaaataactgtgattgatggccatgcaggagaaatatccaactgaggggatctctcacgtcacttcaccgaaatatgtgagatccaggctgttg

SEQ ID NO: 804023 - DNA, 100 bp, Homo sapiens
ttccaatctttgtcttgtaaggagcacctgactacggtactcgataagctttccagagtgttgaatcttccaccagaaaacttgatcacatcaatatctg

SEQ ID NO: 804024 - DNA, 98 bp, Homo sapiens
tagaacgtgtttttcgggagagcaaaggctgtgtctacggcagcctggggatataatgccttcaattaagttgcagagttctgatggagagatatttg

SEQ ID NO: 804025 - DNA, 100 bp, Homo sapiens
actacagagaagcttcttcttgtgccgtgaacctcgttttgagattaagatacttatcttcagcaaatcctaatgataacagaactagctccaatgcaga

SEQ ID NO: 804026 - DNA, 100 bp, Homo sapiens
gcgagagatcgagagcactgacacggcctgcatcgggcccacgctcagcttagaccatgctcagcctccaagcagccttgtcatcgacaaagaatctgaa

SEQ ID NO: 804027 - DNA, 60 bp, Homo sapiens
gaggcggaaaaggtgctgaggaggtctgagaaacatcttacctattacaacagcaaaggt

SEQ ID NO: 804028 - DNA, 100 bp, Homo sapiens
caggctggtgaagaagccagaccaagcccgggttcggaaacaccagccccgctcagacaggtatcaccacgtgaactcctatgacgaggatgacacgacg

SEQ ID NO: 804029 - DNA, 100 bp, Homo sapiens
aagcaatgtccggaggaccacctttatgtcctagagcataatttgcatctactgattagagaggcagcgacagtgcccagggctctgatgtgtctctcac

SEQ ID NO: 804030 - DNA, 100 bp, Homo sapiens
tggatgatttgctgccgctgacgtttttagatttcatccagcttccaattgaagacttgtgcagtttaacatcccagtcactgcccattgaactgacttc

SEQ ID NO: 804031 - DNA, 98 bp, Homo sapiens
caggctccagttgtccgcggttcctcctcctgtcgctgcccgtgtgattactgagactcagcactattcctgatcagagaactccagttgcttcaaca

SEQ ID NO: 804032 - DNA, 100 bp, Homo sapiens
ggcggatggggcacgcacagagtgcaagacgctgagcaatgcaggttcctcatgagagtgctggactcctacggggatgactaccgggccagccagttca

SEQ ID NO: 804033 - DNA, 99 bp, Homo sapiens
gaatactgcccgatggtcttccgtaacctgcgggagaggtttggaattgatgatcaagatttccaggtgtgaaaatcacatcaacactgcaagtgttga

SEQ ID NO: 804034 - DNA, 100 bp, Homo sapiens
tgctcgttttctatatcaccaaaaggaaaaaacagaggagtcggagaaatgacttaattcagtgcacaaatgagatgaatgtgaacatcccacagttggc

SEQ ID NO: 804035 - DNA, 100 bp, Homo sapiens
cctgttccagaattgagaactaaccgttgtaatgcagggactttgaacatgtcggggatcgccctcagcagactcgcccaggagaggaaagcatggagga

SEQ ID NO: 804036 - DNA, 99 bp, Homo sapiens
aaaggcaccggccttgatgaggcaatggaatggtgttgacagctcttctaccacaagcagtgcttctccaatgcccaacagttatgatgccctggaagg

SEQ ID NO: 804037 - DNA, 100 bp, Homo sapiens
taagcactgctgcactttatgaggatgtatgttgtgttcacagcgaaggtactcccttcagcctgtcccagaaaggaggattccaaaccgatacttaggc

SEQ ID NO: 804038 - DNA, 100 bp, Homo sapiens
gaattgccatggctgctggaagaagtctcaaaaagctcccgactagaatgtttggaatggttttggaaaaaattattattcctgaaattcagaaggtatc

SEQ ID NO: 804039 - DNA, 99 bp, Homo sapiens
caggatcccctggtgctccggggcaggatggaacacggggagagcctgaacgtcaaggtcgtgggaaataaaaggcagttctacacagactgcagcaac

SEQ ID NO: 804040 - DNA, 98 bp, Homo sapiens
atggaagcataggtcaaagctgtttggagaaaatcagaagtacagttttatctagccacatcttggagtactcgggagagcctggcttccaacacatc

SEQ ID NO: 804041 - DNA, 98 bp, Homo sapiens
caagttgaaaatggacgagtaatcgcctgctttgattcattgaaagtaatgaatttgggcatcctgaatggttagacttcccaagaaaaggaaataat

SEQ ID NO: 804042 - DNA, 100 bp, Homo sapiens
accaggaaaatggccacagggctcctgagagccaaaaaagaggatattggtgctggaaaaggcaaatactatgctgtcaattttccaatgagagatggta

SEQ ID NO: 804043 - DNA, 100 bp, Homo sapiens
ggattgttattcttctgcttgttgatgtgatatgggttgcttcctctgaacttacttcgggaagtcgagataacatgagtattgtactagtttgcttttc

SEQ ID NO: 804044 - DNA, 100 bp, Homo sapiens
tggagaagatagctgaccagctggaagagttgaataaagagcttactggaatccagcagactgaaactgttgaggagcccatggaggaagaagaagcagc

SEQ ID NO: 804045 - DNA, 100 bp, Homo sapiens
gtgaagcccaggcaacccaaccgtgcctgtctcggaccccgcacccaaaccactggagtacaatgcttgcacactgcacggtggaaaaggccaggagcag

SEQ ID NO: 804046 - DNA, 100 bp, Homo sapiens
cttctcccgcgcggggggcgagtaagccagcggcaggaccagcgggcgggggcccacgactacagagggccggagctggagatgtggtctctgggagtca

SEQ ID NO: 804047 - DNA, 100 bp, Homo sapiens
agacggacaaaaaagaacaggagaagtctgaacacgtcttaggggaaaagccagagcttccagatggaggtgatgatgatgacattatagcagacataag

SEQ ID NO: 804048 - DNA, 99 bp, Homo sapiens
actgggcggtgccggcgccggagacgatgccgttatcaagaatgctgcagccaatgtccttcgggaaacatggttaatctataaacacacaaagctgct

SEQ ID NO: 804049 - DNA, 98 bp, Homo sapiens
aagagccagccagtagcccttcgagcctgtgggcttccctcaggaattttaaacagctatcaagtaaaatggaatttatgacaattaatggaacaaca

SEQ ID NO: 804050 - DNA, 100 bp, Homo sapiens
tgcaccagccatggactgctacacggcgaactggaacccactcggggactctgccttttaccgctaagatatcaacatggactagggactccagacttgc

SEQ ID NO: 804051 - DNA, 98 bp, Homo sapiens
gtgtgcctgatgatcacgcagctggctggcttcagtggaccataaaggcatgacttcctggcaccacagggaaaatcgggtgcaagcccagaaactat

SEQ ID NO: 804052 - DNA, 100 bp, Homo sapiens
cctgtatccttcgatttggcaccaggtctctctgcaactccatcatctccttgaacactacaattagattagaagcccaggacccaggaaggagacacag

SEQ ID NO: 804053 - DNA, 99 bp, Homo sapiens
ctgagatccggagcagccggggtcggagcgggttacgaagtgacagtgctggtgcgggactcctccaggctgccatcagaggggccccggccggcccac

SEQ ID NO: 804054 - DNA, 99 bp, Homo sapiens
ctgggttctggaggctgcggggccatcgctccagtttgggagtctggatcaaaaattagccctggctactcgtattcgtggtcatgttctacccttagc

SEQ ID NO: 804055 - DNA, 100 bp, Homo sapiens
tggtaaaacttggagatcttgggcttggccggtttttcagctcaaaaaccacagctgcacattctttagtggccataaaatgcagtaaaaacaaatccag

SEQ ID NO: 804056 - DNA, 100 bp, Homo sapiens
gataccaggttcggctgcagctgggcagtctgggcagtggaggcagagggtccagggagtcggtagtaagggatggcgggacgtcaccacctttttttcg

SEQ ID NO: 804057 - DNA, 111 bp, Homo sapiens
cccacgcaggaggagaaggacgagtggatcaagtccatccagggggcatgtgctctgtgtacctgaaggacagtgagaaggttgtcagcatttccagtgagcacctggagc

SEQ ID NO: 804058 - DNA, 100 bp, Homo sapiens
cggaactcctccattgccagtgatatgcatctccttggaaacaatgccatctttgaatgtgagagataaacctagtttcagcatgtctgcagcagagacc

SEQ ID NO: 804059 - DNA, 99 bp, Homo sapiens
agcggaggagcctggcggccaccccctcttcctcacttccctgtactctcatcgctctcggcctccgacacggtgaccctgctggactttggtgcaagc

SEQ ID NO: 804060 - DNA, 101 bp, Homo sapiens
cgggtggcgcctccctgcgactcctggaccaccgggcgctggtctgctcccagccggagcatcagatccatgctgctgctgactcggagccccacagcttg

SEQ ID NO: 804061 - DNA, 98 bp, Homo sapiens
gtatcattgcgtgtgctgcgacagtccactcttcagtaaggatggggatgataagaagagacctgtgatcattcatcgagccattttgggatcagtgg

SEQ ID NO: 804062 - DNA, 100 bp, Homo sapiens
cagacgacaagcacacactatggcgctgaaacggattaataaggagcaatgttcctttagttgggactgggggccttcctttcctacccagggaatctgg

SEQ ID NO: 804063 - DNA, 100 bp, Homo sapiens
gatgcttctggagcaaaacttgattaccgtcgatatgcagaaacactctttgacattctggtggctggtggaatgctggtgagaaagatcagtctaaaga

SEQ ID NO: 804064 - DNA, 99 bp, Homo sapiens
accatcaagttcttcaggaatggagacacggcttcccccaaggaatatacaggcggtggaagaagatatccccatagcgaaagaacggacacatttcac

SEQ ID NO: 804065 - DNA, 100 bp, Homo sapiens
catcctgtccatcgtgtgcctgatgatcacgcagctggctggcttcagtggaccaatggcccactgcgtgaccttggttcagctgtccatttcctgtgac

SEQ ID NO: 804066 - DNA, 100 bp, Homo sapiens
gtcctcaccggagctgtcaaccctggagacaactgctactccgtgggcagcgtcggggatgtccccttcacgatggaacagattaaaagggccaataaac

SEQ ID NO: 804067 - DNA, 99 bp, Homo sapiens
ttttctttctcagaaagcagaggctcagagcttggagacagacgggagatgcagttaaagacttgatgcttcgctttctgggtgaaaaagctgcagcaa

SEQ ID NO: 804068 - DNA, 74 bp, Homo sapiens
ggtgtgctcgagcaaccagaaccggagcatggaggcgcacaacatcctcaggctgcctgctgtttcccggggag

SEQ ID NO: 804069 - DNA, 100 bp, Homo sapiens
ctgctcaagtcctgtcctcttctgaccaaagagaatactctgaagatagtaactccgagccaaatgtggatttggaaaatcagtactataattccaaagc

SEQ ID NO: 804070 - DNA, 100 bp, Homo sapiens
aagtactggaatcatacttcctttcagggtaaagttctttacaaagttcgctggaaaggctatacatcggatgatgatacctgggagcccgagattcacc

SEQ ID NO: 804071 - DNA, 100 bp, Homo sapiens
caggagaatacacctttgtggcaggaaggaacaggagttctgtcactctctatgtcaatgcccttctgtgacggctcccacttcttccaacgcactggcc

SEQ ID NO: 804072 - DNA, 100 bp, Homo sapiens
ctgagaaaatgcggccagcatcctggggagcacccatttcctgggaacaagctgacccttttgcgaaactgccaagttttggaccttatctggaacagcg

SEQ ID NO: 804073 - DNA, 100 bp, Homo sapiens
agccttcctgatttctgcagctctgtgtgaaggtttggcatgagagggagtgaaggatgtgcctacctcagcgatgatggtgcagcaacagctagatgtt

SEQ ID NO: 804074 - DNA, 100 bp, Homo sapiens
ctttgacaatagccctgtgctgcaggtatataatgtttacatggcagggaggcagctgtgttctaagcggtaccgggagtttgctatcctacaccagaac

SEQ ID NO: 804075 - DNA, 99 bp, Homo sapiens
attactcgcccccacctgtggactctgaccgcaaacaaggagagcctactgagcagcctgagtggagcccacccacctttgggttcctgttggacatcg

SEQ ID NO: 804076 - DNA, 100 bp, Homo sapiens
gttagatgaactcactaaaatttggaagatacagacttttaatacaggcaggctatgatgttaatattaaagactatgatggctggacacctcttcatgc

SEQ ID NO: 804077 - DNA, 99 bp, Homo sapiens
cgagagcgcgaatatcgtcatcgttagaagccgttcttggaacacctcacagcttgccacatctgatgaatccatccatctctcctgcatttttacatt

SEQ ID NO: 804078 - DNA, 100 bp, Homo sapiens
agaccggcccggccagcgcgcattcggccccggacgaaggtactcgcagcacttggagcgcagaaccggccgcgcccgcaaaatgatgcttcaacaccca

SEQ ID NO: 804079 - DNA, 98 bp, Homo sapiens
actggtgacatcatcacagtggcagctggacttgatcgagaaggctatggttctgatggtctaaagttgttatcacatgaagaaagtgtatcatttgg

SEQ ID NO: 804080 - DNA, 100 bp, Homo sapiens
cacatgatggaactgtttgacacaactgtagagcagctgtatagcatcttcactgtaaaggaggacctgggcgtgaccaaggtgggccacatgaagagga

SEQ ID NO: 804081 - DNA, 100 bp, Homo sapiens
tcgacatgagtgatgtggaggaaaacaacttcgagggcagagcttactgtggatttctccgtcctggagtttcttcagagaatctttctgcagtggccac

SEQ ID NO: 804082 - DNA, 98 bp, Homo sapiens
ctgcacttctatggccgtaaatggaatgcagtagccctctgggcctgggatattgtggttgataactgtgccatctgcaggaaccacattatggatct

SEQ ID NO: 804083 - DNA, 100 bp, Homo sapiens
tcagcctctctcccctgtgccaaggaggaagaaggcacctacgatcaaactctggagttccgtaggggaggtgatggccagccaagacgatccactcggc

SEQ ID NO: 804084 - DNA, 99 bp, Homo sapiens
gagaggaacgcgcagccagccttgggaagcccagtgatttaaagggagtgatagtcactctgagtgatgatggtcacttgcagtgttcatacctgggga

SEQ ID NO: 804085 - DNA, 100 bp, Homo sapiens
gggattgtgggagtctccgcgtcccgctcgctgggagagaggtacctctccttttccctctccctttccctaaggagaaatcccttctgcaaatggttcc

SEQ ID NO: 804086 - DNA, 98 bp, Homo sapiens
cttctgcctggggggctccaagaagacggggtgtcccgaggacctcatctcctgtgcggactgtgggcgatcaggtacgagaagttctttgggcgcct

SEQ ID NO: 804087 - DNA, 100 bp, Homo sapiens
cgggaatgtgcagtcacagagaaaggggaacccacctgtctctgcattgagtgcaagcatctcttggcagtttacctgagtcaggttatgaggacctgtc

SEQ ID NO: 804088 - DNA, 98 bp, Homo sapiens
tgccggggccacaccctggagcggtctgtgttcagcgagcggacggaggagtcttctgccgtgcagtacttccaggttgcagagcgggctctgtattt

SEQ ID NO: 804089 - DNA, 98 bp, Homo sapiens
aacccggccctcaccgccctcaccacccctatccagacggctgcccttcaagtaccattaattggccttggtcctcacagctccaaaaagaaacagga

SEQ ID NO: 804090 - DNA, 100 bp, Homo sapiens
gaaggaggaagggaaccaacccactttctcggcgccgcggctcttttctaaaagtgaatagcgggttttgcagcaattgttgcatatggattatataaac

SEQ ID NO: 804091 - DNA, 100 bp, Homo sapiens
ggggatttctcctcctaatctgggcctcttgtcatgatgatgctgaataatcccctatttgctggaaatcctcagcttcaagaacaaatgagacaacagc

SEQ ID NO: 804092 - DNA, 98 bp, Homo sapiens
aggggtctagatgtaaatgtcagtggaaaggagagctaccatcactaaggtgggccaagagaagggaaactgctctttccagaaaaacccaactccct

SEQ ID NO: 804093 - DNA, 98 bp, Homo sapiens
cttccagttagtggatatagcacaccatccccagccagacgagattgaggagctgcgggccgagatgctggagatgcgggacgtctatatggaggagg

SEQ ID NO: 804094 - DNA, 100 bp, Homo sapiens
aagatccaagaccattcttcaagtttgcaaaggtaatagcctgcagctggtgttttgagaagccctactgctgaaaacttaacaattttgtgtaataaaa

SEQ ID NO: 804095 - DNA, 99 bp, Homo sapiens
accgacaagatcaccacggacgagatgatcaaacgcctgaagtgattcgcctttgccagtctcatctcgtgtctgctttgttaagttccatgatccaga

SEQ ID NO: 804096 - DNA, 98 bp, Homo sapiens
cgagatccagttcctgcgaactgaatagccaggccagaagaaggaaggcctgtggtgagtgggacaggaaatgacatcaccaccccaccgaacaagga

SEQ ID NO: 804097 - DNA, 100 bp, Homo sapiens
atcaaagaactgagagtgattgagagtggaccacactgcgccaacacagaaattataacgtgctggccaaagcgctctatgacaatgtggccgagtcccc

SEQ ID NO: 804098 - DNA, 100 bp, Homo sapiens
attatgaaatttttgggaaggtgcaaggggtgtttttccgtaagcatactcagattcctacgagaagcaacaggcacaaggctctggtcggaaaaaatta

SEQ ID NO: 804099 - DNA, 98 bp, Homo sapiens
caaattcatcccagaaatctaagagcatatgggtgattttggaagcattcatagacccggaattgttgttgactatcaaaacaaatccaccaatgtga

SEQ ID NO: 804100 - DNA, 100 bp, Homo sapiens
ggaaacaggaggaagaattcccaagccaaagctttccagggcaattcatgatgttaaagccacagatctgggattaggtaaagtaagatttaaggcagaa

SEQ ID NO: 804101 - DNA, 51 bp, Homo sapiens
cttcttgtgtatctggagaaaatagagaaatcttcccaaggctgcagacac

SEQ ID NO: 804102 - DNA, 99 bp, Homo sapiens
gcctccttgcccgtgaccgtcgctagaactcagttgtgcgttgcggccagtcgccactgctgaggatttgttggtattgaggaaaacggtgaaatcctt

SEQ ID NO: 804103 - DNA, 100 bp, Homo sapiens
aaacgaaaaagctcaatgcctcagaaattcattgacatcgatgagtgtgctgaagggcgccattactgtcgtgaaaatacaatgtgtgtcaacaccccgg

SEQ ID NO: 804104 - DNA, 138 bp, Homo sapiens
gcttgcccgggagaagaagctctatgccaatatgtttgagaggctggctgaggaggagaacaagttacatcatgctgatgacagcttcctggtcctcaccacagatggaattaacttcatggtgaatagtcaagagat

SEQ ID NO: 804105 - DNA, 100 bp, Homo sapiens
tttttttcgtaaacatctgggtgtatatcaaacggcaagatgtccagtaatgtcccggcggatatggtgaatggaagagaatccgaagaagaaaatctca

SEQ ID NO: 804106 - DNA, 100 bp, Homo sapiens
cctatcacctctccagagacctgtactacctcactgtggagtcctcagagaaggagagctgcaggcaggagggaagcactaccacccaacctgtgccagg

SEQ ID NO: 804107 - DNA, 116 bp, Homo sapiens
cccgctcaatggcgactccctcaccgagtacgaagcgggcgtttgcgaagatcttagcaaagcaatgtctcaagatggtgcttctcagttccaagaagtcattcggcaagagctag

SEQ ID NO: 804108 - DNA, 98 bp, Homo sapiens
cagccatcagccctactccggaaatttcttcagagactcctggatagtgtgcagaggcagaatgtgtactgcttggagcggcaggcagggcccgtgga

SEQ ID NO: 804109 - DNA, 100 bp, Homo sapiens
ggacaggagcagctcttcaaactcacagacaacatacaggacgaattggctgatcccttatccaacatggttctaaccttcagtactaaagaagatgcag

SEQ ID NO: 804110 - DNA, 98 bp, Homo sapiens
aggagtcatgagcgacagcggcgagcagaactacggcgagcggcaggaacgaatgcaggaatttgggaactgagctgtgcaagtgctgaagaaggaga

SEQ ID NO: 804111 - DNA, 101 bp, Homo sapiens
ctttgggccaagccatcaccctccatccagaatctgccatttcaaaaagcaagatggggctaacccccctatggcgagttggcaaacatgaattgactggg

SEQ ID NO: 804112 - DNA, 99 bp, Homo sapiens
gctgaatgtgcgagtccatagctgaagaggagcgccagatggtggaggaatacacttatttatgaagtgaaggaaatactcatgaccagccagatgtct

SEQ ID NO: 804113 - DNA, 100 bp, Homo sapiens
tttattttggatgaatgtgataagatgcttgaacagctcggaggaaaagctttcggactgctgaaggcccagcaggaagagaggctggatgagatcaaca

SEQ ID NO: 804114 - DNA, 100 bp, Homo sapiens
agagttctgatggagagatatttgaagttgatgtggaaattgccaaacaatctgtgactattaagaccatgttggaagatgcggcattccaaaagaactc

SEQ ID NO: 804115 - DNA, 98 bp, Homo sapiens
gcgctcgctccggcgccggcctcgcctcctcgcagcagcgccatgccggcacagtcttcactaccgtagaagaccttggctccaagatactcctcacc

SEQ ID NO: 804116 - DNA, 99 bp, Homo sapiens
gacacggctgtgtttgatgtccggctgagtgggaagaccaagacagtgcctggataccttcgaataggactggcacagcctccaggttggcgggctcat

SEQ ID NO: 804117 - DNA, 100 bp, Homo sapiens
ggttagggggccggcgcccgcggttcagttttcggctttgtgagaaaccttaccatcaaacacgatggccagcaacgttaccaacaagacagatcctcgc

SEQ ID NO: 804118 - DNA, 99 bp, Homo sapiens
gctatcttgtggatcttctgagtaacggaggacaattcaccatagttttctttaaggtcttcaataaactcatcaggagatataagtatttggagaagg

SEQ ID NO: 804119 - DNA, 98 bp, Homo sapiens
gctttcaagacatggagtgtgtgccttgtggagaccctcctcctccttacgaaccgcactacaagttggatggcttgaggactggtactaaaaggaaa

SEQ ID NO: 804120 - DNA, 100 bp, Homo sapiens
gcaaaagcattagaacatcacagaagtgaaatacaggctgaacaggacagaaagaacgccaatctgaattgccaacgcaaagcaaagcgagcttccccag

SEQ ID NO: 804121 - DNA, 100 bp, Homo sapiens
aaccaggttgcaagatttaatgacctcaggtttgtcggtcgaagtggaagaggtactggttttggattaggaattgttttctcacttaccttctttaaaa

SEQ ID NO: 804122 - DNA, 100 bp, Homo sapiens
ctgcggaagcaaaaggcagactttttgatattcagagccttggaagtcaacactgtcagtggaaaagaggctgcttcaggcaccacacctcagaagtccc

SEQ ID NO: 804123 - DNA, 100 bp, Homo sapiens
atcggcccaaggccagttctccgcaggcttgcagccaatttactggagcagggatgacgtagcccagtggctcaagtgggctgaaaatgagttttcttta

SEQ ID NO: 804124 - DNA, 100 bp, Homo sapiens
ccttcatataaacgtacacctactgaatggattcaagacttcaaaacccattttcttggtggcaatttgtaccatacggatgtctcactctttggagaac

SEQ ID NO: 804125 - DNA, 100 bp, Homo sapiens
aaagatttggtttgaatgtctcttcaatctccagaaagctccctgtgctgtcaggaatctacaggacttggctcgtatttacattcgacgcacacttaga

SEQ ID NO: 804126 - DNA, 100 bp, Homo sapiens
agcctgcacggatggtcttgaaacacaaatggtttttggtaacaaacctgaatttggcaactggcatcataaacagaagcagtgcttcagctcccccaac

SEQ ID NO: 804127 - DNA, 100 bp, Homo sapiens
ctggcatccagaaattgtgtattcaggtgctggagaatctggtaaaagcaccattgtgaagcagatgaggatcctgcatgttaatgggtttaatggagag

SEQ ID NO: 804128 - DNA, 100 bp, Homo sapiens
cggatttttgcagaaacacaatggaaagtacacaggaagatgctatgaaatttccatcttcccaatcttcccagccttccaggcttttaaagaacaaagg

SEQ ID NO: 804129 - DNA, 98 bp, Homo sapiens
tcggggagctggacaggctgattgagcgcatggaaaagattggtggaacgagaatgcctacacgcagccacaggaatccagtttccatggaaaccaaa

SEQ ID NO: 804130 - DNA, 100 bp, Homo sapiens
aaccgcgaagtcatggggctctgtcgggaagctaccaggtgcagggtactaaaacatttaaaggtagaaaatgcaccaattgtaaaccgatttgactatg

SEQ ID NO: 804131 - DNA, 98 bp, Homo sapiens
gcggaggcggcggtgcagcgctccggttgaatgcctttgagaacttgatgcataaaatttgcatgactcctcactcctttctggatctctcattggac

SEQ ID NO: 804132 - DNA, 98 bp, Homo sapiens
ttccgggattcctccaggctcactgacattgagaggttaagaatgtctgaggggtcaggcggtgctggcaagatggctgcacttgagaagatgacgtt

SEQ ID NO: 804133 - DNA, 100 bp, Homo sapiens
aacgatttcatcagtatggatcccaaggtgattggagttgtgcttcaaaaatttcagaaattcagcagtattttatctgccaacaataagctctttactt

SEQ ID NO: 804134 - DNA, 120 bp, Homo sapiens
aacagctgtctttgaagggccatcttttggttacacagagcactcagtccgcacctgttttccacagcaggtagcaatgtacagataaagagtactttaacgcccatgcgtgttcaagac

SEQ ID NO: 804135 - DNA, 99 bp, Homo sapiens
tggaccgcagcgtcaatgacttacgccaagaagatgtgaagcctcagtttaggtcatctggtggttcagaacactcaacagagggctctgtatccttgg

SEQ ID NO: 804136 - DNA, 100 bp, Homo sapiens
agcgagccagcgcccggagcaagcggagctcccccaagagccggaaagtgctcctgcgggaagaagtgtcgcggctccaggaggaagttcaccttctccg

SEQ ID NO: 804137 - DNA, 100 bp, Homo sapiens
caaataagctatatactttggttacctatgtacctgttaccactttcaaaaatattcctatcattccggatctggaggaagtacaggaagaagactttgt

SEQ ID NO: 804138 - DNA, 100 bp, Homo sapiens
agcagttggagtgaagattggcaatccagtgccctataatgaagatcctgtattaaaagtaactctagcagtgtctgatcttcaaaagtccttgaactac

SEQ ID NO: 804139 - DNA, 100 bp, Homo sapiens
ggaagaagatgaagatgcttacaagaaacagttctctcaatacataaagaacagcgtaactccagacatggccaaacaccagagcaccctagaaggttta

SEQ ID NO: 804140 - DNA, 100 bp, Homo sapiens
ggcggcgtttggatgattgtctctcggcggcggagtcgttgaagactgggatagtttccaagctattttggatcatacctacaaaatgcatgtcaaatca

SEQ ID NO: 804141 - DNA, 100 bp, Homo sapiens
gtctgggtgagccttctcgtggcggcggggaccgtccagcccagcgattctcagtcagggccatcgatgcacccctcggagctaatagcggagatgagaa

SEQ ID NO: 804142 - DNA, 99 bp, Homo sapiens
agccggccagccggggggcactgcccgcccgggctctgaaggcctttgagccctacttagagattttggaagtatactccacaaaagccaagaattatg

SEQ ID NO: 804143 - DNA, 129 bp, Homo sapiens
ttacgcgggctgcggcaaaacctacacaaagagttcccatctcaaggcacacctgcgaacccacacaggagaagcatattatgtcggagcggaatgttctgttgaagaatgtgaagcaccctttcctgg

SEQ ID NO: 804144 - DNA, 100 bp, Homo sapiens
aaggccgagggcttcgtggatgccctgcaccgggtccggcagtgagaaagatcagtctaaagaaaaggagaagaaagtgaaaaaaacaattccttcctgg

SEQ ID NO: 804145 - DNA, 98 bp, Homo sapiens
catatgttggtgtcagaaaccacaggcgaatccataactctgataagccgtacagccccttcaatgaccggccgatgtgcaggatctgccacgagggc

SEQ ID NO: 804146 - DNA, 98 bp, Homo sapiens
ttgtccactgtccgccagacctgctgctgcttcaatgtccgcatcgcaaccaccgccctggccatctaccatgtgggagaggaggtgggcaggaggaa

SEQ ID NO: 804147 - DNA, 100 bp, Homo sapiens
gcagaccaagctgtttgtagaacagctggaggagttcatgacaaagctctgcagcgcttcagcgagggtgccctggagtacctagccaacctggaccgag

SEQ ID NO: 804148 - DNA, 100 bp, Homo sapiens
gaaagcagatatgcgcgtcagcatactttggcggaagaaagccagcttccctctacaagtgctctgggaaaaggagagcaggttgaagtaacatttcctg

SEQ ID NO: 804149 - DNA, 98 bp, Homo sapiens
tgccctgactgagctgctggctaagatcaccaacacagacgtggcacaaaacagcgttctcacggctcaccagccccaagcaccagctccacgtgtcg

SEQ ID NO: 804150 - DNA, 100 bp, Homo sapiens
ggcagcgacagagccaaaatcagagctggaacctgaggagagagagtgcctggtgaagaatgtgatgggatcactagcatgtctgcggagagcggccctg

SEQ ID NO: 804151 - DNA, 100 bp, Homo sapiens
catggccgatgggggcgagggcgaagacgagatccagttcctgcgaactcttttggaatggattcgtcgcacgatcccctggctggagaaccggactccc

SEQ ID NO: 804152 - DNA, 100 bp, Homo sapiens
tgactgttctaggaggtcaattccatgggaccagttactctccacaagaaaattcacacaaccacagtgctcttcatagttcaaattcacattcttctaa

SEQ ID NO: 804153 - DNA, 100 bp, Homo sapiens
tgaaaaaactgttggagacacacattcataatcagggtcttgcagccattgaaaagtgtggagaagctgctttaaatacttaattcagtgcacaaatgag

SEQ ID NO: 804154 - DNA, 98 bp, Homo sapiens
aggataatattggacaccgcttactccagaaacatgggtggaagctgggccagggattgggaaaatctcttcaggattgagaacctagatccccgagg

SEQ ID NO: 804155 - DNA, 100 bp, Homo sapiens
cggagcttctcagaagacagagggttttcttttgagcatcagaggctccttgaaatgctagatacagagaaggaactgttaaaagaaaaaataaaggaag

SEQ ID NO: 804156 - DNA, 100 bp, Homo sapiens
tttggatgttggatctacactttctcaagcactgtgatcttcaaatttttgagtatccgaggagcccaggaggaggaacccacagacccccagctgatgc

SEQ ID NO: 804157 - DNA, 98 bp, Homo sapiens
gacgtacagcgggccgggaaaagtggcactgaggctctggaacttctgcccagctctccttgcattaacacccttgtgaagatcagcaaaagtgcagg

SEQ ID NO: 804158 - DNA, 98 bp, Homo sapiens
accttttccctaatacgtacctcattgtgggaggaatggaggggccctttggtggtggtatggaaaacatgggtcgatttggatctgggatgaacatg

SEQ ID NO: 804159 - DNA, 99 bp, Homo sapiens
tactactacatcccgcagtacaagaactggagagtcaaggatgctatctaaatgggccttttaattcaaatctactgactatcccgaagcaaaggtcat

SEQ ID NO: 804160 - DNA, 98 bp, Homo sapiens
agtgatacagcaataccaccttcagtacttggcaagatttgatgctcttgtgctcagtgacatcattcaggacaaattgatggccaggagatcactgc

SEQ ID NO: 804161 - DNA, 98 bp, Homo sapiens
ggactaccgtgaggatggtgtgaccccatatatgattttctttaaggatggtttagaaatggaaaaatgtgctggcctgctgtctgccttgggctccc

SEQ ID NO: 804162 - DNA, 98 bp, Homo sapiens
gaggagagttctccaaacatgatcgtttactgcaaattttatcttcaagacactaaaagtagtaatggtacttttataaatagccagagattgagtcg

SEQ ID NO: 804163 - DNA, 100 bp, Homo sapiens
tgaccgagagcgcgaatatcgtcatcgttagaagatgcacttttgtcttcctggccagtgttttactacaatgaggatggcaagtctggacaacagccag

SEQ ID NO: 804164 - DNA, 98 bp, Homo sapiens
gtgccgtgcgccgcagcccgggcccaggccccggcagcgcctgggacaagttctgtgtccatctcatgtgctgcgtgtgtctgtaaagcctcattccg

SEQ ID NO: 804165 - DNA, 100 bp, Homo sapiens
tggcggctgcctctgcgaatggacggcgtgggaagaggatattttgctcgagtccatggtgtcagtcagcttataaaggcatttctacggaagacagaat

SEQ ID NO: 804166 - DNA, 100 bp, Homo sapiens
gttccatttgatagaacttttgaagaataatggaagattaccaagaccagatggatgcccagatgagaacccacaatacattatatgcaccagaaatgct

SEQ ID NO: 804167 - DNA, 100 bp, Homo sapiens
tggcatctgcgaaagttcctccatgcaggatgggtgccgacttccagaacttgccgtgttgccgcccgctgtgctatgagcagtcagagcgccgtctcca

SEQ ID NO: 804168 - DNA, 100 bp, Homo sapiens
agagctcgccccgaacgggggtcttcctcctccgccgttgacagcgcttggtgttcgatattcctgtctttcacccgctagttgatcccacctcaggtga

SEQ ID NO: 804169 - DNA, 98 bp, Homo sapiens
aagcctgaaaagtcgcagcgagctggagccgccggaggacgattactgagagccaatcagattagtttcaactgggacaggcttgctagctggatcaa

SEQ ID NO: 804170 - DNA, 99 bp, Homo sapiens
gagagcgtgaccgagagcgcgaatatcgtcatcgttagaagattcacagagttcaacagcgtgttacaattaagaaagctttgactctaaaatatggag

SEQ ID NO: 804171 - DNA, 98 bp, Homo sapiens
aagattataattcagtggataaaactaccacaggttctatttcaccaattggcatggaaccaacgacaatgagcagtcagtgtggcgtcattctccaa

SEQ ID NO: 804172 - DNA, 100 bp, Homo sapiens
aaagcttccaatgagtatggcagtgtcagctgtacagccacactaactgtgacagagtggagactgctgcacggactctggaaccatgaacatatttgat

SEQ ID NO: 804173 - DNA, 101 bp, Homo sapiens
gaggacggcgtgatcacggccagcgaggacagccagcagccagcttcgggtgtagcctattctcatccaactacagttgctagctacactgtccatcaggc

SEQ ID NO: 804174 - DNA, 100 bp, Homo sapiens
cttccggcattataccgtgggctcctacgacagctttgatgccccaagcttcggaaccaaaaagaagcttcccagagccggggccaggagccccaagcgc

SEQ ID NO: 804175 - DNA, 100 bp, Homo sapiens
ccaaattcttccctctttatgtttttcaagggacggatacaacgactagagagtaaagacaagattgcatcctacagcaaaactccaaaaattgaacgaa

SEQ ID NO: 804176 - DNA, 98 bp, Homo sapiens
gctgtgcatcgcatcccactccatcgccaggatctccttcgccaaggagccccacgtagagcaggttcagattcagaacaagaaagtggacatctcta

SEQ ID NO: 804177 - DNA, 100 bp, Homo sapiens
gtccggaccggagactttggggcctaactaggtgaatgaaaactttgccattgatttgatagcagagcagcccgtgagcgaggtggagactcgggtgata

SEQ ID NO: 804178 - DNA, 99 bp, Homo sapiens
tttttctctctggactgtgcatagcagtagctgttgtttgggctgtgtttcgaaatgaagacagtttgtacctgttcaagctaggcctggcccctcaga

SEQ ID NO: 804179 - DNA, 98 bp, Homo sapiens
tacacagaagaggagctggtggagtttgtgaaggaacaccaaaggccagctcgctggcacaaagccaagaaggttcagctgacccctggacagacaga

SEQ ID NO: 804180 - DNA, 100 bp, Homo sapiens
gttggagttggaatttgtgcaatgtttagccaacccaaattaccttaattgctgaagagatcactttaacaattggccaagcatttgacctggcatacag

SEQ ID NO: 804181 - DNA, 100 bp, Homo sapiens
catggaattggccagaaaatgcacggaactcattagcgatgtattgctattaaggagtcagcaaaagtgggtgatcaagctcaaaggagggtgatgaaag

SEQ ID NO: 804182 - DNA, 117 bp, Homo sapiens
ctcgcacgcccaggaggagcaagtccgatggagaggctaagcagttgagtccacgctccatgagaatgctgaacaccatccaaagcagcaaattgagattccttgatttggggaaga

SEQ ID NO: 804183 - DNA, 126 bp, Homo sapiens
taggttgcatgcctccgcctgtgtcttctgcagtgattttaaccaaggcagttggtggaaatgaggttcctgggacatcctgtagcaaagattctccatgcttacaaccctagtagggacagcgag

SEQ ID NO: 804184 - DNA, 99 bp, Homo sapiens
tcacagctacgtgctgggcacagtcagcccttcccgccccaaagcaggacctggcctgggccgtcagctactacatccggttcttcatcacctacatcc

SEQ ID NO: 804185 - DNA, 99 bp, Homo sapiens
ggaaatcctggtgaagtgggatttgcaggatctccggctgaagagatcactttaacaattggccaagcatttgacctggcatacaggaaatttctagaa

SEQ ID NO: 804186 - DNA, 98 bp, Homo sapiens
aatggcgactgtcattcacaaccccctgaaagcaattctgcttggtcagaatcgtgatggcattgtgttcagcactgatgactattttcaccatcaag

SEQ ID NO: 804187 - DNA, 100 bp, Homo sapiens
cgtgtgccccgcttctactggaaggaccggctgctgaagatgaagatggctgggctgaacgccatccagacccttggggagcagtactacaaagatgcca

SEQ ID NO: 804188 - DNA, 100 bp, Homo sapiens
gcctagcttatgccacacttgccaaggtgcagtagacattgttgcaatcatgatcggcaatctgaaaggcacaaaaattctgcaatctattcaaagaggc

SEQ ID NO: 804189 - DNA, 100 bp, Homo sapiens
gatcatccctaagcaggagagaagctactaaagaacgtactcaggaaaagtggggatttccaatgtgccactatttaaaggaagagagatggtgctgtgg

SEQ ID NO: 804190 - DNA, 100 bp, Homo sapiens
ctggcccaggcgccgcgcggacccggcagctgtctgcgcacgccgagctccacggtataaatgaccaaggattgtacagagttgtgggggtgagttcaaa

SEQ ID NO: 804191 - DNA, 100 bp, Homo sapiens
ggcacaaacgtgaagatgcagatcgtgcggctaagaacggaagatgggcaacggattgtaggaatgagttggaacatttgcagtataaggtattgcagga

SEQ ID NO: 804192 - DNA, 100 bp, Homo sapiens
ccgaccctggccccaaggtccgatcgcccaggggaggagcagcaccgggaccccgcgtcggctgggcgccccacaaggagtacaagcgcaagctagccag

SEQ ID NO: 804193 - DNA, 100 bp, Homo sapiens
ctcctggtcgatgaagaggatgatgtttttggtgaagggtgtgtgctggtggtgtctgtaatagaacagcttgctcaagttcacaactcgacggtccagg

SEQ ID NO: 804194 - DNA, 98 bp, Homo sapiens
atattttgctaaatacagaaggacatgcaaaacttgcagattttggggtagcaggtcaacttacatacaagccagctgccatgttgtgagcacatacc

SEQ ID NO: 804195 - DNA, 123 bp, Homo sapiens
aaccatgcctggtggatccagacatgatcaaagccatcaaccagggcaactatgggacgagaagctcactgtgacccaggacctccctgtgaatgatggaaaacctcacatcgtccacttcca

SEQ ID NO: 804196 - DNA, 100 bp, Homo sapiens
aaatccttgaaagaagaagatggagaagaaatagttacctatgatcggagagcagagaccatgtctgacatagaagaggtggtggaagagtacgaggagg

SEQ ID NO: 804197 - DNA, 98 bp, Homo sapiens
cggagacctcgctgcgctcatggcgtcgcccggaaagaagattggcccatgcacaagctggaatgttctcccatggttgtttttggggaaaactggaa

SEQ ID NO: 804198 - DNA, 98 bp, Homo sapiens
gcaatctcagggtaaccagaactagagctgctcaaagaaaaactgggcttccgttacaagatgaggtctgtgtatgctcacttccccatcaacgttgt

SEQ ID NO: 804199 - DNA, 98 bp, Homo sapiens
ccccggcgggagctgtcaggttggctccgcgtgtcacaacataatgaaagttgctcaagccaaactggaaatgataaaacctgaagaagtaaacttgg

SEQ ID NO: 804200 - DNA, 100 bp, Homo sapiens
caaagactgtggggttctacctgggaacttggagagacaagttggatggcttgaggactggtactaaaaggaaacgtgactgggaggccattgccagcag

SEQ ID NO: 804201 - DNA, 100 bp, Homo sapiens
gatgaagtttatctgctttgtgacaaggtgcagaaagggacagtttccggatctttcagaagctgtcagagatcttctcagatgagaacaactactcatt

SEQ ID NO: 804202 - DNA, 98 bp, Homo sapiens
gacgcgcagctgcaggctgagaagcagaaggccaggatctggacatctgtcccttacttagcatcctacgtcagtcccgtgttaaaagaaaacaaggc

SEQ ID NO: 804203 - DNA, 98 bp, Homo sapiens
gaaagtgcctgccattcttatcatttctaagcaggttcatgccagcccagaacagagaatcaggacaaggctcatcccaggaggatccatgatgcttt

SEQ ID NO: 804204 - DNA, 98 bp, Homo sapiens
caagccaagctcaacctcaaatcagtactgagggattctggaacttttcaaagcctgactctcttcttgaaacagtggagcatcatacagagtttact

SEQ ID NO: 804205 - DNA, 100 bp, Homo sapiens
cagaaactggtggagagcggggtggatgtgaactcccaaaatgaggtcaacggctgggaaacctcaaatgaattctgaaggggagataccttccctgcca

SEQ ID NO: 804206 - DNA, 98 bp, Homo sapiens
gattccatttttgagtatttcaacactgctcctcttgcacatgacctgacatttagagcagccccttcagggttcctgtgaaggatgttgtggacccc

SEQ ID NO: 804207 - DNA, 100 bp, Homo sapiens
cagggaggatgtcgggacaccccggaagctgggaaatgttgctgatcatctgggctgtgatccacaaacccggttctttgtccctcctaatatcaaacag

SEQ ID NO: 804208 - DNA, 100 bp, Homo sapiens
aagagcacttctgaagactacttaatgatatcttggagtcatttaatacttcatgattagaacaaatatgtgaaagttcccaccaaccagtgagaatttc

SEQ ID NO: 804209 - DNA, 98 bp, Homo sapiens
tggaaccgtgttggtggattttgttcctgaaaatcaccagttccgtgctccattatgtcgtgtgcttccccgatgggcttctttcgccgaaggtacaa

SEQ ID NO: 804210 - DNA, 100 bp, Homo sapiens
cctgaggtgaaccttcgaccttggacttctcagcctccagaatgggaacgtgtgaaagaagaattgtggggaaaaaaaagcaagcataaccaaagatcat

SEQ ID NO: 804211 - DNA, 99 bp, Homo sapiens
tcggattcctcagctacgaggaggcgctgaggagagtgatgggtcgttcccctatgactctgtcccttggcagcagaacaccaaccagcctcccggctc

SEQ ID NO: 804212 - DNA, 100 bp, Homo sapiens
gcctgcccgcccagcccgagcccggcctaggagaccccgagaggagacggtacgaggaacagcaaattcaggaaaaagtggcgacctttcgactcatgtt

SEQ ID NO: 804213 - DNA, 100 bp, Homo sapiens
ctttatttgtgaaatttggcaaagaggtggttgtgtcaaaccgattggtgacatctccatgctgtattgtcacaagcacatatggctggacagcaaacat

SEQ ID NO: 804214 - DNA, 100 bp, Homo sapiens
aattgataacaccctgtaacagctgagtaaaaagaacgtattctcatggtacttacagagctggcccaatgagacaaataagcttggtgggagcagttga

SEQ ID NO: 804215 - DNA, 98 bp, Homo sapiens
agaactgcgcagacctggtggaggtgttaaatgaaacttttcgctgtggcctgcagtttttaggcaacattgcctcacggaatgaagattcccagtct

SEQ ID NO: 804216 - DNA, 100 bp, Homo sapiens
gaaagattgggcaagagaagaattcagaagaaacaaaagtgccaccgaagaggatcaccccttctgtgtcattctctgaggaaaacaagttcttctcaag

SEQ ID NO: 804217 - DNA, 99 bp, Homo sapiens
tagtatattgtggaactctttcataggagacaaacttatgtattttttaagtcacagaattcttggaactagaggctgctatccagccagatactagcc

SEQ ID NO: 804218 - DNA, 100 bp, Homo sapiens
tgaaagacaccaggttgacagcactggaaactgaagtaccagttgtcgctagaacagacctttccaaagtgaaactgatgagatttgatgatccactgtt

SEQ ID NO: 804219 - DNA, 98 bp, Homo sapiens
acaagaaagggactgacctggacttagtggagcaactcaacatttatgagtcgggaacatgccctgtgtgccgccgtcatttcccacctgcggttatt

SEQ ID NO: 804220 - DNA, 100 bp, Homo sapiens
atggcctggactggcacccagacagcgagcacattcttgctacctccagtcaagacaattctgtgaagccacccacacagaatatgcctatgggtcctgg

SEQ ID NO: 804221 - DNA, 100 bp, Homo sapiens
tcaagagtggaagttttcacagtacctggagtagaacagaaaaattattatgtctgtgttcccttgggactcattggaaattgtacagtgacatcttctg

SEQ ID NO: 804222 - DNA, 100 bp, Homo sapiens
ctgaagaggagcgccagatggtggaggaatacacttatttatgaaattctggacaatcaggaagtccaagccacaatgatcctgccaagaatcctccagg

SEQ ID NO: 804223 - DNA, 100 bp, Homo sapiens
aaattaagtgaggaattgagtggtggtagattgaagaggactgctgtccaggtctgttttgcaagcacagagtgcttctccaatcttcacccatgtttat

SEQ ID NO: 804224 - DNA, 100 bp, Homo sapiens
tgagcatgctggcctgcttcctcgtctaccactctgtgccagctccacagcacctgccacctataggactagaagaggaggctgcggaggaggaggagga

SEQ ID NO: 804225 - DNA, 99 bp, Homo sapiens
aatgctgtttatagtgaactgagtgtttcatcagagaagatatgaaatataaagatgctactaataaacacagccatctgcacagagaagataaacata

SEQ ID NO: 804226 - DNA, 100 bp, Homo sapiens
attggtattcagttaccgcctccgtagttacaaggattgtggagaatattgaaattctgccatgtaaatgtcagcttgagtggactccagctgagaagaa

SEQ ID NO: 804227 - DNA, 100 bp, Homo sapiens
cctccagcgagaagttgagggagaaaggcgggcccgggaacagtgtctcctttcctcttgggccgggcactttgggctgccagtcggttcactgttgcta

SEQ ID NO: 804228 - DNA, 98 bp, Homo sapiens
agcccacggtcatagacagcaccatacaatcaggctactttgacgcacacgctcttgccatggacttcatgagcataggattccgagagtgcctaaca

SEQ ID NO: 804229 - DNA, 99 bp, Homo sapiens
ggctgactgcaaaggagacccaaggaacagtgccaagttagatgccgattacccacttcgagtcctttattgtggagaagtgtatgctgacttgtaaag

SEQ ID NO: 804230 - DNA, 100 bp, Homo sapiens
aagatattagcctaacaagatggaagcaggtttaaaattttacataagaagttacctttttcagtcgtgtctgttcaaaccggcacggtctgatccggaa

SEQ ID NO: 804231 - DNA, 99 bp, Homo sapiens
gccaacagagcctgatgagcatgcaagtctggaaaagtttgaaattccagtaaaaattcgtttgagtcctgaaccgtggacccctgaaactggtctggt

SEQ ID NO: 804232 - DNA, 98 bp, Homo sapiens
acctgagtcaggacgtaaatggaaccctgcttccttggaaatcattgactagcatcattgaatattattacatgtggaaaactactgacagatatgtg

SEQ ID NO: 804233 - DNA, 98 bp, Homo sapiens
aaatcccggttttggctgcttaaactgctgggttctgagcaaggttcaaccagtcaagaacaggccttatctgctcagcaagctgctgttattaacct

SEQ ID NO: 804234 - DNA, 50 bp, Homo sapiens
ggaaacccacaggcacacccaagagaccaagacacattccaccccagtgg

SEQ ID NO: 804235 - DNA, 100 bp, Homo sapiens
tttggatttgccacagaatttcaagatatttgtgagcgagtagcacagaagagggaggatgctgtttccaaagaagtgactcgaaaactttctgaagctg

SEQ ID NO: 804236 - DNA, 100 bp, Homo sapiens
ggaagcaaaatgtccctaaaattgccaaggaactgggatttcaacctgaaagtggaggctgcgaaaataggaaggaaaatcacctcggcagtgtttgaag

SEQ ID NO: 804237 - DNA, 98 bp, Homo sapiens
ggcaccctggccaggaagcggagggcgcgcgaggggtaaccaggagccgacaacaactcctgacgcaatggttcagccttttactaccatcccatttc

SEQ ID NO: 804238 - DNA, 100 bp, Homo sapiens
agtccctctctgtccgggcgctgcaggagatgctggctaacaccgtggagaaatcagaagggttcccaagaacatactcacagcgattgatccagccatt

SEQ ID NO: 804239 - DNA, 100 bp, Homo sapiens
tggacccctcccaggagggacccacagggctgaaggaagctgccttgtacccacatctcccgccagagcactacaaacaccactggtttcccgaaaagcc

SEQ ID NO: 804240 - DNA, 98 bp, Homo sapiens
tcaaggaaatgactattcctccaaataaaatagaattcggtcaacagtggatgaaaaagaacaaaaacaacttcttatggatttggatgtagtaatgc

SEQ ID NO: 804241 - DNA, 100 bp, Homo sapiens
cgggatcgtgaccgagaccgtgaccgagagcgtgaccgagagcgcgaatatcgtcatcgttagaaggagtaatggagtccaaagagaaacgagcagtaaa

SEQ ID NO: 804242 - DNA, 51 bp, Homo sapiens
ttagagtgaatgtagttgcaccagcctgcagcacaaaactgtgatcttcat

SEQ ID NO: 804243 - DNA, 98 bp, Homo sapiens
tacatagaaatgtacaccctcgagagcggcctgattgggaagaaactcttagcgcaatggtgggttgcctatgaaaaagaacattttaaaggccagca

SEQ ID NO: 804244 - DNA, 100 bp, Homo sapiens
gccccagcctggcgggagaaggaggaggagcagcaggcctccgggcccggcgccgccgcccgcagataaataggatttaccaatccttggatgaagtgct

SEQ ID NO: 804245 - DNA, 100 bp, Homo sapiens
ttggaacatgctttcttcaagatggaacaaagactgttgagtatgctccatgtagatcacgtggttaaataaacttggatcggctgtaatccatcaggaa

SEQ ID NO: 804246 - DNA, 98 bp, Homo sapiens
tgcttcaggacatggggcagcgtcttaacgtccaaaagttttggaaggtctccatcaagaaaacaaaattattcatcaaaaaatgaaaactgtgtgga

SEQ ID NO: 804247 - DNA, 100 bp, Homo sapiens
agcagttggagtgaagattggcaatccagtgccctataatgaagagaagttgatgacgcctgagatgttttcagaaatcctctgtgacgatctggatttg

SEQ ID NO: 804248 - DNA, 100 bp, Homo sapiens
agagggcatggtgaagctgctggatgaattgtcccccaacacaggcctcatgcattgtgcgtcagcagcaatgtttatggtgaaaaatggcaacgggacc

SEQ ID NO: 804249 - DNA, 98 bp, Homo sapiens
ctggccagtgtccagagggggatcgctgaggagcagatggagaatgagccccagttcagtgccatcatgcagtctgatgatttgaagaagagaagaga

SEQ ID NO: 804250 - DNA, 100 bp, Homo sapiens
aagatggtggataagcccacccaggtcagaatgaaggaacgatttccgtagttgaaggagaaacattgtatgtcatagaggaagacaaaggcgatggctg

SEQ ID NO: 804251 - DNA, 140 bp, Homo sapiens
gagattgaaccttgggaagatgctgattaccttgtttacaaagtcacagatagatttggctttttacatggctgcttcaacccccaactccactgctggtgcagccatgaactccttgacctctctcgggactctgcaag

SEQ ID NO: 804252 - DNA, 98 bp, Homo sapiens
aaccccaatctcagtggacaaggtactggtcttcttggacattaatctttgaatacttgctgactgctaagaaatgaccagaggggaagaggagtttg

SEQ ID NO: 804253 - DNA, 98 bp, Homo sapiens
ggatgtactggaattaaaaggatttaagagatcatggtgtgcatgttctaggacttacagattccagtctgctgttagatgattattcatccaagttg

SEQ ID NO: 804254 - DNA, 100 bp, Homo sapiens
cttgcaacccattcttaaccagttcacgcctgctaacattagtcgacaggtgcttgggtaaatcatggtcggggaatggtcaaggaacataacaatcatt

SEQ ID NO: 804255 - DNA, 100 bp, Homo sapiens
gtttactctatgagattcagaacagagatgaacaggctttcccagccctttccgttttttgtgacatcgtaaacatgagccccacacagtgggacttccc

SEQ ID NO: 804256 - DNA, 108 bp, Homo sapiens
gcccagcaaggctgaccgcactgaggtagttcaaaccttatggcgtaagacaggtcatttcctgaccttgaagctgatgatgttaagggcagtgtaccactgtcttca

SEQ ID NO: 804257 - DNA, 98 bp, Homo sapiens
ggcaccgtcactctcaaggatctccgtgtagaactccttggagaggtcctcgaggccacacgggttaatcgaagaaagagcgcactggctttgcgctg

SEQ ID NO: 804258 - DNA, 98 bp, Homo sapiens
tggacagttaaaagcagagctctgaaccaatcagagtccttgtgactggagcagctggtcaaattgcatattcactgctgtacagtattggaaatgga

SEQ ID NO: 804259 - DNA, 98 bp, Homo sapiens
ctgtaaaagtgccttctgtttttaagcttctaattaaagagattcttggcaccagccctccctgttccgccatgattctgtggactctggtgtctcta

SEQ ID NO: 804260 - DNA, 99 bp, Homo sapiens
tcgctcctcgatcgaggacgacttcaactatggcagcagcgtggcctccgccaccgtgcacatccgaatggatataattggtgattacaactttcctct

SEQ ID NO: 804261 - DNA, 100 bp, Homo sapiens
ctcgctgtgagacatgtctgagactcctgctcagtgtagcattaaggttagcgtccccaaaatgaaacataagccaaccaggcaacagaagaaagtagca

SEQ ID NO: 804262 - DNA, 98 bp, Homo sapiens
ccgtgtcaccgccctgcgcttcaacagctccagcctgcagtgccagaattcctcgattgacaagtatctctatgccatgcggctctccgatgaaactc

SEQ ID NO: 804263 - DNA, 98 bp, Homo sapiens
catttcactctggaagatatgctctatgctgcttcatccataaagaaaggcctaaagaatgtatttgacgaagcaatattggctgccctggagcctcc

SEQ ID NO: 804264 - DNA, 100 bp, Homo sapiens
acagagtctgtggaagaggtggttcgagaataactgaagtgaagtgatggactccgatttggagagtagtaagacgtgaaaggaatacacttgtgtttaa

SEQ ID NO: 804265 - DNA, 100 bp, Homo sapiens
ctcccgcgtgctgtctggcgcttctcagaagccgttgttcccatgactttgccgactaaagttctaagtgcccaccgtaaatcactgaatcttgttgatt

SEQ ID NO: 804266 - DNA, 100 bp, Homo sapiens
gaagatgagatcaaatattaaacctgctaagaaaaagttggtgattcaaggaaagcacattgcaatgcattatagcaatcccagacctaagtttgaagat

SEQ ID NO: 804267 - DNA, 100 bp, Homo sapiens
caagaagccgcggaattccaaaccctcacctgtagacagaatgtgtctttaccatatggaacaattttgaacttctaagatcaagcctttttgttgctga

SEQ ID NO: 804268 - DNA, 100 bp, Homo sapiens
tctacctggatgaaaactacaaatcccaggagcacttcacgcctacagacctggtacctggatttttgcccgagatgattcctaccaccttactactgac

SEQ ID NO: 804269 - DNA, 100 bp, Homo sapiens
ggcctctccatcggccccgacttccagaagggcctgaaggatggaactatcttatgcacctatcttccagagggccacactgggcatggacacccttttc

SEQ ID NO: 804270 - DNA, 100 bp, Homo sapiens
ttggagactacaatatggatggctatccagacgctctggtcatactaaagaacacatctggaagtccacctaaacccactgtgttcatctctggggtcat

SEQ ID NO: 804271 - DNA, 98 bp, Homo sapiens
gtgaaagctttctgcccagagctcctggaccaatgcatcttcccaccaccttaaaccactgaattaacactgaatcctccggaaggaattgtagcagg

SEQ ID NO: 804272 - DNA, 103 bp, Homo sapiens
tcttggcaagagagctctgcatcaatgcgccggccataggtttggtgcacctcgatttggaggaagtagggcagggcccttatctggaaagaagtttggaaac

SEQ ID NO: 804273 - DNA, 99 bp, Homo sapiens
catacacctgaagctttatcaaaacatttcattccctataatgcaaagacaaagaaacagccttggtataatagcacgttagcatcaagacgaaaacga

SEQ ID NO: 804274 - DNA, 99 bp, Homo sapiens
tcagtcacagcattgaggaaggactgaagatacaggccatgaacaggaacttggatttttccaaaggtcaccagggtattacaggggacaaagaaggcc

SEQ ID NO: 804275 - DNA, 100 bp, Homo sapiens
ccgagccgggcccacctccccaccaaggaagctattactataacaagcgcattctgcacaagaccaaggggaaacggttcacctacaagttcaatttcaa

SEQ ID NO: 804276 - DNA, 100 bp, Homo sapiens
ggacccggttgccatggtgaaggaaaaaggctgttgccaaaatggttcaacagtgctgtacttatgttgaggaaatcacagaccttcctatcaaacttcg

SEQ ID NO: 804277 - DNA, 100 bp, Homo sapiens
cagctcagaaaggaacatactctcaaaatatttacttatatcaattcctggacacagagcctctaaagagagcaatcactacacttatggctgggatttt

SEQ ID NO: 804278 - DNA, 100 bp, Homo sapiens
ctaagagactatattcccctgaacagcattctatcatggaaggaggagatgaagggcaagggccaaaatgatggtaatttatgctgccagggatgcccag

SEQ ID NO: 804279 - DNA, 100 bp, Homo sapiens
tttcgggaatgctgagaaaacagacagatttgtcatgaagaaactcaatgatcgtgtcatgagactgccactgcagagccccgccatggaagacacgccg

SEQ ID NO: 804280 - DNA, 100 bp, Homo sapiens
ggctgggtagagatcaacagcagttcaaggtggaaaaggattattcatacctgaaggagatatgtgatcaccaagccgaacagctgagcagaaccagcct

SEQ ID NO: 804281 - DNA, 100 bp, Homo sapiens
gagcggatcagacacctagatgacatggtgcattgccagcagaagaaagtcaagcagatggtcgaggaggtctctaattaacagaagatggcaaagccca

SEQ ID NO: 804282 - DNA, 100 bp, Homo sapiens
agttctacgctgtgaattgacgccgctgaaatacaatacagagcgcattcatgttcttagtgggcaccacactgtaactcgaggcatcaccaaaggcgtg

SEQ ID NO: 804283 - DNA, 100 bp, Homo sapiens
aacacctggacaccttgttagatggaacctacaagcaggctcaaactgctttttctgcaaaccctgccaatccagcaattttgtcagaagcttctgctcc

SEQ ID NO: 804284 - DNA, 100 bp, Homo sapiens
aacaagtaatcttatatggtgtgattctgctgttcagcaggagaaaatttcagagctgcaaaattatcagaaccctcggcctcaggaaagtcggacagta

SEQ ID NO: 804285 - DNA, 100 bp, Homo sapiens
accgcccgggggccatgcacgcggatcgagtttgataacgatgcatcaccaaatgccccaaaacttggacccatggagctggccatcattattactgtgc

SEQ ID NO: 804286 - DNA, 99 bp, Homo sapiens
gggaggtgtatctgagggagactgcaaatgctattgtcagtcagcaaactccacaaaggtccaggtcaagacctcgtctccgttctcatagtcgtagca

SEQ ID NO: 804287 - DNA, 98 bp, Homo sapiens
tttctacatattaggatataaccctgagacaaggagtttcataatagaagagcagagtttcttactatgtgaagatcttctctatggaagaatgtcat

SEQ ID NO: 804288 - DNA, 100 bp, Homo sapiens
gatggtgttgtgagagatttctgcagtgaagattgctgtaaaaaatttcaggattggtactacaaggtcacactgcagaacagagtgatattgcaaaaag

SEQ ID NO: 804289 - DNA, 98 bp, Homo sapiens
tgtgaggcctccccagccacgtggaactgccatcgaagacggcaatttggaggaaatggaagaggaagtacggcttaagaagcgaaaaagacgaagaa

SEQ ID NO: 804290 - DNA, 100 bp, Homo sapiens
aagtagatcctgacactaaggaaatgctgaagcttttgattgagatagagagaagcctgtattcagaccacgagcttcgtgctctggatgaaaaccagcg

SEQ ID NO: 804291 - DNA, 100 bp, Homo sapiens
agggctcccagacctcaagctcctccaggacctgaaggagaagaaggagaaggtggaggagaaggcaagccggaaagagcgaaagaaagaagtggtggag

SEQ ID NO: 804292 - DNA, 100 bp, Homo sapiens
aaattgagaagaactcataaacttggcttcctcgcttctgctcctcaggccccttcacagatgtagtcactacaaatcttaaattgcgaaatccatcgga

SEQ ID NO: 804293 - DNA, 100 bp, Homo sapiens
ggggattcagcagctgctgcaggccgagaagcgggcagccgagaaggtgtccgaggcccgcaaaaatcagcttgaacgggtctttttacgacttggccat

SEQ ID NO: 804294 - DNA, 99 bp, Homo sapiens
taagaacaaggaatccttacttgagctagaaagacttgagttagacaagcagcagcacacgcctccctacctcatggcgacagaaaatggagcagttga

SEQ ID NO: 804295 - DNA, 100 bp, Homo sapiens
gatgttgtgattgagtttatattcaaccagctggaagtgaagtacataccgagcatcaaatattaaggcacccggagaacagacagtaccagccttgaac

SEQ ID NO: 804296 - DNA, 138 bp, Homo sapiens
aaaaaggattttttatcagcgcctcaatctctactcgaagaagaaagagaagaaacgttttctcaggccctagaaagtgaatttgtttcttgccaacttcatcagtggatcgaccttatatttggctataagcagcga

SEQ ID NO: 804297 - DNA, 99 bp, Homo sapiens
gaggaacgcgctaaggcaaagcacctggcagaaacggaattacagagagctgcaatggatgctagccgaacaagtcgtcatctggaggaaactattaac

SEQ ID NO: 804298 - DNA, 100 bp, Homo sapiens
tccgttgcttcccgtccgtgtcgcggccctgcggttggcggcctcctcgtggagcggagcaaggcaataagagctaactgccatcaagagccatcagtat

SEQ ID NO: 804299 - DNA, 99 bp, Homo sapiens
atcccttccgaggcccgacttcggtgccatggataacagaggctttcagcaggggagttttagtagcttccagaacagctccagtgatgaagacctgat

SEQ ID NO: 804300 - DNA, 98 bp, Homo sapiens
tgaggtggtgctgacaatcgagcaaggaaacctgggctggctacagcaaacatcattcaagatgtccagcaaagggagcagcacagatggcagaacag

SEQ ID NO: 804301 - DNA, 100 bp, Homo sapiens
agcaggaaggacaaaactattcaacatgtggaagtattttgttatgccaggtggaaaaatgctaatcactgaaagaaaacattttcggtcaggaagaatt

SEQ ID NO: 804302 - DNA, 100 bp, Homo sapiens
ttcttgagggctccccagccatgcttcctgtacagcctgcaaaactttacagaatgtctgaaggggacagtgtgggagaatccgtccatgggaaaccttc

SEQ ID NO: 804303 - DNA, 98 bp, Homo sapiens
ggaatcacttttgagattggtgctcgtttggaggcactggactacttacaaaaatgaatgacagcccatatcaaggcggtgtattctttttgacaatt

SEQ ID NO: 804304 - DNA, 99 bp, Homo sapiens
ttataatgatccacttccacttgatgaatagtgccccctgataagtgccgatgtgccgtgggcagcatcctgagtgaaggtgaggaatcgccctcccct

SEQ ID NO: 804305 - DNA, 100 bp, Homo sapiens
ggcttttgctgatatgcatgcatgtaccgaccttctgaacaaggccaacacctatgcagattttcctggaaacatgaactgccaagagaggaatgggaca

SEQ ID NO: 804306 - DNA, 100 bp, Homo sapiens
aggtgtttacccccctattcaagttcatgtcacgctgggtaatgaggatttgactgtgaaggtggaaccgtcccaaaatgtcccttgctcagaagaagga

SEQ ID NO: 804307 - DNA, 98 bp, Homo sapiens
gggtctaggcaggggaaattggggtgccaccagacggagacagcttggactaccagagacagggtctcattctgttcctcaggctggagttcagtggc

SEQ ID NO: 804308 - DNA, 100 bp, Homo sapiens
gttatacaagccttgtttatggccacagaagctctgagctcttcaccctgacctatggtgccctggtcacccagctatgtaaggactatgaaaatgatga

SEQ ID NO: 804309 - DNA, 99 bp, Homo sapiens
ctgtccctgtgttaaagtggctgtttcggatgtgtcttgctgaatcagggctctcttatccctgccatcgacttacagtgggaagaagatcttcacctg

SEQ ID NO: 804310 - DNA, 99 bp, Homo sapiens
tacaatctgctaaaactgtatagacacattcagctaacgtattttagcaggtggagtgaggttgaagattcctgtgacagcgatgccatagagagaatg

SEQ ID NO: 804311 - DNA, 98 bp, Homo sapiens
tcatgagttaagaaacatatttctacagggaggaagagatagtcgctctggatcacccatggctagacgctgaaaacccacctggttccggaatcctg

SEQ ID NO: 804312 - DNA, 100 bp, Homo sapiens
agcacctgcggagggagcgctgagtctcactgtcgcccaggctgcagtgcagtggtgccatcacgcgtcactgcaacctctgcctcccggattcaagcaa

SEQ ID NO: 804313 - DNA, 100 bp, Homo sapiens
ggcagtttcaggcaaagaagttgggaatgcccttctaaatgttgtcctaaaaagaaaccgaaacttcattgccccttcaatgtgggaatccagccagacc

SEQ ID NO: 804314 - DNA, 98 bp, Homo sapiens
cccgtgcctgtgaacctcggcggtgcgtccctgggactctgctccgtgagcatcgagagtaaacatgaggttacgatcctgggaggacttaatgaatt

SEQ ID NO: 804315 - DNA, 98 bp, Homo sapiens
gaagagcccccaggagaaaagccagtattgcttgtgctcctaacaacctgtctcttggcaagagtttgtcgatgcttatgtggattacatattcaata

SEQ ID NO: 804316 - DNA, 98 bp, Homo sapiens
cagagcagcacaaggaagctgccttcttcaaagagctgagcctgatccagggatgtctggatggccggatggcagaatggagacctccacccccacca

SEQ ID NO: 804317 - DNA, 99 bp, Homo sapiens
ggccgtcttcgggttcgtcctcttcttggtgctgtggctgatgcatttcatggctatcatctacacgatggacaaccggaaattttctacacattttgg

SEQ ID NO: 804318 - DNA, 100 bp, Homo sapiens
cttcatgaggaagatgctcgccgccgtctcccgcgtgctgtctggcgcttctcagaagccgtgaacacctacctcttcatgatgcaagcccaaggcattc

SEQ ID NO: 804319 - DNA, 100 bp, Homo sapiens
gtcatcgttctcaaactcctcctccaacaagcccagcggtctgctcaagaacttcctcatattgagaagtacagtatcaacagttgttctgtaaatggag

SEQ ID NO: 804320 - DNA, 106 bp, Homo sapiens
agatgttgtcaaggtggcctaccaggaggccaggggtgtcgccatggtcttacttatccgagcccagacattgtataagaagtttgtgaagtcaactggctttctg

SEQ ID NO: 804321 - DNA, 98 bp, Homo sapiens
gcaagtcatctggtgaccttgttgatctgtttgatggcaccagccagtcaacagggaaagctttaggcaaatccacagtggtacctgtaccatatgag

SEQ ID NO: 804322 - DNA, 100 bp, Homo sapiens
caaaggcagtctgttgaggcatctggacaccacacacatcatcagtctggggtctctctttttggcatgtcggccctgttactccctgggaactttgagt

SEQ ID NO: 804323 - DNA, 100 bp, Homo sapiens
tagagtttgatcttaagcaaacgcttaccaggctcatggcacatctttttggagatgctatatgttctcctttcagccaagacctttcaccagtgcaggg

SEQ ID NO: 804324 - DNA, 99 bp, Homo sapiens
atggtcctcaagaagttcctaaaagggacttgccatgaggtgttgaagccttgtttcactgagttggagagactggacctaaatggcgcagcatgactt

SEQ ID NO: 804325 - DNA, 99 bp, Homo sapiens
tcagaaacttgaaagagagaataaccgttgtaacatcagtcacagcataaacagatgattatgctgagattatagatgaagaagatacttacaccatgc

SEQ ID NO: 804326 - DNA, 98 bp, Homo sapiens
cgtaagagcaatcagatacctactgaggtcaggagcaaagctgaggagtttgaacgccatgaccctgtggatgggagaattactgagaggcagtttgg

SEQ ID NO: 804327 - DNA, 98 bp, Homo sapiens
gtacctgaagctgcaggatacctgccgtactcagctgattgggcagaaagtggcccatgctctggcagagggactcggagtaatcgcctgcattgggg

SEQ ID NO: 804328 - DNA, 100 bp, Homo sapiens
agagcctctcatgacctatgagttacatggagatttcattgttccagccagagtctactatgcaactgcatactggatgcctgctgaaaagacagtacaa

SEQ ID NO: 804329 - DNA, 100 bp, Homo sapiens
aggtacaggctcagtctgcggccaagactccgtcctgcaagccacatgaaatgaagatcacctctgcctatctacaggacattgagaatgcctataagaa

SEQ ID NO: 804330 - DNA, 99 bp, Homo sapiens
aaatatccggattgagccccccaagaaggtgccctctgctgacaagagcagcagccgctcttctaaaacattcaaaccaaagaagaatatccctgaagg

SEQ ID NO: 804331 - DNA, 98 bp, Homo sapiens
gcgtgacatacctggaggactattcggcagagtacatcattcagcaaggtggctgggtttctggctaccctggttcacatggaatcacagccatggct

SEQ ID NO: 804332 - DNA, 135 bp, Homo sapiens
tcgtgatgagttcccaatgattttaattggtaataaagcagatctggatcatcaaagacagctttcagcttatgtggagaagtcgctgtgaagccacctataaatccatttactgaatttatggagaaggctgta

SEQ ID NO: 804333 - DNA, 99 bp, Homo sapiens
actcccatcatcaaagccttgaacatatttgtggaaagacgaatatcagctctgcctgttgtggatgagtcaggaatggaagttggatacactttgtga

SEQ ID NO: 804334 - DNA, 75 bp, Homo sapiens
gtctcaagcactgtttgcaaaggttgcagcaaccaaaagccagaaatacaggtatcaggatgaagatacacctcc

SEQ ID NO: 804335 - DNA, 100 bp, Homo sapiens
cccagaatgttcatctttagagcaagaggagcttcaagcattgcagatagagcaaggagcatttgatgaatacagaaatatcagccaaaaggacattgtg

SEQ ID NO: 804336 - DNA, 100 bp, Homo sapiens
aacaccctgagtgcggatttctgctatgatgacagctgttcgggggtcttgtctggattttggttgcctcctccaatgttcctctacctctactacaagg

SEQ ID NO: 804337 - DNA, 100 bp, Homo sapiens
ctgcaatgaagagaacccagggaagttcctttttgaagtagttccaggttaaagtattgcacaatcagctggtccttttccacaatgccattgccgctta

SEQ ID NO: 804338 - DNA, 100 bp, Homo sapiens
tgccctctgtcagatggactttgccgtcctgggcctcggggactcctcatacgccaacagtcccagctatctgacttcatgtgaaagatggctaatgcag

SEQ ID NO: 804339 - DNA, 100 bp, Homo sapiens
atacatgagacagcagccaaacccccaggtcttccgaccccgaactccaccggaggcaattgcactgtgtagccgtctgctggagtatacaccaactgcc

SEQ ID NO: 804340 - DNA, 98 bp, Homo sapiens
gctcgaattccagaatgatgaaattgtcgggtcacagaaagtcgagagagccaaatgacgattgaggagaggaagcagctcatcactgtgagagagga

SEQ ID NO: 804341 - DNA, 98 bp, Homo sapiens
atggttttcttccttatcaaccccaccaaaactttctactataaatcccggttttggctgcttaaactgctgggtctaaaattcccaggactccacag

SEQ ID NO: 804342 - DNA, 100 bp, Homo sapiens
cccgcattacccagggatcgggcccgtggatgaatccggaatccccacagcaattagaacgactgctctggcccatttagagtctcttgcagtggatgtt

SEQ ID NO: 804343 - DNA, 100 bp, Homo sapiens
atggtaaaaagcagtgggatttggatgtgggatccggttccttggtgtcatccagccttagcaaaccagagagagcaagcgagacattctgttcctcttt

SEQ ID NO: 804344 - DNA, 98 bp, Homo sapiens
ttagcgtgagtgatcactctcaatcccgggacacattcagctaacgtattttagcaggtggagtgaggttgaagattcctgtgacagcgatgccatag

SEQ ID NO: 804345 - DNA, 100 bp, Homo sapiens
gaggaggggaatttccttgtgcctccattcccgggaggggggagcggcgttggaggccaccgtttccagatttggacacctcccacactgagtccccaac

SEQ ID NO: 804346 - DNA, 100 bp, Homo sapiens
cggatttccagccagagctgagcggcgcgggctccagactcgccgtggtcaagttcaccatgagaggaatctccctggaaaaggagacatgaatgtctgc

SEQ ID NO: 804347 - DNA, 100 bp, Homo sapiens
ttccagccaatgaagctgtttgctatatgcctgaatcaaaccaatggagatcttcgtggatgatgagacgaagttgacgctgcatgggttgcagcagtac

SEQ ID NO: 804348 - DNA, 100 bp, Homo sapiens
acttttcaacagccttctcaattttctttctcagaaagcagaggctcagagcttggagacagacggtactaggttttgacaagcttgcatcatgcgtgag

SEQ ID NO: 804349 - DNA, 98 bp, Homo sapiens
ttaaatgaagtctgtgtcaaggatgagaaacatgctcgacgaggcttgggaacaatgggccgaggcattgtcatttcttttgcaagggccaggattcc

SEQ ID NO: 804350 - DNA, 100 bp, Homo sapiens
atacgccgctctgaatcttgccgccctgcactgccgcttcggtcactacaaaacagagcgtgacactcccaatcatctgcatgctggaaatgaggaaatg

SEQ ID NO: 804351 - DNA, 98 bp, Homo sapiens
agaaaaatgcacaacagagggacaacaaaagcctcctacaagagtcctaccaaaagagaagtacgtggaggaacttgcagcagtgaggcaaaccctcc

SEQ ID NO: 804352 - DNA, 100 bp, Homo sapiens
agtgactccaggatttctgaagactattgtggaagaagcatccattaagtgcacgatctgattttctggagagatgtgaagaagactgggtttgtctttg

SEQ ID NO: 804353 - DNA, 98 bp, Homo sapiens
cgaccgagggaatgatccttactaaccacgaccatcaaatccgtgtcggagtccttacaggacttccttcgctgggcatctggctgggattcttgttg

SEQ ID NO: 804354 - DNA, 99 bp, Homo sapiens
ctggcaccatagagatgctgcatccttggaataatgaaggagcaccacctgaagacaagaaggcagacggtaacaagtactccttgctggattgaactt

SEQ ID NO: 804355 - DNA, 98 bp, Homo sapiens
aatatctgtgggcagaaaaatacaaagttggaagcaataccaaacagtggcatggaccacacccagcggaagagcagctgcattggcatggaagaatc

SEQ ID NO: 804356 - DNA, 100 bp, Homo sapiens
tgtgtgaggaagaagaggcagcctcagcacctgcagttgaagaccaggtacctgaagctgtcatatggccttgaacccacagtgaattgaagagagaaag

SEQ ID NO: 804357 - DNA, 98 bp, Homo sapiens
agtcctggatttgaagtaaacagatgagaattctagtgggaagccgtgtccgccttttaagattgtgattctggatgaagcagattctatgacctcag

SEQ ID NO: 804358 - DNA, 98 bp, Homo sapiens
atgattcagtccttgaaaacaagggggcaatggcggcttcctgtgttctactgcacactgggcagaagatgcctctgattggtctgggtacctggaag

SEQ ID NO: 804359 - DNA, 100 bp, Homo sapiens
agacagtcaagccagcacttcgggaccagcttcactctttttggagctccaaggtgatcgtgcagtccggccgccaccccacagtgctgcagaagctctg

SEQ ID NO: 804360 - DNA, 99 bp, Homo sapiens
gtgtgattagcttcgcagtctggaaagctttaggagttcacagtttcatgtgggtgtatgatgaagatgtaggaatgaattgcagggaggttacctttg

SEQ ID NO: 804361 - DNA, 100 bp, Homo sapiens
tcatttctcccagagattttgtggacttggtgctagtcaagagatatgaggatgggaccatcagttccaacgccctttctaaggcacaaaatgatgtgat

SEQ ID NO: 804362 - DNA, 100 bp, Homo sapiens
atggagtgcagctttgtagttttgcgtgtgttgaaagtacaattctattgcacatcaatgatatcatcccagggatgcttgaagatggaaagaaatttga

SEQ ID NO: 804363 - DNA, 99 bp, Homo sapiens
ccagtgaaaaccaccaaaacaatccagctgttccctcagcatgcagcagattggaataaatatgatgaccgattgatgaaagcagcagaaaggggggat

SEQ ID NO: 804364 - DNA, 51 bp, Homo sapiens
gcctgaacggagtgtgcgacggattgggagaactcccccactggaaaggat

SEQ ID NO: 804365 - DNA, 100 bp, Homo sapiens
aatgaactggcatgcagcaagagtgtggtcaggagttcatgatcaagtgttgcccacaccaaatgcttcatccagagtcatagtacatgtggatctggat

SEQ ID NO: 804366 - DNA, 100 bp, Homo sapiens
gatggaaaacatatccattaaatgggataaaagcttcgatgatgaagaatcagtggatggaaataggccatcatcagctgcatcagccttcaaggttcct

SEQ ID NO: 804367 - DNA, 98 bp, Homo sapiens
caacagagcagcagctacgggcagcagagtggagttctacttcctttcccagtacgtgtcgccagccgactccccgttccgccacatcttcatgggcc

SEQ ID NO: 804368 - DNA, 98 bp, Homo sapiens
agaaatcaaattgaagagagcagttgaagaagtgaagaaattattggtacctgcagtagtcaatgctattattgaatcgggtaagactttgtcaaggg

SEQ ID NO: 804369 - DNA, 100 bp, Homo sapiens
tgaaggtgtagactcagcctcactctgtacaatgatgatcaggagaaacagtccaagaagaaacctcgcctcttctgtgacatttgtgactgctttgatc

SEQ ID NO: 804370 - DNA, 100 bp, Homo sapiens
tgctagtcagagtaaccacagctgtacatccatgccatcttctccagccaccccagccagtggaaccaagtgagggccccaaggctgttgcagctcctcg

SEQ ID NO: 804371 - DNA, 98 bp, Homo sapiens
gagggggagactgtgccgtggagggcctcgccatgtcctgctgcccggctcatgctgaagattcggttatggaccatcatttccggaagccagcaaat

SEQ ID NO: 804372 - DNA, 100 bp, Homo sapiens
agattcgcagtggtcgcttcttctccttggatccttactttagaatgacaagggacgtcgcccccaggatcggctatcctaaaccagccctgctgcactc

SEQ ID NO: 804373 - DNA, 113 bp, Homo sapiens
aaggtcttgctcccagcagcctccgcggtggatacgtcgccatcttggatccgcgggacaagaaaattcatgcgctctggagactggaaggtccaagatcaagatactacaga

SEQ ID NO: 804374 - DNA, 99 bp, Homo sapiens
gcacaaccacagcaagagcacctggctgatcctgcaccacaaggtgtacgatttgaccaaatttctggaagagttaaacagagtttcgacctggaggag

SEQ ID NO: 804375 - DNA, 98 bp, Homo sapiens
cggggtcactccgtcgccgttctcctcttgtctacgtgctggacccgaaacatgagttctgctggcgctgatgggagaaaagcgatgagaagatgtga

SEQ ID NO: 804376 - DNA, 98 bp, Homo sapiens
ttttcctaaaagactgaaatgggggcgaccattcttagtcttcccttggaccagacgcttcctcgccagggtcctggccaatccctgtccttcccaga

SEQ ID NO: 804377 - DNA, 51 bp, Homo sapiens
tcacagagttagagagagggatggtggatcaaaatacttgctggatggtgg

SEQ ID NO: 804378 - DNA, 98 bp, Homo sapiens
gagtcctgagcggccaggacgacgaggagcagggcctgactgcgcagatctcccttgagtttagaaatctggctgagaaataccaaacagtgattgcc

SEQ ID NO: 804379 - DNA, 98 bp, Homo sapiens
gggagtgaaaataaccagccacagatttggattcaagatgtgaaataatcagcgatgggaaaatgcagctttataggaaacactcatgtgttactctc

SEQ ID NO: 804380 - DNA, 98 bp, Homo sapiens
atttgtgaagctgggaatcatttcatcaatgtaatgttgtctcatcccaatcacacaggtgaccaagaatatggcccaggtgaccaaagccctggaca

SEQ ID NO: 804381 - DNA, 100 bp, Homo sapiens
tctgtctctgaaggcatgtcagctgcaattttggagtatgacgccgtgcccatccagtccagcgtggtgttatgttcctgcccatccccatcaatggtga

SEQ ID NO: 804382 - DNA, 100 bp, Homo sapiens
tccatgactggaggggcgccctgggggttcagattgcaaggtggcaaggagcagaagcagcccttacaagttgcaaagcatttggaaacaggcaaatcac

SEQ ID NO: 804383 - DNA, 100 bp, Homo sapiens
gagcgtgtctgtgtgcgagtgggtcagacttgagggactggtatttctagaagcctcacatggaagagacagaatcattcagtacaagtgtatccagagg

SEQ ID NO: 804384 - DNA, 100 bp, Homo sapiens
agaagctgttctggccattgatgatgatatcattatgctgacctctgacgagctgcaatttggttatgagcaggcagatagaagttcctgtcactttctc

SEQ ID NO: 804385 - DNA, 98 bp, Homo sapiens
gtgaacacatggaagaacatggcatcaagtttataagacagttcgtaccaattaaattgtgagacaaactcccacacagcactttaaaaatcagttcc

SEQ ID NO: 804386 - DNA, 98 bp, Homo sapiens
acgacctcacccagcaggagatacggaccctggaggtttgaaatatctccattcagctggcattttacatcgagacattaagccagggaatctccttg

SEQ ID NO: 804387 - DNA, 100 bp, Homo sapiens
gcctgagcccgtggggtccgatgctggggacaagaatgccaccaaagcaggcgatgacgagccagagtacgagcaccttccaaaaagggaaagaagcgga

SEQ ID NO: 804388 - DNA, 98 bp, Homo sapiens
ggagtcctgggcccagagccgagatgagcagaacctgctgcagcagaagaggcctcgtgggctgtgcggctatcctggagacagatgacagctctccc

SEQ ID NO: 804389 - DNA, 100 bp, Homo sapiens
agtttgacaccacaggctgagctccctgaaccagagctgtaggtaaaacttgcctactgatcagttacacaaccaatgcatttcctggagaatatatccc

SEQ ID NO: 804390 - DNA, 100 bp, Homo sapiens
ttcggggccgtgctgctcttttcctggacagtgtatctttgggagaccttcctagcacagcggcaggcaagaggaggagcgaggccgggtatacaattac

SEQ ID NO: 804391 - DNA, 98 bp, Homo sapiens
cagaaaaagaggctcttcctcctcctcccgcgacggttatgggtgctacatgtgtgctttcagagcagtagtgtgaggaagcttggagtgggatggca

SEQ ID NO: 804392 - DNA, 98 bp, Homo sapiens
actatcctctgagatcccagatcatgaggctgtaggttccatgaggacaggccttgagtctgtcctggtctctggaatcacggtgtctagtagaggcc

SEQ ID NO: 804393 - DNA, 115 bp, Homo sapiens
taggaatcatggcggctgcgctgttcgtgctgctgggattcgcgctgctgggcacccacggagcctccggggctgctgagctcctgtgacggccacgacgggctgcggaggcagg

SEQ ID NO: 804394 - DNA, 100 bp, Homo sapiens
cacagagacttggctgcaagaaactgtatgccacagcaaacacaggtgtgcaggaaccgtttgtcatggaagccagggagcctgggaggcccacacccac

SEQ ID NO: 804395 - DNA, 100 bp, Homo sapiens
gaaaattgcccttcgggaaatccgaatgctcaagaaatagatgatgaattcatcaaaaacttgaaaatactgattccttggctacttagtcccgagagcc

SEQ ID NO: 804396 - DNA, 100 bp, Homo sapiens
aaggactaatctgatcgggtcttccttcatcctcttagcaaatatccggctgtgatcaatgatatttcattctggttgccctctgagaattacgcagaaa

SEQ ID NO: 804397 - DNA, 98 bp, Homo sapiens
cgcgccgtggacacagacggggtggagcccatggaatcggtcctggaggacaggtcgttcatgcccaacttggtgcctcccaagatccccgatggaga

SEQ ID NO: 804398 - DNA, 98 bp, Homo sapiens
aatggttcctgaatgaattgaatgcatggatggaggttctctggatcaagtcctgaagaaagctggaagaattcctgaacaaattttaggaaaagtta

SEQ ID NO: 804399 - DNA, 100 bp, Homo sapiens
cctaccagctgccactttccagggtttggaaatcccttgtctccaggttgctgggattgacttcttgctcaattgaaacactcattcaatggagacaaag

SEQ ID NO: 804400 - DNA, 100 bp, Homo sapiens
gaacgctagtttccgagctcatgtgcagtagacattgttgcaatcatgatcggcaatctgaaaggcacaaaaattctgcaatctattcaaagaggcatac

SEQ ID NO: 804401 - DNA, 100 bp, Homo sapiens
cagcttcttcagttccaggaagatgcctttgggaagcatgtcaccaacccggccttcaccaaactccctgtctgtaacattgtggcaggacaaagatgta

SEQ ID NO: 804402 - DNA, 100 bp, Homo sapiens
aaaaagtgtaacagaacagaggaactcttggtggaagagattgaggagcccaagaagaggccgaaaccgagaccatgccagggaagctgaaggtgaaaat

SEQ ID NO: 804403 - DNA, 100 bp, Homo sapiens
agtaatggtgcaaagcctgaagaatcagagatcattgatttcttcctgggggcctctctcaaggatgaggttttgaagattatgccagtgcagaagcaga

SEQ ID NO: 804404 - DNA, 100 bp, Homo sapiens
gagagaaccagcacttctgggacgcacagagaccgtgaagattccaagttcaggagaactcgaccgggcagctttggaagaagtagaaggtgatgtggca

SEQ ID NO: 804405 - DNA, 100 bp, Homo sapiens
gaatatcttcccttacaagggttatatatggaattatggtaccctccctcaggtggatctccttacgtagcagccaaaataaatgaagcaaaagacttgc

SEQ ID NO: 804406 - DNA, 100 bp, Homo sapiens
ccagttattgaatatcaagaggaggagttgttgattcaattagcagagcctcacagacaatggccaaatgtgtcaaagctgtcacagagggtgcccaggc

SEQ ID NO: 804407 - DNA, 100 bp, Homo sapiens
aggggtccagaggatttgcagttctgaacctgcacactccagtctaggatctccgagcaagagcgatcacactgtgaattaaccttggagagaaagtgtt

SEQ ID NO: 804408 - DNA, 98 bp, Homo sapiens
atgtggaaccatatccgtggacctccatatgctcataagaacccacacaatggacaagtgtacctcactgtggaccgaaatcgtctatggtatgtgcc

SEQ ID NO: 804409 - DNA, 99 bp, Homo sapiens
atgaatggtgctatacttgaattttctaaggtgtcattagatcgatctggaatagaaaacgtcaactctgtggaggctttgcaggaaactctcattcgt

SEQ ID NO: 804410 - DNA, 100 bp, Homo sapiens
cgccggctccgggcccggccagtacctgcagcgcagcatcgtgcccaccatgcactaccaggacagcctgcccagatggtttcacccaaatatcactggt

SEQ ID NO: 804411 - DNA, 99 bp, Homo sapiens
tagtagccacggtgtggcagctgctctgaaccaggacctggacccggacccaaagtgccatgtctttaatctctattaccaggttttaaacttcgccat

SEQ ID NO: 804412 - DNA, 98 bp, Homo sapiens
acctcctgcctggactctaagggagcagatgggggctggcagcactgtgtttggagcagcagcctgcagcagctttgctgtctgcatgccgacatgct

SEQ ID NO: 804413 - DNA, 98 bp, Homo sapiens
tgtaatcagaatttttattccaaaaacagaagaaatgcagccaactgttgaaggaagtcaaagtgaattgggcaacaacccctagcagtcaaaagaaa

SEQ ID NO: 804414 - DNA, 99 bp, Homo sapiens
aaaatctcttatccacaaacttgatcaaactatgtcaggttatatcttaagtgtggtgctgctaacattgcccaggcagcatctggttcagctttatct

SEQ ID NO: 804415 - DNA, 98 bp, Homo sapiens
cgctggatcaacaaccgccttgtggcaacatggctcaccctacctgtgcgacatctcgaatcagcgatgcacacttggcagacacaatgattggcaaa

SEQ ID NO: 804416 - DNA, 100 bp, Homo sapiens
ggcaactacggcggcggcgccggggcgatgctgtgggtctcgttgggcgccggtgtcctggcctcttcctcagattattcagagctgggagagcttcccc

SEQ ID NO: 804417 - DNA, 98 bp, Homo sapiens
acatcgtgaacagcatcgtaggggtcagtgtcctcaccatgcccttctgcttcaaacagaccatcatggagcagttcaaccctagcctccggaacttc

SEQ ID NO: 804418 - DNA, 98 bp, Homo sapiens
aaatggcggacgggaaggcgggagacgagaagcctgaaaagtcgcagcgagctggagccgccggaggtttgcctgcaatgagatttcattctctacat

SEQ ID NO: 804419 - DNA, 100 bp, Homo sapiens
tgcctcccgattttatctttggagaagatgctgaattcctgccagacccctcagctttgcagatcatcaatgctgtggtactgttgattttattgagtgc

SEQ ID NO: 804420 - DNA, 135 bp, Homo sapiens
tgagacagaggagtgcaacaaccactggttctccaggaaccgaaaaggcgaggagtatagtacggcaaaaaactgtcgggacaccacgatcatcaaccactcacggaatggcagctacggagagagctcgctgga

SEQ ID NO: 804421 - DNA, 51 bp, Homo sapiens
gaggacgagcggaaaaacggagcctacgcgggggtcacttcatgaatacgg

SEQ ID NO: 804422 - DNA, 100 bp, Homo sapiens
atgtattattgataagatatgttgagaatcccagccaagttttaaattgtgaaagtgagaaagatcagtctaaagaaaaggagaagaaagtgaaaaaaac

SEQ ID NO: 804423 - DNA, 100 bp, Homo sapiens
gcgaattgtccaagccctgaatgccaatgtgtggtccaatgtagtgatgaagaatgttaaagagaagttgactgcggatccagacagtgaaatagctaca

SEQ ID NO: 804424 - DNA, 100 bp, Homo sapiens
ttcaagcctgtaggatccactggcgtcatcaagtcaccaagctggcaacggccaaaccaaggagcaatggctgccatccggaagaaactggtgattgttg

SEQ ID NO: 804425 - DNA, 129 bp, Homo sapiens
caggcagagggtgatagaagaggccaagactgcgttcctgctcaacatccaggtctctaactggtttggcaacaaaagaatccggtataaaaagaacatggggaagtttcaagaagaggctaccattta

SEQ ID NO: 804426 - DNA, 100 bp, Homo sapiens
tggaccacactgcgccaacacagaaattatgatattgctgcatatcgtgccaagggcaaaagtgaagcaggaaagaagggccctggcaggccaacaggct

SEQ ID NO: 804427 - DNA, 99 bp, Homo sapiens
cgagaccaggatcgaggagctcagggccaaacctctaatggagttgattgagagggtagatgatgagctggagatcaaggcctactatgcaggccacgt

SEQ ID NO: 804428 - DNA, 100 bp, Homo sapiens
gattcctttcccgtgcagacatggcctctggcaccaccaccaccgccgtgaaggtatgtcgagagtaccaacgtggcaattgcaaccgaggagaaaatga

SEQ ID NO: 804429 - DNA, 100 bp, Homo sapiens
acaaggaatgactcatcttgaagcccagaataagattaagggttgtacaggctctttgaatatgactctgcaaagagttgctacgatggaagttaaaggg

SEQ ID NO: 804430 - DNA, 100 bp, Homo sapiens
cgcgagcttagtcctgggagccgcctccgtcgccgccgtcagagccgccctatcagttcctctttagagagcaaagaccacctacaggcaccagacacag

SEQ ID NO: 804431 - DNA, 98 bp, Homo sapiens
gccaccgacacatgcaacttcgacttggtggaggacgggctcactgccatggtgagcgggggcggggttggtgttcgaggaagagacattgttgttct

SEQ ID NO: 804432 - DNA, 98 bp, Homo sapiens
ggctaccacctacctgagtatgtcgaaaatctctgcccctggaggagaaatagaaggcaggatggggaagcagaatagcaaactggcccctgaagtga

SEQ ID NO: 804433 - DNA, 99 bp, Homo sapiens
gtcggtcaccctctggacacggtcaaggttcccacatcccatccccctcaccactgtgcagtgtgtatgcagtttgtgcgaaaggaaaacctactctct

SEQ ID NO: 804434 - DNA, 100 bp, Homo sapiens
aattctgtccctgaggacaggactgaagctgggagggtctcgctgttggagttggatttggggctatagaaaagacggcatctgctacctttgagagtgc

SEQ ID NO: 804435 - DNA, 98 bp, Homo sapiens
aggtgtcacaggaaggcaccagcaaggacattggtctttgatttgattcagcagtcctgtcaagtataaatatcaagtcccagcagagcgaggtgacc

SEQ ID NO: 804436 - DNA, 127 bp, Homo sapiens
tttggcctcacgctcacctggctttacttctggtgggaagtccacaatgactatgatgaattcaactggttcagctgtttcagtccacaccttgttcacagtaagatattcaattcaattcagcaaa

SEQ ID NO: 804437 - DNA, 100 bp, Homo sapiens
ggaatggtgacaacatgctggagccaagtgctaacaaaatgtggtgacctggaagaagaactcaagaatgttactaacaatctgaaatctctggaggctg

SEQ ID NO: 804438 - DNA, 98 bp, Homo sapiens
tagacttgaatatggagataatgggctacaccaagtccattgatatttggtctgtaggctgcattctggcagaaatgctttctaacaggcccatcttt

SEQ ID NO: 804439 - DNA, 98 bp, Homo sapiens
ccactaatcaccagaacaaaatgtgcagctttctgatatgatctccatcagtgagaagcctttggcagaacaggactggtaccatggtgcaattccca

SEQ ID NO: 804440 - DNA, 100 bp, Homo sapiens
ctgtccatcaaacatcttccaccacagcttagaggtggacccaagtggagagattgtggaactggcgaaaggtgcatgtccctggaaggagcatctctac

SEQ ID NO: 804441 - DNA, 98 bp, Homo sapiens
gcccaggaaaccagcagatgcccaggagaacctcaacaagctgatgaccaacctgcgggccacacagccccacttcgtccgctgcattgtccccaacg

SEQ ID NO: 804442 - DNA, 100 bp, Homo sapiens
ctagcggactacggagacgggcccgactcctccgacgccgatccggacagcggcacagaggagggaggtgttcattgtactcatggcttcaatcgcactg

SEQ ID NO: 804443 - DNA, 98 bp, Homo sapiens
catttccgggctcggctttgcaaggtgacaatccttacccttccaaggaggacacccctaccagcagtctggactcactttcctccccgtctcccgtg

SEQ ID NO: 804444 - DNA, 98 bp, Homo sapiens
gctgctcctggttacgttgtgcctgaccgaggaactggcagcagcgcttggtgtaaaaattgccaaagcagttgcctgccacaactttgtaaaagcca

SEQ ID NO: 804445 - DNA, 100 bp, Homo sapiens
attacaggagtcctccacttgccactgggttgtggacctggcctattagcagatgccaagatgcgggtatttgaacgttcagtgtattttggtgattcct

SEQ ID NO: 804446 - DNA, 99 bp, Homo sapiens
atttttaaagcttcaaaatcctaagactcagcactgttgcgggccaccattggttcaggcaatcttcagcggtgatccagaggagatccggatgctcat

SEQ ID NO: 804447 - DNA, 100 bp, Homo sapiens
attaaaacagagcttcctgctgctattgcagaatttttgactggagactatagtagagtgatggtgatgattttaattacatcattgcatttttccttgg

SEQ ID NO: 804448 - DNA, 100 bp, Homo sapiens
ctcctcaagggcctcttccggcagggcctgcaatgcaaagtcaaggcggataagaaggcggcacaagaaaagatgatccagcaggagcatgagcggcagg

SEQ ID NO: 804449 - DNA, 101 bp, Homo sapiens
cagccactcaggctggtcctgggggtggggctgtaggggaaagtgctaaagccgctgaggtcccgtgggagtagggctgaatgaactgaaacgaaagctgc

SEQ ID NO: 804450 - DNA, 100 bp, Homo sapiens
gatccgtagctcagacgccaggacatcccggaagctgggaaatgccttccttgaatccagaagctggcaaacagcatcagccatgcagacctattgggac

SEQ ID NO: 804451 - DNA, 98 bp, Homo sapiens
ggatggaggggattttgtcagcttgtcgtcaaggacttctccagacaggttatgttacctgcagaggctgccctgaagctccctgtggcctggagact

SEQ ID NO: 804452 - DNA, 98 bp, Homo sapiens
tcttgcgagatatctggccgcctctgccgcagctggagaatctcactctggtttgagacagaatctcactgtgtcccccaagttggagtgcggtggtg

SEQ ID NO: 804453 - DNA, 98 bp, Homo sapiens
agagacactgccaagcagccttagccctagtgtagaggactccaagccccctgatccttgatcagaactacattaacaccaaaaatcaagttatcaaa

SEQ ID NO: 804454 - DNA, 98 bp, Homo sapiens
aggaagcggcggcggcggcgccgggcccgggggtggtgacagcaggtctgagattggccatctgcaagcttcccttctccgtggagagcaggaagaca

SEQ ID NO: 804455 - DNA, 100 bp, Homo sapiens
gcgtccggaggaggagaagcggcggcgccgggaagcagggacgactggagtgagcactggcctgggagtctgaagattgtgccttcagacctacttcgtc

SEQ ID NO: 804456 - DNA, 50 bp, Homo sapiens
caaatagcactttcttattccaagcaactttcatcctttgaaacgtgtgc

SEQ ID NO: 804457 - DNA, 98 bp, Homo sapiens
tctcttcttcgattttatgaaaatggagaactctgtgatgtcacactcaagaaacgaaatcctgaagttcgacatgtagatttggagatactgtgagt

SEQ ID NO: 804458 - DNA, 100 bp, Homo sapiens
ctgcccctcgaggatttcgcggtggattcagaggaggtcgtgggggccgggagtttgcggattttgaatataggccaagatgcagattcacctggaagtt

SEQ ID NO: 804459 - DNA, 100 bp, Homo sapiens
tcctctgaagagactttcctcattgactgccgaggccccatgaatcaatgtctggtagccaccggcactcacggatcaaaatacttgctggatggtggac

SEQ ID NO: 804460 - DNA, 51 bp, Homo sapiens
gtacatctgaaagccgggaaatgtcgtcggagttctttgagatgctggaga

SEQ ID NO: 804461 - DNA, 101 bp, Homo sapiens
tgacaatgtctttgttccaccagagtcattgcaggaagtggatgagttccacctcattttagagtatcaagcagcatcagacaacagtcagcgctttcgag

SEQ ID NO: 804462 - DNA, 100 bp, Homo sapiens
caaagtctatgtcccggaactcctccattgccagtgatatataacgaaggaggcccaacttcattcaataaggagcctgacggatttatcccagacggta

SEQ ID NO: 804463 - DNA, 100 bp, Homo sapiens
tgaaatctctcctcttatctcctatgctggagaaaaccacatattcttctctttagacgacctcttccaaaagatcaacaaaaatgaagtttatctgggg

SEQ ID NO: 804464 - DNA, 98 bp, Homo sapiens
cacttacactgttgagaaagtggaagttcatcgtctgattaggaatggaagttggatacactttgtgacttgtacgagacactgaccattacacaggc

SEQ ID NO: 804465 - DNA, 100 bp, Homo sapiens
aaggaaaaggcttggagcacctccattcattgtgccaacaggacctgaatgaccgtcgaattgacataaaacagttgatagcaaagaagataaagttgac

SEQ ID NO: 804466 - DNA, 100 bp, Homo sapiens
tgtaggttttagaattttcatggatgccatactactttctttgactagaaagctgctgcctattcacactctgaggcttggtgtggaagtggattccttt

SEQ ID NO: 804467 - DNA, 101 bp, Homo sapiens
acaaacttcaccctcaactacctcaggctcttgaggatgacgattgccaaacaaaggctcggagacgaagcaatcggcgtgcgacactttgcagcccatga

SEQ ID NO: 804468 - DNA, 100 bp, Homo sapiens
gatatttactcctattgtggaacatttgggacttcagatacgctttaacttgaaatcaaggaatgtagaaatcaggggtggttctcttcccaaagtggaa

SEQ ID NO: 804469 - DNA, 100 bp, Homo sapiens
attctgccgctgattgctatcacttctgcagaatccagtggccctgggcgctgcctatggcacagccaagagcggtaccggcattgcggccatgtctgtc

SEQ ID NO: 804470 - DNA, 98 bp, Homo sapiens
gcacttaagcctcggaacaactttaccaggcggagtacgtccagcttgttactgaacttcgaatgacaagagccattcagcctcagatcaatgctttt

SEQ ID NO: 804471 - DNA, 99 bp, Homo sapiens
aacaatcgtagcaataaacccattcatagagcttattgccagatcaaggtcttctgtgacaaagactcctcatctgtttttaagagggaaatctgagtt

SEQ ID NO: 804472 - DNA, 100 bp, Homo sapiens
cctggagaactacatcaccgctctgcaggctgttcctcctcgggccaaccccttcaaggagcgaatctgcagggtcttctccacatccccagccaaagac

SEQ ID NO: 804473 - DNA, 100 bp, Homo sapiens
tttgcataggaatcagaggagttaatcttgcagatctggaggaagaaagaatgcggcagaaaatagcagaaaggacctcagaagaaacaatacgcattta

SEQ ID NO: 804474 - DNA, 101 bp, Homo sapiens
acgcaagacggtgccgagaagcagctgcgagggacttcatctgcagcatcctcaccattaaaaaaagaacagcccttatttactctacggcaggttgggat

SEQ ID NO: 804475 - DNA, 100 bp, Homo sapiens
tggtggggagatgaacccaacctagtgggtgtaatacatcatgaactgcaggggcaactccaacaacattgccaccgtggacatctccgcaggcttcgtg

SEQ ID NO: 804476 - DNA, 100 bp, Homo sapiens
gccagggaccctgtgcaggcctgctcctccgtttgcaagatggtggatgcttccaaaagcatcgaagctgtccatgaggacatccgcgtgctctctgagg

SEQ ID NO: 804477 - DNA, 100 bp, Homo sapiens
tttttatcagaaaaggatcggaaaagaattttggaagtgcttcgggagatccaggatgcagtggccagggcggggcaggtggtgcgggaagccgttggag

SEQ ID NO: 804478 - DNA, 98 bp, Homo sapiens
accagccgcagcttccgtactgccagtgtcagcatcaaccagacagaatggaggctccagagtgaaattaatgacactttgtcgatgaagatcttgat

SEQ ID NO: 804479 - DNA, 99 bp, Homo sapiens
gaaaacatcgtggccaacacggtcttgctgaaagccagggaaggaactctaatgaatcattgattgaccagcactattttaccagttggaatgaatgat

SEQ ID NO: 804480 - DNA, 98 bp, Homo sapiens
gacctgctccagtacagccagaaggacctggatgcagtgaaattcattgtacaacacacgaaccccttcaatacctggataggtctcacggacagtga

SEQ ID NO: 804481 - DNA, 100 bp, Homo sapiens
cctgaaccaacccccatcgctgccccagtaacagtgccagtggttggaaagaaagcagcaccctccacccctgtgatccgcgctgaggactgtactgtgt

SEQ ID NO: 804482 - DNA, 98 bp, Homo sapiens
gggccagagcgtggttgctgaccagttgaaaggtgcatgtgagggaaccctggcttgttcaacctgtcacctcatctttgaagatcacatatatgaga

SEQ ID NO: 804483 - DNA, 100 bp, Homo sapiens
tttctctcgatgaggataacatccctccagaagatgggatttcagtcataatcggttgtctaactggaacatcagcttggaatcacaaacattacaggaa

SEQ ID NO: 804484 - DNA, 100 bp, Homo sapiens
cctgcaccgccccctgggatccgcaggttccctacacggtctcctgggtcaaggcacgtgacacaagctgacctcaagagctccacgttttggcttcgag

SEQ ID NO: 804485 - DNA, 100 bp, Homo sapiens
cccaaaaatgcaagaaaaaaatatccaaagcttaatggattgttggcagatatagttcatctatttgcatgcaaagaacatcatccatagagacatgaaa

SEQ ID NO: 804486 - DNA, 100 bp, Homo sapiens
agcaatgcctctgcatgagccagaggagtcccaggacagaggacatgaggaggccatcctctggacactccacatcttccacaggagctgcctccaggac

SEQ ID NO: 804487 - DNA, 100 bp, Homo sapiens
cagcaacatccccaaacagcggcgtttcacggtggcacatacatggtgctctgtggatgtgtatagttttaaacccccactgcaagttggagcaaaaggc

SEQ ID NO: 804488 - DNA, 98 bp, Homo sapiens
cccactccgcgagaccctggtgcacctcaatcttgctgagtgaagacatttccacctggacacctgaccatgtgcctgccctgagcagcgaggcccac

SEQ ID NO: 804489 - DNA, 100 bp, Homo sapiens
tatttgtcctttgcaacatcctcagaaggccaatcattgtcatttcagagtgttgaatttcatgaaagaggaaagaatcataaggaaaatgtggcaaaaa

SEQ ID NO: 804490 - DNA, 99 bp, Homo sapiens
tgcagccaccgcagctgccatggctcagcttgtcaatcggaaacagaaattagagtctgtggaactttctagccaatcagaaattcaacacttaagcag

SEQ ID NO: 804491 - DNA, 125 bp, Homo sapiens
aaaacctagattactgttttctaatgatgtatgctcaagaaaagggcatatattacattcagaggactttatcagctcagactccaaggtccgcgcagccacccgggaacagtcagaatataaaa

SEQ ID NO: 804492 - DNA, 98 bp, Homo sapiens
gcggctgctgtcgcccagcgccgccccgtcgtcgtctgccttcgcttcacggcgccgagccgcggtccgagttgatatccctgaaagtacttaatagc

SEQ ID NO: 804493 - DNA, 100 bp, Homo sapiens
ccgctatggctggcagtcaggacatattcgatgccatcgtgatggcggatgagagtcccatatagaaatcatccgtggccatgcagccttcacgagtgat

SEQ ID NO: 804494 - DNA, 100 bp, Homo sapiens
aagcaggtttaaaattttacataagaagttacctttttcagggaggcaaatacatgcaggcggtgattcagtatgggaagatagtgtcctggttagagat

SEQ ID NO: 804495 - DNA, 100 bp, Homo sapiens
tggaaacgctttcctgaatcggatggtattgagcctatgtgggaagatgagaaaaacaaacggggaggacgatggctaattacattgaacaaacagcaga

SEQ ID NO: 804496 - DNA, 98 bp, Homo sapiens
gagaagctgaaggagtgtatgaagccaaagaacaactgtgttttgctgatttgggaaaataaagactatggatcaactaggagtattgttcgtattat

SEQ ID NO: 804497 - DNA, 100 bp, Homo sapiens
ctacaggccgcggaggaggaggaggtggagttgctgcccttccggagtccgccccgtgaggagaatgtatgaaatgcttcatgtcacacctccaatgagc

SEQ ID NO: 804498 - DNA, 98 bp, Homo sapiens
gggaaggcccctacatcggccacgtcatggaagggtcacccacaggtggttgaccagattgacaccctgacctctgacctacagctggaggatgagat

SEQ ID NO: 804499 - DNA, 100 bp, Homo sapiens
atggcaatagaatcgttcaagaattctatgaccctatgaccccagtcaatgccaggatggatgtggacagtttccatatgatgcaaacatccagatacac

SEQ ID NO: 804500 - DNA, 99 bp, Homo sapiens
gggctccagtatacagcacacccaggagctcctgaaagagcacgaggagttccagataactgcaaaggaatgtaccaggtcatccagggtatcatctct

SEQ ID NO: 804501 - DNA, 98 bp, Homo sapiens
ctggtgctgaaactgaagaaacttgtgaacgaagataagtggagaggcaagaggatggagatgaagatgaggaagctgagtcagctacgggcaagcgg

SEQ ID NO: 804502 - DNA, 98 bp, Homo sapiens
aataaaactggcttcatctggcaagcagtctacagagacagcagctaatgtgaaagagctcgtgcagaatttactgagtagcaagaagcggaaccgga

SEQ ID NO: 804503 - DNA, 100 bp, Homo sapiens
gggagagcaagaccatcatgctgcgcggccttcccatcaccatcacagagagcgatgtttcccggtcctctggcgaggatcctccaaggcgtctcacatg

SEQ ID NO: 804504 - DNA, 98 bp, Homo sapiens
cagcgctcgcgccccgccgctgagccgccggggagccgtccagtcttcgaatcccagccaaatttgagtccctctttaggacgtatgacaaggacatc

SEQ ID NO: 804505 - DNA, 99 bp, Homo sapiens
ttcaacccaggacacaagaaactccttcacatctggaagaacttgaagatactgtggattatcccccagaaagctgttcgttggattctagtcatgatt

SEQ ID NO: 804506 - DNA, 98 bp, Homo sapiens
tgctgactggacccagccaactgaagattcgcattgacgcaatgcacggaggagcttactccacgggaacagcctctagataatctgagttgttgaaa

SEQ ID NO: 804507 - DNA, 100 bp, Homo sapiens
cagccagatgaactctccctgcaggtggctgacgtcgtcctcatctatcaacgtgtcagcgatgtgctgaagctgctgaaagatggcagaagaagtggtg

SEQ ID NO: 804508 - DNA, 100 bp, Homo sapiens
atgtgagaaacgagtacaggatgtaattgaacgattttgggatttcattgaccagctgagcatcaatacttttgacttcctgggaatgaaaatggttggt

SEQ ID NO: 804509 - DNA, 100 bp, Homo sapiens
cctgaggacgtctcaaagaagctcggcgggagagctgagcgctcggaagaaccaaggctaagtgctatttatggaggtacctatatgctgaataaaccca

SEQ ID NO: 804510 - DNA, 100 bp, Homo sapiens
aatgccaactacctcataagtgcagatattttcagttatctaggtagctagagctttgcataggaccaaactcttacccaggatctactggagcagctgt

SEQ ID NO: 804511 - DNA, 100 bp, Homo sapiens
tccaggctgtcctgcacgacctcactagtgaacctgtcactgttcgggaagtcacctggaaatgatcttcattggttagcatgtgccttatatgtggctt

SEQ ID NO: 804512 - DNA, 100 bp, Homo sapiens
ctcttcactgcattggtgacccagtgtcagaaaatggacatccctttccttggggaaatgcccgcagaggatcatgcggccagatgatgccaacgtggcc

SEQ ID NO: 804513 - DNA, 99 bp, Homo sapiens
cacagtgcttccaccctggacgaagccacccccaccctcaccaaagaggtggagaagagcgagtacttgagaaagaagaggaagaagatgatgatgaag

SEQ ID NO: 804514 - DNA, 100 bp, Homo sapiens
caagtaggaggtggaaagaacagtcagaaagcctctccagtggatgatgaacagctgtcagtctgtctttctgacctgtcgcgaaatcgcctttcagaaa

SEQ ID NO: 804515 - DNA, 101 bp, Homo sapiens
gcgctgctaggcattgaggagaaggcagcggacaaagaggggtagaaatatttctgtcatggctcattcaaagactaggaccaatgatggaaaaattacat

SEQ ID NO: 804516 - DNA, 98 bp, Homo sapiens
gccgctgccccggctgcctcctccctgaggcctccccatggccacccatggaccagtcggcattcacttcctcccttctgcggcccataaaagccctg

SEQ ID NO: 804517 - DNA, 100 bp, Homo sapiens
actctggttatctgcatttgctttataaaagaccactggatcccaagagtgaagctcagcttcaggtggaggatgcgctatcttatcttgaccaggtgaa

SEQ ID NO: 804518 - DNA, 100 bp, Homo sapiens
aaaatgattactggagattcacaggagactgcagttgcaatcgagcaacaagatatggatttggatatagaatttgatgtacaccttggaatagctcata

SEQ ID NO: 804519 - DNA, 100 bp, Homo sapiens
tactgcttacctgtaccagttattccctctttcagcactgctctttatgggaaacttctgaaactccccacatgctgaatgtaattatatctagtgctgc

SEQ ID NO: 804520 - DNA, 100 bp, Homo sapiens
aatcatattatagatggagtaaaggtagattttcgttccgtcacccaggctggagtgcagtggtgtgaccttggcttgctgcaaccctttgcctcctggg

SEQ ID NO: 804521 - DNA, 100 bp, Homo sapiens
tgtcccagctgtgtcagctgctgtgaagacccatttacccaatattaaagtccacgcctacttcgcacctgtcactccacccccatcagtagggggcagc

SEQ ID NO: 804522 - DNA, 99 bp, Homo sapiens
atcaactctagttatttccgacgagtgaaaaatccaaataaccttgatgaaatcaagattgcttcctgaggaggctggcacttctgaagatcctgaaga

SEQ ID NO: 804523 - DNA, 98 bp, Homo sapiens
ttttccaagttttctgcctacatcaaaaataccaagcagcagaacaatgctgtccacctggaaggccgctgtggtggaaggatgtttgactgcagaga

SEQ ID NO: 804524 - DNA, 100 bp, Homo sapiens
ctggatgacacccaggaggcatttgaagttccagcaaagccaaagctaattgagccactcgactatgaaaatgtcatcgtccagaagaagactcagatcc

SEQ ID NO: 804525 - DNA, 100 bp, Homo sapiens
tggaggaaagcttttccacagaatttgggcctgaaaatctgagctgcgaagaagtggaatacttttgtaacaaagaatatttttctcagcacttgggcga

SEQ ID NO: 804526 - DNA, 100 bp, Homo sapiens
gtgtgcccaggaggagcctgaggtcaccaccccagccagcaccatcagcagctccaccctgtcagatgatcacagtcgtgttaaactgcaaaatgctgag

SEQ ID NO: 804527 - DNA, 100 bp, Homo sapiens
tcatggagaaacttctccggaccgtgaaccgaaccgtcatttccatgggacgagattctgaactcattgtggcagggcccagccccgaaccagacaaggg

SEQ ID NO: 804528 - DNA, 100 bp, Homo sapiens
caagcgcttcacaccctggtggccagagtctgaaactggttgttccaaggacagttatgggatggatgggaaggttaatcagccccgtctcactgcagac

SEQ ID NO: 804529 - DNA, 100 bp, Homo sapiens
aaagaactcttcagaattcctggtgtttcatcatatatacgactaagatatcaagtaaccagagagcacagagaaatgctggtgaaactggccaaacaga

SEQ ID NO: 804530 - DNA, 99 bp, Homo sapiens
ctgccttggccatttaagcactattattcatgaggcaaatgaggaacagggcaatagtatgatgcacatcttcattacctccactagactggcctttac

SEQ ID NO: 804531 - DNA, 100 bp, Homo sapiens
gccaaagaaacaagccgtggaataggtgtatcaagtaatggtgcaaagcctgaaaacattgacatcaccaatttcagcagcagctggagcgatggcctgg

SEQ ID NO: 804532 - DNA, 100 bp, Homo sapiens
gaaggtggaggagaagaagaccaggtctaccctgaactgcagatcaccaatgtggtagaagccaaccaaccagtgaccatccagaactggtgcaagcggg

SEQ ID NO: 804533 - DNA, 98 bp, Homo sapiens
gagcgcccagcggacaccggcagcgcgcggtcgacgcgggcctgagctccctccagctcgtttgacagcaagtttgtttaccagcaaataggactcgg

SEQ ID NO: 804534 - DNA, 99 bp, Homo sapiens
atccgagaggccacacccccagttggttgcagttccagaaattcttatgccggtctagatccaagcaaccagtccaaggccattggtttgctagatgtg

SEQ ID NO: 804535 - DNA, 100 bp, Homo sapiens
cacagagatcaaaccacttctaaatgataaggtctcaaaactgagctggattgagaaaaaaatggctgctactctgtttggaaaaataccatcttcaact

SEQ ID NO: 804536 - DNA, 100 bp, Homo sapiens
cggaaaactagcatcaaaattcccagcaacagatacaatgaggcaggtgacaaacattaccaccccagctgtgcacgatgcagcagatgcaaccagatgt

SEQ ID NO: 804537 - DNA, 100 bp, Homo sapiens
ctcatgtattgaagaattccaatcccagttcatttttgatatccgacatgaagccagtgacttcccatgtagagtggccaagcttcctaagaacaaaaac

SEQ ID NO: 804538 - DNA, 100 bp, Homo sapiens
cgagccagaggggaaagtatttgtggtaataacccttaccgggagtttcactgaaggaagtcagcctcataccaaaccatccgtttttgtcatgaaaaat

SEQ ID NO: 804539 - DNA, 98 bp, Homo sapiens
ttagggagtccatggccagaaaacttttgggagaaagtggctcatgccaaagaagaaaaccttagtatgcatcagatgctggatcagactttactgga

SEQ ID NO: 804540 - DNA, 100 bp, Homo sapiens
gtttgcacggagcagcaaacgcagagacaaaagaaacgggccccgactggtgagcgtcctgaccaccctggagcgtaggttcaacctgcagagcgctgac

SEQ ID NO: 804541 - DNA, 100 bp, Homo sapiens
ttcagaaatgcgcagagcaaacatctttcaaaggtgaagctttgttctaagaatatttgtttcatctagtttatgagtccaaatgatatagactgtaaat

SEQ ID NO: 804542 - DNA, 98 bp, Homo sapiens
cgaagccaaaaattatctaagcagtatccttaaccatgggaggctctcgaggctaagaatattgtacacaaagattcttgatgttcttgaggaaatcc

SEQ ID NO: 804543 - DNA, 99 bp, Homo sapiens
ctcaggcgtgcgcggacggtgtgcgggattcaactggaagctttgtgctgcctttccggcaagtcatgtatgctccatatcccaccacacacatagatg

SEQ ID NO: 804544 - DNA, 100 bp, Homo sapiens
cggaagtggaagtggtccccgaaggctatttcgccgctggcgtcaggactattttcacgttttaatgccgagaggggcaagattcttgccaagagaatta

SEQ ID NO: 804545 - DNA, 100 bp, Homo sapiens
ttacaacaggtgctccagctgaaggtgcgagaagaagtcagaaatctacagttactcacacaaggttggccttcattccacgatgtgatcaattctgagg

SEQ ID NO: 804546 - DNA, 98 bp, Homo sapiens
aacagaatggaaaagagtcttctggatggtgatgggaatctttgcaaattgtatcttctgtttgaaagtgaagtacttacctcagcagcagaagaaaa

SEQ ID NO: 804547 - DNA, 100 bp, Homo sapiens
ctgtgtatgccagattcacagatttattgtgaacactctgaaagacggaaggggtgctacatccattgtgtacagatgcaaacagaaggggacccagaag

SEQ ID NO: 804548 - DNA, 98 bp, Homo sapiens
ctcaagcatgaaaagccttaggatattgctgttgtcccaggacagaaaccatgagacggtggctcagggagtaaaggaaggccagttgagcaaacaga

SEQ ID NO: 804549 - DNA, 98 bp, Homo sapiens
acaggcttactgaatatcctcttataattaatgcaataaaacgcttccatctttatccagagctccgccgcatgcaagagatgattgcaaggatgcag

SEQ ID NO: 804550 - DNA, 100 bp, Homo sapiens
tcatggcgctgttcccagcctttgcggggcttagtgaggctcccgatggcgggagctccaggaaaggtctgcgcaggcatggcactaagtgtcccatggc

SEQ ID NO: 804551 - DNA, 100 bp, Homo sapiens
accagcaggtccctggccctcatgtacgagtccgagaaggttggggtcgcctcttccgagaaggagctggcaaacagccctgactgtccccagatgtgtg

SEQ ID NO: 804552 - DNA, 98 bp, Homo sapiens
gccaagcgcttcacaccctggtggccagagtctgaaactggttgttccaggtttttaatgaccacaacaagcaagcatgcagcttactgcttgaaagg

SEQ ID NO: 804553 - DNA, 98 bp, Homo sapiens
caaaagtgaaaaaagacgcctctgctagaaaacggagtcgtaagaaagcagtgggagttgaagtcattgtcaagtgcttgcgatcttttacaagaaaa

SEQ ID NO: 804554 - DNA, 98 bp, Homo sapiens
cccggccccagggtacgctgccggtgtgcacaggcctgccttgctctgccaggaaccatgagtgaggcccgcagggacagcacgagcagcctgcagcg

SEQ ID NO: 804555 - DNA, 100 bp, Homo sapiens
ttcatgccagcgaggccctgcagcctctatacttgtacttacaaaacccggaaccgagccttccctgaaaaacagctgaatgatattgaagattgtgacc

SEQ ID NO: 804556 - DNA, 98 bp, Homo sapiens
aggcaagaaaggggcccggaaatccaaggtaatggggagagtgccaacaatttccattaataagacagaaggttgccacatatacctcagtgaagatg

SEQ ID NO: 804557 - DNA, 98 bp, Homo sapiens
cccaagaatgagaaattgtgcaaaacaggtgaatttccaatcatcagcccaggtcgggtatatgaatacacaagctgtaccacattctctacaacatc

SEQ ID NO: 804558 - DNA, 100 bp, Homo sapiens
acaggtgcactctgcaggacccggatgggcagagaaacctaagtggcaaggtgatcttgagagtgacagaatggtgaggttctggagaattgatgaggat

SEQ ID NO: 804559 - DNA, 100 bp, Homo sapiens
ttagagatttcaggagaagaatatgagcggtttttacagaatgacgtggccgcacttctgaaacccatatcggaaaagattcaggaaatccaaactttca

SEQ ID NO: 804560 - DNA, 100 bp, Homo sapiens
gcaaaacaccttcctggacaccatcgccacccgttttgacggaacacgtcagaagacatgtcttcatctacatggcatctttccttacctctatgtgcca

SEQ ID NO: 804561 - DNA, 112 bp, Homo sapiens
gaagatgctcgcctactgcgtgcaggatgccaccgtggtggacgtggagaagcggaggaacccctccaagcactacgtttgacagtgctctggaagacctacctaagagtgg

SEQ ID NO: 804562 - DNA, 98 bp, Homo sapiens
aaacatcgcagaggccgactgggagagtgtctccagcatcctgcaagtgaaatcacctgctaagaagctgactaatgcattaagcaagtccctgagct

SEQ ID NO: 804563 - DNA, 100 bp, Homo sapiens
gtactgggagatccatagggaagaaggcggaacatccggaggctgggaaatgagacagggaagaacgattggcagcactcacagctgctcaacaagaagc

SEQ ID NO: 804564 - DNA, 98 bp, Homo sapiens
ggaggcgcggaaccatggccgatgggggcgagggcgaagacgagatccagttcctgcgaactgtgacagagctgaatgaacctctctccaatgaagat

SEQ ID NO: 804565 - DNA, 98 bp, Homo sapiens
acagtttttaagtatccagactttgctgcaggctgggccttaagtattccacttgtaaacaatgtggtagaagaggagacacggcgatcccagcaagc

SEQ ID NO: 804566 - DNA, 100 bp, Homo sapiens
attttgatcaagataagctgccttaagttctcttcattacacgaactctattttaagaacctctcaaaacgaaacaagcaaatcatggagaagaatggaa

SEQ ID NO: 804567 - DNA, 100 bp, Homo sapiens
tggtattaattgactatggggatcaatatacagctcgccagctgggcagtaggaaagaaaagttaatacaatctgttggaatgacactggagaatatatt

SEQ ID NO: 804568 - DNA, 100 bp, Homo sapiens
gttcctggcctacctgctgctgtcggtggcctgcttcctccacccggtcctggtctggcacgtgaccatcccagcaagtaacttctaggtctgcagacaa

SEQ ID NO: 804569 - DNA, 98 bp, Homo sapiens
gtgaactaaggccccctgcccccttttcctggtgcatgtgaagttatcaaaaacagacagaacctccactcaatacaccagaaaacagagagtatctt

SEQ ID NO: 804570 - DNA, 99 bp, Homo sapiens
cagaatcgaatctcttctccctccccttcttggaatcattaaccaatggcaacaggaatccaaggataaagtgatttccctcctgttaactcatctgcc

SEQ ID NO: 804571 - DNA, 99 bp, Homo sapiens
gtcagtctatgacaacgtctctctgccgtgaatcattcctgcagatgaaaaagtgtgacttggcagctggcgcaattcaatgctgattgtcaacctgtt

SEQ ID NO: 804572 - DNA, 100 bp, Homo sapiens
cgaagacgagatccagttcctgcgaactgatattgctggtgcctggcagaggctggagcaggctgagaagggttacgaggagtggttgctcaatgagatt

SEQ ID NO: 804573 - DNA, 99 bp, Homo sapiens
tgaagtatccagcgctcattgggaatttagttaagtgcagctctccggctgggatcctggttgacgccatgtcccagaagcaccttcagatcaaccaga

SEQ ID NO: 804574 - DNA, 100 bp, Homo sapiens
ctggagtaaaagctgatgatcggaatgattacaggacactgaagccatgaagagagcattggcctccatagactccaaactgaaccaggccaaaggttgg

SEQ ID NO: 804575 - DNA, 98 bp, Homo sapiens
attctggggacgctgggaacactgaatcaacatgggcaatgagaacagcacctcggacaaccagagctaagcttgtctgctggatccctgcagctgga

SEQ ID NO: 804576 - DNA, 99 bp, Homo sapiens
agcattctaaagtgaatgactccaacgaattaggtggtctgactaccagtggctctgcagagatttggagcaagaggtggtggtggccttcccccgaag

SEQ ID NO: 804577 - DNA, 100 bp, Homo sapiens
acggcgtacgccctcatggggaaaatctccccggtgactttcaggcccctgagcctctgagctccttgaagtccatggcggaacgggcagccatcagctc

SEQ ID NO: 804578 - DNA, 100 bp, Homo sapiens
acaactttcgtttccctctgagggaattgggaggtcggcggccccaaaactgaactagatgcagagcacgcccagaaggtcctggaaatggagcacaccc

SEQ ID NO: 804579 - DNA, 98 bp, Homo sapiens
agatataattttgaggactgaacaaaattcaggaaggactattctcattaaggtgaaaagccatacaagtgtacctgggaaggctgcgactggaggtt

SEQ ID NO: 804580 - DNA, 98 bp, Homo sapiens
attatggctgctgtgtttttctcagttggacgcctgcctcctaattttccctacagagatgatgtcatgtcagtgaatcctacctgtttggtccttat

SEQ ID NO: 804581 - DNA, 100 bp, Homo sapiens
ggggacatcaggctgccccgcagtaccagggagcgactgaagtgcccatgccgcttgctccggagaaggccccttcacagatgtagtcactacaaatctt

SEQ ID NO: 804582 - DNA, 100 bp, Homo sapiens
ttcccgtacatgacgccggtgcagctcaccagaacaagctagaagaaatgatcaatgagctagcagtggcgatgacagctgtaaagcacgaacaggaata

SEQ ID NO: 804583 - DNA, 98 bp, Homo sapiens
gcagcaaatggaaagaaatcccactgggcagagcttgaaataagtggcgcattctacattctaaaggggagctcagtgaagatagacataaacagtat

SEQ ID NO: 804584 - DNA, 104 bp, Homo sapiens
cggctgaccagttgcgtgtgattttcgcagggaaggagctgaggaatgactggactgtgcaggtcacttttacaaagagaaagtttggattaatgaagaaagcc

SEQ ID NO: 804585 - DNA, 100 bp, Homo sapiens
cccaaccctcgtgcctccctgaaccactccactgcctttaaccctcagcctcagagtcagatgcaggataaactcaagccatggagggattactgcatta

SEQ ID NO: 804586 - DNA, 100 bp, Homo sapiens
agcagctgcgggtgttccgggagcaccggggctccgtcatctgtctggaggagtcagagtcagaagcaaaggtagatggagagactgcatcggacagtga

SEQ ID NO: 804587 - DNA, 98 bp, Homo sapiens
actctgtgtttctttcatgcagcgagaaactgtataagagcagctgggaaaaccagaaagcaaaagggtttgagctgcgtcttgattccttgaccttc

SEQ ID NO: 804588 - DNA, 99 bp, Homo sapiens
caaggctgcctataatcaagtaaaaacaatagctcaaggaaacctttccaacacagatgtccaagctgccaacatctactacaagccttagtgggtctg

SEQ ID NO: 804589 - DNA, 100 bp, Homo sapiens
cgactgcaactgctggattgctgcaaggctgagggacgagaacgagaggaccattcttagtggcactggggaaatcttggcacccagaagaattcaactg

SEQ ID NO: 804590 - DNA, 98 bp, Homo sapiens
atcattctcttcactcgagagatgaggacactgaaattcagagaggggaagtgatttgcctcagcttgtactcagtgattccagcagtagttcaagtg

SEQ ID NO: 804591 - DNA, 98 bp, Homo sapiens
agccgtggtcatcttcaacgtgggctccaacaccaacgagaccatcaccatgccccacgcggatgctctctacgatgtcatcactgtgggagccccag

SEQ ID NO: 804592 - DNA, 100 bp, Homo sapiens
ggaatgtcatccagcgagtgattagttcttctggatctgcctcagtcctgacacacagcagctcgggaaatagtctaaaacgcccagataccacagaatc

SEQ ID NO: 804593 - DNA, 100 bp, Homo sapiens
catttatcgccttgttagtctccacatccacctccgtgaaagcagaaggcccgagacatgtatgcagaggagcggaagaggcagcagctggagagggacc

SEQ ID NO: 804594 - DNA, 99 bp, Homo sapiens
ggagatcatgagcatgatctggaagcggctcaatgaccatggcaagaactggcgtcacgtttacaagagaggagctctaaattgggaagtaatgcagga

SEQ ID NO: 804595 - DNA, 100 bp, Homo sapiens
gggaagaaggcttggcctacatctggatgccaacaccagatatgagcaccgaaggtatggcgatttagtactgcattttgttctgttaatgaatggaaat

SEQ ID NO: 804596 - DNA, 100 bp, Homo sapiens
cagctgctgtcccgggcctaccccctggactccctggagaagcagatggaaaaggttaacacagaaatctgcctcctgggccatgccgcttctaaggcct

SEQ ID NO: 804597 - DNA, 100 bp, Homo sapiens
taaaagtgggtctggagtaaacaacagaagaactgagctatttttgaaagaacatgaccaccttcgaaagatcttcagggaatgtttcaggtggaggaag

SEQ ID NO: 804598 - DNA, 100 bp, Homo sapiens
gactacaccagcgagaaatcttcctgttcaacgacctcctggtgacaatgcagatcttcgtgaagactctgactggtaagaccatcaccctcgaggttga

SEQ ID NO: 804599 - DNA, 100 bp, Homo sapiens
ggctctgatcaagcggatccaagccatgattcccaaggagtgtgggctgctgctctcctctgagggcgagtgtcagggctgctacccgctggatgggcac

SEQ ID NO: 804600 - DNA, 100 bp, Homo sapiens
ggagatgaagctgaagatcttacaaagaaacttcttgatgaacaaggaactcatgtcgtgtcccattttgtaaactgggagacacctcaaggatgtggac

SEQ ID NO: 804601 - DNA, 100 bp, Homo sapiens
caccagaggaaaatgtacaaagcaataagatggacctttctggagctctttcgacgtgtagcagcagctttgccgggaatggaaagcacacaggacagaa

SEQ ID NO: 804602 - DNA, 98 bp, Homo sapiens
gtgatgagaagctgaagcagtgcctggtggccgaccttgtccacacagtccataattttcctgcatggagtgctacatcctcttgttccagtctcagc

SEQ ID NO: 804603 - DNA, 99 bp, Homo sapiens
accgccctctgcagaggcccactgggctgtgagggagttggtgaccttcagagatgtggctgtagacttctcccaagaggaatgggattgtctggattc

SEQ ID NO: 804604 - DNA, 100 bp, Homo sapiens
gtctttttaaagaatcaacatgtattcacagggtttgccattgaaggcccctctcaggcaaagattgagtacaacgaccagaatgatggatcgtgtgatg

SEQ ID NO: 804605 - DNA, 98 bp, Homo sapiens
catactggaagaattattttgaaaataccgatattcttgtccgtgggccacatccacaggcgagtcactgaccacctgggtgtcgtctactatgtggg

SEQ ID NO: 804606 - DNA, 99 bp, Homo sapiens
tgctgggatttatcagccatcagcccacccctggttccgagtctgaggaagacataaccttgtgcctgcctgcccacctctctctctggtcctgttcat

SEQ ID NO: 804607 - DNA, 100 bp, Homo sapiens
ggcggatctggacacccagcggtctgacatcgcgacgctgctcaaaacctcgctccggaaaggggacacctggttactgatgccaaattttgcccaagac

SEQ ID NO: 804608 - DNA, 100 bp, Homo sapiens
atcgatgcgggagtatgtaggagacttgtggaactgctgataattggcagagggggtcgatttgggaggaaaggtgtggctataaactttgttactgaag

SEQ ID NO: 804609 - DNA, 100 bp, Homo sapiens
ccaatcttccgtaacccctgcacagagcagattctgaaacttcttgacaatttgcttgcgcttataagatattcaagagaagcttatgtggagttagttc

SEQ ID NO: 804610 - DNA, 100 bp, Homo sapiens
atgtctcgctccgtggccttagctgtgctcgcgctactctctctttctggcctggaggctatccagcgaaacatttactagggacaacttttgagtgtca

SEQ ID NO: 804611 - DNA, 98 bp, Homo sapiens
tgacccccagttacgcctggaatatgaaggcttccccgtcccggttaacacagaaatctgcctcctgggccatgccgcttctaaggcctgtttcttct

SEQ ID NO: 804612 - DNA, 51 bp, Homo sapiens
atctgcatgccgctcaccgtagacgaggatccctggccgcctgaacgacag

SEQ ID NO: 804613 - DNA, 100 bp, Homo sapiens
cgctgccacaactatctccagaatgtcagcatggaggctgctgggcaggtcatgagtcaccatgatatgcctgaatattcagtcacaaatgaattttgtc

SEQ ID NO: 804614 - DNA, 98 bp, Homo sapiens
tcatccagtttgctacggtctacggggcagagcagtctgaaccggacggcttttctcatttccacttgtacgtgtgcgctgcttttctcgtgagatgg

SEQ ID NO: 804615 - DNA, 100 bp, Homo sapiens
agaccctgacaggttgtgaggaccaagcacgcctcttcaaagacgagggtatcacagaggctgagcgagaggctttcgagctgctcccagatgatgagcg

SEQ ID NO: 804616 - DNA, 100 bp, Homo sapiens
gagaacatccagaagtgacggctttagacctgactacagcccacctgaggatattgaccataaggactcatatctcattacaagaagcatcatggccgag

SEQ ID NO: 804617 - DNA, 98 bp, Homo sapiens
atacctgagacaaagggatgctctttggaacaaatatcaatggagctagcaaaagtgatgaaggccatacctaggtgctgcccagctttgagcattgc

SEQ ID NO: 804618 - DNA, 100 bp, Homo sapiens
actaaacaaattcatcccagaaatctaagagagctggactggccattatggaggaggagctgcagcattcccattgtgtgaattgtgtcagtagacggtg

SEQ ID NO: 804619 - DNA, 100 bp, Homo sapiens
tatctgtaaagggtatctgatcaagccaacaacagtgacggaatgcctccatacataagttggtgagatggcaaagcagtatatagagaaaagtcttttg

SEQ ID NO: 804620 - DNA, 100 bp, Homo sapiens
agaaagcattatttcatcaagtccaatagaaatggtattcaaacaattgggaagtcagaacttcgcattaacaaagcatcactggctgattctggagagt

SEQ ID NO: 804621 - DNA, 100 bp, Homo sapiens
aaaatcggcggacttaccagaatcttgtcattgagaaggatggttcaaatgaagccaagtccttctcagcaaatcaaccttggcccgtcgtccaatcctc

SEQ ID NO: 804622 - DNA, 99 bp, Homo sapiens
acctgctcagtatgacgcttctgagctaaaagcttccatgaagcttctgacaaggcttctaaagagcaaccaccccgaggaccttcaggctgcaaaccg

SEQ ID NO: 804623 - DNA, 101 bp, Homo sapiens
cacgcggcgccagttctccggcgggaaggaaaaccgcgcagagaggtaaagtcagtgataaatcttttgtttgctgcatatactggagatgtgtctgcact

SEQ ID NO: 804624 - DNA, 100 bp, Homo sapiens
tgtgctacggacccgcgtaaagaccacggggatcgtggagacacacttcaccttcaaggacctacacttcaagcatagaatgtcaagctaaccaggcgtc

SEQ ID NO: 804625 - DNA, 100 bp, Homo sapiens
agattttgaagctaaagttaagcagtggaggtgaagacagaaagcaagagaagtgtcactccccattccggatcatcccctatctgattcatgtacatca

SEQ ID NO: 804626 - DNA, 100 bp, Homo sapiens
ggtaaagttcaccttgaattaaaactgaatgaactgataacggagaatggaactgtatgccagcagcttgttgtacaaccccaagactgcttctgagaca

SEQ ID NO: 804627 - DNA, 98 bp, Homo sapiens
atatctggttattatcaggttcacgccaacagtacctcattgctctttggcgactcttattgcaggggaaatgctgtctgtagctgagcacttcctgg

SEQ ID NO: 804628 - DNA, 100 bp, Homo sapiens
tttgcacaagggaggcgacagagacagcagcagcaaagagctcctgggaaggtgctgctggatgcagtttgcaaccacctcaacctcgtggaaggtgact

SEQ ID NO: 804629 - DNA, 98 bp, Homo sapiens
tttctccgcggcgaaggtgaagagttgtcccagctcggcccgcgggggagccccgggagccgcacggagtccaatgtgctgattgctgctaacagtca

SEQ ID NO: 804630 - DNA, 99 bp, Homo sapiens
acggacttattgtatatgaagactcacctttggagtctactcttcatcttgtgttgagacttcgtggtggtgctaagaaaaggaagaagaagtcttaca

SEQ ID NO: 804631 - DNA, 101 bp, Homo sapiens
tgcttcttcgtgcagcagttcacggacatggagcacaacagggttacccatgcagttgttactgtaccagcctattttaatgatgcccaacgccaagcaac

SEQ ID NO: 804632 - DNA, 100 bp, Homo sapiens
ccaagtggcgaaggagccggctccaagtaaaatgtttattggaggcttgagctgggatacaagcaaaaaagatctgacagagtacttgtctcgatttggg

SEQ ID NO: 804633 - DNA, 100 bp, Homo sapiens
cgcagcaacgtgcggtgggaccacgagagctgttcctttctgccgaaattctccattcatatagaaaccaagtatgaggacaacaaaggaagcaatgaca

SEQ ID NO: 804634 - DNA, 100 bp, Homo sapiens
tgctcaagtcctgtcctcttctgaccaaagattgccattacccagggaggagcaatacagctggctaacaatggtaccgatggggtacagggcctgcaaa

SEQ ID NO: 804635 - DNA, 100 bp, Homo sapiens
ccactcaagttgcaatgcaaaactctggctcatattcaatttctcagtttcaatccagaatgatcagtaggagagaagtttgctgaggaatgccttcaag

SEQ ID NO: 804636 - DNA, 100 bp, Homo sapiens
cgagaagccccaacagcacggcgtggcctctcagcctcggtctagatgttgatggaatatatcgagttagtggcaatctggcaacaatacagaagttaag

SEQ ID NO: 804637 - DNA, 100 bp, Homo sapiens
ccgtggtactcaatgaggaagggatctgcacacagaaatgtgccctgaactggacggacataccagtggccatgggagaagatggtataaactggtccat

SEQ ID NO: 804638 - DNA, 98 bp, Homo sapiens
cgaactaaacaaattcatcccagaaatctaagaggcatcgttggcttcacagtatgactgatgatcctccaacaacaaaaccacttactgctcgtaaa

SEQ ID NO: 804639 - DNA, 99 bp, Homo sapiens
aagaagctgaaagaaaagctcaagccactgatcaaggtcatagaaagtgaagattatggccaacagttagaaatcgacaacataacgatgcacggatga

SEQ ID NO: 804640 - DNA, 146 bp, Homo sapiens
ccagatccggcccggtgcctgggttccaggaggacacgctgcagttggccttcatcgacttgagacaagtcctgggaactccaacaagggagcaaatcagagaaatgaacccaaactacacagaatttaaattccctcaaattaag

SEQ ID NO: 804641 - DNA, 101 bp, Homo sapiens
ccagccccctggtgatccccatgaaccacgagacagatgtgaacttccagggcaagaacctggacaccgtgaagggaactgctcgcagaaagaagaaggtg

SEQ ID NO: 804642 - DNA, 98 bp, Homo sapiens
ttgggggtcgagcacataacggggttcgggtgtctcgtgtgtgaacatcacagactctttttgatcagaacaatgctgcaaaaaaagaagagtcagaa

SEQ ID NO: 804643 - DNA, 98 bp, Homo sapiens
tgatcaagactgatgatgtcctggatctgagtcttagtggtgcaatggctagtataagcgtgcgttcgagtaccccaggctctcctacacatgtaagc

SEQ ID NO: 804644 - DNA, 50 bp, Homo sapiens
gagggaatctggtcaaacatggaatggggactcagaattcatgattgaag

SEQ ID NO: 804645 - DNA, 100 bp, Homo sapiens
agcagagaccatatagctgccctcagctgcactgtggcaaggcttttgcttccaaatacaagctgtataggtattagaaaactactcggatgctccaatg

SEQ ID NO: 804646 - DNA, 100 bp, Homo sapiens
gtcttatccaaccttgcgctgcatccgctcgacctcgtgaagatccgcttcgccgccaagaaggatcaagaaggtggagaagaaaagaaatctgtgcaaa

SEQ ID NO: 804647 - DNA, 100 bp, Homo sapiens
ccatgccaaacgcagcagccgttgccatggctgcaacacttacacagcagcaacagcctgctacaggttgtctgcattcaaaagagcattctattaaagc

SEQ ID NO: 804648 - DNA, 100 bp, Homo sapiens
gccacaaatgcaaatacttgtgcactgggagagggatcagtttcattcacggatgtgactgtggactttacccaggaggaatgggaacaactggacccct

SEQ ID NO: 804649 - DNA, 100 bp, Homo sapiens
ccagattgtcttggaagttccaaagttgcaacgatttctgtcgcacggggcaggcggttgcagttcgagccaaggcctttggattcagcgtcatatttta

SEQ ID NO: 804650 - DNA, 99 bp, Homo sapiens
aacaatctgtgactattaagaccatgttggaagaccctatcagatttggatatgtccttcatatttgattggatttacagtggtttcagcagtgtgcta

SEQ ID NO: 804651 - DNA, 98 bp, Homo sapiens
caagtctttaacactcttacagagtatattcaggttaatccctatatcctgaagaagaacatgatcctcatgacaaatcatttctatgcagcgatctt

SEQ ID NO: 804652 - DNA, 100 bp, Homo sapiens
cgggacaagtactggaaccgctttcgagacctcattgctatggacagtgctatcaccctgtggcagttccttcttcagctcctgcagaagcctcagaaca

SEQ ID NO: 804653 - DNA, 100 bp, Homo sapiens
gtcagcacccctgcagatcatcctggcgatctacttcctctggcagctgctggagccagttctgcttctcggcaaggagcgatttgctggtgtagacatc

SEQ ID NO: 804654 - DNA, 100 bp, Homo sapiens
gagcctgcagagcgcgcagtacctccgatgagctttgatccaaaccttctccacaacaatggacataatgggtaccctaatggtacttcagcagcactgc

SEQ ID NO: 804655 - DNA, 100 bp, Homo sapiens
aggtgaggacttactttcatgagtttggtcacgtgatgcatcagatttgtgcacaggaatgtgaattggacccttgctgcgaaggaagtacctgtaagct

SEQ ID NO: 804656 - DNA, 100 bp, Homo sapiens
gccttggacctaatgaggcgcctgcctccccagcaaatcgagaaaaacctcagcgacctgatcgacctggtatttgaaatatctcaccaaaaaatatttg

SEQ ID NO: 804657 - DNA, 50 bp, Homo sapiens
agacagatgggaaaaatatttgatcaagctctgggagggtctcacggaac

SEQ ID NO: 804658 - DNA, 99 bp, Homo sapiens
agaggatcatggcagctcctatgagatgcctgaaaacttcatgcctcctgttcccatcacatcaccaatcatgaacccgttgggtgacccccagtcaca

SEQ ID NO: 804659 - DNA, 143 bp, Homo sapiens
tgcacgtggaactgccccacatcaacctcctttccaagatggacctcattgagcattatgggaagctggccagtcgtctgggattgtattccaaaacttcccagtcagtctcaggagaagaaatagatgcaatggatgttcag

SEQ ID NO: 804660 - DNA, 100 bp, Homo sapiens
gtccagtccttggagatcgacctggactccatgagaaatctggaggaggtgcgccagtctgtaactcctgccgagccagtccagtactatttcacgctgg

SEQ ID NO: 804661 - DNA, 100 bp, Homo sapiens
ccactcattacatatgatgcctaccctaagtttatagaatctgccacaaaatgcattgatcactacaccaaacaatgtgtggaaaatgcagatttgcctg

SEQ ID NO: 804662 - DNA, 100 bp, Homo sapiens
aaagctttggatgaaggagcttcaaacccaaagaggattgagtcatcgggctccaatgcgtggggatgtttaccgccgtttatccgggatagagactcca

SEQ ID NO: 804663 - DNA, 100 bp, Homo sapiens
cctctcaagaaatctcaagatattaaagttactgctgttaaaaaggtcagtatgggaatcctttaaataaatatatcagacattatgaaggattatctta

SEQ ID NO: 804664 - DNA, 100 bp, Homo sapiens
agatggatgctacttcctattctattcacacaaaagatgttggacaatttctacaattttgcttcatcatttgctgtctctcaggcccagatgacaccaa

SEQ ID NO: 804665 - DNA, 100 bp, Homo sapiens
ccgacaggattcgttggctgccgtccccgctgctgtgcattgggatgttttcactccagaatgcaaattcaaggaatctgtgtttgaaaactactatgtg

SEQ ID NO: 804666 - DNA, 100 bp, Homo sapiens
gggaccgggacctgctgctggacccggcctgggagaagcagcagcgcaaggatgaccggaaagaagggatgaccgcgtttgtggaaaagagaaaggccaa

SEQ ID NO: 804667 - DNA, 99 bp, Homo sapiens
ctgtggtcactaatgtacaggcagaaaacgagaggctcaccgcagtcgtgcaggatctgaaggaggggggaccttccttggagcagaggtttgaatcct

SEQ ID NO: 804668 - DNA, 98 bp, Homo sapiens
gcgctggactggagcagaaccccaggactgcgcccccgggagcgggcgcccagagatatgggaaaatagtctccacaaaggcaattttggataagaca

SEQ ID NO: 804669 - DNA, 100 bp, Homo sapiens
ctggaattttgccgatttcatgactaaccagtgtcgccactgggacactgtgaaccaggagtgagtcggagctgccgcgctgcccaggccatggactgtg

SEQ ID NO: 804670 - DNA, 110 bp, Homo sapiens
cgggataaaggagctctacgcgtgggacaacagaagagcctccggcctctcctcctctccgtcaacacccacccaagtgaccaagcagcacacgtttcccctggaatcct

SEQ ID NO: 804671 - DNA, 98 bp, Homo sapiens
ataaacatgtggtacagagtgttgagaagtttattcagaaagaagaagaaaggcgtatggcatctgttttagccaaaaaagaggaagagaagaagcgg

SEQ ID NO: 804672 - DNA, 132 bp, Homo sapiens
tttgacgaaggtaattgggactcccatcaagtctccacacagctagcagccacgtggggcacttctccagaattaaagctatagagagtcccaacaaagaagatgatacccagtggctgacctactgggtag

SEQ ID NO: 804673 - DNA, 98 bp, Homo sapiens
acagcttgctttctgtcgtggcaatgttttgaaactggcaaaatcaggaagagagggctcgacgagaggaggaggagaacaggaggaaggctgaggat

SEQ ID NO: 804674 - DNA, 100 bp, Homo sapiens
gaagacttggccaggccgtgttccgtgtctctggattcaagtcccaggagtcctgaccagagagcagattggaaccaaccagatggctgtgtgtgccaaa

SEQ ID NO: 804675 - DNA, 100 bp, Homo sapiens
ggctcatattctacttcattcagaagatcaggtacacaaatgcacgcgacaggaaccaggacccagatgatgtggtaccagttggccaaagaagagcctg

SEQ ID NO: 804676 - DNA, 98 bp, Homo sapiens
ggggccacccttcctgcaggccccatcaggtgcagagctgtgggtctggttccaagacactgtcactgaattgctgctctctgaacactatagtcgtc

SEQ ID NO: 804677 - DNA, 100 bp, Homo sapiens
atgtatgtagctgttttgaatactcagaaatctgttctacaggaagatgctgagaaactgcggaaagaattgcatgaagcgcgtacttgctttgtaagtg

SEQ ID NO: 804678 - DNA, 100 bp, Homo sapiens
ttaaccaaaatagaccctggagtgaaaccattaagcttgtgcgtcaagtcatgatggcagttaaacagggaaaccaactgcagatgcaagtccacgaagg

SEQ ID NO: 804679 - DNA, 100 bp, Homo sapiens
cctgatttctgcagctctgtgtgaaggtggtaaattcactccagcagcaacctcaggctgcatccccttcagtaccagagccccactctttgactccagt

SEQ ID NO: 804680 - DNA, 100 bp, Homo sapiens
tgacccttacattgcagacctccttcaagtggctgataacagtggtggtatctccatcaaggcttctgcaaatatggacctcatgagggctgacatggga

SEQ ID NO: 804681 - DNA, 98 bp, Homo sapiens
ggcctcagcccccgcaaggatggcctttcctaccaggtatggaaaagttgaggccactcgcatattgttagagaaaggaaagtgcaatccaaaccttt

SEQ ID NO: 804682 - DNA, 100 bp, Homo sapiens
ggcgcacggacctgggacgcggagtcctgaagccggcggacggttttcgtacgggcggccgtgcgcgaggcgagatgcctgctctgtgcctgtatctgag

SEQ ID NO: 804683 - DNA, 100 bp, Homo sapiens
ggccagatgaggttcctgacggatcccatggtccattattgcctttaccaagtcgttacagaatgggctctcgagatacacctgaacttgttgcttatcc

SEQ ID NO: 804684 - DNA, 100 bp, Homo sapiens
ctggcctgggaaggccctttccccctgtccatggagatcctggaggttcctacatgaaatacagctgaactgtgctgttaacaagatgagtgtggacaac

SEQ ID NO: 804685 - DNA, 126 bp, Homo sapiens
catctacgagctgctggagcgcgtggaggagccggtgctgcagaaccagatccgggagcacgtcatcgccatcgaagttacagaatgtctgaaggggacagtgtgggagaatccgtccatgggaaa

SEQ ID NO: 804686 - DNA, 100 bp, Homo sapiens
actttacacattgtgctattcactctgctttacaagggatcagtgtccttcagggatgtggctatcgatttcagcagagaggaatggcggcacctggacc

SEQ ID NO: 804687 - DNA, 100 bp, Homo sapiens
aagggtagctgggactgaagtccctatgacctttccactagacgctagcattctggaggacagttgggacttgactcctgggagagttggctctcaaggt

SEQ ID NO: 804688 - DNA, 98 bp, Homo sapiens
gaaaggaagcaagcagttcagaagagccaaggaataaacatgcaatgaacccaaaaggaaccgagctgaagctgccatggaattcttacaagaattaa

SEQ ID NO: 804689 - DNA, 95 bp, Homo sapiens
ctgctcaacgtgaagatgatgaggatgaagacctttatgatgatccacttctacttattaaatagtgcctcgagtctttattggtaaagattgta

SEQ ID NO: 804690 - DNA, 98 bp, Homo sapiens
cggtcgcctggaggaccagtatttcccatggagggtgaaatgacaatggatgctctgttggctcgattgaaacttctgaatccagatgaccttagaga

SEQ ID NO: 804691 - DNA, 100 bp, Homo sapiens
gatccccttgcacaacgaggacgccttccagcacggcatctgctttgaggccaagatggactctgtgactacatgactaataaaatatggcagaaatgac

SEQ ID NO: 804692 - DNA, 100 bp, Homo sapiens
acttgcaagaaacctcaggacttgagtaacagcaacatggctatgcattcctgctgtttcaagatgaaagctctgtgcaggctctcattgatgcatgcat

SEQ ID NO: 804693 - DNA, 98 bp, Homo sapiens
aagacctctcctcattcttattgttttattagggcaatttgtctcaataaaagcccaggaagaagacgaggatgaaatgctttgtggtctacagccac

SEQ ID NO: 804694 - DNA, 114 bp, Homo sapiens
agagacgtgaaacatgtgaacactcaagtgaagcaaaagccttccatgattacgtccataattcagcagccaaatctttccctcgaaggtttgttttgcctttaaatgtcagtt

SEQ ID NO: 804695 - DNA, 101 bp, Homo sapiens
gtcactgaaagccctgacttggggaaggctgcgggctcggagccggagacgccgagctggggccggtccaagccttatgcatttgatcgggtgttccagtc

SEQ ID NO: 804696 - DNA, 100 bp, Homo sapiens
ttatactgtactgcccatgaaaaaggatgttgaccggacagcttcggggagttttgcctggctcacctgttactgaagaggaaccctgtcatgttcttcc

SEQ ID NO: 804697 - DNA, 100 bp, Homo sapiens
atcaaagccatcaaccagggcaactatggcgctcccagatcagctacaaatgccacctggtgctgcgccccatccccgagctgctgcgggcccccccaga

SEQ ID NO: 804698 - DNA, 100 bp, Homo sapiens
tgaaggagcggaaggttaatgttcttcagaagaagtctgaaccggacggcttttctcatttccacttgtacgtgtgcgctgcttttctcgtgagatggag

SEQ ID NO: 804699 - DNA, 98 bp, Homo sapiens
tttaaatctactgaagtgcagaaatcacaaagtacagctcagaatttgacttcaggtcaaagattctaaactgcctgcatataaggatctcggtaaaa

SEQ ID NO: 804700 - DNA, 100 bp, Homo sapiens
ctagaggtcggaaaacacgctatgacacaaaagttggcactgataaatggcccaagattactgattttgggcactccaagattttgggagagacctctct

SEQ ID NO: 804701 - DNA, 100 bp, Homo sapiens
tactgcttacctcattgaaacaagaaataattcagtggcatctcatgtagatgtaccactttcttattgcaactcagagtgcaattgtgatgaaagtcag

SEQ ID NO: 804702 - DNA, 100 bp, Homo sapiens
ctctctaaaattgctgcctctggtggggaagtggaaggttctcttgctgcaaatggccctaccaccttggttgataaagtttcaaatcccaaaactaatg

SEQ ID NO: 804703 - DNA, 108 bp, Homo sapiens
cgctacaaccaagagacaccaatggagatctgcctcaatggaacccctgctctggcctacctggcggttcagggagattactatggagatctggctgctcgcctgggc

SEQ ID NO: 804704 - DNA, 100 bp, Homo sapiens
tcaggaccatctgttcggaaccccagagcacgagtagtagtcttaagaatcagtgtactgttacccggacatacctattccttcacaagttctggttctt

SEQ ID NO: 804705 - DNA, 98 bp, Homo sapiens
attgctggtgaaatagaatcaaaggctgcaaacctcaataatttggtagtggaagcctatcaggtggttgtgagagctttgatcaaaacaaccttacc

SEQ ID NO: 804706 - DNA, 100 bp, Homo sapiens
aggcccctgccgtgtggacccgtaaaataaaatggacaaatgctgtgcttcatgaagttaaaagagaggggctccccgtggaacaaaggaatgaaatctt

SEQ ID NO: 804707 - DNA, 100 bp, Homo sapiens
ctgtgagcactccaagtgaagctggaagccaagactctggagatggcgccgtgggatctaggttgttgcttagaatatgctaccatgttggataaagaag

SEQ ID NO: 804708 - DNA, 98 bp, Homo sapiens
ttggtgttatgggaatgagatcctactactatggaaaattcatgcctgtaggtttaattgcaggtgccaggcagaggtggaggagacactgaagcgac

SEQ ID NO: 804709 - DNA, 100 bp, Homo sapiens
tccccaggtggacctggagactctcagggtcgaaaacggcggcagaccagcatgacagccaagaagtatgatgcgtttttggcctcagagtctctgatca

SEQ ID NO: 804710 - DNA, 100 bp, Homo sapiens
tttgctgtcagccatgaacggatggatgtgatgcctgctagccaaaaggctgcagacctattcacagacttggaaaatgcatttcaggggaagattgatg

SEQ ID NO: 804711 - DNA, 98 bp, Homo sapiens
ggcagtggccactctgcccaggagctgccgaccatcaggacgcctgcagacatttacaggaatctttctgaacctgtcatgacctatagacttcacaa

SEQ ID NO: 804712 - DNA, 101 bp, Homo sapiens
tgagggaagcccaggagaccaggcagctgcgctcttgacagccaggtaccaggaatgcagatgtaaacgtgctccccattccagaccacaaattaattgtc

SEQ ID NO: 804713 - DNA, 110 bp, Homo sapiens
cattgctgctcacctagataaccaggttccagttgagagtccgagagctatttcccgcaccaatgagaatgacccggcagttccggcgaggggggagcctcagcaggatt

SEQ ID NO: 804714 - DNA, 100 bp, Homo sapiens
gggacaccctggaagccaggaaatggttgggacaaacattcctatggttaccatggtgatgatgggcattcgttctgctcctcggggactggccagccct

SEQ ID NO: 804715 - DNA, 100 bp, Homo sapiens
gactatgcagtgcttgctgctgaacctgagctgcaagttggaattgatataatgaagactagttttccaggctttaccgccagcacctgttcagaatcac

SEQ ID NO: 804716 - DNA, 132 bp, Homo sapiens
tgtcccttgtcagtgccatggacactcagaccgctgcctccctggctctggcgtctgtgtggatggctcttgctcacccgagcctcacaaagataatcgctcaggaagtgtttcagccaatccggggcggct

SEQ ID NO: 804717 - DNA, 98 bp, Homo sapiens
ccgcgctgcttccacccaacttcctgttagtttggtgccctggttgtcagatgttggaaagcagtaggacggaacatactcttcgtggttgtgtatcc

SEQ ID NO: 804718 - DNA, 98 bp, Homo sapiens
gcagctattgactggtttgatggctgctgagaaactaggtgaaactgagaaacttagtataatgattgaagaatgtggaggcttagacaaaattgaag

SEQ ID NO: 804719 - DNA, 101 bp, Homo sapiens
cctggccagcgggacagcaggttcaacttcccaggatgggaagcagacgccacgggcacagagggaaggaagaagggagctgctggagcctgctaaccgcc

SEQ ID NO: 804720 - DNA, 98 bp, Homo sapiens
ctgaacagaagggcaagagaggtggatctgtgagggaaaagacccaataggataactcaagttactggtgactaataaaggtaccagaagaatatggc

SEQ ID NO: 804721 - DNA, 99 bp, Homo sapiens
ggggctgcgtgagcgagcagaggcttaaggtcttcagcggggcgctccaggaggcactcacagatataattggtgattacaactttcctctataaatta

SEQ ID NO: 804722 - DNA, 100 bp, Homo sapiens
ggtgcatgcgtcgtcggcctctgggcagcaggagttgatccctgaattttattatctccctgagatgtttgtcaacttcaataattataatcttggagtg

SEQ ID NO: 804723 - DNA, 100 bp, Homo sapiens
acagtccatatgtaaccaaatattatggatcctatctgaagacctgatggccaaaagaaaggaagaaaatttttcctctcctaaaaatgccaaaaggcca

SEQ ID NO: 804724 - DNA, 100 bp, Homo sapiens
tggaacaaaaaaaggagatgcctggcagccccgctctctgcagttgaatgcctttgagaacttgatgcataaaatttgcatgactcctcactcctttctg

SEQ ID NO: 804725 - DNA, 100 bp, Homo sapiens
tgctgaacagaagggcaagagaggtggatctgtgagggaaaagacccaataggataactcaagttactggattaaccacaatgaacggttggaattcctg

SEQ ID NO: 804726 - DNA, 100 bp, Homo sapiens
gtgaactgcacgataaaggaactcaggcgcctcttcttagttgatgatttagttgattctctgaaggtacaccagaggatcgcttcctggcagaatttgg

SEQ ID NO: 804727 - DNA, 100 bp, Homo sapiens
cagtggcgaagggaatcgcaaggctcttccctgaccattttctactgtccctgcgcgagttcgtgtctgggatgtccggccatttgcccccaaagagaga

SEQ ID NO: 804728 - DNA, 111 bp, Homo sapiens
tgggatcttttttcacatccagcccatgcggactgagcagccaaagcttgacagagattcagtgcaggactgtccacgtaactgccatgggaatggtgaatgtgtgtccgg

SEQ ID NO: 804729 - DNA, 100 bp, Homo sapiens
cgggagcgggtaccgggcgcgggcagagcgcggcggcgcggaatatgagttggaagtaaagagggtgcaagacattctttcgggaatagagaaaccacag

SEQ ID NO: 804730 - DNA, 100 bp, Homo sapiens
gacaagagcctcatccacaccgtgttgctgcaaaaggactatcagattggtgtgcccgtttaataaaagaatatggaaactgaacagccagaagaaacct

SEQ ID NO: 804731 - DNA, 74 bp, Homo sapiens
tgcagcagtcagcccaaaggaagattcgcttcaagctcagcttatcaatatgggtgttattcctaccttagtga

SEQ ID NO: 804732 - DNA, 98 bp, Homo sapiens
gcatcatctgggacagtgcagatccctgtttcagcagttcagctccaccaggtccctatcactgttcagtccatcgtcattcagtctctaaataaaac

SEQ ID NO: 804733 - DNA, 99 bp, Homo sapiens
tccagagctgaggactgcctgtttgcaggcacacaaaaaatccctttggacgattgaacccaatgaaggcatggttcctccagaaactgatgttcaact

SEQ ID NO: 804734 - DNA, 142 bp, Homo sapiens
gcggtggtggccttcgcggtggcgatgctcttcttggaaaaccagatccagaaactggaggagtcccgctcgaagctagtgtgctggaattgatgttcgtctgtgtgatgttggtgaggccatccaagaagttatggagtcc

SEQ ID NO: 804735 - DNA, 100 bp, Homo sapiens
tagctgcctgtacagaaaagaaaatccccgttgtttttcgattgcaagagatcagccaaatggccgatgacacagtggcagaactggacaggcatctggc

SEQ ID NO: 804736 - DNA, 101 bp, Homo sapiens
agagcccctgcctcccgctcctgcaggccaagactaaggggctgcagagcggggtggacattggcgtcaagtactcggagaagcaggagcggaatttcgac

SEQ ID NO: 804737 - DNA, 98 bp, Homo sapiens
cttccaaccaggggctgagcttctgcgctgtggagaagccaggtatccatcatcccacgtggcaaaggactaggttatgctcagtatttaccaaaaga

SEQ ID NO: 804738 - DNA, 99 bp, Homo sapiens
cctcttcagcaaacagccaacccatgagagtcgaattggagaacttgttggagtgctggtgaatcatttcaagaggtcagttgctctcccctgaaggaa

SEQ ID NO: 804739 - DNA, 100 bp, Homo sapiens
tggctttggctacacagcactggttgtttctggtgggatcgttggctatgtaaaaacaggttcagccgtctgtatatctccccagatacctgaaactgac

SEQ ID NO: 804740 - DNA, 100 bp, Homo sapiens
tcctgtcccacttgcacagaagtactttgaacttttccctcaggagcgaagccccctttggcaggtgggcccatctggggcagggaagagcacaattttg

SEQ ID NO: 804741 - DNA, 101 bp, Homo sapiens
ctcgacttctcctacagcttcctgctcagggaccgcagatgttcatggactgcagcccacaggccctgcccatcgcatcagaggacaccacggggcagcat

SEQ ID NO: 804742 - DNA, 98 bp, Homo sapiens
gccacgcagccgcggcttccggagccctcggggcggcggactggctcgcggtgcagcatgttggcagataaattgaacatgactccagaagaagctga

SEQ ID NO: 804743 - DNA, 100 bp, Homo sapiens
tctccgtctttgctaatggagtcgtgacttcaattcagactatttggagttttcctcgtcttactggatgtcactctcgtccttgccgacctaattttca

SEQ ID NO: 804744 - DNA, 100 bp, Homo sapiens
gagagcgacgagcagccggtcagcatgagcgagctctaccctctgcagatctcccccgtgtcttcctatgcagttggcttcagctgttctggaggctgtg

SEQ ID NO: 804745 - DNA, 112 bp, Homo sapiens
agtaccttccacaataccagtgctaatctgactgagagatcagataccatcagcataatgtcatcaatgcagtggaccagtgtgacatggggaacataaagatggtcacgat

SEQ ID NO: 804746 - DNA, 125 bp, Homo sapiens
ataagcaggaccagatgataccatgaagagaagtttacaggccctctattgccaactgttaatgggaagccgtgtccgccttttaagattgtgattctggatgaagcagattctatgacctcagc

SEQ ID NO: 804747 - DNA, 142 bp, Homo sapiens
gaacccacaaaaactcctggcagaacaagtagcactctctcagaagatcagatgagccgtcttgccaaggtagttaaaccagagagcaatgacaaagaaacagaagctgcgtatgaatcagatatccccgaggagctctgtg

SEQ ID NO: 804748 - DNA, 100 bp, Homo sapiens
aaatgtgctttttcatcttgaacaggtgacacttggacagaaacactggcctatgtgctcttctggggagttgcaagcattggaacattttttatcattc

SEQ ID NO: 804749 - DNA, 98 bp, Homo sapiens
tgaagctgccgaagtatgcattgccaaaggtaatagcctgcagctggtgttttgagaagccctactgctgaaaacttaacaattttgtgtaataaaaa

SEQ ID NO: 804750 - DNA, 100 bp, Homo sapiens
aaaggagcaagccaagcttccatgctcccgagcccaaagcccactacgagcctgctgaccgagcgcgagaggttatcaatactctggctgaccatcatca

SEQ ID NO: 804751 - DNA, 100 bp, Homo sapiens
ggatggcgtgcagcgcaaccacgagacggccttccaaggttcgagaacttgtcttggacaattgcaaatcaaatgatggaaaaattgagggcttaacagc

SEQ ID NO: 804752 - DNA, 99 bp, Homo sapiens
agtccccagcagctggcagaagaagcaacacgcaaacgagagctgaggctaatgaaaaacagcgggtcacagaaagtcgagagagccaaatgacgattg

SEQ ID NO: 804753 - DNA, 100 bp, Homo sapiens
atctcatgcacatctcacgggcccggaagccagcgttcatcctgggctccatgagggacgagaagcggacgggttgtggaaaccagaacttcgcctggag

SEQ ID NO: 804754 - DNA, 100 bp, Homo sapiens
gactcgagggtgacgctcgctccgctcgtcccgctcgtcatggcctacccgggatacggaggaggggcactggagatattattgctgtcatgataacaga

SEQ ID NO: 804755 - DNA, 100 bp, Homo sapiens
agacagtcctcgtcagcactgactttcagctatggaatcgcttcgagagctgtgcccaggagtgaacaaccagccctacctctgtgagagtggtcactgc

SEQ ID NO: 804756 - DNA, 98 bp, Homo sapiens
ggcgcacctggtagctttgggcttcaccatctttctgacagcgctgtcccggccaggaaccactgtggaggaagatgcagagtcagaagatgaagagg

SEQ ID NO: 804757 - DNA, 100 bp, Homo sapiens
ccttatttattccaatctcttgtgtggggtgttgcggggagctttggagatgaatcaaaaagaccctctggctgtggacaaaataatgaaggacctggac

SEQ ID NO: 804758 - DNA, 100 bp, Homo sapiens
ctctggcccccggaaaacctaaccatgaagacttgaacttaatacagcaagaaagaccatcaagtttaccagaatcaagtactggaaatgtttgatcatg

SEQ ID NO: 804759 - DNA, 98 bp, Homo sapiens
ggagctcccccaagagccggaaaggccaagtcctgtatctgccatgtctgtggcgtccacctcaacaggctgcattcctgcctctactgtgtcttctt

SEQ ID NO: 804760 - DNA, 99 bp, Homo sapiens
gagtttggagttactggagaaattctgccgagagggggcagtatttggcagtcgtattcagagataaacccctggagctatgggatgttaggacttgta

SEQ ID NO: 804761 - DNA, 98 bp, Homo sapiens
ggtagacctgtgggcacggacgcacgccactttttctctgctgatccagaactgcacagtgaatccaaaagaaagtatactgaaaagagtgaaggata

SEQ ID NO: 804762 - DNA, 100 bp, Homo sapiens
gtgtctaccgtgacctgccacgtctcccatttgactggcaacaagagtctgtacatagagctacttcctgtatgtccgtggttcagaccctgtattaaag

SEQ ID NO: 804763 - DNA, 99 bp, Homo sapiens
cccgccaggcgctctgaccactctccagcaccagcttccagttagtggatatagcacaccatccccagccaataacgaaggaggcccaacttcattcaa

SEQ ID NO: 804764 - DNA, 99 bp, Homo sapiens
tatctggagcaaggaaaagagccctggaatatgaagcaacatgagatggtggatgaacccacagcttcagcgccagtcagcaaagtaaataaatactgt

SEQ ID NO: 804765 - DNA, 100 bp, Homo sapiens
cttgagtgtgtatctctacatgcgctctttgaaagcgccccggaatgacctgtcgcctgccagctctggtggagccgccaccaaaatgcagattttcgtg

SEQ ID NO: 804766 - DNA, 117 bp, Homo sapiens
gcaggaccaccaggcatgccaggtcctaggggaagccctggccctcagggtgtcaaggttgtgaactaaaggccgacaaagattatcactttaaggtggataatgatgaaaatgagc

SEQ ID NO: 804767 - DNA, 100 bp, Homo sapiens
gaattgatctcagccgaataagcctggaaagttctgcatccttggaaggttccttaagccatggcttaagatgagttctgcattggacctgagactggag

SEQ ID NO: 804768 - DNA, 98 bp, Homo sapiens
aaccatcagattagccagcagacccagctacgtggactagagatggttccttcatcagcttcaggccaagttcgaagtcactatgtagactggagaat

SEQ ID NO: 804769 - DNA, 100 bp, Homo sapiens
ctgccagctgcgcgccgccagccagagggccgagagccgcggggagaaggccatcacccaggttgaagaagaggatgaacttgaatctggagaccaagag

SEQ ID NO: 804770 - DNA, 100 bp, Homo sapiens
ggtgcgggccctctggaccctggagtacaccccgcagcacagccgcgacttcaagtctccacaaaccggaggactacccccagactgcagtaagtgttgt

SEQ ID NO: 804771 - DNA, 99 bp, Homo sapiens
ggtatctgatcaagccaacaacagtgacggaatgcctccatacatctgaggaaactgaaacccagagaagttttgtaataacttgcccaggattacaca

SEQ ID NO: 804772 - DNA, 99 bp, Homo sapiens
agggatgcccccggccgggagcagaagtacatgctggggaccaatcaccaactcacggttgatctgttccagctgcaggtgaacaccctacgacgttat

SEQ ID NO: 804773 - DNA, 99 bp, Homo sapiens
ctcaacttctgctgcctgggcttcatcgccttggcctactccctcaaagaattacatgaacgacagccttcgcaccgacgtcttcgtgcggttccagcc

SEQ ID NO: 804774 - DNA, 99 bp, Homo sapiens
ttggagaatctcttaagttaaagggagaggaatcaaatgagtctgcagaatctagcagtaattgggaaaagcaggaaagtattgtactgaaattgcaaa

SEQ ID NO: 804775 - DNA, 98 bp, Homo sapiens
cagccggcgccgagggcttggaatctcgagcgggaaaagtattgactcggagacaaaaagaggccaagaccaagagtgacagtgggacagctgcccag

SEQ ID NO: 804776 - DNA, 98 bp, Homo sapiens
tggcgtccctcttcagttctctggagccccagattcaacccgtgtacgtgcctgtgcctaaagtgatctgtgaaaatggttcgctattcacttgaccc

SEQ ID NO: 804777 - DNA, 100 bp, Homo sapiens
gaaaaatataaatgcatacttccccttgtgacaagtggggatgagaatttgcaccatcctgggattgtaaacctggaatgtatgtttgaaaccccagaac

SEQ ID NO: 804778 - DNA, 100 bp, Homo sapiens
aaagataaagatggacctccagaaggctgctaccatcccagtgagccaaatctctaccattgcagagccccaaaggcttcctggagagctacgaggagat

SEQ ID NO: 804779 - DNA, 98 bp, Homo sapiens
ggcacaacggctgggagaggaaacttgatgcttctgggccaccatttgccagggcctcgctcgagattccaagaaaggtggtgtatgaccagctcaat

SEQ ID NO: 804780 - DNA, 98 bp, Homo sapiens
cgcagggggacggggaccagcagctgtcgccgccgctctcaggtccacaaggcgattacaatttccagtcccctaaccacagacctgactgcagagct

SEQ ID NO: 804781 - DNA, 98 bp, Homo sapiens
acagcctatgggtgaaatttggctttcattcatgaatgagacattgcctaagatactgagccatatcgccccagcattttgcatgagcagctgtagct

SEQ ID NO: 804782 - DNA, 100 bp, Homo sapiens
ttgaaaaattaagtgaattgatttggttggaatgctcttttaccgatgctttaacatacagccactagattggtgtgcccgtttaataaaagaatatgga

SEQ ID NO: 804783 - DNA, 118 bp, Homo sapiens
gcccttgtccgagctttaacagactcaacacccagagatcttgattattccagaaacctgatgttgttgttaaacgacaagaagctttagcagctgctcgactgaaaatgcaagaaga

SEQ ID NO: 804784 - DNA, 100 bp, Homo sapiens
actgtgcagattttcatccaagtggcacagtggtggccataggaacgcactcaggcaggaaataatgcaaaaggtgtcccaaggctcctgaccagtgaac

SEQ ID NO: 804785 - DNA, 98 bp, Homo sapiens
gggactctgctctgctgagatcaagcagattgtgtccgagtatgcagagaaggcctggttgcagtatgcttgaaatctgggatgtggaagacccttcc

SEQ ID NO: 804786 - DNA, 100 bp, Homo sapiens
actacaaacaagcaactgtgggcgacataaatacaggatctcacttgcttatctgaagaagattgtccaggctcatattgggaatgcttatgaggaaatt

SEQ ID NO: 804787 - DNA, 101 bp, Homo sapiens
aagacaggagcttcctactatggagaacaaactctacactacattgcaacaaatggagaaagtgctgtagtgcaattactgcacagccagagaacaacaca

SEQ ID NO: 804788 - DNA, 98 bp, Homo sapiens
gatgagcttctttcttctggcatcattaacggaccttttaccatgaatagttctactccttctacagaatcgagagctccagatcatgagaaagctag

SEQ ID NO: 804789 - DNA, 98 bp, Homo sapiens
cgctgccgttcggcgatgtggaggagtggacatccgccataacaaggaccgaaaggttcggcgcaaggagcccaagagccaggatatctacctgaggc

SEQ ID NO: 804790 - DNA, 100 bp, Homo sapiens
agagctattagagattgtgaagaagaatttcgatctccgccctggggtcattgtcaggtcacagagatgcggcggaccctgacgcctgccagctccccag

SEQ ID NO: 804791 - DNA, 99 bp, Homo sapiens
agaatctgaacttaggacagtattgagcttcctacaagctgttctggccagaatcaggcaagagggcacattgggagattcagcttgcaagagtcctga

SEQ ID NO: 804792 - DNA, 98 bp, Homo sapiens
gagaagtcaagaggacactgaagatcacagactgcctgctccttttcttcagaggatttgttaattatctaaaagtcagaaacatgtctgaaagtatg

SEQ ID NO: 804793 - DNA, 98 bp, Homo sapiens
gtgccttttcttgttcctactgtaaaggagatgggttagatgtttctggctcttgctgattgaattcctttggtgcagtttagcatgttcctctgtgt

SEQ ID NO: 804794 - DNA, 98 bp, Homo sapiens
gcagctgaaagagctattgaaaaaatgaatggaatgctcctaaatgatcgcaaagtaattggcagagggggtcgatttgggaggaaaggtgtggctat

SEQ ID NO: 804795 - DNA, 100 bp, Homo sapiens
agtaaaaataaccttcagcttggattgaggtcacggtctagatcacattctcgatccagaggaaggcgatactctcgctcacgcagcaggagcaggggac

SEQ ID NO: 804796 - DNA, 98 bp, Homo sapiens
agttaatattggagatgtatcctacaagttgaaaattcctaagaatccagaacttgtgccacagaactacaataataacaaggactgttctggtgtgt

SEQ ID NO: 804797 - DNA, 100 bp, Homo sapiens
ctgcccctgccatgaccactgtggagaacaaatccaagattagcacagacccgtgcctgtatattccacgctttgcgcacctgctggaattcggggagaa

SEQ ID NO: 804798 - DNA, 100 bp, Homo sapiens
actccctggatgttcttgccgatgcttctcaccgaaggtgttcaccagcacactgctctgccagaattgctttagatttccaaagagggaatgatgttgc

SEQ ID NO: 804799 - DNA, 123 bp, Homo sapiens
acctattgtccaaagcagtcgtaagaagaggtcccaatcccccactctttccgccctaatggaggtctccagtttcgatttagctttggagtcaaacccttctgaccatccaagggcaagcac

SEQ ID NO: 804800 - DNA, 99 bp, Homo sapiens
attgcataaagttttgggaggaaaccagacccttactgtaaatgtagagggcactaaaacattgccagatgatcatgcacagccagagaacaacacatc

SEQ ID NO: 804801 - DNA, 100 bp, Homo sapiens
tggattcagcttcaggaaaagctagagaagacagatgctcaaagcagtgaccaatggggctgaggctgtgtccactgaggctaagatgactgcctttcct

SEQ ID NO: 804802 - DNA, 51 bp, Homo sapiens
gtctgaaggactcgccccgcttcagctgaactagatgcagagcacgcccag

SEQ ID NO: 804803 - DNA, 131 bp, Homo sapiens
atgaaatgtacacagaatatctctccagtgccttcgtgggtctgtccttccctactgtttgtgagtgggcatcaactaccagcccccgaccgtggtccccgggggagacctggccaaggtgcagcgggccg

SEQ ID NO: 804804 - DNA, 98 bp, Homo sapiens
ctccccgctggagagggagccagaacagggaagaacggattcacacaggatggcttgcagaagacgctatttgactccattcccaactcacctgacaa

SEQ ID NO: 804805 - DNA, 99 bp, Homo sapiens
gaataaacatgcaatgaacccaaaaggctgaaatatcctcaagtgaaaaagaggaagatgtattcatgggaatggtttgcccatcaggtaccaaccctg

SEQ ID NO: 804806 - DNA, 100 bp, Homo sapiens
tatcatagctgtgatagctttgcttgctgtggggttgacccagaacaaagcattgccagaaaacgttaaggcgttcgtggcattcagggatgtggctgtg

SEQ ID NO: 804807 - DNA, 99 bp, Homo sapiens
tacacacagcaagttcctgcttctgggacagctctactgacgctgggaatggtgaggaagaaattctgccccactgtaacttgcaggtttttacctaca

SEQ ID NO: 804808 - DNA, 100 bp, Homo sapiens
agtgcttggagtgcagaactgaaagagaaatgacctccaccttcaacccccgagaatgtaaactgtccaagcaagaagggcaaaactatggcttcttcct

SEQ ID NO: 804809 - DNA, 98 bp, Homo sapiens
caagatccaggagcagctctgcctggtccaggactccaacgtccagcgggtattcccctacatctcagccatggtgaacaacggctccctcagctatg

SEQ ID NO: 804810 - DNA, 100 bp, Homo sapiens
tggaagacacaaaagatggcatctggctggttcagttgcattaaaatcctcccctactgaaagaaacggaggccaggataactgtagagcagcaaatttc

SEQ ID NO: 804811 - DNA, 100 bp, Homo sapiens
gatctgtacccagaaagagtcatacctggagcagcaggaatagaaggacagtctgtggaagtttccaatattgtggacatccgaaaagtatataaccgtg

SEQ ID NO: 804812 - DNA, 100 bp, Homo sapiens
catgtcctagaattgatactcagcagctggaccggcaaattaaagcaattatgaaagaagtcattccttttttgaaggagtgttcagcctgggtgttcct

SEQ ID NO: 804813 - DNA, 131 bp, Homo sapiens
gagtgaagctctccaatgtagatgatgatccttgctctgactacatcaatgccagctacatccctgccacacgtgtctacacttagcctctatccatggctacctgggcatcgtggagcttttggtgtcct

SEQ ID NO: 804814 - DNA, 99 bp, Homo sapiens
ctgcctgcgggaaggtgcggggagcggagccatggcctccgaagctgccagtaactcagattctagccatgaaggtcaagaggaatcttcaaaggaaaa

SEQ ID NO: 804815 - DNA, 98 bp, Homo sapiens
agcaccataggacagccaagcaccaacaccatggtcactgcagccagaggggtccagaagagagaggaggcactgcctccactacagcaactgcaccc

SEQ ID NO: 804816 - DNA, 99 bp, Homo sapiens
tccgctcctgaggcccccacaatgaagcagtcggacgcgtctccccaagaaaggccgccatggcatcagatgaaggcaaactttttgttggagggctga

SEQ ID NO: 804817 - DNA, 100 bp, Homo sapiens
ccgcagaccgtctggaaatgcgaatcctaaagcgtttcctcgcttgcattcagctcctctgtgtttgccgcctgggtgttgacttcaaaatcaaaactgt

SEQ ID NO: 804818 - DNA, 126 bp, Homo sapiens
ggctagcaagttcaccagcatccctgcagccttctggtataccatcgtcaccatgacaacactaggctggaaatggagaagcttcagctacaagcccttgagcaagagcacaagaagctggctgcc

SEQ ID NO: 804819 - DNA, 98 bp, Homo sapiens
ttcacggggctggctgctctgtgtctcttccaaggtgctggagaatctggtaaaagcaccattgtgaagcagatgaggatcctgcatgttaatgggtt

SEQ ID NO: 804820 - DNA, 100 bp, Homo sapiens
aagaagccaacagcgaggctttcagttctttggaattccattcttttccttattcttctgatgtggatccagtctgtgtcagcatttgctccaatttgca

SEQ ID NO: 804821 - DNA, 98 bp, Homo sapiens
ggggacgccgcgtgctcccaacgtcgccccggtttgacgcacacggcaccaaactgtcccgctcccggtcccctcggaggagagcccactcccctgag

SEQ ID NO: 804822 - DNA, 100 bp, Homo sapiens
gcaatgctgctttcaatgacctctggagacttgacctaaacagcaaagagtggatccgacctttggcttcaggaaattgacaatggcccttcagctatgc

SEQ ID NO: 804823 - DNA, 100 bp, Homo sapiens
tagtcttgggacccttgcatggtgtttcaaagggtggtgaagaactaagtacgctggggaggaggaggaggaagggagcggcagcagtgaaggatttgac

SEQ ID NO: 804824 - DNA, 99 bp, Homo sapiens
gaaaaaccatcgaagaatgaaaccggcttgttgtcttcaattaaaaaatttattaaaggaagcacacctaagctctttgaggagttgcaggagctgctg

SEQ ID NO: 804825 - DNA, 133 bp, Homo sapiens
gcagcagccgccgcaaccacagacgcagcaacaacagcagccggcccttgttaactacaacagaccatctgatactattcgttacttgtccttgcatgacaacaaatacatcagatactttcctggacatagc

SEQ ID NO: 804826 - DNA, 98 bp, Homo sapiens
agaagccccgaagggaggcagtgctttgaaaaccccagcagagtttaaaatattcagacttacagattccagtctgctgttagatgattattcatcca

SEQ ID NO: 804827 - DNA, 100 bp, Homo sapiens
gctcttgctggggggagcctgggcagaattaaacaaccaccatgtcgagcaaaaaggcaaagaccaagaccaccaagaagcgccctcagcgtgcaacatc

SEQ ID NO: 804828 - DNA, 98 bp, Homo sapiens
ccccgaaggaaaaggaggaattcgccgtgcccgagaatagctccgtccagcagtggcccaccctcaggaccctcaccacccatcagagaagcctgtca

SEQ ID NO: 804829 - DNA, 100 bp, Homo sapiens
gaagacccgtgtgaagctgccctccggctccaagaaggttatctcctcagccaacagagctgtggttgctttctgaaacaaaggtcttcactgcctcatc

SEQ ID NO: 804830 - DNA, 100 bp, Homo sapiens
tgttgcaccaggttcttcgaaaactgaagcagatgttgaacaacaagaacatgtatcgattcgagggcactgggttttcaaacattcctcaacttataga

SEQ ID NO: 804831 - DNA, 100 bp, Homo sapiens
agataccgaggaatgttgcacgcattagtgaggataggcagagaagaagggctgaaagcactctactcggggtgtgactgaagaaatatcaaatgtttcc

SEQ ID NO: 804832 - DNA, 99 bp, Homo sapiens
tccctgaggatatttaagtgggttcctgtgacagacagcaaggagattgagaggatccagaatccagatctctggaatagctaccaggcaaagaaaaaa

SEQ ID NO: 804833 - DNA, 100 bp, Homo sapiens
gcaagatggcggacgagaaggacagggaaggtacctagtagaactgggttgtatcaagccgctctgtgatctcctcacggtcatggactctaagattgta

SEQ ID NO: 804834 - DNA, 100 bp, Homo sapiens
ggcgagtcagtgactgaagcgcccgtccattccaagagtaaagccaatcccagctgaaggaatcaagtcaaatccttccaagcggcatagagaccgactt

SEQ ID NO: 804835 - DNA, 98 bp, Homo sapiens
acgggcggctccgcagtgaccggactcgggggagttccatgccattgcagtgtcaactaggcctcagttacttttcagtttgcccaaattgagcccat

SEQ ID NO: 804836 - DNA, 100 bp, Homo sapiens
agatcggcgctttgagaactgagcgcatgtggagttcggaggaaaagggctcagatagtgtgtgtaccatatcagtggcgtgtaactatgctcatcattg

SEQ ID NO: 804837 - DNA, 100 bp, Homo sapiens
ttttcctccacctaccttcccgaggagaagatgtcaaccggacactagaaggtggaaggaaacctcttcattatgcagcagattgtgggcagcttgaaat

SEQ ID NO: 804838 - DNA, 100 bp, Homo sapiens
ctcctccaacaaatccctcaacttgctaaaaatcaagagccgggtgtgggctgagccctgcctgattgatgctgccaaggaggagtacaacggggtgata

SEQ ID NO: 804839 - DNA, 100 bp, Homo sapiens
cccctcagcgagtggcagcagctgcctcaagaggagcaggtaggagcaacggtgggaatgccctctgaggaatgcagtgatgtccatcagtcacctctca

SEQ ID NO: 804840 - DNA, 100 bp, Homo sapiens
tcctagcaactctgcagtcttccttcaagaacccagtgacttgattgtaaaaatttacagagcggaatcatatgctggtctccaagagtttaaagcagcc

SEQ ID NO: 804841 - DNA, 100 bp, Homo sapiens
ggttgctaacccagaacactatattaaacatcccctacagaacagaaatcaatgtggactgaacataaatcacctgatggaaggacttactactacaaca

SEQ ID NO: 804842 - DNA, 98 bp, Homo sapiens
aaaactcaaaaaccatctggtgctgtggattgcaaccttgaatgaccgtatccttgatgagcttgacaaagacgatagtacccatgagtctctgtctc

SEQ ID NO: 804843 - DNA, 75 bp, Homo sapiens
agacagtggtcaatactggcccagcatttaccacacaatggcctgagcacagggatcagttgtccttgttttttt

SEQ ID NO: 804844 - DNA, 100 bp, Homo sapiens
ggttccttgcaaagggcacgtatagcattggtaaagaacgatcgtccagtggagctctgaacagcaacatggggtgcaaagtcctgctcaacattgggca

SEQ ID NO: 804845 - DNA, 100 bp, Homo sapiens
gaggaggatgaatttgatagagaggttagtagcaaagatgaagattttcttgacctttctgttgatgtggagcagaatacatccattacccactgtctaa

SEQ ID NO: 804846 - DNA, 98 bp, Homo sapiens
aacgcgacccgaggaggcggaagagcggcgccgcatgtgcagtctttgccaacaaaaaaaattaccaagaaacctattccagatgagcacctcattct

SEQ ID NO: 804847 - DNA, 122 bp, Homo sapiens
tgtgcaccaaccaggttctcattactgccagggctgtgcctacaaaaaagaattcaaagaagctttttcactatttgacaaagatggtgatggaactataacaacaaaggaattgggaactg

SEQ ID NO: 804848 - DNA, 98 bp, Homo sapiens
tccaccctccgggccttctgcccctgatcgcttggttttccttgcagtcgcctgctgctgtcgtcgggaggtgccgtgagcgatgtggagatgcagga

SEQ ID NO: 804849 - DNA, 98 bp, Homo sapiens
ccagtttatcacagggaaagtcctggagatcatcaatgctgtggtactgttgattttattgagtgccctggctgatccggatcagtataacttttcaa

SEQ ID NO: 804850 - DNA, 100 bp, Homo sapiens
acaggagtgggaggcgatccaggccttgacgcctgctcaacctgctgatgaacctgcagaaaaggctgatgaaccaatggaacattaagtgataagccag

SEQ ID NO: 804851 - DNA, 50 bp, Homo sapiens
ggtggtcattaagcggagatccgaggctctgaagtcactgcaggagcggc

SEQ ID NO: 804852 - DNA, 98 bp, Homo sapiens
agtcagtgatttccataaattgaagcaaacattctctggatattcaacaaatacaaagtatgacccacaccaaattaaagcagaaatagcaagtcgtc

SEQ ID NO: 804853 - DNA, 100 bp, Homo sapiens
tgggcactgaagggggactacaggttcgagagaaacaaaccatcaggcctcccagaaagtatccgggatctgaaaatcaccaaatcaccacatccggaca

SEQ ID NO: 804854 - DNA, 100 bp, Homo sapiens
cagggaacagccagacgagagcttcagccatcacgaggatgatttcggaacctggagaaaatatgcaggcctggggtagtctcctttctggactgagaag

SEQ ID NO: 804855 - DNA, 98 bp, Homo sapiens
gatattttgaaatggaagcctcccagtctgaattctgtggattttcgtctaaaaataacaagaatgggaggagaaggtccacagaatcttaatcagag

SEQ ID NO: 804856 - DNA, 101 bp, Homo sapiens
agagatctgctatttctttgtggagacatcaatgtatttcttaccaaaagacactttcaggtgttggtaaatcatgcttattgctacagtttacagacaag

SEQ ID NO: 804857 - DNA, 100 bp, Homo sapiens
gaggctcgcgggcggcgggcccgggaatagccaggccagaagaaggaaggcctgtggtgagtgggacaggaaatgacatcaccaccccaccgaacaagga

SEQ ID NO: 804858 - DNA, 98 bp, Homo sapiens
ccagcaagatgcggaggctgcctcggcggagcagaggaaccacacgctgatcatgataacgaaggaggcccaacttcattcaataaggagcctgacgg

SEQ ID NO: 804859 - DNA, 123 bp, Homo sapiens
taaaagatgtcacaaaggaaaacgaggaaagtcccaggatgactactgtgtcaagattctgagtaacaataagatatccgagctgaagaatggctcattttctgggttaagtctccttgaaag

SEQ ID NO: 804860 - DNA, 100 bp, Homo sapiens
atctccgcactctggagcataatgtgtgtggtacatggacggctatcacaacaaccgcttcgtacgtgagtacaagtccatggttgacttcatgaacacg

SEQ ID NO: 804861 - DNA, 98 bp, Homo sapiens
ggtgtttgatgcggtggtggaagctgtggcccgcgcatctctgccactttttactactaaactgaggatccatgatacatgtggggtccataacctcc

SEQ ID NO: 804862 - DNA, 98 bp, Homo sapiens
gaggagctccccagctggtggctggagcgaccccttgttctttggtggcgctgacttaattcagtgcacaaatgagatgaatgtgaacatcccacagt

SEQ ID NO: 804863 - DNA, 98 bp, Homo sapiens
tgacatctttgaagatgaaggattaattacacaaggtggaagcgatggtgagagatgagaacctcaagtttatgaagaatagagatgtatacagtagt

SEQ ID NO: 804864 - DNA, 99 bp, Homo sapiens
ttgttgaagagttcaactttcccagaagttgttctaacgctgcctttgctttaaaacagtattacttgcgaacaccttccaccatgaccacctcagcaa

SEQ ID NO: 804865 - DNA, 100 bp, Homo sapiens
aagatttcattttttgctatgtttctcatgtatctgcttgccgccctctttggatacctaacattttacggagagaacattgaaagtattctctaagcta

SEQ ID NO: 804866 - DNA, 100 bp, Homo sapiens
cagaattatacctagaagtctactaatggacagttagtcacccacctacatgttgagctttcagtgccaatggaaaagatatcattgtcgactttcccca

SEQ ID NO: 804867 - DNA, 100 bp, Homo sapiens
ctcggtgtcaaagccaagacataaactcaaccccttctcttccaaaagatatgttgatgatgtgatcagccgcattgacaggatgtttcctgaaatgtcc

SEQ ID NO: 804868 - DNA, 98 bp, Homo sapiens
ctggcagtcccgggctcgagccccgccctgccgccagccagggtctccaactgaattccttgaagagaaaatggcctaccaggaatacccaaatagcc

SEQ ID NO: 804869 - DNA, 100 bp, Homo sapiens
gcaatagtgagccaaccacctgggccagtattatcaggcatggagatgctactgatgtcaggagaaaccctaaagcaggcagcagctcagaagtcccagc

SEQ ID NO: 804870 - DNA, 98 bp, Homo sapiens
ggcaagttcgatgaattagccacgataaacaggggtcacatgacgacagaagccaagagggctgcaaagatggaaaagaagatgaaaattttgcttgg

SEQ ID NO: 804871 - DNA, 100 bp, Homo sapiens
cagttactcaaactgaaacgtctcctgcatcagagatgaggatgacatcaatgatgtgacttctatggcaggggtcaaccttaatgaagaaaatgcctgc

SEQ ID NO: 804872 - DNA, 99 bp, Homo sapiens
gaaaatggcggtgtctacagtgttctcgacttcgtcgctgtgatggaatggggagaagatattaaagcagtttcaaaagatgaagcagtgatgttggtg

SEQ ID NO: 804873 - DNA, 100 bp, Homo sapiens
ggaaacgccgaggaacccggctgaggcggcagtgccggtggtggtgtgcacattgagccccggtatagacagttcccccagctgaccagatcccaggtgt

SEQ ID NO: 804874 - DNA, 131 bp, Homo sapiens
agcgagctgagtggttgtgtggtcgcgtctcggaaaccggtagcgcttgcagcatggttgcagattttaaagatgcccttgccagagtatatggagtgatacccaaaatccagtgccttccaccaagccag

SEQ ID NO: 804875 - DNA, 100 bp, Homo sapiens
aagtgatagccaagatgaagttgaaaaaggaattccaaagtctgaatcagaggccacctcagagagagtgttggaacgccgcgatggctgcgcagggaga

SEQ ID NO: 804876 - DNA, 100 bp, Homo sapiens
tgttccaccagagtcattgcaggaagtggatgagttccacctcattttagagtatcaagcagacatgccaatatttggtttctgtccagcccatgatgat

SEQ ID NO: 804877 - DNA, 100 bp, Homo sapiens
tttgctgagaatgcagccgtgtgacagtaactgaacattggtctaaagtctttccaaaaggtcaaggttcacaaggtttttcgttggaatatacgttgca

SEQ ID NO: 804878 - DNA, 106 bp, Homo sapiens
cacatggtgtctgggcccttggcactccggctgctgaccctggggctgtccctcctgcatgccgatgtggttccaaatgcaaccatccgcaatgtgcttcgcgaga

SEQ ID NO: 804879 - DNA, 100 bp, Homo sapiens
ggcaactattgtgcacaaatgaagatgtttccagccctgcctcggcggaccaaaggtggaaggactaaaagtggtggagattgagaaatgcaagagtgac

SEQ ID NO: 804880 - DNA, 99 bp, Homo sapiens
cgcagtcggcaaggagagacgtcgctgaggggcttgcctgaagcgaggggtctagaattacggagtcaacaaagcaaacctcaagatgcctcttgtctg

SEQ ID NO: 804881 - DNA, 98 bp, Homo sapiens
gttcggcttccacacggtgacgtgctgcggcttcatcccgcaggcccattacgcagtccaggcaagaagatcccggagcatcactaggaaaagaaagc

SEQ ID NO: 804882 - DNA, 100 bp, Homo sapiens
tacaggaacaatattgatgatgtagtaagattagatcctgtgctgaaagagaaaccaagaaaaaagatgacattccagaagaagacaaaggaaatgtaaa

SEQ ID NO: 804883 - DNA, 98 bp, Homo sapiens
gatctcgaggaagttctcgtcctgacagatctccagctattgaaggaaatcgtggatgggaatgtgaagatgaccctgggcatgatctggaccatcat

SEQ ID NO: 804884 - DNA, 98 bp, Homo sapiens
ggtggtttcttgtgaggacgcggcagcccgtggagtcggctgagggaaaagcgaggcaaggcaggcggaatcgcctaccagaggaatgacgatgatga

SEQ ID NO: 804885 - DNA, 100 bp, Homo sapiens
gcaaggcagaaccaccccagtgcacctccctggcctggtctgctgatggccagggtgaaaatcctatttataagagtgccgtaacaactgtggtcaatcc

SEQ ID NO: 804886 - DNA, 98 bp, Homo sapiens
agcttccacagctggttgatatggctgctcagttgtctgtgctgtgaatgccctcgcccaccatgtgctcaacaaggacctcaaggacattgttggtg

SEQ ID NO: 804887 - DNA, 99 bp, Homo sapiens
tccttgggcccatacatgagagaaacctcacattgctcctgctgctgctgcaggcttcctggactgggtccccaagaagatgcagcgggtgggctgtgt

SEQ ID NO: 804888 - DNA, 51 bp, Homo sapiens
gggccattgaagacatcatcacaggcccctacggtgagcgggacgaccagc

SEQ ID NO: 804889 - DNA, 100 bp, Homo sapiens
tggatgcttaggagcgcgactcaaaactacacccctgacgaccctggagggtactgccagggggatggttaccgcatcggctttggccagtgtgctggaa

SEQ ID NO: 804890 - DNA, 100 bp, Homo sapiens
ccaggtccagccaatgcattcagaagccaaaatggactgtggaaacaacgagcttcaatttgttgctgaagacagatgatgactgttacatagacctcga

SEQ ID NO: 804891 - DNA, 99 bp, Homo sapiens
tttatccagtttcctggatggaccaagggaactctaatgatccaggacaaagaagttaccctggagtatgtatcaagcctggatttttggtactgcaaa

SEQ ID NO: 804892 - DNA, 100 bp, Homo sapiens
cacagaatttcagcagttctctgatttttatattttattcctcttcctatccaatccctgccttttgagtccaggtggcaatggcaacgagggcagcgtc

SEQ ID NO: 804893 - DNA, 99 bp, Homo sapiens
atgcttgaggcctggaatttaaacctgagccactatctgaaggcatctaataggattcaggaatcaaagaatcagtgtactcaggtggtacaggaaaga

SEQ ID NO: 804894 - DNA, 100 bp, Homo sapiens
tcctggagataaaggcaaggatggattaccgggacaacaaggccttcccggatctaagggtatggaaaagttgaggccactcgcatattgttagagaaag

SEQ ID NO: 804895 - DNA, 100 bp, Homo sapiens
ctcctgagtagcttggattacagcgtggccagcagcagccgggagaacccgattcatatctgggacgcattcactggagagctccgggcttcctttcgcg

SEQ ID NO: 804896 - DNA, 100 bp, Homo sapiens
ctacctgtcatttcaatcacagcagcaaaaccttcatggtgatccatggctggacggaagaaaccaatagttttctgaaagcgattgaagaagccaataa

SEQ ID NO: 804897 - DNA, 100 bp, Homo sapiens
agtgctgctcctccagggaccgatccgtatactgcagcaggattggctgcagcagctacattagcaggatgaaacgaggaggaagagatagtgaccgtaa

SEQ ID NO: 804898 - DNA, 100 bp, Homo sapiens
gaaaccaacagacaatgccaatttacgtgtcattatggaactacttatgagatgctgtcttcgcaggtgccatgcctacaatggcaagcgtcaagctgtc

SEQ ID NO: 804899 - DNA, 101 bp, Homo sapiens
cacgccagccgcaccatgccgctcctaagcctgcacagccgcggcggcagcagcagtgagaggttgtgcagcctgactctgaagaagctggtggtcttcaa

SEQ ID NO: 804900 - DNA, 112 bp, Homo sapiens
ctcaagccagcatggctcacaccacaaaggttaacggcagtgcctcagcctcctgatttgtatgataccaacacatccctcagtatgtctcgagatgcctctgtatttcaag

SEQ ID NO: 804901 - DNA, 100 bp, Homo sapiens
agaccgtgaagattccaagttcaggagaactcgaccgatatggctcgtggacagcagaaaattcagtctcagcagaaaaatgccaaaaagcaagctggac

SEQ ID NO: 804902 - DNA, 100 bp, Homo sapiens
aaaacagcaagcgcagagccaaacagccaggcaggcaaagatgccttttgatgccaacaaactgtattgcagtgaagtgctggccatattgctccaggac

SEQ ID NO: 804903 - DNA, 100 bp, Homo sapiens
ccaccacgagcgcctcttcaagccaggctccaagtagcctgtataccagcacggccaggttggcagagtcagcatatatgattccaaaaggcaatccggg

SEQ ID NO: 804904 - DNA, 99 bp, Homo sapiens
acaagtcctaaatgccgactcagtggaacaatcttttgttggattgaaacagctaatcgatggcttaaattccttggtccttgatttagattttcctgc

SEQ ID NO: 804905 - DNA, 98 bp, Homo sapiens
taatgaacatccttcccgaagaatcactgatgagttcatcgagaagagtgtctctgaggccctggcatcttttaatgctgatcccaaagaactaatca

SEQ ID NO: 804906 - DNA, 129 bp, Homo sapiens
tctgatctcaccaccctggtggcctttccctccagctctgtctatcctaccaaggtacaccaggggttggaaaaaccacactaggcaaagaacttgcgtcaaaatcaggactgaaatacattaatgtgg

SEQ ID NO: 804907 - DNA, 100 bp, Homo sapiens
ggaagatactaatgaaatagactgggaagatcttgctagtgccataggccatgtgatgccaagaggctcaggaactggcatttacagcaatgctgcacca

SEQ ID NO: 804908 - DNA, 99 bp, Homo sapiens
caaggcctcagcatacacaggaatgttgtcttctagatatgccactgatacatggatgattgtcttttgaaagtgtggtatcctatgactggttggaag

SEQ ID NO: 804909 - DNA, 100 bp, Homo sapiens
acgtgtaccagtgtgtgttgatcttggcttgattcagtctgccttgtaacaggcatggatgagttgatggaggtgtctttctcgcccctggcggccacag

SEQ ID NO: 804910 - DNA, 98 bp, Homo sapiens
tttagctacaaacatttatctaaggcctaactccacccaccactcctcctcataaagccaaccaagataacccttttagggcttctccaaagctgaag

SEQ ID NO: 804911 - DNA, 98 bp, Homo sapiens
aaaagcgagcctcttctgataactcaggatttacttgaaatgaaaggagattccaacctacttcaggttcttgcatacactgagggacttcacggaaa

SEQ ID NO: 804912 - DNA, 100 bp, Homo sapiens
ggaaatggctgcaggttcagagttgtatctcccacttcacccttctagaccatcccagaagatctataagatttcatctgggaaatcactaggagttctt

SEQ ID NO: 804913 - DNA, 98 bp, Homo sapiens
tgttcaggataatggaggcctggactctgaggaatcctatccatatgaggcaacagtctgtgtgaaaatgtgtgaccctgccaaaggagcagctggcc

SEQ ID NO: 804914 - DNA, 98 bp, Homo sapiens
tgaccgagtgcttcctgagccccagcactactgcagtcttcagttaagcaacaagtagaagctattgaaaaacagtacatttctgcaattgagaaaca

SEQ ID NO: 804915 - DNA, 113 bp, Homo sapiens
tctgccaccatcttcgacttgagcgaagttttatgcaaggccctaaaaagcaccttggggtttcctttgatacggtttgaagacgctgtgattaatctagatccattcactcg

SEQ ID NO: 804916 - DNA, 100 bp, Homo sapiens
tgaagagtcctgaccacaatggggaggacaacttcgcccgggacttcatggttgaattctcttacccgcccctgattccaggagatggacatgacagcca

SEQ ID NO: 804917 - DNA, 100 bp, Homo sapiens
acagtcgaaaagaatactgtgaattatgcaagcacagatttgcttttacaccaatcataggttagcttttcaagacacttcctgcatctctgacctgttg

SEQ ID NO: 804918 - DNA, 100 bp, Homo sapiens
ggagagaggtacctctccttttccctctccctttccctaagggaaaggaaaacctcttcagcgcaaggtgaaaccacctaagaagcaagaggaaaaggag

SEQ ID NO: 804919 - DNA, 100 bp, Homo sapiens
ggctgctcccatcattgatgtggtgcgatcgatgatggatggcccaggagagaatgatcctgatttgaaacctgcagaccaccctcgcttctgtgaagag

SEQ ID NO: 804920 - DNA, 98 bp, Homo sapiens
aacaaccttctgtgagcctagggacccatttctcctcctttgacagggacatcagtggagccttctcagacccacagaagactgtgcagtctttgtaa

SEQ ID NO: 804921 - DNA, 127 bp, Homo sapiens
cccgcatctgctgcccagcaacgagtgcgtggagctcttcagaaccgcctacttctgcagaggcaggccatccgggccacctttagaaacacggaaaggggtgccctcctaaccacccactacatgg

SEQ ID NO: 804922 - DNA, 98 bp, Homo sapiens
ctcgacctgctaacagaactggaccttttcgtgtcaaatcaacagtgccttgacatctttccacactgctttggaacttgcagtagaccagagagaaa

SEQ ID NO: 804923 - DNA, 100 bp, Homo sapiens
cgtgaccagtgaaattggagcagaggaagctgaggaagttggagttgaacacttgttacgttggtagctggcagtgttgtgatggcttttgaagaagtat

SEQ ID NO: 804924 - DNA, 98 bp, Homo sapiens
gtgtaaccaccatcaaaaccattgaagaaaattcttttgggagccaaacccacggatacagttgatatattagttggatggcatatagatcatactca

SEQ ID NO: 804925 - DNA, 144 bp, Homo sapiens
gcaccgagtgtccctgcgtgcattccggaaagcgctaccctcccggcacctccctctctcgagactgcaacacctgaataaaagccagggatccatctttgtccggatacacgccccgtggcaggtgctggccagagaggcaga

SEQ ID NO: 804926 - DNA, 99 bp, Homo sapiens
atggagacacggcttcccccaaggaatatacagcccgagcgggaagaagttccgcagcaagccgcagctggcgcgctacctgggcggctccatggacct

SEQ ID NO: 804927 - DNA, 100 bp, Homo sapiens
gcacctggaaaggagccagaaatgtgaagtgctagctgaaggatgagcagcagctagccaggcaaagggattatcttgaacacataacctccattggccc

SEQ ID NO: 804928 - DNA, 100 bp, Homo sapiens
caaaaagaagctgcttgggcaatcagcaacttaacaataagtggcagaaaagatcagtatgaattacttacacagatgaagtccactttcgaaaagaaga

SEQ ID NO: 804929 - DNA, 100 bp, Homo sapiens
gaacagaaagaagaaaagaaagatgcagaggaagaggaaagcgaactgaccccaagactgcttctgagacagaaacagatatctgtgctgaatgggagat

SEQ ID NO: 804930 - DNA, 100 bp, Homo sapiens
atggggcccacaggaaggccttccgggagtctgtgcgacctggctgggagtacattggccggaagatgcaacctcaagcccagcagcgaagagtcacccc

SEQ ID NO: 804931 - DNA, 100 bp, Homo sapiens
aagaagaagaaaaacgagcactacgttatttagaaacaagacgagaatgtaactccgttgaagcatggatcagcgtcccctttgcattgtcacatcctgc

SEQ ID NO: 804932 - DNA, 100 bp, Homo sapiens
caagcggttgtcccagcgcctcaaagtgcccaaggagcgcctggctcttctccacaaagacacctattactataacaagcgcattctgcacaagaccaag

SEQ ID NO: 804933 - DNA, 99 bp, Homo sapiens
accagacaaatcaaattagtggttttgggaacagagttcagaggcagcagaaactggagttagtgaaaatgaagagaaccctgtgaggattatttcagt

SEQ ID NO: 804934 - DNA, 98 bp, Homo sapiens
ttgggctgaactgcagtgggagaggagaagagatgctggcgtgaaggggtgtggcagagaagacacagcttctgaaattgagtgtacctgctactttt

SEQ ID NO: 804935 - DNA, 98 bp, Homo sapiens
ctggagtcgccgggactcaccagcggcagcgacaccccgcagcaggacatgactgcaacctgcctgagaaccctctgttcattgcatgtggcggccag

SEQ ID NO: 804936 - DNA, 100 bp, Homo sapiens
gatcaagttctcgtggagtcagacaatgagcactctggcccccagaagcttctccacattgcccaggagctcctgcacaccgaggagacctatgtgaagc

SEQ ID NO: 804937 - DNA, 51 bp, Homo sapiens
cctggtcatcttctatttccaaaacaagttggatggcttgaggactggtac

SEQ ID NO: 804938 - DNA, 100 bp, Homo sapiens
ataatcggaatgtgatcacagagcctatttacccagaagtagtccatatgggaatgcagagagcaaccaatgtcacctaccaagcccatcatgtcagcag

SEQ ID NO: 804939 - DNA, 99 bp, Homo sapiens
ccttagcacaggaggctctgaagtggagaacgaaggttgttcctcaaagtcattcaagctgtactcgccgaaggagcccccgaacggcaacgcctttcc

SEQ ID NO: 804940 - DNA, 100 bp, Homo sapiens
agcacaggggaaaacgaacaagttagtcgcagccagcaacgagaggctccggggagaccttggggacttctttgtcggctgcatcttcacggcagaactg

SEQ ID NO: 804941 - DNA, 100 bp, Homo sapiens
ccggatgggcagagaaacctaagtggcaaggtgatcttgagagtgacagagcagtatagctgtgactatggatctggcagattctttatcctttgtggac

SEQ ID NO: 804942 - DNA, 100 bp, Homo sapiens
cgcagggcacggtgggcgcctacctggttttgatggacatgtttgatcaggatgacataggtttggtttctctctgtgaagatgaacctagttcttctgg

SEQ ID NO: 804943 - DNA, 98 bp, Homo sapiens
atgctggagaattataggaacctggtctccctgggatagccgcttcccaaagatcctggagaacctaagactccaaaaacgtggtactggaggagtgg

SEQ ID NO: 804944 - DNA, 100 bp, Homo sapiens
ccagtccttttctttgtatgtcaagtatcaagtggccatacaccaggatccacccgatgaatgtgggaagactgaggtgctgctacccccgtatgatgat

SEQ ID NO: 804945 - DNA, 98 bp, Homo sapiens
accactgcgagtactgcttcaccaggtaaagaacaagcacctttggagatgagtatgcatccagcggcaagcgctccactctcagtctttactaagga

SEQ ID NO: 804946 - DNA, 100 bp, Homo sapiens
gatgaagagaaaggcccggagactgcctctgtgtcctttgtcccaatagtaacaactccctcctggcctttccgggcacgcacacgggccatgtgcagct

SEQ ID NO: 804947 - DNA, 100 bp, Homo sapiens
cttgatgggactctaccatggtcaggtcctgtgcaagaagaataaatttggagctccacagaaggatgttaaaccaacatatgctactccaaaagttcta

SEQ ID NO: 804948 - DNA, 100 bp, Homo sapiens
actgaggccctggcccagagggacaagaatcactagatttgatctacttggcgactttggaaggtttaattggctgggaaatttctatattgtattatcc

SEQ ID NO: 804949 - DNA, 114 bp, Homo sapiens
ccgagctccgggtccgcggcggagcgagcgagcggccggcaggttgggaggagcggccgaagtgcgacttcatgatagcatatcagaagagggctttcactacttggtgtttga

SEQ ID NO: 804950 - DNA, 100 bp, Homo sapiens
ctttttggatcggcatctagtctttccgcttcttgaatttctctctgtaaaggaggaaggaaaagctgatgcgatgctctcagtgccgcgtcgccaaata

SEQ ID NO: 804951 - DNA, 99 bp, Homo sapiens
tcaaggagagcgaagtcaaggccctgtgcgctaaggccagtggtatgtgtgcaacagagagaaattatgcgaatcactccaggctgtctttgttcagag

SEQ ID NO: 804952 - DNA, 100 bp, Homo sapiens
ttcgacatcagcgaggatgacattgatgatggattcaggagactgtttgcccagttggcaggagagaggcatgaaagtcattgagagtcgagcccaaaaa

SEQ ID NO: 804953 - DNA, 98 bp, Homo sapiens
ccggaggacatgcgggagagagaatgagccagagggacacgctggtgcatctgtttgccggaggataaaccgagaaaactggtgtacaatagagccat

SEQ ID NO: 804954 - DNA, 99 bp, Homo sapiens
agaaagtattgcaggacaagagatttaaggagagacagcgtctggagaccatcctcagtctctgtgctgaatacacaaagcctgacagtcgcttatcta

SEQ ID NO: 804955 - DNA, 100 bp, Homo sapiens
gagccaactagcatggaagtgcaggtttgctgtaatggcacaagagtatttgtgcagaaagaaattcttgataaatttacagaggaagtggtgaaacaga

SEQ ID NO: 804956 - DNA, 98 bp, Homo sapiens
aagagagccgggggcgccaactccaacgtgttctccatgttcgaacagacccaaatccaggaatttaaggaggtctagaattacggagtcaacaaagc

SEQ ID NO: 804957 - DNA, 98 bp, Homo sapiens
tctccagggttctttggggcccgagatctaaagcgggaagccagtatctgtcatatgctgaaacatccacacattgtagagttattggagacatatag

SEQ ID NO: 804958 - DNA, 139 bp, Homo sapiens
ctcacacccatgcctatgatattcttctcctggttaatcaagaattctctatttctgctccgtcatccatgccactgtttctgctgatgtactccacggttctgtgcagctattacaattcagccctgacgacagcagt

SEQ ID NO: 804959 - DNA, 99 bp, Homo sapiens
atcagttaaggagcttgatttgtttttggcatactacgtgcaggagcaagaacatctgctcaaattaatgaccatgggggatatgaagaccccagactt

SEQ ID NO: 804960 - DNA, 100 bp, Homo sapiens
accgcacctgggccgaggctgcccgcctgataaataggatttaccaatccttggatgaagtgcttgggaagtctttaagtgccataatcaactgccattt

SEQ ID NO: 804961 - DNA, 51 bp, Homo sapiens
cgagcgcggtcgagatcgccatgcctacccctctaagcgaaagacatgagg

SEQ ID NO: 804962 - DNA, 99 bp, Homo sapiens
gcagagctggccacaatatgaggaagtattttgaaaaaaagtggacagatactttcaaagtactgctagttgaacagctcttccgcaaggagttccaac

SEQ ID NO: 804963 - DNA, 100 bp, Homo sapiens
ctacaaggcttttgaagaagcagctgaacacttccagccttacatcaaattctttgccacctttgacaaagggctgtggacgtggctggaggagctgcag

SEQ ID NO: 804964 - DNA, 100 bp, Homo sapiens
acactggatttgatagaaaaaggatggcattccctgtggatatgctggaaaattgcagccatgaggaattggaaaattctgctgaagattacatgtcaga

SEQ ID NO: 804965 - DNA, 98 bp, Homo sapiens
ctgccaagagacatgttagaaggacaagtcctgagggagtctaacaagttagcagaaatggaagaaccacccttgcttccaggagaaaatattaaaga

SEQ ID NO: 804966 - DNA, 100 bp, Homo sapiens
tcagtggaaaggagagctaccatcactaaggacgagcctgtggagtgggagacacctgacctttctcaagctgagattgagcagaagatcaaggagtaca

SEQ ID NO: 804967 - DNA, 98 bp, Homo sapiens
ggctgcctgcgcagcctcttctacctgcacaacgaactgggcaacatctacacgcacgtgtctttggtgcaacactaacaaggcttgtctggactacc

SEQ ID NO: 804968 - DNA, 100 bp, Homo sapiens
gcgatggttacattgaatactacatatgtcgagggaatgcagaaagagttaaggaaggcagaacgcgtatcacaatgtgactgcagagcagctctttttg

SEQ ID NO: 804969 - DNA, 100 bp, Homo sapiens
atcctgcggcagaagccgagttcaacatcctcctggccaccgactcctacaagatccatttgaaccacagcgacgtctccccgcgaagaaaagtcgacaa

SEQ ID NO: 804970 - DNA, 100 bp, Homo sapiens
tttcatggatgcccctgtttctggtggtgtcagctgtgatgcatgtttaaaaggaaattttcgaggtcgcagatataagtgtttaatttgctacgattac

SEQ ID NO: 804971 - DNA, 100 bp, Homo sapiens
aaggccaggggagacctgggtgccttcagcagagctttcaccaacaatcaccagtggtttacacaacattgcaaggagcattgaaactcgaaactactca

SEQ ID NO: 804972 - DNA, 100 bp, Homo sapiens
agcctaaacgtcagaaatccagtactaaactttctgagcttcatgacaatcaggacggtcttgtgatgctcacatagtagaatggtccccaagaggagag

SEQ ID NO: 804973 - DNA, 100 bp, Homo sapiens
gggctccatccgggaagccggtggggccttcggaaagagagagcaggctgaagaggaacgatatttccgcttagcagtgtctgcaaaaacgaatcttttc

SEQ ID NO: 804974 - DNA, 100 bp, Homo sapiens
gtcgcaaaacttatgtgaccccgcggagacccttcgagaaatctcgtctcgaccaagagctgaagctgatcggcaacgcggtaaaaatattgcttcggtg

SEQ ID NO: 804975 - DNA, 99 bp, Homo sapiens
cctagccctaccggactacgagtatctgggtttggtgcaagtgccaaagttgtgcatttcctgggacgagtcaaaccatggaattatacttatgatccc

SEQ ID NO: 804976 - DNA, 100 bp, Homo sapiens
gattcagggaataggagctggggagcccttctgcgccacaggatggacagattcctggtgaaaggggctcaagggggccttttgaggaagcaggaggagc

SEQ ID NO: 804977 - DNA, 100 bp, Homo sapiens
gggcttcatcatcaagcagatgaaggaggatggcgcctgtctcttccgggctgtagttggaggacgagtaagtcgtgaattaaattatactcgccagaag

SEQ ID NO: 804978 - DNA, 100 bp, Homo sapiens
atcgcccagagccagcacaaccagagcctcgagtgccacgccttcctctgcaccaagcggaagatgagatgtgaagatgtttggcttggtatgccatcac

SEQ ID NO: 804979 - DNA, 100 bp, Homo sapiens
cagcagaaagcatttaaccagcatggctacttcatattttggaaagcagtttttaagacaaatggcccactgcgtgaccttggttcagctgtccatttcc

SEQ ID NO: 804980 - DNA, 100 bp, Homo sapiens
ggccgcgcaatgggcacccgcgacgacgagtacgactacctctttaaagctcactaaatagcctgcctgatttttttctacctgaggctatgcaccgttt

SEQ ID NO: 804981 - DNA, 100 bp, Homo sapiens
ctgtctggatggctgggagttcagtcaggacgtctacctgtccaccattgtgaccgagggctaccacccgatgccccatgaagtggagatcgcacacacc

SEQ ID NO: 804982 - DNA, 98 bp, Homo sapiens
gagctacccgagcggcggcggcggcagcagcggcagcggcaagcaccgaatagccaggccagaagaaggaaggcctgtggtgagtgggacaggaaatg

SEQ ID NO: 804983 - DNA, 100 bp, Homo sapiens
tgatacagttgataaaattgttggacatggatttgattgacatactttggaggcaagatatagatcttggagtaagtcgagaagtatttgacttcagtca

SEQ ID NO: 804984 - DNA, 99 bp, Homo sapiens
gtgagctgcggcaggacggctggaggactttgtgttttatgccccacgtctgagaatcaacaagcggatcctgcagctctgcatgggcaaccatgagtt

SEQ ID NO: 804985 - DNA, 100 bp, Homo sapiens
ttcaaggataagggcgacagcaacagctctgccggctggaagcttcaccagcctccaccaagacgggacaagcagggagtttatccggcagcccaaagcc

SEQ ID NO: 804986 - DNA, 100 bp, Homo sapiens
atctaaacagcctgcctcacaactccaaaaacaaaagggagatactccagcttcagcaacagaagtctcagcgcaaacggaaatctgtgacattcagcaa

SEQ ID NO: 804987 - DNA, 100 bp, Homo sapiens
ttcggcggactagaatttctacgcagaagtctccctcaggatcagaccgtagcccttccggaaacctccatggtctctaattaacagaagatggcaaagc

SEQ ID NO: 804988 - DNA, 98 bp, Homo sapiens
ggggacccagaccctggagcctcagttggaagcagccgatccagcctgcggagcctgtggggcagccgccgccatgtctgcgcatctgcaatggatgg

SEQ ID NO: 804989 - DNA, 100 bp, Homo sapiens
tgatttcccagttagagcaagggacagagccatggatcatggagccaagcattccagtaggtacctgtgcagaacggcagaggtgtgctctttggattag

SEQ ID NO: 804990 - DNA, 100 bp, Homo sapiens
cctcgtcccggggcagcagcggctctcctgcgcacgccgagtcctactccagcggcggcggcggccagcaggtagtaaacctattgatggcaattttgct

SEQ ID NO: 804991 - DNA, 98 bp, Homo sapiens
acatttgtcaattgtcttcacaatagtcttcaacaagctacttgtcaataccatgctttcctgtaatatttgtggtgaaacagtaacctcagaaccag

SEQ ID NO: 804992 - DNA, 98 bp, Homo sapiens
ttgaggacaggaatgcatttgtcacgggcattgcaaggtacattgagcaggctacagtccactccagcatgcaatggtacaacagctccatgaacgtg

SEQ ID NO: 804993 - DNA, 100 bp, Homo sapiens
gggaaatctggatgccaaacgagattggggccatgccaaggactatgtggagcttgatcctctcccagaaaaggttttacagcaaagacccaatgcaaac

SEQ ID NO: 804994 - DNA, 100 bp, Homo sapiens
ttcacatcctcagccgaagatctcacttcctcccagaggcctttgctgactgacccctcaggctctccccggaggctcagccccctctgctccccatggg

SEQ ID NO: 804995 - DNA, 100 bp, Homo sapiens
agggtgttcgactgctagagccgagcgaagcgttggggtgactcagtgggaacgccatctgagcggggcatgacctatgacgcactccacgtttttgact

SEQ ID NO: 804996 - DNA, 98 bp, Homo sapiens
agagaacaatgtgtttgggattgtgccactggccaaggtgctggagaatctggtaaaagcaccattgtgaagcagatgaggatcctgcatgttaatgg

SEQ ID NO: 804997 - DNA, 100 bp, Homo sapiens
agaactatgtggcagatatcgaggtggatggaaagcaggtgagggtcccgatgtcctggtgtacagcttggactttggtgggcatctgcggatgataaag

SEQ ID NO: 804998 - DNA, 100 bp, Homo sapiens
acaatgtactccagttgctggatatccaagcctctcagcttcggagaatggagtcttccatcaatcatatctcacagggctaccagggcatggtggacgg

SEQ ID NO: 804999 - DNA, 100 bp, Homo sapiens
acgcaatgttcctggcttcttacctacaaatgacttaagtcagcccacgggatttttagcccagcccatgaaggagggccaaacatgtgggctattacct

SEQ ID NO: 805000 - DNA, 98 bp, Homo sapiens
gcagtatggaggatatagaccaacacagcctggaccaccacagccaccccagcagaggccttatggatatgaccagctgagtcatccaatggtggcta

SEQ ID NO: 805001 - DNA, 98 bp, Homo sapiens
gagcctctgaaatggcaagtgaggttgttattgatgccttcagattgatcaatgctaatatgatggtcttaggacatgaaccaagacaaacaacttcg

SEQ ID NO: 805002 - DNA, 98 bp, Homo sapiens
tcatttgtctgttggtacagaccactttatggagctttcagggtgataaaagaaaatgtggctgaagttacccgaagttcagcttgcagtgtaattca

SEQ ID NO: 805003 - DNA, 74 bp, Homo sapiens
cctgagacagctgttaaattctgggcatatgaacagagcttactcacatagcatattggtatatcaaaatgaaa

SEQ ID NO: 805004 - DNA, 100 bp, Homo sapiens
atgtggatttgtggtctgcttagattgttacaaggcaaaggaaaggaagagttctagagtcggccgtatactaacaaggtaattactttatggtaccgtc

SEQ ID NO: 805005 - DNA, 98 bp, Homo sapiens
gcaatggaggaaacagctatatgggaacaacatacagtgacgcttcacagggcctaagatctggcaaacttggtgaacagtgtgaagcagttgttcgc

SEQ ID NO: 805006 - DNA, 100 bp, Homo sapiens
catggcctgcctgagcccctcgcagctccagaagatggcccactgcgtgaccttggttcagctgtccatttcctgtgaccatctcattgacaaggacatc

SEQ ID NO: 805007 - DNA, 100 bp, Homo sapiens
cagttaaggagcttgatttgtttttggcatactacgtgcaggagcaaggtattattatgccgctaccttcaagaagtaatttgcgtgctgtttattggag

SEQ ID NO: 805008 - DNA, 99 bp, Homo sapiens
tctcagcaccttggcgaagccttgggtttctttcttaaaggactgatttttagaactccacatttgaggtcgggtcacaaatcttcgaagagtgacata

SEQ ID NO: 805009 - DNA, 100 bp, Homo sapiens
ccctcccatctgccttggacatggcaatatgggtggggggaattgtgtgtttgagatggaagattttcgaggtatagcagaagaatcatttccaagcttt

SEQ ID NO: 805010 - DNA, 100 bp, Homo sapiens
aagacgtttaaggaaatgctgcaggacagcattagtgccagcagtagttcccaagggctgtctcagccatccacccagacgactcagtatctgagagcag

SEQ ID NO: 805011 - DNA, 100 bp, Homo sapiens
cccatggatacaaagggctcactgtattccattggatcaatataccacagaatgtgcggcaagaggagaagactatgagaaagtgaagttgctggagatc

SEQ ID NO: 805012 - DNA, 100 bp, Homo sapiens
cctgtcccacctggcggccatcgtcatcctgctgctgaagatctggaagacgcgctcctgcgccgatattgaaatggattccaggcgtgtgcctcgagac

SEQ ID NO: 805013 - DNA, 100 bp, Homo sapiens
aaatttgcctcgaaaaccaagctcggggcccccagttcccgccccagacctcttgatgcagatcaagcaggagggtgagctccagctccaggagcagcag

SEQ ID NO: 805014 - DNA, 99 bp, Homo sapiens
gagactcgggctgagtttgcggagaggtcagtaactaaattggagaaaagcattgatgacttagaagcggcccctttgttgctttatgcaaacagacgg

SEQ ID NO: 805015 - DNA, 100 bp, Homo sapiens
ggcgccagtccgggcaggggcagcgggagccggccgggtcagatggacaatcggagcaagctccggaacatcgtggagctgcgcctggcaggcctggaca

SEQ ID NO: 805016 - DNA, 100 bp, Homo sapiens
gttcggtgcgtgccccgacggggcgcgcgcgaagcgagcgagaaggcacggagtcgccgcggagcgcagatctgactgcagccatgagcagcaatgagtg

SEQ ID NO: 805017 - DNA, 100 bp, Homo sapiens
caacttgtgtaagagctataccagttgctgccatgactttgatgagctgtgtttgaagacaggaatgagtagcgacagtgacattgaatgtgacactgag

SEQ ID NO: 805018 - DNA, 100 bp, Homo sapiens
tgaattgaagaaaattgcacgtaatcacccaaatgccaaggcagctgcaatgactctccgcacggtattattgtcattgcaagcactattggcagctgca

SEQ ID NO: 805019 - DNA, 100 bp, Homo sapiens
gcggaggtacggatactcagttgtggagagctgattcccaaatctaaagaacagaaactgttcatacttggtgcgctgtggactcttgtgataattaacc

SEQ ID NO: 805020 - DNA, 98 bp, Homo sapiens
tctctaggccttttagaaaacatggcttaccagaactgggtgaagaagaacggggctgagcactcgctccccaccctgggcctcaccaataaccagct

SEQ ID NO: 805021 - DNA, 98 bp, Homo sapiens
acccccaggacgacgtgtacctggacatcaccgatgatgtctttctacctaaagatattgacctagacagtgtggatatggatgagacagagagggaa

SEQ ID NO: 805022 - DNA, 100 bp, Homo sapiens
ctcccccagggacggacccctacacagctggattggctgcagcagcgacactagcgtgaagcctctgcgggccttcttttcgtcttatttgaagtcattg

SEQ ID NO: 805023 - DNA, 100 bp, Homo sapiens
cgtgagactgctcagtgagatgctgcttcattacagccaggaggactcttcggacggggacagagagctgatgaaggtaaagctgaacaagttggccttc

SEQ ID NO: 805024 - DNA, 99 bp, Homo sapiens
gaagatgatgtagacactggactattaggatttggtgctatggagaaatttttggtagaatataagagtgcagtggagaagaaactggcagagtacaaa

SEQ ID NO: 805025 - DNA, 50 bp, Homo sapiens
ggtgaggatccagagaggcctaatgggccaattcctgtccccccagcagc

SEQ ID NO: 805026 - DNA, 101 bp, Homo sapiens
ccaggatgctgatatctaagaggtgttggtccctccccagctgaagttataattttgccttggtccaggtcaagacctcgtctccgttctcatagtcgtag

SEQ ID NO: 805027 - DNA, 98 bp, Homo sapiens
ctgccccggctgcatgctcttgtcgtaggacctggcttgggtagagatgatgcgcttctcagaaatgtccaggccacaatgctgcttggagcctctct

SEQ ID NO: 805028 - DNA, 98 bp, Homo sapiens
agaatatgatcaactcctgaaagaacactctgaacttcaggtggcacaagaatggctcaactctccaaatagagagaatttctatcagttgcaagtac

SEQ ID NO: 805029 - DNA, 100 bp, Homo sapiens
gcggagccgaggcggagccgctgtcctcgtccccagcggtcccgcccaacgcccgactctttcacctgtggcagatgatatcatccagcccgctgccccc

SEQ ID NO: 805030 - DNA, 98 bp, Homo sapiens
cagcacaccagtggggcagtgcctcgctccatgatgcgttatctgggtctggaaacccaaaccctcaaggatggcctggcgcatgggggaaccagcct

SEQ ID NO: 805031 - DNA, 98 bp, Homo sapiens
agtggatccatgccttagaagaaacaattcttcgacatactctccagcttcaaacctgaagattatcggctataagagaataagaattgcagaaaata

SEQ ID NO: 805032 - DNA, 99 bp, Homo sapiens
gaggagatagcgatgcagacagcagaagccctgaggacagagccagctgacagcccatgtggtgccagagggtattggtggcatggatggaacacaaca

SEQ ID NO: 805033 - DNA, 98 bp, Homo sapiens
ctccagacgctaccacactctgggacagtgggagatttggaacagctttgagaagagcaagtgatcgaactgtgagaatttggaaggctcgcaatttg

SEQ ID NO: 805034 - DNA, 99 bp, Homo sapiens
gggacgaggacgacaccgatttcctctcgccgagcggcggcctcgtgcaagccgaatactggcatgaccccataaaggaggatgtgtatcgcaaccaca

SEQ ID NO: 805035 - DNA, 99 bp, Homo sapiens
gtatgcatggtgtggggttggtgtgattagcttcgcagtctggaaagctttaggagttcacagtagccaggactgtctccagtttggtcctcctgctga

SEQ ID NO: 805036 - DNA, 99 bp, Homo sapiens
gcggcgggcggcaaaggagcagccatgagggccgggcccagtcaccgaccgatttccctagagattatgacgttgcagccccgctgcgaggacgtagag

SEQ ID NO: 805037 - DNA, 100 bp, Homo sapiens
agtggaatccatgtttctggacgcggatttttggcctcatactctgttatagataaacaagtggcttttcatggcctgccactgaaaatcaagaaagaac

SEQ ID NO: 805038 - DNA, 100 bp, Homo sapiens
ccggttttaacaacctggatcttcgaacttttgacacggctttggaaacgacgtcatgtgttagccaagagtcgaagctaaaccagaagttcaatctcag

SEQ ID NO: 805039 - DNA, 100 bp, Homo sapiens
gttgactcatgttgaccaagcaagcttccaggttgatgcctttggaacgtcattcattctcgatgtcgtgctaaatcactccaggggagctggaaatgca

SEQ ID NO: 805040 - DNA, 100 bp, Homo sapiens
aggagctgaaagacgcctttcagaacgcctatttggagctggggggcctcggagaacgagtcctaggtcccaatgctcggaggaagcccaagggcagccc

SEQ ID NO: 805041 - DNA, 100 bp, Homo sapiens
gctggcagtgtctgtgggggtggatggaacgctctacaagctgcacccgcgtccttgaacactgcgctgaagcacctgtgcgagatcctcacggacgatc

SEQ ID NO: 805042 - DNA, 98 bp, Homo sapiens
aaaagttcttgggacaaacttcatttggtgcttggattcgccctcatagtcctgtgtacctccagcgtggctgtcgctctttggaaaatccaacaggg

SEQ ID NO: 805043 - DNA, 100 bp, Homo sapiens
gcgtcctccgcgcagagcggcggctcctccgggggacccgcggtccccaccgtgcagcggggcatcatcaagatgcaagtctggaaaagtttgaaattcc

SEQ ID NO: 805044 - DNA, 98 bp, Homo sapiens
tgcccttagtggccgtcttttgcctctttctctcaggctttcctacaactcatgcccagcagcagcaagcaggtgcttttcagtgggaagaattggaa

SEQ ID NO: 805045 - DNA, 100 bp, Homo sapiens
ttgcctacgtcagtaacagccaccaagatcatggaagggaagtggttgctgtgtatgttactggtgcttggaactgctattgttgaggctcatgatggac

SEQ ID NO: 805046 - DNA, 99 bp, Homo sapiens
ttgtacaaacaggacctgcctaattaccttcaaacctggaactctaatgaatcattgattgaccagcactattttaccagttggaatgaatgatcagaa

SEQ ID NO: 805047 - DNA, 98 bp, Homo sapiens
acagtaaggccaaaaatgtgcatactcacagagttagagagagggatggtgggagctaccattaagaaggatgaacagaccggggcgatcattgtggc

SEQ ID NO: 805048 - DNA, 100 bp, Homo sapiens
aattgcatgtgaacacgaacactctaattgcctcctgatagcacacagaaagttttttgtagcatcagatccaacagttaaaacagatcgactgtggcac

SEQ ID NO: 805049 - DNA, 98 bp, Homo sapiens
ttatcaacaaaggcaaaggattcggatttattaagcttgcacaattcagattcagaagcgtcaacagttagtcagaaagatacatgaagatgaattga

SEQ ID NO: 805050 - DNA, 124 bp, Homo sapiens
aattttacaagaaaagccatacttgttttctctggggtatgattctaatatgtattcatccacaatgcgatacctttcatagggtttggctttttggataatgcaattatgattgttgctgtaa

SEQ ID NO: 805051 - DNA, 100 bp, Homo sapiens
ttctcaggatttggcttcattaacagtgagaacgtgttcaaggctcagatccggaacctgaccgtgctgacccccgaaggggaggcagggctgagctggc

SEQ ID NO: 805052 - DNA, 100 bp, Homo sapiens
agctaggaactaagcaggactcaagcaagctacaggaaaatctatggcggacttccaccacaaatggagggattttgactgtatctattgacaatcctgg

SEQ ID NO: 805053 - DNA, 141 bp, Homo sapiens
cggggcaagaagcacagcatcatcctaaggacgcagctgtctgtgagggtccatgcctgcatcgtgcacctggtggacatatggaatgtcatagaagcattgcgggaaaatgctctgaacaacctggacccaaacactgaa

SEQ ID NO: 805054 - DNA, 100 bp, Homo sapiens
attgctcctttggccttctagggactgacttcaaagaaggaaggaaagaatcaggcaggtatcgaaggatgatcgcagtgatgtggagagcagctcagag

SEQ ID NO: 805055 - DNA, 100 bp, Homo sapiens
cagtatcttctcagaccagcagctaatgttactcccacaaagtttttttcaccgctcaaccctgtgagagtacacattgaaattggtcctgatggcagag

SEQ ID NO: 805056 - DNA, 100 bp, Homo sapiens
ggattgggaaagaccatggcagtggaaatttaatggagccaccatttcagaaccaaaagaaatttggaacaaacttcacaaagctggaaaagaaaactat

SEQ ID NO: 805057 - DNA, 100 bp, Homo sapiens
caccgaaggaagtggtcccagaaaagaaagtaccggtgcctcctgccaaaaagccagaagctccacctcctaaagctttaccaacagggacgcttatgtc

SEQ ID NO: 805058 - DNA, 99 bp, Homo sapiens
tagcgcctctctgatcttcctgcatggctcagacaaagaaacagccttggtataatagcacgttagcatcaagacgaaaacgacttactgctcattttg

SEQ ID NO: 805059 - DNA, 98 bp, Homo sapiens
tccctgctatacaacccttacccagatcctccctcccacggagcctcttctgaaagcatgcagaccagtcccagtgctgaccagtcccatcgtatctc

SEQ ID NO: 805060 - DNA, 99 bp, Homo sapiens
gcaaagggaagggcaagaagaaggagcgaggctccggcaagaagccggagtccgcggcgggcagccagagcccagggccacccagtgctcctgcagaag

SEQ ID NO: 805061 - DNA, 100 bp, Homo sapiens
attttgtggaaagttccaaactgtctgatgctggggcttatttcaaaacctttgtccctcagttccaggaggcagcatttgccaatggaaagctctagga

SEQ ID NO: 805062 - DNA, 100 bp, Homo sapiens
tgagaggccaaagattacccttggacatccagattttctattgtgccagacctgacgaagagccttttgtgaagttgccgaacaagcaaccggaaaagct

SEQ ID NO: 805063 - DNA, 100 bp, Homo sapiens
ccagtgcaaagacatcaccatgaacactagcattctgtcaggccaagcagaaggcagccttgctggagctgctgcatgaactctacaatttcctggccat

SEQ ID NO: 805064 - DNA, 100 bp, Homo sapiens
aagaggttatttcaagtatggagagaaatacgttttcaatggattgccacagtaaggtctggaaatctctccaggcaccctgctttggccctctagaata

SEQ ID NO: 805065 - DNA, 100 bp, Homo sapiens
attggtgaacacatggaagaacatggcatcaagtttataagacagttcgtaccaattaaaagcatctgctgcacccaagcctgagccggttcctgttcaa

SEQ ID NO: 805066 - DNA, 99 bp, Homo sapiens
ttcggcgaggcgcagctgtaccgccagttcaccaccaccgtgcaggtcgtcatcttcataggctcgctgctcgaatggctgcagtctgtccaggccacc

SEQ ID NO: 805067 - DNA, 100 bp, Homo sapiens
aggttgcaagatttaatgacctcaggtttgtcggtcgaagtggaagagatttggactgagcaacaaatttgaatctgaattcccttcttcattaactgga

SEQ ID NO: 805068 - DNA, 100 bp, Homo sapiens
atttgataaacaggaacttgaggccccctcccaccacctcctccagtaagcagaaacggcagcacatctcgggccctgcctgctacccctcagttgccat

SEQ ID NO: 805069 - DNA, 100 bp, Homo sapiens
tccttagttgaaaggtgcgccctgctgtgacagtcaataggcgaaggtttcaaagaagctgttcaatatgttttacccaggctgcttctggcccctgttt

SEQ ID NO: 805070 - DNA, 100 bp, Homo sapiens
agtggaggaggcggctataataatagcaaacatcgatggcctactggggataacattcatgcagaacatcaggtgactgaaaactcctgaggcatttcct

SEQ ID NO: 805071 - DNA, 100 bp, Homo sapiens
ccaagattatggatgatgatagctatggtgtagatggaatggatctaacttcccagggggcaggcacttactgcctaaacccaccaagggacgaatgcgc

SEQ ID NO: 805072 - DNA, 100 bp, Homo sapiens
gagctttctggatgatgtaaaccttattctggccaacagtgttaagtataatggtagcacaggcggagtgcagcggaggcccctgccgctgccgtcatgc

SEQ ID NO: 805073 - DNA, 100 bp, Homo sapiens
cactgaaactccagtcaagttgtaaactgaaaaagaacgtgttgaaacaaggaattgccccatagccttcacaggttctaaatggcttctaagaagttgg

SEQ ID NO: 805074 - DNA, 100 bp, Homo sapiens
atggaaaatcgcttggttaaaacctgacacttttaacagcatataggttgctgtagatgaatgttcttagctgtcatgtttaaaaatacttctgcttcgt

SEQ ID NO: 805075 - DNA, 99 bp, Homo sapiens
ttcatctttcaagataacccgtggaattgaagcagttggtggcaaattaagcatgatgccttcttctgtagagtgggcgctttgcagaatacgtgttga

SEQ ID NO: 805076 - DNA, 99 bp, Homo sapiens
ttgtccggctgcaggagaagcggcagaaggagctctggaatctcctgaagattgcttgtccgtgctggtatagaggactctaagaagtggggcatgctg

SEQ ID NO: 805077 - DNA, 100 bp, Homo sapiens
cagatcctggagatgtactgggcaggactgactgtagcagtggagatgcttctcggcccagtagtgacaatgcagattgacaaatggcctacagctgtga

SEQ ID NO: 805078 - DNA, 100 bp, Homo sapiens
gggcacctggcaaagatctatgccatgcactgggggaccgactcaaggacacatgacggaagtgtgtatttttgggccactccacggcaggtccctagcc

SEQ ID NO: 805079 - DNA, 98 bp, Homo sapiens
gtgcgggctgcaggacgtgtaccagcagttccgccgagcatcctggggcctccaagcctccgataagctcctccagtatgacatcacgcatcttgcta

SEQ ID NO: 805080 - DNA, 100 bp, Homo sapiens
gataaaccgactgccggacaaaaactcaggtttggaccttatgagtcttacgactccaggtcttctctgggtgggcgagatctgtacagatctggctatg

SEQ ID NO: 805081 - DNA, 100 bp, Homo sapiens
tttcctaggacttctggggccaggttctgcggagcagatactggactaagcatgcccagtgatacttcactctctccagcaagtcagaactctccatact

SEQ ID NO: 805082 - DNA, 99 bp, Homo sapiens
cgtgaccaccggcctggtattgggatgccggaaatcactgtggaaaatcttcccagttatttcagacttcagaaaccattattgattttgttcagtgat

SEQ ID NO: 805083 - DNA, 99 bp, Homo sapiens
aggattccaagtaactcttatttgaattaaggaagttcactggagtaaaatggaggcctcagtaatattacccattctgaagaaaaaactagccttcct

SEQ ID NO: 805084 - DNA, 100 bp, Homo sapiens
agaccagcaagcgtggcggcaagatcatcgtgggcgacgccacagagaaaggtttgaagatgccgcatttggattggatgaattccaaattctgcttgct

SEQ ID NO: 805085 - DNA, 100 bp, Homo sapiens
cgagtactcatccaagtgccaggaatgcaagaagaccatcatgccaggtcattgcccctgaggagattgtggaccccaacgtggatgagcattctgttat

SEQ ID NO: 805086 - DNA, 100 bp, Homo sapiens
catcatcttgaatttagtgaagccaaagcctgctggagtactaggtgcagtaaataagcctttatcagcaacgggaaggaaaccctatgttagaagcact

SEQ ID NO: 805087 - DNA, 98 bp, Homo sapiens
ccatcgttggctccttagaacctggaatttatgcaggatattttgattggaaggactgcctgcctccaacaggcatttggctttatgtcccgagttgc

SEQ ID NO: 805088 - DNA, 98 bp, Homo sapiens
gaggaggaagaggaggaagaaaaatctgaggttatcaatgacgagggtgtgtccgcagccggccaggtggtatccctgaaggtgtggctgattgacga

SEQ ID NO: 805089 - DNA, 98 bp, Homo sapiens
atgaccctaatggtctttttgttcaagataaagtgattttttgcctttgttgattaactggacaaattcagaatgccgggtctaagttgtagatttta

SEQ ID NO: 805090 - DNA, 100 bp, Homo sapiens
tccttcttcaggagagcgccccagggcaagccccgctccggccaacaaggtgacacggccccactcccttggcacattcgaatcggtatattaataggaa

SEQ ID NO: 805091 - DNA, 100 bp, Homo sapiens
aggatatctatcagtatctcaggcagctggagaaatcttacaggctggtgttaaaggaacttcggaatcccttaaaggtgtgaaacgcaaaaagatcgta

SEQ ID NO: 805092 - DNA, 114 bp, Homo sapiens
agcactcaccaactacctgcagccgcagctggactggcaggcccgagggcgaggcaagccgattttttcagttgatattcaccctgacgggaccaagttcgcaactggaggaca

SEQ ID NO: 805093 - DNA, 99 bp, Homo sapiens
tggatctcgagccagaggggaaagtatttgtggtaataacccttaccgggagtttcactgaaggatgaaggtttaaggctcagaaaggtagcacattcg

SEQ ID NO: 805094 - DNA, 100 bp, Homo sapiens
agacaaaactccttccaaaaacgtgcgcatgatgcaggcccaggaagccgtaagcaggatcaaggaccgtataatagacgctggccccaaaggaaactac

SEQ ID NO: 805095 - DNA, 100 bp, Homo sapiens
gcgagcagatgacgtatgggatatatgtggaagatgtcaagtttgtgatcaactatgactatccaaacagctcagaggattatgtgcaccgtattggccg

SEQ ID NO: 805096 - DNA, 119 bp, Homo sapiens
ctccagtggaacagcagtagctccagagaaccggcaccagccccccagcacaaactgctttggtggaagatcccgatagcagaccccacgttagctgaaatgggaaaaaacttgaagga

SEQ ID NO: 805097 - DNA, 100 bp, Homo sapiens
tgttttctccgtgaccacaatattaaccaggatgaatggcggtaatactgcattgcatgattgtgcagaatctggaagtttggacatcatgaagatgctt

SEQ ID NO: 805098 - DNA, 100 bp, Homo sapiens
atttgaactaaagaagctgaagataatcttgtgccgtggaaatcagaagggcaaaacgaagcagtcatgatgagaagcacacctcagaaatcaggacatc

SEQ ID NO: 805099 - DNA, 100 bp, Homo sapiens
gttctctggcagaagcgaacaacctgagctttcccttggagcccctgagcagggagagggctcacaagcttgaggcattgatggccttccgggatgtggc

SEQ ID NO: 805100 - DNA, 100 bp, Homo sapiens
agctggagtttgcaatccagccaaatacaactggaaaacagctttttgatcaggacacagcattgttggttttgccatgtactattttacctatgacccg

SEQ ID NO: 805101 - DNA, 100 bp, Homo sapiens
gtgctggctacatggagccctatgaggcacagaggatcatgacagatgacaagagcacctcaaaggcagcagcctcaaggagcagccatggccccagact

SEQ ID NO: 805102 - DNA, 100 bp, Homo sapiens
cggagccatgccaggaagcttgggaaccgtgagccacaagagatcactgtgtccactactatgatcttcgtaacactaaacagccaatcatggtattcaa

SEQ ID NO: 805103 - DNA, 100 bp, Homo sapiens
ttttttattctagttccaattgctaatccagcatttgtggatagctgcaaactgtgatatctatcctggccttttagtcgtacctcaagctgtacaggac

SEQ ID NO: 805104 - DNA, 99 bp, Homo sapiens
gactgtcaacgaaacctggcacggctcttgcttccggtactccaaagattcaggtttactcacgtcatccagcagagaatggaaagtcaaatttcctga

SEQ ID NO: 805105 - DNA, 98 bp, Homo sapiens
cagagggacacgctggtgcatctgtttgccggaggtcaatcctttcccatggtaccgtggcagactgtgctgttgttggcaaggaagatcccttaaaa

SEQ ID NO: 805106 - DNA, 100 bp, Homo sapiens
ccagcaccccagatgggtgagagatgtgatcactggtttcgtggcctgaccaaggacctccaagaaacaagccaacgacctggtggccacactgatgagg

SEQ ID NO: 805107 - DNA, 100 bp, Homo sapiens
ttcagattgcagtggaagacctgagccctgaccacccaggtacaagggatttaaaggcaactgttccatgaccttcattgatcagtttaaagcactacac

SEQ ID NO: 805108 - DNA, 100 bp, Homo sapiens
ccaagccctactgggaggcacggagggtggcgaggcaggctcagcttgtcaatcggaaacagaaattagagtctgtggaactttctagccaatcagaaat

SEQ ID NO: 805109 - DNA, 100 bp, Homo sapiens
caggacagaagatctggaccacggccaagctcacaaatcgggttttataggatcacattgacaaaagtaccatggagttttatgagtcagcatattttat

SEQ ID NO: 805110 - DNA, 100 bp, Homo sapiens
ggcagctccttagctcaagagcaagtggcccaaggcctcagaagactagaaggaagttcctggccattcagattgtagaaggcatgaaacaaaaaatgtg

SEQ ID NO: 805111 - DNA, 100 bp, Homo sapiens
ttgaaagaaaagcaagaacaagaaaaacaagagaaagccatgattgaaaagcaggtttctaagcatgaattgaggaacagaagaagcagagcagatgatc

SEQ ID NO: 805112 - DNA, 99 bp, Homo sapiens
gattttgaggacacttgtggagagctcgaattccagaatgatgaaattgtgagtgctaacaggaatgaatgaaacttctgctgtaatcattgctgcacc

SEQ ID NO: 805113 - DNA, 99 bp, Homo sapiens
gcgaggcaagggggagatcactcccgctgcgattcagaagggcttaaaagacaaccttcttgcttctgggacatccagcctgacagccaccaaacagtt

SEQ ID NO: 805114 - DNA, 98 bp, Homo sapiens
atacattactgcagtaacactccaccatatagacccggctttaccttatatcagatttccattttgacagtgccagcagaggaaccaggaacttttgc

SEQ ID NO: 805115 - DNA, 98 bp, Homo sapiens
gcagatatagaacatttcttttatcacagaccgtgtgtatgtacaacaaaataatgtggagaacgtctacaatttgggattaattatttttcgagatc

SEQ ID NO: 805116 - DNA, 103 bp, Homo sapiens
gcttcacttagctctacaatcaacccatgtggctctcaaaattagagagatgtgtaattgtccaccactgtctaatccagaccctcgattactattcaaactc

SEQ ID NO: 805117 - DNA, 98 bp, Homo sapiens
tgatgtcaggatacagtgggacgtcgccacatgagaaaaccagtgctcggaatcacagacactaccaggatacagggctgagccggatcttgaagact

SEQ ID NO: 805118 - DNA, 100 bp, Homo sapiens
aacttaaaactttttaaaagaggcgaaggcagaagagaacaaaggaaggagaaagtaacttgtggaatggtgagaaaggaggaatcattatagattctaa

SEQ ID NO: 805119 - DNA, 98 bp, Homo sapiens
aaggataagggcgacagcaacagctctgccggctggaaggtatcacctcttctgggctcaagatggacaacaagaagcgcctggcctacgccatcatc

SEQ ID NO: 805120 - DNA, 100 bp, Homo sapiens
tggcggatggaagggaggagactcctgaccctcagaatgaaaatgatgcatcctgttgccagcagtaatccagctttctgtgggcctggcaagccttcct

SEQ ID NO: 805121 - DNA, 100 bp, Homo sapiens
ggcgcggaaccatggccgatgggggcgagggcgaagacgagatccagttcctgcgaactgtgccagagtgggtcatcgctccttgatgagatactacaaa

SEQ ID NO: 805122 - DNA, 100 bp, Homo sapiens
gcgtctggtgcgagaaattgctcaggactttaaaacagatctgcgcttccagagcgcagctatcggtgctttgcagatgagacgtgcaggtaccatcagg

SEQ ID NO: 805123 - DNA, 98 bp, Homo sapiens
agggctcaggaacgactggccacggccctgcagaagctggaggaggcagaaaaagctgcagatgagagtgagagggtcttactctgtcgcccaggctg

SEQ ID NO: 805124 - DNA, 98 bp, Homo sapiens
aaaaaagaaaactctagaagtctggatgtcggtgggcctctgagatatgccgtttacggcccatctcagcactagcacagtgcatggtgcaacagagc

SEQ ID NO: 805125 - DNA, 100 bp, Homo sapiens
gggaatggtatatgtcttctactttgcctccttcattctactactgagagagaatgtgacagtgatgataacatgggtgccaaaaatacttcaataggag

SEQ ID NO: 805126 - DNA, 98 bp, Homo sapiens
tcccaccttctttcttcagccgaggccgccgccgcctctccttgctgcagccatggagtgccagaaccctgtggagcatcatgaactgggaagagtag

SEQ ID NO: 805127 - DNA, 100 bp, Homo sapiens
ggacttcattcgccggctgctcgtcaaagatcccaaagagaagaagaaggaggttcctgctgtgccagaaacccttaagaaaaagcgaaggaatttcgca

SEQ ID NO: 805128 - DNA, 100 bp, Homo sapiens
gagggagacccggcacttcttccggcagatcgtctctgctgtgcactattgtcacaaggagaagctaaaacttacttatgaggaaaagtgtgaaattgag

SEQ ID NO: 805129 - DNA, 100 bp, Homo sapiens
ccggggccggccagaagcgggcggcgcgggggagatgtttcatgatcaacatgggagactcccacgtggacaccagctccaccgtgtccgaggcggtggc

SEQ ID NO: 805130 - DNA, 100 bp, Homo sapiens
agaaagagagtgcaatgaagaactttgcaattatgaggaagccagagagatttttgtggatgaagataaaacgttttctgaatttccagatcccatgtgg

SEQ ID NO: 805131 - DNA, 98 bp, Homo sapiens
aagaagattaaattgcttactggtaaacgcgttcaactggcggaagacctcaaaatgttgctgaagtgctgctgaaagggccagagatgcaaggattt

SEQ ID NO: 805132 - DNA, 99 bp, Homo sapiens
aaggaagagaagtcaaaagggaaggctaagtctctggcatctctatcccctatgaggcaccacgtaagacctcctgcccttagctctcttgctcaccac

SEQ ID NO: 805133 - DNA, 98 bp, Homo sapiens
tgatccccagaaagttctacaaggtgtcatgagtccatagaggccactgtattctattgaagaacatgtctaacagtaacactactcaagagaccctg

SEQ ID NO: 805134 - DNA, 100 bp, Homo sapiens
agatccatggttattagagaaagagaaaggatttctaagcaggaactccccaggaggtatttaactgaaaggaatatctgcttcactgttgcaaccaaac

SEQ ID NO: 805135 - DNA, 98 bp, Homo sapiens
attgcagtgtgattttctttccccctttaacttagaggaacgaggattatacagaaatttgaagtcttgctcagtgtgcagaactctgctggcagctg

SEQ ID NO: 805136 - DNA, 100 bp, Homo sapiens
agagatggatgctaagactgtgactcaattctgtggtgttcttggtcacacatttatggagtttctgaagggcagtggagattactgccaggcacagcac

SEQ ID NO: 805137 - DNA, 100 bp, Homo sapiens
tgtcagataatgaggacagtgggacctagattagaccatgaacgagccaaggttgttaaaggccttacttatttgtggagtttaaagattttacatagag

SEQ ID NO: 805138 - DNA, 99 bp, Homo sapiens
tctttcatctcttctggggcaggggccagggccagtactatactggcaattgctggagaagattttgcaattgttgcttctgatactcgattgagtgaa

SEQ ID NO: 805139 - DNA, 100 bp, Homo sapiens
gccgcagatgcccaccggaatggagaaggaagaggagtcgatttacagatattaacgactccttgggaaaactggacttcagtcgcctctctccaacaaa

SEQ ID NO: 805140 - DNA, 98 bp, Homo sapiens
actgaagccctacgagattcacaccgtcttcggtctcctggggtcggcgccgagtgggaggatggcggaaggctgggttacgacccctacaaccctga

SEQ ID NO: 805141 - DNA, 98 bp, Homo sapiens
ctaatcccatgtacaatgccgtgtccaacgcagacctgatggatttcaagaatttgccattttcagtggaaaacaagtggtcgttactagctaagatg

SEQ ID NO: 805142 - DNA, 99 bp, Homo sapiens
aagaaaccatgtgctgaaatgtttgacgacactgatggtttggcaaataagggcgagactgaaaaatcaagtcactcagttgaaggagcaagtacctgg

SEQ ID NO: 805143 - DNA, 101 bp, Homo sapiens
ctatccagcatctttgggcagccattgagattatacggaaccagaagcagattgccaacattgaccgtattacaaactctccagggcacaccgtattcagc

SEQ ID NO: 805144 - DNA, 140 bp, Homo sapiens
tgactgcggcgagtatacatgcaaagcttccaatgagtatggcagtgtcagctgtacagccacactaactgtgacagatacgtaggtaacctttccagagatgtgacagaagtccttatacttcagttgttcagtcagat

SEQ ID NO: 805145 - DNA, 101 bp, Homo sapiens
ataatggatgtcactgaggaggtgtgggacaagaatttggaggttttggttcagttagtggaaaaattgaaatagaaatcaagatcaaccatgaaggagaa

SEQ ID NO: 805146 - DNA, 99 bp, Homo sapiens
ttgagccggaggccgtactgcagaccagagtctccgctatggataacacccagattccagtgctgaatattcaaatgaaaatttttcctgcactttgta

SEQ ID NO: 805147 - DNA, 100 bp, Homo sapiens
cagaggaggaggctgctggttccagcaaatgaaggtgatcccactgagagttcctggtacagttcagacaggacaaagtatgtgtgaagtttattcaggg

SEQ ID NO: 805148 - DNA, 98 bp, Homo sapiens
caatacgattggaaccagcacaagtacaagtaatgtccatccaagaggggtgcagtcccagcgagatacctcattattgaagcacacgtgccgagtgg

SEQ ID NO: 805149 - DNA, 100 bp, Homo sapiens
catgaagactacagatattatgaatacaaccatgatctcttccaaagaatgccacagaatcaggggaggcatgcttcagcagagtcacctgatatgaaaa

SEQ ID NO: 805150 - DNA, 99 bp, Homo sapiens
ggaaaacaacttcgagggcagagtgcccttcgctttatgaggcggataattggacttaaagatgaattttataatcgttacatcaccaagggaaatctt

SEQ ID NO: 805151 - DNA, 113 bp, Homo sapiens
cccctttctcgcccagcgcccccaggccgctcccggggctcacgagtgatcagcagctggactgtgccttggacctaatgaggcgcctgcctccccagcaaatcgagaaaaac

SEQ ID NO: 805152 - DNA, 98 bp, Homo sapiens
agccagaagaacaagaagtaggcattgaccccttgtccagttactctaacaagtctggaggtgatctttagacagtgactgagtatggatcatttgaa

SEQ ID NO: 805153 - DNA, 98 bp, Homo sapiens
aggaggacagttcgctacacagcaatgcatcgagttggaactgataatgggagagaagcaattgaaagtggggctgcatttctcttcatgacatttca

SEQ ID NO: 805154 - DNA, 99 bp, Homo sapiens
aggaagcagtactattcaagaggttctaatagaagactgtatcccggtactgaagaggtacgccaaagaagggagagaatttgattatgtgattaatga

SEQ ID NO: 805155 - DNA, 100 bp, Homo sapiens
ctcttttctttcagtctgcaactgtgtctgatggcggaacttagtgatttggcccgtgaccctccagcacaatgttctgcaggtccagttggggatgata

SEQ ID NO: 805156 - DNA, 98 bp, Homo sapiens
agcgtcccggcgccgtcgcgccactcctccgaaattgccaagaagatgcttttagaagaaattaaagccaatctttcctctgatgaggatggatcttc

SEQ ID NO: 805157 - DNA, 98 bp, Homo sapiens
tagtacctacagcagcactccagtgtgttgttggtggctgcaatgccagctttgcttctcagggagggctagctcgtcatgtacccacacacttcagt

SEQ ID NO: 805158 - DNA, 100 bp, Homo sapiens
gggactccacgatgtatccatcaaccacttcctccagctttcagtgaaaggttacaatgacaagcagccaattttactaaagaagattattgagaaaatg

SEQ ID NO: 805159 - DNA, 100 bp, Homo sapiens
gctggctgttatgatcagcacaaccttgttgcatgccagataaatgatcagcaacctcataatattctgcagaggcgcctcatggaaaccaacctgtcta

SEQ ID NO: 805160 - DNA, 100 bp, Homo sapiens
tgcctggccctgggaagagaagcctagatatctggaagcagaatctggtaatataagtcaaaagtctgatgaagaagattttgtaaaagttgaagattta

SEQ ID NO: 805161 - DNA, 100 bp, Homo sapiens
ttccacctcagcgacctgccatcctacacaactcatggcaccgtgcacgtggtcgtcaacaaccaggttacccttaagttacaggagtcccagctgcctg

SEQ ID NO: 805162 - DNA, 100 bp, Homo sapiens
cggggccgagcctggagatgggtaaacctcagtcagaaacgctgaaagcaggagacttgaggacacgaattagccgatgtcaagtgtgcatgaagaggac

SEQ ID NO: 805163 - DNA, 98 bp, Homo sapiens
tggaaccagcacaagtacaagtgttacagaacatcctggacactgaaaaagaatatgctaaagaacttcagtctcttcttgttacttacttaagaccc

SEQ ID NO: 805164 - DNA, 100 bp, Homo sapiens
taaacagaataggagagctgatcccatgttctcctgccctgaagcagatgtttggaaactggacatttggcactttggtcttcacagtcatggttattac

SEQ ID NO: 805165 - DNA, 99 bp, Homo sapiens
gggccataccggacccgcaagcatgcccaccactgccacaaacgccgcaccaggtcttgtagcagcgcctcctcgagcatgcaagcggcaagatgtcct

SEQ ID NO: 805166 - DNA, 100 bp, Homo sapiens
gtaattcgaagcagactgccatatcacagcctgcttcagggaacacattttctcatcacagtatgatcaagcactgcgcctagcagaaattttactacct

SEQ ID NO: 805167 - DNA, 98 bp, Homo sapiens
agcaagtcaaggtcgccttcttgctctgagaacattattatcacagaccaaaatccacacccttatcacagcccagtgccaatggagtccagacggaa

SEQ ID NO: 805168 - DNA, 99 bp, Homo sapiens
cctgccctcccagcccttttccctctgctcccgactcccggccccggcagcggtgtccagctccgtgctttcgtgctacagaggcgtagttgagtagct

SEQ ID NO: 805169 - DNA, 100 bp, Homo sapiens
gcaggattcattttgacatgcatgggttcctgaccaatgtcatccttgcagacctcaacctctcagggtttgccattgaaggcccctctcaggcaaagat

SEQ ID NO: 805170 - DNA, 100 bp, Homo sapiens
tgacagaagaaaaatttacaatcctgtttgaatcccagttcagtgttggtggaaatgagctggtttttcaagtcaagcataagaagctgggcccccgagg

SEQ ID NO: 805171 - DNA, 100 bp, Homo sapiens
ttctgatgaagatgatgtcagctctgagtcaagtaaaggagagcctgacccactggaagataaacaggtacatgttgggacttgcagcagttccggcggt

SEQ ID NO: 805172 - DNA, 98 bp, Homo sapiens
aatgagtacatgtgaagaaccaagaagccctaatggcccatcaccaattgcaactgcttcaggacaaaggagttggaaaaacaacattgatccataaa

SEQ ID NO: 805173 - DNA, 100 bp, Homo sapiens
aatactcaggagtgggattgctggatcatatggacttggatgttgtgggtgatggtatgcagtgtcctccttcacctttgctttttgatccttcactaac

SEQ ID NO: 805174 - DNA, 99 bp, Homo sapiens
cagtgaaaagcagcagagccgatgggtcatgaggatgtaagtgcgtttgaaggcttccacaccctctactccaggcacaacattctgaaattttttggt

SEQ ID NO: 805175 - DNA, 98 bp, Homo sapiens
tggctacaaaaatcaatctcagggctacaaccagtggcagcagggtatgaattttgataagaggcaacatgaagcaagaatccagcaaatggagaatg

SEQ ID NO: 805176 - DNA, 98 bp, Homo sapiens
cctttttgctgacgtgtcatttctaagtactttctcctactccataaagacttcaaccaatgaatttccctgtttgccaaagcaagtggcttggatcc

SEQ ID NO: 805177 - DNA, 98 bp, Homo sapiens
tggcggttcagcgcgaccacgaaggccgctactccgaggcggtgttttattacaagggagctcactcagtgggtttgatgtggtggatgctggctcgg

SEQ ID NO: 805178 - DNA, 100 bp, Homo sapiens
attcctcatgacattgctgtctgtaacatccaggagatgagggctcggcacaaagaggcttttttgaagaaacataacctcaaactaggcttcatgtcgg

SEQ ID NO: 805179 - DNA, 100 bp, Homo sapiens
agcatacaacagacttatttcttccacttagttctgaggtgaagacagatcatgggactgataaattgctccagagtttcctattttggagaagcagaac

SEQ ID NO: 805180 - DNA, 100 bp, Homo sapiens
gttgaggaccttcagttccgggttgaagaagaatcaattaccaaaggtgatcttgaggtgttcctgatccaagcagaaccctgttatttgaagagcctga

SEQ ID NO: 805181 - DNA, 100 bp, Homo sapiens
accggatatcccagcagtatctggctacccttgaaaacagctctggctgtgacttttcgccctgatggtgcggagctggctgtggccacactgaactcac

SEQ ID NO: 805182 - DNA, 100 bp, Homo sapiens
atggtgttgctgctgtactccttctccgggtcctatccttcccccaaagctggagcaactctggtcgtgtacaaggacttgctagtgctgtttggtggct

SEQ ID NO: 805183 - DNA, 100 bp, Homo sapiens
gattggtcaaaaccactcccaccaagtgaacgcttggaacagacgacatagacagcctaaacccagttctcagggacaacccgcagcttcatgaggaagt

SEQ ID NO: 805184 - DNA, 100 bp, Homo sapiens
aggaatgtctttcctaccatctaaaatacgaaggtttctggctggctcctggcagccaccattctactctgtttctgtgagtttgactattttagatgcc

SEQ ID NO: 805185 - DNA, 100 bp, Homo sapiens
atttcgagagacgctgactgtcgggcggtggtgatctctggtgcaggaaaaatgttcactgcagagttccgttctggaaaggcacccatccttattgcta

SEQ ID NO: 805186 - DNA, 100 bp, Homo sapiens
caccgtatccattcaggtggatattttatccaacaatgttccttctgatgatgtggagttcttggtttcgactcagaaaacatatggtgctgacctggcc

SEQ ID NO: 805187 - DNA, 99 bp, Homo sapiens
aaagtcatcgagcagggcctggaggacctggtcttcactgacgcctctccccagggtcgaagtggttctggaaactttggtggtggtcgtggaggtggt

SEQ ID NO: 805188 - DNA, 100 bp, Homo sapiens
ttaactgtttttaagaatgttgacttgctcagtgatatggttcagtgatacaacattggaacttagtgttatgccaaaagatgaagacattctccaagtg

SEQ ID NO: 805189 - DNA, 99 bp, Homo sapiens
tatcctcggtgctgtggtgcagagctagttcctctccagctcagccgcgtagatatggccgcgtggaaagtgtcaaaattcttcccaagaggggatctg

SEQ ID NO: 805190 - DNA, 98 bp, Homo sapiens
agcagccttagccctagtgtagaggatcagttcgacagcttagacaagcatacacaatggggaattgacttcttggaaagatatgccaaatttgttaa

SEQ ID NO: 805191 - DNA, 98 bp, Homo sapiens
cgcgcgcctcccgggcggattccagccccgagcgggacagcgcggcggggagcgacgagttttgcactgattgcaaaaataaagtcctccgagcatac

SEQ ID NO: 805192 - DNA, 98 bp, Homo sapiens
gctcgggccgcaccgccagggactggggtgagcggcccagtgaagctgtggtctaccaatctagacaactcagtggcaagcattgaggcaaaggctaa

SEQ ID NO: 805193 - DNA, 100 bp, Homo sapiens
gaactggtgacacgggaggtaccctttgctgacctctccaatatggagattggaatgaaggtggaatcgtcccaagaagccaatgctgaggtgatgcgag

SEQ ID NO: 805194 - DNA, 100 bp, Homo sapiens
tttccttgctgatctatttaccaagtggaaggtgacagagctgaatgaacctctctccaatgaagatcgaaatctcctctctgtggcctacaagaatgtg

SEQ ID NO: 805195 - DNA, 100 bp, Homo sapiens
tcagtagtttcaaaaggtggcctttccactggagttgcttcacttagctctacaatcaacccatgtgctgccagccttgccctggctctgaatggcgtct

SEQ ID NO: 805196 - DNA, 99 bp, Homo sapiens
tcggagtcggagggcttggagttccaggtgttgggggccttggaggaatttgctgacacaatatcttccgcctggtgctgggcatatcctaagaactta

SEQ ID NO: 805197 - DNA, 98 bp, Homo sapiens
ggcgggccagggccgcactccggagactcgcggttgctacgcgcaccatggctggagcatttttgaaacgttggggttgttggagtggttggattttc

SEQ ID NO: 805198 - DNA, 100 bp, Homo sapiens
aggggtccaccctcacatcgtggagatggacaggagacctggaatcattgttgatcctgaggaggatgaaggggctggccctggaggccgagagtgagct

SEQ ID NO: 805199 - DNA, 99 bp, Homo sapiens
acaatcaataatggcactcagcagcaagcacagagtatgaccaccactattaagtgaccaagaatatggcccaggtgaccaaagccctggacaaggccc

SEQ ID NO: 805200 - DNA, 101 bp, Homo sapiens
cgaagtcaaggccctgtgcgctaaggccaggagagcgacttgcagttgtggaggtacagtgtgaacggctgaggatgctctaccgggactgtgctcggccc

SEQ ID NO: 805201 - DNA, 100 bp, Homo sapiens
ctaatgctaatgtcagcagacagattgaggacactgtattatacggttactataactcctacaactcttccaagagcagctggtcgagaaaccaaatatg

SEQ ID NO: 805202 - DNA, 100 bp, Homo sapiens
tcacagggaggaggaggcggcagcggcggaggaaggcggcgcaccccgagaggttgacttccccagaaatctggccaagtctgtaactgtggaatgaggc

SEQ ID NO: 805203 - DNA, 100 bp, Homo sapiens
taatcactgctgccatcagcagaaacagagctcaagaaagaaccatgtttacatccgtccttcatcaaccctcacaggtacgaggaacagcaaattcagg

SEQ ID NO: 805204 - DNA, 98 bp, Homo sapiens
tgcctgtagaaatgagaatgacagctgtgataaaaaaaaaattcatctgggcggtatctggaacttggagctatgaagacatgattggtgaggaggtg

SEQ ID NO: 805205 - DNA, 101 bp, Homo sapiens
agatatggaattatttcgtgatatccaagaacaagcactgcaggactatgatttaatctccaaagaaccaaagccttttgtatttgagggaaaagtacgtg

SEQ ID NO: 805206 - DNA, 100 bp, Homo sapiens
taaggagcttcggaagcggctggtgctggaggaatggatcgtggagcagctgggtcagctctacggctgcgaggcagcagtgaggatgccagagttcatg

SEQ ID NO: 805207 - DNA, 99 bp, Homo sapiens
tttcacggtggcacatacatgaaccttctgataacttaagagagattctccaaaatgtggccagattgcagggagtatcaaatatgagaaagctaggcc

SEQ ID NO: 805208 - DNA, 101 bp, Homo sapiens
cctcatcagcgactatgcagtcagtgcccaaggcttccacgccacctatgaagggctgcattccagtatggtatcaaaatgtctgaagggcggaaaaccag

SEQ ID NO: 805209 - DNA, 98 bp, Homo sapiens
ttggacgaaagtttcaaggagtttgggaaaaaccgcgaagtcatggggctctgtcgggaagagtcctcgaatgccaccttgctgaccaatgcagagaa

SEQ ID NO: 805210 - DNA, 98 bp, Homo sapiens
cttcagaaatatgaatatgttttacatccaagaactacaggctttacttttgtggtagaccgtctaagagaagcttttgttaggagtgataaacccaa

SEQ ID NO: 805211 - DNA, 99 bp, Homo sapiens
agtcgtaaaaacaggtcaagtgaagagtcatgccctatcctgagaatagagggacatcagctgacatatgacaacataaacaaacttgaagtttcaggt

SEQ ID NO: 805212 - DNA, 99 bp, Homo sapiens
agcagtcgtaagaagaggtcccaatcccccactctttccgccctaatggaggtctccagtttcggtttctgctttgggacaaccatacatctaattcct

SEQ ID NO: 805213 - DNA, 100 bp, Homo sapiens
actgaaactgcttttgaagtacaggcagtggctctgccaatgatcctgtgagtattcaggaatcactgttgcccctggggatccttgtcctggagtggcc

SEQ ID NO: 805214 - DNA, 98 bp, Homo sapiens
ttcacttcagacgctacctcgatcagtttgtgcctgagaaaatgagacgcgagctgaacaagagtgcagcagctgccccgagccccgtgcttggcaac

SEQ ID NO: 805215 - DNA, 100 bp, Homo sapiens
tcccgcctgaagaaacctggatctttgctagaaagagaggatagtaatgatgacactgaagatgtttcactgtttgatgcggaagaggagacgactaata

SEQ ID NO: 805216 - DNA, 98 bp, Homo sapiens
gaccttactgtttgtgagccaccaaaaccacagtgttctttgcctcaagacccagctattgttcaggatgacccatctgcaatggattttgtcacctc

SEQ ID NO: 805217 - DNA, 98 bp, Homo sapiens
atgcgaatcgtcagggcattagaacagagtgtgaggtgtgagacaagtacttcagttcaagagtgtatttaggaggtaatcccaggaagcagaaatgg

SEQ ID NO: 805218 - DNA, 99 bp, Homo sapiens
accagaaggcgctgctggagttccgcgacaccatcttcgacaacatcctcaaggatgatgaagataaactgacctggaaggatcgtttcccaggttacc

SEQ ID NO: 805219 - DNA, 98 bp, Homo sapiens
ctggcgctcgtcctccacccctggaatccctgtctgggtgcggactcggagaagccctcgagcatccccacaggtcctcttcctgatggatgggaaca

SEQ ID NO: 805220 - DNA, 100 bp, Homo sapiens
tgtgctacaacctatgactacaaagcagatgaaaagtggggcttttgtgaaaccctagggtggtcccaaccatgtgatgtctggagcataggatgcattc

SEQ ID NO: 805221 - DNA, 98 bp, Homo sapiens
ggtatgtgcagcagatgaagagagggccagagaggatgaaggagaagatgactaaatagaacactgatggattccaaccttcctttttttaaattttc

SEQ ID NO: 805222 - DNA, 100 bp, Homo sapiens
cacatatcccaactgtcagaggagcagcctaccaggacatcctcggaaagtatttattctaggccaggctccagtattcctggctcaccaggtcatacta

SEQ ID NO: 805223 - DNA, 99 bp, Homo sapiens
ggagctgacggtggaggttcgcggctctaacggggctttctacaaggtgtgttccagagaacaagccttcagacatttgctatattgacgctgagctgt

SEQ ID NO: 805224 - DNA, 98 bp, Homo sapiens
gagaactcagccgtgctacactacggacacgccggagctcccaacgaccgaacgatccagaatggggatatgtgcgggctgacgcacgaggcacacag

SEQ ID NO: 805225 - DNA, 98 bp, Homo sapiens
ctgctcgataacacagagaggctggaaaggtcatctcggagactagaggctggataccaaatagcagtggaaaccgatggagttttgcccttgttgcc

SEQ ID NO: 805226 - DNA, 98 bp, Homo sapiens
cagctgcggtggcagctgctgagttctcggtgaagatgggctatctgaagaggaacggggacgggagcctgctctacagcgtggtcaacacggccgag

SEQ ID NO: 805227 - DNA, 100 bp, Homo sapiens
agggcccctgagccaggcgccgcgacacagcggggaccctccggccgggcccccagaggcgggagcgcgggaagatgatccctatgatcttgaagatgtt

SEQ ID NO: 805228 - DNA, 112 bp, Homo sapiens
aagtgattaagaaagcagtacctgaagcacctactcctgttcctaaaaaagtggaggcaccaccagctaaagaagcatcagatggtgaaggagaaggagacacagaagtgat

SEQ ID NO: 805229 - DNA, 98 bp, Homo sapiens
cgccatcttgtgggagcaaaaccaacgcctggctcggagcagcagcctctgagcatgccccctagcttcggtactctgacaccttctcttgcacttgc

SEQ ID NO: 805230 - DNA, 100 bp, Homo sapiens
agaagatctggaataatatgccgaaggatcatcctgtggccaatatgttctacattgtagtgattatggctcttgtattacttagttttggtgttcccag

SEQ ID NO: 805231 - DNA, 100 bp, Homo sapiens
cggacagccaagacgtagatccatccaagacttgactgtaactggaacagaacctggtcaggatgtcttgtattatgagcagcttaagaccaatgtgata

SEQ ID NO: 805232 - DNA, 123 bp, Homo sapiens
ggaaaggctgcggcgcgcagagcgaggctgcgggaccccaggatgggggacaggaggctgcggggcctcagactggtcttctgaggacctctgccctctacacagcggcctcttcaggtgcag

SEQ ID NO: 805233 - DNA, 100 bp, Homo sapiens
tggaagcgcggggcggccgggagggggcagtcctcgccggcgagttcagcgaatactcccccagttgcaagaggcgcaggaccgtggaagacttcaacaa

SEQ ID NO: 805234 - DNA, 99 bp, Homo sapiens
tcaaacaggccatcagcatccgggaccatatgaatgccagtgcccagggccacaggtactccaaagattcaggtttactcacgtcatccagcagagaat

SEQ ID NO: 805235 - DNA, 75 bp, Homo sapiens
ctggcgcgatgcgtcaagtacactgaaattcatcctgagatgagatattgatgatgttaagaagttcaaaccggg

SEQ ID NO: 805236 - DNA, 100 bp, Homo sapiens
acccagggagaggaattacgggaacagaaagaaaagtccgaaagagctgggggattcccgaagtcttccgttttctgagaatgtgagtgctgttcaaaaa

SEQ ID NO: 805237 - DNA, 100 bp, Homo sapiens
gaagatgacgaaagactcctgctgaaagaagacagcactctgaaagcagctggaatcggataaaatggaccagttgctacagatgctgcaaagtacagac

SEQ ID NO: 805238 - DNA, 99 bp, Homo sapiens
gaaaactaaagtttaagctggaactccaagagaaagaaacagaagctaaaattgctgaaaagacagcaggtcacagtgctgtcgatatcaccaaggtgg

SEQ ID NO: 805239 - DNA, 100 bp, Homo sapiens
gctgatagactgattgctcagcatcgctgtcaaagaactcaagctgaaacagagcttagcagtgtctgcaaaaacgaatcttttcctacaacctgttaac

SEQ ID NO: 805240 - DNA, 100 bp, Homo sapiens
tcttggtgccttggttcatccctaagggtcctaaccgggggttgatgccggcccaggatggatcagacctgtgaactacccagaagaaattgtctgctgc

SEQ ID NO: 805241 - DNA, 100 bp, Homo sapiens
agcaaagaaacaaaagacaactctgcttttccagaaactgtgccaggatcacgagactttagaagacagctttccatcgacactaggccctttagaccag

SEQ ID NO: 805242 - DNA, 100 bp, Homo sapiens
cgcaaccaaccttaatatacagccagcctgtcatgagacctccaaacccctttggccctgtatcaggagcacaggtggccattaagcagatgaatcttca

SEQ ID NO: 805243 - DNA, 100 bp, Homo sapiens
cccaccagctccccatcgcagaggccatgctgacctacaagcagaagaggtatttattacagtatcaggagccaataccttgtgagcagttggttacagc

SEQ ID NO: 805244 - DNA, 99 bp, Homo sapiens
aaagtgcagtttatctacaacactgttttgctacacagagagccttggtttcaaaggcatgtccatttgtcattgatatctatgcagaaaaatgcaagc

SEQ ID NO: 805245 - DNA, 100 bp, Homo sapiens
caaaattgaaacagagcatgggactagtatcttgcagtctgttaagagcctgatttgaaaaagcggatccgtgtgcacttgctcaatgcccatggcctgg

SEQ ID NO: 805246 - DNA, 100 bp, Homo sapiens
ccccatctggctggaacacacatcagtcaccctttgaagaagatggtggagagaattcgcaagttccagattctcaatgatgagatcatcaccatcctgg

SEQ ID NO: 805247 - DNA, 98 bp, Homo sapiens
ggagggagcccggcggcttcgggacctcccagagttgcccaaacttctgacccagactcttcagaggcctgcgcggaggaagaggaagggctcatgcc

SEQ ID NO: 805248 - DNA, 99 bp, Homo sapiens
gcggcgttaccggtgaagaagtcgaaaatggagcacgtccaggctgaccacgagcttttcctccaggcctttgagactggaaaaggattttggtctgag

SEQ ID NO: 805249 - DNA, 98 bp, Homo sapiens
ctgaagtcctcccaactaggcagagaaatcggggtggagttcgtggttcccaggactggcttttattgcaagctgtgtgggctgttctacacgagcga

SEQ ID NO: 805250 - DNA, 99 bp, Homo sapiens
ttaattgaagagtcttgtccacagctggcaaattcagtgcagatcagaattctgcttggtcagaatcgtgatggcattgtgttcagcactgatgactat

SEQ ID NO: 805251 - DNA, 51 bp, Homo sapiens
agagaaacccggagggcgccggggatccctctgtgacccagctgaccaacg

SEQ ID NO: 805252 - DNA, 98 bp, Homo sapiens
gcctagacggtgctgggagcgcgtctccttgaacgttgtcccgcctgggattgcgaggaatcagagaagatcattgctgagttgaatgaaacttggga

SEQ ID NO: 805253 - DNA, 100 bp, Homo sapiens
accctcctgccaaaaggaaatgcatctttatgtcagaaacacaaagcagcccaaccaaagggtttgtgaatttcccagaccagccggtggtgtggagaga

SEQ ID NO: 805254 - DNA, 100 bp, Homo sapiens
gaggcttcacttccctcggtctgggcttctctgaggcggcgagagatggtcaggtctggagctcgaccgggccagctggagctccgttactctcatgggg

SEQ ID NO: 805255 - DNA, 100 bp, Homo sapiens
gatccgatggcagcaccacttcgaccagcttcatcctcagacagtatctctcagaagatagaagtgtgcaagaagtactacagaagcatttcaatatcag

SEQ ID NO: 805256 - DNA, 100 bp, Homo sapiens
aatgtgacatgcgtttcatacagaagtacctgcttcagagacatgagaagattcatactggtaaaataccatgaagattttgaaaaaacaaaggggagag

SEQ ID NO: 805257 - DNA, 98 bp, Homo sapiens
atctgtcttggaggacatcagaaggagaattctcaccaaatgttcccaaatccttatcctcagctgtgaaggtaaaaattggaacatcactggaatgg

SEQ ID NO: 805258 - DNA, 51 bp, Homo sapiens
cccgaataagctgtcagactttgataggagatgttacagcccagatagctc

SEQ ID NO: 805259 - DNA, 100 bp, Homo sapiens
tccattgccagttattaaagagcctaatcaatatgttcaaactatactaaaacacctacagaatctttttgtaccaagaggaagcctttgacaagttgcc

SEQ ID NO: 805260 - DNA, 100 bp, Homo sapiens
acttcctctcattgtaatagcccctgtacttttggtggttggatcatttgaagtggtgtctacacttataaaaggtatgagtattatagaacaattagac

SEQ ID NO: 805261 - DNA, 98 bp, Homo sapiens
accccttctgcaagaaagcctctttgcaaccggatgtgaagtaggaacgaataattgggtgcagtgcaatgatgcaccggtgaaaatctgcaaatacc

SEQ ID NO: 805262 - DNA, 100 bp, Homo sapiens
atagaaagtgaaccagtggtagaaagcacagaaactgaggggacataatcatcactcagtagatcatggagctttgtggtgcaacaagacttggttattt

SEQ ID NO: 805263 - DNA, 100 bp, Homo sapiens
gccattttctcaaacgagagtcagcctttaacgagaaagcatgggattatggcaaccacagaatctcagtagtacaagttccattcagttttttctgaaa

SEQ ID NO: 805264 - DNA, 98 bp, Homo sapiens
acaggctccggctcatggcatcaagtggcatccatcataaggtaattgtcatgagaaaaccctggacaacagccatgacaaacagaaatattttgaca

SEQ ID NO: 805265 - DNA, 100 bp, Homo sapiens
gagttccggcctgagatgtgtacagagggtgcccagcagggtcttctacagtggctgttgaagaggctgaaggggtgcaagatccagaacatgagtcggg

SEQ ID NO: 805266 - DNA, 100 bp, Homo sapiens
cgagtacttcgttccaacatggacatcctgaagccaatcctgggatcttcattccaaatgtcagaaggatcagaagctgctgtgatcccattggatctgg

SEQ ID NO: 805267 - DNA, 98 bp, Homo sapiens
atgcccaggagaagctggagctggcagagaaaaaggccaccgataacttggagcgtgatgcccagaagtgtgtgaactggtctgtgaccacaaagatg

SEQ ID NO: 805268 - DNA, 100 bp, Homo sapiens
agctcatctgtagagactgatttgcaacccttccgggaagccatagctctgcatgatgaagacagtcagtgttgccttagttttgtgcctgaatgttggt

SEQ ID NO: 805269 - DNA, 98 bp, Homo sapiens
gacggcagtttggcgacatttctcggccgaagggccatttgcttttgcggagcatcttcatgatacagttaagaggaatcttgacagcgccacttccc

SEQ ID NO: 805270 - DNA, 98 bp, Homo sapiens
cagccagagcctgctgcagcagcagagcgctgcaggcagccagaaggaaggattgattatgtcaagtggccaggcatggaaggagcaaagaaggttca

SEQ ID NO: 805271 - DNA, 100 bp, Homo sapiens
gagagaatcgggggacctgaggtcacaaggtgctggagaatctggtaaaagcaccattgtgaagcagatgaggatcctgcatgttaatgggtttaatgga

SEQ ID NO: 805272 - DNA, 126 bp, Homo sapiens
ctttcaaggatatgctgtattcagctcaggaccaggcaccttctgtggaagtttaccgtggtttctgggcagtcctgatgctcctgggggtagttgctgtagtcatcgcaagctttttgatcatct

SEQ ID NO: 805273 - DNA, 98 bp, Homo sapiens
aatgtgctttttcatcttgaacagagagcactggactgggagtaaggcacctgaatttttagtccctgctgacatactcttcctgaatcttggtttcc

SEQ ID NO: 805274 - DNA, 98 bp, Homo sapiens
gtgtaagacgggatattctcttctgtgctgtcaagggtggttcatataaaaatggtaacacctagaggtataatagaaaaaagctgtcaaggacctcg

SEQ ID NO: 805275 - DNA, 98 bp, Homo sapiens
gtgcaatcctcacattcaagctgataggctgcgctaccggaatgtcatccagcgagtgattagctattccgcgaagtaagaataatgaaggttttgaa

SEQ ID NO: 805276 - DNA, 105 bp, Homo sapiens
tgccctcagtatcaacaatgattgctcaagacttctttgtggctttgctaaaggacagaattggggcttgttgatggacaagaactggcggttgctgatgtcacc

SEQ ID NO: 805277 - DNA, 100 bp, Homo sapiens
gtctcagatcttttctacagcttctgataatcaaccaactgttacaatcaaggtctatgaaggctagtcaagtggagcagtgggagtgaagatggaataa

SEQ ID NO: 805278 - DNA, 98 bp, Homo sapiens
tcaggaaaatcaagacttgtccagttacgaaccctaaggactctgcaatatgaataattccctagagaacaccatctcctttgaagagtacatccgag

SEQ ID NO: 805279 - DNA, 98 bp, Homo sapiens
gaggccagaagtcagaaaacaaggtgtctgcaggaccaacctctcctctggatgctctagaacatcgatatattgaactcttcttgaattctactcct

SEQ ID NO: 805280 - DNA, 100 bp, Homo sapiens
cccgccctggtgtcacagaggctactattactggtgtctttccgatagccgttcctggtgagacatcctctttatataaaacctgggcattcagaatcag

SEQ ID NO: 805281 - DNA, 100 bp, Homo sapiens
ctgattgggaagaaactcttagcgcaatggcaaaatccatgtttggtgaccagagctgtatatattgatattctcttcctattgacttgctgcctcaaca

SEQ ID NO: 805282 - DNA, 100 bp, Homo sapiens
aaagaatgtcatgatagagaagtacaagtggtaccacttttactgctgatgtgccattgcggaaagggcgccaaaggctttacccccatacctggcacca

SEQ ID NO: 805283 - DNA, 98 bp, Homo sapiens
ttcggtccttccgaggaagctaaggccgcgttggggtgagaccctcacttcatccgaatcaagatttatttgctacatcacaaagtaaagaatttgat

SEQ ID NO: 805284 - DNA, 98 bp, Homo sapiens
atgtagaagacgtctacgaattcatccgctctctgccagatcgatctggaatagaaaacgtcaactctgtggaggctttgcaggaaactctcattcgt

SEQ ID NO: 805285 - DNA, 100 bp, Homo sapiens
ttacttccggtaccttgctgaagttgcgtgtggtgatgatcgaaaacgacttgaaagaggagattgatattcgactctccagggttcaggatatcaagta

SEQ ID NO: 805286 - DNA, 98 bp, Homo sapiens
atgagctcagccatctttacggctctggggatcgtgatgggacaggtggtcggactcaggctctgtggatagcaactggatcgtgggtgccacgctgg

SEQ ID NO: 805287 - DNA, 99 bp, Homo sapiens
ctccagcaccctgacgaaaaacactccggacctcatgtgggaagaggaattcaccttaacagcacatcccattataatgctggaacttggggcattgta

SEQ ID NO: 805288 - DNA, 100 bp, Homo sapiens
ctgggttttccttacttatactgtcatcagggagactgtgaacatgtcattgtcattactgacataaggaatctccgccagcagtcctctgcagacatcc

SEQ ID NO: 805289 - DNA, 99 bp, Homo sapiens
aaaaaggaattccaaagtctgaatcagaggccacctcagagagagtgttgactcaaacggacatcaccaacagcctactgtgattgttgggagaaatgt

SEQ ID NO: 805290 - DNA, 98 bp, Homo sapiens
atgaattcaatcaattctttgtgactcctcgatcttcagttgaggggctgcgatttatccagttgaaaaatccttggagtcatttacgttggaaagga

SEQ ID NO: 805291 - DNA, 98 bp, Homo sapiens
atccctgagtgcccgggaggagccttaacaagcgcacggagccctcaagacttaattcagtgcacaaatgagatgaatgtgaacatcccacagttggc

SEQ ID NO: 805292 - DNA, 98 bp, Homo sapiens
caagctggagagatacatgacctcaaggacatgttggatgtgaaggagcggaaggttaatgttcttcagaagaagacctgaagattatcggctataag

SEQ ID NO: 805293 - DNA, 100 bp, Homo sapiens
gatttattaaatttaaatagattagtaactggcatagacaactatgggcagatcctgataacttaagtgactctctcttttccggtgatgaagaaaatgc

SEQ ID NO: 805294 - DNA, 98 bp, Homo sapiens
ggagcagtcctacaagtacaatgagctccggcagcatgagatcacaggaatcaagagagacccggccaaggcttttgtgcccaggactgttatgattg

SEQ ID NO: 805295 - DNA, 100 bp, Homo sapiens
atgacctgtacaccatccctaaagatgctgactcccagaatcctgatggtccgaataaatactggaaagaataccactttaaaattcagtgaaaagaaag

SEQ ID NO: 805296 - DNA, 100 bp, Homo sapiens
agtgctctggcaaagactttccaggatgaacaacgtttccagctgggaattatggatgatgctgcagagtgctttgaagtactcccactaccccaacctc

SEQ ID NO: 805297 - DNA, 100 bp, Homo sapiens
ccgagtctccgccgctgcgggcccgctccgacgcggaaggctctttaagggtcacccagagactctggagaagtttgacaagttcaagcacctgaagtca

SEQ ID NO: 805298 - DNA, 98 bp, Homo sapiens
attatcacgcccaaccagtttgaggccgagtattgttgcagcatctggcagtgagactgaggatgaggacagcatggacattcccttggacctttctt

SEQ ID NO: 805299 - DNA, 100 bp, Homo sapiens
gacattgctgcccgcctcaacatcccagtcagccaggtgaaccccaggttgatccaaggattagttttggatcatggtgcccgtcatccagatatgaaga

SEQ ID NO: 805300 - DNA, 100 bp, Homo sapiens
tgcaattcataatggagctactgtactggctattggaaggaggagattctgaagataaggaggctaacctctgctttgtggacattgacaaccacttcat

SEQ ID NO: 805301 - DNA, 98 bp, Homo sapiens
tgggagcatttttcccctgggcctgatcagtatctggtgacccatctcatgggggcagatctgaacaacattgtgaaatgtcagaagcttacagatga

SEQ ID NO: 805302 - DNA, 100 bp, Homo sapiens
tagtgttgctttggatcttgtggaaagtcagagtgggaccagggagattggatctgctctcaccaggatgtgcatgaggcacagaagcattgaagccaag

SEQ ID NO: 805303 - DNA, 100 bp, Homo sapiens
gcccacctgtgaggttggactcattgttgatcgaaagctgctttgcgtcgcagttggagcagcacccccaccgcaggtggcattgaagggagcgtgaagc

SEQ ID NO: 805304 - DNA, 100 bp, Homo sapiens
aactcatcaggaagcgcggggcggcggcgaaaggacgcaattctgtggtgttcttggtcacacatttatggagtttctgaagggcagtggagattactgc

SEQ ID NO: 805305 - DNA, 98 bp, Homo sapiens
aattcacagtctaccatgaattggaaggctgaagccgacgtagcttctctgaacagacgcatccagctggttgaggaagagttggatcgtgcccagga

SEQ ID NO: 805306 - DNA, 98 bp, Homo sapiens
gacgagttcgtcatccgtgctgaggacatcccttccctcaaggtgacagaactgaagggcctggccaaccatgtggttgtgggcagtgtctcctgtga

SEQ ID NO: 805307 - DNA, 124 bp, Homo sapiens
aaaggtagaccaagtctgattttagatacacctgctatgagacatgttaaagaagcacaaaatcatatttcaatgattatgtttgagaccttcaacaccccggccatgtacgtggccatccagg

SEQ ID NO: 805308 - DNA, 100 bp, Homo sapiens
gtcaacgtgaatgctgctgatagtgatggatgtgacagagccccgatgacacggacacctcggctgctgtcacttccctggttcgggcctcccacaggct

SEQ ID NO: 805309 - DNA, 99 bp, Homo sapiens
gtcttgaagagcagcttagcgaaagaaaccctctctgagttcttgggcacgttcatcttgattaatctggccaacctatttgtggaaatggaatggtag

SEQ ID NO: 805310 - DNA, 100 bp, Homo sapiens
agctgttttctgccatatcaccagaacagattgactttcctccttttgtccttgaatatgatgccaggcttagcagtgtctgcaaaaacgaatcttttcc

SEQ ID NO: 805311 - DNA, 99 bp, Homo sapiens
tcgctggtcgtgcgacccaagcccctgcattcctgtacggtgtctaaaaagcacggcaagctcattacgttcttacgaacattcatgaagtctcgtcca

SEQ ID NO: 805312 - DNA, 100 bp, Homo sapiens
gtcactaaggtctgatctcttttctaaccatacctggaagatggaatgctggacccaggattgcttgcacacatttagatgtggatttagtctgcataac

SEQ ID NO: 805313 - DNA, 113 bp, Homo sapiens
ggacactttgttattggagaaacatgcagattatatcgcatcctatggctcaaagaaagatgattatgaggaacgatgatgaatgtcgggcatttgtgaagagagtcataatg

SEQ ID NO: 805314 - DNA, 98 bp, Homo sapiens
cggagctcccccaagagccggaaaggcatgctgcagacagacctttccgtccttcatgaacacacgtgtggtagacagatgactgtcctgtaccctgt

SEQ ID NO: 805315 - DNA, 98 bp, Homo sapiens
ctgctcaccaacagatgaagacagatgcaccaacgagaaggtaagaggggcgtctggtggagcgttaccaaaaaggaggaattccaagatttttttag

SEQ ID NO: 805316 - DNA, 106 bp, Homo sapiens
gctgcggcaaataacacagccagtcagcaagcagcatcacaagctcagcctggacagcaacagattgtagaaggcatgaaacaaaaaatgtggagtattgaaaata

SEQ ID NO: 805317 - DNA, 100 bp, Homo sapiens
agcaaatgctgaggactcagaccagtctctgcaagaggttgggccagcccctgccgggtgcgccacagccccaggccttgtccacagctggtgaggaaga

SEQ ID NO: 805318 - DNA, 98 bp, Homo sapiens
ggcggcgaccgagccggagctgctcgacgaccaagaggcgaagaggtgcgaaattgaggcaactcttgagaggctaaagaaactagagcgtgatctca

SEQ ID NO: 805319 - DNA, 100 bp, Homo sapiens
ctttttgcctctgtgatggctgataagtttgctaatccagactttacacaacctatctcagaagttgtagatgaagtaattcagaattgtcctattgatg

SEQ ID NO: 805320 - DNA, 98 bp, Homo sapiens
gcttatggcggcgctggagagggggcgctgagctgttgggattgctcttaaacttggtgtgactgctaatgatgtaaagaatgtcattatctggggaa

SEQ ID NO: 805321 - DNA, 118 bp, Homo sapiens
ccagagaccctgcgataacctgcatctctgcaaactcaacttgctgggccggtgcaactattcgcagtccgagcggactctccttcagcaactccagaagcttcagactttggtgatg

SEQ ID NO: 805322 - DNA, 100 bp, Homo sapiens
tgaaacggattgccagagaattggcagaagatgcgctggctccctccctccgaggctacttctcagggctggaagtcccgtcagttctgctgaatactat

SEQ ID NO: 805323 - DNA, 100 bp, Homo sapiens
agtccaggactctttctattacatcatgcggcctgatatttgtctttatggaactcagcaacatcacatacagggaacatttacagttcagttttatgat

SEQ ID NO: 805324 - DNA, 98 bp, Homo sapiens
ttgctgtgggtgctgggacttcccgtccgcggcgtggaggagcctggcagagagcaggtgtgtgatacacgtcgtcaggtgactgaccgaggaattca

SEQ ID NO: 805325 - DNA, 98 bp, Homo sapiens
tgacttcactacttttaagcaaaagagcatggaagaggagatggttcgtgttacgcagtggccgtttaactggagatccagatgttttggaatattac

SEQ ID NO: 805326 - DNA, 100 bp, Homo sapiens
gttccaccagcaaccatgagtggttccatgatgggaagtgacatgacgaagttatacggaagcgtctcctcattgatggagatggtgctggagatgatcg

SEQ ID NO: 805327 - DNA, 100 bp, Homo sapiens
tgaccgtgtcttacatcagttcagagagtcatggctccgatcttcatcttgaagaagagtgacattgggtgactgctgcttggaaaactgtccacacttg

SEQ ID NO: 805328 - DNA, 98 bp, Homo sapiens
aggacgttggtgaccctggtctctgagcttttgtgtggtcctctgagccccagtgagagtttcctgaggtacctcacccttccacaagacaacaggct

SEQ ID NO: 805329 - DNA, 98 bp, Homo sapiens
tcatcccactctggaagctgagccggcggcgggaggagctagggctggagcctctccagcctcccgcgaagacccagaagtccacattcccctcgaga

SEQ ID NO: 805330 - DNA, 98 bp, Homo sapiens
gtgtcctaactaagcctcaactccagcagtgcctgggaggaaggaaggtaaaataccatgaagattttgaaaaaacaaaggggagaggctttactccc

SEQ ID NO: 805331 - DNA, 100 bp, Homo sapiens
ttgaaaacacgagtggaaaagattgaatgtaacaagaggcataaaacagttctcactgaactacagggggcagctggcattttatgctatgtgggagcct

SEQ ID NO: 805332 - DNA, 100 bp, Homo sapiens
gagtgaggagccagacgacaagcacacactatggcgctgaaacggattaataaggtcgattgagctatccacatccaggaactgacaatctgttgatgtt

SEQ ID NO: 805333 - DNA, 98 bp, Homo sapiens
ggcgaggagcgtttcgtgcccctcggacccggccacgcagtccccaggggcccggcccggggcgcgttgaagctcctccacaatttacagtaaccccc

SEQ ID NO: 805334 - DNA, 100 bp, Homo sapiens
gagcacgcgtttcccgcaacccgataccatcggacaggatttctccgcctcagcccaacggggagccctccagaatacccatcatatagcccctgaggtg

SEQ ID NO: 805335 - DNA, 100 bp, Homo sapiens
aaaaagaaaactctagaagtctggatgtcggtgggcctctgagatatgccgtttacggttttgtccatcatggaactgtcctggattgtgaggagaaaga

SEQ ID NO: 805336 - DNA, 100 bp, Homo sapiens
tgattcgtatctaagactctgggacactcctgaagtcgggaaatgtactatactggcaattgctggagaagattttgcaattgttgcttctgatactcga

SEQ ID NO: 805337 - DNA, 99 bp, Homo sapiens
tccgatttaaagctgagctgcgaggaaaatggcggcgggaggaggagacatcacagctttcccagatcgggaggaaaaatatggaatgtgttttaccgc

SEQ ID NO: 805338 - DNA, 100 bp, Homo sapiens
ggacgaccaggtcatcctgctgcgggcaggggtcgggccccggctcagtggtcccaggcagctcgggtgtcggaacccccagacagttcacgcgacaaag

SEQ ID NO: 805339 - DNA, 100 bp, Homo sapiens
gaattcagaaggagctagctgaaataacccttgatcctcctcctaattgcagtatcaccttttgccatgatagcatttctttcattggacagttccttac

SEQ ID NO: 805340 - DNA, 100 bp, Homo sapiens
ttgcgctccatccgtccagataacatgtcggagtacagcaagcagatgcagagatggtggcatggagaaatcgttgtcaaaacagagatgtccgtcagta

SEQ ID NO: 805341 - DNA, 99 bp, Homo sapiens
ttgccttattttttctcatggatgttcttcttcgagtatttgtagaaggttgcgagaaagaatcaaagctggcaaaggtgtgacttcagctattgacct

SEQ ID NO: 805342 - DNA, 100 bp, Homo sapiens
cagaggatcctgtagccataaagattgcagcaattctgtggtgttcttggtcacacatttatggagtttctgaagggcagtggagattactgccaggcac

SEQ ID NO: 805343 - DNA, 98 bp, Homo sapiens
gacactgctgtggacagtctcagtgctgcaactactactatgaactctggtggagccgatatgtggatttactcccttgatggaagcagctgctgctg

SEQ ID NO: 805344 - DNA, 100 bp, Homo sapiens
atttaaagagctgggcttgaacttcgtgagtttcgctctaaactgcccttgaaatgaagctggacttggagattccagcaagattatggaagagcatagc

SEQ ID NO: 805345 - DNA, 100 bp, Homo sapiens
accacgttgctcctggagatgagcacgccctttacctgcgtttcctggatgctcttaaaggtccctccttgtggtccatttctgggcaccatgggctcca

SEQ ID NO: 805346 - DNA, 100 bp, Homo sapiens
tgaagatagtgcctttcagccctaccaggtagctgcgaggtgccaacaaggctaaattctgcatccctcaaacagccttatatcactcagaattattttc

SEQ ID NO: 805347 - DNA, 99 bp, Homo sapiens
tctaacacagtggaaaggaaccgttctggatcagtactatactggcaattgctggagaagattttgcaattgttgcttctgatactcgattgagtgaag

SEQ ID NO: 805348 - DNA, 100 bp, Homo sapiens
taatggaaggatacagctatgcaaatatagaacactaaagtgttacatgacagatgtatgagagtgtgcagaatgattcacaagcaattgctgaggttct

SEQ ID NO: 805349 - DNA, 98 bp, Homo sapiens
actttgagacatttgatgtggatgaatatgaacattatgagaagtttgcctgcaatggtactgtaattgagcatccggaatatggagaagtaattcag

SEQ ID NO: 805350 - DNA, 99 bp, Homo sapiens
tccgtcaggtcagaacgccacttgcacaagatacagtttgtgccattcagggattatattgacagaagtggaaaccacatactgagcatggctagattg

SEQ ID NO: 805351 - DNA, 100 bp, Homo sapiens
gttcccagaagcgaagtggagagcgccagagtaatggaatccacattcatctcaatggaaggatcctgccttaagtcaacttatttgtttttgccgggaa

SEQ ID NO: 805352 - DNA, 100 bp, Homo sapiens
cttaaataagattttaattgaagctggaaagcttggacttcagccctagcaaaccaagagtgagccaccttggaagtagatcctgcagtcccagtcaagc

SEQ ID NO: 805353 - DNA, 100 bp, Homo sapiens
atgttggactcatagtcactgccagaaaggtgtcttgtctgtataccctgggctacccgccagcccaagcgcagggtctgcatgtgaccagcatctcctg

SEQ ID NO: 805354 - DNA, 99 bp, Homo sapiens
tccgagcccaaggcaattgatcccaagttgtcgacgaccgacagggtggtgaaaggtaccttaacatggggaatcttcttaaagttttgacatgcacag

SEQ ID NO: 805355 - DNA, 100 bp, Homo sapiens
atgcccaactaatatttggaattttcgtatacgtggattccagaggggtgacagcgaaatgttttactgggacctgatcatgctgctgctgatggtgggg

SEQ ID NO: 805356 - DNA, 100 bp, Homo sapiens
ccggccgcgcgggccgggaggggacggccgccggagccgcgaggccaaggggggccctcagcctcttggccttgaacgggctgttcatcttgattcacaa

SEQ ID NO: 805357 - DNA, 100 bp, Homo sapiens
aacaccatccctcccaccagtgctaccatgggccaactgtatgaggtcctctgactgtcccatcttgggaggaagcccctcaagtgccacgtattccacc

SEQ ID NO: 805358 - DNA, 101 bp, Homo sapiens
cttaaagatagattttgttggagagctgaatgacaaaatgaaaggtttctatagaagaaatgctagtgagtcggaggaagaccgcagcgccggcagtgtgg

SEQ ID NO: 805359 - DNA, 98 bp, Homo sapiens
gactcccaccgggactcctaccagcagcaacctcatcattgtggccgaggcaggcacccgacaggaggatcctttattcgtccgaacaaggtaaattt

SEQ ID NO: 805360 - DNA, 98 bp, Homo sapiens
tgcaatgtcacttacaacattaatcagatactgcatttaaggttcaaaccttgtactactcagctgatcacaagctgcttgatgggaacctactagat

SEQ ID NO: 805361 - DNA, 100 bp, Homo sapiens
tcctctgttataagagagggagagataaaccaccgcttacagatattggagtcaagggtccagagaaggaggagaagttgagacaggcggtcaagcaggt

SEQ ID NO: 805362 - DNA, 99 bp, Homo sapiens
cacgtaccagaggtggaagtccaagtcaaacgcagaaggactgcctcactgagcaaccaagaactgtcaagaacaagtatgccacatcgaagcatgcta

SEQ ID NO: 805363 - DNA, 109 bp, Homo sapiens
cagtatcagttaaggagcttgatttgtttttggcatactacgtgcaggagcaagcagtagaagactcagaaagtggtgtttacatgcgattcatgaggtcacacaagtg

SEQ ID NO: 805364 - DNA, 98 bp, Homo sapiens
atttaaagaatgaaccttggtataaattcttttcggaattggagtttgggaaaccgactatagaatctaactggcggtgtggacgacacaacttgcag

SEQ ID NO: 805365 - DNA, 98 bp, Homo sapiens
gtccggggctgcgcgaccatggcggacaaggaggccggcggcagcgacgggccccgagccttcaggctctacacacagatgatcctctcacttgggat

SEQ ID NO: 805366 - DNA, 100 bp, Homo sapiens
ctgcaaccgtttccgcctcctgctagagcggcgaaccgtgggcagtgaggtgcggtggatgatgtactggattgtttttgcactcttcatggcagcagag

SEQ ID NO: 805367 - DNA, 99 bp, Homo sapiens
ttggtctcatcttggaaatgtcagctcttccgcagtgattgaagctttgataaatgaaatcttcctaagtataggctcataggcggaagggacttgcct

SEQ ID NO: 805368 - DNA, 99 bp, Homo sapiens
aactattcaacatggaggcggaggtcgataagctggaactgatggtgcttgtgagtgaggattctgacagtgatggcattgtggcccacttccctgccc

SEQ ID NO: 805369 - DNA, 100 bp, Homo sapiens
atccattccgtcaaatgcttgttcttccctggaagttgaggcagccatatcaagaaaaactccagcccagcctcagaggaatgatgagaagacagcagct

SEQ ID NO: 805370 - DNA, 100 bp, Homo sapiens
gaaaaagaaggccctgagtcaaagaagatgcctcgaactaaacaaattcatcccagaaatctaagagggaatgaaagctactggttgattttaaagtgcc

SEQ ID NO: 805371 - DNA, 99 bp, Homo sapiens
ctatgtacctgttaccactttcaaaaggtcatctagtagcaggcacccaaatcaggcaactcccaagaaaagtggtttaaagaatggccagatgaagaa

SEQ ID NO: 805372 - DNA, 98 bp, Homo sapiens
cagaagaaggacttcggaatgcactacaacaggaaaatcatattatagatggagtaaagaactggctgacggagctggagatctttgctataatcttc

SEQ ID NO: 805373 - DNA, 100 bp, Homo sapiens
caacagtctactgctcgacctggctgcattattgaactcgacgcaataaccaaccaagtcctcatgctgataccgccagtggatgccagaatttgcagtg

SEQ ID NO: 805374 - DNA, 100 bp, Homo sapiens
cccgttgaaggtgctaccgctgacgacacccctggtggatggcgaggatgagagaaaatatttacaccagcagctccagttcataccaataaagaagatc

SEQ ID NO: 805375 - DNA, 100 bp, Homo sapiens
aactgagcccaggccacagtaccctattcacgctctgtgcttgtgccaaggtttttcgttggaatatacgttgcacatttatggcgattctgagtgtgag

SEQ ID NO: 805376 - DNA, 100 bp, Homo sapiens
caacttccgtagttcagcatagccacttacgagaatcaaattctaggaaagaaggattgtccaaatgtggaagatgcaagcaggcattttactgcaatgt

SEQ ID NO: 805377 - DNA, 100 bp, Homo sapiens
cagcagcagcagtagctatggcagtggcagaagattttaattagttttagttactatccagcagaaaacttgatagagtacaaatggccacctgatgaaa

SEQ ID NO: 805378 - DNA, 100 bp, Homo sapiens
tctgagagccaggcggaaggacaggagcagctcttcaaactcacagacaacatacaggacgaattaaccaacgaaacgtatgctttccttccaagggtta

SEQ ID NO: 805379 - DNA, 99 bp, Homo sapiens
tcatttcacagctgattcctgggagcacatccatttcattggcaaggttcatctgcagaagccagcggacgcctctgttcaacttgtgggttacctggc

SEQ ID NO: 805380 - DNA, 99 bp, Homo sapiens
ggtgggagtgacccgattttccaggtgaacctgagcaaggtgggcgagtattggtggaacgccatcctggagggagaagagcccatcgacattgacaag

SEQ ID NO: 805381 - DNA, 100 bp, Homo sapiens
tggcaaagtagaaaaacactatctcttctatgacggagaatccgtttcaggaaagtagttcacaacagatctgagtgttttaattaagcatggaatacag

SEQ ID NO: 805382 - DNA, 98 bp, Homo sapiens
attagaccattttcttcgtgagaaagaaatcgacgtgctgttttcatagggtgtcgtgaaaactacccctaaaagccaaaatgggaaaggaaaagact

SEQ ID NO: 805383 - DNA, 100 bp, Homo sapiens
ttacctggcatgtggattttgtcgctggacgtctagagatgtgggcatggcagacaaatctgtagaagctaaaccagccccagaaatatttgaaaatgaa

SEQ ID NO: 805384 - DNA, 100 bp, Homo sapiens
acatcatcgacatggccctgagtgaatacccagaaaatttcattgccggtggtggtgtgcacattgagccccggtatagacagttcccccagctgaccag

SEQ ID NO: 805385 - DNA, 99 bp, Homo sapiens
tctgtgactccgttatctgcaggtattgggagatgcacagctaagatgccaggaccacctggaagcctagaaatggattactacagcatcccatttccc

SEQ ID NO: 805386 - DNA, 50 bp, Homo sapiens
acatcagagggtcgcttcatgcaggtgtgtcaaggatgccacaatgccat

SEQ ID NO: 805387 - DNA, 98 bp, Homo sapiens
ccagaagcagggacagggagctggttggggaggaccagaaatcaggactctgctgggccgctcagccatgcctgagggagcccaaggactgagcctct

SEQ ID NO: 805388 - DNA, 99 bp, Homo sapiens
tgggcttttcacagtgggctttactgtgttgagcgaatgacaacagagctgctcaaggcgggaactctgagctaagcagtggaggtttctctggatctg

SEQ ID NO: 805389 - DNA, 100 bp, Homo sapiens
aaggacaaggcaagcggatatatgaaagaaaagtggcaccactgttcaccttagcctccatcaccactgacatcatcgctccgggaagcagtttgttcgc

SEQ ID NO: 805390 - DNA, 100 bp, Homo sapiens
gcacagaagcaccaattctcccacaatagtttcacctgctattgtttcccccacccaggcttacgagaggccccagaaacattcaactctccattatgac

SEQ ID NO: 805391 - DNA, 101 bp, Homo sapiens
gtatgaattcttcgtcaaagtctacccctcctgtcggggaggcaaggtggttttggaccagacaggcgtgtctaacatccgcacttccactaatagccaag

SEQ ID NO: 805392 - DNA, 100 bp, Homo sapiens
ctgaggaaaccatttctacagttcaagactgcctgcgctgctgacttaaggccccaacaccaaacacagaagcaacagccttacacagagtgttcagcaa

SEQ ID NO: 805393 - DNA, 99 bp, Homo sapiens
tgtggcactccagaatatctggcaccagagatactcatttcaaagaacttccaactcttctccactgtgcagcaaaatttggcttaaagaacctggcta

SEQ ID NO: 805394 - DNA, 116 bp, Homo sapiens
catcatatcacagtatcagttaaggagcttgatttgtttttggcatactacgtgcaggagcaaggtattgttgcagcatctggcagtgagactgaggatgaggacagcatggacat

SEQ ID NO: 805395 - DNA, 100 bp, Homo sapiens
aaagagttcctggatgacctcttcgtctttatgcagaagagggatccttcatggatttaaaaatcaagttggcgatgaaaattggaggcgtttctctgac

SEQ ID NO: 805396 - DNA, 98 bp, Homo sapiens
gaaccagttggtggcctgggcagcctgctggaccctgccaagaagtcgcccatcgcagcagctcgggatccatatggctttggagacagtcgagattc

SEQ ID NO: 805397 - DNA, 100 bp, Homo sapiens
gaggacatggccgcgcacaggccggtggaatgggtccaggccgtggtcagccgcttcgacgagcagttatagctgaggtggtaccagtttaagaagtgag

SEQ ID NO: 805398 - DNA, 98 bp, Homo sapiens
aaagaaacctgtcaggaatacgagcttctggatttggacttccagattctagacgccatggtgaaagcatatgtctgtctccatgtaacacactggca

SEQ ID NO: 805399 - DNA, 100 bp, Homo sapiens
ctgactgcacttcttttttgagaaaggaaggaatatatcctgactgattttttctgaagctcagagggacaccttgtattgctggatgataaaaacagga

SEQ ID NO: 805400 - DNA, 99 bp, Homo sapiens
agaactacagaaacctcgtctccctggacatggaaggtctttaatgtaactttaaatggttcaccaaaggatgctctaatggatgacagcgatactcct

SEQ ID NO: 805401 - DNA, 98 bp, Homo sapiens
tggatcccagctttgtggctgccgtcatcaccatcaccttcaatccgctctactggaatgtggagccaaaaacctgtatatcatctccgtgaagggga

SEQ ID NO: 805402 - DNA, 100 bp, Homo sapiens
aaagcctctaacacccacagatccctctatgactgcaatgtgagaaaccaagctctgtccgtatcgatcaactggatcgtgaacagttcaaccccgatgt

SEQ ID NO: 805403 - DNA, 100 bp, Homo sapiens
acagggacagcacctcatcccctggatgggggaccacaagatcctcatcgacaggttgcaccccttaaggatcttcctgtaaatgatgagcatgtcaccg

SEQ ID NO: 805404 - DNA, 100 bp, Homo sapiens
acttggtggcattgttttaccaaatgatggacaatgtcacctggaaaataatatgtacacaatgagccattattatgtggaaaatagctattcaatttct

SEQ ID NO: 805405 - DNA, 98 bp, Homo sapiens
ggacaagaagatggtggagaagtgctggaagctcatggacaagctaactgccttctatgaaagcagtcattattcaaggtgatcgtattcttccagtg

SEQ ID NO: 805406 - DNA, 99 bp, Homo sapiens
agttcgtcatggggctgtttggaaagacccaggagaagccgcccaaagaactgattactcttgtctctgctgctcctgggaaagtgatttgtgaaatga

SEQ ID NO: 805407 - DNA, 98 bp, Homo sapiens
aaaatcgaagcacggagaggcgccagtcggagcctcatggccttttcgctatgacttcacacctatggattcttctgcagtttatgtgttaagtagta

SEQ ID NO: 805408 - DNA, 100 bp, Homo sapiens
cactttcatcacatggatcctcatccagtttgcatttagatttgggccaggcttagtcatctattggtatggatttatccaggagctggactgcaaccgg

SEQ ID NO: 805409 - DNA, 98 bp, Homo sapiens
agtaacatacagcactttgtggagaaagtcgtcttccacttgcacgaaagctttcctaggccaaaaagagcatttgccatctatcaatcgctgcctta

SEQ ID NO: 805410 - DNA, 100 bp, Homo sapiens
gaatattcttcgcagcctaaggaggaacactaaggatgcctttgtggaactgtacggccccagcatgcggcctctgtttgatttctcctggctgtctctg

SEQ ID NO: 805411 - DNA, 100 bp, Homo sapiens
tcgacctccaccaaccagaaggagggcaagtactgcgactgctgctactgcgaattctttgggcacggcgggtgctgtgctgtggctttcattgagaagc

SEQ ID NO: 805412 - DNA, 100 bp, Homo sapiens
aacatgagcttctgaccatgtaccatggatgggttctcgaaagcagatggtggagctgaatatgccacttaccagactaaatcaaccactccagcagagc

SEQ ID NO: 805413 - DNA, 74 bp, Homo sapiens
gaagaggatgttggacttcttacttgaaaagtgtgatgaagaccacatggggtgtgctggatcctcctgtgggg

SEQ ID NO: 805414 - DNA, 98 bp, Homo sapiens
aaggatgatggcatttctcttttaatatctgatactcagcctgaagagcaatgataatgaggagcgcctacaagttgttaaactactggcaaaaatgt

SEQ ID NO: 805415 - DNA, 131 bp, Homo sapiens
ctgttggaagaatgctggaacgagttataggaagatgtagtccaacccacatcagcagtcttttgagggcaacaacaactatgatacacctgagctgcggacttttccagctctctccacgcgattcatca

SEQ ID NO: 805416 - DNA, 99 bp, Homo sapiens
tctggtcctcataatcttacttatcctctaggtcccaggaatgaagggcttttacctttacagtcatcatccttttatggtagcagagctggatccaag

SEQ ID NO: 805417 - DNA, 98 bp, Homo sapiens
tcgggtacctggtggcgcacaacctcctcctgatctttgtagaatttgatggctgtaactggaagcaacactcctgggtaaaagttcatgctgaggaa

SEQ ID NO: 805418 - DNA, 100 bp, Homo sapiens
ggagaggcacgctggctgcccctgtgtcacagcttccatggatgacatctattttgagcacaccattagggaaaggtttgaaacggaacgtaacagccca

SEQ ID NO: 805419 - DNA, 143 bp, Homo sapiens
gcatacaccgagagagtgaggagccagacgacaagcacacactatggcgctgaaacggattaataaggttgcagattttaaagatgcccttgccagagtatatggagtgatacccaaaatccagtgccttccaccaagccagg

SEQ ID NO: 805420 - DNA, 99 bp, Homo sapiens
tgggcgtgaaatgactagattggccgggacaatcctccaaacacagactgtttgacttagaatcttcccttttttactccattcaagagcagcattcat

SEQ ID NO: 805421 - DNA, 99 bp, Homo sapiens
ggaatatgaagggacacagtacggtagtcaaacccccagtgcaccaattccagctggacatcactgtgaaaatgggacgggataaagtccgagaaatgt

SEQ ID NO: 805422 - DNA, 101 bp, Homo sapiens
tggtcgttttgacagagaattcctcttcaacctgcctgatcaaaaggtcctaaagaagacgaagagaagccttcagcctcagcacttgagcagccggccac

SEQ ID NO: 805423 - DNA, 100 bp, Homo sapiens
gacagttcaaggaggaggagacccctattacacaggtttgggtttgtacaagataaatattctgcctctgcttttaacttccctgctgagaacaagcctc

SEQ ID NO: 805424 - DNA, 100 bp, Homo sapiens
aagcagagcaatcgccatggagtttgtgatgaagcaggctctaggagacatgcaagaaagcacttcagccaagcagaagggagccagctggacgaggtgc

SEQ ID NO: 805425 - DNA, 117 bp, Homo sapiens
ccattggtgggggcggtggaccagggcaccagttcgacgcgctttttgcatcccagccatcactcttccacctgctccttagagaagggaagatgagtgagtcgagctcgaagtcca

SEQ ID NO: 805426 - DNA, 99 bp, Homo sapiens
agccgcgcagccctcggagcacggtgtagaatgagccaaggagactcaaacccagcagctattccgcatgcagcagaagatattcaaggagatgaccga

SEQ ID NO: 805427 - DNA, 100 bp, Homo sapiens
ccttggctggaagaggctggataaaatactgcattcagaaaaggttgttgaaagtccagatttttccaaggatgaggactacttaggaaaggttggaatg

SEQ ID NO: 805428 - DNA, 100 bp, Homo sapiens
agaactttcagaatctcaggcgggtgaggacagccctttcttggcggagcacaaatatcccactttacctgggaagctttcaggagccacgcccaatgga

SEQ ID NO: 805429 - DNA, 98 bp, Homo sapiens
tacatccggcaagcgggtgacttccatcagtttaaactcatatcccaggcatatgaagtgctttcagatccaaagaaaagggatgtttatgaccaagg

SEQ ID NO: 805430 - DNA, 98 bp, Homo sapiens
agtgtcctgtgtttccttctgctgcttggattccagttcgtctgcccacagccctccactcaacacaggaaggcttcattccagcgctccaatagtca

SEQ ID NO: 805431 - DNA, 98 bp, Homo sapiens
tcaggagtgtagaattggcaaagttattgccagcttcctgttctaatacccgatttacaattacattgaactacaaggatcccctcactggagatgaa

SEQ ID NO: 805432 - DNA, 101 bp, Homo sapiens
ctgggttcaagcaactctcctgctgcagccacgtctcttgcagctgaatggggtaaatatggaatgcgattcaatgtgattcaaccagggcctataaaaac

SEQ ID NO: 805433 - DNA, 98 bp, Homo sapiens
ggcagaggcggaattgcacaaggaaaggctgcaagccatagcagctgttgtacagtggcctgattatagctcactgtagcctcgaaattctgggccga

SEQ ID NO: 805434 - DNA, 100 bp, Homo sapiens
aaaaacggcccttggatgatggaggtcgtcaaagtcctacattttagctttcagtgctgaacttccttctcccttaaattattataaacttttgctgctg

SEQ ID NO: 805435 - DNA, 98 bp, Homo sapiens
gggagaagcatgggaaggaggccgagccgggatctcaggtcctcgggggcggcggccacgccaaggacggggctaaggaatatgagagtttaatggaa

SEQ ID NO: 805436 - DNA, 138 bp, Homo sapiens
cctacttctgcccagccacagccctcccctcacagttgagcacctgtttgcctgaagttaatttccagaagcagcgagtggcatcgtgttccagtgggggactggtttggcatcatgtggacgacggttgtgccctgg

SEQ ID NO: 805437 - DNA, 98 bp, Homo sapiens
gtcaaaggatttgaaactgctccacttaccaagaattattatactgtgatggagtttcactcttgttgcccaggctggagtgcaatggcgtgacctcg

SEQ ID NO: 805438 - DNA, 100 bp, Homo sapiens
cattcccatgaaggagactatttagagtccatagaagctgccttgaatctggcctacatcctaatccccagcattccccttctcctcctccttgtggtca

SEQ ID NO: 805439 - DNA, 100 bp, Homo sapiens
ctcaaagacctggtcttcaagtcatccttgggcagccaaatgctgtgtaagaaggaacctggagcaagagatttcttttgactttggccccaacggggag

SEQ ID NO: 805440 - DNA, 99 bp, Homo sapiens
gcacagttcctgggaaggtggagccaccagcctctccttgatctttgatggaaaacagattccacagagaatggttgatggatggaatgctttcttctt

SEQ ID NO: 805441 - DNA, 112 bp, Homo sapiens
gggctgtccaacgccttccagctccggctcccgctgcctgcaccatgtccgccagaggttacagaactcaataatgtgaagaacgtagctcgattgccaaaaagcaccaaga

SEQ ID NO: 805442 - DNA, 100 bp, Homo sapiens
ggaggtgttggttcagcaaactcttcagcggattcgacaatcaggaaccaaagaggttgttgtaaatgtggatgatgatggagtcatttcattgaacttc

SEQ ID NO: 805443 - DNA, 98 bp, Homo sapiens
ttcacccgggatacgctgcaagagattttccagagggcgcaccctacgacgcgcacaccaccggcatgaccggcgccatcagctaccacccgtacggc

SEQ ID NO: 805444 - DNA, 98 bp, Homo sapiens
tcatcatctacttcacaggaattgccatttctactctgacctacgacactctccggtttgctgagtttgaagattttcctgagacctcagagcccgtt

SEQ ID NO: 805445 - DNA, 99 bp, Homo sapiens
tattaatagagcacccatgaatggacattgtcatctgtggtgtttgactttacgatgcaaattatactttgacaacttactatctcagcgggcctattg

SEQ ID NO: 805446 - DNA, 99 bp, Homo sapiens
gtgcggctgggcaaagtagccattgaccgaggaacggagtaccagaagccaaaggaggttgtggtggccgagtctgagctacagaaggaactaaagaag

SEQ ID NO: 805447 - DNA, 101 bp, Homo sapiens
cgagtatctggtgaagtggaaaggatggcccccaaagtgaccagaagtcagcagcttcccagaagccccgaagccggggcatcctccactcactcttctgc

SEQ ID NO: 805448 - DNA, 111 bp, Homo sapiens
ttatttcccgccactggctattcaggatttaaaaagaatgggtttgaagataaatctgttcagataagctccttatgaatccttcagatcgatgttcttgaggaaaacagt

SEQ ID NO: 805449 - DNA, 100 bp, Homo sapiens
aaccttagcgacatcaggaagaacagggtcgaggatcgagtcactctgagaggagtgataccaatgaaaaaaggtcagttgattccagtgctaaaaggga

SEQ ID NO: 805450 - DNA, 100 bp, Homo sapiens
ggcctccccctatcccaacctcagcaatcagcagacacgggagtttgtggagaagggacagtcattttgtttactcattcagccctgttgcaggtcccaa

SEQ ID NO: 805451 - DNA, 100 bp, Homo sapiens
ttgaggccaggagttcgagaccagcctagactcggggtctaaatgtgagaccaagaagttacctccaaatcaatgcaacaaatctgggcaaagcatctgc

SEQ ID NO: 805452 - DNA, 100 bp, Homo sapiens
agtttcatgaacatttcaataaattgatggccagacctgcagttgctctacactttcagaagcctggaatggtcccccctccgccgggagaagaaagcca

SEQ ID NO: 805453 - DNA, 98 bp, Homo sapiens
catggctgcggcggcccagctctctctgacacagctattgacctgaaaagtggttctggaaaagtgtaccaaggccctgcaaaaggtgctgctgatac

SEQ ID NO: 805454 - DNA, 100 bp, Homo sapiens
tcgctcttcagcaagacccaaggccaacaagtgtctagcctcaaaggtattgttgcagcatctggcagtgagactgaggatgaggacagcatggacattc

SEQ ID NO: 805455 - DNA, 98 bp, Homo sapiens
aagctcatgcggtctggctccagaacaactcttcttcatagttacgttatactgcccctgcattgttggtattgaaacactagaaagtttgggatttg

SEQ ID NO: 805456 - DNA, 99 bp, Homo sapiens
gctcctggcgctgctggctgcgctctgcccggcgagtcgggctctggaggaaaagaaagacgtgaagccctccaatatgctagtaaacacaagaggaca

SEQ ID NO: 805457 - DNA, 100 bp, Homo sapiens
aggattgtagctttggatctgcgaagtcatgagttttaagaggaaacctgggcaggctgacaatgaacgttccatgggtgatcacaatgagcgtgtgcac

SEQ ID NO: 805458 - DNA, 100 bp, Homo sapiens
gatgaggaaagctgtgaaagttctcaaggccaatggtggcagagtctacatagaactatgcttcgtggtgttctggggaaaacctttcgacttgttggct

SEQ ID NO: 805459 - DNA, 100 bp, Homo sapiens
tttccctggagaggaagaggcaagaccgagtgtgtcagcagccaggactttctctctgggtccccttccaaaacgcagccaccgccgtcaccaatctcta

SEQ ID NO: 805460 - DNA, 98 bp, Homo sapiens
gagaggaccaggaagcacctgactcagatgccgaggtggatggtgtggatgaagaggaggaggacgaaggtgctccaatattacctcaaggattacag

SEQ ID NO: 805461 - DNA, 98 bp, Homo sapiens
gatgaagaaactgaggttcagagaggttaagagactccactgaggtcacacagccgaaagtttacaaagaggattttgagaaggagattaaaggaagg

SEQ ID NO: 805462 - DNA, 115 bp, Homo sapiens
caaaaagctgtgtctgccctgaaggccagtggggttcaagctcaaatggcaaagatgcctggaatgatgtcgtcagtaatgcctggaatgatgatgtctcatatgtctcaggctt

SEQ ID NO: 805463 - DNA, 100 bp, Homo sapiens
ccttgaggcgccggttgccggccacaacccttggcggagcctgcctgcagaattgtcaacatcacactgctggtgacttctgtgaacgatgtgctcttgg

SEQ ID NO: 805464 - DNA, 100 bp, Homo sapiens
cctctgacactgggtctctgtcacctccatgggaccaggaccgtaggatgatgtttcctccgccaggagcggcctgcttcagactcctggcagaaacttg

SEQ ID NO: 805465 - DNA, 100 bp, Homo sapiens
caagattccagatgttcctgtggaccccagtccagatcctggtgtatagcctggaagcaggacgccgcctcttgaagctgggtaacgttctccgtgactt

SEQ ID NO: 805466 - DNA, 98 bp, Homo sapiens
gccactcagagtcgcccgagaacaccgacagtaaatggttcacggccgacatcatgtccataggggtgaattgtacacagatcacagcaacagagtgt

SEQ ID NO: 805467 - DNA, 100 bp, Homo sapiens
aatgtgatttgcttgaagatatgagagttatggtgaatggttgcatggatttgaaaaaaaggcaaaagaatgtatggctggaacttcagggtcagaggag

SEQ ID NO: 805468 - DNA, 100 bp, Homo sapiens
ggttgatgaagctaatttattgacttggcaagggcttattgttcctgtgaagtctttgcgtgcctccctgttggactcaaatgttcttgtgcaaagaaat

SEQ ID NO: 805469 - DNA, 100 bp, Homo sapiens
ccacctaacgctggccgacaacagcctggcgtccgccacggtagacatagctgacattgagaatgaagagaaccgctactgtctattcatggaactcctg

SEQ ID NO: 805470 - DNA, 99 bp, Homo sapiens
ctctcttcaaaaacttcatcatcttcctggtctttttgaatacgatcatattgatggttgaaatagtttaattggttggggtcagataagaagaggagt

SEQ ID NO: 805471 - DNA, 99 bp, Homo sapiens
agggagggaaatatgtcatgtatcccatagctgtgagtggcgatcacgagaacaataaggatacagttgatatattagttggatggcatatagatcata

SEQ ID NO: 805472 - DNA, 98 bp, Homo sapiens
agcagcacaatcaacgcaaccacagaaacaagtggtacagagtacaggggctcaggtccaggtggcaggggatatgctacccaactcaactgagcggg

SEQ ID NO: 805473 - DNA, 98 bp, Homo sapiens
atggtcagtgccatttcgcctttatcgtggtggagtccaccctggctgtgaattaaacaaccaccatgtcgagcaaaaaggcaaagaccaagaccacc

SEQ ID NO: 805474 - DNA, 99 bp, Homo sapiens
atacaggaacagaaatttttatgaactgagccctcacatgtgtctgctttttcaacgtgggagaaggagttgcacaagatagtttttgatccccggtac

SEQ ID NO: 805475 - DNA, 99 bp, Homo sapiens
gccgacccttcctgtcgctgacggcgactgcgggaggccagaaacagtcctgctccagctgtaacagcagcatctgtgaccaacatacaggctactgaa

SEQ ID NO: 805476 - DNA, 112 bp, Homo sapiens
aggacctatttggagcatggctgccagccccagtggctctcaacttttgaacggtgtgctgctgaggactgtcttggaccctgtcactggggatttgtctgatactcgcact

SEQ ID NO: 805477 - DNA, 98 bp, Homo sapiens
tgttggttttatgcatctttatccaatcaagtgcccttggacaaagcctgaaaccagaacctaaaggcagacccagaagagctttttacaaaactaga

SEQ ID NO: 805478 - DNA, 100 bp, Homo sapiens
agcagggaagaaggaatcatcgaggcatgggggtccacactgcaatgtttttgtggaacatggcctggttgcagtatgcttgaaatctgggatgtggaag

SEQ ID NO: 805479 - DNA, 99 bp, Homo sapiens
gcaccacgacggcgccatcaccgagcgcttgatgtgcgcggagagcaatcgccgggacagctgcaagagagagtctacaaggagattgaacaggtggtt

SEQ ID NO: 805480 - DNA, 99 bp, Homo sapiens
ctgaagcaataattaaagaacctattgatattgaagaaggcatcaaaaaggaacaagctctccaggttgggagtgggttccttgggaagaactacctcc

SEQ ID NO: 805481 - DNA, 100 bp, Homo sapiens
tgtttctcacatttgtttcattgaagaaatagttaagaagggcacagtgccagatgatgctgtagaagccttggctgatagcctggggaaaaaggaagca

SEQ ID NO: 805482 - DNA, 100 bp, Homo sapiens
gagagaaaccttcaccaagcatgtttggtgagctgctgcagaatgccagcaccatgggggatctgcggaactgtccagaggttcgtaaagtgaatgaaag

SEQ ID NO: 805483 - DNA, 100 bp, Homo sapiens
gcgccactgagctgctgcaggactacatgctgacgaaatacccgcagcccaaagggcagaagaagaagaagatcgtcaagtacggcatgggtggcctcat

SEQ ID NO: 805484 - DNA, 100 bp, Homo sapiens
cttgatggcttgtgcccaaacaggagcgagctggacgccactgtggggctctgagagtcctgaattcttactgggttggtgaagattccacatacaaatt

SEQ ID NO: 805485 - DNA, 98 bp, Homo sapiens
tcctcttataattaatgcaataaaacgcttccatctttatccagaggtgtttgtggccagtcctcacaaaacacagcctattgtggagatcctgttaa

SEQ ID NO: 805486 - DNA, 100 bp, Homo sapiens
aaagtggacaaagagaggagtcagtgggtaattccagaattgattggccataccattgtcactgtattactgctcatgtcattgcactggttcatcttcc

SEQ ID NO: 805487 - DNA, 100 bp, Homo sapiens
ctctgccgagtctcaatatctgtcttcggtggactccttcggcagtccacccaccgccgccgcctcccagcttaagatctccttcagcgagacagccctg

SEQ ID NO: 805488 - DNA, 100 bp, Homo sapiens
aaaactcctattatccaccgggacctgaagggacaagcagatcttttgaaatatgctaagaatgagacattggagaacctgaaacaaatccattttgctg

SEQ ID NO: 805489 - DNA, 100 bp, Homo sapiens
cagaagctatgcttggcagcagaaggatttggcaacagactttgtttcttggagtccacttccaattccaagattcaaccctatgaaaagataaaggcca

SEQ ID NO: 805490 - DNA, 100 bp, Homo sapiens
aaagcctggtggaccgagagaaagagctggctaccaagaaccacatttgaatttgggagattccattaggagggattatgaagacctgtggaatgttgtg

SEQ ID NO: 805491 - DNA, 99 bp, Homo sapiens
cctcagccatggctccgatatctctgtcgtggctgctccgcttggccaccttctgccatctgactgtcctgctggctgatagctgatcagcttccttgg

SEQ ID NO: 805492 - DNA, 100 bp, Homo sapiens
ttcgacttagccctgctccaggaatgggacctcgagtcactgtggtgacgcatccaaagaagacattgacactgctatgaaattaggagccggttacccc

SEQ ID NO: 805493 - DNA, 100 bp, Homo sapiens
cctgagcagagagctactgcaacacaacttttacagctagccacagtgcagcctggccagaatttccacatgttcacaaaggaagaacttgaagaggtta

SEQ ID NO: 805494 - DNA, 99 bp, Homo sapiens
cggccgaggggctgcgtaggccccgcccggccaggcccagccgggccctggacaggtgtcaggcagcgaacaagacctgccccaccaattacatgtgga

SEQ ID NO: 805495 - DNA, 100 bp, Homo sapiens
aacgtattcttaaaggcgaaaaaggtggatttgctagcacatcaaagctgcccaatgatctgcttgatttgcagcagccaacttttcacccatctgtaca

SEQ ID NO: 805496 - DNA, 100 bp, Homo sapiens
gatcagctgaggaagtagaagaaataaaggcagaaaaagaggctaaaactcaggctatacttttggagatggaaggattacggccaggagatacaaccag

SEQ ID NO: 805497 - DNA, 99 bp, Homo sapiens
ttgctgcagcatttgccaaggagacatccctcttagggcaagaatatcacggcatgggcatgagtagcttgaaactgctgaagtatgtcctgtttttct

SEQ ID NO: 805498 - DNA, 100 bp, Homo sapiens
gaagcccaagcacctgggcgtccccaacgggcgcatggttcagggagcaagtttccgaggttggaaagaagtgacttcactgtttaacaaagatgatgag

SEQ ID NO: 805499 - DNA, 99 bp, Homo sapiens
tgacggccatcgccgccgacctgtgcaagaacccctgaacagtgcccaagtgttgtctctttgttgtcagagagttacaaccctcatgtgcgctacgga

SEQ ID NO: 805500 - DNA, 98 bp, Homo sapiens
agaaacaaaatgtcaacaaattgatgggccacgtgcgagcgagggtttgcagcaatggaagaaacgcaccagaagaagattgaagatctccagaggca

SEQ ID NO: 805501 - DNA, 98 bp, Homo sapiens
tgacctgtccgcgctggtccgccatgcaggactctacatcaacagatgatatgtggtaaaactgctcatctagccatggagtttaccttcacctccaa

SEQ ID NO: 805502 - DNA, 100 bp, Homo sapiens
tcacaacaacaagtgcatccctgagtgtccctccgggtacacgatgaattccagcaaagctgtcgtcgagaaatatctgcttgaaaagtctcgcctggtg

SEQ ID NO: 805503 - DNA, 99 bp, Homo sapiens
aggaccaagatggcagcagtgactctgctggctttggcgtatacacaggagcattccggaagagtttttcgactacagtttgatgaattccagattgtc

SEQ ID NO: 805504 - DNA, 100 bp, Homo sapiens
tcgtttcatactttacgcttgtgtgataaaactgggatctgagtgggacatacttttgaaggatgtgcaatgttcaatcataagtgtgacaaaaactgac

SEQ ID NO: 805505 - DNA, 98 bp, Homo sapiens
ggagatccacctatgatctcaggtcctcagaccaaccagcccaaggaacatcttgccaatttcaaatcgggtggcatcacatagagtcattactaaat

SEQ ID NO: 805506 - DNA, 100 bp, Homo sapiens
aatgtactctggaaaaatcccttattgatgctgccaaatttcctcttccaatggaagtgtttaagggagatgcacttatttacatggaaccagagaaaca

SEQ ID NO: 805507 - DNA, 99 bp, Homo sapiens
accaacgccatccaggactccctgactcgatggaccccgagaagggaccagtccccactttccagccgttccagaggagcatatctgctgatgatgacc

SEQ ID NO: 805508 - DNA, 100 bp, Homo sapiens
acttctctgtcagtactatattggaaaaacctcaaaatatgatggtggttggacagtcagcatttgcagactttgagttctccggggtgctgcaccagtg

SEQ ID NO: 805509 - DNA, 100 bp, Homo sapiens
cttcaaactcgtctttggcgaggacggggcgccggcgccgccgcccccgggctcgcggcctgcagatccctaaagaagtggctgacatctttaacgcccc

SEQ ID NO: 805510 - DNA, 100 bp, Homo sapiens
gaagatttctggccagtggagagaggaattcctcaagacaccattccagaatgtccgtctgtctgcccaggctggagtggcacgatctcagctcactgca

SEQ ID NO: 805511 - DNA, 100 bp, Homo sapiens
ctgttctgggagatctgaagattgagaaaaatcctgctaattgaggacgaggtggatgttatctggtggatgttataggaagatgagaatgtgcctactg

SEQ ID NO: 805512 - DNA, 100 bp, Homo sapiens
gaagattctgtgatctcactctcaggagaccattgcatcattggccgcacactggtgatggagtctgcacgcaaagcatgggagaattctccaaatgtaa

SEQ ID NO: 805513 - DNA, 100 bp, Homo sapiens
ggaacagctccagtctgcagctcccagcgtgatcgacgcagaagacaggtgatttctgcatttccgactgagctttgtatctggtggaggaggcttgggc

SEQ ID NO: 805514 - DNA, 98 bp, Homo sapiens
aggagctgtgtaacagttgtgaaatggaaaatgaggtacttaaagtgctttccgaagctgctatttcagggcctgctttcttccccgggcgatgtgca

SEQ ID NO: 805515 - DNA, 100 bp, Homo sapiens
cacatgcgtttaatcacacaccaaaaactatgaatggagacatgagggtcaaaggccctttcagaagcaactccatttcattggataacttaaaaccctc

SEQ ID NO: 805516 - DNA, 100 bp, Homo sapiens
tcctcctcatcttccgcctctggcagaatgcactgcttgaaaaggccaccatggcggagctgcaggaggtgcagatcacagaggagaagccactgttgcc

SEQ ID NO: 805517 - DNA, 99 bp, Homo sapiens
gctcattaaggacgggaagaacctcatcgctgcgacgaaaaatgcacaaagcagggtcatcagaagcctctcgattcaaaagatgataataccgaaaaa

SEQ ID NO: 805518 - DNA, 99 bp, Homo sapiens
cccgttcgccaccaattatgggagggctggccaacttctgctacagacgactcacctgacaattatttcaatgcaaactgctccttctggaactactca

SEQ ID NO: 805519 - DNA, 100 bp, Homo sapiens
cagggaagtgtggtttggattccatcagtctgttcggcctgccatgtggaaaatgatgcttaatatcgatgatatgaatgccacaatacgaaggattgac

SEQ ID NO: 805520 - DNA, 99 bp, Homo sapiens
ttctatcagttctctgaccttgattggaatgttggcagctataacttacacacttgtaacacttcaagaagcaaaactgctgctaaacgaagatgatta

SEQ ID NO: 805521 - DNA, 98 bp, Homo sapiens
gcgccggacccctatttgcaaagaaaggatcttgttcgagtagaagccacagtcattgaaaagacagaatcatggccaagaatcattatgagattcag

SEQ ID NO: 805522 - DNA, 98 bp, Homo sapiens
cccgagcgaggccaaccttcaggaggaggaggggtggagttcgtggttcccaggactggcttttattgcaagctgtgtgggctgttctacacgagcga

SEQ ID NO: 805523 - DNA, 100 bp, Homo sapiens
ctggcgcagcccacgctcatgatcgacttcctcacccgcgcctgcgacctcgatgccatggacaatattaccaggcagaaccaattctacgatacccaag

SEQ ID NO: 805524 - DNA, 99 bp, Homo sapiens
aacaaagctgaggtccagatgaaagagaagtttctggtcactccccaggattatgcgcggtgccttcaaatctcttgacaaagatggcactggacaaat

SEQ ID NO: 805525 - DNA, 99 bp, Homo sapiens
tgcctgggagcctgctccctgctcagctgcgaattactctcacttccaccacccgatgtatggaaactgctatactttcaatgacaagaacaactccaa

SEQ ID NO: 805526 - DNA, 99 bp, Homo sapiens
gtcgatttggatctgggatgaacatgggcaggataaatggtattatccatgcagcagaagagaaggactggaaaactgcgtactcatacttctatgagg

SEQ ID NO: 805527 - DNA, 99 bp, Homo sapiens
ttctacaatgcagacgagctcaagggaggaaataatgctggccatacagttgttgtggattctgtggaatatgattttcatctcttacccagtggaata

SEQ ID NO: 805528 - DNA, 98 bp, Homo sapiens
cgtctgcaccttccggaacagcgccgaggccttcaagtgcatgatgtgcgatgtgcggaagggcacctccacccgaattctgcttggtcagaatcgtg

SEQ ID NO: 805529 - DNA, 101 bp, Homo sapiens
gaaagatggatttttgcatgagacgcttctggacaggattaataagaaaattccccggggaccaccttctcctcctgcgcctgtcatgcattctcctagcc

SEQ ID NO: 805530 - DNA, 101 bp, Homo sapiens
cgagaaaatggatttaacatctacgtcagtgataaaatctccttgaatcgctctctcccagatatccggcacccaaagcattctttagtggcaggctgaag

SEQ ID NO: 805531 - DNA, 100 bp, Homo sapiens
tgcagcggattaaagctaaagacatagttcctggtgatattgtagaaattgctggaagtctgcggtcttgcagttcttcagactgctttaataaagtgat

SEQ ID NO: 805532 - DNA, 100 bp, Homo sapiens
aggaccagtatccatgaagcaatggagcaacaaaccataagtgttgctaaggctggcagatccagtttgctgaccagaagcaagaattcaacaaacgtcc

SEQ ID NO: 805533 - DNA, 99 bp, Homo sapiens
ggcggcgttcttctgtgtggcccgcctgcagtggaagtgaagaagctctttccaatgaagactgtgaaaatgtttaccacttggtgtactcggcacatc

SEQ ID NO: 805534 - DNA, 98 bp, Homo sapiens
cggataagggacccgacactgataacactgagctgaaggttgaagtggagagcttgaaacgagaactccaggacaagaaacagcatctggataaaaca

SEQ ID NO: 805535 - DNA, 99 bp, Homo sapiens
attgctgcaaaagtgggaactggagaaccctgctgtgactgggtactgggcctaatcgctacgtgcctctttggctatgatgcctatgtcaccttcccc

SEQ ID NO: 805536 - DNA, 98 bp, Homo sapiens
cacagatagcgtggtgatcttctctggagaaggatcagatgaacttacgcagggttacatatattttcacaaggatatgctgcaggctgctagtcatt

SEQ ID NO: 805537 - DNA, 139 bp, Homo sapiens
taagctaaaaaaagtgagagcacttaaaggccacgtggaacagaagagactaagcaatgggaaacttggaatttatgctttctcaagatgttgaacatgagcgtctctttgacctcattcagaaaatgttggagtatga

SEQ ID NO: 805538 - DNA, 100 bp, Homo sapiens
taatgtaaattgccgcgatacccaaggcagacattcaacacctttacatttagcaggtgcagctcagtggaagatgatgacaaccagaagacatgagcta

SEQ ID NO: 805539 - DNA, 100 bp, Homo sapiens
gtgctatggcagttagaagagttttaaaaagggaccttaaacgcattgccaaagcttctggagggagaaaactggttgtcctggatgtttgaaaagttgg

SEQ ID NO: 805540 - DNA, 100 bp, Homo sapiens
ctaggagtgctgagcccgcggaaccgcagccatgtgtgaagcctcagtttaggtcatctggtggttcagaacactcaacagagggctctgtatccttggg

SEQ ID NO: 805541 - DNA, 100 bp, Homo sapiens
gtacgttgcaatctgtggatcagctacgagggaggagtctgctactagtcttatcagctcttaaaaacagaaactcatctgtccaagttcgtggcagaaa

SEQ ID NO: 805542 - DNA, 100 bp, Homo sapiens
ctttctctagaggagaaacttatgccatggctagtccagggaaagataactatagaatgaaaagttataagaataaagccctaaatcctcaagagatgcg

SEQ ID NO: 805543 - DNA, 117 bp, Homo sapiens
cggcggctcagttgtccatgaccctgaaggtccaggagtacccgaccctcaaggctaggcagctggaagagaaagaccgagtgctaaagaagcaggatgcattctacaaagaacagc

SEQ ID NO: 805544 - DNA, 100 bp, Homo sapiens
gactttactgaagaggaggaagcccaggattcggggaaactgcaaggcttatttcaggcagcattggagctcagcacaagcaccaaaccatacgactgtg

SEQ ID NO: 805545 - DNA, 99 bp, Homo sapiens
gcgagactccgtgggcgtaggaccctccgagccaggccataagatgttttattgaaagaaactttcaatatcaagtaatccaaccaaccttctaagata

SEQ ID NO: 805546 - DNA, 101 bp, Homo sapiens
gaagaagggagccaacaaaaattgttttttctacctgttgacgtgtcaagcactaactgacgggctctacgagtgcattctctgtgcctgctgtagcacca

SEQ ID NO: 805547 - DNA, 100 bp, Homo sapiens
tggcccggccctccttcagtttagttgaggataccacattagagccagaagcttggtgtaaaaattgccaaagcagttgcctgccacaactttgtaaaag

SEQ ID NO: 805548 - DNA, 100 bp, Homo sapiens
gcggggacttcactgctctgctgtctcctgcaagaactggctcaagaaatttgcctcgaaaaccaagaagatgatccctatgatcttgaagatgtttctg

SEQ ID NO: 805549 - DNA, 100 bp, Homo sapiens
gcgctgaggcgggcgttttcttggatgaattgcttgctttggagaccacagcaccgggaagtccagtcagcggcagatggtgttcggggtggtcaccgcc

SEQ ID NO: 805550 - DNA, 100 bp, Homo sapiens
gtaactgaaagatacatggcttgcaaaaagtaaaccacgatcgttatgctgactttctcctgtgcttctggagagtatctagaaatgaagaaccaggtat

SEQ ID NO: 805551 - DNA, 100 bp, Homo sapiens
acatgcatcagaggcttggagaaagctaaagtgattcagccaggctgagagcacagacaaaacaacaactcttagaatataaatcaatggttgatgcaag

SEQ ID NO: 805552 - DNA, 50 bp, Homo sapiens
ggcttcctagagagcttcaaaaaaggctgggctgggcgagtatctcttcg

SEQ ID NO: 805553 - DNA, 100 bp, Homo sapiens
caagtcagacgtctggtcctttggtatcctgctgatggagatcgtcacctacggccggatcccttacccagtgacaaccatgagtggaaaaaactaatta

SEQ ID NO: 805554 - DNA, 98 bp, Homo sapiens
aaatagttgcaacaaaagagtgatttgcttgctgaaaatggtcgattaagcaatacccaaggagtcgtttctgccttttctaccatgatgagtgtcca

SEQ ID NO: 805555 - DNA, 100 bp, Homo sapiens
accccctgggaggcagcgccgccatccacctctatgtcaaagcaaaccagtccagctacgggggcccagccagccagcagctgagtgggggttacggagg

SEQ ID NO: 805556 - DNA, 98 bp, Homo sapiens
cagagacatcaaaacctggaccttctggattacaggccaaattagcaactcactaccctgggaaatcttacaccttcaagcactgtgtttttctgctg

SEQ ID NO: 805557 - DNA, 98 bp, Homo sapiens
cgttctaaaaagaggcgaaaggaagcaagcagttcagaagagccaaggaataaacatgcaatgaacccaaaaggggtttttaatgaccacaacaagca

SEQ ID NO: 805558 - DNA, 98 bp, Homo sapiens
gtggatgtacatctagttcaactaaagtttgtcagaggaatggctgtgaatggatgcctggaaggaccatcctctaattttctcagttgcctgttcat

SEQ ID NO: 805559 - DNA, 100 bp, Homo sapiens
ctacaccaccgccacactcatcatagccttcacctctgcaggtgtgctgggcatcaaggtgaagatcatgctgccctgggacccaactggtaagattggc

SEQ ID NO: 805560 - DNA, 100 bp, Homo sapiens
ccaaggaaaaactggagagcttcatcaaaaatagtgatagctttgataagtgcagccctttcttctctagacaaagagggtctgtcagcattaagctggg

SEQ ID NO: 805561 - DNA, 100 bp, Homo sapiens
agcggaaagtccggcaaatgatagagcaggtaaaaaggtggccagagttgccaacccccggctggataccttcagcagagaaatcttccggaatgagaag

SEQ ID NO: 805562 - DNA, 100 bp, Homo sapiens
cagacatattccttgagagcatttgagaaaccccctcaggtacagacccaggctcttcgagactttgagaagcctgggagctcccatcgaccatggcagt

SEQ ID NO: 805563 - DNA, 100 bp, Homo sapiens
tatctggagacccaacacgtacatggaacagggcagaactggccattagtactttctggcctaacttttatcaggatctaacttggcaagatgagcactc

SEQ ID NO: 805564 - DNA, 113 bp, Homo sapiens
ccgggatcgtgaccgagaccgtgaccgagagcgtgaccgagagcgcgaatatcgtcatcgttagaagaccccttgttgaaatgggacagttggcagcggctctgatgagcccg

SEQ ID NO: 805565 - DNA, 100 bp, Homo sapiens
acttccttccgatacagaaaaagaggacagatcaccatctgctatattttcagcagagctgagtaaaacttcagctgttggaaaaattagaggaaagcct

SEQ ID NO: 805566 - DNA, 100 bp, Homo sapiens
gcattggaaagcacaagaagtgtgatcataatgtggattgcagtgacaagtcagatgaactggattgttgggatggccgcttccattcagcactgccacc

SEQ ID NO: 805567 - DNA, 51 bp, Homo sapiens
aggaacaatattgatgatgtagtaaggtcacctcatcatctcaaggaggag

SEQ ID NO: 805568 - DNA, 98 bp, Homo sapiens
cgcgaggaccgcaccatcccgctcattgtgatcgtgcagtccggccgccaccccacagtgctgcagaagctctgccagttgcccttccagtatttcag

SEQ ID NO: 805569 - DNA, 120 bp, Homo sapiens
gaaacacaagtgaaagtaatgtcacagcgacatatgatagatggacgatggtgtgactgcaaacttcctaattctaagtcataccctaatgatcccagcaagataatgtcctgtcttcta

SEQ ID NO: 805570 - DNA, 100 bp, Homo sapiens
tttagaaaatggaatcctcctctgcgagtagctacagcaagctgggtagcaggcagatccaaaggatatcatgaagtttccagggcctttggaaaaccag

SEQ ID NO: 805571 - DNA, 75 bp, Homo sapiens
cggctgtcccctgccggggccgccctactctggggcttcctgctccagctgtattttaaccacatcagcatcgag

SEQ ID NO: 805572 - DNA, 100 bp, Homo sapiens
gtcaggactattttcacgttttaatgccgagaggcagcctggcatcctcgctacaacctcattgttgtgggccgatacccagatcctaatttcaaaagtt

SEQ ID NO: 805573 - DNA, 100 bp, Homo sapiens
aaggtacgaaggcgaaatacccaaaaatatttgcaagaggaagaaaacagtccaccaagtgacaggtaccacgtatgactttgcccactgcaccttcact

SEQ ID NO: 805574 - DNA, 99 bp, Homo sapiens
cgggatcgtgaccgagaccgtgaccgagagcgtgaccgagagcgcgaatatcgtcatcgttagaaggttaaaaggactactgactcaaactctgcctct

SEQ ID NO: 805575 - DNA, 98 bp, Homo sapiens
tcgactggctcctgattacgatgctttggatgttgccaacaaattcctcagcactttgtttgcccccttaaactttgtcatggagaaagtggagagca

SEQ ID NO: 805576 - DNA, 98 bp, Homo sapiens
ccggatgcctggatatgagaccatgaagaacaaagacacaggtcactcaaataggcaggtgttcctggctctatgccaaatgcatcctggactggaaa

SEQ ID NO: 805577 - DNA, 98 bp, Homo sapiens
taaactacaaagagagactttttgtacttacaaagtccatgctaacctactatgagggtcgagcagagcattgtcttcagtgttaagaaatgtggact

SEQ ID NO: 805578 - DNA, 153 bp, Homo sapiens
gccgggtgtttgcagctgatgctccgggtcaatgagtaccgctttgcttgggtggaagcagatggggtaaattggctcttgttcaggccacgaatgctatcttgcagcccaaccaggaggccctgctccaagccctgcagcgactgagactgt

SEQ ID NO: 805579 - DNA, 100 bp, Homo sapiens
acgaagaaggcagaaggagccacgaaattatggaagtggaaattacaatgattttggaaattataaccagcaaccttctaactacggtccaatgaagagt

SEQ ID NO: 805580 - DNA, 98 bp, Homo sapiens
cccgggtcaagcgcgctccgccgggaaacttctgcgggcgccgggctgaagctccgggcagggctgggaaggaaagggtccttgtgctgcagaatcag

SEQ ID NO: 805581 - DNA, 98 bp, Homo sapiens
ttttccgttgccggtgccggcctagcgtcctggaattacttcaatcaattgggacccctgattttagcaggatggcccaatggaatcagctacagcag

SEQ ID NO: 805582 - DNA, 100 bp, Homo sapiens
tatccccggaccaacaagcagaatcagaagaagaaacggaaagtggagccccccacaccacagcagcaagatgaagagcgacgtcggcagctgagagaga

SEQ ID NO: 805583 - DNA, 100 bp, Homo sapiens
ccgacttaaggcaggagacagacttatagagacagacaatgagaggatattctcccagcaccttcagaacagacttcttcctgaccacacgtactcagtg

SEQ ID NO: 805584 - DNA, 100 bp, Homo sapiens
cttcctggagtagagtcttttttcactgaggagacaagctctcactatattgcccaggctggactcgagctcctgggctcaagctgttctgccacctcag

SEQ ID NO: 805585 - DNA, 98 bp, Homo sapiens
tcccccctcacccaggcccctgtcaagaaggtgccggtggtgcgagtcttcggagcgaccccggcagctacttgaaggaaattttgccaaagaagtga

SEQ ID NO: 805586 - DNA, 100 bp, Homo sapiens
agctatgggcagtttgggccatgcaacatgtctgcagcaagaatccttagcagtgtctgcaaaaacgaatcttttcctacaacctgttaactgactggac

SEQ ID NO: 805587 - DNA, 100 bp, Homo sapiens
agaacaacagaagctatgcttggcagcagaaggatttggcaacagactttgtttcttggagtccacttccaattccaagctaagaaacctttccagcttg

SEQ ID NO: 805588 - DNA, 100 bp, Homo sapiens
cggcacggcgaaaccttcaccttcagcccgacggccatggaggctgaagagacgatggaatgccttcaggagttccctgaacatcataaaatgatcctcg

SEQ ID NO: 805589 - DNA, 99 bp, Homo sapiens
ccaggttgtagacgctgcggcccggcccggcggggaaaaacgtggtcttcgagaaatgcgagttcttgaaaatttgaagaacatgatccatgaaacaaa

SEQ ID NO: 805590 - DNA, 98 bp, Homo sapiens
cggctgcgggagtggcctcaagatggatgaagacggcggcggcgagggtggtggcgggggagtcggtgaagtacttcctggacaacttggaccggatc

SEQ ID NO: 805591 - DNA, 51 bp, Homo sapiens
ggagtaccctgttcctggcatgcactggtgattgctgcggtgtttgaccga

SEQ ID NO: 805592 - DNA, 98 bp, Homo sapiens
tcgctactaccccgcagttcccggacatgatcctctccgcctctcgaggtgccgtgagcgatgtggagatgcaggaacactatgatgagttttttgag

SEQ ID NO: 805593 - DNA, 126 bp, Homo sapiens
agcacgccgtgtccgagggtactaaggccgtcaccaagtacaccagcgctaagtaaacaactgtgaccttgaaacaaaggttaaagattgtaccctaaatcagaccacagcgactgaaggttactt

SEQ ID NO: 805594 - DNA, 100 bp, Homo sapiens
ccacacgtgttcaatacacctcccacctgtcctcaggcatatcaaagtgcaaagcagttggtccgaggggagcccaatgtctcctacatctgttctcgct

SEQ ID NO: 805595 - DNA, 99 bp, Homo sapiens
gaaaaggaggctgggagagccaaggatcacgcagcaaggaagaaacagacccaggtgcagactcagattgtgaaaactgctgagagagacttgcaatcc

SEQ ID NO: 805596 - DNA, 101 bp, Homo sapiens
agttgagcctgtgggacacttcggccctccagaatacccatcatatagcccctgaggtggcatggtgatgtctccatgagggaaccccttcccactcatcc

SEQ ID NO: 805597 - DNA, 99 bp, Homo sapiens
tttcatgtccaaaggaaaatgcatcttctaagtttttggcaccatatactactttttccagaattcatacaaagagttgctgaattatcccaaggcaat

SEQ ID NO: 805598 - DNA, 98 bp, Homo sapiens
tcgtcttccacttgcacgaaagctttcctaggccaaaaagaggtgccttagctggaccaattattgtggagccacatgtcacagcagtatggggaaag

SEQ ID NO: 805599 - DNA, 98 bp, Homo sapiens
tccagcagctgctcaatgctcggacacaggccataaaattttgagtagaaaaatccagaaatttgaaaatcagtatcgtggtagagagctgccaggct

SEQ ID NO: 805600 - DNA, 99 bp, Homo sapiens
gagcagagccgctgggcgccggagccgaggcgagcgccgcgcgcaccactgagcaatgttgatcccagggatgatgtatttggatatcctcaacaattt

SEQ ID NO: 805601 - DNA, 98 bp, Homo sapiens
ggagaggtgctcggattctcgtagctgtgccgggaccaccgcacagtctcaagtgtagtgaagtcaggaaagactcactggttctccagtggaagccg

SEQ ID NO: 805602 - DNA, 98 bp, Homo sapiens
ctcttgcgctacgccctggatgagatggtgacactgtttgcctattcggacctgctgctcttcaccaaggaggacgagcctggccgctgcgacgtcct

SEQ ID NO: 805603 - DNA, 100 bp, Homo sapiens
aagacaacagccttctgaagtgggaagttgctgcttttctaacccaaactgtatgtcttgatgacactacagtaaagtttgaaatatgggatacagctgg

SEQ ID NO: 805604 - DNA, 117 bp, Homo sapiens
tcatgaagtcgggtgatgcccgtgtggcgctgattggatttccctctgtggggatcaaaggaagcagttccaggtactggtagagaacaagttttatgaatggttgattaatacagg

SEQ ID NO: 805605 - DNA, 100 bp, Homo sapiens
agattactgtgatgcattattggtttggtcaagcattcttctattttcagaacaccttccaccatgaccacctcagcaagttcccacttaaataaaggca

SEQ ID NO: 805606 - DNA, 100 bp, Homo sapiens
gacctgcatgtactgggggattcgcagggaggatgtcgggacaccccggaagctgggaaatggatttgcagatttacagaatggctgcacattaatggaa

SEQ ID NO: 805607 - DNA, 99 bp, Homo sapiens
agcggcacctacggggacgtctataagacagccgctcaggaagcaatcttgcatgcgtctggaaatggcacaaccaaggactactgcatgctttataac

SEQ ID NO: 805608 - DNA, 100 bp, Homo sapiens
gtgaagatgtgggcaacctccctgaagcccaggagaagaattatgaaaagacacagactgtactctcagaactgaagttgaagtttgaaatgactgagca

SEQ ID NO: 805609 - DNA, 100 bp, Homo sapiens
aggcaaagaagctactacctcaggaaaagaatgttctgtctcagtactggactatgggctctcggaacaccaaaaagtcatggaaaatggaagatttgca

SEQ ID NO: 805610 - DNA, 100 bp, Homo sapiens
atgcaacagtacgttttgctggtgttgtccctcccgtggcagaggtggactagcagaaagactaaatggactgcagaatcgagagagatctgctatttct

SEQ ID NO: 805611 - DNA, 100 bp, Homo sapiens
ggagtccgttcttgtgggtgctgctgttctgggtgcctgtgcctcaggggatttcgcttctgtacaggagcagtttttgcaagaaaggatcaaagtgaac

SEQ ID NO: 805612 - DNA, 98 bp, Homo sapiens
aatatttgatgctcaaacaaggaaacagatatgtattctggataagtatgtgcacagagtgcttgcacatgagctgttatgccctcaaggaggcccca

SEQ ID NO: 805613 - DNA, 100 bp, Homo sapiens
tggactacctggtgcctctagtgaaaagaacaagaagtcttaccctcaggtcaaagtcattaaaacaccaatgaccagccagaagacatttgaatctttg

SEQ ID NO: 805614 - DNA, 99 bp, Homo sapiens
caggtgctttatctttaaaaaaagttccagaaaagatggttgttattggtgcaggagtaataggtgtagaattggatcgaatcatcaatttagttgttg

SEQ ID NO: 805615 - DNA, 100 bp, Homo sapiens
ttgagcttgggtcaggacaattccatttggggaccagagatggacggtcactcagcctatggagcaacaagctcaaccaaattggaagatctgagttatt

SEQ ID NO: 805616 - DNA, 99 bp, Homo sapiens
tacagtctgaactcttctgctcaggagcgcctaataccacttgaacaacatgcctggaattcaaggagccacatcttcgcctcaaccacaggctacttt

SEQ ID NO: 805617 - DNA, 99 bp, Homo sapiens
agctgtccagatgctgaaaagagaaggtcaaacagctgaaggtgaaaggtgtagcagtcactcggcctacacccacagcatcgaccttgtgaacccagc

SEQ ID NO: 805618 - DNA, 101 bp, Homo sapiens
ttaaaattttacataagaagttacctttttcagatgttcctcctgctgatcaagagaagctttttatccagaagttacgtcagtgttgcgtcctctttgac

SEQ ID NO: 805619 - DNA, 100 bp, Homo sapiens
ctagggtcgccgccactgccgcaggaggcgtgagattggagctggagggagcatcactgggctgaagtttaaccctctcaataccaaccagttttacgcc

SEQ ID NO: 805620 - DNA, 100 bp, Homo sapiens
aagaaatttggagtgtgcgtgcgcgccgagcgccttggaagtggagtttactctccccttgaggaagctgaaggtcagaaagggagagacgattgcctga

SEQ ID NO: 805621 - DNA, 99 bp, Homo sapiens
ttgactttctcctcattgaagctatgcagtatttctttggcatcactgcagctagtaatttgccttctggattgtccttgaatgggcaagagggcacat

SEQ ID NO: 805622 - DNA, 51 bp, Homo sapiens
ccaggtccctgtctgagccaggtggcatggagaaatcgttgtcaaaacaga

SEQ ID NO: 805623 - DNA, 98 bp, Homo sapiens
ttggaccttccggagcttctcagaagacagagggttttcttttgagcactttcttatgcaaggagctaaacagtgattaaaggagcaggatgaaaaga

SEQ ID NO: 805624 - DNA, 115 bp, Homo sapiens
gagaatggcagtggaagagggagagagcttcccagaacaaggattaaagcctgtggtttccacagaagcaccacctatcatatttgccacaccaactaaactgacctccgattcc

SEQ ID NO: 805625 - DNA, 100 bp, Homo sapiens
gtcccgctgcagccgagatgccgggggagcggggccttccacaccccctccgtgggtgtgtgatctcacattcttgaaggtggcattgaagagcactaag

SEQ ID NO: 805626 - DNA, 100 bp, Homo sapiens
ctacatcgacgaccacgtgcggaggaaggactcctcgctctatatagagcacagcaatggaggaaacagctatatgggaacaacatacagtgacgcttca

SEQ ID NO: 805627 - DNA, 98 bp, Homo sapiens
cgtggctgaggtgaagagcttttactaaaccaaggagatttaactgaaagacggacatgagcgtgggtgctgactcctggaagagcaactctatctga

SEQ ID NO: 805628 - DNA, 98 bp, Homo sapiens
aagagcagaagataatgaagctaaatggaaaagagaaatatatggtcgaggtcttccagaaagcctatatatgcaaacagatttgcagtaccaaccta

SEQ ID NO: 805629 - DNA, 99 bp, Homo sapiens
gatgtgtcagtcaaagcagcctctgaacttctcatgaaactctcaggcacttctgtctcctgctgccatgtgaagaagaacacgtttgcttcctcttcc

SEQ ID NO: 805630 - DNA, 100 bp, Homo sapiens
gcttctggaaggaaaagaacacctgtgaaagaccgattttctgcagaagatgaagctttgagtaacattgccagagagttctccgggagatgttgcataa

SEQ ID NO: 805631 - DNA, 98 bp, Homo sapiens
tccagaacctcgagaaaagactatctctgcattatgcggatcaaacctcaccaaggccagcacataggagagatgagcttcctacagcacaacaaatg

SEQ ID NO: 805632 - DNA, 100 bp, Homo sapiens
aaattcaacctcagtgtaactgatgcatccagaagactctgtggtttcctcaaaagtcttgtgaacttgctgactgagaaggcaccttggaactctctgg

SEQ ID NO: 805633 - DNA, 99 bp, Homo sapiens
gaccctgacctcagagcagatccagaagctcttagccagcactcgctatccacctccaggtgctccaacgagaagggctactttgcagtgactgagaaa

SEQ ID NO: 805634 - DNA, 100 bp, Homo sapiens
ggaaagttcctcaagatggagactttgactttgggcgggagcaggatgtgagtagaatcctccaagccctacacgagtgccttgctgcccttccccgacc

SEQ ID NO: 805635 - DNA, 98 bp, Homo sapiens
aaaagcctccttctggttccaaatggtgtgagcctcagcagcgatttcattgctggcttttgtggtgagacggaggaagatcacgtccagacagtctc

SEQ ID NO: 805636 - DNA, 75 bp, Homo sapiens
ggctgggcccggggcgcgcagctgcccgccggggcggggctctgcggctaccctcctttttatgatgaaaatgac

SEQ ID NO: 805637 - DNA, 100 bp, Homo sapiens
aggagaatgactttaactgatagcattgaacgctgcctgaaaaaagggtggctttgcaaaatgttacgagatgacagatttgacaaataacaaagtctac

SEQ ID NO: 805638 - DNA, 100 bp, Homo sapiens
ctcttgatacacaatctaaaaagaattaggaaggtccttcagggccaaggagatctgttgaagaatgccaagaatgaagctatagaaaacatgaagcaga

SEQ ID NO: 805639 - DNA, 100 bp, Homo sapiens
ctctcgatgaggataacatccctccagaagatgtggcctggtttgctttcgaccctggctcggcgcactcggacatcatcctctccaatgacaacctgac

SEQ ID NO: 805640 - DNA, 98 bp, Homo sapiens
aagatgtgaagaccaagaaggatgattctcactcagcaggtgttgctctcttgccattcgtggatgagcgaaggctacgagctgccctagaagaggta

SEQ ID NO: 805641 - DNA, 99 bp, Homo sapiens
gtatcgggagcaggaaagccagtgttgtggaccctagcacagagagagaaaaggaacagttccgtaagctctttattggtggcttaagctttgaaacca

SEQ ID NO: 805642 - DNA, 98 bp, Homo sapiens
tcagactggttcttcttacatatactatgtttcgtctacagttgggtgcagcccggaatcccgaggatgtggaccgggagcggcgagaacacgaacgc

SEQ ID NO: 805643 - DNA, 98 bp, Homo sapiens
gggctataccgtgaagggcattcagaaatacaaagcaaagattgtttttgcagagtacagttgtgaatttggctccgcgaagtattatgcactgtgtg

SEQ ID NO: 805644 - DNA, 100 bp, Homo sapiens
ctgttctctgttctgtttcccaatgcagaaaagaaggggcaatctttggcagccagacactacctaactccaatttatggacaatgaataatggtgcagg

SEQ ID NO: 805645 - DNA, 98 bp, Homo sapiens
cacctgtgcaaccccagggacctggaaagacagacaggatggggaggaggttcttcagtgtatgcctggtgactgaaaactcctgaggcatttcctgg

SEQ ID NO: 805646 - DNA, 100 bp, Homo sapiens
ggaaactttggtggtagcaggaacatggggggaccatatggtggagaggcatttcatccttcatgaagccattcaggattttgaattgcatatgagtgct

SEQ ID NO: 805647 - DNA, 100 bp, Homo sapiens
aggaatgctctgaaggacttactgaaagatatgaatcagagttcattggccaaggagtgccccctttcacagaattcagaaggaacttgcagaaatcaca

SEQ ID NO: 805648 - DNA, 99 bp, Homo sapiens
gagatcggaaaacattcctcttctctgccaccatgaccaagaaggctaaagaattacctccaaagccattgtcaagaccacagcagtcatctgcaccag

SEQ ID NO: 805649 - DNA, 100 bp, Homo sapiens
ggaaaatccgcaagaccatcatgcagaaaattggcaacttctccatcgtgcggcggcttggcgtgcaggagtgcattctcctggttacacaacgcataac

SEQ ID NO: 805650 - DNA, 104 bp, Homo sapiens
cagacatcaagctctttgggaagtggagcaccgatgatgtgcagatcaatgacatttccctgcaggtcggcttcttcaagcggaaccggccacccctggaagaa

SEQ ID NO: 805651 - DNA, 100 bp, Homo sapiens
gatcgctgggaattctccaccttaaagaagggaatttcggacatcgatgaagagttcatcttgaaacagtttgacattgactatgagaccaaaccaagcc

SEQ ID NO: 805652 - DNA, 100 bp, Homo sapiens
atgggtgccaaggagtcacggatcggattcctcagctacgaggaggcgctgaggagaggcagttgcagtggtgcagaatggctgacctcagtcttgcaga

SEQ ID NO: 805653 - DNA, 101 bp, Homo sapiens
ctcccaccccatccagtggaatgcaccacagccatctcacatttccaagtacattctcaggtggagacctcctaaatgcgatggccaggtattactgacac

SEQ ID NO: 805654 - DNA, 100 bp, Homo sapiens
aactgggcacagcatgcggaaaatactacagagtgtgcacactggctatcattgatccaggtgtgatgaatgcagactctgctaccattttggctgtttg

SEQ ID NO: 805655 - DNA, 100 bp, Homo sapiens
cttagggcctgctgtggaggcagcggcggacgccgagctaagcaatttcaggtatgctgctgaaagtgggaatcctctacattggtgggcagctggtgac

SEQ ID NO: 805656 - DNA, 100 bp, Homo sapiens
gtgtccctgctgcaggagaagaatgacctgcagctccaagtgcaggcggaacaagatcctgatcttcgggctgtttgaggagacggccctggctgccttc

SEQ ID NO: 805657 - DNA, 100 bp, Homo sapiens
gacattctccacctcctgggaggccagccattcccaaatgccccaaggatgaagaacggagacggtaaaatcccagaggaatccaaagccctctctttat

SEQ ID NO: 805658 - DNA, 98 bp, Homo sapiens
ggcagtgaaacaaggcttcttgtatcttcagcagcagcagacgtttggaaaggagtgtaccaacacgtcaccggagagatgatgggtggccatgccat

SEQ ID NO: 805659 - DNA, 98 bp, Homo sapiens
cgccttcaagaaactcaagaatttgaacacactggaagtcgagataacatgagtattgtactagtttgcttttcaaatgctcccaaggtctcagatga

SEQ ID NO: 805660 - DNA, 100 bp, Homo sapiens
aagggaagtcttgcagcctggtgggaatgaaggttctacagaaagtcaccagaggaagcacatggattaattgatgtatgttgagtttatggagctgcct

SEQ ID NO: 805661 - DNA, 98 bp, Homo sapiens
acgggctcggagggagtcggagaggggaaggaagctgaaggcgcgccctgggtccccggcgcactgaagtctccctgcttcctggcctttctatttaa

SEQ ID NO: 805662 - DNA, 99 bp, Homo sapiens
ccgccctggacatcaagattaaaagagcgaataaagtttatcacgccggggtattaatctctggagaagacacatccacagttagcactttcttcagat

SEQ ID NO: 805663 - DNA, 98 bp, Homo sapiens
atcctgcttgatgaaactctgaaaggaatcccttggcaccatgtcctgtgtgcattataaattttcctctaaactcaactatgataccgtcacctttg

SEQ ID NO: 805664 - DNA, 100 bp, Homo sapiens
cagccctccccctgatgggccaccgctgcccctgcccacagtggctcctgaaagatggatcactccagccttggacaagattcgctatgagagcctgaca

SEQ ID NO: 805665 - DNA, 75 bp, Homo sapiens
gttgagaatttatcctcaagagtcagctggcaggttcaagggcagcaggaaagacgagatcctgggcatcgccaa

SEQ ID NO: 805666 - DNA, 98 bp, Homo sapiens
gagcttggtttcgggatctcggtgctgcagacggcgagacctcctgcacagattcacggcccttccacagtaccttccacaataccagtgctaatctg

SEQ ID NO: 805667 - DNA, 98 bp, Homo sapiens
ttgaagccatcaacatcacaaataatgaaaaagttgttgttaaaattctcaaggttgtagcagataccaatataagcgccatagcagctcagcttgaa

SEQ ID NO: 805668 - DNA, 100 bp, Homo sapiens
aatggctttaattcgccaggatcttataaaacaaatgctgctgctatgaatatgggtcgaccattccaaaaaaatcgtgaacagcagagaatttcaaagg

SEQ ID NO: 805669 - DNA, 100 bp, Homo sapiens
gactttgtcatgtcttacctctttgctcagggagagtcccgtattctcagagtaaaagttgtttctggaattgatctcgccaaaaaggacatctttggag

SEQ ID NO: 805670 - DNA, 100 bp, Homo sapiens
actttggtgtctacccggcactacagagctcccgaggtcattttgggttgctccttgagggcaggacagttcttatggctttatccgttgcgtaagcaca

SEQ ID NO: 805671 - DNA, 100 bp, Homo sapiens
cccaccctgaccgacttcatgatgaactttggtacaacgatccaggccaggtagactggcgtcgttccttcatcaccactgatgttaatccttactatga

SEQ ID NO: 805672 - DNA, 98 bp, Homo sapiens
ttgaactctgcacagcaagcccaggctcattatcagaagtgtatgctgacttgtaaagtgaagaagccagtggtgctgcgggtgttcttttggggtag

SEQ ID NO: 805673 - DNA, 100 bp, Homo sapiens
atgtaatcaactgggagaatgtaactgaaagatacatggcttgcaaaaagtaaaccacgatcgttatgctgagctcctcacttggcttacttgagaacag

SEQ ID NO: 805674 - DNA, 100 bp, Homo sapiens
ggaggaggggctccggctggtctgtggtgaggtccagatggctgtggaggccaagtttgtccaggacaccctgaaaggagacggtgtgacagaaatccgg

SEQ ID NO: 805675 - DNA, 98 bp, Homo sapiens
tcttcgtgaaaagatctgctgcaaggaactgatagcttatggttctccattgtgatgaaagcacatggtacaggccgaagaactggagtattcttgtg

SEQ ID NO: 805676 - DNA, 100 bp, Homo sapiens
ggaagtccggcagacttgtggctacacttctggccagtttgacctggcaaatctccttggaccggctgttgggggaaaaaagtgttagccgtctctcccg

SEQ ID NO: 805677 - DNA, 98 bp, Homo sapiens
tgcattctctcctgactcttctatgctgtgttcagtcggagccagtaaagcacatataggttgctgtagatgaatgttcttagctgtcatgtttaaaa

SEQ ID NO: 805678 - DNA, 100 bp, Homo sapiens
agtcattttgtgtaaggatcaagatggaaaaattggactcaggcttaaatcaatagataattggggaaggagctacatttacacagtctcatcatcattt

SEQ ID NO: 805679 - DNA, 98 bp, Homo sapiens
aagaaatcacagtgctgagtcagtgtgacagtccatatgtaaccaaatattatggatcctatctgaagggcattcttagcagggttacagaatctgtt

SEQ ID NO: 805680 - DNA, 98 bp, Homo sapiens
ccgcgccgcctggctttcgtattcgttgttctcggcgggctgtggggcctccgcgccgcggccgttagtcatgtcggattttaccaaatgttgcaaga

SEQ ID NO: 805681 - DNA, 100 bp, Homo sapiens
gagccccctgccgctgggcttctcccccgtctgcgaccccatggattccagaagctgaaaccccacgtagtgttcttgaagaaattggactgacataact

SEQ ID NO: 805682 - DNA, 98 bp, Homo sapiens
aaaagcagcgtgcctggttacagctgtttccacgtgcggtgctcgtcgggagtgatcacctaccctacagctgaagaggaggcaaatgaagaagatgt

SEQ ID NO: 805683 - DNA, 98 bp, Homo sapiens
agaaaatagcagccaggaaccaagaaaacttggctccttcctcagagaagcttcctgttatgtaccttatggattctattgtgaaaaacgttggaaga

SEQ ID NO: 805684 - DNA, 100 bp, Homo sapiens
aagaatcgagtcttactcccagttccctgtggtggagtttttgacacttttgttcaagtacacatttcatcaggaatgtatcctgtcaggtataatgtca

SEQ ID NO: 805685 - DNA, 99 bp, Homo sapiens
aactgctgtaccaacgaaacaatcctgaggggacctgtaagccaaacccccctcagaagcctctgcctgcagatcctctggccagaacaactcggctca

SEQ ID NO: 805686 - DNA, 100 bp, Homo sapiens
gagcctagtcctgctgttcctgatccgcactgccctttttgcaccccagggagctgctgctgatctctcaaaggccttggttctgacagaaattggcccc

SEQ ID NO: 805687 - DNA, 100 bp, Homo sapiens
cagtaacatacagcactttgtggagaaagtcgtcttccacttgcacgaaagctttcctaggccaaaaagagaaagtgagtgagaaggttggaggagctga

SEQ ID NO: 805688 - DNA, 100 bp, Homo sapiens
ttgacgtccatttaccagtcttccctggcaagattcttctgaattgtgctgccttggccaaaagagaatacagtcgttttgaagctaaaatacatgattt

SEQ ID NO: 805689 - DNA, 100 bp, Homo sapiens
aaaaaaattaaattttaaccatgagggaaatcgtgcacatccaggctggtcagtgtggcaaccagatcggtgccaagggacccagacatggagctgcggg

SEQ ID NO: 805690 - DNA, 100 bp, Homo sapiens
cctgaaggcctcgctggagatcgagtaccaagctcatgctgaagattcggttatggaccatcatttccggaagccagcaaatgatataacgtctcagctg

SEQ ID NO: 805691 - DNA, 100 bp, Homo sapiens
acggcctggattctgctttcacctgtgcagccgagctcgttttgagagtgaacagagtatctgtcaggcaagagctgctgtgatggtttatgatgatgcc

SEQ ID NO: 805692 - DNA, 100 bp, Homo sapiens
ccgacatgggcatcacttgccccatcgtccccgggatctttcccatccagtcacttcagctttctccggggcaatacaacgtgcttcctgcaccagttcc

SEQ ID NO: 805693 - DNA, 98 bp, Homo sapiens
ggaagctaaagctaccaaagacgtagaaagaaatcttagcagggaatccgagcccgcattttagagactttggtcatgcttcttcttcttgcgttact

SEQ ID NO: 805694 - DNA, 98 bp, Homo sapiens
ggaggcctgtgggctgccaggatccccacctctctgcaatgggctgcccaggctgttgggccatatggtgctcttcccagtctggttcctgtacagtc

SEQ ID NO: 805695 - DNA, 98 bp, Homo sapiens
accaagatagaatatggagcagtagaggatggtgcaaccatgacttttttcaaggtgacaaacagcatgtttggtgcttcaagaaagaagtttgtaga

SEQ ID NO: 805696 - DNA, 100 bp, Homo sapiens
ctttcggcttctgagacggcggcagcagcggcattcaggcccgttcctcccgccgtcagccctgctgccagaccctgacttcttctctggcaccgtgtcc

SEQ ID NO: 805697 - DNA, 98 bp, Homo sapiens
tggagctgagtggggcgctccgcttctacgacagatccgacatcgacgcagtctacgaaactgaaatagcagttcaagctaaacaaccggatgtggaa

SEQ ID NO: 805698 - DNA, 100 bp, Homo sapiens
gacagagatgagtttgcagttagacatgcgctggaacaagggaaccatcttaaaagcatccgtggactatatccgaaagttgcaacgagaacagcaacgc

SEQ ID NO: 805699 - DNA, 98 bp, Homo sapiens
ccgaagaagaaaggattcgttacagccagagattggttacgaagtgacagtgctggtgcgggactcctccaggctgccatcagaggggccccggccgg

SEQ ID NO: 805700 - DNA, 100 bp, Homo sapiens
ctaaatttcggtagccatggcacaagaatatactcaaagcttggattctgccgtgccactcacgaatggcgacacagaagacgatgctgacaaaatgcac

SEQ ID NO: 805701 - DNA, 98 bp, Homo sapiens
gacagcaacttcagggatctgtaaagatcatttaaatggagtgctcatctcattgaggagcagattaattttgcgaatctatgggccttcacagggcc

SEQ ID NO: 805702 - DNA, 98 bp, Homo sapiens
tagacttacagaaaaagaagaagcggaaacaacgttctcccgcaaaaggaatgacagaggaagaggaagacaaacttctggcactgaaagacttcatg

SEQ ID NO: 805703 - DNA, 100 bp, Homo sapiens
gaaaagaggtcacatcagcgttctgcgtcatgggggagtgctgatcaactaaaagagcattgatctggtagccttgctccagaagcctgttcctcacagt

SEQ ID NO: 805704 - DNA, 98 bp, Homo sapiens
cctccgggcacacccggctccccggacgcctcggcaagcctgggacctggctgttgacatctgtctgtctcagctgccgacgatcatcgaggaaggca

SEQ ID NO: 805705 - DNA, 99 bp, Homo sapiens
cggcgccgggcactgagcaccgccaccatggggaaggggaaatatgtgcaatggtctttaccattcattgtcttcggagccacgggtctgacctccggc

SEQ ID NO: 805706 - DNA, 98 bp, Homo sapiens
ggtaccggccgtggaagcggccaccgactactgtcagcagctgtgccaggaatttatcaaagagctgctttctcggataagaggcatgaggaaactga

SEQ ID NO: 805707 - DNA, 98 bp, Homo sapiens
tttggggggaaactaggtcgatggtcggcggcgcccggatgggcagctgaggtgtggaaacaggaagagaactagaactggaagtaaagcattgaaga

SEQ ID NO: 805708 - DNA, 99 bp, Homo sapiens
ggaaagagacagcttgagaaaagggactttggaaaaaggctgtctctagacagcagtcttgtggaaaatggcattcctatgaagaaagcacgaaatgat

SEQ ID NO: 805709 - DNA, 98 bp, Homo sapiens
aggtaaccactcctttgtggaggtcgccagggtcattgtcgtggatttgcacagtcggctgggcggtgcaatggcgtgtcccagaagcttttgttgac

SEQ ID NO: 805710 - DNA, 100 bp, Homo sapiens
agggagtggtagttcccatggtacacaatggttatggatttttctaccatatcagagatgacagggtgttgatgatgccttctatacattagttcgagaa

SEQ ID NO: 805711 - DNA, 98 bp, Homo sapiens
caggaagctcggggacagagtgcagctcctaaacctgctggtgacacgactcagacagaagtaagactttgaccccgacgcaggcttcagtgattgcc

SEQ ID NO: 805712 - DNA, 98 bp, Homo sapiens
acctctcagcaggcctttgctggacagatgaagagtgacttgtttctggatgattctaagagatgaggaaaatgaagctcgggctggttaactgactt

SEQ ID NO: 805713 - DNA, 100 bp, Homo sapiens
gaatcatgattcttcttcattccattcaaggacttcgggaaaaagtaatcgaaatggtcccgaaaaagggagaaaatcctccacctccgggtttcataat

SEQ ID NO: 805714 - DNA, 100 bp, Homo sapiens
aggggcttcagcatcgtcacggacactcctgagctacagagactgaagaggactcaggagcaaatcagtaatgaaaactacatctcagacccaactatct

SEQ ID NO: 805715 - DNA, 100 bp, Homo sapiens
acttcattcactactgcagagccaccgtgtgctgggaactaaaggtgccttatgcccgctcagaggcccacctcacagagctgctggaggagatatgtga

SEQ ID NO: 805716 - DNA, 100 bp, Homo sapiens
gacgagctggagcgcctgtcaggctgggaggaggaggaggagagctgcatcatcatgaccatctcctccacgcttctggccctcgtcttgatgcccctgt

SEQ ID NO: 805717 - DNA, 100 bp, Homo sapiens
tggagaaggcagtggagatgacagaccagctgatggttgtagacactcctgggatcctggaccaccctctggaggataggaacaccatcgagatgcaggc

SEQ ID NO: 805718 - DNA, 51 bp, Homo sapiens
tgaactgataaaacccaccagtctagatgcacaaagcagggtcatcagaag

SEQ ID NO: 805719 - DNA, 100 bp, Homo sapiens
gaggcgcaatgatgagaggatgtggtggtctactctgatgtcaatcttgagggctagctacaacctcctgttctttgcgtctggaggaggcaagtttaac

SEQ ID NO: 805720 - DNA, 98 bp, Homo sapiens
aatcatttgacaaactgctttcccatagagatattgatgatgttaagaagttcaaaccgggttacctggaagctactcttaattggtttagattatat

SEQ ID NO: 805721 - DNA, 100 bp, Homo sapiens
gagaatgaagccatccaatggatgcaggaaaactggttttgcgtgtgaagctgtgtggaaatgtgaaatactaccagtcacaccattatagtaccgtggt

SEQ ID NO: 805722 - DNA, 100 bp, Homo sapiens
cagctccagaaaagagtatagtagtttaattggttggggtcagataagaagaggagtgacaatcaagccaacagtagatgatgactgaagaataccagtt

SEQ ID NO: 805723 - DNA, 100 bp, Homo sapiens
gctgacctgatgcctttcctgtattggaatatgatgctaaggatgtttggatctggccgagaacataactttacacgacccaatgagaaaggagagtatg

SEQ ID NO: 805724 - DNA, 100 bp, Homo sapiens
agaattcaattaaagtggctcagtcacccacaaaagctgtatataatgccagacattggaatcatccagattcagaagaactgcctgggccaccagtagt

SEQ ID NO: 805725 - DNA, 98 bp, Homo sapiens
gatattctaagatccagatatacataactgatccagactttaagagtatgccaagatggaaggaagcctcatacagtgagattaataatccgtcggta

SEQ ID NO: 805726 - DNA, 100 bp, Homo sapiens
gatggtgtgaccccatatatgattttctttaaggatggtttagaaatggaaaaatgtgtggaaattcagaaagttcactgaaaaatcgttctgctttctg

SEQ ID NO: 805727 - DNA, 100 bp, Homo sapiens
cctggagcggccgccttccagcgttgtgaaaatcttggagaagcacgaccccttgaagaacacccaggcaaaatatgggtctatccctccagatgaggcc

SEQ ID NO: 805728 - DNA, 50 bp, Homo sapiens
cggcgccgagccgcggtccgaccacaccttccagctgtggagggccctgg

SEQ ID NO: 805729 - DNA, 100 bp, Homo sapiens
gtggtaataccaagtttgaggcattgacagttgtgattcagcacctgctgtctgagtgccggtggtggtgtgcacattgagccccggtatagacagttcc

SEQ ID NO: 805730 - DNA, 98 bp, Homo sapiens
agctttttctaagaagagatgtgagacttcccttggaagttgaaaaacagattccagatgacctgaggaagagactaaatatagaaatgcatgccgta

SEQ ID NO: 805731 - DNA, 98 bp, Homo sapiens
ggagatgcacagctaagatgccaggaccacctggaagcctagaaatggcctcatgcattgtgcgtcagcagcaatgtttatggtgaaaaatggcaacg

SEQ ID NO: 805732 - DNA, 100 bp, Homo sapiens
aggctgagctggcccagagcaccatgtcaatgagaaagaaggaggaatctgaagccttgggcaaacgagatgctgctcagtggacggaagctgacagcgc

SEQ ID NO: 805733 - DNA, 99 bp, Homo sapiens
gcgagggtgactacagcgcagccagaatggtgaaaaggtggcagaatagatctacgaactgcgtgtgatggagaccaaacccgacaaggcagtgtccat

SEQ ID NO: 805734 - DNA, 100 bp, Homo sapiens
tccgacgcaaccggcagcagcgctgccgccgcgtcctcagccaccgctccctcttcccacggagcggcctattgccaattcatggacatgctcttccctg

SEQ ID NO: 805735 - DNA, 100 bp, Homo sapiens
cctcaccgtgcaccttcgcaagaagcaccagttcaagtggccctcagggcatccccgttttcggcgtaacctgatgatggaaggtgcagcgtcaagtgct

SEQ ID NO: 805736 - DNA, 100 bp, Homo sapiens
tttccaacacagatgtccaagctgccaagtgcactggtggaccaaggtgtctttgaggagctagcacgagactacgtcccacagctgtacgactgcatgc

SEQ ID NO: 805737 - DNA, 98 bp, Homo sapiens
gaggaaacgagttactcagatcctgcaaagtcctgtgtctgtttcatgtggaatacctgacttcaggtcaagggatggtatttatgctcgccttgctg

SEQ ID NO: 805738 - DNA, 100 bp, Homo sapiens
tcattcctgcagatgaaaaagtgtgacttggcagctggagactgacaaactggaagatgagaaatctgggctgcagcgagagattgaggagctgcagaag

SEQ ID NO: 805739 - DNA, 100 bp, Homo sapiens
cagcagtcggcttctctacgcagaacccgggagtaggagactcagaatcgaatctcttctccctccccttcttggctgcgatggatagtgctcggcttag

SEQ ID NO: 805740 - DNA, 98 bp, Homo sapiens
cacaacctatgacatcagctatggggaaaggaacagttgctgttcaagaaaaagcaggggtagaaatatttctgtcatggctcattcaaagactagga

SEQ ID NO: 805741 - DNA, 99 bp, Homo sapiens
caagatggacgggtccaggaaagaggaggaggaagacagcacattcaccaacatttctcttgcagatgacatagggaaaacaaagtgcatgatgaagtc

SEQ ID NO: 805742 - DNA, 100 bp, Homo sapiens
cactaaagtgttacatgacagatgtatgagctatatgttctcctttcagccaagacctttcaccagtgcaggggatagaagattcattccacaaacttat

SEQ ID NO: 805743 - DNA, 98 bp, Homo sapiens
taagaagacatacaaaagcctcttctgaaggaaaagacagtgtagtcctgcaaaacattttgagggactttgaatccaaagcaaaccatcttggtgat

SEQ ID NO: 805744 - DNA, 99 bp, Homo sapiens
gacggccttgagcgaggaggagctggacaatgaagactattactcgttgctgaacgtgcgcagggagtcctggacgcacaatatccagcgagagaaaga

SEQ ID NO: 805745 - DNA, 100 bp, Homo sapiens
cagagccgctacacacgggccaatctggctagtaaaaaggacagaattgaatcacttgaaaagaggctcgagtgtgaggatgatttggctgagaagagga

SEQ ID NO: 805746 - DNA, 100 bp, Homo sapiens
cccatggttggaggtgttgggggagatgtccagtgcgaagacaaggcaagcagctcttgaaggtattaaaaatgcactggcttcaaaaatgctgtatgaa

SEQ ID NO: 805747 - DNA, 122 bp, Homo sapiens
ggaatcttgagtgtttgaatgccatccttatacatggagttgatattacaaccagtgacactgcagattcacagagttcaacagcgtgttacaattaagaaagctttgactctaaaatatgg

SEQ ID NO: 805748 - DNA, 98 bp, Homo sapiens
tctccacatgaatattctgttttgctgcccgaagcttggattgtgcagactggtgcttaaaatggaagtcgatattaatggagagtctagaagtaccc

SEQ ID NO: 805749 - DNA, 100 bp, Homo sapiens
agagagaaaattgagacggagctaagagatatctgcaatgatgtactgagctttgaaggtacaatcgtgtgggagagccaagacctccacggccttgtgt

SEQ ID NO: 805750 - DNA, 99 bp, Homo sapiens
agacttgggatcagttataaactctagagtggaatttgaggatccaagggatgcagatgatgctgtgtatgagcttgatggaaaagaactctgtagtga

SEQ ID NO: 805751 - DNA, 99 bp, Homo sapiens
ttggggcagaatacagagatatggaatcagaggttttaaaagactacatcaagccagatggggaatatttggagttgtttgctcgaaatttacagccag

SEQ ID NO: 805752 - DNA, 100 bp, Homo sapiens
gattagctaataaccaactgcaattcctacctccagaatgtgacagtgatgataacatgggtgccaaaaatacttcaataggagaagaatttatatccac

SEQ ID NO: 805753 - DNA, 100 bp, Homo sapiens
tgtcatcggccggcaccctaatccaaaggttatcaatactctggctgaccatcatcatcgtgggactgactttggtggaagtccttggttacatgtcatt

SEQ ID NO: 805754 - DNA, 100 bp, Homo sapiens
gacagaggaggctccgtgtctgcagctagtgtgtcaactcagcgtttctcctctcgtccctgaccggagagcaatggtgtgatctccgcacactgcaacc

SEQ ID NO: 805755 - DNA, 98 bp, Homo sapiens
cggctgcagcagcaagtcccatcggaggacctccctgccctgtataccgagggaacaggctttcagtccagtgtaaagctgttggagcgcgggagcaa

SEQ ID NO: 805756 - DNA, 98 bp, Homo sapiens
gaaatgccctcacaccagacctacggagggagctggaaattcctgacgttcattgatctgcgagtgatagacagccaagcagagaaactgaaggagct

SEQ ID NO: 805757 - DNA, 98 bp, Homo sapiens
tgttttgtggggactggagagacaagtaaactctcagagtaactgtcccctctgactaccatttctaagcttgcttggctcaggaacaacagaagaga

SEQ ID NO: 805758 - DNA, 100 bp, Homo sapiens
atggccacagttcagcagctggaaggaagatggcgcctggtggacagcaaaggctttgatgaatacatgaaggagctagattacgatgaggacctggtgc

SEQ ID NO: 805759 - DNA, 100 bp, Homo sapiens
ctcaccgtcctctctgtctgtgccatcgccaccaatggagccgtgcaggggggcggagcctactctatgttcaatggccagctgctatttgatagaccaa

SEQ ID NO: 805760 - DNA, 100 bp, Homo sapiens
ccagtcttgaggtcctacatctccgaaagcaagctcttctagaagttgatgagctgcttcagaaagagcaaaactattcagatgacgtcttggccaacat

SEQ ID NO: 805761 - DNA, 98 bp, Homo sapiens
atctaaaatacgaaggtttctggctggcttatagtgatttaggatactacattatcaataaactgcaccatgtggacgagtcggtggggagcaagacg

SEQ ID NO: 805762 - DNA, 133 bp, Homo sapiens
ggtattccagataccgcgcttggcgagaaggtgtgcatggatctgccaaattttatatttcagatttgtggaagaaagggttcaaagacaccagtcagtatgtagtaggagaattggcagcactagagaatga

SEQ ID NO: 805763 - DNA, 98 bp, Homo sapiens
attacaagaataaaggcaggaatcaatccattcaatgttaatgaaggagttcccccttctgagtatgttcaatatccatgaaaaccttttagaagccc

SEQ ID NO: 805764 - DNA, 98 bp, Homo sapiens
tgagccgccccgaactaagcagggcggtcgggggcccagaataaagagaccagtgttttagctgctgcaaaagtgattgacactaaatctgaagaaga

SEQ ID NO: 805765 - DNA, 100 bp, Homo sapiens
cccaaccccggccgctggccctctgatgagagatgttcagttcaaccatctcactcgcttcattggcgcctgcatagaccctcccaacatttgcattgtc

SEQ ID NO: 805766 - DNA, 100 bp, Homo sapiens
attgaagtgaattctaaaggtgacagatttggcaattgtggtttctctggcaatgaatacaagaagtgtgccactggacttaattcagtgcacaaatgag

SEQ ID NO: 805767 - DNA, 98 bp, Homo sapiens
cttggaaaaccagatccagaaactggaggagtcccgctcgaagctaggcaaagcataattgatttgaaggagaaggaaataccagaattaagaaacaa

SEQ ID NO: 805768 - DNA, 100 bp, Homo sapiens
ctaccaggaacgcttggcacgtctagaaggggataaggagtccctcatattgcagattagaaatgatatttgccaaatttgatgaagtgcaaagttcagg

SEQ ID NO: 805769 - DNA, 100 bp, Homo sapiens
ttctgtcttcatggacatttttgaacttgtgatgcctgaaaacttcatgcctcctgttcccatcacatcaccaatcatgaacccgttgggtgacccccag

SEQ ID NO: 805770 - DNA, 100 bp, Homo sapiens
ccgattactgcgagaacaactacatacaggtgactacacttgtcaacacaagcaacaaaggcccatctggtaaaaagaaagggaggtcaaagaaagccca

SEQ ID NO: 805771 - DNA, 98 bp, Homo sapiens
cagcgaggagaacagtccgaaatggcggggactgttggtctcggccctgcggaaggaacagatggagtcggataactgttcaggaggagatgatgact

SEQ ID NO: 805772 - DNA, 98 bp, Homo sapiens
ttggtaaaagatgtttattctgcagcaaaaaagctgaagatggatcgagtaaagcaggttgaaatcacaaagattagacacctttttagataggtgtt

SEQ ID NO: 805773 - DNA, 100 bp, Homo sapiens
cccaagtctcctgaagaggaaggagcggtgtcctcttaagaaaatgtcttgccacttgcctagtgaggcttttccgaacctggaaggagacgtctagaaa

SEQ ID NO: 805774 - DNA, 100 bp, Homo sapiens
cggagccctggaagcagcagctcaccgaggacggggactcaatgcccaggaaaaccatgggctggctgtgcccaccccctcggttccagatgattttgca

SEQ ID NO: 805775 - DNA, 98 bp, Homo sapiens
cctcttcaggctgcatgtgaaaatcagccagccctccttacccatcagctccagagtgtacatatgaagattgaagaaaagataacattaacctgtgg

SEQ ID NO: 805776 - DNA, 100 bp, Homo sapiens
tccaagcctcggcaggtacagttcctccctcagtgttctaagaacggaagcatctgggctggatggaatttagcatcaagcagagtcccctttctgttca

SEQ ID NO: 805777 - DNA, 99 bp, Homo sapiens
tcggcctccggcgcagcccggaaatgtccggcaagatcgagaaagcaggtccctcgtctgagctggctcactcgcccaccaacagcgggaagaagctct

SEQ ID NO: 805778 - DNA, 100 bp, Homo sapiens
ctatgaccagcaagaggatggggccctggatgagggggaagggcctcaaagccagaagcttttctgggagaagaggctacaaggacttagtgcatcagat

SEQ ID NO: 805779 - DNA, 100 bp, Homo sapiens
tctcctaagtgaaagattcattaatgtccctccacagatcgctctgcccatgtaccagcagcttcatggtatgtgtgcaacagagagaaattatgcgaat

SEQ ID NO: 805780 - DNA, 98 bp, Homo sapiens
taagaagcagatcctgaaacacctgtcccggtgctactcgtgagcagtagtcgccatccagacagatggattgtccctggaggaggcatggagcccga

SEQ ID NO: 805781 - DNA, 98 bp, Homo sapiens
gactcttttggcagaagaggctcgaaagcttgctgaacggttgacttccccagaaatctggccaagtctgtaactgtggaatgaggctgagaccgtga

SEQ ID NO: 805782 - DNA, 99 bp, Homo sapiens
gcaactatgccagcaaaggaacagcccggcttattgaacacatcagaatccacacagagaatggtgacttcttggccctggatcttggaggaaccaatt

SEQ ID NO: 805783 - DNA, 98 bp, Homo sapiens
cctgtaccacactgaggagcgcggccagccctgctcgcagaattaccgcctcttctttagggggacacagcgattgccacgcgccattggaatgtccc

SEQ ID NO: 805784 - DNA, 99 bp, Homo sapiens
atggttttctaccatttcgactggatcatatcagaaagatggcatatcagatatgcaagtctgtgaatttggtggacttgctttgtgaagagacagttc

SEQ ID NO: 805785 - DNA, 99 bp, Homo sapiens
atatctttagattttggcagcaacgaggcctttgaaattgttgttcgccatgccaagaactacaccaatgccatgttcaagaacaactacccaagcctg

SEQ ID NO: 805786 - DNA, 100 bp, Homo sapiens
tgacatcatcacagtggcagctggacttgatcgagaacgggaatgcatatcagtccacgtgggccaagcgggagttcagattggcaatgcctgctgggag

SEQ ID NO: 805787 - DNA, 100 bp, Homo sapiens
gacggggaggaggagcaggagctggaggaggagccgccgccgccagattggcactgttgaagaaaagcggggaggaagattggagaaacagactcagcag

SEQ ID NO: 805788 - DNA, 98 bp, Homo sapiens
gagactcacttatgtgcacaatgatgccatggacaatattaccaggcagaaccaattctacgatacccaagtcatcaaacaagaaaacgagtcaggct

SEQ ID NO: 805789 - DNA, 124 bp, Homo sapiens
ttcttctacaaattctttcaggagtttacccaagaaccattggtggagatagaagatgatatcatcaagttgaatcgaaaggaagggaagaagcagaattttccaagactaaatagaagactcc

SEQ ID NO: 805790 - DNA, 99 bp, Homo sapiens
gaggcttcaggatgccattatggggtagtcacctgtggcagctgcaaagttttcttcaaaagagcagtggaagggttggatgactgcctgcaacaatat

SEQ ID NO: 805791 - DNA, 100 bp, Homo sapiens
aactggcatagacaactatgggcagcaattctgtggtgttcttggtcacacatttatggagtttctgaagggcagtggagattactgccaggcacagcac

SEQ ID NO: 805792 - DNA, 100 bp, Homo sapiens
ataaaggcaggaatcaatccattcaatgtgctgtccccggcataggtccatctctgcagaagccatttcaggagtacctggaggctcaacggcagaagct

SEQ ID NO: 805793 - DNA, 99 bp, Homo sapiens
ggattccaagtaactcttatttgtgtatagtctttgctatgacttctggccagatgtggaaccatatccgtggacctccatatgctcataagaacccac

SEQ ID NO: 805794 - DNA, 100 bp, Homo sapiens
ggctgggtggtatttcaaccaagtgagatggaagattttcgaggtatagcagaagaatcatttccaagctttctcaccaattcattatttggtaacagtg

SEQ ID NO: 805795 - DNA, 98 bp, Homo sapiens
ttgaattgcccccctgggaagtttcgttacagaatgtctgaaggggacagtgtgggagaatccgtccatgggaaaccttcggtggtgtacagattttt

SEQ ID NO: 805796 - DNA, 100 bp, Homo sapiens
gtcgcgggccggccccgcggggagcgcccccggcgcgatgcccttcaggaaaggctcttgtcaggatggtgaagctgttcatcggaaacctgccccggga

SEQ ID NO: 805797 - DNA, 98 bp, Homo sapiens
cagccccatccaggttcccatggttgccggctcccctctcaggacaacccagatgtgcaacaaagtgcgatggctgcaggtcaaggtgatatgaggca

SEQ ID NO: 805798 - DNA, 100 bp, Homo sapiens
acccacaggtgcatttcacagcactctgggcgaaaattggatgtgaaaatgaagccagaccgaggtgttacagggtcttgattatttacataccaagtgc

SEQ ID NO: 805799 - DNA, 98 bp, Homo sapiens
gagactcaggagtcccaggctttccaggagagagagtctgacaacctggattaccgcctaggagctattcactccctggtatataagctaccagaaaa

SEQ ID NO: 805800 - DNA, 100 bp, Homo sapiens
taagagaagtcacaaaacagcagatttcccaagagcagcggaaaatgatccagtcacaggataaaaactggatatgcatctaaaacaagatgtaagtcac

SEQ ID NO: 805801 - DNA, 100 bp, Homo sapiens
attccaagtaactcttatttgtggccataaaatgcagtaaaaacaaatccagttcccaagaagctgtacaaatgctttcttctgttcgactcaatttacg

SEQ ID NO: 805802 - DNA, 100 bp, Homo sapiens
gccacttgcttgggatcctttatcctggtcatcttctatttccaaagcttatcaggagggcagacttcaaaagctactaaaaatgaacggccctgaagat

SEQ ID NO: 805803 - DNA, 100 bp, Homo sapiens
tgatgacagcagtttaagtgaaatagatgaggatgaaggaaggcaactggatatggccaagaggggaagtttagtggacccctgaaacccatgacatttt

SEQ ID NO: 805804 - DNA, 100 bp, Homo sapiens
gtttacttctcctccttctttgttcaagactgggcttccaccgagcaggaggatgcagcattcaaggttctatcttggaagcagagactgtgccctcacc

SEQ ID NO: 805805 - DNA, 100 bp, Homo sapiens
gggcgcgcggctggtgtccgccccgcccgaaaggggatcccaacaagccctcaggattcagaagtgttaaagctcctgtcactaaagtggctgcgtcgat

SEQ ID NO: 805806 - DNA, 98 bp, Homo sapiens
cggagcgggcggccgccaccgagcgtgctgagcaaccgcagcctccgcggccgagagtgcagcgagaagaggagcaggacttggatggtgagaagggg

SEQ ID NO: 805807 - DNA, 100 bp, Homo sapiens
agaaaccgcctcgaaaacggagaagcaggttgacaactacaggcacaagccattgaagctggaatgtcctgttgctggtatttcaattgacttaagccaa

SEQ ID NO: 805808 - DNA, 99 bp, Homo sapiens
ggaactcaggcgcctcttcttagttgatgatttagttgattctctgaagaatgctgcctttttatatggtcttggtttggtctacttccattataatgc

SEQ ID NO: 805809 - DNA, 98 bp, Homo sapiens
attgtgcagttgctgccagtgccgattgcaggaatacaggagtttccagaaaatataaaaaattgtaaagttttgacaattgtggaggccagtgtaaa

SEQ ID NO: 805810 - DNA, 100 bp, Homo sapiens
tggtaataccagcaccataggacagccaagcaccaacaccatgttcaaactggaaacaagatggatgatgtgtcaagaagactaacagctgaaggaaaag

SEQ ID NO: 805811 - DNA, 99 bp, Homo sapiens
gtttttttcttatgaagcttcttctggttggaaacttgtcaaatttcatcagagatctgaaactggacaatgtcctgttggaccacgagggtcactgta

SEQ ID NO: 805812 - DNA, 100 bp, Homo sapiens
cctcccgagtggctggaactacagacttcgcatatcatttaagtggatggttcgagctttctctggatacttagctacagatcagctcttgcttttatgg

SEQ ID NO: 805813 - DNA, 98 bp, Homo sapiens
gcaactcccccatcgtatgaatctgagccgggtgtgggctgagccctgcctgattgatgctgccaaggaggagtacaacggggtgatagaagaatttt

SEQ ID NO: 805814 - DNA, 98 bp, Homo sapiens
aagatttggaaggcttgatcggaaccctctgtgaccaggttattaatgctgcactggctttagcagcaaaaccacagagtaaactggcccaagagaac

SEQ ID NO: 805815 - DNA, 100 bp, Homo sapiens
gaagaaagatgttttgcctactgttgatccggaaattatggaagtggaaattacaatgattttggaaattataaccagcaaccttctaactacggtccaa

SEQ ID NO: 805816 - DNA, 100 bp, Homo sapiens
gacagagacaacaccgagtatgagaagaaccaacgtccaagaggcccagaagatactcaacaacagcggactccccattacttcagccattgacctggag

SEQ ID NO: 805817 - DNA, 98 bp, Homo sapiens
agcaacacagtcacggcagcccacatcaagaagttcaccttcgtctgcatggctctgtcactcacgactctggaaaatcccaagtatgaactgatcat

SEQ ID NO: 805818 - DNA, 98 bp, Homo sapiens
tggcccaggaggacgactgggaccgggacctgctgctggacccggcctgggagaagcagcagcgcaagggcaaccatcaaagcggatcttccagccat

SEQ ID NO: 805819 - DNA, 100 bp, Homo sapiens
catgaggacaagcagacccgggagcagctgcatagcatcagcgactctgtgttgtttctgcagggctgcccagggattgccaggagctgttccaggttgg

SEQ ID NO: 805820 - DNA, 98 bp, Homo sapiens
cgcacgccggcactcgcggctgctggagccccggctggctcaccccggggccgggcagaattgggctccaggttaatttggagtggcccctggagtca

SEQ ID NO: 805821 - DNA, 100 bp, Homo sapiens
ctctcaaagcatgcttcagtggattgacccaaaccgaatggcagcatcggcacactgctcaatgtagttgatgtcacttggcgatattcctgcaaacatg

SEQ ID NO: 805822 - DNA, 113 bp, Homo sapiens
caaattagctgagaccacagataaagtcaaacaaggcttttgggaagaatttgaggggtttttagatgcctgcgagaagggccctctttctggtcacaagctctctgggctcc

SEQ ID NO: 805823 - DNA, 98 bp, Homo sapiens
ttctggctgaccctgcactttgagggccgcaactacgaggccagtgtagacagtctcaccttcagtgtcgtgaccggaatagccaggccagaagaagg

SEQ ID NO: 805824 - DNA, 121 bp, Homo sapiens
tttgagcccagctgcctggatgccttcccaaacctgaaggacttcatctcccgatttgagtttcacagattccttggtgtctttctccgctgagattttgtcacggacactatgtgaaccc

SEQ ID NO: 805825 - DNA, 100 bp, Homo sapiens
cagcggcaacagtaacgaaaaacagggctgtgtcagttgtacccgaggcgttctcagcagcagcaagtacctgtggtggatttccaggctgaactgaggc

SEQ ID NO: 805826 - DNA, 100 bp, Homo sapiens
gttccaaacctttatcaaatccttcaagtcctggcatttcaggaagaaaaaatgctgggcatcttggtgcagcacaaagtccggagtggcgtctcgggca

SEQ ID NO: 805827 - DNA, 104 bp, Homo sapiens
ccatagctgaagaggagcgccagatggtggaggaatacacttatttatgaagcttcagtgtcatttgaggacgtgactgtggacttcagcaaggaggagtggca

SEQ ID NO: 805828 - DNA, 100 bp, Homo sapiens
aaaataatcaagaccttgttgttggaaacattgtgaagggcccttatattctcaagaccgaatccttcaagccatgggaaacatcgcactggcctttcat

SEQ ID NO: 805829 - DNA, 99 bp, Homo sapiens
gcaaagcgaaattggtcattctcgctaacaactgcccagctttgagcaccgacgagagtgctggggaataaaaaggggatcttcactcggcagagacaa

SEQ ID NO: 805830 - DNA, 50 bp, Homo sapiens
gcttggcaaaatcgagcgggccattggatggtgtcaccctcccggcatct

SEQ ID NO: 805831 - DNA, 50 bp, Homo sapiens
taccgcgtcagtgacgtgaccaaagctctccatggacacgccgatgcccg

SEQ ID NO: 805832 - DNA, 100 bp, Homo sapiens
gtggccgctgtggtgaatgggagcgcgcagggcgcacagatcgtagtcgtgaaaggtgccaaattggcagaggctcacgtttcttctctttacaccaaac

SEQ ID NO: 805833 - DNA, 100 bp, Homo sapiens
cccaagtgcattgcctttggaaacgaggttcctggtacagttcagacaggacaaagtatgtgtgaagtttattcagggaaaccagaaaaatgggagtgtc

SEQ ID NO: 805834 - DNA, 100 bp, Homo sapiens
gaagaaaaggtgtacttgcaagaaacctcaggacttgagtaacagcaacatgatttacactgactgggccaaccactacctagcaaaatcaggccacaag

SEQ ID NO: 805835 - DNA, 148 bp, Homo sapiens
ggagccgtggagggaactttcccagtccccgaggcggatccggtgttgcatccttggagcgagctgagagctcgaggtttaagtgacacttctccagatgaagggttaatagaggacttgactatagaagacaaagcagtggagcaac

SEQ ID NO: 805836 - DNA, 100 bp, Homo sapiens
ggcaccacctacctggacacggccaaaggcgcggtagagaccttcatgaagaaagaatcttcaagagggagacatagggaaaaggaagacataaaaatca

SEQ ID NO: 805837 - DNA, 100 bp, Homo sapiens
atgatgaatcagagagtgcttcgagatggcagatgttctggctacacaggaaccctggattgcttgttacagaaacacgaccctcctctgagtagcatcc

SEQ ID NO: 805838 - DNA, 100 bp, Homo sapiens
acggtcttgctgaaagccagggaagaactcccccactggaaaggattctgaaagaaatgaagtcagccctcagaaatgaagttgactgcctgctggcttt

SEQ ID NO: 805839 - DNA, 76 bp, Homo sapiens
gagttcgtctcttacgtctgcggaagtgcagctgcctcagttcttagcgcagctccgacagttagttaatatgtgc

SEQ ID NO: 805840 - DNA, 100 bp, Homo sapiens
agtcccccaggatacagggtcaaaggagagcacaaccatcgcagttggaagcccatggggcagggtctgaatgctccaagtgagccatcatttgagcccc

SEQ ID NO: 805841 - DNA, 98 bp, Homo sapiens
atggacgcgctcagcgagtgggactggatggagttcgaagacaatagatgtgcatcttcaaatgcagcatcctgtgccaggtgccttgcgctgggtcc

SEQ ID NO: 805842 - DNA, 100 bp, Homo sapiens
aacatcctcctggccaccgactcctacaagtgggacctgatgcagaacatcatgaatgacatgccgatctacatgtactccgtgtgcaacgtgatgtctg

SEQ ID NO: 805843 - DNA, 100 bp, Homo sapiens
ggactgacttttcttatgctgggatgtgccttagaggattatggccttagattgtaagcaaaagaaatcaaggtcaagatctggaagcaagaagaaaatg

SEQ ID NO: 805844 - DNA, 100 bp, Homo sapiens
cctactgaagacatcatttgggaccaagctgatgagcccttgaagcacagcaggtcagtttgctgagaacgaaaccaatgaggtcaattttagagagata

SEQ ID NO: 805845 - DNA, 100 bp, Homo sapiens
attttcctacaacactggtgataacacaacatttcctgatgctgaagataaaggcaatgctggacgtggctgcaaaccagggctggctggtgactgtcct

SEQ ID NO: 805846 - DNA, 111 bp, Homo sapiens
ctatgagttacatggagatttcattgttccagccagaaaatgtttataggaggccttagctgggacactacaaagaaagatctgaaggactacttttccaaatttggtgaa

SEQ ID NO: 805847 - DNA, 100 bp, Homo sapiens
tctgtaaacagcgatatcagtaagaagagcaaagtaaatgctgtcttttcccaaaagacaggctcttcacctgaaggtgcccctgcccaacacccttccc

SEQ ID NO: 805848 - DNA, 99 bp, Homo sapiens
agcgagctgaatgagcccctgcttgcgcctgtggaatcaaatgacagcgaggacactcccagcaagctcttcggctgaccaactgactgaagagcagat

SEQ ID NO: 805849 - DNA, 98 bp, Homo sapiens
ccagactcctggagatcgacccgtacttgaagccctacgccgtggacttccagcgcagagcagcccgacggccatggaggctgaagagacgatggaat

SEQ ID NO: 805850 - DNA, 100 bp, Homo sapiens
cgtgatgttgggcggccacagagagattggtgtttttgtgaggcagtgagacctaagattgtctacaacctgttgtctctgcgcttcaactcacggatcc

SEQ ID NO: 805851 - DNA, 98 bp, Homo sapiens
cagcggacctgagtcttcaatgaaagattgccccaaagcggcctcacaccagagacgggttaagaagagggattggaggtccaccactccactagccc

SEQ ID NO: 805852 - DNA, 100 bp, Homo sapiens
tgtgcggagactgggcggccggccgacccttcctgtcgctgacggcgactgcgggaggccaggtattatagctgcaaatgtccttgtattctgtttatgg

SEQ ID NO: 805853 - DNA, 98 bp, Homo sapiens
aaaaaagcagcaagcctcggcagcagtcaatcctccagaacctatgctggtggaacagcctcggccaccaagcacctgttcttcccggagcctatcag

SEQ ID NO: 805854 - DNA, 100 bp, Homo sapiens
gagtgcaaatgcacctcctgcaagaagagtacatccccttcttcctcatcctcttcatgtacttcagcggctgctttactgcctctaaagctgagagctt

SEQ ID NO: 805855 - DNA, 99 bp, Homo sapiens
tatggactacttagcatttgactagacggtatgaatttctaagtaaggatcagctcagctactatttaataaaacaaaatctgtagaattcacgttttg

SEQ ID NO: 805856 - DNA, 100 bp, Homo sapiens
agggctgttgaaggcagcgaggaagagcggccagttaaacctgtcgggtagaaacctcagtgaagggaacacgggtctggctgagagaaaatggccagca

SEQ ID NO: 805857 - DNA, 100 bp, Homo sapiens
ccctgtgaaggtgaaagtggagaaatcaggagccagcaccgctctttgaccttgccatgcttgccttagatagtccagagagtggctggacagaggaaga

SEQ ID NO: 805858 - DNA, 100 bp, Homo sapiens
cgaagacgagatccagttcctgcgaactccacccacacagaatatgcctatgggtcctggagggatgaatcagagcggccctcccccacctccacgctct

SEQ ID NO: 805859 - DNA, 98 bp, Homo sapiens
tcatacaccatgcaaaacagaaccttccaaatttccttttccaactaaggtggatcttcttgttccaaccaaagtgactggcatcattacacaaggag

SEQ ID NO: 805860 - DNA, 100 bp, Homo sapiens
attctagtcctggctctgtcgcagactagctgcttgatctcagcaattctgtggtgttcttggtcacacatttatggagtttctgaagggcagtggagat

SEQ ID NO: 805861 - DNA, 100 bp, Homo sapiens
tcgagaaaaagtccaagaacagcatccagtggaacactgcttcatgatgccccagtccctgggcgtcatcggagggaagcccaacagcgcccactacttc

SEQ ID NO: 805862 - DNA, 100 bp, Homo sapiens
gaacagacacgggtgaatgctgctaaaaacaagactggggctgctcccatcattgatgtggtgcgatcggtggaaattcttgcttctcttcagaaaccaa

SEQ ID NO: 805863 - DNA, 115 bp, Homo sapiens
tactcttaactgatagtcgctaactttggttatgtgtgttccgatgaagttaaattccgtcaagatttaatgaatattgcgggcacaacattatcctcaaaacttcttactcatc

SEQ ID NO: 805864 - DNA, 98 bp, Homo sapiens
atcctgtgacctgcaggtactgggagatccatagggaagaaggcggaacatccggaggctgggaaatgtggccataaaatgcagtaaaaacaaatcca

SEQ ID NO: 805865 - DNA, 99 bp, Homo sapiens
gctgatgaagacaggcctttcctgctgagcccagcctatcttcgcagcctgctcagcattgggttctgatcttcacattgaagtgaagggttatgagga

SEQ ID NO: 805866 - DNA, 100 bp, Homo sapiens
gtcaggaccgcgacggcagcagagcaaaaatgcatccgatgcagatttatggctcctgaacagttgcactgtaaaaaacccagctgaagaccactttaga

SEQ ID NO: 805867 - DNA, 100 bp, Homo sapiens
tgtctactccacatagaccatccactgcctcagggtcttcagtggtaacagccagtgtgcagatgaggtggaaagtgagaaatggtacctgtctacagac

SEQ ID NO: 805868 - DNA, 100 bp, Homo sapiens
aagaatcaaatattcagtgggatacaaatgatacttctcaccactgcatgaatggacatttgaaagtgccatagccaaacacttgcaagcatggagacct

SEQ ID NO: 805869 - DNA, 100 bp, Homo sapiens
acagtgggacatacacttgttctgccacaaataaggcagggcacaaccaatgcagtgggcatctgacagtcaaagtaacatctttaccagcaatgactga

SEQ ID NO: 805870 - DNA, 100 bp, Homo sapiens
ttctggaggccactggcatcttcaagaagttgcccaacctgcggaaaatgatccttgccacggctggaactgacttcgacctgcgaacactgagggctgt

SEQ ID NO: 805871 - DNA, 100 bp, Homo sapiens
tgtgtcagcacttcttaatgctgaagatgaaaaaagagaagaggagaaggaaaaacaagctgaagaaatggcatcagttctggacttcagtgaccccttc

SEQ ID NO: 805872 - DNA, 100 bp, Homo sapiens
agcacttgttccccaaacaagtgctcctacattctggacctgaaggagaagaaggagaaggtggaggagaaggcaagccggaaagagcgaaagaaagaag

SEQ ID NO: 805873 - DNA, 98 bp, Homo sapiens
tctcacgtccccgtcatcgccaactccaccctctacatcagcacacgacggttctgccctttatattaatcgagatgaggacatcgcaccatcagtat

SEQ ID NO: 805874 - DNA, 98 bp, Homo sapiens
gcgcctcggaggcgttcagctgcttcaagatgaaggattttctagctcatatcatccaccacctggctgctattagtctgatgagcttctcttggtgt

SEQ ID NO: 805875 - DNA, 100 bp, Homo sapiens
atcaacagtgcattagacataaaagttttgactcagccttcccagtcagctgtgagaggttggtcatcattttatccaagcttgactgtggtacagcatg

SEQ ID NO: 805876 - DNA, 98 bp, Homo sapiens
ttcgtcctcttcttggtgctgtggctgatgcatttcatggctatcatctacacaggttggaaagaaccatgactgtattcaggaaggcacatgaactg

SEQ ID NO: 805877 - DNA, 100 bp, Homo sapiens
ccagacaagatggacaccgcggaggaagatccctgcatgtcactgagtccaccatgctttacagaagaagacagatttagtctggaagctcttcaaacaa

SEQ ID NO: 805878 - DNA, 100 bp, Homo sapiens
tcgctgggtgcgtggggctgcctcgccgcgtctcgccacggttttacacatccataagtagacctttttggagcctcaccagccaattcaatggcgtcct

SEQ ID NO: 805879 - DNA, 98 bp, Homo sapiens
ttgtgactcatccacacctttaaaggtccaaattccaagcctgtagtgtccttcattgctggtttaactgctcctcctgggagaagaatgggtcatgc

SEQ ID NO: 805880 - DNA, 98 bp, Homo sapiens
gaagcttggaccgcatcctagccgccgactcacacaaggcaggtgggtgaggaaatccaggttctcaacccattttacattttccagctgttcagtgt

SEQ ID NO: 805881 - DNA, 100 bp, Homo sapiens
tggcatcttggacctgctgcaggccagtgaggaggttggcgcgctggagtacaaccccagcaggcatggctaatgtaaaagcagccccaaagataattga

SEQ ID NO: 805882 - DNA, 98 bp, Homo sapiens
aaaagcaagagtttgttatatagcaatgtaaagaacctatatccatcatcatctccttatacaagaaattgggataaattggttggtgagatcaaaga

SEQ ID NO: 805883 - DNA, 100 bp, Homo sapiens
attgataatctgattgtggctccagggacatttgaagtgttgctctaggtcgtaaccagcctttgaaaaaggagaaaccaaaatggaaaagcgattatcc

SEQ ID NO: 805884 - DNA, 100 bp, Homo sapiens
cagagctgaggactgcctgtttgcaggtttcatttagtggagaaattgggtatgacctcggaggagtcaagaaagagttcttctactgtctgtttgcaga

SEQ ID NO: 805885 - DNA, 99 bp, Homo sapiens
gaaacttctgagcaacagatctaaagccctggtggttggacgtgataagtatgagcctgcagctgtttcagaacaaggtgataaaaagggcaaaaaggg

SEQ ID NO: 805886 - DNA, 99 bp, Homo sapiens
ttaaagctatggcaaaggcactggaggattgagctaggtgggcagaaaagagcaacccagatgtagcctttgtacctctaggaatgacggattatttag

SEQ ID NO: 805887 - DNA, 147 bp, Homo sapiens
cgagatgtctcgctccgtggccttagctgtgctcgcgctactctctctttctggcctggaggctatccagcggatgtttcagcagcccctgagaaggaagaggaggaagctgagggcccgctgagggcgcaggacctgagggagtcc

SEQ ID NO: 805888 - DNA, 100 bp, Homo sapiens
gagatttcagagatgaaccgggccatccagaggctgcaggctgagatcgacaacatcaagaaccaggaggacaatgcaataattgaaatttccctaaagc

SEQ ID NO: 805889 - DNA, 99 bp, Homo sapiens
ggaaatgctctgacagagaatgagatgaccacaattcactatgatagaattacttctctacagagcaagtgataatcaagttactatgagtctgctaaa

SEQ ID NO: 805890 - DNA, 98 bp, Homo sapiens
ctgacttttttatccgtggagagcgactcagggacaaaatggaactctaatgaatcattgattgaccagcactattttaccagttggaatgaatgatc

SEQ ID NO: 805891 - DNA, 100 bp, Homo sapiens
atgtctaaagaagagacccaagatctgtgggaacagagcaaagagttcctgaggtataagtgtgctagcggagtgtctagattgtcctgaattgaaagca

SEQ ID NO: 805892 - DNA, 100 bp, Homo sapiens
cccaagaagaccattcagatgggatctttccggatcaatccagatggcagccagtcagtggtggaggagtatagtcatggccaacagcaaaaaactcaag

SEQ ID NO: 805893 - DNA, 100 bp, Homo sapiens
aagtgccttgcgcctcaaggttacggaggcagtgacgtaatggaactgctggtccatctgaataaacgtataaaaagccgccccaaaatacaacttccag

SEQ ID NO: 805894 - DNA, 99 bp, Homo sapiens
gaaggtgtacatcgtgcatggcgtccaggtggctgtggacagaagctggagcccagtctgaacttgagaccgcgttggggattggagggtttgggtacc

SEQ ID NO: 805895 - DNA, 99 bp, Homo sapiens
aaccaggagctctgccggctcaacacgatggacttactgctgagccttagagaggaggtgacccaccttacccgctcacttcggcgtgcggagacagag

SEQ ID NO: 805896 - DNA, 100 bp, Homo sapiens
ggccaagaaaatttgaagaaggatcttgtgaggaggatcaaaatgttggagtatgctcttaaacaggaaaggttttgctgttactgctcagtgtagtcac

SEQ ID NO: 805897 - DNA, 100 bp, Homo sapiens
gaagaggaagaggctaccaaggaagatgctgaggccccaggcatcagagatcatgagagcctacagcctggctcccgcgacgccggaggtgaaggtggct

SEQ ID NO: 805898 - DNA, 100 bp, Homo sapiens
tgtgaggagctaatccctgaatatctgaggtgaagttgaacaaattgctatgatgaaaccaaaaggccagactgaacacgatgagggtatgcttgaatat

SEQ ID NO: 805899 - DNA, 98 bp, Homo sapiens
gtttgtttttttcgtaaacatctgggtgtatatcaaacggcaagatgtccagtaatgtcccggcggatatggtccaggggcaagttcatcctactctc

SEQ ID NO: 805900 - DNA, 100 bp, Homo sapiens
cagccaccccgcgggatacgcctcagcgcggtgctgttccagaattcaaagaagagaaactgcagctgcaaccaaaaccacgttctggagctgtggaaga

SEQ ID NO: 805901 - DNA, 100 bp, Homo sapiens
gcctcgtcgacatgagtgatgtggaggaaaacaacttcgagggcagagcatttgatctaacagagcaaagatacgtagctgtgaaaattcaccagttaaa

SEQ ID NO: 805902 - DNA, 98 bp, Homo sapiens
tcctgtggtattgtggaaattcccagaggactttggagaccagccacagcatgttccgaagagatgattggaagatggaagtggagggttaaataatg

SEQ ID NO: 805903 - DNA, 100 bp, Homo sapiens
taaagcaaagaaacaaaagacaactctgcttttccagaaactgtgccaggatcacgcccacttcgatgtgttgttcttgtcgcacttagggacatcaatc

SEQ ID NO: 805904 - DNA, 98 bp, Homo sapiens
agcagctactctgaaacttggaattgctattttaaatggtgggaactccacagtacagcagctcaggaatcttgcttttaagaaaattccccagaaat

SEQ ID NO: 805905 - DNA, 100 bp, Homo sapiens
ataccaaaagacacttggaatcttcttttagacttcagtacgatgattgcagatgacatgtctaattatgatgaagaagacggagtctcgctctgtcgcc

SEQ ID NO: 805906 - DNA, 101 bp, Homo sapiens
gagctgtactccagacacaacccggccatcgaggccctgctgcacgacctcagctcccagaggatcaccagcgtggattcccgacagttaagcaatgggga

SEQ ID NO: 805907 - DNA, 100 bp, Homo sapiens
ctgctctcggtctccacgcccctccctgctgtcacccagacccgcggtgcgacagggatccggtgtgattaaagctggttttgctggtgatcagatcccc

SEQ ID NO: 805908 - DNA, 100 bp, Homo sapiens
acatcatgaaggctagtttggatgtggaggggaatagactccatctatccatatgaggcttgcagccaatttactggagcagggatgacgtagcccagtg

SEQ ID NO: 805909 - DNA, 98 bp, Homo sapiens
tcgattttaccttggataccctgctttggctcctgggctataacgaaaagccaataaatctacaaatgtttattgggacagcagatgatcgatattta

SEQ ID NO: 805910 - DNA, 132 bp, Homo sapiens
atgagaacatggtgctggtttccttgcttaaacactacagtgatttcttccaaggtcaaaggacgaaggcctgaagaagtcagtgatttatagttcactaaaactgcacaaaatgtggaaagggtggctgag

SEQ ID NO: 805911 - DNA, 100 bp, Homo sapiens
ctctgtcacccttttaatcctagacatctccagaagtgaggaagtcgagacaacatgagtgtgattttgatctgttttccaaatgcacccaaagtatcgc

SEQ ID NO: 805912 - DNA, 104 bp, Homo sapiens
gccggccccatgaggagggacgtgaacggagtgaccaagagcaggtttgaggaacctacaagcagcaattggcgcctattatgactttgagagcccaaacatca

SEQ ID NO: 805913 - DNA, 98 bp, Homo sapiens
ctacatggcctaccattactttcgaagcaagggctgggtgcccaaagtgggactcaagtacgggacagatttacgaaaagtacccagatgccgtgtac

SEQ ID NO: 805914 - DNA, 100 bp, Homo sapiens
tgtgactggattcacgggtagagattggcttcgggctgagctagcagtgagcaccttttggcccaatgaatatcaggaaggatgataaagactatgcttt

SEQ ID NO: 805915 - DNA, 100 bp, Homo sapiens
cagtactacgtgaaactgaaggacaacgagaagaaccggaagctctttgaccttctggatgtccttgagttcaaccagtgactacctgtttaagctgctt

SEQ ID NO: 805916 - DNA, 100 bp, Homo sapiens
tattcttccagggcgaatatgaggccgcgctgaccatctacgatacccacacattcttcttttggccgatgaaaaatttgacttcgatctttcattgtct

SEQ ID NO: 805917 - DNA, 100 bp, Homo sapiens
tcgtcaagcggccaccagatgactcgctcgctggtccactcaaaggcatcacatccagagcgctctgctggtcacagaaaacgcccactcctggatcttc

SEQ ID NO: 805918 - DNA, 100 bp, Homo sapiens
cacctaactacggaaaacctgatcccaaaattattgaaaacactcgaaggttactgaatcaaatggatggatttgatactctgcatagagttaaaatgat

SEQ ID NO: 805919 - DNA, 100 bp, Homo sapiens
accctgccgtcatgtctaagtcagagagcagtatagctgtgactatggatctggcagattctttatcctttgtggacttggaggaattattagctgtggc

SEQ ID NO: 805920 - DNA, 98 bp, Homo sapiens
ttttgctgggacgcctactccaaagcggccgggagtcgcgcttcttccccactcccgagacaggcatcagcaatgcagaagcacggcagccagggaag

SEQ ID NO: 805921 - DNA, 100 bp, Homo sapiens
cggcaggggaggacgaggtggacgtgggcgtggtgggcgcccaaaccgtggcagcaggaccgacaagggaatgaaagctactggttgattttaaagtgcc

SEQ ID NO: 805922 - DNA, 100 bp, Homo sapiens
catcaaatgctcgacgaagcttaaattttgggttggatggcaagcatgtggtgtttggcaaagtgaaagaaggcatgaatattgtggaggccatggagcg

SEQ ID NO: 805923 - DNA, 100 bp, Homo sapiens
caagaagactgatggagcaggcttgcaatattaaaggccgttgctccagggagaactgcaaatatcttcatccacccccacatttaaaaacgcagttgga

SEQ ID NO: 805924 - DNA, 99 bp, Homo sapiens
gagtgtgtacacaccacccaccataaaagggtactagatggaaacttgagaaaggactgcttattgataacagctaaggtattcctggaagcagagtaa

SEQ ID NO: 805925 - DNA, 100 bp, Homo sapiens
cctgaagatggttccaagtattccctatctagatccttgcactgctggatgctctgagtacggtgcatagtcagaagatgaagaaggccaaggagcagcg

SEQ ID NO: 805926 - DNA, 100 bp, Homo sapiens
aaaggagcccagggctctctgctgtgcaggctgtctctctgagaacccgagttcaagaacaagcagggaaggcagagcaagatggctgaatagaaccctc

SEQ ID NO: 805927 - DNA, 100 bp, Homo sapiens
gtgtccaggcttaacttctcctggagctaagctttaccctgctgcagtagataccattgttcttctgatcaagaatctgaagaatgagatcaccaaaaag

SEQ ID NO: 805928 - DNA, 98 bp, Homo sapiens
cagagaatgcggcttctgagtgtaagacactgaggcggtgtcacagacagattctgtttctggcgtctgcatacgcaagtccccaactcgctgaggag

SEQ ID NO: 805929 - DNA, 100 bp, Homo sapiens
gtctttgcagactacgaagcctatgtcaagtgtcaagataaagtgagtcagctgtacatgagtgatggtgtgcaacaaacaacctacctcgcccagcagt

SEQ ID NO: 805930 - DNA, 99 bp, Homo sapiens
ttgtatctctaattggaagcaatttgttggaatcctgaccaaactggaaaagtggcagtaaccatggaaaagtcaaagacaaaatgacagccaaatcac

SEQ ID NO: 805931 - DNA, 100 bp, Homo sapiens
catcagtgatgaatgcaagaggcgtttctataagaattggtttgtcaagggctatttaatgagttactagaaaatgggatttctgtgtggcctggttatt

SEQ ID NO: 805932 - DNA, 98 bp, Homo sapiens
aaatctcaggaatctggtctcattgggcctcgaaaaagcccaagacagcagaagcagacacctccagtgaactagcaaagaaaagcaaagaagtattc

SEQ ID NO: 805933 - DNA, 50 bp, Homo sapiens
tttggtggatcacctcaatgtgggtgtgtcctgggactctgaatggcctg

SEQ ID NO: 805934 - DNA, 100 bp, Homo sapiens
tgggggcgagggcgaagacgagatccagttcctgcgaactatcgtcagtatttaaacagatcacatcatgcgtgagtacaagctagtggtccttggttca

SEQ ID NO: 805935 - DNA, 98 bp, Homo sapiens
aaagaaatacaagagcatgaagctggaaaaagaagaatttgtcaccctcaaagctatagctcttgctaattcagctctattaccaggttttaaacttc

SEQ ID NO: 805936 - DNA, 100 bp, Homo sapiens
gtccccagtgagggtgtacaaatacccctttgaattaattatggctaaccactcacgaattcttgtttggtgcccttgctgaactggttgataatgcaag

SEQ ID NO: 805937 - DNA, 98 bp, Homo sapiens
caaactgcagaaacagatgccattcggtttttggttgggacgcagtctcttaaatatgataatcaggtttgatctgtggatgaaatgaatcatgattt

SEQ ID NO: 805938 - DNA, 98 bp, Homo sapiens
tagcaatccatggaatggagacattaaagggggaaacgaagaagctagactcagatcagaatgcactgctgcctgcaggcctgaggcagaaggatcag

SEQ ID NO: 805939 - DNA, 100 bp, Homo sapiens
tggatggaatctgctttgttgggagtgatggatggacagattcatcacaagagagctacaagagcctggaagaagctgaagactgctaccctccatcctt

SEQ ID NO: 805940 - DNA, 100 bp, Homo sapiens
ccaaatccaggtcgcgatcgaagagtccccccaagtctcctgaagaggaaggagcggtgtcctcttaagaaaatggtatcagcggcagggaaggaggctt

SEQ ID NO: 805941 - DNA, 99 bp, Homo sapiens
gagataccttactcggaagattggctttgaggcagtcatgaggattcggtgcaccaaagaatgggctttagggatgaagcagctgggtattttcataaa

SEQ ID NO: 805942 - DNA, 105 bp, Homo sapiens
ttggaaggaatgttttgctagctgctaaaaccacctttgtcaccagaatgaatgaagtgcttcagatttaaatatgcatgctgggaccgcgacggacaggctgcc

SEQ ID NO: 805943 - DNA, 100 bp, Homo sapiens
tcgccgcctcccatagctccttaccccagccctacacgaaaggacctgcttctccagccccttcacagatgtagtcactacaaatcttaaattgcgaaat

SEQ ID NO: 805944 - DNA, 100 bp, Homo sapiens
aacagacctctgaagagaagcccaaagacagtgaagaactcgagaacggtgtgctgctgaggactgtcttggaccctgtcactggggatttgtctgatac

SEQ ID NO: 805945 - DNA, 98 bp, Homo sapiens
gcctctatgtggccatgaatggtgaaggctatctctacagttcacccagttcaatacaaacaagtgagtttgactcatcagatgaagagcctattgaa

SEQ ID NO: 805946 - DNA, 100 bp, Homo sapiens
cgtgaacaggaacttaagagtcttaggagtcagttggatgtgacacataaggaggtctgtggctgtcctctctattggaaagcccccatgttcagggctg

SEQ ID NO: 805947 - DNA, 98 bp, Homo sapiens
aagaagtcattccttttttgaagaatcatctcccctgccccacaaacatgaaagaaaagacaagagaagcaccccagaagaggaggggagaagtgccc

SEQ ID NO: 805948 - DNA, 100 bp, Homo sapiens
catgtagaatgttgcaatattgtttacaggcttttgaacacttgcagcaattagaattaataaagcccatggaaagaacttcaggaaattcacagagaga

SEQ ID NO: 805949 - DNA, 101 bp, Homo sapiens
gtggggctgcgctggcggcggctggaggagccgctgggcttcatcaaagttctccagtggggagatacttcaggggattaccggaagattctgctgaagat

SEQ ID NO: 805950 - DNA, 140 bp, Homo sapiens
gatcaagatccttcagcttctaaaacacgagaatgtggtcaacttgattgagatttgtcgaaccaaagtcgagcaaaagatgtgataataccagcaaagccacctgtcagctttttctccttgaggtctccagtccttga

SEQ ID NO: 805951 - DNA, 99 bp, Homo sapiens
ggaagccccttaaatgccgcaccctacggcatcgaaagatgcctgaggaagtgcaccatggagaggaggaggtggagacttttgcctttcaggcagaaa

SEQ ID NO: 805952 - DNA, 100 bp, Homo sapiens
aagcgtacctgagaatacttttaaaggaacctgttgataaatgcaaaacagtggctgttgcaggtttgacagtgctctggaagacctacctaagagtgga

SEQ ID NO: 805953 - DNA, 100 bp, Homo sapiens
atgtctcgctccgtggccttagctgtgctcgcgctactctctctttctggcctggaggctatccagcagagtttcattctgtcgcccaggctggagtgca

SEQ ID NO: 805954 - DNA, 100 bp, Homo sapiens
tcagcctcccgagaagctgggattacagactctgaagaagaagctatggagactacaccagccaaaggaaagaaagctgcaaaagttgttcctgtgaaag

SEQ ID NO: 805955 - DNA, 51 bp, Homo sapiens
agactgtggactggaggagagtgtccaggttcggtgatgctgtgaaaggta

SEQ ID NO: 805956 - DNA, 100 bp, Homo sapiens
cgcacgggctcggccgccgcccctgccggccacccagaggagaaggccaccccgcctggaggcacaggccatgaggggctctcaggaggtgctgctgatg

SEQ ID NO: 805957 - DNA, 98 bp, Homo sapiens
gggaagcgctgtgaaatgggctgtcacccacaaaagctgtatataatgccagacattggaatcatccagattcagaagaactgcctgggccaccagta

SEQ ID NO: 805958 - DNA, 99 bp, Homo sapiens
tttgacttggtgttgaaagtgaaatgtcatgcctctgaaaatgaagcacacgttagatgtcaagagtacaatgttacctgctgccgttcgttgctctga

SEQ ID NO: 805959 - DNA, 98 bp, Homo sapiens
gggggctgtcggggaaccatggctgccccgagaggtgtgactgcacagaaaagttacaaaacaaatttgactttttgcgctcacagttgaatgatatt

SEQ ID NO: 805960 - DNA, 100 bp, Homo sapiens
aagtcctatccatttgtactttcagcaaacctgcatggaggttaaaggaagatggaagtggaagtgcttatgacaaagaatctatggcaattatcaagct

SEQ ID NO: 805961 - DNA, 100 bp, Homo sapiens
tggctgctgctgctgcccgccgcccttctgctccacgaggagcacagccgggccgctgcgaagttttttgtagcatcagatccaacagttaaaacagatc

SEQ ID NO: 805962 - DNA, 100 bp, Homo sapiens
aaaatcacagtggatgggccccgagaacctcgaagcccgatgagagaaagggaaagttaaggatgctggagcagaacaatggatttctctttctctttca

SEQ ID NO: 805963 - DNA, 100 bp, Homo sapiens
cctttcccaatattcatccacctcagataccagcaactcccccatcgtatgaatcttttaattggttggggtcagataagaagaggagtgacaatcaagc

SEQ ID NO: 805964 - DNA, 100 bp, Homo sapiens
tcaagaaagtacctcgtctcaaaacctggctgctatcagagaagaagggtgtttggggtgtgttttacaaagatgatgaggagtctgatgaggaagctgt

SEQ ID NO: 805965 - DNA, 100 bp, Homo sapiens
ctacagtgtggtcattgaggacaagttgacgagagagtcccaagtacgtccacggtcagccttgcggtgtttaatgaacgctgccgaattcacttcaagc

SEQ ID NO: 805966 - DNA, 100 bp, Homo sapiens
aaccacccaagtctgcaatcttaccagggaggccaagcgaccacccaaagaagctccaagaggaaaacgaggatggaaaaccttttatgctgtactgaag

SEQ ID NO: 805967 - DNA, 100 bp, Homo sapiens
cagctgtggaggtggaatcagtagcagcagcagcagccgcggtggcagtgcaaaaggctggcagtacagggagaagcatgacactggccaacactgcgtc

SEQ ID NO: 805968 - DNA, 98 bp, Homo sapiens
cgtggtactcaagggcaccagtattcccgcggtcggcagcatgggtcgggagtcacggattgaatccagtgatcttccacttctggctgctgtagcaa

SEQ ID NO: 805969 - DNA, 99 bp, Homo sapiens
ctcttcttacaacagggaagcagccctcaaggccagcggagtcttcagcacccccacaagcatgcagggccatcgatgcacccctcggagctaatagcg

SEQ ID NO: 805970 - DNA, 100 bp, Homo sapiens
attatggctattccctatattcagcaattaaagatttgattgccttatgtgacaagcccaagatctgtgacagttggagctcaaactaggcagtcttgat

SEQ ID NO: 805971 - DNA, 99 bp, Homo sapiens
gcccttccaaataagcggcataaagcaattgagaattcaggaagctcttcgtgtggtgaagatcttacagaaccttgatccgccatttagcattgatgg

SEQ ID NO: 805972 - DNA, 98 bp, Homo sapiens
gagaaaagcgtcattgatacttcaacaaataacaagcctttgtattcatttgaagataatgcagactatgtttatgatgttatgtggtcacctaccca

SEQ ID NO: 805973 - DNA, 100 bp, Homo sapiens
gttcctctccaactagtccaggaagtttcagaggattaaagtcactgtgtgcccagtattctgcagacaaacgagaagatgagaagatgtgtgatcattt

SEQ ID NO: 805974 - DNA, 100 bp, Homo sapiens
aaactccaagaagccaggtgttcaagactggaatcagccattttaccaagaaagttgggtttcttttactggcaaatagtacttcaagagcacagtctta

SEQ ID NO: 805975 - DNA, 100 bp, Homo sapiens
acgttttcaacgttggtcgagagagtcattcagcagttgccgctgtgattggaaccaggctgcatgctgctgtggcaattgcttgtgttgtaatggcctt

SEQ ID NO: 805976 - DNA, 100 bp, Homo sapiens
gggtcgcttggaagaagccaaggttggattatctcaagatgcccaggatcaaatgagaaagatgctttgccaaaaagaatctaattacatccgtcttaaa

SEQ ID NO: 805977 - DNA, 100 bp, Homo sapiens
agcccagatggaacaagggatgttgctgaacagttggagaagatctatgggtcagacagaattgtgaatgaaaactttgccattgatttgatagcagagc

SEQ ID NO: 805978 - DNA, 100 bp, Homo sapiens
tccttacctgtttttccagctcacccactgccagcagagctggaaggatccctggagcaagagaagaaggtgcgcatggacctggagcgagcgaagcgga

SEQ ID NO: 805979 - DNA, 51 bp, Homo sapiens
ccctggccgtggggaggaccggaggagagatggtcctggtgctgcccagga

SEQ ID NO: 805980 - DNA, 118 bp, Homo sapiens
aaccttttgttgtagatgaagaaattgatcctatccctaaagtcattaacacagccacaatggtgcgcatgaatgtcctggcagatgctctcaagagtatcaacaatgccgaaaagag

SEQ ID NO: 805981 - DNA, 100 bp, Homo sapiens
caggaggttggacacagaccattgcaatggaaatgatagtgtgtgtaccatatcagtggcgtgtaactatgctcatcattgttcttgtcaatgcctttgt

SEQ ID NO: 805982 - DNA, 98 bp, Homo sapiens
caattgcggggcttactgctgatgctagactgttatggagagtcaagccctacccgtcgagaagctgtgaagagaagaacagccgagtacctcatgcg

SEQ ID NO: 805983 - DNA, 98 bp, Homo sapiens
gagcgtcccagtacactgacagagcaacaagctcaaccaaattggaagatctgagttatttagacgggcagagaaatgctcctctacggacgtcaatt

SEQ ID NO: 805984 - DNA, 100 bp, Homo sapiens
aaatggctgatgatttgctggcagctgctgacaaggaatttgcaggtgaagacacttctgatttgtttttggaagagagagaaatagccctacggcaggc

SEQ ID NO: 805985 - DNA, 100 bp, Homo sapiens
ggggagctgaacgtggacagcctcatcacccggctgctggagggaagaagacttaaactgcgtaagggagaggtggtcagatgcactcattaaacgacga

SEQ ID NO: 805986 - DNA, 135 bp, Homo sapiens
tatcaatgaagcagccgatcatggcggatggcccccggtgcaagaggcgcaaacaagccaatcccaggaggaaaaacgaccgagtctcagtctgtcacccaggctagtgcaatggtgcaattttggctcactaca

SEQ ID NO: 805987 - DNA, 99 bp, Homo sapiens
gggaaaacttgctgcggttgctcaagtatcttctcacaggtatgaaacacctagcgatgctattgaggtgataagtcctgccagctcacctgcgccacc

SEQ ID NO: 805988 - DNA, 100 bp, Homo sapiens
cggcgccggcgccgcggcctcttcggctgcggaccctgccattccggaggaggtaagaatgattgatgttggctgatattggagtgctcattcacatgaa

SEQ ID NO: 805989 - DNA, 98 bp, Homo sapiens
gcgctggactggagcagaaccccaggactgcgcccccgggagcgggcgcccagagttgagcagattgtggccgttttcaacgcttctaccagacaaaa

SEQ ID NO: 805990 - DNA, 100 bp, Homo sapiens
tgtaccagtgatgacacaaaatcccagatctacctgacgggcctgcgagggttgaagattgtgaagcaatagcctaaggaagcaagaggctactatgagc

SEQ ID NO: 805991 - DNA, 98 bp, Homo sapiens
tgggagtctccgcgtcccgctcgctgggagagaggtacctctccttttccctctccctttccctaaggtggataggcatgtagacctgctagaagttg

SEQ ID NO: 805992 - DNA, 99 bp, Homo sapiens
atgttttcacctcctgtgagcagtgggaaaaatggaccaacttctttggcaagtggacattttactggctcaagctgctgagaactagccctagacctc

SEQ ID NO: 805993 - DNA, 100 bp, Homo sapiens
tatgccaaagatgatgaggtcatctgcacttcattttactccaagatacaccccttagaaaatggagagaaaacgggcaatgctgtgagagccattggaa

SEQ ID NO: 805994 - DNA, 98 bp, Homo sapiens
ctgacagtattgaggaggaggctgcacaccatagtcaccagcaatatgaatacttcaatgctgtgctgataaatgaaagggacaaagacgggaatttt

SEQ ID NO: 805995 - DNA, 98 bp, Homo sapiens
cggcgctggagagggggcgctgagctgttggggcaggtgacaaacattaccaccccagctgtgcacgatgcagcagatgcaaccagatgttcacagaa

SEQ ID NO: 805996 - DNA, 99 bp, Homo sapiens
cagtgtatgattatgctgggaaaaacaaagttccagagctacaaaagtttttccagcactctcgagtggaccctgaggagctcttcaccaagctcgacc

SEQ ID NO: 805997 - DNA, 100 bp, Homo sapiens
cgacagcaacccttcagcttcccagcctaccactggaccctctgctgcctctccaggtgactaataaaggtaccagaagaatatggctgcacaaatacca

SEQ ID NO: 805998 - DNA, 100 bp, Homo sapiens
tacaatgaacagaggttggtccgagaagccaacaatgtggggcagctgcagctctcccacaatctgagtttggtgatcctggtaccccagaacctgaaac

SEQ ID NO: 805999 - DNA, 50 bp, Homo sapiens
ccctaccggactacgagtatctgggctccccttccctgcgggcatatccg

SEQ ID NO: 806000 - DNA, 100 bp, Homo sapiens
aggacatgcgggagagagaatgagccagagggacacgctggtgcatctgtttgccggaggattgttaaaggaaatgggctggcaggaagacagtgaaaat

SEQ ID NO: 806001 - DNA, 124 bp, Homo sapiens
gacgagatttgtctcacaaggagaaactctacctgagagagctaaatgtcattactgaaactcagtgcactctaggaagtccaggtcgtcctgctggagaggccacctagaggggaactgaggc

SEQ ID NO: 806002 - DNA, 98 bp, Homo sapiens
acacacctgcccctggctctgctcccccagactctgttggatcagaaggtcaaggctggacggcagtctggaaacgaccaatgagatcttggactctg

SEQ ID NO: 806003 - DNA, 98 bp, Homo sapiens
gaaaaaaagatcccatagaaatgtttcattctggacagctggtaaaagtctgtgccccaatggttcgatattcaaaggttgatgttcatgggtgattg

SEQ ID NO: 806004 - DNA, 100 bp, Homo sapiens
atcgacctctctacatacagggatctatattggaaggcgtctgacaacctccaccagcaccttttgatgaagaactggagtctgacttggttcgttagtg

SEQ ID NO: 806005 - DNA, 100 bp, Homo sapiens
atgaaaaccaagaaggagattttgaagatgcagatacccaggtgtcccgacccaggctaagcttgagcatggctgagcaggagcccacagccgagcagct

SEQ ID NO: 806006 - DNA, 98 bp, Homo sapiens
tgaccatctcacaactgctcgcgtgacgaccgcattcgtggcagtactatactggcaattgctggagaagattttgcaattgttgcttctgatactcg

SEQ ID NO: 806007 - DNA, 100 bp, Homo sapiens
tacacaggtgatttccttaagaaaaagtgaattatgtaacctcattacgctggatgtagctcacaatcaacttgaacaccttccaaaggagattggaaac

SEQ ID NO: 806008 - DNA, 98 bp, Homo sapiens
tcgcgtccggagtccccgtggccaggaaccaaagaggttgttgtaaatgtggatgatgatggagtcatttcattgaacttcgagtgtgataagatgac

SEQ ID NO: 806009 - DNA, 98 bp, Homo sapiens
ctactgtgacttcagagacactgccaagcagccttagccctagtgtagaggctcggggaccagttctacaaggaagccattgagcactgccggagtta

SEQ ID NO: 806010 - DNA, 100 bp, Homo sapiens
acccatggacagacatgtcttcccatggaggtactccaaagattcaggtttactcacgtcatccagcagagaatggaaagtcaaatttcctgaattgcta

SEQ ID NO: 806011 - DNA, 100 bp, Homo sapiens
gggacgttcagggcttggtctcagcattgtgggaggaaaagacacacccttgtctattgaagacaatgaagtatatttgcctaatgatgaaatttggacc

SEQ ID NO: 806012 - DNA, 100 bp, Homo sapiens
aaaatattgcatctaccagcattttcagtgaacagagtatctgtcaggcaagagctgctgtgatggtttatgatgatgccaataagaagtgggtgccagc

SEQ ID NO: 806013 - DNA, 98 bp, Homo sapiens
tgggatgtgaagtagatgataaagatgatgatatccttctcaaccttgtgggatgtgaaaactctgttactgaaggtacttcaagcgtagcgagggcc

SEQ ID NO: 806014 - DNA, 100 bp, Homo sapiens
cggccatcatcgtggcctcctacctggtccggatgccacccttcacccaggccttctgcgctctgcagaaagacgagaatccaggacttgaatcgtatct

SEQ ID NO: 806015 - DNA, 98 bp, Homo sapiens
aggctggaagttcaacagaaggcaaatacgaagacgaggcaaagcacccagctttcttcactcttccgcatcagaggctccttgaaatgctagataca

SEQ ID NO: 806016 - DNA, 98 bp, Homo sapiens
ttttgggaatccactgagaaaattcaagttggtgttcttgggggagcagagcggctaaggcagctggataagcacagccaggccacagcccagcagct

SEQ ID NO: 806017 - DNA, 98 bp, Homo sapiens
cggcctgagcaagcggccgcgcactgaggaggcggcggccgacggtggcggcgggatgcaggaatccttcaactgctttctaccaagcgttccatttg

SEQ ID NO: 806018 - DNA, 98 bp, Homo sapiens
tgtggaaagcccattcggaacaatgtttttcacttggaggatggtgaaccctactgtgagactgaggtcatgacgccagtcagatcacactagccttg

SEQ ID NO: 806019 - DNA, 100 bp, Homo sapiens
gagggcgaagacgagatccagttcctgcgaactggggacttgatctcatcttcatgccaggccttgggtttgacaaacatggcaaccgactggggagggg

SEQ ID NO: 806020 - DNA, 103 bp, Homo sapiens
tacgctatgccctgctgtagtcacaggaggtgtagagaggaccccgggacatctgaaagccaggaaatggttctaaatggcttctaagaagttgggtgcagat

SEQ ID NO: 806021 - DNA, 99 bp, Homo sapiens
acggatttgcattgccgaggacgggaccccagggcagcgaagcagttgtgtgacttcattgagacacattacctgaatgagcaggtgaaagccatcaaa

SEQ ID NO: 806022 - DNA, 100 bp, Homo sapiens
gcagctgcaggcccctgacgttctcttctacccactgagaccagagttagtggaatccacatatctcctctaccagatacgaggaggaaagctcatgatc

SEQ ID NO: 806023 - DNA, 98 bp, Homo sapiens
tctgctgctggacgcggcgctctacggcctcgccacctggtacctggaagctgtgtgcccaggtgaaaggtgtagcagtcactcggcctacacccaca

SEQ ID NO: 806024 - DNA, 100 bp, Homo sapiens
agcctacaacatggtggacatcatacactctagaattcggtcaacagtggatgaaaaagaacaaaaacaacttcttatggatttggatgtagtaatgcgg

SEQ ID NO: 806025 - DNA, 100 bp, Homo sapiens
agggctctgatcaagcggatccaagccatgattcccaaggttcgttccaccagtcataaaccagatgaaatctatggcatgattgaaagactatctcctg

SEQ ID NO: 806026 - DNA, 100 bp, Homo sapiens
ttaaagatgcagaggatgctttgcagaaacttcataaatatatgcagcttggtcgggaggaacctgccatgtccatggatgccaatggaaagataatttg

SEQ ID NO: 806027 - DNA, 100 bp, Homo sapiens
agagtttgatggcgagtttgcagctgatgtcttggtggagttcctcttggatgtgcctgtggcatttgatgatgtctccatctacttttccactccagag

SEQ ID NO: 806028 - DNA, 100 bp, Homo sapiens
agaaagtctagcctcctgtgcaaaggtcaaaatgaagccttgtagcagtacctgggaacctgcatcctgtggaaagatggaggagcagatgacatcttcc

SEQ ID NO: 806029 - DNA, 100 bp, Homo sapiens
ctttaaaggagatgcaggagaaaatacggcattgctagatgatggtggtgctaccccagtacaggatgaacgggattcagggtcagacggtgaggatgat

SEQ ID NO: 806030 - DNA, 99 bp, Homo sapiens
aacaagctccgaagaaacggattggagcctgtgacctaccacaggaattatatccagatcgagagacagaagattctgaaagggttcaatgaaatgaga

SEQ ID NO: 806031 - DNA, 100 bp, Homo sapiens
tggaagctgctggagtgctccgggcggcaggtcagccccgaagcgctggaagggaagatcctggctgttgcttctggagacatttctctgccaaaccaag

SEQ ID NO: 806032 - DNA, 129 bp, Homo sapiens
ctatttttacctctttccaaatagacttgaatggagaggagagggagagtcccgggataacaaagctgatgtaattttaaagtacaatgcagatgaagctagaagcctgaaggcatatggcgagcttcc

SEQ ID NO: 806033 - DNA, 100 bp, Homo sapiens
tcgctacgtccgctgctgctgcccggctcgggcctgagcgccgagcaggtgtcttcaaaaacaaacatatttaaaagattttacttctcatctccaggaa

SEQ ID NO: 806034 - DNA, 100 bp, Homo sapiens
ctttgaaaatcaacgacaacttgagcacaggctggtgagattggagagatgaaggatggagtcccagagggagcacaacttcagggaccggttcatcgaa

SEQ ID NO: 806035 - DNA, 99 bp, Homo sapiens
ctcagtcatgaggagaaatgaacagctgaccctacatgatgagaggtttgagaaggttgaaatgttccttcttgcctatgctgtgcgccacaccatcca

SEQ ID NO: 806036 - DNA, 98 bp, Homo sapiens
agtagcaaaagcattagaacatcacagaagtgaaatacaggctgaacaggacagaaaggtcactctgactgctgagacctcatgtagctacatttcct

SEQ ID NO: 806037 - DNA, 100 bp, Homo sapiens
ggtcatttttctccctgaggacaacctgagactggacgccgggcatggcagtgccacgggacattgcagccgcctacctgctccagggaagcttctatgg

SEQ ID NO: 806038 - DNA, 100 bp, Homo sapiens
caccagcagtaacaacagcgaggaagaagaggacgacgacgacgaggaagaggaggtttctgagggatcgatttgcttagtggtataatacctgaactct

SEQ ID NO: 806039 - DNA, 100 bp, Homo sapiens
agcgccaccatccacgccagccgcaccatgccgctcctaagcctgcacagccgcggcggcagcagcagtgagaggtttattgttggccaaaaccaggctt

SEQ ID NO: 806040 - DNA, 98 bp, Homo sapiens
ccgggagctcctggtcatcgagctgtccgacaaccctggcgtccatgagcctgatatcagacaccccgaagaactttctctcttaaagaaacccagag

SEQ ID NO: 806041 - DNA, 98 bp, Homo sapiens
atcgacgtcgtgatccagaagtccagagctgaggactgcctgtttgcagcggagcgtgctttggacaccatgaattttgatgttataaagggcaagcc

SEQ ID NO: 806042 - DNA, 100 bp, Homo sapiens
tgttcggaatcctataattgaaaaacagtaaagatggaaaaccagttattgaatatcaagaggaggagttgttggaagttggtatgccagcggattatgt

SEQ ID NO: 806043 - DNA, 98 bp, Homo sapiens
gagcacccgcctccgggcatcttcaactgtgatgtgtccaatctagatcccaacttctcatttgaaggcaccaaactggatgtggggaacattgtgct

SEQ ID NO: 806044 - DNA, 98 bp, Homo sapiens
caatttcatgaatttcaagagagtaccattgggggtgttggtaaatcatgcttattgctacagtttacagacaagaggtttcagccagtgcatgacct

SEQ ID NO: 806045 - DNA, 100 bp, Homo sapiens
agcatgtgtcttccccagctctgcagccacatactatccgtttgttcaggaaccaccagtgacagaaggtgctgatactcaaagaaggtttaagttgtct

SEQ ID NO: 806046 - DNA, 100 bp, Homo sapiens
acttctgctgttgggggccatgtgctcaggagctttcttcattccagatcaggacacctttctgaacggtaagaatgattgatgttggctgatattggag

SEQ ID NO: 806047 - DNA, 100 bp, Homo sapiens
tgaagagttcaactttcccagaagttgttctaacgctgcctttgctttaaaacagtattacttgcgagttcctgagttggaggtagaagaagaaacccaa

SEQ ID NO: 806048 - DNA, 100 bp, Homo sapiens
tggaaacattaaattgtcacagacaagtaatgtcgataaagaggaggaagctgtggttatcactaggctaaaactggacaaagaccgcaaaaagatcctc

SEQ ID NO: 806049 - DNA, 100 bp, Homo sapiens
ctccaccatcgtccccggcgagcagggagcggagtaccagcacttcatccagcagtgcacagagtgtgaacatggctacgcctcttcattcccgtccatg

SEQ ID NO: 806050 - DNA, 100 bp, Homo sapiens
gccaggcctgcgcgggcccgaggccggaggaacccggactccggcgtagcgatgaggcctgcctgtgttaatacacctagtgaggagtggagctgaattt

SEQ ID NO: 806051 - DNA, 100 bp, Homo sapiens
tatccgggtgcggctccaccccttccacgtcatccgcatcaacaagatgttgtcctgtgctggggctgacagcccttctgttacagtggatgatctgaag

SEQ ID NO: 806052 - DNA, 98 bp, Homo sapiens
gaagctctacccactgccctcggcccgcggtatccctcgtacttggcccctgaggtaattgcacagggaattttcaaaaccactgatcacatgccaag

SEQ ID NO: 806053 - DNA, 100 bp, Homo sapiens
agctcctggaaaaggattgtaatttgaaaaaagtatctattccagtctagatgttgatggaatatatcgagttagtggcaatctggcaacaatacagaag

SEQ ID NO: 806054 - DNA, 98 bp, Homo sapiens
ggaaggctcaagatggcgtgcttgttggagaccccaatccgcatgagcgtcctttcggtggaattctactaagtatcagtcggccctacaagacaaag

SEQ ID NO: 806055 - DNA, 98 bp, Homo sapiens
tgcaacctgggccgggccgtgcagctccaagagctgtggcccgggggcctcttctggaccaggaaactctccactgcgacaacgcaaaagggttgaaa

SEQ ID NO: 806056 - DNA, 100 bp, Homo sapiens
tgcctggaccctgcccagcagaatttgtatagagatgtgatgttggagaactacagaaacctggtctccctaggtgattacgtttttgaagaagaaggac

SEQ ID NO: 806057 - DNA, 100 bp, Homo sapiens
agcttgatgtctactgttttgaagcgttcgatcttttaacatcacatcacatgctgacagcacaagaagatgatgccagctggctgcacgcagggccacc

SEQ ID NO: 806058 - DNA, 98 bp, Homo sapiens
ttgccactgacattgcagagctgtgggctgtgttccacaagttcaaagatctttgtagaatttgatggctgtaactggaagcaacactcctgggtaaa

SEQ ID NO: 806059 - DNA, 98 bp, Homo sapiens
aggaactctatcccaggaatacagctttgcattagacagttaaatctcacacagaaacagatgagaaacaaacagagagccgcaccatcaccccacct

SEQ ID NO: 806060 - DNA, 98 bp, Homo sapiens
gactccagcgagggaaaacggaggtgggagactgaaccatctccacatctagttgccccaggtctcctctgagcctccggcctccataagacccaaaa

SEQ ID NO: 806061 - DNA, 98 bp, Homo sapiens
gaatattcagcaagggtgcatctgagataattctgaaaaacttcatcactggtccagctgtaataccagggtacttctccgttgatgtgaataatgtg

SEQ ID NO: 806062 - DNA, 99 bp, Homo sapiens
ttcactcctcagcgcgacgtcgtgtcgagttcccaaaaagctccgcaggggctgtagggagggtacaggcatccttcacctgctattgttgcaagaaca

SEQ ID NO: 806063 - DNA, 147 bp, Homo sapiens
gtagagcatgtaacttttaacttcacgttggagaatcagatccaccgaggcgggcagtacttcaatgacaagtgacttcatggtcatgacgattttcttcaatgtgagcaggcggtttggctatgttgcctttcaaaactatgtccc

SEQ ID NO: 806064 - DNA, 98 bp, Homo sapiens
aaacacaagaatagaagaggcttgtgaaatgtataccagagctgcaaatatgttcaagatggctaaaaattggagtgaattggtggatccaaatattt

SEQ ID NO: 806065 - DNA, 100 bp, Homo sapiens
cctctctagccccagagaccaatttgatcccgcctcctatatcatagggaaactgaacagccaagactcctataacaattttaccaacaacaaccctggc

SEQ ID NO: 806066 - DNA, 98 bp, Homo sapiens
ggatgagcaagacctaaatgagcctcttgccaaagtgtcccttttaaaagaccattcctcaagaattttgtatccaaggcccaaaagtttgttaccca

SEQ ID NO: 806067 - DNA, 100 bp, Homo sapiens
aagatgagattatgcctgaggttgtggaaaaggaagattactcagagattatagggagcatgggtcagcttttgccaactgttttcaaatcacatgcatg

SEQ ID NO: 806068 - DNA, 99 bp, Homo sapiens
tttctatgcccctctatgcagtcatgtatcctgtgtttaatgagttgtatatgaacacagatcaagattagagaaatccttgcaaaaagaaagacttga

SEQ ID NO: 806069 - DNA, 100 bp, Homo sapiens
tctacgtctaattcagactgtgttgctgctgatgaagacgttatttaccatatccagtatgatgaccaccagtggtaaaaacagagatggtaacaatttc

SEQ ID NO: 806070 - DNA, 100 bp, Homo sapiens
gagcacatccatttcattggcaagatggatatcagtattgacaaatagcaaagaagaggccctaaccatggccttccgtggagagcagagtgcgggagag

SEQ ID NO: 806071 - DNA, 100 bp, Homo sapiens
agaatgtagaatgaggatagaagagaggaaatcccaacatttaacagacgctctgctgttgcccgtattcaggagttcttcagacggagaaaagaaagga

SEQ ID NO: 806072 - DNA, 99 bp, Homo sapiens
tgatgattggtctcgtctggcgctccatggagcacccagggaagctactgtttgctcctaacttgctcttggacagtaatggaggggaaagttccagtc

SEQ ID NO: 806073 - DNA, 98 bp, Homo sapiens
cagctccacgcagcaagacccgcgccgccgggacccccaggacgacgtgtacctggacatcaccgatgagctctgtgaaaatgttacagcctcgtctc

SEQ ID NO: 806074 - DNA, 99 bp, Homo sapiens
ccgattacccacttcgagtcctttattgtggagggcgcaaaccagaagaagagggtgtggaagataacgggctggaggaaaactctggggatggacagg

SEQ ID NO: 806075 - DNA, 108 bp, Homo sapiens
gacacagtatagcttctgacagtggagacactggcattggaacttcctgttctgatagcgtggaagccaccaaagtccttggcactgtcaaatggttcaacgtcagaa

SEQ ID NO: 806076 - DNA, 98 bp, Homo sapiens
ctgttgcgccaccccgaggccagatccagctttgatgagatgcttccaggctgaggcctccgtagaagacagcgccttgcttatgcagaccttgatgg

SEQ ID NO: 806077 - DNA, 99 bp, Homo sapiens
acggatcggattcctcagctacgaggaggcgctgaggagaggtctgccatcatggatgttctcgcagaagcaaatggcacctttgccttaaaccttttg

SEQ ID NO: 806078 - DNA, 139 bp, Homo sapiens
gaaagagaagctggagtatactccaggagagcatgaatatggattatttccagcgcccattcatgttggtagctttggatatgttaaatcctcatgttactttgcctgttttttacccacatcttaagcatggtggtgt

SEQ ID NO: 806079 - DNA, 98 bp, Homo sapiens
aggggaaggcgcctgaagaggacgaagacacatcttccagagctagatacactttcatcagaaagagccagatccttcataacttggcttagagacag

SEQ ID NO: 806080 - DNA, 100 bp, Homo sapiens
accagcaacgacaaatacttattcatcaacagcagtttcagcagttgttaaattctcaacagctcacaccaaaatgcatcttctgcagacaccgggttaa

SEQ ID NO: 806081 - DNA, 99 bp, Homo sapiens
tttgcttcagccgcagtcgccactggctgcctgagatatccctcctaaatgtacaatcaaggatttgctaccaaaagagaagagcagtacagaagcagt

SEQ ID NO: 806082 - DNA, 101 bp, Homo sapiens
tccaaaccaaggaggaaaggatatcacagaggagatcatgtctggggcccgcactgcctccacacccacccctccccagtgtcttcattggctgctctggc

SEQ ID NO: 806083 - DNA, 100 bp, Homo sapiens
ttgcccttggggatgacagcccagcactcaaggagaagcgggtggatctccttacgtagcagccaaaataaatgaagcaaaagacttgctagaaacaacc

SEQ ID NO: 806084 - DNA, 100 bp, Homo sapiens
gctccttcaagcccagcgagcatggttatgatgagtttaatgctgtggacttcagtggcaccttcttcatcaacaccgaaagggacgatgactatgctgg

SEQ ID NO: 806085 - DNA, 99 bp, Homo sapiens
gagtccggaccggagactttggggcctaactaggcattttgttcccaacatcacctttggtcaccctgtggtagaaagccttcgaaagcagctaggcca

SEQ ID NO: 806086 - DNA, 125 bp, Homo sapiens
acaaggaaaaggcttggagcacctccattcattgtgccaacaggacctgaatgaccgcttacgagaggccccagaaacattcaactctccattatgacacgggcctcccacaggacttcaccggt

SEQ ID NO: 806087 - DNA, 132 bp, Homo sapiens
ttttctcagaaaagctggaccacctgagccgccgtcttgcctgggtccatgccactgtctactcccagaggggtctggttgctgcttacagtggtgacagtgacaatgaggaggagctggtggagagacttg

SEQ ID NO: 806088 - DNA, 98 bp, Homo sapiens
cccaccaggaagatctcagtgacctttatcaagagctcttcccatctactactcctgggattcagtcactgatgcatgaattttatgatgtggcaaat

SEQ ID NO: 806089 - DNA, 100 bp, Homo sapiens
cggcgcgaccaggccgggcacctccgagcgcaaggacagcgcgaggtccgcgcagcccagcgcagccatgctgatcagctgaccgaagaacagattgctg

SEQ ID NO: 806090 - DNA, 99 bp, Homo sapiens
tcctcgccagcagccgtccggagccagccaacgagcggaattctcaagaaatttgaggaagaagatttggatgacattttaaggaaaagattgaaggac

SEQ ID NO: 806091 - DNA, 100 bp, Homo sapiens
cgggtccgggacttcgtcgccaagctggccaacaacacgcaccagttgttggagttgcagtaatttgtgttgtcccgtacagatatcttcaaaggaggaa

SEQ ID NO: 806092 - DNA, 98 bp, Homo sapiens
agcactttgaggacatggcctccgacgaggacatgtcgcaatggaagaagagatcgccgcgctggtcattgacaatggctccggcatgtgcaaagctg

SEQ ID NO: 806093 - DNA, 100 bp, Homo sapiens
gagttcaactttcccagaagttgttctaacgctgcctttgctttaaaacagtattacttgcggtaccaaccaagaagctgaagaaatatgagaaagaata

SEQ ID NO: 806094 - DNA, 99 bp, Homo sapiens
ctgagatcaaatggcacttcattggccacctacagaaacaaaatgtcaacaaattgatgggtatagacacgtgtggccgtttacgctgtaggatcctca

SEQ ID NO: 806095 - DNA, 100 bp, Homo sapiens
ggctttctcttacaattgaactgcttcagaaagcacagtatttgactacagtcattccttatgagaaaaaaaacggaccaccgtctgttgaagatcttca

SEQ ID NO: 806096 - DNA, 100 bp, Homo sapiens
cacctccacaagggcttcctggccctctaccaaaccgtgggaattcctcctgatcagcagagactgatctttgctggcaagcagctggaagatggacgta

SEQ ID NO: 806097 - DNA, 99 bp, Homo sapiens
tgggagaatatttaatggaaaatcgcttggttaaaacctgacacttttaacaggcaccggcttttccgtgaacattgtgtttgtgtacaaggaaactat

SEQ ID NO: 806098 - DNA, 99 bp, Homo sapiens
atgctgaaaacaccgtggatactgcttccaagccaggacttcaggagcgtctccaaaagcatgatactttcattcagaaaaccaagaagctctacattg

SEQ ID NO: 806099 - DNA, 100 bp, Homo sapiens
gaatccttgagtcagtccaaaagtttccgtcgtcggcacaactcctctattgacctgaaaagtggttctggaaaagtgtaccaaggccctgcaaaaggtg

SEQ ID NO: 806100 - DNA, 101 bp, Homo sapiens
aacagatgtgagcgagaaagccgttgcctccagcaccacttctaatgaaatgacgctcctctcctcccagtcttcatcactggtggccccttctgggtctg

SEQ ID NO: 806101 - DNA, 98 bp, Homo sapiens
cagcatcgacataggcatggtatcacaaaggctcaggctggaggtacttgaagaagcagaagctcaacatttatatcagtccatcttgcctgatatgg

SEQ ID NO: 806102 - DNA, 100 bp, Homo sapiens
ggatgttcggctggtctcccttggctcccggcaggccaagtcagaacttcgagcagccattgatcggtatgtgcaagagaagattgtgctagcagctcag

SEQ ID NO: 806103 - DNA, 100 bp, Homo sapiens
ccccgtcctaggcagtggggacaaggaggctacagggtacaaataaatgagtgaacgatgttgctctagatacagagagcgcatcctctctggaaagctg

SEQ ID NO: 806104 - DNA, 99 bp, Homo sapiens
gattgaatctggtgttatcaacttaaaagatgccacctctaagatggctcatgatgccctcaatgcccctctgcacattctccgggccatatacgaact

SEQ ID NO: 806105 - DNA, 99 bp, Homo sapiens
ctcgcccagctcgcccagcgtccgccgcgcctcggccaaggtgatttgatgaaggctgctgcaggagagttcgcagatgatccctgctcttctgtgaag

SEQ ID NO: 806106 - DNA, 99 bp, Homo sapiens
atggtaccatccctaatgaagtcaacgggtccagcatgacaggatggaagtacaagtgtcagcacctatagaaagtttcattgtgcaaatctaacttca

SEQ ID NO: 806107 - DNA, 98 bp, Homo sapiens
tcctacaacaacaagccattcatgggccggttttatgagtgggaaccatttgcagaaggaatgggaaaaggacagcacaggatgccctccaaggatga

SEQ ID NO: 806108 - DNA, 99 bp, Homo sapiens
ttgttccgttgcgagctgcagctgcgatctctgtggtaggcccaggtgctccatacttgcttgcagtgcctacgtggctctggctttgggtgataacct

SEQ ID NO: 806109 - DNA, 98 bp, Homo sapiens
ttgggaacagtaaaatggttcaatgtaaggaacggatatggtttcatcaacagcctcgtgcaagccgaatactggcatgaccccataaaggaggatgt

SEQ ID NO: 806110 - DNA, 98 bp, Homo sapiens
acgacagattgtctatcctctggaaaagcttggcataaacgctccatcaaaggcggtctccaaggatccggtgatgatgaaggaatccaggagacagc

SEQ ID NO: 806111 - DNA, 100 bp, Homo sapiens
ccggtcgtaccacggcagccccgccgatcaggttcctttgggagacttcgacttgttggcggatggggaagcagaatagcaaactggcccctgaagtgat

SEQ ID NO: 806112 - DNA, 100 bp, Homo sapiens
ccacgcctggggagctgggccgcctcgtcaacaggaacttagctatagaagaagtcagagatgccatggaaaatgaaatgagaacccagcttcgccgaca

SEQ ID NO: 806113 - DNA, 100 bp, Homo sapiens
agtgatcagcagacagttccaggaagtgaacaagtccaagaggaccttctgattagtccacagtcttcctctataggaaagaaaccttgactggttcccc

SEQ ID NO: 806114 - DNA, 100 bp, Homo sapiens
gacaacattgttcctggaacgccctctttttaaaaaaggatcacctgctgttaccagctaccacccataacaagaccacaagaccaaaaatgtcaattgt

SEQ ID NO: 806115 - DNA, 98 bp, Homo sapiens
ccgggcccgcgacccccgcacccagctccgcaggaccggcgggcgcgcgcggatggcccaatggaatcagctacagcagcttgacacacggtacctgg

SEQ ID NO: 806116 - DNA, 100 bp, Homo sapiens
ccggttttaacaacctggatcttcgaacttttgacacggctttggaaacgacgtcatgtgttaggacatgtgaacttatatatttgacacaacccagcag

SEQ ID NO: 806117 - DNA, 100 bp, Homo sapiens
agccaggcaccatggacagcgtgcggtctgggccttttgggcagcttttccggcctgacaacttcatctttgaaatggatgaaaagaggctgctggatcc

SEQ ID NO: 806118 - DNA, 98 bp, Homo sapiens
agaccacttactctaaacttcacaaatggttctgaagagtatggagcctacgtagattcataaggtgcaaatatatacagagcttcataatcagccca

SEQ ID NO: 806119 - DNA, 100 bp, Homo sapiens
caaaaactgaagaagatggtggataagcccacccagatacaaactggactctcaggacaaaacgacaccagccaaaccagcagcccctcagcatccagca

SEQ ID NO: 806120 - DNA, 98 bp, Homo sapiens
ggcttccgtctgcaggggggcaaggacttcaacatgcccctcactatctcccgggctgaagccgacgtagcttctctgaacagacgcatccagctggt

SEQ ID NO: 806121 - DNA, 98 bp, Homo sapiens
gacgatgttgcgagcataatgaagaaatacctccagaagtaggaaccagttcaggctgaagccgacgtagcttctctgaacagacgcatccagctggt

SEQ ID NO: 806122 - DNA, 100 bp, Homo sapiens
tcctaagcctcctgggcacagagatcattgagaatgcagtcgagttcatcctccgctccatgtccaggagcacgataagtgcaagaaggctgcttccagc

SEQ ID NO: 806123 - DNA, 99 bp, Homo sapiens
gagaattatttgctgttggatcgtttcatactttacgcttgtgtgataaaactgggggtatcagctctgcagacacagtctgatctccaaggtggatca

SEQ ID NO: 806124 - DNA, 75 bp, Homo sapiens
agcgcatcggcagcggcacctacggcgacgtctacaagatatccctttaaggaccaacctgccaccaccattcag

SEQ ID NO: 806125 - DNA, 100 bp, Homo sapiens
cttttgagaatgaggtgtggagggagagcacctggatcccttggttccagtaccccattatctatgacattcgggccagacctcgaaaaatctcctcccc

SEQ ID NO: 806126 - DNA, 100 bp, Homo sapiens
ccgcagtctcgactttcctgggctcaggatttcagatgcatgccaggtttccactgattgccagaactcgagatcactacacatggatccccaaaatcaa

SEQ ID NO: 806127 - DNA, 115 bp, Homo sapiens
gaaggtgaacagccgcgacacggcgggcaggaaatccaccccgctgcacttcgccgcagaatcctgtgaagcagctccagctatgtgtgaagaagaggacagcactgccttggtg

SEQ ID NO: 806128 - DNA, 100 bp, Homo sapiens
catattctaagaaatgggactttacagctttgatcgatttctgggataagcttcctgcctgacacagctcacttcaagaagtgcacaatgtcagaacgtg

SEQ ID NO: 806129 - DNA, 125 bp, Homo sapiens
ttcgcctgcactttccgtctttcttctctgggcgcccaccaacaatggatggcaactccctgctctcggtaccaagcagcccactcacccagtgtacaacattggaccagacaaggtgatccagg

SEQ ID NO: 806130 - DNA, 99 bp, Homo sapiens
ttctgtggacggattcagctctttttggccaggcttttccctctgtctgagaaatcagtaatgctacagccctttgactatgatccgaatgaaaagagt

SEQ ID NO: 806131 - DNA, 99 bp, Homo sapiens
gtagaaattgcagccagggatattgagaaacttctgagcaacagatctaaagccctggtggtgctggtgaatctggtaaaagtacaattgtgaagcaga

SEQ ID NO: 806132 - DNA, 100 bp, Homo sapiens
cttagcagaatggggtgatcgctctcaactaactacaattgtattggcagctagagaggtccagcccagaatcaaatgcaggttccatctggatatggat

SEQ ID NO: 806133 - DNA, 99 bp, Homo sapiens
gccaccacccactccggacacagagagaagaagaaggaggttcctgctgtgccagaaacccttaagaaaaagcgaaggaatttcgcagagctgaagatc

SEQ ID NO: 806134 - DNA, 100 bp, Homo sapiens
cgaaaagaagatgatacaaatgaatttgttagtgctgtgtgctggagggcactaccagatggggatctggaaatagtatattcctatttacatggtatgg

SEQ ID NO: 806135 - DNA, 111 bp, Homo sapiens
gactttgcagccatgtagtgaatggaaagaaattatgcaccttttatggaccaaatttttctgaaaagaaacatttgtttgcataggaattcatgaaggcgacccaacctg

SEQ ID NO: 806136 - DNA, 100 bp, Homo sapiens
atgattcattttctaccaagtcttgcagagtttcaggaggcagatggaggagatgtataagaaagctcatgctgctatacgagagaatccagtctatgaa

SEQ ID NO: 806137 - DNA, 100 bp, Homo sapiens
agcagctgaacctctatgaccgcctgattaacgagcctagtaatgactgggatatttactactgggccacagattctatggaggtgaaacctatcatgac

SEQ ID NO: 806138 - DNA, 98 bp, Homo sapiens
tctgtttctcttcaggatgcagaatggtactggggggatatttcaagggcatatctggaatctgaagttgctatatctgaggagttggttcagaagta

SEQ ID NO: 806139 - DNA, 98 bp, Homo sapiens
acagcctcgctggaggcagtttctggtgaaaggtgtagcagtcactcggcctacacccacagcatcgaccttgtgaacccagcgacctgactgccttg

SEQ ID NO: 806140 - DNA, 100 bp, Homo sapiens
accggaacggcggcgacaagggtgttcccgaactagagtggaattcctagaggacctgtgcaacaacctcttgaggatcgaatcttcactcccgctgtct

SEQ ID NO: 806141 - DNA, 100 bp, Homo sapiens
gtgtcagtagaaaacttcattgcagaattgctgcctgacaagttgatgataattagaagcatgctttccactgaacttcccgacaacatttgttatgcag

SEQ ID NO: 806142 - DNA, 100 bp, Homo sapiens
gcctctgggtcctcggtcggtacagtctctgcacctcgcgccccagcagcccaacagcatggtggtggaacaccccgagttcctcaaggcagggaaggag

SEQ ID NO: 806143 - DNA, 100 bp, Homo sapiens
agtagatattaataccttacaagaggacacagcattgttggttttgccatgtactattttacctatgacccgtggattggcaagttattgtatcttgagg

SEQ ID NO: 806144 - DNA, 100 bp, Homo sapiens
tttgctacccgtcggtggattgagtacggcaagcaagctgtgctggtgcgttatccagaacgcattacaatattgagaggaaatcacgaaagccgacaaa

SEQ ID NO: 806145 - DNA, 100 bp, Homo sapiens
gaagccaaactgtcggcttcaaagagaaaaggcaacatcctgtcacaggccatgctctggcaaaaacgtcatcatcagatttgaaatatttaaagtggat

SEQ ID NO: 806146 - DNA, 100 bp, Homo sapiens
caaatttctgcgtccacactatggcaaactgaaggaaatctatgagaacatggcccctggggagaataaggtacaggtttgcagattccgccagcagcac

SEQ ID NO: 806147 - DNA, 100 bp, Homo sapiens
agactgctacaaaccaacagaggcaatgcatgaaccattgcaaacttggcaagatgcaccatacatttttattgtacatattggcatttcatcctcaaag

SEQ ID NO: 806148 - DNA, 98 bp, Homo sapiens
tcatactgggatcttttttcacatccagcccatgcggactgagcagccaaagcttgacagagatcattataaacctgcaatttcccatcgagatttaa

SEQ ID NO: 806149 - DNA, 98 bp, Homo sapiens
caagttaatactctatttgaaacaagccaggttccagactggagtgatcctcctcagggtaaagttctttacaaagttcgctggaaaggctatacatc

SEQ ID NO: 806150 - DNA, 98 bp, Homo sapiens
gttctcgtcctgacagatctccagctattgaagggtcccaatattgaagcccatggatcttatggtagaagcgagtccacggcgaatttttgcaaatg

SEQ ID NO: 806151 - DNA, 100 bp, Homo sapiens
agctgtttatgaagcactgagaaatgcctcagcaactgttgccattcccaaagaacaccatcgctttgttattggcaaaaatggagagaaactgcaagac

SEQ ID NO: 806152 - DNA, 99 bp, Homo sapiens
aggaacatggcggatcggctcacgcagcttcaggacgctgtgaattcgggaatttgaagtactgccttgtaattcttaatcagcctttggacaactatt

SEQ ID NO: 806153 - DNA, 100 bp, Homo sapiens
ccacatcaagaagttcaccttcgtctgcatggctctgtcactcacgactcaagtaggacgttttgctcctcaattttctggctaccagcaacaagattct

SEQ ID NO: 806154 - DNA, 100 bp, Homo sapiens
tccccattttaccagtgtgcagaagttctcgaatcattctttgtacagaaattgaaaggcttcaaagctagcaggagccaaaaacctgtatatcatctcc

SEQ ID NO: 806155 - DNA, 100 bp, Homo sapiens
aaggactgcctcactgagcaaccaagagttcagtatctgaacacttttgctaaaggtctctggaaagctccctgtgttaattctcgatgagactacgtct

SEQ ID NO: 806156 - DNA, 100 bp, Homo sapiens
aagaacaaacagagactgcgaaacgatcctctcaatcaaaataagacaggggcaagtgtccgagtggtgaatcagctacttacagagatggatggtctgg

SEQ ID NO: 806157 - DNA, 99 bp, Homo sapiens
atatgagtttgacatcgagtttgacgactctggcatctgtgaagatttctaaagtgaaatacgttatctggtcagcagacatgtcacatgtagcactac

SEQ ID NO: 806158 - DNA, 112 bp, Homo sapiens
ataagtactgcccctcttacaacaagagtcctcaatccaacagcccagtgcttctgtctcgactgcactttgagaagtacaagccagctgccatgttgtgagcacataccac

SEQ ID NO: 806159 - DNA, 100 bp, Homo sapiens
caggcagcaactgaggcagcggcaggctcaggtgcagccgctgctctcttcaatctaattcccgtgggcctgcgtgtagtggccatccaaggagtgaagg

SEQ ID NO: 806160 - DNA, 100 bp, Homo sapiens
ggaaagagatctaccgcaagagcaacatctccgtgtacgaagttgatggcaaagaccataaggaatgtcggattgcacatcctattgtaaaatgtactta

SEQ ID NO: 806161 - DNA, 100 bp, Homo sapiens
gggtccacagaatggtcagaaaccctccataacctgaaggtacaaacccgtagtgctgatgaaccaatgacaacatttgttgtctgtaatgaatgtggaa

SEQ ID NO: 806162 - DNA, 100 bp, Homo sapiens
aaaagatgatgagaaataaggacaaaagccaagaggaggacagttcgctacacagcaatgcatcgaggatgccggaccagatctctgtctcggagttcat

SEQ ID NO: 806163 - DNA, 100 bp, Homo sapiens
ccatcgtgggactcagcagccttggtgctcaggtgccagatgcaaaggaaggaaaacaggcttcgttggctgcagacttctccatcactcaatttaagca

SEQ ID NO: 806164 - DNA, 100 bp, Homo sapiens
gtgcgacaggatttggcccagctcatgaattcgagcggctctcataaagatctggctggcaactataaggaagaccagatggatgagaaactaatggaac

SEQ ID NO: 806165 - DNA, 98 bp, Homo sapiens
cgacaccggcgaggaacttggcagcagtctctggtcccagcccaccccatggcccctcccagtcccagcaccaccagcagtaataacaacagtagcag

SEQ ID NO: 806166 - DNA, 99 bp, Homo sapiens
tggcggcacgaggggccttcgccaccacgcactgggtcgtcacggaggacgggaaaatccagcagcagatggacttcagcagaaatctttatgatattg

SEQ ID NO: 806167 - DNA, 100 bp, Homo sapiens
cttcggagaagcagtggtgggttccatgtgatggtggagtaggaggcaggtctccgcgcaatcccacagagtattgatgaggaaactgaagtttggagcg

SEQ ID NO: 806168 - DNA, 100 bp, Homo sapiens
cacaaaatcccagatctacctgacgggcctgcgagggttgaagattgtgaagcaatagcctaaggctccatgacaattcaaaaggtgaagggattgctgt

SEQ ID NO: 806169 - DNA, 100 bp, Homo sapiens
taagcttaatgaggaaatatcaagaacatgaagatgttcctatttgtattcattgcaggttccaatttattgtgcctaaagaatggaacagcaaatatag

SEQ ID NO: 806170 - DNA, 117 bp, Homo sapiens
tcaaacattcgtctcggaaaccccgcctcttacagtcacgaggactccctggaggaaaagcggaagcggcagcggtctgaacgcctggaacggattttccaacttagtgaggctcat

SEQ ID NO: 806171 - DNA, 100 bp, Homo sapiens
gctcagacagtggttctttgtgtaggttgttcaacagtgttgtgccagcctacaggaggaaaggccagactcacagaagtgcggcctcacatagaggaat

SEQ ID NO: 806172 - DNA, 100 bp, Homo sapiens
aagctatgtgaaaatggaaacatgaataatgttgtaactcgaagatttagcaaagctgacacaatagttcacaaagatgtccaaaactaatggcttatca

SEQ ID NO: 806173 - DNA, 98 bp, Homo sapiens
atgacatggcgtgtcataaaataccagtggaggccgacttcttgtatgcatactccacagcacctgtatgattcatccagccttccagctctgttatt

SEQ ID NO: 806174 - DNA, 100 bp, Homo sapiens
gtgaagcagtgtcacgcattttagaagaatgggtggtatcacggaaaacttgacagaacgatagcagaagaacgcctcaggcaggcagggaagtctggca

SEQ ID NO: 806175 - DNA, 98 bp, Homo sapiens
gaatttcctgagccttccaaacagttaacgaagcccttgtcatttgctgattgtgttggggatgagctgccgtggggatgggaagcagggtttgaccc

SEQ ID NO: 806176 - DNA, 100 bp, Homo sapiens
gctgatttggttgtcctagaccaaacaccagggtaaatttttgaaggcaggaggcatctcttatatcctgtagtgatgagcataatacgagttgttcaat

SEQ ID NO: 806177 - DNA, 100 bp, Homo sapiens
acaacacggctgtcaagctggcgcgccagagcggcatcgaggatcttttgccagaaatgagggcatactggcctgacgtaattcactcgtttcccaatcg

SEQ ID NO: 806178 - DNA, 98 bp, Homo sapiens
agcagcgaacattaagaattacggcagtcggccaaacgcaccctatactatactggcaattgctggagaagattttgcaattgttgcttctgatactc

SEQ ID NO: 806179 - DNA, 51 bp, Homo sapiens
gaagaggaagatgctgatgatggattatggcatcgtcaaagcattgtggtg

SEQ ID NO: 806180 - DNA, 98 bp, Homo sapiens
tcaaaaaatgaaacctttaattattcgagaagatgtcaatgccaacagagcacttatggcaaggcatctcgagggggtggcaatcaccaaaacaatta

SEQ ID NO: 806181 - DNA, 98 bp, Homo sapiens
ggcggcggcggctccagcgtcctaagagccagagactgctgctactttgaaacgtacgatagaggccctgatggacagaggagcaatagtgagggact

SEQ ID NO: 806182 - DNA, 50 bp, Homo sapiens
gcatcagcaagtttgcaagtgaaggctgaatcatgtcagggagatttaag

SEQ ID NO: 806183 - DNA, 98 bp, Homo sapiens
accaatgagtcgggctactacctggacatcagcctctacaaagaagtgactgactccagatctggaaatgtctatgttaacaatgaatgggcaaccag

SEQ ID NO: 806184 - DNA, 99 bp, Homo sapiens
tgcaggagaaaatacggcattgctagacctgttaccctccaaatcttctgtgaccaagatttgcagagacccacagactcctgtactgcaaaccaaaca

SEQ ID NO: 806185 - DNA, 98 bp, Homo sapiens
agtaacacacgctacctctttctgggtgactatgtggacagaggctatttcagtatagaggtttgtctacagattttgagcgttcgaagttgacccct

SEQ ID NO: 806186 - DNA, 100 bp, Homo sapiens
aaataaaaatacaaactggaaaataaagattacagagaaaaaaccaacaccttcctgtgcagtcctgttggaattttgttgctaacaaccacaagcagaa

SEQ ID NO: 806187 - DNA, 98 bp, Homo sapiens
gaccggcaaattaaagcaattatgaaagaagtcattccttttttgaagaccttcactgcctggtgtaactcccacctaaggaaagccggcacccagat

SEQ ID NO: 806188 - DNA, 98 bp, Homo sapiens
tgagtgctttggacgatcttcagctggccaacagcaccatcattgcatttacctcggatcatggagctcttacaggcaaaacaggatcttcaagatct

SEQ ID NO: 806189 - DNA, 100 bp, Homo sapiens
ttgttgaacaaatttgatttccggagtcagtcattttactgtcaagacatttcttcggcattctgcaacaggtcctagcagaagatgtgactcagactgc

SEQ ID NO: 806190 - DNA, 130 bp, Homo sapiens
tcggcttttggtggggagataaaatccattgctgctaagtactccggttcccagcttctgcaaaaggagttctttggaatttatcctcatgtgatgctgtaaaaatgacaatcattcgagatgctctctc

SEQ ID NO: 806191 - DNA, 100 bp, Homo sapiens
agccagtcttgaggtcctacatctccgaaagcaagctcttctagaagttgagagtattatgagggaggccgaggacttcatgctccggacagagaaacgg

SEQ ID NO: 806192 - DNA, 100 bp, Homo sapiens
gcctggaccctgcccagcagaatttgtatagagatgtgatgttggagaactacagaaacctggtctccctaggcctctaagaaatatgtctccaaagaac

SEQ ID NO: 806193 - DNA, 100 bp, Homo sapiens
aacaagcaatgaagacctcaggaaaatcccgcagcccatgacccatcgagaaactgcacctgtttcccagcctgaaaacaaaccagaaagtaagccaggc

SEQ ID NO: 806194 - DNA, 99 bp, Homo sapiens
cccagccgaccttgagctccaggagttcgtctcttacgtctgcggaagtgcagctgcctcagttcttagcgcagagtgggaataaggtgtcaatcacta

SEQ ID NO: 806195 - DNA, 100 bp, Homo sapiens
gaattttgtctttggacaggcctctttgacagatgatcctgtgttgccataagcccttggcccacatttaagtgggaatgcagctagcttggatgtctga

SEQ ID NO: 806196 - DNA, 100 bp, Homo sapiens
cgagcgggcggcgggcgcgcgcaccatgggggagaaacccgggaccagggaacccgagcgtcatgttagggtgaagcagaggacctcagtgctgaacatg

SEQ ID NO: 806197 - DNA, 98 bp, Homo sapiens
tctgcactcgctttcctcggattcccggatgtgggtactgtgagaatagagatgtttcgaaatatgcagaatgcagaaatcatcagaaaaatgactga

SEQ ID NO: 806198 - DNA, 100 bp, Homo sapiens
ggagcactcggtcatgtacccggtggactcggtgaagtgcggcaccttcccgtctgatgctggcgttgtgcgtatggtgccctgacgtctgtccacgtgg

SEQ ID NO: 806199 - DNA, 100 bp, Homo sapiens
ggcaaaccagatatatgacttgagtttatgtggccgaggcagacaagtggaattaggccttgctgcaggggacttcatttccttctcagtactggaccca

SEQ ID NO: 806200 - DNA, 100 bp, Homo sapiens
atattatagtgaaacccaagagctactgaggacagaaattgttaatcctctgagaatgttcactttgtatgttaaactaagtattactacgttatgaact

SEQ ID NO: 806201 - DNA, 100 bp, Homo sapiens
ccacagtttgcagaacctacagaaacgttgtttggtcccgattccggaaaaggtgccaagagcttagttgaactccttggctggaaacaggattgttgaa

SEQ ID NO: 806202 - DNA, 100 bp, Homo sapiens
cgtcagaagcctcatagacagaacgattgatgaagtagttgatgatgaattgactctggaaggcatcaagcaatttttcgtggcagtggagagggaagag

SEQ ID NO: 806203 - DNA, 100 bp, Homo sapiens
ggggttggtgtgattagcttcgcagtctggaaagctttaggagttcacagtgaactgaaatacgacgttggtggaggagaacggtttgattctttgacag

SEQ ID NO: 806204 - DNA, 98 bp, Homo sapiens
gacgagaagcctgaaaagtcgcagcgagctggagccgccggagatcacaaggtttacatctggcacaaacgtagtgaactgccaattgcggagctgac

SEQ ID NO: 806205 - DNA, 100 bp, Homo sapiens
caggaggcggccaaggcccaaactgcactgcacattttttgggccatcctcatcataacacacttctgtttttctcctttccattgtcggatgagaatga

SEQ ID NO: 806206 - DNA, 98 bp, Homo sapiens
ctcagtacatagaccacgtcatatcacgctgctatccatgtccagggccaaacatgaatcctattgctcttgggagccgctggcttgcttatgcagaa

SEQ ID NO: 806207 - DNA, 100 bp, Homo sapiens
tacagctggttcttgaagctgctgacttatgaaaatatgcatcagtttaatactgtcttggaattcatgagatggaagcataggtcaaagctgtttggag

SEQ ID NO: 806208 - DNA, 100 bp, Homo sapiens
tgaccaagttcatgctgtgtgctggacgctggacagggggcaaaagcacctgctcggagcatggggaagtgattgactgtgtgcaggagctgagccactc

SEQ ID NO: 806209 - DNA, 100 bp, Homo sapiens
ttctatcctgctctgtggaagaaatgggcatgccagatgcctggaagatcagaggctcacattccaggagaggcagcttccccccttgggtccaacaaac

SEQ ID NO: 806210 - DNA, 100 bp, Homo sapiens
aaaccagttcgtttaaggctttcttctttctcctgtggacaagccagtgctaccccattcacagacatcaagggtgaaaatggtttacatggtgctccag

SEQ ID NO: 806211 - DNA, 100 bp, Homo sapiens
accaccaccaccacagagtctgtggaagaggtggttcgagataagatgctcccaagtcccttgcagctctcttcagaagaaaaatcactagtgctctgct

SEQ ID NO: 806212 - DNA, 98 bp, Homo sapiens
tttgcacgagaacatggactcatcttcatggaaacgtctgctaagactgcttccaatgtagaagagatactgcttttgcaaaaaataaagatgatgga

SEQ ID NO: 806213 - DNA, 124 bp, Homo sapiens
acagcattctaaagtgaatgactccaacgaattaggtggtctgactaccagtggctctgcagaggaaggatctgagtctctccctgcggagacagccctgaagaactcctgtaacgtcaagctg

SEQ ID NO: 806214 - DNA, 99 bp, Homo sapiens
gtggggaagctgctaacccgacccggattggcgctgaggtggcccgtggggcaggtgtgcaactgaggaacatggctcaagaaactaatcacagccaag

SEQ ID NO: 806215 - DNA, 140 bp, Homo sapiens
tgaaagaagactttctgattaaaattgaaacctggcacaaaccagatcttggcacgcaggagaatgtatatgtaggctttcaggtgcagctagacctgacgggtatcttcatgcacggcaagatccccacgctgaagatc

SEQ ID NO: 806216 - DNA, 100 bp, Homo sapiens
ataattgggatgatgacaatgtagaggatgacttctctaatcagttacgatggtgaccctgataactatattgcttattatcggagggctactgtctttt

SEQ ID NO: 806217 - DNA, 100 bp, Homo sapiens
caagtggcgaagcttgaccgagagcaggctggagcagccgcccaactcctggcgcgggatctgctgaggggtcacgggaatatccccggctcggctgtgc

SEQ ID NO: 806218 - DNA, 98 bp, Homo sapiens
ttcaaagcaagtttctcaatcaaaattagaagagagccaaggcacctagccatctccaatatgccattggcattgtatgagaggaaatttccagttcc

SEQ ID NO: 806219 - DNA, 100 bp, Homo sapiens
tgcaggaaatgtgaatctcaggagagagcagccagagtggaaatgggtcctgatgaatatgaagagatggaagaagaggaggaggaggaagaggaggaag

SEQ ID NO: 806220 - DNA, 98 bp, Homo sapiens
cttcgttaagggactcaggcagtacgggaagaacttcttcagaattagaaaggagctgcttcccaataaggaaacagacccattccaacaatctcgta

SEQ ID NO: 806221 - DNA, 98 bp, Homo sapiens
gctacttttactcagagtttgaaggttgtgaccaaaagaggctccgggaatgaaggatggcagcatgccgtgcattaaaagctgttttggtagatctc

SEQ ID NO: 806222 - DNA, 99 bp, Homo sapiens
agagcggctcagccagcggcagacagaacgggacctgtgtcaggcttggaaagagacaagtttgacaacaagactgtcacctttgaagagcacatcaag

SEQ ID NO: 806223 - DNA, 98 bp, Homo sapiens
atagtcaatagtgctcagactggtagcttcaaacagctcacagttaagcaagagtgagccatggagctacgtgtggggaacaagtaccgcctgggacg

SEQ ID NO: 806224 - DNA, 99 bp, Homo sapiens
tttaacatcacatcacatgctgacagcacaagaaggtttgtgggggagagaaaccttatttgtctccagacattctagaggagaagcactgtgaattca

SEQ ID NO: 806225 - DNA, 100 bp, Homo sapiens
tttaataatgatagaatgaagaccacaataaaagagacctctacttagctcagcaattcttaccttggaagaaacccttttttcttggagccagcaataa

SEQ ID NO: 806226 - DNA, 98 bp, Homo sapiens
tgcaggcccacagctgcctacagaaccgtcccaaaatatggcaaagaaacctattctgaggaccttgaccctgctgttcacagccagggggaccctca

SEQ ID NO: 806227 - DNA, 98 bp, Homo sapiens
aacttttaagattccaggacctctgatggctgatttcatcttcaaggtccatgtgctgactttcaccgttcacatgctgctgcaaggcctcaccaata

SEQ ID NO: 806228 - DNA, 124 bp, Homo sapiens
cctccacagtcccataagggggaactctagtctgtatcctgtagcatcaccatctcttcagcaactggtagtagagtgccccttctttgttgatgccacttcctggaactaaagcattgccttc

SEQ ID NO: 806229 - DNA, 98 bp, Homo sapiens
gggccttctgtggattggggaaaaatccagagaccccctgaagattcgcaatggtacaacagctccatgaacgtgatctgcacctggttgacggaccg

SEQ ID NO: 806230 - DNA, 98 bp, Homo sapiens
cagctgtttccacgtgcggtgctcgtcgggagtgatcacctaccctacagtcttcccaagggattgttgaagaaacttctgaagagggaaactctgta

SEQ ID NO: 806231 - DNA, 100 bp, Homo sapiens
caccagcaaggcggtgacagaagtgctggccaggaccatcgagtacctgcagcccaacccaggcttcaccgctgacctgaggtccaacacgggcggccag

SEQ ID NO: 806232 - DNA, 127 bp, Homo sapiens
ggccgccggggccgccatggagcccgactcggtgattgaggacaagaccatcgagctcatgctctaagcgaaagacatgaggcctcagcctgaaatgaggttgttttgaggtcatctgatttctgac

SEQ ID NO: 806233 - DNA, 100 bp, Homo sapiens
tcttggagtccacttccaattccaagtgaatgaactcattcttaaacagaagcaaagatttgaggaaaagaggttcaaattggaccactcagtgagtagc

SEQ ID NO: 806234 - DNA, 100 bp, Homo sapiens
accactgccaaggctacccttactcagatgctgaacgtcattttcacccgcatggaaaaccaagtgccagctacctgcccaaaccaggagctcagctcta

SEQ ID NO: 806235 - DNA, 99 bp, Homo sapiens
tgaagctgtgggtgaagatggtgactccactgatcaagaacttcttctgaggacagacagaagtatgatgggcatcttccaatagaaataaaagctgtt

SEQ ID NO: 806236 - DNA, 100 bp, Homo sapiens
agcagccaaggttcccaaaaaatagtcgaggagttgcaggaacctgtctctccagataccatggaaaacatccagaacaatgctaaagtagctgtgctag

SEQ ID NO: 806237 - DNA, 98 bp, Homo sapiens
gaacggcacggccatctgtgtgtctgggcagtgcaagataaaccgagaaaactggtgtacaatagagccatgccctgatgcagcatctcttctggctt

SEQ ID NO: 806238 - DNA, 98 bp, Homo sapiens
gcagagtacgatactcaggtcaaagcgccctcacaaagccaatgctgaggagatgaccaagtaccacagcgatgactacattaaattcttgcgctcca

SEQ ID NO: 806239 - DNA, 100 bp, Homo sapiens
ggcctcgccatgtcctgctgcccgacgttccatcctcagagcagcctgaactgttcctaaagaaacttcagcagtgctgtgtcatttttgacttcatgga

SEQ ID NO: 806240 - DNA, 100 bp, Homo sapiens
cctggctcccttctgccccagctccgtctcggcggcggcggtcggtggtggggagcggcagctggcagagagtcaacgcccagacggctgtgagatcccc

SEQ ID NO: 806241 - DNA, 100 bp, Homo sapiens
tgccaaactggcagaactacgccgtaatggcactttgccttggttacgccctgattctaaaactcaagtgatttggggaactggtcagctctttcaagct

SEQ ID NO: 806242 - DNA, 100 bp, Homo sapiens
gctcctccgtcagttagatttgtaacaaaaattaatatgaacggaataaataattccagtgggatgatctcttccgttccctgctggcagttcatcagct

SEQ ID NO: 806243 - DNA, 100 bp, Homo sapiens
ttgatctgtaatgttcaggccatggaagaaatgatgatggaaatgaagtataataccaagaaagccccacttgtcaccaggagactaaagtccatcaaaa

SEQ ID NO: 806244 - DNA, 98 bp, Homo sapiens
tacttcttgctatgttggagacaatactatatgggcacggttatgaaatattttgtgttacttgtaacagttcaaagactctgcttgcctcagcttgt

SEQ ID NO: 806245 - DNA, 100 bp, Homo sapiens
ataaaacttgcagactttggacttgctcgattgtatagctcagaagaaaggaagatgagaatgtgcctactgctcctgatcctccaagtcaacatttacg

SEQ ID NO: 806246 - DNA, 98 bp, Homo sapiens
tgcttgactcgtttggatcacaaccgagctaaagctcaagtaatactgcattgcatgattgtgcagaatctggaagtttggacatcatgaagatgctt

SEQ ID NO: 806247 - DNA, 100 bp, Homo sapiens
ggaaaaggtttttaccaatcctcaatccataggttatactggcgaatatggcatatggatcttattcagtctgctgttttgtatagtgtgatgaccctag

SEQ ID NO: 806248 - DNA, 98 bp, Homo sapiens
aaaatatcgtgcacagagacctgaagctggggaacatggtgctcaacaagagatgctcagccagcattgggcagcccccgcttcctgctcccctaccc

SEQ ID NO: 806249 - DNA, 118 bp, Homo sapiens
cgggaccgccaggccaccaccggccgcctcagccatggacgcgtccctggagaaggcgggtgccccggtgatgactggtgcgggagagagcaccaatcccgagaacagcgagctcaag

SEQ ID NO: 806250 - DNA, 98 bp, Homo sapiens
ccactgtggagaacaaatccaagattagcacagggtctggaacagaatctgacagtgatgaatcagtaccagagcttgaagaacaggattccacccag

SEQ ID NO: 806251 - DNA, 100 bp, Homo sapiens
ttcaggaggaagcgatggcttcagacagcatatttgagtcatttccttcgtacccacagtgcttcatgagagattgcagagggaatggcatacatcgagc

SEQ ID NO: 806252 - DNA, 98 bp, Homo sapiens
gagctgagatggatcgtttacagccaggtgaggaagtggagatagctgagctcactacaggttcagcagctggacatggagaaccaacgctcatcacc

SEQ ID NO: 806253 - DNA, 100 bp, Homo sapiens
gtctctgctcaggacctgcctcatattgagaatggtggtgtggctgtcctcactgggaagaagcagggagaaggttttaaggtgaaaacgaagaaagaaa

SEQ ID NO: 806254 - DNA, 98 bp, Homo sapiens
aggatgatttcatgtgcgatgatgaggaggactacgacctgaaagacttccgagtgcaggaactcccactggctcgtattaagaagattatgaaactg

SEQ ID NO: 806255 - DNA, 100 bp, Homo sapiens
cccaggctgggccccgcggcggggtggcagcacgcaaagggtgtccctgtccctcaaggggtcatggcctccatgttgctcgcccagcgcctggcctgca

SEQ ID NO: 806256 - DNA, 100 bp, Homo sapiens
ggattgtcttttcttaacctgggaagtggaaccggatatttaagtacaatggtgggcttaattttagaatgatatggaacctagcaaagctgttccactg

SEQ ID NO: 806257 - DNA, 99 bp, Homo sapiens
gctgtgctgtgaactgtgaacagaagcaaggagtaatggagtccaaagagaaacgagcagtaaacagtctcagcatggaaaatgccaaccaagaaaatg

SEQ ID NO: 806258 - DNA, 100 bp, Homo sapiens
gcacaactccggacacttgttttccagtgtgatcttacccttaaagctgagaaaatgctgagaagcttctgcagttcaagcgttggttctggtcaatagt

SEQ ID NO: 806259 - DNA, 99 bp, Homo sapiens
cttggcaacgtgtggctccaaactttacatcagcccacccgagatcgagaaaaggatatgcctttcacctgtgaaggtatcacccctgatatcatcatc

SEQ ID NO: 806260 - DNA, 100 bp, Homo sapiens
tcagtttgagactgcccagaagaagtgccaggaggcgattaatgctacttgcaaaggcgtgtcctactgcacagatacgtttgaaatggtttctgaagat

SEQ ID NO: 806261 - DNA, 100 bp, Homo sapiens
ctcaaaaccccatctttgaagggcttgatggaagctgggttttgctggagcttggtctgaagaaagagcacatgacgaagcagagggtggaacagtatgt

SEQ ID NO: 806262 - DNA, 99 bp, Homo sapiens
gaatgtttacttgtaaatatgcagattatatttctagggacaaacctatcacatttactcagggtcctaaaaaggtggggacgctgtggcgagaagccg

SEQ ID NO: 806263 - DNA, 100 bp, Homo sapiens
ctgcaatctgttgcccaagctccatgtggtcaaggatacttttgtggaactctatgggaacaatgcagcagccgagagccgaaagggccaggaacgcttc

SEQ ID NO: 806264 - DNA, 98 bp, Homo sapiens
gatcagagatcggcggagaccctcgaagtgcgcaaacttgacactcaccctgaccgtgtctttggtgcaacactaacaaggcttgtctggactaccca

SEQ ID NO: 806265 - DNA, 99 bp, Homo sapiens
agcgactggaacagctactacgcagacacgcaggagatacacttcttgtaccagtactccctccagtttttcctggacatttatcacaacgtcctatac

SEQ ID NO: 806266 - DNA, 100 bp, Homo sapiens
ggtccgagccagccgctgttttgccggaggagcccctcaggccggcacgaccaggagttgacgcactgctgcacacaccccacccagcggctcgtggtga

SEQ ID NO: 806267 - DNA, 100 bp, Homo sapiens
tgctgtttaatgaagtcctagaccacgtgctgaggattgacagggagtgaggattctttggacaccagcctgagagctcacggggtccatgccactaagc

SEQ ID NO: 806268 - DNA, 98 bp, Homo sapiens
gcaccaacagcttccaagatagtaacagatgttctcagtgcagctgagtcttggtgagcagacatgggaatccgaaggcagcagtataaagaaggctc

SEQ ID NO: 806269 - DNA, 99 bp, Homo sapiens
tgggttctggactttgggcgtcccattgccatgacatgggagtcccaccgtattgtccaggctggtctcgaactcctgacctcaagcagtcctcctgct

SEQ ID NO: 806270 - DNA, 100 bp, Homo sapiens
gccattctatgctgtggaaaagaaagcatactgcgagccctgctacattgtctgccatgtgaatctggaggggcagccgttctactccaagaaggacaga

SEQ ID NO: 806271 - DNA, 98 bp, Homo sapiens
cagcattgaacagaaagaagaaaacaagggaggagaagacaagctaaaaatgattcgggaatatcggcaaatggtttattcttcagtccaaggaagca

SEQ ID NO: 806272 - DNA, 98 bp, Homo sapiens
caggcccctccacgggcgttctctgcacagacgcagtcttcagcaaggaagtgctgggaacgccctggagtgaacccaggaagatgcctgcagtgggt

SEQ ID NO: 806273 - DNA, 100 bp, Homo sapiens
gatatggcagtggacgtggatttggggatggctataatgggtatggaggaggacctggaggtcaagtcatcagcccacaaagtagcagtagtggcacgga

SEQ ID NO: 806274 - DNA, 100 bp, Homo sapiens
cctggacctctcgggggcccggctgctcgggctgaccccacctgaggaggagatgttaaagtaacccatcttgcaggacgacattgaagattggtcttct

SEQ ID NO: 806275 - DNA, 98 bp, Homo sapiens
tcaagaaccatttccaaacaaggacatggagggaaggcttcctaagctatgtcttctcattacactgaagaccttttgccagaacagtgcatgcaaga

SEQ ID NO: 806276 - DNA, 100 bp, Homo sapiens
ccttctgaaagaagaattttcaacagttttcttcatactgcattaaaggttttagaaatactacataggattcaaccctatgaaaagataaaggccaggg

SEQ ID NO: 806277 - DNA, 100 bp, Homo sapiens
gaaatatatcaagtttgtgaaagaaaggacagagattgaactcagctatgcaaagcaactcagggactgctgagatgtcctctattcttgaagagcgtat

SEQ ID NO: 806278 - DNA, 100 bp, Homo sapiens
aaaggaccaccgtcacagatgccaaagagttgaagtttgcaagtcaaggccagtctatccatatggggatggggaagccttggcattgtcctttttctga

SEQ ID NO: 806279 - DNA, 115 bp, Homo sapiens
tttcttaaactcctggcctcaagtgatcgtcttacctcagcctctcaaagtgtcgggattacagaggtacttggaaggctccatcgcccctgaagacaaaggaagctgctcattg

SEQ ID NO: 806280 - DNA, 98 bp, Homo sapiens
atatgcaccagaaggagatgaagatatcccaaaagttatgattgaaccttcaggtccaattcatgtaccaaagggaaatggtaccattttaaagggtg

SEQ ID NO: 806281 - DNA, 100 bp, Homo sapiens
aactcaagaaaatcttcgaagacttttcaatccaggtgattgagaatgatagagccagcagaggaggacaagtttatgccaccaacaccagaggccagat

SEQ ID NO: 806282 - DNA, 50 bp, Homo sapiens
gtggcgaatggggctcacgtcgagaacattattgatgcacagaattctcg

SEQ ID NO: 806283 - DNA, 100 bp, Homo sapiens
caagttgggggctcagaggggagtcatcatgagcgatgttaccattgtgaaagaaggttgggttcagaagagggcttgtcaaaattcccaaaaatgatcc

SEQ ID NO: 806284 - DNA, 98 bp, Homo sapiens
atcaaagagatcgttagcagaaacaaaaggagatatcaagaggatggattcgacttagacttgacctctcaaatcccagccttctatatggacacaag

SEQ ID NO: 806285 - DNA, 100 bp, Homo sapiens
ccttaaatggggatctggtggtcgtgaaactgcttcccgaggagcattggaaggacctggtgtcaaagatgcttcatgtagaccctcatcagagactgac

SEQ ID NO: 806286 - DNA, 99 bp, Homo sapiens
tagcccgtcagtccctgctctgtgcgcgcctccatctgggccatggatggatttgtagccaaaccgtgcgccatagccctcaacattcaggccaatgga

SEQ ID NO: 806287 - DNA, 100 bp, Homo sapiens
cgagatgtccggctgcagcagcaagtcccatcggaggacctccctgccctgtataccgagggaacagaacagaatggcaattttcgtgtggtgttaattt

SEQ ID NO: 806288 - DNA, 99 bp, Homo sapiens
gcatctgctcaacgacgaggacctgacgcagtagactatgccagttactaccagggcctatgggattgccatggtgaccagccagatgaactgtccttc

SEQ ID NO: 806289 - DNA, 98 bp, Homo sapiens
acaagttaattgaagagtcttgtccacagctggcaaattcagtgcagatcagctgcacatcattgactcctgggcccaactgtgaccgatttaaactg

SEQ ID NO: 806290 - DNA, 98 bp, Homo sapiens
ccaggtcaagcccgaccaatacactgaggccctggcccagagggacaaagtacccaaaggcaagtggaacagctctaatggggttgaagaaaaggaga

SEQ ID NO: 806291 - DNA, 100 bp, Homo sapiens
gaccgccaacctggatggagagaccaacctgaagcggcggcaggtggtccgcggcttctcggagcttgcaaaaactgattattccaagtggaagttgccc

SEQ ID NO: 806292 - DNA, 139 bp, Homo sapiens
aactgcaacgcccgcctggtggagctcaagaggcaggccctgaggttgctcctcccggggcccttcccgggcaagatctgaaatagctcaactcagtcaagaaaaaaggtatacatatgataaattgggaaagttacag

SEQ ID NO: 806293 - DNA, 100 bp, Homo sapiens
atcctcggcgcgactcgcttctttcggttctacctgggagaatccaccgccatccgccaccatgacaagcagcgagattgtgcgaaccatgctccgaatg

SEQ ID NO: 806294 - DNA, 100 bp, Homo sapiens
gaacaaagtgagtgacaagcaccccgagtactgggacactgccatcctcttcaccaggcaggcttcgggagcaggaaagaaaagaagcagaagaagctag

SEQ ID NO: 806295 - DNA, 99 bp, Homo sapiens
attcgagaggagtttgagcggctgcagagagagagagaagagaggagattgcagcagcgaaccaatcccaaggccctccctatcctgaagacattagct

SEQ ID NO: 806296 - DNA, 100 bp, Homo sapiens
cttttacctgtttggattaatatgtctctgttcaggtccctggatggccggttgcaggtgtcccatcggaaggggctccctcatgtcatctactgccgcc

SEQ ID NO: 806297 - DNA, 100 bp, Homo sapiens
gggacgaggaagggcagactggtgaaatcgcaaactgggcgtctgttccggcgccggacccctatttgcaaaggcatgaacaaccgggaggtgctggagc

SEQ ID NO: 806298 - DNA, 100 bp, Homo sapiens
ccttccatctctgctgctctctcatttgctggccatcggattgggatgccccttggtgtggccactgcaaggctctggcccctgagtatgccaaagccgc

SEQ ID NO: 806299 - DNA, 100 bp, Homo sapiens
cgacctcagatgatgactcaggctgtgctttggaagagtatgcctgggtcccgccgggtctgaagcctgaacagtttaaaattggtggtgaatggtggac

SEQ ID NO: 806300 - DNA, 98 bp, Homo sapiens
gctactgtaggcctttttgactacaattcccagcagcagcttcttggacacttaatgattgttggcaagaaatgtgctgctgatctgggcctgaataa

SEQ ID NO: 806301 - DNA, 100 bp, Homo sapiens
agaagaacaactgcagcagattctaaaaaggaagaataagcaggcttttttagatgagctggtaatggaactgctggtccatctgaataaacgtataaaa

SEQ ID NO: 806302 - DNA, 98 bp, Homo sapiens
gcaacctttgaggctcacattagtgcacggctgtgggaactttgtccgtgtaattcagactttcaatcgcacacatttgtatgtctgtgggagtggcg

SEQ ID NO: 806303 - DNA, 100 bp, Homo sapiens
tcgatgtttcaatattggaagcgctttgatttacagcagctgcaggactcctgagagcagcctccatgaggccctggaccagtgcatgaccgccctggac

SEQ ID NO: 806304 - DNA, 99 bp, Homo sapiens
tgactaataatgtaaaagacgtcactaaattgggctggaaacaggattgttgaaatactccctgaacatctgaaagagtttcagtcccttgaaactttg

SEQ ID NO: 806305 - DNA, 100 bp, Homo sapiens
ttcgaggccagcgtggccctgctggaggcctcgctgaggaacgacgccgaggaaggttacaatgcccttttaagatatgaaggatttgaaaatgactctg

SEQ ID NO: 806306 - DNA, 100 bp, Homo sapiens
atttggttaatatgcagcagtatgatcttcacctagcgcagatggtcagtaggacagaaggtaacattgatgactcgctcattggtggaaatgcctccgc

SEQ ID NO: 806307 - DNA, 100 bp, Homo sapiens
attgtttggagccaggtagagtgaagtcctacagagttatcaggttccagaccctgccttctcttctgaaagggactcctttccatttgatcaacaattt

SEQ ID NO: 806308 - DNA, 99 bp, Homo sapiens
cggtatttttcatgccgactctgacgatgaatcattttgcggtttctcagagagtgagatacaagatggaatggtagcaatgaatcgagcccaagtttg

SEQ ID NO: 806309 - DNA, 100 bp, Homo sapiens
agaggaaccacaagaaaatcaaaagaaacttttgcccttatcagtaacacctgagatgatccagatcctgatgatggatttaactataaacagatgatgg

SEQ ID NO: 806310 - DNA, 100 bp, Homo sapiens
aatttggtggcagtggacggagcaagcaggcttgccaagagcggagatagtccactgtgtgcagaggcatgggagttgtcatgttgggaacatgctagac

SEQ ID NO: 806311 - DNA, 98 bp, Homo sapiens
ccgcccgcaggtgctatgctgtgggccccgctcagtaataatttttcaccatgcatcggaaaaaggtggataaccgaatccggattctcattgagaat

SEQ ID NO: 806312 - DNA, 114 bp, Homo sapiens
cggcggtggtatgaagaggccttagccatcagccccacccacgtgaagagcatgcagcgactgggcagcaaggcgaaccccatccctactcactggagctcagctttgattttt

SEQ ID NO: 806313 - DNA, 100 bp, Homo sapiens
cgctcctcggccgcgcaatgggcacccgcgacgacgagtacgactacctctttaaagaactattccatggcagtatatcttgtaaaacagttgtcctcaa

SEQ ID NO: 806314 - DNA, 99 bp, Homo sapiens
attgacattcacgttaaagagggcttttgatgaggccattgctgaacttgatacactgaatgaagactcatacaaagacagcaccctcatcatgcagtt

SEQ ID NO: 806315 - DNA, 100 bp, Homo sapiens
cacgcacacgctcggcgctgcgatccgcgcatataacgaaaacctgttagaaatgtggtggtttcagcaaggcctcagtttccttccttcagcccttgta

SEQ ID NO: 806316 - DNA, 99 bp, Homo sapiens
tggggacattccggcagatgctgatggagaaggagggagtgctcaccagggaggaccggcctgggggccacatgttaaaagctcaggctctgtttaagt

SEQ ID NO: 806317 - DNA, 100 bp, Homo sapiens
aacccctactcatgatccggaccctgagactcccctaaaggccagaaaggtccaagcatctcattttgaaggcctaatcacaaccatagttgggtatata

SEQ ID NO: 806318 - DNA, 100 bp, Homo sapiens
gatagctggggttcttttgacctgagggctgctattgtatatcacactaaagaaacctcaaatatttgttgttaagtgatcttcctggagtaagagaaaa

SEQ ID NO: 806319 - DNA, 131 bp, Homo sapiens
caaccctaccatcgccgagggcccatcccctaccagcgagggcgcctccgagaatcagagatcattgatttcttcctgggggcctctctcaaggatgaggttttgaagattatgccagtgcagaagcagac

SEQ ID NO: 806320 - DNA, 50 bp, Homo sapiens
aagcgcagaaatgttggatttgaagtttcatgtgcaatgacagatgaaat

SEQ ID NO: 806321 - DNA, 100 bp, Homo sapiens
ctgatttttagaactccacatttgagaaaaacacaccttgactttagtcagatacatcactgtctgttaaaggaaaccaagcgtgaagtggaagtctaac

SEQ ID NO: 806322 - DNA, 98 bp, Homo sapiens
tgatcaaccccaaagataacaatcagtttgccagtgcctctttggacaggactatcaagcctcttagcaatgcataccacgagttagcacaagtgtat

SEQ ID NO: 806323 - DNA, 98 bp, Homo sapiens
agaagacttttaagccagctatacaagaactgaagccaccaacctataagctaatgactcaggcacagttggaagagattttctggtctgactctgga

SEQ ID NO: 806324 - DNA, 100 bp, Homo sapiens
ggatcgttggctatgtaaaaacagttcctgacgtcagtcgaaatggagatccgtttgtagctacctccatcgtggaagcgattgcgactgttgacagagc

SEQ ID NO: 806325 - DNA, 99 bp, Homo sapiens
gatggccagctttcccccgagggtcaacgagaaagagatcgctccacaggctcccaggatggtcccgtgagcaaccccagcagtagcaacagtagccag

SEQ ID NO: 806326 - DNA, 100 bp, Homo sapiens
cacaccctcgtattctcctgcccttccccaggtaatctgtaagtcagatgctccaacaggggatgttcttcttgatgaagctctgaagcatgttaaggaa

SEQ ID NO: 806327 - DNA, 100 bp, Homo sapiens
tggccctcagggcatccccgttttcgtactgccaaatctgtcgaaagggagataatgaagaactgcttcttctttgtgatggctgtgacaaaggctgtca

SEQ ID NO: 806328 - DNA, 98 bp, Homo sapiens
aacacagtattgaaatgcatttgccttatacagctaaagccatggaaagttgttgacctcctgtactggagagacattaagaagactggagtggtgtt

SEQ ID NO: 806329 - DNA, 100 bp, Homo sapiens
tgagtactgcaactgcattctatagattgacaagaaaggcttctcatcagttgaaattggaactcaattcaatgcaggaacaacttatacaggcccagaa

SEQ ID NO: 806330 - DNA, 100 bp, Homo sapiens
tcaacagaaagaaaaagggccaaccactggggaagattggtagcttatgtcgatcttgatgaaagagcaattgatgctctcagggaatttaatgaagaag

SEQ ID NO: 806331 - DNA, 100 bp, Homo sapiens
gctgccaggagaaatggaaaaacaaaaatgaatgaatcaagagtgatttgttaatttcacagaagaaaagcttggccaggctgagaagacagaattggat

SEQ ID NO: 806332 - DNA, 99 bp, Homo sapiens
acgcggccaggcgattcggtgaagcgattcctgcaggcgttggttcccctctttgacctgatggcttaccaaataactttagagctcacccacttcagt

SEQ ID NO: 806333 - DNA, 100 bp, Homo sapiens
agaaagataggcggccatggtccaaccttgaagaaattgcaggtgctgcagtgtctgaaatttccgggcctttctcaacagaggatgtagccagcaactg

SEQ ID NO: 806334 - DNA, 100 bp, Homo sapiens
ccgaggagaagtaccaggaggcgttggccaaggtgcatcatgcatcttgaagatagactacaggagatgtaccttaaaagtaaaatgctatctgaatatc

SEQ ID NO: 806335 - DNA, 100 bp, Homo sapiens
caccccttgaccagcacacactgcaaggagatcagactatcaagaaatccaagtggtaatgggcgaagtttattcagcatccggcaatggacttatcgta

SEQ ID NO: 806336 - DNA, 98 bp, Homo sapiens
ccggagcccgggaggggccgcgccgccaccgtctgaactaggatgtcccgacatgaagggaagaaggagaaagggccaacccctgaagaagcaataca

SEQ ID NO: 806337 - DNA, 98 bp, Homo sapiens
tggagacatgagcaagaaaagcctctgggagcagaagggaggctccaagacctcatcaacaattaagttgaagatggggaagtatttgatttcagagg

SEQ ID NO: 806338 - DNA, 98 bp, Homo sapiens
ctgtaccatgatgtgatgctggagaccttgacacttatatcctccctggatctcagtgaccagctgctggaggtggtcggcttggaaggagccatgga

SEQ ID NO: 806339 - DNA, 99 bp, Homo sapiens
tgccgcagatcgcaggaccgtggagaagacttggaagctcatggacaaagtgacagagtctcactcccatcgcccagacttgagtgtagtgatgtgatc

SEQ ID NO: 806340 - DNA, 98 bp, Homo sapiens
taagggttgtacaggctctttgaatatgactctgcaaagttgctctaggtcgtaaccagcctttgaaaaaggagaaaccaaaatggaaaagcgattat

SEQ ID NO: 806341 - DNA, 100 bp, Homo sapiens
tgctaagcaggcctcatctcagagctgggtgccaggctgaaggatcactgaggaaggggaagtgggcaaagcagaaggccaatgatgaggccaatcagag

SEQ ID NO: 806342 - DNA, 100 bp, Homo sapiens
agtccggctagtacgcgaattggagaaaaagttcagtgggaagcatgtcgtctttatcgctcagtggattaccgtttattccatatctggataatttgcc

SEQ ID NO: 806343 - DNA, 98 bp, Homo sapiens
ctgcagaaaattttctagttttggggagacaattacaaacatgttttatcaatgcagctaagaacaccaatcagggtcttcaggcctggaagattgaa

SEQ ID NO: 806344 - DNA, 100 bp, Homo sapiens
gcctgtgagtcagcctgcagcctcgtcagactcggagacgtctgacagtgacgatgaggatgggaaggccattgtgactatgtggtgattacagttgtct

SEQ ID NO: 806345 - DNA, 100 bp, Homo sapiens
aatacatcagatactttcctggacatagcaaaaggttctttggcatggacacaagttcagtgggaggattagaattgactgatcagactcctgttttatt

SEQ ID NO: 806346 - DNA, 100 bp, Homo sapiens
aaggggaaaaggggagtggaaacacattaatgaaatccggcccaactccaccgtgcagtgggaagaagtgtgccggccctgggtctctgggcatcggaag

SEQ ID NO: 806347 - DNA, 100 bp, Homo sapiens
accccagggacagcatatcagagctttgaacaggcacatgaggcagcattggaagccagagccagtccagagatgagtgaccgaatacagcacttggaga

SEQ ID NO: 806348 - DNA, 100 bp, Homo sapiens
gcaaggcaaagtttgagaacctctgcaagctcatgaaagaaatcttagataagaaggttgagaaggtcgagttcccaccagatctctgttcccgggttac

SEQ ID NO: 806349 - DNA, 98 bp, Homo sapiens
cggcagcgagcggcgccttccaactccgggggagaacattaatatctgctggagtcctgatgggcagaccattgctgtaggcaacaaggatgatgtgg

SEQ ID NO: 806350 - DNA, 100 bp, Homo sapiens
ctgggactggagtcgacgggaaccctttgctgtggtgaagacagctagtgagatggaacgggtccggtaacagactgggttgacccatcatttgatgatt

SEQ ID NO: 806351 - DNA, 100 bp, Homo sapiens
acgcccttgccttctgcttccagggaactcaccagtcaccaagtatttgtaaatggtgctacccaaatggtagcccttggtccggcagaacctgcatcgc

SEQ ID NO: 806352 - DNA, 100 bp, Homo sapiens
aagaccaccaggagcacacttataattcctacatggacaaagatgagcatggttcatcctctgaaagtgaagatgaagcgctgggtaaatatcatgaggc

SEQ ID NO: 806353 - DNA, 100 bp, Homo sapiens
tcttggaagaagcttggagcgcttaaacaggctggagaccctggccgccattggagggcactgtgtttagtcttgagtcagaggaggaggaataccctgg

SEQ ID NO: 806354 - DNA, 100 bp, Homo sapiens
tgaggagctagacaagatgagcacctgcgccaacggaggaggctactaccactattcctactcggtggtgaggggctgcgaccgcatcgtgcccgtggac

SEQ ID NO: 806355 - DNA, 105 bp, Homo sapiens
cagaatgttaatgcttgatgggatgccggcagtcagagtcaaaacagagcttttggaatctgaacaaggggctgtattcatcaccaaagaaaaaacttacaccaa

SEQ ID NO: 806356 - DNA, 98 bp, Homo sapiens
taaatgccgcaccctacggcatcgaaagctccagaacctgggtatcaacccagcaaacattggcttcagtaccctgactatggagtctgacaaattca

SEQ ID NO: 806357 - DNA, 100 bp, Homo sapiens
caaaaacagcacccgctcctagatggcgtagatggtgaggctttctcctgtttctcagaggatttatcaattatgcaaaagttcggaagatgccagaaac

SEQ ID NO: 806358 - DNA, 98 bp, Homo sapiens
taggaactgcttgcccacttttttttgttctgaaagaaaggatacagaccatctgggccaaatttaagaagtgcaacatggccaggggctgcctctgc

SEQ ID NO: 806359 - DNA, 100 bp, Homo sapiens
gagcagatttgcagaaaaactggtgtcctgaaatttaaaactaaggcatcggtgcttgaaattttctgtatcagcaaaaatccctgaaaccaaatggtgc

SEQ ID NO: 806360 - DNA, 98 bp, Homo sapiens
actatactaaaacacctacagaatctttttgtaccaagagcatgtctgttcgatcctggcttccctcctgcggaacctgagagggcagcagcggaccc

SEQ ID NO: 806361 - DNA, 99 bp, Homo sapiens
ctagatgaaatggccaaacaagctcgaaatctcatcactgatatttgcacagaacagtgtacccttagtgaccaggcatctccagaatatcagaaactg

SEQ ID NO: 806362 - DNA, 99 bp, Homo sapiens
ggaacaacatacagtgacgcttcacagggagtggttaatgtgttgctaacaactccactctgggtggtaaacaccagactgaagcttcaaggagcaaaa

SEQ ID NO: 806363 - DNA, 118 bp, Homo sapiens
taaccacatcgtgggatgcactttctcaaaccaaggctgctaggttggtcctgatgaacatgccagtagctgaggacatgacggtccacttcacctccacacttatggctctgatccg

SEQ ID NO: 806364 - DNA, 101 bp, Homo sapiens
tgtttttcctgtcgtacgtgggacaggccacgctgtccgtccgcagtaccgacgcctgcagtaagactttgaccccgacgcaggcttcagtgattgccgcg

SEQ ID NO: 806365 - DNA, 98 bp, Homo sapiens
ttcagcggggtggcttgagagatcctctgattttcaagaattctgatggactcggaataaaaattccacaaggcatatgcccagttggtcgatcttgg

SEQ ID NO: 806366 - DNA, 100 bp, Homo sapiens
gctgggccctgaggctgcaccaagtggcgaaggagccggctccaagagctatactacaaaattcctggacagaagtcatggatttaatattgaaaccccg

SEQ ID NO: 806367 - DNA, 98 bp, Homo sapiens
aaatggcagcgacggttcttcatcctttacgagcacggcctcttgcgctacgccctggatgagatgatataacacgtgggaaccggaggagaacatcc

SEQ ID NO: 806368 - DNA, 98 bp, Homo sapiens
aacctactttatgtatggaataactatcacgtcgtgaaatattctttggattttggacctctggatagtagatcagaaaagcacttggttctgcttcg

SEQ ID NO: 806369 - DNA, 142 bp, Homo sapiens
aagcacattgtttccagaatgaaaaggtcactgccatctggagtggatggacacacctggttgctcagacagatccggtccgacaaagacaatgacatccccatccggtacagcatcacgggagtgggcgccgaccagcccc

SEQ ID NO: 806370 - DNA, 100 bp, Homo sapiens
caagtgattttgaattttttggcagcagaagggcgactgagtactcaacatattgactgtatttgggctgcagcacagcttaagagttggacagtggagg

SEQ ID NO: 806371 - DNA, 98 bp, Homo sapiens
ttgaatcatgaagctactaaccagagccggctctttctcggtctgccatgtgaatctggaggggcagccgttctactccaagaaggacagacccctgt

SEQ ID NO: 806372 - DNA, 100 bp, Homo sapiens
tgatgggagataccatgtcctgtttctcggaacagctctacctacaaggactccaacactctgcacctccctacggagcgtttctcccctgtgcgccggt

SEQ ID NO: 806373 - DNA, 100 bp, Homo sapiens
tataaacgagtgactgggacaaggccatggcccaaaaggaagatatggaagagagaatcactactcttgaaaaacgctacctcgctgcacagcgtgaagc

SEQ ID NO: 806374 - DNA, 99 bp, Homo sapiens
gagcatcagtcagaaaaagtctatgtttgcagaaatacagatccaagacaaagacaggatgggcactgctggaaaagcggctgccgagtgatagagcag

SEQ ID NO: 806375 - DNA, 100 bp, Homo sapiens
gacagatttgtcatgaagaaactcaatgatcgtgtcatgagaacggcaccgaaagcgaaggaagctcctgctcctcctaaagccgaagccaaagcgaagg

SEQ ID NO: 806376 - DNA, 100 bp, Homo sapiens
ctctgacatcaacatccgagacaacgctgaggaaaaggcagatgctctgaataaggagctgctgatgaccaaacagaagttgattgatgcagaagaagag

SEQ ID NO: 806377 - DNA, 100 bp, Homo sapiens
ccacatcagccagtagctcaacccagccagttagtcagaatcccagtacaaacactcagcctcttcagcaaggtcctcagaatggttggaatgaccctcc

SEQ ID NO: 806378 - DNA, 99 bp, Homo sapiens
tcattccagacattgatctgaagttggctaacaaattgaaagatatcatcaaacgacatcagtctcacagaaagttctccgctcccagacatgggtccc

SEQ ID NO: 806379 - DNA, 100 bp, Homo sapiens
ggctgccctccgagtcagagacatcctttctcgtactaaagagggagtgggctcccctaaactggggcctggaaaaggcacaagcagcgctgccctgtgc

SEQ ID NO: 806380 - DNA, 100 bp, Homo sapiens
ggtattaggcagtgctacaagggatcaagatcagctccaggcctgggaaagtgaagggttggggtgctggaggactgcttcaccttcctgggcatcttcc

SEQ ID NO: 806381 - DNA, 51 bp, Homo sapiens
ccggccaccagcaattgtccggcaagattacagagaggtcacttattactc

SEQ ID NO: 806382 - DNA, 100 bp, Homo sapiens
ctcaacgaagcctcggtgctgcacaacctcaaggagcgttactactcagggctcatctacatggctcagcgacttcttctgaggaggttcctggcctctg

SEQ ID NO: 806383 - DNA, 50 bp, Homo sapiens
gcaccgttggtatcctcatggacgtcaaggcctggccgacaacaccgtta

SEQ ID NO: 806384 - DNA, 100 bp, Homo sapiens
acctcctagtagaaaaagttcttgggacaaacttcatttgatgctgtcttcgcaggtgccatgcctacaatggcaagcgtcaagctgtctacacttcatc

SEQ ID NO: 806385 - DNA, 74 bp, Homo sapiens
gtgtacgagctgtgcgaggtgatcggaaagtgtccctggccagtgtccttccacctgtccacaagcatggggaa

SEQ ID NO: 806386 - DNA, 104 bp, Homo sapiens
ctgcacgcagggaaaacatccttgtaatgcgactagcaaccaaggaacaagagatgcaagagtgtactgtttgcctgcaatgagatttcattctctacatttaa

SEQ ID NO: 806387 - DNA, 117 bp, Homo sapiens
ctcccccgccggtggatgggagtgaaggacggaagaggccctgcggaggcggcggtgcagcgctccggtgaaatgacaatggatgctctgttggctcgattgaaacttctgaatcca

SEQ ID NO: 806388 - DNA, 98 bp, Homo sapiens
ggacggcggcggacctgtcgcgatgtcagggctgcgcctctctgcagcaggttgccaacttggcctgttccatctcaaataatgaagaaggtgtaaag

SEQ ID NO: 806389 - DNA, 98 bp, Homo sapiens
ttgctttagggatgtttctctctcgcttgtgtgaagagaaactcaggactacgccgacacagagctcctgctttcccgagaaaacgtggaccaggagg

SEQ ID NO: 806390 - DNA, 100 bp, Homo sapiens
tacaccctcatgagggtctgcaagcagatgataaagggagaaaactggttgtcctggatgtttgaaaagttggtcgttgtcatggtgtgttacttcatcc

SEQ ID NO: 806391 - DNA, 98 bp, Homo sapiens
taaatcctggatggaagatagcttgaacagggctgacaacatttttccttttccggggctgtgcgaaaggacgtttaagcgtctgtaccagtatatgc

SEQ ID NO: 806392 - DNA, 98 bp, Homo sapiens
tttaagaaaggacagcattcctgtgacctctgcctaccatccataaaatactcattcccctctcaggcatgttatttgaaagcaattgagacgcaacc

SEQ ID NO: 806393 - DNA, 98 bp, Homo sapiens
agtatggcaactcctaggatttgtcacgaatgggaagccaagtgccatcttcaaaatttcaggtcttaaatctgatcttagcaaagcaatgtctcaag

SEQ ID NO: 806394 - DNA, 100 bp, Homo sapiens
cgactgcatttttgcctttgagactcccgaaatatttaggcctgaaggaattctcagtcaaagagaatcttttaatgggtctcctacaggaagcataaat

SEQ ID NO: 806395 - DNA, 109 bp, Homo sapiens
ccttcgagaaaaaatttatttacagctcttaatgcaggaatgtatcctgtcaggtataatgtcagtgaatggcaagaaagttcttcatatggatcgaaacccttactac

SEQ ID NO: 806396 - DNA, 100 bp, Homo sapiens
attcgaaaagcagttcaacgagaatgaagccatccaatggatgcaggaaaactggtctggctccatgcaccatatgaacttcatctttccttatttgaac

SEQ ID NO: 806397 - DNA, 99 bp, Homo sapiens
ctatagattctgctggtatacagctacatccaggagagaatgctgacagtcctgcaggacatggatttgattgacatactttggaggcaagatatagat

SEQ ID NO: 806398 - DNA, 100 bp, Homo sapiens
cagggccttgccaccatccacgcctacaataaagggcaggagtttctgcacagtacaagcaaatgctggtgaatgctttcacggagcaaattctgcctca

SEQ ID NO: 806399 - DNA, 100 bp, Homo sapiens
taactcctgtaccttttaacaccacagaggatccagatattagcacagcagaccttggtgatgtgctacaggcttgcattgatgacaatgttgatatggt

SEQ ID NO: 806400 - DNA, 100 bp, Homo sapiens
ctgtttcctaccaggtcacacactgttgcagcgcaggtggtggaggtggatacagcagtcggagaacatctggcagagacaaatacggaccacctgttcg

SEQ ID NO: 806401 - DNA, 99 bp, Homo sapiens
acagtgatgagcagtttgttcctgatttccattcagaaaaccgcagcacgctggctcttctcctgaacttcctcgcctgcctggccagcttctgtgtgg

SEQ ID NO: 806402 - DNA, 100 bp, Homo sapiens
atcctctgagatcccagatcatgagatccggagttaggtgttggcacgctaccagaacatgacagccaggatgcagggccgattgtccccaagatatcgg

SEQ ID NO: 806403 - DNA, 99 bp, Homo sapiens
atttaaacaagagatttccacagaaggagcaggccgggctctcgccatgggtcactgtcgcctctgccacgggaagttttcctcgagaagcctgcgcag

SEQ ID NO: 806404 - DNA, 99 bp, Homo sapiens
ataaatatgctgcaggagttcgcaatcctcagcaacatcttaatgcacagccacaagttacaatgcaacaggtaccattgttggatactggtgacatca

SEQ ID NO: 806405 - DNA, 51 bp, Homo sapiens
ggaagaagcctctgggacccttcgggagggcagcgggtggcatgagacgtg

SEQ ID NO: 806406 - DNA, 100 bp, Homo sapiens
gcaacaacacaagaggttctacagcaggaacttcagggcattcacagtttccggagtcagtggatcggtggggaaaatgctgcttaccctgggccctggg

SEQ ID NO: 806407 - DNA, 100 bp, Homo sapiens
agaataagattagcaccattgaaagaggagcattccaggatcttaaagaactagagagactcaggagcgagaacccgagcagcgccatgagcaacactac

SEQ ID NO: 806408 - DNA, 124 bp, Homo sapiens
caacagggtaccagagccaagaccctcggcctcctcccccgccgccttcctgcagggtcaccagatcctcctcctcctgcaggctcaccatggcttcaaaagaattcagtgttctgcaagactc

SEQ ID NO: 806409 - DNA, 100 bp, Homo sapiens
tgagaaacctggatctgcgatctgtttgtggctgaccggttccctgatgtgttacctgcttctgctactgatccaaactgcagaacttctcattcatccc

SEQ ID NO: 806410 - DNA, 100 bp, Homo sapiens
cctagcgcctggcctgcgcgccgctgcccgcgccacaggcaaccactgagaaaacggaaccgaatagtcaagaggacaagaatgatggtggaaaatcaag

SEQ ID NO: 806411 - DNA, 100 bp, Homo sapiens
gctaagagatatctgcaatgatgtactggctgctttgctggctctgcaagaaaatggactagacgcaactacagtgaaacaagagcactttctaaaatca

SEQ ID NO: 806412 - DNA, 101 bp, Homo sapiens
gtgatcgcggactatgagagcggacgggccatacccaataaccaggtgcttggcaaaatcgagcgggccattggtctcggcgcggaagatggccggcggcg

SEQ ID NO: 806413 - DNA, 100 bp, Homo sapiens
aggtgatcatggttggcagcggaggcgttggcaagtcagccctgacgcttcagttcatgtatgacgaggttaaacccatccagagtaatggctgcggcct

SEQ ID NO: 806414 - DNA, 100 bp, Homo sapiens
caaccgagctgggaagcctgtcatctgtgctactcagttattttaccaagaaaatggtttgcacgactttgaacatatactatccatgctgatgggacag

SEQ ID NO: 806415 - DNA, 100 bp, Homo sapiens
gaataaaggcaggaatcaatccattcaatgagatgatttacacaatgaagaaagtacatgcactttgggcttctgtatgcctgctgcttaatcttgcccc

SEQ ID NO: 806416 - DNA, 100 bp, Homo sapiens
cctgactgtgcaggctgcaatgtgatgcagtggcagaacgtggagcacgttggtgaccagagcccctacgtcacctctgtcattctgcacatcaagcaga

SEQ ID NO: 806417 - DNA, 99 bp, Homo sapiens
ggaagatgaatacaaaaagcataggcggaccatgataatttccccagagcgtcttgatccttttgcagatggaaacctggacaagcatgaagaactaga

SEQ ID NO: 806418 - DNA, 100 bp, Homo sapiens
gcaccatgagctggggcaccgagctctgggaccaagaatcgccttcagccctgtctggtgcatccttggcagaaagtgaggaggaaaacacccccattgt

SEQ ID NO: 806419 - DNA, 98 bp, Homo sapiens
tgcagtgccatctatccaacacctgtggagccttcgcagattgttaggaaaaaagcattgcctgacagcggtgaagatcgagatacaaaagaagctct

SEQ ID NO: 806420 - DNA, 98 bp, Homo sapiens
ttgataatacctgttggaatctcctatgatcgcattatcgaaggtcactacaatggtgaacaactggtgtcatttacaggaaaacaaggtgaaatgag

SEQ ID NO: 806421 - DNA, 100 bp, Homo sapiens
gagattcaagattatttgcaacagctcacgggagcaagaacggtattttggagataacggcagtggaggtgggcattgtggccatcaggggtctcttctc

SEQ ID NO: 806422 - DNA, 100 bp, Homo sapiens
atttggaaactttggcaatatacctgctccaatgacagtaggaaatattcaggcatctcaacaggccaagaagcttgagagaagaaaaatttcagaaaaa

SEQ ID NO: 806423 - DNA, 98 bp, Homo sapiens
aaaaggagtcaggaatgcctcttagggacacttggcattcagggacgtggccatagaattccctcaggaggagtggaaatgtctggaccctgctcaga

SEQ ID NO: 806424 - DNA, 100 bp, Homo sapiens
acagttagtcacccacctacatgttgagacaaggcgcctctgtcgaagagccttctgctggtccccagtgccctctccctcctgctcgccctcctcctgc

SEQ ID NO: 806425 - DNA, 100 bp, Homo sapiens
gtcaaaatccttaccataacgcagtccacgctgcggatgttactcaggccatgcactgttacttaaaggaacctaagagcatctgctgcacccaagcctg

SEQ ID NO: 806426 - DNA, 99 bp, Homo sapiens
aagtctacgttcattcagggcctgctgtggaagaccagccccaaaggtactttggaagttcgtcttatgggctgccaagatatcctagagaatgtccct

SEQ ID NO: 806427 - DNA, 99 bp, Homo sapiens
aaaaccttctccaccagaatccagctcacgctggacaaccctccatatgataagggagccttcagaatcgaaatcaactttccagcagagtacccattc

SEQ ID NO: 806428 - DNA, 100 bp, Homo sapiens
tacaaggaatctgagggtgccctcaatgagcacatgaccagcttagcttctgtcctaaagatgtctggtcgtgctggaagaagaggtcaagacctgcttg

SEQ ID NO: 806429 - DNA, 99 bp, Homo sapiens
acaaggccaagggcaagtgatttgacagggtgttcctgaaaagaaggtacttccaatcaccgtccccaagtcaccagcctttgcattgaagaacagaat

SEQ ID NO: 806430 - DNA, 100 bp, Homo sapiens
tccatctgtcttagcaaggctgtcatcacagtggtatcacggaaaacttgacagaacgatagcagaagaacgcctcaggcaggcagggaagtctggcagt

SEQ ID NO: 806431 - DNA, 98 bp, Homo sapiens
catctgtcttgagctcccagcaagctttatcttcaagccaggatgaagggagactgggcaagactcttacgccccacactgcaatttggtcttgttgc

SEQ ID NO: 806432 - DNA, 98 bp, Homo sapiens
tttggatggagctttgtctttgaggactttgtctctgatgagctgagaaacaaagccacccagccaatgaaggcaaggcatctttacatatgtgatta

SEQ ID NO: 806433 - DNA, 100 bp, Homo sapiens
gtggttgtggatttccacgcacaatcgtcacagctacctgtctctggggatccctagtataacacattcagtgttcccctttcagtcttactactttgac

SEQ ID NO: 806434 - DNA, 99 bp, Homo sapiens
atgaccagtgtctgagcctacaactgcgctatcttccctggatttttcttcaccttttccttactcatgagccagacctgtcatttactccatccttta

SEQ ID NO: 806435 - DNA, 99 bp, Homo sapiens
cggccgaacgatgtgcgagaactgcgcagacctggtggaggtgttaaatgaaaggtgaggtggctttgaccccgggttgcccggccagcacgaccgagg

SEQ ID NO: 806436 - DNA, 100 bp, Homo sapiens
gagtcagtgtgacagtccatatgtaaccaaatattatggatcctatctgaaggagtgctaacaggaatgaatgaaacttctgctgtaatcattgctgcac

SEQ ID NO: 806437 - DNA, 100 bp, Homo sapiens
tcttaaatggcccacatcaggacagctgttccttggccatcccaaagctattctgggggcaacagaggtaacctgtgtatggtgactggaggtgctaacc

SEQ ID NO: 806438 - DNA, 100 bp, Homo sapiens
ggaattgacaaagacaagcccaaggaggcggtcaccgtggccgtgaagatgttgaaaggagttattcctgatgaagctaaagctttgtctctgttggcac

SEQ ID NO: 806439 - DNA, 100 bp, Homo sapiens
caataataactctattctgcatatgtggcaccttcatcttaaatctgtacaagcatgtttaggatatggtggtaccaggagacgataaagtagaaagttg

SEQ ID NO: 806440 - DNA, 122 bp, Homo sapiens
accctggaaagccagaagaaactcaactggtgtcgagaagtccggaagcttgtggcgctgaaaacgaacgcatgacgacagagatgatggtgtggattattgggccaaaagaggaagaggtc

SEQ ID NO: 806441 - DNA, 100 bp, Homo sapiens
ggatctcttctaacatccagaagatcacacagtgttgcagttaatctcatgctcagaagatggcagtgtacgcatttgggagttaagagaaaaacagcag

SEQ ID NO: 806442 - DNA, 75 bp, Homo sapiens
ctcttcctcaggaaatgtccaccactgtttctcatcatcaccaaacgtgaagctgtggtctaccaatctagacaa

SEQ ID NO: 806443 - DNA, 100 bp, Homo sapiens
catggaacagcaggtctggtgttccttacggccctctcagaccccaccaacaactgaacgctttggtcaggctgctacaatggaaggaattggggcaatt

SEQ ID NO: 806444 - DNA, 101 bp, Homo sapiens
gcagccggagtcgtcttcgggacgcgcctgctcttcgcctttcgctgcagtccgtcgacaaatttacatgtattggagaccagaccagaagcccttctgaa

SEQ ID NO: 806445 - DNA, 100 bp, Homo sapiens
ctgctttgcacagctttgccacaaagcccagtctgtgtctcaaatcaaccacaagctggagggaggtggggaagacagggctccagctaccacaggacgg

SEQ ID NO: 806446 - DNA, 100 bp, Homo sapiens
atggggccagaacggacaggggccgcgccgctgccgctgctgctggtgttagcgctcagtcaagaaattgcaggtgctgcagtgtctgaaatttccgggc

SEQ ID NO: 806447 - DNA, 98 bp, Homo sapiens
atgaattgcaagtttgtgccccatagctgcacagtagccggatcgagctgggagatgtgacaccacacaatattaaacagttgaaaagattgaatcag

SEQ ID NO: 806448 - DNA, 99 bp, Homo sapiens
agaaacatcagttgaaacatagggaactctttttgtcacgccagtatgaatctctgcccgcaacacatatcagggacacttgacattcagggacgtggc

SEQ ID NO: 806449 - DNA, 100 bp, Homo sapiens
atggagagcaaggagaaggatcgccaggtgctggaggacttcccaacgagttatgtttaccgaggacctgaagctgcctgcaagcttcgatgcacgggaa

SEQ ID NO: 806450 - DNA, 100 bp, Homo sapiens
gggactgcacttttattcatcaattcatagaatgccagaggaccttggtagctaatgtccgaagaaagtgactctctgagaaccagcccttctgtggcct

SEQ ID NO: 806451 - DNA, 99 bp, Homo sapiens
ggagaagacaagggcatcgccgcctcagccgccgccgccgccgttttcgcctgcagctgctcaccggctggcagtgatggtgaaagcataggaaactgc

SEQ ID NO: 806452 - DNA, 100 bp, Homo sapiens
ggatgagacatttgctacagcatcccacattaagtcaacggtcggttagaccccgtttaaccatctatgtctgccgggagcagccaagcagcacagtgct

SEQ ID NO: 806453 - DNA, 100 bp, Homo sapiens
cctgggggttggttgaggcggacggcggggtccgggccggagtacgtcgttcccgctgcgctaggggaagcgggcagaattggctatccaattcccatat

SEQ ID NO: 806454 - DNA, 100 bp, Homo sapiens
gccgcggctacgtgcgcgtccagtggtacccggagggcgtcaagcagcatgtgaaggagaccaagtgatggggggccccgagtcccgcggcgtcctgcgc

SEQ ID NO: 806455 - DNA, 100 bp, Homo sapiens
cctttgcctgatcatgcagacatctccaactgtgggaactctttccagcttgtgtctgatgaaccaaggatcgggatagcagtataaaattagaatcaag

SEQ ID NO: 806456 - DNA, 100 bp, Homo sapiens
agttccagggaactaatgaacctcactggaacaatccctgtgccttatagaggttgaaccatgccaatgttgtaaaggcctgtgatgttcctgaagaatt

SEQ ID NO: 806457 - DNA, 99 bp, Homo sapiens
tagaagtctggatgtcggtgggcctctgagatatgccgtttacggatcgccacatcacagaatcgtatctatctcacagctgacaaccttgtgctgaac

SEQ ID NO: 806458 - DNA, 98 bp, Homo sapiens
gagagataacaaaagctgctcagagtctcaatgaacttggttggcttttaggacactagtaagaaaatatagttgtgatctgtgttacacaccaatga

SEQ ID NO: 806459 - DNA, 98 bp, Homo sapiens
gcaaatctgttactgcagacagatgggaaaaatatttgatcaaggtgcttgtgaatgacttcttcttggtggcttgtcttgaggatttcattgaaaat

SEQ ID NO: 806460 - DNA, 100 bp, Homo sapiens
cttgtcttacaaaacatttacaaggtccaagcagctcagtctgaggctaaggttgtatctcagtatcatgagctggtggtccaagctcgggatgacttta

SEQ ID NO: 806461 - DNA, 100 bp, Homo sapiens
gattgccagggcttcctggcccgaaaggagagcctgattccggagtttgaatccacctttgacaattgtccgaaagacgtttgaatcaacagaaaaccca

SEQ ID NO: 806462 - DNA, 100 bp, Homo sapiens
aatacctagaagtggaattgctgggtcatatgggtatgcagaagttggctagtcaatacctgaagagagattggcctggagtaaaagctgatgatcggaa

SEQ ID NO: 806463 - DNA, 75 bp, Homo sapiens
gcatttgattgaaaaatccttcttagccattttaaaggttctgatctacaatggccaactggacatcatcgtggc

SEQ ID NO: 806464 - DNA, 106 bp, Homo sapiens
aggaccttggtcagagatctacatcttagtatcacgtcctccagcggttgtggggcacccaggatgtatcccaagacatccaggagatgaaagatgagagtgcaag

SEQ ID NO: 806465 - DNA, 99 bp, Homo sapiens
gcagagtgggcggcggtggtggttgaatataagctgggattccaagtggacaatgttttggcaatggatatgccccaggtcaacatttctgttcagggg

SEQ ID NO: 806466 - DNA, 98 bp, Homo sapiens
cagactgatgttacaggactgcacggcagtcaagacgttattattaaagatgaagagagttcttcaagagtgcactagtgaaattgatgaataagtca

SEQ ID NO: 806467 - DNA, 100 bp, Homo sapiens
cttatagatcttctgcactgtttacaggcacaggaagccttatcagttgtgagtgaggaccagtcgttgtttgagtgtgcctacggaacgccacacctgg

SEQ ID NO: 806468 - DNA, 100 bp, Homo sapiens
aagtcgagggatgtacagcaacagaatgagaagctacaaacaagaaatgggaaaactcgaaacagattttggtcatcgagcagctcggtgggaagcagct

SEQ ID NO: 806469 - DNA, 100 bp, Homo sapiens
tccgtgggcgtaggaccctctgagccaggaacatgctcaaaatcagatatagaaattgaaaatggattcatttccgaatcttcctctatttatattttaa

SEQ ID NO: 806470 - DNA, 100 bp, Homo sapiens
gcaggccctaagtcttagtgtaggtgccgatggtgcagttttctgagtttaaccagtaatgccattcagttgccaatctcaagcaaagcaaacataagcc

SEQ ID NO: 806471 - DNA, 98 bp, Homo sapiens
ggatggcacctatcagggtgggggtgtctgtatcgactgccagttctgggaagtcatcagtgatgagcatggcatcgaccccagcggcaactacgtgg

SEQ ID NO: 806472 - DNA, 99 bp, Homo sapiens
gacttctgaaggtgttcttcggaatagaaagtcacaccattataagaaacattaccctaatgaggttcaaaccttgtactactcagctgatcacaagct

SEQ ID NO: 806473 - DNA, 99 bp, Homo sapiens
ttagaattattaatgagccaactgctgctgctattgcttacggcttagacaaaaaggtattctgcctttgactgcaactcttgtcgtcttatgtgggtg

SEQ ID NO: 806474 - DNA, 100 bp, Homo sapiens
tctagatgtaattaatcaaacttggacagctctctatggcctggtccagatccctgtgagcatgtaccagactgtggtgaccagcctcgcccagggcaac

SEQ ID NO: 806475 - DNA, 100 bp, Homo sapiens
gttgaagtacagctcggtgactgacaccccacagattgttcaagccaaaatcaatgcccagcagctgagtcatgtttatttatgaaacagagcatcataa

SEQ ID NO: 806476 - DNA, 99 bp, Homo sapiens
ccgagcggcggcggcggcagcagcggcagcggcaagcaccctcaggtaacggaggccttggaaagagactctgcgtcaggtcacccagcagagatcagc

SEQ ID NO: 806477 - DNA, 100 bp, Homo sapiens
agtttcctggtcctgttcctcatcaacaccaaggatctgcagtaccgagcccctgaactgctgttgggaaccaccacgcagaccaccagcatcgacatgt

SEQ ID NO: 806478 - DNA, 98 bp, Homo sapiens
ctacaaggaatctgagggtgccctcaatgagcacatgaccagcttagcttctgtcctaaaggaggcaggtggaagtcatcataaagtttctgtttcac

SEQ ID NO: 806479 - DNA, 100 bp, Homo sapiens
gggagctcttcttcatcaacatgtggcagaagatacaagaaaggtggctacaagataaccttactttaagaaaaagaaatgaggaactaaaagaagttga

SEQ ID NO: 806480 - DNA, 100 bp, Homo sapiens
tgaccgagagcgtgaccgagagcgcgaatatcgtcatcgttagaagattttccgcagatttccagtggccccactgatcccttatccactcatcactaag

SEQ ID NO: 806481 - DNA, 98 bp, Homo sapiens
acatcattacaatcctcttgaaagtgcttcttttaggcagaatcagcttgctgctacactggcgagcaatactggcattgctcgggtaccacttgctg

SEQ ID NO: 806482 - DNA, 98 bp, Homo sapiens
gttcggtgcagctgccagatccgctgatctagtgcttctcgaaaaaaaccttcaggcggcccatgggtaaaataccatgaagattttgaaaaaacaaa

SEQ ID NO: 806483 - DNA, 98 bp, Homo sapiens
cggccacctctgagaagggagacgacgctgctgggtccgctgagcggggcgacccgagggccgcctttttgcctatcctgacactcaccgccatcgcc

SEQ ID NO: 806484 - DNA, 100 bp, Homo sapiens
aaggatgaccaatgactcagaagggaaaatgggatttaaacacccaaaggttagaattgcccctactgtcactacctggagtaacaaaactcctactgcc

SEQ ID NO: 806485 - DNA, 112 bp, Homo sapiens
agacagaagcggattgagcagcagaaagaacagaggcgacggctagaagaggagatcatgaatcagacagataaaaatcaacaagaaatcccatcataccttaatgatgaac

SEQ ID NO: 806486 - DNA, 98 bp, Homo sapiens
cctttttgcataagaaaggcttttctctacagtaactgtggtcgctgatcaatgacaccttcctgacgtgaagccctccaatatgctagtaaacacaa

SEQ ID NO: 806487 - DNA, 100 bp, Homo sapiens
gcttgggtcaggacaattccatttggggaccagagatggacggtcactcagcctatggaggccgagtggtttgaggatgatgtcatacagcgcaagaggg

SEQ ID NO: 806488 - DNA, 98 bp, Homo sapiens
gacatggaagatggaccttctaataatgcgagctgcttccgaaggctgaccgagtgcttcctgagccccatgaatttggttccaaaatcatcttgctt

SEQ ID NO: 806489 - DNA, 100 bp, Homo sapiens
gcgcgatgaggcgggtgaccctgttcctgaacggcagccccaagaacggaaagtttgaacgccatgaccctgtggatgggagaattactgagaggcagtt

SEQ ID NO: 806490 - DNA, 100 bp, Homo sapiens
tgaaaattcctactggacaagaatatgctgccaaaattatcaacaccaaaaagctttctgctagggattatctttctcaaggaatagatctttctggaat

SEQ ID NO: 806491 - DNA, 99 bp, Homo sapiens
atcatggacgggatgttagcaattcaggcctgtccgactccccagaaaccgaaacttcattgccccttcaatgtgggaatccagccagaccctattctt

SEQ ID NO: 806492 - DNA, 100 bp, Homo sapiens
aggagtgccaaagaaagaagtaaactgaagttgcaaagcaacagtaataatgtggttgccctgcttggctttccttatgcctccagtggagaaaacacag

SEQ ID NO: 806493 - DNA, 131 bp, Homo sapiens
tgcaaagcttccaatgagtatggcagtgtcagctgtacagccacactaactgtgacagggtgaaaatcctatttataagagtgccgtaacaactgtggtcaatccgaagtatgagggaaaatgagtactgc

SEQ ID NO: 806494 - DNA, 100 bp, Homo sapiens
agaagtacctgcttcagagacatgagaagattcatactgacaccatggtatgcacaggctgctgctcctgcctggaccacattgtgacatacctcttcaa

SEQ ID NO: 806495 - DNA, 99 bp, Homo sapiens
aggggtctgcatggtggtggtgctattcctcatgatcacagcctctacatatgcaataagatacagtttatgtaacttgatggaagaaaatggaattac

SEQ ID NO: 806496 - DNA, 100 bp, Homo sapiens
ggcatatttcttggggatgatgaatggagagagactgcatggggagcttctctgttcaagaaggaagtgtatcttcatacatcaccacacctgaaagcag

SEQ ID NO: 806497 - DNA, 100 bp, Homo sapiens
tgaaccgtttaactgagatccgcctctgcaggctatccatggacttttaaattatagctggggtggaaaggagaatggctttggacttgcagaatgttgc

SEQ ID NO: 806498 - DNA, 100 bp, Homo sapiens
ataacctgctaagcccagcacacatcatggtggagaaagaaagcaaatggttatgagccttagagtttctgaactccaagtactgttgggctacgccggg

SEQ ID NO: 806499 - DNA, 98 bp, Homo sapiens
gaaacatgttgtgaaatatcagatactaaggtgatgacacatctccacgtgattgaagaaaggaggaaccaaagcctctctctgctctacaaagtacc

SEQ ID NO: 806500 - DNA, 100 bp, Homo sapiens
ccaccacctgggctgtgctctccggctcccgccgccacccccgccctcgccttcgcctccgcctccgatgaggtttatataactttccaagacaaggaag

SEQ ID NO: 806501 - DNA, 100 bp, Homo sapiens
tgccctcaacaccattaaggaatggcttgccaagaatcaccatgagtaataagaaacctgactcagaagcaagtgctttgaagaaaaaggtcaacaaggg

SEQ ID NO: 806502 - DNA, 100 bp, Homo sapiens
cggctctctggaccttgtctcgctcgggagcggaaacagcggcagccagaggttggaaaagagactgttcaaaccactgaggatcagattttgaagagag

SEQ ID NO: 806503 - DNA, 100 bp, Homo sapiens
cagtccagagactcatccccgccctgtgggagaagcacagtccacagggctcacccttcagaggacaatgacttttacatcaactacaaggacatcgacc

SEQ ID NO: 806504 - DNA, 100 bp, Homo sapiens
aacttcaaagacgttctcaaggagaaggcagacctggaaactagaaaaactgcttttggaattatctctacagtgaagaaacctcggccatcagaaggag

SEQ ID NO: 806505 - DNA, 100 bp, Homo sapiens
aggagaggcgcttcttccagctacagatgtgcgaggagtacctggccgtagtcgatgctcctcccctggacctccggttcaacccctcgggctacctctt

SEQ ID NO: 806506 - DNA, 98 bp, Homo sapiens
ccagttggtccagagggcagctgaagagaaacataaagaattctttgtttcagaggaagcgagcagctgcaaagcatctaatagaacgctactaccac

SEQ ID NO: 806507 - DNA, 99 bp, Homo sapiens
aaagacttgtgaatccaggaagagagactgactgggcaacatgttattcagaatcctggaagcctactgatactgaaggtaagaagcagtatgacaggg

SEQ ID NO: 806508 - DNA, 145 bp, Homo sapiens
ccgccgccatgtcggcgcaggcccagatgcgcgcgatgctggaccagttgatgggcacctcccgggacggttaaccagcttcgtggcatcctcaagcttctgcagctcctaaaagttcagaatgaagacgttcagcgagctgtgt

SEQ ID NO: 806509 - DNA, 100 bp, Homo sapiens
aggaagttagtgaatctatggattttagatatctgccagatgaaaaaggttcaatgttggatatcataaaatacattgtcaaccgaggagaacacaagaa

SEQ ID NO: 806510 - DNA, 99 bp, Homo sapiens
gaaaaatggaccaacttctttggcaagtggacattttactggctcaaccatcagtggcctatgtacataccacgccgggtctgccttcaggctgggaag

SEQ ID NO: 806511 - DNA, 117 bp, Homo sapiens
cagattgttgccagtcagctagaaagatgtaggcttggagcagaatcaccaagcatcgccagcaccagaaactgtcaactaagtgaagaagaccactggatttaccaggctattttg

SEQ ID NO: 806512 - DNA, 100 bp, Homo sapiens
gacgcacagctaagatgcccggacatcctggaagctgggaaatggtgaccattgtgaggtagatattttgttctaattttccagatgaggaagctgagac

SEQ ID NO: 806513 - DNA, 100 bp, Homo sapiens
actgctgtgggttcttttatactcaaggcaaatgaacttcttcagctcgagaattacaagctcgggtactaaaacgtgttcagatggaacagccagatgc

SEQ ID NO: 806514 - DNA, 100 bp, Homo sapiens
gaatgatcctggaatccaggaatgctatgatagacgacgagaatatcaattatctgactctaccaaatagtagcctttccagtaaatatatgactcaggg

SEQ ID NO: 806515 - DNA, 99 bp, Homo sapiens
atgaccttaagggaggtgtagctggtggtagtatcctaaaaggagtattaaagctgctggaacccaatgtgaatattggactggcggagccttgggaag

SEQ ID NO: 806516 - DNA, 109 bp, Homo sapiens
gtgaactgagaagaatcatcacagacttcctgatgccgctcacacgagaacagtttcaggacgtgttggctcagatggactgccatggtggcataagtggcaccattta

SEQ ID NO: 806517 - DNA, 98 bp, Homo sapiens
accgaacagaaacccctcctcccctagcttcactcaatgttagtaagagctgcctggagttcagcctcagaatccaggagttcattgaactcatccgg

SEQ ID NO: 806518 - DNA, 100 bp, Homo sapiens
cggcagtgaccgtgtgtcagaacaatcttgaatcatgaagctactaaccagagccggctctttctcggacatcaacctggagaaagactggaagctggtc

SEQ ID NO: 806519 - DNA, 100 bp, Homo sapiens
gaaacccttgctgtaaattatgagaaagaagaagaattcctcactaatgagctctccagaaaattgatgcagaatgtggcagatcagattgcatttcaag

SEQ ID NO: 806520 - DNA, 98 bp, Homo sapiens
ggatggccccaggtgtaagcgcagaaagcaggcgaacccgcggcgcaataacgattatctcaactttggtctcctgggaccactcgttgctgacagtc

SEQ ID NO: 806521 - DNA, 99 bp, Homo sapiens
agaagaccagtgccaaccctgagactctgctgggggagatggaggcgaagacaagagagctcattgccctcgagcatgttccaaactcggttcgcttgt

SEQ ID NO: 806522 - DNA, 100 bp, Homo sapiens
aaaaactggagagcttcatcaaaaatagtgatagctttgataaatcacaaaatttgtccaggatagacatagagctagaagaaacagacttcgtaaagat

SEQ ID NO: 806523 - DNA, 98 bp, Homo sapiens
ccacgggtggttcgtcatgattgcaactgggtgggtcaaagccaaaattgcctggaaaagagcagtgagaggagtccgggagatgtgtgatgcatgtg

SEQ ID NO: 806524 - DNA, 100 bp, Homo sapiens
tgttaaggattccaagtaactcttatttgaagttccacctggtgccaagcatcaacaccatgagtggcagtcaggagctgcagtggatggtacagcctca

SEQ ID NO: 806525 - DNA, 100 bp, Homo sapiens
caaggaggccttccagctgtttgaccgaacaggtcctgcaaccctggttccagtctggcaagcattgtagacctggctgctgaagactgacggggcccag

SEQ ID NO: 806526 - DNA, 100 bp, Homo sapiens
tgctctgatgacggcactgttagaatctgggactttcttcgttgccatgaggaaagaattctccgagggaggtggggaagacagggctccagctaccaca

SEQ ID NO: 806527 - DNA, 100 bp, Homo sapiens
ctggacccctcccaggagggacccacagggctgaaggaagctgccttgtacccacatctcccgccaggaggataagatcaatgccctcattaaagcagcc

SEQ ID NO: 806528 - DNA, 98 bp, Homo sapiens
gcgactcaggctccggcgtctgcgcttccccatggggctggcctgcggcgcctgggcgctctgagaatgtaaaaagggcagctctctggcatgttcct

SEQ ID NO: 806529 - DNA, 117 bp, Homo sapiens
tgggcagcagcatcggcatgctctatctgtactgccggcacctcaaccagatgaggaagtacaactttgagagactaatagacaagtcacgagttacctgtgtcaaatgggttcccg

SEQ ID NO: 806530 - DNA, 99 bp, Homo sapiens
gggaaccgagtacagcgtcgggcgggggacagctcagtgttgctctcttgccattcgtggatgagcgaaggctacgagctgccctagaagaggtatacc

SEQ ID NO: 806531 - DNA, 100 bp, Homo sapiens
aagacatttcttcggcattctgcaacagggacgagatctactgccagatcagcaagcagctgacccacaacccctccaagagcagctatgcccggggctg

SEQ ID NO: 806532 - DNA, 100 bp, Homo sapiens
gccaaccccttcgtcatccgccactcagagcaaggacagtgattgttcatggatttacccttggagaaaagggagaaaagatgtccaagtctcttgggaa

SEQ ID NO: 806533 - DNA, 100 bp, Homo sapiens
tgatattattacagcttcatatgcaccagaaggagatgaaggtctgccatgtgaatctggaggggcagccgttctactccaagaaggacagacccctgtg

SEQ ID NO: 806534 - DNA, 99 bp, Homo sapiens
aaaaagcagccggtagacttaggtctgttagaggaagacgacgagtttgaagagttccctgccgaaggagtctccccaggacagtgctatcacccggga

SEQ ID NO: 806535 - DNA, 98 bp, Homo sapiens
cgacagcattatccaacggctgctggaagttacagccaagttctacttctgaatctatggatcaactactaaacaaaaatagagagggagaaaaatca

SEQ ID NO: 806536 - DNA, 100 bp, Homo sapiens
gagctcagacctgccaatttaccagagataattgataacaccctgtaacagctgacggagcgtgctttggacaccatgaattttgatgttataaagggca

SEQ ID NO: 806537 - DNA, 99 bp, Homo sapiens
atgaacccaacctagtgggtgtaatacatcatgaactgcagggtgacttcatggtcatgacgattttcttcaatgtgagcaggcggtttggctatgttg

SEQ ID NO: 806538 - DNA, 105 bp, Homo sapiens
gcaccgggatcgtgaccgagaccgtgaccgagagcgtgaccgagagcgcgaatatcgtcatcgttagaagaatccacattcatctcaatggaaggatcctgcctt

SEQ ID NO: 806539 - DNA, 100 bp, Homo sapiens
tgaagacagggacagtggcattgctcgatcagcttcctgcagatttcacaaaactgcatcttactgacagtctccacccacaggtgacccacgtttcttc

SEQ ID NO: 806540 - DNA, 100 bp, Homo sapiens
acctaagtgccctcaaaggatatctgtatgcagttggtgggcgaaatgcagcaggtgaactgcctagatgaggaagaggagcgaaggaaaaggcgccggg

SEQ ID NO: 806541 - DNA, 100 bp, Homo sapiens
actgaagaaaatgagaagccgcatggatgaaaagacacagcattgttggttttgccatgtactattttacctatgacccgtggattggcaagttattgta

SEQ ID NO: 806542 - DNA, 100 bp, Homo sapiens
aaactctaaaaagtaatgggatgaataaaattggactcagagtttccattgacactgatatgggatagctgggagtatggccaccctgctccacgatgcg

SEQ ID NO: 806543 - DNA, 100 bp, Homo sapiens
atgcctatgataactttggcgtgctgggcctggacctctggcagacagcacccaagaaaacctcatttggctcgctgaaggatgaagaccggattttcac

SEQ ID NO: 806544 - DNA, 50 bp, Homo sapiens
ccaggaggaacgtcaaaaattgattgttgcctgccctgatgtgcttcctc

SEQ ID NO: 806545 - DNA, 99 bp, Homo sapiens
ccccatggcagatacgaccccgaacggcccccaaggggcgggcgctgtggggcgacctatctactgctcttgaggtcgccattgactgctatgaaaagt

SEQ ID NO: 806546 - DNA, 100 bp, Homo sapiens
tgcgccgagctgcacgtcctcgaacgcgaggccaacagccccgagttttaagttgaatgtagacagtcattgtgctctcaaggaagctgtggaggaggaa

SEQ ID NO: 806547 - DNA, 100 bp, Homo sapiens
cagattggagcatttgtgttgatgaagatgaaagagactgcagggtgctgccccacgtcccccaccaaagcccatgtaaggagctgagttcttaaagact

SEQ ID NO: 806548 - DNA, 99 bp, Homo sapiens
gaccgtgcgctgaccctgactcactccagggcagcttgtgcagctggaagagaaagggcagggttcagtgccctggtcagtatatggtgtctacatcca

SEQ ID NO: 806549 - DNA, 100 bp, Homo sapiens
ccgttcatccagacgactcgcgatacacaatctctttgttgggcagctaaagagctcgctgacgtgtacagattgtggttactgttctacggtcttcgac

SEQ ID NO: 806550 - DNA, 98 bp, Homo sapiens
cggctgaggtgctcatggtggaggtagagaacgttgtccacgaggacttccaggtcacggaggaggtgaaagtctgctcaccaggtggccagataccg

SEQ ID NO: 806551 - DNA, 100 bp, Homo sapiens
gcataagagctgaaacttcagagcaagttttcattgggcaaaatggggcttcacaggctgctcaagaagccgagatcaatgccagaaaagccaaaaactc

SEQ ID NO: 806552 - DNA, 98 bp, Homo sapiens
ctgtctctggaggtgcgaaaacgtagacgacggagtagcagattgagggcaatgaggccaaaatacccaggttatggctcatagttcaccccagagca

SEQ ID NO: 806553 - DNA, 100 bp, Homo sapiens
aatgagaagagacacatgaggctttcgagccatgagcccaggaaggagaaaactggttgtcctggatgtttgaaaagttggtcgttgtcatggtgtgtta

SEQ ID NO: 806554 - DNA, 100 bp, Homo sapiens
tttgacgacactgatggtttgcgaggaagaaaggacccggtttcaggagctgctggccagtccggcctacagagccagccccctggtggccatcgggcag

SEQ ID NO: 806555 - DNA, 100 bp, Homo sapiens
ttttgatccttttgagaaataaagatctgaaagaaatggcataatcttaaaacttgactacatgaggaaataattgacttttataacttcatgtcccctt

SEQ ID NO: 806556 - DNA, 100 bp, Homo sapiens
agaagaagaagccaatgatgtatggaaagcagcagagtttctacaaatgctagaagctatcaaagcccttgaagtcagaattctgcttggtcagaatcgt

SEQ ID NO: 806557 - DNA, 100 bp, Homo sapiens
ccggaggaggatcttctgcggattgttggaatctaccgtgaagtaacatctggaactctgaggattggtgctgttagtgcaccgatctataatgcacatg

SEQ ID NO: 806558 - DNA, 100 bp, Homo sapiens
cttcgtgaacatctagcacagaaaccagtatttctccccagaacgagcgacgtgacacaagaggtcccaagggagcaaacctgaaagccagagcctcctg

SEQ ID NO: 806559 - DNA, 100 bp, Homo sapiens
caataggaggcaaaatgttggataaatatatctatggagcacagagccagcccctgggcaacaaagtggaaatggagattgtgagcatgttggaaaaaaa

SEQ ID NO: 806560 - DNA, 102 bp, Homo sapiens
agcataatactcaccctactattgagattttcagactgtgattgacagaaggtaactgcaactgcccaaagtgcgaccttggataaggaaggatgtctgtat

SEQ ID NO: 806561 - DNA, 51 bp, Homo sapiens
gcatgccgctcaccgtagacgaggactcgctcagcagcagcctgaaaactt

SEQ ID NO: 806562 - DNA, 100 bp, Homo sapiens
agctctttgggaagtggagcaccgatgatgtgcagatcaatgacatttccctgcagatcaagactggcgccccctgccgctcggagcgtctggccaaata

SEQ ID NO: 806563 - DNA, 100 bp, Homo sapiens
atgtattggttattctaacagacatgagttcttatgctgaagcacttcgagaggctaccggctctctgaccagttccacgacatcctcattcgaaagttt

SEQ ID NO: 806564 - DNA, 100 bp, Homo sapiens
actggtgtgagcacatggcatgatccaagagtgcccaggaagagagaagggcacagttacctaagtatcaacgtaatcttcctcggccaggacaggcccc

SEQ ID NO: 806565 - DNA, 100 bp, Homo sapiens
cacaaagcacaacgatgatgaacagtatgcttgggagtcttctgctggaggttccttcactgtgcgtgctgaccatgacttcacagagaatgcagttgtc

SEQ ID NO: 806566 - DNA, 98 bp, Homo sapiens
gttcgattcactaatgtcccagaaaggacacaaatagatgtaggcagaatacctttacagaggttaaaattggtatggctagccatcctccaataccc

SEQ ID NO: 806567 - DNA, 100 bp, Homo sapiens
aggcaggagcagatgtgaataaaactgaccatagccagagaacagccctccatcttgcagcccagaaggttatcaatactctggctgaccatcatcatcg

SEQ ID NO: 806568 - DNA, 99 bp, Homo sapiens
tgcgtttgtcactttttgtacaaaagaagcagctcaggaggctgttaaactgcattatgccagtacatacaggcttctaaagccagggatggtgccagc

SEQ ID NO: 806569 - DNA, 100 bp, Homo sapiens
cagagcgaccttaacggattagcaccttaacggattagcaccttaacggattagcgtggcaaggtatgagcagcagcgggacaatcttgcccaacagtca

SEQ ID NO: 806570 - DNA, 100 bp, Homo sapiens
gcggctgcaggactgggcacagcatgagatccaaaggcagggcaaggaaactggccacaaaaatgcactcggtgatggaaagagagccactattctgaag

SEQ ID NO: 806571 - DNA, 98 bp, Homo sapiens
cttcgggagaggatatgtagcgaggaggaacgcgctaaggcaaagcacctgatgtattgctgtccttgaatattagcccatttgaaaacgcctgggaa

SEQ ID NO: 806572 - DNA, 100 bp, Homo sapiens
tttaggcctgaaggaattctcagtcaaagagcgtactgagcgctttgggcagggaggtgcggggcctgtgggtggacagggtcctagaggaatggggcct

SEQ ID NO: 806573 - DNA, 100 bp, Homo sapiens
agctggaggaggccagctctacaggcggttcatcatgcctagtggcgtataagaagaccccgccaccggtccctccacgcaccacttcaaagccgttcat

SEQ ID NO: 806574 - DNA, 100 bp, Homo sapiens
taggtccagaagtgtccaaaccacaagttctcaaaactctctgaaaaatggctccctccgagttaagcaaaatgatgcttcaacacccaggccaggtctc

SEQ ID NO: 806575 - DNA, 100 bp, Homo sapiens
gtctctaccagtgggactttgccagttatgatattctcagcggggatctgatgagcttctttcttctggcatcattaacggaccttttaccatgaatagt

SEQ ID NO: 806576 - DNA, 115 bp, Homo sapiens
acgtgttcaatacacctcccacctgtcctcaggcatatcaaaggtatgagcagcagcgggacaatcttgcccaacagtcattcaacatggaacaagccaattataccatccagtc

SEQ ID NO: 806577 - DNA, 99 bp, Homo sapiens
gaaggaacacatacccgggacactacggcaaaaatctccagccctacagagactgagcggtgcatcgagtccctgattgctgtcttccagaagtatgct

SEQ ID NO: 806578 - DNA, 100 bp, Homo sapiens
aaacttcaacagaatgtggcaaccagggaggtggggaagacagggctccagctaccacaggacgggctctgggtatagccgttccagtcagggacagccg

SEQ ID NO: 806579 - DNA, 100 bp, Homo sapiens
ccaacctagtgggtgtaatacatcatgaactgcagggagaaaatgcagaagtctccatggacgtttccctggcttaccgtgatgacgcgtttgctgagtg

SEQ ID NO: 806580 - DNA, 100 bp, Homo sapiens
ttctgttgtcctgacttctttccaggtgatgtcaagagtttttctaatatgggcagtaacacatagcgtcaaagagcctattctgcaaacttggagttct

SEQ ID NO: 806581 - DNA, 100 bp, Homo sapiens
cttctgaacgtttccaagagaatagttcggatcattcaggatctgtctggctccattgatgacctccccacgggaacggaagcaactttgagctcagcag

SEQ ID NO: 806582 - DNA, 100 bp, Homo sapiens
ccactaaaggatcaacgtaacgtgagcatgaggttttccaatcagtttctccacagacactacccaaagcagtccttcactacagtggcagacagacctg

SEQ ID NO: 806583 - DNA, 98 bp, Homo sapiens
ccagcttggcgtcctgagaaatggctgactgtgctgtcctgattgttgctgctggtgttggtgaatttgaagctggtatctccaagaatgggcagacc

SEQ ID NO: 806584 - DNA, 98 bp, Homo sapiens
gatttcttctctgtgtagcaaggttcctgatgttattagcagcataaggcaattatctaaagcggccatgaaagaggatgccaaacccagcaaagata

SEQ ID NO: 806585 - DNA, 100 bp, Homo sapiens
gcagaaggacttgacgactaccgctgcacggcttgtccacggggatatgaaggccagtactgtgaaagggaacctccacaaggagctcattttctttcca

SEQ ID NO: 806586 - DNA, 101 bp, Homo sapiens
tgctgctactgctggcatcatttacaggggttcaactagatatagcttcacaatctctggatcaagaaattttattaaaagttaaaactgaaattgaagaa

SEQ ID NO: 806587 - DNA, 100 bp, Homo sapiens
aggagagatttatacaaccagtgttaccttggacagagaggatatcagcattgcttatggggagcacctgatgcaggagcacatgtatgagccagcgggg

SEQ ID NO: 806588 - DNA, 98 bp, Homo sapiens
caaactgaccaagcattgaaaaggcaagccaaattagagctgagagttgctgtagcaaaagtggaagagttaactaatgtgactgaagatctgcaggg

SEQ ID NO: 806589 - DNA, 134 bp, Homo sapiens
agaaggatatcgacgtcgtgatccagaagtccagagctgaggactgcctgtttgcagcaacatggccaatctttcctaagctgctcagcttacaagaaaaggaatcatactgctaagaattcaaacttcagcag

SEQ ID NO: 806590 - DNA, 100 bp, Homo sapiens
tgggattgacccaactccggagcagtggaagcagattgcttctgtcatgaaggacttcatagacctcacgttgtcgaagactcaacgaaagactccaacc

SEQ ID NO: 806591 - DNA, 98 bp, Homo sapiens
accgtgaccgagagcgtgaccgagagcgcgaatatcgtcatcgttagaagcctgcagaattttcttcctgccccttgaactctgatgaagaagtgaat

SEQ ID NO: 806592 - DNA, 103 bp, Homo sapiens
gcaaagaaaagagccctacaatgtgaagatacataagatcgtagccagacccccagtcttactactttgaccgcgatgatgtggctttgaagaactttgccaa

SEQ ID NO: 806593 - DNA, 99 bp, Homo sapiens
gcctcttgagtgctttggacgatcttcagctggccaacagcaccatcattgcatttacctcggatcatgacatatgtagagtgtgtcggtcagaaggaa

SEQ ID NO: 806594 - DNA, 100 bp, Homo sapiens
gcaacttgacaagagaaatgataaaacatttagaacgatgtgaacatcgaatcatggaatcccttgcatggctctcagtgtttgtggccagtcctcacaa

SEQ ID NO: 806595 - DNA, 100 bp, Homo sapiens
ctttgagactagttcaggccttccagttcactgacaaacatggggaagatgattcctgccagatttgccggggtgctgcttgctctggccctcattttgc

SEQ ID NO: 806596 - DNA, 100 bp, Homo sapiens
catcaaagttatggatgtcactgagtactttgccagacgtttatcaaaatggggctgctgtcttctttcacttgtagtgacgagtttagctcattgagac

SEQ ID NO: 806597 - DNA, 100 bp, Homo sapiens
ctttggaaacttatgaattctggccaatgagaacagcctgctgagtgcgcagctcaagggcttccccctgttcctgcactcaaacctgggcctgaaggac

SEQ ID NO: 806598 - DNA, 98 bp, Homo sapiens
tcacatcgtggagatggacaggagacctggaatcattgttgaaaacattcagaactctcagaacttaatgtgaaagtgatggaggccctttccttata

SEQ ID NO: 806599 - DNA, 100 bp, Homo sapiens
atatcagctcaccccttatgagatgttaatggatgacattcgctgcaaaagatacaccttgcgaaaagtgatgtgcaaattgggaatcgtgaaattcata

SEQ ID NO: 806600 - DNA, 100 bp, Homo sapiens
agagaatgtgtcagccgatgcaccgagtccagcccaggaaaatggagaggtcggtgagctggtaaaggttacgaagattaatgtgagtggtcagtgggaa

SEQ ID NO: 806601 - DNA, 100 bp, Homo sapiens
ccatgtcagccttcccagtagctggaactacaggacgccaagagtgccgaggatgaggctccttccagacacttgggaaagcaccagccccgctcagcac

SEQ ID NO: 806602 - DNA, 98 bp, Homo sapiens
gtacaggcagaaaacgagaggctcaccgcagtcgtgcaggatctgaaggaggatccactagttcctggactatgggaactgatgactcgcccaatgtc

SEQ ID NO: 806603 - DNA, 100 bp, Homo sapiens
ttccccacgcaaccccagatccatttacactttacactgaccctctggtgggcagcatcgccacacagtacatgaccaacagagcagagcatgaccggat

SEQ ID NO: 806604 - DNA, 101 bp, Homo sapiens
gccgttgctgcgggggattgtgggagtctccgcgtcccgctcgctgggagagagaaggaagaggcccagcagaagggactcgctgagccaccccccgcccc

SEQ ID NO: 806605 - DNA, 98 bp, Homo sapiens
tcccgtcagcttccatgtggtggtgtatgtgcgcttcccagggatcttgagagtgaagatctcgaaggatttcatagaggaagttagaagatctgagc

SEQ ID NO: 806606 - DNA, 98 bp, Homo sapiens
ttctgagaaggacagagccaatctactcctcctgggttatgctcaaggaagactagagattcaagatggaaaaggtgatgtaaccattacaaatgatg

SEQ ID NO: 806607 - DNA, 100 bp, Homo sapiens
cccctgtattctcctccgaaccccttcatgcccaaatcccggaaactccagcgtgtctccagccgtgggaaatcgtggaacacatggtccagcactttaa

SEQ ID NO: 806608 - DNA, 100 bp, Homo sapiens
cagggcctgggccgccgctgctacctgcagcgccgtgtggcacgacacaaaaatcagatcattcccagtgaccccttctgggtgccaactactgaggagg

SEQ ID NO: 806609 - DNA, 98 bp, Homo sapiens
aggagccgggcagcaatgtcaccatgagtgtggatgctgagtgtgtgcccatggtcagggaccttctcagcccgtgggtgctggctgccaagtcttcg

SEQ ID NO: 806610 - DNA, 100 bp, Homo sapiens
gaccaaaaggaagtattacctgcgggggtgaccattaaacaggagcagaacttggaccagacctacttggatgatggaaggaaaacaggcttcgttggct

SEQ ID NO: 806611 - DNA, 100 bp, Homo sapiens
aatgattgaatacgatcctgaaagaagattagattaaagagtctattgttggggaaatcagacgggaaattgtaagtggacttttggcagcagtatcttc

SEQ ID NO: 806612 - DNA, 98 bp, Homo sapiens
ggaactgtgtgtctagatgtaattaatcaaacttggacagctctctatggtaaccatgtgcgaccgaaaggccgtgatcaaaaatgcggacatgtcgg

SEQ ID NO: 806613 - DNA, 100 bp, Homo sapiens
ggaggacatgcgggagagagaatgagccagagggacacgctggtgcatctgtttgccggagggggccacctacagatgctcctgcagtggacacagcaga

SEQ ID NO: 806614 - DNA, 98 bp, Homo sapiens
gtaggcttcatgggttgttcagtcacttctaaaggagtcattcacctaaccaaggtttctgaaggattgtcattcttgcatagcagtgtgaaaatggt

SEQ ID NO: 806615 - DNA, 98 bp, Homo sapiens
aaggcatcgcatcttgtttagatatgctggtcctgaagatgatgctgccattaccttggctactgttggattgattcgaaatcttgccctttgtcccg

SEQ ID NO: 806616 - DNA, 100 bp, Homo sapiens
tcgtggtgaaggtccggggcttgccctggtcttgctcggccgatgaagtgcagaggtttttttctggattaaactgcaaatatctcatgaagctgctgcc

SEQ ID NO: 806617 - DNA, 101 bp, Homo sapiens
ggcgttcctggcttcaaaggagagaagtaaaattcctagttcatatggatgaattaaatattaccgttccatgttgatctgccactcagaaccagtttggg

SEQ ID NO: 806618 - DNA, 100 bp, Homo sapiens
gaatttttggctccaataaatgttgagccccatatgggggttggcaggcagcagagaggcccctttcaaggtgttcgggtaaagaactcagtgaaggaac

SEQ ID NO: 806619 - DNA, 99 bp, Homo sapiens
agcctggaacgcaaggaccggagggcgtgggctgggacgcccctaccttggtctttcaggataccaggtgatcagcactccaacagatttttttatggt

SEQ ID NO: 806620 - DNA, 119 bp, Homo sapiens
gagcctggaactggacgaccaggacacgtgcgggatagacggggacaatgaggaggagacggagcacgccaaagggattaagcatgaaaatattgttgccctggaagacatttatgaaa

SEQ ID NO: 806621 - DNA, 98 bp, Homo sapiens
gttttatagactagcagatctctttgggtggtctcagcttatctacaatcatatcacagccagaagcggactcctagaagaggggagcagcaaggatg

SEQ ID NO: 806622 - DNA, 100 bp, Homo sapiens
aatttggattctgaagttgcctggggaaaggatgacaggtattttctaagtgggtctttggatggaaagctccgcctttggaacatacctgacaaaaaag

SEQ ID NO: 806623 - DNA, 98 bp, Homo sapiens
ctggctgctatcagagaagaagggtgtttggggtgtgttttacaaaggagtctactcttcatcttgtgttgagacttcgtggtggtgctaagaaaagg

SEQ ID NO: 806624 - DNA, 100 bp, Homo sapiens
ctacactccctaccaggagcatgtggccttacacgcccccatcagggcagagttaccagggcaggttatctccatggcagcttctactctggcaaacttg

SEQ ID NO: 806625 - DNA, 100 bp, Homo sapiens
gctacaagacaacaccctgatctggcatggacatatccctttcagctccctgcaaaaacagaaccaataaaagaacgagcagttcaaccagcacccacca

SEQ ID NO: 806626 - DNA, 101 bp, Homo sapiens
aagtacattctcaggtggagacctgattccggagtttgaatccacctttgacaattgtccgaaagacgtttgaatcaacagaaaacccagatgacttcttg

SEQ ID NO: 806627 - DNA, 100 bp, Homo sapiens
agcgcagaaagcaggcgaacccgcggcgcaataacggtttcagaagcaggcaacaggaacaagatgtgaactgtttctcttctgcagaaaaagaggctct

SEQ ID NO: 806628 - DNA, 98 bp, Homo sapiens
gcagctttgtagttttgcgtgtgttgaaagtacaattctattgcacatcaatgatatcatcccagagtaaagccaatcccagctgaaggaatcaagtc

SEQ ID NO: 806629 - DNA, 100 bp, Homo sapiens
ttctccgcggacagctagggagagtgtcctggtcaggatggctaaaggtgaccccaagaaaccaaagggcaagatgtccgcttatgccttctttgtgcag

SEQ ID NO: 806630 - DNA, 100 bp, Homo sapiens
gcgctccctccgccgccgccgccttgctgctgctcaaagctgctgccgccccttgggctaaaagccatggaattccatgaacacttgcacagcataggca

SEQ ID NO: 806631 - DNA, 100 bp, Homo sapiens
atgaagctgcttctgatttttataggaagggagttgatttactcctagaaggtgttcaagccagcagccagcttcgggtgtagcctattctcatccaact

SEQ ID NO: 806632 - DNA, 98 bp, Homo sapiens
ggggctggagaaacgactctgcgccgccgctgcctccatcctgggcaaacctgcggacgccctgtctcagcgggaccctcctcacaacaacttcttct

SEQ ID NO: 806633 - DNA, 100 bp, Homo sapiens
tccgctgccagcgacatgttcaaggtgcaattaaaaactagcatttctagtcagtatgtaattcggatgcagccgactaatagatgcctttctacactgg

SEQ ID NO: 806634 - DNA, 100 bp, Homo sapiens
gctgccgcagccaccatcccatcgggaagccattgtgaacagctgtgtgtttgttcatcagactcttcaccagaccagctcagctagtgagcaagaaaca

SEQ ID NO: 806635 - DNA, 100 bp, Homo sapiens
ccttatgagatgttaatggatgacattcgctgcaaaagatacaccttgcgaaaagtgatggacattggctccctggattatcaagagtttgtagttgaca

SEQ ID NO: 806636 - DNA, 98 bp, Homo sapiens
tacaagattgattgctgctgctacttctgtatgtgcattttctagaatcatgaaactttgtgaagaaaaatgtgaaacagatgaaatacagaagggag

SEQ ID NO: 806637 - DNA, 98 bp, Homo sapiens
gggaagagagaccttagaaaggatcaggactggcggtgtgtgctgtatttatggagtttaaagattaatcatcccaaaacattgtttctgcttcgggg

SEQ ID NO: 806638 - DNA, 100 bp, Homo sapiens
gattcaatgccatggaagatgcccagaccctgaggaaggccatgaaagggctcgccctggtacctgacagtgtaaagaaggagctcctacaaagaataag

SEQ ID NO: 806639 - DNA, 98 bp, Homo sapiens
agttcccggctcccaggtttattctcccatagcatgtggtttctgagtcccttcaacatgatcctgggaggaatcgtggtggtgctggtgttcacagg

SEQ ID NO: 806640 - DNA, 100 bp, Homo sapiens
gcaggaggccaccgctgcagcgcgggccccgcagaggaaggaagccggcgggcgggtctttcccagggaactccgatgaagtgttccaacaaaatgagcg

SEQ ID NO: 806641 - DNA, 100 bp, Homo sapiens
tgaagcaaagtccaagcattgtatcacttcatctgcaaatatttcaataagtacccaaaaggttctcagaggcactgtgactgacttccctggatttgat

SEQ ID NO: 806642 - DNA, 100 bp, Homo sapiens
aagtcgtgttctgatcactactgacttgttgtgtgctgctctggttggtgaagaccagcctctttgcccagatcttcctgaacttgatctttctgaacta

SEQ ID NO: 806643 - DNA, 100 bp, Homo sapiens
gatttccaagagttgcctgcttcttcaaaaacaagtaactcccagcatggaaacagatgttctcaaatagtgatgaagctgtaatcaataaaaaacttcc

SEQ ID NO: 806644 - DNA, 98 bp, Homo sapiens
tgcccgctggcccctcgcgcgtgaggatctatctcagagtccctgtgaagcaggaagagtgagggcaggttcactgcagctcagcagcatgtctgcag

SEQ ID NO: 806645 - DNA, 100 bp, Homo sapiens
ggagaattacaggaatcttctctcattgggattgtcagtggcttcgccccgaggagagctgactgccctgggctgctgcctccggcagagctgagccaaa

SEQ ID NO: 806646 - DNA, 100 bp, Homo sapiens
ggggaacaatgaggcctacgcagagctcatcgtccttggttttgcagccactcttgatgatgacaaaccttggtactccatttttcccattgacaatgag

SEQ ID NO: 806647 - DNA, 100 bp, Homo sapiens
aaaagatgatgagaaataaggacaaaagccaagaggaggacagttcgctacacagcaatgcatcgagctgcaggacaagttcgagcatcttaaaatgatt

SEQ ID NO: 806648 - DNA, 98 bp, Homo sapiens
gcgcccccagcctcctcgtcgccctgggtatggcgttgacggtggatgtggccgggccagcgccctggggcttccgtatcacagggggcagggatttc

SEQ ID NO: 806649 - DNA, 100 bp, Homo sapiens
cgccacctgggaggtggaccggagctcgtccagctgcgtgcctagaccctgcacttgatggaccagctggcaccacccagatcaataaactggcttattt

SEQ ID NO: 806650 - DNA, 100 bp, Homo sapiens
accggagaccccgaaaacggaagcgcagggagaaggaagaggtgtttgaaaaggttccaactatgggagcccacgccccgcccatgccaacatgaatgcc

SEQ ID NO: 806651 - DNA, 100 bp, Homo sapiens
acagaatagacctgaagacaaaaatccagaagtacaagcagtctggtctcctctgagcctccggcctccataagacccaaaacagatgacacctcttccc

SEQ ID NO: 806652 - DNA, 100 bp, Homo sapiens
tttgcacttttgattgtgtattatggataccaaggaagagaagaaggaacggaaacaaagttattttgctcgatgcagcagttgaataacatggatgaag

SEQ ID NO: 806653 - DNA, 100 bp, Homo sapiens
aaacccacaagtttcggttgcacgtcacagctctggattaccttgcaccttatgccaagcccaattttgcccatggcctggcttctctccagatacccca

SEQ ID NO: 806654 - DNA, 100 bp, Homo sapiens
agtgacagtggggaccctgtgctgctgcgcctcttctaccaagtggctgagtacaccttccgccagatgctgtgtctgattggtctcctatgcatgaagc

SEQ ID NO: 806655 - DNA, 98 bp, Homo sapiens
aagtttctgcggaggtacttcattctggacacccaggctaactgcctcctctggtatatggacaacccccagcacctgtggaatcctctcaagaggaa

SEQ ID NO: 806656 - DNA, 98 bp, Homo sapiens
cgcggggagccagcgagcgcgccttcggcattggccgccgcgatgtcagctcagtgctgtgcgggccagatcatcaatgctgtggtactgttgatttt

SEQ ID NO: 806657 - DNA, 105 bp, Homo sapiens
tggaatcgtgcgaagtgcactccatcagatcaccttgcttcgagagctgtgcccaggagtgaacaaccagccctacctctgtgagagtggtcactgctgcgggga

SEQ ID NO: 806658 - DNA, 100 bp, Homo sapiens
ctccctcctgcagggccagattggcaacgatgtggacgagtgctcactagcagaaaaaacctgtgtgaggaaaaacgaaaactgctacaatactccaggg

SEQ ID NO: 806659 - DNA, 100 bp, Homo sapiens
gtgaccccaaaagagagaccattgtccagctcattgatgacttcaggatctcaggagtcaatggagtccatgtatgtccctgggaagctgcatgatgtgg

SEQ ID NO: 806660 - DNA, 99 bp, Homo sapiens
aggaaattctgttctactcgtcacaaatctcaatcctgatctgtccgcaggcttgtccaaaaggaaacatcggaatgaccacttaacatctacaacttc

SEQ ID NO: 806661 - DNA, 99 bp, Homo sapiens
tctgccggcccctgttttagctgaaatatgaaagttactgtggcccatgtcctaaaaactggatatgttacaaaaataactgctaccaattttttgatg

SEQ ID NO: 806662 - DNA, 98 bp, Homo sapiens
agaagagctctgtgtatcaaaatggagtgacccacaagtcttttatggctgcagcttcgattgccaatattgtaaaaagttctcttggtccagttggc

SEQ ID NO: 806663 - DNA, 100 bp, Homo sapiens
caaggccatgtccggacccacactggcaaagggtgtgtatgaaaaagttggagaagctacagagactgctctcacttgcctagtagagaagatgaatgta

SEQ ID NO: 806664 - DNA, 98 bp, Homo sapiens
gccggtcgaccccagccagcgcagcgacggggcgctgcctggcccaggcgcacacggaagtgcatcagcgagagctttctaactgtcaaaggtgctgc

SEQ ID NO: 806665 - DNA, 98 bp, Homo sapiens
tgagaaatatggaaaggcaggcgaagtcttcattcataaggataaaggatttggctttatccgcttgggtggctttgagtataagcgcgctatcgtgg

SEQ ID NO: 806666 - DNA, 99 bp, Homo sapiens
agatctacatctgcaaacaatggacggagattcttcactttacagtctcagagaaagatgtcacatctgctaaagcactgtatgaacatttgactgcaa

SEQ ID NO: 806667 - DNA, 98 bp, Homo sapiens
cctccgttgtgagtgtgaaggggcggctaatgtggcttcacctggaaggtttcaagtgccccatttgctccaagtctgtggcttctgacgagatggaa

SEQ ID NO: 806668 - DNA, 75 bp, Homo sapiens
gctagtaacgtcatggaggatgaacgacagcctggcacctgtgtttgctctgtttgtaccattttactgctccat

SEQ ID NO: 806669 - DNA, 100 bp, Homo sapiens
gaagtaagaggatttatagatcagaatctcagtccaacaaaagaatactacaacacatctttgcaggattctttgcaaattctgccattcctggatctcc

SEQ ID NO: 806670 - DNA, 100 bp, Homo sapiens
caacagaagctatgcttggcagcagaaggatttggcaacagactttgtttcttggagtccacttccaattccaaggtgctgctacccccgtatgatgatg

SEQ ID NO: 806671 - DNA, 100 bp, Homo sapiens
cacgaaagctttcctaggccaaaaagagctgtattgtctgaacttgcattgtgattggcctgtagagttgctgagagggctcgaggggtgggctggtatc

SEQ ID NO: 806672 - DNA, 148 bp, Homo sapiens
gggcttgaagctcaagaagatgaggacccatcctataagtggagagaggaacacagactctcagcaactcagcagagaggagatgttaaagtaacccatcttgcaggacgacattgaagattggtcttctgttgatctaagatgatta

SEQ ID NO: 806673 - DNA, 100 bp, Homo sapiens
cagcttctttttaacaatgcaaagtcctattataaggtttctaagcatgaattgaggaacagaagaagcagagcagatgatcggagcagcatttgtttct

SEQ ID NO: 806674 - DNA, 98 bp, Homo sapiens
gatttctgcacttccaactgaggcaccacctacctatgatgccgtggtacagatggagtaccttgacatggtggtgaatgaaacactcagattattcc

SEQ ID NO: 806675 - DNA, 100 bp, Homo sapiens
ctgaaagcatggttgatgtcagataaaacagaccatgaggcaagaaagatgtatgatgatgctattgaggtccacctaatcatcctgtgaaagtggtttc

SEQ ID NO: 806676 - DNA, 100 bp, Homo sapiens
gtcttctatcgctcccatcgtcatctttgcatccaaccgaggcaactgtgtcatcagcatcaacaaagagagcattgtggatgtagaaggtgttgtgaga

SEQ ID NO: 806677 - DNA, 100 bp, Homo sapiens
gaaatatcccgcctcatttacagtgggagacagacagtctagcagtgcttccttggagaccctgttagcacttcttcaggcagaaggggccaagattgag

SEQ ID NO: 806678 - DNA, 98 bp, Homo sapiens
ccagggctctatcaaggggctggtgtactccagcaacttccaggtgaatccagtctggaaaaagtgtttggaagaacaaggcttgaagtttgttggcc

SEQ ID NO: 806679 - DNA, 100 bp, Homo sapiens
cctccttgccgccagtggcgggctccgttctccctcgaagcactccccccagctccatgaatggaaatcggctccgcagatggatgatgctgaccctgag

SEQ ID NO: 806680 - DNA, 100 bp, Homo sapiens
caggagctgatgggaaaaagatggttgcattactcattgagttaataaaggtatccatggagaacactgaaaactcagtggattcaaaatccattaaaaa

SEQ ID NO: 806681 - DNA, 100 bp, Homo sapiens
gagaagccttccgctattcagcagagagctattattccctgtattaaaggaacagatggagtcggataactgttcaggaggagatgatgactggacccat

SEQ ID NO: 806682 - DNA, 98 bp, Homo sapiens
tgtatgaacataatcttcagagaacagcctgcaatatgacctatggatcatttggtggtgtaaaagtggcagccgattaggaggcctggttacagtgt

SEQ ID NO: 806683 - DNA, 100 bp, Homo sapiens
gaaacaccagtaagacacgaaaggtcgggctgtgaagtttttgtttgagattctcagtagttttgataatgagcagcagaggttatttctccagtttgtg

SEQ ID NO: 806684 - DNA, 132 bp, Homo sapiens
tcattattggagcaaggaaaagagccctggatggtgaagaaggagggaacaagaggcccatgccctggtgaatcccagaccttgctggcagcagcagttgagagagaacgtgcagctacagaagaactcctt

SEQ ID NO: 806685 - DNA, 100 bp, Homo sapiens
aggaacttcagtctataataaagagatgtaaggggtagaagagccatccaaaaaacgagttatagaaggaaaaaacagttctgcagttgagcaagatcac

SEQ ID NO: 806686 - DNA, 100 bp, Homo sapiens
gaagtcagaaaacaaggtgtctgcaggaccaacctctcctctggatgctctaggccaccaccacctatcatgacagatggtgaagatgcggattacactc

SEQ ID NO: 806687 - DNA, 100 bp, Homo sapiens
ggaagccacctatagagagagaagaacaccggctcccattctggttaaaggtaacctgtgccgttgcactggatacaggcccataattgatgcatgcaag

SEQ ID NO: 806688 - DNA, 100 bp, Homo sapiens
caccgtgctggccccccgcttgccgcagccgcctcagaacccgaccaacatccagaacttccagctgcccccaggtccaccggcaacatggactcagagt

SEQ ID NO: 806689 - DNA, 98 bp, Homo sapiens
ctcacctccataccccggatttggaggttcgtacacgcctgaaaattctcataccgctcccctcactgctattccctgtattgaacactgatatacaa

SEQ ID NO: 806690 - DNA, 100 bp, Homo sapiens
gtgctggccacttgcttgggatcctttatcctggtcatcttctatttccaaagtatgttgcacccagagctacagagacttctgaagtggagagtctgcg

SEQ ID NO: 806691 - DNA, 135 bp, Homo sapiens
tctttttgttcaagataaagtgattttttgcctttgttgattaactggacaaattcagctgtgtcagcgtgttatgatgccgtcccgtaccaacctggctactggaatccccagtagtaaagtgaaatattcaag

SEQ ID NO: 806692 - DNA, 99 bp, Homo sapiens
ctgttcctaaaattcatggaagtagttttgtaacatctactgtcaagcgtcaccagtggctacctctacgtgaccatcatctacaacatctccgtcagc

SEQ ID NO: 806693 - DNA, 100 bp, Homo sapiens
gttggataaaaggaggacctctcgccaagggccccaatgagtggcacacagtctactatcaccgacaggctgctgatactttggctgtgaggcaaaaaag

SEQ ID NO: 806694 - DNA, 99 bp, Homo sapiens
cactctgaatgcactgaacacaggcccaagggatgcagacagtgatgaaaacgacaaaggtgaaaagaagaacaagggtacgtttgatggagataagct

SEQ ID NO: 806695 - DNA, 99 bp, Homo sapiens
gctgctgtgatgtggaggaagaagagctcaggaactgcaagcacatgttgaccagataactgaaatggcagcagtaatgaggaaagccattgaaattga

SEQ ID NO: 806696 - DNA, 99 bp, Homo sapiens
acagatgttactgtggttaggtttccagagatctattgggaaactgattataaccactcgggcaccatcgatgcccacgagatgaggacagccctcagg

SEQ ID NO: 806697 - DNA, 100 bp, Homo sapiens
gagggagtcaccactggacctccaaggaagccacgtgcagacatctacaaccttcgatctcctgacgagcaaagtgtttcatggatttcaaagctggagg

SEQ ID NO: 806698 - DNA, 100 bp, Homo sapiens
gcccagtgggaggtggagcgggcggagctgcaggtattgttgcagcatctggcagtgagactgaggatgaggacagcatggacattcccttggacctttc

SEQ ID NO: 806699 - DNA, 100 bp, Homo sapiens
tgggactcagcagccttggtgctcaggtgccagatgcaaagttcacgtgcaactccagggacctgctgggctgcttggcacaggagcacaacatcagcgc

SEQ ID NO: 806700 - DNA, 100 bp, Homo sapiens
gacatcaaggatgtggggcagatgctgatgggcaaactaggatgatggcttggaaaaaagtccaatgaaaaaaaaacagaagaagaaagagaacaaggag

SEQ ID NO: 806701 - DNA, 100 bp, Homo sapiens
atactacctttatttccaccatagaatgacagggagagagtttttctctcgtttcccagaactctatccttttcttctcaaacagttggaaactgtagcc

SEQ ID NO: 806702 - DNA, 100 bp, Homo sapiens
ctttcctgtgccatatgatttgcctccagaactgtatggaagtaaagtgtgtcccggcatggatatccggaacaacctcactaggttgcatgagctggag

SEQ ID NO: 806703 - DNA, 100 bp, Homo sapiens
agtttaagaaagcaaagagcaggttcttcatcttcaaaaatgaacagtttgagaacatcaccaccctgaagccagagactaacactgcaggactcagcag

SEQ ID NO: 806704 - DNA, 99 bp, Homo sapiens
tgaatttccatgtcaacatagtccagtaatccttcccctctaccaccggatatggctcctgggcagagttatcaaccccaatcagaatctgcttcctct

SEQ ID NO: 806705 - DNA, 98 bp, Homo sapiens
aaaacagttcattcatattcagcatgatatcatcaagttgaatcgaaaggaagggaagaagcagaattttccaagactaaatagaagactcctccagc

SEQ ID NO: 806706 - DNA, 100 bp, Homo sapiens
cagaaaatgcacggaactcattagcgattcggtggtggggagcggcagctggcagagagtcaacgcccagacggctgtgagatccccgagatatgccgtg

SEQ ID NO: 806707 - DNA, 98 bp, Homo sapiens
atcgccggctcggtggaggcggtggccaggcccggattgcatttctacaaggcgaaagaaaaggtcaagagaacctgaagaaggacttagtaagaaga

SEQ ID NO: 806708 - DNA, 98 bp, Homo sapiens
gagctctttgatggcaaaactggacatcagaagacagtggatctctctggacaaggcatgtcagagcgggagcgacaggtgatgaagaagctgaagga

SEQ ID NO: 806709 - DNA, 98 bp, Homo sapiens
agcattaaacctgaaccagaagatcgagagcctaactttgcaaccattggtctgcaggacatcactttagatgatgttgccagaggttccaccctctg

SEQ ID NO: 806710 - DNA, 99 bp, Homo sapiens
ggaaacctggagcggtcagagcagctcatctacatgcactggatgaacacggtggtgaattactgcggccccttcgagtatgaagtcggctactgcgag

SEQ ID NO: 806711 - DNA, 100 bp, Homo sapiens
tctgcatggtgttccacatcattgacttactgctttgtgagggaggaaataatgctggccatacagttgttgtggattctgtggaatatgattttcatct

SEQ ID NO: 806712 - DNA, 98 bp, Homo sapiens
ttagctaattaaaacatttttcagggacgtagccatccagaggttttggaaggtgacaatgaaatgtgaagaagttacatttctcaaacttgaaagtt

SEQ ID NO: 806713 - DNA, 99 bp, Homo sapiens
agacatttaataacaatggctcaaattgatcaagcagatatgccagcttactgcagagtgggtctgggcatctgctacgacatgcggtttgcagagctt

SEQ ID NO: 806714 - DNA, 100 bp, Homo sapiens
tcgcgatcctgggctaccggtctgtggatgagcgggaagttgttcagaaaaagaccttcacgaaatgggtgaactcgcacctggctcgagtgtcctgccg

SEQ ID NO: 806715 - DNA, 100 bp, Homo sapiens
ttctcagggtggagatgtcagcccttcagaaacagtattacaaaaaatgctgctcaaattccagtggctactccacaggtctctcctaacacagtgaaac

SEQ ID NO: 806716 - DNA, 126 bp, Homo sapiens
tttgaatgatcatgttggagagcaagatatgggtgaatgtgacgtgaatcacgctacactggcggagaacgggctcgctggtgctcaagaccgaatcggctgggcttttggcctaggattagaaag

SEQ ID NO: 806717 - DNA, 99 bp, Homo sapiens
ttttatccaacaatgttccttctgatgatgtggctggaggcaaagctggaaaggacagtgggaaggccaaggctaaggcagtatctcgctcacagagag

SEQ ID NO: 806718 - DNA, 99 bp, Homo sapiens
ctgcagccgccgagccggacgtgtccgcgaagatggcgggccgggaaatcatcgagttccccatcctaaagctaaatggccggaccatggagattgagt

SEQ ID NO: 806719 - DNA, 100 bp, Homo sapiens
aagtctttccaaaaggtcaaggttcacaagacttacagattccagtctgctgttagatgattattcatccaagttgagccccaaaccaaagagagccaag

SEQ ID NO: 806720 - DNA, 143 bp, Homo sapiens
tacattccaattcaagaggaggagaggggttgttttataaactgcctggccgaatcagccttttcacgctcaagaaccccaggctggagaagcccgtgctactctccgaatttcctaccaagatcccacgaggtgaactggac

SEQ ID NO: 806721 - DNA, 100 bp, Homo sapiens
actatggcaaattcacaaaaacttattccgacattcagagttgtttcctccatttgctaaaggaatagtgtttgattcactggatgaaagaaagataaaa

SEQ ID NO: 806722 - DNA, 100 bp, Homo sapiens
cggcggtggcagcggcggaaaccgaaggggagccatggcggctgacagtcgggaggagaaagatcactttgggaagcagtgacatccaacctgtatcaag

SEQ ID NO: 806723 - DNA, 100 bp, Homo sapiens
cctgcaccacaaggtgtacgatttgaccaaatttctggaagagataaataggatttaccaatccttggatgaagtgcttgggaagtctttaagtgccata

SEQ ID NO: 806724 - DNA, 128 bp, Homo sapiens
aatattttgcttggtacacaaaatggatctggtacaggaggatcaacgggacctgtttccacgggctcccttgctcagcagtatgcgcaccctaacgctaccctgcacccacatactccacaccctca

SEQ ID NO: 806725 - DNA, 100 bp, Homo sapiens
aaagagcataatccaactcagtatgaagagcggatgaggatacagaaggctggaggaaacgtcagggcgttgaagggcaagattaagaaggaaagctcca

SEQ ID NO: 806726 - DNA, 100 bp, Homo sapiens
gttccacgtgaagctcaccgacagtgccctgagggccttcgagagctaccgcgccagacagccttgaaaagatcttttgaggtcgaggaggtcgagacac

SEQ ID NO: 806727 - DNA, 100 bp, Homo sapiens
aagtacagtctacaaaaagacctgctagagccattattgcccccctgcaagtcctgggcaacctctttgtccacttctcaggcgttgcatctcagtcctg

SEQ ID NO: 806728 - DNA, 98 bp, Homo sapiens
aatatcttggctgctgtacatgacgtgcttaatgaaagtttctgtcacccaggctggagtacagtggcacgatcacagctcactgcaccctcaacttc

SEQ ID NO: 806729 - DNA, 100 bp, Homo sapiens
ctgggtgacacccgagtctcctggtttacccaaggtccagcctagcccctaggcaccatgtcggacagtgatctaggtgaggacgaaggcctcctctccc

SEQ ID NO: 806730 - DNA, 100 bp, Homo sapiens
cggcgcggtcggtcggcgcctgttctcgggctgtttggcgggtgcactacatcctccaggaggtggtgatgggtgggatggtgttggaaacaaacatgaa

SEQ ID NO: 806731 - DNA, 98 bp, Homo sapiens
tggaagagtgtgaagatgatgtgttctggacttggtgcctctttctgttatatgctttcctatttagttgggagaccagttgtatacaaatacctaac

SEQ ID NO: 806732 - DNA, 100 bp, Homo sapiens
gaagaaaggatgctcgaggatgctgtccaggtgggcggccgcgggcgcgatgcggcactgcagatgccagagacgcggaacaattgagcaagaacaaggt

SEQ ID NO: 806733 - DNA, 100 bp, Homo sapiens
gctgagcagagccctgcgatactattatgacaaggctgaccggttccctgatgtgttacctgcttctgctactgatccaaactgcagaacttctcattca

SEQ ID NO: 806734 - DNA, 100 bp, Homo sapiens
tttcggtcatctaaaggaggttttaaacagtataacaggagtggaaacaaaatgtcagtcagtgtgcatgagaaccgcaagtccagggccagcagcggct

SEQ ID NO: 806735 - DNA, 100 bp, Homo sapiens
ggtggatgactatgaacatgcagcaaagtacatgaagaacagtcaagtaaggttacctttgggaaatatcggctcatcaaattggggtctcaatttgcta

SEQ ID NO: 806736 - DNA, 99 bp, Homo sapiens
agtcaaaaccagcagtcctatcattcacaaagggaaaactacagccaccacacacaaggagatccttcctcaagcccctgctaatgctcatctgaagga

SEQ ID NO: 806737 - DNA, 99 bp, Homo sapiens
ccagaacagaaccctgggaggggaattccagcaccgcagcaaccactccagaaactttccctccttcagacagttgatattcataaagagaaagttgca

SEQ ID NO: 806738 - DNA, 100 bp, Homo sapiens
ggtcactggagctaattcaggaataggctcagtttatgaacctcttaaaagcattaatcttccaagacctgataatgaaactctctgggataagttggac

SEQ ID NO: 806739 - DNA, 100 bp, Homo sapiens
aaatcacagctacatatttgttattggggagaaaatcttcagagcaactagaagccatttgtgtcaaggtaacgtctggagaaacaaaaggtcaggaaag

SEQ ID NO: 806740 - DNA, 98 bp, Homo sapiens
ccgatccgccagcaccacctgaggatccagaaaccgccccagcgatggaagaggatcaggagctggagaggttatttggaaatagcggtgcttgcagc

SEQ ID NO: 806741 - DNA, 98 bp, Homo sapiens
gggacgctgccgtgcgcgccagagatcccagactgcgtggagcaggactcacaccacccggcaagaactgctcactacggctccctgccccagaagtc

SEQ ID NO: 806742 - DNA, 98 bp, Homo sapiens
gccatgatcaacaactctcgaaacctcaacatccagctcaagtggaagagacccccagagaatggaaaaccgggaggtgggagactggcgcaagaaca

SEQ ID NO: 806743 - DNA, 100 bp, Homo sapiens
gatgacatgggctatatcgtggagaatgatgtcatcatgcatgctctcactaagcagttggaggctgtgtctggaccaaactcttacccaggatctactg

SEQ ID NO: 806744 - DNA, 98 bp, Homo sapiens
tcttccacatggaagacggggagccctactgcgagaaaggtccctccagcctcagccaagcaacatggggtgaacctcagcactcccacacctccctt

SEQ ID NO: 806745 - DNA, 100 bp, Homo sapiens
cgccgccgccgcccctgttgcgatggcgcagaaaccccgttgacaaggcactgctttttcatgacggaaagaccacagcaagattctttcattcgtctcc

SEQ ID NO: 806746 - DNA, 98 bp, Homo sapiens
gagggagtgcgtggaggagctgtgcagccgcgaggaggcgcgggaggtgttcgagaacgaccccgagacgaaccaatacagggcagatgtgaagtgga

SEQ ID NO: 806747 - DNA, 100 bp, Homo sapiens
tcgagatgttgctgctagatattctcagactgagtgtgttgaattcctggactgggcagaggctgaggggatctggcggtggagcgctaggatcagacgc

SEQ ID NO: 806748 - DNA, 100 bp, Homo sapiens
tttttggaaacgggtcaggattggcctggaggatatttggaatagcctctcttcagtgttcacagagatgcaaccactgtgcaaccatattgcttctggg

SEQ ID NO: 806749 - DNA, 100 bp, Homo sapiens
aaggaagcaacaacataatgcccagagttggagccaattaaaccaggttctgctgtgaatgggaacatagaattggagctcctggagttgaggaaataaa

SEQ ID NO: 806750 - DNA, 99 bp, Homo sapiens
gggagtgtctgctggcagagatgaaaggagccaagccgccatggcctaccacagcttcctggtggagcccatcagctgccacgcctggaacaaggaccg

SEQ ID NO: 806751 - DNA, 110 bp, Homo sapiens
gacatttaattttagggtcctttatatagaagggagagtaggaagcagagcaagccatccagtgtctcaatggcaagttggccctgtccaagaagctggtggtgcgatgg

SEQ ID NO: 806752 - DNA, 56 bp, Homo sapiens
cttcacctgggtctgcacgccctttctgggtgtgaccgagtgttatgagtgtcatc

SEQ ID NO: 806753 - DNA, 98 bp, Homo sapiens
cttgatgacttctacataggaaagtattttggaggagtggaaaaccagtagattcccagacatcgcgaagtgaatctgaaattgtgccaaaagttgct

SEQ ID NO: 806754 - DNA, 100 bp, Homo sapiens
aaagcttccaatgagtatggcagtgtcagctgtacagccacactaactgtgacagcaagtctggaaaagtttgaaattccagtaaaaattcgtttgagtc

SEQ ID NO: 806755 - DNA, 100 bp, Homo sapiens
cagttgctgagaagcctgacataccaggactgcctgagacaagccacaagctgagctgcagcagttctataacagccagggccggcttcctgacggcagg

SEQ ID NO: 806756 - DNA, 98 bp, Homo sapiens
agaggccttcccagctcttctcacagaaggaagataaactccacatatttctgttctgcggggagtgtctccagccctgcctgcaggtgccatccccg

SEQ ID NO: 806757 - DNA, 50 bp, Homo sapiens
agcatggatcagacatcacacgatttttgctcacggacacagacctaatt

SEQ ID NO: 806758 - DNA, 100 bp, Homo sapiens
tgatggtctcaatgttgccaaaatgtttcctaaagttcgtgaatctcaacttatggaccacacatccccgacctacatgcttgctaacttaacccacttg

SEQ ID NO: 806759 - DNA, 98 bp, Homo sapiens
tctgccgtgattgtcagtttcctgaggcctccccagccacgctttctgtacagcctgcagaactgtccttgaatgggcaagagggcacatgaagtacg

SEQ ID NO: 806760 - DNA, 100 bp, Homo sapiens
gcagacccagctacgtggactagagggtggtgattccactgaagcaactgccaaaccaaagagaagtttttatgctgccagggatttgtacaagtaccga

SEQ ID NO: 806761 - DNA, 100 bp, Homo sapiens
gaggctgcggtgtctgctgctattctccgagcttcgcaatgcgtttgctgccaattgatggggcaaatgatctcttttttcagccacctccactgactcc

SEQ ID NO: 806762 - DNA, 100 bp, Homo sapiens
accatcacaccacctacagcccaggtggttggcgtgcttaagattcagccgattcgaagacagtctcttacacctcctcctcagaacactattacatggg

SEQ ID NO: 806763 - DNA, 100 bp, Homo sapiens
gttgtaccccgtggtctatgaagaatccatgaataccgtcctaaggcaggagctcatcagattcaacaggcttttggacaaactcttctgaaaggtgggc

SEQ ID NO: 806764 - DNA, 99 bp, Homo sapiens
gaaggatttagaaatcttcaagaatttctgaggacaggagctcacatctggaaggcatcttttctgtcagatcagcctgagccctacctgcccttcctc

SEQ ID NO: 806765 - DNA, 99 bp, Homo sapiens
aataatccagagatttccacagaaggactgggatgatacaccttttccacagggaattgagttgaaatgccagatctggagtaaggaatattgtcatca

SEQ ID NO: 806766 - DNA, 100 bp, Homo sapiens
agggagttaaggacattccaggcagaggcaaggtaaaaaagctccagttttatttaataaagaaatgattgagtcaatgaaggaaggttcagttgttgtg

SEQ ID NO: 806767 - DNA, 101 bp, Homo sapiens
agataagaagcagaaagttgagcgcattgcatcacatgattttgaccccacagagtcaagggtccagagaaggaggagaagttgagacaggcggtcaagca

SEQ ID NO: 806768 - DNA, 99 bp, Homo sapiens
ggagctgggccgcgaacacctcactattgatggtgtagcgctttaggggaagaaggtagaagatagcaccatgccgattcgtcgaactgtgaattctac

SEQ ID NO: 806769 - DNA, 100 bp, Homo sapiens
tctgtttgcaacactgtacatcctctgccacatcttcctgacccgcttcaagaagcctgctgagttcaccacaggtcccgcagcccccggaagccaatag

SEQ ID NO: 806770 - DNA, 99 bp, Homo sapiens
gacacttgtggatttgccaggaatgaccaaggtgcctgagtttcagttcctgattggagatgaggcagcaacacacctgaagcagaccatgagccatga

SEQ ID NO: 806771 - DNA, 98 bp, Homo sapiens
ttcaagctcatctacaacgagtactgtgggcctggagccaagcccctcttcaggagtaagtccatgaaccagttcgaattgcctatgacaggcctcgg

SEQ ID NO: 806772 - DNA, 100 bp, Homo sapiens
cagcaaattcttcctggccgtcagtccggcagcctcacctcaccatttctagcttgttgaaacccaaaactagaaaactaggtgtctgtgttcactccag

SEQ ID NO: 806773 - DNA, 100 bp, Homo sapiens
ttcgcacttccacgcggtgaacgtggcgcagcccgttcgcttcagcagttggtcttcctgcaaaatctggagttgctgggggcattcttttagttgtccc

SEQ ID NO: 806774 - DNA, 98 bp, Homo sapiens
aggctgaaatccctccaaagacctattcattacaaatagacttcccaagtaagaagcggaagaggagccgctggaaccaagacacaatggaacagaag

SEQ ID NO: 806775 - DNA, 100 bp, Homo sapiens
taaacctgataacactgcatgaaatgttagagttgaaaacaatcctcgaacaggaaatcttggtgcactaattaaggtcttcctttctagaaccaaagaa

SEQ ID NO: 806776 - DNA, 100 bp, Homo sapiens
aggagaagatccctgcatggtggaaagagaagtcccttcagatacccgtctagatgacccagcagatggctgggatgaacttctatggagccaatggcat

SEQ ID NO: 806777 - DNA, 100 bp, Homo sapiens
cgacctgaccagtgaggaggaggaaggccagagcctatggtacaagaagtatgtcttcctggaccccctggctggtgctgtaacaaagacccatgtgatg

SEQ ID NO: 806778 - DNA, 100 bp, Homo sapiens
caaagccctgcagcgcctggtgaagaagcctgtgcccaagctcatcgagaagtgctggaccgaggacgaagtggatgctagacatgcagctgaagaagag

SEQ ID NO: 806779 - DNA, 99 bp, Homo sapiens
caaaacgcactcattcagtttgctactagaagttgattcaagtcagttgagacgccagttgtgtggaggaagtcaggccgccatagaaagaatgatcca

SEQ ID NO: 806780 - DNA, 99 bp, Homo sapiens
agctccgcgcccgccagttgcttgatcaggtggaacagattcagaaggagcaggattaccaaagggtgcacgagaaggatgtgattggtattgcacatc

SEQ ID NO: 806781 - DNA, 98 bp, Homo sapiens
ggacctctacctggcctacttcgtgcgtgagcgagacaatgcagatcttcgtgaagactctgactggtaagaccatcaccctcgaggttgagcccagt

SEQ ID NO: 806782 - DNA, 99 bp, Homo sapiens
gggagtgtcgcagccctgaagttgcctcttctggtgtcaaagcttttggacattcctggggatccctctgtgacccagctgaccaacgccccgcagggc

SEQ ID NO: 806783 - DNA, 100 bp, Homo sapiens
ggcctggcctggttcccgtcagcatcatcggggctgaggatgaggattttgagaacgagctggagacagctccaggaggccagagctctactgaagcggc

SEQ ID NO: 806784 - DNA, 100 bp, Homo sapiens
taagaccaagtcctcgctggactgctcagggtgccagacctcatcgttgtaaagctctctgaaatagtgaccttagcgaagcaagcacatgtggatgtga

SEQ ID NO: 806785 - DNA, 99 bp, Homo sapiens
cggcggccgcagtggcgtcctggagccctcctcagtatgccaccacgggctgttccctgaccctgcaccatacggagaaaccagaacatgaagacatat

SEQ ID NO: 806786 - DNA, 100 bp, Homo sapiens
ccagatcacccacaaggacccgaagacaggaaagctgaggacttcaccagcgctggtggtcagtctgaccaaggatacgggtctaaggatgaacttataa

SEQ ID NO: 806787 - DNA, 99 bp, Homo sapiens
atggtggaagtggtgaaacccaaacaacatctcctgctattccttgggctgcctttcctgcagacagcccacctgaggatattgaccataaggactcat

SEQ ID NO: 806788 - DNA, 99 bp, Homo sapiens
atctctaaagtggatatgcacgatgactcattgaatacaacggcgaatttaattcggcataaacttaaagaggtcccaggtcaagttcatggacctgag

SEQ ID NO: 806789 - DNA, 98 bp, Homo sapiens
cagcttctcccgcccttcccatgcactcttcctgtttccctttccagttctcacggtgactcaagccctgactgccgccgcaggaagagggaagctgg

SEQ ID NO: 806790 - DNA, 98 bp, Homo sapiens
gtaaacagcatgacgtgaggccgtggatgcaggcattaagggatgtgacagatgatgaatcctttgttgatgaactgagaataacattacgttttttt

SEQ ID NO: 806791 - DNA, 98 bp, Homo sapiens
tcggggacattattgcgcgtggaacggctgcttttggaaggaggatcccttttcccccagaaattactcaatgctgaaacctctcaaagtggtattag

SEQ ID NO: 806792 - DNA, 100 bp, Homo sapiens
gcagtaccttcttcaagagaaatggagcccttctccaagccattatatgagacagatactggaagctctacgctactgccatgataataacataattcac

SEQ ID NO: 806793 - DNA, 100 bp, Homo sapiens
cggttttggcgtggcggacagtatgagaatttcagggtgcagtatacagaaacagagccgtatcataattaccgacttctggaaggagcaccacttcgag

SEQ ID NO: 806794 - DNA, 141 bp, Homo sapiens
aagtataaaattaaatgataaagctatggacaaatagagacctgcatattattgtaatggtggttcaaggagtagttccagttccagagaggccacctgaacctcgagccatggatgaccctgcgtctgccttcatcagtg

SEQ ID NO: 806795 - DNA, 98 bp, Homo sapiens
gcagaatggtctatgtcattttccttctttggttttttcctgacttacattcgtgattttcaggcaaaagtcaacaactctagcttaattggagtagg

SEQ ID NO: 806796 - DNA, 100 bp, Homo sapiens
atcgatcagattggggaagatttgctgacatggggaagtcgagataacatgagtattgtactagtttgcttttcaaatgctcccaaggtctcagatgaag

SEQ ID NO: 806797 - DNA, 129 bp, Homo sapiens
agaactctgtaaatctgtctcccagcagtcacgcaaacaacttatcagtagtgacttacagtaagagcattggctgtgatgactacttaggctccgacaaagtcgtggacaaatgtggggtgtgtggag

SEQ ID NO: 806798 - DNA, 100 bp, Homo sapiens
gaggaggcgcgggaggtgttcgagaacgaccccgagacgcctggagatttgaaaaagagaattgaatctctgatagacagagactatatggagagagaca

SEQ ID NO: 806799 - DNA, 100 bp, Homo sapiens
ggccgatgggggcgagggcgaagacgagatccagttcctgcgaactacacttcgtgtatgatcatgtgttcgctgagaagatcacttccttgcaaggtca

SEQ ID NO: 806800 - DNA, 100 bp, Homo sapiens
taaaataacacaagaagatattgaaggcattctacagaaatttactggaaatataatgcaagtgccccccctaggcggggtttcaccatgttgcccagac

SEQ ID NO: 806801 - DNA, 99 bp, Homo sapiens
ttcacttccctcggtctgggcttctctgaggcggcgagagatggtcaggtctggagctcgaccgggccaggtacatcgaggaggccattgagaaactaa

SEQ ID NO: 806802 - DNA, 100 bp, Homo sapiens
gggatgatgacaatgtagaggatgacttctctaatcagttacgactaaaggttctcaaaccatgacatcctctggagcccagaaaaaagttaaaagaact

SEQ ID NO: 806803 - DNA, 98 bp, Homo sapiens
gacagcacccgccacaccacgctgagcctcctgaagcgggccaaggtgcacatcaagggccaattcctgtccccccagcagcatggcatcgtgtgctg

SEQ ID NO: 806804 - DNA, 117 bp, Homo sapiens
ctgtaactgcacaagtgaaatcactgacacaaaaagttcaagctggtgcctatcctacagaaaaggaattactctcacttccaccacccgatgtatggaaactgctatactttcaat

SEQ ID NO: 806805 - DNA, 100 bp, Homo sapiens
aaaaagtaaaacttgctgctgatgaagatgatgacgatgatgatgaagaggatgatgatgaagagcaccaggatcatctacgaccgaaagttcctgctgg

SEQ ID NO: 806806 - DNA, 100 bp, Homo sapiens
ctaacaccgtggagaaatcagaagggaccttcactgcctggtgtaactcccacctaaggaaagccggcacccagattgagaacatcgaggaagacttcag

SEQ ID NO: 806807 - DNA, 100 bp, Homo sapiens
acctacagagatgccaacattaaatcacgaagctgaaaccccacgtagtgttcttgaagaaattggactgacataactctcctcccttgttgatgacttc

SEQ ID NO: 806808 - DNA, 100 bp, Homo sapiens
acagaccttcttacaggattgtgaggatgatggggaaacagcagctggtgggcgtcttcttcatctcatggaggtgtcttatagaactcaacatactggg

SEQ ID NO: 806809 - DNA, 100 bp, Homo sapiens
ccattgatgatgatatcattatgctgacctctgacgagctgcaatttggttatgagggaagacccgaattttctgaagttgtcatgaagttagaagagtg

SEQ ID NO: 806810 - DNA, 100 bp, Homo sapiens
caaaaagacaaagcacatactgcccagtggcttctggaagttcctggtccacaacgttaaggagctggaagtactgctgtcacggaacagcaaatttctg

SEQ ID NO: 806811 - DNA, 100 bp, Homo sapiens
caaagtaccatgagaaatgtcggttcagatatgagctttgatccaaaccttctccacaacaatggacataatgggtaccctaatggtacttcagcagcac

SEQ ID NO: 806812 - DNA, 98 bp, Homo sapiens
gtggatcccaaggacctggagccacgggctgccaactgcactcgggccctgtctctgcccctggtggtcatcgtccatggcaaccaagacaacaatgc

SEQ ID NO: 806813 - DNA, 100 bp, Homo sapiens
ttagatgcaagtgatgatggaatcttggccaaaatcgtgcctaaatgcgatggccaggtattactgacacaagtgtggaagcgtttaaacctggtagaat

SEQ ID NO: 806814 - DNA, 98 bp, Homo sapiens
tcagatccagtgataattgacaggagcaggacatcgagactttacatggctctgttcacgtcacgctgtgtgggactcccaagggaaaccggcctgtc

SEQ ID NO: 806815 - DNA, 100 bp, Homo sapiens
aaaaacagtgtttcaagaatgatattcacaaactggtcctagcagctttgaacaggtctattatcctcccagtccacaacgctgaaccgtggctggacga

SEQ ID NO: 806816 - DNA, 100 bp, Homo sapiens
tctgcctttgttgggaaatgttttgtcctatcgtcagaatgccttccctgtgtctggtcaactctatacaacacacctactatctcttgatgccctattg

SEQ ID NO: 806817 - DNA, 100 bp, Homo sapiens
attgcaaagagttatggatattctggtggggagatgaacccaacctagtgggtgtaatacatcatgaactgcaggcggaaagaacacccggaaatgaaag

SEQ ID NO: 806818 - DNA, 98 bp, Homo sapiens
ggaaacaggatgctgatagtctccagcgggcctggactgtgggctggtgtgtggaactggatcaagcgcatggcaggcatgaaggaatcgcagatcag

SEQ ID NO: 806819 - DNA, 104 bp, Homo sapiens
ggcatcttgtccctacatcttctcttctgactttggctacatctcataatgccaagtctcaaccaagtgttcagttttcaaaagccttaattaaacttcctgac

SEQ ID NO: 806820 - DNA, 100 bp, Homo sapiens
tcctttaaaccgcttgtctgcatttctcctaatgccaggactctggcatctgtgaagatttctaaagtgaaatacgttatctggtcagcagacatgtcac

SEQ ID NO: 806821 - DNA, 100 bp, Homo sapiens
gccccggcccctgccctggttccgttgcgcgccccggatgtggcgcggctgcgcgaggagcaggaaaagtttgctattggctccctgatggacgattact

SEQ ID NO: 806822 - DNA, 100 bp, Homo sapiens
tggtacgaatggcagcatacacagatgaaggtgggaaggatggtccagaattcacttttactaccccaaagtttggtagctacagcaagctgggtagcag

SEQ ID NO: 806823 - DNA, 100 bp, Homo sapiens
gccgtggggcagaggctgcggagccccagaaggggaaggccatggtaaaatttcagtatttgctgtcaaaatggctttagccacattgtgtggagggaag

SEQ ID NO: 806824 - DNA, 99 bp, Homo sapiens
aacgctgaggagcaggccctgaaggagaaggagaagggaagctggacccagctgacccacgccgaaaaggtggcctgaaagaccacagcaagattcttt

SEQ ID NO: 806825 - DNA, 98 bp, Homo sapiens
cctaggaatctgcctgataatcgattgcattggcaatgagacaggattgattatgtcaagtggccaggcatggaaggagcaaagaaggttcactctga

SEQ ID NO: 806826 - DNA, 100 bp, Homo sapiens
aaaattgacagagaggggaaaccccgtaaagtggttggttgcagttgtgtagtagttaagaagaaaaagtcagcactttttgaagtgtctgaggttatac

SEQ ID NO: 806827 - DNA, 98 bp, Homo sapiens
tgaacagtacgcagtgaatgttgcctccccatggccacccatggaccagtcggcattcacttcctcccttctgcggcccataaaagccctgggttcag

SEQ ID NO: 806828 - DNA, 99 bp, Homo sapiens
tccaggcctcaggccccctcaccatcctagaggtcaagatcagctctggctagaggcaaggtcttgctatgttgctcagactgatcttgaactcctgac

SEQ ID NO: 806829 - DNA, 100 bp, Homo sapiens
aagaagtactgtttttgtcatttgcaccagcttctttctccaggaaagatcaaaacgatgcactgcaagaactggcatcaaatactcacaacatagctca

SEQ ID NO: 806830 - DNA, 98 bp, Homo sapiens
ggtggatctccgctggacacaccgcctccgaggtgtcggtggtattgaagcagaagctgtcatgctgggtcagccaatcagtatggtgcttcctcagg

SEQ ID NO: 806831 - DNA, 100 bp, Homo sapiens
tctcctccttctttgttcaagactgggcttccaccgagcagatcaaagaccaagctcaccaattcgacatcagggaaggaatgacgagcttgagcgtgat

SEQ ID NO: 806832 - DNA, 100 bp, Homo sapiens
agccggcctgggtgcttaccagctgtctcaggatccaaggaacgtttgggttttcctaggtgcgagtattcgtcaaccagttatatcagccaagtttgga

SEQ ID NO: 806833 - DNA, 130 bp, Homo sapiens
tgctaaatgctgctcagaacaccatggagccacccctgaccccgcccagcccagcagaccgagtgtgtcagcagccaggactttctctctgggtccccttccaaaacgcagccaccgccgtcaccaatct

SEQ ID NO: 806834 - DNA, 100 bp, Homo sapiens
agggaaggcgcatggatgctggagggcgaagacctgcgaagtccctctccagtctccaaaaaaagttggtgatgacattgccaaggcaacgggtgactgg

SEQ ID NO: 806835 - DNA, 98 bp, Homo sapiens
tcaggtgtgactgaagaaatatcaaatgtttcctagtaagacagcaactcaggtccctccagctacaaggtgggcaccatggcggagaagtttgactg

SEQ ID NO: 806836 - DNA, 100 bp, Homo sapiens
ggccaaggacagttccaatgataaatcaaggttcttatagtgaaaactcagataagaaacctgatcgggaagaaattcagatgagcaatatgggatcaaa

SEQ ID NO: 806837 - DNA, 99 bp, Homo sapiens
gagccatcagcttcagctccagctccgctctcttcggctgccccaatccccggcagctctctcaggaatgtatcctgtcaggtataatgtcagtgaatg

SEQ ID NO: 806838 - DNA, 100 bp, Homo sapiens
ttgtgtttatcatctggacaaccatgaagttcagaatagtgacatgtcagtcggaaatttgcgagaatccccgatttatcattgatggagccaacagaac

SEQ ID NO: 806839 - DNA, 99 bp, Homo sapiens
tgacattcacactgatgccacccagaggatgttctaccggccctccagttaccagccccctctgcagaatgccaagccctggactttgtctcacaagat

SEQ ID NO: 806840 - DNA, 98 bp, Homo sapiens
agaatgggaattctcttcactagaatatggagactgttcaatcaccaggctcttcagtaggttacctgcaacatccaggatcagaacaagtacaattt

SEQ ID NO: 806841 - DNA, 100 bp, Homo sapiens
gaaatatggaaacgactcctcggccgagctgagtgaggtagacttgggccttctgcgctttgtcacggctgtcgggacacagggcgccatttcaaaagaa

SEQ ID NO: 806842 - DNA, 100 bp, Homo sapiens
acaaagatgatgataatgttttcagcagcaatttgccctcagaggccagaagcggactcctagaagaggggagcagcaaggatggaatgacagccgtggg

SEQ ID NO: 806843 - DNA, 98 bp, Homo sapiens
cgacagaggatgatgcagatgtacagacacaagcgggccaacaaatagggtggaagatgtctatggatgtgacattcctggggacgggtgcagcatac

SEQ ID NO: 806844 - DNA, 98 bp, Homo sapiens
tgaaatgaaactctttgctcaacaatgcaaggaggtagacatccttatcagcacagcacttattccagtaacagggggtatcacagaagagcagtttc

SEQ ID NO: 806845 - DNA, 100 bp, Homo sapiens
aaaacacaccgaaagcgggtctgactctgaatgtagtttgggtctcagtggtggactggcatttgaagcttgcagggcacacgtgtttcacgttgacagg

SEQ ID NO: 806846 - DNA, 100 bp, Homo sapiens
gattgtgaagaagaatttcgatctccgccctggggtcattgtcagatacgtaggtaacctttccagagatgtgacagaagtccttatacttcagttgttc

SEQ ID NO: 806847 - DNA, 100 bp, Homo sapiens
cgctgctcaaggacacggtctacaccgacttcgacggtgaaatgacaatggatgctctgttggctcgattgaaacttctgaatccagatgaccttagaga

SEQ ID NO: 806848 - DNA, 131 bp, Homo sapiens
gtgagctccagcttgctccatccatgaccacagtggaccagctcgagtctcaagtggacaatgagaaagtggctcatgccaaagaagaaaaccttagtatgcatcagatgctggatcagactttactggag

SEQ ID NO: 806849 - DNA, 99 bp, Homo sapiens
taccagacgatgaggatgtagtggggcccgggcaggaatctgatgactttgagctgtctggctctggagatctggacactgaccactactttctgcgct

SEQ ID NO: 806850 - DNA, 100 bp, Homo sapiens
agctgttgatgctgtaattgctgaacttaaaaagcagtctaaacctgtgaccacccctgaagaaattgcacagaatgagtccctggaacgccagatgcgt

SEQ ID NO: 806851 - DNA, 100 bp, Homo sapiens
cacaacattaaagacatgaagctgttgaagaccctcctggatattcctgcaaacccaacaggcctggttgcagtatgcttgaaatctgggatgtggaaga

SEQ ID NO: 806852 - DNA, 98 bp, Homo sapiens
atgttggtcttcaaaatgatgagtttggaaagaaatcccggcctgcaatgtatgatgtgagccccatcgcctatgaagattacagtcctgatgacaaa

SEQ ID NO: 806853 - DNA, 99 bp, Homo sapiens
tagcgtctgcaccttcagaaacagtgctgaagcctttaaatgcagcatctgcgatgtgaggaaaggcacctccaccagttggattggatgctgctggca

SEQ ID NO: 806854 - DNA, 100 bp, Homo sapiens
agaatgctgacttaaagaaacagcttcatgaactccaagccaaaatcacagctttgagtgagaaacagggcaaccagatgtttgaggagggcttggtgga

SEQ ID NO: 806855 - DNA, 98 bp, Homo sapiens
aacagtgggaacaatttcagacactggtgcagaagacccttttgaggacttctttgggaatcgaaggggtccccgaggaagcagaagccgagggacgg

SEQ ID NO: 806856 - DNA, 98 bp, Homo sapiens
gctccgtctcggcggcggcggggacatgagagatggctttagaagaaaaagtttctactcttcccattatgcgagagagcggtctccttataaaaggg

SEQ ID NO: 806857 - DNA, 99 bp, Homo sapiens
ggaacagctgcggtgctctgccatattgtgtcttccccggccggtccctcgcctcccggccgagctgacggattttactatggattgtggaatttgtta

SEQ ID NO: 806858 - DNA, 100 bp, Homo sapiens
ctatcccctctgacgtctcccacttccgcttccattcggagcccctgcagagtgtggtggaccacatggccacccaccttggggtgtccccaagcaggat

SEQ ID NO: 806859 - DNA, 100 bp, Homo sapiens
tcaaggaaccacacatgtattaagatttgtggaagacttataaccctgccttctcccggttggaaatctggttccggtttttctttgtggtgctcacctt

SEQ ID NO: 806860 - DNA, 99 bp, Homo sapiens
aacaagctgtaccaggacgaaaagtttaaggaagaaatctctaaacgttttaaatcacatactgaccaacttgtgttgatatttgctggaaaaattttg

SEQ ID NO: 806861 - DNA, 50 bp, Homo sapiens
atttcaacatgcctctgacaatctctagtcgtacacagactttactaaaa

SEQ ID NO: 806862 - DNA, 99 bp, Homo sapiens
aggcctttgaagaggctcggagaaggacacgcgaatttgaagatagagacaggtctcatcgggaggaaatggagatacaggctagttccaaaggtttat

SEQ ID NO: 806863 - DNA, 100 bp, Homo sapiens
cactggcaggggtggaccccagcacaggcaaggtacaactgaccagggacatcatcaaaaggaatatccagggtgtgataggtatacagctggttgttac

SEQ ID NO: 806864 - DNA, 98 bp, Homo sapiens
tccttcaagcctccaccacctcgcagccggggaggcaactggagcgaaaccagcgacaggtcacccaacctgcctgcagtttaccctgaacatgaccg

SEQ ID NO: 806865 - DNA, 100 bp, Homo sapiens
gccggagcgcggagcccggctcccgcaccatggaggaggacgacagctacggttgtgcacagggacctgaagcccagcaacatcctgtatgtggacgagt

SEQ ID NO: 806866 - DNA, 101 bp, Homo sapiens
gagcgagaaagccgttgcctccagcaccacttctaatggtgtaggagctgcacgatctgggaacctcacgtttatggtgggaggagttgaagatgaatttg

SEQ ID NO: 806867 - DNA, 98 bp, Homo sapiens
aaaatgcttcatgtattgagcaaaataaagaaaatcagagttttgaaaatgaaactgatgagacgacaactggttgcttttgtaatgaagaagcactt

SEQ ID NO: 806868 - DNA, 100 bp, Homo sapiens
tgtggaggtcattgcaaaggaaggacaaaacctgaaagagctatatttggtgtcctgtaaaatcacagattatgatgccagagacgcggaacaattgagc

SEQ ID NO: 806869 - DNA, 99 bp, Homo sapiens
gctgctgctctgggctgggaccgccttccaggtgacccagggaacgggaccggagcttcatgcctgcaaagagcaaatccagtttgctgatgacatgca

SEQ ID NO: 806870 - DNA, 100 bp, Homo sapiens
catctcttctattgtacctgcaggtttatggctacaaatgatttgatgacggaactgcagaaagattccatcaagttggatgatgatagtgaaaggaaag

SEQ ID NO: 806871 - DNA, 100 bp, Homo sapiens
tcatttcaatcttttggatcctttgaaaaatcacatgaagggtcaacatatttcactggcacctattcacaagcttgaagaagctctgtatgaataccag

SEQ ID NO: 806872 - DNA, 98 bp, Homo sapiens
gggcgtcccagctttcacggatactagatctgtgccagttcagaagcaggcgagcctcttccctgatgaaaaagaagataacttgctgggtaccacat

SEQ ID NO: 806873 - DNA, 99 bp, Homo sapiens
tccccgcaccacctcctgctgccttcccgtcgccgctcccgaagcttttccagaaatgcactcggtgatggaaagagagccactattctgaagaacact

SEQ ID NO: 806874 - DNA, 100 bp, Homo sapiens
catgctcacggatgcggggtgcacccaagaccagagactgctgcctagccgcccgtgactctcacactgtctcctgcatgacgggtggcgcctcccgcag

SEQ ID NO: 806875 - DNA, 100 bp, Homo sapiens
cagaacccaggcccacggaggaagagccgggcagtccctggagcgggccaggttatgatgtgattgctcaagcccaatctgggactgggaaaacggccac

SEQ ID NO: 806876 - DNA, 98 bp, Homo sapiens
tcatcctgcacgccggcgagtgccagcgtgcccatgacgcttccggagacaaccctggaaacactgaagcataaaatcaacccctcggcgggggaggc

SEQ ID NO: 806877 - DNA, 100 bp, Homo sapiens
gtgaccgagaccgtgaccgagagcgtgaccgagagcgcgaatatcgtcatcgttagaaggaccctaaagtaaattggttgaagaaattagatcccaaaga

SEQ ID NO: 806878 - DNA, 99 bp, Homo sapiens
ctgtttctgcttaagttggcaagacactccaagtttggcatgaaaggtagcctttccagtaaatatatgactcagggaaaagcctcagcgaagaggacc

SEQ ID NO: 806879 - DNA, 98 bp, Homo sapiens
ttaggggggcggggggaaagagccccagcaccgcccctcctggaagaaggaagaggaccctaaagtaaattggttgaagaaattagatcccaaagatt

SEQ ID NO: 806880 - DNA, 99 bp, Homo sapiens
aattgttgaagagttcaactttcccagaagttgttctaacgctgcctttgctttaaaacagtattacttgcggccttcaagagggaattgaaaactaaa

SEQ ID NO: 806881 - DNA, 100 bp, Homo sapiens
cagatccgtggttccctgcagactggcaggagcagattccaaaggcacaggaagaagcttgcagggagaacagatcccattccaatcgttgtcaagtatg

SEQ ID NO: 806882 - DNA, 135 bp, Homo sapiens
aactcttcagtaaatatctagcggatcctagtaatctctttgtggtttcttctgatttctgccattggggaaatggaaaggtcagtagttgcacagctgctgagggtagtttcacatctctcactggacttttgg

SEQ ID NO: 806883 - DNA, 100 bp, Homo sapiens
ttaactcattcaaggttacccagttggtagcagcaattgcagagacagatgaatctgcagaatcagaaggtgtaattgattctcataaacgtagagaaat

SEQ ID NO: 806884 - DNA, 100 bp, Homo sapiens
aaagtcaagaagacagcggaagctggaggagtgacagagctcaggccccggggcctccagcggcaccagcggagaccacggtgagctcgtcgtccggatt

SEQ ID NO: 806885 - DNA, 100 bp, Homo sapiens
accatccagatgcgattttagtggaggactacagagccggtgatatgatctgtcctgaatgtggcttggttgtagcttgcattgaaaggctctagttaca

SEQ ID NO: 806886 - DNA, 146 bp, Homo sapiens
ttaatggagctgggtcctgccttcgcgctgaggagccctcgttttcgagatcaggcctgaccgggataagctccagacaccatccagcacatgagagacagcaagcacatcgtcgtgtaccatcgaggacgctacttcaaggtctg

SEQ ID NO: 806887 - DNA, 98 bp, Homo sapiens
acgtctgctcggagatcatttgggagatccaagagattcagtatcactcgctcccttgatgatcttgagaagccccatgtgccactcccctgatctgc

SEQ ID NO: 806888 - DNA, 100 bp, Homo sapiens
atccagaatctgccatttcaaaaagcaagatggggctaacccccctatggcgagcctaatcacacggatgctacagagagatcccaagagaagggcttct

SEQ ID NO: 806889 - DNA, 100 bp, Homo sapiens
acactgcaaggaccccctccggctcaagtgtgtcaagcaagttcacacaaaagatgttggacaatttctacaattttgcttcatcatttgctgtctctca

SEQ ID NO: 806890 - DNA, 131 bp, Homo sapiens
ttttcatatgtctttattggcgtgcgctcttgaggttgtaatggccacatatagcaaaactaatctggattcactccctctggttgatacccactcaaaaaggacacttctgattaagacggttgaaacta

SEQ ID NO: 806891 - DNA, 100 bp, Homo sapiens
tggtcctccccaggtccccgatggtcccccagacctgctgcttgagtcccagtggcaccactattcagctgctgcagcagtgccgcctggtggagcggat

SEQ ID NO: 806892 - DNA, 99 bp, Homo sapiens
gggtaacttggcaatgaatgacagcactgtagaacagctttatgaaacagcttgcttcctacaggaagctgaatatggtgggcatgatcagatagattt

SEQ ID NO: 806893 - DNA, 98 bp, Homo sapiens
agctcgccccgaacgggggtcttcctcctccgccgttgacagggtttcatcaccttaaatggttttgaaccaatgaaggtgtattcccttaaaaagac

SEQ ID NO: 806894 - DNA, 100 bp, Homo sapiens
tgcttcctctacccctgtatttcgctgggctctctaaatggattcagctccaggcctagttccccgagagcgttcagacagtgggggctcaagctcagag

SEQ ID NO: 806895 - DNA, 100 bp, Homo sapiens
tggttgtttctggtgggatcgttggctatgtaaaaacaggtgcttgaagtttctgggaagtcggcatccaaccctggtgcttcccttggtgccagagctt

SEQ ID NO: 806896 - DNA, 100 bp, Homo sapiens
aatgctgatgaatccagcagcagcatcctaaaacctctcactaaaagatggcggcaaggcagcccaggcaaatgtaagaataggcgatgtggttctcagc

SEQ ID NO: 806897 - DNA, 100 bp, Homo sapiens
ctgagggagatggtgacaagctcaaggcctgcgaggatctcattttgcccaacggtggtactccagcaggtacttcaagtccagcttcttcatcttccct

SEQ ID NO: 806898 - DNA, 51 bp, Homo sapiens
gatgactgttgaactggaaaaactaaaagaggggatctgatgataaaaaaa

SEQ ID NO: 806899 - DNA, 98 bp, Homo sapiens
ccgtttgcggaggtacggatactcagttgtggagagctgattcccaaatctaaagcttcgcaaacctgggtatacttcatgtgacaaagaaaaaagta

SEQ ID NO: 806900 - DNA, 98 bp, Homo sapiens
aaagcagcaggagtttggaagcccttttcctccaaatcctgggaaagaacatcgggtcagaagttgagatttccactatcgagaaacaacggaaggag

SEQ ID NO: 806901 - DNA, 100 bp, Homo sapiens
agcaagaaaagcctctgggagcagaagggaggctccaagacctcatcaacaattaagggtgtgggccgaagatatgctcatgtggtgttgaggaaagcag

SEQ ID NO: 806902 - DNA, 100 bp, Homo sapiens
agtaaaagcacagctgccttgtctggagaagcagattcgggaactggagcctctcctctgtcacagtgacaatccatctcagctcatctggacatcatct

SEQ ID NO: 806903 - DNA, 100 bp, Homo sapiens
acaactagtgaatatgaaaaggaaaaactgaatgaacggcttgcaaaactttcagatggagtggctgtgctgaaggagccagatgaccaagatgctccag

SEQ ID NO: 806904 - DNA, 100 bp, Homo sapiens
agatggatgctcgtgcccgtcggctggatgaatgaaagcatttaaatcaaacggtattgagatggattgggttatgaaacataatggtccaaatgacgct

SEQ ID NO: 806905 - DNA, 100 bp, Homo sapiens
gggacaccacggtgctcatgcccagtccacctcgtgctcctgcagaacctgctgacctgtggaggcaactttgtccctaacaaaatgtggaagggattag

SEQ ID NO: 806906 - DNA, 100 bp, Homo sapiens
caaatcatcgcctttctggtgggaggcttgattggaaaatcctgccttgcttcgttgggcctatgcaagaacaataaatgtctatcctaatttcagaccc

SEQ ID NO: 806907 - DNA, 100 bp, Homo sapiens
ccagccaagaagccaacagcgaggctttcagttctttggaattccattcttttccttattcttctgatgtggatccaggaatgggtaccacagaccatgt

SEQ ID NO: 806908 - DNA, 100 bp, Homo sapiens
cgctatcccaatcgctttaagctctggttcactctggatcatcccccaaaagatgtggacgagtgctcactagcagaaaaaacctgtgtgaggaaaaacg

SEQ ID NO: 806909 - DNA, 100 bp, Homo sapiens
gaaagacgagttctcaaagagttgggtttctgcgtccatgtgaagcatcctcataaggtgaagaggacaataccagcgtcgtctggttttggctgcacaa

SEQ ID NO: 806910 - DNA, 100 bp, Homo sapiens
tccgaggacgcgagactgcagagtattggtaaaggttttcaaggtgtcatgaaaagatggggatttaaaggccagcctgctacgcatggtcaaacgaaaa

SEQ ID NO: 806911 - DNA, 99 bp, Homo sapiens
gacagtggagatgaagcctaagaatatgatcagttcaaagcagtattcagcgatttcaagagaagttttttatttttgctttgacacctcaacaagtta

SEQ ID NO: 806912 - DNA, 98 bp, Homo sapiens
aacttaccaggttatctctcaggctgctgtggttcatgccacagccaaaggagtacaagcgcaagctagccagagtttccctggtgcgcaaagaactc

SEQ ID NO: 806913 - DNA, 100 bp, Homo sapiens
aagctggtgacatctgcgccatctgtcaggccgagttccgagagcctctgattctcctgtgccagcaccgtaagacctacagtacggaggagtaccacca

SEQ ID NO: 806914 - DNA, 100 bp, Homo sapiens
ctggacttcatgcttagatacatgtataacaaggctgaagccgacgtagcttctctgaacagacgcatccagctggttgaggaagagttggatcgtgccc

SEQ ID NO: 806915 - DNA, 99 bp, Homo sapiens
cagactgttctagataaattctctgctgtgcctgatcccatcccgcagtggaacaacaatgcctgccttcacattgcagccaaaattggaggcgatgct

SEQ ID NO: 806916 - DNA, 100 bp, Homo sapiens
cactggcattggaacttcctgttctgatagcgtggaagatgccatggctagtccagggaaagataactatagaatgaaaagttataagaataaagcccta

SEQ ID NO: 806917 - DNA, 98 bp, Homo sapiens
agggattggaggagacacccactttgactccgatgagccatggacgctaggaaatgccaaccatgacggacagagcgggatgccaccagcttgtccaa

SEQ ID NO: 806918 - DNA, 102 bp, Homo sapiens
ataatggagctactgtactggctattggaaggaggagattctgaagataaggagcattcaacagaaggtgtcaaattgacagctctcaatgacagcagcctc

SEQ ID NO: 806919 - DNA, 98 bp, Homo sapiens
ttgctaactgcagcttgggaactgccaccatcatcagtgagaacttgaacaatgaggtcatgatgaagctgagatctgtatctgtggacctgaatgtt

SEQ ID NO: 806920 - DNA, 100 bp, Homo sapiens
gatttcagtgtcctccttagctctgcaggtggagctcatgaaggacttcagcatttgggtccttttggcaacatccccaacatcgtggcagagttgactg

SEQ ID NO: 806921 - DNA, 100 bp, Homo sapiens
tttacaccagaatatcccttcaagcctccaaaggccttgacaaaattcttgaaatgtgttaattgggatctacctcaagaggccaaacaggccttggaac

SEQ ID NO: 806922 - DNA, 100 bp, Homo sapiens
ttaaatcttgcacttcttctgagtgagttccatctctcttatgcagagaaagatttgttggagagagagccaagaggagaagcccatcaggaagttctta

SEQ ID NO: 806923 - DNA, 116 bp, Homo sapiens
gtggaagctgccaaggtgggggctttggcatctctcattcgatccgtggcctccttctccatctacaggaatctgcaagcagaatatgaccgtctaaagcagcagcacgaacataa

SEQ ID NO: 806924 - DNA, 98 bp, Homo sapiens
taaagcaatatttcgagcagtttggcaagtctattgcgtctgcagacatggatttcaaccagctggaggcattcttgactgctcaaaccaaaaagcaa

SEQ ID NO: 806925 - DNA, 98 bp, Homo sapiens
aaaacaggatttcaatatgtacagaattcatggatgctgctgtgacttactcgaagcctcgattggccacattttggtactacgccaaggttgagctg

SEQ ID NO: 806926 - DNA, 100 bp, Homo sapiens
acgagagggagagcaagaccatcatgctgcgcggccttcccatcaccatcacagagagcgattgaattttgaagattgcaccggtcgacaaaggacagcc

SEQ ID NO: 806927 - DNA, 100 bp, Homo sapiens
ggcgcctacctggatttggaggccaccctggcagagcagcgggatgagttggaaggcttccaggatgacgccgggaatagccaggccagaagaaggaagg

SEQ ID NO: 806928 - DNA, 99 bp, Homo sapiens
aagatggcggacaaaacgccaggcggatctcagaaggccagttcaaaggaaccgcggggaaaggcgaatgggtgcttttgaatgtgttcgtaaagtgta

SEQ ID NO: 806929 - DNA, 100 bp, Homo sapiens
gcaaacccttctagacagccggggagtgttcctcgacatgtttctccagtgacacctcccagagaagttgtatggcagatcccagaaaatggactcaccc

SEQ ID NO: 806930 - DNA, 99 bp, Homo sapiens
ccaggctcatgacggagctggtctgaagctggtagtttcctcacccaccagtccggaatatgaaaatgttcgtcaggaatatgaagaagtaaaactagt

SEQ ID NO: 806931 - DNA, 100 bp, Homo sapiens
aactggcatagacaactatgggcagcttgaaggatgccaatgatgtaccaatccaatgtgaaatctctcctcttatctcctatgctggagaagtaagtct

SEQ ID NO: 806932 - DNA, 98 bp, Homo sapiens
ccaaatttgaagcagaacgatcaaaagccaagtggcaaacggatttccaatttccaagcctgatgggatctcccagctggaacaggatctacaggtct

SEQ ID NO: 806933 - DNA, 100 bp, Homo sapiens
cgcgtttgatggcttcgaggtgaactggaccgagcagcagcagatgcctcaatcctggtcctctggatgctccaaggctcccaggcagctctctacatcc

SEQ ID NO: 806934 - DNA, 98 bp, Homo sapiens
tcattctcgcctcgtggaatccaaagttgagcttaatatgccctgctgtgccatgatgatgagctggaagggcgccggattgccttcatcctgtacct

SEQ ID NO: 806935 - DNA, 51 bp, Homo sapiens
ggagagtccggccgcgacaggacgcctgatgttcaccaaggtgaagctgga

SEQ ID NO: 806936 - DNA, 100 bp, Homo sapiens
ctggaggaggcgttgccgtgaggccggcacagtcttcactaccgtagaagaccttggctccaagatactcctcacctgctccttgaatgacagcgccaca

SEQ ID NO: 806937 - DNA, 99 bp, Homo sapiens
cggaagcttactccgcggattgtgcacagttcttgaagtattgtgtccagaattggttccttccggtgggttcttggtctcactgacttcaagaatgaa

SEQ ID NO: 806938 - DNA, 100 bp, Homo sapiens
caggacctgtaaacttcatggttcggctttttgtggtgattgtgatgtttgcctggtctatagttgttcgaagcattcagcaaacaatggcaaggcagag

SEQ ID NO: 806939 - DNA, 98 bp, Homo sapiens
agctggctaagcaggtgctgcagacggagctggagcgaccgagagaggtgagaagccatttaaatgtgatcagtgcagttatgtggcctctaatcaac

SEQ ID NO: 806940 - DNA, 98 bp, Homo sapiens
tccggcttccgtcccggacagagcccgtggtcgcgcagcttcttccagaccagctggtcttgcttctggagcatctcttggagcagaagactctgagc

SEQ ID NO: 806941 - DNA, 100 bp, Homo sapiens
aagacaaagacccagtgaacaaatccgggggcaaggccaaaaagaaggaagggaaaaggccgaggcatcagcgtgtgaagaccgcaaagacgatcccgag

SEQ ID NO: 806942 - DNA, 99 bp, Homo sapiens
ggaaacaaagggcttcacagagaagagtgttgcggagataggaacatgggagagaaacaatctgggtaacatgaaagtgatgctggttgctaagggaag

SEQ ID NO: 806943 - DNA, 111 bp, Homo sapiens
cttcaaccaggagccgagatttctgttgctctgaagtggacgtgatgctgaatccaggcagtgccacttcgaatgttgctatttctgtggatcagagacaagtgaaaactg

SEQ ID NO: 806944 - DNA, 98 bp, Homo sapiens
tgggctttaagttcgccaccaagaccgtcatctacctgctcaacccctgtcacctggtcaccatgatgcatctttatcttcaagccaggatgaaggga

SEQ ID NO: 806945 - DNA, 100 bp, Homo sapiens
ggagtcaccactggacctccaaggaagccacgtgcagacatctacaaccttcgatctcctgacgaatctgggacataggaggacaaccccgatttcgaag

SEQ ID NO: 806946 - DNA, 100 bp, Homo sapiens
cctcaggcgtgcgcggacggtgtgcggtctgaaccaatcagagtccttgtgactggagcagctggtcaaattgcatattcactgctgtacagtattggaa

SEQ ID NO: 806947 - DNA, 100 bp, Homo sapiens
tcagaactgttccttcagccaaagaaacaagccgtggaataggtgtatcaagtaatggtgcaaagcctgaacagccaaaggattacctgatatggattct

SEQ ID NO: 806948 - DNA, 100 bp, Homo sapiens
tgatatgcaatgtcacttacaacattaatcagatactgcatttaagtctgagggaaaaggccataccaatgctggagatgcaatatatgaggtggtgagt

SEQ ID NO: 806949 - DNA, 100 bp, Homo sapiens
cagcggctctagaagtagatcctccagtagtgattcaatcagcagcagcagtagtaccagcagtgacagtttagcagccactgctgcatcaggggctttt

SEQ ID NO: 806950 - DNA, 99 bp, Homo sapiens
tgaattaaatgaaaaggaagaagcatacaattccctcatgaaaagctatgcctcagaatattctgttgacaagtgaatctccattgggtgacattaaga

SEQ ID NO: 806951 - DNA, 50 bp, Homo sapiens
ccgagcccatcaaggtgtacggacagaacagtgctcggcatggcagggat

SEQ ID NO: 806952 - DNA, 99 bp, Homo sapiens
tcggcgccggtaggaagagtcagaggggtgaccagagagcccaacgcctggtgctcaagactttctccgagaaatggaatctatttggaatttgcagaa

SEQ ID NO: 806953 - DNA, 100 bp, Homo sapiens
gccggaggtgtgggaacgggtatctggaagatggggaagagtgtgactgtggagaagaagagattacagtagaatgcacattccttgactatataatggg

SEQ ID NO: 806954 - DNA, 100 bp, Homo sapiens
ggacttgccctgcaccgccccctgggatccgcaggttccctacacggtctcctgggtcaagacacgatgaggcgagtggtacgacagagcaagtttcggc

SEQ ID NO: 806955 - DNA, 98 bp, Homo sapiens
cacgagaaggacgttatgagcggagacttgatggcactgatagccattgggcgatacagcatgacaatagagactgtggatgtcggatggtgtaaaga

SEQ ID NO: 806956 - DNA, 98 bp, Homo sapiens
gatgatgacgatgatgatgaagaggatgatgatgaagaattccgttgccaactcgtccccattggtttcttctttttggtactacagaagaggaaatc

SEQ ID NO: 806957 - DNA, 99 bp, Homo sapiens
aaaatcttcgtgaaaagatctgctgcaaggaactgatagcttatggttctccattgtgatgaaagcacatggtacaggagcttcagagagacatagaga

SEQ ID NO: 806958 - DNA, 100 bp, Homo sapiens
tgttagctgggtcgggaagacatccatggaagtgaagatgcaaatgttccagccaggaaatgtgaagaattcacctggaactaagtagaaaactccatgc

SEQ ID NO: 806959 - DNA, 100 bp, Homo sapiens
cagtcagaagaaggctgctattgaaagagagtatgcacagccctaccacttatgtcttggatgaagatgaacctcgattccttgaagaagttgattacag

SEQ ID NO: 806960 - DNA, 98 bp, Homo sapiens
ggactcagtaccgggccaaggatggcagcgggaccggcggctctaagcctctactcttcatggatcttttggatgaaagaacactcgtggcagtagaa

SEQ ID NO: 806961 - DNA, 100 bp, Homo sapiens
tcaccacgcagaacgtcaacaccaagtgcatcaccatccccagaggcggggtttcaccatgttgcccagactggtcttgaactcctgagcttaagcaatc

SEQ ID NO: 806962 - DNA, 98 bp, Homo sapiens
gtggtggatcagaccaaagatggaaagctgtatgtgatggcttctgtgtttgtctgtctactcctttctggattggctgtgtttttccttttccctcg

SEQ ID NO: 806963 - DNA, 98 bp, Homo sapiens
ggagaaggggcttcctgagcgtcccagtacactgacagagtgtaaacaggaacatcgataagtagtgtaaaaacttgcacaatgaaatccgaagccaa

SEQ ID NO: 806964 - DNA, 98 bp, Homo sapiens
tgagaagcacctggatattcctaaaatgttggatgctgaagggcagcatctcatcacggcagttgctgaccatctatttaagctgaagacaacatcat

SEQ ID NO: 806965 - DNA, 99 bp, Homo sapiens
ggctcgctcgcggctcttcggccatggggaacacttaagaatctgtcctcaggaatatacatgctgcaccacagaaatggaagacaagttaagccaaca

SEQ ID NO: 806966 - DNA, 100 bp, Homo sapiens
cagagtggtccggctgagcaccgccaacacctactcctaccacaaagggatgggatccccccatacaggatccgtaagcagcaccgcagggagatgcagg

SEQ ID NO: 806967 - DNA, 100 bp, Homo sapiens
tgcttgctctgtgagcgtggtccaggttcgacgccttttgcgccttagaggcatcagcgtatcagtttcctcacgggcaccctcactgaggacggcttag

SEQ ID NO: 806968 - DNA, 100 bp, Homo sapiens
gtctgctcctgtcgccttcgcctcctaatccctagccactatggggacggcaaaacagaacagaaaggcggagataaaaagaggggtgttaaaagaccac

SEQ ID NO: 806969 - DNA, 99 bp, Homo sapiens
tttccgtgggcaagtcgtgtgtactcctcgccatggctcagctccaaacacgcttctacactgataacaagaagatttaggtcctgaatatgaaggtat

SEQ ID NO: 806970 - DNA, 99 bp, Homo sapiens
gcgcaggaaacatggcggcggcgggtgttgtgagcgggaagtctgtaggtatattgttagagccatgcagtgaccgtggtgatagtgaagatggctgtc

SEQ ID NO: 806971 - DNA, 99 bp, Homo sapiens
agtggcagcgcgacctggccagctgccgcgactgggaggagcgccggaacgccgaggcccagttacgatatcagaagtgcttggtagccaggccgcctt

SEQ ID NO: 806972 - DNA, 100 bp, Homo sapiens
cagccagtggagctgctgaatcctgcccgcgtgaaccacatgcccagcacgggtatgccattgcattggccttaagggaaaagcagcgtgtaatatttac

SEQ ID NO: 806973 - DNA, 100 bp, Homo sapiens
taaagagacgcacttatagtcaagaggtaccatctacctgttcatgtaattggacaccatgctgtgagtccttactccatagttttgcccttatctgctg

SEQ ID NO: 806974 - DNA, 100 bp, Homo sapiens
ccctggagatgactcccgcagtcaggcagagggtgatagaagaggccaagactgcgttcctgctcaacatccaggcgtcctgcctctgcggctctgcccc

SEQ ID NO: 806975 - DNA, 100 bp, Homo sapiens
tcccctctcttccttgcagtgctttcctaagggggtggacatgatggctgcccttgatctctacttccagggaatgaaagctactggttgattttaaagt

SEQ ID NO: 806976 - DNA, 100 bp, Homo sapiens
ggcgcccacctggtgactctggagctgcacagcgagggcaccaccgtcctgctcttccagttcgggatgttccaagatgagatgggattctccaacatgg

SEQ ID NO: 806977 - DNA, 100 bp, Homo sapiens
tcaattgctcagatgagagaagccaccactttggcaaatggatctctctggttaataacttcttgaagtatgggttaaatgagcttaaactgtgcttccg

SEQ ID NO: 806978 - DNA, 100 bp, Homo sapiens
ttaactaccgggaagatttacacagatggaaccagaaaagatacgaggctctaggagaggctttttggaaaggatataaacaacggaaggagtatatgca

SEQ ID NO: 806979 - DNA, 99 bp, Homo sapiens
gaatatcaatcccagcacagcaaattctccaaaatgtcaggtaacagtgatgatgtcaaatgcttttgctgtgatggtggactcaggtgttgggaatct

SEQ ID NO: 806980 - DNA, 100 bp, Homo sapiens
gctggtgcagaagccattttttaaacttaggtatttaagtactgaaagaggatgtgtttctgctggaaactgataacccgaggacaacactagtgtatgg

SEQ ID NO: 806981 - DNA, 100 bp, Homo sapiens
gagccgcctccgtcgccgccgtcagagccgccctatcaggttgctgaaaagccaggagtcaaaatgactgagcgctttgactgccaccattgcaacgaat

SEQ ID NO: 806982 - DNA, 98 bp, Homo sapiens
gagagttacgtggcagaaatgatcaagtcaggtcaattcagtgaagatatgatacccacagtgggcttcaacatgaggaaggtaactaaaggtaacgt

SEQ ID NO: 806983 - DNA, 98 bp, Homo sapiens
cacttcatgaacgccctgcgctacgatgccatggtcggagatgtccgcccagaggttaatttctaacagaacctcccagcaatcggcatctaattctg

SEQ ID NO: 806984 - DNA, 100 bp, Homo sapiens
ggacaaacagcacgtgtatatcggcagtgccggtttggactggcaatccctgggacagatttccttgctgaaacagaatctggagatacagctttcccag

SEQ ID NO: 806985 - DNA, 100 bp, Homo sapiens
tggagaaacaagtgaccaacagttgaatcaaagtatggacacaggattgcacctctgcctccacctcccctactaccacctttggctactaactatcgaa

SEQ ID NO: 806986 - DNA, 100 bp, Homo sapiens
ttcactctggagagaagccctacaaatgcgaaacctgcggagccagatttgtacagttgagccccatatgggggttggcaggcagcagagaggccccttt

SEQ ID NO: 806987 - DNA, 100 bp, Homo sapiens
agatttacctgtgagatgtttcatcccaacagagaagccgtacaagtgctcagagtgcagcaaggccttcagccagaagcgaggcctggatgagcacaag

SEQ ID NO: 806988 - DNA, 100 bp, Homo sapiens
aagtttgtggatgaaaattgggaaggttccctcaagtccaagggtgagtgagcgagaggctgctttggaagaaactcatagattactgcaacagttcccc

SEQ ID NO: 806989 - DNA, 99 bp, Homo sapiens
agaaagatcacagcagtgttccaagttctaaagaggtaatggagagtgaagagttcatgttgcttccagccaatcaactcattgatataatatccagtg

SEQ ID NO: 806990 - DNA, 100 bp, Homo sapiens
gtaagagactccaaggacaactgcaagggggaagtagagagataacaaaagctgctcagagtctcaatgaacttgttctttctacaacttcaacaggctg

SEQ ID NO: 806991 - DNA, 100 bp, Homo sapiens
cacctatgcaaagaaagggaagctattgctgggattttgaggagatcatggaagggaagtggttgctgtgtatgttactggtgcttggaactgctattgt

SEQ ID NO: 806992 - DNA, 99 bp, Homo sapiens
catgtccttcatatcaacactaccaaaaataatccagtgatgtcattgcaagatcaggagtttccagatgtcttggaatgcactgtatctcatgcagta

SEQ ID NO: 806993 - DNA, 98 bp, Homo sapiens
ttctcggcgctgccgtctctggaggagtactggcaacagagagaagaagaaggaggttcctgctgtgccagaaacccttaagaaaaagcgaaggaatt

SEQ ID NO: 806994 - DNA, 100 bp, Homo sapiens
ttaaagataccatctaccttactcaggtcacagagttgtcaagtgaaactcaaagaggtgagactataaagatgactatcaccctgaagagggagctgcc

SEQ ID NO: 806995 - DNA, 98 bp, Homo sapiens
gtcgccttcgcctcctaatccctagccactatgggcgccctgcgtccggcagaggaggcgagcatcccgctcaggtgatgaggaacccctcgcgcacc

SEQ ID NO: 806996 - DNA, 98 bp, Homo sapiens
aattgaagctgctgaagccctgcttcatatggaatctcctacctgcttgagggattcaagaagtcctggggaaagaaacactgatgactcccattccc

SEQ ID NO: 806997 - DNA, 98 bp, Homo sapiens
tgaggtcctacatctccgaaagcaagctcttctagaagttggcataatgattataaagtggtttctcctgctttgcgagctgtgggaaacattgtcac

SEQ ID NO: 806998 - DNA, 99 bp, Homo sapiens
tcctcttggtccattgccacctggatgggtaccgggaccctctggtgataatggcatcagtgttacaatgatcttggtagcctggatggttattgcatt

SEQ ID NO: 806999 - DNA, 100 bp, Homo sapiens
tctgagagattttttattcgttactatgtggatgttccacaggaagaagtgccattcagttattcaagcggagaaatgttgctacagcagaagaagaaac

SEQ ID NO: 807000 - DNA, 100 bp, Homo sapiens
aaatggagtgctggcatacattgggaattttcgcctgcttgcagagctttccagcccgtttgtgaatcagcgggaggtaccttcttccaaacccggtggc

SEQ ID NO: 807001 - DNA, 100 bp, Homo sapiens
tgaagatgtttacagtgcagtcttatcgaaggatgtgcatgaaggacagcctcttctcaatggaagtcctggctgagcaaggttggaagccctagttctc

SEQ ID NO: 807002 - DNA, 75 bp, Homo sapiens
tccaggtcgaggttctgcagaaggttgtgactttagtatacagagtgttgaagcctggaaatcccctccccttcc

SEQ ID NO: 807003 - DNA, 100 bp, Homo sapiens
gattataggcgtgagccaccgtgcctggctgaaggtgctggagaatctggtaaaagcaccattgtgaagcagatgaggatcctgcatgttaatgggttta

SEQ ID NO: 807004 - DNA, 100 bp, Homo sapiens
agccgacaacgccttcatgctgctcacgcaggctgaaaaagcttctgatcctgcaagttctcttcgagttgccaaaacagatagtaaaactgaagaaaag

SEQ ID NO: 807005 - DNA, 98 bp, Homo sapiens
ggtgccaccgtggaaggacagaatgaaagtccatcaacaggaactccgtgagatcgcgaatgcctgcaaaatcctccaagatgtacggcacgctgcgg

SEQ ID NO: 807006 - DNA, 100 bp, Homo sapiens
tgggaagtgcagcgctatgacggctggtttaacaacctgaggcaccacgagcgtggtgctgttgggtcttgcctcacccaagctagagtgcagtggcctt

SEQ ID NO: 807007 - DNA, 100 bp, Homo sapiens
ccagggcaagaacctggacaccgtgaagtcccaggacatcaaagctctgcagaaagaactcgagcaatttgccaagctcctgaagcagaagaggatcacc

SEQ ID NO: 807008 - DNA, 98 bp, Homo sapiens
acttcagaaagaactcaatgtacttaaatcagaacagtcctgcagtatgctgtttgactttggcactgaccaccagtatagttccaggaacggtaaaa

SEQ ID NO: 807009 - DNA, 100 bp, Homo sapiens
tgaaggtggcgctgtgtctgttcatgcacgttccctttggagactagagacgctaagagttgcatggctattcatatgaaaaggaagcaatggaaaattg

SEQ ID NO: 807010 - DNA, 100 bp, Homo sapiens
aaccccttcctggtcggattacactcctgcttccagacgacaagtcggagaacgtatttaccgggcagtcaaagatctattcctacatgagcccgaacaa

SEQ ID NO: 807011 - DNA, 98 bp, Homo sapiens
ctgaagttatgaagatgcaaagcctgagagatggaaactactatgcatgtaaacaaatgaagcagcgctttgaaagtaataatttttcaccatgcatc

SEQ ID NO: 807012 - DNA, 98 bp, Homo sapiens
cgaagagattggactgggagggcaacgagcacaacaggagctacgaggagttgatcggcttcaccaccgaccctcggatggcccgctcctccccctac

SEQ ID NO: 807013 - DNA, 100 bp, Homo sapiens
tctcctgggtttccttttggatcaagacagagtctgctccagcccggacctctctagtctctagtgatccctgaaaagttccagcatattttgcgagtac

SEQ ID NO: 807014 - DNA, 99 bp, Homo sapiens
ctctttaaaaagaaataataaaatgggagagaatgaagcaagtttacctaacacgtctttgcaagttaagtgggcagaccaacatccacctcagcaaaa

SEQ ID NO: 807015 - DNA, 133 bp, Homo sapiens
aacctcctctcccacttcttgccccagaaagccccagacggaaagagctacttgctgattgctctatatgcaatcagtgctgtctactttgctggagtgatggtgcgactgatgttgactttgactccagtcg

SEQ ID NO: 807016 - DNA, 100 bp, Homo sapiens
gagacacattttatgttgtgtcatttcgaagggtttccaatacttatctacaggaatcgccatgaccccagctctgagggaggcaacagcaaagggtatc

SEQ ID NO: 807017 - DNA, 112 bp, Homo sapiens
tcggatatcgtccttatgacaagaacattagcccccgggagaatatcctggtttcacttggagctgtgggtattgaagcccctgggtgataatttgatggaggaaaacataa

SEQ ID NO: 807018 - DNA, 100 bp, Homo sapiens
gcttggccgtgcttgccctgtcatcccacctgagaaccatgctcaccgaccctgtttccacttgagcggcacagtgacagaacctgcaatacaatcggag

SEQ ID NO: 807019 - DNA, 112 bp, Homo sapiens
tggagggtgcccagcgcgccgctgctatcgcgcgccagaaggccgagattgccgcctccaggaatcattaaccaatggcaacaggaatccaaggataaagtgatttccctcc

SEQ ID NO: 807020 - DNA, 100 bp, Homo sapiens
gctctgccggctcaacacgatggacttactgctgctggatcagatctgcatttcttttgacgaaggcaagaccacaatgaacttcattgaggcagcgttg

SEQ ID NO: 807021 - DNA, 100 bp, Homo sapiens
agctgttcctgttcggccatcttggctcctccctgccagatagctcttattttgagggtgccttggtcagtgcaagttcagatgatacacttcatttgtg

SEQ ID NO: 807022 - DNA, 98 bp, Homo sapiens
aacctaaattattctgcaagacaaagggaagaaataaaattttcccatactgacttcaggggccctgtcaaagttaacccgtggattgaaagatgaat

SEQ ID NO: 807023 - DNA, 100 bp, Homo sapiens
cggcggggaccgctgggaaggcgaggacgaggacgaggacgtcaagtttgctgcatctggaggagctcactggagaatctccaacatcggagcgggcctt

SEQ ID NO: 807024 - DNA, 100 bp, Homo sapiens
gcacaccttggccagcagtggggattgcaaagcgaactacatatggaggagtgtctggtgggaatggaagtggccccacatctcaaagaaaccctaaata

SEQ ID NO: 807025 - DNA, 99 bp, Homo sapiens
ttcaagtgaagttaatctgaggtgaagcaaacagaaaattgtggaggttttgttgagttatgcccagccaagtcttcagtatatccaggggcaacagat

SEQ ID NO: 807026 - DNA, 98 bp, Homo sapiens
ccacctgttcctcagttccaaccacaggtagagttggctttgtgggacacagctgggcaggaagattatgatcgcctgaggcccctctcctacccaga

SEQ ID NO: 807027 - DNA, 75 bp, Homo sapiens
cgcctgccttggcgctggccggctacatcgaggtggtaaattcactccagcagcaacctcaggctgcatcccctt

SEQ ID NO: 807028 - DNA, 98 bp, Homo sapiens
cgatggtaggcgtccctggagcggccgccttccagctctattgcgtctgcagacatggatttcaaccagctggaggcattcttgactgctcaaaccaa

SEQ ID NO: 807029 - DNA, 100 bp, Homo sapiens
agcattcctgtgacctctgcctaccatccataaaatactcattcccctctcagagtgactcctctttcttcccagagtgtggtgattcaccatggccaga

SEQ ID NO: 807030 - DNA, 115 bp, Homo sapiens
agtgaccaaggagctcttacagatggacctgtacgcgctgctaggcattgaggagaaggcagcggacaaagaggaatcatgggtaaagaaggaagacaggctgcaagaaacagtg

SEQ ID NO: 807031 - DNA, 101 bp, Homo sapiens
gtgtgaactcattgttaagcacaagttcacgaaagcctacaaaagtgtggagaggttccttcaggaggatcaggttttgcacactagggaccaagaagccc

SEQ ID NO: 807032 - DNA, 99 bp, Homo sapiens
caacattttttgaaatttttaagacacgctgcaacaaagcagatgtgtcttgctgaatcagggctctcttatccctgccatcgacttacagtgggaaga

SEQ ID NO: 807033 - DNA, 100 bp, Homo sapiens
ccgtgacaggccaagtgcaggggccagaagacaaagtcaattccatttctggagagtcttggcttctgggaggaagtcagagggattatctcaggatcag

SEQ ID NO: 807034 - DNA, 100 bp, Homo sapiens
gatgaagaggatgatgtttttggtgaaggaggcaggtggaagtcatcataaagtttctgtttcacccgtcgtccatgttcgaggactctgtgaatctgtg

SEQ ID NO: 807035 - DNA, 99 bp, Homo sapiens
gggtagggaggccgactgagcaggagtcgtccgcttatagtggaggctgctaggagccggtcagaggccttcagtttggaaacctgcagaattatgatt

SEQ ID NO: 807036 - DNA, 100 bp, Homo sapiens
ggtacaggctcagtctgcggccaagactccgtcctgcaagtttcacatccatcatgcaagaaagcataagggtaaatccatccatggttactaaactcag

SEQ ID NO: 807037 - DNA, 98 bp, Homo sapiens
tcctcccgaaatcttccagatccgcgtagtgaggaatcgtctccaccgtcatggggggcggagacctggtgtgaatgacagaggtggtgccatccagc

SEQ ID NO: 807038 - DNA, 100 bp, Homo sapiens
aacctgaaaacattggaccacacaaagtcttactgggaatgaaagctactggttgattttaaagtgcctgggcctcacaggtttggagatgtcccagaat

SEQ ID NO: 807039 - DNA, 100 bp, Homo sapiens
cgttgcagtccttcagggccattcagcttctattacttccatacaggccaagtggcatcagagctgagtgatggacgacctgcagtcccagaacctctcc

SEQ ID NO: 807040 - DNA, 100 bp, Homo sapiens
aaaagaaaaggaaggaggaaatggagaggaagagggccgtggagagacaacgtaactggcggaaacccagaggcattgacaacagggttcgtagaagatt

SEQ ID NO: 807041 - DNA, 99 bp, Homo sapiens
ctcaaccttgaactttccagacgcagaactccgtgctatcaagactaatcaggaccttctcccagaaactccatggacgcacattttctacaatgattt

SEQ ID NO: 807042 - DNA, 100 bp, Homo sapiens
gggttacttgtgctcgactcttttcttgctgtaagccatgagatgaccctttaagttttgcaaaggagtcgagcaaaagatgtgataataccagcaaagc

SEQ ID NO: 807043 - DNA, 100 bp, Homo sapiens
attgactccctttaaccctttagctggcctaaggattgcaggaccctttggtgggtgcgggaatttctgaatgatgaaaacaaaggcctggatgtactgg

SEQ ID NO: 807044 - DNA, 99 bp, Homo sapiens
ggaaatctgcctatgtcataccgtgacagcccgcaggatcagaacctgaacctgaagagcctgaagatgttttagaaagtgcaaaacatgaagaggtag

SEQ ID NO: 807045 - DNA, 100 bp, Homo sapiens
gaagaggcatgccagaggtagagcaggatcttagaaatgaagttgaaaaattacgcaatgaagtgaatgaaagagagaaagcaatggaaaatcgttacaa

SEQ ID NO: 807046 - DNA, 99 bp, Homo sapiens
tcagagagggaagagattcagccagcacactcctcgcgagcaaggcagtagcagaatcccatggtagccaggtgggtgaaggggagcgaggacgttcta

SEQ ID NO: 807047 - DNA, 98 bp, Homo sapiens
agagatgggctcccgggtcctcctggttcccctgggccccctgggcagcctggctacacaaatttgcttgctgaaaatggtcgattaagcaataccca

SEQ ID NO: 807048 - DNA, 100 bp, Homo sapiens
aagccaagtgatgtcatgcttgttcacttccgaaatgttgacttcaactatgctactaaaggctgaacataacttctttttttcaaagttccctgtgttg

SEQ ID NO: 807049 - DNA, 122 bp, Homo sapiens
gccttcaagctggatttcctcccggacatgatggtcgagggccgcctgctcgttcctgacagaatgggcatggtctagtggcccagtcaggacgcggaaacactccctggaggttctgaccc

SEQ ID NO: 807050 - DNA, 100 bp, Homo sapiens
atttctgaggaaaccattgataatggctggttatcagcattgcagcttgaggcaattacatatgcagcccagaactattccatggcagtatatcttgtaa

SEQ ID NO: 807051 - DNA, 100 bp, Homo sapiens
tggcaggagcttttcgtaaagggaagtcatttctactggacttcatgcttagatacatgtataacaaggccaaccaagccctcgagcagttattcccatg

SEQ ID NO: 807052 - DNA, 98 bp, Homo sapiens
cggcttctttttgaagtgtttgacgaaaaccgattggtgacttaagagattaaaattaatttggttgctgttggttctgaacaaataatgagttcttt

SEQ ID NO: 807053 - DNA, 98 bp, Homo sapiens
ggcaccgggatcgtgaccgagaccgtgaccgagagcgtgaccgagagcgcgaatatcgtcatcgttagaagtgaagttattgccagtggactgtgaga

SEQ ID NO: 807054 - DNA, 102 bp, Homo sapiens
tttttcaaaacttaggatctattttaacgtatgccttcttgggaactgccatctcctgcatcgtcatagggatgaacttactgctgtgaatgtaaagcaagg

SEQ ID NO: 807055 - DNA, 99 bp, Homo sapiens
ccaaagatgagatttacctgtgagatgtttcatcccaacaccatgctgtgacctacaagcaaactaaatagccaacatttctgaacccctaagtctcct

SEQ ID NO: 807056 - DNA, 100 bp, Homo sapiens
atcacctagtaacacacgctacctctttctgggtgactatgtggacagaggctatttcagtatagagggaagagcatggaggaaatcaagaaggtgctgc

SEQ ID NO: 807057 - DNA, 99 bp, Homo sapiens
gccacctccgggcgcagaggcctacatcccacagagatacccagacaacaggatcgtctcgtccaaggctggaatgagctgctcatcgcctccttctcc

SEQ ID NO: 807058 - DNA, 100 bp, Homo sapiens
atatcagagatattacagtttacaggctgactactggaagagctgtaggtaaaacttgcctactgatcagttacacaaccaatgcatttcctggagaata

SEQ ID NO: 807059 - DNA, 98 bp, Homo sapiens
tgggaggccggccggtgccagcacctttcggcttctgagacggcggcagcagcggcattcaggtgctggagaatctggtaaaagcaccattgtgaagc

SEQ ID NO: 807060 - DNA, 100 bp, Homo sapiens
agaagtgtcttggagccaactagaggcagggtcatccttgcccttgtcctcccctttcatccctatgtggaaaacgactgggactcttcaattaatctga

SEQ ID NO: 807061 - DNA, 119 bp, Homo sapiens
gttaacttccatcaaatctaccacactaagagttgaccagtcaattctcacagactgctgagaaggaagaatttgaacatcaacagaaagagctggagaaagtttgcaaccccatcatc

SEQ ID NO: 807062 - DNA, 100 bp, Homo sapiens
aacaactaactttgaggggtttcttgcaaaacgcttctccggctgcaccctgaccgatgggaccctggcattctgaaggcaaatcctgtttagacccagg

SEQ ID NO: 807063 - DNA, 100 bp, Homo sapiens
tcacctaccaggtgtcggagtctgacagcagtggggagaccaaggttcccattaaggatgtcgaggcggggaatggtgaggaagagtcgggcatgggtgc

SEQ ID NO: 807064 - DNA, 100 bp, Homo sapiens
ctcatgatctttgggatagcagattgtttgcctactccaggggctatcaacagcaggacgcccatgaattcatgcgctaccttttggaccacctacactt

SEQ ID NO: 807065 - DNA, 98 bp, Homo sapiens
gaaacctggatctgcgatctgtttgtgacgagctcatctgcgcctttgtttagaacgcttaaaagttctgattccactaggaccagactgcacccggc

SEQ ID NO: 807066 - DNA, 100 bp, Homo sapiens
gattcgaacaccgacctcgtcccggcccctgcagtccggatactcacgccagaaggttgtggcagcactgcctgaaggtatgagaccagattctaatctt

SEQ ID NO: 807067 - DNA, 100 bp, Homo sapiens
tagaagattccataattgaggatgaagatgatgaagccgaggtagaagaagatgaacccacagatttggcatctaataggattcaggaatcaaagaatca

SEQ ID NO: 807068 - DNA, 100 bp, Homo sapiens
tccctccaagtgtgagaggcaaagtctggagcttagccattggcaacgagttaaatatcacccacgttgttgacctcctgtactggagagacattaagaa

SEQ ID NO: 807069 - DNA, 100 bp, Homo sapiens
gtggataattttgtggccttagctacaggagagttgaaacattgtagtcggtatatacatgacttatttccttcactcatcaagaatttggatcccgtac

SEQ ID NO: 807070 - DNA, 98 bp, Homo sapiens
accaaagaaaaaacgcttcactgtcaagagaatccttgttcattgaagcatttgtgtcggttaaaaattcgaaggcttatgggtctccagaaactctg

SEQ ID NO: 807071 - DNA, 100 bp, Homo sapiens
gacctccatgatgagccatctccacttaatgactgtctcacattggccggcaacttgttccagcagctgctcagccaggaactgagatctttaatctgcc

SEQ ID NO: 807072 - DNA, 98 bp, Homo sapiens
agaaagtggagaaggtagaggatggagttgcagactctacaggaggctcttaaagtggaaattcaggttcaccaggagctgtgactgatgagaattaa

SEQ ID NO: 807073 - DNA, 100 bp, Homo sapiens
agcagaattttacgggatcactccattagggatcatagacggtatttctatgtaaacgaacagtcgggcgagtctcagtgggagtttccagatggtgaag

SEQ ID NO: 807074 - DNA, 150 bp, Homo sapiens
caaaatatcacaaattaaaatatggcacggaactgaaccaaggtgacttgaaaatgccaacctttgagtcagatttccttgatagctgccgtgccagtactctattggctgagctcgatgatgatgaggacttacctgagccagatgaag

SEQ ID NO: 807075 - DNA, 100 bp, Homo sapiens
ttccttcgtacccacagtgcttcatgagagaatgatatggaacctagcaaagctgttccactgaatgcatctaagcaagatggacctatgccaaaaccac

SEQ ID NO: 807076 - DNA, 100 bp, Homo sapiens
tctgcatctgctcctgcaagactctggagccagtcttgaggtcctacatctccgaaagcaagctcttctagaagttggactatgacttgagccagctgca

SEQ ID NO: 807077 - DNA, 100 bp, Homo sapiens
gcccaagagactcttccaaggcactaccaatatgttatctccagatgccgcgcaactgtctgatctcagttcatggctctgaagagcggccattcctcag

SEQ ID NO: 807078 - DNA, 99 bp, Homo sapiens
ctatttgtttggatatcctgaaagatcaatgaggatggatcagttctgaaacagtttctttctgaaacagagaaaatgtcccctgaagacagagcaaaa

SEQ ID NO: 807079 - DNA, 100 bp, Homo sapiens
ggagcatgaacgcccctccagccttcgagtcgttcttgctcttcgagggcgagaagcccttatgttagctatgggatatcatgagaagggcagagctttc

SEQ ID NO: 807080 - DNA, 100 bp, Homo sapiens
tttgggtcctgaatcttctgggagctgaggaaccagatatcttgaaaagctgccagaaaggatgtggagagcatcttgtgcgcaccatactggctagaga

SEQ ID NO: 807081 - DNA, 100 bp, Homo sapiens
actgcaccagtagcttttctgagaatacttgctgaaaaggaagttttctggaatggtaccataacagcttgggggaaagaccatgaaaaagatgcttttg

SEQ ID NO: 807082 - DNA, 98 bp, Homo sapiens
agaaactggaggagtcccgctcgaagctaggaatgaggggagaatcatacttcatcggaatgaggagcccagggcagcagggacacgtccctgaagat

SEQ ID NO: 807083 - DNA, 98 bp, Homo sapiens
aagatgggcgacccggatctcctggaagtgttggcggaggaagcaagccctcgcagggagcctggtagcaggggccggaagcacagtagagacggacc

SEQ ID NO: 807084 - DNA, 98 bp, Homo sapiens
tccaaagagctgagacagaagtacaacgtgcgatccatgcccatccgaaaggatgatgaagttcagcacttttcaggattagaagaggctgtgtatag

SEQ ID NO: 807085 - DNA, 100 bp, Homo sapiens
gttcttcactggcacatagttgatgaccagtctttcccatatcagagcatcacttttcctgagttaagcaataaacacttttcaggattagaagaggctg

SEQ ID NO: 807086 - DNA, 50 bp, Homo sapiens
tggaaggcatggaagtcatcagaagatggccctgctgtggcaccagtgac

SEQ ID NO: 807087 - DNA, 100 bp, Homo sapiens
atggcttgcaaaaagtaaaccacgatcgttatgctgaacctaatctgggagcctgcaagtgacaacagcctttgcggtccttagacagcttggcctggag

SEQ ID NO: 807088 - DNA, 120 bp, Homo sapiens
aggacttccggtcgccatgatggctgtgggcggtaaacgcggttagtgcaagcatctgggccatcttcaatggccgccttcaacaacaacgtgagcgtggcctacgagtgcctgagcgcc

SEQ ID NO: 807089 - DNA, 100 bp, Homo sapiens
caaggacttaatttatacactttattattggaaatcttcaagttcaggaaagggaatgaaagctactggttgattttaaagtgcctgggcctcacaggtt

SEQ ID NO: 807090 - DNA, 98 bp, Homo sapiens
gactagcttatatgctttgggaaccagcaagagtatttacgtggagaggacaacgctgtggaccgcctggcacctggggacctggggagaacacgggc

SEQ ID NO: 807091 - DNA, 100 bp, Homo sapiens
gactgattttatgggaaaattaagcagatgctccagtttgagaaacctggatctgcgatctgtttgtggaagccaccattcttcagagggcaatgaaggc

SEQ ID NO: 807092 - DNA, 100 bp, Homo sapiens
tggcaaatattgtgaaaggcctgtataccctcagaccaggtgttggagcgggccggagagaagtagagtgggctgcgaggagaaggaaacaggcctttcg

SEQ ID NO: 807093 - DNA, 98 bp, Homo sapiens
cacagcctggcgacggctgcggtgtctccatgcgagaggtgtcgctgtgaagccaacggtgaggtgctatgcacagtgtcagcgtgtccccagacgga

SEQ ID NO: 807094 - DNA, 100 bp, Homo sapiens
agagaggatcgcccaatccacatgcttttccagagcagcccgacggccatggaggctgaagagacgatggaatgccttcaggagttccctgaacatcata

SEQ ID NO: 807095 - DNA, 100 bp, Homo sapiens
agctcgacagtacgcctacttctataaagtcatccaggcatcaagcatgatggaaccatgtgtgatacctgccgccagcaaccaatcattggcattcgat

SEQ ID NO: 807096 - DNA, 99 bp, Homo sapiens
aaaaagcttggagataaagttgctttttactggctggaagattatatctggatcaccaccagagcaagccctttctgaagcttcattccaagacccatg

SEQ ID NO: 807097 - DNA, 100 bp, Homo sapiens
ctacttcctgattaaacccactctccacagtcttcctacaattgccgcttctttgtcctcccctgctgcttctttgacttcattggaagatactcccgga

SEQ ID NO: 807098 - DNA, 100 bp, Homo sapiens
ttggcacccacaaagaccatgaagtttcaacgcttgacacagctataagtgctgtaaagaggaccccgctgagaacccacagacaggaggacaactgcgc

SEQ ID NO: 807099 - DNA, 100 bp, Homo sapiens
agaatgccccatcactgccctccagaacatgctacaaaactgctccaggggcaatgttaaatattgttcaagattcagcacttttggaagccattggttg

SEQ ID NO: 807100 - DNA, 100 bp, Homo sapiens
tggtagaagacttggatcgaattctcactctcacaaccaatgagtatggaagagaagagagcgactggacaattgtgctatcctgaatggaaaatagagg

SEQ ID NO: 807101 - DNA, 98 bp, Homo sapiens
ccgtggcggccgcggcgatgactcggacccaggttgcctgcggacacgctgggcctctgtcctgatgctgctgagctccctggtgtctctcgctggtt

SEQ ID NO: 807102 - DNA, 100 bp, Homo sapiens
cctctccacctgtcctaggggagtctgtcctgcaagaaagttactgtggcccatgtcctaaaaactggatatgttacaaaaataactgctaccaattttt

SEQ ID NO: 807103 - DNA, 100 bp, Homo sapiens
ggagagtctgtgccgacaagatggcggacggggagctgaacgtggacagcctcatcacccggctgctggaggcagcagccgctcttctaaaacattcaaa

SEQ ID NO: 807104 - DNA, 100 bp, Homo sapiens
gggaaaactggtcttattaacctaggaaatacatgttatatgaacagtgttatacaagccttgtttatggccacagaccagatgacgtgtactactgtgg

SEQ ID NO: 807105 - DNA, 100 bp, Homo sapiens
ctgagaagctccagctgctgaaccaccggcctgtgactgctgtggagatccagctgatccgagggaagggcttcgactggccgctgctggtgaaggactt

SEQ ID NO: 807106 - DNA, 100 bp, Homo sapiens
aatgaagtagaggtgggacgtccaaggatgatgggcactggagccaggtgagaatttcaaggattatcgacttcatattgcacattaaagttacaaatta

SEQ ID NO: 807107 - DNA, 100 bp, Homo sapiens
agaattgggaacatgctaaatacaaatggtatcttaagggggacttgatctcatcttcatgccaggccttgggtttgacaaacatggcaaccgactgggg

SEQ ID NO: 807108 - DNA, 100 bp, Homo sapiens
cgtgttgtccacccaagatggagttcctcctggggaacccgttcagcacaccagtggggcagtgcctcggcaaaatgggcatatcaagtttttgaccaaa

SEQ ID NO: 807109 - DNA, 100 bp, Homo sapiens
cgcggcctacgtgaacaacctgaacgtcaccgaggagaagtaccaggaggcgttggccaaggaactctgaggagtgtattataaatgagataactgggga

SEQ ID NO: 807110 - DNA, 99 bp, Homo sapiens
gacaatgtagaggatgacttctctaatcagttacgtgggaagccgtgtccgccttttaagattgtgattctggatgaagcagattctatgacctcagct

SEQ ID NO: 807111 - DNA, 98 bp, Homo sapiens
taatagcgtgtttatctgacacggacgagggagcaaaggagtttgctgctgctctcaccgctgagcggataaagaccccaccaaaacgtccaggaggc

SEQ ID NO: 807112 - DNA, 98 bp, Homo sapiens
gaggtgcagaagttgtctgagtgcgttggtcggcggcagtcgggccagacccaggactctgcgactttacttaatgaaggagttcccccttctgagta

SEQ ID NO: 807113 - DNA, 99 bp, Homo sapiens
aacaagattgcttgcaacaattgttatgcttactcaaatccagtacctcaagcaagtccagcagccgagcgttgcccaactgagatcaacaatggtaga

SEQ ID NO: 807114 - DNA, 100 bp, Homo sapiens
tgtgacatgtctgatcccttgctcccatccctgcagcatgaacaaggtagatcgacacttgagaaagctggatcaggaactggctaagtttaaaatggag

SEQ ID NO: 807115 - DNA, 100 bp, Homo sapiens
catctggagatttccactgggactttctggaggcagtcaagtccatcatctccagaaccagctagtcttcctgcagaagatattagtgcaaactccaatg

SEQ ID NO: 807116 - DNA, 98 bp, Homo sapiens
attagaaaaatgcctaaagaacatccacagaatagacctgaagacaaaaatccagaagtacaagcagtctggaatgtatcctgtcaggtataatgtca

SEQ ID NO: 807117 - DNA, 127 bp, Homo sapiens
gaaagcaaccattgtactcagtagaggagtatcagttcagtatcgctacttcaaagggtactttttagaaccaaaggaagaatcctgtaagtacaatcccaagtattctgttgctaatgacaccggc

SEQ ID NO: 807118 - DNA, 98 bp, Homo sapiens
cagccaaggaaggaggcctgcaaattcatgacaggattattgaggtcacttgctctggggaaagccacctgccatgccgtgaggacattcaaactgcc

SEQ ID NO: 807119 - DNA, 104 bp, Homo sapiens
gaggtttggttctcccggcagcagcccgacgcaaaccaaggatctggggatcttcgcactatcccaagaacctgcacttgttgccaagtcttccatcttactag

SEQ ID NO: 807120 - DNA, 98 bp, Homo sapiens
cagcacattgaagtgttgaaggagtccttgactgctaaggagcagagggctgccatcctgcagactgagggggtgaagccagccagttttgacaaagt

SEQ ID NO: 807121 - DNA, 100 bp, Homo sapiens
ggcaacttccgccaattgctacttcaaagaaaccagactgtgatgactgggagagcgggctgaatgcaatggagtgtgcattacatttggaaaaaaatgt

SEQ ID NO: 807122 - DNA, 100 bp, Homo sapiens
gaccatctgaagcatctgcttacaagcattttcctggaaacatgaactgccaagagaggaatgggacacaaaaccaaacactgttttatatttatggttt

SEQ ID NO: 807123 - DNA, 114 bp, Homo sapiens
acttcgcattttggcattgacatttaattttagggtcctttatatagaagggagagtaggttgtacatcctggagacctgaagaattctgttgaagtcgcactgaacaagttgc

SEQ ID NO: 807124 - DNA, 100 bp, Homo sapiens
gcgcttaatcggcctccaacgtaatttctacaagtgtgaaagaattagaaaacttcaggaacttgttacagaatattcattaaagaaaacaagctgatat

SEQ ID NO: 807125 - DNA, 100 bp, Homo sapiens
ctgagcctgttaaagaagaaaaactttcgcctgagcctattttggatcagttccatgacaagaccccttatacgattatgtttggtccagataaatgtgg

SEQ ID NO: 807126 - DNA, 100 bp, Homo sapiens
cttcaggcggtaaaccaacagctcacaaaggagaaagagcactaccaggtgttagggcgatttgatgaaactgttatcgaagagagaagacaatgtgctg

SEQ ID NO: 807127 - DNA, 100 bp, Homo sapiens
gccagccgctgttttgccggaggagcccctcaggccataatcagcaactgctgtgatgagatgctgcctttaatgctgctgcatgtggtcaaacctccac

SEQ ID NO: 807128 - DNA, 100 bp, Homo sapiens
gtttcgtaggatggtttgaaacatcagcaaagaacaccttccaccatgaccacctcagcaagttcccacttaaataaaggcatcaagcaggtgtacatgt

SEQ ID NO: 807129 - DNA, 99 bp, Homo sapiens
ttgaagtcaaagaattgaaaccctccaaaccacgtcatctgattgacagagcgggatgccaccagcttgtccaaagggaagttccaggagctcctggtg

SEQ ID NO: 807130 - DNA, 100 bp, Homo sapiens
cggagaagggcagtggctgtagctgccctttccgtttccagggttccgaccagatttgtgaagctgggaatcatttcatcaatgtaatgttgtctcatcc

SEQ ID NO: 807131 - DNA, 98 bp, Homo sapiens
gcaattcatttgagcaagagctgggagcatttttcccctgggcctgatcaggccatgtgaaactttctgactttggtctttgcacaggactgaaaaaa

SEQ ID NO: 807132 - DNA, 100 bp, Homo sapiens
agaagacagaatcattataaatcccagtagcagtctgctggccagccaagatgagacaaaggtctgccatcatggatgttctcgcagaagcaaatggcac

SEQ ID NO: 807133 - DNA, 100 bp, Homo sapiens
cttacttggttgctttcattgtgggagagatgaagaacctgagtcaggacgtaaatggaaccctggctgtattcatcaccaaagaaaaaacttacaccaa

SEQ ID NO: 807134 - DNA, 100 bp, Homo sapiens
ccctctgcctggcggcagtcacggccaaggtggaatatgtgatcaagtgtgacatgtcagctctgcagaagattctgtatcgccatatgcaagccaaggg

SEQ ID NO: 807135 - DNA, 100 bp, Homo sapiens
aactctttccacttcaagtagtcatgaaaaaactggatcttattagtgaacttagagaacggtctctaattaacagaagatggcaaagcccagccacagc

SEQ ID NO: 807136 - DNA, 100 bp, Homo sapiens
tgccgtggtacgaccgcgaggccaacgacgctgtcctctttggctttctgaccacctggttcctgggtgaggctgtgctgcacatggagcagcggaagca

SEQ ID NO: 807137 - DNA, 99 bp, Homo sapiens
gggattcacttgtgtgcggaactcctcggaaccatggtatggcagatcccagaaaatggactcaccctttccctgactgaacctgtggtgattttggaa

SEQ ID NO: 807138 - DNA, 100 bp, Homo sapiens
gtggcaaaaattgtctgactcacagaaaatgcccacttcatggttagcagcccgtggaacacagagcattcctaatgacagtcctgcccggggtgagggc

SEQ ID NO: 807139 - DNA, 100 bp, Homo sapiens
tgggctcgcctgtcaacgcgcaggacagaatgacttggaagataacggagcttcgaagcttctagcagaatatgaagtctttcgtcttcagctacctggg

SEQ ID NO: 807140 - DNA, 125 bp, Homo sapiens
ccgtgggacatggagtgttccttccgctagtgatcctttgcaccctgcttggagacggacttgcttccgactatagaatctaactggcggtgtggacgacacaacttgcagaggattcagtgccg

SEQ ID NO: 807141 - DNA, 100 bp, Homo sapiens
cgacatcaccacggagaaccagtaccggctgacctcgctgtacgccgagcacccaggcgactgcctcatcttcaagctcccctcccacccggtcactccg

SEQ ID NO: 807142 - DNA, 98 bp, Homo sapiens
ttatggctgtggccttcttatcagcacagagaagcaaagatccaaattcccaggtcaacgctgctcttctgagccgctgtcgagtgattgttcttgag

SEQ ID NO: 807143 - DNA, 100 bp, Homo sapiens
acccacctgctgatgggccttgccagtggccgcattatccttatcctagagctctgcagccagatggaacagctggagcaagagaaccagcaactgaagg

SEQ ID NO: 807144 - DNA, 100 bp, Homo sapiens
ctatctgcgagaacagagaagggagctctatagtcggagtggagaactgcaaggtgctggagaatctggtaaaagcaccattgtgaagcagatgaggatc

SEQ ID NO: 807145 - DNA, 100 bp, Homo sapiens
agagccaaggaataaacatgcaatgaacccaaaagggtcacacaaaacacaggtcctgagttcctacgtgtacaacgatgaggatgacgtctttgcccgg

SEQ ID NO: 807146 - DNA, 98 bp, Homo sapiens
gagacctacactctggagtactgcagacagcactctcctgagggagagggcctcagccgccccgtggtgcctcctttgatcccgccaaagatcccaga

SEQ ID NO: 807147 - DNA, 98 bp, Homo sapiens
ccaccttactctgagggtcaagaattgccgcttccttttagttacttgtaatgttcaagctcagaaatgccttatgtggatcgtcagaatcgcatttg

SEQ ID NO: 807148 - DNA, 50 bp, Homo sapiens
gactgcctcactgagcaaccaagaggaatgggtactgttcaaaaaggaat

SEQ ID NO: 807149 - DNA, 100 bp, Homo sapiens
ggaagagcccgatttcctcaggaggaagtgcccaccgcgtgccccgattggagaggggaccttctgcaggttgtgcaagaggcctttgaaaaagagcagg

SEQ ID NO: 807150 - DNA, 100 bp, Homo sapiens
cggaaagacgagttctcaaagagttgggtttctgcgtccatgtgaagcatcctcataaggtagagcaagaaaagctggacaagatctggcctaagcttcg

SEQ ID NO: 807151 - DNA, 99 bp, Homo sapiens
agcacttctgggagatcaagatgacctctcccgtctacggcaccgacatgctggtggccatcgtagacccccacatcaaggtggactccggctaccgag

SEQ ID NO: 807152 - DNA, 51 bp, Homo sapiens
ttcagcaatatccccacataccttctcaagactattgggaagaagttacct

SEQ ID NO: 807153 - DNA, 101 bp, Homo sapiens
gctgggaggaggctgcccggcgcctggaggtggccatgtaccccttcaagaagtgtactaatggtcacttgatgtgcgctggctgttttatccacctacta

SEQ ID NO: 807154 - DNA, 99 bp, Homo sapiens
atcgcctggccccggctctctggaccttgtctcgctcgggagcggaaacagcggcagccagagctcccagatggacgtatcatcaaagttgggggagag

SEQ ID NO: 807155 - DNA, 50 bp, Homo sapiens
cgcgcctgtagctcgcgggcctcgcagatgaaatgtggcaactgtggtga

SEQ ID NO: 807156 - DNA, 116 bp, Homo sapiens
tcatcaacatctccagcctggtgggggcaatcggccaggcccaggcagttccctatgtggccaccaagtacggaatcagagcccacgagtggatgttcccggtgtgaagctgcagg

SEQ ID NO: 807157 - DNA, 98 bp, Homo sapiens
tctaccgggctgagccaggccccttctcagattgcaaacagtggttctgctggattgataaacccagctgctacaggagctgtgactgatgagaatta

SEQ ID NO: 807158 - DNA, 98 bp, Homo sapiens
cctggcggtccgaaggcatcaagtatcggaagaatgaggtgttcttggacgtcatcgagtctgtcaacctcttggtgtttccccccgggccggcctgc

SEQ ID NO: 807159 - DNA, 100 bp, Homo sapiens
aggaccggcccccacctttcctcaggagtcatttctgttccgcacaggcctgctgaactgggtgctttatataggcctatggcgttggcctccttgtgac

SEQ ID NO: 807160 - DNA, 100 bp, Homo sapiens
acgaggccacccagtcccacttcaaacattcgtctcggaaaccccgcctcttacagtcacgaggacgactgggtttggattcagaagaggattattatac

SEQ ID NO: 807161 - DNA, 98 bp, Homo sapiens
tggaacatgcgttgaaatgtcttcagcgtgaagatcccagtttgaaagtgaggctagatcctgactctggacaaagacggagtcttgctatgttgccc

SEQ ID NO: 807162 - DNA, 100 bp, Homo sapiens
agagatgttatcatgagggaattccggtcagggtcaagtcgtgttctgatcactactgacttgttgcagaccctgcccggcttggcgatggagtttccgg

SEQ ID NO: 807163 - DNA, 99 bp, Homo sapiens
aaaatgtctgtcacatatgatgattccgttggagtagaagtgtccagcgacagcttctgggagatgcagatgttggacaaatttcccatggaaggagga

SEQ ID NO: 807164 - DNA, 100 bp, Homo sapiens
aatcgcatttatggattctatgatgaatatttgtgcaacgaccagcaccatcaagatgcagacccattccgtcaccatgtggctccctcctgctgtccta

SEQ ID NO: 807165 - DNA, 100 bp, Homo sapiens
gatgtgcaacaagtgtctttggttataaattatgatctacctaccaatcgtgaaaactatattcacagatgggaatgatgaacaaccccaatccttatgg

SEQ ID NO: 807166 - DNA, 100 bp, Homo sapiens
gtgtcgagggcaatattgcaagtgggaagacgacatgcctggaattcttctccaacgcgacagacgtcgagggaagccgtggcggacggagcagacggag

SEQ ID NO: 807167 - DNA, 114 bp, Homo sapiens
aagtaccgaaaatagttcccgatgactttgagaccatgctcaacagcaacatcaatgatcccaaaatggctgggcgaaaacttgctctaaaaaccattgactgggtagcttttg

SEQ ID NO: 807168 - DNA, 100 bp, Homo sapiens
tggctagctataatttgacagttcgcgagctaaagcttttcttcagtaaacttcaaggagataaaggacgatggcctgtggacatctctacagcaatgag

SEQ ID NO: 807169 - DNA, 100 bp, Homo sapiens
gagaccctggccgccattggaggtcgtttatacgcaatgcagactggaatgaagatcgatagtaaaactcctgaatgtcgcaaatttttatcaaagttaa

SEQ ID NO: 807170 - DNA, 100 bp, Homo sapiens
gatcaagatggctcttcatggaaatgcattgtcaggattatctactatctagatccatctgttctgtccggcgtttcctgttttgttatgtttttgtgct

SEQ ID NO: 807171 - DNA, 100 bp, Homo sapiens
acagtttgcacaacttcagttcctggaagctaaagagctcttcaggctcttcagctcccctccctgcttctggaaacctctgcctgctgccctggccctg

SEQ ID NO: 807172 - DNA, 99 bp, Homo sapiens
gtgggcaaggcagtggtcagcgacccgcagtccatctgactcctgcttcccgggtgttgctcgttcttcatctgtcacccagactggagtgcagtggcg

SEQ ID NO: 807173 - DNA, 100 bp, Homo sapiens
ggccctgagtcaaagaagatgcctcgaactaaacaaattcatcccagaaatctaagagattgattataccggaacagagccttccagtccctgtaataaa

SEQ ID NO: 807174 - DNA, 98 bp, Homo sapiens
aacgatgagtgagctgacagctaaggggcttgcctaaaccacacaggagttgttcctttggccacatatatgcgaatctataagaaaggtgatattgt

SEQ ID NO: 807175 - DNA, 100 bp, Homo sapiens
gagaaagctaggccatctgaataactttactaagctagagatgatcgctatggaaaatcctgcagacttgaagaagcagttgtatgtggaatttgaagga

SEQ ID NO: 807176 - DNA, 100 bp, Homo sapiens
ctttaatgttgccattccccgattccatatggcatgtccaacattcagggtgtctatagcccgattggtgtcctggtcaatgaaatcctcaatcacatga

SEQ ID NO: 807177 - DNA, 100 bp, Homo sapiens
ccctgccctggtccatcaacagggacgattacgagctgcaggaggtgatcgtgccctcggctagcatgacccgcctgatgcggtcccgcacagcctctgg

SEQ ID NO: 807178 - DNA, 51 bp, Homo sapiens
ccgggaccgccgccgccgccgccaccatgggcaagaggattatgacagatt

SEQ ID NO: 807179 - DNA, 98 bp, Homo sapiens
tcactcatggtttcaagttacagagtgcctatgagagtggcctgatgccttacacgaattacacatttgatttcaagacggagtctcgctctgtcacc

SEQ ID NO: 807180 - DNA, 99 bp, Homo sapiens
ttatggctgctgttgtccaacagaacgacctagtatttgaatttgctagtaacgtcatggaggatgaacgacaggacctatacgaggcaggggaactga

SEQ ID NO: 807181 - DNA, 98 bp, Homo sapiens
ggcgagtcagtgactgaagcgcccgtccattccaaggttcgatacaagaggctgttttcctagcgtggcttgctgcctttggtaagaacatgtcgtcc

SEQ ID NO: 807182 - DNA, 99 bp, Homo sapiens
gtgctgctggcggcgctcctcagcctccgtcttggctcagacgctcatggattttgaagcaagagcaccccgagttggcagtcctcgcagactcggttg

SEQ ID NO: 807183 - DNA, 98 bp, Homo sapiens
aagaggagagagttcttctcttacagtttgttacgggcaggtttggcacctggatcctgtcattgcaaaactggttttggaggtgtgagctgtgatcg

SEQ ID NO: 807184 - DNA, 98 bp, Homo sapiens
tctgggcggcgtgcccagcaagagattaaagatgcagtacgccacggggccgctgctcaagttccagatttggtcttagtggtgcaatggctagtata

SEQ ID NO: 807185 - DNA, 99 bp, Homo sapiens
gagcagttttaccgcgacctccggaggccggcgtgacaggctctgtcactaaaatagaagtgggtggacggaggcctcaccaacgctcttcccatcctg

SEQ ID NO: 807186 - DNA, 98 bp, Homo sapiens
ttcctgtgccacctcctcctttagaaaactgatcttaatacagggttgccacaccatttggaggttttgaaaaagcatcaagaatggttaaatttaaa

SEQ ID NO: 807187 - DNA, 100 bp, Homo sapiens
cgggcgcggacgcgcagcatggcggtggaggacgaggggctccgggtcttccagagcgtgaagatcaagatcggttcgagaacttgtcttggacaattgc

SEQ ID NO: 807188 - DNA, 100 bp, Homo sapiens
tgtcctatgccaaaaatttcgccattgtgggagccatgttttcttgtactgagtgtttgatagaatctgctccccaaaaaggccacaaagacagccccac

SEQ ID NO: 807189 - DNA, 100 bp, Homo sapiens
cgaattcagaaggatatcgacgtcgtgatccagaagtccagagctgaggactgcctgtttgcagaacccagtgacttgattgtaaaaatttacagagcgg

SEQ ID NO: 807190 - DNA, 100 bp, Homo sapiens
agacttgtctcttatttagttctggggagcgcctcgtcgacatgagtgatgtggaggaaaacaacttcgagggcagaatgggcttgtgtgcagaatgcag

SEQ ID NO: 807191 - DNA, 98 bp, Homo sapiens
agtttgaagagagacatttgaaatttctacagcaacttggcaaggcttcgggagcaggaaagaaaagaagcagaagaagctagtcaaaaggaaataga

SEQ ID NO: 807192 - DNA, 99 bp, Homo sapiens
gggaccgactgacggccggccggcttcccggaactggaagccctaccattgaccatgccctgctggacatgcccttcctttgactccctggggagatgc

SEQ ID NO: 807193 - DNA, 100 bp, Homo sapiens
cttgctggtttctttgctggagcacttgagccacgtgcatgaaccaaacccacttcgttcaagacaggtgtttaagcactgcagttcgtcatgaatcatg

SEQ ID NO: 807194 - DNA, 98 bp, Homo sapiens
aggctaaggacattttctataagaactccttgttccgacatcccaaacaggaattgaatgatctggcacgggaccctccagcacagtgttcagcaggt

SEQ ID NO: 807195 - DNA, 99 bp, Homo sapiens
cctgcccaagggccacgtcatctacgaaggcaagaagggccacgtcttgtcctatgagggccaatagcttcaccgtctcctctgtcgccgccccttcct

SEQ ID NO: 807196 - DNA, 99 bp, Homo sapiens
ttcgattgaagcacatcgaccggcgacagcagccaggagtcatgagcgacagcggcgagcagaactacggcgagcggggttattcaaatgctcagaaga

SEQ ID NO: 807197 - DNA, 98 bp, Homo sapiens
gtcactgacacagaaacagtgcctgcatccgagtccccgggagtgatgcctcttagtcttctcagcagagcatcctggccagaacaagccaaggagcc

SEQ ID NO: 807198 - DNA, 98 bp, Homo sapiens
gggtgactcttctcaaatgccttctcatccccacatagaattggtggtaaagaccctgattgtagcagaacctcatgtcctgcatgcctatcgaatgt

SEQ ID NO: 807199 - DNA, 100 bp, Homo sapiens
gaagccggggagaggctgggcccctgcgtggtggtgccccgggcggcggcaaaggagacagacttcggatgggagctgcatggctacttggagaatgagc

SEQ ID NO: 807200 - DNA, 99 bp, Homo sapiens
acagtgccaaagccagccgggccaggaccaaagccggtgatctccgagatacagattagccgatgaattacatatgccatctctccctgaaatgatgtt

SEQ ID NO: 807201 - DNA, 99 bp, Homo sapiens
ttgtttgactctaaagctgttcaaaagattgaggaggtgacagctcagagggtatattacctctctctggaattttacatgggccgaacattacagaac

SEQ ID NO: 807202 - DNA, 100 bp, Homo sapiens
agcttgctttcactctggaccacgagaccggattgcctcaaggatgtcatatctatgagtaccgcgagagcaacaaggcatgctgttgaagcgaagtggc

SEQ ID NO: 807203 - DNA, 124 bp, Homo sapiens
agcggcagcgatcaagcaggcagcgggctttgccagcaaaaccgaaacagagatcctggcaaatgggtgtttcttcccagaaagggatttttctccatgactgcagttgaattgcagagttgta

SEQ ID NO: 807204 - DNA, 99 bp, Homo sapiens
tttacctggctgttcatcttccataatcaactgagagctgcttttgcacattttcctgaactctatgattttgccctctcaaatgtggcagaagtagat

SEQ ID NO: 807205 - DNA, 100 bp, Homo sapiens
ccgacctgggcgctcagcccccggatcagcctgcctctgggcaggcctggcctcccccgagaactcggagcagctcatcattgccttggagcctgaggca

SEQ ID NO: 807206 - DNA, 100 bp, Homo sapiens
gtaccgaacagatttgcttgttgggtcgaacttgtggctattcatttattctcaccaggaattagaagtgcgtctcaccaaccagccaagatgaacatgg

SEQ ID NO: 807207 - DNA, 100 bp, Homo sapiens
tttttggggaagatttacctagctgccaggaatcagagaagatcattgctgagttgaatgaaacttgggaagagaagcttcgtaaaacagaggccatcag

SEQ ID NO: 807208 - DNA, 100 bp, Homo sapiens
gaaacatcattacaatcctcttgaaagtgcttcttttaggcagaatcagcttgctgctacactggcgagcaatgtgaaggtgccgagctataaacctcca

SEQ ID NO: 807209 - DNA, 100 bp, Homo sapiens
cttctccatgccgggattcctgtttaagaacagtatcaagatacttatcttcagcaaatcctaatgataacagaactagctccaatgcagataaaagctt

SEQ ID NO: 807210 - DNA, 100 bp, Homo sapiens
ggttggccctgtgatccctcaagactggtccacggagtgtatgaccacaaacagccatcaagaatcgtaagaatgatgaagcctcttatgaaaagatgtt

SEQ ID NO: 807211 - DNA, 100 bp, Homo sapiens
tggtcacccgggatcgagctgagaatagggacggccccaagaatcatattctaagaactcagccactcaggtatccaccatggtgctgggtcctgaacag

SEQ ID NO: 807212 - DNA, 98 bp, Homo sapiens
cggcgggctgtggggcctccgcgccgcggccgttagtcatgtcggatgttctcaaatagtgatgaagctgtaatcaataaaaaacttcccaaagaact

SEQ ID NO: 807213 - DNA, 100 bp, Homo sapiens
accaactctccataggacgtcgtttcagaagcaaccttgggcttagtcccaccctttttaggcactcttgagaaatcagtgtatgtggtagaagaccaaa

SEQ ID NO: 807214 - DNA, 98 bp, Homo sapiens
cccgaagcggcctgtgacctgtgaacagggctgtgggtctgtttctgtcgactgtggaccacttatgtgcgatccgtggaccacttgcgtgcgatctg

SEQ ID NO: 807215 - DNA, 98 bp, Homo sapiens
cgagtcatacccccaggagtaagagcccatagcagtctgccagacaatagagcatatggaactcaagacatggctgcccagtgtgtcacaaaggtggc

SEQ ID NO: 807216 - DNA, 100 bp, Homo sapiens
tccatcagctccttctactacaaggagcggtctctggctgatgaacttgctcttgtggatgttttggaagataagcttaaaggagaaatgatggatctgc

SEQ ID NO: 807217 - DNA, 129 bp, Homo sapiens
acgcagccatggcggaggcggctttggaagccgtgcggagcgagttacgagaattcccggccgctgcaaggggaaggaaaatcacctcggcagtgtttgaaggaaggatactgcaactctttgaagtac

SEQ ID NO: 807218 - DNA, 100 bp, Homo sapiens
acctctctggagacgagaatgaggagcatattatttaatatctagaagtctagggccagaatttggtggtgcaattggtctaatcttcgcctttgccaac

SEQ ID NO: 807219 - DNA, 50 bp, Homo sapiens
aaattagtgaaggagatgaagtagagggtctctatggcagtgtaatagtg

SEQ ID NO: 807220 - DNA, 98 bp, Homo sapiens
ggcgtttgaatagtagccttgaaaggcgggttacgccccatggtgtccatcctgccagcagactgattcagaatgggaggcttttgcaaagaatggtg

SEQ ID NO: 807221 - DNA, 98 bp, Homo sapiens
tcgcgccgctgctggttgctgtccctgaagaatggctacgtgactgtcagtgagatcaaagccagtcttaaatgggagaccgagcgagcgcggcaagt

SEQ ID NO: 807222 - DNA, 99 bp, Homo sapiens
gcagatgatgcagaggagcgagctgagcgcctccagcgagaagttgagggagaaaggcgggcccgggaacaggagatctattgggaaactgattataac

SEQ ID NO: 807223 - DNA, 101 bp, Homo sapiens
tcaacaatgatgacaacttctgcaaggcggtttctagtgcaaatcccctgctcagggtcttcatccagaaacgagacctgatggccaaaagaaaggaagaa

SEQ ID NO: 807224 - DNA, 100 bp, Homo sapiens
ggaagtttagcattaatggattcagttgttgacctcctgtactggagagacattaagaagactggagtggtgtttggtgccagcctattcctgctgcttt

SEQ ID NO: 807225 - DNA, 98 bp, Homo sapiens
gacttgtgacacggacggcgcgtcctgctgaccccagccggcgccgagggcttggaatctcgagcgggaaaagagagtttcattctgtcgcccaggct

SEQ ID NO: 807226 - DNA, 98 bp, Homo sapiens
ttcagtctgcaagtatggagctcaagttcttaattattcagaatgctgcggttttccaaggccccaatacctatgaagacgcagccgcctacatccaa

SEQ ID NO: 807227 - DNA, 98 bp, Homo sapiens
ggtggcctattgttggagtacgtcttgtgtcagaatttccatatattgaagcagaggttaaagctctcccggggatgggcaccactatagatgtcatc

SEQ ID NO: 807228 - DNA, 98 bp, Homo sapiens
cgtggtgaagctgttcgggccctttaccaggaattactatgttcgggccgtcctgcatctcctgcgatcagtgggtgaccgcggctgcgagggacttt

SEQ ID NO: 807229 - DNA, 100 bp, Homo sapiens
tcattttcatcacatcatatgtcaggccagtgaaattctgggagaaaaactacaaatgaaattatgcagcaggaagtcagacccctgatggcggtggaga

SEQ ID NO: 807230 - DNA, 100 bp, Homo sapiens
tccagaacttgcagcaacaataggattttgcaggttaattcctcacacacgttcaccaggtacttggacaatatattttgaaggtgcagattatgaaagt

SEQ ID NO: 807231 - DNA, 122 bp, Homo sapiens
tgaggcgatacgagatagcagtgaatctggatctcactgaaagacagttggttagtctgctgctaattggaattgctgcgtggggcattggcttcgggctgatttccagtctccgagtggtc

SEQ ID NO: 807232 - DNA, 98 bp, Homo sapiens
aagtttccaagtctcttaaggagcgattaggcatgtcagctgatccagataatgaggatgcaacaggtggtcttcgagggatagcacgaggtggtctg

SEQ ID NO: 807233 - DNA, 98 bp, Homo sapiens
tgatgtgttcccgcgtctactacatgcagatgacatcaagccatgcccacgatgcagtgcatacattatcaagatgaatgatggaagctgtaatcaca

SEQ ID NO: 807234 - DNA, 100 bp, Homo sapiens
cttttgacaggctggcgcctcggctctggggacccgcagcacccaagaaaacctcatttggctcgctgaaggatgaagaccggattttcaccaacctgta

SEQ ID NO: 807235 - DNA, 100 bp, Homo sapiens
tagcaagaactttgctgctctacttgaggaacatgacatttttgttccagaggatgatgatgatgatgactaacaggtatctcaggagattacatttcag

SEQ ID NO: 807236 - DNA, 100 bp, Homo sapiens
gtaccaatccaatgtgaaatctctcctcttatctcctatgctggagaagtagcccctgaagaagatgaaaggaaaaagaggcgacgagaaagaaataaga

SEQ ID NO: 807237 - DNA, 99 bp, Homo sapiens
tgggcaaagtgtggaaacagcagatgtaccctcagtacgccacctactattacccccagtatctgcaagccaaggttcttcattagaagctgtaaccac

SEQ ID NO: 807238 - DNA, 100 bp, Homo sapiens
ttctgcagatccactccttcacagctataccaaacttaaagcatttgaagacatgctggagaacccactgaacagcacccagtggatgaatgatccagaa

SEQ ID NO: 807239 - DNA, 100 bp, Homo sapiens
ccaagccaacagagcctgatgagcatgatggctattcatatgaaaaggaagcaatggaaaattggatcagcaaaaagaaacgtacaagtcccatgacaaa

SEQ ID NO: 807240 - DNA, 100 bp, Homo sapiens
cccggcagtgcagaggaggctcctcagggtctggttggctgcatccagcatggagatatggaccaaaaggaacgagacgtgattatgagggagtttcgtt

SEQ ID NO: 807241 - DNA, 100 bp, Homo sapiens
agtagagcggagcctggcgggcgtgggaacccaggccccgccgaggcggccaggtgtgctttgcctgcatggatggacaagagttccgcttcgcacagct

SEQ ID NO: 807242 - DNA, 98 bp, Homo sapiens
ccctcgtgagttgggcttggtaccgtgctgcccagaatgcccttcgggagatccagacatttaatgtggatgcaccatgccagaccgtggaagattta

SEQ ID NO: 807243 - DNA, 100 bp, Homo sapiens
atcttggcaaagcttctccctcagtatttagaccaggacgtcccagtgatcgggaggagtgggaagagcttcagctacaaccaggacgtggtgctgctgc

SEQ ID NO: 807244 - DNA, 100 bp, Homo sapiens
tgccaacggccacctcttccaagccaagcgctttaacaggctctgcctgcagttgaacacaaagacctggaggagactcccacctccttcagggagaaga

SEQ ID NO: 807245 - DNA, 100 bp, Homo sapiens
ttcctagattcaccaatgacccctattgctctaggtcgtaaccagcctttgaaaaaggagaaaccaaaatggaaaagcgattatcctatgacagatggac

SEQ ID NO: 807246 - DNA, 100 bp, Homo sapiens
gctgggagtgcagcggcctctcctacagagctcagagttctacagagtcaccactgaacaatatcagaaagctgctgaagaggtggaagcaaagttcaag

SEQ ID NO: 807247 - DNA, 98 bp, Homo sapiens
ggtgattgaggacaagaccatcgagctcatggcaacatttcatttgttgcatttccagtttccaataccaactcacctacaaagattttaccaaaaac

SEQ ID NO: 807248 - DNA, 100 bp, Homo sapiens
atttgaacaagatcacacagctagtttatggcagaacttaaaaagttcttggacacctgtttttgaggacttggatgttgtgggtgatggtatgcagtgt

SEQ ID NO: 807249 - DNA, 51 bp, Homo sapiens
agtacacagacgagcatggggaaggaggctattctgcagaccatcctgtta

SEQ ID NO: 807250 - DNA, 100 bp, Homo sapiens
accctgcagccttcccatgctatctgttgacatggaaaacaaggaaaatggctctgtcggtgtaaaaaagtgaaattcgatgctactgtgatgctgccca

SEQ ID NO: 807251 - DNA, 98 bp, Homo sapiens
gctgctgtggacttcacagccaggtctataccaaaactcacctttcctggtggtttactaattggttgtagtcctggttttatgaatgttcccaagat

SEQ ID NO: 807252 - DNA, 98 bp, Homo sapiens
gatgactccgctgaggtggacgtgtacaacccgacgaggaacgaatgggacaagatcccgtccatgaatcagtttgcttcagtgtccccaacagttcc

SEQ ID NO: 807253 - DNA, 100 bp, Homo sapiens
agcaagatcggcagccctaaaggttagggagcaagaaacatccattacatcttcttataccacatggagcatttcaaataagaaatctaccttcattgaa

SEQ ID NO: 807254 - DNA, 50 bp, Homo sapiens
atttttggcctaccctccaaagaaaagaattcagaaggagctggcggaca

SEQ ID NO: 807255 - DNA, 100 bp, Homo sapiens
aagctcctattctgattgctacagatgtggcctccagagggctaggtactgggaacagcttttgatcctttcttaggaggaaaaaacttcgatgaaaagt

SEQ ID NO: 807256 - DNA, 98 bp, Homo sapiens
ctcccgcgccgcacggtggacgagttttctttttaaaagcggaaggagagttttacatggaagtggcttacagaaacttggcgctgaggtgcagggaa

SEQ ID NO: 807257 - DNA, 100 bp, Homo sapiens
gaagaccgcggagacctggagcccttggagctggtgtgggccaagtgccgaggctacccctcctaccctgccttggagtcttttagtcctgctatacagc

SEQ ID NO: 807258 - DNA, 99 bp, Homo sapiens
gcgtgctactgagttcggccggtccgagtcactgtgcgtcgcctgggcccgttcctggtcttctcccccaggttctcaacaggaggtgtgtagaagcgg

SEQ ID NO: 807259 - DNA, 100 bp, Homo sapiens
agtgcctactgttagaagctgaagggatgtcaaagtcatactgcagtgggacggaacgggagtattgtgaggattgagatgactggagtgtgtgtggcct

SEQ ID NO: 807260 - DNA, 98 bp, Homo sapiens
gaggaggggccccagcagcccccgaaggccctatcaggacatggagtatgaaagacggagccagatgaccaagatgctccagatgaacatgagtcgcc

SEQ ID NO: 807261 - DNA, 99 bp, Homo sapiens
tccgtaaagacccatttctctatgagtcttcccatgcacaagatgattaatacagatcttagcagaatcttgaaaagcccagagatccaaagagccctt

SEQ ID NO: 807262 - DNA, 99 bp, Homo sapiens
tactggcttcgcacaaaactgatctccaggaaaatacacctgttgttgaggatcttaaatgtatttcggcattgggttgaacatcatttttatgacttt

SEQ ID NO: 807263 - DNA, 98 bp, Homo sapiens
gtgcctcctgccaaaaagccagaagctccacctcctaaagacatcacggctgcagccctggctacgggtgcctgcatcgtaggaatcctctgcctccc

SEQ ID NO: 807264 - DNA, 100 bp, Homo sapiens
aacatacggagattgacaatcaatgggccatcttggacggaaggttgtgcaggaccagcgttccctgtgcaggcgccactgcgtttcctgcagattccga

SEQ ID NO: 807265 - DNA, 100 bp, Homo sapiens
ccccggcgtggggcgggacagcggccccctggagggggcagtcccgggagaacctgcggcggccggagcgcttccgtgaatgtgctggtgcagaactgca

SEQ ID NO: 807266 - DNA, 99 bp, Homo sapiens
atctctctcatctcgctcggctgcgggaaatcgggctgaagcgactgagtccgcgatggagattctgctggttcacaaactggatggccacaacgcctt

SEQ ID NO: 807267 - DNA, 50 bp, Homo sapiens
ctacacaacaaggcggagtggaggtcacaaacatgtcagacaaaagtgaa

SEQ ID NO: 807268 - DNA, 98 bp, Homo sapiens
cgcaagcaaggcaaaccccagcacttaagcaaacgggaattctcgcaagctccaccatgaggcgaggtggatggaggaagcgagctgaaaatgatggc

SEQ ID NO: 807269 - DNA, 100 bp, Homo sapiens
ggagaagctcttctccggggtcctcatggatctgtccaaaagaattctgcttggtcagaatcgtgatggcattgtgttcagcactgatgactattttcac

SEQ ID NO: 807270 - DNA, 98 bp, Homo sapiens
acggagcaaccccaagtcaccacaaaaacctatcgttagagtcttcctgcccaacaaacagaggacagtgtttgtatgccagaagaagggtttaaagg

SEQ ID NO: 807271 - DNA, 100 bp, Homo sapiens
tgcagaagaatccattgggatatctggagaggttcaagattatctaagaagatttgaaagtataccagatatgcttgaattggatcacctcacagtttca

SEQ ID NO: 807272 - DNA, 100 bp, Homo sapiens
tagcgaaagaaaccctctctgagttcttgggcacgttcatcttgattgatccagtttatggaaaaggaaaacttggagaaatccagggacttatcttggg

SEQ ID NO: 807273 - DNA, 98 bp, Homo sapiens
cgacggaggaggaggagccttccaaacagagagggccttggtgtaccttgttgtagtgtttgaaaacatctgaggctgcatccatctccagcacccca

SEQ ID NO: 807274 - DNA, 100 bp, Homo sapiens
ttgctcccgcctgagcccagcccccagaaaggattgtgacatatcgttggacccagaattgaggtgctaaaatgatgtattttctggacaagtcaaggca

SEQ ID NO: 807275 - DNA, 100 bp, Homo sapiens
gactgaattttctagctataaagaaaatatttacaccagcagctccagttcataccaataaagaagatcctgctacccaaactaatttgggatttatcca

SEQ ID NO: 807276 - DNA, 99 bp, Homo sapiens
acacagaaggtgtgaccccaacgaagagtggagaacggcaacccatccagatcaccatgccggagaactcctggaagccccgtcttcctcctcatgccc

SEQ ID NO: 807277 - DNA, 98 bp, Homo sapiens
tcggacttgggattggagagaaacaggaactgaggtgttaaaatcatcacacaacaggttcaaccaagtaaaatcttacccaaaccagtgacagcaac

SEQ ID NO: 807278 - DNA, 100 bp, Homo sapiens
agcggccgcgtggaggtgctgaccgatgccggagctgcactgggtgttcaacagccatcactccttggagcatctcctaccatttatacacagcaaactg

SEQ ID NO: 807279 - DNA, 100 bp, Homo sapiens
gtcgctacgaccggctagaaatctgggatggattccctgatgaggaagaatacaagcgattgagtgaagcactagcagaggatgggagctacaatgccgt

SEQ ID NO: 807280 - DNA, 98 bp, Homo sapiens
ccagagaaggtctatgaactcatgcgagcatgtgtgatccctcacatccacaaatctctgattggaaagaagggacagcagaaaactgcttagaggga

SEQ ID NO: 807281 - DNA, 100 bp, Homo sapiens
aacggagtgagagttcaaagattctttgtagcagacactgcaaatgaagctctcgaggctgctaagagactaaaatatgagttggaagtaaagagggtgc

SEQ ID NO: 807282 - DNA, 99 bp, Homo sapiens
taaattggaaggatgcacaagttccaaggttacgtttcagtaatggagagtgaagagttcatgttgcttccagccaatcaactcattgatataatatcc

SEQ ID NO: 807283 - DNA, 98 bp, Homo sapiens
gcaatctggcctggctggtggccaaagcctttgggacagcaagtaactggcagaagttttggtgataaagattttcggacaggtttagaaaatggaat

SEQ ID NO: 807284 - DNA, 100 bp, Homo sapiens
tctttctccacccatcccgagaacagaaaccacccctactcctaatcccccgactacagaagaggagaaaacggaatctaatcaggaggttgctaaccca

SEQ ID NO: 807285 - DNA, 99 bp, Homo sapiens
aggagtacagcttagatctcattccattcgatggggatctcttatccatggaatcagagggtgcattcaaagattggatggaacgctgggttgacgatg

SEQ ID NO: 807286 - DNA, 100 bp, Homo sapiens
agaagacctgcacgacgttcatagttgactccacagatccgggagaccttggccagtgccaaggaggagaacgtcgagattcaccagaccttggaccaga

SEQ ID NO: 807287 - DNA, 98 bp, Homo sapiens
gacatcatccagctgcctcaaatcgtcgtagtgggaacgcagggacttgccatgaggtgttgaagccttgtttcactgagttggagagactggaccta

SEQ ID NO: 807288 - DNA, 98 bp, Homo sapiens
atatggagaagtaattcagctacagggtgaccaacgcaagaacatatgccagttcctcgtagagataagatttgtgaccaaatcagtgatgctgtcct

SEQ ID NO: 807289 - DNA, 100 bp, Homo sapiens
taactgaacattggtctaaagtctttccaaaaggtcaaggttcacaagtgtaaacaggaacatcgataagtagtgtaaaaacttgcacaatgaaatccga

SEQ ID NO: 807290 - DNA, 99 bp, Homo sapiens
ggccattaaacctgctgttctgaaaggacttggcctttaccctggaagagagacagcaattgaacattcatggattgttgccaccttccttcaacagtc

SEQ ID NO: 807291 - DNA, 100 bp, Homo sapiens
catgaagagatggtggattctcactgagttttgactagcggaagaaaagcttattgcaggagtgaccaggacactacctcctagaagtaatgcccacaga

SEQ ID NO: 807292 - DNA, 100 bp, Homo sapiens
ctatcagagctaaacagatactagctactgtgaaaaacataatggattcagtaaacctggcagctgaagataaaaggatattattgctggattcctatat

SEQ ID NO: 807293 - DNA, 98 bp, Homo sapiens
cccgcaacttctcccgttgctgctgctgctctgcgtgccggtggtggtgtgcacattgagccccggtatagacagttcccccagctgaccagatccca

SEQ ID NO: 807294 - DNA, 100 bp, Homo sapiens
ctgaagaagccagctggtttcgagaaacagaaatctaccaaactgtgctaatgcgccatgaaaacatacttggtcatatggagacctgcaatgcacccag

SEQ ID NO: 807295 - DNA, 99 bp, Homo sapiens
gagaatacgattcttaaagctactgaagtgcagttcccgccaaagccagtagtaacacctgaagcaaagggaggagatatcaccaaacatgatggaaca

SEQ ID NO: 807296 - DNA, 100 bp, Homo sapiens
tggctaactctgtggcttaagcagaggtcagaacatctgaagtgatctgcagatatcctgggcattgatgtgcgagatgctcctctgaaggaaatcaagg

SEQ ID NO: 807297 - DNA, 100 bp, Homo sapiens
ccgcctggctccccatactagtcgccgagtgctgcaagaactgggtgtgactcggaatccctcccaaccacttccggcgcaagtggcttctgataatcat

SEQ ID NO: 807298 - DNA, 99 bp, Homo sapiens
agatgtcggagaaatagccccaaggacagttgtcagtggcctggtgaatcatgttcctcttgaacagcattccaaaatatgcccggtgctatccgccca

SEQ ID NO: 807299 - DNA, 100 bp, Homo sapiens
aaaactgaaggagaagcccatgaagagatggtggattctcactgagttttgactagcggaagaaaaggcctcaagaaaggagaactagttatgaaccgtt

SEQ ID NO: 807300 - DNA, 100 bp, Homo sapiens
aatgatggccccaatcccgtggtccagatcatttatagtgacaaatggtgggctttgacagcgagaatcccggggacgacgggcagatgcacaaggggct

SEQ ID NO: 807301 - DNA, 100 bp, Homo sapiens
ctaaagaggctgcccagaaagcagttaacagtgccaccggtgttccaactgtttaaaaaccaaacttgttttctcatgatgcagttgtgagagaaatgcc

SEQ ID NO: 807302 - DNA, 100 bp, Homo sapiens
atcaaggtagcacatacttgtctccatcctcaggaatcccttcctgatactagaagtgagttttagaagccaaactgactgaggagtgggacggttcgtt

SEQ ID NO: 807303 - DNA, 100 bp, Homo sapiens
gaagtggggagagtacaggtccctaatggtgcaggagcagcggctggtgcatgctctctccttcctgcttcctccttgctgtggtggctgggatgcttct

SEQ ID NO: 807304 - DNA, 100 bp, Homo sapiens
ctggtggctcctcttgatgccaacactctggggaaggtggccagtggcatctgtgacaacttgcttatgttcattctggacagagtggaaggtgatactt

SEQ ID NO: 807305 - DNA, 100 bp, Homo sapiens
caccgggatcgtgaccgagaccgtgaccgagagcgtgaccgagagcgcgaatatcgtcatcgttagaagaaggtgggtgcggctgctatttggacgagag

SEQ ID NO: 807306 - DNA, 100 bp, Homo sapiens
ctgacacaaacttcaggaaaggattttgcacttgtgcagaccgggcgagcagagtaagaagcagttcatcagagaagatatgaaatataaagatgctact

SEQ ID NO: 807307 - DNA, 100 bp, Homo sapiens
aggggcccccgcccggcgggcccggcggccgcagcgaggagaagatctcggactcggaggaattacatgaatgacagtcttcgaaccaatgtgtttgttc

SEQ ID NO: 807308 - DNA, 100 bp, Homo sapiens
caactgctacattgctgtcgcgagaagtggcggcatcgagaccatcgccaatgagtacagcgacaggtgtaccccgttctcctgaaaagaaagctgaaca

SEQ ID NO: 807309 - DNA, 98 bp, Homo sapiens
gggatgagccgtgctcccggtggaagcaagggagcccagccggagccatgattatgtttgagaccttcaacaccccggccatgtacgtggccatccag

SEQ ID NO: 807310 - DNA, 99 bp, Homo sapiens
agaaatacagatccaagacaaagacaggatgggcactgctggaaaacagataatctcagtgataccttgaagaagctgaagataacagctgttgacaag

SEQ ID NO: 807311 - DNA, 100 bp, Homo sapiens
aagtattccaagagaagttgtggcatataataaaaatataaatgatgactttgaaatgatagattgtggtggaagatgcaatgctgatgtttgataaaac

SEQ ID NO: 807312 - DNA, 100 bp, Homo sapiens
ggtggagtatggcaaggacagttgcatcatcaaagaaggagacgtggggtcactggtgtatgtcatggaaggcatatcacacctgaaaaattttatgtgg

SEQ ID NO: 807313 - DNA, 98 bp, Homo sapiens
aaaactctttcgtcatcctcatattatcaaactagttctaaagttcctgttgcttcagacaatggatgagcaatcacaaggaatgcaagggccacctg

SEQ ID NO: 807314 - DNA, 100 bp, Homo sapiens
cctcagcggtggctcccaagaagtccgagacacgcggtgaggcggcgacgggctccggtctctggctgatgaacttgctcttgtggatgttttggaagat

SEQ ID NO: 807315 - DNA, 100 bp, Homo sapiens
tcgaagacctggagtcatgtggtcagtcagagctgctgagggaactggaggctttaccgccagcacctgttcagaatcacacaaataagcatcaggtatt

SEQ ID NO: 807316 - DNA, 100 bp, Homo sapiens
ctttagctgttcaacttatgaaacaaaaatatgacagatacctagcatctagcaaaataatggcagctgcttaccttgaccccaacttgaatcacacacc

SEQ ID NO: 807317 - DNA, 99 bp, Homo sapiens
tgaagtttctctaacttcaggacatgctatcatcaggactcccatgggtcagagcaccataacatggtgtgggaagtgaagacaaatcagatgcctaat

SEQ ID NO: 807318 - DNA, 98 bp, Homo sapiens
ggccttgaaaagcagaagacaatccaaaacaaacgctattcctctcacaacagtccaggctctgcagacagcatcccacctgtcccagcaggctgacc

SEQ ID NO: 807319 - DNA, 98 bp, Homo sapiens
cgacacatatcttgatattccattggtcatccgaccttatgggtccagccaagcatttgctagtgtgctggaaggatccctggagcaagagaagaagg

SEQ ID NO: 807320 - DNA, 100 bp, Homo sapiens
ggcgaacgcttcgctggccatttaggagctctgctcaaagccagacggattggccatttgatgatggagctccaccccctaatcagatagtagatgattg

SEQ ID NO: 807321 - DNA, 98 bp, Homo sapiens
gaagacgagatccagttcctgcgaactaccgcccaggtttgctgaatgtgaagcccattgaagacattcaagacaacctgctacaagccctggagctc

SEQ ID NO: 807322 - DNA, 98 bp, Homo sapiens
cgcgggaatgaagcgggcgctgggcagctgagctgactgctgcccactttggaggaggcggtgggctccttcacaagaagactcaacaggaaggcgag

SEQ ID NO: 807323 - DNA, 100 bp, Homo sapiens
agaagtatgaggccagccgggaggacatctacaagcgggacggcatcagaattaatgtaactacactgaaagatgatggggacatatctaaacagcaggt

SEQ ID NO: 807324 - DNA, 100 bp, Homo sapiens
gaagatggtcattctgacagagcctgaggccagcgagaccgaggagaatggctccgacagcttcatgcattccatggacccacagctggaacggcaagtg

SEQ ID NO: 807325 - DNA, 98 bp, Homo sapiens
gaagcgggcggcgcgggggagatgagactggctccagctttccttgaaatcctgcagagccttcattaaaatgagtgcaaggcctgtagcacggccgc

SEQ ID NO: 807326 - DNA, 98 bp, Homo sapiens
gcaccatcaagcatggatcggcgctggacgtgctcctctccatggggttccccagagcccgcgcccataaccagcagaccacagcattcaggcatcct

SEQ ID NO: 807327 - DNA, 100 bp, Homo sapiens
acaaattttggaacataaaaataaaatgcttaaaaatcatcttcgaaatgacaatcaagaggcaccttccactagcaacagtctccccaggcacaacaca

SEQ ID NO: 807328 - DNA, 99 bp, Homo sapiens
cttgatgaagaatctcgaatccatgctacacttttggaatatggcagccactgttccatccctgacccatctttgtcgtttggaaattcggtccagtct

SEQ ID NO: 807329 - DNA, 100 bp, Homo sapiens
aaaaagaatgaaccgcttgcttcttatttagcgcccccctcgcgggcccagctgcaactgcacttgcccgccaaccggttgcaggcggtggagggagggg

SEQ ID NO: 807330 - DNA, 100 bp, Homo sapiens
ggaagttactgccgcgccaccgagtccggaccggagactttggggcctaactagtcaatcctttcccatggtaccgtggcagactgtgctgttgttggca

SEQ ID NO: 807331 - DNA, 100 bp, Homo sapiens
catcgcgggcatcttgctgttcgtgattatatttcttggagttgtgttggtaatgaagaaaaggtgtttgcacttgtgacagcagtatgctgtcttgccg

SEQ ID NO: 807332 - DNA, 102 bp, Homo sapiens
taaaagatgatgagaaataaggacaaaagccaagaggaggacagttcgctacacagcaatgcatcgaggtcaggatggctaactggttggctccccacatgg

SEQ ID NO: 807333 - DNA, 100 bp, Homo sapiens
gcaacatgctcagcaggagcttcatcaacgatatatgtcagatctaaagacgagatgatgcctattggccagaaggaaagcgtgtggcaatggaggaccg

SEQ ID NO: 807334 - DNA, 100 bp, Homo sapiens
ctcaactcaactatttctacatctctcctggaggtcacatttagggcaggcaaaacataagggatatagccctcctgagagtagaaaatctaattctaag

SEQ ID NO: 807335 - DNA, 100 bp, Homo sapiens
atgttgtccatggaacaagtttctcatggcactcaaaatagagtatgggctcacaagaagatgattcaggaaacaaaccatccagttattcttgaaacta

SEQ ID NO: 807336 - DNA, 98 bp, Homo sapiens
gttgagaaaatgggagcagttttcatggatgcccctgtttctggtgcccctggaggaacgcgcatagatgatggtgacaagaccaagatgaccaacca

SEQ ID NO: 807337 - DNA, 100 bp, Homo sapiens
ctgacacctcagggacaaagagatctggacagaatcgccggacaggtggccatcgagtttgatgaacacatcaatgtggccttcagctgcgtgtctgcca

SEQ ID NO: 807338 - DNA, 100 bp, Homo sapiens
gaagactctcccttcccttcctttgcccaggctgaagccgacgtagcttctctgaacagacgcatccagctggttgaggaagagttggatcgtgcccagg

SEQ ID NO: 807339 - DNA, 100 bp, Homo sapiens
gactcaagacacacaactcataacagttgatgaaaaattgatgttctcagtgcagctgagtcttggtgagcagacatgggaatccgaaggcagcagtata

SEQ ID NO: 807340 - DNA, 98 bp, Homo sapiens
gccaattcagttaatacagcttcgtgggattttcctgttcctatctgtagagtgcacactggtttttggctgttgtttgtttccccggtttggaaaaa

SEQ ID NO: 807341 - DNA, 100 bp, Homo sapiens
tccagaacaacccccacgccagctacagcgcccctccgcttatcacacagactttcagccaccacaatcagctggcacagaagacccggcgggagaagag

SEQ ID NO: 807342 - DNA, 98 bp, Homo sapiens
tctcagcacccaatgcctggcatatatgttatagttttgccgctggactcttccctcccttcccccaccccatcaggatgatatgagacttgaaagaa

SEQ ID NO: 807343 - DNA, 100 bp, Homo sapiens
tccctgctgtgtttggggacttcctgggccgggagcgcctgggatccttcggcagcatcacccggcagcaggagggtaatagcctgcagctggtgttttg

SEQ ID NO: 807344 - DNA, 100 bp, Homo sapiens
aaaacaaattgaagcactccaaggagagcttaaaattgctgttttacagaagggcacgttctcatttgaatttcagcccctgaaagctggagaaaccttc

SEQ ID NO: 807345 - DNA, 98 bp, Homo sapiens
ctgttccaccttcagagcgtcacggcgtacgccctcatggggaaaatctccccggtgactttcaggtttttaatgaagataccagatccttggagatt

SEQ ID NO: 807346 - DNA, 98 bp, Homo sapiens
ggaggaagtctatgaacccaaccctttcagtaaatacttggaagataacagcgacctcttttctgaacaggcttctttacctgcaacaactgatcttc

SEQ ID NO: 807347 - DNA, 98 bp, Homo sapiens
aatagtgaattcattcttcaagaagaggcaccagaactagcacctctgaaaagtaaaatgatctatgcaagctccaaggatgcaattaaaaagaaatt

SEQ ID NO: 807348 - DNA, 100 bp, Homo sapiens
agaaaacaagggagctacaagttggcctgaattctacattgatcagctcaattccatggctgctgcactaaggtaaagtcaataagaacacagactgact

SEQ ID NO: 807349 - DNA, 100 bp, Homo sapiens
gacagaaatgttgatgtggtacttgaagacacctgtactgttgcttccttcaaaatgtctactgttcacgaaatcctgtgcaagctcagcttggagggtg

SEQ ID NO: 807350 - DNA, 98 bp, Homo sapiens
ctagtattcaggtcattgtgtaaactgtcaatgaaaccactgtcagatggaccaccagatccaaactttaatgaagcaccagttgagattcccagtcc

SEQ ID NO: 807351 - DNA, 98 bp, Homo sapiens
agttcttgggacaaacttcatttgaaagcatcatcattcaccagttacgaatgaactccagatgaaatggtaaaccaagcacatactgggtgtgtgta

SEQ ID NO: 807352 - DNA, 98 bp, Homo sapiens
ctttcccatcaggtttcctgatgtgagcagcatcaacaaagagagcattgtggatgtagaaggtgttgtgagaaaagtgaatcagaaaattggaagct

SEQ ID NO: 807353 - DNA, 98 bp, Homo sapiens
gtgtattactcgttattctgcaggagttgcattggaaagaccacagcaagattctttcattcgtctcctcctagcctgggggaccaggctcgaactga

SEQ ID NO: 807354 - DNA, 98 bp, Homo sapiens
ttccatgcatccctaccagcggcctgttgcagtctccaaggcaccatgaatgccatcgtggctctctgccacttctgcgagctccacggcccccgcac

SEQ ID NO: 807355 - DNA, 100 bp, Homo sapiens
tcacgggtagagattggcttcgggctgagctagcagtgagcaccttttggcccaatgaatatcaggatgaaggtttaaggctcagaaaggtagcacattc

SEQ ID NO: 807356 - DNA, 99 bp, Homo sapiens
ttttacttcggcccgcttcttctggtcactccgccaccgtagatttgcttgtaaatgcatcacgaagaggcagcccagaatgaagaaagcaagcaggag

SEQ ID NO: 807357 - DNA, 100 bp, Homo sapiens
cagaaacccattatacttcaagtggtaaccctcaaaccaccacacggaaattggagcgttgggccggagcactagcctcacggagaaggatctgaaagaa

SEQ ID NO: 807358 - DNA, 98 bp, Homo sapiens
gagacatttgacccagagaaggagacatggttccagttgtagcctggctgctggtcttgagtctctggggctaacagatatccgaacgctagttcgat

SEQ ID NO: 807359 - DNA, 100 bp, Homo sapiens
gtccttctttgtggagagcaaggccatgtcaaaggacgccctgaatctggcgcagatgcaggagcagacgctgcagttggagcaacagtccaagctcaaa

SEQ ID NO: 807360 - DNA, 100 bp, Homo sapiens
agaaagcgcctttctccaggctcaaaagagtatcagatatgcctcttcatgttcgacgcagtagtgacccagctctaattggcctctccacttctgtcag

SEQ ID NO: 807361 - DNA, 100 bp, Homo sapiens
tgaacgaattctcaacccctacaacttattcctgtccggagacagcctaagggaattttcaacgtccggttcatctaatacagacactggtaaagttact

SEQ ID NO: 807362 - DNA, 99 bp, Homo sapiens
ctgagaggagtgaaggcggcaaaatggcggaccgcttctcccgcttcaacgaagaccgagactttcaggagacgcaggtcagaatggaaatgggctgca

SEQ ID NO: 807363 - DNA, 99 bp, Homo sapiens
tgcggcgcggcggccccgggaccaaggagtgcacgatctgattttctggagagatgtgaagaagactgggtttgtctttggcaccacgctgatcatgct

SEQ ID NO: 807364 - DNA, 100 bp, Homo sapiens
ggtaaagttcaccttgaattaaaactgaatgaactgataacggagaatggaactgtatgccagcagcttgttgtacagagctgatgcagcagaatgggat

SEQ ID NO: 807365 - DNA, 99 bp, Homo sapiens
ttggctgtctccagaagctgctgtttggaaaggtggcaaaggatagcagcaggattatctccgagaagaagctgaagaggaggcggaagccggagtttg

SEQ ID NO: 807366 - DNA, 100 bp, Homo sapiens
ggcgctggtcgtcagcgccgaggctgggctgaggcgccgcggtaccatgaggcgccgaaagtgagtgagaaggttggaggagctgaaggaaccaagctag

SEQ ID NO: 807367 - DNA, 100 bp, Homo sapiens
caactcacaagtgcatgggagattcctgcatcttttgcgctctcaaggtagccaatctgaattctaaggacctctcatataccttaaaggattatgtttt

SEQ ID NO: 807368 - DNA, 100 bp, Homo sapiens
ggacacccacacccctgtattctcctccgaaccccttcatgcccaaatcccggaaactccagcgtgtctccagccgtgatgccagatatacgaaacccag

SEQ ID NO: 807369 - DNA, 101 bp, Homo sapiens
aggtgtatgtgcccacagtgtttgagaactatgtggcagatatcgaggtggatggaaagcaggaaacccagaagttctgtgaacaagtccatgctgccatc

SEQ ID NO: 807370 - DNA, 100 bp, Homo sapiens
acaatttacagtattggggattggattacccacctcttacagcttatcatagtctcctatgtgcatatgtgtgtgaagatgccttaagaaaaaataagag

SEQ ID NO: 807371 - DNA, 100 bp, Homo sapiens
gctgtgtgaagcttcgagcattgacagcaatactggagtaaccgcttcctaaaccattttgcagaaatgtaagggtgttcggttgcgtgcatgtgcgttt

SEQ ID NO: 807372 - DNA, 100 bp, Homo sapiens
ttgaccgcagtaatgaacaaatctccagctgctaaggtggaaagccagatgacatcaccgtccttctttcaatagtggctgagtatacagactagctgag

SEQ ID NO: 807373 - DNA, 98 bp, Homo sapiens
cgagaacatggactcatcttcatggaaacgtctgctaagactgcttccaatgtagaagagatttatcgaggtgtgagagtcggagggttgaaagagtc

SEQ ID NO: 807374 - DNA, 99 bp, Homo sapiens
gagtgcagccactcggccctgcgccgcgacaagtacgtggccgagttcctcgagtgggagaaatctcagcccccacctccacagccagcaaggtcagct

SEQ ID NO: 807375 - DNA, 99 bp, Homo sapiens
aggaaggaaacattcagtgggagagccgtacctatccttatcctggaaccccaatcactcagcgcttctcgcacagtgtggaccactacaacgaggtga

SEQ ID NO: 807376 - DNA, 100 bp, Homo sapiens
ggaggatgtggtgctgcccgagaaggtggacgtgctggtgtctgagtggatggggacctgcctgctggtggtatcacggaaaacttgacagaacgatagc

SEQ ID NO: 807377 - DNA, 100 bp, Homo sapiens
ccccatctgatttaatcactgtgcaatgaccgtgaactgtacagttacctccgtgtgtcacaggaagactcttgaaaagaccagtgccctcagtctgagc

SEQ ID NO: 807378 - DNA, 60 bp, Homo sapiens
ccctggagcagcatcgaggcccgggagataccccagaatcttccatgctccgtcacactg

SEQ ID NO: 807379 - DNA, 99 bp, Homo sapiens
gtagaaaaagcaagagtttgttatatagcaatacccataatatctgccgaacatctgactagccacaagtatgttacccagatgtagaattttcatcac

SEQ ID NO: 807380 - DNA, 100 bp, Homo sapiens
agatttctcgctttggctatgcacactgggccatctacgtgggagatggctatgtggtccatctggctccggcaaggaaaaccaagacccagacctggag

SEQ ID NO: 807381 - DNA, 100 bp, Homo sapiens
aaactgtggaagtcattaggaacaatggtgcaagactgccatcagtgagaattatcagacaatgtcggacactactttcaaagccttacgtcgacagttg

SEQ ID NO: 807382 - DNA, 98 bp, Homo sapiens
taaggctactggagaaccccggccaactgccatctggacaaaagatggaaaggagtggcgggtgaggaggagctgcaggtgattcagcctgacaagtc

SEQ ID NO: 807383 - DNA, 100 bp, Homo sapiens
ctccattcccgggaggggggagcggcgttggaggccaccgtttccaggttttcacctcaaatggccccacggtgatcatgcccacctggttctgctcgcg

SEQ ID NO: 807384 - DNA, 100 bp, Homo sapiens
tggaccaggccctcaagtccctgatggcctcagaggaggagatcgggctggtggtcatcctggcttccacggtggtggccatgtcggccgtggcccagct

SEQ ID NO: 807385 - DNA, 100 bp, Homo sapiens
acgtggttcgatggctgccgcggctacgctgaggctctccgctcaggattatatctgtccaagatgcgagtctggttttatcgaggagcttccggaagag

SEQ ID NO: 807386 - DNA, 100 bp, Homo sapiens
cggcctcctgaaggaggggaagggacgtgggggcggccacggcagataacatgtggaagctgtaggcattataagcccacgtttgatgaacagtctcaga

SEQ ID NO: 807387 - DNA, 100 bp, Homo sapiens
tttcttatctggatcttgaagatattgccaggctttgtcaaacatcacacagatttgcaaagttcattgactggctattcagcatcatggaaagccctaa

SEQ ID NO: 807388 - DNA, 100 bp, Homo sapiens
attctttgtacagaaattgaaaggcttcaaagctagcaggacaaccttaaacttccaccacaagaggaatataaagaggtccctcctgcaccaagaaaga

SEQ ID NO: 807389 - DNA, 100 bp, Homo sapiens
tccatcacccaccaacaacaccacaataatccacagccaagaaaggtgactcttttgatggtgggacttgataatgctggtaaaaccgcaacagcaaagg

SEQ ID NO: 807390 - DNA, 99 bp, Homo sapiens
aaaagttcaagtttcatggtgattatagcacagctccgaaaccttcatgccttcttgatacctcatacttcaaaagtgcccaaccgcttgcttatcctc

SEQ ID NO: 807391 - DNA, 100 bp, Homo sapiens
ctgctgaagcacagcagagcacgctcacctgaccagctcataaagcaggtgcactttacaggtccccgatgaaccaagagaaccctccaccatatccagg

SEQ ID NO: 807392 - DNA, 99 bp, Homo sapiens
gcgctttcctgggttgcttctggcggccatggtgttgctgctgtactccttctccgatcactgtgtccactactatgatcttcgtaacactaaacagcc

SEQ ID NO: 807393 - DNA, 98 bp, Homo sapiens
tgaagcaaaagatcagcgaggagcagcagcagctccagcaggcgctggctcctgctcagaacgcttttgatgtgctgggcttcacttcagaggagaaa

SEQ ID NO: 807394 - DNA, 99 bp, Homo sapiens
gacttcatcgccctggagatcgtggacgagcaggtgcagctcaccttctctgcagtctctgctggatgaaccgaatcctaacagtccagccaatagcca

SEQ ID NO: 807395 - DNA, 100 bp, Homo sapiens
tatgatcattgacaaactggaagagtgagggccccaaggctgttgcagctcctcgacctgatcggttggtcaatcgcttgaagaatatcactctggatga

SEQ ID NO: 807396 - DNA, 98 bp, Homo sapiens
attccaggcctatctctggcacacgtcttagtccactagagctgattggccatcgggactttgatgtggagaagcgacttcggagagacctcaggagg

SEQ ID NO: 807397 - DNA, 100 bp, Homo sapiens
gcctgcgaaataccttgatgaggatacaatctaccacctacagccaagtggcagatttgttattggtgggcctcagggttggattagtagaatctaaaat

SEQ ID NO: 807398 - DNA, 100 bp, Homo sapiens
tggagccccaggtctgcctccacgccagaggatgaagcatcttcccaaactgatttaagccaaacgatctcaaagaaaactgtcaggagcatacaagagg

SEQ ID NO: 807399 - DNA, 100 bp, Homo sapiens
agcacagctgccttgtctggagaagcaggtcctcgatgggcttcctggaatattggtgtgtttatttgcatcagatgtgctggaattcatagaaatcttg

SEQ ID NO: 807400 - DNA, 100 bp, Homo sapiens
ggttatctccatcctggaggctgcgtggacgcccttctggaagcacgcatcccatgtcctctggggagtagtagagtctcgctctgtcgcccaggctgga

SEQ ID NO: 807401 - DNA, 99 bp, Homo sapiens
gaacagtgccctctgcagctgaataacccttttaacgagtattccaaatttgatggcaaggtgaacccgtgagcaactgtggtacctccacctgtccca

SEQ ID NO: 807402 - DNA, 100 bp, Homo sapiens
cacttgtggagagctcgaattccagaatgatgaaattgtgtcctggatgcctcatcccttagtttcaacaccagattgaaatggtttgccatctgcttcg

SEQ ID NO: 807403 - DNA, 100 bp, Homo sapiens
cgttatcgtcatgttcactgctctccaactgcatagacagtgtgtcgtttgcaaattcatgatgttgctatcaaaagttgagaaattgtcagaagaaatc

SEQ ID NO: 807404 - DNA, 100 bp, Homo sapiens
tcaacccagaggatccccagtatgcatctcaagatgtgggccatgctatgatagtggaagcttatccaaaataatagatccagaagaagtgacctgaagt

SEQ ID NO: 807405 - DNA, 98 bp, Homo sapiens
tatggaagcagaagaagctgaggatgaagaagatgacatagggtacctccaactttccggggtttcagaagagaattttttattgaaactggaagacc

SEQ ID NO: 807406 - DNA, 100 bp, Homo sapiens
ttttgcatgagaggattgaacaagagattgagatggaaatgaaagtatcaccttttgccatgatagcatttctttcattggacagttccttacaagggct

SEQ ID NO: 807407 - DNA, 98 bp, Homo sapiens
gagctgacggtggaggttcgcggctctaacggggctttctacaagctcttcagtaggttacctgcaacatccaggatcagaacaagtacaatttcctc

SEQ ID NO: 807408 - DNA, 100 bp, Homo sapiens
ggcatcactgcagctagtaatttgccttctggattattagcctgaggcctgctcagtcgttcctaatgaataaaaatcaagtgccaaagcttcagcccca

SEQ ID NO: 807409 - DNA, 98 bp, Homo sapiens
tccaggctcactgacattgagagtgcgaagaaccctgaagagcggcctgaccccagaagaagccagagccctgggcttggttggcacctcggagttgc

SEQ ID NO: 807410 - DNA, 99 bp, Homo sapiens
tggagtctattcctggattcaatgtcatccagagcccagagcaggtgaggtcccagcttgaagagaaagaaaacaagaagttccctgtgtttaaggccg

SEQ ID NO: 807411 - DNA, 100 bp, Homo sapiens
aagttgtttctggaattgatctcgccaaaaaggacatctttggagccagactcattctgatgaaggaaagagcgtccctgtgcagctgcgtgtccttcag

SEQ ID NO: 807412 - DNA, 100 bp, Homo sapiens
tggatgcatattcaaaaaaactgggctcccgggcagagaagaaagcagagcccccacctagcaagcccacggtggccaagacggggctggcactgatcaa

SEQ ID NO: 807413 - DNA, 99 bp, Homo sapiens
ccttctctcctggacagaaggccgtgtcctgggacttctctgatggcgagaggctgcggctgtaccagccataaggatgagtttaccattattcctgta

SEQ ID NO: 807414 - DNA, 98 bp, Homo sapiens
tgcgctctccgcaccgcggcttaaatgatgtattttgtgatcgcagcgatgaaagactgtccaggacggccggcagtttctaaagtatgttgacccca

SEQ ID NO: 807415 - DNA, 120 bp, Homo sapiens
atctccttcctagagcaaggcaaagagccctggatggtggagagagtggtgtctggaggcctgtgtccagaaatttctgaataaattggcagaagaacgcagacagaagaaggaaactta

SEQ ID NO: 807416 - DNA, 100 bp, Homo sapiens
cccacaaggactgtgaggtggccccactgcccaccatttacaaacgccagaagatcccaaagagaagattgatattgggctgcctccacccaaagtctcc

SEQ ID NO: 807417 - DNA, 100 bp, Homo sapiens
acacagatccagagtgttactggcttacaaattggattgaggacttggcctttaccctggaagagagacagcaattgaacattcatggattgttgccacc

SEQ ID NO: 807418 - DNA, 100 bp, Homo sapiens
aaagccctgaatggttcaataaggccctggccaacgtcaacattgggagcctcatctgcaatgtaggggccggtggacctgctccagcagctggtgctgc

SEQ ID NO: 807419 - DNA, 100 bp, Homo sapiens
ctggtgttcctcctgcccatggaagagtcatacatcaatttccttgcaattaaccaaaaagacaaatcccaatctgctgaaatatgggaaaaattgaatt

SEQ ID NO: 807420 - DNA, 100 bp, Homo sapiens
gtttcagaattgcaattccaaaatgtgtaagacgggatattctcttctgtgctgtcaaggctgacggcccagagggtgggtgccaattccaccagcagct

SEQ ID NO: 807421 - DNA, 100 bp, Homo sapiens
caaccggcagacccgactgaatggtttgggtacccagaccccacctacctgacccgggtgcaagaggagctgagagcgaagggtatcacagatgactgaa

SEQ ID NO: 807422 - DNA, 99 bp, Homo sapiens
agcactgcaggcagagcctggccagcagtgatgtccttgcattgcccatttttaagcaagaagagtcgagtttgcctcctgataatgagaataaaatcc

SEQ ID NO: 807423 - DNA, 99 bp, Homo sapiens
aagaaggctgctattgaaagagagtatgcacagctgctgtgacttactcgaagcctcgattggccacattttggtactacgccaaggttgagctggttc

SEQ ID NO: 807424 - DNA, 100 bp, Homo sapiens
tgttccttttcaggacagctgtgatccacaaattagtgaatttccatcagaatgttgtagtgtgatggcaggaggtactctgactggatggcatgctgat

SEQ ID NO: 807425 - DNA, 100 bp, Homo sapiens
tggaattattgctggaagactggcatatgtcaatgaagagcttccagccagaagaaaacgaaatcgtgaggatggggaaaagacatttgttgcacaaatg

SEQ ID NO: 807426 - DNA, 98 bp, Homo sapiens
gaactttctaacacatctgaaaatgatgagcaaaatgctgaggatttgggcaatgtgtatgtgaagtgcccatcaattgctgcagctattgctgctgt

SEQ ID NO: 807427 - DNA, 100 bp, Homo sapiens
atgaggcggcagcagaagctaaagcaggccaatcaaggcctggccgacaacaccgttattgctaaagtaaataatgttgtgtgggacctggaccgccctc

SEQ ID NO: 807428 - DNA, 99 bp, Homo sapiens
ttttagtctaaatgatgggcagtcatggtcccagaaacgtcactatcaagaagccttagtctttgagaaaagatggctgaaagagaggaactctccaag

SEQ ID NO: 807429 - DNA, 100 bp, Homo sapiens
agcagtagactgttggaagtaagggctaagttctaaaaacatcagttcatctccaagcgttgagagtttgcctggaggaagagaattcactggctctcca

SEQ ID NO: 807430 - DNA, 98 bp, Homo sapiens
cctgactcagatgccgaggtggatggtgtggatgaagaggaggaggacgaaggtatcttgcggtaccgagtagatttccagggaatggaataccaagg

SEQ ID NO: 807431 - DNA, 50 bp, Homo sapiens
cagaacttcccttcctcgtagacacagtgtttgtgaccaaaggaccaact

SEQ ID NO: 807432 - DNA, 100 bp, Homo sapiens
ttacttcaagcaggggctgatttagttcgttaccgtgaacgcatcaccattcttcgagggaatcatgagagcagacagatcacacaagtttatggtttct

SEQ ID NO: 807433 - DNA, 98 bp, Homo sapiens
cagagatcaaaccacttctaaatgataagacataaccagtgcggtgcaatccaagcgaagaaaatccaagtaaacaagcaggactgcgacttgatact

SEQ ID NO: 807434 - DNA, 98 bp, Homo sapiens
aaggcggaggagacccagcgttctgtcaacgacctcaccagccagcgggccaagttgcaaaccgagaatgatcaatgttctccgaaacaggatcaacg

SEQ ID NO: 807435 - DNA, 99 bp, Homo sapiens
tcaggagagcagtcttctgaagaattgtggctcagttttcttggaaactacttgtcatgcttcaccccttcctccatctgctgcacctaccactgattc

SEQ ID NO: 807436 - DNA, 149 bp, Homo sapiens
cgcgggcctcgcctccgccctccgccacctcgagctgcggtagcagcgactcatgagagcgcggccggaggacagcttgcattcacaagagatgggctctgtggtctgtggaatgaaatggttaaagatggagaaattgtatacactgg

SEQ ID NO: 807437 - DNA, 98 bp, Homo sapiens
cttcccgtgtctccccgaacaccctatgggatgccatatcttgggctttctcctgtttctcagaggatttatcaattatgcaaaagttcggaagatgc

SEQ ID NO: 807438 - DNA, 100 bp, Homo sapiens
aaagtctgcgaggaggaagtcgcctctgtgctcgtgagtccagggatctaaggacctgaaggagaagaaggagaaggtggaggagaaggcaagccggaaa

SEQ ID NO: 807439 - DNA, 100 bp, Homo sapiens
gcttggatccttgtgggcatgatccataatcggtttcaagagctgtaggtaaaacttgcctactgatcagttacacaaccaatgcatttcctggagaata

SEQ ID NO: 807440 - DNA, 109 bp, Homo sapiens
caagacagagcgctactcctggcagtgcgtcaatcagagcgtcctgtgcgggtggatgtgaacactgaccggaagatcagtgccaaggagatgcagcgctggatcatgg

SEQ ID NO: 807441 - DNA, 100 bp, Homo sapiens
gttttaggcgtgccaatcatagtacaggcatcacagaacatccagtcatggataaaaatgagctggttcagaaggccaaactggccgagcaggctgagcg

SEQ ID NO: 807442 - DNA, 99 bp, Homo sapiens
ggtgagctgcctggaaatccctgggccctctggccccaagggctaccgtggacagaaggtttttctattgggaaagctactgatcggatggatgctttc

SEQ ID NO: 807443 - DNA, 98 bp, Homo sapiens
taatggaaaatcgcttggttaaaacctgacacttttaacaggacagagaacaccccaatgattgctggccttgggaaggtgagccctggtgagcttga

SEQ ID NO: 807444 - DNA, 122 bp, Homo sapiens
cctcaggaccggccacctccatcactggcgtcaccatgggggctgtgctgggtgtcttctccctcgccagctgggaggcaagtgaggcctatctggttggcctttttgaagacaccaacctg

SEQ ID NO: 807445 - DNA, 98 bp, Homo sapiens
gcgctggagaccttacgacgggttggggatggcgtgcagcgcaaccacgagacggccttccaagagtaatcaagtcagaggattatatgacttttatc

SEQ ID NO: 807446 - DNA, 100 bp, Homo sapiens
ttagacctaccagagaaatcttagagtttcccgcaagggatgtttatgttccaaacactacttacaggaaagaccacagcaagattctttcattcgtctc

SEQ ID NO: 807447 - DNA, 98 bp, Homo sapiens
cgctaacactgtcgcagtttgaaagtgcacttgcaggaaagacatggtgaagatttcaatggatatctttgtgaggaaatttcagccagacagatatc

SEQ ID NO: 807448 - DNA, 100 bp, Homo sapiens
gcgacgcctgtgagcttggccttggagcgaggctatcacaagctgcaccagcttctaaccgattggaaatctacatttctgaaggaacccactcaacaga

SEQ ID NO: 807449 - DNA, 100 bp, Homo sapiens
ggctgagctagcagtgagcaccttttggcccaatgaatatcaggaggagatgttaaagtaacccatcttgcaggacgacattgaagattggtcttctgtt

SEQ ID NO: 807450 - DNA, 100 bp, Homo sapiens
catcatgctgcgcggccttcccatcaccatcacagagagcgattgaggatgaggatgatgaccttcagtatgccgatcatgattatgaagtaccacaaca

SEQ ID NO: 807451 - DNA, 98 bp, Homo sapiens
aggatctgctttcagagtacatgaacaacggttctccaaaaaatgtggaatcctttgcatctatgctgagacattctcctcttacacagatgggacct

SEQ ID NO: 807452 - DNA, 100 bp, Homo sapiens
tcagtggctgcatcacgggaggagctattggtttcagagggatgccagatgatatgaacttcagtgatgtaaagcaaatccatcaaacagacactggcag

SEQ ID NO: 807453 - DNA, 100 bp, Homo sapiens
cagcctggcgaacgagagactacgcgctctggaagacattgaacgggaaatcggcgccatccttcagaatgcaggtcaaaatgcagatcttcgtgaaaac

SEQ ID NO: 807454 - DNA, 98 bp, Homo sapiens
gacacagccggggtcgggagccgcccggggcagggctcgggagagcgggctcttctcaaccatctgtgagtccaggggaaccgtctccaccatccatc

SEQ ID NO: 807455 - DNA, 100 bp, Homo sapiens
ttgggacccttgcatggtgtttcaaagggtggtgaagaactaagatttccatggagaatgattatctgggacctcgaagaattgagagtctacaaaaaga

SEQ ID NO: 807456 - DNA, 98 bp, Homo sapiens
acccagcattattccagtcagtcaagaccaagagaggccctttgggacccaactggaagatgtgtcttgctgaatcagggctctcttatccctgccat

SEQ ID NO: 807457 - DNA, 98 bp, Homo sapiens
aggtgatctggggaaccaaagactctgggactcttggtgccaacagagttactctggtaccatgatcctgaccaatttgacggcgctgcacagggacc

SEQ ID NO: 807458 - DNA, 98 bp, Homo sapiens
tagatcagcgattttctgctgttcaagtacttgagcatccctgggttaattgtgaccgcaacaagggaaaacatggcttatactgtggaatgcctgcg

SEQ ID NO: 807459 - DNA, 99 bp, Homo sapiens
tcctgagaagctggaccccttggtaaaagacaaggccttctccaaggtaaactgtcttgagccccaccctcacctgcctgtgctggcaaccagtggcct

SEQ ID NO: 807460 - DNA, 100 bp, Homo sapiens
gctgcggcctagaggtccgggcttggagttcgcctcagacgcggtggagccgccggagtctgagaaggagacagaggagctggaggaggagaagtcaggc

SEQ ID NO: 807461 - DNA, 99 bp, Homo sapiens
ttggcgaagccttgggtttctttcttaaaggactgatttttagaactccacatttgaggtgggtcatgagccgatgccccccacccttgggaccaatgt

SEQ ID NO: 807462 - DNA, 100 bp, Homo sapiens
ggtgaatctggcaatggtggactatccttatgcctctaactttttacagcctttgcctgcttggcctatcaaggttcatgaaagaagtgtccagtcagac

SEQ ID NO: 807463 - DNA, 100 bp, Homo sapiens
atgtatgccaaagcagcagccttctcgacagccttttactgtgaacagaactcccccactggaaaggattctgaaagaaatgaagtcagccctcagaaat

SEQ ID NO: 807464 - DNA, 51 bp, Homo sapiens
cagcggcgcgggaggccgtgcgggttacgaagtgacagtgctggtgcggga

SEQ ID NO: 807465 - DNA, 99 bp, Homo sapiens
accaacggagcgctgaggcgggcgttttcttggatgaattgcttgctttggagatttctcacattggcaaactgagagattttcttctggaacacagga

SEQ ID NO: 807466 - DNA, 98 bp, Homo sapiens
ggagagccagctcaagaaaatggtgtccaaggagatatctgaagagattataggatcacccatcccagaacctaggcaacgctcaagacttctaagat

SEQ ID NO: 807467 - DNA, 98 bp, Homo sapiens
gggacgccatgtccatggaggaccccttctttgtggtgaaaggtactatactggcaattgctggagaagattttgcaattgttgcttctgatactcga

SEQ ID NO: 807468 - DNA, 99 bp, Homo sapiens
ggacactctggatcgagtagtgcttatgtacagaagtacgtcgtgaagaattatttctactattacctattccaattttcagctgctttgggccaagaa

SEQ ID NO: 807469 - DNA, 100 bp, Homo sapiens
ggggtgctgaatggcaatggcacaaagttctctcgatcagggcatacatctttcttcgacaaagggagagaacattgaaagtattctctaagctatttga

SEQ ID NO: 807470 - DNA, 98 bp, Homo sapiens
ggaaatgtggtgccggcatctgcttctggtcctttctgaaatggtatctatgattcagctattcaaaacctaatgaagttggtgactatgacaatgtg

SEQ ID NO: 807471 - DNA, 98 bp, Homo sapiens
tcgctcctcgatcgaggacgacttcaactatggcagcagcgtggcctccgccaccgtgcacatccgaatggcagaatcaaattggatatccccaacct

SEQ ID NO: 807472 - DNA, 100 bp, Homo sapiens
cgcctacccgagtgtgcgaagctagccaagctctgcttatgataatgtcaacaaagttcgagtagctatcaagaaaatcagcccctttgagcaccagacc

SEQ ID NO: 807473 - DNA, 98 bp, Homo sapiens
ccccaaggatgaaggacccaagggacccagccttgatgcccacttgggaggcagaaagcaccggcacctggtagaactacgagctgcgagaaaggccc

SEQ ID NO: 807474 - DNA, 100 bp, Homo sapiens
agtgtgggaagcccatcggctgtgactgcaaggtagacatagctgacattgagaatgaagagaaccgctactgtctattcatggaactcctggaatctag

SEQ ID NO: 807475 - DNA, 98 bp, Homo sapiens
gcagctctcccacctccagcagcacaccagtacttacagatcatcagtatttggagaggacaccactatgtgccattttgaaacaaaaagctcctcaa

SEQ ID NO: 807476 - DNA, 98 bp, Homo sapiens
tttgcagaagtggaaggagcagaacgtgagggtgtaacttacaaaaagacctggaatggccaaatatcaaggtgaagttcaaagtttgaaactggatg

SEQ ID NO: 807477 - DNA, 100 bp, Homo sapiens
tggtgcagcaggaattgggatcgtgtcgctgcgagaggctttgttggctgagatgggagttgccattcgggaagatggaggaaccctaggggttttctca

SEQ ID NO: 807478 - DNA, 100 bp, Homo sapiens
cttttaccatgccccagattcaggatcagacacctagtccttccgatggaagcactagacaaagttcacctgaggctgatcacttgattgaaaaactaag

SEQ ID NO: 807479 - DNA, 99 bp, Homo sapiens
gtaagaaagattcttaagctgcctcattcttccatcctcagaacgaggagatgttaaagtaacccatcttgcaggacgacattgaagattggtcttctg

SEQ ID NO: 807480 - DNA, 100 bp, Homo sapiens
gagactgtgaatacaacaatatcattctccttcaagggaataaaattttctaaggtggggcatgaggacactggccactccttgcatgactacaaggaag

SEQ ID NO: 807481 - DNA, 100 bp, Homo sapiens
tggctacaattcatacctcagtgaaaaaatttcactggaccgttccattccggattatcgtcccaccaatggccagtttgccatcgtgaagaagtgccgg

SEQ ID NO: 807482 - DNA, 100 bp, Homo sapiens
cagaggccagtcgtccacatcagtggcagacagatgaagaaggcgttcgcaccggaaaatgtagcttcccggttaaggtttcttccaaggtgaaatccag

SEQ ID NO: 807483 - DNA, 98 bp, Homo sapiens
tggtgtgggccgacatcaagagctgcgagatccaacagggagaccctcacgcagggcttagagttctgtcggcggcagcagagggccgatggctcctg

SEQ ID NO: 807484 - DNA, 98 bp, Homo sapiens
tggtgcatctgtttgccggagggacttccttcgctgggcatctggctgggattcttgttggactaatgtacactcaagggcctctgaagaaaatcatg

SEQ ID NO: 807485 - DNA, 98 bp, Homo sapiens
atcgccatggagtttgtgatgaagcaggctctaggaggagccaaaaacctgtatatcatctccgtgaaggggatcaagggacggctgaacagacttcc

SEQ ID NO: 807486 - DNA, 98 bp, Homo sapiens
aggaagaagaggacgccgggcgcgcagtccagttacaacacagggatcacaacaaacacaaccgccacagaagcactatggcattacttctcctatca

SEQ ID NO: 807487 - DNA, 98 bp, Homo sapiens
agaagaaaaagtttctcaaccagaggttcacgcaaagaatctgctccacaagttttgcttccagaagaagagaaaattatagtggaagaaactaaaag

SEQ ID NO: 807488 - DNA, 103 bp, Homo sapiens
aagatgtcagtgggctgtgcctgtcctgaagccaagtacaagaagctggagaagcgatgagaaacttatttctatgggacagagtcttttttttttaatgtgg

SEQ ID NO: 807489 - DNA, 98 bp, Homo sapiens
gccgccacgctctcgggctctgcctcgctctgtggctgtgggctgctgggagtgggcatctggctctccgtgtcccaaggcaactttgccaccttctc

SEQ ID NO: 807490 - DNA, 98 bp, Homo sapiens
tccttcctcaggcgcggtggctttgaagagccggtgctgctgaagaacatccgaggagaataaaggcagccccgttgatgactgaaaatgacaaagca

SEQ ID NO: 807491 - DNA, 98 bp, Homo sapiens
accgagggggaggacattttcaccggcgccgcggtggtcgaagacaactgttagttttgtggcttactgctgctccacccagtgtctgcagacttttg

SEQ ID NO: 807492 - DNA, 98 bp, Homo sapiens
agaacctgagtatctgcaaaagttgcacaaatacctaataaccagaacagaaagaaatgttgcagtatatggaactctaatgaatcattgattgacca

SEQ ID NO: 807493 - DNA, 98 bp, Homo sapiens
ggttcttggtgcttggcatgagggttgctccttgagggcaggacagttcttatggctttatccgttgcgtaagcacagagaggtctgcgaggtcaaaa

SEQ ID NO: 807494 - DNA, 100 bp, Homo sapiens
tcaagaagacaggcaaggaggtggtgctggagggtcagcccaagactaccccgtcggtcattctgttcctgccgtcctgtgaggagccccaagccaacaa

SEQ ID NO: 807495 - DNA, 110 bp, Homo sapiens
aagtgattaagcagagaatggagaagaaggttgattccagaaatataatgatgccctcattatcagtgagcatgcacgaatgaaagatgctctggattacttgaaagact

SEQ ID NO: 807496 - DNA, 98 bp, Homo sapiens
gcaccctgggcctggtcttgcccctctggagtgacacccaggtgtacttagatggagacgggtgctggagaatctggtaaaagcaccattgtgaagca

SEQ ID NO: 807497 - DNA, 98 bp, Homo sapiens
ttgcagatctgtgccatactttcatcaaagatggagcggaattggaacgagcatggagagaatatgataagttagaatacgatgtaactgttaccagg

SEQ ID NO: 807498 - DNA, 100 bp, Homo sapiens
agtcttcaacaggaattaagtcgggtgaaacaggaggttgttgatgtaatgaaatatcctgtggagcacccagacaaattcctgaagtttggcatgacac

SEQ ID NO: 807499 - DNA, 100 bp, Homo sapiens
tggtgctgcccgagaaggtggacgtgctggtgtctgagtggatggggacctgcctgctgattgttctctggggccggactgagaaatgcctgaaggagac

SEQ ID NO: 807500 - DNA, 100 bp, Homo sapiens
gcagcgagcgctcgatggaacctcatcccaggatggccgtataagaaaataaacaacttgctaaaactgctgaaactccctctgcttgtgagatttaaaa

SEQ ID NO: 807501 - DNA, 100 bp, Homo sapiens
ccagaaggaggctgtggcctatgcagtcaactcctggaccactagtactctggctcctcctcctcctcagaagatgaacgacccaagagatcccatgtga

SEQ ID NO: 807502 - DNA, 100 bp, Homo sapiens
acctctcaattccaccaggaagaataaagaaccccagctcaaagggattgtgacaaggttattcagccagcagggatacttcctgcagatgcacccagat

SEQ ID NO: 807503 - DNA, 100 bp, Homo sapiens
ccgccttggacctcctgggaggcgaggacggtctctgccagtataaatgcagtgacggaagaaatctttcctgttttctgctctgtatgctgcctttata

SEQ ID NO: 807504 - DNA, 100 bp, Homo sapiens
gcgggatgccccacgtcatccggatcggcttcaacggaccacaccaaaatgccatctcaaatggaacacgccatggaaaccatgatgtttacatttcaca

SEQ ID NO: 807505 - DNA, 100 bp, Homo sapiens
gagagaggagaacgaacatcttctggacctttgtccaggactgttaaagattcactccagtcagtccagtccgcagcaggccgtcctgacgattcccagc

SEQ ID NO: 807506 - DNA, 99 bp, Homo sapiens
tttgaatgacacttttccagaatacaaggagaccactgaggaatcgatcaaggaaactgagagtgaagccttctccttccaaaaagtttcggtctggct

SEQ ID NO: 807507 - DNA, 100 bp, Homo sapiens
tcaagttcgctgacaggtccagttgcagatacaaacttggattttttccagtctgatccttttgttggcaggcacttcctcacatgccagcgcaactccc

SEQ ID NO: 807508 - DNA, 98 bp, Homo sapiens
gggacaacagtgacgaagagaactgtctcctggtgaccgagcacccgcctccgggcatcttcaactctcatggggcattcagaatgggaccacaaacg

SEQ ID NO: 807509 - DNA, 99 bp, Homo sapiens
tttgtgtcatcctccacagctccagggaaggcactcaaaagtggggggcaggaaaggtatgggctacgtgagttcgtggtgattgcccctgctgcacac

SEQ ID NO: 807510 - DNA, 100 bp, Homo sapiens
ttgacgccttagataacagccatcctattgaaaatgatcaagtctcggcctctggattatacctttgttcctcgaacttggatctttcctgctgaatata

SEQ ID NO: 807511 - DNA, 101 bp, Homo sapiens
gccagaagttctctgtgacagcttatagtgaatggattgaagagctggaagtcgagtgtgctactcaactcaggagatttggagacaaactgaacttccgg

SEQ ID NO: 807512 - DNA, 98 bp, Homo sapiens
ggaacttgtactgggatgtgatgatggagaactacagcaacttactctcactggatttggtgcttccagatgtgagttatcaggtggaatccagtgag

SEQ ID NO: 807513 - DNA, 98 bp, Homo sapiens
gactaagattcaacaaactatttttgaatgaagatgggtcgtgtagggataaaaagaactgtaaggtggtcttttcccagcaggaactgaggaagcgg

SEQ ID NO: 807514 - DNA, 99 bp, Homo sapiens
agaatgatctccaagagatacacacgatccaggagtgtaaggaatgtgaccaagtttttcctgatttgcaaagacctccgcagtcggtgatggcagaca

SEQ ID NO: 807515 - DNA, 100 bp, Homo sapiens
ggctctatcaaagaaagcaagagatggaaaattgttgcctgaagaataccaaggaggatcttttagaaaaatggctacaaacttcctagcacatgagaag

SEQ ID NO: 807516 - DNA, 98 bp, Homo sapiens
gggatgataattgggcctccaagatggatgaggatcgcagtacggaacctgaccgattgcaggtgtttcacaagagagccatcatgccttacggtgtt

SEQ ID NO: 807517 - DNA, 100 bp, Homo sapiens
tcaacgactgcgtctccatcaaccgggccgtgccccagatgcccaccgggatggagaaggaggaggaatcgtgaagaatgcaaattgcacatcagatttt

SEQ ID NO: 807518 - DNA, 98 bp, Homo sapiens
ccgccaggccggagcgcgaatgtcgtgctcaccctgcctccttcccgccgccccctgggagcattggctgtgatgactacttaggctccgacaaagtc

SEQ ID NO: 807519 - DNA, 100 bp, Homo sapiens
ttagagtccaccagatcatccatgtgagtgaccatgcagcaaaagaaggagggtcctctcagtgattaagaacctcagagtgacagagccaaaagaccag

SEQ ID NO: 807520 - DNA, 98 bp, Homo sapiens
ctttggtgttcaacaacttcatccagcccttatacaaagacctttcgggggggacacagcgattgccacgcgccattggaatgtccctggccaaggag

SEQ ID NO: 807521 - DNA, 98 bp, Homo sapiens
acctatcccagcgaagcatgcaaactgaacagttcgagattgtcgtcatcctagaaggcattgtggaaacaactgacagggtcttgctctgttgccca

SEQ ID NO: 807522 - DNA, 100 bp, Homo sapiens
tgagaacatctctgttgacattcattgtgatggagaggagaaaacctatggtggctgtgaaggacctgatgccatgtatgtcaaattgatatcatctgat

SEQ ID NO: 807523 - DNA, 100 bp, Homo sapiens
ggagctccttttcctccacctaccttcccgagttcggctttccagtttggcagcagcactacaaatttcaacttcacaaacaacagtccatcaggagtgt

SEQ ID NO: 807524 - DNA, 98 bp, Homo sapiens
agcagaattattgctgtatattcactctgaactgagagagagtattatgagggaggccgaggacttcatgctccggacagagaaacggcgctgggatt

SEQ ID NO: 807525 - DNA, 100 bp, Homo sapiens
aaaacagcaagcaacagccatcatgaaggaagtccatggaaatggtactaggttttgacaagcttgcatcatgcgtgagtataagctagtcgttcttggc

SEQ ID NO: 807526 - DNA, 100 bp, Homo sapiens
ggaaccctggtcaccgtctcctcaggaaactgattacatcatgtcatattttgacaatggagaggactttggtggtgacagtgatgacaatatggacgag

SEQ ID NO: 807527 - DNA, 100 bp, Homo sapiens
agcaagaaaggcaatggataccgaaagtgaacttggcagacaaaaagcagagaataattctttgaggaaggaaaatcacctcggcagtgtttgaaggaag

SEQ ID NO: 807528 - DNA, 100 bp, Homo sapiens
tgcgtaatttcattttagcatgtcaagatgaagaaacggggggatttgcagacaggccaggagatatggtaaagagaaatgtgtatgaccttacaagtat

SEQ ID NO: 807529 - DNA, 100 bp, Homo sapiens
aagaagcagaggttacagaatatgaaggtacctgcaaggtgtggagttacagtccgagacagtctaaagaaagcactgatgatgagaggtctaatcccag

SEQ ID NO: 807530 - DNA, 112 bp, Homo sapiens
cagggagtggagcttggtttcgggatctcggtgctgcagacggcgagacctcctgcacagggtcctggcggcagagaccacgtcccagcaggagcggctgcaggccatcgca

SEQ ID NO: 807531 - DNA, 100 bp, Homo sapiens
cctgctgatgtgacaactgtgatgtgcctgcaacaacaggaaaggcaatgttatattaagtgagggccgaggcaagttgacggtattttcagttaaagct

SEQ ID NO: 807532 - DNA, 100 bp, Homo sapiens
gcgggggcgatggcggcggcggcggccggagcttctctcagccgtgaccaatgacaagttaacatccaaaatgaatgcggaagaagactcagaagagatg

SEQ ID NO: 807533 - DNA, 100 bp, Homo sapiens
cctggagcttccagccagagggggccgacactactgtgtcgacaaagaaacagccttggtataatagcacgttagcatcaagacgaaaacgacttactgc

SEQ ID NO: 807534 - DNA, 98 bp, Homo sapiens
tgttggaaaaataaaacgagaaattcaaaatctaaaactctttcgtcatcctcatattatcaaactggccacccgttcatcgtgcagttcaatgatgg

SEQ ID NO: 807535 - DNA, 98 bp, Homo sapiens
ggacttggaaacgtccgggttacagacttgggaagatccccatgaaaaagataagagcacgaactgctttggagataatgatcctattgatgtttgcg

SEQ ID NO: 807536 - DNA, 100 bp, Homo sapiens
agccagcagacccagctacgtggactagaggtgaggtttatacatggggcgacaatgatgagggacaactgggagacggaaccaccaatgccatccagag

SEQ ID NO: 807537 - DNA, 100 bp, Homo sapiens
acccgcaccttgataggaacactttgcctaagaaaggactcagaaacctgctctacgaactgtcagaaggcattgactcagagaacttaaaggacatgat

SEQ ID NO: 807538 - DNA, 98 bp, Homo sapiens
ctacgcctctgcctttcaaggtcatgatgttggattctgttgcctgggtaccaccagagggaaagctggggcgaaaaatggagtgctggcatacattg

SEQ ID NO: 807539 - DNA, 99 bp, Homo sapiens
tctggccaacaccaccggcacagtgacggcttcagaggaaattggcgtgttagccaaggctttcattgaccaagggaaactcatcccagatgatgtcat

SEQ ID NO: 807540 - DNA, 99 bp, Homo sapiens
aagtgaagactttgaacgcactcctcagagtccgactctcccacctgctaagatatattcgactttatgggagaaaatttagcaaagaagatcatgttc

SEQ ID NO: 807541 - DNA, 100 bp, Homo sapiens
atccatctaaagcaccagtaaaatatggtgaactcattgtcttaggtttggctttggttgaaataagaatttagcctgtatgtactgctttaactcctgg

SEQ ID NO: 807542 - DNA, 98 bp, Homo sapiens
gagaagaagctgcggccgcacctggccaagtatcctgtggagcacccagacaaattcctgaagtttggcatgacaccttccaagggagttctgttcta

SEQ ID NO: 807543 - DNA, 117 bp, Homo sapiens
gcacttgatgctggaccacattcctcaggtaccacagcagaccacagttctgctttgatgaactaggtggacttctcaaaccaacagtggcctctcagaaccagaaccttcctgttg

SEQ ID NO: 807544 - DNA, 98 bp, Homo sapiens
gtcaccgagccccagcgacacccgaggggctacacagtatataaggtcaccgcccgggatcagagtgacagttgatggcgaatttctgcattacattt

SEQ ID NO: 807545 - DNA, 100 bp, Homo sapiens
tacagggtcaaaggagagcacaaccatcgcagttggaagcccatggggcaggaacatggcaacccgtgtgtgtctcatcccagaaagagaagactttaac

SEQ ID NO: 807546 - DNA, 100 bp, Homo sapiens
aagcactttaaagtcacaacaacgtctattgaaagcccattcaaggttgcaatattatctcatatctttggggctgcttagatttcttttttcaatgctt

SEQ ID NO: 807547 - DNA, 100 bp, Homo sapiens
gctgcttatccgcttcttcaactccttcaatgaggccaccatggttctggtctcctggatcatgtggcccccacagaacacctgaactcaaatgagatgc

SEQ ID NO: 807548 - DNA, 100 bp, Homo sapiens
caagggtccaccctcctccgtgcccaaaagccgccacctgaccatcaagaatggaagttggatacactttgtgacttgtacgagacactgaccattacac

SEQ ID NO: 807549 - DNA, 142 bp, Homo sapiens
cttcgatcccttctctgatttgctgtcagccatgaacggatggatgtgatgcctgctagccaaaagggctttggggtgaacctgttaatctccgtgaacaacatgatgccttagagttttttaattctttggtggatagttt

SEQ ID NO: 807550 - DNA, 99 bp, Homo sapiens
gccggagctggcgctttctcagcactagatctggactccgacccggcgccaggggtcccttcagtgttgtacgacgatgtatcaacagagaaactgggc

SEQ ID NO: 807551 - DNA, 100 bp, Homo sapiens
gaatacatcaagattctgaatctggtgatgaacttagcagcagctccactgaacagataagggaccctttagatcctacaagatcagtgattgtgatccg

SEQ ID NO: 807552 - DNA, 100 bp, Homo sapiens
ttgtccctttgtatggagctgtgagagaagggccttgggtcaacatcttcatggagctgctggaaggcttcacaggctgctcaagaagccgagatcaatg

SEQ ID NO: 807553 - DNA, 100 bp, Homo sapiens
agcagaagctctgaatcgtgttcctgaatgaaagaagtcagctgaaaatgtgtgtctgacatgcaagctcagtggggcagagacccgtggattgctgtgc

SEQ ID NO: 807554 - DNA, 100 bp, Homo sapiens
ctggagacatgagcaagaaaagcctctgggagcagaagggaggctccaagacctcatcaacaattaagattacagtagaatgcacattccttgactatat

SEQ ID NO: 807555 - DNA, 133 bp, Homo sapiens
ggaagatgctcagaacagagcagaaatcaaattgaagagagcagttgaagaagtgaagaaattattggtacctgcactggtgagagagtgtaaggaggtcctgaagggcggcctgctgatgaagcagtactac

SEQ ID NO: 807556 - DNA, 100 bp, Homo sapiens
cagctggcagaagaagcaacacgcaaacgagagctgaggctaatgaaaaacagaacattcctgatgtagatgaagaaggctacagtattaaaccagaaac

SEQ ID NO: 807557 - DNA, 99 bp, Homo sapiens
ttgtgtctcaatttggctacaaaaggttaagaatgtctgaggggtcaggcggtgctggcaagatggctgcacttgagaagatgacgtttcccaagaaga

SEQ ID NO: 807558 - DNA, 136 bp, Homo sapiens
aagcgttatgcaatggggaaaaacgaactccgtccactaacaaaagatggctacgagggtaacatgttcggtggccaaggtggaatacgtcaggaagaagccaaaattaaaagaagtccaggtgaggttagaggag

SEQ ID NO: 807559 - DNA, 98 bp, Homo sapiens
tcagtggctagactgtagcagccgagaacctcggcatcaccagtggcttcgtgaagcccaagctggatgctgcaatttcacagcagttccttccttcg

SEQ ID NO: 807560 - DNA, 100 bp, Homo sapiens
agaaggtgacccagtgggcagaagagaggtaacagtacttgagtatttcctgcttcttgggcctctccatgatggattgctgtgaaggagaatcaacaat

SEQ ID NO: 807561 - DNA, 100 bp, Homo sapiens
agcaagaaggccctggacacagcaatatctctgggctttcacaggcaggaagttatgttcgtgatgatgcagtccccaatttaatccagttaataactaa

SEQ ID NO: 807562 - DNA, 98 bp, Homo sapiens
gtccgcttctggtggacagattgagcaaagataaccagatgcaacgtgaagatctagactggaccctggtttgatgaaccagctgtaaaaacacattt

SEQ ID NO: 807563 - DNA, 98 bp, Homo sapiens
cgccgccgccatgtcccgctacctgcgtccccccaacacgtctctgttcgtcaggaacgtggccgacgacaccaggaagaagctggcccagcggctgc

SEQ ID NO: 807564 - DNA, 100 bp, Homo sapiens
gtctgggggaaggtggaggctgacatcccaggccatgggcaggaagtcctcatcaggtgctgctacccccgtatgatgatgccactgtgaatggtgctgc

SEQ ID NO: 807565 - DNA, 99 bp, Homo sapiens
ctggcactgagcggccgcggccatggcgtacgcctatctcttcaagtacatcataatcggcgacacagctgtgatgcagatccatccgccctagcaaaa

SEQ ID NO: 807566 - DNA, 100 bp, Homo sapiens
cattccgctccaagatccttttagccaaggcagaggtgtgcggccgcctgagcccgagccaggagcactagagagggagggggaagagcagaagttagag

SEQ ID NO: 807567 - DNA, 100 bp, Homo sapiens
atgaagatatttagcattagcatcattgcccaaggcctccctttttgtcgaagacggtgtaaacaggaacatcgataagtagtgtaaaaacttgcacaat

SEQ ID NO: 807568 - DNA, 98 bp, Homo sapiens
cgacggcaggtactttagcaggacggccatcgagatcgtggtgcagatggccgcggccaacggggcatttgatctaacagagcaaagatacgtagctg

SEQ ID NO: 807569 - DNA, 100 bp, Homo sapiens
ggtgatactgaaggggtcgtcactgtactggtatagcaatcaaatgaatgtttctccatcccagagagatgaagtaattcaatggctggccaaactcaag

SEQ ID NO: 807570 - DNA, 111 bp, Homo sapiens
gcatctgattcccaggagattaaaattcagcagccttcgaaagtgcttgtgagtgaggattctgacagtgatggcattgtggcccacttccctgcccatgagaagccagtg

SEQ ID NO: 807571 - DNA, 98 bp, Homo sapiens
aacctattcagtccagcaggattcggacagcaagcatgtggatgtacatctagttcaactaaagtaaaaggcaatcgcaaatgtgagttgaactgcca

SEQ ID NO: 807572 - DNA, 99 bp, Homo sapiens
tcttttgaaagttgtgggtcagctgaccagcggaatggccaaagactatgacgggtcttcctagcacatcagggacaactgccagtgtggtcatcattc

SEQ ID NO: 807573 - DNA, 99 bp, Homo sapiens
ttgtttaatgactttggtgccctcaacatctctcagagacgaaagggtctccaactgaattccttgaagagaaaatggcctaccaggaatacccaaata

SEQ ID NO: 807574 - DNA, 98 bp, Homo sapiens
tcccaagtcttcaacctgttcagaacgatgggcctgcgccacctgcccgtggtgaacgctgtgggagaggtgcagcggaactgctgcctgacgctctg

SEQ ID NO: 807575 - DNA, 100 bp, Homo sapiens
aggatattaatgattataaccggagattctcagggcaacccagatctgcagagattgtcaagaggctgaatgctatctgtgcacaagtcattcctttcct

SEQ ID NO: 807576 - DNA, 133 bp, Homo sapiens
tggattttatggagcattttttgtagaaaacaggatttcaatatgtacagaattcatggatggccactcctcaggatagtcaggaaggaacctttgggtcagagcattcagcgtcaccatcacaagggagtag

SEQ ID NO: 807577 - DNA, 99 bp, Homo sapiens
tgaggctgctaagggcaccctcacttactccaggatgaggggcatggtggcaattctcatcggtgaggacaccagtgatgaattctgaagcaaaagttc

SEQ ID NO: 807578 - DNA, 98 bp, Homo sapiens
gtagccaatgacctcgactggctcctggccttgcctcacgataaattctggtgccagattatgtttgagaccttcaacaccccggccatgtacgtggc

SEQ ID NO: 807579 - DNA, 100 bp, Homo sapiens
actgaaagatacatggcttgcaaaaagtaaaccacgatcgttatgctgagaaactactaaagttcctggggaagcaaagtagaatttcataagaacaaaa

SEQ ID NO: 807580 - DNA, 100 bp, Homo sapiens
gtggagagggactgacgtgtttggagggaaatgggaatgtacacgataattaaagagtaaagttgtgctcaacgattgtgaatcggcacggtcctgaggc

SEQ ID NO: 807581 - DNA, 98 bp, Homo sapiens
ctgcacgtggctgctgccaagggctacattgaggtgatgagaccagaagctttgtatgcagctgtaaataagaaacctacctcggcagcctattcagt

SEQ ID NO: 807582 - DNA, 100 bp, Homo sapiens
cacataaagattacagtgacaagaaaaacattgtttgaggattcctttcaacagacgctggtatccagaagaatatgaatttgcaccaaagaaggctgct

SEQ ID NO: 807583 - DNA, 100 bp, Homo sapiens
ggccagctatgtgtatccatggagacaagagtcaaccagaaagagattgggtacttaatggggaaagctctggcaatttaaatgacccaaataaggaggc

SEQ ID NO: 807584 - DNA, 98 bp, Homo sapiens
cagctattggaccaaggaagaagagaccactagaatctggaattgaggagtggacgcttctcttgtgagccagctggaggtcttacctctttgactga

SEQ ID NO: 807585 - DNA, 100 bp, Homo sapiens
tgctgggccgcaccccagaccgcgtggccacgctgctgcctctctcgaagagcctctggctgccaaggaggccctcggccacctgtccctcgctgaggtg

SEQ ID NO: 807586 - DNA, 98 bp, Homo sapiens
attcctggcctcaaacgatcctcccaccttggcttctcaacgtgctgggattataggggtgactctgacatcattagaagcatgccagaacagactgg

SEQ ID NO: 807587 - DNA, 101 bp, Homo sapiens
gaagaaacccagcttgatatgttgagcccccctccatgcgcctgaaggcccgacccagcagccctggcttttccgtgcttacctgcagcgccttctccttc

SEQ ID NO: 807588 - DNA, 100 bp, Homo sapiens
tgcaaatgctattgtcagtcagcaaactccacaaagagaccatttgtttgtgactatgaagggtgtggcaaggccttcatcagggactaccatctgagcc

SEQ ID NO: 807589 - DNA, 100 bp, Homo sapiens
acaagaagctggaaaagaatgatgttgtccttaaacaacctacagaatatcatctataacccgggcccagaatgtgttcagtatcttcaacaagaatacc

SEQ ID NO: 807590 - DNA, 98 bp, Homo sapiens
tataaagctctgactgatgacagtgatgaaaatgaagaagaagatgcctttaccgaccccacagacccctttgcttctgtttttgggaatgaatcatt

SEQ ID NO: 807591 - DNA, 100 bp, Homo sapiens
tgaaatcattttgaaagctgcacaagaactgaaaatgcttcggttcgttccaccagtcataaaccagatgaaatctatggcatgattgaaagactatctc

SEQ ID NO: 807592 - DNA, 98 bp, Homo sapiens
ccttcaggctgcaccacgtggaggccaacaggactgcccttgaagtatgcagagcatttttacaggaagataaaggcgaaggaatcattatggtgacg

SEQ ID NO: 807593 - DNA, 100 bp, Homo sapiens
cgccgtcaaggaccggcacaaggacgttctcaagtggggcgatgaggcctatggcatgtctgcgttacctttaaatctgataaaaggcactagaagcgct

SEQ ID NO: 807594 - DNA, 99 bp, Homo sapiens
tgtgttctctggggcagggaacatcgcagcagccacaggactggtgaagagggaggaattccctactgatctgaagtctccatctgctgctgcctcttc

SEQ ID NO: 807595 - DNA, 100 bp, Homo sapiens
acaaaccaagtgggcaaataatggcagttaaagtcttgagagctgatgacaataacatgggcaatggctgctctcagaagctggcgactgctaacctcct

SEQ ID NO: 807596 - DNA, 99 bp, Homo sapiens
tttacttcatcctccaaggagttcaatcacttggcgtgacttcactacttttaagcaaaagagtgactgcttagaaaactgcacagcatctgatgaaat

SEQ ID NO: 807597 - DNA, 100 bp, Homo sapiens
gttatagtccatgagcgagtgcctgacatgcagacctatccaccactcccagatatattcttagacaggcaaaagtcaacaactctagcttaattggagt

SEQ ID NO: 807598 - DNA, 100 bp, Homo sapiens
cacgtcccgctctccccagcatttccacagacctgatatgagtaaaattagcctaatcagaatgttagttcctgaaaacattgacacgtaccttatccac

SEQ ID NO: 807599 - DNA, 98 bp, Homo sapiens
gcccacagcctagcagtcgggaccgtactgagcagaaagatgaaggtcttagaatcattgattggaatgatccagaaattcccttatgatgaccctac

SEQ ID NO: 807600 - DNA, 100 bp, Homo sapiens
ttgtacccaaaacactgctggtataaactgcgagacatgtactgatggcttcttcagacccaaagggggttgccacaccatttggaggttttgaaaaagc

SEQ ID NO: 807601 - DNA, 100 bp, Homo sapiens
caaactctttagctcttcttttaatggtggaagacgagatgagtgagcatttgtcctgtgctttcacattctttctgcatggagaaagtaatgtatgcac

SEQ ID NO: 807602 - DNA, 100 bp, Homo sapiens
agcagcagcagacagcagtacagacagctcaggctgcccagatggtggctcccggagtccagggtgctgttggcccaaaggttgccctgaagccccccat

SEQ ID NO: 807603 - DNA, 100 bp, Homo sapiens
gccttgaaaaagctgccctgagacggtgtcccgccgaaagtggccacagatgtctttaattccaaaaacctggccgttcaggcacaaaagaagatcttgg

SEQ ID NO: 807604 - DNA, 102 bp, Homo sapiens
gagtctggtccattgctatcagcccattactcaggtttccttaatgacaacaaaaaagggagtaatcctacccactgtaagagtcatgactcttgattgcag

SEQ ID NO: 807605 - DNA, 100 bp, Homo sapiens
aagatccgcagctccacgcagcaagacccgcgccgccgggacccccaggacgacgtgtacctggacatcaccgatatgaggccccaggattcctggcgag

SEQ ID NO: 807606 - DNA, 99 bp, Homo sapiens
tcattattggagcaaggaaaagagccctggatggtgaagaaggagggaacaagaggcccatgccctggtgaccaagaatatggcccaggtgaccaaagc

SEQ ID NO: 807607 - DNA, 98 bp, Homo sapiens
tgcaatcatgggtcaccaagagaggctgagagaccagagtgaacctctgtatgtgcctgtgaaattccatgatcttccaagtgaaaaacctgagagca

SEQ ID NO: 807608 - DNA, 154 bp, Homo sapiens
tgaagctgtggttggacacttttgtttctagctatgaacaatttttagacgttgactttgaaaagctgcctaccagaacacgagaccaatggtgtggcaaagagtgatcagaaacaagaacagctgttactcaagaagatgtatttaatgcttg

SEQ ID NO: 807609 - DNA, 100 bp, Homo sapiens
ggacttcccgtccgcggcgtggaggtgagattacgtactataggtgaacttttagctcctgcagctccttttgacaagaaatgtggtcgtgaaaattgga

SEQ ID NO: 807610 - DNA, 100 bp, Homo sapiens
tatggctgctacttcgtcccagcattttcggggttatatgcaccttattgggagcccagcgcaagaggtaacaatttggacaagacagcaaatgctattg

SEQ ID NO: 807611 - DNA, 99 bp, Homo sapiens
ccagagtttcccaggaacaccattgagtaccactgaactagagtctgcaagttaaagatcaactcactatcctgaaggtccattctcccaagaagaggg

SEQ ID NO: 807612 - DNA, 100 bp, Homo sapiens
ttcagcagtttaacttagatgtcatacagtgtgaatgatgaaacgaggaggaagagatagtgaccgtaattcatcagaagaaggaactgcagagaaatcc

SEQ ID NO: 807613 - DNA, 100 bp, Homo sapiens
ggaaacctagccctgtctattcatttgggctatggaaagggcaaatggaatggagctggatggtagaagaattcgggtggattattctataaccaagaga

SEQ ID NO: 807614 - DNA, 138 bp, Homo sapiens
cgctggcagccggggagctgcaggaaccagactgggggcgagctgagcacctgtagtcaatcacacgcaggttcttccaggggacccagccccctaaccatgggagctcaggacactctccctgttgcagcagcattt

SEQ ID NO: 807615 - DNA, 100 bp, Homo sapiens
ggggaccagagatggacggtcactcagcctatggagattgggaaaatgaggtacgttagtgttcgcgattttaaaggcaaagtgctaattgatattagag

SEQ ID NO: 807616 - DNA, 100 bp, Homo sapiens
tggagcctgagtttatcctcaaggctgcagagactgcaagtctggaagaacagctgcaaggatggggagaagtgatgctgatggctgataaagtcctccg

SEQ ID NO: 807617 - DNA, 99 bp, Homo sapiens
aggcactgaggaggccgagagatgaggccggagcccaccaagttctgggaagtcagggctatatgtgggaagcatggattatatctgaccctgagcctg

SEQ ID NO: 807618 - DNA, 100 bp, Homo sapiens
gttaccactctgggtgatccagccaaagattgagaggatccagaatccagatctctggaatagctaccaggcaaagaaaaaaactatggatgccaagaat

SEQ ID NO: 807619 - DNA, 98 bp, Homo sapiens
gagcttcagtagcaaataaggacatcatctgctataacctacaagcagttggacagattgttaggaaaaaagcattgcctgacagcggtgaagatcga

SEQ ID NO: 807620 - DNA, 98 bp, Homo sapiens
tacctgttcagcacttctttcagcgatatgaagttaaatccagatgaactgactggaatccttaagaaattatcacttgagaaatatcagcccatttt

SEQ ID NO: 807621 - DNA, 100 bp, Homo sapiens
agtggatatagcacaccatccccagccagtacctgcacatgttgttctttgtcagtgctgtcaagtgtgtgccagggtgatccatggtcactttccggga

SEQ ID NO: 807622 - DNA, 100 bp, Homo sapiens
gtgcatgaaaagtgacaagcatgggtccccatatttctacttattgggccaccctaaagacacgctggattgccttttgcaattcttacttcaaggcata

SEQ ID NO: 807623 - DNA, 98 bp, Homo sapiens
cgggttgtccgggtcctgtcaatgtcacatgtacgagatcaaagcaggaggcagcattgcaaagaagttcagcgcggctctgcagaagctgagctcgc

SEQ ID NO: 807624 - DNA, 137 bp, Homo sapiens
tgggtagtggacagcgcagaccgccagcgcatgcaggactgccagcgggagctccagagcctgctggtggaggagttccatcacctgaagtggacctcttgggaccgtctgaaggtaccagctgggcagcctgagag

SEQ ID NO: 807625 - DNA, 100 bp, Homo sapiens
tagcattattatttggaggagttgatgagaaaggaccccagctattcaattagcagagcctcacagacaatggccaaatgtgtcaaagctgtcacagagg

SEQ ID NO: 807626 - DNA, 100 bp, Homo sapiens
cgaggatgtacattccagaggaaaaccaccaaggacttaaaatctccaaatcagagagatgaaattgcaggagcccgagcttcactgaaggagaactctc

SEQ ID NO: 807627 - DNA, 100 bp, Homo sapiens
gacatgcgggagagagaatgagccagagggacacgctggtgcatctgtttgccggaggattcagaatggacagtttagaagaacctcagaaaaaagtctt

SEQ ID NO: 807628 - DNA, 99 bp, Homo sapiens
cctcccaaagtgctgtgattacagaccttcccctcctccaatgagtcccgccaatgccccaatgcccgttgccagttcgccttctacggtggtgagtcg

SEQ ID NO: 807629 - DNA, 100 bp, Homo sapiens
acaaaccctatcctgtccgagcaaagattacctattaccagaacacactgacaatacagatcacttggattcagtcgagtttgctttgctccgtgggaac

SEQ ID NO: 807630 - DNA, 98 bp, Homo sapiens
ccagatggcgtcttccgtgggcaacgtggccgacagcacaggttgaagctccattcataccaaagtttagaggctctggagataccagcaactttgat

SEQ ID NO: 807631 - DNA, 98 bp, Homo sapiens
ctacaaggcttttgaagaagcagctgaacacttccagccttacatcaaattctttgccacctttgacaaagggtttgcccgaccatctgtaagtcaca

SEQ ID NO: 807632 - DNA, 98 bp, Homo sapiens
gcggcttcgagctctcctctgatggcaggacctgccaagtcctcctgcccctgctcgagtcttgcagtgtgcggcccgacgccagcgtttccagtcac

SEQ ID NO: 807633 - DNA, 100 bp, Homo sapiens
cccccagaataagattacagttgttggggttggtgctgttggcatggcctgtgccatcagtatcttaatgaaggagacggtggctcagggagtaaaggaa

SEQ ID NO: 807634 - DNA, 98 bp, Homo sapiens
ttctggatgatgtgggccatggtgtcaagggccgttgctccagggagaactgcaaatatcttcatccacccccacatttaaaaacgcagttggagata

SEQ ID NO: 807635 - DNA, 127 bp, Homo sapiens
gtcaggctaaaagtgtctgctgctgctgccgccccccactccgcctccgggagaggaacattaagccatcatgtaagaagtccagctattctgttggagtgaccaagttgaaaaaccacttggagag

SEQ ID NO: 807636 - DNA, 116 bp, Homo sapiens
aaaaacaggagtattaaatgaaaacacagtttctgcaggaaaagatctctctacttctcctaaggattccaccagtactgttgctgctcttctcatagacttcaaaagctcattgc

SEQ ID NO: 807637 - DNA, 100 bp, Homo sapiens
ggctggagagcagaagaccgaaaggagactgacaaactggaagatgagaaatctgggctgcagcgagagattgaggagctgcagaagcagaaggagcgcc

SEQ ID NO: 807638 - DNA, 99 bp, Homo sapiens
cggtctaggcggggctggaggcggtggctgcggttgcgggaccggtctcctctgagcctccggcctccataagacccaaaacagatgacacctcttccc

SEQ ID NO: 807639 - DNA, 100 bp, Homo sapiens
cggcgcccagtggcggtgtgaactgtgaggagttcgccgagttccaggaagctgcagtaaaggaagatgaagaagaagtttcagataagggcagtgattc

SEQ ID NO: 807640 - DNA, 99 bp, Homo sapiens
agacgcatccagggacgctcagtggcaaccatcaccccggaagagctgaactgtggggcatatgatattttcctgaatgcaaaagagcaaaacattgtg

SEQ ID NO: 807641 - DNA, 51 bp, Homo sapiens
gttcaggttattggtggcatgagccagatgaccaggatgccccagatgagc

SEQ ID NO: 807642 - DNA, 100 bp, Homo sapiens
tggagatggggagcgtcctggggctgtgctccatggcgagctggttttcggctttgtgagaaaccttaccatcaaacacgatggccagcaacgttaccaa

SEQ ID NO: 807643 - DNA, 100 bp, Homo sapiens
ggtactgcacatactgcacggccttggctggactctgcgggactatgtccgaggatacatccttcagaaatataatgatgccctcattatcagtgagcat

SEQ ID NO: 807644 - DNA, 98 bp, Homo sapiens
gcttcagcagatcggcggcatcagcggtagcaccagcactagcagcatgttgagccgggcagtgtgcggcttccttcaaaatgtctactgttcacgaa

SEQ ID NO: 807645 - DNA, 98 bp, Homo sapiens
aagttacagtcaaaaagcaaatggacaaaattgaggagcttcagaaaaacctgttaaatgcaaatttgttgcctgctaataaagatgcctttcgaaag

SEQ ID NO: 807646 - DNA, 100 bp, Homo sapiens
gcgagtccatagctgaagaggagcgccagatggtggaggaatacacttatttatgaatgtttgggaaatgggaagtaatgacagctggcacctgaactaa

SEQ ID NO: 807647 - DNA, 100 bp, Homo sapiens
aatgaaccacttacacagaagccgcatcagcaggttgtagatggtactccatgtagcccagattccacctctgtctgtgtgcaaggacagtgtgtaaaag

SEQ ID NO: 807648 - DNA, 100 bp, Homo sapiens
gtttgatgaagatggagataaacccccagattttcttggaaaagttgccattcccttgctgtccgaaccacagaggacacattaataactggaagtaaaa

SEQ ID NO: 807649 - DNA, 100 bp, Homo sapiens
tcatcttctgtgtggagctcagcggctacgacctgaaactctacgaggataaccagacaatttgtattgaacgatgtcttgagaggggaaagagtagtgg

SEQ ID NO: 807650 - DNA, 99 bp, Homo sapiens
tgaagaagcccataaataaacaaggagataaatcaaaggaaaataccagaaagatttttagtggccccaaacggatcttccatggtggcttattctaat

SEQ ID NO: 807651 - DNA, 98 bp, Homo sapiens
tcagtagaggaaacaaagttaaccctgctaaccttagcagaagaaaggacggtagacctgcccaagtctcccaaggcacttctggatccagctgtgtg

SEQ ID NO: 807652 - DNA, 100 bp, Homo sapiens
ctaaatgagcctcttgccaaagtgtcccttttaaaagcaaaacaagctatcgatcagggaagatctccagttataatagataacactaatatacaagctt

SEQ ID NO: 807653 - DNA, 100 bp, Homo sapiens
ccccagccgcagcccccgctggcatttatgtttgaatcatctttaagtctggcggtcacaaagtggggactcaaggcctccaggtgtttggatgagaact

SEQ ID NO: 807654 - DNA, 100 bp, Homo sapiens
agggttggaactgctgattatggaagtccctcggatcaggagtatgctgctgctgttccgctttgcgtcctcgctacaaacgcctggtggacaacatatt

SEQ ID NO: 807655 - DNA, 100 bp, Homo sapiens
ctgaatggactccagagcagccttaaccctgcagcctttgtgcccatcaccagctctacagtgctgtccccggcataggtccatctctgcagaagccatt

SEQ ID NO: 807656 - DNA, 100 bp, Homo sapiens
gctgtgctggaggaaattcaacaggagctgatcaaccaagatgccatggacaatattaccaggcagaaccaattctacgatacccaagtcatcaaacaag

SEQ ID NO: 807657 - DNA, 100 bp, Homo sapiens
cgcgcggctggtgtccgccccgcccgaaagggaggaatgatcaattggaatcgtctttttcctcctttacgtcagcgacaaaacgtaaactatcagggcg

SEQ ID NO: 807658 - DNA, 99 bp, Homo sapiens
aggacagttcgctacacagcaatgcatcgagacggaagctcctcagtcttagagagttctgaaggtggatttctcagccacgttcaacctgatgagttc

SEQ ID NO: 807659 - DNA, 100 bp, Homo sapiens
gcgacagtgagcgccggcgcgaggacagcgcgtgcccgcgaggagccgccgcgcgcccgcgccctccgcgcgacgccagaggtggggctggtgtccgagc

SEQ ID NO: 807660 - DNA, 98 bp, Homo sapiens
gagcattttaagaaaggacagcattcctgtgacctctgcctaccatccataaaatactcattcccctctcaggatgaagtcattgctgtttccgaaaa

SEQ ID NO: 807661 - DNA, 145 bp, Homo sapiens
tttatcatcaatcttattccactgcatgtatttgtgttgttactgatgcagagatacagcaaaagagtctacataggcagcagtgaggatgccagagttcatgggtttctagaagacaagttttcaactgcagatacaaacatca

SEQ ID NO: 807662 - DNA, 100 bp, Homo sapiens
gatctcatttaccccaaggtcctagatactgtcatccccgtgtggctgaatcatgcaatggctctgaagagcggccattcctcagattcgaagctgaaca

SEQ ID NO: 807663 - DNA, 100 bp, Homo sapiens
tgacgcctacggaccccccagcaacttcctcgagatcgatgaagctgcagtaaaggaagatgaagaagaagtttcagataagggcagtgattctgaagaa

SEQ ID NO: 807664 - DNA, 100 bp, Homo sapiens
agacatctgcgaagtggttgagaagcctgtacctgttttatacttgcttttgcttcagcgttctgtggttgtcaacagtgagtgacctgcaggaagaagg

SEQ ID NO: 807665 - DNA, 100 bp, Homo sapiens
aaagattggctccttccgctttttttggatccagaatgtcagtcttaagtttcagcaacaccagcaaacagtggactcctcctatttatggagcaggcac

SEQ ID NO: 807666 - DNA, 100 bp, Homo sapiens
cgcactttataccacctgcgattactgttggtcaaagaaaaagtgatgtatgaaaaagaggcaaaacaacaagaagaaaagattgaaaaaatgagagctg

SEQ ID NO: 807667 - DNA, 98 bp, Homo sapiens
ctggcgctctggctgtgctgcgcgacccccgcgcatggaatagccaggccagaagaaggaaggcctgtggtgagtgggacaggaaatgacatcaccac

SEQ ID NO: 807668 - DNA, 100 bp, Homo sapiens
gagaatgaaatcactttgtgtcaaaaagaaataactcagctgaagcatcagggtgacatccagcagctgctctttgtctcggaccaccgggcagcttatg

SEQ ID NO: 807669 - DNA, 103 bp, Homo sapiens
atcgcccaagtccctctactcgcgagtgaattttgaagattgcaccggtcgacaaaggacagcctatttttccctcgacacccgattcaaagtgggcacagat

SEQ ID NO: 807670 - DNA, 100 bp, Homo sapiens
gagggtggtaaaaagcctaccatacttgccgactgaaagggacatctacagggctgagtgtttggagtttgccagatccggcccggtgcctgggttccag

SEQ ID NO: 807671 - DNA, 100 bp, Homo sapiens
aagaaaaccctcctcctgaggcaccacgtctctaccgagcacaaactccacgaagccaacgcccagtggcagtgtccttgttaaacggatgttccggccc

SEQ ID NO: 807672 - DNA, 100 bp, Homo sapiens
gcctctaccaatggacagctctcagtccacactcccaaaagggaaaggtgcagacccacctcgaaaaccccaccaagtaccacatacagcaagcccaacg

SEQ ID NO: 807673 - DNA, 100 bp, Homo sapiens
aagttagtacagagaacgactcaacactagttcatcgttttccccttttggtggcacatatggaaaaactcagccaggttatacattggctcttcaaaga

SEQ ID NO: 807674 - DNA, 98 bp, Homo sapiens
ttgttaaggattccaagtaactcttatttggaggaactaccctgccctgacagaggctggggatgaaggaggaagagacagccggtcccctggataaa

SEQ ID NO: 807675 - DNA, 99 bp, Homo sapiens
ccacgtccaagcaaaccgggaaaggagaggatcccggagccgctgcccatgatggggggagctttcatggactcgcccaacgaggacttcagcaccgag

SEQ ID NO: 807676 - DNA, 100 bp, Homo sapiens
cttctctgaggcggcgagagatggtcaggtctggagctcgaccgggccaggctgtattcatcaccaaagaaaaaacttacaccaatgcagaaatcggtta

SEQ ID NO: 807677 - DNA, 98 bp, Homo sapiens
gttcagttgtcttctcagagatgccaggaagcctcaggtgcgagaagatgtactaaattcattgaataacaactttcttcaaacgctaaatcaagctt

SEQ ID NO: 807678 - DNA, 99 bp, Homo sapiens
acgccgcgagagccaggtttgagtccaaagtaccctccttctactaccggcccacgccctccgactgccagaccctcaatgctcagaacggagagtggc

SEQ ID NO: 807679 - DNA, 100 bp, Homo sapiens
gcctaagtaacttgggaaatacgtgtttcatgaactcagctattcaggttttaaaatcaaagatgggaaaatcggagaaaattgcccttccccatggcca

SEQ ID NO: 807680 - DNA, 100 bp, Homo sapiens
aatatttttccagggatataacagtccactttggaaagaagatttctcagtgatgatgaatgtcttgaacaaaaaccagctcagcccggtaggaaatggc

SEQ ID NO: 807681 - DNA, 100 bp, Homo sapiens
gctcagaacagttggatcttgctcagtctctgtcagaggaagatcccttggtttgtctacagattttgagcgttcgaagttgacccctgactaagtatac

SEQ ID NO: 807682 - DNA, 98 bp, Homo sapiens
tgaatcaacatgggcaatgagaacagcacctcggacaaccagttgttcttcctaacataaaatcagaagatacaccatgccttctgtctatagatctg

SEQ ID NO: 807683 - DNA, 101 bp, Homo sapiens
gcgggggagaattgaatgattttgtttcaactgccaaatgctgcacttaaaaggatgcttgttttgatgtcctgctcattgttttccctatgaagtatcag

SEQ ID NO: 807684 - DNA, 100 bp, Homo sapiens
agtgagagccggacgggcactgggcgactctgtgcctcgctgagggttttaaaatcaaagatgggaaaatcggagaaaattgcccttccccatggccagc

SEQ ID NO: 807685 - DNA, 98 bp, Homo sapiens
agctgttcctctccttgaaaagtcaaggcttggttcaagccagatagcacctgaggacagaacatatcagaaacagtccaactcttacgatatgttca

SEQ ID NO: 807686 - DNA, 100 bp, Homo sapiens
gatcaggagaagtgggcccagcgttcattcagtgggagattcttcacagtcaagctcccagttgctcttgatcctggggccaagatttcagtcattgtgg

SEQ ID NO: 807687 - DNA, 99 bp, Homo sapiens
cggagtgtgaggagcctgtccccaaggaaaccatggaggagcactgcaagcttgagcaccagcaggggtctgctgcgagttgccttagagcgcaagggc

SEQ ID NO: 807688 - DNA, 100 bp, Homo sapiens
tacaacattggaacttagtgttatgccaaaagatgaagacattctccaagtggtttaccgacaagactgtgaaactttcgggatggtggtgaaaatgctg

SEQ ID NO: 807689 - DNA, 99 bp, Homo sapiens
ctagaaatgaatgtttccatctcttcagagatgaaccagtgtgctcactgatccgcctccagggccaccgccatgtcgagccgcggtgggaagaagaag

SEQ ID NO: 807690 - DNA, 100 bp, Homo sapiens
cagcgactcttccagctcctccagctccagttcgtcagactccgactcagaggtaacatgaaggaggatattgaatgttcctaacacaaagaaatgataa

SEQ ID NO: 807691 - DNA, 100 bp, Homo sapiens
ctgtgagtttccttttggttccaagcagaaggaggtctgcatcaatccctaccactataagagagtagaaagccctggtccagcccagaatcaaatgcag

SEQ ID NO: 807692 - DNA, 100 bp, Homo sapiens
agacgtccaacctacagaactgatttgacgggatctgaactatacacccaggcggccagcctcctgcatcctgtggtttatactaccgctatcattctcc

SEQ ID NO: 807693 - DNA, 98 bp, Homo sapiens
ggagaccccgaaaacggaagcgcagggagaaggaagaggtgtttgaaaagctaaattctgtccaacgtttaataaatcaatggaggaacagggtaaat

SEQ ID NO: 807694 - DNA, 98 bp, Homo sapiens
actctgggcagtactactgcattgcttccaatgacgcaggctcagccaggtgtgaggagcaggagatggaagtctgatgcctggtgtgcaggagtata

SEQ ID NO: 807695 - DNA, 100 bp, Homo sapiens
atcccaaaaaggactccgtgtttacctccatgtttcattctgtgagaagagttcttgcagacttcacagagaatgcagttgtcttgacttcaggtctgtc

SEQ ID NO: 807696 - DNA, 99 bp, Homo sapiens
ccgattctgcctgtccaagcctggtaaaactctgctggcacaaaccctagctaaatgccttgatgtcccttttgctatctgtgactgtacaactttgac

SEQ ID NO: 807697 - DNA, 100 bp, Homo sapiens
cattcccactcatgagatccaagtctctacagttaactggcaaagaaggtggtgaagcagtattttccaatttgaagattcatttgaaggtggctcctgc

SEQ ID NO: 807698 - DNA, 100 bp, Homo sapiens
agccggtgaccaagctcggggccgagcgggaggcagccgtggccgagccatccgcagagccatcctgtgcaaaggaaggagctaggctgtgcgccctggg

SEQ ID NO: 807699 - DNA, 100 bp, Homo sapiens
taaagtttattcttttcagaatagaaaacactctgaaaagatggctaaattagagttaatgttctcctcagaggtggaagaatatcctgataaagagaaa

SEQ ID NO: 807700 - DNA, 119 bp, Homo sapiens
aaaagatgatgagaaataaggacaaaagccaagaggaggacagttcgctacacagcaatgcatcgaggctgctcccggcagatcggcttctcctttgtacgacccaagctctgtgcctt

SEQ ID NO: 807701 - DNA, 100 bp, Homo sapiens
cgaggagcacagccgggccgctgcgaaggttcctgatgttattagcagcataaggcaattatctaaagcggccatgaaagaggatgccaaacccagcaaa

SEQ ID NO: 807702 - DNA, 100 bp, Homo sapiens
ttgctcctccctgcaactaactccattcttaattgaggcggggtttcaccatgttgcccagactggtcttgaactcctgagcttaagcaatccacctgcc

SEQ ID NO: 807703 - DNA, 130 bp, Homo sapiens
gctccgtggccttagctgtgctcgcgctactctctctttctggcctggaggctatccagcgatctgcatctccaatggatactgaggggtttggtgagctccttcagcaagctgaacagcttgctgctga

SEQ ID NO: 807704 - DNA, 98 bp, Homo sapiens
ctcaggctgctgtggttcatgccacagccaaaggttcagcctccgttttgtactccagatgaatttacatactgggcaacagactgtggaaattatgc

SEQ ID NO: 807705 - DNA, 50 bp, Homo sapiens
ccgacctcttccactccgaggaaatcaagttaatatgatcctctgttgaa

SEQ ID NO: 807706 - DNA, 101 bp, Homo sapiens
cacagactgttccttcattttcctgtatattctctgtactatgtcgattcgacaggtagagtggaacccccagctattagaggtcccaccccaaactcagt

SEQ ID NO: 807707 - DNA, 100 bp, Homo sapiens
agtgctgaagcctttaaatgcagcatctgcgatgtgaggaaaggcacctccaccagatccccgtcgaggtcaagatcaagatccaggtctatttcacgac

SEQ ID NO: 807708 - DNA, 100 bp, Homo sapiens
caacgtcctccgggaccggagtcagaaccctccgcagagtaaagatattgatgatgttaagaagttcaaaccgggttacctggaagctactcttaattgg

SEQ ID NO: 807709 - DNA, 100 bp, Homo sapiens
ctcgctcgacccgtccttcactcacgccatgcagctgctgacggcaggatcagttcgacagcttagacaagcatacacaatggggaattgacttcttgga

SEQ ID NO: 807710 - DNA, 103 bp, Homo sapiens
cgaggacagcaccgtgtcgctggtggtgcaggcgctgcgccgcaacgccgagcgcaccgacatctgcctgctcaaaggctggagtgcagtggtgcaatctcgg

SEQ ID NO: 807711 - DNA, 100 bp, Homo sapiens
gtcatgctgataacttgaggacaggcaggacaagctcctgcgccgagtgcctgaagttcgaaaagggcccctttgggaagaactgcagcgcggcgtgtcc

SEQ ID NO: 807712 - DNA, 98 bp, Homo sapiens
ccgtgacctgaaggctgtcaagtatgtggagtgttctgcacttacacagggctcaatttgaacaactgtgtgcttcccttttggccagggttgaacca

SEQ ID NO: 807713 - DNA, 100 bp, Homo sapiens
acgcccgagctccagagaatcaagaagacccaggaccagatcagtaacgtaccaaccaagaagctgaagaaatatgagaaagaatatcagacaatgcgag

SEQ ID NO: 807714 - DNA, 100 bp, Homo sapiens
tggcaatggtggactatccttatgcctctaactttttacagcctttgcctgcttggcctatcaagcatcagccactatgtgattgtcatgtccatgacca

SEQ ID NO: 807715 - DNA, 51 bp, Homo sapiens
gccgcgccgcccggcagcctcggcagacccaacatgagtgaagtttcctgc

SEQ ID NO: 807716 - DNA, 100 bp, Homo sapiens
caaggacaacccgtacatcaccgacggctaccgggcctacctgccgtccaggctgtgtatcaaaaggtctgctacaatgctgctgctgcacagagctgtg

SEQ ID NO: 807717 - DNA, 100 bp, Homo sapiens
atcgccttcagccctgtctggtgcatccttggcagaaagtgaggaggaaaacacccccattgagactttgaatgtgattgatcctggcttgatggaccta

SEQ ID NO: 807718 - DNA, 51 bp, Homo sapiens
gttccatccatgttgctgcaaatggccaagctataacatcagaaatggtga

SEQ ID NO: 807719 - DNA, 98 bp, Homo sapiens
agcgtggaagatgagagcagcctgaacttacactgtgaaaatatgtgccaattgttttgactgtcctggctgcatgcacaccctctctactcgggcca

SEQ ID NO: 807720 - DNA, 100 bp, Homo sapiens
tccccgcgccctgcggggctgtccaacgccttccagctccggctcccgctgcctgcaccatgtccgccagagtcttagagtttgaaagagtctatcttga

SEQ ID NO: 807721 - DNA, 100 bp, Homo sapiens
agagaatgctgagttcatgaggaactttcagaagggccaggtgacccgagacggcttcaagtgttctagaacagatcagacattttgtaatgatgcctga

SEQ ID NO: 807722 - DNA, 100 bp, Homo sapiens
agatggaagattttgatgcaaatatcgaagaacagaaagaagaaaagaaagatgcagaggaagaggaaagcgaactggcattgtttccaagtcgtacgag

SEQ ID NO: 807723 - DNA, 100 bp, Homo sapiens
tgcacagttcgaggggccaaggcagaagaaatcttggagaagggtctaaagtctatccagaagttaaaggagagattgctcgtaaagatgaaaagctgct

SEQ ID NO: 807724 - DNA, 98 bp, Homo sapiens
cggcacagagagggcctgggagcttgctgcagcttcaggaggcatacacggaatacctgaggagcatccactatatctcccaggtgttactagaagaa

SEQ ID NO: 807725 - DNA, 100 bp, Homo sapiens
gtactttgtgcaggttgacctaccatggggtctccccatgtaaggtgactgcagcagggaatacagcagacagcccctcctcaacagacagtgcagtatt

SEQ ID NO: 807726 - DNA, 100 bp, Homo sapiens
agatgcagatgagaaggttcagttggcaaaccagatatatgacttggaatggacaaatgaggttttcagtttggcaacaaacctgctggcccaaaacatg

SEQ ID NO: 807727 - DNA, 99 bp, Homo sapiens
agctgggtcagtccgccgctcaccccgcggccgcaccttcccgccttctcaggaattacatgaatgacagtcttcgaaccaatgtgtttgttcgatttc

SEQ ID NO: 807728 - DNA, 117 bp, Homo sapiens
tggaggaagcccatcgagagaagagcaaaggagactgcaccatccgtgagtgacactgctgatcctgtaacatggaggattgtcttcatacctcatctgagaatctgtccaaattgg

SEQ ID NO: 807729 - DNA, 100 bp, Homo sapiens
gacattctcttgaagggcttcacttccttaggaatggaagaagaaagaattgaaaccgcacagcagtaacaaatgtggcaattattttggatctatcacc

SEQ ID NO: 807730 - DNA, 100 bp, Homo sapiens
gaacagagccgggagttcaagaagaacactccagaggatcaccattaacaaggacaccaaggtacccaatgcctgtttattcaccatcaacaaagaagac

SEQ ID NO: 807731 - DNA, 121 bp, Homo sapiens
aaagaggcaaactgagatgcagacaaatgatcatccgtatgctgatcattttgaatattggattggatgctgctggcaagacaaccattctgtataaactgaagttaggggagatagtcac

SEQ ID NO: 807732 - DNA, 99 bp, Homo sapiens
ttccaggaggacacgctgcagttggccttcatcgacttgagacaattgatgaggaatctggattaaaggattcagaaccagagcgaaaacgcaagaaga

SEQ ID NO: 807733 - DNA, 99 bp, Homo sapiens
acctggaggaggaggccatcatcatgaaggacgtgcccgactggaaggttcaaaatggaaagtatttattgaccaaattaacaggtctttggagaatta

SEQ ID NO: 807734 - DNA, 100 bp, Homo sapiens
cagatgagatccaagggaaaccgagataggccatggagcaattctaggggcttatagctccaataatggaatggaaaatgtttcaacgtgcgcaagagtt

SEQ ID NO: 807735 - DNA, 100 bp, Homo sapiens
gctgccgctgccgccctgagtcactgcctgcgcagctccggccgcctggctccccatactagtcgccggtgggaatgagatctcgaaaccaaggtggtga

SEQ ID NO: 807736 - DNA, 100 bp, Homo sapiens
gcgttccagacgattgcacggaatgcacttaagcagcccattctcagctatgagaacattttaaagtgtgcttttcaagaaataacagtccagcaggcag

SEQ ID NO: 807737 - DNA, 100 bp, Homo sapiens
aggcatcagatgccagctctgaaaaactcttcaacactgttattgtaaacaaagatgcagaaactgaggcccagcagagattgagtaacttatgcgagtt

SEQ ID NO: 807738 - DNA, 100 bp, Homo sapiens
tgaaaagcctccttctggttccaaatgtgtcttctgtggcttcagcgtcacctagtgcaggctgccattcaacaaacgcattgtcaacagtcaaccaaaa

SEQ ID NO: 807739 - DNA, 100 bp, Homo sapiens
aaggtacttcatactggataccagagaagatagtttcgtgtggtacatggataatccacagggttttttgattaactcaaaaccagagaatgcctgtgaa

SEQ ID NO: 807740 - DNA, 98 bp, Homo sapiens
tggggccctttgggacgagtgctgtgactgtgttggtgaatctggattgggaaagtcgacattaatcaactcattattcctcacagatttgtattctc

SEQ ID NO: 807741 - DNA, 100 bp, Homo sapiens
tggaacagactgcaacaaccacaaacaaaaagcctggccaggcttttgatgaggccattgctgaacttgatacactgaatgaagactcatacaaagacag

SEQ ID NO: 807742 - DNA, 98 bp, Homo sapiens
aaacgtagggaccacatcaaagacagctttcacagtttgcgggactcagtcccatcactccaaggagagaagctgtcaccccatgtctggagagtgtg

SEQ ID NO: 807743 - DNA, 100 bp, Homo sapiens
cagaggaggagtccatcatcatgtcctcattcgtcagtatcctctcctctctgaatctcaaacaagaatggtgagagtatcatggttgaactcgcagctg

SEQ ID NO: 807744 - DNA, 99 bp, Homo sapiens
tttacttcatgcacttcaacttggaatcctcctacctttgtgaatatgactatgtgaagttgttctacgctgctgcgtatcattcaatgttgatgtgaa

SEQ ID NO: 807745 - DNA, 100 bp, Homo sapiens
cagcttccttcaaaatgtctactgttcacgaaatcctgtgcaagctcagcttggagggtgatggcagcagcgttctcggatgctagctactctttttaag

SEQ ID NO: 807746 - DNA, 98 bp, Homo sapiens
tcttacgatgtcttctctttgctacgccagtgaaactgaaattgcattcttctgtgaagaagattataagaactacaaagctaatcccatttcatcct

SEQ ID NO: 807747 - DNA, 98 bp, Homo sapiens
aaagatgaagatgaaaccaagcccttggtgaatgattccaattgtgaccaagaacttctttccctgctcctggatgccaagctgctggtgaagtgtgt

SEQ ID NO: 807748 - DNA, 117 bp, Homo sapiens
ctgtgatgtagtttcctgacctctgacacgtattgtctcaagattaaagacttggagtccaggtgtgagaaatttctacaaaaagacatttttgaaatcggggcattcaactgggag

SEQ ID NO: 807749 - DNA, 100 bp, Homo sapiens
ggaatgcatcagaatacacttcgtatcaaagagattcatgagaaatcatgccctaatccgggagaaatacgaaatggtcagattgatgtaccaggtggca

SEQ ID NO: 807750 - DNA, 98 bp, Homo sapiens
aaggcccttagaggctgaaggtgcccagctgcagggcggcagtaatgagattgactggggcgactttggggtagaggcagtgtctgaggggactgact

SEQ ID NO: 807751 - DNA, 100 bp, Homo sapiens
aaatcctcatccctgactttgttaaacagacctctgaagagaagcccaaagacagtgaagaactcgagaaaaagcttgtggtgaaggggggcaaaaaaaa

SEQ ID NO: 807752 - DNA, 98 bp, Homo sapiens
gtgaccctttgtctgctggcctgctgggtgctggtctacttctgtgtctggaagggggtcaaatccacgggaaaggtgcagtgcgagctgaagcgaaa

SEQ ID NO: 807753 - DNA, 98 bp, Homo sapiens
cggccatcgaggccctgctgcacgacctcagctcccagaggatcaccagcgtggggttggggtgctggaggactgcttcaccttcctgggcatcttcc

SEQ ID NO: 807754 - DNA, 98 bp, Homo sapiens
ctacaagctgtggatctcttgcatattccgctccagaaattctgcttggtgatgagtatgatgcacctgcagtaggttctccttactatgacaatgtc

SEQ ID NO: 807755 - DNA, 98 bp, Homo sapiens
acgcagggacagctgaaggagcagctctaccaggaaatcatccactacttcgacaaaggcaagatgccttcaattaagttgcagagttctgatggaga

SEQ ID NO: 807756 - DNA, 100 bp, Homo sapiens
cctggagctctacgcctcctacgtttacctgtccatgactgaaactgttgaggagcccatggaggaagaagaagcagccaaagaagagaaagaagaatct

SEQ ID NO: 807757 - DNA, 100 bp, Homo sapiens
cgtggtcaagttcaccatgagagggcaagagtacagcactgcatctgctctgtagccagtgaccactcagtaggacttctaagtttgcgagagaaaaaat

SEQ ID NO: 807758 - DNA, 98 bp, Homo sapiens
cctccaggtgacagcaatcagctggcctggtttgatactgacctgtaaatcatcctttaggttggtgagaccagatgcaaaaaagtttgtacttctaa

SEQ ID NO: 807759 - DNA, 100 bp, Homo sapiens
tgttctcttggcaacagatgtggcagctcggggtctggatattcctaaagtccagcatgtcatccattaccaggccacggcatatgcctccaaggacggg

SEQ ID NO: 807760 - DNA, 143 bp, Homo sapiens
atgagcgattttggtatttcagcagaaagactttcacagagactttcttcatgagattgaaacagttggtgacaaagttcctgctgatataaggttaacttccatcaaatctaccacactaagagttgaccagtcaattctca

SEQ ID NO: 807761 - DNA, 127 bp, Homo sapiens
ctagcccctaccaaaggcttgttaaatgaaccaggacaaaacagctgctttcttaatagcgctgtacagagtaacagactagctagagacaatgaattaagggaaaatgacaaagaacagctcaaag

SEQ ID NO: 807762 - DNA, 100 bp, Homo sapiens
tgagatagaaggggaggggttacagactgtggtgcctacccccatcactgcttccctcagccataacagcctgggtacatggggaccccagaagagcagc

SEQ ID NO: 807763 - DNA, 120 bp, Homo sapiens
acgaagacatgacacttacaagatggacagggatgataattgggcctccaagatcttgccacttgcctagtgaggcttttccgaacctggaaggagacgtctagaaatcccaactttgct

SEQ ID NO: 807764 - DNA, 98 bp, Homo sapiens
aattaagtgcagttcaagctgctaggtactaagaggtcaacagtatggaaggagctgtgatgtatggagtgttggctgtgctattatagaaatggctt

SEQ ID NO: 807765 - DNA, 99 bp, Homo sapiens
ggaaattcccagaggactttggagaccagtactgccaaatctgtcgaaagggagataatgaagaactgcttcttctttgtgatggctgtgacaaaggct

SEQ ID NO: 807766 - DNA, 98 bp, Homo sapiens
agtcagttccttgtggagccggagctgggcgcggattcgccgaggcaccgaggcactcagaggaggactccatccccgtgtctacctccctccttgga

SEQ ID NO: 807767 - DNA, 100 bp, Homo sapiens
gcttgctttctctatggatatcttaatcaagataactgtacatggaggaaacctcgacctgtctcccagttggttgcacagcaggttactcagcagtttg

SEQ ID NO: 807768 - DNA, 100 bp, Homo sapiens
agcgcgttccggaggcccggccacctctgagaagggagacgacgctgctgggtccgctgagcggggcgacccgaggactaatcaggaatgctttgaagaa

SEQ ID NO: 807769 - DNA, 100 bp, Homo sapiens
gagcgcttgatgtgcgcggagagcaatcgccgggacagctgcaaggtcacagaagatgtgaattcaagtatcaagacatttttttgtcccaatgatacct

SEQ ID NO: 807770 - DNA, 127 bp, Homo sapiens
cgagatggcggccgccgggaccttcctgcacccgttcccgagcgaaagcccgccttgctccgaaccttcagctttttgggctttgagattgtgagaccggggcatccccttgtccccaagagacccg

SEQ ID NO: 807771 - DNA, 99 bp, Homo sapiens
agcactatagtgcaggtgttggaagtgaaagggcaggctgtccctgcaggatcccacgtacggctgaatcttcagactggggaaagagaggcaaaactc

SEQ ID NO: 807772 - DNA, 100 bp, Homo sapiens
tcttatactcatggtctttgtcaattatggaggaggaaaatattggtacttcaaacatgcaagttggaatgtccagggaccttgacccagcccctctcag

SEQ ID NO: 807773 - DNA, 99 bp, Homo sapiens
catggcccggctggctgactacttcatcgtggtaggctatgaccacgagaagccagaatcatattctaagaactcagccactcaggtatccaccatggt

SEQ ID NO: 807774 - DNA, 100 bp, Homo sapiens
ttgatgactccaccgaccccatcctcagcaccattagacggattggacttttcaacaaccgcacagatagagtcaagatggagtcttgctctgtcgccca

SEQ ID NO: 807775 - DNA, 100 bp, Homo sapiens
ggatccgagtgcgggcgcgggcgcgggcgctcccggcgagccacggtactccaaagattcaggtttactcacgtcatccagcagagaatggaaagtcaaa

SEQ ID NO: 807776 - DNA, 99 bp, Homo sapiens
atgaagctaccggccagggttttctttactctggggtcccggctgccctgtggcctcgctcctcggagggtatgatctcgtgaaaccttgagagaaact

SEQ ID NO: 807777 - DNA, 100 bp, Homo sapiens
aattactgtcccagtgtttcacctgtttcacaaactcttggcagatcctgataacttaagtgactctctcttttccggtgatgaagaaaatgctgggact

SEQ ID NO: 807778 - DNA, 98 bp, Homo sapiens
gaccttccacactgccacctgattaaaggaattgcttcttcagtccccaaagaggaacaaaagctccccgaggctgacgttgcagtgtttcgcacctt

SEQ ID NO: 807779 - DNA, 99 bp, Homo sapiens
agcgagcgaagctagggtcgccgccactgccgcaggaggcgtgaggctggacgtaaagaaagaagtgatgcactcaattctgcaatagataaaatgacc

SEQ ID NO: 807780 - DNA, 100 bp, Homo sapiens
ggtactctacacttgcttccaatccatacaggcccaaaagagttcagattttattagctctctgggagtgagctacatgatgttgtgcactgaaaattac

SEQ ID NO: 807781 - DNA, 98 bp, Homo sapiens
cttgccgaagacaatggtctcaatttggcctttaccatcgcccatgagctgggccacaagatgtgtgaccggaatggtggtcggcggcttcgacagtg

SEQ ID NO: 807782 - DNA, 100 bp, Homo sapiens
agtgtgtactaaatgaaggcatgccaatttatcgtagaccatatgaaaagggtcgcctaatcatcgaatttaaggctgttgaaaatcctacagctacaga

SEQ ID NO: 807783 - DNA, 100 bp, Homo sapiens
ggaggagtctcagagctgtcagaaagctatccagtcagttcgctgctattcccatgggtcacaggagacagatgaggagtttgatgctcgctgggtaaca

SEQ ID NO: 807784 - DNA, 100 bp, Homo sapiens
agcgcggccagaactgcggtcacttaagttttccgtgtgcgggttgcaaggagcgtgcgtgcgtctgagattgccttggttgaatagaagtcaaacagta

SEQ ID NO: 807785 - DNA, 100 bp, Homo sapiens
aggatcacgtgataaggcactagcagatgtggttggaatccttgctgtgctgaatcctggctgtgtgaccccaagagtggacgcttctcttgtgagccag

SEQ ID NO: 807786 - DNA, 100 bp, Homo sapiens
ttcgcgctgctgggcacccacggagcctccggggctggagatcgtcaacttcaactgccggaagctggtggcctccatgccgctgttcgccaacgccgac

SEQ ID NO: 807787 - DNA, 98 bp, Homo sapiens
cctcaccaactgcgtgttcatggcccagcacgaccctccaccctggaccaagtatgtcgagaaccaatgacaagccagggggcccacactacatcctg

SEQ ID NO: 807788 - DNA, 98 bp, Homo sapiens
cagatcaaccaccaaagtgggaaacattgaaatcaaggtgcaggtatttggactgtattctggagaagaatttcacgagacttttgactgtcccatta

SEQ ID NO: 807789 - DNA, 100 bp, Homo sapiens
cggagggcccacaacccgcagagacttctactggctgcgctcctttctggccggagacagcatgagtatctatgacgatattgatgctgacgtgctgcaa

SEQ ID NO: 807790 - DNA, 100 bp, Homo sapiens
gcacaacagagggacaacaaaagcctcctacaagagtcctaccaaaactcaccatgccttctcctatgcctgagtacctgaatgtgcactacattgggga

SEQ ID NO: 807791 - DNA, 98 bp, Homo sapiens
caaccgcaaccagcgcaaagactcagagcaaatccagtttgctgatgacatgcaggagttcaccaaattccccaccaaaactggccgaagatctttgt

SEQ ID NO: 807792 - DNA, 100 bp, Homo sapiens
tggcagctgcagagccagatgatccacaggatgctgtagtagcaaatcaggtggtgaagcagtattttccaatttgaagattcatttgaaggtggctcct

SEQ ID NO: 807793 - DNA, 102 bp, Homo sapiens
gaagtttgcacagtccccagcagctggcagaagaagcaacacgcaaacgagagctgaggctaatgaaaaacaggagctcagtctgaatattcttggagaaag

SEQ ID NO: 807794 - DNA, 99 bp, Homo sapiens
aaactttggcgacaatgttggcctgtctgcaagcttgtgcagggggttatggttttgtgaaattcacagatgaactggaacagaagcgagccctgacgg

SEQ ID NO: 807795 - DNA, 100 bp, Homo sapiens
ttgatattgatgtgaacgcctctgtgtttgaaacaaacattcgagcctccattgtgttccctcctccaggggcttctgaggagaatggcctgcctcacac

SEQ ID NO: 807796 - DNA, 100 bp, Homo sapiens
gaagaggctggaaaagagggtggaaaaagcagggaggttatgaggcttaataaagaaggcgctgagtgaccagaccatggagaccctgcttggtggcctg

SEQ ID NO: 807797 - DNA, 98 bp, Homo sapiens
cgcgcagctgggcgagaagctgctccggcctagcctggcggagctccacgacgagctggaaaaggaaaacctcacagcacgggtagctctgaacggat

SEQ ID NO: 807798 - DNA, 98 bp, Homo sapiens
tgggttcagttttcttcagaagaaggacttcggaatgcactacaacaggaaaatcatattatagatggagtaaaggaaacctgtgatctggggaagat

SEQ ID NO: 807799 - DNA, 106 bp, Homo sapiens
gtaaagatgcagaggaaagaaaagaatacattcctgattacctgccacccattgtgtcttctcaagaagactgaggctgatgtgaatccaaaggcctatccccttg

SEQ ID NO: 807800 - DNA, 100 bp, Homo sapiens
caggggtaacacccttccagatgatttttgaggaacatgtttgacaagctgaaccgtgatgcctttcatataatttcttattttttgtttcaagttctgg

SEQ ID NO: 807801 - DNA, 100 bp, Homo sapiens
gaagccatgtttcgaagacctgtattacagagctcgtccgcatggtgctgaatggctgaggaccttcccagtctccccagagtccgtgcctttccctgtg

SEQ ID NO: 807802 - DNA, 98 bp, Homo sapiens
ggatgttggcggtccctgtgacctgtggagacacggccagatctgccctccacacatggattaattgatgtatgttgagtttatggagctgccttttg

SEQ ID NO: 807803 - DNA, 98 bp, Homo sapiens
caacacggatatcagcatcctgtccttgcagttatgaatgcaggaatgaggaagtacttcctacaagccaatgatcagcaggacctagtggaatgggt

SEQ ID NO: 807804 - DNA, 99 bp, Homo sapiens
caagctgaagacatcaagaagatcttcgagttcaaagagaccctcggaacactgattttgcacgatttagcggaacaaatgtggaaactgactttgtag

SEQ ID NO: 807805 - DNA, 98 bp, Homo sapiens
gtagatgagtggattgtatttcagtctccagcaagaattgcccatcttgttaaggtaaaataccatgaagattttgaaaaaacaaaggggagaggctt

SEQ ID NO: 807806 - DNA, 98 bp, Homo sapiens
atcttttggcttatgatgtctacaataattcggatttgttctacagagaggtctataagggagaattccaactacctgactttcttaaagaaaaacca

SEQ ID NO: 807807 - DNA, 98 bp, Homo sapiens
tcttccccacctgcccggtgcccgaggaggcagccaagctcgtagcctgccactccgtgcatattttagggcaagtgtggtggctcatgcctgtaatc

SEQ ID NO: 807808 - DNA, 99 bp, Homo sapiens
taagggagttctttatacttctccaggtccacatcttgatacagaaaccccgacagagcaatctcccaggcaatacacacaaactcgggccacttctaa

SEQ ID NO: 807809 - DNA, 98 bp, Homo sapiens
gatattttgacctccttccatgaatcacaaatgttcttaatggcatctagaatgaacccttaggagaaatcttgagagtggacagcaattgtgaagat

SEQ ID NO: 807810 - DNA, 100 bp, Homo sapiens
cgtgactattcagatcatccaagtggaggttcctacagagattcatatgagagttatgtggtctcaaatagtcaagaccccctgctgggaggagcttcta

SEQ ID NO: 807811 - DNA, 100 bp, Homo sapiens
ctcacatcgtggagatggacaggagacctggaatcattgttggctaacctctgctttgtggacattgacaaccacttcattgagttgccagaggacttgc

SEQ ID NO: 807812 - DNA, 99 bp, Homo sapiens
ctttgtgctggagcagtccctctctgtccgggcgctgcaggagatgctggctaacaccgtggagaaatcagaagggccatggcaatgacaggctcaaca

SEQ ID NO: 807813 - DNA, 98 bp, Homo sapiens
accaccatcggcctggcccccctcatggccatgtgctctgtgtaccagtctggaggagtcaacatggtcattgctagaatcgtggatggaagcagatt

SEQ ID NO: 807814 - DNA, 98 bp, Homo sapiens
agcagtgcctggtggccgaccttgtccacacagtccatgcatgtaatgaatttactacacatgtgatgaaccttctccgagaacagagtagaacacgt

SEQ ID NO: 807815 - DNA, 100 bp, Homo sapiens
tttgaagaaagatgacaccacctttgatgagaatccacattcatctcaatggaaggatcctgccttaagtcaacttatttgtttttgccgggaaagtcgc

SEQ ID NO: 807816 - DNA, 100 bp, Homo sapiens
cgcagctccacactccaggtacttcttccaaggacctaggtctctcgcccatcggaaaggtggagtgcaactcaaaattggacccaacaaagaccactct

SEQ ID NO: 807817 - DNA, 126 bp, Homo sapiens
tggagggcttctacgtcatcttcgacagagcccagaagagggtgggcttcgcagcgagcccctgtgcagcaattctgtggtgttcttggtcacacatttatggagtttctgaagggcagtggagat

SEQ ID NO: 807818 - DNA, 100 bp, Homo sapiens
gagttccattatggttacagtcttcagaggacatggaaaaatgctccaaagaggccttggcatgagtatgagcacaactttcaaattatgtataaagtgg

SEQ ID NO: 807819 - DNA, 100 bp, Homo sapiens
tgtggcagcaagtcttagcagtggacgcgagaaaccagggtggttatgaccgctactcaggaggaaattacagagacaattatgacaactgaaatgagac

SEQ ID NO: 807820 - DNA, 100 bp, Homo sapiens
tttgatgctcaaacaaggaaacagatatgtattctggataagactaagcctggagtaattcgcccagtacctgtaaaatccagaatattactgaaaaaag

SEQ ID NO: 807821 - DNA, 100 bp, Homo sapiens
gacgtgattatgagggagtttcgttctggctctagcagagttttgattaccactgacctgctgtcttcacctcctcctcgtcctcttcgagccgtcagac

SEQ ID NO: 807822 - DNA, 98 bp, Homo sapiens
ctatagtcattatcaccacatcccctggcatccaattccgtgaccaagaatatggcccaggtgaccaaagccctggacaaggccctgagcaccatgga

SEQ ID NO: 807823 - DNA, 98 bp, Homo sapiens
gaaaagcctaaagattagactgtaagaaaagaaaatagaagccatgtttcgaagacctgtattacaggttttggagattttaggtaagaagtttcctg

SEQ ID NO: 807824 - DNA, 100 bp, Homo sapiens
aagtttaaaaatgggtgaagaacggtgggtctccctcactccagaagaatttgaccaactccagaaatattcagaatcagttccgccgagcatcctgggg

SEQ ID NO: 807825 - DNA, 98 bp, Homo sapiens
ttttgccaattgtgtggccttagcgatctatattccctttccagaagatgattccaacgccaccaattccaacctgggttcgtgtgagccaggatggg

SEQ ID NO: 807826 - DNA, 98 bp, Homo sapiens
gtcgtcctggttgtcaaccggatcaggagcttggctcagatgaacgtgcctttgcctttgatggcttcaagggttgtggagttgctcagtgcttgaag

SEQ ID NO: 807827 - DNA, 98 bp, Homo sapiens
atcatgtcttctgtatgacttgtattcttaaatgggcagagcttttgaagagggagaacagcagattgctcagttacatgggtctggattttaattct

SEQ ID NO: 807828 - DNA, 100 bp, Homo sapiens
caaaatcaagtggataaactttttagcgcttggatgcagcatgcttggtgggctcaagactgcagtgcagatgacgacaacttccttgtgcccatagcgg

SEQ ID NO: 807829 - DNA, 100 bp, Homo sapiens
gaattcaaggccatcatggtgcaaaaggagaggtttgttggcatccaaagctgttggggttgatggtgctgaaaaaaaggaagactacaatgaaacagct

SEQ ID NO: 807830 - DNA, 99 bp, Homo sapiens
tggggaacctgctcaaagccctgggtcgcttggaagaagccaagtgagaaagatcagtctaaagaaaaggagaagaaagtgaaaaaaacaattccttcc

SEQ ID NO: 807831 - DNA, 99 bp, Homo sapiens
caagatggatgaagacggcggcggcgagggtggtggcggtactccaaagattcaggtttactcacgtcatccagcagagaatggaaagtcaaatttcct

SEQ ID NO: 807832 - DNA, 98 bp, Homo sapiens
agattctggctgagaggaggaaggtgctggccattgaccacctgaatgaagatcagctgaggtcaccaagctccagcagctctcaagccatgcggtcc

SEQ ID NO: 807833 - DNA, 99 bp, Homo sapiens
gttttgccacgtggatgtgaagatttcctctaaaagcaggtcaatggccagcaaggaggggggtccgagccggcggcggcggcggcagtggtggcagcg

SEQ ID NO: 807834 - DNA, 100 bp, Homo sapiens
atctgtcaacatcatcagtttttcgattagatgaggctgtggacccaggctagacagatgggatggtatgcagcaaagtgcatggctgcagcgagttcag

SEQ ID NO: 807835 - DNA, 100 bp, Homo sapiens
aattaattacagggctcgtccaactggtccctcagtcacacatgccagagattgctcaggaagcaatggaggttttgcactgattgcaaaaataaagtcc

SEQ ID NO: 807836 - DNA, 100 bp, Homo sapiens
ccttggccgcctgagcccttgagttggtcacttgaaccttgggaatattgaggtatgccattttgaagactgagacgttggagttttatcctagaggata

SEQ ID NO: 807837 - DNA, 98 bp, Homo sapiens
cagagctgcacaaagggaaagggaacctacaagcagcaattggcgcctattatgactttgagagcccaaacatcagtgtgccctctatgtcctttgtt

SEQ ID NO: 807838 - DNA, 100 bp, Homo sapiens
tatgcccctctatgcagtcatgtatcctgtgtttaatgagatatgggaaaatagtctccacaaaggcaattttggataagacaacgaacaaatgcaaagg

SEQ ID NO: 807839 - DNA, 100 bp, Homo sapiens
attgagccacaagtatactgaaggaagggctccctcgagttctggtgtgaagagataaatcaccagcaattttccagattattcaaagtatcaggatggg

SEQ ID NO: 807840 - DNA, 99 bp, Homo sapiens
accttctctatcagatgctgtgtggaatcaagcaccttcattctgctggaattattcatcgggcccatcaccttcgctgtctgaatgactttgtagaag

SEQ ID NO: 807841 - DNA, 99 bp, Homo sapiens
tatttgattcaccaaatccctgtatcgacatccgtaaagccacaaggtcgttccaggggtagaggaggcatgaaggatgaccgtcgggacagatactct

SEQ ID NO: 807842 - DNA, 100 bp, Homo sapiens
ggaacttcctgtggttcgtgagcatggacctggtgcaggctcctcctgctggaccctccagccccgggcctcaggagcccgagaaggaggagaggagggt

SEQ ID NO: 807843 - DNA, 100 bp, Homo sapiens
catttcagaaccaggttctccttcgaggaacagagaaaatgaaaccagcagacagaatttgtcagaaccttctgataacttaagagagattctccaaaat

SEQ ID NO: 807844 - DNA, 100 bp, Homo sapiens
ctggaagcagtaactttgccgtggcaggaaccccgcactcctacatagacacgtactttgacacagagaggtccaccgggcatacttagtatctttggac

SEQ ID NO: 807845 - DNA, 100 bp, Homo sapiens
gcttccaatgagtatggcagtgtcagctgtacagccacactaactgtgacagattgtgcttcttggtcagaccccgcatcaagaatatgcgatacattgc

SEQ ID NO: 807846 - DNA, 100 bp, Homo sapiens
caatgaagtatatgcagaggaggtcccacaggctcctgccctggactaccgagatccaggtccagagagcatcgcagacatcgatctcgctccatgtcac

SEQ ID NO: 807847 - DNA, 99 bp, Homo sapiens
tgtgattagcttcgcagtctggaaagctttaggagttcacagttaacgcatccccaattaatagaattgtacaaatcagtggcaattccatgccaagag

SEQ ID NO: 807848 - DNA, 98 bp, Homo sapiens
ataagaacaccaaccaaattgtcgccattaagaaagattactacagcatcccatttcccacacccactactccgctgactgggagggatggtagcctg

SEQ ID NO: 807849 - DNA, 100 bp, Homo sapiens
ggaagcacggagcccacgactcccgatagtgagagacctgctcaagctctcttaagagattatgacctttcatctgggaacgtttctctgaagatatatt

SEQ ID NO: 807850 - DNA, 98 bp, Homo sapiens
tcggggcgtctgggcagcctacgctttccgctcggggtgtggttttctctcggttgtgcctatttggccttggaagactatcaaggttcagcaaaggc

SEQ ID NO: 807851 - DNA, 98 bp, Homo sapiens
acccagtccggggacagtgcacagccagagcagggccggccagccaccccttgcctgggaccagtggcagggaccccggaacctgaaggtgctgacaa

SEQ ID NO: 807852 - DNA, 100 bp, Homo sapiens
cggtggaatctgttcttcttttgcatcctacgtaaccagaccaagctgtggggcagtagaagatggtgaaagaaacaacttactacgatgttttgggggt

SEQ ID NO: 807853 - DNA, 98 bp, Homo sapiens
aggtattatgatgagctgtgtacagcaatggctgaggaattgaatgctgtcattgtttccattgaattcacttgtcatggattagtgactggtcagag

SEQ ID NO: 807854 - DNA, 100 bp, Homo sapiens
aagatatgccaaatttgttaaagagaggatagaaattgaacagaactatgcgaaacaattgagctgagtcatccaatggtggctattcctgaacatgaag

SEQ ID NO: 807855 - DNA, 100 bp, Homo sapiens
aggggctcacctgccttgcatcgttccgagtcctgtactggactgcatcaggccgcgtctcctcaggattggcctggggtacatcatctaaagatcctag

SEQ ID NO: 807856 - DNA, 98 bp, Homo sapiens
aaaatggggacccgcagacacctagctgaactgtcccaagcaataaacagtggtacattgttatcaaaaccgtccccacccttaccacctaagagagg

SEQ ID NO: 807857 - DNA, 98 bp, Homo sapiens
tggattcagtgtgggagagtttgcagccctagtgtttgccggagccatggaatttgctgaagagcccatgagggcccccaaaggcctggcttttgctg

SEQ ID NO: 807858 - DNA, 100 bp, Homo sapiens
cctgacatgtgacaatgaaattgaattgaagaaaattgcacgtaatcacccaaatgccaagaaatctgaaatagagtactatgctatgttggctaaaact

SEQ ID NO: 807859 - DNA, 100 bp, Homo sapiens
ctgaagcaagaacaagaggaataccagcgggaagggatcccctggaaacatgttttcctttggaatatggataaatacaccatgatacggaaactagaag

SEQ ID NO: 807860 - DNA, 99 bp, Homo sapiens
cgaacacaaagggaaagaggagaggcacccgatatatgttctctaggccttttagaaaacatggtgaactgcgccaggccactgtggccatgatgaaca

SEQ ID NO: 807861 - DNA, 100 bp, Homo sapiens
ctgaagcgggcttcttttgccaagagtgtgatagtgcatcgtgagtgttgctggtggggccactcgggctgccctgaccgtgcaccaggctcggaggaac

SEQ ID NO: 807862 - DNA, 100 bp, Homo sapiens
agtggagcatagcgtgtccggaactggtgggttcttggtctcactgacttcaagaatgaagccgcggaccctcgcggctggagtgcagtggtgtgatctc

SEQ ID NO: 807863 - DNA, 99 bp, Homo sapiens
tcccgggaggaagatggcgctgcgaattcggggatatcattttcaatgcccaatacccagaactgcctcccgattttatctttggagaagatgctgaat

SEQ ID NO: 807864 - DNA, 101 bp, Homo sapiens
ccgatctttcgggaaggcccctacatcggccacgtcatggaagggtcacccacaggttgcactgctgtgatccatcctcatctcctaaagatgcatcctga

SEQ ID NO: 807865 - DNA, 100 bp, Homo sapiens
agggtggctgtggacaaccagccccgagacatcggactgcaggtctagcacataccgctccaagggctttgacgtcacagtgaagtacacacaaggaagc

SEQ ID NO: 807866 - DNA, 100 bp, Homo sapiens
gcatcatacaccggctgttcgaggccttgactgtaggtcagaagttgagtagcaggggcctaggagggctcgaagccttcacagcgatggcagagaagcg

SEQ ID NO: 807867 - DNA, 100 bp, Homo sapiens
aatgaacttcacaagttcctcatctgggacactgctggtcaggaacgggttgggggccgtcccgctcctaaggcaggaagatggtggccgcaaagaagac

SEQ ID NO: 807868 - DNA, 100 bp, Homo sapiens
ccaaagcctgcccagacggctcacctgtgcgggatggaacaaaaggaggctactcacagtcgaactacaactccccggggtccggccagaactacagtgg

SEQ ID NO: 807869 - DNA, 100 bp, Homo sapiens
ctctctgcacttcggcccattgtgaatcatccacattatgaagacgcaggcttgagggtgaaaatcctatttataagagtgccgtaacaactgtggtcaa

SEQ ID NO: 807870 - DNA, 99 bp, Homo sapiens
tgcatttgtctgtttgatatcaccaaactggaggatgcctatgtattccctggggatggcgcatcacacaccaaagcaatcatcctcttccagtggtag

SEQ ID NO: 807871 - DNA, 98 bp, Homo sapiens
gggcctctaggtcctggcgccccgcccccactgctgtttctcaataagcaaaaaggttatgatgtgattgctcaagcccaatctgggactgggaaaac

SEQ ID NO: 807872 - DNA, 100 bp, Homo sapiens
tttgcctggctggaatcattctcaccttgtatgctttacgtgctcctgacctctgataaagctgcagccaatttctcagatcgttctttgctgaagaact

SEQ ID NO: 807873 - DNA, 99 bp, Homo sapiens
aagattgatttgcttgtttcattgcaaaaccaagggaacaacttgactggctccttttaactggatatagatagggtttcatcatgttggctcggctgg

SEQ ID NO: 807874 - DNA, 100 bp, Homo sapiens
caaaaggtgatctggacaaaggaacaggtatctcagaatctcatctgttctgagtgtggggatgagtttactctgcagagtcagctggccgtgcacatgg

SEQ ID NO: 807875 - DNA, 100 bp, Homo sapiens
aaggtgcgcagcagaaagcatttaaccagcatggctacttcatattttggaaagcagtttttaagacaaggatttgtcttggctgttactatgacacggg

SEQ ID NO: 807876 - DNA, 98 bp, Homo sapiens
atattatttgcacccagtcctgcagcgccagcagctggactatggcatctatgttatcaaccaggtcactctgactgctgagacctcatgtagctaca

SEQ ID NO: 807877 - DNA, 98 bp, Homo sapiens
tttagaaaaacaagaattacagcagccaacctatgttgccctgagttacataaatagttactccacaggatccgctgaacataggatgttgccacaaa

SEQ ID NO: 807878 - DNA, 99 bp, Homo sapiens
tggaatcggtcaccctggagaacagcccgttggtgtggaaggaggggcggcagcttctccgacagagcctgtgtgaaatgcagcaaaggggtgtttggg

SEQ ID NO: 807879 - DNA, 98 bp, Homo sapiens
taatctcttgttttacggaccacctggaactggaaaaacatccactattttggcagcagctagagaactctttgggagtctccccaggacagtgctat

SEQ ID NO: 807880 - DNA, 100 bp, Homo sapiens
gggagttgcttctagcgataaactacaagaatggctccgttctccccgggatgcagttagtccaaggttcctggtacagttcagacaggacaaagtatgt

SEQ ID NO: 807881 - DNA, 99 bp, Homo sapiens
gcagcttcaggacgctgtgaattcggttgcatcataaatacaaaggactgaagttataaaagagaaaagagaagtttgctgctaaaatgaatctgagca

SEQ ID NO: 807882 - DNA, 100 bp, Homo sapiens
actggttctccaggaaccgaaaaggcgaggagtatagtacggcaaaaaactgtcggtattgggagagttgctgctacatctttaggaaatttgactaacc

SEQ ID NO: 807883 - DNA, 100 bp, Homo sapiens
ggaccaaaattgtcttggggaaacagctaattgagagcggtccatcagaatgggttgtccatgaaccagatgctgatgggcttatcaccaaatgtacttc

SEQ ID NO: 807884 - DNA, 100 bp, Homo sapiens
ctggaggaggcatggagcccgaggaggagccaagtgtggcagcagttcgtgaagtctgtgaggagatgtgtcttgctgaatcagggctctcttatccctg

SEQ ID NO: 807885 - DNA, 99 bp, Homo sapiens
caattgaaagttattaccagaggagcttgaaattgtaattggagatgagcacatatcttttaccacatcaaaaataggttctcttattgatgtaaatca

SEQ ID NO: 807886 - DNA, 98 bp, Homo sapiens
agtgccgcctggaggcagccggtccaaccctcttagcaaatatccggctgtgatcaatgatatttcattctggttgccctctgagaattacgcagaaa

SEQ ID NO: 807887 - DNA, 100 bp, Homo sapiens
ggtggtggcaatggtcgtggaggccgagggcgaggaggaccttaagccagttatcgatgggatggatggaatcaaaatctctcaggggcttgggctgcag

SEQ ID NO: 807888 - DNA, 100 bp, Homo sapiens
tagtggggctgcagtatcaactcgagggaggttcatgacaactgaggaaaaagccaaagtgggaccaggattagccgatgaattacatatgccatctctc

SEQ ID NO: 807889 - DNA, 98 bp, Homo sapiens
ccaagggcgccaaaggagaagtgggcccccccggaccaccaggagtctcgctgtgtcacccaggctggagtgcagtggtgtgatcttggcttactgca

SEQ ID NO: 807890 - DNA, 98 bp, Homo sapiens
gttgctccgggccattgtcgactgtggctttgagcatccgtcagaagctggaagcctgtggcagaatacattgatcagcagtttgagcagtatttccg

SEQ ID NO: 807891 - DNA, 99 bp, Homo sapiens
accgtgatggttcgcgttggtggaggatggatggccttggatgaatttttagtgaaaaatgatccctgccgaggatgctgtatgattatgttgaaagga

SEQ ID NO: 807892 - DNA, 100 bp, Homo sapiens
aggagaaggatagacttggctttgagattgtcttcgcagttttaccgacttagaagaacttgatgagacagagttatatatgtgccataaatgcaaaaag

SEQ ID NO: 807893 - DNA, 100 bp, Homo sapiens
gatgacctgtcaggagttcattgcaaatctgcaaggggtaaatgagggtgttgatttctccaaggatctgctgaaagcctcaggagtgcaagtagctgat

SEQ ID NO: 807894 - DNA, 100 bp, Homo sapiens
gaagctatgcttggcagcagaaggatttggcaacagactttgtttcttggagtccacttccaattccaagtgtaatgttcaagctcagaaatgccttatg

SEQ ID NO: 807895 - DNA, 99 bp, Homo sapiens
agctctgaagtaagcacagtagaactgctgcatctgcaacaacagcagcttaacaaacaacagttgcagttactgaaagaacggttccaggccttcctc

SEQ ID NO: 807896 - DNA, 100 bp, Homo sapiens
taaatacgatgttgcagctcagccctgaagaaaagggaaaacttgctgcggttgctcaagaacccagtgacttgattgtaaaaatttacagagcggaatc

SEQ ID NO: 807897 - DNA, 100 bp, Homo sapiens
cgcgacctccggatgacccgggcttcggcccccaccagagactcgaaaatgtgatgttctgaatcgtggattttcaggttacaataccaggtgggccaaa

SEQ ID NO: 807898 - DNA, 100 bp, Homo sapiens
aaaaggccactgactcctacttcctctgtatagagcaactgttgaactcagctgcctgtagggaccattgcaatttagagatgtggccatagaattctct

SEQ ID NO: 807899 - DNA, 98 bp, Homo sapiens
aagtgcctgccattcttatcatttctaagcaggttcatgccagcccagaacagagaatcagttcacaaagatgtccaaaactaatggcttatcagaag

SEQ ID NO: 807900 - DNA, 100 bp, Homo sapiens
ccgggaggcagccttcaccagggacctgcccaggaaaccagcagatgcccaggagctgacatggacccaaatcctcgggccgccctggagcgccagcagc

SEQ ID NO: 807901 - DNA, 51 bp, Homo sapiens
cttagctcagcaattcttaccttcctacgctcactccccaacccatcccaa

SEQ ID NO: 807902 - DNA, 99 bp, Homo sapiens
atccccttccagctgcagcagccgcaccagcgccgggacgggggtggccgtgcagagtgatcagcagctggactgtgccttggacctaatgaggcgcct

SEQ ID NO: 807903 - DNA, 98 bp, Homo sapiens
cacactggagaaaagccttttcagtgtgatctggtaatgccgctgtcatcaaatatgaggagaaacctccaaaaccagcatttcagaatggttcctca

SEQ ID NO: 807904 - DNA, 98 bp, Homo sapiens
ggagacgttgataacgatacggctgaggacctgttcgtggaatttgcacataaggcttcagctttgaacaactggtgtgaaaagatggaagaaaactt

SEQ ID NO: 807905 - DNA, 99 bp, Homo sapiens
cctgcagaattccgggttgtgcagccaagcaggaacggtgtacctttctagacccatcctcttgcaatcttggaccctacttaattcagtgcacaaatg

SEQ ID NO: 807906 - DNA, 98 bp, Homo sapiens
agccgtgaggaactcttcaggctccagaagttttgctgttactgctcagtgtagtcacaccttgaataagaaatggaaaaccttgggatgttgataaa

SEQ ID NO: 807907 - DNA, 99 bp, Homo sapiens
gcagctgtcccatgctctgctgagcacggtggtgtttgagaagctgcagctgctcaaccctgaaatagaagcagaacaaatattaatgtcgcccaactc

SEQ ID NO: 807908 - DNA, 100 bp, Homo sapiens
tctcagatgttgttgatgaagtaatacagaactgccccatcgatgtgcggcgtccgctgtataaggttgccaacttggcctgttccatctcaaataatga

SEQ ID NO: 807909 - DNA, 50 bp, Homo sapiens
ctcccaagtagctggaattacaggaccgagacgtgcagctgtccaaggct

SEQ ID NO: 807910 - DNA, 100 bp, Homo sapiens
tatggtccaggaggcagtggaggaagtgggggttatggtgggaggagccgatactgagcttcttcctatttgccatgggataactgggatgacgatgatg

SEQ ID NO: 807911 - DNA, 100 bp, Homo sapiens
cttggatctggaagacatcgtgcgcaatatccaggccagtgagagaggtccctccagctacaaggtgggcaccatggcggagaagtttgactgccactac

SEQ ID NO: 807912 - DNA, 100 bp, Homo sapiens
gctggttagaatcatcgcaatgagaacttctacagctgaggacttgaggaccagaaaatcgaagctgcagatggcaagattattttatcataaaccccag

SEQ ID NO: 807913 - DNA, 99 bp, Homo sapiens
cgaaggtgtattcagagattttttagtctaaatgatgggcagtcatggtcccagaaacgtcactatcaagaagattctacaggaaaatgtgggccccct

SEQ ID NO: 807914 - DNA, 98 bp, Homo sapiens
gcgacaggatagaccaagcaaacccggattccccgatgagccaatgcggatcagcttgaacgggtctttttacgacttggccatgctgaaacagatga

SEQ ID NO: 807915 - DNA, 99 bp, Homo sapiens
tgcaacgtagtgttgccaatccagcatttttgaagagctatgaagacatgattggtgaggaggtgccatcggatcaatactactgggctcctttggccc

SEQ ID NO: 807916 - DNA, 100 bp, Homo sapiens
tgggggtggctcaccgggcagcgtgggtgagcggcgcagcggcggcagcggagagcgagagaggggagcagaagtccaaggcttgcgagaaggtcatttc

SEQ ID NO: 807917 - DNA, 100 bp, Homo sapiens
cttcaaaatgctgcagaaatgctcactgcaaaagtgaaaggagtttccagatgtcttggaatgcactgtatctcatgcagtagaaaagataaatcctgat

SEQ ID NO: 807918 - DNA, 100 bp, Homo sapiens
ctaccgttacttggctgaggttgccgctggtgatgacaagaaagttgctgatgattcctctgatcatgtcagtactttatgtctgggcccagctgaacag

SEQ ID NO: 807919 - DNA, 100 bp, Homo sapiens
gtggtagattttctttcccggaacaaacaactttatcagaagacggaaattctgtcactggagaagaactcccccactggaaaggattctgaaagaaatg

SEQ ID NO: 807920 - DNA, 100 bp, Homo sapiens
gtctcatttctatgcacagtgtttctcaggaggatggagctagttagctgtctgttgtctgtagcccagctaaaccaggtggacaggtgaaatgtcagta

SEQ ID NO: 807921 - DNA, 98 bp, Homo sapiens
aagaaaagtccatgtgctggcagcacttccctgagccactctccaggctgctccagtactcaagggaacgggggatcccaacaagccctcaggattca

SEQ ID NO: 807922 - DNA, 100 bp, Homo sapiens
ctgaactgcagcgagatcccgaaggtggacctgcgagtgtggcaagactgctgtgcagattaacgtgacagtgtcaggtggacccacagccatcccacct

SEQ ID NO: 807923 - DNA, 100 bp, Homo sapiens
aacttcaatttttctgcagtggctctgggtccagccccttacttaaagctgtggatcggtccgtttcatcaagtctgtcagatgcaagagatgccttagt

SEQ ID NO: 807924 - DNA, 100 bp, Homo sapiens
gagaacttgttggagtgctggtgaatcatttcaagaggagaacatttcaggataggaataggccaagtgctgagaagatgagtcttaggattgatgtgga

SEQ ID NO: 807925 - DNA, 100 bp, Homo sapiens
tccaggaattgtgatcaacaggcccaatggcacagatgtctatcagggagtcccgaaggactacactggagagtagtattattgattccacagaatacag

SEQ ID NO: 807926 - DNA, 100 bp, Homo sapiens
acctgctgcgatttttcttcacagccagtttctgtactgccaaatctgtcgaaagggagataatgaagaactgcttcttctttgtgatggctgtgacaaa

SEQ ID NO: 807927 - DNA, 100 bp, Homo sapiens
agatacctttagcctgatgatggcaaaatctgaacacaacccatctacaagtggctgcaggtctttaagtggagtggagaaaattcatactttatcaatg

SEQ ID NO: 807928 - DNA, 98 bp, Homo sapiens
tcctcttcggcggcggcagcgtccaccatcttcctcttgctgccagtggtagcgctcgtctggcggagctgggtagacatagctgacattgagaatga

SEQ ID NO: 807929 - DNA, 100 bp, Homo sapiens
ggagtgcgggcgcgccccaccaccgccctcaccatgacatacaacagctgtgccagactctgcttaaaccaagaaacagtatgtttagcaagcactgcta

SEQ ID NO: 807930 - DNA, 98 bp, Homo sapiens
gtcttcggtcggtttttcatcctttgatcccgcggtcccttcctgtaccttgtcctcaggccttgtgaaaaagggtaaagaacaaaacacacagcgaa

SEQ ID NO: 807931 - DNA, 98 bp, Homo sapiens
tgcattgagtttttaccatatggctggagcatctcttgataaaggtcccaaaccagttgtcttcctgcaacatggcttgctggcagattctagtaact

SEQ ID NO: 807932 - DNA, 100 bp, Homo sapiens
agtacgtttctccagagctgctcacggagaagtccgcctgtaagagttacagaatgtctgaaggggacagtgtgggagaatccgtccatgggaaaccttc

SEQ ID NO: 807933 - DNA, 99 bp, Homo sapiens
cctccaccgtttcctccaggacagcacctagtcgtggccggaggagtctcagagctgtcagaaagttagcagacttgaagaaagagaagcagaactgaa

SEQ ID NO: 807934 - DNA, 100 bp, Homo sapiens
acatggctacagactacagatgcctggctaatttgtatggacctgtctgccaatcaggacgaggagaccgaccaggagaccttccagctggagatcgacc

SEQ ID NO: 807935 - DNA, 100 bp, Homo sapiens
cgctgcccgccggctccctcccccgcgtccctgcgaccgccgcggcgaagatgaactctaagaaggagctgatgtggaggagcagctgagacagttcaag

SEQ ID NO: 807936 - DNA, 98 bp, Homo sapiens
agcattaatgggccgctgacatgaatatggagtagttttctctagcaaaggtcagacacattctatgtgaaaaacatggcaaaatcatggaagccatg

SEQ ID NO: 807937 - DNA, 100 bp, Homo sapiens
catggggaagcgatacatagccagaattaaacaaccaccatgtcgagcaaaaaggcaaagaccaagaccaccaagaagcgccctcagcgtgcaacatcca

SEQ ID NO: 807938 - DNA, 100 bp, Homo sapiens
ccgtctccacctcctcgcgtccgtaatcagtgacgaggtccgctacgtaaatccctttgcggcggcaatgcagagtcctcagagaagagattcagaatga

SEQ ID NO: 807939 - DNA, 98 bp, Homo sapiens
tggagatgggaccacatcagtaattattcttgctcctacagaagaagggaaaaaagagctgctgttcctaagtaacgcgaacccctcgctgctggagc

SEQ ID NO: 807940 - DNA, 99 bp, Homo sapiens
cggctttcctggtcagcagcgacttgggtgtcctgatgtcagaagaagaagtgtttgaacttgttcctgatgatgagcggcagtgttcagcatgcagaa

SEQ ID NO: 807941 - DNA, 98 bp, Homo sapiens
ggctgggtcaggagcggctgcccgaggtccagaggaagtgtgtggacagcgcggccttcctggccggattggatgaaaggtctgcaggcattttgcaa

SEQ ID NO: 807942 - DNA, 100 bp, Homo sapiens
tctaaaaatgtatgaacaccttttccctgagcttgttgatgattttcagattacttctctaacaggatcaccagtttgctccacaaagcacaatgtctcg

SEQ ID NO: 807943 - DNA, 100 bp, Homo sapiens
aggtgtattcagagattttttagtctaaatgatgggcagtcatggtcccagaaacgtcactatcaagaagtgatatggagaatgcagaaaacattctcac

SEQ ID NO: 807944 - DNA, 99 bp, Homo sapiens
tcgggagtacacagacatcatccgatgtgactacccctgaatctacaaagaatcttgtggagtcatctatggtgaatggaggtttgacatcacaaacaa

SEQ ID NO: 807945 - DNA, 98 bp, Homo sapiens
cctcttctgcaggtactggaaacccacaggcacacccaagttctccaagccagcacccatgttcctggatgactcctttcgcaagtgggctagaatcc

SEQ ID NO: 807946 - DNA, 100 bp, Homo sapiens
tggttgaagaaacattgtccgaatcagtatcagatctacagtgagtcattcaaacagcatgacataactgctgttcgggggtcttgtctggattttggtt

SEQ ID NO: 807947 - DNA, 98 bp, Homo sapiens
cctacgtacaaattccctgaacttcctgaaatccagcaaacttccgaagcactattcctgatcagagaactccagttgcttcaacacacagtatcagt

SEQ ID NO: 807948 - DNA, 99 bp, Homo sapiens
gagagggcaccaccaaaagtgaggtcttctacccaggctgtgctcctggcggacatcctccccacactcgtcatcaaattgttggctcctcttggcctt

SEQ ID NO: 807949 - DNA, 100 bp, Homo sapiens
aaacaatggcatttacagaaagagtcaacagcagtggcaacaggttcttatgagtgcatcaatactgggggccctgtgtctcttctcatctgtctgtgtt

SEQ ID NO: 807950 - DNA, 100 bp, Homo sapiens
tgcaggaaatgtgaatctcaggagagagcagccagagtggataagttctgaacgtcgaaaagaaaagtctcgagatgcagccagatctcggcgaagtaaa

SEQ ID NO: 807951 - DNA, 100 bp, Homo sapiens
cagctcaccctgaacgggatttatacacacatcactaaaaattatccctactacaggactgcggacaagggctggcagcttcaccagcctccaccaagac

SEQ ID NO: 807952 - DNA, 100 bp, Homo sapiens
tgaaggggctctttttgaacattcagtggagacaccccttgtcagagccgacccgtttcaagaccttagccaaaggatccagttggggatctcctgttca

SEQ ID NO: 807953 - DNA, 99 bp, Homo sapiens
ctgaagcctcctcgccgccgtttctgagaaggggaagacggaatctatcactgtggtgaagctgctgagctgctttgatgacctggtggcagcaggcac

SEQ ID NO: 807954 - DNA, 100 bp, Homo sapiens
acggaggtggagcgctgtctggcgcgcaggagcggagacctggacgccctggacaagcagcaaagcggaggcctcagcaacctgctcttccgctgctcgc

SEQ ID NO: 807955 - DNA, 100 bp, Homo sapiens
cggggacccaggagtttcctgtgtccagcgctgccggagccgcctgagcatgcttttcacttccactgcatctctcgctggctcaaaacacgacaggtgt

SEQ ID NO: 807956 - DNA, 100 bp, Homo sapiens
acaaaaccgacagaaagcattttgattaacaaatgtggcaattattttggatctatcacctgtcatcataactggcttctgcttgtcatccacacaacac

SEQ ID NO: 807957 - DNA, 100 bp, Homo sapiens
ttaaagccatgcccgaggatgctaaggggcagtatgaagtgaaggctcctgttccttctgcctgtttcaggaatatttgtaagcaaatgacaaaaatgca

SEQ ID NO: 807958 - DNA, 99 bp, Homo sapiens
aagaaaaaggtccctggagctgcagacgcggttcagccaggcccaccaccatgtccggtattctacccagaaaaacaagaaatcacccttccacctgat

SEQ ID NO: 807959 - DNA, 100 bp, Homo sapiens
ttatctctgtgcttcgtgaagctaatcaagcaattaatcccaagttgcttcagttggtcgaagacagaggttcaggttcaaaccttgtactactcagctg

SEQ ID NO: 807960 - DNA, 100 bp, Homo sapiens
acctctccccatcatgatggatgggagcctggcctttgagagagctgtagtacacatggatgaacgacgagaagaacaaattgtacagttactgaattct

SEQ ID NO: 807961 - DNA, 99 bp, Homo sapiens
ctggtacttgttccattggaggcttcagcggctagtttctgctctggtgtcccttggaattttacatttaatgtaaagttttatccacctgacccagca

SEQ ID NO: 807962 - DNA, 100 bp, Homo sapiens
gtctgagtcggagctcggcaggaagtgggaccggtgtctggcggatgcggtcgtgaagataggtagatgacattaatgctgataagaatatctcttctgc

SEQ ID NO: 807963 - DNA, 99 bp, Homo sapiens
ggagaggatccggcgccgaatcactgactggcacaggtgttgggctggacacctgttctgctgttgtgtcctgccattctcctgaagaacagaggcaca

SEQ ID NO: 807964 - DNA, 99 bp, Homo sapiens
tcagaggcttcctaacgcagactcgagtgcgaagcgcgcagtcgccggccagttattataataccattggtagaaatcgtctatggatctttactggaa

SEQ ID NO: 807965 - DNA, 100 bp, Homo sapiens
aataaaactaacagtctatgatgtcaaggataagtctcatgacaccgaacatcatcttcagcgggctatttcagcacagcaggtgtatggcgagaagagg

SEQ ID NO: 807966 - DNA, 98 bp, Homo sapiens
aagcagtggcgaagggaatcgcaaggctcttccctgaccattttctactgtccctgcgcgaggatgtaatccctgttcattactacttaatacctcca

SEQ ID NO: 807967 - DNA, 99 bp, Homo sapiens
tgctgggctccggggacactttgcgttcgggctgggagcgtgctttccacgacggtgacacgcttccctggattgggtccctgtccttcgaatggtgga

SEQ ID NO: 807968 - DNA, 98 bp, Homo sapiens
gcgagcgccgcgaacttggtggccagcgccgcgcccggggccgtgcgctctcgggccactcggccgcagttccagttcagacatcataagagatcttt

SEQ ID NO: 807969 - DNA, 100 bp, Homo sapiens
aagctggatgagctgaggagagtgagcgtcccctatccaagtagcctgctgtcgcccagccgcgctttccagagtgttgaatcttccaccagaaaacttg

SEQ ID NO: 807970 - DNA, 74 bp, Homo sapiens
aagtaggggtgcacctcagcactatcccaagactgctggcaacaggttttggcacaaataccagtgggaatagt

SEQ ID NO: 807971 - DNA, 99 bp, Homo sapiens
aaaaggaagaagtttaagcggcctccacagaggctgtttgatgctgagaagatcagactcaggatgtgcagaaggcgatggacgagaggagatttcaag

SEQ ID NO: 807972 - DNA, 99 bp, Homo sapiens
ttttgaggacacttgtggagagctcgaattccagaatgatgaaattgtgactcgggtcaagctggaaagcctggaagacgcctacattctgcggggaga

SEQ ID NO: 807973 - DNA, 124 bp, Homo sapiens
cgattccacacttgattctcttatacgctacttttactcagagtttgaaggttgtgaccaaaagaggctccgttgaaagaattcagaatcagtgggatgaagtacaagaacaccttcagaaccg

SEQ ID NO: 807974 - DNA, 100 bp, Homo sapiens
cagcttcgggacaagtacatgtttgctacaaaggtggtgttctttccaaatggcaatgcatttgccactggctcagacgacgccacctgcaggctgtttg

SEQ ID NO: 807975 - DNA, 98 bp, Homo sapiens
agcacctggctgatcctgcaccacaaggtgtacgatttgaccaaatttctggaagagctaaaagatggcggcaaggcagcccaggcaaatgtaagaat

SEQ ID NO: 807976 - DNA, 98 bp, Homo sapiens
agaggaaaatgcaagaagactgatggagcaggcttgcaatattaaaatcagtgaaaagcatgatgtggtgttcttgataaccaagtatggttatatcc

SEQ ID NO: 807977 - DNA, 100 bp, Homo sapiens
gcggcggcgaacatgcgcttttgacacattggaggggcccagatcattgatctgatgatgctggtcatcgatgtgaccaaggggatgcagacccagtcag

SEQ ID NO: 807978 - DNA, 100 bp, Homo sapiens
gggagagagaatgagccagagggacacgctggtgcatctgtttgccggagggttcatatccagctttcagagtggcaccgtgcaatttttcttccacagg

SEQ ID NO: 807979 - DNA, 99 bp, Homo sapiens
tgatgaagaaagtgttagaaacagtagtggagaatcaagggtgtgtttgaccatcgaatgaagtgctggcagaaatgggaagatgctcaaattactttg

SEQ ID NO: 807980 - DNA, 98 bp, Homo sapiens
tgtgagcttggccttggagcgaggctatcacaagctgcaccagcttctaaccgaatatattcgactttatgggagaaaatttagcaaagaagatcatg

SEQ ID NO: 807981 - DNA, 51 bp, Homo sapiens
aggatgagagcgacgaagccaactgtccagaggcagaggaggtggacacgg

SEQ ID NO: 807982 - DNA, 100 bp, Homo sapiens
ttaccagaagagatggctctgttccacttccagcagaagttcttgctggaggctgtcaggaggatgcattagcacaacaggcctttgaagaggctcggag

SEQ ID NO: 807983 - DNA, 100 bp, Homo sapiens
tgaagtctagcagaggacgcggccaggcgattcggtgaagcgattcctgcaggcgttggttcccctctttgacctgatgcatttttgtagaagcattttg

SEQ ID NO: 807984 - DNA, 99 bp, Homo sapiens
catgattgaccagaaccgtgatggcttcattgacaaggaggacctgcacgacatgctggcctcgctgggaaagaccacagcaagattctttcattcgtc

SEQ ID NO: 807985 - DNA, 98 bp, Homo sapiens
tgacttaaagaaacagcttcatgaactccaagccaaaatcacagctttgagtgagaaacagaaaatggacccaagtggggtcaaagtgctggaaacag

SEQ ID NO: 807986 - DNA, 100 bp, Homo sapiens
cacaaagcaaaatgaaatccagtgaagaaatgatcaaaagtgagctggcaacctttgacctttctgttcaagaatttgaaagacatattggctgacctga

SEQ ID NO: 807987 - DNA, 100 bp, Homo sapiens
cgggacgcgcacagtccctccacgcggaaagaagtaccttcgccggtcaccggctcctgcagggataatcgagttcacattggaccaaaaatggaaattc

SEQ ID NO: 807988 - DNA, 98 bp, Homo sapiens
gttgacagtgggcctgcagccaaggaaggaggcctgcaaattcatgacaggattattgagcctcctaaaaagcctctggactatgttcaagatcattc

SEQ ID NO: 807989 - DNA, 100 bp, Homo sapiens
ccatcttgaaggacgacccgacggtgatcactcagagctgacctgtcctggacgcagcataactaacgaagctgctgcaggatgagaagatggcagcgcg

SEQ ID NO: 807990 - DNA, 100 bp, Homo sapiens
gtggaggaaacctgcatctttacccagcaatccagttgacggactggacaaagcttctatagcaaactcagatggccccacagcaggttcccaaacacct

SEQ ID NO: 807991 - DNA, 100 bp, Homo sapiens
cgccgccggcgcggaaggacgaggctgaggcgagaaacgaggacaactacacctttgcccaacctgggattcaaatgaaagtgaaaatgttagaagaact

SEQ ID NO: 807992 - DNA, 125 bp, Homo sapiens
ctgggagccacggtgccaggaccatctacaagagccaaatcaagattgcgtttctcaaagtcctacaggagccctggtattccttgaacatgcatacctttcccagcgtgagggacatggaccgt

SEQ ID NO: 807993 - DNA, 99 bp, Homo sapiens
aagactcaaagtaaacccttttccatccaggaactggaactccgttctctggcccccaaatacatcaagatgtttgtactggatgaagctgacgaaatg

SEQ ID NO: 807994 - DNA, 98 bp, Homo sapiens
aatcacacgcataatggatgaaaggaaccgacagggagttctgggaaatcgttcattcatttacagatgaacagaaaagactcttcttgcagtttaca

SEQ ID NO: 807995 - DNA, 98 bp, Homo sapiens
agcaaaacaggcagaaatggaagtcaagagggaatcttatgcaagagaaagaagggaaatattgccagagaagctgcatccgaggaagctttaacagc

SEQ ID NO: 807996 - DNA, 100 bp, Homo sapiens
gccccagatcgcgcgcctggacaacgggtctcttgcaacgtgtgagctgcctcttgccaagagtgagtggcaaaagaaactaaccccggagcagttctac

SEQ ID NO: 807997 - DNA, 100 bp, Homo sapiens
tgcaggatttacgcgcacgttggaaccgaagagagctctgttgttgcagtggaagtttagctgatgctataagtgaaaactacagaatcatgagttactt

SEQ ID NO: 807998 - DNA, 100 bp, Homo sapiens
cagcgcgccgctgctatcgcgcgccagaaggccgagattgccgcctccaggtagtgaaaatggacacatccattcaacctctttgcaacacataaaaact

SEQ ID NO: 807999 - DNA, 100 bp, Homo sapiens
gcttccagagagccctagaactggatcataaaaatgctcaggcacaacaagaggcccttgcttgtgattggtggttcctctgaaagaaaccaagaaacaa

SEQ ID NO: 808000 - DNA, 99 bp, Homo sapiens
agggcgggcggcagggcgcggcctctccgccgggtgtaccacctgtcgcggcgcgagacctctggtgtcccatttcccaaaaactttatgtctgtggca

SEQ ID NO: 808001 - DNA, 98 bp, Homo sapiens
taattccttttcgaccttcaatccagttccaaggactccacgggagcttctttgaagggcagtctgcaccatgggactcggctaagaaagatgagaac

SEQ ID NO: 808002 - DNA, 100 bp, Homo sapiens
agaggctttatatcctaaacttttcaagcctgaaggaaaggcagaactgcctgattacaggagctttaacagcaaacggggattcagcgtccgatccttt

SEQ ID NO: 808003 - DNA, 98 bp, Homo sapiens
tcatgaagaaactcaatgatcgtgtcatgagagagccggtgaaacctgaagaaggcagagatatggcaaacaggattggcgcttttgggtacatggag

SEQ ID NO: 808004 - DNA, 98 bp, Homo sapiens
acacccaggaatccaagggaacctgaacagctactattcccagcagggctacaccaagtccattgatatttggtctgtaggctgcattctggcagaaa

SEQ ID NO: 808005 - DNA, 100 bp, Homo sapiens
ctgggaccggaggagacatcggcctctgcaggcttgccgaagaagggagatgagctccccacacaagaactctgtgccatcatccctaaatgagtatgag

SEQ ID NO: 808006 - DNA, 100 bp, Homo sapiens
gaattccttgtagataagcaactggattttttaactgaagatagtgcctttcagccctaccagggaaaggtggcccagacagcgtgtatgtcagcttgca

SEQ ID NO: 808007 - DNA, 100 bp, Homo sapiens
aaccagtggaaaaaggaaaaagagaaaagaaatgaaccagtattcttaaattgatttcaagtttgaacaaggacagctgggaagtggtggaaggactgag

SEQ ID NO: 808008 - DNA, 100 bp, Homo sapiens
acctgttccatgtgcctgtgaaccagattttcatgatggctttttacttgaagtacacagagaaagcttggcggagcgtgctttggacaccatgaatttt

SEQ ID NO: 808009 - DNA, 100 bp, Homo sapiens
tggagaccagaatgatgatactctggatgcaaagtattgttcctgggtgtgtctgtgagagtattgccaaaggagagcagtgaactgggaaaagcagacc

SEQ ID NO: 808010 - DNA, 99 bp, Homo sapiens
agatccatttattgataactcagaggctgttcagccaggcccaccaccatgtccggtattctacccagaaaaacaagaaatcacccttccacctgatgg

SEQ ID NO: 808011 - DNA, 98 bp, Homo sapiens
caaatgagtctatttgcttctcccacaagttctgaagagcaaaagcacagaaatggactatcaaatggtcgtagatgtatccaaaggaattgttaatg

SEQ ID NO: 808012 - DNA, 100 bp, Homo sapiens
gcacctactcctgttcctaaaaaagtggaggcaccaccagctaaaggaagccctcctatgacactgaaacagatcctagtgagggattgatgaatgttct

SEQ ID NO: 808013 - DNA, 98 bp, Homo sapiens
aacgacgccgagctctggggcgtcttgcagccctatgagcatctcatctgcggcaagaacgccaatgagtgcctggtgaagaatgtgatgggatcact

SEQ ID NO: 808014 - DNA, 100 bp, Homo sapiens
aggaattagaaaaatcatctgatacattaacaaggttttatggcaattggatatattccgacgaagcttgcgggttttgactggacatgtttgtcaggga

SEQ ID NO: 808015 - DNA, 99 bp, Homo sapiens
atagaagatccttatagcccaaggatacagagctgaaggtgatgtggccgccctcaaccgacgcatccagctcgttgaggaggagttggacagggctca

SEQ ID NO: 808016 - DNA, 98 bp, Homo sapiens
tcaccttctccagctccttcattccccagcagaagctgaccttggacctgacggtgctcctgggtgtgctgcaggggcaacagcagagcctacagcag

SEQ ID NO: 808017 - DNA, 99 bp, Homo sapiens
gccaggatgctatagcattgtcagtatgatgtgatgccagccacttactgtgaaattgatttagataaagaaaagagagatgcatttgtatatgccata

SEQ ID NO: 808018 - DNA, 100 bp, Homo sapiens
gaagacatgacacttacaagatggacagggatgataattgggcctccaagaaacattgagctgaaggttgaagtggagagcttgaaacgagaactccagg

SEQ ID NO: 808019 - DNA, 100 bp, Homo sapiens
ctcaaaacgcccgtgcggaccacggcctgtcagcacgttccaagtggtaagaagttcagaagcaagcctcagttggcaaggtacctgggaaatactgttg

SEQ ID NO: 808020 - DNA, 100 bp, Homo sapiens
agaatccgccatgggctactcagtttacagccactgcagtatcacagccaggacgacatagacagcctaaacccagttctcagggacaacccgcagcttc

SEQ ID NO: 808021 - DNA, 75 bp, Homo sapiens
atctcagcctcctcagtagctgagactacaggtttctgacaaagcgggagcaaaaattaatgcaacggcgacaac

SEQ ID NO: 808022 - DNA, 120 bp, Homo sapiens
gcgctattcataacttttatgacaatattggatttgtaggtcctgtgccaccaaaacccaaagtttgggaatacctgctactgcaattcagttcttcaagcactttatttttgtcgtcca

SEQ ID NO: 808023 - DNA, 100 bp, Homo sapiens
ccggacttttgctaactgcggcgggcgagacgttctcagattgtcatggattttaagcacccagatggcattgcagtgccagttatgttgcctcgtcgga

SEQ ID NO: 808024 - DNA, 98 bp, Homo sapiens
tttgctgactgcaatccgttcgggagaggctgctgccaaattgaaaaggaccatggcaaaagttataaccaccgtactgaagttccctgatgatcaga

SEQ ID NO: 808025 - DNA, 100 bp, Homo sapiens
accaaggaactggtgctgcagcgagagattaacaaaagcagtggcattgtggaggcatcacggatcatgaatttataccagtttattcaactttataaag

SEQ ID NO: 808026 - DNA, 98 bp, Homo sapiens
ttgcacagtcggctgggcggtgcaatggcggaacaagacaacctggcagatgctgaggagcgctgtgatcagctgatcaaaaacaagattcagctgga

SEQ ID NO: 808027 - DNA, 100 bp, Homo sapiens
ccgatgggggcgagggcgaagacgagatccagttcctgcgaactgttaatccctatatcctgaagaagaacatgatcctcatgacaaatcatttctatgc

SEQ ID NO: 808028 - DNA, 99 bp, Homo sapiens
atcagggcagcctcctgctggcgggtcacaccccggagtgttggtcaagagcggaggaaacccagcgtttgctggcagaaccagttcctggcatcaaag

SEQ ID NO: 808029 - DNA, 98 bp, Homo sapiens
tgaagacataccgctggcagtgcatcgagtgcaaatgttgcaatatctgcggcacctccgagaatgacggcatccgaggaggctttcgtgaaggaatc

SEQ ID NO: 808030 - DNA, 100 bp, Homo sapiens
tgtaactgaaagatacatggcttgcaaaaagtaaaccacgatcgttatgctgagaacagcatatgccatatatgagctggctgtggcttcatttcccaag

SEQ ID NO: 808031 - DNA, 142 bp, Homo sapiens
ggctatattatttgcacccagtcctgcagcgccagcagctggactatggcatctatgttatcaaccaggacgagattgaggagctgcgggccgagatgctggagatgcgggacgtctatatggaggaggacgtgtatcagct

SEQ ID NO: 808032 - DNA, 104 bp, Homo sapiens
ggctctgaacacagcatcaatggcaggaggtttcctgttgaggtgctggagaatctggtaaaagcaccattgtgaagcagatgaggatcctgcatgttaatggg

SEQ ID NO: 808033 - DNA, 98 bp, Homo sapiens
gattttctgcagaagatgaagctttgagtaacattgccagagagccaacaaatggaattttcttgagcatgtttctaatcgttttgccattggaatcc

SEQ ID NO: 808034 - DNA, 100 bp, Homo sapiens
acaagcttacgtctctgctcttcagtacaatcctgtcaattcagtgaagatatgatacccacagtgggcttcaacatgaggaaggtaactaaaggtaacg

SEQ ID NO: 808035 - DNA, 99 bp, Homo sapiens
tgaggacaacgacagctgcggcatctccctgtacaaggagatctataaggacaggcagaaattctcagaacaggttttcaaagtggcctcctcagacct

SEQ ID NO: 808036 - DNA, 100 bp, Homo sapiens
ataggcggccatggtccaaccttgaagtgtaaggagaggatgaggcccgtgaaaaaggcactgaaacagctcgacaaacctgacaaggggctcaacgtgc

SEQ ID NO: 808037 - DNA, 100 bp, Homo sapiens
tgcatttcagggaggaacgtctttccctccaggaaaacgactccagagaagaggaggtatcttgcagtgggcctctgtcccaaaaacaagcagaattttt

SEQ ID NO: 808038 - DNA, 100 bp, Homo sapiens
ggccttagcgatctatattccctttccagaagatgattccaacgccaccaattccaacctggtctctgctggtggttctgaagccaaacctctgatcttc

SEQ ID NO: 808039 - DNA, 104 bp, Homo sapiens
ccaaaggcagggcaaggaaactggccacaatattccactgaactgaagaaactctactgccaaattgcaaagacatgccccatccagatcaaggtgatgacccc

SEQ ID NO: 808040 - DNA, 100 bp, Homo sapiens
cgggtagaggctgaggaaggccgtgttgtttgtctacctgggactaaatgttgctgaggcacagtgcatcgccaaccaagttcagctcttctacgctact

SEQ ID NO: 808041 - DNA, 100 bp, Homo sapiens
gctgcaagaactgctttgctgtcggaaagatgttttaatgattcttccatatgtggcaattgtccaagaaaaggcatcccgcctgatgagagcccccgcc

SEQ ID NO: 808042 - DNA, 100 bp, Homo sapiens
ctgctttccctggaactgtgtcattcaggactctgcaaattccctaaagtaggaggaaaaatgaccatgtccaagacagctacggcgtggacaagaagcg

SEQ ID NO: 808043 - DNA, 100 bp, Homo sapiens
catactttgccttttaaaagaaatgccacccacattcagagacacaagtgcagcagtttggtgtggaaacaggaagagaactagaactggaagtaaagca

SEQ ID NO: 808044 - DNA, 99 bp, Homo sapiens
ttcccaggtcctcaactttgaagagatcgactacaaggagatcgaggtggaagaggtatgctatacctccggagcatggaaaacgacttgaaagactag

SEQ ID NO: 808045 - DNA, 100 bp, Homo sapiens
cagagactgctgaaaagctggcccgtgacctgaaggctgtcaagtatgtggagtgttctgcacttacacaggaactttatattgctgttggaatatctgg

SEQ ID NO: 808046 - DNA, 98 bp, Homo sapiens
gaaatctggaaccgggatggcgacgtctacactgagtcggaggcgaagatcttcagtgtctattggatttttccaagagaaagtttgtaaaattcctt

SEQ ID NO: 808047 - DNA, 100 bp, Homo sapiens
gaagaagcttgggctcacttccacaaatattcccgacagttaagcaatggggagacatttggctttgctcctgcttctgctccttctcttccaacatttt

SEQ ID NO: 808048 - DNA, 98 bp, Homo sapiens
acagatctcagagaaattggccatggaagctttggagcagtgtattttatttgtttagtgaatgaccctaggccccagcacaagtacaacaaacttta

SEQ ID NO: 808049 - DNA, 100 bp, Homo sapiens
tcctgcacgccggcgagtgccagcggtcaccatcagaaaagctaagtttgctgtatagtgaggatcaggagatctgatcctgattgcagaaccttccctg

SEQ ID NO: 808050 - DNA, 129 bp, Homo sapiens
tgaagccaacagagtcctggcgggagactcttctggacagcagagttatggagcttttcttcacaatgagctttgatccaaaccttctccacaacaatggacataatgggtaccctaatggtacttcag

SEQ ID NO: 808051 - DNA, 98 bp, Homo sapiens
gagccgccccccgagcccgccttctccgaggcgcagaagtggattgagtgatgatggccaaagagaagccaccgataactgtagttggagatgttgga

SEQ ID NO: 808052 - DNA, 100 bp, Homo sapiens
gcaaaaggtcacaaattacattacccaatggtggaatattgtatacctgaggagcatattatttaatatctagaagtctagggccagaatttggtggtgc

SEQ ID NO: 808053 - DNA, 98 bp, Homo sapiens
tgacttcctgctcaagccagagttgctccgggccattgtcgactgtggctttgagcatccgtcagaaggtagagatcttttcctagcaagctgttcac

SEQ ID NO: 808054 - DNA, 100 bp, Homo sapiens
agtcagtgtttctcttcattgacagacagcacttgcaggtgccttggaacactatgttaattgcctggatctggtaaacaagaggctaccttatggcctt

SEQ ID NO: 808055 - DNA, 99 bp, Homo sapiens
ttgttttgagatcctctctaagatgaacgactttcgaagtaaaatgcaatcaatatttccaacaattcccaagaactccgaatcggctgttgagtggga

SEQ ID NO: 808056 - DNA, 100 bp, Homo sapiens
aatttcctgttctggaatcgagagaagactcctcaacaagttgctgcaatgtctgtgtctaatctatcatgctgtttggggctcagctaagtgaccacac

SEQ ID NO: 808057 - DNA, 135 bp, Homo sapiens
gagaaggaggaggctgaataccgcaaagtctttgagaatttcctgcacaactccatcttcgtgcccaggttaatttggagtggcccctggagtcagtttcctacaccatccgaggccccacccagcacgagctac

SEQ ID NO: 808058 - DNA, 99 bp, Homo sapiens
accgggatcgtgaccgagaccgtgaccgagagcgtgaccgagagcgcgaatatcgtcatcgttagaaggtcatgcctcagctcctaaactacctgaagg

SEQ ID NO: 808059 - DNA, 100 bp, Homo sapiens
ttgtgctgctgctgctgctgctgctgcatgtctaccaggagaggagggaactgcggagcgggtgactattatatggttaaaaagattttggaggaaaaca

SEQ ID NO: 808060 - DNA, 100 bp, Homo sapiens
gattgcccttattgctatgggggaggagattggtgcagagatggcattacgaacctttggccacttggctatgtccaaactgggtcttcggcaggttaca

SEQ ID NO: 808061 - DNA, 125 bp, Homo sapiens
cggccggtgccagcacctttcggcttctgagacggcggcagcagcggcattcagcacaaaagctgtgagccgctttcactctccttttattgtagaaaattacagacatctgaatcagctccggg

SEQ ID NO: 808062 - DNA, 98 bp, Homo sapiens
gcgattgaggaagagcgagccagcgcccggagcaagcggagctcccccaagagccggaaaggtgtgcaactgaggaacatggctcaagaaactaatca

SEQ ID NO: 808063 - DNA, 98 bp, Homo sapiens
cgtggctcaagcaggacaatcgcactttataccacctgcgattactagatttaccgcattgtttctcagaagcaaatgtcagacagacgcgaaaatga

SEQ ID NO: 808064 - DNA, 100 bp, Homo sapiens
aagaaaggctttgtctagacaagaaatgcaggaagttcagagttctaggagtggaagaggagctacacagtctcaccagtggtattcttggggcccacct

SEQ ID NO: 808065 - DNA, 99 bp, Homo sapiens
tataatgaggatgatgcaaaggcagcaagagatgcacaggagatcttcagtttagatcttggaggcatatcaactgtggttctaaatggctatgatgta

SEQ ID NO: 808066 - DNA, 100 bp, Homo sapiens
cctgccaaatacatcagcttgtaggagacagaggatggcatagtcaatccaacaataagaaaagatttgaaaactggaccgaaattctactgctgtccaa

SEQ ID NO: 808067 - DNA, 99 bp, Homo sapiens
cccaaagccaagctcaagccgggggctcctctcaaacccaaactcaacccgaagaaagccagggcctatggcagagatctgactgcagccatgagcagc

SEQ ID NO: 808068 - DNA, 100 bp, Homo sapiens
agcgtgaccgagagcgcgaatatcgtcatcgttagaaggttaggaaattgaaatacagaaagatgaaaagtgatttgcccaagcatatagatcaaagctg

SEQ ID NO: 808069 - DNA, 98 bp, Homo sapiens
gagaattgatctatgttggatcaggaaatattgccagagaagctgcatccgaggaagctttaacagcagtccaaagtggaaatgttagtgaaccggag

SEQ ID NO: 808070 - DNA, 99 bp, Homo sapiens
cagccagtccgtcgatccagctgccagcgcagccgccagcgccggcgggagatacagatgacccaccaagaattactcagaaccctgtgatcaatggga

SEQ ID NO: 808071 - DNA, 100 bp, Homo sapiens
ttaccagtgaagacgtggccgaaatgcacaacatcctgaagaaataccaccaggcacctgaatggacagaagaggacctcagccaactgacaagaagtat

SEQ ID NO: 808072 - DNA, 100 bp, Homo sapiens
ggcctgggcccaggactggacctccgctggcacccctgagtgcctccctgccagcacatggattaattgatgtatgttgagtttatggagctgccttttg

SEQ ID NO: 808073 - DNA, 100 bp, Homo sapiens
aagaacttggatcccattcacctgaggcacccgaagaagagaccatccatatttccaggccctgaaagccattatcgccatggatacagcaggaatgatc

SEQ ID NO: 808074 - DNA, 50 bp, Homo sapiens
ggaactgagacgtttcgaattccagatctcacattcttgaaggtggcatt

SEQ ID NO: 808075 - DNA, 101 bp, Homo sapiens
gggcgtcagctcgcccgcgagttcgcggagcgcggcgccagaaagctacagcctccgcttggcgtcccgatgctctccaccagcggccccgtacatcacca

SEQ ID NO: 808076 - DNA, 100 bp, Homo sapiens
gaccggcggttgtctgtggccggaggctgatcaggctgaccggttccctgatgtgttacctgcttctgctactgatccaaactgcagaacttctcattca

SEQ ID NO: 808077 - DNA, 100 bp, Homo sapiens
tctgtcccatgacaaggaccagctgactaaggagctgcagcagcatgtaaagtcagtgacagccccatatcccaaaatccaggagtgagggatctattca

SEQ ID NO: 808078 - DNA, 100 bp, Homo sapiens
tcgccagcagccgtccggagccagccaacgagcgctaccagagattcactgactgctataagtgcttctaccagttgcagcctgcgatgacacagcaaat

SEQ ID NO: 808079 - DNA, 98 bp, Homo sapiens
gcagcccttacaagttgcaaagggttgccacaccatttggaggttttgaaaaagcatcaagaatggttaaatttaaagttccagattttgagctacta

SEQ ID NO: 808080 - DNA, 98 bp, Homo sapiens
tcaatttgaaatgcagtccaggaaaagaggagatgttaaagtaacccatcttgcaggacgacattgaagattggtcttctgttgatctaagatgatta

SEQ ID NO: 808081 - DNA, 98 bp, Homo sapiens
gggctgttgagtggtcgcggacctgggctctgtgcgttgggaaagggaagtggaggactcacaccacccggcaagaactgctcactacggctccctgc

SEQ ID NO: 808082 - DNA, 100 bp, Homo sapiens
gcagctgcccttagccctctggtttcccatatggaagaccagccacactgtcaagtgggaaggcgtatggcgagaactgggctgcctctcaaggacggcg

SEQ ID NO: 808083 - DNA, 98 bp, Homo sapiens
aagaggcagcgaatcgtgatcttcacccaagggagagatgacactataatggctacagattttaccaaatgttgcaagaactctggagttcttatggt

SEQ ID NO: 808084 - DNA, 98 bp, Homo sapiens
acttgaagcatgtctttcagagcccggcaccacccatcttgagtatctgttataaagatgcttcagactgcaaagaatttgttgaaagaggagaaatt

SEQ ID NO: 808085 - DNA, 98 bp, Homo sapiens
tcagtataaccaagtaccaagtgaagactttgaacgcactcctcagagtccgactctcccacctgctaagatgtattcgtgtcaataaatttcagaga

SEQ ID NO: 808086 - DNA, 100 bp, Homo sapiens
tgagtacacgcagccaatgatagaccacctggttaccatgaagatcagccactgggatggatggcccactgcgtgaccttggttcagctgtccatttcct

SEQ ID NO: 808087 - DNA, 98 bp, Homo sapiens
aaaaatcccatctaccgcaactctcagttcgagagtaaagaataacctgggtatcttgtggtctgaaagagaagaaattgaaactgcacaggcttacc

SEQ ID NO: 808088 - DNA, 100 bp, Homo sapiens
ctgtgtgtaaacatgacttccaagctggccgtggctctcttggcagccttcctgatttctgcagctctgtgtgaaggataactgggatgacgatgatgat

SEQ ID NO: 808089 - DNA, 100 bp, Homo sapiens
actataaagtaaaagaacctggtgaaagtcccatattctggtctctaattaacagaagatggcaaagcccagccacagcagctatgtccttcagcagcta

SEQ ID NO: 808090 - DNA, 100 bp, Homo sapiens
ctgcggcgagtatacatgcaaagcttccaatgagtatggcagtgtcagctgtacagccacactaactgtgacaggttttgagcaaaattttggactgtga

SEQ ID NO: 808091 - DNA, 100 bp, Homo sapiens
agctctgtgcccaggcgctgaaggatggctggaccaggtatcctgaagaacttgcctggcacacaaatttaagtcgaaaaatcttgagaaaatcgccaca

SEQ ID NO: 808092 - DNA, 100 bp, Homo sapiens
aaccaacattgaagtggagacagtcatttgaaagttatttgaagacaatgcctccctactatcttgggtctcatataatggcagcaaaggctgtagcaaa

SEQ ID NO: 808093 - DNA, 99 bp, Homo sapiens
cgctgtttcatctctatggctgtcagaggtgggcggctttgaccgagaggctgctggagctcgtgtttggacgcgttatcaatactctggctgaccatc

SEQ ID NO: 808094 - DNA, 98 bp, Homo sapiens
atcccagacctaagtttgaagattggctttgtaacaagggcaattgaaggaacagactaaaaatcgtgtcctggaaggaaactacaggtactaccagg

SEQ ID NO: 808095 - DNA, 100 bp, Homo sapiens
cccgaccagccccggctcagggtcccccttcctggtggctgtgaagctcaaactttggaacaaataccgaatttccaacattccatcactaatattcctc

SEQ ID NO: 808096 - DNA, 142 bp, Homo sapiens
gacgaaatccccctgaaggtaccgcggacctcgccccgggacagcgaggagctgagggaccctcatcaagatggtgctcatgtggaccagtggtgacgccttcaagacggcctacttcctgctgaagggtgcccctctgcag

SEQ ID NO: 808097 - DNA, 100 bp, Homo sapiens
aaatggccacgcagtcccggcaaattcatctcttttatcctcgcttatgaataagagtctgatcactgcgcatgagcagttcaaggccacgctgcccgag

SEQ ID NO: 808098 - DNA, 98 bp, Homo sapiens
gaagaagaaaacaaaggtagaacatggaggatcgtcaggctctaaacaaaattctggtgccagtctttaggcctatggatctaatggttgaggccagt

SEQ ID NO: 808099 - DNA, 99 bp, Homo sapiens
cggcaaccacgagcccagccaatcagcgccccggactgcaccagagccatggtcgacaaatgtcgacaaatttgcctcggtggttggagaaagaaaagc

SEQ ID NO: 808100 - DNA, 100 bp, Homo sapiens
tctgttccgcacaggcctgctgaactgggtgctttatataggtgaatattacttcagtgtagaaaatttggaacgagacttctttcttcggggaaagatg

SEQ ID NO: 808101 - DNA, 100 bp, Homo sapiens
agtccccagcagctggcagaagaagcaacacgcaaacgagagctgaggctaatgaaaaacagatggagaacttaatgttctggatgatattttaactgaa

SEQ ID NO: 808102 - DNA, 100 bp, Homo sapiens
aaaatccgtgaacaggaacttaagagtcttaggagtcagttggatgtgacacataaggaggctgtacaggaagcatggctggggaggcctcaggaaactt

SEQ ID NO: 808103 - DNA, 100 bp, Homo sapiens
ttccacccaaacttgctggtcactgggagcagagcatcctggccagaacaagccaaggagccaagacgagagggacacacggacaaacaacagacagaag

SEQ ID NO: 808104 - DNA, 98 bp, Homo sapiens
accacctacctgagtatgtcgaaaatctctgcccctggaggagaaatagaaggccactgaagtttgaatgcagagaaaacgctgcaagatagaaaaat

SEQ ID NO: 808105 - DNA, 100 bp, Homo sapiens
taaacaaggctggccttgtacttggaatactgagttgtttaggactttctattgtggcaaacttccaggctgagggtaaaaagctgggattggtaggctg

SEQ ID NO: 808106 - DNA, 99 bp, Homo sapiens
gaagatgtagattgtgtgatgaaggacatggtgcatctgcagacgcagcaggaggtgaagctgcgcatgacgggcatggcgctgcgggtggtgcgtacc

SEQ ID NO: 808107 - DNA, 101 bp, Homo sapiens
agacatagtgcccagcgtgggattcgatacagaattggcagagggggtcgatttgggaggaaaggtgtggctataaactttgttactgaagaagacaagag

SEQ ID NO: 808108 - DNA, 98 bp, Homo sapiens
gcccttccggagtccgccccgtgaggagaatgaagcccttcagcggccagtagcatctgactttgagcctcagggtctgagtgaagccgctcgttgga

SEQ ID NO: 808109 - DNA, 98 bp, Homo sapiens
gtggagaagatcgcatggcagaaagggggcatctttaagattgatcagggaccatgaaaagaaacttgtgcttcaccgaagaaaaatatctaaacatc

SEQ ID NO: 808110 - DNA, 100 bp, Homo sapiens
caagctcaacctcaaatcagtactgaggggtaaaatatacccaggaccataaacagatgaaaggtagaccaagtctgattttagatacacctgctatgag

SEQ ID NO: 808111 - DNA, 100 bp, Homo sapiens
gatttggcacctatgcgcctgcagaggtaatgtctcgctgggaagagtatatcagcaaagtgaaaaataaaggtagtacattgccagatgttacggaagt

SEQ ID NO: 808112 - DNA, 98 bp, Homo sapiens
caaggtttgaaaagcagctggcctgcaagattgtctccagctttaagaccacgacatcgagagctgcctgccagctcgtgaaggagtacatcggccac

SEQ ID NO: 808113 - DNA, 98 bp, Homo sapiens
aatggggaggacaacttcgcccgggacttcatgtttccaacatggctagatccatcagaaactgaagccgtggagaacgctctcggggcctttgccac

SEQ ID NO: 808114 - DNA, 99 bp, Homo sapiens
tggaactgaaatgcgcacagttgctgaaaaggtacaacaactatgaccgggctgtcatcaataccgttccttatgatgtcgtccatcgctggtatacag

SEQ ID NO: 808115 - DNA, 100 bp, Homo sapiens
ttctgctcaggaaccaaaacgagctgggaggtcaaaatgcagatcttcgtgaaaacccttaccggcaagaccatcacccttgaggtggagcccagtgaca

SEQ ID NO: 808116 - DNA, 100 bp, Homo sapiens
ggagaacaaatccaagattagcacagccaatctaaaaagggccctcaggatcgcccacaatgcccagcttagcttcttgacaaacaccttaatggcgcag

SEQ ID NO: 808117 - DNA, 98 bp, Homo sapiens
caacaagatgtgggcacaaaaactaccattcgcctgatgaactctcaggagtctcacaactcaagaaagaaacgggaaattactgaaaaacagataga

SEQ ID NO: 808118 - DNA, 100 bp, Homo sapiens
cttctcgcggccgtgatgcacctccctctgcggtggggtccgggacatggcaggttgtgatcaattattcaatcgtgaaagggctgaagtacaatcaggc

SEQ ID NO: 808119 - DNA, 100 bp, Homo sapiens
ctctgaacatactgccttatgggacagatcaacttgcacaggatgaaggtagttacgttggtggctttgcagtggttgaatatagcactgcggagcaggc

SEQ ID NO: 808120 - DNA, 100 bp, Homo sapiens
aggaggacctctcgccaagggccccaatgagtggcacacagtctactatcaccgacagcggcgtcttcgacatcttcggaacattgctgcccggaacatt

SEQ ID NO: 808121 - DNA, 100 bp, Homo sapiens
ccagcttccttcaaaatgtctactgttcacgaaatcctgtgcaagctcagcttggagggtgatgaattgcattttgtgaaaaaagaacaagaattttctg

SEQ ID NO: 808122 - DNA, 98 bp, Homo sapiens
ccaagcacaattccaggaaggaaaaaccaccatcgtgtcacgtcgacgatgccaaattatgttagcgtgagcagaaacaccgtgggggaggaaggcag

SEQ ID NO: 808123 - DNA, 102 bp, Homo sapiens
agggcgaagacgagatccagttcctgcgaactcacagacgcagtcttcagcaaggaagtgctgggaacgccctggagtgaacccaggaagatgcctgcagtg

SEQ ID NO: 808124 - DNA, 100 bp, Homo sapiens
gagcgggcgcctcctccttgctgggtacgacgacttcaactgcaacgtctgggatgcactcaaagccgaccgggcagatcccaccaaatattttggttgt

SEQ ID NO: 808125 - DNA, 100 bp, Homo sapiens
ggccacaactctgcagtggaccacagcattcctgaaatacatccaggaaagacatggagattctcttaaaaaggttgtggcagcactgcctgaaggtatg

SEQ ID NO: 808126 - DNA, 100 bp, Homo sapiens
tccaggcgcttctcatggaccctgaactccacgttggaaagtgcaaggaacagcatatgccatatatgagctggctgtggcttcatttcccaagaagcag

SEQ ID NO: 808127 - DNA, 100 bp, Homo sapiens
aaacatatatcccagatttctgtggcagaagatgatgatgaaagtgtattaatctctggagaagacacatccacagttagcactttcttcagatgctgac

SEQ ID NO: 808128 - DNA, 98 bp, Homo sapiens
gacgcagagctttggcgagagctacggcaacagcaagaactgccggcggctcttgtgctgcagggttcctgagtgggaagggcttggtgatctatccg

SEQ ID NO: 808129 - DNA, 100 bp, Homo sapiens
tcatcatgctgaagattccagaggagtgtgttgctgaagaggaattgcctcacctgctcaccgaaagggagagacagcgtctggagaccatcctcagtct

SEQ ID NO: 808130 - DNA, 99 bp, Homo sapiens
tcttatacgctacttttactcagagtttgaaggttgtgaccaaaagaggctccgtgcctgaagacctctcattagaagagagagaagaacttctagaca

SEQ ID NO: 808131 - DNA, 100 bp, Homo sapiens
gttcgattattagctttagtgaaatgggctaataatgctggcaaagtggaaaaatgtgcgttaatcagctgtgttcagcgaatacttatgaacagaaggc

SEQ ID NO: 808132 - DNA, 100 bp, Homo sapiens
attgaagacaaccttgatttcagtgtggaaaacgggccttactatacatcatatcccccatcaccagatttgtgacctgccatctttcagtgcttcttgg

SEQ ID NO: 808133 - DNA, 100 bp, Homo sapiens
atctactattcatgatgttaagcaaaagtttcacaaagcatatcttagcaaagcaatgtctcaagatggtgcttctcagttccaagaagtcattcggcaa

SEQ ID NO: 808134 - DNA, 100 bp, Homo sapiens
tttgattcagcaaatgggatcaatatttcacctgatgataagcaagttaggaaatcaacattgaatcccaatgcaaaggagttcaacccacgttccttct

SEQ ID NO: 808135 - DNA, 99 bp, Homo sapiens
gaaaaccccagctctagctgtgaaagctggtcttaaagaagaggaaactgaattgaaacagctgaatttacacaaagctctcctgccacagctcctcac

SEQ ID NO: 808136 - DNA, 98 bp, Homo sapiens
ccaaggagccctacctggatgagcagagagctgtgaaatatctttggcttgcagccaacaatgggggcttatttcaaaacctttgtccctcagttcca

SEQ ID NO: 808137 - DNA, 98 bp, Homo sapiens
ggagacctggaatcattgttgaaactgaggcttcttgaagagcttgaagacacttggctcccttatctgacccccaaagatgatgaattctatcagca

SEQ ID NO: 808138 - DNA, 100 bp, Homo sapiens
ggaaagatgatgcctagtaaattacagaagaacaaacagagactgcgaaacgatcctctcaatcaaaataaggggtattccctcagcggatactacaccc

SEQ ID NO: 808139 - DNA, 98 bp, Homo sapiens
ttgcagccagggatattgagaaacttctgagcaacagatctaaagccctggtgatatttgatttaatggatgccaaagcacgtgctgattgcatcaaa

SEQ ID NO: 808140 - DNA, 99 bp, Homo sapiens
tggaaaggcgttttgatgccatgccgtttactttaagtaggttcttcgcagacagtggcgcagaccccaagggagaaccaggctccaaacagagccctc

SEQ ID NO: 808141 - DNA, 100 bp, Homo sapiens
tgctcttcaaagcgatccacaatctgttagaaagtgtaaacaggaacatcgataagtagtgtaaaaacttgcacaatgaaatccgaagccaaggatggag

SEQ ID NO: 808142 - DNA, 98 bp, Homo sapiens
tctgcccgcctgagtgatcttgaaatgaatagacatccacgacagcgatggcagttccagcagcagccaccagagcctcaagagcacagccaaatggg

SEQ ID NO: 808143 - DNA, 99 bp, Homo sapiens
ttcctggctttgtagctcgctcaagatggcggcgcagccaccccgcgggatacgcctcagcgcgattgtctaaagccccaggaaaaatggtggaaaatt

SEQ ID NO: 808144 - DNA, 99 bp, Homo sapiens
gctgaggtccagatgaaagagaagtttctggtcactccccaggattatgcgcgccctgctgttcgtggcatttgccctgtgtatgttttgcctgtacag

SEQ ID NO: 808145 - DNA, 123 bp, Homo sapiens
ccgggccgccctctctcggagttggcaggaagccaggttgcagggtgtccgcttcctcaggtgctggagaatctggtaaaagcaccattgtgaagcagatgaggatcctgcatgttaatgggt

SEQ ID NO: 808146 - DNA, 51 bp, Homo sapiens
tgcagagttcattgttgccaagggatttatagtaaaacaagtgtcttccca

SEQ ID NO: 808147 - DNA, 100 bp, Homo sapiens
aagcaaaagccttccatgattacttggattggatgctgctggcaagacaaccattctgtataaactgaagttaggggagatagtcaccaccattcctacc

SEQ ID NO: 808148 - DNA, 98 bp, Homo sapiens
ccaacagttgagactcttcattacccggcacctagctcacttctcctcagaggtcaaagggagaaaactggttgtcctggatgtttgaaaagttggtc

SEQ ID NO: 808149 - DNA, 98 bp, Homo sapiens
tggtcctaactcctgcagagctcattgaaagattggagcagatggcttcccagttacgactcttcgatccccagctgaaagagaagccagaagaggag

SEQ ID NO: 808150 - DNA, 98 bp, Homo sapiens
gtaaatgcaccaatcagcatgctgtgtctagctcaaggaagaagaccagctacaaggaaatacttctgaaaaatcactctgaaccccaagctggagtg

SEQ ID NO: 808151 - DNA, 100 bp, Homo sapiens
atgctgcccggtttggcactgctcctgctggccgcctggacggctcgggcgctggagctagatgaggaagaggagcgaaggaaaaggcgccgggagaaga

SEQ ID NO: 808152 - DNA, 100 bp, Homo sapiens
cccaccccatccagtggaatgcaccacagccatctcacatttccaagtacattctcaggtggagacctttcagagtcgtgacacttcaagaggtgggcag

SEQ ID NO: 808153 - DNA, 100 bp, Homo sapiens
atgcaccaatcagcatgctgtgtctagctcaagactgtgccctgtccacggtgcctcctgcatgtcctgctgccctgagctgtcccgagctaggtgacag

SEQ ID NO: 808154 - DNA, 99 bp, Homo sapiens
ccagtttcaccctctggagtggttggcaagggaagcctgcaaccaggacgctctccaggaggcgggcacattcagtcactggaggaggatccatggcca

SEQ ID NO: 808155 - DNA, 99 bp, Homo sapiens
gctgatccagcaggaggatataaaaaagaaggagccatattgtagggtttttgacaactatgcagtcacagttatgattggtggagaaccatatactct

SEQ ID NO: 808156 - DNA, 100 bp, Homo sapiens
gctggatcctttgataatgaaggcattgctatttttgcacttcagttcacatactatttatggacctgtcgcgaaatcgcctttcagaaattcctataga

SEQ ID NO: 808157 - DNA, 100 bp, Homo sapiens
tcttccctggctgtgctggcggaggctgcgccgatgaacctgactgagagagaagtggagatcctgatgtttctcagtgccattgtgatgatgaagaacc

SEQ ID NO: 808158 - DNA, 100 bp, Homo sapiens
aggtctccgtgcagcccaacttccagcaggacaaggtggcacctctgagcatgagaagctgtgccgggcccgggaccagtgccgggagattctcaagtat

SEQ ID NO: 808159 - DNA, 98 bp, Homo sapiens
gcgacctggccagctgccgcgactgggaggagcgccggaacgccgaggcccagaaaccccatttcatttcactttgcctaaagaaggtgatatcatcc

SEQ ID NO: 808160 - DNA, 99 bp, Homo sapiens
ttggccccgcacagattgagccgagttgtcgccccgctgggagaagtgaccctcctgcgcctggtctctacagcggaacaatgtcgttcttcccccaaa

SEQ ID NO: 808161 - DNA, 99 bp, Homo sapiens
ttggtatttcaaatgaccaccatgttgcaaaagaggttactacataataattgtgcctttgaagaaatctcgcgggaaatttatcaagccatgggagag

SEQ ID NO: 808162 - DNA, 98 bp, Homo sapiens
cgcggcttcctccagacctctcggcgcgggtgatttgatgaaggctgctgcaggagagttcgcagatgatccctgctcttctgtgaagcgaggcaaca

SEQ ID NO: 808163 - DNA, 98 bp, Homo sapiens
gaccctcatgctgaatgaggacaagccatccgatgactactctggttgagcttcagcgacagcgagagtgacaacagcgccgactcctccctgcccag

SEQ ID NO: 808164 - DNA, 100 bp, Homo sapiens
gagagagattgcagcaggggacgtggtcgggttcctgaaggcagaaaggacatggatttgattgacatactttggaggcaagatatagatcttggagtaa

SEQ ID NO: 808165 - DNA, 100 bp, Homo sapiens
agcttctggcatttacatcatagtggccacagaagaagtagttactgcagaatctgtggatggtgccattcagcaagtagttagttcagggggtcagcaa

SEQ ID NO: 808166 - DNA, 98 bp, Homo sapiens
ggcagcccgggcgggtcccggggtgcgagcagcgcacttccggtgtcgtgaaaactacccctaaaagccaaaatgggaaaggaaaagactcatatcaa

SEQ ID NO: 808167 - DNA, 101 bp, Homo sapiens
tgagaactactctgacaaatcagatattgaaaatgctgatgaatccagcagcagcatcctaaaacctctcagttcatatccagctttcagagtggcaccgt

SEQ ID NO: 808168 - DNA, 99 bp, Homo sapiens
caagaaaaaaagacgaaagaagaagaagagcaaagggccttctgcaggtttatggctacaaatgatttgatgacggaactgcagaaagattccatcaag

SEQ ID NO: 808169 - DNA, 100 bp, Homo sapiens
ccttatgaagacagcgatagctctgaagatgaggttgactggcaggatactcgtgatgatccctacagaccagggcaagaggattatgacagattacgac

SEQ ID NO: 808170 - DNA, 99 bp, Homo sapiens
gaagaaagaaggtgggagcggagagcgcaggcgtggggatagtggtcctagaagaatgtcagcttccaaaagatattttgaaaaaacaaatgcaatttg

SEQ ID NO: 808171 - DNA, 51 bp, Homo sapiens
cagcagtctaacatctgggtgaatatgggtcaaaatgcagatcttcgtgaa

SEQ ID NO: 808172 - DNA, 106 bp, Homo sapiens
ggactttgtgaggcaacatcggataccactgggtgaattatgtaacctcattacgctggatgtagctcacaatcaacttgaacaccttccaaaggagattggaaac

SEQ ID NO: 808173 - DNA, 100 bp, Homo sapiens
ggcagcggctctagaagtagatcctccagtagtgattcaatcagcagcagcagtagtaccagcagtgacagcttacagttgaacatgagtcttcttatga

SEQ ID NO: 808174 - DNA, 100 bp, Homo sapiens
acaccatctgccctctgcaagaagacagctctggggaggacatcgtcaccaagcttctggttaccagatgtggtggtttacccaacaacattgtggatgt

SEQ ID NO: 808175 - DNA, 51 bp, Homo sapiens
ctcacagctgtattcatgtgggaaccggcaccaatgcctgctacatggagg

SEQ ID NO: 808176 - DNA, 100 bp, Homo sapiens
ctcggcggagcgcgcagaagacaactctgggcccgctaaaccaacccaggatacccaggatcaagtcttccataccagggaccaggccaaaaccagactg

SEQ ID NO: 808177 - DNA, 100 bp, Homo sapiens
cctgtgctaggatttttcatcatagctgtgctgatgagcgctcaggaatcatgggctatcaaagttgttcttcctaacataaaatcagaagatacaccat

SEQ ID NO: 808178 - DNA, 100 bp, Homo sapiens
gggagcctagaatgcatcagtgcccttgtggcgaatggggctcacgtcgagccaagaagcttgagagaagaaaaatttcagaaaaattgtctcaatttga

SEQ ID NO: 808179 - DNA, 100 bp, Homo sapiens
aaaatagctgaactggaaaagaacattgttggtgaaaagaccaagtctctggctgatgaacttgctcttgtggatgttttggaagataagcttaaaggag

SEQ ID NO: 808180 - DNA, 98 bp, Homo sapiens
agccatgtctgtagtctctgtggagacctcagatgatgggaccactcggcgcacagagaccacggatgacttgttcgcggacctggccaacctgagcc

SEQ ID NO: 808181 - DNA, 101 bp, Homo sapiens
atttagaacgatgtgaacatcgaatcatggaatcccttgcatggctctcagcttatgatgctacccaccttgtgaaatcctatccaggatctcagctggac

SEQ ID NO: 808182 - DNA, 100 bp, Homo sapiens
gagaaaagggctatgaacgattaaaagaagaactcgcaaaagctcagagggtaagaatgattgatgttggctgatattggagtgctcattcacatgaagt

SEQ ID NO: 808183 - DNA, 100 bp, Homo sapiens
ggctgaagcgactgagtccgcgatggagtgttctagaacagatcagacattttgtaatgatgcctgaaataaacactaaccacctcgacaagcaacaggt

SEQ ID NO: 808184 - DNA, 99 bp, Homo sapiens
gaagatggcgcctgttgtgacaggctccagaacctgggtatcaacccagcaaacattggcttcagtaccctgactatggagtctgacaaattcatctgc

SEQ ID NO: 808185 - DNA, 100 bp, Homo sapiens
gtctgcaccctgttgtggctctataagcagggctccttcagtggtagatgtcccctgtatggtgtggccaccctgaatggctcctccctggccttatccc

SEQ ID NO: 808186 - DNA, 99 bp, Homo sapiens
gtatccagagctacagatcacaaatgtgatggaggcaaaccagcggggtatgatgtgattgctcaagctcagtcaggtactggcaagacagccacattt

SEQ ID NO: 808187 - DNA, 100 bp, Homo sapiens
atcctcgacggcatctcagccctgagaaaggaggttatcaatactctggctgaccatcatcatcgtgggactgactttggtggaagtccttggttacatg

SEQ ID NO: 808188 - DNA, 100 bp, Homo sapiens
gagtttggccgaatcaaacagggcattcagggagactggaataactgatgaggaacaagccattagcagggagaaagaggattccctggatacccaggac

SEQ ID NO: 808189 - DNA, 100 bp, Homo sapiens
tacagtgacagcacaggtcacagtaaggccaaaaatgtgcatactcacagagttagagagagggatggtgattattcagagctgggagagcttcccccac

SEQ ID NO: 808190 - DNA, 100 bp, Homo sapiens
actaacattttgtgaagttgtaaaacaggacaaagcccacaaacgctatctgctaatgagcattgaccagaggaaaaagatgctcaaaaacctccgtaac

SEQ ID NO: 808191 - DNA, 100 bp, Homo sapiens
aagaggagccgagcatctgggccgagaccattccgtatggagagccgggaaagtgactattttaccccacagggagaattccgtgtagacaaagcaggat

SEQ ID NO: 808192 - DNA, 100 bp, Homo sapiens
tggtgagcgaggagctctccgagaagcaatgaggctggagtgagacagctctacgtacagattgactttgcagccatgtagtgaatggaaagaaattatg

SEQ ID NO: 808193 - DNA, 98 bp, Homo sapiens
gagcttccctcgtggccgacggaacaatgaaggttatgaagacagtatggagtttccagaccatagtagacatttgctacagtgtctgagcgagcaga

SEQ ID NO: 808194 - DNA, 100 bp, Homo sapiens
tccagagccaaggtccagggggcaaggtcgtggtgtctttcctgaagactatcttcccgtctcaaaatggacatgatggatccacggatgtacagcagag

SEQ ID NO: 808195 - DNA, 98 bp, Homo sapiens
agcctcttccacatggaagacggggagccctactgcgagaaagtggtgaaagtggtgctggaaaaacagtggctgccaaatatatcatgagctacatc

SEQ ID NO: 808196 - DNA, 98 bp, Homo sapiens
aggtgccggtggagcccgagtctgactccggggacgaggaagaggaggtgtgggaggtgctgaaccttttctggccatgaaccattataaaatcccaa

SEQ ID NO: 808197 - DNA, 100 bp, Homo sapiens
tatagaatgtgaagacccagtggatcatgttggaaatgcaactgcatcccaggaacttggttatggttgtctcaagttccttccaggaggtactttatgc

SEQ ID NO: 808198 - DNA, 123 bp, Homo sapiens
cttgttgggaactgagaagtgtatatggggcccaagctactggtgccagaacacagagacagcagcccagtgcaatgcctatgttgtccttggccagtttctggtgctaaagaaagatgaaga

SEQ ID NO: 808199 - DNA, 100 bp, Homo sapiens
ggcacggacaacatcaccgtgaggcagggggacacagccatcctcagcagtcactcaggaaatgttgtttaaggggaaccttctggatccttttcatggc

SEQ ID NO: 808200 - DNA, 99 bp, Homo sapiens
ggaagtgctcaaaggtctcacctgcctgctgctgctcttcgcacagaagagggctatcagttgagggatttgcagttgataaaatggctggagaggtta

SEQ ID NO: 808201 - DNA, 100 bp, Homo sapiens
cttttctatcccaagaagtggtggttaatcttttacaagaaaccaaacaagcctttgaaagatgtcataggttgttgcgaagctctttggtgaataatag

SEQ ID NO: 808202 - DNA, 99 bp, Homo sapiens
aactcctctatgatgaagaagaccttgaaatgcatccgctggtcgctgccggaaatggccagcggaatagaagatgaactcaactgaattcaccgaaga

SEQ ID NO: 808203 - DNA, 99 bp, Homo sapiens
gctggataacccttctcctttctacaacccgttccagttcgagatcaccttcgagtgcatcgaggacctgtctgaaggaatgttttaaaggaagttggg

SEQ ID NO: 808204 - DNA, 98 bp, Homo sapiens
cacgccctttacctgcgtttcctggatgctcttaaagtcatggctccgatcttcatcttgaagaagagtgacattgggtgactgctgcttggaaaact

SEQ ID NO: 808205 - DNA, 100 bp, Homo sapiens
tatatgaatatctgctccatgtaggagctcagaaatcagctcaaacatttttatcagaggctaaaggttggtcttcaggttgtggcagtcaaggctccag

SEQ ID NO: 808206 - DNA, 98 bp, Homo sapiens
actgtcaatggagctggaaaacatcgtggccaacacggtcttgctgaaagccagggaaggagcatattaatgaaaagtgccataaactgaaaaaccaa

SEQ ID NO: 808207 - DNA, 100 bp, Homo sapiens
gaaggaacactcctctgtcctcgtcatgttccacgccccatgacttatcaaactggtttcaaagcacagagctcaagtaatttacaccagaaataccaag

SEQ ID NO: 808208 - DNA, 100 bp, Homo sapiens
aagaataagagatgtgattaatgtattccaccacctccgccagttaagaggaaaaagactccaagaatgaaaaggctctgggccgcaaaataaactcctg

SEQ ID NO: 808209 - DNA, 100 bp, Homo sapiens
tcaatcagctcatccgtcagctgaactagacccaggcagaaggagaagacagcctgaagaagatgcagctgatggagcttgcgattctgaatggcaccta

SEQ ID NO: 808210 - DNA, 99 bp, Homo sapiens
ttcgaagtggctgtgggtattgctgcggctggtgcgtcgtcgctctagcgggagatacagatgacccaccaagaattactcagaaccctgtgatcaatg

SEQ ID NO: 808211 - DNA, 106 bp, Homo sapiens
aatcctgccttctccatgctgaatgactcggatgatgatgtgatttatggagaagatggcgaattagaagatggtgaaatagacgatgcaggatttgaagaaatac

SEQ ID NO: 808212 - DNA, 99 bp, Homo sapiens
agcaataaagacggaaccacgtatgtcctcctcccctcaccctcagagggagtactgatggtcggcccacctggcacggggaagacgctccttgctaaa

SEQ ID NO: 808213 - DNA, 98 bp, Homo sapiens
aggaatcttccctcggcccgcgcgcgcgaccggccggtgcgccgcggcccgcgattattcactgaccagcgctgacctgtcagcccttcaaggcttca

SEQ ID NO: 808214 - DNA, 98 bp, Homo sapiens
gaggccaggagccaggggcccagaagcccatcacctcttcatgaccactgcctgccaggaggctaactacggtgccctcctccgggagctctgcctca

SEQ ID NO: 808215 - DNA, 101 bp, Homo sapiens
agcggatccggatggctaacgagaagcacagcaaaaacatcacccagagggggaacgtagccaaaaccctggagcttcagaaatacgagcagttcatcttt

SEQ ID NO: 808216 - DNA, 98 bp, Homo sapiens
ggaggtgctgggagcgagttggctgtgccggtggtggtgtgcacattgagccccggtatagacagttcccccagctgaccagatcccaggtgttccag

SEQ ID NO: 808217 - DNA, 101 bp, Homo sapiens
gccactggagaaaaagaagaaaatgttaaaaagaacagatacaaggacatactgccatcttgtggagagactccagagcaaatacgagcaccaagtggcat

SEQ ID NO: 808218 - DNA, 100 bp, Homo sapiens
gaagctgccggcagccctgcggctacggagacagttccatgatccagactcagcagttgtggcacagcatctgacaaacactgtattcgttgacagagct

SEQ ID NO: 808219 - DNA, 98 bp, Homo sapiens
atttccaaacaaggacatggagggaaggcttcctaagggacaaactctgcctgggcgagtccttttcctgcgttatgtcgttcagaccctagaagatg

SEQ ID NO: 808220 - DNA, 98 bp, Homo sapiens
tggaaacagattactttggcctccagttcctcgactctgcccaggttgcgccctaccacttatgtcttggatgaagatgaacctcgattccttgaaga

SEQ ID NO: 808221 - DNA, 100 bp, Homo sapiens
ctccttttccctctccctttccctaagcttagaccatgctcagcctccaagcagccttgtcatcgacaaagaatctgaagtttacaagatgcttcaggag

SEQ ID NO: 808222 - DNA, 99 bp, Homo sapiens
acgaggtggtacgaggggtcgtggccgaggaaaactcaatgtgagtagtgacactgtccagcatggtgtggaaggattaacgtatctcctcactgagag

SEQ ID NO: 808223 - DNA, 98 bp, Homo sapiens
aagccggagcctgccagagccaaggccaagctctccaagttcagcatccccaagcagggggaggaagatgagaatgtgcctactgctcctgatcctcc

SEQ ID NO: 808224 - DNA, 100 bp, Homo sapiens
gggctccctcgtgaagaacctgaaggacacactaggtgcgagtactccagaaggaactggctgcatccacctctgaagacacgcacccttacaaggagga

SEQ ID NO: 808225 - DNA, 99 bp, Homo sapiens
tggatcagcagacccccaccatccctaaccggctggctgcagacccggcctgtttaaagaagaaaacccgtatgctagatttgaaaacaactaaagcgc

SEQ ID NO: 808226 - DNA, 99 bp, Homo sapiens
atccgctctccctgcgctctccgcaccgcggcttaaatgatgtattttgtgatcgcagcgatgaaaggaaatttgcgagaatccccgatttatcattga

SEQ ID NO: 808227 - DNA, 100 bp, Homo sapiens
gctcaaatctcatcttaaccttgctctgtcagattcagggagttttgtatcttctcgagcccggcgagaaaaaaaatcaaagaaggggcgccaagaagcc

SEQ ID NO: 808228 - DNA, 100 bp, Homo sapiens
ctcgggtgcaatcctggagccccccagtgagggaattacatgaatgacagtcttcgaaccaatgtgtttgttcgatttcaaccagagactatagcatgtg

SEQ ID NO: 808229 - DNA, 98 bp, Homo sapiens
gatccaagcaatgccatgccggtgaccaagaatatggcccaggtgaccaaagccctggacaaggccctgagcaccatggacctgcagaaggtctcctc

SEQ ID NO: 808230 - DNA, 100 bp, Homo sapiens
agcagtctccactggaaaaaaagatcttgcaacagccaactcagtttataaatccagaaacacctggctatgttggatttgcaaacctccccaatcaagt

SEQ ID NO: 808231 - DNA, 98 bp, Homo sapiens
cgaggggagactgaagttcacgttccgctcttagtgcgcggctcacattctacttgactgtggtgaagacaatgtctgtaaacccaagctggaagttt

SEQ ID NO: 808232 - DNA, 100 bp, Homo sapiens
cggggttctccgggagagggggagtgcgcggcggccgcagctgccacaaaccagtacgaggatgtcgtccaggaaagattgtgcagatgactgaagcaga

SEQ ID NO: 808233 - DNA, 100 bp, Homo sapiens
ggccctgctcacaggactgctggacctccagaagagagaaggcttctgccagctcctgcagcagatgaagaacaagcactcagagcagccggagcccgac

SEQ ID NO: 808234 - DNA, 100 bp, Homo sapiens
actagcagatgctggcgacctatccagaatgatcaagattggaattccaccagcccctcgtggagttcctcagattgaagttacatttgacattgatgcc

SEQ ID NO: 808235 - DNA, 99 bp, Homo sapiens
gaaaaaccactgaactggctactttttaattactatttgacaacctgccttcagtcttcagttaataatggaaagaggcaaaacctgatgaattaatgg

SEQ ID NO: 808236 - DNA, 100 bp, Homo sapiens
cactgctcgcaggtggactcggtccgtggcttcggaggcaagtttggtgtccagatggacagagttgatcaggaagctgaaaccccacgtagtgttcttg

SEQ ID NO: 808237 - DNA, 100 bp, Homo sapiens
gatacgatagaaaatgtaaaggccaagatccaggataaggaagattacaaatgttggatcactttgctgaatgtgttaaacaagctaaaggtgtccgcca

SEQ ID NO: 808238 - DNA, 100 bp, Homo sapiens
tactttgatgacctatgttcaagatcaaaatgaagactgcctttacttaaacatctatgtgcccatggaagatgcttcagtatcagacacagcacagcag

SEQ ID NO: 808239 - DNA, 100 bp, Homo sapiens
ctaatcacagactcctatttgaagtatttgacgaaaatagactgtgtaaacaggaacatcgataagtagtgtaaaaacttgcacaatgaaatccgaagcc

SEQ ID NO: 808240 - DNA, 100 bp, Homo sapiens
tcctgggccacctgcagcaggtgtggggcagggctcgggttcatgacgctctcgatattcctgtgcagaaacctggaccacgtctacaaccggctcgctc

SEQ ID NO: 808241 - DNA, 100 bp, Homo sapiens
cctgagggaagtgggcaatgccatcctcttctgcctcctcatagagcaagctctgaattgacttctctttgaaagataacgaaaagcagatcatcctgga

SEQ ID NO: 808242 - DNA, 98 bp, Homo sapiens
acggaggtcaagtttaagggtactttggtgcatgaagctcaactcaactatttctacatctctcctggagatgcctgaaaacttcatgcctcctgttc

SEQ ID NO: 808243 - DNA, 100 bp, Homo sapiens
ggccttgagggtgggagagagccagctcctcctgcagagcccccagagatgtaacctagaagtcaagcggtaaaacaagctttgcaactatgtggatgga

SEQ ID NO: 808244 - DNA, 99 bp, Homo sapiens
acacaacgcttgttatgttttcatcacttctctccagaaggtcaaaatgcagatcttcgtgaaaacccttaccggcaagaccatcacccttgaggtgga

SEQ ID NO: 808245 - DNA, 99 bp, Homo sapiens
cacacagtaatgaaatactaatattttcagttcaaccaaaatctcttgtacgccttatgtttgatcatcggccaaggtcctggcgagaactgcctctgc

SEQ ID NO: 808246 - DNA, 98 bp, Homo sapiens
acacagccatgccccttccgattgggagggacaagtttgtgaagaaatatgggaacctttttagcttggagcttggtgacatatctgcagttcttatt

SEQ ID NO: 808247 - DNA, 100 bp, Homo sapiens
cagccgccttggtagcagcgggtgacatggaaggggcagtacaagcttacgtctctgctcttcagtacaatcctgaagctcttcgtgggcggtcttgact

SEQ ID NO: 808248 - DNA, 101 bp, Homo sapiens
cttcgcattttggcattgacatttaattttagggtcctttatatagaagggagagtaggtaaaacatggctaaaagcttacggagtaagtggaaaagaaag

SEQ ID NO: 808249 - DNA, 130 bp, Homo sapiens
gtcgccgccaccgcggaaaacgtcttgcacgtgcgaggggcatttcaggagtttcctgtctgtcagagaccccatccttggtggtccccttggaagaccgtgtggtatctgtgggagaaacagtggccct

SEQ ID NO: 808250 - DNA, 100 bp, Homo sapiens
ccgggggaatgtgggctttgtgttcaccaaggaggacctcactgagatcagggacatgttgctggccaataagattcaagatggaaaaggtgatgtaacc

SEQ ID NO: 808251 - DNA, 99 bp, Homo sapiens
tattctgttccagcagcagaacacaggcttgtgacaaggactcccaatgtggtggaggcatgtgctgtgctgtcagtatctgggtcaagagcataagga

SEQ ID NO: 808252 - DNA, 108 bp, Homo sapiens
cttaacattgctgtccttgaggacttaccagagtgaaggtccaagaaaaagagtctgaatctaccactccgtatgactccagcacagatttttcaggaaaaactgcag

SEQ ID NO: 808253 - DNA, 99 bp, Homo sapiens
cgctgtccctgcggcttctgggggagtgtacctcacagccttctaggatctccagagtggacaggaatctcacttggagggaccatggagcagtataca

SEQ ID NO: 808254 - DNA, 144 bp, Homo sapiens
caaggctccagggtttggtgacaatagaaagaaccagcttaaagatatggctattgctactggtggtgcattccatgccattgcagtgtcaactaggcctcagttacttttcagtttgcccaaattgagcccatctcaacattt

SEQ ID NO: 808255 - DNA, 100 bp, Homo sapiens
agaggctcccggagtgtatgtctttggagaacttctggagctggccaacgtgcaggagcagtctctggtcccagcccaccccatggcccctcccagtccc

SEQ ID NO: 808256 - DNA, 98 bp, Homo sapiens
agagctatggctgcagaagcagaagcgtcccgcgaggcccgcgccaagagatgtttcaccttcatggacaggggctttgtcttcaagcagatcaacaa

SEQ ID NO: 808257 - DNA, 100 bp, Homo sapiens
cgaatcaagcgggagttcaaggaggtgctgaagagcgaggagtgacagtgatgaaaagcctctcaaaggaagccttcggtcccttaatagggatatgcag

SEQ ID NO: 808258 - DNA, 98 bp, Homo sapiens
caagatttggggaatctatagttaatcttggcgacattgacaatgatggctttgaagaaaacaaccctttttgctgcacatgtaagtggagctgtgct

SEQ ID NO: 808259 - DNA, 98 bp, Homo sapiens
ctccctgccggccacgatgccgaacgtgctgctgccgcccaaggagagcaacctcttcaaacgcatcttgttggaaaatggatataccttatttgatt

SEQ ID NO: 808260 - DNA, 99 bp, Homo sapiens
agaaaaactaagactcacatctacaagcaatgaactgatcaatgtccgagttaccaccatggatgcagagctggagtttgcaatccagccaaatacaac

SEQ ID NO: 808261 - DNA, 100 bp, Homo sapiens
cttcagaatgtaactgcccagcaggtgtcatagagacgtcagatcgactggaccgtgaatcgacctcccattattggctaacagtctttgcaaccgatca

SEQ ID NO: 808262 - DNA, 98 bp, Homo sapiens
gaaagaaatgaaagtctttccaatgcagatgtttgagacggaggcagatgagaagagggagatggccttggaggaagggaaggggcctggtgccgagg

SEQ ID NO: 808263 - DNA, 100 bp, Homo sapiens
cacctttatagctgtctttttgggacctttttgtgcaactgtgaacagcagcgattcaaagaggacatgagaaacctgaggttcgctttgaaacaggaag

SEQ ID NO: 808264 - DNA, 101 bp, Homo sapiens
cttgatatcacagaggaaactctgcattctcgcttcctggagatctatgaagactccatcgtcttgcagtcggtcttcaccagcgtgcggcagaaaatcga

SEQ ID NO: 808265 - DNA, 100 bp, Homo sapiens
gcacgggttctgcgggccgactgtgggacttgaatatgcgtggatttggatctttaatctcatgaagtacgacagctacagccgcttcttaaagtctgac

SEQ ID NO: 808266 - DNA, 100 bp, Homo sapiens
ttttatgtagtgattcctcagatttacaaggctagacagcaacaagcagaattggcccaacaggaatggcttcaaatgcagcaagctgcccaacaagccc

SEQ ID NO: 808267 - DNA, 98 bp, Homo sapiens
ttccattgaatgggctgaagtggtgatcaatgtgaacaatattctcaaggattttgagtctgagaagagaaaggtaatatgcaagacacttcgatttg

SEQ ID NO: 808268 - DNA, 100 bp, Homo sapiens
aataacatttgcagagcgctttcacagatgatgtctttctacctaaagatattgacctagacagtgtggatatggatgagacagagagggaagtggaata

SEQ ID NO: 808269 - DNA, 99 bp, Homo sapiens
ttgggactgggctcgatttgagtgagtgagatcattggccgagacctgagtggcttccctgcacctcctggagaagagcctcctgcctgaaccacgtga

SEQ ID NO: 808270 - DNA, 98 bp, Homo sapiens
caatgccagcttatgccagacacacaggacaagtagggaccaaactgtatatgagcccagagcagattcgggccgacggtcccccccatggtggggtc

SEQ ID NO: 808271 - DNA, 100 bp, Homo sapiens
tttccctccagctctgtctatcctaccaagggtctgctcttgataaaataacagcaagtttatgtgatcttaaatcaaggcttgattcaagaactggtgt

SEQ ID NO: 808272 - DNA, 50 bp, Homo sapiens
cttgcttttggagccacattgctactgttttcagacacggtctattgact

SEQ ID NO: 808273 - DNA, 98 bp, Homo sapiens
tgaacttctctggaccaacttgaccgtctactggaaatctgaatgctgttatcacctgatgatttcagctctcaggataatcttgatgacccagaagc

SEQ ID NO: 808274 - DNA, 100 bp, Homo sapiens
gctcttctggcattgctgtttcctgtggtaaacactcggctgtgggacacagcaggccaggaaagatttcgaacaatcacctccagttattacagaggag

SEQ ID NO: 808275 - DNA, 100 bp, Homo sapiens
ccttttctataaaagttgctgtttactgttgctgtccgtaaactggaacctctgttcactcaaggtgtgaagcttacactctctgctctggtagatggga

SEQ ID NO: 808276 - DNA, 100 bp, Homo sapiens
cttgctgctttttctaactatttcaagatgatatttattcaccaaacaagattgttaaaggaaatgggctggcaggaagacagtgaaaatgatgaaacat

SEQ ID NO: 808277 - DNA, 100 bp, Homo sapiens
aagaaacaaatgcagcaggtcctgatagtcgatcaaaaattgtgcttctggtagatgcttcacagcaaactgtgcacctatgatatgtgttttagaaata

SEQ ID NO: 808278 - DNA, 98 bp, Homo sapiens
cccacgaatctgcccacccctcctgtaacccagcctgtttcacttcttgatttcgggcagacaacttgaacaagctgaagaacctatgcagcaagaca

SEQ ID NO: 808279 - DNA, 100 bp, Homo sapiens
agtcacccagaacccccaccccgagtcaaagcgctgaaatgagccccgcggcaggcctcgggccagcggccaggagctgcctcccccagcccccgtcccg

SEQ ID NO: 808280 - DNA, 98 bp, Homo sapiens
cctttggccacatatatgcgaatctataagaaaggtgatattgtagacatcaaggctgaagccgacgtagcttctctgaacagacgcatccagctggt

SEQ ID NO: 808281 - DNA, 100 bp, Homo sapiens
tttgctaaaccattcacgtttcagatatgataccaccaagccaaacgtcatcattaagttggagcagggagaggagccgtggataatgggaggtgaattt

SEQ ID NO: 808282 - DNA, 100 bp, Homo sapiens
gtggaatgatgttccctgcaattaccatctcacctatacgtgcaagaaaggaacagctattgacctgaaaagtggttctggaaaagtgtaccaaggccct

SEQ ID NO: 808283 - DNA, 100 bp, Homo sapiens
agacgttatcggatgaatcggatgaggattctcaaagaccaggtgcccacttaactgtgaaaaagatatttgttggtggcattaaagaagacactgaaga

SEQ ID NO: 808284 - DNA, 100 bp, Homo sapiens
gcacgcaagatgaaatttgctctgctaaaaggctccttcagtgagcaaggcatcaacgagtttctcaggaggagatgttaaagtaacccatcttgcagga

SEQ ID NO: 808285 - DNA, 98 bp, Homo sapiens
caactccaatgggcctttccagcccgtggtccttctccatattcgagccctggtacctgacagtgtaaagaaggagctcctacaaagaataagaacat

SEQ ID NO: 808286 - DNA, 100 bp, Homo sapiens
tgatgtgatggacaagaccaatggtttaccagtgcagaatgggattgatgcagacgtcaaagattttaggaagagctaaagatggctgaatttctagatg

SEQ ID NO: 808287 - DNA, 100 bp, Homo sapiens
aactcatgagaagtatgggattgccacttcaatttggtaggataactgcacataaggattttgagcaataggagtgaaacatccacatctgataacacag

SEQ ID NO: 808288 - DNA, 100 bp, Homo sapiens
agagattgtgaagaagaatttcgatctccgccctggggtcattgtcagagctggaagtcgagtgtgctactcaactcaggagatttggagacaaactgaa

SEQ ID NO: 808289 - DNA, 100 bp, Homo sapiens
cccgggcgccaacggcatgacagactcggcgacagctaacggggacgacagggaccccgagatcgagctctttgtgaagcattaaagggcagtatttaaa

SEQ ID NO: 808290 - DNA, 100 bp, Homo sapiens
cagcgaccactgcagcctgcggacgaggccgggacttggccgagcggatcctaataaggggaaaatggcttcacaggctgctcaagaagccgagatcaat

SEQ ID NO: 808291 - DNA, 100 bp, Homo sapiens
agaccttaaggtgtttgttgacctcttacctgctacacagtgtacaaaactttgaaatatcagtgatgtataatgaatctgacctgcatacactcgtgaa

SEQ ID NO: 808292 - DNA, 100 bp, Homo sapiens
tcagcaaatgacagaaatgagcatttcaagagaggacaaaataactaccccgaaaacagaggtgtcagagccaggacacagcattgttggttttgccatg

SEQ ID NO: 808293 - DNA, 99 bp, Homo sapiens
ttttgtaattttactcatattagtagccaatgcaattgtgggtgtatggcaggggtgaaagatttgaaagttgaagatgacatctcaatgaaggtgata

SEQ ID NO: 808294 - DNA, 100 bp, Homo sapiens
gactcccctaaaggccagaaaggaccgagatctcactcagcagacagcagcagcccgggagcctgagctcaggaggaactcttacctggaaattgggaac

SEQ ID NO: 808295 - DNA, 98 bp, Homo sapiens
aatgtcatatgaaggacccactgcagaagtggtggagcttcagtatcagacacagcacagcagccatctgaagagcaaagcaagtctcttgaaaaacc

SEQ ID NO: 808296 - DNA, 98 bp, Homo sapiens
gcctccgtctgccacacgctgatggtgcagcaccgcatgatggtacccaaagtcagatgataagagcacttttgaagaaacgtgtccatactgtttcc

SEQ ID NO: 808297 - DNA, 98 bp, Homo sapiens
agacgcccaaatggatgagcaagacctaaatgagcctcttgccaaagtgtcccttttaaaaggaaagaactggcgggggcacacagaaccaataagcc

SEQ ID NO: 808298 - DNA, 99 bp, Homo sapiens
ggaccagcttttcaaacaatacagatgagcacctctgaggagttggatgaaatgccagtgccggattctgaaagtgtattcattatccctggaagcgtt

SEQ ID NO: 808299 - DNA, 100 bp, Homo sapiens
tacaggtccttctgttccagaagaaaaagaaggccgaggactggacttaagcagtggcttagtggtgacttcattgtgcaaatcatcttctctgccagct

SEQ ID NO: 808300 - DNA, 98 bp, Homo sapiens
cgtgggtgccagagaggcggaagaggaggcctgatgggcctcgaagcggaggatccctgtgtcccagccgggcatggccgacccccaccagcttttcg

SEQ ID NO: 808301 - DNA, 101 bp, Homo sapiens
agttcgagcactaatatttaagaaagaagatgttaactttcagctgctgaaatgggttgcggattgaacaagttagagaaacgtgatgaaaaacggcctgg

SEQ ID NO: 808302 - DNA, 100 bp, Homo sapiens
cctggatctgcgatctgtttgtggtgttcctccaagaaaagctggttatattgaagacctggttttgatgctgcctcagaacatttgggataacctatat

SEQ ID NO: 808303 - DNA, 100 bp, Homo sapiens
gtgggcaccgatcttcctgttcattctgcaagaacccaagagaaggaaatcatcgagttccccatcctaaagctaaatggccggaccatggagattgagt

SEQ ID NO: 808304 - DNA, 100 bp, Homo sapiens
cttcaggatcaggttcacaagaaaccaagatcccaatcagtctagtactaagattaagatatgatgcagccattgacctgtttacacgttcatgtgctgg

SEQ ID NO: 808305 - DNA, 98 bp, Homo sapiens
tttgaacaagcaaagaaggtgataaccatgtttgtacagcgacaggatgaatctcacttcctcaaaaacagtaggactgcccgctgtcgagcagctat

SEQ ID NO: 808306 - DNA, 100 bp, Homo sapiens
ttacttctccgccaacgcggtcatctcgcagaacgccatcaaccagctgtgctgctacccccgtatgatgatgccactgtgaatggtgctgccaaggagc

SEQ ID NO: 808307 - DNA, 100 bp, Homo sapiens
aggctcaacggcagaagcttcaccacaaaagcgaaatgggcacaccacagacatgtcctggacttgaacagtatgctattaagaagtttgctgaggcatt

SEQ ID NO: 808308 - DNA, 100 bp, Homo sapiens
agactacggtgattctctggcaaagcgaggcagtgttgccaacttggcctgttccatctcaaataatgaagaaggtgtaaagcttgttcgaatgtctgca

SEQ ID NO: 808309 - DNA, 98 bp, Homo sapiens
ctgcaaatgctattgtcagtcagcaaactccacaaaggctagagtaccgtggcacaatctcagctcattgcaacctctgcttcctgggctcaagcact

SEQ ID NO: 808310 - DNA, 100 bp, Homo sapiens
cgtcccctctgcagcctctctgacaagtgtttgcctgagaatacagatcaacccacagaacaaagcggatttccaaggcatctccccagagcgagccttt

SEQ ID NO: 808311 - DNA, 100 bp, Homo sapiens
cttcaagagaaatggagcccttctccaaggtggggaccaaggcatactgaacacattttttagcagctgggcaacaacagatatcagaaaacacctgccg

SEQ ID NO: 808312 - DNA, 99 bp, Homo sapiens
ccaagagttgaagatgtttcaaggagaggcccagcatatacaaaggcatggaagtatgaaaatggcccgatgagagaaagggaaagttaaggatgctgg

SEQ ID NO: 808313 - DNA, 100 bp, Homo sapiens
tcggactgcaatggttgctgctctgagccccgcggatatcaactacgatgagactttgagcactctgagaatttacatagtacatgacgaagttaaggat

SEQ ID NO: 808314 - DNA, 100 bp, Homo sapiens
tatgaccaaaggactcgccctctgggaggcttaccgagagtttgaaagtgcgattgtggaagctgctcgggactggagtccagagttgccaccagatggg

SEQ ID NO: 808315 - DNA, 100 bp, Homo sapiens
ctggccaacttctgctacagacgactcaataaccttctgttcggtgatgaaattatcactaatggttttcattcctgtgaaagtgatgaggaggatagag

SEQ ID NO: 808316 - DNA, 100 bp, Homo sapiens
actgtgacttcagagacactgccaagcagccttagccctagtgtagagggctgatcccttatccaacatggttctaaccttcagtactaaagaagatgca

SEQ ID NO: 808317 - DNA, 100 bp, Homo sapiens
gtcaataacagccaaactgagacacataatgttttctacgctgtagaaaatctctgttcttacaagatttctgcaaacttgtacaaacagctgagacaga

SEQ ID NO: 808318 - DNA, 100 bp, Homo sapiens
ttactgatacagagacgatggtcggaatcagatttgaaaatgaaagtgttggcctgctgtcttacagtcatcggccctccccactgttcccactgaatgg

SEQ ID NO: 808319 - DNA, 98 bp, Homo sapiens
ataatatttatggagcatatattatggaacacagactggtgaggaatattttaatatctcaagatggtgttaaattgggatcatatgttttcaaaaaa

SEQ ID NO: 808320 - DNA, 100 bp, Homo sapiens
gaacaggaatctctgttgacaggtctccggataactgtgctcctgacatccttccttatggttttgggaactggtctaagatgcatacctatatcagact

SEQ ID NO: 808321 - DNA, 100 bp, Homo sapiens
agattcaacaggctgccaataaaggagcaagatggctaggggacctaatccggagagacatcctgtactacaaaggccgcattgacatggataaatatga

SEQ ID NO: 808322 - DNA, 100 bp, Homo sapiens
caggctcaagcagtcctaccatgtcagccttcccagtagctgggaccacagacctcagaaagtactactacagtaaaaagcaaagttgatgaaagagaaa

SEQ ID NO: 808323 - DNA, 98 bp, Homo sapiens
tgctctggagtgccgtccccggccttctcgcggccgtgatgcacctccctctgcggtggggtccgggacatggcaggaatactcccccagttgcaaga

SEQ ID NO: 808324 - DNA, 100 bp, Homo sapiens
gggagtccaggtaccagccagtccagacaccgttccacagccttctctcagagttgccatggagaaaattccagtgtcagcattcttgctccttgtggcc

SEQ ID NO: 808325 - DNA, 98 bp, Homo sapiens
ggacaccttctaagagtttggcgagtcagtgactgaagcgcccgtccattccaaggcatcctgtacacgtcaaagaagagcccctcgatccagaggaa

SEQ ID NO: 808326 - DNA, 99 bp, Homo sapiens
actgactcacccagagcaacttccagtcctgcaagctccattcatgccatcaagttttatcgtagggctatgcaacttgtacctgatatagagttcaag

SEQ ID NO: 808327 - DNA, 98 bp, Homo sapiens
gcactatgacacagcaattcttttcaccagacaggaaggtgtcttgctgcaggtaactaatgaagaagtggtcaaccacagagtcttcaagaaataag

SEQ ID NO: 808328 - DNA, 100 bp, Homo sapiens
gctaccaatattctactttctgtctctatgaatgtgactaccctggttacctcatatgttgtctgcattcaaaagagcattctattaaagctaccttaat

SEQ ID NO: 808329 - DNA, 98 bp, Homo sapiens
ggattctctcaggacaaacagtgcttccttctctctggtaatgcccaggaaaccagaaaggtttctgagtcccttcaacatgatcctgggaggaatcg

SEQ ID NO: 808330 - DNA, 100 bp, Homo sapiens
ggtccctgtgacctgtggagacacggccagatctgccctccactattgacctgaaaagtggttctggaaaagtgtaccaaggccctgcaaaaggtgctgc

SEQ ID NO: 808331 - DNA, 98 bp, Homo sapiens
ttctcgttcaagttaatccaggtgagactttcacaataagagcagaggatggaacacttcagtgcattcaagaaattcattgtacaacacacgaaccc

SEQ ID NO: 808332 - DNA, 100 bp, Homo sapiens
atttgctttctcggagcaaaagtgaaggatatggagtaatagtactaaatcccaatgaaaactatattgaagtagaaaagccgaagatacacgtacagtc

SEQ ID NO: 808333 - DNA, 100 bp, Homo sapiens
tttacagaaggatgtggtacagctccatgctcctcgatatcagtctatgagaaggagttaatgatgaagatgtcagactaatgttatgggacactgcagg

SEQ ID NO: 808334 - DNA, 98 bp, Homo sapiens
ggagaggcggcggcggcctcggctgaagaaagaaggtgggagcggagagcgcaggcgtggagaactacgatgacccgcacaaaacccctgcctcccca

SEQ ID NO: 808335 - DNA, 98 bp, Homo sapiens
tttggtctcttcggaaagactgttccaaaaacagtggataattttgtggccttagctacaggagagggtctaaactgacttgtgaaaagattgtcaaa

SEQ ID NO: 808336 - DNA, 98 bp, Homo sapiens
cagctgcctcaaatcgtcgtagtgggaacgcaggttaaccagcttcgtggcatcctcaagcttctgcagctcctaaaagttcagaatgaagacgttca

SEQ ID NO: 808337 - DNA, 100 bp, Homo sapiens
cccaatgacatgcaagttggacagacgggaaaaatagtagcaccaaggctgaggggatctggcggtggagcgctaggatcagacgcccccgcgatgacca

SEQ ID NO: 808338 - DNA, 98 bp, Homo sapiens
ggctcgatgctggacatacttgaccggggtcatcctagggaaaacactatcctctgagatcccagatcatgaggttattgcagctgactgcaaaaggg

SEQ ID NO: 808339 - DNA, 100 bp, Homo sapiens
atgctatgaggatgacaaactctggagtaattggagccaagaaatgagtatagggctgaaaaactgggtggtagctgaagacgtggtgtttaaacctgtg

SEQ ID NO: 808340 - DNA, 100 bp, Homo sapiens
gcagggccccgagccggcccgggtcgaggcctcaggagtgcaagtagctgatgaagtatgtcgcattttttatgacatgaaagttcgtaaatgctccaca

SEQ ID NO: 808341 - DNA, 100 bp, Homo sapiens
tgcctcctgggaaagaggatcaccgtcatccacagcaaggactgtttcctcaaaggcaggatggggaagcagaatagcaaactggcccctgaagtgatgg

SEQ ID NO: 808342 - DNA, 100 bp, Homo sapiens
tcaggatgagataactgaaagggaagcagaaccatactatggttacgactcactgattaaaaagagggactttttcaaatactttgcacttttgattgtg

SEQ ID NO: 808343 - DNA, 98 bp, Homo sapiens
tgtctctgggagggcgctgctttccccggccacccggcgcgatgatccagaatgtcggaaatcacctgcgacggggaaatcctcattgacgattcaat

SEQ ID NO: 808344 - DNA, 100 bp, Homo sapiens
actctagaagtttctcccttcttcaagtgccacgaggactggaatgtcacgtggaataccagcaaccccgacttcaccaagtgctttcagaacacggtcc

SEQ ID NO: 808345 - DNA, 100 bp, Homo sapiens
tggaagcaagaatttatcaaaggaaagatggatccagacaaggttttcaaatggaacattttgatgcatcacttagtacctatttcaaggcattgctagg

SEQ ID NO: 808346 - DNA, 100 bp, Homo sapiens
gctgccggcaggacctttctctcgctgccgctgggaccccgtgtcatcgcccaggccgagcacgactggtcgaattgacaaatcttaccctacagtatgt

SEQ ID NO: 808347 - DNA, 99 bp, Homo sapiens
tgaaggtattccacaatgctctcaagctagctcacaaagacaccaaagtttctattaaactctatgatggaccacggcagatgggacgctactgtggag

SEQ ID NO: 808348 - DNA, 100 bp, Homo sapiens
ttaataatgatgttgcaaagagtggcaggttcaagaaagagattgtcgttgatggacagagctatctgctgctgatcagagatgaagggggccccccgga

SEQ ID NO: 808349 - DNA, 98 bp, Homo sapiens
tcctgatttctgcagctctgtgtgaagggcttcctgttgcagctgttccaggagctctgagtcctttggccattccaaatgctgctgcagcagctgct

SEQ ID NO: 808350 - DNA, 100 bp, Homo sapiens
tggtgccaggtgtccatccccgtgctgaggccactatgtacatggtatttgtatctatggaaacggagacttaaagtggctggttaattcaccaagcctg

SEQ ID NO: 808351 - DNA, 100 bp, Homo sapiens
cggcgctccggctcctcagagagcctcggctaggacatggatttgattgacatactttggaggcaagatatagatcttggagtaagtcgagaagtatttg

SEQ ID NO: 808352 - DNA, 100 bp, Homo sapiens
taaggacaaaagccaagaggaggacagttcgctacacagcaatgcatcgagatgctgcagttggagaagaaacttgaacgtgaacttgaggatgatgcac

SEQ ID NO: 808353 - DNA, 100 bp, Homo sapiens
agagcacagcaatggaggaaacagctatatgggaacaacatacagtgacgcttcacaggtttttgaagagcctgaagatcccagcagtaggtccttcttc

SEQ ID NO: 808354 - DNA, 100 bp, Homo sapiens
agaagagcttctcctcatcaactggggatgattacagttcttcctaaaaaaggtaaaataccatgaagattttgaaaaaacaaaggggagaggctttact

SEQ ID NO: 808355 - DNA, 100 bp, Homo sapiens
aggcctctccagtttcatctgtacagatgcaagttctgctggatcaaccaggaataaagatccaacaagacgtccagaactagaagctggtacaaatgga

SEQ ID NO: 808356 - DNA, 100 bp, Homo sapiens
attcatgttgtctacaagagatcagctgtagaacaggctcccatagacatgtccaaagacttccactacagagcaacatggccaacgccctggccagcgc

SEQ ID NO: 808357 - DNA, 98 bp, Homo sapiens
gtacagtcctccccagtgtgtgccggagaacacgggctacacgtatgcgctcaggactccagaagacctttccagattcgtggttgagctgcagcaga

SEQ ID NO: 808358 - DNA, 98 bp, Homo sapiens
cacactacctacagtgaaatagcatggatttcatccattatgctggctgttatgtacgcaggaggtgggccatgcacagacacagctcatgtctcatt

SEQ ID NO: 808359 - DNA, 100 bp, Homo sapiens
gaagtctttgaccatgcaagttttaaatagcatggcagcatttattgcccttccatcaatcttgcaaagaatcttacagcaattttccagattattcaaa

SEQ ID NO: 808360 - DNA, 100 bp, Homo sapiens
ggaggaattgctggtgccttcattcatgaaaagcatgcccatacgattaaacctgcagacttgaaagattatgaagcttggcttggaattcatgatgtcc

SEQ ID NO: 808361 - DNA, 100 bp, Homo sapiens
ctgggagactttgaagaccagtcctgtttgcagggaagccccacttgaaggaagaagtctaagagtgaaaagttccacctggtgccaagcatcaacacca

SEQ ID NO: 808362 - DNA, 98 bp, Homo sapiens
caaattagaaaatcgtcatctttctgaaatggtgatgaaattggaattgggtttacatgagaaccactcacgaattcttgtttggtgcccttgctgaa

SEQ ID NO: 808363 - DNA, 98 bp, Homo sapiens
gaagaggaatgttccctgacaatttcgttaagagcactgcagcctgtggtgttgaggctcacagcgatgccatccagccctgccacatcagagaggcc

SEQ ID NO: 808364 - DNA, 100 bp, Homo sapiens
gcttgaggctcgcgagcctccttcgccgcgccccacttgctcgtgcactttacacacatgagatacccagaaagcggtactctagaaatgaatgtcaagg

SEQ ID NO: 808365 - DNA, 98 bp, Homo sapiens
aatcaacatttaccgaaagccacccatctacaaacagcatgccctggaacagctgctgacagagttggatgacttcctcaagattcttgaccaggaga

SEQ ID NO: 808366 - DNA, 100 bp, Homo sapiens
ccgccatcctcggcgcgactcgcttctttcggttctacctgggagaatccaccgccatccgccaccatgcggacttggctgccctgcttcccgacctctc

SEQ ID NO: 808367 - DNA, 100 bp, Homo sapiens
aaatagttgctcttttaaatgcttttggaagcagctgctggagtgtaataagtgccgaaacagctatcaccctgagtgcctgggaccaaactaccccacc

SEQ ID NO: 808368 - DNA, 98 bp, Homo sapiens
aggacctgccagagactgggagtgttgactgctgcaaggaccaagtccaatatcagatggaaatgatgcggagccttcgccatgtaaacattgatcat

SEQ ID NO: 808369 - DNA, 118 bp, Homo sapiens
agcagccatgaccgtcatgcatcttgccaagtttctccgcaacaagatggatgtgcccagcaagtacaagagcagccagcggcggacaatccttgaaatgctcctgggtttcttgaag

SEQ ID NO: 808370 - DNA, 100 bp, Homo sapiens
ggatcctctgtacgcccgttcactgctccagcccctcagaagggacgcctacagttggcagctatggctgtacccctcagtcattgcccaagttccagca

SEQ ID NO: 808371 - DNA, 100 bp, Homo sapiens
tctcctccttcttcctcaactatctcgctgacacgcagaccatcatggagcagttcaaccctagcctccggaacttcatcgccatggggaagaattacga

SEQ ID NO: 808372 - DNA, 100 bp, Homo sapiens
ctccagcgggtccccggcaaactccttccacttcaagactccaattccagggtttcagaaccgcatcgcagcatctttcctgaaatgcactcagactcag

SEQ ID NO: 808373 - DNA, 99 bp, Homo sapiens
ctgtctgatctgcgagcggcagcgcggcagtgacccgccctgggagctgcccccagcggctccttctcctgaaaaagccgaggaggagagtgagaggct

SEQ ID NO: 808374 - DNA, 98 bp, Homo sapiens
tgcattgtccattcgaagtgttggcagtcacagggtaatgaaagcatgggatgctcatgtgacagcagtttgctcccaagatgccagtgaacttgtaa

SEQ ID NO: 808375 - DNA, 98 bp, Homo sapiens
ccttactggttgcctaattttatggatgtcttcacgtggtctttaccgtttgttggagaaaaagattgggcccaaatggaaggatgtggtgaccaaat

SEQ ID NO: 808376 - DNA, 100 bp, Homo sapiens
tgagaagctttgtgagaagggcagaagattctggaacttttcaaagcctgactctcttcttgaaacagtggagcatcatacagagtttacttgtggttta

SEQ ID NO: 808377 - DNA, 100 bp, Homo sapiens
ctaaggaaaagagcactgggctgagactcaggagacctggtttctagccccagctgtacctctaattgtaaccttggagcgagatgcgagaacacttttg

SEQ ID NO: 808378 - DNA, 100 bp, Homo sapiens
gaggatttgaaataggaattgagaagaaaaagtcagcactttttgaagtgtctgaggttataccagtcatgacaaataattatgaagaaaatatcctgaa

SEQ ID NO: 808379 - DNA, 100 bp, Homo sapiens
aataatatagctggtattgaagagagttcctgagttggaggtagaagaagaaacccaagttcaagagatgactttagatgagtggaaaaatcttcaagaa

SEQ ID NO: 808380 - DNA, 100 bp, Homo sapiens
actcttcacctggactctgagtcgtcttggtcccaggagccagtagtgaaggcaacagtctgcccacctgtggacaccagagctgtaggtaaaacttgcc

SEQ ID NO: 808381 - DNA, 100 bp, Homo sapiens
catggtgcggctcatcttcgagagggctgcccttgagatggagttgctgcctctttggctctgcctgggttttcacttcctgaccgtgggctggaggaac

SEQ ID NO: 808382 - DNA, 100 bp, Homo sapiens
caagaatttagaggagaaactgacgattttaccaaatgttgcaagaactctggagttcttatggtagtaaaatgccggaaagaaaattctgcattgaaag

SEQ ID NO: 808383 - DNA, 100 bp, Homo sapiens
tgctaatggcggattaaaacctgtagatacgtttggctttaggagtctggtagggtgcagcctgaggcttgttcagcagaacaggtgcaagccacattgt

SEQ ID NO: 808384 - DNA, 98 bp, Homo sapiens
ctcaaattgatcaagcagatatgccagataaggcatggcagtcagccaacagcaggcatcatcagagaacttggaagaggcttggaggcagaaactga

SEQ ID NO: 808385 - DNA, 98 bp, Homo sapiens
aggaaagtttgaagaaagtgaattacatcaaaatcttgttactccacaggatccgctgaacataggatgttgccacaaaatctacctcgtgtattttt

SEQ ID NO: 808386 - DNA, 100 bp, Homo sapiens
ttactgggataattatccaaataaattgcaagcattctatccaaatgggggcttgtacatgacagctggaatagcctccagttgaggggcttggtggtgc

SEQ ID NO: 808387 - DNA, 100 bp, Homo sapiens
ctgcagctctccagcttcctctctgaaatcccagtcccaaaatccagtttcctggccgcctcctggctcaggaaaatgttggggcttttcaggaagcata

SEQ ID NO: 808388 - DNA, 98 bp, Homo sapiens
gatggctctgaagaggtcaaagaaacgtggatttgtcttcagcgaagcggaagtttgcagattccttaaatgaatttaaatttcagtgcataggagat

SEQ ID NO: 808389 - DNA, 100 bp, Homo sapiens
gagggatcattgaccaaatccaagaatgatcaagtctcggcctctggattatacctttgttcctcgaacttggatctttcctgctgaatatactcaattc

SEQ ID NO: 808390 - DNA, 98 bp, Homo sapiens
tactgtggaggtcaaaacaatttgagatacataagctggccttagaaaataaattgcctctaacttgtactggcacagcacggccacctatgccatag

SEQ ID NO: 808391 - DNA, 100 bp, Homo sapiens
gagaagcttcttcttgtgccgtgaacctcgttttgagattaagcttctccaatttgggaaatacctgctatatgaatgctattctacaatctctattttc

SEQ ID NO: 808392 - DNA, 98 bp, Homo sapiens
ctgctgcaaggaactgatagcttatggttctccattgtgatgaaagcacatggtacagtgcatttgcccagtataacatggatcagttcacgcctgtg

SEQ ID NO: 808393 - DNA, 148 bp, Homo sapiens
aggttattcgctctataggagtctatgatgtggtggagttgaaatttgcagagaatcgagcaaatggccagtccaaaggcaaaccgaatcattatgcaccaagcaatgacatatatggtggagagatgcatgttcgaccaatgctctc

SEQ ID NO: 808394 - DNA, 98 bp, Homo sapiens
actgatgggagcaagttgactaccaccagtggagtccaggatgaggtcagtcatatcatttggatcaaaaaatagaacaatcggagttgcagccaaaa

SEQ ID NO: 808395 - DNA, 100 bp, Homo sapiens
gatgttgtcaaggtggcctaccaggaggccaggggtgtcgccatgccagtcagaagtccagaaagaagagatagaaaagcatcagctaatgctcgaaaga

SEQ ID NO: 808396 - DNA, 100 bp, Homo sapiens
tcgggaataacacaccggagacttttggggggaaactaggtcgatggtcggcggcgcccggatgggcagctgagtgttatgtgccaagaaccttgcaaag

SEQ ID NO: 808397 - DNA, 99 bp, Homo sapiens
gaaccctcgcggccgcaacgtgtgccgtgctcccggccctcccaggcccaatacttcaaagcatcctacctctgctcaatatatattacttggagagga

SEQ ID NO: 808398 - DNA, 98 bp, Homo sapiens
cttttgagcagttggcactacccgtcttgaggaataacactgagctgaaggttgaagtggagagcttgaaacgagaactccaggacaagaaacagcat

SEQ ID NO: 808399 - DNA, 98 bp, Homo sapiens
cgccgccgccgccgccacccccgggctcggggtggcccccgcttcagtcccagggcaggattcttacagaagcagagattgatgctcaccttgttgct

SEQ ID NO: 808400 - DNA, 100 bp, Homo sapiens
ggctgaaaataaatagggaagatggagacaccctctgggggtcctctctgagtcaaatccagtggaggataagatcaatgccctcattaaagcagccggt

SEQ ID NO: 808401 - DNA, 98 bp, Homo sapiens
gttctgagaacagcagcagcagcagtgatggtggcagcaacaaggagggaaaaaagagcaggtggaaaaggaaagaaacattgtcaattgttgctgtg

SEQ ID NO: 808402 - DNA, 100 bp, Homo sapiens
gcgtcccccgggggcccgtactgcacatcgtggtggtcggatttcaccacaagaagggctgccagcggacaaggcaaaatctcagcaagttcggacctct

SEQ ID NO: 808403 - DNA, 100 bp, Homo sapiens
agtgtccagcgacagcttctgggagggttttggccaaattgggcgagggcacaaaataaccacttaccccttctcaccgaggaagagcgggagaaagggt

SEQ ID NO: 808404 - DNA, 100 bp, Homo sapiens
tgaaactctttgctcaacaatgcaaggaggtagacatccttatcagcacagcacttattccagatatgggaaaatagtctccacaaaggcaattttggat

SEQ ID NO: 808405 - DNA, 106 bp, Homo sapiens
catgggcgagtctacgatgtcacccgcttcctcaacgagacaggggcaagtgtccgagtggtgaatcagctacttacagagatggatggtctggaagcacgccagc

SEQ ID NO: 808406 - DNA, 98 bp, Homo sapiens
gaattactacaggggtgctgacaaactgtgtcgcaaagcttctttagtgaaggttatcaatgccgggaagagcacacacaatgaagaccaagccagct

SEQ ID NO: 808407 - DNA, 99 bp, Homo sapiens
gaaccgaagtttagcaatggaaaagataaagtgttttggttttgatatggattatacccttgctgtaattagtgaatgccaaaggcagcaactggaggc

SEQ ID NO: 808408 - DNA, 100 bp, Homo sapiens
gtgtcatggggcacagacccacagttcctgagaatgaacagggccagtgtcgttattatccttgtggagtaatagaatcaatactgccaattccagaaaa

SEQ ID NO: 808409 - DNA, 127 bp, Homo sapiens
caaagattacgtgagcatcttcgtctgcagtgattggcagctcctgcgggtctcctctgagcctccggcctccataagacccaaaacagatgacacctcttcccagtcccccgcgccttccgaaaag

SEQ ID NO: 808410 - DNA, 100 bp, Homo sapiens
ctgttggctggagtggttccttaaatgtcgaagaagggtacgcaataactgtttggtattttgatgcagatgagagagcacgagctaaagtaaaatatct

SEQ ID NO: 808411 - DNA, 101 bp, Homo sapiens
tcagctgacccttgtgaccagtccgggggcatggggtgtacagaaaatctcccttcagtgtgcaacttgctttggtgtttgctgttttattgccacagatg

SEQ ID NO: 808412 - DNA, 100 bp, Homo sapiens
cagttttccaaagaaattagaccattttcttcgtgagaaagaaatcgacgtgctgttttcataggcatacaagacagtatctggagtcaatggtccacta

SEQ ID NO: 808413 - DNA, 98 bp, Homo sapiens
agcggaccctggagaccacaagtgggctacgacgggtgagcatagctaccccaaaacagaaaccaaaaactccattttgctttggtaagtactgagcc

SEQ ID NO: 808414 - DNA, 100 bp, Homo sapiens
gataattatgactactctcacacggttaaatatacacccacccaacaggtgtcctggaaccagtcccccatgagtatcgatgaatgactacataagccac

SEQ ID NO: 808415 - DNA, 99 bp, Homo sapiens
taacacaggagctgtcctgaggctctggatgactttattcttcaaatggctttaccctcccagtagctccagccgtgctatcaagactaatcaggacct

SEQ ID NO: 808416 - DNA, 99 bp, Homo sapiens
gatggtgaagcagatcgagagcaagggttatgtaccgaaggactctaccgtgtcagcgggaataaaactgaccaagacaatattcaaaagcagtttgat

SEQ ID NO: 808417 - DNA, 98 bp, Homo sapiens
cctgttggtgcatctcagattcctgcagcatctgatcagctctgcaaggaagagagcttcacgtctctggtcagctattgacctgaaaagtggttctg

SEQ ID NO: 808418 - DNA, 109 bp, Homo sapiens
gaagagtcctgaccacaatggggaggacaacttcgcccgggacttcatggtttgggccccatggtatccctgtgacagtatttcccaaaagggaatataaggataaacc

SEQ ID NO: 808419 - DNA, 100 bp, Homo sapiens
gatcaagactgatgatgtcctggatctgaggaaattcaactactgaggaggttacggcacaaaaatgtcatccagctggtggatgtgttatacaacgaag

SEQ ID NO: 808420 - DNA, 98 bp, Homo sapiens
gctgccgcacctccgtagctgactcggttctgatctacaatggccaactggacatcatcgtggcagctgccctgacagagcgctccttgatgggcatg

SEQ ID NO: 808421 - DNA, 51 bp, Homo sapiens
catctccaacagcgacctgagcgcaatggctgccatccggaagaaactggt

SEQ ID NO: 808422 - DNA, 51 bp, Homo sapiens
cagtgctggtctgcctgacatgtgatcgaggaaacatctcaacatcttcta

SEQ ID NO: 808423 - DNA, 99 bp, Homo sapiens
tcacagctatggaggacttgcttttgttgaactggcattaggttaacagaatcattagcaatggcacctgcttcagcagtctcaggcctctacttctcc

SEQ ID NO: 808424 - DNA, 99 bp, Homo sapiens
cagaagagaaaaagcccaggcataaaatcatctccatattctcaggcacagagaaagttgttgacctcctgtactggagagacattaagaagactggag

SEQ ID NO: 808425 - DNA, 98 bp, Homo sapiens
tctcctcgcgctgcaaggatgctcctgggatttcggagaggccgcaggagtcatttcgtgaaaggtgtagcagtcactcggcctacacccacagcatc

SEQ ID NO: 808426 - DNA, 100 bp, Homo sapiens
gctaattgtcccttctacagtaaaacaggagcttgcagatttggagatagcttgcagttccccacaatgatgaatggacccgatttgccaggacccttgt

SEQ ID NO: 808427 - DNA, 100 bp, Homo sapiens
ggaagaacaaaggaaggggagcccgggacccccgggggcgcagatccgagtgaagcctgacaggaccggtgtggtcacggatggtgtgaagcactccatg

SEQ ID NO: 808428 - DNA, 100 bp, Homo sapiens
ctaccatggaccatcctgctggtcagcactgcggctggtgtgagttcttgatacgaatgaaaggccaagagtttgttgatgagattcaaggtagatatcc

SEQ ID NO: 808429 - DNA, 100 bp, Homo sapiens
aagcacagcatcatcctaaggacgcagctgtctgtgagggtccatgcctgcatcggaaacaatgcctgtttcccaagtccaaattataaccccttcacat

SEQ ID NO: 808430 - DNA, 99 bp, Homo sapiens
cccgctgcatttgctcagccctgggactcctcgctccttggatggcagtggttctgagccaggtttgttgaatgtacagagtgcggaagaaagatgcat

SEQ ID NO: 808431 - DNA, 100 bp, Homo sapiens
gggatgcaaggtccaaatctcagcaacccctgtgcttctccccaggtccagccaatgcattcagaagccaaaatggaacttaaaaggagtctagaaaatc

SEQ ID NO: 808432 - DNA, 100 bp, Homo sapiens
acttcagaaagacagagattttactgctgaagattatgaaaaggaagccacagatgatggacataacaacaaccttcttcctcagattattcagtgtttt

SEQ ID NO: 808433 - DNA, 100 bp, Homo sapiens
gccctcacggaagattctggaccctaacactggggtacttaaacttcacccttgtttagcccctattaaggttgctttggatgtaggaagaggccccaca

SEQ ID NO: 808434 - DNA, 100 bp, Homo sapiens
cagcctggaacaccgggatctaaggttatcccatcatcaggtagcaagttgaaacgaccaacaccaacttttcattctagtcggacatcccttgctggtg

SEQ ID NO: 808435 - DNA, 100 bp, Homo sapiens
tgtcatcctatggatgattcaattaggttatccggtgttggctcctgctgcttactatgaccaaactggtgcccttgtagtgaatgcaggcgcgagaaat

SEQ ID NO: 808436 - DNA, 100 bp, Homo sapiens
ggcattgcttgggccccacattcatcctgccacatctgcactgcagcttgtacctccttttaaacctcaagtaacatctgagacagatactagatatttt

SEQ ID NO: 808437 - DNA, 99 bp, Homo sapiens
cagcacgggggctccgaggcggggtctgggtgttgaggggcgactggagccatggcggagtcggcgcctgctcgggaatactcccccagttgcaagagg

SEQ ID NO: 808438 - DNA, 138 bp, Homo sapiens
tcacttcagtgcctcagagtgcagttcccaaggaggcttcaagacaaagggccccttacacaccagacaggcagaaggagaagacagcctgaagaagatgcagctgatggagcttgcgattctgaatggcacctacag

SEQ ID NO: 808439 - DNA, 100 bp, Homo sapiens
aggagttggaccagtcaacatctaaaatggacccaagtggggtcaaagtgctggaaacagcagaggacatccaggagaggcggcagcaggtcctagaccg

SEQ ID NO: 808440 - DNA, 98 bp, Homo sapiens
agtggcacctgcgcgaagctggccaaagcctgcccagacggctcacctgtgcgggatggaacaaaaggcaaatctgagtagcctccaagaggcacaca

SEQ ID NO: 808441 - DNA, 100 bp, Homo sapiens
ccaggtgttaccccctccagcttagacttcctggcctccagaatgagctggaagtcgagtgtgctactcaactcaggagatttggagacaaactgaactt

SEQ ID NO: 808442 - DNA, 100 bp, Homo sapiens
cctgtgtctcgtcttgtatctctaattggaagcagtcagaaccatccagtcctggacatgggaccacatcggcgactgcagtggacgtggctgggccggg

SEQ ID NO: 808443 - DNA, 100 bp, Homo sapiens
atcaatacttttcggattaaatctggaaatgaaaatggagagttctacctacgagtggtgaagcagtattttccaatttgaagattcatttgaaggtggc

SEQ ID NO: 808444 - DNA, 100 bp, Homo sapiens
aagcgcggaattcagaggcagagttgactatattgtggagtatgactatgatgctgtacatgatgatgaattaactattcgagttggagaaatcatcagg

SEQ ID NO: 808445 - DNA, 100 bp, Homo sapiens
ctaccgcaactctcagttcgagagtaaagccagctgaggtgggtgtcctggttggcaaagaccggtcaagtttttacgtgaatgggctgacacttggggg

SEQ ID NO: 808446 - DNA, 98 bp, Homo sapiens
cttcggtcttcgtcgatgcctgactcagggtgagaactctgtctcagtcgacgggaagtgcagtgactccacgctactgagcaacttgttagaagaga

SEQ ID NO: 808447 - DNA, 100 bp, Homo sapiens
agaggtgccatgaatttgttactttttcttgtccgggtgcggataagggacccgacactgatgccgtttgagcaaggaagacattgaacgtatggtccag

SEQ ID NO: 808448 - DNA, 126 bp, Homo sapiens
ccgcgtgtgccctaagcacacctggagcaacaacctggcggtgctcgagtgcctgcaggatgtgagggagttagtacagaagaaactccaagcctcccagcccagcgagagtctcattcagctaat

SEQ ID NO: 808449 - DNA, 98 bp, Homo sapiens
tggccttgtgctctttcatcggacttctaatgatgaggctgtggacccaggctagacagatgggatggtatgcagcaaagtgcatggctgcagcgagt

SEQ ID NO: 808450 - DNA, 100 bp, Homo sapiens
ttgagctattaaaagaattaatggatctgcagaaggatatggtggtcatgttgctgtccatgttagaagaaaactgtcgctgaaaagcaggagaagagaa

SEQ ID NO: 808451 - DNA, 98 bp, Homo sapiens
cgatgggggcgagggcgaagacgagatccagttcctgcgaactgttttgcaaaaggcatcaaattaaatcaagttcaaatattccctgtgtccctaaa

SEQ ID NO: 808452 - DNA, 100 bp, Homo sapiens
gtgaaaacaatgaagattatttacaatgctaccctgctttttctggtgtcctgaacctggaagttgtgctttttaagtaagactttgaccccgacgcagg

SEQ ID NO: 808453 - DNA, 100 bp, Homo sapiens
tctcaaagcatttacagtacctaaaaacaggtccctggcgagccccttgcaggtggtaaagccaaaatctccagaacccgaagcaacgctgacatttcca

SEQ ID NO: 808454 - DNA, 100 bp, Homo sapiens
acggctacatcttttcgtcgcttgccggctgtctgatgaagagcagcgagaatggcgcggcccgccaagctgccccctgtgtgctattctttgatgagct

SEQ ID NO: 808455 - DNA, 100 bp, Homo sapiens
ggaatccctccagaacaatccttggaaactgctaaggcagtaaagcctcatcgcattctccaggccttacggcgttatgtccgtgctgagaacaaagatc

SEQ ID NO: 808456 - DNA, 117 bp, Homo sapiens
agcagcagtagctatggcagtggcagaagattttaattagtgacaaaaatgctgagtttcttccgtagaacactagggcgtcggtctatgcgtaaacatgcagagaaggaacgactc

SEQ ID NO: 808457 - DNA, 99 bp, Homo sapiens
gagaaattttcagacaacatttctactgcatctgaagcctcagaaactgctggcagcggtcctcagaatggttggaatgaccctccagctttgaacaga

SEQ ID NO: 808458 - DNA, 74 bp, Homo sapiens
ttagagacatactaatgtacatgatctgaattctacaaacacattgtgctttctggagggtctactatgtatcc

SEQ ID NO: 808459 - DNA, 112 bp, Homo sapiens
gagaccctgatgctggaattgatgaagctcaagttgaacaagatgctcaggccaaacaccagagcaccctagaaggtttaactaaaagaatgctcatgtttgacccagttcc

SEQ ID NO: 808460 - DNA, 98 bp, Homo sapiens
ggctgcagccctcactcttcatggtcactggagagaagtatgagctccatgcagggactgagtccaccccaagtgtcgtcgtgcacgtgtgcgacagt

SEQ ID NO: 808461 - DNA, 99 bp, Homo sapiens
gctcacccaggaacaagtatctgacagggaacttaggctgcggaactatgtcccggaggatgaggacctgaagaagaggagggtgccccaggccaaacc

SEQ ID NO: 808462 - DNA, 99 bp, Homo sapiens
aatggtccgagcatgcattgccattatctgtgaactaggttggacacgagttgccgctggttgtccaaatcaacaaccaggtcgtccagctcctgctga

SEQ ID NO: 808463 - DNA, 100 bp, Homo sapiens
ccctgcccaacagaatttatatagagatgtgatgttggagaactacagaaacctcgtctccctggctcctataccatttagaaagaaagaaaaacaagaa

SEQ ID NO: 808464 - DNA, 100 bp, Homo sapiens
gccaggtgtccatccccgtgctgaggagccatgtggctagaaatcctcctcacttcagtgctgggctttgccatctactggttcatctcccgggacaaag

SEQ ID NO: 808465 - DNA, 100 bp, Homo sapiens
tttgtgaagcggcagctgaggagactccggcgctcgccatggccgacgaaaagcccaagcactccttgctcaagacccctccccagtacctacccttcca

SEQ ID NO: 808466 - DNA, 98 bp, Homo sapiens
acctgtcaggagttcattgcaaatctgcaaggggtaaatgagggtgttgatttctccaaggatctgctgaaagttggccttggggaggcactattaga

SEQ ID NO: 808467 - DNA, 100 bp, Homo sapiens
tcagattaaggaatgtcatttaaatgctgatggagtgtttatcggtgcaatgtttggaggcgacacactctatgaacttcggtgttccttacagttagcg

SEQ ID NO: 808468 - DNA, 98 bp, Homo sapiens
ccagcctgtgctcctttccctcatccagcagctggcatctgaccttggcactcgaactgacctcaagctcagttcaccaaccgctgcctgctcaagtg

SEQ ID NO: 808469 - DNA, 100 bp, Homo sapiens
aaggcttggaacccattggaaatgtccatccagttgggagctatgagtcctctgaaatgaacagcatagagctcgaggccatgagcagatataccagccc

SEQ ID NO: 808470 - DNA, 100 bp, Homo sapiens
ctctgcatcccagccatcacctggatttacctgttttctgggagcttcgaagctcctctggtgcaagtgtggtagctattgacaacaaaatcgagcaagc

SEQ ID NO: 808471 - DNA, 50 bp, Homo sapiens
ggagaagaagggatggcagagaagtaacaacatgctgtaccccaaggaag

SEQ ID NO: 808472 - DNA, 100 bp, Homo sapiens
ccccgaggtgcaatttgccaacgtgctcaccatggagcccatcgtgctgcagtacgtgcctcatgatcgcttcaacaagaagccaagtacaagaagctgg

SEQ ID NO: 808473 - DNA, 100 bp, Homo sapiens
cgctggagtccgcgcctccctggtgatcctggtggagggattgaaatgtctgagttcatccgagaggccacacccccagttggttgcagttccagaaatt

SEQ ID NO: 808474 - DNA, 98 bp, Homo sapiens
cgcggagcacggaggacggggccgggcgacctgggcaccagcaggacccgaggccaggagccaggggcccagaagactgcgccatggggctcagcgac

SEQ ID NO: 808475 - DNA, 100 bp, Homo sapiens
cttagaggacttccctttggatgtagcaaggaagaaattgttcagttcttctcagttccagtctcatcagattttccatgtcctggtggtggcagcagcc

SEQ ID NO: 808476 - DNA, 98 bp, Homo sapiens
agctccagagagacgtgaaacatgtgaacactcaagtgaagcaaaagccttccatgattaccagcaagatgaagagcgacgtcggcagctgagagaga

SEQ ID NO: 808477 - DNA, 99 bp, Homo sapiens
gaagacgtgcctcgtccgaagattcactcaggtgctggccacagggctcagtgccctgtactcatcactgcctcgaaagattgaggttccaggggatga

SEQ ID NO: 808478 - DNA, 98 bp, Homo sapiens
tgagtgtcataattccccgggcaagggcgaaacttaacctctctccacatggaaccttcctgggccaaaacagagtggagtacgagaaaagggtccga

SEQ ID NO: 808479 - DNA, 99 bp, Homo sapiens
gaatatccaaagccattcactacctgcacaacgttcaaccatgctcggtcatctgtggcagtatatcaagctttccagttctcagggaacaatagaaac

SEQ ID NO: 808480 - DNA, 98 bp, Homo sapiens
aagactctgagcccccgaactctgcaaagcctccagaggacataccacctccaggatcaggatgcagagccaaaggtcattccaaatgctatatgtgg

SEQ ID NO: 808481 - DNA, 99 bp, Homo sapiens
gcgggacccggcggggcgcaccacagagaccggcttcaatatcttcacccagcatgattctgaaaaagagttccacgtcctcccttatcgagtctttgt

SEQ ID NO: 808482 - DNA, 100 bp, Homo sapiens
ggtttttcggatcatgtctggtggctccgcggattataacaggacagagcgggatgccaccagcttgtccaaagggaagttccaggagctcctggtgggc

SEQ ID NO: 808483 - DNA, 100 bp, Homo sapiens
cctgcagatgagacaagaacaattatttctttggacacttcacaaatggatgacgatgactattcatcatctacgagtttgcttggtcagaagaagccag

SEQ ID NO: 808484 - DNA, 100 bp, Homo sapiens
atactggctcctcttgtgaaacggtcctaaaatctctacacttgccaaaaaacaacagtctttatgtccttacaccagatttgccaccaccttcatcatc

SEQ ID NO: 808485 - DNA, 99 bp, Homo sapiens
cgctcggcgatggtaggcgtccctggagcggccgccttccagcttgacattcgtgaaattaaggagatccgcccagggaagacctcacgggactttgat

SEQ ID NO: 808486 - DNA, 100 bp, Homo sapiens
gcacgtggaactgccccacatcaacctcctttccaagatggacctcattgagcattatgggaagctggtgtgttccatgggaaccggtacaagcagactc

SEQ ID NO: 808487 - DNA, 100 bp, Homo sapiens
aaatcagaatgagagcacccattcaggaaacctgaacagggaaggtgaacccctgtcctgaccaaaattggtcagccataatggcaggtgaagaaattaa

SEQ ID NO: 808488 - DNA, 100 bp, Homo sapiens
ctccagcaggtcattccgtatcacaatcctgcctcagattcgacggaggcgccttgcacgacttgctggtggacagacctctcagccaaccaccccactc

SEQ ID NO: 808489 - DNA, 100 bp, Homo sapiens
gagacaccctctgggggtcctctctgagtcaaatccagtgagctggaagtcgagtgtgctactcaactcaggagatttggagacaaactgaacttccggc

SEQ ID NO: 808490 - DNA, 98 bp, Homo sapiens
caaatacagtgacagcacaggtcacagtaaggccaaaaatgtgcatactcacagagttagagagagggatggtggaagaggagcaggacttggatggt

SEQ ID NO: 808491 - DNA, 99 bp, Homo sapiens
ccagcttgcgaagtgtgagaaacaacttcactatactgacaaaccttcatggtacatctaacaacagcgctggagagcgaggtggcttcaataagcctg

SEQ ID NO: 808492 - DNA, 98 bp, Homo sapiens
gggaaccatggctgccccgagaggtaatgactttacatgagtttggaactggtctctagtgggaagttgtgggaggatgaacacagaagagctggagt

SEQ ID NO: 808493 - DNA, 99 bp, Homo sapiens
tggaagcaggactgcgccgcgtcttcctcaagcgtgacgacagcatgtacgatccctgaatgggcccgtgggcatatttagtcattcatttttgatcag

SEQ ID NO: 808494 - DNA, 50 bp, Homo sapiens
catcggatctaagatccaaaagtgacagtggtgctgtttgcagctctgag

SEQ ID NO: 808495 - DNA, 98 bp, Homo sapiens
caaaaatctcaagaaagaggtgggcaagatcctgtgcactgactgcggtgatgcaggttctgaatgctgatgccattgttgtgaagctgaactcaggc

SEQ ID NO: 808496 - DNA, 98 bp, Homo sapiens
actaacgcaggatccggctgccgaaggtcctcgccaggtatctcgggggagctttgtgccttgatggatcaagttcatcatatgcagcactcaaaatg

SEQ ID NO: 808497 - DNA, 144 bp, Homo sapiens
atccactgcaaggagattgacctggtgaaccgagaccccaagaacattaacgaggacatagtcaagtatgaaaagacacagactgtactctcagaactgaagttgaagtttgaaatgactgagcaggaaaagcagtcaatcaca

SEQ ID NO: 808498 - DNA, 98 bp, Homo sapiens
cggtcatggttcagcacatccagcccgcagcgctcagatcgcccaggaccacaccgcagcgtaactgcaggcctctcagcgaaaaagggggaaagcaa

SEQ ID NO: 808499 - DNA, 100 bp, Homo sapiens
ccctgtgaatgtgtttgctctcatgaacatgcaatgagaagactgatcaatctgtttcaggcaaatagttggaaaaatcttatcctcaaagtatgtcaag

SEQ ID NO: 808500 - DNA, 100 bp, Homo sapiens
acattgccaagttatgcagccttaaacgacttgttctctatcgaacaaaagtagagacactcctagaatatgcagagaaatggaaaacttcagaagatcc

SEQ ID NO: 808501 - DNA, 98 bp, Homo sapiens
aggactgcgcccccgggagcgggcgcccagaggagctgaccagtgctttggtgcatctaaaactgcatctttttattcagatctttactcttgcattc

SEQ ID NO: 808502 - DNA, 99 bp, Homo sapiens
accacctggtcggggaggagaccatggctgactacctgctgtacaccctcaacaaacaccagcgctttggctgcatcttcctcccgtgaggctggccga

SEQ ID NO: 808503 - DNA, 100 bp, Homo sapiens
caaactggaacttatgctgtagacatttctttgtggtttatctaaaaaccaaagcaagttgaagtcgattgccaacagtgtatgctcgaaatcctggata

SEQ ID NO: 808504 - DNA, 116 bp, Homo sapiens
gctaatcagtgaagatgtgactaatgagctgctggggaagtcaagccttctggcatccgcttcgatcctgaaattccgcaaacactacgactagagtttgctaaggcaaacacgaa

SEQ ID NO: 808505 - DNA, 100 bp, Homo sapiens
aggcgcatgcacaccgtgattgctcactccaactgcatcgaggtctttcccgaagttatgcagctcccagagatcaagcaatcccacagagtattgatga

SEQ ID NO: 808506 - DNA, 98 bp, Homo sapiens
agagacaagtaaactctcagagtaactgtcccctctgactaccatttctaagttgaagattcctgtctctggatccaaatcagagggccttctctacg

SEQ ID NO: 808507 - DNA, 100 bp, Homo sapiens
ccatcatccttcgctttgctattcaggatatttcggttgaaggaacgaatgatcacacactttgaaaggtccaaaatggagtaaggaatgggaagatttg

SEQ ID NO: 808508 - DNA, 100 bp, Homo sapiens
agccacatggagacattcttgcgctgcatcgaagcctcaggcctcagaagccacaggaacatggcctaggcatggctcagccagcagccccctccctgac

SEQ ID NO: 808509 - DNA, 117 bp, Homo sapiens
gactagcggcggcgggagcggcgccgagaggccgtgcgggacgcgggcgccaggaccggccgaacgcagagaattaaacaaccaccatgtcgagcaaaaaggcaaagaccaagacca

SEQ ID NO: 808510 - DNA, 99 bp, Homo sapiens
gactgctgagagaggagctgggaggagcactgcaaatttcactttggacacgtgagtcagagcccctagtccaattcctgacccttcagtagcaactgt

SEQ ID NO: 808511 - DNA, 100 bp, Homo sapiens
tgggccctctacctttcccttggtgtgctctgggtggcccagatgctactgggtcagataccaggcccaggttccatgatgcccgggcagcacatgccag

SEQ ID NO: 808512 - DNA, 100 bp, Homo sapiens
ggaggacttgcagaagtaccacaacagggacacctggttccagctgcagcacgtggacgctgactcggaagtgcagccgattacacctcaacaagaaggc

SEQ ID NO: 808513 - DNA, 98 bp, Homo sapiens
cggcatgctggagaagctggagttcgaggacgaaggtgcttttgaagatgatgatatcacgcacgttgaaggaagtgtagatcctattcgagatatag

SEQ ID NO: 808514 - DNA, 100 bp, Homo sapiens
agtgtgccaccaacagacttctctcaactgattgattgtccagagtttgtaccaggccaagccttttgctcacatacagctttcaccaacaatcaccagt

SEQ ID NO: 808515 - DNA, 98 bp, Homo sapiens
gcgttttgatgatggagggctactacagatgctgcagttggagaagaaacttgaacgtgaacttgaggatgatgcacgagttattgcttgccggttcc

SEQ ID NO: 808516 - DNA, 98 bp, Homo sapiens
tgaatacagttttaatcttgtttgcaattatttcgaaggggagaaatcatctggatcagggaccttgctgcaagaaactgcctggtaggtgaaaataa

SEQ ID NO: 808517 - DNA, 100 bp, Homo sapiens
caattcttcgacatactctccagcttcaaatgacaagagcacctcaaaggcagcagcctcaaggagcagccatggccccagacttgtcgcacggatgcag

SEQ ID NO: 808518 - DNA, 98 bp, Homo sapiens
ttcatatggcatctcagaagtatgtgttacggagacatgctcttattgtacagaaacccctcagttcctgcacatgggtgagatcatagacggtgtag

SEQ ID NO: 808519 - DNA, 100 bp, Homo sapiens
tctttaaggggtctgtcatggaaggtgctcttccagggtggctgaggtcctggaaggcaaaggagcagggaagaaaggccgttttcagggcaaggccacc

SEQ ID NO: 808520 - DNA, 100 bp, Homo sapiens
gaagaagtgttacaacgaggagaagcactctcaggagttgtcacagcagaaatgtttagacatatgcagaactctgagataattcgaaaaatgactgaag

SEQ ID NO: 808521 - DNA, 98 bp, Homo sapiens
accgagagagtgaggagccagacgacaagcacacactatggcgctgaaacggattaataaggaggaagagttcatcgattggtggagcaaattctttg

SEQ ID NO: 808522 - DNA, 98 bp, Homo sapiens
agggatggcttcattgacaagaacgatctgagagacacctttgctgcccttgatgagacgtgcaggtaccatcaggaagcagcgggataagctgataa

SEQ ID NO: 808523 - DNA, 99 bp, Homo sapiens
ctcttctctcaactggcctcatgttcttttatcacttcagcgtcttgcagatcctcggcctgagtctaacgtgaagacattttgctccaagaatatcct

SEQ ID NO: 808524 - DNA, 100 bp, Homo sapiens
aaagtcttttgtgctcccctcccccatcaaaggaaaggggaaaatgtctcagtcgaaagccactgaggcggctcccagctgcgttggcgacatggccgac

SEQ ID NO: 808525 - DNA, 98 bp, Homo sapiens
gagagtcctggtgactttgaacatgctggtgccgctagccaagctgtcctgcctggcctcactaagcagtcttttgatcacacctttcccatctccaa

SEQ ID NO: 808526 - DNA, 98 bp, Homo sapiens
tgaacgtctggactctagggaccctgctgaatagctggggctacaggcgtgtgtcactgcgcccagatattatggtgggaatgggatattcacaagaa

SEQ ID NO: 808527 - DNA, 98 bp, Homo sapiens
agctgcccaatgcctgattgacggaatgtgcaaagtagcaattaactggtctggagggtggcatcatgcaaagaagtggccccagaagaatttaaaac

SEQ ID NO: 808528 - DNA, 100 bp, Homo sapiens
gggagcgacccggatttccagccagagctgagcggcgcgggctccagactcgccgtggtcaagttcaccatgagaggaatgtacatggcaagtcaaagca

SEQ ID NO: 808529 - DNA, 100 bp, Homo sapiens
ccagagcccgaccaggcctccactggcatcaccgacacactatgctccctccaaagccatgttctcattccggaggggaagaacgtctagaaactccttc

SEQ ID NO: 808530 - DNA, 98 bp, Homo sapiens
agtgatgaagctgcttaccatttaatcattgagctctatgataggtccctgcatcccatgactcggagctgatggccttcatgacgaggaagttgtgg

SEQ ID NO: 808531 - DNA, 99 bp, Homo sapiens
ccaacatcgcggtgcagcgaatcaagcgggagttcaaggaggtgctgaagagcgaggaggtccagaatggctacaacagtccctgatggttgccgcaat

SEQ ID NO: 808532 - DNA, 100 bp, Homo sapiens
gtattggtcctaaagtccagagacagagcactaattaggtccaggtgcaggtacagcagtctccgcaacaggtctcggctcagctctccccacaactcac

SEQ ID NO: 808533 - DNA, 99 bp, Homo sapiens
tcatcctcatcacttttggcccgctggctgtgatgttcgcctacgccatccagggtgaagttgaacaaattgctatgatgaaaccaaaaggccagactg

SEQ ID NO: 808534 - DNA, 98 bp, Homo sapiens
taaacatgcaatgaacccaaaagggatcgtagggcatcagaaaaacaaaaagaaatagagagagtaaaagagaagcaacagaaagaactcaataaaca

SEQ ID NO: 808535 - DNA, 98 bp, Homo sapiens
acgtctgaatactgagtggagtgagttggagaatctggtccttaaggatatgtcagatggtggatcttgaacgcaccttcacgtttcgaaattcaaag

SEQ ID NO: 808536 - DNA, 131 bp, Homo sapiens
gcggtccagaacccggccctcaccgccctcaccacccctatccagacggctgcccttcaagtaccagcaatggatcacttggagtcctttattgctgaatgtgatcggagaactgagctcgccaagaagcg

SEQ ID NO: 808537 - DNA, 99 bp, Homo sapiens
gactaccaccgcagcgacgagcagacctttccagctcacccccagggccttatggtcaagaaatgtatgcgtttcgatctgaggaaagattcaaatccc

SEQ ID NO: 808538 - DNA, 124 bp, Homo sapiens
gactttggccatgattgcatttttcttcatcatcatttacctgggaccaatggttttgatgataatcgaagaaaaaatgctgggcatcttggtgcagcacaaagtccggagtggcgtctcgggc

SEQ ID NO: 808539 - DNA, 100 bp, Homo sapiens
gccaaggccctgagaaagcctgagctgcagaggctggagacagagttgggccaacccgctgagcgctggaaggacacctgggaccgggtgaaggctgcac

SEQ ID NO: 808540 - DNA, 100 bp, Homo sapiens
tggttccatccctaaacttatactgtcaagatatgccataatactgagaatggaggagtctgaggccctggtccatcaactgacagcatgaacttcacgt

SEQ ID NO: 808541 - DNA, 100 bp, Homo sapiens
tttgtcaactgtgtgcgattctctcctgatgggaacagatttgccacagccagtgctgacggccaggttgcctacaaagctgattataaacatgatattg

SEQ ID NO: 808542 - DNA, 100 bp, Homo sapiens
gttttccttctctccgtgcaacgctggcaagtctcaaagtcgccacagatctgaacataaagtctggtctcctctggtgacggaggaagggaagcgtcat

SEQ ID NO: 808543 - DNA, 100 bp, Homo sapiens
gtgaacgccttcattttctgcctgaaatcgagagctccagatcatgagaaagctagatcactgtaacatagtccgattgcgttatttcttctactccagt

SEQ ID NO: 808544 - DNA, 100 bp, Homo sapiens
gtaaagatggaaaaccagttattgaatatcaagaggaggagttgttggttcctaaaagtaaagctttagaggccaccaaattggcaattgaagctggctt

SEQ ID NO: 808545 - DNA, 100 bp, Homo sapiens
gggaaagcctggagtcctggctcaggcagaagataagattattggactgactactagtcctctacgggacaacaagacgactcttcctcattgaagctac

SEQ ID NO: 808546 - DNA, 98 bp, Homo sapiens
tcgattgtatagctcagaagaaagcctcaagtactacagccttccagcagccttcccagacccacagatcacacccagggaaaactaataaagccaca

SEQ ID NO: 808547 - DNA, 100 bp, Homo sapiens
aacaagaaaacatcaaagaggtctagcaaaggtggaattctactaagtatcagtcggccctacaagacaaagcccacccacggcattggaaagtacaagc

SEQ ID NO: 808548 - DNA, 100 bp, Homo sapiens
gggcactgtggggacagggcgacgtgtgtccaggcgtttgccgcgccgtggggaagacatgcttgctgatcagctacacgaccaacgccttccccggaga

SEQ ID NO: 808549 - DNA, 98 bp, Homo sapiens
aatttcagaattttgaacaaatctttgaggagtacaaaatttcaagctttgagcagaggctgatgaatgaaatagagtttcgcttggaacgtactcct

SEQ ID NO: 808550 - DNA, 98 bp, Homo sapiens
gatttgtgatgaacttttccaatggggaaattatagacatcttcaagccagtgcgcaaggtatgcagtggaactgatgaagaccctgatgataaaaac

SEQ ID NO: 808551 - DNA, 99 bp, Homo sapiens
gtcataccagtcaactagtaactgatattcagccagttcttgaagcaagccacccacacagaatatgcctatgggtcctggagggatgaatcagagcgg

SEQ ID NO: 808552 - DNA, 100 bp, Homo sapiens
gtcgagcacataacggggttcgggtgtctcgtgtgtgaacatcacagattcccaacttcttctggagcctggggatcggtcacactggtgcgtggtggca

SEQ ID NO: 808553 - DNA, 100 bp, Homo sapiens
tacttgggaaatcatctttacggaatgtggtgctgagagactacatttataattggagatcctgaacaccaaagaaagctttgaattttatgcacagcag

SEQ ID NO: 808554 - DNA, 98 bp, Homo sapiens
tggatacctacctggggcaatttcctgacataaagacagcaccagttgcccttgaagcagaaaacagaggtgaaatgaaactagctctccagtatgtc

SEQ ID NO: 808555 - DNA, 98 bp, Homo sapiens
ttcgtcaaagtctacccctcctgtcggggaggcaaggtggttttggaccagacaggcgtgtctaagcaccttctaaaaatgaacaagagcagctctga

SEQ ID NO: 808556 - DNA, 100 bp, Homo sapiens
tggatttcccacccagaatctttaggtaaatgaggtcagcctgccagtatactggggggcagccatagtgaaggactgttgcagatagcatcagggcctc

SEQ ID NO: 808557 - DNA, 100 bp, Homo sapiens
actcacaatgacatcgtggctaccacctacctgagtatgtcgaaaatctctgcccctggaggagaaatagaaggagaaaaggttctgcaggacgatgagt

SEQ ID NO: 808558 - DNA, 98 bp, Homo sapiens
gaggaagaggcagaagtgtttcagggggtcgaggtcgtggtggaccacgtggtggcaaatcctccatcagttctgagcaaccatctaaacctgaaatt

SEQ ID NO: 808559 - DNA, 100 bp, Homo sapiens
catcttctcttctgactttggctacatctcataaacttggtcctgatgtctgaccatggagatgtgagcctcccgcccgaagaccgggtgagggctctct

SEQ ID NO: 808560 - DNA, 100 bp, Homo sapiens
aaaggacagcattcctgtgacctctgcctaccatccataaaatactcattcccctctcagtcgtcattgaattttgagaagcattctgaaaactttgcat

SEQ ID NO: 808561 - DNA, 100 bp, Homo sapiens
atagggagaaaggaagctgcgctgcattctgcgggacgaaccctgctccgcgcgaggagtccaatgtgctgattgctgctaacagtcagggtacaattaa

SEQ ID NO: 808562 - DNA, 99 bp, Homo sapiens
aaaggacagcagcattgatcaatcttacagctaacatgttgtacctggaaaacaatgcccagactcaatttagtgaggcccataagatggcctggcctt

SEQ ID NO: 808563 - DNA, 100 bp, Homo sapiens
cctggatttgtcctgtgtgtgacaaaaaagctgcctatgaaagtctaatattagatgggtctcttgatggtcgtctccaggtatcccatcgaaaaggatt

SEQ ID NO: 808564 - DNA, 100 bp, Homo sapiens
cggggcttccctgcggctggaggtagcagaaggtcaagaaatttgtgtgattgaagccatgaaaatgcagaatagtatgacagctgggaaaactggcacg

SEQ ID NO: 808565 - DNA, 100 bp, Homo sapiens
tctgtgcagtggcacctgcgcgaagctggccaaagcctgcccagacggctcacctgtgcgggatggaacaaaagtccaaaagaaactcttccttcaaaac

SEQ ID NO: 808566 - DNA, 99 bp, Homo sapiens
ctatgccaaacaaggccttcgtactttatgtatagcaaagaaggttctgattgcccaagagaaaatggcaacaaacacagtttatgtgtttgccaaaaa

SEQ ID NO: 808567 - DNA, 100 bp, Homo sapiens
ctgcagccacaatgtgcctttgcaggggagcctgagagccacaggtggagctgatcagaataatgttcagcatcaaccccctggagaacctgaaggtgta

SEQ ID NO: 808568 - DNA, 99 bp, Homo sapiens
gaggaaccagctcagtacgctgcccgaagggtttggtgggagctgtttccaaaaggatgttctgaatttggtttatctctgtgaggctctgaatttgcc

SEQ ID NO: 808569 - DNA, 98 bp, Homo sapiens
cgctcgtcagactccagcagccaagatggtgaagcagatcgagagcaaggttccagcaacagatagaaatgctttaagttcactctggggaaagctgg

SEQ ID NO: 808570 - DNA, 99 bp, Homo sapiens
ttggcactacccgtcttgaggaatgttaatacaatctgttggaatgacactggagaatatattttatctggctcagatgacaccaaattagtaattagt

SEQ ID NO: 808571 - DNA, 100 bp, Homo sapiens
ctgtgaatggtttccttgctgatctatttaccaagtggaagatgcttgctttaaatcgagtaacagcatcgcacccatttatgactgccgtagatctaat

SEQ ID NO: 808572 - DNA, 100 bp, Homo sapiens
agaaggctaccaaggagatgggattcactgtcttggtccagcccagaatcaaatgcaggttccatctggatatggattgcatcatcaaaactatattgct

SEQ ID NO: 808573 - DNA, 100 bp, Homo sapiens
ccgctgattgctatcacttctgcagaatccagtgggtttccatggatctcaatagtgccagcactgttgttcttcaggtgttaacacaggccaccagtca

SEQ ID NO: 808574 - DNA, 100 bp, Homo sapiens
cgaagccaagttggcagaagacatcctgaacaccatgtttgacacctcctacagcaagcagacattcagacgcctcctaatttccaaattacaagatgaa

SEQ ID NO: 808575 - DNA, 100 bp, Homo sapiens
gccgatctctctctcgttcaaggaagcgcaggctgaggccccttcacagatgtagtcactacaaatcttaaattgcgaaatccatcggatagaaaagtgt

SEQ ID NO: 808576 - DNA, 98 bp, Homo sapiens
ggggaccgcgctcaagaggctgatggccgagtacaaacgtgagctttccgttgaagaggcgcaggaccctttcctggtcagcatccacataatcgcag

SEQ ID NO: 808577 - DNA, 98 bp, Homo sapiens
tagcccccacccctctccgtccatggccccagatgacacttcagattccaaattacagaaatgcagtcattgtagctaagtctcctgatgctgcaaag

SEQ ID NO: 808578 - DNA, 98 bp, Homo sapiens
ctggaagtcacagccaaagaaattctgtgattactgcaagtgctggatagcagacaataggcctgtcactggaaagaagaatggcaatggggaggcag

SEQ ID NO: 808579 - DNA, 100 bp, Homo sapiens
tcctggatatatcagtgaagatggagaaacaagtgaccaacagttgaatcaaagtatggacacagaaatcaatgtggactgaacataaatcacctgatgg

SEQ ID NO: 808580 - DNA, 98 bp, Homo sapiens
gattccataccctggctattgtgaataatgctgcagtgaacatgggagtacatacatctgtttgagataagccagctgcagaatatatcctgaggtac

SEQ ID NO: 808581 - DNA, 100 bp, Homo sapiens
gtacccattggcaactgcctatgcaacgctgggcatgaggagcggagcggagaatgccaagctcttccaccaaagccacctaagccaatgacttcagcag

SEQ ID NO: 808582 - DNA, 100 bp, Homo sapiens
cttcttgtcctcaagtgatcctcccaccttagcctcctaagtagctgggaccacagaacaagttgaaatcatcgcagaaggataaagttcgtcagtttat

SEQ ID NO: 808583 - DNA, 100 bp, Homo sapiens
gctctacactggactaagagaagttgttaccgaacatctcataaataagccaccattggttcaggcaatcttcagcggtgatccagaggagatccggatg

SEQ ID NO: 808584 - DNA, 99 bp, Homo sapiens
attgaagcagttggtggcaaattaagctcctgtatcacgtggaagagatagttatggaggtccacctcgaagggaaccgctgccctctcgtagagatgt

SEQ ID NO: 808585 - DNA, 100 bp, Homo sapiens
cagggacgtcggtttgctatcgggactcggcgaggacgaaacatgagttctgctggcgctgatgggagaaaagcgatgagaagatgtgacggactcattg

SEQ ID NO: 808586 - DNA, 100 bp, Homo sapiens
cggggacccttccgtatctgcctaggcattttgctgtctcctcctaatacgctgctgataaagatgatagttcagaagacatttcagtgccgagtagtcc

SEQ ID NO: 808587 - DNA, 98 bp, Homo sapiens
gagcccatcaaggtgtacggacaggtattgttgcagcatctggcagtgagactgaggatgaggacagcatggacattcccttggacctttcttcatcc

SEQ ID NO: 808588 - DNA, 98 bp, Homo sapiens
ctaagtccccagattggaggaggctggctctggtcttcgatgcacaggagtggccgttatggaacgcagatatgaggccccaggattcctggcgaggt

SEQ ID NO: 808589 - DNA, 99 bp, Homo sapiens
acaggaaagtgaaggcgaaatccattgtcttccaccgaaagaagaatcttcaggctacggaaaaacctgcgagccctggtggttgtccatgctacatgg

SEQ ID NO: 808590 - DNA, 100 bp, Homo sapiens
gcgcttccgacggggcggccgggggctcagagatccaagtgcgcgccctggcgggtccggaccaagcggcaacctttggcactgcatccatgagcatgcc

SEQ ID NO: 808591 - DNA, 51 bp, Homo sapiens
ctccaaattcgcctccatctgtaccatggagcagtgaggagaatgaatacc

SEQ ID NO: 808592 - DNA, 98 bp, Homo sapiens
tttttctgttttgcctgaatacatgatttaaacaagagatttccacagaaggtcccctcttgctgttggctgcacatcaggaaggctgtgatgggaat

SEQ ID NO: 808593 - DNA, 100 bp, Homo sapiens
cttcccagaggaatacgtgcccactgtgtttgaccactatgcagaaccttcatcaccctggtgttgtaaatttggagtgtatgtttgagacgcctgaaag

SEQ ID NO: 808594 - DNA, 100 bp, Homo sapiens
gggcttccagccctgagggtcgccacctcccttccccacagctaggaaccaaggttatcaatactctggctgaccatcatcatcgtgggactgactttgg

SEQ ID NO: 808595 - DNA, 100 bp, Homo sapiens
tttcgttttgcctccggttggggctgctgtttctcttcgccgacggttacggcctccgctgccacagggccatcatcaccatctgccggctcattggcat

SEQ ID NO: 808596 - DNA, 99 bp, Homo sapiens
aaaaatcaatgtcagcccaacaacttacagatgatatcatcaagttgaatcgaaaggaagggaagaagcagaattttccaagactaaatagaagactcc

SEQ ID NO: 808597 - DNA, 100 bp, Homo sapiens
agggtgccggggaatagaagctctgtcagtctcgtctggatcttggtcctcagcaactgtctggatcctgacaggacatggatttgattgacatactttg

SEQ ID NO: 808598 - DNA, 98 bp, Homo sapiens
acacagctcgacagtacgcctacttctataaagtcatccagaagcctggaatggtcccccctccgccgggagaagaaagccagacggtcatccttcca

SEQ ID NO: 808599 - DNA, 98 bp, Homo sapiens
atcgaaccagtagaaaccgctgccaacactgtcgattacagaaatgccttgccgtagggatgtctcgagatgctttccgggccctcctgcagatccgg

SEQ ID NO: 808600 - DNA, 99 bp, Homo sapiens
ctctatggattcccaaggagaacagcttcttctcctggggctgggaatacagcaaggaaggggacagtcttaggaaaagtcctcagtgctgtgggcagt

SEQ ID NO: 808601 - DNA, 100 bp, Homo sapiens
cccaggaggcatttgaagttccactacattaacaagctattctgaaaatgtggaacgcacaaaatatgctggggaaagcagtaaagaattaggatctgga

SEQ ID NO: 808602 - DNA, 100 bp, Homo sapiens
tgaacaccaaaagaaagaatttgtaaagtactccaaaagtttcagtgatactctgaaaacgtattttaaagatggcaaattctgctaatgtgaatggaag

SEQ ID NO: 808603 - DNA, 98 bp, Homo sapiens
gattttttatcagcgcctcaatctctactcgaagaagaaagagaagaaacgttttctcagatctggcaggggatcgacattgagaccaagatgcacgt

SEQ ID NO: 808604 - DNA, 100 bp, Homo sapiens
acagattcaaaagttaaattaaagtatcagcatttaataacaaatagctttgtagagcgagaattagaactgcagcgtcagcgtgacttgcataagatca

SEQ ID NO: 808605 - DNA, 100 bp, Homo sapiens
tcaagcagaccgatgtctactccatggctctggtgctctgggaaatgacatctcgctgtaatgcagtgggagattttaccaaatgttgcaagaactctgg

SEQ ID NO: 808606 - DNA, 100 bp, Homo sapiens
attctgaatctggtgatgaacttagcagcagctccactgaacagataaggcccatttggaagccctttcctaatcaagacagtgactcggtggtactaag

SEQ ID NO: 808607 - DNA, 100 bp, Homo sapiens
aagctcaccatggctcaacttactcagttaacacagggccactttcggtgtctgaactgctcagcttcgcaagtctgctctcaggatggccctttgtatc

SEQ ID NO: 808608 - DNA, 98 bp, Homo sapiens
ggaggcgggagcccattgtcccgagagcctgtggcctctgcctccgcaggaagaaaaaatgctgggcatcttggtgcagcacaaagtccggagtggcg

SEQ ID NO: 808609 - DNA, 100 bp, Homo sapiens
gccagatccacgccaaccacgaggtgaaatgacaatggatgctctgttggctcgattgaaacttctgaatccagatgaccttagagaagaaatcgtcaaa

SEQ ID NO: 808610 - DNA, 100 bp, Homo sapiens
tccctgctacagagcaggagttgccgcagccccaggctgagacagatgacagcatattaaagtgagtgaccctgcgacccactctttggaccagcagcgg

SEQ ID NO: 808611 - DNA, 100 bp, Homo sapiens
acagcagcctgtgtgaccctgaaacatcgatatgccaggtctggctctgggagaggagtggacagcagctggttgagatacatccccatctggagacagg

SEQ ID NO: 808612 - DNA, 122 bp, Homo sapiens
gcctgtcgctggagcacaaaagagtctccgcggtggaggtctgcgttgctcttgcttttcctcgctggggtgtacggtccaaagtggtacccttctcgagttggtctgcagctagaatgtgg

SEQ ID NO: 808613 - DNA, 100 bp, Homo sapiens
catggtgtgggccgacatcaagagctgcgagatccaacagctttcggaaaatgtgattgatcgaatgaaggaatcctctccatctggttcgaagtctcag

SEQ ID NO: 808614 - DNA, 99 bp, Homo sapiens
ccccactgccctgaggctctggtaggctgtgggcagatagagaatctcaggaatggaagttggatacactttgtgacttgtacgagacactgaccatta

SEQ ID NO: 808615 - DNA, 100 bp, Homo sapiens
cgacgctcggggctcttcccccgcctgcacacgggctcagaaggccagggcgacagccgggcacgatgcctcccctggtgaagacacaaactgtcaccat

SEQ ID NO: 808616 - DNA, 100 bp, Homo sapiens
aggaatccgcccgcaagagcgagccgcctgccccggtgcgcagacagagctattccagcaccagcagagaaatgcccggcgaagccacagaaaccgtccc

SEQ ID NO: 808617 - DNA, 100 bp, Homo sapiens
gcggtggagactctgtccccggactgggagtttgaccgcgttgacgacggctcgcagaaatgttgaaggtatccacctttcctgggaacctccaacctca

SEQ ID NO: 808618 - DNA, 98 bp, Homo sapiens
tgagaattgaagacatgtaggtgactcacaaacttcttggaaagagaccctgtgtgaatctttgtgacaacaaactgtgctctgcagttttcatcccg

SEQ ID NO: 808619 - DNA, 98 bp, Homo sapiens
caaggccaaggctgtccgcgtgatgaacactcattcagactcgtttgtgaacagccaggagtggacgctgagccgctccgtaccggagcttaaagtgg

SEQ ID NO: 808620 - DNA, 100 bp, Homo sapiens
gggggagaccgtaatgagcgtcaaaattatccgaaaccgcctcactggatataagccttccaaagtcagcagcaatctgttacacagcagcactgttgaa

SEQ ID NO: 808621 - DNA, 100 bp, Homo sapiens
gaactgaagggacagggaacagccagacgagagcttcagccatcacgaggatgatttcggaacctggagaaaatatgaagctactaaacttatacataaa

SEQ ID NO: 808622 - DNA, 51 bp, Homo sapiens
tcatcctggcctacgtcatcggaataagactgattttatgggaaaattaag

SEQ ID NO: 808623 - DNA, 144 bp, Homo sapiens
gcaacagaagaagccctttgaggagcactggaggaagcacaccctgtcctatgtggacgtcagcactgggaagggtggccattcagggcaactggggccttcgtcagttgccccttcattccgcccagaggatgagcttgagca

SEQ ID NO: 808624 - DNA, 100 bp, Homo sapiens
tgctgactggtaaaaccctttttgcagattgtggtatctgaacgggaactatttggttctgttggtgtcattggtggtcattcttcctttgtcgctgttt

SEQ ID NO: 808625 - DNA, 100 bp, Homo sapiens
ccacaagtgaatgcagtctttccagaatcaaaagcagacctcattttgattgtagtagcagtggagggcagctcagttctggcaccaaaccaaatcccca

SEQ ID NO: 808626 - DNA, 100 bp, Homo sapiens
cgacaagaacaaactacaggcggttgccaaccaggcagtcatggatcaggtaatgcagtttgttgagccaagtcggcagtttgtaaaggactccattcgg

SEQ ID NO: 808627 - DNA, 98 bp, Homo sapiens
tggctgaccgtatgggcacgccctacctgcagaaggtcctcaatcagtcccaagaggaattacaagagtactgcagacatcatgaaatcacctatgtg

SEQ ID NO: 808628 - DNA, 98 bp, Homo sapiens
tattaaacaagaatttagaggagaaactgacggagtgcatcatcgacgaggactgtgggcccagcatgtactgccagtttgccagcttccagtacacc

SEQ ID NO: 808629 - DNA, 100 bp, Homo sapiens
attgtggcattcaaatcctagcactctgggagagatatttggagtctgggagtgatccttttcatgttggtgtgtgggcagccgccctttcaagaagcca

SEQ ID NO: 808630 - DNA, 100 bp, Homo sapiens
ccgccactgcgcagggcggctgggcagctatgtcatcaacgggcgcaccaagagctccatgaacctgcctccagacaaggcccggctcctgcggcagtat

SEQ ID NO: 808631 - DNA, 100 bp, Homo sapiens
attgtcaaatggaaagaagtttgattccagtcatgatagaaatgaaccatttgtctttagtcttggcaaagtaggtgatttcaaatcggagaagtccaac

SEQ ID NO: 808632 - DNA, 98 bp, Homo sapiens
gtggctgtaaatggtaaacccatgctaggagttatacataagccattttccgaatatacagggtgaaaatcctatttataagagtgccgtaacaactg

SEQ ID NO: 808633 - DNA, 99 bp, Homo sapiens
ttgtttctttggacacagattctggaaaacaggttcacgcaaagaatctgctccacaagttttgcttccagaagaagagaaaattatagtggaagaaac

SEQ ID NO: 808634 - DNA, 98 bp, Homo sapiens
taggcatagagaaactactcgatcctgaaggttcaagttctttcttcaaagagtcatcagaataacatggattgaagagacttccgaacacttgctat

SEQ ID NO: 808635 - DNA, 98 bp, Homo sapiens
gaagctaaaattaagaaacgtcaggctcctgatccgaatttgggtgttgtctacatctactggcctaacaaaaacagtgtataatccagctgctttga

SEQ ID NO: 808636 - DNA, 101 bp, Homo sapiens
cctgcctctgtggttatctttacaatacttgggacttgatgggtttgtggagaggatcaagcatgcctgtcaactggtatgatctcgtgaaaccttgagag

SEQ ID NO: 808637 - DNA, 100 bp, Homo sapiens
gatctcctggaagtgttggcggaggaaggatggcaagatattctgccgacggacagcttgtgattgccagaatccaagtgctgacctattctgttgccca

SEQ ID NO: 808638 - DNA, 98 bp, Homo sapiens
tgaaagacgaatttaggagacataagaccgttggttctgacgaggcacagcgtttcttgcaagaatgggagattatcaacgaggacattgccaagagg

SEQ ID NO: 808639 - DNA, 98 bp, Homo sapiens
gtaggtaaaaatgcctattggatccaaagagaggccaacattttttgaaatttttaagacacgctgcaacaaagcagcttatggaagtgacagggaaa

SEQ ID NO: 808640 - DNA, 98 bp, Homo sapiens
aacacctgtgccaggccctgggggaatgagggtgaacaatcttaaacatctctgccttcctggagcacaccttctagacgctgaccggaaaggagatt

SEQ ID NO: 808641 - DNA, 98 bp, Homo sapiens
ctgttttgccggaggagcccctcaggccatattcctatcattccggatctggaggaagtacaggaagaagactttgttttgcaggtggcagcccctcc

SEQ ID NO: 808642 - DNA, 100 bp, Homo sapiens
aaggcaattgatcccaagttgtcgacgaccgacagggtggtgaaaggttcttcacacacccccattcggcgtagtacccagagagctcaagatgtgtggc

SEQ ID NO: 808643 - DNA, 100 bp, Homo sapiens
cggatacgatgtcaccaggaaccctcatctcaacaaggtcaatgtgacggtggactacattagaccagccagcccagccacagagacagtgcctgccttt

SEQ ID NO: 808644 - DNA, 100 bp, Homo sapiens
tctaactaacacggtttttattgacagagctctgatagttgttccttgtgcagaagttactgtaaaatggggaaaggagaaatttgaaggtgtagaattg

SEQ ID NO: 808645 - DNA, 98 bp, Homo sapiens
ctgagaccatgcagtcagctacgggaattcagtactctgtaacacccagctaccagatacactctgtgcagttttagagagagacacactcagtattc

SEQ ID NO: 808646 - DNA, 100 bp, Homo sapiens
tcattatctaccacccgagatgccccaaggcctgtcccaggctctctatcttctctgctacatctccacaacagacagagacagcccatgccagcctcca

SEQ ID NO: 808647 - DNA, 100 bp, Homo sapiens
tgacactcctggggtctgagcattccttgctgattaggagcaagttcagatcagtggtctgcaagaagaatctggacagtaccactgtggccgtgcatgg

SEQ ID NO: 808648 - DNA, 100 bp, Homo sapiens
ataatgttttcagcagcaatttgccctcagagggaggagattggacaggctggactccccattgcttttctaaaaatcttggaaactttgtccttcattg

SEQ ID NO: 808649 - DNA, 125 bp, Homo sapiens
ttacacaagtgacaagaaatgttccaccaggacttgatgaatataatccattctcggattctagaacatcatatttgatcagaaattggatgaaccttcgggatgctgagacagggaagatactc

SEQ ID NO: 808650 - DNA, 100 bp, Homo sapiens
ccatgaagtggagatcgcacacaccaagaagctgttccgcaggaggagaaatgatcgaaggtacaagggatttaaaggcaactgttccatgaccttcatt

SEQ ID NO: 808651 - DNA, 100 bp, Homo sapiens
gctcagaacccgtgacccgtgtcggcagctgtgacagcatgatgagcagcacctccacccgctctggatcttctccaggtttaaaggagagcaactagaa

SEQ ID NO: 808652 - DNA, 99 bp, Homo sapiens
atcccatgaaaccaccaagcattattctcctaacggatccctacaataatattgtccgtactgcaatagaagcaatggcagcagtatttggagggactc

SEQ ID NO: 808653 - DNA, 98 bp, Homo sapiens
aaagatccaagtgctgttcacacagtgagatgcattctgtcgggaacatgccctgtgtgccgccgtcatttcccacctgcggttattgaagcatctgc

SEQ ID NO: 808654 - DNA, 100 bp, Homo sapiens
ggctccctgatgggatggctgtggtacgggagaccctgcaacgaaatacctccctgggcctcggagacgctgacagtttctccacagacactacccaaag

SEQ ID NO: 808655 - DNA, 100 bp, Homo sapiens
agacacagcatgagcccaagacctcccaagtttacttgatcgtacaagttgagccccatatgggggttggcaggcagcagagaggcccctttcaaggtgt

SEQ ID NO: 808656 - DNA, 100 bp, Homo sapiens
aaagctaaagacatagttcctggtgatattgtagaaattgctgagttgtggaaagtaaaaatgtagccctaccaaaaggaactattgtactggcttctcc

SEQ ID NO: 808657 - DNA, 100 bp, Homo sapiens
ttcaagtagtggaaggagtacagggaagtctataagctttgcaacagaattacagagtatgatacgaaagtaggcggtacgaaccctaatggaggcagtt

SEQ ID NO: 808658 - DNA, 98 bp, Homo sapiens
cggagccagaggagaggcgcccccgccggccgccgcgccgcccggcagcctcggcagccaagaaggatcaagaaggtggagaagaaaagaaatctgtg

SEQ ID NO: 808659 - DNA, 100 bp, Homo sapiens
cctgacagtctgatcacctcagcgttgcagcctcgattcattcaactctttcagggtagctacagcaagctgggtagcaggcagatccaaaggatatcat

SEQ ID NO: 808660 - DNA, 100 bp, Homo sapiens
caacctcagccgcacggttgacgtctactctttgtgtccctggtgatgttggaacattaatgatggaacatggccaaacttcagtcatgatcctgaagcc

SEQ ID NO: 808661 - DNA, 100 bp, Homo sapiens
tgctgctgaattctggagaaagttttttggagacaagcagttgtgaaaaacttcaggacaaaaatgtttcatttaaggacttgtgctgctaagttgaggc

SEQ ID NO: 808662 - DNA, 99 bp, Homo sapiens
ttcattccatctctcttcctttctcatgttttggctttggggctaggtgttgtcatgactggatcttacaataatttcttcagaatgtttgacagaaac

SEQ ID NO: 808663 - DNA, 100 bp, Homo sapiens
aaccttggggacctcttactgggctttcttaaatattatgctacagaatttgaatctttctctggaatcaaaggactccagctgaaagttaacctccaac

SEQ ID NO: 808664 - DNA, 100 bp, Homo sapiens
aggagattggaaactgtacacagataaccaaccttgacttgcagcacaatgaactgctagacctcccagatactataggatgcctttgtggaactgtacg

SEQ ID NO: 808665 - DNA, 98 bp, Homo sapiens
cagctatgactacgacctgcaggaacagcacaacattctgaaattttttggttattgtaatgatgttgatcgggagttgagaaaatgcctgaagaatg

SEQ ID NO: 808666 - DNA, 98 bp, Homo sapiens
aaagggcagtcggcggagcttcgccaaggctggcgcagtcgagacacgctgtgaacaagacaggccttccccaaccacagcgccccctgcgccaccca

SEQ ID NO: 808667 - DNA, 98 bp, Homo sapiens
acaacatcatgcagtggaatgcagttatatttggaggaagaatggcctgatggatcatgaggatttcagagcctgcctgatttccatgggttatgacc

SEQ ID NO: 808668 - DNA, 100 bp, Homo sapiens
ctactcccccatctacctgtcgtttgtcatgcttttggctgccctgagctggcagtacctgaccactctctcccaggatgaagatgagctggattcccac

SEQ ID NO: 808669 - DNA, 99 bp, Homo sapiens
gtgtcgtcactatgtggcccatgtgaaggcaagaaaattggatgtatattttgaatatgaagaaaaaataatgagcaaaactactctggataaatctct

SEQ ID NO: 808670 - DNA, 100 bp, Homo sapiens
ttggagagactgccatgaagcaagtttttagaacttcagccataaaaatgggcagaattttccttgatcatatcggtggtacccgtctgttttcttgtgc

SEQ ID NO: 808671 - DNA, 122 bp, Homo sapiens
ttaaaatgactcctgaaggaagtaagcaagcatgagaagagagggcagcactgcaaaactggttgaacagcggatgaagatatggaattcaaagctctaatggacctttttgaagagaagtt

SEQ ID NO: 808672 - DNA, 98 bp, Homo sapiens
cggacctttcccgctggcgcgcagcctcagctagaatgacagcaattcagcaggagcaggtggaccagtgaaaataacagaaaaccgatcaaagaaga

SEQ ID NO: 808673 - DNA, 100 bp, Homo sapiens
cctggttcctgaagatgaggcaaatataggggcatcaggacttgcaattgtgaccaaatatattacaaagggctggaaagaagttcatgaattgtataaa

SEQ ID NO: 808674 - DNA, 100 bp, Homo sapiens
cggatgttgcagcagagccagcagctagcgcagtataatgcttcatcccagcagcaaagagaaataattaaaagtaggagcctggacaggcggctgcaag

SEQ ID NO: 808675 - DNA, 98 bp, Homo sapiens
cacggggccgctgctcaagttccagatttggttttgcactgattgcaaaaataaagtcctccgagcatacaatatccttattggtgaacttgactgca

SEQ ID NO: 808676 - DNA, 100 bp, Homo sapiens
cttatccatggaatcagagggtgcattcaaatcatcagtgagttctgcctcagtcagctcccaagtgaggacgcagtcacctttgaagactccggaggct

SEQ ID NO: 808677 - DNA, 100 bp, Homo sapiens
aggctcctcctcactgctttctgttctgtccatgaaaagaaccagtcttactactttgaccgcgatgatgtggctttgaagaactttgccaaatactttc

SEQ ID NO: 808678 - DNA, 99 bp, Homo sapiens
tcaagttcaacagaaagagtagttttcatctttccacagttcttagaaaagtcctgagactgagttttactggtcttaggaaaagtcctcagtgctgtg

SEQ ID NO: 808679 - DNA, 100 bp, Homo sapiens
aaccctttagaatcaaatgatgaaaaggagggccaagaagccacttgctcacgaccccagattgtaccagaacaaactgcctattttattggcattttta

SEQ ID NO: 808680 - DNA, 100 bp, Homo sapiens
gggaacgatgtggaaggtgtcagctctgctcttcgttttgggaagcgcgtcgctctgggtcctggcagaaggagggaatgaaagctactggttgatttta

SEQ ID NO: 808681 - DNA, 98 bp, Homo sapiens
tttgtcctctggtgcctctgcaggcctgtatccggtgtccgaggcgaactcagtaagatgatgttaagaggaaacctgaagcaagtgcgcattgagaa

SEQ ID NO: 808682 - DNA, 98 bp, Homo sapiens
ttgaacaaactcgaagaacagctgtggaaagaagttgcaaaacactggctccgacagttagttaatatgtgcatcaacccagatccagagaagcgacc

SEQ ID NO: 808683 - DNA, 99 bp, Homo sapiens
ttcccaactgcggacatgctgggtggatccggatcgcatggaagacgcagcctggccgcgctctcccagcaatttctaaaccgggatgacattggcatc

SEQ ID NO: 808684 - DNA, 100 bp, Homo sapiens
tcgggaagagttcagagagcatctggagctaattgtgaaaaatagtgcaacctacaatgattccattggccgtgacatccccaaaatgcttgaattattt

SEQ ID NO: 808685 - DNA, 99 bp, Homo sapiens
atgaatcctatggttccaggattaacaggcagcaaaatgagctcttcagaagaggcttttgatgaggccattgctgaacttgatacactgaatgaagac

SEQ ID NO: 808686 - DNA, 100 bp, Homo sapiens
gagaaaggaagaaaagcctcccacaaaagagatgagacaagaggaatggttacacagtttgaccttgtctgtgtcaatgcgtggatgctggacctcaccc

SEQ ID NO: 808687 - DNA, 100 bp, Homo sapiens
aggacaataagcccaactacaaactcgaccacatcatcaaggaacgagccccagtttgagggacagcgggatatccaccatgctgctgtgagactcgggc

SEQ ID NO: 808688 - DNA, 99 bp, Homo sapiens
ttgagattatacggaaccagaagcagattgccaacattgaccgtattacaaaaaatcagggagtggtgaggacactgtccagctctgcccaagaggaca

SEQ ID NO: 808689 - DNA, 99 bp, Homo sapiens
acaatatgggattctgtaacatgggaacttaaatgtacattttgccaacgagctgggaaaataagagacctcatggcctatgacagaagagggagacct

SEQ ID NO: 808690 - DNA, 98 bp, Homo sapiens
cgggatcgtgaccgagaccgtgaccgagagcgtgaccgagagcgcgaatatcgtcatcgttagaagatcttgcttctgaaatatctacctgggatgga

SEQ ID NO: 808691 - DNA, 100 bp, Homo sapiens
cagtctttggcagccttatcattggttatgccaggtcttaattctgaaggactataccgagtatcaggatttagtgacctaattgaagatgtcaagatgg

SEQ ID NO: 808692 - DNA, 99 bp, Homo sapiens
ccaactcttcgttcgattattagctttagtgaaatgggctaataatgctggcaaagtggaaaaatgtgcggaactcaacagaggcaattattatcccga

SEQ ID NO: 808693 - DNA, 98 bp, Homo sapiens
gtgtggacccgtaaaataaaatggcccagctcctagtggagacagacaccttcggtagtcaagtccggatcaagggcaaggagacggaattctacctg

SEQ ID NO: 808694 - DNA, 98 bp, Homo sapiens
aagaaagtaaaagatgtcattggcatccgtgtcattctggaccttactcccaactaccggggtgagaactcgtggttctccactcaggttgacactgt

SEQ ID NO: 808695 - DNA, 98 bp, Homo sapiens
agatgacaaaaccacgcgactcgaggctgtgcgggaaatgtcggagacccatcactggcatgtgatcctgccatgaagcagtttctgctgtacttgga

SEQ ID NO: 808696 - DNA, 100 bp, Homo sapiens
cttaggcgacacacctggaagcagtgctgtacaagcgtcttgaattactctggtagcttttccagaaagacccatgacttcaccacatttctcgagttac

SEQ ID NO: 808697 - DNA, 100 bp, Homo sapiens
tcgcagggaagatgaaagttacggactgatgatgcttcggatgcacaatctgcatgggacaaagcccccaccctcagagggcagtgatgaagaagaagag

SEQ ID NO: 808698 - DNA, 100 bp, Homo sapiens
agggaccctgaggactacatctatgacctgtatgctgtgtgcaatcaccatggcaccatgcaaggggggcactacacagatcatggaagggaagtggttg

SEQ ID NO: 808699 - DNA, 100 bp, Homo sapiens
ccggctccctcctgccgccatgtgaagaaggtcgttgcttccccttcaccttccaccaccatgattgccgagacgcatccagagctttcgtgaccgggga

SEQ ID NO: 808700 - DNA, 100 bp, Homo sapiens
cattatccttcagtggggctattggactgacttttcttatgctgggatgtgccttagaggattatggttcccattctgtgatggggctcacacaaaacat

SEQ ID NO: 808701 - DNA, 99 bp, Homo sapiens
ggctgccctgtggcctcgctcctcggagggatccggagtgttggaacagcagctgttaatatgtgccttgtggcaactggcggagcagatgcatattat

SEQ ID NO: 808702 - DNA, 138 bp, Homo sapiens
gcaaagttgtgttggatcattttgaaaaacagtattccaaagaactcggagatgcctggaatacagtaaggttcagccgtctgtatatctccccagatacctgaaactgaccacctgagtacgttttcccattgctga

SEQ ID NO: 808703 - DNA, 100 bp, Homo sapiens
tgtcttcgttgtcacctacctgatccttgcctgctgccagggacccaggtggctgaatccacagaggagcctgctggttctaatcggggacagtatcctg

SEQ ID NO: 808704 - DNA, 100 bp, Homo sapiens
tgcaagggggaagtagagagataacaaaagctgctcagagtctcaatgaacttgtgtgcaacttgctttggtgtttgctgttttattgccacagatgaca

SEQ ID NO: 808705 - DNA, 98 bp, Homo sapiens
gtcaacaaagccccgaggaagggaagtcactcagcctctgaagaagcttcgggttcagactcaggcagtcagtcggaaagtgagcagggaagtgatcc

SEQ ID NO: 808706 - DNA, 100 bp, Homo sapiens
tcatctcagcctccaaaagtgctggcattacagctttagccacagtagaagacttccagattcgtccacatactctctatgtacattcttacaaagctcc

SEQ ID NO: 808707 - DNA, 98 bp, Homo sapiens
aagaaaagcagagcaagggaacccaggtgaaaaaactacagctgatgctaaggcaagctaatgaccagttagagaagacaatgaaagataagcaggag

SEQ ID NO: 808708 - DNA, 99 bp, Homo sapiens
tgaagcaggacatgcctccgccggggggctatgggcccatcgactacaaacggaacttgccgcgtcgaggactgtcggaccattcctcaagaattttgt

SEQ ID NO: 808709 - DNA, 99 bp, Homo sapiens
gggacctcggcccgttcctccggacccgagaggccgccgcacggggaattgaatgatctggcacgggaccctccagcacagtgttcagcaggtcctgtt

SEQ ID NO: 808710 - DNA, 100 bp, Homo sapiens
accacacttgggcgcctcttcatggtcttcttcatcctcgggggactggaacagcttcagctgcggggctcctttacctgcacacatgggcagctgctgt

SEQ ID NO: 808711 - DNA, 98 bp, Homo sapiens
caccatcagcttcagagaatggcagccatttatttgtcccgtgggaaattcaactactgaggaggttacggcacaaaaatgtcatccagctggtggat

SEQ ID NO: 808712 - DNA, 100 bp, Homo sapiens
cttgcagcagaaattcttgctggaggctgcgcagcagaagatgtcgttttcattggacctgacacacatgctattcaagccatgggcgacaagattgaaa

SEQ ID NO: 808713 - DNA, 100 bp, Homo sapiens
tggattgttttaaagcaacctataaacatcagctctcaacaggctccagacccagttcctggacctgccctggaaaagaagtatcccgtagagatgagct

SEQ ID NO: 808714 - DNA, 100 bp, Homo sapiens
cgggagtgggagagattggactgggagactcagcagcatcagaggctccttgaaatgctagatacagagaaggaactgttaaaagaaaaaataaaggaag

SEQ ID NO: 808715 - DNA, 99 bp, Homo sapiens
aatgcccgtgcccgcattgtggctgaagagttccttaagaattgtgccccctaccaccggagccagagaatggtggctacatctgccacccccggccct

SEQ ID NO: 808716 - DNA, 99 bp, Homo sapiens
tgggctcactgagttcacctgcgagtcagccctacctgcactgctctggtctagtacaaacaggctgctggcattgagaatctctttaaaatggacata

SEQ ID NO: 808717 - DNA, 100 bp, Homo sapiens
gataatatgtggtcaagttaatcatgcctggatgttgatgacacaactaaactcactgtggaatgctatgaagaagatgactttatgtgtaagaaggcgg

SEQ ID NO: 808718 - DNA, 99 bp, Homo sapiens
aaagaacatggtccagaaaacattgtaatggccatcgctggaaacaagtgcgacctctcagatattaggatgagttagatgaactccgtgctgagatgg

SEQ ID NO: 808719 - DNA, 98 bp, Homo sapiens
tcagcctcccgagtggctgggattacaggtgctacagtgaagatcatccagatgctgcagcactttgaacacctggcacctgtactggttgcagccgt

SEQ ID NO: 808720 - DNA, 101 bp, Homo sapiens
ctcaaatcctgactccacctgttatatgtagcaggtacactgaggaggggacggctccgtcttcacattgtgcacagatctgaggatgggattagcgaagc

SEQ ID NO: 808721 - DNA, 98 bp, Homo sapiens
ggggattctcgacctgctaacagaactggaccttttcggatgaaaactttcggaagagaaagttgcctgtggtaagttcagttgttaaagtaaaaaaa

SEQ ID NO: 808722 - DNA, 98 bp, Homo sapiens
gaagaggcatgccagaggtagagcagacttacagattccagtctgctgttagatgattattcatccaagttgagccccaaaccaaagagagccaagca

SEQ ID NO: 808723 - DNA, 100 bp, Homo sapiens
cgtctctctgctgcggcgcggggaccgctgtgctctcgactcatgaacaagctacagccgggctccgtccccaagatcaaccgctccatgcagaactggc

SEQ ID NO: 808724 - DNA, 100 bp, Homo sapiens
atttctttcctttcttatcaggagacaatcagaaaattccttgacatactccaagaataaggtaggataacataaaggtggtaactctagaaaacttaac

SEQ ID NO: 808725 - DNA, 100 bp, Homo sapiens
gacgattagatgagcttgagaaagccatcaccactcaaaactgtaatactaaatgtgttaccataccaagtgttccttgcctgtatctccccttggttca

SEQ ID NO: 808726 - DNA, 100 bp, Homo sapiens
cgagtccactgaaaatgcctttaagggacaaatactgtcagactgaccaccatcatcacggatgctgtgaaccagtcaggtcaattcagtgaagatatga

SEQ ID NO: 808727 - DNA, 98 bp, Homo sapiens
agcccaatgacgttgtccggatcctgccctgccgatgcagattctgcccaagaagcccctgcattgcagagggactggagatctgtatgatctgttta

SEQ ID NO: 808728 - DNA, 100 bp, Homo sapiens
tgctgttgaagaagggagccaacaaaaattgttttttctacctgttgacgtgtcaagcactaactgaaagaccacagcaagattctttcattcgtctcct

SEQ ID NO: 808729 - DNA, 98 bp, Homo sapiens
gagcgtcttgcagctttttatggtgtttaatctaatacacttaagctgcagtcccaaaattaggggaatccaaccacccaggtcaaacaggaggtttt

SEQ ID NO: 808730 - DNA, 100 bp, Homo sapiens
ggaacatatagaggccctattggacaaatttggtggggagcataatccaccatcaatatatctggaggtgtgatctccattcctttgtacatccctcaca

SEQ ID NO: 808731 - DNA, 100 bp, Homo sapiens
ccggcatgctggagaagctggagttcgaggacgaagggaataccttggcaagcagctccagtccgagcagccccagaccgctgccgcccgaagctaagcc

SEQ ID NO: 808732 - DNA, 100 bp, Homo sapiens
cagtacatgagaaggtctacttggttacacgcatggggagatactctggaggaagcatttgagcaatgtgcaatggccatgtttggttacatgacagata

SEQ ID NO: 808733 - DNA, 100 bp, Homo sapiens
gcctataatcaagtaaaaacaatagctcaaggaaacctttccaacacagatgtccaagctgccaagcatattaatgaggataagagaaaaacagaagctc

SEQ ID NO: 808734 - DNA, 100 bp, Homo sapiens
ccgggccctggggcttccgtctgcaggggggcaaggacttcaacatgcccctcactatctcccgggaggaattttggggaaattaaaacctgcctttctg

SEQ ID NO: 808735 - DNA, 100 bp, Homo sapiens
tgaataaagatttggaatttcagctccatgaaccatttcttctgtatagaaatgcaagctgtcctaggcctacttacaagcctccagtctcaaattatcc

SEQ ID NO: 808736 - DNA, 100 bp, Homo sapiens
tgatgtcttcagccagtataaaaacacagctcgacagtacgcctacttctataaagtcatccagagcacaatcattgtggagaagacagttcaagacctc

SEQ ID NO: 808737 - DNA, 99 bp, Homo sapiens
gctacctgcgtccccccaacacgtctctgttcgtcaggaacgtggccgacgacaccagcccctgaagaagatggccgaccggatcaggaagtatcagat

SEQ ID NO: 808738 - DNA, 100 bp, Homo sapiens
gaagacccaatggatagatacaaggaaccagcacctatgacagaagatctgctagaagagcagtctgaagttttagctaaattaggtacatcggcagagg

SEQ ID NO: 808739 - DNA, 100 bp, Homo sapiens
ctagccaggcgtgagggagtgacagcagcgcattcgcgggacgagagcgatgagtgagaacgccgcaccaggtttatggctacaaatgatttgatgacgg

SEQ ID NO: 808740 - DNA, 98 bp, Homo sapiens
gaaaaagctgcttgaatgtctgccgaaatgttcaagtttaccaaaagagaggcaccgctggaacactaatgagagcaatggtggaacaaagcggcaaa

SEQ ID NO: 808741 - DNA, 100 bp, Homo sapiens
aaaagagacctgcctcagatgatggacgaggtgggtcgcatcctctgtaacctgtgcggtgtggtttctggaggggtggtctgtttcttcccctcctacg

SEQ ID NO: 808742 - DNA, 100 bp, Homo sapiens
atcatggaaaacaacactcagtggctaatgaagagcgatatctgaagtggctctgatgcctttgccacactcctcgcatctctgggacatcccttccgca

SEQ ID NO: 808743 - DNA, 98 bp, Homo sapiens
ccacccgggattatatcatggaaccctccatcttcaacactctgaagagttgaacagacacggtagaagactcgcccattttggaatgtgaccgtctg

SEQ ID NO: 808744 - DNA, 100 bp, Homo sapiens
tacctgccccacagcctccagttactaagcctcttttccccagtgctggacagcaacacggaagtatatactggaaggctggagcccagcaggcactgac

SEQ ID NO: 808745 - DNA, 100 bp, Homo sapiens
tgtcgaatgtgactgactagcagcttcattttgaatgggacctgatgcagaacatcatgaatgacatgccgatctacatgtactccgtgtgcaacgtgat

SEQ ID NO: 808746 - DNA, 99 bp, Homo sapiens
cgcggaatcggggagcgtccggagctagctggatcctctaggcagaaaaacacaccttgactttagtcagatacatcactgtctgttaaaggaaaccaa

SEQ ID NO: 808747 - DNA, 98 bp, Homo sapiens
agaagactttgcttcattaaagtgtctgagaaggaagagtgaaattcacatgtctgaagaagctatacaggacatattggaacagacagaatcagacc

SEQ ID NO: 808748 - DNA, 99 bp, Homo sapiens
tggcgagcgccggttgctgtttcttctcaggctcagggaccggccgcggccccgtaggggaaaatgttggggcttttcaggaagcataataagattcct

SEQ ID NO: 808749 - DNA, 51 bp, Homo sapiens
cgcgaatatcgtcatcgttagaagaccctgagtgagtcggaaaacttcgaa

SEQ ID NO: 808750 - DNA, 103 bp, Homo sapiens
tgcagccaaggaaggaggcctgcaaattcatgacaggattattgaggtgtacattccaagcagagtggccctcatccttcagaatgtggatctgccgaattga

SEQ ID NO: 808751 - DNA, 99 bp, Homo sapiens
gctatctgaatatctccggggacacacacgagtccatgtgaaagaattaggtgtcgtactggggctttccttaaagtttcccatgtctcaatggactcc

SEQ ID NO: 808752 - DNA, 99 bp, Homo sapiens
cattggatatgatgatactgatgagtcccactgtgctgagattgatatgctgctgaaagaatatttactctctggagacatatctgaagctgaacattg

SEQ ID NO: 808753 - DNA, 98 bp, Homo sapiens
acgaaacaataaagaccggaagctgagtttttatccattgggctaatggatactacagacaacagagaaaacttgttgaagagattggctggtcctat

SEQ ID NO: 808754 - DNA, 100 bp, Homo sapiens
caccatcgagcagtatgccgccctggccacggggactctcttctggatggttaaacccatccagagtaatggctgcggccttacccaggaccctggggga

SEQ ID NO: 808755 - DNA, 99 bp, Homo sapiens
accatttaaaacaggtctaaagaattaaacatgtggacatgaaccaaaagagcatattatggagtgcactgaaacagaaagctgaatcccttcagattt

SEQ ID NO: 808756 - DNA, 99 bp, Homo sapiens
aacagatttctgctcacttcatgggctggcctggaattgacgatgctagtatgttcaacacaccaggaatgcagagcttgttgcaacaaataactgaaa

SEQ ID NO: 808757 - DNA, 100 bp, Homo sapiens
aatgttacaaaagcagttggtgcttgtgcagtagaacctgaaagtatgataaatgcactcggtgatggaaagagagccactattctgaagaacacttggc

SEQ ID NO: 808758 - DNA, 99 bp, Homo sapiens
tctagtagccacggtgtggcagctgctctgaaccaggacctggacccggacccaaagtgccatgtctttaatacatgcgaggattcatgacagcgcatg

SEQ ID NO: 808759 - DNA, 98 bp, Homo sapiens
ctgacaaacgagtctggctattacttggatatcagcctatacaaggaagtgactgactccaggacagcacagccaagggaagagatggtgttgagtgg

SEQ ID NO: 808760 - DNA, 100 bp, Homo sapiens
gagaggatctggtgtaccaggcgaagctggccgagcaggctgagcgatacgacgaatcttttagctgaaaaagtagagcagctgatggaatggagttcca

SEQ ID NO: 808761 - DNA, 100 bp, Homo sapiens
gccctccatcttgcagcccagaaggtcatacagcagatggaacaaaaaaaattacaacaaggaattcctccatcagggccagctggagaattgaagtttg

SEQ ID NO: 808762 - DNA, 100 bp, Homo sapiens
gatctaattacttgtttggacactgcatccaattttttggaacctgagttcagagtcatttgatgtggtcacaaaatgtgtgagtttcacactaactgag

SEQ ID NO: 808763 - DNA, 100 bp, Homo sapiens
aaaacagaaacacttcttttattttcctgtaatatatctgtatcatcggagtttgggagcctctggtggagcaagtaattgggattcctacagtgaccat

SEQ ID NO: 808764 - DNA, 100 bp, Homo sapiens
ttcagccagcccagcacatccagtcagaaaccagtggatctgccaactactcccagaaaactgtgagagtagtgattaattttaagaaaacacagaagac

SEQ ID NO: 808765 - DNA, 98 bp, Homo sapiens
agacccaggagaagccgcccaaagaactggaaatggaaaggtcagtagttgcacagctgctgagggtagtttcacatctctcactggacttttggaag

SEQ ID NO: 808766 - DNA, 98 bp, Homo sapiens
gcactggactcatggaggctgagcatttattcagatatgggacacagcaggacaggaacggttccagtctctcggtgtggccttctacagaggtgcag

SEQ ID NO: 808767 - DNA, 99 bp, Homo sapiens
cggcaccggtccgtactccagcgaggtctctaattaacagaagatggcaaagcccagccacagcagctatgtccttcagcagctaaacaaccaaagaga

SEQ ID NO: 808768 - DNA, 100 bp, Homo sapiens
acatgtttttctaagccctttttgtgccaggtgtcccgttaacgtctctgttagttcagagatagaagaagtcagagatgccatggaaaatgaaatgaga

SEQ ID NO: 808769 - DNA, 100 bp, Homo sapiens
cctggatgatcgaaatgatcgagatgatggccgcaggaaaccaattgctggaggaggaggtgaaatcttgtgctgagtgggtgtctctctcaaaggccag

SEQ ID NO: 808770 - DNA, 123 bp, Homo sapiens
gttgctgacccagaggagagttctccaaacatgatcgtttactgcaaaatgattcagtccctcaaggcgttgattgaaaatgcagatgctgtatatgaaaagatcgtacattgtcagaaggca

SEQ ID NO: 808771 - DNA, 98 bp, Homo sapiens
caattcccatacatgcactagagcctcccctggtgaagacacaaactgtcaccatctcagataatgccaatgctgtgaaaagtgaaatcccaaccaaa

SEQ ID NO: 808772 - DNA, 100 bp, Homo sapiens
gtacaggtttgcagattccgccagcagcacagcaagctctacagatgagtggctctttggcatttggtgctgtggcagggaacagatgttgcaaatacta

SEQ ID NO: 808773 - DNA, 100 bp, Homo sapiens
ggccaacttccattgaacttcccagcactcgaaagggaccgaaatggagagcaaagatttgcttggaacggtagaagaaatccttccaagcctctcagaa

SEQ ID NO: 808774 - DNA, 100 bp, Homo sapiens
aggagctggaagtgctgctgatgtgcaacaattacagaatgtctgaaggggacagtgtgggagaatccgtccatgggaaaccttcggtggtgtacagatt

SEQ ID NO: 808775 - DNA, 99 bp, Homo sapiens
caacttacccgagaacgtgcgggaagagaagatcatcgagcatttcaaacgatgtggacgaatgccgaacccacaacggtggctgccagcaccggtgcg

SEQ ID NO: 808776 - DNA, 100 bp, Homo sapiens
gtaaggatttcaacatgcctctgacaatctctagtatactgcttttgcaaaaaataaagatgatggaaaatggtactattttgatgacagtagtgtctcc

SEQ ID NO: 808777 - DNA, 100 bp, Homo sapiens
ctcgctgtcctctgtcagttcagcctactgcagcggcgggcagccgggcacctgcaagtactggatcctcgacctaggaatttagataatgggctgtgtg

SEQ ID NO: 808778 - DNA, 100 bp, Homo sapiens
atgagccttttaggcctgttcagaggaaatatcattctgcaaaagaagcttatgaacaacttttgcagacagagaatctttctgcacaagtaaaagcaac

SEQ ID NO: 808779 - DNA, 100 bp, Homo sapiens
gtgagactttcacaataagagcagaggatggaacacttcagtgcattcaagtgtaaacaggaacatcgataagtagtgtaaaaacttgcacaatgaaatc

SEQ ID NO: 808780 - DNA, 100 bp, Homo sapiens
cgcctcgtcgacatgagtgatgtggaggaaaacaacttcgagggcagatattggtaaaggttttcaaggtgtcatgaaaagatggggatttaaaggccag

SEQ ID NO: 808781 - DNA, 100 bp, Homo sapiens
aggaagaaaacgagccagtgatttacaatagagcaaggtttactcctggcttgggggcattaggaagcactggaggctcttcgggaactaatggatctaa

SEQ ID NO: 808782 - DNA, 100 bp, Homo sapiens
agctggagcggcagcagaaggagccatcactggtgcaagctatatttaacggagatcctgatgaagttcgagcactaatatttaagaaagaagatgttaa

SEQ ID NO: 808783 - DNA, 100 bp, Homo sapiens
cttaggcagcgtctggaacgtgaagctcgagaagctgcagaacttgaaggttgtccccccggcacgctccacagctggtgacccgacagttcctggctcc

SEQ ID NO: 808784 - DNA, 100 bp, Homo sapiens
atttacctgtgagatgtttcatcccaacagaaattgacaatggcccttcagctatgctaggtctataatgggaagtgtcacagttcggtatttctgttat

SEQ ID NO: 808785 - DNA, 100 bp, Homo sapiens
ccagaagtccagagctgaggactgcctgtttgcagcaccaatgttgttatgaattattcagagatcgagtctaaggttcgagaggcaacgaacgatgatc

SEQ ID NO: 808786 - DNA, 100 bp, Homo sapiens
caccgtttccccctgttgcagggttttgtttatataactcaagttgtttggctaaattcttcaggtcctgtgggaatggccgctgctgctgctgtggcaa

SEQ ID NO: 808787 - DNA, 131 bp, Homo sapiens
ggcaattcagcaagcagataaactgttgaagaaacataaggatcttcattgtgctaaggtccgaataaatactggaaagaataccactttaaaattcagtgaaaagaaagaagaagccaaacgtaaacgaa

SEQ ID NO: 808788 - DNA, 98 bp, Homo sapiens
ttggcgtggccgtcaaggagctggacctctacctggcctacttcgtgcgtgagcgagagactccttcagggtgagcaaaggcctggaaacctgtatgc

SEQ ID NO: 808789 - DNA, 98 bp, Homo sapiens
ttggaggtgccctgctgaatatctacacggaaatgggccgacggaatggtcctcgtccgaagtgagaatgggcagttgttaatgattcctcagcaggc

SEQ ID NO: 808790 - DNA, 100 bp, Homo sapiens
ccttgttgtcctcctgctcgccggcagcggcgggtccgggccccggggggtccaggccaacactgaaaactgtagttacgagtcaatgggagaatccaac

SEQ ID NO: 808791 - DNA, 100 bp, Homo sapiens
cgtctgccaggacaaatcatcagggtaccactatggggtcagcgcctgtgagggatgtaaggcaacaattggcattgactttttatcaaaaactatgtac

SEQ ID NO: 808792 - DNA, 98 bp, Homo sapiens
gccacacttctgcctgctgttggcaaccctcctggactaggctgctcttgttaatcacatggatgttgttttgggtcctgctcctcggtggtgttcct

SEQ ID NO: 808793 - DNA, 98 bp, Homo sapiens
gccccggctgcctcctccctgaggtgaaaattatctcagtgaacgaggatgtcactcttagatcagccctcgatagaaatctgaagagtgctgtgacc

SEQ ID NO: 808794 - DNA, 138 bp, Homo sapiens
agcgtactttcatggttttcacaaacaaatatcccaggagaagtgatcatggagaccaaggagaacaggttccaagtctcttcttcggcctctcaaacatggtaccatccctaatgaagtcaacgggtccagcatgac

SEQ ID NO: 808795 - DNA, 98 bp, Homo sapiens
ctattattctttttattaagactatgtttcacccgtctgaaaagattcctcatttggttttatggcaattggatatattccgacgaagcttgcgggtt

SEQ ID NO: 808796 - DNA, 98 bp, Homo sapiens
gattctgagccttcagacttctgtacagcagctgaaagaccaggatctaagcctttcccacgttatggttataaaccctccccaccgaatggatgtgg

SEQ ID NO: 808797 - DNA, 98 bp, Homo sapiens
acaccttctaagagtttggcgagtcagtgactgaagcgcccgtccattccaagtggctgcttcaacccccaactccactgctggtgcagccatgaact

SEQ ID NO: 808798 - DNA, 100 bp, Homo sapiens
ggcatctacagtgtcatgatccagaaggtgaaccgggtttatgtgattttcgatctgcctaccaccgtgtcaatgatcaaactgtggaattatgcgaaaa

SEQ ID NO: 808799 - DNA, 98 bp, Homo sapiens
ttcctactggacaagaatatgctgccaaaattatcaacaccaaaaagctttctgctagggctttctaaaaccaatttttccaacaacaacgatttccg

SEQ ID NO: 808800 - DNA, 100 bp, Homo sapiens
tggggttttactctaaagggtggcctggagcacggagaaccattaatcatctctaaggtgtacgtgaacggagagtgggtgaccaacatcagcgagggag

SEQ ID NO: 808801 - DNA, 99 bp, Homo sapiens
tctgatgtggtgcttttgaaccactggaaagtgaggaattttgaagtacaccgtggtgacattgtatcattggtcggcccagcccaatccagctttact

SEQ ID NO: 808802 - DNA, 100 bp, Homo sapiens
agggctgaggagcctgcagccagcttctcccaacccggcagcatgggcctggataagaacacagtgcacgaccaagagcccttccttctaccatgattat

SEQ ID NO: 808803 - DNA, 98 bp, Homo sapiens
tcgaaacccggaacttcagaacctcctactggacgacttctttaagtcagctgttgaaaactgccaggacttgaacgcaactcccaattgcagaaaat

SEQ ID NO: 808804 - DNA, 100 bp, Homo sapiens
gtacctgaaccggcacctgcacacctggatccaggataacggaggctggttccgcctggtggtgaagacagccctgaagctgctgctcgtctttgtagag

SEQ ID NO: 808805 - DNA, 98 bp, Homo sapiens
tccctgacagcgcggaatctgggtgcagttcctgcagtaccccactctacgatcagaattgaagatgttcctgctccttctacatctgcagataaagt

SEQ ID NO: 808806 - DNA, 100 bp, Homo sapiens
ttttgaatttcaagaacagtaaagttggaacacagcagagggtgtgtaataaaatacagaaagtttacaaagaggattttgagaaggagattaaaggaag

SEQ ID NO: 808807 - DNA, 99 bp, Homo sapiens
cggcggggagcgccggagttccttgtggccgacgtgcaccaagattgaaaaggccaaacctattaaatgtggaacatttggtgcaacatctttacagca

SEQ ID NO: 808808 - DNA, 100 bp, Homo sapiens
agtgaagagaaaatagcaaacgatccagacggcagggagtgcatcaaaggtgtgaacacagatgaaccagaaactcgagatgcatggtgggcagaaatca

SEQ ID NO: 808809 - DNA, 100 bp, Homo sapiens
tgatcctccaccagatgtcagttgtgttgatgtagataccaacactatttctcagtagctacagcaagctgggtagcaggcagatccaaaggatatcatg

SEQ ID NO: 808810 - DNA, 99 bp, Homo sapiens
ggtagcgcctgctgcccccaccagatgatgatgtgcctgcagatatggttgcagaagaatcaggtcctggtgcacaaaatagtccataccaacttcgta

SEQ ID NO: 808811 - DNA, 98 bp, Homo sapiens
gggttcctcgcccagagcgtcttggcggttctaggtgataaacatgggaatgctttatggcttaatgaaagagagtgctcaattcagagaagaaatca

SEQ ID NO: 808812 - DNA, 100 bp, Homo sapiens
acctggccatcatcagcttctacgtgaggcacagctgcctgcgggaagctcttctgcaccttctcaacaagaattatatccagatcgagagacagaagat

SEQ ID NO: 808813 - DNA, 100 bp, Homo sapiens
aacattgctgaatggattgtgggctctctaaatacgtacagattctgcgataatgtgtggacttttgtactgaatgatgttgaattcagagaggtgacag

SEQ ID NO: 808814 - DNA, 99 bp, Homo sapiens
aaaaaacggctatctataatagaatccaacttagtgactatacaaaagtgacatgcctcagttgtgagctgaatccggaaaggtgtcagtactattctg

SEQ ID NO: 808815 - DNA, 99 bp, Homo sapiens
gcttctccgggtctcagcatgatgcctgtgaggagccaccaacatttgaagctatggagctcattggtaaaccaaaaccctactatgagattggtgaac

SEQ ID NO: 808816 - DNA, 100 bp, Homo sapiens
cttttgcctctgcccctctggtttcacaggcattgttctggactctggggatggtgtaactcacaatgtccccatctatgagggctacgctttgccccat

SEQ ID NO: 808817 - DNA, 50 bp, Homo sapiens
ccggagatcttaataggaaccatcccaggactcagaattcatgattgaag

SEQ ID NO: 808818 - DNA, 99 bp, Homo sapiens
tcaatattgcacaccttatacgggaggcggaggaggcgatgactcggctggtcaacattctgatcctgtcagtcagggatgcacgagactggttgatga

SEQ ID NO: 808819 - DNA, 100 bp, Homo sapiens
gcctcaatctctactcgaagaagaaagagaagaaacgttttctcagaacagctttgctgagccatcaaggtctaatggaagcatggttcggcattcttca

SEQ ID NO: 808820 - DNA, 100 bp, Homo sapiens
gactcaaagctgcacggcagtctgtttatgagggaaacagtgcttcttagtcctacgtcagcagcagtttaatgtccaggctcttgtggcggtgggagac

SEQ ID NO: 808821 - DNA, 98 bp, Homo sapiens
gcgattagttgatgtggcctgcaaggctcttgcagccaatgccggaacaggatttgctgttgctgagcctcaaatcgcaatgttttgtgggaagttaa

SEQ ID NO: 808822 - DNA, 100 bp, Homo sapiens
aatgcatccatgctgtggaaaccagagttcctaaggacggtctgaagagccaagagctatttgatgaaattagaatgacctacatcaaagagctaggaaa

SEQ ID NO: 808823 - DNA, 99 bp, Homo sapiens
tgggtcctctggtgttgagtggtcggcttggtgtggtgtgcggaggagctccaggcccgtcggcgcggaggttttgtagtgcatccctgagcatgagca

SEQ ID NO: 808824 - DNA, 100 bp, Homo sapiens
cctgctcaagccgctcttccccacctgcccggtgcccgaggaggcagccaagctcgtagcctgccactccgtgcggcaagttaaagtcttcagagccctg

SEQ ID NO: 808825 - DNA, 100 bp, Homo sapiens
cctgtggttagaagacctgatcgaaaagatctacttggatatctcaatggtgaagcgtgtgcaaatgtcaattgtcaagccttggacaaagctacaccct

SEQ ID NO: 808826 - DNA, 100 bp, Homo sapiens
ccctggaatgtgaagagacaggaggcagcagacggacatccagggtttcatcaccttaaatggttttgaaccaatgaaggtgtattcccttaaaaagacg

SEQ ID NO: 808827 - DNA, 100 bp, Homo sapiens
gcggcgagtatacatgcaaagcttccaatgagtatggcagtgtcagctgtacagccacactaactgtgacagcagcctgagggaactggcatgatagatg

SEQ ID NO: 808828 - DNA, 100 bp, Homo sapiens
caactttcatggagaatggctggaagttcttggctgcggggtgatggaacaacaactggtcaattcaggctagtcaccctgctgtggaatagaaggccag

SEQ ID NO: 808829 - DNA, 121 bp, Homo sapiens
tttgggcctttggtagtagattggcctcataaagcagaaagcaagtcctattttccaccaaaagctaaaagaaggtctcaagagccacagatgtcttggatatttctgtatttcagactct

SEQ ID NO: 808830 - DNA, 100 bp, Homo sapiens
tattaatcaagcggtcaggataccggactgggactcttcaattaatctgacatttcacaaatccaaaattgccgtggatgaactctttacttcacttcgg

SEQ ID NO: 808831 - DNA, 100 bp, Homo sapiens
ttactacatgcggagaccctatgggcgtcgaccacagtattccaaccctcctgtgcagggagaagtgatggaggtatagtagttgaagattgtttgattt

SEQ ID NO: 808832 - DNA, 98 bp, Homo sapiens
gcttcccgtctcagaggcaaactgaccccagccatgataggctgctcgttcgtggtcaacaggaagttcttcggtgaaattggtcttctggatcctgg

SEQ ID NO: 808833 - DNA, 100 bp, Homo sapiens
gaaagacatggagattctcttaaaaaggtttcctatcctgggagcaggagagtgtgcctatttgaatgacaaaggtgccagtagtgccaggcactacaca

SEQ ID NO: 808834 - DNA, 100 bp, Homo sapiens
ccagtgctctgtgaatggtgttcagatcgtggaggccacacatctaaatcaaggttcacctttccttgccagtgaagatggcgtgcttggcggagtgatt

SEQ ID NO: 808835 - DNA, 98 bp, Homo sapiens
gtgtggtctttgtgggaggaataacccagactaggaatgccagcatctgccaagcatgtacttttcccaacactggtgctcgtatcatgatgttcatt

SEQ ID NO: 808836 - DNA, 98 bp, Homo sapiens
tgccgcaggcacgaagaagcataatcactctcatatctggcttgcagccaatttactggagcagggatgacgtagcccagtggctcaagtgggctgaa

SEQ ID NO: 808837 - DNA, 100 bp, Homo sapiens
tcagccctgaggagttcaaacccattgctgagaagctaacaggaccggccagccttgcagctgtatgatccaggagctcgcttccgagcgcgagagtgtg

SEQ ID NO: 808838 - DNA, 100 bp, Homo sapiens
acaaagagaaggtgcttcagcgctgggaggggggtgacagcaacagcgacgactatgacctcgagtctgacatggattcggggaaactgcaaggcttatt

SEQ ID NO: 808839 - DNA, 75 bp, Homo sapiens
aggacgacagcatccgccctttcaaggtggaaacgtcagatgaggagatccaccatcctgaaagatttcaatgcc

SEQ ID NO: 808840 - DNA, 99 bp, Homo sapiens
tcacctgtgcgggatggaacaaaagccattcgttcctggttaactcggaaacacatccagaggctgcatgcagctgccacagtcatcaagcgtgcatgg

SEQ ID NO: 808841 - DNA, 100 bp, Homo sapiens
gcagagttcgagaactaagcaaattagctgagaccacagataaagtcaaacaaggcttttgggaagaatttgaggaatgtatcctgtcaggtataatgtc

SEQ ID NO: 808842 - DNA, 98 bp, Homo sapiens
acagcctccgcgaggctgtgcgcacgctgctggggtacggctacaacttggaagcaccagatcaagatcatggcagtataactccaactgtggaactg

SEQ ID NO: 808843 - DNA, 100 bp, Homo sapiens
aaaaaacttgaaagtaacagcagtgcctacactacttaagtatggaacagtaaccaaggagcagtgaacagcagctactacagtagtggaagccgtgcat

SEQ ID NO: 808844 - DNA, 123 bp, Homo sapiens
cccccacccccctggggctgcaggagaccatcgcagagtttttgtacattgcccggccgctgctgcactttacctaatggtgtcctcagttgtgggcttctatagctctccactcttccggag

SEQ ID NO: 808845 - DNA, 100 bp, Homo sapiens
aagaggttgaaagacgtagaaaaggactttgaagaatatcctgaacatagaacgaactttttcttactacttcaggctgtcaattctcattgtttcccag

SEQ ID NO: 808846 - DNA, 98 bp, Homo sapiens
gcgaattggagaaaaagttcagtgggaagcatgtcgtctttatcgctcaggaatcagagatcattgatttcttcctgggggcctctctcaaggatgag

SEQ ID NO: 808847 - DNA, 98 bp, Homo sapiens
ctattctaaggaaaagtcttcaaagaaagggaaggggaaaaagaagcagtatctatgcccatcatggggaaattgaggcagagaagccaagacatgtg

SEQ ID NO: 808848 - DNA, 107 bp, Homo sapiens
aacacatgcgccaagaccagatcaccaatggcatggtgaatgctatttctaccctgttcgggggtcttgtctggattttggttgcctcctccaatgttcctctacct

SEQ ID NO: 808849 - DNA, 101 bp, Homo sapiens
agagcatgctcagggccccagcaagcctccagcagtggtgatttgatgaaggctgctgcaggagagttcgcagatgatccctgctcttctgtgaagcgagg

SEQ ID NO: 808850 - DNA, 100 bp, Homo sapiens
ggatcgacgcggacagcgggctggagcctgacgagctggcggtttgcaggcctttcagatatatccatctcacaagacatccccgtagaaggagaaatca

SEQ ID NO: 808851 - DNA, 98 bp, Homo sapiens
gaaatgtccatccagttgggagctatgagtcctctgaaatgaacagcatagtatctactgagcgtttcagtcaacaatacagctcgtgttcgacaata

SEQ ID NO: 808852 - DNA, 100 bp, Homo sapiens
ctggtggcagggcatgaggacagcaatggttgtatcaactatgaagtttgctggcctagacctgaactcttcagataatcagagtggaggaagtacagcc

SEQ ID NO: 808853 - DNA, 116 bp, Homo sapiens
gttttcaccagtcacatctcttactactgctagtcgctgcaacactcctctacagtttgaggatatgggccctcacattttccaaacctgtccatctgctaactattttgactgca

SEQ ID NO: 808854 - DNA, 100 bp, Homo sapiens
tcgcggcctggcccttggcctcctcctgctgctactgtgtccagcgcaggacccttcaaagttgtacaagaaagcagatgatgttgcagccattgaatgc

SEQ ID NO: 808855 - DNA, 100 bp, Homo sapiens
gtgactggaggtggctccccagctatcatggtgaacttacttcagattgtgcgggaccactgggttcatgttcttgtccctatgggatttgtcattggat

SEQ ID NO: 808856 - DNA, 99 bp, Homo sapiens
ctagaatgggtgaggaatgtgttagtgtctggagccatgaaggccttgtgctgaccaagctgctcacctcgattgtagaaggcatgaaacaaaaaatgt

SEQ ID NO: 808857 - DNA, 100 bp, Homo sapiens
cagaaggccaatcattgtcatttcaggtcgctttgctgttcgtgatatgagacagacagttgcggtgggtgtcatcaaagcagtggacaagaaggctgct

SEQ ID NO: 808858 - DNA, 130 bp, Homo sapiens
tgtcggaatcgctttaatagctggcattgctattcctgcaatgattattggcattcctgtgtatgtgggccgcaagtttaatgatcttgtggccgagaaggaagctgtgtcttcagaatgtgtcaatttg

SEQ ID NO: 808859 - DNA, 99 bp, Homo sapiens
cctgatctaacccctagaaacagagtgctgagattgattctgatgacaccggaggcagcgctgctcagaagcaaaaaatctcctttcttgaaaataatc

SEQ ID NO: 808860 - DNA, 100 bp, Homo sapiens
cctactcagccagaagcttggcctcttccatcattatggccagttggacttccccgtgcgagatgaaaaggtggtggaggtggatacagcagtcggagaa

SEQ ID NO: 808861 - DNA, 99 bp, Homo sapiens
tcgcgcagcgctgcagtgaattttccccccaaactgcaataagccgccttccaaggtagctacagcaagctgggtagcaggcagatccaaaggatatca

SEQ ID NO: 808862 - DNA, 100 bp, Homo sapiens
atgaacgccttgttgcccagttccccagttctggcagattctggaaactgtacattgaagcagagagctacattcatgggagcagccaggctcagtttgt

SEQ ID NO: 808863 - DNA, 100 bp, Homo sapiens
cagcggaggtggtggtggaggtggaggtattgttgcagcatctggcagtgagactgaggatgaggacagcatggacattcccttggacctttcttcatcc

SEQ ID NO: 808864 - DNA, 100 bp, Homo sapiens
actatcatcaccatggaaaaagtgacttgagcagtgttatctacaaacttctggcatcgaaaagtgaaggaatcagggtacaagctcttaaggcaatggg

SEQ ID NO: 808865 - DNA, 99 bp, Homo sapiens
ttcacctccgcgctcttcttcgccagcaccgtgctctccaccacaggaatcttacatcctttctgcagaacttggagaaaagtgtgaagacataggcaa

SEQ ID NO: 808866 - DNA, 100 bp, Homo sapiens
caggatgaagggggcaagtgaggagaagctggcatctgtgtccaacctggtcactgtgtttgagaatagcaggccggtgctggtgtgtgctccgagcaac

SEQ ID NO: 808867 - DNA, 99 bp, Homo sapiens
ggaaggggatataatcctggtgttatcaaagggcacgtgacacaagctgacctcaagagctccacgttttggcttcgagcaagttttggtgctactgtt

SEQ ID NO: 808868 - DNA, 99 bp, Homo sapiens
cgtgtgggagcgggagctgcggaaagattctgtttctggcgtctgcatacgcaagtccccaactcgctgaggagagctgttcagctatggctgctgtca

SEQ ID NO: 808869 - DNA, 98 bp, Homo sapiens
cctagaatttttggctccaataaatggattatattccatcacaacaagatattctgcttgccagaagacccaccaaaggcatccatgaatacgacttt

SEQ ID NO: 808870 - DNA, 51 bp, Homo sapiens
gaacagatgagaaacccggcaatgaaaaggtctgcggggtttccgagaggc

SEQ ID NO: 808871 - DNA, 100 bp, Homo sapiens
ctgaaagggaaaacccccattcattctggattggtggatctgaagtacaaaatattttccaggagtccttcaataatgttaaacagtggctgcaggaaat

SEQ ID NO: 808872 - DNA, 100 bp, Homo sapiens
ttgaacagcatcacacacctacctttaaccacagctgagatgagtgaactgagtgtggcacagaaaccagaaaaacttttggagcgctgcaagtactggc

SEQ ID NO: 808873 - DNA, 98 bp, Homo sapiens
aggacaatgcttcccaggctcgagttgatgcccacaggaaactttgaaaagcaccccaaagaactgatcagggggcccatatggcttcgaggttggaa

SEQ ID NO: 808874 - DNA, 100 bp, Homo sapiens
aatctccccagtgcatccatgtatgagcgcagttacatgcatagagatgttatcacccatgtggtatgcaccaagtagctacagcaagctgggtagcagg

SEQ ID NO: 808875 - DNA, 100 bp, Homo sapiens
cgtgcgggtcccgggttttgatcgcgcgtttgtgtagatggctcaatcacaaaggagtgagacagaaacgcctgaatgtctggctgggaattaagaatga

SEQ ID NO: 808876 - DNA, 98 bp, Homo sapiens
ttggaagaggaaccacaagaaaatcaaaagaaacttttgcccttatcagtaacacctgagcaggatcaggcaaaaatgatcatgccgaaaaagtggcg

SEQ ID NO: 808877 - DNA, 100 bp, Homo sapiens
caagcctctcagcttcggagaatggagtcttccatcaatcatatctcacagttggatatgtcaagtgaccagatagctgccaatctgcaagcagttatta

SEQ ID NO: 808878 - DNA, 100 bp, Homo sapiens
gttttccaagactttgggacttagagtggtctgtgtttacggaggaacaggaatcagtgagcagctgagatctgtatctgtggacctgaatgttgatccc

SEQ ID NO: 808879 - DNA, 99 bp, Homo sapiens
ctacgaacatcatttacatttaggaaagtgaggcaaacaccttgtaactgtaacttaattcagtgcacaaatgagatgaatgtgaacatcccacagttg

SEQ ID NO: 808880 - DNA, 100 bp, Homo sapiens
cacacaaaatgtgctggttgatggtgttaagaaactctcagtttgtgtttctgagaaaggtcccacccgaaagatgccccccagcgccagtgccgtggac

SEQ ID NO: 808881 - DNA, 98 bp, Homo sapiens
ttcactttcctcggcaagaaatgtgtgctgactccactggaacccattctctgtacacaacatacaaagattatgaaattatgttccatgtttctacc

SEQ ID NO: 808882 - DNA, 99 bp, Homo sapiens
aaagatgctgctgctaaaggtatccaggaaattgctgactctgtaaaggcagcaattccatttccgtgagggcgtttctagatgaagatgacatgagct

SEQ ID NO: 808883 - DNA, 100 bp, Homo sapiens
cgaaatggaccccaactgctcttgcgccactgtcaatgcagaccctgcaggacttgctcactgatcttcatgcactccaggtcaccatcacagccctcag

SEQ ID NO: 808884 - DNA, 98 bp, Homo sapiens
gactcctgctgcattaatgttactgtgggctgtgggattaatttcaacgagaaggcgatccataaggagttggtgttggtattaggagatctgcacat

SEQ ID NO: 808885 - DNA, 100 bp, Homo sapiens
ccctccttgaatgcagccctgatgcatacattacagcggcatagagacatattgcaggtgattttctcagcagaacagacttatgagttgatgcggtgtc

SEQ ID NO: 808886 - DNA, 99 bp, Homo sapiens
ttcacccattgtttgatgagacctttgaattgtggattttcaagacacgaatgctcggagtctggcagaaaggaagagagaagaggagaagcagaagca

SEQ ID NO: 808887 - DNA, 100 bp, Homo sapiens
tgttatggctgcggtccagaacccggccctcaccgccctcaccacccctatccagacggctgcccttcaagtaccaggatttcaaggatttggatttgga

SEQ ID NO: 808888 - DNA, 101 bp, Homo sapiens
gccaagaagaagggcggaaaccacatccccgaaagagagtttgaggagacaatggatgcactccaggctgacatcgaccagctggaggcagagaaggcaga

SEQ ID NO: 808889 - DNA, 100 bp, Homo sapiens
aaaggaacccaacagagatctcttctgttctccactgctaggccggggtttgaagtctcacgcctacattcacagtgtccagtttagccaccatgttttc

SEQ ID NO: 808890 - DNA, 101 bp, Homo sapiens
cagccttcctcggagaacaagactgcccacctccacaagggcttcctggccctctaccaaaccgtggggtctccgtctctccaccgggggcttcatccttc

SEQ ID NO: 808891 - DNA, 98 bp, Homo sapiens
gagcacataacggggttcgggtgtctcgtgtgtgaacatcacagcagggaacagtacactgggaagctccgagtgagatcacactccttgagtccaac

SEQ ID NO: 808892 - DNA, 100 bp, Homo sapiens
attatcaggttcacgccaacagtacctcattgctctttggcgactcttattgatatctccggagcatttggataatgtgacagttggaatgcagtgatgt

SEQ ID NO: 808893 - DNA, 100 bp, Homo sapiens
agtctagaattcacacagagccacctagggcaggattatttgttgcctgaagcagaagaaattactatgattagtattcagcttgctgctagattcctct

SEQ ID NO: 808894 - DNA, 99 bp, Homo sapiens
cactggcggccgaggtagaggcagtggcgcttgagttggtcgggggcagcggcagatgccttcaattaagttgcagagttctgatggagagatatttga

SEQ ID NO: 808895 - DNA, 100 bp, Homo sapiens
cgtcatctttccaaagaagagtgagtagcttggttggtggtaccctaaaattagggcatgattaagtttggtgccctggttgtcagatgttggaaagcag

SEQ ID NO: 808896 - DNA, 99 bp, Homo sapiens
ggacagcggcagcgacgagaacctggatcagcttatggaaaagtatttctagttcgtaaaataagtggccatgatactggaaagctgtatgccatgaaa

SEQ ID NO: 808897 - DNA, 100 bp, Homo sapiens
gcagaggaccccatccgcagccactccttccggaacacggttcaaaccttgtactactcagctgatcacaagctgcttgatgggaacctactagatggac

SEQ ID NO: 808898 - DNA, 100 bp, Homo sapiens
atcatggccataccctcacctccaagattctcttccgggacgtggtccaagccgtgcgcgaccatgccttcacggttggatggcaagcatgtggtgtttg

SEQ ID NO: 808899 - DNA, 100 bp, Homo sapiens
tcagctcggctgagaaagctggaggtggaagccaacaatgcctttgaccagtatcgagacctataacagtcttcactcctatgctgatttttctggtgcc

SEQ ID NO: 808900 - DNA, 100 bp, Homo sapiens
tcggcgtgctgaccagcggcggggatgctcaaggaccgtataatagacgctggccccaaaggaaactactctcgatttatgaatcacagctgccagccca

SEQ ID NO: 808901 - DNA, 51 bp, Homo sapiens
tccgagaggtgaacagagcccctgatgttcgaagaagaacaatttatgaat

SEQ ID NO: 808902 - DNA, 51 bp, Homo sapiens
gaaggtggagccaccagcctctccttggccaagatgctgaattatcaggga

SEQ ID NO: 808903 - DNA, 100 bp, Homo sapiens
agagagaggctctttgaactttggatgctttattgtacaaaggtactccaaagattcaggtttactcacgtcatccagcagagaatggaaagtcaaattt

SEQ ID NO: 808904 - DNA, 100 bp, Homo sapiens
tgcggacagtatgaggcaagcgcagggggacggggaccagcagctgtcgccgccgctctcagagattttgattcgctttccaaggacaatgtcttcgaga

SEQ ID NO: 808905 - DNA, 100 bp, Homo sapiens
cacgcagaacgtcaacaccaagtgcatcaccatccccaggtgactgggtacctggatatgtgatcgagtattcttctgggtgtttctatgaggatgtttt

SEQ ID NO: 808906 - DNA, 119 bp, Homo sapiens
cttatcaatcatcaatgaaaaagtaccttttaatgatacaacatcctcctggatgaagaggggcacattaagatcacaggtttgtaaaagacggcaggccccctccatggcttcatctc

SEQ ID NO: 808907 - DNA, 100 bp, Homo sapiens
cgaattggagaaaaagttcagtgggaagcatgtcgtctttatcgctcaggctcaggggagagagaaagcccagaaagaaagctactccagggtcctatgg

SEQ ID NO: 808908 - DNA, 100 bp, Homo sapiens
cggccacccgagacgcggcgcgcacgctccggcctgcggtccggcctctttggcctacccccgttggctccgctgccccaggtcgatgagtcccctgtca

SEQ ID NO: 808909 - DNA, 99 bp, Homo sapiens
acgttcggatgagctacagaggcacaaacgtacacacacaggattggaggctgttgtcattggagaagttcatgagaatgttactctgcactgtggcaa

SEQ ID NO: 808910 - DNA, 98 bp, Homo sapiens
atcgatttgtctcaatgaaggttgatttcatcagactaaaaagttacaggcttggtgtaaaaattgccaaagcagttgcctgccacaactttgtaaaa

SEQ ID NO: 808911 - DNA, 100 bp, Homo sapiens
ggattgagccaggacacaacaccgcggagccctgcaggcggacatggatttgattgacatactttggaggcaagatatagatcttggagtaagtcgagaa

SEQ ID NO: 808912 - DNA, 100 bp, Homo sapiens
cagaacgagtatgtggtgcaaggtgccattgagctcctggccaatcaatacagcatccagtacaaaattggacagctgtacatgatcagcaaacacagcc

SEQ ID NO: 808913 - DNA, 100 bp, Homo sapiens
gcttgctgctgaacctgagctgcaagttggaattgatataatgaagactagttttccagcacgctccctgaaatttggcaggcagactggaggtgaagag

SEQ ID NO: 808914 - DNA, 98 bp, Homo sapiens
ctgcccacagccctccactcaacacaggaagaaacgcctacacctcagaggaaaggccttcgatcaagtgcactgcggccaaagagaccagaaacgcc

SEQ ID NO: 808915 - DNA, 98 bp, Homo sapiens
acgatgtgactccgccgccggggacccgtgaggtttgtgtggaccccgagacactgtgcatcttagccaacatagcggatgggacaacagcaaaagat

SEQ ID NO: 808916 - DNA, 101 bp, Homo sapiens
acattccttttaacctatgtcttacaaaggcccaagctgtcattatttgtatcaaaaacaaagaatttgaaaaggcttcaaaaattttgaaaaaacatatg

SEQ ID NO: 808917 - DNA, 100 bp, Homo sapiens
ctctacgtcgcctgcgcccagaagaaatgtttgaaacatgggtattgtcttctaagaactctgaagcaatgtcagacattgagggaagctctcattgctg

SEQ ID NO: 808918 - DNA, 100 bp, Homo sapiens
tcaatactacctttatttccaccatagaattctgcttggtcagaatcgtgatggcattgtgttcagcactgatgactattttcaccatcaagatgggtac

SEQ ID NO: 808919 - DNA, 136 bp, Homo sapiens
ttgagaataaagatgagctctgaaaattgtttcgtagcagagaacagctctttgcatccggagagtggacaagaaagaaataaaaagggtcagttggaggtagtttagtcactaaggccactgcaacttcctctct

SEQ ID NO: 808920 - DNA, 100 bp, Homo sapiens
atatcaagttcaaaaccagcaatttcaaaatgtcaagctgtcagctgaggtggagccatttattccccagaagaagagtcctgatacatttatgatccct

SEQ ID NO: 808921 - DNA, 100 bp, Homo sapiens
ccaagcaagccaccccacagccaccaagctggcagagctgccaccaacccctctcagcttacagggatcttcagaccagggaagacatacggaatgcagc

SEQ ID NO: 808922 - DNA, 100 bp, Homo sapiens
tgagcagagttctggctggactagttggctcggaattacccaaagcaaaaagaagttgtttctgatgtggatattagcaatggagtggaatcagtgccca

SEQ ID NO: 808923 - DNA, 98 bp, Homo sapiens
gtcaagaaaatagatgcttctaaatctgttgatgaattgcgtgttgtatcacaagatgtgaaattgagccttcaagaattggatgaactttatgtcat

SEQ ID NO: 808924 - DNA, 100 bp, Homo sapiens
tcattttgctctcagtcatccttacccctaaagaaggagagtccagggatgtggtcagacatatttccaacatttgggtcaaaaccttgtccaacaagac

SEQ ID NO: 808925 - DNA, 117 bp, Homo sapiens
aagcaagacatcggggacattctgcagcagataatgaccatcaccgaccagagcctggacgaggcccaggccaatttgacaagtatgcgcccaagctggacagcccctacttccgac

SEQ ID NO: 808926 - DNA, 100 bp, Homo sapiens
ttgtgaaagcagtccttgttcctatggcctaatgaacaacttccagataacgaaggaggcccaacttcattcaataaggagcctgacggatttatcccag

SEQ ID NO: 808927 - DNA, 98 bp, Homo sapiens
agctgaagaactcccaggaggcccagcagagacaagcaacccttgtgaggaagctgcaggccaagcaaagaatggccgagtggattctgaggaccgga

SEQ ID NO: 808928 - DNA, 101 bp, Homo sapiens
gaatcctcatgctcctactatccatttcaactacagatactttgaagtagaagaagctgatggtcctgcggtagactggtgggcacttggagtttgcttgt

SEQ ID NO: 808929 - DNA, 99 bp, Homo sapiens
cagtgactttgttgagtgtcaaaacatcctcaagcccagctgcagctccagcaggtggcgctgcagcagcagcagcaacagcagcagttccagcagcag

SEQ ID NO: 808930 - DNA, 99 bp, Homo sapiens
gaggacgggtcggtcctgcggggccagccctttggggccgccgtgtcgactgccggggaagtgggtggagccatcgaagcccccacccacaggctgaca

SEQ ID NO: 808931 - DNA, 98 bp, Homo sapiens
ccacatcttccggccaacttccattgaacttcccagcactcgaaagggaccgaaatggagagcaaaggtccctccagctacaaggtgggcaccatggc

SEQ ID NO: 808932 - DNA, 100 bp, Homo sapiens
ccaggtcccagcagagctgctgctgattttctccctgggccactgccctaaccaggactggctggcggtcggaatggagagtagcaacgtggagatcctg

SEQ ID NO: 808933 - DNA, 100 bp, Homo sapiens
agtaaggatcaatgatttagaggctgcttttatttataatgacccaaccttggaagtttgtcacagtgaatcaaaacagattttgcctaccattttacag

SEQ ID NO: 808934 - DNA, 100 bp, Homo sapiens
tagtcgtcagatcgcccgtcctggtatcacagtgcttctgttcagtattttcagacagagtggtatatactccagaaagcctctacaaggaactcttctc

SEQ ID NO: 808935 - DNA, 100 bp, Homo sapiens
tggccttgaagatgatggaactttcagaagaggtgctgacacctgatggaagaccgattcagaatccacattcatctcaatggaaggatcctgccttaag

SEQ ID NO: 808936 - DNA, 122 bp, Homo sapiens
tcgttacctgcaggtattgggagatccacagctaagacgccaggacccactggaagcctagaaatgttatagctgaggtggtaccagtttaagaagtgagaacttcttcactgactgaaatt

SEQ ID NO: 808937 - DNA, 98 bp, Homo sapiens
agtctcagaactgttccttcagccaaagaaacaagccgtggaataggtgtatcaagtaatggtgcaaagcctgaagagccagcaccgctctttgacct

SEQ ID NO: 808938 - DNA, 100 bp, Homo sapiens
ataaccgactgacctggatagtagttgttcttcagcctctacggcagacacatgcaggccaacccagaaccaccgaagaagaataatgacaaatcgaaaa

SEQ ID NO: 808939 - DNA, 100 bp, Homo sapiens
ctgggtctcagccccgcgtacggcctttcacgagtcttcaagccttcagaatgattacggacctgaagccaaagaacaagatgcgctagtggacagattg

SEQ ID NO: 808940 - DNA, 100 bp, Homo sapiens
caatgttgccaaaatgtttcctaaagttcgtgaatctcaacttggaatgaaagctactggttgattttaaagtgcctgggcctcacaggtttggagatgt

SEQ ID NO: 808941 - DNA, 98 bp, Homo sapiens
tgggcaccgcggatctggggccgtcctcagatgctgtctttgcaggtgccatgcctacaatggcaagcatcaagctgtctacacttcatcccattgtg

SEQ ID NO: 808942 - DNA, 98 bp, Homo sapiens
aggagttcgtctcttacgtctgcggaagtgcagctgcctcagttcttagcgcagggctcaaaatttgggcggggaactggactcactcagccttctca

SEQ ID NO: 808943 - DNA, 100 bp, Homo sapiens
gcagcggaggcgttggcaagtcagccctgacgcttcagttcatgtatgacgagatctcttccctgaagaacaggctgaaaaaggtctccacaaccactgg

SEQ ID NO: 808944 - DNA, 100 bp, Homo sapiens
accaatcctaaagaaaatcatttgtgatgggtcagctagtatgcaggctaggcaaactaattatatccagatcgagagacagaagattctgaaagggttc

SEQ ID NO: 808945 - DNA, 100 bp, Homo sapiens
agccaccccagcagaggccttatggatatgaccagtttgtgaagaaatatgggaacctttttagcttggagcttggtgacatatctgcagttcttattac

SEQ ID NO: 808946 - DNA, 100 bp, Homo sapiens
tgggctctggcactgtcattggcagcaattgctttatcaccaacagtgtcattggccccggctgccacattggatgggcaacactccagattcagcctca

SEQ ID NO: 808947 - DNA, 100 bp, Homo sapiens
agctttggaaggctgaatgcactaaacatgaagagcttgaaagcgaagttcaggaagagtgacgaagatgatttgaatgggatccacattgtggcctttg

SEQ ID NO: 808948 - DNA, 100 bp, Homo sapiens
caaccttggcttggtacagatggaaaagaccatcaatcaggatttcgagcagtcaaatttactttgcacaccagagatctgctaagcacagtgttatata

SEQ ID NO: 808949 - DNA, 100 bp, Homo sapiens
tgaaacttcagcagaactcagaatcgaaggttgtgaaacagctattttattcccaatgcgttccaagaagatttttggaagcgtgcatccagtgagacca

SEQ ID NO: 808950 - DNA, 104 bp, Homo sapiens
gtaaaaggccactgactcctacttcctctgtatagagcaactgttgaactcagctgcctgtagatgatgattattctccaccgtctaagagaccaaaggccaat

SEQ ID NO: 808951 - DNA, 106 bp, Homo sapiens
ggaacagaaccaaaggctattggatcagctcagcaggggacaaactctgcctgggcgagtccttttcctgcgttatgtcgttcagaccctagaagatgactttcag

SEQ ID NO: 808952 - DNA, 100 bp, Homo sapiens
cgggtcttccagagcgtgaagatcaagatcgagacacgctgtgaacaagacaggccttccccaaccacagcgccccctgcgccacccagcccctcgccct

SEQ ID NO: 808953 - DNA, 100 bp, Homo sapiens
ctgtgaagccacacagtgtccagatacgaggggcaagtgtccagagaatggctgggatgaaagtacacttgaactctttttacatgaacttgcaatcatg

SEQ ID NO: 808954 - DNA, 100 bp, Homo sapiens
agaagatgcctcgaactaaacaaattcatcccagaaatctaagaggtggtgtgacaagaatgactgtctccctggtggttattgtttttgagcttactgg

SEQ ID NO: 808955 - DNA, 99 bp, Homo sapiens
acaagacgtgggctctggcaccagcaataacagccaagcctgtgcccagataccgtggccagccagtgacagaaaaaagagtgaatgtgcctttaagaa

SEQ ID NO: 808956 - DNA, 100 bp, Homo sapiens
gcttgggacgaaagtgtcaaggcattacggctcccattgagacccgggaagccctaatcaagatcctggatgacctcagccccagagaccagttcaacct

SEQ ID NO: 808957 - DNA, 99 bp, Homo sapiens
tttgatccagaagaaccgccgagtggtgctggcctccttcctgctcctgctgctggggctggctcttggagcagtcggagtggcagccaacaaacgtgg

SEQ ID NO: 808958 - DNA, 100 bp, Homo sapiens
gagggagagcaagaccatcatgctgcgcggccttcccatcaccatcacagagagcgatggggagaagcgagcggacatccagctgaacagcttcggtttc

SEQ ID NO: 808959 - DNA, 100 bp, Homo sapiens
cggagattgacaatcaatgggccatcttggacgcctatacggttcagacatccgagagcatgaccccaactgccacttcagagacttatttgaaagcttt

SEQ ID NO: 808960 - DNA, 100 bp, Homo sapiens
agtgtgatggaatcaagtcagacgtgaggaaggacctacctccttggtcaaagctgggatggggattattgcatcgagcttttagtgtcttcttattcaa

SEQ ID NO: 808961 - DNA, 100 bp, Homo sapiens
agagcttccgagaccacacttttctctatgaaaagctctacactggcaagccaaaccttgctactctccagagagaccggatcttcaaacattttaccag

SEQ ID NO: 808962 - DNA, 99 bp, Homo sapiens
ttcaacaagccagatatagatgcctgggaattgcgtaaaggagaataaaggcagccccgttgatgactgaaaatgacaaagcatccacctaacagacga

SEQ ID NO: 808963 - DNA, 100 bp, Homo sapiens
cttctgtacagcagctgaaagaccagtgaaattggagcgatttgaaattccaatcaaggttcgattaagcccagagccatggacccctgaaactggtttg

SEQ ID NO: 808964 - DNA, 100 bp, Homo sapiens
cagttagaaagggaacagctggaatgggagagagagcgcagaatatcaagtgctggactccctggaggaaaagcggaagcggcagcggtctgaacgcctg

SEQ ID NO: 808965 - DNA, 100 bp, Homo sapiens
gcattggggtccagccgtccccagaacgcagatcagaggtagtcggacctttcccgctggcgcgcagcctcagctaggtttgacagtgctctggaagacc

SEQ ID NO: 808966 - DNA, 100 bp, Homo sapiens
aagaaatcccactgggcagagcttgaaataagtggtcctcagccagcagagccacgttccttatgagcaccgtgggtttatttcattttcctacaccact

SEQ ID NO: 808967 - DNA, 98 bp, Homo sapiens
gtcttcccggcgagtccgcgacggtcgccgcccacggcgaggttaagaatagacccaccagcatttcgtgggatggtcttgattcagggaagctctac

SEQ ID NO: 808968 - DNA, 100 bp, Homo sapiens
tctacaatttttagtggagttgccatctatgttaatggatacacaggtgtcaactctgcccgctcagttcctccttcctacccaccaccgcaggacccgt

SEQ ID NO: 808969 - DNA, 100 bp, Homo sapiens
caagaaggccatctatgcatcgaaggatctgaagcttgttggaattagtcaacctaaatatgcagcagaactggctgagaatagaggaaagaatcgctat

SEQ ID NO: 808970 - DNA, 100 bp, Homo sapiens
aggaagaggacacacagagtattggtcctaaagtccagagacagagcactaattaggctccagtgatcattctacatatattgtacaaacactagatttt

SEQ ID NO: 808971 - DNA, 100 bp, Homo sapiens
cctcgggaagccattttgcgtcatgccaaagcagcagaagacagcccatattgggtttctccagcatattccaaatgcttgtgaccacaccagaaaaatg

SEQ ID NO: 808972 - DNA, 100 bp, Homo sapiens
gcccattgaatcagctgaaaccataaggatggggatgataagaagagacctgtgatcattcatcgagccattttgggatcagtggaaagaatgatagcca

SEQ ID NO: 808973 - DNA, 99 bp, Homo sapiens
gcctccacacccgggcccgggtctctctaaaggacctggccctgcagctgctgcacaagaagatccaggttttgatggtacagtccaggtctatgatgc

SEQ ID NO: 808974 - DNA, 98 bp, Homo sapiens
ggagaacagtccgaaatggcggggactgttggtctcggccctgcggaaggcctccttgtatcagtcctctatagacagaagcctggaaagacccatga

SEQ ID NO: 808975 - DNA, 100 bp, Homo sapiens
tgccggaaccgacgccgggagctgacagagaagctgcaggcgcaggcgggtgaaaatgaaagccggctgtagcatcgtggaaaagccagaaggaggtgga

SEQ ID NO: 808976 - DNA, 99 bp, Homo sapiens
aaacattcaagttgagcagatgacaaaacttcaagccaaacatcaagcagaatgtgatttgcttgaagatatgagctcaaatagctataactgtaccaa

SEQ ID NO: 808977 - DNA, 100 bp, Homo sapiens
ggggaccagaggaactcagccctgattgcgcttcagtatcagacacagcacagcagccatctgaagagcaaagcaagtctcttgaaaaaccgaaacaaaa

SEQ ID NO: 808978 - DNA, 100 bp, Homo sapiens
caattcaagatatccgaaggttcaattatgtggtcaaaccagcagacttcataggaaagcaagcactgaaacagattaaagccaaggggctgaaacgaag

SEQ ID NO: 808979 - DNA, 100 bp, Homo sapiens
tcaccgcctgctggaggaagacacccctcgatacatgagagccagcgaccctgccagcccccacatcgatgacagtcatgtccctttccagggacctcaa

SEQ ID NO: 808980 - DNA, 98 bp, Homo sapiens
ggtggactccttcggcagtccacccaccgccgccgcctcccagtattctaccttgtaaatactgttatttgtatatactgtaaatgatgacatcggtg

SEQ ID NO: 808981 - DNA, 99 bp, Homo sapiens
tcacatccgatgcaccctttttgtcagattatcaggatgagggttctgccctgatgtttcctggaataatgctgaggactgcctttcgggtagccgccc

SEQ ID NO: 808982 - DNA, 98 bp, Homo sapiens
acggcccgggccggcgctccaaggcccgcccgggagggccggggccgcgctcagatactctcagcccctgcatgaagaaatagcattgcataaacacc

SEQ ID NO: 808983 - DNA, 100 bp, Homo sapiens
ccagtttgctgggccatcttgaacagcgaggcttccagggttttagccaggtgattggtgaaaacactaaacaaccctgagcccagggccaacccctacg

SEQ ID NO: 808984 - DNA, 100 bp, Homo sapiens
cacgatgttcccctcgcggaggaaagcggcgcagctgccctgggaggacggcagacctgcaggctgggacaatgaaaagaaaatagctattttacatgaa

SEQ ID NO: 808985 - DNA, 99 bp, Homo sapiens
gaaatgaaaggagattccaacctacttcaggacccagtggtcttcagcgtgtagtaaaaccaacctcaattactgttcatgattcagagagtgatgatg

SEQ ID NO: 808986 - DNA, 100 bp, Homo sapiens
ggttcgcggggctgccggagaccggccgcatggggcttcctgaggctgcggtggtcacgcttcgcccgtgtcctcctcacccgctcctgcgccatcctgc

SEQ ID NO: 808987 - DNA, 100 bp, Homo sapiens
tgggccgccgtcggcagcaagaacagagagagaggtggacagatctgagagatactgaggatcataaaaggattcctctgtactagcacactcccctaaa

SEQ ID NO: 808988 - DNA, 98 bp, Homo sapiens
agggtggaagctgggaaacccacaggaggcaaccacactagtttagcctacaaggagaagatgaaggagctgtcggtgctgtcgctcatctgctcctg

SEQ ID NO: 808989 - DNA, 100 bp, Homo sapiens
ctcagcctcccgagtagctgggactataggatgcctcattgatggacatgaactccttcagccctatgatgccaacatcccctttatcaatgataaacca

SEQ ID NO: 808990 - DNA, 100 bp, Homo sapiens
gcgccgtcgcgccactcctccgaatagttttgaggcagctgtgccatcaaatagccacattgtttcggaacctggaaagaatgtcacactcacttgtcag

SEQ ID NO: 808991 - DNA, 99 bp, Homo sapiens
gagacttgggcgtgtgtcttgttagcttgagatggtggaggcatgcatgtctaccaaacatgtgggacattaggaagagacggggtcttgctctgtcac

SEQ ID NO: 808992 - DNA, 121 bp, Homo sapiens
ggcagcagaagggcgactgagtactcaacatattgactgtatttgggctgcagcacagtaatctatgccagcaattatgacaatgttagcagaccatgcagctcgtcagctgcttgatttc

SEQ ID NO: 808993 - DNA, 100 bp, Homo sapiens
aagcagctcaggaggctgttaaactgtttcagcaagaaaaacatctgccagccagtgacccggaaaaccttcatgaaaaacaactttgaacacatccagc

SEQ ID NO: 808994 - DNA, 99 bp, Homo sapiens
ccaaccagagcttgtgtagcgtcagatccttgagtgataaaggagtagagcattagtgccagcagtagttcccaagggctgtctcagccatccacccag

SEQ ID NO: 808995 - DNA, 99 bp, Homo sapiens
gactttatacagggacgtgatgctggagaattataggaacctcgtctccctgggaatgggtaggacaagtggaaataagtgccctttctcttatgtaca

SEQ ID NO: 808996 - DNA, 98 bp, Homo sapiens
ggaaatgtagaaaatgtatagcaagctctggttgttttatggagtatcttgagaatcaagtgattaagcaaagtgtgggatgctgtctcaggagatga

SEQ ID NO: 808997 - DNA, 100 bp, Homo sapiens
gctgacagaggcagggtttgagagtgccgagaaagcatccgtggaaacgctgacagagatgctgcagagctactatcaagaaatccaagtggtaatgggc

SEQ ID NO: 808998 - DNA, 100 bp, Homo sapiens
gaaagttggaacctctgacaagaccaagtactaccttcaagatgaaacgactacaaagtgccatgacagaaggtggtgtggttctacgggaacctcagag

SEQ ID NO: 808999 - DNA, 98 bp, Homo sapiens
tcaaatgaagattatcactccacttgatgaacatcttagaagcagaccaaacgatcttgacattggtgccaagaacgtgaagctttacgtcaacagaa

SEQ ID NO: 809000 - DNA, 100 bp, Homo sapiens
atccacaaggattcttttcaatacatcctaaaacaggttggatggcaagcatgtggtgtttggcaaagtgaaagaaggcatgaatattgtggaggccatg

SEQ ID NO: 809001 - DNA, 99 bp, Homo sapiens
tcgagagctcgccccgaacgggggtcttcctcctccgccgttgacaggagatacaactcgtcaacgaatcaaattcagtgatgacagagtatgcaagag

SEQ ID NO: 809002 - DNA, 99 bp, Homo sapiens
cgacccgcgccctgctccctctcagcacctgggcggacggttttgaaagagggaaggaagatatttctcaaaataaagatgaatcttcactttctatgt

SEQ ID NO: 809003 - DNA, 100 bp, Homo sapiens
tttgaagtacaccgtggtgacattgtatcattggtcacaatcctggaggaagagaaggctcagcaagaagagcgcatgaggatggagtccagaagacagg

SEQ ID NO: 809004 - DNA, 100 bp, Homo sapiens
tgagcctagtcctgctgttcctgatccgcactgccctttttgcaccccagggagctgctgctggtgtctttcaggttgcagaaaagatggaaaaaaggac

SEQ ID NO: 809005 - DNA, 99 bp, Homo sapiens
tgaattttccccccaaactgcaataagccgccttccaagggtggcccagttgaaatccttcccttcctctaccttggaagtgcctaccatgcatccaag

SEQ ID NO: 809006 - DNA, 98 bp, Homo sapiens
ccaggtcaagagcctctgcgagaagctatgctaagaaggaatctgatcttaatggcgcccagatcaagcttcgagaatatgaagcagcactgaattcg

SEQ ID NO: 809007 - DNA, 99 bp, Homo sapiens
ggccagcccgagtgactcactcggccaaggaaactcccagggcccgcccaggacccccaagccgccgcggacgcagatcctgggtttgagcagtttaaa

SEQ ID NO: 809008 - DNA, 101 bp, Homo sapiens
ctgccccatgacatgtattctcgaaccttgatgctctgcacgaccaccttgctaccatctacccaggaatgcgtgcaccttcctttaggtgcactgatgca

SEQ ID NO: 809009 - DNA, 100 bp, Homo sapiens
aagccgtgggcccagaggacaaaacaaacctgaaggatgtgattggcgccgggttgcagcagttactgccccccgaatccaagcccaacttcacccctct

SEQ ID NO: 809010 - DNA, 101 bp, Homo sapiens
ctcgggagccgtggggcagaggctgcagagccccaggagggtgacgcatccaaagaagacattgacactgctatgaaattaggagccggttaccccatggg

SEQ ID NO: 809011 - DNA, 98 bp, Homo sapiens
taaacactgtgtgatagttcctacacatctcattatagtttgtgactattatatggttaaaaagattttggaggaaaacagttcaggtgacttgaaca

SEQ ID NO: 809012 - DNA, 98 bp, Homo sapiens
tcagacacagagaggaggctgaacgaggctcggagggagcatgccaaggccggtacctggacaacatccacctgcaccccgaggaggagaagtaccgg

SEQ ID NO: 809013 - DNA, 98 bp, Homo sapiens
agagttccagaaggtgcagattaagagatttgaggtctctcagcttctttcaatgcttcaccaggggcaatatcagccaagaccaagttttcgaggaa

SEQ ID NO: 809014 - DNA, 99 bp, Homo sapiens
cgccggttttgaccgccacattaccattttttcacccgagggtcggctctaccaagtagtacgaggatgtcgtccaggaaagattgtgcagatgactga

SEQ ID NO: 809015 - DNA, 98 bp, Homo sapiens
gcgccgtgacctgcaggtactgacagatccgtagggaggacaccgtgacttcccggacgctgggaaatggtcgctctggtgcagtggacagagagtgt

SEQ ID NO: 809016 - DNA, 100 bp, Homo sapiens
gctggttgatcgcactatgactctggaagaagtccgcggccaggacacagttccggaaagcacagccaggctgatcagctgaccgaagaacagattgctg

SEQ ID NO: 809017 - DNA, 100 bp, Homo sapiens
acagatcagggaggctgtcgtggcagtccatcaaggggacccacctcaccatcacccaggcccaggcgcagtcgaacctcctggggaagtgccgccggcc

SEQ ID NO: 809018 - DNA, 100 bp, Homo sapiens
cattgtagcctcaaactcccaggctcaagcagtcctaccatgtcagccttcccagtagctgggaccacaggtggacaagagcaaggaccaagtgtggaag

SEQ ID NO: 809019 - DNA, 100 bp, Homo sapiens
tgggaaatctggatgccaaacgagattggggccatgccaaggactatgtggagattcagaatggacagtttagaagaacctcagaaaaaagtctttaagg

SEQ ID NO: 809020 - DNA, 148 bp, Homo sapiens
aggtacctggggcccaagatttggtggatttctctccagtttatcgatgtctacatatatattctgtcctggttattcagcgatagttatgacctcccggttacgtgcgttgggtggaagaattaataatatacgcacctcggagtta

SEQ ID NO: 809021 - DNA, 100 bp, Homo sapiens
ccacctaccactgtccgagtgacacacaaataacagacgagtacctttggaaaggtcacgctctcgccacaatggagctatctcatctaagtgattcctg

SEQ ID NO: 809022 - DNA, 100 bp, Homo sapiens
ctttctggacagaccaacctgtcagtgctgcaagattggtagcttatgtcgatcttgatgaaagagcaattgatgctctcagggaatttaatgaagaagg

SEQ ID NO: 809023 - DNA, 98 bp, Homo sapiens
gaaggaaggattcaccacctccaggaaaaggaaaagcaggtgatattctcagtggagaccaggacaaggaacagaaagacccttactttgtggagacc

SEQ ID NO: 809024 - DNA, 100 bp, Homo sapiens
ggctgggccgagaacccgctggtttattgcgacgggcacggctgcagcgtcgcggtgcatcaaggtctatgttaacaatgaatgggcaaccagtgttggg

SEQ ID NO: 809025 - DNA, 100 bp, Homo sapiens
gaaaaccaaggttctcatgaatctccaactttaaatcctgcctccaagactgcagagaatgccaccagtggggaaacattagaagaaaatgaagctgggg

SEQ ID NO: 809026 - DNA, 99 bp, Homo sapiens
tcgggatgactttaaacgagagctggacagtattactccagaagtccttcctgggtggaaaggaatgagacgactgggtttggattcagaagaggatta

SEQ ID NO: 809027 - DNA, 98 bp, Homo sapiens
ccgagtggaagaactgtatcattgtttcacctgacgcagggggagccaaaagattctttgtgggaaagagattcctcgctggatcaatcgacttgcct

SEQ ID NO: 809028 - DNA, 99 bp, Homo sapiens
aggatttggtttcagcatgtccttctctgaatgatgaatacttttactactgtgacaacattaacggttgttggtgtagcccaggccatcaacaagaaa

SEQ ID NO: 809029 - DNA, 99 bp, Homo sapiens
aaagatgtcggttgggagaaactagctctgatcctaacaggccacgttaaactgcccatctggagaatcgcctgcagacctgtgttgcgtggtgggtct

SEQ ID NO: 809030 - DNA, 98 bp, Homo sapiens
attcggggagaagtgatgttctttaaagacagattttcagctgaactctcatctctcaacactggcaaatattcataagatctaccacacccttaata

SEQ ID NO: 809031 - DNA, 100 bp, Homo sapiens
ccctgccagaatggaggcacctgtattgaccttgtgaaccatttcaagtgctcttgcccaccaggcactcgggatcctgtctcagaaagaagagtgggag

SEQ ID NO: 809032 - DNA, 100 bp, Homo sapiens
atgtcgagggaatgcagaaagagttaaggaaggcaggaacaagatcactcaaggtgaaggataatctactaataccagcactttgaatgaaaatttgttt

SEQ ID NO: 809033 - DNA, 99 bp, Homo sapiens
caacattcacaagcgcatccatggagtgcttcacaggctgctcaagaagccgagatcaatgccagaaaagccaaaaactctgttactagcctcctcagc

SEQ ID NO: 809034 - DNA, 100 bp, Homo sapiens
tctcgaaacctcaacatccagctcaagtggaagagacccccagagaatgggagtgcatccgccccaacccttttccccctcgtctcctgtgagaattccc

SEQ ID NO: 809035 - DNA, 100 bp, Homo sapiens
aagctactactgccttaaactttttgcacttataccatactattatactttgtcatacttcagaaagttccatgccattgcagtgtcaactaggcctcag

SEQ ID NO: 809036 - DNA, 98 bp, Homo sapiens
gacaggagtactccacagaggataaatttcaacctccggggccacaatagcgaggttttcaaatggaacattttgatgcatcacttagtacctatttc

SEQ ID NO: 809037 - DNA, 101 bp, Homo sapiens
ctttgctaccaggacctacggcaccagtggcctggacaacagacctctgtttggggagacgtccgccaagagttctttaaagttgtatcaggatactcatc

SEQ ID NO: 809038 - DNA, 101 bp, Homo sapiens
aaggaatgaaacccttccagctcgatctgctcttcgtctgcttcttcctcttcagtcaagtggccagacgcaccgggtctgcctcctcatctgcaactcac

SEQ ID NO: 809039 - DNA, 124 bp, Homo sapiens
ctcggaggaaccggcagctctccacgcccctgcccgaagcctgacccgactgcctctctcagtgagatttctcaaaggatggttctgtttcctgctctctgcaaggagaaaatgaatgtcttat

SEQ ID NO: 809040 - DNA, 98 bp, Homo sapiens
gcgacggctacaagaagcgggccgcatgcctgtgtttccgcagcgagagcgaggaggaggttgaccagatgttcgccgccttcccccctgacgtgact

SEQ ID NO: 809041 - DNA, 100 bp, Homo sapiens
gccgagacccctcagggcggccgagcactgcagcctgtggtgttgaggctcacagcgatgccatccagccctgccacatcagagaggccattcgacgcta

SEQ ID NO: 809042 - DNA, 133 bp, Homo sapiens
gtcatggtttgcactggccatcacaccaatgctcatctacctctggaaagcttccctgatccggcactccacccagagcctctttgagtacatgaagggcattcagagcgacccgcaggccctgggcagcttc

SEQ ID NO: 809043 - DNA, 100 bp, Homo sapiens
tgctggagagggaagagaaagtctttatttacagcttcatggagacctggtcagaggatcagcactgccagtggagatgggcgtcactactgctaccctc

SEQ ID NO: 809044 - DNA, 100 bp, Homo sapiens
gagcggggcaaccactgcgagtactgcttcaccaggaaatctatacctttggaagaatattgggaaaagggagctttggaatagtcattgaagcgacaga

SEQ ID NO: 809045 - DNA, 100 bp, Homo sapiens
taagaattaaaagatgatgagaaataaggacaaaagccaagaggaggacagttcgctacacagcaatgcatcgagaaatggaccaattttgacaagatat

SEQ ID NO: 809046 - DNA, 100 bp, Homo sapiens
ctctgggaccagcgggcccaccagccaaagaggtgctgaaaaaatatttggagtccaaggaggatgtggctgatgcacttctacagactgatcagtcact

SEQ ID NO: 809047 - DNA, 133 bp, Homo sapiens
taaattacatattccagtaatggtggatgaagttgttcattgtttgtcaccacaaaaaggacaggacgggctctacgagtgcattctctgtgcctgctgtagcaccagctgccccagctactggtggaacgga

SEQ ID NO: 809048 - DNA, 99 bp, Homo sapiens
tctactcagacaacaacggctaccagatgcagcggaggccctacgtttcctatgtgaacaacagcatcgcccgggtccactggtgtgtcctccccttcc

SEQ ID NO: 809049 - DNA, 100 bp, Homo sapiens
cgggcgccgggctgaagctccgggcagggctgggaaggaaagctctttcgacgtgtagcagcagctttgccgggaatggaaagcacacaggacagaagca

SEQ ID NO: 809050 - DNA, 100 bp, Homo sapiens
tttttaaagcttcaaaatcctaagactcagcactgttgcggggacatggatttgattgacatactttggaggcaagatatagatcttggagtaagtcgag

SEQ ID NO: 809051 - DNA, 98 bp, Homo sapiens
gttaatgtcacaagagagaggaaaaggatgaaggccttgatgacaatgatgggtcttcgggattcagcgttctgactcagattgatggacaacttttc

SEQ ID NO: 809052 - DNA, 99 bp, Homo sapiens
tcaagatcacaatgtcagaatgtacatagaagaacaagatgatcaagatggctcttcatggaaatgcattgtcaggctcctcctgctggaccctccagc

SEQ ID NO: 809053 - DNA, 98 bp, Homo sapiens
tggtggcggtggccgcgctgctactgggcgccgcgggccacctgtaccccggagaggtgtatgtggtagaagaccaaagaagagatgagctaggacca

SEQ ID NO: 809054 - DNA, 100 bp, Homo sapiens
tcctggacaccatcgccacccgttttgacggaacacgactatgatgatggatatggcactgcttatgatgaacagagttatgattcctatgataacagct

SEQ ID NO: 809055 - DNA, 98 bp, Homo sapiens
ttcctgagcttgagatgctaggaagacttggcaatctttgaagtgggaggagtcccatactctgttcttgaacccgttttggagaggtgtacacctga

SEQ ID NO: 809056 - DNA, 100 bp, Homo sapiens
tacttcggggacccattggctcccaacccagcagacaagtgtcgaggagtgtgagcagctgcagaagatgtacggggggcagattgatgaaagaaccctg

SEQ ID NO: 809057 - DNA, 99 bp, Homo sapiens
agatattgatcataaacttgaagaacaactgattgatggtattctttatgctttccaagaacagactacagaggacatggatttgattgacatactttg

SEQ ID NO: 809058 - DNA, 101 bp, Homo sapiens
ttttctggctccctcgactggttgatcagcagattggaaagactggaagcttcttcagaaagaagagattttatcgacatcgaaagtaaatttgccctaag

SEQ ID NO: 809059 - DNA, 98 bp, Homo sapiens
acaggaacctgctttctctcgatgaggataacatccctccagaagatggcagcatggtgattcatttgatgcttccagaaaccagagaaatctatgaa

SEQ ID NO: 809060 - DNA, 98 bp, Homo sapiens
taaactacacaaaagtggaacagctttgttcaggatgtaacagtccctcccaagcctgtctcgctccatcctttatatcagactaaactctatcctcc

SEQ ID NO: 809061 - DNA, 100 bp, Homo sapiens
aagtccttagagatccagaaacccgctgggtggagagattcaaccagttagcgtgaaagttggagataaagttcttctcccagaatatggaggcaccaaa

SEQ ID NO: 809062 - DNA, 100 bp, Homo sapiens
ggtcctgctctttgtctacgcagttggtgagtttgtaagtgatgcccttctcgttcctgacaagtgcaaattcttacaccaggagaggatggatgtttgc

SEQ ID NO: 809063 - DNA, 100 bp, Homo sapiens
gcagttaaccagagccatccttcgggagaggatatgtagcgaggaggaacgcgctaaggcaaagcacctgatttattcaggagattgagcatgctctggg

SEQ ID NO: 809064 - DNA, 100 bp, Homo sapiens
ctttgtctgaagatcctctgggtgatcatggttcagcgctttagcctcaggaggcagctatccaagtttggtgccctggttgtcagatgttggaaagcag

SEQ ID NO: 809065 - DNA, 128 bp, Homo sapiens
cgaaggtaattgggactcccatcaagtctccacacagctagcagccacgtggggcacttctccagatccgagagcagaatttacaggacattaagacggctggccctcagtcccaggttttgtgtggt

SEQ ID NO: 809066 - DNA, 75 bp, Homo sapiens
agtcgaggtcctgcaggtggagctccggcagccgccctggaaacctgtccagtttaagtcgtcttggtctgagat

SEQ ID NO: 809067 - DNA, 100 bp, Homo sapiens
caccccagccacccgccttctcatccagaggtttgtgccgttccctgctgtagggaaaggggctgtttgccacacagctcatccggaagggggagaccat

SEQ ID NO: 809068 - DNA, 99 bp, Homo sapiens
ttttcctctgttataagagagggagagataaaccaccgcttacagatattggccgtgagacacacaaaatcgcagtgttttacattgctgaaggtcaag

SEQ ID NO: 809069 - DNA, 98 bp, Homo sapiens
gccaccaccagcaccacgggctccaccctgctgcagcccctcagcaacgccgtgcagctgcccatcgaccaggtgcagtacagaaggtttctaaaaaa

SEQ ID NO: 809070 - DNA, 100 bp, Homo sapiens
gtccttgggggagccctggagggcgggcttccagtggggggagagcccctggcagaacaccttccaccatgaccacctcagcaagttcccacttaaataa

SEQ ID NO: 809071 - DNA, 100 bp, Homo sapiens
ggggatggcgtcccccgggggcccgtactgcacatcgtggtggtcggatttcaccacaagaagggctgccagggaaagtgtggagagcctgattcaaaag

SEQ ID NO: 809072 - DNA, 115 bp, Homo sapiens
atggagaccaaacctgtgataacctgtctcaaaaccctcctcatcatctactccttcgtcttctggatctggaaagcatgaagactgggctttttttcctatgtctcttgggaac

SEQ ID NO: 809073 - DNA, 98 bp, Homo sapiens
gctaagagacatgggaatcactctgcatctgctcccccccaaccaagcggcagcggcggagtcggggccggcccagtggtggtgccagacggcggcgg

SEQ ID NO: 809074 - DNA, 100 bp, Homo sapiens
aaaaattccagcagatggagtccacaggatcagagtggactttaagaattcccatttgcagaaaccctatgagattaacctgatggaggaactaactctg

SEQ ID NO: 809075 - DNA, 51 bp, Homo sapiens
ggaggggctccggctggtctgtggtgagctgtcccccgaggcagcctatga

SEQ ID NO: 809076 - DNA, 100 bp, Homo sapiens
cgggcagcgccgccaccatgttcctgggcaccggggagccggccttggacacgagcgccgccctgtgctgggctgccgggagctcgtcttcaggaacctc

SEQ ID NO: 809077 - DNA, 100 bp, Homo sapiens
gagcaatatcaagcccattcaaacagaggcatggaaaaatggagtgctggcatacattgggaattttcgcctgcttgcagagctttccagcccgtttgtg

SEQ ID NO: 809078 - DNA, 100 bp, Homo sapiens
ctatgctaccctctactttgtattttgtgtggattcctcagagagtgaacttggaatcttggacctcatccaggtgatactgtgcttgtccaccgagttc

SEQ ID NO: 809079 - DNA, 100 bp, Homo sapiens
cttttatgacaggggctgcagaacaaatcaagcacatccttgctaatttcaaaaactaccagggcttctaccactgctgatgcaaaaccacaaagggacc

SEQ ID NO: 809080 - DNA, 98 bp, Homo sapiens
tgccaacactagtggaatatgatcacatcccagcttgtactcccagagtacctcatccacgctttcttctgtgtcatgtttctttgtgcagcagagtg

SEQ ID NO: 809081 - DNA, 100 bp, Homo sapiens
tgtttctgatggggattctagaagcagttcggttatacctgggtgaccaagaatatggcccaggtgaccaaagccctggacaaggccctgagcaccatgg

SEQ ID NO: 809082 - DNA, 100 bp, Homo sapiens
gaagctgagggatagaattgcttcctggcccacgagcagtgacaacagtttggacaatggcgatgaccactcagaaggaggcctggtggagaaccacgtg

SEQ ID NO: 809083 - DNA, 98 bp, Homo sapiens
aaagtttgactgaaaaagtttctctctatagaggtgacatcacattgctagaggtagatgctatagtcaatgccgctgtccagaccaaaacgaagaag

SEQ ID NO: 809084 - DNA, 100 bp, Homo sapiens
aaaaacaggctgctgtccagtgtcttcgatctgcttctgatgaaacgactaagctaccggagagccgcgggcaccctgccgagcccccagagcctcagga

SEQ ID NO: 809085 - DNA, 100 bp, Homo sapiens
cctcagccgcttcgtgtggttcttttctggcatcgtaggaggtggcctgctgtacaacaaacacctcttcgtgcacattgggcatgccaaccattcttac

SEQ ID NO: 809086 - DNA, 142 bp, Homo sapiens
gggccctgcgccctggggcttcaggctctcagggggcatagacttcaaccagcctttggtcatcaccagggtttcaggctctgtataactatactcccaggaatgaagatgagctggagctcagagaaagtgatgtcattga

SEQ ID NO: 809087 - DNA, 100 bp, Homo sapiens
gcagcctttgggggacatcctcagtgcctggtctggctgattcaagcaggagccaacattaacaaaccgggtttgtggatgcacttagatgtttgcaatg

SEQ ID NO: 809088 - DNA, 99 bp, Homo sapiens
tgagtgatcactctcaatcccggcagcgtcaccctttacaccagaaagctggcgggcactatggggaaaaaacaaaacaagaagaaagtggaggaggtg

SEQ ID NO: 809089 - DNA, 100 bp, Homo sapiens
tgtggggctgtgtgcttcgtgaaggataacccccagaagtcctacttcatccgcctttacggccttcagcttcttggacacttaatgattgttggcaaga

SEQ ID NO: 809090 - DNA, 100 bp, Homo sapiens
gtgggactttttgactacaattctcaacaacaggttgctgaatgctataaagccaggacttgttaaaaagatcaatagattgcctacccccattgcagga

SEQ ID NO: 809091 - DNA, 98 bp, Homo sapiens
gcggctgctgcagcccgggcggctgccgagaaggagggaggggaaacacaaagccggctacgcgctgcgagcacccccccaggcagcagcagcagttt

SEQ ID NO: 809092 - DNA, 100 bp, Homo sapiens
gcggagcagaggaaccacacgctgatcatgaaatgcttcggttacccacagtctttcgccagatgagaccggtgtccagggtactggctcctcatctcac

SEQ ID NO: 809093 - DNA, 100 bp, Homo sapiens
tttagcatcagtgactcacaaatcagcaacacagaatttctgcaagtaattgcaaagaatggccgagtggattctgaggaccggaggagccgccactgcc

SEQ ID NO: 809094 - DNA, 100 bp, Homo sapiens
gacaacgcagatatagaacatttcttttatcacaaaatcaatgtggactgaacataaatcacctgatggaaggacttactactacaacactgaaaccaaa

SEQ ID NO: 809095 - DNA, 99 bp, Homo sapiens
gaattgatgcttctgattaccagacagtccaggcattatccaattggtttgctatttgatcttcttgcatcaagttcagctcttccttggaacatcaca

SEQ ID NO: 809096 - DNA, 98 bp, Homo sapiens
atggtattccttctcatgagatctgtgatggatggctgtgtgcccggtgcaaaagaaatgcgtggacagcattgtatatgaacacagatcaagattag

SEQ ID NO: 809097 - DNA, 99 bp, Homo sapiens
gagacagaagcagtgaccgtgcccacgccaagaatagctgaaacctttggacttcaagaaaattatatcaaaattgtcataaataagaagcaactacaa

SEQ ID NO: 809098 - DNA, 100 bp, Homo sapiens
ccaggggccagatacagagaatgtccccatcatgtacatctgccatgggatgacgcctcaggctgaagccgacgtagcttctctgaacagacgcatccag

SEQ ID NO: 809099 - DNA, 100 bp, Homo sapiens
ttggcatcatgttatgctgtggttccagtattagccagagactgctgctactttgaaacgtacgatagaggccctgatggacagaggagcaatagtgagg

SEQ ID NO: 809100 - DNA, 99 bp, Homo sapiens
tttaggtattgctttcactgacctaccgcaacacagtcactcctggcggcaaaccaaacaaaaccagagtcatctggggaaaagtaactcgggcccatg

SEQ ID NO: 809101 - DNA, 100 bp, Homo sapiens
tcctgggcgcgacgaccctagtgctcgtcgccgtggcgccatgggtgttgtccgcagccgcagaggactacactgaaacattcaaatgtgtggcgaaaac

SEQ ID NO: 809102 - DNA, 99 bp, Homo sapiens
cctggcggagcctgcgtgctggtgatcgcgctgatgttcctggcctggggggaaggttcagttgcagactcttcttcaaagcaagtatgtagaatattt

SEQ ID NO: 809103 - DNA, 100 bp, Homo sapiens
agatggaagccaaagttcatcagagtccaaaatggtgatcaggaagtatttataacagcaatgatgtagcagtatcgtttccaaatgtagtatctggctc

SEQ ID NO: 809104 - DNA, 99 bp, Homo sapiens
tgaacaggcctgcgtggaaattgaatgagattataacggaggagatgatggatcaggcaaatgataaaaaagtggctgctattgaagccctaaatgatg

SEQ ID NO: 809105 - DNA, 98 bp, Homo sapiens
gtggatccagatgcccctagcagagcagaacccagacagagattctggagacattggctggtaacagatatcaagtttattcaggatgataacatgga

SEQ ID NO: 809106 - DNA, 98 bp, Homo sapiens
cggctgccgccaaggtgttcggtccttccgaggaagctaaggccgcgttggggtgagaccctcacttcatccggacatggatttgattgacatacttt

SEQ ID NO: 809107 - DNA, 98 bp, Homo sapiens
acacaacatgtctgaggcaatggcggtgactgcctaccaccagtactcaaaagaatcatttttcctatccagatatcacaattgccattagaatcagt

SEQ ID NO: 809108 - DNA, 100 bp, Homo sapiens
gcccccttcatggccaacatccctctcctcctctaccctcaggacggcccccgcagcaagccccagccaaagactatcaagaaatccaagtggtaatggg

SEQ ID NO: 809109 - DNA, 100 bp, Homo sapiens
cgcgcggagtctgagggagatggaagttgagcaagagcagcggcgcagaaaggtggaggccgggaggacgaaggtactccaaagattcaggtttactcac

SEQ ID NO: 809110 - DNA, 99 bp, Homo sapiens
aatgagtggcacacagtctactatcaccgacagtcacatcgatcagacaacaacatggcaggaccccaggaaggccatgctgtcccagatgaacgtcac

SEQ ID NO: 809111 - DNA, 98 bp, Homo sapiens
tctttgtcactccccggcggcagcacgaaagtaccatggaagaactgctaaagctttgaggtcattacaatttacgaatccaggaaggcaaactgaat

SEQ ID NO: 809112 - DNA, 106 bp, Homo sapiens
aggactgatgaacagttccctccttcatcaggactgatcctttgaaatactccagccatgactaaaagagaagcagaggagctgatagaaattgagattgatggaa

SEQ ID NO: 809113 - DNA, 100 bp, Homo sapiens
tcctacattagcgtctacgaccaccaaggaaccaaagaggttgttgtaaatgtggatgatgatggagtcatttcattgaacttcgagtgtgataagatga

SEQ ID NO: 809114 - DNA, 100 bp, Homo sapiens
tcatcggcgcagtgggcatcggcattgccgtggtcatgggcccctgggtagacagacacagcttgatttcagagcagacataggcgaagaaaacatggca

SEQ ID NO: 809115 - DNA, 100 bp, Homo sapiens
ctgggcttccggatcgagggcatcaagagctaaaaaagtccctgtacgccatcttctcccagtttggccagatcctggatatcctggtatcacggagcct

SEQ ID NO: 809116 - DNA, 125 bp, Homo sapiens
aatagatttttccctctaccttaaggatgtgcaggatcttgatggtggcaaggagcagcctgcttctgcaaagtggtacgatcgaagggactatgtcttcattgaattttgtgttgaagacagta

SEQ ID NO: 809117 - DNA, 99 bp, Homo sapiens
tgtggccatcttcaccgtgtacctgggctcgagcctgcacatgaaggttgttcctcaaagtcattcaagctgtactcgccgaaggagcccccgaacggc

SEQ ID NO: 809118 - DNA, 100 bp, Homo sapiens
tgagcacgagcaacacagtcacggcagcccacatcaagaagttcaccttcgtctgcatggctctgtcactcacggtcttattgaagttaaaacagatgag

SEQ ID NO: 809119 - DNA, 99 bp, Homo sapiens
caagaagtataatatgcgtgtggaagactacgaaccttacccggatgatggcatggggtctctaattaacagaagatggcaaagcccagccacagcagc

SEQ ID NO: 809120 - DNA, 100 bp, Homo sapiens
cactgtattctttacctgcttcccaatcccactgatgaggatcagcccatggaaacctcgacctgtctcccagttggttgcacagcaggttactcagcag

SEQ ID NO: 809121 - DNA, 100 bp, Homo sapiens
agaagatacagcatcccgaattgatgagttatttcaaaagagaagcagtgttctcactcaggatcttctcttagaaatctacagaagtataggggagcca

SEQ ID NO: 809122 - DNA, 100 bp, Homo sapiens
tgtgaaggcatgcaccgacatgggcatcacttgccccatcgtccccgggatctttcccatccaggttggacgtgataagtatgagcctgcagctgtttca

SEQ ID NO: 809123 - DNA, 100 bp, Homo sapiens
aaagttaaccctgctaaccttagcagaagaaaggacggtagacctgcccaagtctcccaagtccaaggccattggtttgctagatgtggatgtgtatgga

SEQ ID NO: 809124 - DNA, 100 bp, Homo sapiens
ctccctgctcggaggcggtggcgtctccaaaaaaagttggtgatgacattgccaaggcaacgggtgactggaagggcctgaggattacagtgaaactgac

SEQ ID NO: 809125 - DNA, 99 bp, Homo sapiens
acgtctacaatggagtcgagtctagaattcacacagagccacctaggttcaatgtggcttaattgtggtggcctacaaagatggatcacctgcccaccc

SEQ ID NO: 809126 - DNA, 98 bp, Homo sapiens
tcacagtggaaatgatgtagaggcttatgagtatcttaacaagggacacgtcaaaggctacatatcgcatcagcatcagaagctggtggtcagcaagc

SEQ ID NO: 809127 - DNA, 98 bp, Homo sapiens
gagcacggatccaagaaggagtggagtctttggctggctatgcagacatctttctggaagcttaaagaacctgcttctttctgcagtagaagcgtgtg

SEQ ID NO: 809128 - DNA, 100 bp, Homo sapiens
agtaatccctagtgtcagcagattcagcggtactggtgtataatagatcacatgtacatgaagacaatggaaagttatttccttcatccagtctacaaat

SEQ ID NO: 809129 - DNA, 98 bp, Homo sapiens
ggttctttccattgtgtctgccagcagggtttctcaatctctgcagatggccgtacgtgtgaaggtgcagctaaatcaagtccagcagctaaaccagg

SEQ ID NO: 809130 - DNA, 100 bp, Homo sapiens
cgcgcttttcctgcagaacgaggagttcatgaaggagctgcaacggaaccgcgacttcctcctcgctctggagagaggtttgtggagaagtacactgagc

SEQ ID NO: 809131 - DNA, 102 bp, Homo sapiens
caggccgaccccgacccggactcggacaagtatgacaatctcctgagccagtttggctgcatgcaggtgtcttcgtcctcctcctcacactccctgtcagcc

SEQ ID NO: 809132 - DNA, 98 bp, Homo sapiens
ctgcactatgcccgcaaggtgggctacaggaagaaaaaatgctgggcatcttggtgcagcacaaagtccggagtggcgtctcgggcatcgtgggcatg

SEQ ID NO: 809133 - DNA, 99 bp, Homo sapiens
gccaaacgtagaccaaaggctcagcccacaactcttgtcctaccacctcatgaccatgaaagacaccaggttgacagcactggaaactgaagtaccagt

SEQ ID NO: 809134 - DNA, 100 bp, Homo sapiens
gaaagatacatggcttgcaaaaagtaaaccacgatcgttatgctgaagttggacacgcccaaggaccttcaggtttctgaaactgcagagaccagcctga

SEQ ID NO: 809135 - DNA, 100 bp, Homo sapiens
ccatacttgctaaaaattctgggagaaacctttgaagttccagaaattgtgccatttcgcctgactcataatatggttaatggaatgggtcctatgggaa

SEQ ID NO: 809136 - DNA, 99 bp, Homo sapiens
agtgaccttgaacgattccgctctgcggcgggtgtccctaaactagcagtttagggtgtcagggaaagaatatggcaaagctgatgcaagatgggttta

SEQ ID NO: 809137 - DNA, 98 bp, Homo sapiens
cggctttcctggtcagcagcgacttgatcatggaagggaagtggttgctgtgtatgttactggtgcttggaactgctattgttgaggctcatgatgga

SEQ ID NO: 809138 - DNA, 100 bp, Homo sapiens
tacccaagctcggggtccggcagcagctccagcagcagctccacctcccacctggcctccccgccgggcggatccaggcctatagccaggtgtctaccac

SEQ ID NO: 809139 - DNA, 98 bp, Homo sapiens
caacgtctgtcagaagcccagtggtatcctgtcaggatggctaactggttggctccccacatggtgccctacgtctatatcacaccttaaagaagctg

SEQ ID NO: 809140 - DNA, 100 bp, Homo sapiens
gacggtgccccatagatggccagctttcccccgagggtcaacgagaaagagatcggcattctgaaggcaaatcctgtttagacccaggcaaaggttcctg

SEQ ID NO: 809141 - DNA, 100 bp, Homo sapiens
aagacatacagcttcagactacgtgcagctaacaaaatggggggagaagcagaatttgcccgcatcatgagcattgtggaccccaaccgcctgggggtag

SEQ ID NO: 809142 - DNA, 98 bp, Homo sapiens
gatgatgaagatggttgcgggggatcaggaagtggagaagtcaagaggacactgaagatcacagacttgaataaccctataccttccaatttgaaatc

SEQ ID NO: 809143 - DNA, 124 bp, Homo sapiens
agctcatctcagatctggagcatcggctgcaggggtcagtgatggagctgcttcaggaaatctgaaatagagtactatgctatgttggctaaaactggtgtccatcactacagtggcaataata

SEQ ID NO: 809144 - DNA, 98 bp, Homo sapiens
ggctgatcttgggaacttcaaaaggaataagcactatggaaaatacttcgagccagaggcttacttcccatcttgggaaaactaggtgtctgtgttca

SEQ ID NO: 809145 - DNA, 100 bp, Homo sapiens
cgaaggccaggacaccatgacacacaactctttgcggctggcacatgtctggttggatgaatacaaggctaccaagcagtttctcgaagagattaacaag

SEQ ID NO: 809146 - DNA, 98 bp, Homo sapiens
agcatgctgtgtctagctcaaggcctggagctgctgaagactgctattgggaaagctggctacactgataaggtggtcatcggcatggacgtagcggc

SEQ ID NO: 809147 - DNA, 100 bp, Homo sapiens
ccgtggtcctgatgccaacagtgtaccagcagggcgttggctatgtgcccatcacagctcctgggcaacgtgctggtctgtgtgctggcccatcactttg

SEQ ID NO: 809148 - DNA, 100 bp, Homo sapiens
ctatccctccacaacgattgtcaatcctactattgtgctcttgcaacacaatcgagtggctgtaaacctagctgaagacacagctcatcccaaactcgtc

SEQ ID NO: 809149 - DNA, 98 bp, Homo sapiens
gggatcgttggcagagcggacgtgttagcgtgtctgctgtttctattggcctttctctcgtacaacagcaatggcagattgtccttctagcatacagc

SEQ ID NO: 809150 - DNA, 100 bp, Homo sapiens
gaggaagaggaagaagaggatgaagatgtggatctggcccaggtactggcctatctcctccgcagggaagaaggagaaagggccaacccctgaagaagca

SEQ ID NO: 809151 - DNA, 100 bp, Homo sapiens
ctcctgcacctgtatatagggccaagtcaattctggagacctgggtgtgggtcaagcaaccaggtttgaagactgcttcattctgcctctagtaccagcg

SEQ ID NO: 809152 - DNA, 100 bp, Homo sapiens
ggaaccatggccgatgggggcgagggcgaagacgagatccagttcctgcgaactgtaattcagtaccaaactgttcgatatgatatcctccccttatctc

SEQ ID NO: 809153 - DNA, 100 bp, Homo sapiens
gagaaggtggcctcactgctcggcaagaagggggccagtgccaccaaacacgacagtgagggcaagaccgcatctctctactttagttagaagatgcccc

SEQ ID NO: 809154 - DNA, 100 bp, Homo sapiens
ttggtggagcagctgcctgggagaatgttgactctactgcagttgagccccatatgggggttggcaggcagcagagaggcccctttcaaggtgttcgggt

SEQ ID NO: 809155 - DNA, 98 bp, Homo sapiens
ataggcacctgcctgaggaagatatttcctggcctctctccagtggcctattccctggtggattccagtcaagtgtctacatttctgatttccattct

SEQ ID NO: 809156 - DNA, 99 bp, Homo sapiens
gcctggctgccttgctctccttcctgggtctgtctctgccacctggtctgaggaatgtttgctgggggattgaaggagatggaacaggaagaggtcctg

SEQ ID NO: 809157 - DNA, 99 bp, Homo sapiens
gcgggagcgcgaacgagcgacggcggaacccgtgggcctgtggactgcagcctcggcggtcagcagtttgtttcgacgccggaccgcgtaagagacgat

SEQ ID NO: 809158 - DNA, 100 bp, Homo sapiens
cggcagtcacaggcacatcagcaaagaggtaccagctggaggatgagtctgcgcatttggatgaaatgccactaatgatgtctgaagaaggctttgagaa

SEQ ID NO: 809159 - DNA, 99 bp, Homo sapiens
ggacccaaagtgccatgtctttaatacacgatgaggcgagtggtacgacagagcaagtttcggcatgtatttgggcaagcggtgaaaaatgaccagtgc

SEQ ID NO: 809160 - DNA, 101 bp, Homo sapiens
aggaggaagatgctcaataaactgatttgcttaatggacaaagcagttccaattccagagaaaatgagtgaatgggcacctcgacctcccccagaatttgt

SEQ ID NO: 809161 - DNA, 100 bp, Homo sapiens
tccgctttgtggccacatggtgtcagatgaatatgagcagctgtcctctgaaggtgttctgttcctgctcctacgatgccaccacacactttgagacaac

SEQ ID NO: 809162 - DNA, 100 bp, Homo sapiens
aggaaacatccaagaaaaatgtccttaaagcaattgagcaggctgatctactgcaggagtttgcattgagactccttgcattccgccagatacacaaagt

SEQ ID NO: 809163 - DNA, 98 bp, Homo sapiens
aaaaacaaaaatgaagcttggtgtacaggtggtcattacagaccctgaaaaactggaccaaattagacagaggttcatctctaacaagtatttagtga

SEQ ID NO: 809164 - DNA, 100 bp, Homo sapiens
ccggctgcagccccaagacagagcgctactcctggcagtgcgtcaatcagagcgtcctgtgcggtgcagcggaactgctgcctgacgctctgcaacttca

SEQ ID NO: 809165 - DNA, 100 bp, Homo sapiens
atatcagccagggatttagttatagctgcaggcagcagaaaatgagaaagtgaggtgggaactagaaaaaacccaactccaacaaaacatagaagagaat

SEQ ID NO: 809166 - DNA, 100 bp, Homo sapiens
agggagcagctgtgaaattggcagactttggcttagccatagaagttcaaggggaccagcaggcgtggtttgagaaggactaccctctgaaagggacatg

SEQ ID NO: 809167 - DNA, 98 bp, Homo sapiens
cggcggccaatcacagtccactttggacaggttgatgctatgaaactgggagtaaaggaaatgaagaaggcatacaagcaagtgaagatcgaccagat

SEQ ID NO: 809168 - DNA, 100 bp, Homo sapiens
gaggattttgaggacacttgtggagagctcgaattccagaatgatgaaattgtttggaagctgaaggtgttcctgaagtatctgaaaaatatgaaattag

SEQ ID NO: 809169 - DNA, 100 bp, Homo sapiens
ctccacggccttgtgtcaagaaatctccacaaagtgacagtgaatgatggagggggagttctcagagtcattacagaaacgtactcccaaactaagccca

SEQ ID NO: 809170 - DNA, 102 bp, Homo sapiens
tggtggtgaatcctccatagtctggtcactggagttctggatgattgcttgtgtgatattgacagcatcgataacttcaatacctacaaaatcttccccaaa

SEQ ID NO: 809171 - DNA, 100 bp, Homo sapiens
ggagaagcccaacaagtgtacggtggccctgagaaggcagcaggcccaggaggaggaattgggtatcagccaccccatcccactgcccagtgcggccgag

SEQ ID NO: 809172 - DNA, 104 bp, Homo sapiens
cgacgagcgggccctggctcaggaacagggacagcacctcatcccctggatgggggaccacaagatcctcatcgacaggggtcaccagtcgttggcacaccaag

SEQ ID NO: 809173 - DNA, 100 bp, Homo sapiens
cctacaaccacagagctgtcatggctgccatctctacttccatccctgtaatttcacagccccaggactgccctccagatgcagaagatttcagagccca

SEQ ID NO: 809174 - DNA, 99 bp, Homo sapiens
gaaagacgaggaaagaggaggaaaacaaaagctgctacttatggaagatacaaagggtatctgaaaaggtttaaagtgatgaagatcaaagttctaaga

SEQ ID NO: 809175 - DNA, 100 bp, Homo sapiens
aaatagtaaaaagacgttgcgagaagttggaagtgtgaaagcattgatggaatgtgctttagaagttaaaaagagtgatggctgttttagtacttcaggt

SEQ ID NO: 809176 - DNA, 100 bp, Homo sapiens
tgccaaggaggccatcaacgtggagcaggcgttccagacgattgcacggaatgcacttaagcagattttcctcttggcagtggactcccgaaaaattgac

SEQ ID NO: 809177 - DNA, 100 bp, Homo sapiens
gtgatcaagtaccttgagacactcctttactcacagcagcagggacatcgcggtggaggaagatctcagcagcactcccctattgaaagacctgctggag

SEQ ID NO: 809178 - DNA, 100 bp, Homo sapiens
agttttccacatatggtgctttctcttcatcagaaggcccaactccgacactgtatgtccaagcaagcagaagtattaattaaaggaaagcggcagacag

SEQ ID NO: 809179 - DNA, 99 bp, Homo sapiens
gcgcgcgtgtggtccttgcgccgctgacttctccactggttcctgggcaccgaaagatcaatgtccgagttaccaccatggatgcagagctggagtttg

SEQ ID NO: 809180 - DNA, 112 bp, Homo sapiens
ctggcattggagcaagccaagaaagaatccgaagatcagaaacgagccagccccagtgcctgctgagccgtttgacaacactacctacaagaacctgcagcatcatgactac

SEQ ID NO: 809181 - DNA, 100 bp, Homo sapiens
agagccgcggagcctggaagagccccgagcaattaaacaaccaccatgtcgagcaaaaaggcaaagaccaagaccaccaagaagcgccctcagcgtgcaa

SEQ ID NO: 809182 - DNA, 100 bp, Homo sapiens
gtggacctcaccaactcacttcgagcatttatggatgtcaatggagggagaaaactggttgtcctggatgtttgaaaagttggtcgttgtcatggtgtgt

SEQ ID NO: 809183 - DNA, 100 bp, Homo sapiens
atcgtgatcttcacagtgctcctgcagtctctctgtgtggctgtaacttacgtgtactttaccaacgagctgaagcaggaataactcaagtcacctgtac

SEQ ID NO: 809184 - DNA, 104 bp, Homo sapiens
aaaggcagaactgcctgattacaggagctttaacaggggtgacagtccaaagattgacttggccggcagttcgctatctggcatcctggacaaagatctctcgg

SEQ ID NO: 809185 - DNA, 100 bp, Homo sapiens
tttcaggaccaaaattgtggaaaagtcactctgctgccaaggggccaagggatgagctggggccctccttcccaatggcatctccccctggtctggaact

SEQ ID NO: 809186 - DNA, 98 bp, Homo sapiens
gcattgacatttaattttagggtcctttatatagaagggagagtagcttacagggatcttcagaccagggaagacatacggaatgcagcatggcacaa

SEQ ID NO: 809187 - DNA, 100 bp, Homo sapiens
tgtctgtgacagtaacagtacttgggatcccccagttccaaagtgtcttaaagggatgaattgtaaaagcaacatcagcttgaccagtataaaattacag

SEQ ID NO: 809188 - DNA, 118 bp, Homo sapiens
aatttccgaatcctgtgatcggattaaggaagagtttcagtttttacaggctcaataccacaggagaacttgcgcctgtcaggggctggatccagaaacctgtggtgcctccttctct

SEQ ID NO: 809189 - DNA, 100 bp, Homo sapiens
tttagcgcccatctccaacgtaacctcggcgccggtgacgtccctcccgctggtcaccactccggcaccaggagtagcttgagccgagaacgaggcgaga

SEQ ID NO: 809190 - DNA, 99 bp, Homo sapiens
ggaggcggagcggacaaggctccggcctgcgaggaggtatacactgaatatcctcgaagaaattggtggtggccagaaggtcaatgatgacattattgt

SEQ ID NO: 809191 - DNA, 99 bp, Homo sapiens
tcgctagcgttcccctgtcttccccaacgccccggagccgccggccgctagcgtcagcgccagccaggctcacaggcagaaggaattttccttgtcttg

SEQ ID NO: 809192 - DNA, 100 bp, Homo sapiens
ggaaagagagtttccagcagttgaaacaccacaaccccagacccagacccagcaactggaaggaacggatgggcctctagtgacagatccagagacacac

SEQ ID NO: 809193 - DNA, 99 bp, Homo sapiens
cttggagaactgccccaaggatttgcaaggggaaggtgtggctcattgactttaatccatttggtgaagtcacagattcactgctgttcacctgggaag

SEQ ID NO: 809194 - DNA, 100 bp, Homo sapiens
ccaaccctcccaagaagttcagaggaagctgtgggagaccgggtgcctgttcttctgctgggtaataagcttgacaacgagaaggagcgggaagtccccc

SEQ ID NO: 809195 - DNA, 100 bp, Homo sapiens
gctgctggccgaagcgaagggcgacgccaagccggagggaatggaagttggatacactttgtgacttgtacgagacactgaccattacacaggctgttat

SEQ ID NO: 809196 - DNA, 98 bp, Homo sapiens
ctccggcctccctgctcttaccgggaggttgcactgctgtgatccatcctcatctcctaaagatgcatcctgacttatctccacacttgcacactgaa

SEQ ID NO: 809197 - DNA, 100 bp, Homo sapiens
cgttgtttggtcccgattccggaaaaggtgccaagagcttagttgaactccttacatatctgaagagatggattaagaatgctttggattaaggattgtg

SEQ ID NO: 809198 - DNA, 98 bp, Homo sapiens
ctagaatcaactgagagagatgcttaaaaatcaccagttactttaatgagagcaccagcatgtttgacatgcggtgtgaggaggaggccgcggtgcag

SEQ ID NO: 809199 - DNA, 100 bp, Homo sapiens
gagttctacagttactccaacattaccagggagaaaactggttgtcctggatgtttgaaaagttggtcgttgtcatggtgtgttacttcatcctatctat

SEQ ID NO: 809200 - DNA, 100 bp, Homo sapiens
gggcagaccccggcgggctgtggcaggagggcggcggcggcggctgcggtcgaagaaggggacgccgacaaggaagcaggtcctggggaccaaggtggac

SEQ ID NO: 809201 - DNA, 99 bp, Homo sapiens
agccccccagcacaaactgctttggtggaagatcccgttcctggtccagaactttacacagaaaaggtgctcaaaggatatttgtttaatgaatgtggt

SEQ ID NO: 809202 - DNA, 98 bp, Homo sapiens
ggctgcagcaacaaagggcagcgagcgattggccgggctgcaggcgaggagcagcagccaagctggacagatgacctgcctctctgccacctctctgg

SEQ ID NO: 809203 - DNA, 100 bp, Homo sapiens
tgatttacactcggtatgtcctcagtcttctgctgcatgacagctatgactacgacctgcaggaacagtttgaaggatgacctctaggaagaaagtgttg

SEQ ID NO: 809204 - DNA, 99 bp, Homo sapiens
tttccagaaaacagaaatcgaaacagatacagagatgtaagcccatctcctgtcttcgttcctggctagaacaagacacctcctgtccaacatgcagaa

SEQ ID NO: 809205 - DNA, 100 bp, Homo sapiens
gacgatctgcacttcgcattttggcattgacatttaattttagggtcctttatatagaagggagagtagccgagtcgtccggaaatccattgcccgtgtt

SEQ ID NO: 809206 - DNA, 98 bp, Homo sapiens
aagatccagaaactttcactcaagaagatattgacctttatcttcaagccaggatgaagggagactgggcaagactcttacgccccacactgcaattt

SEQ ID NO: 809207 - DNA, 98 bp, Homo sapiens
ctttgtctcctttttcaacaaatggatcttcagtttagatcttggaggcatatcaactgtggttctaaatggctatgatgtagtaaaggaatgccttg

SEQ ID NO: 809208 - DNA, 100 bp, Homo sapiens
tggagttcctcctggggaacccgttcagcacaccagtggggcagtgcctcggaagatgagaatgtgcctactgctcctgatcctccaagtcaacatttac

SEQ ID NO: 809209 - DNA, 100 bp, Homo sapiens
tagccttccttgataagattttagaggacagtcattttgtttactcattcagccctgttgcaggtcccaataaactcttcataaggttgacagaagcacc

SEQ ID NO: 809210 - DNA, 100 bp, Homo sapiens
accatccgctgcgtctacatcctggacccctggttcgccggctcctccaatgtgggcatcaacaggtggcgagcaaaaaaacattgttggttccaacacc

SEQ ID NO: 809211 - DNA, 100 bp, Homo sapiens
agtttggcgataaaccttgttgttttacagaccttaaggtgtttgttgacctcttacctgctacacagtgtacaaaagatgctttggagtctgcaatgaa

SEQ ID NO: 809212 - DNA, 100 bp, Homo sapiens
agcaccttgtccaggcgggcctcccgtttctggctccgggctgagcttcctggagaagaggaagggcctcatctttgtggtggacagtaatgaccgggag

SEQ ID NO: 809213 - DNA, 110 bp, Homo sapiens
ctacatctccgaaagcaagctcttctagaagttggagaaccagcagaaatccaccaatgtagtctatcaggcccaccatgtgagcaggaataagagagggcaagtggttg

SEQ ID NO: 809214 - DNA, 100 bp, Homo sapiens
ataaaaaggaagcagcaggacacgcccggaagccctgaccacagagacgcgtccagagctggaagtcgagtgtgctactcaactcaggagatttggagac

SEQ ID NO: 809215 - DNA, 100 bp, Homo sapiens
catccccatcttacagatgtattaagaagcctcagggattagaaaatgagtatcaggaagaagggcagcttctgggacagttcacgtatgatcaggatgg

SEQ ID NO: 809216 - DNA, 100 bp, Homo sapiens
ctgatggtgatggagattttgatgtggatgatgccaaagttttattaggtctctgctggtggttctgaagccaaacctctgatcttcacatttgtcccca

SEQ ID NO: 809217 - DNA, 99 bp, Homo sapiens
taaattcctgtgcagaaggcatcgtcgtcttccggacagactatggtcagtttggaaattttagcattcaggtgccaggaatgcagatgggacagccag

SEQ ID NO: 809218 - DNA, 100 bp, Homo sapiens
cgggctaccagaaaacctcagacaccatagccccctggttccatggggcagtgatcggtgatggacagtctgctgtggccagtaacattgccaatactac

SEQ ID NO: 809219 - DNA, 100 bp, Homo sapiens
gtatatgatttggattttcctgccttaagaaaaaacaaaaatattgacaactttttaagcagatgcatgtccagatcagcaatgagtcggcaattgactt

SEQ ID NO: 809220 - DNA, 100 bp, Homo sapiens
gggggactctgtgtgagggaaagaaaacaatttctcctgctctgcagcttctgttcagctccagaaacatgacaaggaggactttcctgcctcttggaga

SEQ ID NO: 809221 - DNA, 100 bp, Homo sapiens
tgaagattatggaggtgatgttcaagcagtgcctgtctccgcacttacggccattttgcaacctgtgttggcagcagaagattttactatctttaaagca

SEQ ID NO: 809222 - DNA, 100 bp, Homo sapiens
tgatggaagagagctctgtctggaccccaaggaaaactgggtgcagagggttgtggagaagtttttgaagaggtttcccaacagtgatgtcacaagattg

SEQ ID NO: 809223 - DNA, 98 bp, Homo sapiens
acagtcatgctgaaacctgcccacagcagaggagcacctgtcaggaacatgaatctgaaggtggaagaacacctttgatgaaagctgcaagagctggt

SEQ ID NO: 809224 - DNA, 98 bp, Homo sapiens
actgaccactattggagcctttgcacgtgcattatttaatcacatagacaagtcaggattgaaggatagttctgtcgaagaactcaagaaaagatacg

SEQ ID NO: 809225 - DNA, 100 bp, Homo sapiens
agtgaccttgagcccagggcgacggtcagcttgttaattcctggctgcaggggaaagaaacactgatgactcccattccctttgctagaccacaagattt

SEQ ID NO: 809226 - DNA, 100 bp, Homo sapiens
aaacaaaaccttcactcttgagaaggggctgataggcaatgccaccgtagataagttggaggacttcatcaacaacattaacagtgtcttggagtccttg

SEQ ID NO: 809227 - DNA, 100 bp, Homo sapiens
gaaggaagacttcatgctgttggcagtaggaatcattgcagcaagtgctttcatccaaaaccatgagtgttggagccagatggagcagcatattgtatgg

SEQ ID NO: 809228 - DNA, 99 bp, Homo sapiens
aggcaccagagctgcgtccctgctcgctttctctcgtggatcttctcgctcctgacatagctcgccttttgcaagaaaaggagttacaggaagagaaaa

SEQ ID NO: 809229 - DNA, 100 bp, Homo sapiens
ccgccccaggtacgctaggccgcggccttcgttcctcccagaaaggccctggccaacgtcaacattgggagcctcatctgcaatgtaggggccggtggac

SEQ ID NO: 809230 - DNA, 100 bp, Homo sapiens
cacttgagttaagcagtagtgtttgggaagaaaaacagaggagttctattaagacgcgagcccaagctgcactgcaggctgtcagtgccgtccaatcagg

SEQ ID NO: 809231 - DNA, 100 bp, Homo sapiens
gaaacatgctagaattacctggaacttcatcatcatctacttcacaggaattgccatttgatgttgacaatgcgtctctggcacgtcttgaccttgaacg

SEQ ID NO: 809232 - DNA, 98 bp, Homo sapiens
agaccgacttctttctctttaccctcattggcgcttctctcctgcagtccgcctctgggccctgccgatgtcatccatactgtagggccaatagccag

SEQ ID NO: 809233 - DNA, 50 bp, Homo sapiens
cggcacgcgaagtggccgcatccgcaagctggtcagtgagaaggtcggag

SEQ ID NO: 809234 - DNA, 100 bp, Homo sapiens
tggcgctgctggaagacgaggagcgcgtcgtgcgcctgggggtgcgcgcctgcgacctgcccgcctgggtgctggagaatctggtaaaagcaccattgtg

SEQ ID NO: 809235 - DNA, 98 bp, Homo sapiens
ggcaaatgtgactgccatggagtgaagggacaaaaggaatagccaggccagaagaaggaaggcctgtggtgagtgggacaggaaatgacatcaccacc

SEQ ID NO: 809236 - DNA, 100 bp, Homo sapiens
agtgctagcagcttagatgccatttctcctgttcagatccaacttagaaataatgtttcattcaagataaggctcgtggcttaggagattgtgacctggc

SEQ ID NO: 809237 - DNA, 100 bp, Homo sapiens
gacacccgagttcctggccgaacaccgggtaaggagtgccaatggaccgatgcctgcctgtctcatccctgtgcaaatggaagtacctgtaccactgtgg

SEQ ID NO: 809238 - DNA, 98 bp, Homo sapiens
cgccgtcccgtccgacagccaggcccgggagaaaatcaagccagggaggacttcaaccaggacatcggctggtgtgtctccctcatcaccgactacag

SEQ ID NO: 809239 - DNA, 99 bp, Homo sapiens
tcctgaaaccaaatatccacttccagttttttcaacttttgtcttgacaggttcttcagccaaaaagctgtcacgggaagtctttttaggataaacgta

SEQ ID NO: 809240 - DNA, 100 bp, Homo sapiens
actttaatcggggtggtggcaatggtcgtggaggccgagggcgaggaggccaatgatttattggatttgttgggaggaaatgacataacacctgttattc

SEQ ID NO: 809241 - DNA, 100 bp, Homo sapiens
agaagagagagaggcatttagaattcattgaaaacagctggtggacaaaattttgtggcgctctgcgtcccctgaagatcctgcccggcctgtacatcgg

SEQ ID NO: 809242 - DNA, 100 bp, Homo sapiens
attcgaagcagactgccatatcacagcctgcttcagggaacacattttctcatcacagtatggatggcacatttctggtcagagacagctctaaaaaaac

SEQ ID NO: 809243 - DNA, 130 bp, Homo sapiens
gatggtgaactttatgcaattctgagttgactccaatccagatgtattttggaactaggtagaatatgactgcatcctgaggttagcattacacttctcccagtggagcccatgacttctgatcaggacg

SEQ ID NO: 809244 - DNA, 99 bp, Homo sapiens
tcttgggagtgatttgcgccatcatcctcatcatcatcatagataagccatcaccaaactcagaaaatgaacaaaattctgttaccctggaagtcctgc

SEQ ID NO: 809245 - DNA, 100 bp, Homo sapiens
gtctgtacctactgatggtgctgtaaccacctcacagattccagcttcggaacaagagaccctggtcatagacatgaatgactaccagaggaggaggttt

SEQ ID NO: 809246 - DNA, 100 bp, Homo sapiens
gattgctaaaatgatagtcagtgacattatgcagcaggctcagtatgatcaaccgttagagaaatctacaaagatggccaacttagcatttatacggggt

SEQ ID NO: 809247 - DNA, 100 bp, Homo sapiens
tggggcccgccgccccgcgggggagggcggagctggcgcggcccctagctttctccttctggtgtggggcccgagcccttagagatttgtttgattccat

SEQ ID NO: 809248 - DNA, 100 bp, Homo sapiens
taaggccaaaaatgtgcatactcacagagttagagagagggatggtggttcttctgtgtggcagttcagaatgatggatcaagctagatcagcattctct

SEQ ID NO: 809249 - DNA, 98 bp, Homo sapiens
catataccttctactgtccaagcacagtctcagccccatggggtatatccaccctcaagtgtgtgctcctgatatggaagatatattgactgaatcag

SEQ ID NO: 809250 - DNA, 100 bp, Homo sapiens
cggcggcagcacgaaagtaccatgtgttcataatgtgacagccctgagcaacctcataacgtggcagaaggtggattatgacttcagctaccatcagatg

SEQ ID NO: 809251 - DNA, 98 bp, Homo sapiens
cagccctggtgtcacctatcagtaaaaggcaaaagaatggaccccagcaggaaaagcaaagcaagagaattctgctaagaagttttattctgaatctg

SEQ ID NO: 809252 - DNA, 98 bp, Homo sapiens
gaatccagcctctaaggtgatagctctgaaaggtgtagaagacatcgtggccataatgattcctgagccaaaagggaaggagatagtaagcctgctgg

SEQ ID NO: 809253 - DNA, 100 bp, Homo sapiens
agcttcatctgcgatggacagaataactgtcaagacaacagtgatgaggaaagctgtgaaagttctcaaggagggatttgttcgtgttgaccgagattat

SEQ ID NO: 809254 - DNA, 100 bp, Homo sapiens
ctcctccaagaaccaacccccaaattggctgggacagacctaatctgggagcctgcaagtgacaacagcctttgcggtccttagacagcttggcctggag

SEQ ID NO: 809255 - DNA, 100 bp, Homo sapiens
gctactacgtcaacaacgagtacctcaaccctgagctgcgtgagaacccgcccatgaagccagatttctcccaggtgacctcacagtgactcaagctacc

SEQ ID NO: 809256 - DNA, 100 bp, Homo sapiens
agagggatgaggttcggaatgttttccgggagctgcagatcatgcaagggctggagcaccccttcctggtcaatctgtgctatcggcaggaccctcatcc

SEQ ID NO: 809257 - DNA, 100 bp, Homo sapiens
tgctgctgctgctgccccggacccgggcggacgagcacgaacacacggattcaattcgagacgtccacatcaaaggaataatgtacagagcaattgaagc

SEQ ID NO: 809258 - DNA, 100 bp, Homo sapiens
ctctgtgatccggaaggatgatgggaagaagcgcctggccggggagtacggccgaggagacctcgtcggcgtggagggggctggagtatggcatcaggat

SEQ ID NO: 809259 - DNA, 99 bp, Homo sapiens
agagggcagcagagtcacagctgcagcacaacattctgaaattttttggttattgtaatgatgttgatcgggagttgagaaaatgcctgaagaatgagg

SEQ ID NO: 809260 - DNA, 51 bp, Homo sapiens
ctcgacaaaatagatatgtctttgggccaagactaaggggctgcagagcgg

SEQ ID NO: 809261 - DNA, 99 bp, Homo sapiens
ggcgtgggaacccaggccccgccgaggcggccagtgtgaagcctcagtttaggtcatctggtggttcagaacactcaacagagggctctgtatccttgg

SEQ ID NO: 809262 - DNA, 98 bp, Homo sapiens
agaaagggaaggaacacgctgcattactgcgtgcatgcagcagattggaataaatatgatgaccgattgatgaaagcagcagaaaggggggatgtaga

SEQ ID NO: 809263 - DNA, 98 bp, Homo sapiens
caggtgagactttcacaataagagcagaggatggaacacttcagtgcattcaaggccaaatttgagtttcatcatggtgactatgaaaaacagtttct

SEQ ID NO: 809264 - DNA, 98 bp, Homo sapiens
tttgcttggtttggaaaaatttcattagagataatccaggcacatggcggcactgttgaccccaccttcacgagtcgatgcacgcaccttctctgtga

SEQ ID NO: 809265 - DNA, 100 bp, Homo sapiens
aggtggctatggcggttccagcagcagcagtagctatggcagtggcagaagattttaattagcaaaccagtccagctacgggggcccagccagccagcag

SEQ ID NO: 809266 - DNA, 100 bp, Homo sapiens
taaaaagaggcgaaaggaagcaagcagttcagaagagccaaggaataaacatgcaatgaacccaaaaggggaacgtgtgaaagaagaattgtggggaaaa

SEQ ID NO: 809267 - DNA, 100 bp, Homo sapiens
atttatggcagcctcactcccagtagtttctgcatttagtgagataagtgccatctgggattgacagctcagcctgaactctatcttctgaacaccatgg

SEQ ID NO: 809268 - DNA, 100 bp, Homo sapiens
ctggaaagaagatgctaattaaagtgaagtatttggaaaccatgttcacactactttttcagttactgcagcaagttacagaatgtgacacaaagatgca

SEQ ID NO: 809269 - DNA, 100 bp, Homo sapiens
ttcaggagggaggacagcttcagtaaatgcactaggatccagagaggttaaaaatctgtaagagcctgattttagaattcaccagctcctcagaagtttg

SEQ ID NO: 809270 - DNA, 99 bp, Homo sapiens
aacaatcgtggctacaaaaatcaatctcagggctacaaccagtggcagcagggtaccccagttattaaagcttttggcatcttgaagcgagcggccgct

SEQ ID NO: 809271 - DNA, 99 bp, Homo sapiens
aacttatggagcagacctcggagatcatcacgtttgccgagtcaggtgtcttctctttagggatggtgaggttggaaaaaggctcctgtaaccctcctc

SEQ ID NO: 809272 - DNA, 100 bp, Homo sapiens
tgacagcaatcagctggcctggtttgatactgacctgtaaatcatcctttaggtaaaataccatgaagattttgaaaaaacaaaggggagaggctttact

SEQ ID NO: 809273 - DNA, 100 bp, Homo sapiens
gaaaaccctgctgatgtcagtgttatatcctccaggaatactggccaggcatcaacagtgatgacagcaacctctacctaactgccagcaagaagaagcc

SEQ ID NO: 809274 - DNA, 98 bp, Homo sapiens
tttgattacaaggtttgaaccgtttaactgagatccgcctctgcaggctatccatggacttttaaattatgtacccgaggattaataaagaatcttta

SEQ ID NO: 809275 - DNA, 100 bp, Homo sapiens
tgcaggactcgtccggggactacagcctggcgcacgtccgcgagatggcttgctccattgtcgaccagaagcagcccactcacccagtgtacaacattgg

SEQ ID NO: 809276 - DNA, 100 bp, Homo sapiens
cttatcttttaattattaaaacagagcttcctgctgctattgcagaatttttgactggagactatagtagatgtacactagattttgatggcatttttcc

SEQ ID NO: 809277 - DNA, 100 bp, Homo sapiens
gacctctgtcgaagattataaagcccttcagaaatacgaaaaggagaaatttgaagagatgattcaacaaagaacggagaccaacctgggctgaagaaag

SEQ ID NO: 809278 - DNA, 100 bp, Homo sapiens
cctaggagctgatgacatgtccagaccaggtctcatgcttggtgcctggtgccaggtgtaatgcatcaagtaaaacacttagcagaatcagagtctttgt

SEQ ID NO: 809279 - DNA, 98 bp, Homo sapiens
aacaatgatggagaaaaggaaccttcattaacagatgccattccctctcacccaagagaatgtttctccatcccagagagatgaagtaattcaatggc

SEQ ID NO: 809280 - DNA, 141 bp, Homo sapiens
cgccagcccacggcagccacacgccccagaccaacacgagaagaacgcaggccgacaacatcttcatctatgcttcacaggataatgcagctggctgtggttgtatcagaagtacttgagaatggttcctcagttttggtc

SEQ ID NO: 809281 - DNA, 98 bp, Homo sapiens
gaagcgtcgggattaggtgaaagtggtgactatcctgttgagaagcaaaagatactttgcaagtaaaaaatatgcctcccaagtttaagcgccacctc

SEQ ID NO: 809282 - DNA, 100 bp, Homo sapiens
aaaatggagatgttgttgggcagcattcatttcctggcaggcagtatttggcagtcgtattcagagataaacccctggagctatgggatgttaggacttg

SEQ ID NO: 809283 - DNA, 100 bp, Homo sapiens
acagcaacagtttgtggcccttttgtggaagagactgctaattgccagacggagtcggaaaggattttttgctcagtactactataattccttgacccag

SEQ ID NO: 809284 - DNA, 98 bp, Homo sapiens
catcaggaccccagatgtctgacagccctgtgtgacaccaagataagtaacgtgataacgtggtgctggaccagacctacctgtggcagggtgttcga

SEQ ID NO: 809285 - DNA, 100 bp, Homo sapiens
ggttgtggatcttgaagctttggaaagaacatcgatatattgaactcttcttgaattctactcctggaggcggctctggcatgggaggttctggaatggg

SEQ ID NO: 809286 - DNA, 98 bp, Homo sapiens
actctctctttctggcctggaggctatccagcggtggaatggaagttaaggagcctcaggtccgtttaggccgtctcttcctgtacagtttcaatgac

SEQ ID NO: 809287 - DNA, 98 bp, Homo sapiens
tagatctcatctctatgggtggaagggttttgactctgggaggagggctgccttatttggagcaccttaatctctctggttgtcttactataactggt

SEQ ID NO: 809288 - DNA, 98 bp, Homo sapiens
ccgcgagtgggagaacaacaaggaggcgctgctcaccttcatggagcaggtgcagagtggaaagctcattcctttctcacctgccgtgaacacatcag

SEQ ID NO: 809289 - DNA, 99 bp, Homo sapiens
aatcaatgaaacagacacacctgcacaggtgattgtagagaaggctccaaaagccagggtgcctgatctggacaagaggaagtacctagtgccctctga

SEQ ID NO: 809290 - DNA, 99 bp, Homo sapiens
ggggacggattggttgttttttcctgtatgaagcggttggcaccactgaagtgaccgaatgagccttggggctctattttgcggaattggaatttctta

SEQ ID NO: 809291 - DNA, 100 bp, Homo sapiens
atgtccatgagaaaaagcttggagataaagttgctttttactggatatccgacatgaagccagtgacttcccatgtagagtggccaagcttcctaagaac

SEQ ID NO: 809292 - DNA, 100 bp, Homo sapiens
ctgaaacagtgccgacttgcaaacggttattcaaggacacggaaaagccaacaccatggtagcattaatgaaagtttaccaagaggaagatgaagcctac

SEQ ID NO: 809293 - DNA, 100 bp, Homo sapiens
cgcagcccgtcacccacctcatctttgacatggacggacttcttctgggaatgtaaccaatttacctacaagtttgccgaagaaatcagaaggcagtctt

SEQ ID NO: 809294 - DNA, 100 bp, Homo sapiens
cctgccccgggccactgtctgtgaagcagccgccctggagaaacagatcggttcctcatgccatgcacctgctgtcacccagcatgcaccctattttaag

SEQ ID NO: 809295 - DNA, 99 bp, Homo sapiens
atctgtcacctaagtcttatcgaactgccaagtttcacagccggttcacagaagaaaagcttggccaggctgagaagacagaattggatgctcacttag

SEQ ID NO: 809296 - DNA, 100 bp, Homo sapiens
ttttcaagcctgaaggaaaggcagaactgcctgattacaggagctttaacagaaaggcctaaagaatgtatttgacgaagcaatattggctgccctggag

SEQ ID NO: 809297 - DNA, 100 bp, Homo sapiens
agcagcaagttagtggattaaaatctcccaagaggaatgacaaacaaccagctcttcaggtacggttcctggagcagcagaacaagatgctggagaccaa

SEQ ID NO: 809298 - DNA, 100 bp, Homo sapiens
cctcctccccgaggctgaggcgtgtgtgcggcaacacctccccgacctctacgctgctgccggggtggcggcggagtacttcaagaacaccacgctgctg

SEQ ID NO: 809299 - DNA, 101 bp, Homo sapiens
aggttttcaaatggaacattttgatgcatcacttagtacctatttcaaggcattgctaggccctcgagttacagcaagctgctgaagtttctcagctgcgg

SEQ ID NO: 809300 - DNA, 98 bp, Homo sapiens
agaatacaagatctaacaggactagatgtttccacagcagaggaattacagattgcagatctgactcagaagatctttgaccttcgaggcaagtttaa

SEQ ID NO: 809301 - DNA, 98 bp, Homo sapiens
ttccagttagtggatatagcacaccatccccagccagtgctcttacagcctgttccaagtgtggcttaatccgtctccaccaccagatctttctccgt

SEQ ID NO: 809302 - DNA, 100 bp, Homo sapiens
cggggaacgactgcggcgcgctgctggacgaagagctctcctccttcttcctcaactatctcgctgacacgcaggcataattatgataagacatttctca

SEQ ID NO: 809303 - DNA, 100 bp, Homo sapiens
cagtcccacttcaaacattcgtctcggaaaccccgcctcttacagtcacgaggaaatgactataccctggtgcttaaggagagcggaacttgtgttcaag

SEQ ID NO: 809304 - DNA, 109 bp, Homo sapiens
tggacatgttgaaaattaggtctgaattcaagagaaagtacggcaagtccctgtactattatatccagattggtggaacgagaatgcctacacgcagccacaggaatcc

SEQ ID NO: 809305 - DNA, 100 bp, Homo sapiens
aaatatgcatgctagcaaaagcacagaaagaccacttaagcaaacttaatataccagacactgcaactggtccacaaggcgattacaatttccagtcccc

SEQ ID NO: 809306 - DNA, 100 bp, Homo sapiens
gaagatagtgcctttcagccctaccaggacctagatgtgaaggctggtggaggctgtgtaatgaccattggagaaatgctacgatcttttctcacaaaac

SEQ ID NO: 809307 - DNA, 144 bp, Homo sapiens
cgacttgtccactgaagtaacagcagcaatgaccttccctcgggaattccacctctgcgtttttccctccaggttatgcctccgcctcgttgccctgaaagccgcagcgacagcgaaaagggctaagattcggccatgagcagc

SEQ ID NO: 809308 - DNA, 100 bp, Homo sapiens
atgaagatgatgaagccgaggtagaagaagatgaacccacagatttggttagcatggcctcattgaaagaactagatcaaagactctttgaaaattacat

SEQ ID NO: 809309 - DNA, 98 bp, Homo sapiens
aactgcctggccgaatcagccttttcacgctcaagaatctttggaagaactaccagaaacgagtgggaaaacaacccggagattcttctttaatttaa

SEQ ID NO: 809310 - DNA, 100 bp, Homo sapiens
ggaagcttttgtcgtctaccgctggcaaggagatgcccgccaaaaagctctgaaggacttgctgaaatgggtcttagagactgcttttcaggaagccttg

SEQ ID NO: 809311 - DNA, 100 bp, Homo sapiens
cccatggccacccaggcctccgggccgcgaagtcgcagcgccagacccaaggcccccgagtgagcgcgggcgccgagcacaggaagtcctggagaacctg

SEQ ID NO: 809312 - DNA, 98 bp, Homo sapiens
accaagccatgaaaacaacagacaggaggattgtgtggtgatgaaaggcaagatcccagatgcagtgactggttactacctgaaccgtgctggctttg

SEQ ID NO: 809313 - DNA, 100 bp, Homo sapiens
tcccggcccctgcagtccggatactcacgccagaagtgggcgacagatgcgaaagaaacgagttccagtgccaagacgggaaatgcatctcctacaagtg

SEQ ID NO: 809314 - DNA, 144 bp, Homo sapiens
gaaaatggcggacgggaaggcgggagacgagaagcctgaaaagtcgcagcgagctggagccgccggaggatctaagcattgaagaacagtcagagtgtgctcaggatttctaccacaatgtggccgaaaggatgcaaactcgtg

SEQ ID NO: 809315 - DNA, 100 bp, Homo sapiens
catatccgtggacctccatatgctcataagaacccacacaatggacaagtggcagaaatactcagtgtcctcagtcacagaaacatcatccagttttatg

SEQ ID NO: 809316 - DNA, 100 bp, Homo sapiens
ctggtttctttgctggagcacttgagccacgtgcatgaaccaaacccacttcgttcaagacaggtgtttaagcctctattaccaggttttaaacttcgcc

SEQ ID NO: 809317 - DNA, 98 bp, Homo sapiens
gcggacgttcttgttctgtggagaataacggctgcacctggagattgacgcagagtgggcggcggtggtggtaaaatgtcggttccaggaccttacca

SEQ ID NO: 809318 - DNA, 98 bp, Homo sapiens
tagttttgcgtgtgttgaaagtacaattctattgcacatcaatgatatcatcccagggagaaaactggttgtcctggatgtttgaaaagttggtcgtt

SEQ ID NO: 809319 - DNA, 100 bp, Homo sapiens
gaggacctccctgccctgtataccgagggaacaggtgaattatgtaacctcattacgctggatgtagctcacaatcaacttgaacaccttccaaaggaga

SEQ ID NO: 809320 - DNA, 100 bp, Homo sapiens
agacccatccccactttgtgattccctaccgctgcttaggtaaggagtgccaatggaccgatgcctgcctgtctcatccctgtgcaaatggaagtacctg

SEQ ID NO: 809321 - DNA, 100 bp, Homo sapiens
tcttccgctgacgtggctcttgccctggcaagtgctgcctcccaaaatgttttacatggacggatggcaaattaaacagcagtaacttggtaattctgtc

SEQ ID NO: 809322 - DNA, 98 bp, Homo sapiens
ggatttactcccttgatggaagcagctgctgctggccatgagataatcgtgcagtattttctgaatcacgtgcgcttcccttcccacttcagctctga

SEQ ID NO: 809323 - DNA, 98 bp, Homo sapiens
tcacttcctgtggttgtggcagcgacagcgatggagactgcagctcgacaggaatggacttcattgacttaactagagagaccagaccaaggacaaaa

SEQ ID NO: 809324 - DNA, 100 bp, Homo sapiens
caaattatgattggaaggaactggaaaagcaagataaagccgatcttatccgaccgaaacggaaatatgaaaagaagcccaaagtcttaccatcgtctgc

SEQ ID NO: 809325 - DNA, 100 bp, Homo sapiens
ccggaaatcggcatcactagacagtcctgtcctattggtcatcaaagatatggataatcagtagaagcaacatatggcactgtgagaacaggaaatagaa

SEQ ID NO: 809326 - DNA, 99 bp, Homo sapiens
gaagatgaagattttaaagagcagactagacttctcaagggagaagagaagtttacctttattgagaaatgtaacaaccctcgttctgtcacattattg

SEQ ID NO: 809327 - DNA, 98 bp, Homo sapiens
gccaagttgaaaatggacgagtaatcgcctgctttgattcattgaaagttcctgatgttattagcagcataaggcaattatctaaagcggccatgaaa

SEQ ID NO: 809328 - DNA, 137 bp, Homo sapiens
acggttccgaggcgttgccgggagccgggcgcggctctgtgtggactcggagaaacgcggatatcagaaaggtagatttgtcaaaaaacctgttgtcatcatgggatgaagtgatacacattgctgatcagctcaga

SEQ ID NO: 809329 - DNA, 100 bp, Homo sapiens
tgaaagagacagacacctcagtttttctggatcaggcattgatgatgatgaagattttatctccagcaccattgccattacccagggaggagcaatacag

SEQ ID NO: 809330 - DNA, 98 bp, Homo sapiens
ggaggcggcggggagccgcgcgcggcaggaggcaaaaccttcaactgaggacttgggggataagaaggaaggtgaatatattaaactcaaagtcattg

SEQ ID NO: 809331 - DNA, 51 bp, Homo sapiens
gcgctggagagggggcgctgagctgttgggacatggaaggtctttaatgta

SEQ ID NO: 809332 - DNA, 100 bp, Homo sapiens
agaaaaacatgactgcattggagattttggaattacagatgcaaagtataatggaaaagaaaatgaaaaccaagagaaatattgccaagcattacaagaa

SEQ ID NO: 809333 - DNA, 98 bp, Homo sapiens
cgctgtgtatgccatccaccaccagcagctgccccacggcttcaccaacatggcccatgttacccaggccctgtctctgcccctggtggtcatcgtcc

SEQ ID NO: 809334 - DNA, 99 bp, Homo sapiens
ttttttacagagcagaatctttcttactcagaagaaccaatcaccgaaattcctggaaccaaagtatttaaggcctccggtgtggctgtctctgatggt

SEQ ID NO: 809335 - DNA, 100 bp, Homo sapiens
tgcagaggataatttaggtcctctacctgaaaactgggagatggcctatactgaaaatggagaagtctattttatagactccagaaacatgacaaggagg

SEQ ID NO: 809336 - DNA, 100 bp, Homo sapiens
ctcaacctggtgcagtgcgagacgctagagggcactgacatggccgtcttctgtctgctgtgtgggaagcgcttccaggcgcagagcgcactgcagcagc

SEQ ID NO: 809337 - DNA, 100 bp, Homo sapiens
gagtgaccctgaatgttctggaaatgacttctgaagatttagaaaatgctctaaaagcagtcatcaatgacaaaagactcggaaaaagccggctgttctc

SEQ ID NO: 809338 - DNA, 100 bp, Homo sapiens
ccagggctcctgtggctcctgctgggtaaaaggtccaggagttgggctgcttggaatttccaaagggggtgagctctgcctttccatggcctctttcctg

SEQ ID NO: 809339 - DNA, 98 bp, Homo sapiens
ttgcctcgccgaccgccatttcacatccagcagaggaggcgggggcagccgctgagacggtttttcacaaggtgtgagcgacgtctcctcaccacagt

SEQ ID NO: 809340 - DNA, 98 bp, Homo sapiens
tagctgacttctgggggaacaacaacgagatcctcagtgtcttgttactacagctataattcaaagaggaactttaagaaaaggctctgttctggttg

SEQ ID NO: 809341 - DNA, 99 bp, Homo sapiens
tatcaactgctttccacttagattcagacctggccactcctcaggatagtcaggaaggaacctttgggtcagagcattcagcgtcaccatcacaaggga

SEQ ID NO: 809342 - DNA, 98 bp, Homo sapiens
gagccgggatctcaggtcctcgggggcggcggccacgccaaggacgggtacatgtcccagagcaagcacacggaggcccgggagctcatgtactcggg

SEQ ID NO: 809343 - DNA, 98 bp, Homo sapiens
tctcaggagcttgatccagacctctacaagcaaatggagaagttcaggaagatgtttgagacggaggcagatgagaagagggagatggccttggagga

SEQ ID NO: 809344 - DNA, 100 bp, Homo sapiens
atggatgccctggttgctgaagaggaggcggaagccaagacatatctgaagagatggattaagaatgctttggattaaggattgtggagcacatttcaat

SEQ ID NO: 809345 - DNA, 100 bp, Homo sapiens
aaaattggaactacacggtttatgtcgttaatatcaggtatctgcatgtaaaatcttcagctggtggatggtgacttttgaagaacaaaaggctttggca

SEQ ID NO: 809346 - DNA, 99 bp, Homo sapiens
ccaaagataacaatcagtttgccagtgcctctttggacaggactatcaagagggctgtgctgaagtttgctgctgccactggagccactccaattgctg

SEQ ID NO: 809347 - DNA, 134 bp, Homo sapiens
tactaccattttgaggatctggactccgtttcctgccttgctctttggaccacattgtcaattcacaccggtgcttgtactatttggcagagcggtaaacattttccctctttcctacctcctgaatttcttcc

SEQ ID NO: 809348 - DNA, 98 bp, Homo sapiens
ttgagacgcgggagaatgcaggctgcgtgctggtacgtgcttttcctcctgcagcccaccgtctacttggtaagaagagttcctgggtcaagtggtca

SEQ ID NO: 809349 - DNA, 98 bp, Homo sapiens
cagcagttcagcatgcagtacatctcgcacatcttcggagtgctgctactgtttgaacggtcttggatgaacagatggaagtctgctgttctgcatga

SEQ ID NO: 809350 - DNA, 100 bp, Homo sapiens
ttaaggattccaagtaactcttatttggtttgcatcgccagcttctatatattacggcctttttttttgctggatattatcttgtaaaacgtgaagacta

SEQ ID NO: 809351 - DNA, 98 bp, Homo sapiens
caccgtcgcctggtgcctcccgcctccgtgtgccctggttgtgagaagacgtctgtgtcgtgcggaaataagatatgtggaacggagttatgtatcaa

SEQ ID NO: 809352 - DNA, 99 bp, Homo sapiens
aaaggtgtcacctcagtctctcagatcttccacagcccagttaatagaagatgaaattgcaaccattcttaaatctacattgaaaggactagaatattt

SEQ ID NO: 809353 - DNA, 100 bp, Homo sapiens
gaaaagatggtgccattgaagatattatcacaggttcaatacttcttcaagatcttggataattagtggtgtggaaagtaaagaagtcacaggttgggac

SEQ ID NO: 809354 - DNA, 99 bp, Homo sapiens
cctgctgtggaggcagcggcggacgccgagctaagcagaggaattttgttgtcagagaataaaaggaggttgtccataattgactttaagcagcaatca

SEQ ID NO: 809355 - DNA, 112 bp, Homo sapiens
tctttctcagcaccttggcgaagccttgggtttctttcttaaaggactgatttttagaactccacatttgagtagctgctgctggtggtgacaatgtcaaataacggcctag

SEQ ID NO: 809356 - DNA, 98 bp, Homo sapiens
cagggggaagtgggaatctgctcactgagagaagcactttcactgactcccagctggggcatttagatcatcacaaactgtgggatcccaatgaattt

SEQ ID NO: 809357 - DNA, 100 bp, Homo sapiens
ttgtagagacggtggaatgtgaaaaggaaggggaatgaaagctactggttgattttaaagtgcctgggcctcacaggtttggagatgtcccagaataagg

SEQ ID NO: 809358 - DNA, 98 bp, Homo sapiens
ccacgcacatctacggcgcctcggccggggcgctcacggccacggcgctggtcaccggggtctgcctgggcagtcatggatcaggtaatgcagtttgt

SEQ ID NO: 809359 - DNA, 100 bp, Homo sapiens
gcatggggtctgcccaggcatgtccatgccaggtgcccagggctgcttccacgacgtgggtcccctgccagatttgtgctctgcagcgcttcagcgaggg

SEQ ID NO: 809360 - DNA, 100 bp, Homo sapiens
tgccggatggtttgaaacctctgcaaagtggtttgggaacctggtcactatggaatggtggaatgatctttggctaaatgaaggatttgccaaatttatg

SEQ ID NO: 809361 - DNA, 100 bp, Homo sapiens
aaaacagctgaactacttagtcatcatcaagtagaaataaaacaagagttcccaagagaagggtggaacgagaactttgttcagccacagctgaatttga

SEQ ID NO: 809362 - DNA, 113 bp, Homo sapiens
ttcatcggctcccagagaaaaatcggcagatgttacagctgctcatgaaccacttggcaaaatattttcaactccaggccatccaaaaatgatttacagctcctcaaacttaa

SEQ ID NO: 809363 - DNA, 100 bp, Homo sapiens
cggtaaccgggacccggtgtctgctcctgtcgccttcgcctcctaatccctagccactatgctacgagttccagggagctctgtcctggtgaccgtgccc

SEQ ID NO: 809364 - DNA, 100 bp, Homo sapiens
aggacccggtttctccgagcttcatctacctgtggactgaccaagcctgagacctactgcacccagtatggcgaggcccctcctcaagtgtctggctgaa

SEQ ID NO: 809365 - DNA, 98 bp, Homo sapiens
tgatctccagtttggagcaggggaaggagccatggatggaggaggaagagataaggacgtggagcttcccaggctggagtgcaatggcgtgatctcag

SEQ ID NO: 809366 - DNA, 100 bp, Homo sapiens
tttgatccagaacttgcagcaacaatagcaaagtgtgggatgctgtctcaggagatgaattgatgaccctggctcataaacacattgtcaagactgtgga

SEQ ID NO: 809367 - DNA, 99 bp, Homo sapiens
ttagagcctcgtaccaatctctctgtctttaaaagatgaggtgacttggtgattttcctggaaaattatagtcaagagaatccatcccattaaatgacc

SEQ ID NO: 809368 - DNA, 100 bp, Homo sapiens
ctttctggccgagaccagccagtggagctgctgaatcctgcccgcgtgaaccacatgcccagcacggatttgggccaggcttagtcatctattggtatgg

SEQ ID NO: 809369 - DNA, 100 bp, Homo sapiens
tgggccaaggaaaaatcgagcagaaagaatgtctttcaggactcagcccaaaaccatgtttgcccaagttgaatctgatgatgaggaagcaaagaatgag

SEQ ID NO: 809370 - DNA, 100 bp, Homo sapiens
attttgacaccaataattttcaaggaagaaaatcttaggcaacgggtaatgacttgcttcagagcatgggaagattgggcaatttatccagaaccatttt

SEQ ID NO: 809371 - DNA, 114 bp, Homo sapiens
ctgaggccctgtccccagaagatggagccagcacagcactcattgcagtcattcctgtattccatcaaccagacaatctgcttgcggttggatagcattgaagccaaattgcaa

SEQ ID NO: 809372 - DNA, 98 bp, Homo sapiens
gaaattcgccccgattaaagactgtgttgcattatcaggatcatccttccttgtgggttagcaggcagttataagattgcaaaatgggtctccggatt

SEQ ID NO: 809373 - DNA, 98 bp, Homo sapiens
caaacattcagacaaaattggagagactgccatgaagcaaattctttcttgtggagaagttattcatgtgaagatccttggaattttggctcttattg

SEQ ID NO: 809374 - DNA, 100 bp, Homo sapiens
gtggccttgacactcggaagacagaattggcactgcctgagagagacgtatgagactctggcctcagacatgcaggctcctggatttggatttggaattg

SEQ ID NO: 809375 - DNA, 99 bp, Homo sapiens
gaaatgaaggtgtattcattatgggcaaaaccattgaatttcacatgggtggtaatatggagttaaaggcgggaaaacgggtggctggaggccctcaga

SEQ ID NO: 809376 - DNA, 99 bp, Homo sapiens
agctgctgcaatcgcttgggagagctcctgggccacccctcctttcaggtcaagatacctgcactttaatcagatagaaactttggacccagattcgtt

SEQ ID NO: 809377 - DNA, 50 bp, Homo sapiens
ccgcgctgagcaggtcatctttgtccgagccctggggtaacagcgtgacc

SEQ ID NO: 809378 - DNA, 100 bp, Homo sapiens
ctccccagccatgtggaactaagttatagaccttactcatgataacaaagatgatcttcaggctgccattgctttgagtctactggagtctcccaaaatt

SEQ ID NO: 809379 - DNA, 98 bp, Homo sapiens
gaagagagccgggggcgccaactccaacgtgttctccatgttcgaacagacccaaatccaggaatttaaggaggcatcatgtgcatggaccacctgga

SEQ ID NO: 809380 - DNA, 128 bp, Homo sapiens
gacatcacggatgagaaatctttcgagaatattcagaactggatgaaaagcatcaaggagttttacaggcgtttatcagaggaaatgacacaaagaagatgggagaatatgccagtttcccagtcatt

SEQ ID NO: 809381 - DNA, 100 bp, Homo sapiens
aaaagaggcgcccggacccaacggggcaacagaagaagatggggttccttccaaagtgcagcgctgtgcagtgctgcaagctttcttcctggtggcagat

SEQ ID NO: 809382 - DNA, 98 bp, Homo sapiens
atggtcggccaactgagcgagggggccattgcggacagtgaggaggaatttggttctgagcgagatgagtaccgggagaagtcagagagtgggggcag

SEQ ID NO: 809383 - DNA, 100 bp, Homo sapiens
gcagtaggcaactttgcttccaaaagaagttaccaacatttagaatttctacttattctgaggaaatgggtcctgatgaatatgaagagatggaagaaga

SEQ ID NO: 809384 - DNA, 98 bp, Homo sapiens
ctccccggcacatgactcagaaggaacaagaagagaaactgtatatgatgctgccagtgtttaacagggaagatgagaagtttttgtctgaagttttt

SEQ ID NO: 809385 - DNA, 100 bp, Homo sapiens
tgaagatatttagcattagcatcattgcccaaggcctccctttttgtcgaagacgggaccgaggtgatgagttcacatacactggaagcggtggtaaaaa

SEQ ID NO: 809386 - DNA, 100 bp, Homo sapiens
gttgaaagcctatgtcttgcttggagatgacagttttctggaaagatttaacacagctcgggttatgtatgattttgctgctgaacctggaaataatgaa

SEQ ID NO: 809387 - DNA, 100 bp, Homo sapiens
gatctgtctgagatgtacgctaagactgaacaggatattcagagaagttctgtatatttgcgtgctctcgtgagaaatctttttaatgaaggaaatgacg

SEQ ID NO: 809388 - DNA, 100 bp, Homo sapiens
ggaggcggcccgggaatccgcaaggacgctttcgccgacgccgtgcagcgggcccgccagatggtcatcatgggccagtgctactacaacgagaccatcg

SEQ ID NO: 809389 - DNA, 98 bp, Homo sapiens
ttggatctgttgctgatgatcagaaacttatgattattttcctgacagcagcccttggatttcccgaggctttgattcctgttcagctgctctgggtc

SEQ ID NO: 809390 - DNA, 100 bp, Homo sapiens
ggacttgacgttcctgacgaagcaggagatcctcctcccacaatgcagttgttacatcagccatctttgcaccaaacccaagtttgatgttatctttgga

SEQ ID NO: 809391 - DNA, 100 bp, Homo sapiens
tggtgaattttgagaggaagatagagaaatttctcgaaaatttcaagtggtagtagagatcaccctgagactataatggaagaagtgaaaataaagccac

SEQ ID NO: 809392 - DNA, 98 bp, Homo sapiens
cctctaggctacctagctactttgtaaggcctgatctgggccccaagatgtacaacgcctatgtacatgtactagccttagcaagttctgttccaaac

SEQ ID NO: 809393 - DNA, 100 bp, Homo sapiens
taaagtctgatgtctggtcatttggaattctgcaaacagaactagtaacaaagggccgagtgccatatccagtgccggtggtggtgtgcacattgagccc

SEQ ID NO: 809394 - DNA, 100 bp, Homo sapiens
gtgtcccgagaccgcaccacccgcctctgggccccagacagctgatcgtcgtgtgttgccacccattcatgtcaagatgactaagtttggatttttgcga

SEQ ID NO: 809395 - DNA, 98 bp, Homo sapiens
agcctcttctacctgcacaacgaactgggcaacatctacacgcacggtgtgccacggaccacaatgtggacaacaccacagagatgctgcaggagtgg

SEQ ID NO: 809396 - DNA, 100 bp, Homo sapiens
gccaacaactcaacatttttttcaatatcttcctctgatcttgtttctaagtggctaggtgaaagtgaaaatccaagtggtaagaagttcagaagcaagc

SEQ ID NO: 809397 - DNA, 102 bp, Homo sapiens
gcaggaaatccacagctcctcctgcacccagaatgggaaggaaagaaggccaagggaattcagattctgaccagccagatatagaaatctctactgaagagg

SEQ ID NO: 809398 - DNA, 98 bp, Homo sapiens
gcgtccctgcctcaggcctgcccggacggtgtgcggacactcgcctatggggacatgaaccacgagtggatcggcaacgagtggctccccagcctggg

SEQ ID NO: 809399 - DNA, 98 bp, Homo sapiens
ccaatacctcattccctaagacttcaccatgaaattagctacatccatctgatggcacattttcgaatgcacactcaaataaaaaaccaaacagctgc

SEQ ID NO: 809400 - DNA, 98 bp, Homo sapiens
ccactaaaggatcaacgtaacgtgagcatgaggttttccaatcagcaaccagcaggcctttttactggagaacgtcccttgtaataatgcaagctgtg

SEQ ID NO: 809401 - DNA, 99 bp, Homo sapiens
gcttcttgaccttgtggcttctcacttcaatctgaaggaaaaggagtactttggaatagcattcacagatgaaacggagtaactattcccagtcagagg

SEQ ID NO: 809402 - DNA, 100 bp, Homo sapiens
ctctgggagcagaagggaggctccaagacctcatcaacaattaaggctcttcttccggaggcattaccccgtgaacagtgtgattttctgtgccttggac

SEQ ID NO: 809403 - DNA, 100 bp, Homo sapiens
ggaagcctggacgtgccaaggcccaacagcagggtggagatcgtggctgccatgcgccggatacggatgctgtgagagaagtaaggaaatattcctcagt

SEQ ID NO: 809404 - DNA, 99 bp, Homo sapiens
gtatttgtggcttaaactcttggcatttggctttgcctttctggacacagaagtatttgtgacagacaaggtctttactaggtgtatttgaagaagatg

SEQ ID NO: 809405 - DNA, 100 bp, Homo sapiens
ggattttagtctatatgcttgtgcttctccaaaaacacccatccaggcagggggatatggcagttgtgaaaaacttcaggacaaaaatgtttcatttaag

SEQ ID NO: 809406 - DNA, 100 bp, Homo sapiens
ccccctctgctgaggtgtcccatgttcacagacagtgtgcatgaccagagatgtttctgccctctggggccaattccaccactccctggaaagtgatgtg

SEQ ID NO: 809407 - DNA, 100 bp, Homo sapiens
gcccgcctggcctgcagcgctcccacccccggcggcggcacgatgccctttgacttcaggagtgtgcaggagaagagaattgggtggacagcaggaccat

SEQ ID NO: 809408 - DNA, 99 bp, Homo sapiens
cacagcattaccactggttgtaaggtccaatgatgcatcagcagcctccttctcagcaatacaatatgccacagggaggcggacagcattaccaaggac

SEQ ID NO: 809409 - DNA, 99 bp, Homo sapiens
tctataagctttgcaacagaattacagagtatgatagacggtctcgccacattgcccagactggtctgaaagtcttgggctcaagagatcctcccgctt

SEQ ID NO: 809410 - DNA, 100 bp, Homo sapiens
tgacggagaagttttatatttggtacattactatggatggaatgtcaggtgactaataaaggtaccagaagaatatggctgcacaaataccagaatctga

SEQ ID NO: 809411 - DNA, 101 bp, Homo sapiens
cttgaggccaagagtttgagaccagcctggtcaatatgagctcaaatgatacttttcccacagcaatgcacattgctgctgcaatagaagttcatgaagta

SEQ ID NO: 809412 - DNA, 101 bp, Homo sapiens
aagttgataacatttcaaaccctgaaggacagtgacttattatgttttgctgttactgctcagtgtagtcacaccttgaataagaaatggaaaaccttggg

SEQ ID NO: 809413 - DNA, 100 bp, Homo sapiens
gagaaccgaggaacgaagaaacagacattcaacatgattgcatttgaagaaagtgtgctgtgttgtcattcaaggacttcctctcctgcaggccaactga

SEQ ID NO: 809414 - DNA, 100 bp, Homo sapiens
gtgggagtccaggcttcacgcactctttgctgttcaatgtagatggagttttaacattgaatgcggagaacactaattatgcctatcaagttccaaactt

SEQ ID NO: 809415 - DNA, 100 bp, Homo sapiens
gccccaaacaggacgaaggcgtgctgaagatgaaggatttgggggcagagcacttggcaggtcatgaaggggtccaacttctcgggttgttgaacgtcta

SEQ ID NO: 809416 - DNA, 98 bp, Homo sapiens
gccaaccatgatgctgccatctttccaggaggctttggagcggctaaaaacctaatgtatgacaacatgtccacaatggtgtacataaaggaagacaa

SEQ ID NO: 809417 - DNA, 98 bp, Homo sapiens
aagagttaaatgccctcaagtcgacaggggatgggaccctaggctacattattggaattttgaagtcatgaaaacatcagatgaaccaacctgcaaca

SEQ ID NO: 809418 - DNA, 100 bp, Homo sapiens
cctcaacccgctcaaggagccactcggcttcatcaaggtcctcgagtgggttcagattcagaacaagaaagtggacatctctaaggtctcctccaagtgt

SEQ ID NO: 809419 - DNA, 98 bp, Homo sapiens
cttcaccacgcggctgcacaactgcaggaacaccgtcacgctgctggaggagagctcagccatcagccctactccggaaatttcttcagagactcctg

SEQ ID NO: 809420 - DNA, 99 bp, Homo sapiens
tccatcatagtcaactgcgtggaagagaaggcagggcaagaatcctttcgttccatcacaaggtcgtattacagaggtgcagcaggagctttactagtt

SEQ ID NO: 809421 - DNA, 100 bp, Homo sapiens
accgtggaagtcgcctggtgtgaactgcaggttgcacgttttcaaaaaatacctaatggtgaaaatgagacaatgattcctgtattgacatcaaaaaaag

SEQ ID NO: 809422 - DNA, 100 bp, Homo sapiens
ctccatggcgtttatccggaagaagcagcaggagcagcagctgcagctctactccaaggagagaaatctccaaattggacatccagagcagcattcttgt

SEQ ID NO: 809423 - DNA, 98 bp, Homo sapiens
agggtctccagggttctttggggcccgagaaggccttacgaccggatatgggctataatacattagccaactttcgaatagaaaagaaaattggtcgc

SEQ ID NO: 809424 - DNA, 100 bp, Homo sapiens
aatttggagtagatcccagtgctgatcctgagctggccttggatctcaaagatttcatgagacaagctggggaagtaacgtttgcggatgcacaccgacc

SEQ ID NO: 809425 - DNA, 98 bp, Homo sapiens
atgccttgaagaattgcagcagggagatactatagcacgactgccttgtctatgcatatatcataaagggtcagtaacagatccaagagatggaaaga

SEQ ID NO: 809426 - DNA, 98 bp, Homo sapiens
gctcttctccaccacaccgggagccgaagggagccgatcggaaacagaagactgaccgggagaagatggagaaaagaactgcccaagagaaggagaaa

SEQ ID NO: 809427 - DNA, 100 bp, Homo sapiens
aaccagtggagcgcactcgtaacctggatcccagaaggtcgcgaaggcagtaccgtttcctcagcggcggttgctgaacctgtttgcatgagttgctcct

SEQ ID NO: 809428 - DNA, 100 bp, Homo sapiens
tcacctgtccagcatccgaccaccgaggctggagggggagaacacccagataagtgccatagagttcatttccatttgccgtatcgatggcaattcttgg

SEQ ID NO: 809429 - DNA, 100 bp, Homo sapiens
ggcggaagcggagagcaacagcgcgccggtatccgttacagcactgatgtgagtgtagatgaagtaaaagctttggcttctctgatgacatacaagtgtg

SEQ ID NO: 809430 - DNA, 98 bp, Homo sapiens
ctttgtcagtatcctgcttcacttccaggtgtttgatttcaccaccatagacttgacatctgagactgatgaaattccagatattatagctttggaag

SEQ ID NO: 809431 - DNA, 100 bp, Homo sapiens
cagagttgccctgtcaccatttctttcacaaaccttgtgtctcaatttggctacaaaagaatgacgttctgcccctttcaaactcagtgcctgaagatgt

SEQ ID NO: 809432 - DNA, 100 bp, Homo sapiens
tctcatcttacaggagcagactaggatgacagtgatgggattccgtggtcagaagaacgggtggtacgtaaagtcctttatttgtctctgaaggagttca

SEQ ID NO: 809433 - DNA, 100 bp, Homo sapiens
ttcaagcagaccgatgtctactccatggctctggtgctctgggaaatgacatctcgctgtaatgcagtgggagataaaagcttcgatgatgaagaatcag

SEQ ID NO: 809434 - DNA, 98 bp, Homo sapiens
agcctgttgactccaattcagaggttcaggttagatcttgggacagcccacatacctagacaaacttaggctttccagcttgcactggaccagggtgg

SEQ ID NO: 809435 - DNA, 100 bp, Homo sapiens
gggcatcagaattgggtgtacagctgtgcattctctcctgactcttctatgctgtgttcagtcggagccagtaaagcagaatggaccacttcttgtacgg

SEQ ID NO: 809436 - DNA, 100 bp, Homo sapiens
acttgctgcatgccagcaccataaggaccctctattgtcccaggcctgtgttggctgcctggaggccttgcttgactacctggatgcccggagcccagac

SEQ ID NO: 809437 - DNA, 100 bp, Homo sapiens
tggtgtcttcatccagaagggacagtttgtgccagctctccagagagaaaagtggcaaagagcaatgacaatgcgaaaagtcttacaagaaatcctggag

SEQ ID NO: 809438 - DNA, 98 bp, Homo sapiens
tcaaagtccctcatcaggaagagaatggctgtgctgacttttttatccgtggagagcgactcagggacaaaatgggatagctgggagtatggccaccc

SEQ ID NO: 809439 - DNA, 98 bp, Homo sapiens
tgagttccactgcccgaagtgtcggcacaacttccgagcgtggagcaccgcgtgctttcccgggatccatccgcagagctggaggctaagcagccgga

SEQ ID NO: 809440 - DNA, 98 bp, Homo sapiens
tagtaaggcgctccacaatgggacactgagctttgtggaagcatttggcggcataccaccctgcactgtgagctcaaaattgttctggattgagaacc

SEQ ID NO: 809441 - DNA, 98 bp, Homo sapiens
gacagaacagttaatcctcaatttaagcctgatctaacccctagaaacagtgcccatgacgcttccggagacaaccctggaaacactgaagcataaaa

SEQ ID NO: 809442 - DNA, 99 bp, Homo sapiens
gcctaccacagcttcctggtggagcccatcagctgccacgcctggaacaaggaccgcacccgtgtgctgggcatcaaggtgaagatcatgctgccctgg

SEQ ID NO: 809443 - DNA, 100 bp, Homo sapiens
agagagctggaggctcacagcacactcaggaggatggctgccttttaccagtgcatcaggcctgaccccagcggtcttgcgagtggctggttccctgcag

SEQ ID NO: 809444 - DNA, 98 bp, Homo sapiens
tagcgacatcaggaagaacagggtcgaggatcgagaaggaagaatcctgctcaaaaatgaggtgaattaatacttgggcgctcaggaaccctggacag

SEQ ID NO: 809445 - DNA, 98 bp, Homo sapiens
agcacttcacgttgcagctgctaaaggctatacggaagttttaaagtttcctttggatcctaaaagaagaaaagaatgggttcgcctggttaggcgca

SEQ ID NO: 809446 - DNA, 98 bp, Homo sapiens
cagcatctggttcagctttatctatattttttgactgctctgctcctctatgctggacatcaaatttccagcatatcagtgctttcatgccttaaaaa

SEQ ID NO: 809447 - DNA, 98 bp, Homo sapiens
aaggaaagaatttctcaggaaacaaggtatttgacaccgaaatctcagtttgggtcagcctcacactctgaagctgtacaagaagtcaggaaagactc

SEQ ID NO: 809448 - DNA, 98 bp, Homo sapiens
gtggggagccttgcaagggtgaagtgcttcgggtccagaccaaacatttccacatcaagtgtttcacctgcaaagtcttggacagtaaagcaccaaaa

SEQ ID NO: 809449 - DNA, 99 bp, Homo sapiens
cccggaggagcacccagtgctgctgaccgaggcccccctgaaccccaaggccaacagagagaagatgactcaggcaagttgctccctgagctgctccaa

SEQ ID NO: 809450 - DNA, 50 bp, Homo sapiens
cagcacatctcagtgaatttgcaagtgtgaccacaactgaaatcactcat

SEQ ID NO: 809451 - DNA, 100 bp, Homo sapiens
tccaagatgcagttttttgatgctgaggagctcctggtcgatgaagaggatgatgtttttggtgaagtttggatgctcttccaagagtcacatgtccaaa

SEQ ID NO: 809452 - DNA, 100 bp, Homo sapiens
tcttatagttgagaatttatcctcaagagtcagctggcaggttcgttccaccagtcataaaccagatgaaatctatggcatgattgaaagactatctcct

SEQ ID NO: 809453 - DNA, 98 bp, Homo sapiens
gaagacgcggtgggccgcccctccggtcatgcttcaccccttcctccatctgctgcacctaccactgattctacagattccataacaggacagaattc

SEQ ID NO: 809454 - DNA, 100 bp, Homo sapiens
aacgaattcattcagaacctagttaggtatccagaactttataaccaccccatggcctttctgtggtgctcacgtccccagcggtgttcactttcacggc

SEQ ID NO: 809455 - DNA, 100 bp, Homo sapiens
ctaatgctcatctgaaggacttggatgaagaaatctttgatgatgatgacttttaccaccaggatgatcaggatggtgctttcacaaaatggagagtgga

SEQ ID NO: 809456 - DNA, 100 bp, Homo sapiens
ccttacgacgggttggggatggcgtgcagcgcaaccacgagacggccttccaagcacccaggctgaactctgtaccatttggaagaatggaagctgatgc

SEQ ID NO: 809457 - DNA, 98 bp, Homo sapiens
tgagcaagacctaaatgagcctcttgccaaagtgtcccttttaaaaggtacaaacccgtagtgctgatgaaccaatgacaacatttgttgtctgtaat

SEQ ID NO: 809458 - DNA, 98 bp, Homo sapiens
ttctccctgcctggacccctactattgcaacaagataggaaaggaacatgttggcttgaaggctgtgactgaaatcctccaagatattcagtataagg

SEQ ID NO: 809459 - DNA, 100 bp, Homo sapiens
gactctttactagtgacagctccacaaccaaggctgaccggttccctgatgtgttacctgcttctgctactgatccaaactgcagaacttctcattcatc

SEQ ID NO: 809460 - DNA, 99 bp, Homo sapiens
ctggaggtgggatccacacagctcagaacagctggatcttgctcacactctttcaagagaagcttccttgatacgtggacagttcaaaggctgttattg

SEQ ID NO: 809461 - DNA, 99 bp, Homo sapiens
aaatcctaatgacagtctccaaattcgcctccatctgtaccatggatcccatggtccattattgcctttaccaagtcgttacagaatgggctctcgaga

SEQ ID NO: 809462 - DNA, 100 bp, Homo sapiens
cgaagatgatgaggatgacgatgacgatgaggaagatgatgataccacgagtcaacccaaaagttgctggggagaagttgctctttaatgaattgcatct

SEQ ID NO: 809463 - DNA, 100 bp, Homo sapiens
atgctcagggaccctgtggagagagatcctgagtcatgtgttccagtggcttgggttcacagtgcatatacacaataatgtgacgaaagtggaaatggag

SEQ ID NO: 809464 - DNA, 100 bp, Homo sapiens
agaagcagtagagggtgccatgcacattcaggatggatgcaaccttgaaagaactgacaagcttagtaaaagaagtctacccagaagctagaaagaaggg

SEQ ID NO: 809465 - DNA, 100 bp, Homo sapiens
gctgtttcgggccagcgacccgctgctcagcgtcctcatgtggggggtaaaccactcggttatcaatactctggctgaccatcatcatcgtgggactgac

SEQ ID NO: 809466 - DNA, 51 bp, Homo sapiens
ggattatggggattacaattcaagagtacaggggctcaggtccaggtggca

SEQ ID NO: 809467 - DNA, 100 bp, Homo sapiens
gttatcagagctcactgcagccttaacctcctgggctcaagtgattctcccacctcagtctccctgggactacagagagaagaagaaggaggttcctgct

SEQ ID NO: 809468 - DNA, 98 bp, Homo sapiens
tgaataacacagtttgtaccaatgaaagaggctggataacctaccagggattcctttcccagtggacaatgatgccaatgggtggaatgatgccacct

SEQ ID NO: 809469 - DNA, 99 bp, Homo sapiens
tttacgtcatcttcgattagctaataaccaactgcaattcctacctccaggtgctgcccataaactcgtgtgttatttcaccaactgggcacacagtcg

SEQ ID NO: 809470 - DNA, 99 bp, Homo sapiens
cccacccctcctgtaacccagcctgtttcacttcttggggttgtagaaggtgatttagctgccatagaagcatacaagtcatcaggaggagacattgca

SEQ ID NO: 809471 - DNA, 100 bp, Homo sapiens
gaaaaatacgatcctacgatagaagattcttatagaaaggttcaaaccttgtactactcagctgatcacaagctgcttgatgggaacctactagatggac

SEQ ID NO: 809472 - DNA, 100 bp, Homo sapiens
ggtagtgagtcgcgaagtcgggaccatcgtcgtgaggatcgtgtgcattacaggagtcctccacttgccactgggtaccagcatcaagatgatttatggt

SEQ ID NO: 809473 - DNA, 100 bp, Homo sapiens
atttttatggagaatgaaagaaaccaagatccgagtgctttccctctttttaattgctccaaaagctgcgtttgctttggttagctagaaagcaggccca

SEQ ID NO: 809474 - DNA, 100 bp, Homo sapiens
aatttcaagaaatgcagaccaacggtgatgtttcaagcaatctgcacatcgtgctgccacacgaggcttcattcgttatggctggcgctggggttggaga

SEQ ID NO: 809475 - DNA, 152 bp, Homo sapiens
gactctgtgtccagctgtgggcaggcgggcagtcagagcatcgggagcaacgtcacgctcatcaccctgaactcggaagtgtacaactccgctgagcagctcttccatctcaacttcagaggactgtctttctcttttcagttagactcatg

SEQ ID NO: 809476 - DNA, 98 bp, Homo sapiens
ggcttctgtgaaacatggcggtaggctgggaccataacacaaggtgctacctttttacccacacttaagtgacgcaaaatgcccttcaatggcgagaa

SEQ ID NO: 809477 - DNA, 100 bp, Homo sapiens
aattgcgaatattctggcccaccaaaaccattgccaaaggatggatatgacttagtgcaggtgacacttaactccgccatctgcgttttgagcactgttc

SEQ ID NO: 809478 - DNA, 100 bp, Homo sapiens
gcctgaaaatctgagctgcgaagaagtggaatacttttgtaacaaaggtctgctcaccaggtggccagataccgcccacgtgcccccatcattgctgtga

SEQ ID NO: 809479 - DNA, 98 bp, Homo sapiens
gagctacagctccgcgcccgccagttgcttgatcaggtggaacagattcagaaggagcaggattaccaaaggaatggttatacgccactgcacatcgc

SEQ ID NO: 809480 - DNA, 100 bp, Homo sapiens
aaaatgaagggaaataaagtgaatgaggtgctgaatagactgcacctggctatcccaaccaggagggacgataagagcaaaatatgctgtgaattccatc

SEQ ID NO: 809481 - DNA, 100 bp, Homo sapiens
ccgtgaggaggttgggggccctcgcggaggccgagaggcttaaggaggtctgagcgggaaagttccgaagaataggagtggctgagttagctacggagtt

SEQ ID NO: 809482 - DNA, 100 bp, Homo sapiens
ggatgagtacgataccgaagcgggctgtgtgccccttctccacccagagggtgaggatccacgacctccgcagtggtaacatcgccctgtcgctctccgc

SEQ ID NO: 809483 - DNA, 100 bp, Homo sapiens
tggagatcttgacaaagcctcttctgtttccaatgggtatcctaagaaatccggtaaccaataagaagcattacagattgtatgtgatttataaagttcc

SEQ ID NO: 809484 - DNA, 98 bp, Homo sapiens
agaaggtcagtgtgcttgcttggagatcaggacgcaaaggattcactccttctccagttgcacagccacacccttcagctggccttaatgttgacttt

SEQ ID NO: 809485 - DNA, 98 bp, Homo sapiens
cccggccggctgcggtccgtgcggaggctgagccggccgcgggcgcgaccggaggcagatgttcctcctgctgatcaagagaagctttttatccagaa

SEQ ID NO: 809486 - DNA, 98 bp, Homo sapiens
aaaaggagagcctctgagctcaacggaggattgtgcctgagaagaacccacagaggcttgggaacaatgggccgaggcattgtcatttcttttgcaag

SEQ ID NO: 809487 - DNA, 99 bp, Homo sapiens
tatactggggaccagcctcttaatcggatgtatcttgtattcatggttttgcactgattgcaaaaataaagtcctccgagcatacaatatccttattgg

SEQ ID NO: 809488 - DNA, 100 bp, Homo sapiens
cctgctgggccgcgtggccgtttccgcaggtgaagcggtgagtgctggagatgcattatgtgaaattgagactgacaaagctgtggttaccttagatgca

SEQ ID NO: 809489 - DNA, 100 bp, Homo sapiens
ctgacgccgggaccgggaccgccgccgccgccgccaccatggtccccgtctgggcaactcaccggtgccaagcatagtgcagtgtttggcgaggaaagat

SEQ ID NO: 809490 - DNA, 98 bp, Homo sapiens
gtgtctccttcttctaccacatgtacgggaaacacatcggttgtactcgtaaaacaaggatcatcgatgttgtctacaatgcatctaataacgagctg

SEQ ID NO: 809491 - DNA, 100 bp, Homo sapiens
tcacaataccaaacttgataataatctagattctgtgtctctgcttatagaccatgtttgtagtagaatcactgagcttcagctcaaacttgagagtgcc

SEQ ID NO: 809492 - DNA, 100 bp, Homo sapiens
aaataaaatttggacttgcaatatctcaattggtggatgtggtttatcttgcagattatggactttcctacagatattgtcccaatgggaaccacaaaca

SEQ ID NO: 809493 - DNA, 100 bp, Homo sapiens
tggtggagagggaccgcgccaccttggccatgcctgaaaacttcatgcctcctgttcccatcacatcaccaatcatgaacccgttgggtgacccccagtc

SEQ ID NO: 809494 - DNA, 112 bp, Homo sapiens
tatgaccatgtatttgtggcttaaactcttggcatttggctttgcctttctggacacagaagtatttgtgacaggccaagctataacatcagaaatggtgaatgaatacaag

SEQ ID NO: 809495 - DNA, 100 bp, Homo sapiens
agccaaggaaggcttcgagaagattagcaaaggtgctaatccagtggaaatcaggagaggtggaataacactcccatggatgaagcactgcactttggac

SEQ ID NO: 809496 - DNA, 98 bp, Homo sapiens
ggttgacctgtctgagaaatataaaaaactggttctgaggaatatctctgaagatgtgattttttctgtgatgtgttataaagatgaggatgaagagc

SEQ ID NO: 809497 - DNA, 99 bp, Homo sapiens
tcactgtcctggtacaaggatgaggaggctttgtccagggatctgaaaccactttgcagtcgacatactcggataccagcgctcagcccacctgtgatt

SEQ ID NO: 809498 - DNA, 50 bp, Homo sapiens
aagaccgccttccccagcgtccagctccctagatctttagcttctactcc

SEQ ID NO: 809499 - DNA, 98 bp, Homo sapiens
tccgactagtggagtttttagccttttaacattcaaggattaggtattctttaggtgatgctagaaggcctcttcatgaaacagcagttttggtagaa

SEQ ID NO: 809500 - DNA, 102 bp, Homo sapiens
ttgttgatttcaaatagatcagaggttggatttatgcaaacctgggccaaaggacagttagaagacgagctatcagcttcccagtttgcacaattcatcaag

SEQ ID NO: 809501 - DNA, 100 bp, Homo sapiens
ggtcttttttgtcttcattcactttcccccctcagtttctgaaatgattctccagaatttctcctcataaaaaagcttcttgacctgagcaatggagaac

SEQ ID NO: 809502 - DNA, 100 bp, Homo sapiens
ctgcgccccgcacccctccgagcagcccggggatccagcacgcagccatacacactgctgctatggatatgctgggaggacctggtatcgaaagccagtg

SEQ ID NO: 809503 - DNA, 98 bp, Homo sapiens
gcgaggagtatagtacggcaaaaaactgtcggggggacacagcgattgccacgcgccattggaatgtccctggccaaggagctcatattctctgcgcg

SEQ ID NO: 809504 - DNA, 98 bp, Homo sapiens
acagcggattctcttgtcaacacgaggttatgtcaacttcgtgaatgaagtatttcaccagtgaccatgaaagacaccaggttgacagcactggaaac

SEQ ID NO: 809505 - DNA, 98 bp, Homo sapiens
gcgtgtccctgcagcgaaggatcctggttggtgcatggcggcctgctgcagatcttccctgagggccggcccgtggtagccaacatcgagccactctt

SEQ ID NO: 809506 - DNA, 100 bp, Homo sapiens
cccacatttcctttggcttctgtggggacaactatataaaccacagtacttcaggatcccattatgaaaattcccagcggggacctgtgtcttctacaag

SEQ ID NO: 809507 - DNA, 98 bp, Homo sapiens
tacagcagtttggtcaatattgtcttaacatgcttcaaataaatcagatggcttccttagcggtatccaactggcctaagcccatgccattgattcca

SEQ ID NO: 809508 - DNA, 100 bp, Homo sapiens
atagagcggtatttcaccttagtcaccagatcgcagcaggagacagatgatgattattctccaccgtctaagagaccaaaggccaatgagctaccgcagc

SEQ ID NO: 809509 - DNA, 100 bp, Homo sapiens
ataacctgtatcctgaagagaagttggactgtgttatagtagtcttcataggagagcgacgagtagaacagcccctctatggtttagatggcagtgctgc

SEQ ID NO: 809510 - DNA, 98 bp, Homo sapiens
cgctcctaaggcaggaagatggtggccgcaaagaagacgacatgtgcattgccattgcgatttctcttctcatgatcctgatatgtgctatggctact

SEQ ID NO: 809511 - DNA, 100 bp, Homo sapiens
tgtagctagaagatttatcaaactagatgcacaaagaaagcgcctttctccaggctcaaaagagtatcagaaacccatagggccagatgatgctatagac

SEQ ID NO: 809512 - DNA, 100 bp, Homo sapiens
cacctcagtcgcaggcgttgtcaacggggagagtcttgaagatatcaggaagttggattggatgctgctggcaagacaaccattctgtataaactgaagt

SEQ ID NO: 809513 - DNA, 100 bp, Homo sapiens
ggacgccgcggtcttcccaggcgtcgcggagagcagcggttaagaagattgtctaccaaatatagaacagaaaagatatatcccacagccactggagaaa

SEQ ID NO: 809514 - DNA, 51 bp, Homo sapiens
ggcggactgaccccacagtatctggcggaactgcaagcacatgttgaccag

SEQ ID NO: 809515 - DNA, 98 bp, Homo sapiens
ctaacatcacctgcttcatccttgtttaatgactttggtgccctcaacatctctcagagacgaaaggcaatgaatcgctccctggctaatgtgattct

SEQ ID NO: 809516 - DNA, 100 bp, Homo sapiens
agatggtgatacaccagatatgaaatgtgacgatatgctaacagcaaatggcattaaaattggccctcagcatgctgctaccaatgcaacacatgcaggc

SEQ ID NO: 809517 - DNA, 100 bp, Homo sapiens
ggcgggcccgccccccgggttctccgcccccgccgccgccattacggagctcccagtgtacgtgggctccttccctgtggatgacctggacacccaggag

SEQ ID NO: 809518 - DNA, 100 bp, Homo sapiens
cgacatggccctgagtgaatacccagaaaatttcatgctgctcccggcagatcggcttctcctttgtacgacccaagctctgtgccttctctggcctcta

SEQ ID NO: 809519 - DNA, 110 bp, Homo sapiens
tatgtccgaagcaaggatttccgggactacctcatgagaaacttgtggtggagaatgttgatgtgttaacacaaatgaggaccagctttgacaaaccagaccagatggct

SEQ ID NO: 809520 - DNA, 100 bp, Homo sapiens
cagtcactggtcccaagaagacctatatcacagatcctgtttcagccccctgtgcgccaccattgcagccaaaggagtgtgaggaagaggctgtctgtgt

SEQ ID NO: 809521 - DNA, 100 bp, Homo sapiens
acacctaccaggtggacggcacggacgacagaagcgactttggtgagactctgatcttgctgacgtcttgactgtgaacccggactcaccggcgtcggac

SEQ ID NO: 809522 - DNA, 99 bp, Homo sapiens
gactgcaaagctgtgctccatgctgtggctccatactggaataatggagcagagacttcttggcagaacttcagtgaagatttcatacattggcctcat

SEQ ID NO: 809523 - DNA, 109 bp, Homo sapiens
atatcattgaaacaaatacttttagcagcactagtattgcccaagctgactatggccttgaacacttggatgaccccataggaaatattaacctggccatggaaatcgc

SEQ ID NO: 809524 - DNA, 98 bp, Homo sapiens
agctcagaaatcagctcaaacatttttatcagaggcaattaagttggaatatgcaaggttggttaagttggcccaagaagacaccccaccagaaaccg

SEQ ID NO: 809525 - DNA, 100 bp, Homo sapiens
atttgtctttagtcttggcaaagctgctgtgacttactcgaagcctcgattggccacattttggtactacgccaaggttgagctggttcctcccacccct

SEQ ID NO: 809526 - DNA, 100 bp, Homo sapiens
cgtgcgccgcagcccgggcccaggccccggcagcgcctgggacaagttgagccccatatgggggttggcaggcagcagagaggcccctttcaaggtgttc

SEQ ID NO: 809527 - DNA, 98 bp, Homo sapiens
caggtgcttgattttgtgcaggatccgtgctttgcccaaggagatggtctcattaagtgcattccactcttcgttcaacttgttttggagagattaac

SEQ ID NO: 809528 - DNA, 98 bp, Homo sapiens
aatggactccctggctgctggagagttgaatgccagccaccagccatggccaactgggtacatggaaaactcagtctcctacagcgcaattgaagacg

SEQ ID NO: 809529 - DNA, 98 bp, Homo sapiens
agcaaggaggtcgctgtagccctgttccaggtctatcaagcagcccttctgggtcacccttgcatggtgttgacttcaaaatcaaaactgtagagcta

SEQ ID NO: 809530 - DNA, 100 bp, Homo sapiens
tgaagaaggcgcgggagagctcggggcgcctggctgaccggttccctgatgtgttacctgcttctgctactgatccaaactgcagaacttctcattcatc

SEQ ID NO: 809531 - DNA, 99 bp, Homo sapiens
ggaaactcggagggaccctggcccggaggaagaaagccaaggagggcagcaaagctggccaagatgaagattccccccagtgagatgttcttgtcagaa

SEQ ID NO: 809532 - DNA, 100 bp, Homo sapiens
gagcaaggaaaagagccctggaatatgaagagacatgcgatggtagatcaacccccaggttttgcacactagggaccaagaagccctcggggacactgct

SEQ ID NO: 809533 - DNA, 98 bp, Homo sapiens
cgcgcgaagacgctcgggcggcgggacccagggaaggcagcggccggagcgcgcaaggtgcccctgggcgctgggattgctctagcctgtaagtataa

SEQ ID NO: 809534 - DNA, 99 bp, Homo sapiens
cttgggagctgctatcggagagtcttgcattctgggcccagccacatccctgctcttggtaaaggtatattttggaacttcacatccaagatactatat

SEQ ID NO: 809535 - DNA, 99 bp, Homo sapiens
acagaatttatatagagatgtgatgttggagaactacagaaacctcgtctccctggaccaccaaatcccattgaatttctagcatcttatcttttaaaa

SEQ ID NO: 809536 - DNA, 107 bp, Homo sapiens
tgggagttagcgaggcgaccacgaaaacggtgaaggtcggaaccgacagcctcctccgagaaggtgtactaatggtcacttgatgtgcgctggctgttttatccacc

SEQ ID NO: 809537 - DNA, 100 bp, Homo sapiens
aaaggaaagcagaagaagaagccagaaggagaatagaggaagaaaagaaggcgtttgctgaagcaaggagaaatatggctcacattctacttgactgtgg

SEQ ID NO: 809538 - DNA, 100 bp, Homo sapiens
cgggaagactcatcggagcgtgtggatttgagccgccgcattttttaaccctagatctcggttctgagatgcagtaaaatcgctggtgtgaaagtagcag

SEQ ID NO: 809539 - DNA, 100 bp, Homo sapiens
gagatgtggttggttacttttcgatagatctggtgacttttatagatccaagcaccttggaacaacaggctgtcagccagatgaaacagcaaaaatatcc

SEQ ID NO: 809540 - DNA, 100 bp, Homo sapiens
aggactccaaaatggcgtcagttggtgagtgtccggccccagcgagtcacctgttcccctacgtgaagaagagaatacaagtaattagccaatcgagcac

SEQ ID NO: 809541 - DNA, 99 bp, Homo sapiens
tccatattctcaggcacagagaaaggcctaccccttgctcaggttcaagaagacagtgaagaggctcattccgcatcttctttctttgcagaaatttct

SEQ ID NO: 809542 - DNA, 100 bp, Homo sapiens
aaccagccccgagacatcggactgcagggcacaccaataaagtttgacaacaactcaggtcaatctgccatcaaacacaatgtcaaatccttaatcacgg

SEQ ID NO: 809543 - DNA, 100 bp, Homo sapiens
gtgaagccaagcaacagtttccttttcattcagacaccccaaagtcttgtactaagtcttctaaaagctccactccagttccttcaaagcagtcagcaag

SEQ ID NO: 809544 - DNA, 100 bp, Homo sapiens
ccagcctcatttgagtacctctttgagcagcataccataaagtctccaaaggatggcacagtaaagaaagtgttctacagagaaggtgctcaggccaaca

SEQ ID NO: 809545 - DNA, 99 bp, Homo sapiens
tgcatgaaaggcgcatcgtgattatctcgagcaaattaagcactgtgaaaaaccatacaagtgtcaaatttgcaatcagtcttttagaattaagaaaac

SEQ ID NO: 809546 - DNA, 100 bp, Homo sapiens
aaactccaacagcttcatatggacagatggacttcaaatgctgtttgtattccagagactaggtatgagcattctccagggaaaggatgacatatttttg

SEQ ID NO: 809547 - DNA, 100 bp, Homo sapiens
gggcagtcatggtcccagaaacgtcactatcaagaagaaagtttcctacactactgaggtttaggggcactgtgaagcaaaagccacgcctcagaatccc

SEQ ID NO: 809548 - DNA, 98 bp, Homo sapiens
cggcctagcgtcctggaattacttcaatcaagactggaatgtcacgtggaataccagcaaccccgacttcaccaagtgctttcagaacacggtcctcg

SEQ ID NO: 809549 - DNA, 100 bp, Homo sapiens
cacaaagcaacaaatggaggcatatgaaattcctcatcgaggaaacactggagatgttgctgttgaggcttttgatgaagccattgctgaacttgataca

SEQ ID NO: 809550 - DNA, 50 bp, Homo sapiens
tttaccatcgcccatgagctgggccacaaagtattgttacaatcacattt

SEQ ID NO: 809551 - DNA, 100 bp, Homo sapiens
tccttgccaggccttcaaccactatctcagtgcaatgggatgttgagaaagagaaggaaacccacagttacctcagcaaagaggagatcaaagagaaagt

SEQ ID NO: 809552 - DNA, 100 bp, Homo sapiens
cttcgtctatttcatcacaaaactgtcccgggtgggaagaggaacagcctatgtgggcttccacggagtggattgtattacacagagcatgaatatactt

SEQ ID NO: 809553 - DNA, 101 bp, Homo sapiens
acggagccggatcaggagccgccgccgccatatcagaggtgctgatactcaaagaaggtttaagttgtctgatctctctataaattccactgaatgtctac

SEQ ID NO: 809554 - DNA, 100 bp, Homo sapiens
agaaaggattgtgacatatcgttggacccagaattgagggacagagcagaatgggctgatatagatccggtgccgcagaatgatggccccaatcccgtgg

SEQ ID NO: 809555 - DNA, 137 bp, Homo sapiens
acttctgcagactccaaattttcgaattaccgtggttgatgatgcagacactgttgaactctgtggtgcgcttaagatgagctctgtgaaaatgttacagcctcgtctcagtagtatcctgttcaagctcacatttg

SEQ ID NO: 809556 - DNA, 100 bp, Homo sapiens
ctacggtggaagccacctcttgtacagggtctaaaattcccaggactccacagctttgcaccagataagcctggaggaatactaatgatggatctaaaag

SEQ ID NO: 809557 - DNA, 98 bp, Homo sapiens
atgcccttgtccgagctttaacagactcaacacccagagatcttgattattccagaagtgtaccaccaaaatcaagcccaggatcgttggaggaactg

SEQ ID NO: 809558 - DNA, 100 bp, Homo sapiens
gctaacagggttaagtctgctattgctatacaaggaggcctgactgaacttccctggaaaatgtttataggaggccttagctgggacactacaaagaaag

SEQ ID NO: 809559 - DNA, 98 bp, Homo sapiens
tcagctcaaatacacacacctgttgccattatagagctggaattaggcaaatatggacaggcccggattgcatttctacaaggcgaaagaaaaggtca

SEQ ID NO: 809560 - DNA, 100 bp, Homo sapiens
aaggccacacggcagccacgggggcagccgtcgcagtcgccgtcccacacgggctgcggacaccaagggttgctagaggaaaaggcttctcttttacatc

SEQ ID NO: 809561 - DNA, 98 bp, Homo sapiens
aagaaagaagacaaggtggaaaagttgcagtttgaagaggaggactttcattagtgaccagaaggatcccaaggatcgaatggttcaggttgtgaaat

SEQ ID NO: 809562 - DNA, 100 bp, Homo sapiens
cctggtgaaatgcctgcggctgctgcgcaggtaccggctctcgcacgactgcatctctctctgcatccaggcgcaggtcgtctacttcacagccactttt

SEQ ID NO: 809563 - DNA, 100 bp, Homo sapiens
ggtgcaggactatgtgcagatgaaggccagtgagctggagcaggagcaggagacagagctccaggtggagtgtgttactcttggggctggaatgagcatg

SEQ ID NO: 809564 - DNA, 98 bp, Homo sapiens
cgtggcggcggggaccgtccagcccagcgattctcagtcaggccttggatggtatactgtaaattcagcatatggagataccattatcataccttgcc

SEQ ID NO: 809565 - DNA, 60 bp, Homo sapiens
ccatgagcgagcgcctccgtcccaggtggaagatgcaatgctgatgtttgataaaactac

SEQ ID NO: 809566 - DNA, 100 bp, Homo sapiens
tcctactgatgagacaagatgtggtgatgacagaatcagcttttgatgttttgagcagtgacattataattctgacaataacacgatgcatagccatcct

SEQ ID NO: 809567 - DNA, 100 bp, Homo sapiens
aatccagtttcctgctaatttgcagcttcctccaggatatccgacatgaagccagtgacttcccatgtagagtggccaagcttcctaagaacaaaaaccg

SEQ ID NO: 809568 - DNA, 100 bp, Homo sapiens
tgaagaaaaactcattgtttctgcgtggtataataagaagttggtgagatggcaaagcagtatatagagaaaagtcttttggttccagaccatgtgatca

SEQ ID NO: 809569 - DNA, 50 bp, Homo sapiens
ccgcgccgaactgctccggttcccggaggagaaggcagagcccccccagg

SEQ ID NO: 809570 - DNA, 99 bp, Homo sapiens
cggccgccatggagcagccgccggcgcctaagagataaagaaatgggggctccgagcagtcaagaagaacatgccccaagttattcgtcagtgaggcgg

SEQ ID NO: 809571 - DNA, 100 bp, Homo sapiens
gatttgtactgtgttcgcagtgacctggggaacctgctcaaagccctgggtcgcttggaagaagccaaggtcccagagaactacttctatgtgccagacc

SEQ ID NO: 809572 - DNA, 100 bp, Homo sapiens
gccaggaggagcgcgcgggcacagggtgccgctgaccggtaaagtgttgagagaggagaaccagtgcattgctcctgtggtttccagccgcgtgagtcca

SEQ ID NO: 809573 - DNA, 100 bp, Homo sapiens
gctggttcccggcgagctacgtgcagttgctggagatggggaaattgaggcagagaagccaagacatgtgctaaaggtcatgcaggctatgaatggagct

SEQ ID NO: 809574 - DNA, 154 bp, Homo sapiens
gtagatgctgcaaatggcatagttatggaaggatatctgttcaaacgagccagcaatgccttcaaaacttggaacaggactattagaagacacattagtgcagaagcttccaggctgtagagccctgcttcccttctctgacctcacaaagata

SEQ ID NO: 809575 - DNA, 98 bp, Homo sapiens
aagctaaaaatgattcgggaatatcggcaaatgatggcaagattattttatcataaaccccagtttgccattttggatgaatgcacaagtgcagttag

SEQ ID NO: 809576 - DNA, 98 bp, Homo sapiens
tgctccgccgcccttgcctccaggggtattgtccagtcagaagaaaaacttgtcatcagtgcatcctgggcaaaagatgatgatatcagcagactctt

SEQ ID NO: 809577 - DNA, 100 bp, Homo sapiens
agagaaaatggtgtcttttcgatccaaattcaaggatctagaagataaaaaagtgaatcagcagccaaatacaaggcagttggtgtcaccagccagcgac

SEQ ID NO: 809578 - DNA, 100 bp, Homo sapiens
ggcatgaacctcgagtggtcccagaagcctaaaggggagtggccccagtggcggtagcggcggtggtgccaatggtacctctttcagctacacattccat

SEQ ID NO: 809579 - DNA, 99 bp, Homo sapiens
ggctcaacgagaacaagctatcaggtcagatgtaccaacagtaccagcaacaggccggctatggtgcacagcagccgcaggctccacctcagcagcctc

SEQ ID NO: 809580 - DNA, 112 bp, Homo sapiens
ataccctttctgtttatagaagtgtcaagaggctaggtattcctgacagcagttccgccgagcatcctggggcctccaagcctccgataagctcctccagtatgacatcacg

SEQ ID NO: 809581 - DNA, 98 bp, Homo sapiens
tcctgcagcgccagcagctggactatggcatctatgttatcaaccaggcccggattgcatttctacaaggcgaaagaaaaggtcaagagaacctgaag

SEQ ID NO: 809582 - DNA, 98 bp, Homo sapiens
gagaaaagcggcaggaataaagtgatgaccgtccggctggaacgcggagtgtgagagctccggtgacgaaagtccatggcggttcaggcggggcacag

SEQ ID NO: 809583 - DNA, 100 bp, Homo sapiens
tccacgaccggagtgcgtcaggtcccggggctgcataatgggacgaaagcctttctctttcaagcccacgacccttcctcagggcaccatcaacatgaac

SEQ ID NO: 809584 - DNA, 100 bp, Homo sapiens
ccgcaacaataagaaactcctgggccgcgtgaaggccttcgatagcacctgtgagaatatgaacttctcttggaggaatgaatgcaaccagtgtaaggcc

SEQ ID NO: 809585 - DNA, 100 bp, Homo sapiens
ctgaaaggaaatgacggattttgatttttacctcctataactccaccagaaaagttttttctttcccagctgatgctggcacccccacgggaactcttca

SEQ ID NO: 809586 - DNA, 98 bp, Homo sapiens
tgccctgtagaatcagtgctgtgaccccgagtaacaacgcgcgcttgagttggtataaactcctgaaggatgtacagttacccagcacgtgtacctcc

SEQ ID NO: 809587 - DNA, 100 bp, Homo sapiens
atgaagtgcactctgctgcttatcctcctccggcagtggaagagggaggagatgaagtggcggcagtgggcggacgactggctggtgcacctgatctccc

SEQ ID NO: 809588 - DNA, 98 bp, Homo sapiens
gtgctgtaagctgatgtccgcctcaagccagcacctccggggacatgcaggtttctgagtcccttcaacatgatcctgggaggaatcgtggtggtgct

SEQ ID NO: 809589 - DNA, 98 bp, Homo sapiens
tcgctcggctgcgggaaatcgggctgaagcgactgagtccgcgatggaggactgaatgtgggcccagttggcgtcattctgctttgacctaaacattc

SEQ ID NO: 809590 - DNA, 98 bp, Homo sapiens
tggagcaggagcggggccggaactggagccgaggcgcaggtggcgctgggccacccagaggagaaggccaccccgcctggaggcacaggccatgaggg

SEQ ID NO: 809591 - DNA, 100 bp, Homo sapiens
ggcgcgggagcagcacttccacagccaagtgcgggagtccacgtagtattattgattccacagaatacagccaacctccaggtttcagtggcagttctca

SEQ ID NO: 809592 - DNA, 100 bp, Homo sapiens
ccggtttatacagaagcagatggaacattttcaaggccctgtttgctgaaatgttggggccaaacaacttgatagagcctatgatgttcctttcaagctt

SEQ ID NO: 809593 - DNA, 140 bp, Homo sapiens
atggttgcggaagggccacgcgtcccccagtaggagaatgactccgattcgtgaccctcagcgccggtgcatgtcgattgaccaaagacttgaccactcaaagtccagctccccagaacactgctcgacatggacaccgg

SEQ ID NO: 809594 - DNA, 100 bp, Homo sapiens
tcgcgatcgcgacggctacagctacggaagccgcagatacaatgtctctttgctatatgaccttgaaaatcttccggcatccaaggattccattgtgcat

SEQ ID NO: 809595 - DNA, 100 bp, Homo sapiens
agctacaaataaattcaaattaatgaatgacgataccctggtgaatgtgttatacgtcacacaacattgatgcggatgaaattaaaaggctaggaaagag

SEQ ID NO: 809596 - DNA, 100 bp, Homo sapiens
aaagccagagctaagaatacattttatgaaacattaccagtggcaattaatggaaatggacccaccaagaatgtgaaagatgttgcagaagtgttccaga

SEQ ID NO: 809597 - DNA, 100 bp, Homo sapiens
tactatgtccagcctatttgcacaccatccaggagtcagtttattactggaaagtggtcattgggactcccacacttaaacaaagaaaggaaattctgca

SEQ ID NO: 809598 - DNA, 100 bp, Homo sapiens
gtcgcctggaggaagccggaggcctgcgtggaggaggcgccccgcgcagctggctggcggagcatgagcgccccaggtgaatgaaaactttgccattgat

SEQ ID NO: 809599 - DNA, 99 bp, Homo sapiens
agacctgcggaccaagggcttcagcctagagtcgtgccgcagcatggtgaacctcatggatgcactgggggccacagtgctgatctcagcagctccatt

SEQ ID NO: 809600 - DNA, 98 bp, Homo sapiens
ctgggagcgagcgcagcaaagcgcccagcctgccgcctcgctgtccctgcggcttctgggggtgccagagtttgtagcctattggaggaaaacacacc

SEQ ID NO: 809601 - DNA, 100 bp, Homo sapiens
tgtgacttcagagacactgccaagcagccttagccctagtgtagaggtaaatgagctggatggtatcccgttgatcctggacaactgcaacatcagtgac

SEQ ID NO: 809602 - DNA, 98 bp, Homo sapiens
tccgagccctgaagaacaacagtaatgatattgtaaatgcgattatgctcattcttggaatcccagaacaggccttaagtcttctccacatggccatc

SEQ ID NO: 809603 - DNA, 101 bp, Homo sapiens
cccccatctccggcggagagaccgtccgaggtaattgtctgccacgagtgcacattctgaaaacagtggcggcacctgacttgctggatcctaaatctgcc

SEQ ID NO: 809604 - DNA, 98 bp, Homo sapiens
tgcccgacgtggaacccgctgccttcctcgcactgctcaagaaggatttgatgccctggatccctttattcccatcctggtttccaactataacccaa

SEQ ID NO: 809605 - DNA, 100 bp, Homo sapiens
ggggccagaagacaagagagacggcgaggcgcgctccctgcccggcagcgactcggaggcagtggaccaatccagctatggcagtttcttctggaattac

SEQ ID NO: 809606 - DNA, 100 bp, Homo sapiens
ttagaaagctgaaagctgataagaggctaagaatattgtacacaaagattcttgatgttcttgaggaaatccctaaaaatgcagcatatagaaagtatac

SEQ ID NO: 809607 - DNA, 98 bp, Homo sapiens
gcggccagcgggcagccgcggcccgagatgcagtgcccggccgagcagtgttggtgtctgtccagtcccttatattagtagctgagccttattttaat

SEQ ID NO: 809608 - DNA, 98 bp, Homo sapiens
ccatgaacttcgaaacgtgataagaagcacctggatgagacatttgctacagcatcccacattaagtcaacgcccaccttgggacaccttgactccaa

SEQ ID NO: 809609 - DNA, 100 bp, Homo sapiens
agacttgtgaatccaggaagagagactgactgggcaacatgttattcagtgccccaggtgctaaagagctgtgcagaatttgtggaggagtatggagtgg

SEQ ID NO: 809610 - DNA, 100 bp, Homo sapiens
tgttattcaaagaggttagcagtagactgttggaagtaagggtgcagttctacctcaagaaataagccaagtaaatcaacatcataaatctggctttaat

SEQ ID NO: 809611 - DNA, 100 bp, Homo sapiens
aaacgctgcagcagcagaccttcaagatccgcatggagcctgacgagacggattcagtggcctttgaggatgtggctgtgaacttcaccctggaggagtg

SEQ ID NO: 809612 - DNA, 100 bp, Homo sapiens
tcgttgatgagagcattcgaagtgacctcagcagggcatccagctgctggagccagttctgcttctcggcaaggagcgatttgctggtgtagacatccgt

SEQ ID NO: 809613 - DNA, 99 bp, Homo sapiens
aaaatattccatgacttggatatgctgacgactgtgcaggaagaaaacgagccagtgatttacaatagagcaaggtcttgggcgtctttggtactggct

SEQ ID NO: 809614 - DNA, 99 bp, Homo sapiens
tcggagacgagtggtgggagaaccagccgactggagcaggcagcagcccagaagtgagttgctgaatgagcttatggacagtgcaaaagtgtctaacag

SEQ ID NO: 809615 - DNA, 99 bp, Homo sapiens
tggaaacatcaaagctggattagaacatctggatcgcagtatgtggtagggaagtgatgctgtctgaaggtgacatcctgttctcctctcttctgtcct

SEQ ID NO: 809616 - DNA, 98 bp, Homo sapiens
tcacttttgagtgcaactgccttccagtgaatgaactcattcttaaacagaagcaaagatttgaggaaaagaggttcaaattggaccactcagtgagt

SEQ ID NO: 809617 - DNA, 100 bp, Homo sapiens
tcccagctgcgcaaagcttgcgaggtggcgttagcactggcctgtgtttgtggaggtgaaagaccttttgacattggtgccgcccctggtgggcctgaag

SEQ ID NO: 809618 - DNA, 98 bp, Homo sapiens
gcagcaccaaatccaagatggcggccagcaggaggctgatgaagaccgcaggatggaaacaagcccactgagactagtcaacctcaatctagcacagg

SEQ ID NO: 809619 - DNA, 99 bp, Homo sapiens
gcctcctcctgctgctctcaggggccctggccctgaccgatacttgggcgggccgccgactcgaagcgtgagcagttccggaggtacttggagaagtcg

SEQ ID NO: 809620 - DNA, 100 bp, Homo sapiens
gaaagtgtagaagtcacaccccaatggcgggatagcagcccctgtgtgtgagcacccctccatgccaggtgctgcagaaattggggaaagctgtagaaac

SEQ ID NO: 809621 - DNA, 100 bp, Homo sapiens
acctgcagggggactctggccgcggctactacctggagatgctgatcgggacccccccgcagaaggcctgtcccctcagttcccaggtgccatgaggaag

SEQ ID NO: 809622 - DNA, 100 bp, Homo sapiens
ggtaccctggatgatggtgaatacaaccccactgatgataggccttccagaaaactgtcgctgaaaagcaggagaagagaaatcaggatcgcttgaggag

SEQ ID NO: 809623 - DNA, 99 bp, Homo sapiens
aaaatcaagtaaaggaacccaacagagatctcttctgttctccactgctagaatatcatcacccttgcagaaactggctctctggacttcagaacattt

SEQ ID NO: 809624 - DNA, 100 bp, Homo sapiens
gacctaaagccacagtcttcaagagcccacggacaccacctcaacggtaaaaatgtctccatcgtatcatcagtccaaaggggatcccactgctaaaaag

SEQ ID NO: 809625 - DNA, 99 bp, Homo sapiens
gtatcgttctatttctctagctattgccttattttttctcatggatgttcttcttcgagtatttgtagaaggtattccactgaactgaagaaactctac

SEQ ID NO: 809626 - DNA, 99 bp, Homo sapiens
caatgcctaccccgtcagttcagcaggttggctgttgaaggcacgaatggaatagataatcatgtacctacaagcactctagtccaaaactcatgctgc

SEQ ID NO: 809627 - DNA, 98 bp, Homo sapiens
gcagaaaagttgaaagaaaggtcaaaggcatctggagtggttagcaggaagaagatgagccttaagtctgaacgccgaggaattcatgtggatcaatc

SEQ ID NO: 809628 - DNA, 100 bp, Homo sapiens
ctcctcagtgcgaagaagctgcagccgcacctggccaagggtctgccatgtgaatctggaggggcagccgttctactccaagaaggacagacccctgtgc

SEQ ID NO: 809629 - DNA, 100 bp, Homo sapiens
cctcagtctcccgagtagcttggactacagggagaactaatgccgacgtgatgaccgccctgtcccagggctacaggatgccccgtgtggagaactgccc

SEQ ID NO: 809630 - DNA, 100 bp, Homo sapiens
gaaaacgatgacttagcccatgagctggtgaccagcaagattgcactacggaaggacctggataacgctttaaatgaagaaattgttaatagaaagaaga

SEQ ID NO: 809631 - DNA, 99 bp, Homo sapiens
gagcgggcagaggatgcagtggaggccatcaggggccttgataacacagagtttcaagctgtattctgtacgggtggaagagatggcaacattatggtc

SEQ ID NO: 809632 - DNA, 100 bp, Homo sapiens
cctggatctgcgatctgtttgtgctaatcttccagtaccaacaattgcagcaatagatggactcgctttaggtggtggtcttgaactggctttagcctgt

SEQ ID NO: 809633 - DNA, 100 bp, Homo sapiens
accaccgtactgaagttccctgatgatcagactcagaaaattttggaaagagaagatgctcggctgatgttggatgaaaaatctgacaaacagtatgctg

SEQ ID NO: 809634 - DNA, 100 bp, Homo sapiens
cagaagatgatgattggacggtgcaaccgagctgggaagcctgtcatctgtgctactcagaatttcactctcgtcgcccaggctggactggagtgcaatg

SEQ ID NO: 809635 - DNA, 100 bp, Homo sapiens
tctgtgaggagttcccacatgagctagataagaccatcatcatgtggaaactgaccagggatgagaccaactatggaattccacagcgtgctctgcgggg

SEQ ID NO: 809636 - DNA, 100 bp, Homo sapiens
gcaccgcaaagcggggacccagaccctggagcctcagttggaagcagccgatccagcctgcggagcctgtggggcagggaaaggaaaacctcttcagcgc

SEQ ID NO: 809637 - DNA, 100 bp, Homo sapiens
cgccctcttgcagtctgcagcttctcctgtcatcggaaatgccaggccaagatgtctgctccaatgaggatctccctgaagttgagctggtgagtctgct

SEQ ID NO: 809638 - DNA, 100 bp, Homo sapiens
cccgggacctgggctgggaacccgcggtggagcgggacacgaacgtggctaagtcctatcagccatggaaacaccattgctctcttcttccggtcactgt

SEQ ID NO: 809639 - DNA, 100 bp, Homo sapiens
caccgacatggaacagggactcactggggccatgaagctcatgactgctctggtgaatgttgccttaaacctcagtattcatcaggataatacccagaga

SEQ ID NO: 809640 - DNA, 111 bp, Homo sapiens
gaagactgccctcatccacgatggcctagcacgtggaattcgcgaagctgccaaagccttagacaatatctcaacatcaaactaactgacatcagtgtcacagaccctgag

SEQ ID NO: 809641 - DNA, 98 bp, Homo sapiens
agctcctgtctctggaggtgcgaaaacgtagacgacggagtagcagattgagggcaatgaggccaaaatacccaggacttcctcgttctgcccatctt

SEQ ID NO: 809642 - DNA, 99 bp, Homo sapiens
tggagacagagctgagggagcaagaggtgtcggaggtctcatctttgaactactgccggagcttctgccaggcggagatggtccacacaggtttgaagt

SEQ ID NO: 809643 - DNA, 99 bp, Homo sapiens
tcaacttctgaaatttacagaaacaaactacatctcaggccccacaggaagccccaagtcagccgcccgctacatactcactggtaaataaagttaaaa

SEQ ID NO: 809644 - DNA, 100 bp, Homo sapiens
tgtggatttgtgtggagcacacattgaatgggccaaggaaaaatcgagcagaaagaatgtctttcagaataagaagatctacttggacattattcacaca

SEQ ID NO: 809645 - DNA, 98 bp, Homo sapiens
cggagtgagaagcaagaaggccctggacacagcaatatctctgggctttcacaggcagacctcaacaccaacatcgaggatgaaggcagctccttcta

SEQ ID NO: 809646 - DNA, 98 bp, Homo sapiens
gaacagcgacagtacaaagaagactcttgtcacactaattgccaacaacaatggaccaagccatatgtccttctatgttcgagcccacaaagggtcaa

SEQ ID NO: 809647 - DNA, 100 bp, Homo sapiens
tctacaaactgagatgtggaaggaaggaaacagaattcattttcaaaccaagggattaaagcctgtggtttccacagaagcaccacctatcatatttgcc

SEQ ID NO: 809648 - DNA, 98 bp, Homo sapiens
cgacggagaacacaatcaaacccctgggtctggacaaagtgccaaaggatcttccccctgacacaactctgctagacctgcaaaacaacaaaataacc

SEQ ID NO: 809649 - DNA, 74 bp, Homo sapiens
gcctgatctaacccctagaaacaggtattcctggagtggagagccactctttttgacctgccctacatcagaag

SEQ ID NO: 809650 - DNA, 100 bp, Homo sapiens
gagggtcttgtaaagagtctgccttctggatctcaccagcgtcagcttttctttcgcaaaaagctgcttcactcatcccagatgcttcgggcggtctccc

SEQ ID NO: 809651 - DNA, 100 bp, Homo sapiens
ttgcagataaacagtccaccatttgaccaaccaatgagtcgaaggtctcgtagagcttccttagatctgcaactggaatatggacaaggacaccaaggtg

SEQ ID NO: 809652 - DNA, 100 bp, Homo sapiens
tgtaggataagtcaaaggaggaatttgcctcttctacagatagagctgttaagtctgtgtctgtgtggagtgttgcaggacgagtggaaatgactgtttc

SEQ ID NO: 809653 - DNA, 100 bp, Homo sapiens
atccggacagagtttgacagggagatagaccggggatccctcaaccctggaaaacagctgttggtcaaagaaaaagtgatgtatgaaaaagaggcaaaac

SEQ ID NO: 809654 - DNA, 98 bp, Homo sapiens
aaaacgtgaggagctagagcgaatactggaagagaataaccgaaaaattgcagaagcacaagccaaactgattggacgactgattattggacagaatg

SEQ ID NO: 809655 - DNA, 98 bp, Homo sapiens
cttcgggctgacgctgctgctcgccgcgctgcgcccttcggccgcctacttcgggagtcgtaagaaagcagtgggagttgaagtcattgtcaagtgct

SEQ ID NO: 809656 - DNA, 99 bp, Homo sapiens
cccaagaaagctcccaagagggagaagtcggctccggagccgcctccaccagagcctgtgtggtgcccctatctccttgttccaagggcctctcttgcc

SEQ ID NO: 809657 - DNA, 100 bp, Homo sapiens
cgaaggccgggacccggttccccggcccacagtgggggtgtgcaaacccgagagaactggtcctgacacagctctccctgaggagcagccacattccagc

SEQ ID NO: 809658 - DNA, 100 bp, Homo sapiens
gctttaattcgccaggatcttataaaacaaatgctgctgctatgaatatgggtcgaccattccaaaaaaatcgtgttatgtgccaagaaccttgcaaaga

SEQ ID NO: 809659 - DNA, 99 bp, Homo sapiens
gttagtagcagcggggcacagaacagcgacagtacaaagaagactcttgtcacactaattgccaacaacaatgtctccatctgctgctgcctcttcatc

SEQ ID NO: 809660 - DNA, 99 bp, Homo sapiens
aaattactgatacagagacgatggtcggaatcagatttgaaaatgaaagtatccaaaatacggagctggcatatacttcaccaagaacctcaaaaacct

SEQ ID NO: 809661 - DNA, 100 bp, Homo sapiens
aggccgtgttgtttgtctacctgggactagtcagcaaagtggaacgcgagaagaaccaggagctgcggcaggtgcgcgagcatgagcagcataagaccgc

SEQ ID NO: 809662 - DNA, 100 bp, Homo sapiens
ggcagcccgggtacgcgccgcccggcgcgcacaggctgtagcaggttccggcggacggcgttgcgaaggagaaaaggttctgcaggacgatgagttcacc

SEQ ID NO: 809663 - DNA, 98 bp, Homo sapiens
gccgccgccgccccagccaccgcccccgccccaagccggcctaccccagatcatccaaaaaatgacagggagagagtttttctctcgtttcccagaac

SEQ ID NO: 809664 - DNA, 100 bp, Homo sapiens
aaagaggagccaaagggcctaagggtgaaaacggtgttgttggtcccacaggccccgttggagctgctggcccagctgtggtgaagcagtattttccaat

SEQ ID NO: 809665 - DNA, 98 bp, Homo sapiens
ttagagccaaaaacgggaagaccatccaggtgtgcctacaggggttgtggaaggagacgctgcccccggtctatgccctggaattgctgaccatcttc

SEQ ID NO: 809666 - DNA, 100 bp, Homo sapiens
ctttagtgactcagaaatcgggggcatcaccatcgcctggaagtttgactcccacaacgtgtcctggagagacagcacaatgggctctatcttcatcaca

SEQ ID NO: 809667 - DNA, 100 bp, Homo sapiens
agcagtaccccacaatggagctgcagggaattgtgccggaggttctgaagaagatcgtaacaacttatgacatggttattctcgttcaagttaatccagg

SEQ ID NO: 809668 - DNA, 98 bp, Homo sapiens
ttgtgttggctgcgtgccaggccttggagaacagcacgtccccgctgagtgtatgtccgtggttcagaccctgtattaaagcttttggacgacaatgg

SEQ ID NO: 809669 - DNA, 98 bp, Homo sapiens
ggattaaaatctcccaagaggaatgacaaacaaccagctcttcaggtttcaagtgccccatttgctccaagtctgtggcttctgacgagatggaaatg

SEQ ID NO: 809670 - DNA, 100 bp, Homo sapiens
gtattgttgagaccagcacaagccaaaggtgctcctatcaggtttaatgatatccatgtaccaatccgcctggaatgtgtgaaatttgctagccattgtc

SEQ ID NO: 809671 - DNA, 100 bp, Homo sapiens
taccgatgggaagtccttattattggccctccagatacactttagctatggtgaactaaacggtaatgctggagaaagagaaatatctttaaagaacctg

SEQ ID NO: 809672 - DNA, 100 bp, Homo sapiens
ctggtgcatgcgtcgtcggcctctgggcagcaggctatggtgaactaaacggtaatgctggagaaagagaaatatctttaaagaacctgagttctgatga

SEQ ID NO: 809673 - DNA, 100 bp, Homo sapiens
tgccccatccccatttgaggtctgtcggagctgcccttcagtgtggcgcattctacattctaaaggggagctcagtgaagatagacataaacagtatgag

SEQ ID NO: 809674 - DNA, 98 bp, Homo sapiens
acttttcaagcctgaaggaaaggcagaactgcctgattacaggagctttaacagatgtcagtgccatggtcatgccgataactgcgacacaacaagcc

SEQ ID NO: 809675 - DNA, 99 bp, Homo sapiens
cagcctttcctaccgcaccacgggctccacctacctgcacccgctcagcgagctcctgggcatcccgctggaccagaaaatgcatccgatgcagattta

SEQ ID NO: 809676 - DNA, 98 bp, Homo sapiens
cgctgcgccgcaacgccgagcgcaccgacatctgcctgctcaaagggactggtgattgcagctggaagtgcccatgaccgagctggcgtcctccgggg

SEQ ID NO: 809677 - DNA, 100 bp, Homo sapiens
gacacatcagcatttgtttcccttagccagcccgagcaagtaaagattgagccgatgatgagcaccccacctcctgccagcgagctcccgcagccacagc

SEQ ID NO: 809678 - DNA, 98 bp, Homo sapiens
caaattggccaacataccctcagctgtatgtgaaaggggagctggtgggaggattggatattgtgaaggcacgtgacacaagctgacctcaagagctc

SEQ ID NO: 809679 - DNA, 100 bp, Homo sapiens
agtaccagacctgggaggagttcagccgcgctgccgagaagctttacctcgctgaccctatgaagatataattgaccctgcaatcctgcgcccgggccgc

SEQ ID NO: 809680 - DNA, 100 bp, Homo sapiens
cgctgcgtgtcttcttcctggtgctccaggtcacccactatctggatgccgggcaggtatgaagaggagatcaacaaacgcacagcagccgagaatgact

SEQ ID NO: 809681 - DNA, 100 bp, Homo sapiens
cctctgccttcctggccgctcccaaatataggttatttggaaatagcggtgcttgcagcgcttgcggacagtcgattcctgcgagtgaactcgtcatgag

SEQ ID NO: 809682 - DNA, 98 bp, Homo sapiens
cctcctaggcatcttattgatcctccagtcgaggcaagaagagaggcggaggcgatccttccaggattacactgggcagaagatcacccttgaggctg

SEQ ID NO: 809683 - DNA, 75 bp, Homo sapiens
gagtaccatattgatgaagaagtgggctttgctctgccaaatccacagcgatgccctcctagctagccgtcacgg

SEQ ID NO: 809684 - DNA, 98 bp, Homo sapiens
ggaggcaaaacagattcagaatctgcagaaagcaggcaccaacatgatgatggtgggcgtgcacggccccaagaccccctgtgaggaggtgtacgtga

SEQ ID NO: 809685 - DNA, 100 bp, Homo sapiens
catgttagataaacttgtggatggacttgctacctcttgggtgaactctagcaattacaagactatctgttatagtccctgggtcaagacaacaattttt

SEQ ID NO: 809686 - DNA, 100 bp, Homo sapiens
tttcattgacagggacagcacccttcggagacttcaccacattcaaattgcatccactgccataaagagctcaaatgatacttttcccacagcaatgcac

SEQ ID NO: 809687 - DNA, 99 bp, Homo sapiens
gctgagggagcaagaggtgtcggaggtctcatctttgaactactgccggagcttctgccaggcaatactgaacactgcgcagcttgcagaggtctcctg

SEQ ID NO: 809688 - DNA, 100 bp, Homo sapiens
cacaattctatctcttgggcaatcttcacggggctggctgctctgtgtctcttccaagttgttgacctcctgtactggagagacattaagaagactggag

SEQ ID NO: 809689 - DNA, 100 bp, Homo sapiens
ccgggaatgtgcagtcacagagaaaggggaacccacctgtctctgcattgagcttctagaattcctctccagagctactctcaagttatatccaggggac

SEQ ID NO: 809690 - DNA, 100 bp, Homo sapiens
tcttatgatactcgagtatatatctgggatccacataatggagacattctgatggaatttggctggttatattctgggcactaaatgaaggcgtttctag

SEQ ID NO: 809691 - DNA, 100 bp, Homo sapiens
cattagcagccatagctgcctttatgtctgctgtgatcctcacagctgttgctgttattacagtccaacttcgcatatcatttaagtggatggttcgagc

SEQ ID NO: 809692 - DNA, 100 bp, Homo sapiens
agattagcaaaggtgctaatccagtggaaatcaggagagcttcttggacacttaatgattgttggcaagaaatgtgctgctgatctgggcctgaataagg

SEQ ID NO: 809693 - DNA, 100 bp, Homo sapiens
ctctcttggccctcctgaaatggggactcagaagaagatccttgacattgccaacatgctgggcttgtccaacacagtgatgcggctcatcgagaagcgg

SEQ ID NO: 809694 - DNA, 98 bp, Homo sapiens
aggaaaatactggagttcctgagatctcaagaagacttgcactatctgccagatgctgcttcctaaccagtgcagttatgcatcacaccagagaatcc

SEQ ID NO: 809695 - DNA, 118 bp, Homo sapiens
aatctgtccctccagctggccctgaggcatctgagtcaacaacggatgaaaatgaagacgacattcagtttgtcagtctccgacagttagttaatatgtgcatcaacccagatccaga

SEQ ID NO: 809696 - DNA, 99 bp, Homo sapiens
gaaacatttgctctggctagcagtcttttggataggtttttagctaccgtaaagtattgcctaagtgtaatcttgaacatgggcggtgctgtgagtgct

SEQ ID NO: 809697 - DNA, 98 bp, Homo sapiens
gggcacctccgagcgcaaggacagcgcgaggtccgcgcagcccagcgcagccatcggagctggagtttgttcagatcatcatcatcgtggtggtgatg

SEQ ID NO: 809698 - DNA, 100 bp, Homo sapiens
taaggattccaagtaactcttatttgatctgacaggatggcatctgatgactttgacatagtgattgaggccatgctggaagctccctataaaaaagaag

SEQ ID NO: 809699 - DNA, 100 bp, Homo sapiens
aaattggacctcggctcggggccctcccagcacacactgacagtcatgacctctgtatggcttttcaattttagttgaaattctctctccatggcctttt

SEQ ID NO: 809700 - DNA, 100 bp, Homo sapiens
gacaaactgcagattggccaaggatatgttcaaggaatgagtgatttactttcccctcttttatatgtgatggaaaatgaagtggatgccttttggtgct

SEQ ID NO: 809701 - DNA, 98 bp, Homo sapiens
gagacgtcttagacagtcgtggttcctgtgatctgtgtcctctttgcagaaggcatgcttcccaagagccaagtgacagatacacttgccaaagaagg

SEQ ID NO: 809702 - DNA, 100 bp, Homo sapiens
ctgcgctgttccacctcattcaacttcagcataagcttaaatcgtctcagaaggacaaggtccgccagtttatggcgtgcactcaggctggcgagagaac

SEQ ID NO: 809703 - DNA, 100 bp, Homo sapiens
tgacttgagcctgcagtgtgctgtgagagatctaccactaggcttgtccagccggaagccctgagggcagctgttcccactggctctgctgaccttgtgc

SEQ ID NO: 809704 - DNA, 98 bp, Homo sapiens
gtactcagtaatctagctgcagttttgatgcacagaggttgcaaattcgtgaagaatcagcatcatgtttggcagctgagtattggagccaggagcct

SEQ ID NO: 809705 - DNA, 98 bp, Homo sapiens
agcaggaagacagttcagatgatgatgaagctgaagaaggagaggttgaagatgagaactcaagtgatgtagaggtaaactgtcttgagccccaccct

SEQ ID NO: 809706 - DNA, 100 bp, Homo sapiens
tctcagagaggctgtgcagctgctggaggactataagcatgggaccctgcgcccgggggtcaccaatgaacagtctctggctgatgaacttgctcttgtg

SEQ ID NO: 809707 - DNA, 100 bp, Homo sapiens
tcacatctatgccatcacagacaccgcctacaggagtatgatgcaaggccctcatcaccttttttcaagtcaagatttcatcccatacatgcatgactca

SEQ ID NO: 809708 - DNA, 100 bp, Homo sapiens
agcttaacaagtctgattctaaccagtatattggggaactgaaagatcagatagcagagctgaatcatgaggtgatagaaattgaagatgcttcacccac

SEQ ID NO: 809709 - DNA, 98 bp, Homo sapiens
ttcaacagtgcaccaatattctttcacagccgattatgtttcgaggggaagtacgtttaaatgtggaagagaaaaaaacaagagctgcaagagagcga

SEQ ID NO: 809710 - DNA, 100 bp, Homo sapiens
cagaaggtgtgaccccaacgaagagtggagaacggcaacccatccagatcaccatgccggcacatgaggcagcattggaagccagagccagtccagagat

SEQ ID NO: 809711 - DNA, 99 bp, Homo sapiens
gcaagcctaactcaagccattggcacacagatgagtgccaaaccaaatatggaaatgctaatgcctggagatactgtaccaaagtttttgacatgctca

SEQ ID NO: 809712 - DNA, 98 bp, Homo sapiens
agcctggaagaactcgtcatgctctttgtagcgtggtgcttctgttgctcacaggctgcctgataggggctgtaaatctcaaatccagcaatcgaacc

SEQ ID NO: 809713 - DNA, 98 bp, Homo sapiens
aaagaagagttgagcacaatcagaacatgacctttgacctgccatcagatgccacagtggtgctcaaccgcagctcctgtggaaaagagaacacttct

SEQ ID NO: 809714 - DNA, 100 bp, Homo sapiens
ggacaccgcttactccagaaacatgggtggaagctgggccagggattgggaaaatctcttcagggaacagtaagaggaccttgtgcatgaataatttgtt

SEQ ID NO: 809715 - DNA, 98 bp, Homo sapiens
gaaggtggcggcgctgctgctcgggctgctcttggaggtcgctcctgtggttggtccagcccagaatgcagccttgagcctggcttaggccaccacct

SEQ ID NO: 809716 - DNA, 100 bp, Homo sapiens
aagagtacttcggcagctatggaactctggccaggagtggtggctcacacctgtaatcccagctctgggaggccaaggccagtggattgcttgagcccag

SEQ ID NO: 809717 - DNA, 100 bp, Homo sapiens
atgtccctgcacgacctggacgtgggtgaaatctgcaccgtggacccgtgccacaagaaggaaagccacgcaagttggggagaaaacccccaaggatgaa

SEQ ID NO: 809718 - DNA, 120 bp, Homo sapiens
gagaacttagaaggcaaaagagggaggagatgcgactcgaagcagaaaggttgctccttgagggcaggacagttcttatggctttatccgttgcgtaagcacagagaggtctgcgaggtc

SEQ ID NO: 809719 - DNA, 98 bp, Homo sapiens
ttctcccttgatccgggagtctttccactggccaggcgggcaccacggcaggggctgagctaccctcatggaagggagaggaccgtaccggatctacg

SEQ ID NO: 809720 - DNA, 98 bp, Homo sapiens
cgctaaggaacatggcgaaggtggagcaggtcctgagcctcgagccgcagcacgagctcaaattccgaggtttcaagacaacagatgaattgtgaaag

SEQ ID NO: 809721 - DNA, 98 bp, Homo sapiens
ttctaagtgatgtccaggaaggaggaggaataatatttatggagcatatattatggaacacaccctggaagaaagcgggacttttcccctgttccttg

SEQ ID NO: 809722 - DNA, 127 bp, Homo sapiens
tccccattttaccagtgtgcagaagttctcgaatcattctttgtacagaaattgaaaggcttcaaagctagcagtctacccatggtgttggaatgaatggaaataatgcagcagcagggaaaagcgt

SEQ ID NO: 809723 - DNA, 100 bp, Homo sapiens
cagcatgggaagcaaaggccatggcagtaatagcgtgtttatctgacacggacccaggtgtgaagtctggcaacaagaggtcttcatctcactctagccc

SEQ ID NO: 809724 - DNA, 100 bp, Homo sapiens
acgggtaatcgccaacccacccaaagccaccctggagaaatgtgccacgtgctcccagcccatcctggaccggatcctgcgggctatggggaaggcctac

SEQ ID NO: 809725 - DNA, 100 bp, Homo sapiens
cacgaggtcggagactttgccatcttggtccagtctggctgcagcaaaaagcaggctccctggggaagggaatgcagggttgctggggctgggcccagaa

SEQ ID NO: 809726 - DNA, 100 bp, Homo sapiens
acaaatccaccttcttgccacctgcaaccccaatctcaatccggaggccagtagcaccaggatatgtcttgttccatcttagcccacatccagaagcaaa

SEQ ID NO: 809727 - DNA, 98 bp, Homo sapiens
ttttggagggcttgcttcagcgagacgttagcaagcggctgggctgtcacggaggcggcagaaaaagtcctacctggagcgaagcgttaaggaagctg

SEQ ID NO: 809728 - DNA, 98 bp, Homo sapiens
tgccgctcttcagttttcattatcttgcatttttctgagggaaggaaaagccacagcagcccgacggccatggaggctgaagagacgatggaatgcct

SEQ ID NO: 809729 - DNA, 152 bp, Homo sapiens
ttcgagagaaggtcatcgacttttccaagccctttatgacacttggaataagtattttgtaccgcaagcccaatgcatgtggcaaactgatgaaaatcacaggcccagttacagtcaagacatctggaacccgatttggtgcttggatgaca

SEQ ID NO: 809730 - DNA, 98 bp, Homo sapiens
agcactttgggagaccaacgtcggaggatcacttgaggtcaggagttccagaccagcctgggcaacgtggtatcgaaggatgatcgcagtgatgtgga

SEQ ID NO: 809731 - DNA, 60 bp, Homo sapiens
ccaagagggatccttcacccgtgtctgccttctacaccagcaggtacggctacaagatgt

SEQ ID NO: 809732 - DNA, 100 bp, Homo sapiens
acctggccccagtgctgcgtccttatcagccgagccgctttggggccatttggatcacacgatgttttttcaagattttagaccctttctaagtagcagt

SEQ ID NO: 809733 - DNA, 98 bp, Homo sapiens
cgacgtgcagcctggcagtgcagtgggtctgtttgtatcctggctttgttgacgtgaaagaagctgactggatattggaacagctttgtcaagatgtt

SEQ ID NO: 809734 - DNA, 100 bp, Homo sapiens
tgtgtcagcctgccctaggacttcatgtctatatatttccccattcactgattggcggcagtaagcacacaatgaatgatcacctgcatgtcggcagcca

SEQ ID NO: 809735 - DNA, 100 bp, Homo sapiens
gtgtgtactaaatgaaggcatgccaatttatcgtagaccatatgaaaagggtcgcctaatcatcgaatttaagcaattctgtggtgttcttggtcacaca

SEQ ID NO: 809736 - DNA, 100 bp, Homo sapiens
ggacgggtccatccatcgcataagagcaaagaatactattgttgccacaggtttctcttcagcaacgggtagcagaattggaaaaaattaatgcagaatt

SEQ ID NO: 809737 - DNA, 98 bp, Homo sapiens
cgcagctggctggcttcagtggaccagtagttttccacggaatgctgtttgcttttatttatctggctttgcagaagcgtcaaatactttctgaagga

SEQ ID NO: 809738 - DNA, 98 bp, Homo sapiens
atagctctgaccacccggcgaagctcgaattacatctttacaagaggaggtgaagcatctcaaacataatctcgaaaaagtggaaggagaaagaaaag

SEQ ID NO: 809739 - DNA, 100 bp, Homo sapiens
agttttcgtcgttcgaatcaggttgactggtccttcatccccccaatctcccgtacctggcgagtccagctcgtcgcgttctgcaggctggaaatccaag

SEQ ID NO: 809740 - DNA, 100 bp, Homo sapiens
cctagcgacgtcttgatcttgaccctgtgtaggcctaggaattcagcttagagaactatcaacacaggacaatgcaagcccatgagctgttccggtattt

SEQ ID NO: 809741 - DNA, 100 bp, Homo sapiens
cactgacgaagaatgaaatgactgttactcacatatttacttcagatggtctgcatgctgagtggaaaagcgagattgtctttgaccatttgctatggac

SEQ ID NO: 809742 - DNA, 100 bp, Homo sapiens
gcatagaaaatacattgtgggcaagcaccattgttgcatcaggctccatccgcgaggagaacggcgtgcgctggcatgtgtgtccctactgcgccaagga

SEQ ID NO: 809743 - DNA, 98 bp, Homo sapiens
ggaacatctggaggctgggaaatgattcacttgtcatggattagtgactggtcagagttatattttccgggtcagagcagtcaatgcagctggactta

SEQ ID NO: 809744 - DNA, 100 bp, Homo sapiens
cctagaccggtttttagtccattgactatgcagcctaatggggtcctactgggcaatagacaccaatccgaaggaagatgtgctgcctactcggccaaag

SEQ ID NO: 809745 - DNA, 100 bp, Homo sapiens
tcgtgggagtcatgaccgcccagaaatacctgcagactcgggccgtggccgcctacaggttttaccaattcttgagattctgtatcatgttgaagaaagg

SEQ ID NO: 809746 - DNA, 100 bp, Homo sapiens
aatgaagttcctactttccaactggagacaatgaccgtttgccaagtaaaattatctaatggcttactggtacatgggccacagtgccactctgaaaatg

SEQ ID NO: 809747 - DNA, 100 bp, Homo sapiens
tctatagtttccagatggctctaacctcagtgatcctggccaatttggagcaaggcttagcagaagacggcggcatgagcagcgtgactcaggagggcag

SEQ ID NO: 809748 - DNA, 100 bp, Homo sapiens
ttttcaaaactggatatggccaggatgctatagcattgtcagtgttatttgttatcaaagcgtgaaggccaagcagggtctccagagaaaccgttatctg

SEQ ID NO: 809749 - DNA, 100 bp, Homo sapiens
tagagatcgttttgatggatatatcttccttgacagcaaaggtatttctggtggtcgcattcatatgtcagttttaggaaggcttgggacatttgaaact

SEQ ID NO: 809750 - DNA, 107 bp, Homo sapiens
ttatcaccatgcaagctttgtcggaagaggaccggaggctctggatggaagccatggatggccgggaacctgtgcacttacagagtgctacgatgaactggggaaca

SEQ ID NO: 809751 - DNA, 98 bp, Homo sapiens
gaccgcatgtacccggacctttccgagctgcttatggtgtctgccccaagaattcctcctgatcagcagagactgatctttgctggcaagcagctgga

SEQ ID NO: 809752 - DNA, 100 bp, Homo sapiens
tctaggatttgaattcaggccaggccgagaatatttctacatctatagggatgaggaagaaatgaccaaacgagatgacaaaagagatatcaacagatac

SEQ ID NO: 809753 - DNA, 100 bp, Homo sapiens
caccaacttcagagatttgtccaagggtaatgccctgtacttcaagtctgccagaaatgttacagtgaacattctcaatgaccagactaaagtgctaact

SEQ ID NO: 809754 - DNA, 100 bp, Homo sapiens
cccatagtggaaactgggaagcttttaggcatctgatcagagcgggagccagccgggggaccacagtgctggacaggctggaatcgatggagaaagcatc

SEQ ID NO: 809755 - DNA, 100 bp, Homo sapiens
gtgcaggcagagaatgcgctggggaccagcatgtccccacaactgtgtcttgatcccatggatgttggtgtacacttaaagcgttctgggaatatgaatc

SEQ ID NO: 809756 - DNA, 100 bp, Homo sapiens
tcgctaccatagatttatatcatttgccctctatctggcaggccctcctgtcggtccttcgagaaagccatcgttcaagaacagtttttaggaaagttgg

SEQ ID NO: 809757 - DNA, 95 bp, Homo sapiens
agttaatgccaagaagcagccgccagttgggatcaaatgtgagcctatggatcaaggtatgatctcgtgaaatcttgagagaaactgaatgacga

SEQ ID NO: 809758 - DNA, 100 bp, Homo sapiens
tcaactatccaagcacaccaccttctgaaagaaatggcacttcatcaacttgtcaagcacttattttagaggagattgcaattgattgtcataataagga

SEQ ID NO: 809759 - DNA, 100 bp, Homo sapiens
gagcagctcttcggcccttcccggacagcgacgcagtcgcagcgcgcgccctaacacagattctctttgtggccagatgggtttgtatggacaggcttgt

SEQ ID NO: 809760 - DNA, 99 bp, Homo sapiens
ccgacccgagttatgcccaccctccaactttgcgacggaaatgtgtcatcgaaagccagtgaggagctggtttcacctgaggacctgctggagtggctg

SEQ ID NO: 809761 - DNA, 115 bp, Homo sapiens
aacagaattgttgtacaaggatggacgttattgccaggagcctcgaggaccgacggaccttggttgcatgtacaagttatttagtcgtgtgccaaatggtttgaaaacaatgtgt

SEQ ID NO: 809762 - DNA, 98 bp, Homo sapiens
catgatccataatcggtttcaaggcatttactgtacatttctcccgagaaaagagtgagatcgtgtcatctcatgctccccatccgcaggtcacttcc

SEQ ID NO: 809763 - DNA, 100 bp, Homo sapiens
cgttaaacatctgaaagggtcaggattttttatcaagcagaaatgcatcgaacaacgagaatcaagatcactgagctaaatccccacctgatgtgtgtgc

SEQ ID NO: 809764 - DNA, 100 bp, Homo sapiens
atccccgttcgccaccaattatgggagggctggccaacttctgctacagacgactcaccacttccggctcctgcgtcgctccggaagcctgcgagttccg

SEQ ID NO: 809765 - DNA, 99 bp, Homo sapiens
gaaaatcataacaagcggttctctaccctgtaaagatttggattcctagacttgcccaagcacttctgtctgctgtagcagatgtgagactttactcat

SEQ ID NO: 809766 - DNA, 100 bp, Homo sapiens
aatcccccactctttccgccctaatggaggtctccagtttcggtgtgggaataagtatctttggaagaccaggcactttatgcagtattgagctcaggag

SEQ ID NO: 809767 - DNA, 100 bp, Homo sapiens
ctcagcacacagaggatgatgctgactttgatgaagattcgcttcaagctcagcttatcaatatgggtgttattcctaccttagtgaaattactgggcat

SEQ ID NO: 809768 - DNA, 100 bp, Homo sapiens
gactggagcggatccagggcatgaccaaagtcaccacagacaagatggcccaggagaggtgtacagagccagtgggccggatggagccactggcagaggc

SEQ ID NO: 809769 - DNA, 100 bp, Homo sapiens
cgaaaaagaggggccacttctcagcgattcacatgtagctttcagggattcaagagggattggcatcaaagttcacttctttaacaaaagtgctttatga

SEQ ID NO: 809770 - DNA, 104 bp, Homo sapiens
gacaagccagcagctcgctcagtacaagaggtcctgaccagctctaaagatgggtcagctgctgtatttccaagaaccccatgacttccagggccccttgttcc

SEQ ID NO: 809771 - DNA, 100 bp, Homo sapiens
cagtcccttgccagtgggggaaatgatgcacgaaggcagttccagtctcagctggctgacctgcagcagctccctgacatcctgaagatcacggaggcga

SEQ ID NO: 809772 - DNA, 100 bp, Homo sapiens
gccgatgtttacttataattggacgtatgtttacttggaaaagttcatgacctttcagatgtcactccgaagagaggatgtgtggcttccactgatgtct

SEQ ID NO: 809773 - DNA, 100 bp, Homo sapiens
agacattgcctctgcagatgtacttgccaccccacaagaaacttacttcaagtctcaggtctcagaaatattccagtatatacaataaatcgcatagtca

SEQ ID NO: 809774 - DNA, 98 bp, Homo sapiens
ctgaagtagcaaaggcaagaaggcaacgacgttccatctgtggaaggacctaccaaccagagtcctatcattgatcggcctgagtctaatagctttgg

SEQ ID NO: 809775 - DNA, 99 bp, Homo sapiens
tgggaagcctggggaaatcccagcagcccgtattcagcagcgaatgacaacagagctgctcaaggcgggaactctgagctaagcagtggaggtttctct

SEQ ID NO: 809776 - DNA, 100 bp, Homo sapiens
tttggtgctcaagatgcaacaaaactggatacgtgggtttttgataatgttaaggttcgatctggggctaatgttctaatttgtggtccaaatggctgcg

SEQ ID NO: 809777 - DNA, 99 bp, Homo sapiens
ttctctgctctggacttgggaggctccgttgcctgctcccggagggagacgcgctgccgaggagaacccagcggattgcaaaagttgagaagctcaaac

SEQ ID NO: 809778 - DNA, 100 bp, Homo sapiens
cacgccagcaccctatgccatgcctgagttccagcgggtcaccatcagcggagattactgtgccggggaattgtacctacttctgtgattgtgactgggg

SEQ ID NO: 809779 - DNA, 148 bp, Homo sapiens
gggcttcgtggcggccatctcgccctttaacttcactgcaatcggcggcaacctggcgggggcaccggccctgatggtatgaagtgaaggtgataggctacaacctcatgcaggccatgcgctttgcggtggaggagatcaacaatga

SEQ ID NO: 809780 - DNA, 100 bp, Homo sapiens
gcttcgtcgagaactcattactccaaagggtggtggtggtggaggtccaggagaaggtaactatggccaagatcaatcctccatgagtagtggtggtggc

SEQ ID NO: 809781 - DNA, 100 bp, Homo sapiens
tgaaactagtgcaaaagctggatacaatgtaaagcaggctgaagaaatgtcaacaattgggagttttgaaggattccaggctgtgtctctgaagcaagag

SEQ ID NO: 809782 - DNA, 100 bp, Homo sapiens
cgctgccatgactgtcatcttcttcatcgttagtcagccagcacctaaccaagtcacttttcatctgccactacatcgttactatgctatgtttttgagt

SEQ ID NO: 809783 - DNA, 100 bp, Homo sapiens
cagtagctatggcagtggcagaagattttaattaggaaagcagatggtggagctgaatatgccacttaccagactaaatcaaccactccagcagagcaga

SEQ ID NO: 809784 - DNA, 100 bp, Homo sapiens
aggcaggtgatgcggtttactatactgcttcatatgcaaaagatccacttaataactatgcagtcaaggttaaatcacccagaggttccatacagtagtg

SEQ ID NO: 809785 - DNA, 98 bp, Homo sapiens
tctttactcctcatggacctgatctttatgattcaggaggaatcagatatgtggaaaataagagaactggaaaaacagatggaagatgcttaccgggg

SEQ ID NO: 809786 - DNA, 99 bp, Homo sapiens
gatcagatttctccaccaaattctcagcctgataagggcagctgttgtgctgtgtatggacgtgggctttaccatgagtaactccattcctggtataga

SEQ ID NO: 809787 - DNA, 100 bp, Homo sapiens
ggagccagcaataattatcacaattactgatgggagcaagttgactaccaccagtggagtccaggatgaggatattagaaatggctactccccagtcaat

SEQ ID NO: 809788 - DNA, 99 bp, Homo sapiens
ggaggagaaaaaccagctggagattgagagactggaggagcaggaagtggcagtttttgtctttgataaaaaactgattgacaagtatcaaaaatttga

SEQ ID NO: 809789 - DNA, 100 bp, Homo sapiens
ggagcatatattatggaacacatcggtggtggggagcggcagctggcagagagtcaacgcccagacggctgtgagatccccgagatatgccgtgtttgac

SEQ ID NO: 809790 - DNA, 98 bp, Homo sapiens
agaccagtccatttggggaaatccttcggatggtgaactcattagaaccatggaattccatgaacacttgcacagcataggcaccaaggaaggtttga

SEQ ID NO: 809791 - DNA, 101 bp, Homo sapiens
ttgcagtatgtggccagttatttgcctcagtaaaagagatcgcaacaatgcaaggcaaattcatgaaggtgcaagtttaccgttttttgaagtatttgttg

SEQ ID NO: 809792 - DNA, 100 bp, Homo sapiens
ccaagtgctcatcaactgccgcaacaataagaaactcctgggccgcgtgaaggccttcgataggtcccagaatggtgcttagatgactggcatccttctg

SEQ ID NO: 809793 - DNA, 100 bp, Homo sapiens
tattcctgggttcagagatctctctcagcatgaccaggtcaaccttttaaaggctgggacttttgagcaattgcttgttcagagctcttggtgatcaatt

SEQ ID NO: 809794 - DNA, 100 bp, Homo sapiens
acttggcagcggagtgactgggacctgggaacctactgtggggccgcggccggaccgagcgcctcgacctcggtctgagattttcgacaatgaagccaaa

SEQ ID NO: 809795 - DNA, 100 bp, Homo sapiens
aggatttattcgagacaaatatgagaagaagaaatacatggaccgaagtctggacatcaatgcctttaggtacatagattctgcggacttggagcccatc

SEQ ID NO: 809796 - DNA, 98 bp, Homo sapiens
gaaatacttcttacaggctacccatgttcagccagttttctcataagattcaccttgaaactatgtgtgaagtaaagaaaatctaccttcaggatgag

SEQ ID NO: 809797 - DNA, 100 bp, Homo sapiens
ctccatgccacgaagcaggaagggagatgcagcatcccagtttttggtcttctgtcaaaaacacagggatgagctttctcatcattcattgagagcagga

SEQ ID NO: 809798 - DNA, 100 bp, Homo sapiens
caactgtgaggactaccttatgatttcctctggtaatgaatcttgccctcagcctcagacatcggaacacctggctgctatagagatcatgaaactgaag

SEQ ID NO: 809799 - DNA, 113 bp, Homo sapiens
tggtggtggtcatatcaatcatagcattttctggacaaacctcagccctaacggtggtggagaacccaaaggggtactgaagatgcactgttaaaaaaccaaagacgggcgca

SEQ ID NO: 809800 - DNA, 98 bp, Homo sapiens
tcagggacagtggcggatgtgcactgctacaggactctactatggagagatgctaagatctcatccagtgagcatatgagaatcggggggagtgaaga

SEQ ID NO: 809801 - DNA, 98 bp, Homo sapiens
agtgaacttcaagcatacatcaaggaacaccacaccacgggcctcacatggagcaaaacagcattaagtgtaactgaaaccctgattaaacccttgga

SEQ ID NO: 809802 - DNA, 154 bp, Homo sapiens
accctggccaagatccgcaaggccgcccgggaactgctgacgcttgatgagaaggacccacggcgtctgttcgaagcaactttttacagatgtggcaactggagaaatgtccagggaattagctgatgacataacagctatggacaccttagtg

SEQ ID NO: 809803 - DNA, 100 bp, Homo sapiens
atgttctcaaatagtgatgaagctgtaatcaataaaaaacttcccaaagaactcctgttacggtcatcctgtacagttctacagcatgaataggcctgcc

SEQ ID NO: 809804 - DNA, 98 bp, Homo sapiens
gctgattgagcagtatgagctgcgcgaggagtctcttcaagaaaatgaggaggaggagattgggaacctagagcttgcctgggatatgctggatttag

SEQ ID NO: 809805 - DNA, 99 bp, Homo sapiens
ttctgttggttttatgcatctttatccaatcaagtgcccttggacaaagcctgaaaccagctgcagaaccttggcctgaaaatgctacattatatcagc

SEQ ID NO: 809806 - DNA, 99 bp, Homo sapiens
ttgaagtagctcctgaagcttctacgtctagtgccagccaagtgattgctcctactcaagtgacagaaactaatctggattcactccctctggttgata

SEQ ID NO: 809807 - DNA, 100 bp, Homo sapiens
cgagggtcaacgagaaagagatcgccacatgaaatgaagatcacctctgcctatctacaggacattgagaatgcctataagaaaacctttctccctgaga

SEQ ID NO: 809808 - DNA, 100 bp, Homo sapiens
tctcctttcaaaatgaagcccataggacttcaagagagaataagaccacagcttgccaaagagaagattgaaggatgccatatttgtacatctgtcacac

SEQ ID NO: 809809 - DNA, 100 bp, Homo sapiens
aagtccagatatatggagctctacaccagggcatatacttctcttgtcttggttggatgcacaaatctgtgtgcagtgctttttgcccgttgcctagacg

SEQ ID NO: 809810 - DNA, 98 bp, Homo sapiens
cgcgggtctgctctgtgtgccatggacggatatttgaatggtggtacttccataagcatggcacatcttttattgagcaagtatctgtaagccatttg

SEQ ID NO: 809811 - DNA, 98 bp, Homo sapiens
cgaacttgtggctattcatttattctcaccagggtctgccatcatggatgttctcgcagaagcaaatggcacctttgccttaaaccttttgaaaacgc

SEQ ID NO: 809812 - DNA, 100 bp, Homo sapiens
caggcgacccgacgcgacgcgccagcagcgcagcaccgattcctctcgggctcttgggcgctgctctgaggttatcaatactctggctgaccatcatcat

SEQ ID NO: 809813 - DNA, 100 bp, Homo sapiens
caatggcttccgtgctgtcctacgaaagcctggtccacgccgtggccggagccgtggtaattgaacggcgcattcggcaagagctgcctttcatggccac

SEQ ID NO: 809814 - DNA, 100 bp, Homo sapiens
gcccctgtccgggggatgactgattctcctccgccagcccgcgggaggactcagactccagcacttccagcagcgcctgccctctatggacgacagcccg

SEQ ID NO: 809815 - DNA, 100 bp, Homo sapiens
aaaagaagaatttcgtaaagaatttaccaagctagaggagatatgggacacagcaggacaggaacggttccagtctctcggtgtggccttctacagaggt

SEQ ID NO: 809816 - DNA, 98 bp, Homo sapiens
ttactgtgttcctcacaatgtttggggagaaacttaagggtccgagtgaagctgaagaattccagcttgaggtgagtgggctactaggggagatgaac

SEQ ID NO: 809817 - DNA, 100 bp, Homo sapiens
gagccgatttccgcgatggcgagagggggcaccggaggtgacaacaataacaagactgtccttcggacaagttttagtgcatctatcctttgggctctaa

SEQ ID NO: 809818 - DNA, 99 bp, Homo sapiens
ggtctgcctggttctgggaaaacaacattgtctcgatgtggaagatgtcaagtttgtgatcaactatgactatccaaacagctcagaggattatgtgca

SEQ ID NO: 809819 - DNA, 99 bp, Homo sapiens
aagtactgtgcctccttgggacacaaggcaaatcactccttcactccaaactgcatctacgatatacaaaactgtgtggagttttatcctatattcata

SEQ ID NO: 809820 - DNA, 100 bp, Homo sapiens
tggaggcgccgctctagcggccgggactctgaactatggcgctcttttgtgacagggacggcttgttgcgggcacttctcacccctgagaatctgggacc

SEQ ID NO: 809821 - DNA, 98 bp, Homo sapiens
acaagcctgtcattcctgctgctgccctagctggctacacagccgctgccatggcccagacactgcagatggagatcccgaacttcggcaacagcatc

SEQ ID NO: 809822 - DNA, 98 bp, Homo sapiens
cgcgaccgtccgccagtcgtcccgaggttaatttggagtggcccctggagtcagtttcctacaccatccgaggccccacccagcacgagctacagcct

SEQ ID NO: 809823 - DNA, 98 bp, Homo sapiens
gcgccccgctctgctgtgggcgctgctggcgctctggctgtgctgcgcggcccccgcgcatggtgctgctggtgagtagcagccggtacccagaccag

SEQ ID NO: 809824 - DNA, 98 bp, Homo sapiens
caggcgagctgctggacttctcactggccgacgcggtgaaccaggagtttctgaccacgcgcaccaacgagaaggaaaaccgggaggtgggagactgg

SEQ ID NO: 809825 - DNA, 100 bp, Homo sapiens
cgatgctcttgcaggatgcctttccttttgggtcttagacagaaaaactaccggcagagggtcgatgagctgaagttcaccagcgtgaccgacagctccc

SEQ ID NO: 809826 - DNA, 98 bp, Homo sapiens
cggcgtgccccaccatgtcagacgcagccgtagacaccagctccgaaatcaccaccaaggctttccatctgatggtcccctggtgtgtgccctggaac

SEQ ID NO: 809827 - DNA, 100 bp, Homo sapiens
catgtttgcacccgcggtgatgcgtgcttttcgcaagaacaagactctcggctatggagtccccatgttgcaacacagtcactcctggcggcaaaccaaa

SEQ ID NO: 809828 - DNA, 98 bp, Homo sapiens
cacaagcaggtccaaagagagattgagttgtattcctgggccttgtccaacttcagatgatttgaaatatactatgattcgtttagcagtagatggag

SEQ ID NO: 809829 - DNA, 51 bp, Homo sapiens
gacactcctgaagtcgggaaatggtgacaaccaaagccaagcaactgaagg

SEQ ID NO: 809830 - DNA, 98 bp, Homo sapiens
aagcaagctcttctagaagttggatgtaacagtccctcccaagcctgtctcgctccatcctttatatcagactaaactctatcctcctgctaagtcac

SEQ ID NO: 809831 - DNA, 100 bp, Homo sapiens
catcatggagtggccggctgaggatcactgcaaagggacagatggcctacatcaagctggaggacaggacgtcagggcttttaaattttgacacagaatt

SEQ ID NO: 809832 - DNA, 98 bp, Homo sapiens
ggtggagaatacaaacctgacaagggtaaagatatccttggaacagaagatcttattgtggaagtgacttccaatgatgctgtgagattttatccctg

SEQ ID NO: 809833 - DNA, 100 bp, Homo sapiens
aaggaggagccagaaattgacagcccagggggtttccaatacttatctacaggaatcgccatgaccccagctctgagggaggcaacagcaaagggtatca

SEQ ID NO: 809834 - DNA, 98 bp, Homo sapiens
tcagatgaaccactggggagtctcttgatactctgttgcctaatttggatggttaatgggttgtgaactaaaggccgacaaagattatcactttaagg

SEQ ID NO: 809835 - DNA, 98 bp, Homo sapiens
ctgcagtgattttaaccaaggcagttggtggaaatgagtttgaacggctgaatgttgcacttcagagaacattggcaaagcacaaaataaaagaaagc

SEQ ID NO: 809836 - DNA, 100 bp, Homo sapiens
agaagtaaaattacgaactcactgagctggaagtcattcaacgggaattgaatagattgctgagctgaaaagaggtgctgaaattattgtttgcacacct

SEQ ID NO: 809837 - DNA, 100 bp, Homo sapiens
aaacgcagaaggactgcctcactgagcaaccaagaccacctgtctttaccagtttccaagactatgttactgggcttcagactttaatttccaatgttgt

SEQ ID NO: 809838 - DNA, 100 bp, Homo sapiens
taacagtcccaggaatggaagagaccacatcagaggcagacaaaaacctttccaagcaagcatgggacaccaagaaggtcttgggcgtctttggtactgg

SEQ ID NO: 809839 - DNA, 135 bp, Homo sapiens
cacctccaagattctcttccgggacgtggtccaagccgtgcgcgaccatgccttcacggtggctacagtttcagaaaagtcacgtataatggaactggagaaagacctagcattgagagtacaggaagtagctga

SEQ ID NO: 809840 - DNA, 100 bp, Homo sapiens
gcctcccgagtggctgggattacagcaccagccacaacgggaccactgccttcagctcctcgggatgtcgtggcctccctggtctctacccgcttcatca

SEQ ID NO: 809841 - DNA, 98 bp, Homo sapiens
gatgccacaacacctgtccctcggaaaacttcagtttaacagtttctgcaatacaagcttgtgatttatgcttactctaagtggaaatcaggattgtt

SEQ ID NO: 809842 - DNA, 100 bp, Homo sapiens
aagcttccaatgagtatggcagtgtcagctgtacagccacactaactgtgacaggtcttaaagaaagtgcagaagagatggtcaaaaacaaattggaagg

SEQ ID NO: 809843 - DNA, 107 bp, Homo sapiens
tcttgtcactttaattacttgagaatttataatggaattggagtcagcagaactgaaatagtatgccgagattttgctgtcctggaggaccacaccctggctcacag

SEQ ID NO: 809844 - DNA, 100 bp, Homo sapiens
gcgcgcacagctcctgcagcccacgctggagatcaaccccagataactgcatgaagtacaatgccagggacaccgtgttctatagagccgcggtgaggct

SEQ ID NO: 809845 - DNA, 99 bp, Homo sapiens
ctctgtcactgactccacacaggtgtttggagaagagggattgaccctgaatcttgaagacgttcagcctcatgacttaggaaaagttggagaggtcat

SEQ ID NO: 809846 - DNA, 100 bp, Homo sapiens
acgccaactcttcgttcgattattagctttagtgaaatgggctaataatgctggcaaagtggaaaaatgtgcgagtacatccaagccattatgatgatgg

SEQ ID NO: 809847 - DNA, 149 bp, Homo sapiens
gaacccaaaaggtgcgatgctcacccatgggaacgtggtggctgatttctcaggctttctgaaagtgacagagattgatgacattgtaaaagctgttggtaactgcagctacaaccaactagtggagaagatcatctcttgtaaacagt

SEQ ID NO: 809848 - DNA, 100 bp, Homo sapiens
tgtgacatatcgttggacccagaattgagatcatacatctgtcggtggcctgggagacagtttttatgaatacttactgaaagcatggttgatgtcagat

SEQ ID NO: 809849 - DNA, 98 bp, Homo sapiens
acgcttagagattgaacattcggtgcccaaaaaacaaagactgaacattcttcacgatctgaaaggaaaagaagagattctttcgggatgtttgacgg

SEQ ID NO: 809850 - DNA, 145 bp, Homo sapiens
aggtaccttatatgaaggggaaaaatttcaacttctatttaaatttagtagtcgatatccttttgactctcctcagagaattcggtcaacagtggatgaaaaagaacaaaaacaacttcttatggatttggatgtagtaatgcgg

SEQ ID NO: 809851 - DNA, 99 bp, Homo sapiens
aaagatgtgtatgttgattccaaagatcctgtgtcttccttgcaggggcccatcctgatggagctgcagacttaccgttaccacggacacagtatgagt

SEQ ID NO: 809852 - DNA, 100 bp, Homo sapiens
ggaactaaatgggtatatattgcctgttggattttggacagaagattcattgaatggcacctgcagaaggttcaaaccttgtactactcagctgatcaca

SEQ ID NO: 809853 - DNA, 100 bp, Homo sapiens
gcgcctccgtcgccaagccgcgccgtcgcggggctcccgggagcggcccttagcgaccccgcccgggccccctcaggtcaattggcatgattttgctttt

SEQ ID NO: 809854 - DNA, 98 bp, Homo sapiens
acacattggctgtggccaacatgaagtattccagtaccagtacccggagagaacatgtcaaagttaaaaccagctcccagccaggcttcctggaacgg

SEQ ID NO: 809855 - DNA, 100 bp, Homo sapiens
gtttgtttctgccagtgaaaaccaccaaaacaatccagctgttccctcaggaacgagttgaagcagttaatatggctgaaggaatcattcacgacacaga

SEQ ID NO: 809856 - DNA, 100 bp, Homo sapiens
tggacagtttcagtgcattacagtttaagctatgaagaaggacatccctcacactctgaaacagatctccttcagagacagagttttgcagcctctcatc

SEQ ID NO: 809857 - DNA, 98 bp, Homo sapiens
tattcaacaaataattgagtgctttcgatcagaacctccgttggatggctcctgaggtgttcacgcagtgcactcggtacaccatcaaagcagatgtc

SEQ ID NO: 809858 - DNA, 98 bp, Homo sapiens
acaaaaaaaggagatgcctggcagccccgctctctgcagtggcattggctgtgtaggtcaagacaagggccaggttcgaaaatgccttgacgtggtgg

SEQ ID NO: 809859 - DNA, 100 bp, Homo sapiens
acttcaagaagttaagcaacttgctcaagatcatctaagaaattactggtggtctacccttggacccagaggttctttgagtcctttggggatctgtcct

SEQ ID NO: 809860 - DNA, 98 bp, Homo sapiens
ggccttgtgctctttcatcggacttctaatgggcatccgcttcgatcctgaaattccgcaaacactacgactagagtttgctaaggcaaacacgaaga

SEQ ID NO: 809861 - DNA, 98 bp, Homo sapiens
cgcgggctgcggacgctcggtcccgcgctgcgcatccccgcggacgccacagcgcttctcctgggctacctgaccaagtacgactgctccagtgcgga

SEQ ID NO: 809862 - DNA, 98 bp, Homo sapiens
tttcctgggagcggcggccacggaggcaccatgaagaagtcttactcagtaatctatgccagcaattatgacaatgttagcagaccatgcagctcgtc

SEQ ID NO: 809863 - DNA, 100 bp, Homo sapiens
aagacggtaacccgtgtgactttgactggctcattgctatggacagtgctatcaccctgtggcagttccttcttcagctcctgcagaagcctcagaacaa

SEQ ID NO: 809864 - DNA, 100 bp, Homo sapiens
tggcttgcaaaaagtaaaccacgatcgttatgctgaaggaagaaattgttgagcttccagatttggattacctgcgaaccatgactcatatagtctttgt

SEQ ID NO: 809865 - DNA, 100 bp, Homo sapiens
cccaggaatttataccagctgtagcaaaagtgggaagccaagcctttcctcccggagccagtctacttgatgacttatacaagtatttcttcttccatca

SEQ ID NO: 809866 - DNA, 101 bp, Homo sapiens
gagaagtgcaagctggcgatgcagaggggtgcgcagtccagcgtgaactacagtcagggcagcctgaaggatgcagccagacgggtgcagggaacaactgg

SEQ ID NO: 809867 - DNA, 100 bp, Homo sapiens
ataggatctgtagatttgcacctggagcctgtggaaaagaaagctgcattggaaaaggagcgagaagaacggatagctgaagctgaaattgaaaacttaa

SEQ ID NO: 809868 - DNA, 100 bp, Homo sapiens
ttcctgccgtctgctcttctgcctcttgatctccgccaccgtcttcaggccaggaacagaaattcttggcaagtcagttcgtattatattctctacatta

SEQ ID NO: 809869 - DNA, 100 bp, Homo sapiens
attacttgttacccatttgtgcaggaaaaccagtccaatagagaccttgtacacagacagacggctagtgcagtggtacagcacatgtcacttggggttt

SEQ ID NO: 809870 - DNA, 75 bp, Homo sapiens
tccagagttctggctgagcctgtccctctgccagccgacctgtcttagaagtgatctgctcccgaatgcgctaca

SEQ ID NO: 809871 - DNA, 132 bp, Homo sapiens
gtcagtagggtgagcacataaaaaatccatgtcttgcacctgtattttagcgtactatgcagttttcggctttgtgagaaaccttaccatcaaacacgatggccagcaacgttaccaacaagacagatcctc

SEQ ID NO: 809872 - DNA, 98 bp, Homo sapiens
cagctccacgcagcaagacccgcgccgccgggacccccaggacgacgtgtacctggacatcaccgatggtgtcctcagaccgaagccaactttccttt

SEQ ID NO: 809873 - DNA, 99 bp, Homo sapiens
ttgagaccctgagactttcagaaacttattcacagttaccaaagctgttgttgacctcctgtactggagagacattaagaagactggagtggtgtttgg

SEQ ID NO: 809874 - DNA, 51 bp, Homo sapiens
ctgcacaatattaaaactttacctggggctgatcagctgaccgaagaacag

SEQ ID NO: 809875 - DNA, 98 bp, Homo sapiens
gaatttccaaggggattcaaacttcaacagaatgtggcaaccaggatttggtgctatggagaaatttttggtagaatataagagtgcagtggagaaga

SEQ ID NO: 809876 - DNA, 98 bp, Homo sapiens
ctttgctcactacgagaagcgccaggaggaggaggaggtggtgcgcaaggtgtctcccagtctgctaaagccctaaggccatcaccatggacttccag

SEQ ID NO: 809877 - DNA, 100 bp, Homo sapiens
ccgggtggcgcctccctgcgactcctggaccaccgggcgctggtctgctcccagccggagttagaagccgctcttcacagagatgacgtggagtttatca

SEQ ID NO: 809878 - DNA, 99 bp, Homo sapiens
tgctcgataaatcagacagaacagttaatcctcaatttaagcctgatctaacccctagaaacagatcctgtttgaccaaactcagagatcaattaaggc

SEQ ID NO: 809879 - DNA, 98 bp, Homo sapiens
ggcaggcacggcgggtccactctgacagtgagaccgacgacattgggttcatccccagcaaacggcgatcctgacgacctccctgtgactcgtgccct

SEQ ID NO: 809880 - DNA, 100 bp, Homo sapiens
tgcacctgcaagatctgtggcaaggccttctccaggccctggttactgcagggccatgtccgcacccacacagggagcgtggctgtgctgtctgcagagc

SEQ ID NO: 809881 - DNA, 100 bp, Homo sapiens
aaaataattaatgagtcaaggtctcaggagagacagaagaacattaaccaggtggtatttgttggaaatttcttgagaattaatacgatcgccatgcggc

SEQ ID NO: 809882 - DNA, 100 bp, Homo sapiens
caagcagtacctcctaggactctatgacacggccggacagggtaagcttgatgattaccaggaacgaatgaacaaaggggaaaggcttaatcaagatcag

SEQ ID NO: 809883 - DNA, 100 bp, Homo sapiens
ctgaaggtgtacaggtgccctctgtgcctattcagcaattccctactggaaaactcaatgtgagtagtgacactgtccagcatggtgtggaaggattaac

SEQ ID NO: 809884 - DNA, 100 bp, Homo sapiens
gttggccttcatcgacttgagacaaatggtgccaagaacgaagaaggaagctcctgcccctcctaaagccgaagccaaagcgaaggctttgcaaggccaa

SEQ ID NO: 809885 - DNA, 50 bp, Homo sapiens
tgctgtcaggaactgtgaccaagactgacattgagattacacgagaggag

SEQ ID NO: 809886 - DNA, 98 bp, Homo sapiens
gccttcaccagatgtagtcctcaggggaagcagcgatggatctatctggttcaatagatgacctccccatggggacagaaggagctctgagtcctgga

SEQ ID NO: 809887 - DNA, 99 bp, Homo sapiens
cttaccctcccaaagtggtgagattacagaatggacgcgatctctctatctggtccagtggcagccggcacatgaagaagcagacatttgtggtacatg

SEQ ID NO: 809888 - DNA, 98 bp, Homo sapiens
ctgggccgcctgaagcagctgctgtcccgggcctaccccctggactccctggagaagcagatggaaaagggtcctcaaggtcatagaaccccataacc

SEQ ID NO: 809889 - DNA, 99 bp, Homo sapiens
cggcggcccgagcgcgccccaagcccgggcgccaccgctgccacctccgcgaggagctggagctggtggaggatgtgtggcgaggggaggcgcaggacc

SEQ ID NO: 809890 - DNA, 100 bp, Homo sapiens
ttacctctttgatctcgacaataagaagatgctcatgaagcagcaggaccggctggaggagcgagagcaggacattgaggaccagctgtacaaactcgag

SEQ ID NO: 809891 - DNA, 100 bp, Homo sapiens
tttgaaccaaattatgctgcaaatcatgtagagcgcatgaagtacaggacaataaagcttcctacacatatcaccaggaggatctctttgaaagattcac

SEQ ID NO: 809892 - DNA, 105 bp, Homo sapiens
gaagctaaagctaccaaagacgtagaaagaaatcttagcaggaaattaaggatgcagacactcagggcgtgtgtcttgcacagccagccagcctgggaaaatgaa

SEQ ID NO: 809893 - DNA, 100 bp, Homo sapiens
cagagatagttgtgcttttacacggttttccaacatccagctacgactggtacaagctggagtcttttgtgcaattgtttctcaccctgctgattctgtg

SEQ ID NO: 809894 - DNA, 100 bp, Homo sapiens
gtcccacagaagctacagctgccagggattgtcgatcagtcacaacaagcataccaagaagcttttgaaatcagcaaaaaggaaatgcaaccaacacatc

SEQ ID NO: 809895 - DNA, 98 bp, Homo sapiens
aaagctcaccctcccgagttgaaaaaatggcagaggtggaagcggtacagctgaaggaggaaggaaaccggcatttccagctccaggactacaaggcc

SEQ ID NO: 809896 - DNA, 100 bp, Homo sapiens
tgtacagggacgtgatgttggagaactacaggaacctgctttctctcgatgaggataacatccctccagaagatgtacaagccagctgccatgttgtgag

SEQ ID NO: 809897 - DNA, 98 bp, Homo sapiens
agagcagtaccctgatggagtcccttgcagggcctcagtaagaagacgggaatttcttcaagccatctccaagccctgtggatcggctacagcaccga

SEQ ID NO: 809898 - DNA, 100 bp, Homo sapiens
agaagttcttgctggaggctgtgccaaagcttacttgaggattgctgtggaagtggtaagaagattgccatcaccttcagaatgattccccaagtgtcct

SEQ ID NO: 809899 - DNA, 100 bp, Homo sapiens
tgttctccaagttcacctccatcctgcagcacgccgtggaggcggtcctcagtttgcagaagacccctcccagttgccttcaactcagttaccttcctca

SEQ ID NO: 809900 - DNA, 100 bp, Homo sapiens
agcgctgtcgtgctcctctactcgccacccacacagaatatgcctatgggtcctggagggatgaatcagagcggccctcccccacctccacgctctcaca

SEQ ID NO: 809901 - DNA, 100 bp, Homo sapiens
gtgaaagcccgcttcaagaggttcggaagtgccaaggtcatccggtccctccacgggcggctgcagggtggaggaaaaatgccagctgtgggacaaggag

SEQ ID NO: 809902 - DNA, 98 bp, Homo sapiens
cctctgactcctattaccaggataactgtgcgaacatcacatttacctttaacaaggagatgatgtcaccactactcccgagcccggagaggacccac

SEQ ID NO: 809903 - DNA, 109 bp, Homo sapiens
cactgctgtaaaaactcagttactcaaactgaaacgtctcctgcatcagcttcagtatcagacacagcacagcagccatctgaagagcaaagcaagtctcttgaaaaac

SEQ ID NO: 809904 - DNA, 100 bp, Homo sapiens
agaagttcaccttcgtctgcatggctctgtcactcacgagcattgaatgaaatgtggaaatgtcaaaatctgctccgacatcaagtaaaggatttgcttg

SEQ ID NO: 809905 - DNA, 99 bp, Homo sapiens
ctcgggacggaggacgcgctagtataaccagcccgagtcatgcagtcttttcgagaaaggtgtggtttccatggcaaacaacagaactaccagcagacc

SEQ ID NO: 809906 - DNA, 100 bp, Homo sapiens
gtccctagggaaccaccaattcttcccagggcatttttggtcgaagagagctgaagtaatgagaagacatcatggaggcccagtcccacagctccacgac

SEQ ID NO: 809907 - DNA, 100 bp, Homo sapiens
ctgaatttaactacagtgtggggtttaaagatttaaatggactccatccccgtgtctacctccctccttggagacacttccgacacgacctctactggcc

SEQ ID NO: 809908 - DNA, 100 bp, Homo sapiens
tggaacctgaaccaacccccatcgctgccccagtaacagtgccagtggttggaaagaaagcaggacacggaagtttccaatcagatcaccctcgtggaag

SEQ ID NO: 809909 - DNA, 98 bp, Homo sapiens
gtgaggttatcactaggcgccgaggaggggagcgggaagcgcaggttgcaaatgctgaaagcttaaatgcaattggtgtgttgatatacatggaccag

SEQ ID NO: 809910 - DNA, 98 bp, Homo sapiens
aggaatctcactctgttaaagctggtctgttctaactgaggggtaaaagcatgtctacgaagaaaagtatgtgaacaggaagaaaagtatgaaattcc

SEQ ID NO: 809911 - DNA, 100 bp, Homo sapiens
ccgctttgtggccacatggtgtcagatgaatatgagcagctgtcctctgaaggcagtggccattcaccaccgagtagcagtctcacttctccaagccacg

SEQ ID NO: 809912 - DNA, 99 bp, Homo sapiens
cacaaacctgcggaatggactttaattgctatggtgttgctgtcattgtgattgggatattaataatccttcgtcttcaaatgtgatttatgatgaaca

SEQ ID NO: 809913 - DNA, 98 bp, Homo sapiens
tgaagaagtcttatgccctcccaaggtcaacatatttcactggcacctattcacaagcttgaagaagctctgtatgaataccagccactgcagataga

SEQ ID NO: 809914 - DNA, 99 bp, Homo sapiens
cgagagatggtcaggtctggagctcgaccgggccagcttcttctcagcctgttgataaccatgttagcccatcttccttcttgggccagacaccagcat

SEQ ID NO: 809915 - DNA, 98 bp, Homo sapiens
ctcggacccacggagccggcagcccagcactccgatagcctgggctggaagctcttctacgtcacaggctgcctgtttgtggctgtgcagaacttgga

SEQ ID NO: 809916 - DNA, 98 bp, Homo sapiens
gatgccctctcctgcaagccactcgctgacgaacgaggtcactcggacactatggtgttcttttacctgtggattgtcttttatatcatcagttcctg

SEQ ID NO: 809917 - DNA, 100 bp, Homo sapiens
aaatcagaggcatactttatagggtcaacatatttcactggcacctattcacaagcttgaagaagctctgtatgaataccagccactgcagatagagaca

SEQ ID NO: 809918 - DNA, 100 bp, Homo sapiens
ccggaaccgcgattcggcgtgtcagatacttggtgcttgaaaaactgaagaaggaagacgctgaccgaattcatatattcagttcttttttctataaacg

SEQ ID NO: 809919 - DNA, 100 bp, Homo sapiens
aaaggagaatgactttaactgatagcattgaacgctgcctgaaaaaagcttctccaatttgggaaatacctgctatatgaatgctattctacaatctcta

SEQ ID NO: 809920 - DNA, 100 bp, Homo sapiens
gagaaggcgctgcgcaagcacgctgaggaggtgagatttgtggatttaaaattcacgggcagaatgtcccctttgatgcagtggtagtggataaatccac

SEQ ID NO: 809921 - DNA, 99 bp, Homo sapiens
gagcggtaggagcagcaatttatccgtgtgcagccccaaactggaaagaagatgctaattaaagtgaagatcatggaagggaagtggttgctgtgtatg

SEQ ID NO: 809922 - DNA, 100 bp, Homo sapiens
tgaattaaaactgaatgaactgataacggagaatggaactgtatgccagcagcttgttgtacacgtttgctgccaattgatggggcaaatgatctctttt

SEQ ID NO: 809923 - DNA, 98 bp, Homo sapiens
ccaatcttatatacgtggctcatctatcagcctcagaaacgaacaagtagacatatgcaacagggattattgtcattcaaggatatatctatggagtt

SEQ ID NO: 809924 - DNA, 100 bp, Homo sapiens
ctggaatggccatagctggaataatgttacttttgagaagcattcgactggtgcctgatgtgttgccagtgttgccagacctcccgttacccgcgataca

SEQ ID NO: 809925 - DNA, 99 bp, Homo sapiens
ccaaacataagtgaccaacaggtttctgccttatcatattctgaccagattcagcaacctctaactaaccagtgaacacctacctcttcatgatgcaag

SEQ ID NO: 809926 - DNA, 100 bp, Homo sapiens
gttcgagaacgaccccgagacggccgggtgctcgtccactgccgggaaggttatagccgctccccaacgctagttatcgcctacctcatgatgcggcaga

SEQ ID NO: 809927 - DNA, 99 bp, Homo sapiens
tggccgttcagcagccgagactcaacatcttcatgatacagttaagaggaatcttgacagcgccacttcccctcagaatggcgatcaacagaatggcta

SEQ ID NO: 809928 - DNA, 98 bp, Homo sapiens
ggccgactggcactctgtagagcagacggaattcccttctgagaggcagccatgttgttcagttctggagtcttttggatgggcttgttattcatccc

SEQ ID NO: 809929 - DNA, 100 bp, Homo sapiens
atcccaggctgccgcggctcctgtgtgctttgaaggtttcagcgctgaggaggcctgagttccgtcatggccctctattatgaccaccagatagaagccc

SEQ ID NO: 809930 - DNA, 99 bp, Homo sapiens
cggaacttgccgcgtcgaggactgtcggtttcttcagtgtactagatggctgactgggaagattccagggtcccaacaggcttcagagttgcgaaggct

SEQ ID NO: 809931 - DNA, 98 bp, Homo sapiens
tcagtcagtgctgaattagtgcctacctcatcatggaacatctcaagtgaactcaacaaaggcgatatgaaaggtgaggtctatccatttggcatcgt

SEQ ID NO: 809932 - DNA, 100 bp, Homo sapiens
ggcaaagtgctggagtgcttccatcggcgcactggacagaagtgtgccctgaagctccagaaacatgacaaggaggactttcctgcctcttggagatcag

SEQ ID NO: 809933 - DNA, 100 bp, Homo sapiens
aaggtcagctgctggtacaagtacctccttttcagctacaacatcatcttctggggagatacttcaggggattaccggaagattctgctgaagatctgtg

SEQ ID NO: 809934 - DNA, 100 bp, Homo sapiens
ctcacggtgcggcgtaaagtggtttttgcggatcaattatactggtgccagcatgaatcccgcccgatcctttggacctgcagttatcatgggaaattgg

SEQ ID NO: 809935 - DNA, 100 bp, Homo sapiens
tttgggcctttggacttgttttgtgggaagtggccaggcggatggtgagcaatgttttaacagtgtatgccagggaacacacattctctttcgagaattc

SEQ ID NO: 809936 - DNA, 98 bp, Homo sapiens
gtgaatacactcgtgaatacaggccatttcctgtacctacagccacccgctgaaattgacaatggcccttcagctatgctaggtctataatgggaagt

SEQ ID NO: 809937 - DNA, 100 bp, Homo sapiens
gagacacacctgcactcttcaacttcaccactcaaggagtgacagttcatttagattctttgtattcttcttcgtctatatttgtcagtttgctgtacat

SEQ ID NO: 809938 - DNA, 100 bp, Homo sapiens
tgaggatgacaaactctggagtaattggagccaagaaatgagtatagggaagacactgatcaaggtggcagaagctgaaaagcaactgggagccgcggag

SEQ ID NO: 809939 - DNA, 100 bp, Homo sapiens
tgcaggcaaaaccactcttcttcacatgctcaaagatgacagattgggccaacatgttccaacactacatccgagttcaactactcaatttcatgctggc

SEQ ID NO: 809940 - DNA, 98 bp, Homo sapiens
cttatcttgtagacactggcatgttcagaggctgccgaatcagacccctggctgtggagtgagcaacaggtatgccagtggcttctctgggccaccaa

SEQ ID NO: 809941 - DNA, 100 bp, Homo sapiens
tagccgggaaacaagtccaaaccgaataggattagtacgaatgtaaagttatcgcagaaaaatctcatcaggaatgaagaaggcaaaaaatatcttttgt

SEQ ID NO: 809942 - DNA, 100 bp, Homo sapiens
agagtcagcatcatgtcttacgcgttgcaagcaccctccacccctgtgatccgcgctgaggactgtactgtgtgttggaacacagccactatccgatggc

SEQ ID NO: 809943 - DNA, 100 bp, Homo sapiens
tccttggcctctcctgggatcggcccaaggccagttctccgcagtccatggcagaagtccttgctaaaaaagaagagctagcagatcgtctagaaaaggc

SEQ ID NO: 809944 - DNA, 100 bp, Homo sapiens
tccgtctccctggaccgctgtgtaggcacctgagttaacggacgctaagcggggtaggggaaggtatggcgtgagtcccgagaacattatcctctatggt

SEQ ID NO: 809945 - DNA, 98 bp, Homo sapiens
gagccgtcttccccaggcctgcgtccgagtctccgccgctgcgggcccgctccgacgcggaagagccccccaagatgaacccagtggtggagccactg

SEQ ID NO: 809946 - DNA, 130 bp, Homo sapiens
aagtttagtggcttcacgcagaagttggcaggagcatgggcttcggaggcctatagcccgcagtggtctcaaatagtcaagaccccctgctgggaggagcttctatcctgctctgtggaagaaatgggca

SEQ ID NO: 809947 - DNA, 100 bp, Homo sapiens
gtgagaaatccaattcagctttttgtgctgccagcaagaaatgatcagtagcaccagtgtttatgatgccagaggaacaagcattctgtgttttggtgaa

SEQ ID NO: 809948 - DNA, 100 bp, Homo sapiens
cgctctttgccgtgacaacaccgttcccccagccgggctgggtacagctcgcagaaagaagaaggtggtacatagaacagccacagctgatgacaaaaag

SEQ ID NO: 809949 - DNA, 100 bp, Homo sapiens
tgaaatctggcatattagcgctagccctgcagacagaggtgtgctgacgacctgctacaacagaaggtgttttgaatgctgtatcaaatgcctggggggc

SEQ ID NO: 809950 - DNA, 100 bp, Homo sapiens
ggcgcctcggccatgactgcggagctgcagcaggacgacgcggccggcgcggcagacggccacggctcgaccatggtgaatccgggcagcagctcgcagc

SEQ ID NO: 809951 - DNA, 99 bp, Homo sapiens
ctggagggactcgtgagccggagcccagaaatccgggggtggataagacaccgcgtcccctccaattcccgttttgagcaaaattttggactgtgaagc

SEQ ID NO: 809952 - DNA, 100 bp, Homo sapiens
gacgaccacgtgcggaggaaggactcctcgctctatataggtgctggagaatctggtaaaagcaccattgtgaagcagatgaggatcctgcatgttaatg

SEQ ID NO: 809953 - DNA, 100 bp, Homo sapiens
caaaagcctttcatgattatcatggcggacaccgacctgttcatggaatgtgaggaggaggagttggagccatggcagaaaatcagtgatgtcattgagg

SEQ ID NO: 809954 - DNA, 99 bp, Homo sapiens
caatatctgggtcctggactactttggtggaccaaaaatcgtgacaccagaagaatattataatgtcacagttcaggactatgcagccatcgtcttctt

SEQ ID NO: 809955 - DNA, 100 bp, Homo sapiens
cgcaaacggtgggggtcggccggggccgcttcaccacttacgaaatcagggtcaaggtcaccttccgcaaccctgtcattgagaggattcctcggctccg

SEQ ID NO: 809956 - DNA, 100 bp, Homo sapiens
gaggctgcggctgaaacagcaagaactgcttcggcaggtgaggccacagggtttacagagtccacggggaatgggatgcaagccagaagctgtatgtagt

SEQ ID NO: 809957 - DNA, 100 bp, Homo sapiens
cccctgcagtccggatactcacgccagaagaccctgcacttgatggaccagctggcaccacccagatcaataaactggcttatttgaatttgcggccccc

SEQ ID NO: 809958 - DNA, 98 bp, Homo sapiens
cagagggaaagggataggagaaggatgtggactgcagtgctgcagtgccagtggtattggaaggaactggccctgggcctctggaggcagcagtattc

SEQ ID NO: 809959 - DNA, 100 bp, Homo sapiens
gcgactcgcttctttcggttctacctgggagaatccaccgccatccgccaccatggaagcagagaaaggtgtgaaattcctaacattgccaccagtgtta

SEQ ID NO: 809960 - DNA, 100 bp, Homo sapiens
aagttttcacttatctcgaaagcctatcagcatagttaagatgagttttgatcatcctgagaaaaatgggccttggcctgcagacccaataaaccttccc

SEQ ID NO: 809961 - DNA, 98 bp, Homo sapiens
gcaaacagacctcagctccgcggaagttgcgaaccacaatggacactgccagccatagccttgttcttctccagcagctgaacatgcagcgagaattt

SEQ ID NO: 809962 - DNA, 101 bp, Homo sapiens
gttacaagagaaactttatgtgcctgtaaaagaatacccagatgagtctggtgaaggcagaaattcatcagactgtagagataatgaaattaaaaaatggc

SEQ ID NO: 809963 - DNA, 100 bp, Homo sapiens
tttttatccatggatgacttgcttggacgggtcttacccccttgatggaagcagcttctggagggtatgcagaggttggaagagttcttcttgataaagg

SEQ ID NO: 809964 - DNA, 98 bp, Homo sapiens
ggtcacatactttaaagccaaagcagcaggagtttggaagcccttttcctccaaatcctgggaaagacaatacaatggtgggtgaagagaagatgtct

SEQ ID NO: 809965 - DNA, 100 bp, Homo sapiens
tttgagttttgactcagtcagaaggagaatgagtgtaattgtaaaatctgctacaggtgaaaggtgtagcagtcactcggcctacacccacagcatcgac

SEQ ID NO: 809966 - DNA, 100 bp, Homo sapiens
ggcccagatccctgggacaccgagattctgagaggcatcagtcaagattggatcagatgttttcagatgcctttagtaaagatcaccagctgcttcgggc

SEQ ID NO: 809967 - DNA, 98 bp, Homo sapiens
tgccagtggcacttctgggcagagtactactgcgccaaatttggtgcctggagtaggagggtatttgaagtataccatacaactgttttgaaaatcca

SEQ ID NO: 809968 - DNA, 100 bp, Homo sapiens
aatcagtgcaagcgaaattaagggaaaatggatgtagaaaatgagcagatactgaatgtaaaccctgcaggtgccgtgagcgatgtggagatgcaggaac

SEQ ID NO: 809969 - DNA, 100 bp, Homo sapiens
attttggataggcctttctcggccccagactgaggtaccatggctctgggaggatggatcaacattctcttctaacttatggagtctcgctctgttaccc

SEQ ID NO: 809970 - DNA, 100 bp, Homo sapiens
tgactctgcaatcacaccaatgtgtgaagtgacaggcggcctgctccttttcttcagaggatttgttaattatctaaaagtcagaaacatgtctgaaagt

SEQ ID NO: 809971 - DNA, 98 bp, Homo sapiens
gtcaatttgtcttgatgggctacagttagagtctgaagttgttaccaatggtgaaactacatgttcagaaagagagaacattgaaagtattctctaag

SEQ ID NO: 809972 - DNA, 100 bp, Homo sapiens
ccagggcagccaggcagagctgcacccgctgccccagctcaaaggtactaggttttgacaagcttgcatcatgcgtgagtataagctagtcgttcttggc

SEQ ID NO: 809973 - DNA, 100 bp, Homo sapiens
cattcaagctgataggctgcgctaccggaatgtcatccagcgagtgattaggtatctgtaattcttgcccaccaaacaagcctgcagaatctgttcagtc

SEQ ID NO: 809974 - DNA, 105 bp, Homo sapiens
gaactacagcaacttactctcactgggagcgcctggaccatgctgctgagcgcctactggcacggcctccacccgggctactacctgagcttcctgaccatcccg

SEQ ID NO: 809975 - DNA, 100 bp, Homo sapiens
gtggaagacctgagccctgaccacccagacttaattcagtgcacaaatgagatgaatgtgaacatcccacagttggcagacagtttatttgaaagaacta

SEQ ID NO: 809976 - DNA, 100 bp, Homo sapiens
acccggacaagaacccggatgagggcgagaaggctcctcgacctccaaaacaacccaatgttcaggatttccagttctttcctccacgtttatttgaatt

SEQ ID NO: 809977 - DNA, 98 bp, Homo sapiens
agcccacagtcaaatctgtccaggctgttcgctgctacgaatctttaatcttaaaagctgaaggaaaagtggagtctgacttcttttgccaattaggt

SEQ ID NO: 809978 - DNA, 116 bp, Homo sapiens
ttattgggctcctgtctgcaggatttacgcgcacgttggaaccgaagagagctctgttgttgcaatgaccctaattttcagtgcaaattcaaaggtctctggagtaaggaaaaata

SEQ ID NO: 809979 - DNA, 99 bp, Homo sapiens
cgtgggaggaggaagatggcggccggcaagagcggcggtagcgcaggggagattacttttctggaaggaagatgagagactgcttaggcgccaccacta

SEQ ID NO: 809980 - DNA, 100 bp, Homo sapiens
ggaaaagtgattgaacaaatgggcaaattttaccctgaactgaagctagcttatgctgttcgaggcaataaatgtggcgacatgtctaagaatgtgagcc

SEQ ID NO: 809981 - DNA, 100 bp, Homo sapiens
gcgacagtgcccaggggtctgagtctcacagcttgtaaaggtactggtgtggcatactcggacagagaagcccaagatgaagcaggaggagcagctgcag

SEQ ID NO: 809982 - DNA, 100 bp, Homo sapiens
gcagggggtgctgcaacagggcacggcgtggaggaggaaccagaccgcggccagagcgttcaggttagtggatgacagatgtgtggtgcacccagaggcc

SEQ ID NO: 809983 - DNA, 100 bp, Homo sapiens
atcttgtgtcttattcaagtaataaatggagtgcttggaggcatatgtggcttttgctgctctcaccaacaggcgaaattacaagagtccattgaatatg

SEQ ID NO: 809984 - DNA, 100 bp, Homo sapiens
caaggacctggccgacatcgcggccttcttccgatccggaagccagttgagggaagttctccatgaatgtacgtcacaatgatgatgaccgaccaaatcc

SEQ ID NO: 809985 - DNA, 100 bp, Homo sapiens
ggactccaaggggtggagctgggaacattcctcataaagcgagtcgtcaaggagttgcagcaatcatcctcttccagtggtagcgtgtttgggtctggaa

SEQ ID NO: 809986 - DNA, 98 bp, Homo sapiens
cagaggccctcatcaacgcgggagacttccacggcctgcagaccaagaccttggacaaggcaggggtgctccatcgcaccaagacggcagacaaggga

SEQ ID NO: 809987 - DNA, 98 bp, Homo sapiens
gaggaggccgtccagcagatggcggatgccctgcagtacctgcagaaggtctctggagacatcttcagcagcactccagttctcgcctgaattaccaa

SEQ ID NO: 809988 - DNA, 100 bp, Homo sapiens
tggattctaaggcaacacttccttgaagaaacaagcttacaggcagacatctggtccctgggcataacagctattgaacttgcaagaggggaaccacctc

SEQ ID NO: 809989 - DNA, 104 bp, Homo sapiens
ctgggctggtgaagtacatgaactcagggccggttgtggccatggatgagacctgcacgcagtggctcacagcagcacgatttgtgacagcccgaggcggagaa

SEQ ID NO: 809990 - DNA, 100 bp, Homo sapiens
atcgagctgtccgacaaccctggcgtccatgagcctgggtatacctcagttaccatgtgccaaagcattatacaactatgaaggaaaagagcctggagac

SEQ ID NO: 809991 - DNA, 100 bp, Homo sapiens
gaaagacccaggagaagccgcccaaagaactggaggaagaaggcacctacgatcaaactctggagttccgtaggggaggtgatggccagccaagacgatc

SEQ ID NO: 809992 - DNA, 98 bp, Homo sapiens
caaatcaaactgcaaatctgggatacgccaggtgattggtgaaaacactaaacaaccctgagcccagggccaacccctacggaacaccactactttac

SEQ ID NO: 809993 - DNA, 100 bp, Homo sapiens
atattgtggctggagacatgagcaagaaaagcctctgggagcagaagggaggctccaagacctcatcaacaattaagggaactctcaactttggtgggat

SEQ ID NO: 809994 - DNA, 100 bp, Homo sapiens
agttcgctacacagcaatgcatcgagaattccttgtgtggatatcagatccggatggaatctcgagcttgtgaatctaccaggttactctattgtacaac

SEQ ID NO: 809995 - DNA, 100 bp, Homo sapiens
tggaaatcctcatccctgactttgttaaacagacctctgaagagaagcccaaagacagtgaagaactcgagctttggtgtgaagcttatggacttccagg

SEQ ID NO: 809996 - DNA, 98 bp, Homo sapiens
ggactataataccttgggatgtggacacaatttgtaagattgcagattgagtacccagcacgaggaatcagcagatgagcagaaaggttctgaagcag

SEQ ID NO: 809997 - DNA, 98 bp, Homo sapiens
gtcagaaccctccgcagagtaaagcttgcagttccccacaatgatgaatggacccgatttgccaggacccttgtggaaattcgtgctaacagagctga

SEQ ID NO: 809998 - DNA, 98 bp, Homo sapiens
tcgtatctgtgttggcactgataccagaaaccacaacattgacagttggtggaggggaccctgatgcttggtgtgacctgagtaaatttgacctccct

SEQ ID NO: 809999 - DNA, 98 bp, Homo sapiens
aaatcatggtgaggacatgaggaaaatgtccttccagcgctgcgcccggacagacaagttggaatgccaagatgccttggaaacagcagcccgagccg

SEQ ID NO: 810000 - DNA, 100 bp, Homo sapiens
gtctcgcatgaatttgccttgaatttcaaccccagtaacccctactgtgcagccagtcagtctgcaggaagccaaactactgctaaaagaagatgatgaa

SEQ ID NO: 810001 - DNA, 100 bp, Homo sapiens
gtattgccgcggtggaaatggagcatcaaggcatgccatgggttgcctctcataaatggccaaagctgtgacccttatgcaacagtttctctagtgggcc

SEQ ID NO: 810002 - DNA, 98 bp, Homo sapiens
ggcgaggaggcgcggaaccatggccgatgggggcgagggcgaagacgagatccagttcctgcgaactgcggcgctggcggcggccctgggacccgcgg

SEQ ID NO: 810003 - DNA, 99 bp, Homo sapiens
caaagtgggacgcggcacctacggtcacgtctacaaggcgaggcggaaagatggattgttaaaggaaatgggctggcaggaagacagtgaaaatgatga

SEQ ID NO: 810004 - DNA, 98 bp, Homo sapiens
gacaccgccaaggaggatgcggccaaccgcaagctggccaagctctacaaggaaactgctgcacgagtaaatcaatcagctctggaagctgtcactcc

SEQ ID NO: 810005 - DNA, 100 bp, Homo sapiens
cctcaagaagcagttccataaagccactcagatacagatccacgggttttagaaaaacaagaattacagcagccaacctatgttgccctgagttacataa

SEQ ID NO: 810006 - DNA, 100 bp, Homo sapiens
tgccctgcagtacctgcagaaggtctctggagacatcttcagcaggttgctaggatacttggagtctctgaagagatgaggaggaacatgggggtgagct

SEQ ID NO: 810007 - DNA, 98 bp, Homo sapiens
ccaagaagccaacagcgaggctttcagttctttggaattccattcttttccttattcttctgatgtggatccagctattgacctgaaaagtggttctg

SEQ ID NO: 810008 - DNA, 100 bp, Homo sapiens
ctctgtgcactgataataaccctgcagagatcgggtctctccatgttgcccaaactgatctcgaactcctggcctcaagcgatcctcctgccttggcctc

SEQ ID NO: 810009 - DNA, 100 bp, Homo sapiens
cactgaggttgcagttggcgtgaagggacagcaatcagacctattgctttgagagctgtgacctccattgctcgtgctctgcctggatttcccattttgg

SEQ ID NO: 810010 - DNA, 141 bp, Homo sapiens
tcttctctgagctggcagaagacaaggagaattacaagaaattctatgaggcattctctaaaaatctcaaggttcctttgcaacagcatcttgcctgatttgtaaatacaaagttgactgtgaagctgtacgaggagatat

SEQ ID NO: 810011 - DNA, 100 bp, Homo sapiens
aggggaagttcaggaaacatccaagaaaaatgtccttaaagcaattgagcaggctgatctactgcaggaggtggagagacttatccaagaacgtggctgg

SEQ ID NO: 810012 - DNA, 100 bp, Homo sapiens
cgtttccttttgaagctgcccgtagatttcagcaatatccccacataccttctcaaggtggaataacactcccatggatgaagcactgcactttggacac

SEQ ID NO: 810013 - DNA, 149 bp, Homo sapiens
cggagccggagccgacgggcggtggccgcactgggaccccggaatcccgcgcgctgcccacgattcgcttctgagaagatgaatttgctgtcatgttttgtggaatgagggaccgttgagctcactaccacctggagtttgagttgaag

SEQ ID NO: 810014 - DNA, 118 bp, Homo sapiens
ccgcttcaaccccaggggaccagaggaactcagccctgattgcggatttttagactctgaggagcagttggagctaatccacattatggaaatggaaaccaccgaacctgagccagac

SEQ ID NO: 810015 - DNA, 100 bp, Homo sapiens
cagatgtgggcccagaaaacaagccagtcagctctctatcaatatcagctcacatcattgaaaagataattttgaagacatgttttgctgaaaagacact

SEQ ID NO: 810016 - DNA, 99 bp, Homo sapiens
gagaggccgctgcgagcggaaggcctcctccataaccgagtccgaaagggcagaatctatggggtataattttaataaccggggaagcctgacctttga

SEQ ID NO: 810017 - DNA, 100 bp, Homo sapiens
gggctgatgggcgccggcattgcccagctcagagtcaagatctccactgaagttggcatcacaaatgttgatctttccaccgtggataaggatcagagca

SEQ ID NO: 810018 - DNA, 98 bp, Homo sapiens
ttgtttggtgggacgaccgtcggttctgtccgggaggaatgacggggtcaagaacaccttccaccatgaccacctcagcaagttcccacttaaataaa

SEQ ID NO: 810019 - DNA, 98 bp, Homo sapiens
tccaatgagtatggcagtgtcagctgtacagccacactaactgtgacaggtggagtattgctcctggaaaatccaaaaggtgacaataggttggacct

SEQ ID NO: 810020 - DNA, 100 bp, Homo sapiens
atcaggatcttcgagcattcactgcaccagaggttcttcaaaatcagtcactaacttctctctcagatgttgaaaagggaatcttttaactgagccagtc

SEQ ID NO: 810021 - DNA, 100 bp, Homo sapiens
ggtgggttcttggtctcactgagttctagaatgaagctgcagaccctcgcagtgagtgttacagctcttaaggagatgttacagcccagatagctcttca

SEQ ID NO: 810022 - DNA, 100 bp, Homo sapiens
ttgatctatatccatagattggaatattggtgggccagcaatcctcagacgcctcacttaggacaagtcttgtgataatggtcactgtatgctgaatgga

SEQ ID NO: 810023 - DNA, 98 bp, Homo sapiens
tttgttaagattcaggtcaaagacaggccttcccttcttcttggtggtgttcttgagtaagataatctggactggcccccgtctttgcttccctgcct

SEQ ID NO: 810024 - DNA, 98 bp, Homo sapiens
agtggagaacggcaacccatccagatcaccatgccgctggagaccatggccaaaatggaggtgaaaacctcacttctggacaatatgattggagttgg

SEQ ID NO: 810025 - DNA, 100 bp, Homo sapiens
gtgggacctagacaaagggagagggtgaccgacatcccaactaggttttgcacactagggaccaagaagccctcggggacactgctgagaaaagactgcc

SEQ ID NO: 810026 - DNA, 98 bp, Homo sapiens
gttttcgtacgggcggccgtgcgcgaggcgaggaggttgtggctcactggattgctgaaagccgcattgccattgagaagatccgcttgttgactctg

SEQ ID NO: 810027 - DNA, 98 bp, Homo sapiens
tggggagattgagtccaagttcaaccaagccattggcgagaaaaatcatggctttgaggtcctgtaccacagcgtgaagcaggggcccatctccacca

SEQ ID NO: 810028 - DNA, 100 bp, Homo sapiens
acagaatctcccatccagtccggcacccagtaccatattctctggaggttttagacacgctggcgcccatgcggctctacacgctctccaagcgccactt

SEQ ID NO: 810029 - DNA, 100 bp, Homo sapiens
ttcctaagagataccgctcagaagaaaatgcaaaaaaactaatggaattagcctgcaacatgaaggtgggaatggaagtggccccacatctcaaagaaac

SEQ ID NO: 810030 - DNA, 98 bp, Homo sapiens
cctgaccacggcgactggacttacgaggagcagtttaagcaggtccagggtggcgcgtggctgctgagcccccgcctgtgcgacgccctcatggccat

SEQ ID NO: 810031 - DNA, 100 bp, Homo sapiens
caggagaatgaagaagcagtcaaaaagatgcttgtggaagccacccgggagtttgaggaggttgtgttcttcatgtgggggatggtcagcgggagatggc

SEQ ID NO: 810032 - DNA, 98 bp, Homo sapiens
aaaaacaagattgttgacagattccttcacctgctcaacagaccccgagaatatattcagctacacagcaaagtgtgggatgctgtctcaggagatga

SEQ ID NO: 810033 - DNA, 100 bp, Homo sapiens
ggagctgatccaaacctttgtagtgaatatgtgaaagatatttatgcttatctgagacaacttgagataaactcaagccatggagggattactgcattac

SEQ ID NO: 810034 - DNA, 126 bp, Homo sapiens
ccaattacgactacaggtaccttcagcagaagtacggcgagagctgcgcagaggccagggagaagagctacacccccacggtgtttgagcggtacatggtcaacctgcaagtgaaaggcaaacctg

SEQ ID NO: 810035 - DNA, 99 bp, Homo sapiens
agaggaagaccctcctgccaaaaggaaatgcatctttatgtcagaaacacaaagcagcccaaccaaaggggaacacgggtctggctgagagaaaatggc

SEQ ID NO: 810036 - DNA, 100 bp, Homo sapiens
tggacccagcctcgtgggagccccgcgggtcctgcccagatgtgttttcgcattataacaaggacctgttgacagagcactgcacagaagcttcattcca

SEQ ID NO: 810037 - DNA, 99 bp, Homo sapiens
ggggcttattttgggaactattttacttattattctattcaagaaggatcaggaaagatcactttttaattcgggcctctgcagcattagaaaaattga

SEQ ID NO: 810038 - DNA, 98 bp, Homo sapiens
aatttgccggcacagctcccaattgaagctacagaatgctttggagacatgctttacccttatgttgaagaaatggatgattatgtacttgaagtgag

SEQ ID NO: 810039 - DNA, 98 bp, Homo sapiens
tcggatttcaccacaagaagggctgccaggcagaagctcctcctggggtagagacagatcttattgatgttggattcacagatgatgtgaagaaagga

SEQ ID NO: 810040 - DNA, 100 bp, Homo sapiens
agcctcctcttccagaatgcctttgcgcagagtgcgatgacatggatcctgcggacaaaccgccccagggcgtacctagcaccgaagcatcaggcgccac

SEQ ID NO: 810041 - DNA, 99 bp, Homo sapiens
gacacttctgtggtgtgtagtgagtctctacttttatggaatcctgcaaagtgatgcctcagaaggccaatgatgaggccaatcagagtgatacaagtg

SEQ ID NO: 810042 - DNA, 100 bp, Homo sapiens
ccggatcacctactcttcagaaatttgattgcagagggaatggcatacatcgagcggaagaactacattcaccgggacctgcgagcagctaatgttctgg

SEQ ID NO: 810043 - DNA, 100 bp, Homo sapiens
ccgctgcgtgttgtccacccaagatggagttcctcctggggaacccgttcagcacaccagtggggcagtgcctcggggcctttacaacaactaaacggac

SEQ ID NO: 810044 - DNA, 99 bp, Homo sapiens
attccctggcgcagctccgggaagaggtgcacgaactgcaggcgcggtggttccccagcagaaccactctgcatcggaactctaatgaatcattgattg

SEQ ID NO: 810045 - DNA, 127 bp, Homo sapiens
actccaagctgaacttccggaaggcggtgatccagctcaccaccaagacgcaggtggtccagctgctcacctgtgacctgctactgtcgctacggacagcgctctggcaaaaacaggccagtgccag

SEQ ID NO: 810046 - DNA, 100 bp, Homo sapiens
aggtacctctccttttccctctccctttccctaagagctttcattgttgaggttcctcagtgctgaactaacaagagggtacttccttgaacataatgag

SEQ ID NO: 810047 - DNA, 98 bp, Homo sapiens
aggccagtgttgtccctactgcatagatattgcaggagaagaggctgggtccgatccacactcattatgtctgttccacaaacaagtacttcaaaagg

SEQ ID NO: 810048 - DNA, 98 bp, Homo sapiens
ctaatattactgatgggagaatcacacctgagccagcagtcagtaatacagaagatccagtgccctacctgccaattcgtctggtgttttaagtgcca

SEQ ID NO: 810049 - DNA, 100 bp, Homo sapiens
caacctgcattgaacttgggaaatccctgttggcgagaaaacactatgcatctgaggagatcctggagagctcccagactttgctcagcgttctcaagag

SEQ ID NO: 810050 - DNA, 100 bp, Homo sapiens
ctccttctacaggtgtgtatgccatacacactgctgctatggatatgctgggaggacctggtatcgaaagccagtgtagaaaagttgatatcattgcaga

SEQ ID NO: 810051 - DNA, 100 bp, Homo sapiens
ctggaaagtgaggaattttgaagtacaccgtggtgacattgtatcattggttgggagattttgataagatctggcgagaacactgtgaggatgaagaaac

SEQ ID NO: 810052 - DNA, 99 bp, Homo sapiens
tttgatggccttcacaatccaagttccacaatatattgactactgccacaattccgaatcctgctgcatcacagaagctggaagttctgatgttccact

SEQ ID NO: 810053 - DNA, 98 bp, Homo sapiens
gatgagtggcttcttctccacctagatgaccccagactgaggaaatgatgtctgttgtcatgcattctatccagaaagtgagggtgaaagctctaaaa

SEQ ID NO: 810054 - DNA, 98 bp, Homo sapiens
attccatggctccaagtttaaaagaactacgtgttttatccaacagggctctctaaatacgtacagattctgcgataatgtgtggacttttgtactga

SEQ ID NO: 810055 - DNA, 100 bp, Homo sapiens
atctgagcgggagctggactgggccaaggtgatggtggagaagagcaggatcacactgtgaattaaccttggagagaaagtgttttaaaaagaagaatgg

SEQ ID NO: 810056 - DNA, 98 bp, Homo sapiens
agtctttcctggcagatgccggctatggcgaacaggaactggatgccaactctgcccttatggaattggacaaagactcctacaactcttccaagagc

SEQ ID NO: 810057 - DNA, 98 bp, Homo sapiens
tttgcagttgttgaaattgtccccgcagttttcaatcatgggaggagctgtgcagtgagaagcaaagcaggaaacaagcctattacaaatcaacttgg

SEQ ID NO: 810058 - DNA, 99 bp, Homo sapiens
aggtgaagagtcctggatggcagatggggggaccccggtacggacctgtgcagacgagagattaaacagttattgtctgagttggatgaagagaagaaa

SEQ ID NO: 810059 - DNA, 100 bp, Homo sapiens
gctaatctcacagctcttgcagctattggaccaaggaagaagagaccactagaatctggaattgagtggaagacaagcattccagtgatgccagtagttt

SEQ ID NO: 810060 - DNA, 98 bp, Homo sapiens
gtacgcccatggcgtgtttctgtgtctcctttcctcttgggccgggcactttgggctgccagtcggttcactgttgctatgtcccctgaactgatcca

SEQ ID NO: 810061 - DNA, 98 bp, Homo sapiens
cccccaacactgcatggagcggatccagggtgtgggccgaagatatgctcatgtggtgttgaggaaagcagacattgacctcaccaagagggcgggag

SEQ ID NO: 810062 - DNA, 100 bp, Homo sapiens
tgaaacatacaatcagctgttgcatcttgcttctgagcaaggtagttttgatgcaattctgtggtgttcttggtcacacatttatggagtttctgaaggg

SEQ ID NO: 810063 - DNA, 100 bp, Homo sapiens
gcagctaccaaatgcttattttctgcttccaaaggtccagagcattcagctgtctcaaatgcaggttgggcccatgagatgtgtgctctgtatattccgg

SEQ ID NO: 810064 - DNA, 101 bp, Homo sapiens
ttcagctcatgcacagttgcaaagagggctacgtgaaagatctgaaaggattgctgtcacgtctaatgtggctgctgcctcgtgtcacatctgaaactcat

SEQ ID NO: 810065 - DNA, 99 bp, Homo sapiens
agcagcctgtaactgctgacaagcagcaaggtcatgaacctgtctctcctcgaagtcttcagcgctcaagcgatttgaaattattaatgcaatttatga

SEQ ID NO: 810066 - DNA, 100 bp, Homo sapiens
gaaaaagtttgtagaatggctcaaaaatgctgaagaagcttatgtttattcagagccaaggccaggtccagctgactattgagcttctggacacagaaga

SEQ ID NO: 810067 - DNA, 98 bp, Homo sapiens
ttgctctagacatggaggaaagaaactgcacggatttgcttggaacggtagaagaaatccttccaagcctctcagaaaatatcagtgtttgggggatg

SEQ ID NO: 810068 - DNA, 100 bp, Homo sapiens
tgcccagcaagttcagtgactttttacttgatccatacaagaattcaagccaggaagaagcagcaatctgtcttctggattaaaactgaagatcaaccta

SEQ ID NO: 810069 - DNA, 100 bp, Homo sapiens
atattatcatctatgaatatccttctctgagaccatacagagtccttcgaggtttctccaacaactaacagaagagaattttgagttaattagtaagttg

SEQ ID NO: 810070 - DNA, 100 bp, Homo sapiens
gccggatagacctattggatatggagcctttggtgttgtctggtggatcatccatgccatggagtatgaacttcagatccgtggcggagacaagccagcc

SEQ ID NO: 810071 - DNA, 128 bp, Homo sapiens
gaacttgatctgggcctggaaggggaagaattcgggaaaagcaacgtggggcattccaggtgcaaagttccccatcaagtggacggcccccgaggcagccctgtacgggaggttcacaatcaagtctg

SEQ ID NO: 810072 - DNA, 98 bp, Homo sapiens
gacctgctcctggacccagcctgggagaagcagcagaggaagggccagatattcgaagcttacaacatggcagctttgtggaaattaccttgtatttt

SEQ ID NO: 810073 - DNA, 98 bp, Homo sapiens
agcggcataggctccatctgcagtgtcaatgcggcgctcccgctgaaggagggaaacgcggcgcgtccagatctcctccctggttcgaagggctgccc

SEQ ID NO: 810074 - DNA, 100 bp, Homo sapiens
aaggggagcccgggacccccgggggcgcaggccaagctataacatcagaaatggtgaatgaatacaagaaaattcttttgctgaaaggatttgagctcat

SEQ ID NO: 810075 - DNA, 99 bp, Homo sapiens
ttagccttaaatgaaagaatcatgttgtctcttgtcagcacaggagattttgacacttcatgacatgtcattatttagagcaataatgaatattgacct

SEQ ID NO: 810076 - DNA, 100 bp, Homo sapiens
gcttcacgagtacaatgacatcaaggatgtggggcagatgctgatgggcaaactaggtgtcagaaactatttaaaagaagcactggtgaatataattgcc

SEQ ID NO: 810077 - DNA, 100 bp, Homo sapiens
tggaaaagtggctggaacaacaagaaaccggccttcttgcgtcgatggcagttcaattaacctccagaagatggctgaacctgcaggaataccagagcaa

SEQ ID NO: 810078 - DNA, 100 bp, Homo sapiens
gcagggagaggagccgtggataatgggaggtgaatttccatgtcaacatagtccagattcgccatgaagtcagcgtaaataatgtaacacataaactgtg

SEQ ID NO: 810079 - DNA, 100 bp, Homo sapiens
attgattcatcagattttgcattggatattcgcatgcctggggttacacctaaacagaacattgagctgaaggttgaagtggagagcttgaaacgagaac

SEQ ID NO: 810080 - DNA, 50 bp, Homo sapiens
cagggctccaccccgtcgcctcgacagacctctgtgagtgaaagccttca

SEQ ID NO: 810081 - DNA, 100 bp, Homo sapiens
acccttgaccaagctttcagaggtattctagaagaagaaatttttccaaccctttgtaatcagtactacaaattaatcacatttatctgtgagatttttc

SEQ ID NO: 810082 - DNA, 100 bp, Homo sapiens
gagcgagctgagtggttgtgtggtcgcgtctcggaaaccggtagcgcttgcagcatgcaagatggattctggatatactctgagtattgtaacaaccacc

SEQ ID NO: 810083 - DNA, 123 bp, Homo sapiens
gctgcctgtcctacggccccacagcgcgctcctggagaatatgcacatcgagcagcattgcagtgtcgagatggctatgaaccctgtgtaaatgaaggaatgtgtgttacctaccacaatggc

SEQ ID NO: 810084 - DNA, 98 bp, Homo sapiens
ccagctgagccgagggctcgcactcttctggtctcccaggcccaacccacctgaaggaacaaatgtggtatctggggctggcggtctgagaagatgga

SEQ ID NO: 810085 - DNA, 100 bp, Homo sapiens
gctattggaaggaggagattctgaagataaggagcccatgacgattgatgaactgtatgagctggtggtggatgccatctttggcttcagcttcaagggc

SEQ ID NO: 810086 - DNA, 100 bp, Homo sapiens
cggccggtgccagcacctttcggcttctgagacggcggcagcagcggcattcaggccctccctatcctgaagacattagctgagagtctggcacctttta

SEQ ID NO: 810087 - DNA, 130 bp, Homo sapiens
gctccaaggccaggacctccctggatgccctgaagatcagcatccgccagctcaagtggaaggagatcagccaaatggccgatgacacagtggcagaactggacaggcatctggcagtgaagaccaaaga

SEQ ID NO: 810088 - DNA, 99 bp, Homo sapiens
tggaacagtgcatggccagcaagcactatctcagtgccactgacatgttgcttttctgggagaagaggctacaaggacttagtgcatcagatgtaacag

SEQ ID NO: 810089 - DNA, 112 bp, Homo sapiens
ggcctcaaacgtggagatcaactcctctctgttaatggagtggggcctttatcatctgctggactcctggattggttttgttacttctagacgtgtgctgtccacagtgcga

SEQ ID NO: 810090 - DNA, 98 bp, Homo sapiens
cagagtttctacaaatgctagaagctatcaaagcccttgaagtcagctctttcagtctcacatggcaacgaaaacaacttgtatgtcttcacaaggat

SEQ ID NO: 810091 - DNA, 98 bp, Homo sapiens
cgtgtcagtttggggcatctccgcggtccggcccggggccccgggatctcggctgtccttcctcccggttgtccttctattcaggccactcttcgttt

SEQ ID NO: 810092 - DNA, 100 bp, Homo sapiens
gcctccccagccacatggaactctgttgttggcctactgtacccctgtatcgacagtcacctcggagaaccccacaaatttaagagagaatgggccagtg

SEQ ID NO: 810093 - DNA, 100 bp, Homo sapiens
taatggacaaaaacatgagtcaatatgtattgtggcattcaaatcctagcactctgggagagtatgaatacttcaatgctgtgctgataaatgaaaggga

SEQ ID NO: 810094 - DNA, 100 bp, Homo sapiens
acaaccatagcccagtgccaatgcatcttctgtactctggtgagaattatgaagatgatgacctagtaaattctgatgaggttatgaagaaaccatgtcc

SEQ ID NO: 810095 - DNA, 100 bp, Homo sapiens
gttctttctcacatgctgcttagctttcagcattctccagaggcgttccatttggttctccgtgctggagcaggtcagcgtcctcttactcccaatcagg

SEQ ID NO: 810096 - DNA, 100 bp, Homo sapiens
ggagaataacaaatgctaagggtgacgtggaagaagttcaaggacctggagtagttgaacagacccaggaaagcattcagcattttgagcgacaggcagg

SEQ ID NO: 810097 - DNA, 98 bp, Homo sapiens
agaaagttccgccatgagctggggcacggagctgtggctgtgaaagttgtgtagatttactgtttgtgagaggagctggaaactgccctgagtgtggt

SEQ ID NO: 810098 - DNA, 100 bp, Homo sapiens
ttgtggaaaagggccccagcgtcctcttgtcaccgacagggcgattgcagtgcgttccgggctctacggtatttaatggggcccagaatggtgtgtctca

SEQ ID NO: 810099 - DNA, 103 bp, Homo sapiens
gttggcgttggccttgttcactgctgtgtgccaagctgctgacagcatctggctatcgcaggtaaaatgtcggttccaggaccttaccaggcggccactgggc

SEQ ID NO: 810100 - DNA, 100 bp, Homo sapiens
aaccttgtgtcaaccatccattccaggagccagctatctgaggtactaggttttgacaagcttgcatcatgcgtgagtataagctagtcgttcttggctc

SEQ ID NO: 810101 - DNA, 100 bp, Homo sapiens
gaacaatgctgtaaagggggcgctgatggccaacttcctcacacaaggccagccctactgccaataaagggaaaataagagatgctcatcgacgaattat

SEQ ID NO: 810102 - DNA, 98 bp, Homo sapiens
aggtgatcggactcttcctgtcagcttaaaactagagatcgatacatcagtagtctgaaaaagaaatgccagaaggaatctgaacaaaacaaagaaaa

SEQ ID NO: 810103 - DNA, 98 bp, Homo sapiens
acctcgtgtatactacgctatccccctggaggaacgcgcatagatgatggtgacaagaccaagatgaccaaccactgtgtgttttcagcaaatgaaga

SEQ ID NO: 810104 - DNA, 50 bp, Homo sapiens
acagttttatattaatgttgagagagagtacataccgagcatcaaatatt

SEQ ID NO: 810105 - DNA, 98 bp, Homo sapiens
agtgcaacaaggaggtgtacttcgcatcccagccatcactcttccacctgctccttagagaagggaagatgagtgagtcgagctcgaagtccagccag

SEQ ID NO: 810106 - DNA, 98 bp, Homo sapiens
cagatataacccaagagcatgaaagaagtatggcttatggactggatctatttggaaagtcagacccatacctggaattccacaagcagacatctgat

SEQ ID NO: 810107 - DNA, 98 bp, Homo sapiens
tctgttccaaatgctttgctggagtgtacctcacagccttctaggatctccagagtggacaggaatctcacttggagggaccatggagcagtatacag

SEQ ID NO: 810108 - DNA, 100 bp, Homo sapiens
ccccttcaactcttttctctcgggcttcatctcttgtgtggggagtttcatcctagcggctaaagatcatcaccctggtaaaactttgccagagaaccca

SEQ ID NO: 810109 - DNA, 100 bp, Homo sapiens
ccgaaaagaagatgatacaaatgaatttgttagtgctgtgtgctggagggcactaccagatgggggcatgctgttgaagcgaagtggcaaatcgttgaat

SEQ ID NO: 810110 - DNA, 100 bp, Homo sapiens
tgaattcacagtctaccatgaattggaagggattaaagcctgtggtttccacagaagcaccacctatcatatttgccacaccaactaaactgacctccga

SEQ ID NO: 810111 - DNA, 100 bp, Homo sapiens
acttcataaccagctatccgggttcatcctacatttttgtgcaagagaacactgagctgaaggttgaagtggagagcttgaaacgagaactccaggacaa

SEQ ID NO: 810112 - DNA, 98 bp, Homo sapiens
tgcaaggagggccagctgcgcgtcggcgagctcacccagcaggcgctgcagcggtacctgaagacccgggagaaggctctgaagattgctcaaaaaac

SEQ ID NO: 810113 - DNA, 100 bp, Homo sapiens
tccaggacaccttctggaaaatcccaactttaaacgaatctgcacaggaatcattgtagtcaatcattttccagttctcagccgctcagttgtgatcaag

SEQ ID NO: 810114 - DNA, 100 bp, Homo sapiens
tgcaagttcccatcgtcccaggaactagaggatgcctcctgctgttctcttaagaaagattccaacccaatggaagaggagttgtacgcatgtcagagag

SEQ ID NO: 810115 - DNA, 100 bp, Homo sapiens
ttataagtagtgctcagaaggttcagataaaacaggaaactattgagtccaggctttctgaattaaaaaggtatgaaccctctcgtgagatgaaaagtca

SEQ ID NO: 810116 - DNA, 100 bp, Homo sapiens
gagctgaaggctgtgataatgaggaagatcttcaaatgggcattcacaagacattggaagagcatgaggcagagacaggaatgaagtctaaagaagccag

SEQ ID NO: 810117 - DNA, 98 bp, Homo sapiens
cggccccggcgaggaggcgcggaaccatggccgatgggggcgagggcgaagacgagatccagttcctgcgaacttctccagagaatacagagggcaaa

SEQ ID NO: 810118 - DNA, 100 bp, Homo sapiens
taggacagcaggcccaagtctgcacatcccagaaattcatggccaagcaaagaaaggaaaaggagcagaatgaggctgaagaaagaagctctaggtgatt

SEQ ID NO: 810119 - DNA, 99 bp, Homo sapiens
tacgcagagctcatcgtccttgtatttgataggtacaagagttacagcccttatgacatgttggaaagcatcaggaaagaggttaaaggagacctggaa

SEQ ID NO: 810120 - DNA, 131 bp, Homo sapiens
ctggatcttaccagtgcgttccctgcacagaaggattccgaggctggaatggacagtgccttgctttcaccaacaatcaccagtggtttacacaacattgcaaggagcattgaaactcgaaactactcaga

SEQ ID NO: 810121 - DNA, 132 bp, Homo sapiens
caaaatgtggccaagacagaaccagtcagcattctacaaccccagaccaccgttaatccagatcgcatcaaacaaaactgtttgaggcgaagagatgctggtttgttgaatcagttgcaagagcttgacaag

SEQ ID NO: 810122 - DNA, 98 bp, Homo sapiens
tggactcatggaggctgagcatttattcagtgtgttctaggtcagtggcttcaaagactccagttggattcattggactgggcaacatggggaatcca

SEQ ID NO: 810123 - DNA, 100 bp, Homo sapiens
cagttttatctagccacatcttggaggtggaatgaggtaccatctactgtctccagaggaccgagaagaacttgtagatggcacaagacctagaagaaag

SEQ ID NO: 810124 - DNA, 100 bp, Homo sapiens
cgggagcggcccgcatccgtggggagacgctgggcctcattggctttgggaatatccccggctcggctgtgctggtgtttgacatccatgtgatcgactt

SEQ ID NO: 810125 - DNA, 100 bp, Homo sapiens
ggcgccggtacgcctggtccccgcgtggagtctttactcaaaacagggccaattcctgtccccccagcagcatggcatcgtgtgctgaaccctctgagcc

SEQ ID NO: 810126 - DNA, 99 bp, Homo sapiens
gaccagtggcagcagcggcggtggcggcagcaagaggatcaggcttttctgatgtggatcacacctatgctcaaagaactcagctctttgacaccttag

SEQ ID NO: 810127 - DNA, 100 bp, Homo sapiens
ggactgggctggccccggaagcccccacgggctctacctgaccctgcaggcttgaacatgacaagcagatttgggagtccaaggcccagacagaggtcca

SEQ ID NO: 810128 - DNA, 98 bp, Homo sapiens
tgtgggagtgtctgtggctctgcagagagaaggcatagactcccaggctcatcatatgcccgaagctcagtggttacggctgtgaaatttacaatttc

SEQ ID NO: 810129 - DNA, 100 bp, Homo sapiens
tatgttgttacaggagctttattgcagaaatgaccatttatatcaagcagctgggcagaattaagtgggcagaccaacatccacctcagcaaaaacttct

SEQ ID NO: 810130 - DNA, 99 bp, Homo sapiens
ttataatcaggaagtggatgcctccatttttaaggatctgcatctccaatggatactgaggggtttggtgagctccttcagcaagctgaacagcttgct

SEQ ID NO: 810131 - DNA, 98 bp, Homo sapiens
ggatgcggagcccgcagaacctccacagtcaagaggacgattctgcttctcagaagatgcactattatagatactctaacgccaaggtcagctgctgg

SEQ ID NO: 810132 - DNA, 98 bp, Homo sapiens
tttagggtcctttatatagaagggagagtagagtaatcaagtcagaggattatatgacttttatctgcctagagaagaactatggatctacaacatgg

SEQ ID NO: 810133 - DNA, 98 bp, Homo sapiens
gcggaccgcggcagcccagagcagcaaaagttcaaacagaccctccctcagttccaatatgtgacctgtatcctaatggtgtatttcccaaaggacaa

SEQ ID NO: 810134 - DNA, 99 bp, Homo sapiens
taaggatgcagaggaaatgaggttgtttctagatgcagtccatcaaaacagacttcctgcagaaaaatccagttacactcttaaaggaattgtcagtga

SEQ ID NO: 810135 - DNA, 106 bp, Homo sapiens
gggcttcgacctggagctgggccaggccgtggagtattggtaaaggttttcaaggtgtcatgaaaagatggggatttaaaggccagcctgctacgcatggtcaaac

SEQ ID NO: 810136 - DNA, 100 bp, Homo sapiens
agctgaattcctgcagctcagcagccgccgccagagcaggacgaaccgccaatcgcaaggcacctctgagaacttcagagctcttcagtatccccatcag

SEQ ID NO: 810137 - DNA, 119 bp, Homo sapiens
agcaaaaacagttcctccacatcaaagcagaagaagaccgaagggaagacttccagtagctccaaggaggttaagttcttctcaccactaaatccaatacgagttcatattgatattgg

SEQ ID NO: 810138 - DNA, 100 bp, Homo sapiens
ccaagtcgcagtgccactgcaagcccacagattccagtgctgaatattcaaatgaaaatttttcctgcactttgtactgtagcagggaccatattttcct

SEQ ID NO: 810139 - DNA, 100 bp, Homo sapiens
agccacccaggtgtaccccaagctgtacttgtcacctcgaattgagcaggattaaagcctgtggtttccacagaagcaccacctatcatatttgccacac

SEQ ID NO: 810140 - DNA, 100 bp, Homo sapiens
catgaattccggagttgccatgaaatatggaaacgactcctcggccgagctgagtgagggctcaaaatctccttcgccaagaccaaacatgcctgttcga

SEQ ID NO: 810141 - DNA, 100 bp, Homo sapiens
ggatggctttggctttgcagacagcacagtcttacaggttaaatggaagctgatcggcgttcacatggaatcctcctcacgtagctcagatggatggcca

SEQ ID NO: 810142 - DNA, 100 bp, Homo sapiens
ttcaatcagaatgacccttgggcccccactgtggatttcagtgacttcatcaacaatgagaccattgctggaaagtggtgatcgccgctcgggaatgcgg

SEQ ID NO: 810143 - DNA, 100 bp, Homo sapiens
gaacaactcagcttgcaaaagcccagggccatatatctcagcacccccaaattcagaaggagtcccagtatatcaagtatctctgctgtgatgacacaag

SEQ ID NO: 810144 - DNA, 100 bp, Homo sapiens
acactgtcaaaactttacaagttaattgaagagtcttgtccacagctggcaaattcagtgcagatcagccaaagccttctactaccccaacttcacctcg

SEQ ID NO: 810145 - DNA, 98 bp, Homo sapiens
taaagttgcctgtttcagatgtcttgagacaactttttgcactctttgacagggcagaaggagaagacagcctgaagaagatgcagctgatggagctt

SEQ ID NO: 810146 - DNA, 99 bp, Homo sapiens
gtcattataccttcacccagcatttcatccctcgtcgaaaggattggattggcatctttagatttgtcccgctggctggaagcctggcagtgacacgat

SEQ ID NO: 810147 - DNA, 124 bp, Homo sapiens
aggggtggtgaccatcgaaaggagcaagagcaagatcaccgtgacatccgaggtgcctttctccaaaagaacgacaccgtaactatccgcactagaaagttcatgaccaaccgactacttcaga

SEQ ID NO: 810148 - DNA, 100 bp, Homo sapiens
tcaacactgttattgtaaacaaaggtgaatctggattgggaaagtcgacattaatcaactcattattcctcacagatttgtattctccagagtatccagg

SEQ ID NO: 810149 - DNA, 100 bp, Homo sapiens
cgcagtttggagagatgggaggcaagtttatgaaaagccaggaaagaattcagagcctgaagcagagcatagacttcatggctgacttgcagaaaactcg

SEQ ID NO: 810150 - DNA, 100 bp, Homo sapiens
gatgaacccaacctagtgggtgtaatacatcatgaactgcagggaatcctttgtgcattgaagactttagattcctctctgcggtagacgtgcacttata

SEQ ID NO: 810151 - DNA, 101 bp, Homo sapiens
cgacattatagtattaacaaaagatatacaagaaggagatacattaaatgcaatagcccttcagtactgttgtacggttctgccggagacttccatttggc

SEQ ID NO: 810152 - DNA, 99 bp, Homo sapiens
acggagctgcagtcggcactgctactgcgaagacagctggcagatgaggagactgtccttcctgtttcgcagatgaggaaactgaggcttagagaagtt

SEQ ID NO: 810153 - DNA, 98 bp, Homo sapiens
ccatcacccgcagtcccttccctgtccatgtgtcggaagagctcgtccgcatggtgctgaatggctgaggaccttcccagtctccccagagtccgtgc

SEQ ID NO: 810154 - DNA, 98 bp, Homo sapiens
gggtatggctgaaaagagacagtggtcaatactggcccagcatttaccacacaatggcctgacttcttaattactcaaatgactggaaaagagctctt

SEQ ID NO: 810155 - DNA, 100 bp, Homo sapiens
ggtgtaatacaagatgctttaaagaagccctgccaaggtaaccctgctggggtcagttatcttcacattccagcacacccagcatctggcaatatcaaag

SEQ ID NO: 810156 - DNA, 98 bp, Homo sapiens
ttgtgagacgccatcagtttcgatggagtgaaattcagaaaggaggcatagaatgtcaagctaaccaggcgtccgctacttcagaagagtgtactgtc

SEQ ID NO: 810157 - DNA, 98 bp, Homo sapiens
gaatgcggattcgatcattcacatcgctgccactgcagagccccgccatggaagacacgccgttggtgatatcgaagcagaagacggaggtggtgtgc

SEQ ID NO: 810158 - DNA, 100 bp, Homo sapiens
aggatgctcaccaagccctgttggagactatgcaaaacaagtttatcatggttcaactcataatgacaagagacagtgatggttatgaaaactcaacaga

SEQ ID NO: 810159 - DNA, 98 bp, Homo sapiens
aagaattggccaaagaagttgagaaaatgggagcagttttcatggatgcccctgtttctggtgctggctgtcccaactccttgattaaagagctccat

SEQ ID NO: 810160 - DNA, 99 bp, Homo sapiens
gctgctcagagctgccttgaaggacggccactcaggtactccaaagattcaggtttactcacgtcatccagcagagaatggaaagtcaaatttcctgaa

SEQ ID NO: 810161 - DNA, 98 bp, Homo sapiens
gaaattcagcctcaaaaccgtcctgctgcttgctgaccaaatggttaaaggtgaatccttgtttcattctaagaaaatggacctgacagtaaatgggg

SEQ ID NO: 810162 - DNA, 100 bp, Homo sapiens
tgccctgggggcctttttttaaaaaacaaaaaccacaaaaattcccaaaccatacttgctaaaaattctgtgatgcttttgacatacaatatggagtagt

SEQ ID NO: 810163 - DNA, 98 bp, Homo sapiens
aacaatgataaagaagaagaagagaagaaagatgaaacttcgagctcctctgctggttatattctgggcactaaatgaaggcgtttctaggcaatttg

SEQ ID NO: 810164 - DNA, 101 bp, Homo sapiens
aaagtgcattttgcccattcggctgtggatagagaagcaggaagagcactggacttggagtcagagtatatcttggaacctccaccctgcatatcagcacc

SEQ ID NO: 810165 - DNA, 50 bp, Homo sapiens
tggtttatcctgaagagttaaagctaaagaattacctccaaagccattgt

SEQ ID NO: 810166 - DNA, 100 bp, Homo sapiens
tttccctctccctttccctaagatagaagaggagttatgggaagaagaatttattgaacgctgtttccaagaaatgctggaagaggaagaagagcatgaa

SEQ ID NO: 810167 - DNA, 98 bp, Homo sapiens
gaaatctacagttactcacacaagcaatgaagttggagcagaggctgaaaacacaggctgctgaagttttttggaatgctggtgctaaccacttgcta

SEQ ID NO: 810168 - DNA, 100 bp, Homo sapiens
ctggacaaagatctctcggaccgcagcaatgacattgctggcagcctgctatcaattatattgatagtaaatttgaggactacctaaatgcagaatcgcg

SEQ ID NO: 810169 - DNA, 100 bp, Homo sapiens
tgtggctgctcccagctctactccttctctgcctctcagcagccaacagggaagagtgtcgcacccaggagaaagttaatgcaacaggaccacagttcgt

SEQ ID NO: 810170 - DNA, 105 bp, Homo sapiens
gcggcggtagcggcagtggcggcgcgtaggaggcgaagatgattgaagaatcactgaagattaaaataaaaaaggaattagaaatggaaaatgaattagaaatga

SEQ ID NO: 810171 - DNA, 100 bp, Homo sapiens
tctggagatgacaacttgacttctctggggactctgaacttccctggtcgaacagttttttctaatggctattcaagcactgagctagcctctccttgct

SEQ ID NO: 810172 - DNA, 100 bp, Homo sapiens
gagacacaatttatcattgaataagtgttttaagaaagtggacaaagagaggagtcagcatttttgaaacgttggggttgttggagtggttggattttcc

SEQ ID NO: 810173 - DNA, 100 bp, Homo sapiens
tttttcttctctgggaaggtgaacatttgtagcattgatttcccggatctggtaacatggcaaaagatactactggtgcctggatgatctgtaccgggag

SEQ ID NO: 810174 - DNA, 100 bp, Homo sapiens
aagacctgaccggactgcgccgcccgaggccgtcggccgccgtcagcgagggcgccgagcaacttcgaaagcaaggagatggccaccaaggagaagctgc

SEQ ID NO: 810175 - DNA, 100 bp, Homo sapiens
gggagaaaccacgctaggtacatggaccccgccggttttgtacattggattggggctgagagaagatgagaaagcggaggcacagcggtgccctgatacg

SEQ ID NO: 810176 - DNA, 100 bp, Homo sapiens
ttcctggcaatgatagatacatcagtgtgggaagccaagcagatacaagattcctacaggaagcaagtagtaattgatggagaaacctgtctcttggata

SEQ ID NO: 810177 - DNA, 100 bp, Homo sapiens
gtccgaaggaggaagggaaccaacccactttctcggcgccgcggctcttttctaaaagtctgagcgggctttggacaccatgaactttgatgtgattaag

SEQ ID NO: 810178 - DNA, 100 bp, Homo sapiens
cctggtccacctcttccgcttctaccgcgtgctcacctgtatcagctggcccctgtcgtgatgtcttggcattgcccattttcaagcaggaagattccag

SEQ ID NO: 810179 - DNA, 100 bp, Homo sapiens
atttccataagttttactttgagaatcgatttggtgctatggagaaatttttggtagaatataagagtgcagtggagaagaaactggcagagtacaaatg

SEQ ID NO: 810180 - DNA, 100 bp, Homo sapiens
cgagttaaagttggatgtgctggaacagggacgtcgccaagaatgccctgctgcgctggcgcgtgttcatctactggacgctcctgggactgtttgacgc

SEQ ID NO: 810181 - DNA, 100 bp, Homo sapiens
aaagtgaatgtgcggaaaatgccttcaaatcaggcccaacgttccccatcattcgccttgctggaggcagcagtgtgcatgaaggccgggtggagctcta

SEQ ID NO: 810182 - DNA, 98 bp, Homo sapiens
caccagacctgcaatctatggagcagattcggagaattatgagacctactgatgtccctgatacaggacttttccagatttctcagaataaagtagca

SEQ ID NO: 810183 - DNA, 98 bp, Homo sapiens
tcaagcactgtttgcaaaggttgcagcaaccaaaagccaggatgtaaagcaggagttaataaagttggttaaggcagcaggattttcatcttccacaa

SEQ ID NO: 810184 - DNA, 134 bp, Homo sapiens
gcacacccaggcagagaatgctgagttcatgaggaactttcagaagggccaggtgacccgagacggcttcaagggcaaacttgaagataaatcttttgactccagctctttagaggatctaaagtgaccttgat

SEQ ID NO: 810185 - DNA, 99 bp, Homo sapiens
agtgacatacctgccaggcccattgtgtccatcgctctcagagcagctggggattgtggtgagctgatcaaccttgccatgtactgtgagaggataagg

SEQ ID NO: 810186 - DNA, 100 bp, Homo sapiens
ctgccattgaagtatataatgaagcagctaaactcaaccagaaagattggcgtgtatatgatgaagaagtggaggagccagtactcaaggctgaggcaga

SEQ ID NO: 810187 - DNA, 100 bp, Homo sapiens
ttctgccgaagagaacaagacgtgtgaagactcaggagaaaatgctgagaagcttctgcagttcaagcgttggttctggtcaatagtagagaagatgagc

SEQ ID NO: 810188 - DNA, 99 bp, Homo sapiens
tcggcggaagatggcggccggcgaaaggagctggtgcctgtgcaagttgttgagctctattatcaagtcctaaattttggaatgattgtctcatcggca

SEQ ID NO: 810189 - DNA, 99 bp, Homo sapiens
tcgcggacaatttagtgaagtttatagagcagcctgtctcttggatggagtaccagtagctttaaaaaaagtgcaggctcgtatacatccatttcatat

SEQ ID NO: 810190 - DNA, 100 bp, Homo sapiens
ctgatcccaaaattattgaaaacactcgaaggcctgccctcaagtatgtgttgtatacattggttggctttgtgggttttgtaacccattatgtgctgcc

SEQ ID NO: 810191 - DNA, 100 bp, Homo sapiens
agtaacccagtactacgcatatgtaactgagcgccaaaaagtacactgcctcaacacacttttctccaggtttcacgccatggataccttgcaaaggaac

SEQ ID NO: 810192 - DNA, 98 bp, Homo sapiens
atcatcaccatggaaaaagtgacttgagcagccaaacaggcaggactcgtgaaattgtgatgccttctaggaactacaccccatacacaagagtcctg

SEQ ID NO: 810193 - DNA, 100 bp, Homo sapiens
gggacaccccggaagctgggaaatgggtggatccatgctgtgctcacttctcaggactgtatggcttttggggggaacttcctgcacaaccttaacattg

SEQ ID NO: 810194 - DNA, 100 bp, Homo sapiens
cccgggagatgcggagcctccgctgcagcgcgatctgcgcgaccagaccggcccccccgagagccgacagttagaatcagaaactgggaccacagaggag

SEQ ID NO: 810195 - DNA, 99 bp, Homo sapiens
cctttcttgctccccatcctcttcttggcttctcatgtggggtctccgtctctccaccgggggcttcatccttccagggaggagaagagggactccaga

SEQ ID NO: 810196 - DNA, 99 bp, Homo sapiens
aaggtgtcaagaagctcagaatggtcagtatgggaatcctttaaataaatatatcagacattatgaaggattatcttacaatgtggattcattacacca

SEQ ID NO: 810197 - DNA, 100 bp, Homo sapiens
gaagttttggaactgtctatctggtttcagacaagaaagccaaacgaggagaggaattaacccctgaacagtgcccaagtgttgtctctttgttgtcaga

SEQ ID NO: 810198 - DNA, 100 bp, Homo sapiens
ctctctcgctgtgagacatgtctgagactcctgctcagtgtagcattaagatgagattgtggggaacctgggtgaaggcacctttggcaaggtggtggag

SEQ ID NO: 810199 - DNA, 120 bp, Homo sapiens
cgggtatgaggctgggactaagccaagggattcaggtgtggtgccggtgggaactgaggaagcgcccaaggtaattgctctagcagatgcagtggaggaaaaccaaggcaatctgttcca

SEQ ID NO: 810200 - DNA, 98 bp, Homo sapiens
agccccaacggcgagacggtcatctcgagtagcgacgacgactccatcgtgctctatgactgccaggagggcaatactatactggcaattgctggaga

SEQ ID NO: 810201 - DNA, 100 bp, Homo sapiens
cttactataagaaagcattgcgtactaacccaggatgtccaggtcccagactactatgacatcatcaaaaagcccattgccttaaatataattcgtgaaa

SEQ ID NO: 810202 - DNA, 100 bp, Homo sapiens
gtgagtcaaaaggccccgtgatacaaggctctgtggatagcaactggatcgtgggtgccacgctggagaagaagctcccacccctgcccctgacactggc

SEQ ID NO: 810203 - DNA, 100 bp, Homo sapiens
ttcctctccactgccgcacagaattctccacccaggaagaggagcagcttcgagcccagggaggcagcgtccatggagcaaaaggaatgccaggatcctg

SEQ ID NO: 810204 - DNA, 99 bp, Homo sapiens
gcggcttcctagtgagtcggcggctgatttagaaggaggttcaggctacgggtcacggagactcaccagttggcagaattaaatgagaagaagaatgaa

SEQ ID NO: 810205 - DNA, 100 bp, Homo sapiens
tagaggcggctcctcatgatatcggctacgtcaaacaggccatgttccactatttccagagtggcagacgaaatgttgatttggatttggcagcatctca

SEQ ID NO: 810206 - DNA, 99 bp, Homo sapiens
tctggcacacgtcttagtccactagagctgccaaaattgcctggaaaagagcagtgagaggagtccgggagatgtgtgatgcatgtgaagcaacattgt

SEQ ID NO: 810207 - DNA, 98 bp, Homo sapiens
gttgcttgatcaggtggaacagattcagaaggagcaggattaccaaaggttaattatcttcacccccaaatccctgttgcgccaccccgaggccagat

SEQ ID NO: 810208 - DNA, 100 bp, Homo sapiens
agagacacagtatggtagccacacccccaggagatacaactcgtcaacgaatcaaattcagtgatgacagagtatgcaagagtcaccttctcaactgttg

SEQ ID NO: 810209 - DNA, 50 bp, Homo sapiens
gtgccacccccttttcccccgatccaaggcaagttgctccctgagctgct

SEQ ID NO: 810210 - DNA, 99 bp, Homo sapiens
cccggccatggcggacaacgagaaactggacaaccaacggctcaagaatttcaagaacaaaggccgcgacttggaggtccttatgtcgtcagaagatcg

SEQ ID NO: 810211 - DNA, 98 bp, Homo sapiens
gaacatctggaggctgggaaatgactaagcctggagtaattcgcccagtacctgtaaaatccagaatattactgaaaaaagaggaggaagtctatgaa

SEQ ID NO: 810212 - DNA, 100 bp, Homo sapiens
cttcctcctctcgaatgcagcagccacagatctctgtctacagtggttcagaccgacatgctgtacaggtgccgacgccaccgccgagcccatgatcctg

SEQ ID NO: 810213 - DNA, 100 bp, Homo sapiens
agaaaagcgagcctcttctgataactcaggatttacttgaaacgaaaggagaacccaggcaacttcagcaaatcgcagtcttctccaggctgacaaggcg

SEQ ID NO: 810214 - DNA, 113 bp, Homo sapiens
aacagtctgccctcctaattaatgggaccctaaagcattaccaggtttattacagaggtcagctgggaagagctaccactttaagtgtaactcctgaaatggaaagagtgaag

SEQ ID NO: 810215 - DNA, 100 bp, Homo sapiens
gacagaagcagccatggaaaaattaatcaacagagtgggacctaatggtgagaggtatggcgatttagtactgcattttgttctgttaatgaatggaaat

SEQ ID NO: 810216 - DNA, 100 bp, Homo sapiens
tcgtgtgcctgatgatcacgcagctggctggcttcagtggaccaggtgttaatctttatgtgaaaaatcttgatgatggtattgatgatgaacgtctccg

SEQ ID NO: 810217 - DNA, 100 bp, Homo sapiens
agagaatactgtgtggctgacttcaaaagagtagtggattttctgaaagagaacaattctgtggtgttcttggtcacacatttatggagtttctgaaggg

SEQ ID NO: 810218 - DNA, 101 bp, Homo sapiens
gtggtctaaggaagaagaagcagcagccagaaaaaaagtaaaagaaaactcagctgtgcgagtccttctggaagagcaagtggaaagagtggaacgagaaa

SEQ ID NO: 810219 - DNA, 98 bp, Homo sapiens
atggataagcatgccctgaaaaagtatcgtcgagaagcctatcatcggaggactgacaaatggtagtggtcgatatatctctgcagcacctggagcag

SEQ ID NO: 810220 - DNA, 98 bp, Homo sapiens
tactcgggcaagaccaccttcgtcaacgtgatcgcgcatatgtaagtggaactcagaaggcaacattccctgaacatactcttccaccagaatctcct

SEQ ID NO: 810221 - DNA, 113 bp, Homo sapiens
ccagatgaggtgatggcaacggccaacttcggcaagatccagatcgggatttacgtggagatcaagcgcagcgatgtcaccttcaggccattcagaggaggaaagagagggga

SEQ ID NO: 810222 - DNA, 98 bp, Homo sapiens
tcgaggctcagctggggataccgcgagcacaacgaactgtgccgcataaatgaggatcagaaggtggccctggatcttgacccctatgttaagaagct

SEQ ID NO: 810223 - DNA, 100 bp, Homo sapiens
tatgctgccaaaattatcaacaccaaaaagctttctgctaggggttctccatatcgagacaaaattaccatagcaattcttcagctgcaagaggaaggca

SEQ ID NO: 810224 - DNA, 101 bp, Homo sapiens
gagaaagagtggaagagaaaattgtgaactaaggccccctgcccccttttcctggtgcatgtgaagttatcaaaaacagctcaactgagaagtcatttcct

SEQ ID NO: 810225 - DNA, 100 bp, Homo sapiens
attttggtggggtgaagaccccagttttgctgaccttattcaccatgacttatcaggaaggttgtgcaggaccagcgttccctgtgcaggcgccactgcg

SEQ ID NO: 810226 - DNA, 100 bp, Homo sapiens
gagccgcacaaaccagggctcgccatgaagccagatcacccggaagttcaggctgaattctgaaggcaaacttgagcagacggtctccatggcaaccacg

SEQ ID NO: 810227 - DNA, 100 bp, Homo sapiens
tgcggagacagcggtgtcctgcgcgtcttcgggggaaggtgtggctcattgactttaatccatttggtgaagtcacagattcactgctgttcacctggga

SEQ ID NO: 810228 - DNA, 98 bp, Homo sapiens
gggaccccccggagcgcggccacggcgcaggaggagaacatttgcctgcactgggcggcgttctccggctgcgtggacatagccgagatcctgctggc

SEQ ID NO: 810229 - DNA, 99 bp, Homo sapiens
tgggagaaaccagatgatcttaaaacacctgctgaggaccctgctgggatctttgagcttgtggaggtggtcggcaatggaacctacggacaggtgtac

SEQ ID NO: 810230 - DNA, 99 bp, Homo sapiens
tcccagcagcccccggcccgcgctgcccgcactcctggtcctgctcggggctctgttcccaggccgccatggcatcagatgaaggcaaactttttgttg

SEQ ID NO: 810231 - DNA, 99 bp, Homo sapiens
ggtgatttctgcatttccatctgagcgtgggcttcctctaatattacaccgtaaaaggcattgatcaccataagaaggaacatttgtgaaggtactcca

SEQ ID NO: 810232 - DNA, 98 bp, Homo sapiens
aaaaaggaagcaaaggagactgtactgtactgaagcccacacttatggctgctgttccgatgcagtcatcatttacatcttcagaacaagagctagag

SEQ ID NO: 810233 - DNA, 100 bp, Homo sapiens
gagaggcagacaaacccatcagccatgcttgcaagtagaagtctcaggcaacagattaaaccagcagtgactataaagctacaccttaatcaaaatggag

SEQ ID NO: 810234 - DNA, 118 bp, Homo sapiens
ggtgctaaaaagatgccttcttcatttggctgtgataggtgctttgctggctgtgggggctacaaaaggtgaaatgacaatggatgctctgttggctcgattgaaacttctgaatcca

SEQ ID NO: 810235 - DNA, 100 bp, Homo sapiens
cttgtcccgggatcgctccgtcgcacccaccatgatggaagacgacgggcagccccggactcttttttggctttcacccccaaccagtgaccaaagactt

SEQ ID NO: 810236 - DNA, 98 bp, Homo sapiens
aaagtctgagagagggaagtcgcctctgtgctcgtgtgagatcaaccatgagttccgttgcagttttgacccaagagagttttgctgaacaccgaagt

SEQ ID NO: 810237 - DNA, 99 bp, Homo sapiens
ttccaacgccaccaattccaacctgctgtcaccactgactaaagaagagaaaactgcggcagagcaattcaaatttcacatgccagatttatgaagaaa

SEQ ID NO: 810238 - DNA, 100 bp, Homo sapiens
atgtcttcgcctcccgaagggaaactagagactaaagctggacacccgcccgccgaacctgtgagaagtttctacaatggtgggctcagctctcaggaga

SEQ ID NO: 810239 - DNA, 98 bp, Homo sapiens
tccgcgtgcccaggtccggcgacagggtctacaagaacgagtgcgccttctcctacgactctcccaaatgacctccaccttcaacccccgagaatgta

SEQ ID NO: 810240 - DNA, 98 bp, Homo sapiens
cttggccatgaccatctggattctcaaagtcatgaacttcacaattgcaaaagaatggaccccagcaggaaaagcaaagcaagagaattctgctaaga

SEQ ID NO: 810241 - DNA, 100 bp, Homo sapiens
tgctgtgggcgctgacgaccgaagtgagtgttgaaaagatagacctgaagggattatcacacacaaaaaatgacagaaatgttgaatgttcctttgaggt

SEQ ID NO: 810242 - DNA, 98 bp, Homo sapiens
caacctgctaccccatgccatcaacctgcgtgaggtcaacctgcgcccccagatgtcccagaacttggtagtcaagccagaccagctgatcaaacgtc

SEQ ID NO: 810243 - DNA, 100 bp, Homo sapiens
gaagaaaaagagagccacccctaatgggacccctagagtgctgctgtaggcagaagtcaattcatctggaaagactatctctgagtcagacttaaaccac

SEQ ID NO: 810244 - DNA, 100 bp, Homo sapiens
gacccgaggcaagctcacctacacccagcagctggaggacctcaagaggcagctggaggaggaggttaaggccctgaccctcatcatcttcatctgcttc

SEQ ID NO: 810245 - DNA, 100 bp, Homo sapiens
caagaacagatttcagggccaaccagacatctacaaagcattcctggagattttgcacacatatcaggcaccacctacctatgatgccgtggtacagatg

SEQ ID NO: 810246 - DNA, 101 bp, Homo sapiens
aagtttcataggataggactccctcctaagaaaatggtgtgaatggaacattaacttcaaatgtagcagactctccccggaataaaaaagagaaatcttca

SEQ ID NO: 810247 - DNA, 98 bp, Homo sapiens
agaaggacgcgcagtccatctctctcagtgccggtggtggtgtgcacattgagccccggtatagacagttcccccagctgaccagatcccaggtgttc

SEQ ID NO: 810248 - DNA, 100 bp, Homo sapiens
tgagactttctgtcgcatccaccagtgtatcagcattaagctgaccggttccctgatgtgttacctgcttctgctactgatccaaactgcagaacttctc

SEQ ID NO: 810249 - DNA, 99 bp, Homo sapiens
tgatctttaagatcgagcaaggagaagagccctggatattagaaaaaggattcccaagccagtgccacccaggtggaaaaggagggagctgctctcagg

SEQ ID NO: 810250 - DNA, 100 bp, Homo sapiens
agagagaagagggcagagccgtgcatggggctgctccccaggacctgagcaggaacctggagttttcagggtctccgtctctccaccgggggcttcatcc

SEQ ID NO: 810251 - DNA, 50 bp, Homo sapiens
tgcaagctcagcttggagggtgatacgccatcgtagtagaagcagggagc

SEQ ID NO: 810252 - DNA, 50 bp, Homo sapiens
ctgaaacccatgaactgcccaggacactgattttggctatggaaagggga

SEQ ID NO: 810253 - DNA, 100 bp, Homo sapiens
cgggatggtgccacaggaggctgtgcgggccccgctccgcttcgaatgggttaccatggcctctactgtgaggaggaatataatgagtgcctctccgctc

SEQ ID NO: 810254 - DNA, 100 bp, Homo sapiens
gataaagtcacttcagatgagaccagaggtgcggaaggaacagaaaggctagagatgaagatggacatgctgaaaattttccccagcagcactatgctaa

SEQ ID NO: 810255 - DNA, 98 bp, Homo sapiens
ccgatttcatgactaaccagtccatcatcgtctacagactgccgtggacctggaaatgcagcaagctcctgatgaaatccatccatgcagggttaaat

SEQ ID NO: 810256 - DNA, 100 bp, Homo sapiens
gaaggcaagaaaaatccaggtgccggaggagcagaaggaattacatgaatgacagtcttcgaaccaatgtgtttgttcgatttcaaccagagactatagc

SEQ ID NO: 810257 - DNA, 100 bp, Homo sapiens
agatttgtattcgatagaccactgcctgtgtctcgtcttgtatctctaattggaagcaatgtgtcgtggaggccgaatgtttgcaccaaccaaaacctgg

SEQ ID NO: 810258 - DNA, 99 bp, Homo sapiens
ctggtcacggccaacgtgggctcgctcttcgacgacaaaaagcttgtggtgaaggggggcaaaaaaaagaagcaagttctgaagttcactcttgattgc

SEQ ID NO: 810259 - DNA, 100 bp, Homo sapiens
agcaagtcaagtgaggatgaagaattggcagagggggtcgatttgggaggaaaggtgtggctataaactttgttactgaagaagacaagaggattcttcg

SEQ ID NO: 810260 - DNA, 100 bp, Homo sapiens
ggccggcgagcagatgagaccgctactcacccggatctttgatgatgcgtacaaatcccagctcagttgtgtggttgtggatgacattgagagattgctt

SEQ ID NO: 810261 - DNA, 100 bp, Homo sapiens
ctggggaacctgctcaaagccctgggtcgcttggaagaagccaaggctattcaagatctctggcagtggaggaagtctctttaagaaaatagtttaaaca

SEQ ID NO: 810262 - DNA, 100 bp, Homo sapiens
atttgcctccacttagtgagcggaagaatgattttcagctgaactctcatctctcaacactggcaaatattcataagatctaccacacccttaataagct

SEQ ID NO: 810263 - DNA, 100 bp, Homo sapiens
gcggcggcgcgcagcgtgtcaggcggagagacccgccgccagagcccccctccatgcgcctgaaggcccgacccagcagccctggcttttccgtgcttac

SEQ ID NO: 810264 - DNA, 98 bp, Homo sapiens
tgcatgttagtgctcaagagcctcattatctaccacccgagatgccccaagggaagaaggagaaagggccaacccctgaagaagcaatacagaaactg

SEQ ID NO: 810265 - DNA, 98 bp, Homo sapiens
cgctccaagagctccagcctgagccggctcgaggtgagaggccctccagctgcaggggcatttaaagaaagaccaaccaagcccacagcatttcgaaa

SEQ ID NO: 810266 - DNA, 100 bp, Homo sapiens
aaagattatgctcggtacagtaaagaggaagaaatggatgatatgctaaaagatggcggcaaggcagcccaggcaaatgtaagaataggcgatgtggttc

SEQ ID NO: 810267 - DNA, 98 bp, Homo sapiens
tcaaggctgcctataatcaagtaaaaacaatagctcaaggaaacctttccaacacagatgtccaagctgccaaattgttcagtttggcatgaatgaaa

SEQ ID NO: 810268 - DNA, 100 bp, Homo sapiens
gattgctgcataatttaaatgaaacctatgtgtatataactttcaaaacttctttttcaagaaactaagagatacagcagcacgtctttcctatcagaat

SEQ ID NO: 810269 - DNA, 100 bp, Homo sapiens
tctatttattgtactgtgaataatgatgaaggagagtggagtggcccaccacctgaatgcagagcggagcgtgctttggacaccatgaattttgatgtta

SEQ ID NO: 810270 - DNA, 99 bp, Homo sapiens
gaattcagaaggatatcgacgtcgtgatccagaagtccagagctgaggactgcctgtttgcaggtagtttctctccctggctcatcttgcatgcttgct

SEQ ID NO: 810271 - DNA, 100 bp, Homo sapiens
ggaaacctctggacctctatcgcctctatgtgtctgtgaaggagattggtggattgactcaggtcaccaagaagttctactcaatgggctgctacgagat

SEQ ID NO: 810272 - DNA, 100 bp, Homo sapiens
ccctgggtgaagtgctccgccgcccttgcctccagatggaggagatgtataagaaagctcatgctgctatacgagagaatccagtctatgaaaagaagcc

SEQ ID NO: 810273 - DNA, 100 bp, Homo sapiens
aaccatctcagaagccatgcccctcaggctggaacttgccctgtctcctcgcagatgagggtcccgggattcttgagctgtgcccagctgacgagctttt

SEQ ID NO: 810274 - DNA, 98 bp, Homo sapiens
aatacttgctggatggtggactcagagaccaataaaaataaactgcttgaacatcctttgactggttagccagagagcgcgccagccttggaaggaat

SEQ ID NO: 810275 - DNA, 100 bp, Homo sapiens
tgtcttgcaaagtgttggaggacagacattaacagtatttactgagagctcatcaggcctttgcccagtttgatgctgagggtgatgggacagttgatgc

SEQ ID NO: 810276 - DNA, 98 bp, Homo sapiens
acttatgctggaaggagacgatgatgcagtcagtctgctacaggagaaagaaattgacaaccttgcagatgttcctgcagcagccagctgtatccctg

SEQ ID NO: 810277 - DNA, 100 bp, Homo sapiens
tgcttcaatgtgggccgggagctgtacttctatatctacaagggggtccgcaagactgcaataaggtcactgatcagtgcctgtccttcttcaaacgctg

SEQ ID NO: 810278 - DNA, 100 bp, Homo sapiens
tctggctctgcgcggtggcagcggcggcggcggcgcggggaccgaggtcaccgacgatgagggcgcacctgctgtcctggagcttccgatctctgttcgg

SEQ ID NO: 810279 - DNA, 98 bp, Homo sapiens
gcagagcccatagccaccttctatgggttaaggcaacagagtctgatcactgcgcatgagcagttcaaggccacgctgcccgaggcggacggagagcg

SEQ ID NO: 810280 - DNA, 100 bp, Homo sapiens
acgagaagcgcagcaacgtgcggtgggaccacgagagcggctacaagaagcaggcagcactgaagctgggggacatcagtcaccgtctgctggagcagca

SEQ ID NO: 810281 - DNA, 100 bp, Homo sapiens
gaagcagctttcttgaatgtctacaaaagattgattgacgtcccagactgcctgcgctgctgacttaaggccccaacaccaaacacagaagcaacagcct

SEQ ID NO: 810282 - DNA, 98 bp, Homo sapiens
ctggcggagcctgcgtgctggtgatcgcgctgatgttcctggcctggggggaagagtatgttggataaaggacattgttgtggcagtaactggagaga

SEQ ID NO: 810283 - DNA, 100 bp, Homo sapiens
ctgtttgcaacactgtacatcctctgccacatcttcctgacccgcttcaagaagcctgctgagttcaccacagaggccagtcaccactgcacattttggg

SEQ ID NO: 810284 - DNA, 100 bp, Homo sapiens
tccctccacgcggaaagaagtaccttcgccggtcaccggctcctgcaggaaggagctggcaaacagccctgactgtccccagatgtgtgcctataagctg

SEQ ID NO: 810285 - DNA, 100 bp, Homo sapiens
cgtttgaaggcttccacaccctctactccagggttatcctaccttgcggatagagaagaacgacttgagaagtgtcactcttttggaggccaaaggcaag

SEQ ID NO: 810286 - DNA, 99 bp, Homo sapiens
ttcagggagtgcttttatattcccaaaatacaggatctgcctccagatcaaatttttggctctcatctgcacaaagtgtgtgaacgtgaaaattccaca

SEQ ID NO: 810287 - DNA, 100 bp, Homo sapiens
cacgttctaggaggaggaggactccctcatcttctagacacaggagtttcgatacgatgaatttgatggctccatctttactatacctgatgactacaag

SEQ ID NO: 810288 - DNA, 100 bp, Homo sapiens
atccaccgtcaggcataaattgattattcctcgcccacatctgtgccaggaggccttacatcgggaacaaatgttggaacagaagttagccacgcttcag

SEQ ID NO: 810289 - DNA, 100 bp, Homo sapiens
tttccacctgtctggatggacaggtcattggctctgccaagaaggccaatgatgaggccaatcagagtgatacaagtgtctccttgtcagaacccaagag

SEQ ID NO: 810290 - DNA, 98 bp, Homo sapiens
gattactcatcctagagactacagtggagaaatggaagggaaacattcccagatcctcaaactatcgaagtaaacatatagatggtagtctggctctg

SEQ ID NO: 810291 - DNA, 100 bp, Homo sapiens
tggagtttaaaaagcttgcaaatcagaattcaagccgcagctgtggcccctctgatcatgagcgtcttgttgttcatcgagcactcagtagaggtggccc

SEQ ID NO: 810292 - DNA, 100 bp, Homo sapiens
gcctcgagcagtttattaacaaatttcctcgtcctgtgactgtggagcccatggaccagttagatgatgaagagggacttccagagaagctggttataaa

SEQ ID NO: 810293 - DNA, 98 bp, Homo sapiens
tactgaagcccccagaagatgaggctgagcattacaagacagagtgggaagctttggagctgacggatcaccagtgggcactagatgatgtcgaagaa

SEQ ID NO: 810294 - DNA, 100 bp, Homo sapiens
acaaaggctttgccgcagttcatcttcctccctgtgtactttccatttgccttcctggcctacttctgcttcctcctggccgctctgggtgtgacagctg

SEQ ID NO: 810295 - DNA, 100 bp, Homo sapiens
aacaaaaattgttttttctacctgttgacgtgtcaagcactaactgtagctacagcaagctgggtagcaggcagatccaaaggatatcatgaagtttcca

SEQ ID NO: 810296 - DNA, 99 bp, Homo sapiens
tcaatgatcgtgtcatgagagtgaatctgtctctgtcatcaagcacactgatcccgtccctgacccacgagctgtcaaccaagataaaaagaacatgct

SEQ ID NO: 810297 - DNA, 98 bp, Homo sapiens
agaggtggaggcgctttgaaaggactcacaccacccggcaagaactgctcactacggctccctgccccagaagtcacacggccggacccaagatgaaa

SEQ ID NO: 810298 - DNA, 100 bp, Homo sapiens
tactctcaaaatatttacttatatcaattcctggacacagagctacatcaaatgggtctttggagggcctggataaccaggagggaggggtgtgccagac

SEQ ID NO: 810299 - DNA, 98 bp, Homo sapiens
tccatggctccaagtttaaaagaactacgtgttttatccaacagctgtcccctttcctccaacccaacggcttactttcaaggaagtatttgagaatg

SEQ ID NO: 810300 - DNA, 98 bp, Homo sapiens
tgatgagacttatatgatgcaagatgtggcagaagaacaagaagttgagaccgagaatgtggaaacaggtataaatgaccaaggattgtacagagttg

SEQ ID NO: 810301 - DNA, 129 bp, Homo sapiens
gaatccccacgaggccctggctcagcctcttcccaccacaggcacaccagggtcagaaggcaaccccagctttccagacagtcacttttcccagtggtcatacctggtctggaagattccccatcatct

SEQ ID NO: 810302 - DNA, 98 bp, Homo sapiens
agtgaagggcataggatccggcaaagtcctgaagaggtggtcttcgagggatagcacgaggtggtctgacaggactaacacttaccagcctctatgca

SEQ ID NO: 810303 - DNA, 100 bp, Homo sapiens
tcagaacctgtcgggctctccactcattacggtccacctcaagcacagattggaagatgagaatgtgcctactgctcctgatcctccaagtcaacattta

SEQ ID NO: 810304 - DNA, 100 bp, Homo sapiens
cggggacttcactgctctgctgtctcctgcaagaactggctcaagaaatttgcctcgaaaaccaaaaccgcatgcacgagtctctcatgctcttcgactc

SEQ ID NO: 810305 - DNA, 99 bp, Homo sapiens
ctcgtctctccccgaggccccactgaagcccccgggcccactggtgccacctgaccagcaggacaaagtccagtgcagcacgctggctcttctcctgaa

SEQ ID NO: 810306 - DNA, 98 bp, Homo sapiens
catttttcttttttccattcttcaggaccttcggcaaggcactgttatgtggtatacttgttacatgtcctgaggatccgctgaggtatttagaggga

SEQ ID NO: 810307 - DNA, 100 bp, Homo sapiens
atcattagttcagtgcagtgtctgacttgtgacaggataacgaaggaggcccaacttcattcaataaggagcctgacggatttatcccagacggtagaac

SEQ ID NO: 810308 - DNA, 100 bp, Homo sapiens
gaaaaattacagcacatctcagtgaatttgcaagtgtgcacttgcaggaaagacatggtgaagatttcaatggatatctttgtgaggaaatttcagccag

SEQ ID NO: 810309 - DNA, 100 bp, Homo sapiens
ctactaagcaccgttggtatcctcatggacgattcagaatggacagtttagaagaacctcagaaaaaagtctttaaggctcgaaaaacgatgagagtgag

SEQ ID NO: 810310 - DNA, 104 bp, Homo sapiens
ccagcggctggagctcctgaagaaggaggccttgcggaaccaccagacgccccgcgtgcccaaagagctgaaaagattaagcattctattaagaaaacagtaga

SEQ ID NO: 810311 - DNA, 100 bp, Homo sapiens
aagttcagccagtggtcatcagagaagactctcttagtgactcttccaggaagcttttgtccagtgatcgaaatccaccaattgatgacttaataaaatc

SEQ ID NO: 810312 - DNA, 100 bp, Homo sapiens
tggctgtgacctgacggagtatctggaaagctcgggacaggatgattccaggagggcttcgtgtatggacctcaagcgttggaggtagcagacttttcag

SEQ ID NO: 810313 - DNA, 99 bp, Homo sapiens
agaaaatagcaaacgatccagacggcagggagtgcatcaaaggtgtgaacacaggttcttgggtgtctctggggagtccctgggccagaccttcctcca

SEQ ID NO: 810314 - DNA, 99 bp, Homo sapiens
gggtcatctccagatgctagggttatgggtttccctaggacttctgcatgcccatgccacacatatcctgtggcccccagagcgctggcagaaattgga

SEQ ID NO: 810315 - DNA, 113 bp, Homo sapiens
aacgtcaaagaaagcgccgctcatgactatacgctaagagaacttaaactttcaaaggttggacaagtcattcccaaaagcaagttcgtcttggtgaagttcgacacccagta

SEQ ID NO: 810316 - DNA, 100 bp, Homo sapiens
tttgggaggagtatgccaaccagcatggccctggacagatggcccactgcgtgaccttggttcagctgtccatttcctgtgaccatctcattgacaagga

SEQ ID NO: 810317 - DNA, 98 bp, Homo sapiens
caagtaactggcagaagttttggtgataaagattttcggacaggtttagaaaatggaatcctcctctgcgattaataacgacatgatagtcactgaca

SEQ ID NO: 810318 - DNA, 100 bp, Homo sapiens
cttgctcttcagtctttaatttctaaccagatacaagaacgcgtatcacaatgtgactgcagagcagctctttttgaaggacattatagaaaaaaacctc

SEQ ID NO: 810319 - DNA, 99 bp, Homo sapiens
gtcttcaggaagccaacagtgccatcatgtatctaagaccctggagaggcagatgcagcctcaggaccagctgagagcagggctgagggagggctccga

SEQ ID NO: 810320 - DNA, 100 bp, Homo sapiens
gcctctttgcagaatttgctgttcaagctgaaaagaaaattgaagttgtaatggccgaacccttggaatactttcaagtcatcccaaatatggttccatc

SEQ ID NO: 810321 - DNA, 99 bp, Homo sapiens
ccgtggctgctcgataaatcagacagaacagttaatcctcaatttaagcctgatctaacccctagaaacagctatcagttgagggatttgcagttgata

SEQ ID NO: 810322 - DNA, 100 bp, Homo sapiens
gccccgtaaattggaaggatgcacaagttccaaggttacgtttcagtggcagatatgctgttggagctctgtgtcaccgagttggaggatgtggccacag

SEQ ID NO: 810323 - DNA, 100 bp, Homo sapiens
cccatcccctcgaccgctcgcgtcgcatttggccgcctccctaccgcacttctaccctagccgggcccagcccccgagcagtgcagcctcccgagtgcag

SEQ ID NO: 810324 - DNA, 98 bp, Homo sapiens
gcaatcaagttagcccaacaaggaaacctcttagaaaaaagagtagatgtatcggcaagcagtgtaaacggaggacttggggaaaaaggaccacatag

SEQ ID NO: 810325 - DNA, 100 bp, Homo sapiens
gctgcggatgctgctcaaggccaagatggacgccgagcaggatcccaggaacccatattgaaatgtctattggaattattttgggaatttcaactatggc

SEQ ID NO: 810326 - DNA, 98 bp, Homo sapiens
ggagtaccgccacctccccgctgggtggggagaggcccttcaggcatctccagctgccctggcaaagagcgtgctggctgaagtcccaaaccaagttg

SEQ ID NO: 810327 - DNA, 98 bp, Homo sapiens
ctgccatgaccactgtggagaacaaatccaagattagcacaggtctcctctgagcctccggcctccataagacccaaaacagatgacacctcttccca

SEQ ID NO: 810328 - DNA, 113 bp, Homo sapiens
caaaggcggctcgggagattcagccgtgaagcaagtgcagatagatggccttgcatttattaatacagcaaaagaaatttatgaaaaaattcaagaaggagtctttgacatta

SEQ ID NO: 810329 - DNA, 99 bp, Homo sapiens
tcgagtttagccacaccaggctggagaatatggtgcagaggccctccacggttacaacctgccatattcattcatccagtgatgatgaaattgacttta

SEQ ID NO: 810330 - DNA, 98 bp, Homo sapiens
ctggaactgacggatacaaacaacattgcctacttatttctctcagctgccaacagatggctggaggtcaggacgattgactttgaagatgtgattgc

SEQ ID NO: 810331 - DNA, 98 bp, Homo sapiens
acagggcaaggcggcggacggctgcgtcgcccgaggcgaggaggagcgctggcggtgttgaaaagtctcctctagagctttggaaggctgaatgcact

SEQ ID NO: 810332 - DNA, 100 bp, Homo sapiens
tcaaaggagcagggaagaaggaatcatcgaggcatgggggtccacactgcaatgtttttgtggaacatgggtgtggagagaagctcgggaccgcatcgtg

SEQ ID NO: 810333 - DNA, 100 bp, Homo sapiens
ggccacagcagccaggcagcgggaccatgagatttctctatgaatcatcatcaagaactctgggagaacttttgaattcataaccaagccaacatctcca

SEQ ID NO: 810334 - DNA, 98 bp, Homo sapiens
ctatttacccagaagtagtccatatgggccttaaagcggctgacaatgaccccacagctccaccatatgactccctgttagtgtttgactatgaaggc

SEQ ID NO: 810335 - DNA, 98 bp, Homo sapiens
gaaacccacaggaggcaaccacactagtttagggagttctgggaaatcgttcattcatttacagatgaacagaaaagactcttcttgcagtttacaac

SEQ ID NO: 810336 - DNA, 100 bp, Homo sapiens
gaaagattctgccagaagaagagtgaagaactgaatgtcatcatgtctggaatcaagcgaaccatcaaagaaaccgaccctgattacgaggatgtatctg

SEQ ID NO: 810337 - DNA, 98 bp, Homo sapiens
cagacgttctagaagtgcaagcaggctccgtgtgtttgacagtggcgtcatggtaattgagcttcagtctcacaaggaagaggaaatggtggcctcgg

SEQ ID NO: 810338 - DNA, 100 bp, Homo sapiens
gcaagtttacgacaaggaggttcagtggacccttggagccatcctctacaggacccgctttctaccattaagcacaatcctggaggaagagaaggctcag

SEQ ID NO: 810339 - DNA, 99 bp, Homo sapiens
ggctgatatgcaatgtcacttacaacattaatcagatactgcatttaagagcaacttatgactctcatctctgctgcacgagaatatgagatagagttc

SEQ ID NO: 810340 - DNA, 100 bp, Homo sapiens
gaagccttttccgttgccggtgccggcctagcgtcctggaattacttcaatcaagtgttatttggaagatggagcttcaaagggtgcctggctgaaccgg

SEQ ID NO: 810341 - DNA, 98 bp, Homo sapiens
tgtcagcttttggactccctattgtatttgccagagcacatctgagatggacagagacgtatgtgcgttggtctcctaagggcacctacctggctacc

SEQ ID NO: 810342 - DNA, 98 bp, Homo sapiens
ggggactggcctggcgtgcactccgcacctcggggacattattgcgcgtggaacggctgcttttggaaggaaccaaccggtgagccctctcctaagag

SEQ ID NO: 810343 - DNA, 98 bp, Homo sapiens
ccaaattcagaagctcagaacgctggactctccctttgcagcacaacattctgaaattttttggttattgtaatgatgttgatcgggagttgagaaaa

SEQ ID NO: 810344 - DNA, 98 bp, Homo sapiens
tttagtcttcatggattaattgagtacttccatttagatatgatgaaacttcgtagatttttagcctcggtgtctggatgcccagcctaaccaagtca

SEQ ID NO: 810345 - DNA, 100 bp, Homo sapiens
acttaagggctcccattgtgagagctagtggtgtggaacacaaggtgctactcacaggaacaccattgcaaaatactgtagaagaactgtttagcttgct

SEQ ID NO: 810346 - DNA, 100 bp, Homo sapiens
ctgggctggggctcgctgctcatcatgctcaagtcagagggcttttactcctacctgtgtaccgagccagtacgaggatgtcgtccaggaaagattgtgc

SEQ ID NO: 810347 - DNA, 100 bp, Homo sapiens
aatccgcttacttgcaatcaagggttcaggtgcaagcagatgctgactcagcctgttccattaaggttgcagagcctgaggcctgtgatcagatgtacga

SEQ ID NO: 810348 - DNA, 100 bp, Homo sapiens
cagacgccgacgtcgaccagcagagactggtattactcagcacagaaattcaggagacacagacaagttcttccacgatgtcgtacagacgagaactaga

SEQ ID NO: 810349 - DNA, 99 bp, Homo sapiens
ctcaatttgctggatttaagcactgctgcactttatgagggttctgagcaaggttcaaccagtcaagaacaggccttatctgctcagcaagctgctgtt

SEQ ID NO: 810350 - DNA, 98 bp, Homo sapiens
acaagtgcctggaagagttctatgcactctgtgaccagctggagctgtgcctgtggaatgcagtagccctctgggcctgggatattgtggttgataac

SEQ ID NO: 810351 - DNA, 98 bp, Homo sapiens
aaggaggcaatgcggcggccacagattgacaagaaaggacgggctgtctcatggaccttctctgagaccccaccaacaactgaacgctttggtcaggc

SEQ ID NO: 810352 - DNA, 100 bp, Homo sapiens
acatgacaattccagaggacatccttggggagattgctgtgtctggtcgagggacctcagactgaatcaaagaatgaagcctcttcccgtgatgttgtct

SEQ ID NO: 810353 - DNA, 108 bp, Homo sapiens
atcatgaagctactaaccagagccggctctttctcgatgtatcctccactcctcgctggccaccatcctgctgcccaacagaagaagctcttctgtctccgatttcct

SEQ ID NO: 810354 - DNA, 100 bp, Homo sapiens
cacaaagacctcctcctccacaggggagacagagagacacctatggctgccgatgaaggctcagcagagaaacaggcaggagaggcccacatggctgcgg

SEQ ID NO: 810355 - DNA, 98 bp, Homo sapiens
ggctactacctggacatcagcctctacaaagaagtgactgactccagatctggaaatatttcacaaaggagatgtcctcatcactgcgtcaactggaa

SEQ ID NO: 810356 - DNA, 99 bp, Homo sapiens
aaacttgaaactgtttgggaaatgcaacaatccaaatggccatgggcacaattataaagttcaatcccctgtctcccctttactccctggatgttcttg

SEQ ID NO: 810357 - DNA, 100 bp, Homo sapiens
cgggcggtggccgcactgggaccccggaatcccgcgcgctgcccacgattcgcttctgaggctgaagccgacgtagcttctctgaacagacgcatccagc

SEQ ID NO: 810358 - DNA, 51 bp, Homo sapiens
cgcggcggccgcagctgccacaaaccagtactatactggcaattgctggag

SEQ ID NO: 810359 - DNA, 98 bp, Homo sapiens
tctgctgggggagatggaggcgaagacaagagagctcattgttaaaagatgttgatactcggaaaatcataaaagcaatgctttcttatgtgtggccc

SEQ ID NO: 810360 - DNA, 100 bp, Homo sapiens
gctgcgtacgggttcatgcaatttaatcccatggaatcaatcaaattaaatcatcatgactacattgattccccatcgctgaaggacagaattcattgtg

SEQ ID NO: 810361 - DNA, 98 bp, Homo sapiens
aaaaatgaagatttaaccgagttacttaatggcatggatgaagagtttgaaacagctgagacacttctaaattcagaagttcatatgcttctggaaca

SEQ ID NO: 810362 - DNA, 98 bp, Homo sapiens
gaacgaagattcgaaaagccacttgaagaaaagggtgaaggaggcgaattttcagttgataggaggcaagtgaggcctatctggttggcctttttgaa

SEQ ID NO: 810363 - DNA, 50 bp, Homo sapiens
tgagcttcctggagaagaggaagtgtggacgaatgtggaacctcgctctg

SEQ ID NO: 810364 - DNA, 100 bp, Homo sapiens
ttgtgagccgtcagtgaaacacttagagcagtttctggcacatggttgattcttcaccacactgaaaccattaggaaaaatccttgtggttaacagcaga

SEQ ID NO: 810365 - DNA, 100 bp, Homo sapiens
atatgcctgatgttgctaaatgtagacaatggttagagaagaattttccaaatgaatttgcaaaacttactgtaggtgcagattcactttataggaacag

SEQ ID NO: 810366 - DNA, 100 bp, Homo sapiens
atgcgctcgggctggaccagcagtcaccttcaggccattcagaggaggaaagagaggggaatatgaagtcagccaagccccaagtgaaccacagtcagca

SEQ ID NO: 810367 - DNA, 100 bp, Homo sapiens
aaatccaacttaccttgtcattgcatgatatctcagaatcggaatttctaactgaagctgaaatcatttgtgatgttgtatgcctggtatatgatgtcag

SEQ ID NO: 810368 - DNA, 100 bp, Homo sapiens
gcgcagctatcggtgctttgcaggcgatcatggctcagcttccccaggagcaaaaagcgaagattgcggaacaggtggccagcttccaggaagaaaagag

SEQ ID NO: 810369 - DNA, 98 bp, Homo sapiens
ctgaaccagctcgtcctggagcacctgcagctggcgcctctgcagtgggattggcagattgctactctggctttactcctgggcggcgctgccatcat

SEQ ID NO: 810370 - DNA, 100 bp, Homo sapiens
aggaccgtggcaggagacaggctctggttacagatccagtttgctgaccagaagcaagaattcaacaaacgtcccaccaaaattggacgtcgctctttgt

SEQ ID NO: 810371 - DNA, 100 bp, Homo sapiens
tggcttatgagtacctttgtcatttggaagaagcgaagagtcgcccatgtttgatggaaaagtcccacactggtaccacttctcctgcttctggaaggtg

SEQ ID NO: 810372 - DNA, 100 bp, Homo sapiens
cttgtggaactgaacttagctcgacggggctgaccgctctggcccagggtggccgccatggcatcagatgaaggcaaactttttgttggagggctgagtt

SEQ ID NO: 810373 - DNA, 98 bp, Homo sapiens
acttcgtgtggaaccgcacgcgtggcatacggaagtctattatcctcccagtccacaacgctgaaccgtggctggacgaatgtttgaggtctgttttg

SEQ ID NO: 810374 - DNA, 99 bp, Homo sapiens
gcggcggctctctggtccgcagcggcaacagtaacgaaaaacagggctagtgatcagcagctggactgtgccttggacctaatgaggcgcctgcctccc

SEQ ID NO: 810375 - DNA, 99 bp, Homo sapiens
gttagtgaagcgcgcccggcgtcacggtattaggggaatattcctacctcttagataaggaaacgccagaggaagttatagctaagctctacaagttac

SEQ ID NO: 810376 - DNA, 100 bp, Homo sapiens
gaccacagtcatcgagaggaccttccacgtggattctccagacgagagaaaagtcctccatacattttctccccaattccattccttgggcatgccatag

SEQ ID NO: 810377 - DNA, 98 bp, Homo sapiens
tcaaaactcttcccagtctgctgacggtttgcgctagtatgccaagatggaaggaagcctcatacagtgagattaataatccgtcggtattcctctga

SEQ ID NO: 810378 - DNA, 99 bp, Homo sapiens
cggtaacaccgttcacagagctagccggacgtcctccgactcaaggtacatccaagcagaagtccagttccctccaggtagcagatcaggacctactgc

SEQ ID NO: 810379 - DNA, 99 bp, Homo sapiens
gaatgaccaaatttacgccatgaaagtggtgaagaaagagctggtgcatgatgacgaggtttggtgcacctcgatttggaggaagtagggcagggccct

SEQ ID NO: 810380 - DNA, 100 bp, Homo sapiens
gaggaaggcatggactcggagattggctgcctcatccgcttctatgcaggcatcagatgccagctctgaaaaactcttcaacactgttattgtaaacaaa

SEQ ID NO: 810381 - DNA, 98 bp, Homo sapiens
tcttcatggagacacagatcacggcaatgaccgtgtggctgtccacagccccgacagagcccctgacccactggtaccaggtgcggtgcctgttccag

SEQ ID NO: 810382 - DNA, 100 bp, Homo sapiens
cgaggactacccccgcttctaggatcaccacgatgaatgacacggtaactatctggaccaggaagttcatgaccaatcgaccgctccagaggaaacaaat

SEQ ID NO: 810383 - DNA, 100 bp, Homo sapiens
tacggactctgacctttgaagatatccctggaattcccaagcaagcaagtctggaaaagtttgaaattccagtaaaaattcgtttgagtcctgaaccgtg

SEQ ID NO: 810384 - DNA, 100 bp, Homo sapiens
tgcaggtattgggagatgcacagctaagatgccaggaccacctggaagcctagaaatggactggaaggatcaccagcacatatgcggccagtcagcagct

SEQ ID NO: 810385 - DNA, 100 bp, Homo sapiens
tgatccagaagtccagagctgaggactgcctgtttgcaggtgcagttttgccaaggagtgctaaagaacttagatgtcagtgcataaagacatactccaa

SEQ ID NO: 810386 - DNA, 99 bp, Homo sapiens
gtcttgaagacttccgagtagattcactgtgtgcccagtattctgcagacaaacgagaagatgagaagatgtgtgatcatttgataagagcagcaaaat

SEQ ID NO: 810387 - DNA, 100 bp, Homo sapiens
ctcgttccttcttcagtcctgctcgtcggaggacccggttgccatggtgaaggaaaaaggtgcttccagaggcagggctatgctcacattcatggcctct

SEQ ID NO: 810388 - DNA, 100 bp, Homo sapiens
aagctcgtttaactgacaaacatcaatctattgaagaggcaaagtctgtggcaatgtgtggatatgggcactgtggtcctgggaaagctggaatcaggat

SEQ ID NO: 810389 - DNA, 100 bp, Homo sapiens
accgtttgcccagcttccagcagagctgcaggtcggtgagctggtaaaggttacgaagattaatgtgagtggtcagtgggaaggggagtgtaatggcaaa

SEQ ID NO: 810390 - DNA, 100 bp, Homo sapiens
catggtgatataaaagcagcaaatctacttttgggttacaaaaatccagaccagtatcctagaaggaaaacatcaccatggctacagaaattggttctcc

SEQ ID NO: 810391 - DNA, 100 bp, Homo sapiens
acaaccgacaagtgagactgtttgatatgtcaggagtgcgcctggcgcggcttccccggagcagccgacaggttgagataagtcgaagagtgactctgga

SEQ ID NO: 810392 - DNA, 100 bp, Homo sapiens
aagaagatcgccaagagatcaaagataaaatcttttgtgaaagtgtataactacaatcacctaatgcccacaagcgtggagattggtgaaagcgtgagag

SEQ ID NO: 810393 - DNA, 100 bp, Homo sapiens
caggccctgcaggacctgctttcggagtacatgggcaatcctaacaggacgtattatctgatggaccccagcgggaacgcacacaagtggtgcaggaaga

SEQ ID NO: 810394 - DNA, 100 bp, Homo sapiens
tataagcacagcaggacaccaggacctggcctgaagacatttcctctcctcccctctggatttctcagagctgttcgggggtcttgtctggattttggtt

SEQ ID NO: 810395 - DNA, 136 bp, Homo sapiens
ggacttcatctcattgctcagcgcggacctagacctggaatcgcccaagtccctctactcgcgagacccgtgcctgtatattccacgctttgcgcacctgctggaattcggggagaagaaccacgaggtgtccatg

SEQ ID NO: 810396 - DNA, 100 bp, Homo sapiens
gatcacagagcctatttacccagaagtagtccatatgctccatgatgcgttatctgggtctggaaacccaaaccctcaaggatggcctggcgcatggggg

SEQ ID NO: 810397 - DNA, 100 bp, Homo sapiens
tgatgaacagatgttcccttgtcgattcattaaaatagtttctctgcaggtggatattgttcccagccagggggagatcagcgttggagagtccaaattc

SEQ ID NO: 810398 - DNA, 100 bp, Homo sapiens
gttcctgaggatttccaagagcaaggatgaaaaattgaagtcacagcccctcagcaccaagcagaaggaaagaccacagcaagattctttcattcgtctc

SEQ ID NO: 810399 - DNA, 100 bp, Homo sapiens
tgaaaatgaattcaacataccattaggatcttaccgagataattgacgaccttgccaacctagtggagaacacagatgaaaaacttcgcaatgaaaccag

SEQ ID NO: 810400 - DNA, 101 bp, Homo sapiens
cgtgccgcagatgcccaccggaatggagaaggaagaggagtcgtcatccgtccttggctcaggatttggagagcttgcaccaccaaaaatggcaaacatca

SEQ ID NO: 810401 - DNA, 98 bp, Homo sapiens
aaggcaaggtggtggacctgctggccacggacgccgacatcatcagccgctgccaggctagggaacctcgccctgcaccagccccaatcagacgccgc

SEQ ID NO: 810402 - DNA, 100 bp, Homo sapiens
caagtatgacttcataatggagaccaagctcaaacccctccggaagtttggaaattttagcattcaggtgccaggaatgcagatgggacagccagtgcca

SEQ ID NO: 810403 - DNA, 98 bp, Homo sapiens
aaatgccctcacaccagacctacggagggagctggaaattcctgacgttcattgatctgttggggttagacttggaggaactcgaggagatagaagaa

SEQ ID NO: 810404 - DNA, 100 bp, Homo sapiens
gcgggattgatgtgcaacaagtgtctttggttataaattatgatctacctaccaatcgtgaaaactatattcacagacttcacagagaatgcagttgtct

SEQ ID NO: 810405 - DNA, 98 bp, Homo sapiens
ttccatgctttgtgtcacagcctgctgctgcatcagatctgttgctgcactcagcactggtgcaggagaccgcctacatcgaagaccggcccctgcat

SEQ ID NO: 810406 - DNA, 100 bp, Homo sapiens
gatagatactgtgaagctgctcgctcagaaatacaagttctggaacatctgaatacaacagaccccaacagtactttgttgatgataattagaagcatgc

SEQ ID NO: 810407 - DNA, 136 bp, Homo sapiens
tcaggaaaactcgtgtccatcaaaatccagatgctggatgacacccaggaggcatttgaagttccagtgccaatgggtcatgtttggttagaaggtgacaatctacagaattctacagattccaggtgctatggac

SEQ ID NO: 810408 - DNA, 100 bp, Homo sapiens
ctctgaaccaggacctggacccggacccaaagtgccatgtctttaatatcatggaagggaagtggttgctgtgtatgttactggtgcttggaactgctat

SEQ ID NO: 810409 - DNA, 100 bp, Homo sapiens
gagcgtccagacatcagttccatccagagacgtattaaggtggtggaggtggatacagcagtcggagaacatctggcagagacaaatacggaccacctgt

SEQ ID NO: 810410 - DNA, 100 bp, Homo sapiens
gcatagaggctgaggctggggccaggacccagacagagacacacggtcactgcagctgaagccgctgcccctgctacagatcaactcccttctcctgacc

SEQ ID NO: 810411 - DNA, 99 bp, Homo sapiens
aattttacccaagaccaggaactcctgctgcaaaaatggaacaagttccagcacaagtgcatctgacagatacgtctcatggtgtaagaaataagtgcc

SEQ ID NO: 810412 - DNA, 120 bp, Homo sapiens
aaagtgttcccaacacacctttgagaccaaatcagcaatctgtggttaatagtctagagatgatcgctatggaaaatcctgcagacttgaagaagcagttgtatgtggaatttgaaggag

SEQ ID NO: 810413 - DNA, 100 bp, Homo sapiens
gggcggatactgcacctccggaagagggccttccaggtgtcagttgtacccgaggcgttctcagcagcagcaagtacctgtggtggatttccaggctgaa

SEQ ID NO: 810414 - DNA, 100 bp, Homo sapiens
aacatacccatttaatccccctaaggtgtttttggctgaatacacaggacctctgctaatatacctcctcttttatttgaggatcccatgtatatatgat

SEQ ID NO: 810415 - DNA, 98 bp, Homo sapiens
tgcttcctgagccactacaacatctggaaggaggacagtcattttgtttactcattcagccctgttgcaggtcccaataaactcttcataaggttgac

SEQ ID NO: 810416 - DNA, 99 bp, Homo sapiens
ccatcgttgctgccttcttcgtcaagatcactggggtgatcctgctggctgttggagtctggggcaaacttactctgggcacctatatctcccttattg

SEQ ID NO: 810417 - DNA, 98 bp, Homo sapiens
cgaagtgcgcaaacttgacactcaccctgaccggtggggaccaaggcatactgaacacattttttagcagctgggcaacaacagatatcagaaaacac

SEQ ID NO: 810418 - DNA, 115 bp, Homo sapiens
agcagctgccggagcccgagtggatcggggacggagagaacacgagcccatcagcctcctctattggcccaggaagcccacccagccccgccacgcagagcccagaaggaaagaa

SEQ ID NO: 810419 - DNA, 100 bp, Homo sapiens
attgaggttcttgactcacttcagagcaaagcaaagctgctcagctccgggaagcagtttgttcgctatataaacatgttgataaacgacacgacgtttt

SEQ ID NO: 810420 - DNA, 100 bp, Homo sapiens
ggaacttttcaactgacttttacttttgacgaccaccatgactgagatcactgctgaagactcctacaactcttccaagagcagctggtcgagaaaccaa

SEQ ID NO: 810421 - DNA, 98 bp, Homo sapiens
tccagccgtccccagaacgcagatcagaggtagtcggacctttcccgctggcgcgcagcctcagctagactcacaacgacccagaaagcattctcaaa

SEQ ID NO: 810422 - DNA, 99 bp, Homo sapiens
cgggccagccccgccgccctcgcaacctggcagccgccgccgtggaagggaaatcctcattgacgattcaatttgttgaaggccaatttgtggactcct

SEQ ID NO: 810423 - DNA, 127 bp, Homo sapiens
ttctggaaggaaaagaacacctgtgaaagaccgattttctgcagaagatgaagctttgagtaacattgccagagagattttaccaaatgttgcaagaactctggagttcttatggtagtaaaatgcc

SEQ ID NO: 810424 - DNA, 98 bp, Homo sapiens
gaagtacagggagcgagagctggagaagctgggattggagattccacccaaacttgctggtcactgggagattggtggaacgagaatgcctacacgca

SEQ ID NO: 810425 - DNA, 98 bp, Homo sapiens
gagtcctaccccacggacagcatcctggaggaccagtcagaccagcgcgtcatcatcaaggttatcaatactctggctgaccatcatcatcgtgggac

SEQ ID NO: 810426 - DNA, 100 bp, Homo sapiens
ccttctccaggaagagcactcaggagaccaggaaaatggccacagggctcctgagagccaaaaaagaggcatacccagatggaagtagcaaagaaaagag

SEQ ID NO: 810427 - DNA, 100 bp, Homo sapiens
gagcccccgaaacagtccacgtctttcttggttttgcaggaaatcctggagtctgaagaaaaaggcatcacctccagaatctacttgaagtggatgacac

SEQ ID NO: 810428 - DNA, 98 bp, Homo sapiens
agcccttcatttgacagtgtactgccccgttacttatttttacaagttatgatggagggtggtcgcagcaaagggtttggttttgtatgtttctcctc

SEQ ID NO: 810429 - DNA, 100 bp, Homo sapiens
atgcaagtggccaggctgtgaagcagtgtgcgaagatttccaatcatttctaaaggactcatgaagtggcagctaagccctgtccagtggccacccgtca

SEQ ID NO: 810430 - DNA, 100 bp, Homo sapiens
cggagcggccggtactgttgaaagcgacaagtggaggcgccgctctagcggccgggactctgaactatggcggtggacacacgtttgcaaaatggatttg

SEQ ID NO: 810431 - DNA, 100 bp, Homo sapiens
ccagttacccttatgctccaggggcactgcctcccccaccaccgcctcatctgtatcctaatacacagctatcagttgagggatttgcagttgataaaat

SEQ ID NO: 810432 - DNA, 99 bp, Homo sapiens
agcaagaaaaaaaggaagacgatgacttcaggtgtctgacttccagcaactgctggcctgtgccagggtgcaagctgagcactggagtggagttttcct

SEQ ID NO: 810433 - DNA, 99 bp, Homo sapiens
ttggcaccgcgtttgtcaagttttctactcttacaaaggaactgtccacactgctgaaaaatctgtttttggagccgtgagggatacagcagtttggtc

SEQ ID NO: 810434 - DNA, 99 bp, Homo sapiens
ccagaacatgcagtccctgcttcctgccgtactccaaagattcaggtttactcacgtcatccagcagagaatggaaagtcaaatttcctgaattgctat

SEQ ID NO: 810435 - DNA, 100 bp, Homo sapiens
aggactttccttacctgtttttccagctcacccactgccagcagaggacaaggtgctgcggatgctgtacgtgtgggcgctctgccgagaccaggacgag

SEQ ID NO: 810436 - DNA, 98 bp, Homo sapiens
gcggctttggcgacggcggtggagctccttcgtgggcccctgaggacgcctggatgggcactcaccctaagactaccatgccggggatgaagcgagac

SEQ ID NO: 810437 - DNA, 100 bp, Homo sapiens
ctcatgcggcaattggcaggcctgaggtccttgttggctgcttgctggagaggaaatgactataccctggtgcttaaggagagcggaacttgtgttcaag

SEQ ID NO: 810438 - DNA, 100 bp, Homo sapiens
cgcgacctgcggcggctccggggtgcccgtggttgacacgagctgtgtccccagctgttcccgtctacaatggcatcatcttcctctttgtcctggccaa

SEQ ID NO: 810439 - DNA, 100 bp, Homo sapiens
ctgctgtttcatctcctcctatgggcagatctcacttgcttatctgaagaagattgtccaggctcatattgggaatgcttatgaggaaattcatgccgag

SEQ ID NO: 810440 - DNA, 98 bp, Homo sapiens
ggggtttctgttaaggaactcgatttatatttggcatactttgtgcatgcagcagatcttggaaggagaccaagccatcctgcagagaataaagaagg

SEQ ID NO: 810441 - DNA, 100 bp, Homo sapiens
ggaagagttcgtgaaagctttctgcccagagctcctggaccaatgcatcttcccaccaccttaaaccactgattggatttgaggctcctcccctccaggg

SEQ ID NO: 810442 - DNA, 99 bp, Homo sapiens
tatgatatgctaagaaagaatcttgtcactttagccactgctactacaggtcgctcaagccctcagttagaccctttgagaaaaagcccaaccatggaa

SEQ ID NO: 810443 - DNA, 101 bp, Homo sapiens
tcctcccttcgctcgcaccatggttgacatcatggacatatgtgagtccatcctggagaggaagcggcatgacagcgaaaggtctacttgcagcatcttgg

SEQ ID NO: 810444 - DNA, 98 bp, Homo sapiens
tttgcttttgtaacttttgatgatcatgatacagttgataaaattgttgatgctattaacattctgaaggagatgaaagagaaggatgttcttatcaa

SEQ ID NO: 810445 - DNA, 100 bp, Homo sapiens
gcgcgggcacagggtgccgctgaccggctgctctttggcgtaaattgcaatcgattagggatcgtttctcagaatcaagttagaagtgagagttcagata

SEQ ID NO: 810446 - DNA, 101 bp, Homo sapiens
tccaggctgtcctgcacgacctcactagtgaacctgtcactgttcgggaagtcacctgtctgcttctccaaagcatggattcaccattatgaataggctga

SEQ ID NO: 810447 - DNA, 100 bp, Homo sapiens
aaaaactcagttactcaaactgaaacgtctcctgcatcagatgaagataaaacgttacctgcagagtcgggatgtacaatagaggatcacgtaattgcag

SEQ ID NO: 810448 - DNA, 100 bp, Homo sapiens
gtggccctgttctgggatgagcaaggtgtaaaggtgtggatgaggtcaccattgtcaacattttgaccaaccgcagcaatgcacagagacaggatattgc

SEQ ID NO: 810449 - DNA, 99 bp, Homo sapiens
ttttcttgaacttttagaatatgaaaataagagccctgaggatccacaggtcttggataatattctgacaagtccctgtacacccagctgtgcttttac

SEQ ID NO: 810450 - DNA, 100 bp, Homo sapiens
aaagaccaatatccacaacagtcgcttgaacagattggcacccgaattgccaaagttttggaaaagattcgatacatttctcagactcaaggtttgccag

SEQ ID NO: 810451 - DNA, 98 bp, Homo sapiens
tctgagagatttcatttctgtcctgctgatgaagtctacgttcattcagggcctgctgtggaagaccagccccaaagagatggggtctcactgtgttg

SEQ ID NO: 810452 - DNA, 100 bp, Homo sapiens
ttacattcagagctctatcaataagaggaatacatattacagtgaattcgacaaccgcacaagttggcagtatttaccttgctgtggattgctgactgga

SEQ ID NO: 810453 - DNA, 51 bp, Homo sapiens
cgtgccgtgttccggagccagcagcagagcctgctcagcctgccggtctgg

SEQ ID NO: 810454 - DNA, 98 bp, Homo sapiens
gactaccagtggctctgcagagtcaagtaagggagaattgactacgcttatacatcagcttcaagaaaaggacaagttactcgctgctgtgaaggaag

SEQ ID NO: 810455 - DNA, 100 bp, Homo sapiens
cagaatggcatccagagagaggctctttgaactttggatgctttattgtacaaagccggttgttatgacaatggaaaacactatcagataaatcaacagt

SEQ ID NO: 810456 - DNA, 100 bp, Homo sapiens
ttccctgcctgaaatcctcattgagggcaagaactttatccccaggatctaaaccagtgctggacaatagatgctcagcacgtgtggttctcaaatatag

SEQ ID NO: 810457 - DNA, 100 bp, Homo sapiens
ctcacactcaccgacaccgagcatgaaaacactgagactgcaattaccagctctggctgggtcgccacaacttgtttgacgacgaaaacacagcccagtt

SEQ ID NO: 810458 - DNA, 100 bp, Homo sapiens
cccagaagccctgtgaggacagctgtcggtcgtttggggattctcagcagttgcggctggtccgtattctgcgcagcaccgtgatggttcgcgttggtgg

SEQ ID NO: 810459 - DNA, 100 bp, Homo sapiens
tgtcgctgacggcgactgcgggaggccaggagccatgtggctagaaatcctcctcacttcagtgctgggctttgccatctactggttcatctcccgggac

SEQ ID NO: 810460 - DNA, 98 bp, Homo sapiens
gcagtctgcattagtcaccggaggcttacacacaggttgtacggctctccaggtgacattgacctctggcccgcccttatggttgaagacctgattcc

SEQ ID NO: 810461 - DNA, 100 bp, Homo sapiens
tcctcattaaagatactctcggatatccgtgattgttcaggacccttaagtgctcttactgaactgaatactaaagtaaaagagaaatttcaacagttgc

SEQ ID NO: 810462 - DNA, 100 bp, Homo sapiens
aaggaaatagagaagctcaataacctccaagcagtgtttacagtaagtccatggcctacatgcgcggcatgtactttcgcatgaaggatgaggtgttccg

SEQ ID NO: 810463 - DNA, 100 bp, Homo sapiens
attgtattctccgagtcagattggagcatttgtgttgatgaagatgaaagagactgcagtccaaaccaggttgcagagaaggtggcctccagaatcgccg

SEQ ID NO: 810464 - DNA, 100 bp, Homo sapiens
cttaacctctcagaactgaacaaagacaacattgttcctggaacgccctctttttaaaaaaggacgccaggaaagcatgtgcagatgcaactctctctca

SEQ ID NO: 810465 - DNA, 98 bp, Homo sapiens
ggaagacagaccagagctacagcatgtggttcataaggaaatggattactttataaaagataagttgcttcttgaaagaattcttggaatggaattca

SEQ ID NO: 810466 - DNA, 126 bp, Homo sapiens
gataatgtttttgccactcccagccccatcatccagcagttggaaaaaagtggcgacattgactacagcaccgtgctcctcggcatgctggtgacgcaggacgtgcagctcgggctcttcatggcc

SEQ ID NO: 810467 - DNA, 101 bp, Homo sapiens
gtgatcgtcatcacagtcaactatcgacttggagtactcgttggattggatgctgctggcaagacaaccattctgtataaactgaagttaggggagatagt

SEQ ID NO: 810468 - DNA, 51 bp, Homo sapiens
gaggctggagggggagaacacccaggtatctcagatgaagacatcatcaac

SEQ ID NO: 810469 - DNA, 100 bp, Homo sapiens
agccgagatgctaagagcaaggccaagaggaaggctcttgcagccaatgccggaacaggatttgctgttgctgagcctcaaatcgcaatgttttgtggga

SEQ ID NO: 810470 - DNA, 98 bp, Homo sapiens
gggatcgtgaccgagaccgtgaccgagagcgtgaccgagagcgcgaatatcgtcatcgttagaagctctgaacagcaacatggggtgcaaagtcctgc

SEQ ID NO: 810471 - DNA, 100 bp, Homo sapiens
ctgtgagaaaagcgagcctcttctgataactcaggatttacttgaaatgaaaggagattccaacctacttcagttctctcagctactggaagagaaaaac

SEQ ID NO: 810472 - DNA, 98 bp, Homo sapiens
gaaaagtggaccctgaggccttgcaggtctttaaagaggccagaacaacagccaactcagtttataaatccagaaacacctggctatgttggatttgc

SEQ ID NO: 810473 - DNA, 98 bp, Homo sapiens
aggatggcaggaaatggaaccattgctttctctgtaaaaagtgtgtaaagccttgttttacttcatcgactggcaagttttcatcgagtttggagttt

SEQ ID NO: 810474 - DNA, 100 bp, Homo sapiens
gaagtgcaagtcgatcgaggtcaagaacacgatcacgttctagatcacatactccaagaagacaagtacagttgaccaaaagcgtgccagccatcatgag

SEQ ID NO: 810475 - DNA, 100 bp, Homo sapiens
aagactctgaggctgatatgcaatgtcacttacaacattaatcagatactgcatttaagggtctttacggaataaaggatgatgtcttccttagtgttcc

SEQ ID NO: 810476 - DNA, 100 bp, Homo sapiens
cgctgctggaagacgaggagcgcgtcgtgcgcctgggggtgcgcgcctgcgacctgcccgcctgggcccctccagccagcgtcaggtgcagaatggcccc

SEQ ID NO: 810477 - DNA, 100 bp, Homo sapiens
gtgttcctttcactgcagctgatccagagggtgctcgagaggaagacctcgatgctgtggaagcgcagattggctgcaagcttcctgacgattatcgatg

SEQ ID NO: 810478 - DNA, 100 bp, Homo sapiens
gaccaaacaagttaccatgcttactggaaatggaggtggatggaacatagaacaaccttccattctaaaccaaagagcatctgctgcacccaagcctgag

SEQ ID NO: 810479 - DNA, 50 bp, Homo sapiens
tccgaggctcgcgggcggcgggcccggtgaagatagtgatccggggagac

SEQ ID NO: 810480 - DNA, 98 bp, Homo sapiens
gggatcccaccaggacatcaccgaagacagcttttccctcttctggttgctggagccccggataggtgatcagactctgagaatatgggatgtgaagg

SEQ ID NO: 810481 - DNA, 98 bp, Homo sapiens
tgtctggagcaagaaaaagagccctggaatatgaagagacatgagatggtggatgaacccccagggtaccatgatcctgaccaatttgacggcgctgc

SEQ ID NO: 810482 - DNA, 98 bp, Homo sapiens
gatgctgccccctcaaggtgctatctcagagaccaggtgtccctggccagtgtccttccacctgtccacaagcatggggaacatcttcgccaacctct

SEQ ID NO: 810483 - DNA, 100 bp, Homo sapiens
tccacagatgtgtcaccaaaccaggctgtgctactcatggacgccgaaaagcgtatccggttactgcagtttgtcacagggacatcgcgagtacctatga

SEQ ID NO: 810484 - DNA, 103 bp, Homo sapiens
ccgagaagcggcacacacgggactccgaagcccagcggctccccgactccttcaaggcctcctgacaaggtgatccgggcgggccccgcaggaattttatccc

SEQ ID NO: 810485 - DNA, 100 bp, Homo sapiens
ccagaagtcagaatccaagatggaaagaccacagcaagattctttcattcgtctcctcctagcctgggggaccaggctcgaactgaccctggacatcaaa

SEQ ID NO: 810486 - DNA, 100 bp, Homo sapiens
atgaggatcctcaggctgtcggaggacttgcttctgcactagacaatcgaaaacagagttcagaagggaggctgacccgcggctgattgagtccctctcc

SEQ ID NO: 810487 - DNA, 98 bp, Homo sapiens
gcttccttcgttattggagccaggcctacaccccagtcaggtgacacacagtcttttgcacagaagctccagctccgggtgccctccgtggagtcttt

SEQ ID NO: 810488 - DNA, 98 bp, Homo sapiens
ggcgtcaccgccgcggacttcgctttgggccatgaccaggttatgaagacagtatggagtttccagaccatagtagacatttgctacagtgtctgagc

SEQ ID NO: 810489 - DNA, 100 bp, Homo sapiens
cctgctgaccccagccggcgccgagggcttggaatctcgagcgggaaaaggacgcacagacattcgggtgcttcagccagaacaaccccagcaaccggcg

SEQ ID NO: 810490 - DNA, 100 bp, Homo sapiens
tgttgctcccgcctgagcccagcccccagaaaggattgtgacatatcgttggacccagaattgagagacagggcagggcattgttcatgcactgaccgac

SEQ ID NO: 810491 - DNA, 100 bp, Homo sapiens
aaaaccagcccttatccctcgtgagaaaaagatctcgatacttgaggaaccttcaaaggcacttcgtggggtcacaggtattgttgcagcatctggcagt

SEQ ID NO: 810492 - DNA, 100 bp, Homo sapiens
cccctcccccatcaaaggaaaggggaaaatgtctcagtcgaaagttttggcaagcgttctgcaggaagttttaggcgtggctgtgaatgcattgttttag

SEQ ID NO: 810493 - DNA, 100 bp, Homo sapiens
cgcgggctaccaaccgtggctacagcagcagtggacgtcagctcagcgaggtcttcatccagctgccctcgcgaaaggagctgcccgagtactacgagct

SEQ ID NO: 810494 - DNA, 100 bp, Homo sapiens
agctggccggggcctgggcctgagcatcgttgggaaacgcttcttggacacttaatgattgttggcaagaaatgtgctgctgatctgggcctgaataagg

SEQ ID NO: 810495 - DNA, 100 bp, Homo sapiens
cactggttctccaggaaccgaaaaggcgaggagtatagtacggcaaaaaactgtcgtgttctggacttggtgcctctttctgttatatgctttcctattt

SEQ ID NO: 810496 - DNA, 100 bp, Homo sapiens
tgccaagatccggacctaatatatatgaactcaggtcttaccaactccgaggacagagcagaatgggctgatatagatccggtgccgcagaatgatggcc

SEQ ID NO: 810497 - DNA, 98 bp, Homo sapiens
acttcctcctggaggaatacctggcattgacctctcagatcccaaacaactggcagaatttgctagtttagattttgaagaatgtgctcacaaattgc

SEQ ID NO: 810498 - DNA, 99 bp, Homo sapiens
gaagatgattctaattcaacaaatcataacttgatatttggagtctgggagtgatccttttcatgttggtgtgtgggcagccgccctttcaagaagcca

SEQ ID NO: 810499 - DNA, 98 bp, Homo sapiens
ggatgtggtttcatcatatgtgcaagaccagagcgaagactgcctatatttaaatatatatgtcccgactgaggatgaggacaatccttacactccca

SEQ ID NO: 810500 - DNA, 100 bp, Homo sapiens
cccgagttccatctgcagaggaaattggcggacagcagccacagagccaagattctgggtcagataatcgtataaacacagtcagtctcaaggaagcatt

SEQ ID NO: 810501 - DNA, 100 bp, Homo sapiens
agatccgattggaacatgaagaaggtgcaccctgcacagctataagagaaggatactatttttgagacaacaaattaaggaacttgaaaagctaaaaaat

SEQ ID NO: 810502 - DNA, 99 bp, Homo sapiens
cgcagccccccaatgcggccgcgagaagcagcgggggggcaggcgatcgaagttaaagaagagtgtaagagtcctaaagctgagtgttggtcccaaaaa

SEQ ID NO: 810503 - DNA, 100 bp, Homo sapiens
aagactaccaggctgcggaggaggtattatgccggctgggctgataagtaccacgggaaaaccatccccattgacggagacttcttcagctacacacgcc

SEQ ID NO: 810504 - DNA, 100 bp, Homo sapiens
tataaataagccctttgcacagcagtgccaagacttgattaaagtaattgaggattttccagcaaaggacataagcagctctatgaccaatagcacagct

SEQ ID NO: 810505 - DNA, 98 bp, Homo sapiens
ctcggacaccattttctgccgctggacgcaagccatgtacatcttcatgtgatcagccaggattttgattctccttgccttaaaaacaaaaaacattg

SEQ ID NO: 810506 - DNA, 100 bp, Homo sapiens
accgggacctcaagaccgagaacctcctgctggatggcaacatggacatcaagctggcaggacgtggagtcggactctgccaagcagtttttgcaggcag

SEQ ID NO: 810507 - DNA, 98 bp, Homo sapiens
agcagggctacgtgaaaatccgcagcaggaagcttgggtcggtggtggggagcggcagctggcagagagtcaacgcccagacggctgtgagatccccg

SEQ ID NO: 810508 - DNA, 99 bp, Homo sapiens
gccaatgaggccaagtgcgacagccacatggagacattcttgcgctgcatcgaagcctcaggtccgcaggggtggagcagctcatgtacatcaaggagg

SEQ ID NO: 810509 - DNA, 100 bp, Homo sapiens
attgtaacttttcatgaatggtatgaaacaagcaaccacctctggctagtggtggaactctgcacaggcaaagcagagagcagaggttcttcagtccacg

SEQ ID NO: 810510 - DNA, 152 bp, Homo sapiens
gagcccccgatccgccagcaccacctgaggatccagaaaccgccccagcgatggaagaggatcaggagctggagagtcactgtatatatgccttatttcctgggtccatgggaagcatgagtctgttgggacttgggacaagaagaaaacaa

SEQ ID NO: 810511 - DNA, 133 bp, Homo sapiens
cagatttgaatgtgctgatgaagacattgggacttcttagaaatctcctctccactcgtcctgcctcagcaactgttgccattcccaaagaacaccatcgctttgttattggcaaaaatggagagaaactgca

SEQ ID NO: 810512 - DNA, 100 bp, Homo sapiens
tcaatcgtgcacagttttgaagatgttggtccaaaattcatcttctccctgaagggccttggctttagtattgctggaggtcgagactgcattcgtggac

SEQ ID NO: 810513 - DNA, 98 bp, Homo sapiens
ctggacctgccgcagatcgctgtagtgggcggccagagcgccggcaagagctcggtgctggagaacttcgtgggccgtattctaccttgtaaatactg

SEQ ID NO: 810514 - DNA, 100 bp, Homo sapiens
ttccatatttcaagtcattcaaagacagatgaaatctcctttacagacaataggtgaagaacaaacccagaatccctacactgaactgctagtactgaag

SEQ ID NO: 810515 - DNA, 99 bp, Homo sapiens
gtctccagaggcccatggaccagagtgctggaaaagcttggggcagacaggggtctcaagttgaaagtctaccctgatgggagagtctgcatttccatc

SEQ ID NO: 810516 - DNA, 100 bp, Homo sapiens
ggccttggaagaatcctgtacctctctcctttggccaggccttactgtgatgagcacataaagagttgtaaagatgtggcacctgtggagaagactatta

SEQ ID NO: 810517 - DNA, 110 bp, Homo sapiens
gatgaaggagcagtagacagcgacccaagcacaccacttcagctagggaaagaattaaacaaccaccatgtcgagcaaaaaggcaaagaccaagaccaccaagaagcgcc

SEQ ID NO: 810518 - DNA, 98 bp, Homo sapiens
tcagaggtgggcggctttgaccgagaggctgctggagctcgtgtttggacgcaaggaagaatcctgctcaaaaatgaggtgaattaatacttgggcgc

SEQ ID NO: 810519 - DNA, 100 bp, Homo sapiens
ggaattttattcttcctggttcgtgcattcatcctccataagaaacagcataccaattgtgacagagcagcccctcatctctgctggagaaaacagagtg

SEQ ID NO: 810520 - DNA, 100 bp, Homo sapiens
ccaaccctaatgtcgaatatattccctttgatgaaatgaaggaaagaatactgaaaattgtcactggatttaatgggaagatgagaatgtgcctactgct

SEQ ID NO: 810521 - DNA, 100 bp, Homo sapiens
aggttggatttgtgaagctggcagaaggagatcatgtaaactcacttttggagatagcagatacactgaagagatggtgccttggcacccttgcctggaa

SEQ ID NO: 810522 - DNA, 100 bp, Homo sapiens
ctacgagctcaaaagccaacccttaccccttcgctcaaggggctttgttatgcacctaaagccatattggaagctccagaagaaagagcaccccccggaa

SEQ ID NO: 810523 - DNA, 100 bp, Homo sapiens
gcgccttctgcgtctcccggctggtggggaagcctctgcgccgccggcaccatgaggaggaaaaggcttctcttttacatcgtactcaggaagaaagaag

SEQ ID NO: 810524 - DNA, 98 bp, Homo sapiens
gaagatgatatcagccttgcacattcagtgtatgcgacctcactgcagagtgatattatgtttgagaccttcaacaccccggccatgtacgtggccat

SEQ ID NO: 810525 - DNA, 100 bp, Homo sapiens
caaaacatgggagacatggacccccacatctttgctgtggcagaagaagcctacaagcagatggccaggtggatgaaaatactaggaaaagtttatttaa

SEQ ID NO: 810526 - DNA, 98 bp, Homo sapiens
ggcgtacgccctcatggggaaaatctccccggtgactttcaggaatccagaaccctggctgaaattgcaaaagcagagctggacggcaccattctcaa

SEQ ID NO: 810527 - DNA, 98 bp, Homo sapiens
agaagatcgaaaattaaacctcagggctgttataaaatacagaattttaataatgtaatacccgaaggtatgaacttgagtttcctcattgccttaat

SEQ ID NO: 810528 - DNA, 99 bp, Homo sapiens
ggaaatgctcccaagagggcggcggcagcgggtcctacgaggagggctgtcagagcctcatggagtacgttctgggaggaggaggaaaggaccctttaa

SEQ ID NO: 810529 - DNA, 50 bp, Homo sapiens
cgagatcttccgccactacgagtatggacctgtctgccaatcaggacgag

SEQ ID NO: 810530 - DNA, 100 bp, Homo sapiens
gggtacaggctggagtctgggatgcagaacatgagtattcatacgaagaccaccagcggctatgcagatttgaagctgcttcaaataacaatctggttta

SEQ ID NO: 810531 - DNA, 100 bp, Homo sapiens
tgcaggcacagccttttacattgatcaggttgtaaagctctctgaaatagtgaccttagcgaagcaagcacatgtggatgtgaaatttcagttgccaata

SEQ ID NO: 810532 - DNA, 104 bp, Homo sapiens
atgatgagaatgctgtgtgcgcagcacagaactgccaaaggccctgcaaggacaagatatggtgtaagatacttcttcaagattggacagctggggaccttctt

SEQ ID NO: 810533 - DNA, 100 bp, Homo sapiens
ctacaactacagaacagcctgtcaccaccacattccctgtaaccacgggtcagatgtaccaacagtaccagcaacaggccggctatggtgcacagcagcc

SEQ ID NO: 810534 - DNA, 98 bp, Homo sapiens
gttaccccagccgtgggccgattggaggtgtccatggtcaaaccaactccaggcctgacacccaggtttgactcaagacggagtctcactctgtcacc

SEQ ID NO: 810535 - DNA, 99 bp, Homo sapiens
aaagataaatccaaatactgcatatcagaaacaacaggcctccagctaaaccagaaggccctcaccactttcccggatgtggtgcttgtacgggtaccc

SEQ ID NO: 810536 - DNA, 100 bp, Homo sapiens
aaggcctatcaaaattcaatttagatcaggtggactaggagagaacaagcagacttctatagaacagtgtcttcctttggtgttgtttacgatcaagaaa

SEQ ID NO: 810537 - DNA, 99 bp, Homo sapiens
tgaactacagcaagatgtggaagacacaaagcctgcgaaagtgctcgggaagagggagagcaaacttggctcagcccaaactggatgctcccactaacc

SEQ ID NO: 810538 - DNA, 100 bp, Homo sapiens
tggtggcttttgtgggctgctgcggggcctgcaaggagaactattgtcttatgatcacgggaaatcctcattgacgattcaatttgttgaaggccaattt

SEQ ID NO: 810539 - DNA, 50 bp, Homo sapiens
accaagtctgaagagaccctggatgaggagttggtgctgctgtaatcgat

SEQ ID NO: 810540 - DNA, 100 bp, Homo sapiens
gacgactttagcgcccatctccaacgtaacctcggcgccggtgacgtccctcccgctggtcaccactccggcaccagatgactatgctcagctgtgtaac

SEQ ID NO: 810541 - DNA, 98 bp, Homo sapiens
tctccaatgcatccatattcaaggcagaccataaatcaacttcttgctgaaatggatggttgggacagaaataacccagagccctggaacaaactggg

SEQ ID NO: 810542 - DNA, 98 bp, Homo sapiens
actttctcctcattgaagctatgcagtatttctttggcatcactgcagctagtaatttgccttctggattatcactttgggaagcagtgacatccaac

SEQ ID NO: 810543 - DNA, 99 bp, Homo sapiens
agcaggagcccgctgctcttccccactcagatgttgcccatttaatgtggttcgaaagactctatgtttggcttcagtgttttgaaaaatacatcttgt

SEQ ID NO: 810544 - DNA, 114 bp, Homo sapiens
aatgagtatggcagtgtcagctgtacagccacactaactgtgacagcgtttctgagattaagatggaagatattttgtgtgttctgacaagagatgattgttttaaagggaaac

SEQ ID NO: 810545 - DNA, 98 bp, Homo sapiens
ctggatgcacgtacagaatacattcagccgtcaggaatggcggcgctagatagtaaggcatcagggaagatgggaatgcgagctgtagtctattatat

SEQ ID NO: 810546 - DNA, 102 bp, Homo sapiens
gaggaggtggcggcggcgggaagatgcaggatggggaagcagaatagcaaactggcccctgaagtgatggaggacctggtgaagagcacagagtttaatgag

SEQ ID NO: 810547 - DNA, 100 bp, Homo sapiens
ttagacttctcaagtgcaattcaagatatccgaaggttcaattatgtggtcaaagttacctacctgggcaaagtctccaccactggcatgcagtttttgt

SEQ ID NO: 810548 - DNA, 98 bp, Homo sapiens
gacatggaacagggactcactgggggtgttccattgcctaaagaggagaacatttctgctcccttgatctccagctccccagtgaaggcagcccggga

SEQ ID NO: 810549 - DNA, 100 bp, Homo sapiens
tgatgtgcaggctggaagtcttacagctaaggtcacagcaccacaggtatcctggtcagatataggaggactggaaagtatcaaactgaagttggaacag

SEQ ID NO: 810550 - DNA, 100 bp, Homo sapiens
ctccatatgctgttgaagaagggagccaacaaaaattgttttttctacctgttgacgtgtcaagcactaactgttacacgcatggggagatactctggag

SEQ ID NO: 810551 - DNA, 122 bp, Homo sapiens
ttacgtttcaaaaattttagaaaatggacctgctgacagagcagatggcctggagattcatgacaaaatcatggagaatgtgacagtgatgataacatgggtgccaaaaatacttcaatagg

SEQ ID NO: 810552 - DNA, 100 bp, Homo sapiens
caagtggaggttcctacagagattcatatgagagttatggcggtggtgctgtggttctgggggcagagtcccatgcctccaaggatgtcgccatcgacat

SEQ ID NO: 810553 - DNA, 100 bp, Homo sapiens
ctgactctctgaggctcattttgcagttgttgaaattgtccccgcagttttcaatcatgaactcccccactggaaaggattctgaaagaaatgaagtcag

SEQ ID NO: 810554 - DNA, 100 bp, Homo sapiens
agaggcatggtccgctggtggctgaagccaagatctgataaagtagccaatatttggtgcagcttcaatgtctttctgaagattaaggatattttgccac

SEQ ID NO: 810555 - DNA, 98 bp, Homo sapiens
catttgcaacttatatcgccagtccagcagctaaggatattttgtgcaggctgtgagaagacatttatcacagtgagtgccctgttttcccataaccg

SEQ ID NO: 810556 - DNA, 100 bp, Homo sapiens
cgggttttgatcgcgcgtttgtgtaggttgctgaaaagccaggagtcaaaatgactgagcgctttgactgccaccattgcaacgaatctctctttggcaa

SEQ ID NO: 810557 - DNA, 100 bp, Homo sapiens
gggaaggagctggaaaatttggattatttagccttcaaacgtcagcaggtaaatgagctggatggtatcccgttgatcctggacaactgcaacatcagtg

SEQ ID NO: 810558 - DNA, 100 bp, Homo sapiens
tccaggtcgcgatcgaagagtccccccaagtctcctgaagaggaaggagcggtgtcctcttaagaaaatgcactgactcatatattgaagtccttgatgg

SEQ ID NO: 810559 - DNA, 100 bp, Homo sapiens
aggatctctttggcaagtttggttacaattcaacaaacatggtgtgttgcgggtagaaggcttcttaacaccaaacaagtatgacaatgaagcaattggc

SEQ ID NO: 810560 - DNA, 100 bp, Homo sapiens
caaaaatcccatctaccgcaactctcagttcgagagtaaaggctgagtatgagtttatcagctctggtctctacctagtggtgttattgcacttgtgcga

SEQ ID NO: 810561 - DNA, 100 bp, Homo sapiens
gcaagatcggcagccctaaagtgctgtacctggtggagaagggagccgtgatcgagcatgtggaccacagcgggatgcggcccttggacagagccatcgg

SEQ ID NO: 810562 - DNA, 99 bp, Homo sapiens
agctggagcgcccagaggcgagccctggtggaggaagaggcgttcaatgtcatcaatggcggttctcatgctggcaacaagctggccatgcaggagttc

SEQ ID NO: 810563 - DNA, 98 bp, Homo sapiens
gattggagtgaaccggagaccccgaaaacggaagcgcagggagaaggaagaggtgtttgaaaaggttgaaaggattgttgacaaaaggaaaaataaaa

SEQ ID NO: 810564 - DNA, 98 bp, Homo sapiens
aaaactcaggcttcgccacctgcgtgcaaacgttgggccggagcactagcctcacggagaaggatctgaaagaagccaaggcgcggagccagcagatt

SEQ ID NO: 810565 - DNA, 100 bp, Homo sapiens
ggaggggccccagcagcccccgaaggccctatcaggacatggagtatgaaagacgctgcagctgataaattctaatgaacccggagtgatcatgtttaag

SEQ ID NO: 810566 - DNA, 98 bp, Homo sapiens
gctcggggagcccagttccgccgctgccgagcgcgtccagcccccaggctccgctcttgccagagggacaggagccatggctcagaaaatggactgtg

SEQ ID NO: 810567 - DNA, 100 bp, Homo sapiens
caaaacttcaagccaaacatcaagcagaatgtgatttgcttgaagatatgagccccgtgctgatcccattccaatatgtagcttctgtttggggactaaa

SEQ ID NO: 810568 - DNA, 100 bp, Homo sapiens
gccgggattcgcggcccggagctcgggaccggcaccttggaagttgttttcaaccatatccagcctttgccgaatacatcctatctgccacacatccagc

SEQ ID NO: 810569 - DNA, 100 bp, Homo sapiens
cctatagatattcaaacctggatccttggatacaggaaaccaacagtcacacatgtacattacagacagctgatactgattctggaactctatagtccca

SEQ ID NO: 810570 - DNA, 98 bp, Homo sapiens
tgcccttaggggacctggatctatatgatggcacatacataactttggagagcaaagacatcagccaagcaggttgagtatctggtcaatgaaaagca

SEQ ID NO: 810571 - DNA, 98 bp, Homo sapiens
tgtttcccacatcctgatgacgttctggaatcaccacaagacctaagtgtccgaagaagtcaaggtactgaagatttaccccccaaaaaaaattgtca

SEQ ID NO: 810572 - DNA, 100 bp, Homo sapiens
accagtgtcatctgcacaaagttttttctcttaaggaagaagtttctcagcagcaggaaagcgtctccactctccctgccagcgtgcatccccagctgtc

SEQ ID NO: 810573 - DNA, 100 bp, Homo sapiens
aataacccttgatcctcctcctaattgcagtaggttgtgacagttggaagtgtcatgtacaacatgcggcgattaagtctttcacccaccttttcaatgg

SEQ ID NO: 810574 - DNA, 98 bp, Homo sapiens
ccgagccgtcaagcaagaatctgtgggagcagatctgcaaggaaagctacttctccagtgaaatctactacatctatcactgatgctaaaagttgtga

SEQ ID NO: 810575 - DNA, 98 bp, Homo sapiens
tcctgttgggccatttccgagaactcccatcagtttctgtatagtgtaaaagggaactctaatgatccaggacaaagaagttaccctggagtatgtat

SEQ ID NO: 810576 - DNA, 98 bp, Homo sapiens
taacataaatgcagctacagctgtggctctacagtgtttctacacctgtgggttatgacaaagacaactgccaaagaatcttcaagaaggaggactgc

SEQ ID NO: 810577 - DNA, 100 bp, Homo sapiens
agttcagaagagccaaggaataaacatgcaatgaacccaaaaggggatcccaacggcttcaatgactggaccttctccactgtgcgatgctggggggaga

SEQ ID NO: 810578 - DNA, 100 bp, Homo sapiens
ggctaaccaaaagtctgttctgggaggtatatcatacaaagagaatgcaacatgttatctgtgtaaaatggacttctgacagcaagtatattatgtgtgg

SEQ ID NO: 810579 - DNA, 100 bp, Homo sapiens
aaaacggaagcgcagggagaaggaagaggtgtttgaaaagagatttaccgcattgtttctcagaagcaaatgtcagacagacgcgaaaatgacatgtctc

SEQ ID NO: 810580 - DNA, 98 bp, Homo sapiens
tcagactcagacaagagtagcgacaacagtggcctgaagaggaagacgcctgcgctaaaggtcccagaagaggaggccagtcacaatggacagcgccg

SEQ ID NO: 810581 - DNA, 100 bp, Homo sapiens
aagtccatgctgctgccgttaatggagataagggtgctctacagaggctcatcgtagattcaaccaactctggtgataacatgtatactttaatgaatgc

SEQ ID NO: 810582 - DNA, 100 bp, Homo sapiens
ctgcccttcgacggcgacttcgccagggagaaaacaaaggcggccggcctggtgcgcaaggccccgaacaacaggagggagccatggatttgctgcggga

SEQ ID NO: 810583 - DNA, 100 bp, Homo sapiens
caaagttctctcgatcagggcatacatctttcttcgacaaagggtcccgaaacctttttctggcccagtaagactacactcctccaatcctaatttgtca

SEQ ID NO: 810584 - DNA, 100 bp, Homo sapiens
ccagaggtttggctctcccatcatcatcttgaatttagtgaagctaaacccacagttcagccctccccttctacaacttccaagacagttactacatcag

SEQ ID NO: 810585 - DNA, 100 bp, Homo sapiens
tccaccagatcatccatgtgagtgaccatgcagcaaaagaaggagggtcctctcagtgattaaggagccctggtattccttgaacatgcatacctttccc

SEQ ID NO: 810586 - DNA, 98 bp, Homo sapiens
gtgggctggtgttccttgactggagacaacctgcagcctcctggcaccaaaggtccaaagtggtacccttctcgagttggtctgcagctagaatgtgg

SEQ ID NO: 810587 - DNA, 115 bp, Homo sapiens
cgtacacagcaggactgagtgaagaagaacagctcgagagagcattacaagccagcctctgggaccgagataacagcgacttgattgcatgtacagtgatcaccaaggatggcgg

SEQ ID NO: 810588 - DNA, 98 bp, Homo sapiens
tgagtccaaggtgtctgattctcagaaacagcattccttcctagtagcttctgtatgtacactacgttgatagccatgactggatggtatatggacaa

SEQ ID NO: 810589 - DNA, 100 bp, Homo sapiens
gtgggaagggacctcgaatgtgggaccccagcccctctccagctcgaaatcgtcatggaaaatggaagatttgcaaaatacaaatattttacccatgtca

SEQ ID NO: 810590 - DNA, 124 bp, Homo sapiens
gccgctgccgccctgagtcactgcctgcgcagctccggccgcctggctccccatactagtcgccggtgggagagataaacgtggaggtcccattttaacgtttccggcccgcagcaatcatgac

SEQ ID NO: 810591 - DNA, 98 bp, Homo sapiens
aagtaccttgcagagagaaatgaaataacctttgacaagattttcaatcagaaaattgattggccatcgggactttgatgtggagaagcgacttcgga

SEQ ID NO: 810592 - DNA, 98 bp, Homo sapiens
aaggctattgttgcagaccggcttcctggagaagagcccattggaagagtggaaccagtgggtaatgcacctttgttggcattagttcacaagatgaa

SEQ ID NO: 810593 - DNA, 100 bp, Homo sapiens
atggatagccgcttgcaggagatccgggagcggcagaagttacggcgacagctcctcgcgcagcagaattataaggctgtctgcagagatttgaaaaatg

SEQ ID NO: 810594 - DNA, 100 bp, Homo sapiens
ggagactcagaatcgaatctcttctccctccccttcttggcaatgaatcgctccctggctaatgtgattcttggaggctatggcaccacttcaacagctg

SEQ ID NO: 810595 - DNA, 98 bp, Homo sapiens
tgtttttggcatactacgtgcaggagcaagcttgcctgggaccagtggcagggaccccggaacctgaaggtgctgacaaagatgacctgctgctgttg

SEQ ID NO: 810596 - DNA, 98 bp, Homo sapiens
ggaatcttttattccactgacaaattttgaagatgtaactgagtttctggaagaggtcattgaagccttgatattggatgaggaagttagaacatttc

SEQ ID NO: 810597 - DNA, 98 bp, Homo sapiens
agtgaagacaactggttgaaggggaccaggaggttggacacagaccattgcaatggaaatgtatctggagtccatctttcaccatcttctcctgagat

SEQ ID NO: 810598 - DNA, 98 bp, Homo sapiens
ggaagcccctgggaggccgaatgtgcaggatcaccgaggggaaagtgagcttgacaggttctggcctttgggaagactcagagacactgagagaccct

SEQ ID NO: 810599 - DNA, 98 bp, Homo sapiens
ttttgaagctccaaacttctttcaaaagtacaacccgagcagttcagtgatgaagtggaaccagcaacacctgaagaaggggaaccagcaactcaacg

SEQ ID NO: 810600 - DNA, 98 bp, Homo sapiens
atcatggaacatctcaagtgaactcaacaaaggtataagcagtttagccaaattttgaagaacattggagaaaatgaaggtggtattgataagttttc

SEQ ID NO: 810601 - DNA, 98 bp, Homo sapiens
attcgggaacaaatactactacatcccgcagtacaagaactggagagctgagatgagtgaactgagtgtggcacagaaaccagaaaaacttttggagc

SEQ ID NO: 810602 - DNA, 99 bp, Homo sapiens
gttactccactgactctctcttttcctgataacatggccagcaagaaagtaattacagtgtttggagcaacaggtgtgatgaatgcagactctgctacc

SEQ ID NO: 810603 - DNA, 114 bp, Homo sapiens
atttcttcacggtgccccccgtgtttgtgtctgtgtacttaaacagaagttggcttggtggtggagtctatggcccttctccttgaatctgagtgaaattagtgagtctttcaa

SEQ ID NO: 810604 - DNA, 100 bp, Homo sapiens
cctgaggctgccccggccgcctgcgcacccggcagcaccatgacagtgccgcagaatggaattcggcattgttcctacacagcttctcggcaacatctct

SEQ ID NO: 810605 - DNA, 99 bp, Homo sapiens
ctctgtgagctcttcattagggcaccaaagcgaaggaatagccaggccagaagaaggaaggcctgtggtgagtgggacaggaaatgacatcaccacccc

SEQ ID NO: 810606 - DNA, 100 bp, Homo sapiens
agtgcctgtaaccaggtcgtcaagccacaggttttccagtcgcactgcgctatgacagagactccactttcaatgtgtttgtgggaaaaggacagctgat

SEQ ID NO: 810607 - DNA, 100 bp, Homo sapiens
tcttccaggtaaagaagttatttaaatctctgtgtgttccttattttgtgcttgaacttgatcaaacagatcatggaagggaagtggttgctgtgtatgt

SEQ ID NO: 810608 - DNA, 100 bp, Homo sapiens
cctggccgccttagccagccctggcaatgcattgaggagttcactccaggtgtgtggaggtcattgcaaaggaaggacaaaacctgaaagagctatattt

SEQ ID NO: 810609 - DNA, 100 bp, Homo sapiens
ccagccgcccgcgggccagcgcaccggtcccccagcggcagccgagcccgcccgcgcgccgtgcccttgctaccagttccgagccagccgagacctgccg

SEQ ID NO: 810610 - DNA, 100 bp, Homo sapiens
ctcagccgaattccttaacagctgccggttaaatgctgagccaggtggtcttcgagggatagcacgaggtggtctgacaggactaacacttaccagcctc

SEQ ID NO: 810611 - DNA, 100 bp, Homo sapiens
gaagccagagccgcctgccatgccccagccagtccccacagcataacaggggacaccaggagaagattcggcagcggcagtccatcctgcctcctcccca

SEQ ID NO: 810612 - DNA, 98 bp, Homo sapiens
ctcctgcccggcctatgcctacgtgctcacggtcaacgagcggggcaaccactgcgagtactgcttcaccagattcgaaatcagagcaaagcctctgg

SEQ ID NO: 810613 - DNA, 98 bp, Homo sapiens
taataatgatctcctacattccaatatgattcatccagccttccagctctgttatttaaagcaagaacacttctgggagccgaaagccatctgcgaaa

SEQ ID NO: 810614 - DNA, 100 bp, Homo sapiens
gtgcctgccaccctacgccgtagccgtccagagactggcaggcctcggcctaaagaatgaatgtctcccccaaaactggctggcaccagcttcatctgtg

SEQ ID NO: 810615 - DNA, 99 bp, Homo sapiens
atgaacctcggaggcagccttaccagacagcttcggaaatgtgtggacacctacaagtaccttttcatcttctctgtggccaacatgaggaacagcaag

SEQ ID NO: 810616 - DNA, 101 bp, Homo sapiens
ctccgttgcctgctcccggagggagacgcgctgccgaggagaacccagcggtgatcagggccaaagcggtcagtgagaaggaagtggactctggaaacgac

SEQ ID NO: 810617 - DNA, 100 bp, Homo sapiens
agccacacaaagaacaaattgcagttgtttgagcctgcctagggtagttaaaagacgagtgaatgctctcaaaaacctgcaagttaaatgtgcacagata

SEQ ID NO: 810618 - DNA, 99 bp, Homo sapiens
atcaacatgccatggcttggtagtacacagactggcagaggagcatctgtggagtcttttagtcctgctatacagctgcaccttgtacatcaagctcca

SEQ ID NO: 810619 - DNA, 98 bp, Homo sapiens
ctttaccccattggcaacaacagccaccacagccagcaccaccaccaccactgtttccacgacagcagcagacaacaagggaggtgtcacagttttcc

SEQ ID NO: 810620 - DNA, 98 bp, Homo sapiens
aaaactgaaatccattgtgagaggggatgctccatcaagcttggcagcttcagggatctgtaaaaaagaggttatcaatactctggctgaccatcatc

SEQ ID NO: 810621 - DNA, 99 bp, Homo sapiens
cctgcttggagacggacttgcttccggacgcctcgtctaaggagcagaaaacccaagggcaggtggagagtccagggaggcaggatggatcaccagaca

SEQ ID NO: 810622 - DNA, 100 bp, Homo sapiens
gagaaaaacttcagacagaccaggccgaagcctcaaggccacagtctcctaaaaacccagaacagaagatcattaagagagtgattgctcttgaaggaga

SEQ ID NO: 810623 - DNA, 100 bp, Homo sapiens
ccgacaaggcgttcaagcgaaaacatgaccgctgagcccatgagctctgggtgaaccaggaggatgaggtggaggaggggcccagcgatgtgcagaacgg

SEQ ID NO: 810624 - DNA, 50 bp, Homo sapiens
agcgagccatgatgatccaaacacctgggatcatggaagctgataaagat

SEQ ID NO: 810625 - DNA, 98 bp, Homo sapiens
cccagagatcgcagcatatcaaagagattcatatgggacattgtgtaaatctgactgatggggctgtcgaagctgtccttacttactgtcctcaaata

SEQ ID NO: 810626 - DNA, 100 bp, Homo sapiens
agacactctgggctcggacaggataccttggttttgtccgccggaccgagctcacagcggccactggagttgattatggaagattcccacaagagtacca

SEQ ID NO: 810627 - DNA, 100 bp, Homo sapiens
gaccccaactgctcctgctcgcctggtggaatgaatcttacttgttgaatatcttctggttactagttggattcatttgtgaaagaatcattttcccctg

SEQ ID NO: 810628 - DNA, 98 bp, Homo sapiens
gcagacgggcgtcttctacctgacgctcgtcctcatcctggtcactagcggactcttcttcgccttcgagtatatgtctcgagtccacggtatgcacc

SEQ ID NO: 810629 - DNA, 100 bp, Homo sapiens
atccgatatgatgctgtgaagagtaaacctgccctcaagtatgtgttgtatacattggttggctttgtgggttttgtaacccattatgtgctgcctcaag

SEQ ID NO: 810630 - DNA, 100 bp, Homo sapiens
ccgtcagtccctgctctgtgcgcgcctccatctgggccatggatggactgggctggcttagatgaagatgaagatgcacatgtctgggaggataattggg

SEQ ID NO: 810631 - DNA, 107 bp, Homo sapiens
cgagagcgtgaccgagagcgcgaatatcgtcatcgttagaaggtgtgtcaaggatgccacaatgccatcgacccagaagtgcagcgggtgacctataacaatttcag

SEQ ID NO: 810632 - DNA, 100 bp, Homo sapiens
gacttggtggtggagtgtagagatatagttggcaacctcactgagttagaatcagaggtcctggacccaagccagaagcctctgcaaagcttccttccag

SEQ ID NO: 810633 - DNA, 99 bp, Homo sapiens
tcgcagtggtcgcttcttctccttgccacatgctaaatgccctttatgcagaaatgatatacatgaagataatttattagaatgtcctccagaagaatt

SEQ ID NO: 810634 - DNA, 100 bp, Homo sapiens
aaaattatgcatgcgttagggaagctctgagagaatggctgtggaaggagcaggacatcgagactttacatggctctgttcacgtcacgctgtgtgggac

SEQ ID NO: 810635 - DNA, 100 bp, Homo sapiens
tgcaagctttgtcggaagaggaccggaggctctggatggaagccatggatggccgggaacctgctgttcgctgctacgaatctttaatcttaaaagctga

SEQ ID NO: 810636 - DNA, 100 bp, Homo sapiens
accaatgtcatccttgcagacctcaacctctcaggctgcctctaagaatcaaacttcactcttgggagaaccaccaaaagaaattcggctcagtaaaaat

SEQ ID NO: 810637 - DNA, 99 bp, Homo sapiens
aagttccttgcttttttgctgctgtttggtgactggaagaggcaccagagactctcactctggggagtcacagaagatcttattagacggaatgctgaa

SEQ ID NO: 810638 - DNA, 100 bp, Homo sapiens
gctcagtgagaagcaacttcatatagacactttagagaacagaatcagacccgagagggactcacttatgggaattcatccgcgacatcctcttgaaccc

SEQ ID NO: 810639 - DNA, 122 bp, Homo sapiens
tgctgcttatggagcaagacagaaacgaagaggccatcaaacttttggaatctgccaaatgtgttcagagcaacattgttttgttgacacaagcatttagaagaaagtttgtgattcctgac

SEQ ID NO: 810640 - DNA, 132 bp, Homo sapiens
taaatccgccagccagacaaagccgcctgatggagcgttggctgtgaggagacagagcatcccagaacagtccactttggaaagtgaagaatggaatccttgggaaggagatgaaaaaaatgagcaacaaca

SEQ ID NO: 810641 - DNA, 100 bp, Homo sapiens
aaagagctctcgtgccgccagcaggcggccaacctcatccaggagatgggacagcgtctcaatgtgtattgtaatagagattttgatgatgagaagatcc

SEQ ID NO: 810642 - DNA, 100 bp, Homo sapiens
catggcggagctgacggtggaggttcgcggctctaacggggctttctacaagggaagaaacccttttttcttggagccagcaataattatcacaattact

SEQ ID NO: 810643 - DNA, 100 bp, Homo sapiens
tgctttagcatttatcacttccttccttactttgtcttggtatactacatggcaaaatgggaaagaattctccactttaccaatacttacaggatctggg

SEQ ID NO: 810644 - DNA, 98 bp, Homo sapiens
tctgcccacttccaccagagacacattgagaaggaggaaactatggcctccaggcttccgacggcctggtcctgtgagagaaacaagaatgctgctca

SEQ ID NO: 810645 - DNA, 100 bp, Homo sapiens
ctgaagatgggaaagcccatcctttcaaaatcaacttagaatcagaaccacagagtcttgctaagctgcaggagcggtttcatttggatcagaacattgg

SEQ ID NO: 810646 - DNA, 100 bp, Homo sapiens
gctggaacagttgcagggtcacagaaacatcgccatgaaagctgatcggaagcgcttaaagggcgagaagacagacctggtgagccagatgcagcagctg

SEQ ID NO: 810647 - DNA, 100 bp, Homo sapiens
aaaaatgaagatgatgtagacactggactattaggtgaagatggagctggaaaaacaagcttaataagaaaaattcagggaatagaggagtataagaaag

SEQ ID NO: 810648 - DNA, 99 bp, Homo sapiens
gtgactggaagctgcatccagatggtggcagaggaagccatgtgccattatgaagacattcagacgcctcctaatttccaaattacaagatgaatttga

SEQ ID NO: 810649 - DNA, 51 bp, Homo sapiens
ccgggagttacaccgccaccgccagacttgttacatttactgactctcatg

SEQ ID NO: 810650 - DNA, 100 bp, Homo sapiens
ctgcacgcagaggctccccacggccgccaaactggcgatggaatatgagaggagccctctggaaagaaaaggacagaccctgtgctttcatgaaagtgaa

SEQ ID NO: 810651 - DNA, 100 bp, Homo sapiens
atatccaagaacaagcactgcaggccgatgctgctaccagctttctgagagcagcaagatcaggtaacttggacaaagctttggatcacctgcggaatgg

SEQ ID NO: 810652 - DNA, 105 bp, Homo sapiens
tacgaagcccatctgttttggaagttagagaaaagggctatgaacgattaaaagaagaactcgcaaaagctcagaggttctggaggctgggaagtccaagatcaa

SEQ ID NO: 810653 - DNA, 98 bp, Homo sapiens
ctccaccgaacgccgcagtttgagggtcaaaagggaagtgtttggattgtgagctatttcagaactgttctcaggactcattattttaacatttggga

SEQ ID NO: 810654 - DNA, 100 bp, Homo sapiens
cactggctggattgaggagtagaaggctcaaacaacccaaggtgttgacagctcttctaccacaagcagtgcttctccaatgcccaacagttatgatgcc

SEQ ID NO: 810655 - DNA, 100 bp, Homo sapiens
ggttaatacaatccctggctttgatggagtagtcaagggccttaaagcggctgacaatgaccccacagctccaccatatgactccctgttagtgtttgac

SEQ ID NO: 810656 - DNA, 100 bp, Homo sapiens
ctgggatccgcaggttccctacacggtctcctgggtcaagacctgtcatttactccatcctttatagtgatgctacaggacgaagaggaatggataaaaa

SEQ ID NO: 810657 - DNA, 100 bp, Homo sapiens
taactgaaggagtatccagttgctggtttctaacagctgaaggttataagcacatgtccttggccctgaataggactggcagaagcattgtgtactcctg

SEQ ID NO: 810658 - DNA, 100 bp, Homo sapiens
tggaggaagtgggggttatggtgggaggagccgatactgagcttcttcctatttgccatggcccctggatgaaacactgaagaaagcccttacaggtcac

SEQ ID NO: 810659 - DNA, 100 bp, Homo sapiens
ttatccagaccatggggaaggatctgacaccgatcacaccctctagggtctcggctcactgtagcctcaacctcccaggctcaggcaatcctcccacctc

SEQ ID NO: 810660 - DNA, 98 bp, Homo sapiens
cagcttcatgctaaaactggtcaaagtgctgactctggtaccattaaggcaaaattgagcctcattcattcagatataagaacaggaggaaagagtcc

SEQ ID NO: 810661 - DNA, 98 bp, Homo sapiens
ggccgcaggcgggacccggcggggcgcaccacagagaccggcttcaatatcttcacccagcatgccaagaaggatcaagaaggtggagaagaaaagaa

SEQ ID NO: 810662 - DNA, 100 bp, Homo sapiens
agcaagaagtggagacagagcttaaaatgtcaactagaagccatttgtgtcaaggtaacgtctggagaaacaaaaggtcaggaaaggccaatgctcctac

SEQ ID NO: 810663 - DNA, 100 bp, Homo sapiens
ggaatgcaaagaccagaacaaacagaaggaagccagcagccaagccggggcagtttcagtctccaccccaaatgcagtaacaaatgtggcaattattttg

SEQ ID NO: 810664 - DNA, 98 bp, Homo sapiens
aaggcctgcagagcacagtcacaggccacgtagaacgtgcccttgagactcggcacgagcaggaactgatctggtcggatctcacaaggccatccaat

SEQ ID NO: 810665 - DNA, 100 bp, Homo sapiens
cagcaatcagctggcctggtttgatactgacctgtaaatcatcctttagctaactgccttctatgaaagcagtcattattcaaggtgatcgtattcttcc

SEQ ID NO: 810666 - DNA, 100 bp, Homo sapiens
aaaaactgtctgtgaggttgtgaatttaacaaatttacattgtatcctggtgaagatgcaatgaccggggacacagacaaatatcttgggccacaggacc

SEQ ID NO: 810667 - DNA, 100 bp, Homo sapiens
tggaggacacacctaaacatgtggaatcccaatgccgtattcatgtgattgaacggcgtgctcttcctgagttcttcaatggaaaaaacaaatccaagac

SEQ ID NO: 810668 - DNA, 100 bp, Homo sapiens
gacattgaacttactcatcacgtctctatagtgtcttctgagctgaagccatttattggtatcttggatggttaacatctaaatgcttaattcctgaaac

SEQ ID NO: 810669 - DNA, 98 bp, Homo sapiens
tttaaaggaacctgttgataaatgcaaaacagtggctgttgcagctggtcctatagtacccctcctcaggaatgtctccccagtgcaaggacaaagac

SEQ ID NO: 810670 - DNA, 100 bp, Homo sapiens
cccctgtgcttctccccaggtccagccaatgcattcagaagccaaaatggtggagcagctgcgccaggccattgaagaactgtactactttgaatttgtg

SEQ ID NO: 810671 - DNA, 99 bp, Homo sapiens
gctgctggagttcctggtgtgcccgctctccaagaagccgctcagtgatgaattgactctggaaggcatcaagcaatttttcgtggcagtggagaggga

SEQ ID NO: 810672 - DNA, 99 bp, Homo sapiens
agctcaaaacatcctgaggacagtgcctggaggcaggagttggtggtgggtctcacaaaggagctgaccctgaacattaacctaactaactccggggaa

SEQ ID NO: 810673 - DNA, 100 bp, Homo sapiens
aaatcaggatggctggataaactctctcctcaaggattcaaggcctcttccagatgtagccctgactgggaagtgcactcgtgagtgtgatgagtatggc

SEQ ID NO: 810674 - DNA, 100 bp, Homo sapiens
caagatttccttactgaaaccctctacaaaggcattagtcctatcttgtaagaatccaactcaagtcggaacagctcttcaggttttctataatcttgga

SEQ ID NO: 810675 - DNA, 99 bp, Homo sapiens
gggtctggaggagccttctcaagaacagaggtctgtgcagacttttgcagacaaatcaaaacaagaagctctgaagaatgacctggtggaggctttgaa

SEQ ID NO: 810676 - DNA, 98 bp, Homo sapiens
tggcactcgcctcggatttgggggcttcctcactcgtggctttccgaaggctgctggaatagccaggccagaagaaggaaggcctgtggtgagtggga

SEQ ID NO: 810677 - DNA, 100 bp, Homo sapiens
cagccgggaactccccatcgcgttttgccagcgataatacgcctcaggtgctgttggcagcagcggtctgcacaaaagcaggaaaggctattgtttctcg

SEQ ID NO: 810678 - DNA, 112 bp, Homo sapiens
acagcctggcgcacgtccgcgagatggcttgctccattgtcgaccagaagacctcgggactcaacaataaaccagaccagtatggctctatcttcatgaagaacatacacaa

SEQ ID NO: 810679 - DNA, 100 bp, Homo sapiens
cagtgaagtggacatgttgaaaattaggtctgaattcaagagaaagtacggcaagtccctgtactattatatccaggactctagtatgggattcctttct

SEQ ID NO: 810680 - DNA, 100 bp, Homo sapiens
gccgctcgcgatccccgcaccgaagacgctcccggatgctgaaaacgccattcaacagatgggtggccagtggcttggtggaagacaaatcagaactaac

SEQ ID NO: 810681 - DNA, 100 bp, Homo sapiens
ttgtggagagctcgaattccagaatgatgaaattgtggcatttggtccactttggtgccatgaagacatcacacctaaaaatcaaaattcaaagagtgct

SEQ ID NO: 810682 - DNA, 100 bp, Homo sapiens
gcaataaccatgaacttcgaaacgtgataagaagcacctggatgagacatttgctacagcatcccacattaagtcaacgagccaggccaagtctattgca

SEQ ID NO: 810683 - DNA, 100 bp, Homo sapiens
gagggggactctgtgtgagggaaagaaaacaatttctcctgctctgcagcttctgttcaggggttcaactagatatagcttcacaatctctggatcaaga

SEQ ID NO: 810684 - DNA, 98 bp, Homo sapiens
aatacattaagcagaatcctatggctactggaagaggatcacctagcccgggtagaagaggcaatcacccgtatgcttgtgtgtgccctgaaaactgc

SEQ ID NO: 810685 - DNA, 98 bp, Homo sapiens
cccgggactccctgtgccttgcttggagctgacgccgacggcttcctgcctgacacagctcacttcaagaagtgcacaatgtcagaacgtggaattaa

SEQ ID NO: 810686 - DNA, 100 bp, Homo sapiens
tttgaagtatttgacgaaaatagactggtgtctactatgaaccatcctgtactcagaatgtgaatcatggtgtacttgtggttggctatggtgatcttaa

SEQ ID NO: 810687 - DNA, 100 bp, Homo sapiens
gctccgggatgctgtactccttgtctttgcaaacaaacagcggccctccaggcactgaagcgtaagaagaggtatgagaagcagctggcgcagatcgacg

SEQ ID NO: 810688 - DNA, 99 bp, Homo sapiens
ttccagtcgctgctcctgcttctcgggctgctggtgctgtgcgcgaggctcctcactgcagcgaaggaaatattcccaagagactctaacttaaaagac

SEQ ID NO: 810689 - DNA, 99 bp, Homo sapiens
gcagagtggctatggtgggcaaactaagccgattttccggaaaaagagtcatttgatgtggtcacaaaatgtgtgagtttcacactaactgagcagttc

SEQ ID NO: 810690 - DNA, 100 bp, Homo sapiens
ataaaaatgacttcccattatgtgattgccatctttgccctgatgagctcctgtttagccactgcaggttcagccctatgtagctacaacctaaagcctt

SEQ ID NO: 810691 - DNA, 99 bp, Homo sapiens
ttccttggagatggaacgcagagacaagcatcaattcctgaagattgccaagcccctctccagcctcactccactgattgctgcagctaaggaggcaac

SEQ ID NO: 810692 - DNA, 100 bp, Homo sapiens
taaaataaaggacttccctgaaaaagctaaggatatctttattgaagctcacctttgtctaaataatctaacaaagtgccagtggtgcagcaccctcacc

SEQ ID NO: 810693 - DNA, 100 bp, Homo sapiens
caaaaagccgatgtatcttctacagggcagggagttattgataaagactccttaggaccgcttttacttcagtgacttttttgaacgaaccattctgtgc

SEQ ID NO: 810694 - DNA, 100 bp, Homo sapiens
cgccgctgacttctccactggttcctgggcaccgaaaggtggaatacatgttggtatcttttgatcatgaaaataaaaaagtccggttggtcctgtctgg

SEQ ID NO: 810695 - DNA, 98 bp, Homo sapiens
tactgcacacctctcaatgcagctttacagggtttcaaagacaacctccacgctgtgttctgcttggctgagaactcggtggggcccaatgcgacaag

SEQ ID NO: 810696 - DNA, 98 bp, Homo sapiens
cggatcaccgtacggccgaacgcgacccgaggaggcggaagagcggcgccggttgtccttctattcaggccactcttcgttttccatgtactgcatgc

SEQ ID NO: 810697 - DNA, 100 bp, Homo sapiens
accctacaaaaaagcttgcaccacagaagctcacaaacaggcccctgtgtccgtctgggatgaggaggaggatggtgccgtgtttaccgtcacaagccgc

SEQ ID NO: 810698 - DNA, 100 bp, Homo sapiens
tgatttgctgtcagccatgaacggatggatgtgatgcctgctagccaaaaggtgatatcagtatcaagataaaagtttggaatgggagaaaaattctcaa

SEQ ID NO: 810699 - DNA, 98 bp, Homo sapiens
gccgtaatgccttggctgctctcagcccccaagctggttcccgctgtagcaaacgtccgcggcctctcaggctgcccggcagctctgacagactcaga

SEQ ID NO: 810700 - DNA, 100 bp, Homo sapiens
cagatgtggtttccttattggagcaagggaaagaaccctggctggggaaaagggaagtgaaaagagatctgttttcagcaccttgcagagtgaagtcaag

SEQ ID NO: 810701 - DNA, 98 bp, Homo sapiens
gccaccttatcttagagttattcaaggggatggagtagatattaataccttacaagagctggaggagagcaggagtgttcagaagcaaatgaagatcc

SEQ ID NO: 810702 - DNA, 100 bp, Homo sapiens
gggtctggagacgccgtggcagcctgaacggagtgtgcgacggattgggaggcaagcacgaggagcggcaggacgagcatggctacatctcccggtgctt

SEQ ID NO: 810703 - DNA, 106 bp, Homo sapiens
tgaccagaccatgttagataaacttgtggatggacttgctacctcttgggtgaactctagcaattacaagaaacaagtgttgaaaatgttaaaggctgtgctgaag

SEQ ID NO: 810704 - DNA, 100 bp, Homo sapiens
aaccgatatcatttctgatctgtctgaatgtttaattaatcaggaatgtgaagaaattctacaggatcttaagtaccaggcccaagataactttatgatg

SEQ ID NO: 810705 - DNA, 100 bp, Homo sapiens
ggatgatctgtttctaaagcgttacgcatctttgctgaagtatgctggagagcctgtccctttcattgaaccccctttttcggctttgtgagaaacctta

SEQ ID NO: 810706 - DNA, 100 bp, Homo sapiens
aagctcacccatgatgacacaggagccaggtatttacacctggccagagaagacacgaataatctgttcaggttaaacactttaagatgagaaaaattga

SEQ ID NO: 810707 - DNA, 100 bp, Homo sapiens
cattggaaaagaaatcctgataagaactgctttgtcataaataaagttcatcttaaggcaaatcatgtggtcaagagagatgttgatgagcatttaagaa

SEQ ID NO: 810708 - DNA, 99 bp, Homo sapiens
ggtcggggaggagaccatggctgactacctgctgtacaccctcaacaaacaccagcgctttggcaaacggggattcagcgtccgatcctttggaacagg

SEQ ID NO: 810709 - DNA, 100 bp, Homo sapiens
cagcgtgcctggttacagctgtttccacgtgcggtgctcgtcgggagtgatcacctaccctacaggcaatgcggtgtgcagagggtgcttggtggttctc

SEQ ID NO: 810710 - DNA, 98 bp, Homo sapiens
tccccgtaccgcagcccccgggcacgacctctcggacacggtgcaggcagggcctaaggatcattttctcggatgcatcacggctcatcttccggctc

SEQ ID NO: 810711 - DNA, 51 bp, Homo sapiens
ggaaaacatatattggagctacatggatagccagtcttggtgctctgtgtt

SEQ ID NO: 810712 - DNA, 98 bp, Homo sapiens
aggaggttcagtggacccttggagccatcctctacaggacccgctttctaccattaaggggaaaagtatgaattgcacgcagcgactgacaccactcc

SEQ ID NO: 810713 - DNA, 100 bp, Homo sapiens
gtcagtgcagagcctggcaacctgcataagtgagagggtccaagcctggtaagaatgtccagcttcaggagaatgaaatcagaggactgtgcttaaagtc

SEQ ID NO: 810714 - DNA, 100 bp, Homo sapiens
ctttaatcacctctttgcaattgccaattctgcagaagctggagatgctggtgttcatttggtatcagggtacaatcattggtttgatgggatggcgctg

SEQ ID NO: 810715 - DNA, 98 bp, Homo sapiens
attctggacatgataagcttaatgaggaaatatcaagaacatgaagatgttcctatttgtattcattgcaggtcattatgcgacacaaaggactgtgg

SEQ ID NO: 810716 - DNA, 100 bp, Homo sapiens
ggattcaaggaccagatctatgacatattccaaaagctcaacagcaacacccagacttcacagagaatgcagttgtcttgacttcaggtctgtctgttct

SEQ ID NO: 810717 - DNA, 100 bp, Homo sapiens
gccgcggaaaccgatctgcccgttgtgtttgtgaaacagagaaagataggcggccatggtccaaccttgaaggtaaagtgttgagagaggagaaccagtg

SEQ ID NO: 810718 - DNA, 99 bp, Homo sapiens
tagtagaaaaagttcttgggacaaacttcatttgtcaagtccatcatctccagaaccagctagtcttcctgcagaagatattagtgcaaactccaatgg

SEQ ID NO: 810719 - DNA, 100 bp, Homo sapiens
tgaatacaaggtcatcagcacaggatatgccttgtcagatctgctacttgaactaccctaactcgttttgacagtgtttcctgccttgctgactcttctt

SEQ ID NO: 810720 - DNA, 100 bp, Homo sapiens
gagaatatttaatggaaaatcgcttggttaaaacctgacacttttaacagatcgcttcttgacctgcacaactttctgatttgatgagttcaacagaaac

SEQ ID NO: 810721 - DNA, 100 bp, Homo sapiens
atggaaagtcgggggctttcgcccgggtcctcctagaaattccccccgaagaagactcccccacatctgggatacctccaaaagcagccatactttggag

SEQ ID NO: 810722 - DNA, 100 bp, Homo sapiens
gaatacctgtggccattctggcttttcatcagaagcgtctatgattccttcagataccagggactgtggccctcagattctcagcttgattctaaggaac

SEQ ID NO: 810723 - DNA, 100 bp, Homo sapiens
ttctgaaagtgcattaacatttgtggccttgtgctctttcatcggacttctaatggccatcgaagacggcaatttggaggaaatggaagaggaagtacgg

SEQ ID NO: 810724 - DNA, 100 bp, Homo sapiens
ggagaaggaagaggtgtttgaaaagattacatgcagcaaactggaggtcaagcacatctattcttttggatgacagtggaaggataccgggttaccgccc

SEQ ID NO: 810725 - DNA, 100 bp, Homo sapiens
ctggttcctcttcagaaagaaaaaagaagaagtccccgagttcaccaaaattcagacattgatgataatgaagataattcaaatgatgggacccagccat

SEQ ID NO: 810726 - DNA, 100 bp, Homo sapiens
cgggagatgatcctggcggattttcagccacagacccctttgcttctgtttttgggaatgaatcatttggaggtggatttgctgacttcagcacattgtc

SEQ ID NO: 810727 - DNA, 98 bp, Homo sapiens
aagagctagaagataattccaatcatcttacaaaactggaaactgaggcatctaatatgaagaaactgatgatggtgttgatgatctgaaaataaatc

SEQ ID NO: 810728 - DNA, 98 bp, Homo sapiens
ctctaagttacctgtggatatccttggaagattactgcaacaaggaggtatacaataaggagaatcttttcaacagcctgaactatgatgttgcagcc

SEQ ID NO: 810729 - DNA, 100 bp, Homo sapiens
gaagacttggatgaaaatatggattacaggttgatgtgggagaaaatgcttgactacctcaaggagaaaaaggatgtgggcttctttcagagcctggccg

SEQ ID NO: 810730 - DNA, 98 bp, Homo sapiens
caagcacaccctaccgaattacaagatcagccatatccagaagacccagcagtttataaaccactctcccaggaagagctgcaaaggataaagaatga

SEQ ID NO: 810731 - DNA, 100 bp, Homo sapiens
aaagaaacctctctgcatccccaaggccaaatccttgtagctgtcttcttgccccggtcagtgccagccgtactattcacaacactgctgctaccgaggc

SEQ ID NO: 810732 - DNA, 100 bp, Homo sapiens
ggcgacatactacctctggccccgagatcagaatgccgctgttttcactcattagctcctgaggtaaacaaattgaaaaaatgagcgaactggaacagtt

SEQ ID NO: 810733 - DNA, 100 bp, Homo sapiens
gccccagctcggtgttcctcagcaattgtgggcacacttgaagctgaaaaagaaagaagaaaatctgggctatcctcaagagttcagtttcgaaaccaag

SEQ ID NO: 810734 - DNA, 100 bp, Homo sapiens
aaactatttcaaaacctcgagcatctagaaaagaaaatggacctgttgtagggctgtgggacagatgatgtctaccatgttctacccactggtcaccttt

SEQ ID NO: 810735 - DNA, 99 bp, Homo sapiens
acgggaggtgaatttccatgtcaacatagtcctgggtcctgacttgtcctgggcaagccaagtccattgcttctgctcctgggaagtgccaagattctg

SEQ ID NO: 810736 - DNA, 100 bp, Homo sapiens
ttttcgttgacccggacgaggaggagtctgctctgcggagatcatggggacagcctcccaagctgaaggaaggtaaccttcgagaaagctttgaatgccg

SEQ ID NO: 810737 - DNA, 100 bp, Homo sapiens
cacagaatctacacagcaaagttaacctgacacagaaaatccttgtgcaaataaatgcttagaaccgcggggaaaggcgaatgggtgcttttgaatgtgt

SEQ ID NO: 810738 - DNA, 98 bp, Homo sapiens
cacagttacattacagacctgttccaggtgttacttactggaaatggaaacacgaaggtctcgtctacagaggactggtctttcaatagcaagttttc

SEQ ID NO: 810739 - DNA, 99 bp, Homo sapiens
ccagtgttgcccttggccccctcgtcgtctgccccaggcatcagaacacaccatgatggctgtgacctaagaccctcaggaagccccggggtcatggcc

SEQ ID NO: 810740 - DNA, 109 bp, Homo sapiens
ttataccatgaaatgattgaatctggtgttatcaacttaaaagatgccacctctaagccgcatgaagctggagagtgcatctacttcctccctggaggatcgggtgaag

SEQ ID NO: 810741 - DNA, 100 bp, Homo sapiens
gccattgaaaaccctgctgatgtcagtgttatatcctccaggaatactggccaggtgaattcacataaaagggcatcagaaaaatacaaagacaacccat

SEQ ID NO: 810742 - DNA, 100 bp, Homo sapiens
aaaaacattgctgcatagtcttgggactctggcccaggagaatgacagcccatatcaaggcggtgtattctttttgacaattcattttcctacagactac

SEQ ID NO: 810743 - DNA, 100 bp, Homo sapiens
tccctctcagattcagtaactattttcagcaggttaaatttttcagaccaaccaaatctgactcagtggattagaacaatatctcagcaaataaaagcat

SEQ ID NO: 810744 - DNA, 98 bp, Homo sapiens
accacctagcatagaggaagttgaagaggtggcaccacctagaggtacctacagaatactggacatacggattcagaatccataaggctttatcacct

SEQ ID NO: 810745 - DNA, 99 bp, Homo sapiens
tggtgtggtacctatttcagattgtttcagcagtgagctgcatccataaagctggaatccttcatagtatggactttctgtcagattttgagatgatgt

SEQ ID NO: 810746 - DNA, 100 bp, Homo sapiens
gaaagagccagaagtacgacagttcttcttcttgctcgcagtttgccacacagtcatggtggataggactgatggattatagtgtcacctatggccattg

SEQ ID NO: 810747 - DNA, 100 bp, Homo sapiens
ctctggatggggtcaagtcctggctgaagccacggctgggacaggaagccacacaattgggcagatgtgtgaggcacctgtggtgacccgagagtgggtg

SEQ ID NO: 810748 - DNA, 100 bp, Homo sapiens
ggctccgggtcttccagagcgtgaagatcaagatcgcgatgccctcctagctagccgtcacgggatggagggcttcatggactcagggacacagacggac

SEQ ID NO: 810749 - DNA, 98 bp, Homo sapiens
aggactcaggctcccttcacctacattttctgtgatggatgtggaacgttatgtagggcctgctatggtgtgctgcggttcatcatggagagtggggc

SEQ ID NO: 810750 - DNA, 100 bp, Homo sapiens
ccgtaccctttttcaaaaggaactcatgatgtatacaaggtctccgtctctccaccgggggcttcatccttccagggaggagaagagggactccagaatg

SEQ ID NO: 810751 - DNA, 99 bp, Homo sapiens
ctacgtagctctgactgatggcttagggaacctcaccatcatcattgaaaccatggtcacttacttcagcctctggtactacaacaagcaaaatcagcg

SEQ ID NO: 810752 - DNA, 98 bp, Homo sapiens
ggcctacatccaggagagcgccaccttccttgaagctgtttttcagagtgacggatgaccgggccaagcaatctgaactgtacttagttggaatgatc

SEQ ID NO: 810753 - DNA, 98 bp, Homo sapiens
tggggggtccgggggagggaaggggacagaagatggccaagaagagaaagccccccagcatcaaggggtaatacctgcctggagaatggatctttctt

SEQ ID NO: 810754 - DNA, 100 bp, Homo sapiens
aaatgggccattctcctggaagagattgaatgcacagaagaagaaatgatgatgtttgcagccctgcagcatttctttgaaggtgttgaagctcgcgtgg

SEQ ID NO: 810755 - DNA, 100 bp, Homo sapiens
gaacaggcttcggcgaacacaaagggacacttagtcggtctggatgaaccagcttcgggagctgggcaagaagctctgcttaaacaagagcaagcaaaaa

SEQ ID NO: 810756 - DNA, 100 bp, Homo sapiens
ctccgccaccgtgcacatccgaatgggacctagaagaatcccttaggatgaagctgagtcttaccaaggtagttaatggctgtcgcctaggaaaaataaa

SEQ ID NO: 810757 - DNA, 98 bp, Homo sapiens
aatgatgccacaacccttacgcaaagctgtccagaccaaaacgaagaagacgttagccaaacccaatataaggaatgttgtggtggtggatggtgttc

SEQ ID NO: 810758 - DNA, 100 bp, Homo sapiens
tcgaacaccgacctcgtcccggcccctgcagtccggatactcacgccagaaggttgtctgcagagtgagattatggcgaagcattttattctttttacaa

SEQ ID NO: 810759 - DNA, 100 bp, Homo sapiens
gatgacattgaggacgagtccacgggcctgaagaagggtacagctctgccggggggggaaaaagtggtaccattttgggcgttcttgagcttcagaatgc

SEQ ID NO: 810760 - DNA, 99 bp, Homo sapiens
agagtcaggtgaaggctgatggatttcagaaactgttggagtttatatacacaggaactttaaatcttgacagcacccacatgcaggatctccaggagg

SEQ ID NO: 810761 - DNA, 100 bp, Homo sapiens
tatcagagattgagaatgtccatggatttgtttctcattctcatatttcaccaataaaggctgctgacttgagtaaaccaatagataaaaggatatacaa

SEQ ID NO: 810762 - DNA, 98 bp, Homo sapiens
gcattttatgctccagtacatgcagatgacttgagagaaggtgcacagtatttgatgcagctgaagagtctgctgcttctggagcaaagggagatctg

SEQ ID NO: 810763 - DNA, 98 bp, Homo sapiens
cagcctaggagtgcgtggacaccacctcagcccactgagcaggagtcacagcacgaagaccaagcgcaaaggaggctgagtgcccctagagggcaggg

SEQ ID NO: 810764 - DNA, 100 bp, Homo sapiens
tgtccctgtgggacacaatgcccccaagaaaatatttacaccagcagctccagttcataccaataaagaagatcctgctacccaaactaatttgggattt

SEQ ID NO: 810765 - DNA, 111 bp, Homo sapiens
actgattgcagggagcactgtagaagaggaatgaaggccaaacaattaaaagcggaggcggggaggtgctgctacccccgtatgatgatgccactgtgaatggtgctgcca

SEQ ID NO: 810766 - DNA, 100 bp, Homo sapiens
ccacggcacggaaggtggggcggcctgggaggaagcgcaagcaccccccgttacagaatgtctgaaggggacagtgtgggagaatccgtccatgggaaac

SEQ ID NO: 810767 - DNA, 100 bp, Homo sapiens
ccaagagtcatggataaagtcacttcagatgagaccagaggtgcggaaggaacagaaaggaaatgggtcctgatgaatatgaagagatggaagaagagga

SEQ ID NO: 810768 - DNA, 99 bp, Homo sapiens
tatgtccgaagcaaggatttccgggactacctcatgaggtaccagacgtgctccaacaatgggctggtggcaggattccagagccgctacttcgagtca

SEQ ID NO: 810769 - DNA, 100 bp, Homo sapiens
aagagagacatttctggctctgaaggcgaacgcttcgctggccatttaggagctctgctcaaagccagacggactgcgcccggggcacggccaactgtgt

SEQ ID NO: 810770 - DNA, 100 bp, Homo sapiens
ggatatggtcgtgatcgtgactattcagatcatccaagtggaggttcctacagagattcatatgagagttatggtgagatcggactggaactgttcggct

SEQ ID NO: 810771 - DNA, 100 bp, Homo sapiens
ggcaactttctgggatccagcgagcgacatgcacctggctgcagtggaagaaagaaagatcaagtccctggtagctctcttggttgagacacaaatgaag

SEQ ID NO: 810772 - DNA, 99 bp, Homo sapiens
ttagaagtatatatgatgacatttctagcccaggacttggatcaacacctttaacttcaagaagacagacttcctgctatatcctgatcatcactattg

SEQ ID NO: 810773 - DNA, 100 bp, Homo sapiens
ggctcctgtagaggaggctggagattccacccaaatcctcttctccaagaagatatatttttgccatcatggatcagtttggagatatattagaaggtga

SEQ ID NO: 810774 - DNA, 100 bp, Homo sapiens
ctgaaggagtgtggactttttgaatttcaagaacagtaaagttggaacacagcagagggtgtgtaataaaatacaggccaaagaactgccaactctgaaa

SEQ ID NO: 810775 - DNA, 111 bp, Homo sapiens
agataattacacaaaagccgaggaaattttgagtagatccatagtgaaacggtgggcaaattttgcaaaatatggattttattcttcaccgtacagtattgcaaccaaccg

SEQ ID NO: 810776 - DNA, 100 bp, Homo sapiens
aacaaggaagaccaaagcattgctgcacaagtttcctccaagcctttatgctaccaggatttctaaagcacaccaagaggaaatagcaggtgctttccta

SEQ ID NO: 810777 - DNA, 98 bp, Homo sapiens
agaagggagccaacaaaaattgttttttctacctgttgacgtgtcaagcactaactgtgcagaggacgtggtgatggcgttttccaggtcggagacgg

SEQ ID NO: 810778 - DNA, 98 bp, Homo sapiens
tctatgtgctgtgtccggacaacggctgcggcgacaatttttacctggagtagaacagaaaaattattatgtctgtgttcccttgggactcattggaa

SEQ ID NO: 810779 - DNA, 99 bp, Homo sapiens
ggcgacgcagcccgcggcagaaggttggtcaaagaaaaagtgatgtatgaaaaagaggcaaaacaacaagaagaaaagattgaaaaaatgagagctgaa

SEQ ID NO: 810780 - DNA, 100 bp, Homo sapiens
ttaggaactgtgaagatggaagggcatgaaaccagcgactggaacagctactacgcagacacgcaggagattgccgtgtgccatgaactctataatacca

SEQ ID NO: 810781 - DNA, 100 bp, Homo sapiens
gatctatattccctttccagaagatgattccaacgccaccaattccaacctggacaacagctttgagcagttcattattaattattgtaacgaaaagctg

SEQ ID NO: 810782 - DNA, 100 bp, Homo sapiens
ccggcaaagttcacgtgactgtggatctcaagtactaccggccaactgaagtgacatagggcctgattacattccaacagaggaagaaaggagagtcttc

SEQ ID NO: 810783 - DNA, 100 bp, Homo sapiens
gaggtgaccagaaagatctccatcggttgcccaaggctaggtacagccccgtggtggaggccggctcggacatggtcttccggtggaccatcaacgacaa

SEQ ID NO: 810784 - DNA, 100 bp, Homo sapiens
tgctgccatggctgcaagacctcattcaattgatgggagagtagttgagccaaaacgtgctgtagcaagagagagatggggtcttgctatgttgcccagg

SEQ ID NO: 810785 - DNA, 98 bp, Homo sapiens
gaaacgctggctcgcgctcgcgctcgcgctggtggcggtcgcctgggtccgcgccgagcaatctgcacatcgtgctgccacacgaggcttcattcgtt

SEQ ID NO: 810786 - DNA, 100 bp, Homo sapiens
gagaagtttttttgtatgaaattggaggaaatattggaggaattaattccaatgagtgtgaaaatgtatcaagaaaaaagaaaatgtcagaggaatttga

SEQ ID NO: 810787 - DNA, 99 bp, Homo sapiens
tgccttggtatttgaagagatataaactagatcaatttctttcacaggatcaactaaacagatattgatgatgttaagaagttcaaaccgggttacctg

SEQ ID NO: 810788 - DNA, 100 bp, Homo sapiens
gtgatagctttgcttgctgtggggttgacccagaacaaagcattgccagaaaacgttaagaccgtggctgagcatggagctgtccccccgcagtcctccg

SEQ ID NO: 810789 - DNA, 100 bp, Homo sapiens
ctctcaccgcgcatgtttggagcatgatgccttcttctgtagagtgggcgctttgcagaatacgtgttgaatgaaatcactgatctaggaaaagtaaaaa

SEQ ID NO: 810790 - DNA, 100 bp, Homo sapiens
ttggcacccggatcctggatgaggaggtgtttgaggatgataatgaagataattcaaatgatgggacccagccatccaaaaggaggcgaatgggctcagg

SEQ ID NO: 810791 - DNA, 99 bp, Homo sapiens
gggaacagcacgtgccattcagagaaaacctaacccgttagccaatagtaacactactgtgtgttctcatttcacccaaaacctttggacagtgcaggg

SEQ ID NO: 810792 - DNA, 99 bp, Homo sapiens
cagatgtgaataaaactgaccatagccagagaacagccctccatcttgcagcccagaaggaaaccaagtgctacctcctggagcttctcttggaaatgg

SEQ ID NO: 810793 - DNA, 100 bp, Homo sapiens
ggaagaaagggccatctttgcaacaggtgagtggtttaccgcccccggagctgacatggctactcaatggccaacctgtgctaccagatgcctcccacaa

SEQ ID NO: 810794 - DNA, 100 bp, Homo sapiens
ctgaaacatgaatttgatgcagacttacaggtggatctttcaacatatcgttgtttagttttcaagaataaagccatcataagacctcatgccacagaag

SEQ ID NO: 810795 - DNA, 100 bp, Homo sapiens
ggtaacccagccgctggcaccatgaacccaggttctccagcaagtagataacaagtttattgcctgtttgatgagcactaagactgaagagaatggcgag

SEQ ID NO: 810796 - DNA, 98 bp, Homo sapiens
agggaaggcactcaaaagtggggggcaggaaagactgcagagtgggatgaacttgcagatatgctttgtcaacgacagtggcagtgataaggacagtg

SEQ ID NO: 810797 - DNA, 100 bp, Homo sapiens
tctaacagccaatagaaaagcagaaagccgcctcttggtttgcgtcctgcactgaaaggaaatgacggattttgaagagttacaggccaacctggacctg

SEQ ID NO: 810798 - DNA, 100 bp, Homo sapiens
ttgtgagcaccgggaaggacaacctgctcaacgcctggaggacgccgtacggggccagcattttccaggacagagcgggatgccaccagcttgtccaaag

SEQ ID NO: 810799 - DNA, 100 bp, Homo sapiens
tggtgtgtctcagcaggctctacactgggatgcatacggtcctgtgctcccaagaagatattgctgataaactaggtgtggatatctctgcaacaaaggc

SEQ ID NO: 810800 - DNA, 100 bp, Homo sapiens
gcattgagcttgggtcaggacaattccatttggggaccagagatggacggtcactcagcctatggagcaaatgaagaaacacccctgccgccagtgtgac

SEQ ID NO: 810801 - DNA, 123 bp, Homo sapiens
cgagcggtggcgtcgttgtcgccccctcctcgtcgggaagaatcgtttggtctcctgccgtgcccggccctgattacgtcaaacagagatttcaggaaggtgtagatgctaaagaaaatccag

SEQ ID NO: 810802 - DNA, 99 bp, Homo sapiens
tctgatttaatcactgtgcaatgaccgtgaactgtacagttacctccgtgtgtcacaggaagactcttccaaatttgtatcctactgtggggcttcaaa

SEQ ID NO: 810803 - DNA, 98 bp, Homo sapiens
cagttgcagacgacttgtcctgccaccaccatgagttctgagaatggatcttggagaatgtctgaaagtccatgacctggctttaagagcggattatg

SEQ ID NO: 810804 - DNA, 100 bp, Homo sapiens
gctgaaagtcatggcttttgggattctggtcataactccatgcaggaagctcatcttgtgtgctgataacagaaaagaaatggaagattggattgcagca

SEQ ID NO: 810805 - DNA, 98 bp, Homo sapiens
tcgacgtcgtgatccagaagtccagagctgaggactgcctgtttgcaggttccaatacatatgaagaggcagctgcctatattcaatgccagtttgaa

SEQ ID NO: 810806 - DNA, 99 bp, Homo sapiens
gctgatctcacagatgagacttcacgactttttgtaaagaaaacaatagtagtgggcaatgtgtccaaagcatgtaacttctaatgccagcgatagtga

SEQ ID NO: 810807 - DNA, 101 bp, Homo sapiens
gccaaagctactcctactcatctattttgaataaatcagaaactggtcgtttaggccaattgggtttgaaagaaggatttccatctgctgtgaaaaatatt

SEQ ID NO: 810808 - DNA, 100 bp, Homo sapiens
attcgggtgggagtgacccgattttccaggtggtagaaggacagcccccctgccctgagacaacactcggaggcctgtattccagcgagagtgccctgac

SEQ ID NO: 810809 - DNA, 100 bp, Homo sapiens
catcacacaaaatgtgctggttgatggtgttaagaaactctcagtttgtgtttctgagaaagcaagtctggaaaagtttgaaattccagtaaaaattcgt

SEQ ID NO: 810810 - DNA, 99 bp, Homo sapiens
atttgaaaagttcttgctgaagctagaagggcaattactggatggaatgatattccaggttcagtgtatctttgcctgcctacatcaatctgcaaggga

SEQ ID NO: 810811 - DNA, 74 bp, Homo sapiens
gaggaagagaaagatgacagcccacaggggcaagctctgtgtgattgattggaagacatcagagaaaccaaagc

SEQ ID NO: 810812 - DNA, 126 bp, Homo sapiens
ggaggatgttaaaagttacctgtttcggaatgcttttgtgctgctcacagtcaccgctgtcattgtggtgaacagcagagaatttcaaaggaccttgctaatatctgtaagacggcagctacagca

SEQ ID NO: 810813 - DNA, 99 bp, Homo sapiens
aaaaaaaagccggagtattttactaagcccctaaaatgtcgagatttgtacaaggaaactactaaagttcctggggaagcaaagtagaatttcataaga

SEQ ID NO: 810814 - DNA, 98 bp, Homo sapiens
caaattcgcctccatctgtaccatggaagaattttaaatcgtttctccaaagacattggacacttggatgatttgctgccgctgacgtttttagattt

SEQ ID NO: 810815 - DNA, 98 bp, Homo sapiens
gcagttgtctgatgaagagaagggacatctctacaccgttcccatccgggaacagggcaacatctacaagcccaacaacaaggccatggcagacgagc

SEQ ID NO: 810816 - DNA, 100 bp, Homo sapiens
ttaatcaagataactgtacatggaggctaatagctcgtcagcttgctaaaatccatgctattcatgcacacaatggctggatccccaaatctaatctttg

SEQ ID NO: 810817 - DNA, 100 bp, Homo sapiens
gaaagaccatggctttctcgcttttcatctttttggatggctgcttgtcgcaatattgtcttcttcgctttagacaagtgaggggaagtggcttcgaaac

SEQ ID NO: 810818 - DNA, 98 bp, Homo sapiens
tccagctgtctggcagggaggagagacagaagctctggcccgcctggataagcacttggaacggaaggttatcaatactctggctgaccatcatcatc

SEQ ID NO: 810819 - DNA, 98 bp, Homo sapiens
agtggatgatgatgatgacgacaatgatcctgagaatagacttacagattccagtctgctgttagatgattattcatccaagttgagccccaaaccaa

SEQ ID NO: 810820 - DNA, 98 bp, Homo sapiens
tgtactggactgcatcaggccgcgtctcctcaggcggccctccaggcactgaagcgtaagaagaggtatgagaagcagctggcgcagatcgacggcac

SEQ ID NO: 810821 - DNA, 98 bp, Homo sapiens
acttggagcatccagagatgctggagaaagcgtcccgggagctgtggatgcgcgtctggtcaagggccaacagagcacttatggcaaggcatctcgag

SEQ ID NO: 810822 - DNA, 100 bp, Homo sapiens
taataaagtgtttgcatctcagtggttgaatcataggcaagtggtgtgtggcacaaaatgcaacacggatttacaagaccagctagaggatatgatggaa

SEQ ID NO: 810823 - DNA, 101 bp, Homo sapiens
agaaacgcactttcgtggcagccgacgggaaatcctatcaagtgccaatgctggcccagctctccgtgttccggtgtggatggtgccatgacaatggtgtg

SEQ ID NO: 810824 - DNA, 99 bp, Homo sapiens
ctgaggccctatgtgcccctcttctgcagcgtcctcaccaagttttcctttggaatatggataaatacaccatgatacggaaactagaaggacatcacc

SEQ ID NO: 810825 - DNA, 99 bp, Homo sapiens
ttacagaggtctccagagccttctctctcctgacctgtcgcgaaatcgcctttcagaaattcctatagaagcatgtcactttgtttctctggaaaatct

SEQ ID NO: 810826 - DNA, 100 bp, Homo sapiens
ttccggccaacttccattgaacttcccagcactcgaaagggaccgaaatggagagcaaagaaaaggcaacagatggctccctgcaaagtgaggattggac

SEQ ID NO: 810827 - DNA, 98 bp, Homo sapiens
tgacaaccatccatactgtgtaggtgcagccagatccaggttcaacagaatccctcaatcctagaccacagaccacaatttctccagcagatcttcat

SEQ ID NO: 810828 - DNA, 100 bp, Homo sapiens
acagcatgcggaaaatactacagagtgtgcacactggctatcattgatccaggaggttgtggctcactggattgctgaaagccgcattgccattgagaag

SEQ ID NO: 810829 - DNA, 136 bp, Homo sapiens
atttggaatgtaatcaactgggagaatgtaactgaaagatacatggcttgcaaaaagtaaaccacgatcgttatgctgaaaactggcgatggaatatgagaggagccctctggaaagaaaaggacagaccctgtgc

SEQ ID NO: 810830 - DNA, 100 bp, Homo sapiens
tcgtctatttcatcacaaaactgtcccgggtgggaagaggaacagcctatgtgggcttccacggagtaacaaatgtggcaattattttggatctatcacc

SEQ ID NO: 810831 - DNA, 100 bp, Homo sapiens
cccttagttccactctgaggtctccttcacattctcctgaacatagaaatgtgtaattatcagaaaggtgagaagccatttaaatgtgatcagtgcagtt

SEQ ID NO: 810832 - DNA, 100 bp, Homo sapiens
aacaagtaatcttatatggtgtgattctgctgttcagcaggagaaaatttcagagctgcaaaattatcagaattctggtacagctcaagttttcagttta

SEQ ID NO: 810833 - DNA, 98 bp, Homo sapiens
ggaggtgatgatgccctattcgacagaactgatattttatattgaaatggatcctccagggaaatgaggcaagttatcctttggaaatgtgctcacac

SEQ ID NO: 810834 - DNA, 100 bp, Homo sapiens
aaaccttacctttattggagacaaaaccgaagtgtttggattgtgagctatttcagaactgttctcaggactcattattttaacatttgggagaaacaca

SEQ ID NO: 810835 - DNA, 100 bp, Homo sapiens
aatgacaaactgacggaaaaggagagagatttcggagcaacatcccctgtcacctggttgatatctcttgcggattaccctgcagtgccacgctaccatg

SEQ ID NO: 810836 - DNA, 99 bp, Homo sapiens
tcgcctcagacgcggtggagccgccggagtctgagaagcaaagaacagtctgaacttgatcaagatttggatgatgttgaagaagtagaagaagaggaa

SEQ ID NO: 810837 - DNA, 98 bp, Homo sapiens
agcggttggaggcttcgcccggctttgcagcggggacttcggcggcggcgcctcaggcacctcggcccggtcattgaaattatgagactatcattcaa

SEQ ID NO: 810838 - DNA, 120 bp, Homo sapiens
gatgaacaggctcttgcacacaaagaagagacatgatgtatttgcatccttccctgcttcagccagatcttagcaaagcaatgtctcaagatggtgcttctcagttccaagaagtcattc

SEQ ID NO: 810839 - DNA, 100 bp, Homo sapiens
ggaaactgtacattgaagcagaggttggactccatgaaagaattgcacaaaacaaatcgacagcagcatgagaaacatctgcaaagccgagtggactcta

SEQ ID NO: 810840 - DNA, 98 bp, Homo sapiens
gaagagggagtcaccactggacctccaaggaagccacgtgcagacatctacaaccttcgatctcctgacgacctggagatttgaaaaagagaattgaa

SEQ ID NO: 810841 - DNA, 100 bp, Homo sapiens
ccatcgtgccccccttgctgttacctcccaagtcatcaactgtagaaaccaggcggtccagtttatcaggttgcaacaaggacagtgtcagagcaggctg

SEQ ID NO: 810842 - DNA, 100 bp, Homo sapiens
gcagaatgtcttccagtatccaggagcagattgtcactgctgttccaagggcacacgcagagggatttggaattcctggagagttgcctttgtgagaagc

SEQ ID NO: 810843 - DNA, 100 bp, Homo sapiens
aggtgtgagccactgcacctggcctccttaaatgtatctttatggcctaattttcacctttgcacccagttgatgggtagcaagagtctttgaaataagc

SEQ ID NO: 810844 - DNA, 99 bp, Homo sapiens
tgtctttgtactttgataccaagaggtaccaggaagcattgcatttggagattcgtcagcgaactgcagctcaaagaaacctttctccaacaccagcaa

SEQ ID NO: 810845 - DNA, 100 bp, Homo sapiens
gaagaaataacatttgtatttcaagaaaagggccggggaccagcccttgaagatcatcagcagtgactccacagggcagctccacctcctgatggtgaat

SEQ ID NO: 810846 - DNA, 100 bp, Homo sapiens
tttctcaagcagaggcaaaggatgtcggtgctattgacagtcctgggcatgaatctttcggactgcaaatgtgctcagtgggcccctcctctgataaggc

SEQ ID NO: 810847 - DNA, 100 bp, Homo sapiens
aggaacatccccgggaatgctgccgtggtgaagcatgaagtcacagggctactgttttccaatcctcaggaatccagatgcaggccaagtacagcagcac

SEQ ID NO: 810848 - DNA, 98 bp, Homo sapiens
catgcatgtcttttaacccggaaacaagaagactgtccataggtctagacaatggtacaatctcagcattggttataaattcaaagagcttgaaaaga

SEQ ID NO: 810849 - DNA, 138 bp, Homo sapiens
tgctctgggaagcaccagggtgtccccgccgccctcagctcgaagtcagccaccatggaggcgcaggcacaaggtacaacttggccaagtagaaatcaaatgccccatcacagagtgttttgaattcttggaagaaac

SEQ ID NO: 810850 - DNA, 100 bp, Homo sapiens
ggacggcgagggcccctccgccggtgcctgtaggtgatcaacctaaggatattgagcttcaaatcagagagctcattcttcggttcatcagtaatcctaa

SEQ ID NO: 810851 - DNA, 100 bp, Homo sapiens
cgtatttaagagcctgaatattccaggtggtgctgtgggtcggcctgggcgtcctggtggtgagcactgtcaccacactgtctgtgagcgaggaggtccc

SEQ ID NO: 810852 - DNA, 98 bp, Homo sapiens
atgtcacaaaggaaaacgaggaaagtcccaggatgactactgtgtcaagcctggcatgcgtgggcagtgatgaacttcgaagctgtgctacactacaa

SEQ ID NO: 810853 - DNA, 100 bp, Homo sapiens
cttgtctcttatttagttctggggagcgcctcgtcgacatgagtgatgtggaggaaaacaacttcgagggcagatgtactaatggtcacttgatgtgcgc

SEQ ID NO: 810854 - DNA, 74 bp, Homo sapiens
gaacacaggaccagatacagaatgcacagtatttgctgcagaacagcctgtcctgggggaacagagaggccctg

SEQ ID NO: 810855 - DNA, 100 bp, Homo sapiens
agacagctcagaagttccatagaacgggttattaacatatttcagagcaacctctttcaggctttaatagatgatgattattccccaccttctaagagac

SEQ ID NO: 810856 - DNA, 98 bp, Homo sapiens
tagttcatccatcgcaagaagaagatcaaaaccaaaggagtacccctgagatggaaagacagagagctgtgtaccatctagccactaggcttgttcaa

SEQ ID NO: 810857 - DNA, 98 bp, Homo sapiens
gacactccccttccccggtcagacacgtgcgggcaccgaccccatctccggtcagggcacacagagtgaacagaaaaagaggatacctctgcgatccc

SEQ ID NO: 810858 - DNA, 100 bp, Homo sapiens
cagtaagggagggcaagaagatatgaacctgagccttcagtcaagaccctccagcttgcctgctcaggtggccttccttcagggagagaggaaagggcag

SEQ ID NO: 810859 - DNA, 99 bp, Homo sapiens
gagggtggaacgcgggcgcctgaaggagttgttgtctcggcagcgcccgcggagacgtgaagaggtgaagctttgttctaagaatatttgtttcatcta

SEQ ID NO: 810860 - DNA, 100 bp, Homo sapiens
cgggacccggtgtctgctcctgtcgccttcgcctcctaatccctagccactatggagaacgtatttaccgggcagtcaaagatctattcctacatgagcc

SEQ ID NO: 810861 - DNA, 100 bp, Homo sapiens
cacgcataatggatgaaaggaaccgacagccaattctgatctgaacagaaaatccaagaacagggatatgtgtggattacagttttctctgccttgccta

SEQ ID NO: 810862 - DNA, 100 bp, Homo sapiens
ttcctgatttctgcagctctgtgtgaaggttctgtacagagtaatgagatgtgtgacggctgcaaaccaggtgtttttttctgaggctgtgttgacagct

SEQ ID NO: 810863 - DNA, 99 bp, Homo sapiens
actgaccaagcaagcccacaagaagattatgcctaatagtcccagtgaatattgtttttatgtggatagtgatatggtcaatgaattcaagttggaatt

SEQ ID NO: 810864 - DNA, 100 bp, Homo sapiens
gtgagaccagcaagaatgacttctccctctccctcaagttctgctccagacgagcccttaccacgttgactcactcctgcagctcagcgatgcctgccgc

SEQ ID NO: 810865 - DNA, 100 bp, Homo sapiens
tccaagcaagatctcagtcagagtaggaaataattttcacaaccttcaagaaattcggggaagcagctcgagagtgtcgtagaaagaagaaagaatatgt

SEQ ID NO: 810866 - DNA, 99 bp, Homo sapiens
gaagaacaacctaactccagatatctacctaattgattggagtaccgggcgtcaaagcagaacgctttgaagaaggaatgacggtaaagcactgtgcat

SEQ ID NO: 810867 - DNA, 98 bp, Homo sapiens
aagttcagcaacaagtaatagttcagaggaagcagaaagtgaaggaggggctgctgcagtttgcggggttcttctccagaccatagatgcctcagttt

SEQ ID NO: 810868 - DNA, 100 bp, Homo sapiens
aaggaggccgtcaccttcaaggccgtcagacaagcactattcctgatcagagaactccagttgcttcaacacacagtatcagtagtgcagccaccccaga

SEQ ID NO: 810869 - DNA, 101 bp, Homo sapiens
cggcaaggagagacgtcgctgaggggcttgcctgaagcgagggcattcaacagaaggtgtcaaattgacagctctcaatgacagcagcctcgacttgtcta

SEQ ID NO: 810870 - DNA, 99 bp, Homo sapiens
gagaagatgggttggaagaaaggagagggcctggggaaggatggtggaggaatgaaaacgccgatcaagaagttggtatatgtttacctggttcgatat

SEQ ID NO: 810871 - DNA, 99 bp, Homo sapiens
ttttccttcttacagagatgtgactctgtttgagagtcgagagaaagaacttatgggtttcagcaaatcggtaaatgaagcacgttcaaagatggatgt

SEQ ID NO: 810872 - DNA, 100 bp, Homo sapiens
gtgaaggcccatcccatggtggactacctggtgcctctagtgaaaagaacaagaagtcttaccctcaggtcaaagcctggaagaaacgctggtttatcct

SEQ ID NO: 810873 - DNA, 100 bp, Homo sapiens
ggacgaccgcggcgccgaggagcccatttccgtgagtcaggtgaaacagctgaggaatcgggcagatgaagatgctcgaatgattcacatgagtatgcag

SEQ ID NO: 810874 - DNA, 98 bp, Homo sapiens
cctcggattaaggaataatttatgaagctccgttgactaccgtggagagatcataatttggggttcaagattccaggcagcaagagcaactcaccacc

SEQ ID NO: 810875 - DNA, 124 bp, Homo sapiens
ccgcatgccctctgccagtgctgaatttgtcaatacaagcaacctcacaggcgcccagacaccatgtcacaaccctccagaactgacgttggcaggaagtagagactttgttgcctgtgtcccc

SEQ ID NO: 810876 - DNA, 100 bp, Homo sapiens
cacacaggagagctggctgcagtaaaaatcattaaattggagcctggacaatcatatcctgattcagcccttcctccacaaaggcaagacagattttgtt

SEQ ID NO: 810877 - DNA, 100 bp, Homo sapiens
atcaaaacctggaccttctggattacaggccaaattagcaaagctgtaggtaaaacttgcctactgatcagttacacaaccaatgcatttcctggagaat

SEQ ID NO: 810878 - DNA, 100 bp, Homo sapiens
cccttccgaagagcagaagaaacagttagcgcaagacacaggacttacaattctccaagtaaacaactggtataaaggaccattgttagaagagcaagcc

SEQ ID NO: 810879 - DNA, 98 bp, Homo sapiens
ggggcttacacggaaggtgtaatgagaaatgttaacttccttacaagtactggtctattattagcagaagatttttctgcatagttggcacgctgtac

SEQ ID NO: 810880 - DNA, 100 bp, Homo sapiens
ttgcaacatgttcaaatgatggcacagtgaaaatctggaacagtcaaaagatggaggggaagaccaccactaccagccacataaagaagatccctaatag

SEQ ID NO: 810881 - DNA, 100 bp, Homo sapiens
ttggaagacctattatcagatcaaccaccaaagtgggaaacattgaaatcaagatctcagtggttcaatagcatccccagatgtcaaattaaatcttggt

SEQ ID NO: 810882 - DNA, 98 bp, Homo sapiens
ggacacaccgctggatcagtgtaaggttccagtttcattgctgaagtatgcaccaaacaacggtggcctgaatccactctttggccctcaacaggtag

SEQ ID NO: 810883 - DNA, 100 bp, Homo sapiens
caccagaggagattagacgtagcagattaggcttctccagggaaagtgaccgaggcagtgaaagaggccattgacgcagggtaccggcacttcgactgtg

SEQ ID NO: 810884 - DNA, 99 bp, Homo sapiens
acaggctgacctggcctatcagcttcagatgagtcctgccggcggtgaccatcttccaacatagggatatacctccctccttcttataactgaagatcc

SEQ ID NO: 810885 - DNA, 100 bp, Homo sapiens
cggcgaaggaggaggcgttgccgggaggcaaaaccttcaactgaggacttgggggataagaaggaaggtgaatatattaaactcaaagtcattggacagg

SEQ ID NO: 810886 - DNA, 98 bp, Homo sapiens
tcatcatgatctcttcacccgcaccatgatcgttatgaatgatcagagagaagaagaaggaggttcctgctgtgccagaaacccttaagaaaaagcga

SEQ ID NO: 810887 - DNA, 99 bp, Homo sapiens
agaagtatctgctgaggatcttggaggtgctgatcttcattgcagagtaatcaagtcagaggattatatgacttttatctgcctagagaagaactatgg

SEQ ID NO: 810888 - DNA, 98 bp, Homo sapiens
agccttcccagtagctgggaccacagattcacttgtcatggattagtgactggtcagagttatattttccgggtcagagcagtcaatgcagctggact

SEQ ID NO: 810889 - DNA, 100 bp, Homo sapiens
agcagagcgaaccgcaccggcccgagcggagcgccgcacgttcccaaccgcgaggccaggaaactactttgcttcgcactttttcatgggaggagagaaa

SEQ ID NO: 810890 - DNA, 100 bp, Homo sapiens
cgccaaccgcaaccattgacgccatgtcgggttattcgagtgaccgagaccgcggccgggaccgaggagagaaaaggaacagttccgtaagctctttatt

SEQ ID NO: 810891 - DNA, 100 bp, Homo sapiens
agaacatggttttatatcacaacaattgaagttccagattcttccattttgaaaaagatggagttttaacattgaatgcggagaacactaattatgccta

SEQ ID NO: 810892 - DNA, 100 bp, Homo sapiens
ccaaccggctccagggcactggtaatttggctagaggaccgcgcggaggcagcggggtacttaaagctttcaccaaaacacccagaatcaaatactgctg

SEQ ID NO: 810893 - DNA, 100 bp, Homo sapiens
caggagaacatggtgaagagcagcggaggaatgaggggagaatcatacttcatcggaatgaggagcccagggcagcagggacacgtccctgaagatggag

SEQ ID NO: 810894 - DNA, 98 bp, Homo sapiens
gccgacctgtcttgtctcgtcccagccaccagcgtggctgtccgcagagggacctgctgtgccatcaacaagaaaatatttacaccagcagctccagt

SEQ ID NO: 810895 - DNA, 100 bp, Homo sapiens
gaactcctgctgcaaaaatggaacaagttccagcacaagtggttgatgagaaagctctgaagcacataacggaaatgggcttcagtaaggaagcatcgag

SEQ ID NO: 810896 - DNA, 100 bp, Homo sapiens
tacctgcttcagagacatgagaagattcatactggttatggaggttttgatgactatggtggctataataattacggctatgggaatgatggctttgatg

SEQ ID NO: 810897 - DNA, 100 bp, Homo sapiens
gtctagatcaacaatcaaagacaatatcaatgacaaactgacggaaaaggagagagagggcttctttcctgtcgttgttggctttattagaagagtgcca

SEQ ID NO: 810898 - DNA, 98 bp, Homo sapiens
tctgctttgataacaatgtcttgggggcagctggcattttatgctatgtgggagcctatgtcttcatcacttatgatgactatgaccacttctttgaa

SEQ ID NO: 810899 - DNA, 100 bp, Homo sapiens
gaatgctgaaatgaggcctcttggttgtttgaatatcacctctgccaggcaattaaccggctgtagtcgctttggtcatattttcccttcatctgcttac

SEQ ID NO: 810900 - DNA, 100 bp, Homo sapiens
tccaaatccaggtcgcgatcgaagagtccccccaagtctcctgaagaggaaggagcggtgtcctcttaagaaaatgatgctgcagtctgaagagacttcc

SEQ ID NO: 810901 - DNA, 100 bp, Homo sapiens
attttttgactgctctgctcctctatgctggacatcaaatttccagacagcctctggagatcctgtgttgctacttgtcatgtttcttaggatcagctat

SEQ ID NO: 810902 - DNA, 98 bp, Homo sapiens
gtagaacagctatctcgggagaaacaacaactgctacatctgttggaggagccaactagcatggaagtgcagagtattgttacaatcacatttgacgt

SEQ ID NO: 810903 - DNA, 100 bp, Homo sapiens
tcaagatgtggagctctccttgcagatcggtgacacagttcacatcctggagatgtacgagggtggataatattaatgcagctgtgatggatttgaaaaa

SEQ ID NO: 810904 - DNA, 99 bp, Homo sapiens
ctgtagtctgggacaagataactggagagcctctctacaatgctgtggaaactaaagttacagagtggagaggtaacaaaagaagagaggcagcctgca

SEQ ID NO: 810905 - DNA, 100 bp, Homo sapiens
gttgtcaagccgccaaagtggagagtgcgattgcagaagggggtgcttctcgtttcaggtgtgatgttagctgttgatgctgtaattgctgaacttaaaa

SEQ ID NO: 810906 - DNA, 100 bp, Homo sapiens
accctgcttggagacggacttgcttccgttgggacccctgattttagcaggatggcccaatggaatcagctacagcagcttgacacacggtacctggagc

SEQ ID NO: 810907 - DNA, 99 bp, Homo sapiens
tctcctccaaggtctacatgattacctgaagtttaataaaggctaagaatattgtacacaaagattcttgatgttcttgaggaaatccctaaaaatgca

SEQ ID NO: 810908 - DNA, 99 bp, Homo sapiens
gcagcgcgggatcccagcctcaggcgtgcgcggacggtgtgcgggtattaataggggaccctattaccacatgtctttctccctcagtgtatgatataa

SEQ ID NO: 810909 - DNA, 100 bp, Homo sapiens
tttgccattcatggaaacttttctgatcactcctacagtgacagcacagagatggtgaaaatcattgtgcacactgtgcagagtcaggaccgtgtgctca

SEQ ID NO: 810910 - DNA, 100 bp, Homo sapiens
gtggaacgacccgcgcgtgccctctgagggccccaaggcatccagcaagatgaggacatctatgaggaaggaaactatgaggaggaaggaagtgaagatg

SEQ ID NO: 810911 - DNA, 101 bp, Homo sapiens
cgccgcggcggcgtgtgcgcccctcagggccaattcctgtccccccagcagcatggcatcgtgtgctgaaccctctgagccctctgccccactgcccgccg

SEQ ID NO: 810912 - DNA, 100 bp, Homo sapiens
gtttttaaaattaaaagttaaacccaggaagctttggatcagacttttgtgttgcagttcgggaacaagatcactcaaggtgaaggataatctactaata

SEQ ID NO: 810913 - DNA, 99 bp, Homo sapiens
ttttccacagggaattgagttggggaaatcagccttatggtcccacctgttacattatcaggacaaccggcagagaaaactcacatcaggaagcctcag

SEQ ID NO: 810914 - DNA, 100 bp, Homo sapiens
ataccacctccgcagacgcccccaaacaagttatgagtgccagtgagccgccttagatagaagcatcgtcagcactttattaatgatggatagtgagaat

SEQ ID NO: 810915 - DNA, 100 bp, Homo sapiens
ccgccattgagctagatgaagatactggaacattcagaatctacggagaggaggaacatatgcagcagaaaaaagaggaggaagaagttcttaaagaagt

SEQ ID NO: 810916 - DNA, 100 bp, Homo sapiens
ccagggcccgagagctcgcccgtggtcgtccgcaccgacgaggatgcttgatgaagaaatctctggaattgtggaagtggttggaagagtaaccgccaag

SEQ ID NO: 810917 - DNA, 100 bp, Homo sapiens
tctgacagatgccagcgtagctgaatccagtaccaaaaacgtcaacaacagttttacggaaagtgatgaagcattgggcccaacaatgatgagttggaat

SEQ ID NO: 810918 - DNA, 100 bp, Homo sapiens
gctcgtcgctgccccggggtccacgcaggcccaggccgccccgttccccgagctgtgcagtgatcctgccatgaagcagtttctgctgtacttggatgag

SEQ ID NO: 810919 - DNA, 100 bp, Homo sapiens
agccagcatcgcaccgaaccttcggggggccgcggctggagcgctcggccggcgtgggagcgccaaggccgcaggagtcagtggatcggtggggaaaatg

SEQ ID NO: 810920 - DNA, 100 bp, Homo sapiens
tggtcccgtcagccggaccccacctggacggctggggccacttgtggtcgccgggaggttctaagctggtctatgtccatcaccttcttggagaaggagc

SEQ ID NO: 810921 - DNA, 98 bp, Homo sapiens
ggccgggagagcaacatccacctgatcccgtacatcattcacactgtgctttacgtcctgaacacggagaggagcggaagaccttctggtgtgggctg

SEQ ID NO: 810922 - DNA, 100 bp, Homo sapiens
gttcaccagcactgtctccaccctagagagtgaattactggaactgaaacggcagcagcaagagcaagaaagagccaaaatccaccagactgaacacagg

SEQ ID NO: 810923 - DNA, 112 bp, Homo sapiens
tcagttttcgggtcgtcatggctggctacgaatacgtgagcccggagcagctggctggctttgataagtacaaggtgcaaattgagcatgacccagaattagaaaaagaaag

SEQ ID NO: 810924 - DNA, 100 bp, Homo sapiens
ctgttgcagtcatatgcggtggaatctgttcttcttttgcatcctacgtaaccagaccaagctgtgggattgtggacaaagccctagaagagccaaagta

SEQ ID NO: 810925 - DNA, 98 bp, Homo sapiens
ttagagacaatggcaaacatgctttgatcatctatgacgacttatccaaacaggccttattccactgctggggattgatgtgtgggagcacgcttact

SEQ ID NO: 810926 - DNA, 100 bp, Homo sapiens
actgccattgctttcagctgctacatcggctacacctatgtgcttcccaagctgtatgtgaagctacattactgtgtgagttgtgcaattcacagcaaag

SEQ ID NO: 810927 - DNA, 100 bp, Homo sapiens
tacagaagatgctgaagctgaggacacacccaggaaaagactcaggacggacaagcacagtcttcggaagggcattcttcttgagcaccgagaaaaagaa

SEQ ID NO: 810928 - DNA, 99 bp, Homo sapiens
ggcgcgagcggcggcggcggcggttccagcatgaagaggagagctggcctggggggcagcatgagatggctcggactcaaaagaacaaggccacagcac

SEQ ID NO: 810929 - DNA, 100 bp, Homo sapiens
attcgaaggaatctttaacaatgccatcttctgcacaattgttttaggcacttttgtggtacaggaataagtcagcaacctgatccaggctttactgggg

SEQ ID NO: 810930 - DNA, 99 bp, Homo sapiens
tttgactgtgaggaccgaactgatgaagccaactgccgaggagatcgggcagttggtgaagcagatgctggatgactttggaccacatcgctacattgc

SEQ ID NO: 810931 - DNA, 98 bp, Homo sapiens
aaaacatcaagcagtgaggaaagatccatacgtgcaaatggacaaaggagttctccaggaggagagacttcagcatgcaaaccttcatctgttcggct

SEQ ID NO: 810932 - DNA, 98 bp, Homo sapiens
aaatcaaatacattgcccatctcgctgcagtctataagaagtagcctactgctaggcttcaggaggcacatctccctaacacttcctgccaccttccg

SEQ ID NO: 810933 - DNA, 99 bp, Homo sapiens
taccttcagcaacttccaaaggagcagttgctagtggccatttacaggaatcagccacttcagttcagattctcagaggattaaacagcaagcaacatt

SEQ ID NO: 810934 - DNA, 100 bp, Homo sapiens
caaagaagaagagaagctcatgattcgtggattaggctacacaacgcctgttggcagccctggagttgtttgtatgattgaaatgactgcagatggaaaa

SEQ ID NO: 810935 - DNA, 100 bp, Homo sapiens
ttagaatacattccagaaaatgtatcaagttaaaggcattaggatttcctgaaggacttgtgatacaagcgtattttgcttgtgagaagaatgagaattt

SEQ ID NO: 810936 - DNA, 100 bp, Homo sapiens
agctgtggatctggctgcatccaacccttaaacaggtacttccaatgaggtagcccagtttctctccaaggaaaatcaagtcattgtccgcatgcggggg

SEQ ID NO: 810937 - DNA, 98 bp, Homo sapiens
ttccaggcccagcgggctttccttctgatggcctctcagtaccaacaaccccacgaggcaaccactgagaaaacggaaccgaatagtcaagaggacaa

SEQ ID NO: 810938 - DNA, 98 bp, Homo sapiens
taaggaatccggatcattctagagctttaagccctggccaacgtcaacattgggagcctcatctgcaatgtaggggccggtggacctgctccagcagc

SEQ ID NO: 810939 - DNA, 100 bp, Homo sapiens
ggtgatggaagtggcccaagggtctcccttctcggtgaacgttcagctgctgcaggaccacggggaaattgccaagactgtggccagaagagctccgaag

SEQ ID NO: 810940 - DNA, 100 bp, Homo sapiens
gttctactacgatgagtttggtttccgtgtgtacaaggaaggtgtggaggcacagttggtgctattttcacttgtccactagaagtcattaagacacggt

SEQ ID NO: 810941 - DNA, 98 bp, Homo sapiens
gttgaatatgcatctaaagttgatgagaactttgactgtgtagaggatgctgaaatttctggaaaagacaatggaaatcaggggcaggaagagaacag

SEQ ID NO: 810942 - DNA, 99 bp, Homo sapiens
ctcgcccctcgttcccttgggaaccgcctgggaactccgccatgtcatccacttcgcccaacctccagtcttgactcgtctgctgaacaaatcctctga

SEQ ID NO: 810943 - DNA, 98 bp, Homo sapiens
atgacccagcgtacatactgaatgatctctacatctcagactactgtgtgtggattcagaaagtcaaaaggcggtcaccttctccttactatagtcgt

SEQ ID NO: 810944 - DNA, 98 bp, Homo sapiens
taactcgagtcctgccgcctcccgggagtgccgtgcgccgcagcccgggcccaggccccggcagcgcctgggacaagtttctgatgaagaattgaaaa

SEQ ID NO: 810945 - DNA, 98 bp, Homo sapiens
caagatggctaaaaattggagtggtgagccagccatgagagggtatcttgtggccatattcctgagtgctgtcttcctctattatgtactgcattgca

SEQ ID NO: 810946 - DNA, 99 bp, Homo sapiens
tggcttcctacccgttcaccaccctgaagccccacgtcgggatcgtccactacgaaggccacctacaaatagcaggccctcgggaccaaggatcacgtc

SEQ ID NO: 810947 - DNA, 98 bp, Homo sapiens
caaatggaacacggaggataaagtcagccatgtgagcactgggggtggtgccagtttggagctcctggaaggtgcaaatgtcaattgtcaagccttgg

SEQ ID NO: 810948 - DNA, 98 bp, Homo sapiens
cccagcctggcccctgcagcccacccaggcctggtgcccacttcgtgccatgggagcagcccaggggaagaaggccttgaaccggggcattgctgctg

SEQ ID NO: 810949 - DNA, 100 bp, Homo sapiens
ctgaacttaaaaagcagtctaaacctgtgaccacccctgaagaaattgcacagatgattttcccaaaccccagatcacggttcagccagaaacacagtcg

SEQ ID NO: 810950 - DNA, 100 bp, Homo sapiens
tgtcccagtaagagatctgaaaccagccatagtgaaagtctatgattactacgagacggggaagacaccctctctggacccccatcagaccaaagagcag

SEQ ID NO: 810951 - DNA, 100 bp, Homo sapiens
atattcaggttctccatgatcttcgacaacgtttccctgaaattccagagggcgtggtgtctcagtgcatgttacaggaaaattacgggcagaaggaggc

SEQ ID NO: 810952 - DNA, 98 bp, Homo sapiens
gattctggtgatgtacttcatcatgctcttctgtatcacgatgaagaggcaaatcaaggactggccgtttgacgatggggcgcccccgcccggcaagg

SEQ ID NO: 810953 - DNA, 100 bp, Homo sapiens
cgctcccgcattgtcgaaccatgaaaaacgttttgaatcacatgacgcattgtcaggctgggaaagcctgccaaggtgctggagaatctggtaaaagcac

SEQ ID NO: 810954 - DNA, 99 bp, Homo sapiens
agaaacacctaggaagggagaactgagaaagtctgtgattgctgtgagcttcatagcagcgttccttttcctgctggttgtgcgtcttgtaaatgaagt

SEQ ID NO: 810955 - DNA, 75 bp, Homo sapiens
gcagccgcgggcgcccgaggggccgagcgagggatcgcttacacctgagacgaactacagaacagcacgtaccag

SEQ ID NO: 810956 - DNA, 100 bp, Homo sapiens
cgtggaggagtacaacaacaaggttggacgtgataagtatgagcctgcagctgtttcagaacaaggtgataaaaagggcaaaaagggcaaaaaagacagg

SEQ ID NO: 810957 - DNA, 98 bp, Homo sapiens
aaagacctacccagatactgattccttcaacactgtagcagagatcactgggagcaaatatccagaacagggtattttaagcctggaatattgtgtgg

SEQ ID NO: 810958 - DNA, 99 bp, Homo sapiens
ctaaagctagaaggagactctgaattcttacaacctctctacgccaaagaaatccagtcccgaccattttccacctatttccctggatattttgatggt

SEQ ID NO: 810959 - DNA, 100 bp, Homo sapiens
aaccgtttccgcctcctgctagagcggcgaaccgtgggcagtgagctgcatccagtggaactaaagccgttccaggattatcaaaaactgagcagcaacc

SEQ ID NO: 810960 - DNA, 100 bp, Homo sapiens
ggaagctgtccttcctgcctaccccacgtactcagggttctgaagatgtggtacaggctttcatcagtgagattgggtgtccagggtggtcgagccaaac

SEQ ID NO: 810961 - DNA, 100 bp, Homo sapiens
ctcagcggcgccttgcggagggaccccagattgattatgtcaagtggccaggcatggaaggagcaaagaaggttcactctgacagcactaaggaactttg

SEQ ID NO: 810962 - DNA, 100 bp, Homo sapiens
atatgccgcctcagttttttccccagcatcatcttccccacacaatatatggtgagcaaggtcaagctgaactagcagaaattccagaaggctatgtccc

SEQ ID NO: 810963 - DNA, 98 bp, Homo sapiens
atcgtgctattcctggtctacatcctgcgggtgcctttgaaaatcaacgacaacttgagcacagggtttgaaagtattcttgaagggctgtttggacc

SEQ ID NO: 810964 - DNA, 100 bp, Homo sapiens
ggatgtcggcgaagagttcaaccagcttagcagtgtctgcaaaaacgaatcttttcctacaacctgttaactgactggactgttggtaacaaagtaattg

SEQ ID NO: 810965 - DNA, 98 bp, Homo sapiens
ttggagaatgtctttcctgacttaagggctcccattgtgagagctagtggtgtggccaaatttgagtttcatcatggtgactatgaaaaacagtttct

SEQ ID NO: 810966 - DNA, 100 bp, Homo sapiens
gcgatgctggaccagttgatgggcacctcccgggacggcattgaatgccccagaggagcccgaaacctcccaggcttggtgcaggaaggagagcccttca

SEQ ID NO: 810967 - DNA, 100 bp, Homo sapiens
gagcctctgtgggagccggggccgcggcggcgcgggtgctccgggccgaggccgcgattctgaagggagtggtaatggaagtgaagatgcttcaaaggac

SEQ ID NO: 810968 - DNA, 100 bp, Homo sapiens
ttctactagactttgctagtctgtttatgctttcctactctccaaagttttagatggagcaggattagatattgatttccatcttgcctctccagaaggc

SEQ ID NO: 810969 - DNA, 98 bp, Homo sapiens
gcgctgttctcgctccggagccgctgcacatttcggtggcacgcactacccttcttcctggcctcctgaagaccatagcagcaaatcgtaagatgccc

SEQ ID NO: 810970 - DNA, 100 bp, Homo sapiens
atttacttgttggggccctcttgataaaaagagatgtggggggattctcgacctgctaacagaactggaccttttcgttccaatgacaggatttacacag

SEQ ID NO: 810971 - DNA, 100 bp, Homo sapiens
tcagaaatcactaaatactactctgaggggcttagaaattaacaggggaatgaaggatggcagcatgccgtgcattaaaagctgttttggtagatctcag

SEQ ID NO: 810972 - DNA, 100 bp, Homo sapiens
aatctacattaccttaactggagttcatcaagttcccactgagaatgtgcaggtgcatttcacagagaggtgctgtaaatgcattgatggaaaaaaagtg

SEQ ID NO: 810973 - DNA, 98 bp, Homo sapiens
aagtaggattcaagaactggaggaaaaggtcgcctctttgctgcaccaggtgtcctggagacaggtgagtggtttaccgcccccggagctgacatggc

SEQ ID NO: 810974 - DNA, 98 bp, Homo sapiens
tatgaatgctacttggatgcctcttaaggtgtcagttgtacccgaggcgttctcagcagcagcaagtacctgtggtggatttccaggctgaactgagg

SEQ ID NO: 810975 - DNA, 50 bp, Homo sapiens
ggcggcgacggcggccctggcaggtcttatatccagatggccaggctcag

SEQ ID NO: 810976 - DNA, 100 bp, Homo sapiens
aagggtcctgagctgctcaccatgtggtttggggagtctgaggccaatgtcagagaaatctttgacaagagttgtggaaagtaaaaatgtagccctacca

SEQ ID NO: 810977 - DNA, 100 bp, Homo sapiens
cagaaagtgaagctgtttcgggccagcgacccgctgctcagcgtcctcatgtggggggtaaaccactcgatgcatcatcccattcagatgaaacctgcag

SEQ ID NO: 810978 - DNA, 99 bp, Homo sapiens
gcccatggtgcgaggctgggagccgccgcccgggctggactgcgttccgccatggagtcatagttgcagctgactccagggctacagcgggtgcttaca

SEQ ID NO: 810979 - DNA, 100 bp, Homo sapiens
gcacgtggcccccagcacgtccaccaacctgaccatgacctttaacaaccagctgaccactgtccacaaccagagaatggatcttggagaatgtctgaaa

SEQ ID NO: 810980 - DNA, 99 bp, Homo sapiens
tgagaaaatgcatcacgtcaatatgaccccagaattcaaaaatcttttgaaacttggcacggtattcaaaagtccgtggaaagaaaaaaaccttgtcct

SEQ ID NO: 810981 - DNA, 98 bp, Homo sapiens
ttcgacctggagctgggccaggccgtggaggttgctgaaaagccaggagtcaaaatgactgagcgctttgactgccaccattgcaacgaatctctctt

SEQ ID NO: 810982 - DNA, 119 bp, Homo sapiens
atccttgtcctccttggctggggcgcccaccggcggtctgataggctacatcgcggcatgagatgaagctgtgacagactgctgcagtaagaatgtcttttccacctcatttgaatcgc

SEQ ID NO: 810983 - DNA, 98 bp, Homo sapiens
gaggatgacttctctaatcagttacggtccctttgtggtacgtgctttccttcgtagttcaacaagtgaaggtttattactgaagattgatccattgt

SEQ ID NO: 810984 - DNA, 100 bp, Homo sapiens
agtcacctctctatagtgggcgtggccgaggccggggtgaccctgccggagcctccgctgccagcgacatgttcaaggtagaacatctgggaggtccctt

SEQ ID NO: 810985 - DNA, 99 bp, Homo sapiens
ttggaaggagggcagaaatgaatgaacttatggagcagacctcggagatcatcacgtttgccgagtcagtggactcccgaaaaattgaccaggaaggga

SEQ ID NO: 810986 - DNA, 100 bp, Homo sapiens
atatgccaaggaaaaactggagagcttcatcaaaaatagtgatagctttgataagtaaaataccatgaagattttgaaaaaacaaaggggagaggcttta

SEQ ID NO: 810987 - DNA, 98 bp, Homo sapiens
tttgcctggacatccacctgtacgtccccaggtctgggatctgccgatatgggggatatgaagacccctgattttgatgacctccttgctgcctttga

SEQ ID NO: 810988 - DNA, 100 bp, Homo sapiens
accaataccatagctggaaggtatggtgctatctgcggatttggcctttccttgatcaaatggatccttattgtcaggggaggaacatcacatcatttag

SEQ ID NO: 810989 - DNA, 99 bp, Homo sapiens
gaattaagaaattactgcagcagggtgcagaagctggatacctaccaggagtacaaggaggctgcgtcctcttaccaggaagcctggagcacactccgg

SEQ ID NO: 810990 - DNA, 99 bp, Homo sapiens
tttttcgttgctcacagctatggaggacttgcttttgttgaactgtatctacatgaaaatgggattgtccatcgtgatctcaaaccagagaatcttctt

SEQ ID NO: 810991 - DNA, 98 bp, Homo sapiens
acagcaagcccaaacagtccaggctgacgtggtgcctattaacataactgggtaagcttgatgattaccaggaacgaatgaacaaaggggaaaggctt

SEQ ID NO: 810992 - DNA, 98 bp, Homo sapiens
caaaagtcagaaaagtggcaacagcaccacctgctccagcatataaagatgcggaaaacgccatgcggtacataaatgggacgcgtctggatgaccga

SEQ ID NO: 810993 - DNA, 98 bp, Homo sapiens
gggccggagcccgagcccttggagtgtctaccatcagagggagatctctgccccctggggctgagagaccccaacctttccccaagctgaagctgcag

SEQ ID NO: 810994 - DNA, 100 bp, Homo sapiens
catctggctgttcctgtactgaagttctcaaaatgcatcgtgattcctgtccattggactgtaaggtttatgtaggcaatcttggaaacaatggcaacaa

SEQ ID NO: 810995 - DNA, 100 bp, Homo sapiens
ggctactttgacgccctggtgaagatgggggagctggccagcgagagccagggctccaaagaactcggtaaaccaagggaacatgccagggcttcagagc

SEQ ID NO: 810996 - DNA, 100 bp, Homo sapiens
ccaaatacatcagcttgtaggagacagagtagcactttaagccctcaggaggaccattctaacagaaagtctgcctatgatccttcctctgtggatgtta

SEQ ID NO: 810997 - DNA, 100 bp, Homo sapiens
cctagccaaattgctcaactaagaccaagtcctcgctggactgctcagggtgccagacctcatcattaccccggaagctttcgagaagctgggattccct

SEQ ID NO: 810998 - DNA, 100 bp, Homo sapiens
atattcttctcctggttaatcaagaattctctatttctgctccgtcatccatgccactgttgttaaaaaagcagacatgatcaacaaaaatatgactcat

SEQ ID NO: 810999 - DNA, 99 bp, Homo sapiens
aagagtcaaaacaaataagttatgctatgaggatgacaaactctggagtaattggagccaagaaatgagtatagatgttggagtccggggtgacctggt

SEQ ID NO: 811000 - DNA, 100 bp, Homo sapiens
tagcctattggaggaaaacacaccaaggaagatgttaccgagtacttcagtgaattccttagtgcaggggaacggagtcttgaattccagggatgcggca

SEQ ID NO: 811001 - DNA, 51 bp, Homo sapiens
tggaaatgtcatccgatggcacaatcaggtcatccatctccagccccacct

SEQ ID NO: 811002 - DNA, 147 bp, Homo sapiens
tattgggacctgctggtatatccttctttctggttccgtgttcatcaaggaatccatgtttcttccaagaagcaggtgctgactgggttacttttttaaacactaggaatggtaatttctactcttctggacttcaaactaagaagt

SEQ ID NO: 811003 - DNA, 100 bp, Homo sapiens
ggagttgcgtcgccttagtcctcctggctgccgccgtcagctgtgccgtcgcgcagcacgcgccgccggtgattggtctgttggacgtttttacacctgc

SEQ ID NO: 811004 - DNA, 100 bp, Homo sapiens
tggaacagaggctgacaacttcacagttctcaatctggctgtggcaaaaaaatgtgagcgctattggcctttgtatggagaagaccccataacgtttgca

SEQ ID NO: 811005 - DNA, 100 bp, Homo sapiens
gttacacaaggacttctttatccgagcgctggattgcatgagaagcatgcaatgatgctacctgttctgacccatcatatccgctaccaccaatgcctaa

SEQ ID NO: 811006 - DNA, 100 bp, Homo sapiens
taaggaaagagacacactaaaggaaagagaaagagagcttcagatgactcttaataccaggcgcagttgtgtagcagttgagtaatgctggttagctgtt

SEQ ID NO: 811007 - DNA, 100 bp, Homo sapiens
ccagaggtgatccctgggcctccatcagagagccctggcatgctgactaagctccagctcctattaaggaaccaaaaaagttgatgcccaaaacatccct

SEQ ID NO: 811008 - DNA, 100 bp, Homo sapiens
ttgaagaaaattccttcttggaacaatttatgatagaggtgttgagatcactgtaacttttccaagagatgtcagtcctccccaagaaatgagccaagaa

SEQ ID NO: 811009 - DNA, 98 bp, Homo sapiens
tcgattcgctgtcggaggagaatgagaccctggtggagtttgctattgatctggcgcgagctcttctctcctctgcatgcacttaactttggcattgg

SEQ ID NO: 811010 - DNA, 100 bp, Homo sapiens
cgagcggggcccaacatggcggagagagaggtggagtccggcccccgaaagagggttaatttggagtggcccctggagtcagtttcctacaccatccgag

SEQ ID NO: 811011 - DNA, 100 bp, Homo sapiens
aagggaggctccaagacctcatcaacaattaagactaagcctggagtaattcgcccagtacctgtaaaatccagaatattactgaaaaaagaggaggaag

SEQ ID NO: 811012 - DNA, 98 bp, Homo sapiens
ggtgcacgcttatctttatctgtggcatgcaactggcttgtaatgagccagtgctgcgccgtgttgctgtggacaagtgtgcaaggagagtgcggcag

SEQ ID NO: 811013 - DNA, 100 bp, Homo sapiens
gtgttcaacaacttcatccagcccttatacaaagacctttcgggtctcttgcagctgaatggggtaaatatggaatgcgattcaatgtgattcaaccagg

SEQ ID NO: 811014 - DNA, 98 bp, Homo sapiens
tgaagtggagcttctggcatttacatcagtgtaattgaaaagtgatcctctcttcagagatgtcaaaaacaaacaaatccaagtctggatctcgctct

SEQ ID NO: 811015 - DNA, 100 bp, Homo sapiens
tgggatatgtttggtgaaaaaagcctgcattcattggtaaaggttggcgtgcagtggtgtgatctcagctcattgcaacctctgcctcccggactcaagc

SEQ ID NO: 811016 - DNA, 98 bp, Homo sapiens
tttatgggttcactggtccacagtgtgaaagagtttgctcaggtccacggccaagatgccgaccacaccagtgaaggccaagagggtcagcaccttcc

SEQ ID NO: 811017 - DNA, 100 bp, Homo sapiens
ctccagatttgatggccttcacaatccaagttccacaatatattgactactgccacaattccgctgctctatgaatggacgctgccccagtacagcgagg

SEQ ID NO: 811018 - DNA, 100 bp, Homo sapiens
ggaggcaaatgcagatcctcttggtgttttgataaacagtgattctgccccccaggttcgcctaatagtcttggctacttccctacagctgctaatctta

SEQ ID NO: 811019 - DNA, 100 bp, Homo sapiens
gacttgtttcttatatgtgatgccattccagcactggactcatggaggctgagcatttattcaggatgtcactgattttatcagtcatttgttcatgcag

SEQ ID NO: 811020 - DNA, 98 bp, Homo sapiens
aggctgagtgggtttcttcagtttgtgtgcaagtttcaagaaatggaaggactgaccaggtgttgacttcaaaatcaaaactgtagagctaagaggaa

SEQ ID NO: 811021 - DNA, 100 bp, Homo sapiens
gtttaacctttattgtggtggagtccaccccgctgtggaatagccaggccagaagaaggaaggcctgtggtgagtgggacaggaaatgacatcaccaccc

SEQ ID NO: 811022 - DNA, 99 bp, Homo sapiens
ggagtcgcgcttcttccccactcccgagacagaaagttgaagttgatggtagtttaagtgatagccacgtatctcctccagccaaacgcactttgaaac

SEQ ID NO: 811023 - DNA, 100 bp, Homo sapiens
ggataccgtcaagctggccaagcacaaagagcttgctccctacgatgagaactggttctacacgcgagctgaactgatagtgcatcagccgacccaggta

SEQ ID NO: 811024 - DNA, 98 bp, Homo sapiens
tgcagcatctgatcagctctgcaaggaagagagcttcacgtctctggtcaggtggagtttgtccatatgctcaatgctaccatgtgcgccactacccg

SEQ ID NO: 811025 - DNA, 100 bp, Homo sapiens
agacggacagcccatcgtgtgaactatagagtttgtggacagatttatattggatcgcagtatgtggtagggaagtgatgctgtctgaaggtgacatcct

SEQ ID NO: 811026 - DNA, 51 bp, Homo sapiens
actgaagggggactacaggttcgagacaagaaccagttgagtcatctctgg

SEQ ID NO: 811027 - DNA, 99 bp, Homo sapiens
tgaatagctggggctacaggcgtgtgtcactgcgcccagattttcagctgaactctcatctctcaacactggcaaatattcataagatctaccacaccc

SEQ ID NO: 811028 - DNA, 100 bp, Homo sapiens
gagactgtgccgtggagggcctcgccatgtcctgctgcccgggaccctccattttccatatccaggaaaatgtgatgcgccacaggtatcagcgtctgga

SEQ ID NO: 811029 - DNA, 121 bp, Homo sapiens
cggcgcccgccaccggctccctcgggagctcatcttcgtggggcgtgaggagtgtgagctcatgctacaggctgctgacttgagtaaaccaatagataaaaggatatacaaaggaacacag

SEQ ID NO: 811030 - DNA, 98 bp, Homo sapiens
gttagataaacttgtggatggacttgctacctcttgggtgaactctagcaattacaagattggccatcgggactttgatgtggagaagcgacttcgga

SEQ ID NO: 811031 - DNA, 100 bp, Homo sapiens
ttccaaaggcacaggaagaagcttgcaggattcccttcaatgaagatcccaatcccaatactcactcatcaggaccctcaacccctctgaaaaaccaaac

SEQ ID NO: 811032 - DNA, 98 bp, Homo sapiens
ctgggtgcgtggggctgcctcgccgcgtctcgccacgttggttaccacagagaagcgcttcctcaaagacagtttgtacaatgaaggaatcctaattg

SEQ ID NO: 811033 - DNA, 98 bp, Homo sapiens
agcgctgcgctcgcgcccggatccctcagaattcctagaggacctgtgcaacaacctcttgaggatcgaatcttcactcccgctgtctcagcagtcta

SEQ ID NO: 811034 - DNA, 100 bp, Homo sapiens
gggctgcgagttcgcaaggcgtataagaggccccaggatcaagcaaccccttctgagcctgagattgacctggaagctctcatggatctatccacagagg

SEQ ID NO: 811035 - DNA, 98 bp, Homo sapiens
tgttgaattttccccagtggtttgatctgctcaaggatattttctctaagtttacaattttcctacagagagtgaagtccctagatgacactgagctc

SEQ ID NO: 811036 - DNA, 100 bp, Homo sapiens
atagtgagtcttccaaccagagcttgtgtagcgtcagatccttgagtgataaaggagtagaggctagtcttgaattcctgacctcaggtgatcctcccgc

SEQ ID NO: 811037 - DNA, 100 bp, Homo sapiens
acaataaagaaaacttccagcttggagcttttcttggctcttttgttagtatatacaagcttatgtccctgatgccaaaaatgcacctactctttcctct

SEQ ID NO: 811038 - DNA, 100 bp, Homo sapiens
aagtttacaggccctctattgccaactgttaagaatctttgtctgaagtggaagaaaaatacaagaaagccatggtttccaatgcacagttagacaatga

SEQ ID NO: 811039 - DNA, 100 bp, Homo sapiens
gagaagcaccagaagcagatggagcggtgtgatccctcacatccacaaatctctgattggaaagaagggacagcagaaaactgcttagagggatgcttta

SEQ ID NO: 811040 - DNA, 98 bp, Homo sapiens
tattggtcctgccaccatccttcccttatggtggcatggagaatccttgccttacttttgtaactcctactctactgcttcgagattcaacagaacaa

SEQ ID NO: 811041 - DNA, 100 bp, Homo sapiens
agggttgtagacatggcggccatcaggaatacagtcgctttgaatcgaagatacatgacttacgagaacaaatgatgaacagcagcatgagctctgggtc

SEQ ID NO: 811042 - DNA, 100 bp, Homo sapiens
ctgtgtatgataccttacttaatactatatgattctataacagactcttccagaaatgatatgaagaggaaatttgccctgacaatggaatttgttgaag

SEQ ID NO: 811043 - DNA, 100 bp, Homo sapiens
acggtgctgtgtgaggccgggggcccggtggttctgggaagcgtacttccagtcaattaaagccattgccctggccaccctgcagattatcaatgaccgg

SEQ ID NO: 811044 - DNA, 100 bp, Homo sapiens
agctctccgggttccccggctcgcggggcccggcgaagggcaggtgaaagaacttgtcctggacaacagtcggtcgaatgaaggcaaactcgaaggcctc

SEQ ID NO: 811045 - DNA, 100 bp, Homo sapiens
agcagacttaccctgaagtagttagaatgaagaagctcattcacacagaagacccatttaatgatgaacatcaggagaggcaagaggtggaaatgttggc

SEQ ID NO: 811046 - DNA, 100 bp, Homo sapiens
ctgcatcctgcgttcccctccatccttctggatctggccaacaccaccggcacagtgacggcttcagagggagttgataccaagttgaaattcactcttg

SEQ ID NO: 811047 - DNA, 100 bp, Homo sapiens
ctgtaggcactgccatggcccctgtgctcagtaaggactcggcggacatcgagggtttggaaatcccttgtctccaggttgctgggattgacttcttgct

SEQ ID NO: 811048 - DNA, 50 bp, Homo sapiens
gccatgtcctccctgtactcgaaatgattctggggaccattctgaccaca

SEQ ID NO: 811049 - DNA, 99 bp, Homo sapiens
gatcattaacctcactagtgttttgagtctccaggaagaaattaatgagcagggacatgaggtccaggcaactcctagtagtacaacggaagaaacagc

SEQ ID NO: 811050 - DNA, 98 bp, Homo sapiens
ttcctataaatctcgcccaaacaggaaagacccactccttgccagttgtggtgatctccaacatctgtcagatgccaaatgcctgggcgtccatcctg

SEQ ID NO: 811051 - DNA, 99 bp, Homo sapiens
tcctgcaacccagaaccctggctgaccactttgaaggaggatgctccagcaggcctgaaatcttgaagcaggaaatcaaagtcttctttgtgaagtaca

SEQ ID NO: 811052 - DNA, 100 bp, Homo sapiens
agtaagagtagcaaatgaagctgaatttatcctgagcaggcagagagcagaagatattcacagacatgcggaatttgagaaaactgtggatttagttact

SEQ ID NO: 811053 - DNA, 129 bp, Homo sapiens
attcttgtgccagaggagtgtgccatattccaatggctgagccgttttgccccaaaacgagagagtgatggtcattgtcctccagagcagtgatggaggaaataccagcccaggaagcagcagggtcac

SEQ ID NO: 811054 - DNA, 100 bp, Homo sapiens
ccgccatacgcgctctccctgtttagatctaggatcctggaattcacaagtgaatgcattttgtgtgccatttccctagaactgtaaatgactcacccca

SEQ ID NO: 811055 - DNA, 100 bp, Homo sapiens
ccaacaacctctgccacaccctggggcctgtgcatcctcctgacccacagatggccgccaagaacgagtcatgtttgacaaaattacatctcgaatccag

SEQ ID NO: 811056 - DNA, 99 bp, Homo sapiens
tacacacaatgagctggaaaagaatcgacttatgaaaatatgcatcagtttaatactgtcttggaattcatgagatggaagcataggtcaaagctgttt

SEQ ID NO: 811057 - DNA, 98 bp, Homo sapiens
tcaagtcccgcctgaggaggcaggacgtgcccggccccgcgtcgtctggcgccgccgccgccagcgcgatacactctgtgcagttttagagagagaca

SEQ ID NO: 811058 - DNA, 98 bp, Homo sapiens
cgatgactacatgaagtcactcggtgtgggcccatcgctggatggatctgtcagaacacggctttgggctggccctgctcaacgactgcaagtatggc

SEQ ID NO: 811059 - DNA, 100 bp, Homo sapiens
catagatggccagctttcccccgagggtcaacgagaaagagatcgcggaatggccaaagactatgacgggtcttcctagcacatcagggacaactgccag

SEQ ID NO: 811060 - DNA, 98 bp, Homo sapiens
tccattatgtcgtgtgcttccccgcaaatgaagaaacacccctgccgccagtgtgacaagtctttcagctcgtcccacagcctgtgccggcacaaccg

SEQ ID NO: 811061 - DNA, 99 bp, Homo sapiens
agaatctgaaaaaaagagaaacctgggtgaactttcacggacaacctcagaggacaacgaagtgttcgtcctgtgcctcctgattgctgagtgttcacc

SEQ ID NO: 811062 - DNA, 100 bp, Homo sapiens
aatagcagtgcttcaggaatagaaatcttggcaatcgaaagatccatctgtttgacattgatgttcctggaaaaattacatttcaagaatctaaaacatt

SEQ ID NO: 811063 - DNA, 99 bp, Homo sapiens
ccgtccccagccctgcctctccctgggctctggcaggatggggaagcagaatagcaaactggcccctgaagtgatggaggacctggtgaagagcacaga

SEQ ID NO: 811064 - DNA, 99 bp, Homo sapiens
cttacaggactcctaaggcttgcaacaagtgttgttaaacacaaaccaccctttaaattttcaagggaaggacagacagaaccaagttgtattgttaga

SEQ ID NO: 811065 - DNA, 99 bp, Homo sapiens
agcgaagcagttgaggccattaagaatgcaggaaaccctgtggtgttcattgttcagagtttgtcatccactccacgattccgtgatgatggtctaagc

SEQ ID NO: 811066 - DNA, 100 bp, Homo sapiens
tcctgtttgttttcagggacctgctgttgctggacccaaaggagaaaagctctagaggacaaaatcccagtccttggcacaaactcaggaaatggaagcc

SEQ ID NO: 811067 - DNA, 50 bp, Homo sapiens
tgttgatgaagatgaaagagactgcagctgagcagcgccagttggcacta

SEQ ID NO: 811068 - DNA, 100 bp, Homo sapiens
agcagcacacagaacaagaggccagctacggcagagacgcctttgccaagacatcgctattgcggttccgaggcagtgggaagagatgcggcccctggac

SEQ ID NO: 811069 - DNA, 100 bp, Homo sapiens
agagaccatgcaagcatttgctcaggctgcggagacttttgatggtggaagtggtgaaacccaaacaacatctcctgctattccttgggctgcctttcct

SEQ ID NO: 811070 - DNA, 100 bp, Homo sapiens
aaagagatcctggacctatgaatatccagtttgagccatcggatctaagatccaaaagtctttcccagggaactccgatgaagtgttccaacaaaatgag

SEQ ID NO: 811071 - DNA, 100 bp, Homo sapiens
gggtctggatcaatatataataaaacgctttgatggaaagaatcaaatatggctgagaagcaagcaccagctgaagaccaagtggctgcgacccccctgg

SEQ ID NO: 811072 - DNA, 99 bp, Homo sapiens
aatgactgaatctgatacagcttcagttaatgaaaatgggctaggtgttaaaatcatcacacaacaggttcaaccaagtaaaatcttacccaaaccagt

SEQ ID NO: 811073 - DNA, 100 bp, Homo sapiens
atgagttagaaaccatcacaatgcataaaatcctggagaccaccaccttcttccaaagagcggtgtacttgttccttcctcagagatcacctatgggatg

SEQ ID NO: 811074 - DNA, 100 bp, Homo sapiens
ccggggacctgatgggctgagtcgaggaaaggccattgctgctctggagctgtgtgtgtgtgtgatgactaaagcaaagaagcagccctacagtggcact

SEQ ID NO: 811075 - DNA, 98 bp, Homo sapiens
ccacatgcctctaccaatggacagctctcagtccacactcccaaaagggaaagtaaaggcatgacttcctggcaccacagggaaaatcgggtgcaagc

SEQ ID NO: 811076 - DNA, 98 bp, Homo sapiens
ctggacacagcaatatctctgggctttcacagaaccattccccttgcaatatgtatatccatggccattgtcaccattggctatgtgctgacaaatgt

SEQ ID NO: 811077 - DNA, 100 bp, Homo sapiens
cctgcacttagccccgcgcccgagatggacttgccagtttcaaaagtttcctgaagtctgaattcagtgaggaaaaccttgagttctggattgcctgtga

SEQ ID NO: 811078 - DNA, 100 bp, Homo sapiens
acgtcagtgtgcccaccacccttccctctgccacgcaggtgccgatggaagtccttaaggagtacaaaatttcaagctttgagcagaggctgatgaatga

SEQ ID NO: 811079 - DNA, 98 bp, Homo sapiens
aaccgcagtcaccttcggtttaccttccgccacaggtcatcacaggactgaaatctggcattttttaaagtttgcgccccacaaagaggaaatattcc

SEQ ID NO: 811080 - DNA, 98 bp, Homo sapiens
gcagcaacagctggcagcatcacccccggacagcaaggtctggctctgggagaggagtggacagcagctggttgagatacatccccatctggagacag

SEQ ID NO: 811081 - DNA, 124 bp, Homo sapiens
cctacctgaccaccatcaccaagcagatcacgccctacgtccgctccattgccaaggtgaaggagcggctggagcccagcaatactggagtaaccgcttcctaaaccattttgcagaaatgtaa

SEQ ID NO: 811082 - DNA, 99 bp, Homo sapiens
cgaggagcctggggagaagcgccccaagtttgtggatctccttacgtagcagccaaaataaatgaagcaaaagacttgctagaaacaaccaccaaacat

SEQ ID NO: 811083 - DNA, 100 bp, Homo sapiens
ctctctccgctcgattttgtcaccgttatgtgggaagcgaatccaggaggtggggaagacagggctccagctaccacaggacgggctctgggtatagccg

SEQ ID NO: 811084 - DNA, 127 bp, Homo sapiens
cctgcctgcgcctcggcacgctggcaaggagcccgggaagagacgccgggagcggtccataattcagcagccaaatctttccctcgaaggtttgttttgcctttaaatgtcagtttgaatgcccctg

SEQ ID NO: 811085 - DNA, 100 bp, Homo sapiens
tcaattccaaaactggaaatcagcatgatgcagggatttgcccgccttttgatcaacttgttaaactgcagaaccttggcctgaaaatgctacattatat

SEQ ID NO: 811086 - DNA, 98 bp, Homo sapiens
accacgttctccaatgcaatgctgtttgccctgaacatcatgaattcccaagaaggagaaatgggacgtcggtcatcagatactgaagaagaaagcag

SEQ ID NO: 811087 - DNA, 98 bp, Homo sapiens
atactgcttcatatgcaaaagatccacttaataactatgcagtcaaggaaaagcttttgacatcacctatgtgcgtctcaagttccacaccagccgcc

SEQ ID NO: 811088 - DNA, 98 bp, Homo sapiens
ctcctacaccgggctttcttcttcttcagcgagattcctgagccgttctatccctaaacgcttcgttaagggactcaggcagtacgggaagaacttct

SEQ ID NO: 811089 - DNA, 98 bp, Homo sapiens
tgacactgcagctgcgacgcggctaagaggcgcagagcgaggagtcgggatttggtcgcgagcggcgacgggtgatgaattagaagacaatggaaaga

SEQ ID NO: 811090 - DNA, 99 bp, Homo sapiens
ggaagcggatcgggtggagtgtaggtcatatcgccgcgcgattattggagccggaattggtggcacttcagcagcctattacctgcggcagaaatttgg

SEQ ID NO: 811091 - DNA, 98 bp, Homo sapiens
ggtggccgattactgcgagaacaactacatacaggcaaagatgcaatctacacaatcccagtaaaaaacattcttgctgtggaaaaactggaagagag

SEQ ID NO: 811092 - DNA, 100 bp, Homo sapiens
gccaggggatattattcggttgaccagaggcgtgagtgcatctccatccacgttggccaggctggtgtccagattggcaatgcctgctgggagctctact

SEQ ID NO: 811093 - DNA, 100 bp, Homo sapiens
gcgacctttgtgagcgagctggaggcggccaagaagaacttaagcgaggccctgggggacaacgtgaaacatgaatggtagtgtctagaaagggtatgtc

SEQ ID NO: 811094 - DNA, 98 bp, Homo sapiens
ggaaatggctgcgagaccctagaggcctgcggcctgcggtacggacattgctgcaggagaagaggttgccatcaagcttgaatgtgtcaaaaccaaac

SEQ ID NO: 811095 - DNA, 100 bp, Homo sapiens
ggctgcagtgagccctgtttttgccaccacactccagcttggtagtttatgccaacgtgacttcattcatacagatgaaccaaggatcgggatagcagta

SEQ ID NO: 811096 - DNA, 100 bp, Homo sapiens
cccctcgcgcctcccattgcagcctttgtgataactgcgtaggctcgggttatgtatgattttgctgctgaacctggaaataatgaactgacggttaatg

SEQ ID NO: 811097 - DNA, 98 bp, Homo sapiens
tctaccggcttctgctttacgacagacagttgatattcataaagagaaagttgcaagaagagaaattggtattttgactaccaataaaaacacttcaa

SEQ ID NO: 811098 - DNA, 100 bp, Homo sapiens
agtcaatcgtaggaagaacacagtacagaaatctcctgcaaagaagctgagccatgcaattagtaaatctttggggtgtgtacccacgagagaacccccg

SEQ ID NO: 811099 - DNA, 100 bp, Homo sapiens
agcagcgctagtccagctgaacactttccagccttgtttttcagcagctttgaggaaaagtataggtcctttcccataacctgtgcacggtgctgaaggt

SEQ ID NO: 811100 - DNA, 100 bp, Homo sapiens
atatcaaagagtgaaaagccttctacaagtagggacaaggactatagagcaagagggagagatgacaagagtgttgcggagataggaacatgggagagaa

SEQ ID NO: 811101 - DNA, 100 bp, Homo sapiens
acactgttctgccctgctctgctctaacaacatttctaaaaaaatagaggttcctgcacagctgaaagaattagtttcggatttatcttctcagtttgtc

SEQ ID NO: 811102 - DNA, 100 bp, Homo sapiens
cctagtatttgaatttgctagtaacgtcatggaggatgaacgacagattgctcgctgtaagcagctcatctgtgaccccagctacgtaaaagatcgggta

SEQ ID NO: 811103 - DNA, 100 bp, Homo sapiens
tacagaacgaggtagagaagcagatgaatatgagtccacctccaggcaatgatcgttcagaaagaggcagagcgggccgaacgggccaaggagcgggaga

SEQ ID NO: 811104 - DNA, 98 bp, Homo sapiens
caagtcccggtctgtgtccgaggacagcgacgtcaggttcacctgcatcgtcacaggtataagtgtgctagcggagtgtctagattgtcctgaattga

SEQ ID NO: 811105 - DNA, 100 bp, Homo sapiens
cgggctgaaaatgaagctggagttggccacccaagtgaacccacagaaatcctatccattgaagatccaacaaaacttcttggtatacatgaacaagcag

SEQ ID NO: 811106 - DNA, 98 bp, Homo sapiens
aagcaccagatcaagatcatgcgccacgatcatgtctctcgaagactttgagcagcgcttgaatcaggccatcgaaagaaatgccttcctggaaagtg

SEQ ID NO: 811107 - DNA, 98 bp, Homo sapiens
cacttcgcattttggcattgacatttaattttagggtcctttatatagaagggagagtaggaatttaaactttgggataatgagctgcagtatgtgga

SEQ ID NO: 811108 - DNA, 100 bp, Homo sapiens
tattattaatggtcagaagatgtggataaccaacggaggaaaagctaattgttctttatagctccaagctctacagattcttcaaatatattgagaatag

SEQ ID NO: 811109 - DNA, 108 bp, Homo sapiens
ggggcgcagcttcgagggccgggagctcctggtcatcgagctgtccgacaaccctggcgtccatgagcctggaaaacacagatcctggtgccgaacatgaggacaggg

SEQ ID NO: 811110 - DNA, 100 bp, Homo sapiens
cctcctccaaatccaaagaacttagccttgttattcaagaagcccaagcgaaagacctgctgagaagaccatttgatttaatgttggttgtgtgtctcct

SEQ ID NO: 811111 - DNA, 98 bp, Homo sapiens
aacaaccccgtgaagggctcacgttacagaagaatggtctgagaaaaaatggtattttgaaaaatggcttgatctgtgacttcaagtttggaccgtgg

SEQ ID NO: 811112 - DNA, 100 bp, Homo sapiens
ttcaagttgagcagatgacaaaacttcaagccaaacatcaagcagaatgtgatttgcttgaagatatgaggtctcacttgccctggaacctctgtcagaa

SEQ ID NO: 811113 - DNA, 99 bp, Homo sapiens
gcagcagaaagcatttaaccagcatggctacttcatattttggaaagcagtttttaagacaagcattgctaccatttatgttcgttataagcaagttca

SEQ ID NO: 811114 - DNA, 100 bp, Homo sapiens
ccagagtgcagagccgcctttccagcatgcaggggctgctcaggcctgaggagcgatgcgacaggcatgatggaggtcgagtcctcctactcggacttca

SEQ ID NO: 811115 - DNA, 100 bp, Homo sapiens
gctgcaggagccagcgggggaggggctcccgctgcggaagagcggctcggtggaaaacgggttcgatacccagtcacccacaaaagctgtatataatgcc

SEQ ID NO: 811116 - DNA, 101 bp, Homo sapiens
gctgtcctcgtcctccagctgttatctggaagtttggagtttgagaatcagaagactcgcttgggcattcagttggattttgaaaagaaccaactgaagga

SEQ ID NO: 811117 - DNA, 98 bp, Homo sapiens
tttttagccttttaacattcaaggattagaaagtgaagtcactgcttttgctgtcttggatcaagaccagaaagaaattattgataccaatggagctg

SEQ ID NO: 811118 - DNA, 100 bp, Homo sapiens
caaagactggcaaaagcacaaggattctcgctgtgacagagacaacaccgagtatgagaagtgtggccgacgacgatgccctcgctgaggagcgcatgcg

SEQ ID NO: 811119 - DNA, 100 bp, Homo sapiens
tgtggcctctgcccagcttcccaacttcagaacctgacccgggaacaagccgactactgcgtctcccacatgaagccctacgtggacggcaagggccgcg

SEQ ID NO: 811120 - DNA, 98 bp, Homo sapiens
gaaattcctccagggctgagtcacagggaagaaagcgatttcctccgcctcttccaaagcggcaagatgatgatgaatgaagtcctggcagcttcctg

SEQ ID NO: 811121 - DNA, 100 bp, Homo sapiens
ggctgaaaataaatagggaagatggagacaccctctgggggtcctctctgagtcaaatccagtggaagctcttcgtgggcggtcttgactggagcacgac

SEQ ID NO: 811122 - DNA, 98 bp, Homo sapiens
ctagaccggttacaagccccagaactggccaacgtggcaggggagatgcctcaagttgaccatttggtgtttgtggtgcatggcattggacctgtgtg

SEQ ID NO: 811123 - DNA, 98 bp, Homo sapiens
cccagacagcagtggccccgagcggtgtgccacggaccacaatgtggacaacaccacagagatgctgcaggagtggctggcggctgtgggcgatgact

SEQ ID NO: 811124 - DNA, 100 bp, Homo sapiens
aatggtctcctgatggtgaatattttgctactgctggaaaggaactagaacagtctttggctagctggactcagaacttgaaagaacttcaaactatgaa

SEQ ID NO: 811125 - DNA, 99 bp, Homo sapiens
tctactggccttgcccagcgcctagctgcatgaaagcggttacgatgctggcaaagccctgcagcgcctggtgaagaagcctgtgcccaagctcatcga

SEQ ID NO: 811126 - DNA, 98 bp, Homo sapiens
ggaaacttaggggccacgtgagccacggccacggccgcataggccataaaattttgagtagaaaaatccagaaatttgaaaatcagtatcgtggtaga

SEQ ID NO: 811127 - DNA, 100 bp, Homo sapiens
ccccagctccgtctcggcggcggcggggggcaatggcggcttcctgtgttctactgcacactgggcagaagatgcctctgattggtctgggtacctggaa

SEQ ID NO: 811128 - DNA, 102 bp, Homo sapiens
cgacgggttggggatggcgtgcagcgcaaccacgagacggccttccaagggtcaacatatttcactggcacctattcacaagcttgaagaagctctgtatga

SEQ ID NO: 811129 - DNA, 98 bp, Homo sapiens
agaagcccttacctcagatgatcttctctacttggaatttctgcagaagtttgagaggaacttcattgctcaggatgcctcaggagcagtacactcac

SEQ ID NO: 811130 - DNA, 100 bp, Homo sapiens
gcacccagagagcaggaggctcctgggacccaatggcctctggatgaaacgtcaggaatttactacacaggcccacggatgacagtaaccagcccccggg

SEQ ID NO: 811131 - DNA, 100 bp, Homo sapiens
tgtttgtaactacctggcattgccttttgttgaggatcgacatgcacttggatcattgcagtttctgggcctgctgtcatctcccccttcagtacttccc

SEQ ID NO: 811132 - DNA, 98 bp, Homo sapiens
aatgctctcaacgcaaggattgaggatgaacaggccctcggcagccagctgcagaagaagctcaaggagcttcaggccaaccgcgagaagatgaccca

SEQ ID NO: 811133 - DNA, 101 bp, Homo sapiens
ctcgtttcctgatctgcagagatcttttgatcttacagcagctgttaatgaggcttggagatgctaaaactttagaaactgttcctttggagaggaaaaag

SEQ ID NO: 811134 - DNA, 111 bp, Homo sapiens
ttggtcatgtgaactgcacgataaaggaactcaggcgcctcttcttagttgatgatttagttgattctctgaaggattctcaaagttggattggtggaaacaatgaaccat

SEQ ID NO: 811135 - DNA, 99 bp, Homo sapiens
gaccctgtattttgggagtcgaacggaattgtagaaggcatgaaacaaaaaatgtggagtattgaaaatattgccttcggttctggtggaggtttgcta

SEQ ID NO: 811136 - DNA, 100 bp, Homo sapiens
aaaagcctctgggagcagaagggaggctccaagacctcatcaacaattaaggtttttgaagaaccctccatcagcctttttgctctggagcattgtgagg

SEQ ID NO: 811137 - DNA, 98 bp, Homo sapiens
cacagagtatgaccaccactattaagaaatggtgtttgcaagtgtcgtgtgtgtgagtgcaaccccaactacactggcagtgcatgtgactgttcttt

SEQ ID NO: 811138 - DNA, 101 bp, Homo sapiens
cctctgggagtgacagtgctgacaagaaggctcaaggtcccaaaggtggtggcaatgcagtaaagcctccgatggaaccccacagggggagaaggaaaagg

SEQ ID NO: 811139 - DNA, 99 bp, Homo sapiens
aagagttcaactttcccagaagttgttctaacgctgcctttgctttaaaacagtattacttgcggaggcaggtggaagtcatcataaagtttctgtttc

SEQ ID NO: 811140 - DNA, 100 bp, Homo sapiens
aagccgatccccatttttattgaaagatgtattgagtacattgaagccacagcattgtggaagcttccaagggctgccagctggggaagacagagcaggg

SEQ ID NO: 811141 - DNA, 133 bp, Homo sapiens
ggatctggtgctaaaaagatgccttcttcatttggctgtgataggtgctttgctggctgtgggggctacaaaagacttcccaagtaagaagcggaagaggagccgctggaaccaagacacaatggaacagaag

SEQ ID NO: 811142 - DNA, 98 bp, Homo sapiens
tggataggcagaagaaagaagaggagaaggagcagtccgtgctcaagtttattacccagaactctttgtctgggtcagtcaagaaccatttccaaaca

SEQ ID NO: 811143 - DNA, 98 bp, Homo sapiens
tgtacgtgtacatcatttacggcatgtacttctgcatgaacatctccagccaggccacggatgacatcgtgaaggttgaagtctgggatgtagtagac

SEQ ID NO: 811144 - DNA, 99 bp, Homo sapiens
gagtgtacacactgcgagctactttctgactgcccgcctggcactgaagccgagctcaaaggtttgaagatgccgcatttggattggatgaattccaaa

SEQ ID NO: 811145 - DNA, 100 bp, Homo sapiens
gatgctcaagagtgagctgcggaagcaaaaggcagactttttgatattcagagccttggaagtcaacactgtcagttataatcaccaacagatgagtgaa

SEQ ID NO: 811146 - DNA, 98 bp, Homo sapiens
tacagagatgtgatgttggagaactatagcaatctggttttcttgggcattgcggcctcatttgctgtcaagcttttcaaagcatggatggcagaaaa

SEQ ID NO: 811147 - DNA, 100 bp, Homo sapiens
gaggcgcgagggcgcggagttccaggtcgagcagttaggccgcgagcgactgcggcgccgagccgctcctactcagactgttactctggtgacacaacct

SEQ ID NO: 811148 - DNA, 100 bp, Homo sapiens
acagtggagctgaggggggccactctctcctgggcccccaaagacaaatccagtaggaagaatgtgctggaggaagtttgtgtttttcaacatacctcag

SEQ ID NO: 811149 - DNA, 100 bp, Homo sapiens
caagcaaattcagagattcagccaccaaggggttcagcttattgacttctcaccttgtgaaagggtgactatgaccagagcaggaccaaagtgctgcaca

SEQ ID NO: 811150 - DNA, 100 bp, Homo sapiens
cagcgcccgtctgcttcgggcctctggaatttagcgctcgcccagctagccgcagggcggcaccttcctacttctgcccagccacagccctcccctcaca

SEQ ID NO: 811151 - DNA, 99 bp, Homo sapiens
gggagaggcctggaggacaccaacatgcgcgggtccaagcctgtagccccaaatcggataatctctgcagctgataacaagcaaaagagaagccaggca

SEQ ID NO: 811152 - DNA, 98 bp, Homo sapiens
gcgcctttgtgcgcgcgccgagtggtgccaccgaacatcgcagaactgaagaatttggaggtgctcaacttttttaataaccaaatcgaggagctgcc

SEQ ID NO: 811153 - DNA, 100 bp, Homo sapiens
cgttgtaccatccgcctgtgggacacctaccagattgcagcaaaaattggaggtgatgcagggacatcactgaattcaaatgactatggttatgggggac

SEQ ID NO: 811154 - DNA, 100 bp, Homo sapiens
gggagcttcacttggacaacaacaagcttaccagagtacctggtgggctggcagagcataagtacatccagtccacaagccctagccatgccgtggtagc

SEQ ID NO: 811155 - DNA, 51 bp, Homo sapiens
cctctttgatctcgacaataagacttcccagactcccggccagccatcgag

SEQ ID NO: 811156 - DNA, 100 bp, Homo sapiens
aacctcaatattgcaattgatgtcatagatgcttaccaaaaacatcctgaatcagaatggccaacttcctcaacaatttccaaactgctaaagaagcttt

SEQ ID NO: 811157 - DNA, 100 bp, Homo sapiens
gatttttacttttgaaaaaaccttggaggaactctatttagatgctaatcagattgaagagcttccaaaggtgctggagaatctggtaaaagcaccattg

SEQ ID NO: 811158 - DNA, 100 bp, Homo sapiens
caatgacaagagagaaatagacatagagtggtcacttcatttaccaaccctggaaccgcagacctctgggcttcctggaatagccaggccagaagaagga

SEQ ID NO: 811159 - DNA, 100 bp, Homo sapiens
atcgtgacctccagttccatccatgttgctgcaaatggcatatcacacctgaaaaattttatgtggaagcttgtgatgatggagcagatgacgtacttac

SEQ ID NO: 811160 - DNA, 99 bp, Homo sapiens
tcggaatcagatttgaaaatgaaagtgctccacttaacactcctgtaacagaagacagatttggaattttaacagagaaatacagaattcctgtgccaa

SEQ ID NO: 811161 - DNA, 101 bp, Homo sapiens
tgtttcctacccactattcagccattgggtcacaagcgatgaaaagagcaccttgaagaaaccaccatcatgggttcgggtcccatagaccccaaagaact

SEQ ID NO: 811162 - DNA, 100 bp, Homo sapiens
acacaacaaaacattcatggagggggaagtatctgatgaggatgaaattctaccaccaaaacttcaagctgccctgatgcagattttggaagaacgaaat

SEQ ID NO: 811163 - DNA, 99 bp, Homo sapiens
agtaacacacagctgggtgggggcacaggagacgaaaccagacagagggtcaagtttacagatgaccgtgtctgcaagagtcaccttctggactgctgc

SEQ ID NO: 811164 - DNA, 98 bp, Homo sapiens
ttttccaaatgaatttgcaaaacttactgtaggtcctggcattgatgtgcctgctccagacatgagcacaggtgagcgggagatgtcctggatcgctg

SEQ ID NO: 811165 - DNA, 98 bp, Homo sapiens
gaaatgtgacgatatgctaacacaaatgatgtgcttgcttttggaacattggtcagtacttccaatacctacgacgggtctggtgttgtgactgtgga

SEQ ID NO: 811166 - DNA, 98 bp, Homo sapiens
tttgttgaattgccttatgtataaaatgtcatactacagatttggagaaatgcagattggccaaaatgggaaggattggattccactctcttccacga

SEQ ID NO: 811167 - DNA, 101 bp, Homo sapiens
ggcaacctgcggggctctggctatgggcaggacgtggacgggcacaacttcatcatgaggtgggtgtgcagactggtgagctgccagcaggggcccagacg

SEQ ID NO: 811168 - DNA, 99 bp, Homo sapiens
aaaatactatttttggagaaagaggagaaatatgctgtatttaaaaacccccagtgcattccactcttcgttcaacttgttttggagagattaactcga

SEQ ID NO: 811169 - DNA, 100 bp, Homo sapiens
aatgtacctcagctggatgcccctatctctcaattttggtgtttctgtggcctgggactggttagcaccaacaagtcctgctcgatgccacccatcagtt

SEQ ID NO: 811170 - DNA, 100 bp, Homo sapiens
aaaggagaacttcttaagaagagtggttattgataaggaaactatagatttattggcgttcacctctgttgcagaactggagttgctgggtttggagaag

SEQ ID NO: 811171 - DNA, 100 bp, Homo sapiens
agatagaaaccgagggagggagagagacagcgatcgagagagaccggagaggtggagagggtttgctgaactaactccaagctggtgtgcctagcgtccg

SEQ ID NO: 811172 - DNA, 100 bp, Homo sapiens
atgcaaatagcgggaagaacaaaggaaggggagcccgggacccccgggggcgcagatatgccaagagtttaacagtacctgggcatgggagatggagaag

SEQ ID NO: 811173 - DNA, 99 bp, Homo sapiens
cgtcttgcatctgaagaagttcatcgccaaaaaactcaacctttcatcctttaacgagaacaccttccaccatgaccacctcagcaagttcccacttaa

SEQ ID NO: 811174 - DNA, 99 bp, Homo sapiens
tcatttctgagtattgtctttatatcctgacactatgaatgctacttggatgcctcttaaggagctcattttgcagctctcaagcttttatagcatgct

SEQ ID NO: 811175 - DNA, 100 bp, Homo sapiens
cctgccgtcgagatcgccgccgacgccgctgctgtggccgctgctgctgctgctgctcctggaaaccgctgctggagccagttctgcttctcggcaagga

SEQ ID NO: 811176 - DNA, 98 bp, Homo sapiens
aaaaatgacatccagcgacaaggactttagggttatcaatgccgggaagagcacacacaatgaagaccaagccagctgtgaggtgctcactgtgaaga

SEQ ID NO: 811177 - DNA, 100 bp, Homo sapiens
ttcaggaggggagtctgatattgaagaggaagaactgaccagagctgatcccgagcagcgtcatgtacccctgattcagtggtcccaatttaaaggctat

SEQ ID NO: 811178 - DNA, 98 bp, Homo sapiens
ttgtggtgctggaaggggccagtctggagacagtcaaggtgattgtagagaaggctccaaaagccagggtgcctgatctggacaagaggaagtaccta

SEQ ID NO: 811179 - DNA, 100 bp, Homo sapiens
cccaagaaaaagaagaattcagatgatgctccatggagtcctaaaggttgaatgcctttgagaacttgatgcataaaatttgcatgactcctcactcctt

SEQ ID NO: 811180 - DNA, 98 bp, Homo sapiens
agcactcaggacttaagcgatgtttccatggatgaagtgggcatcccactccggttccatgccattgcagtgtcaactaggcctcagttacttttcag

SEQ ID NO: 811181 - DNA, 100 bp, Homo sapiens
gaacagctatctcgggagaaacaacaactgctacatctgttggaggagccaactagcatggaagtgcagggtcctgtattaataggaagttcacatggtg

SEQ ID NO: 811182 - DNA, 100 bp, Homo sapiens
gacatactctccagcttcaagaataagacgagttggaagaagacctgatcaacaacttcagggtgaagggaaaataattgatagaagaccagaaaggcga

SEQ ID NO: 811183 - DNA, 98 bp, Homo sapiens
gttcagttgataaaaataagaacaaagtgacaccactgcagagctgattgctgaggaaggggtggacagcctgaatgtcaaggagctgcaggcagcgt

SEQ ID NO: 811184 - DNA, 120 bp, Homo sapiens
tgcccacttggcaccagtggtcagcagcactgtttcctatgatcctaggaaacccactgtgaagaaaacactttgtgctactctgtggggctttggaaaagcatgttaaatgtgatatta

SEQ ID NO: 811185 - DNA, 100 bp, Homo sapiens
gtgacatcgcttctgggtaccactatggggtagcatcatgtgaagcctgcaaggcattcttcaagaggacaattcaagatcggtttgggcttggccagcc

SEQ ID NO: 811186 - DNA, 98 bp, Homo sapiens
caactgctgatgcggatgagaaggcctttggcgggtggaggaaaatcttggggtatcgcacatttttataaagtcacccaacctgcctgcagtttacc

SEQ ID NO: 811187 - DNA, 100 bp, Homo sapiens
ctgtgaatgaaactgggtttcagctgaagtgaatctgaatggtgcctaccctaagctggtgcctttcagacctgcaggacggctgatctctccacctctg

SEQ ID NO: 811188 - DNA, 100 bp, Homo sapiens
agaatatgaaatgagtctggaaaactgggccaaagcagtgaaacgctccatgaattgtcttcccaagggattgttgaagaaacttctgaagagggaaact

SEQ ID NO: 811189 - DNA, 98 bp, Homo sapiens
ggcagttgcagtgttggagctaaagtatggcgatttagtactgcattttgttctgttaatgaatggaaatttgctgacatcctaagcatggcagacca

SEQ ID NO: 811190 - DNA, 100 bp, Homo sapiens
gcacggagatttctggggctttggagggaatcgtgagcgggcgggaggaggccggggaccacacaggtgctggagaatctggtaaaagcaccattgtgaa

SEQ ID NO: 811191 - DNA, 100 bp, Homo sapiens
acccccctgactaccgagggcagagctgcatgaagaggcacggcattcccatgagccacgttgcccggcaggtttaccgacaagactgtgaaactttcgg

SEQ ID NO: 811192 - DNA, 98 bp, Homo sapiens
cgcggaattccaaaccctcacctgtagacaggtgcaatgaagggcgtgttggtagacattgtgaatgcagcacagatgaagttaacagtgaagacatg

SEQ ID NO: 811193 - DNA, 100 bp, Homo sapiens
caaaaccttatctggtcgtccagcccaccccggtgccttgctctggaagtcctcctcgccctctgactaatatgaatgacaccatggttagccacatgtc

SEQ ID NO: 811194 - DNA, 100 bp, Homo sapiens
gcacaagctccagcatcccgtcaggggttgcaggtgtgtgggagttacagcagatgaatggaacagcaaccatacgatagaaatagagataaatcagact

SEQ ID NO: 811195 - DNA, 99 bp, Homo sapiens
tgggattcacccccaaggagtctcgctgcttttgtggtcacgagaagagaatgccttctagatgcaaaatcacctccaaaccagaccacttttcttgac

SEQ ID NO: 811196 - DNA, 99 bp, Homo sapiens
tgtctgtccccagagcctcagtttgtgcaggacaccgacatggaacagggactcactggggtgatgtcttggcattgcccattttcaagcaggaagatt

SEQ ID NO: 811197 - DNA, 98 bp, Homo sapiens
ttgatttctccaaggatctgctgaaagtatctactgtgcgtttcagtcaacaatacagcttgtgttcgacaatattccttgatgacagcacagccatc

SEQ ID NO: 811198 - DNA, 100 bp, Homo sapiens
caagccctgccgcacagctactactggagcgcgccggctccctatctgggaaacaaagcagttgtgaaaaacttcaggacaaaaatgtttcatttaagga

SEQ ID NO: 811199 - DNA, 99 bp, Homo sapiens
atcacctctgcagccttgctgttcattgccaccgtcgacaatgatctctgctgtctcttggatcccatctgcctagatggaagaggatcctatccgaag

SEQ ID NO: 811200 - DNA, 99 bp, Homo sapiens
tttcacagtcccctggggactcagaggagtacttcgccacttactttaatgagaagatctccattcctgaggaggaggagaataaaggcagccccgttg

SEQ ID NO: 811201 - DNA, 100 bp, Homo sapiens
actggcctgtgctcttggcagaaaggacctttccagctcacccccagggccttatggtcaagaaatgtatgcgtttcgatctgaggaaagattcaaatcc

SEQ ID NO: 811202 - DNA, 99 bp, Homo sapiens
tttgctggatttaagcactgctgcactttatgaggtgccaacatcgcctctggtgaggaagtcgccatcaagctggagtgtgtgaagacaaagcacccc

SEQ ID NO: 811203 - DNA, 100 bp, Homo sapiens
gaagagagcggcggccgctcacaacatgcacagcctggcgacggctgcggtgacagagctgaatgaacctctctccaatgaagatcgaaatctcctctct

SEQ ID NO: 811204 - DNA, 100 bp, Homo sapiens
cttttggattacaactgttcatcctcacctatgcaaagaaagggaagctattgctgggattttgaggagggccagatattcgaagcttacaacatggcag

SEQ ID NO: 811205 - DNA, 118 bp, Homo sapiens
ttggattccgatgcaactgatagcagctctgatgacgatttggatgaatatacccttagaaaaaatgtggcagtgtatgactacgtggaagtcttcgatggagaaaatgaaaatggac

SEQ ID NO: 811206 - DNA, 100 bp, Homo sapiens
caccgacccttaccctcagcgagagaagtaaccctaaaagatggcggcaaggcagcccaggcaaatgtaagaataggcgatgtggttctcagcattgatg

SEQ ID NO: 811207 - DNA, 100 bp, Homo sapiens
accattcaacaagatgctgactgggacagcgttctgtcatctcagcaaagaatggtcagatgggcagacctggaagagaagaaggatgcagataggaaaa

SEQ ID NO: 811208 - DNA, 100 bp, Homo sapiens
gttggagccgtctgcaaagtgtccccggcaagaagtaatggaacggcggtatcccaaggaggtccaggacctgtatgaaacaatgaggcgatttgcaaga

SEQ ID NO: 811209 - DNA, 98 bp, Homo sapiens
gaagcataaccgttggtcgtggggaggctctctccatgggagccctagcatccacagtgcaggtttcaggctctgtataactatactcccaggaatga

SEQ ID NO: 811210 - DNA, 99 bp, Homo sapiens
ctccctcagcttccgccccaaaagcccactcaacagcaaagagcagctatgctgattaaaatgatacttaaaaaagataatgattcctacgtatcattc

SEQ ID NO: 811211 - DNA, 99 bp, Homo sapiens
ggcggagcctgcgtgctggtgatcgcgctgatgttcctggcctggggggaaggagctagaaaatatcatcagtcagatgatgcatgttgcagaatacct

SEQ ID NO: 811212 - DNA, 98 bp, Homo sapiens
agagttcagaccgtggcgaagtggagagtgacatgcagttggatggcggtgactgcgtgaaaacatcggagcagtgtgggtccgagcaaacctgtttc

SEQ ID NO: 811213 - DNA, 98 bp, Homo sapiens
gacactttgttattggagaaacatgcagattatatcgcatcctatggctcaaagaaagatgattatgagggagcaaaggagtttgctgctgctctcac

SEQ ID NO: 811214 - DNA, 98 bp, Homo sapiens
ggcgccgagggacaccgcagtatgaggcagagattacatgaagcagatgacatttgaagcccaagcctttttagaagctgtgcaattcttccgacagg

SEQ ID NO: 811215 - DNA, 99 bp, Homo sapiens
ttcaagcggcaggacgcacttgtcttagcagttctcgctgaccgcgctagctggaagaaatgttggctatttggcgatgagaggtggtgaacagtgacc

SEQ ID NO: 811216 - DNA, 100 bp, Homo sapiens
aaagttgggtttcttttactggcaaatagtacttcaagagcacagtcttatgtaaggaatagccaggccagaagaaggaaggcctgtggtgagtgggaca

SEQ ID NO: 811217 - DNA, 98 bp, Homo sapiens
aggagagggttcgatctccgtacgcaccaggatgcagcaccgaggcttcctcctcctcaccctcctcgccctgctggcgctcacctccgcggtcgcca

SEQ ID NO: 811218 - DNA, 100 bp, Homo sapiens
tgcctgcagggaaacagaagcttactttgctgacctgataatgaagaattattttgcaccactggatgttgtttactggatttgaatttgttgaaatgag

SEQ ID NO: 811219 - DNA, 100 bp, Homo sapiens
agttaccattgatttaaaggaggaagatgctcaataaactgatttgcttaatgggtaaactagcgctcctttccgtaaccacgggaggcacggccgagat

SEQ ID NO: 811220 - DNA, 99 bp, Homo sapiens
cagactgatggccagcagagggcgaagtttcaagcagacttcacttgctcttgtacatgagtttcaccagtgatcattaaagaatgggcagcttacaaa

SEQ ID NO: 811221 - DNA, 124 bp, Homo sapiens
aaaacccttgggtgcagatcatgatgtttaagaacatgacgccgtcacccttcctgcgattctacttaggaatgaattcttccaaaacaaaactagaactgcaaaagcacctgacgacattaac

SEQ ID NO: 811222 - DNA, 99 bp, Homo sapiens
gaaagtcagatgccccttttaaactccctcttcaaaactcatctcctgggtgactggtctgccatcatggatgttctcgcagaagcaaatggcaccttt

SEQ ID NO: 811223 - DNA, 140 bp, Homo sapiens
tgatagacttcgggccttgaaaagcagaagacaatccaaaacaaacgctattcctctcactgaatgagttcacggtgatcaggaagaagttcaagtgtccgtactgcagcttctcggccatgcaccagtgcatcctcaag

SEQ ID NO: 811224 - DNA, 98 bp, Homo sapiens
gatgatccagaatgtcggaaatcacctgcgacggtcaccaggtgtcaagatgctgcaagtacataggactggactgggcaggctgggggtcagcctct

SEQ ID NO: 811225 - DNA, 111 bp, Homo sapiens
cagcagcccccgaaggccctatcaggacatggagtatgaaagacggttaacgaagcccttgtcatttgctgattgtgttggggatgagctgccgtggggatgggaagcagg

SEQ ID NO: 811226 - DNA, 100 bp, Homo sapiens
gcaatagatacatggagcccatcagaatggcagatggcttatgaaccacaggttgctccggttgctaagaagactatgaacaagtcagagaacctgctgt

SEQ ID NO: 811227 - DNA, 100 bp, Homo sapiens
accaaaaatcgtgacaccagaagaatattataatgtcacagttcagttatgggtgctacatgtgtgctttcagagcagtagtgtgaggaagcttggagtg

SEQ ID NO: 811228 - DNA, 99 bp, Homo sapiens
tttgcgggactcagtcccatcactccaaggagagaagcatcagtgagcctccttcagctcccatctctcctcggatgaacaagggggagcctcaacccc

SEQ ID NO: 811229 - DNA, 100 bp, Homo sapiens
ggggtatacccaggatattatctaacgtttctaacaggggtgttaatgacattagcagcaagagctgttatcaatactctggctgaccatcatcatcgtg

SEQ ID NO: 811230 - DNA, 100 bp, Homo sapiens
agcccggtttatacagaagcagatggaacattttcaagatacatatgaaccagatggttacaacccagaagctcctagtattactagttctggtagatct

SEQ ID NO: 811231 - DNA, 100 bp, Homo sapiens
gaaggaagacttcatgctgttggcagtaggaatcattgcagcaagtgctttcatccaaaaccatgagtgttggagccagcatgaaagcccctttagggga

SEQ ID NO: 811232 - DNA, 98 bp, Homo sapiens
tctctggctccctcctcccagggccaggcgccgctcagaacggcccggtggttctgggaagcgtacttccagtcaattaaagccattgccctggccac

SEQ ID NO: 811233 - DNA, 100 bp, Homo sapiens
cctgcacatgcaattcagggaaaaccgtgaaaaagtatcatgagatgagagctattgttcacataactcaacagttagtgattgtcaagtggggaacacg

SEQ ID NO: 811234 - DNA, 100 bp, Homo sapiens
gccacccacaaacaaactacccattttcttttttggaactcatgagaccaatcatcctcttccagtggtagcgtgtttgggtctggaaacactggaagag

SEQ ID NO: 811235 - DNA, 99 bp, Homo sapiens
tggagaacccgagccctttccacagccccttccggttcgagatcagcttcgagtgcagtgaagccctggcggacgagcgggcagagaagatgggccaga

SEQ ID NO: 811236 - DNA, 100 bp, Homo sapiens
agaatgtgttgctgactgagaatgcagaggtgaaacttgtgcctgagattgtgagggagacccaggacctaattgaacaaggggcactcctgcaagccca

SEQ ID NO: 811237 - DNA, 100 bp, Homo sapiens
aagacccgaaccaagcacattggaggtgtactatattctctcaagatgtccttttggcatagaagatgggaagaaaaggtttgggattgaaagactgcta

SEQ ID NO: 811238 - DNA, 101 bp, Homo sapiens
agtatagtttgggttcgccagttggaattgaagggaagcccaggctccccaggagtcacaggaccaagtgggaagccaggaaaacctggagatcatggcag

SEQ ID NO: 811239 - DNA, 100 bp, Homo sapiens
catcagcagacccatttcctcagggtaattaaaaccatggaggcgatcagcgaggttctccaggaccttaggtttgatgcggaatctgccgagtgatggc

SEQ ID NO: 811240 - DNA, 98 bp, Homo sapiens
cctggaggagcgcatgcaacagaagtatgaggccagccgggaggacatctacaagcgggtgacaggggatcctggagctgtgctgtggcttgaggaga

SEQ ID NO: 811241 - DNA, 100 bp, Homo sapiens
caatatctggcaagccgggtgacaagtaatcgtgtggaagcgtggacaagagatgttgctttcttactcagacaagaaggcaggcccatggttaatctta

SEQ ID NO: 811242 - DNA, 50 bp, Homo sapiens
ccccgctgaccaggtggctgcagattcccagccatatgaagacaccctag

SEQ ID NO: 811243 - DNA, 100 bp, Homo sapiens
taaagcaaattaaaaacaggatgaaaaagactgattggctcttcctcaatgcttgtgtgggtcagttctcctcgggtctcggggacttgacatatcccac

SEQ ID NO: 811244 - DNA, 100 bp, Homo sapiens
gaaagtactcaacagcatcgcctacaagatactggtagacacagtctgggccctctcttaccttactgatgctggcaatgaacaaatacagatggtaata

SEQ ID NO: 811245 - DNA, 100 bp, Homo sapiens
ttattggtgtccactgtacccatggtttaaacaggactggctacctcatttgcagcttagcagtgtctgcaaaaacgaatcttttcctacaacctgttaa

SEQ ID NO: 811246 - DNA, 98 bp, Homo sapiens
ttatgtctgcctgttctcccctcgtcggtggctaagagtaatcaagtcagaggattatatgacttttatctgcctagagaagaactatggatctacaa

SEQ ID NO: 811247 - DNA, 99 bp, Homo sapiens
ggagcagagtcgactgggagcgaccgagcgggccgccgccgccgccatgaaccccgaatagcggtggtgctgtggttctgggggcagagtcccatgcct

SEQ ID NO: 811248 - DNA, 99 bp, Homo sapiens
tgggaagtctgtattagctgcagaagctgttagagatcattcccttttagaagtatcccttttactattcagcgactatgtgaattgttaacagatcca

SEQ ID NO: 811249 - DNA, 100 bp, Homo sapiens
tcggtcacgaggtggaagaggtagaggacgatactctgaccgttttagtagtcgcagacctcgaaatgatagacggctctttggtgtaacgggaaactgc

SEQ ID NO: 811250 - DNA, 99 bp, Homo sapiens
agaagagcagcttctcgccgtacaaggccataggaaaaggatacagagtagagtttcatgaacctgaaacttggtggaaatttgatcctgaagaattag

SEQ ID NO: 811251 - DNA, 100 bp, Homo sapiens
aaatgaggacatatcagtatcggtggcagcacaccctgggccccccactccccgccgcaagtcctgaggatggccagcagagaaacaagaaaatggactc

SEQ ID NO: 811252 - DNA, 100 bp, Homo sapiens
atggtatatttgcagccagtactctatatgaacaatccgtctggatcacggatgtaggaagtggtgagagcacagtaaggactattgctatggatggtac

SEQ ID NO: 811253 - DNA, 99 bp, Homo sapiens
ttggcttactgcagcctctgcctcctgagttcaagcgattctgcatcagcctcccgaatagctgcgattacagatttggagcaagaggtggtggtggcc

SEQ ID NO: 811254 - DNA, 98 bp, Homo sapiens
tatgttgtgcaagaggtactgtccatcaaacatcttccaccacagcttagagacctgcttttttaaaggctgcagaaaacttcactcttttggttaag

SEQ ID NO: 811255 - DNA, 99 bp, Homo sapiens
ttcaacagctccagcctgcagtgccagaattcctcggaaactggagcacccatcctaactgatgatgttagcctgcaggtgttcatggaccatttgaag

SEQ ID NO: 811256 - DNA, 100 bp, Homo sapiens
ctgtctcagcctacaaagttgctggaactctagatttgtgacattatttccaaatgggaacaggcttccaaagaacagcagcctggaaaatgtgaaggta

SEQ ID NO: 811257 - DNA, 98 bp, Homo sapiens
tatctaacgtttaccctagcaaaccaatgctgtcttcgcaggtgccatgcctacaatggcaagcgtcaagctgtctacacttcatcccattgtgaatc

SEQ ID NO: 811258 - DNA, 98 bp, Homo sapiens
ctcacctgggtccatgagatttttcagggaacgcttaccaatgaaactcgatgcttgaactgtgaaactagagaatttcccaagagatttgtgtagtt

SEQ ID NO: 811259 - DNA, 98 bp, Homo sapiens
gagcagataactgcagtggttttctaggagtgcggccaaagatgatttgtcattaattcggaagaacagaatggctctctttcaacaattgacatgtg

SEQ ID NO: 811260 - DNA, 100 bp, Homo sapiens
tcttagaacaccacgaacaccagcttcccaggacagaattctgcagggaactctaatgatccaggacaaagaagttaccctggagtatgtatcaagcctg

SEQ ID NO: 811261 - DNA, 98 bp, Homo sapiens
ggaaccgctggctgtcagacagcttcaaggagacgttaagtgggcagaccaacatccacctcagcaaaaacttcttcctgacgaatcgcgccagggag

SEQ ID NO: 811262 - DNA, 100 bp, Homo sapiens
tttgacgccatcgccaacatccgaggggaaactttcttcttcaaaggttctgccatcttgaaacccccattctgtttccagcccagaagaaatgctgccc

SEQ ID NO: 811263 - DNA, 100 bp, Homo sapiens
aagaaactgcaattttatctacagaaaacaaatctgagttcctgttaacggattactttgtgtcttcagtgccctgggtttgcctgtgacccaatgccca

SEQ ID NO: 811264 - DNA, 99 bp, Homo sapiens
ctggaagggatgtcgtctcagcagtgctcgggcgcagagaccccaggcatggaggagagcctggcagaaatgagtattatgactactgagcttcagagt

SEQ ID NO: 811265 - DNA, 109 bp, Homo sapiens
ccatggaaaatgtgaattcatctattctactcagaaggcttcttgtagcgttacagtgtttctgccacctctgtacaaaagacaattttacttgtgtgacagatgggct

SEQ ID NO: 811266 - DNA, 98 bp, Homo sapiens
tgacctggacctcggctacagactgctggctgtgtgtgctgcaaaccgagacaagttcaccccgaagtctgccgagcagttcagagccccagttgcag

SEQ ID NO: 811267 - DNA, 98 bp, Homo sapiens
aaatcaagatttaacattccaacacataaaaattatttatccaacagctcctcccaggttttataggatcacattgacaaaagtaccatggagtttta

SEQ ID NO: 811268 - DNA, 100 bp, Homo sapiens
gcaggactttgatgctagcctgtccgggatcggccaggaactgggtgctggtgcctatagcatgagccctgtatgatgagattcgtcagtttcgcaaggc

SEQ ID NO: 811269 - DNA, 100 bp, Homo sapiens
tttcatgggcgtcatgaataacatgcggaaacagaaaactgctgcagatggaaaaaggcaagagatcattgttctggattccaagaggagtaacgccatc

SEQ ID NO: 811270 - DNA, 100 bp, Homo sapiens
ctcctctccatgtggctgcaagatacggtcatgagcttttgattaacaccttaataaccagcggagctgacacagccaaatcctgataacttaagtgact

SEQ ID NO: 811271 - DNA, 98 bp, Homo sapiens
caaacaggagctggagcagctcaaagagatagctttccaatgattagacgaattgattctttctgtgactcatcagttcatttcctgtaaaattcatg

SEQ ID NO: 811272 - DNA, 99 bp, Homo sapiens
ggagccccggctcgcccgtgtgcagaggtctctaattaacagaagatggcaaagcccagccacagcagctatgtccttcagcagctaaacaaccaaaga

SEQ ID NO: 811273 - DNA, 98 bp, Homo sapiens
ttgctttcactctggaccacgagaccggattgcctcaaggatgtcatatctatgagtaccgcgagagcaacaagtattgttgcagcatctggcagtga

SEQ ID NO: 811274 - DNA, 100 bp, Homo sapiens
gctggaggagcgtctctccgccactgcgcacattttgcagcctgcaccggccaacgttgtcgagatgtccacagaaggaggatttggtggtactagcagc

SEQ ID NO: 811275 - DNA, 98 bp, Homo sapiens
cgggaagatcctggaggtggatctgaagaacggggctatggcatttcctctgtgccatctgcttccaattctaaatccataaaagagaatagtaatgc

SEQ ID NO: 811276 - DNA, 130 bp, Homo sapiens
gcgcgcctcccgggcggattccagccccgagcgggacagcgcggcggggagcgacgatccacctggaaggccgctgtggtggaaggatgtttgactgcagagatgtggcattcactgtgggcgaaggaga

SEQ ID NO: 811277 - DNA, 98 bp, Homo sapiens
cttctatagaaatggctgaaggaaaacctccttatgctgatatacatccaatgaggtctgcgctcctcagaccaccggcaggtgaacagcctgatgca

SEQ ID NO: 811278 - DNA, 100 bp, Homo sapiens
gtgctgaaaaagaagaatcagcaaatactactgaaagtgcaatatttgagtatcactgcgagctgtatttaaacttgaaacagatagaagtatatggccc

SEQ ID NO: 811279 - DNA, 100 bp, Homo sapiens
tgtggttcttcatcgtgctattcctggtctacatcctgcgggtgcctttgaaaatcaacgacaacttgagcacagatgctgatgcagagattgaaggagc

SEQ ID NO: 811280 - DNA, 98 bp, Homo sapiens
tcgtgttctttagaactgaagccattctcaaagcctcctggccccagagacaggtggcagggcccagccccgaaccagacaagggacccctcaaggag

SEQ ID NO: 811281 - DNA, 100 bp, Homo sapiens
agccttcctgatttctgcagctctgtgtgaagaaactaatctggattcactccctctggttgatacccactcaaaaaggacacttctgattaagacggtt

SEQ ID NO: 811282 - DNA, 98 bp, Homo sapiens
atcacccaccaacaacaccacaataatccacagccaaggtgggaatgagatctcgaaaccaaggtggtgaaagtgcatctgatgggcatatctcctgt

SEQ ID NO: 811283 - DNA, 100 bp, Homo sapiens
tcagatcttcatgtgtctcttctaagctgaataaagctgttttggaactgtcaggtacctcaaagcgtaagaattgaatgatctggcacgggaccctcca

SEQ ID NO: 811284 - DNA, 100 bp, Homo sapiens
tttcacttgagaaccacccagccaagcagacagtggaggaggagatgttaaagtaacccatcttgcaggacgacattgaagattggtcttctgttgatct

SEQ ID NO: 811285 - DNA, 100 bp, Homo sapiens
gatggcggacagtgcggaactaaaggttggattcagatgccgaggacacagtacttcctcagaaagaagacagaatttgcaaaagagaccagataataag

SEQ ID NO: 811286 - DNA, 100 bp, Homo sapiens
tgcaggcaggccctgagcacgctgctgtgtgagcagcagagacctgtcggccatggagcctaatgatagtaccagtaccgctgtggaggagcctgacagc

SEQ ID NO: 811287 - DNA, 100 bp, Homo sapiens
atgtggggtagaagaagaaaacttcgaaggcttaattacatgctatgggaaaacttcctggaaccagaatggcagcgttaaaagccaagtataccttgct

SEQ ID NO: 811288 - DNA, 99 bp, Homo sapiens
aaagattttcatggttctcttcttcgattttatgaaaatggagaactctgtgatgtcacactcaagaaatcctgcaggacggactggactggtgggccg

SEQ ID NO: 811289 - DNA, 99 bp, Homo sapiens
tcaacaccctgagtgcggatttctgctatgatgacagcataagcagtactataatggatgtagacagcacaatttccagtgggcgttcaactccagcaa

SEQ ID NO: 811290 - DNA, 98 bp, Homo sapiens
aagtagatgaagatgagattcagaagatgcacggagcgtgctttggacaccatgaattttgatgttataaagggcaagccagtacgcatcatgtggtc

SEQ ID NO: 811291 - DNA, 100 bp, Homo sapiens
cctggcacaccagcgcccgcaggatgcccaggtccttccatagtgacgccccccaaggacatctggaatgtcactggtgcccaggtgtacttgagctgtg

SEQ ID NO: 811292 - DNA, 100 bp, Homo sapiens
ctccaccctgccgtcagttccacaccagtgcctcagaggtccatggcagtatcccagccaaatctcgatggttctgactctagagataagccaaagcttt

SEQ ID NO: 811293 - DNA, 100 bp, Homo sapiens
gcaccgccaagccaagctcaacctcaaatcagtactgagggctcaaatctaatccaagtgaaaatgaagaaaaggaagcacagtctcaacttataaaatc

SEQ ID NO: 811294 - DNA, 98 bp, Homo sapiens
tcaaattcaggagttcaagaaacgagatgcacaggtaattattcgaggtggaggacatattttaccctatgaccagcctctgagagcttttgacatga

SEQ ID NO: 811295 - DNA, 100 bp, Homo sapiens
caggatgaaagtgagcagtccagaaagcggcttatcgaacagagccgggagttcaagaagaacactccagaggtattgccagggaacagacgaggaggac

SEQ ID NO: 811296 - DNA, 99 bp, Homo sapiens
tctgatgtggtgcttttgaaccactggaaagtgaggaattttgaagtacaccgtggtgacattgtatcattggtatgtaaacagtgttctagtttgaga

SEQ ID NO: 811297 - DNA, 100 bp, Homo sapiens
cacttgtaagaactggtataaaaagtccatctgtggacagaaaacgagagacagcgtctggagaccatcctcagtctctgtgctgaatacacaaagcctg

SEQ ID NO: 811298 - DNA, 100 bp, Homo sapiens
gaatacacagggttcccacttggggagctgcatcgagaaagcccggccctactatgaggctcggcggctggctaaggagagtcgggtttctccattcaag

SEQ ID NO: 811299 - DNA, 100 bp, Homo sapiens
aagttgccaaatttgaagcagaacgatcaaaagccaagtggcaaacggttacccttaagttacaggagtcccagctgcctgggccagaccagttacagca

SEQ ID NO: 811300 - DNA, 101 bp, Homo sapiens
tgagtttgacgaagtggacatcacctgcagtcagtccagagctgcccagtggctgcctctttgatgagccgtatagcacatgtggatatagtcaatctgaa

SEQ ID NO: 811301 - DNA, 100 bp, Homo sapiens
tttatcatgaccgtgttcaggcaggaaaacgtggatgattactacgacaccggcgaggaacttggcaggaagaggatcacctagcccgggtagaagaggc

SEQ ID NO: 811302 - DNA, 123 bp, Homo sapiens
acagtgaagtcaaaacggatgtaaataagattgaggaatttcttgaagaagtcttatgccctcccaagtgaccaagtcagccatcggggtgctctaactgggggttattatgacacaaggaag

SEQ ID NO: 811303 - DNA, 100 bp, Homo sapiens
ccaccgcccccgccccaagccggcctaccccagatcatccaaaagtgcaattaaaaactagcatttctagtcagtatgtaattcggatgcagccgactaa

SEQ ID NO: 811304 - DNA, 100 bp, Homo sapiens
gtccttacgtcctgctaacccgcttggcattgagattgaaaagtgaaagaactcttttcttctttgggagtcgaatgtaatgtcttggaacttgatcaag

SEQ ID NO: 811305 - DNA, 99 bp, Homo sapiens
aacaccacaataatccacagccaagaattaccgaattgatgggatatgagccagaagaacttttaggccgctcaatttatgaatattatcatgctttgg

SEQ ID NO: 811306 - DNA, 99 bp, Homo sapiens
gaggggttacagactgtggtgcctacccccatcactgcttccctcagccataacaggctccgagctctgtccagtggtgggagtattacatcccctcct

SEQ ID NO: 811307 - DNA, 100 bp, Homo sapiens
cgccgcgctcttcttcttttctctctcgtcctcgctgctgtacttcgtctatgtggcgcccggcatagattctggaagttacggtcagtctgggggtgag

SEQ ID NO: 811308 - DNA, 100 bp, Homo sapiens
aaaccagaaagtgtggatttgtgtggagcacacattgaatgggccaaggaaaaatcgagcagaaagaatgtctttcagctgcaaaagaaggagctggtgc

SEQ ID NO: 811309 - DNA, 100 bp, Homo sapiens
acacgaggcgctatcttaatgagctcaaggtcactctggaatatagacccgtgatcgacaaaactttgaacgaggctgactgtgccaccgtcccgccagc

SEQ ID NO: 811310 - DNA, 98 bp, Homo sapiens
agacctgggaggagttcagccgcgctgccgagaagctttacctcgctgaccctatgaaggacggtggccgcagaggtgcggaagcaggtgtcccggga

SEQ ID NO: 811311 - DNA, 100 bp, Homo sapiens
agctgttcttccagtcctggatttagcccaaaggcagaatgggtggttgcccatctctgctatgaacaagatggagcagctatcagatgaagaaattgat

SEQ ID NO: 811312 - DNA, 98 bp, Homo sapiens
cggattcaggattcagatgaaccaggtggagggagctgttcatcctctgggggctgctgggcaagaaacatttcttacctgataatgtgaagcgtcag

SEQ ID NO: 811313 - DNA, 98 bp, Homo sapiens
ccgtccgagccccggccccaagtaacgccgccgccccggagccgccgtccgtgacgagaagttattaccgaggcgcggccggggctctcctcgtctat

SEQ ID NO: 811314 - DNA, 98 bp, Homo sapiens
ccatatcccattgctgcctggctggaaaagtgaacgaaccccacaagaattccatattggagcaatgctggacgaggacgaggatgagcgtgtggacg

SEQ ID NO: 811315 - DNA, 100 bp, Homo sapiens
ctacgatgtgatcgccaaccagcctgtcgtgatcgacaacgctgaagccgacgtagcttctctgaacagacgcatccagctggttgaggaagagttggat

SEQ ID NO: 811316 - DNA, 100 bp, Homo sapiens
aactccagtcaagttgtaaactgaaaaagaacgtgttgaaacaaggaattgccccatagccttcacaggtaccttgtggtctataatcctttagaacaag

SEQ ID NO: 811317 - DNA, 99 bp, Homo sapiens
ctgtctgacacctccacaacgtcgctggagctcgattcacgacagaaccaagttgtattgttagacacactggaacaagagatttcaaaatttaaagaa

SEQ ID NO: 811318 - DNA, 99 bp, Homo sapiens
cggctttgaccgagaggctgctggagctcgtgtttggacgcgttgtctgcattcaaaagagcattctattaaagctaccttaatttggcgcttattttt

SEQ ID NO: 811319 - DNA, 100 bp, Homo sapiens
tcaagcagtcctaccatgtcagccttcccagtagctgggaccacagccatttaagattaaaggacaaccagaaagtggaattctaaggacaggaactttt

SEQ ID NO: 811320 - DNA, 100 bp, Homo sapiens
aaatccatctcattaatgacaatcagccatcctggattggacatgtaaggagaggatgaggcccgtgaaaaaggcactgaaacagctcgacaaacctgac

SEQ ID NO: 811321 - DNA, 100 bp, Homo sapiens
gctgtatatcccaccaaagcagaataaatctgtactcgtgcctcatggatccaaattaaaggcttgcattgatgacaatgttgatatggtgaagtttctg

SEQ ID NO: 811322 - DNA, 100 bp, Homo sapiens
ctgaaaaacctgaggctgatgacccaaagatatatttttgccatcatggatcagtttggagatatattagaaggtgaagtggaccattctttctttgaca

SEQ ID NO: 811323 - DNA, 101 bp, Homo sapiens
gccccacgctgagccccgaagaagaagatgacatccggaatgtcatagagaatgtgatcaatgggcaggactacgaagtgatgatgcagattgactgtcag

SEQ ID NO: 811324 - DNA, 104 bp, Homo sapiens
aagaatttgtcaccctcaaagctatagctcttgctaattcaggatttgtaggtgaaaatgcccagccaatcctagaaaataatattggaaaccgaatgcttcag

SEQ ID NO: 811325 - DNA, 98 bp, Homo sapiens
ttccatctaattatgacctccttcgccacttacagtatgcaacacattttcctatacctctgagatggagtctcactgtattgcctaggctggtcttg

SEQ ID NO: 811326 - DNA, 98 bp, Homo sapiens
ttggatttagcagaaacaatggttgcatctgcagatggtttagtttatgaaccatcccagatacctctaatcataagtcttcatagatcaatagaaga

SEQ ID NO: 811327 - DNA, 98 bp, Homo sapiens
ttattccttccttggtttggctcctcctccagactcaaaggtaagcagctgctccctttgtccagcagtgtacatagcagtgtgggacaggtgacttg

SEQ ID NO: 811328 - DNA, 100 bp, Homo sapiens
cttcgtacccacagtgcttcatgagagattctgtgtcaactggttctgtatttggaagaagcacgactctaaatatgcagacatctcagctaaatacccc

SEQ ID NO: 811329 - DNA, 100 bp, Homo sapiens
gttacaccaaccaggacagaaatcattatcttagccaccagtgtgaagcctcagtttaggtcatctggtggttcagaacactcaacagagggctctgtat

SEQ ID NO: 811330 - DNA, 100 bp, Homo sapiens
tggaccttccacccctgggggattgcctcggatgatggcctgcgactgacagtctctcagctcttctcagctctcctgaggctgcagctgtcagctccct

SEQ ID NO: 811331 - DNA, 100 bp, Homo sapiens
tttgattactgccatgaagaaaatggtttccatttagctgcaagaaacagcactgtatttttcaaagcactagaaaattctgtggccagtccagaaagac

SEQ ID NO: 811332 - DNA, 99 bp, Homo sapiens
gcaggaactgcagtacaaagaaaagggggtggagaccctgcaagaggtaatactgaacaacctgtccaaactagcaagattggacttggaagaagagag

SEQ ID NO: 811333 - DNA, 98 bp, Homo sapiens
tctcttcaccaccttcaacgccttccagggggtcttcatcttcgtctttcactgcgccttacagaagaaggtccagtggctcctggacaactatgaga

SEQ ID NO: 811334 - DNA, 98 bp, Homo sapiens
ctgagaagcggcagcagtcccttgggggcttctttaaaggcctgggtttggaaatcccttgtctccaggttgctgggattgacttcttgctcaattga

SEQ ID NO: 811335 - DNA, 100 bp, Homo sapiens
ctgtatagctatcctctttttaagggctgggagaactcaggaagcctggcgtgcaatggaattgagttttgccctggtaaatgggaataatatccgaggc

SEQ ID NO: 811336 - DNA, 98 bp, Homo sapiens
gggcaggcgcggagccgggccggcaggcaatgaatcgctccctggctaatgtgattcttggaggctatggcaccacttcaacagctggtggaaaaccc

SEQ ID NO: 811337 - DNA, 98 bp, Homo sapiens
gaagctgcagccgcacctggccaagggtttttgccaatccagaagactgtgtagcatttggcaaaggagaaaatgccaagaagtatcttcgaacagat

SEQ ID NO: 811338 - DNA, 98 bp, Homo sapiens
aagcgggtgaaatctggcatattagcgctagccctgcagacagaggtgtgctgacgacctgctacaacagaagttgtgggcatttttgcaggatttgg

SEQ ID NO: 811339 - DNA, 98 bp, Homo sapiens
gaacattctcgaatacctagaatggggtggaatgaggtaccatctactgtctccagaggaccgagaagaacttgtagatggcacaagacctagaagaa

SEQ ID NO: 811340 - DNA, 100 bp, Homo sapiens
aaactgtgtggagttttatcctatattcataattacattgtggatggctgggtggtatttcaaccaaggactttgtatctttgctaaagtcagtgatgtg

SEQ ID NO: 811341 - DNA, 98 bp, Homo sapiens
gcgtccaggcctgacagctctgcggctcgggccctgagactatcttgctaatcatggccggttaaatgagtctgaagccaggcgaaaattctggcaaa

SEQ ID NO: 811342 - DNA, 100 bp, Homo sapiens
aggcaacagcactccctttgttgaaacaatttgggattgatggtgaatcatttgaactgaagataaatctgttcagataagctccttatgaatccttcag

SEQ ID NO: 811343 - DNA, 98 bp, Homo sapiens
ccattggattttgcttctttatccaagttatcattctgtcttttaattggggtgtgcattcaaggtactgagcagtacagtgaatacacaggctatgc

SEQ ID NO: 811344 - DNA, 100 bp, Homo sapiens
agagtatgaccaccactattaagttttcctttggaatatggataaatacaccatgatacggaaactagaaggacatcaccatgatgtggtagcttgtgac

SEQ ID NO: 811345 - DNA, 100 bp, Homo sapiens
aacgatcccgtcaacacgaaaatcccaggaatcagagcgtgacgacagcatgtacgatccctgaatgggcccgtgggcatatttagtcattcatttttga

SEQ ID NO: 811346 - DNA, 99 bp, Homo sapiens
tggaactgaacttagctcgacggggctgaccgctctggcccagggtgaggccctgccccttctggaaaacctaaccatttccgacattaatccctacgg

SEQ ID NO: 811347 - DNA, 98 bp, Homo sapiens
agaacctggtgaaagtcccatattctgatacgtaggtaacctttccagagatgtgacagaagtccttatacttcagttgttcagtcagattggaccct

SEQ ID NO: 811348 - DNA, 101 bp, Homo sapiens
cccagtcctcggtgcggcgcggccagcgggcctccccttcctcatcatcgagacaagcaccatcaagccttaccaccgagggttttactgcaatgatgaga

SEQ ID NO: 811349 - DNA, 100 bp, Homo sapiens
gactgataaattaactcaggcccagatctttgactacggtgaaatccccaactttccccgaagtacagattgtcactgctgttccaagggcacacgcaga

SEQ ID NO: 811350 - DNA, 118 bp, Homo sapiens
ggagaccccgaaaacggaagcgcagggagaaggaagaggtgtttgaaaaggtatgcaaccactcatgtattcggttcaggaagcattaaatgccagaccatggtggattcgtatgggg

SEQ ID NO: 811351 - DNA, 98 bp, Homo sapiens
gcacttgtgagaagcgccgggacgccgagtatggcgccagcccggagcaggttgcagccatcgtcagccagtggcagcaggagtccaaagagaaggtg

SEQ ID NO: 811352 - DNA, 98 bp, Homo sapiens
ttaccgattacctctcagtagccatgctcatgatcggcgtgtttggatgtactttacagggcccggcaggaagatgggctcccgtggacagggactct

SEQ ID NO: 811353 - DNA, 100 bp, Homo sapiens
tccagaagcgagtccccaatgcctacgacaagacagccttggctttggaggcccttgcttgtgattggtggttcctctgaaagaaaccaagaaacaatgg

SEQ ID NO: 811354 - DNA, 100 bp, Homo sapiens
tctcaaaaacaaaattctgaactcaggacttggcaacaacctgataacattgtttatgtgatggatgcctccattgggcaggcttgtgaagcccaggcta

SEQ ID NO: 811355 - DNA, 100 bp, Homo sapiens
caaagtttagctgctcgagatcgaggagttggtagctggcagtgttgtgatggcttttgaagaagtatgcccggacagaatagatctgattcataaaaat

SEQ ID NO: 811356 - DNA, 100 bp, Homo sapiens
cggctacggcgaatacagtgaagatgtgcacctgcacacgcccccggcacctgacctatgccagatttactggtgctccactgaaggtacacaagatcag

SEQ ID NO: 811357 - DNA, 100 bp, Homo sapiens
tgtggctgcttcaaccattgacagttttgctgctgctgggtcctggctataagtcaccatggcacagcaagctgccgataagtatctctatgtggataaa

SEQ ID NO: 811358 - DNA, 100 bp, Homo sapiens
tcaaggcaagaccgaattcagaaggatatcgacgtcgtgatccagaagtccagagctgaggactgcctgtttgcaggactacaaagctgatgaagaccca

SEQ ID NO: 811359 - DNA, 100 bp, Homo sapiens
tgctttccccccacctgaacagaaaactgcatttgacaagatgacaagagcacctcaaaggcagcagcctcaaggagcagccatggccccagacttgtcg

SEQ ID NO: 811360 - DNA, 100 bp, Homo sapiens
aagattgctcagtaatgcagccacctgttgcctatccagaagaaaatacactactcatcaaggaagaaccagggtagatacaacaagaattgaatactcc

SEQ ID NO: 811361 - DNA, 99 bp, Homo sapiens
aaccttcaaaacaactggaatatttagcaaggattcaaggctttcaggaaactactaaagttcctggggaagcaaagtagaatttcataagaacaaaat

SEQ ID NO: 811362 - DNA, 101 bp, Homo sapiens
gctaacccggcctctggacaagagtatctactgtgcgtttcagtcaacaatacagcttgtgttcgacaatattccttgatgacagcacagccatccagcat

SEQ ID NO: 811363 - DNA, 98 bp, Homo sapiens
gacctgcccgcctgcggctgctccggcattccatattggaagaagagatttctacacatgaaaaaaatgcctttgtttagtaaatcacacaaaaatcc

SEQ ID NO: 811364 - DNA, 118 bp, Homo sapiens
tatgaagctcaagatgtggggagtggcagagagtatgcattaaaggaactctgcgaccttcaagtcgtttgaggaccgagttgggaccataaaggtaattgtacctggactgtttgat

SEQ ID NO: 811365 - DNA, 99 bp, Homo sapiens
gtcgcttcgccgactactttgtcatctgcggactggacacggagaccgggctggagccggacgagctgtcggttttcaacttgaccaacaatgtggatt

SEQ ID NO: 811366 - DNA, 100 bp, Homo sapiens
ccaggatggagataaaggaactcaaagaatttggggtgcaaccttgacatttttgagttctgatcatctcagccttccagaaagcatcaaagaaaacaca

SEQ ID NO: 811367 - DNA, 100 bp, Homo sapiens
ttatcatgattcactttataccacggactgctatacagccaaagccagtctggctgatggcacaacagcattattgaaagcagccaacaaagggtataat

SEQ ID NO: 811368 - DNA, 100 bp, Homo sapiens
tatcttcaggagcgaagagctgcttctgtatcttaaggtgcggtacttagaggaagagagaccttttgcaattgagcaagttactggaatgctgttagcc

SEQ ID NO: 811369 - DNA, 100 bp, Homo sapiens
ccaaccagacaccatctccattgcttctaggacctctcagaacacagtggacagtgacaagggaataccttggcaagcagctccagtccgagcagcccca

SEQ ID NO: 811370 - DNA, 100 bp, Homo sapiens
agtcccagagtggactagaactcagggaaggagctgttatgagaagattgcaccttattgtcacaagacagccaaacagagaacactttttacagttggc

SEQ ID NO: 811371 - DNA, 100 bp, Homo sapiens
ccgcaccacctaacgctggccgacaacagcctggcgtccgccacgggtcctcactgagcagcgagtcgtcccccgtgtcctctccggccaccaaccacag

SEQ ID NO: 811372 - DNA, 100 bp, Homo sapiens
ctgggactaggccggaggcagcgggggaccggcagcattaataataagctacagcagccggaggcagcggccggagtgttagaatatgccatgaaacact

SEQ ID NO: 811373 - DNA, 100 bp, Homo sapiens
taagcatgtaatgagtcgtctttctagcacatcatcattagcaattggttttcacagaattccatggactttaactgctgaaccaatgatgcactgattt

SEQ ID NO: 811374 - DNA, 111 bp, Homo sapiens
gcggcagaggctacggggctcggtttggctgactggggagtcggcaggcggcagctgtcttgtcgacggtctcactgatgcctcttctgcattcaaagttcctcgacccgg

SEQ ID NO: 811375 - DNA, 100 bp, Homo sapiens
aagtgtggttcagggccagtgcatattagtggacagcacttagtagactctggctcctcctcctcctcagaagatgaacgacccaagagatcccatgtga

SEQ ID NO: 811376 - DNA, 98 bp, Homo sapiens
tggatgatgatgtcatcctgacagaaagtaaccagagagcacagagaaatgctggtgaaactggccaaacagaacaccaacaaggccaaagactcttt

SEQ ID NO: 811377 - DNA, 99 bp, Homo sapiens
tagagctggcgacccgactccatggtccagcacatggcacagagactgggcaatctgcacatcgtgctgccacacgaggcttcattcgttatggctggc

SEQ ID NO: 811378 - DNA, 100 bp, Homo sapiens
atgcaagattttaataccatgttcaccaactgttacatttacaacaaggtaaacgcaaagcactgaagttgaattttgcaaatccacctttcaaatctac

SEQ ID NO: 811379 - DNA, 99 bp, Homo sapiens
gatcagagatcggcggagaccctcgaagtgcgcaaacttgacactcaccctgaccgaaatcagggagtggtgaggacactgtccagctctgcccaagag

SEQ ID NO: 811380 - DNA, 100 bp, Homo sapiens
aagagtcctgcatggtttcaagggacgtaccaggaggatggtgcccagcaagtctggaaaagtttgaaattccagtaaaaattcgtttgagtcctgaacc

SEQ ID NO: 811381 - DNA, 100 bp, Homo sapiens
tgttctcaggactcattattttaacatttgggagaaacacagccagaagaatgatatggaacctagcaaagctgttccactgaatgcatctaagcaagat

SEQ ID NO: 811382 - DNA, 100 bp, Homo sapiens
caggaaggctcccctgttcctttttgctgacgtgtcatttctaagtactttctcctactccataaagacttcaaggtgccaaggactcacccgtacgtcg

SEQ ID NO: 811383 - DNA, 100 bp, Homo sapiens
catcttttgataggcgaggggaatatatttatacgggaaacgcaaaaggcaaggatgaattagtgtccaagtccaaaaaacgctactatgtgaattctct

SEQ ID NO: 811384 - DNA, 99 bp, Homo sapiens
aaactttctttctgtgtctcgccctcttgcagtctgcagcttctcctgtcatcggaaatgccaggccaaggtactccaaagattcaggtttactcacgt

SEQ ID NO: 811385 - DNA, 100 bp, Homo sapiens
aagcatcgttaaagtctctcttcaccctgccgtcatgtctaagtcagaggcatgccagatttcctggagaagctgcacatggccactctgaaagccaaga

SEQ ID NO: 811386 - DNA, 100 bp, Homo sapiens
aacatccgtgacacctggactctttcaggttctgaacaaaatgatgcttcaacacccaggccaggtctctgcctcggaagtgagtgcttctgccatcgtc

SEQ ID NO: 811387 - DNA, 100 bp, Homo sapiens
ccccagttcaaatcagtggttgaagaaattcagggtccaaattccaagcctgtagtgtccttcattgctggtttaactgctcctcctgggagaagaatgg

SEQ ID NO: 811388 - DNA, 98 bp, Homo sapiens
agccataaacgtcagtgtgcccaccacccttccctctgccacgcaggtgccgatggaagtccttaaggcatttggctttatgtcccgagttgccctac

SEQ ID NO: 811389 - DNA, 99 bp, Homo sapiens
aagcatcaactgctggaagcagatatatctgcccatgagaatccacctcattgcctggagatcacgccaccatcttcagaaaagctggtctcagtgatg

SEQ ID NO: 811390 - DNA, 99 bp, Homo sapiens
ttcaggcacatggtgctgatgagtttctgccagtccctgagttgatgccttttcggctaactcgccagtttatcaatctgatgttaccaatgaaagaaa

SEQ ID NO: 811391 - DNA, 98 bp, Homo sapiens
gagaaccaccagctcagcaagaaggtatgaagctaaaatgcagcggctaagaacgcggctctggagcttgacaggcctgacgtcgaatcccagccctc

SEQ ID NO: 811392 - DNA, 99 bp, Homo sapiens
agcaagtcttccagtatgaatcccacagaaaccaagcacattgagtcacgtactcttgcaattgcccgcaacctgactcagcagctccagaccacgtgc

SEQ ID NO: 811393 - DNA, 100 bp, Homo sapiens
tgcacgacgatgaggtgacagtcacgattacgtgtgaaaatgaacttgtgcaaacccaaccccatgctgataatccatctaatactgtcacttcagtacc

SEQ ID NO: 811394 - DNA, 98 bp, Homo sapiens
ctaggatcacgcggcatgtattgaggcgagcccacaccttaaccgtgctcttcatcctcacctgtacgcttggctatgtgacgctgctggaggaaaca

SEQ ID NO: 811395 - DNA, 100 bp, Homo sapiens
agcagatattcctccgagtagccaccccgcagaaggcgtgcgattcttccagcagatatgaagagacaaagcatggaggacacaagaatgggaggaaagg

SEQ ID NO: 811396 - DNA, 100 bp, Homo sapiens
tttgagacactggtagaggacagcgcagaagaggaatctactctcaccagaccttttggagagcgagacgatcaacaggtgtttatccagaaagttgttc

SEQ ID NO: 811397 - DNA, 99 bp, Homo sapiens
ttcatgaaggtggtgaagcccaagcaatacgtttggtttaatattggcagtgtggacacctttgaacggaatctggaaactttacagcaggaattgggc

SEQ ID NO: 811398 - DNA, 137 bp, Homo sapiens
agaaagtggtggtgattccttatgtgtcctccagagagaacatagacctttcaaagattccaaacaggtcacggtctagatcacattctcgatccagaggaaggcgatactctcgctcacgcagcaggagcagggga

SEQ ID NO: 811399 - DNA, 99 bp, Homo sapiens
atggcctcggagaagccgctggcggcagtcacttgtacagcgccggtcaacatcgcggtcatcaagtactgaattttatcaggatggaaatgggcgtga

SEQ ID NO: 811400 - DNA, 98 bp, Homo sapiens
ccgtacttctggccttcgaactgctgggaacctgaaaacactgactatgcgacaaggtgctggggcaaccaatggaaaagacaagacatctggtgaaa

SEQ ID NO: 811401 - DNA, 109 bp, Homo sapiens
atttgtatgtctgtgggagtggcgctttcagtcctgtctgtacttacttgaacagagggaggagatcagagtcttattgccagcagttttgaagatgactcccgtgtag

SEQ ID NO: 811402 - DNA, 98 bp, Homo sapiens
acagagcggggccagctgcagcgtgtagtgcgagtggggcggacgcgcgcagcccgcccgcccggcgaccagcaagacaagttggatggcttgaggac

SEQ ID NO: 811403 - DNA, 100 bp, Homo sapiens
aatacaaagaaattaccctaaaacatttagagcagtttgctacagaagaaacgaaatcctgaagttcgacatgtagatttggagatactgtgagtttgat

SEQ ID NO: 811404 - DNA, 100 bp, Homo sapiens
aggctatgtcagaaatgctaagacatcctaggatatcgggaaagcctatattggtgtcctatggcagcgtatacaaagctattcataaagagaccggcca

SEQ ID NO: 811405 - DNA, 99 bp, Homo sapiens
gcaacacaacaatcagatggcaccagggactggcagctccactgccgtcaactcctgttctcctcagagcctgcgtggatgcaactagagagacaaatc

SEQ ID NO: 811406 - DNA, 98 bp, Homo sapiens
atataatgaagaagttcgtgaccttttgggcaaggatcagacacaaaggttagagggtaaaaggacaaacttgcgtaaaactggctcagagcgtatcg

SEQ ID NO: 811407 - DNA, 98 bp, Homo sapiens
cataccggacccgcaagcatgcccaccactgccacaaacgccgcaccaggtcttgtagcagcgcctcctcggccctcgggaccaaggatcacgtcatg

SEQ ID NO: 811408 - DNA, 98 bp, Homo sapiens
tcctcagacagtgacaatggattttcctcaactggtagcacgccggctaaacccactgtggaaaaattgagccttatgtttgatcatcggccaaggtc

SEQ ID NO: 811409 - DNA, 98 bp, Homo sapiens
gccaccgcctcagcgggagaggagtctccaccaggactgaccgctgccgcccagcacgtccaggtgcaaatatatacagagcttcataatcagcccaa

SEQ ID NO: 811410 - DNA, 100 bp, Homo sapiens
acggcaagatgtccagtaatgtcccggcggatatggactaaaaacagcccttgtagaaagagatgatttctcatcagggaccagcagcagaagcactaaa

SEQ ID NO: 811411 - DNA, 100 bp, Homo sapiens
agggcgagaagcgccacccggaggctctagcctgacaaatgcttgctgacctgggccagagctcttcccttacgcaaggaagaacctacggcagatgagc

SEQ ID NO: 811412 - DNA, 98 bp, Homo sapiens
gtggtaacgacggcctcagcaggcggggaagatgaaagggaatagccaggccagaagaaggaaggcctgtggtgagtgggacaggaaatgacatcacc

SEQ ID NO: 811413 - DNA, 100 bp, Homo sapiens
ctcgatcaaatgcccgcctaaagcagctctcatttgcagatccagacctctctgatatgaagaataatgagccttatgactataagtttgtgaaatggat

SEQ ID NO: 811414 - DNA, 98 bp, Homo sapiens
gctgaaaaacttgatccaggccaggagaaaattcagatccagttaacacaatcatttgagaaagaagagaagccctcaaaagatgaagcagaaaaaga

SEQ ID NO: 811415 - DNA, 100 bp, Homo sapiens
attatacctggtctgaaaagaagatggaattgtcaaagcttgaatcctcagacgttgcaattgatatctaaaaagaagtcacttgctggagcagcacaaa

SEQ ID NO: 811416 - DNA, 100 bp, Homo sapiens
ccggctgcagcgcaggaggtctggaggcttagccagccccgcggagagaataacaagcctttgtattcatttgaagataatgcagactatgtttatgatg

SEQ ID NO: 811417 - DNA, 130 bp, Homo sapiens
tggctggaagttttttgggaatttgatggacgcgagcaaactgtccctttgtggggaggagagcttcgggaccgcttgataatggaactatacagcgaagagacaatctctggcaagtttttgtagaaaa

SEQ ID NO: 811418 - DNA, 98 bp, Homo sapiens
ggagtctccgcgtcccgctcgctgggagagaggtacctctccttttccctctccctttccctaagggtccaaattccaagcctgtagtgtccttcatt

SEQ ID NO: 811419 - DNA, 100 bp, Homo sapiens
taagaaaatcagataacttgtactggagagaaatcctacaagtgtgaaaaccactgttccattaaacaacagaaggtaatggttcagcacatgaagaaac

SEQ ID NO: 811420 - DNA, 100 bp, Homo sapiens
cgagtcccaggtcaagagcctctgcgagaagcaacatgaaccgtgaagaccggaatgtgctgcgtatgaaagaacgggaaaggcggaatcaggaaattca

SEQ ID NO: 811421 - DNA, 98 bp, Homo sapiens
tctggtgcatgctgatgacgaaaaacactgcagagagatcctgcttcccatgatgaccgatcagctcaagtaccatctggagagacaggaggacctgg

SEQ ID NO: 811422 - DNA, 100 bp, Homo sapiens
gcagggagaaggaagaggtgtttgaaaagatcttttagagaaatctcgggttgttaaacagccaagaggtgaaagaaacttccatgtgttctatcagctg

SEQ ID NO: 811423 - DNA, 98 bp, Homo sapiens
accagaagcttgggaaggagctggaaaatttggattatttagccttcaaacgtcagcaggtgaatgattccaattgtgaccaagaacttctttccctg

SEQ ID NO: 811424 - DNA, 98 bp, Homo sapiens
aaatactgcagtttctacctgaacgaattttctttcgatggcattaccagagtatagattcaaccctatgaaaagataaaggccaggggcttgcctga

SEQ ID NO: 811425 - DNA, 100 bp, Homo sapiens
ggacacctacagccccgacgaacatttctgggtgacactcaacaggattcccgggaaaaggacttggaggccaagttcattattcagatggagaaaagca

SEQ ID NO: 811426 - DNA, 98 bp, Homo sapiens
ccctagaaaaactgaagactccattgaaccctgcaaagcctgggagcagctggattccatttaaagagtttgaaagtctctcaagcatattgaaactt

SEQ ID NO: 811427 - DNA, 100 bp, Homo sapiens
tcttcctgaatttgaaccaccgtttccatcgtctcgtagtccgacgcctggggcgatggatccgtttacggaggttctgtggatggagttataaaggaag

SEQ ID NO: 811428 - DNA, 100 bp, Homo sapiens
ggaggacttcgattctttggaatgcatggagggcagtgattgacataaaactggaaaagcctcaggagcaaccagtcagtgaaggaggctgttcctgcta

SEQ ID NO: 811429 - DNA, 98 bp, Homo sapiens
ctgaaattcagagaggggaagtgatttgcctcagcttgtactctccctgggctctgtcagctagcagagcatttggtggaagaaagacagcccagctc

SEQ ID NO: 811430 - DNA, 100 bp, Homo sapiens
tcaacaagtgcccagaacacgtgctgaggcacacccagggccggcggtaccagcgagctctgtgtaaatagccagacctggaggactgcagcttccggtg

SEQ ID NO: 811431 - DNA, 98 bp, Homo sapiens
gccaaggaacagggaatccattctttggaagatgcgctggctccctccctccgaggctacttctcagggctggaagtcccgtcagttctgctgaatac

SEQ ID NO: 811432 - DNA, 100 bp, Homo sapiens
ccaagctttatggatttaccaaagttgtccagtgtacagaagcttactggaaggagtggccaactagttaaaggtttgacacctcaatatcaacaaaatg

SEQ ID NO: 811433 - DNA, 100 bp, Homo sapiens
ttccctgaggcctccccagaagcagatgctgtcgtgcttcctgtatagctgcagaactgaccctatctgcagatgttctgaatacctctgagaatagaga

SEQ ID NO: 811434 - DNA, 100 bp, Homo sapiens
aagtcatgtacaaccagtctacagccacgaccctctttcacagtctgccattgctcaggagactttgaatgtgattgatcctggcttgatggacctaaat

SEQ ID NO: 811435 - DNA, 100 bp, Homo sapiens
aagatgtggagacttccaagaaatgtctcctacaccgccaccatgccattcggtaacacccacaacaagttcaagctgaattacaagcctgaggaggagt

SEQ ID NO: 811436 - DNA, 100 bp, Homo sapiens
tttttctcaatacgaggcgcaaggtggactggctgactgagaagatgcatgccagagacttcacagtttctgctctgtggaggaagaagcgaatgcgcag

SEQ ID NO: 811437 - DNA, 99 bp, Homo sapiens
ttccgatccctggcttccgtgcccgctggcattgctaaacacgtggaaagaatcaatttggggtgtatgtatggatctatgacccagttcactttaaaa

SEQ ID NO: 811438 - DNA, 100 bp, Homo sapiens
gcttcttcgctaattttgacacagaaattcctttcctgctagaactttcagaatctcaggcgggtgaggccttcatggtgaaacacctcttggagtatac

SEQ ID NO: 811439 - DNA, 100 bp, Homo sapiens
gcctccctagtagctaggactacagtttccgttactatggcaatgacggcagggactacaacaacctttcctatgagcaaccatacccgggaaagagtga

SEQ ID NO: 811440 - DNA, 99 bp, Homo sapiens
taaagtggcatcctgggattttgttgaagccacacaaagaacaaattgcagttgtttgaggttgcttcatgtgcgaaatggaaactgcaaatatcattt

SEQ ID NO: 811441 - DNA, 98 bp, Homo sapiens
gcaactataatgcttggtcccatcgcatctgggttttacagcacttggccaagctagatgtcaaggagtctccccaggacagtgctatcacccgggat

SEQ ID NO: 811442 - DNA, 98 bp, Homo sapiens
ttacaagacctggtgaaggtggaacggggctcccaggacctccactaatcaccagaacaaaatgtgcagggccttaaagcggctgacaatgaccccac

SEQ ID NO: 811443 - DNA, 98 bp, Homo sapiens
atgtttgacacagtctggaattaatggaacttactctcgttcctaaagagaaagatgaaatggtagagcaagagtttaaccggttgctagaagctaca

SEQ ID NO: 811444 - DNA, 100 bp, Homo sapiens
gcagcctgcgcgggctgcgcaccaagtgcgctgtgtccaacgacctcacccagcaggagatacggaccctggagcaaaatgatgcttcaacacccaggcc

SEQ ID NO: 811445 - DNA, 100 bp, Homo sapiens
gctggtgtggcacacagtaaatccagcaaggatatggagagccatgttttcctgaaggccaagacccggggttgttacaagttgagttgaaaacaagaaa

SEQ ID NO: 811446 - DNA, 100 bp, Homo sapiens
tacaaggaacaatacatcactatggatgcttgtttgctactgatgggtgtgagcaagttagatattctataccggagacttctcctaacaaaacttttta

SEQ ID NO: 811447 - DNA, 98 bp, Homo sapiens
ggtaccaatggagccaactgtggtggggctgatgtggagaatctcaacagtcagaatgaagctgagctccgacgccagtttgaggagcgacagcagga

SEQ ID NO: 811448 - DNA, 50 bp, Homo sapiens
ctgaagtgagtgagaggcacatgaaggtatcattgcccagtgcctaagat

SEQ ID NO: 811449 - DNA, 107 bp, Homo sapiens
tttggattgcaaagtcatcagccggtgccaaaggccataggaaaaggatacagagtagagtttcatgaacctgaaacttggtggaaatttgatcctgaagaattaga

SEQ ID NO: 811450 - DNA, 100 bp, Homo sapiens
gtgaccgagaccgtgaccgagagcgtgaccgagagcgcgaatatcgtcatcgttagaaggggaaaaaagttgttccatgtagacatgactggcatcagac

SEQ ID NO: 811451 - DNA, 143 bp, Homo sapiens
tggcgttttactaccaaatgatctccttgaaaaagtggattcaattaatgaaaaatgggaactgcttgggggcatccgcttcgatcctgaaattccgcaaacactacgactagagtttgctaaggcaaacacgaagatggcca

SEQ ID NO: 811452 - DNA, 100 bp, Homo sapiens
gaggatgtgtttctgctggaaactgataacccgaggacaacactagtgtatggcatttttacaacatcaagcaattttccagattattcaaagtatcagg

SEQ ID NO: 811453 - DNA, 98 bp, Homo sapiens
gagtgttcagtatgctgtgtttctaataatgcagaagacaataagtgtgtgtcctgtatgtctgagaaaccaggctgaccatttcagcagacgtggca

SEQ ID NO: 811454 - DNA, 100 bp, Homo sapiens
ggaaactgtgtggagacccttaggctacaggctttaagaaaaatgcctcacattaaacatgtggatctaaggctgactggcatgaggaagctacactcct

SEQ ID NO: 811455 - DNA, 98 bp, Homo sapiens
tgaggtgcagaaccctgttggcaaagacagctgcacagcttcattgcaggtttcaggtacctccctctgcaggatatcatgtgtatggaatgtctttc

SEQ ID NO: 811456 - DNA, 98 bp, Homo sapiens
ttcagggttgaatacagagacagaaatgttgatgtggtacttgaagacacctgtactgttggaagttcacaaatgggtgctaccatagtagatgcttt

SEQ ID NO: 811457 - DNA, 100 bp, Homo sapiens
cgggagctctgaccgaggcgcctcgctggggcggggaccttgccttgcccgggccctttctaaggcacaaaatgatgtgatggaaatgaagatgcagtca

SEQ ID NO: 811458 - DNA, 100 bp, Homo sapiens
tctttgaatatgactctgcaaaggttaaagtattgcacaatcagctggtccttttccacaatgccattgccgcttactttgctgggaatcagaagcagct

SEQ ID NO: 811459 - DNA, 100 bp, Homo sapiens
cctgttgcagggttttgtttatataactcaagttgtttggctaaattcttcaggccatatatgtctcttggaagtcttcgggatcaagtcatttaccctg

SEQ ID NO: 811460 - DNA, 98 bp, Homo sapiens
cgcaaacttacggatttctaccctgtccgaaggagctccaggaagagcaaagccgagctgcagacggagccggtgggagaggagagcatctccgacgc

SEQ ID NO: 811461 - DNA, 100 bp, Homo sapiens
cctcccgaggagctgggactacagtctggactttgccatcaacaagctcaagactgggggctcacgtcctggctcctatgttctccgccgcagcccccag

SEQ ID NO: 811462 - DNA, 100 bp, Homo sapiens
cctcgccaccgctcccggccgccgcgctccggtacacacagtatcagatgtagaaggtggtgatggactgcagctcagaaaggaacatactctcaaaata

SEQ ID NO: 811463 - DNA, 101 bp, Homo sapiens
gacatgcggaacttagccaccatctttctggcggttgtgatggccttattgagcctgcactgcttagcagcctttaagccttctcttggagtcaagaagcc

SEQ ID NO: 811464 - DNA, 100 bp, Homo sapiens
tcctcctgctgttctcgggagccgtggccctgatccagacctgggcagtcctcatcaccgggggcatcgtggccacagctgggcgcttcacccagtggta

SEQ ID NO: 811465 - DNA, 100 bp, Homo sapiens
agaagggcaagcactaagtgaagcaagaaagcatttaaaagaagagacacaattacgattggttacttcttgctgcagattctgcgcaggatcggagctg

SEQ ID NO: 811466 - DNA, 98 bp, Homo sapiens
gcataagaaagtggatgaatacacagacactgacctgtacacaggaggaaaagaaccaggattgggaggtcacagaacctgaaatcagcatgattgcc

SEQ ID NO: 811467 - DNA, 100 bp, Homo sapiens
atcttcctgtttgtggataagacagtcccacagtccagagagacaagagagacacctccaacttcgacaaagagttcaccagacagcctgtggaactgac

SEQ ID NO: 811468 - DNA, 99 bp, Homo sapiens
tcaggttgaaaatggaagagtaattgcctgctttgattccctaaagcaaagagctcctgggaaggtgctgctggatgcagtttgcaaccacctcaacct

SEQ ID NO: 811469 - DNA, 101 bp, Homo sapiens
atcaatgtgacctggtctgactccacctcccagactatctaccggaggtacagcaagttctttgacctgcagcctacttctgcttcctcctggccgctctg

SEQ ID NO: 811470 - DNA, 98 bp, Homo sapiens
tgagccggtgtcttcagataaggtcacgcaaaaacagttccaactgaaagaaatcgtgcttgagggatcagagaaggctgaagaaggtggagaaactg

SEQ ID NO: 811471 - DNA, 99 bp, Homo sapiens
ctggatcaccgacagcacagacagaatccctgctaccaaacccggcagtgggcaggtgtttgtgacttcagagaaccaacttgtgtattaccccagcat

SEQ ID NO: 811472 - DNA, 100 bp, Homo sapiens
tggacatctgctgccggaaggggtcccgaagccccctgcaggaactctacaacccaatccagacctgaagattatcggctataagagaataagaattgca

SEQ ID NO: 811473 - DNA, 100 bp, Homo sapiens
aaggatgacaccggagtttgacgaagaggtggtttttgagtctggctcttgctgattgaattcctttggtgcagtttagcatgttcctctgtgttctgca

SEQ ID NO: 811474 - DNA, 99 bp, Homo sapiens
aaagagttttctatcgatgttggttatgagagatttttgggacctgaaatcttttttcatccagaggtttattaatgcccggagaagaatagtgcagcc

SEQ ID NO: 811475 - DNA, 99 bp, Homo sapiens
ttggaccttccggagcttctcagaagacagagggttttcttttgaggccaagaataaaatctttatgaactaacaagatgaattaaagatggaatgatt

SEQ ID NO: 811476 - DNA, 100 bp, Homo sapiens
tgccgcacagctactactggagcgcgccggctccctatctgggaaacaaagctgaagccgacgtagcttctctgaacagacgcatccagctggttgagga

SEQ ID NO: 811477 - DNA, 99 bp, Homo sapiens
tatttgctgccccaggaggagcagcccttgtgccacccaatagtagaaagaggtaggtggtagcccattcatctggttactgatactggccggcatcag

SEQ ID NO: 811478 - DNA, 100 bp, Homo sapiens
gttgctgatgccacctcatcaagaagcatgatggacaggatgtttgccctcgaggatcctgatggtgaacatgccaggagagcaatgcaaaaggtgatgg

SEQ ID NO: 811479 - DNA, 100 bp, Homo sapiens
caattttgctaactttgcacatttcaacagtcatgcaggagatgagtatgatgtatgtgccatttgtttggatgagtatgaagatggagacaaactcaga

SEQ ID NO: 811480 - DNA, 99 bp, Homo sapiens
ggaagtctttcattggcacaccatattggtcattagtaattatcagcactttagatgggagaattgctgccttggatcctgaaaatcatggtaaaaagc

SEQ ID NO: 811481 - DNA, 98 bp, Homo sapiens
catgctctttgtagcgtggtgcttctgttgctcacagaaatggagtctccctgtgttgttcaggctggtcttaaactcctaggctcaagtaatccccc

SEQ ID NO: 811482 - DNA, 100 bp, Homo sapiens
ccgccttcgagtccggactcgacctctcggacgcggagcccgacgcgggcgaggccacggtgctgactgggttacttttttaaacactaggaatggtaat

SEQ ID NO: 811483 - DNA, 100 bp, Homo sapiens
tgctgggaaatcccagtacagatcattgcaaaagttgagaagctcaaaccattagaggtagagctgcgacgcctagaagacctttcagaatctattgtta

SEQ ID NO: 811484 - DNA, 100 bp, Homo sapiens
gatgaacactatgattaccaccaggagattgcaaggttaaggtgagctcatcgattcagcacccagaaacacctctgcacatttctggtttccatctgcc

SEQ ID NO: 811485 - DNA, 100 bp, Homo sapiens
agaaaattggaaaggaaattgaagaaaaactaagactcacatctacaagcaatgaactgtgtgtggaccagttgacaaagatccaaactgaattacaaga

SEQ ID NO: 811486 - DNA, 101 bp, Homo sapiens
cagtgttttgggcatgcacgtgatactcacacagtggcttctgctcaccaacagatgaagacagatgcaccaacgagattgttctctggggccggactgag

SEQ ID NO: 811487 - DNA, 100 bp, Homo sapiens
tcaggatcttcctctccctcgggacccaaggccacaaaggagagctccgtggagagaaggtgtgtgatcctgtaaaattaaatcttccaagatgatctgg

SEQ ID NO: 811488 - DNA, 98 bp, Homo sapiens
atgcatcctgccgtcttcctatccttacccgacctcagatgctcccttctgctcctggagccacacaggacagttgacccaacacttctgccacctga

SEQ ID NO: 811489 - DNA, 149 bp, Homo sapiens
ggagtgacatactttgtggttgctgtgttggagctcctctttgctaaacctgtgcctgaacattgtgcctcgacaaagggtggaggatatgaaagtgaaagtgcttacccaaatgcagaacttgtgttcttggagatccacaacattca

SEQ ID NO: 811490 - DNA, 98 bp, Homo sapiens
ctataccattactgctgaaaattcaagtggttctaaatcagccaccattaagcttaaagtgttagctcttcagagaagtaagaataatgaagatttta

SEQ ID NO: 811491 - DNA, 100 bp, Homo sapiens
gaagcgattcaagccaagctgaccaagaagccaaagaactggctaggcaaataagctttaagaaacgatactggagtatttgtgtcagacattgtcaaag

SEQ ID NO: 811492 - DNA, 100 bp, Homo sapiens
ctcctggccaccgactcctacaaggtcaaggtgttgaaatgcatctcagaggtgcaggccaacaatgtggtcctgggccagtacgtggggaaccccgatg

SEQ ID NO: 811493 - DNA, 99 bp, Homo sapiens
ggattttgtcagcttgtcgtcaagagccatcatcaaccactttaaccccaaaattgagtcctacgctgctgtgaatcacatatcccaactgtcagagga

SEQ ID NO: 811494 - DNA, 111 bp, Homo sapiens
ggatttgttaaggattccaagtaactcttatttgactggattatggacagaacttggaaatattgagaataatttcttaaagccacttcatataggacttaatatgtcaaa

SEQ ID NO: 811495 - DNA, 100 bp, Homo sapiens
tccatccatccccaaggagaacttcagttgcttgactcgtttggatcacaaccgagctaaagctcaaggccaaggagatctgttgaagaatgccaagaat

SEQ ID NO: 811496 - DNA, 100 bp, Homo sapiens
aggtgcagagcactgcgctgtcagcgatagcccagtggatggccattccagctgctggagccagttctgcttctcggcaaggagcgatttgctggtgtag

SEQ ID NO: 811497 - DNA, 100 bp, Homo sapiens
ccatcctagaggtggtgttctttttaagaatttgagaaggaaaacgtagttcccagctacttttatataatgagttgataccaagttgaaattcactctt

SEQ ID NO: 811498 - DNA, 98 bp, Homo sapiens
aaacagatgccattcggtttttggttgggacgcagtctcttaaatatgataatcaggcttatttataaagctgaatcctgctaaaagtctgacataaa

SEQ ID NO: 811499 - DNA, 100 bp, Homo sapiens
ctttggcctgtgagaaagcttttgtggctggtttactgttaggaaaaggtcgaattgacataaaacagttgatagcaaagaagataaagttgacagcaga

SEQ ID NO: 811500 - DNA, 100 bp, Homo sapiens
gcagctttctagtctcattaaaacgagtcttcactacccagaatcatttaatcatccatttcatcaaaaaaggtgtgaaaatcacatcaacactgcaagt

SEQ ID NO: 811501 - DNA, 100 bp, Homo sapiens
tgcttgacaagaattaactcaaatatctcttcttaacacctacctgattctggcatacaatatgtttgacgacttctcagaaggcagagagtgtgtcaac

SEQ ID NO: 811502 - DNA, 100 bp, Homo sapiens
caaagagagcagagcagttaaaaaaaagcatcttaaagcaggctgcagatcttacacaggtctgctttgtgaatcttgatgtgaacaaggatgaatgcag

SEQ ID NO: 811503 - DNA, 100 bp, Homo sapiens
cctagccagactcagggatcaaagagcaaacagattcagtggcctgcattgacagcccacctgaggatattgaccataaggactcatatctcattacaag

SEQ ID NO: 811504 - DNA, 99 bp, Homo sapiens
taaaatgatcattgaaaacttcgaggcactcaagtcctggctcagcaagactctcgagcccatatttaatttacccacacccaaatgcttctgcagaaa

SEQ ID NO: 811505 - DNA, 98 bp, Homo sapiens
agaaaaagagctgtttgaacaagggctgatagcaaaattactcagtgggaagacccaagactgcagaacccagctattactggtccggtcagtatttt

SEQ ID NO: 811506 - DNA, 100 bp, Homo sapiens
acggagctatcggcgccgcggcaagagccaggtggtggccctaggggatgttccagatggcactctggtcactgtgatggctggcaatgatgaaaactac

SEQ ID NO: 811507 - DNA, 100 bp, Homo sapiens
aagatgttcggccgtggctcccgccaccgcaaggaggtggactacagcgactcactgacggagaagcagtggctcaagaggctgaggctgcagtggccac

SEQ ID NO: 811508 - DNA, 98 bp, Homo sapiens
gaaaagaaagtaccggtgcctcctgccaaaaagccagaagctccacctcctaaagattctgagacgcccatccctgcaacgtcgagctggctcccgct

SEQ ID NO: 811509 - DNA, 100 bp, Homo sapiens
gttagaccccaatgagaccaatgaaatcgccaatgccaactccctttcaaccacaccacgggcttttgaccacacaaaacagaaccaggactggacccag

SEQ ID NO: 811510 - DNA, 75 bp, Homo sapiens
tacccatagccccttcgcccctgcaacaggcacttctccccacgtgaaagtgatcctgggcgaggatcgggaagc

SEQ ID NO: 811511 - DNA, 99 bp, Homo sapiens
gccgctgtgtggttgcaacggagataaattcccggaaccgcgattcggcgtgtcagacctgaaagatgtctgaaaattccagtgacagtgattcatctt

SEQ ID NO: 811512 - DNA, 98 bp, Homo sapiens
aaagatctaaaggagctgtcagatggagaaataaaagtggccattagtactgtgagcatgaaccttgaggtcctcgaggccacacgggttaatcgaag

SEQ ID NO: 811513 - DNA, 100 bp, Homo sapiens
gatcgctgtagtgggcggccagagcgccggcaagagctcggtgctggagaacttcgtgggccgccatcgacgagtacaagccccaggatgctaccaccaa

SEQ ID NO: 811514 - DNA, 101 bp, Homo sapiens
aggacttcctggagggggtgactgtccagagcctggaactgtgcccacaccagaagccatcagcagcaaggatggtgccatgacaatggtgtgaactacaa

SEQ ID NO: 811515 - DNA, 100 bp, Homo sapiens
aaaatctttccgctcctctgaagagtgaagtgagcaaatacaacccagcagtaggttattgaagacagcagccccaggtctggctattttagttgccaca

SEQ ID NO: 811516 - DNA, 100 bp, Homo sapiens
ggtctctgcacctcctttctgatctcatagatcagaacatactggagcctgtaacccgtgcacagagggtgtggattacaccaacgcttccaacaatgaa

SEQ ID NO: 811517 - DNA, 100 bp, Homo sapiens
acttgagcgaagttttatgcaagcccgtgctttgaagaagaggagcacttcaaggtgctggtgaagatgaccgcccaggagctcgccaatggaattcctg

SEQ ID NO: 811518 - DNA, 101 bp, Homo sapiens
cagaccagtttttagaggaacaaaaggctgtggaaaatctctgttctcacaaagtctccccaatgctctacaagcaactgcgtcaggcctgtgaagaccac

SEQ ID NO: 811519 - DNA, 101 bp, Homo sapiens
aaacagaactgaaacaactggaaactgttttggatgatcttgaccccgaggaatctgtcttgaactatcgtttcgatcctctcggcattgttgatggtttt

SEQ ID NO: 811520 - DNA, 100 bp, Homo sapiens
tgatatcaatgcccaaatggtggaagatcagggatttctggattctctacgggatctcatagcagattcaaatccaatgagaaggccagctggttggggg

SEQ ID NO: 811521 - DNA, 99 bp, Homo sapiens
ggaggactgtgctgtgcctctctcgcccacattttccccaagcactctcaggaacctggcaacagaaaacagacacatgaccctcattgagaactgcag

SEQ ID NO: 811522 - DNA, 98 bp, Homo sapiens
gattttgagaaaacgggattttctgaagaagtactagatggtgccagcactgttcctcctgcttccacagctacattgctgagcaacgacttggaagc

SEQ ID NO: 811523 - DNA, 143 bp, Homo sapiens
gaggtggaagaagagccagaggtgatccctgggcctccatcagagagccctggcatgctgactaagctccagaatcacccaggacattttccagcagttgctgaaacgaggttttgtgctgcaagatactgtggagcaactgc

SEQ ID NO: 811524 - DNA, 100 bp, Homo sapiens
cgcaccttggagaaaaattttaacgtttgaggagacggtggctcagggagtaaaggaaggccagttgagcaaacagaagtgttcctctgcatttcaaaac

SEQ ID NO: 811525 - DNA, 98 bp, Homo sapiens
ggtcctcgggggcggcggccacgccaaggacggggaatctagagcaacagcaaagctgaggtcaaactaccgtaaggatggacaccaaggaagctgtg

SEQ ID NO: 811526 - DNA, 100 bp, Homo sapiens
gcggaaccatggccgatgggggcgagggcgaagacgagatccagttcctgcgaacttggccacgtggcgctatggcggtcactaccgggaattaaccacg

SEQ ID NO: 811527 - DNA, 98 bp, Homo sapiens
aactgcaccggaaatgtgcctaccagaacatcgtagctgtgggagctgggttctgcgacggcctccgctgtggagacaacaccaaagcggccgtcatc

SEQ ID NO: 811528 - DNA, 50 bp, Homo sapiens
caggcgtgcgcggacggtgtgcggctccagatcaagcatgcggtcactga

SEQ ID NO: 811529 - DNA, 99 bp, Homo sapiens
ttcaacgaccttcgcttcgtgggccgcagtgggcgagaattcaacagtcatgagcagagctgaaaattttaaacaagttgagtacctccttattcatgg

SEQ ID NO: 811530 - DNA, 98 bp, Homo sapiens
acaatcttgcgtgtcctgggctctaatgtcagagaatttctacagatctgacaaagttcccaaagatgtcacttgtgacctcattgtaggatgtgatg

SEQ ID NO: 811531 - DNA, 100 bp, Homo sapiens
gcaagatgtggaagacacaaagcctgcgaaagtgctcgggaagagggagagcaaacttggctcagcccagaatagccaggccagaagaaggaaggcctgt

SEQ ID NO: 811532 - DNA, 106 bp, Homo sapiens
gggtacttagaaggtgctttgaaacctgcatttgattaagcaagaattcgcttgcaagttaaggattatgcggatcaaacctcaccaaggccagcacataggagag

SEQ ID NO: 811533 - DNA, 100 bp, Homo sapiens
atccttctgctgctgaaccaatgccaacagataacgaaggaggcccaacttcattcaataaggagcctgacggatttatcccagacggtagaacaaaagg

SEQ ID NO: 811534 - DNA, 98 bp, Homo sapiens
acatacagtgacgcttcacaggggagtgaagagcaaggccagcctacccaactttcttgaccacatcattgcctcagtggtagaaaataagaaaacct

SEQ ID NO: 811535 - DNA, 99 bp, Homo sapiens
attgatcccaagttgtcgacgaccgacagggtggtgaaaggctcgggttatgtatgattttgctgctgaacctggaaataatgaactgacggttaatga

SEQ ID NO: 811536 - DNA, 74 bp, Homo sapiens
ctccactctccctacgagatcaccacagaccgttccttgcattgactccatggagagtatatcacctgatttcc

SEQ ID NO: 811537 - DNA, 142 bp, Homo sapiens
gggtagggaggccgactgagcaggagtcgtccgcttatagtggaggctgctaggagccggtcagaggtcacagcaaactgtacaatggcagttgagtgggttttgaaaaacgtctgaattgtagtgtctacatctaccttct

SEQ ID NO: 811538 - DNA, 100 bp, Homo sapiens
ctcgagcatctagaaaagaaaatggacctgttgtaggtgggtttggaggatttgggacaacatctacaactgcaggttctgcattcagcttttctgcccc

SEQ ID NO: 811539 - DNA, 117 bp, Homo sapiens
aaatggtcttttcagagacagttatcacatctgtgggagacgaagaaggcagaaggagccacgagaacgtatttaccgggcagtcaaagatctattcctacatgagcccgaacaaat

SEQ ID NO: 811540 - DNA, 100 bp, Homo sapiens
gcaaaagggaatttcctacaagcagtgtggcaagcctcccctggtgaagacacaaactgtcaccatctcagataatgccaatgctgtgaaaagtgaaatc

SEQ ID NO: 811541 - DNA, 99 bp, Homo sapiens
aaagcagcgtcaggagccatagtacctacagcagcactccaggaagccaccattcttcagagggcaatgaaggcacagaaatggaagtaccagcagaag

SEQ ID NO: 811542 - DNA, 98 bp, Homo sapiens
cgacacaggtcatctcaggaaagaatattcaacgaagcagctgaccaatctggtgaatgtttgcctgggatcccatatcaataagaaagcaagacaaa

SEQ ID NO: 811543 - DNA, 99 bp, Homo sapiens
gagtgagattaggcgagaacgagagaggcagacaaacccatcagccatgggtggctgtgccagtgtcattgtgtcattaactactcagtgtcctcagga

SEQ ID NO: 811544 - DNA, 98 bp, Homo sapiens
gtgtggggttggtgtgattagcttcgcagtctggaaagctttaggagttcacagtgctcttcgtcagattgggcagaggacgataagcactgcttccc

SEQ ID NO: 811545 - DNA, 100 bp, Homo sapiens
aggatgtactattctcggcgcggcgtgatcaccgaccagaactcggacggctactgtgccctgtgggacatcgagaccggccagcagacgaccacgttta

SEQ ID NO: 811546 - DNA, 100 bp, Homo sapiens
tggatgaaaatgaaaactgttcctctctgggatctccaagtgaaccaccacagcagtcccactactgggcgtctacccagaagaaaagaagtcattatat

SEQ ID NO: 811547 - DNA, 98 bp, Homo sapiens
aggcccaggtctccgtgcagcccaacttccagcaggacaagggcacccttgaggatcaaatcatcgaggccaaccctgccatggaggcctttggcaac

SEQ ID NO: 811548 - DNA, 100 bp, Homo sapiens
gccaacgcgcaggtgctagcggccccttcgccctgcaggtattctgagagaagcctcacaaagtgtattggaattactattgaaaccagaccagattact

SEQ ID NO: 811549 - DNA, 100 bp, Homo sapiens
gttacagatggctacttaaatagaggatcagcactgccagtggagatgggcgtcactactgctaccctcatttcacctgcgctgtggacactgagaacat

SEQ ID NO: 811550 - DNA, 98 bp, Homo sapiens
cctacacctgctgcatcaggaacacgattgacaagtatctctatgccatgcggctctccgatgaaactctcatagatatcatgactcgcttcaggaag

SEQ ID NO: 811551 - DNA, 98 bp, Homo sapiens
gactcccgcggcgggaggagcctgttcccctgaggttgccaacttggcctgttccatctcaaataatgaagaaggtgtaaagcttgttcgaatgtctg

SEQ ID NO: 811552 - DNA, 100 bp, Homo sapiens
gctctgcggcccaagctctgtcacctcagctctctgggccgcggctcccacgtgagaaatgagggtgaggtggctttgaccccgggttgcccggccagca

SEQ ID NO: 811553 - DNA, 101 bp, Homo sapiens
acagaggactaattttggcagttctaaatttgaatttgagagatggagtcttactatgttgaccagcctggtctccatctcctggcttcgggcgatcctcc

SEQ ID NO: 811554 - DNA, 98 bp, Homo sapiens
gacataccagggtctagagagtctagaagaagtctgtgtatatcattctggagtacctattttccatgaggggtactccaaagattcaggtttactca

SEQ ID NO: 811555 - DNA, 98 bp, Homo sapiens
gaaaccttccaaacagtcacttcagtcttaccaagaggctttgcagcagcagggtgagaaggactggcagaaatacgagactgctcggcggctgaaaa

SEQ ID NO: 811556 - DNA, 100 bp, Homo sapiens
aacaacattcagatcaccagggaaaagaaagctgcattggaaaaggagcgagaagaacggatagctgaagctgaaattgaaaacttaacaggagccagac

SEQ ID NO: 811557 - DNA, 100 bp, Homo sapiens
cagaaaacagtctgtggagagaatctgcctcctttaacttatgaccaggtaaatggttgcagttttgtgatgagaacaggaaagcctacaaatttattaa

SEQ ID NO: 811558 - DNA, 98 bp, Homo sapiens
gagaagaccttcaagcagcgccgcaccttcggtttttcgttggaatatacgttgcacatttatggcgattctgagtgtgagggcagacttctgccagg

SEQ ID NO: 811559 - DNA, 98 bp, Homo sapiens
cattgaaccagtgggattacaacctatccggtttgtgaaagcttctgcagttgaatgcggaggaccaaacattcctctgaatattgatttgctgaata

SEQ ID NO: 811560 - DNA, 99 bp, Homo sapiens
tcaagtcaaagcagcaggaagataccacaatcagaccctccgagttgctacagtgaacggaagaaaacacgaaacttagaagcttacgtggaatggttt

SEQ ID NO: 811561 - DNA, 100 bp, Homo sapiens
caagaatcctcatgctcctactatccatttcaactacagatactttgaagtagaagaagctgatgatcaatctcagcgaggtagcctcttcactctcttt

SEQ ID NO: 811562 - DNA, 100 bp, Homo sapiens
aaaaggggagctggctacttctcgctctgcttcatcccactattattttggcacaacaggaagtcttttgagggcaacaacaactatgatacacctgagc

SEQ ID NO: 811563 - DNA, 100 bp, Homo sapiens
gagcttttacagaaggatgtggtacagctccatgctcctcgatatcagtctatgagaaggctacaccaaaattgcattgagccaaacttgccaccaagag

SEQ ID NO: 811564 - DNA, 50 bp, Homo sapiens
actactataggggcaattacagtggcaatcactgggcagcttggtgtgaa

SEQ ID NO: 811565 - DNA, 99 bp, Homo sapiens
gaagatcacaccactcacgctcaagagtcaacaaaatgtactgagtgggcacagtcagcaaacatctctacccagtcagacacagagcactcttacagc

SEQ ID NO: 811566 - DNA, 99 bp, Homo sapiens
ctagcaatgagctcccaaagccatccaggtattgttgcagcatctggcagtgagactgaggatgaggacagcatggacattcccttggacctttcttca

SEQ ID NO: 811567 - DNA, 98 bp, Homo sapiens
cattgaagactcctacctgaaacatacggagattgacaatcaatgggccatcttggacggagatgagtatgatgtatgtgccatttgtttggatgagt

SEQ ID NO: 811568 - DNA, 100 bp, Homo sapiens
cgccaactccgctgcctttgccgccaccatgcccaaaacgctcccctttgaattggagatttactacattcagcatgttatgctctacgtggtacccatc

SEQ ID NO: 811569 - DNA, 100 bp, Homo sapiens
agctcaagtatatcaagcattcaaattgctcacagctgatcctaagtgtgtttcctgtaacaaatcgttcaagaaactctggtcccttcatgaacatatc

SEQ ID NO: 811570 - DNA, 100 bp, Homo sapiens
accaacatcagacatttggcgtgctcagaggtaccagcaacttcaaggtttctgccagcccactgttgtatacgcttattgagaaaacaatgcaaaatgt

SEQ ID NO: 811571 - DNA, 100 bp, Homo sapiens
agagtggctatgaatagacaacttcttgatcatatggattcatggacagctaaatttagaaatccaaggtggtgccccagcagatcacgcacacttctcc

SEQ ID NO: 811572 - DNA, 100 bp, Homo sapiens
ggaacgaaagagaagctctatctcccctccaggagcccagctatgaactccttctccacaatgttatgtgccaagaaccttgcaaagaaagacttcttca

SEQ ID NO: 811573 - DNA, 98 bp, Homo sapiens
gtgttcctcgacatgtttctccagtgacacctcccagagaagttgtgcatgctattatgatgctaatcagtctatgtatgtgtttggaggctgtaccc

SEQ ID NO: 811574 - DNA, 99 bp, Homo sapiens
aaggaggctgcggacgcggagctgggccagctccgagcccagggtggcagcagtgacagcagcctggctctacatgacagagcgggatgccaccagctt

SEQ ID NO: 811575 - DNA, 100 bp, Homo sapiens
aaaaatccctctaaatatggaggagcctcccgtggaggaaccggttcagattttgcttaaactgtggagcaatggtttcagtttagatgatggagaattg

SEQ ID NO: 811576 - DNA, 100 bp, Homo sapiens
caggcgtgcgggtactcagaagattctgcagaaggagagtacagtgcactctgtagctatctatctttacctacaaatttgttcctgctcttccaggaat

SEQ ID NO: 811577 - DNA, 100 bp, Homo sapiens
cagttggccacaacttcattgctgggaaaaggagcagcatttctttctattactactatctatgctgagactggttcaggttttgtagtaccaagtgctt

SEQ ID NO: 811578 - DNA, 100 bp, Homo sapiens
catagaggcaagtgggggaggagcgttccttgtcctccctctgcacaagagagtaatgccttctagctttttcctgctgttgcggtttttcttgagaatt

SEQ ID NO: 811579 - DNA, 98 bp, Homo sapiens
tgccatgctggactcccccatgctgggtgtgcgggacgacgtgacagctgtctttaaagagaacctcaattctgagctgatgagattttctgaccacg

SEQ ID NO: 811580 - DNA, 100 bp, Homo sapiens
ctagagttggcatcttgtttaccagaggggagcgtttcagagtcaagtggtgagatcaaagacttttcaccaaaaaatgtcatttatgatgactcatccc

SEQ ID NO: 811581 - DNA, 100 bp, Homo sapiens
gacagtacaaagaagactcttgtcacactaattgccaacaacaatgtttccacgggctcccttgctcagcagtatgcgcaccctaacgctaccctgcacc

SEQ ID NO: 811582 - DNA, 100 bp, Homo sapiens
aaaactcatcctctgtaacatcttgtcaggctagtctttggatgggaagaatgccatgcagattgtgggctttatggatcatgaagctgagtctgtcttg

SEQ ID NO: 811583 - DNA, 129 bp, Homo sapiens
gcggctccggcatggccgggatcattaagaagcagatcctgaaacacctgtcccgatgtcatctgggtgattctcagtgtggaggtgggtggacttttaggagtaacgcagcagctgtcatcttttgaa

SEQ ID NO: 811584 - DNA, 99 bp, Homo sapiens
ccgcgtggctggaagacatggccactccagtcggtgttgagcacggcgagcagtctcaggcctttagtgatgatggaagatgacgattcagagactgaa

SEQ ID NO: 811585 - DNA, 99 bp, Homo sapiens
tcaaattttccagtggttattatgacttccttgtcgaagttgaaggtgacaaccggtatattgcaaataccgtagagattgagaggatccagaatccag

SEQ ID NO: 811586 - DNA, 100 bp, Homo sapiens
gcaagcaaacgtgaaaaatggattaaggctgatgccccaaaaggcactggaggtggggaagacagggctccagctaccacaggacgggctctgggtatag

SEQ ID NO: 811587 - DNA, 98 bp, Homo sapiens
aaaaacagagtccgatgaaaggaatgggtctgggaccttaacagggagccatgttattagaggaagtaacacaaggggatatgagtgcagcagacaca

SEQ ID NO: 811588 - DNA, 100 bp, Homo sapiens
atatacccttagaaaaaatgtggcagtcacttgcacctcctgcgccgccgccccccatccaaggatatgccttcaagcctccacctagacccgactttgg

SEQ ID NO: 811589 - DNA, 99 bp, Homo sapiens
gctaaacagaatcaaaactgaagtaggagataattggaggctaaaggtccggaccctatttgtcagtggccttcctctggatatcaaacctcgggagct

SEQ ID NO: 811590 - DNA, 99 bp, Homo sapiens
aggatgtgaaccctgggggcaaggaggagaccccagggcagaggccagcgacttcgagtaagaaggtgatttacagccagcctagtgcccgaagtgaag

SEQ ID NO: 811591 - DNA, 100 bp, Homo sapiens
gaggaagctgggacacccgggagtcaggaaatggttatcaatactctggctgaccatcatcatcgtgggactgactttggtggaagtccttggttacatg

SEQ ID NO: 811592 - DNA, 100 bp, Homo sapiens
tgagatcaaatggcacttcattggccacctacagaaacaaaatgtcaacaaattgatggtggctgtttggtggccattctccgtccctaggactgccccc

SEQ ID NO: 811593 - DNA, 102 bp, Homo sapiens
ctatggatcatttaattgcatactctatgaccacgcacatgtaaagccccttctgcaaaagaaaccactcaagaaggttattattgaagaaactggtaattt

SEQ ID NO: 811594 - DNA, 100 bp, Homo sapiens
tgttgatgctgtaattgctgaacttaaaaagcagtctaaacctgtgaccacccctgaagaaattgcacaggttgttattgatgccttcagattgatcaat

SEQ ID NO: 811595 - DNA, 100 bp, Homo sapiens
caagatgtctgacatggaggatgatttcatgtgcgatgatgaggaggactacgacctggtctcctctgagcctccggcctccataagacccaaaacagat

SEQ ID NO: 811596 - DNA, 100 bp, Homo sapiens
gatgaacagcagatcagtgctgcagtggagaaagccatcaagaaatttggaggaagtcctggctgagcaaggttggaagccctagttctcgcattgaccg

SEQ ID NO: 811597 - DNA, 100 bp, Homo sapiens
cggtctacaaaggtctggacactgaaaccaccgtggaagtcgcctggtgtgaactgcaggcatggaagaggagatggttcgtgttacgcagtggccgttt

SEQ ID NO: 811598 - DNA, 98 bp, Homo sapiens
ccccccaggaggggcgagagggagccgcagctgatgtcaggtgcagctaaatcaagtccagcagctaaaccaggatccacaccttctcgaccctcatc

SEQ ID NO: 811599 - DNA, 100 bp, Homo sapiens
gcgggcgagggcagcgccctaagcagccacccgtgggaaactgttacaacagctgcaatgcagaaatacccaaaccctatgaacccaagtgtggttggag

SEQ ID NO: 811600 - DNA, 100 bp, Homo sapiens
atgaggaaatttagttcctgagggttgaggttgtgagaactgctttattggatgctgctggtgtggcctctctgttaactacagcagaagttgtagtcac

SEQ ID NO: 811601 - DNA, 100 bp, Homo sapiens
aggtatcgggctaatcgagaaaaagtccaagaacagcatccagtggaacatggagatatggaccaaaaggaacgagacgtgattatgagggagtttcgtt

SEQ ID NO: 811602 - DNA, 100 bp, Homo sapiens
gccaacaaaaattgttttttctacctgttgacgtgtcaagcactaactgtttatggttggctgtgggagatgtgatgactggtttcatggtgattgtgtt

SEQ ID NO: 811603 - DNA, 100 bp, Homo sapiens
atcactggagtctgatggaaagagataggcgcatctctggagttgatcgttactatgtgtcaaaggaaagaccacagcaagattctttcattcgtctcct

SEQ ID NO: 811604 - DNA, 100 bp, Homo sapiens
gaaaaggctgggacattaggagaacaaattttcagcattgaaggtcatattggaattgctgttcctgatgtatacagtgcttgtaaaaggtttgaagaac

SEQ ID NO: 811605 - DNA, 100 bp, Homo sapiens
cccgccttcctcctcccacctccctcctccctccacagtcctccagcttcggatccacagacggaatcaggagcagacggaatcccgactgtgcctggga

SEQ ID NO: 811606 - DNA, 99 bp, Homo sapiens
atctccatcacccaccaacaacaccacaataatccacagccaagccaaggaagtatcgcctggggatgctggaggagaggctagttccgatgggatcaa

SEQ ID NO: 811607 - DNA, 99 bp, Homo sapiens
tggcggccacggagcagagtccctcacccccaccagctgtagctgaacgtctggatggtggagaagagcaggccagtcccttcctgattccctgatgca

SEQ ID NO: 811608 - DNA, 100 bp, Homo sapiens
gatggtcggaatcagatttgaaaatgaaagtgttagtaaaactggagctgaaggtgctgtgctggatgaagctaaaaacatcaacaagtcactttctgct

SEQ ID NO: 811609 - DNA, 100 bp, Homo sapiens
tgaaacctggagtcataccttctatctttgattctccatatcacctacaggtgagacaggcattggcaaatccacgttaatggacactttgttcaacacc

SEQ ID NO: 811610 - DNA, 100 bp, Homo sapiens
ctctgtaaaagccccgcctctgccttcggatagaatccaactcaagtcggaacagctcttcaggttttctataatcttggaactttgaaggatactatta

SEQ ID NO: 811611 - DNA, 105 bp, Homo sapiens
taccaacatgtctgtacctactgatggtgctgtaaccacctcacagattccagcttcggaacaagagaccctgatgataccacgagtcaacccaaaagttgctgg

SEQ ID NO: 811612 - DNA, 100 bp, Homo sapiens
gtgtgactttgacaacgactgtggagacatgagcgatgagagaaactgccgtgacagcgggaaggtgaccacagtcgtagccactctaggccaaggccca

SEQ ID NO: 811613 - DNA, 100 bp, Homo sapiens
gaaccgggtgcggagccaatacccgcggcagcagcaccaggtgcatggctgcctcctaatcccatagtccagaggaggcatccctaggactgcgggcaag

SEQ ID NO: 811614 - DNA, 98 bp, Homo sapiens
gaaatggagatgatgaagatgatcgggaagcataagaatatcatcaacctgctgggggcctgcacgcaggatgaacaccttccaccatgaccacctca

SEQ ID NO: 811615 - DNA, 100 bp, Homo sapiens
ttccgcttggatattcgcatgggcctactttacatcacactctgcatagtgaatggtagtgtctagaaagggtatgtcccttcaagagagaggtgccaat

SEQ ID NO: 811616 - DNA, 100 bp, Homo sapiens
gttgggcctggatgtgtcggtgaccatctcgcaggatgccggcaggttcttgatagtccacaatgggtgaaccacagcaagtgagtgcacttccaccacc

SEQ ID NO: 811617 - DNA, 99 bp, Homo sapiens
agccggagagggtgctggctgccgcgcggccgagtccagatgtcagagcattccttcaaatggacagtccaaaacaccagtcagatccatctgaagatg

SEQ ID NO: 811618 - DNA, 100 bp, Homo sapiens
cacagcttggaggagggtcactatgtcattgggccaaagatagagattccggtacattatgcaggtgggaagaagagcgctatcctgaaggcatcaagtg

SEQ ID NO: 811619 - DNA, 98 bp, Homo sapiens
gaatttagaggagaaactgacgtttaccgtggtttctgggcagtcctgatgctcctgggggtagttgctgtagtcatcgcaagctttttgatcatctg

SEQ ID NO: 811620 - DNA, 100 bp, Homo sapiens
tgtttggatggagctttgtctttgaggactttgtctctgatgagctgagaaacaaagccacccagccaatgaaggtggcaattttggaggtagccccggt

SEQ ID NO: 811621 - DNA, 99 bp, Homo sapiens
ttacataatgcattggaacatgacatgagattaagattcagaatggacagtttagaagaacctcagaaaaaagtctttaaggctcgaaaaacgatgaga

SEQ ID NO: 811622 - DNA, 100 bp, Homo sapiens
catctctgatgcaatgaaaaaagttggaagaaagggtgtcatcacagtaaaggttcaaaccttgtactactcagctgatcacaagctgcttgatgggaac

SEQ ID NO: 811623 - DNA, 99 bp, Homo sapiens
atcattccagttctgtctgatatccttcaggagtctgtcaaagagaaagtaacaagaatcattcttgcagcatttcgtattgagaggatccagaatcca

SEQ ID NO: 811624 - DNA, 101 bp, Homo sapiens
gaaagacagagattttactgctgaagattatgaaaagcactttgatatgcctcatgatattgttgcatctgaagatgggactgtgtacattggagatgctc

SEQ ID NO: 811625 - DNA, 100 bp, Homo sapiens
gaaaaaaatgcattatgtggaccctgaccatgtaaagctctttcagtctcacatggcaacgaaaacaacttgtatgtcttcacaaggatcagatgatgaa

SEQ ID NO: 811626 - DNA, 100 bp, Homo sapiens
tcagaagacagagggttttcttttgaggccatttcataattctgaatcatgtctgataacggagaactggaagataagcctccagcacctcctgtgcgaa

SEQ ID NO: 811627 - DNA, 98 bp, Homo sapiens
atgagagggccggagccgggtccccaaccgacgatggagggagacgtgctggacacactggaggcgctggggatgatgaagataaactgacctggaag

SEQ ID NO: 811628 - DNA, 98 bp, Homo sapiens
tcatgagagaagaaatacaggatgcctctcagctgccacctgcctttgacctttttgaagcctttgcaaaatttctagatgtcgtgcagctggttcat

SEQ ID NO: 811629 - DNA, 99 bp, Homo sapiens
gctgagagcgaagctggaaaaggttgtctaccttcataacaacaatatctctgtagttggatcaagtgacttctgcccacctggacacaacaccaaaaa

SEQ ID NO: 811630 - DNA, 98 bp, Homo sapiens
tgagggagggtccgagccagccgctgttttgccggaggagcccctcaggcccggggccttttccgaagtggttttagctgaagagaaggcaactggca

SEQ ID NO: 811631 - DNA, 98 bp, Homo sapiens
ggctagcagagcggaggcgctgccacgaaactcgtacctgcggctaagagcagggtgacagtggagggcctctggtcacttcgaagaacaatatctgg

SEQ ID NO: 811632 - DNA, 100 bp, Homo sapiens
ccctcttcgtggactgcatccccctcttccacggcaccctggccctcgcccccatgctggaggtggctctcaccctgaattacagaggatcatgtgattc

SEQ ID NO: 811633 - DNA, 100 bp, Homo sapiens
ttcagctgatgcatttgcacctgtggcttatctacgctttttagaattgcacttggaggacaaggttcactaccttatggttctgtctgccaactgggcc

SEQ ID NO: 811634 - DNA, 100 bp, Homo sapiens
ccaagttccacaatatattgactactgccacaattccggagcagcatttctttctattactactatctatgctgagactggttcaggttttgtagtacca

SEQ ID NO: 811635 - DNA, 99 bp, Homo sapiens
ttcgtggggcgtgaggagtgtgagctcatgctacagaaattccgggtagatatgcctggctcaggcagtgcattcatccccaccatcaacgccatcacg

SEQ ID NO: 811636 - DNA, 100 bp, Homo sapiens
cattctcatgccttggtctccttgtccttcctaaaaaaccttcgcctcatcctaggagaggagcagctagaaggggccttattggaaggagaaagtaatc

SEQ ID NO: 811637 - DNA, 98 bp, Homo sapiens
ttgcagagcctgcggggcaagatctgttatgaagacagtatggagtttccagaccatagtagacatttgctacagtgtctgagcgagcagagacacca

SEQ ID NO: 811638 - DNA, 100 bp, Homo sapiens
tgggagcagcttaagcagtttcatgccactcactatcacccaagcaatgctagataacgaaggaggcccaacttcattcaataaggagcctgacggattt

SEQ ID NO: 811639 - DNA, 100 bp, Homo sapiens
cttggttgaatataatccatccatggtacgagagtttgtcatgcaggaggcacaacagaatgatgatgactgcttactagacttcaggaactgattctca

SEQ ID NO: 811640 - DNA, 98 bp, Homo sapiens
aaaatcattggaccatttagtaagaagaattccagtcttataaagaaagaaggattgtccaaatgtggaagatgcaagcaggcattttactgcaatgt

SEQ ID NO: 811641 - DNA, 100 bp, Homo sapiens
gccccagctgcttcgggctgccgaggaccttctgggcccccacattaatgagatgttcagcccacaagagcttactggtgaaggaatgggacaagaccca

SEQ ID NO: 811642 - DNA, 100 bp, Homo sapiens
agtgacacacaaacaacttacagacttccacaagcaagtcactagccttaaagaaggagaggatcagaaagagataaagattgagccagctcaggctgtg

SEQ ID NO: 811643 - DNA, 98 bp, Homo sapiens
gggaacttcaaacagttcaacatcttctgtcatatgctggagtcagccctcactcaggaagaagaaaggcgtatggcatctgttttagccaaaaaaga

SEQ ID NO: 811644 - DNA, 124 bp, Homo sapiens
gcagcagctggggaggagccaaagcctcggcgctcacctaagccgcagggagatacacccaactgggaggataaatgtgcatcctcactaggaaaaaaaagtttgtgtgaaaagctggatccaa

SEQ ID NO: 811645 - DNA, 100 bp, Homo sapiens
cggcatggcgctccggggcttctgcagcgccgatggctccgacccgctctgggacggaaccactgcactccaggttccttgctgggtgctgagcgtggcc

SEQ ID NO: 811646 - DNA, 98 bp, Homo sapiens
ttctctcaaacgtgtcttaaaggatgggatcagtcagataagtttgtgaaaatctacattaccttaactggagttcatcaagttcccactgagaatgt

SEQ ID NO: 811647 - DNA, 98 bp, Homo sapiens
gttcagaagagccaaggaataaacatgcaatgaacccaaaagggcacttaaggaaagcttcataaaagccattggtgttggactaggatttgaattgc

SEQ ID NO: 811648 - DNA, 100 bp, Homo sapiens
agtcagtttattactggaaatgatcttgagcctgaatggctggacagtgtgcagaaaaatggagagctgttttatttggaattgagtgaggatgaagaag

SEQ ID NO: 811649 - DNA, 98 bp, Homo sapiens
ggggttcctcgaagcagttttcaggacttaaggctctgggagtatccagctcacatagaagacattgactacgaggaaggaaaagtactcatccattt

SEQ ID NO: 811650 - DNA, 98 bp, Homo sapiens
ataattaaagagtaaagttgtgctcaacggtacaggtttgcagattccgccagcagcacagcaagctctacagatgagtggctctttggcatttggtg

SEQ ID NO: 811651 - DNA, 100 bp, Homo sapiens
ttaggatatatgtgtttccatgatgaaatcaaaggcagcataactttaaatcttccccaagatgtatggttggaaaggtactttgttgggtgttgctatg

SEQ ID NO: 811652 - DNA, 98 bp, Homo sapiens
gttaaatgccctcaagtcgacaggggatgggaccctagtcaagagaatccatcccattaaatgacctgaagtcagaagtatcaccacggatttcagca

SEQ ID NO: 811653 - DNA, 100 bp, Homo sapiens
ggtctccctcactccagaagaatttgaccaactccagaaatattcagaatgaatagccaggccagaagaaggaaggcctgtggtgagtgggacaggaaat

SEQ ID NO: 811654 - DNA, 99 bp, Homo sapiens
agtgctgcacgaggagcgattcctcaagaacactgcttttctaacccaaactgtatgtcttgatgacactacagtaaagtttgaaatatgggatacagc

SEQ ID NO: 811655 - DNA, 100 bp, Homo sapiens
ttgactgttactacagaaaaaggaagtaagcaatggcatagaaaaaaaaggaaagaaaaaatctgtaggtcgtccacctggcccatatacaagaaaaatg

SEQ ID NO: 811656 - DNA, 100 bp, Homo sapiens
tttagactctgaagggacttttaattcctataggtcctctggtgatgttcttgagacgttcaatttcttagaaaatgccgatgacagtgatgaagatgag

SEQ ID NO: 811657 - DNA, 100 bp, Homo sapiens
tctcctttggtatccgcaaactctacatgaaaagtctgttaaaaatctttgcgcggaatagaagatgaactcaactgaattcaccgaagatgtagaagaa

SEQ ID NO: 811658 - DNA, 100 bp, Homo sapiens
cctcatgttacacggcgcaccccagactacttcctataaatttctcctgggaaacctgcctttgtagttggcaaaaaaggagaaagccactaaggtacaa

SEQ ID NO: 811659 - DNA, 98 bp, Homo sapiens
acaggtgctccagctgaaggtgcgagaagaagtcagaaatctacagttactcacacaaggtgagccagccatgagagggtatcttgtggccatattcc

SEQ ID NO: 811660 - DNA, 100 bp, Homo sapiens
taaatggcgcagcatgactttgctccagcctggcttaatttccctactccaccatcatcaacaaagtcattttttgagaccagtactgttataatcccta

SEQ ID NO: 811661 - DNA, 100 bp, Homo sapiens
tttggtgcagagcggctaaagattccagaaggattatttgacccttccaatgtaaagggtgatgaccagttaaatgtatttggagaggacactatgggag

SEQ ID NO: 811662 - DNA, 50 bp, Homo sapiens
cccgctggtcaccactccggcaccaggagaactacgatgacccgcacaaa

SEQ ID NO: 811663 - DNA, 99 bp, Homo sapiens
ctgccctgacagcggagcattttgcagcactccagagcctgctcaagtttgcctgagaatacagatcaacccacagaacaaagcggatttccaaggcat

SEQ ID NO: 811664 - DNA, 100 bp, Homo sapiens
tgcacagcggaatctatatagggatgtgatgttagagaactacagaaacctgatcttccttgctaaaacagcggaagaggtgatttattatatggttgtt

SEQ ID NO: 811665 - DNA, 100 bp, Homo sapiens
taccgtgaggatggtgtgaccccatatatgattttctttaaggatggtttagaaatggaaaaatgtggaatgaaagctactggttgattttaaagtgcct

SEQ ID NO: 811666 - DNA, 100 bp, Homo sapiens
aaacgccctcaccaaagaccctggcttcgggacccgctgtatggaaggaaacccaatccctgtatcgcattaagttcaaggagagctttgctgagatgaa

SEQ ID NO: 811667 - DNA, 100 bp, Homo sapiens
atgtcgggttattcgagtgaccgagaccgcggccgggaccgagggtgagactgtggagatgagaaggtggtggacactcgtgatggaatggaaatcgtcc

SEQ ID NO: 811668 - DNA, 100 bp, Homo sapiens
gggagtcatcatgagcgatgttaccattgtgaaagaaggttgggttcagaagaggggtgatgggcagaatctgtttacgaaagacgtgacagtgatcgag

SEQ ID NO: 811669 - DNA, 100 bp, Homo sapiens
ttatggcacacacagtgggacctagacaaagggagagggtgaccgacatcccaactaggtttggcaaacatcgaaaagatgacaagattgagaaaacggg

SEQ ID NO: 811670 - DNA, 100 bp, Homo sapiens
aatttcctgagccttccaaacaatttccaggccctccacctgtcaacaatgtggcatcctcacatgcaccataccaaccctctgcacaatcttcttatcc

SEQ ID NO: 811671 - DNA, 99 bp, Homo sapiens
actgaagcgcccgtccattccaaggtaagaagagttcctgggtcaagtggtcaccttcataaaaccgaagacggggactgggagtggagtgacgacgag

SEQ ID NO: 811672 - DNA, 99 bp, Homo sapiens
agcagcctggctcctggtggctccagcagcagtacgaggatgtcgtccaggaaagattgtgcagatgactgaagcagaagttcgaggcttatgtatcaa

SEQ ID NO: 811673 - DNA, 99 bp, Homo sapiens
gaataataaaagttaaaacaattgctgcacgaaacactgaaattttggcagatgtacattgaagatgtcagtttctacatgtgggaagtagacattgaa

SEQ ID NO: 811674 - DNA, 98 bp, Homo sapiens
gcgaagccttgaaaaagctgccctgagacggtgtcccgccgaaaggtgaatccgccatactacatcccgctggttgagctggtcccccacccggagac

SEQ ID NO: 811675 - DNA, 100 bp, Homo sapiens
ccgagagctacacgttcacggtgccccggcgccacctggagagaggccgcgtcctgggcagaggttacctaaccaaactcctgcaaaaccacaccaccta

SEQ ID NO: 811676 - DNA, 98 bp, Homo sapiens
agaaggcttggaacccattggaaatgtccatccagttgggagctatgagtcctctgaaatgaacagcatagaataagacgagttggaagaagacctga

SEQ ID NO: 811677 - DNA, 100 bp, Homo sapiens
cattgcttttgaagttattaaagtctgttggtgcacaaaaagacacttatactatgaaagagtctgaagatgatgagaaactgaaaaagaggaaggagcg

SEQ ID NO: 811678 - DNA, 100 bp, Homo sapiens
tcagtcctcggcctctccagccaacgatgaccagtccaggcccagcctctcgaatgggcacacctgtgtagagccagtcttggtgctctgtgttcacctg

SEQ ID NO: 811679 - DNA, 98 bp, Homo sapiens
tcggaaaccaggagatcatgaggcttgagaaagagatccaagatcttgaaaaagctgaactgcaaatctcaacgaaggaagaggccattttaaagaaa

SEQ ID NO: 811680 - DNA, 100 bp, Homo sapiens
cctgcatccaatggatgctgcccagagatcgcagcatatcaaacttttccagagccttgtgccaaaggagaaatatgacaaaaatgatgttattttagag

SEQ ID NO: 811681 - DNA, 98 bp, Homo sapiens
aaaactcgggcagaacggtctggataatgggagggccacacagaagagccggaagcagaggagcaagcccacgaacagcagcccccgcagcaggaaga

SEQ ID NO: 811682 - DNA, 99 bp, Homo sapiens
attaactgcctttcttctgtgggctgtgattttcagaggggaatgctaagaggccttggacaagattcgctatgagagcctgacagacccttcgaagtt

SEQ ID NO: 811683 - DNA, 99 bp, Homo sapiens
gaaaagcatcccggaggaggaagaagaagtgttatatgtcctaaagtaaggtttcaggttcttgggtgtctctggggagtccctgggccagaccttcct

SEQ ID NO: 811684 - DNA, 99 bp, Homo sapiens
ctgagctaaacatctaactagaagggatacccttccatttcaaagaacagaatgctaaggaagctgtggcaattactgcaacaaggaggtatacaataa

SEQ ID NO: 811685 - DNA, 100 bp, Homo sapiens
atgtaccttcttatgacccatccagtccacaaaccagccagtttgatagagagaatgtacggattccaggaatgctaattattgatactcctgggcatga

SEQ ID NO: 811686 - DNA, 100 bp, Homo sapiens
gtccccgggtggccctggcgcccggggagacggtgatcggccgcgggccgctgctgggattgatgcggatgaaattaaaaggctaggaaagagatttaag

SEQ ID NO: 811687 - DNA, 100 bp, Homo sapiens
attttatgaataagcatcagaagccagtgctaacaggccagcggttcaaaactcggaaaaggggccggatcacctcaacagtcacgtcagacaagtgcac

SEQ ID NO: 811688 - DNA, 100 bp, Homo sapiens
ccgcatcaacaagatgttgtcctgtgctggggctgacagcgtactgtaagaactctgtggacggcctctggtactgcttcgatgacagcgatgtgcagca

SEQ ID NO: 811689 - DNA, 98 bp, Homo sapiens
cgcagtcggcgccgctgcccatggagggagtggacatcagccccaaacaggacgaaggcgtgctgaagttgcagagtgggcaggatcttaagacccga

SEQ ID NO: 811690 - DNA, 100 bp, Homo sapiens
caaccattgacgccatgtcgggttattcgagtgaccgagaccgcggccgggaccgagggtcctgcagacattcgctttgtctgggagaagaatgggcgag

SEQ ID NO: 811691 - DNA, 99 bp, Homo sapiens
ggcagtggtggtggcggcggcgcaagggtgagggcggccccagaaccccaggttattaatgctgcactggctttagcagcaaaaccacagagtaaactg

SEQ ID NO: 811692 - DNA, 100 bp, Homo sapiens
ttgaagttttgacctataaaaaggcagatactgatctgactgtagactccactccactttcagttcacacaccaaccttaaggaaaaaaggatgtcctgg

SEQ ID NO: 811693 - DNA, 100 bp, Homo sapiens
caaggaaggatgagaatagctactgaaattgtgccttataacctgcctttgcctgggggagtggtgcctcgcatgctgataacaattctgggcacggtga

SEQ ID NO: 811694 - DNA, 100 bp, Homo sapiens
gtgatgtaaaggtgaaaaatggtaccacttatgagggtatcttcaagacgctaagctcaaaggttacaagaggacccacctgtgggtgtcagtggcgcac

SEQ ID NO: 811695 - DNA, 98 bp, Homo sapiens
gatctggagcatcggctgcaggggtcagtgatggagctgcttcaggttggatggcaagcatgtggtgtttggcaaagtgaaagaaggcatgaatattg

SEQ ID NO: 811696 - DNA, 100 bp, Homo sapiens
ttctggaaactgtacattgaagcagagggtcagtttgaaaaggaggatcgagctcactgtggagtatccatggagatgtggagccttgtcaccaacctct

SEQ ID NO: 811697 - DNA, 100 bp, Homo sapiens
ggaacttgaaaagcgtgaaaaaagaagcttattaaacaagaatttagaggagaaactgacgctcttcagagaagtaagaataatgaagattttaaatcat

SEQ ID NO: 811698 - DNA, 98 bp, Homo sapiens
ccagagtaacaagggttattcacttgcttcacttttggctaaagttgcagcaggcaagggtggagagattcaaccagttagcgtgaaagttggagata

SEQ ID NO: 811699 - DNA, 99 bp, Homo sapiens
tgagggaccgcggggttagccactgctggctgcttccagtgttcgccgagaggttcgagaacttgtcttggacaattgcaaatcaaatgatggaaaaat

SEQ ID NO: 811700 - DNA, 98 bp, Homo sapiens
aggctttatatcctaaacttttcaagcctgaaggaaaggcagaactgcctgattacaggagctttaacaggaggaagaaggcacctacgatcaaactc

SEQ ID NO: 811701 - DNA, 99 bp, Homo sapiens
agaacccgagtgctgcttggcggcgaggtgtgggccatgtttgaggattgccccagcattcagttctatgagtaataaatatccacaggctgttttctt

SEQ ID NO: 811702 - DNA, 100 bp, Homo sapiens
ctcggccgccttccctctcgcccacctctacccggcagcgggggcagtcagagcggagccaagatgcgaatgggctccttcgagaactcatagaacggaa

SEQ ID NO: 811703 - DNA, 100 bp, Homo sapiens
tactatctggaacagttaattctgaaatatggaatgcatcagaatacacttcgtatcaaagagattcatgaacatgtatacagagaagtgctcaaatcat

SEQ ID NO: 811704 - DNA, 98 bp, Homo sapiens
actggacagtgtgagtgcagagccaacgttcagggtcagagatgtgacaaatgcaaggcactcttaaaagacccattttacatgggcttgtaccagaa

SEQ ID NO: 811705 - DNA, 121 bp, Homo sapiens
ggggctgaggcagcccctggggccctggggcaggtgaaggccaaagtcgaggtgtgcaaagatgaatccgttgcagcctagggcctaggcccgggccaccatggcgctgcctccaggccca

SEQ ID NO: 811706 - DNA, 98 bp, Homo sapiens
cgctcccgctgaaggagggaaacgcggcgcgtccagaacccctgaacagtgcccaagtgttgtctctttgttgtcagagagttacaaccctcatgtgc

SEQ ID NO: 811707 - DNA, 100 bp, Homo sapiens
tgagatggaaggatgactatgagtatgagctattatagaaaccatgtaccaaatatgccccaacagcggcaagaccagcatcatcagagtgccatgatgc

SEQ ID NO: 811708 - DNA, 99 bp, Homo sapiens
atggccaccagtttccggacagcttcgtgctggtgcgaggacgacgggcagacgttcttcagcctagatgacgggaacaccaaattctctgacctgatc

SEQ ID NO: 811709 - DNA, 101 bp, Homo sapiens
ccgccacggctacttcggtgccaactgcgacaccagtgctggacgtcattgctcctccttatacctctgacttcgtgcaacttttcctccccatcctggag

SEQ ID NO: 811710 - DNA, 100 bp, Homo sapiens
gaaagcgacaagtggaggcgccgctctagcggccgggactctgaactatggcgaatggtagctgagtggaggttgtctcgaggtgttgaagaacagacac

SEQ ID NO: 811711 - DNA, 100 bp, Homo sapiens
caaacatgctccgccagatcatcggtcaggccaagaagcatccgagcagcatgcttgagaagggaggataaaaactttcagaatgagcaaaacaccatca

SEQ ID NO: 811712 - DNA, 99 bp, Homo sapiens
gacgcccggcgccagcacatcgcagatctcacattcttgaaggtggcattgaagagcactaagatcggaagatgagtgagcttgaccagttacggcagg

SEQ ID NO: 811713 - DNA, 98 bp, Homo sapiens
aacttagaggaacgaggattatacagaaatttgaagaattgcattttgtgaaaaaagaacaagaattttctgcaaggatcatatctaagtgcactttt

SEQ ID NO: 811714 - DNA, 100 bp, Homo sapiens
ctgatatacagcaggttggatacggtggcctcactgccctccatattgctacaatagctggccacctagagcttcgagcaaatgctctcatcaaaagagg

SEQ ID NO: 811715 - DNA, 100 bp, Homo sapiens
tcatccctgacgtttcccgatcctaccactttggcatcgtcggcctcaacatgaatggctactttcacgtactggtgtggcatactcggacagagaagcc

SEQ ID NO: 811716 - DNA, 100 bp, Homo sapiens
ccgggtggccgccctgttccccgcgctgcggcctggcggcttccaggcgcactaccgcgttgctgatcatctgggctgtgatccacaaacccggttcttt

SEQ ID NO: 811717 - DNA, 98 bp, Homo sapiens
aacaacttagcaaaatgttctttactactaagcaccgttggtatcctcatggacgaagtctggacagctgatcacctgaaagagaggagccaagaaaa

SEQ ID NO: 811718 - DNA, 99 bp, Homo sapiens
ctctttccaaattttaacacagaagtgactttggtccagagacttctccagtcctgcaccttgaccacagtgctgactctcctgtgagcagtcttccca

SEQ ID NO: 811719 - DNA, 98 bp, Homo sapiens
gtacaccctcgaactcttggactcaagcaatcctctcacctgagcctcctggctagatgtgactacagtgtggtttattgacaatcatttacaatgcc

SEQ ID NO: 811720 - DNA, 100 bp, Homo sapiens
ccaactcgggtttcttcttccttgagaacgatctgattcatcatcatctgaaccagggatcacagtctaaggtccaggagtcctttggaacctctcctca

SEQ ID NO: 811721 - DNA, 99 bp, Homo sapiens
gtaaaaacaatagctcaaggaaacctttccaacacagatgtccaagctgccaaattctgaaaaagagttccacgtcctcccttatcgagtctttgttcc

SEQ ID NO: 811722 - DNA, 100 bp, Homo sapiens
cccgctccgccctcccttttccctgactagacgcttgaagcaaagctgccatcccagaagacgacatgctctcagcaacccccctgtatgggaacgttca

SEQ ID NO: 811723 - DNA, 98 bp, Homo sapiens
accactgatacctcccctgaaaaaaccccccaaatggattagaagaccaacaggtgtttcatttgctggaagctatatgctgttgggggttatgatgg

SEQ ID NO: 811724 - DNA, 100 bp, Homo sapiens
tacctcactgcagaggtgctggagctggcagagaggaggttcagatgagcccctgctgacttgagagagacagagagaccacgccgattgctgagaggaa

SEQ ID NO: 811725 - DNA, 100 bp, Homo sapiens
tttgctctagagaatatctcaacccgttgcattacactggacctcccactgaaagaataaggacacagcattgttggttttgccatgtactattttacct

SEQ ID NO: 811726 - DNA, 100 bp, Homo sapiens
aaattatttatccaacagctcctcccaggtaaaaagaacgtattctcatggtacttacagagctggcccaatgagacaaataagcttggtgggagcagtt

SEQ ID NO: 811727 - DNA, 109 bp, Homo sapiens
tgccccagcaccttctatggttccagttgtgagtttgctgtggaacaggtggatctaggctcaacagtaaacaccagtattggaggtaatacaacttctgcatccacac

SEQ ID NO: 811728 - DNA, 100 bp, Homo sapiens
gaatgaggtgctgcgcagcaaggtgtctcggctcacggagcggctccgcaagcgctaccccaccaacaacttcgagcatccacaatgggtaccccagcct

SEQ ID NO: 811729 - DNA, 100 bp, Homo sapiens
cttcatagaaaactatccaagaatgtgacttcctggagtagagtcttttttcactgaggggtccagattatagactctacaagagtgaaccagagttaac

SEQ ID NO: 811730 - DNA, 100 bp, Homo sapiens
cgcagccaagctcaagcgcaaatactggtggaaaaacctcaagattagtgatgatgaaccaggttatgaccttgatttattttgcatacctaatcattat

SEQ ID NO: 811731 - DNA, 99 bp, Homo sapiens
ccagtatcaagctctcagtcaagatccaaacagtctttcaaacctagatcaggccataggaaaaggatacagagtagagtttcatgaacctgaaacttg

SEQ ID NO: 811732 - DNA, 98 bp, Homo sapiens
tgcctcgttttggtacaccattgtcaccatgaccacactgggggcgatgccagtccctccactccagaggagaacgaaaccacgacaaccagcgcctt

SEQ ID NO: 811733 - DNA, 100 bp, Homo sapiens
tttgcccagcgatattgtcagtgcaataatggcgtgttccagtccacgggcaagaaactatattcagtctttgactcagatgccgaagatgaactttgcg

SEQ ID NO: 811734 - DNA, 98 bp, Homo sapiens
agactgagacgttggagttttatcctagaggataaaggaaatctttgggaaagtcagtattttatatagcaactttcagagtccactgctgaatccca

SEQ ID NO: 811735 - DNA, 98 bp, Homo sapiens
tggggaccaggagctcattgctctggccaaaaatcgatttagcctgcccagagagcatgggacttcttgacccagcgaccagtgatgggcgagttatt

SEQ ID NO: 811736 - DNA, 100 bp, Homo sapiens
catctaatcctcttgggacctgttatcagatctctcgtggaagaggaagaccaacacatgaaattgtcccttggaggcagcgaaatgggcctctcatccc

SEQ ID NO: 811737 - DNA, 98 bp, Homo sapiens
gatctttggagttcaggtcttaaggtaatttgcattgtatatagatgatcgtctcaaaatttcacaatgagagactgatgaaattgacataaatcaat

SEQ ID NO: 811738 - DNA, 100 bp, Homo sapiens
gggagcttccgggagggcggctcgcagattcacagttaatagaaggatctctatagttggatttggcttgtatggatctattcatggccctacagattat

SEQ ID NO: 811739 - DNA, 98 bp, Homo sapiens
agattgttcctaaaccagaagaggaggttgcccagaagaaaaaggttctcctgaaaagaaagctgaacattcatctataaatcaagaaaatggcactg

SEQ ID NO: 811740 - DNA, 100 bp, Homo sapiens
gtctgcccttgtttgaggccttcacagcatgtggttttgtgcaggtctctaattaacagaagatggcaaagcccagccacagcagctatgtccttcagca

SEQ ID NO: 811741 - DNA, 122 bp, Homo sapiens
gtgcgaatgttaaatcagctggagaaggagaagtggagaagaaatcagtcagccgcagggttttggaaatttgcccatctgcatggcaaagaccgatctttctctgtctcaccaacctgaca

SEQ ID NO: 811742 - DNA, 100 bp, Homo sapiens
gacaattgttgagttgggctccatctttcagcagttggcacacatggttaaggaacaggaggaaaccattcagaggcattgaagttgatatcgatgtgga

SEQ ID NO: 811743 - DNA, 99 bp, Homo sapiens
ggctctctggaccttgtctcgctcgggagcggaaacagcggcagccagagccaccagctgaacaggccaaagccagactacagctggttcttgaagctg

SEQ ID NO: 811744 - DNA, 98 bp, Homo sapiens
ccgacatgaagaaagacgtgcggatcctgctggtgggagaacattcagaatggacagtttagaagaacctcagaaaaaagtctttaaggctcgaaaaa

SEQ ID NO: 811745 - DNA, 98 bp, Homo sapiens
ctggtgaatgtgttatacgtcacacaacagagcagtatagcatcaagttctagaggaattgggagccattgcaaatctgagggtcaggaggaatcttt

SEQ ID NO: 811746 - DNA, 100 bp, Homo sapiens
ccaaacaccacatgttgtctcttagaagtgggagctgaacgaggagaggagacgccgtgagcgggacgaccagatgtaccgagagcggctgcgcaccttg

SEQ ID NO: 811747 - DNA, 100 bp, Homo sapiens
ttcctgggaaggtggagccaccagcctctccctggttctaaatgagaagaaacttcaagaggttgatagtttatggaaagaatttgaaactccagagaaa

SEQ ID NO: 811748 - DNA, 100 bp, Homo sapiens
ggagcctagaatgcatcagtgcccttgtggcgaatggggctcacgtcgaatccatccttttacaatccctgctattattcgtccattcagcgtattgaac

SEQ ID NO: 811749 - DNA, 100 bp, Homo sapiens
gttaccaagcaatggcatgctacgatcaaaatggcaggcttgtggaaacatctagatgtaacagccatgccatttgtaaatatccatgtggaaaaagtag

SEQ ID NO: 811750 - DNA, 100 bp, Homo sapiens
gggaagctgctaacccgacccggattggcgctgaggtggcccgtggggcagatgcagagcaaagcggcagtccccggacagggatgggctctgaccagga

SEQ ID NO: 811751 - DNA, 100 bp, Homo sapiens
ctggccctgtccctggctccctcattaccgtcgccagcggagcgaacccgagagcgtggagcgggctgggccagatagaagcagatttgggatatcctgg

SEQ ID NO: 811752 - DNA, 100 bp, Homo sapiens
aacagaatacactggacctgaaagttatgtggctcaaatgattgtgatcttcagtttagatcttggaggcatatcaactgtggttctaaatggctatgat

SEQ ID NO: 811753 - DNA, 100 bp, Homo sapiens
ataaatccaaagaggagccagttaccatgactcatccagtattcaagtcaaacaacgttgaaatggattgggtgttgaagcatactggtccaaatagtcc

SEQ ID NO: 811754 - DNA, 98 bp, Homo sapiens
accggcaccaagaccggccacatcccagcactgcccacctctggttccaagggggcaaaaaagaagaacttattggaattgcatacaacagactgatt

SEQ ID NO: 811755 - DNA, 118 bp, Homo sapiens
cgcgtccaagtcggtgactgcccacttggccgcgaagtggcccgagaccccgctgctgctggaggcaaggtcagtgctgacagttgcttgtgaacaaactgaagttctgctttttgac

SEQ ID NO: 811756 - DNA, 100 bp, Homo sapiens
ttcatggtgcggctcatcttcgagaggcaaaggcagctcgagcatctcatctgacgtgagttcaagtacagatcacacgcccactaaagcccagaagaat

SEQ ID NO: 811757 - DNA, 100 bp, Homo sapiens
cgttcatcgggcaactcccgaagatctgatcattgagactgaaaatatgatggaccgaattgtgactggcttgtctgagtctagtgtcaaggtgcggtta

SEQ ID NO: 811758 - DNA, 100 bp, Homo sapiens
accagttagcgtgaaagttggagataaagttcttctcccagaatatggaggcaccaaagtagttctagatgacaaggcaatgagaagcacgaccttcatg

SEQ ID NO: 811759 - DNA, 98 bp, Homo sapiens
accaagaaagttgggtttcttttactggcaaatagtacttcaagagcacagtcttatgtaaggaatactcccccagttgcaagaggcgcaggaccgtg

SEQ ID NO: 811760 - DNA, 99 bp, Homo sapiens
aagtcagtgcctcagttgctggattggcagccaccatttgcatgtgatgttgataaacttcattttacgccacgtatccagagactgaatgaattggag

SEQ ID NO: 811761 - DNA, 98 bp, Homo sapiens
gtctatgagggtcatgtttcctgtgtgaaattgcttctgtcaaaggggcctttatcatctgctggactcctggattggttttgttacttctagacgtg

SEQ ID NO: 811762 - DNA, 100 bp, Homo sapiens
taagagaagctggcttgatgaaaaggctctccagtttggacttaattcagtgcacaaatgagatgaatgtgaacatcccacagttggcagacagtttatt

SEQ ID NO: 811763 - DNA, 99 bp, Homo sapiens
agacggcggcggcggcgacggcatttaacaaggcggtgtggtttactccatgcagttgtcaggagtttgaacgccatgaccctgtggatgggagaatta

SEQ ID NO: 811764 - DNA, 98 bp, Homo sapiens
tgttggatcgtttcatactttacgcttgtgtgataaaactggggttatggccacaccgtgcccttgtcagatggaggtaaggccttctgcatcatcta

SEQ ID NO: 811765 - DNA, 100 bp, Homo sapiens
acagccgcttcaccgtgcccctgcccgcgaccatggcctcctccgaggtggcgcggcacctgggacaagaatccttcaagaaacaggaaaaaactcctaa

SEQ ID NO: 811766 - DNA, 98 bp, Homo sapiens
gcgtggccagcactggctccttgatgagtgatcagcagctggactgtgccttggacctaatgaggcgcctgcctccccagcaaatcgagaaaaacctc

SEQ ID NO: 811767 - DNA, 100 bp, Homo sapiens
ctggcttctagaccatcgtacctgtcccatgtgcaagatgaacattcttaaagccctagggatcccggttattgccatggaatggagaatgaggcgatag

SEQ ID NO: 811768 - DNA, 104 bp, Homo sapiens
gagaccgagtcgctcaagtcctacctggagcgggagatgaggaaaatgaggcccaaagaagtgatgccacttggttaaggtcccagagcaggtcagaatcagac

SEQ ID NO: 811769 - DNA, 142 bp, Homo sapiens
gcagcccggaaagaaatcataagaaacaaaattcgagcaattggcaagatggcaagagtcttctctgttctcaggtggccaaggtggaatacgtcaggaagaagccaaaattaaaagaagtccaggtgaggttagaggagca

SEQ ID NO: 811770 - DNA, 98 bp, Homo sapiens
tgcagccgcttgtcagtgtgatgaagattggcacccaggtgcagaggccaagaccgttttgcccaagaaggagaaaatgaagctgaggcgtgagcaat

SEQ ID NO: 811771 - DNA, 100 bp, Homo sapiens
gcccggggcctgccaggcccgggctgcagccgcgtctgatcgccgagcgcgccgcgtagacctccgctcccccaggtcctggtgcttgatggtcgaggcc

SEQ ID NO: 811772 - DNA, 99 bp, Homo sapiens
atgggctcaggtgtcagcattctagccgtgtactccaaggacaactataaaagagttacagggaccagtgccctgtgggacatcgagaccggccagcag

SEQ ID NO: 811773 - DNA, 100 bp, Homo sapiens
acaacaacagctatgaaaccaaaaccccaaatcttcgaatgtcagagaagaaatgttcttttgccaactttccaattaaaggttgacattcctgcataag

SEQ ID NO: 811774 - DNA, 114 bp, Homo sapiens
tgccaccaagtatggcaacatgacagaggaccatgtgatgcacctgctccaggtcatcatggtcacaggagaccatccaatcacagctaaagctattgccaaaggtgtgggcat

SEQ ID NO: 811775 - DNA, 100 bp, Homo sapiens
gccttttgtccctttgcctcatcccaggttgccttggaaaatgccaacgccgtgtctgaaggtttggatgcatctgctcagactacttctcatgaactca

SEQ ID NO: 811776 - DNA, 98 bp, Homo sapiens
cgccccgcggaagccgccggttgccaggccaaggagtggactagggtcgccggggaagcggtaccttccactggaagaatctcaaacagcgctactta

SEQ ID NO: 811777 - DNA, 98 bp, Homo sapiens
cgacttgttctctatcgaacaaaagtagaggtgtcctcattaaagaagaatgtgggtcagttcagtggctttccatttgaaaaaggaagtgtccaata

SEQ ID NO: 811778 - DNA, 100 bp, Homo sapiens
atcctgggagtttcagacctgccactcgactgtggactacgccactttctaccgggtgataaaagaaaatgtggctgaagttacccgaagttcagcttgc

SEQ ID NO: 811779 - DNA, 98 bp, Homo sapiens
aatgggcaaggagccacaaagaagaaaacatttcttttaatttttaaacttggtttgaaaggtccctggatggccggttgcaggtgtcccatcggaag

SEQ ID NO: 811780 - DNA, 100 bp, Homo sapiens
accatcactgcccacagcttggaggagggtcactatgtcattgggccaaagatagagattccggtacattatgcaggagtacaagcgcaagctagccaga

SEQ ID NO: 811781 - DNA, 100 bp, Homo sapiens
tttgggaccttgaacaaggcaaatatggttttgttggttgaatctggcgatgtggaacccatggatatggagggctgactatatacaccatgttttttcc

SEQ ID NO: 811782 - DNA, 99 bp, Homo sapiens
gctctcggcggcctgatggagtaagaggggttggctgtgaatgtgtggatgaggtcaccattgtcaacattttgaccaaccgcagcaatgcacagagac

SEQ ID NO: 811783 - DNA, 100 bp, Homo sapiens
gaacatttctgggtgacactcaacaggattcccggcacggagtgtgaatgtgaagacacaagctctttctggatacagagaccaatttagtttggagatt

SEQ ID NO: 811784 - DNA, 98 bp, Homo sapiens
agaacttttggaactagtgccggcggctctccaccccccaggaagctttataagcgatatgcttttctacgttgcgaagaagaaagagagcagtttct

SEQ ID NO: 811785 - DNA, 100 bp, Homo sapiens
ctttggaagatggataaactggcaaacaaatccatggatgggacagtttcatatcctggtctcctctgagcctccggcctccataagacccaaaacagat

SEQ ID NO: 811786 - DNA, 100 bp, Homo sapiens
actggcagatgctaaagccaagataagaaggcttaggcaggaattgcttgcagatcagatgagaatgttgaattttccccagtggtttgatctgctcaag

SEQ ID NO: 811787 - DNA, 100 bp, Homo sapiens
aatccaggctcgcagaaccgtgaaaaaggagtggcaggcggcatgcgttcctgcggacgatcgcatcttgtgtcgctgaagcgcctcccccagggaccgg

SEQ ID NO: 811788 - DNA, 100 bp, Homo sapiens
ggttgttgatgtcaatgaatcaagaatcaatgcgtggaattctcctacacttcctatttatgaggtttttgacaactatgcagtcacagttatgattggt

SEQ ID NO: 811789 - DNA, 99 bp, Homo sapiens
cttcagcagcaacagcagcagcaagttagtggattaaaatctcccaagaggaatgacaaacaaccagctcttcaggtcataaataaagttcatcttaag

SEQ ID NO: 811790 - DNA, 100 bp, Homo sapiens
ttctgaacgaaatggagaaactggaaaagaccctcttcagacttgaacaagtttgcaggtcgaagtaagaaggaaaccaaatattctcttaaggctgtcg

SEQ ID NO: 811791 - DNA, 98 bp, Homo sapiens
agaatcctatagaccagtgtaataccctgaatcccgaatcattaaccaatggcaacaggaatccaaggataaagtgatttccctcctgttaactcatc

SEQ ID NO: 811792 - DNA, 100 bp, Homo sapiens
ttggactaatgggagttgcttttggaatgaatttggaatcttcccttgaagaggtgaatcatgtccgaaccagagactttgactgctgccttgttgtgcc

SEQ ID NO: 811793 - DNA, 98 bp, Homo sapiens
aaagccacagtcttcaagagcccacggacaccacctcaacggaattagcttaccgaaaggagatggtgagagctgacctaattaacaaaaaagttgga

SEQ ID NO: 811794 - DNA, 100 bp, Homo sapiens
atgcggagcctccgctgcagcgcgatctgcgcgaccagaccggcccccccgaggtgcctaatggataagaacttcgttaggattgggaaatggtttgtcc

SEQ ID NO: 811795 - DNA, 99 bp, Homo sapiens
tttttttttaggtaccagcatcaagatgatttatggtaataagatgctttcttcacatgtcgaaaaaatgtccttctggcgaacagctcatccccccag

SEQ ID NO: 811796 - DNA, 100 bp, Homo sapiens
aagaagaccattcagatgggatctttccggatcaatccagatggcagccagtcagtggtggagatgccccctaaaaagggaggtgatggaattaaaccac

SEQ ID NO: 811797 - DNA, 98 bp, Homo sapiens
tgtggctgtagtatttgcccgggatcccgaccaagatatagccagtaccaacgtatgctgagcacgctgtctcaatgtgaattttcaatgggcaaaac

SEQ ID NO: 811798 - DNA, 99 bp, Homo sapiens
tgagcgcgcgcccgccccgctctgggaggaccgcgagatgagcacctctgaggagttggatgaaatgccagtgccggattctgaaagtgtattcattat

SEQ ID NO: 811799 - DNA, 99 bp, Homo sapiens
agtgctttccctgccggtgcgcaggggaagcgtgactgtgctcaggcccaggctgcaagcacaaaggaagtttgctcagtctcagccgaatagtcccag

SEQ ID NO: 811800 - DNA, 108 bp, Homo sapiens
tcttggcagccttcctgatttctgcagctctgtgtgaagattttcgacaatgaagccaaagacgtggagagagaagtttgctttattgatattgcctgcgatgaaatt

SEQ ID NO: 811801 - DNA, 100 bp, Homo sapiens
ttgtggattatgaaaaccctttaaagaagatgatggaagaatttgtaccccatagcaagtttcaaagaaagcatggagaaatcatcatactccgactggc

SEQ ID NO: 811802 - DNA, 98 bp, Homo sapiens
actgcctgaagttacatttagagactgaaatcactgcaccttaaaaacaaaagattgagctgcactgtattcctggggacttgatctcatcttcatgc

SEQ ID NO: 811803 - DNA, 99 bp, Homo sapiens
ttttctgtacaacatcacttcttctgtttgcagtggcgcttcctcccatcaacacagtcggcggagacaaggttggctaaaggagatccgaaagcttca

SEQ ID NO: 811804 - DNA, 98 bp, Homo sapiens
gatgccatctgttaagggggcccaggcattaagaagaaatgcactcaccatgagcaccaacttctgcatctgcctgatcatatttaaaggaacagaga

SEQ ID NO: 811805 - DNA, 98 bp, Homo sapiens
ttcttctctacagaagagcttctcctcatcaactggggatgattacagttcttcctaaaaaagatgtggaaacaacttctgtgcatctcatcgttatg

SEQ ID NO: 811806 - DNA, 98 bp, Homo sapiens
ggcacatcctctcggtgttcccgctggcggcgggcatcttcttcgtgaggctgctcttcgagcgtctctgcgatatgataccagctattttgtggagt

SEQ ID NO: 811807 - DNA, 100 bp, Homo sapiens
ccaaagccgaagtgcaagtggaaggaagatctctgaaaacagctattctctagatgacctggaaataggcccaggcaaagtgtttcatggatttcaaagc

SEQ ID NO: 811808 - DNA, 99 bp, Homo sapiens
ggtatcctcggaaacggtttgtggctggagtaggagcaaacagcaaattgtagaaggcatgaaacaaaaaatgtggagtattgaaaatattgccttcgg

SEQ ID NO: 811809 - DNA, 100 bp, Homo sapiens
cacagaaaccttgccatcagggcatttccggagagttcttttgaagtcacttcagaaggatctacatgaggaaatgaactacatcactgcaataattgag

SEQ ID NO: 811810 - DNA, 99 bp, Homo sapiens
tcagctcggccggggccgcagtctggccacccgcttccatgcggttcgggtccaagatgatgccggttttacaactgcctacagcatgctttggaaagg

SEQ ID NO: 811811 - DNA, 100 bp, Homo sapiens
gctcaccagtggagagaagattttgcagatggccaggccatgttatgggatctcaacgaaggcaaacacctttacacgctagatggtggggacatcatca

SEQ ID NO: 811812 - DNA, 98 bp, Homo sapiens
cccagtcactcaaatccgtggactacgaggtgttcggaagagtgcaggaggatgaggaagatgaggaaatggtggaatctaaagttggccaggactca

SEQ ID NO: 811813 - DNA, 100 bp, Homo sapiens
acgaaggtgactctctggatggaccagaatacgaggaggaagaggtggccataccgttgaccgctcctccaactaaccacaacgcacctcttgctttttc

SEQ ID NO: 811814 - DNA, 129 bp, Homo sapiens
acagctgatgttgcggtatccagatggaaaaagggaacagatcactcttccagagcaagctaaactgctaattcagagactgcatttgaaatcaaatcatcagtttccagcaggagcatttttaaagat

SEQ ID NO: 811815 - DNA, 100 bp, Homo sapiens
gatccagcaaggtcggcagagcaaggggcttacgcagaaggacctggccacggtggaggctacggagccacaggacgtggtggtctatgaccagagcacg

SEQ ID NO: 811816 - DNA, 99 bp, Homo sapiens
ctcaatgttctcgatgccaatctctgcttgaaaggagaagacttggattctcaggtcagtttaggggctggtgcaaaggatgagttgcacattgttgaa

SEQ ID NO: 811817 - DNA, 100 bp, Homo sapiens
tacgggcggccgtgcgcgaggcgaggctcttgcagccaatgccggaacaggatttgctgttgctgagcctcaaatcgcaatgttttgtgggaagttaaat

SEQ ID NO: 811818 - DNA, 100 bp, Homo sapiens
atttattctatacacagtattccaaagggaactgaaattactattgcctttgattttgactatggaaattggggtcacagttattgataaaccattatga

SEQ ID NO: 811819 - DNA, 100 bp, Homo sapiens
agactgctttcaaaaaattaagagtggatgcatcagggaaaggaaacagattcattgtctgtctgaggatgagttaagttcttctacaagttcaactgat

SEQ ID NO: 811820 - DNA, 100 bp, Homo sapiens
ggctcggcgggggcggcccctccttgggcctgcggctctctacgtccctgcggagcagccgtctgaagatgatgagaaactgaaaaagaggaaggagcga

SEQ ID NO: 811821 - DNA, 100 bp, Homo sapiens
agatgaacacagtattgaaatgcatttgccttatacagctaaagccatggaaaggtaagaatgattgatgttggctgatattggagtgctcattcacatg

SEQ ID NO: 811822 - DNA, 100 bp, Homo sapiens
attctggactggcaggatattgtttcctttgttcacgagaacattgagacatttctttcggaactctttccagttaacagacagagtgtggatcattttg

SEQ ID NO: 811823 - DNA, 147 bp, Homo sapiens
gaaacaccggtaggagcggggaggtgggtactacacaaccgtctccagccttggtctgagtggactgtcctgcagaaatgagccgtcagactgctacagcattacctaccggtacctcgaagtgtccaccatcccagagggtgcctg

SEQ ID NO: 811824 - DNA, 100 bp, Homo sapiens
atggagttctcacttaaagacctttatgccatccaagagattcaagctgaagaaaacctgtttaaactcattgtcaagtctacaaggaagtcttcacgag

SEQ ID NO: 811825 - DNA, 98 bp, Homo sapiens
ggaaaagcatccccctcaaaatgtgctacgtcactcggagtatggccttggccgaccctgagaacagtgattctgaagatggggagaaggaaaatgaa

SEQ ID NO: 811826 - DNA, 101 bp, Homo sapiens
aaaaaatataacatcatggcttttaatgcagccgacaaagtcaactttgctacgtggaatcagaaaaggacagatgaagctgctttccagaagctgatgag

SEQ ID NO: 811827 - DNA, 100 bp, Homo sapiens
acagactctccaaccccagttgctttgccagcctggctgggctcaggagacttaattcagtgcacaaatgagatgaatgtgaacatcccacagttggcag

SEQ ID NO: 811828 - DNA, 101 bp, Homo sapiens
gaagtcttgaagaatagagccataaagaaagcaaagcgcagaaatgttggatttgaagttggtgaccgttgttatgatgaaaaaatgtatgatgctgctaa

SEQ ID NO: 811829 - DNA, 100 bp, Homo sapiens
gatactaacctcttattcagaatgtcccaacagagctacgaagtgaagagtgtcctcggaaaggaagtggggttgttaaattgttttgtccagtccgtaa

SEQ ID NO: 811830 - DNA, 98 bp, Homo sapiens
aaaattggctacccagaagtcatacctgcaaaatgaagccaagttggatgagattttaaaagagatcaaatctataaaagacacaatctgcaatcaag

SEQ ID NO: 811831 - DNA, 98 bp, Homo sapiens
cgtgcctatgattgtaccggcagctccttaccttcctggactgattcagacacggcatcagcgaggagatacgcatcctctaaccttagatgaaattt

SEQ ID NO: 811832 - DNA, 98 bp, Homo sapiens
ttttttaaaaattaaacttcaacacaatgaggtttccagagctttacctgagaaacaaggagaaattgaagctcaaataaaagaccttgggcagcttg

SEQ ID NO: 811833 - DNA, 100 bp, Homo sapiens
atatttcttcaattgtttctggtggtcctgttgatacattgggtctcctacagccagaagatgagctgcttgaggcagctgttgtgctgtgtatggacgt

SEQ ID NO: 811834 - DNA, 98 bp, Homo sapiens
ggaatttagttttctagatattcttcgattatgggaggaagatgagaatgtgcctactgctcctgatcctccaagtcaacatttacgtgggcatggga

SEQ ID NO: 811835 - DNA, 100 bp, Homo sapiens
gacttaagtcagcccacgggatttttagcccagcccatgaagctgaagagctttgatcagttcacctgcaacctgctgtatgtgagctggaggaaggacc

SEQ ID NO: 811836 - DNA, 98 bp, Homo sapiens
cacactgtacttccagggagacaccgattataagaagagaaactcagcgctggggaagaagtcgggaagacgtctctgattacgaggttcatgtacga

SEQ ID NO: 811837 - DNA, 100 bp, Homo sapiens
tcctaaagttcgtgaatctcaacttgtcagtttacgttgcgagacatgtatgagcaatttcaaaatatcatgaaaatgggccccttcagtcagatcttgg

SEQ ID NO: 811838 - DNA, 100 bp, Homo sapiens
agctccagcgggtccccggcaaactccttccacttcaagggggcaatggcggcttcctgtgttctactgcacactgggcagaagatgcctctgattggtc

SEQ ID NO: 811839 - DNA, 50 bp, Homo sapiens
tgaatgatggattttctagttacctgtgcttttttaggaccaaaggatat

SEQ ID NO: 811840 - DNA, 100 bp, Homo sapiens
atccttccttgatgatgaagagaagttttcatgggctgagctgctgagttcagcctgggaactgaggccaacaagggagtctcctcggcacacaagtttg

SEQ ID NO: 811841 - DNA, 100 bp, Homo sapiens
gactctttctgttcaggccagaccctctgggagcttctcagccattttccacagatcagaatgcgtcaacctttgaggatgtcacccaggtgtcctctgc

SEQ ID NO: 811842 - DNA, 100 bp, Homo sapiens
tggaatctgcatccccgggaaactgcaatgtaatggctacaacgactgtgacgactggagtgacgaggctcattgcagaaagtccatcagcttgataatg

SEQ ID NO: 811843 - DNA, 100 bp, Homo sapiens
agcggatcgcactctctttgtgggcaaccttgaaacgaaagtgaccgaggagctccttttcgagcttttccaccaggtgaagagaagaagagtatgaact

SEQ ID NO: 811844 - DNA, 100 bp, Homo sapiens
gtgagaaaagtgaatcagaaaattggaagctgtacacagcaagacgttgagttacatgttcagaaggccacggaaaggtatgatatatttgatccaagac

SEQ ID NO: 811845 - DNA, 100 bp, Homo sapiens
cggtggactccgccttctcttccagaggatcactgtcgctgtcctttgagcgggaaccttcaaccagcgagctggaagtcgagtgtgctactcaactcag

SEQ ID NO: 811846 - DNA, 100 bp, Homo sapiens
aggcaaaggcaaaggcggctcgggagattcagccgtgaagcaagtgcagatagatggccttgagctgctgctcttcctccagaacctgcccacagcccac

SEQ ID NO: 811847 - DNA, 100 bp, Homo sapiens
gtccgaatcagtatcagatctacagtgagtcattcaaacagcatgacataactggagtcagaaataccatcagaggaggggtactgtgactttaatagta

SEQ ID NO: 811848 - DNA, 98 bp, Homo sapiens
gtactgaagaaaccctctgttaagatgtgtctagagagcttacagtcagaatctggagatgtgagtagaaacacggaactgaagaaacttcagatttt

SEQ ID NO: 811849 - DNA, 98 bp, Homo sapiens
ccacatccctcccggctgtagccaagaactattcggttctctacttccaacagaagtgaaggtgactggtgggaggctcggtctctcagctccggaaa

SEQ ID NO: 811850 - DNA, 50 bp, Homo sapiens
tgactcctgactcagaacacgtgcttttttaggaccaaaggatatatttc

SEQ ID NO: 811851 - DNA, 99 bp, Homo sapiens
tgagattcccttgcaaatttacatacgagaatggcttgtgaaatcatgcctctgcaaagacaagttggatggcttgaggactggtactaaaaggaaacg

SEQ ID NO: 811852 - DNA, 100 bp, Homo sapiens
gaaggacgtgcccgactggaaggttaacgtccctaaaacccgccggactttctgtaagaagtgtggcaagcaccaaccccataaagtgacacagtacaag

SEQ ID NO: 811853 - DNA, 99 bp, Homo sapiens
gtctttccactgtgctcagattcaagtaaaactggctaatccttttcgaataggacaggcacatacagtgagggtctcagtggcccttagcagcagctc

SEQ ID NO: 811854 - DNA, 75 bp, Homo sapiens
cggaccgaccatgggcagatcccagatgctattaactgagtacttggatatgaaaaatactcgtacggcctctga

SEQ ID NO: 811855 - DNA, 100 bp, Homo sapiens
tttagtggtgtataaccttggactcacactgctgtctctgtatatgttctgtgaggagctgaacaagacaatctgggaggtgcccgagcgttaccagaac

SEQ ID NO: 811856 - DNA, 98 bp, Homo sapiens
aggagactccggcgctcgccatggccgacgaaaagcccaagcgtgagtgcatctccatccacgttggccaggctggtgtccagattggcaatgcctgc

SEQ ID NO: 811857 - DNA, 99 bp, Homo sapiens
acaccatcaatacttttcggattaaatctggaaatgaaaatggagagttctacctacgagtgaggacaccagtgatgaattctgaagcaaaagttctgg

SEQ ID NO: 811858 - DNA, 100 bp, Homo sapiens
ccggaaccggagcccaagccgggtgctggcacatccgaggcgttctcccgactctggaccgacgtgatgggtatcctggggaaggtgtggctcattgact

SEQ ID NO: 811859 - DNA, 110 bp, Homo sapiens
agctgtgcagcctcaaccccatgtccgacaagctgaccttctctgtgatctggacactgactccagagggcaaggcagctatcaatggtgtaataccacaggaaaatggc

SEQ ID NO: 811860 - DNA, 98 bp, Homo sapiens
aaaacaagaaatttcaaaacttgatcaagactctgctgctgcagattgcaaagcaagagctggagcgagaggcggaggagcggcgcggagagaagggg

SEQ ID NO: 811861 - DNA, 100 bp, Homo sapiens
tcacagctacatatttgttattggggagaaaatcttcagaggacactaaaggagactcagccatggtcctctcccaaaggttctgaaggataccttgcag

SEQ ID NO: 811862 - DNA, 100 bp, Homo sapiens
gatctgggcatcacgggccccgagggacatgtgctgagccgacctgaggaggatggcactggatctttaaaacgcagtggttcctttagcaaactccggg

SEQ ID NO: 811863 - DNA, 99 bp, Homo sapiens
tccaggaagccaccttactctgagggtcaagaattgccgcttccttttagttactcccatgactgaagagttgctgaaacaacaaaagctgaattcaca

SEQ ID NO: 811864 - DNA, 100 bp, Homo sapiens
ctcgtctggtttgatcacaagacgggcaaggaatagcgggttttgcagcaattgttgcatatggattatataaactgaagagcaggggaaatactaaaat

SEQ ID NO: 811865 - DNA, 100 bp, Homo sapiens
gattatgaaggcatcaaggctaaaattgcaaatgcatatatcatcaaggagcattttgagattatacactaagcctaacttctggttcctaggtaagtca

SEQ ID NO: 811866 - DNA, 99 bp, Homo sapiens
caggactccagaaaattcagcaaagaagaagcttttaagagacattccataagtggaccaatctcaacatccaaacccctgacagccctgtcagataag

SEQ ID NO: 811867 - DNA, 100 bp, Homo sapiens
tgttgaagctaaacccatatgcaaagaccatgcgccggaacaccattcttcgccaggccaggaatttccatgccattgcagtgtcaactaggcctcagtt

SEQ ID NO: 811868 - DNA, 100 bp, Homo sapiens
gctcatgaaccacttggcaaaggaagtcgagataacatgagtattgtactagtttgcttttcaaatgctcccaaggtctcagatgaagcggtgaaaaaag

SEQ ID NO: 811869 - DNA, 98 bp, Homo sapiens
gttcgagaagttgtgaacagactcgatcgttagggaatggatctagtttgaagcactaagaagaataagacatcagtttgaaaagaggctctatcaga

SEQ ID NO: 811870 - DNA, 100 bp, Homo sapiens
tattttgaaatatgattaaactcctgatgctgcagcagaggctaagaatattaatggccagatctagaccaagcggagcagccagctggcagtagcgccc

SEQ ID NO: 811871 - DNA, 100 bp, Homo sapiens
agaacagctttatgaaacagcttgcttcctacagttgacgaaggatcagagattggtgtattcgggcagactgcttcccgatcatctgcagctgaaagac

SEQ ID NO: 811872 - DNA, 100 bp, Homo sapiens
cagcagggagcccagaccagcctgcactgtgccttaacagaaggtcttgagattctaagtgggaatcatttcaggggttgatagttcttggggaggtacc

SEQ ID NO: 811873 - DNA, 100 bp, Homo sapiens
atgctccacccattaatatggaaagcccctcaaggatcgagaagatgaccagtacagccaccttcaaggaaaccagttgaggaggaattgaactcaggac

SEQ ID NO: 811874 - DNA, 98 bp, Homo sapiens
gatgagcccattttagaatttagcttagactatcttgctaatcatggccggttaaatgagtctgaagccaggcgaaaattctggcaaatcctgtctgc

SEQ ID NO: 811875 - DNA, 98 bp, Homo sapiens
ctgaccctttttttatatcgcggcgacggcgggctgtcgtcacgacgacgtgcggacgcagcggcgggggcgtactttggaagttcgtcttatgggct

SEQ ID NO: 811876 - DNA, 98 bp, Homo sapiens
tgaggcccttcttgtgtatctggagaaaatagaggcagtcttgattgatatggaagaaggggtagtgaatgaaattctgcagggaccactgagagatg

SEQ ID NO: 811877 - DNA, 98 bp, Homo sapiens
cttctccgaggcgcagaagtggattgagacaaatggacacctaccagggaacggagatgtgtatcaagaaaggctggcacgtttagaaaatgataaag

SEQ ID NO: 811878 - DNA, 98 bp, Homo sapiens
tctggatcacggatgtaggaagtgttgttgacctcctgtactggagagacattaagaagactggagtggtgtttggtgccagcctattcctgctgctt

SEQ ID NO: 811879 - DNA, 100 bp, Homo sapiens
ctttgctgttggatactatggacagggctttccttctttcctacggtttgtgaagaaatatgggaacctttttagcttggagcttggtgacatatctgca

SEQ ID NO: 811880 - DNA, 98 bp, Homo sapiens
acgtgctggtgtctgagtggatggggacctgcctgctgtgaatgagttcacggtgatcaggaagaagttcaagtgtccgtactgcagcttctcggcca

SEQ ID NO: 811881 - DNA, 100 bp, Homo sapiens
ctggcgttccaccagcaaccatgagtggttccatgatgggaagtgacatgagctcttcagtatccccatcagccagtttccgaggtgctgagaagcacag

SEQ ID NO: 811882 - DNA, 100 bp, Homo sapiens
gacgatctactatgtgatgtcagggcctgcgtgggaccggaacacccgaatcctgggaagagtttcagcgcccgaggcttcccacgacactgttaccttc

SEQ ID NO: 811883 - DNA, 100 bp, Homo sapiens
gatttgttcccttagcagaaattatgttggctcttcgaaatgaggaggcagaaaatgaaaacagcaaattaagaagagaggtaaaaaattttagtagttg

SEQ ID NO: 811884 - DNA, 100 bp, Homo sapiens
gaatgctcttttaccgatgctttaacatacagccactagctttagtgcagccgtcattatccatgacaccggaaactgtgaaagatgttggatttggtag

SEQ ID NO: 811885 - DNA, 100 bp, Homo sapiens
cgcgacacggagactaggtggcagcaccatatgaaggcggagtatggaaagttagagtggacctacctgataaataccctttcaaatctccatctatagg

SEQ ID NO: 811886 - DNA, 100 bp, Homo sapiens
gactcctcctttacttcatcatgacttgaagactcagaatatcttattggacaatgaatttcatgttaagggacaggatgagaacttcagtcaatgttgt

SEQ ID NO: 811887 - DNA, 98 bp, Homo sapiens
tatagagctaattacaactttcggggcatgtacaatcagaggcaatacagtacggtactgaggataacagtactgcagtagtagtgccttttggtgcc

SEQ ID NO: 811888 - DNA, 100 bp, Homo sapiens
ctcagattgcaaacagtggttctgctggattgataaacccagctgctacaggtaagttctcttctacgctgtatgagactggtggctgtgatatgtcact

SEQ ID NO: 811889 - DNA, 100 bp, Homo sapiens
cacacccctcgtgtccaggttcctcatgggcagtgctcggggtgacaaagaagatgccagaggaacaagcattctgtgttttggtgaaaatcatgtacga

SEQ ID NO: 811890 - DNA, 100 bp, Homo sapiens
accaaaatgaggcgtaagaaacgctttgcaaagcaaggcatagaatgtcaagctaaccaggcgtccgctacttcagaagagtgtactgtcgcatggggag

SEQ ID NO: 811891 - DNA, 100 bp, Homo sapiens
tgagagaagacaggtatatgcgtttaaaggaggagctgcaactgtctgatgaacagctacagaagagctcctctggtgcaagtgtggtagctattgacaa

SEQ ID NO: 811892 - DNA, 98 bp, Homo sapiens
agacatgcggtgccatcaacaaaaatggtcttcaagcctcaagctgtgaagttcctttacactgggtgtgtaagaagtttacaagtccttccactttc

SEQ ID NO: 811893 - DNA, 99 bp, Homo sapiens
tctttgcaacatttcaggaaaacagagaaagaagtgataggagggctctgtagcttcggaaccaaaaagaagcttcccagagccggggccaggagcccc

SEQ ID NO: 811894 - DNA, 100 bp, Homo sapiens
gccggagtttgcagaggctgcctccgagcgccgtccgccaggaagactccctgcctcctgagtcccaatccgtgattctaactgcaactatgaggccttt

SEQ ID NO: 811895 - DNA, 99 bp, Homo sapiens
tgaatttccatgtcaacatagtccagtgtggaaaagccactggcagtgattcaagtggtgtcattgatctcacaatggatgatgaagagagtggagctt

SEQ ID NO: 811896 - DNA, 98 bp, Homo sapiens
ccctgaggccccagaactatcttttcggtgaatgaaaactttgccattgatttgatagcagagcagcccgtgagcgaggtggagactcgggtgatagc

SEQ ID NO: 811897 - DNA, 100 bp, Homo sapiens
ttgccaattgtgtggccttagcgatctatattccctttccagaagatgattccaacgccaccaattccaacctggacggaaccactgcactccaggttcc

SEQ ID NO: 811898 - DNA, 98 bp, Homo sapiens
tggaccgccatgttctcagataagaagtacctgaccgccagccagcttgttcccccaggccagcacatctacctctcggctcgaattgatggaaacct

SEQ ID NO: 811899 - DNA, 100 bp, Homo sapiens
tgagtgaaaatacagccaagatcttggcaaagcttctccctcagtatttagaccagatttgctgtcatgaaccgaaaagtccttgatgtttttggtactg

SEQ ID NO: 811900 - DNA, 98 bp, Homo sapiens
tcctgctgccgcctttctgagaaatgtgaccctggccaggaaacctgtaggaagtgtcagggactctggaaagaacataatggcctcacctgtgaaga

SEQ ID NO: 811901 - DNA, 100 bp, Homo sapiens
gtgaagaaaaaagaagtaaaagaagctattattacaagaataaaggcaggaatcaatccattcaatgcaaatggttatgagccttagagtttctgaactc

SEQ ID NO: 811902 - DNA, 114 bp, Homo sapiens
gtgatgaacaggagaattctcacaccctcctcagtcacaacgcatgcaacaaggtggcaagtgggatgatactggtcatggctttctttctcatcacctacacctttcattcaa

SEQ ID NO: 811903 - DNA, 98 bp, Homo sapiens
ccttttccacagagaaatgagagcaccctcagtgtctttacatttggcaatctccgtcctacagagggctggaaaagccctgcgggagacggcatatc

SEQ ID NO: 811904 - DNA, 98 bp, Homo sapiens
aagcttaatgaggaaatatcaagaacatgaagatgttcctatttgtattcattgcaggagagaagtggatgggccctatacctccagccgtgaatgcc

SEQ ID NO: 811905 - DNA, 99 bp, Homo sapiens
tcatctctaccctcttcccaagcaagatgagtatcatatggttcatctagtatgtacttctcggactcctcccagttctccaaaatccagcaccaatag

SEQ ID NO: 811906 - DNA, 100 bp, Homo sapiens
cagtaaattcttcagctgctcggacagatgaagctccccaaggagctgcaggtgatctttagacagtgactgagtatggatcatttgaacgaggcaactc

SEQ ID NO: 811907 - DNA, 100 bp, Homo sapiens
cttacacttgaaatacagactgttggggaacaagagttattacaagaactgtgtacagtatttaatgtagatttaccatgccgtgtgaagtcttcccaat

SEQ ID NO: 811908 - DNA, 100 bp, Homo sapiens
gatcattcacaatatctgtgtcgttcttggcagaaattatattttccagcccgtgtctgcagggggattcccgaagtcttccgttttctgagaatgtgag

SEQ ID NO: 811909 - DNA, 100 bp, Homo sapiens
aaacaccagatgatgaccctgagcaaggaaaatctgagggtagctacagcaagctgggtagcaggcagatccaaaggatatcatgaagtttccagggcct

SEQ ID NO: 811910 - DNA, 98 bp, Homo sapiens
cttggtgtcgtttttccttgagctgaacgtcttgcaacagtggccgcacgcatagtatttcatggttctatcaaagcagcagtaaaaaaaatactctt

SEQ ID NO: 811911 - DNA, 100 bp, Homo sapiens
cgcaatggacaagctgaagaaggtgctgagcgggcaggacacggaggaccggagcggcctgtccgaggaattacatgaatgacagtcttcgaaccaatgt

SEQ ID NO: 811912 - DNA, 98 bp, Homo sapiens
gaacccacaggagtcgctggatagactgcacaaggtgaagactgtctgcagcaaggtaaaatctgtaaaaactgggtcagttttttggacaatgtgct

SEQ ID NO: 811913 - DNA, 99 bp, Homo sapiens
gggtttggtagagtgacttctattcactaaaaccatgtgtctgaactgaagaagcttgggctcacttccacaaatgtatcagcagatgttgcacacaaa

SEQ ID NO: 811914 - DNA, 100 bp, Homo sapiens
gacaatgtgagcagtgcttttgaacaagggcaagtgtccagagaatggctgggatgaaagtacacttgaactctttttacatgaacttgcaatcatggac

SEQ ID NO: 811915 - DNA, 100 bp, Homo sapiens
gcaggacgtgcagctcgggctcttcatggccgtcatgccgactctcatacaggcgggcgccagtgcatcttctagagccagagcccagaggtggagcagt

SEQ ID NO: 811916 - DNA, 98 bp, Homo sapiens
gaaagcaaggagaaccagtggttgggagtcagtgttcggagccaggggcctgggggcaagattgtttttgtgaagaaatatgggaacctttttagctt

SEQ ID NO: 811917 - DNA, 100 bp, Homo sapiens
actctttccgccctaatggaggtctccagtttcgcagcagccgctcttctaaaacattcaaaccaaagaagaatatccctgaaggatctcatcagtatga

SEQ ID NO: 811918 - DNA, 100 bp, Homo sapiens
actcgatggttagaatatgtaaggtgtaccttcagttgaatttttagaatctcccattacggcagtagacagcccattcctaaaagcatttcaagcatca

SEQ ID NO: 811919 - DNA, 99 bp, Homo sapiens
tcccataaaaaaagaactggtttctacagggattatgacattccatttactcagatctaccttctgagatatcatccttcttcagggagataaggaaaa

SEQ ID NO: 811920 - DNA, 99 bp, Homo sapiens
aagaccctgtgcacctctcagcaggcctttgctggacagatgaagagtgacttgtttctggatgattctaagagtgcagattctgggaaagtgaactcc

SEQ ID NO: 811921 - DNA, 99 bp, Homo sapiens
aacaacacccccatgtgcgtgtgccaggaccccaccagctgcccagcccccattggcgagtttgagaaggctggagcattggatttgctaaaggagctt

SEQ ID NO: 811922 - DNA, 98 bp, Homo sapiens
cgtcactgacctgcgcggcatgctaaagaggctcaagggcatgaggcgcgatgagaagaagagcacagacatcgtgaacacccctaaacccgatgaaa

SEQ ID NO: 811923 - DNA, 100 bp, Homo sapiens
gctgtggggactccgaaaaaacaaaacaaatatgaactatgataagctgagcagagccctgcgatactattatgacaagtattaaaggtggaagaaggtc

SEQ ID NO: 811924 - DNA, 99 bp, Homo sapiens
tggaagcaggtttaaaattttacataagaagttacctttttcagatcaaatggggagcctgcggccttgtgttggcaggcaatgcagtcattttcctta

SEQ ID NO: 811925 - DNA, 100 bp, Homo sapiens
gtcgacatgagtgatgtggaggaaaacaacttcgagggcagactcagcgacatgtcctcacctacatggaggatgcagtgtgccagctgctagaaaacag

SEQ ID NO: 811926 - DNA, 99 bp, Homo sapiens
gacatattaaattggctaaatttggactttatcacatgacagctcatggtgatgatgttgatttcccaatagggtgatcgaggaaacatctcaacatct

SEQ ID NO: 811927 - DNA, 100 bp, Homo sapiens
gagcttggaaaagttgagccctcttcgagagaaattggaagaacagtttaagtcagattctgaggaagatgaacccacaaagaagaaaactatccttcag

SEQ ID NO: 811928 - DNA, 147 bp, Homo sapiens
cataatgggaagaaatcctcttcagtgtatccactctctcaagatcttccttatgttcacatcatttaccagatcctggccaacgtcttcctctacctgtgcgccatcgctgtgggcatcatgtcctactacatggctgaccgcaag

SEQ ID NO: 811929 - DNA, 98 bp, Homo sapiens
ctggctccccatactagtcgccggcatcgttggcttcacagtatgactgatgatcctccaacaacaaaaccacttactgctcgtaaattcatttggac

SEQ ID NO: 811930 - DNA, 100 bp, Homo sapiens
aaaacctcctcctgggcttatcaagaatccacattcatctcaatggaaggatcctgccttaagtcaacttatttgtttttgccgggaaagtcgctacatg

SEQ ID NO: 811931 - DNA, 100 bp, Homo sapiens
tgaatgtgaggagggtggaaagcatttcggctcagctggaggaggccagctctacaggcgttgttgacctcctgtactggagagacattaagaagactgg

SEQ ID NO: 811932 - DNA, 100 bp, Homo sapiens
atttttagtggagttgccatctatgttaatggatacacagaatgttttcaggaaagtgaacatctcaaggaaagtcttaaatgttgcttattgcatctct

SEQ ID NO: 811933 - DNA, 100 bp, Homo sapiens
cctgcccccctcatcagcacaccacccagccgtcctccccagggcctattccctggtggattccagtcaagtgtctacatttctgatttccattcttctt

SEQ ID NO: 811934 - DNA, 100 bp, Homo sapiens
aatatgttagcgttgtatcttgggagaaagacacagtctccatcatcccaggtgagcctgaatttaaatacattgggaatatgcatgggaatgaggctgt

SEQ ID NO: 811935 - DNA, 100 bp, Homo sapiens
aattacaagtggaaatccacaaggattcttttcaatacatcctaaaacagaggccaaactgagcagtttctggcagttgattgtggatgagaaaaagcag

SEQ ID NO: 811936 - DNA, 101 bp, Homo sapiens
tcaccgtgagcgtggtgaacaactatgccctgaatctcaacattgccatgcccctgcatatgatatttagatccccagaagatcagctgccatgttacttg

SEQ ID NO: 811937 - DNA, 100 bp, Homo sapiens
acgtccgtatcatcaagaacagaacaggccctatggggcatacctatggctttattgacctcgactcccatgcggattggcagcagtagcactgattaat

SEQ ID NO: 811938 - DNA, 100 bp, Homo sapiens
gggacagtttctggaagttataacgctacacgaagaactaagaatattattagcacaagagcaccatactttgagggtctctgctggtggttctgaagcc

SEQ ID NO: 811939 - DNA, 99 bp, Homo sapiens
gaagagaaggtggtgatcaaaggacaggtgatttggcttctgcacagttaggaggagcaccaaaccgatgggaggttttgtcagccacacctacaacta

SEQ ID NO: 811940 - DNA, 100 bp, Homo sapiens
tctgtcacagagggagatgtcaggtgggagaaaggggtggcactgaatcaacaagacaagcaactcaattgattaatgctttgatcaaggatccagacaa

SEQ ID NO: 811941 - DNA, 99 bp, Homo sapiens
tgaaaaccatcgcatagtctcacctaaaaatagtggtcctacaggtatggatctctggcagctgctgttgaccttggcactggcaggatcaagtgatgc

SEQ ID NO: 811942 - DNA, 100 bp, Homo sapiens
cccacagataaccaagtcagacttcgtaagagaaagtcggcagcctctgtgaagaagattttatgtgaagcccctgtggaatctgtggtgcaagtgtctg

SEQ ID NO: 811943 - DNA, 140 bp, Homo sapiens
gcctttggatgttactgccaatggctttccacagggaacaacaaagaaaacaattggaagccttcaggcaagtatgtccgtggttcagaccctgtattaaagcttttggacgacaatgggaacattgctgaagaactgag

SEQ ID NO: 811944 - DNA, 98 bp, Homo sapiens
acctctcccagcagctgggactaccgggctgtcaaatttacattaactatgagaattaagcagtctgaagatgatgagaaactgaaaaagaggaagga

SEQ ID NO: 811945 - DNA, 100 bp, Homo sapiens
atatccgcagggttcggatgagaccaggaggcaagtgaggcctatctggttggcctttttgaagacaccaacctgtgtgctatccatgccaaacgtgtaa

SEQ ID NO: 811946 - DNA, 98 bp, Homo sapiens
tgaaacaacccgcaaataaaggcttcagagccctgattatatcaccaacacgagaacttgccagccaggttattggaacccttccatgggtagtgaac

SEQ ID NO: 811947 - DNA, 100 bp, Homo sapiens
ccagcagccaagccggggcagtttcagtctccaccccaaatgcaggtctgagaaagaaccccagtttaagtttatctacttcaaccacatgaatctcgcc

SEQ ID NO: 811948 - DNA, 124 bp, Homo sapiens
ttctttgacagagagcaagtctgctcatgtgcagactcagactggccaaaattcaatccctgctttagctcagattttaccaaatgttgcaagaactctggagttcttatggtagtaaaatgcc

SEQ ID NO: 811949 - DNA, 100 bp, Homo sapiens
caagaacgagaggaggcgttggtcagaggagtcttcatgaaggtggtgaagcccaaggtgtcatggagaaactccagctgggcccagagattctgcagcg

SEQ ID NO: 811950 - DNA, 100 bp, Homo sapiens
cacctctgacttggatgccatagctaaagatgttttccagcattcacagcttctatatacctttgagaaagacttgcaagttttcagttgctctgtcaac

SEQ ID NO: 811951 - DNA, 98 bp, Homo sapiens
agcaagttcaccagcatccctgcagccttctggtataccatcgtcaccatgacaacactaggtgagccccatgcccgtttctacgcggcccagatcgt

SEQ ID NO: 811952 - DNA, 100 bp, Homo sapiens
ggaaccggatatttaagtacaatggtgggcttaattttaggggctaagccagctctaccataaccagagtcagggactcttatcccagctgcaaggacag

SEQ ID NO: 811953 - DNA, 100 bp, Homo sapiens
tgaacttttccaatggggaaattatagacatcttcaagccagtgcgcaagaccatattttacatccttccacgcctttcaggccttattgaagatgaatg

SEQ ID NO: 811954 - DNA, 100 bp, Homo sapiens
cttcaccatcttgggagaagaaggaagaaagtgaaagcgatgtggtccttcttagtcccaaggaccctgacagattttgagaagagggggaaaaaggaag

SEQ ID NO: 811955 - DNA, 98 bp, Homo sapiens
tggtgggcactcagcaccctctgcttaccacagccagcatttctggaaaggagtccattatcgctgggcatttttcatggccagtggcccatgtttag

SEQ ID NO: 811956 - DNA, 100 bp, Homo sapiens
gcgtacttgctgaggcaactgcaacgcgcagcgagctcaggtgcccctgtgatccaggtcttctaccctgaaaccccaccctccatcaaggtcctgcctg

SEQ ID NO: 811957 - DNA, 100 bp, Homo sapiens
ggtgaagctgccgttctttaatatgctggatgagctgctgaagcccaccgaattagaactgccattggatgtccagaatcccctgtagttgataatgttg

SEQ ID NO: 811958 - DNA, 100 bp, Homo sapiens
agaatccttttggcttagagatcactaatccatcttcagcttcaattacaatatgccttcaagacagtgtgttggctttctggaaacatgggatgcaggg

SEQ ID NO: 811959 - DNA, 98 bp, Homo sapiens
ctatgtttaaacagatccacaaactgaacagagaatggcctgtccagaagacagccaaatacatccttcaaacagacttcactgcaggagacagagtg

SEQ ID NO: 811960 - DNA, 146 bp, Homo sapiens
cggaatgatattgaaaaaatcgtctgtctcctgttttctaggtggaaagaatctgatgagccttttaggcctgttcagaaatggaccaattttgacaagatatagtgctgcagcgtgcctgatgggatatattcagtcatggcgtc

SEQ ID NO: 811961 - DNA, 100 bp, Homo sapiens
ctatgatgaagcagagaaaacagcaagcaacagccatcatgaaggaagtccatggaaatgatcacatgtacatgaagacaatggaaagttatttccttca

SEQ ID NO: 811962 - DNA, 100 bp, Homo sapiens
gcgacacaattgtctgtgacagtaacagtacttgggatcccccagttccaaagtgtcttaaagacttctccattgtggttggggtgctgttcccaatggc

SEQ ID NO: 811963 - DNA, 99 bp, Homo sapiens
tgaaaatcaagtagtgtttgccagagttgattgtgatcagcactactctcagcgttctcatctctcttccttcaccatgaagctgatggacaaattcca

SEQ ID NO: 811964 - DNA, 100 bp, Homo sapiens
tacgaggcggtgcgggaagtcctgcacgggaaccagcgcaagcgccgcaagacccagatgatgtggtaccagttggccaaagaagagcctggtgttggtg

SEQ ID NO: 811965 - DNA, 98 bp, Homo sapiens
ggctataagtggtctacggctctggctctaaggagacttcttggcatcatcacaaaaaaggatgttctgagacatatggcccagatggcaaaccagga

SEQ ID NO: 811966 - DNA, 98 bp, Homo sapiens
ctaccactcatccatcaagcctctggagcagtcctacaagtacaatgagctccggcagcatgagatcacaggaccagaggagcgagagcagcaagaac

SEQ ID NO: 811967 - DNA, 100 bp, Homo sapiens
ggcctcttcatgaaacagcagttttggtagaagatgtggtacacactcagttaattaatctggatgcatcatctgcagacatcagaaaagcatatcgtaa

SEQ ID NO: 811968 - DNA, 98 bp, Homo sapiens
accaagaactcaggcttcaagcgttctcgaacccttgaggggaagttaaaggtagctacagcaagctgggtagcaggcagatccaaaggatatcatga

SEQ ID NO: 811969 - DNA, 100 bp, Homo sapiens
caggggctgagcttctgcgctgtggagaagccagctctaagcgaaagacatgaggcctcagcctgaaatgaggttgttttgaggtcatctgatttctgac

SEQ ID NO: 811970 - DNA, 100 bp, Homo sapiens
tgatttccagaagtgcctcgtgaatatccaggcgcttctcatggaccctgaactccacgttggaaagtgcaagggtgaagttgaacaaattgctatgatg

SEQ ID NO: 811971 - DNA, 100 bp, Homo sapiens
gattgtgaagaagaatttcgatctccgccctggggtcattgtcagaaatgcttcggttacccacagtctttcgccagatgagaccggtgtccagggtact

SEQ ID NO: 811972 - DNA, 99 bp, Homo sapiens
ttggcaaatcaagcctagtgcttcgttttgtgaaaggccaatttcatgaatttcaagagagtaccattgggggaataattccggctaatgggaagatga

SEQ ID NO: 811973 - DNA, 100 bp, Homo sapiens
gtatctcgacactctgcaagattctctcctgaagtcccagaaaaaatgcctgtcttaaaggctgaagcgtcacattataactctgacttaaataacttgc

SEQ ID NO: 811974 - DNA, 100 bp, Homo sapiens
cctgccatgctatctgctctgctcagcgactgaaggtgcccgcatcccagctctgccaggaagcaaaggtggtagaaggacagcccccctgccctgagac

SEQ ID NO: 811975 - DNA, 99 bp, Homo sapiens
tcgtctcgcctcccgcgcgccggtaggatgtacagttacccagcacgtgtacctcctcctcctcctattgctcgggctgtagtgccctcgaaacgtcag

SEQ ID NO: 811976 - DNA, 100 bp, Homo sapiens
gagctgcagcatgttgtcaaggtgagagccagctgcagccttcctactgcagtgcctgctggggccaagatgaaccctaaggactctgcaatatgaataa

SEQ ID NO: 811977 - DNA, 99 bp, Homo sapiens
gtaacaagaagacacaagtttgacttagctgctcgcacactgctagcaagagcagaacaccttgcacagaatatatctaaatcgcatctggaaacctgc

SEQ ID NO: 811978 - DNA, 100 bp, Homo sapiens
agcaacgtcaactattacaatcgcttgtacaaaggagagtttaaacagccaaaacagttcattcatattcagcgcaggatggggaagcagaatagcaaac

SEQ ID NO: 811979 - DNA, 98 bp, Homo sapiens
ttcagggaacgcttaccaatgaaactcgatgcttgaactgtgaaactgactgtggaaactgaagtcattgcagagtttggatctgtcattcaatggga

SEQ ID NO: 811980 - DNA, 99 bp, Homo sapiens
gcttttgaagaaaatgtatgtactgacgggaaaaggaggataagcaagtcgaatttttgtcttacgggtgaaaaggaacagcctgtatttgcaatgacc

SEQ ID NO: 811981 - DNA, 101 bp, Homo sapiens
tcagtccagaaatgcagagctttgtgagataccacccacttctgatacaaagtcagatactgcaacaggaatcaacagtgagacaattatgaaaccagctt

SEQ ID NO: 811982 - DNA, 100 bp, Homo sapiens
gcctcgtgggagccccgcgggtcctgcccaggaccaagaatcgccttcagccctgtctggtgcatccttggcagaaagtgaggaggaaaacacccccatt

SEQ ID NO: 811983 - DNA, 98 bp, Homo sapiens
ctggtcctcctccacctcccacatttcatcaggttactattcgagcttcagttggacctctgcaatcaggagcttcacctacaccttccattagtgca

SEQ ID NO: 811984 - DNA, 100 bp, Homo sapiens
gagctgtgctggcactgcatcaggacctcttctccttggcacaacagttcacagagacctaaagccacacaacatcctcatatccatgcccaatgcacac

SEQ ID NO: 811985 - DNA, 100 bp, Homo sapiens
aatggaccaacttctttggcaagtggacattttactggctcaagcagcagaagatgtcgttttcattggacctgacacacatgctattcaagccatgggc

SEQ ID NO: 811986 - DNA, 100 bp, Homo sapiens
cgggcccacatcttccggccaacttccattgaacttcccagcactcgaaagggaccgaaatggagagcaaagagccatcatcaaccactttaaccccaaa

SEQ ID NO: 811987 - DNA, 100 bp, Homo sapiens
tgacctacctcacagcagggatgctggaccaacctggctttcccgactgctccatcgaggcagccatggtgaagagtggttcgcctccagcacacagagc

SEQ ID NO: 811988 - DNA, 100 bp, Homo sapiens
cgctgtacgccgagcacccaggcgactgcctcatcttcaagggagtgcatccgccccaacccttttccccctcgtctcctgtgagaattccccgtcggat

SEQ ID NO: 811989 - DNA, 101 bp, Homo sapiens
ttccacatcaagtgtttcacctgcaaagtgcaccaattccagctggacatcactgtgaaaatgggacgggataaagtccgagaaatgtttatgaagaatgc

SEQ ID NO: 811990 - DNA, 98 bp, Homo sapiens
gaaatgtgcgcaggattataatatgctttctgatgatgcccgtctcttcacagaggtgtggatgaggtcaccattgtcaacattttgaccaaccgcag

SEQ ID NO: 811991 - DNA, 98 bp, Homo sapiens
gaccccggcgtctccttctatgtgctgtgtccggacaacggctgcggcgacaattttgccaccagcccctcgggttccaagatgcagctactggagac

SEQ ID NO: 811992 - DNA, 51 bp, Homo sapiens
acaggctgacctggcctatcagcttcaggctggagcgcaatggcgtgatct

SEQ ID NO: 811993 - DNA, 100 bp, Homo sapiens
cacatgctcgcccagccacccccaggacgccttctgcaactccgacatcgctctccgaacagcaggatttcccaacggcagcttgggaaaaagacccagt

SEQ ID NO: 811994 - DNA, 100 bp, Homo sapiens
attgagatttgctgatggaagcataagaacatgagaactgcgactcagcatgcagaagatgagtgaccgaggaggtggcgttcctttgaggaaaattgac

SEQ ID NO: 811995 - DNA, 99 bp, Homo sapiens
aaacttaccctgatgatccatgctttccatcaaacacaatgaggcatatacatggacaaatcccacctgctgtgtgcataatatcattgtgggtaaact

SEQ ID NO: 811996 - DNA, 100 bp, Homo sapiens
cgcattttatgtggagcgaaaccacgtggatctggactcaggcctgagatggagtattcaaagcacaaagaaatgcagtaacttcctaaaggtttcacat

SEQ ID NO: 811997 - DNA, 100 bp, Homo sapiens
gcagacgcagtggtggccctggagcagtatgccagcaagcaccctggaggagaagaggttctgctggaacaagctggtgtagatgcaagtgaaagctttg

SEQ ID NO: 811998 - DNA, 100 bp, Homo sapiens
agcgacataccagtctctgtacccactcaccttgtttgtcccaggactcctctatctcctccagttcaatcaaatgcctggtaggaattgctagcgttgc

SEQ ID NO: 811999 - DNA, 107 bp, Homo sapiens
ggaagtcctcacaccgggtcagctcttccttatgttcctgaaggaactgcctcctgagcgtggagcctgccattagcaccaagcacctcccttaccagagcttccag

SEQ ID NO: 812000 - DNA, 100 bp, Homo sapiens
acaagtttgtcctggcagcccgcagtgacagctggagtctggctaacttgtcttccactaaagagttggacctgtcagttctcctgtgcctcctgttggc

SEQ ID NO: 812001 - DNA, 100 bp, Homo sapiens
cttccatatccgggtgcggctccaccccttccacgtcatccgcatcaacaagatgttgtcctgtgctggggctgacagactctgatgccagtatggactg

SEQ ID NO: 812002 - DNA, 119 bp, Homo sapiens
tgaagacgcggctggagcaggagatcgccacctaccgccgcctgctggagggcgaggacgcccaattgtggacctgacagtgggcaacaacaaaactctcctggacattgacaacactc

SEQ ID NO: 812003 - DNA, 100 bp, Homo sapiens
tctaaaccaacactcctagccaatggtggtcatggagtagaagggagcgatactacagatattgatgatgttaagaagttcaaaccgggttacctggaag

SEQ ID NO: 812004 - DNA, 99 bp, Homo sapiens
aagaacttatcagagattgagaatgtccatggatttgtttctcattctcatatttcaccaataaagctgaactaccagcagaaagtaggcatcatgtac

SEQ ID NO: 812005 - DNA, 100 bp, Homo sapiens
actggattataatactggagaggataaatcctcaaaaaatcttcttggttctgctacaagcgaccccctcctgcagttccaggacgaccatcctaacccc

SEQ ID NO: 812006 - DNA, 100 bp, Homo sapiens
catcacaaatgcaacttctggaggatcagctgaacagatcaagtgaacatgattaaagatgatgggacagttattcatttcaacaatcccaaagtccaag

SEQ ID NO: 812007 - DNA, 98 bp, Homo sapiens
ggctgccgctgcattaggggcttcctgaggaagcgcgggcggacgacagaggatgccgaaccactccagagagaagtatgagctccatgcagggactg

SEQ ID NO: 812008 - DNA, 100 bp, Homo sapiens
gctattaccacagtcaaagcaacagaaacaaaagcaggcaaatggagtcgttgggaatgtcctgggaactccaacaagggagcaaatcagagaaatgaac

SEQ ID NO: 812009 - DNA, 100 bp, Homo sapiens
ccggaagctctttgaccttctggatgtccttgagttcaaccagctgctacaggagctgagagaccctaccctcactttccgtctgcttggctcccccagg

SEQ ID NO: 812010 - DNA, 100 bp, Homo sapiens
tccgggtcttaaaggtgatcggggagcaattggctttcctggaagtcgaggactcccaggatatgccggaaggccaggtgcatggaggactgcaacagag

SEQ ID NO: 812011 - DNA, 100 bp, Homo sapiens
agaaaaaaaatgaccttcggtatattgaaatgcaggtggacccccaaaagtacaagggcatatttaacggattctcagttacacttaaagaggatggtgt

SEQ ID NO: 812012 - DNA, 98 bp, Homo sapiens
taaatgtggcatatagtccctactacaaaatttttcaacctggtcatgcttcaccccttcctccatctgctgcacctaccactgattctacagattcc

SEQ ID NO: 812013 - DNA, 100 bp, Homo sapiens
gttagacttctttgggaatgggccaccagttaactacaagtgggcgacagatgcgaaagaaacgagttccagtgccaagacgggaaatgcatctcctaca

SEQ ID NO: 812014 - DNA, 98 bp, Homo sapiens
atctcatcaaaaaggacaccagcaagctgttcaatgaggagatcccagcatggtgagtgcctacatgtacccagcaggggccactggggcgcaggcgg

SEQ ID NO: 812015 - DNA, 100 bp, Homo sapiens
gaagaagaatgtgaatggaaaccagatgaagaagatgagatttcggtggatccataaagaacccagccaacccgcagagggaggggaggggctgagctgt

SEQ ID NO: 812016 - DNA, 100 bp, Homo sapiens
ccttttagtgcaccatttgcagcgtgccaattatgtgcctgccttgaagctgaaccaaactctgaagattaatgttatgcttcaaggttactgacttttt

SEQ ID NO: 812017 - DNA, 100 bp, Homo sapiens
cagcactttttattaatttgatcagtgatccttcacgttgggaggaacatatgcagcagaaaaaagaggaggaagaagttcttaaagaagtaactgcaca

SEQ ID NO: 812018 - DNA, 98 bp, Homo sapiens
gaggcattttccccaaagtagcaacaaatatcatgagagcatggctcttccagcatctcacagtattgttgcagcatctggcagtgagactgaggatg

SEQ ID NO: 812019 - DNA, 100 bp, Homo sapiens
agaggccactaagcatttagaatgaggactcttgtgaagatatgagttgtggagaggagagtctcagcagctctcctcccagtgatcaagagtgcacctt

SEQ ID NO: 812020 - DNA, 100 bp, Homo sapiens
ggacgggaagcccaccgactttgaggatctggaggacggagaggacctgttcaccagcactgtctccaccctagagttgtcgagatgtccacagaaggag

SEQ ID NO: 812021 - DNA, 100 bp, Homo sapiens
cagatgattgctagctgtggccgactggtgaatgaacagaaagagcttgctcagggactaaataggaatagtttgccaactccacagctgaggagaagct

SEQ ID NO: 812022 - DNA, 100 bp, Homo sapiens
gatagtttgagagtaaatgggttaccagaggaagagctaagaaatctccaacctgctggtggctactaagaaagcccaggagtggcagcccgtctacccc

SEQ ID NO: 812023 - DNA, 98 bp, Homo sapiens
cttctgaaaacatttttgaaaagacaagccatcaaaactgccttcagaagcaaaaggtcttcgccaactatagttagtaacaaaagagtcagtaagag

SEQ ID NO: 812024 - DNA, 98 bp, Homo sapiens
ggatttgcaccccgtggggtggtgcacacagaacaacaaggtgttgatgccgccggacgtgggtgaatttgtaagtgatgtcctgctagttccagaaa

SEQ ID NO: 812025 - DNA, 100 bp, Homo sapiens
ctgagcctcctgaagcgggccaaggtgcacatcaagatctgccttctggagactgcgccgtcctcccgggagagccagaaagaggacatggctgctgggc

SEQ ID NO: 812026 - DNA, 98 bp, Homo sapiens
gcgggaccataagggcttaactcatatatttaacccccctccaaaaaatcgtcagtatttaaacagatcacatcatgcgtgagtacaagctagtggtc

SEQ ID NO: 812027 - DNA, 100 bp, Homo sapiens
agaaggagctgagtctccccagaagaggaagtttgaaacttggatttaactggccagaagcaggtattcaaagcagagaacaatccctgggtgaccccca

SEQ ID NO: 812028 - DNA, 100 bp, Homo sapiens
gatctggacagtggcacacagataccgtttattaaaagagctgtggctataagaatgtgccttttgatgaaagaactttatctttctacaatgaagagtg

SEQ ID NO: 812029 - DNA, 113 bp, Homo sapiens
aaaagcaagaaggaactgaaaagggaagcccggaatttgctcaaatctcatcttaaccttgctgactttggtgtgtctgccaagaatctgaagactctacagaaacgagattc

SEQ ID NO: 812030 - DNA, 100 bp, Homo sapiens
caccgccaagccaagctcaacctcaaatcagtactgagggcctcctgacaaggtgatccgggcgggccccgcaggaattttatcccctcaccggcctcac

SEQ ID NO: 812031 - DNA, 100 bp, Homo sapiens
ctcaagttgtttggctaaattcttcagttaccctgcagtttgtgaatttttgcagaacaataatttactatcaattatcagagcccatgaagcccaagat

SEQ ID NO: 812032 - DNA, 100 bp, Homo sapiens
cccctcccgtcccagcccccaacgccagcttcctgcaggcccagagccggcatgaactctcccaacgagtcggatgctcagccagcattgggcagccccc

SEQ ID NO: 812033 - DNA, 98 bp, Homo sapiens
gtgatggataaatcgaaaggagagcccgtcattagcgtgaaaaccacaagcaggtccaaagagagagctgctctttggcgtaaattgcaatcgattag

SEQ ID NO: 812034 - DNA, 100 bp, Homo sapiens
agcttggtgtacaggtggtcattacagaccctgaaaaactggaccaaattagacagaggaatttgaggatccaagggatgcagatgatgctgtgtatgag

SEQ ID NO: 812035 - DNA, 98 bp, Homo sapiens
ggacctgatagatgggaaagcttatctaaaggacagtctggcaagttctccggcagttctccggcgcccccaagccagccgcagggtctgagctatgc

SEQ ID NO: 812036 - DNA, 100 bp, Homo sapiens
cagagaaatgctaaagcagtactacattggtgatatccatccggttttgtagtgcatccctgagcatgagcacagaatgaagcggcgtttggatgaccag

SEQ ID NO: 812037 - DNA, 99 bp, Homo sapiens
acctgactgtggagatggcggctcagaagataaacgaggggctggaacacctcgccaaagcagagaaatagtatcagtgctgcagaatcagggcagaga

SEQ ID NO: 812038 - DNA, 98 bp, Homo sapiens
gtctccgcggaaatgttgtccaaagttcttccagtcctcctaggcatcttattgatcctccagtcgaggagtgtggccatctggggccgtgtggtatt

SEQ ID NO: 812039 - DNA, 98 bp, Homo sapiens
agcctgtcgcttgccgggcagctggtgagtcggtgacctggcctgtgagctttcaccaacaatcaccagtggtttacacaacattgcaaggagcattg

SEQ ID NO: 812040 - DNA, 99 bp, Homo sapiens
cacaatccatcattgagtgtgtcaaacagatctgcgtggtcatgttggaggctatgtccaaactgggtcttcggcaggttacaggagttactagagtca

SEQ ID NO: 812041 - DNA, 100 bp, Homo sapiens
cggcttctcccctacgcgctacacaagtggagctccttttcctccacctaccttcccgagcgatatgagtctcatccagtctgtgctgatctgcaggcca

SEQ ID NO: 812042 - DNA, 99 bp, Homo sapiens
gccccgctgccgctgctgctgggcctcttcctccccgcgctctggcgtagagtttgcagaaaaaacttcagcatgtgccaggaacacaacctcaccttg

SEQ ID NO: 812043 - DNA, 112 bp, Homo sapiens
cgggcggagacatggccaacatcgcggtgcagcgaatcaagcgggagttcaaggaggtgctgaagagcgaggagctccaagtacagcccagtatggaattaccgggagcgct

SEQ ID NO: 812044 - DNA, 98 bp, Homo sapiens
accacctggtcggggaggagaccatggctgactacctgctgtacaccctcaacaaacaccagcgctttgggtgccactgattaatgaacttgaatcag

SEQ ID NO: 812045 - DNA, 100 bp, Homo sapiens
gagcttccgggagggcggctcgcggaggcgttggggctgaacctctgctcccatggaaccggatgctgcaaacccagaatgcagccttccagccaaacca

SEQ ID NO: 812046 - DNA, 100 bp, Homo sapiens
gggatgaatcctcaagaatgtctgcctgtcattctggatgtgggaaccgaaaatgaggtggcctttttgaagatgtaactattagagctgggcattctcc

SEQ ID NO: 812047 - DNA, 100 bp, Homo sapiens
cgcctgccgtgcttgatgtgcagaaagaagccggacaccatgatcctaacaccaggcattttggagatcaaagatgggtagaaaagatgctgctactata

SEQ ID NO: 812048 - DNA, 98 bp, Homo sapiens
tcccgagtggctgggattacagtgggatgaagctctcttgactatgagtaaaggagaaaaggctcgactggagattgaaccagaatgggcttacggaa

SEQ ID NO: 812049 - DNA, 51 bp, Homo sapiens
tccgtatttatgggagctagaaggaattcgatgtcttctttccgtcctggg

SEQ ID NO: 812050 - DNA, 100 bp, Homo sapiens
tggatccagctcctatggtcgcctgggtccctctgagccccggggcatctatgccagtgagaggcccaagtccctaggtgtggatgtggaagcagccaag

SEQ ID NO: 812051 - DNA, 100 bp, Homo sapiens
tggactgtctctgtatagtgacaaccaagtgccttgctgttgaattctgtgatgtctgccttccgggctgagttcatcgccacaaggtctatggatttca

SEQ ID NO: 812052 - DNA, 100 bp, Homo sapiens
agtggagcaaatggtggctttcattggagttttgcggcctccaggtggtggatccaatttttcattaggttttgatgaaccaacagaacaacctgtgagg

SEQ ID NO: 812053 - DNA, 100 bp, Homo sapiens
caatgggcagaacgaattcagtgatatcattaagtccagatctggaaccacgtgaatgttgagggggcgacacacaagcaggtggtggacctgattcgag

SEQ ID NO: 812054 - DNA, 98 bp, Homo sapiens
caagatggcgtctgctagtagggtcgttcagctcatgatggagcagtccaagaagtcctccctcatggtggcccgcagtattctcaacaacaagctca

SEQ ID NO: 812055 - DNA, 99 bp, Homo sapiens
atagaagaaattgttctagtagatgatgccagtgaaagagtgaagctgtggtctaccaatctagacaactcagtggcaagcattgaggcaaaggctaat

SEQ ID NO: 812056 - DNA, 98 bp, Homo sapiens
tccgtccccgccccagagggcggaggcgcgcgctcgattccccccacgcggcggcgccgcctgtttacggctgaccaactgactgaagagcagattgc

SEQ ID NO: 812057 - DNA, 98 bp, Homo sapiens
tacaaattccctgaacttcctgaaatccagcaaacttccgaagtatccggagttactcgtggcttcctataacaacaatgaagatgcccctcatgagc

SEQ ID NO: 812058 - DNA, 100 bp, Homo sapiens
ttatttagttctggggagcgcctcgtcgacatgagtgatgtggaggaaaacaacttcgagggcagaggtgttgttatgtccaaagccatcttgccatgcg

SEQ ID NO: 812059 - DNA, 100 bp, Homo sapiens
tgttgcctaatccgtatattatggctccagggctgttacatgcctacccgggacttgcaacaaagcattgccagagaacctagtgctccttcaattccta

SEQ ID NO: 812060 - DNA, 100 bp, Homo sapiens
tggagtcctccacacatgcttgtaaaataaagagggctctgaactcctacttcgagcctccggtggaggagagcgccttggaacgccgacctgaaaccat

SEQ ID NO: 812061 - DNA, 100 bp, Homo sapiens
caggtcctcccagaccccgaggtgctggaagctgtgggggacaggcaggatgacgcaaaacacggtgattgtgaatggagttgctatggcctctaggcca

SEQ ID NO: 812062 - DNA, 98 bp, Homo sapiens
attctctacccagtctggcatgaacctcgagtggtcccagaaggctattcacgaaaagcagcagctctagagttcttaaaccgctttgaagaagccaa

SEQ ID NO: 812063 - DNA, 98 bp, Homo sapiens
gggatactacacctggccaaaaacttggtcctgatgtctgaccatggagatgtgagcctcccgcccgaagaccgggtgagggctctctcccagctggg

SEQ ID NO: 812064 - DNA, 100 bp, Homo sapiens
gttgtattcatcaataatgaaatgctgactaaggaacaaggtgatgtaataggaataccatttaatgtggatatggatagctcccagttgatccattgtc

SEQ ID NO: 812065 - DNA, 98 bp, Homo sapiens
ttagcgcactggaggagcggcgggcttcagacagaggttggaaagaaccatgactgtattcaggaaggcacatgaactgaagcttctgtcagaatgcc

SEQ ID NO: 812066 - DNA, 118 bp, Homo sapiens
agtgctgccaagctaaagaggaagtattggtggaaaaactgcaaggtagacccagtgtaatcacaagcatccttgtaagtggcaaagaggcagaggagacagcgccagagaggcagct

SEQ ID NO: 812067 - DNA, 100 bp, Homo sapiens
aaccttccagaaaagctcacagccttcaaaggattttcagtttagagcgctaaagaaggtgagaatctttgactcccctgaggaattgcccaaggaacgc

SEQ ID NO: 812068 - DNA, 100 bp, Homo sapiens
taaacagtggactcaacttcaaagacgttctcaaggagaaggcagacctggtactatactggcaattgctggagaagattttgcaattgttgcttctgat

SEQ ID NO: 812069 - DNA, 100 bp, Homo sapiens
aggctggactcggattcgttgcctgaggctattcagcttgaccctgaagaaactcgtcatgctaaaagaaatggacaaagatcttaactcagtggtcatc

SEQ ID NO: 812070 - DNA, 99 bp, Homo sapiens
cttaaaattgctgttttacagaaggtggcagtagagaagagcatcacagaagttgctcaggagctgacagagctggtggaacatcttgtagacattgtc

SEQ ID NO: 812071 - DNA, 98 bp, Homo sapiens
gttcaggagatggagagagggctgctcagtcttttgaatgatttccactctggaaaacttcaagcatttggttgttttggaaaccgaaataacaaata

SEQ ID NO: 812072 - DNA, 100 bp, Homo sapiens
acagatgtggagaagatgttttcggtggctatgatgatggttggctcggagcgtgctttggacaccatgaattttgatgttataaagggcaagccagtac

SEQ ID NO: 812073 - DNA, 116 bp, Homo sapiens
gacacggcctcttgacactcccaggcagcacagatagacggatccgaggataagatcaatgccctcattaaagcagccggtgtaaatgttgagcctttttggcctggcttgtttgc

SEQ ID NO: 812074 - DNA, 98 bp, Homo sapiens
ggatcttcatgccctgggttctgcccgcacggacccccatgctccctggggaagggaatgcagggttgctggggctgggcccagaagcagcagcacca

SEQ ID NO: 812075 - DNA, 100 bp, Homo sapiens
ggaacagctggaatgggagagagagcgcagaatatcaagtgctgaaatggtggagtcaatgaagaaagtagcagggatggatgtggagctgacagttgaa

SEQ ID NO: 812076 - DNA, 98 bp, Homo sapiens
agaagagtgagagagagctattagagattgtgaagaagaatttcgatctccgccctggggtcattgtcagcatttggaacagctccgcgcaaatagaa

SEQ ID NO: 812077 - DNA, 100 bp, Homo sapiens
cagagtccgactctcccacctgctaaggcattttgttcccaacatcacctttggtcaccctgtggtagaaagccttcgaaagcagctaggccaggaccct

SEQ ID NO: 812078 - DNA, 98 bp, Homo sapiens
agaaagccttgtaaccatcaggtagatacagcaccaacgacatttgaagacagtgatttgttccatttgattggtgttatctgtggcttagcaattta

SEQ ID NO: 812079 - DNA, 100 bp, Homo sapiens
ggaaggctcccctgttcctttttgctgacgtgtcatttctaagtactttctcctactccataaagacttcaaatccaggatgagaagactgataaaagaa

SEQ ID NO: 812080 - DNA, 117 bp, Homo sapiens
tttgaagccaccccggtcaaaggatgctgagtccggagcgcctagccctaccggactacgagtatctggcttctgggctggctggctgagaaactacctactcttcgttccacccct

SEQ ID NO: 812081 - DNA, 100 bp, Homo sapiens
tggactcggtccgtggcttcggaggcaagtttggtgtccagatggacagagttgatcaggaaagaccacagcaagattctttcattcgtctcctcctagc

SEQ ID NO: 812082 - DNA, 98 bp, Homo sapiens
acttcctgcgcttccagcttaccatgcggctgcgctccataaaggcagacgacaagagccagcccctgggcaacaaagtggaaatggagattgtgagc

SEQ ID NO: 812083 - DNA, 99 bp, Homo sapiens
gaataaaacagctccagtacaagcacctcctgctccagtaattggtggattggtgatagaaaagcagtgctttgatcccacctgtacacacattgttgt

SEQ ID NO: 812084 - DNA, 100 bp, Homo sapiens
tggggccctttgggacgagtgctgtgactgtgttgttaatggccagccaagaccccttgaatcaagtcaggtgaaatatctccgtcgagaactgatagaa

SEQ ID NO: 812085 - DNA, 100 bp, Homo sapiens
ctactccttctacaggtgtgtatgagaagagcaagttagtaccttgtaccaaaacatcaaccttgtggagccaagattaattcagccatatgaacatgtt

SEQ ID NO: 812086 - DNA, 99 bp, Homo sapiens
actggatcaacaccggggagtctgcggtattaaaggtggaagaaggtccatatctttttctgtgggtgcttcaagtgttgttggaagtggaggcagcag

SEQ ID NO: 812087 - DNA, 100 bp, Homo sapiens
aaaaacacaaatgaattctataagaccattccccggttttattataggcacgcactcctggctttaaagtttatacttgcatttgccatacctgataagc

SEQ ID NO: 812088 - DNA, 100 bp, Homo sapiens
ttactcaaactgaaacgtctcctgcatcagggaaatgatgtcactctgaaactcaggctggaatacactggcatggtcatacctcactgcggcctcaaac

SEQ ID NO: 812089 - DNA, 100 bp, Homo sapiens
ggaactggatttctctcccgcctgccggcctgcctgccacagccggactccgccactccggaagatgaagtcctcagtacattctgaagaagatgatttt

SEQ ID NO: 812090 - DNA, 98 bp, Homo sapiens
ccctgcagggaccatggaatccagagctgaccctgggcgctgcctatggcacagccaagagcggtaccggcattgcggccatgtctgtcatgcggccg

SEQ ID NO: 812091 - DNA, 100 bp, Homo sapiens
ggataatccaaagattcagctgacatttgaggctactctccaacaattagaagcaccttataacagcttcacaggctgctcaagaagccgagatcaatgc

SEQ ID NO: 812092 - DNA, 100 bp, Homo sapiens
catgctgagaaactgatgaagctgcagaaccaacgaggtggccgaatcttccttcaggatatcaaggactagtgacacaatagtcctttcccaaaaggag

SEQ ID NO: 812093 - DNA, 100 bp, Homo sapiens
atacttgaaccagtgttgccatttcactctggaagatatgctctatgctgcttcatccataaaggtccgggcccaccagctggtcttgccaccttgcgac

SEQ ID NO: 812094 - DNA, 99 bp, Homo sapiens
ggaagcctttttggtggcatggtcctcaagaagttcctaaaagggagtcgtcgcatggtggatgtcatggacgtgaacacacagaaaggcattgaaatg

SEQ ID NO: 812095 - DNA, 100 bp, Homo sapiens
gtggaaaactgtttactcgaagagaacatgtaaaaagacattccctggagctggagccggaggagccgcgctcatggcgttcagcccgtggcagatcctg

SEQ ID NO: 812096 - DNA, 100 bp, Homo sapiens
acttctaaatactccagtccttttccatgcactggaggagaggtgttacctcattttgaaagtcttgggaaacaggaaaaaattcctaacaaaatgtcag

SEQ ID NO: 812097 - DNA, 100 bp, Homo sapiens
agctgaggtccagatgaaagagaagtttctggtcactccccaggattatgcgcgggtgtgcagaaggctatgcccgcgacgccacggagattcagaacat

SEQ ID NO: 812098 - DNA, 100 bp, Homo sapiens
gtcggagaacatcgccaagcagcaacagctggcagcatcacccccggacagcaaggcagtgctcggaatgtgaccaggcagggagcagtgacatggaagc

SEQ ID NO: 812099 - DNA, 100 bp, Homo sapiens
tttttgcctcgtttgatcgcagagcctggcctcatgttaaacttcagcgcaactgcccttaggagcaggatgattgaaatgcccttatgaaacagctgtg

SEQ ID NO: 812100 - DNA, 100 bp, Homo sapiens
gaaaaagctacaggaggaagggtggctggaaggagaactaaatgggagaagaggaatgttccctgacaatttcgttaagcagccaacagagcagtcagca

SEQ ID NO: 812101 - DNA, 98 bp, Homo sapiens
ggagatgatcgatgaggtggacgaggacgcctcggaactggcttctgtttgcatgccacgcaacaaatgaagtagcccagctcatccagggagggcgg

SEQ ID NO: 812102 - DNA, 100 bp, Homo sapiens
catcaaggtccagaatcttccagtacgctctacaggatcaaagcaagttggagaaacatcagcacctggagacaccttagatggcacacctcgtactctc

SEQ ID NO: 812103 - DNA, 100 bp, Homo sapiens
gataccacaccaacagttgctggacagtttgaggatgcagatgttgatcactgaaaatgatttatgcaagtttaagttgtggacatcggatacccaagga

SEQ ID NO: 812104 - DNA, 100 bp, Homo sapiens
aagagtgacaagaaagagaacatggaggaacttctgaacctttgttcaggaaaattcacttctcaggaaactcatcactgctatatatgcagattatgcc

SEQ ID NO: 812105 - DNA, 98 bp, Homo sapiens
ccggccatggcggacaacgagaaactggacaaccaacggctcaagaatttcaagaacaaaggccgcgacttggaggaccaagaatcgccttcagccct

SEQ ID NO: 812106 - DNA, 100 bp, Homo sapiens
gacgtcttcctgtatagagcgtacctggcgcagttaaaactagtcctcgaaaacctcgtgggagacctagaagtggctctgaccgaaattcagctatcct

SEQ ID NO: 812107 - DNA, 99 bp, Homo sapiens
ctgcttttcccagaacacagagagcagaggtaatgtttgaaacttaccagttttccggtgtatatgtagccatccaggcagttctgactttgtacgctc

SEQ ID NO: 812108 - DNA, 98 bp, Homo sapiens
gatttccagctaggatcagatgttccagatcctgggatggttaacgaaggcacaaaatgtggtgctggaaagtcggtggtggggagcggcagctggca

SEQ ID NO: 812109 - DNA, 100 bp, Homo sapiens
agatcacacgcccactaaagcccagaagaatgtggctaccagcgaagtgacactccattcagggtaatggacaagatggagtttgcagaggcgaggaaaa

SEQ ID NO: 812110 - DNA, 100 bp, Homo sapiens
cggccctggctgggggaaccactatgatcatttccctgaaacctgggctcttgaagacgcatcactggagcagatggataatggagactggggctatatg

SEQ ID NO: 812111 - DNA, 98 bp, Homo sapiens
ggacccctgctacgtggagaaaacctcggataaggcatcccgggcccaaatcctagacaaagccacagaatatatccagtatatgcgaaggaaaaacc

SEQ ID NO: 812112 - DNA, 100 bp, Homo sapiens
acttgcaaacatcagggatgaagttggcaaacaacatgggtgttggagtggttggaattatagagtgtaatttccttaagccaactcataataaacaaga

SEQ ID NO: 812113 - DNA, 99 bp, Homo sapiens
gctaagactccaggacacccctgaagccgagaaatgtactatactggcaattgctggagaagattttgcaattgttgcttctgatactcgattgagtga

SEQ ID NO: 812114 - DNA, 100 bp, Homo sapiens
caagaagaatgacaaataatcaacagaaaacccgtattcttcagatatctccggagcatttggataatgtgacagttggaatgcagtgatgtcgactctt

SEQ ID NO: 812115 - DNA, 98 bp, Homo sapiens
ggtactgttgaaagcgacaagtggaggcgccgctctagcggccgggactctgaactatggcggtggctacagtttcagaaaagtcacgtataatggaa

SEQ ID NO: 812116 - DNA, 99 bp, Homo sapiens
gcgcacattggtatgatgtggaaggtactatggatatagaggagagaaatcgccaaatgaaaattaacaaatacaaacaggtagccggatcagatccca

SEQ ID NO: 812117 - DNA, 100 bp, Homo sapiens
tggattacaggccaaattagcaacctccaagtctattataaatagtatgctacgggacccttctcagattccagatggagttctagcaaatcaggtctat

SEQ ID NO: 812118 - DNA, 100 bp, Homo sapiens
agttagctaaagaactccctcaagtttcatttgtgaaggagctcttgtccctggcaaagcgaaagcgcagtgactctgaggagaaggagccgcctgtgag

SEQ ID NO: 812119 - DNA, 100 bp, Homo sapiens
ttacactccatacgcaaaccgcgatacattttgctgaacaaatagcaaagtgcatgcagcccctgtcatgtaccgcctgtttgctcaaatcaatcatgac

SEQ ID NO: 812120 - DNA, 99 bp, Homo sapiens
agaccgcgctgggttgccgctgccgctgccgccatcgtgccagcccctcgggcacattgcaagcaacccgtgccttgatggtggttggcatcctcctgg

SEQ ID NO: 812121 - DNA, 100 bp, Homo sapiens
cccagcgaccactgcagcctgcggacgaggccgggacttggccgagcggatcctaataaggggaaaatgatttgaaaaagggcgcatctatacgttcatt

SEQ ID NO: 812122 - DNA, 98 bp, Homo sapiens
gcgctccttcggcatgaccccagtgctgcctgcattcgcggggcatgttcccgaggctgtcaccagccagagactgctgctactttgaaacgtacgat

SEQ ID NO: 812123 - DNA, 100 bp, Homo sapiens
tcaagggcatgaggcgcgatgagaagaagagcacaggattgattatgtcaagtggccaggcatggaaggagcaaagaaggttcactctgacagcactaag

SEQ ID NO: 812124 - DNA, 98 bp, Homo sapiens
cagccgggacgagctgttccgccggagcccccggcccaagggcgacttctccagccgggcccgcgaagtggttgatatccctgaaagtacttaatagc

SEQ ID NO: 812125 - DNA, 100 bp, Homo sapiens
actactaggatcacgcggcatgtattgaggaattactctcacttccaccacccgatgtatggaaactgctatactttcaatgacaagaacaactccaacc

SEQ ID NO: 812126 - DNA, 98 bp, Homo sapiens
tgaatgtgaccctgctgagatctcctaagcggcactcagtgcaaataacaatagcaactcccccagcaggtagacgttacatccaagaggaaataatc

SEQ ID NO: 812127 - DNA, 100 bp, Homo sapiens
agggccttggaccccgcggcgcccctcggcctcggagcaacgagcgcagcgccgggtgaggtggctttgaccccgggttgcccggccagcacgaccgagg

SEQ ID NO: 812128 - DNA, 99 bp, Homo sapiens
aaatctttcagaagttgtcaacagtatagtttgggttcgccagttggaattgaagtgcaaaatggcaactcttaaggaaaaactcattgcaccagttgc

SEQ ID NO: 812129 - DNA, 100 bp, Homo sapiens
ggactcaagcgatcctcccaccacctcagcctcctgagtagctggaaccatcatatgcaccagcacgcctggctaaatgtcatcacaatggatcccaaag

SEQ ID NO: 812130 - DNA, 101 bp, Homo sapiens
ttagatgatgattataatggacaagccaaggagacccggtgagcctccattgataaaaggttggcttccttatcttggagtggtcctgaacttacgaaaag

SEQ ID NO: 812131 - DNA, 98 bp, Homo sapiens
cctctgtcgcgccgtgacctgtacaggtcgcgggagtcgtagggaggacgccgggacacctggaagccgagaaatgcccgagcgggaagaagttccgc

SEQ ID NO: 812132 - DNA, 100 bp, Homo sapiens
tccagctaggatgatcgaggttgtttgcaacgaccgtctggggaagaaggtccgcgttaaatgcaaatcttcatcataaaagaggagaaacagataaaag

SEQ ID NO: 812133 - DNA, 98 bp, Homo sapiens
catagaggatgtggatgccctcaagtcctggctggccaagttactggagccgataaaccgaaacttcattgccccttcaatgtgggaatccagccaga

SEQ ID NO: 812134 - DNA, 100 bp, Homo sapiens
acctttgagcatacaccgagagagtgaggagccagacgacaagcacacactatggcgctgaaacggattaataagagtatctgactgtcttctctcagat

SEQ ID NO: 812135 - DNA, 100 bp, Homo sapiens
aagatatccatagtaacacatacaattacaaaagcactttttctgtggaaattgttccaatatgcaaggttttcatcctgcagctggagggagagaaaca

SEQ ID NO: 812136 - DNA, 100 bp, Homo sapiens
tagagaagctcaataacctccaagcagtgtttacagaagttaaatgaagttcgaaagagattgaatgagctaagagaattagttcattattatgaacaaa

SEQ ID NO: 812137 - DNA, 99 bp, Homo sapiens
cttgaacagggctgacaacatttttccttttccgtccgggaccatgtctggagaactaccaccaaacattaacatcaaggaacctcgatgggatcaaag

SEQ ID NO: 812138 - DNA, 100 bp, Homo sapiens
attgggagatgcacagctaagatgccaggaccacctggaagcctagaaatgcgagcccacagcctcggtgccccccgagtcggacgtgtaccggatgctc

SEQ ID NO: 812139 - DNA, 99 bp, Homo sapiens
tcatcacggacgagaactggagagaactgctggaaggagactggatgatagaattaaactaattctgaagcaagcccttatagttgtgctgcagtggtg

SEQ ID NO: 812140 - DNA, 119 bp, Homo sapiens
ggttctgcagcgctgtatcgtgtcgccggcagggaggcatagcgcctctctgatcttcctgcatggctcaggcaatggcgaactgagcaataaggaatttgtttccatcatgaagcaac

SEQ ID NO: 812141 - DNA, 100 bp, Homo sapiens
cccaaagttgcatttcctcgtcgagcgcaacccaagcaaaaatattttgattctggggattacaacatggctaaagcaaaaatgaagaacaagcaacttc

SEQ ID NO: 812142 - DNA, 99 bp, Homo sapiens
gaagaaaacacaggagccggagcagaagcaaagagggattaaagcctgtggtttccacagaagcaccacctatcatatttgccacaccaactaaactga

SEQ ID NO: 812143 - DNA, 98 bp, Homo sapiens
ggaggaggacctgggccgcctaggcaagacagtcgacgcgctcaccggctgggtgggttcgagcaactaccgggaactttatattgctgttggaatat

SEQ ID NO: 812144 - DNA, 100 bp, Homo sapiens
ggatcccagcctcaggcgtgcgcggacggtgtgcgggtttgccaataggattatcctgctgccatcatgtcttggtttgttgatcttgctggaaaggcag

SEQ ID NO: 812145 - DNA, 98 bp, Homo sapiens
tttgatgtgtccaacaaccacatctactggacagacgtcagcctgaagcccgaagatccctgttttgcatctcaaaaccgtgtgtacaatgacattgg

SEQ ID NO: 812146 - DNA, 98 bp, Homo sapiens
gccggagggcctgggccgagctgctgggtgaaatgacaatggatgctctgttggctcgattgaaacttctgaatccagatgaccttagagaagaaatc

SEQ ID NO: 812147 - DNA, 100 bp, Homo sapiens
agaggcactgatgctcctgggagctcttctgactggatccctgggtccatcggccgtgttgccgcccgctgtgctatgagcagtcagagcgccgtctcca

SEQ ID NO: 812148 - DNA, 122 bp, Homo sapiens
tttatcactgccttcttgggaattgcttcgtttgccattttcttatggagaactgtccttgttgtgtttttggctgaatacacaggacctctgctaatatacctcctcttttatttgaggat

SEQ ID NO: 812149 - DNA, 99 bp, Homo sapiens
gcatgccaggcatttttctagatacattagacacatctctgatgctcaccacagttcccagaagataaaagaatcagagtgtctcaacccttgacaaga

SEQ ID NO: 812150 - DNA, 100 bp, Homo sapiens
caggagaaccacgacgagacctacggcgtgccctccctggaggagctgggttgaggaacaggttagcaccactgagagagtgtttcaggatagacaatat

SEQ ID NO: 812151 - DNA, 100 bp, Homo sapiens
agagtctctatagagatgggatggcccctatggtgaaatctaccagcagaccaaaatgcaaaatgatgcttcaacacccaggccaggtctctgcctcgga

SEQ ID NO: 812152 - DNA, 98 bp, Homo sapiens
agagcaagcagctgacattctcatgacaacagccaggaacctccctttccttatcaagaaggatgcacaagatgagattgccccagtggaaaatgaca

SEQ ID NO: 812153 - DNA, 100 bp, Homo sapiens
gctgacatctatctcctggacgatcctctcagtgcagtagatgcggaagttagcagacacttgttcgaactccacccacacagaatatgcctatgggtcc

SEQ ID NO: 812154 - DNA, 100 bp, Homo sapiens
ttaggctttcttccctggcacatcagattgactgagattgtgtatggcatgaattgccttattcagtttgaagattttgccaatgtgaatgcatttcgtc

SEQ ID NO: 812155 - DNA, 100 bp, Homo sapiens
actgcatgctccagattgtttgtcgagatgggaaaacaattagtctttgtgcagaaagcacagatgattgctttttattcgacttgaatcaacatttaag

SEQ ID NO: 812156 - DNA, 100 bp, Homo sapiens
cgcacttaaaataattgggcagaagagaagcagtgaaggagtgcagaggcatcacctgaaagcatcagacatcgatgagtcatcagtgatgcagctggcc

SEQ ID NO: 812157 - DNA, 100 bp, Homo sapiens
cccggagctggaatacattcccagaaagaggggcaagaaccccatgaaagctgtgggactggcctgttggtagctggcagtgttgtgatggcttttgaag

SEQ ID NO: 812158 - DNA, 98 bp, Homo sapiens
aaaggtgatctggacaaaggaacaggtatctcaggtggtatcacggaaaacttgacagaacgatagcagaagaacgcctcaggcaggcagggaagtct

SEQ ID NO: 812159 - DNA, 100 bp, Homo sapiens
agttcttggaagaagcttggagcgcttaaacaggctggagaccctggccgccattggagccaaacaggcaggactcgtgaaattgtgatgccttctagga

SEQ ID NO: 812160 - DNA, 100 bp, Homo sapiens
acgaagaagtgcttcagcgggccaggaagcgcatccaggagttacagcaattggaacttgcacagatacagcatagagacgctaatctcacagctcttgc

SEQ ID NO: 812161 - DNA, 100 bp, Homo sapiens
gactagacgccagttagccttgaagggcgacataccttctgttgaataccttttacaaaatggaagtgatccaaatgttaaagaccatgctggatggaca

SEQ ID NO: 812162 - DNA, 98 bp, Homo sapiens
gcgggatctgaagacctcaccaaggtcattaaacagctgatgaaaaaggaattcactctagagttttcacgtgacagaaagtcaatgtcggtttactg

SEQ ID NO: 812163 - DNA, 100 bp, Homo sapiens
gaaggcagagcagcgttctcctcagcacagaccttgggggcactgcctcgctttgggacaactcggggccgcatcaacgtggatcaatcttcctgtccta

SEQ ID NO: 812164 - DNA, 100 bp, Homo sapiens
ggctttcaatcaacccaaggtgatgcttttgctacgacctcattttctgctggaactgttcaaggagcagggacaagttacaggaatgttctccaagcag

SEQ ID NO: 812165 - DNA, 101 bp, Homo sapiens
tgaggcttctgtgctcctggcttcttacgccgtccaggccaagtgcaagcatctcttggcagtttacctgagtcaggttatgaggacctgtcagcagctaa

SEQ ID NO: 812166 - DNA, 98 bp, Homo sapiens
ggagtactcattcctgtaatagctgtgatttggagcaagaggtggtggtggccttcccccgaagaaatttggtaatcctggggagcgtttgcgtaaaa

SEQ ID NO: 812167 - DNA, 99 bp, Homo sapiens
tgcctgcctattctctctacgactacctcaggtggtcgagatatccagtctgacggagcacttgctgacggaatgtgacaaaaaagacgggtttggaaa

SEQ ID NO: 812168 - DNA, 98 bp, Homo sapiens
agcactcagctctccaatctgggaagcaccgagactctagaagaaatgccctccgggtcacaggataaggaggcctcgtgtgcttacgtgctgatcgt

SEQ ID NO: 812169 - DNA, 98 bp, Homo sapiens
tgcagatccgcaggcgcaaggcttcaggcgacccgtactgggcctactctggttgccatgtcaaatcttagcgaggctgtgcaggatgcagacctgct

SEQ ID NO: 812170 - DNA, 100 bp, Homo sapiens
ggagaagctggccaagaaggcggagaaggactccaaggcggagcaggccaaagtgaagaagccccaccgtagagatgccttcttcggtgacggcgctggg

SEQ ID NO: 812171 - DNA, 98 bp, Homo sapiens
gtcattataccttcacccagcatttcatccctcgtcgaaaggattggattggcatctttagatggcatggcagagagaaatgctaattttgaagccct

SEQ ID NO: 812172 - DNA, 99 bp, Homo sapiens
tccagccgaaggagaaggggggacttgggaccctggaggactgacgctgctggcctgggcgtccccttccgctgagccatggcgactcccgacgtgagt

SEQ ID NO: 812173 - DNA, 99 bp, Homo sapiens
gcaagatgatccaccagcggttccatcctacacttggctgagatctgtatctgtggacctgaatgttgatccctcgcttcagattgacatacctgatgc

SEQ ID NO: 812174 - DNA, 98 bp, Homo sapiens
tttgtcctgtcctggatcagtttctttgtcatgtagccaagactggagaaacaattctggctcttgctgattgaattcctttggtgcagtttagcatg

SEQ ID NO: 812175 - DNA, 100 bp, Homo sapiens
agtttgagccatcggatctaagatccaaaagggtggttctcttcccaaagtggaagccaaattcatcaattatgtgaagaattgcttccggatgactgac

SEQ ID NO: 812176 - DNA, 100 bp, Homo sapiens
tcgggaacagcagcatgtcatggaagaattatttcaatccagtttcaggaggattgccagaagagctacgaagtgaagagtgtcctcggaaaggaagtgg

SEQ ID NO: 812177 - DNA, 98 bp, Homo sapiens
acagacttcacagagaatgcagttgtcttgacttcagggtcctgctgcgtgtccgcatgctgtactacctaagacaagaagtgataggagaccaggcg

SEQ ID NO: 812178 - DNA, 98 bp, Homo sapiens
catgttccctccaaactagatgccgagaaacttgttggtagagctgttggagccagcagacctgactggagagaactggatgatgagctcatgaaaga

SEQ ID NO: 812179 - DNA, 130 bp, Homo sapiens
atcgtgaccgagaccgtgaccgagagcgtgaccgagagcgcgaatatcgtcatcgttagaagccgcggcgagtcctttgcacatgttggcaacacacgcatccgcatcggcctccctgcccacaaagcgc

SEQ ID NO: 812180 - DNA, 99 bp, Homo sapiens
tcgccgtgctctctcgcggcggccggcggggcccgcgctgcagccggagacccggagaaagggtggcatggaatattcacatgggagagccgcatgagg

SEQ ID NO: 812181 - DNA, 100 bp, Homo sapiens
ggctggctgccttccgcctcttcaagtgggacctgatgcagaacatcatgaatgacatgccgatctacatgtactccgtgtgcaacgtgatgtctggcga

SEQ ID NO: 812182 - DNA, 100 bp, Homo sapiens
aggagagtgggcgtctggcggggtccgcagtttcagcagagccgctgcagccatggccccaatcaagcttcaacagctgcaggagcacttccctatcagg

SEQ ID NO: 812183 - DNA, 99 bp, Homo sapiens
aaacaatgaaatcaagtttcagcgtggacaggatgtgatccgagccatgaatgtcaatcccaagatttcattccctcctgtcgttgacttttgccttct

SEQ ID NO: 812184 - DNA, 99 bp, Homo sapiens
aaatcaagaaccttaaagagcaactttctatgaaaagactctgctaacaccagatagtggaaagaaaccatgtgctgaaatgtttgacgacactgatgg

SEQ ID NO: 812185 - DNA, 60 bp, Homo sapiens
cgagccccagattattgcccagagacaatgcacccagtcagcttgaagagtttcaaatgg

SEQ ID NO: 812186 - DNA, 100 bp, Homo sapiens
gcccgcgctgctcgccccgagccaggagaacgagctcgaggaggatgcctgggcccctgtgctgactccttagttgctgagatgagcttgtaaaaagcag

SEQ ID NO: 812187 - DNA, 98 bp, Homo sapiens
ctgttttggggaggctgctgcgacgaagagttccctcagcctccggccttgtgtgtccgactcggcagcagtggtgctttactccatgaactgtctaa

SEQ ID NO: 812188 - DNA, 100 bp, Homo sapiens
gagagagtcgttcgacctgctgctgagcagtaaaaggtttcgaaaaaacgatgaaatgaaagctatggatgttttaccaattttgaaggaaaaagttgca

SEQ ID NO: 812189 - DNA, 60 bp, Homo sapiens
ccgtccgccgccaccacccactccggacacagggactttgaacatgtcggggatcgccct

SEQ ID NO: 812190 - DNA, 100 bp, Homo sapiens
ttcctgcagatgaaaaagtgtgacttggcagctgatcccaactgggccagtttgaacttgggagccctcatgtgcatcgaatgctcagggatccaccgga

SEQ ID NO: 812191 - DNA, 100 bp, Homo sapiens
ctgtgccaggtactccatgtttgcagctaaacttctgactcacatgatggcagccagcttaggtacacagaacactctgctccagccaaggtggtgaggg

SEQ ID NO: 812192 - DNA, 100 bp, Homo sapiens
acagtaacagtacttgggatcccccagttccaaagtgtcttaaaggagtcggatggtcagggctgccctttctgtcgttgtgaaataaaaggaactgagc

SEQ ID NO: 812193 - DNA, 98 bp, Homo sapiens
agagaggcaccgctggaacactaatgaggtccacaaggcgattacaatttccagtcccctaaccacagacctgactgcagagctgtctggtgggccaa

SEQ ID NO: 812194 - DNA, 101 bp, Homo sapiens
ccgcgccccatccgcaacctggaggtcaagttcaccaagggcgcaccctacgacgcgcacaccaccggcatgaccggcgccatcagctaccacccgtacgg

SEQ ID NO: 812195 - DNA, 98 bp, Homo sapiens
agtctcaaggatccttcaaataacttcaggggagttctgggaaatcgttcattcatttacagatgaacagaaaagactcttcttgcagtttacaacgg

SEQ ID NO: 812196 - DNA, 100 bp, Homo sapiens
gtctggctgctgcggaccccgccgagtcctagcgcctggcctgcgcgccgctgcccgcgccacagatattcctatcattccggatctggaggaagtacag

SEQ ID NO: 812197 - DNA, 98 bp, Homo sapiens
gaccgtgggcagccagggtcggtgaagctgtccagaccaaaacgaagaagacgttagccaaacccaatataaggaatgttgtggtggtggatggtgtt

SEQ ID NO: 812198 - DNA, 100 bp, Homo sapiens
ctcccagcgatatcctggatgagaagcagatctgtggatccataaagaacccagccaacccgcagagggaggggaggggctgagctgtgaggagagcggg

SEQ ID NO: 812199 - DNA, 100 bp, Homo sapiens
tgatccatgaagatggcatcattcgtccttatgacagacaggaatctgagggctctgacttacttgaggatgttccagatgaccttgatggtgcccccat

SEQ ID NO: 812200 - DNA, 100 bp, Homo sapiens
aaattctgaactcaggacttggcaaattcaaccctatgaaaagataaaggccaggggcttgcctgataatatatcttccgtgttgaacaaactagtggtg

SEQ ID NO: 812201 - DNA, 98 bp, Homo sapiens
ctcagaagataaacgaggggctggaacacctcgccaaagcagagaaataagcaccccaagatctggctacctcgggccctgaggcagacctacatccg

SEQ ID NO: 812202 - DNA, 132 bp, Homo sapiens
tccactgactcctacctccaaagtttatactatcagaccttattttcctaaggatgagcaattgtgggcacacttgaagctgaaaaagaaagaagaaaatctgggctatcctcaagagttcagtttcgaaac

SEQ ID NO: 812203 - DNA, 100 bp, Homo sapiens
tcgagtgtacacactgcgagctactttctgactgcccgcctggcactgaagccgagctcaaagtcaccaggagactaaagtccatcaaaaacatccagaa

SEQ ID NO: 812204 - DNA, 100 bp, Homo sapiens
ttcggaccctggcctcttgggatgcaaaggtgcgaggaagtggctggagtggaggaaggaggttgagctgctctcagatgtggcctactttggcctcacc

SEQ ID NO: 812205 - DNA, 99 bp, Homo sapiens
cgcacgcggcgatatggaagaggagggcaagaagggcaagaaggaattgaaagatgttggccatcgtgatcagatggctgcagctagaggaatcctgca

SEQ ID NO: 812206 - DNA, 98 bp, Homo sapiens
cagccacatactatccgtttgttcaggaaccaccagtgacagaaagttttcatgggctgagctgctgagttcagcctgggaactgaggccaacaaggg

SEQ ID NO: 812207 - DNA, 99 bp, Homo sapiens
gaaaattttccttgacctttaggtgcttttatattcatctcaaaaacaaaattctgaactcaggacttggcaaattgctacgctttacatatggtcctt

SEQ ID NO: 812208 - DNA, 100 bp, Homo sapiens
gcttaaatgatgtattttgtgatcgcagcgatgaaagtggtctaccatcacggcaacagtgcgacgggcggccattacactacagacgtcttccagatcg

SEQ ID NO: 812209 - DNA, 99 bp, Homo sapiens
agaaacccttgctgtaaattatgagaaagaagaagaattcctcactaatgagctctccagaaaattgatgcagagtgtgaacatggctacgcctcttca

SEQ ID NO: 812210 - DNA, 100 bp, Homo sapiens
tgcagatcaccgggggcgccctggaggagtccctgaagatctatgctcctctgtacttgaacggccggtttgtgggcgatgctgaccttgaaagacagaa

SEQ ID NO: 812211 - DNA, 98 bp, Homo sapiens
tgaacactcaagtgaagcaaaagccttccatgattaccggctctaattagaggaaatcgtaaaaactgtgctcaattttctggctccctcgactggtt

SEQ ID NO: 812212 - DNA, 100 bp, Homo sapiens
tgatttagttgattctctgaagattgtaaaccatggctgtgtggatacaagctcagcagctccaaggagaagcccttcatcagatgcaagcgttatatgg

SEQ ID NO: 812213 - DNA, 100 bp, Homo sapiens
tgtttgttcatcagactcttcaccagaccatacccttttgtgttattctactctaaatttcatgggctagaaatgtgtgttgatgcaaggacttttggga

SEQ ID NO: 812214 - DNA, 99 bp, Homo sapiens
ctgttcctctccttgaaaagtcaaggcttggttcaagccagatagcacctgaggacagaacatatcagagtattgggaaagggtcgttgtggtgcatag

SEQ ID NO: 812215 - DNA, 99 bp, Homo sapiens
ccaaagatgcggcaccgggaggaggaggagatcgtcaggctggcccaggaccgggaggagatgaagcttccttcaaaatgtctactgttcacgaaatcc

SEQ ID NO: 812216 - DNA, 100 bp, Homo sapiens
ccaaggtcaacaaggacaacaatgagatcgtggacaagatcatgggcaaaggacagatccagagaatctcgatgctggcctggagcagaaactgagctgg

SEQ ID NO: 812217 - DNA, 100 bp, Homo sapiens
gaatgaacttatggagcagacctcggagatcatcacgtttgccgagtcagactcctgggagagttggctctcaaggttctgatttagattcatcagcaac

SEQ ID NO: 812218 - DNA, 100 bp, Homo sapiens
actacagatactttgaagtagaagaagctgatgaatgtgacagtgatgataacatgggtgccaaaaatacttcaataggagaagaatttatatccacaga

SEQ ID NO: 812219 - DNA, 99 bp, Homo sapiens
tcgagccagacagactgctgagcgactatattgagaaggaggtaaagaaaaccaaatatggcatcttccatgaggagcttgttttctgaccacgggaaa

SEQ ID NO: 812220 - DNA, 99 bp, Homo sapiens
gtaacagtgcctgctctccagtgtctgaaaacaaatgtttttctggtcttcacttttttgaggcaggaagagctctccaaatcccagaatgatatgact

SEQ ID NO: 812221 - DNA, 99 bp, Homo sapiens
gaatgcttctcacccggaaacaaacttgccagttgggtatcctcctcagtatccaccgacagcattccaagccaatgttttcagttgcaccaagcttag

SEQ ID NO: 812222 - DNA, 100 bp, Homo sapiens
cagctagagagccgtctcccctctctggagccgagagaggccggtttcccccaccgctgaggctgaggtggcctccttgaaccgtaggatccagctggtt

SEQ ID NO: 812223 - DNA, 98 bp, Homo sapiens
catgcttttgacatggaggatttgggagataaagctgtgtactgccgttgttggaggtccaaaaaggcaatgaatcgctccctggctaatgtgattct

SEQ ID NO: 812224 - DNA, 100 bp, Homo sapiens
acttagagcaggaccttgtcagggaggttatcaatactctggctgaccatcatcatcgtgggactgactttggtggaagtccttggttacatgtcattat

SEQ ID NO: 812225 - DNA, 98 bp, Homo sapiens
tgaagcgcccacggggaccctctccgcttgtcaccatgacaccagcctttccccctggtgctcttcatcctttaccaaagagacaagcacttgaaaaa

SEQ ID NO: 812226 - DNA, 98 bp, Homo sapiens
ttccagtaatgacaccgttcggaggatgccattgctccccggaccctgccctggcccaagagctcagacacaatctccaagaatgggaccctttcctc

SEQ ID NO: 812227 - DNA, 100 bp, Homo sapiens
tcccaaatcagatgctttgtactttgatgactgcatgcagcttttggcgcagacattcccgtttgtagatgacaatgagatcctgtctcagaaagaagag

SEQ ID NO: 812228 - DNA, 100 bp, Homo sapiens
gaccccagcgtgggtgaagataggatcaagatggccatgtggcaggagttatcagttcagtggatggaatatcattacaaggatttccaagtgaaaaaat

SEQ ID NO: 812229 - DNA, 98 bp, Homo sapiens
cacggggagtgggaatgtgtcgccaccaacgtggtcacgagcatcactgccagcacccacctcaccgtcatcgataccaccaggccccgaaagagcca

SEQ ID NO: 812230 - DNA, 100 bp, Homo sapiens
tagaacatctgaagcagaagtacccccaccacgcctctgcaatcatgggtcaccaagagaggctgagagaccaggcaccagagaaggaggaattcctggc

SEQ ID NO: 812231 - DNA, 98 bp, Homo sapiens
gccgcctcagccatggacgcgtccctggagaagcactgaaagagccccagtgacccttcacctcgacgggatcgtgcaggtcctaaactgccacctca

SEQ ID NO: 812232 - DNA, 99 bp, Homo sapiens
acagcagctaagctggttcatcccatcagcctggattggtgaaactgaatcacaggagatatttccagccattggatttaatgtagagacggtgacgta

SEQ ID NO: 812233 - DNA, 99 bp, Homo sapiens
tggaattcgcgaagctgccaaagccttagacaaatattaacctggctgcagagccaaaagtgaaccgaggaaaagcaggtgtgaaacgatctgcagcgg

SEQ ID NO: 812234 - DNA, 100 bp, Homo sapiens
cgagagggactacgtgggcaccttgcgcttcttgcagtcgcctacaacacagcagtcccctcaggatgagcaggaaaagctcttggatgaagccatacag

SEQ ID NO: 812235 - DNA, 100 bp, Homo sapiens
ttcaaaatatcggagaataatttctttctcgctgatcgcctaacttctactgacgaagcttggaagttgcagaaggacacattcagctaacgtattttag

SEQ ID NO: 812236 - DNA, 98 bp, Homo sapiens
aactaccatgatggaagcatgtgccaaggagaactgttcacccacaattccagcttcaaatacaggtatgttccagaacaaaaagaacacagatccca

SEQ ID NO: 812237 - DNA, 50 bp, Homo sapiens
tggcgctctgcgtcccctgaaggaaaaatttgagggactgtttcggactt

SEQ ID NO: 812238 - DNA, 100 bp, Homo sapiens
caatgcattccaggaagcagctagtcttttgtattgttgcagcatctggcagtgagactgaggatgaggacagcatggacattcccttggacctttcttc

SEQ ID NO: 812239 - DNA, 117 bp, Homo sapiens
cttaagagttcccagaaatacatttgccaccaacagagtagaatccacattcatctcaatggaaggatcctgccttaagtcaacttatttgtttttgccgggaaagtcgctacatgg

SEQ ID NO: 812240 - DNA, 100 bp, Homo sapiens
cgggagttgggaggacccgggacaccgcacagccgggaaatgattaatcctaccatatgaaagatttattaaaggagaagaagataagcccctgcctcca

SEQ ID NO: 812241 - DNA, 98 bp, Homo sapiens
gaaaggcaaaggcaaaggcggctcgggagattcagccgtgaagcaagtgcagatagatggccttgttgctgaaaagccaggagtcaaaatgactgagc

SEQ ID NO: 812242 - DNA, 100 bp, Homo sapiens
gggctgagctagcagtgagcaccttttggcccaatgaatatcaggtgacagtggatagtggaaacaggagatcgtggatcctccttcaaaaatggaggat

SEQ ID NO: 812243 - DNA, 150 bp, Homo sapiens
aggaaaaaagatggcggcgggctcggatctgctggacgaggtcttcttcaacagcgaggtggacgagaaagtggcagaaaacattgtgctgttagagctggacatgcccagccggaccaccagagactatgagggtccagccattgcccc

SEQ ID NO: 812244 - DNA, 99 bp, Homo sapiens
gaaatcctaatgacagtctccaaattcgcctccatctgtaccatggacccagatgatgtggtaccagttggccaaagaagagcctggtgttggtgcatg

SEQ ID NO: 812245 - DNA, 100 bp, Homo sapiens
aacattgtggcaaatttgctcctcaacctaacgaggataatccgactgtggtagttgaagacctcaggctttgcacagtgaaacattgtgaagacataga

SEQ ID NO: 812246 - DNA, 98 bp, Homo sapiens
gcctcccaaagtgctgagattacaggttggtggcgatacaaaaattgaaactggcctcagttgttgctctcaaatgcagatcaaggaatgtggacgct

SEQ ID NO: 812247 - DNA, 100 bp, Homo sapiens
ctaaacagtggactcaacttcaaagacgttctcaaggagaaggcagacctgggccttagaaaatttacgtgtatacctgtgtgagaaaatcatagctgag

SEQ ID NO: 812248 - DNA, 98 bp, Homo sapiens
agctcctggccctggccctgatcatcctgctgggcttcgtccagatcgggaaggagcctggagacacaggccccatccttcccaatggggacacttca

SEQ ID NO: 812249 - DNA, 99 bp, Homo sapiens
tctgctggccagccaagatgagacaaagagcagcccgacggccatggaggctgaagagacgatggaatgccttcaggagttccctgaacatcataaaat

SEQ ID NO: 812250 - DNA, 98 bp, Homo sapiens
tggaaatgcagaaaagcttgcagaatatatttgttccatgtccatgttagctgtagaagagtatgaggagatgcaagtaaacctggagctggagaagg

SEQ ID NO: 812251 - DNA, 99 bp, Homo sapiens
gagtcagcatcatgtcttacgcgttgcaagtgattccaaatgatatttcaagtaatgctgcaattttaggaggacagccgccaaatgtgacaagcaatt

SEQ ID NO: 812252 - DNA, 98 bp, Homo sapiens
caccgccatccctgacccatggcgctgaagaggattcagaaacatgttggcagataaattgaacatgactccagaagaagctgaaaggtggattgtaa

SEQ ID NO: 812253 - DNA, 100 bp, Homo sapiens
gcaacctggagaagctggcagaacgcttcctggccaagacatgcagcaccaaggaccagcaattcaagagaactatgccatttttgggtcaggactggag

SEQ ID NO: 812254 - DNA, 100 bp, Homo sapiens
gcagcatattcctgatacatatctatgtgaacgttgtcagcctaggtatttacatgaggaatttccagagtcctggtcagttcccaggttggctgaaggc

SEQ ID NO: 812255 - DNA, 98 bp, Homo sapiens
gagagggaccaaccgacgccacttcgtgttgggaagtgggagcgggagggccgggcaattcccgaccgaaccaaacgattatctcctgctgcatacta

SEQ ID NO: 812256 - DNA, 98 bp, Homo sapiens
acagcatggcctgggatctcagagcaaatgcagccctgaggatttggctactgcatataacaacagggggcaaatcaagtacttcagggttgattttt

SEQ ID NO: 812257 - DNA, 100 bp, Homo sapiens
tctcaactaacagtattgacgctgtaagagcatcagatggcagaagattttttcatttaatgtctggggtaaaattgcaactttttggaacaaggctttc

SEQ ID NO: 812258 - DNA, 100 bp, Homo sapiens
ctccaaacatgatcgtttactgcaaagatgtaacagtccctcccaagcctgtctcgctccatcctttatatcagactaaactctatcctcctgctaagtc

SEQ ID NO: 812259 - DNA, 100 bp, Homo sapiens
ctaacgtttaccctagcaaaccagcctggttgcagtatgcctgaaatttgggatgtagaagatcctgccaatgctgggaaaactcccttatgtaacctct

SEQ ID NO: 812260 - DNA, 98 bp, Homo sapiens
gagccagcgagccgccgacccgccgagcaaaatgacttaattcagtgcacaaatgagatgaatgtgaacatcccacagttggcagacagtttatttga

SEQ ID NO: 812261 - DNA, 98 bp, Homo sapiens
tgtttaatgactttggtgccctcaacatctctcagagacgaaaggagttattcctgatgaagctaaagctttgtctctgttggcaccagctaatgcag

SEQ ID NO: 812262 - DNA, 100 bp, Homo sapiens
cagtaactgaacattggtctaaagtctttccaaaaggtcaaggttcacaaggtggttttttggcaaaatccccagagccaaggcagaagaaatgcttagc

SEQ ID NO: 812263 - DNA, 100 bp, Homo sapiens
tcataggcaagtggtgtgtggcacaaaatgcaacacgttttaccgggcagaagttgaagccctccattcttcgggtatgacagcagttgttaaattcatt

SEQ ID NO: 812264 - DNA, 100 bp, Homo sapiens
gcctcccggctcgacaagttcaagcagctgcttgccggccccaacacggaccttgtaagactttgaccccgacgcaggcttcagtgattgccgcggatca

SEQ ID NO: 812265 - DNA, 98 bp, Homo sapiens
aattttttataatgcatcattgtgcgtccctgtatgcatactaccttgtactggtaaacactacacgtgaagagtggtgaaagggaacattgattact

SEQ ID NO: 812266 - DNA, 100 bp, Homo sapiens
tgagctgtcctttcaggaaggagccattatttatgtcatcaagaagaatgacgatggaaaatggcattcctatgaagaaagcacgaaatgatgaatatga

SEQ ID NO: 812267 - DNA, 100 bp, Homo sapiens
tagatcttctgcactgtttacaggcacagttggttgaatctggcgatgtggaacccatggatatggagggctgactatatacaccatgttttttcctggc

SEQ ID NO: 812268 - DNA, 99 bp, Homo sapiens
ttccaagctctactgtgacttcagagacactgccaagcagccttagccctagtgtagagaaccttctgaggaaaggaggccatacagaaattgaacctc

SEQ ID NO: 812269 - DNA, 98 bp, Homo sapiens
gaggaggcggaaaaggacgcaaagttctccggcgaggcaacggacagccaagacgtagatccatccaagacttgactgtaactggaacagaacctggt

SEQ ID NO: 812270 - DNA, 99 bp, Homo sapiens
gcactttgacaccctgctagatggctcatcatatgcccgaagctcagtggttacggctgtgaaatttacaatttctgaccatccacaacctattgatcc

SEQ ID NO: 812271 - DNA, 100 bp, Homo sapiens
cggagcccgggaggggccgcgccgccaccgtctgaactaggatgtcccgacatgaaggaactgtggaaggtgcatcagtgaagaaatggaccaatgtgta

SEQ ID NO: 812272 - DNA, 100 bp, Homo sapiens
agaagcaagcccagtacctgggcatgtcctgtgatggccccttcaagccggatcactaccgctactgagagccagatggaatctcgctctgttgcccagg

SEQ ID NO: 812273 - DNA, 98 bp, Homo sapiens
ttaaaactgaatgaactgataacggagaatggaactgtatgccagcagcttgttgtacacaccaaggatgacattgatcttgatgccttggctgcaga

SEQ ID NO: 812274 - DNA, 100 bp, Homo sapiens
ggcaagccagacagctgggccggagcagccgcgggcgcccgaggggccgagcgagctgaaccttagccggccgatcgaggagcagggccccctggacgtc

SEQ ID NO: 812275 - DNA, 99 bp, Homo sapiens
ctgaccagagctgatcccgagcagcgtcatgtacccctgctattcagcttgaccctgaagaaactcgtcatgctaaaagaaatggacaaagatcttaac

SEQ ID NO: 812276 - DNA, 98 bp, Homo sapiens
gaaacagcagatgtaccctcagtacgccacctactattacccccagtatctgcaagccaagtttcaccagtgatcattaaagaatgggcagcttacaa

SEQ ID NO: 812277 - DNA, 100 bp, Homo sapiens
ccagagatggacggtcactcagcctatggaggctatttttatgattcccacaaatccaccaccaacattcagaaagccagaactttggtccgatgatttc

SEQ ID NO: 812278 - DNA, 98 bp, Homo sapiens
ctgccatgcactgacagcttcatcaaagtggacatgagaactatttcatttgatattcctcctcaggaggcctactgaacttgacgcactggtatttg

SEQ ID NO: 812279 - DNA, 99 bp, Homo sapiens
atggagttcctcctggggaacccgttcagcacaccagtggggcagtgcctcgttctctctttccagacgtagtgaactgtatgcagactgacaatctgg

SEQ ID NO: 812280 - DNA, 125 bp, Homo sapiens
ttcaaccccacatctgcttgacaagaattaactcaaatatctcttcttaacacctacctgattctggcatacattgactggtctgagtgtctccaatggaaaggaccaacttgtagtgttccata

SEQ ID NO: 812281 - DNA, 99 bp, Homo sapiens
ttatgtcaactgggcagtgaattttgtgaattggaagtttttgctaaagtactgagagctttggataaaaggaagtttatctcgacaatgctagttgca

SEQ ID NO: 812282 - DNA, 100 bp, Homo sapiens
gttggatgccatgctggaggagttcaagaaggaccaggccccgtccccatgcctcggggtgcagtgtgcatttggggcgacgtgtgctgtgaagaacggg

SEQ ID NO: 812283 - DNA, 100 bp, Homo sapiens
gcaggaggctaagaaagtggtgaatcccctgtttgagaaaaggcctaagaattttggcattggttttctgtctcaactggtctctgacaagcctctgact

SEQ ID NO: 812284 - DNA, 98 bp, Homo sapiens
ggccaacttccattgaacttcccagcactcgaaagggaccgaaatggagagcaaaggcaatgatatgggaaatgatgatgccattggagggaatgtga

SEQ ID NO: 812285 - DNA, 100 bp, Homo sapiens
agcgcattggactgttcagtcatgcggagattaactctggacatcctgagcccaagtcccccacactcagtgcagtgatgagtgcggaagtgaaggtgac

SEQ ID NO: 812286 - DNA, 51 bp, Homo sapiens
agtcatcagactgcataaaatcaggtcctgcagacattcgctttgtctggg

SEQ ID NO: 812287 - DNA, 98 bp, Homo sapiens
gctctctcctttgatcttctcttctggaagagatggaccaaaagcctctccagcaataatccttccagcctcagctggtcctggtggctgctggattt

SEQ ID NO: 812288 - DNA, 100 bp, Homo sapiens
catgaacgatgggcgagtagtcagcaacttcatcctgcaggcgctccagggggagccactcacggttatcaatactctggctgaccatcatcatcgtggg

SEQ ID NO: 812289 - DNA, 98 bp, Homo sapiens
ggtcaacgggcgggtgctggagctgttccgggccgcgcagctgccgaacgacgtggtcctacagagcacaacatatgtttcgccaagccatgcgtaca

SEQ ID NO: 812290 - DNA, 100 bp, Homo sapiens
cttcaggatctgctttcagagtacatgaacaacacacagataatgtacaagtggatagagcccaaaatctgccgggaggatctcacagatgctattagat

SEQ ID NO: 812291 - DNA, 100 bp, Homo sapiens
tccttctacatctgcagataaagtggagagctgcgttcctttgcctgcaacaggggtcaagatgagttttgcctgacttctttgatgtcctgaactttcc

SEQ ID NO: 812292 - DNA, 98 bp, Homo sapiens
ttgttaccctcggacgtagcccggcttgtattgggctgcctgataggggctgtaaatctcaaatccagcaatcgaaccccagtggtacaggaatttga

SEQ ID NO: 812293 - DNA, 100 bp, Homo sapiens
caggagcagaggctgagcagcaggatacagctagcgtggagcagtcctcccagaaggagtgtgggcaacctgcaggggatttatagtaaaacaagtgtct

SEQ ID NO: 812294 - DNA, 100 bp, Homo sapiens
caaccacacaccagcggctgcaggactgggcacagcatgagatccaaaggcagggcaaggaaactggccacaattggaatgttaaagaaattcatcaggc

SEQ ID NO: 812295 - DNA, 100 bp, Homo sapiens
tgttgttctcagctacttgggactcctctctcaagagaagctgcaagagcaacatctttcctcaccccaaggtcaaacatgtgttgacatcaaggacaac

SEQ ID NO: 812296 - DNA, 100 bp, Homo sapiens
tcgaaaggagcaagagcaagatcaccgtgacatccgaggtgcctttctccaaaagagatcatgatgcagccgtccttttggatttctttttaataatgtg

SEQ ID NO: 812297 - DNA, 100 bp, Homo sapiens
catggagccattgaagggaacaacacccttgatggacactcaatcacttgtcggaagtccctcaacccgtatagcacctcatattattggagcagaagat

SEQ ID NO: 812298 - DNA, 100 bp, Homo sapiens
aagcataatatgtatgccaaagcagcagccttctcgacagccttttactgtgaacaggtatactctgaaactaatgattgataaagcaagtttaggtcca

SEQ ID NO: 812299 - DNA, 98 bp, Homo sapiens
caaagccgtcctgtgtatggtggtggcaggggccatcgctgccgtctttcacacactgatagctgagggcacccggtgcacggacccgcctgcaggca

SEQ ID NO: 812300 - DNA, 100 bp, Homo sapiens
tcgccctggaatcacttttgagattggtgctcgtttggaggcactggactacttacaaaaatgagcatgtaacttctaatgccagcgatagtgaaagtag

SEQ ID NO: 812301 - DNA, 100 bp, Homo sapiens
actgccttcttgggaattgcttcgtttgccattttcttatggagaactgtccttgttttgcattaaaatcctcccctactgaaagaaacggaggccagga

SEQ ID NO: 812302 - DNA, 100 bp, Homo sapiens
caaacggcgcacattggtatgatgtggaaggagttattcctgatgaagctaaagctttgtctctgttggcaccagctaatgcagtggcaggtcttctgcc

SEQ ID NO: 812303 - DNA, 100 bp, Homo sapiens
cctgatgaagacttgtgttgctgtcatgatatgaaagattccagtaattacaagcggccaatggatggcacatatggccctcctgccaagcggcacgaag

SEQ ID NO: 812304 - DNA, 100 bp, Homo sapiens
gtacacaaaaagttctcacctgaaggctcaccggaggacacatacagacaagttggatggcttgaggactggtactaaaaggaaacgtgactgggaggcc

SEQ ID NO: 812305 - DNA, 100 bp, Homo sapiens
ctgcccactccccaggatacctcgttaagcctccagtcagcccggtcaagcatgacagcaactcaaactcggcaaacttccaagacgtggaggacatgcc

SEQ ID NO: 812306 - DNA, 100 bp, Homo sapiens
tctaagtgccttaagagaggatcgcccaatccacatgcttttccaggaagtgagctcacaatgactcaagctgccacatagtgttgattgtgaaatgcca

SEQ ID NO: 812307 - DNA, 125 bp, Homo sapiens
acagtccctggatcaccgacagcacagacagaatccctgctaccagaagatgagaatgtgcctactgctcctgatcctccaagtcaacatttacgtgggcatgggacaggcttttgctttgattc

SEQ ID NO: 812308 - DNA, 98 bp, Homo sapiens
gaagctgcagccgcacctggccaagggcctgggcccctcactgctctctccgtactcagacgaggacactacccagcccgggggccccttccagccaa

SEQ ID NO: 812309 - DNA, 99 bp, Homo sapiens
atagtgaagtgctccactcgaacagatgtgagcgagaaagccgttgcctccagcaccacttctaatgcaacatggccaatctttcctaagctgctcagc

SEQ ID NO: 812310 - DNA, 98 bp, Homo sapiens
ctccaggcaaacaacacttctgaggatcgtccgcagaaagtcattgggtggtacagattccggcgcaatacgcagcagcagatgtcctacagagagca

SEQ ID NO: 812311 - DNA, 100 bp, Homo sapiens
tctttcgcagcctagggcaacgtccaagtctccgaacagagccacacgactcccgctggctcaatggtaaagtccatggttccctggcccgtgctggaaa

SEQ ID NO: 812312 - DNA, 100 bp, Homo sapiens
tcaacagaagagtgagagatggaacccgaagaagaaaggattcgttacagccagagattgagaccaggtatgttgccaggcagccgaatgacacctcagg

SEQ ID NO: 812313 - DNA, 100 bp, Homo sapiens
ttatccgagatgtggacctcaatggggatggacgagtggactttgaagggatcagtttcattcacggatgtgactgtggactttacccaggaggaatggg

SEQ ID NO: 812314 - DNA, 98 bp, Homo sapiens
ctaccagatcaacgtcctccgggaccggagtcagaaccctccgcagagtaaaggaggctctgtcggtggtgagcgacgaccagtccctctttgactca

SEQ ID NO: 812315 - DNA, 98 bp, Homo sapiens
aactttctccggggcgcagcgtgacggctggcatcatcattgttggagatgagatccttaaggtcagtcttccacctccactaccggtgccaaaaaaa

SEQ ID NO: 812316 - DNA, 98 bp, Homo sapiens
gtgaagcacatcatgtccagctaaacctcgtgcccagattcaaggacctcagcctgtactccgtgatggtgggagtccaccagcgcccagaaaatagc

SEQ ID NO: 812317 - DNA, 100 bp, Homo sapiens
atccgctacctcatctcgtccaacgtcggggaagttgtctggacaaatcccaatctgctgaaatatgggaaaaattgaattttggaaacaaggaccaaaa

SEQ ID NO: 812318 - DNA, 100 bp, Homo sapiens
ataaaaatggagaggtacagaatttagctgtcaaatggatgaatctggttatagatggacaagagacgatcattctgcaagcaggcaacctgaatacagg

SEQ ID NO: 812319 - DNA, 100 bp, Homo sapiens
cacaattataaaatgtcagcttttaaggtaccttccactggaagaatctcaaacagcgctacttactcaggatcagtggcaccagccaactcagctttgg

SEQ ID NO: 812320 - DNA, 98 bp, Homo sapiens
aagaattcgcttgcaagttaaggtttaagtgctgtggggctgctaactacacagattgggagaaaatcccttccatgtcgaagaaccgagtccccgac

SEQ ID NO: 812321 - DNA, 100 bp, Homo sapiens
gacctggaaaaatggcagaataatctgcttccatcccgccagtttggattatctccctccaaactctaaagaaggaatataaatcctatgaagccaagct

SEQ ID NO: 812322 - DNA, 98 bp, Homo sapiens
ccaccaggactgaccgctgccgcccagcacgtccaggtcgagtttgagtggctgaggcagttttggtttcaaggcaatcgatacagaaagtgcactga

SEQ ID NO: 812323 - DNA, 98 bp, Homo sapiens
ctcatctcccaggaatctacatgacctgctattttcagatttctgaaatgtcaccttatcacaaactatatggaaatggatttgaagaagtacaaagt

SEQ ID NO: 812324 - DNA, 100 bp, Homo sapiens
acttcggaatgcactacaacaggaaaatcatattatagatggagtaaagggagagtcccgtattctcagagtaaaagttgtttctggaattgatctcgcc

SEQ ID NO: 812325 - DNA, 99 bp, Homo sapiens
ccaacttccgcgtcggcaagaagatcggctgcggcaacttcggggagctccgcctagttgactatattgtggagtatgactatgatgctgtacatgatg

SEQ ID NO: 812326 - DNA, 98 bp, Homo sapiens
agcagcagtttagagtcttcagagacttcgacttcctagatgtggagctggaggatggagaggtttctagagaggaaggatctccccagctgtcttca

SEQ ID NO: 812327 - DNA, 100 bp, Homo sapiens
tgggcagcacatgacgtatttgagttgaagcagttttctcagctgcctgctaacatagctgtttgcagttctaagcatggcggacaccgacctgttcatg

SEQ ID NO: 812328 - DNA, 98 bp, Homo sapiens
atgagaggctacgtattaattcactcaggaagaataccattttgccaaaaattcttcagatctccaagaaggagaagcttctctcgcagccggagcag

SEQ ID NO: 812329 - DNA, 98 bp, Homo sapiens
acaacctgaacgtcaccgaggagaagtaccaggaggcgttggccaaggggaaatcctcattgacgattcaatttgttgaaggccaatttgtggactcc

SEQ ID NO: 812330 - DNA, 98 bp, Homo sapiens
gcaggctcaggtgcagccgctgtgctacagatgaagcatggcgactattatccacttacctggagaggtacaaagtccagaataacttgtatcaccac

SEQ ID NO: 812331 - DNA, 100 bp, Homo sapiens
aaactatggtcccagaccaaatatgagtatgcagccaaaccaagcaaaatgatgcttcaacacccaggccaggtctctgcctcggaagtgagtgcttctg

SEQ ID NO: 812332 - DNA, 100 bp, Homo sapiens
tacgatcacagtggtctccagcactaactatttcaaaagagacgagttgtactgctgtcacaggaaatggacgctggattacaagcatggcagctcaggc

SEQ ID NO: 812333 - DNA, 100 bp, Homo sapiens
cattgacatttaattttagggtcctttatatagaagggagagtaggctgcacagaccaccggtactgccaaaggaaatcctactcactccaggtgcccag

SEQ ID NO: 812334 - DNA, 98 bp, Homo sapiens
tggatgatttcacctgtgaaaaaatagggtctggcttcttttctgaagtgttcaagttgatgattttctgcagaaaaacaactgcgaaaaagaaccta

SEQ ID NO: 812335 - DNA, 98 bp, Homo sapiens
tgcacataaaatcatggagaaatgtacattaccattgactggaaagcaatgtgtcaaccgcattattactgaaaagacgaaagtaggcggtacgaacc

SEQ ID NO: 812336 - DNA, 98 bp, Homo sapiens
cttggagcccccagccgcaagcccgacctgcgagtcatcacttcccaggcaggaaaggggttaatgcatcacttgaatttgctggaccatttggaaga

SEQ ID NO: 812337 - DNA, 100 bp, Homo sapiens
caaggggaagtgccctggggagaagagagaagacgccggccaggcccctgtgcaggaatctggtggacagtaacaaactttggtgaaatttcaggaacca

SEQ ID NO: 812338 - DNA, 100 bp, Homo sapiens
tagaaaggagctgcttcccaataaggaaacaatgcctgaaaacttcatgcctcctgttcccatcacatcaccaatcatgaacccgttgggtgacccccag

SEQ ID NO: 812339 - DNA, 100 bp, Homo sapiens
cctggaggatgtgcggggtgcgccggcagaggatccagtgttcaccatcctggccccggaaggcaacggggtggtcatccacttgccaggcttgtttgag

SEQ ID NO: 812340 - DNA, 100 bp, Homo sapiens
ggttctccattgtgatgaaagcacatggtacaggaatcattgtagtcaatcattttccagttctcagccgctcagttgtgatcaagggacacgtggtttc

SEQ ID NO: 812341 - DNA, 100 bp, Homo sapiens
aagctcaactcaactatttctacatctctcctggaggcattaagtgtaactgaaaccctgattaaacccttggaaaaattcagaaaagagcaacttggag

SEQ ID NO: 812342 - DNA, 100 bp, Homo sapiens
atgttcttgccgatgcttctcaccgaaggtgttcaccagcacactgctctgccagggcagtaaacggctttgaccccgctcctcctcctcctggtctggg

SEQ ID NO: 812343 - DNA, 98 bp, Homo sapiens
gcccccgccccaagccggcctaccccagatcatccaaaagatgtgtgctgtgtttggtggaatttattgtcttcgccattcagtacagtgccttgtag

SEQ ID NO: 812344 - DNA, 100 bp, Homo sapiens
aacgtgggcatcagggagaaggactattggacctgctttgaggtcaacgagagggaggaggcagccaccttctgggtgaaccctcagttcaagatccggc

SEQ ID NO: 812345 - DNA, 98 bp, Homo sapiens
ccgggaggacatctacaagcggattattcttggagaaaccctgtctgtttactgtaaccttttgcactcaaattcctttatcaggaataactacatag

SEQ ID NO: 812346 - DNA, 108 bp, Homo sapiens
ttcaagctcgccgcaggatctgtgagaatgggcctgactgtgcaggctgcaatgtgtgcttgaatttcagccacatccctaagctgccatctcagaccagaggaacag

SEQ ID NO: 812347 - DNA, 98 bp, Homo sapiens
tacttttactcagagtttgaaggttgtgaccaaaagaggctccgcaagtccgcatgcaacaccatcgactcttcatttcccgacatcacccattatcc

SEQ ID NO: 812348 - DNA, 98 bp, Homo sapiens
gcagtatgatgaactggaggctgagtacgacagcctcaaacaggagctggagcagctcaaagagcatttttgaaacattggggttgttggagtggttg

SEQ ID NO: 812349 - DNA, 100 bp, Homo sapiens
aatcatgaagaaggcaagaaaaatccaggtgccggaggagcagaagggagtggacatccgccataacaaggaccgaaaggttcggcgcaaggagcccaag

SEQ ID NO: 812350 - DNA, 98 bp, Homo sapiens
aaacttctgagcaacagatctaaagccctggtggcatgaatgctttacagttgcagaacctggcgacgctggctgctgctgcagctgcggcccagacc

SEQ ID NO: 812351 - DNA, 100 bp, Homo sapiens
gggcaggcggagcagggccttggaccccgcggcgcccctcggcctcggagcaacgagcgcagcgccgaactgaagcgctgcggcatggcgcgcgcctgcc

SEQ ID NO: 812352 - DNA, 99 bp, Homo sapiens
cgccatctggcatcaccagccaagcagttacagatcccacagcagggacagagcagaatgggctgatatagatccggtgccgcagaatgatggccccaa

SEQ ID NO: 812353 - DNA, 100 bp, Homo sapiens
cacatccgatctcaacattcacgtcctgccctataaccgattaattaattgatccccagctagactagtgagaaggcaaccaaagtgcaggacatcaaaa

SEQ ID NO: 812354 - DNA, 98 bp, Homo sapiens
gaaacagaagatgagattatgcctgaggttgtggaaaaggaagattactcagagattatagggagcatgggaaagatgaatgggagggctgattttcg

SEQ ID NO: 812355 - DNA, 100 bp, Homo sapiens
tacacatcttcagtatatggttcccttgcatctgttctagcacagtgttgacagctcttctaccacaagcagtgcttctccaatgcccaacagttatgat

SEQ ID NO: 812356 - DNA, 99 bp, Homo sapiens
gcgctcaggatggaggaagactcgatccgcctgcctgcgcacctgcgctcagtttatgaacctcttaaaagcattaatcttccaagacctgataatgaa

SEQ ID NO: 812357 - DNA, 100 bp, Homo sapiens
ggcggggcggcggcgacgcggacctgcggactagcgaacccggaggactatggcagccagggacgccacttcaggcagcctgtcagaggagagcagtgct

SEQ ID NO: 812358 - DNA, 100 bp, Homo sapiens
ctgagaaactggaccaccatcctgaatggtttaacgtgtacaacaagaaagctctgggtgtgcggcagtaccatgtggcctcagtcctgtgccaacgggc

SEQ ID NO: 812359 - DNA, 99 bp, Homo sapiens
cacaggcaaccactgcagcaaaagccatataataatcattctgaaatgtctgaccttttaaaaggaaaggtattatacctgaagaaccttagccctcgg

SEQ ID NO: 812360 - DNA, 50 bp, Homo sapiens
tcccctcccaggctccgactcatatctgtgacaggctgaagaacgatgac

SEQ ID NO: 812361 - DNA, 99 bp, Homo sapiens
gagagacaagcatcttcagttaccgtgaagatcccattgtctatgaaattcatccaaccaaatcttttattagaatatggttgagccccttatacccac

SEQ ID NO: 812362 - DNA, 100 bp, Homo sapiens
cgatcagggcatacatctttcttcgacaaagggaccaagaatcgccttcagccctgtctggtgcatccttggcagaaagtgaggaggaaaacacccccat

SEQ ID NO: 812363 - DNA, 100 bp, Homo sapiens
tatcacaacggagttcagtacagaaataacgaggaatggactgttgatagctgcactgagtgtcactgtcagttatcaggaactgttgccgttattacat

SEQ ID NO: 812364 - DNA, 95 bp, Homo sapiens
gacttcaagaaccacgtgatcaagtaccttgagacactcctttactcacagcagcagtggacgtgactctggacccagacacggcctaccccagc

SEQ ID NO: 812365 - DNA, 100 bp, Homo sapiens
gccaaaaatgtgcatactcacagagttagagagagggatggtggcctggaagaaacgctggtttatcctgcggagtggccggatgagcggtgacccagat

SEQ ID NO: 812366 - DNA, 100 bp, Homo sapiens
ggcgctcatcttcgacaacaagcacaccaactacaccatggaggaaacggaggtggagctgtacaacgaatttcctgaacctatcaaactggacaagaat

SEQ ID NO: 812367 - DNA, 100 bp, Homo sapiens
tgtatagagatgtgatgttggagaactacagaaacctggtctccctaggggttggtgtagacaatgatggaattttggttctgggagctacaaatatacc

SEQ ID NO: 812368 - DNA, 98 bp, Homo sapiens
agctgaggaggaactgaaggagctaaaggctcaaattgaggaagcaggattctcctcagtgtcccacatcaggccaagtcatcaaggcatgggacatt

SEQ ID NO: 812369 - DNA, 98 bp, Homo sapiens
cccaggagacagctatatttgcccatgttattcaaggtgaagtacaaggaggattatgagagatccagagggaagctcattggggcaaaagatgtaca

SEQ ID NO: 812370 - DNA, 100 bp, Homo sapiens
ctagcggatcctagtaatctctttgtggtttcttctgatttctgccattgggggtccagattatagactctacaagagtgaaccagagttaacaacagtg

SEQ ID NO: 812371 - DNA, 98 bp, Homo sapiens
aatttacagaaagtcatctctgcagcttgatgggcgacaacccttttcaaccaaaaagtgtgactgcacagaaaagttacaaaacaaatttgactttt

SEQ ID NO: 812372 - DNA, 103 bp, Homo sapiens
gcgctgccgcctgaagtgcgggcgcagctggcggagctggagctggagctctcggaggggccacccgttcatcgtgcagttcaatgatggaaatgccgccgtg

SEQ ID NO: 812373 - DNA, 100 bp, Homo sapiens
cttccttctgtcacatcacacccaatgttggactaaatgctcttccttcagaggattatccggggcatctactcaatgaaaaaccatgataattctttgt

SEQ ID NO: 812374 - DNA, 100 bp, Homo sapiens
tgtataatgaacgctgttgagtggaacaagaaggaagaacttgttgcagagcaggctctgaagcacctgaagttttctgaaaatggtaaccagaagaatt

SEQ ID NO: 812375 - DNA, 100 bp, Homo sapiens
acggccgcgggctggattggtacagttgagccccatatgggggttggcaggcagcagagaggcccctttcaaggtgttcgggtaaagaactcagtgaagg

SEQ ID NO: 812376 - DNA, 98 bp, Homo sapiens
agtttcagcctgccagcttctcctacggattctggacttgccagccccacaatcattcctgtgcctcctgattgctgagtgttcacctggaccttctg

SEQ ID NO: 812377 - DNA, 98 bp, Homo sapiens
ctgggatgccttcgcgtcttctcttccctcgggtgacttgagaatcctgctgcatcacagaagctggaagttctgatgttccactgaaatcacaatgg

SEQ ID NO: 812378 - DNA, 100 bp, Homo sapiens
atctacagagaggacaactaatatgacttcctgaagccacagatcatcacccagccagaaaccaccatggctatggtgggcaaggacatccggtttacat

SEQ ID NO: 812379 - DNA, 98 bp, Homo sapiens
tttcagcgttacctagttacatccgatctacagttcacgcctctaggggcctcatccacatgctcacccacttggccgaggctctgcaccaggcccgg

SEQ ID NO: 812380 - DNA, 98 bp, Homo sapiens
cccccattgcagaccagttccagcttggcgtgtcccatgtttttgagtatatccgttctgagacatacaaatatgctgctgcagcacggagctgaccc

SEQ ID NO: 812381 - DNA, 100 bp, Homo sapiens
aaccccgaggatgccctgagacacggaggcccccagtattgcaggagcgaccccgacgtggaacgctgcctcagatttcaagcagatgcagcctgaccat

SEQ ID NO: 812382 - DNA, 100 bp, Homo sapiens
ggcccccgcagcaagccccagccaaagttgagtcagcagatactggagttatttgaaacatgtcagcagcaaataagtgatttaaagaagaaagaactct

SEQ ID NO: 812383 - DNA, 99 bp, Homo sapiens
cgagaccagccagtggagctgctgaatcctgcccgcgtgaaccacatgcccagcacggtgtcccagaagcttttgttgacaattccagtttccgaacaa

SEQ ID NO: 812384 - DNA, 75 bp, Homo sapiens
ctgagggctgctattgtatatcacactaaaggtctctggggtctgatcaataatgctggtgttcccggcgtgctg

SEQ ID NO: 812385 - DNA, 98 bp, Homo sapiens
ctcgaattccagaatgatgaaattgtgaagaaggtagataatgactataatgcccttcgagaaagactcagcaccttgcctgataaattgtcttataa

SEQ ID NO: 812386 - DNA, 98 bp, Homo sapiens
aaaacagtgatcgctaagaactttgccgataccttaggatacaacatagaacctattatgctctatcaggaatacatggtttacaggaagcataccta

SEQ ID NO: 812387 - DNA, 100 bp, Homo sapiens
catacctgataagccacggcatatccagatgaaactagccagactggaatttgagtctttggaggcactcaagcagcagtgcctgtcaggcagttctgat

SEQ ID NO: 812388 - DNA, 100 bp, Homo sapiens
tgcagatcaccgggggcgccctggaggagtccctgaagatctatgctcctctgtacttgaacgatttcgagatttactactgcctccatctagtcaagac

SEQ ID NO: 812389 - DNA, 98 bp, Homo sapiens
tcatcgagactgagctggctaagcaggtgctgcagacggagctggagcgaccgagagaggatttaatcaaagatctcaaatcagagttaagtggaaat

SEQ ID NO: 812390 - DNA, 100 bp, Homo sapiens
ccaatcctctgcttccaggacaagtcctgcgcttggggatcctctgtacgcccgttcactggaatggtttgcagtgtatgtggaacttaatcagcaaatt

SEQ ID NO: 812391 - DNA, 100 bp, Homo sapiens
aaggccaatgttggtgctggcaaaaaggtggcttcccacacttctgactcggacgttccttccggtgtcactgaggtggtcgtgaagctctttgactctg

SEQ ID NO: 812392 - DNA, 98 bp, Homo sapiens
ccagcgcgtggtgggggaactgctggggaaggcgattggcatcgatctctccatcccttccgaggcccgacttcgaccaaagagaaccctgtacagta

SEQ ID NO: 812393 - DNA, 100 bp, Homo sapiens
cttgaaaaggaccttgtagaacctctttgcagcttcatcactggtccagctgtaataccagggtacttctccgttgatgtgaataatgtggtactcattt

SEQ ID NO: 812394 - DNA, 100 bp, Homo sapiens
gaacagacaaatatggatgagctgagtgtcaccttagactacctactcagcattccaagtggtgaactatgacaatgtagtggacacaggttctgaaaca

SEQ ID NO: 812395 - DNA, 100 bp, Homo sapiens
acttgaacaacctaccaagtgatgtggtgcaattaaaaactagcatttctagtcagtatgtaattcggatgcagccgactaatagatgcctttctacact

SEQ ID NO: 812396 - DNA, 100 bp, Homo sapiens
aaacttgctgcggttgctcaagttgctgccaaacaaggtgaatccgacccagagaggaaagaaacaaggcagaaagtagacgacgacagaaaacatgaga

SEQ ID NO: 812397 - DNA, 98 bp, Homo sapiens
atgaagctggtgtgtctgctgaccaagaagggagtgagaggtctcatgttccggtgcagcgccagctgttgtgaggacagccaggcctccatgaagca

SEQ ID NO: 812398 - DNA, 100 bp, Homo sapiens
cccttgtccagttactctaacaagtctggaggaggactgacaaatggtagtggtcgatatatctctgcagcacctggagcagaagcaaaatatcgaagtg

SEQ ID NO: 812399 - DNA, 98 bp, Homo sapiens
cagacagagaaaaccagtccatcctgatcacatacttattgaagatctgctgtcagatgatgccttaaaatctgatagatcaaagatgacctatggga

SEQ ID NO: 812400 - DNA, 98 bp, Homo sapiens
gaagcgggcccacatcttccggccaacttccattgaacttcccagcactcgaaagggaccgaaatggagagcaaagggaaattggattccaagatcca

SEQ ID NO: 812401 - DNA, 100 bp, Homo sapiens
gtatatgccgatgaggagagctctaatattactgatgggagaatcacacctgagccagcagtcagtaatacagaagggcccaatgtaaaggctgttgcta

SEQ ID NO: 812402 - DNA, 98 bp, Homo sapiens
aggggcaggacaagaaccccgaaatgtgccgagtgctgctcacccatgagatcatgtgcaggactccctggaggaaaagcggaagcggcagcggtctg

SEQ ID NO: 812403 - DNA, 100 bp, Homo sapiens
acacatgatagaagaaattgttctagtagatgatgccagtgaaagaggcgcatttctcctgggaggaatcctctactcctggcagtttcctcatttcaac

SEQ ID NO: 812404 - DNA, 100 bp, Homo sapiens
aggaccccggcggcagacgcaggttcgggaccatgagctggactgaaatgcaactgcagaagcaacatgtgaccttttagagatgcttgtgggactgcat

SEQ ID NO: 812405 - DNA, 98 bp, Homo sapiens
tcagctgggaggaatattgctgcccggctgatgagccttcccagcgtccccgtcttcctagaggtttctggccagtttgatgttgagttccggcttgc

SEQ ID NO: 812406 - DNA, 100 bp, Homo sapiens
aacagaacacgtgttcagtcatcacaaccctcaaaggacatgaagatctgactgcagccatgagcagcaatgagtgcttcaagtgtggacgatctggcca

SEQ ID NO: 812407 - DNA, 100 bp, Homo sapiens
aattaaccgtgctaatgggaagaatttgaaagacatattggctgacctgatacctaaggagcaggccagaattaagactttcaggcagcaacatggcaag

SEQ ID NO: 812408 - DNA, 100 bp, Homo sapiens
tatgggggcacgtgtgttgtcgacaacggaggctttgtttgccagtgtagaggattatatactggtcagagttccatgccattgcagtgtcaactaggcc

SEQ ID NO: 812409 - DNA, 100 bp, Homo sapiens
cctaagggaccacaaatacgtgatttggagagagcctgagacagctgtcttgtgagggactgagatgcaggatttcttcacgcctcccctttgtgacttc

SEQ ID NO: 812410 - DNA, 100 bp, Homo sapiens
cgcctgctgcacattccttcgagaacgattcatctgaaaactacattaagatgaagacctttgaaggtttctgtgctttgcatctcgctgcaagtcaagg

SEQ ID NO: 812411 - DNA, 100 bp, Homo sapiens
ttctctccccgtctccacctccagtggtaagcatccgtggcattcaagacgaagatccccctgacgcccagctcctgaggctggataacatgctgctggc

SEQ ID NO: 812412 - DNA, 98 bp, Homo sapiens
gatgtctgacatggaggatgatttcatgtgcgatgatgaggaggactacgacctgatttcccatcagatatcgctaacaagtctctctcagagaccac

SEQ ID NO: 812413 - DNA, 100 bp, Homo sapiens
cttcctcatccttccttttctcggggctcccgtggcccccaaatacatcaagatgtttgtactggatgaagctgacgaaatgttaagccgtggattcaag

SEQ ID NO: 812414 - DNA, 100 bp, Homo sapiens
acgtgatatttccaacacacttataatgctcgcagataagcatgctaaccatcaagtgcctgctgatccaccctaaccccgagtctgcactcaacgagga

SEQ ID NO: 812415 - DNA, 100 bp, Homo sapiens
tgttcgaatgtctgcaagccagttagaagccctctgtcctcaggacttgagaccaggagacgtatccagcaagcggaacctctgggaaaagcaatctgtg

SEQ ID NO: 812416 - DNA, 98 bp, Homo sapiens
ccaattatacatcgtgacttgaacagagagtgataatcttcaaaatgaagactttggaaaattttaggttctctataggaactacaaaaatggaagga

SEQ ID NO: 812417 - DNA, 100 bp, Homo sapiens
cagcagcagaaaatcattgccctgcagagtggtttacaagctgggtgggtatatggctgccaaggtccagaaattggaggaacagtttcgatcagatgct

SEQ ID NO: 812418 - DNA, 100 bp, Homo sapiens
aacaactggcagaatttgctagagctgaagccatttattggtatcttggatggttaacatctaaatgcttaattcctgaaaccactcaagagtcatagga

SEQ ID NO: 812419 - DNA, 111 bp, Homo sapiens
gtcccttttgggcttctttacagtgaagtgactgcatccagtttgcccagcgaggtcatgatgatgatgtttctagcaccagtgaagatgatggctatcctgaggacatgg

SEQ ID NO: 812420 - DNA, 100 bp, Homo sapiens
agaagctaatcgcctatttgcagtaaatcagaaaaacatgactgcattggaggcttcattccagcgctccaatagtcatgacaaagtaaggagaatagtt

SEQ ID NO: 812421 - DNA, 99 bp, Homo sapiens
aaatggtcttcaagcctcaagctgtgaagttcctttacactgggtgtgtaagaagttaaagattggtgcctggccagaaatgcctgtgaaacagctgtg

SEQ ID NO: 812422 - DNA, 100 bp, Homo sapiens
gttccacgtgaagctcaccgacagtgccctgagggccttcgagagctaccgcgccagacagaaactcccatcaagactgaagcagacgttttggcagaaa

SEQ ID NO: 812423 - DNA, 100 bp, Homo sapiens
ccgcgactccggctctgcgctcggctgcctgacttcttcctgctgctgcttttcaggggaaggatgataaagactatgctttaaaacaaatagaaggaac

SEQ ID NO: 812424 - DNA, 100 bp, Homo sapiens
tacttcatcctggcactcaccgtcctctctgtctgtgccatcgccaccaatggagccgtgcaggggggcggagcctactactgggcttccgaaatgtcgt

SEQ ID NO: 812425 - DNA, 98 bp, Homo sapiens
accagctactgtgaactctgccacttcaggtttgcagtcgagcgcaaacccaggccgttagtggagacgaaagtaggcggtacgaaccctaatggagg

SEQ ID NO: 812426 - DNA, 100 bp, Homo sapiens
acagaccctgtccacctctataagaactggatcaaccagactgaggcccagacagggcagcgcaggtggatccataaagaacccagccaacccgcagagg

SEQ ID NO: 812427 - DNA, 100 bp, Homo sapiens
acagatgaatgaagaccccattcggaaagacacctggccagcggtccagagctgatgcagaaaatatttacaccagcagctccagttcataccaataaag

SEQ ID NO: 812428 - DNA, 100 bp, Homo sapiens
tttgccactttcatattgcagccagcatcaacccagccacaggagaactatgccatttttgggtcaggactggagatctcctggatggagttggattaag

SEQ ID NO: 812429 - DNA, 98 bp, Homo sapiens
aggatgaagttcgccgagcacctctccgcgcacatcactcccgagtggaggaagcaatacatccagtatgagctccttcgagaactcatagaacggaa

SEQ ID NO: 812430 - DNA, 100 bp, Homo sapiens
actgcggctgtctccttgaaggttctccctgttggttctgattagtgaaagaaaggatgtcttaagagaagctgaaattttacacaaagctagatttagt

SEQ ID NO: 812431 - DNA, 100 bp, Homo sapiens
cggactgagcagccaaagcttgacagaggatttacaagaccagctagaggatatgatggaagatgcaaatgaaatccaagaagcactgagtcgcagttat

SEQ ID NO: 812432 - DNA, 150 bp, Homo sapiens
aagttggcggctgccgtgctgaggaccgggggtggaggtggtgcctctggcagtgacgaggacgaagtgtccgaggcattctttagtggcaggctgaaggccagagggaacatcatgctgagccagaaacttcagatgattcttaaagac

SEQ ID NO: 812433 - DNA, 100 bp, Homo sapiens
gagatcacgcagtcctgctacttcctgggatgttaggtactgaacgacacctgggtctccttcccttcctggtctgaggactccacgttcgtcagctcca

SEQ ID NO: 812434 - DNA, 98 bp, Homo sapiens
tatcagcgcctcaatctctactcgaagaagaaagagaagaaacgttttctcagaatagaagatggttgaggggactggacacctgaattggctttgaa

SEQ ID NO: 812435 - DNA, 100 bp, Homo sapiens
aatgatgaagaagatccttcaaaattaaaagaggagcagcatggcatttcagtcactggtttgcagagtccaggccataaaattttgagtagaaaaatcc

SEQ ID NO: 812436 - DNA, 74 bp, Homo sapiens
ctggagtctattcctggattcaatgtcatccagagcccagagcagctgggacgatgccggagtgtgaaggagtt

SEQ ID NO: 812437 - DNA, 105 bp, Homo sapiens
attacataatttacccttgtaacctcaagctcgagaggactggctatcaaaggtgctgactattctgatgccgagtttccaattgccttgattaaagtagaaaca

SEQ ID NO: 812438 - DNA, 98 bp, Homo sapiens
cgaagagaacgcgcccaagtggcggggactactggtgcctgcgctgaaaaagctcctttagcggcagagttttccgagtgaccttcttgatgctggct

SEQ ID NO: 812439 - DNA, 100 bp, Homo sapiens
gcaaatgctctctggaggatctgaaacttgcgaaatccctggtgccaaaggctttagaaggttatatcacaggtttttctattgggaaagctactgatcg

SEQ ID NO: 812440 - DNA, 100 bp, Homo sapiens
ttcattttatcacagataccctgtcaaagggtgagacaaagttcatgctattcccttcagcaagctcaagctttttatacgtttccatttcaacaactga

SEQ ID NO: 812441 - DNA, 100 bp, Homo sapiens
ctctgagaagggagacgacgctgctgggtccgctgagcggggcgacccgagttttatcttcaagacactaaaagtagtaatggtacttttataaatagcc

SEQ ID NO: 812442 - DNA, 100 bp, Homo sapiens
ggagtctgccccaccaacatggcccgcagagttaatgcagggcttggcacgatacgtgttccagtcagctatcatggtgaacttacttcagattgtgcgg

SEQ ID NO: 812443 - DNA, 100 bp, Homo sapiens
cacaaggccaacacttataccagcaaaacgtatgaaggtcaactccctgtgctggccatcacagatcccgacgtgatcagaacagtgctagtgaaagaat

SEQ ID NO: 812444 - DNA, 100 bp, Homo sapiens
gcaagcctaactcaagccattggcacacaggcgctgcttgcagattctggctgcaggactgttcctgccaggttcagtgggtatcactgacccctgtgag

SEQ ID NO: 812445 - DNA, 98 bp, Homo sapiens
aagaaggacctgctcaccctgatgaagctggaaaccaatgatgcgagctcagagtcaatagcatccttctctaaacaggaggtcatgagtagctttct

SEQ ID NO: 812446 - DNA, 100 bp, Homo sapiens
atttaaaatatgtccttctggcatatgatgtcaaacaggtggattcaccaatgaacttgaagcatcctcatgacctagtcatattaatgagacaagaagc

SEQ ID NO: 812447 - DNA, 100 bp, Homo sapiens
agccatcagcttcagctccagctccgctctcttcggctgccccaatccccggcagctctctcaggtcatcatcagatttgaaatatttaaagtggataca

SEQ ID NO: 812448 - DNA, 100 bp, Homo sapiens
gttaacaagtcccatgaagcaaagctggttttattgaatatgccagggccaccccgaaaccctgagggtgatgaaaactctgacggtccaaatccttgtg

SEQ ID NO: 812449 - DNA, 98 bp, Homo sapiens
gcggcgatcctgggctgcgggcaaggcgggaagaatcccactgatgcataccttgatgccatgatgaatgaggccccagggcccatcaatttcaccat

SEQ ID NO: 812450 - DNA, 98 bp, Homo sapiens
tgttcacgttccgcgaggacctcgcgctcggcacccagctggcgggggtccataggctgctgcaggcgccgcacaagacggttgatgatgaagcgccg

SEQ ID NO: 812451 - DNA, 100 bp, Homo sapiens
gttcttcaccgttatcatctatgttcggctggacttctccatcaccaaggaaacggaggtggagctgtacaacgaatttcctgaacctatcaaactggac

SEQ ID NO: 812452 - DNA, 98 bp, Homo sapiens
tgacccacgagctgtcaaccaagataaaaagaacatgctgttttctgccgtccagggcactggcctggcattcatcgtctacacagaggccattaaaa

SEQ ID NO: 812453 - DNA, 98 bp, Homo sapiens
tttggtcaatattgtcttaacatgcttcaaataaatcagaagcctggagagttgatgacctgatagagagaatccaagaaaacgaagacaaacattca

SEQ ID NO: 812454 - DNA, 99 bp, Homo sapiens
ggaccagcagaaacctagagtggcccttgatgagcctccctatttgacagtgggcactgatgtgagtgctaaatacagaggagccttttgtgaagccaa

SEQ ID NO: 812455 - DNA, 99 bp, Homo sapiens
acagaattatacagatagtagttcctcttctacagagtcctcccagagttcccaaggttccaatacatatgaagaggcagctgcctatattcaatgcca

SEQ ID NO: 812456 - DNA, 100 bp, Homo sapiens
tgatgtcagtgttatatcctccaggaatactggccaggtctataagaaggagaaagctcgagtcatcactgaggaagagaagaatttcaaagccttcgct

SEQ ID NO: 812457 - DNA, 98 bp, Homo sapiens
gggtactgcttgctcctcggcttgcatttgtttctgctgaccgcgggccctgccctgggctggaacgaccctggctaatggaggttggcaggatgcta

SEQ ID NO: 812458 - DNA, 100 bp, Homo sapiens
tgatgtgacgctggagaacctggcacttatgtcctccctgggcactgtaagaagattcctagagattcatggggaaaccattgaaaaagtagtatttgct

SEQ ID NO: 812459 - DNA, 100 bp, Homo sapiens
aggctttatatcctaaacttttcaagcctgaaggaaaggcagaactgcctgattacaggagctttaacagagacttgaagcctgagaatattctccttga

SEQ ID NO: 812460 - DNA, 100 bp, Homo sapiens
cagaacagagaacagaagctcagagaagtgaagcaacttgcccagctatgagagacagagccaggatttgaaaccaggaggctgaaccgtctgagcccag

SEQ ID NO: 812461 - DNA, 100 bp, Homo sapiens
atcagaaagaggcctccctcgtgagttgggcttggtaccgtgctgcccagaatgcccttcgggaggtcacccctcctaatttctcagtgtcacaagtgcc

SEQ ID NO: 812462 - DNA, 99 bp, Homo sapiens
tacaaggacagcagcgactttggggcccgtcaccctcaggactttgccaataccattcctggccatggaggcatcatggatcgctttgactgccagtat

SEQ ID NO: 812463 - DNA, 100 bp, Homo sapiens
cagatagctcctccaagaagacaaagtctagttcagaggagagtagatccgagatatatgagccctatgagtttgtctctctggaatggctgcaaaagtg

SEQ ID NO: 812464 - DNA, 100 bp, Homo sapiens
aagaagtagcagaagggagccgagtttatctggagtgtagagtcactggaaaccccactcctcgagtcagaaactgatttcactccagactggtgtggcc

SEQ ID NO: 812465 - DNA, 99 bp, Homo sapiens
aacaggacagcttgctgctcttgtctcagaggggcgcagagcctgcagagcagagaaaattggcactccagttaaagttcggtttcaggaagctgaaga

SEQ ID NO: 812466 - DNA, 100 bp, Homo sapiens
cgctctccttcgaagtccggaggagtttcctggatttggcactctcgtgcaaagcggtcatatgctgcagtaacagtgtatcatgtatgccactgattcc

SEQ ID NO: 812467 - DNA, 103 bp, Homo sapiens
ctgtatgcatggtgtggggttggtgtgattagcttcgcagtctggaaagctttaggagttcacagtgtgatgatgaacagtctacacagatggctgcaagttg

SEQ ID NO: 812468 - DNA, 100 bp, Homo sapiens
aacaactgctacatctgttggaggagccaactagcatggaagtgcaggaaaggcagactacaagttactgagcacctccctgagaaaattgaaagtagtt

SEQ ID NO: 812469 - DNA, 98 bp, Homo sapiens
ggaaggcccagaagatcccttacaatacctgagaggtcttgttgcccgtgcccttgcaatacagccaatggtaatgatagtaaaaaatttaaaggaga

SEQ ID NO: 812470 - DNA, 100 bp, Homo sapiens
acctgttctatggacagtatgaaggcaaagtcaggtgtggcctgaagtcactgatcctgagaagttcgtgtatgaagatgtggctatcgcagcatacctg

SEQ ID NO: 812471 - DNA, 100 bp, Homo sapiens
ggattaaggaataatttatgaagctccgttgactaccgtggagagatcataatttggggttcaagattccagaacatagataccctggagcgaatagccg

SEQ ID NO: 812472 - DNA, 99 bp, Homo sapiens
atgatcacgcagctggctggcttcagtggaccattgaacaagagatttttcaatcaagactttggaactacgaagatggaagagatttgaagagggata

SEQ ID NO: 812473 - DNA, 103 bp, Homo sapiens
cagatttctccaccaaattctcagcctgataaggggtcccactccattgcccaagctgaagttcagtggcacgaacatgtttcactgcagcctcaacctcctg

SEQ ID NO: 812474 - DNA, 100 bp, Homo sapiens
aaaggaactattttgttcgtgataaactggatcctgatatggctctttgccgaaatgctagagaaatgtctctgcgatatgataccagctattttgtgga

SEQ ID NO: 812475 - DNA, 100 bp, Homo sapiens
ccaggctcaagcagtcctaccatgtcagccttcccagtagctgggaccacaggttgcaatgaatgtgtatgagttatcatcagctgccggattaccttgt

SEQ ID NO: 812476 - DNA, 99 bp, Homo sapiens
tgagttgcagcaagtcatacgggaggaaagaccacagcaagattctttcattcgtctcctcctagcctgggggaccaggctcgaactgaccctggacat

SEQ ID NO: 812477 - DNA, 99 bp, Homo sapiens
gaagatggctactctggagttgaggtggtgttcccactgatgaagagcaggcgactgggttggagagggagatcatgctggctgcaaagaagggactgg

SEQ ID NO: 812478 - DNA, 100 bp, Homo sapiens
aatatattgactactgccacaattccgtttcaccagtgatcattaaagaatgggcagcttacaaaggaaagtctcctcaaaccccggaactggttgaagc

SEQ ID NO: 812479 - DNA, 100 bp, Homo sapiens
ctccttttccctctccctttccctaaggtatgatctcgtgaaaccttgagagaaactgaatgacgaatgaaactattgttcctgtttcacacagaagaaa

SEQ ID NO: 812480 - DNA, 50 bp, Homo sapiens
caggagccgagcatggagtaccaggtgaggtccagagatatatccagaga

SEQ ID NO: 812481 - DNA, 100 bp, Homo sapiens
tgcacactgatgatgtgcctccaggacaaaggactgaatcaggaaacccaggcccaacggcaggtggatgcaagaagaaatgttccccaaaacgacccag

SEQ ID NO: 812482 - DNA, 98 bp, Homo sapiens
aagagctcggtgggaggaaggagagaaaagctcctgggggcgccgaaagctcagcccagccgcgggtgaagagggaacagaaatctttgccccctgac

SEQ ID NO: 812483 - DNA, 100 bp, Homo sapiens
cgcggagccagcacgaacgagcccagcaccggccggatggagcgtccgcaacccgacaggcctatgaaaggaggttccctacatgtcctttgattccgat

SEQ ID NO: 812484 - DNA, 100 bp, Homo sapiens
cgcccccagagagtaccgacgagggggccgaaaccgagaggctccaggaggccagagctctactgaagcggcggcggccccgggggccagggggccgggg

SEQ ID NO: 812485 - DNA, 100 bp, Homo sapiens
gtgccctagcaccccgagaaccgtcagtttgagccagatggagacaaggacggcagcaaggtgacaacagtggtggcaactcctgggcagggtccagaca

SEQ ID NO: 812486 - DNA, 100 bp, Homo sapiens
cagacgtgcaacaaagtgcgatgactcgagccttacgcagacccttattatgactatgaaattgagcggttttggcgtggcggacagtatgagaatttca

SEQ ID NO: 812487 - DNA, 100 bp, Homo sapiens
cattggagtgcttcattaccacgagataggcaatacgaaagctgctcagatggaagataaaaagccctttatcctgtcttccatgaggcttcctctcctg

SEQ ID NO: 812488 - DNA, 100 bp, Homo sapiens
gcacaaggaatgactcatcttgaagcccagaataagattaagggttgtacaggctctttgaatatgactctgcaaagggaaatccctaagtcagccaacc

SEQ ID NO: 812489 - DNA, 100 bp, Homo sapiens
cccagttctggcagattctggaaactgtacattgaagcagagccgtgcagtcggaggtccttgtgcatgaagacagatttgttctatggcctcggagttg

SEQ ID NO: 812490 - DNA, 100 bp, Homo sapiens
gggctcgccttgtatctcaacaccctgagtgcggatttctgctatgatgacagaaaacttggaatataacgtggagcctcaagaaatctcacaccctgac

SEQ ID NO: 812491 - DNA, 98 bp, Homo sapiens
cgccttctgggcccggagaacgaaatgatggagcttggatctcggtcccggggtgcctcccagaagaagcagaagttggaacaaaaagctgctggctc

SEQ ID NO: 812492 - DNA, 98 bp, Homo sapiens
ggaagaggaaggtcctggtggtgcccacccagttttctggatatgccgcagaaggatccgtgccagaagcaagcctgtgagatacagaaatgtttaca

SEQ ID NO: 812493 - DNA, 100 bp, Homo sapiens
gggcgccataaacgcccccaatttcccagctgctaaaggaagaggaaggtggtgctggctagagtgtatacgtttggacccaagcttaacttttccaatg

SEQ ID NO: 812494 - DNA, 100 bp, Homo sapiens
cccgaccctgcccctcccgcccgcaactccgccgcccaccatggcttccgaggagctgtacgaggatggttcctacctggctgagttcctgctggagaaa

SEQ ID NO: 812495 - DNA, 100 bp, Homo sapiens
attcagaaaggagcagactgtggagcaaagattgaccctcttgctggaatgacatctcttagtataggtggttcagctgcccctcacacccagagtatgc

SEQ ID NO: 812496 - DNA, 100 bp, Homo sapiens
tctgaacaaggccaacacctatgcagcagcctcagctcataccagccatccaatgcaaggaaggacaacaccaagcccagaggacagttcctggactgat

SEQ ID NO: 812497 - DNA, 100 bp, Homo sapiens
tgacagcgatgctgaggatcgaggaacgttgtctgtgtaaacaggaacatcgataagtagtgtaaaaacttgcacaatgaaatccgaagccaaggatgga

SEQ ID NO: 812498 - DNA, 100 bp, Homo sapiens
ggaagccaggaagaaggcactgaagcttggggccaaaaagatcatgattctggaaggaggtggtgtaatgaatctcaaccccggcaacaacctccttcac

SEQ ID NO: 812499 - DNA, 100 bp, Homo sapiens
atcttcgggggcagcccggcagctgccggcggcgcggcgagagagcggctgacagaggggatgcgagacatgccaatatttggtttctgtccagcccatg

SEQ ID NO: 812500 - DNA, 100 bp, Homo sapiens
ctgttttgcaggagatcgtgaccaggtgaaattcgatgctactgtgatgctgcccactgtgtagccactggttatatgtgtaaatctgagctcagcgcct

SEQ ID NO: 812501 - DNA, 100 bp, Homo sapiens
gagagagagccttgggacggcagggatggcgagctgaagtcacctgggagcccccctggacctgagctgcccattgaaacagcgttggatgatagagaac

SEQ ID NO: 812502 - DNA, 100 bp, Homo sapiens
gctgcaagactgtcgacctaaagcctgactggggcaagggcctgcttccgcgaggccaacatcccaacccacttcgggagaagaaccgacaggtgaacga

SEQ ID NO: 812503 - DNA, 51 bp, Homo sapiens
tttaccaaactagcagtggacagtataggaaacacctttgtccaagtcccc

SEQ ID NO: 812504 - DNA, 99 bp, Homo sapiens
agttcggtgctcgaatgataactattgatgggaaacagataaaacttcagatatgggatacgtgctaggaaaagaatgtcagtgattgttcgcactcca

SEQ ID NO: 812505 - DNA, 100 bp, Homo sapiens
caggggcaaggcaccatcggcaactacgtgtctcggaccaacatcaacatgcagtccaacccagtgtcaacagcatctccaccctggagcctgtgagccg

SEQ ID NO: 812506 - DNA, 108 bp, Homo sapiens
cgatggaagaacaactgaaaagtgatgaggaactggcaagaaagctaagcattgatattgctttggtgaagcacgtgcagtctaaaggatacccaaatgaacgttttg

SEQ ID NO: 812507 - DNA, 98 bp, Homo sapiens
aatcctgacgaaattgaaattacctccgagggaaacaagaaaacatcaaagaggtctagcaaagcattctctggatattcaacaaatacaaagtatga

SEQ ID NO: 812508 - DNA, 100 bp, Homo sapiens
ccttttcgaccttcaatccagttccaaggactccacgggcaattctgtggtgttcttggtcacacatttatggagtttctgaagggcagtggagattact

SEQ ID NO: 812509 - DNA, 128 bp, Homo sapiens
acgtccaacctcgtgcgcatgcgcagccaggccctgggccagtcggcgccctcgctcaccgccagcctggcctgaggagcgatgcgacaggcatgatggaggtcgagtcctcctactcggacttcatc

SEQ ID NO: 812510 - DNA, 98 bp, Homo sapiens
ggagcgcaggcgccgagactgacaacgcggtcccacagaatccacattcatctcaatggaaggatcctgccttaagtcaacttatttgtttttgccgg

SEQ ID NO: 812511 - DNA, 100 bp, Homo sapiens
ccccgacctgctcagcgccgagggcctggcgcctctgcacctctgccgcacggccgcctcgctcggtggattctgctgcgaaccggagaccatggccaaa

SEQ ID NO: 812512 - DNA, 99 bp, Homo sapiens
ccagttttgtcaaagggaaggtaaagctgctgtattaaagtatgaaaataatgtgatgaatattcgacagtttaactgttctccacatccttactggtt

SEQ ID NO: 812513 - DNA, 99 bp, Homo sapiens
atccctgctcatctcacctatgggaagctgctagctctaacagaaacccagcgtttgctggcagaaccagttcctggcatcaaagccgaaccagatgag

SEQ ID NO: 812514 - DNA, 100 bp, Homo sapiens
tggtcattctagaagggatggtggaagccacagagctgtaggtaaaacttgcctactgatcagttacacaaccaatgcatttcctggagaatatatccct

SEQ ID NO: 812515 - DNA, 100 bp, Homo sapiens
tggagagcatccgcaaacattcagacaaaattggagagactgccatgaagcaagaagatgatccctatgatcttgaagatgtttctgcacagaaatgagg

SEQ ID NO: 812516 - DNA, 100 bp, Homo sapiens
gggaaaggaaatcagccgcactccttccagggagatactacagcaaaccttttgttacatttcatcaaatcaatgcctttgaggaccagggctgtgttat

SEQ ID NO: 812517 - DNA, 98 bp, Homo sapiens
aggaatctgatgactttgagctgtctggctctggagatctgggaaagcttagatatgccaacaacagcaattacaaaaatgatgtcatgatcagaaaa

SEQ ID NO: 812518 - DNA, 100 bp, Homo sapiens
agggctcagaggggtgcgcacaacaaccttatttcgtgctgtgaatccagagctcttcattaaacctgtccggaccctatttgtcagtggccttcctctg

SEQ ID NO: 812519 - DNA, 100 bp, Homo sapiens
aacagtggagatagatttaccctttctaaactattagctgtaattttaaggcccaatgattcatgctgaggtgggcaacaccgtcctgatcatatttaag

SEQ ID NO: 812520 - DNA, 98 bp, Homo sapiens
aaggagaagaggattgtccatagagatctgacaccaaacaacattatgttgggggataaggacaaagtaaccgttacagcatctggaatcaagagacc

SEQ ID NO: 812521 - DNA, 100 bp, Homo sapiens
tccctgtatgtgatgatgaccgtcaccaactggttcaaaaacttgaactggatcgatttatgctgtatgctcacgggcctgacctttgtagagaatcgga

SEQ ID NO: 812522 - DNA, 99 bp, Homo sapiens
aagacttcaaagaaacattaagaacttggatcccattcacctgaggcacccgaagaagagaccatccatatttccagtgttcacttggcaagaagagtg

SEQ ID NO: 812523 - DNA, 100 bp, Homo sapiens
acccacccagatgcactggttggcacaggcataatcaccagcaacacccgggacaataatacgggggccacctacccccacctgaacttcagcattccca

SEQ ID NO: 812524 - DNA, 99 bp, Homo sapiens
ccaaagcctgcccagacggctcacctgtgcgggatggaacaaaaggaatcagtgtctgtccctgaagggtcattaaatcagctatgttcttcagaagaa

SEQ ID NO: 812525 - DNA, 98 bp, Homo sapiens
gaacccttttgatcaagatgcggtgaacatgctgaaccaataacgtttccatctggaggaggcaagtcatttattatgggttctgatgatgttttgtt

SEQ ID NO: 812526 - DNA, 100 bp, Homo sapiens
gacgacttgtgacacggacggcgcgtcctgctgaccccagccggcgccgagggcttggaatctcgagcgggaaaagacttacagattccagtctgctgtt

SEQ ID NO: 812527 - DNA, 100 bp, Homo sapiens
agaagtccagagctgaggactgcctgtttgcaggctttcttgatcatggatggtgaagatataccagatttttcaagtttaaaggaggaaactgcttatt

SEQ ID NO: 812528 - DNA, 100 bp, Homo sapiens
agaatttggggtaaagatcctgcctttgcaagctgaccccattgcgcaggtccaccaggccttctgcaagaacctgctggagcgagctatagagtccttg

SEQ ID NO: 812529 - DNA, 99 bp, Homo sapiens
ttaaaaaactagatccaggttggaatcctcaggttcgatctggggctaatgttctaatttgtggtccaaatggctgcggaaagagttcacttttccgtg

SEQ ID NO: 812530 - DNA, 98 bp, Homo sapiens
ccacccattgtgtcttctcaagaaggggatctgccaggagagcccagcaagatgacagcctcgtccagcaacccagacctgctgggaggatgggctgc

SEQ ID NO: 812531 - DNA, 98 bp, Homo sapiens
tccatacgacataatctgtcattgaacaaatgtttccttaaagtgcctcgatctaaggatgaccctggaaaggtgaatgaaaactttgccattgattt

SEQ ID NO: 812532 - DNA, 100 bp, Homo sapiens
aggatgatgcaaaggcagcaagagatgcacaggagcacagaagttgggcctcattgggcctccaccacctccactgtcatcagatgaatgggagaaggtg

SEQ ID NO: 812533 - DNA, 98 bp, Homo sapiens
agaggaagaagaggatgaagatgtggatctggcccagaaaaactaccggcagagggtcgatgagctgaagttcaccagcgtgaccgacagctcccaga

SEQ ID NO: 812534 - DNA, 100 bp, Homo sapiens
cagcaggaaggcgctggagaccttacgacgggttggggatggcgtgcagcgcaaccacgagacggccttccaaggacacaactcagatgggaagttcatc

SEQ ID NO: 812535 - DNA, 100 bp, Homo sapiens
agaactggtatcaaagaatggattttttcagggatataaccgactgacctggatagtagttgttcttcagggcatccgcttcgatcctgaaattccgcaa

SEQ ID NO: 812536 - DNA, 100 bp, Homo sapiens
catgtatacccaagggatggagaacaagcagtggcgggagaaacgctatgtattagaggaagctgagcaactggagcctcgagttagtgctctggaagag

SEQ ID NO: 812537 - DNA, 101 bp, Homo sapiens
gtccccgtcaccagagccccaacccaccgccgccatggtaggaaaaggtgccaaagggatgctgggtgaagatgtaagcatgggcatctggatggctgcca

SEQ ID NO: 812538 - DNA, 98 bp, Homo sapiens
cagggagaaggaagaggtgtttgaaaaggaacggcagagtcgaaacaaacaatgagggcgaaccagtttcttacatgttctaacgtttgactttgaaa

SEQ ID NO: 812539 - DNA, 98 bp, Homo sapiens
ggtcgtcgtggtccagacagtttagcagaacagcctccgcggctccggggagaagtatggtttcaacatggtcatgtctcatccacacgctgtcaatg

SEQ ID NO: 812540 - DNA, 99 bp, Homo sapiens
taagatctgcagtgagcaaagagaggaaatggagcagtcaatgaatatgctgaattccaaccatgagttgcctgatgtttctgagttcatgacaagact

SEQ ID NO: 812541 - DNA, 100 bp, Homo sapiens
tgaactcgaaatgaagcggaaagcagatatgcgcgtcagcatactttggcggtctgccgagttcctgggattgcaggtgcgcgccgccactcctgactgg

SEQ ID NO: 812542 - DNA, 100 bp, Homo sapiens
tgtcattcaagtggctaatcttacaacagcacaaattcatctaaccaggaatagccaggccagaagaaggaaggcctgtggtgagtgggacaggaaatga

SEQ ID NO: 812543 - DNA, 101 bp, Homo sapiens
ctgcaacacctggcaatgagatccctgtagagctccctagatctttagcttctactcccactgctcctaccactccagcaacgccagataatgcatcacag

SEQ ID NO: 812544 - DNA, 100 bp, Homo sapiens
tggaccgggaaggagcatcccaggacctaccagaatctggatggaagatgctaattctgaaaagagtataaatgaagaaaatggagaagtatcagaagac

SEQ ID NO: 812545 - DNA, 98 bp, Homo sapiens
catcatgcactttggaaacatgaagttcaagctgaagcagcgggaggagcaggcggagccagacggcactgaagatggcccaatggaggagtccaaac

SEQ ID NO: 812546 - DNA, 100 bp, Homo sapiens
gggtggctggtgcagccgaggtcttcgggaattccagcgagggctgtaacagaagacaagtacgaaatactgcaatctgtcgacgatgctgcgattgtga

SEQ ID NO: 812547 - DNA, 100 bp, Homo sapiens
caacaacagcaacttgtgattggcggtgaccggatattcagttgcacatccccacatcaatgcactgccaatgttgctgattgttggaggttcttttggt

SEQ ID NO: 812548 - DNA, 100 bp, Homo sapiens
acctttggagtactggcgaggagagcgaatagattatcaaggaaggccatcaggcaaatcctggcattgttacttgccttgaaaatcatcctcacaaact

SEQ ID NO: 812549 - DNA, 100 bp, Homo sapiens
tccagcttcggaacaagagaccctgcctatgctattggcatgatacttacatttgttgttctggtgctgatgaaaaaggggcaacctgctctcctctatt

SEQ ID NO: 812550 - DNA, 100 bp, Homo sapiens
caaggccaaagagactgcagatgccatcactaaagaaggaaccaaagaggttgttgtaaatgtggatgatgatggagtcatttcattgaacttcgagtgt

SEQ ID NO: 812551 - DNA, 100 bp, Homo sapiens
ggactctgatcatctgaccaaaactcatcatgatagtatggcttgccagtgaacttccaagcaatgctacttcagcccaataagaaaactttgaagaaac

SEQ ID NO: 812552 - DNA, 100 bp, Homo sapiens
ctccagaaaggaaacggattaagtactccagggaaactgacagaatctggtgggccctttattgaccaggtttacgtcctgcaaagttacgcagaggggt

SEQ ID NO: 812553 - DNA, 100 bp, Homo sapiens
agcttccttattctcacatcaacaaccgagatcagtaccgtgtgactgtgccgctgatgggggctgtgtccgacctgtgcgaggctctctccaggctgtc

SEQ ID NO: 812554 - DNA, 98 bp, Homo sapiens
gtgaaacagctgcaaaggttgcattgatgaaattaaagatgcatgctgatggcgataagtcattaccacagggttctccaaaaaatgtggaatccttt

SEQ ID NO: 812555 - DNA, 128 bp, Homo sapiens
acttccctgtggtatggcacaagacggtaagagggagaccaaagttatcaaggaaatggtatagcatttggaggctacttaagtgaagtagtagaagaaaatactccaccaaaaatggaaaaagaagg

SEQ ID NO: 812556 - DNA, 99 bp, Homo sapiens
gatggggagagccatgcactggcctggagcatcgacctcaagacgaagggaacgtcatcgtttggaaagcgtcgcaataagacgcacacgttgtgccgc

SEQ ID NO: 812557 - DNA, 98 bp, Homo sapiens
acactgatgctcctcaagaaatgggagatgaaaatgcggaggaatttgtttcctcggagtctgtcactccagaagataatgatggatttaaaccaccc

SEQ ID NO: 812558 - DNA, 100 bp, Homo sapiens
cacggacagactcatggggaagggccaggtccaggcaggaaactgcatatcttctggtttacatgaagatggagtgctaatggaaatgcccaaaaccttc

SEQ ID NO: 812559 - DNA, 100 bp, Homo sapiens
gaaaacgtaatgaggatgaagattcaccaaataagctatatactttggttacctatgtacctgttaccactttcaaaaggcgagatgtgtgacagaggtg

SEQ ID NO: 812560 - DNA, 98 bp, Homo sapiens
gcggagcgccccttcgcgtcccctgcaccatgagctggggcaccgagctctggtgatgatgacagcctcttcatctatgactgcagtgctgcagaaaa

SEQ ID NO: 812561 - DNA, 100 bp, Homo sapiens
ggtgtagaccgcgcccctggagaacctaaaggcagacccagaagagctttttacaaaactagagaaaattgggaagggctcctttggagaggtgttcaaa

SEQ ID NO: 812562 - DNA, 100 bp, Homo sapiens
tttcagccaatactgtggaagaaattattgaaaacttacagcaagatggttcatcttttgccctagagcaattgaagtcaggtgacacacagtcttttgc

SEQ ID NO: 812563 - DNA, 99 bp, Homo sapiens
agggagccacctccgggcgcagaggcctacatcccacagagatacccagacaacaggatcgtctcgtccaaggtgctgatattcgtggcttcagtgctc

SEQ ID NO: 812564 - DNA, 100 bp, Homo sapiens
gagaaaagccttttcagtgtgatgcttatgcaagcaaagatctggaggagcagttacggtctgtgtccagtgtagatgaactcatgactgtactctaccc

SEQ ID NO: 812565 - DNA, 98 bp, Homo sapiens
gaatctgctacaactgctgactgatgatgaagcctggaatggattcgtggctgctgctgaactgcccagatgtcgctactattccaacctccgcctgc

SEQ ID NO: 812566 - DNA, 100 bp, Homo sapiens
tcaggacggacaagcacagtcttcggaaggatcgacgagaacgtgctaggagcccagctggacgttgaggccgcccattcagagatcctcaagtacttcc

SEQ ID NO: 812567 - DNA, 100 bp, Homo sapiens
gagctgcctgacagtctgatcacctcagcgttgcagcctcgattcattcaactctttcagggtacttataagacatttccaaagtcaagttaatgagctg

SEQ ID NO: 812568 - DNA, 100 bp, Homo sapiens
ggagtgaaacatggagttcttctgactgaaggagtcgtaagaaagcagtgggagttgaagtcattgtcaagtgcttgcgatcttttacaagaaaatctca

SEQ ID NO: 812569 - DNA, 98 bp, Homo sapiens
ggcagctgctagcaggctgtcataacaatgaccacctggtagagaaataccgcattcttatcacaaagctttcaccaacaatcaccagtggtttacac

SEQ ID NO: 812570 - DNA, 100 bp, Homo sapiens
gttccctttcaactttcaaaacgaatatccatgcaacactcagtgcatacaaagtggagttagcagagacttgtcttacaaggaccggcactggcatgaa

SEQ ID NO: 812571 - DNA, 114 bp, Homo sapiens
ctgcgttgggagtctggaagaagactctcccttcccttcctttgcccaggcgggtgccacgtctatgtgggcttcgtgctgtgggctgctgaatgaagtcatgggaactggagc

SEQ ID NO: 812572 - DNA, 99 bp, Homo sapiens
ttcgcttggtgtcctcctggcctcagcaacctgacaattctgtcgtgtcccggctttaaaacagagagaagcaatcctgaaactcatcttgaaaaatga

SEQ ID NO: 812573 - DNA, 98 bp, Homo sapiens
ccaaggaaggcttcgagaagattagcaaaggtgctaatccagtggaaatcaggagagaaatggtggagtcaatgaagaaagtagcagggatggatgtg

SEQ ID NO: 812574 - DNA, 100 bp, Homo sapiens
caccactcaggctgaacgcaagattcgtatcattatggcagagcccctggatcttagaaatgaagttgaaaaattacgcaatgaagtgaatgaaagagag

SEQ ID NO: 812575 - DNA, 50 bp, Homo sapiens
gagtgatcactctcaatcccgggtgagctccaaggaagtgaataagtttc

SEQ ID NO: 812576 - DNA, 98 bp, Homo sapiens
agaatacgaggaggaagaggtggccataccgttgaccgctcctccaactaaccagggtttgttgcatcggaccagtgtccctaaggaagtagttgatt

SEQ ID NO: 812577 - DNA, 100 bp, Homo sapiens
cgggtggcggctcgggacggaggacgcgctagtgttgcacttcccccagctggccctgaggcggaggctggggcagctgagctgcatgtccagacccgct

SEQ ID NO: 812578 - DNA, 100 bp, Homo sapiens
ggaagccacgtgcagacatctacaaccttcgatctcctgacgaattactgtggcatgatcctccaccattcacactctaccctggactctgggaagggac

SEQ ID NO: 812579 - DNA, 99 bp, Homo sapiens
agtggaaggcgcttttcaccgcggccatcctgcaggcacagttgccgattacagttggtgaggtaacatacgtggagctcttaatggacgctgaaggaa

SEQ ID NO: 812580 - DNA, 98 bp, Homo sapiens
aaaactcacagaccaacgggatagccgatgacaggcagtccttgtcgtcagcagataatctggttccatcaatggtgagcaccagcctgaatgcagaa

SEQ ID NO: 812581 - DNA, 100 bp, Homo sapiens
atgtacctgttaccactttcaaaagtagtgggcagcagtcagtgacaggtgtaacctctgtggatgacagcaacagttactggaggatacgggggaagag

SEQ ID NO: 812582 - DNA, 100 bp, Homo sapiens
ctgtttatgaagcactgagaaatgcagacatctggtccctgggcataacagctattgaacttgcaagaggggaaccacctcattccgagctgcaccccat

SEQ ID NO: 812583 - DNA, 100 bp, Homo sapiens
ccaaggagaaaacctgtgatcgtctcccgaagttcctcattgtgggaccccagaaaacagggcaagtactttgagatccagttcagccgaggtggggagc

SEQ ID NO: 812584 - DNA, 98 bp, Homo sapiens
tgttggattcaaagacagcccagaatctctgaggagatgttaaagtaacccatcttgcaggacgacattgaagattggtcttctgttgatctaagatg

SEQ ID NO: 812585 - DNA, 141 bp, Homo sapiens
cgggatcgtgaccgagaccgtgaccgagagcgtgaccgagagcgcgaatatcgtcatcgttagaaggtatggtgtggtgcttcgaaaactggacttggttaaagaggccattgatgtgtttgtggaagctactcatgtttt

SEQ ID NO: 812586 - DNA, 100 bp, Homo sapiens
aggccacgacccacgagatcatggggcccaagaaaaagcacctggactatgctggcccgcgagagacattgatgcattttgctgtgcggctgggactgct

SEQ ID NO: 812587 - DNA, 100 bp, Homo sapiens
aagtggtggggaataaacgcctgaaagaagctacctgcaagctctatttttaccagatgctcttggctgtgcaggtatttattacagtatcaggagccaa

SEQ ID NO: 812588 - DNA, 99 bp, Homo sapiens
cctgacagtaccagtagttattttcccagaaactttgaaaagcaccccaaagaactgatcagggggcccatatggcttcgaggttggaaagggaatgaa

SEQ ID NO: 812589 - DNA, 100 bp, Homo sapiens
aacacctcgccaaagcagagaaatagaggaggaagccaagaatctggtgagcgaagccatcgcagctggcatcttcaacgacctgggctccggaagcaac

SEQ ID NO: 812590 - DNA, 98 bp, Homo sapiens
cctgctgtccgcgtcctactccgccttcgagatgaaggagttgccgcagctggtggcctcagtcatcgagagacttgccttcaaggtgtgcaagtaag

SEQ ID NO: 812591 - DNA, 100 bp, Homo sapiens
tgcaactactttagaagaaacgacaccattgtttttagacaagttggatggcttgaggactggtactaaaaggaaacgtgactgggaggccattgccagc

SEQ ID NO: 812592 - DNA, 100 bp, Homo sapiens
tcacgttgagaggggggcgtgaagacgccttttcatggaagctggggaatgtgggggccttggggagactgttcgagaacgtgcggtggaggagtccagt

SEQ ID NO: 812593 - DNA, 100 bp, Homo sapiens
ctgcggccacttctcgttttcatctgggccaagatcctcgcagtggacagcggaaagtcgctggcgggcaagcgcctcacgggcctgatgcagtcctcct

SEQ ID NO: 812594 - DNA, 98 bp, Homo sapiens
ccgggacacctggaagccgagaaatgcacgtgtggagtgagagcgaggactgcctgcctttcttgcagctagcacaggattacatctcctcctgcggc

SEQ ID NO: 812595 - DNA, 99 bp, Homo sapiens
ggagacgcaggaagcgatgaaagagatgtctgctactatggactacaaattttggaaaatgtgataaaaacaaggtggaagattcttccaaggaaccag

SEQ ID NO: 812596 - DNA, 100 bp, Homo sapiens
gccgccgttgcctccgccgccaagagtgagcgagcggacccgcgatggggctgaaatctctttaatgatggagggaagcaggcagacgcgagtgtctcgg

SEQ ID NO: 812597 - DNA, 100 bp, Homo sapiens
gactctcatacaggcgggcgccagtgcatcttctagacccaacatgagtgaagtttcctgcaagaaacgggacgactatttggaatggccagagtatttt

SEQ ID NO: 812598 - DNA, 100 bp, Homo sapiens
gacaaaatcctcaccactagtccatcagatttctttaaaagccatagttataataaagccattattgcccgtgtcacaaccttgtcagatgtagtagttg

SEQ ID NO: 812599 - DNA, 100 bp, Homo sapiens
ggaacagcacccccttctttaagattccacctgctcctacgaagcccgactttgatggtcctcgagagaagatgcagaaactgggagaaggtgaagggtc

SEQ ID NO: 812600 - DNA, 100 bp, Homo sapiens
gacagcctgcatgactgttcacattgcctctactcaatagtccccccagctttgtgtgctggtctcggggcttcatggagatgaatgggcggggggagtt

SEQ ID NO: 812601 - DNA, 100 bp, Homo sapiens
gaacttcaaagggaaggtcattgtcatcgtggggcatgtggcaaaacacacagctgagcatattcctctgcagacactattgaagttcatggtggatatt

SEQ ID NO: 812602 - DNA, 100 bp, Homo sapiens
tgagcacccaggatccctcagatctgtggagcagatccgatggagaggctgagctgctccaggacttgggttacgccccatggtgtccatcctgccagca

SEQ ID NO: 812603 - DNA, 98 bp, Homo sapiens
cccaggaggacgactgggaccgggacctgctgctggacccggcctgggagaagcagcagcgcaagatccggccagttattgaacaaacctttcctttt

SEQ ID NO: 812604 - DNA, 100 bp, Homo sapiens
taatgcatgctatggaggcacagctgctgtcttcaatgctgttaactggattgagtccagctcttgggatgttaccccaacaagccgaagcttactaagg

SEQ ID NO: 812605 - DNA, 98 bp, Homo sapiens
acagtctttggcagccttatcattggttatgccagtttagaagaagaatgtgaatcctctctttgcacatctgcgttaagagccaggaatctagagct

SEQ ID NO: 812606 - DNA, 99 bp, Homo sapiens
acgaggagagacagaagaagctggaggccggcaaagccaagggaaatcctcattgacgattcaatttgttgaaggccaatttgtggactcctacgatcc

SEQ ID NO: 812607 - DNA, 100 bp, Homo sapiens
acccattgggacagtgacccctgctctgaagctcaccaaaaccatccagatgtccaacatcacagtcacatacagagatggccgagtggcacagctggag

SEQ ID NO: 812608 - DNA, 98 bp, Homo sapiens
cattgacaaggaggacctgcacgacatgctggcctcgctgggcattgaagttgatatcgatgtggagcacggagggaaaagaagccgcctgacccccg

SEQ ID NO: 812609 - DNA, 138 bp, Homo sapiens
tggaatgatccttggaaaaaatctgaaagtgataaaataatatgggaaaaacatcaaattcttgaccaatctaggaggaagcagaccagcccactacagagccaggcatggtcctggacagtgtggaagcaggagaca

SEQ ID NO: 812610 - DNA, 99 bp, Homo sapiens
gacgatgcaccagtgatctacgggctggagttccagtgccttgtctttgaagatgctcccaatggggtggaggcggccctggcagctgggatgcaggtg

SEQ ID NO: 812611 - DNA, 100 bp, Homo sapiens
accttcagctgtttcctgagttgctgtttcttgggactgcgaagctatacaggctaatctgtctatgatcttctcccaaaggagttacagttacctccat

SEQ ID NO: 812612 - DNA, 100 bp, Homo sapiens
gcctgcacctcggagaaccaggaaaacgaggagaatgagcagacggaggaggggcggccaagcgctgttgaagaactggacggggctggaggagaagagt

SEQ ID NO: 812613 - DNA, 100 bp, Homo sapiens
atttccaggaagaaatagagtttcttaatgcaattttcccaatcataccctaatgatcccagcaagataatgtcctgtcttctaagatgtgcatcaagcc

SEQ ID NO: 812614 - DNA, 100 bp, Homo sapiens
cggccatgtaagatcgtcgagatgtctacttcgaagactggcaagcacggccacgccaagcgctagtcctgctgatgggcaaagaaggtgtccacggtgg

SEQ ID NO: 812615 - DNA, 98 bp, Homo sapiens
gtactctatcaaaagaggatatgttgatgtttcgtctgaactcactttctgctttggcagaactggctgtgggttctcgatggtaccatggaggatca

SEQ ID NO: 812616 - DNA, 98 bp, Homo sapiens
cgcctgatgggtcgaggcggacgcgcggctgcgtcagaacaacttcaccagaaggaccaaaaaatcctactcttgttggaagagaaggagatgatttt

SEQ ID NO: 812617 - DNA, 99 bp, Homo sapiens
tcttcaagctgggcttggccaagtccatccaccacgctcgcgtgctgatccgccagcgccatatcagacacatctgaccttcgggaaggagttcacaga

SEQ ID NO: 812618 - DNA, 99 bp, Homo sapiens
tcagagaggccattcgacgctacagccacaggattggcccactttccccattcacaaccccaggcaggcacagtcttccccgccgtggtcctatgacca

SEQ ID NO: 812619 - DNA, 100 bp, Homo sapiens
tatggatttcaatccctccgtatgcacatgtgggtagaggacgtgttagacaagttcatgagcaaaatgatgcttcaacacccaggccaggtctctgcct

SEQ ID NO: 812620 - DNA, 98 bp, Homo sapiens
gccctcaaaatgccttcttcctcgtaaaattctggattggatttgaggctcctcccctccagggacaggctgcagctccagcgagtggcagtggagct

SEQ ID NO: 812621 - DNA, 124 bp, Homo sapiens
ctgccatcgggatattaaaccgcagaacctcttgttggatcctgatactgctgtattaaaactctgtgactttggaaggggactctgtgttgatgctctcattgaactgtctgatgaaaatgct

SEQ ID NO: 812622 - DNA, 100 bp, Homo sapiens
ccttctggacgtgaagacacggctggagcaggagatcgccacctacagccgcttgctagaggttgaggacgctcaatccagagacaatggccccgatggg

SEQ ID NO: 812623 - DNA, 142 bp, Homo sapiens
tggatgtagaaagtgtgaggaaaaggccatatgattctgataacctacagcatgaagagctactcatgaaggcaattaagttggaatatgcaaggttggttaagttggcccaagaagacaccccaccagaaaccgattatcg

SEQ ID NO: 812624 - DNA, 100 bp, Homo sapiens
ttcatccctgtggaggaaaatagtggggtctctgagatttatctcacattcttgaaggtggcattgaagagcactaagatcggaagatgagtgagcttga

SEQ ID NO: 812625 - DNA, 99 bp, Homo sapiens
tctgcagtgcagcattaatgggccgctgacatgaatatggagtagttttctctagcaaagaaactggaccaggatcttaatgaagtcaaagctcgagta

SEQ ID NO: 812626 - DNA, 100 bp, Homo sapiens
ggaatgacctctaaacagcttaacaactgggccgtgtataggttgtcaaaattcacaaggcaaggtgactttgaaaggcctaaagatattggaagaccta

SEQ ID NO: 812627 - DNA, 98 bp, Homo sapiens
agcgaagagctgcttctgtatcttaagtgccggtggtggtgtgcacattgagccccggtatagacagttcccccagctgaccagatcccaggtgttcc

SEQ ID NO: 812628 - DNA, 98 bp, Homo sapiens
gcctcctgaccttggctggcgcaaaggctgccctggatgggactcctggtgccatggatgtagctttgggatcaggtgccactggggtctttaccaat

SEQ ID NO: 812629 - DNA, 98 bp, Homo sapiens
gatgccctcaactatgctctccgctgtgtccacagcgttcaagcagcacagtcagcagcctccattcaagagttgattcattagaaaagtcaaatact

SEQ ID NO: 812630 - DNA, 100 bp, Homo sapiens
aggaagaaattgttcagttcttctcagctggaaggggtctgtgtacatcagcaactttcaaacccattttatttggagaaaatgtactctctggatgcct

SEQ ID NO: 812631 - DNA, 98 bp, Homo sapiens
tctgacatgtttgatcaaggtgggagctgaggctgatcagaactatcagaactacatcttaaggggatggatcttctcctgaactcccaagtcttgag

SEQ ID NO: 812632 - DNA, 99 bp, Homo sapiens
gcatcctcatataattaaactatgctatctgtgagcagcagttgataatgtgcataaaatctgggaacaggccagatgtggatgacatcactgagtact

SEQ ID NO: 812633 - DNA, 100 bp, Homo sapiens
gtgctggggctgctttctggctttttggtctggagacgatgccgcaggagagagaagttcaccaacggcgaggggaccgacctgtttgccgtggctgtcc

SEQ ID NO: 812634 - DNA, 51 bp, Homo sapiens
cctgaacatcatgaattcccaagaaggagcgtccagaccaaagcatttact

SEQ ID NO: 812635 - DNA, 100 bp, Homo sapiens
ccagttggaaagaaccttttccaggaacagatgctgcttgtgttgctcagagtcacggaatctgtactgaagatgccatcacaagcttttctacagttcc

SEQ ID NO: 812636 - DNA, 100 bp, Homo sapiens
tgaccaagcacagagtcaccagtttccatatgtaatgcaaggggccgttgctccagggagaactgcaaatatcttcatccacccccacatttaaaaacgc

SEQ ID NO: 812637 - DNA, 100 bp, Homo sapiens
ccaagttaaagaacatggcgacgtctaatctgttaaagatggttctgtgaagggaaagaactgcacaacactcctgatattcaaatccactgtgagggag

SEQ ID NO: 812638 - DNA, 98 bp, Homo sapiens
ccgctgacgacacccctggtggatggcgaggatgagaggggctcttggctttgggcctcagtgcaagtccattggaaaaggcagctgcaacaatctag

SEQ ID NO: 812639 - DNA, 100 bp, Homo sapiens
ggctgcctataatcaagtaaaaacaatagctcaaggaaacctttccaacacagatgtccaagctgccaattttttgctccactcaagcctgttagaatca

SEQ ID NO: 812640 - DNA, 100 bp, Homo sapiens
aaacgtttcatttaagtcccagatgaggaccgaaaacttgaaatcagaggagcatctgaaatcaagtaatattagttgtcatggatgcactggtagaaga

SEQ ID NO: 812641 - DNA, 100 bp, Homo sapiens
ctcctcctcctgcttctcctgctcagagttcctgcctccagctgccaggggggacagccagccagcagcaggaggggcgccatgttttggaagtttgacc

SEQ ID NO: 812642 - DNA, 100 bp, Homo sapiens
tcaatgtaatgttgtctcatcccaatcacacagtctcggaaagggagcgacccagacaaagagaagaaaggcctggagagtcgtgcggacagcattggga

SEQ ID NO: 812643 - DNA, 111 bp, Homo sapiens
tttccgaggagatgaagggatctttgaggagtctttcatcgaagaaaggaggcagggcctcgagcagtttattaacaagcttcccagcagcggcttatggaccagtggcag

SEQ ID NO: 812644 - DNA, 98 bp, Homo sapiens
gtgacctccagttccatccatgttgctgcaaatggtgaagaacgaggtggagaagctcccccgacagcagcggaaggaaagcatgaagcagaagatgg

SEQ ID NO: 812645 - DNA, 100 bp, Homo sapiens
ctgccgcagcagacacagcctccagcaaaggaagacctggaagcgctcatagcccatttccagacactcgatgccaagaggactcagactgtggaacttc

SEQ ID NO: 812646 - DNA, 100 bp, Homo sapiens
aagttgcaaggatattcctcatgtatcatgcaaggatattcctcatatatcatgagtctcgctctcagtcaaaatctccaacgggaactcctgctcgtgt

SEQ ID NO: 812647 - DNA, 100 bp, Homo sapiens
acaagtacatcaactcccagctccgctccatcacccacagctttgcgggaaggccttccaaaggggtgccattcgcgccctctggcctcaaggtgcgcta

SEQ ID NO: 812648 - DNA, 98 bp, Homo sapiens
gcagtctctgcccccgccggccggcctcaacaaaaataaagcagttggagtgatgaagtcgggccatgtatttacaattgagccaatgatttgtgaag

SEQ ID NO: 812649 - DNA, 100 bp, Homo sapiens
ggcggagcaagatggcggacatctccctggacgaactcatcaggaagcgcggggcggcggcgaaaggacgaaaactttagaaactgttcctttggagagg

SEQ ID NO: 812650 - DNA, 99 bp, Homo sapiens
tgtcctgaaatttaaaactaaggcatcggtgcttatacctgaaaaaagcggcagtctgcaacccagaagagggccttacttggaacctaaccatgctgg

SEQ ID NO: 812651 - DNA, 100 bp, Homo sapiens
gttacgttgttagaatgtagcaggcttcaacggaccacaccaaaatgccatctcaaatggaacacgccatggaaaccatgatgtttacatttcacaaatt

SEQ ID NO: 812652 - DNA, 100 bp, Homo sapiens
ccggaggctctggatggaagccatggatggccgggaacctgaaggtgggagtcaatcattttgacaagtctcctgaaaggaacagctagcaggaactgaa

SEQ ID NO: 812653 - DNA, 99 bp, Homo sapiens
aagaatgttctgtctcagtactggactatgggctctcggaacaccaaaaagctacccacctttctgttctgagacccctcaagagacatataagaaggt

SEQ ID NO: 812654 - DNA, 100 bp, Homo sapiens
tgaacgtcacctcaccgctccaagcctccagccggcagaaaacagatggggtcttgccaggtcttggccaggctggtcttgaactcccggactcaagcaa

SEQ ID NO: 812655 - DNA, 100 bp, Homo sapiens
agactgtccgtgtggaccctgactcacagatagagatcatttccagcttggcaccttatctcatactctcaacattaaagctactgggtacctggaatta

SEQ ID NO: 812656 - DNA, 101 bp, Homo sapiens
gaagaagcgaccaaagcgcctgaggaccggcaacatggtgcggtcggggaataaggattctgaaaccttccttgtatccctcctgagacatctttgctgca

SEQ ID NO: 812657 - DNA, 100 bp, Homo sapiens
tttgcatgaaaactgcactttattgcaagtgtatgtggaatttgatgatcttgaatgggataaacgagagtgggttaaagtttatgaagatttttcaact

SEQ ID NO: 812658 - DNA, 100 bp, Homo sapiens
ctccacgacctcggtcgagcatgttcaccagggcccagtctggcaagttctccggcagttctccggcgcccccaagccagccgcagggtctgagctatgc

SEQ ID NO: 812659 - DNA, 118 bp, Homo sapiens
aagaaaagaaagagaaaaagcagaaagtagatgaagatgagattcagaagatgcaggattttatattggaagacatggatcttgctgccaacgagatcagcatttatgacaaactttc

SEQ ID NO: 812660 - DNA, 99 bp, Homo sapiens
ctgagagcagcagcctggctcctggtggctccagcagcagccccagcatgagaccagatgtaagctctcctccatccagctcctcaacagcaacaacag

SEQ ID NO: 812661 - DNA, 100 bp, Homo sapiens
tcaaatacaacaattgaggatgaagatgtgaaaggtgcaattgctggtatagttgatcagccgatgcagaacttccagaaaacatctgaggcacaggctt

SEQ ID NO: 812662 - DNA, 51 bp, Homo sapiens
cagagatggaacccacctttccccagggaggcagaattgaccacgggcacc

SEQ ID NO: 812663 - DNA, 100 bp, Homo sapiens
acagaggcagaggcgtagtcgagccgaggaagaggaaagtggcctccggggaagccagagctgactgaaggctcttgatggaaatgtgtatgatcatctc

SEQ ID NO: 812664 - DNA, 100 bp, Homo sapiens
cagcgagactccgtgggcataggaccctccgagccagcaagcttgaaggtgagcacctcgaagggcttctttttatgttgaaaggcacgggtttgcatgg

SEQ ID NO: 812665 - DNA, 98 bp, Homo sapiens
cctggttacgttgtgcctgaccgaggaactggcagcagcgctccgacagttagttaatatgtgcatcaacccagatccagagaagcgaccagacgtca

SEQ ID NO: 812666 - DNA, 52 bp, Homo sapiens
ccggcctgggctgctctgagacatggtggagagtgtgactgcaggatcccca

SEQ ID NO: 812667 - DNA, 100 bp, Homo sapiens
aaattcagttccagtaattattgctgctgttggtaccagacaaaatggtactaaatcagaagtactgaatatagataacccagacttggctaaatatcca

SEQ ID NO: 812668 - DNA, 100 bp, Homo sapiens
cgctgatctagtgcttctcgaaaaaaaccttcaggcggcccatggcaataagagctaactgccatcaagagccatcagtatgtcttcaagctgcatgccc

SEQ ID NO: 812669 - DNA, 100 bp, Homo sapiens
agggagggacccaccgtagagactaaggatggcatagttcttggagcagatacaagagcaactgaagggatggttgttgctgacaagaactgttcaaaaa

SEQ ID NO: 812670 - DNA, 100 bp, Homo sapiens
actatttctacatctctcctggagcgatgaagaacgatacagatacagggaatatgcagaaagaggttatgagcgtcacagagcaagtcgagaaaaagaa

SEQ ID NO: 812671 - DNA, 100 bp, Homo sapiens
aagcctgaaaagtcgcagcgagctggagccgccggagagccctatgagtttgtctctctggaatggctgcaaaagtggttggatgaatcaacacctacca

SEQ ID NO: 812672 - DNA, 100 bp, Homo sapiens
aggcattggacacacgactgggaaacctctccatttcaaaggatgcccttttcatcgaagcataccaatcccattgtggaaaatggacagactcatccgt

SEQ ID NO: 812673 - DNA, 98 bp, Homo sapiens
gcctcatcagaaatgttacacacggagtatcaaactctgctgccaagatcctgaggaggatgaaggggctggccctggaggccgagagtgagctggag

SEQ ID NO: 812674 - DNA, 99 bp, Homo sapiens
taagatatccgagctgaagaatggctcattttctgggttaagtctccttgaaagattgaggctgggatgcagatggaaaaggcccttgtgtctgggaca

SEQ ID NO: 812675 - DNA, 103 bp, Homo sapiens
gggagtctccgcgtcccgctcgctgggagagaggtacctctccttttccctctccctttccctaaggtgtttgatcagtatgtaaagaccagggcagaggaag

SEQ ID NO: 812676 - DNA, 100 bp, Homo sapiens
ggaagaattaagacgcatggaagaacttcacaatcaagaaatgcagaaacgtaaagaaatgcaattgaggtatttctgggaaaagccagcttctgtttgc

SEQ ID NO: 812677 - DNA, 100 bp, Homo sapiens
gagattgcacttaaacggaacttgcctgtgaatttcgaggcctccccatggccacccatggaccagtcggcattcacttcctcccttctgcggcccataa

SEQ ID NO: 812678 - DNA, 100 bp, Homo sapiens
cctacagaacctagcctatcagctggggctggatgagtatgggaatttcttagccataggctcacatgacaactgcatctatatatatggcgttagtgac

SEQ ID NO: 812679 - DNA, 99 bp, Homo sapiens
gctagctttggcgaggggacggagccggatcaggagccgccgccgccatatcaggattggccatttgatgatggagctccaccccctaatcagatagta

SEQ ID NO: 812680 - DNA, 100 bp, Homo sapiens
aggattccaagtaactcttatttggccaagtcattatggcagccactgagatctctgtcctttctgagcaattcaccaagatcaaagaactcgagttgat

SEQ ID NO: 812681 - DNA, 51 bp, Homo sapiens
attctggccaagcgcctgctgaatccccgcgcagtccccgttcagcctgcc

SEQ ID NO: 812682 - DNA, 100 bp, Homo sapiens
aaatttgtgcacacatttcatggacagctgattctttcccagtgagtgatagttgcttcaggaatcttgcagaagaccgcagtgggataaatctcaaaga

SEQ ID NO: 812683 - DNA, 98 bp, Homo sapiens
aaggaagcagcaggacacgcccggaagccctgaccacagagacgcgtccagcattagtgaccagaaggatcccaaggatcgaatggttcaggttgtga

SEQ ID NO: 812684 - DNA, 100 bp, Homo sapiens
ctgctcctgagggtgctggaccccctgctctgcgacttcctggatccaattctggtacagcagttgcgccggacatacaaatatttcaaagattatagac

SEQ ID NO: 812685 - DNA, 98 bp, Homo sapiens
ccttcagcctcagctaaagattgacaaagctgtggcctttcagaatccgcagactcggcttgcgcctcattttcacagatggttctcgaatcgtcttc

SEQ ID NO: 812686 - DNA, 98 bp, Homo sapiens
cccagcaccacctccagcccctgcgcctcggtttggaattcacccagttgcaggccgaatgcctggtcagcttaatgtgctgctggctgaggctggtg

SEQ ID NO: 812687 - DNA, 100 bp, Homo sapiens
aggagtgggactctgggacattcgaaaacctcagaggtacatctccgttcatggatgcattaacagccaatgggacaaccaacatacagacatctgttac

SEQ ID NO: 812688 - DNA, 100 bp, Homo sapiens
ccggtgcgccagaagaagcggatggacagcaggccccgcgccggaagagccgaatgcacataaggtcgccagcccaccctccggacccgcataccccgat

SEQ ID NO: 812689 - DNA, 99 bp, Homo sapiens
ttttaacctggaggatgcagtgaaagaaacttcctcagtaaagcgtctctccaagtttgtgcctaagaagatgataatcacacaaacaagtcactgtta

SEQ ID NO: 812690 - DNA, 98 bp, Homo sapiens
gttttcagatagctttgcttacctctgaagatcacattaatcgcaaatatgcttttaagagcaatggtggaacaaagcggcaaaagatatcccatcaa

SEQ ID NO: 812691 - DNA, 98 bp, Homo sapiens
ggcacttcattggccacctacagaaacaaaatgtcaacaaattgatgggtcatctctgaatttgagcaatggtgaaacggaatctgtgaaaaccatga

SEQ ID NO: 812692 - DNA, 98 bp, Homo sapiens
gaaaaaatcagagatcggctgcctgtgaatgtccgagaactgagcctggatgatcctgaggtggagcaggtcctggatgcctcatcccttagtttcaa

SEQ ID NO: 812693 - DNA, 100 bp, Homo sapiens
ctgtgtcaaacatccatatcataagtggaattttggagatattcaaagggtgctggaaatgtaaacaagaatagactgttcattcctgatggcttttagt

SEQ ID NO: 812694 - DNA, 100 bp, Homo sapiens
ctaaagtctgcgaggaggaagtcgcctctgtgctcgtgagtccagggatctaagatgccttcaattaagttgcagagttctgatggagagatatttgaag

SEQ ID NO: 812695 - DNA, 100 bp, Homo sapiens
ttgaatcaagatttcaccacagcctacagaaaaactcatcactgctatatatgcagattatgcccggagtttgaagaacctcggttttaagcagggagca

SEQ ID NO: 812696 - DNA, 101 bp, Homo sapiens
ggagatcctgatgtttctcagtgccattgtgatgatgaagaaccgcagatccaggaaacagtgcttcttagtcctacgtcagcagcagtttaatgtccagg

SEQ ID NO: 812697 - DNA, 100 bp, Homo sapiens
acgagaaactggacaaccaacggctcaagaatttcaagaacaaaggccgcgacttggagggaatttgaagtactgccttgtaattcttaatcagcctttg

SEQ ID NO: 812698 - DNA, 100 bp, Homo sapiens
tttgagctaagtgatgatggccgctttgaggtgtggaatgcgatgactcggaagctgaagagggaactacccttttcattccgatcaattaatacgagag

SEQ ID NO: 812699 - DNA, 100 bp, Homo sapiens
aagaagaaagtgtgaagaagaaattgctaaattatacaaacagcttgatgacaagccctggtgcatacaacccagagaagaagccaccgccaaaaattgc

SEQ ID NO: 812700 - DNA, 100 bp, Homo sapiens
cccggcccgccgcggtcccgtctcctgggcctgtcccgcccgcgccctccgccggccctcagttctccgggagatgttgcataaccactccttcgtgggc

SEQ ID NO: 812701 - DNA, 100 bp, Homo sapiens
aatgctctcccatctgctccaggctttagattatggggcaccccctcatggaggaattgccttaggctattcaagatctctggcagtggaggaagtctct

SEQ ID NO: 812702 - DNA, 100 bp, Homo sapiens
gggctcaaaccatcctcccacctcagccttgagctgctgctcttcctccagaacctgcccacagcccactgggatgatgaggacatcagcctgttgctgg

SEQ ID NO: 812703 - DNA, 100 bp, Homo sapiens
aaagccaaggagaagttctcccagctggcagaagcctatgaggtgtctttcctgaagactatcttcccgtctcaaaatggacatgatggatccacggatg

SEQ ID NO: 812704 - DNA, 100 bp, Homo sapiens
cgccatctgccccagctggtgacagagtagaagcttccactccctcctgcccagatccggccaaggacctcagcagggtcagtatagaccttctgatttg

SEQ ID NO: 812705 - DNA, 100 bp, Homo sapiens
ttcaccattgaggcttaagggacagagaaaagacagcgtggtcccagatagaaactggcgatggaatatgagaggagccctctggaaagaaaaggacaga

SEQ ID NO: 812706 - DNA, 99 bp, Homo sapiens
agcgcgggagccgtcacggtgctcaaggctgctgccccattggaagattactccccaggcttcccttgccccaagcagtgagctgactggaatggtacc

SEQ ID NO: 812707 - DNA, 99 bp, Homo sapiens
tgggggcaaagacctacccagatactgattccttcaacactgtagcagagatcactgggagcaaatatccagaacagacagggaagttggacccccact

SEQ ID NO: 812708 - DNA, 100 bp, Homo sapiens
tgtggtctctggagatacttttcattcatttcctcattcagtcacatcgatcagacaacaacatggcaggaccccaggaaggccatgctgtcccagatga

SEQ ID NO: 812709 - DNA, 100 bp, Homo sapiens
tttccgagaactcccatcagtttctgtatagtgtaaaagactattgcccagaagaaaagatgtttggttttcacaagccaaagatgtaccgaagtataga

SEQ ID NO: 812710 - DNA, 98 bp, Homo sapiens
aaggcgacggcgccttcctcgggtcagactaccggcggcgacgaccacaggagtgatgatgatgatgattttgatgatgaggaagctgaagaaaaagc

SEQ ID NO: 812711 - DNA, 100 bp, Homo sapiens
accttcaatatcaaaaatgactttactgaagaggaggaagcccaggctcttgtcaggatggtgaagctgttcatcggaaacctgccccgggaggctacag

SEQ ID NO: 812712 - DNA, 100 bp, Homo sapiens
gggagcaccccagggccctgtggcatgaggaagctgggggcatcttctccccagcctgattcggactccaccaaacactcaactccatcgaatagctcca

SEQ ID NO: 812713 - DNA, 100 bp, Homo sapiens
aaagaggcagcttctcctcttccagtttgctcatcacttagaactttggcgactgggatccacagttgcaacagctgtctgcttttctgtggagactgcg

SEQ ID NO: 812714 - DNA, 124 bp, Homo sapiens
aaaaccaacctatacatccgaggattgcaaccaggcactactgaccaagatcttgtcaagctgtgtcagccacccttggcttctgcgttcgaagagtcctgtaggtaacccccagctgatccag

SEQ ID NO: 812715 - DNA, 100 bp, Homo sapiens
aatcataccatatcagatgcctcgcagagcaccaggcccaccgtgaaaggaataatgtatttgtggccttggacatgaggcagtcagtcctctgttgctg

SEQ ID NO: 812716 - DNA, 142 bp, Homo sapiens
ccgaccgctgccggcggcgggtcgtgggggctgactgtcgctctgcctttgacaggagaggctgcttcttgtagagataaataggatttaccaatccttggatgaagtgcttgggaagtctttaagtgccataatcaactgc

SEQ ID NO: 812717 - DNA, 99 bp, Homo sapiens
tttgtgagcgagctggaggcggccaagaagaacttaagcgaggccctgggggacaacgtgaaacaaccactggagcgatccagcgaagatgtggatata

SEQ ID NO: 812718 - DNA, 98 bp, Homo sapiens
atgagtgacttcaacctggggaatcttctgaaagttctgctgaagacagtgagcaggaagatgagagaggtgctcaagacatggataataatggcaaa

SEQ ID NO: 812719 - DNA, 100 bp, Homo sapiens
gaactttctgcatttgacagataaagatggtgaacaacctcaaatactgctggatcgtagggcatcagaaaaacaaaaagaaatagagagagtaaaagag

SEQ ID NO: 812720 - DNA, 98 bp, Homo sapiens
atgcttggcagcagaaggatttggcaacagactttgtttcttggagtccacttccaattccaagtccagttacaacacagggatcacaacaaacacaa

SEQ ID NO: 812721 - DNA, 100 bp, Homo sapiens
tcaatgttaagatggcccttgacattgagattgccacctacaggaagctgctggaaggcgaggagagcagaaacctgctcctccaaagccagagcccaag

SEQ ID NO: 812722 - DNA, 98 bp, Homo sapiens
agctgtattcccaagataagaccgggatggtggactttgctctggaatctggtgaacatacatatgatagttgagaaagacacatattctgatcatga

SEQ ID NO: 812723 - DNA, 100 bp, Homo sapiens
tctcataaaacacgttcaaggatggcctgcagatcatgcagagaagcagatggagcagcatattgtatgggacgtatgaattctgactgttggtatgttt

SEQ ID NO: 812724 - DNA, 98 bp, Homo sapiens
tctcggagcccacccctgaccctgacttcctgactgattacatgaagcagatgacatttgaagcccaagcctttttagaagctgtgcaattcttccga

SEQ ID NO: 812725 - DNA, 98 bp, Homo sapiens
aggaggacaggccagcaggatgccgcttctgctccagggcatgcaccatgccttggtgttctcaagagtctgccctttccgaggaagaagaggataca

SEQ ID NO: 812726 - DNA, 98 bp, Homo sapiens
aacaaaagttcacctctgcgaaggtcagaagagatcaattctacagaaatttccagtggttctgttgaggctttatggaattcagcatgtcaaaattc

SEQ ID NO: 812727 - DNA, 99 bp, Homo sapiens
tttcttctttgagaaaaacctgaaagatgtctcaataatttgcaagtaccttttgagtgaagaagaggaccacttcagtgaggaacagtacttggctgc

SEQ ID NO: 812728 - DNA, 99 bp, Homo sapiens
ggagcgcgagcaggacccgcgtgtcgcccctcagcagtactggtcttctgaggacctctgccctctacacagcggcctcttcaggtgcagggaggaaat

SEQ ID NO: 812729 - DNA, 100 bp, Homo sapiens
atgaactaaacatagttttggaactagcagatgctggcgacctatccagaatgatcaaggaggctgcattgaggcgtgagcaaaagaagttggaaaagaa

SEQ ID NO: 812730 - DNA, 98 bp, Homo sapiens
ttcaatactacctttatttccaccataggtgggagaaggagagaaattggtgagggctctttttgctgtggctcgagaacttcaaccttctataattt

SEQ ID NO: 812731 - DNA, 98 bp, Homo sapiens
acctggaaggactttacgataaaacgtgtcaattccttagcattggccgaagagttaaggaactggcccaaataaggaaggaggaaaaagagaagaaa

SEQ ID NO: 812732 - DNA, 98 bp, Homo sapiens
gaggaagaaggtggggaggaagaggaggaggaagaagaaggtgatgctttgtgatggtctgaggtccatgaagggattaaaaccaggaactggctcct

SEQ ID NO: 812733 - DNA, 100 bp, Homo sapiens
aagcaacttaatcgggatatcgaggtattgatgaagatgaccctactgctgatgataccagtgctgctgtaactgaagaaatgccaccccttgaaggaga

SEQ ID NO: 812734 - DNA, 98 bp, Homo sapiens
aggagcgcctctgcccggtcgcgaccccgtctgggagagtcattcttatagaagagcatcagaggaagataaaaaagaatcctcaatgtcaggcccct

SEQ ID NO: 812735 - DNA, 122 bp, Homo sapiens
ctttaagcagctatagtcttgtattgatggttttgcactatttacaaatgaaactggaacgccaagctgaagaagaacgaatacggaagcacaaagcagctgctgagaaagctttccaggaa

SEQ ID NO: 812736 - DNA, 100 bp, Homo sapiens
gaaacacctaggaagggagaactggcttacagcttcgccatgggctgctggcccaagaatggacttctagacatgaacaagggcctcagcctgcaacaca

SEQ ID NO: 812737 - DNA, 100 bp, Homo sapiens
gagaaaccagacaaaaaaatactaatgaagaagatgatgaagtccgtgagattgcagcaattctccggaaacggaaattagactattatttacacaaact

SEQ ID NO: 812738 - DNA, 100 bp, Homo sapiens
tactacaagcccaccaagctaaagaggctgcccagaaagcagttaacagtgccaccggtgttccaactgtttaaaaaatttaagatccgcattgaagacc

SEQ ID NO: 812739 - DNA, 99 bp, Homo sapiens
cagtttcttgaaaagcaaggtttagaatctcagtgtgatccctcacatccacaaatctctgattggaaagaagggacagcagaaaactgcttagaggga

SEQ ID NO: 812740 - DNA, 100 bp, Homo sapiens
ttgtctggattttcctgtagaactgagggcagtgcctgatcaactttctagcgggagaacgatcatggaggtggtgccagctgaggtgaatagtttgctt

SEQ ID NO: 812741 - DNA, 99 bp, Homo sapiens
aggtgaccaagctgattgacaacaacaagactgagctttctagtaactatattgctcagatttccaacggccagcaactcatgagccagccacagctac

SEQ ID NO: 812742 - DNA, 98 bp, Homo sapiens
ataaatccatcagaatgacaccttctcaggttgcctttgaaataagaggaactcttttaccaggggtatagaacaggctatgcttacaggcatcctct

SEQ ID NO: 812743 - DNA, 100 bp, Homo sapiens
cacaagctgctggcccagttgctgggcactagtgaagaggacagcatggtgggcaccctctatgacaagtaacaaatgtggcaattattttggatctatc

SEQ ID NO: 812744 - DNA, 100 bp, Homo sapiens
tcttgaaaatctgtgacattgcaagggaaaaagtaaataaagctgctgtttttgaagaggggcaatttgaaattcgatatgcaccgtggttccagtggac

SEQ ID NO: 812745 - DNA, 99 bp, Homo sapiens
gcctggaaagtatacaatgaaacttgaaggtctcttcacagactaatttcttatctcgagcatggtggttccccatcttttatttttttgagaaaaatg

SEQ ID NO: 812746 - DNA, 98 bp, Homo sapiens
ggaacaccctgtatatccaaggaagtcatgtgccagttaggtttacatcaaaagcgtttgctgccaattgatggggcaaatgatctcttttttcagcc

SEQ ID NO: 812747 - DNA, 100 bp, Homo sapiens
gaagccctgaatccataaaggcataccttaaacaagctcgattatggctgctgttcctcaaaataatctacaggagcaactagaacgtcactcagccaga

SEQ ID NO: 812748 - DNA, 100 bp, Homo sapiens
tccactgcaaggagattgacctggtgaaccgagaccccaagaacattaacgaggacatagtcaagatgccaacaaggccagtgccaagttatattcaaag

SEQ ID NO: 812749 - DNA, 100 bp, Homo sapiens
ggcacagcatgagatccaaaggcagggcaaggaaactggccacaagtctccgaattcaatcctttgacgttcaccagcgtgatcgaatgcgagaagccaa

SEQ ID NO: 812750 - DNA, 98 bp, Homo sapiens
tccacaaatgcttcaagacttgcaagctgctggatttgatgaggcaccttttttacgcacgcggccctgcagagcctccgcctgtaccccttcaccga

SEQ ID NO: 812751 - DNA, 100 bp, Homo sapiens
aggaagaattaagacgcatggaagaacttcacaatcaagaaatgcagaaacgtaaagaaatgcaattgaggaaaggaaacagattcattgtctgtctgag

SEQ ID NO: 812752 - DNA, 99 bp, Homo sapiens
cgatctctccagtttccatatgttgagattctacttattcatcagtttgttgtgcttgtcaagatcagctcaacatgaactctgctcctacattcatgc

SEQ ID NO: 812753 - DNA, 100 bp, Homo sapiens
cgagcggacggaggctccgggcacccccgagggccccgagcccgagcgccccagcccgggtcaaaatgcagatcttcgtgaaaacccttaccggcaagac

SEQ ID NO: 812754 - DNA, 98 bp, Homo sapiens
ggacactttgttattggagaaacatgcagattatatcgcatcctatggctcaaagaaagatgattatttgatattcactgatggactccaaagaatca

SEQ ID NO: 812755 - DNA, 100 bp, Homo sapiens
cctgttggaggaactggcccggaaacaggaggaccaggagcattggtttgaaaaggccctacgagacaagaagggcttcatcatcaagcagatgaaggag

SEQ ID NO: 812756 - DNA, 100 bp, Homo sapiens
gggcaagtacgtcatcaccatccgcttcgggggtgagcacatccccaacagccccttccacgtgctgggtttggtaaaggctccagtgtggtggcctatg

SEQ ID NO: 812757 - DNA, 98 bp, Homo sapiens
cttcaactgacaacagtaaatattttgaatttactgtgatgggacgcttaaacaaagttcgccagcttcatcgagagttcctcagagctggctcaaac

SEQ ID NO: 812758 - DNA, 100 bp, Homo sapiens
tggatcccagatagcaatgaagagagaggacatctacactttagatgaagagttacccaagagagtgaaagctcgatttaggaagaaatcctacttagcg

SEQ ID NO: 812759 - DNA, 100 bp, Homo sapiens
taggtgcacgtttcacctcctcacgcccgaagaagagttctccttttgtgccaaggactcccagggccaggagtcaaattgactttatcagctttaatcg

SEQ ID NO: 812760 - DNA, 98 bp, Homo sapiens
gcgtgagcagccggaggatcgcggagtcccaatgaaacgggcagccatggccctccacagcccgcagattgaaaatcttcaagagcagcttagagaca

SEQ ID NO: 812761 - DNA, 100 bp, Homo sapiens
ccagcagcagcagcagcagcagaaagcgggcgagcagcagttgagcgagcccgaggacatggagatggaaggatgccgaggaatgtgacagggctgggag

SEQ ID NO: 812762 - DNA, 98 bp, Homo sapiens
tgtctgaactctgctcagagggacctgtactgggacgtgatgctggagaactacagtaacttggtctcactggaacccggcagtgggcaggtgtttgt

SEQ ID NO: 812763 - DNA, 99 bp, Homo sapiens
taacagttgcatttgaaaacaaatattttatgacctggtcagacagataaataggaaaacaccagtggaaaagaagaagcctaaaaagaaatcatgtct

SEQ ID NO: 812764 - DNA, 98 bp, Homo sapiens
ataaagttccagagcctggagtgcccactgaaaccataaaggaacttagtgatttggcccgtgaccctccagcacaatgttctgcaggtccagttggg

SEQ ID NO: 812765 - DNA, 100 bp, Homo sapiens
agagaacaagacgtgtgaagactcagttggctgattgcaattctggcccaactcaaccctctctttggaccgcaattgaaaaatgaaaccatctggtatc

SEQ ID NO: 812766 - DNA, 101 bp, Homo sapiens
tttggatatcgaatcccagacctgtgcttctgactatcttctcttcaccagctcttcagatcaatatgttgttgcagaaactgcaggtagcttatctggcg

SEQ ID NO: 812767 - DNA, 100 bp, Homo sapiens
ccatcatagtcaactgcgtggaagagaagaaacgatggaaagaactttctaaggaagacttatctcctgcctttgatcattcaccaaacaaaataatgac

SEQ ID NO: 812768 - DNA, 100 bp, Homo sapiens
agcgaagaagatcgaaaattaaacctcagatctctgatgtatggtttaatagaagatagctggattctcacatctgtttctgcattcagtctgctgagag

SEQ ID NO: 812769 - DNA, 98 bp, Homo sapiens
aagctttagccgccgaggccgcgtgtcccaaaggccaggctggaggctcccaggtgattttcacaaatcctttagaaatcgtcaagatccgtttgcaa

SEQ ID NO: 812770 - DNA, 98 bp, Homo sapiens
ggagacgggcccgactcctccgacgccgatccggacagcggcacagaggagggaggtgctgttccagaattcaaagaagagaaactgcagctgcaacc

SEQ ID NO: 812771 - DNA, 100 bp, Homo sapiens
tatgtatatgaatgatggctatgcaccacctgatatcaccaactttgatgcggatgaaattaaaaggctaggaaagagatttaagaagcttgatttggac

SEQ ID NO: 812772 - DNA, 99 bp, Homo sapiens
agctgcatcattccttggggcaaaatgtggacaaggccacacagaacccagcatttcatcatgaaagcaggaagacatacgggcagagtgcagatggag

SEQ ID NO: 812773 - DNA, 100 bp, Homo sapiens
tgccagacaaacctctccaccctcagtgacccggtgcagctagaagtccatatcggccaagctataacatcagaaatggtgaatgaatacaagaaaattc

SEQ ID NO: 812774 - DNA, 98 bp, Homo sapiens
ccctgggccaattatactttgagcatctacagattcttcacaaacaaaggacatttgtgaagatatttctgatcatgttgagcaaatccatgccctcc

SEQ ID NO: 812775 - DNA, 98 bp, Homo sapiens
ctgcgactccggagacagcccaaatatcctcggaagagcgctcccaggagaaacaagaggctattctgcagaccatcctgttattaaggtcttctgga

SEQ ID NO: 812776 - DNA, 100 bp, Homo sapiens
ctggagcattacagagacatgggctacccactagccgtgaaactgggaaccatcactcctgacggggcaggactttccgtgacatttctgaagatctgaa

SEQ ID NO: 812777 - DNA, 99 bp, Homo sapiens
ccgtttctggctccgggctgagcttcctggagaagaggaaggtcaaaatgcagatcttcgtgaaaacccttaccggcaagaccatcacccttgaggtgg

SEQ ID NO: 812778 - DNA, 98 bp, Homo sapiens
agctgacccctgtgagagtggcagctttgcacagcgtgtgtgtgaaccaggccagtcatggtttcattactcagcacccctgggctagcttgattcgt

SEQ ID NO: 812779 - DNA, 100 bp, Homo sapiens
cgggggcagatgggactgcatgtgtgagtcaattctgtggtgttcttggtcacacatttatggagtttctgaagggcagtggagattactgccaggcaca

SEQ ID NO: 812780 - DNA, 98 bp, Homo sapiens
cgtggtcagccgcttcgacgagcagaaagaagagattttatcgacatcgaaagtaaatttgccctaaggacccctgaagacacagctgaggacacttg

SEQ ID NO: 812781 - DNA, 98 bp, Homo sapiens
gaaaggatcatgaactagtgacctggaaaggactttggcattatgttcctgcaccaccttgtatctattttcttgattaccttttcatatgtcaacaa

SEQ ID NO: 812782 - DNA, 100 bp, Homo sapiens
gggctgcgccctgagaaggcggcggtcagtgctttgtgcggggaaagcgcattgcggatggcaattccgggacaagaatccttcaagaaacaggaaaaaa

SEQ ID NO: 812783 - DNA, 98 bp, Homo sapiens
tgcaaagcttccaatgagtatggcagtgtcagctgtacagccacactaactgtgacaggtcctcagaatggttggaatgaccctccagctttgaacag

SEQ ID NO: 812784 - DNA, 100 bp, Homo sapiens
ggaaaacctgcaagcagcttttggagacagccgaacggcgtttgaatagtagccttgaaaggcggggcaaaatttggtttctctaatattactggaattg

SEQ ID NO: 812785 - DNA, 100 bp, Homo sapiens
ctggtgtaccaggcgaagctggccgagcaggctgagcgatacgacgtttccccctttctagggtgaggatggttctacacagccacccggagttccttag

SEQ ID NO: 812786 - DNA, 98 bp, Homo sapiens
ggtggacgtgctggtgtctgagtggatggggacctgcctgctggactgggaggtgctggtcctagggaagctcaagtgggacctggctgctgtgattg

SEQ ID NO: 812787 - DNA, 98 bp, Homo sapiens
gcggcgttggaggccaccgtttccaggagcctcacagtctactcagagaaaaataaaagaaggcaaaatgagtcctccccatttccatgcaagccaga

SEQ ID NO: 812788 - DNA, 99 bp, Homo sapiens
gaggcgcgcgctcgattccccccacgcggcggcgccgcctgtttacggtgattgtgtccaggggggggcgctttctggaagcccccgtctcagggaatc

SEQ ID NO: 812789 - DNA, 99 bp, Homo sapiens
agaggctctgggcaactcaccagaaatctaagggacactgtgttcctgaaacaggtagcatctaaaggaactggtttaaatcctaatgccaaagtatgg

SEQ ID NO: 812790 - DNA, 99 bp, Homo sapiens
gcaacctggcagccgccgccgtggaaggccttcatggtgaaacacctcttggagtatacccaggcaacagagtctaacctgcagtacagcttgttgtta

SEQ ID NO: 812791 - DNA, 100 bp, Homo sapiens
caggctgccgcttcgaggggcagttcagcatcaacaagatcactactggttacaacctggaagatgaccgctgtgagtgtgtggctctgcaggattttcg

SEQ ID NO: 812792 - DNA, 100 bp, Homo sapiens
gcctacgtgaacaacctgaacgtcaccgaggagaagtaccaggaggcgttggccaaggtttaggtagaagcttaggctattgatttgaacccactatttt

SEQ ID NO: 812793 - DNA, 101 bp, Homo sapiens
tggagatgacaacttgacttctctggggactctgaacttccctggtcgaacagttttttctaatggctattcaagcatggtagcccaagcattagtgttcc

SEQ ID NO: 812794 - DNA, 100 bp, Homo sapiens
ctcatgagcagcctgcccaacttctgcgggatcttcaaccacctcgagcggctgctggacgaagatttgtaagactccagggcctcccagccgtgaataa

SEQ ID NO: 812795 - DNA, 99 bp, Homo sapiens
cctcccaaagcattgggattacagatttcgccagaagtttgagtatcactactcctgaagagatgattgaaaaagccaaaggggaaactgcctatctgc

SEQ ID NO: 812796 - DNA, 100 bp, Homo sapiens
cgccgaatggcatacaattagaagctgagaaaaaagcattctctgaaaaccttgatcctgagatttgggatgtgagaactaaagccagtgtacacacatt

SEQ ID NO: 812797 - DNA, 100 bp, Homo sapiens
attagtctttgtgcagaaagcacagatgattgctttgttgcattgatgaatcatagctgttgccccaatgtcattgtgacctacaaagggaccctggcag

SEQ ID NO: 812798 - DNA, 98 bp, Homo sapiens
agaatgagccagagggacacgctggtgcatctgtttgccggaggatggcaagattattttatcataaaccccagtttgccattttggatgaatgcaca

SEQ ID NO: 812799 - DNA, 100 bp, Homo sapiens
caaacaatccaggtggcagggagtgcatcaaaggtgtgaacgcagtgactctgacagttggcagtgtgaacctagagatccacaatggcttcatcctcgg

SEQ ID NO: 812800 - DNA, 101 bp, Homo sapiens
acagctcacccatagaccatctgaattttcacaaacctgatgtcaagccctccaacatcctagtcaactcccgtggggagatcaagctctgtgactttggg

SEQ ID NO: 812801 - DNA, 98 bp, Homo sapiens
cctgttctcccactctgttccctcctcaggaagtccttttattaccaggaggttaaagtattgcacaatcagctggtccttttccacaatgccattgc

SEQ ID NO: 812802 - DNA, 100 bp, Homo sapiens
gtagtgcagttttaccactacttcgaggacaaagaaaacatttacattctcttggaatactgcagtagaagggtaatgtgaggctacaggagatgatggc

SEQ ID NO: 812803 - DNA, 100 bp, Homo sapiens
tgtgttttaaacagaatttcgtgaacagccttttatctccaagcggaaagaaaggaagaggagcaggacttggatggtgagaaggggccatcatcggaag

SEQ ID NO: 812804 - DNA, 100 bp, Homo sapiens
aagccaaattttatctcgacgctgtcctatgccattgataatccattgcactatcagaagtgctcagtgtcttgtggtgttggagtgatgcagagatctg

SEQ ID NO: 812805 - DNA, 100 bp, Homo sapiens
ccgcacagctactactggagcgcgccggctccctatctgggaaacaaagtatctactgagcgtttcagtcaacaatacagctcgtgttcgacaatattcc

SEQ ID NO: 812806 - DNA, 50 bp, Homo sapiens
gttggactcatagtcactgccagaaagtgaaactggaacgccaagctgaa

SEQ ID NO: 812807 - DNA, 100 bp, Homo sapiens
catgtgaactgcacgataaaggaactcaggcgcctcttcttagttgatgatttagttgattctctgaagtttgcattgagactccttgcattccgccaga

SEQ ID NO: 812808 - DNA, 99 bp, Homo sapiens
tcagccaaagtaaatccatgatcctcaccgatgtcgggaaggtcactgaacctatgagaagcccaaggtcaaccccaaactctacatgtgtgtgtgtga

SEQ ID NO: 812809 - DNA, 99 bp, Homo sapiens
gctgaccctcgaaaaaaagatggagccctgcatatgattggctctttagctgaaatacttctgaagggcaagtgtccagagaatggctgggatgaaagt

SEQ ID NO: 812810 - DNA, 100 bp, Homo sapiens
tccaagaatcgagtaccagttttttgaagacagacacaggtttcagactgaaattcaaacagtgaataaacagttcccatgtgagccattcaaatttttg

SEQ ID NO: 812811 - DNA, 98 bp, Homo sapiens
gacgtgtacttctgtttctcagtttatctggatgttatcagatcacagaccatggtctcagatgttttctggcaaaggccttcctgcatttatgaatt

SEQ ID NO: 812812 - DNA, 100 bp, Homo sapiens
gtctagactttgtgttccaagatcagagcgaaaactagaagctgaacttcttcaaatagaggaacgacaccaggagaagaagaggaaattcctggaaagc

SEQ ID NO: 812813 - DNA, 99 bp, Homo sapiens
gggaggcgagcaagatggcgcagacgcagggcacccggaggaaagtctgttactactacgacgctttttgactccacaactcttgaacatcagaagact

SEQ ID NO: 812814 - DNA, 99 bp, Homo sapiens
cctcctcagccatgtggaactatgtgttttcgcattataacaaggacctgttgacagagcactgcacagaagcttcattccaaaaagtgatatcgagga

SEQ ID NO: 812815 - DNA, 98 bp, Homo sapiens
ctaatgatgcaccagattattatggtgttattaaggaacctatgggcaatctgaaagcaaatcctgtttagatgcaggcgaaggttcctggtgaccca

SEQ ID NO: 812816 - DNA, 100 bp, Homo sapiens
atgtcttgggggttttgatcctgtcactgtggctctccaagtggcccggcagttcctgctgcagcaggcctcaggcctgagctccccagggaacaatgac

SEQ ID NO: 812817 - DNA, 100 bp, Homo sapiens
cagtacttgggatcccccagttccaaagtgtcttaaaggtacagccatagtgctgaagttcaagttcgtcttcaattcttgacttgtgtattttcaactc

SEQ ID NO: 812818 - DNA, 100 bp, Homo sapiens
tgttggacttgggagtatctccgtattctggagcagtatttcatgaatatccgagaaatagctcagtctcaccgggacatggagcaggaactggcccacg

SEQ ID NO: 812819 - DNA, 99 bp, Homo sapiens
agcattcgaagtgacctcagcagggcatccagctgttgaaggaggatgttcccatcttggtcagtcctatgcggatagagatgtctggaagccagaacc

SEQ ID NO: 812820 - DNA, 98 bp, Homo sapiens
cgcaggcactcacactcctgggagccggctccagcaggttcaggagaagtggcacctggtggaggacctgtcgcgactgctgccggagccaggcccga

SEQ ID NO: 812821 - DNA, 99 bp, Homo sapiens
tctaatcatcccagtagttttggaatgtacccatctcagatgaagtgagtcctgcaaatgttaagtgatttgctcaaggtgcccatttcgcaggaattg

SEQ ID NO: 812822 - DNA, 98 bp, Homo sapiens
atttccgggactacctcatgagattaaggatacttggcatcaagtttatagaagacattttttaaaaacagctctaaaccattgtaacctttgtcgaa

SEQ ID NO: 812823 - DNA, 100 bp, Homo sapiens
tttgcctggctggaatcattctcaccttgtatgctttacgcatccgagatgtttccaaatggagtgagagaacaagaaagcctctagaagccctctatgg

SEQ ID NO: 812824 - DNA, 100 bp, Homo sapiens
aaactaccattcgcctgatgaactctcaggaacttgcatcagcactgaagtcagccttatctggccacctggagacggtgattttgggcctattgaagac

SEQ ID NO: 812825 - DNA, 100 bp, Homo sapiens
aaatgaaacagatgtttgtgcagcgagtaaaggagaaagaagccatattgaaagaagctgagagagagacaatactgtcagagttcaagacacagattgg

SEQ ID NO: 812826 - DNA, 100 bp, Homo sapiens
tgggttctattttccctcctcaaactgactttgcagccacggagaggtactaggttttgacaagcttgcatcatgcgtgagtataagctagtcgttcttg

SEQ ID NO: 812827 - DNA, 100 bp, Homo sapiens
ataaacggagagcagcagccgcccgcttcaaccccaggggaccagaggaactcagccctgattgcgatatggaatgtgcagatgtcccactattaactcc

SEQ ID NO: 812828 - DNA, 98 bp, Homo sapiens
gggttccctatgcaaatgccaaaggaattggttatccagatgagctgcttcagaaagagcaaaactattcagatgacgtcttggccaacatgattagt

SEQ ID NO: 812829 - DNA, 99 bp, Homo sapiens
ttattaaaattgcaacaccatatatgcatcattatatgaagcatcagcatgattctggaacagagtgcacaccaggagaatctaagaatttgggtcaaa

SEQ ID NO: 812830 - DNA, 98 bp, Homo sapiens
aggaggcctgcaaattcatgacaggattattgagatgctgcagttggagaagaaacttgaacgtgaacttgaggatgatgcacgagttattgcttgcc

SEQ ID NO: 812831 - DNA, 100 bp, Homo sapiens
tggtatgtcagtgtggactccgtgttggcagcagtgctgttaccactctgggtgatccagccaaaggtcctgctcaatctggaattttgtcagatcgtga

SEQ ID NO: 812832 - DNA, 100 bp, Homo sapiens
aaaactatgggcagaaaagaatctggccgttgctccagggagaactgcaaatatcttcatccacccccacatttaaaaacgcagttggagataaatggac

SEQ ID NO: 812833 - DNA, 100 bp, Homo sapiens
ctggagcactcacaggactcacccgggtacgaagattccaacaggatgatgctcacatattctgtgccatggagcaggccacagatggggaagtcacagc

SEQ ID NO: 812834 - DNA, 98 bp, Homo sapiens
ttggaagtttgcttgtcattttctgtgtagaactggcttgtggcgtttggacatatgaacaggaacttatgtcatatttgatcagaaattggatgaac

SEQ ID NO: 812835 - DNA, 100 bp, Homo sapiens
tggcgcctttctcattattataggctccctcctgctgtcaggctacatcagcaaagggattccgaaatttttaacctctgaagctgtgccttcacatgat

SEQ ID NO: 812836 - DNA, 100 bp, Homo sapiens
tgatgaagaggatgatgatgaagagcatttcagaagatggacacaaagaagaaggaggaacagttgaagcttctcaaggagaaatatggcatcaacacag

SEQ ID NO: 812837 - DNA, 99 bp, Homo sapiens
aagaaggcgctgaagggcaaggaaagcagcatagagaatgagatagccgtcctgagaaagacttgaaagaggagattgatattcgactctccagggttc

SEQ ID NO: 812838 - DNA, 100 bp, Homo sapiens
ggttcgcgaaagccattgctgacgaccaggtagcaacacaagtcggaatagaatggaacctgtcccctgttggcagagttaccccaaaggaatggaggaa

SEQ ID NO: 812839 - DNA, 98 bp, Homo sapiens
tcccaatcccccactctttccgccctaatggaggtctccagtttcgatccagacatttaatgtggatgcaccatgccagaccgtggaagatttaacga

SEQ ID NO: 812840 - DNA, 99 bp, Homo sapiens
tcccttccccacgacggggcgcctctgcaactcacaactgggagacaagacttgaaaatagtgtgtcagccccagagcctgacatttctgaagaagagc

SEQ ID NO: 812841 - DNA, 100 bp, Homo sapiens
tttcatttccatttctaccttgtatgcctcaatttgctggatttaagcactgctgcactttatgaggatctaagcctttcccacgttatggttataaacc

SEQ ID NO: 812842 - DNA, 100 bp, Homo sapiens
caggcattttgacttcttgaaggtccataattcagcagccaaatctttccctcgaaggtttgttttgcctttaaatgtcagtttgaatgcccctgaggga

SEQ ID NO: 812843 - DNA, 98 bp, Homo sapiens
tggaaatccattctgaattctctgtatgagttgctgggtcccaggtgtgtgatggcggctgcaatctgtcttgtgggtattaatgcaatcttcagtgg

SEQ ID NO: 812844 - DNA, 100 bp, Homo sapiens
cgggagcagcctaggctatttcctccaaggaaacgttttgatggtaaattacaatcagaatcaactaataatggaaaaaataagagagatgtagatttcg

SEQ ID NO: 812845 - DNA, 100 bp, Homo sapiens
tgtctaatctctttacagcaaattgaaacttacagcctatttagatcttaacctggataagtgctatgtgatccctctgaacacttccattgttatgcca

SEQ ID NO: 812846 - DNA, 98 bp, Homo sapiens
ctatggcgaacaggaactggatgccaactctgcccttatggaattggacaaagcccagatgaaccaatgacaaatttggaattaaaaatatctgcctc

SEQ ID NO: 812847 - DNA, 100 bp, Homo sapiens
taaacttgaattgaagatcagtgatttccttgatgaaaatgaggcacttagagagcgtgtgggaatttggcagctgatcttcttctgatgattcctgata

SEQ ID NO: 812848 - DNA, 99 bp, Homo sapiens
catcagcctccttcccgacgtcctcaagaaagtcctgtgccggcagctgtggccaacagcaacagagagagtccagctcttggagtttgacaaggagtt

SEQ ID NO: 812849 - DNA, 98 bp, Homo sapiens
gaagatcggacactacgtgctgggcgacacgctgggcgtcggcaccttcggcaaagtgaagagaatagccaggccagaagaaggaaggcctgtggtga

SEQ ID NO: 812850 - DNA, 99 bp, Homo sapiens
gtgaagcagtgtcacgcattttagaagaatgggctgtggagtttgaaggctgggctgacaccctctttcttctgcagttcaccctctcctgtgtgatgg

SEQ ID NO: 812851 - DNA, 98 bp, Homo sapiens
tcgagggctgagtgctttgcagtctttaggacagttatgggatggatgggaaggttaatcagccccgtctcactgcagacatcaactggcaaggccta

SEQ ID NO: 812852 - DNA, 100 bp, Homo sapiens
cgagaagtgcaagctggcgatgcagaggggtgcgcagtccagcgtgaactacagtcagggcagcctgaaggatgcagcagctgttgtgctgtgtatggac

SEQ ID NO: 812853 - DNA, 99 bp, Homo sapiens
gggaagtggttcctgaacctgttgccagatggtgcaatgttcaaagtactcaagatgaatttgagcagtctctggtcccagcccaccccatggcccctc

SEQ ID NO: 812854 - DNA, 100 bp, Homo sapiens
ttgaagattactggatgcacgtacagaatacattcagccgtcagctcgagatgctgctgtgcagaagattgagactattatcaaagaacagtttgctctt

SEQ ID NO: 812855 - DNA, 98 bp, Homo sapiens
aaattttaaagactgttgtgaacagggatgtacctaatatttggagcaagaggtggtggtggccttcccccgaagaaatttggtaatcctggggagcg

SEQ ID NO: 812856 - DNA, 99 bp, Homo sapiens
ttaccacgaagccggaagcagagggtgtacaactatgagcctttgacacagctcaagaatgtcagagcaaattactatggaaaatacattgctctaaga

SEQ ID NO: 812857 - DNA, 98 bp, Homo sapiens
gacttgaaaaaaactttgctgccaatactctgggatccactagttcctggactatgggaactgatgactcgcccaatgtcacagatgatgcagctgat

SEQ ID NO: 812858 - DNA, 99 bp, Homo sapiens
gcgtgtacgtgggcagcggcggctggcgcttcctgcgcatcgtctgcaagaccgcgaggcgagacctcttggctccctgcggactgccgtggccgctgg

SEQ ID NO: 812859 - DNA, 100 bp, Homo sapiens
tgcgcggcatgctaaagaggctcaagggcatgaggcgcgatgagaagaagagcacagagacgagttgtactgctgtcacaggaaatggacgctggattac

SEQ ID NO: 812860 - DNA, 101 bp, Homo sapiens
aattactgccgtacattgttggcgtggcccaaaggcacattgtcttgaaaccgccaaccattgtcacacaagcaatggctgccatccggaagaaactggtg

SEQ ID NO: 812861 - DNA, 51 bp, Homo sapiens
tgtctcttctcgccctggcggggaaggaaggagtcaagactgagaacaacg

SEQ ID NO: 812862 - DNA, 98 bp, Homo sapiens
gaggccctaatccaagatttaatcaactactgtctgagctacattgcgaaaattaaactcccgaagaagagatgaggaaaatgaagctcgggctggtt

SEQ ID NO: 812863 - DNA, 100 bp, Homo sapiens
atcgaagagtccccccaagtctcctgaagaggaaggagcggtgtcctcttaagaaaatggcagtttctcttagtgttcagcaggaaacatccaatttagg

SEQ ID NO: 812864 - DNA, 100 bp, Homo sapiens
tttttctgccatgaatttgcattcaggactcagggagtacacacttaccagcacaagtgcatacaccttgatagcaccaaatataaaccggagaaatgag

SEQ ID NO: 812865 - DNA, 100 bp, Homo sapiens
attatccattttcgagacattcttacgatatcagaagtgcttggtagccaggccgccttctcagaaagttcgaccacctccaccgccagcagattcagta

SEQ ID NO: 812866 - DNA, 99 bp, Homo sapiens
cgacagcctcaaacaggagctggagcagctcaaagagtattcatgtgattgaacggcgtgctcttcctgagttcttcaatggaaaaaacaaatccaaga

SEQ ID NO: 812867 - DNA, 100 bp, Homo sapiens
cagacagagctattccagcaccagcagaggaaaattcacgaattgtgagagtaagagttatagccggaataggccttgccaagaaggatatattgggagc

SEQ ID NO: 812868 - DNA, 100 bp, Homo sapiens
gttgaaaatggaagagtaattgcctgctttgattccctaaagggtttggacagaggagccaaaggccaaatttccactttcagcagttttatttcagctg

SEQ ID NO: 812869 - DNA, 100 bp, Homo sapiens
gtactgcttcaccatgtaataataacataaatgcagctacagctgtggctctacagttattgccttgtctgtcaagatccgcagttatgaagaacacttg

SEQ ID NO: 812870 - DNA, 99 bp, Homo sapiens
ggagaggcacccgatatatgttctctaggccttttagaaaacatgaggaaatactatgtgaagtatgccggaaaacatttaaacgcaaagattacctta

SEQ ID NO: 812871 - DNA, 98 bp, Homo sapiens
aatcataaagtcatccctgtgtatgtaggagtgaatataaaaggacttcatctcctcaacatggaaactaagaatcaagctatagaagtggtctggag

SEQ ID NO: 812872 - DNA, 100 bp, Homo sapiens
accccaaaaagccgtttagaaagctcagtcgctttggaaacgctttcctgaatcggctgacattcacgtttcattctgccacactcgggaacggtgatcg

SEQ ID NO: 812873 - DNA, 99 bp, Homo sapiens
tttaggagaagcattttgaatcagaaggcttaagaagaattctgcttttctcatcctgagactccagcaggatgtcttatcaacagcagcagtgcaagc

SEQ ID NO: 812874 - DNA, 100 bp, Homo sapiens
tctaccttacagggtataactttacattagcagatatactattgtactatggacttcatcgctttataaacccttaggagaaatcttgagagtggacagc

SEQ ID NO: 812875 - DNA, 99 bp, Homo sapiens
cgacctgaggggagagggaacgcagctgaaagcgtgaactgagcttcagtttcagcgactcacccgagaactggaagtggaaaggcagattgttgccag

SEQ ID NO: 812876 - DNA, 98 bp, Homo sapiens
tccaccacgcagagaatccagcctggtattccataaaacctaccaactcatggattcccaagatgtgagctttttacataatgaaagaacccagcaat

SEQ ID NO: 812877 - DNA, 98 bp, Homo sapiens
tgaactccaatgatgaggacatccacacagccaatgagcgccgcctgaagctactacccacagatggcatgatccgaaaacactctcatgtcaagata

SEQ ID NO: 812878 - DNA, 98 bp, Homo sapiens
ctgatgcaaagaagctttatacattattttatgtacatggttcttctggatctgcctcagtcctgacacacagcagctcgggaaatagtctaaaacgc

SEQ ID NO: 812879 - DNA, 98 bp, Homo sapiens
cacccgcctccgggcatcttcaactacgacaggatctgctcgccacccttcatggagctcacgagcctgtgcggggatgacaccatgcggctgctgga

SEQ ID NO: 812880 - DNA, 99 bp, Homo sapiens
accacctacctgagtatgtcgaaaatctctgcccctggaggagaaatagaaggatcatggggttgacagcagcattttccagaatcctaaaaagcttca

SEQ ID NO: 812881 - DNA, 98 bp, Homo sapiens
tttggggaaatccttcggatggtgaactcattagaaaaaattctaacgatgattcccaccgatgaggagaagcagaaaatccaggaagctcagctggc

SEQ ID NO: 812882 - DNA, 100 bp, Homo sapiens
ccttcggacccgccttttcagccgtcaccaccatcacaaaagacgtggctgagaaagacccggacgaggactgcaggacgctggcactgagggccctgct

SEQ ID NO: 812883 - DNA, 107 bp, Homo sapiens
atttattaacacctcttgccactcagctgacatatgaaggactcattgatgaaatttatggcattcagaacatgggctaccttgagaatggagcgaggagccaagga

SEQ ID NO: 812884 - DNA, 98 bp, Homo sapiens
gatggcaagatagcggcgcgggagcgtaccgcacccttgacagcgacagacacagccatcctctctggaagcctctcaacccagaatggaaatggagg

SEQ ID NO: 812885 - DNA, 98 bp, Homo sapiens
tggctttggcatgatttatgattccctggattatgcaaagaaaaatgaacccaaacatagacttgcaagaggtggttctcttcccaaagtggaagcca

SEQ ID NO: 812886 - DNA, 98 bp, Homo sapiens
gagcccatggcgtacagtcaaggaggcggcaaaaaaaaagtctgctactactacgacggatgacagtgatgggattccgtggtcagaagaacgggtgg

SEQ ID NO: 812887 - DNA, 100 bp, Homo sapiens
agttgcctcttctggtgtcaaagcttttggacattcctgggggtggttctcttcccaaagtggaagccaaattcatcaattatgtgaagaattgcttccg

SEQ ID NO: 812888 - DNA, 127 bp, Homo sapiens
acttggccatgtcaccaaaacaaggagaaggtgcaagactgtccgtgtggaccctgactcacagatgtctttggtggacttgggaaagaggttgctagaagcagcaagaaaaggccaagatgatgaa

SEQ ID NO: 812889 - DNA, 98 bp, Homo sapiens
gtcgagaaccagtccgggatgtgggaaggctcctggttgtctacccatggacccagaggttctttgacagctttggcaacctgtcctctgcctctgcc

SEQ ID NO: 812890 - DNA, 100 bp, Homo sapiens
cagccgctcattaccttgcagtatttttctctggaaatccttgtaatcttgaaggaatggacctcaaactttaccaacagggacgcttatgtcaactggg

SEQ ID NO: 812891 - DNA, 100 bp, Homo sapiens
cccaggagaaggagcagatcaagaccctcaacaacaagtttgcctccttcatagacaaggtgaaatgacaatggatgctctgttggctcgattgaaactt

SEQ ID NO: 812892 - DNA, 99 bp, Homo sapiens
gtggccatgctggccaagcagtctaccaggtatcattgcccagtgcctaagatcttttatgttcagctcactgtaggaaataatgaattttttggggaa

SEQ ID NO: 812893 - DNA, 98 bp, Homo sapiens
agcctctccagcctcccgcgaaggcaaccactgagaaaacggaaccgaatagtcaagaggacaagaatgatggtggaaaatcaagaaaagggaatata

SEQ ID NO: 812894 - DNA, 100 bp, Homo sapiens
tatctttcctggacgttgttggagtgagatcactgcgggtgggagaaaactggttgtcctggatgtttgaaaagttggtcgttgtcatggtgtgttactt

SEQ ID NO: 812895 - DNA, 100 bp, Homo sapiens
ctcccgcccaaggagaatgcgctcttcaagcggatcttgagatcgcggattcaggtgtggctctatgagcaagtgaatatgcggatagaaggctgtatca

SEQ ID NO: 812896 - DNA, 100 bp, Homo sapiens
cacctgggaggtggaccggagctcgtccagctgcgtgcctaggtgaaggacttaactaagtacttggatcccagtgggctcggcgtgatcagctttgaag

SEQ ID NO: 812897 - DNA, 100 bp, Homo sapiens
gtgcaaggtatcgagcaggacctggtgataggtctgcaatcgaagagggtaaagggatttataataacattaaaaatttcgttagattccagctgagcac

SEQ ID NO: 812898 - DNA, 100 bp, Homo sapiens
ctgtccattgatgtgaaaggggttgaagccatccttgtcaatatatttggtggtatcgtcaactgtgccatcattgccaatgggatcaccaaagcctgcc

SEQ ID NO: 812899 - DNA, 98 bp, Homo sapiens
tgtgcatgaaggacagcctcttctcaatggccgctttgaagaggaatttatcaaaatgcgcatggagagacttcaggcctggatgaccaggatgtgtc

SEQ ID NO: 812900 - DNA, 132 bp, Homo sapiens
cgggtgaatgctgctaaaaacaagactggggctgctcccatcattgatgtggtgcgatcggcatggattccgtgaaggaacaacacctaaacccaagagggcagctgttgcagcatccagttcatcttaaga

SEQ ID NO: 812901 - DNA, 100 bp, Homo sapiens
gtggggacggccgcctagagtggttcagccacaaggagaccggccagaatttagcttcacttgagagagatctggaatggtcgccatgattgaaaccacg

SEQ ID NO: 812902 - DNA, 98 bp, Homo sapiens
tgccggagagcatgcacagcatccccctcaccaatttagccattccagagcattggggagtcagcaatgtccgttgtgttaaatcagctgctgcccat

SEQ ID NO: 812903 - DNA, 99 bp, Homo sapiens
gaggtccattcctgttggtgacaacaccgtggccctgttctgggatgagcaaggtgtaaaggtatgatctcgtgaaaccttgagagaaactgaatgacg

SEQ ID NO: 812904 - DNA, 100 bp, Homo sapiens
acgcaaaccaaggatctggggatcttcgcactatcccaagggttgtgagtcccggcccagcccctccacccccctgcccccccgatgcgaccatgggctc

SEQ ID NO: 812905 - DNA, 100 bp, Homo sapiens
agtacctcagcaaacaggacgggaagatttacagaagccgagacccacagctagagcgcctgctcgctgtgcccccgggttatgacgacccccaataaag

SEQ ID NO: 812906 - DNA, 100 bp, Homo sapiens
ggagatccagaacaacccccacgccagctacagcgcccctccgaaagctgacttcatgagaccgaggatctcgttcgttgatcgatgctacatattcagc

SEQ ID NO: 812907 - DNA, 99 bp, Homo sapiens
ctcactcgtggctttccgaaggctgctggagagacagcgtctggagaccatcctcagtctctgtgctgaatacacaaagcctgacagtcgcttatctac

SEQ ID NO: 812908 - DNA, 100 bp, Homo sapiens
tgctggccccccgcttgccgcagccgcctcagaacccgaccaacatccagaacttccagctgcccccagttcagaatgaccgaagaagcatgccgaacac

SEQ ID NO: 812909 - DNA, 100 bp, Homo sapiens
cagcgattgcgagaatgaggaggacaacagctacaaccggggacacatcttccagagctagatacactttcatcagaaagagccagatccttcataactt

SEQ ID NO: 812910 - DNA, 100 bp, Homo sapiens
ccctgcatcggatcaccggcgtgccccaccatgtcagacgcagccgtagacaccagctccgaaatcaccaccaaggccaagactaaggggctgcagagcg

SEQ ID NO: 812911 - DNA, 98 bp, Homo sapiens
gtgaccagctttctgttgggaacactcaaaggatacagttgatatattagttggatggcatatagatcatactcagaaaccttcgctcacgcagcagg

SEQ ID NO: 812912 - DNA, 99 bp, Homo sapiens
gcgccgctgccctccggctccgcgggcggcccacggcgagtaatctatgccagcaattatgacaatgttagcagaccatgcagctcgtcagctgcttga

SEQ ID NO: 812913 - DNA, 111 bp, Homo sapiens
gcgttcccagcccgggtccccgcgttcacagccccagcgcagtggccataaaatgcagtaaaaacaaatccagttcccaagaagctgtacaaatgctttcttctgttcgac

SEQ ID NO: 812914 - DNA, 100 bp, Homo sapiens
ctgctttaggcccttctggctttggaccttctggaggaagtggcaccaattggattggatgctgctggcaagacaaccattctgtataaactgaagttag

SEQ ID NO: 812915 - DNA, 99 bp, Homo sapiens
cagagaccgtgaagattccaagttcaggagaactcgaccgaccgatttgggatgttgcccctggatgagcctgctattcttgttagtgaattcctagat

SEQ ID NO: 812916 - DNA, 98 bp, Homo sapiens
ttgaaatacagactgttggggaacaagagaagtctggctagataatcccaaaatgtggctccgagataatcaagacaaccttaaaagtatggagagag

SEQ ID NO: 812917 - DNA, 99 bp, Homo sapiens
aggaaaaggcgctccgtcatggggatccagacggctgaagaagagcaaacatgcccagtgccccaggaagaagaggaggaggtgcgggtactgacactt

SEQ ID NO: 812918 - DNA, 100 bp, Homo sapiens
gagagtttgcgctacgctgagtacttgcagccctcggccaaacggccagacgccgacgtcgaccagcagagactgaaactatccaactctggccaatatt

SEQ ID NO: 812919 - DNA, 100 bp, Homo sapiens
cgagattgaaatgatcatgacggaccttgaaagggcaaaccaggtgccgggcagcctacaacattgtgacacggctttcaagcttccggatcactcacca

SEQ ID NO: 812920 - DNA, 98 bp, Homo sapiens
acattgtttctctccctctgcccccccttccccacgcaaccccagatccatttacactttacagaattgcattttgtgaaaaaagaacaagaattttc

SEQ ID NO: 812921 - DNA, 100 bp, Homo sapiens
gcttctgcataaagtgcagaggaactgtgatattgtgactgcctgcttgcaggctgtgtcacagaagagaagggacaaagcatgtaacttgatgatcttc

SEQ ID NO: 812922 - DNA, 100 bp, Homo sapiens
ggatttggcaacagactttgtttcttggagtccacttccaattccaaggcaagaaactatattcagtctttgactcagatgccgaagatgaactttgcga

SEQ ID NO: 812923 - DNA, 98 bp, Homo sapiens
gcgggcatcgccctctacagccaacatgccgagtttttgcactgcaagtccaaaaagtttacagactttgatgaagtccggcaggagattgaagcaga

SEQ ID NO: 812924 - DNA, 100 bp, Homo sapiens
agcagatggaatgggagaatgctcttcaattcctgacaaaattatgggcagactgtttgctgacgaaggaaagcctacatccttgaaaactgcacagtcg

SEQ ID NO: 812925 - DNA, 98 bp, Homo sapiens
catcggtacacgctcaggccaggtggaggtcaatatcacagaaaccaatagagccatggcgactccctctgctgccttcgaggcccttatgaatggtg

SEQ ID NO: 812926 - DNA, 98 bp, Homo sapiens
tataaactgcctggccgaatcagccttttcacgctcaagtgattctaccagaaaggaatgaagaacagaaccttcaggaattgagtcacaatgcagac

SEQ ID NO: 812927 - DNA, 124 bp, Homo sapiens
ccaaattacaggctacaagacacaaagcattctttgtatgccaattaagaatcatagggaagaggctttagaaaagaactcaggaatttggaagcaggctataaatctcatgaattccacccag

SEQ ID NO: 812928 - DNA, 98 bp, Homo sapiens
tggtggtgaccccgcccagttggcccagaggatctcttctaacatccagaagatcacacagtgttgatgaccagtgtcccagtgaaggaacgagtgaa

SEQ ID NO: 812929 - DNA, 100 bp, Homo sapiens
ttcagacaggattcttgaactggaccaggagctcataaaagctaggcatttcatccttcatgaagccattcaggattttgaattgcatatgagtgcttgg

SEQ ID NO: 812930 - DNA, 99 bp, Homo sapiens
tctaatgcagttcatcacatcattcatgattttcaggtggttgtgtcaaaccgattggtgacatctccatgctgtattgtcacaagcacatatggctgg

SEQ ID NO: 812931 - DNA, 100 bp, Homo sapiens
gggcgagggcgaagacgagatccagttcctgcgaactactcaaggcacaggagggaagaaagtcattcagactgatgagtggagaaatggccctgtcgaa

SEQ ID NO: 812932 - DNA, 98 bp, Homo sapiens
ggcagcttatgatgccaatttgtcccatgatgatggaccatttggattgtgcaacaaatgaagaaaaccctgtgatatctggtgaacagattgtccag

SEQ ID NO: 812933 - DNA, 98 bp, Homo sapiens
ggagacacgccaaagctcccaaggcaacagcattattgagaaaagcccttacagaagagtgtggccgtaggtcagctattcacagtagtgaatcatct

SEQ ID NO: 812934 - DNA, 100 bp, Homo sapiens
cagcgaggtgctcatcactcccttggagaagtttcgaaaggaacagatcggggctgccaagacagctttattaaaccgcctggagcgaattttcgaagca

SEQ ID NO: 812935 - DNA, 98 bp, Homo sapiens
ctaagatctccgcctcgagaaaattgcagctgaagctgtatgcaggagctattcttgaagtttgtggatgaaaattgggaaggttccctcaagtccaa

SEQ ID NO: 812936 - DNA, 98 bp, Homo sapiens
gaaatgccctcacaccagacctacggagggagctggaaattcctgacgttcattgatctggttgctgaaaagccaggagtcaaaatgactgagcgctt

SEQ ID NO: 812937 - DNA, 100 bp, Homo sapiens
ccggggtcacccgctacgggaagcaggcctcgccacaggggacaagcaggccttcgcactatcacgtcctctgggacgacaatcgtttctcctctgatga

SEQ ID NO: 812938 - DNA, 98 bp, Homo sapiens
ttactggcagcatgtatatcttttggtacttttgacttcagtgacattgctgtctatatattcaataaacctcctattgatctgttcaaaagaaacag

SEQ ID NO: 812939 - DNA, 100 bp, Homo sapiens
agatgatgagaaataaggacaaaagccaagaggaggacagttcgctacacagcaatgcatcgagcagaattacctgattctaggacaaaggaaattgaag

SEQ ID NO: 812940 - DNA, 98 bp, Homo sapiens
cggcttagaagacctccaccgtgagaacaccgtctaccggaagagagaagggcacagttacctaagtatcaacgtaatcttcctcggccaggacaggc

SEQ ID NO: 812941 - DNA, 100 bp, Homo sapiens
tgtcagcaaaacttcttttgggggccgagggatttttgccagtggaagtccttttaagagtgtgactctggaagatggcaagaccttcattcctgggcag

SEQ ID NO: 812942 - DNA, 100 bp, Homo sapiens
ccttctgggatacagaagaagcgtacattggatccatgcggcctctgaaaatgatcctgcagctccaccaaagaaaccgcctcgccctggagctcccggt

SEQ ID NO: 812943 - DNA, 99 bp, Homo sapiens
caggctttactcccaccccggcttccgcccactgtgctgcccttcctcggacctgggctgtcgggagagctggagcatggcggacaccgacctgttcat

SEQ ID NO: 812944 - DNA, 100 bp, Homo sapiens
ctcttctccaccacaccgggagacagagggagttacaaagcgtttggcagaaaagaatgactttgtgatcttcctgtttacattgatgacaagtaagaag

SEQ ID NO: 812945 - DNA, 98 bp, Homo sapiens
ccttacgagttcttcagcgaggagaacagtccgaaatggcggggactgttggtctcggccctgcggaagactgggctggcttagatgaagatgaagat

SEQ ID NO: 812946 - DNA, 98 bp, Homo sapiens
gctgctgcccgcgtccgaggctcgcgggcggcgggcccgggaccaagaatcgccttcagccctgtctggtgcatccttggcagaaagtgaggaggaaa

SEQ ID NO: 812947 - DNA, 100 bp, Homo sapiens
cctaagcaacatgataaagcatataggcatgggcttgaggtatccaagcccaccaatgggatctgtctcagcacccaacctgcctacagcagaagataac

SEQ ID NO: 812948 - DNA, 145 bp, Homo sapiens
tattgtggaaactgcagacatgcttcaggctcctctctttactgctgaagctttacttcgagctcatggttctaaggcccagcagctactacaaggattgcaagccagtgatgaaagtcaacagcttcaggcagttattgagatg

SEQ ID NO: 812949 - DNA, 100 bp, Homo sapiens
ttgaagggctgggtaatgttgcatctgtggagctaaaagagttggaaactcaactattggaacaatgtactgttgacacaagtgttgctaaagaacagag

SEQ ID NO: 812950 - DNA, 100 bp, Homo sapiens
ccatgattgtgaggcctccccagccacgtgaaactcctgaagcaggacattctaaatgaaaagactgaattggaagcaacacttaaggaagcggagttgg

SEQ ID NO: 812951 - DNA, 101 bp, Homo sapiens
cgcgggaggaggaagtagagcccgggaccgccaggccaccaccggccgcctcagccatggacgcgtccctggagaaggtttacccaaggtccagcctagcc

SEQ ID NO: 812952 - DNA, 100 bp, Homo sapiens
gctcaaccagatcgcgcgggaggagagcttgtttcatatccatatcccactgtattcctgctaatctgctaatgcagtaaattggaggaaaactgttacc

SEQ ID NO: 812953 - DNA, 100 bp, Homo sapiens
gacaattcattttcctacagactaccccttcaaaccacctaaggtgtatgcaacagcgttattgcaacaggctaacgaaaacagacaaaattcaactgga

SEQ ID NO: 812954 - DNA, 100 bp, Homo sapiens
tcccgcagtcaggcagagggtgatagaagaggccaagactgcgttcctgctcaacatccaggaatctctgaaggaagaagatgaatcagatgatgataat

SEQ ID NO: 812955 - DNA, 122 bp, Homo sapiens
ctgggggtcatcgacagctgcaaggaggccgtcaccttcaaggccgtcagacaagagtgctgagcagatcactgcactgtgcaggagttttaacgacagtcaggccaacggcatggaaggac

SEQ ID NO: 812956 - DNA, 100 bp, Homo sapiens
aggaggaggagagagaaaggagagacaattatgttcctgagggcaccttctctctgattattgaagctctccacacagattctcctgatgacctcgcaac

SEQ ID NO: 812957 - DNA, 100 bp, Homo sapiens
acagagcgcctgcgaccccagtcggtgctccggggaggtcacctgacgaggagaagaagaagaggacagtgctccagtgaaagtggaagaacaaaggaag

SEQ ID NO: 812958 - DNA, 100 bp, Homo sapiens
aatatctgatatcagtatcgatgttaatatatccagcagcacagaacttttgagcatgctgttctagctgcaggaacagatttccgttctgacagactgt

SEQ ID NO: 812959 - DNA, 99 bp, Homo sapiens
gctccggcgcatcatggcggctggccgggcccaggtcccttcctccgtggacatcttcaataaggagctactgctaatccccatccacctggaggtgca

SEQ ID NO: 812960 - DNA, 99 bp, Homo sapiens
tgggcggctttgaccgagaggctgctggagctcgtgtttggacgcaactggcctatgatctggatgtggatgatgcgcctggaaacagtcagcaggcaa

SEQ ID NO: 812961 - DNA, 100 bp, Homo sapiens
aatcagccagtcacagaacaggagatactcaatattttccaaggagtcattgggtaagaagactgttagaatgccctcggtaacacagaggctgagagat

SEQ ID NO: 812962 - DNA, 100 bp, Homo sapiens
ttttgaaaagacaagccatcaaaactgccttcagaagcaaaaggaggtgcctcattagaccttaaagcttgtcctccaaaaccatcaaaatggatcctgg

SEQ ID NO: 812963 - DNA, 98 bp, Homo sapiens
gctggagaactatagccacctggtttctcttggcacagaaaactgaatctgtagataacgagggagaatgaattgtcatgaaaaattggggttgattt

SEQ ID NO: 812964 - DNA, 100 bp, Homo sapiens
cagaaggactgcctcactgagcaaccaagaggaactgtccaggtttattgctgccgggagactacactgcaaaatagataaagtgaatgaaatagtagaa

SEQ ID NO: 812965 - DNA, 100 bp, Homo sapiens
cttctttcttctggcatcattaacggaccttttaccatgaatagttctactccttctacaggtgtgtatggcagggctcaacgtcattaaagaggcagag

SEQ ID NO: 812966 - DNA, 100 bp, Homo sapiens
gaacagaaagaaatgttgcagtatatgagtgtgaacatggctacgcctcttcattcccgtccatgccgagcccccgactgcagcattcaaagcccccacg

SEQ ID NO: 812967 - DNA, 98 bp, Homo sapiens
atgggcctttgtgggctgctggagagatgttggctgcaccatgacccagccgctactggcgccggtggaatcggttctgcagaaggaagtgccgcgcc

SEQ ID NO: 812968 - DNA, 100 bp, Homo sapiens
aacattcacaaaatgggtaaatgcacaattttctaagatggtgttatctgaaaaggttagtcagctgatggaatggactaacaaaagacctgtaataaga

SEQ ID NO: 812969 - DNA, 100 bp, Homo sapiens
tgggcctgtggctggcgctggtggacgggctagtgcgaagcagcccctcgctggaccagatgttcgacgccgagaatgcacgctgtactagcatctcctg

SEQ ID NO: 812970 - DNA, 100 bp, Homo sapiens
cgccattggatgttttgtccagggcagcatctctggtgcatgctgatgacgaaaaacgagagacagcgtctggagaccatcctcagtctctgtgctgaat

SEQ ID NO: 812971 - DNA, 98 bp, Homo sapiens
gccttcaagcctgtaggatccactggcgtcatcaagtcaccaagctggcaacggccaaaccaaggagcttagcagtgtctgcaaaaacgaatcttttc

SEQ ID NO: 812972 - DNA, 100 bp, Homo sapiens
caacctggagctctacgcctcctacgtttacctgtccatggagatctattgggaaactgattataaccactcgggcaccatcgatgcccacgagatgagg

SEQ ID NO: 812973 - DNA, 100 bp, Homo sapiens
gaaggaccctggtggaggaagaaaggcatcaagcatgatggaaccatgtgtgatacctgccgccagcaaccaatcattggcattcgatggaagtgtgcag

SEQ ID NO: 812974 - DNA, 98 bp, Homo sapiens
gaaatgtaatgcacgttggactacagaagagcagcttctcgccgtacaaggttatattaatgaaagtgggcacctcaacttacctcgatttgagaaat

SEQ ID NO: 812975 - DNA, 100 bp, Homo sapiens
agcagcaagtcggctttcagatcagttggattggatgctgctggcaagacaaccattctgtataaactgaagttaggggagatagtcaccaccattccta

SEQ ID NO: 812976 - DNA, 101 bp, Homo sapiens
tgtgcattgacccgaagctaaagtggattcaggagtacctggagaaagctttaaacaaactgtatgaaaacaagggagaggctgacttcgtggaatctttg

SEQ ID NO: 812977 - DNA, 99 bp, Homo sapiens
caatgaccgtggaggagtaccgcatcgcccagctgtacatgatacagacttcgcatatcatttaagtggatggttcgagctttctctggatacttagct

SEQ ID NO: 812978 - DNA, 122 bp, Homo sapiens
ctgcgtgggggatgtgcaggagcgtcagatgtgcaacaagaggagctgccccgtgggactactgttcgaagatttttggaagaatactgagaacggcataaagtgaagatcgacatttaaaa

SEQ ID NO: 812979 - DNA, 100 bp, Homo sapiens
gcagtctttaaccatggcgtccctcttcaagaagaaaaccgtggatgggccgttgctccagggagaactgcaaatatcttcatccacccccacatttaaa

SEQ ID NO: 812980 - DNA, 99 bp, Homo sapiens
gcagaggatcctggaggcctgggaagccaacgaccacacgcatccagaatgacagggtccagaaactggcgagccacgagggacatgtgtaggtatcgg

SEQ ID NO: 812981 - DNA, 100 bp, Homo sapiens
agcgcaaagagcacctgcacctcaccatcatccagaactttgacagaggcaaaggagagttggccctatgcatgggcaaacagctggactttccaaggaa

SEQ ID NO: 812982 - DNA, 100 bp, Homo sapiens
gatacagctggacaagaagattatgacagattacgccccctatcctatccgcaaacagattctaacattttcagagaaccttttggaaagaacaagccta

SEQ ID NO: 812983 - DNA, 98 bp, Homo sapiens
gcaaaactttggaaactctcacagaggcatttcatccttcatgaagccattcaggattttgaattgcatatgagtgcttggctcttccttctgttcta

SEQ ID NO: 812984 - DNA, 99 bp, Homo sapiens
tggaatcctcaaaatgctgtggctcttcttccagagaatgacacaggtgaaagtatgaaaacccatggacaatcccgaatatgttgtcaatgacgagaa

SEQ ID NO: 812985 - DNA, 98 bp, Homo sapiens
aagatatcagtagcttggaatttgctgagaataaggcaaagaccaggttgtcactgattcgtagatcaatggtgcatgtgagggaaccctggcttgtt

SEQ ID NO: 812986 - DNA, 100 bp, Homo sapiens
caggaggagactctccctggaaaacttcccttccctttcggattggcagccaccatttgcatgtgatgttgataaacttcattttacgccacgtatccag

SEQ ID NO: 812987 - DNA, 98 bp, Homo sapiens
caaaaaaaatgttatttagaacagaaaacagtctgtggagagaatctgcctcctttaacttatgaccagtctttccatctacagcccactggcactcc

SEQ ID NO: 812988 - DNA, 98 bp, Homo sapiens
tgggcgtcggcaccttcggcaaagtgaagaatgagtttgatgcctacatcattgtgtctttcgtgaatgccaccctagtgttgtccattggagaaact

SEQ ID NO: 812989 - DNA, 100 bp, Homo sapiens
gaggaccgagcctaagagggcagccgcctgaaggaacgcgacggcggcgcccgcagtcctgaggctttctaccaatgcaggccagtggaaggaagcagct

SEQ ID NO: 812990 - DNA, 100 bp, Homo sapiens
gtttgggaaattcatccaagtcagctacctagagagtggcatcgtgagagggctgttcggctcttgaatcccagcgatgaaaccaggaactcactttccc

SEQ ID NO: 812991 - DNA, 100 bp, Homo sapiens
gagagcccacaggtgctaaagagagcagtaccctgatggagtcccttgcaggtgactcgccgggccctattccctggagattctgagattgaccagctct

SEQ ID NO: 812992 - DNA, 100 bp, Homo sapiens
gatctgttcgaggagccgaggaagcagccagcaggaagcacagcaagattcattctatccggagccttgcttcacagcctacagaactgaattcggaagt

SEQ ID NO: 812993 - DNA, 120 bp, Homo sapiens
aagccttgaaaaagctgccctgagacggtgtcccgccgaaaggaggcaagtgaggcctatctggttggcctttttgaagacaccaacctgtgtgctatccatgccaaacgtgtaacaatt

SEQ ID NO: 812994 - DNA, 100 bp, Homo sapiens
ttcaaagaccttgcaagaagtactaactatggagtatcggctaagtcaagcttgtatgctctgtgcagtgtgcctagaagacttcaagcctcgagatgag

SEQ ID NO: 812995 - DNA, 98 bp, Homo sapiens
gactgcacttcttttttgagaaaggaaggaatatatcctgactgatttggacagtagtcctgatgaggctctggtacatcttcttgctggtttggaaa

SEQ ID NO: 812996 - DNA, 100 bp, Homo sapiens
tcacactcttctgaaacgactcgggtagaggctgaggaaggccgtgttgtttgtctacctgggactagtgctcctgtcccaccggctttgaaggaccaac

SEQ ID NO: 812997 - DNA, 100 bp, Homo sapiens
gtttcctatagatgagaaaccatacaagctgtggtgtgatgaatgcagactctgctaccattttggctgtttggatcctcctttgaaaaagtctcctaaa

SEQ ID NO: 812998 - DNA, 114 bp, Homo sapiens
ccctccttgcagcctcccccagaaagcaatgataattcccaggacagtcagtctggtactaacaatgcagtatcaccttttgccatgatagcatttctttcattggacagttcc

SEQ ID NO: 812999 - DNA, 100 bp, Homo sapiens
acttacagttttccgaagatgagaagaggttgttgttggagaagcaggctggcggaaacccttgtgtgttgaagagatcctaggatacctgaaatcctgc

SEQ ID NO: 813000 - DNA, 99 bp, Homo sapiens
ggaatttctgcccagatagtgtctgcagctgcttgggaacaatgggccgaggcattgtcatttcttttgcaagggccaggattcctgtgattgctgtag

SEQ ID NO: 813001 - DNA, 98 bp, Homo sapiens
accaccatgactgagatcactgctgaagctttggcagcatgtaagcagctgtttgccaagaacccaggtcactgctaagaaagggtgccttcgggaga

SEQ ID NO: 813002 - DNA, 116 bp, Homo sapiens
aaacattaccagtggcaattaatggaaatggacccaccaaggtatggtgacatggtgccaaaaaccatagcagggaagatttttggttctatctgttcgctgagtggggtcttggt

SEQ ID NO: 813003 - DNA, 100 bp, Homo sapiens
cgattctcccacctcagcctctcgagttgctgggaccacaggtcactggagttctggatgattgcttgtgtgatattgacagcatcgataacttcaatac

SEQ ID NO: 813004 - DNA, 124 bp, Homo sapiens
aaggttctgtctatcagtgctgcgagaaaggaaagaaacaagtttgctctcagcggatctcattgcccaccagaaaggacagatagagaagcagccaccgtttgagatctacttatgctttggg

SEQ ID NO: 813005 - DNA, 100 bp, Homo sapiens
catcttctaaacagagcagcagcagcagagatgataacatgtttcagagtggtggacatgacaacagagtcaactgcatacagtggcatcaagacagtgg

SEQ ID NO: 813006 - DNA, 99 bp, Homo sapiens
aatgattcctcctacgaaacctgaaattcaggccaaggctccaagtagtctgagtgatgtgccccaggtgctaaagagctgtgcagaatttgtggagga

SEQ ID NO: 813007 - DNA, 100 bp, Homo sapiens
agaccaaccagcccaaggaacatcttgccaatttcaaatcgggtaaccaaggagcagtgaacagcagctactacagtagtggaagccgtgcatctatggg

SEQ ID NO: 813008 - DNA, 50 bp, Homo sapiens
tttaaccggatggaagaaatgagaaggtccttctccagcccactgaggac

SEQ ID NO: 813009 - DNA, 100 bp, Homo sapiens
ctagtccagctgaacactttccagccttgtttttcagcagctttgaggaaaagtatagattcagaccaggatgtagcactcaaacttgcccaggagcgag

SEQ ID NO: 813010 - DNA, 98 bp, Homo sapiens
tggacaagggagttcagcttttgggagactgactgggctatgaagcacgcactcctggctttaaagtttatacttgcatttgccatacctgataagcc

SEQ ID NO: 813011 - DNA, 98 bp, Homo sapiens
tcctcccctttcctcatggcaagacgcatggaagaagagtgctgttaaggcctctccattaatcaacaggttcacttcttaaaagagggatgtggaga

SEQ ID NO: 813012 - DNA, 99 bp, Homo sapiens
gatggaacacttcagtgcattcaagagataatcattcaggtcttcgtgagctaaggccaaacaaacaaaaaacacttgctttgatggactgaatactgt

SEQ ID NO: 813013 - DNA, 98 bp, Homo sapiens
gcagaacgccatcaaccagctaatatgcttttaaggctattaaccagggtggccttacatcagtagctgtcagagggaaagactgtgcagtaattgtc

SEQ ID NO: 813014 - DNA, 100 bp, Homo sapiens
gcagtaaaagtgaaattaaataggaagatcatcagtcaaggaagacccactggagaggttttatatgactggaaagaaagattgaaacagggttgtgaaa

SEQ ID NO: 813015 - DNA, 124 bp, Homo sapiens
ttcaactgcccagctgttttccaaagttactgcatcattttgtatcccaccagcaatgaatgagcgttccagcttctcctgttaatttgagatgtgaaacacaagatattcttaaacatgccag

SEQ ID NO: 813016 - DNA, 100 bp, Homo sapiens
aagccttctccgataggaacaccctcatcatctacctggacaaggaaatgaaacacgatttccaaaatgaacttaatctttcatgagaaactgaggatag

SEQ ID NO: 813017 - DNA, 101 bp, Homo sapiens
agcagacaaagatctgttgaagaggacagcacttgtcctagcccgattacctttggataagattaccgaatgtcttagtgaactatgttctgttcaggtta

SEQ ID NO: 813018 - DNA, 100 bp, Homo sapiens
gcaagagaagcacctgcacctcagagtaaagctgctggacaacaccatggaaatatttgacattgagaattctgcttggtcagaatcgtgatggcattgt

SEQ ID NO: 813019 - DNA, 100 bp, Homo sapiens
gtgccaaagggctgctttatggcgaatgtggctgataagtctagattcaccaatgtcaaacagtttattgcaccagtagtcgtgaaaggtgccaaattgg

SEQ ID NO: 813020 - DNA, 100 bp, Homo sapiens
tttcattagatattccaagtcagttcagaagtaagcgctctaagaatcaagaaaatggaccagtttgttcgttacgaggaagtaccaccaagaacaggga

SEQ ID NO: 813021 - DNA, 100 bp, Homo sapiens
aggaggtggagttctgtgtggaaggaggagatgttaaagtaacccatcttgcaggacgacattgaagattggtcttctgttgatctaagatgattatttt

SEQ ID NO: 813022 - DNA, 100 bp, Homo sapiens
ccgagcccggcctaggagaccccgagaggagacgaatctttggaagaactaccagaaacgagtgggaaaacaacccggagattcttctttaatttaagtt

SEQ ID NO: 813023 - DNA, 99 bp, Homo sapiens
ctagaaggggaaaagctacttcaaggttatgatgtgattgctcaagcccaatctgggactgggaaaacggccacatttgccatatcgattctgcagcag

SEQ ID NO: 813024 - DNA, 100 bp, Homo sapiens
tttcctcgtcgagcgcaacccaagcatcagaggctccttgaaatgctagatacagagaaggaactgttaaaagaaaaaataaaggaagctttgattcagc

SEQ ID NO: 813025 - DNA, 100 bp, Homo sapiens
ttcaagttctgaactgggaggtgactttgagttcatggatgatgccagtcagatggcaaaaatcaagcaaacccttctagacagccggggagtgttcctc

SEQ ID NO: 813026 - DNA, 100 bp, Homo sapiens
cttggaatgaactgccagcaggcggaaaatctgaacaagctgatgaccaacttgcgctccacccatccccactttgtacgttgtatcatccctaatgaga

SEQ ID NO: 813027 - DNA, 98 bp, Homo sapiens
cttttcatgagtgttcctgtggtctctgcacctcctttctgcagttgtgaaaaacttcaggacaaaaatgtttcatttaaggacttgtgctgctaagt

SEQ ID NO: 813028 - DNA, 99 bp, Homo sapiens
cccaaagcagcgtcccgtgctaaaggtgcttttgaagatgatgatatcacgcacgttgaaggaagtgtagatcctattcgagatatagaaataatacat

SEQ ID NO: 813029 - DNA, 98 bp, Homo sapiens
aaactaccattcgcctgatgaactctcagcagctacatcatgtgacagtggaattatagaagatgtgaagaaaacaacacacactccaacactaaaag

SEQ ID NO: 813030 - DNA, 100 bp, Homo sapiens
agtctcagaactgttccttcagccaaagaaacaagccgtggaataggtgtatcaagtaatggtgcaaagcctgaaacaatgccatccccatcaaatcctg

SEQ ID NO: 813031 - DNA, 99 bp, Homo sapiens
agaaagagagctcaaaatcggagacagagtattggttgactatagtcaatggggccaatggagccaagtgtatggaaacccacaacagtatggacagta

SEQ ID NO: 813032 - DNA, 99 bp, Homo sapiens
ttgggttccttactcatgcccttctgggggatagtttggctgctgaataccttatattacatctcatctccacagtattttcaacccatgaaagtgcag

SEQ ID NO: 813033 - DNA, 100 bp, Homo sapiens
atcctgagctacacatggtactcagtaatctagctgcagttttgatgcacagaggttaatggtgcaatgtaagaaacctttaaaagtttctgatgaatta

SEQ ID NO: 813034 - DNA, 100 bp, Homo sapiens
ttccccagctctgcagccacatactatccgtttgttcaggaaccaccagtgacagaatatggtattagacaacatgatagcttctggccaattagacgag

SEQ ID NO: 813035 - DNA, 100 bp, Homo sapiens
aaaatggcgccctacagcctactggtgactcggctgcagttccaatttgagccgctgtgaaaaaggcctccaccagcctctcaccagaagagattgctca

SEQ ID NO: 813036 - DNA, 100 bp, Homo sapiens
ggaccttccccttcaactcttttctctcgggcttcatctcttgtgtggggagtttcatcctagcgggcccctccagccagcgtcaggtgcagaatggccc

SEQ ID NO: 813037 - DNA, 100 bp, Homo sapiens
atgcgctaagctccatggccaacattgcgggaacctgtgtgcagacacattagaaaaggattggaacaaggtaatttgaaaaaggctttagtgaatgtgg

SEQ ID NO: 813038 - DNA, 100 bp, Homo sapiens
caagctcctacaaggcaggcagtattgggtgcagcatcagaagagctaacaattgctggaatgacctttacaacttttgatcttggtgggcacgagcaag

SEQ ID NO: 813039 - DNA, 139 bp, Homo sapiens
tatggtctccacaagtatctgaagatgggaaagcccatcctttcaaaatcaacttagaatcagaaccacagacaaatgctgtgcttcatgaagttaaaagagaggggctccccgtggaacaaaggaatgaaatcttgac

SEQ ID NO: 813040 - DNA, 100 bp, Homo sapiens
ttggaatgtaatcaactgggagaatgtaactgaaagatacatggcttgcaaaaagtaaaccacgatcgttatgctgagcatctccttggaaacaatgcca

SEQ ID NO: 813041 - DNA, 100 bp, Homo sapiens
gcattgaggagaagtgctatgtgctgacttttgccgagtactgcaggttcacctgaaacaaagtggattgatgcaacttctggaatttacaactcagaaa

SEQ ID NO: 813042 - DNA, 100 bp, Homo sapiens
tttaccatgacgtgatgctggagaactgggtacttatatcctccctggtgagaaagatcagtctaaagaaaaggagaagaaagtgaaaaaaacaattcct

SEQ ID NO: 813043 - DNA, 99 bp, Homo sapiens
gattctacaagtgacttaagaagcaaaaaattcaagaaactgactaaagctatatgtggactgtgcaaaatggcaactcttaaggaaaaactcattgca

SEQ ID NO: 813044 - DNA, 100 bp, Homo sapiens
ctggactgtgaggaggagcagtggaagttccagccactggtgccagccggcgtgtctgcgagctctgcaagggagcggcccctcctgacagccccgtggt

SEQ ID NO: 813045 - DNA, 99 bp, Homo sapiens
gatatagtcactctcatcaataagatctggacgttggtggttggctatgtgttgactgtttcattcaagtggaatgcaagcactgaacgctacttgaga

SEQ ID NO: 813046 - DNA, 100 bp, Homo sapiens
gaaaaaaaatatcatttgggtgtgagtccactttgcgatcgtcacactgaatctattgccaacatccagattgttatcagggaataccaagagcagagag

SEQ ID NO: 813047 - DNA, 98 bp, Homo sapiens
aaaagaacttcctggagaaactgaagcgggacgttgagctgaagaaatcaggggagaaacccctgcttggtggaagcctgatggaatatgcaatcttg

SEQ ID NO: 813048 - DNA, 100 bp, Homo sapiens
gaggaaagtcccaggatgactactgtgtcaaggaaatcctcattgacgattcaatttgttgaaggccaatttgtggactcctacgatccaaccatagaaa

SEQ ID NO: 813049 - DNA, 100 bp, Homo sapiens
gtctctcctgcacacgcaggatggcgtggtgcaccaccacggcctcttccagggtgtgggccgaagatatgctcatgtggtgttgaggaaagcagacatt

SEQ ID NO: 813050 - DNA, 100 bp, Homo sapiens
agtccctcaccagcaagttcatgaccacattcagtcagctccgaggaaaacgcagcacagttcccttgaccagagttctccaccccagagcggagtgtcg

SEQ ID NO: 813051 - DNA, 98 bp, Homo sapiens
aggtggagaccggagaagctgtgaggttattcctggattttgtgaagggggatttaaaatccatgaggctgatataaatgcagataaagattgtgatg

SEQ ID NO: 813052 - DNA, 100 bp, Homo sapiens
ctcggccccgggccccctggagctggacctgacggttcacggcgaagcagctggagaagctggccaagaaggcggagaaggactccaaggcggagcaggc

SEQ ID NO: 813053 - DNA, 100 bp, Homo sapiens
tttggagatcttgacaaagcctcttctgtttccaatgggagcctaatgggaggtgactggatcatgggagcagagttctcttggatggtttagcattatc

SEQ ID NO: 813054 - DNA, 100 bp, Homo sapiens
ttgctggcattcaagaagggacctcggcggagcaggagggccttcaagaaggagaccagattctgaaggaggatttgacagctaaggatattgaagaaat

SEQ ID NO: 813055 - DNA, 100 bp, Homo sapiens
cgccccgaggcccggccctgggtgtggggaaccgcgctgaggagctggaaactttcccggcaggtttggtgcacctcgatttggaggaagtagggcaggg

SEQ ID NO: 813056 - DNA, 99 bp, Homo sapiens
aacgcagctgaaagcgtgaactgtgtgtcagctgtgatgcatgtttaaaaggaaattttcgaggtcgcagatataagtgtttaatttgctacgattacg

SEQ ID NO: 813057 - DNA, 100 bp, Homo sapiens
ccagattctgccaattcgttttcaggagcatctccaggctgaagccgacgtagcttctctgaacagacgcatccagctggttgaggaagagttggatcgt

SEQ ID NO: 813058 - DNA, 100 bp, Homo sapiens
ctcttccttccccatcatcctttcctgtggctcctcaggcttcacctaaagaggaatgcagattccagcagaagatggctgtgccacccacgtatgccga

SEQ ID NO: 813059 - DNA, 100 bp, Homo sapiens
cctcgtctgggctcgcggcgtctccggggaaagccgtggccccgagggcggatccgagcaaatcctgaaggaacccaaagtggctgcttctgttttgaat

SEQ ID NO: 813060 - DNA, 98 bp, Homo sapiens
gtcataagaccgcgaccagacaggcggcgccatcttcgaacttagacttccggaaggactttggcgagggtcttcaatgaaatttatccagtatggac

SEQ ID NO: 813061 - DNA, 98 bp, Homo sapiens
aagtaggggtgcacctcagcactatcccaagactgctggcaacaggatgtaggctatccggaattcctcaacatacgtccgtatatgtcccagaataa

SEQ ID NO: 813062 - DNA, 99 bp, Homo sapiens
tgttaccggaacggcggcgacaagggtgttcccgaactagagtgggagctcttgtccctggcaaagcgaaagcgcagtgactctgaggagaaggagccg

SEQ ID NO: 813063 - DNA, 99 bp, Homo sapiens
gagcttcggagaagcagtggtgggttccatgtgatggtggagtaggaggcaggtctccgcggttctgtggacaatcacaatgggaatccaaggagggtc

SEQ ID NO: 813064 - DNA, 100 bp, Homo sapiens
atttcctgccaagggaagtagtgtcctactcaaaggagacccagactcctcttgccacgcatcagtctgaaggttcgagaacttgtcttggacaattgca

SEQ ID NO: 813065 - DNA, 99 bp, Homo sapiens
agctgtgatgctggagccaagaattcataagatagccatcctgggtcttggcagcagcattgggactcctccagaagatgcctgaaatgtgcagatgcc

SEQ ID NO: 813066 - DNA, 119 bp, Homo sapiens
gcatcaattcttcgacaggaaaaaaatttgctggatattgatgcgccagtcactggttaccttgaggatagttttgtaaaatctggagtcttcaatgtatcagaacttgtaagagtatc

SEQ ID NO: 813067 - DNA, 99 bp, Homo sapiens
gcagcctggacccagagagcatcttcgagatgatggaggcatgtggcgtcatagtagaattaatcaaaagcaagaaaatggctggaagagctgtcttgt

SEQ ID NO: 813068 - DNA, 100 bp, Homo sapiens
tggtgcagagattgtctcggctcttgagtacttgcactcgcgggacgtggtataccgcgacatcaagaatcatgtccctaaggaggaagctggagctcca

SEQ ID NO: 813069 - DNA, 98 bp, Homo sapiens
ttccacccctaggaattgatttcaagatccgcactgtggatatagaggggaagaagatcaaactacaagtctggtattctggatggtgaaatggaccc

SEQ ID NO: 813070 - DNA, 100 bp, Homo sapiens
gggaccccatccttcctgtcttcgcagaggagtcctcgcgtggcaggatggggaagcagaatagcaaactggcccctgaagtgatggaggacctggtgaa

SEQ ID NO: 813071 - DNA, 100 bp, Homo sapiens
cttccccatctggtgcttttcccatggagaacacacaaccaaggactactgagcccagccaggctgtatgccattgctgccaaagaaaaagatattcaag

SEQ ID NO: 813072 - DNA, 100 bp, Homo sapiens
gttccatgcaagttttgtggagcaagataatttctgcattatcacggagtactgtgagtgttgttaataacagtactggtagtggaagggattgccgtgg

SEQ ID NO: 813073 - DNA, 98 bp, Homo sapiens
cctgcagtccggatactcacgccagaagggtggttctcttcccaaagtggaagccaaattcatcaattatgtgaagaattgcttccggatgactgacc

SEQ ID NO: 813074 - DNA, 100 bp, Homo sapiens
ctactggacaaacatttcctccaagggtgcaatatgtgacttctgtgaagcttgggtttgccatggtaggaaatgtctcagtacacatgcttgtgcctgc

SEQ ID NO: 813075 - DNA, 100 bp, Homo sapiens
aggaagaagattggaaaaaggtgctgcagcaggaagaagctgggatctgattgaacaggtactccacaatttacaccatgtttcctgtgttttctctggt

SEQ ID NO: 813076 - DNA, 100 bp, Homo sapiens
tggctggaaaaccccaaaagtgtacataaggactcagcccaggagagtgttattactcgagatattcatcgtacatttcccgcacatgattactttaaag

SEQ ID NO: 813077 - DNA, 98 bp, Homo sapiens
acatcctctgggaagacacacacaatggagattgagaggatccagaatccagatctctggaatagctaccaggcaaagaaaaaaactatggatgccaa

SEQ ID NO: 813078 - DNA, 98 bp, Homo sapiens
aaggataagggcgacagcaacagctctgccggctggaagaaagagcgggatttagaattggccgctcgcatcggccagtcgttgttgaagaagaacaa

SEQ ID NO: 813079 - DNA, 98 bp, Homo sapiens
cccaccacctgcgctccctccaagaccttgtccatcacagctggaggagagcaggagtgttcagaagcaaatgaagatcctgcagaagaagcaagccc

SEQ ID NO: 813080 - DNA, 100 bp, Homo sapiens
caatgcctgtttattcaccatcaacaaagaagaccacacactgggaaacatcattaaatcgtgtgatccctcacatccacaaatctctgattggaaagaa

SEQ ID NO: 813081 - DNA, 100 bp, Homo sapiens
gatgagccactttgagcccaacgagtacatccattatgacctgctagagaagaacattaacattgttcgcaaacggtcacgagaagagaatgccttctag

SEQ ID NO: 813082 - DNA, 100 bp, Homo sapiens
catatgatggaatcccatttgttaatgcaggaaacaagattttggtgaagcagtcgcccatgcttgtagcgtacgacaatgcggtcaaccttagctgcaa

SEQ ID NO: 813083 - DNA, 99 bp, Homo sapiens
ggaaatgggaccaaccttgatgaatatgtggctttggtggatggggtattcttgaaccaggtcatgctccaaatgttcaaagtacggagggagaagctc

SEQ ID NO: 813084 - DNA, 100 bp, Homo sapiens
ccaacactgcaaagcatttttatggacaacgaccacaggaatctggaattttattaaacatggtctggctattttagttgccacagcatggtatggcaat

SEQ ID NO: 813085 - DNA, 100 bp, Homo sapiens
aggaaggatgcagagagaaaggagagttggtaagtcacatagaagagatgctccagacagcctacaacaagctccacacatggcagtcacggcgtctgat

SEQ ID NO: 813086 - DNA, 98 bp, Homo sapiens
ggaggcttccaggtgaaactctatgacattgagcaacagcagataaggaacgccctggaaaacatcagtcagactggttcttcagtgacgaagaggac

SEQ ID NO: 813087 - DNA, 98 bp, Homo sapiens
ttccagccttccaagctctactgtgacttcagagacactgccaagcagccttagccctagtgtagagcagaagatggctgtgccacccacgtatgccg

SEQ ID NO: 813088 - DNA, 100 bp, Homo sapiens
acttcagagacctaagctttttccagagaagagaagctttactggtgttccagccctaagacagcgcaaagatgagctggaacagagaatgtctgctctc

SEQ ID NO: 813089 - DNA, 98 bp, Homo sapiens
ggcaagcgcgaggtcatgtacacggccttcaaggccctcggcgattcggtggactacatccagtttttcccaggtcatgagtctcgggctacagaagc

SEQ ID NO: 813090 - DNA, 99 bp, Homo sapiens
agaagtccgagacacgcggtgaggcggcgacgggctccggcgtgagtgcatctccatccacgttggccaggctggtgtccagattggcaatgcctgctg

SEQ ID NO: 813091 - DNA, 98 bp, Homo sapiens
ggatagcgagggcggccgcgccggctccaggagctgcagcagctgctgtgctgcacgcggcaagaggcgagggcccggctgcaggcccaggagcacgg

SEQ ID NO: 813092 - DNA, 50 bp, Homo sapiens
tttgaagcattaaatgttatcgtaagtggctgacaagattttgaaaaaga

SEQ ID NO: 813093 - DNA, 98 bp, Homo sapiens
tggacttgaaaagctgggaatattcgtcaagacagtaacagaaggtggtgctgctcaacgggatggcagatgccttcaattaagttgcagagttctga

SEQ ID NO: 813094 - DNA, 100 bp, Homo sapiens
ggacctagactgtgacaacgaccacgtctccaaaatgagtcgcatcttcaacccccatctaacgatatcgcattcagagtgaacaatttgaagatctttg

SEQ ID NO: 813095 - DNA, 100 bp, Homo sapiens
cttatccatcccatctcttggacagatgatgccagttaattactttgaatgttttatgaatgaagctatggctacagattccccaagaagacccagtcgt

SEQ ID NO: 813096 - DNA, 100 bp, Homo sapiens
ggagaagccttcaggctgcaccacgtggaggccaacaggttgtggaagatatcaataagcgcagagagccgctccccagcctggaggctgtgtatctcat

SEQ ID NO: 813097 - DNA, 100 bp, Homo sapiens
tcatttgaggaatcagaacgcaagcaaaatgcgttaggaaaatgtgatgcatgtctcagtgttgcctttccccatcttcctggttctgctccttcgtggc

SEQ ID NO: 813098 - DNA, 100 bp, Homo sapiens
caggagctcaaggaatagtatgctcaaagcttggattctgccgtgccactcacgaatggcgacacagaagacgatgctgacaaaatgcacgttgataggg

SEQ ID NO: 813099 - DNA, 100 bp, Homo sapiens
tgtgaactaaggccccctgcccccttttcctggtgcatgtgaagttatcaaaaacagcttttggaaatgccaaaactgtaaggaatgacaactcctctag

SEQ ID NO: 813100 - DNA, 98 bp, Homo sapiens
acgaggccttccctgcccagtccccacaggacctcacctaggtgtcctcatgacttctcttgtggaccatgtccgtgatcttttttgcctgcgtggta

SEQ ID NO: 813101 - DNA, 100 bp, Homo sapiens
acacatggcctggagttcattctttaccacattttaagccagctgtatgcaggagctattcttgaagtttgtggatgaaaattgggaaggttccctcaag

SEQ ID NO: 813102 - DNA, 98 bp, Homo sapiens
acgaagttgccagggcctgtccagctggagctcattggacacagcatctttgatttcatccacccctgtgaccaagaggagcttcaggacgccctgac

SEQ ID NO: 813103 - DNA, 99 bp, Homo sapiens
tcatattccttcatctaccatggctcagccgggaactctgaacctcaataacgaggttgatgataattagaagcatgctttccactgaacttcccgaca

SEQ ID NO: 813104 - DNA, 100 bp, Homo sapiens
cctcaacttccaagtgataaattcaaggatgatccagttggaccttttggacaggaaagtgtaacatcagttacagacggaatggccaaagactatgacg

SEQ ID NO: 813105 - DNA, 99 bp, Homo sapiens
agacagttcctgctctaagaggccatctgtgaggctcagtctcccaacacctctgatgatatcatcaagttgaatcgaaaggaagggaagaagcagaat

SEQ ID NO: 813106 - DNA, 100 bp, Homo sapiens
cgaccagccggcagtccccctggcccgggcatttctgggacagggttatgatgatggctacgggggtgaatatgatgaccagacctatgagacttatgat

SEQ ID NO: 813107 - DNA, 98 bp, Homo sapiens
tctcagaagacacagtgtaaacaccaactggcatccatatcttctccagatgtggccaattagatagtgctttgcatgaagctactagtcgcgtgaga

SEQ ID NO: 813108 - DNA, 101 bp, Homo sapiens
ctagcgctccgccgctgctgccttacgcggccccgcgtcgggagaactgggatcgccccaagagcaccgcgagggaaatctggcattttttaaagtttgcg

SEQ ID NO: 813109 - DNA, 98 bp, Homo sapiens
aaaacttcccagtcagtctcaggagaagaaatagatgcaatggatgttcagcagctttcacaaatagtaccaaagggtatatttacttctggcacatg

SEQ ID NO: 813110 - DNA, 100 bp, Homo sapiens
acgcttggctatgtgacgctgctggaggaaacacctcaggacacggcctacaacaccaagaggtgcaattgctggtatagttgatcagccgatgcagaac

SEQ ID NO: 813111 - DNA, 100 bp, Homo sapiens
gagctcatcaaggacgggaagtcactcataagcgcgctcaagagtctacatcatccgggtcacgtggtccagcggctccaccgaggccatttaccggcgc

SEQ ID NO: 813112 - DNA, 145 bp, Homo sapiens
ggagctttgaagccaccccggtcaaaggatgctgagtccggagcgcctagccctaccggactacgagtatctggtcttaggaaaagtcctcagtgctgtgggcagtgcccagctactgatgtcccagaaattccagcagttccgg

SEQ ID NO: 813113 - DNA, 100 bp, Homo sapiens
gttggtggtaccctaaaattagggcatgattaagagacttgaggtttaacagaataagagaaattccagggagcgccttcaagaaactcaagaatttgaa

SEQ ID NO: 813114 - DNA, 98 bp, Homo sapiens
acaccagcaggagtgctgccagaaatttgaacaactttccgaatctgcaaaagaagggcttatttcaaaacctttgtccctcagttccaggaggcagc

SEQ ID NO: 813115 - DNA, 100 bp, Homo sapiens
gcgggatttggagctgcctagcctcgcggtcgttctccaaggagaagtacatcctggactcatcgccagagaaactccacaaggaattggaggaggagct

SEQ ID NO: 813116 - DNA, 100 bp, Homo sapiens
acagaattgaagctatgtgaaaatggaaacatgaataatgttgtaactcgaagatttagcaaagctgacacaatagcaaaaaatggccccatttatgatg

SEQ ID NO: 813117 - DNA, 98 bp, Homo sapiens
gagtcctgagcggccaggacgacgaggagcagggcctgactgcgcagatcatcacgggggaattctaccggatctattacctgaagaagtcgcggtcg

SEQ ID NO: 813118 - DNA, 99 bp, Homo sapiens
ttactggccctgagtctttgggggcagcctgcagaggctgcgggtgcagtactagccgctgtgtcaagtcacaaattcaactcattctatggggatccc

SEQ ID NO: 813119 - DNA, 98 bp, Homo sapiens
agctcacaaaggagaaagagcactaccaggtgttagcgatctagggcagccctgcagaggtacctgttctactgtaatcgctatatgaaccacatgca

SEQ ID NO: 813120 - DNA, 100 bp, Homo sapiens
cttcatcaaaaatagtgatagctttgataagtcaatatccaacacagccaacctaccctgtgcagcctcctgggaatccagtataccctcagaccttgca

SEQ ID NO: 813121 - DNA, 100 bp, Homo sapiens
aaaactttctgttgacttgatcaaaacatacaagcatattaatgagagctggaagtcgagtgtgctactcaactcaggagatttggagacaaactgaact

SEQ ID NO: 813122 - DNA, 99 bp, Homo sapiens
ctagaccaagatagaacagcccttcagaaagtgaagaagtctgtaaaagcaatatataattctggtcaagatgcccagcctacagagtctgagaaggaa

SEQ ID NO: 813123 - DNA, 100 bp, Homo sapiens
agacagcaaaaagacttgtcaaagtcaagtggtcgtttttcaatgagctagagaagttaccaagtctacgggctttgtcctgcctaagaaaccccctgac

SEQ ID NO: 813124 - DNA, 99 bp, Homo sapiens
gcagaagttcttcagcgatgttcagtatctgcgggacatgcagcataaggtggactctgagtatcagattcaccagaccagagcacttgggcagcagcg

SEQ ID NO: 813125 - DNA, 100 bp, Homo sapiens
gccaagcatgttgccactgttcaaaatgaagaggaagcccagaaagggaaaaactaccagaacggagatgtgtttggcgactaaatgtgttaaatgggct

SEQ ID NO: 813126 - DNA, 100 bp, Homo sapiens
gaaaaattcttcagattggaaaataccacaggatggagactacgagtttgtgtctcactttgtcgcccaggctggagtacagtggtgcgatcttgactga

SEQ ID NO: 813127 - DNA, 99 bp, Homo sapiens
aaaggcggctccaaggagtactggtttgtgctgactgccgagtcactgtcctggtacaaggatgaggagctgatccaccttgagatcaagccggccatc

SEQ ID NO: 813128 - DNA, 100 bp, Homo sapiens
gaacatctctctccagagcatgagtgagatggaagattttcgaggtatagcagaagaatcatttccaagctttctcaccaattcattatttggtaacagt

SEQ ID NO: 813129 - DNA, 100 bp, Homo sapiens
gtgtgggacgggtttagcggcagcctcttcgatttgtcccatcagatgaaaagaagaaacaaggttgtcaacgagaaaatgaaactctaatacaaagaag

SEQ ID NO: 813130 - DNA, 99 bp, Homo sapiens
ttatgaaccagtgtatcccaaacagaaccaagttgtattgttagacacactggaacaagagatttcaaaatttaaagaatgtcattctatgttggatat

SEQ ID NO: 813131 - DNA, 100 bp, Homo sapiens
gacacttggaaattgaacaagcgtcacttgacaagcctatagaatcggaatctatcttctggatttaatctacattgattctgcatatcctgcctcaggc

SEQ ID NO: 813132 - DNA, 100 bp, Homo sapiens
acagcatgcggaaaatactacagagtgtgcacactggctatcattgatccaggattattacaaaaccggtatcatcaattgtcctgatggcatctctatc

SEQ ID NO: 813133 - DNA, 112 bp, Homo sapiens
cgggacgcgagcggcgagccggagcgcggagcccggctcccgcaccatggaggaggacgacagctacgcttccccgggcgctgcctggacaggcctgcctgcgtgctgggac

SEQ ID NO: 813134 - DNA, 100 bp, Homo sapiens
gtggaagtgtcgccccaggaaggctgcatcacaaagctggacaatccagatgagcaagcagcccagatcagacgagagctggatggacgtctacaaatgg

SEQ ID NO: 813135 - DNA, 100 bp, Homo sapiens
cctcacagtaatgatgcctgctctaccaactctcaagtgggcggactactggaagtcacagccaaagaaattctgtgattactgcaagtgctggatagca

SEQ ID NO: 813136 - DNA, 121 bp, Homo sapiens
tcctgctataagagcattatgggcagacagcggcatacagaatgcctatgaccggcgtcgagaatttcaactggagccattatttccatttaatttggatgaatttgttactgtggatgag

SEQ ID NO: 813137 - DNA, 100 bp, Homo sapiens
agcatctaccgctcactgtagaccatctcaagcagggttgtggagttgctcagtgcttgaagattgtctgccaagttgggagattagacagaggaaagag

SEQ ID NO: 813138 - DNA, 100 bp, Homo sapiens
ccagccactgccctggaggaccagggggagagtttggagtgaagtttaatgttgccaatggaggggccacctacagatgctcctgcagtggacacagcag

SEQ ID NO: 813139 - DNA, 100 bp, Homo sapiens
aatagtttattattcatggagacatccgctaaaacatcaatgaatgtaaatgaaatattcatggcaatagtagagacggggtttcaccttgttagccagg

SEQ ID NO: 813140 - DNA, 100 bp, Homo sapiens
tgaatgccctgaaagatcgagcagaggcctatttgatagaggaaatgtatgatgaagattgcaaatagaagagtcttccaaaccagtgaggctatcacaa

SEQ ID NO: 813141 - DNA, 99 bp, Homo sapiens
aacaaggtgttggactatcccgccatcgttatatatgccatgattggaaatgatgtctgcagtggggatcatggcccaagttgcaatgtccaccctccc

SEQ ID NO: 813142 - DNA, 100 bp, Homo sapiens
gcaaggaacctggagaaggcagctgccatttagctgaagtgtggaggggaaatggttcgtgctggccgtgggcagcgccgtctttgatgccatgttcaac

SEQ ID NO: 813143 - DNA, 98 bp, Homo sapiens
ggaccccgcgagcaccagagtcggcgtaactatcgcctgacagggtactaggttttgacaagcttgcatcatgcgtgagtataagctagtcgttcttg

SEQ ID NO: 813144 - DNA, 98 bp, Homo sapiens
cttctggcactggcacttgtcctcctgtttctatagaaactgggttggaagtcagagctgcacaaagggaaagggcttgaaggtccccaccaccatta

SEQ ID NO: 813145 - DNA, 100 bp, Homo sapiens
gaaggtgctccagagatcttctgttcttcaggattatatgcgtcaggcaggagaagtgacttatgcagatgctcacaagggacgcaaaaatgaaggggtg

SEQ ID NO: 813146 - DNA, 100 bp, Homo sapiens
tcggcggcgaaggtcagcgccgacggcagccggcacctgacggcgtgaccgacccgagccgaccctcctcctccgcccccccgcagctcgggccctggtc

SEQ ID NO: 813147 - DNA, 100 bp, Homo sapiens
gactacacccacttctacttctgttatcgctggttcctgctggattttaagagagactgcttttcaggaagccttggacgctgcaggtgataaacttgta

SEQ ID NO: 813148 - DNA, 100 bp, Homo sapiens
aggaagccttgttctatggtactcggaccatggagccatacagttagagatgtttatgattacttccgagctgtcctgcagcgtgatgaaagaagtgaac

SEQ ID NO: 813149 - DNA, 100 bp, Homo sapiens
agtgtcatcattagcaggtgctcttggaaaactcaagcatagtcaagatccagtgttgtacatcagtacacagaagagacggatgtgaagacaccaagag

SEQ ID NO: 813150 - DNA, 98 bp, Homo sapiens
aaaggacatggacgagccctcaccagtccccaatgtagaagaggtgacacttcccaaaacaggttggatggcaagcatgtggtgtttggcaaagtgaa

SEQ ID NO: 813151 - DNA, 100 bp, Homo sapiens
caggactgcgcccccgggagcgggcgcccagaggtgacagttaaaggatttgaacctttaattcagtttgcctacactgctaaactgattttaagtaaag

SEQ ID NO: 813152 - DNA, 99 bp, Homo sapiens
gataactttcgtatcacaaaagcagatgctgctgaattctggagaaagttttttggagacaaaatcctgctgcatcacagaagctggaagttctgatgt

SEQ ID NO: 813153 - DNA, 98 bp, Homo sapiens
cacactgaatggtgaaatccttcttgatgattcaggctcagaactggctttcaaggactttgatgttggcgatgggctgtgcttaagagtaaaacttc

SEQ ID NO: 813154 - DNA, 98 bp, Homo sapiens
caccggcacagtgacggcttcagaggagactcttgaagacaactctgaaaagtgggctgtgactcccgatgcaggggatggtgtggtcaagccctcgt

SEQ ID NO: 813155 - DNA, 118 bp, Homo sapiens
agaagtggagcgtgtcctgaaggagttccaccaggccgggaagcccatcggcaattctgtggtgttcttggtcacacatttatggagtttctgaagggcagtggagattactgccagg

SEQ ID NO: 813156 - DNA, 98 bp, Homo sapiens
tttagggtcctttatatagaagggagagtagagggcaaggagttggtgcacacctacaagggctgcatcaggtcccaggactgctactccggcgttat

SEQ ID NO: 813157 - DNA, 100 bp, Homo sapiens
agatcaacttggacaggaattggaagaactcacagctagtctatttgaggctcccagccaacctctgataaaccctcccagcggccatcagagagcacaa

SEQ ID NO: 813158 - DNA, 98 bp, Homo sapiens
atgactttttctgctagagtgtctagtgaatatcagctcctgggtcatttttctccctgaggacaacctgagggaccactgacatttatggatgtggc

SEQ ID NO: 813159 - DNA, 100 bp, Homo sapiens
ggatttgttaaggattccaagtaactcttatttgttgtaatttagattcgagaagtggtttatcctttgactggaaaagaaaagtagctgcagtattccc

SEQ ID NO: 813160 - DNA, 98 bp, Homo sapiens
ggaaatgaggagacactgggagggtttcctgtcaagagtgttgttccagctttgaggagaaggcagagcccccccaggctatgaatgccctgatgcgg

SEQ ID NO: 813161 - DNA, 100 bp, Homo sapiens
cgagctcagggtccagctggcccagaaggagcaggagctagccagagccaaagaagccttgcaggatgccctccaaatccttggttatggaatatttggc

SEQ ID NO: 813162 - DNA, 99 bp, Homo sapiens
gacaatcttcgggccctcctcatttatgccatttcagctacagtgttcacagtcatacttacctggttgcttgcgcatctagtaatgttggatcatatt

SEQ ID NO: 813163 - DNA, 100 bp, Homo sapiens
acccgttcagagtcctacagtggcaggttgtaaatgtcttaaaatccttattgtcaaatcttgatgaagtaaagaaggaaagagagggtctggagaatga

SEQ ID NO: 813164 - DNA, 99 bp, Homo sapiens
gaatgacaaaatccgcaaacagatcaacatcaataatccctttgttttcaaacacattagtaacctcaagggttattggggctgtgccatcggcaaagc

SEQ ID NO: 813165 - DNA, 99 bp, Homo sapiens
cttactaaccacgaccatcaaatccgtgtcggagtccttacagggagtgcatccgccccaacccttttccccctcgtctcctgtgagaattccccgtcg

SEQ ID NO: 813166 - DNA, 100 bp, Homo sapiens
ctcttcccaatgatgagacgcgtgtgaatgcaacgatggaagatgtgaatgactggctgactgaactcttttggagctgaatttcgtcggttttcgctgg

SEQ ID NO: 813167 - DNA, 98 bp, Homo sapiens
ttgcttttcctcgctggggtgtacgtgcctttgttccattgaatgttcccaataacaaaaattctacagagtgggaaaaagtgaagtccctatttgaa

SEQ ID NO: 813168 - DNA, 100 bp, Homo sapiens
aacgatgttggactcatagtcactgccagaaagacctgagcatgcagaattccgagggtggagcggattcgccagcgtccgtggctctgcgtccctcggc

SEQ ID NO: 813169 - DNA, 100 bp, Homo sapiens
aagagggtctggaggagccttctcaagaacagaggtttctgagtcccttcaacatgatcctgggaggaatcgtggtggtgctggtgttcacagggtttgt

SEQ ID NO: 813170 - DNA, 99 bp, Homo sapiens
ctggaggaggcatggagcccgaggaggagccaagtgtggcagcagttcgtgaagtctgtgaggaggtgatcatggaggaagcactttactcccaccaaa

SEQ ID NO: 813171 - DNA, 100 bp, Homo sapiens
tcttctccaagtgaagacaactggttgaaggggaccaggaggttggacacagaccattgcaatggaaatgcatcttcatgatacagttaagaggaatctt

SEQ ID NO: 813172 - DNA, 99 bp, Homo sapiens
tggcctcggagcgcccggagccggagttggggactcgcttcattatagaagccatggaggcagcagggcactcaatcagtactcttttcctatgtggag

SEQ ID NO: 813173 - DNA, 100 bp, Homo sapiens
tacagcatggaagctgttgccaagtttgatttcactgcttcaggtctcctctgagcctccggcctccataagacccaaaacagatgacacctcttcccag

SEQ ID NO: 813174 - DNA, 98 bp, Homo sapiens
ccatcgtgtgaactatagagtttgtggacagatttatattgtgtaaacaggaacatcgataagtagtgtaaaaacttgcacaatgaaatccgaagcca

SEQ ID NO: 813175 - DNA, 100 bp, Homo sapiens
tccacaccagcggcagcatgcatctgatgctctctctccagtccttgctgaagagactttccgttacatgattttatcttcaagacactaaaagtagtaa

SEQ ID NO: 813176 - DNA, 100 bp, Homo sapiens
taggagaaagagcacaaaagaggtctgggaacttctctgctgcaatgaaagatctgtcaggcttattaagggagatggcgaggtcctagaggaaatcgta

SEQ ID NO: 813177 - DNA, 98 bp, Homo sapiens
tggcagtggaaagacccaagaatgccagtcaagaagacagattcatctgaaaactacattaagatgaagacctttgaaggtttctgtgctttgcatct

SEQ ID NO: 813178 - DNA, 98 bp, Homo sapiens
cttgctaataaaacaccacatacttggagtagggagaatattcaggtatccaaaatgttgaaagattatgactggattaatgcagagagacacctctt

SEQ ID NO: 813179 - DNA, 99 bp, Homo sapiens
aaaatgccatgcgcagcgacagtggcagccagtgccccttgctgtggaggatgtatttgaactttctgtccaacatgtttaccgtggctgatgtgttga

SEQ ID NO: 813180 - DNA, 98 bp, Homo sapiens
ccagtggccacagcatctttgtctagccccagtgcagaaccacaatggacactgccagccatagccttgttcttctccagcagctgaacatgcagcga

SEQ ID NO: 813181 - DNA, 100 bp, Homo sapiens
acctgccccagaaggatcttgcactacagatggaaccaaagaggttgttgtaaatgtggatgatgatggagtcatttcattgaacttcgagtgtgataag

SEQ ID NO: 813182 - DNA, 100 bp, Homo sapiens
aatgcagtcgaaactggatacttgaattcagtttgccagagtttgttagacaatctggatttcaatggcaccagcatgatatcattgatcattcctccca

SEQ ID NO: 813183 - DNA, 99 bp, Homo sapiens
cctggagctgtggaagctgtgcacctccctcactttgtggctctccaaggtttccctaatgtgggaaagtcctcgctgatcaatgggctggtggggcgg

SEQ ID NO: 813184 - DNA, 100 bp, Homo sapiens
ttcaaatgtgtgcagaaggaggtcctgccgtccatgcggaagatcgtcgccacctggatgctggagcgaactgtgactgtctaaatggaggaacatgtgt

SEQ ID NO: 813185 - DNA, 119 bp, Homo sapiens
cctgttgaagaactcttagattcttatcacaaccaagtagaactggctcttcaaattgaatttgtgaagaaatatgggaacctttttagcttggagcttggtgacatatctgcagttct

SEQ ID NO: 813186 - DNA, 100 bp, Homo sapiens
gtacggcttagaggacttccctttggatgtagcaaggaagaaattgttcagttcttctcagttcttacagcagctgtgacacaagcctcactgcagtcta

SEQ ID NO: 813187 - DNA, 100 bp, Homo sapiens
ggaaacttggatctgaggaatggagaactccagaaatggtcctggaatgccagacaaccacggctcctaccatgtcggccagcagcagctctgatgtagc

SEQ ID NO: 813188 - DNA, 100 bp, Homo sapiens
gtttactcagccagggcctccccttctcttccatgcccactgcctacaacacaggagtatggatgtgtccaacagccaaaaactcaagaaagtaaattga

SEQ ID NO: 813189 - DNA, 99 bp, Homo sapiens
gcggtgagatcgtcagcgctgactccatgcaggtggctttctagaagatgaccatagaggaccttccagattttccattagaaggaaatcctttgtttg

SEQ ID NO: 813190 - DNA, 100 bp, Homo sapiens
tagatcacgaaggctccttctcacctccggacgtgagaattacaggcttggatctcaaaccgccgcgacatctttccaggaacagcgtgaggaggacaga

SEQ ID NO: 813191 - DNA, 100 bp, Homo sapiens
tgagagcttcaggggaaatggcttcagcgcagtatattactgcaggtgacgcatccaaagaagacattgacactgctatgaaattaggagccggttaccc

SEQ ID NO: 813192 - DNA, 98 bp, Homo sapiens
gacgtcttgcctgtgtcccacttgttcgcggcctatagacattgcctaagatactgagccatatcgccccagcattttgcatgagcagctgtagcttc

SEQ ID NO: 813193 - DNA, 100 bp, Homo sapiens
gacgcttgtgaagagccatctcatcgctaatgctgacgtgcagtccattgctgtagctgacgtgtcagaaatggctgtttctgagctacctggtaacccc

SEQ ID NO: 813194 - DNA, 100 bp, Homo sapiens
gatgataaactgcggcagagtctccgcagatttgcaaatacacacactgctccagccacagtggttcttgtgtcaatttccccctttctagggtgaggat

SEQ ID NO: 813195 - DNA, 118 bp, Homo sapiens
ccagcacctgccactcagagcgcctctgtcgctgggacccttcaggacacattcagctaacgtattttagcaggtggagtgaggttgaagattcctgtgacagcgatgccatagagag

SEQ ID NO: 813196 - DNA, 100 bp, Homo sapiens
taccatttcgagggtgaagctcctcgacaccatggtggacacttttcttcagaagctggtcgccgccggcagatcacctcagccagttctcagacactta

SEQ ID NO: 813197 - DNA, 100 bp, Homo sapiens
ggcactgtggtgggcactgcagtgggcctctcctcccacccccgagctctcagccactccctagcactcacaggtcagtttaggggctggtgcaaaggat

SEQ ID NO: 813198 - DNA, 98 bp, Homo sapiens
gatctgcagccccacaccctggagacattggggacttcattaatgagtgcatctgggggaggtgttgtagccattgacaacaaaatagaacaagcaat

SEQ ID NO: 813199 - DNA, 100 bp, Homo sapiens
ttgcaaggtacattgagcaggctacagtccactccagcatgcgctatcatagagcacaccaaccgggtcatcttcctggaggacgatgacatcgccgcag

SEQ ID NO: 813200 - DNA, 100 bp, Homo sapiens
gggcgcgcgcctgcccagctttgcagcccccgaacgcggcctcgcacaggtgtggatgaggtcaccattgtcaacattttgaccaaccgcagcaatgcac

SEQ ID NO: 813201 - DNA, 100 bp, Homo sapiens
gtcaaggatgagaaacatgctcgacgagatttgcttggaacggtagaagaaatccttccaagcctctcagaaaatatcagtgtttgggggatgaaagatt

SEQ ID NO: 813202 - DNA, 98 bp, Homo sapiens
tgatacccaagaaacatatatcccagatttctgtggcagaagatgatgatgaaagtttcgaaaagatataatccgcatcctccccagtctagatgtcg

SEQ ID NO: 813203 - DNA, 128 bp, Homo sapiens
gacctgattattggcaaggtctccacagccctgaagggccactgggccaaccccgatctggaaaatgagcgtaccaaggatctaatcattgagcaaagatttcatcgcacaatcattgggcagaaggg

SEQ ID NO: 813204 - DNA, 100 bp, Homo sapiens
tttcatggggagaaactcagaagtggagagaacgtctgaggctacatagccagtacaaattgcattaaaatcctcccctactgaaagaaacggaggccag

SEQ ID NO: 813205 - DNA, 100 bp, Homo sapiens
ctcacacctgtacacaaatgttgttatctgatatgtggatgggaaggctgaatatgaggaaaaattcctggtacaagaccattaaaaatctcaagtgacg

SEQ ID NO: 813206 - DNA, 100 bp, Homo sapiens
ctagcaacaaaaagaaagctgcgttaatgtttgcaaatgcagaggaagaatttttctatgaggccctggccaacgtcaacattgggagcctcatctgcaa

SEQ ID NO: 813207 - DNA, 98 bp, Homo sapiens
gaagaagcagctgaagacggaggcagctccacactgtgaactaatatggtttgaagtggtgaacatggatttttctcggcttcacatgtacagtcctc

SEQ ID NO: 813208 - DNA, 98 bp, Homo sapiens
cagcccatgatcaagaaagctcgcaaagtcttcatccctgatgacctgaaggtacatcaggaacgtctctatcaagaatacaatttcagcaaggctga

SEQ ID NO: 813209 - DNA, 99 bp, Homo sapiens
tcccaagtagctgggactgcagcttattccactaagctcaacaaatttcctgtatttaatattaatgatgacttgaatgatctgtgtaccagtgcagta

SEQ ID NO: 813210 - DNA, 100 bp, Homo sapiens
ttattgcataaaaactttctgaagcaggaagtagttcagaggttcttgcgtctcctttctactctgcaaggtgcggccggccggacggacctactacgac

SEQ ID NO: 813211 - DNA, 98 bp, Homo sapiens
cccgggttttgatcgcgcgtttgtgtaggacggggaggtttactgcatcgacgcgcggttctacgggaacgtcagccggttcatcaaccaccactgcg

SEQ ID NO: 813212 - DNA, 98 bp, Homo sapiens
atcctctccaggaatgccacccagcacagttagaagaatgggctctcaaaggtgatgatgatgtagaagaaacacatccaatggatgggaatgatagt

SEQ ID NO: 813213 - DNA, 100 bp, Homo sapiens
attacggggacccctcttcagaattccctcaaagagctctggtccttgctgcactttattatgccggagaagcaactcatgcagcaattccagaaccccg

SEQ ID NO: 813214 - DNA, 100 bp, Homo sapiens
caggaggcagtgccgcttcggccgaaggcccgagcgcccgaggcgtctgggatggtgtgggaccggtttggtgccctggttgtcagatgttggaaagcag

SEQ ID NO: 813215 - DNA, 98 bp, Homo sapiens
ggtggtggaccccgaggtgccttcaccacagtccaaggatgcccagtacacagtgaccttctcccactgtaaggttggaagtgtatcctcccttctta

SEQ ID NO: 813216 - DNA, 100 bp, Homo sapiens
atcagaaaattaatgcccgttggaccacagaggagcagcttctagcagtgcaagattcatcatggaaggctgcagtacaagtttgactgtggaagtggcc

SEQ ID NO: 813217 - DNA, 100 bp, Homo sapiens
tacagaacatgatcaagggtgttacactggtgctggagaatctggtaaaagcaccattgtgaagcagatgaggatcctgcatgttaatgggtttaatgga

SEQ ID NO: 813218 - DNA, 98 bp, Homo sapiens
cgacaataagctcttcagggaggaattcaacgccatccggctgtccttagagcaagccctgcctcctgagccaaaggaagaaaatgctgagcctgtga

SEQ ID NO: 813219 - DNA, 99 bp, Homo sapiens
aacagtagtagcagcagctgccttcttggacgcctttcagaaagtggctgacatggccaccaacacacgtgaacaccgaaaatctctcccagcacttta

SEQ ID NO: 813220 - DNA, 100 bp, Homo sapiens
gtggagtacaatgtgtccttcccccacgcagcacgttcgagaacttgtcttggacaattgcaaatcaaatgatggaaaaattgagggcttaacagctgaa

SEQ ID NO: 813221 - DNA, 98 bp, Homo sapiens
gaaggtgtggctcattgaggtcaacggtgcccctgcatgtgctcaacgacaggatctgctcgccacccttcatggagctcacgagcctgtgcggggat

SEQ ID NO: 813222 - DNA, 98 bp, Homo sapiens
gacatgcgggagagagaatgagccagagggacacgctggtgcatctgtttgccggaggggtcagtatagaccttctgatttgctgtgccctgagacat

SEQ ID NO: 813223 - DNA, 100 bp, Homo sapiens
aagacctggaaaaatggcagaataatctgcttccatcccgccagtttggcttcggaaagaacagtcattgcattatggttcggttcttcttataactgaa

SEQ ID NO: 813224 - DNA, 98 bp, Homo sapiens
acaagcctgtcccctggctctcagagatcggcttcaccaccgaccctcggatggcccgctcctccccctaccccactgacgtggcccgagtggtgaat

SEQ ID NO: 813225 - DNA, 131 bp, Homo sapiens
gggcggagaggagcggccggagtcagcgatggtgcccggcgaggagaaccaactggtcccgaaagaggctgatttaaactgcaatattcaagatgatgctggggctttttatggtgtaaccagtcagtacg

SEQ ID NO: 813226 - DNA, 98 bp, Homo sapiens
ctgggctggggacctgccctcctcctccagccgcccgcttcctccttgccaggagagcacagcaatggaggaaacagctatatgggaacaacatacag

SEQ ID NO: 813227 - DNA, 100 bp, Homo sapiens
gacagattgaggacactgtattatacggttactatagatgtgatcttcgtggtggaaagctaaattttaaaaccaccccaatggatgcagacagtgatgt

SEQ ID NO: 813228 - DNA, 98 bp, Homo sapiens
aaaatttcacgaaaaacgaggaatccgacattcaatgaaatggagagaaacaagaatgctgctcaggagctggccactttgctgttgtccctgccagc

SEQ ID NO: 813229 - DNA, 98 bp, Homo sapiens
catcatgaagagctcccccgaggtgtccagcatcaaccaggaggcgttggtgctcacggccaaggccacgggaaagcaggcaggatgggagagtcgcc

SEQ ID NO: 813230 - DNA, 100 bp, Homo sapiens
caaattcagcaagttgatatgtatgctgaaaaaatgcagatattttcaggaacatctaagaggacagtgcttctgacaggaatggaaggcattcaaatgg

SEQ ID NO: 813231 - DNA, 100 bp, Homo sapiens
aacaggcccagagctgatccagctggggatgttcaaaagaagtctggctaaacatgttaaaaaaggagagcagatatgttcatgacaaacattttgaagt

SEQ ID NO: 813232 - DNA, 99 bp, Homo sapiens
tctgctaatccacccaaaatgtgcctggtgctccaaagaggaacgacaatcgagtggttagaaccaaagatatctttatcaaaccactataaaaatgga

SEQ ID NO: 813233 - DNA, 100 bp, Homo sapiens
cctcaagccttgcggagccaaatggtttagcaccgaatggagcatgcgtgaaataactaagaagttgggcaaccccaaacagcctacaaatcctttcctg

SEQ ID NO: 813234 - DNA, 98 bp, Homo sapiens
gctgaaggaggaggacaaagagcccctcatcgagctcttcgtcaagctgtatgcaggagctattcttgaagtttgtggatgaaaattgggaaggttcc

SEQ ID NO: 813235 - DNA, 116 bp, Homo sapiens
tgtttctcctagctgtgaactgtgtcctaatcaggatggaattttcaaggagacagatgctggaaggaagatgagaatgtgcctactgctcctgatcctccaagtcaacatttacg

SEQ ID NO: 813236 - DNA, 100 bp, Homo sapiens
tttggtcataatcgctgaagatgttgatggagaagctctaagtacactcgtcttgaatagggtgattctgggggtccacttgtctgtaatggtgtgcttc

SEQ ID NO: 813237 - DNA, 100 bp, Homo sapiens
attcaaaaagtttaggactgctaagacattccacttcttccatctattacatctctgagtctaaatgaaaatgaagagaagaccggaccttttgttgtac

SEQ ID NO: 813238 - DNA, 100 bp, Homo sapiens
taagcatgccctgaaaaagtatcgtcgagaagcctatcatcgctctttcagtctcacatggcaacgaaaacaacttgtatgtcttcacaaggatcagatg

SEQ ID NO: 813239 - DNA, 98 bp, Homo sapiens
gcaggaggctcactccgatttaaggtgcccgagtccacgctgatggactgccgtagacgtttttctattgggaaagctactgatcggatggatgcttt

SEQ ID NO: 813240 - DNA, 98 bp, Homo sapiens
ctgccgccgctctgaggagttaaagggaaatctgcttcgccactgaaggtactctgcaccccagaaggaatacgacttcagtgtttcatgaagtattt

SEQ ID NO: 813241 - DNA, 100 bp, Homo sapiens
tcaaagaagacaagtttgagaatccagatctctttgccaaattggcattgaattttgctactcagataaaaggcggcgctggcggcggccctgggacccg

SEQ ID NO: 813242 - DNA, 100 bp, Homo sapiens
ctttttccttgaagaccataagcactagtgatccagccgaagtactcgtcaaaaatagccagataaaccgagaaaactggtgtacaatagagccatgccc

SEQ ID NO: 813243 - DNA, 99 bp, Homo sapiens
ctgccccgtgtttgctgcggcaaggacgagccggggcgctgaagggcttccttcctcggctccaccctgtggatgtaatggcggcccctgctctgtcct

SEQ ID NO: 813244 - DNA, 100 bp, Homo sapiens
ctgagtactcaacatattgactgtatttgggctgcagcacagcatgcagccagtaaagatcccagagaagttcgagaagctagagatcataaggaaccaa

SEQ ID NO: 813245 - DNA, 100 bp, Homo sapiens
cttctctacgcagaacccgggagtaggagactcagaatcgaatctcttctccctccccttcttggtcaaagttgcaatcctgaaatacattgagtctctg

SEQ ID NO: 813246 - DNA, 100 bp, Homo sapiens
ccggacggaagtgcctctccgacagcagatccaggctcggagctccagacgctgggacaggactacccatcggtgggccagctggcgcacaagctggctg

SEQ ID NO: 813247 - DNA, 98 bp, Homo sapiens
agcctctggctctttatgtattttcgcataaccataagacattgcctaagatactgagccatatcgccccagcattttgcatgagcagctgtagcttc

SEQ ID NO: 813248 - DNA, 100 bp, Homo sapiens
gcggcccgcctggcctgcagcgctcccacccccggcggcggcacgatgccctttgacttcaggagcatgtcagtgaaaaaaccagtgaatcgccttccaa

SEQ ID NO: 813249 - DNA, 100 bp, Homo sapiens
caaaaactcatgcaagggaagggcaaaacccagtatggtcagaagagtttgtctttgatgtttggtgctggcaccaactcgggaactggcccaacaggtg

SEQ ID NO: 813250 - DNA, 98 bp, Homo sapiens
atcaatgtaatgttgtctcatcccaatcacacaggtaaaacttccttttcctgtagatcaaatcacagatcttccaaggaacgatttccagatgatga

SEQ ID NO: 813251 - DNA, 100 bp, Homo sapiens
ctgaggccgaggcggagaaggggcttcctgagcgtcccagtacactgacagagatgttgataccacctatccagataagaagtccatcttaatgtacatc

SEQ ID NO: 813252 - DNA, 100 bp, Homo sapiens
ctgaactacactcagtatacagtgatagtgggatttgaacacctgaagctccccatcaagggaatgaacttcacatggctgtttggtggccattctccgt

SEQ ID NO: 813253 - DNA, 100 bp, Homo sapiens
ggctgctgtctctattctctcggcctgtcagcaaaatgaggtttatataactttccaagacaaggaagttgtgcaaagcctcacagctactaagaggctg

SEQ ID NO: 813254 - DNA, 98 bp, Homo sapiens
agatcatcatgaaggacacttaactgtatgtggaggggacaagccttacattgcaccttcagatctggagcgaaaacacttggatctcaaggaagtgg

SEQ ID NO: 813255 - DNA, 98 bp, Homo sapiens
agatcttaagcatgtcatgtctgatagctctttggatttaccaacagttagtggccagcatcctcctgctgcaggcatctgtggctcttgtgcaatga

SEQ ID NO: 813256 - DNA, 99 bp, Homo sapiens
attgctgctacatatacattctctggcaaacggggattcagcgtccgatcctttggaacagggactcacgtgaagcttccaggaccagctcccgacaag

SEQ ID NO: 813257 - DNA, 100 bp, Homo sapiens
tcttgggcgggggatgtgagcgctgagcccttggcagagagaagaagaaggaggttcctgctgtgccagaaacccttaagaaaaagcgaaggaatttcgc

SEQ ID NO: 813258 - DNA, 100 bp, Homo sapiens
atctgcccacccctcctgtaacccagcctgtttcacttcttgttgctgtctctgctggccttcatctgtgaagaagttgtatcacaatgtactttatgtg

SEQ ID NO: 813259 - DNA, 100 bp, Homo sapiens
atccagactcctttacatgatagtcttcctatcacgggcactagtgtggctctcctgttccagcaattggttcctggtccagaactttacacagaaaagg

SEQ ID NO: 813260 - DNA, 100 bp, Homo sapiens
tcaccatggcacctttatggaggagttcaaagagaactcgatgccaccgcaacggtattggcgaaccggcaggatgaaagtgagcagtccagaaagcggc

SEQ ID NO: 813261 - DNA, 100 bp, Homo sapiens
aaagctgtgaaatcaaagtctctacccctctgaagtttacccggatggcctgactcatcccagaaaactaattctgaagcaagcccttatagttgtgctg

SEQ ID NO: 813262 - DNA, 99 bp, Homo sapiens
cagaagacgcctagtacaccacgaagggtcacacaagatcgaggagactggcagagggaaagaaagttcaactatggtggtggcaacaacaatccacca

SEQ ID NO: 813263 - DNA, 98 bp, Homo sapiens
ctctgttaaagctggtctgttctaactgaggtgtgagtcatcctgttctaaagcaagttgctgaacagtttctcaacatgaggggtgggcttggttta

SEQ ID NO: 813264 - DNA, 100 bp, Homo sapiens
tgatctcttggagcagctggggatcatgggatggagccccccaaacagaaattatcaatgctcatacgaaggaaactcgctgggctctccctgaaggaag

SEQ ID NO: 813265 - DNA, 100 bp, Homo sapiens
ggcgcgatggagcagcgaaaacgtggttgtagagttccgtgactcccaggtattgttgcagcatctggcagtgagactgaggatgaggacagcatggaca

SEQ ID NO: 813266 - DNA, 98 bp, Homo sapiens
aataaatcaagtcctatttgtgaatggaaaggactggaagttcaccttaaaaatctttctctggaatcaaaggactccagctgaaagttaacctccaa

SEQ ID NO: 813267 - DNA, 100 bp, Homo sapiens
aggctgggttcattacatgattcatgagccagatatgccctgcgtccaagcccaatatagcccttcccctccaggttccagttatgcggcgcagacatac

SEQ ID NO: 813268 - DNA, 100 bp, Homo sapiens
agaccggaagcgctccgctgtacctggatcctgctcctctgggttgaaacccgggcgccgccaagatgccggattatgaaagcccttgcaaatgctggag

SEQ ID NO: 813269 - DNA, 99 bp, Homo sapiens
cagaacccagatccgaaatacccctgcaagaacagaattatctgttcctggcagacatggaaaataatgtactttttcgggatgatatagaatgtcaga

SEQ ID NO: 813270 - DNA, 123 bp, Homo sapiens
ctgattttatgggaaaattaagcagatgctccagtttgagaaacctggatctgcgatctgtttgtggataagttctgaacgtcgaaaagaaaagtctcgagatgcagccagatctcggcgaag

SEQ ID NO: 813271 - DNA, 98 bp, Homo sapiens
gagggacatgaagtgacagcagcctgtttaggaccacaccacattttggacctcttgctgtgcagttcagaacatagataccctggagcgaatagccg

SEQ ID NO: 813272 - DNA, 51 bp, Homo sapiens
ggagaaactcgctcgccttcagaagacagggccggaacggagtgtggatgt

SEQ ID NO: 813273 - DNA, 99 bp, Homo sapiens
aggaaccacagctgctcagaaggccaggtgaaaattatctcagtgaacgaggatgtcactcttagatcagccctcgatagaaatctgaagagtgctgtg

SEQ ID NO: 813274 - DNA, 100 bp, Homo sapiens
gaaggccgggacccggttccccggcccacagtgggggtgtgcaaacccgagagaactgggtaatatgtctcatcctcggccttggctagggctcgaccac

SEQ ID NO: 813275 - DNA, 95 bp, Homo sapiens
ctcgcccggagacagctgtcctcttgcagggtctgccgtgctggagggaaggctgctgttggagtcaaacatcatcgcctggctgcggaaagcgc

SEQ ID NO: 813276 - DNA, 100 bp, Homo sapiens
acagagatcccgctgcccatgctgcctctggcggacaccgagaagctgatccgcgagaaagacgaagaggcaacaggacctgtaccgaatcctgaaggcc

SEQ ID NO: 813277 - DNA, 100 bp, Homo sapiens
aaatatactatcatgttgttgaaactgggtccatgggagcaagattagtggctgctaaacttgaaccgaaaagatgtgatgctgatccttcagccttagc

SEQ ID NO: 813278 - DNA, 100 bp, Homo sapiens
gctgaataacccttttaacgagtattccaaatttgatggcaagactggtgaattttcagctcgtttccttttgaagctgcccgtagatttcagcaatatc

SEQ ID NO: 813279 - DNA, 100 bp, Homo sapiens
catcgaggtgaatgggagcaagattggcccagacaacctgccttatgtccagatcttgaaggagaaaagccttacagatgctcatgggaagggtgtgagt

SEQ ID NO: 813280 - DNA, 99 bp, Homo sapiens
tacggtctacaagatctgcgcctggatgcagctcttggcagaaatgcttcggttacccacagtctttcgccagatgagaccggtgtccagggtactggc

SEQ ID NO: 813281 - DNA, 98 bp, Homo sapiens
tcaaaacagttgaattacaaggaaagaagatcaagctacagatatgtgcacgatctgattttctggagagatgtgaagaagactgggtttgtctttgg

SEQ ID NO: 813282 - DNA, 98 bp, Homo sapiens
cagtttatgagtctctgggatggattggatactgatcacagctgccagttactccacaggatccgctgaacataggatgttgccacaaaatctacctc

SEQ ID NO: 813283 - DNA, 100 bp, Homo sapiens
tttgctgttggatactatggacagggctttccttctttcctacggcttagcagtgtctgcaaaaacgaatcttttcctacaacctgttaactgactggac

SEQ ID NO: 813284 - DNA, 100 bp, Homo sapiens
cttttcttcattcatgaaaatgcagatccactgagaaagggaataaggttatcaatactctggctgaccatcatcatcgtgggactgactttggtggaag

SEQ ID NO: 813285 - DNA, 98 bp, Homo sapiens
gcagaccaatggacaccttctaagagtttggcgagtcagtgactgaagcgcccgtccattccaagctattgagaagggcaaaggcaaggccaagaaag

SEQ ID NO: 813286 - DNA, 100 bp, Homo sapiens
acctggtacggatggtgcagctggcaaagagaaactaatctggattcactccctctggttgatacccactcaaaaaggacacttctgattaagacggttg

SEQ ID NO: 813287 - DNA, 100 bp, Homo sapiens
gccgcaaagaatcaagttgcaatgaaccccaccaacacagtttttggacagagcgggatgccaccagcttgtccaaagggaagttccaggagctcctggt

SEQ ID NO: 813288 - DNA, 100 bp, Homo sapiens
ccaagagtcagcggtatattagttcagttaccactaccagcacgaaagtcaaagaagttgggaaagttaaaagggattcacgaggagcagccacagcagc

SEQ ID NO: 813289 - DNA, 100 bp, Homo sapiens
cgtgtgcctgatgatcacgcagctggctggcttcagtggaccattcatcagagaagatatgaaatataaagatgctactaataaacacagccatctgcac

SEQ ID NO: 813290 - DNA, 114 bp, Homo sapiens
tcctgagggccgagcaacagtgtagtggcgtattccacatagcaaacaggaaaccctcattgaatactgtgaaagttgtcaggataaaaatagagtcacttgtgacaaaatgga

SEQ ID NO: 813291 - DNA, 99 bp, Homo sapiens
agtgttcagcaggtcctgttggagatgatagaggatcagctgatttattcggaggatttgctgactttggctcagctgctgcatcaggcagtttccctt

SEQ ID NO: 813292 - DNA, 98 bp, Homo sapiens
gctccacgcatttcccttcgtggtcttgggcgtctttggtactggcttttttaggggtctgcctggggattacccttgctgtggatagaagcaacttt

SEQ ID NO: 813293 - DNA, 100 bp, Homo sapiens
caggaccgccatggggacacggcactgcatgctgctgcccgccagggcccagatgttccagaaagctgagtctgatctggattacattcaatacaggctg

SEQ ID NO: 813294 - DNA, 100 bp, Homo sapiens
aggaggtacccactggatgaacaaaactgcaccttggaaattgagagctgtgatatttgtgatcccaatccatgtgaaaatggaggtatctgtttgccag

SEQ ID NO: 813295 - DNA, 100 bp, Homo sapiens
ctcccagcgaccactgcagcctgcggacgaggccgggacttggccgagcggatcctaataaggggaaaatgcacatggattaattgatgtatgttgagtt

SEQ ID NO: 813296 - DNA, 100 bp, Homo sapiens
gatgactccgctgaggtggacgtgtacaacccgacgaggaacgaatgggacaagatcccgtccatgaatcaggatgatgcttcttgaaaattgcttagtt

SEQ ID NO: 813297 - DNA, 100 bp, Homo sapiens
accattacaccagtgaagatgaggaagtctgggggccgagaccacacagcttcagcgcctgctcctggtcatcactaaccagatttacttggagtacatg

SEQ ID NO: 813298 - DNA, 98 bp, Homo sapiens
agcaagaaacccctgcagtacttgaagatttgcataaagccaacattcgcaccgtcatggtcacagctgcagatagcaaggatgaagaagtcaaggtt

SEQ ID NO: 813299 - DNA, 127 bp, Homo sapiens
ttttatcactgcatggagaaatctggtcaagacatcagagacttttatgaaatgttagccgaaagaagggtggaaaaatggcatactacgaaatgcgagctgaacatagtgtggatatagatgtgga

SEQ ID NO: 813300 - DNA, 98 bp, Homo sapiens
tggagaccttctgagattagagcgactgaaaagagcactggttgccattggtacccatgatttggacactttgtcgggcccatttacttatactgcaa

SEQ ID NO: 813301 - DNA, 100 bp, Homo sapiens
cctcccccggcgccctctggggctccgagcccggcgggaccatgttcaccagcaccggctccagtgggctctggcagctgcaatgactctccgcacggta

SEQ ID NO: 813302 - DNA, 117 bp, Homo sapiens
tgacctttctgcagaacaggcaacagcattattaagctgctttgtgtttcaagagaatgtattcatcagcagagaccagactcctccatcaagactcggctgatcccaccccacctg

SEQ ID NO: 813303 - DNA, 100 bp, Homo sapiens
gtctttgagggactcatgtaaagtctctcccttaatgctcagttcttagaagaccgagggcttccgttacaagatgaggtctgtgtatgctcacttcccc

SEQ ID NO: 813304 - DNA, 142 bp, Homo sapiens
atgaatcagagagtgcttcgagatggcagatgttctggctacacaggaaccctggattgcttgttacaggatggatctgtagtccttgactcttgtgaagtgtcaacagaaaatgatcaaagcactcgatttccaaaacctg

SEQ ID NO: 813305 - DNA, 98 bp, Homo sapiens
tgctaaaagagaggattttggtgctcaagatgcaacaaaactggatacgtgggtttttgataatgttaagggctaccacccgatgccccatgaagtgg

SEQ ID NO: 813306 - DNA, 98 bp, Homo sapiens
ctgctggccattgccatatttattcggtggaaaaaatcaagggcctttggaggagacaaggatgatgatgacgatgatgatgcagatgagaaaatgca

SEQ ID NO: 813307 - DNA, 99 bp, Homo sapiens
ggtgctgtggtctgagctagagggtgaagctggcggagcaggaggatgggcggaattgaagccattttttatgaaggaagttggcagtcactttgatga

SEQ ID NO: 813308 - DNA, 100 bp, Homo sapiens
tacaccttgcttctgtagaccagctccaacaggattccatggtagctgggatgttagggctcagagttcaaggcccaagctacaagcagcttgctccagc

SEQ ID NO: 813309 - DNA, 98 bp, Homo sapiens
gtcaccaaaatgcatctgccattattaagactgccccatcaaaggtcaagctggttttcatcagcacacggcactttcttgggtcacattcggttgga

SEQ ID NO: 813310 - DNA, 98 bp, Homo sapiens
ggactcatggaggctgagcatttattcagcatcagacatcgatgagtcatcagtgatgcagctggccgagatgggtttcccgctggaagcatgtcgca

SEQ ID NO: 813311 - DNA, 100 bp, Homo sapiens
aaaggtgctaatccagtggaaatcaggagagcatttaaatcaaacggtattgagatggattgggttatgaaacataatggtccaaatgacgctagtgatg

SEQ ID NO: 813312 - DNA, 99 bp, Homo sapiens
aattctttcaaactggagccttattggagaacaagttgaaatcatcgcagaaggataaagttcgtcagtttatgatcttcacacaatctagtgaaaaaa

SEQ ID NO: 813313 - DNA, 100 bp, Homo sapiens
gtgtcctgtccctgtgttaaagtggctgtttcgggttggtgttcgaggaagagacattgttgttcttggtgtggagaagaagtcagtggccaaactgcag

SEQ ID NO: 813314 - DNA, 98 bp, Homo sapiens
aattaccgggaggctctcactaaccacaggcatcagttggtactcgccatgaaactcaaagatcgagagattgggaaaatgaggtacgttagtgttcg

SEQ ID NO: 813315 - DNA, 100 bp, Homo sapiens
aatgtgcatactcacagagttagagagagggatggtgtttcagaaaccactaatgattcgataatacatgatgtggttgaaaatcatgttgcagaccaac

SEQ ID NO: 813316 - DNA, 100 bp, Homo sapiens
cttcaagctttggccatcaatagctctgaggttatggaggttttgatgactatggtggctataataattacggctatgggaatgatggctttgatgacag

SEQ ID NO: 813317 - DNA, 99 bp, Homo sapiens
ataaagtcacctactgtaccagagtttcagaggaggagccaccatctagcgccctggccagcgtggtccagcacctcccattggagctcatggatggtg

SEQ ID NO: 813318 - DNA, 144 bp, Homo sapiens
cttgcagtaattaaactctttctctgctgcaacacccctactgttctccgtgtattggcttttctgggcagcaggtattgttgcagcatctggcagtgagactgaggatgaggacagcatggacattcccttggacctttcttc

SEQ ID NO: 813319 - DNA, 98 bp, Homo sapiens
ttgttaaggattccaagtaactcttatttggaaaccgaatgcggtgctacaactgtggtggaagccccagcagttcttgcaaagaggccgtgaccacc

SEQ ID NO: 813320 - DNA, 100 bp, Homo sapiens
tccaggccatgaagagtcctgaccacaatggggaggacaacttcgcccgggacttcatggtgtgtgtctggggaagagacttacagaagtggagttgctg

SEQ ID NO: 813321 - DNA, 100 bp, Homo sapiens
gaccgtgtgtcagaacaatcttgaatcatgaagctactaaccagagccggctctttctcgggaatgaaagctactggttgattttaaagtgcctgggcct

SEQ ID NO: 813322 - DNA, 98 bp, Homo sapiens
cggctggagagcctgttggagaaacacaaagagttgactatattgtggagtatgactatgatgctgtacatgatgatgaattaactattcgagttgga

SEQ ID NO: 813323 - DNA, 100 bp, Homo sapiens
cagggcaacacctctacaaggatctgcagccatttatattgcttaggctactggtgaccaggtggcctgtaggaaaccaagggctgctatatgaccggag

SEQ ID NO: 813324 - DNA, 99 bp, Homo sapiens
cagtccgcccgcccgccctctccccgtggcgcggcggcggggaggcgagaacctctgtattactggcaacagactgaagatgatttgacagtaaccata

SEQ ID NO: 813325 - DNA, 98 bp, Homo sapiens
atgcagagtttcagaaaagactggaaaagaataaaattgctgcagaggagcagaccgcaaagcgccggaagaagcggccatccactgcagagcaatcc

SEQ ID NO: 813326 - DNA, 100 bp, Homo sapiens
agcacttttaaacattacagttgtataaggtgtctcaatgcttgtacctactgcaaaactaaacacgccagaggaaatttggccagttatccaattgatg

SEQ ID NO: 813327 - DNA, 98 bp, Homo sapiens
tgaatgtctgccgaaatgttcaagtttaccaaaagagaggcaccgctggaacactaatgaggaggaagagttcatcgattggtggagcaaattctttg

SEQ ID NO: 813328 - DNA, 100 bp, Homo sapiens
ctacttcttggagcaaggcattataccaaagctattggtgtgagcatctatggtgagacatttccagatgagaacttcaagctgaagcactatggcattg

SEQ ID NO: 813329 - DNA, 98 bp, Homo sapiens
aggcgcatcactcccagctgcgcaaagcttgcgaggtggcgttagtattactagaacatttgcatcgggaaaaacagaaaaggtgatctttcaagcac

SEQ ID NO: 813330 - DNA, 98 bp, Homo sapiens
gaaactagaactttggtagcagttggggccaaatttgggcaagttggactttgtgatttggaattgaatgatctggcacgggaccctccagcacagtg

SEQ ID NO: 813331 - DNA, 98 bp, Homo sapiens
gaaagaacatgaccaccttcgaaagtatgccattgcattggccttaagggaaaagcagcgtgtaatatttaccagcccaattaaggctctgagtaacc

SEQ ID NO: 813332 - DNA, 100 bp, Homo sapiens
caaatgaaaaagttgaagatatcaatggatgtcctagaagtcagtctcagatgccaggcccagacatgtccgtccttgtaagttaaaagcttccatggga

SEQ ID NO: 813333 - DNA, 101 bp, Homo sapiens
cgctatgaagagctggctcggatgctgatggggctggacctgctggtgttcgcccacgaccatggtcttccgaccccgaactccaccggaggcaattgcac

SEQ ID NO: 813334 - DNA, 51 bp, Homo sapiens
aattcttacgatgtcttctctttgctacgtttaacggatgaagagtcccgg

SEQ ID NO: 813335 - DNA, 98 bp, Homo sapiens
atgattgaagaactccttgtgccatccaaagagcaggttttgatacttatagaggactcccttcaatttccaatggaaattatagccagctgcagttc

SEQ ID NO: 813336 - DNA, 98 bp, Homo sapiens
tctctccagctgacagcagaaaaaagggttgccaccccagttgattggaaggtgtggtttcagaaccgaagagccaagttccgcaggaatgagagagc

SEQ ID NO: 813337 - DNA, 100 bp, Homo sapiens
atgggaggactgttggaattgttggcaaccaacctaaggtggcctcagccctgtatccttttgaaggacatgacaatgtggatgcagaatttgtagagga

SEQ ID NO: 813338 - DNA, 98 bp, Homo sapiens
atctgataatcaagtgattcactgggaaatagaggataatcagcctctactcttcatggatcttttggatgaaagaacactcgtggcagtagaacggc

SEQ ID NO: 813339 - DNA, 100 bp, Homo sapiens
gcttcagaccatggaaccagcattgcccatgccccctgtggaggagctggatgtcatgttcagtgaactggtgcaattctgtggtgttcttggtcacaca

SEQ ID NO: 813340 - DNA, 100 bp, Homo sapiens
gtactttgcagtgtatgatggacacggtggacctgcagcagctgatttctgtcatacccacatggagaaatgtattattttaagcagctccacaggaaat

SEQ ID NO: 813341 - DNA, 99 bp, Homo sapiens
ctgcctttgacctttttgaagcctttgcaaaacctacaacacagcagtcccctcaggatgagcaggaaaagctcttggatgaagccatacaggctgtga

SEQ ID NO: 813342 - DNA, 98 bp, Homo sapiens
cggggccaggaagcaattctggaagcgcagcaacagcaagctcccgggcagctcatgatggagcagtccaagaagtcctccctcatggtggcccgcag

SEQ ID NO: 813343 - DNA, 98 bp, Homo sapiens
tgacctcgcccacgcccagcagcagcagcaacaggttgaagccatccttgtcaatatatttggtggtatcgtcaactgtgccatcattgccaatggga

SEQ ID NO: 813344 - DNA, 98 bp, Homo sapiens
caggcagaggaatctggagctgtcattttagaagctttcaccaacaatcaccagtggtttacacaacattgcaaggagcattgaaactcgaaactact

SEQ ID NO: 813345 - DNA, 98 bp, Homo sapiens
ctgtcgctgagagcctcacgagtcgaggtcctgcaggtggagctccggcagccgccctggatttaagtgccctgtatgctcaaaatttgtatcctcag

SEQ ID NO: 813346 - DNA, 100 bp, Homo sapiens
acagtaccatgctgggtgcctctggcgactacgctgatttccagtatttgaagcaagttctcggccagatggtctcctgaatccgccaccaagatgtcct

SEQ ID NO: 813347 - DNA, 99 bp, Homo sapiens
aggaaagcaccatgacgtccatccatttcgtggttcacccgctgccgggcaccgaggaccagctcaatgacagccgattacaaggagagctttaatacg

SEQ ID NO: 813348 - DNA, 100 bp, Homo sapiens
accaaaactgccgcttttgaagattttgcatgcagcaggtgcgcaaggtgaaatgttcactgttaaagaggataaagatggtgatagagcagttcaccat

SEQ ID NO: 813349 - DNA, 98 bp, Homo sapiens
cagacccactccggcatcacctgcccttgaagagaggagttgcttaaaccaatgggactaaaacctgatgggacaataacgcctttggaggaagcact

SEQ ID NO: 813350 - DNA, 99 bp, Homo sapiens
atgggaccctctacaagctacatcctcattcctggccattttctatccaagatgtggtacaacctcttaccctgcaagttcagagacccctggtctctg

SEQ ID NO: 813351 - DNA, 99 bp, Homo sapiens
ggacggcgtggaccacatagacatttacgcggatgtcggcgaagagttcaaccagattcatgatgttgctatcaaaagttgagaaattgtcagaagaaa

SEQ ID NO: 813352 - DNA, 100 bp, Homo sapiens
tgtgattctttactcagctgagtgtgccacacaggtagccctggacggcattcagtgttttggttaatccctatatcctgaagaagaacatgatcctcat

SEQ ID NO: 813353 - DNA, 98 bp, Homo sapiens
agaactttttgccaaaatgacagcagataaactgataggtccaaaggaacgaatgatcacacactttgaaaggtccaaaatggagtaaggaatgggaa

SEQ ID NO: 813354 - DNA, 98 bp, Homo sapiens
gcagccgctgctatctccagtgctcatcacaggtctacttccccagcaggacagcatcattctcctatatcttctagacatcactcatcttcctcaca

SEQ ID NO: 813355 - DNA, 98 bp, Homo sapiens
ttggatcttgctcagtctctgtcagaggaagatcccttgataagtatgctgtgcgcttcatccctcgggagaatggcgtttacctgattgacgtcaag

SEQ ID NO: 813356 - DNA, 100 bp, Homo sapiens
gctataataaacgtattaatgacataagagaatgcaaggaggcagccgtgtcacatgcatgtgatgctgatccttcagccttagccaactatgttgtagc

SEQ ID NO: 813357 - DNA, 98 bp, Homo sapiens
gacgagatccagttcctgcgaactgttagtagcaaagatgaagattttcttgacctttctgttgatgtggagcagaatacatccattacccactgtct

SEQ ID NO: 813358 - DNA, 100 bp, Homo sapiens
cccaccgaagatgaacagggttcctggggcatcgacgatctccatatttcattgcaaggattaagttgtcatcattctgggaagaaaaaaaaaacattaa

SEQ ID NO: 813359 - DNA, 100 bp, Homo sapiens
tcgggcctttgtggtcaccaaccagaccacctggacagcatgacgtatcccagactttactcaaggcaacactggacagtgttgtagaagaatgtgtcag

SEQ ID NO: 813360 - DNA, 100 bp, Homo sapiens
ttcaccttgaattaaaactgaatgaactgataacggagaatggaactgtatgccagcagcttgttgtacagtgtttgtgctctgccaaggcctcctgcag

SEQ ID NO: 813361 - DNA, 100 bp, Homo sapiens
atgggtggtgatgaggatgtagatttaccagaagtagatggagcagatgatgactacaaatccctccaggatatcattgccatcctgggtatggatgaac

SEQ ID NO: 813362 - DNA, 100 bp, Homo sapiens
agaagatgagagagggtcctgcaaaggcacagatgaggagagcatcctgactctgttgacatcccgaagtaatgctcagcgccaggaaatctctgcagct

SEQ ID NO: 813363 - DNA, 100 bp, Homo sapiens
accgggatcgtgaccgagaccgtgaccgagagcgtgaccgagagcgcgaatatcgtcatcgttagaagagacgaccaccggataattctttttatgtgcg

SEQ ID NO: 813364 - DNA, 100 bp, Homo sapiens
ccgtggctctcttggcagccttcctgatttctgcagctctgtgtgaagaaatgagccgtcagactgctacagcattacctaccggtacctcgaagtgtcc

SEQ ID NO: 813365 - DNA, 100 bp, Homo sapiens
gtgagctgagcctgccgccaagatgccggcctattttcagaggccggaaaatgccctcaaacgcgccaacgatttaaggaacagtgacaccccaccccag

SEQ ID NO: 813366 - DNA, 99 bp, Homo sapiens
ccgtctgcctgcatctgctgctgaccctcgtggttacaagtgaacctgaaatgattggagctgaagttatttcagagttcttaattaatggcgaagaat

SEQ ID NO: 813367 - DNA, 51 bp, Homo sapiens
tattacccccagtatctgcaagccaaggtacctggaactggaaagtagtgg

SEQ ID NO: 813368 - DNA, 100 bp, Homo sapiens
tgacaatagtttattattcatggagacatccgctaaaacatcaatgaatgtaaatgaaatattcatggcaatagagacggggtttcgccatgttggccag

SEQ ID NO: 813369 - DNA, 101 bp, Homo sapiens
attgcccaccacgataatgcagttcttattactaggccaacttgcccctgctgcagcgtgagctcctccactgcgcaagactggccaaacagaaccctgcc

SEQ ID NO: 813370 - DNA, 100 bp, Homo sapiens
gtcggcggagcttcgccaaggctggcgcagtcggaatctggggtattggtgttgcaactcagaaggttaacttgaatcagattcctcttggccgagatat

SEQ ID NO: 813371 - DNA, 100 bp, Homo sapiens
agaaaccaagtctgaagagaccctggatgaggtggcggtggaaatcgcaaaggcaaaagcaagaaatggcggcagatgctccagttccctcacatcagcc

SEQ ID NO: 813372 - DNA, 100 bp, Homo sapiens
cttgggcaatcttcacggggctggctgctctgtgtctcttccaagcctactcagtgtgaagacaaccaggatgaagacctttataatgatccacttccac

SEQ ID NO: 813373 - DNA, 98 bp, Homo sapiens
acgagggttcccgggattggaccgacgcagccatgaagccaagtacaagaagctggagaagcgatgagaaacttatttctatgggacagagtcttttt

SEQ ID NO: 813374 - DNA, 100 bp, Homo sapiens
gtcaaatggatctctttctccacccatcccgagaacagtttaccttccagaggctggcaatgctgtttcactggaggacacggctaagaaggaagtccac

SEQ ID NO: 813375 - DNA, 100 bp, Homo sapiens
agcaagcatcccagaacttcacctttaccccagagggcttcgtgggacacatatgcaacatgcctatgatttttacaagcctgatatgctatctgaatat

SEQ ID NO: 813376 - DNA, 100 bp, Homo sapiens
ctgagatgcaggctacagtcagatccctggaggggttgtagaaggtgatttagctgccatagaagcatacaagtcatcaggaggagacattgcacgtcag

SEQ ID NO: 813377 - DNA, 99 bp, Homo sapiens
gggccgtgaacgaaagcagtgacggaggagcttgtaccaccgggggtcctgatgacaacttaattgaaggtggaggaacaaaatttgtctgcaaacctg

SEQ ID NO: 813378 - DNA, 99 bp, Homo sapiens
ccgccgctcgcatgagcacctcatacggctgcttctggagaaggtgggaatggaagtggccccacatctcaaagaaaccctaaataagaacttttttga

SEQ ID NO: 813379 - DNA, 99 bp, Homo sapiens
aaaaatgcccagcgcggcgcggggctgcggagtcgtccggagccgctgcgcggtgaaattgatcttcaaattctctccaaagttcaggctcaataccca

SEQ ID NO: 813380 - DNA, 100 bp, Homo sapiens
ccgccatgaacaagaaaattgaggttcttgactcacttcagagcaaagcaaagctgctcagtgaacagcagagaatttcaaaggaccttgctaatatctg

SEQ ID NO: 813381 - DNA, 100 bp, Homo sapiens
tagaagctcaagcatgaaaagccttaggatattgctgttgtcccaggacagaaaccatgagcagaaattctggattgaggatgagcagtccaggaatgac

SEQ ID NO: 813382 - DNA, 102 bp, Homo sapiens
attgatacacttcttagtgtagttgaagatcataaagagattgttttacaaggacatgctacaagagtaactgctaaatctcaacagagtggagagaaggca

SEQ ID NO: 813383 - DNA, 99 bp, Homo sapiens
gcagatggcggatgccctgcagtacctgcagaaggtctctggagacatcttcagcagcctcgatgacttacgagccctcaaggggaagcattttctcct

SEQ ID NO: 813384 - DNA, 98 bp, Homo sapiens
gaagagcaagaaacagaagcttttgtagaggaacctagtaaaaagggagcacttaaggaagagtcacatttctgggttttaatgaagagacagatgct

SEQ ID NO: 813385 - DNA, 100 bp, Homo sapiens
aggtacagaggcggatgaactgctgagacttggtgaaggaggccatgcagcggattcacgaccgagggaacattggcaagttaattctggatgtagaaaa

SEQ ID NO: 813386 - DNA, 100 bp, Homo sapiens
catgacaggcatgttgtataaatgtacaggaactcgaatcatttatgacagaaagtttctgttggatcgtcgcaattctcccatggctcagaccccaccc

SEQ ID NO: 813387 - DNA, 100 bp, Homo sapiens
ataacaccctgtaacagctgactattgacctgaaaagtggttctggaaaagtgtaccaaggccctgcaaaaggtgctgctgatacaacaatcatactttc

SEQ ID NO: 813388 - DNA, 98 bp, Homo sapiens
cttatgctgatatacatccaatgaggaccttcactgcctggtgtaactcccacctaaggaaagccggcacccagattgagaacatcgaggaagacttc

SEQ ID NO: 813389 - DNA, 100 bp, Homo sapiens
tcgacagtgactaccatgacgaaaacatgtactacagccagtcttctatgtttccacatcggtcagaaaaagattgttggtagccttatatgaagaacca

SEQ ID NO: 813390 - DNA, 100 bp, Homo sapiens
aagatttgtaaagaaaactcttagatctcccttgagtttagaaatctggctgagaaataccaaacagtgattgccgacatttgccggagaatgggcattg

SEQ ID NO: 813391 - DNA, 100 bp, Homo sapiens
gttcaggcagcgggagcgaggaggggaaatggctcattccaagactagcttttcatgggcaacccctttccatccttgccttgagaacccagcactggac

SEQ ID NO: 813392 - DNA, 98 bp, Homo sapiens
gggatcacagatgacgacatcacgcacaaggtgctcaggtacaatgccagggagtactacgaccacctgcccgagctgaagcaggccgtggaccagat

SEQ ID NO: 813393 - DNA, 98 bp, Homo sapiens
atatttgatgaggtggatctgacagatgccagcgtagctgaatccagtaccaaaaacgtcaacaacagttttacggttattctgaggacggcggggcg

SEQ ID NO: 813394 - DNA, 99 bp, Homo sapiens
cccctctgctgcaccacttcatgagagtttgaggagacaatggatgcactccaggctgacatcgaccagctggaggcagagaaggcagaactaaagcag

SEQ ID NO: 813395 - DNA, 99 bp, Homo sapiens
tctcctgccagccaagtgaagacatgcttacttccccttcaccttccttcatgatgtggaagatagatgataagcctgtaaaaattgacaagtgggatg

SEQ ID NO: 813396 - DNA, 100 bp, Homo sapiens
aagcatcgaaagcgttggagaggtgttaccggaacggcggcgacaagggtgttcccgaactagagtggccttgcccctcttgctcgccttgaaaatggaa

SEQ ID NO: 813397 - DNA, 100 bp, Homo sapiens
agaacacgggctacacgtatgcgctcagatatatgcttaaaggaggtaacgtcgatggccgacagtctgtataatattcggcttctgagagaattctcca

SEQ ID NO: 813398 - DNA, 100 bp, Homo sapiens
gggaatcagagtggatcagcttcagagtggcctctactttgaccagagaaactatagcagtcttagacatagcaaacccacctctgcctactacactcgg

SEQ ID NO: 813399 - DNA, 98 bp, Homo sapiens
actttcaaggagatctgaatctctactctttatcaggatatggaacagatgctatcatctacttaaagattggccatcgggactttgatgtggagaag

SEQ ID NO: 813400 - DNA, 99 bp, Homo sapiens
ccgctacgagctggctttaatcctgaaagccatgcagcgggaaaacctattgtcaccggcgactgaactttctggaatccaagttcagccttcatgaga

SEQ ID NO: 813401 - DNA, 98 bp, Homo sapiens
caagtctgattctaaccagtatattggggaactgaaagatcagatagcagagctgaatcatgagaaaaatggagtgctggcatacattgggaattttc

SEQ ID NO: 813402 - DNA, 98 bp, Homo sapiens
gggagccaggaaatcatgactgagaaagatatggaattatttcgtgatatccaagaacaagcactgcagactcaaaagcctcgaaagtttgactgtga

SEQ ID NO: 813403 - DNA, 98 bp, Homo sapiens
gtgaagcacatcatgtccagctaaacctcgtgcccagaccccatgccacagctggatgtgactgaggccaacaaggagttcatggaacagagtgagga

SEQ ID NO: 813404 - DNA, 100 bp, Homo sapiens
ataaagttggtcagtctcgcactgggtgtagaagacatcgtggccataatgattcctgagccaaaagggaaggagatagtaagcctgctggaaagaaaca

SEQ ID NO: 813405 - DNA, 100 bp, Homo sapiens
tgccgatccgccgcccgtccacacccgccgccagggcgaactttctgaccaagtatacaactacccagagggcctaggagaagtgctgtatagagagcag

SEQ ID NO: 813406 - DNA, 98 bp, Homo sapiens
gcgctggagagggggcgctgagctgttgggtcacctggggcctgctttgcccaggcccagtttgacttctcagcccaggacccctcgcagctcagctt

SEQ ID NO: 813407 - DNA, 100 bp, Homo sapiens
aaccgcaaccgagggaaccgaggcagcggaggtggtggtggaggtggagagctggaagtcgagtgtgctactcaactcaggagatttggagacaaactga

SEQ ID NO: 813408 - DNA, 98 bp, Homo sapiens
gcaggagaggcacatttcagagagaatccagtatgcaatggatgtcgcacacaagagagagagacgcaggctgcaagaaagcgtaagattgccattcg

SEQ ID NO: 813409 - DNA, 98 bp, Homo sapiens
aagatcagagtgaaacaggataagaggcatttcatccttcatgaagccattcaggattttgaattgcatatgagtgcttggctcttccttctgttcta

SEQ ID NO: 813410 - DNA, 99 bp, Homo sapiens
tttacccctatctagaggatataccagaccctggagtgaactggattccatgtagagacccctggagccgcctgtcttggttagatggctctggattag

SEQ ID NO: 813411 - DNA, 100 bp, Homo sapiens
aggagaagaaatccgcagaagcttattaaagttaaggttgatacccaaagatcagtattactgtggtgttctctatttcactgggagtgatattttcaat

SEQ ID NO: 813412 - DNA, 100 bp, Homo sapiens
gtctgaggcggagggagtaatggtgtttggagaagagggattgaccctgaatcttgaagacgttcagcctcatgacttaggaaaagttggagaggtcatt

SEQ ID NO: 813413 - DNA, 98 bp, Homo sapiens
gctgatccagatgacctgccggggctggcacactttttggagcacactggtatttgaagatgctacagtgctgcaaatgtaagcagtggtttcatgag

SEQ ID NO: 813414 - DNA, 99 bp, Homo sapiens
tggaattacgagtctactattcatcctttggtgacttcatggtcatgacgattttcttcaatgtgagcaggcggtttggctatgttgcctttcaaaact

SEQ ID NO: 813415 - DNA, 101 bp, Homo sapiens
cgacgctgccaacaacgggcactacaagataacgaaggaggcccaacttcattcaataaggagcctgacggatttatcccagacggtagaacaaaaggaag

SEQ ID NO: 813416 - DNA, 100 bp, Homo sapiens
agcggtttcaaacggcttagagcaggccgcttggttctgacccagctgaggcacttcctggacctcactactacacatggggagaccacggcggaatcat

SEQ ID NO: 813417 - DNA, 98 bp, Homo sapiens
cgaaaatctgggctaagtgctggcaagagcgatgtctactacttcaggtctttgatttgcgtcagtgtcatcgacagatgcagcagcaggcggctact

SEQ ID NO: 813418 - DNA, 100 bp, Homo sapiens
gaagatttgaataatcactttaagtctttgggaagcagtgatttgaaattttgaggtgacaggcttttaaggtctattattagcagaagatttttctgca

SEQ ID NO: 813419 - DNA, 98 bp, Homo sapiens
aaaaggcaaaaatcccatctaccgcaactctcagttcgagagtaaagatgccttcaattaagttgcagagttctgatggagagatatttgaagttgat

SEQ ID NO: 813420 - DNA, 99 bp, Homo sapiens
tgtagagtttgcatatatcaactgtggccttaatgagcatgttgacagcatcgatgctagacagacagttacaagtgaacctgaaatgattggagctga

SEQ ID NO: 813421 - DNA, 100 bp, Homo sapiens
ccgccggccagaaggagtgcttctaccagcccatgcccctgaaggcctcgctggagatcgagtaccaaggatccacatcttctggacccaactgtggaat

SEQ ID NO: 813422 - DNA, 121 bp, Homo sapiens
ggacggcaatgagatggtgttctgtgacaaatgcaacatctgtgtgcaccaggtgaggaagatcttctcagtcctccccaggacacaagcacagggttagaggaggtgatggagcaactca

SEQ ID NO: 813423 - DNA, 100 bp, Homo sapiens
ctgctgcagaagaatattttgcctgctggaacctgctgtatctactcaagagtggaagttttcacaggggcctttacaacaactaaacggacaggcattc

SEQ ID NO: 813424 - DNA, 100 bp, Homo sapiens
ggtgtcccacctttttgggaagggtgtgggccgaagatatgctcatgtggtgttgaggaaagcagacattgacctcaccaagagggcgggagaactcact

SEQ ID NO: 813425 - DNA, 99 bp, Homo sapiens
taaaacaaatgctgctgctatgaatatgggtcgaccattccaaaaaaatcgaactgctttctccaggggttaaaaataagaattttaaatgccaccgaa

SEQ ID NO: 813426 - DNA, 98 bp, Homo sapiens
atattttaaaatatgatgaagaaggtggaggagaagaagaccagttctggacacagctgggcaggaggaattcagcgccatgcgggagcaatacatgc

SEQ ID NO: 813427 - DNA, 51 bp, Homo sapiens
agactattgtggaagaagcatccattaagacatcgctattgcggttccgag

SEQ ID NO: 813428 - DNA, 100 bp, Homo sapiens
gatcccggcgacatactacctctggccccgagatcagaatgccgtatctggagtccatctttcaccatcttctcctgagattgtactggaccgtgaccac

SEQ ID NO: 813429 - DNA, 98 bp, Homo sapiens
gcttctccagctcccagtacagcatctgcttcacgctgggctcctttgccaagatctatgccgacacctttgcagggagagcaacaagccccggccct

SEQ ID NO: 813430 - DNA, 100 bp, Homo sapiens
ccaagagctgtggcccgggggcctcttctggaccaggaaactctccacgagaggagaggcagcagcatggcgagtgtcctgtcccgacgccttggaaagc

SEQ ID NO: 813431 - DNA, 100 bp, Homo sapiens
tactaaacatgcagcagaaaatccagggaaatataacattcttggcacaaatactattatggataagatgatgcacaagctccgggtggataaggcagct

SEQ ID NO: 813432 - DNA, 98 bp, Homo sapiens
ctcagcggccggaggacatgcgggagagagaatgagccagagggacacgctggtgcatctgtttgccggaggtggctgtgtggagtggtgtgaatgtg

SEQ ID NO: 813433 - DNA, 98 bp, Homo sapiens
cgcagtccccgcgcgtggtcatccaggctttacaggaagtatggtgctggcatctgcttggcttctagagagtcttacaatcgtggaggaaggtgaat

SEQ ID NO: 813434 - DNA, 100 bp, Homo sapiens
aggtggtcatcaaaatagctacaaaccatactaaattattccatttgcaacttatccccaacaggtttctttacctccagaaagaagaatattggcccct

SEQ ID NO: 813435 - DNA, 100 bp, Homo sapiens
gaagaagagaccatccatatttccaggtccataattcagcagccaaatctttccctcgaaggtttgttttgcctttaaatgtcagtttgaatgcccctga

SEQ ID NO: 813436 - DNA, 98 bp, Homo sapiens
tccactctctgccttctctgaccccaagaagaccaaaccatcccacggctccaagatgaagatctccttcaacgacaaaagcctgcagaccacatttg

SEQ ID NO: 813437 - DNA, 100 bp, Homo sapiens
ggcgggacagacctcgtcccgggctgaattctctctccactcttcgagattggcacacccaggccctgaaagcagatttggttccatacctcttaaaatt

SEQ ID NO: 813438 - DNA, 100 bp, Homo sapiens
aggaagatgaaccaacgttagaagcagcctggcctcatctacaggaacgggattttccaacagaaaccattaaatttggtcctgaacgcatgtatattga

SEQ ID NO: 813439 - DNA, 98 bp, Homo sapiens
tccccacaacagcaattttgggtactcgtatgccaagaggatgatcgacgtgcagaacaggtaccgagcccctgaactgctgttgggaaccaccacgc

SEQ ID NO: 813440 - DNA, 112 bp, Homo sapiens
tcctattaatgaagtagcacgatttaatctgatgcaggactacagagacatcattgacactccaatggattttgctaccgttagagaaactttagaggctgggaattatgag

SEQ ID NO: 813441 - DNA, 100 bp, Homo sapiens
caaggctcggaagaggaagagtaatgaaatggaggagcatgatggaagtggttcattgcatgatattcaactgtcattgccatccagtccagaaccagaa

SEQ ID NO: 813442 - DNA, 107 bp, Homo sapiens
ctcaaacctccctgcagaccaatggacaccttctaagagtttggcgagtcagtgactgaagcgcccgtccattccaaggccgagtacagatgctgccccaggcggtg

SEQ ID NO: 813443 - DNA, 99 bp, Homo sapiens
attgttaagaaatttcatcctgtaaactatgatgtattcagatacgtgataacacatctaaacaggctcagttagctctagaggccattcttttgctga

SEQ ID NO: 813444 - DNA, 134 bp, Homo sapiens
aagacatggacctctatagcattaattatctccactttggagagcccaagtcttgaagaccacgtggccttaaaccaactgctgcaactctgtgtgcaggatgattctgtgggcccaagtcacccagcgcctat

SEQ ID NO: 813445 - DNA, 98 bp, Homo sapiens
ctgaacctcctgttcctctgctatccctgtggtcgccaggacccccccagagccaagaccttctccagaaggtgacccttcccccccaccaccaccaa

SEQ ID NO: 813446 - DNA, 98 bp, Homo sapiens
actttctcctactccataaagacttcaagtgcgaaattgaggcaactcttgagaggctaaagaaactagagcgtgatctcagctttaaggagcaggag

SEQ ID NO: 813447 - DNA, 98 bp, Homo sapiens
tggatctttgctagaaagagaggccaagtcatcaaggcatgggacattggggtggctaccatgaagaaaggagagatatgccatttactgtgcaaacc

SEQ ID NO: 813448 - DNA, 100 bp, Homo sapiens
gatcactactcttggaatcaaagataaatccaaatactgcatatcagaaacaacaggcagtgaaatcaactgtgcagaccatcactgttggaggagtgag

SEQ ID NO: 813449 - DNA, 111 bp, Homo sapiens
catttcaagtgctcttgcccaccaggcactcggggaaaagcttttgacatcacctatgtgcgtctcaagttccacaccagccgcccggagagctttgccatttacaagcgc

SEQ ID NO: 813450 - DNA, 100 bp, Homo sapiens
tacagtcgagattatcgtagacggcacagccacagccattctcccatgtctactcgcaggcgtcatgttgggaatcggattgagaggatccagaatccag

SEQ ID NO: 813451 - DNA, 100 bp, Homo sapiens
gtccctttggagtagcattattatttggaggagttgatgagaaaggaccccagctcaaatgcagccctgaggatttggctactgcatataacaacagggg

SEQ ID NO: 813452 - DNA, 98 bp, Homo sapiens
cacctggtcaatgcagacggacagtacctcttctgcaggtactggaaacccacaggcacacccaagtaaagggagaagatgaggaagagaacaatttg

SEQ ID NO: 813453 - DNA, 100 bp, Homo sapiens
taatctccttcagtgaggccctgcagcacttccagactgtggacctttcccccttcaagtttgcccagtatgcggagatcgtccacttcaccctcccaga

SEQ ID NO: 813454 - DNA, 100 bp, Homo sapiens
agaccatcatcgacaaatccagcgagatggggattgagaatgtcatcttggggatgccacacaggtgtcccctgaagaccttgcaaaagtgtgagatcgc

SEQ ID NO: 813455 - DNA, 100 bp, Homo sapiens
cagaaccattagacacatcagtggagtccatgctacctgattgcccccgggtctcagcagataagaatgtgccttttgatgaaagaactttatctttcta

SEQ ID NO: 813456 - DNA, 100 bp, Homo sapiens
agtccagcttatagacccaatcaaaaaagaaactagcaaactttttaatgaggaagtggttgtgtcaaaccgattggtgacatctccatgctgtattgtc

SEQ ID NO: 813457 - DNA, 100 bp, Homo sapiens
taccatctaaaatacgaaggtttctggctggtctgtggctgtgccaaccagtgtcgtcacagttactcctggaaagccattgaatactgtaactaccctg

SEQ ID NO: 813458 - DNA, 98 bp, Homo sapiens
ttgaccatggctgtgactctctttccacagtgaagctgtggtctaccaatctagacaactcagtggcaagcattgaggcaaaggctaatgtgtgctgt

SEQ ID NO: 813459 - DNA, 100 bp, Homo sapiens
cgagtgcagccactcggccctgcgccgcgacaagtacgtggccgagttcctcgagtgggtattatcagaaaatccacccagcttcaccattactgtgacg

SEQ ID NO: 813460 - DNA, 98 bp, Homo sapiens
cccggtatcggttccggaagagggacaaagtgctcttctatggccggaagattatgcggaaggtctcctctgagcctccggcctccataagacccaaa

SEQ ID NO: 813461 - DNA, 100 bp, Homo sapiens
tggattacagctgggccaagggaaaaatttactgcagctgagtcctcctccgcctcctcctctctgcatgcgcgtcagagcccgtgccaagaacaagcag

SEQ ID NO: 813462 - DNA, 100 bp, Homo sapiens
agctgcgccggcgagaagcggccgagccagcagcagatcgaagccgcggtcaaggccgccagagaagcctttcccagctggtcatcccgcagcccccagg

SEQ ID NO: 813463 - DNA, 98 bp, Homo sapiens
ttggcaccatgttacgttgttcaacagatgggagaatgcaaagcaactgctcattagggtcttactacatattgcaacagaagataatattggaggtg

SEQ ID NO: 813464 - DNA, 100 bp, Homo sapiens
ggttggaaagatggatgctacttcctattctaacttcacagagaatgcagttgtcttgacttcaggtctgtctgttctgttggcaagtaaatgcagtact

SEQ ID NO: 813465 - DNA, 98 bp, Homo sapiens
ctgagaagcacctggatattcctaaaatgttggatgctgaagccaggtggaagagaccggagtggtgctgtccctggagcaaacggagcaacactctc

SEQ ID NO: 813466 - DNA, 100 bp, Homo sapiens
tacagccacagcatcatcacgcatggaggcgccattgtgtcggctttgagccagactgggtctctctttaagccccggaaagcctatctgccccaggagt

SEQ ID NO: 813467 - DNA, 101 bp, Homo sapiens
aacttgcagaaatcacattggaccctcctcccaactgtaggtaagttctcttctacgctgtatgagactggtggctgtgatatgtcacttgtgaattttga

SEQ ID NO: 813468 - DNA, 99 bp, Homo sapiens
gagagccttttccacagagaaatgagagcaccctcactgcacatcattgactcctgggcccaactgtgaccgatttaaactgcacataccatatgctgg

SEQ ID NO: 813469 - DNA, 100 bp, Homo sapiens
accccttgttggatggcacctgaagttatggaacaggtgctggagaatctggtaaaagcaccattgtgaagcagatgaggatcctgcatgttaatgggtt

SEQ ID NO: 813470 - DNA, 100 bp, Homo sapiens
gaatatgccattgaggctatcaaggccctggagatgtacaaggatgattggaacaaagtgtcggaacatgttggaagtcgtactcaggatgaatgcatcc

SEQ ID NO: 813471 - DNA, 98 bp, Homo sapiens
tgtacatagattttggtggaaagtttcattgtgtatgtagaagaccagaagtggatggagaagagacatctccccatacatttcaattagacttattc

SEQ ID NO: 813472 - DNA, 100 bp, Homo sapiens
tgaatgatatcagacccagtgccatgagggaaatagcaattgatgtcccaaatgcaatttgaatcaacccatagaagtgacagcgctgtattcatttgaa

SEQ ID NO: 813473 - DNA, 99 bp, Homo sapiens
caccaagatgcggatccgggcctttccgtcaaaatttgctgtgcgatgtcacaattgtggcagaagacatggaaatttctgctcatagagtggtgctgg

SEQ ID NO: 813474 - DNA, 98 bp, Homo sapiens
ctgccgttaaggaccgttacgtttcccggacccgtgaccaaggtgtagactaagaagtggagtcatgcttcacacggccatatcatgctggcagccat

SEQ ID NO: 813475 - DNA, 99 bp, Homo sapiens
atggattttaaaacctttgggattatatgaggagaaacatcagatggagtgaggaagtcagttcacaaggtctttgcttccatgcttggagagaatgaa

SEQ ID NO: 813476 - DNA, 123 bp, Homo sapiens
ccccaagaccctaaagttcgtcgtcgtcatcgtcgcggtcctgctgccaattgcagagggaatggcatacatcgagcggaagaactacattcaccgggacctgcgagcagctaatgttctggt

SEQ ID NO: 813477 - DNA, 100 bp, Homo sapiens
ggaagtttgtcctgtcctggatcagtttctttgtcatgtagccaagactggagaaacaattgatatcagtatcaagataaaagtttggaatgggagaaaa

SEQ ID NO: 813478 - DNA, 98 bp, Homo sapiens
gtatctattcacaatgaagttgcagtctcccgaattccagtcacttttcacagaaggactgaagagtctgacagttccaggaatggatggaggtgctt

SEQ ID NO: 813479 - DNA, 101 bp, Homo sapiens
cccaggatcacagaagcttgtcacctgcacagggtaccaccagcaacccctataccacccgacctaaccgtcggggtgatacttggcatgatcgagatcgc

SEQ ID NO: 813480 - DNA, 100 bp, Homo sapiens
ggatttcaggggtctaccggctctcttatggcgaatgcaacccgaagagagagtgaggattgtcagtggcttcgccccgaggagagctgactgccctggg

SEQ ID NO: 813481 - DNA, 100 bp, Homo sapiens
ccgcctgcttcagtctgtgcggcccgctgttgtctgcccgcacccgggcccgcaggccaggaatgcagtttattctactccaagagattctgcctccctt

SEQ ID NO: 813482 - DNA, 98 bp, Homo sapiens
ttgtgtgctggaatgagggtcaccggatgtaacactgagcacgctctaagtatgcagtcatctccaaatggccagtttgtagcgccaagtgatattca

SEQ ID NO: 813483 - DNA, 98 bp, Homo sapiens
ccagtcatgggccagacctcggtgtccacgctgtccccgcagcccggcagcgggcccatttggaggccagcgctgagaagtggaacaggttgctgatg

SEQ ID NO: 813484 - DNA, 100 bp, Homo sapiens
tctagaagagagaaggaggaaaagaagcagttcctgatgttacaaatgaacaaggatctcccaggaatggaagttggatacactttgtgacttgtacgag

SEQ ID NO: 813485 - DNA, 99 bp, Homo sapiens
atgattggaggacctatcttgccttctgaaacttcttggacacttaatgattgttggcaagaaatgtgctgctgatctgggcctgaataagggttatcg

SEQ ID NO: 813486 - DNA, 100 bp, Homo sapiens
acgtgaacaacctgaacgtcaccgaggagaagtaccaggaggcgttggccaagggacattttggcgcaagttttacagattttattaaagtcgaagctat

SEQ ID NO: 813487 - DNA, 100 bp, Homo sapiens
tatttaaccaagttccaacaaaagaatgctgccgcaggttgaaaaagatcatctagcaaagccttttttcccagctacatataaggaatttgaaagtcac

SEQ ID NO: 813488 - DNA, 99 bp, Homo sapiens
gcggaagaagatggcgctcaccaggtgctcgttctggctgtgaagcagctgttcccagagtttgagtttatgtggcttgtggatgaagccaagaagaac

SEQ ID NO: 813489 - DNA, 100 bp, Homo sapiens
aaacacatggaaaactgttgaaattgtccatatagatattgcagatagaagtcaagttgaaccagcaactgatgctgagaagcactcacaggtggagagg

SEQ ID NO: 813490 - DNA, 98 bp, Homo sapiens
cggcgtgcccacccggacttgtccttctacctcaccacctttgtgggtcggaagcagttcatgaggtttgagtgggcaaactacgcagctgaggccct

SEQ ID NO: 813491 - DNA, 99 bp, Homo sapiens
ttccccggaagacctcactgaccccagagtggcagaaaggctgatgcagcagttccaggtggtgcggacgcaggagacccaggagatcagaaccctcaa

SEQ ID NO: 813492 - DNA, 100 bp, Homo sapiens
cagtccaggttcccggttactggccactggaggcatggaccgcagggttaagctttgggaagtatttggagaattctgagggggatgcccagacgctgac

SEQ ID NO: 813493 - DNA, 98 bp, Homo sapiens
gaactatgatttggctctgagttttcaggagaaagctggctgtgatgagatctgggaaaaaatttgtcagggatttgttcctgggctgtttggaacat

SEQ ID NO: 813494 - DNA, 100 bp, Homo sapiens
gaaacagctatcctgcgctacagtgagggtttggagaagctgaaggacatgaaagtgctgtacaccaaccgagcccaggataaaagaatcagagtgtctc

SEQ ID NO: 813495 - DNA, 134 bp, Homo sapiens
gggggtcactgcgacgttcacagaggaacactgccggggcccaaccacaagacgactcaataggaggaaggtggataggcatgtagacctgctagaagttgcccaggaaactgatgggttttcaggaagtgacc

SEQ ID NO: 813496 - DNA, 98 bp, Homo sapiens
aggcattgacttccataagcagcagccactgttcgtctctggaggagatgactataagattaagatctgcatgttgacgttcgaacacgagatggaaa

SEQ ID NO: 813497 - DNA, 100 bp, Homo sapiens
gtcgaaagaggcgacgaaatgcagcaatggctgccatccggaagaaactggtgattgttggtgatggagcctgtggaaagacatgcttgctcatagtctt

SEQ ID NO: 813498 - DNA, 100 bp, Homo sapiens
gacagcgcagtgccagtgtcaacaaagagcctgttagtcttcctgggatcatgagaagcaagcagagatgaactccagtccagaaaagttaaattagact

SEQ ID NO: 813499 - DNA, 99 bp, Homo sapiens
tctgcgtttgcaatgcatgctggtccgtgtagttctcagcctgacaccgtcgttcccagaacccagcgcgctctgccttatgatgggaaatggagtaaa

SEQ ID NO: 813500 - DNA, 98 bp, Homo sapiens
gggagagactgcctttgtcaactctgtgcacagccgatgtcgtccagtccgaaagaaaccaccttctccagcaaaactggcgatggaatatgagagga

SEQ ID NO: 813501 - DNA, 98 bp, Homo sapiens
agaaactcaagaatttgaacacactaagcggccagcttgatgtccgggagctgatctctctctaccccttcctgttgcccacctcctcctccttcacc

SEQ ID NO: 813502 - DNA, 100 bp, Homo sapiens
ctggtggagagcggggtggatgtgaactcccaaaatgaggtcaacggctgatattaaagccatgacagcaaacagcccctttctcctaaggttcctgatt

SEQ ID NO: 813503 - DNA, 100 bp, Homo sapiens
aaggcttgaagatttctatgcaggaccccaaaatgcaggagtcccatttcgtggtatgctgtttggaggagattttcacaagtgatgataacctgttttt

SEQ ID NO: 813504 - DNA, 99 bp, Homo sapiens
ggaaacaccattccagaaaatgggattgcccaccacgataatgcagttcttattactaggcttggaaagagacaagtttgacaacaagactgtcacctt

SEQ ID NO: 813505 - DNA, 98 bp, Homo sapiens
ttccagcaggacatggagcagtacctgtccactggctacctgcagattgcagagcggcgagttattggagggtggtgaagagaggatggagacacccc

SEQ ID NO: 813506 - DNA, 100 bp, Homo sapiens
gtgatggtggcttgaggtgttgggaatctggagatgatccatgggtagaacatgccaagtggtttccaagcttgtaacacttcaagaagcaaaactgctg

SEQ ID NO: 813507 - DNA, 100 bp, Homo sapiens
gcatcccagaaggtgaagaagatctggcaaaagcaattcagatggcccaagaacaggctacagatactgaaattttgcgtttgctgccaattgatggggc

SEQ ID NO: 813508 - DNA, 99 bp, Homo sapiens
aaatcgtgacaccagaagaatattataatgtcacagttcaagccatcctcctcaaggtgcgagacatggtcagcagccatgtggagcgagtgtttcaga

SEQ ID NO: 813509 - DNA, 111 bp, Homo sapiens
gcggcgcccgagtgccggcttctcccctacgcgctacacaagtggagctccttttcctccacctaccttcccgacattgttggaaactgttactacatttttactggaaat

SEQ ID NO: 813510 - DNA, 98 bp, Homo sapiens
gcagctgacttacatggaggagacgtgtcgtcactatgtggcccatgtgaagagcacagcaatggaggaaacagctatatgggaacaacatacagtga

SEQ ID NO: 813511 - DNA, 100 bp, Homo sapiens
attggccaaagaagttgagaaaatgggagcagttttcatggatgcccctgtttctggtggtaattattcgaggtggaggacatattttaccctatgacca

SEQ ID NO: 813512 - DNA, 100 bp, Homo sapiens
actatttgtctcagagctcggagctggacccccccatcgagtcgctgatccctgaagaccaaataggtgtgcaactgaggaacatggctcaagaaactaa

SEQ ID NO: 813513 - DNA, 100 bp, Homo sapiens
gcacaccagagcaccagggcggggggcttctccgcagcaagatgcacttttgtcttcctggccagtgttttactacaatgaggatggcaagtctggacaa

SEQ ID NO: 813514 - DNA, 100 bp, Homo sapiens
cagaagactccaaatgaaccgcagttggaattcatccttggtaagccgtaactttgagctggttggacgggttaacttggatcagctggaacagatgaag

SEQ ID NO: 813515 - DNA, 98 bp, Homo sapiens
cccagttgctgtacgagagcaagctctataagattcttcaaggtggggttggcatcccccacatacggctgtggaaaatctctgttctcacaaagtct

SEQ ID NO: 813516 - DNA, 99 bp, Homo sapiens
ttgttctcccactggtaatcacgttaatgaaatcttagaatcacccaagaaggcaaagtcgcgtttaataacatttggtgcttccagatgtgagttatc

SEQ ID NO: 813517 - DNA, 100 bp, Homo sapiens
gatactgtatggaggatggcctagagggctgaactgatgcttgaagaacttggtcctgatgtctgaccatggagatgtgagcctcccgcccgaagaccgg

SEQ ID NO: 813518 - DNA, 98 bp, Homo sapiens
tccccagcggtgttcactttcacggcccagatgtttccagagcgacacctggagatggcagaaatactggacttgttgagcccattaaagaaatggaa

SEQ ID NO: 813519 - DNA, 100 bp, Homo sapiens
atatttttggagaagaatccaatgagtttactaatgactggggttagaatttggaatctaactcagcggaattgtatccgtacaatacaagcacatgaag

SEQ ID NO: 813520 - DNA, 98 bp, Homo sapiens
gacacctagatgacatggtgcattgccagcagaagaaagtcaagcagatggtcgaggaggaagaatgttggtgaaaagcacagaaaccagtgacgttt

SEQ ID NO: 813521 - DNA, 136 bp, Homo sapiens
atgttcagggctgcagggggagagaagacaggatttgtgacagcacagtcattcattgccatgtggagaaaacttcgagctggcttcttcgagcaccttgagaagtggtttgaccagtgttccctcaacacccggg

SEQ ID NO: 813522 - DNA, 98 bp, Homo sapiens
agcagaatcagatggggacacacagtcagagaaaccggggcaacctggagttgagacagacgactgggatggaccagcaggcattgccagtggacctg

SEQ ID NO: 813523 - DNA, 98 bp, Homo sapiens
gcaacactgtcatttgggataataaaacacctgtttgtgacattggccagtcagtgctgaaagatgtaagcaaagtgaagaagctgaagcaatctgga

SEQ ID NO: 813524 - DNA, 100 bp, Homo sapiens
ctgaggctcattttgcagttgttgaaattgtccccgcagttttcaatcatgctaattactccacctgaagcaaaaaagtatttcaacttcagatatccac

SEQ ID NO: 813525 - DNA, 100 bp, Homo sapiens
cgctgtgagaagtgcgacaccgaatttcccaatttcaagtaccgcatgatcctgtcagactgaaagacctcctcctagcaggctgctcctggtctgcagt

SEQ ID NO: 813526 - DNA, 98 bp, Homo sapiens
gatatttctcttttgtctgcccctattgtaagtgcagatggaacacaacagtctaccctgacatttgcactatcagccttgtagcagtgagtgatgtg

SEQ ID NO: 813527 - DNA, 99 bp, Homo sapiens
tctacactgtacatgctttttattacaagactacggagcataggaggaaaattcatcatctggtcatgaatgaaaaacttcagcactgcatggaactaa

SEQ ID NO: 813528 - DNA, 100 bp, Homo sapiens
actttgaagaccagtcctgtttgcagggaagccccacttgaaggaagaagtctaagagtgaaatctgggcgaccgacgttctttacagctgtgttcaata

SEQ ID NO: 813529 - DNA, 100 bp, Homo sapiens
gctctcctgtatcccaagcaaggctctttctaccgcacaccctgcaggcccatccaggcccatccagacaataaacagataaagctgaaggttcaaacaa

SEQ ID NO: 813530 - DNA, 51 bp, Homo sapiens
ggcctacccgggatacggaggaggggcataatcaccagcaacacccgggac

SEQ ID NO: 813531 - DNA, 99 bp, Homo sapiens
atcagtcaggtcattgagcagttacctcagccaaacaggacaagcagaatttttgacagcagctgtatatcttctaagattccgctcctcaccaccatc

SEQ ID NO: 813532 - DNA, 100 bp, Homo sapiens
tcagcaatcatgtcaccccaccacccattccgaaatctaaccatggaggcagtgatgcaggccgccatggcatcagatgaaggcaaactttttgttggag

SEQ ID NO: 813533 - DNA, 100 bp, Homo sapiens
aacgcgaagacggtaacccgtgtgactttgactgggcacaaggaaggacagacccagtctctgtccttatggagctaagggggagacggacattaatcaa

SEQ ID NO: 813534 - DNA, 98 bp, Homo sapiens
aaaatcagccaatcaataatggtgaatttgacattattgtcctaagtgggtgacccctgtgaagtgtgcccaacactgcctgaagggttccagaactt

SEQ ID NO: 813535 - DNA, 98 bp, Homo sapiens
gagacagcttgctttctgtcgtggcaatgttttgaaactggcaaaatcagtgcaccaattccagctggacatcactgtgaaaatgggacgggataaag

SEQ ID NO: 813536 - DNA, 99 bp, Homo sapiens
actaatgccatcttcaaagcctttgctatgatcattgacaaactggaagagcaaacttaaactatttccagaagcttcaaaaggtcaatgcaaccaact

SEQ ID NO: 813537 - DNA, 121 bp, Homo sapiens
caggttatggagacagaacggatgatttatctggtgacagaatatgctagtggaggggaaatatttgatgtgcccgtggagaagctggccgccatgccagccttgcgcagcatcaacctcc

SEQ ID NO: 813538 - DNA, 98 bp, Homo sapiens
attataaagtggtttctcctgctttgcgagctgtgggaaacattgtcacaggggatgatattcagacacaggttcatctctaacaagtatttagtgaa

SEQ ID NO: 813539 - DNA, 100 bp, Homo sapiens
atgtgaagagacatgagaccatagccaaacccccagggaggtggggaagacagggctccagctaccacaggacgggctctgggtatagccgttccagtca

SEQ ID NO: 813540 - DNA, 100 bp, Homo sapiens
ggcgaaaattggatgtgaaaatgaagccagaccgaggactccaagccccctgatccttgatcagaactacattaacaccaaaaatcaagttatcaaagca

SEQ ID NO: 813541 - DNA, 131 bp, Homo sapiens
aaagagccaaaatgagttccagtgaagttggtccttttgtctccaaaataagagcagtgattaacgatattggattatcattggcaatggcgttcattccttacgagtggctttactgcagtttatttctt

SEQ ID NO: 813542 - DNA, 100 bp, Homo sapiens
aaagaactttgaaggaagaaaggaaattgtgctaaggaattgtcttagaagaaagaaggcaagccaccattttacccacgtaaatatatgaatatatttc

SEQ ID NO: 813543 - DNA, 98 bp, Homo sapiens
caggagatttcagatgaaacaagagttttccgcttattaggatcagacaggattggtccaaaggaagattttttccattgtttgaaatgtaacttatg

SEQ ID NO: 813544 - DNA, 100 bp, Homo sapiens
attatacctagaagtctactaatggacagttagtcacccacctacatgttgagtatttgattttcatcaagcagctgatggtatccaggaacaacagaga

SEQ ID NO: 813545 - DNA, 100 bp, Homo sapiens
gagccaatcacattttgcacaagggcagtcaccatgaaagcttaagagttggacagtggaggaccttcagaagaggctcttggccctggaccccatgatg

SEQ ID NO: 813546 - DNA, 100 bp, Homo sapiens
cagcctcctcagtagctgagactacagattgagaggatccagaatccagatctctggaatagctaccaggcaaagaaaaaaactatggatgccaagaatg

SEQ ID NO: 813547 - DNA, 100 bp, Homo sapiens
tgctctgcgtcaacgccatcgcagtgctgcacgaggagcgattcctcaagaacaggattttatattggaagacatggatcttgctgccaacgagatcagc

SEQ ID NO: 813548 - DNA, 99 bp, Homo sapiens
acaagaagaggattggaaccagttccgatacagcacaatggtcagaatagcaatgttggaaagttgaaaacactatctggggctcttgatataatggtg

SEQ ID NO: 813549 - DNA, 100 bp, Homo sapiens
agtagatcctgtccagatgaaaaatgtcacctttgaacatgttaaagggctgcactgggtgttcaacagccatcactccttggagcatctcctaccattt

SEQ ID NO: 813550 - DNA, 98 bp, Homo sapiens
acacacttatagatcttctgcactgtttacaggcacaggtctctgaaagaagatgaatttggctgagatttgtgataatgcaaagaaaggaagagaat

SEQ ID NO: 813551 - DNA, 99 bp, Homo sapiens
tccctcatcagctacctctctgagcaagacttcggcagctgtgccgacctggaaaagcctacagatgaattttcagatctgcctcttcgagtagcagag

SEQ ID NO: 813552 - DNA, 99 bp, Homo sapiens
tcatggtgcccgtcaatgctgtgatggcgatgaagaccaagacgtatcagttttaaaggacaccttggaaaaaaagggggtattagggcatttaaaagc

SEQ ID NO: 813553 - DNA, 100 bp, Homo sapiens
tggggttccctcctccgtttctgtatccccacgaggtgccaaatctgattccagttttgatgttcaaattgggaagaccactggaacctatattatataa

SEQ ID NO: 813554 - DNA, 99 bp, Homo sapiens
aactatggaataaggtttactcagctcattgctgggatggatatggtgagttttcatgtacattgaccaaatactggaatagaggatttgtggctttac

SEQ ID NO: 813555 - DNA, 99 bp, Homo sapiens
aacagctgtggaaagaagttgcaaaacactggtagagaaatggtcagaaggaacgacaccacagaagaaattagaatgtttaaaagaaccaggaaaaac

SEQ ID NO: 813556 - DNA, 100 bp, Homo sapiens
ttcaccacagaaactttagaatggaggctcggttcttctgacattcttaattacagtgtttcctgaggttataggcgggtgtttgaggagtacatgcggg

SEQ ID NO: 813557 - DNA, 98 bp, Homo sapiens
tagagtcaaggatggatctggaagtatgaatgctgctgtcagggctgtggttcgagttggtatcttcaccggtgcccgtgtcttctttgtccatgagg

SEQ ID NO: 813558 - DNA, 98 bp, Homo sapiens
gcaccccagaaggaatacgacttcagtgtttcatgaagtattttacagacgaaatgaaagtgaactggtgtcacaactccatcaagtatgatggtgaa

SEQ ID NO: 813559 - DNA, 99 bp, Homo sapiens
ataaagtcagcacaactgagctgagctggttttgcagaagggctgatgagggaatttcttcacatggctcctggagaagtgaccatcacagttcgcctc

SEQ ID NO: 813560 - DNA, 99 bp, Homo sapiens
gcgagctgagtggttgtgtggtcgcgtctcggaaaccggtagcgcttgcagcatggtacgaggaacagcaaattcaggaaaaagtggcgacctttcgac

SEQ ID NO: 813561 - DNA, 98 bp, Homo sapiens
ggtctccggccggcggcggcggcggcggcggcggcggcgcaggcaagaaataccgcccacgaatggatcaggaagtctctgaccaagccattagcaga

SEQ ID NO: 813562 - DNA, 100 bp, Homo sapiens
agcactctccaatcctcacctcactgctgtgctccagaacaaggtattgaagcccctgggtgataatttgatggaggaaaacataaggcagtctgtaaca

SEQ ID NO: 813563 - DNA, 100 bp, Homo sapiens
gcatcctcatataattaaactgtcttgggcgtctttggtactggcttttttaggggtctgcctggggattacccttgctgtggatagaagcaactttaag

SEQ ID NO: 813564 - DNA, 74 bp, Homo sapiens
ggctgacatggccaccaacacacgtgaaaatggtgtgaatggaacattaacttcaaatgtagcagactctcccc

SEQ ID NO: 813565 - DNA, 138 bp, Homo sapiens
caacgttatattttgtcttctgtgtggattcttcagaaagtgaacttggcattttagatctaattcaagtaattccagtggagaagctagtgaaaggacgtttccaggacaacctggattttattcaatggtttaaga

SEQ ID NO: 813566 - DNA, 98 bp, Homo sapiens
aggaagtcgcgctccaagagctccagcctgagccggctcgagatgacgtgtctaaggtggcattcctgaccgtgaccctacaccaaggcggagccact

SEQ ID NO: 813567 - DNA, 99 bp, Homo sapiens
ttactaccaaacagcacttcctggcaatgatagatacatcagtgtgggaagccaagcagatacaaaaatcgaaacgagttggctgagactcttgcactc

SEQ ID NO: 813568 - DNA, 100 bp, Homo sapiens
gccagagatgaatgtggttttgaaaaatgtcaaaccagaccaatgggtgaagcagcagtgttgtactgctacttctataaacggacagccgtaagactag

SEQ ID NO: 813569 - DNA, 100 bp, Homo sapiens
tgaagtcgagtagttcagttgtggaattggttatgctactgtgttctcagtcttgtgaaaatgccattgtgtgctggaaacctggcaagatggaagatga

SEQ ID NO: 813570 - DNA, 143 bp, Homo sapiens
ttgaagcaacagaatctcccatccagtccggcacccagtaccatattctctggaggttttagacaccggtttccaacctagatgaggaaagccgatggacagtccactacactgccccgtggcaccagcaggagaatgtgttc

SEQ ID NO: 813571 - DNA, 134 bp, Homo sapiens
gtgaggtgagtgagggccaagcaggaacaggggtcacggggcaaggagcacgtggcagcgcaggaaacaggctgatgaattcatccgagcaaatgccaccaacaagctgacagtcatagctgagcaaatccaac

SEQ ID NO: 813572 - DNA, 100 bp, Homo sapiens
ccaggtctcggtgcctgcaccgccatagacaccaccaggtacagcaactggggcgggagctacgaggaggtccccggagtcccgccggaggtggagccca

SEQ ID NO: 813573 - DNA, 100 bp, Homo sapiens
aagctacagtgatgacgaggagacagagccccagcactcacagacctcaatgtctagtggaggtgttccgttattacggtattttaagcctggaatattg

SEQ ID NO: 813574 - DNA, 100 bp, Homo sapiens
aatcttcagcggtgatccagaggagatccggatgctcatccataaaactgaagatgtgaatactctgctcaaatctaatccaagtgaaaatgaagaaaag

SEQ ID NO: 813575 - DNA, 110 bp, Homo sapiens
cccttttcccagacctacccaagagaaatgatatatttgattccctacaaaaggcaaagtttgatgtatcagatgaactaccccgggcagagggtctgggcaccagtgag

SEQ ID NO: 813576 - DNA, 98 bp, Homo sapiens
agatggagaatatatggctggacagctagctgcttatggctataaaattacaggacagcaggcacagccagtaacaagctgtggtacgcctccctggc

SEQ ID NO: 813577 - DNA, 98 bp, Homo sapiens
ggccttccacaccccctccgtgggtgtgtggagcctccctattaaggaccttgccgtagacagcgcctctcccgtctaccaggctgtgattaagagcc

SEQ ID NO: 813578 - DNA, 98 bp, Homo sapiens
ctcccgagtagctggtattacagagagttctactgtttcgaaccatggttaccaaggagaaggagaaactggggctggtggaaaccagctctgcctcc

SEQ ID NO: 813579 - DNA, 100 bp, Homo sapiens
aaaaactaatggctttactgactcctctaaatgtgaattgccatgcaagtgatgggcgaaagctagaacgagtaaatctgtctgcagcccagacactgag

SEQ ID NO: 813580 - DNA, 100 bp, Homo sapiens
cggcagccgaggccgcgaactgcatcatggagaagatctaaagcagtccacagtagctggcaagcaccccccagtttgaaccaacctgttagctagaatc

SEQ ID NO: 813581 - DNA, 100 bp, Homo sapiens
tggacagtccaagatcaaggtgcctgcatctggcgtctagtgtggaccctattcctggtttgcaggagtcagtggatcggtggggaaaatgctgcttacc

SEQ ID NO: 813582 - DNA, 100 bp, Homo sapiens
cttttgaagaggaaatgaagggtattgccgctgttactgatatacctttagaataactgaagtgaagtgatggactccgatttggagagtagtaagacgt

SEQ ID NO: 813583 - DNA, 98 bp, Homo sapiens
caaacaaggcttttgggaagaatttgagattggagaaatgaaggcagaggtcaccaaactacataaaaaattgtttgaacaagaaaagaagttgcaaa

SEQ ID NO: 813584 - DNA, 99 bp, Homo sapiens
gacggagccggacccgccgcctcccgggtcctaaagaagacgaagagaagccttcagcctcagcacttgagcagccggccaccctccaggaggtggcca

SEQ ID NO: 813585 - DNA, 98 bp, Homo sapiens
aaagagaagctagaatctgccgtcttttgaagcaccctaatattgagtttgccagatccggcccggtgcctgggttccaggaggacacgctgcagttg

SEQ ID NO: 813586 - DNA, 98 bp, Homo sapiens
gaaccagaacaccccgagatgagaggagaagagcccagcacaacgaaggaacacctgctgaaggaagggttggcgtggctggacttacaggccccagg

SEQ ID NO: 813587 - DNA, 114 bp, Homo sapiens
cacggcctggccctctatctgcagcttttcctggatgattccaaaatgaagaatttcatcacctgcttcaaagggactggtgattgcagctggaagtgcccatgaccgagctgg

SEQ ID NO: 813588 - DNA, 100 bp, Homo sapiens
cttggcacgacacctgcttcatttgcgcatgtccaccaaaggagacagggctgggagcgctgcccggggcccaggtcctccctaatgacagcatgcacga

SEQ ID NO: 813589 - DNA, 100 bp, Homo sapiens
gtcgcgctgtaagaagcaacaacctctcctcttcgtctccgccatcagctcggcagtcgcgaagcagcaaccatgggaccatgggctgtggctgcagctc

SEQ ID NO: 813590 - DNA, 100 bp, Homo sapiens
tccctggctgcgtgcacagcgccttgttccagcagggcctgatccaggttttataggatcacattgacaaaagtaccatggagttttatgagtcagcata

SEQ ID NO: 813591 - DNA, 100 bp, Homo sapiens
ctccttccacctggccaggaatcagggttttggccaaattgggcgagggcacaaaataaccacttaccccttctcaccgaggaagagcgggagaaagggt

SEQ ID NO: 813592 - DNA, 98 bp, Homo sapiens
ccggatggctccgcaagtcccccccggagaaaaagttgaagcgttatcatccagtcctggatgagccaatagctgaagctgtctgtattatcgcagac

SEQ ID NO: 813593 - DNA, 100 bp, Homo sapiens
aattttctagttttggggagacaattacaaacatgttttatcaatgcagctaagggagcaatggaccacagaaattctgcattgaaaaagttgggaaaga

SEQ ID NO: 813594 - DNA, 98 bp, Homo sapiens
gataatgtaactgtgtgcaaggataacagcaaatgcagccctgaggatttggctactgcatataacaacagggggcaaatcaagtacttcagggttga

SEQ ID NO: 813595 - DNA, 100 bp, Homo sapiens
gcccatgaagagatggtggattctcactgagttttgactagcggaagaaaaggttaacattcaagatggtacatgctgaagccttttctcgtcctttgag

SEQ ID NO: 813596 - DNA, 100 bp, Homo sapiens
tcctggttaatcaagaattctctatttctgctccgtcatccatgccactatttagtggttgaaggactgcgatgtgtagttttgccagaagatctttgcc

SEQ ID NO: 813597 - DNA, 100 bp, Homo sapiens
agacgcggcgcgcccgccctgcagctgcccaagcaccaggtttcccaggatgccctgaggagaaccatcttccctctggggggattaacgaaagagtttg

SEQ ID NO: 813598 - DNA, 98 bp, Homo sapiens
aacccccggccgtcccacgagctcacagagctatgaacagaatatcaaacagattggcacctttgcctctgaaagaccacagcaagattctttcattc

SEQ ID NO: 813599 - DNA, 98 bp, Homo sapiens
gagcaggctgagcgatacgacgatcgcccaggaccacaccgcagcgtaactgcaggcctctcagcgaaaaagggggaaagcaaagacccgggtgtgca

SEQ ID NO: 813600 - DNA, 99 bp, Homo sapiens
gagaacaaatccaagattagcacagtttggaaattttagcattcaggtgccaggaatgcagatgggacagccagtgccagaaacaggcccagctatact

SEQ ID NO: 813601 - DNA, 101 bp, Homo sapiens
ggagagcctgcaggacggcgcggcagagtccccgtacgcctacagtaacggagcaggccgggctctcgccatgggtcactgtcgcctctgccacgggaagt

SEQ ID NO: 813602 - DNA, 99 bp, Homo sapiens
cttggtcggctcttccagctacaaactctaggtttgaaaggccaagaagcttgagagaagaaaaatttcagaaaaattgtctcaatttgactagaatat

SEQ ID NO: 813603 - DNA, 100 bp, Homo sapiens
ggagacaaaactacgtgagtttgaagatcttcagatgcagcttaacacaagcattgatttgcgcacagctcctgagtcctataagaatgtgacagatgtg

SEQ ID NO: 813604 - DNA, 100 bp, Homo sapiens
tgccccatagatggccagctttcccccgagggtcaacgagaaagagatcgccaaacatcatgtcaatggcaacagaacagtcgaacctttcccagaggga

SEQ ID NO: 813605 - DNA, 98 bp, Homo sapiens
taagatctgaatgttgtgaccactaatttgggtaataagagatttgtttttgagttgtaatggagtaagtcaaataatcgaattaaattgcttaaatg

SEQ ID NO: 813606 - DNA, 98 bp, Homo sapiens
cggatcccgcagatcggagacggggcctggaggatctaatccaggatcatatgctgcctttaggtgacacatccctttagtctcctttaatcaggagc

SEQ ID NO: 813607 - DNA, 100 bp, Homo sapiens
tgattgacctgagcgaagggttttcagagacgagctttaatgacatcaaagcattcttcaggtcatctgaaccttctgagaaaacatggtcaacgtcttg

SEQ ID NO: 813608 - DNA, 100 bp, Homo sapiens
agattttaaggagatatcctgtgggttatcagcctgttgcaggggacccctggctgaaagacaaaaatggtccacatatagcctcagttacattagctgc

SEQ ID NO: 813609 - DNA, 100 bp, Homo sapiens
taaaatgaaagaaaccgctgaggcttatttgggaaagaagaaaatgtatggagatctagatgtcttattcctgacagatgaatacgacacagttctggct

SEQ ID NO: 813610 - DNA, 100 bp, Homo sapiens
aaattttggtctgatgatagcagatcctatctgttcaattcttatagccattcttatagttgtaagaacaccttccaccatgaccacctcagcaagttcc

SEQ ID NO: 813611 - DNA, 100 bp, Homo sapiens
ttttaattttgcaaagaatccaggacaaaaaggattagtaaaggcatgacttcctggcaccacagggaaaatcgggtgcaagcccagaaactatttcccc

SEQ ID NO: 813612 - DNA, 101 bp, Homo sapiens
aaggggacacggcggtgcttagagttctaaagttcctgttgcttcagacaatggatgagcaatcacaaggaatgcaagggccacctgttcctcagttccaa

SEQ ID NO: 813613 - DNA, 98 bp, Homo sapiens
tggcagccgccttggtagcagcgggtgacatggaaggggcagtacaagcttacgtctctgctcttcagtacaatcctctttatcttcaagccaggatg

SEQ ID NO: 813614 - DNA, 105 bp, Homo sapiens
gcagtgtcaatgcggcgctcccgctgaaggagggaaacgcggcgcgtccagcctactcgacacccagcacctcccccgcaaaccgattcgtcagtgttggaccac

SEQ ID NO: 813615 - DNA, 99 bp, Homo sapiens
atcttacagatacagagatcatgactttggtagatgagactaacatgtatgaaggtgtaggaagaatgcagcctgcttctgcaaagtggtacgatcgaa

SEQ ID NO: 813616 - DNA, 100 bp, Homo sapiens
aggcattgaggactttccttacctgtttttccagctcacccactgccagcagagaattttgatttggctgctgggctgctaccttgaaatccaagcccta

SEQ ID NO: 813617 - DNA, 100 bp, Homo sapiens
gcttaatcaaatcatgcctaagaaagatcctgtcaaaatagtccgatgccacgaacatacagaaatccttaccgtacagcagggaagaactggaaactca

SEQ ID NO: 813618 - DNA, 99 bp, Homo sapiens
cgagctcaacaggagtcagcgcaggccgagaatcacctcaatggcaagaattcctctttgactctgactggagaggtcaaacctggttccacttgcgtc

SEQ ID NO: 813619 - DNA, 100 bp, Homo sapiens
tgtccttgggagttttccatatgtgaccatggatataaaatcacaggacacatgcctggacatacaagtcgagaagtactaatcatctttagcagcctta

SEQ ID NO: 813620 - DNA, 51 bp, Homo sapiens
agggcaaagcccaacaccttcccccactgctaccaagtcaggattgttacc

SEQ ID NO: 813621 - DNA, 100 bp, Homo sapiens
ttgctttggaggaagatgcaaaaccagagatagacaatgcaaatacatttgggggcaaagtttgtactacagaaagtgccagttaatttccaaggaagat

SEQ ID NO: 813622 - DNA, 98 bp, Homo sapiens
ccgcaacaggcgttttgcaatgcagatgtagctagtatgttcaacacaccaggaatgcagagcttgttgcaacaaataactgaaaacccacaactgat

SEQ ID NO: 813623 - DNA, 100 bp, Homo sapiens
ttacagaacccgggtcagcggggtcacccctcagcacatggtgggggccacaccatttgccgtggccaggctagagtatctccagatgaaatggccactg

SEQ ID NO: 813624 - DNA, 100 bp, Homo sapiens
cttcatcaaaaatagtgatagctttgataagtgcgaaattgaggcaactcttgagaggctaaagaaactagagcgtgatctcagctttaaggagcaggag

SEQ ID NO: 813625 - DNA, 100 bp, Homo sapiens
ctctcctcctctaccctcaggacggcccccgcagcaagccccagccaaaggagcttctggaagaggtgaagaaggaattgcagaaagtgaaagaggaaat

SEQ ID NO: 813626 - DNA, 99 bp, Homo sapiens
gattttcaagccttggaaatggaggaagaagaaaagcgaaaagttcaaacacacgtcagcagtctgttctctggggaggcagtaaggggccgtggagct

SEQ ID NO: 813627 - DNA, 100 bp, Homo sapiens
aatcttcgtgaaaagatctgctgcaaggaactgatagcttatggttctccattgtgatgaaagcacatggtacagattttaggtgatgggcaagtcagaa

SEQ ID NO: 813628 - DNA, 98 bp, Homo sapiens
agtacattaggaaacatgctagaattacctggaacttcatcatcatctacttcacaggaattgccatttaaaatgatgcatcctgttgccagcagtaa

SEQ ID NO: 813629 - DNA, 100 bp, Homo sapiens
ctgagccttcagaatcagacactgcccgatatgttacatcaaaaattcttcatctggctcagagtcaagtctccatgcagtaaacagacccagcagaacc

SEQ ID NO: 813630 - DNA, 100 bp, Homo sapiens
aacctgaagccatagcattttgtaaggatgaaattacaagtgttttcctttggaatatggataaatacaccatgatacggaaactagaaggacatcacca

SEQ ID NO: 813631 - DNA, 99 bp, Homo sapiens
tgatagcttatggttctccattgtgatgaaagcacatggtacagtctattgcgtctgcagacatggatttcaaccagctggaggcattcttgactgctc

SEQ ID NO: 813632 - DNA, 98 bp, Homo sapiens
tgaaatgtccatccacttatccagacccaatggaacatcagcaatgcttctggtgaaggaggccatgcagcggattcacgaccgagggaacattggca

SEQ ID NO: 813633 - DNA, 100 bp, Homo sapiens
tagaggggaagtcgcctggttcagcgacgagagtttattaaccacttaacctctcagaactgaacaaagacaacattgttcctggaacgccctcttttta

SEQ ID NO: 813634 - DNA, 100 bp, Homo sapiens
ctcccaagtagctgggattgcaggtatcctgaagcagtttatgttgtttataccggcgatgttaatgtcaacggtcaacagatactagaaggtgctttca

SEQ ID NO: 813635 - DNA, 100 bp, Homo sapiens
gaggccagtcgtccacatcagtggcagacagatgaagaaggcgttcgcaccggaaaatgtagcttcccggttaagctcgtcgtcaaggtgcacatgaatg

SEQ ID NO: 813636 - DNA, 98 bp, Homo sapiens
ggaaacgccgaggaacccggctgaggcggcagtttttcagaagaagtgaagtcaagatgaagaaccatttgcttttctggggagtcctggcggttttt

SEQ ID NO: 813637 - DNA, 100 bp, Homo sapiens
ttgcgtgcaatgttcaccagtcagtgtttgaaggagaagagagcaaggcactacctggcagcaccatctaaacctgtatcatctgctgtggtcccagtta

SEQ ID NO: 813638 - DNA, 100 bp, Homo sapiens
atgtgtctctcacagcttgaaaaggtgaaagaagaacgtccagaaaaaataccagatttaaaattattggtagagaagaaatttttggctttacagagca

SEQ ID NO: 813639 - DNA, 100 bp, Homo sapiens
ggctgtgatcatttataatccttgactcctccgctccgccacttgtcaagatgacaggattcatttcggaatgaaaggcttcatcatgattaatccactt

SEQ ID NO: 813640 - DNA, 100 bp, Homo sapiens
gttgctcgtaatagagccttaaatggggatctggtggtcgtgaaactgcttcccgaggagcattggaaggaaaatgtttataggaggccttagctgggac

SEQ ID NO: 813641 - DNA, 98 bp, Homo sapiens
gcgcgcgccggagcggggtccgatggttctcgaaggcccgcggcgccccgtgctgcaggtgcactacatcctccaggaggtggtgatgggtgggatgg

SEQ ID NO: 813642 - DNA, 100 bp, Homo sapiens
gaggtcgagtgtcattacgctcaaacaagcattttcttcctctcgcaaatctggaatgttcaccaaacattgaaactttcctctgcaaagcatttgtacc

SEQ ID NO: 813643 - DNA, 98 bp, Homo sapiens
ccggccgcaggcgggacccggcggggcgcaccacagagaccggcttcaatatcttcacccagcatgataagctgttgccaggtgatgcaggagccctt

SEQ ID NO: 813644 - DNA, 100 bp, Homo sapiens
gttgacgccttgcagaggctttgtagagcatctgcagagacaccagcagaggagcagcagatgacatcaagccatgcccacgatgcagtgcatacattat

SEQ ID NO: 813645 - DNA, 99 bp, Homo sapiens
gctgctcgctcagaaatacaagttctggaacatctgaatacaacagaccccaacagtactttggtcatgctctatcagatttcagaagaagtgagcaga

SEQ ID NO: 813646 - DNA, 100 bp, Homo sapiens
aaaaagagaagacgctttacccgactctttgggccgttatctcacatttgaggcttaagcaacttcttccggggaagagtgccagtgcagccactgttac

SEQ ID NO: 813647 - DNA, 101 bp, Homo sapiens
cgctgcggccccgcttcctggcggccgggtcccaggaagagctaaggagcaaatccaagatctgtgccaatgtgttttgtggagccggccgggaatgtgca

SEQ ID NO: 813648 - DNA, 98 bp, Homo sapiens
ctgaggcctccccagccatgcttcctgtacggcctgcagaactgccagaagcctgtcttagatgttcatgcagaactagacagaattacacgaaaacc

SEQ ID NO: 813649 - DNA, 98 bp, Homo sapiens
tacgaattgaaaaaggaaccccaaaggagtcgattcttaaaaactctgcttctgttgagctaaatctgcttcgtaatgttgatgctaacaacactgag

SEQ ID NO: 813650 - DNA, 100 bp, Homo sapiens
acccgggctgcttccgctgcgagctgtgtgatgtggagctggctgacctgggctttgtgaagaatgccggcaggttctccttactatgacaatgtccgcc

SEQ ID NO: 813651 - DNA, 143 bp, Homo sapiens
aactccgcagcaaacaactccgcaaacgaaaaagaacgacatgatgcaatcttcaggaaagtaagagggaagtcacacttcttttctaaggtcacatgaggacttggcatctgactctgaagactgtcttgcctgcatcgtcc

SEQ ID NO: 813652 - DNA, 98 bp, Homo sapiens
gcctgacagctctgcggctcgggccctgaggctcccagaaccctggccgaagctcacctccccctggctatgttcctgagcggcagcagcacattgcc

SEQ ID NO: 813653 - DNA, 99 bp, Homo sapiens
ctcctcctggaaaaagcaagctgaagacatcaagaagatcttcgagttcaaagagaccctcggaacctgagatgagtgaactgagtgtggcacagaaac

SEQ ID NO: 813654 - DNA, 100 bp, Homo sapiens
tgacagctgtcccgccctacaggctgcgggtgatcgcagaagcctacgctaccaaagcgcaaatctgtccaaggctgcctggggagcattggagaagaat

SEQ ID NO: 813655 - DNA, 100 bp, Homo sapiens
atctctcagggccatctcagctataaacacaagacataatgaagcctacacctggaccaaccccacctgctgcgtccacaacgtcatcatcgggaagctg

SEQ ID NO: 813656 - DNA, 98 bp, Homo sapiens
agaaacccggaagaggaagaggaaagcaaaggagtcagggatggctctttctcagattctggatgaaattgaagaacataacatcaaaatctatcact

SEQ ID NO: 813657 - DNA, 98 bp, Homo sapiens
gcactgatgaaaatgggctttgtcctgcatgtagaaagtttctggcccccaaagacaaaccaagtggagacacagcagctgtatttgaagaaggtggt

SEQ ID NO: 813658 - DNA, 100 bp, Homo sapiens
ggatggcaagaatcagctggggcagaagcgcgtggtcaaggaaagaccacagcaagattctttcattcgtctcctcctagcctgggggaccaggctcgaa

SEQ ID NO: 813659 - DNA, 98 bp, Homo sapiens
ggcgagcagtctcaggcctttagtgatgatgctgcggttggatttctcacgatgtccagtgttatctccatgtctgcccctttcttcctggggaagat

SEQ ID NO: 813660 - DNA, 99 bp, Homo sapiens
tatccctggcagtttacatattcacttgatgcagctttctcaagtgtcgatatatagtatctggttttatgacaagaatgactgtcaccgcatagcaaa

SEQ ID NO: 813661 - DNA, 98 bp, Homo sapiens
gatatatttgattccctacaaaaggcaaagtttgatgtatcagtcctgtccaagaacagcaagcctatccataccaccatcctaaacccacacgtcca

SEQ ID NO: 813662 - DNA, 100 bp, Homo sapiens
tatttctctagctattgccttattttttctcatggatgttcttcttcgagtatttgtagaaggggacaaactctgcctgggcgagtccttttcctgcgtt

SEQ ID NO: 813663 - DNA, 100 bp, Homo sapiens
cggcggcggcgctcggcgatggtaggcgtccctggagcggccgccttccagcgatattttaattaactgtcgacgtgctgccacgtctgttgctatttgc

SEQ ID NO: 813664 - DNA, 101 bp, Homo sapiens
aacctgcactgtgacctacactagtcgcgggagccacgcagaggacgccggaacaccctggaagccgagaaatgtcctggttcctctgataagatcgacaa

SEQ ID NO: 813665 - DNA, 98 bp, Homo sapiens
attcctgaactgtaagctggctaccagggccaaggatgggagctacagtttttgtccagcccctggacctggtgaagaaccggatgcagttgagcggg

SEQ ID NO: 813666 - DNA, 100 bp, Homo sapiens
tcatggtgccggcgcccatccaagacctggaggccctgcgcgcgctcacggcgctcttcaaagagcagcggaaccgatttctacctggacaaggactggt

SEQ ID NO: 813667 - DNA, 98 bp, Homo sapiens
ggggaggagtttcatgaagagcccaaaacctattacgaactcaaaagtcaaccgctgaagagcagaaaagactttgagctgaatgctctcaacgcaag

SEQ ID NO: 813668 - DNA, 99 bp, Homo sapiens
ctatgtgctgggaaaccacaggatggagagtgttggcgtgtacggattctgtgggtgtaaagcaaagaacaaaatgaagtgtgattcaaggtgggaaat

SEQ ID NO: 813669 - DNA, 100 bp, Homo sapiens
tggagcagggagaggagctgtggataacgggaggtgaatttccatgtcaacatagtcctgtgtaaacaggaacatcgataagtagtgtaaaaacttgcac

SEQ ID NO: 813670 - DNA, 99 bp, Homo sapiens
ttctttccggcatcagtgtggacattgaccccactggactgcagtcacagtggactcccaaggggcaggacaaccctccatatgataagggagccttca

SEQ ID NO: 813671 - DNA, 100 bp, Homo sapiens
gagctgctgctgcgactgcagaaggacggcctgacgcaggcggacaaggacgcgctggatggcctcctccagcagatatggctcgtggacagcagaaaat

SEQ ID NO: 813672 - DNA, 98 bp, Homo sapiens
agtttgcgactcgcggaccggcgtccccggcgcgaagaggctggactcggattcgttgcctgaggcccgatgagagaaagggaaagttaaggatgctg

SEQ ID NO: 813673 - DNA, 110 bp, Homo sapiens
gttcattatctggcaatggcactctttcaaatagagcagggcattgagcggcgttttctgaaagctccacttggtttgttttggaacagtacaatgcactctcctggcta

SEQ ID NO: 813674 - DNA, 100 bp, Homo sapiens
taatgaccacaacaagcaagcatgcagcttactgcttgaaaggtaaatgcgaatgtaaggaacagacattaggaaatgccaaggcattctgtggaatgaa

SEQ ID NO: 813675 - DNA, 100 bp, Homo sapiens
accatgttgcaggcccacagctgcctacagaaccgtcccaaaatatggcaaagaaacctattctgagcaaatcgcagtcttctccaggctgacaaggcga

SEQ ID NO: 813676 - DNA, 100 bp, Homo sapiens
cttcgacacgctgttcgaccacgccccggataagctcagcgtggtgaagaaggcttgggaggcgatggagccggagttcttgtacgacctgctgcagctc

SEQ ID NO: 813677 - DNA, 100 bp, Homo sapiens
gggacagcctcatgatcacaaacatttaatgccaacccaaattatacctggttctggttccccacattggcagacaaaattagaagcggcacagaatgtt

SEQ ID NO: 813678 - DNA, 99 bp, Homo sapiens
ggcgcatgcgctctccagcgcgctctccaggagctttggctcgatcggcgccaatggtgtgccatagccatcctctttgcagtcctgttggttgtgctc

SEQ ID NO: 813679 - DNA, 100 bp, Homo sapiens
aagcatacagacaagcccttcttacagagttggaaaaccgaaagcagagacagcagtgaatttctacaagtgtgaaagaattagaaaacttcaggaactt

SEQ ID NO: 813680 - DNA, 99 bp, Homo sapiens
gaagctggctcaagtacattagattcgctggctgttatgatcagcacaaccttgttgcatgccagataaatgatcagttgccaccttccagagaagagg

SEQ ID NO: 813681 - DNA, 100 bp, Homo sapiens
cccggcgaggagaaccaactggtcccgaaagagattggcagattgctactctggctttactcctgggcggcgctgccatcattctcattgcattcctggt

SEQ ID NO: 813682 - DNA, 100 bp, Homo sapiens
agctaaaaccttcctcaccgtgtactactggacgccgggcatggcagtgccacgggacattgcagccgcctacctgctccagggaagcttctatggccac

SEQ ID NO: 813683 - DNA, 98 bp, Homo sapiens
aaaaacatacctcaacccttggaaaaaaatcgattctgctcctctagctgtccaggcagccatcttgtctggagacaagtctgagaatgttcaagatt

SEQ ID NO: 813684 - DNA, 100 bp, Homo sapiens
aacttgacactcaccctgaccggcacacaaaccaatggtctggactttcagaagcagcctgtgcctgtaggaggagcaatctcaacagcccaggcgcagg

SEQ ID NO: 813685 - DNA, 100 bp, Homo sapiens
cctaaatggatgggtggagctgagaatccagttcggacctatggttatgcgttccttttttccctcactggatattttggaatctcctttgttctggctt

SEQ ID NO: 813686 - DNA, 100 bp, Homo sapiens
gtcaagaaatccgacggaccaaattatcagcactttttattaatttgatcagtgatccttcacgttgggtgaatggtgatattccccctcggttaaaaaa

SEQ ID NO: 813687 - DNA, 100 bp, Homo sapiens
gaattatggatgatgctgcagagtgctttggtgtcttttatgaataatcaaaagcagcaaaagccaacgctatcaggccagcgttttaaaactagaaaaa

SEQ ID NO: 813688 - DNA, 100 bp, Homo sapiens
caccttcgaggcggacgagaatgagaacatcaccgtggtgaagggcatccgggtcaatgtgacggtggactacattagaccagccagcccagccacagag

SEQ ID NO: 813689 - DNA, 100 bp, Homo sapiens
tgcgaagttttgctcctggatgaatccaagttaacccttaccacccagcagcagggcatcaaggttcgaaccagtgtcctaccagaacataaggatcccc

SEQ ID NO: 813690 - DNA, 99 bp, Homo sapiens
cagggaggagaccggcacccagacaggtggcgacggcagaggagcacattgcaagcaacccgtgccttgatggtggttggcatcctcctgggagtgata

SEQ ID NO: 813691 - DNA, 100 bp, Homo sapiens
ctttacacttctggcctctctgggaaagaccacagcaagattctttcattcgtctcctcctagcctgggggaccaggctcgaactgaccctggacatcaa

SEQ ID NO: 813692 - DNA, 98 bp, Homo sapiens
ataatctgtaatactaaagacaatttggttagtctgctgctaattggaattgctgcgtggggcattggcttcgggctgatttccagtctccgagtggt

SEQ ID NO: 813693 - DNA, 98 bp, Homo sapiens
cttcttgcggcgcctcggctcctcccaggtggcctcccgcgtgctggccatgaaggtctctgacctgcagcaaggtaagacctatgtcttcagggtcc

SEQ ID NO: 813694 - DNA, 140 bp, Homo sapiens
gtcactccttcctccgcctctcgctaccaccgccgacggtcttcagggtcacgagatgagcgctatcggtcagagagtgataatgaactctcaagtggaacaggtgatgtgtctaaggattgtcctgagaagatcctgta

SEQ ID NO: 813695 - DNA, 100 bp, Homo sapiens
agtgatgacgaggagacagagccccagcactcacagacctcaatgtctagtggaggtgttccgttattacgatggagagcaatacatcatcatctttgga

SEQ ID NO: 813696 - DNA, 98 bp, Homo sapiens
gcggccgtggtcaccaggaaggggacgggacggacggtgatggtggtcgccgcggcggcgtgtgcgcccctcaggagacgcaggtcagaatggaaatg

SEQ ID NO: 813697 - DNA, 98 bp, Homo sapiens
tgcggcgacctcgtgcctgccttatgtgcacctgtgccagcatctttctcaggtagcaacacaagtcggaatagaatggaacctgtcccctgttggca

SEQ ID NO: 813698 - DNA, 98 bp, Homo sapiens
tgaggactaccctgaccctccaataccccacagctattctagtgataggattcacagcttgagctcaaataaggtgtgttaccgagtggaatgggcca

SEQ ID NO: 813699 - DNA, 100 bp, Homo sapiens
caaagacccagcattccaaaaccttggaacggttttgttcagttatgccagctaattctggacttgcattgagaggaagaattctcctgcttgtggcagg

SEQ ID NO: 813700 - DNA, 100 bp, Homo sapiens
ctcccacacttcctctccgagccctaccagtacaccttggccagcactgatctctggaaacatggctacagaacatgttaatggaaatggtactgaagag

SEQ ID NO: 813701 - DNA, 110 bp, Homo sapiens
gtccccgctgcgggtggcggtggtgtgctcgagcaaccagaaccggagcatggaggcgcacaacatcctcagggactttgaacatgtcggggatcgccctcagcagactc

SEQ ID NO: 813702 - DNA, 98 bp, Homo sapiens
tgagctttggtatccttaaacctgacttaaggattgtctttgtacataacaagggacagggtgccttatcggagagactgcggagcttcagcatgcag

SEQ ID NO: 813703 - DNA, 99 bp, Homo sapiens
ttgtagcaagtggtgataacacactcagcatcactaaagacaatacaatggtgggtgaagagaagatgtctctaagaaaccggctgtcaaagtccaggg

SEQ ID NO: 813704 - DNA, 99 bp, Homo sapiens
tccagccgtccccagaacgcagatcagaggtagtcggacctttcccgctggcgcgcagcctcagctaggcttttatcttgagaacatggtgtctggagt

SEQ ID NO: 813705 - DNA, 100 bp, Homo sapiens
cagaccacgtttgaaggagggatgagggagcctgccctcgcatggtggccagggcacgtcactgcaggccagtgatgaacggcagcagccactcaccaac

SEQ ID NO: 813706 - DNA, 100 bp, Homo sapiens
cagttaaaacacaccattgccctctggcagttcctgtctgctcataagtctgaacagctgctgcggctgcacaaaacccttcgcaggtgttacagtcggg

SEQ ID NO: 813707 - DNA, 100 bp, Homo sapiens
tgggagacattgtttctgttattgacatgcccccgaaagtgttaagcacatggtggagaggcaagcacggattccagctattactactgaactatttcac

SEQ ID NO: 813708 - DNA, 98 bp, Homo sapiens
actggtgtttggtgtacccatgtgactaatttgtccaaagagaggaagcgagcagctgcaaagcatctaatagaacgctactaccaccagttaactga

SEQ ID NO: 813709 - DNA, 98 bp, Homo sapiens
gagagcgtgaccgagagcgcgaatatcgtcatcgttagaagggctgaccccacattggacaccgctgcatccatgtccatcacacaacacagctgccg

SEQ ID NO: 813710 - DNA, 98 bp, Homo sapiens
cactgccgtcaactcctgttctcctcagagcctgctatcatggtgaacttacttcagattgtgcgggaccactgggttcatgttcttgtccctatggg

SEQ ID NO: 813711 - DNA, 101 bp, Homo sapiens
ctaaggccaaaggcggagttctgttttggaggctgtgacattcaaggatgtggctgtggtcttctccagggaggaactgcgactgctcgatcttacccaga

SEQ ID NO: 813712 - DNA, 100 bp, Homo sapiens
tcctagtcaggaagaggacacacagagtattggtcctaaagtccagagacagagcactaattagggcagctttggaagaagtagaaggtgatgtggcaga

SEQ ID NO: 813713 - DNA, 100 bp, Homo sapiens
acagctggaggagttcatgacaaaggacctgatgacatttgaagatgtggctgtggaattcagccagtgggagtgggggcagctgaaccctgctcagaag

SEQ ID NO: 813714 - DNA, 100 bp, Homo sapiens
atgagaagcaggcagaagattgcatcacacgaatgacaaaggacagatccctgctgatgttgttccagacccagtagatatgccgttagagatggctgac

SEQ ID NO: 813715 - DNA, 144 bp, Homo sapiens
tcggtccccaccgtggcctcagcgtgctgcttgcacggatacctcagcgggcgccacggtggctcccagatgaagatgaggagagtgaggaatcaagtgaagaagaatctagcttggagagtgatgaagatgagtctgaatcag

SEQ ID NO: 813716 - DNA, 99 bp, Homo sapiens
cctgagaacttcctgatctctctcgctgtgagacatgtctgagactcctgctcagtgtagcattaaggtactaggttttgacaagcttgcatcatgcgt

SEQ ID NO: 813717 - DNA, 100 bp, Homo sapiens
aatgtgtggcggattactgggacagatggtacaaacccgtagtgctgatgaaccaatgacaacatttgttgtctgtaatgaatgtggaaatcgatggaag

SEQ ID NO: 813718 - DNA, 98 bp, Homo sapiens
ttgctgggacgcctactccaaagcggccgggagtcgcgcttcttccccactcccgagacaggaagagctaaggagcaaatccaagatctgtgccaatg

SEQ ID NO: 813719 - DNA, 98 bp, Homo sapiens
tctgaatatccttactcggagtgccaaaatgctgcacagatctaccgtcgcgtgaccagtatcatccagcccctcttagaacttgaccaaaatagaag

SEQ ID NO: 813720 - DNA, 98 bp, Homo sapiens
ttcagccctgtctggtgcatccttggcagaaagtgaggaggaaaacacccccattgctctcaaaattagagagatgtgtaattgtccaccactgtcta

SEQ ID NO: 813721 - DNA, 100 bp, Homo sapiens
cacagttcatcagttctactgccctctgcctgcggaagagagaagggcacagttacctaagtatcaacgtaatcttcctcggccaggacaggcccccatc

SEQ ID NO: 813722 - DNA, 98 bp, Homo sapiens
gaatcgttaaacatctgaaagggtcaggtcaaaatgcagatcttcgtgaaaacccttaccggcaagaccatcacccttgaggtggagcccagtgacac

SEQ ID NO: 813723 - DNA, 98 bp, Homo sapiens
tgcgtcccctgtatgacattccttacatgtttgaggcccgggaatttcttcgaaaaaagcttattgggaagaagtccattccagtgattaatggaaga

SEQ ID NO: 813724 - DNA, 100 bp, Homo sapiens
cagaagtatttcaaccacagatggcactgccaacagaatgacagcccatatcaaggcggtgtattctttttgacaattcattttcctacagactacccct

SEQ ID NO: 813725 - DNA, 99 bp, Homo sapiens
gaccacaagcccaagtttacccaggacaccttccgagggagtgtcttagagggagtcctaccagtaacatatcagcagacgacatgctgtataccgaga

SEQ ID NO: 813726 - DNA, 100 bp, Homo sapiens
ggaggcagtagccaaacacccagattctccggtgaagactcccatcaaggtgaaggtgatcgagaaggacatctctgtccaggccatcgcctgccgcagc

SEQ ID NO: 813727 - DNA, 98 bp, Homo sapiens
tctgctgcagtgagatcccaggaagctgattttttgaaaggactgcctgtctacaacaaaagcaattttagtcgatttcacgcggactccgtgtgcaa

SEQ ID NO: 813728 - DNA, 99 bp, Homo sapiens
ggagagatcctggccacaggcagtacggcatggtgctcggtgaggtcccagcttgaagagaaagaaaacaagaagttccctgtgtttaaggccgtgtca

SEQ ID NO: 813729 - DNA, 100 bp, Homo sapiens
gaggagaggggagccggaggaggatgctcctgcctcccagagaggggagccggcgaggatcaaaatcttcgaaggagggcaccgtataaacttgagttca

SEQ ID NO: 813730 - DNA, 99 bp, Homo sapiens
gcggatctggaggagcagttgtctgatgaagagaaggtgttttctctggctggctctacctttagcctcccttctacccacatctttggaacccccatg

SEQ ID NO: 813731 - DNA, 98 bp, Homo sapiens
attgtctaatgatggagaaacaatggtaaatgtgccacatattcatgcaagaacccccagtcggatcttcaggcccaggatagatgtcatagaattgg

SEQ ID NO: 813732 - DNA, 113 bp, Homo sapiens
agtctccgcgtcccgctcgctgggagagaggtacctctccttttccctctccctttccctaaggacactgccttaggaaaaccacgagaggtgtttcgacttcctacagattt

SEQ ID NO: 813733 - DNA, 99 bp, Homo sapiens
aatgttccaccaggacttgatgaatataatccattctcggattctagaacagtgggcaccatgtccttgaagcttcaggcaagcaatgtaaccaacaag

SEQ ID NO: 813734 - DNA, 100 bp, Homo sapiens
cagaaaccccgttgacaaggcactgctttttcatgacgtggcccaccctcaggaccctcaccacccatcagagaagcctgtcattcactgccataaatgt

SEQ ID NO: 813735 - DNA, 125 bp, Homo sapiens
tcagccttcagttgaaacatacaatcagctgttgcatcttgcttctgagcaaggtagttttgatgcatttaaatcaaacggtattgagatggattgggttatgaaacataatggtccaaatgacg

SEQ ID NO: 813736 - DNA, 98 bp, Homo sapiens
cacaaatggctgccaaactggaacgtttgcgagagaagggaaatggctcattccaagactagcttttcatgggcaacccctttccatccttgccttga

SEQ ID NO: 813737 - DNA, 74 bp, Homo sapiens
tctcaagatattaaagttactgctgttaaaaagatagaaaatgctgctgaagaacctagagtcttatgtattat

SEQ ID NO: 813738 - DNA, 100 bp, Homo sapiens
ctcaagttgagtcaacaaaggaaggaaatccaagtaccactgcctgtgactctcaagattgaccaatggggctgaggctgtgtccactgaggctaagatg

SEQ ID NO: 813739 - DNA, 98 bp, Homo sapiens
ctcggcctacagcgaccccgtgcggctgcgttaagccggctctggagacaggttatcaccaatctagtgaaaatgttgaagtccagagacacgaggag

SEQ ID NO: 813740 - DNA, 100 bp, Homo sapiens
gaagcagtgcctggtggccgaccttgtccacacagtccatcctaccaggacatcctcggaaagtatttattctaggccaggctccagtattcctggctca

SEQ ID NO: 813741 - DNA, 125 bp, Homo sapiens
ctattacaccatcctggattctggaggcatcattgtggccattgagcacagcagccgtcctatcaatgtgattaaggtggccctggcccccttgccagattccagctggccgtcagtgctcgcgt

SEQ ID NO: 813742 - DNA, 100 bp, Homo sapiens
cggggaggaaagctgctcggagaggtgggagccaggtcactacaggaaaagatatcttcattaaagtgcaacagcacactgagagcaacacaccaccaca

SEQ ID NO: 813743 - DNA, 98 bp, Homo sapiens
atctcagggaccagtacatcagagaaacccaactccatggacactgcaaatacctcacccttcaaagtaccaatgatacttggaggacagaatatgtt

SEQ ID NO: 813744 - DNA, 98 bp, Homo sapiens
gaggatcgcccaatccacatgcttttccagaacaaaatccagtctcatagcagaggagaatataatgtttacagcaccttccagagccatgaaccaga

SEQ ID NO: 813745 - DNA, 98 bp, Homo sapiens
ctccggaggcctcgggggcgtacaggcgcagcggccgcagcagcagcggcagtcacaggcacatcagcaaagagatgatgattcagatctgtactctc

SEQ ID NO: 813746 - DNA, 99 bp, Homo sapiens
cggaggaaagcgggaagactcatcggagcgtgtggatttgagccgccgcattttttaaccctagatctcggccataaaattttgagtagaaaaatccag

SEQ ID NO: 813747 - DNA, 100 bp, Homo sapiens
ctgaacagttacagcgagctgcttactatcaggctcttgcagccaatgccggaacaggatttgctgttgctgagcctcaaatcgcaatgttttgtgggaa

SEQ ID NO: 813748 - DNA, 100 bp, Homo sapiens
tgtgtggcaccaaccgcattccagacatctcaacagtgagcatgcgctggacgatagaagtacagcccaatgtagagtacaaatgcaggttgtacagcag

SEQ ID NO: 813749 - DNA, 100 bp, Homo sapiens
agacatcagaggcacttgttatcagagagccaataagggtcactcccattgatggagctccccaccgatcatacagtgagtgctaccctgtcctgctgga

SEQ ID NO: 813750 - DNA, 100 bp, Homo sapiens
ttgtccctgtttcgccacagttcctaccttatgagctcggttttcttatgcttataagagtggaacaggattggttgccgtggtctttactgcttttctc

SEQ ID NO: 813751 - DNA, 98 bp, Homo sapiens
aagcgaaaacatgaccgctgagcccatgagattcaaccctatgaaaagataaaggccaggggcttgcctgataatatatcttccgtgttgaacaaact

SEQ ID NO: 813752 - DNA, 99 bp, Homo sapiens
ttgaaactagtgcaaaagctggatacaatgtaaagcagcatcaaagctaagccagaagatttatcacattttcatcatcagctacaggattagaaagga

SEQ ID NO: 813753 - DNA, 100 bp, Homo sapiens
ctttggcctacagttcccgctggacctggatgtgagggtgaaggctgtgctgctgggagccacattcctcattgaatggcccccagaacatatacaacct

SEQ ID NO: 813754 - DNA, 100 bp, Homo sapiens
gatgtttgcgacatcccagagagcttccagagaatgtgaattggacccttgctgcgaaggaagtacctgtaagcttaaatcatttgctgagtgtgcatat

SEQ ID NO: 813755 - DNA, 98 bp, Homo sapiens
tccgaggagtcggccgagctgctcccgcgccctggccggagctccttaataagcatttatagtcagtttttggcagcaatagaatcactaaaggcatt

SEQ ID NO: 813756 - DNA, 126 bp, Homo sapiens
caccgccgcccatcgagtcgaagcaccgcagcctggtgcagatcatctacgacgagaaccgggatcccctaacaacagtgagagagcaatgcgagcagttggagaaatgtgtaaaggcccgggagc

SEQ ID NO: 813757 - DNA, 99 bp, Homo sapiens
aggcccgcacagtttcgacgtgtccttccagcagtcgagcaccgccaagtcggccacctggacggagtacaagcgcaagctagccagagtttccctggt

SEQ ID NO: 813758 - DNA, 51 bp, Homo sapiens
ggagaggagagcggtgcggaggactgagatcaggatcctcatgaccagcca

SEQ ID NO: 813759 - DNA, 108 bp, Homo sapiens
ttaactataatcttcatagtagtgtatttatttggcgctgtgttacaggttgtaaatgtcttaaaatccttattgtcaaatcttgatgaagtaaagaaggaaagagag

SEQ ID NO: 813760 - DNA, 100 bp, Homo sapiens
ccagacactgagagccgctttcatcaagtgttataaagacgaatcctcaagagaatgatatgttcttcaatgtcattgctattgttgatccattaacaag

SEQ ID NO: 813761 - DNA, 100 bp, Homo sapiens
gcgttagcattcgcaagtccgtgaagcggttattgagcattcgctgtgtaccaagtgctgtccttgacaagaagacttacacccagtggtcccagaggga

SEQ ID NO: 813762 - DNA, 100 bp, Homo sapiens
atcggaaaccacgcgtcctactacaaagatgctctgcggtttttgggctgtgttgacatcaaggatctaccaggacacatgacggaagtgtgtatttttg

SEQ ID NO: 813763 - DNA, 125 bp, Homo sapiens
taactgtcgagaagtgattattacaccaaattctgcatggggtggagaaggcaggtgtaactgtgtggaaccgcataatcccagcaatggcacattgaaggaatggagggaatccaatatttctg

SEQ ID NO: 813764 - DNA, 100 bp, Homo sapiens
acttcctcgaggctggaactgggttgatgttgtgaaggttaatttggagtggcccctggagtcagtttcctacaccatccgaggccccacccagcacgag

SEQ ID NO: 813765 - DNA, 100 bp, Homo sapiens
gaaagtcactggaaggtgtgcccgatgtgcagcgagcagttccctcctgactatgaccagcaggtgtttgaaagaagaagaagaggacagtgctccagtg

SEQ ID NO: 813766 - DNA, 98 bp, Homo sapiens
catctgctataacctacaagcagttggacagcccattgcagatgcaaaggctcctgagaagcgggcctcaccatccaagccagcttctgccccagcct

SEQ ID NO: 813767 - DNA, 98 bp, Homo sapiens
tcgtctgcccacagccctccactcaacacaggaaggcgttcgtggcattcagggatgtggctgtgtacttcacccaggaggagtggaggttgttgagc

SEQ ID NO: 813768 - DNA, 98 bp, Homo sapiens
cggcacgacaacattaaaccatcagatgagagagaaaaggaacagttccgtaagctctttattggtggcttaagctttgaaaccacagaagaaagttt

SEQ ID NO: 813769 - DNA, 98 bp, Homo sapiens
cccgaactctgcaaagcctccagaggacataccacctccaggatcaggatgcagaggtatgcaaccactcatgtattcggttcaggaagcattaaatg

SEQ ID NO: 813770 - DNA, 99 bp, Homo sapiens
gcgcagcgccatggcccccattggcctcaaagctgttgtcggagagattggcaaacatgaattgactgggcataaagtagctgtgaagatactcaatcg

SEQ ID NO: 813771 - DNA, 100 bp, Homo sapiens
cccgaaatgagacttggtgcactctatacctactgggttcccctggtgcctgactgacagaagttcttgcccccggggagctggtgtggacagaggaggg

SEQ ID NO: 813772 - DNA, 100 bp, Homo sapiens
agaatgttaatgcttgatgggatgccggcagtcagagtcaaaacagagcttttggaatctgaacaagggggcccggcccgtcatcaacatcgtccacaag

SEQ ID NO: 813773 - DNA, 100 bp, Homo sapiens
ctcggctgcctggagcggctggactaccccaagagcaggatggccatctggtattttgaaggtggcgtctcatctgtctacctctgggatctggatcatg

SEQ ID NO: 813774 - DNA, 98 bp, Homo sapiens
agagacgtcatacttggaaatggctgcaggttcagatgacttttttgaacgaaccattctgtgcaacagccttgtgtggagttgtgctgtgacgggta

SEQ ID NO: 813775 - DNA, 100 bp, Homo sapiens
gaaggtggacgtgctggtgtctgagtggatggggacctgcctgctggtatataatgtttacatggcagggaggcagctgtgttctaagcggtaccgggag

SEQ ID NO: 813776 - DNA, 98 bp, Homo sapiens
accttcatccgagtcacccagcaggaagatgttaccgagtacttcagtgaattccttagtgcaggggaacggagtcttgaattccagggatgcggcaa

SEQ ID NO: 813777 - DNA, 100 bp, Homo sapiens
acaagttcctgatgatgaacagtttgtcccagattttcagtctgataaccttctagacctggaaggcctcctaagaggactcaaagtgtcacctccccag

SEQ ID NO: 813778 - DNA, 100 bp, Homo sapiens
gcgatgtcaccattgttcagctgggtggccaaggcaaccactgagaaaacggaaccgaatagtcaagaggacaagaatgatggtggaaaatcaagaaaag

SEQ ID NO: 813779 - DNA, 100 bp, Homo sapiens
tccgggccggtgagggggcgcggggggcgccgggggggcccaagcgtcagcggcccgcgcctgtcgggctgaactgagatgatgtgctgactaaagacgc

SEQ ID NO: 813780 - DNA, 100 bp, Homo sapiens
aagagctcaaagatttggtttgaatgtctcttcaatctccagaaagataaactcaagccatggagggattactgcattacatcaaccctgcacacgccat

SEQ ID NO: 813781 - DNA, 100 bp, Homo sapiens
gccctacttcaaggataagggtgacagcaacagctcggcgggctggaagagctttcagcagaggccaaggcagcattgcttgaatttgaagaaagggagc

SEQ ID NO: 813782 - DNA, 100 bp, Homo sapiens
tcggtgcttcagggagctcggtctccatcatggtggccaacatccttcgcctcttcaagatttgtgacccagaaggaaatctctgacctcagctgtggct

SEQ ID NO: 813783 - DNA, 100 bp, Homo sapiens
atggagttcctcctggggaacccgttcagcacaccagtggggcagtgcctcggggctttgttatgcacctaaagccatattggaagctccagaagaaaga

SEQ ID NO: 813784 - DNA, 100 bp, Homo sapiens
agaaagaagaaaagaaagatgcagaggaagaggaaagcgaactggtggtttgtgatgaaaatggttccaagggctatggatttgtacactttgagacgca

SEQ ID NO: 813785 - DNA, 100 bp, Homo sapiens
caacctatacatccgaggattgcaaccaggcactactgaccaagatcttgtcaagctgtgtcagccggcagctgcaatgactctccgcacggtattattg

SEQ ID NO: 813786 - DNA, 100 bp, Homo sapiens
tctttacaatgacctgggcgcacagtggtattggaaggaactggccctgggcctctggaggcagcagtattctggcagaatttggaaccctgcatttgga

SEQ ID NO: 813787 - DNA, 100 bp, Homo sapiens
gacgattcacctgtccagcatccgaccaccgaggctggagggggagaacacccagctgatcactggagattccatcgttagtgctgaggcagtatgggat

SEQ ID NO: 813788 - DNA, 100 bp, Homo sapiens
gtaaatgttgaagctcggtgtaccgcgggacaaatcctgagtcacccctgggtgtcaattatgtttgagaccttcaacaccccggccatgtacgtggcca

SEQ ID NO: 813789 - DNA, 99 bp, Homo sapiens
caatttggagtctcattcagccattcttgaccagaaattaaatggtctcaatgaggaaattgctagagtaggtcaccctcgtcgactgaaagtgaaacc

SEQ ID NO: 813790 - DNA, 100 bp, Homo sapiens
aacctaattctgcccttgatgtcacaggatctcttgaaggttcaaaccttgtactactcagctgatcacaagctgcttgatgggaacctactagatggac

SEQ ID NO: 813791 - DNA, 100 bp, Homo sapiens
ctgcggctcccactctggtgagtggtggtggcagtaccagtagcaccagcagtggcagcttcgaagccagcccaggccctggccaacgtcaacattggga

SEQ ID NO: 813792 - DNA, 100 bp, Homo sapiens
agccaagacataaactcaaccccttctcttccaaaagctaactgccttctatgaaagcagtcattattcaaggtgatcgtattcttccagtgaaaacaag

SEQ ID NO: 813793 - DNA, 100 bp, Homo sapiens
cggaaggtcagttctgatacattggagaccattgctcctgaccatggcaaaagttataaccaccgtactgaagttccctgatgatcagactcagaaaatt

SEQ ID NO: 813794 - DNA, 98 bp, Homo sapiens
ggttttcctctgagcagcagctgacaaaggaatgcgtttggctctggctgatgctggtgacactgtagaagatgccaactttgtggaagccatggcag

SEQ ID NO: 813795 - DNA, 101 bp, Homo sapiens
gcggcccaggcacggagaggcggcgagaccgcagaaagcataacccctactgtagaactaaatgcactgtgcatgaaacttggaaaaaaaccaatgtataa

SEQ ID NO: 813796 - DNA, 98 bp, Homo sapiens
aggaccttctgggcccccacattaatgagctacaactagatgcttttgaagtagaaaaacaggcattgttgaatgaacatggtgcagctcaggaacag

SEQ ID NO: 813797 - DNA, 100 bp, Homo sapiens
ggatccggctcctccagctaccggcccaaggccatctacctggacatcgatggacgcattcagaaggtatcaaaacattcagcgaaccattgcaacagag

SEQ ID NO: 813798 - DNA, 99 bp, Homo sapiens
gttaccatcactggatctgctgccagcattagcctggctcaatatctaatcaatgtcagccccgtgctgatcccattccaatatgtagcttctgtttgg

SEQ ID NO: 813799 - DNA, 98 bp, Homo sapiens
acgaattcagtgatatcattaagtccagatctgctattcaggattatgaaactgctcaggaacacaatgaaaatgatcagcagattcgagaaggtcta

SEQ ID NO: 813800 - DNA, 100 bp, Homo sapiens
gcaaatgcaactagccaatgccatgatgcctggtgccccattacaacccgtggacaggttgcttggaagcgagctgtcaaaggtgttcgagaaatgtgtg

SEQ ID NO: 813801 - DNA, 98 bp, Homo sapiens
cggctcaggacttacggaaacaggagcagctgatgagccagatccgggagacgcagcagctctgccaccagaccctgttcatcttcgatgaagcggag

SEQ ID NO: 813802 - DNA, 100 bp, Homo sapiens
catgggactctacctggggatatacatgcatgcaccaaaacgaggacagactattcctgatccttatgaagactttatgtaccgtcacctccaatattat

SEQ ID NO: 813803 - DNA, 100 bp, Homo sapiens
tcagagtctttttccaatggcaactccgagtctgtgcatcccgccctgcagagaccagcggagccacagatcgttctgcagtgggagcgtgtgactgcgg

SEQ ID NO: 813804 - DNA, 100 bp, Homo sapiens
atacttttgaaggtgcaagatactatataaagagattacctggggcaattgatgttatcggtcagactataactatcagccgagtagaaggcaggcgacg

SEQ ID NO: 813805 - DNA, 98 bp, Homo sapiens
gcctataacaatctgtctgtgttcagacagcaaatgaaaccaacctggagagttcatgaatgtgcccccagacctctccatctgcacctttgtgctgg

SEQ ID NO: 813806 - DNA, 99 bp, Homo sapiens
tcctcgatccgcccacagacctcaaattcaaaggtggatgctcatggaaatattctgttgacatcgctggaagttcacaatgaaatgaatgaggtctca

SEQ ID NO: 813807 - DNA, 100 bp, Homo sapiens
atccccccttcaagcaagggcatgatgcctccactatatgccatggaacctaattatctgcatatttggcctagaaatacctttatgatgattgcacttc

SEQ ID NO: 813808 - DNA, 100 bp, Homo sapiens
caagtcaatcagtttgcattgtgcctgagattgtgagggagacccaggacctaattgaacaaggggcactcctgcaagcccaccggaagctgatggacct

SEQ ID NO: 813809 - DNA, 98 bp, Homo sapiens
tatgcgaatctataagaaaggtgatattgtagacatcaaggttcagattcagaacaagaaagtggacatctctaaggtctcctccaagtgtgggtcta

SEQ ID NO: 813810 - DNA, 100 bp, Homo sapiens
acaggtgcatttcacagcactctgggcgaaaattggatgtgaaaatgaagccagaccgaggttcacaagaatgtactttaaacatgtactctttgaggac

SEQ ID NO: 813811 - DNA, 118 bp, Homo sapiens
gactccttagatgactctgtggtgggtccctcagcccttctgagctctgtgctgaacaagcattgttggaaactgttactacatttttactggaaatactattattcattttaatttt

SEQ ID NO: 813812 - DNA, 100 bp, Homo sapiens
ttctactgtgcctcgaattactacccattatactatttatccccgggataaggacaagagatgggaaggtggctacagtcaacgacttccaaatgcaagt

SEQ ID NO: 813813 - DNA, 98 bp, Homo sapiens
caactcggcagcctccacccaccggcccaccctacatttagcgcatcatgtgatccggtgctgggcctaaaggagataacatttatgaatggagatca

SEQ ID NO: 813814 - DNA, 100 bp, Homo sapiens
aaccatctcacacctttccaaaggacgcgaccataactctaaaaggatggacgtggtagaggtcgcgggtagttggtgggcacaagagcgagaggacatc

SEQ ID NO: 813815 - DNA, 100 bp, Homo sapiens
ctaccaattccatatagaaaagactgggccgttactgattgagctacgaggaccaaggtgatctttagacagtgactgagtatggatcatttgaacgagg

SEQ ID NO: 813816 - DNA, 98 bp, Homo sapiens
ccaactgctactatgacaaatccaagtcgttcttcgacaacatctcttctgaactcaagaccagaggctgtggccaggccagctgggctcggggagcg

SEQ ID NO: 813817 - DNA, 100 bp, Homo sapiens
gcatcccggacggtacttctgccactgctgctccgtggagatcgtcccgcgcctgccggaaatggagcgagaacgtcttcttggataacgagctgctgac

SEQ ID NO: 813818 - DNA, 100 bp, Homo sapiens
tgtgcgacgtgcacttcctggtgggcaaggggctcagctcgcagcgcatccccgcgcacaggttgcctgtggctggagaaaggaatgtgctcatcaccag

SEQ ID NO: 813819 - DNA, 50 bp, Homo sapiens
tctcaacccacttccttcagagtacttgctggaaaataaccggatggtga

SEQ ID NO: 813820 - DNA, 98 bp, Homo sapiens
agaaatgctcatctgaaattcatcacctctctggagtcttcaaactgaccaagcattgaaaagcttgaattcggagtgatttaccactgcacagagga

SEQ ID NO: 813821 - DNA, 100 bp, Homo sapiens
tggtccatgatagtggccctgatcatcgcaaacattttctctttaggacccccctcgacaaccaacattcaccaccaggctggaccttgatgccgctggg

SEQ ID NO: 813822 - DNA, 100 bp, Homo sapiens
tgtggatgacattagtattaataaccacatttcacaagaagattgtgcaagttttgatacttatagaggactcccttcaatttccaatggaaattatagc

SEQ ID NO: 813823 - DNA, 100 bp, Homo sapiens
cttcagtatatggttcccttgcatctgttctagcacaatcgggaaaaagagctaatccgccaagcagctctgcagcagaccaaggagatggacctcagcg

SEQ ID NO: 813824 - DNA, 98 bp, Homo sapiens
aagcaccgccccgtggaaccggaacgcagcaataccaagaaggagggtgacctgatagctgctcaggctcggctgaaggacctggaggctctgctgaa

SEQ ID NO: 813825 - DNA, 103 bp, Homo sapiens
tggatttgctcccattactctgatcgctccgttaggctgtgtgtctgttacagatcctgggaagactctgcctgaagcccttgattattgcactgtttggcta

SEQ ID NO: 813826 - DNA, 99 bp, Homo sapiens
aaagaacggcagtaaatacgggcccgacgggctgccctacctcaaggttctcaaggataaaagaatcagagtgtctcaacccttgacaagaggaccaag

SEQ ID NO: 813827 - DNA, 100 bp, Homo sapiens
caacaacacaaacagtcccaagtggaagcaaccccttacagtatcttaccaatatatttgagtccttcctgcctcagttattggcctatcctaaccccat

SEQ ID NO: 813828 - DNA, 100 bp, Homo sapiens
acaattattaggctctcagatgtaactagagagagaaggaacattccagaaactttgggcgatgtagttacaggaagcgatgctcaggtttctgttcctg

SEQ ID NO: 813829 - DNA, 100 bp, Homo sapiens
cccgtttactctatgagattcagaacagagatgaacaggctttcccagccctttccaaattttggagccaagcataacaccagtaaccagcactatccca

SEQ ID NO: 813830 - DNA, 100 bp, Homo sapiens
gaggcaaaggctaatgtgtgctgtgttaaattcagcccctcttccagataccatttggctttcggctgtgcagccaatggtaatgatagtaaaaaattta

SEQ ID NO: 813831 - DNA, 99 bp, Homo sapiens
gcttttcattatatttttaatgtgcaactagcctgtgagattcagaaaaatgtccattccacaaggtttgtgacatatttctgtgagcaggttctccct

SEQ ID NO: 813832 - DNA, 100 bp, Homo sapiens
ttcgacctggagccgtcccaggactgtgcaggggactctgtcacaatctacgcagaccccaccaagaggctggagctgtacttccggcccaaggacccat

SEQ ID NO: 813833 - DNA, 100 bp, Homo sapiens
agactgagactcaggagtcccaggctttccaggagagaggaactgtctatcttgaccatgcaggtgccaccttgttctcccagagccagctcgaaagctt

SEQ ID NO: 813834 - DNA, 100 bp, Homo sapiens
ccggaagcagatctcttggagtgaaggctgttagtcgccgcgaaggtgctcgggtcttcggggcactgggtcccatcggtccctcctcacctgggctcac

SEQ ID NO: 813835 - DNA, 99 bp, Homo sapiens
gcggaagaaaatacaaatcacacgcataatggatgaaaggaaccgacagttcagatcttttcctgctgaccctttgatttcaaatgtgcagaggggtgt

SEQ ID NO: 813836 - DNA, 100 bp, Homo sapiens
cacgttctgtgaagcttttggatcgtatccacaatcctgatatgctttcttcatcagcaagcagtcctgctcctgatcccgcccctgaacctgatcctgc

SEQ ID NO: 813837 - DNA, 100 bp, Homo sapiens
ctaagtggatcctctggccagctgactgcacttcttttttgagaaaggaaggaatatatcctgactgattctcattggaggtgaagtgctccctgtgtgt

SEQ ID NO: 813838 - DNA, 100 bp, Homo sapiens
gcaaacctctagaatcagcaccaataattgctgaacatccatttgcgaggacgtgggacttctcagacgtcaggagagtgatgtgagggagctgtgtgac

SEQ ID NO: 813839 - DNA, 99 bp, Homo sapiens
tggatcccaatgattcagatgtggaggagaatatatcctctaaatctgatagagcctccttttcacctgaccagaagaggctggggtgagtttcccgtc

SEQ ID NO: 813840 - DNA, 100 bp, Homo sapiens
gaatatggagactgttcaatcaccagggttaaacccatccagagtaatggctgcggccttacccaggaccctgggggagttgcagctgtatagaatatta

SEQ ID NO: 813841 - DNA, 100 bp, Homo sapiens
gtcgacatgagtgatgtggaggaaaacaacttcgagggcagatttcggtgtctgaactgctcagcttcgcaagtctgctctcaggatggccctttgtatc

SEQ ID NO: 813842 - DNA, 100 bp, Homo sapiens
gttggctttcacaagtacagtctacaaaaagacctgctagagccattattgccccgcctcagctgttgaagaacgctctgcagagagcagtagagagggg

SEQ ID NO: 813843 - DNA, 100 bp, Homo sapiens
agaatttcgatctccgccctggggtcattgtcaggagaaataaagtgtagtccttctgaaagccccttaatggaaaaaaagaatagcttgaaagaagacc

SEQ ID NO: 813844 - DNA, 100 bp, Homo sapiens
ctgcagagcaggctggagcccaagccccagccccctgtggctgaggctacaccccggagccaggagggaactcaccttcgaggcttggaaaccacagcca

SEQ ID NO: 813845 - DNA, 100 bp, Homo sapiens
cggaaactgagtatgggatctgatgatgctgcctacacacaagattcaaggcctcttccagatgtagccctgactgggaagtgcactcgtgagtgtgatg

SEQ ID NO: 813846 - DNA, 99 bp, Homo sapiens
gaaattcccacctgtcaaagagtgctcatcatcactgtaggggacctttgaaagagctgccggagaaggtgaggaagaaagccctgcctggaaagcaac

SEQ ID NO: 813847 - DNA, 100 bp, Homo sapiens
gagtacaggactcgcctcctcagggttccctgtgctgccacttttcagccatggccacaagcaactagaagccatttgtgtcaaggtaacgtctggagaa

SEQ ID NO: 813848 - DNA, 100 bp, Homo sapiens
gttaaaaatgaactgcggaggcaagcttcagaggatgattccgaagaagacggagaccataacaggacatttgatattgcctaacttcatataagacaga

SEQ ID NO: 813849 - DNA, 98 bp, Homo sapiens
atgaggatagcaaaagcttatgctgcacttacagattccagtctgctgttagatgattattcatccaagttgagccccaaaccaaagagagccaagca

SEQ ID NO: 813850 - DNA, 100 bp, Homo sapiens
ggttcttggtgggatctgagcagatgttgaaacatttgtagcagatatactgaaaggagaaaatttatccaagaaagcaaaggaaaagagagaatccctt

SEQ ID NO: 813851 - DNA, 99 bp, Homo sapiens
cgaggctgaggatgatggtagattgccagagcagcccgacggccatggaggctgaagagacgatggaatgccttcaggagttccctgaacatcataaaa

SEQ ID NO: 813852 - DNA, 100 bp, Homo sapiens
gaccttggcattgccacagtgcccaagggccattgtgcatcctgccagaaaccgattgctgggaagacctacagcttactccttgatgtggaggactatg

SEQ ID NO: 813853 - DNA, 100 bp, Homo sapiens
ataaaaaaattgcaagagagagactattttcgttattacaagttcctggaagttcatctaaatgggaggaagtacagtccaaagcaaaccatttattatt

SEQ ID NO: 813854 - DNA, 101 bp, Homo sapiens
gacaacaactagaggaagttaaagcaattaacatagagatgtatcaaaagttgcaggattggcagccaccatttgcatgtgatgttgataaacttcatttt

SEQ ID NO: 813855 - DNA, 99 bp, Homo sapiens
cagttgggactacactaaaccatatttgggaagacgagtgtcttctacaaatgcttctgggaactggaggacccagttaaccatagggctgtcggatta

SEQ ID NO: 813856 - DNA, 98 bp, Homo sapiens
aaggccgagatgggaggaccgttttcctatgtgtatgtgtccgcccagaagatgctggacggtgcctccttcaccctgtatgagttctggcaggatga

SEQ ID NO: 813857 - DNA, 100 bp, Homo sapiens
agacgacaagcacacactatggcgctgaaacggattaataagctaaccatctcagtctttcctgaggacttgggaactgccgaggcctctgccaatgtgt

SEQ ID NO: 813858 - DNA, 50 bp, Homo sapiens
atgataatacctcagtgttcacataactacccctttgctgatgcaactaa

SEQ ID NO: 813859 - DNA, 98 bp, Homo sapiens
ccgagaacatccagtttgatgtttactacaagcaaaatgatgcttcaacacccaggccaggtctctgcctcggaagtgagtgcttctgccatcgtccc

SEQ ID NO: 813860 - DNA, 98 bp, Homo sapiens
cagggctcgtacttctgctcgcagaggacaagaattttgggcagatttgaatgccatgaacgtgtatgaaacaactgaatttgaccaactacgaaggc

SEQ ID NO: 813861 - DNA, 100 bp, Homo sapiens
tatgagcttttgaaacttgttaaggggaagacggaatctatcactgtggtgaagctgctgagctgctttgatgacctggtggcagcaggcacagcctctg

SEQ ID NO: 813862 - DNA, 100 bp, Homo sapiens
gtccagattcaacaggctgccaataaaggagcaagatggctaggggttgcatgatggaatttgaacattacttcaagaggttttgtattttggattagtt

SEQ ID NO: 813863 - DNA, 100 bp, Homo sapiens
gcgaggctgtggaagatgctcccagctacagagggtaccgggatgcctgcaccattactggccatcgaagacggcaatttggaggaaatggaagaggaag

SEQ ID NO: 813864 - DNA, 100 bp, Homo sapiens
gtttcaagagagactactacctaataaggggcatctatgtacttcaggacaacaaatttcgcctgcttactcagatgtctgcaggaaaacagtatttaga

SEQ ID NO: 813865 - DNA, 100 bp, Homo sapiens
gatgttttcacctcctgtgagcagtgggaaaaatggaccaacttctttggcaagtggacattttactggctcaattcaaactggaaacaagatggatgat

SEQ ID NO: 813866 - DNA, 100 bp, Homo sapiens
aagactaaaattggccattaagtaccgtcaaaaagagagcacaacatatgtttcgccaagccatgcgtacacccatcatttggttccatgtggttcctgc

SEQ ID NO: 813867 - DNA, 98 bp, Homo sapiens
atatagaagattctacagcaaggtcaaggttttaaatggcatctgtgacaaaacaatccgatctaccacagatcctgtgatgagccagtgtgcatgtc

SEQ ID NO: 813868 - DNA, 100 bp, Homo sapiens
aaatgaagacagacaataacaagtgttgctgacggtgtggagaaattggaaccctcatacattgcaggaagtccaacccagagatccaggactttatgag

SEQ ID NO: 813869 - DNA, 112 bp, Homo sapiens
tgaagttcgataaagggccgtggctcaagcaggacaatcgcactttataccacctgcgattactgaattacatgaatgacagtcttcgaaccaatgtgtttgttcgatttca

SEQ ID NO: 813870 - DNA, 99 bp, Homo sapiens
gggtgcgttcagcggcattcaacaaatggcaggattaagcatgaaaatattgttgccctggaagacatttatgaaagcccaaatcacctgtacttggtc

SEQ ID NO: 813871 - DNA, 98 bp, Homo sapiens
tggaccgcccgtgtggaaccaaacctgcgcgcgtggccgggccgtgggacaacgaggccgcggagactttgctggaacattatcagatggcttaggga

SEQ ID NO: 813872 - DNA, 100 bp, Homo sapiens
agatgagttgcagcaagtcatacgggaggtaagaagagttcctgggtcaagtggtcaccttcataaaaccgaagacggggactgggagtggagtgacgac

SEQ ID NO: 813873 - DNA, 98 bp, Homo sapiens
cagatcatgatgtttaagaacatgacgccgtcacccttcctgcgattctacttagaaatggtggagtcaatgaagaaagtagcagggatggatgtgga

SEQ ID NO: 813874 - DNA, 100 bp, Homo sapiens
ggatgcgttccctggggtccgggtgttatttggaagatggagcttcaaagggtgcctggctgaaccggtcaagtattatttttgcgggaggtgataagtg

SEQ ID NO: 813875 - DNA, 100 bp, Homo sapiens
gcgtcctcggtccccaggaccacggcttctttcctgccagccatcagcccacaaagacatgactaccaacgcgggccccttgcacccatactggcctcag

SEQ ID NO: 813876 - DNA, 98 bp, Homo sapiens
tctggagtgtagagtcactggaaaccccactcctcgagtcagaaaaggcaacagatggctccctgcaaagtgaggattggacgttgaatatggagatc

SEQ ID NO: 813877 - DNA, 100 bp, Homo sapiens
cgaaatggattggagtgaaccggagaccccgaaaacggaagcgcagggagaaggaagaggtgtttgaaaaggaagtcctggctgagcaaggttggaagcc

SEQ ID NO: 813878 - DNA, 99 bp, Homo sapiens
aaaccgtggctgctcgataaatcagacagaacagttaatcctcaatttaagcctgatctaacccctagaaacaggaatgggtcgggaagttgagaatct

SEQ ID NO: 813879 - DNA, 98 bp, Homo sapiens
caaatatgagaaagctaggccatctgaataactttactaaggcaaatactgtggtctggggttgcaaatgaaccattcaattgaatcaaaaggcaatg

SEQ ID NO: 813880 - DNA, 98 bp, Homo sapiens
ttttgggactcgcctttgccctggcaaacactggaatcctactttttctgagctgatgctacacacatggatggtgatcagattgttgtggaaataca

SEQ ID NO: 813881 - DNA, 100 bp, Homo sapiens
tacagccactgcagtatcacagccaggtctgcgcaggcatggcactaagtgtcccatggcacatttggccctcatggaggcctcaaaagggcaggaccag

SEQ ID NO: 813882 - DNA, 98 bp, Homo sapiens
tttgatgttaagggaagcctgaaaattattgtcgaacaagtaaaattacttgaccgattcagtaccagcaacaagtcattaacaggaacactgtatct

SEQ ID NO: 813883 - DNA, 100 bp, Homo sapiens
aatgtctgtgagctggatttgattttccatgtagacaaggaaagagtaggaaactttttggcagacttttacctggtgaatggacttgttttagaatcaa

SEQ ID NO: 813884 - DNA, 100 bp, Homo sapiens
caaagttgtaacaaccaattacaaacctgttgctaatcatcaatacaatgctgacctctgtgtccctagactgaatgaaggggaccaagttgtactgatc

SEQ ID NO: 813885 - DNA, 99 bp, Homo sapiens
gttgccggggcaggggcggaggcggaggcagaggtggaggcgctttgaaagatttgcctgcaatggataacccagtgtttttggaattacttagattgg

SEQ ID NO: 813886 - DNA, 100 bp, Homo sapiens
caaatacaacccagcagtaggttattgaagacagcagccccagggtgttgctctgttgcccaggctggaaggcaggggcccgagctcagctcactgtagc

SEQ ID NO: 813887 - DNA, 99 bp, Homo sapiens
ttcttccttgaagaaatacagcttggtgaagagttactagctcaagccagattctttggatcggaggcaggaatcctggagaagatgttgagaggttta

SEQ ID NO: 813888 - DNA, 99 bp, Homo sapiens
gcagcggaggctggacgcttgcatggcgcttgaggacttggcagatgaacttgctcttgttgatgtcatcgaagacaaattgaagggagagatgatgga

SEQ ID NO: 813889 - DNA, 99 bp, Homo sapiens
ttctctgctcagcacagccaaggaacagaattagaagaaaaggaaccctggcctgaggtgttacctcattttgaaagtcttgggaaacaggaaaaaatt

SEQ ID NO: 813890 - DNA, 98 bp, Homo sapiens
tattatttatgatgtgttccctgatgcctgcaaagagtttcaagatgcaggtgaacaggaaattttgggaacggtttattgccctgtgtcatgaaaac

SEQ ID NO: 813891 - DNA, 100 bp, Homo sapiens
cgctgccgaagcatgaagaaggggtaaggcgtgagcccccaagatttcacggttggcgtgcagtggtgtgatctcagctcattgcaacctctgcctcccg

SEQ ID NO: 813892 - DNA, 99 bp, Homo sapiens
cgcagaggaggagcgcagcccggcctcgccacataaagaagatccctaatagtcatttctcaacaattatatagtcaactgatgtaacaatggtactaa

SEQ ID NO: 813893 - DNA, 100 bp, Homo sapiens
tctcagatgcttttgaccagaagttctcaaaggtgcctaccaaggtcaaaggctatgacaacctctttgctatggcgttggagaccagggccagccctgg

SEQ ID NO: 813894 - DNA, 110 bp, Homo sapiens
ctcagtacctctgcaatgttcgacacatctttacgattccaggacaagcttttgtccccaaaccagagttttatgaaggatacggacagacagagtgcactgccgggtgc

SEQ ID NO: 813895 - DNA, 98 bp, Homo sapiens
aagtcctctcttctccttgccatcctcggtgagatgcagacattggaaggaaaagttcactggagcaattgctctaggtcgtaaccagcctttgaaaa

SEQ ID NO: 813896 - DNA, 100 bp, Homo sapiens
aagatgtaggcttggagcagaatcaccaagcatcgccagcaccaggtaagaagacaagaggtttcttctcctagaaaagaaacttcagcaaggagtcttg

SEQ ID NO: 813897 - DNA, 100 bp, Homo sapiens
agatgacaatctagaaacttattggcaatcagatggttcccagcctcatttagtgaacatccaattcaggtgctgactgggttacttttttaaacactag

SEQ ID NO: 813898 - DNA, 98 bp, Homo sapiens
tctggagccagtcttgaggtcctacatctccgaaagcaagctcttctagaagttggattatagctggacagacatccgctgcccctttgaaaaacgaa

SEQ ID NO: 813899 - DNA, 100 bp, Homo sapiens
agacccaggagttccaaacagtgctccctttaaggaggctcttcttagggaagctgagctaaggaaacagagggccaccctggagaaatgtgccacgtgc

SEQ ID NO: 813900 - DNA, 100 bp, Homo sapiens
gctttagcaggaggagtgtctacagcaccttctgctcctccagtgatgatgatgatgattttgatgatgaggaagctgaagaaaaagcgccagtgaagaa

SEQ ID NO: 813901 - DNA, 98 bp, Homo sapiens
cctttgggacgagtgctgtgactgtgttgaatcctcactatggatgggctcattgaggacattaagcatcggcggtattatgagaagccatgccgccg

SEQ ID NO: 813902 - DNA, 100 bp, Homo sapiens
atacagatctgcagctcatcaatgctgaggagcagacgagtggccaggcttctggggctgactcaactgatgaagaaggcagccaggatgaatccttaga

SEQ ID NO: 813903 - DNA, 98 bp, Homo sapiens
aggattcaaaaagtttaggactgctaagatggttctgtgaagggaaagaactgcacaacactcctgatattcaaatccactgtgagggaggggacctc

SEQ ID NO: 813904 - DNA, 100 bp, Homo sapiens
cagaggaatcatcacctccaaatactggtcccacgtgatgagccctcctcttcagctaggaaaatgacggtgttcagaaagttaaaacttcttcgctgga

SEQ ID NO: 813905 - DNA, 50 bp, Homo sapiens
tacaaatcaggattcactcagacagatccagatgcagaggtgtgccttca

SEQ ID NO: 813906 - DNA, 50 bp, Homo sapiens
cgaccaagatcaggaacctgccctgcttgacagagccaattcgctattaa

SEQ ID NO: 813907 - DNA, 98 bp, Homo sapiens
actaaactttctgagcttcatgacaatcaggacggtcttgtggaaacttggctgtaacttcaaaagaagatttgattctttatttctggactgcatat

SEQ ID NO: 813908 - DNA, 100 bp, Homo sapiens
ccatgtaccaggcagaagagttccaggtgcttccctgcagatcctgcgcccccaaccaggtcaaagtggcagccgggggccatcaagtataagaccacag

SEQ ID NO: 813909 - DNA, 99 bp, Homo sapiens
caaaacagtgcacagacggctgacggctcacactgggttcatgtgtcacacaagtaggccttctggaaagcgtgtatgaaatgttcaggaaggatgacc

SEQ ID NO: 813910 - DNA, 99 bp, Homo sapiens
cacacagtgtccagatacgaggtctacgcctgcaagctctcagaccgggaacatccactctacctgcgtttggtagcagggcccagaacagacacactt

SEQ ID NO: 813911 - DNA, 100 bp, Homo sapiens
aaagaacaaattcattgctgcacaaggtaacctttgatgtagcttggtctccaaagaacatagacagaagatgctataattatactggaatcgcagatgc

SEQ ID NO: 813912 - DNA, 100 bp, Homo sapiens
ggccaatgtgggatcgatgtttcaatattggaagcgctttgatttacagcagctgcagttggcttcctgaggctcaggtagtccaaagagccctgaattc

SEQ ID NO: 813913 - DNA, 98 bp, Homo sapiens
cccaacattaaatgaaagatatttattacttcatctgcttggtagaggtggctttagtgaagtgtataagtgggcaagttacggaagcaatggctaaa

SEQ ID NO: 813914 - DNA, 98 bp, Homo sapiens
aagttcgggatgtggaaaagagctttatgtctagcaagcacatctttgcactctttaatacagagcaaagcggacggaatagacctcagcagcggcgt

SEQ ID NO: 813915 - DNA, 100 bp, Homo sapiens
gaggatctggtgtaccaggcgaagctggccgagcaggctgagcgatacgacggtacacagcttctcctagcatgacttcgatctgatcagcaaacaagaa

SEQ ID NO: 813916 - DNA, 51 bp, Homo sapiens
agaacgtcccgctggatctgacccgagagcagtgtgacctttgaagacgtg

SEQ ID NO: 813917 - DNA, 101 bp, Homo sapiens
aagaaaacgagccagtgatttacaatagagcaagagctcctgaaattattcttgggttaccattttgtgaagctattgatatgtggtcactgggctgtgtg

SEQ ID NO: 813918 - DNA, 100 bp, Homo sapiens
ctccaaattcattcttgacctcatactgaacaagtcatcaccgagtggtcttctcacatcatccttcaggcagcaccaagagtcactggcagcagagaga

SEQ ID NO: 813919 - DNA, 99 bp, Homo sapiens
agggctctgatcaagcggatccaagccatgattcccaaggtggtcctgggcggtggtcaggaagccatggatgtaaccacaacctccaccaggattggc

SEQ ID NO: 813920 - DNA, 100 bp, Homo sapiens
ggagtgcttatgccaagaggaacagcagtgtaaatgactcagaagagaatggcatggatcaagaaaatcccccttgtgaagaagaatcagcagttcttgc

SEQ ID NO: 813921 - DNA, 100 bp, Homo sapiens
gctgagggtctcggggcgggcgccgcgggacctctccgggccatggagtccggcagcgtcttctcttgagggagcaatttggagaagagctggaacccag

SEQ ID NO: 813922 - DNA, 100 bp, Homo sapiens
tgctgcagcagcagtacgatccccagagccagtgctacctgggcgatgccttccgctgtgccagctgcccctaccttgggatgccagccttcaaacctgg

SEQ ID NO: 813923 - DNA, 100 bp, Homo sapiens
ctgataagacctcagatcagacagagtctacaaataagaaacctcgaaaatctccaggtgagaagagcagaattgaagctggaattagaggagcaggccg

SEQ ID NO: 813924 - DNA, 101 bp, Homo sapiens
tgactgttaccggctcaggaaaagccggccacgcagtgggcaagtgtccagagaatggctgggatgaaagtacacttgaactctttttacatgaacttgca

SEQ ID NO: 813925 - DNA, 50 bp, Homo sapiens
caaatccatcaagctcatcaaaagaggtcggatccgcagctgcttgcccg

SEQ ID NO: 813926 - DNA, 98 bp, Homo sapiens
cccaccatccctaaccggctggctgcagacccgggaagtgttcgccagttactacatgaaaagataagagatgcttatactcacccacaatttgtgac

SEQ ID NO: 813927 - DNA, 98 bp, Homo sapiens
gagagagagaaagaggaggggaggaggaggaggattcagggaataggagctggggagcccttctgcgccacagttgctgatatgtgttcaagatgagt

SEQ ID NO: 813928 - DNA, 99 bp, Homo sapiens
cgtatactaaccaacaattctcagaccccaatcctaagccctcaggaggttgtgtcttgtagccagtatgctcaagaaaacctggaatcagattacttt

SEQ ID NO: 813929 - DNA, 100 bp, Homo sapiens
acttcttgataataatttacaatgaatggacacagtgatgaagaaagtgttagaaacagtagtggagaatcaaggaaaatggttctcctgaagaacatgc

SEQ ID NO: 813930 - DNA, 100 bp, Homo sapiens
cgaaaggcatttttactgctgggtcttgctctgttgcccacgctggagtgcagcggcgtgatctctgctcactgcaacctccacctcctaggttcaagtg

SEQ ID NO: 813931 - DNA, 99 bp, Homo sapiens
ggggccctcttgataaaaagagatgtggggggattctcgacctgctaacagaactggaccttttcggtatggcgttgacggtggatgtggccgggccag

SEQ ID NO: 813932 - DNA, 121 bp, Homo sapiens
aagtgagcgccaatgtccaaaacgtgaccactgaggatgtggagaaggccacagattgggcccaaatggaaggatgtggtgaccaaatgcatcaaggggcattatcagcccctgctgctgc

SEQ ID NO: 813933 - DNA, 98 bp, Homo sapiens
agtgatctatcaggcaccagacttgggatcagttataaactctagagtgcaagatgacgattactttgccaccctgagggaactggaagctacccttc

SEQ ID NO: 813934 - DNA, 100 bp, Homo sapiens
ctgctgcacaccgagtactcactgctgtctctcctgcacacgcaggatggcgtggtgcaccaccacggcctcttccaggatatgaattgtctcccacggc

SEQ ID NO: 813935 - DNA, 100 bp, Homo sapiens
cctgaggcagctcggcctgcagatgagcctacccctgccagcaagtgctgcagcaagccacaggtggtgaattacttggaaactgcacaacacacccgct

SEQ ID NO: 813936 - DNA, 100 bp, Homo sapiens
agaggaatctatacaaagaagtgatgctggagaattacaggaatcttctctcattgggtttttggcgcattctcacagacttagatgaaactgtgatggc

SEQ ID NO: 813937 - DNA, 100 bp, Homo sapiens
ttatgaattggatatcaagccagagaagtgcccgaggagagttaacagctctgatgaagccttcagtaaagtcaatttaaattaccgcactgaaaatggg

SEQ ID NO: 813938 - DNA, 100 bp, Homo sapiens
ccctgtcgggtacacaggaccacgctgtgagagctcactaccctgggaaatcttacaccttcaagcactgtgtttttctgctgtgatatgcaggaaaggt

SEQ ID NO: 813939 - DNA, 98 bp, Homo sapiens
gttctgagactctaggcaggctggcaggcaacaccttagggtgtggttacagaggaggctacatggaggtgatcaacctgcaccctgagatcaagggc

SEQ ID NO: 813940 - DNA, 114 bp, Homo sapiens
ctctcatctcgctcggctgcgggaaatcgggctgaagcgactgagtccgcgatggaggtgtcttataagactttgacacttcctgttttgtctgaaaaaaatgtgaattacctg

SEQ ID NO: 813941 - DNA, 100 bp, Homo sapiens
tccaggtgagactttcacaataagagcagaggatggaacacttcagtgcattcaagggaaatcctcattgacgattcaatttgttgaaggccaatttgtg

SEQ ID NO: 813942 - DNA, 100 bp, Homo sapiens
catttcatgaaagccttccagaaaatagtggtgcttttttataaaggtttccaatacttatctacaggaatcgccatgaccccagctctgagggaggcaa

SEQ ID NO: 813943 - DNA, 100 bp, Homo sapiens
cgtgtgtcttcagctggatcgaggagcactgtaagcctcagtgcatacaccgagacctggcagccaggaatgtcctggtgacagaggacaatgtgatgaa

SEQ ID NO: 813944 - DNA, 98 bp, Homo sapiens
tgctgaagcctttaaatgcagcatctgcgatgtgaggaaaggcacctccaccaggaaccaacgtccaagaggcccagaagatactcaacaacagcgga

SEQ ID NO: 813945 - DNA, 100 bp, Homo sapiens
cagaagctggtctctgaggtctggcataagaaacggtcccctctgagccctctcaccttgtcctgtggaagaagcacaggctcctgtcctcagatcccgg

SEQ ID NO: 813946 - DNA, 100 bp, Homo sapiens
aaaaatggactccaaagagctaactttgtaccattcatagcagtcttgaaggctgttcggctcttgaatcccagcgatgaaaccaggaactcactttccc

SEQ ID NO: 813947 - DNA, 100 bp, Homo sapiens
tatgaatcggtttaccacagccttaatagttttcggctttgtgagaaaccttaccatcaaacacgatggccagcaacgttaccaacaagacagatcctcg

SEQ ID NO: 813948 - DNA, 100 bp, Homo sapiens
agctgggcctgaccaacccgaaaacattgctagcctccagggtcgtatagacctccccctcctatgggcaaaccaccaggttcaattgtaagaccctctg

SEQ ID NO: 813949 - DNA, 98 bp, Homo sapiens
aagattggggccttctgattattttgagagtgaaccacgagacgctggaactgaccaacgtagctctggcattattcgcctgcatacaataaagcaaa

SEQ ID NO: 813950 - DNA, 99 bp, Homo sapiens
cgcccaaggtctctcgcgggcgggagaacggaaaactcccaacttcctgattcgagtggtgaatgcatttcgtagttctttatatgaagggttagaaaa

SEQ ID NO: 813951 - DNA, 100 bp, Homo sapiens
ccgctgctgctgctgctgctgcgcctgggccaggtactccaaagattcaggtttactcacgtcatccagcagagaatggaaagtcaaatttcctgaattg

SEQ ID NO: 813952 - DNA, 100 bp, Homo sapiens
taacctatcgggttctctctccgcgcgttcaggctgaagagatcactttaacaattggccaagcatttgacctggcatacaggaaatttctagaatcagg

SEQ ID NO: 813953 - DNA, 100 bp, Homo sapiens
agactggtggactgttcatcattctgttgaagaaacgcttaacccagtgaccattgtgaggtagatattttgttctaattttccagatgaggaagctgag

SEQ ID NO: 813954 - DNA, 99 bp, Homo sapiens
ctctaagtacatgcccagtggatactccatgtgacatggtttctccctatgttacgtggatgtttgtaacctggaaaggcagctcatcatgcagagtga

SEQ ID NO: 813955 - DNA, 100 bp, Homo sapiens
aacatgaatgtggtggaataagtgctagtatcggacatgatcctcatcttttatacactcttagtgctgtccaggaactagtttcagaaggaccagttcc

SEQ ID NO: 813956 - DNA, 98 bp, Homo sapiens
ctacttccaggactcggggctctcacgctttctgctcaagtcctgtcctcttctgaccaaagaaaaagaacgccctatatcattaggaattttcccat

SEQ ID NO: 813957 - DNA, 100 bp, Homo sapiens
cttggagcgcttaaacaggctggagaccctggccgccattggagaaatcagtcaggagacggctgtgaatcctgtggacattgtcagcactctgcaagcc

SEQ ID NO: 813958 - DNA, 99 bp, Homo sapiens
caagatgaaagcagcagttttcatcatctaagtgaaagataacaggaggcgcagggttcgtgggctcccatctaactgacaaactcatgatggacggcc

SEQ ID NO: 813959 - DNA, 99 bp, Homo sapiens
gcaaattcacaaaaacttattccgacattcagagttgtttcctccatttgctaaaggaatagtgtttgggtcccgggattcttgagctgtgcccagctg

SEQ ID NO: 813960 - DNA, 100 bp, Homo sapiens
gtcgtctggctacgtggagcggctgaagggcatgtccctgcttgtcagggctgagagcgacggtgggaacattctccatggccagtgaggaagtcttgaa

SEQ ID NO: 813961 - DNA, 100 bp, Homo sapiens
ttccttcccattgtttaaggatgacctgtgtaaagatgattttaagctggatgaactgcagctttgcaagaattgcttttacttgtcaaatgctcgtcct

SEQ ID NO: 813962 - DNA, 100 bp, Homo sapiens
ctacgtgccctatgtgccgttacggcagcgccggcagctactgaacattcctgatgtagatgaagaaggctacagtattaaaccagaaacaaatcagaat

SEQ ID NO: 813963 - DNA, 100 bp, Homo sapiens
tactttgctgtgaatgtgaagaatcagaaatctttactgattccaatattttaccaaatgttgcaagaactctggagttcttatggtagtaaaatgccgg

SEQ ID NO: 813964 - DNA, 100 bp, Homo sapiens
ggaactactctacggcatctggagcaactggatgacatctgaactggagagcagcctaacgtctatggactggttaccacagctcaccatgagagcagcc

SEQ ID NO: 813965 - DNA, 100 bp, Homo sapiens
cttcccggttgatcgtggattatttgaggttcctccccgggcagaagaaatcaccattccagctgatgtcaccccagagagagttccaacacacattgta

SEQ ID NO: 813966 - DNA, 104 bp, Homo sapiens
cctggaaagtttgcagaagtggaaggagcagaacgtgagggtgtaacttacaaaaagtggtgaagttcatggatgtctatcagcgcagctactgccatccaatc

SEQ ID NO: 813967 - DNA, 101 bp, Homo sapiens
agtcagcctctggttcagactgcagtaaccaggaggagatatcaccaaacatgatggaacaggcggacagtccatttatggagacaaatttgaagatgaaa

SEQ ID NO: 813968 - DNA, 100 bp, Homo sapiens
caaagggaacctggcacctcaaggatcggacatatctgaagagatggattaagaatgctttggattaaggattgtggagcacatttcaatcattttagga

SEQ ID NO: 813969 - DNA, 100 bp, Homo sapiens
gagtcgaaagtgaaattttcctttggccaacgtgacagaaaatatttacaccagcagctccagttcataccaataaagaagatcctgctacccaaactaa

SEQ ID NO: 813970 - DNA, 100 bp, Homo sapiens
aaggagttgtttcccattgcagcccaggtggataaggaacatctcttcccagcggctcaggccctgtctctgcccctggtggtcatcgtccatggcaacc

SEQ ID NO: 813971 - DNA, 100 bp, Homo sapiens
tgtcccttcaaagatgtgagagagaaaagtgagtttattctgaagagcatccaggaccaggagctgcattatctattctagacaaatttcttgaagaatc

SEQ ID NO: 813972 - DNA, 100 bp, Homo sapiens
ttcaatatcagcaaaaacctgcggtcattacacatgctattggggtcaggcccagccccaggcccagtggtattactgaattcactgaatgtggatgcag

SEQ ID NO: 813973 - DNA, 100 bp, Homo sapiens
ctatgtttccttcttcctcatcatcgtcttcaggaagccagacagattcaagtattgaaggttcagaatgctaagcaagtaaacagtgcacttaaacaga

SEQ ID NO: 813974 - DNA, 100 bp, Homo sapiens
cagtccaaagcctcttacagcctggggagtgcgagagaaacccagccgaagcatttaaaaggcactgaaggatagcacagaagtagaaattgtggatgag

SEQ ID NO: 813975 - DNA, 100 bp, Homo sapiens
gatcgttcagaggctttggcttgggctaaagaggtcgtggatctgtgccagttcagaagcaggcgagcctcttccctgatgaaaaagaagataacttgct

SEQ ID NO: 813976 - DNA, 100 bp, Homo sapiens
cctcggcctcccggcgcccttcagcgaggaaggtgacttcatggtcatgacgattttcttcaatgtgagcaggcggtttggctatgttgcctttcaaaac

SEQ ID NO: 813977 - DNA, 100 bp, Homo sapiens
atgcagtatttctttggcatcactgcagctagtaatttgccttctggattcttctccatatacaacctcaactccaaacatcaacagtgtgagaaatgct

SEQ ID NO: 813978 - DNA, 100 bp, Homo sapiens
gggctgaagcgactgagtccgcgatggaggaaaggcagcaacaggtggaagctgttgagttggaggctaaagaagttctcaaaaaattatttccaaaggt

SEQ ID NO: 813979 - DNA, 100 bp, Homo sapiens
gagaattgtggatattttggtggggtgaagaccccagttttgctgaccttattcaccatgacttatcagcaattctgtggtgttcttggtcacacattta

SEQ ID NO: 813980 - DNA, 98 bp, Homo sapiens
tgaaacctggtgtgatgatgaatccaaacaaagagccaaaacaattgatctggatgttggttcctgcaaacaagaactgaccctatcacctctgcctc

SEQ ID NO: 813981 - DNA, 101 bp, Homo sapiens
gttttaattcttcggaaataccaagtggtctcttaaagcccaatctgcaggtgttgcgagcccgattctctgagatcacaccccatgccgtcaggacagct

SEQ ID NO: 813982 - DNA, 98 bp, Homo sapiens
ataaggttgaaacattttctgaatcaagaaatgccagatctggagtaaggaatattgtcatcacctggattttgagaaagaaaaataacttctctgca

SEQ ID NO: 813983 - DNA, 100 bp, Homo sapiens
cagttgtgatgcagtgggtgtctacacacttctgatgacacctttattttaaaagctgatgttccaagggtgcagcagttggaggaagaaaatacagagc

SEQ ID NO: 813984 - DNA, 50 bp, Homo sapiens
cggcgcgacccggggaaccggcattgggcaaacttgaagataaatctttt

SEQ ID NO: 813985 - DNA, 50 bp, Homo sapiens
gctggacggagctccctggctgaggccgtcctcatcgtcagcgggaacct

SEQ ID NO: 813986 - DNA, 98 bp, Homo sapiens
cagggcagcatctctggtgcatgctgatgacgaaaaacaaatcgagctatagcagattatcttcgttcaaatggctatgaagaggcatattcagtttt

SEQ ID NO: 813987 - DNA, 100 bp, Homo sapiens
ggagtatcaaactctgctgccaaggttcctaaagagaaagatgaaatggtagagcaagagtttaaccggttgctagaagctacatcttaccttagtcatc

SEQ ID NO: 813988 - DNA, 99 bp, Homo sapiens
aaccagtggtaattaccatcaatactatggaatgcattttgaaacttaaggatgggatacagacaaatcttcctattttcaagctgaaagaatctactg

SEQ ID NO: 813989 - DNA, 100 bp, Homo sapiens
taacagcagctgggaaagaagttatgcttgttggaattggtgacaaaatcagaggcatactttataggaggagatgttaaagtaacccatcttgcaggac

SEQ ID NO: 813990 - DNA, 100 bp, Homo sapiens
gcactgtggtcctgggaaagctggaatcaggatctatttgtaaaggccagcagcttgtgatgatgccaaacaaggagctcttgaaacaacatcaaagtga

SEQ ID NO: 813991 - DNA, 100 bp, Homo sapiens
agccacatagttgggccagagtcgggcgccagctgcatggtgcagatcacatgactatatgaaggaagaggaaggttttcctgaagatgaggcgactgaa

SEQ ID NO: 813992 - DNA, 100 bp, Homo sapiens
cgaaaggaacgcaagaacagaatgaagaaagtcagggggactgcaaaggccaatgttggtgctggcaaaaagttctgcaggctggaaatccaagatgaag

SEQ ID NO: 813993 - DNA, 98 bp, Homo sapiens
actaggggcgactgcctggggcgccggcgagcggagctggagtttgttcagatcatcatcatcgtggtggtgatgatggtgatggtggtggtgatcac

SEQ ID NO: 813994 - DNA, 100 bp, Homo sapiens
gtctgtcgggggcgcgctcgggtacctgtaccccacgtagtcgccggttaccgatcggactaagttccaggaaagtggagaatgaggacatgaataaaga

SEQ ID NO: 813995 - DNA, 100 bp, Homo sapiens
tcgagtcctggaggaggatccccaagtagggggagtcgggggagatgtccaggcactgacacccacttagtctttcgtcctctcatggagaaggtggaag

SEQ ID NO: 813996 - DNA, 100 bp, Homo sapiens
ataacatatgcctttttgcttatggacagacaggctctgggaagacatataccatgctggggaccccaggaacagattctccgtgtgaaggctgaagaag

SEQ ID NO: 813997 - DNA, 98 bp, Homo sapiens
gacactttgttattggagaaacatgcagattatatcgcatcctatggctcaaagaaagatgattataaaccgtcacaggaacggggaaaaagtgcagc

SEQ ID NO: 813998 - DNA, 100 bp, Homo sapiens
caccatttcttcctaaaatcttcatcaaacccaatgctcagaaacctctccctcaagcttattgcagaagaattttgtctaaaaacattttcgaagtttg

SEQ ID NO: 813999 - DNA, 99 bp, Homo sapiens
taaattcaacaggaacagacaagttaatgacaggtgtcattagccctgagaggcgcacatcaaagctgcccaatgatctgcttgatttgcagcagccaa

SEQ ID NO: 814000 - DNA, 98 bp, Homo sapiens
atgagacgctcaagtttgtggcccgcaactacctggaacctggtacactgaggaggggacggctccgtcttcacattgtgcacagatctgaggatggg

SEQ ID NO: 814001 - DNA, 100 bp, Homo sapiens
cccactgagtatgtcggaggagagcgacatggacaaagccatcaagctaaagattccaggcttcaagatcagaggcagaactctcctgcagggaataaag

SEQ ID NO: 814002 - DNA, 100 bp, Homo sapiens
gaaacctggatctgcgatctgtttgtggtgaaatgacaatggatgctctgttggctcgattgaaacttctgaatccagatgaccttagagaagaaatcgt

SEQ ID NO: 814003 - DNA, 100 bp, Homo sapiens
ggctcaagcaattccccagcctcagcctcctaaagcgttgggatttcaggggctgataacatccggaaatactggagccgctactaccaaggatctcaag

SEQ ID NO: 814004 - DNA, 125 bp, Homo sapiens
ccccaaaataaaaaaattgcaagagagagactattttcgttattacaagccacctcgtacatctcatcctgtagtgaagttttcctgtacagactgtgaaccaatggttattgataaacttcctt

SEQ ID NO: 814005 - DNA, 100 bp, Homo sapiens
ctgaagggggccaggccggccatgagcagggcagtgttatagttttgccgctggactcttccctcccttcccccaccccatcaggatgatatgagacttg

SEQ ID NO: 814006 - DNA, 100 bp, Homo sapiens
taccatacggccgcctctacccttggcagccaagagacagggcagggcattgttcatgcactgaccgacctcagcagccccggcatgacctcagggaacg

SEQ ID NO: 814007 - DNA, 100 bp, Homo sapiens
ccctaccatttattctacctcagtcaccgacagcaaggctatgcaagtggagagctgctcctcagccgtgggggattaaagcaaggagagccaatcatga

SEQ ID NO: 814008 - DNA, 98 bp, Homo sapiens
caacctccgggaagggatgtctgtgctcgtgcactcagctggtgggggcgtggtggggacccatcgtgaagatggcgtggccctgagaggcagccatt

SEQ ID NO: 814009 - DNA, 100 bp, Homo sapiens
tatgaaaccatgggacgagctttgaggaatcacccttcggtcatcgtgcagcctgggaagagacctttacctgtggaatccccggatactcaaaggaagc

SEQ ID NO: 814010 - DNA, 100 bp, Homo sapiens
gtcaatcccagatttgttgccataatcatagaggcaagtgggggaggagcgttccttgtcctccctctgcacaagggtcagtatagaccttctgatttgc

SEQ ID NO: 814011 - DNA, 98 bp, Homo sapiens
ggaagcagatagcatagctgctgtggctgaactacgacaacacattgctgagcttgaaatccaggacgccaggaaagcatgtgcagatgcaactctct

SEQ ID NO: 814012 - DNA, 98 bp, Homo sapiens
tcaaagcacctagtacctcctaccattgtcaactgagaaactccagaaaatcttgccaaacttctgaccaggatgtatttaaaatcagaagtcatagg

SEQ ID NO: 814013 - DNA, 100 bp, Homo sapiens
aaagaggctgcccagaaagcagttaacagtgccaccggtgttccaactgtttaaaatacagaattcgttgttgggaaggactggggaaacagctgtaaca

SEQ ID NO: 814014 - DNA, 112 bp, Homo sapiens
tgattgaggagaacattgataaaattctgccaattatgtttgccagtttgtacaaaatttccaaagaacactggaatcctagagacggggtttcaccgcgttagccaggatg

SEQ ID NO: 814015 - DNA, 121 bp, Homo sapiens
acgtcacgcacacgctcggcgctgcgatccgcgcatataacggagcaccatactggaccaacacagaaaagatggaaaagcggctccatgctgtgcctgcggccaacactgtcaagtttcg

SEQ ID NO: 814016 - DNA, 99 bp, Homo sapiens
tcatcgagaagaacctcgagagcaagaaccaccccaagctgctgctacgcagagcctttgcactggcgatgccatctgctgcctggatgtcttcctgct

SEQ ID NO: 814017 - DNA, 98 bp, Homo sapiens
tggccatgtagaagttgatgaatcaagaggaatgcacatctgtgaagatgctgtaaaaagattgaaagctgaaaatcctgccttgcttcgttgggcct

SEQ ID NO: 814018 - DNA, 98 bp, Homo sapiens
ttgaagtacaccgtggtgacattgtatcattggttgtatgtggtagaagaccaaagaagagatgagctaggaccatccacctgcctcacagcctgctg

SEQ ID NO: 814019 - DNA, 100 bp, Homo sapiens
gccgtgccccagatgcccaccgggatggagaaggaggaggaatcgcggaagatccatccaaaagctatgtgaaattacgagactttgtgcttgtgaagct

SEQ ID NO: 814020 - DNA, 100 bp, Homo sapiens
caggctttctggttggaatatctatagcagtatttctgcatgtagagcgcatgaagtacaggacaataaagcttcctacacatatcaccaggaggatctc

SEQ ID NO: 814021 - DNA, 100 bp, Homo sapiens
gcaggtactgggagatccatagggaagaaggcggaacatccggaggctgggaaatgggaaatctgcttcgccactgaaggtactctgcaccccagaagga

SEQ ID NO: 814022 - DNA, 99 bp, Homo sapiens
tttattcggccgggatcttcggcaagactcacgtctccaacaaccaagctccccaattggtagctggcagtgttgtgatggcttttgaagaagtatgcc

SEQ ID NO: 814023 - DNA, 100 bp, Homo sapiens
ggaaggctctggcttgggacgaaagtgtcaaggcattacggctcccattgaggccctggccaacgtcaacattgggagcctcatctgcaatgtaggggcc

SEQ ID NO: 814024 - DNA, 100 bp, Homo sapiens
tcctcaggagtcatttctgttccgcacaggcctgctgaactgggtgctttatataggcttcagctttagctgcagctgcctctgttcagccacttgcaac

SEQ ID NO: 814025 - DNA, 99 bp, Homo sapiens
gtctttctcagcaccttggcgaagccttgggtttctttcttaaaggactgatttttagaactccacatttgagaaatctctaccccaaatttgcgtcac

SEQ ID NO: 814026 - DNA, 100 bp, Homo sapiens
ccaacggctcaagaatttcaagaacaaaggccgcgacttggaggaagccagttgagggaagttctccatgaatgtacgtcacaatgatgatgaccgacca

SEQ ID NO: 814027 - DNA, 98 bp, Homo sapiens
cgttcttgagtcgggaaatggccgctgtgtggttgcaacggagataaattcccggaaccgcgattcggcgtgtcagagtcgggccacaaaaagttaaa

SEQ ID NO: 814028 - DNA, 100 bp, Homo sapiens
gaaaaagatagtcttccaattgatctttcagaattaaatttcaaggataaagatttggatcaagaagagttaagggaagaaagtcggaggctggctttgg

SEQ ID NO: 814029 - DNA, 98 bp, Homo sapiens
gcagagagagagcgcgagagatggagatgggcagacggattcatttagagctgcggaacaggacgccctctgatcttggttctacagccattgggatc

SEQ ID NO: 814030 - DNA, 100 bp, Homo sapiens
cagatgtcaaatttgtttgtcaggatcttaaggagcctacgtggaagcagtggagagagttcctggtcaaatactccttccttccataccagctgattgc

SEQ ID NO: 814031 - DNA, 100 bp, Homo sapiens
agatgccaggcagatttataaccctcccagtgggaaatatagcagcaatttgggcaactttaattatgcaaacttccttgataacatgcttttgcgaagt

SEQ ID NO: 814032 - DNA, 100 bp, Homo sapiens
ctctgtggtgcctggggctgaacgcggctttctgtactatactggcaattgctggagaagattttgcaattgttgcttctgatactcgattgagtgaagg

SEQ ID NO: 814033 - DNA, 100 bp, Homo sapiens
cctgcagtggcgcctaaagtctgagagagggaagtcgcctctgtgctcgtgagtgcatggggtataagctcctgttggatcaccaggatgccattgctcc

SEQ ID NO: 814034 - DNA, 99 bp, Homo sapiens
acaggagtcaatggcaaggctaaagaaattaatgacaataatggatagtatgaatgatcaagaagtcaaattttctactactctactgggatgactgtg

SEQ ID NO: 814035 - DNA, 99 bp, Homo sapiens
ttttctgagaatacttgctgaaaaggaagttttctggaatggtacttctgaaattcctcagttccggctgccgtatgatgtagtgaattttgagattga

SEQ ID NO: 814036 - DNA, 98 bp, Homo sapiens
ataatcaagtaaaaacaatagctcaaggaaacctttccaacacagatgtccaagctgccaaaaggcggtcaccttctccttactatagtcgtggagga

SEQ ID NO: 814037 - DNA, 98 bp, Homo sapiens
ttggtgccttggttcatccctaagggtcctaaccgggggatgccaaccctgtggtaattgagccatcatctgttttgaatggaggaaaatactcattt

SEQ ID NO: 814038 - DNA, 98 bp, Homo sapiens
atggctcattgtagcctcaaactcccaggctcaagcagtcctaccatgtcagccttcccagtagctgggaccacagccactttttactactaaactga

SEQ ID NO: 814039 - DNA, 100 bp, Homo sapiens
gtcgggacaccccggaagctgggaaatggcccaacatgcagcagaaataggagctgatggcatcgctgtcattgcaccgttcttcctcaagccatggacc

SEQ ID NO: 814040 - DNA, 98 bp, Homo sapiens
gggaagagggagagcaaacttggctcagcccacaaagctctgcaggaatattctcagagcttcatcgtgtcactcgtcctggggaaggatgtgattcc

SEQ ID NO: 814041 - DNA, 100 bp, Homo sapiens
tcctgaaatgcttcatgggatggcccctcagcaaaagcatgggcaggcctactgaacttgacgcactggtatttggccatctatacaccattcttaccac

SEQ ID NO: 814042 - DNA, 100 bp, Homo sapiens
gcagcccgagcccatcaaggtgtacggacaggcttttattgagatggagacaagagaagatgcaatggcaatggttgaccattgtttgaaaaaagccctt

SEQ ID NO: 814043 - DNA, 99 bp, Homo sapiens
agtgttgttaaacacaaaccaccctttaaattttcaagggaaggacaggaggagcatattatttaatatctagaagtctagggccagaatttggtggtg

SEQ ID NO: 814044 - DNA, 74 bp, Homo sapiens
gagacacagagggcagtcatgagggccgttgctccagggagaactgcaaatatcttcatccacccccacattta

SEQ ID NO: 814045 - DNA, 100 bp, Homo sapiens
gctacttcatattttggaaagcagtttttaagacaaggaagtgccagacacagcttcagaatgtgactccttaaattcttccattggaaggaaacagtct

SEQ ID NO: 814046 - DNA, 102 bp, Homo sapiens
tcaggtccacccatctggccgggcagtaccttcttcaagagaaatggagcccttctccaaggacatccataaaaattcatcagagagcattttactactgag

SEQ ID NO: 814047 - DNA, 100 bp, Homo sapiens
tctcgatgaggataacatccctccagaagatgttgccctcaaattggctgtagccacacggatataagaaagtcagatcttatccaggatgaagcactta

SEQ ID NO: 814048 - DNA, 99 bp, Homo sapiens
cggcaagagggagttaaggacattccaggcagaggcaagagatgctgcctatggaagttgcaatttctacattacacttcttgactgttttcatgcagt

SEQ ID NO: 814049 - DNA, 100 bp, Homo sapiens
aatctggaaagatgttagaattgaagcctataatatttgtcacctgaactacttcacattttccccaatatatgatgctgagactcttggtgaatctctc

SEQ ID NO: 814050 - DNA, 100 bp, Homo sapiens
ctgccgctatggatgatcgagaggatctggtgtaccaggcgaagctggccgagcaggctgagcgatacgacggatgacgtagctttgccaaagacttaga

SEQ ID NO: 814051 - DNA, 113 bp, Homo sapiens
tgaaaagaaagttcgcaaattacttccggaacgtaaacctgaaccaaaggaagaagttgttctgaaaagcgctcgatgcattctatttctcatcatttggctcataactggag

SEQ ID NO: 814052 - DNA, 98 bp, Homo sapiens
agtttaaaaaggaaaaggttcagaagcagaagacaagttcacagcctggagaacttgcgcctgtcaggggctggatccagaaacctgtggtgcctcct

SEQ ID NO: 814053 - DNA, 100 bp, Homo sapiens
atcctgaggtttatagaaaggattcatgactttgtaatggaggtaataaagacatcacatgggtaatgttagaagctggtgctgagacagatgttgtcaa

SEQ ID NO: 814054 - DNA, 100 bp, Homo sapiens
ccagccagaccaggaacccaccagaaggaaccaattccggacacataacaagcagcagtgaggacaccaaagatcagcctctgtggactcggtgcttctc

SEQ ID NO: 814055 - DNA, 100 bp, Homo sapiens
tttttatttttttaatggctttacagaatcttaaatagaatacagtttgacatgacggcaaaaaatgttgcctgtgatttgcttcggaggattattcgta

SEQ ID NO: 814056 - DNA, 98 bp, Homo sapiens
gccaagttcatcaagaacataccttggaattttgggcagaaggaacccagccagccggcggaatgcaagcagcagtaggaagcggaggcgggtgcctg

SEQ ID NO: 814057 - DNA, 101 bp, Homo sapiens
taccaggagaggagggaactgcggagcggcagctcttgccaggtaaaaagttttgggaaacagatgaatccagcaaagatggaccaaaaggaatattcctg

SEQ ID NO: 814058 - DNA, 100 bp, Homo sapiens
agcgggtgtgggcgctgttcgacgtgcggcccgaatgccagcgcctcttctaccggggcaagcagcatgcttttcacttccactgcatctctcgctggct

SEQ ID NO: 814059 - DNA, 100 bp, Homo sapiens
gcaaacctttacatagcagtggaatcaatgtaaatgcagctccattccaatccatgcaaacgatgataacaccctatgcccattgtcctgatctgaaaat

SEQ ID NO: 814060 - DNA, 100 bp, Homo sapiens
tcgggaagccattgtgaacagctgtgtgtttgttcatcagactcttcaccaggacttggatgttgtgggtgatggtatgcagtgtcctccttcacctttg

SEQ ID NO: 814061 - DNA, 100 bp, Homo sapiens
ctgcttgttcgtctcactggtgtgagctccagcatcccctttgctcgaaatggaccccaactgctcttgcgccactgttgctatagcccaaggtggaaca

SEQ ID NO: 814062 - DNA, 100 bp, Homo sapiens
gaaaggttaaaacaagaaattgataatgccagagaactacaagaacagagggattctttgactcagaaactacaggaactttatattgctgttggaatat

SEQ ID NO: 814063 - DNA, 99 bp, Homo sapiens
gggtggggaacatgtctgagtcggagctcggcaggaagtgggaccggtgtctggcggatgcggtcgtgaagataggaagattcttacctctgaagacaa

SEQ ID NO: 814064 - DNA, 100 bp, Homo sapiens
gggcctgctctccaacttccctgacatcatccatctacaaaaagagctggaagtcgagtgtgctactcaactcaggagatttggagacaaactgaacttc

SEQ ID NO: 814065 - DNA, 98 bp, Homo sapiens
tagactctcgccaaagccgctctgggcaaggtctgggaggggctgaacgtggtgaagacaggccgagtgatgcttggggagaccaatccagcagattc

SEQ ID NO: 814066 - DNA, 98 bp, Homo sapiens
tggacatggaaccccagggctgcctggtggctgaggttgctggtaaaattcctcctagtgtccaagtggaggcagcttgtcttctgtcccagcatttt

SEQ ID NO: 814067 - DNA, 100 bp, Homo sapiens
gacttcagtgatgccagagaaaagaagaagccaaagaaagacagctccttatcagctgtgccggctgttcggacggaagcatcaggctgcaccagctgag

SEQ ID NO: 814068 - DNA, 100 bp, Homo sapiens
cggtgacgacggggaccattttaccatcaccacccaccctgagagcaaccagggcatcctgacaaccaggaagaagatgattgaagaatcactgaagatt

SEQ ID NO: 814069 - DNA, 98 bp, Homo sapiens
actgggaaatccatagctaagatgccaggaccccctgaaagcctagacatgcatgtcagtgaaaaaaccagtgaatcgccttccaaaccaggagaaaa

SEQ ID NO: 814070 - DNA, 100 bp, Homo sapiens
accttgctaccccttttgggatgagatggcaactcaggaagttcctactggtcttgaacactgtgtctcagggtcttttcggaatgatggtttgaaagct

SEQ ID NO: 814071 - DNA, 100 bp, Homo sapiens
tactacaaagatggacttctctgtacaggggcaacaccctccactaaagagtcaagccagccggacgcattctcatctggtgggggaagcaaaccttctt

SEQ ID NO: 814072 - DNA, 98 bp, Homo sapiens
gagcccagcgtcaacttcctcaagtcgcccaaaggttcctggtagagttacacagttgtgccgccagtatagcgacatgcctcctttgacgttagagg

SEQ ID NO: 814073 - DNA, 100 bp, Homo sapiens
gttggaccttccggagcttctcagaagacagagggttttcttttgagctggagccagacggactgctggtgtgggtcctggcaggcgccctggggctcag

SEQ ID NO: 814074 - DNA, 98 bp, Homo sapiens
ctgcaggtattgggagatccacagctaagactccaggaccctctggaagcctagaaatggaaatgtagtctttggtgagcccatcactgccagcctcg

SEQ ID NO: 814075 - DNA, 98 bp, Homo sapiens
ccaagctgcaggacccattctctctataccgctgccacaccatcatgaactgcacaaggacctgtcctaaggttgcagagcctgaggcctgtgatcag

SEQ ID NO: 814076 - DNA, 98 bp, Homo sapiens
ccgaataccaagctcggatccctgaatttgatccaggagaagctgtgcctgaggatgaacagatcagtgccaaggaccagaagaacctggagccttgt

SEQ ID NO: 814077 - DNA, 100 bp, Homo sapiens
tttaatcatccatttcatcaaaaaagggtgaatttggaagtgaaaagaaaactgctttgcatgaaaaagaggagacacttcggcttcagagtgcacaggc

SEQ ID NO: 814078 - DNA, 100 bp, Homo sapiens
ttgctggaggcacctgacaaatcctagcgaatttttggagcatctccacccaggaacctcgccatccagaaatggcccactgcgtgaccttggttcagct

SEQ ID NO: 814079 - DNA, 51 bp, Homo sapiens
tggagtgcctccaaaggttgctgagagtcactttgtggcatgtatgacagc

SEQ ID NO: 814080 - DNA, 99 bp, Homo sapiens
agaggcaagcaggggcgccgtgggtgccagagaggcggaagaggaggcctgatggggatttccagatgtgacttgcactcagaagatcagtggtcaact

SEQ ID NO: 814081 - DNA, 100 bp, Homo sapiens
tatccagagaacttctttctcttaagaggaaaccatgagtgtgctagcatcaatcgcatttatggattctatgatgaatatattgaagcacagattcgag

SEQ ID NO: 814082 - DNA, 100 bp, Homo sapiens
cccgccctttcgctcctcggccgcgcaatgggcacccgcgacgacgagtacgactacctctttaaaggtaactaggatttctacctcaaccgcgagacct

SEQ ID NO: 814083 - DNA, 98 bp, Homo sapiens
agctctttgttttcttcgtactggacagtttaggttgctgaaaagccaggagtcaaaatgactgagcgctttgactgccaccattgcaacgaatctct

SEQ ID NO: 814084 - DNA, 100 bp, Homo sapiens
ctttctcagaaagcagaggctcagagcttggagacagacgatagaaaatgctgctgaagaacctagagtcttatgtattatacaagatactactaattca

SEQ ID NO: 814085 - DNA, 100 bp, Homo sapiens
gttgtctcagggagcacagaagtacctggcaaagaattctgcaactttgttcagtgccagcgattatgaagtggctcctcctgagtaccatcggaaagct

SEQ ID NO: 814086 - DNA, 100 bp, Homo sapiens
aaactcgaagaacagctgtggaaagaagttgcaaaacactggcttcttcatattgacaaaagaagagaatatctttatcaacttcaggagtttttggtga

SEQ ID NO: 814087 - DNA, 100 bp, Homo sapiens
gagagaatgagccagagggacacgctggtgcatctgtttgccggaggctaaaagatggcggcaaggcagcccaggcaaatgtaagaataggcgatgtggt

SEQ ID NO: 814088 - DNA, 98 bp, Homo sapiens
agggtaccgggatgcctgcaccattactgtaggggagactgcattgctgagtcctggccctctgaggggacgactgtgcctgagtgctgctgtgccac

SEQ ID NO: 814089 - DNA, 100 bp, Homo sapiens
gtgacaaccatgctggtttgcttcagactggtggtcgagatatccagtctgacggagcacttgctgacggaatgtgacaaaaaagacgggtttggaaagt

SEQ ID NO: 814090 - DNA, 100 bp, Homo sapiens
gggggcgtacaggcgcagcggccgcagcagcagcggcagtcacaggcacatcagcaaagaggccctagaaagtgaatttgtttcttgccaacttcatcag

SEQ ID NO: 814091 - DNA, 100 bp, Homo sapiens
aaggaccagacagattttgaagtgtgaacatggctacgcctcttcattcccgtccatgccgagcccccgactgcagcattcaaagcccccacggaggttg

SEQ ID NO: 814092 - DNA, 100 bp, Homo sapiens
tgtgcccctgaagaagcgcggatacgatgtcaccaggaaccctcatctcaacaagggcccacccaatgctaatgaagactacagagaagcttcttcttgt

SEQ ID NO: 814093 - DNA, 124 bp, Homo sapiens
tctatgcaagttttgccctttgtatgtttgtggcggctgcaggggcctatgtccatatggtcactcatttcattcagatcatggccttcggaaagccaagaaaccaaaaaagaaaactaagaag

SEQ ID NO: 814094 - DNA, 99 bp, Homo sapiens
ggtggaggagcacttctactgaatgcatacacagccacagctatcaacagcaccaacttctgcacctcagcaaaggatgcctttgtcattctggtggag

SEQ ID NO: 814095 - DNA, 100 bp, Homo sapiens
ataataagatcatccacagagatctgaaggctggcaacattctctttaccttagatggagatatcaaattgggtggatttgacatggaagtgaaaggttg

SEQ ID NO: 814096 - DNA, 100 bp, Homo sapiens
aggtcttcgacaataaattccacatcatcggcgcagtgggcatcggcattgccgtggtcatgataacaactattccacaccaaatgagagaggagaccac

SEQ ID NO: 814097 - DNA, 100 bp, Homo sapiens
gtggaggaagtgaaatgcaaatttgggaagatggagagttggaagaaggtgaattggaagatgatggggcagaggagacccaggatacctccggagggcc

SEQ ID NO: 814098 - DNA, 100 bp, Homo sapiens
cggcgtcacagcgaatgtggaggatagactacagtgccgctggtcagaatggcggcagtggagcatcgtcattcttcaggattgccctactggccctacc

SEQ ID NO: 814099 - DNA, 100 bp, Homo sapiens
aaaagaaaagattgtgacagatcactggacccagcacctagaccaagatcactccatggatgaaatgacagctgtggtgaaaattgaaaaaggagttggt

SEQ ID NO: 814100 - DNA, 99 bp, Homo sapiens
gccactccagtcggtgttgagcacggcgagcagtctcaggcctttagtgatgatggtgctacttttactgactggtttacctcttatgtcaaaaatgtt

SEQ ID NO: 814101 - DNA, 117 bp, Homo sapiens
attcctgaacatgagtttgcgacgggaccagtgtgtcttgatgatgagaatgagtttcctcctgattcactccttctccagttgcacagccacacccttcagctggccttaatgttg

SEQ ID NO: 814102 - DNA, 98 bp, Homo sapiens
taagtgctgctgttgcttcccgtgtagaggccccttcatggctgtgctctttgccaaactcgagaacatgctgcagaactccgtctatgtcaacttcc

SEQ ID NO: 814103 - DNA, 100 bp, Homo sapiens
ttcaatacgggcgatgagagagcccagaagcgccagcctatccgcggctctgatgaaggagattttgtttctgtaagcagtcctgagggcaattttaaaa

SEQ ID NO: 814104 - DNA, 100 bp, Homo sapiens
tttggcccctgcctactcggaatggaacaaaggtgctgcagcagagaacatgttaggcagtttgctgtgcctcccaggttcagggtcagtgcttcttgac

SEQ ID NO: 814105 - DNA, 99 bp, Homo sapiens
gcaaacctaccagggtattctgaagaagacaagagtcatggaaaaaaccaagtggctggatatcaaaggaaatcatgatctgaagaggaatgattatac

SEQ ID NO: 814106 - DNA, 98 bp, Homo sapiens
gccccgtgtcctgcaggtattgggagatccacagctaagacaccgggacctcctggaagccaaaaatggaagttgttgacatgaagtctgagggacag

SEQ ID NO: 814107 - DNA, 100 bp, Homo sapiens
aagacaggactcaccttgctggctgctgccagcattgcttacatcagccgtttgtgaatagcacaatggaagaagctggactttgtgggttaagagagaa

SEQ ID NO: 814108 - DNA, 99 bp, Homo sapiens
gagacgggacgctgctgtacgcttcctcgcttttccaggaacacggaagtggagctgcagatgcaaaccaggcagaaggccatgaatcgaatttcattg

SEQ ID NO: 814109 - DNA, 100 bp, Homo sapiens
gcaccgtgacaggccaagtgcaggggccagaagacaaagtcaattccatgaccaggaagaaacaggctcctgccagcaccgacagcaacgaaaatgttcc

SEQ ID NO: 814110 - DNA, 100 bp, Homo sapiens
tggagagtccatggatggtggttttcaggtggtgatctttgtgaagtctgtgcagcggtgcattgccttggcccagctactagtggagcagaacttccca

SEQ ID NO: 814111 - DNA, 100 bp, Homo sapiens
attgagactacatcacaacagagctattactcacttaatgaggtctgctaaagagagagttcgtcagaatcagctgaaccaagccagttggaagttccag

SEQ ID NO: 814112 - DNA, 98 bp, Homo sapiens
ttgatgagggctgcagaacagaaccaaagaggttgttgtaaatgtggatgatgatggagtcatttcattgaacttcgagtgtgataagatgactccaa

SEQ ID NO: 814113 - DNA, 100 bp, Homo sapiens
caaactggacaaatccttgtggagcaaatgggaaaagttaaagagaagttgactgcggatccagacagtgaaatagctacaaccagcctaagggtttctc

SEQ ID NO: 814114 - DNA, 99 bp, Homo sapiens
cggcttttgtctacttggctgacctcctgatgcctcacttgatggaggacgttattgaggatataatcggtatggaatcaagttttaaagaggaaggag

SEQ ID NO: 814115 - DNA, 100 bp, Homo sapiens
caccagttatataccagcagctcacatcattcacacagttacattggtttgccctatgcgttgtccagtgtacagaagcttactggaaggagtggccaac

SEQ ID NO: 814116 - DNA, 100 bp, Homo sapiens
ctgccactgcccccgggctgggagatgaccttcacggccactggccagaggtacttcctcaactactacttatacatgtgtgataaagtggttgccccaa

SEQ ID NO: 814117 - DNA, 100 bp, Homo sapiens
tcaagggcctggacagcttccttaaccgagatggggaagtcaaaagtgtggatgggatttccaagatcttcagggtgctatcgtggctgtgactggtgac

SEQ ID NO: 814118 - DNA, 100 bp, Homo sapiens
acaaagggaaggcgcatggatgctggagggcgaagacctgcgaagtccctctccagtctgcagatctccaggggagcccaccagcctagtcaacatggcc

SEQ ID NO: 814119 - DNA, 100 bp, Homo sapiens
ctgttacgggttttgccttatgaacttggtcggctcttccagctacaaactctaggtttgaaagcttctcggacttctattcagagtgaacttcatcgag

SEQ ID NO: 814120 - DNA, 103 bp, Homo sapiens
gtatggtgttcagggatttcctaccattaagatttttggatccaacaaaaacagaccagaagattaccaaggtccgagtgaagctgaagaattccagcttgag

SEQ ID NO: 814121 - DNA, 98 bp, Homo sapiens
gctactttgtaatccggatccaggatggtactggagtggttaatgtgttgctaacaactccactctgggtggtaaacaccagactgaagcttcaagga

SEQ ID NO: 814122 - DNA, 98 bp, Homo sapiens
agcacgcgcgagagcggttgcaggacgactcggtggaaacagtcacgtccatagaacaggaactgcaagcacatgttgaccagataactgaaatggca

SEQ ID NO: 814123 - DNA, 100 bp, Homo sapiens
gccgacaggatgcagaaggagatcactgccctggcacccagcacaatgaagatcaagaacccagcttagactagaaagtctagaagacacacacataatg

SEQ ID NO: 814124 - DNA, 98 bp, Homo sapiens
aagacctgcctcctgttccgcttctcagaggacgccttcaacaccaccttcatctccaccatcggtcatctctgaatttgagcaatggtgaaacggaa

SEQ ID NO: 814125 - DNA, 98 bp, Homo sapiens
ttgtagcctcaaactcccaggctcaagcagtcctaccatgtcagccttcccagtagctgggaccacagcattatagccttcagaaaggccaacaaagt

SEQ ID NO: 814126 - DNA, 100 bp, Homo sapiens
agacccacagcaaggcggtggggctttcatccatcccaggggaatcacttacctatgccagcacaactttcaaactctcagaagaaaagagcaatcactt

SEQ ID NO: 814127 - DNA, 99 bp, Homo sapiens
agcacatctgctattcttatagaaaatatggatctttacatgttgaatccttgcagcactaaaatttgctcaaagttatgaagtttcaggatgaattgg

SEQ ID NO: 814128 - DNA, 100 bp, Homo sapiens
ctttgcaacagaattacagagtatgatgtacagcagggaagaactggaaactcagagaaagaaactgcccttccatctacaaaagctgagtttacttctc

SEQ ID NO: 814129 - DNA, 98 bp, Homo sapiens
aagatgcagatcctcatttccatcatttcctgctaagccaaacagagaagggaaatgtttcaacgtgcgcaagcgttgcggcggcgggcagaggacta

SEQ ID NO: 814130 - DNA, 100 bp, Homo sapiens
cgcgaggaggcgcgggaggtgttcgagaacgaccccgagacgcctggagtactcgggtactttgagttcagtggctcaccccagcctcctggttatttga

SEQ ID NO: 814131 - DNA, 100 bp, Homo sapiens
aagacaacattgttcctggaacgccctctttttaaaaaaggatgctgacctgttggatgttgaaagcaaacactttgaagacctggagttccagcagctt

SEQ ID NO: 814132 - DNA, 100 bp, Homo sapiens
cacgcgggactccctcagctcggcaagagactgcctcagtttgatgacgatgcggacactgaattatatccagatcgagagacagaagattctgaaaggg

SEQ ID NO: 814133 - DNA, 99 bp, Homo sapiens
ggacactgaaattcagagaggggaagtgatttgcctcagcttgtactatctttccagaaatcgttttacagaaattccttctgatgtctggttatttgc

SEQ ID NO: 814134 - DNA, 98 bp, Homo sapiens
gagggtcaacgagaaagagatcggccaaatttgagtttcatcatggtgactatgaaaaacagtttctgcatgtactgagccgcaaggacaagactgga

SEQ ID NO: 814135 - DNA, 100 bp, Homo sapiens
taaactggtacaaaacaacgtgttattgatcttcgctgtaacccaagaacaagttcatttatatgagcttcaatggactacagacagtgggaatattctc

SEQ ID NO: 814136 - DNA, 119 bp, Homo sapiens
ctcgtgctcaagattggggatttcgggttggcaaggatcgttgatcagcattactcccacaaggtctctaaggacatctccatgcggctgcataaggagctcgaggtggtggagaagaa

SEQ ID NO: 814137 - DNA, 100 bp, Homo sapiens
aacgacctgtttgagagtgggaacatgacgcaggtgcaggtgtctcttctcgccctggcggggaagttggcgacaaacagcccacaattctcaaatggcg

SEQ ID NO: 814138 - DNA, 98 bp, Homo sapiens
tggaccagcagtatgacaccttccacaatggcagctgggtccacctcaccatcaacggttattcaagaagcccaagcgaaagacctgctgagaagacc

SEQ ID NO: 814139 - DNA, 101 bp, Homo sapiens
aatagcttgtgctgctgctgctgctgctgctgcatgtctaccaggagaggagggaactgcggagcgggtcctgggaactccaacaagggagcaaatcagag

SEQ ID NO: 814140 - DNA, 100 bp, Homo sapiens
ccagccaccgcccccgccccaagccggcctaccccagatcatccaaaaacttacagattccagtctgctgttagatgattattcatccaagttgagcccc

SEQ ID NO: 814141 - DNA, 99 bp, Homo sapiens
agagcagcagcctggctcctggtggctccagcagcagggtcctgcctcagttggcggaatggcggccacgggagccaatgcagagaaagctgaaagtca

SEQ ID NO: 814142 - DNA, 56 bp, Homo sapiens
gagccggccgcgggcgcgaccggaggcagatggagctctcgaaggccttctctggc

SEQ ID NO: 814143 - DNA, 100 bp, Homo sapiens
atcaagcaggttttaaatcaagatttaacattccaacacataaaaattatttatccaacagctcctcccagggccagcaccttctctctaaagcccaaga

SEQ ID NO: 814144 - DNA, 99 bp, Homo sapiens
ctgcccagaagaagggaaggcgcgagtgaggaaaggaggtactgtagctgcagaagaaagatcagcaactggagcctaaaaaaagtaccagccctaaaa

SEQ ID NO: 814145 - DNA, 100 bp, Homo sapiens
tcaactatggcagcagcgtggcctccgccaccgtgcacatccgaatggtatctggagtccatctttcaccatcttctcctgagattgtactggaccgtga

SEQ ID NO: 814146 - DNA, 100 bp, Homo sapiens
cctggacccagcctgggagaagcagcagaggaagggtacccagtgtgttgaacaaattcaagagttggttctacgcttctgtgagaagaactgtgaaaag

SEQ ID NO: 814147 - DNA, 98 bp, Homo sapiens
cgcagatgtggacttgaaagaagctgcagcggaggaaggcgaggtggtaaattcactccagcagcaacctcaggctgcatccccttcagtaccagagc

SEQ ID NO: 814148 - DNA, 100 bp, Homo sapiens
gtttcctccaacattgatgttcctccagcaagggtaaaccagacttgaatacaacattgccaattagacaaacagcatcaattttcaaacaaccggtaac

SEQ ID NO: 814149 - DNA, 100 bp, Homo sapiens
ccacagaagacctggtctacatgctagagggcttgggcattcacacgtctgtgaatttctggtacgtgctggtgatgaatgatgagcacacagagaggcg

SEQ ID NO: 814150 - DNA, 98 bp, Homo sapiens
ctactcagaagaacttgtacagagatgtgatgttggagaactatagcaatctggttttcttgggtttgcatcgccagcttctatatattacggccttt

SEQ ID NO: 814151 - DNA, 100 bp, Homo sapiens
ctgaccttgctggccctgttgtggcagagacccgtccagacggaagtgaaaatgtgacaggattggacctttcagatttcccagcattagcagaccgaaa

SEQ ID NO: 814152 - DNA, 98 bp, Homo sapiens
aggccagagcccaggtccccaggacagtgcaggtaaagagagcgttttcccaaagaaaataacatagcacagaaggaaaaataaaaagaaattgctgc

SEQ ID NO: 814153 - DNA, 98 bp, Homo sapiens
agcatcaccgttccccagcgccagttgtagcacccgagaggaagagcgtgtctcccttcttggggggaccacagaagtgagtccgtgctgctgcacat

SEQ ID NO: 814154 - DNA, 100 bp, Homo sapiens
ttatttagccggagtgagaagcaagaaggccctggacacagcaatatctctgggctttcacaggacaatctctatgggaagcagaaggcaaggaccccgg

SEQ ID NO: 814155 - DNA, 98 bp, Homo sapiens
ctggatgaggcaggcaacctgttcgtgtggcgcttggctctggttaatggcaaaattcactatgttcaatggccagctgctatttgatagaccaatgc

SEQ ID NO: 814156 - DNA, 100 bp, Homo sapiens
agaaaaggagcaaagccattcattcttcaggtacaactggatttggaacaaatccaggtggtctctttggccaacagaatcagcagactaccagcctctt

SEQ ID NO: 814157 - DNA, 100 bp, Homo sapiens
gagtgctgcttggatggcacctgaagtttttgaaggacttggactaaagtctgatgaacttcccaatcagatgagcatggatgattggccagaaatgaag

SEQ ID NO: 814158 - DNA, 114 bp, Homo sapiens
tactccatcagcagtgacaactctgacaccactgacagtaccctgggggtgagcttatcctcctgcagcgtccctggttccaaacccaccttcgagctctcagccgacgaggtg

SEQ ID NO: 814159 - DNA, 99 bp, Homo sapiens
gcgtgcctgaagcgggaagggtggtcagcaggcacaggagaagcgaatatgagaatgcagaatctattgatcttaaacagtttttcgaccaacattttt

SEQ ID NO: 814160 - DNA, 100 bp, Homo sapiens
aaacactcagagtggaaaaagtaccatcatttgaaacaggcctggttgcagtatgcttgaaatctgggatgtggaagacccttccaatgcagctaaccct

SEQ ID NO: 814161 - DNA, 98 bp, Homo sapiens
acaccctgatctggcatggacatgccatttcataattctgaatcatgtctgataacggagaactggaagataagcctccagcacctcctgtgcgaatg

SEQ ID NO: 814162 - DNA, 100 bp, Homo sapiens
gatttcccaagcagttgttgcacaggtaacagatttcttgataaccggctgtttgctacctgctctgatgacactacaatagcactatgggatctgagaa

SEQ ID NO: 814163 - DNA, 101 bp, Homo sapiens
tctctagtcgtatggacagcacgggggtccccgaccgaatccaggacatgaagaatgcaaccctctccctgaattctaatgacagtgagccaaaatattac

SEQ ID NO: 814164 - DNA, 98 bp, Homo sapiens
ttcagaagagccaaggaataaacatgcaatgaacccaaaaggatcagacagcagatggaagaacaggttgctcaaaagtcctctgaactggaacagta

SEQ ID NO: 814165 - DNA, 100 bp, Homo sapiens
aaagtaagaagccggtggtgactttccaagaccgagtgtgtcagcagccaggactttctctctgggtccccttccaaaacgcagccaccgccgtcaccaa

SEQ ID NO: 814166 - DNA, 98 bp, Homo sapiens
agaaattggcagcagtcaagatgaaaccaaaaaacttcttcatgatcatgaacttcttttggccaagctcaagccagaggaagagcatttggcctgtg

SEQ ID NO: 814167 - DNA, 98 bp, Homo sapiens
ggaatcagcacttcctctgcgggagatcatccgtcggctggagcttgaattcggagtgatttaccactgcacagaggagcggctgtacacgggccggc

SEQ ID NO: 814168 - DNA, 99 bp, Homo sapiens
caatggacagcatgcctcaccaagtcacatgacaagcagcctgaagtgttagaagattcacctctggttccccaaaaaggcagttttcagatggttcac

SEQ ID NO: 814169 - DNA, 99 bp, Homo sapiens
ccggagccatggaggacgaagtggtccgctttgccaagaagatggacaagatggtgcagaagaagaacgcgtgaaaaatgtgaggttttacaatattct

SEQ ID NO: 814170 - DNA, 98 bp, Homo sapiens
atgaggccagccgggaggacatctacaagcggattctctaaccatggcacaggtagagaaacgtggaggtttgctccggaaatcttcagcctccaaaa

SEQ ID NO: 814171 - DNA, 98 bp, Homo sapiens
agggcaagccccgctccggccaacaacttatgttcctgaggaagaattgaaggcagcagaaatagatgaagagcacgtggaggatgacgggctgtctt

SEQ ID NO: 814172 - DNA, 100 bp, Homo sapiens
gcctggctctgtgctgcgggtgctctgacttcacagagaatgcagttgtcttgacttcaggtctgtctgttctgttggcaagtaaatgcagtactgttct

SEQ ID NO: 814173 - DNA, 100 bp, Homo sapiens
ggcttctctgaggcggcgagagatggtcaggtctggagctcgaccgggccagatacactctggaaatgattaaactagtaccacataatgaaagtgcatg

SEQ ID NO: 814174 - DNA, 123 bp, Homo sapiens
cgggaggctctcactaaccacaggcatcagttggtactcgccatgaaactcaaagatcgagaggttctcctggatggatacctgatgatctgtgtggacggggggccctccacagatggcttg

SEQ ID NO: 814175 - DNA, 100 bp, Homo sapiens
gaccaggctctcctctctcaatttctggatatgtgcatggatctgaaagttcatcctgaacaggaaaagggtcagttaaatgaaagcatggaccatgggg

SEQ ID NO: 814176 - DNA, 100 bp, Homo sapiens
atcaaatactttcatgcccaatgcaagcatattaatgaggataagagaaaaacagaagctcaaaagcaaatttttgatgttgtttatgaagtagatggat

SEQ ID NO: 814177 - DNA, 99 bp, Homo sapiens
tttgatacagcatgtgttaccaagctgtttcctaccaggtcacacactgttgcagcgcagcttggtcgggaggaacctgccatgtccatggatgccaat

SEQ ID NO: 814178 - DNA, 100 bp, Homo sapiens
gtctgccagcagggtttctcaatctctgcagatggccgtacgtgtgaagatcagaatcaagctttgcgactctgtctgggtagcactagtgttggaggtc

SEQ ID NO: 814179 - DNA, 100 bp, Homo sapiens
caagtagtggaacatttcatgtaaagctgcctaagaagcacaatgtggaacttggaataaccataagttttttacatgtggcacccataaaagatgaggc

SEQ ID NO: 814180 - DNA, 100 bp, Homo sapiens
gccagtccgggcaggggcagcgggagccggccggatactagagtaaaaggatggtttcttctggacaattatatacccacatttatctgctctgtcatat

SEQ ID NO: 814181 - DNA, 100 bp, Homo sapiens
aggaggagcagcagagctggccccggggataatgcagaattgatcacttctctgcttcacagtggagctgatatacagcaggttggatacggtggcctca

SEQ ID NO: 814182 - DNA, 100 bp, Homo sapiens
gcagagtcagatgtcaggatggtggctgacgaatgcctcaacaaagttatcaaaagaggaattcatagcagtgtgcagtgcaaactgcgctatggaatgt

SEQ ID NO: 814183 - DNA, 98 bp, Homo sapiens
ggaccccagcgcaccctccagagactgcccacatgagtgtccgaaaatccaccggtgattcccagagacagagtttctctctggcgcccagcctggag

SEQ ID NO: 814184 - DNA, 98 bp, Homo sapiens
aggaagaggaagaggaggaattagtggtgcggcggcagcacatggagcgttgtaccagcttcctggtggatgagctgggcgtggtggatcgatcccag

SEQ ID NO: 814185 - DNA, 98 bp, Homo sapiens
aagctggaagtcagcactaatggagaggactggatggtgtaccggcatggcaaaaaccacaaggtggagccgccaccaaaatgcagattttcgtgaaa

SEQ ID NO: 814186 - DNA, 150 bp, Homo sapiens
tgtacctttcagctgcgccggccgcgaggccacggagagctcgccttggagagcccaggagcaggggagacatgagccagcccctgggcaacaaagtggaaatggagattgtgagcatgttggaaaaaaacgcaacacttctcaaattcg

SEQ ID NO: 814187 - DNA, 100 bp, Homo sapiens
atcaagaagatcttcgagttcaaagagaccctcggaacggtttcatcaccttaaatggttttgaaccaatgaaggtgtattcccttaaaaagacggacag

SEQ ID NO: 814188 - DNA, 100 bp, Homo sapiens
aaaactccagagctcccagaaccttcagtgaaagtaaaagaaccttcagtacaagaggctacttctactagtgacctgaaaaaaatgtctggatttctag

SEQ ID NO: 814189 - DNA, 98 bp, Homo sapiens
atgatttcatgtttgtgaagaggaatgatccagatggacctcattcagacagaatctattaccttggaaagagcatctacggtgagcgcttccccgat

SEQ ID NO: 814190 - DNA, 98 bp, Homo sapiens
gtggaatgggtccaggccgtggtcagccgcttcgacgagcagagaatggatcttggagaatgtctgaaagtccatgacctggctttaagagcggatta

SEQ ID NO: 814191 - DNA, 100 bp, Homo sapiens
cggcccgaccccaccggccatacggggggctttctctgtggtccgacgctgtgtcaagctctgcaccggccatgagtatgcagccaagatcatcaacacc

SEQ ID NO: 814192 - DNA, 100 bp, Homo sapiens
aagtgacagcacagaagaggccagagaacagcctcctggaggagaccctacactttgaccatgctgtccggatggatccccgtcgaggtcaagatcaaga

SEQ ID NO: 814193 - DNA, 100 bp, Homo sapiens
cgaattccagaatgatgaaattgtcaccaaggatgacattgatcttgatgccttggctgcagaaatagaaggagctggtgctgccaaagaacaggagcct

SEQ ID NO: 814194 - DNA, 100 bp, Homo sapiens
gacactgcgactccggagacagcccaaatatcctcggaagagcgctcccaggagaaacaacatggcttctcgctgtttctgggatgctgacactgacaac

SEQ ID NO: 814195 - DNA, 99 bp, Homo sapiens
atctatcagcaggctccgggctgaagattgcttctcttctctcctccaagattattgcttgggttagaatatgccctactggtttggtggactcctaaa

SEQ ID NO: 814196 - DNA, 100 bp, Homo sapiens
tcgaggaggcgcaggagactgaccgcaacggcaggtgggatggagtaggacctcttccagactgtgctgaaccaccaaaagggatccagatgctgtggca

SEQ ID NO: 814197 - DNA, 100 bp, Homo sapiens
aggaccagggctgcgacggccatgctggggcagagctaaaacgtcatcctctcttcagtgatgtggactgggaaaatctgcagcatcagactatgccttt

SEQ ID NO: 814198 - DNA, 100 bp, Homo sapiens
aacgaaaaagaacgacatgatgcaatcttcaggaaagtaagagggaaacgtaaatattttcaccacgatcgattagactgggatgaacacagttctgccg

SEQ ID NO: 814199 - DNA, 100 bp, Homo sapiens
cacacccggttcgcacagactacactcattgcctgtacagcacgagaacggacacacgttcagtgcattcagaacaagcccctgtattttgctgatcggc

SEQ ID NO: 814200 - DNA, 100 bp, Homo sapiens
cttgaaacaaaaggagaccctaatcttcaggcaattaagttggaatatgcaaggttggttaagttggcccaagaagacaccccaccagaaaccgattatc

SEQ ID NO: 814201 - DNA, 98 bp, Homo sapiens
tggtctcttcccatggcgatgtccatctgccaccgtggcactggtattgctttgagtgcaggacaaagacaattctggtgccacagtcttgcatctgg

SEQ ID NO: 814202 - DNA, 100 bp, Homo sapiens
agcaccatggcggagctaggagctggcggcgacggccacaggggcggcgacggcgcagtgcgaagcgaaacaggcagcaatgaatgtggatcacgaggtt

SEQ ID NO: 814203 - DNA, 99 bp, Homo sapiens
tgtgacagagacaacaccgagtatgagaagtacaatgactcttcttgcttttcacctaagttgaataagcaccctgtgcactttaatctcctgtcggta

SEQ ID NO: 814204 - DNA, 100 bp, Homo sapiens
ggcaacatccaagagatctacgatttccataacaagtgtcctggggaagtgtcgctacgtttactatgggaaaaactcagagggcaacaggtttatccga

SEQ ID NO: 814205 - DNA, 100 bp, Homo sapiens
aaaaagaagtaaaagaagctattattacaagaataaaggcaggaatcaatccattcaatgatgtgtcgtggaggccgaatgtttgcaccaaccaaaacct

SEQ ID NO: 814206 - DNA, 98 bp, Homo sapiens
tcgactggaccaagatcgagcccagcgtcaacttcctcaagtcgcccaaagcgcgagcccagcattgacctgctgcaggccttcgtggagcactggaa

SEQ ID NO: 814207 - DNA, 100 bp, Homo sapiens
gcattttggcattgacatttaattttagggtcctttatatagaagggagagtaggcagcctcagtcagagcaccctgaagtttttgctcctgaatccagc

SEQ ID NO: 814208 - DNA, 98 bp, Homo sapiens
tgggagatggataccaaagaaaaattggagcaggctgccattgtcaaagagaagggaaccgtatacttcaaggaagatgagaatgtgcctactgctcc

SEQ ID NO: 814209 - DNA, 100 bp, Homo sapiens
gattgtgaagaagaatttcgatctccgccctggggtcattgtcaggcagcgtcctccagatcgtgtccgcccccgggcagccctaccttcgagcccctgg

SEQ ID NO: 814210 - DNA, 98 bp, Homo sapiens
gccacactctgcaccgctaggccgtccccgaccttgcctgaacaaggtccggaccctatttgtcagtggccttcctctggatatcaaacctcgggagc

SEQ ID NO: 814211 - DNA, 98 bp, Homo sapiens
ggaaggcaagtccctggataagaatgacaagatgatcattccaaaagtggcttttcatggcctgccactgaaaatcaagaaagaaccccacagtccat

SEQ ID NO: 814212 - DNA, 99 bp, Homo sapiens
aagaaagcaaagcgcagaaatgttggatttgaatcaagtaagggagaattgactacgcttatacatcagcttcaagaaaaggacaagttactcgctgct

SEQ ID NO: 814213 - DNA, 100 bp, Homo sapiens
cgacctggagccgtcccaggactgtgcaggggactctgtcacagtggtgtggggatgatgtgctcattgagtgaacaagggaagcagctagctatccagg

SEQ ID NO: 814214 - DNA, 98 bp, Homo sapiens
tccagcccttatacaaagacctttcggtatatattcttccaacttccatgcagtgaagagggaatcagacggggctcctggggatctcactagcttgg

SEQ ID NO: 814215 - DNA, 100 bp, Homo sapiens
tggacgtggtcaagtacgagagtggccctgacggaggggaggaagcaatggacctcatcatgaccgttgctgtacttacaatgaaaacaacttggtggat

SEQ ID NO: 814216 - DNA, 100 bp, Homo sapiens
aggcccacgtgcagtgtgaaggcctgtctgaggcgctcctgtgaagaggaagcctcaggagggagtgagagcagaagggagcccacctgtggttgtctca

SEQ ID NO: 814217 - DNA, 98 bp, Homo sapiens
gaccctctgctcaggcttctgcctctggcgcgagggggaccagctgaccaagtgggcctttggagtgacgctgtgggaactcatgactctgggccaga

SEQ ID NO: 814218 - DNA, 98 bp, Homo sapiens
acacgtgcacatcggggaaggcccttctgttgtgttgctttctgccacaatgccaactgatgtgttggaagtgaccaaaaaattcatgagagatccaa

SEQ ID NO: 814219 - DNA, 99 bp, Homo sapiens
aaagaaaatttggaagaaaaccagcatgaaattacttgaccaagttgtccctccagctggtgtttaaaattggtggtgaatggtggacatggatcgatt

SEQ ID NO: 814220 - DNA, 99 bp, Homo sapiens
gctggtttcggaaatgcccttacagcagcaggaacctctttcaggagctataaaagaaagggaggaatcatgtccacaattgcagctttctatggcggc

SEQ ID NO: 814221 - DNA, 98 bp, Homo sapiens
atgagaacatggatgcttatctctcaaagatggaattgtcagccacttgaagaagcaggcaggaccagcttcagtgcctctcaggactgaggaagaat

SEQ ID NO: 814222 - DNA, 100 bp, Homo sapiens
gtccaagaggaccttctgattagtccacagtcttcctctatagacgagagattaaacagttattgtctgagttggatgaagagaagaaaatccggcttcg

SEQ ID NO: 814223 - DNA, 100 bp, Homo sapiens
ggccgagttcttgccctcctttgctcaggcatctggtgtcgaaggctcagatattcctgatgatggtaaactgataggatttgcccagctcagcatcagc

SEQ ID NO: 814224 - DNA, 100 bp, Homo sapiens
aggctcagagatgcctgtaccgtgatgtgacgctggagaacctggcacttatgtcctccctggttggtgacaaagttcctgctgatataaggttaacttc

SEQ ID NO: 814225 - DNA, 98 bp, Homo sapiens
tttccttgatggtcaaaagattaagagtcatcctttttgaacttccatgactcagactgcgaacccaagggatcatcaccctgtgactccttgctttc

SEQ ID NO: 814226 - DNA, 100 bp, Homo sapiens
caacatgcagttacaacagcatacagcatttctcccaccaggtttcaggctctgtataactatactcccaggaatgaagatgagctggagctcagagaaa

SEQ ID NO: 814227 - DNA, 100 bp, Homo sapiens
aggatcctgagatccggagcagccggggtcggagcgggttaacacagaaatctgcctcctgggccatgccgcttctaaggcctgtttcttctcatgagcc

SEQ ID NO: 814228 - DNA, 100 bp, Homo sapiens
ctgctgctgccgccgtcgccgctgcctctcgcagccgatcatggaagggaagtggttgctgtgtatgttactggtgcttggaactgctattgttgaggct

SEQ ID NO: 814229 - DNA, 100 bp, Homo sapiens
gcccgggagtacatctacatgcattttggggaggagaacaagaacctggttcatggtaatgtgtgtggccggaacatcctgctggcccggctggggttgg

SEQ ID NO: 814230 - DNA, 100 bp, Homo sapiens
ggccagaagctgcacctgcactttgagaggctgttgctgcatgacaaggacaggcatttattaatacagcaaaagaaatttatgaaaaaattcaagaagg

SEQ ID NO: 814231 - DNA, 98 bp, Homo sapiens
gcgaggtcgctcggcgcagctgttgcggggccatggcggggaccgcgctcaagaggctgatggccgagtacaaacgtccttctatatgatccactctt

SEQ ID NO: 814232 - DNA, 101 bp, Homo sapiens
tagcagatatatctggcctaccatccttctgctgctgaaccaatgccaacagggaggcaggacacaatgtgtgagagaagtctgtcccattctctcctgtc

SEQ ID NO: 814233 - DNA, 98 bp, Homo sapiens
agccagtcttgaggtcctacatctccgaaagcaagctcttctagaagttgagctctgattatacaaaaccaggagacattgaccctacatcagtagca

SEQ ID NO: 814234 - DNA, 100 bp, Homo sapiens
tttgggcatgcacgtgatactcacacagtggcttctgctcaccaacagatgaagacagatgcaccaacgagattgtagaaggcatgaaacaaaaaatgtg

SEQ ID NO: 814235 - DNA, 100 bp, Homo sapiens
aatggatccaccactaggggaaccggaaggatcgcttggggttattcaaatgctcagaagactattcttctgcaggtggatcagaactgtgttcgcaatt

SEQ ID NO: 814236 - DNA, 100 bp, Homo sapiens
ccgcggatctggggccgtcctcagcacccgacagctacaaagtgcaagataagaaaaatgcctccagccgccctgcctctgcaatttcaggacaaaataa

SEQ ID NO: 814237 - DNA, 100 bp, Homo sapiens
cggcagccacagcgtccgactcgactcggagggtttctgtgagagacaaattgcttgttaaagttggcccgccacaataaactgttgcagcagatgctca

SEQ ID NO: 814238 - DNA, 99 bp, Homo sapiens
aggcggcggcggcggaacgccaggcagaaaacctcggatcaattctcagctggtggcacaacaagtggcacaacagtatgccaccccaccaccccctaa

SEQ ID NO: 814239 - DNA, 100 bp, Homo sapiens
cggatacttctgaagaacaaattaaagaatattttggagcctttggagaggtggtgaagcagtattttccaatttgaagattcatttgaaggtggctcct

SEQ ID NO: 814240 - DNA, 100 bp, Homo sapiens
gcgcatatcttcaaagcacctagtacctcctaccattgtcaactggcggttttggtgaataacatcaccacaggtgagaggctcatccgagtgctgcaag

SEQ ID NO: 814241 - DNA, 100 bp, Homo sapiens
ccccatcacataggggtttctgttaaggaactcgatttatatttggcatactttgtgcatgcagcaggggatatcattttcaatgcccaatacccagaac

SEQ ID NO: 814242 - DNA, 100 bp, Homo sapiens
atgaacttgtgaaaaaattcaaagtcgaatatcatgctggtggctctacccagaattcaattaaagtggctcaggagtatagtcatggccaacagcaaaa

SEQ ID NO: 814243 - DNA, 98 bp, Homo sapiens
tacttccttcacgcagtgccatacttggtgagcccacccatcgcagaggaaaggccatgtgaagataaagaaaaggctgccatctccaggtcaggaag

SEQ ID NO: 814244 - DNA, 100 bp, Homo sapiens
atcgacgccgcctggcaggccctgcgcaccagattgagaggatccagaatccagatctctggaatagctaccaggcaaagaaaaaaactatggatgccaa

SEQ ID NO: 814245 - DNA, 127 bp, Homo sapiens
agacatctgcgaagtggttgagaagcctgtacctgttttatacttgcttttgcttcagcgttctgtggttgtcaacaggctctgtgtgctccgggatggagcaggtgtgcagagggtgagaacccag

SEQ ID NO: 814246 - DNA, 51 bp, Homo sapiens
tggatccaggataacggaggctggatagatggctccccaataccagaagtg

SEQ ID NO: 814247 - DNA, 98 bp, Homo sapiens
gccacatcattgctttatgtgagcagcccgacggccatggaggctgaagagacgatggaatgccttcaggagttccctgaacatcataaaatgatcct

SEQ ID NO: 814248 - DNA, 99 bp, Homo sapiens
gagaacagtccgaaatggcggggactgttggtctcggccctgcggaagatcctgtttgaccaaactcagagatcaattaaggcacagcttcagaacttt

SEQ ID NO: 814249 - DNA, 100 bp, Homo sapiens
gctgctcagcgtcctcatgtggggggtaaaccactcgatggcgagcggctgcagctgcaggatgaggaagacgacagcctgtgtcgcatctgcatggatg

SEQ ID NO: 814250 - DNA, 100 bp, Homo sapiens
atgctgaagtaagattgtcttggaaatactaagttgggatttccagatgtgacttgcactcagaagatcagtggtcaacttcagaagctcttccacgctt

SEQ ID NO: 814251 - DNA, 98 bp, Homo sapiens
cgcctgccccggtgcgcagacagagctattccagcaccagcagaggtgcttttcagtgggaagaattggaagaagatatcaggaagaagttgaaagat

SEQ ID NO: 814252 - DNA, 100 bp, Homo sapiens
gttcgtctgctgagactcggctccaaggtcacagctcgtaacactgagctccagagattatattggggttgccattttgtgaagccatagacatgtggtc

SEQ ID NO: 814253 - DNA, 100 bp, Homo sapiens
gcgggtttgctcccaacatcctggagaataaagaaggttgttgatcattatgaaaatcctagaaacgtggggtcccttgacaagacatctaaaaatgttg

SEQ ID NO: 814254 - DNA, 98 bp, Homo sapiens
atgacacccaacttcctcagatcctagagaaactggaacgagccagtaccaaaatgttggacaggtataacccggaaaaatcccagaacacctctttc

SEQ ID NO: 814255 - DNA, 100 bp, Homo sapiens
ccgggcagggaggagaccggcacccagacaggtggcgacggcagaggacccaccttgggacaccttgactccaagcccagcagtaagtccaacatgattc

SEQ ID NO: 814256 - DNA, 100 bp, Homo sapiens
gaagatttgtttggccactgtgggggttgccctgctgtcagacgtctatcctgagaaaatcttgccggacttgttggctcaatatgacagcagcaaagac

SEQ ID NO: 814257 - DNA, 100 bp, Homo sapiens
attttactactgagctgcaaaggaatggtttgcagtgtatgtggaacttaatcagcaaattgcagcactcttgaatgctggcgatgaggaagatcttgtg

SEQ ID NO: 814258 - DNA, 100 bp, Homo sapiens
gccggatggcagtgttggtgaggcagagcatatggaaaatgatccctgcatgtcactgagtccaccatgctttacagaagaagacagatttagtctggaa

SEQ ID NO: 814259 - DNA, 100 bp, Homo sapiens
acctcctccgactgtcagcactgctccacctctgattccaccaccgggcgtgaattacccttcactaagtcggctcatctcaccaatccttggaatgaac

SEQ ID NO: 814260 - DNA, 100 bp, Homo sapiens
aaattcatgcctattgtttatactcccactgtgggtctggcttgccaacaatatagtttggtgtttcggaagccaagatttgatccaggctaccaacgag

SEQ ID NO: 814261 - DNA, 100 bp, Homo sapiens
aattaggaactgttctgccggaatttgaaaagtgcctttttttacaggctggtggataatgattgatgcagctgtggtgtatcctaagccagaacagttg

SEQ ID NO: 814262 - DNA, 100 bp, Homo sapiens
atgaactcgaaatgaagcggaaagcagatatgcgcgtcagcatactttggcggagtccgatgggtggtccttttattcctgctgctcctgtcaaaactgc

SEQ ID NO: 814263 - DNA, 51 bp, Homo sapiens
agccagcaccatctctgctgttagtttggaaattttagcattcaggtgcca

SEQ ID NO: 814264 - DNA, 98 bp, Homo sapiens
caatcacctgaaggatctgacttccagaaggaggaaaaggattagtagatattcagcctcattgggtatctgccctggcttggccagaagagggtccg

SEQ ID NO: 814265 - DNA, 98 bp, Homo sapiens
gcctggccgacttcggctcttgcctcaagctgcgggcagatggaacggtgcggcagctggtgcctcggagggaccaagctctgacggaggagcatgcc

SEQ ID NO: 814266 - DNA, 100 bp, Homo sapiens
tcctgtattggacgagtcttggattcgtgaacagaccacagtggaccacttctgggagatcgcggattcaggtgtggctctatgagcaagtgaatatgcg

SEQ ID NO: 814267 - DNA, 100 bp, Homo sapiens
agtgcaggcgcttcaccacagacggacttacacatattattgaaactcgaaaagtccttgatttaaggataaatctgaagccttcttatctagtagttcc

SEQ ID NO: 814268 - DNA, 100 bp, Homo sapiens
tgtctttctccgcggcgaaggtgaagagttgtcccagctcggcccgcgggggagccccgggagccgcacgaactgataaatttcaaacggaagagagtgg

SEQ ID NO: 814269 - DNA, 90 bp, Homo sapiens
gtgacagcgagagcggcccggacgacaagaggtggggctggtgtccgagcacttctcgcaggccccgcagaggctgtccttctacagctg

SEQ ID NO: 814270 - DNA, 100 bp, Homo sapiens
tatgggagacgacagaccgtttgtgtgcaatgccccgggctgtggacaggaataagacgagttggaagaagacctgatcaacaacttcagggtgaaggga

SEQ ID NO: 814271 - DNA, 100 bp, Homo sapiens
agaaacatcatgtcaacagaacatgatacaggagcttatagaaactaatcaacagcttagacacaaagaccatcaccaccatggctgaagacatgtcccc

SEQ ID NO: 814272 - DNA, 98 bp, Homo sapiens
gctaactttgaaggtgatacttacctcacctctaattagggacgaattggagaagaaggatggaggtggcattggctgtgtaggtcaagacaagggcc

SEQ ID NO: 814273 - DNA, 100 bp, Homo sapiens
tcaagataaagtgattttttgcctttgttgattaactggacaaattcaggcgtccaggtgatcccccaaacagcatgtgctcagccccagacctgccgcc

SEQ ID NO: 814274 - DNA, 99 bp, Homo sapiens
ctcctccaacccagaactggacaatctggttttccagaagagattcaatggctcagtaagtttcttccgcggctggaatgactacaagctgggcttcgg

SEQ ID NO: 814275 - DNA, 99 bp, Homo sapiens
gcctccgccgccgcctgaggaggcgagctagccgggagttacaccgccaccgccaggtttatgctaaaactatcgatgggcaacagactattattgcat

SEQ ID NO: 814276 - DNA, 100 bp, Homo sapiens
gctacggatggatatgtcaggaatgtgattcttcatcttccaagacagattatgagggacaagccaagaaactcctggaactgatggaaaacacggatgt

SEQ ID NO: 814277 - DNA, 100 bp, Homo sapiens
tactagcattatctgtggctgctcttgcctgggagtcatggctctggtgtttgccatcaaggtctgagagtcactggagctaccagaagcatcatggggc

SEQ ID NO: 814278 - DNA, 98 bp, Homo sapiens
actgcgctggttgaaaaatggcaaagaattcaaacctgaccacagaattggaggctacaaggacaatctctatgggaagcagaaggcaaggaccccgg

SEQ ID NO: 814279 - DNA, 100 bp, Homo sapiens
gctgctttcttcggtagctaccgaaacgctctgaaaatcgagccggagctagtgaagatcctgcacaaggcactggaggccgcccagcaggagaagcggg

SEQ ID NO: 814280 - DNA, 100 bp, Homo sapiens
cagcagctctggggctacctcctggagtggcaggtgtacctgtccttcgtttatcccaacgactacactcgcctcacccacatggagacggacaacaagt

SEQ ID NO: 814281 - DNA, 100 bp, Homo sapiens
gatgaagattcaccaaataagctatatactttggttacctatgtacctgttaccactttcaaaaagcaaatttttcagaacataaaacaagaatatagtc

SEQ ID NO: 814282 - DNA, 100 bp, Homo sapiens
cgcggcccgccccggtgctcgtgatggggctgatcttcgccaaactgtggagcctcttctgtaaccaagggtaacaagatgctcaactatagtgctccca

SEQ ID NO: 814283 - DNA, 100 bp, Homo sapiens
ccacgacggcgccatcaccgagcgcttgatgtgcgcggagagcaatcgccgggacagctgcaaggggttcggtccgagcccggtgggaggctcccggagc

SEQ ID NO: 814284 - DNA, 100 bp, Homo sapiens
cctgattgatggcagcagggaaggattactgtaggatgccaatgggactaagcactggtatcatatctgattcacagatcaaggcttcagagtttctggg

SEQ ID NO: 814285 - DNA, 101 bp, Homo sapiens
ctgcagaccatgggccccctccacggcaccatcaccgttctggctgttttggagtcagcggaagatcaccaaggccagggagtggttccaccgcactgtga

SEQ ID NO: 814286 - DNA, 98 bp, Homo sapiens
tcgaacgccacagaaacatccggcccagacatgactatcaaggcaatggatcacttggagtcctttattgctgaatgtgatcggagaactgagctcgc

SEQ ID NO: 814287 - DNA, 100 bp, Homo sapiens
gtgctggaggcccctggtgtctacgtgtttggagaactgctggacatgcccaatgttagagaggtttcattgaaaacagatcctgcaaaagttccaggtg

SEQ ID NO: 814288 - DNA, 100 bp, Homo sapiens
atctgcagaaagcagctccgagccccagaccagctctcaggatgactttggtccttttgtacaagtggatgaactgatggaaattttccgaagatgcaag

SEQ ID NO: 814289 - DNA, 98 bp, Homo sapiens
tgactccactaggagctctcagcgtgctagtaagaatgatgccaatgggtggaatgatgccacctggaccaggaataccacctctgatgcctggaatg

SEQ ID NO: 814290 - DNA, 98 bp, Homo sapiens
tttagaggctttatatcctaaacttttcaagcctgaaggaaaggcagaactgcctgattacaggagctttaacagaaagatgttctcgtccgtggcgc

SEQ ID NO: 814291 - DNA, 100 bp, Homo sapiens
ctcaagaacttgttaacctccggggagagctaggctgtggaaaatctctgttctcacaaagtctccccaatgctctacaagcaactgcgtcaggcctgtg

SEQ ID NO: 814292 - DNA, 98 bp, Homo sapiens
tgaagggcaccatcgacccgaagttgcggattgcagccgagaacgagctcaaccagggaataccttggcaagcagctccagtccgagcagccccagac

SEQ ID NO: 814293 - DNA, 50 bp, Homo sapiens
gtatgaccctcccagcaatgcaaggaaacagagcaaatgcagcgttacaa

SEQ ID NO: 814294 - DNA, 99 bp, Homo sapiens
attaatgaagctgtacctcaggtgaagttttatgaagaggtggatccaaccgaagagaaaggggtgctccaccactccctcccatcccgaggtgatctt

SEQ ID NO: 814295 - DNA, 100 bp, Homo sapiens
gagactgtgatggaggtcatggtgaacgtccttggaggtggagagtccaaggcactccaggaagctcatcgggtgctgaaaccaggaggacggtttctct

SEQ ID NO: 814296 - DNA, 98 bp, Homo sapiens
tgatgaccaagagaatgtgtcagccgatgcaccgagtccagcccaggaaaatggagaggctatttgcgcctaggagccatggctagagataagggaaa

SEQ ID NO: 814297 - DNA, 100 bp, Homo sapiens
cttctttgtcaccataggagacatggacgaagccttcaaatccatcaagctcatcaaaagtagatctctggcttcctgctctgtttgttctggttgccct

SEQ ID NO: 814298 - DNA, 100 bp, Homo sapiens
gtaaagtgcattttcctgatccaaacaagcttcattgttttcagctaacagtaaccccaggtgaaggcattctcatctcctcagaggcttcagagcttct

SEQ ID NO: 814299 - DNA, 100 bp, Homo sapiens
tgtaaaaggccactgactcctacttcctctgtatagagcaactgttgaactcagctgcctgtaggtgattgtagagaaggctccaaaagccagggtgcct

SEQ ID NO: 814300 - DNA, 99 bp, Homo sapiens
agacatgtggcccatctctgtagccatcactgagaaatctggattttcaagggtgtgtgctggtggtgtctgtaatagaacagcttgctcaagttcaca

SEQ ID NO: 814301 - DNA, 99 bp, Homo sapiens
gagacctcaccatagctaatcttgggacatcagagggtcgcttcatgcagttaatgaaggagttcccccttctgagtatgttcaatatccatgaaaacc

SEQ ID NO: 814302 - DNA, 100 bp, Homo sapiens
ctttgaacgcactcctcagagtccgactctcccacctgctaagatatgggtaagtgtcaccttaccaaaggcaaacaggctctagagattcgaagtagtt

SEQ ID NO: 814303 - DNA, 100 bp, Homo sapiens
aaggagcctcggaagtcaagagactcagagtcccataggacattgtttaaggatgcatctggaaatcttgacaaaaatgccagattttctgccatctaca

SEQ ID NO: 814304 - DNA, 50 bp, Homo sapiens
ccacgagtggggcttctgcagacactgaacagcatatgccatatatgagc

SEQ ID NO: 814305 - DNA, 60 bp, Homo sapiens
gaacccgagtgctgcttggcggcgaggatggaatggccgtatgcatgttcatgcaaaaca

SEQ ID NO: 814306 - DNA, 99 bp, Homo sapiens
gggaccggcttttggctaatggctttaatgagtgtattcttctcttctccgatttaccaggaacctctttcaggagctataaaagaaagggaggaatca

SEQ ID NO: 814307 - DNA, 98 bp, Homo sapiens
tggataaaccacaaaatgggtaatatactatagtgctgaaccggataaggacctggcagaaaacccaccagggggagaacaatgggcttgctaacagt

SEQ ID NO: 814308 - DNA, 98 bp, Homo sapiens
ttcaggtgcctcattcacatacgtcaaggaaattgagaatccgaatcggaaggtgaggaaaattaaatggctcaacaagcacaatacctaggttacca

SEQ ID NO: 814309 - DNA, 99 bp, Homo sapiens
tggatctcagcaatggggataccattctggaagacttgcccatccaatctggattggcagccaccatttgcatgtgatgttgataaacttcattttacg

SEQ ID NO: 814310 - DNA, 100 bp, Homo sapiens
tcaagcaggttttaaatcaagatttaacattccaacacataaaaattatttatccaacagctcctcccagctcaccagcgactggaaccagcaactctgt

SEQ ID NO: 814311 - DNA, 99 bp, Homo sapiens
tctaaagaggagatggtgagacgattaaagaacctaaaggcagacccagaagagctttttacaaaactagagaaaattgggaagggctcctttggagag

SEQ ID NO: 814312 - DNA, 100 bp, Homo sapiens
ctcttggtcatgtgaactgcacgataaaggaactcaggcgcctcttcttagttgatgatttagttgattctctgaagaccattaaaaatctcaagtgacg

SEQ ID NO: 814313 - DNA, 99 bp, Homo sapiens
gagaccatggcgaggaatgaagtgattgctgacattaattgcaaaggaagaagaaggtgatggtgagtagccttgtctatcttccccttttcaggtact

SEQ ID NO: 814314 - DNA, 98 bp, Homo sapiens
atcgagacggtcatcaacgccctgaagggccgcatcatcgagtgcacacactgtggctgtcgtggctgctctggctgaggctggcgcgctccaccctg

SEQ ID NO: 814315 - DNA, 99 bp, Homo sapiens
caaggtgaagctcgagtgcaaccccacagcccgcatctaccggaagcactttctcggcaagaactggctgcggctttatggctacctgcctcagcccag

SEQ ID NO: 814316 - DNA, 98 bp, Homo sapiens
tctcctgatctggcctcatctgttccagggaggtgggattgactggtggagctgtctaaggctcaagatatagaagcaggagatggcaccacatcagt

SEQ ID NO: 814317 - DNA, 100 bp, Homo sapiens
agatgaccacactccaggaatgccagtgcatcttttgcacagctgtatgaggatacatgggctgcacttcacagaagagccaaagactgtgcaagtgctg

SEQ ID NO: 814318 - DNA, 100 bp, Homo sapiens
gacaaggagaccaaagagaacaacctctctgaagaaggctgcctgctgtttcccggggagatcatgaaacgaggtcgccttcccagcagcagtgaggatt

SEQ ID NO: 814319 - DNA, 98 bp, Homo sapiens
aaaaacaaaagattgagctgcactgtattcctgaatccttcaactgctttctaccaagcgttccatttgaacacgttaaaggaatcaaagagcctctg

SEQ ID NO: 814320 - DNA, 100 bp, Homo sapiens
ccagagtgtatgcactttactacaaagatggacttctctgtacagggacacttgacattcagggacgtggccatagaattctctcaggaggagtggaaat

SEQ ID NO: 814321 - DNA, 107 bp, Homo sapiens
cggcccccatcctccccgccccatcggttgttgtctgggcgggtaaaaatgcatttgcaaagggagaaaatgaaggccaaacagaagcaggctccagcttctgcaaa

SEQ ID NO: 814322 - DNA, 100 bp, Homo sapiens
tggagcttcggaagaaggtagaggttctagagaacactaataggtactccacatcagcattctcaagactggagaagttaggcctcagacatcccaagcc

SEQ ID NO: 814323 - DNA, 98 bp, Homo sapiens
actcttcgagatggttcttggtcctgcagcttataatgttccattgccaaagaaatcgataatcttgtgccgtggaaatcagaagggcaaaacgaagc

SEQ ID NO: 814324 - DNA, 100 bp, Homo sapiens
aggaacttcaggcacatggtgctgatgagggagagatgacatgctggacgtggagaccgatgcctacatccactgcgtcagtgccttcgtcaagctggcg

SEQ ID NO: 814325 - DNA, 99 bp, Homo sapiens
tcggaaagagtgcatctgtagatgctgaaaaatcaatgctgtccaaacttaaacatggaacacatataactgtggtttcccattcaagacctgtgggcc

SEQ ID NO: 814326 - DNA, 99 bp, Homo sapiens
gaaaacgctacgtgagctgggccctgggccagaggcagaaaacggacggaagaaaaggtctggccgattgaagatggaaaatccccaagacattttctc

SEQ ID NO: 814327 - DNA, 100 bp, Homo sapiens
atccccctccagacctgcgggggatgacagctgaaccgcctaaaggagcgagcaccacaaggaagcctatgaggtcaagctgggggcccaccagctagac

SEQ ID NO: 814328 - DNA, 100 bp, Homo sapiens
ccgagggcttggaatctcgagcgggaaaaggtgaatcagttcagacagctgtattccaaagtcatcaatgataagcatgatgatgtcatggccaagtttg

SEQ ID NO: 814329 - DNA, 99 bp, Homo sapiens
ctgcggagagtgtgcggctccaggtgggctcacgcggtatgcatcggtttggtcctataccccttggttccttgggctggaagacagttaaacaaccag

SEQ ID NO: 814330 - DNA, 100 bp, Homo sapiens
gccatgtgagcactgggggtggtgccagtttggagctcctggaaggtcccagagcccctgggtgaagacaagaagaaggggaagccagagaaattgaaac

SEQ ID NO: 814331 - DNA, 100 bp, Homo sapiens
cggagattgttgaggagcagatgcacatcctccacatttctgtgatggactctgacaccaccataccaatggacgaatcactgcagtttaactcctccct

SEQ ID NO: 814332 - DNA, 99 bp, Homo sapiens
tgaggctcattttgcagttgttgaaattgtccccgcagttttcaatcatggtaatgaaagtactaaattcttccaatgagcatgtcattagcattggag

SEQ ID NO: 814333 - DNA, 100 bp, Homo sapiens
gatgagctgtcctttcaggaaggagccattatttatgtcatcaagaagaatgacgatgggggaaatttgcagtggtgagaaaatgtataaagaaagattc

SEQ ID NO: 814334 - DNA, 98 bp, Homo sapiens
gagctttctataaatagcaatccaggtggtggagtctatggcccttctccttgaatctgagtgaaattagtgagtctttcaatccaaagactacagtc

SEQ ID NO: 814335 - DNA, 110 bp, Homo sapiens
aacaagggaggagaagacaagctaaaaatgattcgggaatatcggcaaatggaagatgagaatgtgcctactgctcctgatcctccaagtcaacatttacgtgggcatgg

SEQ ID NO: 814336 - DNA, 100 bp, Homo sapiens
aaaggagtatctccagcctttcaaggacaaactagaggagttcttccaaaaagctactggtcagaagttatatgtaaggctctttcaacgtaaattaagc

SEQ ID NO: 814337 - DNA, 100 bp, Homo sapiens
agtagatattaataccttacaagagggaatgaaagctactggttgattttaaagtgcctgggcctcacaggtttggagatgtcccagaataaggcacaat

SEQ ID NO: 814338 - DNA, 50 bp, Homo sapiens
caaaggcatggaagtatgaaaatggtgaaagaacttgtcctggacaacag

SEQ ID NO: 814339 - DNA, 99 bp, Homo sapiens
ctgtcattaagttgagtacagtgttggttcgacaagtggcaacagatagtagcttattggccaaggacagccccccgacacctaccatgtacaagtatc

SEQ ID NO: 814340 - DNA, 98 bp, Homo sapiens
gactcattgtaccagatgtcaaattctacaaggagggattttatattggaagacatggatcttgctgccaacgagatcagcatttatgacaaactttc

SEQ ID NO: 814341 - DNA, 98 bp, Homo sapiens
gatgcccaccgggatggagaaggaggaggaatcgatcgttaactgaagacaatatgcaaaattctcacatggatgaatacagaaattctagtaatggc

SEQ ID NO: 814342 - DNA, 98 bp, Homo sapiens
atcgacaagtccgggagctgggcggccatttaccagagccatcatcaaccactttaaccccaaaattgagtcctacgctgctgtgaatcacatatccc

SEQ ID NO: 814343 - DNA, 100 bp, Homo sapiens
tgaacactcaagtgaagcaaaagccttccatgattacgcctctgtgtcctttgtcccaatagtaacaactccctcctggcctttccgggcacgcacacgg

SEQ ID NO: 814344 - DNA, 98 bp, Homo sapiens
ctggttctccatcattgtcaccctggccctcgcggtggctgcctttagcaagaagttatgaaatggaatggatggggatataatgattctaaattcat

SEQ ID NO: 814345 - DNA, 98 bp, Homo sapiens
cgccccggagcttggctacgccaaggagtctagcagtgagcagtacgtgcctgatgtgttttataagccaccagctaagtaccttcttccagaggtga

SEQ ID NO: 814346 - DNA, 98 bp, Homo sapiens
ctcacctgtgcgggatggaacaaaagccaggtctgcgggactaggtcctccaagcgcatctccaagctggcctatcaccaaggcgtggtcattgtgac

SEQ ID NO: 814347 - DNA, 98 bp, Homo sapiens
tgacctcgtgattgtcttacatgtccgtgtgaagagaccaaacaggctttgtatatgggacacagcaggacaggaacggttccagtctctcggtgtgg

SEQ ID NO: 814348 - DNA, 51 bp, Homo sapiens
gcgcgactcggcgcccgcccgcgggaaatgatcttcattggttagcatgtg

SEQ ID NO: 814349 - DNA, 131 bp, Homo sapiens
tgaactcattgttaagcacaagttcacgaaagcctacaaaagtgtggagaggttccttcaggaggatcagagtgcttgtgatttcacgtatttttgctgaactcgtaaaagagacacttggatggtggatt

SEQ ID NO: 814350 - DNA, 100 bp, Homo sapiens
aaacgtggagatcaactcctctctgttaatggagtggagcagacgcctccgcctagacctgaagcctaccccatccccactcagacgtacaccagagagt

SEQ ID NO: 814351 - DNA, 100 bp, Homo sapiens
aagctgtgatgaatggcttggcacctggcagcaatgggcaagacaaagttgccattgccccaaatggagccttacagttggcaagtccaggcacagatgg

SEQ ID NO: 814352 - DNA, 98 bp, Homo sapiens
cgtggaggcagaggtggcatgggctcctggaatgaggccgcccatgggaggccatatgccaatgatgcctgggcccccaatgatgagacctcctgccc

SEQ ID NO: 814353 - DNA, 100 bp, Homo sapiens
ggaccctgcggactactgcaaagaacttggagcgtgatgcccagaagtgtgtgaactggtctgtgaccacaaagatgagaaccgcatgctgagattggtg

SEQ ID NO: 814354 - DNA, 98 bp, Homo sapiens
agttttgggagatgggagatggtgctatacggtctttagggttacgtgaagtcaagtaaaatcgcacactggtcgagtctatgctgtcttgtcaaaga

SEQ ID NO: 814355 - DNA, 100 bp, Homo sapiens
atggccccgatgggatggagcccgaaggcgtcatcgaggttactcactataaacaatatccacccaacacaagcaaagtttattcctactttgaatgccg

SEQ ID NO: 814356 - DNA, 100 bp, Homo sapiens
tcagcctgagacccatccctagcaggggaacaggaacctgataaagaatcaggagcctcagtggatgaagtagcaagacagttggaaagatcagcattgg

SEQ ID NO: 814357 - DNA, 100 bp, Homo sapiens
tgtggggtgctgaatggcaatggcacaaagttctctcgatcagggcatacatctttcttcgacaaaggaaacctctgtagaggagcaggatgcaaccgac

SEQ ID NO: 814358 - DNA, 99 bp, Homo sapiens
gaagatgtcttagcttctaatggggtgacttcatggtcatgacgattttcttcaatgtgagcaggcggtttggctatgttgcctttcaaaactatgtcc

SEQ ID NO: 814359 - DNA, 100 bp, Homo sapiens
ggctctttgagaatgtggtggccatgggcgttagtgacaagagggacatctcgcgatttctcgaggtcaccaacctgcggtccaaggtgtctcacctggc

SEQ ID NO: 814360 - DNA, 100 bp, Homo sapiens
ctgtactacaagcccaccaagctaaagaggctgcccagaaagcagttaacagtgccaccggtgttccaactgtttaaagcttcacaggctgctcaagaag

SEQ ID NO: 814361 - DNA, 99 bp, Homo sapiens
cacctacctgcacccgctcagcgagctcctgggcatcccgctggaccaggttatttgttatcaaagcgtgaaggccaagcagggtctccagagaaaccg

SEQ ID NO: 814362 - DNA, 98 bp, Homo sapiens
atgtggtggaatatgccaaggaaaaactggagagcttcatcaaaaatagtgatagctttgataaatttgtgaagctgggaatcatttcatcaatgtaa

SEQ ID NO: 814363 - DNA, 98 bp, Homo sapiens
aagatctattaagtgcaaaagtttgtgacttgaagtggatacatatgccgcagaatggaattcggcattgttcctacacagcttctcggcaacatctc

SEQ ID NO: 814364 - DNA, 100 bp, Homo sapiens
agaagtttcatcaaagcagcaaatcttatgccttcattcatccggcatggtccaacaattccaagacgaactgatatctgtcttccagattcaagcccta

SEQ ID NO: 814365 - DNA, 100 bp, Homo sapiens
gtgggaacaccatggtcctgaagcctgcggagcagacacctctcaccgccctttatctcggctctctgatcaaagaggaatcctatccatcttcttcacc

SEQ ID NO: 814366 - DNA, 100 bp, Homo sapiens
gaagtacccccaccacgcctctgcaatcatgggtcaccaagagaggctgagagaccagggaatgaaagctactggttgattttaaagtgcctgggcctca

SEQ ID NO: 814367 - DNA, 100 bp, Homo sapiens
atctgatgtgatgtatgcagttgaagttcctggaccccctactgtcttagcactacacaatggaaatggcggaccgtgaatagtctcccacaatacgcag

SEQ ID NO: 814368 - DNA, 100 bp, Homo sapiens
ctttcaggcaatcctgcttgctgtgtgcttaatcatttctgcatgtgcaaggatgtgaagagctggcaaaacttgacctgactgtgaatttcattggaga

SEQ ID NO: 814369 - DNA, 100 bp, Homo sapiens
cgaaatccccctgaaggtaccgcggacctcgccccgggacagcgaggagctgagggaccctggagagcagagaccatgtctgacatagaagaggtggtgg

SEQ ID NO: 814370 - DNA, 100 bp, Homo sapiens
gtcagcaacgcacagctatcttgacccacccttgacattgctacaagtggttggtgtggtctctgtggctgtggccgtgattccttggatcgcaataccc

SEQ ID NO: 814371 - DNA, 99 bp, Homo sapiens
ttgtattgagtcagcacaaatttgcaagcaccctggaggagaagaggttctgctggaacaagctggtgtagatgcaagtgaaagctttgaagatgtagg

SEQ ID NO: 814372 - DNA, 100 bp, Homo sapiens
tcctccacaccttgtctgtctttgataataaagatgacattgccagttttgtcaaagggaaggtaaaggtgacgatgcctggggagcctgtggacgtggc

SEQ ID NO: 814373 - DNA, 100 bp, Homo sapiens
caatgggagaaaacacgatgaaaacagaaccgacttctccccttgtggaattacaagagatttcgactgtggaagctccaggtgctccttcagctccaag

SEQ ID NO: 814374 - DNA, 100 bp, Homo sapiens
tcagccacgcagagtcctgccttcctttggaacatccagtcatggataaaaatgagctggttcagaaggccaaactggccgagcaggctgagcgatatga

SEQ ID NO: 814375 - DNA, 98 bp, Homo sapiens
acaaaagactcagagactatataagtagcttaaagatgacaccttgcattccctatttagagactttagaagacagctttccatcgacactaggccct

SEQ ID NO: 814376 - DNA, 100 bp, Homo sapiens
gtcagccttcccagtagctggaactacagattctggaggaagccgaccaccattgttgccaccgggaggaagatccacatctgcgaaacccttttcaccc

SEQ ID NO: 814377 - DNA, 98 bp, Homo sapiens
tcattctctcatccagctcctcggcctcatcggaacatttccaccaccattactcctttggaaactggagctgccactccgaaaccagtcccagaacc

SEQ ID NO: 814378 - DNA, 100 bp, Homo sapiens
gcaccatgatctgtggctgggataagagaggccctgtacctgttcctgacttttccacggattgtcttcatgctgggctttgtcgtggttctgagcttcc

SEQ ID NO: 814379 - DNA, 99 bp, Homo sapiens
tcaaccgcttcgtgcaactctccgggcggccgcacctgccagccagatgaaaactcgctggatttttcctcctgtatgttacggcctgggattaaaaat

SEQ ID NO: 814380 - DNA, 100 bp, Homo sapiens
agctggtgaaggattcttctgaacccccaccctaccccctaaagctgtcggaaaaggtaacagaagatggaactcgaaatcccaatgaaaaacctaccca

SEQ ID NO: 814381 - DNA, 100 bp, Homo sapiens
gaagacgcgaccgcggcgcgagtcaccatggatcctgctgggatttttgagctggtggaagtggttggaaatggcacctatggacaagtctataaggtcg

SEQ ID NO: 814382 - DNA, 98 bp, Homo sapiens
gcagacctctcgctgcttcaggaggacctgcaggaggacgcagacggatggaaatcctcattgacgattcaatttgttgaaggccaatttgtggactc

SEQ ID NO: 814383 - DNA, 100 bp, Homo sapiens
aagtggagaagaaatcagtcagccgcagatacggatataatgcaggagaagctacccaccatgcggtggattctgcggtcaatgttggcgtaactgccta

SEQ ID NO: 814384 - DNA, 100 bp, Homo sapiens
gctcttacacccaccatcccactggcctctgataaaggtgtggaaacaggaagagaactagaactggaagtaaagcattgaagatgtgactgaattgctg

SEQ ID NO: 814385 - DNA, 100 bp, Homo sapiens
tttacgcacagctgcctgtcaccccagatgtcctcatcatcccgtcagagctgaggtacttcgtgaagggattatcttgaacacataacctccattggcc

SEQ ID NO: 814386 - DNA, 100 bp, Homo sapiens
cgtaagcctttggtcataatcgctgaagatgttgatggagaagctctaagtacactcgtcttgaatagtggtgggggaaaagtagctccagctcaaccat

SEQ ID NO: 814387 - DNA, 98 bp, Homo sapiens
aatgtcctgtcctatacattccagctctttcaccatgcctggatcacttcctttgaatgcagaagcttgctggccaaaagatgtgggaattgttgccc

SEQ ID NO: 814388 - DNA, 75 bp, Homo sapiens
tcttctcaccatttctggccaaaactacaaacaagacttcgcagaactgcagttaatccctggggtctgtggatt

SEQ ID NO: 814389 - DNA, 100 bp, Homo sapiens
tgaagttataaggttccccatggttgtctgttttgatgccaagataaactttgatgacaacgcagaattccgacaaaaagacatatttgctatggacgac

SEQ ID NO: 814390 - DNA, 100 bp, Homo sapiens
ggtgaggtacaggctcagtctgcggccaagactccgtcctgcaagggcaactccaacaacattgccaccgtggacatctccgcaggcttcgtgggcttag

SEQ ID NO: 814391 - DNA, 100 bp, Homo sapiens
tccccttggaccgagccgatcgccgcggggcagttcgggccggctgtcctggcgcggttatcaatactctggctgaccatcatcatcgtgggactgactt

SEQ ID NO: 814392 - DNA, 100 bp, Homo sapiens
gtccctgggagccgagatgtgggggcctgaggcctggctgctgctgctgctactgctggcatcatttacaggaaccacagaggacacattaataactgga

SEQ ID NO: 814393 - DNA, 98 bp, Homo sapiens
aagcagccttagccctagtgtagagggttacacatcattttggaatgactgtatatcatctggattacgtggctgtatgttaattgaattagcattga

SEQ ID NO: 814394 - DNA, 100 bp, Homo sapiens
agcaggggacatcgcactcctgtatctccaagagatagaaagggactacgccgacacagagctcctgctttcccgagaaaacgtggaccaggaggctctg

SEQ ID NO: 814395 - DNA, 98 bp, Homo sapiens
tgggagtgatgaagctggctgcctacaggctgctcctgctaaggccaagccggctgaagctcctgctgctgcagccccaaaagcagaacctacagcag

SEQ ID NO: 814396 - DNA, 100 bp, Homo sapiens
ccgagagcgcgaatatcgtcatcgttagaaggttttggcttgtggttaacgggcatgttgataaacatccattcagatcatatcctaaggaatctcagaa

SEQ ID NO: 814397 - DNA, 98 bp, Homo sapiens
tttatggtgcactcttcagagaggctattcatgctcttatggaaaatgctgtgcaacccttactcacttctgtgggagatgctatagaggccataatc

SEQ ID NO: 814398 - DNA, 100 bp, Homo sapiens
aatgagtatggcagtgtcagctgtacagccacactaactgtgacaggtgaggggaagtggcttcgaaacattgactattaccgtttagatggttccacta

SEQ ID NO: 814399 - DNA, 98 bp, Homo sapiens
attattgcgcgtggaacggctgcttttggaagataacgaaggaggcccaacttcattcaataaggagcctgacggatttatcccagacggtagaacaa

SEQ ID NO: 814400 - DNA, 98 bp, Homo sapiens
tagaatctgggactttcttcgttgccatgaggaaagaattctccgaggtccctccagctacaaggtgggcaccatggcggagaagtttgactgccact

SEQ ID NO: 814401 - DNA, 98 bp, Homo sapiens
gaacaacaaaggtctacaaactcgtcatccacaagaagggctttgggggcagtggtgccttatgcccgctcagaggcccacctcacagagctgctgga

SEQ ID NO: 814402 - DNA, 100 bp, Homo sapiens
tatttttgccaattgtgtggccttagctatttacatcccattccctgaagatgattctaattcaacaaatcataacttgcctgaacacttgcctttgcag

SEQ ID NO: 814403 - DNA, 98 bp, Homo sapiens
aaccatcactgaggtggatgaggagcatgtccatcggggcctcttcaaaatttatcccctcccagaagacccagccatccccatgcccccaagacagt

SEQ ID NO: 814404 - DNA, 100 bp, Homo sapiens
atttggactttatccagtcacacctgcggaggttctgccttcagtacatcgtggacatcaagcctgctaacatggaggagctgaccgaagtcatcactgc

SEQ ID NO: 814405 - DNA, 100 bp, Homo sapiens
acaatcaactgtagaagcctttgtagcaggttgaaggggcccggccaggactcggggaagggtggcctgagagcagcgatgacctctggggtcactgtcc

SEQ ID NO: 814406 - DNA, 100 bp, Homo sapiens
tgaagctgcagaccctcgcagtgagtgttacagctcttaagacgcaaacatgcagatctttgtgaagaccctcactggcaaaaccatcacccttgaggtc

SEQ ID NO: 814407 - DNA, 100 bp, Homo sapiens
tgtttgttggctttatctgtagaagaggctcctacctcaagagcagacacgccgctttttggatgcctcctatgcctggcgggagtcttgtctgagctgg

SEQ ID NO: 814408 - DNA, 100 bp, Homo sapiens
gttagggcgtggcctgaggcttggataagtgggtcttctcacaagactttcaggattaagcgattcctggccaagaaacaaaagcaaaatcgtcccattc

SEQ ID NO: 814409 - DNA, 100 bp, Homo sapiens
cgcggccacccggggagacgtcttagacagtcgtggttcctgtgatctgtgtcctctttgcagaaggctctcaaaattagagagatgtgtaattgtccac

SEQ ID NO: 814410 - DNA, 50 bp, Homo sapiens
cgtttggtctcctgccgtgcccggattctcaagattcttgtagaaacctg

SEQ ID NO: 814411 - DNA, 95 bp, Homo sapiens
aaactgaagctgactgcatcaacaacatcaatgacttcctgaaaggatgtgcaaccctccaagtggaaatggaatttcactcttgttgcccaggc

SEQ ID NO: 814412 - DNA, 100 bp, Homo sapiens
gcctcccgagtggctgggattacagtacctccctgcacttggctattcaaaacgggtccatctgatgaatcctatggttccaggattaacaggcagcaaa

SEQ ID NO: 814413 - DNA, 100 bp, Homo sapiens
tatggctctaactgttggtgtggggacagtgatggatgctagagaaatatttcagcagttgaatcagttgaattcacttcatcaagaaactatcatgaaa

SEQ ID NO: 814414 - DNA, 98 bp, Homo sapiens
ttggatacactgggatccagaacactcatatgaggttgaagaagaggatgaacttgaatctggagaccaagaggatgaggatgatgaaagtgaagatc

SEQ ID NO: 814415 - DNA, 104 bp, Homo sapiens
aaatgtagacaatggttagagaagaattttccaaatgaatttgcaaaacttactgtaggaggctgatccgatagagtaatacctaattatatcaccatgagatg

SEQ ID NO: 814416 - DNA, 100 bp, Homo sapiens
aggccaccatcgtgggcgtccgcaagaccgggcagatctggcccaacgatggcgagggcgccttccatggagacgcagttggagaacatcaattaacagg

SEQ ID NO: 814417 - DNA, 99 bp, Homo sapiens
tgaagtaacagcagcaatgaccttccctcgggaattccacctctgcgtttttccctccaggaccgtataatagacgctggccccaaaggaaactactct

SEQ ID NO: 814418 - DNA, 98 bp, Homo sapiens
gaatagtagcaggcggcggcggcggaacgccaggcaggtggccatcatcgcagggaactttgagcttgcagaggttatcaagacccacaaagactcgg

SEQ ID NO: 814419 - DNA, 98 bp, Homo sapiens
cgacagcgagtacacctgcaccatccaggttgctgaaaagccaggagtcaaaatgactgagcgctttgactgccaccattgcaacgaatctctctttg

SEQ ID NO: 814420 - DNA, 100 bp, Homo sapiens
gaagagaggatgtacggccagaggagattgcagaccaagaattagcagaagcccttcaaaaatcagcagaggatgcagacggagtcttgctctgctgccc

SEQ ID NO: 814421 - DNA, 98 bp, Homo sapiens
tagctgttgatgctgtaattgctgaacttaaaaagcagtctaaacctgtgaccacccctgaagaaattgcacagggaagtatgggtagtattacctgc

SEQ ID NO: 814422 - DNA, 100 bp, Homo sapiens
aataaatccatcagaatgacaccttctcaggttgcctttgaaataagaggaactcttttaccagctaagtgttaggcggaaaaatactaaagagatgttt

SEQ ID NO: 814423 - DNA, 100 bp, Homo sapiens
aggaggagtcctccacctcgtcgcaggtattgatgaagatgaccctactgctgatgataccagtgctgctgtaactgaagaaatgccaccccttgaagga

SEQ ID NO: 814424 - DNA, 100 bp, Homo sapiens
cttctgcccctgatcgcttggttttccttgcagtcgcctgctgctgtcgtcgggaggtaatgctatgggctatgtacgaatgataagatctggtggtctt

SEQ ID NO: 814425 - DNA, 100 bp, Homo sapiens
ctcaaagtgtgccttctcgggggagaggtgatatccagcctcagttggacagtgctctccaagatgtcaatgataagtatctcttattggaagaaacaga

SEQ ID NO: 814426 - DNA, 98 bp, Homo sapiens
ctgaaccgctataagatgatccgactcctgattatgtatggcgcggatctcaacatcaagaactgtggcagcagtcaaggctttctggggggcaaaag

SEQ ID NO: 814427 - DNA, 98 bp, Homo sapiens
gggcatcaccaacatagccatcgacttcggggagcagggatggttgtgcgagctgttacgctggaaagaagatccttctccagaaaacagaaccctgt

SEQ ID NO: 814428 - DNA, 100 bp, Homo sapiens
ggcctctctggaagcattacttccagaatacccaggaagtgtttggattgtgagctatttcagaactgttctcaggactcattattttaacatttgggag

SEQ ID NO: 814429 - DNA, 99 bp, Homo sapiens
tgctgtgaacacgcaccgggacaggcctcaggttcggagcgaccttggccgttggcctgaccatctttgtgctgtctgtcgtcactatcatcatctgct

SEQ ID NO: 814430 - DNA, 99 bp, Homo sapiens
gtaactgtgtgcaaggataacagtcgtcctcttgagttctggcgccttgactactgggaagatgacttgcggcgccggcgacgatttgtgcgtaaccct

SEQ ID NO: 814431 - DNA, 99 bp, Homo sapiens
cactgcgttcctgggaagggctgcgaggcctgccctccaaacctgactggggatgggcggcactgtgcgggataccaagggtttggtggacttccgaga

SEQ ID NO: 814432 - DNA, 98 bp, Homo sapiens
gtctgcccctattgtaagtgcagatggaacacaacaggagtgttcagcctgggtgttcctgtagatgctctcttctttattggtaaccagttggtggc

SEQ ID NO: 814433 - DNA, 100 bp, Homo sapiens
gctgctgcacccaaactttgcaaggaattcggtccagaggattacggcgaagagcaggggaaatgctgtctgtagctgagcacttcctggagcagcagat

SEQ ID NO: 814434 - DNA, 98 bp, Homo sapiens
aacgtctacactgtacatgctttttattacaagactacggagcataggaggaaaattcatcatctgaaaccccgagactcttcagttgaagttcgtag

SEQ ID NO: 814435 - DNA, 100 bp, Homo sapiens
ccatctaaaatacgaaggtttctggctgggagttcatgatcaagtgttgcccacaccaaatgcttcatccagagtcatagtacatgtggatctggattgc

SEQ ID NO: 814436 - DNA, 98 bp, Homo sapiens
ggtcatgtgcacagattaatggctggatccatggcagctgaactagatgcagagcacgcccagaaggtcctggaaatggagcacacccagcaaatgaa

SEQ ID NO: 814437 - DNA, 99 bp, Homo sapiens
atagagtttgtggacagatttatattggcccagtgacgagcaccatccggaagtgaaggctgatgggtacgtggacaacctcgcagaggcagtggacct

SEQ ID NO: 814438 - DNA, 98 bp, Homo sapiens
cagaaccaccgacatctttcagacggtggatctatgggaagctcggaagtcttctggccagcctggtcgactgccacccccaactctggccccaccac

SEQ ID NO: 814439 - DNA, 100 bp, Homo sapiens
agcaagaaaagcctctgggagcagaagggaggctccaagacctcatcaacaattaaggagcgcagctcagctgggctggaactgccctcctggaactccc

SEQ ID NO: 814440 - DNA, 100 bp, Homo sapiens
tgcacaatggccgctgcctggacaagatcaatgagttccagtgcgagtgccccacgggccctgtctctgcccctggtggtcatcgtccatggcaaccaag

SEQ ID NO: 814441 - DNA, 99 bp, Homo sapiens
ccaagcttccaggtgtcccagaaacccaggaaatcgagactcatgactcccagagaggatggcatctagaagctctggccaggctgccgcacctctaca

SEQ ID NO: 814442 - DNA, 98 bp, Homo sapiens
ttattacatgaagtatcatgtttcttttgtgaagaaatatgggaacctttttagcttggagcttggtgacatatctgcagttcttattactggcttgc

SEQ ID NO: 814443 - DNA, 98 bp, Homo sapiens
ctcaatgagcacatgaccagcttagcttctgtcctaaaggagtcattctcatttgacgatttatctgtggacttcacccaaaaggagtggcagctact

SEQ ID NO: 814444 - DNA, 100 bp, Homo sapiens
ctaacatccagaagatcacacagtgtttatgaatctgatgaacaagaaaagagtgcctatcaagagtatgacagtgacagtgatgttcctgaggaactca

SEQ ID NO: 814445 - DNA, 98 bp, Homo sapiens
tgcaaaaaagacccagccaaaggccaggtacgaactatggctcgagatttatacgatgaccattttaaagctgttgaaagcatgcctcgtggagtagt

SEQ ID NO: 814446 - DNA, 100 bp, Homo sapiens
gcctcgtcaaccagcagagcttccaggacatcaagcccatgcgggaccagatcatccgcgtgaagcgggccacccagtgctcctgcagaagatcgttcag

SEQ ID NO: 814447 - DNA, 99 bp, Homo sapiens
ggcaattgcacttaaagaaggatttcattttgaactctttcgacgtgtagcagcagctttgccgggaatggaaagcacacaggacagaagcagagaaga

SEQ ID NO: 814448 - DNA, 99 bp, Homo sapiens
gatggaacacttcagtgcattcaagggaacctcagaacctgttctggatccacagcaaatccaagcatttgatcagctttgccgtctctaccgaggaag

SEQ ID NO: 814449 - DNA, 100 bp, Homo sapiens
ggaaacggtttgtggctggagtaggagcaaacagcaaagtgtctataaatgtgatttcctgaacttacagcttcagcaaccactccagcttgcacaggat

SEQ ID NO: 814450 - DNA, 101 bp, Homo sapiens
cgccattgtcggctactgcgacgccaaatacgtctgggcagccacggccgggggcgtctttcagagcattacgggttattttggagctgttggagcactcc

SEQ ID NO: 814451 - DNA, 100 bp, Homo sapiens
attgtggggatgttaggatattgtggaacggtgaaaagaaatctgttgcttcttgcatgggatccgagaacgctctaagcctgtccacgagctcaatagg

SEQ ID NO: 814452 - DNA, 100 bp, Homo sapiens
gttggagcagggagaggagctgtggataacgggaggtgaatttccatgtcaacatagtcctggaaattctgaaacagccacacctacaaatgtagacttg

SEQ ID NO: 814453 - DNA, 100 bp, Homo sapiens
agtcttcctttattactggagacataaacagttcagcgtcactcaacagagatattaataaggcagcggaaagaagaaatatgaatacggctccatcaag

SEQ ID NO: 814454 - DNA, 50 bp, Homo sapiens
actgtactggtatagcaatcaaatgttgtattccctgaatgactataaac

SEQ ID NO: 814455 - DNA, 98 bp, Homo sapiens
tctaaatgtgcacccaatacctggggccacagcattaccactggttgtaagtttggatttaggtggcgagtagaaaaagaagtaatttcaggaaaagg

SEQ ID NO: 814456 - DNA, 98 bp, Homo sapiens
atgctggtgaaacacaaggagaccgggaaccactatgccatgaagatcctcgacaaacagaagacctggagtggaagatcatttatgttggctcggct

SEQ ID NO: 814457 - DNA, 98 bp, Homo sapiens
gcgctgcgcaggacttctcctggcggcgctgcggatccagggggtcggctgccaggtacagatgtggaagatgtcaagtttgtgatcaactatgacta

SEQ ID NO: 814458 - DNA, 100 bp, Homo sapiens
ggtgtacttgcaagaaacctcaggacttgagtaacagcaacatggtggtggaagatggatatgaattttttgctaaacgacagttggtaaccttattttc

SEQ ID NO: 814459 - DNA, 100 bp, Homo sapiens
tgggccagttcaaggagctgctgaccaaaaagggcagctacagactgcttttcaggaagccttggacgctgcaggtgataaacttgtagtagttgacttc

SEQ ID NO: 814460 - DNA, 98 bp, Homo sapiens
aacaggactacgagctggtgtccacgttaggatcccaaagctcagcaagttactggctgaccaacaaagttcctatcaaaagacccagcacaggtctt

SEQ ID NO: 814461 - DNA, 100 bp, Homo sapiens
gtttgttgtgcttgtcaagatcaggtgtggatgaggtcaccattgtcaacattttgaccaaccgcagcaatgcacagagacaggatattgccttcgccta

SEQ ID NO: 814462 - DNA, 135 bp, Homo sapiens
ctcggtcccagtgccccacaccaccgcactgtcgctgcccgcctgccctgaggagtccccgctgcttgatggagtggatgttgaagatgatccgacttgctcttggccagcttcctcaccttctagcaaggatca

SEQ ID NO: 814463 - DNA, 98 bp, Homo sapiens
aagaagttatgtccagatcttctactggcacaagttcgtgagtcccgtgggaaagctaacctcaccaaagaggtgagaagatgactcgagaagaagta

SEQ ID NO: 814464 - DNA, 100 bp, Homo sapiens
agcggacaaataaaactcgctgacttcggccttgcccgcatctatagtttccagatggctctaacctcagtgggcggcgactggcggcgcgatggacctg

SEQ ID NO: 814465 - DNA, 98 bp, Homo sapiens
cgggctcatcttcaggctgctgctgcccatctgcctggcagtaggtgtaatggataggtaacagagaagacctcgtcccttcctagtcagggcatcag

SEQ ID NO: 814466 - DNA, 100 bp, Homo sapiens
cgactgcatcatgctgtctggagaaacagccaaaggggactatcctctggaggctgtgcgcatgcagcacctggttcagacagtaactttaattccagga

SEQ ID NO: 814467 - DNA, 100 bp, Homo sapiens
tgcgtggtgatctggggtataccgttttagtcttgggggtagagtgactgcttgcgaaccagttcagcagtgcctcaggattattgatgaaatgcttgat

SEQ ID NO: 814468 - DNA, 100 bp, Homo sapiens
agttggtgggagacgggtgaggtacaggctcagtctgcggccaagactccgtcctgcaaggatttaagaggggtgcagatcccggaatgcctgaaccaac

SEQ ID NO: 814469 - DNA, 100 bp, Homo sapiens
gggaagaggcggcagacagcggggtgtccctggccagtgtccttccacctgtccacaagcatggggaacatcttcgccaacctcttcaagggcctttttg

SEQ ID NO: 814470 - DNA, 100 bp, Homo sapiens
cttcagaaacagtgctgaagcctttaaatgcagcatctgcgatgtgaggaaaggcacctccaccaggtctacaaggaagtcttcacgaggagcagtgaga

SEQ ID NO: 814471 - DNA, 98 bp, Homo sapiens
ttgagaactggctgccagtctcctatgtcccctattatctcccctgcccagagatcttattctggaacttttcaaagcctgactctcttcttgaaaca

SEQ ID NO: 814472 - DNA, 100 bp, Homo sapiens
ccagcagcacgtgttggaatggacttcggaccctggcctcttgggatgcaaagcgatcctgggcatgcacacgctcatgagtaaccagcagtactaccag

SEQ ID NO: 814473 - DNA, 100 bp, Homo sapiens
tgaccgagccagtttgaaactgggcctagataaagctgtgttacagagcatgagtggaagagaaagtaatgttggtggtaatcttggagaggcagaatat

SEQ ID NO: 814474 - DNA, 100 bp, Homo sapiens
gaactctttgtcatttccccggaggagatgttaaagtaacccatcttgcaggacgacattgaagattggtcttctgttgatctaagatgattattttgta

SEQ ID NO: 814475 - DNA, 101 bp, Homo sapiens
tctcgtgattttcattccaagctaaagacatagtcaactgtgacctgaaatctacactacgagtgttgtacaacctcttcaccaagtaccgtaacgtggag

SEQ ID NO: 814476 - DNA, 100 bp, Homo sapiens
aaaaaagagaaacctgggtgaactttcacggacaacctcagaggacaacgaagtgttcgcacctttgtgtgtcctacagaaattgttgcttttagtgaca

SEQ ID NO: 814477 - DNA, 100 bp, Homo sapiens
cacattatcattctcttcactcgagagatgaggacactgaaattcagagaggggaagtgatttgcctcagcttgtactgcctactctgtgtatgatgaag

SEQ ID NO: 814478 - DNA, 100 bp, Homo sapiens
ttgaagaccttcatatttcccaagatgccactggtgaagaagactgtggatattcataaggagaaagtggcacgaagagagattggtattttgacaacaa

SEQ ID NO: 814479 - DNA, 98 bp, Homo sapiens
caagtatctgaagatgggaaagcccatcctttcaaaatcaacttagaatcagaaccacagcagcagtgttgtactgctacttctataaacggacagcc

SEQ ID NO: 814480 - DNA, 100 bp, Homo sapiens
gctttgatagtcgtaccatatgcagaagtgaagctgtggtctaccaatctagacaactcagtggcaagcattgaggcaaaggctaatgtgtgctgtgtta

SEQ ID NO: 814481 - DNA, 98 bp, Homo sapiens
ttttttgtgcagtgggcaggaagaacccatcgggcagctacacatcttgaaagagaagctcttcctgtgagctaatatgcaagtgaaccagtgacctg

SEQ ID NO: 814482 - DNA, 99 bp, Homo sapiens
gtaattttgctgtggaaagacttcacgtcttgccgaatgaaagccaagatcaaggctcgagatcttcgcgggaagaagaaggaggagctgctgaaacag

SEQ ID NO: 814483 - DNA, 100 bp, Homo sapiens
agagtctccatcaggaaaacaagcctggttcagttaaacctactcaaactattggttggcaaaagcagcttttgatgatgcaattgcagaactggatacg

SEQ ID NO: 814484 - DNA, 100 bp, Homo sapiens
actgtacagttacctccgtgtgtcacaggaagactcttattgcagtgagcatgctgacctaccccttcctgctagttggcgacctcatggctgtgaacaa

SEQ ID NO: 814485 - DNA, 100 bp, Homo sapiens
cggtggcgcgcccggccccgcccgcccgaccaagcgtcggacgcggcccggcgccgagccatggtgttcccggacgcagtagatcctggagatgtggtta

SEQ ID NO: 814486 - DNA, 98 bp, Homo sapiens
gggagcagcacttccacagccaagtgcgggagtccacgtttggaaattttagcattcaggtgccaggaatgcagatgggacagccagtgccagaaaca

SEQ ID NO: 814487 - DNA, 100 bp, Homo sapiens
atgaaccagcagcgtgggaggcgttttagacactttttcaaaaatggcaatggtatcagaattcctcaagcaggcctggtttattgaaaatgaagagcag

SEQ ID NO: 814488 - DNA, 100 bp, Homo sapiens
taaagatgaacctgactgggaatcacttatttttctggctaggcttatacctcgcatgtgtcacaacgttaacaggtggtattaaagataatcaaacatt

SEQ ID NO: 814489 - DNA, 100 bp, Homo sapiens
aaactgggcaagaggccccagcccgtgaaaagtgaggtttattccctgctgtcctgaatcttgcttctaatgctcttatcacgaccaatgcaacatgtgg

SEQ ID NO: 814490 - DNA, 100 bp, Homo sapiens
ttaaatttatgaactcgaaatgaagcggaaagcagatatgcgcgtcagcatactttggcgggtgcaacattagaggaaatcaatcagcactgggactggc

SEQ ID NO: 814491 - DNA, 98 bp, Homo sapiens
caacggatgaaaatgaagacgacattcagtttgtcagtatttgatccaggctaccaacgagaccaatgttaatattcctcagatggccgacactctct

SEQ ID NO: 814492 - DNA, 144 bp, Homo sapiens
agctgaagaggaaaggggttgaatttcccatggcagacttggacgctctgtctcccatacacacaccacagcgggtgccctaagacagtggaaaacttctgtgttcacagcagaaatggttattataatgggcatacatttcac

SEQ ID NO: 814493 - DNA, 98 bp, Homo sapiens
gcagagagtccccagcaggaaggtctcacctgaggtgaaccttcgaccttggacttctcagcctccagaatgcccccaaatacatcaagatgtttgta

SEQ ID NO: 814494 - DNA, 100 bp, Homo sapiens
aaagaaaccgctgaggcttatttgggaaagaaggtcttaacccatatttaactttgaacacctctggtagtggaacaattcttatagatctgtctcctga

SEQ ID NO: 814495 - DNA, 100 bp, Homo sapiens
atggacacagtgatgaagaaagtgttagaaacagtagtggagaatcaagcagaaaaagtcctacctggagcgaagcgttaaggaagctgaggacaacatc

SEQ ID NO: 814496 - DNA, 100 bp, Homo sapiens
gctgcccttgagtctaagttggcccaggctgaggagcagctagagcaagagaccaggaaacatgatgaaagtattgagggggcatcagaattgggtgtac

SEQ ID NO: 814497 - DNA, 98 bp, Homo sapiens
attgccagcagaagaaagtcaagcagatggtcgaggagctcaatctgaaattgaagtgtctgtctctgcaaggaatatcagaaggctactaagtttcc

SEQ ID NO: 814498 - DNA, 98 bp, Homo sapiens
cccagaacaagaagaagaagaagtctggaggcttccagtccatggggcgagtgaacgtgaaaaatgaagaaattgatgaaatgatcaaggaggctccg

SEQ ID NO: 814499 - DNA, 100 bp, Homo sapiens
tcgctgagggcccgccggagatgttttccttgtcgagcacggtgcaaccccaggaaacttggatttaactggccagaagcaggtattcaaagcagagaac

SEQ ID NO: 814500 - DNA, 103 bp, Homo sapiens
gacatgtagattttccacttatgctcgatttagcaccattctgctctgctacttgtaagggcatacataatcttgctgctatgcttcgaagctgtagtctgaa

SEQ ID NO: 814501 - DNA, 100 bp, Homo sapiens
gatagaatatggagcagtagaggatggtgcaaccatgacttttttcaagttgcaggacgaggagcggaggcggcagcagcagttagaagagatgcgcaag

SEQ ID NO: 814502 - DNA, 100 bp, Homo sapiens
tccacaatgggacactgagctttgtggaagcatttggcggcataccaccctgcactgtgagaacctaatccaccaatagatcaagttatacagaaaccag

SEQ ID NO: 814503 - DNA, 100 bp, Homo sapiens
tcaactgctacaacgccctctatgcacaggctccatttggtggctttaaaatgtcaggaaatggcagagaactattttgcctgcctgagctcctctagta

SEQ ID NO: 814504 - DNA, 98 bp, Homo sapiens
cgggctggagcagctgggccccatggaggaggtcagtggccaaggcctaggaagcagctggtcctttggagtccttctttgggagatagtgagccttg

SEQ ID NO: 814505 - DNA, 100 bp, Homo sapiens
tttgctgtctctggcctcatttctgatcgggaagcctcatctagcccagaggatcggaatgacagatgtgcctcatctccagacatggagcccagctatg

SEQ ID NO: 814506 - DNA, 100 bp, Homo sapiens
ctcccgcgactacagccactactacacgaccatccaggacctgcgggacaaggcccattcatcagcgtagtcctgtcaaagctggagaacatgctggaga

SEQ ID NO: 814507 - DNA, 100 bp, Homo sapiens
gccgatgaggaagtactgagcctgttggaggaactggcccggaaacaggaggacgtaagtggagaaagagttgaagggaaagtgttgggatttggacatg

SEQ ID NO: 814508 - DNA, 98 bp, Homo sapiens
cacacaaacttggtataccttgctacaatagcagattctaatcaaaatatgcagtctcttttaccagcagctgacttatccttgtataatgaattccg

SEQ ID NO: 814509 - DNA, 100 bp, Homo sapiens
tggaagaaacaggaggagattcttggaaatatagtttgagggatttccactggacaaagcggttgcctatgcaaaactcaggaatccatttgtaatcaat

SEQ ID NO: 814510 - DNA, 100 bp, Homo sapiens
acttcaatgagcgagaagccagccgagtggtgcgggacgttgctgctgcccttgacttcctgcataccaaaggtgaaagaagaacgtccagaaaaaatac

SEQ ID NO: 814511 - DNA, 98 bp, Homo sapiens
ttcatttccatttctaccttgtatgcctcaatttgctggatttaagcactgctgcactttatgagacaagttggatggcttgaggactggtactaaaa

SEQ ID NO: 814512 - DNA, 100 bp, Homo sapiens
agacaccagtggttgtggatttccacgcacagctctttaagggtcacccagagactctggagaagtttgacaagttcaagcacctgaagtcagaggacga

SEQ ID NO: 814513 - DNA, 98 bp, Homo sapiens
gagacatttgctacagcatcccacattaagtcaacggtcattcactggaactcccccaagaagctccgggtgaagaacaagcatgtggagttttttcg

SEQ ID NO: 814514 - DNA, 100 bp, Homo sapiens
tggccaagaagggccttactccttcacagatcgaggtcctgctgtactagccaccaaagcagctgctggtactaagaaatatgatcttagtaaatggaaa

SEQ ID NO: 814515 - DNA, 98 bp, Homo sapiens
aggacatgcttccaacaaagagaaagaaatggtgactaggtcatacagcatatttgacaataatcgccaggatcccacagggctgacagctgctcttc

SEQ ID NO: 814516 - DNA, 98 bp, Homo sapiens
acattcacagatgacttttcctatgggatgcacagggtggaaacaagctgctctcaggtgctgctacccccgtatgatgatgccactgtgaatggtgc

SEQ ID NO: 814517 - DNA, 100 bp, Homo sapiens
ttgattgtcttatatttcaagttaaggtccaaaaaaactccagctgtgaaagcaacataaatgatccaaaatacggagctggcatatacttcaccaagaa

SEQ ID NO: 814518 - DNA, 98 bp, Homo sapiens
gaacatgctgtgtgggctcagccgggagacccctggagaggcggccctgatgctctgatgatgtcaggggcagagcagaacccacaggagggaggcag

SEQ ID NO: 814519 - DNA, 100 bp, Homo sapiens
ccgaatgtatgatgcccagcagcagcaaggtggcaattttggaggtagccccggttatggaggaggaagaggaggatatggtggtggaggacctggatat

SEQ ID NO: 814520 - DNA, 98 bp, Homo sapiens
cgaccgccagaaacttccttctcctgactcaggccacagtcttctgtgtggatgttcttgagtcgaagaacagcaccatcaaggacctgcagtatgag

SEQ ID NO: 814521 - DNA, 100 bp, Homo sapiens
caacaaagctagtgattacctggtagacctcattgcctttcttcgtagcacctttgctgtattcacacaccttcctgttgcagtattttacagagctagc

SEQ ID NO: 814522 - DNA, 99 bp, Homo sapiens
gtgaggggatccgacttgccggcagaacttacgctgcgggaccccgggcactgttgctgctgcgggaggtctgccatcatggatgttctcgcagaagca

SEQ ID NO: 814523 - DNA, 100 bp, Homo sapiens
tggccagcactggctccttgatggttatcaatactctggctgaccatcatcatcgtgggactgactttggtggaagtccttggttacatgtcattattgc

SEQ ID NO: 814524 - DNA, 98 bp, Homo sapiens
cagagtgaaaatcctgctttacgagtgaatggaatttgggctttaatgggctcagaaacacttatgggattttctaagcacggagggttcacttcctt

SEQ ID NO: 814525 - DNA, 100 bp, Homo sapiens
gaattcgcttgcaagttaaggaggagaaggcagagcccccccaggctatgaatgccctgatgcggttgaaccagctgaagccagggctgcagtacaagct

SEQ ID NO: 814526 - DNA, 51 bp, Homo sapiens
ctcgcagaacgccatcaaccagcttccccaaagctccagagatagatccag

SEQ ID NO: 814527 - DNA, 98 bp, Homo sapiens
cttaacgactttgaagaagatgacacaggatactgctattgttcatccagttcccattcgtatgactccaagcaaaatccacatgcaggaaatggaac

SEQ ID NO: 814528 - DNA, 100 bp, Homo sapiens
gcgagtatacatgcaaagcttccaatgagtatggcagtgtcagctgtacagccacactaactgtgacagcagcccctgtcaaagggaacaggaagcagtc

SEQ ID NO: 814529 - DNA, 99 bp, Homo sapiens
agggcctggctggggatgaaaaagaggtctgcgagctctgcaagggagcggcccctcctgacagccccgtggtctactcggacagggcaggctacaaca

SEQ ID NO: 814530 - DNA, 100 bp, Homo sapiens
gccaagttgcgttacatgagccgagatgacttcagggtcttgaccgcggatcctaagcacttcaagtcagagaagacaggacggggacagttgagggaag

SEQ ID NO: 814531 - DNA, 100 bp, Homo sapiens
agaggcggaggctcaggcagcttgagatgaggtggaggaccatcctgctacagtattgctttctcttgattacatgtttacttactgctcttgaagctgt

SEQ ID NO: 814532 - DNA, 133 bp, Homo sapiens
tcataccaggactggagcccccagttccccagcgcctcccatctcagacggaatctgtgacctcgaatcgcacaggttctgtcatatgttgaagaatccatacaccattaagaaacagcctctgcatcagttt

SEQ ID NO: 814533 - DNA, 100 bp, Homo sapiens
ctcctggtcctgctcggggctctgttcccagccattgagacccagagcagcagttctgaagagatagtgcccagccctccctcgccaccccctctacccc

SEQ ID NO: 814534 - DNA, 100 bp, Homo sapiens
cggagtctccgcggcccgaaccgagtctggaccatttagaagacgccggcagtctgccacacctaccatggggaacacagacttctggaaaacactccga

SEQ ID NO: 814535 - DNA, 100 bp, Homo sapiens
ttgggacagttgtaggaggaagattaacatataccagtacagatgagcatgatgctatggatggagaattatcctgtcgtttacttcactttaaggtcag

SEQ ID NO: 814536 - DNA, 99 bp, Homo sapiens
gaggttcgaagctgagtatgtgacagattgcaaaggtcgactgcaaggaagtactagacatcatttgtaatctggaatctgaggggcaggataacacag

SEQ ID NO: 814537 - DNA, 100 bp, Homo sapiens
agatgggcaatattgtggatattggccccgacagcttaacaattgaacccttgaatcagaaaggcaagcaattctgtggtgttcttggtcacacatttat

SEQ ID NO: 814538 - DNA, 100 bp, Homo sapiens
tgtttcaatcattatttacccaatgaagaatcacatgttcttcatcgcgataacgaagaaacctgagacatatctgaagagatggattaagaatgctttg

SEQ ID NO: 814539 - DNA, 119 bp, Homo sapiens
aaaccaaagctgaggcaggagccgaaactcagagtccttcaaggcctatagccaggaggagatggacctgaaggtactacagttcaagaacaagaaactggcagagcggctggaacaac

SEQ ID NO: 814540 - DNA, 100 bp, Homo sapiens
gtctggccctggggattctgcttatgtggatatcaaagtattgcagagtgccttagcagccatccgacatgcccgctggttcgaggaaaatgcttctcag

SEQ ID NO: 814541 - DNA, 100 bp, Homo sapiens
agaaataaaagcatcagagagacgaacagctgtggccattgcagtgaatggcattactgaggaagctgatcccaccatttactctggcaaagtaattcgc

SEQ ID NO: 814542 - DNA, 100 bp, Homo sapiens
acagtgcccaggggtctgagtctcacagcttgtaaagctactacccacagatggcatgatccgaaaacactctcatgtcaagatagggcgttaccatcag

SEQ ID NO: 814543 - DNA, 100 bp, Homo sapiens
tgtccagcatccgaccaccgaggctggagggggagaacacccagtatctctcagaagatagaagtgtgcaagaagtactacagaagcatttcaatatcag

SEQ ID NO: 814544 - DNA, 99 bp, Homo sapiens
ttctggttttaaaaaatacatatctggttttggaagaaaaaatgctgggcatcttggtgcagcacaaagtccggagtggcgtctcgggcatcgtgggca

SEQ ID NO: 814545 - DNA, 112 bp, Homo sapiens
cgatttggatgaatatacccttagaaaaaatgtggcagtatattccaatggagacagttggaaaacctgtacttcagagaaaagaagttttccgtggaagttcatgacccac

SEQ ID NO: 814546 - DNA, 98 bp, Homo sapiens
aggttactcgcacgcggatttggctggcgtcccgcgtttgccaagatggtggataagaatatttacatcattcaaggggagattaacattgtggttgg

SEQ ID NO: 814547 - DNA, 98 bp, Homo sapiens
tgctggtgctgtctctcgaacaagcactgcccctttggaccgtctgaaaatcatgatgcaggttatagaaacattatcacgactttctcgaacaccta

SEQ ID NO: 814548 - DNA, 100 bp, Homo sapiens
catctctttataattccctaagcatggctatgcagactctaaaattggtttatcttggaagctaaagggcattgctcatcctgaagatcagctgaccatt

SEQ ID NO: 814549 - DNA, 100 bp, Homo sapiens
tggaaacagcggatgattctggaactgggagaagatggctttaaagaatacacttcaagatcaggagggttcaggaaaaggaagcatgacaatttcccac

SEQ ID NO: 814550 - DNA, 99 bp, Homo sapiens
gagaattctagcgttcccgactgagcgccagcaaggaatttgtaagtgtctgggttcgagatcctaggattcagaaggaggacttctggcattcttaca

SEQ ID NO: 814551 - DNA, 131 bp, Homo sapiens
ccggccgagccgagggccaccccctggtcctctgccctcgcgccccgctagggccagatcgaacggttggaagtaagcagccttgcccaaacatccagtgcagtggcctccagtaccgatggcagcatcca

SEQ ID NO: 814552 - DNA, 100 bp, Homo sapiens
ctagaccctgcccaacagaatttatatagagatgtgatgttggagaactacagaaacctcgtctccctggatcgaaaagtatcctccttgcacacctccc

SEQ ID NO: 814553 - DNA, 99 bp, Homo sapiens
tggaagctgagggcacgtgtttgcggttcagccctttgatgaccgcagcaggcagttgtgaaaaacttcaggacaaaaatgtttcatttaaggacttgt

SEQ ID NO: 814554 - DNA, 100 bp, Homo sapiens
atgatgaagcagagaaaacagcaagcaacagccatcatgaaggaagtccatggaaatggaataaacatcatcctgaccttcatctctgggcttgttccgg

SEQ ID NO: 814555 - DNA, 98 bp, Homo sapiens
ggcccatagccgagcagactggcatctgtaaggtgcggccgccgccgatgaatgatttcggaatcaagaatatggaccaggtagcccctgtggctaac

SEQ ID NO: 814556 - DNA, 98 bp, Homo sapiens
acccgcccgcccaaggtctctcgcgggcgggagaacggaaaactcccaacttcctggcagccttaagtgccttgaaacaattttctgaacaaggactg

SEQ ID NO: 814557 - DNA, 100 bp, Homo sapiens
ctggtgcccaaagaatcttatgtgattggaccagaccctgaattcttctagctcctccaatcccattttatcccatggaaccactaaaaacaaggtctgc

SEQ ID NO: 814558 - DNA, 115 bp, Homo sapiens
ggatggtgtgaccccatatatgattttctttaaggatggtttagaaatggaaaaatgttcttactactttgaccgcgatgatgtggctttgaagaactttgccaaatactttctt

SEQ ID NO: 814559 - DNA, 99 bp, Homo sapiens
gatgatcttatgcttgatgtggatctgcctgaggatgcacctcttgaaaatgtcacccacaaaagctgtatataatgccagacattggaatcatccaga

SEQ ID NO: 814560 - DNA, 99 bp, Homo sapiens
agctctgtcacaaagctgttcatggaagaggatgttggacttcttacttggagtcaactgagagttcaaatacaacaattgaggatgaagatgtgaaag

SEQ ID NO: 814561 - DNA, 51 bp, Homo sapiens
ggagaatatatcctctaaatctgatccagagactgctgctactttgaaacg

SEQ ID NO: 814562 - DNA, 100 bp, Homo sapiens
tagaccaggcccagaatcgaatccaatgtgccatcaagtcactaagtccacccagtcagcttgaagagtttcaaatggaccctaccactgagaaatcaag

SEQ ID NO: 814563 - DNA, 98 bp, Homo sapiens
tgggaggaagaaattttctatccacacctcagtttttattgccaagcatgcccacggacatggaacacacaggacattacctacatcttgcctttctg

SEQ ID NO: 814564 - DNA, 100 bp, Homo sapiens
tgggagttgcttttggaatgaatttggaatcttcccttgaagaggttggatggcaagcatgtggtgtttggcaaagtgaaagaaggcatgaatattgtgg

SEQ ID NO: 814565 - DNA, 106 bp, Homo sapiens
agattggcagaaagttgatataggtggacttttttacagacaagttggatggcttgaggactggtactaaaaggaaacgtgactgggaggccattgccagcagaat

SEQ ID NO: 814566 - DNA, 99 bp, Homo sapiens
gagcatcagtcagaaaaagtctatgtttgcagaaatacagatccaagacaaagacaggatgggcactgctggaaaaggtaactaaggaagtggatgcta

SEQ ID NO: 814567 - DNA, 98 bp, Homo sapiens
ttggaactagtgccggcggctctccaccccccaggtgcctcaatcaggaaccctgaagctgtcccacctacaggagggaacctacaccttccagctga

SEQ ID NO: 814568 - DNA, 98 bp, Homo sapiens
cctcttattcgtaacattactgtggataatagagttaaatgctaatgtaatgcttgaatatgatattgatgaagctcaggcattgttggaaaagaatt

SEQ ID NO: 814569 - DNA, 100 bp, Homo sapiens
caacagactttgtttcttggagtccacttccaattccaagcttgtcaaggtggctttggagaaaagtctggcaactgtggagacccagaacccatctttt

SEQ ID NO: 814570 - DNA, 100 bp, Homo sapiens
atttaacaccatctcagcctgggctctccagtcaggagcactggatgcaagtcggcaggttcagaaaagagaccctcgtgactggactgcacagttcatg

SEQ ID NO: 814571 - DNA, 100 bp, Homo sapiens
gacgaccgacagggtggtgaaaggttgaagcactggacaatgccacatactttgtggatggtgtgggtcttgggggtcatcatcagcctctccaaggaag

SEQ ID NO: 814572 - DNA, 100 bp, Homo sapiens
ctgggtcccgccagacacgccgccgccgcagcaccagtggaacagtgattaacaagctgaaggttgttaagaagcagacatgccctttacagactgggga

SEQ ID NO: 814573 - DNA, 100 bp, Homo sapiens
aatgaatcaaaagaaaatctctaaatgcagattccagaaaaattacagcacatctcagtgaatttgcaagtgcaataagagctaactgccatcaagagcc

SEQ ID NO: 814574 - DNA, 98 bp, Homo sapiens
tttcctcagagccttggaattctattttatgaacctagagaagcagaatccttacttttataaccatgatgactacacagacttctactatgacattt

SEQ ID NO: 814575 - DNA, 129 bp, Homo sapiens
agaagcccagcttttccatcctggagatctacaggatttatcaaatcgagtcactgtcaacttcagaagggaggaaaacacagaagacgagggctgaaagatggcattggacttggcacagggatggtc

SEQ ID NO: 814576 - DNA, 100 bp, Homo sapiens
aaacaagaagtcgtcaccccagacaacatgtgcatggggaggaccagtcgtggagaccaagacacattccaccccagtggggggtcccataccactcatg

SEQ ID NO: 814577 - DNA, 101 bp, Homo sapiens
cccgtaaattggaaggatgcacaagttccaaggttacgtttcagatgttcacggaagaccagggtgtagatgacaggctgctctatgacattgtattcaag

SEQ ID NO: 814578 - DNA, 100 bp, Homo sapiens
gtttttctgcatctgtatccagctcctgaacaagacatggaaggaaatgagggcaacttctgaagacttcaacaagatgcaggacaagtactccaaaagt

SEQ ID NO: 814579 - DNA, 100 bp, Homo sapiens
accacaacacgcgccagacgtcgtggatcgacccccgcgaccgaatatgacagatacctagcatctagcaaaataatggcagctgcttaccttgacccca

SEQ ID NO: 814580 - DNA, 100 bp, Homo sapiens
agatatctcagtgttctccgctctcataggtcaggaactttatattgctgttggaatatctggagccatccaacatttagctgggatgaaagacagcaag

SEQ ID NO: 814581 - DNA, 100 bp, Homo sapiens
caaagaaacttcttgatgaacaagtctttggaggattgtcctctggatgaagatgaagatgcatttcagggactgggagaagaagatgaagagattgatc

SEQ ID NO: 814582 - DNA, 98 bp, Homo sapiens
tttacctgttttctgggagcttcgaagcccttagagatttgtttgattccatggataaaacttcttccagtattccacctattattctactgcagttt

SEQ ID NO: 814583 - DNA, 99 bp, Homo sapiens
atcgagatctcactgaggctgttcctcgacttccaggagaaacactaatcactgatactgtggatggtagggaagaaaagtctgcttctgattcttctg

SEQ ID NO: 814584 - DNA, 100 bp, Homo sapiens
gccacagcggcctcggcctccccttggattcagacgccgattcgcccaggtgttacagttcgagtgcctcaaacaaccacatatgttgtaaacaatggac

SEQ ID NO: 814585 - DNA, 98 bp, Homo sapiens
ggggcctctggtgaacacgtcggacctcaatgaagagctgggacagaacccagcccttgctgacatctacacagagcacgcccatcaggtggtggtgg

SEQ ID NO: 814586 - DNA, 98 bp, Homo sapiens
gcaaccgccacacactgcagctgtacaggtacaaagatggcagtctgatttgccaggcggctgaaccgggaaagtacaggattgagagcaactatggc

SEQ ID NO: 814587 - DNA, 100 bp, Homo sapiens
tcagagtgagttttgtacagctattcgagaggttgtttttgagcacgttcactctcgcagtgtcagctggggctgttttgcttttacccttctcaatcat

SEQ ID NO: 814588 - DNA, 100 bp, Homo sapiens
gagatatgatgattttgaagtcatttcacatcgaagccatgatttaaatatcggcgttaagaaaatttcccaggaacgagaaaaatttgctgatgaaggc

SEQ ID NO: 814589 - DNA, 99 bp, Homo sapiens
gcgcctgccgcccctgcgccgccgagccagctgccagatttccacatggaagaggcactggattggcctggagtatacttgttaccaggccaggtttct

SEQ ID NO: 814590 - DNA, 100 bp, Homo sapiens
acagagaagccttttccgttgccggtgccggcctagcgtcctggaattacttcaatcaaacatggaaggtctttaatgtaactttaaatggttcaccaaa

SEQ ID NO: 814591 - DNA, 100 bp, Homo sapiens
aagaaaaacggcaacgtgtaatcagaaggcacagattagaggaaggaagaggtggattatgtatttacagataagactggaacactcactgaaaacagca

SEQ ID NO: 814592 - DNA, 100 bp, Homo sapiens
atcttcctccctgtgtactttccatttgccttcctgggctcccacaggcaagagcacatcctactggacctgaggaagaaaatgatctgtccatacccac

SEQ ID NO: 814593 - DNA, 100 bp, Homo sapiens
gataggggtagcctggaggcctgcagtccgcgcggccgcggggagggacgagagggcctgacgtacaggagattgatggcaacgctctgctgttgctgaa

SEQ ID NO: 814594 - DNA, 102 bp, Homo sapiens
atcactccagcagaagaaagggaaggaacacgctgcattactgcgtgatcagtcgcatcgaatacattcattcaaagaacttcatccaccgggatgtgaagc

SEQ ID NO: 814595 - DNA, 98 bp, Homo sapiens
ccggtcagaagctcaaagagtccgtggggagatggtaacctgcacctcaatgtgacggcggaggccttcagcccctcgctcctggctgccctggagcc

SEQ ID NO: 814596 - DNA, 98 bp, Homo sapiens
gctttcaagacaaatggcaaacctgaagaaaaaaaccatgaagctggaacatcaggtgaagaagaattttcttatgggtattctctaaaaggaataaa

SEQ ID NO: 814597 - DNA, 98 bp, Homo sapiens
gaaacgaaagggagccgccagcgcgtttggctgtgacctgacggagtatctggaaagctcgggacaggatgagctgaacaggagaaaatccttgtaag

SEQ ID NO: 814598 - DNA, 98 bp, Homo sapiens
tcagtttagctcatcgtcctgtcagactagaagagacggtccagcagacaggtgaagagaaagcgctacactgaagacctggagttcaagatttctga

SEQ ID NO: 814599 - DNA, 100 bp, Homo sapiens
gccggggtccgcaaggccggagaaggccgccgggcccgggcatggtggtctggggcaacgcggaaggtgtccctggccagtgtccttccacctgtccaca

SEQ ID NO: 814600 - DNA, 100 bp, Homo sapiens
ttcacgcaggggaaacttgaacattcgcagggcaattgaaggaacagactaaaaatcgtgtcctggaaggaaactacaggtactaccagggattttcagt

SEQ ID NO: 814601 - DNA, 98 bp, Homo sapiens
aggacaactgcaagggggaagtagagagataacaaaagctgctcagagtctcaatgaacttgtatggaccaatatttacagtctttgctatgggaaac

SEQ ID NO: 814602 - DNA, 100 bp, Homo sapiens
aaaacccacagaagttgtattagatgatgacagagaagatctttttgcaggaatagcgggttttgcagcaattgttgcatatggattatataaactgaag

SEQ ID NO: 814603 - DNA, 100 bp, Homo sapiens
agaatatgatcaactcctgaaagaacactctgaacttcaggatggacaaccggaaattttctacacattttggaattcagttactcaggcactttcttct

SEQ ID NO: 814604 - DNA, 100 bp, Homo sapiens
actgtcagctgaggtggatcttccagagaaaggaccagggtgttaagtgtgatgcttccataatacatttggatgctgtcagctaagttcacttctgaac

SEQ ID NO: 814605 - DNA, 100 bp, Homo sapiens
gcaaaggcattcttggcggaaggacccgagacgtgaaaaaaacaggcgtattctggtaatttcgaggagttactgaatcaaatggatggatttgatactc

SEQ ID NO: 814606 - DNA, 51 bp, Homo sapiens
aagctgaggacttcaccagcgctggcctcccatccctggaccgccttatgt

SEQ ID NO: 814607 - DNA, 100 bp, Homo sapiens
tgcgaccgtcgcggaccatgggcgacaaagggacccgattatataaggaccatctggaaaagaaacatgctgcctgttgtctggaaaccttccactgaca

SEQ ID NO: 814608 - DNA, 98 bp, Homo sapiens
gagatcgaccgcaccatcggcaagggcaacttcgcggtggtcaagcgggccacgcacctcgtcaccaaggccaaggttttgggtcctgctcctcggtg

SEQ ID NO: 814609 - DNA, 98 bp, Homo sapiens
gggctgtcgcccgaatgcaggaagaccgtgatgggagctgcagcacagtcgggggtgtaggttatgggggtcaatgtgacggtggactacattagacc

SEQ ID NO: 814610 - DNA, 100 bp, Homo sapiens
gccatgatcgcctcatgtggagggcaaagttgcgccggggaacttgtgagcctgcggtgaaagctgccaccttcatggagcactggaagcggaaacagat

SEQ ID NO: 814611 - DNA, 98 bp, Homo sapiens
tttcaacatgcctctgacaatctctagtgtgaccatagccgatgactactcagatccctttgatgccaagaatgatctcaagagcaaagcaggaaagg

SEQ ID NO: 814612 - DNA, 98 bp, Homo sapiens
cctgagtccggagctaccaaaaccatcctcctggttatcaatactctggctgaccatcatcatcgtgggactgactttggtggaagtccttggttaca

SEQ ID NO: 814613 - DNA, 98 bp, Homo sapiens
tgctggggcctccagcctgcgcgctctgcgaggacacgctctgctgcggagggcccggcaggaagatgggctcccgtggacagggactcttgctggcg

SEQ ID NO: 814614 - DNA, 98 bp, Homo sapiens
tgtgattcagcacctgctgtctgaggtttgtatttcagcagtcagaaaaatttgcaaaggtggaaaaccaataccagttactgaaactagaaaccaat

SEQ ID NO: 814615 - DNA, 100 bp, Homo sapiens
aagttggagaagacccacctttgtttcctagtgagaaccgagtcagtgctcttacccaggtgtttggcaatcaactcattcctcccaatgcacaagtgaa

SEQ ID NO: 814616 - DNA, 98 bp, Homo sapiens
gctgcttgctgcaggctctggggagtcgccatggttgcactgctgtgatccatcctcatctcctaaagatgcatcctgacttatctccacacttgcac

SEQ ID NO: 814617 - DNA, 100 bp, Homo sapiens
ccgcccaccaccccagtaccaagacccgacacaaggcagcttcccacagcaggttggacagttcacagttctgttccacatgtacgactcggacagcgac

SEQ ID NO: 814618 - DNA, 100 bp, Homo sapiens
gtgaggctttggcagaaattaagaaggaaatatctccattcggagcgtgctttggacaccatgaattttgatgttataaagggcaagccagtacgcatca

SEQ ID NO: 814619 - DNA, 98 bp, Homo sapiens
aagaccatcctgctctcaactacaacatcgtttcaggatttaatgtgtgccgaccatttccttcagtgctggacaggctgctgtgaagggacatcacc

SEQ ID NO: 814620 - DNA, 100 bp, Homo sapiens
ccttcttgagatccctaaaatgaaagaagaaacaagggacctgtatagtatgtctttggtggacttgggaaagaggttgctagaagcagcaagaaaaggc

SEQ ID NO: 814621 - DNA, 50 bp, Homo sapiens
ctcctggccggctgggtcgccgtagattgccttgggtccccagtgtttac

SEQ ID NO: 814622 - DNA, 143 bp, Homo sapiens
gcgggcaggtgttcgacgtggggccgcgctacaccaacctctcgtacatcggcgagggcgcctacggcatggtgtgaatagcctaacatggcagaccagagacagcgctcactgtctacctctggggagtcattgtaccacgt

SEQ ID NO: 814623 - DNA, 98 bp, Homo sapiens
acatgcccaagaggggacttgatgttaacaaatgtgagattgccaggaaacctcgacctgtctcccagttggttgcacagcaggttactcagcagttt

SEQ ID NO: 814624 - DNA, 100 bp, Homo sapiens
gtgaaggcaatgatttataccatgaaatgattgaatctggtgttatcaacttaaaagatgccacctctaagaccattgtggccgccatgagcaacctggt

SEQ ID NO: 814625 - DNA, 98 bp, Homo sapiens
ggtatcctatcctggtcagaggaagtgtgagggtctgaagattggggacacgggaggaatgatcaattggaatcgtctttttcctcctttacgtcagc

SEQ ID NO: 814626 - DNA, 100 bp, Homo sapiens
agaagagcctctccagccagaaccaggtatatgccctcattttgcttaagacctctggccagagcagggcatggaagattccttttaaaaagtaatactg

SEQ ID NO: 814627 - DNA, 98 bp, Homo sapiens
gcagggagaaggaagaggtgtttgaaaaggaacaagactgccaatggagactgccgcagagacccccgggagcggagccgcagccccatcgagcgcgc

SEQ ID NO: 814628 - DNA, 100 bp, Homo sapiens
cccacaaccatcacatccaccatgaaagctaagctgctgaagccgtgtgtgctgtggagccgaggccgtcctgcaggaagccgcgtgactcccgcctcct

SEQ ID NO: 814629 - DNA, 100 bp, Homo sapiens
cctctgatgagcagggacattgtgagagactgcctagagaaggacccaattgaccggacagatgatgacattggaatcctacggcccctgaatattttgg

SEQ ID NO: 814630 - DNA, 100 bp, Homo sapiens
tggcgatggtcttcctgctggggctcatgtttgaggcagtggccttgtcgtcgaagtctggcctttcccgaggccggaaagtgatgctgtcagcgctggg

SEQ ID NO: 814631 - DNA, 99 bp, Homo sapiens
gagccgctcagccaccggggcctgccgcgcctgtcctggatcgacaccctctacagcagtagacgttacatccaagaggaaataatccaggcaaggaag

SEQ ID NO: 814632 - DNA, 98 bp, Homo sapiens
atggaccagtttgttcgttacgagtgagaagaggggatgtcctggcagcatggagtggaatccgtcctcttgttacagaccccaaatctgcagatact

SEQ ID NO: 814633 - DNA, 100 bp, Homo sapiens
ccgctgttactgatatacctttaggcattgaagttgatatcgatgtggagcacggagggaaaagaagccgcctgacccccgtctctccagagagttccag

SEQ ID NO: 814634 - DNA, 100 bp, Homo sapiens
tctcgttgggcgccggtgtcctggcctcttcctcaggtgtgcacttgtactacgtcgggggagaggtgtatgccgagtgcgtgagtgacagcagcatctt

SEQ ID NO: 814635 - DNA, 100 bp, Homo sapiens
gacacagatctggatggagttgtgacctttgacttgtttaagatgatcaagttccagatgatcctcagtgagggataccatcctttcaatattcaagagt

SEQ ID NO: 814636 - DNA, 100 bp, Homo sapiens
ttagaccaaagccattgcttttgaagttattaaagtctgttggtgcacaaaaagacacttatactatgaaagaggacactgcccatctctaagataagaa

SEQ ID NO: 814637 - DNA, 100 bp, Homo sapiens
aaaaagaaacacaagcgagaggaggaggaggatgatgagctctttaagggtcacccagagactctggagaagtttgacaagttcaagcacctgaagtcag

SEQ ID NO: 814638 - DNA, 99 bp, Homo sapiens
acacgttggtcctgggggtcaccgtggcccagcagcagcaggaggagctcaaggggatgcagctgctgcgggagaaatctcctgcaaagaagctgagcc

SEQ ID NO: 814639 - DNA, 100 bp, Homo sapiens
ttacctcctgcatcctgcgttcccctccatccttctggatctggccaacaccaccggcacagtgacggcttcagaggctttggggccatttggatcacac

SEQ ID NO: 814640 - DNA, 130 bp, Homo sapiens
cccaaagtcgagggatgtacagcaacagaatgagaagctacaaacaagaaatgggaaaactcgaaacagattttgaactctaatgaatcattgattgaccagcactattttaccagttggaatgaatgat

SEQ ID NO: 814641 - DNA, 98 bp, Homo sapiens
cagaagtcacgtacagggtttcagggcagaaagcagagggtggtgaaggcagatattgtaaactacaaccaggaacctatgtcaaggactgttaaccc

SEQ ID NO: 814642 - DNA, 98 bp, Homo sapiens
tcaggacggaacccccagaaacaggcccggacctcctcctctaccacccccaatcgaaaggggcaacttggtagtacccagagccaaggacttgtacc

SEQ ID NO: 814643 - DNA, 98 bp, Homo sapiens
acgagatccagttcctgcgaactgctcttgtcaggatggtgaagctgttcatcggaaacctgccccgggaggctacagagcaggagattcgctcactc

SEQ ID NO: 814644 - DNA, 100 bp, Homo sapiens
agatgtccttaccagctttgacaatacaggaaatgtttgtagttaaaccagagagcaatgacaaagaaacagaagctgcgtatgaatcagatatccccga

SEQ ID NO: 814645 - DNA, 98 bp, Homo sapiens
acccagcacacaaaatggatctcttacggccgtcatttccctgatggagatggggttcgacgagaaagaggtgatagatgccctcagagtgaacaaca

SEQ ID NO: 814646 - DNA, 100 bp, Homo sapiens
agcaatccagaaaagagtaccctgtgcttatgacaagactgccttggcattagagggtgttagaacaccaaccttacagctctctgcgatgcaagaagga

SEQ ID NO: 814647 - DNA, 100 bp, Homo sapiens
tttgtctccttcgacttggagtctttgtccaggacgggttagcataaaggaatcatctgtagcgaaactaggatcagtatgccgtaggatttacagaata

SEQ ID NO: 814648 - DNA, 100 bp, Homo sapiens
tgtgatctcgagagacctgcgtacattcggggtgccagaaggaaagcatagacatatctgaagagatggattaagaatgctttggattaaggattgtgga

SEQ ID NO: 814649 - DNA, 100 bp, Homo sapiens
aggaacacttgtgaacatatctatgagtttccccagctttcggaggatgtcagtgggctccttcgggaatggcacggttctcaggagcaccagagaggtg

SEQ ID NO: 814650 - DNA, 99 bp, Homo sapiens
acagcctcccgcgcctcgctcagctccaacatgggtggctcctatggacggaaaacagtcttaagaggcaactccgatggtacccttgtcctcttcttc

SEQ ID NO: 814651 - DNA, 98 bp, Homo sapiens
ttctgccccagaaccggtcgaaaaccgtgtatgagggattcatctcggctcaggtgcacacatcttgaccaactcagcagcaaggtggattttctttg

SEQ ID NO: 814652 - DNA, 98 bp, Homo sapiens
tagctgttgctgctcacgatgttggagaatatgtgcggcattatccacgaggcaaacggttaaggcggctcagaaacaagacagctcaccagatgaag

SEQ ID NO: 814653 - DNA, 100 bp, Homo sapiens
cctctgcgctggaatcagtcactgtcagcgacagacccctcggggtgtccatcacaaaagccgagtttccgttactatggcaatgacggcagggactaca

SEQ ID NO: 814654 - DNA, 100 bp, Homo sapiens
ttctttccccctttaacttagaggaacgaggattatacagaaatttgaagagtacatcgatgcccaccctgagaccatcgtcctggacccgctccctgcc

SEQ ID NO: 814655 - DNA, 100 bp, Homo sapiens
ggggtaacctagacctgaatgggcttgaccatctcacaactgctcgcgtgacgaccgcattcgtggcaggttggtcaaagaaaaagtgatgtatgaaaaa

SEQ ID NO: 814656 - DNA, 98 bp, Homo sapiens
ctcaactggggtcagaaggacctctaccgagatgtgatgttggagaactacaggaacatggtcttgctgggctggagtgcaatggcgggatctcggct

SEQ ID NO: 814657 - DNA, 98 bp, Homo sapiens
aaaaactgcgctgctccatgtcttcgccaaggactgcttccccgaggtatctgcccaaactggaacttatgctgtagacatttctttgtggtttatct

SEQ ID NO: 814658 - DNA, 100 bp, Homo sapiens
tggaatgaaggttgtccttatcagcagatcaaaggataaacttgaccaggtttccagtgaaataaacctgagtttgggaggtgtccttttatttcctgtt

SEQ ID NO: 814659 - DNA, 98 bp, Homo sapiens
ccacacacaggtgaatttaaaggagcagccctggtgtcacctatcagtaaaagacaaatttacatgtattggagaccagaccagaagcccttctgaat

SEQ ID NO: 814660 - DNA, 100 bp, Homo sapiens
ccctccgggagctccacttggacaacaacaagttggccagggtgccctcagggctcccagacctcaagctcctccagcgccccgggatgccgtctggagc

SEQ ID NO: 814661 - DNA, 98 bp, Homo sapiens
ggaagcccatcggctgtgactgcaaggatccatcagttacacaagtgacaagaaatgttccaccaggacttgatgaatataatccattctcggattct

SEQ ID NO: 814662 - DNA, 98 bp, Homo sapiens
aagttcgtgtcgctgctgcaggaggccaaggacggcgttctggatctcaaagcgctgttcgggggtcttgtctggattttggttgcctcctccaatgt

SEQ ID NO: 814663 - DNA, 100 bp, Homo sapiens
agggaggacaccgtgacttcccggacgctgggaaatgaccttaaacagattcagagaccgtggggccaacaaactgaactggagtaacatgtgaattgag

SEQ ID NO: 814664 - DNA, 117 bp, Homo sapiens
tgtccttcatgcagtctctcattggcttctttgagactgaaatggcaggtgcgggcattctatgtgaacgtgctgaatgaggaacagaggaaacgtctgtgtgagaacattgccggc

SEQ ID NO: 814665 - DNA, 100 bp, Homo sapiens
aatcaagtctacactgttcaaataaggcagtttctcttagtgttcagcaggaaacatccaatttaggtcctggatctgcaccatccaaattacatgtttc

SEQ ID NO: 814666 - DNA, 98 bp, Homo sapiens
cgaccttagatgctccagaagagaggcggagaaaatttaagtaccgaggcaaagatgtgtctttaaacagggtaaagatggtggaaaaggaaaaggat

SEQ ID NO: 814667 - DNA, 100 bp, Homo sapiens
aatcgaattgtttactgtacaatggaagtggaaggagaaaaacttcagacagaccaggccgaagcctcaaggccacaagtgtctataaatgtgatttcct

SEQ ID NO: 814668 - DNA, 98 bp, Homo sapiens
aacctgcagcctcctggcaccaaagcggtcttgcgagtggctggttccctgcagaagagcacagaagtgatgaaggccatgcaaagtcttgtgaagat

SEQ ID NO: 814669 - DNA, 99 bp, Homo sapiens
caggaacagcagaggctgggccttgatgtgtccgtgaccctcagagatcctttgccctgggaatccagtggattgtagttagaatactaggtactgtgc

SEQ ID NO: 814670 - DNA, 100 bp, Homo sapiens
gacccacttaaattcaggagttattctctcaattcaccacttggatcacagatccacattgtttgaagttattgtgagtgcctcgaggaccaaggaaccg

SEQ ID NO: 814671 - DNA, 100 bp, Homo sapiens
agaacgagaacatttggaaatggaactagaaaaggcagagatggaacgatctacctatgttacagaagtcagagaggtagctaaaattggtgctttctgc

SEQ ID NO: 814672 - DNA, 99 bp, Homo sapiens
ttcgggtgcccgctggggctggtcctggccttgaggaagactgtcatcccagccctggatggtgaaaggtgtagcagtcactcggcctacacccacagc

SEQ ID NO: 814673 - DNA, 98 bp, Homo sapiens
ctggcgtccgcgtgcagccacagcatcctgagaccttcggggcccggagcaggtatcggctatgcctccgttgtaattgtgtccctcctgaatgtcta

SEQ ID NO: 814674 - DNA, 100 bp, Homo sapiens
tagctactccggaccttacggggacatgcgagccttgcttcctgttttacatcacaaatctaaaaaaggacccccccgtcaagccaaatatgccattcat

SEQ ID NO: 814675 - DNA, 100 bp, Homo sapiens
cccacatatcaggaccgagtggccccgccagatggggcattctcttctcccaccctcgggactttaccccagtgtgcaccacagagcttggcagagctgc

SEQ ID NO: 814676 - DNA, 101 bp, Homo sapiens
ccgccggttcctcaccctcggggagcaacatgggtagctacagcaagctgggtagcaggcagatccaaaggatatcatgaagtttccagggcctttggaaa

SEQ ID NO: 814677 - DNA, 100 bp, Homo sapiens
ggaggccatccagctcatcgctcgcatcgctgccgccaacgggggtgagcccatcactttctgtgaggagagttttgtaaagcaccgctcaagcgtgatg

SEQ ID NO: 814678 - DNA, 98 bp, Homo sapiens
gacccgggctttccaccgcttgcgcctggagctgctgcttgacacgccaggtcagagcagcccaccatgggatggggagggggtggaggctgcacccc

SEQ ID NO: 814679 - DNA, 99 bp, Homo sapiens
ttacagacagctttcgaagacgggatactgctcagcaagggtactggaagatgaaagagactatacaagggaccgggtcctgggggcctgagcctcctg

SEQ ID NO: 814680 - DNA, 100 bp, Homo sapiens
ccacacagtgcacccccattgaatttgacagcaaaggaggcaagtgaggcctatctggttggcctttttgaagacaccaacctgtgtgctatccatgcca

SEQ ID NO: 814681 - DNA, 99 bp, Homo sapiens
atcagggaaagccagtgcctatggttcgccatcggtggtgtgaactcattgttaagcacaagttcacgaaagcctacaaaagtgtggagaggttccttc

SEQ ID NO: 814682 - DNA, 98 bp, Homo sapiens
gcggaggaggagctgcagcaagcgggagaccaggagctcctccaccaggccaaagacttcggcagctcagcaacagcctcaccaaggactccatgaat

SEQ ID NO: 814683 - DNA, 98 bp, Homo sapiens
cttgataagattttgaagaaacacaaacctgacttcatctcattgttcaaaaatccggtataccaagcttggctacgcaggcaacactgagccccagt

SEQ ID NO: 814684 - DNA, 100 bp, Homo sapiens
atgtcgagttatggatccaacaaagattctgataactggcaaaacaaggtgtgagcattttcgatccatgttccagtcgtattggaatgaagacatgaag

SEQ ID NO: 814685 - DNA, 100 bp, Homo sapiens
atctctacttgtctcctagtggaaattcatctccacccggatcacctactcttcagaaatttggttcgatacaagaggctgttttcctagcgtggcttgc

SEQ ID NO: 814686 - DNA, 100 bp, Homo sapiens
aagatccccatggacaacaaggagagcaaatttttcagaacataaaacaagaatatagtcgttatcagaggtggagacatttagaagttgttcttaatca

SEQ ID NO: 814687 - DNA, 100 bp, Homo sapiens
cggcagcaatgctccgttgagagacgcggctttcggcaagaactggattcgtggcgccacaagctcattcactgtgtagatagcctgggctggaagctct

SEQ ID NO: 814688 - DNA, 100 bp, Homo sapiens
gccattggcgatgggatgagactgtgggacctgagaaccctgagtactatactggcaattgctggagaagattttgcaattgttgcttctgatactcgat

SEQ ID NO: 814689 - DNA, 100 bp, Homo sapiens
tcagtccctcaaggcgttgattgaaaatgcagatgctgtatatgaaaagatcgtacattgtcagaaggcagaagtggagcagatcgaggctattgccaag

SEQ ID NO: 814690 - DNA, 100 bp, Homo sapiens
tgctgctgggattcgcgctgctgggcacccacggagcctccggggctgttctctttgatgcagtactctgaagaattccggattcactttaccttcaaag

SEQ ID NO: 814691 - DNA, 98 bp, Homo sapiens
cggcgcccctgagccggccgagcggcgacggaccgcgaggggacggcaaaacagaacagaaaggcggagataaaaagaggggtgttaaaagaccacga

SEQ ID NO: 814692 - DNA, 144 bp, Homo sapiens
ttggctatcagtatgttatcactggccggaaccgctccttggaaggtcgctgggaggtggcattcaaagctaaggcgggtctttggaaattgcctgccacccttcccaccaaagtactatctggcaatgaccacagctatggct

SEQ ID NO: 814693 - DNA, 100 bp, Homo sapiens
aatggctggtctcctactcccagatgcatccgtgtcatggctgtgtggagtggtgtgaatgtggcaggtgtttctctccaggaattgaatccagaaatgg

SEQ ID NO: 814694 - DNA, 100 bp, Homo sapiens
aagacctgctatggatattccacccattcatcctggcatggaagaggagatggttcgtgttacgcagtggccgtttaactggagatccagatgttttgga

SEQ ID NO: 814695 - DNA, 100 bp, Homo sapiens
cttctattcaggccactcttcgttttccatgtactgcatgctgtttgtggcaatgacaagattctgcagatcattacggaattgataaaaacagagaata

SEQ ID NO: 814696 - DNA, 100 bp, Homo sapiens
tttatggagcatatattatggaacacagattctcaaagttggattggtggaaacaatgaaccattgacaggctttacatggcgaggtggctgtgaaagag

SEQ ID NO: 814697 - DNA, 100 bp, Homo sapiens
tctatcagggcatgctggaatgttgacgttaacaagccccaaacttgttaaaggccccttcacagatgtagtcactacaaatcttaaattgcgaaatcca

SEQ ID NO: 814698 - DNA, 98 bp, Homo sapiens
ctgaaccggggctggcgggaagaggtttgcctgcaatgagatttcattctctacatttaaaggacatcctttctgagctgctgtgaataaatttggaa

SEQ ID NO: 814699 - DNA, 100 bp, Homo sapiens
cagaatggaagcatacagatctgggaccgaaatttgactgttagtggttacttggatgattgtacctgtgatgttgaaaccattgatagatttaataact

SEQ ID NO: 814700 - DNA, 99 bp, Homo sapiens
gccgcgcagccagaggtcaccggagcatcttcggagctggagctgactgctgggcaggaacgtctctcaggagaaagagtggaagagaaaattgtgaac

SEQ ID NO: 814701 - DNA, 100 bp, Homo sapiens
gagcgagaggacccagtcccacatctcccaggtcgctctggtgcagtggacagagagtgtgggcctcacgctggtcagcagggacctcacctccatgcag

SEQ ID NO: 814702 - DNA, 98 bp, Homo sapiens
aggaggaaaattcatcatctggagcggacatgataagcatacataatgaagaagaaaatgcttttatactggatactttgaaaaagcaatggaaaggc

SEQ ID NO: 814703 - DNA, 100 bp, Homo sapiens
gaaaggaaatcaaaccgaaaatgtgtatatagtgtacctcggtatgatcaaccacctcctgtcacataccagccacagcaaactgaaagaaatcagtccc

SEQ ID NO: 814704 - DNA, 100 bp, Homo sapiens
gatcaatgggaagaagagagccagccagcttcttgatcctcctgagtgtggcaatggcttcattgaaactggagaggagtgtgattgtggaaccccggcc

SEQ ID NO: 814705 - DNA, 122 bp, Homo sapiens
aaaatcaacatcacggagatgtacaagagcaacaactatttgggttctgtgtgcaccacccgcaccaagacgggagtggggtacccccagctgagtgccgtcattgagtgtgccgactctgc

SEQ ID NO: 814706 - DNA, 98 bp, Homo sapiens
cgtttcagcgcctacaattacagaaacttcgtgaatactttcattcaatttaagaagcccattattgtagcagtcaatggcccagccattggtctagg

SEQ ID NO: 814707 - DNA, 99 bp, Homo sapiens
agacagtttagcagaacagcctccgcggctccggggagaaggtggatctcgagccagaggggaaagtatttgtggtaataacccttaccgggagtttca

SEQ ID NO: 814708 - DNA, 100 bp, Homo sapiens
agatgatgcctagtaaattacagaagaacaaacagagactgcgaaacgatcctctcaatcaaaataagattgtagaaggcatgaaacaaaaaatgtggag

SEQ ID NO: 814709 - DNA, 50 bp, Homo sapiens
gttaaatgcagccaattatacagtgtgatcttacagactctttcagcacc

SEQ ID NO: 814710 - DNA, 98 bp, Homo sapiens
ggggctgacacgcactttatcggaggagaacgtctatgaagacattctagaataactgaagtgaagtgatggactccgatttggagagtagtaagacg

SEQ ID NO: 814711 - DNA, 98 bp, Homo sapiens
tcccctcaggaacgtgtcccggggccgacccggcccgtagtgtggaagcagcttcaggcatagaatgtcaagctaaccaggcgtccgctacttcagaa

SEQ ID NO: 814712 - DNA, 98 bp, Homo sapiens
tgggatgaagatgcctgggccagcaagaaagtgaagtcactgcttttgctgtcttggatcaagaccagaaagaaattattgataccaatggagctgga

SEQ ID NO: 814713 - DNA, 116 bp, Homo sapiens
ccccggtctctcggacaccattttctgccgctggacgcaagtggtgccaccgaacatcgcagaactgaagaatttggaggtgctcaacttttttaataaccaaatcgaggagctgc

SEQ ID NO: 814714 - DNA, 100 bp, Homo sapiens
gaacgcgctaaggcaaagcacctggttgaactcccaccacctgatcttggaccaagttctgcactaaatcagacactcatgttgctgcgtgaagttttag

SEQ ID NO: 814715 - DNA, 100 bp, Homo sapiens
gagagatggagatgggcagacggattcatttagagctgcggaacaggacgccctctgatgtgaacctgttctctgacccaccccagcccaaccacagcat

SEQ ID NO: 814716 - DNA, 98 bp, Homo sapiens
atggccgacgacgacgtgctgttcgaggatgtgtacgagctgtgcgaggtgatcggaaagaactagtatattcaccgtctatgaggccgcctcacagg

SEQ ID NO: 814717 - DNA, 98 bp, Homo sapiens
cagagacaagctgagcttgccgcacaaaaagctagagagggtggttctcttcccaaagtggaagccaaattcatcaattatgtgaagaattgcttccg

SEQ ID NO: 814718 - DNA, 99 bp, Homo sapiens
agctctgaaaaactcttcaacactgttattgtaaacaaagatgaacctctagtcttgctttgaaaaaatcattctgtgtaactcttgactgtgactaag

SEQ ID NO: 814719 - DNA, 99 bp, Homo sapiens
tggaggttttggctctgcgtgagtgtggtctacgagctgtttctcatctttatactcttccagctgtgccctcctggctgaagaagccccaagacagcc

SEQ ID NO: 814720 - DNA, 100 bp, Homo sapiens
aacgtgtggatgctttacttttagacctcagacaaaaatttccacccaaatttgtgcaggaaggagaacatggactggatgaacacaaactccacatgta

SEQ ID NO: 814721 - DNA, 98 bp, Homo sapiens
tttgttcacaccaacttgcgcaaaaacaacagacagccctatgctgtcagtgaattagcagatgggaaactcttgtctagtgatgtgactcattacgt

SEQ ID NO: 814722 - DNA, 100 bp, Homo sapiens
taaaggatcctgtagaaattcaaaccctagtgaataaagccaagagagaccttggagtaattcgtcgacagccattgccgaaatctaaaaaaacttgtag

SEQ ID NO: 814723 - DNA, 100 bp, Homo sapiens
ctcagctcggccggggccgcagtctggccacccgcttccatgcggttcgggtccaagatgatgccggactgaatgtgggcccagttggcgtcattctgct

SEQ ID NO: 814724 - DNA, 100 bp, Homo sapiens
tcttctaagctgaataaagctgttttggaactgtcaggtacctcaaagcttacagaatgtctgaaggggacagtgtgggagaatccgtccatgggaaacc

SEQ ID NO: 814725 - DNA, 98 bp, Homo sapiens
ccaagaacaacgtcgtcatcaactataagggagatacttcaggggattaccggaagattctgctgaagatctgtggtggcaatgactgaacagtgact

SEQ ID NO: 814726 - DNA, 100 bp, Homo sapiens
aaaccagttattgaatatcaagaggaggagttgttggtgaaaggtgtagcagtcactcggcctacacccacagcatcgaccttgtgaacccagcgacctg

SEQ ID NO: 814727 - DNA, 98 bp, Homo sapiens
atgagccagagggacacgctggtgcatctgtttgccggaggtcgggaagacgtctctgattacgaggttcatgtacgacagcttcgacaacacatacc

SEQ ID NO: 814728 - DNA, 99 bp, Homo sapiens
ctcgctgcaacctccgcctcctgggttcaagtgattctcctgcctcagcctcccaagtagctggattacaggatgattgactgggtgtcctggcccctg

SEQ ID NO: 814729 - DNA, 100 bp, Homo sapiens
tcttcagatcttcacagcacagttcctgggaaggtggagccaccagcctctccttggttttgcacactagggaccaagaagccctcggggacactgctga

SEQ ID NO: 814730 - DNA, 98 bp, Homo sapiens
tacgcgggtcttgcgagatatctggccgcctctgccgcagctggagcaagagtgagccatggagctacgtgtggggaacaagtaccgcctgggacgga

SEQ ID NO: 814731 - DNA, 98 bp, Homo sapiens
acagcagcttcatgatattactgtaccgttagaagtttttgaggcactgtgaggtgaatgctattgtacacgttttatagatgaggaaactaaggctc

SEQ ID NO: 814732 - DNA, 98 bp, Homo sapiens
tcaccatggacaagctggtgcagaacattgcgcggcagccgcccctgacctggtcctcaatgcggagatggtgcagcagaccacctacctggaggacc

SEQ ID NO: 814733 - DNA, 100 bp, Homo sapiens
tggcacagcccatcagggagaaagagcaggcagtggcgattttgacagccacataccctgtgggtcacatgccatacggctggttgacggaaatccgtgc

SEQ ID NO: 814734 - DNA, 99 bp, Homo sapiens
tttgggactcgcctttgccctggcaaacactggaatcctactttttctgttcaacagagtttggaaaagatttctaaactggagcaggaaaaagaacat

SEQ ID NO: 814735 - DNA, 98 bp, Homo sapiens
gggcggagcctgccgaagcgccctttgtctgcggagcctcctgacaaggtgatccgggcgggccccgcaggaattttatcccctcaccggcctcacac

SEQ ID NO: 814736 - DNA, 100 bp, Homo sapiens
gccggcgcggcttctgcctggagagatttgaatataacctgccgctttgcaggtgtattccacgtggagaaaaatggtcgctacagcatctctcggacgg

SEQ ID NO: 814737 - DNA, 100 bp, Homo sapiens
cggtaggagcggggaggtgggtactacacaaccgtctccagccttggtctgagtggactgtcctgcaggcctgaaacaaccagagagctacgggaaagga

SEQ ID NO: 814738 - DNA, 100 bp, Homo sapiens
ctggagttacttattaacatcaaggcaggaggaagagcgcaggcgccgtgaagaagagatgcggcggcagcaagaagaaatgatgcggcgacagcaggaa

SEQ ID NO: 814739 - DNA, 51 bp, Homo sapiens
cagtgggtctactataactatagcaatgttacattacttcgttcagaacca

SEQ ID NO: 814740 - DNA, 98 bp, Homo sapiens
catcatccttcgctttgctattcaggatatttcggttgaagatgagttctggttctccgatgggtccttatcagataagtccaagtgcgcagatcctg

SEQ ID NO: 814741 - DNA, 100 bp, Homo sapiens
ttacagtgacaagaaaaacattgtttgaggattcctttcaacagggacttagtcatgcattgagaaagcaagcatggaaatttcttctgggttattttcc

SEQ ID NO: 814742 - DNA, 106 bp, Homo sapiens
gcgaggtcgagtaccttccctgtcccatcgcaaacccaaagatccccgttcctggagattctgattgaggtactccaaagattcaggtttactcacgtcatccagc

SEQ ID NO: 814743 - DNA, 100 bp, Homo sapiens
tggacaagtgtaatgaaattatcaactggcttgataagaatcaggatgaacatggtttcatctccagggagttccacaggaaataccggatcccagctga

SEQ ID NO: 814744 - DNA, 98 bp, Homo sapiens
gaaatgctcatctgaaattcatcacctctctggagtcttcaaactgaccaagcattgaaaagaaaaggcgacggcggattgacagaagtatgattgga

SEQ ID NO: 814745 - DNA, 100 bp, Homo sapiens
gtccaatttactacagagattcaaatggagcgattttagtttatgacataacagatgaagattcttttcagaaggatccagtttatggaaaaggaaaact

SEQ ID NO: 814746 - DNA, 100 bp, Homo sapiens
cgtggctctccagcggggagtgtttctgctgtctggtgaaatgacaatggatgctctgttggctcgattgaaacttctgaatccagatgaccttagagaa

SEQ ID NO: 814747 - DNA, 75 bp, Homo sapiens
cacgcataatggatgaaaggaaccgacagggaaaatatttatccccaaacagaaacctgtacagacttttacaga

SEQ ID NO: 814748 - DNA, 132 bp, Homo sapiens
ctgtctggagcaaataaaagagccctgcaatttgaagatacatgagacagcagccaaacccccagatgtatcctccactcctcgctggccaccatcctgctgcccaacagaagaagctcttctgtctccgat

SEQ ID NO: 814749 - DNA, 100 bp, Homo sapiens
cctacctttgatcagcaaggaaggactggggtggcaaaggctcatgcccccattttacaggtttttcgttggaatatacgttgcacatttatggcgattc

SEQ ID NO: 814750 - DNA, 98 bp, Homo sapiens
ctaccaccagtggagtccaggatgagggaccatggctaaacctcctggatcattagccagaagcagcagcctgtgccgttcacgccgcagcattgtgc

SEQ ID NO: 814751 - DNA, 99 bp, Homo sapiens
gagtacagcgtcgggcgggggacagctcagtaaagaacaagcacctttggagatgagtatgcatccagcggcaagcgctccactctcagtctttactaa

SEQ ID NO: 814752 - DNA, 100 bp, Homo sapiens
aaggaagcccatcccccagaattgagctgctgcataatattgacccgaacttcgtggactcttcaccgtggttgcttttgtaatgaagaagcacttaaat

SEQ ID NO: 814753 - DNA, 100 bp, Homo sapiens
ggaagctgcattgctgagcattggtactgcgacggtgacaccgactgcaaagatggctccgatgaggagaactgtcgccgctgcgcggccctgcgcatgc

SEQ ID NO: 814754 - DNA, 100 bp, Homo sapiens
ggattgatgtgcaacaagtgtctttggttataaattatgatctacctaccaatcgtgaaaactatattcacaggtattgggagagttgctgctacatctt

SEQ ID NO: 814755 - DNA, 98 bp, Homo sapiens
gagaagcggcgcggcctggacaagcggaccccggcccaggcggccttcgagaaaatgcaggagaagcgggtggaagagatcatgcagctggtgaatgc

SEQ ID NO: 814756 - DNA, 100 bp, Homo sapiens
actcacccgcagactccttctccagcatgggctcgcctgtcaacgcgcagaacatatcctcccctgagagttcccctgcgcataggcccgagtccctgtc

SEQ ID NO: 814757 - DNA, 99 bp, Homo sapiens
agaaaaactgtgcattaaaattcttcagacattacgagaaatgttagagaagaaagacagctttgtggaagaggaaacccagcgtttgctggcagaacc

SEQ ID NO: 814758 - DNA, 122 bp, Homo sapiens
gaaggtgtaaagcttgttcgaatgtctgcaagccagttagaagccctctgtcctcaggttttaggagaagttttagcacaacttctgcttcttcccaaaaggagattaacagaagaaatgct

SEQ ID NO: 814759 - DNA, 100 bp, Homo sapiens
cgggcaggtcactggcttctttgatgcccacgtggaattcaccgctggctgtttggcacatggaagcatgcacggcgatatggaggcatctatgcagcct

SEQ ID NO: 814760 - DNA, 50 bp, Homo sapiens
ggaaagaaacaagtttgctctcagcggatggagtctccctctgttgccca

SEQ ID NO: 814761 - DNA, 98 bp, Homo sapiens
cagcttctcccattccgggtaccagttcgcgtcctgctccaaggactgcactgtgaagtgcaatgtgccaccccaagccctcccacctcccctgcttc

SEQ ID NO: 814762 - DNA, 98 bp, Homo sapiens
ttcttaaggatgctttcaaatcaaatgactcacagcagcacctgttcttcccggagcctatcagcaaagccattcccaaggctatggctacatgcacc

SEQ ID NO: 814763 - DNA, 100 bp, Homo sapiens
catgatgcctacatgttctgcatcattgacaagtcattgattgatagagctacattctcctgatagcaggaacacgttgatcctacgctgcaaagataca

SEQ ID NO: 814764 - DNA, 100 bp, Homo sapiens
cctccttacgatgttgtaccgtcaatgcgtccggtggtgttagtggggccgtcactgaaaggttacgagagcacaaagttatcattgttgggctggataa

SEQ ID NO: 814765 - DNA, 100 bp, Homo sapiens
ctccaggaagccaccttactctgagggtcaagaattgccgcttccttttagttactaactccatccggcacaacctgtcactgcatagtcgattcatgcg

SEQ ID NO: 814766 - DNA, 98 bp, Homo sapiens
gatgttggcggtccctgtgacctgtggagacacggccagatctgccctccagaccaagaatcgccttcagccctgtctggtgcatccttggcagaaag

SEQ ID NO: 814767 - DNA, 100 bp, Homo sapiens
agcttggacccagacatcagcattccagggtggggcaccctctccatttgatagaaactttggaaccaaaatctctgccagagctatggagtggatcact

SEQ ID NO: 814768 - DNA, 98 bp, Homo sapiens
tgttaatccttccaataaaccttctttgccatcggtcttcagtttgcctgtttccgtttttagaaggcaatgaatcgctccctggctaatgtgattct

SEQ ID NO: 814769 - DNA, 100 bp, Homo sapiens
accttctcccagagcgtcagcagcctgttcggcgaggacaacgtgcgcgccgctcagaagatgctgagggttggaaaagcaaaagcagatgtgtggccca

SEQ ID NO: 814770 - DNA, 99 bp, Homo sapiens
gtgcctctggcagtgacgaggacgaagtgtccgagccccaccatggctgcaatccgaaagaagctggtgatcgttggggatggtgcctgtgggaagacc

SEQ ID NO: 814771 - DNA, 100 bp, Homo sapiens
agcgggagcagcaacaccagcactgccaacagacttatgaaaatatgcatcagtttaatactgtcttggaattcatgagatggaagcataggtcaaagct

SEQ ID NO: 814772 - DNA, 100 bp, Homo sapiens
cagatgtggtggaatatgccaaggaaaaactggagagcttcatcaaaaatagtgatagctttgataagcccagtctgactctgtctgtaatacctgattg

SEQ ID NO: 814773 - DNA, 98 bp, Homo sapiens
tcagctcaggaccaggcaccttctgtggaaggtttcagcgttaaaaacaatggccagtcagggaggccccaagtatactctctcacagcagccttggg

SEQ ID NO: 814774 - DNA, 100 bp, Homo sapiens
aatccattcacactccccaaaccagttttcggctttgtgagaaaccttaccatcaaacacgatggccagcaacgttaccaacaagacagatcctcgctcc

SEQ ID NO: 814775 - DNA, 100 bp, Homo sapiens
acaggccggtggtcgtgtccaactgctcctgcacccgggaggactatgagtggttttcgaaaggccttacactctgaccgtcctccttctgcatctcagc

SEQ ID NO: 814776 - DNA, 100 bp, Homo sapiens
cttgtggataagcacaaagtcaagagacagcgattggacagaatttgtgaagccagaaaacattatgttgttagacaagaatattcccattccacacatc

SEQ ID NO: 814777 - DNA, 98 bp, Homo sapiens
gggccagcagctggacagcgtcatgagaggcctggacaagatggagtcagacctggaggtggcggacaggtgtccctggccagtgtccttccacctgt

SEQ ID NO: 814778 - DNA, 100 bp, Homo sapiens
gatgtggtgatggctctactaccggttatcccatcatcaggtagcaagttgaaacgaccaacaccaacttttcattctagtcggacatcccttgctggtg

SEQ ID NO: 814779 - DNA, 100 bp, Homo sapiens
gaagacaatggattgtctacaagccttttgaacagtggagaatgcagggcgttggctttaggttgaggaacaggttagcaccactgagagagtgtttcag

SEQ ID NO: 814780 - DNA, 100 bp, Homo sapiens
ttaaccttcaaccatctggggaaaaggcaaaaatcccatctaccgcaactctcagttcgagagtaaaggctaagaaatggcatttcaaaaggcagtgaaa

SEQ ID NO: 814781 - DNA, 99 bp, Homo sapiens
cctgcgccgcgaggtctgcggcctcggtgatgtgtccaatctagatcccaacttctcatttgaaggcaccaaactggatgtggggaacattgtgctggc

SEQ ID NO: 814782 - DNA, 100 bp, Homo sapiens
attcaaaggacaccgtaaagcagtctcttatgcaaagtttgtgagtggtgaggaaattgtctctgcctggtgcaactattatctcagccactggagcctc

SEQ ID NO: 814783 - DNA, 100 bp, Homo sapiens
agcgcattactttctagaaaccactccttagaagaagagtttgaaagggcaaaagcagcagtggaggaagttggtgaaccatctaaagaagagaaggctg

SEQ ID NO: 814784 - DNA, 99 bp, Homo sapiens
agtcgtaagaagaggtcccaatcccccactctttccgccctaatggaggtctccagtttcgtttccatcttgctgctgcaaaaggacacgtggaatgcc

SEQ ID NO: 814785 - DNA, 101 bp, Homo sapiens
cggcgctgcagctggagagaatcaacgtctactacaatgagtcatcgttgggaatgtaagacggacttagatattgcatacaaatttggaaaaactgtggt

SEQ ID NO: 814786 - DNA, 98 bp, Homo sapiens
agggacacgctggtgcatctgtttgccggagggtgacaaacagcatgtttggtgcttcaagaaagaagtttgtagagggggtcgacagtgactaccat

SEQ ID NO: 814787 - DNA, 98 bp, Homo sapiens
tcaatttgagctgctccacagttcccacctttgttctgtccatcacagccacaacacaggcaagtagcctgcagtatgaaatgctgctgctgacggat

SEQ ID NO: 814788 - DNA, 100 bp, Homo sapiens
cgctacttttactcagagtttgaaggttgtgaccaaaagaggctccggtcgtttatacgcaatgcagactggaatgaagatcgatagtaaaactcctgaa

SEQ ID NO: 814789 - DNA, 100 bp, Homo sapiens
aggggaagcagaggggctggaagtcattcagggctgggagtaagcagacgctctgctgttgcccgtattcaggagttcttcagacggagaaaagaaagga

SEQ ID NO: 814790 - DNA, 100 bp, Homo sapiens
aagccatccgcagaaggggagacacattttatgttgtgtcatttcgaaggtccttgaaatattccttccagacaaaagaccgtttgtgttttgtgatgga

SEQ ID NO: 814791 - DNA, 99 bp, Homo sapiens
gaaagttccatatttaagtagtctgcttcagcctttttcaggttccggtggaggaggaggttgctggtgatctctgctcctaacgatgaagactgggcc

SEQ ID NO: 814792 - DNA, 100 bp, Homo sapiens
tgtttctaatgtatgggatggtgatagagagtgctcaggaatgaggttatatcctgtgttgtgacctcatggtttaagtgggaataaagatgagtataag

SEQ ID NO: 814793 - DNA, 98 bp, Homo sapiens
aaaactcagggtacagtgcagcacctgcaggcaggcaacgctcaccttgacccaggaattgaatgatctggcacgggaccctccagcacagtgttcag

SEQ ID NO: 814794 - DNA, 100 bp, Homo sapiens
caaggaagagaaacttcagcaggcgatagcaatgcacagccaatttcatgctccactatagctcattgctatggacagtgctatcaccctgtggcagttc

SEQ ID NO: 814795 - DNA, 98 bp, Homo sapiens
gagaacagacgcatcactggccgagcccactggggctcacaccacgcagttacccagcatgccacaatctgattgctgacctggatggaacagagtga

SEQ ID NO: 814796 - DNA, 100 bp, Homo sapiens
tcaccgaggagaagtaccaggaggcgttggccaagggatcccatggtccattattgcctttaccaagtcgttacagaatgggctctcgagatacacctga

SEQ ID NO: 814797 - DNA, 98 bp, Homo sapiens
gctaaagaagcaggatgcattctacaaagaacagctggctagactggaggagagggtaaatgagctggatggtatcccgttgatcctggacaactgca

SEQ ID NO: 814798 - DNA, 100 bp, Homo sapiens
aggcgactgcttaattgctggggaccaccaaggaaatatttatgtttttgacttacatggaaacagaaatgcttgttaccaacctatgtcttttcgacca

SEQ ID NO: 814799 - DNA, 100 bp, Homo sapiens
tggaaggtcaaaaaggctgtattaatttacatgcaaaaagtcacactagaggaatgccatatcagaatgcttttgacacgccgctttttggatgcctcct

SEQ ID NO: 814800 - DNA, 98 bp, Homo sapiens
aaagcagtcgtaagaagaggtcccaatcccccactctttccgccctaatggaggtctccagtttcggtagccaaggtgctttggtggtactatttctc

SEQ ID NO: 814801 - DNA, 98 bp, Homo sapiens
ttggtatttcagcagaaagactttcacagagactttcttcatgagattgaaacagatatttgaatggtggtacttccataagcatggcacatctttta

SEQ ID NO: 814802 - DNA, 100 bp, Homo sapiens
gtaccttggcttggctcttgacgtggacacaagtctggaaaagtttgaaattccagtaaaaattcgtttgagtcctgaaccgtggacccctgaaactggt

SEQ ID NO: 814803 - DNA, 132 bp, Homo sapiens
ccgctggcagccggggagctgcaggaaccagactgggggcgagctgagcacctgtagtcaatcacacgcaggagtctccccaggacagtgctatcacccgggatattaaccgaacattcccagcccatgact

SEQ ID NO: 814804 - DNA, 100 bp, Homo sapiens
agagtgctggaagatgatccagaagctgcttatacaacaactagtcgtgtacaacggcaagaggaccagcagcccccgctccccacccagcagcagcgag

SEQ ID NO: 814805 - DNA, 100 bp, Homo sapiens
cagaattggacgaaagtttcaaggagtttgggaaaaaccgcgaagtcatggggctctgtcgggaaggtggaatgcaagctttaggacttcacctgacaga

SEQ ID NO: 814806 - DNA, 100 bp, Homo sapiens
tgacacctttgactcttctactgtctcagaccttagacttaattcagtgcacaaatgagatgaatgtgaacatcccacagttggcagacagtttatttga

SEQ ID NO: 814807 - DNA, 100 bp, Homo sapiens
ttctctgctgcacatgcccttcacaatagcagcggagaaggtgtacaacacccgccatcagatggcagaaacggtggacacaagcgaaatggtcaacggc

SEQ ID NO: 814808 - DNA, 100 bp, Homo sapiens
aattcttacaacctctctacgccaaagaaatccagtcccgaccaactatgtcttcagcagtggtgcagttatatgcagcagatcggaactgtatgtggtc

SEQ ID NO: 814809 - DNA, 100 bp, Homo sapiens
agtctataagctttgcaacagaattacagagtatgatggtgatgaattagaagacaatggaaagaatttctacgaatctgatgatgatcagaaggaaaag

SEQ ID NO: 814810 - DNA, 100 bp, Homo sapiens
gtccaacagggagtgtatgctacgaacgtaatggggaacaagctgaaagctggatacctaatgtcagtggagtcttctgagtgtttcctggaagaagtcg

SEQ ID NO: 814811 - DNA, 100 bp, Homo sapiens
aagcttcacagacctgctgctggatgatgggcaggacaataacactcagatcgagctctttcagtctcacatggcaacgaaaacaacttgtatgtcttca

SEQ ID NO: 814812 - DNA, 100 bp, Homo sapiens
aagcggaagctgcccttcaccgcgggcgccaatggggagcagaaggactcggacacaggtgatctgtgaaaatggttcgctattcacttgacccggagaa

SEQ ID NO: 814813 - DNA, 100 bp, Homo sapiens
ccagattgggaaccgctgccaccccaagctctacgacgagggcgacccctctgagaagctggagctggtgacagaagttttcagcaaactcggattatct

SEQ ID NO: 814814 - DNA, 98 bp, Homo sapiens
cccccagtatctgcaagccaaggttgcactgctgtgatccatcctcatctcctaaagatgcatcctgacttatctccacacttgcacactgaagaatg

SEQ ID NO: 814815 - DNA, 100 bp, Homo sapiens
ctcagttaaagaagatgaagaagtcttcaggggagattgtctactgtgggcaggaatcagagatcattgatttcttcctgggggcctctctcaaggatga

SEQ ID NO: 814816 - DNA, 98 bp, Homo sapiens
tcatcatcatcgcctcctgcgtcatcaacttaggcgcaattctgtggtgttcttggtcacacatttatggagtttctgaagggcagtggagattactg

SEQ ID NO: 814817 - DNA, 98 bp, Homo sapiens
agattcccaggatgtgagcaacacgggaccgatgacagacaaccttctgtgccttcatcaagctggttgtgtacccaccatgtccctggcgacaggat

SEQ ID NO: 814818 - DNA, 98 bp, Homo sapiens
gacaaagctgttgtctcagggagcacagaagcaggtgacaaacattaccaccccagctgtgcacgatgcagcagatgcaaccagatgttcacagaagg

SEQ ID NO: 814819 - DNA, 100 bp, Homo sapiens
cttccatctgctgctcacctcagctgcctgggtccccgacgagagccagggtaccgtgagggttttctctggaagcgtggccgggacaacgggcagtttt

SEQ ID NO: 814820 - DNA, 100 bp, Homo sapiens
ataatggatttggtaatgatggttgccgatatagaatctggcagacagattcagctgatcaaccgaaagtctctgcgatctctcactgcccagttgctgg

SEQ ID NO: 814821 - DNA, 100 bp, Homo sapiens
ataagcaaccagcatttagagctgtttatgaagcactgagaaattgtgttgaagagatcctaggatacctgaaatcctgctttagtcgagaaccaatgat

SEQ ID NO: 814822 - DNA, 100 bp, Homo sapiens
gcatcctgacccgtggggcctctgtgcagctggtgtttggctttgaggaatggtcctcgtccgaagtgagaatgggcagttgttaatgattcctcagcag

SEQ ID NO: 814823 - DNA, 100 bp, Homo sapiens
cggctctccgccgtccccagccctgcctctccctgggctctggaatagcgggttttgcagcaattgttgcatatggattatataaactgaagagcagggg

SEQ ID NO: 814824 - DNA, 100 bp, Homo sapiens
cttcttcccgctggccgccatctgctgcagactggagcctgagagcagccagagactgctgctactttgaaacgtacgatagaggccctgatggacagag

SEQ ID NO: 814825 - DNA, 100 bp, Homo sapiens
gtctgactgataaattaactcaggcccagatctttgactacggtgaaatccccaactttccccgaagtacagcccctggtgtctgcagtgggggatttaa

SEQ ID NO: 814826 - DNA, 100 bp, Homo sapiens
cctcctgagtggctgggactacaggtaattattgaacatctacttgctgcctactttcaacatctgcatgtgtgtgtgaatattaaatatcacaccaaga

SEQ ID NO: 814827 - DNA, 99 bp, Homo sapiens
gcgaagggggcaatggcctgggctgtgggggaaatcctcattgacgattcaatttgttgaaggccaatttgtggactcctacgatccaaccatagaaaa

SEQ ID NO: 814828 - DNA, 98 bp, Homo sapiens
aacagaagaagctgatacctgggggagataatgtaactgtgtgcaaggataacagatcatggagtgcatcggatcctttctataccaacgacaggagc

SEQ ID NO: 814829 - DNA, 98 bp, Homo sapiens
cggtttcagcctccagtactggggatttgccaaaaggttgcaaaagcttctcatttcagagagatgccaggatcctaagtgcctgccaaacttaccaa

SEQ ID NO: 814830 - DNA, 98 bp, Homo sapiens
gaaactcatggaatatcctgcagaagaaaatggatttcgttatatcccctttagaatatatcagatgtgtcatccccacaccagcgagcctctgccaa

SEQ ID NO: 814831 - DNA, 100 bp, Homo sapiens
tgatccgcaattacggccccgaggtgtgggaagacatcaaagctttccatccaggtgtcatgcagaattatggggatcacccttgtgagcaaaaaggcga

SEQ ID NO: 814832 - DNA, 100 bp, Homo sapiens
tcggactgggacaccctctgaccctcgtcggcgcctcagaaatattattcatctgtgccagaggaaggaggggcaacccatgtctatcgttatcacagag

SEQ ID NO: 814833 - DNA, 104 bp, Homo sapiens
agaggacaggtccagtctctgtggggaccaagaaagatgctcagccagcattgggcagcccccgcttcctgctcccctacccccttcacatggcagtagttctg

SEQ ID NO: 814834 - DNA, 98 bp, Homo sapiens
cggagggagacgcgctgccgaggagaacccagcggcatcaacaacagcaacttgtgattggcggtgaccggatattcagttgcacatccccacatcaa

SEQ ID NO: 814835 - DNA, 100 bp, Homo sapiens
caatttaccagagataattgataacaccctgtaacagctgaacctcaggatatcattgtgtttgtaattggaggagccacctatgaagaggctctaacag

SEQ ID NO: 814836 - DNA, 129 bp, Homo sapiens
tcaagatggcggccaatgtgggatcgatgtttcaatattggaagcgctttgatttacagcagctgcagatttcaccaaaagaattgtgagaggaaaaagaaacttacatctaacaggaagagaaaagtt

SEQ ID NO: 814837 - DNA, 98 bp, Homo sapiens
ggaattaaaaggatttaagagatcatggtgtgcatgttctaggataatttttatggtgggacgaggatacctgtctccagatctcagtaaggtacgga

SEQ ID NO: 814838 - DNA, 100 bp, Homo sapiens
atggctgggctcccccaaattgtgagactaaaggatacggaggaagtgtggacagtggacctacatacaatgatctaaatcggaaggtagcacacagaca

SEQ ID NO: 814839 - DNA, 100 bp, Homo sapiens
gcaaggaggcttgggaggagtgtggctaccacttggccccctctgatctgcgccgggtcgccacatactggacttgattattcttagaaatgcacttgac

SEQ ID NO: 814840 - DNA, 98 bp, Homo sapiens
acagcagccaggagtcatgagcgacagcggcgagcagaactacggcgagcggatttatcagcgatgctggttagtattcaagaaagcttcaagcaaag

SEQ ID NO: 814841 - DNA, 100 bp, Homo sapiens
tctatcagctagagaatcaaccttctgaattcaggaggatagaatctccactgaaacatcagctgtacaggaagaggcacatacaaagaaaagaatcccc

SEQ ID NO: 814842 - DNA, 100 bp, Homo sapiens
tacttcgccttccctgcaccacactctgccaggtcctgcatgctgtgagccatcaggactcttgtcctggcgctggagtgacttgtctgagattcctcca

SEQ ID NO: 814843 - DNA, 98 bp, Homo sapiens
ttaaagaaggcaaggagagaatgtatgaagaacagtcacaggacagacctaactaccataatgaatgctgcatattaagagaaaccacaagaaggtta

SEQ ID NO: 814844 - DNA, 99 bp, Homo sapiens
ggacgccttcaacaccaccttcatctccaccatcggcttgatagttctgaaatggatcacagtgaaaatgaagattacacaatgtcttcacctttgccg

SEQ ID NO: 814845 - DNA, 100 bp, Homo sapiens
catgggccggttttatgagtgggaaccatttgcagaagaaaatgcatccgatgcagatttatggctcctgaacagttgcactgtaaaaaacccagctgaa

SEQ ID NO: 814846 - DNA, 98 bp, Homo sapiens
cttggaaacagatgaggagcctcctgatcttattggggggagtataaagaaaacctttccaacctatgagagaaagagatgtgaagaaagaagacggg

SEQ ID NO: 814847 - DNA, 98 bp, Homo sapiens
tgtttgtgaaacagagaaagataggcggccatggtccaaccttgaagaaacgatggaaagaactttctaaggaagacttatctcctgcctttgatcat

SEQ ID NO: 814848 - DNA, 100 bp, Homo sapiens
aaggcagagttcacttcccaaggacagaggcaaacggagcagtgcgtttgtgtttgaactttctggggagcactggacgattcaaactcagatgactttg

SEQ ID NO: 814849 - DNA, 100 bp, Homo sapiens
aagaagggctggagtgcctacgcctgctcaatgagatcattgccgacttcgacgagaattatatccagatcgagagacagaagattctgaaagggttcaa

SEQ ID NO: 814850 - DNA, 99 bp, Homo sapiens
gaaccttggagagaggagaacgaacatcttctggacctttgtccaggtcagaagagatcaattctacagaaatttccagtggttctgttgaggctttat

SEQ ID NO: 814851 - DNA, 100 bp, Homo sapiens
acttatatcgccagtccagcagctaaggatattttgtgcaggttcaatgttggatatcataaaatacattgtcaaccgaggagaacacaagaatggagtt

SEQ ID NO: 814852 - DNA, 131 bp, Homo sapiens
cgcgttcctgctgctctgcctgctccacaagcggcgccgcgccctcggcctgcacggggatggttgtgcgagctgttacgctggaaagaagatccttctccagaaaacagaaccctgtgggagaacctctc

SEQ ID NO: 814853 - DNA, 99 bp, Homo sapiens
atgcaggcagcaagcagctgtttatgacagcctacttcttggtcagtgccctcgcaggagaagaagttgacagacagctgtgcagagatgccatcttcc

SEQ ID NO: 814854 - DNA, 100 bp, Homo sapiens
tctggctgagccctgcgcggtcctgccgaccgtgtgcgctccttatattcccccgcagagtactatactggcaattgctggagaagattttgcaattgtt

SEQ ID NO: 814855 - DNA, 98 bp, Homo sapiens
gcaccccagaaggaatacgacttcagtgtttcatgaagtattttacagacgaaatgaaagtgaactggtgtcacaaactgcagagtgggatgaacttg

SEQ ID NO: 814856 - DNA, 100 bp, Homo sapiens
tcagtctcctctcctcacactcccaccactcctcccaaaaagctaccccggctgaagaagtggaagactccaatgaatgtgacagtgatgataacatggg

SEQ ID NO: 814857 - DNA, 98 bp, Homo sapiens
ctcgaggccttcgtcttccgaatgaactacagccgcaagaaccaggactcggaagatgcatttccccggattgctcccatccgagcagctgaatccct

SEQ ID NO: 814858 - DNA, 100 bp, Homo sapiens
agccctgagcccatggcagctccagcctctgcctcccagaaactcaggtaccgtatcctgaaccccagtgccatcccggatgacaccttcatggacagca

SEQ ID NO: 814859 - DNA, 100 bp, Homo sapiens
agctatgcagtatttctttggcatcactgcagctagtaatttgccttctggattgttcaacagaatccctcaatcctagaccacagaccacaatttctcc

SEQ ID NO: 814860 - DNA, 100 bp, Homo sapiens
ctcccaaatcaggaacactgaagagccctcccaaaggatttgatacgactgccataaacaaaagctattacaatgtggtcctgtatcacctctttgagga

SEQ ID NO: 814861 - DNA, 100 bp, Homo sapiens
taagcaattttttggataaaagtggattgcaagctatatgtgagacagagcctgaacagcctgttcgacattacccattatgggtaaaagtagaaggtga

SEQ ID NO: 814862 - DNA, 98 bp, Homo sapiens
ccaccgtctgaactaggatgtcccgacatgaagagtttgccagatccggcccggtgcctgggttccaggaggacacgctgcagttggccttcatcgac

SEQ ID NO: 814863 - DNA, 100 bp, Homo sapiens
ggggacattattgcgcgtggaacggctgcttttggaagtgtaatgttcaagctcagaaatgccttatgtggatcgtcagaatcgcatttgtggttttcta

SEQ ID NO: 814864 - DNA, 98 bp, Homo sapiens
gtaccagtgatggcaataagaaacaaaatgatatcagaaggactagacccagatcttcttgattccagtgcgacggcctctcagccgccggagtcgct

SEQ ID NO: 814865 - DNA, 135 bp, Homo sapiens
ggtcccggatgttgcggacagtatgaggcaagcgcagggggacggggaccagcagctgtcgccgccgctctcaggatactcttattagcatgaagtgggaccctacaggtcatattcttatgacatgtgccaaag

SEQ ID NO: 814866 - DNA, 99 bp, Homo sapiens
ttcggggtggcccattcccaggcaggctgctaccgcccctccgcttccagacattctcagctgtcagttttagagaattactccaaattcatcatgatt

SEQ ID NO: 814867 - DNA, 100 bp, Homo sapiens
aaagttttgcagatcttcaacaagaggacccaggagaaattcgccctcaaagtgaatgaaaactttgccattgatttgatagcagagcagcccgtgagcg

SEQ ID NO: 814868 - DNA, 99 bp, Homo sapiens
ggaaaatgatgcttaatatcgatggtgactgcttagaaaactgcacagcatctgatgaaattagcgaataagaacatcaaccatgtcttacactccagg

SEQ ID NO: 814869 - DNA, 55 bp, Homo sapiens
cttataaagtattaccatgcacagtgcaacaaagtgtgggatgctgtctcaggag

SEQ ID NO: 814870 - DNA, 100 bp, Homo sapiens
tagcatttggatctttaattattgcattaattcaaatgtttaaaattgtactagaatacttggaccaccgtcttaaacattcctgtctgactaaagggac

SEQ ID NO: 814871 - DNA, 98 bp, Homo sapiens
agggcccgcccaggacccccaagccgccgcggacgcagatctcttccctgaagaacaggctgaaaaaggtctccacaaccactggggatggtgtggcc

SEQ ID NO: 814872 - DNA, 99 bp, Homo sapiens
ggcagcggagcacgcgggctgctcatcgtcagcagggagaggctgcacctggccacattcatcatggacaagagcgaagccatcacgtctgtggacgac

SEQ ID NO: 814873 - DNA, 100 bp, Homo sapiens
tcactaatcaatttggatggcaagcttcaccagcatgtggttaagtgcacagtttgcaatgaagctacggatgatccgttggtgctgaatgagatcagag

SEQ ID NO: 814874 - DNA, 100 bp, Homo sapiens
gccagacaacttctggcagaaacagaggactaattttggcagttctaaatttgaatttgaggtgtatgtggaatttgatgatcttgaatgggataaacga

SEQ ID NO: 814875 - DNA, 99 bp, Homo sapiens
ctcgatgtgctctgcgtgttgctgggtagctacagcaagctgggtagcaggcagatccaaaggatatcatgaagtttccagggcctttggaaaaccaga

SEQ ID NO: 814876 - DNA, 98 bp, Homo sapiens
aactggctaccgttcggactatttgtagtcatgtacagaacatgatcaagggtgttacactgatgcagccaccccttcaaggtctacctgggaggaag

SEQ ID NO: 814877 - DNA, 100 bp, Homo sapiens
tggatcacggatgtaggaagtgatctacggaatccagaggcagcattgtctccaaccttccgtagtgacagcccagtgcctactgcacccacctctggtg

SEQ ID NO: 814878 - DNA, 100 bp, Homo sapiens
ggatgtgtttctgcctccaggtctgggtggtcagaatggatccacgcctgatggctccacgcatttcccttcgtggaggagatctcttttcaaaaagcta

SEQ ID NO: 814879 - DNA, 98 bp, Homo sapiens
acgtaccagaggtggaagtccaagtcaaacgcagaaggactgcctcactgagcaaccaagaggaatggatttgtaaactcaagagcttctccaaattt

SEQ ID NO: 814880 - DNA, 130 bp, Homo sapiens
tggcggatgctctacctctgcacatcgcacccaggtggttcagctcgcatagtggagtctccccaggacagtgctatcacccgggatattaaccgaacattcccagcccatgactactttaaggacacag

SEQ ID NO: 814881 - DNA, 50 bp, Homo sapiens
aggagtcatcctcacctgttaggttggaaatctacatttctgaaggaacc

SEQ ID NO: 814882 - DNA, 98 bp, Homo sapiens
gccggcgccgagggcttggaatctcgagcgggaaaagcactctggcccccagaagcttctccacattgcccaggagctcctgcacaccgaggagacct

SEQ ID NO: 814883 - DNA, 100 bp, Homo sapiens
cgactatggctatgtctgcgtggagttttcactcttggaagatgccatcggatgcatggaggccaaccagggccttaaagcggctgacaatgaccccaca

SEQ ID NO: 814884 - DNA, 100 bp, Homo sapiens
agcagaggatggaacacttcagtgcattcaagtggcagctagactgtcttgcttgcttgctgaagttaatatgccagtttgcagtagatccatccgattt

SEQ ID NO: 814885 - DNA, 51 bp, Homo sapiens
cctcgctggagatcgagtaccaaacgactgcaagaacattgccaacatcat

SEQ ID NO: 814886 - DNA, 99 bp, Homo sapiens
agcaagttccacagcaccatgcattatgatgggcatgtccgcttcgaccttcccccacaagtctcttcaagaaaatgaggaggaggagattgggaacct

SEQ ID NO: 814887 - DNA, 98 bp, Homo sapiens
agcgatcgagagagaccggagaggtggagagcagcctcccgcgacgatgcccctcaacgttagcttcaccaacaggaactatgacctcgactacgact

SEQ ID NO: 814888 - DNA, 100 bp, Homo sapiens
atctccgccaccgtcttcaggccaggtggaggagttactgatggccatggagaaggtaaagcaggaactagaatccatgaaagcaaagctgtcctccacc

SEQ ID NO: 814889 - DNA, 136 bp, Homo sapiens
cttggaagcaatgtttgaacaaactcgaagaacagctgtggaaagaagttgcaaaacactggatgcttgtttgctactgatgggtgtgagcaagttagatattctataccggagacttctcctaacaaaacttttt

SEQ ID NO: 814890 - DNA, 100 bp, Homo sapiens
agcaccgagagagaatgtcccagccgtgttgccgcccgctgtgctatgagcagtcagagcgccgtctccacaagagtttacaaatgaaaatggaggaaat

SEQ ID NO: 814891 - DNA, 98 bp, Homo sapiens
tgcatcaaaggtgtgaacacagtatcaccttttgccatgatagcatttctttcattggacagttccttacaagggctccactcagtgtctgtctgtat

SEQ ID NO: 814892 - DNA, 99 bp, Homo sapiens
gatggcggatctggaggagcagttgtctgatgaagagaagaagctccaccatgaggcgaggtggatggaggaagcgagctgaaaatgatggctgggaaa

SEQ ID NO: 814893 - DNA, 98 bp, Homo sapiens
ccggttaccggagggacaccttaaggaactgtataaagcaacagcatcagaagagctaacaattgctggaatgacctttacaacttttgatcttggtg

SEQ ID NO: 814894 - DNA, 100 bp, Homo sapiens
caccgcttggacgagccgccgcacatctgtactatactggcaattgctggagaagattttgcaattgttgcttctgatactcgattgagtgaagggtttt

SEQ ID NO: 814895 - DNA, 98 bp, Homo sapiens
tcgacaccatggtggacacttttcttcagaagctggtcgccgccggcagcagaaaaagtcctacctggagcgaagcgttaaggaagctgaggacaaca

SEQ ID NO: 814896 - DNA, 100 bp, Homo sapiens
gcttcatgtattgagcaaaataaagaaaatcagagttttgaaaatgaaactgatgagacgacaactgtacaccagaggatcgcttcctggcagaatttgg

SEQ ID NO: 814897 - DNA, 99 bp, Homo sapiens
cccaacgaggcgctggtggtttcaggtggtggtgaagtttattaagaaggagaaggtcttggaggattgttggattgaggatcccaaacttgggaaagt

SEQ ID NO: 814898 - DNA, 99 bp, Homo sapiens
cagattctaactccaatggcccaaaattacaatgccatcaagtcatataaaacagaaggaagagctgaacgtttagaggcaacagaataccttgtctca

SEQ ID NO: 814899 - DNA, 99 bp, Homo sapiens
ttagacttccggaaggactttggcgagggtacttggtaatcaaataatgcctggatttcttaatatgaagataaagtttgtgtgcgcccagtgtctgag

SEQ ID NO: 814900 - DNA, 100 bp, Homo sapiens
aagtctgttcaatacaggaaataaactttgaagatttggtaaaactcacctctttggatgggcctttgggtccccgaggattagctgaagctacagagat

SEQ ID NO: 814901 - DNA, 100 bp, Homo sapiens
cggggtccgcaaggccggagaaggccgccgggcccgggcatggtggtctggggcaacgcggaaggtgagaagcgccactgctttgatgtcaactataatt

SEQ ID NO: 814902 - DNA, 100 bp, Homo sapiens
agcacaccaccgtctgcaccacaggcatgccgcacagtgggaatgtaagacggacttagatattgcatacaaatttggaaaaactgtggtgagctgtgaa

SEQ ID NO: 814903 - DNA, 100 bp, Homo sapiens
ccatctggcagattggaagcggggaaggaatgaagcgtgtcctgacttctgtcagcttggggaaggaagtcagtaagcgaatgtctgtgacggagggtgg

SEQ ID NO: 814904 - DNA, 114 bp, Homo sapiens
cgcctacctgcatgaccagttctggagctactggaatagggagtaactattcccagtcagaggcgctatgtgtattattatagctacctgttaaagaatcatctggattataga

SEQ ID NO: 814905 - DNA, 100 bp, Homo sapiens
gaagagactggaatgttgacttgattcccaagttccttatggctaatggtggagacagattactgtctgctgctggctctgccctgtggccgtgaccaag

SEQ ID NO: 814906 - DNA, 100 bp, Homo sapiens
ctggaacagcactatgcccagtatgatgccgacgatgacgaggatctatctggttcaatagatgacctccccatggggacagaaggagctctgagtcctg

SEQ ID NO: 814907 - DNA, 98 bp, Homo sapiens
aaccggatcaccgagggcatttacggcaggatcactgcttttaccacggcacggtgagggagacagaactgtccagcgtcacgctcagcacttgccga

SEQ ID NO: 814908 - DNA, 100 bp, Homo sapiens
ctctttgtcatctcaatggctggggaaggtgctcaattcccatacatgcactagagagacacagatgtgcacactgtggcttccctgttaaagctctacc

SEQ ID NO: 814909 - DNA, 98 bp, Homo sapiens
gtctcactagataccttcaatcatcattttgagctcaaaggcatccaacgcactggaggagctttgctttatgattatgggaatgctaccaaagcctc

SEQ ID NO: 814910 - DNA, 100 bp, Homo sapiens
agaccaagagcgggaatgtgtggaaagaccacagcaagattctttcattcgtctcctcctagcctgggggaccaggctcgaactgaccctggacatcaaa

SEQ ID NO: 814911 - DNA, 125 bp, Homo sapiens
cacttctgaagtcttcaacaaattcttcaaggaaagagtcatggaaatagttgatgcagatgaggtatcggctaacaagggtgaaattggtgatgccactccatttaatgatgctgttaacgtgc

SEQ ID NO: 814912 - DNA, 100 bp, Homo sapiens
aggccttacggtggccaatgaagcagactcactaacttatgatttcctctgtgacgagggtgcaggtatctctggggactacatcgatcgcgtggacgag

SEQ ID NO: 814913 - DNA, 99 bp, Homo sapiens
gccgctgtgtggttgcaacggagataaattcccggaaccgcgattcggcgtgtcaggaggagacatcacagctttcccagatcgggaggaaaaatatgg

SEQ ID NO: 814914 - DNA, 100 bp, Homo sapiens
agaagacacttaaatttttccagacatttgccttgcttgagcacccagtcagcttgaagagtttcaaatggaccctaccactgagaaatcaagatggcag

SEQ ID NO: 814915 - DNA, 100 bp, Homo sapiens
ggccaggataactgtagagcagcaaatttcagagaaggcctgaacttacaagaaggagaattcttattacaggaagctgagctgaacacattacgatgga

SEQ ID NO: 814916 - DNA, 100 bp, Homo sapiens
cttcctgttcacggtgaccttcgcttggtgtcctcctggcctcagcaacctgacaattctgtcgtgtcccggaagccagcagacctgcagaacttggctc

SEQ ID NO: 814917 - DNA, 100 bp, Homo sapiens
tcggaaaccatgggttattgcagtggcaggtgcacgcttatctttatctgtggcatgcaactgagagtcccacgaactggctgggtatacagaaatgtcc

SEQ ID NO: 814918 - DNA, 100 bp, Homo sapiens
ggcatggatatctctactcgctccaaagattaatcctaccatatgaaagatttattaaaggagaagaagataagcccctgcctccaatcaaacctcggaa

SEQ ID NO: 814919 - DNA, 100 bp, Homo sapiens
gcccgatggtcttccgtaacctgcgggagaggtttggaattgatgatcaagatttccaggagcagtgaggagaatgaataccttccaagaccagagtggc

SEQ ID NO: 814920 - DNA, 100 bp, Homo sapiens
atagcaaatctccttggatttcctccagagttcggtttgttggcatccaaagctgttggggttgatggtgctgaaaaaaaggaagactacaatgaaacag

SEQ ID NO: 814921 - DNA, 100 bp, Homo sapiens
ggctgcagcgagcgctggacggagaggaaagcggtcaacgtattgaaacttactgttgaagacttggagaaagagagggatttctacttcggaaagctac

SEQ ID NO: 814922 - DNA, 100 bp, Homo sapiens
cgcagcatcagcagcactgtgcagcggcagctggagagcttcgacagccaccgtaatggaggggaaagttccagtcgcagcgctgagaagcgatcagctg

SEQ ID NO: 814923 - DNA, 100 bp, Homo sapiens
tccttgaattggaaggcatctctcctgaatattttcagtctgtagtaaatcttacaaaccattgtggttttatgggaggactacaaaaaaacaaaagcac

SEQ ID NO: 814924 - DNA, 100 bp, Homo sapiens
aaaaagatccatgcccagtggcagaaagagcagcccgacggccatggaggctgaagagacgatggaatgccttcaggagttccctgaacatcataaaatg

SEQ ID NO: 814925 - DNA, 99 bp, Homo sapiens
cctgatgatgaacagtttgtcccagattttcagtctgataaccccacagtacacgaacctggggctcctgaacagcatggaccagcagattcagaacgg

SEQ ID NO: 814926 - DNA, 100 bp, Homo sapiens
ttcaacttggaatcctcctacctttgtgaatatgactatgtgaagagcttttcatcctactataaaggaggatttgaacagaaaatgagtaggcgagaag

SEQ ID NO: 814927 - DNA, 99 bp, Homo sapiens
acctgtgggtgtcagtggcgcaccatctgaaaacaacatcatgcagtggaatgcagttatatttggtgttctttcagaggaccaagacagttacctgtg

SEQ ID NO: 814928 - DNA, 98 bp, Homo sapiens
aaaacaagttctgaaaatggaagttgctgttttgaaaaagctgcaagattcgaaatcagagcaaagcctctgggtctgggctctgtgagggagatgaa

SEQ ID NO: 814929 - DNA, 100 bp, Homo sapiens
ttcgaggagatgtgaaacaagttaaagaattaataagtttaggggcaaatgtgaatgtgaaagattttgcaggtggagctgaagagccaggaggctcaga

SEQ ID NO: 814930 - DNA, 98 bp, Homo sapiens
tatggtgaagtcttttgtacagtggttagaccctgtgcgcactcattcgaggagtccatcaaaagaataagtctacctctgggtttgacattatcaac

SEQ ID NO: 814931 - DNA, 100 bp, Homo sapiens
aaagtcgtgatatcatcgttgaactcttctgaaagttctgctgaagacagtgagcaggaagatgagagaggtgctcaagacatggataataatggcaaag

SEQ ID NO: 814932 - DNA, 100 bp, Homo sapiens
ggacgctctcagggagccgctcccggccactttaagaattactggttacaaaagaatttctccaagaagcaacgctatttttccaaacccagaagagcct

SEQ ID NO: 814933 - DNA, 98 bp, Homo sapiens
tcccagagaaaaatcggcagatgttacagctgctcatgaaccacttggcaaagaacgccagcgcctggagaccatcctgaacctgtgtgccgaataca

SEQ ID NO: 814934 - DNA, 100 bp, Homo sapiens
tttcaaattaagaatgggtctgtgatgtcacatctaggagcatctacccatggacagacatgtcttcccatggagatatacagagatgccaaggagtgcc

SEQ ID NO: 814935 - DNA, 100 bp, Homo sapiens
cagaaagccccagacggaaagagctacttgctgacctatggaccagctctcattgaacactgtcttttagaaaatggattctcgggtaatgtcaaagtgg

SEQ ID NO: 814936 - DNA, 100 bp, Homo sapiens
ccttcaacaacttccagatgaagatcgggttgaaaggaggagcaggaggtactgatggacaaggaggtaccttccggtacacctttcatggcgatcctca

SEQ ID NO: 814937 - DNA, 99 bp, Homo sapiens
gagggatgagatgcgagccttggcaggcaaccccaaggccaccccaccccagattgtcaacggggaccagagtagatctgctccggagttggtgctaca

SEQ ID NO: 814938 - DNA, 98 bp, Homo sapiens
aacagaccagagttcctccgatggccaggaaccttttagtacttccggtgtctgctttttcaacgtgggagaaggagttgcacaagatagtttttgat

SEQ ID NO: 814939 - DNA, 100 bp, Homo sapiens
gtcacacatgaagaacacacagcggtggaaaagatgccagaattccagaaaagttcagttcgaatcaagaaccctacaagagtagaagaaattatctgtg

SEQ ID NO: 814940 - DNA, 98 bp, Homo sapiens
gccatgttgcaagttcttctacagccccagttatgtggacgagctgttaaaccagaataactgaagtgaagtgatggactccgatttggagagtagta

SEQ ID NO: 814941 - DNA, 100 bp, Homo sapiens
cacttgagaaaattaatgtggcaggaagctctatgcagaactgtgccaaggcatcgtggacatagccatttccagtgtcttcccacccccagatgtggag

SEQ ID NO: 814942 - DNA, 100 bp, Homo sapiens
tacctgcagaggtgtcacaggcaacagaacttcatgtcctggatgtggcagggaacaggtggttccttaaaaacagttattgctcaagatgaaaacctcc

SEQ ID NO: 814943 - DNA, 100 bp, Homo sapiens
cacgtcagggcagccccaggtcgggcgcgtgccagcagccagaggatgtacagttacccagcacgtgtacctcctcctcctcctattgctcgggctgtag

SEQ ID NO: 814944 - DNA, 99 bp, Homo sapiens
agctggccgccgatattcaccaagcgcttcgctacaaggtcaatgtgacggtggactacattagaccagccagcccagccacagagacagtgcctgcct

SEQ ID NO: 814945 - DNA, 100 bp, Homo sapiens
gtcgccgcgggaccggggccgctggggtctggacgggggtcgccatgtcctgtgcctcctgattgctgagtgttcacctggaccttctgactaccttccc

SEQ ID NO: 814946 - DNA, 100 bp, Homo sapiens
accggtgtaggagaagaaatccgcagaagcttattaaagttaagaggcgtgcaaagactccagaattggaggcatgatgaagactctgctgctgtttgtg

SEQ ID NO: 814947 - DNA, 98 bp, Homo sapiens
aatggtggtcatggagtagaagggagcgatactacagagagaaaaggaacagttccgtaagctctttattggtggcttaagctttgaaaccacagaag

SEQ ID NO: 814948 - DNA, 100 bp, Homo sapiens
aaaccccctcaggtacagacccaggctcttcgagactttgagaaggaagatgatttgaatgggatccacattgtggcctttgcagagaagagtgatccag

SEQ ID NO: 814949 - DNA, 98 bp, Homo sapiens
agaccaggtcaagcccgaccaatacactgaggccctggcccagagggacaacgccgactaccaggaacgcttcaaccccagtgccctgaaggactcgg

SEQ ID NO: 814950 - DNA, 98 bp, Homo sapiens
gtgaagaaaacctcatgaatagcaatcacagagactcggagagcatcactgcatctttacagttcaagtggatgaaaacagaagatacatgcaaaacc

SEQ ID NO: 814951 - DNA, 100 bp, Homo sapiens
atgggaggctcctttcgaggagctttcagtaactcagagaaaggaggagatgttaaagtaacccatcttgcaggacgacattgaagattggtcttctgtt

SEQ ID NO: 814952 - DNA, 100 bp, Homo sapiens
gctcctcgacatttccacacccagacccaaagtttgcaacaatcagtcaggaaagcagatggtggagctgaatatgccacttaccagactaaatcaacca

SEQ ID NO: 814953 - DNA, 100 bp, Homo sapiens
cgacgtgggcaagggcgagatcctggcgagcctgcaggatggcgcggccgagtccccgtacggccacccggcggctcttgaatgtcgtctctcaactagc

SEQ ID NO: 814954 - DNA, 101 bp, Homo sapiens
caatgtttagccaacccaaattaccttaatttgtggtttattgacaatcatttacaatgccgaagagtgctgtagtgagccagcacagtgggtaacacagc

SEQ ID NO: 814955 - DNA, 74 bp, Homo sapiens
cggagcccggctcccgcaccatggaggaggacgacagctacgcttcaaggttactgactttttatgatgtttgg

SEQ ID NO: 814956 - DNA, 100 bp, Homo sapiens
gaactatagagtttgtggacagatttatattggccctctttggattccagtacgatgcatcagaccataccatggcgtggctaggacccaacacagtacc

SEQ ID NO: 814957 - DNA, 98 bp, Homo sapiens
aacaattggaagtggagctactggtagccggtctgggtctccaggaagagttctgaccacaacagccctgtccactgtgagctctggtgttcaaagag

SEQ ID NO: 814958 - DNA, 98 bp, Homo sapiens
aacttttcaagcctgaaggaaaggcagaactgcctgattacaggagctttaacaggaaagccaatggagtcctagaggcgcggcaactcgccatgcgc

SEQ ID NO: 814959 - DNA, 100 bp, Homo sapiens
ctcgccgtcaacgtggtcaccacgctcgtgctcatctcctactgtcccacggccaccgaagagaacctccgttggatggctcctgaggtgttcacgcagt

SEQ ID NO: 814960 - DNA, 99 bp, Homo sapiens
gaagagcctcttgctgacatcacacaggtggactatagtggaggttttgaacctttcagtgttcttcgctttagccagaaatttgtggatcgggtagct

SEQ ID NO: 814961 - DNA, 99 bp, Homo sapiens
gaggctgctcggcttccagctcaatcctgccggttgcgccttcttcctggacatgaccaactgcagccatggcaatgacaggctcaacaccttgctcat

SEQ ID NO: 814962 - DNA, 98 bp, Homo sapiens
atggttcccgtagggttgcctggacagcagctcgtgtctggagtccatagaggccactgtattctattgaagaacatgtctaacagtaacactactca

SEQ ID NO: 814963 - DNA, 98 bp, Homo sapiens
gggtccaggccccggggcacatgatcatctcagctgctggccctaagggcagctggtggaatttttgaagaaaatggaatctcgaggccccctttcgt

SEQ ID NO: 814964 - DNA, 98 bp, Homo sapiens
cggaccctttgctggagagaagagaatgcctgaagacttggatgaaaatatggattacaggttgatgtgggaggttaaccagcttcgtggcatcctca

SEQ ID NO: 814965 - DNA, 143 bp, Homo sapiens
gctgagcgagaagcatccccacttcaaaaatgtgaaggagagaaccaactggaccaacgagcgaacgctggacgatgaaaagttggagaagatgagggatcatgaacgaaaggaagaaacttttaccccaatgcccagccctt

SEQ ID NO: 814966 - DNA, 100 bp, Homo sapiens
agttgaaaatggacgagtaatcgcctgctttgattcattgaaagatttagaagaattctgctttaagttttgcatcaatcatttgacagaagttacacag

SEQ ID NO: 814967 - DNA, 100 bp, Homo sapiens
gatgatttccatactattgattgggtgcgagaaaaatgtaaagacagagaaaggcatagacgggatggaagagtgtagaaagtgtcccaaagttggtgtc

SEQ ID NO: 814968 - DNA, 100 bp, Homo sapiens
actgagcatctgggcgattccatctctgaagcaacaaggggaatggggtcaaaatgagcagaactctaagaaggagctgatgtggaggagcagctgagac

SEQ ID NO: 814969 - DNA, 100 bp, Homo sapiens
ttttcttaacctgggaagtggaaccggatatttaagtacaatggtgggcttaattttagtgttccaagatgtacatgttatgatatttgttgggtttggc

SEQ ID NO: 814970 - DNA, 100 bp, Homo sapiens
taaagaaagagaaacggcaattcggcagctggagactgcttttcaggaagccttggacgctgcaggtgataaacttgtagtagttgacttctcagccacg

SEQ ID NO: 814971 - DNA, 100 bp, Homo sapiens
gaaactgcagcctgacttgggctgccctgatcatcctgctgctccccggaactggatctaccatgaaagacttgtgaatccaggaagagagactgactgg

SEQ ID NO: 814972 - DNA, 100 bp, Homo sapiens
aaggacaaaacgggactggctagttaaacaaagaggctggatatggccgcgtggaaagtgtcaaaattcttcccaagaggggatctgaaggaggagtggc

SEQ ID NO: 814973 - DNA, 98 bp, Homo sapiens
gaaatgagagctgcaccttgactttaagtgagagcacgatgaatacccttatgtttgatcatcggccaaggtcctggcgagaactgcctctgcggcta

SEQ ID NO: 814974 - DNA, 100 bp, Homo sapiens
gcagccgccagcccaaacaggcgtgtcacagagtatgccaagatggaaggaagcctcatacagtgagattaataatccgtcggtattcctctgagaagca

SEQ ID NO: 814975 - DNA, 100 bp, Homo sapiens
aggaagcctggttcagcccagttcacacataccctcttcttgccaccaggtcctctcagggtgcgccatcattgtccgaggtcagcctcgtggtgggcct

SEQ ID NO: 814976 - DNA, 98 bp, Homo sapiens
ggaggaggtcattctgccctttcttgggctgtgttcacgacagatgtgctggtgctgagctgtgatctgataacagacgttgccttacatgaggttgt

SEQ ID NO: 814977 - DNA, 100 bp, Homo sapiens
caatcaagtcttagaaacacagcgagactttttgaatgatacacatttttctacagtggtattgtgagtgatgttcatgtgactgagcgtccagccagag

SEQ ID NO: 814978 - DNA, 99 bp, Homo sapiens
atcaagtggccatacaccaggatccacccgatgaatgtgggaagactgaggtggttagctcaaccaatggagagctgaatgttgatgatcccacgggag

SEQ ID NO: 814979 - DNA, 98 bp, Homo sapiens
ttcggtctcctggggtcggcgccgagtgggaggatggcggaataagactttgaccccgacgcaggcttcagtgattgccgcggatcagaagcctgagc

SEQ ID NO: 814980 - DNA, 51 bp, Homo sapiens
gtggagccttctcagacccacagcgatgcggtttcactatggtgtccaggc

SEQ ID NO: 814981 - DNA, 99 bp, Homo sapiens
tctactttgcacctccggaattcctcttaggggagacaatccagggtctgagggcgaatctcaccagtgccatagaaaccctgtgtggtgtggactcct

SEQ ID NO: 814982 - DNA, 100 bp, Homo sapiens
ggtccccgcgttcacagccccagcgcaggtctaggcgttttacactgagattctccactgccaccctttctactcaagcaaaatcttcgtgaaaagatct

SEQ ID NO: 814983 - DNA, 99 bp, Homo sapiens
tgtcttccccagctctgcagccacatactatccgtttgttcaggaaccaccagtgacagaatataattgaccctgcaatcctgcgcccgggccgcctgg

SEQ ID NO: 814984 - DNA, 98 bp, Homo sapiens
ggcagtcggatagacaataccacaacaacacattttgcagagcatggacaccacgttgctgaaaacatgctttgggactgccactgaatttatctttt

SEQ ID NO: 814985 - DNA, 100 bp, Homo sapiens
ctggacgccactttccggggtgcacagcaagtggggactgcagccttcagatgcccaccggacccgctgcctcgtcctggccctcgcagacattgtgtgg

SEQ ID NO: 814986 - DNA, 98 bp, Homo sapiens
actgggcaagaggccccagcccgtgaaaagtgagggtttggatccagctcgagtcaacgtccctgtcattggtggccatgctgggaagaccatcatcc

SEQ ID NO: 814987 - DNA, 100 bp, Homo sapiens
agatccgctgtggaaacagcagatgaaggaagagtggattcagcaatggagacaagcatgatgtctgtacaaggcggggtttcaccatgttgcccagact

SEQ ID NO: 814988 - DNA, 100 bp, Homo sapiens
atgagaccgggggaggcgacgctaagttgctgatcgtggcgtgtggacgaatgtggaacctcgctctgtggctgtgttcccttggcactccttagtcccc

SEQ ID NO: 814989 - DNA, 100 bp, Homo sapiens
aactagacctttttcttgggttggatgatgtgttcccgcgtctactacatgactatttggagttttcctcgtcttactggatgtcactctcgtccttgcc

SEQ ID NO: 814990 - DNA, 100 bp, Homo sapiens
tgagctctcggattccttatgcagagtggccgacttgcggcgtcttcgacatcttcggaacattgctgcccggaacattgttaatagaaatggccatcag

SEQ ID NO: 814991 - DNA, 98 bp, Homo sapiens
catcctttacgagcacggcctcttgcgctacgccctggatgagatgacaatgcagatcttcgtgaagactctgactggtaagaccatcaccctcgagg

SEQ ID NO: 814992 - DNA, 100 bp, Homo sapiens
atcggaagaaagcagttccaagtgagtgacctgcaggaagaaggcaagaatgccatcaactcaccgatgtcccccgccctggtggatgttcaccctgaag

SEQ ID NO: 814993 - DNA, 100 bp, Homo sapiens
ggaaaacttgctgcggttgctcaagataacgaaggaggcccaacttcattcaataaggagcctgacggatttatcccagacggtagaacaaaaggaagaa

SEQ ID NO: 814994 - DNA, 99 bp, Homo sapiens
tcaagatggcggccaatgtgggatcgatgtttcaatattggaagcgctttgatttacagcagctgcaggctctctatgagaacatgctggtggagctgc

SEQ ID NO: 814995 - DNA, 112 bp, Homo sapiens
gcagtgtctccagaagaagtagaatttgccaagcaagccatgttttcaaggtgctggagaatctggtaaaagcaccattgtgaagcagatgaggatcctgcatgttaatggg

SEQ ID NO: 814996 - DNA, 100 bp, Homo sapiens
gtcctccggaccctgttccaggcctgcaccgacgaggaggcagccgtggtccaaagtgtggccaaggtggaatacgtcaggaagaagccaaaattaaaag

SEQ ID NO: 814997 - DNA, 100 bp, Homo sapiens
gaacctgggactcggcgaatgcggattcgatcattcacatcgggaaaaattgaggaagcagtgaatgcatttaaagaactagtacgcaaataccctcaga

SEQ ID NO: 814998 - DNA, 98 bp, Homo sapiens
ggaagatgaggagcaggagaacagaagcagattggccatcgggactttgatgtggagaagcgacttcggagagacctcaggaggacacatgcactgtt

SEQ ID NO: 814999 - DNA, 98 bp, Homo sapiens
acgctctcgtctggtttgatcacaagacgggcaagtaatctatgccagcaattatgacaatgttagcagaccatgcagctcgtcagctgcttgatttc

SEQ ID NO: 815000 - DNA, 101 bp, Homo sapiens
gcttactgcttcattatggattatacagattgactttgaagatgtgattgcagaaccagaagggacacacagttttgacggcatttggaaggccagcttca

SEQ ID NO: 815001 - DNA, 142 bp, Homo sapiens
ctcaccaagaagctactggacctcgttcagcagtcatgtaactataagcagcttcggaaaggagccaatgagggtatgggcactaggaaaagacttcttccatcaagcttaattgttttgttattcatttaatgactttccc

SEQ ID NO: 815002 - DNA, 101 bp, Homo sapiens
ctgtgcagccgcgaggaggcgcgggaggtgttcgagaacgaccccgagacggttattcagcttctcaaggctggaaaagcgaaggaagtttcctacaatgc

SEQ ID NO: 815003 - DNA, 99 bp, Homo sapiens
aagctgataccagagctatacagctgctattaggcaggtgatgaaacttatcaggacatatttcgtgatttttcccaaatggcatccaataatccagag

SEQ ID NO: 815004 - DNA, 98 bp, Homo sapiens
tgagcaggatatgttagaaaagaggaaaatacagcgtgaattagcaaaaagggctgaacagatccagaatgaagagagtgtggtgctttttctggtcg

SEQ ID NO: 815005 - DNA, 100 bp, Homo sapiens
gaaagaggaggggaggaggaggaggattcagggaataggagctggggagcccttctgcgccacaggcacaggattcccaaagaacagtggtggctcaagc

SEQ ID NO: 815006 - DNA, 99 bp, Homo sapiens
gcagattatatcgcatcctatggctcaaagaaagatgattatatgcaagtgctgctggaccaggcgggctgctgtatcgtgggtcagagtgagcagctg

SEQ ID NO: 815007 - DNA, 98 bp, Homo sapiens
taatacaccagtatttgttggatgccttcttcacacggcccttttataaggctcttctcagaatactacaaggcttttgaagaagcagctgaacactt

SEQ ID NO: 815008 - DNA, 100 bp, Homo sapiens
gtgtccagccacatcatatcacagtatcagttaaggagcttgatttgtttttggcatactacgtgcaggagcaaggtggatattccatctattataacca

SEQ ID NO: 815009 - DNA, 98 bp, Homo sapiens
gcatgggaaggaggccgagccgggatctcaggtcctcgggggcggcggccacgccaaggacgggcaacaccaacattgcttagaagatttggatctca

SEQ ID NO: 815010 - DNA, 99 bp, Homo sapiens
ggaaccatttgaaggaacagcatcctgacatcgaaaacccggacctcgcttacctgcatgctggtgaaagaaaagatgttgtcccggttaagagtagtt

SEQ ID NO: 815011 - DNA, 99 bp, Homo sapiens
tttgggatcacttccaacagtgacgtgttctccaaataccagctcgacaaagatggggttgtcctctttaagaagactggatacacgtctgtttaacta

SEQ ID NO: 815012 - DNA, 98 bp, Homo sapiens
cttcctcttcctcctactcaccatcagcctcctggttatggtacaggttttgggatttgagattgacgcggtgaactctgtccagttttcaaaccaca

SEQ ID NO: 815013 - DNA, 100 bp, Homo sapiens
agcaccagatggacatctaccagaagcggtgcgaggccttcggattgagcttctagagcctcagagatggaattcgccgttttgccgcgatttggcgtta

SEQ ID NO: 815014 - DNA, 137 bp, Homo sapiens
taacacatcatgaaggctagtttggatgtggaggggaatagactccatctatccatatgagtttgtcagaggaatggctgtgaatggatgcctggaaggaccatcctctaattttctcagttgcctgttcattgtgg

SEQ ID NO: 815015 - DNA, 100 bp, Homo sapiens
agacggctcacctgtgcgggatggaacaaaaggagtgagctgttgccgcagaatgggctgctggctcctgccctgcttcctgtgatcgagccggccctga

SEQ ID NO: 815016 - DNA, 100 bp, Homo sapiens
aacagatcgtggatctgaaagtgacaagcattttagaaaggatgtaacagtccctcccaagcctgtctcgctccatcctttatatcagactaaactctat

SEQ ID NO: 815017 - DNA, 100 bp, Homo sapiens
aatctggaggcgctaacagagctggagccgttaattaaggaaaagttgagccagggcgtgaccctcgtcgtggacagatacgcattttctggtgtggcct

SEQ ID NO: 815018 - DNA, 99 bp, Homo sapiens
tatcaacaccagtaacagtgtgtggagatatccatggacaggtatgtgccagtcaaagatctactgggaatttatgagaaactgtatggtcgaaaagtc

SEQ ID NO: 815019 - DNA, 100 bp, Homo sapiens
cagagattcatatgagagttatggtgcagctaaatcaagtccagcagctaaaccaggatccacaccttctcgaccctcatcagccaaaagggcttcttcc

SEQ ID NO: 815020 - DNA, 99 bp, Homo sapiens
gccgggctgtgagcggcgtatgcaaatcgagggtctcggggatgcggatccaagaccctgggaaggctgctgagaactagccctagacctctgcgtgag

SEQ ID NO: 815021 - DNA, 100 bp, Homo sapiens
tgaacagtcacgagtgccttctgcatttgcagctatttactctaaaggaggtattccttgcagtggtagaagatgatgaagatgactttcctacaacgcg

SEQ ID NO: 815022 - DNA, 100 bp, Homo sapiens
cacgggtgcagacagcaatggtgagatgagtcccgcagagctgctgcacttccagcagcaacaggtgcaatggatgagcttcatagtctggatccaagaa

SEQ ID NO: 815023 - DNA, 100 bp, Homo sapiens
cgcggatttttggcctcatactctgttatagataaacaaggaacatggaggagacatatttccacctatttctctccataagtataaaagaccataaaag

SEQ ID NO: 815024 - DNA, 100 bp, Homo sapiens
ctgaaactcttggagatgttcacgacttccttctgagactcttcttggaccgagacctcatgacacttcctattcagaactcctgggcaacgtgctggtc

SEQ ID NO: 815025 - DNA, 100 bp, Homo sapiens
caaagagcagtgggggttgctgacccagaggagagttctccaaacatgatcgtttactgcaaaggatagctgggagtatggccaccctgctccacgatgc

SEQ ID NO: 815026 - DNA, 100 bp, Homo sapiens
ttcatgatgctgatgtcaactcccagtctgcaacaggaggcagttcccatgttatacgcagcagatacttacggagcattgtaatgaagtgtggttctgt

SEQ ID NO: 815027 - DNA, 100 bp, Homo sapiens
ctggccagcctcctgggcgcgggtcatcatcagatttgaaatatttaaagtggatacaaaactatttcagcaatgcagacaattaagtgtgttgttgtgg

SEQ ID NO: 815028 - DNA, 100 bp, Homo sapiens
atggaacccccgtcaacagtggagataaggcaagatgggagccaacgtctgtcagaagcccagtggtatcctgatccaaactactggatacaggtgcatc

SEQ ID NO: 815029 - DNA, 99 bp, Homo sapiens
tccgcttcgaccttcccccacaagatggccatgctgctgaaacttcaagaagctgccaactacattgagtctccagatcgagaaaccatcctggacccc

SEQ ID NO: 815030 - DNA, 100 bp, Homo sapiens
atgctcaagagtgagctgcggaagcaaaaggcagactttttgatattcagagccttggaagtcaacactgtcaggacgctcacctacctcatgaattacg

SEQ ID NO: 815031 - DNA, 100 bp, Homo sapiens
ctaccatggtatgacactgaaatctgtaacggttgtaaagctctctgaaatagtgaccttagcgaagcaagcacatgtggatgtgaaatttcagttgcca

SEQ ID NO: 815032 - DNA, 100 bp, Homo sapiens
agaagggactcaatgacacaatgagaccatgctcgacagctgaccaaggccatgatgcgaaaggccacggccagccgcctggtcacgcagcgcgatgcgg

SEQ ID NO: 815033 - DNA, 101 bp, Homo sapiens
taaaccaccgcttacagatattggcatatgagctatttgcattcatcagtcacatgggaacatccacaatgagtggtcattacatttgccatatcaaaaag

SEQ ID NO: 815034 - DNA, 100 bp, Homo sapiens
gcaaaggggggcgtcaatgacaatttccaggtgccttggaacactatgttaattgcctggatctggtaaacaagaggctaccttatggccttgctcagat

SEQ ID NO: 815035 - DNA, 98 bp, Homo sapiens
gaaacagttcctggaaactgccattaacctccagctttttaagcagccctcctctgatgcacaggataagcagtttggtacttggagactgagagtca

SEQ ID NO: 815036 - DNA, 100 bp, Homo sapiens
cctcggggcggcggactggctcgcggtgcagtggaggcaatgttcactgcaatgtgcgaatgccaggccttgcatccagatcctgaggatgaggattcag

SEQ ID NO: 815037 - DNA, 100 bp, Homo sapiens
tgctggtcttaccacttatcatctccagtcttgtcacaggactcagcccaaaaccatgtttgcccaagttgaatctgatgatgaggaagcaaagaatgag

SEQ ID NO: 815038 - DNA, 98 bp, Homo sapiens
aggctgcgtcactgagattgacactcagcactttgcgccaccttactctaaccagtgaactggactatcacgacgctgtgaatgtcaatgatcggtgc

SEQ ID NO: 815039 - DNA, 99 bp, Homo sapiens
gtcgcttgaaaagactgggcttgtccttgctggtgcatgcgtcgtcggcctctgggcagcagtgaatttaggaggacttttactccaagcactcctgga

SEQ ID NO: 815040 - DNA, 98 bp, Homo sapiens
gacttgtcgcacggatgcagaaaacttaatggaggaggctgaggaagtgagctcacaatgactcaagctgccacatagtgttgattgtgaaatgccag

SEQ ID NO: 815041 - DNA, 98 bp, Homo sapiens
tttctggagtctgggtcttccgaggccaggagcttgcctttccgaacacaccacagccatcagcactggaatgcaaagaccagaacaaacagaaggaa

SEQ ID NO: 815042 - DNA, 98 bp, Homo sapiens
cctccccctgagcctgagcgccctaaggaggtcgagtttgatgcttccaagatcaagacagacaagacgatgactgagttggagatagacatgaacca

SEQ ID NO: 815043 - DNA, 100 bp, Homo sapiens
ggaaaacttcgtggacattgttgatgccaagctgccccagagcacatcagctatgtgccccagctctcaaacgacaccctggcggggaggctcaccctgt

SEQ ID NO: 815044 - DNA, 100 bp, Homo sapiens
actttgtggggaaaaaaaggagcttgccttctgagctttgtaccaaagacctgggaaaagctcctggatttggatttggaattgcaatatctggtggacg

SEQ ID NO: 815045 - DNA, 126 bp, Homo sapiens
acagcgtagtcagcttcaaggagcaatgcagcagtttaaccagagattcatttatggggaatcctgtatggcacgatgaccctggagctgggtgggaaggtcaccatcgagtgtgcgaagaacaac

SEQ ID NO: 815046 - DNA, 100 bp, Homo sapiens
gccgttcctggctttgtagctcgctcaagatggcggcgcagccaccccgcgggatacgcctcagcgcgcttgctcacttccgacagagaaaaacaaaagg

SEQ ID NO: 815047 - DNA, 98 bp, Homo sapiens
gaatcaaacatttgaattctttctagaagtttccccctttctagggtgaggatggttctacacagccacccggagttccttagttgaaaggtgcgccc

SEQ ID NO: 815048 - DNA, 100 bp, Homo sapiens
gcggagtcggcgccgagaacatgggtgggattaaaaactcagcctgaatcaaaatgccctgagctgcttgccaattactgtgacatgttgctaagaaaaa

SEQ ID NO: 815049 - DNA, 100 bp, Homo sapiens
tcaccgtggaggtcgttggtgtgggagatacctgctcctttgctcagatggatgttcgccagcatggtcatccccagttatggctgcagcttcgattgcc

SEQ ID NO: 815050 - DNA, 100 bp, Homo sapiens
aatgaattcagtggaaccatcacacaaaagcacacaaagacctcctcctccacaggggagacagaggtgaccaagaatatggcccaggtgaccaaagccc

SEQ ID NO: 815051 - DNA, 99 bp, Homo sapiens
ccatggcggacaacgagaaactggacaaccaacggctcaagaatttcaagaacaaaggccgcgacttggagactgcagagtgggatgaacttgcagata

SEQ ID NO: 815052 - DNA, 133 bp, Homo sapiens
cggccctgagcgcactctggagggattctggcatcagggaggctttcagccggagaagcgagtttcagctgggttctctataaaggtgtcttaaaaaggttgattttgttatatgagcctttgtttggattgc

SEQ ID NO: 815053 - DNA, 100 bp, Homo sapiens
ggccaagcaccacatctccattgctgagatctatgagacagagttggtggacatcgagaaggccaagtggaggtgactggtgatgaatacaatgtggaaa

SEQ ID NO: 815054 - DNA, 98 bp, Homo sapiens
tgtgtctcttctaagctgaataaagctgttttggaactgtcaggtacctcaaagccacacacatgccctcttggttctgtttctttgaagaaccccag

SEQ ID NO: 815055 - DNA, 100 bp, Homo sapiens
ccttcaaaacccaccccttctttaggcctaccccttgctcaggttcaagaagacagtgaagaggctcattccgcatcttctttctttgcagaaatttctc

SEQ ID NO: 815056 - DNA, 98 bp, Homo sapiens
caaaatatcggagaataatttctttctcgctgatcgcctaacttctactgacgaagcttggaagttgcagaagagctacattcatgggagcagccagg

SEQ ID NO: 815057 - DNA, 100 bp, Homo sapiens
ctgatctccatgtcctgttgtggggcttttacagcctttgggctgaagccgacgtagcttctctgaacagacgcatccagctggttgaggaagagttgga

SEQ ID NO: 815058 - DNA, 100 bp, Homo sapiens
ggctgagcctggagctgtggaagctgtgcacctccctcactttgtggctctccaagcatcaccctcattgttctgtcatctgaggtgggcatctctgagc

SEQ ID NO: 815059 - DNA, 98 bp, Homo sapiens
gctcttcccggcgctctcctggctcccttctgccccagctccgtctcggcggcggcgggcaatgaatcgctccctggctaatgtgattcttggaggct

SEQ ID NO: 815060 - DNA, 98 bp, Homo sapiens
agatcctgaagatgtcatcagaaatgcctttgcttgctttgatgaagaagcaactgatggatacacaactgatgacattgagttttactggcgtggcg

SEQ ID NO: 815061 - DNA, 100 bp, Homo sapiens
ttccaccgaaagaagaatcttcagattggagctggagtgagccttccaggaattttggctgccaaatgtggtgcagaagtaatactgtcagacagctcag

SEQ ID NO: 815062 - DNA, 100 bp, Homo sapiens
tgttcgcttcaatgtggccaaatctctacaaaagattggaccaattctagataccaagtcaataactgggagatggacaaactagagatggaagatgcag

SEQ ID NO: 815063 - DNA, 100 bp, Homo sapiens
ccagcaccccagatgggtgagagatgtgatcactggtttcgtggcctgaccaaggacctccaaggtactccaaagattcaggtttactcacgtcatccag

SEQ ID NO: 815064 - DNA, 100 bp, Homo sapiens
gaactggaggagcgatttgccatcgtgctggctcacgggatccagtgttcctgacctcattgtgagcatgagcaaccagatgtggctacatctgcagtcg

SEQ ID NO: 815065 - DNA, 143 bp, Homo sapiens
ggaatgtaagaccccgactcttcctggtgaagcatctgatgcacgttccatccggcgctcagctgggcttgagtgcaaacggttagagcaggagcttcatcatgtgaaagagcagaaccagacttcagcaaacaacatgagac

SEQ ID NO: 815066 - DNA, 100 bp, Homo sapiens
tgggtcagctcctgtgatggcagtcgttcggctccttgctgaaataaggacaaggtgtatgtggaatttgatgatcttgaatgggataaacgagagtggg

SEQ ID NO: 815067 - DNA, 98 bp, Homo sapiens
aaaattaagcagatgctccagtttgagaaacctggatctgcgatctgtttgtgatatgtgcagcgggggctacagcgagtggggctagatccccagct

SEQ ID NO: 815068 - DNA, 101 bp, Homo sapiens
tacaagctgaaccacttattcaagacaatcctgaatgccttaagatggtgataaggaaacagtgcttcttagtcctacgtcagcagcagtttaatgtccag

SEQ ID NO: 815069 - DNA, 100 bp, Homo sapiens
cctgtccggagacagcctaagggtagttacttttggtgacgctgtccagttcccacaatgtatcattccttatctgaaactagacatcctctgcagccag

SEQ ID NO: 815070 - DNA, 101 bp, Homo sapiens
caaaatcacagctttgagtgagaaacagatgggacctgcaaaggataaactggtcattggacggatctttcatattgtggagaatgatctgtacatagatt

SEQ ID NO: 815071 - DNA, 100 bp, Homo sapiens
tcgggggcgactcaggcctgtccagccggggcaagaaggctccaccgaggacaccgcgtccagcttgtgtggcgaggaggacacagaggacgaggagctg

SEQ ID NO: 815072 - DNA, 100 bp, Homo sapiens
cccagccatgcttcctgtacagcctgcaaaactgctcggggaccagttctacaaggaagccattgagcactgccggagttacaactcacggctgtgtgca

SEQ ID NO: 815073 - DNA, 140 bp, Homo sapiens
ccaagagaacaatgaggatgctgctcatgttttagcggaactggaggtaacgatgcaccatgctctcttacagaatcaaatatggctgagaagcaagcaccagctgaagaccaagtggctgcgacccccctggaaccccc

SEQ ID NO: 815074 - DNA, 100 bp, Homo sapiens
ccctcagtgacccggtgcagctagaagtccatatcggctcctggcgacctccctgctgcagggggccctcccagcggggccatgcccttctacaaccctg

SEQ ID NO: 815075 - DNA, 99 bp, Homo sapiens
gagactgcatggggagcttctcactctgatgccagtatggactggagatgatgggagccagttggatagccccatggaaatccccaaagagctctggat

SEQ ID NO: 815076 - DNA, 100 bp, Homo sapiens
accaacaacaccacaataatccacagccaagaaccgcatgcacgagtctctcatgctcttcgactccatctgtaacaacaagttcttcatcgatacctcc

SEQ ID NO: 815077 - DNA, 98 bp, Homo sapiens
agttatcctgtttgctcacaatgatctcgttgacaaggtccagcctggggacagagtgaatgttacagcaaaccagtccagctacgggggcccagcca

SEQ ID NO: 815078 - DNA, 98 bp, Homo sapiens
gaactcgtcatgctctttgtagcgtggtgcttctgttgctcacagaacccttaggagaaatcttgagagtggacagcaattgtgaagatcgccagaga

SEQ ID NO: 815079 - DNA, 100 bp, Homo sapiens
caggagggtcgtggtctggctgtggcggaggagcataagaaggtcgagtttgagtggctgaggcagttttggtttcaaggcaatcgatacagaaagtgca

SEQ ID NO: 815080 - DNA, 99 bp, Homo sapiens
aacctttaagcagcagaggagcacgaggatcgtgggagctaagaaaactggggagtctcaccacggctaatttgatggagaaggttcgaggcctacaga

SEQ ID NO: 815081 - DNA, 100 bp, Homo sapiens
ctctacggcatctggagcaactgtgaagctgtggtctaccaatctagacaactcagtggcaagcattgaggcaaaggctaatgtgtgctgtgttaaattc

SEQ ID NO: 815082 - DNA, 98 bp, Homo sapiens
caggtagacatggaggccgtcggggagacgctgtggtgtgactggggcaggaccatcagagtggccaaatcaatgaaggtccctgtatatgagacccc

SEQ ID NO: 815083 - DNA, 99 bp, Homo sapiens
attcagccagcacactcctcgcgagcaaggcatctaataggattcaggaatcaaagaatcagtgtactcaggtggtacaggaaagagagagccttctgg

SEQ ID NO: 815084 - DNA, 98 bp, Homo sapiens
cccagaagcaaaagagacccacagatttggatgtagatacgttagccagtttacttagtttctgcggcactgaaacaaggccaaattacaccaacaga

SEQ ID NO: 815085 - DNA, 136 bp, Homo sapiens
gtgtatcgtgcctttctccagtacctctacacagacacagtcgacctgccgccagaagatgctatagggacccgagctgatccagaaagccaacggtctccacggcttcatgaattggcctcataatctgctaacg

SEQ ID NO: 815086 - DNA, 101 bp, Homo sapiens
catccccgccctgtgggagaagcacagtccacaggctgagcacagggttgctccaggtgggcccaaatgctgaagagcctcatgttagagtttttcacctc

SEQ ID NO: 815087 - DNA, 100 bp, Homo sapiens
gacgccggcgccgagggacaccgcagtatgaggcagagctgccaaggggccaagggatgagctggggccctccttcccaatggcatctccccctggtctg

SEQ ID NO: 815088 - DNA, 100 bp, Homo sapiens
cgatgtattggagaaggccaatttggagatgtacatcaaggcatttatatgagtccaaagctgaacatggttatgcctccatgttaccatacaataacaa

SEQ ID NO: 815089 - DNA, 100 bp, Homo sapiens
actgttgaaaaaatttccagtgagatttgatggtagagtggtggcaaagcttccttttacccctctttcttacatccaaggactgtctcatcgaaatctg

SEQ ID NO: 815090 - DNA, 99 bp, Homo sapiens
ggtgacgggttaagattcggagagagaggtgctagtggctggacttgacctggaaagctgtgaaaattaagaagccaatcaagacgaagttcagaatgc

SEQ ID NO: 815091 - DNA, 98 bp, Homo sapiens
agggaaggagctgaggaatgactggactgtgcaggcaaatgttctgaaaaagactctgcatgggaatggcctgccttacgatgacagaaatggaggga

SEQ ID NO: 815092 - DNA, 100 bp, Homo sapiens
cagcagcacaacacagggaagcttggggagacagagtttcactcctgttacccaggctggaggacaatgatgtgatctcgggtcaccacaacctccgcct

SEQ ID NO: 815093 - DNA, 100 bp, Homo sapiens
gaaagcctgtctgaagtgcagtctctgagctccttccagtccgaatcgtgcgatgacaatgtcaccaggagactaaagtccatcaaaaacatccagaaaa

SEQ ID NO: 815094 - DNA, 100 bp, Homo sapiens
cgagtactcttatgcagtccccatggttcgagaaatggctgctactaccttaagcggtctgctacagtgtaactttcttaccatggacagtcctatgcag

SEQ ID NO: 815095 - DNA, 98 bp, Homo sapiens
tgtcaccatccaggaactcacagctcgtattaaccgttggcttattagctgttgttgtatacctatacactgtggtggcattcaattttttccgaaaa

SEQ ID NO: 815096 - DNA, 98 bp, Homo sapiens
ttccaagcctgtatcaactctggtatggacacagcttctagtgttgctttggatcttgtggaaagtcagacatcagacaacagtcagcgctttcgaga

SEQ ID NO: 815097 - DNA, 98 bp, Homo sapiens
gagggacacgctggtgcatctgtttgccggagggtccccagtctatgtgaggatctcctgtcttctgttgaccagccactgaaaattgccagagacaa

SEQ ID NO: 815098 - DNA, 98 bp, Homo sapiens
aacgggcgggtgctggagctgttccgggccgcgcagctgccgaacgacgtggtcctacagagacttgcagccaatacaggaagcaaacagcgtagtcg

SEQ ID NO: 815099 - DNA, 99 bp, Homo sapiens
aaatcggaagtgaattcggattgtttgctgggtctgaaaagccctcaagaaagcctcagtgatcttggtgccatagagagtctccgggtccctggaaag

SEQ ID NO: 815100 - DNA, 98 bp, Homo sapiens
agttccggaggaaagtgacaaaggaccgggacctgttggttgtcgcccatgatctgatccggaagatgtcacctagtgtgccctggaggatgaaacgt

SEQ ID NO: 815101 - DNA, 99 bp, Homo sapiens
aggaatggttccccaaataagttcagatcttcttcaagccatatgaaatggaggcaatttgtttatcagtctgagtctccagaactcctgaattttttg

SEQ ID NO: 815102 - DNA, 98 bp, Homo sapiens
agtgaatgtctctagtcgtatggacagcacgggggtccccgaccgaatccagtcggtggtggggagcggcagctggcagagagtcaacgcccagacgg

SEQ ID NO: 815103 - DNA, 100 bp, Homo sapiens
tgtccttcagcccatccttattgaagatcttctgccaacctgaaatcctgcaggactcccgactcatcaccctgtacctcacgatgcttgtcaccttcac

SEQ ID NO: 815104 - DNA, 100 bp, Homo sapiens
aactttgcacccatcatcaaccatgtggccaggtttgcagcccaggctgcacatcaggggactgcctcgcctggatctaaaaaatcagcaaatggatcag

SEQ ID NO: 815105 - DNA, 98 bp, Homo sapiens
ctaacggcttgacttccgataactcagatggacaagaaaatgcatccgatgcagatttatggctcctgaacagttgcactgtaaaaaacccagctgaa

SEQ ID NO: 815106 - DNA, 98 bp, Homo sapiens
tgtggggggattctcgacctgctaacagaactggaccttttcggttcgagaaatggctgctactaccttaagcggtctgctacagtgtaactttctta

SEQ ID NO: 815107 - DNA, 98 bp, Homo sapiens
ctggccctactgcaatctactgcactcgaggggatcccaacaagccctcaggattcagaagtgttaaagctcctgtcactaaagtggctgcgtcgatt

SEQ ID NO: 815108 - DNA, 98 bp, Homo sapiens
gaccactgcctgtgtctcgtcttgtatctctaattggaagcaacagccgcgaggagagtgtcctaggcagcgtcctgctccccagctacaatattaga

SEQ ID NO: 815109 - DNA, 98 bp, Homo sapiens
aagggttgtatcgaggctataaaagcacagttttaagagaggacttgtcagtcacatctgtaacctgctcactgaaactgccacactgtgcttggatg

SEQ ID NO: 815110 - DNA, 100 bp, Homo sapiens
aagcagatcgagaaaaatcacgggctgtccaggaactgtcggaacagaaccaaaggctattggatcagctcagcaggctgttaggcaattttcttcagtg

SEQ ID NO: 815111 - DNA, 100 bp, Homo sapiens
catgcagattatatcgcatcctatggctcaaagaaagatgattataaccttctgaggaaaggaggccatacagaaattgaacctcagcacttctgtcaag

SEQ ID NO: 815112 - DNA, 100 bp, Homo sapiens
cctgaggtcatcgcctgtgatgagaacccagatgccacctatgattacagatttgaaggaagaaagtactgtgaacatgactttcagatgctctttgccc

SEQ ID NO: 815113 - DNA, 100 bp, Homo sapiens
tgatccggttcttggtgcccctgggcatcaccaacatagccatcgacttcggggagcagcattcaacagaaggtgtcaaattgacagctctcaatgacag

SEQ ID NO: 815114 - DNA, 100 bp, Homo sapiens
caactcagccttcctgcataccctggaccagcagaaacctagagtgttattacaagaactgtgtacagtatttaatgtagatttaccatgccgtgtgaag

SEQ ID NO: 815115 - DNA, 100 bp, Homo sapiens
gactgcatcatcacagcccttagaagtggggtgaccaaggctttccagatgaacccaaggaaagtgaaaaagctgatgctaataaccagacaacagaacc

SEQ ID NO: 815116 - DNA, 98 bp, Homo sapiens
tgtagacagccacaaatgggaagcaagagaaaaagaacattactgtcttgtttgcctgagaatacagatcaacccacagaacaaagcggatttccaag

SEQ ID NO: 815117 - DNA, 98 bp, Homo sapiens
ttcaatattggaagcgctttgatttacagcagctgcagaggctgtgatcaatagccaggaatggactttgagccgctccattcctgaactgcgcctgg

SEQ ID NO: 815118 - DNA, 100 bp, Homo sapiens
ttatgttgctgatggagctaaggctgcaattctgggttttacatcaccggtctgggcatctcagagaaagatgtcacatctgctaaagcactgtatgaac

SEQ ID NO: 815119 - DNA, 98 bp, Homo sapiens
cggaaagtccgtgacttgcaagaggcagatctggaccttttgagagacatctgaagagctgccatgtctggggcatcttcctcagaacagaacaacaa

SEQ ID NO: 815120 - DNA, 100 bp, Homo sapiens
ctatcttgttgcttgtggcccagatgactgctctgagctttggctttggaatgtacaagttgcaaataaaaatgtggctaaagtaccacctcctgttcct

SEQ ID NO: 815121 - DNA, 100 bp, Homo sapiens
cgaaaagcccaacagatacttttggcacgattaatttccaagatggagagcacacccatcatgccaagatatagtggaaatgctatttactcaaccaaat

SEQ ID NO: 815122 - DNA, 98 bp, Homo sapiens
cggtcgggctggaacctgtactggcagccggaggtgtaggtaggaaccggaatacctcggaagccgggaaatgagctgtaggtaaaacttgcctactg

SEQ ID NO: 815123 - DNA, 100 bp, Homo sapiens
gcttaatcatcattcacttccatcggatcaactggaaatcaagtcagatacctctaacctatttggaaacagtggggccaagacatttggtggatttgcc

SEQ ID NO: 815124 - DNA, 98 bp, Homo sapiens
aacagcccagctcgcgcttcagcgtcccggcgccgtcgcgccactcctccgaattctgctctctttgctgaactcggttatttcacagacactgatga

SEQ ID NO: 815125 - DNA, 99 bp, Homo sapiens
ggagatccgtgatgtaacaaggattgagcgaatcgtatttgagaacacagtggctacggtgatggctctgcgcagggagaagatgttcgtggaagaggt

SEQ ID NO: 815126 - DNA, 98 bp, Homo sapiens
atatcagatcctagatggtattcactacctgcatgctaactgggtgttgcacagagatttggaagtttcagctgatcctactgccacactcacagcag

SEQ ID NO: 815127 - DNA, 100 bp, Homo sapiens
ttggagtccagcactctgcatgtgactccccgcagcctggacaggaaaacggacgatgtattactaagctggaaaacatggggtttcgagtgggacaagg

SEQ ID NO: 815128 - DNA, 99 bp, Homo sapiens
agcttccaacctggccacctgaattcaaacccctggaaatcttacaaaaaccaggagagactgtctttgtaccaggagaagttaaggctgcaaggccaa

SEQ ID NO: 815129 - DNA, 100 bp, Homo sapiens
gctaacattgctcacggcaactcttcagtgttggctgataaaattgccctgaaactggttggtgaagaaggatttgtagttggacagagagactctgaag

SEQ ID NO: 815130 - DNA, 100 bp, Homo sapiens
caggtatctgcccaaactggaacttatgctgtagacatttctttgtggtttatctaaaaaccaaaggctgtggaaaatctctgttctcacaaagtctccc

SEQ ID NO: 815131 - DNA, 100 bp, Homo sapiens
agaaaattcacaataagctggaatttcctcagattatttatatggacagtcactcagcctctgaagaagcttcgggttcagactcaggcagtcagtcgga

SEQ ID NO: 815132 - DNA, 98 bp, Homo sapiens
cttctcctcccctcacgctcgcagaaaagtgctggctggagtcgtcatgacaacagaccttcactgcctggtgtaactcccacctaaggaaagccggc

SEQ ID NO: 815133 - DNA, 100 bp, Homo sapiens
ggagcgggtccgtcgcggagccggagggcgggaggaacatgacatcgcggagattccagggtctgagagagagccaagatgaatatggccttccaagaag

SEQ ID NO: 815134 - DNA, 100 bp, Homo sapiens
ctttggtagatcaaagatattcatccgaaacccaagaacagtttttcagaaacgcatggcagagtcaggctttctcactgaaggggagatggccctgatt

SEQ ID NO: 815135 - DNA, 98 bp, Homo sapiens
ctccttggcctctcctgggatcggcccaaggccagttctccgcagaactgttcgtcagttggcacaggagcagttctttttaatgtgcaccagatgtt

SEQ ID NO: 815136 - DNA, 100 bp, Homo sapiens
gtttgaccgagacataaactgcagaagagcagcctctgtcctggctataagtcaccatggcacagcaagctgccgataagtatctctatgtggataaaaa

SEQ ID NO: 815137 - DNA, 120 bp, Homo sapiens
gagccacccactccccgtggcaaggacccgctcatgtacttcattgagaagattatgtttgagaccttcaacaccccggccatgtacgtggccatccaggccgtgctgtccctctacgcc

SEQ ID NO: 815138 - DNA, 100 bp, Homo sapiens
gtcgcggcgacctccggcggcgggaggcccggcctgggcaggtgcaccctgacattggcatctctgccaaggccatgagcatcatgaactcgtttgtaaa

SEQ ID NO: 815139 - DNA, 100 bp, Homo sapiens
cagatgcccctgccggagatccctcagccctggctgagacacttgtcgcccgaggagttccaggaagtgtttgggatgagcatcgaggagtttgaccgcc

SEQ ID NO: 815140 - DNA, 100 bp, Homo sapiens
aactggtagccacagagtacttattcattcatttcccagatcatcatgaaggacacttaactatgattactgtgaatgcttccttgtttcctagttctgt

SEQ ID NO: 815141 - DNA, 98 bp, Homo sapiens
aactcctggcctcaagtgatcctctcgtctcagcctctcaaactgctgggattacaggttttgcagcatttggacaaacaaagccagtagtaacccct

SEQ ID NO: 815142 - DNA, 100 bp, Homo sapiens
agagtttgcgctacgctgagtacttgcagccctcggccaaacggccagacgccgacgtcgaccagcagagactgaccaccatcatggcagtggagtttga

SEQ ID NO: 815143 - DNA, 100 bp, Homo sapiens
tgttggctgagctgttactaggacaaccaatatttccaggggatagtggtgtggatcagttggtagaaataatcaagaacggggaagataaccgaagggt

SEQ ID NO: 815144 - DNA, 100 bp, Homo sapiens
gagagagaagctgaaagctgccgactgcgacctgcagatcaccaatgcgcagacgaaagaagacttggcttcaaccaactcaggacatagcgattgctca

SEQ ID NO: 815145 - DNA, 100 bp, Homo sapiens
ctgaaacggtgcacgtactacgagacgtgtgctacatacgggctgaatgtggagagggtcttccaggacggtatggcatttcaaatatagatacaaccat

SEQ ID NO: 815146 - DNA, 100 bp, Homo sapiens
aaacaagccaatcccaggaggaaaaacggtgaggaagatcttctcagtcctccccaggacacaagcacagggttagaggaggtgatggagcaactcaaca

SEQ ID NO: 815147 - DNA, 100 bp, Homo sapiens
ataggagaaggatgtggactgcagtgctgcagtgccaggactgatggacgccgctggtcgttggcttctctcccttcctctggctatgggacaaacacac

SEQ ID NO: 815148 - DNA, 100 bp, Homo sapiens
gaaggaagaggatgaggaggaagaagaggagggtgtggagtggggctacgaggaaggttggaggaggtgacgttaaaggattttaaagcagctattgatc

SEQ ID NO: 815149 - DNA, 121 bp, Homo sapiens
gtttatgagcaggtgcttcggagtgcttatgccaagaggaacagcagtgtaaatgactcaggacacagcattgttggttttgccatgtactattttacctatgacccgtggattggcaagt

SEQ ID NO: 815150 - DNA, 118 bp, Homo sapiens
atgtttaaaagttcccgaagcaaattcttcttggatggacacagttataagacagggccttggacaagttgttactgactatgttcatggggatgccttgcagaaagctgccaaggca

SEQ ID NO: 815151 - DNA, 100 bp, Homo sapiens
cgagatgcggttttcctcgcagaacgcctttatgcagaaggtgacttcatggtcatgacgattttcttcaatgtgagcaggcggtttggctatgttgcct

SEQ ID NO: 815152 - DNA, 100 bp, Homo sapiens
ggacaggataaactgttacgcatatatgacttgaacaaacctgaagcagttggattggatgctgctggcaagacaaccattctgtataaactgaagttag

SEQ ID NO: 815153 - DNA, 98 bp, Homo sapiens
tgagtcaaagaagatgcctcgaactaaacaaattcatcccagaaatctaagagcatacatctgtggatggatatactgaaccacacatccagcctacc

SEQ ID NO: 815154 - DNA, 113 bp, Homo sapiens
ggccgatatggaacccaagcagtggcgaagggaatcgcaaggctcttccctgaccattttctactgtccctgcgcgagagttgtggaaagtaaaaatgtagccctaccaaaag

SEQ ID NO: 815155 - DNA, 98 bp, Homo sapiens
ctacctgtacgtcatgtctgagagacaggttgcagtgagagcagatgctggcaagaagcacttaccagacaagcaggatcacaaggcctccctggact

SEQ ID NO: 815156 - DNA, 100 bp, Homo sapiens
ccacacgactgggtatatttcctctctggcttcaacggaccacaccaaaatgccatctcaaatggaacacgccatggaaaccatgatgtttacatttcac

SEQ ID NO: 815157 - DNA, 98 bp, Homo sapiens
acatcagttgaaacatagggaactctttttgtcacgccagtatgaatctctgcccgcaacacatatcaggcaaccagataaactggtggtagtttgga

SEQ ID NO: 815158 - DNA, 100 bp, Homo sapiens
acggcgagcgcgagcggcgcgagaaagagaacgtatttaccgggcagtcaaagatctattcctacatgagcccgaacaaatgctctggaatgcgtttccc

SEQ ID NO: 815159 - DNA, 98 bp, Homo sapiens
ttctctatggagcttcagtagcaaataaggacatcatctgctataacctacaagcagttggacagataaaccgagaaaactggtgtacaatagagcca

SEQ ID NO: 815160 - DNA, 137 bp, Homo sapiens
ccatctttggatatagaggtcgatggtggagtaggtcctgacactgtccataaatgtgcagagggaacgtgtgaaagaagaattgtggggaaaaaaaagcaagcataaccaaagatcatcagcagtgaagaatctag

SEQ ID NO: 815161 - DNA, 100 bp, Homo sapiens
taatgttttcagggagaaaagcatgcagaacagatatgtacaaagtgaataaaggttctcttcagtttgaagacaaatgggattttatgcgcccgattgt

SEQ ID NO: 815162 - DNA, 98 bp, Homo sapiens
caggcccggcgccgccactgccgcagccaggagatggttcgggcctagcggagccgggactggagaaatcgagctatagcagattatcttcgttcaaa

SEQ ID NO: 815163 - DNA, 100 bp, Homo sapiens
agttccgccctaccttccctgcctccaggcctcatccattctctttaggcccactgtcatcccctgttttcctccagggctccaagcgccgccagctctt

SEQ ID NO: 815164 - DNA, 100 bp, Homo sapiens
gagagaatgagccagagggacacgctggtgcatctgtttgccggaggtgaggagctggtttcacctgaggacctgctggagtggctgcggcctttctgtg

SEQ ID NO: 815165 - DNA, 98 bp, Homo sapiens
aagaaagtacggaccataataatcaggagtgaagtcccagggatattctgtgctggatgttgcttcagagtgtgaagtcaaatgcatgccaacattcc

SEQ ID NO: 815166 - DNA, 98 bp, Homo sapiens
gacccccctacccacgctgaacgagagggacacggagcagattatgtttgagaccttcaacaccccggccatgtacgtggccatccaggccgtgctgt

SEQ ID NO: 815167 - DNA, 100 bp, Homo sapiens
aaagtacaattctattgcacatcaatgatatcatcccaggagtcagaaataccatcagaggaggggtactgtgactttaatagtaggccaaatgagaact

SEQ ID NO: 815168 - DNA, 100 bp, Homo sapiens
attctcttgaccatgtgacatctgatgctgtggaacttgcaaatcgaaggttcttccaggttggaaagagaatatgctggagagctgtctcccacgtgca

SEQ ID NO: 815169 - DNA, 98 bp, Homo sapiens
tgtcagaggtgggcggctttgaccgagaggctgctggagctcgtgtttggacgcgtatatgtctcgagtccacggtatgcaccctaaagagaccaccc

SEQ ID NO: 815170 - DNA, 99 bp, Homo sapiens
gtgaattgatccgggagttgaagagggctgcaaggtgggaagtgaagtcagtgcctcagttgctggggtgttccagtgcggccccgcttcggtcattgg

SEQ ID NO: 815171 - DNA, 100 bp, Homo sapiens
cagatatcgaggtggatggaaagcaggagctacagggagctggccgactgcacctggcacatggcggagaagctgggctgcttctggcccaatgcagagg

SEQ ID NO: 815172 - DNA, 99 bp, Homo sapiens
tggccgctgtgtggttgcaacggagataaattcccggaaccgcgattcggcgtgtcagattctggacaatcaggaagtccaagccacaatgatcctgcc

SEQ ID NO: 815173 - DNA, 100 bp, Homo sapiens
tccctgtacgccgagggctccgtcaatggcttcatcagcactttggggcaccgtctgcgtcctgctgtccttccccttcatcttcagcccctgcctgggc

SEQ ID NO: 815174 - DNA, 99 bp, Homo sapiens
ggagaacatgaagccagtcctgacaatgggcagaacgaattcagtgatatcattaagtccagatctgagtttcagattgccaaaagacaaaacgggtac

SEQ ID NO: 815175 - DNA, 98 bp, Homo sapiens
ggccttcctggtgctgcccctgggcaaggtggagctggacagaatatttctgtccataagacccccagaagtcccctaagtgggataccagtgaggac

SEQ ID NO: 815176 - DNA, 100 bp, Homo sapiens
tgcagcagtatgtgccacaactgcaaaacaacaccatcctccgccttctgcagcaggttttatggcaattggatatattccgacgaagcttgcgggtttt

SEQ ID NO: 815177 - DNA, 99 bp, Homo sapiens
ctcacctcgcgggatggcagctgctgatttgtcccatgctctatgttctatgatgaggatggggatctggctcacgagttctatgaggagacaatcgtc

SEQ ID NO: 815178 - DNA, 100 bp, Homo sapiens
acacattcaatccggaccattttctggagaatggacagtttaagaaaagggaagcctttatgcctttctcaataggaaaggcagactacaagttactgag

SEQ ID NO: 815179 - DNA, 99 bp, Homo sapiens
ttcactacctgcacaacgttcaaccatgctcggtcatctgtggcagtatatcaaggatttaggtcctgaatatgaaggtatatttaacacttcattgca

SEQ ID NO: 815180 - DNA, 100 bp, Homo sapiens
agctcatcttaggctgtgctgtgaactgtgaacagaagcaagtggacccatcaacttgtgccagtacagggtctgtgcagtggagtaggcacttcagtgg

SEQ ID NO: 815181 - DNA, 98 bp, Homo sapiens
agaggtgctcggattctcgtagctgtgccggctggagatggagctgaagatgctgaagtctcagtccagctctgccgaacagagcttcctgttctcca

SEQ ID NO: 815182 - DNA, 98 bp, Homo sapiens
aaacttaatccacagcaagctcccttatatcagggagaaggttttaaggtgaaaacgaagaaagaaatccggcatgtggaaaagaagagccactcgta

SEQ ID NO: 815183 - DNA, 100 bp, Homo sapiens
atgcgctttgcaatgaaatctcgaaggggacctcatgtccctgtgggacacaatgcccccaagaagctccaccatgaggcgaggtggatggaggaagcga

SEQ ID NO: 815184 - DNA, 100 bp, Homo sapiens
gacgtgcagtttacttggtatgcaactatgccccaaagcagaactggggctcccttgcatcttccagttacaaattcagtgccttctgcagtttccccag

SEQ ID NO: 815185 - DNA, 98 bp, Homo sapiens
gcaacatttacacaagatggacattacattattagtgcatcctctgatggcactgtaaagattgctcttaaacttggtgtgactgctaatgatgtaaa

SEQ ID NO: 815186 - DNA, 100 bp, Homo sapiens
aggttttaaatcaagatttaacattccaacacataaaaattatttatccaacagctcctcccagattgttcagattccattctgtggggaaattgactgt

SEQ ID NO: 815187 - DNA, 100 bp, Homo sapiens
acctcacgggccaggtcgctctgtacaccttctgccccaaggccaaccagtggtgctacagttgaaactccagcagcgccggacccgggaagaactggtg

SEQ ID NO: 815188 - DNA, 100 bp, Homo sapiens
gtcagtttctgaggaatttcatcagtgatgtcttggcattgcccattttcaagcaggaagattccagccttccattggatggtgaaacagagcacccacc

SEQ ID NO: 815189 - DNA, 98 bp, Homo sapiens
acgaggagatcgcgttccttaagaaagtgcatgaagaggaggagcggatccgtcgcggggatgacctgcggctgcagatggcaatcgaggagagcaag

SEQ ID NO: 815190 - DNA, 98 bp, Homo sapiens
ttctcaaatctaaaaaatgtcccttcattgttgcactcaataagtgacaaaaatgctgagtttcttccgtagaacactagggcgtcggtctatgcgta

SEQ ID NO: 815191 - DNA, 100 bp, Homo sapiens
acacctacgacgatcgggcctacagcagcttcggcggcggcagagggagaatacttatctctggcgcacatcactatatttggctgcctctgccagtgct

SEQ ID NO: 815192 - DNA, 99 bp, Homo sapiens
tccaccagtgcagcagaatatgatgaactcggcttcagggtgctcaaggattggagaggagacaaaaccaggagcagcacagtggggacatctcccgtc

SEQ ID NO: 815193 - DNA, 98 bp, Homo sapiens
ctcgcctcagttcgcctctgtgaacatcaccaccaaccaggcagggtctgacatttcaggaggtggagaacttctttactttcctaaagaacattaat

SEQ ID NO: 815194 - DNA, 98 bp, Homo sapiens
gtttgacaccaagcctctcattgttcatttagtcatccaacaagaagaaatatgaaattccagcaataagaaatgaacaaaagattggagctgaagac

SEQ ID NO: 815195 - DNA, 100 bp, Homo sapiens
gctgacctggtcagattgcccctcaggatgtgtgacaagctggctgctgactgtgcccacgagctgcggcgccatggggtcagctgtgtgtctctgtggc

SEQ ID NO: 815196 - DNA, 100 bp, Homo sapiens
cagatggggacacacagtcagagaaaccggggcaacctggagttgagacagacgactgggatggaccagtctccagagaatacagagggcaaagatggat

SEQ ID NO: 815197 - DNA, 98 bp, Homo sapiens
acatgctgggcttgtccaacacagtgatgcggctcatcgagaagcgggctttccaggacaagtactttatgataggtcattaaatttgacggtggaga

SEQ ID NO: 815198 - DNA, 100 bp, Homo sapiens
cacagtgaaagtatccagtatgtctttccaccgtaccctagagttggcatcttgtttaccagaggggagcgccgatgtgtccagatgctagaatggtttg

SEQ ID NO: 815199 - DNA, 99 bp, Homo sapiens
aaagagttgaagcttttgaattgaagagagaagggcacagttacctaagtatcaacgtaatcttcctcggccaggacaggcccccatcggtaatccacc

SEQ ID NO: 815200 - DNA, 98 bp, Homo sapiens
ccaatactgcggctcctgctgggcccacgccagcaccagcgctatggcgggtcctctgtgtaaataccgccatgtccccagaataatgtgtctcaact

SEQ ID NO: 815201 - DNA, 98 bp, Homo sapiens
ggactctgcagagtgaagagaaaatagcaaacgatccagacggcagggagtgcatcaaaggtgtgaacacagttttagaaagagcgttttcgctacgt

SEQ ID NO: 815202 - DNA, 101 bp, Homo sapiens
cccgcagcctggacgacatcgacctgtccgccctgcgggtggacatcttcaataaggagctactgctaatccccatccacctggaggtgcattggtccctc

SEQ ID NO: 815203 - DNA, 100 bp, Homo sapiens
attatcgtagcaaggtgctcttctgggacaacgcgtacgagttcaacctcagcgctctgaactccagtgatccacaagctcagaaatacatcgcggaaag

SEQ ID NO: 815204 - DNA, 100 bp, Homo sapiens
gaagtaccaggaggcgttggccaaggcctggagaacagctccctccagagatgactgtggcaagatcttcggtcaaagagacctccagagaaggcacctc

SEQ ID NO: 815205 - DNA, 50 bp, Homo sapiens
cagacatgttctcaccacccttggccagaagcctgtcttagatgttcatg

SEQ ID NO: 815206 - DNA, 100 bp, Homo sapiens
ggaggccaacctgctgctagccaaggccgtctctgctggatgaaccgaatcctaacagtccagccaatagccaggcagcacagctttatcaggaaaacaa

SEQ ID NO: 815207 - DNA, 100 bp, Homo sapiens
ggaagctcaacgactccattgccgaggagctgaacaagaagttggccaacaaggcaaataagggcgagactgaaaaatcaagtcactcagttgaaggagc

SEQ ID NO: 815208 - DNA, 100 bp, Homo sapiens
gtacctcactgcagaggtgctggagctggcaggtggcagggcccagccccgaaccagacaagggacccctcaaggagcttcattctagcaggagaaaatt

SEQ ID NO: 815209 - DNA, 100 bp, Homo sapiens
gagctccacagcagaggacgcgctctccatccgctcggagatgatccagcgcaaaggagaagtacagcatcggggagcccacagtgccatccaccctggc

SEQ ID NO: 815210 - DNA, 100 bp, Homo sapiens
ccggacagagtttgatcgactgaatgagatcaaaggtcacctggaaattgccttattggaaaaacatttcttaccacaggaagtcctggagaacctgaag

SEQ ID NO: 815211 - DNA, 100 bp, Homo sapiens
caatggaattcatgatgaaagcaatgcttttgaatcaaaaggtgtcagctgtgatgcatgtttaaaaggaaattttcgaggtcgcagatataagtgttta

SEQ ID NO: 815212 - DNA, 98 bp, Homo sapiens
tggcattgctgtttcctgtggtaaacactcggctgggtctaaaattcccaggactccacagctttgcaccagataagcctggaggaatactaatgatg

SEQ ID NO: 815213 - DNA, 99 bp, Homo sapiens
taacgcacaataatatggctccgatgggctcaaaggtgaaagaacttgtcctggacaacagtcggtcgaatgaaggcaaactcgaaggcctcacagatg

SEQ ID NO: 815214 - DNA, 99 bp, Homo sapiens
agatattgatctgaaaagaggctttggttttgtggatctaggggtgtttattcctgctcctatggctcaagggatgagaagtgacttctttctggaggg

SEQ ID NO: 815215 - DNA, 75 bp, Homo sapiens
tggagatctacaggatttatcaaatcgagtcactgtcaaacagtgatgtgtgttctgaaattgtgaaccatgagt

SEQ ID NO: 815216 - DNA, 100 bp, Homo sapiens
tgccaatatgtttgagaggctggctgaggaggagaacaagctctattaccaggttttaaacttcgccatgatcgtgtcttctgcactcatgatatggaaa

SEQ ID NO: 815217 - DNA, 99 bp, Homo sapiens
cccttccctacagcctgaggagtacatggcctacgttcagaggcaagccggacatggtctgctatacagctcagactctcgtccgaatcctctcacatg

SEQ ID NO: 815218 - DNA, 100 bp, Homo sapiens
tggaagcggccaccgactactgtcagcagctgtgccaggtggcccacaaactctttaacaacttgaaataaatgtgtggacttaattcaccccagtcttc

SEQ ID NO: 815219 - DNA, 100 bp, Homo sapiens
agaagccaagcacgctgacgaggttctgtgagagcattggagtctccaccaccatcgaccccttctgggacatcagcttggatctccccggctcttccac

SEQ ID NO: 815220 - DNA, 100 bp, Homo sapiens
ccgcacccacacgggcgagaagccctacgagtgcaacatctgcaaggtccgcttcaccagtgatgtccttgcattgcccatttttaagcaagaagagtcg

SEQ ID NO: 815221 - DNA, 98 bp, Homo sapiens
cggcaaagccgagaaggagaacaccccgagcgaggccaaccttcaggaggaggagtgccggtggtggtgtgcacattgagccccggtatagacagttc

SEQ ID NO: 815222 - DNA, 98 bp, Homo sapiens
acaacatggcagacattgacaaggcaattcatgatgttaaagccacagatctgggattaggtaaagtaagatttaaggcagaagtagattttgatggg

SEQ ID NO: 815223 - DNA, 98 bp, Homo sapiens
accctgggcggcggcaagctgtgcgacctcttctgcggccggcctgggcaggtgtcttcctcgagagctttcagaaggagttctcactcgaagataaa

SEQ ID NO: 815224 - DNA, 99 bp, Homo sapiens
cctttgcagtggaacctcaggggcccgcgttagaaaaccatgataaattctggacaaaatacagaaaacccacaactctctgaaggcactggagagtga

SEQ ID NO: 815225 - DNA, 100 bp, Homo sapiens
agtgatgatgaatttgatgaagaaagtgaggaagggaaagcagcaatttcacaactcaggtttgaaggttgcgagaaggccttttcaaggcttgaaaatc

SEQ ID NO: 815226 - DNA, 100 bp, Homo sapiens
cagtgatggtgctgctctcttagctgtgattcactattattgcccagagcagatgaaactggatggcctgacctctcgggacacacccagccctgtggac

SEQ ID NO: 815227 - DNA, 100 bp, Homo sapiens
caggacttcgacctggagccgtcccaggactgtgcaggggactctgtcacatgtccagctctgaagggcaaagtgcagaagatcctaatctggaagtggg

SEQ ID NO: 815228 - DNA, 100 bp, Homo sapiens
gagaagtacagggagcgagagctggagaagctgggattggagattccacccaaacttgctggtcactgggaggcaaaatacatatctcagtgcattgatg

SEQ ID NO: 815229 - DNA, 100 bp, Homo sapiens
cacgcgtcctactacaaagatgctctgcggtttttgggctgtgttgacatcaaggatctaccaggaatgtctgatcacagatacggggatggtggctcta

SEQ ID NO: 815230 - DNA, 100 bp, Homo sapiens
acagctcaagtccaaaaagatgcacggattggagaagcagaggccaagagagatgctgggatccggttatccatcttggtgcatcctgacaaaaatcaag

SEQ ID NO: 815231 - DNA, 100 bp, Homo sapiens
ctgaaagggaaaacccccattcattctggattggtggatctgaagtacaaaatattttccaggttcatcaatgccagaagacgaattcttcagccaatgt

SEQ ID NO: 815232 - DNA, 100 bp, Homo sapiens
aagctttgcaacagaattacagagtatgatgaaaagcttttgacatcacctatgtgcgtctcaagttccacaccagccgcccggagagctttgccattta

SEQ ID NO: 815233 - DNA, 100 bp, Homo sapiens
aactgatccaggaagactccctgagaaccccaagatcccacatggaggaactctaatgaatcattgattgaccagcactattttaccagttggaatgaat

SEQ ID NO: 815234 - DNA, 100 bp, Homo sapiens
aacaaaggcaaaggattcggatttattaagcttgtgattgatgtaaagcgaagttatgtaactatgactgcaacaaagattgaaatcactatgagaaaag

SEQ ID NO: 815235 - DNA, 98 bp, Homo sapiens
agggaggcagggcccaggacgcaaggtggcgacaagtcgcgtttggccccagaacactcctatgccaccttcaccagctgtacaagtgcagggccagc

SEQ ID NO: 815236 - DNA, 100 bp, Homo sapiens
cagcaggagagggagagactggagaaggacctggaggaagcccatcgagagaagagcaaaggagactgcaccatccgtgcttggccggtacaggtgtgag

SEQ ID NO: 815237 - DNA, 99 bp, Homo sapiens
ctggacgatctcattgacagctgcattcaatcttttgttaaagccttccatctgaagtatgatgaagttcgtctggatccaaatgttcagaaatgggat

SEQ ID NO: 815238 - DNA, 100 bp, Homo sapiens
atgttttgccacgtggatgtgaagatttcctctaaaaggtgctggagaatctggtaaaagcaccattgtgaagcagatgaggatcctgcatgttaatggg

SEQ ID NO: 815239 - DNA, 99 bp, Homo sapiens
atttattaacacctcttgccactcagctgacatatgaaggactcattgatgaaatttatggcattcagaacagagagattaaacagattctagaaaatg

SEQ ID NO: 815240 - DNA, 98 bp, Homo sapiens
cagatgcaaggcaactcgaccagaaaaccagcattggaatcagctgattcaggatgctcagaagcgtggtgccattattaagacctgtgacaaaaact

SEQ ID NO: 815241 - DNA, 98 bp, Homo sapiens
ccataatgtcatgattgatcatgagcacagaaagaatgaaactagtgatcgagaagatggcctccccaaaggacatcatgtgacagactctgagaacg

SEQ ID NO: 815242 - DNA, 100 bp, Homo sapiens
acccacctacagcctggacacacgctcggagctgccttcttgccggctcaagctggagtgggttcttagtaaacacttgccatcgtcagatagtatgtct

SEQ ID NO: 815243 - DNA, 98 bp, Homo sapiens
ggacgtctacctgtccaccattgtgaccgagtttgtgaagaaatatgggaacctttttagcttggagcttggtgacatatctgcagttcttattactg

SEQ ID NO: 815244 - DNA, 101 bp, Homo sapiens
tgttctgaagcaactatacttctttgctatttccacctatgtgcagagtcataccctaatgatcccagcaagataatgtcctgtcttctaagatgtgcatc

SEQ ID NO: 815245 - DNA, 75 bp, Homo sapiens
gcgcggctactacaaccagagcgaggccgggtctcacaccctgcagtggatgcatggctgcgagctggggcccga

SEQ ID NO: 815246 - DNA, 100 bp, Homo sapiens
ctgtccccatggcaacccaaatccaacaacttctccaggacaagcagtttgaattggctctgcagctcgcatttcccacagtcaaatcactcgcctctac

SEQ ID NO: 815247 - DNA, 50 bp, Homo sapiens
gagatattctgctgagtggaaggatccatccaacctacaaggaaaagtac

SEQ ID NO: 815248 - DNA, 100 bp, Homo sapiens
gtgtgtgggagcaggaccagcaggccataggaaaaggatacagagtagagtttcatgaacctgaaacttggtggaaatttgatcctgaagaattagaaaa

SEQ ID NO: 815249 - DNA, 98 bp, Homo sapiens
tgaggttgcagttggcgtgaagcatgattccacctttccactgatagactcaagttcccagaaccagattagaaaacgcatcgtacttgaaaagttga

SEQ ID NO: 815250 - DNA, 98 bp, Homo sapiens
tggaacgtcattcattctcgatgtcgtgctaaatcagagattttatgaagatggagcaattgtcttgggtgaagaagcaaatatgcttgctggcatgc

SEQ ID NO: 815251 - DNA, 100 bp, Homo sapiens
gtgcccatcgggaaatgcatgtgcaaggcaggatatgaagagaaaaatggcacctgtcaagagaacacctgttcccagcgctgaagcattccgatggttc

SEQ ID NO: 815252 - DNA, 99 bp, Homo sapiens
tgtcagcctccttatccaaacggcaaggcagcctccccgggatgtacgctccacactcatgctcagagcagcattattcacagcagccaggagggggac

SEQ ID NO: 815253 - DNA, 99 bp, Homo sapiens
acccctcctcccctagcttcactcaatgttagtaagctgtgctccattgaagtgacttgtgaatcagccagtgtgatggctgcgacactggctaatggt

SEQ ID NO: 815254 - DNA, 98 bp, Homo sapiens
ctacgaccgggagttcctccgcaccctgcccggcttcctcatcgtggccgagatcgggaggagccccagccccgcgacgaggaggaagcggagctgga

SEQ ID NO: 815255 - DNA, 100 bp, Homo sapiens
cgaggtcaacccagcagcgcatctcacaggtttccagccaatggattctggtcaactggtggagattggctgacaccctggagaagccgaaaccagagag

SEQ ID NO: 815256 - DNA, 100 bp, Homo sapiens
aatgactccctacaatacacctcagctatctccagcaaccactccagcaaataaaaagaatcgattacctatagatgggttacttatgaatatggcagtt

SEQ ID NO: 815257 - DNA, 100 bp, Homo sapiens
cgcgggaggagcggggggtccgcgcacccagctttggattttgtgaaaatggaaaattatgaggcattggtaggctttgatctctgtaatacaccgctct

SEQ ID NO: 815258 - DNA, 100 bp, Homo sapiens
gtaacaactgggccaaaggccactacacagagggcgccgagctggttgattctgtcctggatgtggtacggaaggaggccgctatgcagggtagcactgg

SEQ ID NO: 815259 - DNA, 98 bp, Homo sapiens
acgctgggcatgaggagcggagcggagaatgccaagctgcaattctcattgcaagatcatcgcctccctggtttatagtagacagaccttttctgttt

SEQ ID NO: 815260 - DNA, 98 bp, Homo sapiens
ttctatttgatagactaacaaatggagttttttgagaaccctgcttttcgtcccgatgggctgaaactctatcctaccctggtgattcgtgggaccgg

SEQ ID NO: 815261 - DNA, 100 bp, Homo sapiens
ttttcaggaagacttggccaggccgtgttccgtgtctctggattcaagtcccaggagtcctgaccagagagcagtgacatatttaggtcaaagaagctgc

SEQ ID NO: 815262 - DNA, 100 bp, Homo sapiens
gccttttgggatcaaaggtcaagttggatgaaaaatctgacaaacagtatgctgaaaattatacaagagtgagtatgtaaattcctaagggaaattctca

SEQ ID NO: 815263 - DNA, 100 bp, Homo sapiens
caaagcgaccagaaattgactgcactctggtggctaacaggtggttggttctagctattgccatggtacgtttttatatggaaaaaggaacacacagagg

SEQ ID NO: 815264 - DNA, 100 bp, Homo sapiens
ccatgttccctccgaaggacccagaaaagctgcaggccatgcacctggagcgatgatccgatcacataggacagtatgcaccttaagatcctgaagaaac

SEQ ID NO: 815265 - DNA, 100 bp, Homo sapiens
accagcatcgagaccaacatccgcctgactctggagaagaggtttcaagatgctcacccaatacacctctccaagttcatgtcctgtgtctcaccttggg

SEQ ID NO: 815266 - DNA, 100 bp, Homo sapiens
agaagaataagagatgtgattaatgtattccaccacctccgccagttaagaggaaaaaggacttcaaacaagtgtgaagaggctgtgtggcgagattgtg

SEQ ID NO: 815267 - DNA, 100 bp, Homo sapiens
tatccctgccatcgacttacagtgggaagaagatcttcacctgcacagacccgggaacagtcggaagaaacactgtgcatcttagccaacatagcggatg

SEQ ID NO: 815268 - DNA, 98 bp, Homo sapiens
gttgatgagaacaatttgacagctcatgtagaggctggcataacaggacaagagttggaaagacaggcctttttgcaaatgtgtaacttgcctatcaa

SEQ ID NO: 815269 - DNA, 100 bp, Homo sapiens
tcaggggaaggaagagcttgaggggacagtggagaagcaggaggcatcaagagggagcccaataagttttttgtgcctcggactgtgatgattggaggga

SEQ ID NO: 815270 - DNA, 100 bp, Homo sapiens
agactcgcttccacgctggggcttccaccatgcccctcagcttgtttgccagctctgagcctgtgccaggattccagggggataccctgcagctagcatt

SEQ ID NO: 815271 - DNA, 100 bp, Homo sapiens
gagagggatgggttacatgcccaagaggggacttgatgttaacaaatgtgagattgccagaaatgcactcggtgatggaaagagagccactattctgaag

SEQ ID NO: 815272 - DNA, 100 bp, Homo sapiens
actgcaaaacagccgtcaattgttcatctgattttgatgcgtgtctcattaccaaagctggaaatgggtcctgatgaatatgaagagatggaagaagagg

SEQ ID NO: 815273 - DNA, 98 bp, Homo sapiens
cgcgtcgtagggactcactggcggtgcgcgacctgggctggctccgggggtggcgggcgcagctgctgtgacagagcatctgctgcacccaagcctga

SEQ ID NO: 815274 - DNA, 100 bp, Homo sapiens
gagtggaagagaaaattgtgaactaaggccccctgcccccttttcctggtgcatgtgaagttatcaaaaacaggttttgaagccgcttctctggccgagt

SEQ ID NO: 815275 - DNA, 98 bp, Homo sapiens
gacgccctctgcccgctccagaagcagatggtagtgaaaacctttatggatatggatcaggactcagaagatgaaaaacagcagtatctcccactagc

SEQ ID NO: 815276 - DNA, 100 bp, Homo sapiens
agtcgtaaacaaccctgaagagaacagccaggcctggagggccctcctggacccgggagcggaccctggtggcggtgaagcccgatggcgtgcaacggcg

SEQ ID NO: 815277 - DNA, 99 bp, Homo sapiens
ccataatgtcgacctgccggagtcgaggattccagggtcgaacactcggtttgttggcatccaaagctgttggggttgatggtgctgaaaaaaaggaag

SEQ ID NO: 815278 - DNA, 98 bp, Homo sapiens
cgagaaggagggaggggaaacacaaagccggctacgcgctgcgaggaagattgttgatcgaatcgacaatgatggggatggctttgtcactactgagg

SEQ ID NO: 815279 - DNA, 99 bp, Homo sapiens
ggaagtattacctgcgggggtgaccattaaacaggagcagaacttggaccagacctacttggatgatgctcttttgtgacagggacggcttgttgcggg

SEQ ID NO: 815280 - DNA, 100 bp, Homo sapiens
taaagcctattggctctggggctcagggcatagtttgctccaaaaccttggaattaatccagctaacattggattcagcacactgaccatggaatctgac

SEQ ID NO: 815281 - DNA, 100 bp, Homo sapiens
ggggaggattggctcagccacccgctgggaatcgtgcagggattcttcggaaattgacaatggcccttcagctatgctaggtctataatgggaagtgtca

SEQ ID NO: 815282 - DNA, 121 bp, Homo sapiens
ggaagtggcccaagggtctcccttctcggtgaacgttcagctgctgcaggaccacggggaaattgccaagagtctacgacgttcctccatcggtgagcaaggatgtgcccgatggcccact

SEQ ID NO: 815283 - DNA, 100 bp, Homo sapiens
gcagtggcaggtgcacgcttatctttatctgtggcatgcaactggtttaccgacaagactgtgaaactttcgggatggtggtgaaaatgctgattgaaaa

SEQ ID NO: 815284 - DNA, 100 bp, Homo sapiens
cagcaccacctttttggggaagatttacctagctgccagaacttcgagaaaccaagacctctgaatacttcagcctttcccaccatcctttagactacag

SEQ ID NO: 815285 - DNA, 99 bp, Homo sapiens
aagtgaacaccttgactaaaccgacttctgatccatggatgccatcaggtgttgacttcaaaatcaaaactgtagagctaagaggaaagaaaattagat

SEQ ID NO: 815286 - DNA, 100 bp, Homo sapiens
aacagtttaaaagttcataatgaatccattctggaccaggtgtggaatatcttttctgaagcttccaacagcgagccagatgaccaagatgctccagatg

SEQ ID NO: 815287 - DNA, 99 bp, Homo sapiens
aatccttcagcttcaaagttccccaagaagaactggaaaatgccagcctagtgtttacagatgatgttgaatttgaagtatcatcggaccgacggactg

SEQ ID NO: 815288 - DNA, 99 bp, Homo sapiens
tcggggcctccgcagcgacaacatggaggccgtgaagaccttcaatagcgagggacttcatctgcagcatcctcaccattaaaaaaagaacagccctta

SEQ ID NO: 815289 - DNA, 98 bp, Homo sapiens
tgcagctgattaaggactatcgggagaaagtggagtccgagctgagatccatctgcaccacggtgctgcccatcaccacgggaggggtcacttaccgg

SEQ ID NO: 815290 - DNA, 100 bp, Homo sapiens
tgactgtaaatgcgcgcaactcagaaggggaggtcacaggcaggttaaaagtcgcttttaagaagtacctgcaagaaacctactcaaagcaggtcaccag

SEQ ID NO: 815291 - DNA, 100 bp, Homo sapiens
tgaagcgactgagtccgcgatggaggctcttctcaaccatctgtgagtccaggggaaccgtctccaccatccatccatccaggaaaatcagacttaatag

SEQ ID NO: 815292 - DNA, 100 bp, Homo sapiens
cattctcttcaatcatgagagtcccagaagagaaatcttacaggctggtgttaaaggaacttcggaatcccttaaaggtgtgaaacgcaaaaagatcgta

SEQ ID NO: 815293 - DNA, 98 bp, Homo sapiens
tgggacacctatgaagatgacatctcggaaatcaggaccttctaccgctttgaggctgtgtgggatagctctctgcataactcccttcttctgaaccg

SEQ ID NO: 815294 - DNA, 98 bp, Homo sapiens
cctacgcagctgccgccctgggctggaagaagcacgccaaattcattctcgttttgaaaaagaatttagttttaagaatgaggagacagcacaggttg

SEQ ID NO: 815295 - DNA, 99 bp, Homo sapiens
atggccgaggtgttgcggacgctggccgcactgggaggtgttcagaaaagttacagaagttttcattttagtccctgcacttcttggtctcaaagggaa

SEQ ID NO: 815296 - DNA, 100 bp, Homo sapiens
gaaatggagaatcagccccataagaaatacgaactcacgggtggagccgccaccaaaatgcagattttcgtgaaaacccttacggggaagaccatcaccc

SEQ ID NO: 815297 - DNA, 100 bp, Homo sapiens
tgtggtttgaacaccaaggggcaactgggccatgagagggaaggaaacaagccagctaaaagatggcggcaaggcagcccaggcaaatgtaagaataggc

SEQ ID NO: 815298 - DNA, 98 bp, Homo sapiens
gaaatcctactccacccataggaagacccacgtccacacctactcctcctcaggttgattcttcaccacactgaaaccattaggaaaaatccttgtgg

SEQ ID NO: 815299 - DNA, 131 bp, Homo sapiens
ctgacaaaattctggggacgctgggaacactgaatcaacatgggcaatgagaacagcacctcggacaaccaggttcctcagtggtgtgctgaatattgtctttccatccactaccagcacgggggcgtgat

SEQ ID NO: 815300 - DNA, 100 bp, Homo sapiens
agaaggaagaggtgtttgaaaaggggcccagaagacacctgctttgagtttggtgtttttcctgccatcctgagtttcccacttgattacccgttaagtc

SEQ ID NO: 815301 - DNA, 100 bp, Homo sapiens
ctgtgaactctgccacttcaggtttgcagtcgagcgcaaacccaggccgttagtggaggagtccagctacttgctcttttagttcccactttgatatctt

SEQ ID NO: 815302 - DNA, 100 bp, Homo sapiens
cacccagcagagcagtgctgagtaacaccaggctcctcaggcaccttcaccatcggcaggttgtaagtaccagagttggtggaattcctgaggtgcttcc

SEQ ID NO: 815303 - DNA, 98 bp, Homo sapiens
aggagttcagccgcgctgccgagaagctttacctcgctgaccctatgaaggctgttcggctcttgaatcccagcgatgaaaccaggaactcactttcc

SEQ ID NO: 815304 - DNA, 100 bp, Homo sapiens
gaccctgtcggcggcagccgtgttcaatgaccggctgtgtgttgggatcgtggcctcggagcgagcaggtgttgtgatccccccaggggtgcccgatgcc

SEQ ID NO: 815305 - DNA, 100 bp, Homo sapiens
tggcctgcagcgctcccacccccggcggcggcacgatgccctttgacttcaggaggaatagccaggccagaagaaggaaggcctgtggtgagtgggacag

SEQ ID NO: 815306 - DNA, 100 bp, Homo sapiens
gcctccagcgagaagttgagggagaaaggcgggcccgggaacaggatgctgatatgctaactggtgatgagcaagtatggaaggaagttcaagaatccct

SEQ ID NO: 815307 - DNA, 100 bp, Homo sapiens
ggcagagaccactgctgctaccaccaacggcagtctcagtgacccgtccaaagaagtggaatacggtatttgaagtataccatacaactgttttgaaaat

SEQ ID NO: 815308 - DNA, 98 bp, Homo sapiens
agcgctagccctgcagacagaggtgtgctgacgacctgctacaacagaaaaggggaaactgaggcccaaggaaattgagtatctctgcaaagtcacca

SEQ ID NO: 815309 - DNA, 98 bp, Homo sapiens
tcttatttagccggagtgagaagcaagaaggccctggacacagcaatatctctgggctttcacagtcgaggggagctgcagcgggagtcagacttcat

SEQ ID NO: 815310 - DNA, 99 bp, Homo sapiens
ttctgtggagaataacggctgcacctggagattgacgcagagtgggcggcggtggtgttcaggcccatgaagttcatcagaaaattctggcaactgatg

SEQ ID NO: 815311 - DNA, 100 bp, Homo sapiens
cagatttcaatccagtacaggaaatgatccatttgccaatatataggcatctccgaagatttattttgtcagtggactgactgcattgcacagatgatgg

SEQ ID NO: 815312 - DNA, 98 bp, Homo sapiens
ctgcacacctggatccaggataacggaggctggcggaggaaatatttgagagtgtaggagatcgagagctaagacaagtctttgaaggacagaatcgt

SEQ ID NO: 815313 - DNA, 98 bp, Homo sapiens
gggatcttttttcacatccagcccatgcggactgagcagccaaagcttgacagagctcgggaagcagagctccgccagcttcgcaaatccaacatgga

SEQ ID NO: 815314 - DNA, 75 bp, Homo sapiens
aagaagatggacaagatggtgcagaagaagaacgcgttttctgagtttaaccagtaatgccattcagttgccaat

SEQ ID NO: 815315 - DNA, 98 bp, Homo sapiens
aagatgcagctgctgcaggacccgcagggaaactgaacagccaagactcctataacaattttaccaacaacaaccctggcaaccctcggctctctcct

SEQ ID NO: 815316 - DNA, 100 bp, Homo sapiens
actcaggaagagatttgaaaccacatgaagatcaacaagatataaataaagatgtgggtgtgaaggtcctgccgccacccccactggtgcctgtggttcc

SEQ ID NO: 815317 - DNA, 99 bp, Homo sapiens
actctgaatgcactgaacacatgtctttggtgcaacactaacaaggcttgtctggactacccagttacaagcgtcttgccaccggcttccctttgtaaa

SEQ ID NO: 815318 - DNA, 100 bp, Homo sapiens
agttcggcaccttatttctctgctgagtgtccagatcctccaaagacagatctgctccatcaagtatgatggtgaaggatgaatatgtgcatgactttga

SEQ ID NO: 815319 - DNA, 100 bp, Homo sapiens
gctgtttctcatctttatactcttccaggccccgccagcaggcgaagcagggagatgtcagactgctacacggagctggagaaggcagtcattgtcctgg

SEQ ID NO: 815320 - DNA, 98 bp, Homo sapiens
ttcgggaacaaatactactacatcccgcagtacaagaactggagagagtccgaatgtcattcagaatttgaaaatactacccgttctgtcttcaggtc

SEQ ID NO: 815321 - DNA, 51 bp, Homo sapiens
acaaggatagttttggctgatgtgtatgtcttactgaaagaaagaaacatg

SEQ ID NO: 815322 - DNA, 98 bp, Homo sapiens
tcgttcagtcagagagcataatagaagtactgcgttttgatgatggagggctactacagctgtctctctggatcaatgagaagatgctcacagcccag

SEQ ID NO: 815323 - DNA, 99 bp, Homo sapiens
tgcccatctatcagcaggctccgggctgaagattgcttctcttctctcctccaagtcatgacagaaccatgcaagatattgtttacaaattggtaccag

SEQ ID NO: 815324 - DNA, 99 bp, Homo sapiens
tggaaatagcgcggctgtgcaagtacctgccagagaacgacctgaaggactacaaagctgatgaagacccagcattattccagtcagtcaagaccaaga

SEQ ID NO: 815325 - DNA, 100 bp, Homo sapiens
agaagagagaagaacattctcgaatacctagaatggggactccaagccccctgatccttgatcagaactacattaacaccaaaaatcaagttatcaaagc

SEQ ID NO: 815326 - DNA, 51 bp, Homo sapiens
cgaatagttgatgccctaaatgaattcagacagccgctcaggaagcaatct

SEQ ID NO: 815327 - DNA, 99 bp, Homo sapiens
aaaggtggaagggtcacttgacccagggagttgaaggctgcagtgagccctgtttttgccaccacactccagcctgggctggagtgcagtggcgcgatc

SEQ ID NO: 815328 - DNA, 100 bp, Homo sapiens
ccagcctgatgctaccaaaggtggaaagtcctgaagaaatccagtgggacagaactgtaccgctctctttttggccagctccaccctcccgacgaaggcc

SEQ ID NO: 815329 - DNA, 100 bp, Homo sapiens
ccgctacgagctggctttaatcctgaaagccatgcagcggcactattcctgatcagagaactccagttgcttcaacacacagtatcagtagtgcagccac

SEQ ID NO: 815330 - DNA, 100 bp, Homo sapiens
cagaaggcacagattagaggaaggaagaggacaaacatgctttattagatgtaacaccaaatgcagttgatcgtcttaactatgcccagtggtatccaat

SEQ ID NO: 815331 - DNA, 100 bp, Homo sapiens
gtgcaccttcgcaagaagcaccagttcaagtggccctcagggcatccccgttttcgatctccacaatggaagttcgaagcaagcaaaagccacgcaaacc

SEQ ID NO: 815332 - DNA, 125 bp, Homo sapiens
caagcgctgcccgcgagctgagccgccggaggaggagccgcgggcaacgagccacagcatgttccgaagagatgattggaagatggaagtggagggttaaataatgaaatgcagctaacatttcg

SEQ ID NO: 815333 - DNA, 100 bp, Homo sapiens
gcggcggcagcggcggcggcggcggcggcctcggctcttccagccaccccctctccagtctgctcagccaaactggcaagacgcagtcaagaacgggaca

SEQ ID NO: 815334 - DNA, 99 bp, Homo sapiens
gagcccatgtcctatgactcagacctgggcacagcaaatgctgaggactcagaccagtctctgcaagatgttttaactcaaatgggtgatgaaaaggac

SEQ ID NO: 815335 - DNA, 99 bp, Homo sapiens
gggacagccgtggagacggagggcagcggcagccggcatcctccctgggcgagaggcatctaataggattcaggaatcaaagaatcagtgtactcaggt

SEQ ID NO: 815336 - DNA, 99 bp, Homo sapiens
caggatacagggtcaaaggagagcacaaccatcgcagttggaagcccatggggcagagtcgggtttctccattcaaggacatgattttatgcttctctg

SEQ ID NO: 815337 - DNA, 98 bp, Homo sapiens
accaggagattgcgagggagcgatgcggtgcagcgcgtgctacagttgaaactccagcagcgccggacccgggaagaactggtgagccaagggatcat

SEQ ID NO: 815338 - DNA, 98 bp, Homo sapiens
cttttccagcagctgctgcctgccagagaggcgccttcagagacccagcgcttacacaatacccaccatgtcccagattgatgacacagatgccatgg

SEQ ID NO: 815339 - DNA, 100 bp, Homo sapiens
gtcatcgctgaagaaaggctcaatgctggcctagggccggggctactagaacaagggtcatcgagcagctcggtgggaagcagctggtcatgaaccacat

SEQ ID NO: 815340 - DNA, 98 bp, Homo sapiens
caatgagaagatccaggcagtcatagactccggagtctgccggagattggtagagctgctgatgacagtcattttgtttactcattcagccctgttgc

SEQ ID NO: 815341 - DNA, 101 bp, Homo sapiens
cgcagctgcgatggccgtggccgtggggagaccgtctgcttgtacagcatatgtggattttatgatttctgtggccagattgattcgtcaggaagaaagat

SEQ ID NO: 815342 - DNA, 99 bp, Homo sapiens
ctggatgttggtagaaaaagcaagagtttgttatatagcacatgatggaagtggttcattgcatgatattcaactgtcattgccatccagtccagaacc

SEQ ID NO: 815343 - DNA, 99 bp, Homo sapiens
gtcggcgccgctgcccatggagggagtggacatcagccccaaacaggacgaaggcgtgctgaaggcacgtctgagaatggtggatgtggtggagaaaga

SEQ ID NO: 815344 - DNA, 118 bp, Homo sapiens
gtggatccgctggagcggagccggccgtacgcggtgctgcgagggcagaacctggggacgtccagatcggtgacatcgtcacagtgggcgagtgccggcctctgagcaagacagtgcg

SEQ ID NO: 815345 - DNA, 100 bp, Homo sapiens
ctcccacctcagcagcctgatcgctcagctagaagagaagcagcagcagcccaccagggagctcctgcagggtgtcagtgtggaggcagttgatccagtg

SEQ ID NO: 815346 - DNA, 100 bp, Homo sapiens
gcagctggctggcttcagtggaccacaacaaggagtgaggatcttcataatgctctacaaagaggtggaactcgctcttggcatcaatagtgaatacacc

SEQ ID NO: 815347 - DNA, 50 bp, Homo sapiens
tgactcccaaggggccgggccaggggggcaccgacttggagaagcaccgg

SEQ ID NO: 815348 - DNA, 100 bp, Homo sapiens
tgcaggggtgcagtgtgtctggtcttatgagtttgaaggttgcgagaaggccttttcaaggcttgaaaatctcaagatccacttgcggagccacacaggc

SEQ ID NO: 815349 - DNA, 99 bp, Homo sapiens
agatctctttgccaaattggcattgaattttgctactcagataaaagagtcctgtgaagataaatcagattagcttggatgaaagtggagagcacatgg

SEQ ID NO: 815350 - DNA, 98 bp, Homo sapiens
aggcctgaagggaaggggcttctctgtgctccacacttaccaggaccacttgtgatcaacaacccctccccgtcgtaaacgctgaggaatgatgtggc

SEQ ID NO: 815351 - DNA, 98 bp, Homo sapiens
ataaaacagctcgcagggaagatgaaagttacggatgcagagaggtgttcataaagagcaatatcagatggcaccccaaaaaaggatatgaaagaaca

SEQ ID NO: 815352 - DNA, 100 bp, Homo sapiens
cagaagttcatggatgctgtcaacaagaagagcagttcccaggatctgcataaaggacccacgcagccacccagcctcagcactcatctgcgcagccatg

SEQ ID NO: 815353 - DNA, 100 bp, Homo sapiens
gcttgcaaaaagtaaaccacgatcgttatgctgagctggcgcccatgcggctctacacgctctccaagcgccactttgtcctcgtgtttgtcgtcttctt

SEQ ID NO: 815354 - DNA, 98 bp, Homo sapiens
aagaaaagccatcgtaagagaagatctattaagtgcaaaagtttgtgacttgaagtggatacatagtggtttcagacaccctcacaggttttctacca

SEQ ID NO: 815355 - DNA, 100 bp, Homo sapiens
cacagaaggagaaagtgcattgaattttaatttatttgaaaaatctgcagctgctactgaagaagagaaaggttgcacttcctgcagaagaggattattt

SEQ ID NO: 815356 - DNA, 99 bp, Homo sapiens
tctcccaggccacaagacatttcctgctcggaaccttgtttactaattgttttacacatccataagtagacctttttggagcctcaccagccaattcaa

SEQ ID NO: 815357 - DNA, 100 bp, Homo sapiens
ccaggttctcattactgccagggctgtgcctacaaaaaagctgcagtattgaagtatgagaacaatgttatgaatatcaggcaattcaactgttctcctc

SEQ ID NO: 815358 - DNA, 98 bp, Homo sapiens
ttggcctgcgagacaccttgagcatcgcatccacggattcctttgcttccgcagcagaggctggcagtgatggtgaaagcataggaaactgccccttt

SEQ ID NO: 815359 - DNA, 120 bp, Homo sapiens
acattactcagttgccagaagatgcatttaagaactttccttttctagaagagcttgatccaaaccaaccagttcctcaggataccaagttcattcatacaaaacccaatcgctttgaag

SEQ ID NO: 815360 - DNA, 100 bp, Homo sapiens
aacgtggtggaggatgagattgatcagtacctcagcaaacaggacgggaagatttacagaagccgagacccacagctgttaaagctgaagctcaacaaag

SEQ ID NO: 815361 - DNA, 100 bp, Homo sapiens
cggcttccgtcccggacagagcccgtggtcgcgcaggaggaagaaggcacctacgatcaaactctggagttccgtaggggaggtgatggccagccaagac

SEQ ID NO: 815362 - DNA, 100 bp, Homo sapiens
ccaggaaaaagaggaaagtggactgtccggggccgggctcaggagcagaggtcttccacgtggcctacgtcctcatcaagtttgccaactcaccccggcc

SEQ ID NO: 815363 - DNA, 100 bp, Homo sapiens
ctaaagcaggaaaataaaactcttttgaaagttgtgggtcagctgaccagatgttgcaagagcaattgaattactggaaaaactacaggaatctggagaa

SEQ ID NO: 815364 - DNA, 100 bp, Homo sapiens
caaagcctgcccagacggctcacctgtgcgggatggaacaaaaggatcccccagaagaggcagaactgctgctacagaacctgcaaagtagaggtcccag

SEQ ID NO: 815365 - DNA, 98 bp, Homo sapiens
ccaacctgggaaggattttcaagccttggaaatggaggaagaagaaaagcgaaaagttcaaacacacgtcagcaggtccctccagctacaaggtgggc

SEQ ID NO: 815366 - DNA, 100 bp, Homo sapiens
caaggtggactggctgactgagaagatgcatgccagagacttcacagtttctgctctggctcattggtgggcagtattacttatgggaattgctctgatc

SEQ ID NO: 815367 - DNA, 100 bp, Homo sapiens
ctccgagtgccagtgggagcggatccctgagctcgtcaagcagctgtcggccaagctcatcgccaacgctgcagtagactgctcggttccagtaagcgtg

SEQ ID NO: 815368 - DNA, 99 bp, Homo sapiens
tgaattccaacaacttcaaagtaaaatcagtttaatttcagaaaaggcctactgaacttgacgcactggtatttggccatctatacaccattcttacca

SEQ ID NO: 815369 - DNA, 98 bp, Homo sapiens
gggctcccgtggccgcgtgctgggaggagactggagcccggttaggaagaatggagttggcgactcgctaccagaagttggtgagatggcaaagcagt

SEQ ID NO: 815370 - DNA, 99 bp, Homo sapiens
gaatatgaagagacatgcgatggtagatcaacccccaggtcggattgtttgtgctgaacgaactgtcctcttgcttcagaagccccttttgagtgtggt

SEQ ID NO: 815371 - DNA, 137 bp, Homo sapiens
gcctgaccattacacgcaaagatattcaaactctaaaccatctgaattggctcaatgatgagatgctcctgccagcatttgtcttcattgggctggaacaggatgactgctgtggctgctgtggccatgaaaactgt

SEQ ID NO: 815372 - DNA, 98 bp, Homo sapiens
gctaaatgacagatatttgttgttacatcttttgggtagaggaggtttcagtgaagtttacaaggaatcctgggcattcccttgccccggaaacgccg

SEQ ID NO: 815373 - DNA, 100 bp, Homo sapiens
cgggacccccaggacgacgtgtacctggacatcaccgcattagtgaccagaaggatcccaaggatcgaatggttcaggttgtgaaatggtacctctcagc

SEQ ID NO: 815374 - DNA, 99 bp, Homo sapiens
ggccttcgaggagatggagggaacctccccgagcagcccaccacccagtgggggtacggagaccacaagcagtagctccttcgaattggagatggcaca

SEQ ID NO: 815375 - DNA, 100 bp, Homo sapiens
acctttacagaagcaggagtcagaaccagcttgactgtagtagactctgatggagctaccaactctactactgcaaacctgacagtgaacaaagctgtgg

SEQ ID NO: 815376 - DNA, 100 bp, Homo sapiens
agaagggagactacaaggacagcagcgactttggggcccgtcaccctcagattggccatcgggactttgatgtggagaagcgacttcggagagacctcag

SEQ ID NO: 815377 - DNA, 100 bp, Homo sapiens
cgggacagcggcgagacgcgcgtgtgtgagcgcgccggaccaagcgggcccagaagcggatatggctcgtggacagcagaaaattcagtctcagcagaaa

SEQ ID NO: 815378 - DNA, 99 bp, Homo sapiens
gaggctccaagacctcatcaacaattaaggtaaatcttacaaaccattgtggttttatgggaggactacaaaaaaacaaaagcactggattgaccactc

SEQ ID NO: 815379 - DNA, 100 bp, Homo sapiens
atccgttcgggagaggctgctgccaaattgaaaaggtgcttagatgagtacgaagatgatgaagcagggcagaaagagcggaaacgagaagatgcaatta

SEQ ID NO: 815380 - DNA, 100 bp, Homo sapiens
atcctgcgggtgcctttgaaaatcaacgacaacttgagcacagacgatcattcccgagtgaggctgcagacaatagaaggagacacaaactcagactata

SEQ ID NO: 815381 - DNA, 98 bp, Homo sapiens
gctattttaggcgcaggaagttccagctctgcgccgatctatgcacgcagatgctggagaagtccccttatgaccagatcacccggaagttcaggctg

SEQ ID NO: 815382 - DNA, 100 bp, Homo sapiens
ctggcatattagcgctagccctgcagacagaggtgtgctgacgacctgctacaacagaaaattcggttccctcaaaattataaaggcaggaaagctcaag

SEQ ID NO: 815383 - DNA, 99 bp, Homo sapiens
ttaatcttgctgcaccgcagcagcccctccccaacccggtaaaatgtgggcgataattcctttcttacaaggaaattccacttacttggatgaccatgg

SEQ ID NO: 815384 - DNA, 99 bp, Homo sapiens
taaatcatgcgttttcatcctcagaagcaggccccttcacagatgtagtcactacaaatcttaaattgcgaaatccatcggatagaaaagtgtgtttca

SEQ ID NO: 815385 - DNA, 100 bp, Homo sapiens
tgtctctcaactggaaggacattttgacattgttatgtgtgctgactggaccctaataggagtattcataccagcagcagcagcagcagcagcagtagca

SEQ ID NO: 815386 - DNA, 99 bp, Homo sapiens
gatagtctccagcgggcctggactgtgggctggtgtgtggaactgccatgtgatcattctgggtgacctgaatacagcccaccgccccattgaccactg

SEQ ID NO: 815387 - DNA, 100 bp, Homo sapiens
gctgctattaaaaaggcctgggatgatctcaagaaatatttggagcccaggtgtcctcggatggttttatctctgaaagtgatgcagaagaccacaagcc

SEQ ID NO: 815388 - DNA, 100 bp, Homo sapiens
ctcccactgattctacattacgaatgcctaccgcaggaatgggatggcttttctagcctgctgatgtgacaactgtgatgtgcctgcaacaacaggaaag

SEQ ID NO: 815389 - DNA, 98 bp, Homo sapiens
atgaagaaaatgggtttctagtaatcaaaaatcttgtacctgatgccgatattcaacgctttcgtgctacctgggcgatgccttccgctgtgccagct

SEQ ID NO: 815390 - DNA, 100 bp, Homo sapiens
actggccaagaagggccttactccttcacagatcggtctgctcaccaggtggccagataccgcccacgtgcccccatcattgctgtgacccggaatcccc

SEQ ID NO: 815391 - DNA, 100 bp, Homo sapiens
ttatgccttcgtacacatggagcgggcagaggatgcagtggaggccatcaggggccttgataacacagagtttcaaggaaaatgtttataggaggcctta

SEQ ID NO: 815392 - DNA, 100 bp, Homo sapiens
cgaaaatggcagatattcaaaacgtcagcaaccaaaggcaccggccttgatgaggcaatggaatgatgatgtggaaacctgcctatgattttctgtatac

SEQ ID NO: 815393 - DNA, 99 bp, Homo sapiens
cagaagctcttagccagcactcgctatccacctccagggcaattgaaggaacagactaaaaatcgtgtcctggaaggaaactacaggtactaccaggga

SEQ ID NO: 815394 - DNA, 100 bp, Homo sapiens
tgggtcatgacatcactcgcctcttctactccaacattcagactgtcattaacaactggctcctcatcgagggtgtagttgctgctaaagatcatgatat

SEQ ID NO: 815395 - DNA, 99 bp, Homo sapiens
caacatttagaatttctacttattctgaggttggacgtgataagtatgagcctgcagctgtttcagaacaaggtgataaaaagggcaaaaagggcaaaa

SEQ ID NO: 815396 - DNA, 100 bp, Homo sapiens
acccagtacagaaggattcacgagaagaaaattggcaagagtggagacaaagagatgagcaggtaaaataccatgaagattttgaaaaaacaaaggggag

SEQ ID NO: 815397 - DNA, 100 bp, Homo sapiens
ctgctcccccaatgacttcaagccgcaggacttccaccgcttccaggaacatcatttacagcgagcaatttcagcacagcaagtgtttagagaaaaaaaa

SEQ ID NO: 815398 - DNA, 99 bp, Homo sapiens
gatctagtgcttctcgaaaaaaaccttcaggcggcccatggcacacgtcacatggagatgggcgtcaagaagttacctctcgtaccagccgctcaggag

SEQ ID NO: 815399 - DNA, 99 bp, Homo sapiens
gggtctcggagtccggaacccccaacccaaatctggaggatgaggaacccggagtctgcatttcttaccctgaaaagcaaaggcctcatctccatggca

SEQ ID NO: 815400 - DNA, 100 bp, Homo sapiens
gcgcgaatatcgtcatcgttagaaggagttaaagttcctcgtaattttcgcttgttggaagaacttgaagaaggacaaaaaggagtaggcgacggtacag

SEQ ID NO: 815401 - DNA, 100 bp, Homo sapiens
tgtcacccaatggatccattcctcccattcatgtgcctccaggttatatctcacagggctgctcttcacctatcgtggtgaagtttgctgacactcagaa

SEQ ID NO: 815402 - DNA, 100 bp, Homo sapiens
tgatgggtcattatgaccagagtattgccgcggtggaaatggagatccaggatgagaagactgataaaagaagaagctagctgaacagctgtaaaatgcc

SEQ ID NO: 815403 - DNA, 98 bp, Homo sapiens
caactctgggagagagcttactgatgaggaggaagaacgtgcaaaacgtgaggagctagagcgaatactggaagagaataaccgaaaaattgcagaag

SEQ ID NO: 815404 - DNA, 99 bp, Homo sapiens
ggcagcggcggcggcgcccgcgggtggtataaaatggcggatttcgaagagttgagggttcgatacaagaggctgttttcctagcgtggcttgctgcct

SEQ ID NO: 815405 - DNA, 98 bp, Homo sapiens
cagcagacatgaacgctctcgctctgggtccctcagaatatgactctctgcctgaaaatagcgagacaggggtggaccaagctttgccgcaagaacgc

SEQ ID NO: 815406 - DNA, 100 bp, Homo sapiens
caacctgatctcggctgtcggagtgggtgtcctcaagaaagttgaaaaacaaaggtcgctgggtccattggaatgaattaattaaaaatactaatttagg

SEQ ID NO: 815407 - DNA, 98 bp, Homo sapiens
tggtattttgaaatatgattaaactcctgatgctgcagcagaggctaagaatattaatggccagatctagttttgctgctgcagcccattgagagtga

SEQ ID NO: 815408 - DNA, 100 bp, Homo sapiens
agtcggacctttcccgctggcgcgcagcctcagctagatgggaaaactgacaaccatgcctgcaggtctgatatatgcatctgtaagtgtacatgcagcc

SEQ ID NO: 815409 - DNA, 100 bp, Homo sapiens
gagtaacccagtactacgcatatgtaactgagcgccaaaaagtacactgcctcaacacacttttctccaggcaacggcagcctttaacagttgagcacat

SEQ ID NO: 815410 - DNA, 100 bp, Homo sapiens
agaaggcttatgaggatggctgcaagactgtcgacctaaagcctgactggggcaagatgcaccctggaagccaacagtgaacgggacaatggtggccgta

SEQ ID NO: 815411 - DNA, 99 bp, Homo sapiens
atcagtgtgtcatctccaatcactttggttcatcctactctgtcaaagccaagcttacagtaaatacaccctgatatgtatgagagagcagtgctaaga

SEQ ID NO: 815412 - DNA, 100 bp, Homo sapiens
caagactacggagcataggaggaaaattcatcatctgtttggcagtcttgaacagaagctggctttggcagaacggattcgaggccacgtcctgtcattg

SEQ ID NO: 815413 - DNA, 100 bp, Homo sapiens
ggacctcaggagcctcctaaaaccacaggaaaatatgttggagaggattcattttcacatagtgccaagcagagatgcagacatgtgtacctctaaatct

SEQ ID NO: 815414 - DNA, 106 bp, Homo sapiens
gaaattcagatagctttagtgattgtctttgtgttgtctgcatttggaggagcaacaatgtgggactatacgctgaggactggatagttgcaaacaaagatctgat

SEQ ID NO: 815415 - DNA, 98 bp, Homo sapiens
gcagcaaggctgacgtggagcggtacatcgcctcggtgcagggctccaccccgtcgcctcgacagatcagctgtttcatgtattagccttgcacatgc

SEQ ID NO: 815416 - DNA, 100 bp, Homo sapiens
aaataatgaagaatagtgggaaaaccagatttaaaagaactaaaattgattacttgatgaactacatggtttacacgaacactcgtgaaactgctcaggc

SEQ ID NO: 815417 - DNA, 98 bp, Homo sapiens
gactcatcttgaagcccagaataagattaagggttgtacaggctctttgaatatgactctgcaaaggaaagaaggattgtccaaatgtggaagatgca

SEQ ID NO: 815418 - DNA, 100 bp, Homo sapiens
cgccatggagccgggggaggtgaaggaccggatcctggagaacatctcgctgtcggtgaagaagcgtatagcttctggcctgggcttggcctggattgtt

SEQ ID NO: 815419 - DNA, 101 bp, Homo sapiens
acatgtcagtgtcctttcacacccatgtgaaagaggcaccgaccgtcacgagctaacttcctggaagagctttccgtctattttcaaattctttaccgaag

SEQ ID NO: 815420 - DNA, 100 bp, Homo sapiens
tgaaatttgatgacctagatggaacacatgctctgatggtgcctgtagtggctgtgttgggttccgggggtggaacccgagccatgtcttctctgtacgg

SEQ ID NO: 815421 - DNA, 98 bp, Homo sapiens
tgaggactaccctgaccctccaataccccacagctattctagtgataggattcacagcttgagctcaaataaggaccgtataatagacgctggcccca

SEQ ID NO: 815422 - DNA, 99 bp, Homo sapiens
ctgagcgcaacacttctccgagccagcgagccagcgagccgccgacccgccgagcaaaatgggggacttgatctcatcttcatgccaggccttgggttt

SEQ ID NO: 815423 - DNA, 100 bp, Homo sapiens
gatttgacccactgattctactgtgcaattcttggtctgccatcatggatgttctcgcagaagcaaatggcacctttgccttaaaccttttgaaaacgct

SEQ ID NO: 815424 - DNA, 98 bp, Homo sapiens
gcaatgaccctgtggccattaatgcagtaatagtggccttgtcttcaaaatcatgggatgtagagactgcaacagaattgcttctgagtaactgaggc

SEQ ID NO: 815425 - DNA, 99 bp, Homo sapiens
aatgattgctcaagacttctttgtggctttgctaaaggacagaaggcggtcaccttctccttactatagtcgtggaggatacagatcacgttccagatc

SEQ ID NO: 815426 - DNA, 100 bp, Homo sapiens
tgacctctgcctaccatccataaaatactcattcccctctcaggaatgttttaaaggaagttgggctactcacaagttactacataagaaagcaagtaag

SEQ ID NO: 815427 - DNA, 114 bp, Homo sapiens
cggaggtggcaattcaccgaattcgaatcaccctaacaagccgcaacgtaaaatccttggaaaagggtgctggacgtcattgctcctccttatacctctgacttcgtgcaactt

SEQ ID NO: 815428 - DNA, 100 bp, Homo sapiens
atttgctttgtaaacttgagaatacattttgttgccaacaaaaagaagttaaaatgcattttgctaatcagtcaatagaacctttgggaagaaaagtgga

SEQ ID NO: 815429 - DNA, 100 bp, Homo sapiens
ccagactatccgtttaaaccccctaaggctgaccggttccctgatgtgttacctgcttctgctactgatccaaactgcagaacttctcattcatccccaa

SEQ ID NO: 815430 - DNA, 100 bp, Homo sapiens
cccgagacccatgtcagccccactggatgccgttaatgatgaaatggcaggtaattcacacttttggacagagcgcaccgcccccgtggaatcaccctac

SEQ ID NO: 815431 - DNA, 99 bp, Homo sapiens
ggcgggctgaggggcggcccccgggagagagcggccaggtggaggaggagcgcggaggcgaccgcagtctgaagatgatgagaaactgaaaaagaggaa

SEQ ID NO: 815432 - DNA, 100 bp, Homo sapiens
tttcaagctggtcatcatgatgaaacttagacacaggtgaaaagatcttctacctgatccgcccaacaaatgccaatctgactctctttgagtgctggag

SEQ ID NO: 815433 - DNA, 100 bp, Homo sapiens
tggacaaaaacatgagtcaatatgtattgtggcattcaaatcctagcactctgggagagactaagcctggagtaattcgcccagtacctgtaaaatccag

SEQ ID NO: 815434 - DNA, 98 bp, Homo sapiens
gcggcggccggcgggaccataagggcttaactcatatatttaacccccctccaaaaaatcgtattaaacttcacatccatggatttgtttaaaagccg

SEQ ID NO: 815435 - DNA, 100 bp, Homo sapiens
cccccgaagaagactcccccacatctgggctagtgaaaactttagtggctgacactcctctaactgcggtagatttcatgcctgatggagccactttggc

SEQ ID NO: 815436 - DNA, 100 bp, Homo sapiens
tatttagttctggggagcgcctcgtcgacatgagtgatgtggaggaaaacaacttcgagggcagagttactcactataaacaatatccacccaacacaag

SEQ ID NO: 815437 - DNA, 100 bp, Homo sapiens
tttgctctcatacccatcctcacatttacgagcttgcggccagtaatgagtgactttgccaatggactgtaagaatgattgatgttggctgatattggag

SEQ ID NO: 815438 - DNA, 100 bp, Homo sapiens
cagagaagaaatgaagaattggaggaacagtgtgtccagcatgggagagtacatgagacgatgaagcaaaggttgtggaaaggaggagaacccctgctga

SEQ ID NO: 815439 - DNA, 100 bp, Homo sapiens
cctaggattacctgaaggtgaaacagattgagccagaaggaagacaatgctgagttgaacaatgaccatagttgacaaagcttctgaatcttcagaccca

SEQ ID NO: 815440 - DNA, 100 bp, Homo sapiens
tcacaaattcaactcattctatggggatccccctgaagagttaccagatttctccgaagaccctacctcctcaggtaaagaacaagcacctttggagatg

SEQ ID NO: 815441 - DNA, 100 bp, Homo sapiens
ctttggcatggtcaagatagacctgaaaaccaagtcttgtagtggagtgattcgagagcctggaccaagagatgaacagcctgatgggccgcgttctgga

SEQ ID NO: 815442 - DNA, 98 bp, Homo sapiens
tcctgatctcacaccaaagcaagttgacatgtggcaaacacgtcttagtacacatttgcagggaatacagcagacagcccctcctcaacagacagtgc

SEQ ID NO: 815443 - DNA, 100 bp, Homo sapiens
gacctctccatgcagtcagtggaagtggcggaaacattggcaaatttggagcgacagatctatgcttttgagggaagctacctggaagacactcagatgt

SEQ ID NO: 815444 - DNA, 100 bp, Homo sapiens
actccacagaggataaatttcaacctccggggccacaatagcgagttgatgaaagttgtgaatgaaatgtgtcccaatatcaccagaatttacaacattg

SEQ ID NO: 815445 - DNA, 100 bp, Homo sapiens
ggaataaacatgcaatgaacccaaaaggttaaacacagtgggaatatcacttttgatgagattgtcaacattgctcgacagatgcggcaccgatccttag

SEQ ID NO: 815446 - DNA, 100 bp, Homo sapiens
gaaccatcagattagccagcagacccagctacgtggactagagttgactaagataacacgcacaggtccttcagcttgggaaaccaaaaagattcttgct

SEQ ID NO: 815447 - DNA, 100 bp, Homo sapiens
caacacagtatatgccacagtatcagtcttcacaagtctatggagatgtagatggtcagtaggacagaaggtaacattgatgactcgctcattggtggaa

SEQ ID NO: 815448 - DNA, 98 bp, Homo sapiens
aagtgagcagtccagaaagcggcttatcgaacagagccgggagttcaagaagaacactccagaggattatcgagattgcagcctgtcactccacacac

SEQ ID NO: 815449 - DNA, 100 bp, Homo sapiens
gaggttacagcccgagtgcaaaaagcgcctcaatgaccggattgagatgtggagttacgcagcaaaggaagcttgctggactttctgaaaagtgatgagg

SEQ ID NO: 815450 - DNA, 100 bp, Homo sapiens
tccccagcgcctcccatctcagacggaatctgtgacctcgaatcgcacagccctagcagatgctaatccagcgtgcgtcctggcagaggttgaagggggc

SEQ ID NO: 815451 - DNA, 98 bp, Homo sapiens
agcaaaaacaagagtccctctaaagcagctcaaaaggtactaggttttgacaagcttgcatcatgcgtgagtataagctagtcgttcttggctcagga

SEQ ID NO: 815452 - DNA, 99 bp, Homo sapiens
actctttaaagaaggcaaggagagaatgtatgaagaacagtcacaggacagatgggaatgatgaacaaccccaatccttatggttcaccatatactcag

SEQ ID NO: 815453 - DNA, 100 bp, Homo sapiens
atctccatgcattagaacacacatactctgataaagtggcccaccctcaggaccctcaccacccatcagagaagcctgtcattcactgccataaatgtgg

SEQ ID NO: 815454 - DNA, 101 bp, Homo sapiens
cgtgaccgagagcgcgaatatcgtcatcgttagaaggaatgcagctatatgtaaaccaaaggaagattttgacttcatcttattcagagctttataaggaa

SEQ ID NO: 815455 - DNA, 98 bp, Homo sapiens
cgtcatggcctacccgggatacggaggagggacgactgcaagaacattgccaacatcatgaagacactcgcctatcgaggcttcatcttcaagcagac

SEQ ID NO: 815456 - DNA, 99 bp, Homo sapiens
tcttcctcattttcacatcagtgatgtttgggacccaggtgcactccatctgcacagatgagacgatacttggtgcttgaaaaactgaagaaggaagac

SEQ ID NO: 815457 - DNA, 123 bp, Homo sapiens
cgcggcggtggcggcgactggccggcggggctgaccacttaccgcagcatccaagtcggccctggcataatcaccagcaacacccgggacaataatacgggggccacctacccccacctgaac

SEQ ID NO: 815458 - DNA, 100 bp, Homo sapiens
gtcagataaaaatctgcaaatccgcctgaagcggccctccaggcactgaagcgtaagaagaggtatgagaagcagctggcgcagatcgacggcacattat

SEQ ID NO: 815459 - DNA, 100 bp, Homo sapiens
tgctcctgctcctggtggccgccagccggcgcgcagcagcggtttccaacctagatgaggaaagccgatggacagtccactacactgccccgtggcacca

SEQ ID NO: 815460 - DNA, 100 bp, Homo sapiens
ttctggctttggccactttacttcctgccagaattcccatttgcagaaaccctatgagattaacctgatggaggaactaactctgaagggagtaacccag

SEQ ID NO: 815461 - DNA, 132 bp, Homo sapiens
ctttcttcatatggtggcaaagctgctggaatcgggggaaccaaagcttcaagttcttggaacaaattctattgcttcctccacagtttcctcaggaaaaaccagtgatcagtgtttatccaccaatacgac

SEQ ID NO: 815462 - DNA, 98 bp, Homo sapiens
gatgctcaattgagaagaacacttagtccagagatgatcacagtgacttctgcggttggtatcccagtcacccaggcctgcctcatggaggacatcga

SEQ ID NO: 815463 - DNA, 98 bp, Homo sapiens
ggcaaatatggaactatggctgaagatgaccaaaatgttagacttgcttgaggacttcttagactatgaaggctacaagtatgagcgcatcgatggtg

SEQ ID NO: 815464 - DNA, 100 bp, Homo sapiens
gaacggatggatgtgatgcctgctagccaaaaggcagcgtcaccctttacaccagaaagctggcgggcactatggggaaaaaacaaaacaagaagaaagt

SEQ ID NO: 815465 - DNA, 100 bp, Homo sapiens
ctgaaggaagctgccttgtacccacatctcccgccagatttggtcgtattgggcgcctggtcaccagggctgcttttaactctggtaaagtggatattgt

SEQ ID NO: 815466 - DNA, 100 bp, Homo sapiens
gcgagctagccgggagttacaccgccaccgccaggttgcctgggtgaagtggatggactcctcagctccattcaccatggtaccagacaccaactactgc

SEQ ID NO: 815467 - DNA, 99 bp, Homo sapiens
gatttggcacctatgcgcctgcagagggtttgaagaagatctctgcctacatgaagtccagccaattcctccgaggtcttttgtttggaaagtcagcta

SEQ ID NO: 815468 - DNA, 100 bp, Homo sapiens
tcgtcgcggcggcggtggagatcgcaggtcgctcagtctgaaccggacggcttttctcatttccacttgtacgtgtgcgctgcttttctcgtgagatgga

SEQ ID NO: 815469 - DNA, 100 bp, Homo sapiens
tgagtttgtagacatgaaggtccatgtaccctgtgaaaccctcgaatacattgaagccaactatggtttggaaatatcttgggatggagacagttttgta

SEQ ID NO: 815470 - DNA, 100 bp, Homo sapiens
cagcatgaacaccttctccgacagcagcacacccgaaatgcacaattttgaggaagagttaacttgtcccatatgttatagtatttttgaagatcctcgt

SEQ ID NO: 815471 - DNA, 99 bp, Homo sapiens
gccaatatccacaccttttctgcctgcctagtcctggaatcaagatgtgagaccaagaaattatttctgaagaaagaaatttatgaaatagaatcaacc

SEQ ID NO: 815472 - DNA, 101 bp, Homo sapiens
acattcagcatccctgtctggtatgccttctcgggaaacagtgcttcttagtcctacgtcagcagcagtttaatgtccaggctcttgtggcggtgggagac

SEQ ID NO: 815473 - DNA, 100 bp, Homo sapiens
aactagaccggagtggaaccaggaaaggacacattgtgatcaaggaattagcagcaaaagtggttcagatgttttatgtggctgagccaaagcaagtgcc

SEQ ID NO: 815474 - DNA, 99 bp, Homo sapiens
ggaaatcagccctggacctggcagatccttcagcaaaagctgtccttacagcaaaacaagctatcgatcagggaagatctccagttataatagataaca

SEQ ID NO: 815475 - DNA, 51 bp, Homo sapiens
ggaggagccttctcaagaacagagagtcacaatggcttcagcctttcgcct

SEQ ID NO: 815476 - DNA, 98 bp, Homo sapiens
gactggcacccagacagcgagcacattcttgctacctccagtcaagacaattctgtgaaggttcctaaaagtaaagctttagaggccaccaaattggc

SEQ ID NO: 815477 - DNA, 98 bp, Homo sapiens
ggctgccggctgacgtctccttgcgatggagcatatccggacgaccaagaaactggcagacctttcacttcgtatccaacaaattgaaacaactctca

SEQ ID NO: 815478 - DNA, 100 bp, Homo sapiens
gaagcagcccttacaagttgcaaaggttgatatctgtgcagaagaattggggaataatgtaaagcccgctgttactttgctaggaaacatacatgctgtc

SEQ ID NO: 815479 - DNA, 100 bp, Homo sapiens
acagaggaagaggaaggaaaagacaatcattgcttcaagaatgctgacccttgtagaagtgtcatggagaaactccagctgggcccagagattctgcagc

SEQ ID NO: 815480 - DNA, 99 bp, Homo sapiens
gaaaaaggaaaaataagcttgaagaaactttccctgcctatttacaagtacttacaatttcatcagaaattcctaaaagaattcgaagtgccttaaaaa

SEQ ID NO: 815481 - DNA, 100 bp, Homo sapiens
ctctctccgctcgattttgtcaccgttatgtgggaagcgaatccaacaccattcgcttttcacccaagatgatttgatgtcttataaaactctgatgaac

SEQ ID NO: 815482 - DNA, 101 bp, Homo sapiens
actgcaggctgatttcatcggggttgtccgaaacaatgaacagaagatggctgtgccacccacgtatgccgatcttggcaaatctgccagggatgtcttca

SEQ ID NO: 815483 - DNA, 118 bp, Homo sapiens
gttgagagtccgagagctatttcccgcaccaatgagaatgacccggttggtcaaagaaaaagtgatgtatgaaaaagaggcaaaacaacaagaagaaaagattgaaaaaatgagagct

SEQ ID NO: 815484 - DNA, 100 bp, Homo sapiens
cccggcgttcttccgctggctcagccgcaagtacccgtccatcatagtcaactgcgtggaagagaaggcgttggagaccagggccagccctggccacacc

SEQ ID NO: 815485 - DNA, 99 bp, Homo sapiens
gcagaggcacggaaggagtcacggggcgcgcatgccagggaagactacaagtttgtcccgctggctggaagcctggcagtgacacgattaagcccaacg

SEQ ID NO: 815486 - DNA, 98 bp, Homo sapiens
cactgtgtgtggccagtcatttaccaccaatgggaacatgcacagatttgggccaggcttagtcatctattggtatggatttatccaggagctggact

SEQ ID NO: 815487 - DNA, 100 bp, Homo sapiens
agaaccctgtacaatttgatagtcattcgtaatcagcaggccaaagactcagagattctcgctgaagtctgttaattctactttttgagtacttatgaat

SEQ ID NO: 815488 - DNA, 98 bp, Homo sapiens
gcttcgcgagcttgaacagagggtctccctccggagggcactcttagaacaaaagagagagtctacaaggagattgaacaggtggttggcccacatcg

SEQ ID NO: 815489 - DNA, 100 bp, Homo sapiens
ggaggacccgggacaccgcacagccgggaaatgtggtgaagcagcgcttgcagatgtacaactcgcagcaccggtcagcaatcagctgcatccggacggt

SEQ ID NO: 815490 - DNA, 98 bp, Homo sapiens
gcggcaagatcgtgtatcccacggagaaggtgaactgtctggataaggctcagctgtcgcaggccctggaggagctgggaggccagaaacaaagagca

SEQ ID NO: 815491 - DNA, 98 bp, Homo sapiens
aaaatgaccctgggtatgatctggaccatcatccttcgctttgctattcaggatatttcggttgaagagccagcccctgggcaacaaagtggaaatgg

SEQ ID NO: 815492 - DNA, 98 bp, Homo sapiens
ttactattttctccagtttaacaagttgagacatttgggaaatgatgaagtgcacattgtttggtcagagcatactagagactacaggagaggaatta

SEQ ID NO: 815493 - DNA, 98 bp, Homo sapiens
gaagcgtgaggccggcatcgtctttccgtcctctgaggcgacggccgcggctgcacagatgtccagaaggcttcttgggggaatattgtcaacatcga

SEQ ID NO: 815494 - DNA, 98 bp, Homo sapiens
atcctgtaaatacgaatctttccaaaggagatgcccgaggaccattcttagtggcactggggaaatcttggcacccagaagaattcaactgcgctcac

SEQ ID NO: 815495 - DNA, 100 bp, Homo sapiens
ggcgagtatacatgcaaagcttccaatgagtatggcagtgtcagctgtacagccacactaactgtgacaggatcgctgtctgccctggtctaccagcact

SEQ ID NO: 815496 - DNA, 100 bp, Homo sapiens
ggaattatcaaaggaggctgagaaggagcagccagtgaggtgtgtagaaaaacaagagtaaagccaatcccagctgaaggaatcaagtcaaatccttcca

SEQ ID NO: 815497 - DNA, 100 bp, Homo sapiens
aatggacaccttctaagagtttggcgagtcagtgactgaagcgcccgtccattccaaggatcaaaaccattcaagtgcaagatatgccattttgcaacag

SEQ ID NO: 815498 - DNA, 100 bp, Homo sapiens
cctgagtagctatgactacggttgcagataataatgaagatgttgatggtgatggtgttcatgaaataacaagccgagatagcccggtttatcccaaatg

SEQ ID NO: 815499 - DNA, 51 bp, Homo sapiens
ggttacgcagcaaaccatccagaagttttacatgtggcacccataaaagat

SEQ ID NO: 815500 - DNA, 100 bp, Homo sapiens
tagcagaaacagaggagttggagttgctactaaaaagagaggtgcctttatctgatgatgatgaaagttacacagctgttgcttttaaaaatgccaaaca

SEQ ID NO: 815501 - DNA, 100 bp, Homo sapiens
tactgctgtagaatggggataaaaacatcagagggcacaccaggtactacagtgcaaccattctgcagatgtctggtgttgaagatgatagacttgcaat

SEQ ID NO: 815502 - DNA, 98 bp, Homo sapiens
tcactccgatttaaggtgcccgagtccacgctgatggactgccgtagacttgataaaaatggtgatgtgtgcatttctattcttcatgagcctgggga

SEQ ID NO: 815503 - DNA, 98 bp, Homo sapiens
ccggcgctctcctggctcccttctgccccagctccgtctcggcggcggcgggcctgaccgccgctgcctacagagtcacactcaatcctccgggcacc

SEQ ID NO: 815504 - DNA, 100 bp, Homo sapiens
attgaacttcccagcactcgaaagggaccgaaatggagagcaaaggaatgaagccaagagtgatgaaagaagctgtatctactccatcacgaatggccca

SEQ ID NO: 815505 - DNA, 98 bp, Homo sapiens
tcacctttccggagcaggggaagctgccccgtgcccgggagggagcgggcgcaccgcggcccccaggacacgcgctgctctactgaagaaacacgaag

SEQ ID NO: 815506 - DNA, 100 bp, Homo sapiens
aaagataaaatcttttgtgaaagtgtataactacaatcacctaatgcccacaaggtccctttctagagataggagaagagagagatcgctgtctcgggag

SEQ ID NO: 815507 - DNA, 100 bp, Homo sapiens
atccctactacaggactgcggacaagggctggcagcatgcttttcacttccactgcatctctcgctggctcaaaacacgacaggtgtgtccattggacaa

SEQ ID NO: 815508 - DNA, 98 bp, Homo sapiens
gcggccagagcgccggcaagagctcggtgctggagaacttcgtgggccgctatcccccatcctcatcactttcctatctggctgctgcagcagaaaca

SEQ ID NO: 815509 - DNA, 100 bp, Homo sapiens
tactactgtgccttgcttatgtttgttaggaccaaacctcaaagcatggctaagagtgttcagtagaaatggacgtttgatgcaaatgatttgtatcagg

SEQ ID NO: 815510 - DNA, 99 bp, Homo sapiens
ggcaaggagccacaaagaagaaaacatttcttttaatttttaaacttggtttgaaagtcaggccttgaaaagaggatagaccaggctgtggaggagtgg

SEQ ID NO: 815511 - DNA, 100 bp, Homo sapiens
cagcctctaccttgcgagccgtcttccccaggcctgcgtccgagtctccgccgctgcgggcccgctccgacgcggaaggcacattgcaagcaacccgtgc

SEQ ID NO: 815512 - DNA, 100 bp, Homo sapiens
aggtgaagacagatcatgggactgataaattgggcacacgtgtttcacgttgacaggtttgcttgggacgctagtaaccatgggcttgctgacttagcca

SEQ ID NO: 815513 - DNA, 98 bp, Homo sapiens
caagcgaacgcaggaaagtcaggctaaaagtgtctgctgctgctgccgccccccactccgcctccgggagaggctctttaagggtcacccagagactc

SEQ ID NO: 815514 - DNA, 100 bp, Homo sapiens
cggcggcggctgcggtcgaagaaggggacgccgacaagattcttctgctgatcgacattgagcagtcctacatcaacacgaaccatgaggacttcatcgg

SEQ ID NO: 815515 - DNA, 119 bp, Homo sapiens
cttaatgctgtcttaactagtgtaggaaaacggctcaacccaccgctgccgaaatgaagtataagttatttgctggtataaaggatggagaaagcctgcagctctttgaacaaagttct

SEQ ID NO: 815516 - DNA, 98 bp, Homo sapiens
gctttccaagatggcgacggagggaggagggaaggagatgaacgagattaagacccaattcaccacccgggaagttctccgggagatgttgcataacc

SEQ ID NO: 815517 - DNA, 51 bp, Homo sapiens
catcaaagttatggatgtcactgagagtctctggtaagaagagtgaaagca

SEQ ID NO: 815518 - DNA, 98 bp, Homo sapiens
tatatcaaagaggctgtccgactggatgacgtcgctgttcattactacagattgtataaggttctcagaggcactgtgactgacttccctggatttga

SEQ ID NO: 815519 - DNA, 100 bp, Homo sapiens
ctccaccctgggggagctgaaacagaacctgtccaggagctggcatgacgtgcaggtctctagcgccttcaccagcctccaccaagacgggacaagcagg

SEQ ID NO: 815520 - DNA, 98 bp, Homo sapiens
ccctgaatcttggtgtttggacataggaggtctagatccagaagaagctcccgaaggcattatacccggtcacggtctcgctcccgctcccatagacg

SEQ ID NO: 815521 - DNA, 99 bp, Homo sapiens
tggacaccacacacatcatcagtctgaatgccgggacattctgcttcctgtcatcaccaaagagctgaaggagctgctggagcagaaggatgacatgca

SEQ ID NO: 815522 - DNA, 100 bp, Homo sapiens
atgcaatcttcaggaaagtaagagggtccataattcagcagccaaatctttccctcgaaggtttgttttgcctttaaatgtcagtttgaatgcccctgag

SEQ ID NO: 815523 - DNA, 98 bp, Homo sapiens
ggaagaacttcttcagaattagaaaggagctgcttcccaataaggaaacacatgatggaagtggttcattgcatgatattcaactgtcattgccatcc

SEQ ID NO: 815524 - DNA, 98 bp, Homo sapiens
cttcctcctctcgaatgcagcagccacagatctctgtctacagtggttcagaccgacatgctgtacaggtacgcaataactgtttggtattttgatgc

SEQ ID NO: 815525 - DNA, 100 bp, Homo sapiens
aaggatgcagctcagggcgaagtggaagcagagagcccgggccctgtgccggagttggcatcctttggaagagttcgtgaaagctttctgcccagagctc

SEQ ID NO: 815526 - DNA, 118 bp, Homo sapiens
cgctgctgctgaggagaggagcgtcaacagcagcaccatgggaagaaaacaggcagattttggcgcggcaaaagtcaaactcacagtcggactcccatgatgaggaggtgtcgcccac

SEQ ID NO: 815527 - DNA, 100 bp, Homo sapiens
ctttggttaaaggagctgccgtcagatttcaatgggacagatgttacaagattttggaaaatttcttgggatgtttcttcttgttttgttttctttcaca

SEQ ID NO: 815528 - DNA, 140 bp, Homo sapiens
ggaagcgtttttgaagactgttgcccaaaactacagttctgtcactcacttacacagtattgggaaatctgtgaaagggtgcttttcaggaaacaatgatcattttttggcaattaatcagaagaagagtgggaagccgg

SEQ ID NO: 815529 - DNA, 99 bp, Homo sapiens
ggagcgaaccaacaagttcatcaaggagctcattaaggacggctctctgctcattggggcgttgaggaagcagttcagagccccagttgcagacgactt

SEQ ID NO: 815530 - DNA, 51 bp, Homo sapiens
gcagcggcagcggcaagcaccctctagccggcccggtccttggactgaaag

SEQ ID NO: 815531 - DNA, 98 bp, Homo sapiens
catggtgtctgggcccttggcactccgataacgaaggaggcccaacttcattcaataaggagcctgacggatttatcccagacggtagaacaaaagga

SEQ ID NO: 815532 - DNA, 98 bp, Homo sapiens
tcactttagaccctccacctaattgcagtatacaattggaccgtggatgaggtggtacagtggctgatcacatatgtggagctgcctcagtatgagga

SEQ ID NO: 815533 - DNA, 98 bp, Homo sapiens
gataatgcctttatgttacttactcaggatggatgtggacagtttccatatgatgcaaacatccagatacactgggtatcatttctggatgggcgcca

SEQ ID NO: 815534 - DNA, 100 bp, Homo sapiens
cagctctggccatgccagcacctcagtcagcatcagcatggggcatgcaggggcaaagaaatgcaagtcaggggaagcctcgaaggtgcctgaaagaaac

SEQ ID NO: 815535 - DNA, 51 bp, Homo sapiens
aaatacaagtattcagctcttattgagcaggagagcctgtcctgcctccag

SEQ ID NO: 815536 - DNA, 100 bp, Homo sapiens
tttttcttgcaaaccttgctttggattttatgtgctacagtctgcggaacggagcagtatttcaatgtggagatattgatgatgttaagaagttcaaacc

SEQ ID NO: 815537 - DNA, 98 bp, Homo sapiens
ggagacccaaggaacagtgccaagttagatgccgattacccacttcgagtcctttattgtggagatggtggagccagggcaagatttactgcttgctg

SEQ ID NO: 815538 - DNA, 100 bp, Homo sapiens
catgtatcagccgaggtggagctgcggggccctggcatgaaaggccctgggaggagcggggacactgaggacctctctccaaattggcctctcaactcac

SEQ ID NO: 815539 - DNA, 100 bp, Homo sapiens
aggagccatcagcttcagctccagctccgctctcttcggctgccccaatccccggcagctctctcagcaagccagggctgagcaggaagaagaattcatt

SEQ ID NO: 815540 - DNA, 100 bp, Homo sapiens
ctgccaatccagcaattttgtcagaagcttctgctcctatccctcacgatggaaagcaggcagatggcttgtgcagaagattggagaaggcttgtattag

SEQ ID NO: 815541 - DNA, 100 bp, Homo sapiens
gacctatgaatatccagtttgagccatcggatctaagatccaaaaggttaaaaatgtgtctgcaggcacacaggacgtgccttcacccccatctgactat

SEQ ID NO: 815542 - DNA, 98 bp, Homo sapiens
cggaggacggggccgggcgacctgggcaccagcaggacccgaggccaggagccaggggcccagaagttggttgaatctggcgatgtggaacccatgga

SEQ ID NO: 815543 - DNA, 100 bp, Homo sapiens
cagtttgaagctgaggattttcaagcagacagatctgggaatcactgaggatgctctggggaagcatgctgagctcaagacaattctcttccaggcgaag

SEQ ID NO: 815544 - DNA, 123 bp, Homo sapiens
tatctgagtcaaaattttataacctgggcttgggatctgacaaaggactccaacagagcaaggtagctacagcaagctgggtagcaggcagatccaaaggatatcatgaagtttccagggcct

SEQ ID NO: 815545 - DNA, 99 bp, Homo sapiens
acaatttcaccaacatgttaggctatactgatcatcagttcactgagctcacgcgcctgtacctcaccatccacagtttaagtgctgtggggctgctaa

SEQ ID NO: 815546 - DNA, 100 bp, Homo sapiens
gactcttttggcagaagaggctcgaaagcttgctgaacgtaggagagaagtttgctgaggaatgccttcaagcacaaagtgatgaatgactgccttcaag

SEQ ID NO: 815547 - DNA, 100 bp, Homo sapiens
ctccagagtagctgggattacagagcaactaagaggtctttcttggctctatgagaacctggtgggattcctgaagataaagtccacaaaaatgaagctc

SEQ ID NO: 815548 - DNA, 100 bp, Homo sapiens
cttgggcacagtgccctggctcagggaccttcctgggagtgaggcagcagtgaggatgccagagttcatgggtttctagaagacaagttttcaactgcag

SEQ ID NO: 815549 - DNA, 98 bp, Homo sapiens
tagtgattcaatcagcagcagcagtagtaccagcagtgacaggtgcatgctattatgatgctaatcagtctatgtatgtgtttggaggctgtacccag

SEQ ID NO: 815550 - DNA, 99 bp, Homo sapiens
tgaggaaagctggtgccatcacactcccgtttgttaccgtggccctggccaagcactggacagcggcgattggtgtgagttcttgatacgaatgaaagg

SEQ ID NO: 815551 - DNA, 100 bp, Homo sapiens
gaagcgttcggaaatggcaacttgcgcggtggaggtgttcgggctcctggaggacgaggtttagatcctgataagcatcttgggaaaaccctggatcaaa

SEQ ID NO: 815552 - DNA, 98 bp, Homo sapiens
gaagatcggcgtgaaggtcttcttggtgaacatccatgtgagaactcaacagaggcaaaagcagtagattctaacaatcagtcgaagtccccactgga

SEQ ID NO: 815553 - DNA, 98 bp, Homo sapiens
ttaaccaacctcagctttacaaaccctgaatttataactgagaacgaatgcaggaatttgggaactgagctgtgcaagtgctgaagaaggagatttgt

SEQ ID NO: 815554 - DNA, 98 bp, Homo sapiens
gccccgcccgcaggtgctatgctgtgggccccgctcaggctcttgcagccaatgccggaacaggatttgctgttgctgagcctcaaatcgcaatgttt

SEQ ID NO: 815555 - DNA, 100 bp, Homo sapiens
gttggcccagaaactacaggctgaaaagcatgacgtaccaaacaggcacgagataaggatctgggattggcacaagactctgctaccagcacaaagagcc

SEQ ID NO: 815556 - DNA, 99 bp, Homo sapiens
ggcgagaggcggcgccgctcccaagatgtcgcagacggccatgtccgaaacctacgtgctcctgatatggaagatatattgactgaatcagaaattaaa

SEQ ID NO: 815557 - DNA, 98 bp, Homo sapiens
agccggccccggcgaggaggcgcggaaccatggccgatgggggcgagggcgaagacgagatccagttcctgcgaacttaccttccactggaagaatct

SEQ ID NO: 815558 - DNA, 100 bp, Homo sapiens
cgagaaactggacaaccaacggctcaagaatttcaagaacaaaggccgcgacttggaggatccagtttatggaaaaggaaaacttggagaaatccaggga

SEQ ID NO: 815559 - DNA, 100 bp, Homo sapiens
ttgatctggagccagaaggaagagtgtatgtgatcatcgatctctcagggtcgtcgggtgaagtgcatataacctacagcaagcgagcatggcagctggc

SEQ ID NO: 815560 - DNA, 105 bp, Homo sapiens
ttttatggaatcctgcaaagtgatgcctcaggcaaggggagagccagttgcgcagagccctgcaaccagcagtccagggagaagtggtgaatgtcatggagccca

SEQ ID NO: 815561 - DNA, 100 bp, Homo sapiens
tttttaagactctcaggcttactgtggatctggattctaaggcaacacttccttgaagaaacaagcttacagatccccagctcaagggtatagtgaccag

SEQ ID NO: 815562 - DNA, 99 bp, Homo sapiens
ttggaccccctaagcaagctgccgcagatcgcaggaccgtggagaagacttggaagctcatggacaaagtgtggctgtttggtggccattctccgtccc

SEQ ID NO: 815563 - DNA, 98 bp, Homo sapiens
ataggcaggttaccatcactggatctgctgccagcattagcctggctcaatatctaatcaatgtcagggtgccagcctgggtgagcaatggggatgca

SEQ ID NO: 815564 - DNA, 99 bp, Homo sapiens
cggcacaaagaacacaagaaggagaaggaccgggaaaagtccaagcatagcaacagatgaacgactttcgaagtaaaatgcaatcaatatttccaacaa

SEQ ID NO: 815565 - DNA, 98 bp, Homo sapiens
ttcaggggagcagtatggaattcattctgatgtctggagcttaggaatctcttttatggagatgtcatttgtcagagtgaaccgctgtggtccccgag

SEQ ID NO: 815566 - DNA, 99 bp, Homo sapiens
agaatttcagcagttctctgatttttatattttattcctcttcctatccaatccctgccttttgagtccaggtgcattgttggaaactgttactacatt

SEQ ID NO: 815567 - DNA, 98 bp, Homo sapiens
tcacctttcaaggagtcctgtgatccatcactcggattggcaggacctggggccaaaagccaaggtactccaaagattcaggtttactcacgtcatcc

SEQ ID NO: 815568 - DNA, 50 bp, Homo sapiens
catcaaacagctgcggaagctgcaggcccaaggaagaagtaactgtcaag

SEQ ID NO: 815569 - DNA, 100 bp, Homo sapiens
tcactggattatgttataatgtggaacctggatgaatgtagagagaaagtacttcaaggtcctcagaatggttggaatgaccctccagctttgaacagag

SEQ ID NO: 815570 - DNA, 99 bp, Homo sapiens
aaaaacagtgctcggaaagcatctattgtgaaaaacctaaaggataccttagaaaacatccagtacagacctttctgatatccctgctctccctgcaaa

SEQ ID NO: 815571 - DNA, 99 bp, Homo sapiens
gcgggcggtggaaggcggaagtaggagaggagttcggcgccgcttctgtggccacggcagtaaaaggcaatcgcaaatgtgagttgaactgccaggcaa

SEQ ID NO: 815572 - DNA, 100 bp, Homo sapiens
ggatgatcatctctggcacaacagctcacttttcttccaaggataagttgcaagaggtactttgcagcaactcagtttgaacccctggcagcaagatctg

SEQ ID NO: 815573 - DNA, 99 bp, Homo sapiens
tatgatagaagctatataaagtcaagtgtccattttctttcaactatatttgagcatacccaggcatgtggagaccccaaggcaaaaccatcctatctt

SEQ ID NO: 815574 - DNA, 100 bp, Homo sapiens
agatacaaacatgtggagcagaatggtgagaagtttgtgaggacaagaattttgggcagatttgaatgccatgaacgtgtatgaaacaactgaatttgac

SEQ ID NO: 815575 - DNA, 98 bp, Homo sapiens
cagtccacccaaggtctcctcggatcgcctggagaggcactcggacctggtgaaagaagaacgtccagaaaaaataccagatttaaaattattggtag

SEQ ID NO: 815576 - DNA, 100 bp, Homo sapiens
ctgctggccgcggagtgcgcgcttgtggcccaccctcaggaccctcaccacccatcagagaagcctgtcattcactgccataaatgtggggagccttgca

SEQ ID NO: 815577 - DNA, 98 bp, Homo sapiens
ggaaagtgccagggcagaggccccgaggccttcactatcatggaccagaacagggatggcttcattgacaagaacgatctgagagacacctttgctgc

SEQ ID NO: 815578 - DNA, 99 bp, Homo sapiens
gcgggttccggagatcccggcctcacttcgtcccactgtggttaggggtgacgagctcatcttcttggaccctcatacaacccagacctttgttgacac

SEQ ID NO: 815579 - DNA, 99 bp, Homo sapiens
accaacaacagcgttgctcttagaacaccacgaacaccagcttcccaggacagaattctgcagcttggattccttagcaccaccacagctcagccagaa

SEQ ID NO: 815580 - DNA, 98 bp, Homo sapiens
actggctactgatgtgtctgtggaggatgaggaagggactggaagccccaagattggctctaccagtgcacctggacagggaggaatcctggctcagc

SEQ ID NO: 815581 - DNA, 98 bp, Homo sapiens
tttgtcaataactatctttcaaaaggagtattataggatattccaagataaatgcatgaatactaccttgacggaatgtgatttctcaagtctttcca

SEQ ID NO: 815582 - DNA, 100 bp, Homo sapiens
atcttgatctggagaaaaactggatgttggtagaaaaagcaagagtttgttatatagcaactttcaaacctctggttgaaagaaatatacccagttcagt

SEQ ID NO: 815583 - DNA, 116 bp, Homo sapiens
catttgaagcccatttccagagagctgcggcgggagctgtatggccgccgtcgcaagaacaattctgtggtgttcttggtcacacatttatggagtttctgaagggcagtggagat

SEQ ID NO: 815584 - DNA, 98 bp, Homo sapiens
atcgtctccaagaggagtttgaagctacccttggggcatctgatcctaattcccttgctgatgatattggaattcctcctatgagtggaacaggaacg

SEQ ID NO: 815585 - DNA, 100 bp, Homo sapiens
gcatgacagcctgcatgactgttcacattggaaaaattgatgggacacttgggtgttgtattgtatgagtatttgggtgaagagtaccctgaagtattgg

SEQ ID NO: 815586 - DNA, 100 bp, Homo sapiens
cagcagctaccagcgacgttggcgacgcagccaaacaacaagtttggaaaatggggtatttcctagatgaggcttcggctcaccgagagtgacaagctgc

SEQ ID NO: 815587 - DNA, 100 bp, Homo sapiens
ctgctttgaagacttagcagagggagtaactattcccagtcagaggcgctatgtgtattattatagctacctgttaaagaatcatctggattatagacca

SEQ ID NO: 815588 - DNA, 100 bp, Homo sapiens
acttgctggagaaacctaactcatcagtggctgcaaagaatgcagtaatagtggccttgtcttcaaaatcatgggatgtagagactgcaacagaattgct

SEQ ID NO: 815589 - DNA, 100 bp, Homo sapiens
aggaacactgccggggcccaaccacaagacgactcaataggaggaaggaaaaaagaaggggcatggctggagcagaatgggaacgagaacgcagaaaaac

SEQ ID NO: 815590 - DNA, 100 bp, Homo sapiens
tcttcgagctgaacctgaggaccattattttttaatgcaacagccaactcagtttataaatccagaaacacctggctatgttggatttgcaaacctcccc

SEQ ID NO: 815591 - DNA, 98 bp, Homo sapiens
gtttctgcggaggtacttcattctggacacccaggctaactgcctcctctggtatatggacaacccccagattgtcactgctgttccaagggcacacg

SEQ ID NO: 815592 - DNA, 100 bp, Homo sapiens
atggcggcgccctgtaggctggagggactgtgaggtaaacagctgagggggaggagacggtggattgacttgatgcacaacatcacaaaggcgatttttg

SEQ ID NO: 815593 - DNA, 98 bp, Homo sapiens
cgaaacagccagtttccaatgttagagccatccagcagggagaaggttttaaggtgaaaacgaagaaagaaatccggcatgtggaaaagaagagccac

SEQ ID NO: 815594 - DNA, 100 bp, Homo sapiens
aaaaactgaatgaacggcttgcaaaactttcagatggagtggctgtgctgaagtttaagtgctgtggggctgctaactacacagattgggagaaaatccc

SEQ ID NO: 815595 - DNA, 100 bp, Homo sapiens
agatgtaggcttggagcagaatcaccaagcatcgccagcaccagcttattgcaggagtgaccaggacactacctcctagaagtaatgcccacagaaagcg

SEQ ID NO: 815596 - DNA, 98 bp, Homo sapiens
cgaccgctacgctgtctactggaacagcagcaaccccagctaagaaacctttccagcttggacctacgtcatatcactgaactggataatgaaaccgt

SEQ ID NO: 815597 - DNA, 100 bp, Homo sapiens
atatgggatgctggaggacatctgggggccacaaatgctccttctcctggagacgcaactcaaggaaaatgttggggcttttcaggaagcataataagat

SEQ ID NO: 815598 - DNA, 100 bp, Homo sapiens
gccacctgcctttgacctttttgaagcctttgcaaaatgacaggatcacagaatgtgaattttgaacagatctgaaaagttattaagttcaactccacag

SEQ ID NO: 815599 - DNA, 98 bp, Homo sapiens
gggtggcccgccacagctctgtcagcaaggaggagaaggaaaaccgggaggtgggagactggcgcaagaacatcgatgcactgagtggaatggagggc

SEQ ID NO: 815600 - DNA, 100 bp, Homo sapiens
agaactgatattttatattgaaatggatcctccaggaatagccaggccagaagaaggaaggcctgtggtgagtgggacaggaaatgacatcaccacccca

SEQ ID NO: 815601 - DNA, 60 bp, Homo sapiens
tatctgttcagcgcctcacgaaatccaaaggaagaggatcacctagcccgggtagaagag

SEQ ID NO: 815602 - DNA, 100 bp, Homo sapiens
gtggatcaagcaggttttaaatcaagatttaacattccaacacataaaaattatttatccaacagctcctcccaggtatagcgaaggagatactgagaag

SEQ ID NO: 815603 - DNA, 99 bp, Homo sapiens
agaaaacgagcgcgagagggggaaaagcgagcgatcgagcgagcgcgcgcgcgaaaactccgggcagttcatacagtcaccaggaagcccatgtcttgg

SEQ ID NO: 815604 - DNA, 99 bp, Homo sapiens
agggcacaccaaactccatctgcctgacatttaccccggtaactgctgggcatttaaaggctcccaggggtacctggtggtgaggctctccatgatgat

SEQ ID NO: 815605 - DNA, 99 bp, Homo sapiens
tgggcctggcgctggaggcagcggtgcacgtgcagtccgggaccatgtctggagaactaccaccaaacattaacatcaaggaacctcgatgggatcaaa

SEQ ID NO: 815606 - DNA, 98 bp, Homo sapiens
cagaaaggaacatactctcaaaatatttacttatatcaattcctggacacagagaggcaaatttctggagatgtgcaatgatctcttagctagagtgg

SEQ ID NO: 815607 - DNA, 100 bp, Homo sapiens
tgtcttgtgattggagttggtaccatgtcagaattctggggagacattgccaaggaattttactggaagactccatgccctggcccattccttcggtaca

SEQ ID NO: 815608 - DNA, 100 bp, Homo sapiens
cataccactatatcagataagcttgacattacagccaagatggtgctgtcccagagacaacgagatgaactgctgacttatccttgtataatgaattccg

SEQ ID NO: 815609 - DNA, 99 bp, Homo sapiens
accaatgcaaaccctctctctaccacgagcagcgccctgggagccctcacgagtcccgagtgtatccagaagctactgtcaggaggacactgtaagaga

SEQ ID NO: 815610 - DNA, 100 bp, Homo sapiens
atcggattcatcctggtgatagaccggcgacgggacaaatggacctccgtgaaggcgtccgtcctgcgcatcgcagcagacctcaacaccaacatcgagg

SEQ ID NO: 815611 - DNA, 100 bp, Homo sapiens
gacatcctaggatatcgggaaagcctatattggttcaagctacaacttcaagcagaagagagaggagttgtgtctatcaaaggagtgtgtgctaaccgtt

SEQ ID NO: 815612 - DNA, 98 bp, Homo sapiens
ccgcttcttgaatttctctctgtaaaggagtgaactccggagacggcattgactacagccagcagaagagggagaacattggggacttgatccaggag

SEQ ID NO: 815613 - DNA, 100 bp, Homo sapiens
atggggaatatgaggaagacctactggagcagtcgcagtgagtttaaaaattccagtctcatcagattttccatgtcctggtggtggcagcagcctttgt

SEQ ID NO: 815614 - DNA, 98 bp, Homo sapiens
ggaaatcctaatgacagtctccaaattcgcctccatctgtaccatggctggactctgtgaagctgagcaggagcagatgcggaagatcctctaccaga

SEQ ID NO: 815615 - DNA, 109 bp, Homo sapiens
cctaccttcagattcttgaccaaaatgtggcaccccaacatttatgagtgttatagttttgccgctggactcttccctcccttcccccaccccatcaggatgatatgag

SEQ ID NO: 815616 - DNA, 100 bp, Homo sapiens
gaggactttgtctcctactccatcagcagaaggttctgtaggattgaaaggagagcgtggcccccctggaggagttggattcccaggcagtcgtggtgac

SEQ ID NO: 815617 - DNA, 100 bp, Homo sapiens
gacctccaaacccaaaatccactgcttcaggagcctaaagcgtggggatgtacagttacccagcacgtgtacctcctcctcctcctattgctcgggctgt

SEQ ID NO: 815618 - DNA, 100 bp, Homo sapiens
atcgaaatgaagaggaggaagaggccatttacttctctgctgaaaagcaatggaggcattgtggatggatggctgctggaaaccccttgccatagccagc

SEQ ID NO: 815619 - DNA, 100 bp, Homo sapiens
gacctcatagacttggccacttttaggcctcagccaactgccagtatgattttgtagaagttgaggaacccagtgatggaactatattagggcgctggtg

SEQ ID NO: 815620 - DNA, 101 bp, Homo sapiens
gagaccccgaaaacggaagcgcagggagaaggaagaggtgtttgaaaagggtttgtgtttagtgaatcagagggatctgcattagaacagtttgaaggtgg

SEQ ID NO: 815621 - DNA, 117 bp, Homo sapiens
ggaattctaatttgaaccatgtttggattgaagccgcctctgtattacttaccagtctcagaggagcagtgcctgtaccagatctacattgatgagttgtacggaggcctccagaga

SEQ ID NO: 815622 - DNA, 98 bp, Homo sapiens
tccaaaccgccttaagatttggtggcaatctgaaaatggttcgaggtgttggaacaggaggaattgtttctacagcattttgcctgttatacaaatta

SEQ ID NO: 815623 - DNA, 100 bp, Homo sapiens
acaagtggatgatgacagcagtttaagtgaaatagatgaggatgaaggaaggaatgtcgttgtctgctgggtcttcccctcttcattcccccaagattac

SEQ ID NO: 815624 - DNA, 100 bp, Homo sapiens
aacagcagcagcagcagctgcaggccaaggaaaaggagatcgaggagctgaagtcagagagagacacgaggccagctccaccagggcaagggtttttccc

SEQ ID NO: 815625 - DNA, 99 bp, Homo sapiens
tcggcctttctccacgcactgcgcttacactggtgagaattatgaagatgatgacctagtaaattctgatgaggttatgaagaaaccatgtccagtaca

SEQ ID NO: 815626 - DNA, 98 bp, Homo sapiens
aactttcccagtccccgaggcggatccggtgttgcatccttggagcgagctgagagctcgagtgcttcaccgatatagacacattttgggattgtggc

SEQ ID NO: 815627 - DNA, 98 bp, Homo sapiens
tccaaaccccagtactcctctgcccaacactgtacctcagttcattgccagagagccattcactgcttcaaccacctgtgagaaattagaaaaagcca

SEQ ID NO: 815628 - DNA, 98 bp, Homo sapiens
caggggtgaccacattcatctgggcatgcctgcagtactcttggcccatggacctgaaggagaagcacctgcatctcacagatacgtttattcatacc

SEQ ID NO: 815629 - DNA, 100 bp, Homo sapiens
ccttttgtgctgatcaacttgatgtctttttacaaaaaggtgacttcatggtcatgacgattttcttcaatgtgagcaggcggtttggctatgttgcctt

SEQ ID NO: 815630 - DNA, 100 bp, Homo sapiens
tgaggacacttgtggagagctcgaattccagaatgatgaaattgtgaagccttatcagttgtgagtgaggaccagtcgttgtttgagtgtgcctacggaa

SEQ ID NO: 815631 - DNA, 98 bp, Homo sapiens
aagtagtagttgttgagcagagggaaagggataggagaaggatgtggactgcagtgctgcagtgccagatcgtctggggaatatttttcatcttagtt

SEQ ID NO: 815632 - DNA, 100 bp, Homo sapiens
ggccagttcctgccgtctgctcttctgcctcttgatctccgccaccgtcttcaggccaggcatgttggagacttgggcaatgtgactgctgacaaagatg

SEQ ID NO: 815633 - DNA, 100 bp, Homo sapiens
gactctggagccagtcttgaggtcctacatctccgaaagcaagctcttctagaagttgctcctctggtgcaagtgtggtagctattgacaacaaaatcga

SEQ ID NO: 815634 - DNA, 100 bp, Homo sapiens
tcctactaaacctttggctgtgactggaagtgatgatcgttcggtcagctaatttgacaggacatgctgagaaggtgggaatagaaaattttgagctcct

SEQ ID NO: 815635 - DNA, 100 bp, Homo sapiens
aggcagtatgccagaactgaagaaatacatgaagaaagtcatgccatttgttgccatgattaaggttggttgaagactttcaatgactactttagagaca

SEQ ID NO: 815636 - DNA, 99 bp, Homo sapiens
aacagtcgcaacagctgaaacgctcacatttttagatgctcactgctcagctcttgccaggccaaattgagacatgtctgacacaagcgagagtggtgc

SEQ ID NO: 815637 - DNA, 99 bp, Homo sapiens
gtaggcgacaggccgctgacggccggaaggaaaatgtgtgagtgaagacactcaggatggctcaaggatccggggatcaaagagcagtgggggttgctg

SEQ ID NO: 815638 - DNA, 100 bp, Homo sapiens
tttcagataaatacctttgatctaagggttcagcctttcaatgtgacacaaggaaagtattctacaggaaagaccacagcaagattctttcattcgtctc

SEQ ID NO: 815639 - DNA, 100 bp, Homo sapiens
actggaggaaacctctggactgaaaattcttcaaaccggagtcgggtcggaggaaaaggcttctcttttacatcgtactcaggaagaaagaagaaagaga

SEQ ID NO: 815640 - DNA, 100 bp, Homo sapiens
tgaagacctacatttcccggaaggttaacagcccccttctcagttttcctgatggaaattcctgctgctaaccttgtgaacaagtacatcgccactcagg

SEQ ID NO: 815641 - DNA, 100 bp, Homo sapiens
gttaaatgaaccaggacaaaacagctgctttcttaatagcgctgtacagtttaaggaagaaatctctaaacgttttaaatcacatactgaccaacttgtg

SEQ ID NO: 815642 - DNA, 98 bp, Homo sapiens
tctgactacgaaacacatggtgcaggattttccatacgttatgaaattttcaagagagacttaattcagtgcacaaatgagatgaatgtgaacatccc

SEQ ID NO: 815643 - DNA, 100 bp, Homo sapiens
ggacatgagggtccccgctcagctcctggggctcctgctgctctggctcccaggtcagcccaaggctgccccctcggtcactctgttcccgccctcctct

SEQ ID NO: 815644 - DNA, 74 bp, Homo sapiens
cctcccttcgctcgcaccatgtctcctgaatatttacgcgttgctgaatctcctgtggacaaaccaccaatagg

SEQ ID NO: 815645 - DNA, 100 bp, Homo sapiens
gagagagagagaagagaggagattgcagcagcgaaccaatcccaagatatggatcagaaactttcgaagttggtagaagagctcacaacttcaggagaac

SEQ ID NO: 815646 - DNA, 101 bp, Homo sapiens
cctgcatcctgcgttcccctccatccttctggatctggccaacaccaccggcacagtgacggcttcagaggggctgtgcattcttgtgggggtgtccatct

SEQ ID NO: 815647 - DNA, 98 bp, Homo sapiens
gtttgagagtctctcggctcaaggaccgggagtatgaagtgtaacagaacagactttaccacctgaaactgctgcttcaagttcagatcaggcaagga

SEQ ID NO: 815648 - DNA, 98 bp, Homo sapiens
tccaaaaatccctagagagagcatcacaatataatattaggggtgttacgtataggctcactcaagatgacctggcccaggagatggaagatgtggac

SEQ ID NO: 815649 - DNA, 100 bp, Homo sapiens
ttccctggcccgtgctggaaaagtgagaggtcagactcctaaggcttcacaggctgctcaagaagccgagatcaatgccagaaaagccaaaaactctgtt

SEQ ID NO: 815650 - DNA, 100 bp, Homo sapiens
ttccgccatgcggcagggcccctacctgcccctggagctggggttggagcagctgtttcaggagctggctggagaggtctcagcggcggtggcagccgag

SEQ ID NO: 815651 - DNA, 100 bp, Homo sapiens
gtgagagagaaaagtgagtttattctgaagagcatccaggccctggccaacgtcaacattgggagcctcatctgcaatgtaggggccggtggacctgctc

SEQ ID NO: 815652 - DNA, 100 bp, Homo sapiens
aaatcttcaaactcagattaggtcatcttaaaaagattccaaaagatgagcatattcttcggttcctccgtgcacgggattttaatattgacaaagccag

SEQ ID NO: 815653 - DNA, 98 bp, Homo sapiens
gatcatgatgtttaagaacatgacgccgtcacccttcctgcgattctacttagggtctgcggaagagggagctgctgaaggagctgctaccagtcatc

SEQ ID NO: 815654 - DNA, 100 bp, Homo sapiens
gttttcgaaggaggatgccctggagacacacaggcagacccatactgtgacctacggcatgatgagctccaatgtgtactactacacccggatgatgtca

SEQ ID NO: 815655 - DNA, 99 bp, Homo sapiens
agggaattactactgcacagctgacaatggctttggtccccagcgcagtgaagtggtgagcctttttgtcactgattacacacactccgcctgcaggaa

SEQ ID NO: 815656 - DNA, 100 bp, Homo sapiens
aactgtttcctgatgatgaagtgatttgcaatagtatgggggagcatctcttcagtgaagctttgccctttttcctacttttgattgacctttccagagc

SEQ ID NO: 815657 - DNA, 98 bp, Homo sapiens
accaactctttgatgatgcatccagtacataccgagcatcaaatattaaggcacccggagaacagacagtaccagccttgaaccttcagaatgctttc

SEQ ID NO: 815658 - DNA, 98 bp, Homo sapiens
ttgggatgaatgacaagattgttattgaaaagcagggcaaaggcacagctgatgaaacaagcaagagaggcatttcatccttcatgaagccattcagg

SEQ ID NO: 815659 - DNA, 100 bp, Homo sapiens
gcccaggagaagctggaactggcagagaagaaggctgctgatgtgtccctggccagtgtccttccacctgtccacaagcatggggaacatcttcgccaac

SEQ ID NO: 815660 - DNA, 100 bp, Homo sapiens
ctgcaaatgaagctctcgaggctgctaagagactaagttgtctgcattcaaaagagcattctattaaagctaccttaatttggcgcttatttttcttaat

SEQ ID NO: 815661 - DNA, 132 bp, Homo sapiens
caaagcccacagagcagtgcttgctgctttttctaactatttcaagatgatatttattcaccaaacaaggctaaatgtgaacaataatgtcttggaagagaaattatttttcagggggtcgtggtagtgtac

SEQ ID NO: 815662 - DNA, 123 bp, Homo sapiens
ctcagagactatataagtagcttaaagatgacaccttgcattccctatttaggaactgtggaaggtgcatcagtgaagaaatggaccaatgtgtataatcatggaatctccttgctaaccatc

SEQ ID NO: 815663 - DNA, 100 bp, Homo sapiens
cagggagatgcctgtatattttgtgcattgaagtattaattttaaagacccacagtttgctgaagattacatttttaaagctgtaatgcttccaggagca

SEQ ID NO: 815664 - DNA, 99 bp, Homo sapiens
ctcactgcagaggtgctggagctggcaggagtggaagctggacacactatgtgacttgtatgaaaccctgaccatcacccaggcagtcatcttcatcaa

SEQ ID NO: 815665 - DNA, 100 bp, Homo sapiens
attcgagaaatgatggagtccttcgaaggccctcagcctgcggatgtgaggctgatgaagaggaaaacaggagctggagtcagatggcagcactatggag

SEQ ID NO: 815666 - DNA, 100 bp, Homo sapiens
ccgcagatcgcaggaccgtggagaagacttggaagctcatggacaaagtgcctgaaaggatttcaggggagcagtatggaattcattctgatgtctggag

SEQ ID NO: 815667 - DNA, 99 bp, Homo sapiens
gaaccaaagaatatgaaattcatcatgttgatgcggatgaaattaaaaggctaggaaagagatttaagaagcttgatttggacaattctggttctttga

SEQ ID NO: 815668 - DNA, 100 bp, Homo sapiens
ctatccagacgctctggtcatactaaagaacacatctggaaggtcggttgtacgccgtgcagcaagtcttttaagtaaagtagtggacagcctggcccca

SEQ ID NO: 815669 - DNA, 99 bp, Homo sapiens
gcgagctagccgggagttacaccgccaccgccaggttggtcttcctgcaaaatctggagttgctgggggcattcttttagttgtccccaatgttatggg

SEQ ID NO: 815670 - DNA, 99 bp, Homo sapiens
aatgtgccacaggtgtcctccatgcagatgggagcagtggatctcctaggaggaggactagatagtctgatttctgagagagcagacaccatcttattt

SEQ ID NO: 815671 - DNA, 100 bp, Homo sapiens
cgaggatggatgaacaggctctattagggctaaatccaaatgctgattcagactttagacaaaggaaagcagaagccactggagaaaaacggccaagagg

SEQ ID NO: 815672 - DNA, 100 bp, Homo sapiens
caacaatctgatgaaaagtcaatacaaaactaccatccttttgcagtggccacagatgtctttaattccaaaaacctggccgttcaggcacaaaagaaga

SEQ ID NO: 815673 - DNA, 98 bp, Homo sapiens
agagctcaaaatcggagacagagtattgattatctgcgtcaaagttatgggctgtccatggactttaattcgccaaatgattataataaattggtgct

SEQ ID NO: 815674 - DNA, 100 bp, Homo sapiens
gtgactgagcggagcccggtgacaggatgggagaaactctggaaaccttgacaatggcaacagtgtgtctcttcagcgcacaacctcagctggcagatca

SEQ ID NO: 815675 - DNA, 112 bp, Homo sapiens
cctcgaggtgcccagacaagcccaaggaggagctggagaaggacttcatctcccagtttcagtcattcagtcagtaccgctgtaagactgccaagaagtcagaggaggagat

SEQ ID NO: 815676 - DNA, 98 bp, Homo sapiens
gccccaccagctccgaaacaccgagtgcagccgagctcgtcagtgcaattgaggaactcgtgaaaagcaagatggacatgatcatttctgggctccag

SEQ ID NO: 815677 - DNA, 98 bp, Homo sapiens
catttcacttcacttcttaataacataggctgaagccgacgtagcttctctgaacagacgcatccagctggttgaggaagagttggatcgtgcccagg

SEQ ID NO: 815678 - DNA, 100 bp, Homo sapiens
gacagagacaagctgagcttgccgcacaaaaagctagagagggttgtggtctcctgaacagaagtctgtctccaaacacaaatcaagcagcaagatcatc

SEQ ID NO: 815679 - DNA, 100 bp, Homo sapiens
gcctataacaccaggacaatagtgcattattctccaaatctagttttttcaggaattgaggtcgacgtgttgatgcccaatgttggtgagattgtgggag

SEQ ID NO: 815680 - DNA, 100 bp, Homo sapiens
cgctgcgtgttgtccacccaagatggagttcctcctggggaacccgttcagcacaccagtggggcagtgcctcggtatgtctttgcaagactccactctt

SEQ ID NO: 815681 - DNA, 100 bp, Homo sapiens
tgggagagctccccagacacccctgatgccatcattttctgcaccttcaggaacagttccagtctcatcagattttccatgtcctggtggtggcagcagc

SEQ ID NO: 815682 - DNA, 98 bp, Homo sapiens
gagtgaggatggaagacagctaaggcgagggagcctgggaggagccctgactgagcccagcattacatcaacatgcccgtgcagttcaaaccgaagtc

SEQ ID NO: 815683 - DNA, 100 bp, Homo sapiens
gcaaacttgacactcaccctgaccggctgacttatccttgtataatgaattccgattgtggaaggatgagcccacaatggacaggacgtgtcctttctta

SEQ ID NO: 815684 - DNA, 98 bp, Homo sapiens
ccatggacattggagagagtggtattatggtgtaaacaacgattctttggagctgtgtcagcgtgttatgatgccgtcccgtaccaacctggctactg

SEQ ID NO: 815685 - DNA, 100 bp, Homo sapiens
ggcctcccgcgtgctggccatgaaggcgggtcgttaaccaagctggcctactattcaacggtacagcacaaagtcgccaaggtgcggtctttcgaccact

SEQ ID NO: 815686 - DNA, 100 bp, Homo sapiens
tggacaagaagattatgacagattacgccccctatcctatccgcaaacagtggatgcccggagcataccagtgttagcaaaatggcaaaattcatatagc

SEQ ID NO: 815687 - DNA, 106 bp, Homo sapiens
gctctgcctgtcatgtatgcagtagcgcttgaccttcgagtgtttgccaataatgatgaagtgaagctgccggccaaactgagcatcagcaaatcgctgaaagagt

SEQ ID NO: 815688 - DNA, 100 bp, Homo sapiens
gtttttgatgaaattgtagagaactgtgccgccatgccgccattgccaagtacttcggggatgcgctgcctgcctgcgccaaaggctgcgaccactgcca

SEQ ID NO: 815689 - DNA, 100 bp, Homo sapiens
ctcaagattagattatcgtcgctatgcagacacactcttcgatatcctggtggctggcagtatgcttgtgagttggactatggatcaggtactgtgctca

SEQ ID NO: 815690 - DNA, 99 bp, Homo sapiens
atggttttggcattgacacatgtcgcagcatggtggccgtgatggatatcttttggagaaatctcgtgctatccgccaagccaaggaagaacggacctt

SEQ ID NO: 815691 - DNA, 100 bp, Homo sapiens
gtggcagagaaggaaggatggcctctggacatccgagtggacggaaatggagagctggatttctccacttttctgaccattatgcacatgcaaataaaac

SEQ ID NO: 815692 - DNA, 98 bp, Homo sapiens
aagagtgtatgtgatcatcgatctctcagggtcgtcgggtgaaggtcttcatcctccaggtccacctttagcaagacctattctcccccgagaacgag

SEQ ID NO: 815693 - DNA, 100 bp, Homo sapiens
tagaagagccaaggaagagaaacttcagcaggcgatagcaatgcacagccaatttcatgctccactatagggtgaacactttggaacaacggaagctaca

SEQ ID NO: 815694 - DNA, 100 bp, Homo sapiens
ttaccgctcgtctctttgacatccacaagcaagtcctaaaagagggcattgcccagggttttgatgagtatatgaaccttgtattagatgatgcagaaga

SEQ ID NO: 815695 - DNA, 100 bp, Homo sapiens
gtgcaatgttcaccagtcagtgtttgaaggagaagagagcaagcacatgccaaaatttaattcaatttcaattagtggataccatatgcaggaagcaggg

SEQ ID NO: 815696 - DNA, 98 bp, Homo sapiens
tcctctcaaggcccctagaaaggttggagctgccgccgcctgcagtcggtgaccgcgcgactcggcgcccgcccgcgaaatgacctccaccttcaacc

SEQ ID NO: 815697 - DNA, 99 bp, Homo sapiens
aggcccagctctcctgcgccgccgcctcccgccgcgccccgccatgccgctctactccgatgggggactcaaggagatttcaccaccacccatcctcgg

SEQ ID NO: 815698 - DNA, 100 bp, Homo sapiens
tcctcaaaatatgctccagatgctgagatctgtatctgtggacctgaatgttgatccctcgcttcagattgacatacctgatgcgctcagtgagagagac

SEQ ID NO: 815699 - DNA, 100 bp, Homo sapiens
atttgatcctccatttgttcgagtggtgttacctgttctctcaggaggaagaggtgtggtggaaaggtcttccagaaccagaggctaagcacacagcagt

SEQ ID NO: 815700 - DNA, 100 bp, Homo sapiens
atgacatcagctatggggaaaggaacagttgctgttcaagaaaaagcagagtacagttgtgaatttggctccgcgaagtattatgcactgtgtggctttg

SEQ ID NO: 815701 - DNA, 99 bp, Homo sapiens
gaccatgtttggatttcttacaagaagtcacaaaaagtactgaaatcccaccttatgtgatgaagtgtccgagcaatggtttgtgtagcaggcttcctg

SEQ ID NO: 815702 - DNA, 101 bp, Homo sapiens
cactaagtgaagcaagaaagcatttaaaagaagagacacaattacgattggaacaggagtacagctgtgtagtaaagatgccttctggtgaatttgcacgt

SEQ ID NO: 815703 - DNA, 100 bp, Homo sapiens
caaacttggataagaagaatacacctgttcaaagtccagtatctctaggagaagatttgcagtggtggcctgataagggctctggaacttcatccattct

SEQ ID NO: 815704 - DNA, 100 bp, Homo sapiens
aacattgtttaccttggaagaactccgtgcccagatgctcataaggattgtcctctttctacaaaagaattaacactgaatcctccggaaggaattgtag

SEQ ID NO: 815705 - DNA, 100 bp, Homo sapiens
cgagctttcacaattgcagcagatgaagatccattggtaaattgatcaggatttttggcctaccctccaaagaaaagccggatcgagctgggagatgtga

SEQ ID NO: 815706 - DNA, 100 bp, Homo sapiens
cagaatttcaagcgaggctctgggcagagtggaccacggggagccccacgaggagagatgaatggagagtatagaggcagaggatttggacgaggaagat

SEQ ID NO: 815707 - DNA, 107 bp, Homo sapiens
tggaccatgggcgcccgcggtctggacaagcgaggaagtttctttaagacaaatggacacctaccagggaacggagatgtgtatcaagaaaggctggcacgtttaga

SEQ ID NO: 815708 - DNA, 99 bp, Homo sapiens
aactattcaacatggaggcggaggtcgataagctggaactgatgatggagtggatgttgaagatgatccgacttgctcttggccagcttcctcaccttc

SEQ ID NO: 815709 - DNA, 100 bp, Homo sapiens
caagctcatattttgaagtgtttacggggtttcagaagctgccagaggaggagccagaaacagatctcagccccgggctcccagctgcccacctcatagg

SEQ ID NO: 815710 - DNA, 98 bp, Homo sapiens
gcgtggtacagctgtacctcactatgggattcattacagggccgcgatgggcctcttggaacattggtgtgttcatctgcattcgatgtgctggaatc

SEQ ID NO: 815711 - DNA, 99 bp, Homo sapiens
gataggaatcccatctcatttaggtgacttcatggtcatgacgattttcttcaatgtgagcaggcggtttggctatgttgcctttcaaaactatgtccc

SEQ ID NO: 815712 - DNA, 100 bp, Homo sapiens
cagagccaagtgcgagcccagcgggagaaaatcaaggaggccacgtgcgagcgagggtttgcagcaatggaagaaacgcaccagaagaagattgaagatc

SEQ ID NO: 815713 - DNA, 75 bp, Homo sapiens
tggccaagaagatcatcattaaggacggaggcacgataaggagtcaggccagggcgggatgacactcattgattc

SEQ ID NO: 815714 - DNA, 100 bp, Homo sapiens
cttcatggtgctgctcctaccctcgctgggactgagcagcaaactcagtcgtggctttggagatcactttaagcttgtctccagctggcacactaaggag

SEQ ID NO: 815715 - DNA, 100 bp, Homo sapiens
ggaaggcaacaggtgtcacagcacggagcagtatagcatcaagttctagaggaattgggagccattgcaaatctgagggtcaggaggaatctttcgtccc

SEQ ID NO: 815716 - DNA, 98 bp, Homo sapiens
aaaacaagactggggctgctcccatcattgatgtggtgcgatcggtatggagagtcggcttgactacactgtgtggagcaagttttaaagaagcaaag

SEQ ID NO: 815717 - DNA, 98 bp, Homo sapiens
gattttaaaaacttcggatgagaaagaaagtaaaagatgtcattgtactatactggcaattgctggagaagattttgcaattgttgcttctgatactc

SEQ ID NO: 815718 - DNA, 100 bp, Homo sapiens
aggatccccagtatgcatctcaagatgtgatacgtaggtaacctttccagagatgtgacagaagtccttatacttcagttgttcagtcagattggaccct

SEQ ID NO: 815719 - DNA, 99 bp, Homo sapiens
ggcgcggagcccgggacgcgcgtacgccctgctgcttctcctgctttaccgatttgttacaactcaagcaagggccagcagaaattctcttttgacaga

SEQ ID NO: 815720 - DNA, 99 bp, Homo sapiens
agcttgcccacgcaccccactcggcgtcgcgcggcgtgccctgcttgtcacagtgcttagatgagtacgaagatgatgaagcagggcagaaagagcgga

SEQ ID NO: 815721 - DNA, 98 bp, Homo sapiens
gggtcctgaatcttctgggagctgaggaaccagatatcttgaaaagctgccagaaaggtccttatacctttagcatctgtgacacctccaacttctcc

SEQ ID NO: 815722 - DNA, 100 bp, Homo sapiens
cagccatactgtcggtggagaagaggtatgggcttattttgccaaagaaaacacagcagttgcaccctgttttgcaaaaaccatcagtgtttgggaatga

SEQ ID NO: 815723 - DNA, 100 bp, Homo sapiens
caggacatcaagcccatgcgggaccagatcatccgcgtgaagcgagtttgccagatccggcccggtgcctgggttccaggaggacacgctgcagttggcc

SEQ ID NO: 815724 - DNA, 98 bp, Homo sapiens
aaaagcgaaatgggcacaccacagggttttacatatgtggctccatctgtacttgaaagtgtgaaagaaaagttttcctttgaaccaaaaatccgatc

SEQ ID NO: 815725 - DNA, 100 bp, Homo sapiens
gacagtgattctgtcctaaacaagacagtgactccaggatttctgaagactattgtggaagaagcatccattaagaaacgcttcgttaagggactcaggc

SEQ ID NO: 815726 - DNA, 98 bp, Homo sapiens
ccccttccacgtcatccgcatcaacaagatgttgtcctgtgctggggctgacaggcctcagaaaacggaatctctgtctgtgaccttctcctgcccca

SEQ ID NO: 815727 - DNA, 98 bp, Homo sapiens
ggggagccgactggattccaaaagttcacacaaaagatgttggacaatttctacaattttgcttcatcatttgctgtctctcaggcccagatgacacc

SEQ ID NO: 815728 - DNA, 100 bp, Homo sapiens
caagccgtggaataggtgtatcaagtaatggtgcaaagcctgaaatcctgagagtcagaccttgaaagaacacttaattgatgaattggactatgtattg

SEQ ID NO: 815729 - DNA, 100 bp, Homo sapiens
ctcaccttacacccaatagaaattgctcgacaactcactttacttgaatcagatctataccggtcgttcatgcccaacttggtgcctcccaagatccccg

SEQ ID NO: 815730 - DNA, 98 bp, Homo sapiens
gacttttgctaactgcggcgggcgagacgttctcaggccccttcacagatgtagtcactacaaatcttaaattgcgaaatccatcggatagaaaagtg

SEQ ID NO: 815731 - DNA, 100 bp, Homo sapiens
agcaggagtctgcacgcagggaaaacatccttgtaatgcgactagcaaccaaggaacaagagatgcaagagtgtacttttcctattctgtgaaacagaag

SEQ ID NO: 815732 - DNA, 98 bp, Homo sapiens
acgtcttccccagccctgactgcaagccaagcacagatgtatctgagggcacagatgtttggcaatgaggagcagcagctggcgtgggccaagcggga

SEQ ID NO: 815733 - DNA, 100 bp, Homo sapiens
gatgttgagttccggcttgccgcggcctgccgcaatggaaacatctatattctgagaagggctcacccttcagaggacaatgacttttacatcaactaca

SEQ ID NO: 815734 - DNA, 98 bp, Homo sapiens
ctcctttgggttgtactcatagattgtgtaggcgttggtcttctgatagcaactttaatgtgacaccagagaagcctatgatgacaagcaggtggtca

SEQ ID NO: 815735 - DNA, 100 bp, Homo sapiens
ccatacccaataaccaggtgcttggcaaaatcgagcgggccattggtattgttgcagcatctggcagtgagactgaggatgaggacagcatggacattcc

SEQ ID NO: 815736 - DNA, 100 bp, Homo sapiens
gaagctatgcagaataaagctcgagccgaaggacatatgggtgtcaagaagaattgtaagcagattgaatctgctaaattattacctgatacacccgttc

SEQ ID NO: 815737 - DNA, 98 bp, Homo sapiens
ctacgtcgcctgcgcccagaagaaatgtttgaaacatgggctaccaagcagtttctcgaagagattaacaagtggacagttcagtacaatgtttcccc

SEQ ID NO: 815738 - DNA, 100 bp, Homo sapiens
aacgtctccagggaccgatgccaggagctcgggtgctgcttctacgaaggcgtctgctacaagaaagcggttcccagttgcccgaagctcagcagagagt

SEQ ID NO: 815739 - DNA, 98 bp, Homo sapiens
aatgatgaagaagatccttcaaaattaaaagaggagcagcatggcatttcagtcactggtttgcagagtccaggtcctgttattgccttggagtttaa

SEQ ID NO: 815740 - DNA, 98 bp, Homo sapiens
gagaaattccagggagcgccttcaagaaactcaagaatttgaacacactgctgaagaaaatcttggtatggtgatgatttttactctagtgacagctg

SEQ ID NO: 815741 - DNA, 99 bp, Homo sapiens
aagaagaccattcagatgggatctttccggatcaatccagatggcagccagtcagtggtggagctttctaaaaccaatttttccaacaacaacgatttc

SEQ ID NO: 815742 - DNA, 98 bp, Homo sapiens
ggaggaaaacaacttcgagggcagaagtgggaaaccacccatcaatgatatgttcacagacctcaaagatggaaggaagctattggatcttctagaag

SEQ ID NO: 815743 - DNA, 98 bp, Homo sapiens
aattcatgacagaagggagtttgctaaatttgaaaaggagaaaatgaatgccaaatgggacacgatggccaaaaaggctttgaaatctgagtccgctg

SEQ ID NO: 815744 - DNA, 100 bp, Homo sapiens
acattcaaccaggttgtgttgaagaggttgtttatgagtcgcaccaaccggccgcctctgtccctttcccggatggtagttggcaaggagccaaggctga

SEQ ID NO: 815745 - DNA, 100 bp, Homo sapiens
ttctcctgtctccagagagatcttggtagaggagagcaacgtgcagagggtggactcgccagtcacaggcccatcaaccgtgagatgcgccacctgatta

SEQ ID NO: 815746 - DNA, 100 bp, Homo sapiens
caagttccaacaaaagaatgctgccgcagcaagtttatttctgatcgtgaaagtagaagaagtctcacaaacagccatttggaaaaaaagaagtgtgatg

SEQ ID NO: 815747 - DNA, 100 bp, Homo sapiens
ttactgtggctccctgggcgaggggaccatctcccgcaatgtggctctggtatacgaactcctggatgaagtgctggtccatgagctgattccagctgtg

SEQ ID NO: 815748 - DNA, 100 bp, Homo sapiens
atggaatatgtccctgggggtgaaatgttttcacatctaagaagaattggaaggttcagagctgaacgacaaaggaatgaagcactatataatgccgaag

SEQ ID NO: 815749 - DNA, 98 bp, Homo sapiens
aaaggaattgtggccatttgatataattctggatggaagacctcttatttgtattacattgaattagagtggatgttccttcaacttgtgccttcttg

SEQ ID NO: 815750 - DNA, 99 bp, Homo sapiens
agaaatgcagcgtatggatgttcctacctcttgtatttactttgtttacttcagctggattgtggatagtacagtacaatgtagattataaactggaga

SEQ ID NO: 815751 - DNA, 98 bp, Homo sapiens
ctcagcgtcaacgagttcaaagagctggttacccagcagttgccccatctgctcaaggcggtgcgtctttctacgtgaataggattttgtggctggcc

SEQ ID NO: 815752 - DNA, 100 bp, Homo sapiens
tgccattttgtcttctgtggatgggtgagagtcccctttgcaccctcccccagtaatatcaggacgccaggaaagcatgtgcagatgcaactctctctca

SEQ ID NO: 815753 - DNA, 99 bp, Homo sapiens
ttcagggttgaatacagagacagaaatgttgatgtggtacttgaagacacctgtactgttggaaaccaagtgctacctcctggagcttctcttggaaat

SEQ ID NO: 815754 - DNA, 98 bp, Homo sapiens
gccacggtggataacgacaagaaaaacaatcgcttcaatgatgggaaggtggatcccgccgggaggtactttgctgttgaaagaattcagaatcagtg

SEQ ID NO: 815755 - DNA, 100 bp, Homo sapiens
ctaaggcagaggcccaggagaatggagaccacagggaagtcaaagatatggagtttggacctccaacagttaatgataaactaatgagattttttgatca

SEQ ID NO: 815756 - DNA, 98 bp, Homo sapiens
taatgcccagagttggagccaattaaaccaggaagtgcacggctgtctataacgtgctgccgggtctcaggatggaggagtgaagtctcctgtcgccg

SEQ ID NO: 815757 - DNA, 100 bp, Homo sapiens
ctgatgggcccctatttggggacactgtcaccagctcagagcacctctgtggcatcaacttcacaggcagtgtgccatccagcacacggaagacatggag

SEQ ID NO: 815758 - DNA, 100 bp, Homo sapiens
ggcaggctgaggagaaagcggcgcgcggagactgtgccctgtccacggtgcctcctgcatgtcctgctgccctgagctgtcccgagctaggtgacagcgt

SEQ ID NO: 815759 - DNA, 100 bp, Homo sapiens
gcggcgctgccgcctgaagtgcgggcgcagctggcggagctggagctggagctctcggagggacgcttccattgcacacagattccatgtgatgagagag

SEQ ID NO: 815760 - DNA, 99 bp, Homo sapiens
cgctgctggctgcgctctgcccggcgagtcgggctctggaggaaaagaaaggtctttctaccctggactccatctgtgactccctgagtgttgctttcc

SEQ ID NO: 815761 - DNA, 100 bp, Homo sapiens
cggtggcggctgcgctggcgcggcttttggcggcctttctgctcctcgcggcccagggcagctggtggaatttttgaagaaaatggaatctcgaggcccc

SEQ ID NO: 815762 - DNA, 98 bp, Homo sapiens
ctacttctatgatgtcacaaggaacagctatcggatcatcagtgtggacggagccaagggcgtctctggccgagcctctttttgtggaaaacgacagc

SEQ ID NO: 815763 - DNA, 130 bp, Homo sapiens
cagggcctgggccgccgctgctacctgcagcgccgtgtggcacgacacaaaaatcagatgccgtgtgaagggaggactcagatgcactccctgtggtctgggctcaaccagccaaaagagcaacaaagac

SEQ ID NO: 815764 - DNA, 98 bp, Homo sapiens
gcgtcccgctcgctgggagagaggtacctctccttttccctctccctttccctaagaacactgagctgaaggttgaagtggagagcttgaaacgagaa

SEQ ID NO: 815765 - DNA, 98 bp, Homo sapiens
agatgccagtagtgcccgccccacccgcatgctctttgtcactccccggcggcagcacgaaagtaccattgcaaattgggaatcgtgaaattcataga

SEQ ID NO: 815766 - DNA, 101 bp, Homo sapiens
agaacaggataaagctcgccgggaatgggaaagacagaagagaagggaaatggcaagggagcattccaggagagaaagcaactttcatcctttgaaacgtg

SEQ ID NO: 815767 - DNA, 100 bp, Homo sapiens
ctctcatattacatgggccagcactgcttcatccgggaagtgcttggggatggagtgcctccaaaggttgctgaggtgctcaaaaatgtgataactttgc

SEQ ID NO: 815768 - DNA, 100 bp, Homo sapiens
tttactggagtaggtgttagtaagcaaatctctagaagatgacggtgttctttaaaacgcttcgaaatcactggaagaaaactacagctgggctctgcct

SEQ ID NO: 815769 - DNA, 98 bp, Homo sapiens
gctgggcgacctgcaggcagcaccggaggcccaggtctccgtgcagcccaacttccagcaggacaaggctaagtcctatcagccatggaaacaccatt

SEQ ID NO: 815770 - DNA, 100 bp, Homo sapiens
cgagcggatcttgcaggagatcgagagcaccgacaccgcctgtgtggggcccaccctccgagagatgcaggtcagctcctccagtaccacaacttctgag

SEQ ID NO: 815771 - DNA, 98 bp, Homo sapiens
gatggcggcgcgatggagcagcgaaaacgtggttgtagagttccgtgactcccaggttgcataccctgtcctgagggcgcggcacggagtgcatgcgg

SEQ ID NO: 815772 - DNA, 100 bp, Homo sapiens
gggccctcatggcgtgcggccggtgtttgatttcaccaccatagacttgacatctgagactgatgaaattccagatattatagctttggaagaggagaac

SEQ ID NO: 815773 - DNA, 114 bp, Homo sapiens
gtttgatcaaggtgggagctgaggctgatcagaactatcagaactacatcttaaggggatgaaggtttaaggctcagaaaggtagcacattcggataaacctggatcaacctca

SEQ ID NO: 815774 - DNA, 100 bp, Homo sapiens
aacagaaaaagcagttggcacaagacacgggactcaccatccttcaagtgaacaattgcagacataaacgtgacccaaaaaagcttcaattttgccaaga

SEQ ID NO: 815775 - DNA, 98 bp, Homo sapiens
atgattgatgtcatgtgcctcttgcaacatgtgtcagctgggctggcgtcttcttcctgtcctcggccgagggggagcagatcagcttcctgttcgac

SEQ ID NO: 815776 - DNA, 100 bp, Homo sapiens
cggaccccccggatctgacggggcgggacctggcgccaccttgcaggctgcacatggtccgtctaatgctgttggagagattactgcagaccctgcctca

SEQ ID NO: 815777 - DNA, 98 bp, Homo sapiens
tggccccacagtgatccttactgggcaatctactggccaggaggccaagccctgtctagaacccagcaagcgtagtcgaggagccctggggtccatcg

SEQ ID NO: 815778 - DNA, 100 bp, Homo sapiens
gaaactgaaggacaacgagaagaaccggaagctctttgaccttctggatgtccttgagttcaaccaggttttggcttggtttgaagaaggtgaagaaaca

SEQ ID NO: 815779 - DNA, 99 bp, Homo sapiens
ttacatctgcaaagaccttatttccaggaacctagaaagattgtacaatgaatggtgattctcgtgctgcggtggtgacctcaccacccccgaccacag

SEQ ID NO: 815780 - DNA, 100 bp, Homo sapiens
tccaaacttggtgtcttttctacaaactctgtgcctcaacaaccatttctaagtgtgccggtggtggtgtgcacattgagccccggtatagacagttccc

SEQ ID NO: 815781 - DNA, 98 bp, Homo sapiens
actgttggaaaattggaattgctttcttcagggccttcaatgccattcatcaaagaggggttatgcttcctcctggagcccagcattctgatgaaaag

SEQ ID NO: 815782 - DNA, 101 bp, Homo sapiens
cggatctttcagagactccaaatcattgacaattcaggtcgtccttggtggaaggaaccatgaactggcatctccccctcttcctcttggcctctgtgacg

SEQ ID NO: 815783 - DNA, 100 bp, Homo sapiens
aggctgggcacctacatgggccataccggagctgtgtggtgtgtggacgctgactatattgctacagtggcataaggaggaagaccttggtgtctatgcc

SEQ ID NO: 815784 - DNA, 100 bp, Homo sapiens
tgactttggcctggcaaagcaaaaacaagaaaacagtaaactcacctctgtggttggaacaatcctgtattcttggaactgcaagcacatgttgaccaga

SEQ ID NO: 815785 - DNA, 100 bp, Homo sapiens
tttctactataaatcccggttttggctgcttaaactgctggactttgcctcccgggccaaactggcagttcaaaaactagtacagaaagttggatttttt

SEQ ID NO: 815786 - DNA, 100 bp, Homo sapiens
ggccccccggacagtggctctgacggcgttactgatggtgctgctcacatctgtggtccagggcagggccactccagagcctgtcatagggaactgcatg

SEQ ID NO: 815787 - DNA, 98 bp, Homo sapiens
aattcactagcagagtatcatagcagcacagctgaaggtttaacaagaaaaaatatgtcagatgtcagtgggtggcaaacatttttacaagcccttga

SEQ ID NO: 815788 - DNA, 131 bp, Homo sapiens
ggaacaagtaccgcctgggacggaagatcgggagcgggtccttcggagatatctacctggatttggagcaagaggtggtggtggccttcccccgaagaaatttggtaatcctggggagcgtttgcgtaaaa

SEQ ID NO: 815789 - DNA, 98 bp, Homo sapiens
tagccgcccaccggtttttctgccacttttgcaagggcgaggtcagccccaaactaccggtctctgctggtggttctgaagccaaacctctgatcttc

SEQ ID NO: 815790 - DNA, 100 bp, Homo sapiens
gtttggccttcggagcaggaagctaaagctgtttctgaatgagacccaaacgcagggcttcaacggaccacaccaaaatgccatctcaaatggaacacgc

SEQ ID NO: 815791 - DNA, 100 bp, Homo sapiens
gacagttcaaggaggagaagcttgcagagcagctgaagcaagctgaggagctcagatgactctggccactggggcagaggtggtttatttacagctctgg

SEQ ID NO: 815792 - DNA, 100 bp, Homo sapiens
atgagctggcccgctacttcccagaccggaacgtggcactcttcgtggccacctggaacatgcagggccagaagaacatccagtcatggataaaaatgag

SEQ ID NO: 815793 - DNA, 100 bp, Homo sapiens
gcggtaccgcaaagccgagaagatccgcaacatcctcgcccggtcaagacaaatgctgtgcttcatgaagttaaaagagaggggctccccgtggaacaaa

SEQ ID NO: 815794 - DNA, 100 bp, Homo sapiens
tgcgcgcggccaagccatgctcggccccaggaacttgcttgctagaaaacaaagtgcaaggcttgacaaacacaatgacttgggatggaagttatttggg

SEQ ID NO: 815795 - DNA, 100 bp, Homo sapiens
cacagcctttaggaagcttcctcgggaccccttcccggtgcgccgccccgggtgggcctgggggcgcgcccttgagatggaagattttcgaggtatagca

SEQ ID NO: 815796 - DNA, 100 bp, Homo sapiens
cagcgccatggcccagattctgccaattcgttttcaggagcatctccagttactgtaaaatggggaaaggagaaatttgaaggtgtagaattgaatacag

SEQ ID NO: 815797 - DNA, 99 bp, Homo sapiens
gagtctgaggcggagggagtaatgatgcctgaggaagtgcaccatggagaggaggaggtggagacttttgcctttcaggcagaaattgcccaactcatg

SEQ ID NO: 815798 - DNA, 100 bp, Homo sapiens
agacggaggcgctgcagcgcttcttcgaagctccagaaacatgacaaggaggactttcctgcctcttggagatcagaggaggaaatggcagcagaagccg

SEQ ID NO: 815799 - DNA, 98 bp, Homo sapiens
cttgacaatacaaaaagctgatgaagttgtttgggtacgtgcaagagttcatacaagcagagctaaaggtccagaggtgtccttctaaagctggtaga

SEQ ID NO: 815800 - DNA, 100 bp, Homo sapiens
tctaccttttacagaatttgtgcggtacatttctacaacagccttatggagatcctaagaaaaagcttatatgttcagtgtgcaataaaaagtgttcttc

SEQ ID NO: 815801 - DNA, 100 bp, Homo sapiens
cttttccctctccctttccctaaggtttcaagtgccccatttgctccaagtctgtggcttctgacgagatggaaatgcactttataatgtgtttgagcaa

SEQ ID NO: 815802 - DNA, 98 bp, Homo sapiens
acttttgagattggtgctcgtttggaggcactggactacttacaaaaatgcatctaacattcacaagggaatttgattcagattctcttagacattac

SEQ ID NO: 815803 - DNA, 100 bp, Homo sapiens
cctgtccggcatctgtcttgagctcccagcaagtctgtgatcaaaacagggcgactgctaatcagtcacgaggctcccttgacaggcggctttgcatcgg

SEQ ID NO: 815804 - DNA, 100 bp, Homo sapiens
cttggagagcccagagcgacccttcctggccatcctgggcggagtcaacaaacactcgggtcctatacttcagcatcttttcaatgttctgtctcattgg

SEQ ID NO: 815805 - DNA, 98 bp, Homo sapiens
agctgtggccgtggacttaggcaacaggtgaaatgacaatggatgctctgttggctcgattgaaacttctgaatccagatgaccttagagaagaaatc

SEQ ID NO: 815806 - DNA, 130 bp, Homo sapiens
cgagttctgctacttcctagtaagggacgtctctggagagattctgaggtgtttgagaaccaggaagacagcgcttccagcaacccgtttgcactccccaactctgtcactccccccttaccgacgtttg

SEQ ID NO: 815807 - DNA, 100 bp, Homo sapiens
ggccctgagcctcctgcaacacctgcggcctcactgggacccccaggaggtgaccctgcagcaaagaagtttgtcatcctgatattggtggcaagatcat

SEQ ID NO: 815808 - DNA, 100 bp, Homo sapiens
cccacagactgccaagtgggacaactttctggcttttgaaaggctccttcttcaggtagctacagcaagctgggtagcaggcagatccaaaggatatcat

SEQ ID NO: 815809 - DNA, 106 bp, Homo sapiens
tggaatgtcattacaccttaactccatatattcatccacatccaaaagattgggttggtatattcaagatacaagaaaggtggctacaagataaccttactttaag

SEQ ID NO: 815810 - DNA, 139 bp, Homo sapiens
caagatccgcaaggccgcccgggaactgctgacgcttgatgagaaggacccacggcgtctgttcgaagtacaagccagctgccatgttgtgagcacataccacatagctccatggagatgcccatgtgactgtgatgaa

SEQ ID NO: 815811 - DNA, 98 bp, Homo sapiens
tcagagtcggagagctccagtgagtccagctcctctgacagcgaagactccgaaacagttttctggatatgccgcagaaggatccgtgccagaagcaa

SEQ ID NO: 815812 - DNA, 100 bp, Homo sapiens
ctgaagcctttaaatgcagcatctgcgatgtgaggaaaggcacctccaccaggatgtggagagcatcttgtgcgcaccatactggctagagaatgttcac

SEQ ID NO: 815813 - DNA, 100 bp, Homo sapiens
ggccaacaacccattccaggctgtgcaggaagttgtacacagaagaaagcccatatgaggacacagcaagaaggtggctgtcttcaagccaagaagagag

SEQ ID NO: 815814 - DNA, 100 bp, Homo sapiens
ccgccgcagaccccttcaagttctagtcatgaggcggggtttcaccatgttgcccagactggtcttgaactcctgagcttaagcaatccacctgcctcgg

SEQ ID NO: 815815 - DNA, 100 bp, Homo sapiens
gaccattgcccagagcctggaacattcctggattaaggaacaaatagcgaaggatttgctttcaggggaagaagaggaagagacgcaatcatctgctgac

SEQ ID NO: 815816 - DNA, 100 bp, Homo sapiens
aggaaagctatggagatgtctatggaatttgcaccaaattgaaaacatctcccaatgaaggaaagaaaccttgactggttccccaggatgagagccatgt

SEQ ID NO: 815817 - DNA, 100 bp, Homo sapiens
cagcgttggcgaggagccccgggaggtgcttctgcggctgtacggagccatcttgcaggacgactgggtttggattcagaagaggattattatacaccac

SEQ ID NO: 815818 - DNA, 135 bp, Homo sapiens
caagcttggaatgatcatcaaacagctatggtgatgattagagacatactaatgtacatggatgagagccactcagagtgggtgtcttgtgtccgcttctcgcccaacagcagcaaccctatcatcgtctcctgt

SEQ ID NO: 815819 - DNA, 100 bp, Homo sapiens
agaagccacaacttatcagtccccagggggaaagactctcacaagtttcactgttacatgccttgaagtgatgaggaggtttctgttactatatgctaca

SEQ ID NO: 815820 - DNA, 100 bp, Homo sapiens
cagagcatcccggctgagatcgagaacttgcagaggatgctccagaccttgtatgattacttctggtgggaacgtctgtggctgcctgtgaacttgacct

SEQ ID NO: 815821 - DNA, 98 bp, Homo sapiens
acaagactattaagatgtgggatgtcagtactggcatgtgccttatgaccctctgtgtaatgctgtgtcatggagctaaaatcggatttttccaagga

SEQ ID NO: 815822 - DNA, 100 bp, Homo sapiens
tctaagaaggatcctgacagattatggcttcgagggacatcctttccggaaagactttcctctatctggctatgttgagaaactcccatcaagactgaag

SEQ ID NO: 815823 - DNA, 74 bp, Homo sapiens
aacactacagattaaagactttctgaatggaccagatccagacatttaatgtggatgcaccatgccagaccgtg

SEQ ID NO: 815824 - DNA, 98 bp, Homo sapiens
cagctatgtgtatccatggagacaagagtcaaccagaaagagattgggtacttaatggcgcaatgtgtcatttaggcctgtgacgtcggaactttatt

SEQ ID NO: 815825 - DNA, 98 bp, Homo sapiens
caggaggttggacacagaccattgcaatggaaatggctacagatgcacatgttgaatggagctcttctggcattgctgtttcctgtggtaaacactcg

SEQ ID NO: 815826 - DNA, 100 bp, Homo sapiens
tacgctaacctatcgggttctctctccgcgcgttcagggtatatttacttctggcacatgggaagagaaatcagatgaaatttcctttgctgacttcaag

SEQ ID NO: 815827 - DNA, 133 bp, Homo sapiens
cgataacttcaatacctacaaaatcttccccaaaataaaaaaattgcaagagagagactattttcgttattacaagtggaagcattgacatttcctccttcttctggaaagtcattcatcatgggagcagatg

SEQ ID NO: 815828 - DNA, 100 bp, Homo sapiens
tggcagcaagaagatcgatgctgagcggcaggctgcagctgcagcctgccagctgttcaagtatggtggtgatattacccgaaaaatgaagcttttgaag

SEQ ID NO: 815829 - DNA, 50 bp, Homo sapiens
ccgcggcgatgactcggacccagcattcctgggagatggtcgggaagaag

SEQ ID NO: 815830 - DNA, 100 bp, Homo sapiens
cctcacctccgcactggcccgaggcgtctcggggatcttcgtgtggactgccctggtgctcacctgccaccaggccaccagcccctcgggttccaagatg

SEQ ID NO: 815831 - DNA, 98 bp, Homo sapiens
acgactgcggcgcgctgctggacgaagagctctcctccttcttcctcaactatctcgctgacacgcaggtcagttcaccgggacctggaggcccagat

SEQ ID NO: 815832 - DNA, 98 bp, Homo sapiens
gaaataccatgcagatttgtatgttagagttagtgctgagggtgctgtactatggccggcaaaattttatggaagacagcagagcccagcaataaatc

SEQ ID NO: 815833 - DNA, 98 bp, Homo sapiens
gctacagagggtaccgggatgcctgcaccattactgaccttcactgcctggtgtaactcccacctaaggaaagccggcacccagattgagaacatcga

SEQ ID NO: 815834 - DNA, 100 bp, Homo sapiens
tgcacaagctgcacttcctgcacagatgtatcggcaagcagtgtaaacggaggacttggggaaaaaggaccacatagtccatcgaagaagagtccttgga

SEQ ID NO: 815835 - DNA, 100 bp, Homo sapiens
tcgtgattatatttcttggagttgtgttggtaatgaagaaaagcatcgagagtaaacatgaggttacgatcctgggaggacttaatgaatttgtagtgaa

SEQ ID NO: 815836 - DNA, 100 bp, Homo sapiens
gtcctcatgattctcctggcagttgtcatatgtactgtgtcagccatcatgtgtgtcagcatgagagtgcctgaagacctctcattagaagagagagaag

SEQ ID NO: 815837 - DNA, 98 bp, Homo sapiens
ccacttcatgttccagtgcctcgagcgctcaggatggaggaagactcgatccgcctgcctgcgcacctgctctctggctgatgaacttgctcttgtgg

SEQ ID NO: 815838 - DNA, 99 bp, Homo sapiens
tcaaggagaaggcagacctgggtgcaaagttccccatcaagtggacggcccccgaggcagccctgtacgggaggttcacaatcaagtctgacgtgtggt

SEQ ID NO: 815839 - DNA, 99 bp, Homo sapiens
tccgcctctgatgcagaatttgatgctgtggttggatatttagaggacattatcatggaatttagcttgggttaaatcatataacatctgctttgaatt

SEQ ID NO: 815840 - DNA, 111 bp, Homo sapiens
cccgccagcgcgtcgaaagcctgaggaaaaagcggccgctgccggtggtggtgtgcacattgagccccggtatagacagttcccccagctgaccagatcccaggtgttcca

SEQ ID NO: 815841 - DNA, 99 bp, Homo sapiens
tcgattggttctactgtgggtctggactgatctccatgtcctgttgtggggcttttacagcctttggtgacaaccatgagtggaaaaaactaattatgg

SEQ ID NO: 815842 - DNA, 99 bp, Homo sapiens
gtaattctgaggaaagggaattctccccgagtttcatcaactttgtcaacttgtgattcgggaactggagcctctcctctgtcacagtgacaatccatc

SEQ ID NO: 815843 - DNA, 98 bp, Homo sapiens
tttcatatgttttagctacaaacatttatctaagagttactggaggtgaactgtttgaagacatagtggcaagagaatactacagtgaagctgatgcc

SEQ ID NO: 815844 - DNA, 100 bp, Homo sapiens
agctggcctatggtttctgcattttgttaagaagcacctcatgcaagcgagggacctgggactgctcacagccaggaatcccagtcagaagttccagcct

SEQ ID NO: 815845 - DNA, 99 bp, Homo sapiens
caggaacggctccagcatcaagatccgtctgacagatgatcatgacgcagtcctgaggtttaatggggcacccacagccaacttccaacaagatgtggg

SEQ ID NO: 815846 - DNA, 100 bp, Homo sapiens
ccacgagtgacctggaacaagaagggcaagaaggtcaactctcagcgctttgaggggaggagccccagccccgcgacgaggaggaagcggagctggagct

SEQ ID NO: 815847 - DNA, 99 bp, Homo sapiens
gaagatgaagataaatcagaatcatttatgcaaaaatatgagcaaaaaatcagacattttgaaattgcaggtgctgcagtgtctgaaatttccgggcct

SEQ ID NO: 815848 - DNA, 99 bp, Homo sapiens
ttaaaaatcaccagttactttaatgagcatctccttggaaacaatgccatctttgaatgtgagagataaacctagtttcagcatgtctgcagcagagac

SEQ ID NO: 815849 - DNA, 100 bp, Homo sapiens
tcggtggctgtgtataccctgcctttggtggtggcaccccagtcagaaacgggaccctgaagctgggatttaggcatcctgtttacgctggtctgtgggg

SEQ ID NO: 815850 - DNA, 100 bp, Homo sapiens
tcactacaaaccttaatctcatcttagagtcgacagaggtacgttcttggagacacagcaatgcagaagatggccaagtcccatgttttcttaagtggga

SEQ ID NO: 815851 - DNA, 100 bp, Homo sapiens
ctaacgcacagtcacacaagcttatcatctttgatgctcgacaaaacagtgtcgctgataccaacaaggattggattcagcatcaaaatacatctactca

SEQ ID NO: 815852 - DNA, 100 bp, Homo sapiens
aagattcccaaggctcggaagaggaagagtaatgaaatggaggaggtctgctcaccaggtggccagataccgcccacgtgcccccatcattgctgtgacc

SEQ ID NO: 815853 - DNA, 100 bp, Homo sapiens
gagaatgtaagacaggaaaataattaaatattcttaccgaggttcttgattattacagacctctttctgaaaagcccggaattggtacaagccatgtttc

SEQ ID NO: 815854 - DNA, 98 bp, Homo sapiens
tgtagcaaaagtgggaagccaagcctttcctcccggattggtccaaaggaagattttttccattgtttgaaatgtaacttatgcctagctatgaatct

SEQ ID NO: 815855 - DNA, 100 bp, Homo sapiens
ggcgaaatgtggaaaatttcctagaagcttgcagaaaaattggtgtacctcagacatatctgaagagatggattaagaatgctttggattaaggattgtg

SEQ ID NO: 815856 - DNA, 100 bp, Homo sapiens
cttcttcgagtatttgtagaaggttgctgatgattcctctgatcatgtcagtactttatgtctgggcccagctgaacagagacatgattgtatcattttg

SEQ ID NO: 815857 - DNA, 100 bp, Homo sapiens
cggcacagaggtgcttctgccaggacagagcgggatgccaccagcttgtccaaagggaagttccaggagctcctggtgggcatcgttgtggagaatgacg

SEQ ID NO: 815858 - DNA, 99 bp, Homo sapiens
gatgaaacgcatgtcaaccaaacatcagaggaataatgtggggaggccagccagtcggtctaatttgaaagattctggaacttttcaaagcctgactct

SEQ ID NO: 815859 - DNA, 100 bp, Homo sapiens
gagcatgtgaaagcccgcttcaagaggttcggaagtgccaaggtcatccggtccctccacgggcggctgcagggtggagattgatccaaatcctgatcag

SEQ ID NO: 815860 - DNA, 100 bp, Homo sapiens
aagaaagcaatccgagaggaaattctattttgactccagcacggggactttttttatgaagacatggagtccttgacgcagatgcttagggccttggcaa

SEQ ID NO: 815861 - DNA, 98 bp, Homo sapiens
gggatcctggggcaaatctctgctgtcgtcagcatctgccacagtagggtggattatgatcgcatcagggatgttggccctgacagggcggcatccga

SEQ ID NO: 815862 - DNA, 100 bp, Homo sapiens
cgtttcctgccttgctctttggaccacattgtcaattcacaccgggtttggaaatcccttgtctccaggttgctgggattgacttcttgctcaattgaaa

SEQ ID NO: 815863 - DNA, 99 bp, Homo sapiens
aagcataatactcaccctactattgaggtagtgtcagtggctgagtatcaccgcaggatcgatgctctaaatactgaagaactgcgcacactctgcaga

SEQ ID NO: 815864 - DNA, 99 bp, Homo sapiens
ttcagccaaagaaacaagccgtggaataggtgtatcaagtaatggtgcaaagcctgaaattcgacacctcttagaggctgcaatcccagagagagttga

SEQ ID NO: 815865 - DNA, 100 bp, Homo sapiens
cgcccccggccgctaccgctcaggtgctgcaggcacagcccgagaaaccgcagcactacacgctacatccagaagatcaagtcgggagaggaggactttg

SEQ ID NO: 815866 - DNA, 98 bp, Homo sapiens
agccgatagtcaagttcccgggggccgtggaccaatggtgaactagacccctggtcaggaggtggagtaactaaggatatcacagacactctggttgc

SEQ ID NO: 815867 - DNA, 100 bp, Homo sapiens
gttcaggcctctccaataacagccaaatatcagtttggctgctgacttgagtaaaccaatagataaaaggatatacaaaggaacacagcctacttgtcat

SEQ ID NO: 815868 - DNA, 99 bp, Homo sapiens
actgcgaaagctgtgatgagaatgaggatgatttcatccaagtcactaaaaatggatcagcacttttccagccattaactccaggctctcgagaatttg

SEQ ID NO: 815869 - DNA, 100 bp, Homo sapiens
cggccggacgacccaagcccgctgagcaggatgaggttggtagctggcagtgttgtgatggcttttgaagaagtatgcccggacagaatagatctgattc

SEQ ID NO: 815870 - DNA, 100 bp, Homo sapiens
aaacatccactccaacccatagaagtgcctcctcttcaacatcctcccaaagggacagtaggcagctgcagaaccttggcctgaaaatgctacattatat

SEQ ID NO: 815871 - DNA, 100 bp, Homo sapiens
cgactacggctgaaccagggttcatggggacatggcaaaacgctgatactaacctcttattcagaatgtcccaacaggaatctggtgaacagtaacaaac

SEQ ID NO: 815872 - DNA, 98 bp, Homo sapiens
agagactaaaatatggaacggcatggttggggaacttgtctatgggcaagatggattctggatatactctgagtattgtaacaaccacctggatgctt

SEQ ID NO: 815873 - DNA, 99 bp, Homo sapiens
gccagtggtgtggcccccggggagctggacctctccatgtccgcccagagcctcggggaagaggccactgtgtcttagttcacttgcacatggattcac

SEQ ID NO: 815874 - DNA, 98 bp, Homo sapiens
tcagcggtattctggtgcttatggtgcctcagggcacgctatcatcactaactacttgttgaactatttccctggtcttgaccttgaaaggaggaacg

SEQ ID NO: 815875 - DNA, 100 bp, Homo sapiens
agtggatggtgcgttgcgtgccctacttcaaggataagggcgacagcaacagctctgccggctggaaggagctatgaagacatgattggtgaggaggtgc

SEQ ID NO: 815876 - DNA, 98 bp, Homo sapiens
catcgttctcaaactcctcctccaacaaggtggcaaactgtggtcatatatcagtaaatttctaaacagaagtcctgaagaaagctttgacatcaagg

SEQ ID NO: 815877 - DNA, 98 bp, Homo sapiens
ggctcattgtagcctcaaactcccaggctcaagcagtcctaccatgtcagccttcccagtagctgggaccacagggctgcgagacaaccatccgtgtg

SEQ ID NO: 815878 - DNA, 99 bp, Homo sapiens
tttgcccgagcatatgcacagggtatcagccgaaccaagtactgggaggtacaggtttgcagattccgccagcagcacagcaagctctacagatgagtg

SEQ ID NO: 815879 - DNA, 100 bp, Homo sapiens
caagagatcctcctgcatcagcctcccgaagtgctgggattatagctcttcacagaggtcctccaggatcaaggggaccactgattccaccactgctgag

SEQ ID NO: 815880 - DNA, 98 bp, Homo sapiens
gagtatattcaaggaatggttccccaaataagttcagatcttcttcaagttccctctcccagcctgtgctgactcagccatcttcccattctgcatct

SEQ ID NO: 815881 - DNA, 99 bp, Homo sapiens
gcagccggcccgcgtcgtcctgtcaacctcgactcagcgctggccgcgctgcgcaaggagatgagtcattcaggagagcaggaaagaaaaggccatccc

SEQ ID NO: 815882 - DNA, 100 bp, Homo sapiens
ctgtggtgtgccacgacaagccgttatgaaagagatgaaaagtggggattttgccctgatcccagtcccgtcaggaagcccaagtatgtggaaagcccca

SEQ ID NO: 815883 - DNA, 100 bp, Homo sapiens
cttcctgtagaccctgccacgagcaacggccgcatcaagcagctgcgttcagtctgttctctggggaggcagtaaggggccgtggagctggcctcggcct

SEQ ID NO: 815884 - DNA, 98 bp, Homo sapiens
cagcttcctccattgtcacactgtatgctacagacctaggtcaacaagtcagttggaccacacccatagatgagagcagccagatgagtgacctccct

SEQ ID NO: 815885 - DNA, 98 bp, Homo sapiens
gagctgcagcactccagccactgctgtctccttagctgctcacatatggatactttcacagttcaggagccggtgaaacctgaagaaggcagagatat

SEQ ID NO: 815886 - DNA, 100 bp, Homo sapiens
tgccccctttcttgctccccatcctcttcttggcttctcatgtgggtttcccatccacataccaagctgatgaggatcccatcgttcttccccagtcctg

SEQ ID NO: 815887 - DNA, 100 bp, Homo sapiens
gtctgtgcagtggcacctgcgcgaagctggccaaagcctgcccagacggctcacctgtgcgggatggaacaaaagaatatgcttttaaggctattaacca

SEQ ID NO: 815888 - DNA, 98 bp, Homo sapiens
gctggccatgtttggcctgcggcacatggagcctgaccttagtgccagggtcaccatctaccaggtgattggcatgcactacttctctcccgtggaca

SEQ ID NO: 815889 - DNA, 50 bp, Homo sapiens
tccagaacctgcatgaggacctgaaggtgaggaagaggatggagatgaag

SEQ ID NO: 815890 - DNA, 98 bp, Homo sapiens
atctgatgtggtgcttttgaaccactggaaagtgaggaattttgaagtacaccgtggtgacattgtatcattggtagatcagggaagatgtgccttgg

SEQ ID NO: 815891 - DNA, 99 bp, Homo sapiens
ctcattgtagcctcaaactcccaggctcaagcagtcctaccatgtcagccttcccagtagctgggaccacaggtggaccaaactacgaattaacatgct

SEQ ID NO: 815892 - DNA, 111 bp, Homo sapiens
gtgattttccacagaggtgaccatgtctgggatggaaaaaagtctttatctcttgcaaggttcagtagtggcagatcatgactacattggattgcctgaaattccgattgg

SEQ ID NO: 815893 - DNA, 121 bp, Homo sapiens
gcccaacttctctggcaactggaaaatcatccgatcggaaaacttcgaggaattgctcaaagtgctgggtattgttgcagcatctggcagtgagactgaggatgaggacagcatggacatt

SEQ ID NO: 815894 - DNA, 100 bp, Homo sapiens
tgacgatgcccgggctgccagggtcaaggagctgcaccgccacatagaggaaggactgggtcgaaacatgtctgaccgctgctccacggccatcaccaac

SEQ ID NO: 815895 - DNA, 98 bp, Homo sapiens
caaattgtagccctacccggaaaaggtcttcatctgagagtacttcttcaacaggccgtggaggagctcctggagaccctggatctggaaaagaaggc

SEQ ID NO: 815896 - DNA, 98 bp, Homo sapiens
tccattgaacttcccagcactcgaaagggaccgaaatggagagcaaaggttattcacagtcctatggtggttatgagaatcaaaagcagagctcatat

SEQ ID NO: 815897 - DNA, 100 bp, Homo sapiens
ccagtgctgcaatgaaccaggtgctttatttatattcatacaagtgttgttctactttatgacgacgctttataaatcatgacaagatgtttaagatgag

SEQ ID NO: 815898 - DNA, 98 bp, Homo sapiens
gaggtggaagtccaagtcaaacgcagaaggactgcctcactgagcaaccaagagatccactagttcctggactatgggaactgatgactcgcccaatg

SEQ ID NO: 815899 - DNA, 100 bp, Homo sapiens
agagaagaaaattgaatttgtagttgttggaccagaagcacctctggctgctgtgcaatcgactgttaaagtggtgtcctgccccagattgccaccatgt

SEQ ID NO: 815900 - DNA, 100 bp, Homo sapiens
catgaccttccagaattacgggcaagcgctgttcaaacccatgaagaagaaaacaggcagattttggcgcggcaaaagtcaaactcacagtcggactccc

SEQ ID NO: 815901 - DNA, 100 bp, Homo sapiens
gtgacttccagaggcgtactcttctccaagatctgtaccttaaggcaggttctatgaaagatcctctgctagatgaccatggtgattttattagaatgtg

SEQ ID NO: 815902 - DNA, 100 bp, Homo sapiens
gtgtgaccagggttacagagcatctgggcttggagaccactgtgaaggagtacaagcgcaagctagccagagtttccctggtgcgcaaagaactcaggtc

SEQ ID NO: 815903 - DNA, 100 bp, Homo sapiens
atggagtgagactggtacctgatttggaaaagcttgagaaggttgatcaatttaagaacaatgtctcccttttgcagagctgtattgacttgttcaagaa

SEQ ID NO: 815904 - DNA, 108 bp, Homo sapiens
gccggtggaggaatttgtggctggctggatctctggcatccgtgtcattctggaccttactcccaactaccggggtgagaactcgtggttctccactcaggttgacac

SEQ ID NO: 815905 - DNA, 100 bp, Homo sapiens
tgcccttttatgatgtccttgatgttctcatcaagcccacgagtttaggccaagtcctgtatctgccatgtctgtggcgtccacctcaacaggctgcatt

SEQ ID NO: 815906 - DNA, 100 bp, Homo sapiens
cagcggcccgcgcccgccggtgccaccgtcgcccgcccagcctccgcccggtggcgacatgtctaagaatgtgagccagtcacagatggcaaaattgaac

SEQ ID NO: 815907 - DNA, 98 bp, Homo sapiens
agcatttctacgccgtggagaggagggcatattgcgagggctgctacgtgaggactattttaacaaagggaaaaatgagcctgaggacagtaagcttc

SEQ ID NO: 815908 - DNA, 100 bp, Homo sapiens
actttggttctgctagtcacgtttccaaagctgtgtgctcaacctacttacagtcacgttactacagggtttgactgccgatgtggaaatttgttttgtg

SEQ ID NO: 815909 - DNA, 98 bp, Homo sapiens
gcgaggccctcatgtaccacacggtctgtgtgtcatgattgcggcctccatttatacagacaggcgtgaagacattcacgacaaaaacgcgaaattct

SEQ ID NO: 815910 - DNA, 100 bp, Homo sapiens
gttatgaagatgcaaagcctgagagatggaaactactatgcatgtaaacaaatgaagcagcgctttgaaagaagacgatcaccttctccttattatagtc

SEQ ID NO: 815911 - DNA, 100 bp, Homo sapiens
aagccaacaacagtgacggaatgcctccatacatattgttctctggggccggactgagaaatgcctgaaggagacgacggaggagatccggcagatgggc

SEQ ID NO: 815912 - DNA, 98 bp, Homo sapiens
tgatggccagacctgcagttgctctacactttcaggcatccagtaccctgctgactctgacatgcccccagcctcccccagctctgcagggagccctg

SEQ ID NO: 815913 - DNA, 50 bp, Homo sapiens
tgtcggaggctgatcgcgcccagaagttcctccgtgtcacaaagcagtac

SEQ ID NO: 815914 - DNA, 75 bp, Homo sapiens
ggcggccatcgtcatcctgctgctgaagatctggaagacgcgctcctgcgccgaaatgcactcggtgatggaaag

SEQ ID NO: 815915 - DNA, 100 bp, Homo sapiens
gaacttacggaaaaagatgctacaattgcttctacatctccagttacagcccgaacactggaaactctgattcgactggccacagcccatgcgaaggccc

SEQ ID NO: 815916 - DNA, 98 bp, Homo sapiens
tggctgtcgctgtgctcaaaactgtcattttgggactgctgtgcctcctcctcctgtggtggaggagaaggaaagatattgatgagtgtagctactcc

SEQ ID NO: 815917 - DNA, 100 bp, Homo sapiens
tgaccccagagtggcagaaaggctgatgcagcagttacagatgtagagctaaaacgactgaaggatgctttcaagaggacctgtggactctcatattaca

SEQ ID NO: 815918 - DNA, 100 bp, Homo sapiens
accatcaagttcttcaggaatggagacacggcttcccccaaggaatatacagaatccaggagtcctccagctgagaacgaggtgtccacccccatgcagg

SEQ ID NO: 815919 - DNA, 100 bp, Homo sapiens
tcctgtgagaacacgagaagatggtggagaaaatactcatccatagaatccacattcatctcaatggaaggatcctgccttaagtcaacttatttgtttt

SEQ ID NO: 815920 - DNA, 100 bp, Homo sapiens
aattagggagtgatatttaccttgatgcttgaaagatctagccacgtgagcaggacagaagtgcacaacaaccatatcttgatttctgtggaccaggtgg

SEQ ID NO: 815921 - DNA, 100 bp, Homo sapiens
gagtatctcaagggacttgcaggaactgcagaagaagctgtctctgctgatagactccttccagaataactcaaagagagatcgatgtcttattgtgatg

SEQ ID NO: 815922 - DNA, 100 bp, Homo sapiens
gaattctgtggattttcgtctaaaaataacaagaatgggaggagaaggtttccacagtgcctacacaacctgataatccattttctcaccctgacaaact

SEQ ID NO: 815923 - DNA, 98 bp, Homo sapiens
ttcataccagctgaagagcgacaagccgctggcagccgcggatctcaccgccgctcagggaggatcccttttcccccagaaattactcaatgctgaaa

SEQ ID NO: 815924 - DNA, 98 bp, Homo sapiens
tgggctccctagccggctgcggtgtgagaatggagtgggcaggaaagcagcgggactttcaggtgtgcggagatgatcatcagcatggacagcagcca

SEQ ID NO: 815925 - DNA, 100 bp, Homo sapiens
aacatgaaacagcatctcagacttctttcccagatgtttataatgagggcacacagtgacaaaggagagcatgcttccagctggagctgagtccaagcac

SEQ ID NO: 815926 - DNA, 100 bp, Homo sapiens
cagaggcctacatcccacagagatacccagacaacaggatcgtctcgtccaagactttgacccctggtggacaaacgactgtgagcagaatgagtcagag

SEQ ID NO: 815927 - DNA, 101 bp, Homo sapiens
cccttacaagggttatatatggaattatggtaccctccctcaggaatcagtgtctgtccctgaagggtcattaaatcagctatgttcttcagaagaaccag

SEQ ID NO: 815928 - DNA, 98 bp, Homo sapiens
acaaaaacagaggatagggaggggaagaaatacattgtagcctaccacgcagctgggaaaaaggctttggcaagggcctttacaacaactaaacggac

SEQ ID NO: 815929 - DNA, 133 bp, Homo sapiens
gtctgtgtgatattagtgaagggactgttgttccagaggatcgctgcaaatctccaacctctggcaaagcctttggttgtgttggagggtacatcgccagcacgagttctctgattgacaccgtacggtccta

SEQ ID NO: 815930 - DNA, 99 bp, Homo sapiens
catgcggctactcctgcccagcgtggtggggcagcagaagctccagagcccagacttgcaggtccaagcatctcattttgaaggcctaatcacaaccat

SEQ ID NO: 815931 - DNA, 100 bp, Homo sapiens
acaaaataaactagaagatgttgtgattgacaggaatcttctaattcttggaaaaattctgggtgaaggaggtgataacctttatgatggtattgaggac

SEQ ID NO: 815932 - DNA, 100 bp, Homo sapiens
acactttagatgaagagttacccaagagagtgaaagctcgatttggaactgtacctggggaatgaattgtaggtttatacaccctggagtgaacgacaag

SEQ ID NO: 815933 - DNA, 100 bp, Homo sapiens
tttgtttttttcgtaaacatctgggtgtatatcaaacggcaagatgtccagtaatgtcccggcggatatgatccccaagtaagcccttggcacggaaatt

SEQ ID NO: 815934 - DNA, 99 bp, Homo sapiens
cagacgctgcagttggagcaacagtccaagctcaaacacacagatccaggtagtctctgctagtaatgagccccttgcctttgcttcctgtggcacaga

SEQ ID NO: 815935 - DNA, 100 bp, Homo sapiens
ctgctaaatatatccgtaggaatggagagggaccggatctcaggtgggaagaagagcgctatcctgaaggcatcaagtggaaattcctagaacataaagg

SEQ ID NO: 815936 - DNA, 98 bp, Homo sapiens
agagaacttcccagcatacctgagaatgagattggaggcctgctgcagacccgcggccacgagtggggagtgaccacaggcaggaagaggcgctgcgg

SEQ ID NO: 815937 - DNA, 100 bp, Homo sapiens
tgaagttctccgccatgaacctgaggggcctcttccaggacttcaacccgaggtgcacaggtttcatattccagaaggttggaaagttggctgcaacagc

SEQ ID NO: 815938 - DNA, 100 bp, Homo sapiens
gaaattcaagaattatgactcatcggtcagcagaaaactattcctctacacagccgactagttatgatcagagcagttactctcagcagaacacctatgg

SEQ ID NO: 815939 - DNA, 100 bp, Homo sapiens
aaagtctctcttcaccctgccgtcatgtctaagtcagaggcacccaaggatcctgccagacagcacactttggaggaaggtctgcagggagcagctgagc

SEQ ID NO: 815940 - DNA, 100 bp, Homo sapiens
gaagaagaatttcgatctccgccctggggtcattgtcaggtttggcatgagagggagtgaaggatgtgcctacctcagcgatgatggtgcagcaacagct

SEQ ID NO: 815941 - DNA, 100 bp, Homo sapiens
caaggataggttgggatcctgaacccccatccctcagcatgtgacttcatttagagccttaaagaaggagaggatcagaaagagataaagattgagccag

SEQ ID NO: 815942 - DNA, 98 bp, Homo sapiens
ttggaggccaccctggcagagcagcgggatgagttggaaggcttccaggatgacgccgggaaactctttatacagtgaaacaggaggaaagaaaaatg

SEQ ID NO: 815943 - DNA, 98 bp, Homo sapiens
gtggcacacagtctactatcaccgacagatctcacattcttgaaggtggcattgaagagcactaagatcggaagatgagtgagcttgaccagttacgg

SEQ ID NO: 815944 - DNA, 100 bp, Homo sapiens
gggaagtcggggtctccttcgccttctgtctttctgcgtcctactagcaggaatcttctgcggcttgtccatagtgtgaataaaaactaaatcacatcta

SEQ ID NO: 815945 - DNA, 121 bp, Homo sapiens
agccgacgttcgagaggaagattcttacctctttgatctcgacaataaggttggctcaaaaacagaagttgctgagtgcaaggagaaattcgccgcctccaaggaccccacggtcagtcag

SEQ ID NO: 815946 - DNA, 98 bp, Homo sapiens
aaacgcgagtccggagaggagttccgcatggagaagttgaaccagctgtgggagaaggcccagcgagctgaagccgacgtagcttctctgaacagacg

SEQ ID NO: 815947 - DNA, 100 bp, Homo sapiens
gtgtctaaggattgtcctgagaagatcctgtattcttggggagagttgctaggaaaatgatgtctgtagcatgcggcttgtcacatctgcaagggagctg

SEQ ID NO: 815948 - DNA, 99 bp, Homo sapiens
gcctggaggacacgcctgtagcactgaaggtctcgctgtgtcgcccaggctgtaatgcagtggcgcgatcaccgctcactgcagtctccacctccagga

SEQ ID NO: 815949 - DNA, 100 bp, Homo sapiens
accaacgctcgcgactgcttcctccacctgccgcggcgtctcgtggcccagctgcatctgctgcaggcattagtatcatttgaagacgtggttgtgacct

SEQ ID NO: 815950 - DNA, 99 bp, Homo sapiens
tccattccaacacacagagaaattcagcagatccgcaaacgattaattctgtcagacaaagggcagctggattggaagaagatgtatttcaaacttgtc

SEQ ID NO: 815951 - DNA, 100 bp, Homo sapiens
caagtcaacagaatcagagctaaaaaaaaaggaaaagcggcgtgatgaaatgctgggacttgtgcccatgagggcatccgcttcgatcctgaaattccgc

SEQ ID NO: 815952 - DNA, 100 bp, Homo sapiens
gagaagctctaagtacactcgtcttgaatagatgagtgatgtgtctgcaggaggagccactgtttttcctgaagttggagctagtgtttggcccaaaaaa

SEQ ID NO: 815953 - DNA, 100 bp, Homo sapiens
atggatctgtacatcaaaaggatggattaaacgatgatgattttgaaccttacttgagtccacaggcaaggcccatgatctgcctcggatgcgattcaag

SEQ ID NO: 815954 - DNA, 100 bp, Homo sapiens
ctgaattagaactgcagaggttcctctacagcaaggtaaaatgtgtccaggatgcaattcgggccaagaaaaaagcattcaatttcctgggagagatcat

SEQ ID NO: 815955 - DNA, 100 bp, Homo sapiens
gaacccaccagaaggaaccaattccggacacataacaagcagcagtgaggacaccaaaggctccaccgaggacaccgcgtccagcttgtgtggcgaggag

SEQ ID NO: 815956 - DNA, 109 bp, Homo sapiens
tgattcaagtgttggcggatggaagggaggagactcctgaccctcagaatgcctgaagcaggacattctaaatgaaaagactgaattggaagcaacacttaaggaagcg

SEQ ID NO: 815957 - DNA, 100 bp, Homo sapiens
atgcatcagttccatcgagccattactacagccttatgtttgatcatcggccaaggtcctggcgagaactgcctctgcggctagctgattttggggtact

SEQ ID NO: 815958 - DNA, 98 bp, Homo sapiens
agtggcacacagataccgtttattaaaagagctgtggcttttgcaggtcgaagtaagaaggaaaccaaatattctcttaaggctgtcgaagacatgtt

SEQ ID NO: 815959 - DNA, 98 bp, Homo sapiens
ctccagtacaaccttcaaaacaactggaatatttagcaaggattcaaggctttcagactgcatcatctgctattaaaggtgctattcagctgggaata

SEQ ID NO: 815960 - DNA, 100 bp, Homo sapiens
ctgggatcctacgtgcatgaagatggacgaggtcctgtacagcatcgccgagaagttcctggtccagaactttacacagaaaaggtgctcaaaggatatt

SEQ ID NO: 815961 - DNA, 100 bp, Homo sapiens
gaaggttggcgaaattgagtttgaagggcttatgaggactctggacaacttggatgctattcctatgatcagcaaactgaggtacaatcccagatttgac

SEQ ID NO: 815962 - DNA, 100 bp, Homo sapiens
tgactgaggcagtgcgggccctgctgatgtggatgaggcttccaagaaggagatcaaagacatcctcatccagtatgaccggaccctgctggtagctgac

SEQ ID NO: 815963 - DNA, 100 bp, Homo sapiens
agaataattattgagctacacaaacagttcaggccaccgatcacacaagaagaagatgagaatgtgcctactgctcctgatcctccaagtcaacatttac

SEQ ID NO: 815964 - DNA, 100 bp, Homo sapiens
aatgaagcttgtgaatctgtaatccagacagcctgcaaacatataagatctggagacccaattccccagaagaccatgtctgtgttgagctgtatctgtg

SEQ ID NO: 815965 - DNA, 51 bp, Homo sapiens
ggcctctcccaaagcacctgcgcaggtgaccaagaatatggcccaggtgac

SEQ ID NO: 815966 - DNA, 98 bp, Homo sapiens
cggctccgcggcgatggcgctctataacccctaccgccacggaagagagaatggattctgcaagaccatgtctacacagacaacaccatcttctgaat

SEQ ID NO: 815967 - DNA, 100 bp, Homo sapiens
cgtgcggaccgcgaggccgcgggcgggtggaggcgcgtctccggcacggaatactcccccagttgcaagaggcgcaggaccgtggaagacttcaacaaat

SEQ ID NO: 815968 - DNA, 100 bp, Homo sapiens
ttttcaggcaatttccctgagaaccgtttacttccagaagattggtggagcttgatctgaagatgttcatttggatttggaagaccgcctggcaaaattt

SEQ ID NO: 815969 - DNA, 98 bp, Homo sapiens
cagattttgcattggatattcgcatgcctggggttacacctaaacagggacacgtcaaaggctacatatcgcatcagcatcagaagctggtggtcagc

SEQ ID NO: 815970 - DNA, 98 bp, Homo sapiens
catgagtggttccatgatgggaagtgacatggttgaatgatcctaaaatgtctgaaacggagcgccagtccatggaaagcgagcgtgcagaccgcagc

SEQ ID NO: 815971 - DNA, 103 bp, Homo sapiens
cagagattgaaccttgggaagatgctgattaccttgtttacaaagtcacagatagatttggctttttacattgttgacctcctgtactggagagacattaaga

SEQ ID NO: 815972 - DNA, 99 bp, Homo sapiens
aggaagactgtatgtattggtacaactttctggcctatcacatggccagtgccaagatgcacaagactggggactccactgtgagaccacttacaccaa

SEQ ID NO: 815973 - DNA, 100 bp, Homo sapiens
ctgcttggagaggaagaaggtagaggagccagcgaagagtactgggatttaatgaatttgtctgaaaaacatgataagataccagaaatctgggaaggcc

SEQ ID NO: 815974 - DNA, 121 bp, Homo sapiens
gccattgctgctgcaagccttataactgccttcagtgcctggacaagacgcctcttgttgctgtaccacatagaattcactcaacaagtagaaacgtgagagaagaaaaaacacgctcaga

SEQ ID NO: 815975 - DNA, 127 bp, Homo sapiens
ccaggcttcctgtgctgtcttggggacctgctcagaggctggaccgcgtcatgctcagaagggcatcctattttcattggtggtgatgctgtatgtcatctgggtccaggcagtggctgacatggaa

SEQ ID NO: 815976 - DNA, 100 bp, Homo sapiens
ctacaaccttcgatctcctgacgagctttatcctgtggataaacgcagagtgaacgagtttggggagtcctacgaggagaaggccacgcgggcgccccac

SEQ ID NO: 815977 - DNA, 100 bp, Homo sapiens
ccctgcagtccaccacagatgccacagcagtactcagtactggtgcgataccagcgggaggatggcaaagtccacgccgtgaacctacagcaagcgggcc

SEQ ID NO: 815978 - DNA, 98 bp, Homo sapiens
gggactctgcaatagatacatggagcccatcagaatggcagatggcttatgaaccacaggttaatgatgaaatggcaggtaattcacacttttggaca

SEQ ID NO: 815979 - DNA, 98 bp, Homo sapiens
ccttggaggggctgctggacctcagctacccccgcacccacgcggccctgctgaaagtggcgcaaatgtagccggatcgagctgggagatgtgacacc

SEQ ID NO: 815980 - DNA, 100 bp, Homo sapiens
aaaaaacaaaacaagaagcttatgcccaaaacagagcaagggcaaaagaattccataaggactacagagacatcattgacactccaatggattttgctac

SEQ ID NO: 815981 - DNA, 98 bp, Homo sapiens
gagcagtgcatggttatggatactggacaaggatatttggaaagggtgaagcagtcagagctgttcgacaggtggaagagcctccagatgtgcaaatg

SEQ ID NO: 815982 - DNA, 98 bp, Homo sapiens
ctgatctgagctcagacctgccaatttaccagagataattgataacaccctgtaacagctgagaatttggataaagagagggcagtgctactacaacg

SEQ ID NO: 815983 - DNA, 98 bp, Homo sapiens
agcagtgccctggggacaaggtgtagaaatagaaagggccctcaaacaggatgcaatgcagtatgcttctgaatctaaagatactgaattggctgaag

SEQ ID NO: 815984 - DNA, 98 bp, Homo sapiens
tgtgagcagtccctctgacacatccaacttcgacgtggatgacgacgtgctgagaaacacgtgatggaatggggagaagatattaaagcagtttcaaa

SEQ ID NO: 815985 - DNA, 100 bp, Homo sapiens
actacatttgctttgatactttcacagaatacttaaggtggctgcgacaagtctccaagggaaaggcgtaggaggaggagcaggagttcttccagatcgc

SEQ ID NO: 815986 - DNA, 99 bp, Homo sapiens
gcgggggctatggcgccagtaagaagaaaaaagcgtccgcttccagctttgcgcagtagtgagttgaaactcttggaggaagcaaccatttcagtctgc

SEQ ID NO: 815987 - DNA, 98 bp, Homo sapiens
gcaccaagcacattatttgatttcttggaatctaaaatgggaactttgaatgtggaagtctatgactttgaaagaagccatcaagtcttcactcatca

SEQ ID NO: 815988 - DNA, 98 bp, Homo sapiens
ataatgatagaatgaagaccacaataaaagagacctctacttagctcagcaattcttaccttgaatcggtgagtttcaaggatgtggctgtggacttc

SEQ ID NO: 815989 - DNA, 100 bp, Homo sapiens
tgccaggcttgccgcttcatgaagtgtttaaaagtgggcatgctgaaagaagatactgtgagagtcgacgaagggttttgttacagcatgtgcatgaagg

SEQ ID NO: 815990 - DNA, 100 bp, Homo sapiens
gatggcgagtggctggtgcccattgggcagtgcctgtgccaggcaggctacgagaaggtggaggatgcctgccaggtgccccaggtgctaaagagctgtg

SEQ ID NO: 815991 - DNA, 100 bp, Homo sapiens
aagccttgggctcccttgcaggattcagaagtgtatttagcatctctagcagagagagatcatcattgcctgaatttagctttgtgactgcaagagcaag

SEQ ID NO: 815992 - DNA, 98 bp, Homo sapiens
gaagatacatgagacagcagccaaacccccagtgccgccaagctcctggacaagaacccattctcggtcagtaacccgaaccctctgcttccttcacc

SEQ ID NO: 815993 - DNA, 100 bp, Homo sapiens
ggcagacagcggcgccttcctgctgctcttcctgctcgtgctcactgtcaccgagccgctgcggccagactcttccagctggagttggaggctgacgccc

SEQ ID NO: 815994 - DNA, 100 bp, Homo sapiens
ttggattctccagtacctggatatcagcatacaattcttacatattcctggtgtagaatctgcaaacagaggaggtggccaagttggagaagcacttgat

SEQ ID NO: 815995 - DNA, 100 bp, Homo sapiens
gttccagtgtcagtagcagaagctactctccagaaaggagcaaatcatactctttccatcagtctcaacatagaacttaatcctgattatcgagatgccc

SEQ ID NO: 815996 - DNA, 100 bp, Homo sapiens
gacctccgccttacagcaggagactgaaaaggatcccctaacaacagtgagagagcaatgcgagcagttggagaaatgtgtaaaggcccgggagcggcta

SEQ ID NO: 815997 - DNA, 100 bp, Homo sapiens
gctacagaatccagctgctcatcatagtgccagagtcagtcctaggggaaaagaggatccctgctcataccattactgggacttccacccccaccacgtg

SEQ ID NO: 815998 - DNA, 98 bp, Homo sapiens
caattagaaatgcaacttgagaaacccaaacctgtaaaaccagtgacgttttccacaggcatcaaaatggagtccttcaataatgttaaacagtggct

SEQ ID NO: 815999 - DNA, 98 bp, Homo sapiens
acgaaaactgcagaggcttctgggccttttaactttggagaagttgaggaccttgtcgctcatttggcagaagaatctgaattatccagaacagaaag

SEQ ID NO: 816000 - DNA, 98 bp, Homo sapiens
ccagcagcccccgaaggccctatcaggacatggagtatgaaagacggcagaagcaacaaattacccacctgcatgagaggataagggataatgaatta

SEQ ID NO: 816001 - DNA, 138 bp, Homo sapiens
ggataattctttttatgtgcgaacatgtaacaagaatccaaagaaaacaaaatggtggtatcatgatttgcttggaacggtagaagaaatccttccaagcctctcagaaaatatcagtgtttgggggatgaaagattc

SEQ ID NO: 816002 - DNA, 100 bp, Homo sapiens
acattatgtggaaggatcaacagtcaattgtgtactagcattccaagttaatggccagccaagaccccttgaatcaagtcaggtgaaatatctccgtcga

SEQ ID NO: 816003 - DNA, 100 bp, Homo sapiens
gaactacagaacagcacgtaccagaggtggaagtccaagtcaaacgcagaaggactgcctcactgagcaaccaagagggccaagaaatgaagcttcaggc

SEQ ID NO: 816004 - DNA, 100 bp, Homo sapiens
ttgtctgctttgcagaaggcagtttcccaataaagaagttctgatcaaacaccagcagctgtcagacctgcacaagcaacacggaggtagtcacgtttcc

SEQ ID NO: 816005 - DNA, 98 bp, Homo sapiens
tgggtggatccggatcgcatggaagacgcagcctggccgcgctctcccaacagagtttcttgatataagccagctgtctttcatccatgatttgggac

SEQ ID NO: 816006 - DNA, 100 bp, Homo sapiens
gttgcatgaagctgacgccctcctcttctggctcagcagctacctggtgatgcccttcatgcagacggatctgcagaagatcatggggatggagttcagt

SEQ ID NO: 816007 - DNA, 100 bp, Homo sapiens
aaacgccaggctctctggaggccaggagatgagaatgcagaatctattgatcttaaacagtttttcgaccaacatttttcacatatatactatgtgttct

SEQ ID NO: 816008 - DNA, 100 bp, Homo sapiens
tgccccaatggttcgatattcaaaagttttgagacgtctggttacgcttattactcaactggcaaaagaactgtcaaacaaaggtgtacttaaaactcaa

SEQ ID NO: 816009 - DNA, 126 bp, Homo sapiens
tgaaaacgagcccctatcctaggattacctgaaggtgaaacagattgagccagaaggaagacaatgctgggatacttgactttcagagatgtggctatagagttctctttgctggagtggaaacgc

SEQ ID NO: 816010 - DNA, 100 bp, Homo sapiens
tgacagaaaaattgaattcccaccccccaatgaggagcccctgggaatcgtggcggatataataggaggggcaacatgccacagagaggtggtggcggtg

SEQ ID NO: 816011 - DNA, 98 bp, Homo sapiens
aggaggcaggagaagaaagccgataaggatgacattcggctgctgccgtcagcattgggtgtgaagaagagaaaacgaggacccaagaagcagaagga

SEQ ID NO: 816012 - DNA, 98 bp, Homo sapiens
tcactgcggaggcttcctgctgcgagcccgctgggtggtctcggccgcccactgcttcagccacagccgactccacgggaacccactccctctacacg

SEQ ID NO: 816013 - DNA, 100 bp, Homo sapiens
ctcagaagcatgtgtcttccccagctctgcagccacatactatccgtttgttcaggaaccaccagtgacagagtgaaaggtgtagcagtcactcggccta

SEQ ID NO: 816014 - DNA, 100 bp, Homo sapiens
gtgttgtcaacaacgctggccaccgaacagtggaggccatgtgtcttttggcagtcagtccagatgggaattggctagctgcatcaggtaccagtgctgg

SEQ ID NO: 816015 - DNA, 134 bp, Homo sapiens
ggctggcgccgctgcgcgcatgggcctgttcctggcccgcagccgccacctacccagtgaccatgataggtttcccaggcagctgcagacttgaaacagttctgtctgcagaatgctcaacatgaccctctgct

SEQ ID NO: 816016 - DNA, 100 bp, Homo sapiens
ccgcgccgctgccgctgctgctggtgttagcgctcagtcaagggacttgccatgaggtgttgaagccttgtttcactgagttggagagactggacctaaa

SEQ ID NO: 816017 - DNA, 98 bp, Homo sapiens
gactacctgctgtacaccctcaacaaacaccagcgctttggaaaccaggcgatgcggaagaagctaatcttgtacttcaagaggaggaatcacgctcg

SEQ ID NO: 816018 - DNA, 100 bp, Homo sapiens
atgaagattcaataacagttgcatttgaaaacaagtacagcagggaagaactggaaactcagagaaagaaactgcccttccatctacaaaagctgagttt

SEQ ID NO: 816019 - DNA, 98 bp, Homo sapiens
tggactggtgtctggaccagctagagaccctacagaccaggcactccgtcagtgagatggcctccaacaagactgtcttctgaagattgatgtctatt

SEQ ID NO: 816020 - DNA, 98 bp, Homo sapiens
ctgtggagactgatggtgaaggacatgtccagtatatacagcatgcttgagagttcaaaccggcttgatgaagaacacaggctaattgccaggtatgc

SEQ ID NO: 816021 - DNA, 98 bp, Homo sapiens
agatcctgtgtcacccggcaactcagaaacatcaggtccaaggtatcatgatattagctggtttgacatcaagtcatttgtgagtcatcagatcttct

SEQ ID NO: 816022 - DNA, 100 bp, Homo sapiens
gaactcattattgcacatggacgttgcatgatatctcagaatcggaatttctaactgaagctgaaatcatttgtgatgttgtatgcctggtatatgatgt

SEQ ID NO: 816023 - DNA, 100 bp, Homo sapiens
ggactgaccgctgccgcccagcacgtccagataatatcgtctactgcattatttttggctgcaaaagtggaagaacaggctcgaaaacttgaacatgtta

SEQ ID NO: 816024 - DNA, 100 bp, Homo sapiens
tacaatttttagtggagttgccatctatgttaatggatacacaggaaacggaggtggagctgtacaacgaatttcctgaacctatcaaactggacaagaa

SEQ ID NO: 816025 - DNA, 100 bp, Homo sapiens
cctgttggaagctgcccgtgccaacaatatgcaagaagtcagcagtttgaaaaagaacttcagagaatttcggaagcctatgaaagtctggtcaagtcta

SEQ ID NO: 816026 - DNA, 100 bp, Homo sapiens
gtctccacagctttccctgtcctcttctccaacggcatctgtgactcccaccacccgaagccgaataagctatatgttctcctttcagccaagacctttc

SEQ ID NO: 816027 - DNA, 99 bp, Homo sapiens
tgaagagggtctggaggagccttctcaagaacagagcctgcgtatcagaatctgagacagcgtgttgacaactttgttgcaaatcacttggcaactcac

SEQ ID NO: 816028 - DNA, 100 bp, Homo sapiens
gacaaccatccgtgtggtgtccatggacagagactaccacgtggcatgttaccactgtgagcgtccgtctccaagagagtatgaagagagtgcgtctgta

SEQ ID NO: 816029 - DNA, 100 bp, Homo sapiens
acgcaggacatgctgctggagatgctggaggacatgaccacagcacagagatactcctgagaataaccctgatactccatttgatttcacaccagaaaac

SEQ ID NO: 816030 - DNA, 99 bp, Homo sapiens
ggccgaggcctgggttacaagcagcaagtgcgcggttggggccactgcgaggccgttttaggataggaaaaacttgttggagacccgattgcacatcac

SEQ ID NO: 816031 - DNA, 100 bp, Homo sapiens
accatggaagggttcacgctgatagctgatagcttttacagtgctcattcctaacagtggatttactttggtggtgaccgcggtggcttcaaaaattttg

SEQ ID NO: 816032 - DNA, 98 bp, Homo sapiens
gggacacacctccattggatttaaaagacagtcctcgtcagcactgactttcagctatggaatcgactgtacaatttgttcaaggaatttttgtagaa

SEQ ID NO: 816033 - DNA, 100 bp, Homo sapiens
atttgtgaagctgggaatcatttcatcaatgtaatgttgtctcatcccaatcacacagtttcttatctcagtcatcactatggtgcttctgacgttgatg

SEQ ID NO: 816034 - DNA, 98 bp, Homo sapiens
gctatcctgccaactctatcgtggtcgtaggaggctgtcctgtctgcagatcgccggggagtggcctgtacagcaacctccagcagtacgatctcccg

SEQ ID NO: 816035 - DNA, 99 bp, Homo sapiens
tcaacccgagtgcagtttcgatggaaaatgaagttgcatccaagaattgatgcccggagagctgatgaaaaccttggaatgcttcttgtagaatttttt

SEQ ID NO: 816036 - DNA, 98 bp, Homo sapiens
ttgagtatttcatcagagatttatcttttgacccgatatgctgaatctctaggtcagtatgctgctgcgtcccaatcctgtaacttcgcactcaggtt

SEQ ID NO: 816037 - DNA, 100 bp, Homo sapiens
ggaaaaaataatggaagtgttggaaaagtccagtactttaaatgtgcccccaagtatgtacgaggatgtcgtccaggaaagattgtgcagatgactgaag

SEQ ID NO: 816038 - DNA, 100 bp, Homo sapiens
gtatgcctcaatttgctggatttaagcactgctgcactttatgagagaacaccttctgcagtggggaccatgtgtcctggcacagccctttggataacag

SEQ ID NO: 816039 - DNA, 100 bp, Homo sapiens
ggaaaattaactataaaggagagcgccaaaccattactgatgatgtggaggttaacagctatctttctgaaatggaagttccagtattaccgaaaatctc

SEQ ID NO: 816040 - DNA, 98 bp, Homo sapiens
cccgcctctgggccccagacaggcttgtgcagacataagagccagttcagtgttttggcagcaaatggagttcgttgatagcctgcatggccaaccca

SEQ ID NO: 816041 - DNA, 100 bp, Homo sapiens
ctcgaattccagaatgatgaaattgtgtggtactgtgaaggcaaggagcttgaaaattccccagatattcacatcgtccaggcaggaaatctgcactcac

SEQ ID NO: 816042 - DNA, 100 bp, Homo sapiens
acccggcctgggagaagcagcagcgcaagggggcagctggcattttatgctatgtgggagcctatgtcttcatcacttatgatgactatgaccacttctt

SEQ ID NO: 816043 - DNA, 100 bp, Homo sapiens
cacagtggagcagctctgaagatgcaaagctgtgttccagatcatctccctggtaatttaccccgtgaagtacacccagaccttcacccttcatgccaac

SEQ ID NO: 816044 - DNA, 98 bp, Homo sapiens
acccagttccaggtagacatggaggccgtcggggagacgctgtggtgtgactggggcaggaccatcaggcttggtggcatgcatgtttagtcccagct

SEQ ID NO: 816045 - DNA, 100 bp, Homo sapiens
catttgattgtattgatgatactaagcttgtgaagcagataatcatatcaattgaaatggcgattgagacgctgcaaaagtctgacggtctgtccactca

SEQ ID NO: 816046 - DNA, 100 bp, Homo sapiens
caggtgtgaaccactgcgcccggccagaagtttttcttgtgagttgaggtgaacatctgaatcccctcggggaactgagagacggggtttcgccatgttg

SEQ ID NO: 816047 - DNA, 100 bp, Homo sapiens
ggtattcccttggaaatggtccacaaaggcctccgtgtggggctggtgtacctggcaggagtgattgcagtgggacctgatgcagaacatcatgaatgac

SEQ ID NO: 816048 - DNA, 98 bp, Homo sapiens
ttaatgtttttattaaatttggagggaagtttttgcagcctttcgcctagcgtggccttcagaaagtgactgagaccgaagatgatagtgatagtgac

SEQ ID NO: 816049 - DNA, 98 bp, Homo sapiens
agctttctggacttccagctgggcctgacagagaaggctcactcaaggatcagttggctttagcaattggtgcaactgccaaaagaactggcgtaaga

SEQ ID NO: 816050 - DNA, 98 bp, Homo sapiens
aaaagaagaactcgcaaaagctcagagggtgctaaccggatagtattagaagactccaatatcttgcagcctgtgggacttactgtgtttgaaaactg

SEQ ID NO: 816051 - DNA, 98 bp, Homo sapiens
ggctaatttgatggagaaggttcgaggcctacagaacctagcctatcagctggggctggatgagttcttgcctccagcaaatccatcctccaatcctg

SEQ ID NO: 816052 - DNA, 98 bp, Homo sapiens
gagaacatttacaaagtctacaagaaatgcaagcgagggttatcaatactctggctgaccatcatcatcgtgggactgactttggtggaagtccttgg

SEQ ID NO: 816053 - DNA, 100 bp, Homo sapiens
catgattttcaagcacttgctctggagggaagagcgatgggagagtatacaccaacaagtattccagaagtccaacaagagaatataatcaatcctcaag

SEQ ID NO: 816054 - DNA, 100 bp, Homo sapiens
tttcctgcatggattgggagatactggatagaagaatttcgaaggctgaggacacatgttaagggggcagaacttgtggaaggctgtgatgggattttgg

SEQ ID NO: 816055 - DNA, 100 bp, Homo sapiens
gggtgatttgttctgtatcagaagacaatatcatgcaagtgtggcaaatgaacatttccccagaggagctcaaaatggagttgccggagagacagcccag

SEQ ID NO: 816056 - DNA, 100 bp, Homo sapiens
gaacattgaattcagggacctttcctattcggttcctgaaggaccctggtggaggaagaaaggttttgagcaaaattttggactgtgaagcaaggcattg

SEQ ID NO: 816057 - DNA, 100 bp, Homo sapiens
cttggagtctttgtccaggacgaacaccttccaccatgaccacctcagcaagttcccacttaaataaaggcatcaagcaggtgtacatgtccctgcctca

SEQ ID NO: 816058 - DNA, 100 bp, Homo sapiens
gctgtgggtgctgggacttcccgtccgcggcgtggaggttctgccttcccaggaccctgcccttccccagaaggagcaggagaaaatgaccaagtttcag

SEQ ID NO: 816059 - DNA, 99 bp, Homo sapiens
ctaatgagggtcatattaaactgacggattttggcctttcaaaagttactttgaatagagccccatgttatagtacattgtgcagcagagagaagacca

SEQ ID NO: 816060 - DNA, 100 bp, Homo sapiens
tgcacagtccccagcagctggcagaagaagcaacacgcaaacgagagctgaggctaatgaaaaacaggccagcgatctgtacatgagacccaggaattat

SEQ ID NO: 816061 - DNA, 98 bp, Homo sapiens
caccagtccaactcgggtcgcccccaccattatttcgttccagggtctccctccactgctgtagtaacccgggtccggggcctcggtggtgctcctga

SEQ ID NO: 816062 - DNA, 99 bp, Homo sapiens
ttctgtcaccttcctcacggaccttggtcacggccgcaggtgaccccttagcccagctccagtgggcgggtggcagggtgataaaagaaaatgtggctg

SEQ ID NO: 816063 - DNA, 100 bp, Homo sapiens
gtgctgcccatcggcgacgcggacgcggctgcagcagtgaccacgtcgtacagatcctgttcatcttcatcgacagcgaccacaccgacaaccagcgcat

SEQ ID NO: 816064 - DNA, 99 bp, Homo sapiens
gaagaggaaatgaagggtattgccgctgttactgatatacctttaggcccacctgtagatccagatgaagactctgacaacagtgcaatttatgtacaa

SEQ ID NO: 816065 - DNA, 100 bp, Homo sapiens
gtttaacagaataagagaaattccagggagcgccttcaagaaactcaagaatttgaacacacttgatcaccagcagcttgcaaaacttatccaggagtcg

SEQ ID NO: 816066 - DNA, 98 bp, Homo sapiens
caacgggtttgccgccagaacacagaaaccagactgtgatgactgggagagcgggctgaatgcaatggagtgtgcattacatttggaaaaaaatgtga

SEQ ID NO: 816067 - DNA, 99 bp, Homo sapiens
tttgtgccagctctccagagagaaaagcaaatgcagccctgaggatttggctactgcatataacaacagggggcaaatcaagtacttcagggttgattt

SEQ ID NO: 816068 - DNA, 147 bp, Homo sapiens
tcaaccttcactgtcctaaaacgttaccagcagctgaaaccaattggctctggggcccaagggattgtttgaacctctgtattactggcaacagactgaagatgatttgacagtaaccatacggcttccagaagacagtactaagga

SEQ ID NO: 816069 - DNA, 100 bp, Homo sapiens
gcccctccccgtccctctacgcgttttggttcccggttggtgcttcctgttcgcagctgcggcagaaccaaagaggttgttgtaaatgtggatgatgatg

SEQ ID NO: 816070 - DNA, 100 bp, Homo sapiens
acccccatctcagaacagaagggtgggaagccagagccgcctgccatgccccagccagtccccacagcataacaggcctccccatggccacccatggacc

SEQ ID NO: 816071 - DNA, 100 bp, Homo sapiens
gtctcttggtttggtctctaaaagtaaagggactttgttggcattaggatgtcatgtgggtatatcagatgaacatgctgaagacaaggtgaaaaaaatg

SEQ ID NO: 816072 - DNA, 100 bp, Homo sapiens
caaaaaaatgcttcatagactgacagagtgcctggtgaagaatgtgatgggatcactagcatgtctgcggagagcggccctgggacgagattgagaaatc

SEQ ID NO: 816073 - DNA, 99 bp, Homo sapiens
ttgtttatcgaggtttttgggctggtggtttcggcaggtgaggcaggcgactaatcagattgtgatgaattgtgctgatattgatattattacagcttc

SEQ ID NO: 816074 - DNA, 98 bp, Homo sapiens
ccggctgtaccggcagatcctcaggggcaagtacagttactctggggaggtgctgagcgccgtcctcaaggatctctaccacctgctgaagcacgtag

SEQ ID NO: 816075 - DNA, 98 bp, Homo sapiens
gtacctgcccccagctccggaaagtggcagcaccaacccatgggttcagttcttttgttccacggagaacaggtgactctgacatcattagaagcatg

SEQ ID NO: 816076 - DNA, 100 bp, Homo sapiens
atctgcttacagatgcatgcttcaaggaaaactgtggtatgtctgtgtgtaatggtaaaatatatatcctgggcggaagacgggaaaatggagaagccac

SEQ ID NO: 816077 - DNA, 98 bp, Homo sapiens
tataagaagagaaactcagcgctggggaagaagcactgcctcctaaaccaccaaaacctactactgtagccaacaacggtatgaataacaatatgtcc

SEQ ID NO: 816078 - DNA, 100 bp, Homo sapiens
ctgcaacaggctggagatatgcagagtcttcatgggggaggttttaaatgcacagagagcaggatacaaggcagccatagttcacaatgttgattctgat

SEQ ID NO: 816079 - DNA, 98 bp, Homo sapiens
acacgcccggaagccctgaccacagagacgcgtccagtctggctcttgctgattgaattcctttggtgcagtttagcatgttcctctgtgttctgcat

SEQ ID NO: 816080 - DNA, 98 bp, Homo sapiens
ggagttttccatatgtgaccatggatataaaatcacaggccgctcctgacatcactggccataaacggagtgagaacaagaatgaagggcaggatgcc

SEQ ID NO: 816081 - DNA, 60 bp, Homo sapiens
ggtcaagcgatctgctggcctcggcctctcaagagctcccccatccaggaatccactgct

SEQ ID NO: 816082 - DNA, 98 bp, Homo sapiens
atgaagactacagagaagcttcttcttgtgccgtgaacctcgttttgagattaagaaattgcaggtgctgcagtgtctgaaatttccgggcctttctc

SEQ ID NO: 816083 - DNA, 136 bp, Homo sapiens
ctactatgctatgaaaggtgctggcacagatgactccaccctggtccggattgtggtcactcgaagtgagggtacttaccaaaagctgctacctctctacttcccaaggtcattaaaagaggagaatcgatcattg

SEQ ID NO: 816084 - DNA, 100 bp, Homo sapiens
gcgttaatgtttgcaaatgcagaggaagaatttttctatgagaatgacagcccatatcaaggcggtgtattctttttgacaattcattttcctacagact

SEQ ID NO: 816085 - DNA, 100 bp, Homo sapiens
ttggcctgaaaacaggacggacctccatgcctttgagaacctagaaatcatacgcggcaggaccaagcaacaacctacctggtggttctgtgccttcccc

SEQ ID NO: 816086 - DNA, 98 bp, Homo sapiens
ccgtctccaagatgtagctaatgaccgtggttcccactgagatggcaggagaggagaacttcaaggaagagctcagatcccaggatgcttccaggaac

SEQ ID NO: 816087 - DNA, 100 bp, Homo sapiens
ggtcccccaagggctcccccgccaaggggtcccccaaaggctcccccagcaggcacagccggtctggagacttttagccagcttgtttggaaatctgctg

SEQ ID NO: 816088 - DNA, 100 bp, Homo sapiens
cgaacctccgagttgcaatagtcagcatgaagaccaatgatgcgagctcagagtcaatagcatccttctctaaacaggaggtcatgagtagctttctgcc

SEQ ID NO: 816089 - DNA, 99 bp, Homo sapiens
aatgaaccaagaaaaacaaacgtcacacatgaagaacacacagcggtggaaaaggtcattgacgagactctggatgttaaggaaatgattttcaatgcc

SEQ ID NO: 816090 - DNA, 98 bp, Homo sapiens
gcatttgatttcacaaaagtgaagagaggatgtcccctggaagcaggactgcatagtagcagcaaagtcacaatacacgagtgtgatgaaggctccga

SEQ ID NO: 816091 - DNA, 100 bp, Homo sapiens
tgttcaccggcctagcattgctctcgccatggctctcagcgatgctgacgtgcaaaagcagtgcacaaaacaacttgcagcagcttttcatgaggaattt

SEQ ID NO: 816092 - DNA, 98 bp, Homo sapiens
aacaatagctcaaggaaacctttccaacacagatgtccaagctgccaagtatctgctgtgcgtttcagtcaacaatacagcttgtgttcgacaatatt

SEQ ID NO: 816093 - DNA, 125 bp, Homo sapiens
tgaggacctctatctcgcttttcccctggccttctgtatcttcatggtgcggctcatcttcgagagggagagacaaaggcagcgctgccctcgggggagtattggccctggcggaacgcagcaac

SEQ ID NO: 816094 - DNA, 98 bp, Homo sapiens
tgtttctgctgattacacccgtgcccaggagcttgacgccttagataacagccatcctattgaactaaaagatggcggcaaggcagcccaggcaaatg

SEQ ID NO: 816095 - DNA, 100 bp, Homo sapiens
ggaagcagcccccagcctcggacgccgtggcccttgggagagaggtcccgcagcccccggaagccaatagactccctcagggactctcggtccctcagct

SEQ ID NO: 816096 - DNA, 100 bp, Homo sapiens
ggacaaacagttgtccaattgttcggcataacaaaattcatgatggccagcatggtgggatttatgtggatgtaaatgaagaccctggagaagatgtggc

SEQ ID NO: 816097 - DNA, 100 bp, Homo sapiens
gtttttaagagtgctggggcctggaggctgtaatacaaaagctgcgcgtcccttaatttcctcggcgggacatccataaaaattcatcagagagcatttt

SEQ ID NO: 816098 - DNA, 100 bp, Homo sapiens
ggaagctgaagctggaccagtgcttccagctgaggctgtttgaacaggatgctgagaaggctagtagcattaccagagagctccaggggagagagctaaa

SEQ ID NO: 816099 - DNA, 98 bp, Homo sapiens
acctccctgccctgtataccgagggaacaggtaccccaatctgaagtcagtaaatgaactaatctacaagcgtggttatggcaaaatcaataagaagc

SEQ ID NO: 816100 - DNA, 100 bp, Homo sapiens
tcctcaggagctgcagactgacgtctgagagaagaaatggaagaaatcacacagcagcagctggtacacgacaagtactgcaaagatctcatgggcttcg

SEQ ID NO: 816101 - DNA, 100 bp, Homo sapiens
ctcctgagacgttctgtgcaatgagtcaagaaattggagcatggctatgagcaatggaaacaatgattttgtggttctgagcaacagcagcatcgcaacc

SEQ ID NO: 816102 - DNA, 100 bp, Homo sapiens
attcttccctgggctggtgaagtacatgaactcagggccggttgtggccatggttcgcggaccttcccgagctgatcctaaccatcttgtagatgatctg

SEQ ID NO: 816103 - DNA, 98 bp, Homo sapiens
agcctccgtggaactcagcgctccgctcctcccagttcctaagataagactttgaccccgacgcaggcttcagtgattgccgcggatcagaagcctga

SEQ ID NO: 816104 - DNA, 100 bp, Homo sapiens
aaacactttgcatcacccagcaagctgaaacgacatgccaaggcccacgaggattatgtttgagaccttcaacaccccggccatgtacgtggccatccag

SEQ ID NO: 816105 - DNA, 100 bp, Homo sapiens
aacaaactacccattttcttttttggaactcatgagacgtacgaggaacagcaaattcaggaaaaagtggcgacctttcgactcatgttgctggagaagg

SEQ ID NO: 816106 - DNA, 100 bp, Homo sapiens
gttcagatgaaagcccagaacagtgccgaggagatgttaaagtaacccatcttgcaggacgacattgaagattggtcttctgttgatctaagatgattat

SEQ ID NO: 816107 - DNA, 100 bp, Homo sapiens
gacaactcgaggtgaggcccctgttttccccgccccgctcgccgactcgaggttgaaatcacaaagattagacacctttttagataggtgttcttcagca

SEQ ID NO: 816108 - DNA, 98 bp, Homo sapiens
caaggaggtagacatccttatcagcacagcacttattccaggtgtggatgaggtcaccattgtcaacattttgaccaaccgcagcaatgcacagagac

SEQ ID NO: 816109 - DNA, 100 bp, Homo sapiens
cttggtggcttggaataagctataagggaattggccaatatgatatacaagacaaggtgaagcctcggaaggtgatttgatgaaggctgctgcaggagag

SEQ ID NO: 816110 - DNA, 100 bp, Homo sapiens
tagaatccatactgttccagcagaactggactaattctgtggaccctcagacccctaaatggggccgtcttggaaatgttgttacagatcttataacagt

SEQ ID NO: 816111 - DNA, 100 bp, Homo sapiens
ctttcagttcaagtgacaaacgtacctgtggtccctggatccagtgctactgctacaaataaggatttggtgctatggagaaatttttggtagaatataa

SEQ ID NO: 816112 - DNA, 100 bp, Homo sapiens
aagatatctttgagacctgaggttgaaaactatcttaaggaaggctttatgaataaggagctggaggagagcaggagtgttcagaagcaaatgaagatcc

SEQ ID NO: 816113 - DNA, 98 bp, Homo sapiens
ataactttacattagcagatatactattgtactatggacttcatcgctttataagtctcactgtgttgcccaggctgaagcagcctcaaactcctggg

SEQ ID NO: 816114 - DNA, 98 bp, Homo sapiens
gatttcttctgacttgagcctgcagtgtgctgtgagagatctaccactagagtgattctcatcagttccgtgtaatggcagctgtccttcgtcattgt

SEQ ID NO: 816115 - DNA, 100 bp, Homo sapiens
atgtggactacaatggaaaccttccagattttctggcatccttaaatcttgtgtcaaggattggttataatataaccagaaaccatgacggcggctgaga

SEQ ID NO: 816116 - DNA, 98 bp, Homo sapiens
ccatagtacctacagcagcactccagcacagacgcagtcttcagcaaggaagtgctgggaacgccctggagtgaacccaggaagatgcctgcagtggg

SEQ ID NO: 816117 - DNA, 100 bp, Homo sapiens
tttgccctctgttccagaagagaaaaagcccaggcataaaatcatctccatattctcaggcacagagaaagaatgtttctccatcccagagagatgaagt

SEQ ID NO: 816118 - DNA, 98 bp, Homo sapiens
aggttcaaatggctggtataattataggcaccaggttccattacagcttatagaaagtgttgaatgccgagatatatttcagcttcatttgacttgca

SEQ ID NO: 816119 - DNA, 98 bp, Homo sapiens
cctccacaccttgtctgtctttgataataaagatgacattgccagttttgtcaaagggaaggtaaaggtaagcagaattttgtacagtttctgtacag

SEQ ID NO: 816120 - DNA, 100 bp, Homo sapiens
actggtgtgtacgagctcagcctgtgccacgtggctgacgcgggcagcccagctcttcatcacggtcatggacaagctgcgcctggagatccgcgccatg

SEQ ID NO: 816121 - DNA, 99 bp, Homo sapiens
cggcgtctccttctatgtgctgtgtccggacaacggctgcggcgacaattttgcaagaaggggttaaaagtggaatgtatgttgtaatagaagttaaag

SEQ ID NO: 816122 - DNA, 99 bp, Homo sapiens
ttggaggaggctggctctggtcttcgatgcacaggagtggccgttatggaacgcagaacatgccagatccccacaaccttccaatagtggctggttgga

SEQ ID NO: 816123 - DNA, 100 bp, Homo sapiens
taacaccaggacaaagttaagggatcactactcaagcataaggaaacccttttccaaagagaaatgaagaagaaaactgtatgtaccctaaatatgggag

SEQ ID NO: 816124 - DNA, 98 bp, Homo sapiens
aggccgtgcgccggcctttggtcgcctccgtgggcctcaatggaactttatattgctgttggaatatctggagccatccaacatttagctgggatgaa

SEQ ID NO: 816125 - DNA, 100 bp, Homo sapiens
aattattaaaacagagcttcctgctgctattgcagaatttttgactggagactatagtagcattcctctgaatattgatttgctgaatagcccagactta

SEQ ID NO: 816126 - DNA, 98 bp, Homo sapiens
gggcatctcctacattagcgtctacgaccaccaaggtgaccattgtgaggtagatattttgttctaattttccagatgaggaagctgagaccctaaaa

SEQ ID NO: 816127 - DNA, 100 bp, Homo sapiens
aaagtgcgtgaggagtttaaggagctgaaagcgcggaagccagttgagggaagttctccatgaatgtacgtcacaatgatgatgaccgaccaaatccctc

SEQ ID NO: 816128 - DNA, 99 bp, Homo sapiens
ggaatttcagcagctctatgtgaaggaagctgaatatggtgggcatgatcagatagatttgtatgacgatgtcatatctccatctgcaaataatggaga

SEQ ID NO: 816129 - DNA, 98 bp, Homo sapiens
cgactctgcttaaaaccacgtggttcgatggctgccgcggctacgctgaggctctccgctcaggtgattccagatcactgtatctttgccagtaacac

SEQ ID NO: 816130 - DNA, 100 bp, Homo sapiens
ctggcaaatactccacaactttcttcatggtgacgtttgcagccctttacagcactcacaaagatcactgtgtccactactatgatcttcgtaacactaa

SEQ ID NO: 816131 - DNA, 100 bp, Homo sapiens
caagcagttacagatcccacagcagactggggctgtggctgagatgtcacatggcagataggatcacaaatttctgttgtatctggatggagatcagcag

SEQ ID NO: 816132 - DNA, 100 bp, Homo sapiens
tcggcactctgaacgcggccaaggtgccggccgacaccgaggtcctgctgtactagccaccaaagcagctgctggtactaagaaatatgatcttagtaaa

SEQ ID NO: 816133 - DNA, 98 bp, Homo sapiens
tttttggatcctgagaattgatctatgttggatcaaattcagcttagagaactatcaacacaggacaatgcaagcccatgagctgttccggtattttc

SEQ ID NO: 816134 - DNA, 98 bp, Homo sapiens
caggagaacatggtgaagagcagcggagcctgtggacatctctacagcaatgagtgaacgggcacttgctcagaaaagactcagtgagaatgcatttg

SEQ ID NO: 816135 - DNA, 98 bp, Homo sapiens
agcacaggatatgccttgtcagatctgctacttgaactaccctaactcgggacacaactgactgtggaagtccaccctcgagatgccatgccccagct

SEQ ID NO: 816136 - DNA, 100 bp, Homo sapiens
ggatatcttgggcgggggatgtgagcgctgagcccttggcaggagatctattgggaaactgattataaccactcgggcaccatcgatgcccacgagatga

SEQ ID NO: 816137 - DNA, 100 bp, Homo sapiens
cgaacccccaatgctgaccaaggaggagcctgttccagaactgctggaagctgaggtcaaatggatgatgtactggattatatttgcacttttcaccaca

SEQ ID NO: 816138 - DNA, 100 bp, Homo sapiens
cttcatgcccaaatcccggaaactccagcgtgtctccagccgtgctggcataaccttgacaacagattgccttgaagatagcctccttacatgctactgg

SEQ ID NO: 816139 - DNA, 100 bp, Homo sapiens
atgattgcccgaggaaagaatgcttcagacctgtttcccgcggtggtgaagaacgtggcctgtaagaacatagagaacctaaaggcagacccagaagagc

SEQ ID NO: 816140 - DNA, 100 bp, Homo sapiens
gcggtcccgcatcaaggctctggcagggctcaagggttcttgttgatgcacgagataagcttggcattccttggcagtattctgaaaatgagaagcatgg

SEQ ID NO: 816141 - DNA, 99 bp, Homo sapiens
ttacaccggaaaaaaacacttgtaccagccctctataaagttattcaagattcaaataatgagtcactgttgctgttatcacatgcaagtatccagagg

SEQ ID NO: 816142 - DNA, 136 bp, Homo sapiens
tacagtgggacaaagaattggatctggatcatttggaacagtctacaagggaaagtggcatggttcaatgtatctatgcctgcctacctcaatctgcaagggagtgtcagaaaggccccgcattcgccaagccgtg

SEQ ID NO: 816143 - DNA, 100 bp, Homo sapiens
cccgaagtgggtactgtgcaatgatatccaggattccaagggagctcttgtccctggcaaagcgaaagcgcagtgactctgaggagaaggagccgcctgt

SEQ ID NO: 816144 - DNA, 99 bp, Homo sapiens
atggagccattgaagggaacaacacccttgatgatccaatggaagaagacattctccaagttgtgaaatactgtactgatctaatagaagaaaaagatt

SEQ ID NO: 816145 - DNA, 98 bp, Homo sapiens
tgcctggaatcccatttgtttggggttggtagaaggtgttattgggaaaattcaacttcattcaggagactccatcctctgccaatggcccttcccgg

SEQ ID NO: 816146 - DNA, 98 bp, Homo sapiens
cattcacctgaggcacccgaagaagagaccatccatatttccagagttactggaggtgaactgtttgaagacatagtggcaagagaatactacagtga

SEQ ID NO: 816147 - DNA, 100 bp, Homo sapiens
agatgaacctggaagagcagagccagcagcagatctgaagaagacacttgaatcatgggtgacgttaaaaattttctgtatgcctggtgtggcaaaagga

SEQ ID NO: 816148 - DNA, 98 bp, Homo sapiens
gccatgcagtgcgttcagtgcaaaaagcctgtgcacgtcgggcgtagttcggcttcacatcaacagctggctggaggtgagcttctgcctgccccaca

SEQ ID NO: 816149 - DNA, 100 bp, Homo sapiens
tacatcatacttggacatatcaagcattggtgcacgatgtactggacccagatgatgtggtaccagttggccaaagaagagcctggtgttggtgcatgtg

SEQ ID NO: 816150 - DNA, 100 bp, Homo sapiens
tactttgacgccctggtgaagatgggggagctggccagcgagagccagggctccaaagaactcgtaagactttgaccccgacgcaggcttcagtgattgc

SEQ ID NO: 816151 - DNA, 98 bp, Homo sapiens
tcctagtatttcctgtgtgccaaaccttatcagctataataataggcggagtcgatctggaacatacagctcgagatcaagaagcaggtcccgcagtc

SEQ ID NO: 816152 - DNA, 99 bp, Homo sapiens
tctcttcagtcctcggcctctccagccaacgatgaccagtccaggcccagcctctcgaatgggcacacctgtgtagctttggagacatgctgtccttca

SEQ ID NO: 816153 - DNA, 98 bp, Homo sapiens
aagtctcagaacgagtgacacttcacatttgtgcttctacaaaaaaccatggctatgcccggtggcaagacatccagaatgacccacgctatgccatc

SEQ ID NO: 816154 - DNA, 100 bp, Homo sapiens
tggaggggtggtgaccatcgaaaggagcaagagcaagatcaccgtgacatccgaggtgcctttctccaaaagctggagttccacatgaaggagaagagag

SEQ ID NO: 816155 - DNA, 100 bp, Homo sapiens
tgatatttccaaagtttgcagaaaagaatatgagacactggccaaaagaagaccctagacaagaaagatggaagacgaatgtcttttcagaaacctaaag

SEQ ID NO: 816156 - DNA, 98 bp, Homo sapiens
gacgcgctgacagctcgagtgagcggactgcccaggacttcggaactagacgagctgcagaaccttggcctgaaaatgctacattatatcagcaattg

SEQ ID NO: 816157 - DNA, 100 bp, Homo sapiens
ccaggtggtcccggaggagcaggtgcagagcactgcgctgtcagcgatagcccagtggatggccattccagggaaagaatatggcaaagctgatgcaaga

SEQ ID NO: 816158 - DNA, 100 bp, Homo sapiens
gggctgtcacttaccacctggaggacctaagaaggcgtcagagcatcatcaacgagtggaagcagggaaaggcctggagatgaggaagctggttctctcg

SEQ ID NO: 816159 - DNA, 100 bp, Homo sapiens
gtcatgagtcgcttcaagtttatcgttggttgaatctggcgatgtggaacccatggatatggagggctgactatatacaccatgttttttcctggcacat

SEQ ID NO: 816160 - DNA, 99 bp, Homo sapiens
aactggaaccctcaagaggaccgagttttttgctccactcaagcctgttagaatcaccatggaatacagctccagtgggaaggccactggagaagctga

SEQ ID NO: 816161 - DNA, 98 bp, Homo sapiens
caaggttacaacacagcaagggagaagccaacccgagaggtgcaggagggggattttggcactcaaaaagaagctgcttgggccataagtaacttaac

SEQ ID NO: 816162 - DNA, 99 bp, Homo sapiens
gtatttcacatagccagccaaaaaaactttaaggctaaaaacaaagcaaaaccagttaccactaatcttaagaagtagagacgaggtttcaccatgttg

SEQ ID NO: 816163 - DNA, 100 bp, Homo sapiens
taaaacaaagttccttgtacctgaccatgtcaacatgagtgagctcatcaagataattagcatggacaccacgttgctgaaaacatgctttgggactgcc

SEQ ID NO: 816164 - DNA, 100 bp, Homo sapiens
tgaagacatttcctctcctcccctctggatttctcagaggtgcagcggaactgctgcctgacgctctgcaacttcagcatccccgaggagctggaattcc

SEQ ID NO: 816165 - DNA, 100 bp, Homo sapiens
gtttaccaaaagagaggcaccgctggaacactaatgaggctgcgtcatcaccatctcgggacgcatgaccttcacgagcaataagtccatggagatcgag

SEQ ID NO: 816166 - DNA, 98 bp, Homo sapiens
acaactacgaatgaatgtccatccccagatacttctcaaaatacttgtaaaagtcctccaaaaatgagcaagaggcctaacatcgtgtcccagctcag

SEQ ID NO: 816167 - DNA, 98 bp, Homo sapiens
cagagaattttgtagacatcaagggtctggcattccgcagaggcacccaccagctctacagcacatcccacgatcgctccgtgaaggtgtggaatgtg

SEQ ID NO: 816168 - DNA, 99 bp, Homo sapiens
ctgagcgcactctggagggattctggcatcagggaggctttcagccggagaagcgagtttcagctggaaatactgacagcccagctgacagagaaagat

SEQ ID NO: 816169 - DNA, 100 bp, Homo sapiens
aggcttgaggccaagcaccgagagagaatgtcccaggatcagttcttaagagcagccccggtaactggaggaatgggagccgttttgatgagaaaaatgg

SEQ ID NO: 816170 - DNA, 99 bp, Homo sapiens
agaggcctgccatactacattcgcttaaattttgcagagaaagatgtcccctggaagcaggactgcatagtagcagcaaagtcacaatacacgagtgtg

SEQ ID NO: 816171 - DNA, 98 bp, Homo sapiens
tgcacagaagccaaaaagcattgctggtatttcgaaggactctatccaacctattatatggagaaacaaaggcagcgctgccctcgggggagcattgg

SEQ ID NO: 816172 - DNA, 99 bp, Homo sapiens
tcgtgctcggcttcctgcgcgataaccaactctcagaggtggccaataagttcgccaaagcgacaggagctgtttattgggcacttcctagcaccaggc

SEQ ID NO: 816173 - DNA, 98 bp, Homo sapiens
aggacagcatggatgggctggagacaacagaaacagaaacgattgtggaaacagcctcccctggtgaagacacaaactgtcaccatctcagataatgc

SEQ ID NO: 816174 - DNA, 98 bp, Homo sapiens
cgtctgcatgtaccaaccgccaacctgcccatttctacccatggaccagagcatatcggtatctccaaaaggcagcaagcatgaaccataccaaagcc

SEQ ID NO: 816175 - DNA, 100 bp, Homo sapiens
gccctcttttattaaggagcctcaaacaaagccttccaggtacatgtcccagagcaagcacacggaggcccgggagctcatgtactcgggagccctgctc

SEQ ID NO: 816176 - DNA, 98 bp, Homo sapiens
tgcccgcccttagcggcccggcgttgaattccgggaagtgggagcttcaggctcgctccgtgcgggaatggcggcgctagatagtaaggcatcaggga

SEQ ID NO: 816177 - DNA, 155 bp, Homo sapiens
cagctaccgcgatgagaggcgctcgcggcgcctgggattttctctgcgttctgctcctactgcttcgcgtccagacagggctgagcctaatcctctgccagctttcattaccctctatccttccaaatgaaaatgaaaaggttgtgcagctgaat

SEQ ID NO: 816178 - DNA, 100 bp, Homo sapiens
taccatccgcgaccgagtctggcagatccagtcttgctcagctctcacaggagagggcgttcagcaggggaaatgctgtctgtagctgagcacttcctgg

SEQ ID NO: 816179 - DNA, 98 bp, Homo sapiens
tcagtcagcaccttggcggcccactacccaccgtccacctgggcttatttcaaaacctttgtccctcagttccaggaggcagcatttgccaatggaaa

SEQ ID NO: 816180 - DNA, 100 bp, Homo sapiens
ttgcagatacaaacttggattttttccagtctgatccttttgttggcaccaatgaatttccctgtttgccaaagcaagtggcttggatcctggccacaag

SEQ ID NO: 816181 - DNA, 100 bp, Homo sapiens
cgctcacagtgctgggaaggaatctatccaaggacattggctccctggattatcaagagtttgtagttgacattgaatccaggctgaggatggaaggtgt

SEQ ID NO: 816182 - DNA, 98 bp, Homo sapiens
gtcgatggtcggcggcgcccggatgggcagctgaggtgaatctggattgggaaagtcgacattaatcaactcattattcctcacagatttgtattctc

SEQ ID NO: 816183 - DNA, 100 bp, Homo sapiens
tccacctcagataccagcaactcccccatcgtatgaatctggctactacaaagttctgggaaagggaaagctcccaaagcagcctgtcatcgtgaaggcc

SEQ ID NO: 816184 - DNA, 98 bp, Homo sapiens
gctttgcgggcgatgacgcgccccgcgctgtcttcccgtccatcgtgggccgcccgcggcaccagggattccagccgaacttccatccgcagctccca

SEQ ID NO: 816185 - DNA, 98 bp, Homo sapiens
ggcacccccgcggtccccgggaggctagagaatgcagagagcagtttgcagcagaagaatgaagccatcacatcctttgaaggaaaaaccaaccaagt

SEQ ID NO: 816186 - DNA, 99 bp, Homo sapiens
cccaggaggacgactgggaccgggacctgctgctggacccggcctgggagaagcagcagcgcaaggatatttcatgtctgaatcgggacccagctcgag

SEQ ID NO: 816187 - DNA, 100 bp, Homo sapiens
atttgcctttagtgcactcttctccttcacagtaaagtggctggaggcaggtggaagtcatcataaagtttctgtttcacccgtcgtccatgttcgagga

SEQ ID NO: 816188 - DNA, 100 bp, Homo sapiens
ttcattcctcttcaagtacctgatgcaccagaaatcaaccagactattatgaagtggtttctcagcccattgacttgatgaaaatccaacagaaactaaa

SEQ ID NO: 816189 - DNA, 98 bp, Homo sapiens
ctgagagaggcatctggagctgcagcatggaccagcgagagcccctgcctcccgctcctgcagtttgcctgagaatacagatcaacccacagaacaaa

SEQ ID NO: 816190 - DNA, 128 bp, Homo sapiens
atcttaagtagtgatatttctcttttgtctgcccctattgtaagtgcagatggaacacaacagattctgacaatggagatattaattatgattatgttcatgaattgtcattggaaatgaagcgtcag

SEQ ID NO: 816191 - DNA, 100 bp, Homo sapiens
gtcatctatgagacaaactgccactgggaaggctgcgcgagggagttcgacacccaagagcagcttgtgcacgattattgcatcgagcttttagtgtctt

SEQ ID NO: 816192 - DNA, 100 bp, Homo sapiens
cgcagatggtgaaggagaacatcgaggcccccagtccccaagcagggctccatgggtcgggcggcgggcattgggatttatcaaagatgttcatgaagac

SEQ ID NO: 816193 - DNA, 99 bp, Homo sapiens
atccatctgccttctgcataggccaaacagataaagaactatatgcttggatgaagtgtgtgaagggacagcctcatgatcacaaacatttaatgccaa

SEQ ID NO: 816194 - DNA, 98 bp, Homo sapiens
gagtgcaatggcacagtcatagctcactgcaacctcagccttccacatttgggatcatagacggtatttctatgtaaacgaacagtcgggcgagtctc

SEQ ID NO: 816195 - DNA, 100 bp, Homo sapiens
gttcaacaccctcttcttgaactggtgctgtctgggcttcatagcattcgcctactccgtgaagtgtggaggaatgaacgtaattaactttgaacatctt

SEQ ID NO: 816196 - DNA, 100 bp, Homo sapiens
ttctatgctccctaatgaagatgctattaaggagttctttccaaatggcaatgcatttgccactggctcagacgacgccacctgcaggctgtttgacctt

SEQ ID NO: 816197 - DNA, 98 bp, Homo sapiens
atggaacccccgtcaacagtggagataaggcaagatgggagccaacgtctgtcagaagcccagtggtatcctgtctcagtggcccttagcagcagctc

SEQ ID NO: 816198 - DNA, 98 bp, Homo sapiens
tcgaaactgttgttagatatgaaaagtttttcacagttgaacctcagcacattccatgtgtactagtttatcaacttatgaggaaatgctgggaattc

SEQ ID NO: 816199 - DNA, 100 bp, Homo sapiens
attgaatgtccctgatctttctgacagcatccactctgctaatgcctctgagagagacgtggaccatagcaaaatatgctcccaggtttaatgggtttca

SEQ ID NO: 816200 - DNA, 100 bp, Homo sapiens
taagcactgctgcactttatgaggttactcactataaacaatatccacccaacacaagcaaagtttattcctactttgaatgccgtgaaaagaagacaga

SEQ ID NO: 816201 - DNA, 98 bp, Homo sapiens
cccgccgagccgccaccgcaggtcgaggacggtcggactcccgcggcgggaggagcctgttcccctgagtctgtggcaagcgctacaagaaccgaccg

SEQ ID NO: 816202 - DNA, 100 bp, Homo sapiens
ctgagtcaacactcccgacctggtaaacaacctgctcagggctctggtgaacaagctgtaggtgcgtataatttgctctgcgtcgactcctatatcaagc

SEQ ID NO: 816203 - DNA, 98 bp, Homo sapiens
tttcgttaagtgaccgtgcgcagcgctgtaactgcagtaccaagaagcaagagagacctatcttgatctggatagtaaagtgaggactttaaaaaagt

SEQ ID NO: 816204 - DNA, 100 bp, Homo sapiens
gcccttcgccaaggagatcgtctctctcatcgaggcccaaaccgccaagaccctgcacttgatggaccagctggcaccacccagatcaataaactggctt

SEQ ID NO: 816205 - DNA, 98 bp, Homo sapiens
cagctgtaacagaagctgaaaaccaacaaatgacagttcaagcccagccacagattgccacattagcccaggaacctgaggatcagctttactatgtg

SEQ ID NO: 816206 - DNA, 100 bp, Homo sapiens
aaagattgcaaggtgaataaagaagtggagcgtgtcctgaaggagttccaccaggccgggaagcccatcggattgtaaaccatggctgtgtggatacaag

SEQ ID NO: 816207 - DNA, 100 bp, Homo sapiens
tccctcttcactttcctcggcaagaaatgtgtgatggagaacatcattgcaacagtaagagattccaacctcaagctgacccttgctttcgggataggaa

SEQ ID NO: 816208 - DNA, 100 bp, Homo sapiens
ggagcctcccctgcagcgactcggaagattcgaggcggcgggggacaagtcggcgccccagagcggacgagaggacagttatgggatggatgggaaggtt

SEQ ID NO: 816209 - DNA, 98 bp, Homo sapiens
aacaggccatggagggacaggatccggaggcgccagctcaacctaatagttatgcacgagtgcgagctgtggtgatgacccgagatgactcaagtggt

SEQ ID NO: 816210 - DNA, 100 bp, Homo sapiens
aatgcaattatgtttctctttgtgttggccaacttcagcatggccaccttcatggacccagggattttccctcgaggtacagagtgagatcccaggctcg

SEQ ID NO: 816211 - DNA, 100 bp, Homo sapiens
ttcagcgcagtatattactgcaggttttgcactgattgcaaaaataaagtcctccgagcatacaatatccttattggtgaacttgactgcagcaaagaaa

SEQ ID NO: 816212 - DNA, 100 bp, Homo sapiens
ttcaatggtggcgggtcgccggagctctgatcgccgggaacccttgccgctgctgtcctgcgaccccaagcagatgacgtccggttgtttgccttcgtgc

SEQ ID NO: 816213 - DNA, 98 bp, Homo sapiens
accgctgtgaggtcattgacgggctggaggatgaaagcggtctggtggagctggagctgcggggacaactttgggtttgaccttcctgcagttgaggc

SEQ ID NO: 816214 - DNA, 98 bp, Homo sapiens
gcaggagagaagcgcggaagaaggcctccgtggaggccagattgaagggagaccagtgtaaatttgatcatgatgcagagatagaaaagaaaaaggaa

SEQ ID NO: 816215 - DNA, 100 bp, Homo sapiens
accaactacacgctccacgtgattgaaatgaaacatgacggcatccgaaaggaaatgcttgacatcatgaagtccatctatgacatgatgggcaagtaca

SEQ ID NO: 816216 - DNA, 100 bp, Homo sapiens
gccagcgcaggagaaaacgaaaccttcgtgatgagattgactgtagccgagggtagccctaatggagaaccttgtggaaagacttgtttggaagagagag

SEQ ID NO: 816217 - DNA, 98 bp, Homo sapiens
aaagtggaggggtgaatcagtatgttgtgcaagaggtactgtccatcaaacatcttccaccacagcttagagacctgaaggctgaaattgacaagttg

SEQ ID NO: 816218 - DNA, 116 bp, Homo sapiens
gaaacttgcagagaatgaaatcactttgtgtcaaaaagaaataactcagctgaagcatcagataatgttaattcaagactctcgaagagaagcttcagtgcagatggatttgagat

SEQ ID NO: 816219 - DNA, 100 bp, Homo sapiens
gggaatgcctggaccctgctcagagggacttgtacgtggatgtaatgttggagaactatagtaacttggtgtcactggtggtttgagtccagccaatgac

SEQ ID NO: 816220 - DNA, 98 bp, Homo sapiens
ggaacctttttcctattttttctccttctgcgctgaaaccagaaagcaggaactttcgtggtgagagttggcaggggatgtggacgagtgctcactag

SEQ ID NO: 816221 - DNA, 98 bp, Homo sapiens
tcaccgccctacacatcaaactccgggccacaggaggaaataggacctgaagaagtacggggctaccactgtggtgcgtgtgtgtgaagtgacctatg

SEQ ID NO: 816222 - DNA, 99 bp, Homo sapiens
cgggcccggggctttcgacatgccccccaggattattgggactttgcagaactctgcagagttttcagaagcctttcactgccgcaagaattcatacat

SEQ ID NO: 816223 - DNA, 100 bp, Homo sapiens
cgacgttattctgatctcaccaccctggtggcctttccctccagctctgtctatcctaccaaggaactggagctggtggagagcctgctgaagagcatgc

SEQ ID NO: 816224 - DNA, 98 bp, Homo sapiens
ggcggcccagctctctctgacacagaattaaatgtgagggagtctgacgtaagagtttgtgatgagtcatcatgtaaatatggaggagtctgtaaaga

SEQ ID NO: 816225 - DNA, 100 bp, Homo sapiens
cccagactgccctccacttgtgcagaagggtgaatgccatgtcaactttgttcggaaggctgcaataggatctgtggctttggacacagcaaggtcacat

SEQ ID NO: 816226 - DNA, 101 bp, Homo sapiens
ggccccaacgcaggcgaagttactcaaggatttgctctggggatcaagtggcgcctggactctcgccctcagagggaggcccgtcccacggtctgtggcta

SEQ ID NO: 816227 - DNA, 100 bp, Homo sapiens
cagctggacgtgggatccacacagctcagaacagttggatcttgctcagtctctgtcagaggaagatcccttgatcctgactgctgtcatggcgtgccct

SEQ ID NO: 816228 - DNA, 98 bp, Homo sapiens
acgagaggccactcatgcagactgagcttcatcagcttgttcctgaggctgagccggagattcgggaactggagcctctcctctgtcacagtgacaat

SEQ ID NO: 816229 - DNA, 100 bp, Homo sapiens
tggccatcgtcaccggcggggccacgggcatcggaaaagccatcgtgaaggagctcctggagctggatatttagcttcctgtggtatactgatgagcaga

SEQ ID NO: 816230 - DNA, 100 bp, Homo sapiens
tttcacaacaccaggagttcagctatgggcagtttgggccatgcaacatgtctgcagcaagaatcaacatgtatacagagaagtgctcaaatcataagtg

SEQ ID NO: 816231 - DNA, 100 bp, Homo sapiens
ccttaccttcctggactgattcagcggcagtacatacctgtgaaaatgaagagcaaagccttctggatcttttcttgggagtatgccatgatgtatgtgg

SEQ ID NO: 816232 - DNA, 98 bp, Homo sapiens
aagatggtgctgtcccagagacaacgagatgaactgccagtgacatatcaggcatttcgggaatgtacactggagaccacagttcatgccagcggctg

SEQ ID NO: 816233 - DNA, 100 bp, Homo sapiens
gtgcttcgctgccgactgcatttcctcagtcacgggcctagaactccaaggagaaaggcggcgctgctctgttaaaagcgaaaatgaaacaattgcctgc

SEQ ID NO: 816234 - DNA, 100 bp, Homo sapiens
tgtcccagatcaccgccatcgaggcacagcacttgctcaagaggaaaccaggtccttcaaatcgctccaattcagtgtcctccctagacctagaaggaga

SEQ ID NO: 816235 - DNA, 98 bp, Homo sapiens
tcggagtgcatcacggaggacggcaggactgtggccgtgggggacatcgtctgggccacccgtgggaaactgttacaacagctgcaatgcagaaatac

SEQ ID NO: 816236 - DNA, 100 bp, Homo sapiens
agtttggaaggtcagacctttttctccaagaaggacaagcccctgtgcatccgtgtcattctggaccttactcccaactaccggggtgagaactcgtggt

SEQ ID NO: 816237 - DNA, 51 bp, Homo sapiens
ctgaagagggaagacacgcggaaacagtgtccttgcgttggacaaagctgc

SEQ ID NO: 816238 - DNA, 100 bp, Homo sapiens
ttatgtacactgatcgtttctgcagctgcagattctgctgttcgactctggtctaaaaagggtccagaaggaaaaccagtgagtctggagagctgcatgg

SEQ ID NO: 816239 - DNA, 50 bp, Homo sapiens
tcattcatacaggggtagccaatgatgagctggaaaatgcagaatttatc

SEQ ID NO: 816240 - DNA, 100 bp, Homo sapiens
tttagttctggggagcgcctcgtcgacatgagtgatgtggaggaaaacaacttcgagggcagattggttagtctgctgctaattggaattgctgcgtggg

SEQ ID NO: 816241 - DNA, 99 bp, Homo sapiens
ggtattgggagatgcacagctaagatgccaggaccacctggaagcctagaaatgccaacaaatggaattttcttgagcatgtttctaatcgttttgcca

SEQ ID NO: 816242 - DNA, 100 bp, Homo sapiens
ccagaagaaactcaactggtgtcgagaagtccggaagcttgtggcgctgaaaacgaacgggtacagctctgccggggggggaaaaagtggtaccattttg

SEQ ID NO: 816243 - DNA, 99 bp, Homo sapiens
gcttttggtgcatgagcaagctgctggatggaatccagtttgggggcagcccagtgtcctgcgctgtggggctggccgtcctgaatgtcttggagaagg

SEQ ID NO: 816244 - DNA, 101 bp, Homo sapiens
tccaacatctgtcagatgccaaatgcctgggcgtccatcctgtggtacaacatgctgaccaacaatcccaaggatgaagtgaagctgccggccaaactgag

SEQ ID NO: 816245 - DNA, 100 bp, Homo sapiens
ggcgaggaggcgcggaaccatggccgatgggggcgagggcgaagacgagatccagttcctgcgaactgtcaatgagctgaaggagaaaggcaacaaggcc

SEQ ID NO: 816246 - DNA, 100 bp, Homo sapiens
acaacttttctcctgatttgaggcattcctctgaatattgatttgctgaatagcccagacttattggaagcaacgattggtgatgtaattggggcatctg

SEQ ID NO: 816247 - DNA, 98 bp, Homo sapiens
gggcgtctccgccggctactgccgcttcagttctcccggtgtggccacgagtcggtttctcctggcggcgctggtcctgtctctcattctgccgagga

SEQ ID NO: 816248 - DNA, 98 bp, Homo sapiens
caacatgaaaaccatgtcagccatttaccagaaagtgcgtcaccgcatgaacgatgactgggcttacgggaatggttcagttccggaaggtgtcttag

SEQ ID NO: 816249 - DNA, 100 bp, Homo sapiens
aaacccaatttaggaatttcgcagaggttttgattcatggattcacccagtcattacttctagatgatgctggctcagttctggccacagccaccagctg

SEQ ID NO: 816250 - DNA, 100 bp, Homo sapiens
gtaactataagcagcttcggaaaggagccaatgaggtgccgagcactgtctaaaagactggccttggctgaaaagtctaaggaagcattgacagaagaaa

SEQ ID NO: 816251 - DNA, 105 bp, Homo sapiens
gtgcacaagtctgtgtttatcattttcttccaaggcgatcagctgaaaaacagagtcaagaaaatctgtgaaggcttgcagtttgacccagcacctcgtagaggc

SEQ ID NO: 816252 - DNA, 100 bp, Homo sapiens
aactgcacgataaaggaactcaggcgcctcttcttagttgatgatttagttgattctctgaaggttttagctaaagaagatactgaggcagctattcaat

SEQ ID NO: 816253 - DNA, 99 bp, Homo sapiens
tgcagccagttactatggcagttgcaaaatattcaggagaccgtcgttgccttgtatttccagagaacaggaattgcattttgtgaaaaaagaacaaga

SEQ ID NO: 816254 - DNA, 100 bp, Homo sapiens
ggagaggcccgcggtgaccgaggcctgggccccggacttacagattccagtctgctgttagatgattattcatccaagttgagccccaaaccaaagagag

SEQ ID NO: 816255 - DNA, 100 bp, Homo sapiens
gttgacctcatcctcgagaacacatccaaagtccctgcccccaaagatatcttcagctcaagaagaagttagaagatgagttccccggccgcctggacat

SEQ ID NO: 816256 - DNA, 98 bp, Homo sapiens
cggccgcctcagccatggacgcgtccctggagaagtatttgagaacacagtggctacggtgatggctctgcgcagggagaagatgttcgtggaagagg

SEQ ID NO: 816257 - DNA, 100 bp, Homo sapiens
cgaagagctcatctgaaaacaggaggcaatttcccatacctgtgcagaagtgcagaggtcaatctttatgtacagtgggtaattccagaattgattggcc

SEQ ID NO: 816258 - DNA, 100 bp, Homo sapiens
tcttgtaaagcctgtggctatcgaggcatgcttgacacacatcataaactctgcacattcattctcaaaaacccacctgccttgggagaccatttcagag

SEQ ID NO: 816259 - DNA, 98 bp, Homo sapiens
caggcctacagccattatgagatcttcacagagcagttctcctttaaggaggcctggttgcagtatgcttgaaatctgggatgtggaagacccttcca

SEQ ID NO: 816260 - DNA, 98 bp, Homo sapiens
ggtaaagttgccacaggaagatatggaccatcacttggtgcatttcggtgtctgaactgctcagcttcgcaagtctgctctcaggatggccctttgta

SEQ ID NO: 816261 - DNA, 117 bp, Homo sapiens
ggatgcggagcccgcagaacctccacagtcaagaggacgatgatgataattccgaagaaggcttccacactattcattcaggaaggcatgaatatgcattcagcttcgagcttccac

SEQ ID NO: 816262 - DNA, 100 bp, Homo sapiens
gatgacctgggctctgggcctctgaagatgactatgctcagctgtgtaacatccccgtgacgggacgccggcagccatatggacgggacgccttggttga

SEQ ID NO: 816263 - DNA, 98 bp, Homo sapiens
ggagaaaacgttttgtttcagccatgcctaaagacttattcgtctaatggaagagatcatgagtgagaaggagaataaaaccattgtttttgtggaaa

SEQ ID NO: 816264 - DNA, 74 bp, Homo sapiens
gttttataagtctttattggacatttgtaagaagcctagatattatcctactgaagatgtgcctcgaaagctgt

SEQ ID NO: 816265 - DNA, 98 bp, Homo sapiens
cagaatcgaatctcttctccctccccttcttggtgaatcagtggctaacctggttagaaactgctgaagaagaagaatcagaggaagaagctgactaa

SEQ ID NO: 816266 - DNA, 100 bp, Homo sapiens
tgttctttctcagatactagagctggccacactgcaggacattgggaagattgccttctctcagcacagcaattttatggacctggtacagttcttcgtg

SEQ ID NO: 816267 - DNA, 98 bp, Homo sapiens
aatgctaaggaagctgtggcaagtgaggaagatcttctcagtcctccccaggacacaagcacagggttagaggaggtgatggagcaactcaacaactc

SEQ ID NO: 816268 - DNA, 100 bp, Homo sapiens
atgcaaagccagcgttacagtaatgttccagaactatttgtcaatgaagattgtaaagccaaatgtgtaacaaaggcaaaggcttcatttcaagagtcat

SEQ ID NO: 816269 - DNA, 99 bp, Homo sapiens
gccggccggcgcgtcgtccccacagcacttttcaggattagaagaggctgtgtatagaaacatacaagcttgcaaggagcttgcccaaaccactcgtac

SEQ ID NO: 816270 - DNA, 100 bp, Homo sapiens
acagcaccgaggggctgtccgccgccctggcctctctcaggaatctctatactcccaacgtgaaggagtccttcaataatgttaaacagtggctgcagga

SEQ ID NO: 816271 - DNA, 100 bp, Homo sapiens
ggagaactacagccatctagtttccttgggccgcattgacaggaagattgagttccccctgcctgatgaaaagacgaagaagcgcatctttcagattcac

SEQ ID NO: 816272 - DNA, 99 bp, Homo sapiens
tagcctaaagccgggcggactgcgagaatgatgaggagcaggaggcactgccatctctggataaacctggctggtactcccaagggaacgctgtccacc

SEQ ID NO: 816273 - DNA, 100 bp, Homo sapiens
cactgcgccaacacagaaattatatccaggatgagaagactgataaaagaagaagctagctgaacagctgtaaaatgcccaaatctgggttcacaaaacc

SEQ ID NO: 816274 - DNA, 98 bp, Homo sapiens
gggcggcggccgaacgatgtgcgagaactgcgcagacctggtggaggtgttaaatgaaagtgcaagtggcatgaagaaaatgatattctcttctgtgc

SEQ ID NO: 816275 - DNA, 100 bp, Homo sapiens
gagcccatcgtgcgggtcttgcaaagtgtcccttttgatgagaagaataagcctcattctgattcaacagcagagatcaaagaaaagacttctgttttct

SEQ ID NO: 816276 - DNA, 98 bp, Homo sapiens
accataatatatgggcaaagaaaaagaaaatggagttggagtccaaaggcaatacagtacggtactgaggataacagtactgcagtagtagtgccttt

SEQ ID NO: 816277 - DNA, 100 bp, Homo sapiens
ctcaagttcgctgacaggtccagttgcagatacaaacttggattttttccagtctgatccttttgttggcatgccctgcaggagtcattaaatcaaaact

SEQ ID NO: 816278 - DNA, 100 bp, Homo sapiens
cgacagtggaaagtacacaattaaggccaaaaatttccgtggccagtgttcagctacagcttccttaatggtccttcgtgtggacaaccactacaaaata

SEQ ID NO: 816279 - DNA, 100 bp, Homo sapiens
ggactccgtttcaaggttaattcgaaagtcttgtggaagatctggaagaaacaggaccccaaaatgtatgtacagacagtgcttgatgttcataaaaaat

SEQ ID NO: 816280 - DNA, 100 bp, Homo sapiens
gggggcaacttggcacttagaaccgcagcagggacgtcggtttgctatcgggactcggcgaggacgacgtgaagccctccaatatgctagtaaacacaag

SEQ ID NO: 816281 - DNA, 99 bp, Homo sapiens
tcaagctgctgcaccgcggcgccgacatcaattacgccaatgtggacggactcactgccctgcaccagggtgacgctgtatgccgagttccttcccatg

SEQ ID NO: 816282 - DNA, 113 bp, Homo sapiens
gccccagcccgggtgcccacactggccgtcccggccatctcgctgcccgacgatgtccgcaggcggaacgacttagctgaatatcagagaacttgtgaagatcttaaagagca

SEQ ID NO: 816283 - DNA, 100 bp, Homo sapiens
aatcaacatgggcaatgagaacagcacctcggacaaccagaacactctgctccagccaaggtggtgagggcagctgttcctaaacagcgcaaaggcagca

SEQ ID NO: 816284 - DNA, 100 bp, Homo sapiens
aagaaagcagtacctgaagcacctactcctgttcctaaaaaagtggaggcaccaccagctaaagtttgaaagatgatgacagtggggaccatgatcagaa

SEQ ID NO: 816285 - DNA, 118 bp, Homo sapiens
tgacctcatcctgccttgtgctcacagcttttgtcagaagtgtattgataaatggtgaccaagaatatggcccaggtgaccaaagccctggacaaggccctgagcaccatggacctgc

SEQ ID NO: 816286 - DNA, 100 bp, Homo sapiens
ggccacctcaactggggtcagaaggacctctaccgagatgtgatgttggagaactacaggaacatggtcttgctgggctattcaagatctctggcagtgg

SEQ ID NO: 816287 - DNA, 100 bp, Homo sapiens
ggcacgattctccctctcctagaggcgctcctcagagaaattttgaaattgccttcaagatgtttgatttgaatggagatggagaagtagatatggaaga

SEQ ID NO: 816288 - DNA, 98 bp, Homo sapiens
gtcaacttcgcacttctccagttagttggagcccaggtaccaaccaagaagctgaagaaatatgagaaagaatatcagacaatgcgagagagtcagct

SEQ ID NO: 816289 - DNA, 100 bp, Homo sapiens
atgtgagcactgggggtggtgccagtttggagctcctggaagtcataccctaatgatcccagcaagataatgtcctgtcttctaagatgtgcatcaagcc

SEQ ID NO: 816290 - DNA, 100 bp, Homo sapiens
tccgggccaagtacgagcgacaggagttcatctacccggagaagcaggagccctactcggcaggctgttactgaggcggagacacgggtgatgattggct

SEQ ID NO: 816291 - DNA, 100 bp, Homo sapiens
aaatgatgtccccaaggactaggccacgcaggccctgaaagccattatcgccatggatacagcaggaatgatcctgggatggaaattttttgatcatgcg

SEQ ID NO: 816292 - DNA, 100 bp, Homo sapiens
tttaaagtggtggcccatatgatgcctgacctgccaaacgtgggactagaaagagacattgaacagttcacattttctggatatgccgcagaaggatccg

SEQ ID NO: 816293 - DNA, 100 bp, Homo sapiens
agttcttcaggaatggagacacggcttcccccaaggaatatacaggtctcctactccctccctccagtactgcgagaactgtgacacccacttccaagat

SEQ ID NO: 816294 - DNA, 98 bp, Homo sapiens
agcaccatggaggacgtgaagctggagttcccttcccttccacagtgcaaggaagacgccgagattacaccaggaagcaaggcggcagctgccaacct

SEQ ID NO: 816295 - DNA, 98 bp, Homo sapiens
cagtatgcagccgattgatacctgtgtctcctacccaaggacagggggacagggctctgtctcgcacttcccagttcactgagacttttttgacggag

SEQ ID NO: 816296 - DNA, 99 bp, Homo sapiens
ccgcagccatggaggccaactggaccgcgttcctgttccaggtgacttcatggtcatgacgattttcttcaatgtgagcaggcggtttggctatgttgc

SEQ ID NO: 816297 - DNA, 51 bp, Homo sapiens
ccagaactggattgaattacttagtgccctcaaggacgttttgttctgaag

SEQ ID NO: 816298 - DNA, 100 bp, Homo sapiens
gatcaccgacaagatcaccacggacgagatgatcaaacgcctgaaggttaagaatagacccaccagcatttcgtgggatggtcttgattcagggaagctc

SEQ ID NO: 816299 - DNA, 98 bp, Homo sapiens
gagatcccaggcggtgacagagtggagccatggctagaggtgtttgtaaaatgtatgaagaacatctgaaaagaatgaatcccaacagtccctctatc

SEQ ID NO: 816300 - DNA, 99 bp, Homo sapiens
cgatcctttgcaccggattgttcaaagtggaccccaggggagaagtcggagcaaagaacttaccaccaagcaggctttcatgttactctgtgatcttct

SEQ ID NO: 816301 - DNA, 100 bp, Homo sapiens
cacctactttatagtcctgattcaagtgttggcggatggaagggaggagactcctgaccctcagaatgggaggagctttatctttatatactgcccttac

SEQ ID NO: 816302 - DNA, 100 bp, Homo sapiens
aatacgtggttggagagctcatctggaattttgccgatttcatgactaaccagtgtcctggcattgatgtgcctgctccagacatgagcacaggtgagcg

SEQ ID NO: 816303 - DNA, 100 bp, Homo sapiens
agaatggccttgaatttgacacaggtatgttctcctacgtcatgctggccagcagccctctcttctgctcccctgagtggcctcggaagctggtgtccta

SEQ ID NO: 816304 - DNA, 50 bp, Homo sapiens
ccctcagcttccgccccaaaagctcttcacagatggaatcacaaataaac

SEQ ID NO: 816305 - DNA, 98 bp, Homo sapiens
ccttcctctcctctctcttcttgcttagcttcttgccttctggccagagaagatgtgatccacatgctgaagacagagaaaaccaagcctgaggttct

SEQ ID NO: 816306 - DNA, 98 bp, Homo sapiens
gggagccgcctgcgcccgccgaggcctcggtatcctgtggtctgaggccatcttcctcgaggcaaggccccagaggaggaccaagagcgtggatgccc

SEQ ID NO: 816307 - DNA, 50 bp, Homo sapiens
cctcaactatctcgctgacacgcagtatgaagtgtaacagaacagacttt

SEQ ID NO: 816308 - DNA, 100 bp, Homo sapiens
gagcctgcccagaaggacctgtacagggatgtcatgctggagaactacaggaacctggtctcactggggtgtcctgttcccaaagctgagctgatctgcc

SEQ ID NO: 816309 - DNA, 130 bp, Homo sapiens
gcttctcatgctgcagcgacggcaacatcgctgtgtgggatctgcacaaccagacactagtgagggtttgactgccgatgtggaaatttgttttgtggacttcaccgttactctgacaagcacaactgtc

SEQ ID NO: 816310 - DNA, 100 bp, Homo sapiens
gaactgactgaaggggacatcatctgtgtgttctcacagtagttacttttggtgacgctgtccagttcccacaatgtatcattccttatctgaaactaga

SEQ ID NO: 816311 - DNA, 100 bp, Homo sapiens
aaacagtgatcgctaagaactttgccgataccttaggatacaacatagaacctattatgctctatcagaccttcactgcctggtgtaactcccacctaag

SEQ ID NO: 816312 - DNA, 100 bp, Homo sapiens
agttttaggcgtggctgtgaatgcattgttttagagccttctgaaatgattgtggaagatgatccctatgatcttgaagatgtttctgcacagaaatgag

SEQ ID NO: 816313 - DNA, 98 bp, Homo sapiens
tcaagagtcacttctttacttggtgcaggaaggcagtctttgctacgtacagcaaaaggtgccactgattaatgaacttgaatcagcaatacatcagc

SEQ ID NO: 816314 - DNA, 100 bp, Homo sapiens
ttggcttcgggctgagctagcagtgagcaccttttggcccaatgaatatcagagcatggatcattttgatgacattggtcccagtgttgtaatggcctcc

SEQ ID NO: 816315 - DNA, 100 bp, Homo sapiens
tttccatatgacccttatgaacgagctcgccaaaagatgttattggagctattttgtaaggttgctccttgagggcaggacagttcttatggctttatcc

SEQ ID NO: 816316 - DNA, 100 bp, Homo sapiens
ctactattacaaatattccaatgaagggaatgggtactgttcaaaaaggaatgccccacaagtgttaccatggcaaaactggaagagtctacaatgttac

SEQ ID NO: 816317 - DNA, 98 bp, Homo sapiens
agatagagattccggtacattatgcaggatgtgaagttaccccagatgtaaacatttcaggccaaaaatttaacattaaactcctgattccagttgca

SEQ ID NO: 816318 - DNA, 98 bp, Homo sapiens
agaggaccccggtacatctgaaagccgggaaatggtttcaagtgccccatttgctccaagtctgtggcttctgacgagatggaaatgcactttataat

SEQ ID NO: 816319 - DNA, 99 bp, Homo sapiens
tcaagcaattctcccatctcagcttcctgagtagctggaccacagacattgtatgcaaacctgttccattctttcttcgtggacaacccattccaaaaa

SEQ ID NO: 816320 - DNA, 100 bp, Homo sapiens
aaccattggtctgcaggacatcactttagatgatgggaatgaaagctactggttgattttaaagtgcctgggcctcacaggtttggagatgtcccagaat

SEQ ID NO: 816321 - DNA, 98 bp, Homo sapiens
ttctacaaggagggcaagtttgcttccaagaaactgttcaggttccattatcaaaacgagcaaaatttgttggacctggtggctataacttaaaaaaa

SEQ ID NO: 816322 - DNA, 100 bp, Homo sapiens
gtatgaggccagccgggaggacatctacaagcgggtctgacctacgagaaacatggcaaccagcgccgtccccagtgacaacctccccacatacaagctg

SEQ ID NO: 816323 - DNA, 99 bp, Homo sapiens
ggccgtggaggcttcgccgcctagatacttggcatatcgaaattttatgattgacacgtatcgtctaaacccccaagagtatttaactagcactgcttg

SEQ ID NO: 816324 - DNA, 100 bp, Homo sapiens
atcttcgggcacgacgcctttcagctctgcagcagctttgcctccagggtcatacgcatccttagatcctgcagctcctgaaaggcaagctggtggtggg

SEQ ID NO: 816325 - DNA, 50 bp, Homo sapiens
gatacaatttctgactggaatctaagcaccaggatcatctacgaccgaaa

SEQ ID NO: 816326 - DNA, 98 bp, Homo sapiens
acgaagtggtaacccgagaatacaccatcaacattcacaagcgcatccatggagttgcctagcccctcctgtaatggttttgacaacaccctttcaag

SEQ ID NO: 816327 - DNA, 99 bp, Homo sapiens
ttaggaccacccaccatgcctatccaggggtgagcccctccagactccgaataggagatcaagagtttgattcattgcctgctttactggaattctaca

SEQ ID NO: 816328 - DNA, 100 bp, Homo sapiens
agggacctgctcaagttcactcagctctttaagggtcacccagagactctggagaagtttgacaagttcaagcacctgaagtcagaggacgagatgaagg

SEQ ID NO: 816329 - DNA, 86 bp, Homo sapiens
tttctctccgccgcgctctcgctctggccgacgagtggagaaaagagtgattgactgcctggaggatgagaaggcaaccctcacct

SEQ ID NO: 816330 - DNA, 100 bp, Homo sapiens
gctgtacgccgagcacccaggcgactgcctcatcttcaaggtggacccccaaaagtacaagggcatatttaacggattctcagttacacttaaagaggat

SEQ ID NO: 816331 - DNA, 98 bp, Homo sapiens
ctgcagttcctggactgcgtacaccaggtgctgtatttctctgaatccctcgtgcccacggcaaggaaggctttgtgtgacccactggaggaggtcag

SEQ ID NO: 816332 - DNA, 99 bp, Homo sapiens
catctctctagaccataaaaataaaaaacatatccgagggtgtcctgttacttccaagtcatcaccagaaagatgctgcagttggagaagaaacttgaa

SEQ ID NO: 816333 - DNA, 98 bp, Homo sapiens
atcatggtaaaaagcagtgggatttggatgtgggatccggttccttggtgtcatccagccttagcaaaccagagtgcgacttcatgatagcatatcag

SEQ ID NO: 816334 - DNA, 100 bp, Homo sapiens
tgcagcgcctgtaatgtttggcgagtctggtgaatttccaatcatcagcccaggtcgggtatatgaatacacaagctgtaccacattctctacaacatca

SEQ ID NO: 816335 - DNA, 100 bp, Homo sapiens
ttctcgaccctgtcggaccggatggcaagaatcagctggggcagaagcgcgtggtcaagccttgaccttatgtcatgggttcaacttggacactgaaaac

SEQ ID NO: 816336 - DNA, 98 bp, Homo sapiens
ccggtgagggtgcctgatgcctgagagagggccaggtgcaactgacatgggtgaaccccagggatccatgcggattctagtgacagggggctctgggc

SEQ ID NO: 816337 - DNA, 100 bp, Homo sapiens
tcatcagtgagctgtccctgctggaggagcgcttccggatgacccgttggcttcctgaccacctggccgcccactgctatgcgtgcgacagtgccttctg

SEQ ID NO: 816338 - DNA, 100 bp, Homo sapiens
ggaaagttggcatctgcagacatagagacctcacctgttcttcccggagcctatcagcaaagccattcccaaggctatggctacatgcaccagaccagtg

SEQ ID NO: 816339 - DNA, 100 bp, Homo sapiens
gggtgctgctgcgcttgtcaccatcatcaccgtgcccgtggttctgctgaacaaaggcaaacgaggtcactcggacactatggtgttcttttacctgtgg

SEQ ID NO: 816340 - DNA, 99 bp, Homo sapiens
agcctcctgactactccttctccaagagagaggaccaggtaaacttccgtggattcatgcgaactttggctcatttccgccccattgaggataatgaaa

SEQ ID NO: 816341 - DNA, 98 bp, Homo sapiens
cggcgacgtggtgtgcaccggctggctgaggaaatcgcctcccgagaagaagttgaggcgctatgacttaaaatctccaaatcagagagatgaaattg

SEQ ID NO: 816342 - DNA, 100 bp, Homo sapiens
aaattttctgatgaacgtgctgcatatttcaggtgttatcataaggttagtagcaaagatgaagattttcttgacctttctgttgatgtggagcagaata

SEQ ID NO: 816343 - DNA, 100 bp, Homo sapiens
gaaacctggatctttgctagaaagagaggttggaaaagagactgttcaaaccactgaggatcagattttgaagagagatatgccaccagcatttattaag

SEQ ID NO: 816344 - DNA, 100 bp, Homo sapiens
acattttttccacatggtggagtcattgccacaggtcttgccacttgcctagtgaggcttttccgaacctggaaggagacgtctagaaatcccaactttg

SEQ ID NO: 816345 - DNA, 100 bp, Homo sapiens
agagtgggggcaggttgtcataatccacatgctaactcgatatgctcggacacagtttgtcagcccttggaaagaggcagagatcctacaagaatccagg

SEQ ID NO: 816346 - DNA, 98 bp, Homo sapiens
aatacttcagcagttatggactcatctgtcattcaaaggaaaaaagtagctgtcattggtggtggcttggttttcctttggaatatggataaatacac

SEQ ID NO: 816347 - DNA, 100 bp, Homo sapiens
cagtatcagatactctggtgattcctccaagactgttttaatggtggacccccaaaagtacaagggcatatttaacggattctcagttacacttaaagag

SEQ ID NO: 816348 - DNA, 100 bp, Homo sapiens
taaaattgaagtcttctgtgagaggacacccaaaacatgtgagatatgagggaaggcaccattggagatatggctatcctgggtataacagaaagttttc

SEQ ID NO: 816349 - DNA, 100 bp, Homo sapiens
catcctctgtaacatcttgtcaggctagtctttggatgggaagctctgacacagagtctgactatggtggcagcgagggctcccacacagaaccctgtga

SEQ ID NO: 816350 - DNA, 100 bp, Homo sapiens
gggtggtcggtgtgcttgtgaccctgcctttgtgtggctgtcaccggtgggactggcggggagctgtgttagagacggggttttaccgtgttagccagga

SEQ ID NO: 816351 - DNA, 100 bp, Homo sapiens
agcagaaccagcagctcaagctggacctacgccgcggcgcggccaagacgggagtgcatccgccccaacccttttccccctcgtctcctgtgagaattcc

SEQ ID NO: 816352 - DNA, 100 bp, Homo sapiens
ttgctgaaggcatcagtgcaactgtatttcgcacagtgctggttattgaagaaattgaagaaatgatgcaggaatcaccggacccagaagatgatgaaac

SEQ ID NO: 816353 - DNA, 140 bp, Homo sapiens
gttcaaagacggaaaaagcgactgagacacagagtcccccccaggaaacctgagcccctggttaagcccctcagggttgtgaaccgcaagcgtccagcccgggaggattgtcggggcctcaccggcccactgcagagcct

SEQ ID NO: 816354 - DNA, 98 bp, Homo sapiens
cagcagcggctcctcaacacccctcgaagaactgtaagagtaaatgggtccagtaattggaatgactccagataagagagctgaaaccccaggagctg

SEQ ID NO: 816355 - DNA, 51 bp, Homo sapiens
agactattgtggaagaagcatccattaagccttcagtttggaaacctgcag

SEQ ID NO: 816356 - DNA, 100 bp, Homo sapiens
cttcctcagaatgtgaaggattatttactcgatgatggaactctggtggtttcaggaagaatggccaacatgcagggactggtggaaagactggaacgag

SEQ ID NO: 816357 - DNA, 100 bp, Homo sapiens
cttgctcctctctccttggcctctcctgggatcggcccaaggccagttctccgcagtttggaaattttagcattcaggtgccaggaatgcagatgggaca

SEQ ID NO: 816358 - DNA, 100 bp, Homo sapiens
cccaacatgcctcaccctcatctatatcctttggcagctcacagatggagtcccctgtttccacaccagcagtgctgccaatacaccttttggtgccagt

SEQ ID NO: 816359 - DNA, 100 bp, Homo sapiens
ccgcccatcgagtcgaagcaccgcagcctggtgcagatcatctacgacgagaaccgggaacttagtgatttggcccgtgaccctccagcacaatgttctg

SEQ ID NO: 816360 - DNA, 98 bp, Homo sapiens
tccgccgtgctggatgccgtgatctccagcgccggcctcctcagtgcgaagaagctgcagccgcacctggccaagggatatgctgcaggctgctagtc

SEQ ID NO: 816361 - DNA, 99 bp, Homo sapiens
cggaattgatgctgtcctcattgcaacgtggttggttgtgttggtgttgaagaggagaaggctgctgacattgacctctaccactgccccaactgtgaa

SEQ ID NO: 816362 - DNA, 99 bp, Homo sapiens
gcggcggcggcggcagcgacagcagcagcagcagccagtattcgggaaaggcagacaggctttcttcaatactaaaaatgtatggaagtcctttgaaaa

SEQ ID NO: 816363 - DNA, 51 bp, Homo sapiens
ggaagattaaaggaaggggcacaattgttgctccttgagggcaggacagtt

SEQ ID NO: 816364 - DNA, 100 bp, Homo sapiens
gacccaggagctgcaaaccacccaagtctgcaatcttaccagggaggccaagcgaccacccaaagaaggtacatctccgttcatggatgcattaacagcc

SEQ ID NO: 816365 - DNA, 100 bp, Homo sapiens
aagagctgcagtggctggagaaaatgccagagtcatcgccggccaaccacttgttgccctcaaattggctgtagccacacggatataagaaagtcagatc

SEQ ID NO: 816366 - DNA, 98 bp, Homo sapiens
tggcggccgcggctgtggtggttcccgcagagtggataaagaactgggagaaatcagggagaggcgaattatgcagaatcctgatacactatcagcaa

SEQ ID NO: 816367 - DNA, 100 bp, Homo sapiens
ttcatctttgaatggttgcgatttcttgataaagtcttggttgctgccaacaagaaatgcactcggtgatggaaagagagccactattctgaagaacact

SEQ ID NO: 816368 - DNA, 100 bp, Homo sapiens
caactgttgaactcagctgcctgtaggttgctgaaaagccaggagtcaaaatgactgagcgctttgactgccaccattgcaacgaatctctctttggcaa

SEQ ID NO: 816369 - DNA, 100 bp, Homo sapiens
gagacaccagcttcagtggcctgtcgttggaagagtacaagctgatcctgtccacaggcaaatcctgatcctaactgttgtcttggagtatttgggctga

SEQ ID NO: 816370 - DNA, 100 bp, Homo sapiens
ttttgaaccagcaactcagagaacaacagaaaactcaaaaaccatctggtgctgtggattgcaaccttgaatgacctctggaagcaactactcctgatta

SEQ ID NO: 816371 - DNA, 98 bp, Homo sapiens
gtaggtattgggagatccacagccaagatgccgggaccccttagaagcctagaaatggtcactcagctctatgtgccagcatccagacatgtgtggag

SEQ ID NO: 816372 - DNA, 98 bp, Homo sapiens
tgagtgctcagagtacagctgcaaccgcgaccatgggcgggaagaacaagcagcgaactaaagggaacctgaggggcatccgcttcgatcctgaaatt

SEQ ID NO: 816373 - DNA, 100 bp, Homo sapiens
acttgaaactaatcctgatattaagccatcaaatgtggaacctatggaaaagctttccgcttggccctcatccagcttcagatttcttccatcaaatcag

SEQ ID NO: 816374 - DNA, 100 bp, Homo sapiens
ggcgcagtacaccaacgcggtgcgcgaccgggagctggacctccgggagctccagagattatattggggttgccattttgtgaagccatagacatgtggt

SEQ ID NO: 816375 - DNA, 115 bp, Homo sapiens
ttcaatatggaacttgaaaagcgtgaaaaaagaagcttattaaacaagaatttagaggagaaactgacgcaaattagacggccggatgaaagcaaaggagttgctagtagagttg

SEQ ID NO: 816376 - DNA, 98 bp, Homo sapiens
agatctgaagctcttggttgccttggtggtggtaacaatgtgaaaagaattatggcttgttaacaacaccccagctgcactacatggtgtattgtcga

SEQ ID NO: 816377 - DNA, 98 bp, Homo sapiens
gatctctctgatattgtagaaggcatactgaatgcacatgacaccacaaaggaattgaatgatctggcacgggaccctccagcacagtgttcagcagg

SEQ ID NO: 816378 - DNA, 99 bp, Homo sapiens
tgctgaacgacttttaactttcattgtcttttccgcccgcttcgatcgcctcgcgccggctgctctttccggaaaagaggcacagttagatgaagaagg

SEQ ID NO: 816379 - DNA, 100 bp, Homo sapiens
cgccgctgcctcctcctcaagcgccttgacctcactacatctgctttccactggagtgaccgggcagagacttacagccagctggcccaccccatccagc

SEQ ID NO: 816380 - DNA, 99 bp, Homo sapiens
ttttgaggagacctatgaccgaaagctcaagaatgaacttctaaaaaaaggaaccagtgatttacttgcttgggaccccctatttggaccatctcttga

SEQ ID NO: 816381 - DNA, 98 bp, Homo sapiens
agggtgtggccgttttacattggctgttttcctcacattcctcaagcagtaacggtcatctgtgccgcccctggtgcggacggggcctggtggcgagc

SEQ ID NO: 816382 - DNA, 99 bp, Homo sapiens
gacactgtacagggatgtgatgctggagaactgcaggaacctggcctcactaggacagcctttcctgcctcagggaagaagagagagacagactacagt

SEQ ID NO: 816383 - DNA, 100 bp, Homo sapiens
tcttgttccgaggcggccccagaggtctgccatcatggatgttctcgcagaagcaaatggcacctttgccttaaaccttttgaaaacgctgggtaaagac

SEQ ID NO: 816384 - DNA, 99 bp, Homo sapiens
gagtatgcctgccgtgtgaaccatgtgactttgtcacagcccaagatagttaagtgggcggagcgtgctttggacaccatgaattttgatgttataaag

SEQ ID NO: 816385 - DNA, 99 bp, Homo sapiens
gggcatggctgcatggagcccggccgcggcagcgcctctcctccgcgggatccgcggggcatgccagatttcctggagaagctgcacatggccactctg

SEQ ID NO: 816386 - DNA, 99 bp, Homo sapiens
agcctcaacgtggacgtggtcaagtacgagagtggccctgacggaggggaggaagaaccacgtgaatgttgagggggcgacacacaagcaggtggtgga

SEQ ID NO: 816387 - DNA, 100 bp, Homo sapiens
tggatccatttctcctattgaggagtcaacttgagccccatatgggggttggcaggcagcagagaggcccctttcaaggtgttcgggtaaagaactcagt

SEQ ID NO: 816388 - DNA, 98 bp, Homo sapiens
tccgactacagccacctgtcctccacgagcatggaagagaaagccaatacccacctcctcttgggcatgtgcttagacgcctgtgctcgctaccttct

SEQ ID NO: 816389 - DNA, 100 bp, Homo sapiens
gcccatcctgtctgctagtgccatctgaaatccttcctggaacttgaattgccatgggaccaacccagtgacagctgtcaggagtattctgactggaaag

SEQ ID NO: 816390 - DNA, 100 bp, Homo sapiens
tatatgtttttacaataacgtctccaaaaccaccgcccagcttgatcttctagactccatggcaccgggctgagcgggtctcggcgcggaagatggccgg

SEQ ID NO: 816391 - DNA, 100 bp, Homo sapiens
tattctggtggggagatgaacccaacctagtgggtgtaatacatcatgaactgcagggaccctaataggagtattcataccagcagcagcagcagcagca

SEQ ID NO: 816392 - DNA, 100 bp, Homo sapiens
gaagtcgcgctccaagagctccagcctgagccggctcgaggtggtgcccaggcaacatgggtgactggagcgccttaggcaaactccttgacaaggttca

SEQ ID NO: 816393 - DNA, 100 bp, Homo sapiens
ttacatctgacccccaaagctcagcagttttccagttctcaagatgaggaggagattgatatggatactgttcatgatagccaggccttcatttcccatc

SEQ ID NO: 816394 - DNA, 100 bp, Homo sapiens
agttgctccaaaacctaagtacaacccatacaaacaacctggaggtgaggaaaagatgttggtttaaagcgattttttcctaagagtttactggattctg

SEQ ID NO: 816395 - DNA, 100 bp, Homo sapiens
tgatggcatgcctgtaaagaacttgcagttgaaggagtataacacagaatatatacagccctgctctgggacacacctccattggatttaaaagacagtc

SEQ ID NO: 816396 - DNA, 100 bp, Homo sapiens
tcctcagctccttccagatgaccaacgagacggtcaacatctggactcacttcctgcccacctggtggatgcccagctgacgggaagaatcagccagaag

SEQ ID NO: 816397 - DNA, 100 bp, Homo sapiens
tgctcaaagccctgggtcgcttggaagaagccaagcaacggcagcctttaacagttgagcacatgtatgaagacatcagtcaggatcatgtgaagaaaac

SEQ ID NO: 816398 - DNA, 98 bp, Homo sapiens
tctataagctgaattatggcagcccagtcaaggtttctgctttgggacaaccatacatctaattccttaaagtagttttatatgtaaaacttgcaaag

SEQ ID NO: 816399 - DNA, 98 bp, Homo sapiens
cctgcaagtaaatccaagagcctgttacagattggcggtcgtgccttatgaaatctgacttctacttccagaaaccaccatcatgggttcgggtccca

SEQ ID NO: 816400 - DNA, 99 bp, Homo sapiens
gtgacccctacggagccccagcttgcccacgcaccccactcggcgtcgcgcggcgtgccctgcttgtcacagtgatgtcttggcattgcccattttcaa

SEQ ID NO: 816401 - DNA, 98 bp, Homo sapiens
tggatacagtgtgctttagaatccagggaacttcttgctttgtgcttgaaaaaaatcaaagcccctctgagtaagtgtgctggaattgatgttcgtct

SEQ ID NO: 816402 - DNA, 99 bp, Homo sapiens
ctctccagtggagagccgcctggtaccttgacctctgcaatgactcatgacgagcaaagaatctgcagagtgttgtgcttagtaaaatgaattttgaat

SEQ ID NO: 816403 - DNA, 100 bp, Homo sapiens
atgcaaagtagcaaaattccgtgattatgaagaaaaactcattgtttctgcgtggtataataagtttgtgaagaaatatgggaacctttttagcttggag

SEQ ID NO: 816404 - DNA, 100 bp, Homo sapiens
agtccagagcaacctctttaaaaagcaaggtctctaattaacagaagatggcaaagcccagccacagcagctatgtccttcagcagctaaacaaccaaag

SEQ ID NO: 816405 - DNA, 100 bp, Homo sapiens
cctctcatctcagcctccaaaagtgctggcattacaggttagagcagccagcgggtacagaatggattttggaagagggagtcaccactggacctccaag

SEQ ID NO: 816406 - DNA, 100 bp, Homo sapiens
tttaaaagctcacctgaggactcacactggacaacagaaggtctgacacaggaactttgagaagacgtgacagcaatcccttcaccttttgaattgtcat

SEQ ID NO: 816407 - DNA, 100 bp, Homo sapiens
acatgagatctggggctgcttcacaaactaaagtcgagcaaaagatgtgataataccagcaaagccacctgtcagctttttctccttgaggtctccagtc

SEQ ID NO: 816408 - DNA, 99 bp, Homo sapiens
tcggctcttccagccaccccctctccagtctgctcagatgtcatctgggtgattctcagtgtggaggtgggtggacttttaggagtaacgcagcagctg

SEQ ID NO: 816409 - DNA, 100 bp, Homo sapiens
gctcccagggcggacagcagcctcgggtgcaatcctggagccccccagtgagggtcctcagaatggttggaatgaccctccagctttgaacagagtaccc

SEQ ID NO: 816410 - DNA, 100 bp, Homo sapiens
gggaggtttggcagatggagaacctgatcgaacttcggcagggcaagaatcctttcgttccatcacaaggtcgtattacagaggtgcagcaggagcttta

SEQ ID NO: 816411 - DNA, 100 bp, Homo sapiens
tcaggaattaagtcaaccacgttctcataccagcctgaagttacagatgtagagctaaaacgactgaaggatgctttcaagaggacctgtggactctcat

SEQ ID NO: 816412 - DNA, 100 bp, Homo sapiens
ggcgagtgcttaacctacctcccaacaccattatggaatacaaaactcacaccgacagcatcaagacccaaccctggaagaaaagatggaatattttcag

SEQ ID NO: 816413 - DNA, 98 bp, Homo sapiens
gacatttaattttagggtcctttatatagaagggagagtaggggaaggtgctattaacctggctttggctcagaaccgaagccaagatgtgagaatga

SEQ ID NO: 816414 - DNA, 98 bp, Homo sapiens
aatgaagaggaagcccagaaagggaaaaactaccagaacggagatgtgtttggcggataagggagatcttgaaggcatctcgaaagttgcaaggtgat

SEQ ID NO: 816415 - DNA, 98 bp, Homo sapiens
gcgcgggcgcgcagtactccagcgaccggtgcagctggaaggggagggctaccttttcatctctgtgttggtgaactcaaacagtgagctgatccgcc

SEQ ID NO: 816416 - DNA, 100 bp, Homo sapiens
agtggatagtagaacttatctactggatttccgtagtattgatgtaggactttgctataaaacacgtgaccctagggaaacttttgaagttagcggtata

SEQ ID NO: 816417 - DNA, 100 bp, Homo sapiens
cacgtcctcgaacgcgaggccaacagccccgtatatctctctaccgggggaattgcaggcccatacgatttgagccaccaatgctggatttccatgaaca

SEQ ID NO: 816418 - DNA, 100 bp, Homo sapiens
cttgaatcagaagatgaagtcaaattggccctgaaaaaagacagagaaactatgggacacagatatgttgaaggaggagatgttaaagtaacccatcttg

SEQ ID NO: 816419 - DNA, 100 bp, Homo sapiens
gcagcaacatccccaaacagcggcgtttcacggtggcacatacatggtcctcagccagcagagccacgttccttatgagcaccgtgggtttatttcattt

SEQ ID NO: 816420 - DNA, 100 bp, Homo sapiens
caattgatgaactagtagatagagccaaacaatcttttcaaggattggatgtggtcttgatcgtctgcaatgggaaaatgtatctgcgatgatcgaggag

SEQ ID NO: 816421 - DNA, 98 bp, Homo sapiens
ccgatgggggcgagggcgaagacgagatccagttcctgcgaactgattgattatgtcaagtggccaggcatggaaggagcaaagaaggttcactctga

SEQ ID NO: 816422 - DNA, 98 bp, Homo sapiens
tcttcaacaagaggacccaggagaaattcgccctcaaatgaaagaattcttagccaaagccaaagaagattttcttaaaaaatgggaaagtcccgctc

SEQ ID NO: 816423 - DNA, 98 bp, Homo sapiens
tggatttaaaagacagtcctcgtcagcactgactttcagctatggaatcggtgttggagtgtggatatgagtcatggaactctggggctatgttgctg

SEQ ID NO: 816424 - DNA, 146 bp, Homo sapiens
tggataagactgtctctagaaaagaagctcttgtcccagcatcttaagcagttgctttctaaccaaccactcaccaatgctgttccctcgtcacaccaatgccagtgctcgagacaacaccatcaacctgatccacacgttccggg

SEQ ID NO: 816425 - DNA, 75 bp, Homo sapiens
tgattataaccggagattctcagggcaacccagatctaaccttctgaggaaaggaggccatacagaaattgaacc

SEQ ID NO: 816426 - DNA, 99 bp, Homo sapiens
tccaggcacgcgaggcccctcaggacacagcattgttggttttgccatgtactattttacctatgacccgtggattggcaagttattgtatcttgagga

SEQ ID NO: 816427 - DNA, 100 bp, Homo sapiens
gcagcaacagcagcagcaacagcttcgaaggcgaccttccttgctttcagaatttcacccaggttctgacaggatagtaatgatgacactgaagatgttt

SEQ ID NO: 816428 - DNA, 100 bp, Homo sapiens
tgcctgggggctgaggatgacaaaaaagccttcataggagctttgcctgacaagggggatctgatgcacgacccagcaatggatgaagagctggaacggc

SEQ ID NO: 816429 - DNA, 100 bp, Homo sapiens
ggttatagatggacaagagacgatcattctgcaagcaggcaacctgaatacagtgatctcagtgaaaaccaaattcaggcaatcccaaggaaagctttcc

SEQ ID NO: 816430 - DNA, 100 bp, Homo sapiens
ccctcgtgtctgccaccatcttcgacttgagcgaagttttatgcaagactagacgcttgaagcaaagctgccatcccagaagacgacatgctctcagcaa

SEQ ID NO: 816431 - DNA, 100 bp, Homo sapiens
ttttcttcagcctccttgtcctagggggtgaatctctacattaagaacttggatgacactattgatgatgagaaattaaggaaagaattttctccttttg

SEQ ID NO: 816432 - DNA, 100 bp, Homo sapiens
gcaatagaggcttcatctctgttgcaggatttagcaggttgaatcgctcctagctgacccctcacgtctcttatgatacgtacagaaagcaagagcagcc

SEQ ID NO: 816433 - DNA, 100 bp, Homo sapiens
tcgctcatggattctgcctgacgagttccagctctttgttgctcaggtcgaacaagtaaaattacttgaccgattcagtaccagcaacaagtcattaaca

SEQ ID NO: 816434 - DNA, 100 bp, Homo sapiens
gcagatcggcgcccagcaatcacagaagccgacaaggcgttcaagcgaaaacatgaccgctgagcccatgaggtggtgcggttgtgtcagaacccaaagc

SEQ ID NO: 816435 - DNA, 99 bp, Homo sapiens
aagtgacagcagatttgctggatacgtgacatcaattgctgcaactgaacttgaagatgaatgcccttcaatcagctgggcaccctggcaggcagcaag

SEQ ID NO: 816436 - DNA, 100 bp, Homo sapiens
aggatgctcaacctttacttcttttcggcatagatcaagaagctggtcccacggaaagtggtatctcgggaatcaggagtccaagattgatctccttgat

SEQ ID NO: 816437 - DNA, 100 bp, Homo sapiens
gtgctgaagcctttaaatgcagcatctgcgatgtgaggaaaggcacctccaccaggactcagtgacctttgaagatgtggctgtgaacttcacccaggag

SEQ ID NO: 816438 - DNA, 99 bp, Homo sapiens
ttctgcgctgctcccgttccccctccccagagcaagctttggcagcatgtaagcagctgtttgccaagaacccaggtcactgctaagaaagggtgcctt

SEQ ID NO: 816439 - DNA, 99 bp, Homo sapiens
tggaatccagaactcagtgagtgcaaaccgcagtgacccagtcaccctggatgtcctctgcaatacagtacggtactgaggataacagtactgcagtag

SEQ ID NO: 816440 - DNA, 100 bp, Homo sapiens
gtcccactggtctagaacccggctctgagggcactggcctagttcccgacttgtttctcagggagaggctagtggtaacaggccgagctggatggatggg

SEQ ID NO: 816441 - DNA, 98 bp, Homo sapiens
ctgaggcctccccagccatgctgaactgatatgaacgagactgccaaacaagaagatattttggaatccacaacagatgctgcagaatggagcctaga

SEQ ID NO: 816442 - DNA, 98 bp, Homo sapiens
tgacggacaggaggcgaaatgtgcaaatgtttatgggggggagttaacaaaatgttccacgggatccaggactacgaggaaaacaaggcccgggtgca

SEQ ID NO: 816443 - DNA, 100 bp, Homo sapiens
agtgctgctgatgtgcaacaaattctacaagggggttgctcctctctggatgagacagataccatacaccatgatgaagttcgcctgctttgaacgtact

SEQ ID NO: 816444 - DNA, 100 bp, Homo sapiens
atccctggaatatgaagagacacagtatggtagccacacccccagaataactgaagtgaagtgatggactccgatttggagagtagtaagacgtgaaagg

SEQ ID NO: 816445 - DNA, 99 bp, Homo sapiens
tcagactgtgcttcttgtgcaagtaatcagtctttgacaagtgatgagaagctgtcggagcttcccaagattgataggcagcagtttgaagaaacagtt

SEQ ID NO: 816446 - DNA, 98 bp, Homo sapiens
ttaggtcctacgtttaccctcgatgctcttgttgaatgtcttgtgattggagttggtaccatgtcagtggtagaagatgatgaagatgactttcctac

SEQ ID NO: 816447 - DNA, 100 bp, Homo sapiens
gtctccgtgacacggaccttggacagagaagtaatcgctgtttatcaattgcagaatgaagaagagtctggagaacctgaacaggctgcaggtgatgctc

SEQ ID NO: 816448 - DNA, 98 bp, Homo sapiens
cgagggacaccgcagtatgaggcagaggcctccggtgtggctgtctctgatggtgtcatcaaggtgttcaacgacatgaaggtgcgtaagtcttcaac

SEQ ID NO: 816449 - DNA, 111 bp, Homo sapiens
aatgagcgattttggtatttcagcagaaagactttcacagagactttcttcatgagattgaaacagctctgcttatgataatgtcaacaaagttcgagtagctatcaagaa

SEQ ID NO: 816450 - DNA, 100 bp, Homo sapiens
agggagttcccgttacaatcactagtgttgcaggtataagtgtgctagcggagtgtctagattgtcctgaattgaaagcaactgcagatgactttattca

SEQ ID NO: 816451 - DNA, 98 bp, Homo sapiens
ggcgctggggcccccagaagtgatcgctcagctggagaacgcggctaaagttctgatgtcttcaggaaccagtattactgtggacatcgccgtcatgg

SEQ ID NO: 816452 - DNA, 99 bp, Homo sapiens
ctgaactgggtgctttatatagggttccagcaacagatagaaatgctttaagttcactctggggaaagctggcctctgaaatcttaatgcagaattggg

SEQ ID NO: 816453 - DNA, 100 bp, Homo sapiens
gaccgtgaaagccaagacggacctcaagctctgggggatcgaccgggacagctaccggcgcatccttatggatcctgatggtgaacatgccaggagagca

SEQ ID NO: 816454 - DNA, 101 bp, Homo sapiens
tctttggctcaaaggagttgtatttagtgtgacgactgttgacctgaaaagtgtaaacaggaacatcgataagtagtgtaaaaacttgcacaatgaaatcc

SEQ ID NO: 816455 - DNA, 111 bp, Homo sapiens
gctgcttcgcccggccgacgcctgcagctgctccccggtgcacccgcaacaggcgttttgcaatgcagatgtagatgaaggatttgggggcagagcacttggcaggtcatg

SEQ ID NO: 816456 - DNA, 98 bp, Homo sapiens
agagacagcgattggacagaatttgtgaagattcgacggaggcgccttgcacgacttgctggtggacagacctctcagccaaccaccccactcacctc

SEQ ID NO: 816457 - DNA, 100 bp, Homo sapiens
gctctgcgtgctcgtggtggaggctgctggcaatggcctacgtcgtcataccgggcttccttgccctgtccggggacatggatttgattgacatactttg

SEQ ID NO: 816458 - DNA, 100 bp, Homo sapiens
agcagccacaggaaccttgagttattattcttggcgaaattcaaaggatggctcctggttcatccagtcgctttgtgccatgctgaaacagtatgccgac

SEQ ID NO: 816459 - DNA, 98 bp, Homo sapiens
tcttgtaaacagtcagacaatagtgagctggttagtgaagatgtggaagatgtgaaatttgtcatcaattatgactaccctaactcctcagaggatta

SEQ ID NO: 816460 - DNA, 100 bp, Homo sapiens
ttgcctatgggtatttacgaaaactaggacagtatttatgatgaaatggaagagaagtggtcaaaacagaaggcgaaatggaagaaggatgagaagttcg

SEQ ID NO: 816461 - DNA, 100 bp, Homo sapiens
tttagaaatatacatatatacacactattttcttgtgggagatctcctttgggcaaaggattaaagcaaggagagccaatcatgactggcaaaacacaga

SEQ ID NO: 816462 - DNA, 99 bp, Homo sapiens
ggaaaccagtggccacagcatctttgtctagccccagtgcaggaactcttgcaagaagaaaggactatgagttcaactttagagggagccatggggact

SEQ ID NO: 816463 - DNA, 100 bp, Homo sapiens
gtggaagccaaacaggtggctcagcaggaagcagagagggccagatttgtggtggaaaaggctgccaacaatctcattgtcctaggccgtgaggaagcag

SEQ ID NO: 816464 - DNA, 100 bp, Homo sapiens
gtccggagctaccaaaaccatcctcctggtattgttgcagcatctggcagtgagactgaggatgaggacagcatggacattcccttggacctttcttcat

SEQ ID NO: 816465 - DNA, 99 bp, Homo sapiens
agagatccatggattcctacctaaaccagtcatatggcatggacaatcacagtggtggtggtgggggtagcagaaactatcagccatccccgtttcagc

SEQ ID NO: 816466 - DNA, 129 bp, Homo sapiens
ccaggcaagcctgggccttctggtcaacctggccgtccggggcccccaggccccccacctgcagttggtgacaaagttcctgctgatataaggttaacttccatcaaatctaccacactaagagttgac

SEQ ID NO: 816467 - DNA, 100 bp, Homo sapiens
gccccaggacgagcagctcctggctaggaacagaagacaggcactgtgggacaagtcaaagccagaagatcagctgccatgttacttgactcacaccaac

SEQ ID NO: 816468 - DNA, 100 bp, Homo sapiens
agtttttggagccgtgagggatacagcagtttggtcaatattgtcttaacatgcttcaaataaatcagggaggaataagtttttttcatctgtaatttgg

SEQ ID NO: 816469 - DNA, 51 bp, Homo sapiens
ggacccactggaagcctagaaatgcagtttgaaatccagggtattggaaac

SEQ ID NO: 816470 - DNA, 99 bp, Homo sapiens
ggcaggcgagattgcctgacccaggcctgctcggccctcacaggactcagggtttgggcactgctctgaagatcttattttctgagaaattgatagcaa

SEQ ID NO: 816471 - DNA, 100 bp, Homo sapiens
agtaccccagctccatcaacctcacgctgcacctggattctgaaaaagagttccacgtcctcccttatcgagtctttgttccccttcctggatccactgt

SEQ ID NO: 816472 - DNA, 100 bp, Homo sapiens
taaaaagaaagcactgtggtttcctgcattggtgtggatgtggaagcagccaagcgggcagaagaggaattgctccttcatgacacgaggtgctggctga

SEQ ID NO: 816473 - DNA, 100 bp, Homo sapiens
cagttcaattacacacacatctgtgctggagcatctgccttcggaaagactggaaatagcaaaggctatgcatttgtggagtttgagtctgaggatgttg

SEQ ID NO: 816474 - DNA, 147 bp, Homo sapiens
gagcctgcttgagatgaggcggagcgtggcggaactcaggctccagctccagcagatgcggcagctccagattgagaggatccagaatccagatctctggaatagctaccaggcaaagaaaaaaactatggatgccaagaatggcca

SEQ ID NO: 816475 - DNA, 100 bp, Homo sapiens
ccagaggagcctggaccgctcattcggactcgtcgggcaggactttctgaagaccttttcccccgatgtcttccggttcttctgcctgcggagcagctac

SEQ ID NO: 816476 - DNA, 98 bp, Homo sapiens
gctttagctatcaaagtactaaataagaccatggatgttagtaaactctctgctgaaaaaggtgagcgagtgctgtgctttcatgggcctcttcttta

SEQ ID NO: 816477 - DNA, 100 bp, Homo sapiens
caaataggaaaattaagtttagtagtgctcctattaagccaacaagtcccaaatttggaaaagctgactcatatgaaaagctggaaaaactaggggaagg

SEQ ID NO: 816478 - DNA, 100 bp, Homo sapiens
agactgcatggggagcttctctggcagctgaaatatcctaaactaattctccgagaagccagcagtgtatctgaggagctccataaagaggttcaagaag

SEQ ID NO: 816479 - DNA, 101 bp, Homo sapiens
tgtgtgggaagaaaaagcttgtattctggttgatcatcttagggagccattgtatataaaggaccagatctttatggaaaatgtaggtgcagtgaagcaac

SEQ ID NO: 816480 - DNA, 100 bp, Homo sapiens
ttaactcctctttacttgctgtcagctgcggagaaatcacctgctaagaagctgactaatgcattaagcaagtccctgagctgtgcttccagccgtgaac

SEQ ID NO: 816481 - DNA, 99 bp, Homo sapiens
caacgtgttggaccttccggagcttctcagaagacagagggttttcttttgagtacagagcaactgattttgttgttcctgggcctggaaaagtagaga

SEQ ID NO: 816482 - DNA, 100 bp, Homo sapiens
tggatggtgcctgtgggtgcctgcacctgtgccaccggccatgagccagctgccaaggagtcccagtgccgccgtctgaaggggcgtctcgattacctga

SEQ ID NO: 816483 - DNA, 99 bp, Homo sapiens
tcatctttaactgcttggccgtgcttgccctgtcatcccacctgagaaccatgctcaccgaccctggtcgacaagaagatgctgaggaatacttaggct

SEQ ID NO: 816484 - DNA, 100 bp, Homo sapiens
ggaaggagccaggacaaaggcttttgttcaggtagaaaatctggtgtattaactgtgaaaattttagagctgcatgaggaatgtgccatgcaagttgcca

SEQ ID NO: 816485 - DNA, 100 bp, Homo sapiens
ggagaagtaccaggaggcgttggccaagggttatcaatactctggctgaccatcatcatcgtgggactgactttggtggaagtccttggttacatgtcat

SEQ ID NO: 816486 - DNA, 98 bp, Homo sapiens
tgtatctactcatcaacaaggcagaaagtaccctgaagctctaccaccccaacaatgcccaactgggcatggccgtgatgcgggcagggctgaccaac

SEQ ID NO: 816487 - DNA, 100 bp, Homo sapiens
ctctccaaagagctgcaggccttcaacagccttattagataaccttctgttcggtgatgaaattatcactaatggttttcattcctgtgaaagtgatgag

SEQ ID NO: 816488 - DNA, 99 bp, Homo sapiens
agacctggaccagccagaggacgcgggctctgaggatgagctggaggaggggatcgccatggatcggatgaagaagatcaaacggcagctgtcaatgac

SEQ ID NO: 816489 - DNA, 100 bp, Homo sapiens
atagaatgtgaagacccagtggatcatgttggaaatgcaactgcatcccaggaacttggttatggttgtctcaagtcggtggtggggagcggcagctggc

SEQ ID NO: 816490 - DNA, 100 bp, Homo sapiens
ctgctccaggaaattcagcctcaaaaccgtcctgctgcttgctgaccaaatgggtgaatttggaagtgaaaagaaaactgctttgcatgaaaaagaggag

SEQ ID NO: 816491 - DNA, 99 bp, Homo sapiens
aaaactcaaaggaattccccagttagaaggccagaaggacatgataacgtggatacttcagggatagctgggagtatggccaccctgctccacgatgcg

SEQ ID NO: 816492 - DNA, 98 bp, Homo sapiens
tcacctgaggcacccgaagaagagaccatccatatttccaggtggaatgaatcttacttgttgaatatcttctggttactagttggattcatttgtga

SEQ ID NO: 816493 - DNA, 100 bp, Homo sapiens
cccccatggaggtgatgcgggcaagattcaattagcagagcctcacagacaatggccaaatgtgtcaaagctgtcacagagggtgcccaggcagtagagg

SEQ ID NO: 816494 - DNA, 99 bp, Homo sapiens
ttggatttggctacacacttatagatcttctgcactgtttacaggcacaggagcagcatttctttctattactactatctatgctgagactggttcagg

SEQ ID NO: 816495 - DNA, 99 bp, Homo sapiens
cctgcgccccgctctgctgtgggcgctgctggcgctctggctgtgctgcgcgacccccgcgcatggatgttggcaaaggatgaactgatgaccatactt

SEQ ID NO: 816496 - DNA, 100 bp, Homo sapiens
ttcttgaatgacatccgagcgaaagagaaagaggccattggctgtggtattgtagaaagcatactaaactgggtgaagtttaaggcccaagtccagttaa

SEQ ID NO: 816497 - DNA, 98 bp, Homo sapiens
gggtcctctcagtgaagccagggtggccgccccagcagacagtgctacagagccaactcctgacagctcgacccctttgaatccagtgatcccttttc

SEQ ID NO: 816498 - DNA, 100 bp, Homo sapiens
gatctacagctcggaggagagagacgagcgactgacacgcatgtacaacgtgcgcataatgcgggctgctggtcagcgcctcccaggatgggaagctcat

SEQ ID NO: 816499 - DNA, 146 bp, Homo sapiens
aacctgaggagcctacccctgccccctgggctcgattatgggcccttcaggatggatttgccaatcttgattgggggcaccaacttcgtggcacctccaacagcagcagtaccagccaatcttggagcacccatcggcagtggcct

SEQ ID NO: 816500 - DNA, 98 bp, Homo sapiens
cgggggctgcgttgtgtcatccgccccccgctcaatggcgactccctcaccgagtacgaagcgggcgtttgcgaagtctacatcagcatcagcatctg

SEQ ID NO: 816501 - DNA, 100 bp, Homo sapiens
ctctccgttgctttctggaagtcaacattttgatgttcctcccaggagacagctatatttgcccatgttattcaagatatgggcacggttatgaaatatt

SEQ ID NO: 816502 - DNA, 98 bp, Homo sapiens
gactcttttgtgcctagtaaagttgctcctgatgaacatggtttcatctccagggagttccacaggaaataccggatcccagctgatgtagaccctct

SEQ ID NO: 816503 - DNA, 100 bp, Homo sapiens
gggccacgtgtggaggaggccatgtacagaacatgccgagtttttgcactgcaagtccaaaaagtttacagactttgatgaagtccggcaggagattgaa

SEQ ID NO: 816504 - DNA, 98 bp, Homo sapiens
cgaattatgatcaaggggggcgtatggaggaataccgaggtcaccagtgatagtgaactggaatccatgactgacaagatgctggtgagagggcacgc

SEQ ID NO: 816505 - DNA, 98 bp, Homo sapiens
cggacttcgtggtagaatccattggctctgaagtggggtctctggtgaaagtaagtgaacacagtctcctgccccttatgctggagcagtttccgttt

SEQ ID NO: 816506 - DNA, 100 bp, Homo sapiens
tatttggaattttcgtatacgtggattccagaggggtgacagcgaaatttgccaccttccagagaagaggtacgagatgacaagacaaccataaagtgtg

SEQ ID NO: 816507 - DNA, 100 bp, Homo sapiens
caaggcacacctgcgaacccacacaggaatcggctggggactgctacctctgagaagacacaaggtgatttcagactgcagaggggaaagacttccatct

SEQ ID NO: 816508 - DNA, 99 bp, Homo sapiens
caaaggggaggttacgcagcaaaccatccagaagcagttggaattgatcacaccttttcagttgtacttcaatcctgaattaatctttaaacactttca

SEQ ID NO: 816509 - DNA, 99 bp, Homo sapiens
gatagcagattgtttgcctactccagcttcaatcgaatagacattccaccctatgaaagctatgaaaagctatatgaaaagctgctaacagccattgaa

SEQ ID NO: 816510 - DNA, 122 bp, Homo sapiens
agcgctgtcgcaagagaaaacttgactgtatacagaatcttgaatcagaaattgagaagctgaacccagtgacttgattgtaaaaatttacagagcggaatcatatgctggtctccaagagt

SEQ ID NO: 816511 - DNA, 100 bp, Homo sapiens
acaaccttccctgagagccatcttcggactcctcagatgccaccaacaactccatccagcagtttcttcaccaagattctgatgtcagagccagggaagt

SEQ ID NO: 816512 - DNA, 100 bp, Homo sapiens
accagcacccgtgcatcgagggaattcctcttcccctgcccctgctgcctccatcacaagcatggtgacagagctgaatgaacctctctccaatgaagat

SEQ ID NO: 816513 - DNA, 100 bp, Homo sapiens
gctgggactccaagtgggtgccactacagccaggaatctcttagttataacatttgttagctactttggagccaaacttcacaggccaaaaataattgga

SEQ ID NO: 816514 - DNA, 98 bp, Homo sapiens
gttggagcctcttgttacacagggttgataacagcagaagatagaagagttggtacaacaaatcttcacttagatgtgtctgatgctgttaatgtgat

SEQ ID NO: 816515 - DNA, 99 bp, Homo sapiens
caaatattacacttctctccttgcagttgcagtggtgcagaatggctgacctcagtcttgcagatgcattaacagaaccatctccagacattgagggag

SEQ ID NO: 816516 - DNA, 100 bp, Homo sapiens
acagaacagcacgtaccagaggtggaagtccaagtcaaacgcagaaggactgcctcactgagcaaccaagaattttaccaaatgttgcaagaactctgga

SEQ ID NO: 816517 - DNA, 99 bp, Homo sapiens
ccaagatgatgtgcggggcgccctccgccacgcagccggccaccgccgagacccagcacatcgccgaccagaacaagttgaaatcatcgcagaaggata

SEQ ID NO: 816518 - DNA, 99 bp, Homo sapiens
ttcatggtatcaattttgtcagtcctgttcgaaaccaagaatgacagaagccacattcgatactctgcgactctggttaataatcctgctgtgtgcttt

SEQ ID NO: 816519 - DNA, 98 bp, Homo sapiens
actgttcaagggcaagaaggcttcatatccccagaggagcaccggcagcaccagtgtgtgaggggagcaggcagcggtcctagccagttccttgatcc

SEQ ID NO: 816520 - DNA, 98 bp, Homo sapiens
tgtctctagctcagataataaaggaattgaagccattttttatgaaggaagttggcagtcactttgatgattttgtgaccaatctcattgaaaagtca

SEQ ID NO: 816521 - DNA, 100 bp, Homo sapiens
ggcccctgcaccactaacgcgaggaaacgcagttttcggctttgtgagaaaccttaccatcaaacacgatggccagcaacgttaccaacaagacagatcc

SEQ ID NO: 816522 - DNA, 98 bp, Homo sapiens
caccgactgggggcaacttggcacttagaaccgcagcagggacgtcggtttgctatcgggactcggcgaggacgggttacatgatgaaaaagggccac

SEQ ID NO: 816523 - DNA, 100 bp, Homo sapiens
catggtctttagaagatgaattcctgaaccagaggtacccagatatgagatcctgactccaaactccattcccaagggtttcatggacgggaagcaggcg

SEQ ID NO: 816524 - DNA, 100 bp, Homo sapiens
taggtgccattttaaattcccagacaaggaaaaaccaaggattagaaattaagtagcttgcccaaggccacacatcaagcaatacttcaagtcagctgca

SEQ ID NO: 816525 - DNA, 99 bp, Homo sapiens
tccgaaccccttcatgcccaaatcccggaaactccagcgtgtctccagccgtgtttttcagttatgggacaaaaatattatatcaaaacactgaagctt

SEQ ID NO: 816526 - DNA, 100 bp, Homo sapiens
caactgaagatggacagacacgagagctacagaatcatctaggaaacctgtccagtttaagtcgtcttggtctgagatataacagactgtcagcaatacc

SEQ ID NO: 816527 - DNA, 100 bp, Homo sapiens
aacaatgccaggaggtctggagaaaacgtgtcatcagtgcatttctaaaatcgccagcaatggtggctgcggtgactagtcgtggaataggaaactggag

SEQ ID NO: 816528 - DNA, 98 bp, Homo sapiens
tgccaaaatgtgcaaaggacttgcagctttgccccactcatgcctggaaagaatgaactaaaattgtcggtggtttctttgaaagaaatacaagagag

SEQ ID NO: 816529 - DNA, 100 bp, Homo sapiens
caacaaaactgaaataatcacaaccccagttggtccagggagtcggtagtaagggatggcgggacgtcaccacctttttttcggggaaagcagagggccc

SEQ ID NO: 816530 - DNA, 99 bp, Homo sapiens
cccgacccgggctcccacctgctcctccagcgcaccagcctactcgacacccagcacctcccccgcaaaccgattcgtcagtgttggaccacgggatcc

SEQ ID NO: 816531 - DNA, 100 bp, Homo sapiens
aagacgattcacctgtccagcatccgaccaccgaggctggagggggagaacacccagcttggatttacactgggcaacgtggttggaatgtatctggctc

SEQ ID NO: 816532 - DNA, 98 bp, Homo sapiens
atattttattcctcttcctatccaatccctgccttttgagtccaggtggatgagaacaagttgagcagtgccaacggccatgaagaacgtagcaaaaa

SEQ ID NO: 816533 - DNA, 100 bp, Homo sapiens
tgggagttattacagtttcaggattggcgggcttggtttcagcgagaaaaggagctttgctggcagtagaacacgtgaaagacgatgtcagcatttccgt

SEQ ID NO: 816534 - DNA, 100 bp, Homo sapiens
gcacctaccaaaaaaatcattgatcctcttccccccattgatcattcagaggccataggaaaaggatacagagtagagtttcatgaacctgaaacttggt

SEQ ID NO: 816535 - DNA, 98 bp, Homo sapiens
gtgccattaacgagctggcgaagatgggcgacccggatctcctggaagtgttggcggaggaagctgagtcatccaatggtggctattcctgaacatga

SEQ ID NO: 816536 - DNA, 100 bp, Homo sapiens
gcttctttgttatttgaccctaaggaagcggccacaatcgacagggacaccgccttcgccattgccaggacatcacaggtgacatttactatttcaactt

SEQ ID NO: 816537 - DNA, 98 bp, Homo sapiens
tcaaggttctgatttagattcatcagcaactcctataaacacagtggacgtcaataatgaaagctcttcagaggggtcggcaccaggaattattatag

SEQ ID NO: 816538 - DNA, 100 bp, Homo sapiens
aacaaatgctgctgctatgaatatgggtcgaccattccaaaaaaatcggtttcaggctctgtataactatactcccaggaatgaagatgagctggagctc

SEQ ID NO: 816539 - DNA, 100 bp, Homo sapiens
acttgatgtccaggggaacatcactcagaagtttgatgtaatcatacctggagctgatgctgatgcagctgttggaaccttggtgtcagcagctgagggg

SEQ ID NO: 816540 - DNA, 99 bp, Homo sapiens
atgataaagggctctgaaagctagaagaaaaggtgtacttgcaagaaacctcaggacttgagtaacagcaacatgaggcggggtttcaccatgttgccc

SEQ ID NO: 816541 - DNA, 99 bp, Homo sapiens
tcgaggttgtcctgagggatggacgcgaaattccgggtagatatgcctggctcaggcagtgcattcatccccaccatcaacgccatcacgaccagccag

SEQ ID NO: 816542 - DNA, 100 bp, Homo sapiens
gtaatgccatctgttttcctaaaagactgaaatgggggcgaccattcttagctggagaatgctggaggagaccttaaggatggccaccaccactatgaag

SEQ ID NO: 816543 - DNA, 98 bp, Homo sapiens
cacagtggagaaggaactgtacacttgggtggaggagataagcaaggacctcagagccacactgaacgccttcctgtaccacatgggccaacacagca

SEQ ID NO: 816544 - DNA, 99 bp, Homo sapiens
tggctgtatgttatcaataatactttaatgtcattatcagggttcccttactttgtgactttgaacctctacaccagcatgtacttgctctacataatt

SEQ ID NO: 816545 - DNA, 100 bp, Homo sapiens
aacttctatctctacaccttggcctttgtatattctccatcgaagaatgccctctatgatactagagtaaaaggatggtttcttctggacaattatatac

SEQ ID NO: 816546 - DNA, 100 bp, Homo sapiens
aataccactgtctttggctctggggacagttggcatgccaggttaactttatgaagtgcatcataaaacaacgttttatttgaagttgctgatacggaat

SEQ ID NO: 816547 - DNA, 99 bp, Homo sapiens
attgcagcaaatgggaatgagatcattatatttcttcctttgtggaattatggatggaactaaagcctttgaagtaaattttatggatgatgtaggtca

SEQ ID NO: 816548 - DNA, 98 bp, Homo sapiens
ctgccgctgccgccgccctccacgctcagaatcgggaccagtattcacatctgctaagtgatcattttctgccataccaaggtcataattccttccgt

SEQ ID NO: 816549 - DNA, 100 bp, Homo sapiens
actgcccaaacaggaagtctatgatgagtacaagaatcctgggcattcccttgccccggaaacgccgtgtccaggccgacctaagccaggagccgcaggg

SEQ ID NO: 816550 - DNA, 100 bp, Homo sapiens
aggttcttatagaacatggagttcaacccagtgttatcatcctactcagtctgttctccactcctcatgggtaaggtagccgaacgtggtacccaccatg

SEQ ID NO: 816551 - DNA, 100 bp, Homo sapiens
gtttctggaattgatctcgccaaaaaggacatctttggagccagagctggaagtcgagtgtgctactcaactcaggagatttggagacaaactgaacttc

SEQ ID NO: 816552 - DNA, 99 bp, Homo sapiens
gaacagacaagcaggttgtcttgggttttgagctcatcttcatcattcatatgaggaaataagtggtaaaatccttggaaatacaatgagactcatcag

SEQ ID NO: 816553 - DNA, 100 bp, Homo sapiens
aaactagaaacaccattacagttccagcctctttcatgttgaggatgttggcttcacttaatcatatccgagctgctcaaactggaggattataaggatc

SEQ ID NO: 816554 - DNA, 98 bp, Homo sapiens
ttggctatcctactaatagtgactttgagttgaagacagctgagctcccacccttaaaaaatggagagttaaacatgaagtttctggagagacagtgg

SEQ ID NO: 816555 - DNA, 98 bp, Homo sapiens
tctctccaaggagacaggcgtgaggtttgccggtgctgactttgtcttctacaactgcagcgtcctccagtcaaacctgctcctccaaagccagagcc

SEQ ID NO: 816556 - DNA, 98 bp, Homo sapiens
ggcggatggccccaggtgtaagcgcagaaagcaggcgaacccgcggcgcaataacggatgagacttctgtgagcagcgaggattttgatatgagcgac

SEQ ID NO: 816557 - DNA, 100 bp, Homo sapiens
gattaattatcagtatatgtgaaatcatgtccactgatcaaggttagtaactttggaaaacagtccatgtattacaccagagttgcttcgtatatttcag

SEQ ID NO: 816558 - DNA, 100 bp, Homo sapiens
ataagattgaatgccaagcagaaaattacctaaatgcactctttcgaaagaaaggccctggccaacgtcaacattgggagcctcatctgcaatgtagggg

SEQ ID NO: 816559 - DNA, 100 bp, Homo sapiens
gccaggcgtggaggaagaggcattgaggactttccttacctgtttttccagctcacccactgccagcagaggaagaccccaggactgatgtcaaggcata

SEQ ID NO: 816560 - DNA, 98 bp, Homo sapiens
gacctggtcatggggacagacgccaaggtgctggatatttggatgatgtcaccctggcaagtgctcgtcctgggcctggagtccctgcaacttgggtg

SEQ ID NO: 816561 - DNA, 100 bp, Homo sapiens
tggaaatgcaactgcatcccaggaacttggttatggttgtctcaaggaccccaacgcagacactgaatggaatgacatcttacgcaaaaagggtatctta

SEQ ID NO: 816562 - DNA, 100 bp, Homo sapiens
atgtttcctcctactcctctttcacctgccaggttcaaatttgtagccaaaccgtgcgccatagccctcaacattcaggccaatggaccacaaattgctc

SEQ ID NO: 816563 - DNA, 98 bp, Homo sapiens
ctcgacctgctaacagaactggaccttttcgggatggaagcttcctggcgccaggtggccggtggccgaggccgatcccggggacgggccactgccgc

SEQ ID NO: 816564 - DNA, 98 bp, Homo sapiens
gcctgctctctgggcccctgctggtactggaactgcatcccaaggctgaaattactggaggattctaacatggatacaactctggaggcagacacagg

SEQ ID NO: 816565 - DNA, 115 bp, Homo sapiens
ggacatcggcgagctgcaggaggggctcaggaacctgggcatccctctgggccaggacgccgaggagggccaaaagagaaacattggctactttgacaaccttaaagcggactcc

SEQ ID NO: 816566 - DNA, 100 bp, Homo sapiens
gggaaccaaagactctgggactcttggtgccaacagagttactctctccagaaacatgacaaggaggactttcctgcctcttggagatcagaggaggaaa

SEQ ID NO: 816567 - DNA, 98 bp, Homo sapiens
aaagaaaacattttggaagaattcagtaaagtcacagctccaatactgttggcactagtggcaggagaagctgctggtatcatggaaaacataagtga

SEQ ID NO: 816568 - DNA, 99 bp, Homo sapiens
tcgccacaaacatcttctgatcaaacggtccctgcgctgccgtataggaatgatgtcacaggtggaagaagagacccaaatcattctgaaggctcaact

SEQ ID NO: 816569 - DNA, 100 bp, Homo sapiens
aactggagctggtgcagcaggaattgggatcgtgtcgctgcgacaaagccacagacccaagcatgtcggaacaggattggtcagctatccagaatttctg

SEQ ID NO: 816570 - DNA, 98 bp, Homo sapiens
aaaaattaagtgaattgatttggttggaatgctcttttaccgatgctttaacatacagccactagcatctgtgggtcttgcagatatgatgtctcctg

SEQ ID NO: 816571 - DNA, 100 bp, Homo sapiens
aggagactggtgattggtgcaagcgacgtgggatgaggaaaggctaaccggtggtttggggttgctccccctaaatctggaaaaatgaacatgaacatcc

SEQ ID NO: 816572 - DNA, 98 bp, Homo sapiens
gctgtgtgtgtgtgcagttgcgacgggcacgtcctactatggcctctctggcatgaccaagaacacctttgaggtggtctcggctgctcgtatcttac

SEQ ID NO: 816573 - DNA, 100 bp, Homo sapiens
agagaaagagtggatttcagcctgcacggatggtcttgaaacacaaatggtttttggtgttcagaatgccaggattccctcaccaactggtactatgaga

SEQ ID NO: 816574 - DNA, 100 bp, Homo sapiens
ggcatcctcagcatggccaactccgggcccaacagcaacaggtctcaattgcttaatgccagaccgggagttggaggtgtccgatctcgagttgggatcc

SEQ ID NO: 816575 - DNA, 98 bp, Homo sapiens
cttccattgaacttcccagcactcgaaagggaccgaaatggagagcaaagttttctgaatttccagatcccatgtggggttcagattatgtgcagttg

SEQ ID NO: 816576 - DNA, 98 bp, Homo sapiens
tgaaagtagatcctgctcacagaatcacagctaaggaactactagataaccagtggttaacaaaagaagagattttatcgacatcgaaagtaaatttg

SEQ ID NO: 816577 - DNA, 98 bp, Homo sapiens
gccgcgcgcgcctcagaagctcccggacgcccagcccacagcccccatcccgtagcccttcctggatctggagagagcagctgctgctgccccaccac

SEQ ID NO: 816578 - DNA, 110 bp, Homo sapiens
gccacgaggtgccaccccacgtgtacgcagtgaccgagggggcctatcggagcatgctgcagggtatatacagagcctgatggatttggtggaattccatgagaaaagcc

SEQ ID NO: 816579 - DNA, 98 bp, Homo sapiens
ccactctccagcaccagcttccagttagtggatatagcacaccatccccagccaatccgatcacataggacagtatgcaccttaagatcctgaagaaa

SEQ ID NO: 816580 - DNA, 136 bp, Homo sapiens
ttctccagtgctcatcttgttctcgagttttctctgccatgttgctattgcaggacggacacatcaaccccgtggccgcctccctcatccagaagatgcttcagacagatcccactgcccgcccaaccattaacga

SEQ ID NO: 816581 - DNA, 100 bp, Homo sapiens
cctgattggtgctggcatcagcacagacaccgctttgccgatagtctcactaccggccattctacgtcaacaaaggcaacgggattgggtccaacgaagc

SEQ ID NO: 816582 - DNA, 99 bp, Homo sapiens
gcagaagtccttcttcgccaaatacaataacctgaatctgctcagagacctggctgtgcacattgcccatagcctcaggaacagtccagactggggagg

SEQ ID NO: 816583 - DNA, 99 bp, Homo sapiens
tctgttctgcccggaggagccgcccgtattgttgcagcatctggcagtgagactgaggatgaggacagcatggacattcccttggacctttcttcatcc

SEQ ID NO: 816584 - DNA, 99 bp, Homo sapiens
ggcgccatggcagggcttgcagaaagcatgtacctacatcagatctaaccttgatcccagcaatgtggattccctcttctacgctgcccaggccagcca

SEQ ID NO: 816585 - DNA, 100 bp, Homo sapiens
acttaaccttgcagagagccactggcatcagctttgccattcatggaaacttttctgttgttgacctcctgtactggagagacattaagaagactggagt

SEQ ID NO: 816586 - DNA, 99 bp, Homo sapiens
acatggtggagacagcggctgaaatggaagcatatgttctagaagacattcttgagatggttcacaggcaccagccagaccccctaaaccacgaccgcg

SEQ ID NO: 816587 - DNA, 100 bp, Homo sapiens
ggagacgcgggcggctagagccggagtggggcgagccgcggaacccggccgggagccgcgcgaggcgccgatacggaagatgtgtgcattgtagagagat

SEQ ID NO: 816588 - DNA, 100 bp, Homo sapiens
ggaaggacattgttgctagactgcagactcaggcatctccttggaaacaatgccatctttgaatgtgagagataaacctagtttcagcatgtctgcagca

SEQ ID NO: 816589 - DNA, 99 bp, Homo sapiens
ctggggttccctactcccctgctatccccaacaagaggaaagacacacctaccaagaagccagtcaagcggccagaatagcctaacatggcagaccaga

SEQ ID NO: 816590 - DNA, 99 bp, Homo sapiens
tgagtttgtggaagcctcgcccgcatcctacagcccagacgagttaggatcaaacagagcatactgaatcagcaggactggctggtggtgcagcagaca

SEQ ID NO: 816591 - DNA, 98 bp, Homo sapiens
tccgatggggccgcagcggcggctgtcccctgccggggccgccctactctggggcttcctgctccagctgactccagggattagagctcgatctgcaa

SEQ ID NO: 816592 - DNA, 99 bp, Homo sapiens
aaaactgaagatcggagccaaatccaagaaagatagggatgaggaagaaatgaccaaacgagatgacaaaagagatatcaacagatactgcaaggagag

SEQ ID NO: 816593 - DNA, 100 bp, Homo sapiens
ggtaacttgcaagtccgagttctaccatgatgagtttaaaaggtctggaggcggctggtggaaatccaattccccgcggagcatggctggaaggagtcgt

SEQ ID NO: 816594 - DNA, 98 bp, Homo sapiens
ttttgtgaagcggcagctgaggagactccggcgctcgccatggccgacgaaaagcccaagcaaactgtcatcaggagcttaaataggacagattttca

SEQ ID NO: 816595 - DNA, 100 bp, Homo sapiens
tggagggacattactatgatccactttcagagactcctccactctctgggaatgacacggactccctctcctgcgacagtggcagttcggcaactagcac

SEQ ID NO: 816596 - DNA, 100 bp, Homo sapiens
ttcactgaattcacaattgaggatttccacaacacggagggcatcctggctgtttcacccgtggacttgaacttgccattggactgagctctttctcaga

SEQ ID NO: 816597 - DNA, 100 bp, Homo sapiens
gtacaaatacccctttgaattaattatggctagtgatcagcagctggactgtgccttggacctaatgaggcgcctgcctccccagcaaatcgagaaaaac

SEQ ID NO: 816598 - DNA, 98 bp, Homo sapiens
gactgttcatcattctgttgaagaaacgcttaacccagtcaattcagtgaagatatgatacccacagtgggcttcaacatgaggaaggtaactaaagg

SEQ ID NO: 816599 - DNA, 100 bp, Homo sapiens
ggccgaccacactgcctttgacaacgcttccaagcattgctattacaactgtaagccaggagtggaagatttcgatgtcgatcattttgtgtctgactgt

SEQ ID NO: 816600 - DNA, 100 bp, Homo sapiens
caaaagtatctcatatgaccagtggtctgtctgggaaccctgcagatctggagaaacgtaggcaggtgtttggacacaacgtgatcccccccaaaaagcc

SEQ ID NO: 816601 - DNA, 100 bp, Homo sapiens
tctgtcttggggagtacccagtggagcagatgacaaccatagcccagtgccaatgcatcttctgtactctggtagacatagctgacattgagaatgaaga

SEQ ID NO: 816602 - DNA, 98 bp, Homo sapiens
cccagactacttcctataaatttctcctgggaaacctgcctttgggattcaaaccgatgacaagggtcatatcatcgtagacgaattccagaatacca

SEQ ID NO: 816603 - DNA, 100 bp, Homo sapiens
agttccccggcagcgggacccggcgaagacgcgaccgcggcgcgagtcaccatgtgaacttctgcaagatttggaaaactgtgaaaatgatcctgtggcc

SEQ ID NO: 816604 - DNA, 98 bp, Homo sapiens
gagaagctgcatccgaggaagctttaacagcagtccaaagtggaaatgttagtgaaccggagcccacagtcaccagcgtgtgttccgagacttctcag

SEQ ID NO: 816605 - DNA, 98 bp, Homo sapiens
aatcgaatttgtaattacactccagattgaagagcccaaggtatcttctcttaatggatctccaagatagaaatgaaaaactcttttatagagtgctg

SEQ ID NO: 816606 - DNA, 99 bp, Homo sapiens
actgaatgtgcaacttgcaagggaactggagacaatgaaaatcttgtcaggtttcatggggaagggtatcgggaaggctatgaagaaggcagtagtttg

SEQ ID NO: 816607 - DNA, 100 bp, Homo sapiens
gtgtacccttaacaggtatctgctcctcatggcgcaggagcatctggagttccgcctgccggtggaacggccgccttctccattctccatggccccacaa

SEQ ID NO: 816608 - DNA, 99 bp, Homo sapiens
gctccccagtttagatttgactggtttatcaagtctaggactgccatggttcttatcttatcaaacaatcttctaaagaagcttccccatggtcttgga

SEQ ID NO: 816609 - DNA, 122 bp, Homo sapiens
cacattgctgcatttgttctgcctgacttggaccctggaaaacctggccctcttcaatttctgacaaaagagaatggatcttggagaatgtctgaaagtccatgacctggctttaagagcgg

SEQ ID NO: 816610 - DNA, 100 bp, Homo sapiens
tggtcgtgatcgtgactattcagatcatccaagtggaggttcctacagagattcatatgagagttatgagcagcccgacggccatggaggctgaagagac

SEQ ID NO: 816611 - DNA, 98 bp, Homo sapiens
ctcaacttcatttactttggatatatacgcgctcaggaaaggccgttgcgcctcgcgaaggaaacagagccgttgaccatggttgcaactggcagttt

SEQ ID NO: 816612 - DNA, 100 bp, Homo sapiens
cggcgaagccacagaaaccgtccctgctacagagcaggagttgccgcagccccaggctgagacagttgtgtgaattacgtgcctgagcctgagaactcag

SEQ ID NO: 816613 - DNA, 98 bp, Homo sapiens
gcacagtcccagggcatataccttctactgtccaagcacagtctcagccccatggggtatatccaccctcaagtgtgctgtttgagatggagaacgtt

SEQ ID NO: 816614 - DNA, 98 bp, Homo sapiens
gttcttccaaagtcgcccaggcaccttctccatgcattgcaaggtggtataagttgaaatccaaaccaggaaagaaggacaaggagcgaggagaaatt

SEQ ID NO: 816615 - DNA, 100 bp, Homo sapiens
tatacagaatgaatattgtaatgatgcttgctctgtcaaggcacagcctattgtctcctttgctcagtgtgacatcattcagacgcttctacagaggtga

SEQ ID NO: 816616 - DNA, 98 bp, Homo sapiens
gatcggacactacgtgctgggcgacacgctgggcgtcggcaccttcggcaaagtgaagagaatataaatagtttctggaaaggacactgacaacttca

SEQ ID NO: 816617 - DNA, 127 bp, Homo sapiens
ataccagacagttgaaaaattacagcaatattatatttttattccctctaaattcaagcttacaaaacactacacagcaaaataatgatctgctagactgctaacccgagcatccagcttccacaat

SEQ ID NO: 816618 - DNA, 100 bp, Homo sapiens
cgagacacgcggtgaggcggcgacgggctccgggctcgcttctcatatgtgcggatgaaatatcttttcttttcctggttagtggtttttgttggaagct

SEQ ID NO: 816619 - DNA, 99 bp, Homo sapiens
tcctgccgtccatgcggaagatcgtcgccacctggatgctggagttaagtgggcagaccaacatccacctcagcaaaaacttcttcctgacgaatcgcg

SEQ ID NO: 816620 - DNA, 99 bp, Homo sapiens
tgaaccagggcacgtgtattgacgacgttgccgggtacaagtgcaactgcctgctgccctacacaggtgctggagaatctggtaaaagcaccattgtga

SEQ ID NO: 816621 - DNA, 98 bp, Homo sapiens
ctttgaggatctggaggacggagaggacctgttcaccagcactgtctccaccctagaggagcagtgaggagaatgaataccttccaagaccagagtgg

SEQ ID NO: 816622 - DNA, 98 bp, Homo sapiens
gtgctcgagtgcctgcaggatgtgagggagattggccatcgggactttgatgtggagaagcgacttcggagagacctcaggaggacacatgcactgtt

SEQ ID NO: 816623 - DNA, 118 bp, Homo sapiens
gccgcgcagctgggcgagaagctgctccggcctagcctggcggagctccacgacgagctggaaaagaaactggcgatggaatatgagaggagccctctggaaagaaaaggacagaccc

SEQ ID NO: 816624 - DNA, 98 bp, Homo sapiens
gagaaggttcagttggcaaaccagatatatgacttgacaaaattgcttacccagtacatattaaatctcggcaagtatgatcaaaactacgacatcag

SEQ ID NO: 816625 - DNA, 99 bp, Homo sapiens
tctgaagtgcagcccataatgaaggtcttggcggcaggaacttagtgatttggcccgtgaccctccagcacaatgttctgcaggtccagttggggatga

SEQ ID NO: 816626 - DNA, 119 bp, Homo sapiens
cggccctgagcgcactctggagggattctggcatcagggaggctttcagccggagaagcgagtttcagctggcatggaagaggagatggttcgtgttacgcagtggccgtttaactgga

SEQ ID NO: 816627 - DNA, 99 bp, Homo sapiens
gccaaccatgggaaaggagagtggatgggactcagaaaagaggcacagttagatgaagaaggacagtttcttgtcagaataatatatgatgactccaaa

SEQ ID NO: 816628 - DNA, 116 bp, Homo sapiens
gccatggggtggcgggcggcgggcgcgctgctgctggcgctgctgctgcacgggcggctgctggcgaatgaaactagtgatcgagaagatggcctccccaaaggacatcatgtgac

SEQ ID NO: 816629 - DNA, 100 bp, Homo sapiens
cggatgccctgcagtacctgcagaaggtctctggagacatcttcagcagatggtggatgcttccaaaagcatcgaagctgtccatgaggacatccgcgtg

SEQ ID NO: 816630 - DNA, 99 bp, Homo sapiens
tcttgtggctcagagcataatttggcaataattgggacaatggtgacagatccaggcaccgagctccacgcaatgcccggatgtctgcaccttcgcttg

SEQ ID NO: 816631 - DNA, 100 bp, Homo sapiens
aggagtcatatatccttcatatgatccatcttagtgaagaattaggatacaggttccaatggtcctcagctgtttacaatagagcaatggggcagtcctg

SEQ ID NO: 816632 - DNA, 98 bp, Homo sapiens
gtggctctggatagcaccttatggacaggcacctgaatggacagaagaggacctcagccaactgacaagaagtatggttaagttcccaggagggactc

SEQ ID NO: 816633 - DNA, 98 bp, Homo sapiens
gcaggatggatttctacgccgaccccggcgtctccttctatgtgctgtgtccggacaacggctgcggcgacaattttccaaaccaaacaggaagctta

SEQ ID NO: 816634 - DNA, 98 bp, Homo sapiens
ggaatgcatttgtcacgggcattgcaaggtacattgagcaggctacagtccactccagcatgcatcacagccacagctgccagtattggggcagctgg

SEQ ID NO: 816635 - DNA, 99 bp, Homo sapiens
gaagagggactggaaccatctcagaagccatgcccctcaggctggaacttgccctgtctcctcgcagatgagatgcctgtgaggagccaccaacatttg

SEQ ID NO: 816636 - DNA, 98 bp, Homo sapiens
cgaaactgtgattgttttctggtggtaatatttcccagctcagacagccaggcgcaccctccggagctgctgttctcagcctcactgcccgccctggg

SEQ ID NO: 816637 - DNA, 98 bp, Homo sapiens
ttgtcctgtcctggatcagtttctttgtcatgtagccaagactggagaaacaatatttgttattgggcgggaaaaaccaggacaagtgagcgaggttg

SEQ ID NO: 816638 - DNA, 100 bp, Homo sapiens
agttgtggcaatagaaacgaaacgccctcagaccctgtaatcattgacaggaatcatattgacaggtcatgaaaatgagaccaaaagatctctggaagcg

SEQ ID NO: 816639 - DNA, 100 bp, Homo sapiens
aggacatccataaaaattcatcagagagcattttactactgagctgcaaaggtatcattgcccagtgcctaagatcttttatgttcagctcactgtagga

SEQ ID NO: 816640 - DNA, 100 bp, Homo sapiens
gcgcctcggtggcgccgcgctgctcctgctgctcatcccggtggccgccgcgcaggagcctcccggagctgcccacagcccccatcccgtagcccttcct

SEQ ID NO: 816641 - DNA, 100 bp, Homo sapiens
gagcttctgtcgccgctctaggagacacctctgactctgtcacagctctgcagggtgaacttgaggaaggccactggcgtccgagggctggagaagattg

SEQ ID NO: 816642 - DNA, 99 bp, Homo sapiens
ccaaccccttcgagcaagacgtggacatgcacatgatggtgtccaagccagaacagtgggtaaagccaatggctgtagcaggagccaatcagtacacct

SEQ ID NO: 816643 - DNA, 124 bp, Homo sapiens
ttattcttcaactctacattcttctggagcatggacaagcgaatttcagtcagtgaagttggtgaaccatctaaagaagagaaggctgtggccaagtatcttcgattcaactgtccaacaaagt

SEQ ID NO: 816644 - DNA, 98 bp, Homo sapiens
ggaacagccagaattggacccgaaaccatgcctcactgtcctaggcaaggctggaggctctcaggtcatttttaccaacccattggagatagtgaaga

SEQ ID NO: 816645 - DNA, 98 bp, Homo sapiens
tcctacaacaacaagccattcatgggccggttttatgagtgggaaccatttgcagaagagcacctgaagaagcctcttgaagactacatggccctttt

SEQ ID NO: 816646 - DNA, 98 bp, Homo sapiens
agtcgttcctgggcaagctgggcggcaccctggccaggaagcggagggcgcgcgagggagtacaaaatttcaagctttgagcagaggctgatgaatga

SEQ ID NO: 816647 - DNA, 98 bp, Homo sapiens
ttctcaggagaaactgtcttcatgtcgatggaaaacccagttcctacaacagcagccagtacccctgatgccgttgacaagtatctcgagacacctgg

SEQ ID NO: 816648 - DNA, 98 bp, Homo sapiens
ctgggatgatacaccttttccacagggaattgagttgggaggttatattcaaaagaaaaaggaactgtggggaatctgtatctttattgcagcagttg

SEQ ID NO: 816649 - DNA, 125 bp, Homo sapiens
accactggttctccaggaaccgaaaaggcgaggagtatagtacggcaaaaaactgtcgaattgagcccctgagtcctgagttggtggcagctgcatctgctgtggcagattctctcccttttgat

SEQ ID NO: 816650 - DNA, 113 bp, Homo sapiens
atcaatatctacgcccctaccctcttggtctttaaagaacatataaacaggcctgccgatgttatccaggatcatggggttgacagcagcattttccagaatcctaaaaagct

SEQ ID NO: 816651 - DNA, 100 bp, Homo sapiens
cttctacaaattctttcaggagtttacccaagaaccattggtggagatagaaggtactgtccaagaagctggaacattattatccagcaagaatgttcgt

SEQ ID NO: 816652 - DNA, 98 bp, Homo sapiens
ggcttctctggactttgcacacctccaggagaagaacccagaaaattgatcagttctaaaaaaccatgccccactccacagatcctggtccctacaaa

SEQ ID NO: 816653 - DNA, 100 bp, Homo sapiens
aagtatcaagcacagccaacctgagtctggaagcacctgttcttcccggagcctatcagcaaagccattcccaaggctatggctacatgcaccagaccag

SEQ ID NO: 816654 - DNA, 100 bp, Homo sapiens
tgatggtacaggaagggaacgtggaaagcgcatacaggaccctaaacagcaccacaaaaacccttcccatgcaaattgacggagaaccctggatgcagac

SEQ ID NO: 816655 - DNA, 101 bp, Homo sapiens
ccaaagacaatctacttacctccagcagcaaacagcacacagtctttcctgcgaaaggatcaagggataaaccatgtgcatttgcacagtataacttggac

SEQ ID NO: 816656 - DNA, 100 bp, Homo sapiens
tggtattatggaaaattccaagtaaagaactgagggtcagattggtggttctcttcccaaagtggaagccaaattcatcaattatgtgaagaattgcttc

SEQ ID NO: 816657 - DNA, 98 bp, Homo sapiens
tagcatgatggaggcagccagtggtcttttggtgccttaatgaagagtcggattttgaagcagccttcagcgtgggagccactggcgtcataacggat

SEQ ID NO: 816658 - DNA, 100 bp, Homo sapiens
gttcccccaccccagaagaggatggcaaaggtggctaaggacctcaacccaggagttaaaaagaggcgtagaggctccggtgttttttgtgccaattgcc

SEQ ID NO: 816659 - DNA, 100 bp, Homo sapiens
tcttctggcagtgattctgacagtgaggttgacaaaaaggcatcataggcgagtattagtggaatggctaagagatccatctcaggagcttgaatttatt

SEQ ID NO: 816660 - DNA, 100 bp, Homo sapiens
agggcggtaaggatttcaacatgcctctgacaatctctagtattttaccaaatgttgcaagaactctggagttcttatggtagtaaaatgccggaaagaa

SEQ ID NO: 816661 - DNA, 100 bp, Homo sapiens
cgaggatgagagcgacgaagccaactgtccagatgccgacaaaaggatcaaggtggcgaagcccgtggtggagatggatggtgatgagatgacccgtatt

SEQ ID NO: 816662 - DNA, 98 bp, Homo sapiens
ttggctacaggcacaaatacatttacaagagccctgagctgccacggatactgaggcgggcacatgaacgccccccaccccatccacataggatgcac

SEQ ID NO: 816663 - DNA, 100 bp, Homo sapiens
atcccagacgaagacagtccctggatcaccgacagcacagacagaatccctgctaccagttcacctttccttgccagtgaagatggcgtgcttggcggag

SEQ ID NO: 816664 - DNA, 99 bp, Homo sapiens
ttctgagctctgtgctgaacaagactctggatgggcacatggtggtgcgtagccatgcccgtgtgtcgtcgctgaccctgaagagcatccagtacactg

SEQ ID NO: 816665 - DNA, 98 bp, Homo sapiens
gcgagccttctttcttccagcacctcaacaaggacaaggacatgctgaagctgaccggttccctgatgtgttacctgcttctgctactgatccaaact

SEQ ID NO: 816666 - DNA, 100 bp, Homo sapiens
tcctggcatcgtggcatttccgagattggagcctaacagtgtagatcctgagaacatcaccgaaattcctgaggctttctaccaatgcaggccagtggaa

SEQ ID NO: 816667 - DNA, 100 bp, Homo sapiens
aaaatgcggttaaaaaggtgatgggtatctttaagagcagcttattccaagctttgctagccccagcatgagaccagatgtaagctctcctccatccagc

SEQ ID NO: 816668 - DNA, 99 bp, Homo sapiens
aaatgtgcaatcttaaaagaaactgtgaagcaaattcgtcagatcaaagaacaagtgacttctgacagctctctccatggaaggaggcggcggccgcga

SEQ ID NO: 816669 - DNA, 139 bp, Homo sapiens
ggttcctgcttttgatcctagacctggtcgtactaatgtccagcagacaactgatctagaaataccacccccaggtgtgatccctcacatccacaaatctctgattggaaagaagggacagcagaaaactgcttagagg

SEQ ID NO: 816670 - DNA, 98 bp, Homo sapiens
ccgcctggctttcgtattcgttgttctcggcgggctgtggggcctccgcgccgcggccgttagtcatgtcgggtgctgttccagaattcaaagaagag

SEQ ID NO: 816671 - DNA, 100 bp, Homo sapiens
ggttaaatggattcacaacaagcccccgcctcccaacactggaccaccgcacagtctcaagtgtagtgaagtcaggaaagactcactggttctccagtgg

SEQ ID NO: 816672 - DNA, 98 bp, Homo sapiens
ccagccaccggggaggaccctgagggctcagacatcctgatgcctgaggaaacccagacccaagaccaaccgatggaggaggaggaggttgagacgtt

SEQ ID NO: 816673 - DNA, 98 bp, Homo sapiens
ttcagcttctttctcacacgcagatgaacactggacttcagaaatgtgttgcttttgaacagggcaaaatccttcctactcctgagacagttcctttt

SEQ ID NO: 816674 - DNA, 98 bp, Homo sapiens
ctagcagttcctgatacataacttcccaagtaagaagcggaagaggagccgctggaaccaagacacaatggaacagaagacagtgattccaggaatgc

SEQ ID NO: 816675 - DNA, 100 bp, Homo sapiens
ttcacttttgagtgcaactgccttccagcagccagacccggtccgtttggaatgcctgggatggtgccgccgcatgttcctcctcagatgctcaacattc

SEQ ID NO: 816676 - DNA, 98 bp, Homo sapiens
cctggatgagacatttgctacagcatcccacattaagtcaacgaggaccattcttagtggcactggggaaatcttggcacccagaagaattcaactgc

SEQ ID NO: 816677 - DNA, 98 bp, Homo sapiens
aaaaccaacgcctggctcggagcagcagcctctgaggttgacatcatggacatatgtgagtccatcctggagaggaagcggcatgacagcgaaaggtc

SEQ ID NO: 816678 - DNA, 100 bp, Homo sapiens
gataacgacaagaaaaacaatcgcttcaatgatgggaaggtggatcccgccgggaggtactttgctggtgtaaatgcagacaaagttggaattgaagctg

SEQ ID NO: 816679 - DNA, 100 bp, Homo sapiens
tggaaggaaaaagatctaaagtcacccggcggccaaaggccagtgactaccaacgtttggaccagaagctgagcgggctttggacaccatgaactttgat

SEQ ID NO: 816680 - DNA, 98 bp, Homo sapiens
agaaattactgtctcaagtgatacgctttcacttgacagggccactgggcaaggaactgagggtggcatccagccaacagctaccaaggaactgaggc

SEQ ID NO: 816681 - DNA, 98 bp, Homo sapiens
tcaggcgtgcgcggacggtgtgcgggtaaaagaatgtcacatgtcagcatttgtacctgaagtcagcatgcaaagttcagggtacctggatgaatgcc

SEQ ID NO: 816682 - DNA, 98 bp, Homo sapiens
tgggactaagccaagggattcaggtgtggtgccggtgggaactgaggaagcgcccaagaaaatatttacaccagcagctccagttcataccaataaag

SEQ ID NO: 816683 - DNA, 98 bp, Homo sapiens
ggaattgagcaagggagtgatgccggttatctctgtgaatctcagtcggtggtggggagcggcagctggcagagagtcaacgcccagacggctgtgag

SEQ ID NO: 816684 - DNA, 98 bp, Homo sapiens
ggcagtcgggccagacccaggactctgcgactttacgaagttggtgaaccatctaaagaagagaaggctgtggccaagtatcttcgattcaactgtcc

SEQ ID NO: 816685 - DNA, 100 bp, Homo sapiens
tggcggcgctggagagggggcgctgagctgttggggaatggcggcgctagatagtaaggcatcagggaagatgggaatgcgagctgtagtctattatatg

SEQ ID NO: 816686 - DNA, 100 bp, Homo sapiens
agtgttcaagaaggaagtgtatcttcatacatcaccacacctgaaagcaggcaggcccccagcccctcatgtcagagccccctgtgtactgtaacctggt

SEQ ID NO: 816687 - DNA, 98 bp, Homo sapiens
gcccgaaagaagcgaaattttattctggatcagatatgggagaagggactactataaatgcaagtgcagatggcaacattggaactatagaggatggt

SEQ ID NO: 816688 - DNA, 100 bp, Homo sapiens
aaacacaataccaggcatacatttggcagaataaatgaaccagactcaagataacatcactgtcaggtgggacctgggccttaacaagaagagaatcgcc

SEQ ID NO: 816689 - DNA, 100 bp, Homo sapiens
ctgccctggagcagttcgtgaacagtgtccgacagctctcagctcaaggccacgtgcgagcgagggtttgcagcaatggaagaaacgcaccagaagaaga

SEQ ID NO: 816690 - DNA, 98 bp, Homo sapiens
cttccttactttgtcttggtatactacatggcaaaatgggaaagccctggaaaggaaaatatctatgaggcaaagcagagaagagctgataaagcgag

SEQ ID NO: 816691 - DNA, 100 bp, Homo sapiens
tgtacccggtggagtatggcaaggacagttgcatcatcaaagaaggagacgtggggtcactggtgtatgtcatggaagttctccaacatcttcaaataaa

SEQ ID NO: 816692 - DNA, 100 bp, Homo sapiens
atctcttttaggggattctgcaccaacactgcacttaaataagggcacacctagtcagtataaaggtgcacatgtaaagccaggatttgctgaacatttc

SEQ ID NO: 816693 - DNA, 100 bp, Homo sapiens
gccaagccaagctcaacctcaaatcagtactgagggctgaccaagaggaggaagctcaccccgaattcaaatttggaaatgaactttctgctgatgactt

SEQ ID NO: 816694 - DNA, 100 bp, Homo sapiens
ctgaggcatgcagctggggttttggctcagatgacggagcagcggaaacgcaggcaacgcctaggctttgtggatgtccagaactgcattagccgctgag

SEQ ID NO: 816695 - DNA, 100 bp, Homo sapiens
ggagcgcctggacccagcacggagggacttctgcagagagagtgcgcagaaggattccgggagcacagttccgccgaggcctgccttaagtgtgaaagta

SEQ ID NO: 816696 - DNA, 100 bp, Homo sapiens
ttcactctgggaaaaggcactgaagttgcccggaagcaggagatcattaagaccacggagcagctcatcgaggccgtcaacaacggtgactttgaggcct

SEQ ID NO: 816697 - DNA, 99 bp, Homo sapiens
aaatctactactgttcatggcagatttgtagccaaaccgtgcgccatagccctcaacattcaggccaatggaccacaaattgctccgcccaatgccatt

SEQ ID NO: 816698 - DNA, 100 bp, Homo sapiens
ctggtccaaacaatcatgggaatttccaaggggattcaaacttcaacagaatgtggcaaccagatattccactgttgaaagaagcatgagggcagcggcc

SEQ ID NO: 816699 - DNA, 130 bp, Homo sapiens
aatagtgctatttgataagccaactagaggaactactgtacaaaaatttaaagaaatggtctatagtctctttaagatagaatgagtccatttaagtcccaggacggtggaaactagctagtagattgca

SEQ ID NO: 816700 - DNA, 100 bp, Homo sapiens
ggttcgttgtatttgtgacatctgtgggtttaatccaacagaagaaggacttaaagagagatctacttcagagccagcagtcccgccagaagaggctgag

SEQ ID NO: 816701 - DNA, 100 bp, Homo sapiens
agggcagtgaagaattattttcagtggaaccactaccaccacgaccatcatctgatcagtctagcagggtggttctcttcccaaagtggaagccaaattc

SEQ ID NO: 816702 - DNA, 100 bp, Homo sapiens
gcttcgaagaggacggagctgcgctggggccggaggcgggcgaggaaggaggctccagtggctcctccagtgacaaccggacctaccgctacagcaaccg

SEQ ID NO: 816703 - DNA, 100 bp, Homo sapiens
aacaagatgtgctaatagctgtagaacctgtgaaaacgtacgctctccaactggccaatacaaatcccttgtatccgatatgtgaacttttgcaaagcgg

SEQ ID NO: 816704 - DNA, 100 bp, Homo sapiens
gacctacggcgtgccctccctggaggagctgggctgagtcatcactagagagtgggaagggcagcagcagcagagaatccaaaccctaaagctgatatca

SEQ ID NO: 816705 - DNA, 98 bp, Homo sapiens
gaagaaccacctagcatagaggaagttgaagaggtggcaccacctagagccgatattatgtacacggggacagttgactgctggaggaagattgcaaa

SEQ ID NO: 816706 - DNA, 100 bp, Homo sapiens
attaatacaaataaagtacttaaacaaaaagccaaaaagaggagaaggggagaaaccaggcagtggcaaacagtgtaaggagaggatgaggcccgtgaaa

SEQ ID NO: 816707 - DNA, 98 bp, Homo sapiens
cagctgtacagccacactaactgtgacagggatttactgctgcggcttgctccgcgcgcggaagagtgactgcaccggcctcccactgtccatgctga

SEQ ID NO: 816708 - DNA, 100 bp, Homo sapiens
ctgtactcgtgcctcatggatccaaattaaaggagtcagtggatcggtggggaaaatgctgcttaccctgggccctgggctgtagaaagaagacaccaaa

SEQ ID NO: 816709 - DNA, 100 bp, Homo sapiens
gctttcttcttggacacctaatacccacagtcctccagatgatactctccaagctgtaaggaagaagtcaaggattaaggagacctggactggagaggag

SEQ ID NO: 816710 - DNA, 100 bp, Homo sapiens
ctggttctccaggaaccgaaaaggcgaggagtatagtacggcaaaaaactgtcgtgattcgcctttgccagtctcatctcgtgtctgctttgttaagttc

SEQ ID NO: 816711 - DNA, 100 bp, Homo sapiens
aaacttcctcggaggcctccatcaggttggaataattgtatggaagagatacagtgattttaagaaactacacaaagaactatggcaaattcacaaaaac

SEQ ID NO: 816712 - DNA, 100 bp, Homo sapiens
accgttttagtagtcgcagacctcgaaatgatagacgattgcagttgctctacggtgagcccgggcgtgctggcagggatcgtgatgggagacctggtgc

SEQ ID NO: 816713 - DNA, 99 bp, Homo sapiens
tcggatacgatagaaaatgtaaaggccaagatccaggataaggaagactttgggatcatgctactatgacagaagtgaaatctctaaattttaatatgt

SEQ ID NO: 816714 - DNA, 98 bp, Homo sapiens
cctctggatgtggaattctccgtccctttccagggagggaacaaagcccacagcaccgctcttgaatgtcgtctctcaactagccaaacggaatctgc

SEQ ID NO: 816715 - DNA, 98 bp, Homo sapiens
ggaaggcgggagacgagaagcctgaaaagtcgcagcgagctggagccgccggagatttgtccaatatgtgcagcgttacctggaggcgatcctaatca

SEQ ID NO: 816716 - DNA, 100 bp, Homo sapiens
ggtgctatggatttagtgtccagtgcgaaaaccaaagtggtggtcaccatggagcattctgcaaaggcaatgaatcgctccctggctaatgtgattcttg

SEQ ID NO: 816717 - DNA, 100 bp, Homo sapiens
gagagctattagagattgtgaagaagaatttcgatctccgccctggggtcattgtcagatgatgaagaacgagagcttcaaatggatcctgcagactatg

SEQ ID NO: 816718 - DNA, 100 bp, Homo sapiens
gttgtcacgccggtgtcagtctgatgaagattggcatcaggcaaggggagagccagttgcgcagagccctgcaaccagcagtccagggagaagtggtgaa

SEQ ID NO: 816719 - DNA, 100 bp, Homo sapiens
ctccacaccgacaccatctggaggaggcgttgccgtgaggaaaaggcaacagatggctccctgcaaagtgaggattggacgttgaatatggagatctgtg

SEQ ID NO: 816720 - DNA, 100 bp, Homo sapiens
agaacttaaaggacatgatcttccttctgaaagactcgcttcccaaaactgaaatgcaattgtgggcacacttgaagctgaaaaagaaagaagaaaatct

SEQ ID NO: 816721 - DNA, 98 bp, Homo sapiens
aggactgcgcccccgggagcgggcgcccagaggaccaagaatcgccttcagccctgtctggtgcatccttggcagaaagtgaggaggaaaacaccccc

SEQ ID NO: 816722 - DNA, 100 bp, Homo sapiens
aaactaagcaaaccataagcctcttcaaggagggaaaagaaagaatgtatgaggagaattctcagcctagggatacagcaggccaggagcgatttcacac

SEQ ID NO: 816723 - DNA, 99 bp, Homo sapiens
agggaaggaggcggcggccatggagttgggcgagctgctctacaacaagtctgagtacatcgagacgtttggtgaggattcatcaacctccagtatgat

SEQ ID NO: 816724 - DNA, 100 bp, Homo sapiens
gtgacctctcacctgaagaacgagggcctgtgctttaacggcagtgccttcgtcttgtacctctctgccgctgttgtagatgcatcttccgtctcccctg

SEQ ID NO: 816725 - DNA, 98 bp, Homo sapiens
ggaaaccggtagcgcttgcagcatggctaggtcccactcagctcaaaatcttcacttgtgaatactgcaacaaggtcttcaagttcaagcactcgctg

SEQ ID NO: 816726 - DNA, 99 bp, Homo sapiens
tatgacaagaccaaggtcaacaaggacaacaatgagatcgtggacaagatcatgggcaaaggacagatccagttaccggtattgtaagaacaagccgta

SEQ ID NO: 816727 - DNA, 100 bp, Homo sapiens
ataaggatgtcttcagagatcctgctcttaaacgcaaggcccgacgggaggccaaggtcaagtttgaagagaggcatgttggagacttgggcaatgtgac

SEQ ID NO: 816728 - DNA, 99 bp, Homo sapiens
ggggactctgtgtgagggaaagaaaacaatttctcctgctctgcagcttctgttcagctggtgctcaagaccgaatcggctgggcttttggcctaggat

SEQ ID NO: 816729 - DNA, 100 bp, Homo sapiens
gaaaaatcaaaaggagttcatgcttatgaatgctcgacttcaggctcgcttctcatatgtgcggatgaaatatcttttcttttcctggttagtggttttt

SEQ ID NO: 816730 - DNA, 99 bp, Homo sapiens
tgctgtggaggctgaggaggcggcggcggagatctggaggaagccagatcgctgagggtccggtctccagtttgcctcctgctatatccattggaagag

SEQ ID NO: 816731 - DNA, 98 bp, Homo sapiens
ccagagcagaggaatctatacaaagaagtgatgctggagaattacaggaatcttctctcattggtgagaaagatcagtctaaagaaaaggagaagaaa

SEQ ID NO: 816732 - DNA, 99 bp, Homo sapiens
aagcgaagagaacgagaactaagacgaaagcatgtcatggaagttcgacaacagcctaagagtttgaagcttcgaggcagagaatgggccgacaccatc

SEQ ID NO: 816733 - DNA, 100 bp, Homo sapiens
ggggaagatggcagcagacgctttggctactgcaggcgcttactggtgctatgcttacatttgaaaagatttcattggacagcatatttaagaaataaag

SEQ ID NO: 816734 - DNA, 119 bp, Homo sapiens
aagatcatggtggggagtacggacgaccccagcgtgttcagcctccctgactccaagatatttgatttaatggatgccaaagcacgtgctgattgcatcaaagaaatagatcttcttaa

SEQ ID NO: 816735 - DNA, 100 bp, Homo sapiens
ggtgcggctccaccccttccacgtcatccgcatcaacaagatgttgtcctgtgctggggctgacagccagtgtagggagctctgcggtgatgagcacggc

SEQ ID NO: 816736 - DNA, 98 bp, Homo sapiens
gctgtaattggaagaccagattttgaacatgccgtggaagcttctaaactttctagtcaagctgaccggttccctgatgtgttacctgcttctgctac

SEQ ID NO: 816737 - DNA, 98 bp, Homo sapiens
gccacatccccccgggctacatctcacaggtggaggagaagatcaagcagacccaccgtaagtacctgctgcaggagcagctaaagatcatcaagaag

SEQ ID NO: 816738 - DNA, 98 bp, Homo sapiens
gtgcctcgaaggccaggatggggtgcaggatgagttttctctgcagcctgaagaaggtagttcgaggacactacaaaggtcagcaaattggcaaggta

SEQ ID NO: 816739 - DNA, 100 bp, Homo sapiens
gatgtaaaagaggagtgtcaaaaatatggaccagtggtatctctacttgttccaaaggaaaatcctggcagaggacaagctggagtgcagtggtgcagtc

SEQ ID NO: 816740 - DNA, 100 bp, Homo sapiens
aaagaacatggaagagatgtttcacaagaagtctgaggccgtcagggaagaaaaaatgctgggcatcttggtgcagcacaaagtccggagtggcgtctcg

SEQ ID NO: 816741 - DNA, 100 bp, Homo sapiens
gtcttccccagctctgcagccacatactatccgtttgttcaggaaccaccagtgacagaattatacagatgaacgggaaaactatgcactacatctttcc

SEQ ID NO: 816742 - DNA, 100 bp, Homo sapiens
agaagcggaacagccacagcagcctcccaaggagtctgcaagttgagcggagaacagccttgggagtcatctttgccagcagtctcttccttcttgcact

SEQ ID NO: 816743 - DNA, 100 bp, Homo sapiens
gtggaaagtacttgtgttatttccaagatggtgacttctacgaaaaagccctggtggagctgaaggttgcagtggaggccatagtggagtttgactacca

SEQ ID NO: 816744 - DNA, 98 bp, Homo sapiens
cctgtgtcccgcgggaacccgcattggcagcgggagccgtccggaggacctgggacaccgcggaagtcgggaaatggagcggcgccggtcagagagag

SEQ ID NO: 816745 - DNA, 99 bp, Homo sapiens
cacatcccaggctccagcaatcctgctacctcagcctcctgagtagctgggaccatacgccaccatgcccagctggtggagctgtctaaggctcaagat

SEQ ID NO: 816746 - DNA, 98 bp, Homo sapiens
tcccgccggccgtctccttaacaccgaacaccgcattatccaattggtttgctatttgatcttcttgcatcaagttcagctcttccttggaacatcac

SEQ ID NO: 816747 - DNA, 100 bp, Homo sapiens
cttgtacctggtgttcggttatggagcctctctcctctgcaacctgataggatttggctacccagcctacatctcgaaggatttgatgccctggatccct

SEQ ID NO: 816748 - DNA, 98 bp, Homo sapiens
tcacacccatgcctatgatattcttctcctggttaatcaagaattctctatttctgctccgtcatccatgccactattaactgctgaagtactgatcg

SEQ ID NO: 816749 - DNA, 100 bp, Homo sapiens
aacttgatacttctgtctccattgaggagatctcaccctgtatcacctgggctgaagcgtagtgacgctatcacggctcactgcagcctcgacctcctgg

SEQ ID NO: 816750 - DNA, 100 bp, Homo sapiens
cttggccttggagcgaggctatcacaagctgcaccagcttctaaccgagttatatttcacactatgtgctgactgtatctacagaagatatttaaaaaaa

SEQ ID NO: 816751 - DNA, 100 bp, Homo sapiens
ggccaggggagacctgggtgccttcagcagaggattgacatctaaagactcttggtacatgaggaagaaacccggaaaaggaaagcagaggagtcaggga

SEQ ID NO: 816752 - DNA, 98 bp, Homo sapiens
gaagaaattagagaagcattccgtgtgtttgataagacgaggacctattaaacttggaatggctaaaatcacgcaagtcgactttcctcctcgagaaa

SEQ ID NO: 816753 - DNA, 98 bp, Homo sapiens
tgatactatctatgaaggagaattttcagatgactggactcttagtggaaaggagcttctaagtaggacatccttagaaactcagaagttggatctga

SEQ ID NO: 816754 - DNA, 99 bp, Homo sapiens
gctccttacccaagtacatatcctgtaagaccagaattgcaaggccagttagagatgtttatgattacttccgagctgtcctgcagcgtgatgaaagaa

SEQ ID NO: 816755 - DNA, 98 bp, Homo sapiens
agcaggcagagggcttctacaacagcttcctggagcagctgcgtaaaacatacaggccggagcttatcaaagttgtcacaggtagtactgatggaatt

SEQ ID NO: 816756 - DNA, 100 bp, Homo sapiens
tttaactttctatttgcctaaattcttcattgttggactattgtggttggcttctgttacgctaggaatatggcaaacatacattccaccgttgatctgg

SEQ ID NO: 816757 - DNA, 98 bp, Homo sapiens
gaacggaagtgaggatcacctacaggtttaccgacaagactgtgaaactttcgggatggtggtgaaaatgctgattgaaaaagatccttcattagaaa

SEQ ID NO: 816758 - DNA, 98 bp, Homo sapiens
gcccccagaaaggattgtgacatatcgttggacccagaattgaggtaaaataccatgaagattttgaaaaaacaaaggggagaggctttactcccgtc

SEQ ID NO: 816759 - DNA, 100 bp, Homo sapiens
gatgaagctgctgctgggcatcgccttgctggcctacgtcgcctagagctattgcttaccttttcccaagtggtttgtttgagaaacgagccaggccagt

SEQ ID NO: 816760 - DNA, 99 bp, Homo sapiens
ttctgccctgggtcaagtgtacaaccgtcttcagatctcgtgcctccattgctcttatggacaaagaaggattgacagccctcagctgggcttgtttga

SEQ ID NO: 816761 - DNA, 100 bp, Homo sapiens
acgagcacctcctcgaagtcatcccagttctgaagatgatgagaaactgaaaaagaggaaggagcgatttgggattgtcacaagttcagctggaactgga

SEQ ID NO: 816762 - DNA, 99 bp, Homo sapiens
ccaagaccacgcttagcggtggcttcttcgttgctgtaattgaacgggtcgagatgccgacgtgtcgagcttggcaagcccacccacttcacagtaaat

SEQ ID NO: 816763 - DNA, 100 bp, Homo sapiens
ttctgggaaagaccgagtgaagaaaggtggatcctacatgtgccataggtcttccgtgtgtgctaagatcgtgcagctcctggggcagaatgaggtggac

SEQ ID NO: 816764 - DNA, 100 bp, Homo sapiens
tttttgtcacttcatcgtttgactggacagtaaagctttggacaactaaggtcagtcttcactgtttccaatggaagatggattcttggatgatggccgt

SEQ ID NO: 816765 - DNA, 98 bp, Homo sapiens
cctatcctccttcaggaccaacgaggagcaactgaagtcacatgaaagtaagctgaagcagatcaccaccgagctggccgagcaccgctcatatcccc

SEQ ID NO: 816766 - DNA, 100 bp, Homo sapiens
caggtccgaaaacttaatctacacctacgataaggtattgttgcagcatctggcagtgagactgaggatgaggacagcatggacattcccttggaccttt

SEQ ID NO: 816767 - DNA, 100 bp, Homo sapiens
ccggggaaagccgtggccccgagggcggatccgaggtttaactatagatcaacacatcatcttgcatctcatgggttctatgaatttttaaattggtttg

SEQ ID NO: 816768 - DNA, 99 bp, Homo sapiens
gcatgcagaacagatatgtacaaagtgtcaccaggagactaaagtccatcaaaaacatccagaaaattaccaagtctatgaaaatggtagcggcagcaa

SEQ ID NO: 816769 - DNA, 99 bp, Homo sapiens
gaggtcctccatgcgcagtcatgagtcgcttcaagtttatcgtggaagatagatgataagcctgtaaaaattgacaagtgggatggatcagctgtgaaa

SEQ ID NO: 816770 - DNA, 100 bp, Homo sapiens
tatcaatgagatagaaatactgcctttgaaaggctatttcccttctaattggcccactaacagttgctacgatttctgcaaacggagacaaagaaattgg

SEQ ID NO: 816771 - DNA, 100 bp, Homo sapiens
gcagtcctcgcatctcagcctcccaaggagctgggacctcagttgcaattcagtgcttggagacagtttttaagatcagcccagaagatacacacctagc

SEQ ID NO: 816772 - DNA, 100 bp, Homo sapiens
gcaaaggtgctaatccagtggaaatcaggagaggaaacagagcaaatgcagcgttacaatcaaagacttattgaggaattgaaaaacagacagactcaag

SEQ ID NO: 816773 - DNA, 100 bp, Homo sapiens
caggcccccagatcgcgatttcccagcagacttttttgaaagggatgcaaaagatgctgttgatttgatgaaggctggtgtacagggagcaacaccggag

SEQ ID NO: 816774 - DNA, 99 bp, Homo sapiens
ggcgaaatgctctacaccaagcgatttggggtacttcggtccttggtggaagcatctagctcaggtgtgtcggtactgagcctgtgtgagaaaggtgat

SEQ ID NO: 816775 - DNA, 100 bp, Homo sapiens
aattccgaagcaatcttcctgctaaggccattggacacagaatccgagtgattgtcactgctgttccaagggcacacgcagagggatttggaattcctgg

SEQ ID NO: 816776 - DNA, 100 bp, Homo sapiens
ccggagacttttggggggaaactaggtcgatggtcggcggcgcccggatgggcagctgagtacttggaccatgagactgtttcagccactttcatcgaca

SEQ ID NO: 816777 - DNA, 98 bp, Homo sapiens
aacagtcgccgaggcgattcccgcccagtgcacgatctgattttctggagagatgtgaagaagactgggtttgtctttggcaccacgctgatcatgct

SEQ ID NO: 816778 - DNA, 100 bp, Homo sapiens
gtcatcacaaaagagttgattgaaattatctctggtgctgcagctctaatgtctactagagtccttttagccactctttccatccctattactcctgagc

SEQ ID NO: 816779 - DNA, 100 bp, Homo sapiens
agtcccatgtgatccgattacccactggagcccagcaacactcaatcctcctcctactgaaccggtttcatgtggacagcgtccagaggaccagaggtta

SEQ ID NO: 816780 - DNA, 98 bp, Homo sapiens
gttcagcgactgcagctcagccaaggccaggggagacctgggtgccttcagcagaggctccgcgcatgggcaccttcatcggcgtctacctgccgtgc

SEQ ID NO: 816781 - DNA, 98 bp, Homo sapiens
aggcatctggacaccacacacatcatcagtctgtgcatattgggtacttccagaagtatgaattcagtgatgcaaaggacaggcgggctgcagcagca

SEQ ID NO: 816782 - DNA, 98 bp, Homo sapiens
ttaacacagtagcagctggaaccatgacaggcatgttgtataaatgtacaggtaaaaaagctccagttttatttaataaagaaatgattgagtcaatg

SEQ ID NO: 816783 - DNA, 100 bp, Homo sapiens
ctagctcgggaccgcttcagtttttattgaaaccagacaacggcagcccttggattatctactatctagatccatctgttctgtccggcgtttcctgttt

SEQ ID NO: 816784 - DNA, 98 bp, Homo sapiens
caccgggagatccgtagctcagacgccaggacatcccggaagctgggaaatggtgaccagcgccatgtccagccaggtggtgggcattgagcctctct

SEQ ID NO: 816785 - DNA, 50 bp, Homo sapiens
tcaatgtcatccagagcccagagcaggcagtgacatcagtgtctggccca

SEQ ID NO: 816786 - DNA, 98 bp, Homo sapiens
ttcttacaacgggcattgtcgtgtcagcttttggactccctattgtatttgccagagcacatctgatacttgagcgttctctaaagctgctatttgaa

SEQ ID NO: 816787 - DNA, 99 bp, Homo sapiens
aggggcgtgtgcatctctcccgaggccatcgttactgcggacggagctggttgcaatgaatgtgtatgagttatcatcagctgccggattaccttgtga

SEQ ID NO: 816788 - DNA, 98 bp, Homo sapiens
gaagacctccgaaggaccatagcagtctgagctatcagctgaagaaagtccagaaaaattaggaacctcccagctacatcgccggaaagtcatttcct

SEQ ID NO: 816789 - DNA, 101 bp, Homo sapiens
ggccacccgtgcagatgaggacggagacacgcgacagctggccaagctggccatcatcttcagccacatgcacgcagagctgcacgcactcttccccgggg

SEQ ID NO: 816790 - DNA, 99 bp, Homo sapiens
gggccgtgaacgaaagcagtgacggaggagcttgtaccaccgccatgaagctcatgactgctctggtgaatgttgccttaaacctcagtattcatcagg

SEQ ID NO: 816791 - DNA, 100 bp, Homo sapiens
gcatggtctccagatcattctcatgctgaaaagagccctggtcccattgtctctcgaactcggagctgggactcttccagtcctgttgaccgtcctgagc

SEQ ID NO: 816792 - DNA, 100 bp, Homo sapiens
caacattcaaagatcctcgcaatgggaagtcatctgtctataatgatccagccttttatgaagaatgcaaaatggaatacctgaaggaaagggaagaatt

SEQ ID NO: 816793 - DNA, 99 bp, Homo sapiens
cggcttccagatcaacctcaacccgctcaaggagccactcggcttcatcaaggtcctcgagtgggaatatgtttatccagaagccagagacagacaata

SEQ ID NO: 816794 - DNA, 98 bp, Homo sapiens
aacctcagcactctggaagacctgaacaccagatggaagcttctgcaggtttcttgagtacaggcgatcaggctgcaaaggggaactatggactcctt

SEQ ID NO: 816795 - DNA, 98 bp, Homo sapiens
acagatgaacgaagttatggcagagttagctaaagaactccctcaagtttcatttgtgaagactcaatgatgaggcacggcggctcattgctgatttg

SEQ ID NO: 816796 - DNA, 100 bp, Homo sapiens
tcacaatgagcccggctttgaacagaatatactgatgataatgctctgattcctaagaattcttctgtaattgttagaagaattcctattggaggtgtta

SEQ ID NO: 816797 - DNA, 98 bp, Homo sapiens
cgagtttccgatttaaagctgagctgcgaggaaaatggcggcgggaggaacctcggagagctgatagatcggtttgtggctgatttcaaagcccaggg

SEQ ID NO: 816798 - DNA, 100 bp, Homo sapiens
gcatccgcttcctggacaatcggacagggaagatggagagttggaagaaggtgaattggaagatgatggggcagaggagacccaggatacctccggaggg

SEQ ID NO: 816799 - DNA, 100 bp, Homo sapiens
atggaattgaagaggaagatgatgatgatgatgaaattgatgatgatgatacaatttctgactggaatctaagtgatgttggaccaaatggacaacctgg

SEQ ID NO: 816800 - DNA, 100 bp, Homo sapiens
aagtccaggaagctcgatcaaatgcccgcctaaagcagctctcatttgcagcctatgaaagagacaaccagcaccaagatgaagcagaaggagatccagg

SEQ ID NO: 816801 - DNA, 100 bp, Homo sapiens
aaagaaacttcctcagtaaagccctccatcttccaagaagagcgatggttctgggacatatactaagttgcagaatacccaggtgagggtcatgtctgag

SEQ ID NO: 816802 - DNA, 99 bp, Homo sapiens
tacccttggggcatctgatcctaattcccttgctgatgatattgaaaccgaagctgaaagactggcatcctcctgggggctttattctgggattatggg

SEQ ID NO: 816803 - DNA, 100 bp, Homo sapiens
ttcaatgcccagtccccagctcgccagcgctctgccaaggctgagaatgacaaacatctaagtgtagggcctggccaggggccagggtctgcagtggatg

SEQ ID NO: 816804 - DNA, 98 bp, Homo sapiens
ctggccgaggcgaagcggcaggcctccgaggacgccctgacggtcatcaaccagcaggaggactccagcgagtgtaaccagctctttgagctcctgca

SEQ ID NO: 816805 - DNA, 100 bp, Homo sapiens
cctacaactacctgcagcgggcctacatcaaggttggaatcgggaggtagtaatcctacaaccagtgattcttacggtgaccgggcttcagcaagagccc

SEQ ID NO: 816806 - DNA, 100 bp, Homo sapiens
gtattttgctgatcggctgtatgactccatgaaggacacagcattgttggttttgccatgtactattttacctatgacccgtggattggcaagttattgt

SEQ ID NO: 816807 - DNA, 99 bp, Homo sapiens
gggaacccacgaccattatatgctggaatggttccttctgacagcagccatggcgagcggcagtggagacagcgtcacccgtcggagcgtggcatcaca

SEQ ID NO: 816808 - DNA, 98 bp, Homo sapiens
ctaccctgagaatgggtggactcccggagaggattcctaccgagagtggatacaggtttggcaaacatcgaaaagatgacaagattgagaaaacgggt

SEQ ID NO: 816809 - DNA, 100 bp, Homo sapiens
caacagtgacgaagagaactgtctcctggtgaccgagcacccgcctccgggcatcttcaactatatggaatgtgcagatgtcccactattaactccaagc

SEQ ID NO: 816810 - DNA, 100 bp, Homo sapiens
caaaattatcgccaagattcagcaaggtttgactgccgatgtggaaatttgttttgtggacttcaccgttactctgacaagcacaactgtccgtatgatt

SEQ ID NO: 816811 - DNA, 98 bp, Homo sapiens
cccacctgccgcccttcttcgattgaaaaggaagatcaggccaaccccaaagaagaagtgaccaaggaggagtttaaactgaatgaacaacctcggct

SEQ ID NO: 816812 - DNA, 99 bp, Homo sapiens
aacaccttcaggaaaactcgtgtccatcaaaatccagatgctggatgacacccaggaggcatttgaagttccagcctcccagtagcattggatgcagga

SEQ ID NO: 816813 - DNA, 99 bp, Homo sapiens
cctaccccagtgaagaagccaaagaggagctggccaagaaatgcagcatcacagtgtcacagaatataaaaaggcttctgcagaaccccaaagtgacag

SEQ ID NO: 816814 - DNA, 98 bp, Homo sapiens
aatcaactttatcaaatttgatacagtggatgatgctggcaaaatagaacatgatggttccactggagtgaccatcgatgcagaatcagaaatggatc

SEQ ID NO: 816815 - DNA, 100 bp, Homo sapiens
gcgcagcgggggtggcgctgggagcaacgggagtgtcctggacccagctgagcgggcggtcattcgcatcgcagagctgccatcagtcatgctcttaaac

SEQ ID NO: 816816 - DNA, 100 bp, Homo sapiens
ccggaggctgggagccgcggcggcctggggctgaccccgcactacatctacccaccagccatcgtgcagcccagcgtggtgatcccagccgcccctgtcc

SEQ ID NO: 816817 - DNA, 98 bp, Homo sapiens
tgctcttcgcccagcagatctgcgagattatgtttgagaccttcaacaccccggccatgtacgtggccatccaggccgtgctgtccctctacgcctct

SEQ ID NO: 816818 - DNA, 100 bp, Homo sapiens
taaaagaggagcagcatggcatttcagtcactggtttgcagagtccagcctttgaagtaaattttatggatgatgtaggtcagactctattaaactgggc

SEQ ID NO: 816819 - DNA, 100 bp, Homo sapiens
taccctccatctctagattgaagtgttggggtgttgttttatcaaggaagctgatttctatattcagatgaagttcaaattggtccagaaacagttatga

SEQ ID NO: 816820 - DNA, 100 bp, Homo sapiens
tggggccttaaagccccttcgtctccccagcacccactctctgggggcaggtgggcccggtgacaggcccaaacctgcaccactgactgctgaaatacag

SEQ ID NO: 816821 - DNA, 98 bp, Homo sapiens
tgcacaaacccactggacaccttcgtcccctttgatccctgtgtgctgaagagttttacagctcccagcacagtaggaaagagaaatttgagtcctag

SEQ ID NO: 816822 - DNA, 100 bp, Homo sapiens
aagacaagaacctggtccatgttgcccatgaccttatccagaaactctctcctgctcttgcagccaatgccggaacaggatttgctgttgctgagcctca

SEQ ID NO: 816823 - DNA, 98 bp, Homo sapiens
tcatgagctccagcagaccataagggataacctttaccgccatgctgtgccttaaattgcaggtgctgcagtgtctgaaatttccgggcctttctcaa

SEQ ID NO: 816824 - DNA, 98 bp, Homo sapiens
aaaattagccagcgttctcttttcccatcatagagtgactgttttgcagaaaatatttacaccagcagctccagttcataccaataaagaagatcctg

SEQ ID NO: 816825 - DNA, 100 bp, Homo sapiens
taatctattgggagatatttatgagatgtacagacctcttcccaggaacaggaaatatagtggtcattatgattagctatccaaaaggaagagaaatttt

SEQ ID NO: 816826 - DNA, 100 bp, Homo sapiens
agtcccgaaggaggactcagctcaaggcttccagaaggaagaggaacacaggtgtcatcacctgactgaggtcaaggtcagcatctcctcgacgatcaag

SEQ ID NO: 816827 - DNA, 100 bp, Homo sapiens
aggtcggagactttgccatcttggtccagtctggctgcagcaaaaagcagtcgtgagatggagaataaagaaactctcaaagggttgcacaagatggatg

SEQ ID NO: 816828 - DNA, 98 bp, Homo sapiens
gactcagaaaattttggaaagagaagatgctcggctgatgctgtctgtggaagcccgtaaagagatgactagaaaggctattaagacagtcaaacatt

SEQ ID NO: 816829 - DNA, 100 bp, Homo sapiens
gactcccctaaaggccagaaaggctcaaactgctttttctgcaaaccctgccaatccagcaattttgtcagaagcttctgctcctatccctcacgatgga

SEQ ID NO: 816830 - DNA, 125 bp, Homo sapiens
gaaaataatccagagatttccacagaaggactgggatgatacaccttttccacagggaattgagttgattctggaacttttcaaagcctgactctcttcttgaaacagtggagcatcatacagag

SEQ ID NO: 816831 - DNA, 100 bp, Homo sapiens
ctacacattactgggatgtgatgaactatcttcgattcgggaactggagcctctcctctgtcacagtgacaatccatctcagctcatctggacatcatct

SEQ ID NO: 816832 - DNA, 100 bp, Homo sapiens
gggagctcttggcaaaacaccagatggttacagaatgtctgaaggggacagtgtgggagaatccgtccatgggaaaccttcggtggtgtacagatttttc

SEQ ID NO: 816833 - DNA, 99 bp, Homo sapiens
gcaacctcagccagttatcttctggagaagacaagtggctgcttcgaaagaaggcccaggttcaatttgaaattagcataacttcaaataagtgtccaa

SEQ ID NO: 816834 - DNA, 100 bp, Homo sapiens
gggaagaaaaaggaccccaatgctcctaaaaggccaccatctgtgacttcctccgcggagccacagtccatagaatcctcggccagcaggtcccctatgc

SEQ ID NO: 816835 - DNA, 100 bp, Homo sapiens
gatgggggcgagggcgaagacgagatccagttcctgcgaactttcacctgtggcagatgatatcatccagcccgctgcccccgcagacctggaaagccca

SEQ ID NO: 816836 - DNA, 100 bp, Homo sapiens
cgaatcggtggccatgatctctagggttaatgcgagatgatacaatatacgaggatgaagatgtaaaagaagccataagaagacttcctgagaaccttta

SEQ ID NO: 816837 - DNA, 100 bp, Homo sapiens
tgcgatcccgggtcatctccagatgctagggttatggtgtaatgttcaagctcagaaatgccttatgtggatcgtcagaatcgcatttgtggttttctag

SEQ ID NO: 816838 - DNA, 119 bp, Homo sapiens
tagagctactttgtggattaactcagagtgaaaatcctgctttacgagtgaatggaatttgggctttaatggaattacatgaatgacagtcttcgaaccaatgtgtttgttcgatttca

SEQ ID NO: 816839 - DNA, 98 bp, Homo sapiens
tgtgtccttttcatttgcaaccagtgcctgagtctgccatgtgaatctggaggggcagccgttctactccaagaaggacagacccctgtgcaagaagc

SEQ ID NO: 816840 - DNA, 100 bp, Homo sapiens
agacggcagccgctgtacagattcatcaccacgaatcaggaaacccaggcccaacggcaggtggatgcaagaagaaatgttccccaaaacgacccagtga

SEQ ID NO: 816841 - DNA, 98 bp, Homo sapiens
ctcatttgactgatggattttaaaacctttgggattatatgagatcttttagagaaatctcgggttgttaaacagccaagaggtgaaagaaacttcca

SEQ ID NO: 816842 - DNA, 100 bp, Homo sapiens
cactttccccggagctgggccgcgaacacctcactattgatggtgtagcgctttaggggaaggaatagccaggccagaagaaggaaggcctgtggtgagt

SEQ ID NO: 816843 - DNA, 98 bp, Homo sapiens
cggggagcgcccccggcgcgatgcccttcaggaaagaacccttaggagaaatcttgagagtggacagcaattgtgaagatcgccagagagttctgtgt

SEQ ID NO: 816844 - DNA, 100 bp, Homo sapiens
cggtccagggaaggaagcaaagcaaatggagaatggcatgctggtgacggacagtgcagggaagcaactgcagagggcccagtcctatgcggagagactg

SEQ ID NO: 816845 - DNA, 100 bp, Homo sapiens
gacgaccccgaactccaggacagcatccaggcctcattggacagcattcgaggacctgaaggagaagaaggagaaggtggaggagaaggcaagccggaaa

SEQ ID NO: 816846 - DNA, 99 bp, Homo sapiens
tgaaaggtttctatagaagtaaatatactaccccttctggagaggtgcgctatgctgctgtaacacagtttgaggtggaaaaggtttataagaatgggt

SEQ ID NO: 816847 - DNA, 100 bp, Homo sapiens
gcggcgtggtcagagcgagcttcggagaagcagtggtgggttccatgtgatggtggagtaggaggcaggtctccgcggtggatccataaagaacccagcc

SEQ ID NO: 816848 - DNA, 100 bp, Homo sapiens
aagaaactgcaccggaaatgtgcctaccaggatatcaatgcttacaattgtgaagagcccacagaaaagttaccttttcccatcatcgatgataggaatc

SEQ ID NO: 816849 - DNA, 99 bp, Homo sapiens
gggtgtccatggatgaagcaccgaacaaactggagcccgcaagctcaatctgaaattgaagtgtctgtctctgcaaggaatatcagaaggctactaagt

SEQ ID NO: 816850 - DNA, 98 bp, Homo sapiens
cggagttggcgtcccttctccctctccgagtgctgctcctgtcattgtggccatggacgattaataaagaactcttcagaattcctggtgtttcatca

SEQ ID NO: 816851 - DNA, 100 bp, Homo sapiens
ctgaaactggaggatatcgggaggaaaggataaccttctgttcggtgatgaaattatcactaatggttttcattcctgtgaaagtgatgaggaggataga

SEQ ID NO: 816852 - DNA, 100 bp, Homo sapiens
aaaacctctcaccccgtcgttgcctccacttggcccgtccatagagccagttgagccccatatgggggttggcaggcagcagagaggcccctttcaaggt

SEQ ID NO: 816853 - DNA, 100 bp, Homo sapiens
gctctttgccgtgacaacaccgttcccccagccgggctggtcctagtccggcgacttcctaatggcacagaactccgaggccgcatcgtggagaccgagg

SEQ ID NO: 816854 - DNA, 98 bp, Homo sapiens
tactacagtttacagtctgactactggaagaagaaattgcttcagagaattcagattgcatctttccttcagctcctgatgttaaggcctgagcgtca

SEQ ID NO: 816855 - DNA, 101 bp, Homo sapiens
cttgagtagcaggggcctggtccccacagcccacaggatggaccaaagggggcagggcttgctctcaattttgcgcaagttgaaaagtgcaccagaccagg

SEQ ID NO: 816856 - DNA, 100 bp, Homo sapiens
cagctgtatccactgcagagcacacctggccaatcatgacgagctcatctccaaggctatgttttccaccaatcgtgggactgttggaggcttcttcctg

SEQ ID NO: 816857 - DNA, 99 bp, Homo sapiens
tgaatgcaaaaccttgaggcagaaagtggagattctgaatgagctctatcagcagaaggagatggctttgcaaaactgtacccaagaattaaaccaaga

SEQ ID NO: 816858 - DNA, 51 bp, Homo sapiens
tgatgttggtttatcctgaagagttaaagggatcatggaagctgataaaga

SEQ ID NO: 816859 - DNA, 100 bp, Homo sapiens
attgagacggagctaagagatatctgcaatgatgtactggacactgccttaggaaaaccacgagaggtgtttcgacttcctacagatttgacagcatgtg

SEQ ID NO: 816860 - DNA, 99 bp, Homo sapiens
gtacttgaagatttgcataaagccaacattcgcaccgtcatggtcacagcatcagaagagctaacaattgctggaatgacctttacaacttttgatctt

SEQ ID NO: 816861 - DNA, 100 bp, Homo sapiens
catttaaccccaaaatcagtgattctacatctcaagctcatattttgaagtgtttacggtgttttaaccaaacagttgtggctactcatggtgaggaatg

SEQ ID NO: 816862 - DNA, 100 bp, Homo sapiens
cagccatgaacacaagttcccaaccttgtcagacccaagcagtagactttcaacttctcctcctcctccagcaattgcagttcccttgctggaaatgggg

SEQ ID NO: 816863 - DNA, 100 bp, Homo sapiens
tcagatttccaaagatgagcttgatgaactcaaagaggcctttgcaaaagttggctaggcagctggaagagaaagaccgagtgctaaagaagcaggatgc

SEQ ID NO: 816864 - DNA, 100 bp, Homo sapiens
agcgggcggagctgtgcgagagcctcctcacttggggtggcctttcagcagcccctgcgcgggctgtgtctgctgtgaaaaacatcaacctgccagagat

SEQ ID NO: 816865 - DNA, 98 bp, Homo sapiens
gaggagtacgagacgaggttcctgtgcaactcttcacaggacactcatgaggaccatgatacttccactgagaatacagacgagtccaaccatgaccc

SEQ ID NO: 816866 - DNA, 100 bp, Homo sapiens
atgatgtgtgatgacatcctcattgatgttaatgaatggtgctatacttgaattttctaaggtgtcattaggtccacctcattcatttaaccgagatgag

SEQ ID NO: 816867 - DNA, 100 bp, Homo sapiens
ctcagtacgccacctactattacccccagtatctgcaagccaaggctcgggttatgtatgattttgctgctgaacctggaaataatgaactgacggttaa

SEQ ID NO: 816868 - DNA, 100 bp, Homo sapiens
tccgccttcctgccccgcgtcgggccgggcgccacctcccccctgcctccctctccgctgtggacatgatccacatcgcggacaccaaggtcgccaggcg

SEQ ID NO: 816869 - DNA, 98 bp, Homo sapiens
ctggaatcaaatagtgttacggcaacaaggtagttacttttggtgacgctgtccagttcccacaatgtatcattccttatctgaaactagacatcctc

SEQ ID NO: 816870 - DNA, 98 bp, Homo sapiens
ttattggaacactttcttgccaccctcatggagttaaaatgctggaaaaatgcagtgtatttcagtggagcctccctattaaggaccttgccgtagac

SEQ ID NO: 816871 - DNA, 100 bp, Homo sapiens
caaagtctttgactccttgctgaatctgagcagaatatattaaaggaatctgtgaacctgaactagaagaaagagaatgttaccccaaggacatgcactg

SEQ ID NO: 816872 - DNA, 100 bp, Homo sapiens
ctttgggaggaggaagggacaccgagggaccaaagggcgcattatgccagtacatacaggcttctaaagccagggatggtgccagccctttcatttcaag

SEQ ID NO: 816873 - DNA, 100 bp, Homo sapiens
aggctggactatatcacagctgaaatcccccaaatacatcaagatgtttgtactggatgaagctgacgaaatgttaagccgtggattcaaggaccagatc

SEQ ID NO: 816874 - DNA, 99 bp, Homo sapiens
gaaacaagacagttctgtctgcagaagcccattatggctgtaactggagatgacacaggtttgcctgcaatgagatttcattctctacatttaaaggac

SEQ ID NO: 816875 - DNA, 99 bp, Homo sapiens
aggctgaaagaaacaaggggccagggcagagggcacctgagcggctggagagcctgttggagaaacacaaagaggttgctccttgagggcaggacagtt

SEQ ID NO: 816876 - DNA, 100 bp, Homo sapiens
ttggcaacatgttagctttgaagtggatcctaccagacttcacagagaatgcagttgtcttgacttcaggtctgtctgttctgttggcaagtaaatgcag

SEQ ID NO: 816877 - DNA, 99 bp, Homo sapiens
cagcgtcctgaagcttttgatcaccattggctgggaaggaaaaacagaatcagctgttccctgcgaaagacacggaatcgatttgaaggaacaaggtca

SEQ ID NO: 816878 - DNA, 98 bp, Homo sapiens
gggggacactgcagccggagcccgggaggggccgcgccgccaccgtctgaactaggatgtcccgacatgaaggttgcctgggcttctggttcctcttc

SEQ ID NO: 816879 - DNA, 100 bp, Homo sapiens
gctttgtgaagacttttgtcaagttcccacctgctgatggtaatcaccgtgtgtttgcagtaagttgtgagatgataaacctctcataatgaaggccccc

SEQ ID NO: 816880 - DNA, 100 bp, Homo sapiens
gacgacagtggtggccatcttcccatctcccatgatgtatgctggaccaactgaggaaaatggcattcctatgaagaaagcacgaaatgatgaatatgag

SEQ ID NO: 816881 - DNA, 98 bp, Homo sapiens
aggtccccagcttactccagggatgatgtcagaaaatgagacttcgaaagatgacctgctgttgacagactttgaaggtgccttgaagttctttaggg

SEQ ID NO: 816882 - DNA, 100 bp, Homo sapiens
aagtgacatgcatttgcgaagtattcgtacgaagttgatgcttatgtccagaaatgaagaggccactaagcatttagaactttgggacatccggaagaaa

SEQ ID NO: 816883 - DNA, 98 bp, Homo sapiens
ttaaggataggtggacaagttcatgctgtccaggctttagtgcaggaaaattgggccgatttccacctatgatgcatcatcaccaggcaccctcagat

SEQ ID NO: 816884 - DNA, 98 bp, Homo sapiens
gaggaactctagatgtgtctttactgaataaacaaggagggatgtttctaacccgagcaatgtctgatcgaatttcaaaagaatccggcaaagttttt

SEQ ID NO: 816885 - DNA, 100 bp, Homo sapiens
ggggacggattggttgttttttcctgtatgaagcggttggcaccactgaagtgaccgaatgaggagggccacacagaagagccggaagcagaggagcaag

SEQ ID NO: 816886 - DNA, 51 bp, Homo sapiens
ggacgagcagcaagtcagggagcttaaggcctctccttccgatgaaaagag

SEQ ID NO: 816887 - DNA, 100 bp, Homo sapiens
tgaaagaattccagccggtctttaaaatgaaggttcctggacatcagtcagtttttatgaatgaaccaaggctgtcagacttcaagcaagttctcttacg

SEQ ID NO: 816888 - DNA, 98 bp, Homo sapiens
tcccgcggcgggaggagcctgttcccctgagggccacccgttcatcgtgcagttcaatgatggaaatgccgccgtggtgtccatgtgggtgtgccggg

SEQ ID NO: 816889 - DNA, 99 bp, Homo sapiens
atcaccgatgccatcaagctggactcgggagtggtgaaacgcctgtacacgttggatgggaaacagttgctgcgaaaccagagatttcctgcatcctat

SEQ ID NO: 816890 - DNA, 98 bp, Homo sapiens
gaagagaagcagaattatacctagaagtctactaatggacagttagtcacccacctacatgttgagatttatcagcgatgctggttagtattcaagaa

SEQ ID NO: 816891 - DNA, 100 bp, Homo sapiens
aggaaaatttgagtgaagtcagtcaagtgaaagagactttggaaaaagaacttcagattttggaagagagagaaaatccttcaaaacggagtagaattga

SEQ ID NO: 816892 - DNA, 99 bp, Homo sapiens
tcatctctgagacccggaggaggttcgaagctgagtatgtgacagtgtttcacttcaagcccactacggtggtgacaagctgccagccgaagaatccaa

SEQ ID NO: 816893 - DNA, 98 bp, Homo sapiens
tctcctaccttcgggaatctgacaagcagatcgacctgagcacagtggacctgaagaagctccgagttaaagagctgaagaagattctggatgactgg

SEQ ID NO: 816894 - DNA, 100 bp, Homo sapiens
acgtaccacttaaggacattgtggcaatcatcctgaatgaatttagagccaaactgtccaaggctttggcaggaatctgaagatactgctctgttactac

SEQ ID NO: 816895 - DNA, 100 bp, Homo sapiens
tgacatccttctttttagagatcgttttgatggatatatcttccttgacagcaaaggtctatgttaacaatgaatgggcaaccagtgttggggaaggagg

SEQ ID NO: 816896 - DNA, 100 bp, Homo sapiens
aggctatcaagatgagttggtagatcatcgtttgacagaaagggaatgggctgatgaatggaaacatcttgaccatgagtccttcaataatgttaaacag

SEQ ID NO: 816897 - DNA, 98 bp, Homo sapiens
cggggatggacctccagatttccttactgaactctaagaaggagctgatgtggaggagcagctgagacagttcaagatgacgaccacagtagccacag

SEQ ID NO: 816898 - DNA, 101 bp, Homo sapiens
gaaggcattgctatttttgcacttcagttcacatactatttatggacagagtttcttgatataagccagctgtctttcatccatgatttgggaccaaaggg

SEQ ID NO: 816899 - DNA, 100 bp, Homo sapiens
ttgaatgtaatttttacaaaatttgatgaagtccagaaatctggaaacatgatacaatctgcaaatgtgtaaacaggaacatcgataagtagtgtaaaaa

SEQ ID NO: 816900 - DNA, 51 bp, Homo sapiens
agccctggtcggagcgagccgctgagtcagtgctgattctctcaaatagag

SEQ ID NO: 816901 - DNA, 100 bp, Homo sapiens
cgagaccactttggccgtacattctataatcaggcaattatgtcttctaaaaatattgcacagcctggtgtgtccgtttctctggtgaatccccagccat

SEQ ID NO: 816902 - DNA, 100 bp, Homo sapiens
ccatcctgggaaaaatggggaagctgtgtatcgcattaagttcaaggagagctttgctgagatgaacaggggctcgaacgagtggaagacggttgtgggc

SEQ ID NO: 816903 - DNA, 100 bp, Homo sapiens
ctccagttattacagaggagcccatggcatcatagttgtgtatgatgtgacagatcaggccaactgcattgactccacagcctcagccgaggccgtgttt

SEQ ID NO: 816904 - DNA, 100 bp, Homo sapiens
gcctctgggcatcgcagccttctacttgtcccatgaggaaatttgcgagaatccccgatttatcattgatggagccaacagaactgacatctgtcaagga

SEQ ID NO: 816905 - DNA, 100 bp, Homo sapiens
aagaagacctacaccagcatcacttgtgattctcaatgagcataaccccccaggtaagaaccttgatgctgtccatgatatcactgtggcgtatcctcac

SEQ ID NO: 816906 - DNA, 98 bp, Homo sapiens
tcacctctctggagtcttcaaactgaccaagcattgaaaaggtcccagtagggatggcacaatcagcgaggacaccatccgagcctctctcatctctg

SEQ ID NO: 816907 - DNA, 98 bp, Homo sapiens
ccttccctacatcacccccttctgtgtcaactttctgggtccagcccagaatcaaatgcaggttccatctggatatggattgcatcatcaaaactata

SEQ ID NO: 816908 - DNA, 100 bp, Homo sapiens
ccaaaaggacaagcagtttgttgccaaggttgtggtttctcgatcaggaccatcaacccctcatgtgaattttctcctggactcccatccagtgtctcca

SEQ ID NO: 816909 - DNA, 100 bp, Homo sapiens
cagcactttgtggagaaagtcgtcttccacttgcacgaaagctttcctaggccaaaaagagatgtttgagacggaggcagatgagaagagggagatggcc

SEQ ID NO: 816910 - DNA, 100 bp, Homo sapiens
ttactctcctggtccaaggacacctacagccccgacgaacatttctgggtgacactcaacaggattcccggaaacttggatttaactggccagaagcagg

SEQ ID NO: 816911 - DNA, 98 bp, Homo sapiens
tcagcttcactcagaagatctaggtctggttctataaaaggatcgaggtatttccagaagatgagaatgtgcctactgctcctgatcctccaagtcaa

SEQ ID NO: 816912 - DNA, 100 bp, Homo sapiens
ctctgtcagtactatattggaaaaacctcaaaatatgatggtggttggacagtcagcatttgcagactttgctgttggagccagcagacctgactggaga

SEQ ID NO: 816913 - DNA, 99 bp, Homo sapiens
ttcatcgtgatttaaaagctgaaaatttacttctggatgccaatctgaatatcaaaatagcaggtgctggagaatctggtaaaagcaccattgtgaagc

SEQ ID NO: 816914 - DNA, 98 bp, Homo sapiens
aaccccagccgaccttgagctccaggagttcgtctcttacgtctgcggaagtgcagctgcctcagttcttagcgcagataatgagtgtgtatatggca

SEQ ID NO: 816915 - DNA, 100 bp, Homo sapiens
catttttatggacaacgaccacaggaatctggaattttattaaacatggtggccaaggtggaatacgtcaggaagaagccaaaattaaaagaagtccagg

SEQ ID NO: 816916 - DNA, 100 bp, Homo sapiens
tggccgcggaaaccgatctgcccgttgtgtttgtgaaacagagaaagataggcggccatggtccaaccttgaagcttccacagcgcggcacctgtacctc

SEQ ID NO: 816917 - DNA, 133 bp, Homo sapiens
ccgtaaacaggaggatctgggagcaaattgcctctcctggtgcatgaggcacacatttgcatcatcaagcacacagcaagaaggaggccatcagcaaactgggaagaggaccctcaccaggaaccacatctgc

SEQ ID NO: 816918 - DNA, 100 bp, Homo sapiens
tttgatcaccattggctgggaaggaaaaacagaatcagctgttccctgcgaaaggcattatattgtacttctagcaagtgcaccaacagaaaaacaacgc

SEQ ID NO: 816919 - DNA, 125 bp, Homo sapiens
aagctcttcagcccctgcagcccgagccgccccccgagcccgccttctccgaggcgcagaagtggattgaggtatcttgcaatatattcagaactctccctcctagtgacagcaatgaatttgat

SEQ ID NO: 816920 - DNA, 118 bp, Homo sapiens
aaaactggagagcttcatcaaaaatagtgatagctttgataaggtctcactctgtcacctgagctagagtgcagtggtgcgatcacagcttactgcagcattgaactcctgggctcaa

SEQ ID NO: 816921 - DNA, 101 bp, Homo sapiens
ctaaaggagcagaggaaatggagacggtcatccctgtagatgtcatgaggcgagctggggtcccagcgactccagtttgatgtctcttcccccaatggcat

SEQ ID NO: 816922 - DNA, 100 bp, Homo sapiens
caccaccagcgatggcagacagaccacatataccacgaggatccatctcgtctgctccaggggcaggctggtttctaagcatgaattgaggaacagaaga

SEQ ID NO: 816923 - DNA, 100 bp, Homo sapiens
ggagtttacctacaaccccttcatgagagtgagtgatgcagtttggcaaagggaagtcgtgttgctaccggtttctgaccaaaggtcagcagtggatctg

SEQ ID NO: 816924 - DNA, 99 bp, Homo sapiens
ggaacccttcgctggcgggagcgcggttcggggccgcagagcatttaaatcaaacggtattgagatggattgggttatgaaacataatggtccaaatga

SEQ ID NO: 816925 - DNA, 100 bp, Homo sapiens
cagatggttcccagcctcatttagtgaacatccaattcaggaattgtgagcatatcagcatcaagtaccactggtgtggcaatgcacacttcaacctctt

SEQ ID NO: 816926 - DNA, 100 bp, Homo sapiens
aagtgcaacgtctgtgtgcatcagtgtcatcatgacaggctcctacaacaacttcttcaggatgttcgacagaaacaccaagcgtgatgtgacccttgag

SEQ ID NO: 816927 - DNA, 100 bp, Homo sapiens
ccacctcagtcaggccacggtggaagacgcgtgccgcggcgcctggttgcctgcagcggcccggacccgagagggaatacagtgagtaacctgatcatga

SEQ ID NO: 816928 - DNA, 98 bp, Homo sapiens
ttccattgaacttcccagcactcgaaagggaccgaaatggagagcaaagttggctcttcgaaatgaggaggcagaaaatgaaaacagcaaattaagaa

SEQ ID NO: 816929 - DNA, 100 bp, Homo sapiens
ctcagctcgccaggcggcgcagggaagatgagaatgtgcctactgctcctgatcctccaagtcaacatttacgtgggcatgggacaggcttttgctttga

SEQ ID NO: 816930 - DNA, 101 bp, Homo sapiens
gcgtggaccaacttatggaactggccgggctgagctgtgctacagccatcgccaagaagatctaaagcagtccacagtagctggcaagcaccccccagttt

SEQ ID NO: 816931 - DNA, 98 bp, Homo sapiens
ggaagtgagctcgctcacttgtgatgccctgactgagctgctggctaagatcaccaacacagacgtgaactaaaattccagatggcaaactcaatgaa

SEQ ID NO: 816932 - DNA, 100 bp, Homo sapiens
atgggcaatattgtggatattggccccgacagcttaacaattgaacccttgaatcagaaaggcaagctccataatgggagaagtaaagaacaaagactta

SEQ ID NO: 816933 - DNA, 98 bp, Homo sapiens
ataaaggggtccaccctcacatcgtggagatggacaggagacctggaatcattgttgggccggtgcataaacttctcccgagttccatctcagtaaaa

SEQ ID NO: 816934 - DNA, 98 bp, Homo sapiens
aaaattaaagaagatgatgctccaagaacaatagcttgccctcataaacgctggataaaacaagccttagaagaagggatgactcaaacatcatctgt

SEQ ID NO: 816935 - DNA, 100 bp, Homo sapiens
acaaatgttcttaatggcatctagaatggataccatggccaagcggaatacagtgataggaacaccattttggatggctccagaagtgattcaggaaatt

SEQ ID NO: 816936 - DNA, 99 bp, Homo sapiens
cgagcacgccggccccgcgcgcgcctcgaggccgagtcaaggaatgggaaaaggacagcacaggatgccctccaaggatgagctggtccagagatacaa

SEQ ID NO: 816937 - DNA, 99 bp, Homo sapiens
ccgaaccggtgcagttcaaggactgcgttactaaaccaaggagatttaactgaaagacggacatgagcgtgggtgctgactcctggaagagcaactcta

SEQ ID NO: 816938 - DNA, 100 bp, Homo sapiens
cttcaaccaggattgtcttttcttaacctgggaagtggaaccggatatttaagtacaatggtgggcttaattttagattgcagagggaatggcatacatc

SEQ ID NO: 816939 - DNA, 100 bp, Homo sapiens
ccagaacatctgggagaatatttaatggaaaatcgcttggttaaaacctgacacttttaacagtgggaccctgaagatgtgaacctcgaaggcagcaaag

SEQ ID NO: 816940 - DNA, 100 bp, Homo sapiens
caccccgcgggatacgcctcagcgcgttgaagcttcttgtcatgacggggatgaaacaattgaaactattgaggctgctgaggcactcctcaatatggat

SEQ ID NO: 816941 - DNA, 51 bp, Homo sapiens
acagctgctcatgaaccacttggcaaaccctggcctcccacgactacatcc

SEQ ID NO: 816942 - DNA, 98 bp, Homo sapiens
ttttaccggtacatttttgatgcggagtgtgcactggagaaacttactaccgatcatgagaaaggttgggggccgtcccgctcctaaggcaggaagat

SEQ ID NO: 816943 - DNA, 100 bp, Homo sapiens
tgaacattctgccgaagagaacaagacgtgtgaagactcaggtaaacgcaaagcactgaagttgaattttgcaaatccacctttcaaatctacagcaagg

SEQ ID NO: 816944 - DNA, 50 bp, Homo sapiens
ctgactgggagcggtggcgacgagaagacctgaagaaacacttaaattct

SEQ ID NO: 816945 - DNA, 100 bp, Homo sapiens
gaaaaatgggcccacctcagcccttcggaattttcccaacttcagaaatatgctgagtgtgtgatgaatgcagactctgctaccattttggctgtttgga

SEQ ID NO: 816946 - DNA, 100 bp, Homo sapiens
tacaaatttgatgtttcgtcagagttactagaggttcatacgttttatgaagctgtggggtacatgattggtgcacaaacagatcaaacagtacaagaac

SEQ ID NO: 816947 - DNA, 104 bp, Homo sapiens
gagccgctggctgcggcagcaggggactagcgtgagaggcaagaaataccgcccacgaatggatcaggaagtctctgaccaagccattagcagagaatgaagaa

SEQ ID NO: 816948 - DNA, 100 bp, Homo sapiens
gaaaaagtgaagaaaacaactcaggtcaaagactacagctttgtcactgaaggaactcctgagtttatggctccagagatgtatgaagaacactatgatg

SEQ ID NO: 816949 - DNA, 100 bp, Homo sapiens
cagaaagattccgaaggggacacaccttcacttatcaactggccttccagcacctgttcttcccggagcctatcagcaaagccattcccaaggctatggc

SEQ ID NO: 816950 - DNA, 98 bp, Homo sapiens
taaggaccctaacaagctggtgttatgtgaagttttcaagtacaatcgaaggcctgcagatcctgagagtgagaagcctgactgaccccgcctagacg

SEQ ID NO: 816951 - DNA, 100 bp, Homo sapiens
gatgaggtggccatcactgagcaggatttggaacttattaaagaaagagaaacggcaattcggcagctggaggtggaacatcctcagagatctaaaaagg

SEQ ID NO: 816952 - DNA, 100 bp, Homo sapiens
tccattacactgctgagtcacacacaacgcttgttatgttttcatcacttctctccagaagatttgtgaagctgggaatcatttcatcaatgtaatgttg

SEQ ID NO: 816953 - DNA, 100 bp, Homo sapiens
aagacagagcgggtgactggaggtggctccccaggaatgggtaccacagaccatgtcatcgtcctggcgtccacgaaccgagctgacattttggacggtg

SEQ ID NO: 816954 - DNA, 98 bp, Homo sapiens
tggactggacagatcattgttactgaagaggaaccttcagagaatggatcttggagaatgtctgaaagtccatgacctggctttaagagcggattatg

SEQ ID NO: 816955 - DNA, 100 bp, Homo sapiens
gtagcataagagctgaaacttcagagcaagttttcattgggcaaaatgggatcaagactggcgccccctgccgctcggagcgtctggccaaatacaacca

SEQ ID NO: 816956 - DNA, 100 bp, Homo sapiens
tgaccgtgtcttacatcagttcagagagggtctccaactgaattccttgaagagaaaatggcctaccaggaatacccaaatagccagaactggccagaag

SEQ ID NO: 816957 - DNA, 100 bp, Homo sapiens
gatctcttgaattgttccttcaagtgtagctatgttgtaactaatggccttgggattgtcactgctgttccaagggcacacgcagagggatttggaattc

SEQ ID NO: 816958 - DNA, 100 bp, Homo sapiens
gggaaatatagacaagctggaacccaggagcagttgggagttttaaagaatgccagcctttttaaagagctccttaataagcatttatagtcagtttttg

SEQ ID NO: 816959 - DNA, 98 bp, Homo sapiens
ggcgccccctcccagctcccagcggtaggagatcaaatcattgaaatcaatggggaaagcacaagggacatgacacatgccagagcaatagaactcat

SEQ ID NO: 816960 - DNA, 100 bp, Homo sapiens
taccaacggcatagcaatcgcacagctgaggaggtatacgacatccctccctcatcagcaaaaggccctgtgttttcagttccagtgggagagataaaac

SEQ ID NO: 816961 - DNA, 100 bp, Homo sapiens
tgtgacaccatcttcatccagcacaacggactcatcaagattggctctgagttcaaggcagccttcgacatcttcgtgctgggcgctgaggatggctgca

SEQ ID NO: 816962 - DNA, 100 bp, Homo sapiens
aaacctcagacagatcgccggggaggcagcgcgggatcccagcctcaggcgtgcgcggacggtgtgcggagtttgccagatccggcccggtgcctgggtt

SEQ ID NO: 816963 - DNA, 100 bp, Homo sapiens
ctgcccaatttgccaagcagacaggccagtggatcggaatggtggagaacttcaaccaggcactcaagtctctcagcaaacctgctgggcgacagcggac

SEQ ID NO: 816964 - DNA, 98 bp, Homo sapiens
tcgtcttccacttgcacgaaagctttcctaggccaaaaagagatgctgtctttgcatttcaactacgcaacccagtgcacaatggacatgccctgtta

SEQ ID NO: 816965 - DNA, 100 bp, Homo sapiens
ggtgacaagaacggcggtacccgggtggttaaacttcgcaaaatggtacaggtttgcagattccgccagcagcacagcaagctctacagatgagtggctc

SEQ ID NO: 816966 - DNA, 100 bp, Homo sapiens
gacacctggatcgggtctgtcatacacggaggaagcggctgttctactgctgattcctaaagaaaagcccccaatcacggttgtgggtgatgttggagga

SEQ ID NO: 816967 - DNA, 99 bp, Homo sapiens
aaggactatgggggaactgatggcgttcctgttacctctcatcattgtgttaatggtgaagcacagcgattccctgaaagagtttctagccaaagccaa

SEQ ID NO: 816968 - DNA, 101 bp, Homo sapiens
cccgcggtagtgtcagttccctggggaccaggaagggcgactcttgcctgggagtcagtgcttgggccgtcgggtccggatgtcgaactctctcaggttca

SEQ ID NO: 816969 - DNA, 100 bp, Homo sapiens
cgctgctgctgaggagaggagcgtcaacagcagcaccatggtgttcagactgcatcacagtgcttccgatacaagcgacaaaaatcgagttaaaagcaga

SEQ ID NO: 816970 - DNA, 98 bp, Homo sapiens
gaatgcagtcagtctgttgatgaaactatgtatctcgggggagctttgtgccttgatggatcaagttcatcatatgcagcactcaaaatggcagcatc

SEQ ID NO: 816971 - DNA, 100 bp, Homo sapiens
ggcatgtttccccaagcaatgaagaatctgagactgttgacttggagcaggtttgggagctggattccctggagtacctggaggcactggagtgtgtgac

SEQ ID NO: 816972 - DNA, 99 bp, Homo sapiens
acaaattatgctgcagcatattgtactggcctgctgctggcccgcaggcccctggcaaccactaatctgctttctatctatggatttgcctattctgga

SEQ ID NO: 816973 - DNA, 100 bp, Homo sapiens
agaagcgggcggcgcgggggagatgcaagagtgagccatggagctacgtgtggggaacaagtaccgcctgggacggaagatcgggagcgggtccttcgga

SEQ ID NO: 816974 - DNA, 98 bp, Homo sapiens
atcagtgcccttgtggcgaatggggctcacgtcgaaaaattatgcatgatgccattggattcagaagtacattaactggcaagaactacacaatggaa

SEQ ID NO: 816975 - DNA, 100 bp, Homo sapiens
agtgccgaaagagcactggactccggaagcatcctggtggggaagaagttttaagggaacaagctggaggtgacgctactgagaactttgaggatgtcgg

SEQ ID NO: 816976 - DNA, 100 bp, Homo sapiens
aaagcactagcaacttcaaagccgacggcctgtccggcactgctgaaggttctgggttgacaaatatcaagacggaggagatctctgaagtgaagatgga

SEQ ID NO: 816977 - DNA, 100 bp, Homo sapiens
tccagcagcgccggacccgggaagaactggtgagccaagggatcatgccgcatgctgtctttgcaggtgccatgcctacaatggcaagcatcaagctgtc

SEQ ID NO: 816978 - DNA, 100 bp, Homo sapiens
actccaccaagcatcccattacagatagaagagcttcttggacacttaatgattgttggcaagaaatgtgctgctgatctgggcctgaataagggttatc

SEQ ID NO: 816979 - DNA, 99 bp, Homo sapiens
aaggcactgctttttcatgacggactgggaggtgctggtcctagggaagctcaagtgggacctggctgctgtgattgcacatgatttcctggccttcat

SEQ ID NO: 816980 - DNA, 98 bp, Homo sapiens
aactagaaagagaagctagaatctgccgtcttttgaagcaccctaatattggcctggttgcagtatgcttgaaatctgggatgtggaagacccttcca

SEQ ID NO: 816981 - DNA, 99 bp, Homo sapiens
ctaataatgctggcaaagtggaaaaatgtgcgctcccctttgaattggagatttactacattcagcatgttatgctctacgtggtacccatctacctgc

SEQ ID NO: 816982 - DNA, 98 bp, Homo sapiens
ggctccctatctgggaaacaaaatagaaaatgctgctgaagaacctagagtcttatgtattatacaagatactactaattcaaagacagtgaatgaac

SEQ ID NO: 816983 - DNA, 98 bp, Homo sapiens
tgcgctcccggggaaggagccccacagtccccaggccgactcgcgggccgctgcacccaccgccaaggacaaaaggagcccagcgctactagctgcac

SEQ ID NO: 816984 - DNA, 100 bp, Homo sapiens
gagcacagcatcatcaaggacttcaccaagcagttgtgacccaccctgtgtcccttacctggggatgtacctcaccgacctggccttcatcgaggagggg

SEQ ID NO: 816985 - DNA, 119 bp, Homo sapiens
tttcatgagacaagctggggaagtaacgtttgcggatgcacaccgacctaaattaaatgaagggacttatcaaactggtttcaaagcacagagctcaagtaatttacaccagaaatacc

SEQ ID NO: 816986 - DNA, 100 bp, Homo sapiens
atgcagtcatgtatcctgtgtttaatgagaggcggggtttcaccatgttgcccagactggtcttgaactcctgagcttaagcaatccacctgcctcggcc

SEQ ID NO: 816987 - DNA, 99 bp, Homo sapiens
atgacgcaggtgcaggtgtctcttctcgccctggcggggaaggtttctctggaaacccccctggtaagtgtggaggaggcgggacactctgacccaaga

SEQ ID NO: 816988 - DNA, 100 bp, Homo sapiens
gactccagattatatcgccccagaggtactccaaagattcaggtttactcacgtcatccagcagagaatggaaagtcaaatttcctgaattgctatgtgt

SEQ ID NO: 816989 - DNA, 100 bp, Homo sapiens
ggcgcagcggccgcagcagcagcggcagtcacaggcacatcagcaaagagatttgggccaggcttagtcatctattggtatggatttatccaggagctgg

SEQ ID NO: 816990 - DNA, 100 bp, Homo sapiens
agcacgtaccagaggtggaagtccaagtcaaacgcagaaggactgcctcactgagcaaccaagaagtgttgttcgctgcctgtggcatccaaagctgaac

SEQ ID NO: 816991 - DNA, 98 bp, Homo sapiens
ccatgtacaagtatcggccgggttacagtagcagcagtacgtcagctgccatgccgcattcctccagcgccaaggcccctagcagtcttcttgatgct

SEQ ID NO: 816992 - DNA, 100 bp, Homo sapiens
attctttaataaatcttcctgccaattcaacaatcaaaaagaaagctgctgttatcatcatggctgtagagaatccagatgggagaaacctgatgatttc

SEQ ID NO: 816993 - DNA, 100 bp, Homo sapiens
tcagtggcatcgtggacccggccgtcatggggggcttctccaactatgaaaaggtgccgtggccagcacagaagtgaagatgaagttacaagaatttgtc

SEQ ID NO: 816994 - DNA, 100 bp, Homo sapiens
tacgccgtctccaagatgtagctaatgaccgtggttcccactgagcaagaaaggcagagaattgtgcagcaatatcatccttccaacaatggagaatatc

SEQ ID NO: 816995 - DNA, 144 bp, Homo sapiens
gaagccaccctggaaaataaatggcccttccttggggttcctttgacagtcaaggaagctttccagctacaagtcttatgatgtaatcagcgcgatttcacttcctgaatttcgatgaattctaagacatgggcaagatcgggt

SEQ ID NO: 816996 - DNA, 100 bp, Homo sapiens
ggcgggcccaaggcgtgaggcgccgcccgggtgtccccgcggcgcaggaggcggtggagcgcagagcgggcgagcgcgggcacctttcacagccagcagg

SEQ ID NO: 816997 - DNA, 99 bp, Homo sapiens
atccgtggaaaccgccaacacagacgagcctttcttatttctttactcaacctctttgatgacacagcaaaagtctttatctcttgcaaggttcagtag

SEQ ID NO: 816998 - DNA, 51 bp, Homo sapiens
atggcctacccgggatacggaggaggggaggagattgtatttcgttactac

SEQ ID NO: 816999 - DNA, 98 bp, Homo sapiens
ttccagaagatgattccaacgccaccaattccaacctggttgctatcaagatcatagataagacccagctggatgaagaaaacttgaagaagattttc

SEQ ID NO: 817000 - DNA, 100 bp, Homo sapiens
gagaaaagcaccttcatcaacatgaccagagtggattcagacatgaatgatgcttacttggaaagcgtggatacccatcaacgaagttttgatattggaa

SEQ ID NO: 817001 - DNA, 98 bp, Homo sapiens
ttccctctccctgacacggttgtgcagagggcgcggtggctcaggatatgtcgttattgatccagctcaactttatgtatatgagaaacttggacagt

SEQ ID NO: 817002 - DNA, 132 bp, Homo sapiens
ggatcaacgccgagatcgagaagcagctgcggcgggacaagcgcgacgcccggcgcgagctcaagctgctgctgctcggagatcgtcaacttcaactgccggaagctggtggcctccatgccgctgttcgcc

SEQ ID NO: 817003 - DNA, 98 bp, Homo sapiens
agagtgtgggtgatggcgttcacacaaactggtcagcgtttccctggagaggaagaggcaaggttaccagccagtcttgtctggtcaacagggattcc

SEQ ID NO: 817004 - DNA, 100 bp, Homo sapiens
gcttcttgaatttctctctgtaaaggagacacttccctctgtgaccatgaaactctgggtgtctgcattgctgatggcctggtttggtgtcctgagctgt

SEQ ID NO: 817005 - DNA, 100 bp, Homo sapiens
cttaacagatatcaccgaagccattaaactagactcaggagtcgtcaagaggctctgcaccctggatggaaagcagggttctgtgtagcctcacctagtg

SEQ ID NO: 817006 - DNA, 100 bp, Homo sapiens
ttaaagaagaaatgtgcagatcctgatttgaatgctgtcctttataccaaccgggcagcagcacagtactatctggcatgtacagaagcatattcccaat

SEQ ID NO: 817007 - DNA, 100 bp, Homo sapiens
ggcttcctggtttacctggcactcctggacaggatggattgccagggcttcctggcccgaaaggagagcctgaatttgcactacacaaattgaatgcagt

SEQ ID NO: 817008 - DNA, 100 bp, Homo sapiens
ccgggacccaggaccatgtctctgtctcgctcagaggagatgcaccggctcacggaaaatgtctataaggttatcaatactctggctgaccatcatcatc

SEQ ID NO: 817009 - DNA, 108 bp, Homo sapiens
tcttcgagatttcggcgaggagcatcccttctatgacagatctcattgcccaccagaaaggacagatagagaagcagccaccgtttgagatctacttatgctttgggg

SEQ ID NO: 817010 - DNA, 50 bp, Homo sapiens
agatgaaggagcattcctcttggagtggtcagactgaccccctgcagaag

SEQ ID NO: 817011 - DNA, 99 bp, Homo sapiens
gatgatgatagcatcttatgtagtggtctccagcctcatcagctgctggttttctcccagggttcttgaagcttttgagattaacaatggcaggaaaat

SEQ ID NO: 817012 - DNA, 100 bp, Homo sapiens
ggcctattttgtggaatattcattgtactgaatattacccttgtgcttgccgcatatgaaacactctcagatgctaatagacgaaaagagtatgatacac

SEQ ID NO: 817013 - DNA, 100 bp, Homo sapiens
agaaaatgaatgccaaatgggacacggctggacgtaaagaaagaagtgatgcactcaattctgcaatagataaaatgaccaagaagaccagggacttgcg

SEQ ID NO: 817014 - DNA, 100 bp, Homo sapiens
aggctactttgacgccctggtgaagatgggggagctggccagcgagagccagggctccaaagaactcggtactccaaagattcaggtttactcacgtcat

SEQ ID NO: 817015 - DNA, 100 bp, Homo sapiens
ggcagaacgaattcagtgatatcattaagtccagatctgtgtggaaccatcagagaatctacaatccctgatggagaagaatcagtccctggtagaggag

SEQ ID NO: 817016 - DNA, 98 bp, Homo sapiens
tcaaacctggatccttggatacaggaaaccaacagtcacacatgtacattacaggatgaccagtgtcccagtgaaggaacgagtgaaggtgtctcaga

SEQ ID NO: 817017 - DNA, 100 bp, Homo sapiens
ataatctcaaaacaaaatcaagcaaatttggagcaaagaaagttgctgaaaatgtcaaggcatgaaatccaaggtttcttgagtacaggcgatcaggctg

SEQ ID NO: 817018 - DNA, 98 bp, Homo sapiens
aaggtgctaccgctgacgacacccctggtggatggcgaggatgagagaatgcactgctgcctgcaggcctgaggcagaaggatcagaccaccaaggcg

SEQ ID NO: 817019 - DNA, 100 bp, Homo sapiens
atggttccagtttccatgaatccagggcctaacatgggacagccgcaaccaggaatgacttctatctcttgcatggcaccaagaatgttaccaattcaag

SEQ ID NO: 817020 - DNA, 100 bp, Homo sapiens
ttcaagatggaacaaagactgttgagtatgctccatgtagatcacatgaccgtccggctggaacgcggagtgtgagagctccggtgacgaaagtccatgg

SEQ ID NO: 817021 - DNA, 100 bp, Homo sapiens
gctttgtcaggaagctctggatataagtttggtgttcttgctaagattgtgaattacatgaaggtgactctgacatcattagaagcatgccagaacagac

SEQ ID NO: 817022 - DNA, 100 bp, Homo sapiens
ctggaacgggactttgcagaaatgtgtgcagactacatggcatctaccatagggttgattatggaagattcccacaagagtaccacgtcagagacagcac

SEQ ID NO: 817023 - DNA, 100 bp, Homo sapiens
ctccaaagccccgtggaaaagttaaagatgctcattttacttacaggttaactgaagtccaaaagatgtctagaacgtccagttgcggataatgagcgaa

SEQ ID NO: 817024 - DNA, 98 bp, Homo sapiens
aacgcctggatcagccacaaatgtacccccagtacacttactactatcctcattatctccaaaccaaggtcaactttgtagtgtgccaactctttgcc

SEQ ID NO: 817025 - DNA, 98 bp, Homo sapiens
atagaggaagaaaagaaggcgtttgctgaagcaaggagaaatatgacactcgcctatggggacatgaaccacgagtggatcggcaacgagtggctccc

SEQ ID NO: 817026 - DNA, 100 bp, Homo sapiens
tccatggaaccttcagcaattgaactcccagattatttgatacattcacggcatggtgtaactcccacctccggaaggcggggacacagatcgagaacat

SEQ ID NO: 817027 - DNA, 98 bp, Homo sapiens
gggaatgccaacacagaaaccttgccatcagggtacaccaggggttggaaaaaccacactaggcaaagaacttgcgtcaaaatcaggactgaaataca

SEQ ID NO: 817028 - DNA, 100 bp, Homo sapiens
attattataaagctcaaccgagttctaggcttcaaacctaagcatcggtatcaagtcccattgttgcaggtggtttgagaaacatacatgataataaagt

SEQ ID NO: 817029 - DNA, 98 bp, Homo sapiens
aggaaggattcctgagattccaggaggaagtactggcgaagtgctccatggtttgaggaactactggccaacctactaaatgaacaacatcagatagc

SEQ ID NO: 817030 - DNA, 98 bp, Homo sapiens
cacccgacgctgaacttgccactgagcccccaggggactgtgcgaactgcaggtcaaggtcagcatctcctcgacgatcaagatctatctctcttcgt

SEQ ID NO: 817031 - DNA, 100 bp, Homo sapiens
ccctcccccttctttcgatcagagatcggcggagaccctcgaagtgcgcaaacttgacactcaccctgaccgggacacagcaggtcaggagagattcaac

SEQ ID NO: 817032 - DNA, 100 bp, Homo sapiens
ggccctgcaggaaggacggacttcaggggcagggtaattaaaaccatggaggcgatcagcgaggttctccaggaccttaggtttgatgcggaatctgccg

SEQ ID NO: 817033 - DNA, 99 bp, Homo sapiens
ctactcgcccgccaccctgcgctgccgccgctctgaggagttaaaggcattctgtgaaactttagaagagacaaactaccgcttacagaaagaactact

SEQ ID NO: 817034 - DNA, 100 bp, Homo sapiens
tgggtctgtgactacaacatattgctgcaatcaggaccattgcaataaaatagaacttccaactactggtgttgacagctcttctaccacaagcagtgct

SEQ ID NO: 817035 - DNA, 100 bp, Homo sapiens
cccaaacccaaattcttcgttctgtgcggcgacctcatccacgccatgccagtgttcagactgcatcacagtgcttccgatacaagcgacaaaaatcgag

SEQ ID NO: 817036 - DNA, 100 bp, Homo sapiens
ttgactggactgtcaaactgtggaccaccaaggctggaggctcccaggtgattttcacaaatcctttagaaatcgtcaagatccgtttgcaagtggcagg

SEQ ID NO: 817037 - DNA, 100 bp, Homo sapiens
tcagagagagagcttggttaacttgggagaaagtttcatctgtggatggagtattgtctgaatcaccatcttattctcctcagcctcagccatttccaca

SEQ ID NO: 817038 - DNA, 99 bp, Homo sapiens
aagttggaacacagcagagggtgtgtaataaaatacagaagcatcagatggtgaaggagaaggagacacagaagtgatgcagcaggagacagttccagt

SEQ ID NO: 817039 - DNA, 100 bp, Homo sapiens
tgctggttcttacatgccaccatccacagtccttcagcagattgattcagtggctaatgctgatatcataaatattatctccctccaaactctaaagaag

SEQ ID NO: 817040 - DNA, 100 bp, Homo sapiens
gggtttctttgatgcgacctcaggaaggagatgagtgaatttattggattcacgcactgtcatgggggacctgggatggattgcttttccaaaaaatggg

SEQ ID NO: 817041 - DNA, 98 bp, Homo sapiens
ttcaaagggcagatgggtagaaggcataacctctgagggttaccattactattatgatcttatctcaggaggttataatcaccaacagatgagtgaag

SEQ ID NO: 817042 - DNA, 100 bp, Homo sapiens
tagcgatctatattccctttccagaagatgattccaacgccaccaattccaacctgaactttcacgatggccgtaaagcacagcagcacatcgagacttg

SEQ ID NO: 817043 - DNA, 98 bp, Homo sapiens
ctgtacaaaaagctgcattggaggcacacaagtctctgaattttgtctcaacactgctccagattactatgtcggaacagctggatttacctgtgaga

SEQ ID NO: 817044 - DNA, 99 bp, Homo sapiens
tgataagaagcacctggatgagacatttgctacagcatcccacattaagtcaacgtcaagctgcagtttcagctcaggccacatcaaatgtcaacccaa

SEQ ID NO: 817045 - DNA, 99 bp, Homo sapiens
aataagctatatactttggttacctatgtacctgttaccactttcaaaatatacaattggaccgtggatgaggtggtacagtggctgatcacatatgtg

SEQ ID NO: 817046 - DNA, 100 bp, Homo sapiens
gaagcagtgcctggtggccgaccttgtccacacagtccatgcaattaagttggaatatgcaaggttggttaagttggcccaagaagacaccccaccagaa

SEQ ID NO: 817047 - DNA, 103 bp, Homo sapiens
gcaaattccgaccctactgagccgtgagagccgcagtggatggctggaggtgcagggccaggaggaacatgaggagactgagtgccctttgcggcttgctgtc

SEQ ID NO: 817048 - DNA, 100 bp, Homo sapiens
ccggcctcccttttcatcaggacgggaagtgctggacaatattcctctcaaggtctgtctttggaggagatgaaaagaagtcttcaatacacacccattg

SEQ ID NO: 817049 - DNA, 100 bp, Homo sapiens
tgcctatccaccgtgttgcagatatatctgggaaaccaatagagccatggcgactccctctgctgccttcgaggcccttatgaatggtgtgacaagctgg

SEQ ID NO: 817050 - DNA, 100 bp, Homo sapiens
tggccatcaagtgctcgcccagcctgcacgtcgacgacagattggtttatcttggaagctaaagggcattgctcatcctgaagatcagctgaccattgac

SEQ ID NO: 817051 - DNA, 100 bp, Homo sapiens
tcaagagattctacatcagtttggtttcactcagaccgacttcgacccccaccacttctggcagtggagcagcttctcggactacgtgcagtgcgtcctg

SEQ ID NO: 817052 - DNA, 100 bp, Homo sapiens
cggagctggaatacattcccagaaagaggggcaagaaccccatgaaagctgtgggactggcctgaaggtgcttcctggaggggcctgccccactgttcct

SEQ ID NO: 817053 - DNA, 99 bp, Homo sapiens
gcagactggcgcgtccaggtggccgtgaagcacctgcacatccacactccgctgctcgacagtcccagcagaagtgcatcgtgatctttgccctggtgt

SEQ ID NO: 817054 - DNA, 100 bp, Homo sapiens
acattgtgaagagtccacaagaaaacttgagggaacccaaaagaaaacgaggcagacccccttccatagctcctactggatgtgggctctcttgatgaga

SEQ ID NO: 817055 - DNA, 100 bp, Homo sapiens
tggaaacttttgattttgatgctgagtacattgataggtatgtgccagtcaaagatctactgggaatttatgagaaactgtatggtcgaaaagtcatcac

SEQ ID NO: 817056 - DNA, 100 bp, Homo sapiens
gcgctgcccacttgcccagcctgccacaagataattctaacatctttgtcatcagtgttgacatctcttgattgtatcctgtcattccatttgagatctt

SEQ ID NO: 817057 - DNA, 99 bp, Homo sapiens
gatgacaaactctggagtaattggagccaagaaatgagtatagatggttccaatccctatacattgaagctttgcttttctacatcatcccatttataa

SEQ ID NO: 817058 - DNA, 127 bp, Homo sapiens
gaaaaccatggaagtgatgagaaactctcaggaaactctgttaaccattgtagagaacttgaaggtgcacattcttgatactgaaagttttgaaactacatttggccctaagtcacagaggaaacga

SEQ ID NO: 817059 - DNA, 98 bp, Homo sapiens
aagaggcacttcgtccagtcagccaaggaagtcgccaacagcactgccaacctggtgaagaccatcaagacaagttggatggcttgaggactggtact

SEQ ID NO: 817060 - DNA, 100 bp, Homo sapiens
ttgcagatgcttcgggagaacctggaggaggaggccatcatcatgaaggacgtgcccgactggaagcggaagatggagaaccgtgattaccgggatgcac

SEQ ID NO: 817061 - DNA, 100 bp, Homo sapiens
gccaagaccaggcaccggttgctgatttccttgttggagtcttcaccactatgagcactgctcatgtttcccacctggagaatgtgtcagaggaagaaat

SEQ ID NO: 817062 - DNA, 99 bp, Homo sapiens
tttgacaggtcaaaactgaagaaaactaatactgaagaaaaaaatactcttccctcaaaggaaaatgtctcagagcatgtcttcagtatcttcaaggca

SEQ ID NO: 817063 - DNA, 100 bp, Homo sapiens
ggaagatggcggccggcaagagcggcggtagcgcaggggagattacttttctggaagctgactcaggtgttgacaccttggcagtgtttatggccagcag

SEQ ID NO: 817064 - DNA, 98 bp, Homo sapiens
tcgaaaaaaagatggagccctgcatatgattggctctttagctgaaatacttctgaagaaaaatcctgggtagaagctggatcagcaagaatgtcact

SEQ ID NO: 817065 - DNA, 100 bp, Homo sapiens
aacttcagcatgtgccaggaacacaacctcaccttgatcaggttcaaaccttgtactactcagctgatcacaagctgcttgatgggaacctactagatgg

SEQ ID NO: 817066 - DNA, 100 bp, Homo sapiens
cctctttacatcatagactttcagctacttgaagatagccatcagccgctacgtgactcttttctccagagatgtggtctgaagctattaaaatcctgaa

SEQ ID NO: 817067 - DNA, 98 bp, Homo sapiens
ccccaagtgacggccacgaggcactggagaaggaggttcaggcaacacctcctcagcccatcaaagtaccacagtttatcccccctcctagactcact

SEQ ID NO: 817068 - DNA, 100 bp, Homo sapiens
ggggctgcctacgtgccagaactcacccaacagttccctctgaagtacaagttgtgcaaagtgaggaagattactgtgggagtgaagggaatccctcacc

SEQ ID NO: 817069 - DNA, 100 bp, Homo sapiens
gacatggaggagagaagacctcatctggatgccaggcccaggaattcccataccaaccacagaggagctcatgggacacatgtagctagtatagctgctg

SEQ ID NO: 817070 - DNA, 147 bp, Homo sapiens
aaccactcaccaaatccatgtggagcagtccatcagcctcctccttaacttcctgcttgcagcgtttgatccatgtgttcagagcaacattgttttgttgacacaagcatttagaagaaagtttgtgattcctgactttatgtcttt

SEQ ID NO: 817071 - DNA, 99 bp, Homo sapiens
tgccggcacctcaaccagatgaggaagtacaactttgaggtaagtggaggtatacttcgaatttttccagaaggcaaagcccagtttgctgacattgaa

SEQ ID NO: 817072 - DNA, 100 bp, Homo sapiens
gggagattataggagaactgggcgacggagcctttgggaaagtgtacaaggtgacttaagagattaaaattaatttggttgctgttggttctgaacaaat

SEQ ID NO: 817073 - DNA, 99 bp, Homo sapiens
aatgatttatagctaagactccaggacacccctgaagccgagaaatgtgtcgtgtgggagccaatgggagatgggaagaaaatcatttccttggctgat

SEQ ID NO: 817074 - DNA, 100 bp, Homo sapiens
aatacatcatgcttaaccctagttcacgaatcaaggttcgatacaagaggctgttttcctagcgtggcttgctgcctttggtaagaacatgtcgtccatc

SEQ ID NO: 817075 - DNA, 100 bp, Homo sapiens
ccggaacgggccagcgctgcaagaggcctacgtgcgggtggtcaccgagaagtccccgaccgactgattattccttgggcctgaatgacttgaatgtttc

SEQ ID NO: 817076 - DNA, 100 bp, Homo sapiens
tctggaccaggtgtggaatatcttttctgaagcttccaacagcgactgtgaattggagaatcaagaggcacatgagcaagatggaaatgatgaactaaag

SEQ ID NO: 817077 - DNA, 100 bp, Homo sapiens
attttacccaaggataaaattcaggatttcttaaaggatagccaattgcagtttgaggctgtagacatagctgacattgagaatgaagagaaccgctact

SEQ ID NO: 817078 - DNA, 98 bp, Homo sapiens
ggaacactggagactgggagatggcagctgcacttcttgcggctggatcacagactcctcgtgaagtggcccagcaggctgtggatgcggatgtgcat

SEQ ID NO: 817079 - DNA, 146 bp, Homo sapiens
gaaccctacacctgcggcgcctgtgggatccagttccagttctacaacaacctgttggagcacatgcagtcccatgcagagcattggctgtgatgactacttaggctccgacaaagtcgtggacaaatgtggggtgtgtggaggag

SEQ ID NO: 817080 - DNA, 98 bp, Homo sapiens
ctgcttcagagacatgagaagattcatactggagccagtgtcctgggctaaacacaagagtgctgattcccactgtaagttacagtgaagaacttctg

SEQ ID NO: 817081 - DNA, 98 bp, Homo sapiens
tgccaaatagttacctcttttaaactcattctactggagcaaatgtgtgccccctaccaccggagccagagaatggtggctacatctgccacccccgg

SEQ ID NO: 817082 - DNA, 122 bp, Homo sapiens
tccaatgagtatggcagtgtcagctgtacagccacactaactgtgacagataacgaaggaggcccaacttcattcaataaggagcctgacggatttatcccagacggtagaacaaaaggaag

SEQ ID NO: 817083 - DNA, 100 bp, Homo sapiens
ctggtgtagaggaagtaacacaggatttgaccctaaagcatggctggaggactggtgcaatcatcccagagttgagatctgagctcaaaatcatgaacac

SEQ ID NO: 817084 - DNA, 100 bp, Homo sapiens
ctgggattggcatgctttagctatctgaacgaaacttccctttggggagttaagttttccaggagccgaggaggtgctgctgctggcccggcggacggac

SEQ ID NO: 817085 - DNA, 100 bp, Homo sapiens
gaaggtggggtggcgtggcaagccggactaaggaccggggacttcttgattgagaaacagaagcctatcagttgctgaagaaggccacccttcaggataa

SEQ ID NO: 817086 - DNA, 99 bp, Homo sapiens
agagaaactgcaccttatcacccggaacctgcagggtatggtcagacaggtccaatttctcagcgagctggttatgatgctgttgcctcggctgtttct

SEQ ID NO: 817087 - DNA, 100 bp, Homo sapiens
attttgggaaactcgactttggagaaaccaccgtgctggaccgcttttacaatgcaggaatttagataatgggctgtgtgcaatgtaaggataaagaagc

SEQ ID NO: 817088 - DNA, 100 bp, Homo sapiens
gagatccacagctaagacaccgggacctcctggaagccaaaaatggtctcagtgctgtgccccccccagagcctagaggatgtttcatgggatcccagcc

SEQ ID NO: 817089 - DNA, 98 bp, Homo sapiens
gtgtaacccgaataagctgtcagactttgataggtttcacaagaagtactgtggctgtatacagtacctgtatgctggttgttcttttgcgggtccag

SEQ ID NO: 817090 - DNA, 99 bp, Homo sapiens
gattatcgagcaaaactttgggcttgcaacttttgttaccaaaggaatcagatgatgaaaaactctcagaggtagaagaagctcaggaagcaagcatgg

SEQ ID NO: 817091 - DNA, 100 bp, Homo sapiens
ttatcagcgcctcaatctctactcgaagaagaaagagaagaaacgttttctcaggtattacacaatggcctcgttatggagatggagcatccaactgtgg

SEQ ID NO: 817092 - DNA, 98 bp, Homo sapiens
tccacggagtgtatgaccacaaacagccatcaaggaattacatgaatgacagtcttcgaaccaatgtgtttgttcgatttcaaccagagactatagca

SEQ ID NO: 817093 - DNA, 100 bp, Homo sapiens
ctacaagaccgccccttttgacagccgcttccccaaccagaaccagactagaaactgctggcagaactacctgggaaggtgcttcaatattggatattca

SEQ ID NO: 817094 - DNA, 100 bp, Homo sapiens
aaaataatccagagatttccacagaaggactgggatgatacaccttttccacagggaattgagttgtttgtgaagtgtggatatgcaggctctaactttc

SEQ ID NO: 817095 - DNA, 98 bp, Homo sapiens
acagcccgagaaaccgcagcactacacactggattatggacagaacttggaaatattgagaataatttcttaaagccacttcatataggacttaatat

SEQ ID NO: 817096 - DNA, 102 bp, Homo sapiens
ctgctccccggaaaagggcactcgtctccgtgggtgtggcggagcgcgcggtgcatgctcctttagcggcagagttttccgagtgaccttcttgatgctggc

SEQ ID NO: 817097 - DNA, 100 bp, Homo sapiens
atcaccgtgacatccgaggtgcctttctccaaaaggatgttttcaagcctatggaccttaatcgtgtcatcaaactcctcgaagagactgataaagtgag

SEQ ID NO: 817098 - DNA, 98 bp, Homo sapiens
gctcccccgggcggggttgagtcggcgctcagctgcttctctttcaaccaggactgcacgtcacccaacctgcctgcagtttaccctgaacatgaccg

SEQ ID NO: 817099 - DNA, 98 bp, Homo sapiens
aacatgctgaccgctcaagagattctacatcagtttggtttcactcagaccggtgatttgaagatattaaagctagaaattggaactagaaaatcaaa

SEQ ID NO: 817100 - DNA, 100 bp, Homo sapiens
tgatactttaggtgaaggagcttttggaaaagttgtggagtgcatcgatcataaagcgctgagttggctgtcattcttaaatttgtgctggaccatgagg

SEQ ID NO: 817101 - DNA, 100 bp, Homo sapiens
cgatgatgattttgaaccttacttgagtccacaggcaaggcccccctcagcagggagagcacctatcagcaatccaggaatgagtgaagcagggaacttt

SEQ ID NO: 817102 - DNA, 98 bp, Homo sapiens
tcaattggacagtacatctgtggacaaagcagtacctgaaacagaagatgtgcagggcctactgaacttgacgcactggtatttggccatctatacac

SEQ ID NO: 817103 - DNA, 99 bp, Homo sapiens
gaaaacaggcactggaccacttcaatgcagatgggtctgagagtggagcctttcaggctggcatggagagcttaaggggcaactgaaggagacacactg

SEQ ID NO: 817104 - DNA, 98 bp, Homo sapiens
aaggaggacttcctggagggggtgactgtccagagcctggaactgtgcccacaccagaagccatcagcagcaagattatgatgcatcattatcacaga

SEQ ID NO: 817105 - DNA, 100 bp, Homo sapiens
tgagcaggcggaggccgacaagaaggcggcggaagacaggagcaagcaggcacgcatcgaggagctggaggaggagctggaggccgagcgcaccgccagg

SEQ ID NO: 817106 - DNA, 100 bp, Homo sapiens
acaacagtttttaccagttcatccacaaaatcctggatttgttcagaatccttcagggtggttctcttcccaaagtggaagccaaattcatcaattatgt

SEQ ID NO: 817107 - DNA, 100 bp, Homo sapiens
ctggtcccaagctagatcttcgggaaaagggatcaaggaaatgactattcctccaaataaaattgaatggataccacgcatcagggaccccagcgcaccc

SEQ ID NO: 817108 - DNA, 132 bp, Homo sapiens
gaaaaaaattatatttatagatagcacctggaaccaaacaaacaaaatattcactgatgagcgacttcaaggagagccagtttctgagtgccccagaggagaatgctgtagtgaacacagccctgtacagag

SEQ ID NO: 817109 - DNA, 105 bp, Homo sapiens
ccaccttcagagcgtcacggcgtacgccctcatggggaaaatctccccggtgactttcagccctgggcgctgcctatggcacagccaagagcggtaccggcattg

SEQ ID NO: 817110 - DNA, 98 bp, Homo sapiens
gccatttccagacgccccggaggccaccacacacacccagctaccagaggccatgtggaagtgttacatcaccttttgcttggaaagatttactaaga

SEQ ID NO: 817111 - DNA, 99 bp, Homo sapiens
tcagccgggcagtttgaggagctgctgcgcctcaaagccaaagatgctgatgaaaccaaagaatggattgaagagaagaatcaagctctaaacacagac

SEQ ID NO: 817112 - DNA, 100 bp, Homo sapiens
ctagcacgtggaattcgcgaagctgccaaagccttagacaaggatggggaaagacaccatagtcataaaagaagaaagcaaaaaatataaatgaagtact

SEQ ID NO: 817113 - DNA, 121 bp, Homo sapiens
cctcggcactgtattctttacctgcttcccaatcccactgatgaggatcagcccatgtgaactttgaggcgctgatcatcaccatgtcggtagtcgggggaaccctcctcctgggcattgc

SEQ ID NO: 817114 - DNA, 99 bp, Homo sapiens
gcagcacttccacagccaagtgcgggagtccacggtacctggaatggaaacacaaaagtagccataaagactcttaaaccaggcacaatgtcccccgaa

SEQ ID NO: 817115 - DNA, 100 bp, Homo sapiens
ctcaggcttcgccacctgcgtgcaaagaatagccaggccagaagaaggaaggcctgtggtgagtgggacaggaaatgacatcaccaccccaccgaacaag

SEQ ID NO: 817116 - DNA, 98 bp, Homo sapiens
gtagctcaatacatggctgatgtattggaagatagcaaagacaaagttcaagagaatctgttggctaatggaggccttggacaagattcgctatgaga

SEQ ID NO: 817117 - DNA, 100 bp, Homo sapiens
atgaatgctgcttcgatgcaaatcaaccagagggaagaaaatgcaaactgaaacctgggaaacagtgcaggttttgacctgtagcagagaaccaattctg

SEQ ID NO: 817118 - DNA, 100 bp, Homo sapiens
atcttttaatgtggcattactgctggcagaagatttcaaaagataacaacgaacttgatgcaagtgataggtttgccaaggtcagacctctcatcatccg

SEQ ID NO: 817119 - DNA, 100 bp, Homo sapiens
gggctgaggatgacaaaaaagccttcataggtaaaaccttgttagccaaagcagtagcaaaccaaacctcagccactttcttgagagtggttggctctga

SEQ ID NO: 817120 - DNA, 100 bp, Homo sapiens
gaacaagccatggagggtcaaagaaactcctggttgagctcaaagttattttacattagctggaagtcgagtgtgctactcaactcaggagatttggaga

SEQ ID NO: 817121 - DNA, 100 bp, Homo sapiens
gcacctttcggcttctgagacggcggcagcagcggcattcagaagccttgaagaaccaatgtactgatgtggggattaaagagggtccactttccccagc

SEQ ID NO: 817122 - DNA, 51 bp, Homo sapiens
cagctggctggcggagcatgagcgccccagaatcatattctaagaactcag

SEQ ID NO: 817123 - DNA, 98 bp, Homo sapiens
catagtatctttaaactacacaaaagtggaacagctttgttcagggccgcgatgggcctcttggaacattggtgtgttcatctgcattcgatgtgctg

SEQ ID NO: 817124 - DNA, 100 bp, Homo sapiens
ttcaggatttacacagacgtggggcgatgcttgtgaccctgcagctcctcaaaaggcggggtttcaccatgttgcccagactggtcttgaactcctgagc

SEQ ID NO: 817125 - DNA, 100 bp, Homo sapiens
atcttccactatggaattctcactacggatttttctgggaagccacagatgatggacataacaacaaccttcttcctcagattattcagtgttttgcatg

SEQ ID NO: 817126 - DNA, 100 bp, Homo sapiens
aagtgtgcgacgctctcttcctcatcttctcctttgtcttcttctacacccgactggtcctctttcccacccagacacatgacggaagtgtgtatttttg

SEQ ID NO: 817127 - DNA, 118 bp, Homo sapiens
agtccccagtgagggtgtacaaatacccctttgaattaattatggctgagtccttcaataatgttaaacagtggctgcaggaaatagatcgttatgccagtgaaaatgtcaacaaatt

SEQ ID NO: 817128 - DNA, 50 bp, Homo sapiens
tatttggctgaggagttttcaatcccaagaaagcatgggattatggcaac

SEQ ID NO: 817129 - DNA, 100 bp, Homo sapiens
cttaagccatctgggcctacaccagcatccggtcagttatcatctggtgacaaagcttcagcaagaggtggaaacatacagaagaagcaaggaaattaca

SEQ ID NO: 817130 - DNA, 99 bp, Homo sapiens
tctctaccgggggaattgcaggcccatacgatttgagccaccaatgctggatttccatgaacattgactttggtgtgagtgctcagctggacaggactg

SEQ ID NO: 817131 - DNA, 98 bp, Homo sapiens
tcaactcaactatttctacatctctcctggaggtgtcatctttaagaaatgaaaagcgaggctcatcatatctcatctctgccccagaaggtggttca

SEQ ID NO: 817132 - DNA, 98 bp, Homo sapiens
atatgacattaacagacaagacacttttcagaaagacaggggggacacagcgattgccacgcgccattggaatgtccctggccaaggagctcatattc

SEQ ID NO: 817133 - DNA, 100 bp, Homo sapiens
gaacttttaagtggagtggtggatcagaccaaagatgggtagttattactagtaaaagcggagagatcttgtatcgtatttcaccgtgggcaaagtatgt

SEQ ID NO: 817134 - DNA, 100 bp, Homo sapiens
ggccgctgtgtggttgcaacggagataaattcccggaaccgcgattcggcgtgtcagggcccaatgtaaaggctgttgctactgctgtggaacagattta

SEQ ID NO: 817135 - DNA, 100 bp, Homo sapiens
gcggatcaggatcggaagcctgcgtaactttctcccttgatccgggagtctttccactggggagttctgggaaatcgttcattcatttacagatgaacag

SEQ ID NO: 817136 - DNA, 98 bp, Homo sapiens
acaaaatacaaatcatggagccgctggggtcccttttgcctcagatactattttgaagtttgtgatttaaggacgaacaaacttcccggttcccctgg

SEQ ID NO: 817137 - DNA, 100 bp, Homo sapiens
gactggaattgagcaagggagtgatgccggttatctctgtgaatctcagacccctgtaaaagagcccaacagtgaaaatgtagatatcagcagtggagga

SEQ ID NO: 817138 - DNA, 98 bp, Homo sapiens
acatccccacatcaatgcactgccaatgaagtgaacatccacttgcccagctttactgccattcaatcatggaacaccatcattttgaccagtgcctg

SEQ ID NO: 817139 - DNA, 101 bp, Homo sapiens
aagccccagagtgcctggagatgcagttataatgccattcagagaagtagccaagccaacagagcctgatgagcatgagatgcggtttcaccatgttggcc

SEQ ID NO: 817140 - DNA, 100 bp, Homo sapiens
agatttcaaattataacctatttcctgcaccattgctgacgcctggtgatccatgtcagaagtacttccagaggtgctgatactcaaagaaggtttaagt

SEQ ID NO: 817141 - DNA, 100 bp, Homo sapiens
gctgaattttggactagtgcggatgacagcagtgcttccgacgaaatcaggcattgtgtggctgctcaattaatgtaccaacactggatggaagaaacat

SEQ ID NO: 817142 - DNA, 99 bp, Homo sapiens
agacagaacctttgacttggtgttgaaagtgaaatgtcatgcctctgaaaatgaaggcaattaagttggaatatgcaaggttggttaagttggcccaag

SEQ ID NO: 817143 - DNA, 101 bp, Homo sapiens
gcctgtacctgttttatacttgcttttgcttcagcgttctgtggttgtcaacaggtctcctctgagcctccggcctccataagacccaaaacagatgacac

SEQ ID NO: 817144 - DNA, 99 bp, Homo sapiens
ccgggagtggtgcgtgatgtggctaagatgctgccgactctgggcggcgaggaaggcgtctcccggactctgagatttgcccacctgatgaccttgcca

SEQ ID NO: 817145 - DNA, 99 bp, Homo sapiens
gatgaacaggctcttgcacacaaagaagagacatgatgtatttgcatccttccctgcttcagccaggttctgaccacatccgtgagaaagatggactgt

SEQ ID NO: 817146 - DNA, 98 bp, Homo sapiens
tttgcctctgcacagtttcccaatggttggatggcaagcatgtggtgtttggcaaagtgaaagaaggcatgaatattgtggaggccatggagcgcttt

SEQ ID NO: 817147 - DNA, 98 bp, Homo sapiens
ggccctgaagaactacagtgtggtggtcattgggactcccacacttaaacaaagaaaggaaattctgcaagtgattacctcgaagatgcccatctcca

SEQ ID NO: 817148 - DNA, 98 bp, Homo sapiens
accgagagcgcgaatatcgtcatcgttagaagttgttgaatgttgggtcacgaagatctcaacctggccaaagaagagaacccagaaagatcatcaca

SEQ ID NO: 817149 - DNA, 100 bp, Homo sapiens
tttggattacaactgttcatcctcacctatgcaaagaaagggaagctattgctgggattttgaggagaaaggtgactcttttgatggtgggacttgataa

SEQ ID NO: 817150 - DNA, 100 bp, Homo sapiens
ctcccgcgcgcgctgagtgggcggagcgaacagggggctggacagacttaattcagtgcacaaatgagatgaatgtgaacatcccacagttggcagacag

SEQ ID NO: 817151 - DNA, 98 bp, Homo sapiens
cgaaacagctcatcactgatatttctggctcaggaaataattgatatgcaagaactgtacaggttgctttgatcgacacatcccatgtgtttctctga

SEQ ID NO: 817152 - DNA, 100 bp, Homo sapiens
taagatatctttgagacctgaggttgaaaactatcttaaggaaggctttatgaataaggaggttctacctacagcgtcctgtccaccatgccctcagact

SEQ ID NO: 817153 - DNA, 98 bp, Homo sapiens
gcggcggcggcggcgggtccctgagctggaagccggtccggaccctatttgtcagtggccttcctctggatatcaaacctcgggagctctatctgctt

SEQ ID NO: 817154 - DNA, 60 bp, Homo sapiens
gctttccccccacctgaacagaaaactgcatttgacaagtgaacagcagagaatttcaaa

SEQ ID NO: 817155 - DNA, 98 bp, Homo sapiens
gtgtctgaagtcttcaggcgagctcaccacatgctacaggttacagaatacctatatgctaataaaatggctttccgatacccagaacctgaagacaa

SEQ ID NO: 817156 - DNA, 99 bp, Homo sapiens
ttcattgcagaattgctgcctgacaaccacagcaattgtctgctattttaaaagcactgtgatgcttaaatattccagctgctacatcggacaggtgtc

SEQ ID NO: 817157 - DNA, 99 bp, Homo sapiens
tttggaggaggaacaacccccatgttgacttggcttcagatcaggctttacaggaagtatggtgctggcatctgcttggcttctagagagtcttacaat

SEQ ID NO: 817158 - DNA, 100 bp, Homo sapiens
tcatctgactcgtgatctgcccatcttgttactccctagcagtgtggtaaggaagtagctgatctctgcaggaaactgctgttacctggcctcagctgaa

SEQ ID NO: 817159 - DNA, 100 bp, Homo sapiens
tgaagacgtagccatcttgctccatgaagtgcgcgtcccgggacgactggcgctgtgcgcgctccatgcacgagttttccgccaaggacatcgacgggca

SEQ ID NO: 817160 - DNA, 100 bp, Homo sapiens
tgcgaatgttaaatcagctggagaaggagaagtggagaagaaatcagtcagccgcaggtttctgctttgggacaaccatacatctaattccttaaagtag

SEQ ID NO: 817161 - DNA, 100 bp, Homo sapiens
cattggaatcgctgaaccgtgcagtgctcgctgccatggatgccaccaagctggtgaccatggaggaagaagatgagtctcgagggaagacagaggagtc

SEQ ID NO: 817162 - DNA, 98 bp, Homo sapiens
ggggccccagccagagtgatgaccaagaaggctaagtcctatcagccatggaaacaccattgctctcttcttccggtcactgttgccaaactatacca

SEQ ID NO: 817163 - DNA, 98 bp, Homo sapiens
gccgtcgcagcccccgcgctggtgcagccaccctcgctccctctgctcttcctcccttcgctcgcaccatgatgttgatggcatggacctgggcaaaa

SEQ ID NO: 817164 - DNA, 98 bp, Homo sapiens
tcgttctcctccatctggtcattgaaagcaagagtttgggtgaaaatcctatttataagagtgccgtaacaactgtggtcaatccgaagtatgaggga

SEQ ID NO: 817165 - DNA, 100 bp, Homo sapiens
ctgcaaagtgtccccggcaagaaggtgctgctggtgagtagcagccggtacccagaccagtggattgtcccaggaggaggaatggaacccgaggaggaac

SEQ ID NO: 817166 - DNA, 100 bp, Homo sapiens
caccacccgcccaggccagccccagcagcaacagcagcacaggaatggtttgcagtgtatgtggaacttaatcagcaaattgcagcactcttgaatgctg

SEQ ID NO: 817167 - DNA, 98 bp, Homo sapiens
cacaggtgtcatcacctgactgagtttgctatgccaaaaattttggccccacgggtattgggtttggaggccttacacaacaagtggaaaagaaagaa

SEQ ID NO: 817168 - DNA, 100 bp, Homo sapiens
tacgtggggaagaatgaaaaaaccaaaattatcgccaagattcagcaaaaatctgagtggatgacaacaacctgcaatcacgcactttatgctatttgtg

SEQ ID NO: 817169 - DNA, 100 bp, Homo sapiens
tttgaagagactgctagattccagccaggatacagatcttaaatttgtcagatcaaaaaccatttctccattgcatttatcatctataaatttgttaaga

SEQ ID NO: 817170 - DNA, 99 bp, Homo sapiens
acactcatagacggcgaaggctggtccgaaaacgcaagaaagatttaacacagactgcttcaagcaccgcaaggtcttatcgggacctcaaagaagtaa

SEQ ID NO: 817171 - DNA, 100 bp, Homo sapiens
gtgttgttgccatccagggagtgaaaacagggttgtatatagccatgaatggagaaggttacctctacccatcagataaaagaatcagagtgtctcaacc

SEQ ID NO: 817172 - DNA, 100 bp, Homo sapiens
aacaaactcgaagaacagctgtggaaagaagttgcaaaacactggacatggtctcgctatgttgcccagaatggttttgcactgggtccaagcagttctg

SEQ ID NO: 817173 - DNA, 101 bp, Homo sapiens
agtgtctccatcgtcatcagaaactgaaggcaactttgtctatcgcacaggtacactgaggaggggacggctccgtcttcacattgtgcacagatctgagg

SEQ ID NO: 817174 - DNA, 100 bp, Homo sapiens
cagctgctcggacagatgaagctccccaaggagctgcagtgtttacaggcattggagtttttacatgctaatcaagtgatccacagagacatcaaaagtg

SEQ ID NO: 817175 - DNA, 98 bp, Homo sapiens
aaagatagagataaggagaaggataaaatgaaagccaagaagggaatgctgaagggcttgggagacatgttcagaaaatatttacaccagcagctcca

SEQ ID NO: 817176 - DNA, 100 bp, Homo sapiens
taaactcaacatcgacagcattatccaacggctgctggaagatgttcattctggacagagtggaaggtgatacttgttcccttaatgagtttaccataac

SEQ ID NO: 817177 - DNA, 100 bp, Homo sapiens
aagaaagcagtacctgaagcacctactcctgttcctaaaaaagtggaggcaccaccagctaaagacacagggaatatggaggttctgcacctgtatggaa

SEQ ID NO: 817178 - DNA, 99 bp, Homo sapiens
gaacccaccagaaggaaccaattccggacacataacaagcagcagtgaggacaccaaagagtgatgatgcgggtgtgctggttggtgagacaggacagc

SEQ ID NO: 817179 - DNA, 98 bp, Homo sapiens
tagtggctcctctgcaggaaaggaatagccaggccagaagaaggaaggcctgtggtgagtgggacaggaaatgacatcaccaccccaccgaacaagga

SEQ ID NO: 817180 - DNA, 100 bp, Homo sapiens
acaatgcagatgacttccctaatctcttcagacaggttggtcaaagaaaaagtgatgtatgaaaaagaggcaaaacaacaagaagaaaagattgaaaaaa

SEQ ID NO: 817181 - DNA, 100 bp, Homo sapiens
ccaacaccttcctgtgcagtcctgttggaattttgtaaacaggaacatcgataagtagtgtaaaaacttgcacaatgaaatccgaagccaaggatggaga

SEQ ID NO: 817182 - DNA, 98 bp, Homo sapiens
aaggcagtgggtgtgaccaaaagtgccatttgttaaagagatccaagcctcctaaaggccaaggagctgagcaccatctagaaagaatccgacgcagc

SEQ ID NO: 817183 - DNA, 98 bp, Homo sapiens
gacgggatcgctttctcccatcgaaccttctagttgcttattgcaggtcaaaatgcagatcttcgtgaaaacccttaccggcaagaccatcacccttg

SEQ ID NO: 817184 - DNA, 100 bp, Homo sapiens
acccgtgaaggcaatgatttataccatgaaatgattgaatctggtgttatcaacttaaaagatgccacctctaagatcctgtttgaccaaactcagagat

SEQ ID NO: 817185 - DNA, 100 bp, Homo sapiens
cgacaagcacacactatggcgctgaaacggattaataagggcctattccactagaagcaagatggctgaactcaatactcatgtgaatgtcaaggaaaag

SEQ ID NO: 817186 - DNA, 98 bp, Homo sapiens
ttcaatgcagacaagacggatgtgatgctgcgggtccatatggaatatttgctggtagggatgcctccagaggactggccacattttgcctagataaa

SEQ ID NO: 817187 - DNA, 100 bp, Homo sapiens
tcaggagtggggaaggtgcgacaggctgcatgcggtggcacgggctgtgcagtgttaaacgtctattatcctcccagtccacaacgctgaaccgtggctg

SEQ ID NO: 817188 - DNA, 98 bp, Homo sapiens
cggccaggcgattcggtgaagcgattcctgcaggcgttggttcccctctttgacctgcgtttagtcacatcaagaaatagaacagaattcagccatgg

SEQ ID NO: 817189 - DNA, 100 bp, Homo sapiens
gttatcatgtggcagaagcactatggtggaaagtggacaacttatcggtctatggcagaagataccataaatgctgctgtcaaaactcataatttaaaag

SEQ ID NO: 817190 - DNA, 99 bp, Homo sapiens
ccctcagcgccgcaggaggcggaggacaacactggccactgccccaacccaggcatttcactgggcgcagtgcggacaggcttccgctttggtcatggg

SEQ ID NO: 817191 - DNA, 100 bp, Homo sapiens
ctgtatataaggcttcattaagcttaactgagaagtatttctctgtagagtgttctacgcagaaatagaagagctgaaactggtgtatccttatcacggc

SEQ ID NO: 817192 - DNA, 100 bp, Homo sapiens
attgacaggaactacgtcccggggaaggtgtcttcagtgccctgggtttgcctgtgacccaatgcccactgggactgaatgccaaaggactccctttagg

SEQ ID NO: 817193 - DNA, 98 bp, Homo sapiens
ccttttccctctccctttccctaagcctgactggcagccctatttgccacagaacggagacaacattgaagttgccttctcctactcctcggtcttat

SEQ ID NO: 817194 - DNA, 98 bp, Homo sapiens
cccctctcactctccaattctgttgttgcctccatgcgccaatccaaaccgaaagccagaagttgtgctgaaagacattatgacaccgccaaatttaa

SEQ ID NO: 817195 - DNA, 100 bp, Homo sapiens
agggaccgaaatggagagcaaagacctcgcgacctgtgtcagcagagccgccctgcaccaccatgtgcatcatcttctttaagtttgatcctcgccctgt

SEQ ID NO: 817196 - DNA, 101 bp, Homo sapiens
actacgtgattccagtggtacaagtcgtggtgttggctttgctaggttatcaatactctggctgaccatcatcatcgtgggactgactttggtggaagtcc

SEQ ID NO: 817197 - DNA, 98 bp, Homo sapiens
gcacgcagacccgcttttaaaggatgaggtggtagtaaatgaccgatggggtcagaactgttcctgtcaccatggaggatactataactgtgaagata

SEQ ID NO: 817198 - DNA, 101 bp, Homo sapiens
acgatctgcacttcgcattttggcattgacatttaattttagggtcctttatatagaagggagagtagttccagcgccaggggcttcagcagacccagcag

SEQ ID NO: 817199 - DNA, 98 bp, Homo sapiens
aaaaacgaaagcaactggagctcaggggaaagcgagagctgatcaagttctttgttcctggggaattcacttctcttcctccctcatggaagatgcaa

SEQ ID NO: 817200 - DNA, 100 bp, Homo sapiens
caaacaactgaaacctactgcttctgtcaaaccagtacagatggaaaagttggctccaaagctgcaagctttcttcctggtggcagatgacatcatggat

SEQ ID NO: 817201 - DNA, 98 bp, Homo sapiens
gtcttgtttacttttaccaggagatgccactgtcataacttcttcatgggataataatgtttctactcagtgaatgtggattacagcaagctgaagaa

SEQ ID NO: 817202 - DNA, 98 bp, Homo sapiens
cagccaccagtcagatgcggggaagcaggggcttggcccccccagcacccccatagccgtgcatgctgctgtaaagacggagtctctctctgttgccc

SEQ ID NO: 817203 - DNA, 99 bp, Homo sapiens
agtgtgctccagcattaaatttggagatgaggaaaatactggatttacaagcacccatcatgaggaaagaccacagcaagattctttcattcgtctcct

SEQ ID NO: 817204 - DNA, 99 bp, Homo sapiens
ggctccggaaaggcgtttgggatgccaacgtatacctgaggtgcaccggaggtgaagtcggtgccacttctgccctggcccccaagatcggccccctgg

SEQ ID NO: 817205 - DNA, 119 bp, Homo sapiens
tttgcaaagaggaggaaggagggacttcttggcttctcccagcatagccccaggcagtgctcggaatgtgaccaggcagggagcagtgacatggaagcagatatggccatggaaaccct

SEQ ID NO: 817206 - DNA, 100 bp, Homo sapiens
ccacaaaaacctatcgttagagtcttcctgcccaacaaacagaggacagtgattgtgttaacagaaatgtactatgatgggttccatcgttccttttgtg

SEQ ID NO: 817207 - DNA, 98 bp, Homo sapiens
caacccagaggatccccagtatgcatctcaagatgtgatatccaaacacagcctgtgagcttctgacttgtgatgtgccgcagatcagcgaccgcctc

SEQ ID NO: 817208 - DNA, 98 bp, Homo sapiens
agaggagagcggtgcggaggactgaggtgaacctggccctgcctgtgttcttcatcctggcctgcctcttcctgatcgccgtctccttctggaagaca

SEQ ID NO: 817209 - DNA, 98 bp, Homo sapiens
gggcacgacgcctttcagctctgcagcagctttgcctccagggtcatacgcatccttaggtattgcgcagcgatgcacggccatcaagtaccactttt

SEQ ID NO: 817210 - DNA, 98 bp, Homo sapiens
cgggcggacgccgcagagcgccgaggaggctttcctgctggtggcaaccgcctacgagacactcaagttgtgctgcatggaaacaacctgttagtatt

SEQ ID NO: 817211 - DNA, 98 bp, Homo sapiens
aaggctggcattgaggtccaggaaatcaaaggcattaattcatggactaaacagacattattactccattactattaactatcggaaaaatgaactgg

SEQ ID NO: 817212 - DNA, 98 bp, Homo sapiens
gaggactgtttacagcaggatgagcatgccaatttaactgagcgctttgaacttcaagattcaggaagctctctacttcctaaagagattgtaaaagt

SEQ ID NO: 817213 - DNA, 98 bp, Homo sapiens
cacagcctactatcagccggcgccccaacctggccagcaggtactttgaactcaagtaaacaaaagggaagattttctcgttgatactggagactgca

SEQ ID NO: 817214 - DNA, 99 bp, Homo sapiens
gctgccagcacctgccactcagagcgcctctgtcgctgggacccttcagggtgttggaactcgccataaggcattgatcaggattatggtttcccgttc

SEQ ID NO: 817215 - DNA, 100 bp, Homo sapiens
aagacaggtatcctcggaaacggtttgtggctggagtaggagcaaacagcaacttgatcctctcccagaaaaggttttacagcaaagacccaatgcaaac

SEQ ID NO: 817216 - DNA, 100 bp, Homo sapiens
taaacttccttttactattagcccatcaagaaatgaagaacgagattcagacacagctatgggagacatccatttaagatcaactgtttacatgtgatac

SEQ ID NO: 817217 - DNA, 95 bp, Homo sapiens
agcggcaggacagcaagagcgcactcttcctgctggagcaccaggcagatataaatgtcagagttaggaagtaacatggtagtacctcaggcaaa

SEQ ID NO: 817218 - DNA, 98 bp, Homo sapiens
ttgacacaggactgaggaataagatggtacaagttggactgcttcccaagctcactgcactcctagttttgagtatccgaggagcccaggaggaggaa

SEQ ID NO: 817219 - DNA, 98 bp, Homo sapiens
aggaggtcgtttatcagcaattacaatggcacttcaatatggctcagaaagtgaagaagatgctgctttagctggaatagccaggccagaagaaggaa

SEQ ID NO: 817220 - DNA, 100 bp, Homo sapiens
ccgcggccggggacctggacaacccccctaagaagttccgtgtactatactggcaattgctggagaagattttgcaattgttgcttctgatactcgattg

SEQ ID NO: 817221 - DNA, 98 bp, Homo sapiens
tgggcagacggattcatttagagctgcggaacaggacgccctctgatcaatggtacaacagctccatgaacgtgatctgcacctggttgacggaccgg

SEQ ID NO: 817222 - DNA, 98 bp, Homo sapiens
ggccgcggccagggaacggggcatcgcggttccaacgcttctgaaagttctgctgaagacagtgagcaggaagatgagagaggtgctcaagacatgga

SEQ ID NO: 817223 - DNA, 100 bp, Homo sapiens
ggtactaaacagacaagtactttgaaacaagaagatgcttctaaaagcataaatgcagttccaactacaacgaagattttgtgctacagctagagaagga

SEQ ID NO: 817224 - DNA, 100 bp, Homo sapiens
tatgttgtgtcatttcgaagggtccacaactcccaggcctgttgcagatctccaactcctgctttgtgtgaccccccagcatgctctctgccggtggcat

SEQ ID NO: 817225 - DNA, 50 bp, Homo sapiens
aatgttggcagctataacttacacactaagtaatcatttgtttgaagaac

SEQ ID NO: 817226 - DNA, 100 bp, Homo sapiens
caaatgacagcgaggacactcccagcaagctcttcgaattagtaagctgtgtgggctggactactgctgaagagctgtattcatgtagtgatgatcacca

SEQ ID NO: 817227 - DNA, 100 bp, Homo sapiens
caaaaagcaacggtcaaatctccaagcgacttctctcatatcatgtgctacagtgcatctgggggaggtgttgtagccattgacaacaaaatagaacaag

SEQ ID NO: 817228 - DNA, 100 bp, Homo sapiens
gaggtggccgaatcttccttcaggatatcaagagctggaagtcgagtgtgctactcaactcaggagatttggagacaaactgaacttccggcagaaactt

SEQ ID NO: 817229 - DNA, 98 bp, Homo sapiens
aataaagtccaagggctttcccagacgtttccgtgaagtgccttcttctggggagagaggagagaaggggagcagagctggagaaagagctttcccgg

SEQ ID NO: 817230 - DNA, 100 bp, Homo sapiens
atctttaccagtccagaaatgcagcctacgacacctggagcttctctgcagactgacacaccctcccccaccccgggtagtggagatgctggtgtctggg

SEQ ID NO: 817231 - DNA, 98 bp, Homo sapiens
agaatatcactgtttgctgcaattactgtgtcctgatttcccgctggagctcactcagaaagcagccagggagattccatggagctggaaatatggtg

SEQ ID NO: 817232 - DNA, 98 bp, Homo sapiens
gcagcctggccgcgctctcccagtcccttcaccgatgttgtcaccaccaacctaaagcttggcaacccgacagaccgaaatgtgtgttttaaggtgaa

SEQ ID NO: 817233 - DNA, 98 bp, Homo sapiens
catggctcaccgcagtctcgactttcctgggctcaggacctcagcagccatgtcgaagccccatagtgaagccgggactgccttcattcagacccagc

SEQ ID NO: 817234 - DNA, 100 bp, Homo sapiens
tggccatcatcagcttctacgtgaggcacagctgcctgcgggaagctcttctgcaccttctcaacaaggcccagccgcagccccagccccagccccagcc

SEQ ID NO: 817235 - DNA, 100 bp, Homo sapiens
ccgagatgaatcctgcggcagaagccgagttcaacatcctcctggccaccgactcctacaaggtgggcaccatgtccttgaagcttcaggcaagcaatgt

SEQ ID NO: 817236 - DNA, 100 bp, Homo sapiens
cggcgtccccggtttggtgttgcggcgcccaccttcgggaggatcagcggcagtacatacctgtgaaaatgaagagcaaagccttctggatcttttcttg

SEQ ID NO: 817237 - DNA, 100 bp, Homo sapiens
gaagctgctcaggcattcctgtgcaaaaatggggacccgcagacacctaggacatggtctgctatacagctcagactctcgtccgaatcctctcacatgg

SEQ ID NO: 817238 - DNA, 100 bp, Homo sapiens
cccgtggtccttctccatattcgaggaaacctgtaggaagtgtcagggactctggaaagaacataatggcctcacctgtgaagagctggctgaaaaagac

SEQ ID NO: 817239 - DNA, 100 bp, Homo sapiens
ctttgtccattctggaaactcaatattacttgcgagtcctcaaagagttatgcccagccaagtcttcagtatatccaggggcaacagattttcacagctc

SEQ ID NO: 817240 - DNA, 98 bp, Homo sapiens
gactctctgaggctcattttgcagttgttgaaattgtccccgcagttttcaatcatggttaaaagagcagaaccttgtgaaagagctgaggccccgag

SEQ ID NO: 817241 - DNA, 98 bp, Homo sapiens
ccgcgggaagatggcggcgccgctcatccccctctcccagcagtctctgccatccaggaccctgcccaccctgccctgcctttatgacaaaaacatgt

SEQ ID NO: 817242 - DNA, 98 bp, Homo sapiens
ggaggttttggctctgcgtgagtgtggtctacgagctgtttctcatctttatactcttccagaggactaccccaatggcacctggctgggcgacgaga

SEQ ID NO: 817243 - DNA, 98 bp, Homo sapiens
aacagagcatggtcaacagtttgcccaccttccctacagatatcaagaatacttcagtcaccaacgtgccaaatatgcattgtcttcagtgttaagaa

SEQ ID NO: 817244 - DNA, 100 bp, Homo sapiens
agccattcgggttggagtaattggacacagcattgttggttttgccatgtactattttacctatgacccgtggattggcaagttattgtatcttgaggac

SEQ ID NO: 817245 - DNA, 98 bp, Homo sapiens
cggcaggggtcctacaccagcatcaacagtgagggggagttcatcccagagaccagcgagcagtgcgttcttagcatgataatcaacgcagcctacaa

SEQ ID NO: 817246 - DNA, 98 bp, Homo sapiens
aatgaaaaagggcaagatactggggaacatcatcttcagcgggctatttcagcacagcaggtgtatggcgagaagagggataatatggttataccggt

SEQ ID NO: 817247 - DNA, 98 bp, Homo sapiens
acctttctgcgccaccgggtcatggaagtcatgcggtcatcacactgaaacggtgttcaaccgggttttgccagggcctattgcaccagagagcagca

SEQ ID NO: 817248 - DNA, 100 bp, Homo sapiens
atccgggagcacgtcatcgccatcgaagaaaatatttacaccagcagctccagttcataccaataaagaagatcctgctacccaaactaatttgggattt

SEQ ID NO: 817249 - DNA, 100 bp, Homo sapiens
cagaagctatgcttggcagcagaaggatttggcaacagactttgtttcttggagtccacttccaattccaaggaattggcagcaatgaaacagattctcg

SEQ ID NO: 817250 - DNA, 100 bp, Homo sapiens
agactgaaaattacaaagaatatgataaaatcttacttcaggaacaaagctacgtttttccaggttttaaaacatgaatcctacactcatccttgctgcc

SEQ ID NO: 817251 - DNA, 100 bp, Homo sapiens
tgactccacctttacttttacctacgttggcggccccagaaggttcttccgaatgatccagtctttcttgagcctcatgaagaaatgacactctgcaaat

SEQ ID NO: 817252 - DNA, 100 bp, Homo sapiens
ctgtcctggtgttttatgacatgtgatggaagtcaaaggacaaatgatccatgttccagaatcaaattccattttatttttgggctctccatgtgtggac

SEQ ID NO: 817253 - DNA, 98 bp, Homo sapiens
gcggatttgcaccccgtggggtggtgcacacagaacaacaaggtgttgatgccgccggacggaagatgagaatgtgcctactgctcctgatcctccaa

SEQ ID NO: 817254 - DNA, 98 bp, Homo sapiens
cgaacaatggcaaacagtacggcagtgaggatctttgtagaatttgatggctgtaactggaagcaacactcctgggtaaaagttcatgctgaggaagt

SEQ ID NO: 817255 - DNA, 98 bp, Homo sapiens
agccaccatcatcctgcgagaagacaactgtcatttcctgcgtgtggacaagcaggacttcaaccgtatcatcaagtctgatgccaatgcaagttact

SEQ ID NO: 817256 - DNA, 100 bp, Homo sapiens
ctggtcatggcgcagccgggcccggcttcccagcctgacggagagaagatgactgaggaggaggtggagaccgttctggcaggacacgaggacagcaacg

SEQ ID NO: 817257 - DNA, 98 bp, Homo sapiens
cttgcttctgagaacaaacgcaaaaggacagtaaactgtggaccttgaagttagcaggtacctggagtacaagagggtccctaacagcagaccacctg

SEQ ID NO: 817258 - DNA, 98 bp, Homo sapiens
ggggacccaggagtttcctgtgtccagcgctgccggagccgcctgagagctgtgtgtgggggacccaagtcctgagctcggaggcattttctggccag

SEQ ID NO: 817259 - DNA, 100 bp, Homo sapiens
gctggcaacgaaaatgagcctcgcgaggccgacaagagccacccggagcaggtttcagccatgccacagagctccggcagtcatgggcccgctatagcag

SEQ ID NO: 817260 - DNA, 100 bp, Homo sapiens
accaagaagcgctctgctgtacaagttcaatggcagcccttctaagaatctcattttcagcttctgccagagccagtagcagttgggaaagaaggctgtg

SEQ ID NO: 817261 - DNA, 99 bp, Homo sapiens
ctgaattagtttctggaggatctgataatcaagtgattcactgggaaatagaggataatcagaacacctacatctggacagtcagtatctacttgctcc

SEQ ID NO: 817262 - DNA, 99 bp, Homo sapiens
aagaatgtcccggattccactggggaaggtcctcctgaggaatgtcatccggcacacagatgctcacaataagaaatcatttctaccagttcggagaga

SEQ ID NO: 817263 - DNA, 100 bp, Homo sapiens
tgaacacctgaagctccccatcaagggaatgaacttcacaggaagtttaattagcattgacagcacctgtacagagatgggcaattttgacaatgctaat

SEQ ID NO: 817264 - DNA, 100 bp, Homo sapiens
ctacccaagaagcctatcagaatgaattaaagattgaaagtgtagaacgttccttcattctctcagccagggaatcttttaactgagccagtcggctact

SEQ ID NO: 817265 - DNA, 99 bp, Homo sapiens
agctggagcgcccagaggcgagccctggtggaggaagagttccagaaacgccgctggactgcgaggtctccctgtggtcgtcctggggactgtgcggag

SEQ ID NO: 817266 - DNA, 99 bp, Homo sapiens
ttggctccctgtagctatagcagccgcggcggttaagtatgcggcgccaggagctctgcggttggatttctcacgatgtccagtgttatctccatgtct

SEQ ID NO: 817267 - DNA, 100 bp, Homo sapiens
gcccggccgggtcgctgcggctgggctggaggtgaaacctttgtcctggggaatagtctggcccgctccttggaaccacactcagactcaatggactctg

SEQ ID NO: 817268 - DNA, 100 bp, Homo sapiens
ggggtggagcggattttctccatcgtggaacagagactagaggtgccttggaacactatgttaattgcctggatctggtaaacaagaggctaccttatgg

SEQ ID NO: 817269 - DNA, 98 bp, Homo sapiens
gaaacgcgagttggaggagaaggtcaaggcagtggaagattgcaaaagttgagaagctcaaaccattagaggtagagctgcgacgcctagaagacctt

SEQ ID NO: 817270 - DNA, 100 bp, Homo sapiens
gcgttggagcgcggaaatctggaaccgggatggcgacgtctacactgagtcggaggcgaaggccaacatagccgaggtagaggtctccatccctgccaag

SEQ ID NO: 817271 - DNA, 100 bp, Homo sapiens
gccgccatgggctcctcgcaaagcgtcgagatcccgggcgggggcaccgagggctaccacgttctgcgggacaaaactttcggtttgaagaataagaaag

SEQ ID NO: 817272 - DNA, 98 bp, Homo sapiens
gtttagtctcctcctcggcgggagccctcgcgacgcgcccggcccggagcccccagcgcagcggccgcggcagcagtgaggatgccagagttcatggg

SEQ ID NO: 817273 - DNA, 102 bp, Homo sapiens
cggcacccagacaggtggcgaaggcagaggataacagatcaactcctagcaatcatgatcggatacagcgtctgaggcaagaatttcagcaagcaaagcaag

SEQ ID NO: 817274 - DNA, 113 bp, Homo sapiens
gatgcccctcctccaccagaggactgggaggagcatgtcaacagacttatgaaaatatgcatcagtttaatactgtcttggaattcatgagatggaagcataggtcaaagctg

SEQ ID NO: 817275 - DNA, 100 bp, Homo sapiens
caagccccagccaagcaatgcaggaatatatcgcagtagttaaaaaactagatccaggttggaatcctcaggttctgtacagagtaatgagatgtgtgac

SEQ ID NO: 817276 - DNA, 98 bp, Homo sapiens
aatacttgacatctaaaatttttggtattgcagatgacgaaaatcctgccttgcttcgttgggcctatgcaagaacaataaatgtctatcctaatttc

SEQ ID NO: 817277 - DNA, 99 bp, Homo sapiens
cacagctcaaacgttgaaacacccacagactgccaagtgggacaactttctggcttttgaaaggctccttcttcaggcgcattgaacagtcctgggcac

SEQ ID NO: 817278 - DNA, 100 bp, Homo sapiens
tgagtatgggatctgatgatgctgcctacacacaagatctgttacctaaagcaataaaaaatggccagaggatcagtgtccgatgaggaaatgatggagc

SEQ ID NO: 817279 - DNA, 100 bp, Homo sapiens
ttgtgacagtctatatgtatcaccacccaacatcagcagccagcatcttctttattgaggaggaggcaaaacagattcagaatctgcagaaagcaggcac

SEQ ID NO: 817280 - DNA, 100 bp, Homo sapiens
gaggaaggcgctgatcccctgcaagaggttgcttctagaactgctggagttactgtttgacaagtttaatgctgtagccgctgcacactctgtggtcctg

SEQ ID NO: 817281 - DNA, 100 bp, Homo sapiens
tcgtagcacgcttgcttgcatcctggaatattctcaaccagaaaatcccgttttgtcaacctaatgaagcattcaaagaagacatatgactcttttcaag

SEQ ID NO: 817282 - DNA, 151 bp, Homo sapiens
ctctattactgtattatcaccaccccagatgacctggaggggaaaaatgaggactcagtggaactgctggtgttgggagcggcctattgccaattcatggacatgctcttccctggctgcattagtttgaagaaagtaaaatttcaagcaa

SEQ ID NO: 817283 - DNA, 99 bp, Homo sapiens
ctccgccgccgcctgaggaggcgagctagccgggagttacaccgccaccgccaggtgactattatatggttaaaaagattttggaggaaaacagttcag

SEQ ID NO: 817284 - DNA, 99 bp, Homo sapiens
gggcctactcgcccgccaccctgcgctgccgccgctctgaggagttaaaggagtgttggaggaagcagaattttacaatatcacctcattaataaaact

SEQ ID NO: 817285 - DNA, 100 bp, Homo sapiens
caggtttgtataacaaaggatttatttatctggatgtaccaatatctgatgacagttgtatagcagataccagtggaatggaagaacaggaaaaggaaaa

SEQ ID NO: 817286 - DNA, 100 bp, Homo sapiens
aagcaaaagatacggatcaaaaaagaaaagacatgaaaaacatactattcctttggtagtccagaaagaaacatgtgaattcatgacacctttgactctt

SEQ ID NO: 817287 - DNA, 98 bp, Homo sapiens
ccgggtttctttgatgcgacctcaggaaggagatgagatcgtaaagctgaaaattgaaatcatgaaagtagacaggactaaactgaagaagacaccta

SEQ ID NO: 817288 - DNA, 98 bp, Homo sapiens
cagagaacagcctcctggaggagaccctacactttgaccatgctgtccggatgggtaaaaagaacgtattctcatggtacttacagagctggcccaat

SEQ ID NO: 817289 - DNA, 101 bp, Homo sapiens
ccggctcaagtgtgtcaagcaaggaaaatatatgcagatgatgaacattcttaagccaattgcctttgatgttattcatttcatgtctcaactatttgatt

SEQ ID NO: 817290 - DNA, 100 bp, Homo sapiens
gcaggggctcccttctctgtaattggaaacacaatcagcgatctgaagataaaggttggggacaggcacatcagtgctcacaagtttgtcctggcagccc

SEQ ID NO: 817291 - DNA, 100 bp, Homo sapiens
atgtgtgcagactacatggcatctaccataggggagtttccagatgtcttggaatgcactgtatctcatgcagtagaaaagataaatcctgatgaaagag

SEQ ID NO: 817292 - DNA, 137 bp, Homo sapiens
cagactgttgaaaacaatcggcaaggggaattttgcaaaagtaaaattggcaagacatatccttacaggcagagagctgagatctgtatctgtggacctgaatgttgatccctcgcttcagattgacatacctgatg

SEQ ID NO: 817293 - DNA, 100 bp, Homo sapiens
catacggggatgtgatgttggagaactacagccatctagtttccctggggtcctaaaaaggtggggacgctgtggcgagaagccgggcttagctggaagg

SEQ ID NO: 817294 - DNA, 98 bp, Homo sapiens
tgtttggaaatgatacaattacctgcacgacacatggaaattggactaaattaccagaatgcaggggcactggtgaggtggattgatgatgaatcttc

SEQ ID NO: 817295 - DNA, 100 bp, Homo sapiens
ctcccgaagagaacctcccccgtacggataccggaaaggctggatacctcggttattagagagtacagttgtgaatttggctccgcgaagtattatgcac

SEQ ID NO: 817296 - DNA, 100 bp, Homo sapiens
aggggttcgggagaaccatagaagaggaagggccgtgtcttccgtggacagttatgacatgcaccgattacatccctcgctcatccaatgattatacctc

SEQ ID NO: 817297 - DNA, 100 bp, Homo sapiens
gcggaggagagaagatgccctgtcctcaatccagacatttaatgtggatgcaccatgccagaccgtggaagatttaacgaatggggttgtgatggcccag

SEQ ID NO: 817298 - DNA, 100 bp, Homo sapiens
ctgtggtggtgggctgttaactgaagaaacagcaagagattgactctaaagatgctattattttgcatcagtttgcaagacctaacaatggtgttccaag

SEQ ID NO: 817299 - DNA, 100 bp, Homo sapiens
ggaagcaacacatcggaaccagtcttcagaaaacaagaatgaactctggaagcccagccagggacaatgcaccttcacagagattctgcactaatctgag

SEQ ID NO: 817300 - DNA, 98 bp, Homo sapiens
ctgttgctcaccccgcaggagaacgagtccctcttcactttcctcggcaagaaatgtgtggttattcagcttctcaaggctggaaaagcgaaggaagt

SEQ ID NO: 817301 - DNA, 99 bp, Homo sapiens
ggagcgcgagagcttcgagcggactcaggcttttgcagcccaggaagacttggaaaagaccaaagaagagttaaaaactgtgatgtctgccccccctcc

SEQ ID NO: 817302 - DNA, 100 bp, Homo sapiens
gaatgggacgggaccctgcacctataacaaatcgggctccagggagtgtgagtggatgaggatcgcagtacggaacctgaccgattgcaggtgtttcaca

SEQ ID NO: 817303 - DNA, 98 bp, Homo sapiens
gggacaagtgaacagagtgaagctgctctcatctccaccagagatgattcctccccggggctgtgcttatgtctgcatggttcatcgacaagatgcat

SEQ ID NO: 817304 - DNA, 99 bp, Homo sapiens
caagcttaacttttccaatgtggaatcctgggccttcattgaatcccgcccattgtcagttcctgttaaagccatgttgaatatatctgaaagctgtag

SEQ ID NO: 817305 - DNA, 100 bp, Homo sapiens
accgctgctggaccacaaaccgctgccagaaaaatttctcactatgtgcaatagacactttggcagtgttgtggcacaaaccattcggactcaaaaaacg

SEQ ID NO: 817306 - DNA, 98 bp, Homo sapiens
gcattcctatctttctcccggaagtcaccattggagctcatcagactgaccgtgtcttacatcagttcagagagagccagcccctgggcaacaaagtg

SEQ ID NO: 817307 - DNA, 100 bp, Homo sapiens
tttgctatgtctctgagctgcgagtccaaacaggagctttacagaaatgcactgtatgagtggccattccaattttgtatcttgtgtatgcatcataccc

SEQ ID NO: 817308 - DNA, 99 bp, Homo sapiens
cggtgacagagtggagccatggctagaggttcacagctggagcaaagctgttgtttcacctgaggcagctgctgaaggagctgaagggactgagttgcc

SEQ ID NO: 817309 - DNA, 98 bp, Homo sapiens
aggctcggagtagtggagaagaagaagatgttgactctggaagctcccttgtctgccaaatggacaagacctggattcagataggagtggtaagctgg

SEQ ID NO: 817310 - DNA, 98 bp, Homo sapiens
agcctggagagcggcggtgctgggaggcccggccagctcgatcgcaggcttccacctggcggccatccagttacaacacagggatcacaacaaacaca

SEQ ID NO: 817311 - DNA, 100 bp, Homo sapiens
gatccagccgaagtactcgtcaaaaatagccaggaaaatttctaccttgaaccgtatctgaaagaggttattcgggaaagaaaagaaagagaagaatggg

SEQ ID NO: 817312 - DNA, 100 bp, Homo sapiens
agaagttgaaggaggaggagaacacagtggtttggtaactctcattcgacatccatctgaactaatgaatgttcctcttcagcaacaaaacaaatgtaca

SEQ ID NO: 817313 - DNA, 98 bp, Homo sapiens
ctgttccacttccagcagaagttcttgctggaggctgtaaggagctcaaaaagtgggatgagtttgaagatattttagaagagaggaggcatgtcagt

SEQ ID NO: 817314 - DNA, 100 bp, Homo sapiens
gggatctggcactgtggttcctgcatgaagacagtggctggcggtgcctggacgtacaagatcacctgctgttaccagctaccacccataacaagaccac

SEQ ID NO: 817315 - DNA, 100 bp, Homo sapiens
tccgcttgactcagctcaccgtcaccaggagactaaagtccatcaaaaacatccagaaaattaccaagtctatgaaaatggtagcggcagcaaaatatgc

SEQ ID NO: 817316 - DNA, 100 bp, Homo sapiens
agcggcagagggcttctgagatccagggtgtgaggctggagaaggcgttgcgaggagaagcaggtgaagcggtgagtgctggagatgcattatgtgaaat

SEQ ID NO: 817317 - DNA, 99 bp, Homo sapiens
ctcaaatgctgctcatggaagatccaaatccgaatggtcagtctgtagacgttgaagagacattgccatctgaaccagaaaatggagctcttttgcgat

SEQ ID NO: 817318 - DNA, 100 bp, Homo sapiens
tggcaggctgccatgacaaccaggcaatgctggatagataccgaattcttatcacaaaggccctgcttgatactcagaatcttttgcgtgcacaaatcac

SEQ ID NO: 817319 - DNA, 98 bp, Homo sapiens
gagattgccgtgaacctccggcccggtctgagctctttctactcggagctgatgaaaggactgggtgcaggggggcgcctctgggagctcctggagag

SEQ ID NO: 817320 - DNA, 100 bp, Homo sapiens
cttaagctggtggagaaactcgcgtgaccgaattacaagttttagaaaatctactgtcaaaaaagaaaaacctcttattcaacatcctattgattctcaa

SEQ ID NO: 817321 - DNA, 99 bp, Homo sapiens
ctgggggccggggcgcgtcgcaggtttctctggaaacccccctggtaagtgtggaggaggcgggacactctgacccaagacgaaaggcctgtagctcca

SEQ ID NO: 817322 - DNA, 113 bp, Homo sapiens
gccgcagcagcagcggcagtcacaggcacatcagcaaagagggctgatcccttatccaacatggttctaaccttcagtactaaagaagatgcagtttcctttgcagaaaaaaa

SEQ ID NO: 817323 - DNA, 133 bp, Homo sapiens
tcaacccagagctgaaccagaagggctacaatgtcaagtccgacgtctggagcctgggcatcaccatggtctcctctgagcctccggcctccataagacccaaaacagatgacacctcttcccagtcccccgc

SEQ ID NO: 817324 - DNA, 98 bp, Homo sapiens
ttcctgctgacttacgcttgtttgaggggcctttacaacaactaaacggacaggcattccagccccacgggaattttcagtaactgtctcaagagaga

SEQ ID NO: 817325 - DNA, 99 bp, Homo sapiens
cgccagagacccatgttcatgtctgaggtgatccaggcctatgaaactctgcatggcagtggagtgggagtgaagaagctgtgtgaactgcagcctgag

SEQ ID NO: 817326 - DNA, 100 bp, Homo sapiens
aatagccagctccccagaaatgaacctgcccacggtgtccgcgctcagggtatccatcatcccacgtggcaaaggactaggttatgctcagtatttacca

SEQ ID NO: 817327 - DNA, 51 bp, Homo sapiens
ctggacccggaccggttttggacctcggaccacaatgccagcatggacttt

SEQ ID NO: 817328 - DNA, 99 bp, Homo sapiens
tacatctgaggcatctgtgtaaaaggatctgcatctccaatggatactgaggggtttggtgagctccttcagcaagctgaacagcttgctgctgagact

SEQ ID NO: 817329 - DNA, 75 bp, Homo sapiens
gacctgcgctgcttcctacacagcctcctgtcgtggaccaactgttgccaatcctgagctgttccgcaagttcgg

SEQ ID NO: 817330 - DNA, 100 bp, Homo sapiens
actgaagataggcaacaagatgatgagggcgcggcagtatccttggggcactgtgcaggcctggcatcctcgctacaacctcattgttgtgggccgatac

SEQ ID NO: 817331 - DNA, 100 bp, Homo sapiens
ttggtgcccctgggcatcaccaacatagccatcgacttcggggagcagccctccaagccacaaaactgtggtgaatggaaaagaatgtataaacttcgcc

SEQ ID NO: 817332 - DNA, 100 bp, Homo sapiens
gtgagcgtggggaatctggaagaggctggggagtctgtgtccttccagctgcagatacggaggctaatctgtgaggtgagcttatgtaagatcaacagca

SEQ ID NO: 817333 - DNA, 100 bp, Homo sapiens
aggagtaaatggccaaatcgatgctgctgtagaattaaatgaatccacattcatctcaatggaaggatcctgccttaagtcaacttatttgtttttgccg

SEQ ID NO: 817334 - DNA, 100 bp, Homo sapiens
ttaccagtggataatagtctactgtccaattctgtttactctgaattaccatcagctgaagggaaaatgaaggtttgtggtaaatatgccagctctagaa

SEQ ID NO: 817335 - DNA, 98 bp, Homo sapiens
aaagaagtgacttcactgtttaacaaagatgatgagcagcatctcctggaaagatgtaaatctcccaagtccaaaggcttgccaattctgtaactcct

SEQ ID NO: 817336 - DNA, 98 bp, Homo sapiens
agggctccccagccatgcttcctgtacagcctgcaaaactacggagccggtgggagaggagagcatctccgacgcagagaaggtggccatggatctca

SEQ ID NO: 817337 - DNA, 99 bp, Homo sapiens
gaaacgtgataagaagcacctggatgagacatttgctacagcatcccacattaagtcaacggtgaaagctggaatagaagctcattcggaagccaaaac

SEQ ID NO: 817338 - DNA, 98 bp, Homo sapiens
aggattccaagtaactcttatttgaaagttcgtcgctgcttcctgtgctccaggagaggacatctcctgtattcctgtccagcccccctttgcgaata

SEQ ID NO: 817339 - DNA, 98 bp, Homo sapiens
tccagccttccaagctctactgtgacttcagagacactgccaagcagccttagccctagtgtagagagcatctgttaagaacatcttcagccagccgg

SEQ ID NO: 817340 - DNA, 100 bp, Homo sapiens
cgggtttgccgccagaacacagggacgactggagtgagcactggcctgggagtctgaagattgtgccttcagacctacttcgtcacttactagctggcga

SEQ ID NO: 817341 - DNA, 50 bp, Homo sapiens
gtgtacgagctgtgcgaggtgatcggaaaaggtgtggcgaaatcttgttt

SEQ ID NO: 817342 - DNA, 100 bp, Homo sapiens
aaggcctaagaattttggcattgggaatgaattttatagcaggatatctgattcttataacaaataatgaagaagaatctttttggctgttagatgctct

SEQ ID NO: 817343 - DNA, 100 bp, Homo sapiens
gcaagacctaaatgagcctcttgccaaagtgtcccttttaaaagatgtgtgcaacagcaccgatcttccggaagtcgagatcattagcctgctggaggag

SEQ ID NO: 817344 - DNA, 98 bp, Homo sapiens
tggaaatggtgaataacttcagagctctgcgcagtgagacggagctgctgctgtctgggaagatggccctgatgaagtagtggagcagagatctggtt

SEQ ID NO: 817345 - DNA, 100 bp, Homo sapiens
cgcgaccagagccattggagggcgcggggactgcaaccctaatcagtttaagtgctgtggggctgctaactacacagattgggagaaaatcccttccatg

SEQ ID NO: 817346 - DNA, 99 bp, Homo sapiens
tccacctggtgcaccgcttcaacgcccaccacggggacaccaagctggttgtcttcttgcctgccctgtgtcgtaaaatgggggtcccttactgcatta

SEQ ID NO: 817347 - DNA, 101 bp, Homo sapiens
cccagccctggagaagctcaaaggcaaaggacagtcattttgtttactcattcagccctgttgcaggtcccaataaactcttcataaggttgacagaagca

SEQ ID NO: 817348 - DNA, 98 bp, Homo sapiens
cgtttcatacagaagtacctgcttcagagacatgagaagattcatactggcatggaagaggagatggttcgtgttacgcagtggccgtttaactggag

SEQ ID NO: 817349 - DNA, 100 bp, Homo sapiens
aagaagtacaatagcattcgcgaactcccccactggaaaggattctgaaagaaatgaagtcagccctcagaaatgaagttgactgcctgctggctttctg

SEQ ID NO: 817350 - DNA, 99 bp, Homo sapiens
cagcatgccttcgctgcgatgcctgtataacccagggactggcgcactcacagctttccagatgatgtgatgccagccacttactgtgaaattgattta

SEQ ID NO: 817351 - DNA, 98 bp, Homo sapiens
tgaatatggccgtgatcgtgcccaaagaggagggcgtcatcagcgtctccgaggacaggttgaactcccaccacctgatcttggaccaagttctgcac

SEQ ID NO: 817352 - DNA, 100 bp, Homo sapiens
cacgtgccccgggctgtgtttgtagacttggaacccacagtcattgacaagtgtcccccagccccacctctccctggtgctgcaccctctgtggtgttga

SEQ ID NO: 817353 - DNA, 98 bp, Homo sapiens
ccgatctcaaagactttctggagagcatccgcaaacattcagacaaaattggagagactgccatgaagcaagtagttattactagtaaaagcggagag

SEQ ID NO: 817354 - DNA, 100 bp, Homo sapiens
gctgcacagtagagaggcttccttaagacatttgtccttgaaactgcaccaaactcttggaagaacccagaacgtcttagaccatgctcagcctccaagc

SEQ ID NO: 817355 - DNA, 99 bp, Homo sapiens
caactttgcttccaaaagaagttaccaacatttagaatttctacttattctgagttctggacatggcaagacatgtgccactctatcgggcactgctgg

SEQ ID NO: 817356 - DNA, 98 bp, Homo sapiens
tctcttccctcgggtgacttgaggtgtacaagggagaagaagccacattccaaatctcaggcctccagaccaacacagactacaggttccgcgtatgt

SEQ ID NO: 817357 - DNA, 100 bp, Homo sapiens
ccagaccattgattcccgactgaagaccccatatcatgtgaacctcctcctggctggctatgatgagcatgaagggccagcgctgtattacatggactac

SEQ ID NO: 817358 - DNA, 100 bp, Homo sapiens
gcgcggaaccatggccgatgggggcgagggcgaagacgagatccagttcctgcgaactaaacgaggatgcagtcaatcagatggccgttactccctttcc

SEQ ID NO: 817359 - DNA, 99 bp, Homo sapiens
gactggcccagcagatggagaatagaccctctgtccaggcagcattaaaacttaagcaggtaagaccattgcaattggaaaagttctgaaactggttcc

SEQ ID NO: 817360 - DNA, 124 bp, Homo sapiens
ttggtttacgaaggactgcagcgaagtgaactagcgatggataagtacagggaccatgcctggccggatgctgccgcctggcttcagtgccatctgcatgtcctcagggatgacaaaggactca

SEQ ID NO: 817361 - DNA, 100 bp, Homo sapiens
cagtaccttcttcaagagaaatggagcccttctccaaggctcacttcatggactcactttgcgtgcttgttaaatgtgctgtgttgctcccaagaccatg

SEQ ID NO: 817362 - DNA, 98 bp, Homo sapiens
agcttcacttcagaatcaaccaaacagattctgaagaatatttctgtgtaaaaagaattttctcagggggagatcaaagcttttcacattactctagt

SEQ ID NO: 817363 - DNA, 100 bp, Homo sapiens
tcctgcagccattaatgatcccaagataatcgcctcaggcatggcgtacgtggagcggatgaactacgtccaccgggaccttcgtgcagccaacatcctg

SEQ ID NO: 817364 - DNA, 100 bp, Homo sapiens
ttcacaatcagtgaccacccagcagaacagcgtgggatgttcacaaaggaaagggggctgtatacagctttgatccagtagggtcttaccagagagactc

SEQ ID NO: 817365 - DNA, 100 bp, Homo sapiens
ctgggatcttttttcacatccagcccatgcggactgagcagccaaagcttgacagagccgcttgatggcattgaaacgaatgggaattgtaagcgactat

SEQ ID NO: 817366 - DNA, 90 bp, Homo sapiens
gctgctcttgcctcagcggctaccaaagccaagtgtaaggcaaacattggtgggcaccgatcttcctgttcattctgcaagaacccaaga

SEQ ID NO: 817367 - DNA, 100 bp, Homo sapiens
acaggcggtgttggacaggcttacctttgactaccaccagaagctgcagggcaagccacagagccatgagctgattacatgaagcagatgacatttgaag

SEQ ID NO: 817368 - DNA, 100 bp, Homo sapiens
tcgaagcggatttccgattgaatgaaatcttacaggctggtgttaaaggaacttcggaatcccttaaaggtgtgaaacgcaaaaagatcgtagctgagaa

SEQ ID NO: 817369 - DNA, 100 bp, Homo sapiens
ccggaaggacctgctgccgcagatggacgaatgcgtattggagatgaactcttagagatcggtcgcttggttatcggacagaatggaatcctctccaccc

SEQ ID NO: 817370 - DNA, 98 bp, Homo sapiens
gtctcctgggttcaagcaaatctcctgcctcagcctcttgagtagcctgagtagctgggactaaagactgctaaggagccctgtatggctaagtttgg

SEQ ID NO: 817371 - DNA, 98 bp, Homo sapiens
gagaacagtgacatacaaagccttttatccctcacgtcagaggagtacacagatggaagtactagccggacatcatgagtggctgtcgggtattcatc

SEQ ID NO: 817372 - DNA, 100 bp, Homo sapiens
ttggctcttcctcaatgcttgtgtgggatttaagtgccctgtatgctcaaaatttgtatcctcagatgaaatggatttgcatcttgtaatgtgtttaaca

SEQ ID NO: 817373 - DNA, 98 bp, Homo sapiens
tacaagatggaacaatagttttaatgggaacatacgatgatggagcaaccaacattcctctgaatattgatttgctgaatagcccagacttattggaa

SEQ ID NO: 817374 - DNA, 99 bp, Homo sapiens
tggaatttgtgcaatgtttagccaacccaaattaccttaattgattattacaaaaccggtatcatcaattgtcctgatggcatctctatcccagatctt

SEQ ID NO: 817375 - DNA, 98 bp, Homo sapiens
tcacagatgatacctttgatccagaacttgcagcaacaataggacatggatttgattgacatactttggaggcaagatatagatcttggagtaagtcg

SEQ ID NO: 817376 - DNA, 98 bp, Homo sapiens
atctgcagctagtacctgtattcttaccattgaaaatgaactgagcgccaatggacaatatcaatgtcttgctgaactgtccaccagccccatcacag

SEQ ID NO: 817377 - DNA, 100 bp, Homo sapiens
acaggtgatagattatacttgtcgagtttgtcaaatggcctttgttttctcaaggatgccccagtgaagttgtgtgactttggatttgccaagattgacc

SEQ ID NO: 817378 - DNA, 98 bp, Homo sapiens
gagccagaggaggagatcctgggatcagatgatgaggagcaagaggaccctgcggactactgcaaagagcatgcttgagaagggaggataaaaacttt

SEQ ID NO: 817379 - DNA, 99 bp, Homo sapiens
cgcttcaatgatgggaaggtggatcccgccgggaggtactttgctgtatgagcccagaggacctggtcggcccttgtaccaaagaagaatctcatctag

SEQ ID NO: 817380 - DNA, 100 bp, Homo sapiens
tcagaatgccaaatgtgtttgcatgctggggtgaaaatcctatttataagagtgccgtaacaactgtggtcaatccgaagtatgagggaaaatgagtact

SEQ ID NO: 817381 - DNA, 100 bp, Homo sapiens
gcactttgggatccaaagtaggataccaagttcgttttgatgattgcagttctaagcccccattcactggggagaatagaaagaaaacaattgacaaaat

SEQ ID NO: 817382 - DNA, 100 bp, Homo sapiens
gagaaaacagtggtagcagtagtattggcattcccattgctgtgcctacaccttcgccacccactattggaccaggtgttttgtccagtctgagtcctgt

SEQ ID NO: 817383 - DNA, 100 bp, Homo sapiens
gaagaagcatatacttttgaaggtgcaagatactatataaagttttgatgatgatggttcagaatttcatgaacatatatttctggagaaacacctggag

SEQ ID NO: 817384 - DNA, 99 bp, Homo sapiens
agaaacgcaagtccatgtacacgcgagattataagaagcttgggttcatttgttcctttctgccgaaattctccattcatatagaaaccaagtatgagg

SEQ ID NO: 817385 - DNA, 98 bp, Homo sapiens
cctcctgaccctggtgaacagatcttcaacctgccaaaaaagtctcaccatgcaaactcccccacagcaggtgttggtgaaaatttgactgacccatc

SEQ ID NO: 817386 - DNA, 100 bp, Homo sapiens
ctcagatgatagtaaagatcaaaagaattcgaagggagttggtaaacgctggatgacgcggcatggcaagaactgcaccgcaggggccgtctacacctac

SEQ ID NO: 817387 - DNA, 99 bp, Homo sapiens
ggcattctcttagctgacagaaggggcacatggccatcccgagaggccccttcacagatgtagtcactacaaatcttaaattgcgaaatccatcggata

SEQ ID NO: 817388 - DNA, 100 bp, Homo sapiens
tggagccagcaataattatcacaattactgatgggagcaagttgactaccaccagtggagtccaggatgagcaacgcacctcttgctttttcctccaaag

SEQ ID NO: 817389 - DNA, 98 bp, Homo sapiens
atttccagtgtgttgggctaaaggttataatcaccaacagatgagtgaaggacacaggcagaaatctgaattttataaccgcacagcatctgaatcaa

SEQ ID NO: 817390 - DNA, 100 bp, Homo sapiens
ggaaagacgacgatgttgcgagcataatgaagaaatacctccagaagtaggaaccagttcagctccagagaaagagacacattggaaatgacatcgtggc

SEQ ID NO: 817391 - DNA, 100 bp, Homo sapiens
acaggcttccagtacgagctggttaggaggcacagggcgtcggacctgcacgagctgtctgtgcactggtgattgctgcggtgtttgaccgagacataaa

SEQ ID NO: 817392 - DNA, 99 bp, Homo sapiens
cacagccagcaccgcacgccctgcaagggagttaaagccttccatctgaagtatgatgaagttcgtctggatccaaatgttcagaaatgggatgtaaca

SEQ ID NO: 817393 - DNA, 132 bp, Homo sapiens
gcagccgacccctgccggccggtgtccccaccgccatccctgacccatggcgctgaagaggattcagaaacttcagtatcagacacagcacagcagccatctgaagagcaaagcaagtctcttgaaaaaccg

SEQ ID NO: 817394 - DNA, 100 bp, Homo sapiens
ttattccactcttcggcgaagctttacgttcatgtaaacagcatgacgtgaggccgtggatgcaggcattaagccgttcttggaacacctcacagcttgc

SEQ ID NO: 817395 - DNA, 100 bp, Homo sapiens
tctactgcaacttcaagtagtggaaggagtacagggaagtctataagctttgcaacagaattacagagtatgatttgtcatggatgatgatgatgactcg

SEQ ID NO: 817396 - DNA, 100 bp, Homo sapiens
ttgagatgtgctattttgacaacacttattcatcttgttcaggcagagatcctacaagaatccaggatgatgatcccagattgccagcgcaggttggaag

SEQ ID NO: 817397 - DNA, 100 bp, Homo sapiens
gtccaacagagtctaggctgggttcattacatgattcatgagccaggcaaatgaagaggattcttccagttctctagtgaaggatcacctttttcagcaa

SEQ ID NO: 817398 - DNA, 98 bp, Homo sapiens
atgaacccaacctagtgggtgtaatacatcatgaactgcagggtaatgctatgggctatgtacgaatgataagatctggtggtcttcattgtagcagc

SEQ ID NO: 817399 - DNA, 98 bp, Homo sapiens
gagaactgaagtgcagccatcaggtggaaggaacgccagcgcctggagaccatcctgaacctgtgtgccgaatacagccgggctgatgggggacctga

SEQ ID NO: 817400 - DNA, 100 bp, Homo sapiens
acaaaataggaatatttccaatttcatatgttgaggtcggcagataggatcaccattcaggaaaatgaagtttctgaagatggagtctcgagtactgtgg

SEQ ID NO: 817401 - DNA, 98 bp, Homo sapiens
aggaagtggaaagagagcaaggggaaggatcgggagtacacagacatcatccgggtgaggtggctttgaccccgggttgcccggccagcacgaccgag

SEQ ID NO: 817402 - DNA, 99 bp, Homo sapiens
ccggcttctcccctacgcgctacacaagtggagctccttttcctccacctaccttcccgagatggacaaccggaaattttctacacattttggaattca

SEQ ID NO: 817403 - DNA, 98 bp, Homo sapiens
gggagtcatcatgagcgatgttaccattgtgaaagaaggttgggttcagaagagggtcactgcttcaaccacctgtgagaaattagaaaaagccagga

SEQ ID NO: 817404 - DNA, 98 bp, Homo sapiens
tcttcatcgtgctattcctggtctacatcctgcgggtgcctttgaaaatcaacgacaacttgagcacaggggaaaggccatacaaatgtcagacctgc

SEQ ID NO: 817405 - DNA, 98 bp, Homo sapiens
cgagcccgacctcgggcgccccgccggtcacctccgcgcggacaccaggcctcagagaaccatggctactgccaagggaatcgccataggcatcgacc

SEQ ID NO: 817406 - DNA, 100 bp, Homo sapiens
tacgcctttctcatatccactgccaaagggaccacatcagacaacagtcagcgctttcgagaaacctgttttgcatttgccttgacaccacaacaagtgc

SEQ ID NO: 817407 - DNA, 98 bp, Homo sapiens
acagatggctccaagggaatgcagtgttaacaattagggttatgtaccgaaggactctaccgtgtcagcgggaataaaactgaccaagacaatattca

SEQ ID NO: 817408 - DNA, 100 bp, Homo sapiens
gcaggagcaggaggaattgctggtgccttcattcatgaaaagcatgcccatacgattaaacctgcaggcagaggaggtggacacggtggacgtctccggc

SEQ ID NO: 817409 - DNA, 100 bp, Homo sapiens
acacagcagggcggaggaaagtgcagcgcgttccttcacctcgggcagaataactttgcagaagcccacaggttcttcacagagatcttaaggatggatc

SEQ ID NO: 817410 - DNA, 100 bp, Homo sapiens
aatgaaaggagattccaacctacttcagtcttcaggaaccagtattactgtggacatcgccgtcatgggcgaggcccacggcctcattaccgacctcctg

SEQ ID NO: 817411 - DNA, 98 bp, Homo sapiens
ctgagaagcacctggatattcctaaaatgttggatgctgaagaaaacctttccaacctatgagagaaagagatgtgaagaaagaagacgggtcataga

SEQ ID NO: 817412 - DNA, 98 bp, Homo sapiens
gtacgcctgtggaacgggggcttttcatccaatttgcacctacattgaaattggacatcatcctgagagcttccatatggctgggaaaaaatcgatga

SEQ ID NO: 817413 - DNA, 100 bp, Homo sapiens
cgcggacctgcggactagcgaacccggaggtggtattaaagataatcaaacattatcaagaagaaggacaaggaactgaagttgttcaaggagtgctttt

SEQ ID NO: 817414 - DNA, 100 bp, Homo sapiens
cccatcacggatgacagcaccagcttgcataaattttcttataaacttgagtatctcctgcaaatgtatcggcaagcagtgtaaacggaggacttgggga

SEQ ID NO: 817415 - DNA, 100 bp, Homo sapiens
acctataactacaacatgagaggaggtgcttatcccccgagagaataccttctgcctcctgagacacagcctctccatgaggtggtgtacttcagtgctg

SEQ ID NO: 817416 - DNA, 100 bp, Homo sapiens
aagttcgaaggcacgatatgcgtgtccatccttaccaaaggattgtgaccgcagaccgagctccttgacctgtttatggtttgggattggtctacttacc

SEQ ID NO: 817417 - DNA, 100 bp, Homo sapiens
gggtcagtctgggagaagaaagaaaattctgcgccaaatgggaaaacccttaaagtctgcatagttttgcttgtcggcctccggtgtggctgtctctgat

SEQ ID NO: 817418 - DNA, 100 bp, Homo sapiens
gtcagagacgttcccagatttcgtcgatgcctgtggctacagcgacccggaggatgagagcaagcataaatgcagttccaactacaacgaagattttgtg

SEQ ID NO: 817419 - DNA, 98 bp, Homo sapiens
attattgcttttggtccatggatgaatctaacactacaaaatacgctggaaccagcacctatgacagaagatctgctagaagagcagtctgaagtttt

SEQ ID NO: 817420 - DNA, 100 bp, Homo sapiens
cgaggggagcctgatcctatcgttttgacgccagatggatgatgtaatcgatgacatcattagcctagaatcaagttataatgaggaaatcttgggcttg

SEQ ID NO: 817421 - DNA, 100 bp, Homo sapiens
ctcatggggatcagcaggatgatggcccagcaggtccagcagagcgaggaggccatgcagtctctaggaaatgggtcctgatgaatatgaagagatggaa

SEQ ID NO: 817422 - DNA, 100 bp, Homo sapiens
gcagtatcccagccaaatctcgaaccttttgatggaacaaatacagccagagcagtgcacgaaaagcagaaatttgatatgatcaaggatcaatttttaa

SEQ ID NO: 817423 - DNA, 100 bp, Homo sapiens
acacaagtgtgaggagttgctaaatgctcagatcagaagcaatcaagggagcagttgttggtattgatttgggtactaccaactcctgcgtggcagttat

SEQ ID NO: 817424 - DNA, 100 bp, Homo sapiens
cacagagttagagagagggatggtggagtcttttagtcctgctatacagctgcaccttgtacatcaagctccatgtaatgttcctccttacctctcaaag

SEQ ID NO: 817425 - DNA, 101 bp, Homo sapiens
cagccccacctgctgaggccgatttgcactcggggagcagcaatgatctgttcacaaccgagatgagatatgatatggtccggaaaaagaacccccctctg

SEQ ID NO: 817426 - DNA, 99 bp, Homo sapiens
tgaagaaggcgcatcactcccagctgcgcaaagcttgcgaggtggcgttagtttggaaattttagcattcaggtgccaggaatgcagatgggacagcca

SEQ ID NO: 817427 - DNA, 131 bp, Homo sapiens
ccccttcgagagaattgtggaagtggggttgccagatcaaacacaagacacccagttaaaattcaactgtaggtagctacagcaagctgggtagcaggcagatccaaaggatatcatgaagtttccagggc

SEQ ID NO: 817428 - DNA, 99 bp, Homo sapiens
gggacgctctcagctctcggcgcacggcccaggagatctattgggaaactgattataaccactcgggcaccatcgatgcccacgagatgaggacagccc

SEQ ID NO: 817429 - DNA, 100 bp, Homo sapiens
gagagagacgagccgccctgataatccagcagtacttccggggtcagcaaactgtgaggtggtcattgggactcccacacttaaacaaagaaaggaaatt

SEQ ID NO: 817430 - DNA, 98 bp, Homo sapiens
gagaagcctgaaaagtcgcagcgagctggagccgccggagactgctgtgattgcacctgccatcttatgcagaaatgacctgaagacagactgaaaca

SEQ ID NO: 817431 - DNA, 100 bp, Homo sapiens
atggaatttgcaccaaattgaaaacatctcccaatgaagcctgcctagggtagttaaaagacgagtgaatgctctcaaaaacctgcaagttaaatgtgca

SEQ ID NO: 817432 - DNA, 99 bp, Homo sapiens
caagccggaggactgtgctgtgcctctctcgcccacattttccccaagcactctcaggaacctggcaacaggtcatcatggtcacaggagaccatccaa

SEQ ID NO: 817433 - DNA, 100 bp, Homo sapiens
gcacagccgatgtcgtccagtccgaaagaaaccaccttctccagcagtactccaaagattcaggtttactcacgtcatccagcagagaatggaaagtcaa

SEQ ID NO: 817434 - DNA, 100 bp, Homo sapiens
actctccttctcaccgttccgggaacaaatgctagatacctgagatctgtatctgtggacctgaatgttgatccctcgcttcagattgacatacctgatg

SEQ ID NO: 817435 - DNA, 98 bp, Homo sapiens
cccctaccaaggatacccacagtacggctggcagggtggacctcaggagcctcctaaaaccacagagatcccagaagacccacttgtggctgaagagt

SEQ ID NO: 817436 - DNA, 100 bp, Homo sapiens
tcctaacgattctgcttctgacattgcaaagcatgtatatgacaattggccaatgggaatggcaaaactctattcagaagaatgcaggacttgcatttat

SEQ ID NO: 817437 - DNA, 100 bp, Homo sapiens
gtagacagtggcctcgagaccctgcctgcctgaggaggcctcggttggatgcgaaggagctgcagcatccagcatacgatgaggcctatgctgaattcca

SEQ ID NO: 817438 - DNA, 100 bp, Homo sapiens
gtgggcagcagagggatggctgctcagctgctgactgatgaggcactgccagagactgctgctactttgaaacgtacgatagaggccctgatggacagag

SEQ ID NO: 817439 - DNA, 99 bp, Homo sapiens
acactgggtctgactatttctgaacaacaagcagagttgattcttcaaagcgtatctgtgaggtctatagccggaaccccgccagcctactggaagagc

SEQ ID NO: 817440 - DNA, 98 bp, Homo sapiens
acactgcctgtcgcttgtcttctattcaccatggcttcttctggtgagaaaccctatcgttgcaacatctgtggggcccagttcaaccggccagccaa

SEQ ID NO: 817441 - DNA, 100 bp, Homo sapiens
caaactttgatctacgacgccctggagagaccgcggggctgggcgctgctttaccacgcgttggtgttgctatcaagatcatagataagacccagctgga

SEQ ID NO: 817442 - DNA, 51 bp, Homo sapiens
gcccggtccgcccgcggtgagagagagaacgaggtgctcaaagtccaactg

SEQ ID NO: 817443 - DNA, 100 bp, Homo sapiens
ggaaaatgatgaagttctggttgctggatttggtcgcaaaggtcatgctgttggtgatattcctggagtccgctttaagatggtgaatgtgtaccacgta

SEQ ID NO: 817444 - DNA, 98 bp, Homo sapiens
aatgattatcgagtagttaaccaatttgccagacattatcagactggacagcctatatatgcaaacagatttgcagtaccaacctatgcagccaagca

SEQ ID NO: 817445 - DNA, 98 bp, Homo sapiens
agtttaagggtactttggtgcatgaagctcaactcaactatttctacatctctcctggagctcatttagaggcgagttttgaggaggtagagaacaac

SEQ ID NO: 817446 - DNA, 100 bp, Homo sapiens
tgaaattaccaactgctttcctttccctcagcacacagaggatgatgctgactttgatgaaggaacttagtgatttggcccgtgaccctccagcacaatg

SEQ ID NO: 817447 - DNA, 100 bp, Homo sapiens
tctccgccctggggtcattgtcaggaaagattcagatgaggcagacttggtgctggcgaaagaggcaaatatgaagtgtcctcaaattgtaattgctttt

SEQ ID NO: 817448 - DNA, 100 bp, Homo sapiens
tgaacccagaggtcgtggaggtggccgtggaggcagaggtggcatgggcaccagtggcagttcgcagcctccaggacttggctcgcatcgccatccgggg

SEQ ID NO: 817449 - DNA, 100 bp, Homo sapiens
gtcgcttgggggccacggcgcggacgccatgacctgcgaccgcatcaagcagtccgccagcggaaccaagcggcgcgtgttcatcatcgagaccatgggc

SEQ ID NO: 817450 - DNA, 98 bp, Homo sapiens
cccaccatggctctgaagagaatccacaaggtcttgctcagtgtgcagaactctgctggcagctgagaggggaagccggaaagaggcaagttcctggt

SEQ ID NO: 817451 - DNA, 98 bp, Homo sapiens
ctgagagccaggcggaaggacaggagcagctcttcaaactcacagacaacatacaggacgaattgcctggcgtttccttgaccatgcaggcattttcc

SEQ ID NO: 817452 - DNA, 100 bp, Homo sapiens
aaggagagcttgaagcaagggaccttgttatagaagccttaaagttttctggatatgccgcagaaggatccgtgccagaagcaagcctgtgagatacaga

SEQ ID NO: 817453 - DNA, 100 bp, Homo sapiens
tgtagaagacatgtggtgtatataaagtttgtgatcgttggcggacattttgacttcaggcccgcatagctcataggatacaagaactggaaaatctgcc

SEQ ID NO: 817454 - DNA, 100 bp, Homo sapiens
atttcactcccccaggccacagtcacaccccccaggaagctggcagagaggctgatgacatcgtgaactggctgaagaagcgcacgggcccggctgccac

SEQ ID NO: 817455 - DNA, 99 bp, Homo sapiens
tcgagctgaggaggccggctgcagccccaagacagagcgctactcctggcagtgcgtcaatcagagcgtcctgtgcgaacctgtggcatattccttgga

SEQ ID NO: 817456 - DNA, 98 bp, Homo sapiens
tccactgtcctcatcctagtgggggttggcttgcccatttcctctatgtctgctccaatgaggatctccctgaagttgagctggtgagtctgctagaa

SEQ ID NO: 817457 - DNA, 99 bp, Homo sapiens
tttaagtctggagcaggcactgagctgtctgtgcgcggaggagtttgcaaaccaaagctgatcagcaagtcaaacagcaggaaatctaagtctcctata

SEQ ID NO: 817458 - DNA, 100 bp, Homo sapiens
acaggaacaatattgatgatgtagtaaggtacttggaaaaatggacaaggattgtgaaatgaaacgcaccacactggacagccctttggggaagctggag

SEQ ID NO: 817459 - DNA, 98 bp, Homo sapiens
gccgcctcttggtttgcgtcctgcactgaaaggaaatgacggattttggatttcagtcataatcggttgtctaactggaacatcagcttggaatcaca

SEQ ID NO: 817460 - DNA, 100 bp, Homo sapiens
agtcaacccggagcgtgaggacagtgagactcgaacaataacaacgaacttgatgcaagtgataggtttgccaaggtcagacctctcatcatccggatga

SEQ ID NO: 817461 - DNA, 99 bp, Homo sapiens
gcagaagatctattttgcggatcagatgtcaccgggtgcgcatcaatgtacctccacacagagggcttctctgggccctctccaggtgacggggccatg

SEQ ID NO: 817462 - DNA, 100 bp, Homo sapiens
gttaaggagcttgatttgtttttggcatactacgtgcaggagcaagcaattctgtggtgttcttggtcacacatttatggagtttctgaagggcagtgga

SEQ ID NO: 817463 - DNA, 100 bp, Homo sapiens
attccccttacttggatacaaccaggaactactgttctcaactgctcccatgacttcctgtcagttcctcgtctcctcattatgaaagacatggtcagac

SEQ ID NO: 817464 - DNA, 100 bp, Homo sapiens
gggctgtgccgggcggagagaactcagcgaggattctgagtccccaaagctccagagatagatccagtagagtgtttggtggcagataactctgtaacag

SEQ ID NO: 817465 - DNA, 101 bp, Homo sapiens
cacacttgcctcgccgaccgccatttcacatccagcagaggaggcgggggcagccgctgagacggtttttcacaaggaccagtcctgcctctgttgtagaa

SEQ ID NO: 817466 - DNA, 100 bp, Homo sapiens
gctaccccatgccatcaacctgcgtgaggtcaacctgcgcccccagatgtcccaggctatgactttgcagccgtcctggagtggttcgcggagcgtgtgg

SEQ ID NO: 817467 - DNA, 100 bp, Homo sapiens
ttagcaaaagttcatctccttctgcatccttaactgagaatgaggaacctggcttctgtatttaccatgtacctggagcattggtttggcagctgaacca

SEQ ID NO: 817468 - DNA, 140 bp, Homo sapiens
ctggaccccggaggcagcagggctggaggcggtggcgggcttcagggcaacttcacccggccggctgcggcgtggaatgatatggaacctagcaaagctgttccactgaatgcatctaagcaagatggacctatgccaaa

SEQ ID NO: 817469 - DNA, 98 bp, Homo sapiens
aagcctattgctacaacggcatgtgccagtattatgatgctcaatgtcaagtcatctttggctcaagttgctccttgagggcaggacagttcttatgg

SEQ ID NO: 817470 - DNA, 98 bp, Homo sapiens
gacttctgccatgacttctgccacagattcactgtgtaacctggggtcatacagcagatggaacaaaaaaaattacaacaaggaattcctccatcagg

SEQ ID NO: 817471 - DNA, 98 bp, Homo sapiens
aaaattctgaactcaggacttggcaagcagaaggagaagacagcctgaagaagatgcagctgatggagcttgcgattctgaatggcacctacagagat

SEQ ID NO: 817472 - DNA, 98 bp, Homo sapiens
ttgctcttctgggcgtgggagaaggttctgtctatcagtgctgcgagaaaggaaagaaacaagtttgctctcagcggctgtctgtggaagcccgtaaa

SEQ ID NO: 817473 - DNA, 98 bp, Homo sapiens
gcttcatcctttcaaagacttagtgcgagaattagaactgcagcgtcagcgtgacttgcataagatcaagcagcttcagcagacagtgagagacctgg

SEQ ID NO: 817474 - DNA, 98 bp, Homo sapiens
caggttacttcttcctcaacaccagcaccgcagatgttgtcaaggtggcctaccaggaggccaggggtgtcgccatgccaaatttgtatcctactgtg

SEQ ID NO: 817475 - DNA, 100 bp, Homo sapiens
tcagtgcccttcagttaaagaccaccaggagcacacttctccaaaaggaattcttcatttgtctcctgatgtttatcaagagatggaagccagccgccac

SEQ ID NO: 817476 - DNA, 100 bp, Homo sapiens
actccctttgttggagttttgcccacgcgttgtaattaagcctcgcacaatatgaccaaactagagtcagaacgaatactagcatcagtggggaagaaac

SEQ ID NO: 817477 - DNA, 100 bp, Homo sapiens
aaggttcgactccagctgcaggagcatatagcactttctacattgtgggtttaatattatcaatgcagataccttttgtgggattccagccaatcagaac

SEQ ID NO: 817478 - DNA, 99 bp, Homo sapiens
agagcctcccagcatgactcagctacttcgaattaccccacattcctaagcatgttcatatctcaagctttttatgatcatttcacataaaatattatt

SEQ ID NO: 817479 - DNA, 98 bp, Homo sapiens
atggctggcaggagatattgagtcagctggcctgcaagcagatgggtttagggctgtattcatcaccaaagaaaaaacttacaccaatgcagaaatcg

SEQ ID NO: 817480 - DNA, 99 bp, Homo sapiens
tgcactttataatgtgtttgagcaaacctcgcctctcctacaacgatcctgaggaggatgaaggggctggccctggaggccgagagtgagctggagaga

SEQ ID NO: 817481 - DNA, 98 bp, Homo sapiens
ttcgtccgcggagatctctctcatctcgctcggctgcgggaaatcgggctgaagcgactgagtccgcgatggagcactttcatttggacccgtggata

SEQ ID NO: 817482 - DNA, 98 bp, Homo sapiens
gcctggaggaccagtatttcccatggagggcagttgtgaaaaacttcaggacaaaaatgtttcatttaaggacttgtgctgctaagttgaggccattg

SEQ ID NO: 817483 - DNA, 100 bp, Homo sapiens
ctcctcctggcagctggacaccagtttgaatcttcctttgagctccggaaagttggttgaatctgcatggaatatcaggaaactgagtccaacactatgc

SEQ ID NO: 817484 - DNA, 99 bp, Homo sapiens
aaacaggggagcaaggtgcaagagtccacaaagggacctgatgaagcgaagatcaagatcatggaggacacccaggctattgactgggatgttgaagaa

SEQ ID NO: 817485 - DNA, 100 bp, Homo sapiens
gagagcattttaagaaaggacagcattcctgtgacctctgcctaccatccataaaatactcattcccctctcagcgcttcagcatggaagggatctcaaa

SEQ ID NO: 817486 - DNA, 100 bp, Homo sapiens
cgagaaggcgtctgcgagaccatggagaacgggtagctacagcaagctgggtagcaggcagatccaaaggatatcatgaagtttccagggcctttggaaa

SEQ ID NO: 817487 - DNA, 100 bp, Homo sapiens
ccaggaggcatttgaagttccagccatcaagccctgtcgtcctatgaccaacaatgctggcagacttttccactaccggatcacagtctccccgcctacg

SEQ ID NO: 817488 - DNA, 98 bp, Homo sapiens
caaatgatgatgtagctcaagagattgctgaaaggtataagaacagcactcctggaatcagatgagcacacatgtccgacgtgtcatcaaaatgatgt

SEQ ID NO: 817489 - DNA, 100 bp, Homo sapiens
ttaatatttttccagggatataacagtccactttggaaagaagatttctcaggcattgaagttgatatcgatgtggagcacggagggaaaagaagccgcc

SEQ ID NO: 817490 - DNA, 74 bp, Homo sapiens
cattcagagttgtttcctccatttgctaaaggaatagtgtttggtctagtgacggagcccgcgcgcggcgccac

SEQ ID NO: 817491 - DNA, 98 bp, Homo sapiens
ccgcgtcttcccggtctcctttcccggccgcacaggatgccttcaattaagttgcagagttctgatggagagatatttgaagttgatgtggaaattgc

SEQ ID NO: 817492 - DNA, 100 bp, Homo sapiens
caggaggcctggatggctacagcgtggagtactgcccagagggctgtgaagaacctgacggaagagatggctgcgctggacgagtcagtggcccggctga

SEQ ID NO: 817493 - DNA, 100 bp, Homo sapiens
cagggacgtctgcagccattttgatttgaataaaaagaccctgtacaccctggtgaccaagagggattcaaagatgaaggatttgggggcagagcacttg

SEQ ID NO: 817494 - DNA, 100 bp, Homo sapiens
ccgacggaccaaattatcagcactttttattaatttgatcagtgatccttcacgttggtgagccaaggaggtgttgcattggtctctgacatgtgtccag

SEQ ID NO: 817495 - DNA, 99 bp, Homo sapiens
ttatatcgcaaaatgaaacgtgctctccaggttgtatcagagtaagatggacggtagctttgattgtgattgtggtgagctggagccacctgatcacta

SEQ ID NO: 817496 - DNA, 99 bp, Homo sapiens
ggtcatcagcctggagaagctggagaatgacaagagcttccgcggtgtcattctgacctcgcttttcctccgcaaccatgtctgacaaacccgatatgg

SEQ ID NO: 817497 - DNA, 100 bp, Homo sapiens
tgcactctcatcgctctcggcctcggcctcggcctccgacacgaacctcagaggatccagaacggcagctggtccttgctggactgttcctgtccatgtg

SEQ ID NO: 817498 - DNA, 100 bp, Homo sapiens
gggaacatgacgcaggtgcaggtgtctcttctcgccctggcggggaagatgctgagccagggaggcggcccttccagcagccatgagggaaggacaggag

SEQ ID NO: 817499 - DNA, 100 bp, Homo sapiens
gcaaatcctaggagaccgagtcttggcacgtgaacagagtcctcgaatgccaccttgctgaccaatgcagagaagattgccaccatcaccaccacacaca

SEQ ID NO: 817500 - DNA, 135 bp, Homo sapiens
cactgtggtgttgtcattgcctgagcgcgtcgagccagacagactgctgagcgactatattgagaaggaggtaaaggtgtcttctctttagggatggtgaggttggaaaaaggctcctgtaaccctcctccagga

SEQ ID NO: 817501 - DNA, 100 bp, Homo sapiens
gattccactcgtggtatgagagtggataatataatcaactcctctgcctggttaatttggagtggcccctggagtcagtttcctacaccatccgaggccc

SEQ ID NO: 817502 - DNA, 98 bp, Homo sapiens
tgcttttaaatcaactgccaagaactttagtccatctacaaattcagtgaaagagattcaggcttcttcaggagaaagcaagtacactggtaccttgg

SEQ ID NO: 817503 - DNA, 98 bp, Homo sapiens
gcgaacacagtagtggaagatgtaaagcaatatttcgagcagtttggcaaggggactcagaagaagatccttgacattgccaacatgctgggcttgtc

SEQ ID NO: 817504 - DNA, 98 bp, Homo sapiens
ttttcgacttgctctttcaaaactgcagagttgtgatctctttgatgagtttgacaatatcttccccagcagatgttgctgaaaaagctgacagaatt

SEQ ID NO: 817505 - DNA, 100 bp, Homo sapiens
ggccacccgagacgcggcgcgcacgctccggcctgcggcagttgtgaaaaacttcaggacaaaaatgtttcatttaaggacttgtgctgctaagttgagg

SEQ ID NO: 817506 - DNA, 100 bp, Homo sapiens
gcaacctgcccttcctcttcaaagtgctctcagttgaaacacccctgtccatccaggcacaccctaacaaggccagcgagaccgaggagaatggctccga

SEQ ID NO: 817507 - DNA, 100 bp, Homo sapiens
acagagggcttcatcactctgacctacaaagggcctctctctgccaaaggtgctggagaatctggtaaaagcaccattgtgaagcagatgaggatcctgc

SEQ ID NO: 817508 - DNA, 99 bp, Homo sapiens
catagctaagatgccaggaccccctgaaagcctagacatggctttggacgtggaccggatggttctttacaaaatgaagaaatccgtgaaagcaatcaa

SEQ ID NO: 817509 - DNA, 100 bp, Homo sapiens
cgcgccttggagtccggagtaacttggccaggctggccccgagcggaactggagaaagctgagggtgttacaggattggtgggtatacctggacctccag

SEQ ID NO: 817510 - DNA, 107 bp, Homo sapiens
attcaaactgccctgatgggcagtcaacagctaaaaccttcctcaccgtgtactgaaacgtaaatattttcaccacgatcgattagactgggatgaacacagttctg

SEQ ID NO: 817511 - DNA, 98 bp, Homo sapiens
cggaggaccggtagctcccagcaaagcggcccagcggattgcagatctgactcagaagatctttgaccttcgaggcaagtttaagcggcccaccctgc

SEQ ID NO: 817512 - DNA, 100 bp, Homo sapiens
tcagcctcaggtagatggtttccgtagatggtggctttctttggacccttgacatcaaccagttactatttggagggcaactagcatggatctgccaatg

SEQ ID NO: 817513 - DNA, 98 bp, Homo sapiens
gtgggcgccctccccgccaaggcccgtgcgaggagctcttgtccctggcaaagcgaaagcgcagtgactctgaggagaaggagccgcctgtgagtcag

SEQ ID NO: 817514 - DNA, 100 bp, Homo sapiens
actgcaacaaccacaaacaaaaagcctggccaggtggaaatcacttgggatgagactgatcatgaaagaattacaatgctcaacaggaagtttaaaaagg

SEQ ID NO: 817515 - DNA, 98 bp, Homo sapiens
acttttagttattagacctcctgtcattgctggccaaatagaatggcgatcagtccacgaagcgatgcaactttctccagtcagaaatcaacaccttc

SEQ ID NO: 817516 - DNA, 128 bp, Homo sapiens
cagccaccttcagtcagtgcatggaataagcccttaacatcgtttggatcagctccttcatcagaggttcttcattagaagctgtaaccacctgtgaactatgtaaagagaagttggagcttaacctg

SEQ ID NO: 817517 - DNA, 98 bp, Homo sapiens
gggatcgtgagctccggcccgggcgagcgggtgcgtctgccgcagagtcggcacctgaaggacatggaggttgaccagatgttcgccgccttcccccc

SEQ ID NO: 817518 - DNA, 100 bp, Homo sapiens
cattcctatctttctcccggaagtcaccattggagctcatcagactgaccgtgtcttacatcagttcagagaggtgggatgtgtgtgggctgaaattccg

SEQ ID NO: 817519 - DNA, 98 bp, Homo sapiens
gtccaatactgtggctactgtaaataccattttagtaagctgaccatcattgaatgtctaaaatatatttgtactggagatttccctcctggaaccaa

SEQ ID NO: 817520 - DNA, 99 bp, Homo sapiens
ggaaaggtgtgctgtgcctgaggccagtgtggccatgaggtctgccggaagtgacttgttggtgttatctcctgagttaaaatgtgaagggattttttt

SEQ ID NO: 817521 - DNA, 100 bp, Homo sapiens
tgaaaaatgaagatgatgtagacactggactattaggtctagatgttgatggaatatatcgagttagtggcaatctggcaacaatacagaagttaagatt

SEQ ID NO: 817522 - DNA, 98 bp, Homo sapiens
ttagaactgaacaaaatgaaagacagaaggtagctggtgatttgcataagaaaacgcccactcctggatcttcacattgaactcaatggctacatgta

SEQ ID NO: 817523 - DNA, 98 bp, Homo sapiens
aagattttatcatgttattggaggcagcattgccccggtttttcaggggtgctactgaactctatcgcacagatctaccaaggattcctcctgcttta

SEQ ID NO: 817524 - DNA, 100 bp, Homo sapiens
ctgacgccggagcagctcctaacccagggagtgtttcaagagccagtgacaaggaccaggggcccaagtcccaccagccatgcagacctgccccctggca

SEQ ID NO: 817525 - DNA, 98 bp, Homo sapiens
gatgctggaccagttgatgggcacctcccgggacggttgctgaaaagccaggagtcaaaatgactgagcgctttgactgccaccattgcaacgaatct

SEQ ID NO: 817526 - DNA, 98 bp, Homo sapiens
gcctctgggcaatcttaccctcctgggaactgagagaggctctttaagggtcacccagagactctggagaagtttgacaagttcaagcacctgaagtc

SEQ ID NO: 817527 - DNA, 51 bp, Homo sapiens
ttttgccggaatatttcaagacaccgaaagtgaatgatgaacccacaacag

SEQ ID NO: 817528 - DNA, 100 bp, Homo sapiens
atttgtttcacagtatgggatgttggtggtcaagatagaattaggcctctctggaagcattacttccagaatacccagaagatgattgaagaatcactga

SEQ ID NO: 817529 - DNA, 143 bp, Homo sapiens
ctgctttcgacttagaaaaaagaaccagatgtcaaaactgatttcagaaatgcatagttttatccaggatgtcagctgcaacgagatcacagcgttgccccagcagataggtcagttgaaatctctacgagaactgaatgtca

SEQ ID NO: 817530 - DNA, 99 bp, Homo sapiens
gagctgtttctcatctttatactcttccaggggggcaacaacgccggccacacggtggtggtggatgggaaagagtacgacttccacctgctgcccagc

SEQ ID NO: 817531 - DNA, 101 bp, Homo sapiens
agtacttggcagatcactctcttagcaggtctcctctgagcctccggcctccataagacccaaaacagatgacacctcttcccagtcccccgcgccttccg

SEQ ID NO: 817532 - DNA, 100 bp, Homo sapiens
gccctggcctgtaccctgcccacactcccagtgcaaagaaaggaggtacaggcccgagctgtgttctaccccctcttagggttgggaggagctgtgaaca

SEQ ID NO: 817533 - DNA, 98 bp, Homo sapiens
gcaaaggggttctgaggtccataccaagaagacggtgatgatcaagaccatcgagacacgggatggggaggccgagcagaagcgcaacgcagagtcgg

SEQ ID NO: 817534 - DNA, 100 bp, Homo sapiens
cttcctcctgcttcccatcgaagctctagaaatgaatgtttccatctcttcagagatgaaccagctgatgaacttattagtcctaaagacattgatcctg

SEQ ID NO: 817535 - DNA, 99 bp, Homo sapiens
tcatagccgagtatgaaagtcaagtcaaagagaaagcgtcgtggtggagcaataaattctagacaagctcagaagcgaactcgggaagcaacctccacc

SEQ ID NO: 817536 - DNA, 98 bp, Homo sapiens
tcaagtgtccagaatttccaattacagacgacaaagtagcactgattgtaaaccatggctgtgtggatacaagctcagcagctccaaggagaagccct

SEQ ID NO: 817537 - DNA, 99 bp, Homo sapiens
ctcttcggcttctcgctggccatgcactggcaactgcagcccgaggacaagcggctcatattcctctgcagacactattgaagttcatggtggatattg

SEQ ID NO: 817538 - DNA, 100 bp, Homo sapiens
tcgtgaccgagaccgtgaccgagagcgtgaccgagagcgcgaatatcgtcatcgttagaaggtgccgtgagcgatgtggagatgcaggaacactatgatg

SEQ ID NO: 817539 - DNA, 100 bp, Homo sapiens
gccaggtcatcaccattggcaatgagcggttccggtgtccggaggcgctgttccagccttccttcctgggttcatgaaccatcgagctccagccaatggc

SEQ ID NO: 817540 - DNA, 98 bp, Homo sapiens
tgcagccagggatattgagaaacttctgagcaacagatctaaagccctggtgggtgttggtgccagaagaaaagaatgattgatgggaaacagacacc

SEQ ID NO: 817541 - DNA, 99 bp, Homo sapiens
gcatctcccggaaagtgcgttttaaggcgaagtcatgatgtattctcccatctgtctcactcaggttccacttccaaacatgagttccaggccgagaca

SEQ ID NO: 817542 - DNA, 100 bp, Homo sapiens
gaatgattttaaagttatgggactacaacagcagccacaggaaccttgagccaagctataacatcagaaatggtgaatgaatacaagaaaattcttttgc

SEQ ID NO: 817543 - DNA, 100 bp, Homo sapiens
catgttggtccaaatcaagtcaaaataacaagcctttgtattcatttgaagataatgcagactatgtttatgatgttatgtggtcacctacccacccagc

SEQ ID NO: 817544 - DNA, 98 bp, Homo sapiens
ggaaatggaatcaatactgctgatatgatggaggcagaagaagctgctgctaaagcatcatcagaagtgaacctggcaaacttacctcccagctatca

SEQ ID NO: 817545 - DNA, 98 bp, Homo sapiens
caaatatgacttcaaagctactgcagacgacgagctgagcttcaaaaggggggacatcctcaagtagtttatgccaacgtgacttcattcatacagat

SEQ ID NO: 817546 - DNA, 98 bp, Homo sapiens
ggacagccagccctcgctggaccagaccatggccgcggccttcgatagcctgggctggaagctcttctacgtcacaggctgcctgtttgtggctgtgc

SEQ ID NO: 817547 - DNA, 100 bp, Homo sapiens
gttcagttttcttcagaagaaggacttcggaatgcactacaacaggaaaatcatattatagatggagtaaagaaatatggctacacacacctttctgcag

SEQ ID NO: 817548 - DNA, 100 bp, Homo sapiens
gtgatacactcaagctgttgaaaatgagcagctgtcctcatgtctctccagcagatatttgtcaggatacgaatcaggttctcttcaagtgctgccaggg

SEQ ID NO: 817549 - DNA, 98 bp, Homo sapiens
actgtccagagcaagactaacaccttacttcctccccagcccccacctattcctgcaggacctgatcccaaccttgaagaaagtcctaaaagaaaaaa

SEQ ID NO: 817550 - DNA, 100 bp, Homo sapiens
gtttgcatatgagtgctgctgcagcttcccgagacatcaccttgaatatggtcttcgattggcaagccatatatttgttaaggaaatttcacaagatagt

SEQ ID NO: 817551 - DNA, 98 bp, Homo sapiens
cagaaggtgcaggaggtgctgaaggccagccatggccatgcagaaaatctttgcccgggaaatcttggactccaggggcaaccccacggtggaggtgg

SEQ ID NO: 817552 - DNA, 99 bp, Homo sapiens
ggagatctagatcttgatttgaaagtttctgagaaaatcttcagctcagacttgagggtcaactttaccagctgaagaaaattgtacaagctggagata

SEQ ID NO: 817553 - DNA, 100 bp, Homo sapiens
attggccaaagaagttgagaaaatgggagcagttttcatggatgcccctgtttctggtgcggacaaggcaaaatctcagcaagttcggacctctagtaca

SEQ ID NO: 817554 - DNA, 98 bp, Homo sapiens
ttcacctcgcgtcgcgcccgggaggaaggaacgaggcaaggagctaaagcagcgtgcgttcagccctgggccccctctcccaacaactccgacacctg

SEQ ID NO: 817555 - DNA, 100 bp, Homo sapiens
cgccgcccgggcatgcgaagccgtccctccccgggtgtcgtgaaaactacccctaaaagccaaaatgggaaaggaaaagactcatatcaacattgtcgtc

SEQ ID NO: 817556 - DNA, 99 bp, Homo sapiens
tgtcccgcaccttctacctgatagatgtgaagcccaagccgattgagataccactcagtggggagatgtgttcagagcaacattgttttgttgacacaa

SEQ ID NO: 817557 - DNA, 100 bp, Homo sapiens
tattgaaaaagcagctgcttctgtgtgatttcttccaaaatacatgtttgtaaaagaatggacttggtctgccagagaatgttgaatcagggatttctga

SEQ ID NO: 817558 - DNA, 98 bp, Homo sapiens
tctatcttcccatcataaaaaacaagaggtggaaacatacagaagaagcaaggaaattacagttagaggtcacaactgcccgaagccagttctaaatt

SEQ ID NO: 817559 - DNA, 100 bp, Homo sapiens
tcaattatttgattcttattctgagtcactgccggcaaatcaacaacctcgtgacttgaatcggatggagctggaggagagcaggagtgttcagaagcaa

SEQ ID NO: 817560 - DNA, 100 bp, Homo sapiens
gagatctacaggatcccccgccccaaatggccccggaggcccttctgcgatgttttacctggctgcggctgtgtcagatttctatgttcctgtctctgaa

SEQ ID NO: 817561 - DNA, 100 bp, Homo sapiens
ttggatcttcatgccctgggttctgcccgcacggacccccataacaccttccaccatgaccacctcagcaagttcccacttaaataaaggcatcaagcag

SEQ ID NO: 817562 - DNA, 98 bp, Homo sapiens
cttcatcacgaggccacccagtcccacttcaaacattcgtctcggaaaccccgcctcttacagtcacgagggcaattgaaggaacagactaaaaatcg

SEQ ID NO: 817563 - DNA, 99 bp, Homo sapiens
gaattagaggtaccctgtggcctgagcgcagttcaagccaagaccccaattggcagaaacacttttatcattttgagggactcatgaagtggcagctaa

SEQ ID NO: 817564 - DNA, 98 bp, Homo sapiens
ctgatcaagccaacaacagtgacggaatgcctccatacatatgttgatggcatggacctgggcaaaaaggtcagcatccccagagacatcatgttgga

SEQ ID NO: 817565 - DNA, 99 bp, Homo sapiens
ttttccactgtatttggagaagaatggaaagagaagactgatagagacttcgttaaggtttcagaaccttctgtggtccagaaagacatttgtggacaa

SEQ ID NO: 817566 - DNA, 99 bp, Homo sapiens
ccggagccgcagcccgagcggcggggcgtggtgaccaagatgaagatgcagaggaccattgtcatccgccgagactatctgcactacatccgcaagtac

SEQ ID NO: 817567 - DNA, 100 bp, Homo sapiens
agactcaatttgaactcagagtactgggaaaagatgtatgatctcgtgaaatcttgagagaaactgaatgacgaatgaaactattgttcctgtttcacac

SEQ ID NO: 817568 - DNA, 100 bp, Homo sapiens
gaaagtaaccagacaagaacgagaggaggcgttggtcagaggagtcttcatgaaggtggtgaagcccaagaaaatatttacaccagcagctccagttcat

SEQ ID NO: 817569 - DNA, 99 bp, Homo sapiens
gatctgcagccatttatattgcttaggctactggcagcctggcatcctcgctacaacctcattgttgtgggccgatacccagatcctaatttcaaaagt

SEQ ID NO: 817570 - DNA, 100 bp, Homo sapiens
ttcatcaactcctagaatctagaaagactctgtttgctggctacacggacaacctggtgcgagtgtggcaggtgaccattggcacacgctagaagtttat

SEQ ID NO: 817571 - DNA, 100 bp, Homo sapiens
atctcccctgcccagagatctttgacaagaatggtgagattgaccaccaccgggaacagtatgaaaatctaaaatggacactggagagaaaacttgagga

SEQ ID NO: 817572 - DNA, 98 bp, Homo sapiens
gatttggcaacagactttgtttcttggagtccacttccaattccaagtgttcaagagacctatgaagccaaaagacatgagttccatggtgaacgtca

SEQ ID NO: 817573 - DNA, 100 bp, Homo sapiens
ggcatttcagtcactggtttgcagagtccaggatcagcattgaggcccgcaagtcacccaagctgccccgggctgctcaggagctctcccggtccccacg

SEQ ID NO: 817574 - DNA, 115 bp, Homo sapiens
gcctttgccaacgctgttgcagttgctatgtatgtggttggatttgcagaaaccgtggtggagttgcttaaggtcagtttaggggctggtgcaaaggatgagttgcacattgttg

SEQ ID NO: 817575 - DNA, 99 bp, Homo sapiens
gtgtatagcctttactttcctgagaattcctagaggacctgtgcaacaacctcttgaggatcgaatcttcactcccgctgtctcagcagtctacagcac

SEQ ID NO: 817576 - DNA, 99 bp, Homo sapiens
catgctttgcggtctgtaatgtcagcagaacaggagaaggatcccatttcgctgaagagagttcgaggaatctgagaaaaaggggttgattgaaagaat

SEQ ID NO: 817577 - DNA, 100 bp, Homo sapiens
tactatgtccagcctatttgcacaccatccaggagtcagtttattactggaaaattcacagagttcaacagcgtgttacaattaagaaagctttgactct

SEQ ID NO: 817578 - DNA, 100 bp, Homo sapiens
tcacagctcgaagaaccatcatcatcaagggctatgtgcctcccacaggcaagagatgcctggagttactgtaaaagacgtgaaccagcaggagttcgtc

SEQ ID NO: 817579 - DNA, 99 bp, Homo sapiens
ccttgtcccgctgcagccgagatgccgggggagcggggccttccacaccccctccgtgggtgtgtggttacactcctggcacaccttacaaagtgtcct

SEQ ID NO: 817580 - DNA, 99 bp, Homo sapiens
ccacctgcccggtgcccgaggaggcagccaagctcgtagcctgccactccgtgctgccaaatctttggagtgttgatggagaagttacagtagctgaac

SEQ ID NO: 817581 - DNA, 98 bp, Homo sapiens
gattttaccttggataccctgctttgggagtggttaatgtgttgctaacaactccactctgggtggtaaacaccagactgaagcttcaaggagcaaaa

SEQ ID NO: 817582 - DNA, 98 bp, Homo sapiens
agccgccacctacccagtgaccatgataggtatccgttacagcactgatgtgagtgtagatgaagtaaaagctttggcttctctgatgacatacaagt

SEQ ID NO: 817583 - DNA, 98 bp, Homo sapiens
aaaagaaacactggcttctctccttcagctccaggctagtggccaacagtgttgcaaacaggaacccgaggttttcacttcactgttgatgggaacaa

SEQ ID NO: 817584 - DNA, 98 bp, Homo sapiens
tctaagtgatgtccaggaaggaggaggaataatatttatggagcatatattatggaacacacacccaactggtcagctaactttgatgtcccaatgga

SEQ ID NO: 817585 - DNA, 98 bp, Homo sapiens
aactgcagagctaaaatcagatgtgatatggaagatattcatactcttcttaaagaaggaagtcgaggctcaagaggttctcaaattgatagtcacag

SEQ ID NO: 817586 - DNA, 100 bp, Homo sapiens
ctcatctggaattttgccgatttcatgactaaccagtttcgatcctttggtacagaagacagaccgacagatcgtccaataccacctcgagatgaagtct

SEQ ID NO: 817587 - DNA, 100 bp, Homo sapiens
cttctgggctgtgctggtcacagccacactctgcaccgctaggccgtccccgaccttgcctgaacaaggtcattcctgtcccaatcagctgctctactac

SEQ ID NO: 817588 - DNA, 98 bp, Homo sapiens
gctggtgcagcgggttgtgaaggacatcactaacgccttcaggaggaacccacacattgttctttcagaggaccaagacagttacctgtgtaatgtca

SEQ ID NO: 817589 - DNA, 100 bp, Homo sapiens
gagtttggaggccctgatggaggggacggaggcaacggtggacacgtcattctgagaggaagcgtcctgatcagacatgggttcagtgtgatgcctgtct

SEQ ID NO: 817590 - DNA, 100 bp, Homo sapiens
aacatgaagacacttttgtatatctatctgcaattcaggcaccacattaaataccagcatttgctgaagaagaaatatgtatgtccccatccctcctgtg

SEQ ID NO: 817591 - DNA, 98 bp, Homo sapiens
cccagaacagaggactctaattgttactcattccaatcaggtattccagcgtcttcaggaaacagtttagactctcttcaagatgacaatcctccaca

SEQ ID NO: 817592 - DNA, 100 bp, Homo sapiens
ttcctgatccgggagagtgagagctccccaggggagttctctgtgtctgtgaaagttttactacccttggatgctgctgttgacatggaaaagattgagg

SEQ ID NO: 817593 - DNA, 100 bp, Homo sapiens
acttggaagcaatgtttgaacaaactcgaagaacagctgtggaaagaagttgcaaaacactgggcaaaatttggtttctctaatattactggaattgatt

SEQ ID NO: 817594 - DNA, 99 bp, Homo sapiens
aatcaaactgctacaagacaacaccctgatctggcatggacattgtgatggggttggggtggacctgagcaacatcttcctggaaggcattgccattct

SEQ ID NO: 817595 - DNA, 50 bp, Homo sapiens
agctagccggacgtcctccgactcaagaagcagcattaagaggtcttctg

SEQ ID NO: 817596 - DNA, 99 bp, Homo sapiens
ttggatcttgctcagtctctgtcagaggaagatcccttggtcatagcctgcagtgctacaactgtcctaacccaactgctgactgcaaaacagccgtca

SEQ ID NO: 817597 - DNA, 100 bp, Homo sapiens
gaacgagtaaatctgtctgcagcccagacactgagagccgctttcatcaagctctgaactgtcttctccagttcctgttggtgatacttcaacattggga

SEQ ID NO: 817598 - DNA, 98 bp, Homo sapiens
ctcagagaaattggccatggaagctttggagcagtgtattttggatatcagtatgaacaacattactcagttgccagaagatgcatttaagaactttc

SEQ ID NO: 817599 - DNA, 98 bp, Homo sapiens
tcacattccttcttagaagacttgactggtcttacattgctgcatcaagaaacccaagctgctgagccattcgttatctatgacatgaattccttaat

SEQ ID NO: 817600 - DNA, 98 bp, Homo sapiens
gccgcctccggaactaaacgggcccggaggaaccacccccgccctcctcagcctgatcctggaagagactcggggccccccagcctccgccaacccag

SEQ ID NO: 817601 - DNA, 100 bp, Homo sapiens
acaaaggagaaagagcactaccaggtgttagacctagaggatcaagacataatgggagcatttttagacaagccaaagatggaaaagcataatgcccagg

SEQ ID NO: 817602 - DNA, 100 bp, Homo sapiens
agtccctggatcaccgacagcacagacagaatccctgctaccaggtacaggcatccttcacctgctattgttgcaagaacagtcagaattttacatacac

SEQ ID NO: 817603 - DNA, 98 bp, Homo sapiens
gaaatagcatggatttcatccattatgctggctgttatgtacgcaggagatattgatgatgttaagaagttcaaaccgggttacctggaagctactct

SEQ ID NO: 817604 - DNA, 98 bp, Homo sapiens
gtttcccgcctgagcgcaactagcggcgggtcgtgggcacctccagtttgaagaaaacaggtctgaaacaaggtcttacccccagctgcttctgaaca

SEQ ID NO: 817605 - DNA, 98 bp, Homo sapiens
atgggatccagctgttagtcgggtaggcataggaactttatattgctgttggaatatctggagccatccaacatttagctgggatgaaagacagcaag

SEQ ID NO: 817606 - DNA, 100 bp, Homo sapiens
agtgctatcaaggaaccacgctctcgtctggtttgatcacaagacgggcaagaaaacctcggatcaattctcagctggtggcacaacaagtggcacaaca

SEQ ID NO: 817607 - DNA, 100 bp, Homo sapiens
atgaactggaggctgagtacgacagcctcaaacaggagctggagcagctcaaagagattcagaatggacagtttagaagaacctcagaaaaaagtcttta

SEQ ID NO: 817608 - DNA, 100 bp, Homo sapiens
gtggtgccccgggcggcggcaaaggagacagacttcggatgggaggttggaaaagagactgttcaaaccactgaggatcagattttgaagagagatatgc

SEQ ID NO: 817609 - DNA, 100 bp, Homo sapiens
tattggtgcccagggagaaccccttggatatcgccaggatgcatttctggattaaaagtggtgggggagtccctttctccagcctttcacctacaactgg

SEQ ID NO: 817610 - DNA, 98 bp, Homo sapiens
cttcgttccaacatggacatcctgaagccaatcctgaagcctccccagctttctgaggatgatatctggctaaaaagcgagggagacaactatagtgc

SEQ ID NO: 817611 - DNA, 100 bp, Homo sapiens
ggagatgcctggcagccccgctctctgcaatgcctgtgaggagccaccaacatttgaagctatggagctcattggtaaaccaaaaccctactatgagatt

SEQ ID NO: 817612 - DNA, 100 bp, Homo sapiens
tgggccactcccgggcatctgtgatctggcatcggacacagcaatgaagttggagcagaggctgaaaacacaggctgctgaagttttttggaatgctggt

SEQ ID NO: 817613 - DNA, 120 bp, Homo sapiens
gtgtgattccagatcactccaagaagaacatcggcaatgggattatttcctccccactgactggaaaggatgctgacctgttggatgttgaaagcaaacactttgaagacctggagttcc

SEQ ID NO: 817614 - DNA, 98 bp, Homo sapiens
acagaggtgaccatgtctgggatggaaaaattctgcttggtcagaatcgtgatggcattgtgttcagcactgatgactattttcaccatcaagatggg

SEQ ID NO: 817615 - DNA, 99 bp, Homo sapiens
atgacatcaaatctcaacttcatttactttggatatatacgacagagctcggatagagagtccagccttttctactctcaggggctgtctaactgatgg

SEQ ID NO: 817616 - DNA, 98 bp, Homo sapiens
cagtcaggagagatcgtaatgacttctgggaaggtattaaagttttcagcattgcaaataacaatctcagctactgggatgcccccctgggaagttct

SEQ ID NO: 817617 - DNA, 98 bp, Homo sapiens
agtctctggagaatgctattgaatggagactccccatccccaggatgtcaacctcagtccctcaaggccatacctggacccaacgggtgaagaaagac

SEQ ID NO: 817618 - DNA, 99 bp, Homo sapiens
gagattgcagtgggggctgccagtgctaccctgagaaaggtggacgtgccacagaaacactattcagaatgggtgtagcaagaggaaccatcacaacat

SEQ ID NO: 817619 - DNA, 100 bp, Homo sapiens
tcttcatcaatggaatctccaaatatgcagagtcagaaaagatcaagaagcattttgataccaagggaagaacacctacctggagaagattgacggcttc

SEQ ID NO: 817620 - DNA, 100 bp, Homo sapiens
agttgtgacccaggggaaaaattagactcaaaaattggagtccttataggaaaagatgacttcaaacctgcttctattgacacttcttctgaaggatacc

SEQ ID NO: 817621 - DNA, 99 bp, Homo sapiens
agaatgcaaagcaactgctcattagctctaactgaggaactggattctataaccagtgagctacatgcagtagaaattcaaattcaagaacttacggaa

SEQ ID NO: 817622 - DNA, 100 bp, Homo sapiens
accagcctgggagtgggaggatgcgcaggggttttctgcacttctacactcagattgggagtatgtatttaaaaacagtgaattttcatcaaagcaagag

SEQ ID NO: 817623 - DNA, 100 bp, Homo sapiens
ctcagcaagactggagtccctgatggaattatgcagtttattaaggtgtgtgtgtgcaggccacagcagcatgcccttggtgtagtcagtgccgaaaggg

SEQ ID NO: 817624 - DNA, 99 bp, Homo sapiens
ctcacgttgaccaactctttgatgatgcatccaggctcccagccaacctctgataaaccctcccagcggccatcagagagcacaaattgtagccctacc

SEQ ID NO: 817625 - DNA, 99 bp, Homo sapiens
gagcacgagctgtgaggggattcacttgtgtgcggaactcctcggaaccatggccacagatgctatggcccacgtggccggcttcactgtggctcatga

SEQ ID NO: 817626 - DNA, 100 bp, Homo sapiens
tgggatatatgcatgagaaaggactgggcattaaacagccctaccattgaccatgccctgctggacatgcccttcctttgactccctggggagatgccct

SEQ ID NO: 817627 - DNA, 100 bp, Homo sapiens
ctggcgcgggacccttattgcgcctgggatggccattcctgttccagattctacccaactgggaaacgtggatgtttccaaggattgtcttcagtcatgg

SEQ ID NO: 817628 - DNA, 100 bp, Homo sapiens
aaacaagacagggacatcgcacttctggatttaatcaacttttttatccagtgttcaggatgtcgaggcaaggaaacagttactattcttccaggagcct

SEQ ID NO: 817629 - DNA, 100 bp, Homo sapiens
agccccagttcattattccttcatgctacccacctttctgttctgagacccctcaagagacatataagaaggtgatgaactggaaagaaactttgacttt

SEQ ID NO: 817630 - DNA, 100 bp, Homo sapiens
tactctctctttctggcctggaggctatccagccatgtttttggcccagaggagcctctgctctcttagcggtagagcaaaattcctgaagacaatttct

SEQ ID NO: 817631 - DNA, 100 bp, Homo sapiens
gctggtctcctactcccagatgcatccgtgtcagctggccagctaaactatgtggatccagctactggctatgtggtgctcacacagattgcccacttgc

SEQ ID NO: 817632 - DNA, 98 bp, Homo sapiens
agaaattcctggtcatggcttcagaggatgaggtttctggttttcaatggtgtgctgataagtgtaacactcatctctctgatagaaggaagaatccc

SEQ ID NO: 817633 - DNA, 100 bp, Homo sapiens
agaaagagttttctatcgatgttggttatgagagatttttgggacctgaaatcttttttcatccagagctctattaccaggttttaaacttcgccatgat

SEQ ID NO: 817634 - DNA, 100 bp, Homo sapiens
cacagacgttctcgtaaggacaaaacgggactggctagttaaacaaagaggctgggttggtgaaaattgcccctcaatattatgacatgagcaatttccc

SEQ ID NO: 817635 - DNA, 100 bp, Homo sapiens
ttccagttggtgggaggatcagctagtgaatgtggaaaattgcctaagaattatgacccaaaagttaccccagatccagaaagatggctgccaatgcgag

SEQ ID NO: 817636 - DNA, 121 bp, Homo sapiens
ctcagatgatgactcaggctgtgctttggaagagtatgcctgggtcccgccgggtctgaagcctgaacaggtagatgctggctggattggattttggtccatagttggaggctgtgttgtt

SEQ ID NO: 817637 - DNA, 100 bp, Homo sapiens
tcgccttgggcgggagctgagcaaagtgatcattgttgacaattcccctgcctcatacatcttccatcctgagaatgcactggagaatgctggaggagac

SEQ ID NO: 817638 - DNA, 100 bp, Homo sapiens
aagagacaggaggcagtagccaaacacccaggaaaccactatcagcggcctgaccccggagaccacctactccgttactgttgctgcctataccaccaag

SEQ ID NO: 817639 - DNA, 98 bp, Homo sapiens
aacccagggtatcttccttgatcagcctttacagtaaaaatgacccatctatggctgcttaataatgctatgaacctacctcctgacaaagccaggtt

SEQ ID NO: 817640 - DNA, 99 bp, Homo sapiens
gatttaaaacttcgccagaatttaggccttcgaggaagaggcccacctccttcatgggcctctgagcctgaacgcccatccattcttagtgcatcagaa

SEQ ID NO: 817641 - DNA, 99 bp, Homo sapiens
gactcaccgctctggccagggtgcttttggaaaccctcaggcagtgccagacccagaagagggctcttcagcacctagaagctggaaagggatgaacag

SEQ ID NO: 817642 - DNA, 100 bp, Homo sapiens
gcatagtcatggtgatgggtattacagatgtagatgataaaatcatcaaaagagccaatgaggatgatgccaataatgacccacagtggtctgaggaaca

SEQ ID NO: 817643 - DNA, 98 bp, Homo sapiens
gccttgcccgcatctatagtttccagatggctctaacctcagtggccaaatttgagtttcatcatggtgactatgaaaaacagtttctgcatgtactg

SEQ ID NO: 817644 - DNA, 98 bp, Homo sapiens
gtcctacggccccacagcgcgctcctggagaatatgcacatcgagcagggacaagaatccttcaagaaacaggaaaaaactcctaaaacaccaaaagg

SEQ ID NO: 817645 - DNA, 99 bp, Homo sapiens
ttgggttcagttttcttcagaagaaggacttcggaatgcactacaacaggaaaatcatattatagatggagtaaagattttccgcagatttccagtggc

SEQ ID NO: 817646 - DNA, 100 bp, Homo sapiens
tgcgggggtggcattcaagctcgccgcaggatctgtgagaatgggcctgactgtgcaggctgcaatgtgagctggtgatgctgctggagtggtggtcggg

SEQ ID NO: 817647 - DNA, 100 bp, Homo sapiens
cagtgaatttaagcccacatatcaggaccgagtggccccgccagcaaatggttatgagccttagagtttctgaactccaagtactgttgggctacgccgg

SEQ ID NO: 817648 - DNA, 98 bp, Homo sapiens
tcattccatcttcattcatgactccagacaggagtccatagaggccactgtattctattgaagaacatgtctaacagtaacactactcaagagaccct

SEQ ID NO: 817649 - DNA, 100 bp, Homo sapiens
agtcaaaacggatgtaaataagattgaggaatttcttgaagaagtcttatgccctcccaaagttcttcgtaagtacatcttaaagctgtcaagatggttc

SEQ ID NO: 817650 - DNA, 98 bp, Homo sapiens
aaagaagcagcaccttatctcagctccctggggataagtccaaagcctttgatttccttagtgaagagtaatagcctgcagctggtgttttgagaagc

SEQ ID NO: 817651 - DNA, 98 bp, Homo sapiens
gcagcatggagagatagataaacggttggtgcttcccgtgctgctgttgatgctggctttgttcccaatgacatgcaagttggacagacgggaaaaat

SEQ ID NO: 817652 - DNA, 98 bp, Homo sapiens
agtatctgcagagcataggttttgtgctggtaccactgcggcccccctcacccgcccgcaggctgttttggagtcagcggaagatcaccaaggccagg

SEQ ID NO: 817653 - DNA, 99 bp, Homo sapiens
aactggatcaccttcaatgtgggctaccacgtggagcaccacgacttccccagcatcccgggctacaacctgccgctgacggccaatgggaacgtggag

SEQ ID NO: 817654 - DNA, 99 bp, Homo sapiens
tccggctgcagggcggtaaggatttcaacatgcctctgacaatctctagtattctctgcaatgactgtaatggacgatccactgttcagtttcatatat

SEQ ID NO: 817655 - DNA, 100 bp, Homo sapiens
attttccccccaaactgcaataagccgccttccaaggcataatcaccagcaacacccgggacaataatacgggggccacctacccccacctgaacttcag

SEQ ID NO: 817656 - DNA, 100 bp, Homo sapiens
cttacaacatggcagacattgacaaggcagctcttgaagaaaatccttatttccgtttgaagaaagtagtgaaatggtatttgtcaggattctataaaaa

SEQ ID NO: 817657 - DNA, 99 bp, Homo sapiens
ccacccaaaagcagcaaaaacacagactttttcattggcaagccaactctgagagagagcaaatttttcagaacataaaacaagaatatagtcgttatc

SEQ ID NO: 817658 - DNA, 50 bp, Homo sapiens
atagcagtggcttatccattggaactggagtgggaatagctttgcgaaaa

SEQ ID NO: 817659 - DNA, 100 bp, Homo sapiens
atccggcagtgaccgtgtgtcagaacaatcttgaatcatgaagctactaaccagagccggctctttctcgtacaagttgtgcaaagtgaggaagattact

SEQ ID NO: 817660 - DNA, 100 bp, Homo sapiens
gctatgcttggcagcagaaggatttggcaacagactttgtttcttggagtccacttccaattccaaggcaactggacaacaaccacatcagctgcattga

SEQ ID NO: 817661 - DNA, 100 bp, Homo sapiens
aggtggccggttcttggtgggatctgagcagattctctcgggcctagccgtccttggaacccgatattcgggctgggcggttccgcggcctgggcctagg

SEQ ID NO: 817662 - DNA, 121 bp, Homo sapiens
ttccagagctctcatgttctgcacctcaggagggaattcagcctcagtgatgtccatgaggtggtgactatcctgttgagaagcaaaagatactttgcaagtaaaaaatatgcctcccaag

SEQ ID NO: 817663 - DNA, 98 bp, Homo sapiens
gcgaggagtgtgggaagcccatcggctgtgactgcaaggtcatttaggaaatcgtaaatcatgtgaagatgggactcttggtatttgtgcgcaatctg

SEQ ID NO: 817664 - DNA, 51 bp, Homo sapiens
cggggtcccaggaagggcggcccagatcgcccaggaccacaccgcagcgta

SEQ ID NO: 817665 - DNA, 100 bp, Homo sapiens
cgcagttttgttctgctccagctgttcgaaggtgatccaggcaaactcttccacatagactttggatatattttgggtcgggatccaaagcctcttcctc

SEQ ID NO: 817666 - DNA, 99 bp, Homo sapiens
ctgaagcaataattaaagaacctattgatattgaagaaggcatcaaaaaggaacaagctctccagcgtaagagacccatacagaaagtagaaatgggta

SEQ ID NO: 817667 - DNA, 98 bp, Homo sapiens
tatcagcaacagtagcagaattgaaacgggagctttggtgcaattcccatcgaccagagttggtccgaccagccttggaaaggtcactgaaaaatctt

SEQ ID NO: 817668 - DNA, 98 bp, Homo sapiens
tccccaccgtcaatccgtccactggagaggtcatctgtcaggtagctgaaggggacaagttggatgaaaaatctgacaaacagtatgctgaaaattat

SEQ ID NO: 817669 - DNA, 100 bp, Homo sapiens
agaggccggaaaatgccctcaaacgcgccaacggagtggaagctggacacactatgtgacttgtatgaaaccctgaccatcacccaggcagtcatcttca

SEQ ID NO: 817670 - DNA, 100 bp, Homo sapiens
aacttggtgatgcccatgactggaaccagaacagaggatcctgatggtgaacatgccaggagagcaatgcaaaaggtgatggctacgactggtgggatgg

SEQ ID NO: 817671 - DNA, 98 bp, Homo sapiens
tacttactgcggccgcccggctcttgggaaccaagtctgaagatgatgagaaactgaaaaagaggaaggagcgatttgggattgtcacaagttcagct

SEQ ID NO: 817672 - DNA, 100 bp, Homo sapiens
ccaggaagtgctgcttcaaacgggcagggctctaggaaacatatgttacgatagccgtcttgctcagtgtgcagaactctgctggcagctgagaggggaa

SEQ ID NO: 817673 - DNA, 98 bp, Homo sapiens
cacgatgcatcaccagacattcttcacctgcctgcctgccacctcctcccaagaaaacctgcacaaactgctcgaaggatgaattgtaaaagcaacat

SEQ ID NO: 817674 - DNA, 100 bp, Homo sapiens
tcactctagatgaaatcgtggacactttgggtgaaggagcctttggcaaagttgtagagtgcattgatcatggcatgttggtaacaaggaagatgctgag

SEQ ID NO: 817675 - DNA, 100 bp, Homo sapiens
aaaactcctgaggcatttcctggactagaatgggtagtgaagacccatgtcaggtcagcccttcataaacccagatgggagtccagttgtgtataatcct

SEQ ID NO: 817676 - DNA, 100 bp, Homo sapiens
cgatctgcacttcgcattttggcattgacatttaattttagggtcctttatatagaagggagagtagattgattacacagtacctaccgttatagcagag

SEQ ID NO: 817677 - DNA, 98 bp, Homo sapiens
aagatgctgctgctaaaggtatccaggaaattgctgactctgtaaaggtaaagtcagtgataaatcttttgtttgctgcatatactggagatgtgtct

SEQ ID NO: 817678 - DNA, 100 bp, Homo sapiens
cctgtaggtgggagttgggagacatgctgggctcttgcactgtttggtggaaatggtgagacaggatttgagcaaaattctacttattcagtgttcagca

SEQ ID NO: 817679 - DNA, 118 bp, Homo sapiens
ccaggcggtccgtgcgagaggaccaacggagcgctgaggcgggcgttttcttggatgaattgcttgctttggagtggaaggagcctgggagaggccaggcctccccggactgctagcc

SEQ ID NO: 817680 - DNA, 100 bp, Homo sapiens
tgtggcagagtgtaatgctgtccgccaggccctgcaggacctgctttcggagtacatgggcaatatcattgagactgaaaatatgatggaccgaattgtg

SEQ ID NO: 817681 - DNA, 100 bp, Homo sapiens
gggctcagacagttggcaagaaaaccccgaggagccctgttccaaagcctcctggaccgtccaagaatatccaatgtactcacgggattatgtttatgtt

SEQ ID NO: 817682 - DNA, 100 bp, Homo sapiens
tcttcggtttgcacagctagaggccgcgcagcagcaaaggatgagcggaaccttggaaaagggttattcaaatgctcagaagactattcttctgcaggtg

SEQ ID NO: 817683 - DNA, 100 bp, Homo sapiens
ccggtttgcaatgaagcggttctatgaggataagattgtgcccattggccagccatcccaaagaagagccagtggcagccccagctgcagcagctacgtg

SEQ ID NO: 817684 - DNA, 98 bp, Homo sapiens
ggattgtcaccagacctgcaatctatggagcagattcggagaattatgagacctactgatgtccctgatacagcctgatctagttgaatctgaagatg

SEQ ID NO: 817685 - DNA, 109 bp, Homo sapiens
cggagctgggcgcggattcgccgaggcaccgaggcactcagaggagtgggtaattccagaattgattggccataccattgtcactgtattactgctcatgtcattgcac

SEQ ID NO: 817686 - DNA, 100 bp, Homo sapiens
cttgaatttcctggcagctaagggaataaacatccaggggctgtctgcagaaggaaccacgtgaatgttgagggggcgacacacaagcaggtggtggacc

SEQ ID NO: 817687 - DNA, 100 bp, Homo sapiens
ctttggcacttctctttgaattggccagaggaatagagagtggcacagacagaagcttgatgactctaaacctagtttgttctctgaccgcctcagtgat

SEQ ID NO: 817688 - DNA, 99 bp, Homo sapiens
aaccaccgaggccagatgagtggaaataccctggttagttggcctgagtcacatggcactattgatgggacaggttctctacttttagagtcgaaaata

SEQ ID NO: 817689 - DNA, 101 bp, Homo sapiens
gtaaggaaagaaaaggaagcaacaacataatgcccagagttggagccaattaaaccaggtcctaggcctacttacaagcctccagtctcaaattatccagg

SEQ ID NO: 817690 - DNA, 100 bp, Homo sapiens
agggaaattactcggaggcagcaaaggtggctgctaatgcaccaaagtgcccgaaggaggaaacagtgacagacctggagactgcagttctctatccttc

SEQ ID NO: 817691 - DNA, 100 bp, Homo sapiens
tggtggctccgcggattataacagtagtttatgccaacgtgacttcattcatacagatgaaccaaggatcgggatagcagtataaaattagaatcaagac

SEQ ID NO: 817692 - DNA, 98 bp, Homo sapiens
cgctggcgcgcagcctcagctaggtctccacttcttctgtggttgaaggaaaggagctccccacgagaagttcaagtgaaaatgccaaagtgacaagc

SEQ ID NO: 817693 - DNA, 110 bp, Homo sapiens
cgagaaaccatgagtgtaaggttaccccagagtatagacaggttcaggaagatttgactgaagagaaaaaaagggaactggagcataatgctgaagagacctatggtgaa

SEQ ID NO: 817694 - DNA, 99 bp, Homo sapiens
cgcggcgcacggacctgggacgcggagtcctgaagccggcggacggttttcgtacgggcggccgtgcgcgaggcgagtattaaaggtggaagaaggtcc

SEQ ID NO: 817695 - DNA, 100 bp, Homo sapiens
ccagtgataagcggaaggccacagtcagcccagggccacacgctggagattgaaatcatggcaggtccagaaagtgatgcgcaataccagttcactggta

SEQ ID NO: 817696 - DNA, 100 bp, Homo sapiens
acataggatgttttggcgagagatgtattcagtggaggaagctggtatatttgcttacttaaactaccatgttcctcgaacgagacgagaaatcctggag

SEQ ID NO: 817697 - DNA, 100 bp, Homo sapiens
tacagcaaagcagtcatggttatagctgtagtgaaaaattatccaaagctcagttgacaagtcacaaggcacttaaagcattgttgaggtcattggtagg

SEQ ID NO: 817698 - DNA, 98 bp, Homo sapiens
gtggatggcaaatgctgtaaggaatgcaaatatccttatgtgaagattcatctgatgcagaatggtaagaggctgaagaagaaaaagacaacaattaa

SEQ ID NO: 817699 - DNA, 99 bp, Homo sapiens
aattgcaagcattctatccaaatggaacttaagagatttgagaacttcataaaatctcgtcctccttttgatgttgtcattgatggtctcaatgttgcc

SEQ ID NO: 817700 - DNA, 100 bp, Homo sapiens
ttctcacatgctgcttagctttcagcattctccagaggcgttccatttggcatggaagaggagatggttcgtgttacgcagtggccgtttaactggagat

SEQ ID NO: 817701 - DNA, 100 bp, Homo sapiens
gaggagagatccccctaactccaccgaacgatacacacgttggatcaaccagctgacgccggagcagctcctaacccagtagtttatgccaacgtgactt

SEQ ID NO: 817702 - DNA, 98 bp, Homo sapiens
atcacaattacaatgcagtaaagccagaaaagactgctgctccctcgccgtcactgttgtataaatgtttggtgcacctcgatttggaggaagtaggg

SEQ ID NO: 817703 - DNA, 100 bp, Homo sapiens
tatccggtcttagaatacattccagaaaatgtatcaaggaagaagaccctcaccagatgccagccccttgatcttggacttcctagccttcagaaatgtg

SEQ ID NO: 817704 - DNA, 98 bp, Homo sapiens
caaggagccctgctcctgaagggtccctcaggcactggtggagacctgtcgcttcgtagcaagtaagaagagttcctgggtcaagtggtcaccttcat

SEQ ID NO: 817705 - DNA, 98 bp, Homo sapiens
caaaagagtctccgcggtggaggtctgcgttgctcttgcttttcctcgctggggtgtacggtaaaaaagctccagttttatttaataaagaaatgatt

SEQ ID NO: 817706 - DNA, 98 bp, Homo sapiens
gaatgagccagagggacacgctggtgcatctgtttgccggaggttgcgctacaagtcagacctgatcggcatgaagggcataggatggctggcgctga

SEQ ID NO: 817707 - DNA, 100 bp, Homo sapiens
atttggtgatgaatgtagccaccacgcctacctgcatgaccagttctggagctactggaatagtgcatttgattatgacacagaaaatatgaactctgaa

SEQ ID NO: 817708 - DNA, 100 bp, Homo sapiens
gccaccacagcatctttctgaagccgggagagggcctgtaggggaacttagtgatttggcccgtgaccctccagcacaatgttctgcaggtccagttggg

SEQ ID NO: 817709 - DNA, 98 bp, Homo sapiens
agaagcacagcatcatcctaaggacgcagctgtctgtgagggtccatgcctgcatcgcttttagaatgattccatacccgttagagaaaggacatcta

SEQ ID NO: 817710 - DNA, 99 bp, Homo sapiens
ccaggaggcgattaatgctacttgcaaaggcgtgtcctactgcacagaaatgatgtgctcacgggtgccctctgaacagtcttctggtacctctctctt

SEQ ID NO: 817711 - DNA, 98 bp, Homo sapiens
aagaggactgaagcagatggcaactctgatcccaactctgattacatgaagcagatgacatttgaagcccaagcctttttagaagctgtgcaattctt

SEQ ID NO: 817712 - DNA, 100 bp, Homo sapiens
atgccatcgagcacaccctgcagcaatcatcctcttccagtggtagcgtgtttgggtctggaaacactggaagagggggaggtttcttcagtggccttgg

SEQ ID NO: 817713 - DNA, 100 bp, Homo sapiens
cgaggaggaagaggacgaggacgacgaggaggaggaggaggaggaaaaaggtgaaagaagaacgtccagaaaaaataccagatttaaaattattggtaga

SEQ ID NO: 817714 - DNA, 100 bp, Homo sapiens
attagagatttcttctggaaaactggaaacaagctcaatgtcaattgctgcaagcttagtgagtgaagatacaaagaccaagtttttgaacaaaatgggc

SEQ ID NO: 817715 - DNA, 98 bp, Homo sapiens
caccaccaccatctccatcacccaccaacaacaccacaataatccacagccaagagtaaagccaatcccagctgaaggaatcaagtcaaatccttcca

SEQ ID NO: 817716 - DNA, 123 bp, Homo sapiens
ctgaagtcagcatcgaccagtccaagctgcctggagtcaaggaagatattgatgatgttaagaagttcaaaccgggttacctggaagctactcttaattggtttagattatataaggtaccag

SEQ ID NO: 817717 - DNA, 100 bp, Homo sapiens
agctaagtaaaaactgcataaacaacagaggactcaacatatttgcagtagaagtgggacccaaatctacaatggggatgctggtgagcaggccatcaga

SEQ ID NO: 817718 - DNA, 100 bp, Homo sapiens
ccatgaccgaggagagctctgacgttcccagggagttgatagcttcctgcctgacacagctcacttcaagaagtgcacaatgtcagaacgtggaattaag

SEQ ID NO: 817719 - DNA, 98 bp, Homo sapiens
gttgaagcagaagaataaggagaaggataagtcgaaggggaaggcgcctgaagaggacgaagtaagactttgaccccgacgcaggcttcagtgattgc

SEQ ID NO: 817720 - DNA, 100 bp, Homo sapiens
gtcttttagcaacattaatggaaacttattgcttatgggcacttgactggcaatgctccagatagtacaacaccaggcaaaaaattaattgatagaatta

SEQ ID NO: 817721 - DNA, 100 bp, Homo sapiens
ctgaggctacctgtgaacagtacgcagtgaatgttgtaaaaccagtaatccatagcaggatcaacgtgtcagctcgctttagaaaaccgcttcaggagcc

SEQ ID NO: 817722 - DNA, 100 bp, Homo sapiens
aaataccatcttcaactgtacaagaagctttacacaatttccttaaggatgatcaggatggtagtcaaggtctgggcaagagaaaaagggtaaaactaag

SEQ ID NO: 817723 - DNA, 98 bp, Homo sapiens
ggaacaaagtcagatggacacttacacctcggatgaacaagaaagtttggaagatgaagctactgaatctttacatcaaacgtgcacaaacaggttct

SEQ ID NO: 817724 - DNA, 100 bp, Homo sapiens
cggtggcgcctgacagaggaagatggacagctgggaattgctgaattagaactgcagaggttcctctacagcaagctcatgggcctcctgagtgacccag

SEQ ID NO: 817725 - DNA, 100 bp, Homo sapiens
gggaattgtcctctgtggaagggactttcttttggccctaggccccttcctgcccctgtcgtcagcagtgtatcccctactccgtgttgctgaaagacct

SEQ ID NO: 817726 - DNA, 100 bp, Homo sapiens
ggcgcccagcggtagccctccttgcgcctccgattcccagcttgaaggatgccaatgatgtaccaatccaatgtgaaatctctcctcttatctcctatgc

SEQ ID NO: 817727 - DNA, 98 bp, Homo sapiens
agtatggtggccgagtttttaaagaacagtaggatccttgctggggacgtggagacccatgcaaatgtttgcagactacggctgaccgtacctcctga

SEQ ID NO: 817728 - DNA, 100 bp, Homo sapiens
ggattgtgtggtgatgaaaggcaaggttgttaaaaaagcagacatgatcaacaaaaatatgactcatcaggtccaagctgagagagatgcactggcacta

SEQ ID NO: 817729 - DNA, 100 bp, Homo sapiens
aatataatgaacctcatgaaagcagaaccaactcggatattgttgagccttttttagcaaaacttcagtctccgattaaagaggagaatacaactgctgt

SEQ ID NO: 817730 - DNA, 100 bp, Homo sapiens
gaagagtggcaaccagaacctcttgttcctcctgtcccaaaagaccatcctgctctcaactacaacatcgtttcaggtctcaggtatgtctttatcagca

SEQ ID NO: 817731 - DNA, 99 bp, Homo sapiens
ccgagcccgagcgccccagcccggcaagtgagaaacagatggtggtggtgtgcaaggagtccccaaaggagtatctccagcctttcaaggacaaactag

SEQ ID NO: 817732 - DNA, 100 bp, Homo sapiens
acaccaacaggatacattgaaaggtgtgactgcacagaaaagttacaaaacaaatttgactttttgcgctcacagttgaatgatatttcgtcatttaaga

SEQ ID NO: 817733 - DNA, 99 bp, Homo sapiens
gatgtgtgagaagaccaccatcaacaatgagtacaactaccgctgctggaccacaaaccgctgccagaaaaggtgacagcagtattcgctattttgaga

SEQ ID NO: 817734 - DNA, 100 bp, Homo sapiens
agaataaacttatccaaaatcgacaagtacttcaaggttatttgttatcaaagcgtgaaggccaagcagggtctccagagaaaccgttatctgatctggg

SEQ ID NO: 817735 - DNA, 98 bp, Homo sapiens
gatcaaggccaagtatccgccagtcaataggaagtacgagtaagaactgcaggagctgcgggaacgctaccatttcctgaatgaggaataccgggccc

SEQ ID NO: 817736 - DNA, 100 bp, Homo sapiens
actttttgtcctaatccatgaccatgcgcactgggatcttgtgagacatatctgaagagatggattaagaatgctttggattaaggattgtggagcacat

SEQ ID NO: 817737 - DNA, 99 bp, Homo sapiens
ttggcctcatactctgttatagataaacaaggttgtctgcattcaaaagagcattctattaaagctaccttaatttggcgcttatttttcttaatcatg

SEQ ID NO: 817738 - DNA, 100 bp, Homo sapiens
attttccggtcccggcgcccggcgagggcgcgcggctggtgtccgccccgcccgaaaggatgtacagttacccagcacgtgtacctcctcctcctcctat

SEQ ID NO: 817739 - DNA, 119 bp, Homo sapiens
ctcattaacatctgtctgtccgcttagtcatcacatcatttcactgtggccccttcacagatgtagtcactacaaatcttaaattgcgaaatccatcggatagaaaagtgtgtttcaaa

SEQ ID NO: 817740 - DNA, 100 bp, Homo sapiens
tacagaaccaaatgctgaccctcgaaaaaaagatggagccctgcatatgattggctctttagctgaaatacttctgaagaggaatgcagtagcatggata

SEQ ID NO: 817741 - DNA, 123 bp, Homo sapiens
gagcgtgccaacctgctagaaattgctccccatttatcagctccattgcctataatgcttccagtttacaactggggtatggccgtcaatgtgtactccacatctgtgaccagtgaaaatctg

SEQ ID NO: 817742 - DNA, 100 bp, Homo sapiens
ctctactggacaaacatttcctccaagacaccattcgcttttcacccaagatgatttgatgtcttataaaactctgatgaaccatgatggctacacagac

SEQ ID NO: 817743 - DNA, 100 bp, Homo sapiens
gcgttcctgctgctctgcctgctccacaagcggcgccgcgccctcggcctgcacgggaactaccactgctggaatgaagcatggatgacaaggcctgacc

SEQ ID NO: 817744 - DNA, 98 bp, Homo sapiens
cggatctcaagctcgctatggagaattacgttttaattgactatgacaccaaaagctgtgagccgtgagctttgaggcggtgggatgtgtcagcagaa

SEQ ID NO: 817745 - DNA, 100 bp, Homo sapiens
cggtggaaaacacagatccagagtgttactggcttacaaattggattgagattatctttctcaaggaatagatctttctggaatagaagtgatagaaaat

SEQ ID NO: 817746 - DNA, 100 bp, Homo sapiens
aatttacactgacagaagcagtggtcgaatccagtagaaaactggtcaaggaagctagcctctgcattgagaacagctgcatcgcggcccacgacaagag

SEQ ID NO: 817747 - DNA, 99 bp, Homo sapiens
tattaccagtgaagacgtggccgaaatgcacaacatcctgaagaaataccaccaggatgctgggcagttttatgctaaatataaagaaacaagattgaa

SEQ ID NO: 817748 - DNA, 99 bp, Homo sapiens
gttgtccttctattcaggccactcttcgttttccatgtactgcatgctgtttgtggcaaatattgaaggatgtttgttccaagatctctaaaaatcaag

SEQ ID NO: 817749 - DNA, 98 bp, Homo sapiens
ccagtccctgctcccagtcagctcccagcttcaagcccaaccaagtgcgagatctgcgtgaaaagtcaataacttctatccggagtgaactgattcca

SEQ ID NO: 817750 - DNA, 99 bp, Homo sapiens
tggtggggacttccctgtcttgcgttcctgtgttttctaatgcacgcccgagttagtgtgactctggatccagatacagctcatcacgaactaattctc

SEQ ID NO: 817751 - DNA, 100 bp, Homo sapiens
aacgggcagtttgtcgaacgatgttggactcatagtcactgccagaaagatacaaaagttgggactacaagcaagtgacataaaaagcttctcagctctc

SEQ ID NO: 817752 - DNA, 98 bp, Homo sapiens
agacactgttgaactctgtggtgcgcttaagcagaagatggctgtgccacccacgtatgccgatcttggcaaatctgccagggatgtcttcaccaagg

SEQ ID NO: 817753 - DNA, 133 bp, Homo sapiens
gacttaggccagccctacagcagtgctgtttactcattggaggaacagtaccttggcttggctcttgacgtggacagctccaaacaggcatgcgaggtgcctttggaaagccccagggcactgtggccagggt

SEQ ID NO: 817754 - DNA, 100 bp, Homo sapiens
tcttagctcacgacacttccggttccttttaaaggcccccaaggctgtgcaacgcggagcgtgagaggaaggccaagggcgagatcccagaagtggcatt

SEQ ID NO: 817755 - DNA, 100 bp, Homo sapiens
ttccagcccgtggtccttctccatattcgagggcaaccttcgcccagaagaggcacttcaggctctcaccatatatgaggggaagtttggtaggctgaag

SEQ ID NO: 817756 - DNA, 98 bp, Homo sapiens
actgaaagaagtggatgatgtgcttggtggagcagctgcctgggagaatgttgactctactgcaggttttccagcttgcagctcatctggtgtactgg

SEQ ID NO: 817757 - DNA, 99 bp, Homo sapiens
cactttttattaatttgatcagtgatccttcacgttggggcacagacagaagcttgatgactctaaacctagtttgttctctgaccgcctcagtgattt

SEQ ID NO: 817758 - DNA, 100 bp, Homo sapiens
ctatggcagtggcagaagattttaattagaggctgccattcgctgcaaggttgaacacccccatgggccctggacgaactgtcgtcgttaaaggagaagt

SEQ ID NO: 817759 - DNA, 98 bp, Homo sapiens
gaaagctgctgttatcatcatggctgtagagtttgttgcatattctaaggacccagacataggcttggtggcccgtctcttgtctttcctggtttatg

SEQ ID NO: 817760 - DNA, 98 bp, Homo sapiens
tttctctgatttagctgtggccagaagagctccgaagagacaggcgagcttgaattagagtctgtcaaagcccagtctttggcaataacaaaacaaaa

SEQ ID NO: 817761 - DNA, 100 bp, Homo sapiens
cctggaaagacaccagtatatggatcaaagcaagttggagaaacatcagcacctggagacaccttagatggcacacctcgtactctcaatactgtctttg

SEQ ID NO: 817762 - DNA, 100 bp, Homo sapiens
caccctgagagtggtgaggaggctgtggccttggtggaggattggcaccgagagaccaggactgcaggacagtcggtatattcaagagcaaatgaccaag

SEQ ID NO: 817763 - DNA, 100 bp, Homo sapiens
ccacctggagaccttatcaaccctctcaacctcactctttctgtatgtccagagcctcctggacatcatggagttcctggacaaggatcccgaggaccat

SEQ ID NO: 817764 - DNA, 100 bp, Homo sapiens
gaacatttcagaaatacagaagttgaagcagcagcttatgcagattcctgacattcagacaactgacttgtaactgacttataactgacttgtaatacac

SEQ ID NO: 817765 - DNA, 100 bp, Homo sapiens
aatgaaatgtcttctgaagctgacatggagtgtctgaatcagagaccaccagaaaacccagacactgatgagttttgagagcaaaatgacaacacccaga

SEQ ID NO: 817766 - DNA, 98 bp, Homo sapiens
gtaattattgctgctgttggtaccagacaaaatggcatcaagcatgatggaaccatgtgtgatacctgccgccagcaaccaatcattggcattcgatg

SEQ ID NO: 817767 - DNA, 122 bp, Homo sapiens
tcacagtacatccctaccacacagagccagggcttccactgcccaccagtgtggccttgacagaaatgttggtaaatgttctgagtatttgctctgatgatgaactaatgactgaaggtgaa

SEQ ID NO: 817768 - DNA, 101 bp, Homo sapiens
cggggatcgggatgtccctcctccttctcctcttgctagtcctattttgtaacggattatgatccaaccattgaagattcttacacaaagcagtgtgtgat

SEQ ID NO: 817769 - DNA, 100 bp, Homo sapiens
acccactctctttgggctcctgctgggtttcctggccagcacgtgtgcagataagagaacggaccagttacagaagtggatccgcggtaatgtgagtgca

SEQ ID NO: 817770 - DNA, 98 bp, Homo sapiens
catgctagtgagtcccacgaattcagttcccacgccaaaccagaccccatggcctgctcagcctcagcggtttctgagtcccttcaacatgatcctgg

SEQ ID NO: 817771 - DNA, 100 bp, Homo sapiens
gagcgatggccgggatcctggagcactcggtcatgtacccggtggactcggtgaagagccagcccctgggcaacaaagtggaaatggagattgtgagcat

SEQ ID NO: 817772 - DNA, 100 bp, Homo sapiens
cagccccgacctggcggggccaggacgctggttcatacactccaagaaaccccgagactcttcagttgaagttcgtagtgattgggaagtgaaagaggaa

SEQ ID NO: 817773 - DNA, 50 bp, Homo sapiens
cgatgcgatcaactggaagaaaggaaatgaatactgcattgagggacgga

SEQ ID NO: 817774 - DNA, 99 bp, Homo sapiens
ctacatttagcgcatcatgtgatccgggacttgaaaatactggaaatctgtccggatccaaattattttgcaagccagatgagtaaccagagggcatga

SEQ ID NO: 817775 - DNA, 98 bp, Homo sapiens
tgcggaacaggacgccctctgatcccagctcaacattggcaatgtgctccctgtgggcaccatgcctgagggtacaatcgtgtgctgcctggaggaga

SEQ ID NO: 817776 - DNA, 99 bp, Homo sapiens
agaaaatcgtcatctttctgaaatggtgatgaaattggaattgggtttacatgaggtgaggaagaaaatgcttcccgttcttctggatgggcatcctat

SEQ ID NO: 817777 - DNA, 98 bp, Homo sapiens
cggagaggagctgcctgctcaaagagctgcaccgcttcgagtctattgccattgcccaaggttttgctggcacacctggatatctttctccagaagtt

SEQ ID NO: 817778 - DNA, 100 bp, Homo sapiens
agccgctggcggcagtcacttgtacagcgccggtcaacatcgcggtcatcaagtactaggactaccccaatggcacctggctgggcgacgagaacaaccc

SEQ ID NO: 817779 - DNA, 100 bp, Homo sapiens
ctaaggaaagagcctggaaaatggagcagacctggacgaggagttccgattctgaagaggcatttgagaccccggagtcaacgacccctgtcaaagctcc

SEQ ID NO: 817780 - DNA, 100 bp, Homo sapiens
ctgcaaatgaagctctcgaggctgctaagagactaagggagttgctggaagccatcaaacgtgactttggttcctttgacaagtttaaggagaagctgac

SEQ ID NO: 817781 - DNA, 101 bp, Homo sapiens
caaaacgccaggcggatctcagaaggccagttcaaaggtgttagtaaaatggcctttcgccatttaattgagttcacatatacagcaaaattaatgataca

SEQ ID NO: 817782 - DNA, 100 bp, Homo sapiens
gtcagtggtggaagtgagaccgaaatagactctgaagtaatatctggactttgaaattgaattgaatgatctggcacgggaccctccagcacagtgttca

SEQ ID NO: 817783 - DNA, 100 bp, Homo sapiens
tgtttttcaagggacggatacaacgactagaggctccatggagtgtgctgatgagccctgtgatgcctacgaggtggagcagaccccacaaggattccgg

SEQ ID NO: 817784 - DNA, 100 bp, Homo sapiens
gaggaagtgttcagtcaagaatgggattctgaccatctcacatgccacaaaatgagccgtcagactgctacagcattacctaccggtacctcgaagtgtc

SEQ ID NO: 817785 - DNA, 98 bp, Homo sapiens
tattctcggatattttattgataagctttctcctgtttctcagaggatttatcaattatgcaaaagttcggaagatgccagaaactttctcaaatctc

SEQ ID NO: 817786 - DNA, 100 bp, Homo sapiens
cccattcaacagccatctggccctggtgaggtgaaggattttgacattgctggtcagtttgaccctatgatccccgatgcagagtgtttgaagatcatgt

SEQ ID NO: 817787 - DNA, 99 bp, Homo sapiens
cagcgcagtggaagtcaagagcaagttactgtaaaatggggaaaggagaaatttgaaggtgtagaattgaatacagatgaacctccaatggtattcaag

SEQ ID NO: 817788 - DNA, 98 bp, Homo sapiens
cagagtaactgtcccctctgactaccatttctaagtgtctgagcagcaggagagagccttcacgctggggctagcaggacttctcggcgagggagttt

SEQ ID NO: 817789 - DNA, 98 bp, Homo sapiens
actgctataaaaacaacaacaaatacttttattaattcggggagcctggtcaccaactggatgctcagtgcaatgcgtgttttactatctaaattacc

SEQ ID NO: 817790 - DNA, 100 bp, Homo sapiens
acccccttccatctagtaagccttttcagaagtattcctggtcagttactgataaagaaggttgggataattcttcactattccacccttgccacagtac

SEQ ID NO: 817791 - DNA, 50 bp, Homo sapiens
tctgtgtgctctgattgtaatggagaagcctgaagcaggacattctaaat

SEQ ID NO: 817792 - DNA, 99 bp, Homo sapiens
cctgcagcagctgagaaaggagctcggggactcccccaaagacaagaagccacgttacgagatccgatggaaggtgattgagtctgtgagctctgacgg

SEQ ID NO: 817793 - DNA, 100 bp, Homo sapiens
accagtagtttggagaggccttatggtaatgtcggccattgagaaattgttgaggcaggtcacccaacctgcctgcagtttaccctgaacatgaccgagg

SEQ ID NO: 817794 - DNA, 100 bp, Homo sapiens
aaatagcttgtgctgctgctgctgctgctgctgcatgtctaccaggagaggagggaactgcggagcgggtgaccgggttattgatgtgggatctgaatgg

SEQ ID NO: 817795 - DNA, 100 bp, Homo sapiens
tatctgattaaaccccctgaagaaaatgaaagggaaaatggacaggagattcttctgtatttgataggtacaagagttacagcccttatgacatgttgga

SEQ ID NO: 817796 - DNA, 98 bp, Homo sapiens
cagacagctcagaagttccatagaacgggttattaacatatttcagagcaacctctttcaggctttaataggccatttcataattctgaatcatgtct

SEQ ID NO: 817797 - DNA, 100 bp, Homo sapiens
atgtccactccattctcccacaggatcacaccttcaagagtgaactgggggggacacagcgattgccacgcgccattggaatgtccctggccaaggagct

SEQ ID NO: 817798 - DNA, 98 bp, Homo sapiens
ggagttttccaccaaatgaaaatacaggaaaggaggtgacgtgtctggcatggagaccagatggcaaactgcacgatctgattttctggagagatgtg

SEQ ID NO: 817799 - DNA, 100 bp, Homo sapiens
gccttggtcccagcgccttcccacggagcagcactcttcaccctgcacagccttgttaggccagaagcggactcctagaagaggggagcagcaaggatgg

SEQ ID NO: 817800 - DNA, 98 bp, Homo sapiens
ggcgagagggagccgcagctgatgtcaggttcagattcagaacaagaaagtggacatctctaaggtctcctccaagtgtgggtctaaggctaacatca

SEQ ID NO: 817801 - DNA, 100 bp, Homo sapiens
gaatgcagtgatctgcagtgggacctatgcacaggcgtttaaacagaaatcaccttcagctgtttcctgagttgctgtttcttgggactgcgaagctata

SEQ ID NO: 817802 - DNA, 99 bp, Homo sapiens
acggaagaaaaggtctggccggctgtttgcttctcaaacatagaataggacccgtttgtgtactgtttgtttgttacaggtgataaaactaggactaag

SEQ ID NO: 817803 - DNA, 98 bp, Homo sapiens
ggactattttcacgttttaatgccgagaggaaaatagggatgctgataataccttgctcagggggttgtccaaagctgtgttgtgcagtatggcagcc

SEQ ID NO: 817804 - DNA, 100 bp, Homo sapiens
agaaactgacaaaaacatttctgaggttagctccattcagaaccaaatgcagtccaagggaggttatggaggtggaatgcctgccaatgtccagatgcag

SEQ ID NO: 817805 - DNA, 98 bp, Homo sapiens
accccccactgatcgcgctggataaagatgcgcctctgcgatttgcaggtgtttgtggccagtcctcacaaaacacagcctattgtggagatcctgtt

SEQ ID NO: 817806 - DNA, 100 bp, Homo sapiens
ccgccatgtacttggagcactatctggacacttcgagagctgtgcccaggagtgaacaaccagccctacctctgtgagagtggtcactgctgcggggaga

SEQ ID NO: 817807 - DNA, 100 bp, Homo sapiens
aggccgaggagacgcgggccttcgagcagctcatgaccgacctcaccctgtcgcggaatgatatggaacctagcaaagctgttccactgaatgcatctaa

SEQ ID NO: 817808 - DNA, 98 bp, Homo sapiens
gccaagcagcaacagctggcagcatcacccccggacagcaagagagatggaaccatgtaaccaccacgaccaagaggccagtaaccaccagagctcca

SEQ ID NO: 817809 - DNA, 99 bp, Homo sapiens
tcccgggcgcagcgagaggatggtcatccgcgtgttcatcgcctcttcctcgggcttcgtggcggaatgtatcctgtcaggtataatgtcagtgaatgg

SEQ ID NO: 817810 - DNA, 98 bp, Homo sapiens
agaattgcctttgggactctgaaggctgaaggcgggccttttttgaaggactacattaccattcaaagtattgcagcttcctccattgtcacactgta

SEQ ID NO: 817811 - DNA, 100 bp, Homo sapiens
cttggccatcactatacacaacgttccaggtctggtccatcgaactcatatgtcatcctgtcgggtggataagccctctgagatagtagatgttggagat

SEQ ID NO: 817812 - DNA, 100 bp, Homo sapiens
gatgatggccgcaggaaaccgggtataggaggaagagggcaattcaagctgctggaacaagaccgagatataaaggagccagtgcaatatttcaacagtg

SEQ ID NO: 817813 - DNA, 99 bp, Homo sapiens
ttgaatctggtgttatcaacttaaaagatgccacctctaagatgatgaggagtctgatgaggaagctgtgaagaaaaccaacaaatgtgtactagtctg

SEQ ID NO: 817814 - DNA, 98 bp, Homo sapiens
gctctgatgacttcaacctgtacatgtggagaattcctgcagatccagaagcagcttcttgcatgactgcctgaaatccgcctcctgtcagatcagca

SEQ ID NO: 817815 - DNA, 100 bp, Homo sapiens
cttatacagctaaagccatggaaagagattatggagaagtctggcgaggaaggaatgcctgatcttgcccatgtcatgcgcatcttgtctgcagaaaata

SEQ ID NO: 817816 - DNA, 98 bp, Homo sapiens
ttaattgtacccaaaacactgctggtataaactgcgagacatgtactgatggcttcttcagacccaaaggggagtcaactgagagttcaaatacaaca

SEQ ID NO: 817817 - DNA, 98 bp, Homo sapiens
ggagagactgccatgaagcaagtggatctccttacgtagcagccaaaataaatgaagcaaaagacttgctagaaacaaccaccaaacattgatgctta

SEQ ID NO: 817818 - DNA, 100 bp, Homo sapiens
aggctccagtttcctgtatgcattggatggaagtgacagtagaaagcagattgggcccaaatggaaggatgtggtgaccaaatgcatcaaggggcattat

SEQ ID NO: 817819 - DNA, 100 bp, Homo sapiens
accacctcagcccactgagcaggagtcacagcacgaagaccaagcgcaaagactagacgcttgaagcaaagctgccatcccagaagacgacatgctctca

SEQ ID NO: 817820 - DNA, 100 bp, Homo sapiens
tgatgtaaacatgagaatagctgctggtgaatctttggcacttctctttgaattggccagaggaatagagagtcgcacagtgcaaaaaaatgcaaaatac

SEQ ID NO: 817821 - DNA, 99 bp, Homo sapiens
gataggcctcaatgacaagatgtttgagcatgacttccgttggactgatggcagcacactgaagaatggtttattattgccagttttggcctcctcagt

SEQ ID NO: 817822 - DNA, 98 bp, Homo sapiens
aaaatatagtgaagtatttgaggccattaatatcaccaacaatgagagagtggttgtaaaaatcctgaaggagtggacgcttctcttgtgagccagct

SEQ ID NO: 817823 - DNA, 99 bp, Homo sapiens
acccaccggcccaccctacatttagcgcatcatgtgatccggattgagaggatccagaatccagatctctggaatagctaccaggcaaagaaaaaaact

SEQ ID NO: 817824 - DNA, 100 bp, Homo sapiens
catgctgaacagaagggcaagagaggtggatctgtgagggaaaagacccaataggataactcaagttactggacctgcgcgaagtctggctcaattatcc

SEQ ID NO: 817825 - DNA, 100 bp, Homo sapiens
tgcttctcttttcccgttgaaggtgctaccgctgacgacacccctggtggatggcgaggatgagagctatctttcagatcattcagagcataaggatggg

SEQ ID NO: 817826 - DNA, 98 bp, Homo sapiens
aagtttgttatgacctggaacgaattaaacttctacaaagaggacatggagaatgggctgaagcgatgcttccagctgcatttgatgccagaaggcaa

SEQ ID NO: 817827 - DNA, 99 bp, Homo sapiens
tctgcatgtggctgcaggacctctgtcagagaatgaaacactcatcgcatgatgccagatatacgaaacccagaaggaactcagtacagttcccatcct

SEQ ID NO: 817828 - DNA, 100 bp, Homo sapiens
ttcctggtctacatcctgcgggtgcctttgaaaatcaacgacaacttgagcacagatgagaattctccagccaacttctgggattctaagaacaggggtg

SEQ ID NO: 817829 - DNA, 99 bp, Homo sapiens
agcagcccagacgcggcacagagagggcctgggagcttgctgcagcttcagctgtcgcctggttgggcccggaaatgggacgtcgcgctttctcaggga

SEQ ID NO: 817830 - DNA, 100 bp, Homo sapiens
ggaaatcatgtcaagcgaagccttgaaaaagctgccctgagacggtgtcccgccgaaaggtttgacagtgctctggaagacctacctaagagtggacctc

SEQ ID NO: 817831 - DNA, 100 bp, Homo sapiens
gtgttggagtctacgctgtcttgtgaagcctgtaaaaatggcatgcctaccatctcccggctcttacagatgccatggagtcttgctctgtcgcccaggc

SEQ ID NO: 817832 - DNA, 100 bp, Homo sapiens
agtctgcgatgatgaaagagattgtattgctgttttggaaagaattagcagattggccgatgattcagtaatgctacagccctttgactatgatccgaat

SEQ ID NO: 817833 - DNA, 98 bp, Homo sapiens
gaagatgggaaagttattgaacggctgggccagagcgtggttgctgaccagttgaaaggattcatacctgtgtgtagccttggagtggctcaagtggg

SEQ ID NO: 817834 - DNA, 99 bp, Homo sapiens
gtcgtcctctgctgcatcatgatgtcaacaaccgtggctcacaagatgaaagagcacgctttggtatcaggatgatgctgtcctcataaaatgagttag

SEQ ID NO: 817835 - DNA, 101 bp, Homo sapiens
caattgcccttgagcatgattcgaaaggaaacaaaatcgcctggaagaacctaaaggcagacccagaagagctttttacaaaactagagaaaattgggaag

SEQ ID NO: 817836 - DNA, 98 bp, Homo sapiens
tcacggtccaggagccccaccccgcccttcgagagcatgcagaggctctgcgacaagtacaaccgtgccatcgacagcatccaccagctggtaggtgg

SEQ ID NO: 817837 - DNA, 100 bp, Homo sapiens
acacagagggttctttccattgtgtctgccagcagggtttctcaatctctgcagatggccgtacgtgtgaaggtaacgatgggggtccatcctcttcaag

SEQ ID NO: 817838 - DNA, 100 bp, Homo sapiens
taattgcccgactagaagaaaaaaccaataaaattactgcagccatgaggcagctggaacaaagacgcagtaaaacgcaggactcttcccgcttggattc

SEQ ID NO: 817839 - DNA, 138 bp, Homo sapiens
ggtgaatggagaccatcggattgggatctttgccaagagggcaattcaagctggcgaagagctcttctttgattacagactcagatatcagtgatcttattagctttttcacaagccagaacataatggtgacgatga

SEQ ID NO: 817840 - DNA, 98 bp, Homo sapiens
ctctacctggatgcattttaactaatcctgaggacttcatccggtcaccatctacctattcttcaaatggtttttctatatgagtggagaagacagct

SEQ ID NO: 817841 - DNA, 100 bp, Homo sapiens
tgttatcaacttaaaagatgccacctctaaggttgacatgacaactgaagagatagatgctcttgttcatcgggaaatcatcagtcataatgcctatccc

SEQ ID NO: 817842 - DNA, 121 bp, Homo sapiens
caaacgatccagacggcagggagtgcatcaaaggtgtgaacacaggtgctgatgtatggacagccgtatcgtgttaccttagagcttgagctgccagagtcccctgtgaatcaagatttgg

SEQ ID NO: 817843 - DNA, 99 bp, Homo sapiens
attccaacgccaccaattccaacctggtaaaaagaacgtattctcatggtacttacagagctggcccaatgagacaaataagcttggtgggagcagttg

SEQ ID NO: 817844 - DNA, 100 bp, Homo sapiens
ccccgatttatcattgatggagccaacagaactgacatctgtcaaggagagctaggcgatgacccaggatgcagccaggggccacgacatgcacggagga

SEQ ID NO: 817845 - DNA, 100 bp, Homo sapiens
cagccctttgatctctgctttgggggccgaaggcagttctgcaagaggagctattctgatcttgaatgccttccctgtgtctggtcaactctatacaaca

SEQ ID NO: 817846 - DNA, 98 bp, Homo sapiens
ctgctgcccaaggccttcctgtcccgcgggaagcggcaggagccgccgccgacacctgaagatctcgtagtagaaattcttggggtgaacaaatgccg

SEQ ID NO: 817847 - DNA, 100 bp, Homo sapiens
cctgaacgtcaccgaggagaagtaccaggaggcgttggccaaggaggtatgtagaaaaccccaacatcatggcctgctacaatgaactgctccagctgga

SEQ ID NO: 817848 - DNA, 98 bp, Homo sapiens
tttccttccccctcggaaaatggttcccactgccgggcgagatttggtcgtattgggcgcctggtcaccagggctgcttttaactctggtaaagtgga

SEQ ID NO: 817849 - DNA, 100 bp, Homo sapiens
tttgttgaccgggagaaacgagatgggggtgaagctggagatatttcgggtatcacctcttctgggctcaagatggacaacaagaagcgcctggcctacg

SEQ ID NO: 817850 - DNA, 100 bp, Homo sapiens
ccttccagagcccgaccaggcctccactggcatcaccgacacactatgctccctccaaagccagtgatggctgttttagtacttcaggtggaattcgtcc

SEQ ID NO: 817851 - DNA, 100 bp, Homo sapiens
aggaatttgaagagatgctggaacatgcagagtctgcacaagttggagtccccaacccggtctctagtgatggaggccccaaaaggagtggaaatcaatg

SEQ ID NO: 817852 - DNA, 100 bp, Homo sapiens
gtggaagccatgaggccaaaggcagttgtattggtatgggaggacatggctatggtggagctggtgatgcaagttcaggttttcatggtggtcatttcgt

SEQ ID NO: 817853 - DNA, 100 bp, Homo sapiens
ctcctggctccctactcttctaaggatcgctgtcctgacagaagagaccagctcagctagtgagcaagaaacacaagctccgaagccagaagcgtccccg

SEQ ID NO: 817854 - DNA, 100 bp, Homo sapiens
gtaacaactgggccaaaggccactacacagagggcgccgagctggttgattctgtcctggatgtggtacggaaggaggtggggaccagcagataaatccc

SEQ ID NO: 817855 - DNA, 98 bp, Homo sapiens
gacaagccgctggcagccgcggatctcaccgccgctcaggatgaatgatttcggaatcaagaatatggaccaggtagcccctgtggctaacagttaca

SEQ ID NO: 817856 - DNA, 100 bp, Homo sapiens
cgagcgctggcggtgacggcgcggggtccgcgcccggagcgccccgccgcgcacaagaggaggttcagatgagcccctgctgacttgagagagacagaga

SEQ ID NO: 817857 - DNA, 98 bp, Homo sapiens
tgcggacatgctgggtggatccggatcgcatggaagacgcagcctggccgcgctctcccagtgtttttggctgaatacacaggacctctgctaatata

SEQ ID NO: 817858 - DNA, 98 bp, Homo sapiens
tacaaagcaataagatggacctttctggagaacatacatatgatagttgagaaagacacatattctgatcatgaagaaataaacacaagttaaatatg

SEQ ID NO: 817859 - DNA, 100 bp, Homo sapiens
tgagaaaaaacagcagatggctcgagaatacagagagaaaattgagacggagctaagagatatctgcaatgatgtactgaaggctgaggagaatgcagag

SEQ ID NO: 817860 - DNA, 98 bp, Homo sapiens
ggatttgaacttcacacagctgtttgaactccagtcagtctcagtcatcctacatcatcaggaatccacagcagaggcgcatcagccagtcacagccc

SEQ ID NO: 817861 - DNA, 100 bp, Homo sapiens
ctttagccgccgaggccgcgtgtcccaaaggccagattcttcagtatgatatgtggaatgttactcctacagacctatgggactggaaggttctcaagga

SEQ ID NO: 817862 - DNA, 98 bp, Homo sapiens
ctttgggttgtactcatagattgtgtaggcgttggtcttctgatagcaactttaatgtgcctcacagttagccaagttggccagaacttcacattcgt

SEQ ID NO: 817863 - DNA, 154 bp, Homo sapiens
caaaactccttatagctgcacagaaacaaaaggttgtggaaaaagaagctgagacagagaggaaaaaggcagttatagatggtaaggttgaagttacaaaagaaggtgtgaagttgtgtaccatgggtccaggaaaagtgtttggggaattggc

SEQ ID NO: 817864 - DNA, 99 bp, Homo sapiens
ccagcggcagcagcagcggcgggaggagcctccgggaatcttgtggaagaagaatgaagttgctgattatgaagctacaacattttccatcttctataa

SEQ ID NO: 817865 - DNA, 98 bp, Homo sapiens
aagctgaggtccagatgaaagagaagtttctggtcactccccaggattatgcgcggcttacatcaaaatctatcaaggagaagaacttccacatccaa

SEQ ID NO: 817866 - DNA, 100 bp, Homo sapiens
ttggaaacacctactttatagtcctgattcaagtgttggcggatggaagggaggagactcctgaccctcagaatggaactaagcgtcttgtagaaggaac

SEQ ID NO: 817867 - DNA, 100 bp, Homo sapiens
aattgttttacagtctgttccgcatgatcgttataataaggaactgcaagcacatgttgaccagataactgaaatggcagcagtaatgaggaaagccatt

SEQ ID NO: 817868 - DNA, 98 bp, Homo sapiens
gaggacaaagaaaaagattcctttcttggcaactggaggtcaaggcgaatatttaacttatatctgcctgtcagctgagtcatccaatggtggctatt

SEQ ID NO: 817869 - DNA, 100 bp, Homo sapiens
tttcaacaatctctatggcaccaaagagaagctgctcgagaatgtcgcagaaagaagaaagaatatgtgaaatgcctggaaaaccgagttgcagtcctgg

SEQ ID NO: 817870 - DNA, 98 bp, Homo sapiens
ggtctctggctccctcctcccagggccaggcgccgctcagaacgagagattggaacaattatcaggtcattaggatgctgtcctacggaaggagagct

SEQ ID NO: 817871 - DNA, 100 bp, Homo sapiens
catctcggagactagaggctggataccaaatagcagtggaaaccggtcctgaatgttcccagaactacacaacacctagtggagtgataaagtcccccgg

SEQ ID NO: 817872 - DNA, 100 bp, Homo sapiens
tcaaagcctattcaaaaataaaggtggacaatcacctttttaacaagttggtcaaagaaaaagtgatgtatgaaaaagaggcaaaacaacaagaagaaaa

SEQ ID NO: 817873 - DNA, 100 bp, Homo sapiens
agtttgtccagtggaagaccatctacatctcccacaggaagtgtcacacagcagtcaagtatgtcccaaacgtctttggttaccacagagaagcgcttcc

SEQ ID NO: 817874 - DNA, 100 bp, Homo sapiens
aaagactttggaagtcgtcaggaatttgactctggccttgttttaggaatctattccaaagaaaaagaagatgatgtgccacagttcacaagtgcaggag

SEQ ID NO: 817875 - DNA, 100 bp, Homo sapiens
tctgggctttgttgaggcggcagtatgaccgggtttctttgatgcgacctcaggaaggagatgaggatatattttggagaagttcagctgagtggcttag

SEQ ID NO: 817876 - DNA, 98 bp, Homo sapiens
ttcagtatctcaggcggcaccctgtccccgaggaggggaccatgacacagcctgacctctcgggacacacccagccctgtggacccagacaccgtgga

SEQ ID NO: 817877 - DNA, 100 bp, Homo sapiens
cagaaagcgaaacgactgatagtgtgcccagcgatgaagagagtgccgagccaacaaatggaattttcttgagcatgtttctaatcgttttgccattgga

SEQ ID NO: 817878 - DNA, 100 bp, Homo sapiens
agtatacagcaaacagcaatagttcgacagagcagattgttgtccaggcaggacagattcagcagcaggtggttagccagcgtttccctcagaacagcat

SEQ ID NO: 817879 - DNA, 100 bp, Homo sapiens
ccaggatcctgcacaggcagacgcgggccagcctcagcaccgacagccgacgcgcagatagcagagccatccttgggatcgccacatcacagaatcgtat

SEQ ID NO: 817880 - DNA, 98 bp, Homo sapiens
tgacagctgtgtactttgccctcagcatctcccttcatgtctgggtcatggagcgaatccgtttagctcgacagattgagaaatctgagtatcggaac

SEQ ID NO: 817881 - DNA, 100 bp, Homo sapiens
caggggcagcgggagccggccggtctaggtgtttttggaagagctgcagcctttgaagaaacatctcttgatgatgatatcatagactccttcctactgg

SEQ ID NO: 817882 - DNA, 100 bp, Homo sapiens
tgagtcggactttcaaaagcctcttcagagcaagcgatgaggggtcggcaccaggaattattatagaaagatcggctacagattacaaggcccgtacatg

SEQ ID NO: 817883 - DNA, 100 bp, Homo sapiens
tacttggccagtggatccttcgacaagtgcgtccatatctggaatactcaggttcagcagactgtacaggatctttttggcagagccccaagtaaagctg

SEQ ID NO: 817884 - DNA, 100 bp, Homo sapiens
acacaaataaaaaagctctgggcaccgtatcaagccaagaacagcccaatctcctttctgggcaaacgttccaaggtacactggagaacctagaagaact

SEQ ID NO: 817885 - DNA, 100 bp, Homo sapiens
gccccggtgctcggagccggcaccgccagcccgtcaagaactcaggccacagtggcttggccaatggcacagagtacccaaaggcaagtggaacagctct

SEQ ID NO: 817886 - DNA, 100 bp, Homo sapiens
ggacatcccggaagctgggaaatgatataaaccacagtacttcaggatcccattatgaaaattcccagcggggacctgtgtcttctacaagtgattctag

SEQ ID NO: 817887 - DNA, 98 bp, Homo sapiens
gccggtgaacgggcggcacaccctgggggagaacatcgccgacaacgggggtctcaaggcggcctatcggaattcctagaggacctgtgcaacaacct

SEQ ID NO: 817888 - DNA, 100 bp, Homo sapiens
gctgggccggcgccctggggccccggagagagcaaaatatgctgtgaattccatcaagaagaaagtcaacgacaagaacccacacgtcgccttgtatgcc

SEQ ID NO: 817889 - DNA, 99 bp, Homo sapiens
tgaaggattttgcactcaccattaaatctatcagtatttccaacttggggatgtttggcatcgacgaatttactgcagtgattaaccctcctcaggcct

SEQ ID NO: 817890 - DNA, 98 bp, Homo sapiens
cctgggaatgtacgacgccaaagatgacttccctcttaggaaaacagtctgggttctgcccgcacacattcctcgccaccttcttggtgtctgagaac

SEQ ID NO: 817891 - DNA, 100 bp, Homo sapiens
ttaagaacttggatcccattcacctgaggcacccgaagaagagaccatccatatttccaggtgtgatgaatgcagactctgctaccattttggctgtttg

SEQ ID NO: 817892 - DNA, 98 bp, Homo sapiens
ggacgggaagtcactcataagcgcgctcaagaagctattaagaatggcaaaggattgcatagcaagaaggaagtgcctatccaccgtgttgcagatat

SEQ ID NO: 817893 - DNA, 100 bp, Homo sapiens
gtgaaccggagaccccgaaaacggaagcgcagggagaaggaagaggtgtttgaaaagccagaagatacctgaaattcctgcagatgttgtgggtgccctt

SEQ ID NO: 817894 - DNA, 100 bp, Homo sapiens
aacatggtagactttgctatggatgtatacaaaaacctttattctgatgatattcctcatgatgagcacctctgaggagttggatgaaatgccagtgccg

SEQ ID NO: 817895 - DNA, 98 bp, Homo sapiens
ggccgcagcagcagcggcagtcacaggcacatcagcaaagagtttctctgcaggtggatattgttcccagccagggggagatcagcgttggagagtcc

SEQ ID NO: 817896 - DNA, 100 bp, Homo sapiens
tcatggtcattcttcgaacagtttaccgtagagatgtgcagtctgcaatggacagatatactgcattgtaatactgcattgcatgattgtgcagaatctg

SEQ ID NO: 817897 - DNA, 139 bp, Homo sapiens
ccagctcccagtgacaaaagcgttaagattgaggaacgggaaggcatcactgtctattccatattcttattgccaagtcccctctggctcccttcacctcatttgtctacaccatcaaggaggaaggcctggttcttca

SEQ ID NO: 817898 - DNA, 100 bp, Homo sapiens
acgctggggttacaatccaagacacactcaacacattagacggcctcctgcatctgatggggcagctggatacagtggacctgaataagctaaacgagat

SEQ ID NO: 817899 - DNA, 98 bp, Homo sapiens
atgccccaaaagatgactacaaacataggatgttttggcgagagatgtattcagtggaggaagctggcgaactggatgaccatttgatgccagttggg

SEQ ID NO: 817900 - DNA, 100 bp, Homo sapiens
aattcagagaggggaagtgatttgcctcagcttgtactgccaacctgcccctgctgcagcgggaactgctgcactgcgctcgggcggccaagcagacccc

SEQ ID NO: 817901 - DNA, 100 bp, Homo sapiens
cggttatactctgcaaggtggtgttccagtggcaaacagctgtataaactcttgtaaacaggactttgtgttttatgccccacgtctgagaatcaacaag

SEQ ID NO: 817902 - DNA, 100 bp, Homo sapiens
tcagaaaatacgtggttggagagctcatctggaattttgccgatttcatgactaaccagtgtaaaaggattgagagggaagaagaggaagaagaagaagc

SEQ ID NO: 817903 - DNA, 98 bp, Homo sapiens
ctagccagctaggttcctggtgctttggggagaaacttttccatgtctgtaaatagtgctgctgtcctgcgattgacaggacgaggaggaggaggaac

SEQ ID NO: 817904 - DNA, 100 bp, Homo sapiens
acgcactactggcccctgatccggttcttggtgcccctgggcatcaccaacatagccatcgacttcggggagcagtctattctgaacccagaagcccgag

SEQ ID NO: 817905 - DNA, 98 bp, Homo sapiens
agaaaggagctctatgaactttgggaagcaccatactggacataccttttatgtgcactgggactttttatttaccagtcactggatgctattgatgg

SEQ ID NO: 817906 - DNA, 100 bp, Homo sapiens
gagttcagaccgtggcgaagtggagagtgacatgcagttggatggcggtgactgcgtggcatgaacttcttgaagaagctcggagaaagggattaccttt

SEQ ID NO: 817907 - DNA, 98 bp, Homo sapiens
gggaataagactgcatctgttcatatgaggttggattagcagcatgccaaattgctagagcttatggcttaaagattttgggcactgctggtactgag

SEQ ID NO: 817908 - DNA, 98 bp, Homo sapiens
cttctgaccaggaagttagtgaatctatggattttagatatctgccagatgaaaaaggtatttcagtgtctgtagacaagatggaatcatctccattt

SEQ ID NO: 817909 - DNA, 100 bp, Homo sapiens
actgccccaactgcaacatctctgtgcagagtcgagatgcagcctggtaccagctgctgatggcaccactcagcgaggatcagaggacagcactgcagga

SEQ ID NO: 817910 - DNA, 98 bp, Homo sapiens
aaggctctgatgtatttcagatgattggcacttctctgtttgatgaagagggagccaagattgtcaaagacctaatgtccaaagctgagaagaatggt

SEQ ID NO: 817911 - DNA, 101 bp, Homo sapiens
cacagatgcaggagcagacgctgcagttggagcaacagtccaagctcaaagtggaccccatgtgaagaaaggagagagggagggagaatgagcaacgaggg

SEQ ID NO: 817912 - DNA, 98 bp, Homo sapiens
agcagccccgcagcggcgccgaggacagtgcagccgagttgcgtctccctcgcgcgagatggcggcagctatgccatccacgactcccaggcccccag

SEQ ID NO: 817913 - DNA, 98 bp, Homo sapiens
ggatttcctcccggacatgatggtcgagggccgcctgctcgttcctgacagaatgtttcagcaaccaaggagcacacaccctgatccttgattggtga

SEQ ID NO: 817914 - DNA, 100 bp, Homo sapiens
tggaccagactcagtgcctgatggatatcaggggtcacagacatttcatggggctccactaacaggagtagcactgtagatgggttaaggaaaagacccc

SEQ ID NO: 817915 - DNA, 100 bp, Homo sapiens
aaagaccttttccaggaactcacccgcttataattccccacctgcgatacaccctggaaattaacgtccgggccaggactgggctggtctctgacatggg

SEQ ID NO: 817916 - DNA, 98 bp, Homo sapiens
ccagctgggcactcctctatttcctctgctatatcctccctcagaccgccccgcaagtactcaggatcgatgatacaccccctgaagactccattcct

SEQ ID NO: 817917 - DNA, 100 bp, Homo sapiens
aaggagaaggataaagggaaggacaaggaattacataacatcaaacgtgggtgtacattccaagcagagtggccctcatccttcagaatgtggatctgcc

SEQ ID NO: 817918 - DNA, 100 bp, Homo sapiens
tggcttgtggcgtttggacatatgaacaggaacttatgggacccgtgacattaaaggatgttattgtggaattcaccaaggaagaatggaagttactgac

SEQ ID NO: 817919 - DNA, 98 bp, Homo sapiens
atgactcttttgaacaagcgcctccagaattccaagggaaagaagccatcagcttgcttggctcaggaacaacagaagagaataaagaaaatgacctc

SEQ ID NO: 817920 - DNA, 100 bp, Homo sapiens
ggtgatacaggtggttcagtcagatgtatggtctgctggctgtgtgttggctgagctgttactaggacaaccaatatttccaggggatagtggtgtggat

SEQ ID NO: 817921 - DNA, 99 bp, Homo sapiens
tgttgccaaggccaaatatgaatttttatttggcagatctgaagggaaagctccagatactattggtcagaaaatacaatatggcctcaaggggtgctg

SEQ ID NO: 817922 - DNA, 100 bp, Homo sapiens
tcgtgcgcttcgatgacaagcacatcccggggagccccttcacagccaagatcacagctaagcggtacatcgagacggacccagccaatcgggatcggcg

SEQ ID NO: 817923 - DNA, 100 bp, Homo sapiens
aaatgaaggtgtattcattatgggcaaaaccattgaatttcacatgggtggtaatatggagttaaaggcggcatgtcggggaaaccagcacgatgtgcca

SEQ ID NO: 817924 - DNA, 100 bp, Homo sapiens
ggccgggtggtgggcgcatatcctgggtagcctctaggaagcgctagacacattcatatggccttgaacccacagtgaattgaagagagaaagaaatgga

SEQ ID NO: 817925 - DNA, 99 bp, Homo sapiens
tcttgaccttctggaccgagtgatgataatccggaccatgctgtatactccacaggaaatgaaacagtgtgaagcagtatgcagatgttgaaggattct

SEQ ID NO: 817926 - DNA, 100 bp, Homo sapiens
aatcaaacgcaaaaaggcccaccctgaccgacttcatgatgaactttggtacaacgatccaggccaggtatttctttaaatccagaacaatggagccagc

SEQ ID NO: 817927 - DNA, 98 bp, Homo sapiens
cagaggctgaccaagacttcagtgatgagaatcgcacctaccaggcttccagcccggatgagagacaagaaagatttgctgatagatcactgttggaa

SEQ ID NO: 817928 - DNA, 99 bp, Homo sapiens
cggacccagtggcctcggcgattatggacccggccgaggcggtgctgcaagagaaggcactcaagtttatggcagagactccccctaatgggccagatt

SEQ ID NO: 817929 - DNA, 100 bp, Homo sapiens
aagcagtcctgtggtgaggcccatgtcaagaaggcctgagatctcccaccatcagctacagccaatttgtcagtcacgagtccatagaggccactgtatt

SEQ ID NO: 817930 - DNA, 100 bp, Homo sapiens
agaaggcaaggcagctgttctgaaggttaccttccgaacaagaatctatcactgtaatattaacagccaaggtgtgatctgtctggacatcttaaaggac

SEQ ID NO: 817931 - DNA, 100 bp, Homo sapiens
ttcaatacttgcactgaatgcaagaatcaagtgtgtaatctctgtggatttaaccctacaccacatttgactgagacacgaagatcgattgagaagttat

SEQ ID NO: 817932 - DNA, 100 bp, Homo sapiens
cagactcccagggaacctacagctttctccttcacagcattgcaggagggaggcagcgtccatggagcaaaaggaatgccaggatcctgcacaggcagac

SEQ ID NO: 817933 - DNA, 100 bp, Homo sapiens
tgtaaagatgaatgctgcttcgatgcaaatcaaccagagggaagaaaatgcaaactgaaacctgggaaacagtgcaggattaaactgcaaatatctcatg

SEQ ID NO: 817934 - DNA, 100 bp, Homo sapiens
tgcaaagctgtacaagagatcatgcagggccatgaaatgacaagcattggactgctacttggtgtttctgctgcaaaactaggcaccatggatatgtcta

SEQ ID NO: 817935 - DNA, 100 bp, Homo sapiens
cctcatcaacgcgggagacttccacggcctgcaggccaaacgtaccaagaaagtcgggatcgtcggtaaatacgggacccgctatggggcctccctccgg

SEQ ID NO: 817936 - DNA, 99 bp, Homo sapiens
gaccaacagataactgaggacaatggacctgcctgggcatagacttccttaagagcgatcgtcttctgatcaaaggaggtaaaattgttaatgatgacc

SEQ ID NO: 817937 - DNA, 98 bp, Homo sapiens
ataagtgaaacacggaaactgagtatgggatctgatgatgctgcctacacacaagatctagatactgatgacgatttaaatagcgacgattatgaata

SEQ ID NO: 817938 - DNA, 98 bp, Homo sapiens
gtgtgcatattcttgtgaggatagaagcactagtgctgtgctgtggctttcattgagaagctagacgcccagtctttgaatctaagtcaggaggattt

SEQ ID NO: 817939 - DNA, 100 bp, Homo sapiens
ctgctgggcaaacttcagactgcactgaaagaggtggagatgtgtgtttgtcaaatagatgataatagttatgcacgagtgcgagctgtggtgatgaccc

SEQ ID NO: 817940 - DNA, 100 bp, Homo sapiens
gagaccatcaccatgccccacgcggatccagctatgggacacagcaggacaagaacgattcagaaagagcatggttcagcactactacagaaatgtacat

SEQ ID NO: 817941 - DNA, 98 bp, Homo sapiens
aagcaccatgacgtccatccatttcgtggttcacccgctgccgggcaccgaggaccagctcaatgacagggtccaaattccaagcctgtagtgtcctt

SEQ ID NO: 817942 - DNA, 100 bp, Homo sapiens
ggaaccaggaaagaccacagccgatttgcaaactgccctatgatgtgacccctgagcaggcgctagctcatgaagaagtgaagacacggctagacagctc

SEQ ID NO: 817943 - DNA, 98 bp, Homo sapiens
cggacactttgttattggagaaacatgcagattatatcgcatcctatggctcaaagaaagatgattatgttgatggaaatcacaatcttctgacaaag

SEQ ID NO: 817944 - DNA, 100 bp, Homo sapiens
gtttacagcccttccagatacagctaccaggctccgagctctgtccagtggtgggagtattacatcccctcctctttctccagcattgccgaagtataaa

SEQ ID NO: 817945 - DNA, 99 bp, Homo sapiens
cggcaaccgcgagaaggcccagcgcttcctgcagaaggccgagaagctctacccactgccctcggcccgcgttaacacaggcatcactacttccaattg

SEQ ID NO: 817946 - DNA, 99 bp, Homo sapiens
ccgcagtgacccagtcaccctggatgtcctctgtggtggaggtggatacagcagtcggagaacatctggcagagacaaatacggaccacctgttcgtac

SEQ ID NO: 817947 - DNA, 98 bp, Homo sapiens
gatgatactatctatgaaggagaattttcagatgactggactcttagtggaaagaatgaagatgataaccgagccagtgagagcaagaaacccaaaac

SEQ ID NO: 817948 - DNA, 99 bp, Homo sapiens
tttgtacaaggatgtgatgttggagaactataggaacctggtcttcctagtacgtagagaaatcgacactcttaatgaacgtttagctgctgaaggaca

SEQ ID NO: 817949 - DNA, 100 bp, Homo sapiens
tctttcaaccccaacgtgaacacggtgtctgttatgatcacactgccagtgaaagatgtagaagataaacctgaacaacaaaccagaacaagagagactg

SEQ ID NO: 817950 - DNA, 100 bp, Homo sapiens
ttcacggctccatcgctgttaacttaattcagtgcacaaatgagatgaatgtgaacatcccacagttggcagacagtttatttgaaagaactactaatag

SEQ ID NO: 817951 - DNA, 100 bp, Homo sapiens
tcccaagtagctggaattacagtattccgaggttttgataaagataatgatggctgtgtaaatgtattggagtggattcatggattatcactgtttcttc

SEQ ID NO: 817952 - DNA, 100 bp, Homo sapiens
tgatgcatacattacagcggcatagagacatattgcaggcatttgcaagtaaaatcactggcatgttgttggaattatccccagctcagctgcttctcct

SEQ ID NO: 817953 - DNA, 98 bp, Homo sapiens
tggatttgcatggagttttgtggaggtggttctttacaggatatttatcacgatgctattaacattctgaaggagatgaaagagaaggatgttcttat

SEQ ID NO: 817954 - DNA, 100 bp, Homo sapiens
ggctgctggacctcagctacccccgcacccacgcggccctgctgaaagtggcgcaaatggcgctgagatgcgtctggagagccagagggcctgcctgaag

SEQ ID NO: 817955 - DNA, 98 bp, Homo sapiens
ggaggactcgctgcagtacaaagccaaatttgtatcctactgtggggcttcaaacaccaggagaagtggtcgatgccaattttgggcaacatcctttc

SEQ ID NO: 817956 - DNA, 100 bp, Homo sapiens
ctagccactttgcattgactggaaacaatggcatttacagaaagagtcaacagcagtggcaacaggtatggcacagtcacaagggtgggtgaaaagatac

SEQ ID NO: 817957 - DNA, 90 bp, Homo sapiens
cgggctgcagcagtggcgggcgcaggagcccggccccggagccaccgttatcaagtgggaatcctgtatatgaaaaatactatagacagg

SEQ ID NO: 817958 - DNA, 100 bp, Homo sapiens
actgtgggtctggactgatctccatgtcctgttgtggggcttttacagcctttggagagcccgagcccagcacattgtgccctgtactatatctcagctg

SEQ ID NO: 817959 - DNA, 101 bp, Homo sapiens
caaagtcttaatcgcaagtaacaacaaacttggatcattaccagaagagataggtcagctcaaacagttaatggagctgaaagaatcttcaagagggagac

SEQ ID NO: 817960 - DNA, 100 bp, Homo sapiens
aaggaccaagatggcagcagtgactctgctggctttggcgtatacacaggagcagcatggacctgtcagcaactaaggaacaaaagtaatgaagatttac

SEQ ID NO: 817961 - DNA, 99 bp, Homo sapiens
gtgacaatccaggctcccggggagcccctgctggacaatgagtccacacgaggggatgagcggctgcaagaatcttattgacctccagaagcacctgga

SEQ ID NO: 817962 - DNA, 117 bp, Homo sapiens
cagaaaccggggaccttaacaatccacctaagaaattcagagatatggtccagacctgtacatgaataactttggttagtcagagtgaaatattcaataatgagtggtgcagctttg

SEQ ID NO: 817963 - DNA, 98 bp, Homo sapiens
cagcacttgttccccaaacaagtgctcctacattctgggtgattgtgttgttacagtgctgcttgctgaagaggacaaagctgaagatgatgtagtgt

SEQ ID NO: 817964 - DNA, 100 bp, Homo sapiens
tggcccttccttggggttcctttgacagtcaaggaagctttccagctacaagtacgagctcaactggaggcagtcctgtgcggaaatctgaagaaaaaac

SEQ ID NO: 817965 - DNA, 100 bp, Homo sapiens
agaaggggaaatttgattacatactgttagagaccactggattggcagacccaggttgctgatcagctctgtgccaagtatagcaaggaatatggcaagc

SEQ ID NO: 817966 - DNA, 100 bp, Homo sapiens
atgtctgaaagcaaaacaagaagtggaaaagtctttcagaataaaatgcttcaaggttactgactttttatgatgtttggtggctatgagactatagaag

SEQ ID NO: 817967 - DNA, 100 bp, Homo sapiens
tgatcagtgtcattgttgtcatgactatcctcctggtggttctgtataaatacaggtgctataagtttgagaaggccggtgatacagtgtcagagaaaaa

SEQ ID NO: 817968 - DNA, 99 bp, Homo sapiens
cacatcagcgaccgggagaacatagacggcagtaacagagaagaattttgaaacaaaagattttcgagcctctctagaaaatggtgttctgctgtgtga

SEQ ID NO: 817969 - DNA, 119 bp, Homo sapiens
aagatgtgccgccgctgccaacgtcgagcggcgacggctgtctataccaaaactcacctttcctggtggtttactaattggttgtagtcctggttttatgaatgttcccaagatcaaag

SEQ ID NO: 817970 - DNA, 100 bp, Homo sapiens
gcccatttccagagagctgcggcgggagctgtatggccgccgtcgcaagaactattatttcatcaaacatgtcccgccactgacagaagaacaactaaat

SEQ ID NO: 817971 - DNA, 100 bp, Homo sapiens
gaacagaagaaaaaacaaattgaagcactccaaggagagcttaaaattgctgttttacagaagattagtgatgatgaaccaggttatgaccttgatttat

SEQ ID NO: 817972 - DNA, 100 bp, Homo sapiens
cgatctactagagggcgcaacaaggttggaagaaaaattactggcattgagcctttacctggagaaaataaggcatcctctggtatcacgattccaaaac

SEQ ID NO: 817973 - DNA, 98 bp, Homo sapiens
gtgatacaacattggaacttagtgttatgccaaaagatgaagacattctccaagtggtggatgatgctgaagaacctgacaaaacaggggagaataaa

SEQ ID NO: 817974 - DNA, 103 bp, Homo sapiens
tttaacacctcaaggttgaagcagaagaataaggagaaggataagtcgaaggggaaggcgcctgaagaggacgaagatgaaggatttgggggcagagcacttg

SEQ ID NO: 817975 - DNA, 100 bp, Homo sapiens
ccgaaatctgtcaggtcagcccaactttccttgtcgtgtcaatgctgtgcctcgtcctataccggagaaaaaatggttaaaaagatcaagtggcatgagc

SEQ ID NO: 817976 - DNA, 98 bp, Homo sapiens
aaggattccaagtaactcttatttgaattcctagaggacctgtgcaacaacctcttgaggatcgaatcttcactcccgctgtctcagcagtctacagc

SEQ ID NO: 817977 - DNA, 100 bp, Homo sapiens
ctttgaccagtgctttctatagggtttggaataccttgtagcaggacatgaggatataagaacaggcaaactaattgtgaatatgaaaagctttgtccag

SEQ ID NO: 817978 - DNA, 100 bp, Homo sapiens
tcctgcacgacctgctcctacagccggcgatccactcccggctgttcccccggaggctttgaacttggcctactccagcatttacggcagctaccggaac

SEQ ID NO: 817979 - DNA, 98 bp, Homo sapiens
ctggcccctcaagacagcgattctgaagtttctcagaaccgaagcccgcaccaagaatctttctcctggcctgccctccatgtcggggagctatcgtc

SEQ ID NO: 817980 - DNA, 147 bp, Homo sapiens
agatggacagatgttcagatatatcttgaattttctacgaacatccaaactcctcattcctgatgatttcaagttgcaggatgtgagtttgaatctatggaatgtctacagcaagatggatcctatgtctctggagagtttgctttc

SEQ ID NO: 817981 - DNA, 100 bp, Homo sapiens
gtgaggatgggttcagcgttgaggcagagagcttggaggagaccctgagggcgcggtggctcacgcacaggacgtcatctcggacctgctgtgcaaccgc

SEQ ID NO: 817982 - DNA, 100 bp, Homo sapiens
aacagatcttgactgcatttttgggaaaagacagagtaagaagactcccgagtgggaatgtaagacggacttagatattgcatacaaatttggaaaaact

SEQ ID NO: 817983 - DNA, 100 bp, Homo sapiens
tttgtggcggtgcctgtggcagtgactttcttggatcgggtcgcctgtgtggcaagagtagaaggagcatcgatgcaggagtatgctgctgctgttccgc

SEQ ID NO: 817984 - DNA, 99 bp, Homo sapiens
tccaggtctgggtggtcagaatggatccacgcctgatggctccacgcatttcccttcgtgcaatggctgccatccggaagaaactggtgattgttggtg

SEQ ID NO: 817985 - DNA, 98 bp, Homo sapiens
accagccaaaatcatttttgaggatgaccgggagattaacgagaccagaaggaagcatgaaacgcgcttggtagaggtggattctgggcgtcaaattg

SEQ ID NO: 817986 - DNA, 107 bp, Homo sapiens
ccaggtccggcgacagggtctacaagaacgagtgcgccttctcctacgactctcccgtaattcaacaggcattgcatcggccccccagctcagctgctcagtacctt

SEQ ID NO: 817987 - DNA, 100 bp, Homo sapiens
tatgaatttgctaaacttaaaagcaagctggttctctgggatataaataagggcattgctcccaaaatagagttttctacaaggacagccatcagagaat

SEQ ID NO: 817988 - DNA, 99 bp, Homo sapiens
cgcctgctacggtcctggcaagcacctcgggatcccattccttcacagggaccctagccagacctcacctccacccgcgacaacccagtcccctgaaag

SEQ ID NO: 817989 - DNA, 99 bp, Homo sapiens
aacgtttccagctgggaattatggatgatgctgcagagtgctttctgtccctttccccccaacacatcgcttgacatctgaagaagtatttgatttgga

SEQ ID NO: 817990 - DNA, 100 bp, Homo sapiens
gaagagccatggaaacaggaggaagaattcccaagccaaagctttccaggtcctcatgctgataccgccagtggatgccagaatttgcagtgtggttttc

SEQ ID NO: 817991 - DNA, 99 bp, Homo sapiens
cttgatctggagaaaaactggatgttggtagaaaaagcaagagtttgttatatagcaatcgggaagacaggtgcctacctgcagttcctcagtgtcctg

SEQ ID NO: 817992 - DNA, 100 bp, Homo sapiens
gctgacaacagctgtcgtctctgggactgtgaaacaggcaatttgaatcaacccatagaagtgacagcgctgtattcatttgaaggacagcagcctgggg

SEQ ID NO: 817993 - DNA, 100 bp, Homo sapiens
cgagacatgtactgatggcttcttcagacccaaaggggtatcatgaactgatcactaaatatgggaagttggagcctttggcagaagtggacctaagacc

SEQ ID NO: 817994 - DNA, 99 bp, Homo sapiens
ggacctcatggccttcagcccaagccttcagctgtctcgagaagattgtttaaatcctcccagtgaacatttggccatccagtgtcattggtctcagag

SEQ ID NO: 817995 - DNA, 100 bp, Homo sapiens
aaaccaacctgggtttgtcctgtctgtgataagaaggctccatatgaacaccttattattgatgggacctcagcagccatgtcgaagccccatagtgaag

SEQ ID NO: 817996 - DNA, 100 bp, Homo sapiens
accatttggctctgagctatgacaagagaggaaacaaaaagttaaacaagcaagcctgccataagtgagaaggcttctggctgtgatgggtcggagattc

SEQ ID NO: 817997 - DNA, 100 bp, Homo sapiens
ggcagcaccggaggcccaggtctccgtgcagcccaacttccagcaggacaagggtgaccaaggcgagaggggtccagtggggcaaccaggccctcaggga

SEQ ID NO: 817998 - DNA, 101 bp, Homo sapiens
gggagcagttgggaatcaggtctggaatactcctaaccaagaagttgcccagctgcaccacctcgtgagcgatgacgtctgcctgaaggtggtggagctct

SEQ ID NO: 817999 - DNA, 100 bp, Homo sapiens
ccggagtcggggacccaggagtttcctgtgtccagcgctgccggagccgcctgagatgccttcaattaagttgcagagttctgatggagagatatttgaa

SEQ ID NO: 818000 - DNA, 100 bp, Homo sapiens
tctgagctttccaagcctgttgtttatgatgtctgcgatgatcaagagatccagaagaggctcgctgagcagcagaatatcctccgaatcctaaatctag

SEQ ID NO: 818001 - DNA, 51 bp, Homo sapiens
ctgtggattactactgtgataccttcgtgaccctgctgaatggggagcagg

SEQ ID NO: 818002 - DNA, 135 bp, Homo sapiens
cgcagatcaaggagcgcaagtgcctgctcctcaagatccgcggtgggaaacagttcattttgcagtgcgatagccacagtgggctccacagaggtgagtgtggccgtgaccccagatggttacgcggatgccgtg

SEQ ID NO: 818003 - DNA, 98 bp, Homo sapiens
tcaacatcgccagatatcaattaggcatagagaaactactcgatcctgaaggttttgctgttactgctcagtgtagtcacaccttgaataagaaatgg

SEQ ID NO: 818004 - DNA, 100 bp, Homo sapiens
aggcttcgcgggaagacgcggcggcggcggcggaggatgagcctgcagagcgcgcagtacctccgaatgtgcccccagacctctccatctgcacctttgt

SEQ ID NO: 818005 - DNA, 100 bp, Homo sapiens
agcctgatcaagctactccagcagccttggtattacagggtcttcatgcactctgtcaagctgaggcattcaagtcagcagaaaagaaaacaaagcaaac

SEQ ID NO: 818006 - DNA, 100 bp, Homo sapiens
tcccatcaggtttcctgatgtgagcagtttctgatgaagaattgaaaagaagagtagctgaggagctggcattggagcaagccaagaaagaatccgaaga

SEQ ID NO: 818007 - DNA, 98 bp, Homo sapiens
gcagaacaactaaaacagtatgaaataaacgccactcctaaaggctggtcctgccactgggacagaggacagtccagcttatctgccgaggattcccc

SEQ ID NO: 818008 - DNA, 100 bp, Homo sapiens
gccagggctgcctcaaaggataccatctccaataatagacattgatgagtgcagcatcattcctgggatatgtgaaactggtgaatgttccaacaccgtg

SEQ ID NO: 818009 - DNA, 100 bp, Homo sapiens
tggagagatgcaagaccagtccatttggggaaatccttcggatggtgaactcattagaagtttaaccaccaaggactctgagagctggcaggtctgagta

SEQ ID NO: 818010 - DNA, 100 bp, Homo sapiens
ggtgcccggccccggactgcgggttttataggatcacattgacaaaagtaccatggagttttatgagtcagcatattttattgttcttattccttcaata

SEQ ID NO: 818011 - DNA, 100 bp, Homo sapiens
cgggacagagtcaccatttgatttggaacagcagtggcaagatctcatgtccatcatggaaatgcagcttgagatcttcttagcccagagagcagtggag

SEQ ID NO: 818012 - DNA, 98 bp, Homo sapiens
ggcagggggcggcggaccgcggggcgctcatctggctctgctacgacgcgctggtgcacttcgcgctgaagactgtgcagtctttgtaactgatgaag

SEQ ID NO: 818013 - DNA, 100 bp, Homo sapiens
ctatggtgtgtcaaaaggcaaagtgtgttttgagatgaaggctatgtccaaactgggtcttcggcaggttacaggagttactagagtcactatccggaaa

SEQ ID NO: 818014 - DNA, 100 bp, Homo sapiens
gtttgacccagcagactccggttacctttacctgatgacgtcccaccagagttgggctacacagagcagctgttccagttcctgcaggccaccgcccagg

SEQ ID NO: 818015 - DNA, 100 bp, Homo sapiens
gaaacaagttcttggcaagagaggcatcctccttgaagtatttggctgaggagttttcaatcccaaaatcgtggatgggaatgtgaagatgaccctgggc

SEQ ID NO: 818016 - DNA, 100 bp, Homo sapiens
agaaaatttcggtctgagccaaggagtatttttgaatatgaacctggcaagtcatcaattcttcagcatgaaagaccatggtacaggcatggatgggaag

SEQ ID NO: 818017 - DNA, 99 bp, Homo sapiens
tgttgaggacctgcaccgccaagccaagctcaacctcaaatcagtactgagggtattatcagaaaatccacccagcttcaccattactgtgacgtctga

SEQ ID NO: 818018 - DNA, 98 bp, Homo sapiens
gtcctctgctgcatcatgatgtcaacaaccgtggctcacaagatgaaagagcacggaacccgagcgtcatgttagggtgaagcagaggacctcagtgc

SEQ ID NO: 818019 - DNA, 54 bp, Homo sapiens
ctgggaggtggaacgggccgaactgcagctggagaagagcgtccggcgcctccg

SEQ ID NO: 818020 - DNA, 100 bp, Homo sapiens
aacaattgagatggcttcaaaggataaatccagcaaaaagaatgtatttgagtctctagtgatccctgaaaagttccagcatattttgcgagtactcaac

SEQ ID NO: 818021 - DNA, 100 bp, Homo sapiens
ttttgagccaaaccaagaagttcctgtagcaccttcacagtccaggcaagagaatgtaactggtcactacatttccccctttcatgatattcctctgaag

SEQ ID NO: 818022 - DNA, 98 bp, Homo sapiens
tcgtccagcctaggttccacccttttctgggaacgtgagtatcaaccaaggccagaagtaaatctgaagaaatattccggctgcctcaaagatattga

SEQ ID NO: 818023 - DNA, 98 bp, Homo sapiens
gaagctgtcactgccccagaaagaaagcaccccagagccaaggcaaagaggtacttcttgcaagggatatgcattagcacatactcaagaaggggaag

SEQ ID NO: 818024 - DNA, 100 bp, Homo sapiens
ccgggacacccagaagccgggaaatggtcaccttccgcaaccctgtcattgagaggattcctcggctccgacggcagaagaaaattttctccaagcagca

SEQ ID NO: 818025 - DNA, 98 bp, Homo sapiens
cggaaaagctgtatctatttcaggagtctgagaatagtggggacagcggataccccagtgagaagcggggtgagctggatgaccctgagccccgagaa

SEQ ID NO: 818026 - DNA, 50 bp, Homo sapiens
tcagtggctgactcacaggctgctcaaggagttatgaccactcagaaaat

SEQ ID NO: 818027 - DNA, 109 bp, Homo sapiens
tgcagtggaccacagcattcctgaaatacatccaggaaagacatggagattctcttaaaaagacatatctgaagagatggattaagaatgctttggattaaggattgtg

SEQ ID NO: 818028 - DNA, 100 bp, Homo sapiens
ttcctaactgatctgtacccagaaagagtcatacctggagcagcagggcctctgaaaaatggaaccaaattctctgaggactaaagtcccagctttctta

SEQ ID NO: 818029 - DNA, 100 bp, Homo sapiens
agaccgttacaacaaggctcgcaaagaccctactggtgtcgttcagtatttctacattgaagactggcaattcgttaatgattatcgacatcctgtcagt

SEQ ID NO: 818030 - DNA, 98 bp, Homo sapiens
aaactaccagaacggagatgtgtttggcgtcgctccccaagtagggagaagaagagagctcgttgggaggaagaaaaagaccgttggagtgacaacca

SEQ ID NO: 818031 - DNA, 60 bp, Homo sapiens
agaccaagtctggggtggcaccccaaaagatggcagaggcatttcatccttcatgaagcc

SEQ ID NO: 818032 - DNA, 99 bp, Homo sapiens
gagccatagtacctacagcagcactccaggtgcgtgctctggaggaggccaacgccgacctggaagtgaagatccgtgactggtaccagaggcagcggc

SEQ ID NO: 818033 - DNA, 99 bp, Homo sapiens
aaaagtgttaaatgtgatcagccttgaattttcagatacaaagatttgtactgtgttcgcagtgacctggggaacctgctcaaagccctgggtcgcttg

SEQ ID NO: 818034 - DNA, 100 bp, Homo sapiens
ccgctgttcttgctgctgaacgccaagcctgtgcctactacactggcacaagtggatagagaaaagatctatcagtggatcaatgagctgtccagtcctg

SEQ ID NO: 818035 - DNA, 99 bp, Homo sapiens
ggaccctgagactcccctaaaggccagaaagaacgatatcgcattcagagtgaacaatttgaagatctttggctcataaccaatgagcttattcttcgc

SEQ ID NO: 818036 - DNA, 146 bp, Homo sapiens
aggttccggccgtagagcgagagcctctaggtgtaaggaaggtgatgtcgtaaagccgggagtgtcgtaaaccaggttgggcccgaaggcatcctgcagaacggggctgtggacgacagtgtagccaagaccagccagttgttggc

SEQ ID NO: 818037 - DNA, 100 bp, Homo sapiens
accagcaggactgtgttcatgaagctgaggaggggagtaaattgaaaatattggggccatttagtaacttctttgcaagtgctcatcatcactgtagggg

SEQ ID NO: 818038 - DNA, 98 bp, Homo sapiens
ttttctctgcccttcaaaaagagtctcctggctgccttgatcctctgtctcctggtggtgagatttgatccagatgccacttcaaatgaacaacaaga

SEQ ID NO: 818039 - DNA, 98 bp, Homo sapiens
gccccaatttagtgggggtagccccttccaggttaatacaatctgttggaatgacactggagaatatattttatctggctcagatgacaccaaattag

SEQ ID NO: 818040 - DNA, 100 bp, Homo sapiens
ctgcgtggggcgggggctgcgcccgagcccgatctgccggctccgagtggacatcctcatcatggatgatgacgacgtccccagctggcctcccaccaag

SEQ ID NO: 818041 - DNA, 100 bp, Homo sapiens
gattccctgtgttctgcttttttcattgttccactggacgctcatcagagggaagatctttttcctcaattgaatcttgtggaagaagaatgaagttgct

SEQ ID NO: 818042 - DNA, 100 bp, Homo sapiens
gtccacacccgagagcccctccctgggacttgtgcaccatggacaattttgctgagggagatttcactgtggcggattatgccttgttagaagattgccc

SEQ ID NO: 818043 - DNA, 98 bp, Homo sapiens
aagaggcattttccccaaagtagcaacaaatatcatgagagcatggctcttccagcatctcacagttatggataaatatggagagttctacggccgag

SEQ ID NO: 818044 - DNA, 99 bp, Homo sapiens
tgactttcagcctgcgagccttcttcccggggcgccataaacgcccccaatttcccagctgctaaaggaagaggaagttgagtggtgattttatgcaat

SEQ ID NO: 818045 - DNA, 98 bp, Homo sapiens
cagtctccgggcgcaagtgcctccccagtttatttccccccaggtggctttcctgggggaatgcctggtaattttcccggaggaatgcctggaatggg

SEQ ID NO: 818046 - DNA, 98 bp, Homo sapiens
agcctccttcgccgcgccccacttgctcgtgcactttacacacatgagcttgcctgggaccagtggcagggaccccggaacctgaaggtgctgacaaa

SEQ ID NO: 818047 - DNA, 100 bp, Homo sapiens
tggacctggtgaagaggtacaagaaagccatcacgctggccatcggagatggggccaatgacgtgaacatgatcaaaagaatctggaaactgttcttcag

SEQ ID NO: 818048 - DNA, 100 bp, Homo sapiens
taccagtacattaggaaacatgctagaattacctggaacttcatcatcatctacttcacaggaattgccattttaaagatgacggcgccttgaggtaagc

SEQ ID NO: 818049 - DNA, 100 bp, Homo sapiens
ccacgtgcggaggaaggactcctcgctctatatagttccagggccctgcgaaccagaagacctcatcgacgggatcatctttgctgccaattacctgggg

SEQ ID NO: 818050 - DNA, 100 bp, Homo sapiens
ggacatcctggaacctgggaaaggacaccattcgcttttcacccaagatgatttgatgtcttataaaactctgatgaaccatgatggctacacagacatt

SEQ ID NO: 818051 - DNA, 100 bp, Homo sapiens
ccggacctttgagcatacaccgagagagtgaggagccagacgacaagcacacactatggcgctgaaacggattaataagagtctcactctgtcgcccagg

SEQ ID NO: 818052 - DNA, 100 bp, Homo sapiens
ctgtgcccgggccgggagctgggcagagagatcgatgtcttattgtgatgagtctcgactgtcatatcttcttcggaggatcacccgggaaaacgaccga

SEQ ID NO: 818053 - DNA, 100 bp, Homo sapiens
gagttttctctgccatgttgctattgcaggacggaaatgctgtccagtttcaacgagtggttttggcaggacaggttctggttaccacccaatgtcacgt

SEQ ID NO: 818054 - DNA, 100 bp, Homo sapiens
gtccccagtgagggtgtacaaatacccctttgaattaattatggctatttatccacctatcaatgtgctgccctcactatcacggttaatgaagtctgct

SEQ ID NO: 818055 - DNA, 100 bp, Homo sapiens
aactagccctcctactgatgaacagttgaacatgaagaatactggaaagttgctatgttttggatgctttcattggatttggaggaaatgtgatcaggca

SEQ ID NO: 818056 - DNA, 98 bp, Homo sapiens
gcggcgcgaccaggccgggcacctccgagcgcaaggacagcgcgaggtccgcgcagcccagcgcagccataaatgcatcttctgcagacaccgggtta

SEQ ID NO: 818057 - DNA, 119 bp, Homo sapiens
gatttctcaaggactgtccaagtgggaggctaaatctcgaggaatttcagcagctctatgtgaagatcttagcaaagcaatgtctcaagatggtgcttctcagttccaagaagtcattc

SEQ ID NO: 818058 - DNA, 100 bp, Homo sapiens
tacgacataatctgtcattgaacaaatgtttccttaaagtgcctcgatctaaggatgaccctggaaagaaagacttccgagtgcaggaactcccactggc

SEQ ID NO: 818059 - DNA, 100 bp, Homo sapiens
acgcaaagatctttcgaggccagctcgaattacatctttacaagaggaggtgaagcatctcaaacataatctcgaaaaagtggaaggagaaagaaaagag

SEQ ID NO: 818060 - DNA, 100 bp, Homo sapiens
cgagatccaggagaaccacgacgagacctacggcgtgccctccctggaggagctgggacttatcaaactggtttcaaagcacagagctcaagtaatttac

SEQ ID NO: 818061 - DNA, 100 bp, Homo sapiens
ctggtacgcggcactcagcggccagaaaggaaaaatatattcagggggaagagatgtaatagatttcacattatggcagttactaaagaagcacgtgaac

SEQ ID NO: 818062 - DNA, 100 bp, Homo sapiens
caaggagagaaaggctgtctccttgacttaaaggttacctaagtgaccccttgagttttagagaacaacttgtaatggagccttcatctcttgagctgcc

SEQ ID NO: 818063 - DNA, 98 bp, Homo sapiens
ttattctgacaaagagatgacaaccccagccaagcagattaaggatccttcaaaccaaaaatgtggtggaagaaagaaaaccgtgtctttcagcagca

SEQ ID NO: 818064 - DNA, 98 bp, Homo sapiens
aatctcactctgttaaagctggtctgttctaactgagattttcacccgatggaagactaattgtgtcatgtagtgaggataaaactattaaaatttgg

SEQ ID NO: 818065 - DNA, 98 bp, Homo sapiens
gtatggccgccgtcgcaagaagtgacttgatggagggtgagctctattctgctctcaaggaagaagaagcatccgaatcggtttctagtaccaatttc

SEQ ID NO: 818066 - DNA, 98 bp, Homo sapiens
cggtgcagcgaatcaagcgggagttcaaggaggtgctgaagagcgaggaggtacatgtacaggagcaaggagcttattcgaaataagagagagtgtat

SEQ ID NO: 818067 - DNA, 100 bp, Homo sapiens
catattctacttcattcagaagatcaggtacacaaatgcacgcgacaggaaccaggtgctaaagagattgatatcgcagcgaccctggagcacttgaggg

SEQ ID NO: 818068 - DNA, 100 bp, Homo sapiens
atcctcccacctcagtctcctgagtagctatgactacggacggaaactggacgcattggattagaaggctgcctttgtcaagatttttataggataagag

SEQ ID NO: 818069 - DNA, 100 bp, Homo sapiens
ctgcggcgcatggaggaggaggagccacaacgacctgcccctggtcctaaggcaggtttaccagaaagggctacaggatgttaacctgcgcaatttcagc

SEQ ID NO: 818070 - DNA, 99 bp, Homo sapiens
gccgctgaccgccgcgcgcccgaaccgggtgtccacatgagtgcctctcccagcagatccaggcatttggctttatgtcccgagttgccctacaagcag

SEQ ID NO: 818071 - DNA, 98 bp, Homo sapiens
tgcttcacagtgggaatctctcactgttcatcaccgctgccctagcagccgcagggtacttttgacttcagtgacattgctgtctatatattcaataa

SEQ ID NO: 818072 - DNA, 100 bp, Homo sapiens
gcgggcgcatctcccaccagagtcaggacaagaagattcacgtgtacggctattccatgggtcgagctgtgcagttttagcgggtacaagatctaccccg

SEQ ID NO: 818073 - DNA, 100 bp, Homo sapiens
ctgagagttacgtggcagaaatgatcaagtattctaccttgtaaatactgttatttgtatatactgtaaatgatgacatcggtgggcactaaccgagccc

SEQ ID NO: 818074 - DNA, 100 bp, Homo sapiens
cagaggaaaataagaacacagtggatgtcgagaacggtgcttctatggcaggatatggttccaagtgttcaggattccatagctgcttcacttgtgcttg

SEQ ID NO: 818075 - DNA, 98 bp, Homo sapiens
gagaaagagtggatttcagcctgcacggatggtcttgaaacacaaatggtttttgctttggggccatttggatcacacgatgttttttcaagatttta

SEQ ID NO: 818076 - DNA, 101 bp, Homo sapiens
tgaaagaatgtcctaccttctctatcagatgctgtgtggaatcaagcaccttcattctgctggaattattcatcggggaaacttcgtggcttgcatgacag

SEQ ID NO: 818077 - DNA, 100 bp, Homo sapiens
caagatcaagatccaggtctatttcacgaccaagaagcagatattgatgaatgttcagaacaaccctcagtgtgtgggagccacacaatctgcaataatc

SEQ ID NO: 818078 - DNA, 100 bp, Homo sapiens
gaggccaggaagatccttcaggtgctggaaaggaatgaggagttacagagggccgagaaggacaggatcaggctgaccaactgactgaagagcagattgc

SEQ ID NO: 818079 - DNA, 100 bp, Homo sapiens
gtcccttctgttcattacaattcacatctaaaccaaccactgccacaacctgcgcagcagacaggatcatcatgcctagggttcataacataaaaaagtc

SEQ ID NO: 818080 - DNA, 109 bp, Homo sapiens
tggcatatgaattgctgaagttgaagtacaaccagcatatcaatagattaccagaagcccagttggcatgctggaagatggactgccctccaatggtgtgccccgatct

SEQ ID NO: 818081 - DNA, 100 bp, Homo sapiens
aatagataacagcactggagccatgctgctatctcataaattagagctaacagcaaaacagtatcctgaaatccgagctgttccacttgttaacagagac

SEQ ID NO: 818082 - DNA, 135 bp, Homo sapiens
aatccttgtgacatggttaagcaacccagataccgaaaagggcctgatgtctgctttgataacaatgtcttgaaattttggacggtgtggaacttggagagccagcccataagaaaacggggaccacagtgccag

SEQ ID NO: 818083 - DNA, 100 bp, Homo sapiens
agcgcgaatatcgtcatcgttagaagctccaaccaggagattcagacctacgccattgcactgattaatgcactttttctgaaggctcctgaggacaaac

SEQ ID NO: 818084 - DNA, 100 bp, Homo sapiens
taataatagcaaacatcgatggcctactggggataacattcatgcagaacatcaggtttgtctacagattttgagcgttcgaagttgacccctgactaag

SEQ ID NO: 818085 - DNA, 100 bp, Homo sapiens
ctgagctgtcagatcaccattcccaaaggctgctttgaatgctgcatcaagtgtctgggaggagtcccctacgcctccctggtggccaccatcctctgct

SEQ ID NO: 818086 - DNA, 100 bp, Homo sapiens
agaaacgcctgccaatgctttctcatttggacccagactccagatcgggaggtggaatgaatcttacttgttgaatatcttctggttactagttggattc

SEQ ID NO: 818087 - DNA, 100 bp, Homo sapiens
agaaggtctggttagaccccaatgagaccaatgaaatcgccaatgccaactcccattctgaaaagaaatcatctctcctgtcagaggaacaacaagaaac

SEQ ID NO: 818088 - DNA, 100 bp, Homo sapiens
gattgtgtgaagactgtctggttgtcccagggaaggaaccaaggttctacactgcccctcagctatagacttattctggactcttctgtgtagttataaa

SEQ ID NO: 818089 - DNA, 98 bp, Homo sapiens
gaaaacctaaccatgaagacttgaacttaatacagcaagaaagaccatcaagtttaccaaacctgctaaggctgcctcagacctgactgcctggttca

SEQ ID NO: 818090 - DNA, 100 bp, Homo sapiens
caaacaccctcagctccacattgagagcaaaatctacaagatgatgcagggaggaggtattcctggagtggagagccactctttttgacctgccctacat

SEQ ID NO: 818091 - DNA, 100 bp, Homo sapiens
caagaatcaatgcgtggaattctcctacacttcctatttatgagggataaagtaattcctaataaagtggggacatattgtatccagtttggttttatga

SEQ ID NO: 818092 - DNA, 98 bp, Homo sapiens
gtgtactttccatttgccttcctgggaagttggtgaaccatctaaagaagagaaggctgtggccaagtatcttcgattcaactgtccaacaaagtcca

SEQ ID NO: 818093 - DNA, 100 bp, Homo sapiens
ggagcacgagttcaggaaggctcaggaagaggagagcagcaagcgggttctgatctacaatggccaactggacatcatcgtggcagctgccctgacagag

SEQ ID NO: 818094 - DNA, 98 bp, Homo sapiens
agtgaaccggagaccccgaaaacggaagcgcagggagaaggaagaggtgtttgaaaaggtcacccaacctgcctgcagtttaccctgaacatgaccga

SEQ ID NO: 818095 - DNA, 100 bp, Homo sapiens
aatgctgcacatcccttaatagtcatctacatagcaattctgtggtgttcttggtcacacatttatggagtttctgaagggcagtggagattactgccag

SEQ ID NO: 818096 - DNA, 99 bp, Homo sapiens
gagcaggcagagggcttctacaacagcttcctggagcagctgcgtaaaacatacaggccggagcttatcaaagattttaccaaatgttgcaagaactct

SEQ ID NO: 818097 - DNA, 98 bp, Homo sapiens
ggacagagcgcctgcgaccccagtcggtgctccggggaggtcacctgacgaggagatgaacaggaagcggtgcaggaggttcctagagttgttcagaa

SEQ ID NO: 818098 - DNA, 100 bp, Homo sapiens
ttaaagaccaattgcagaaatacatcagagagctggagcaagcaaatgacgacctggaaagagccaagcgatggccgccctgctcccccaatgaaaggcc

SEQ ID NO: 818099 - DNA, 98 bp, Homo sapiens
gaacaacaacttgcagctcatctctattgatgatgggaaatttggaattaagccttcccagaggagaatttctgggaaatctacatttcatagtgaaa

SEQ ID NO: 818100 - DNA, 99 bp, Homo sapiens
aacctcagagaccccccccgcagtatcctctccttatagttgtgtataaggaaggtgtgtatatttatgggctctacatggatggagcagcctgggaca

SEQ ID NO: 818101 - DNA, 100 bp, Homo sapiens
gaagaagcaaaatcaacaagaccagcaccagatccaggttctagaacaaagtatcctcagtgataaacaagcaactttgattcctgatgaggtgtttgat

SEQ ID NO: 818102 - DNA, 100 bp, Homo sapiens
cagaatccagagaccacatttgaagtatatgttgaagtggcctatcccaggacaggtggcactctttcagattacacacactccgcctgcaggaatactt

SEQ ID NO: 818103 - DNA, 100 bp, Homo sapiens
gaaggatgactatgagtatgagctattatagaaaccatgttcttcagattattaaggaatcccagcagcagcatggtttacggcatggagattttcagag

SEQ ID NO: 818104 - DNA, 100 bp, Homo sapiens
gtcgactgcccagagtccgcggccggggcgcgggaggagtaccttagatccacagaagatgctcttgtcatgggatggaggggaaagtaggagtcctgta

SEQ ID NO: 818105 - DNA, 100 bp, Homo sapiens
cccgcagccgccacctacccagtgaccatgatagatgtatcctccactcctcgctggccaccatcctgctgcccaacagaagaagctcttctgtctccga

SEQ ID NO: 818106 - DNA, 98 bp, Homo sapiens
cgggcaatgcctcgcgggcgcaatgaatccgcggcagaaaactacccctgagtgtggtcccacaggatatgtagagaaaatcacatgcagctcatcta

SEQ ID NO: 818107 - DNA, 99 bp, Homo sapiens
gagattccacccaaacttgctggtcactgggagaaagtgaatggcttggaggaaggcgtggagttcctgccagtcaacaacgtcaagaaggtggaaaag

SEQ ID NO: 818108 - DNA, 100 bp, Homo sapiens
ccttccggagtccgccccgtgaggagaatggccttgtgaaaaagggtaaagaacaaaacacacagcgaagcttttttctcagaatgaagtgtaccctaac

SEQ ID NO: 818109 - DNA, 115 bp, Homo sapiens
aaatgggcgagacacacctgcactcttcaacttcaccactcaagatccttgccagcacattacagaatatttttgttgaaccttcttgagaattcagagaaactgctgagtgacc

SEQ ID NO: 818110 - DNA, 100 bp, Homo sapiens
taaagttgcaacagcttatagacccccagctttaagaaataaaccaatcaccaattccaaattggacctccaggatatagtggctaccctgggccccagg

SEQ ID NO: 818111 - DNA, 98 bp, Homo sapiens
cgcggaggccacctatgaagaagactgggaagtatttgacccgccaccaccacctatcatgacagatggtgaagatgcggattacactcattttacaa

SEQ ID NO: 818112 - DNA, 100 bp, Homo sapiens
atgacagttcacataagaagttcttcgatgtatctaaacttggcaccaagtatgtggaaattgcaacactaacaagagagaatggaaagacagtaatcag

SEQ ID NO: 818113 - DNA, 100 bp, Homo sapiens
agcaaatactcagaaacatccttccagaaggagcgaactgaagaggttctacacaattggttacacttccaggggctccccactcagtccccagtcatct

SEQ ID NO: 818114 - DNA, 100 bp, Homo sapiens
aactgctgatgcggatgagaaggcctttggcgggtggaggaaaatcttggggtatcgcacatttttataaaagctgacagattgctgctccatgcattct

SEQ ID NO: 818115 - DNA, 99 bp, Homo sapiens
aatggtataagtttaatgatgaagacatagaaaagatggaggggaagaaattacaactagggattgaggaagatctagttgtggacatcggatacccaa

SEQ ID NO: 818116 - DNA, 100 bp, Homo sapiens
caagcgccagaagtatgaacggatcagcgagaagaagatgtcaacgcccatcgaggtcctctgcaaaggctatccctagtcaacaaacactcgggtccta

SEQ ID NO: 818117 - DNA, 99 bp, Homo sapiens
gaaaggaaagtagtgaaaatgattttgaagttattggaagataaaaatggagaggtacagaatttagctgtcaaatgaaagcagaagccactggagaaa

SEQ ID NO: 818118 - DNA, 99 bp, Homo sapiens
gctgcaggactgggcacagcatgagatccaaaggcagggcaaggaaactggccacaagagtcaatcttaagatgtgatactttcctgtgaaacctgaaa

SEQ ID NO: 818119 - DNA, 98 bp, Homo sapiens
gagaaggaagaggtgtttgaaaagctagagatgatcgctatggaaaatcctgcagacttgaagaagcagttgtatgtggaatttgaaggagaacaagg

SEQ ID NO: 818120 - DNA, 100 bp, Homo sapiens
cagcctgtctgcctcgcccgccctggggagcaccaaggagttcagacagttaaatctcacacagaaacagatgagaaacaaacagagagccgcaccatca

SEQ ID NO: 818121 - DNA, 51 bp, Homo sapiens
cagcacttcatccagcagtgcacagttcagaatgaccgaagaagcatgccg

SEQ ID NO: 818122 - DNA, 100 bp, Homo sapiens
aaacttcatcatctcaagttgacctgccacttcacccaaggaggggtgcctttagccgtctggacccaactggaacatttgagaaagaaatgattggcag

SEQ ID NO: 818123 - DNA, 100 bp, Homo sapiens
agtggtcgcttcttctccttggccaggtacaaagcagaaagtgcatagaagatgtgatccactttgcctgggaagagaagctctttctcctggctgatga

SEQ ID NO: 818124 - DNA, 100 bp, Homo sapiens
cacctggggtatggagaggaaggaagagaacatagataccctggagcgaatagccgggctggaacaggaggacttggtggaggcgcacggcaccttctac

SEQ ID NO: 818125 - DNA, 100 bp, Homo sapiens
attgagatgtcccatcaagctctatgatttctacctcttcaaatggctctgggctacagaccactatcagcctttaagaatatttgccggccatcttgct

SEQ ID NO: 818126 - DNA, 98 bp, Homo sapiens
cgggtcgttgtggtgcgctgtcttcccgcttgcgtcagggacctgcccgactcagtgaccaaagatgtgaccaaggccatggatgagaagaaatttga

SEQ ID NO: 818127 - DNA, 98 bp, Homo sapiens
gcactcgccgccgcggggcccgccgccgctcaccgcagccccctcctggcgacccgcaaagttgtggaaagtaaaaatgtagccctaccaaaaggaac

SEQ ID NO: 818128 - DNA, 100 bp, Homo sapiens
cccataggtcactgtgtggccatctaccactttgaagagtgcccaagacaggagcaggacattgtgttcctgatcgatggctcaggcagcatctcctccc

SEQ ID NO: 818129 - DNA, 98 bp, Homo sapiens
ctggatctgcgatctgtttgtgttggtgacaaagttcctgctgatataaggttaacttccatcaaatctaccacactaagagttgaccagtcaattct

SEQ ID NO: 818130 - DNA, 100 bp, Homo sapiens
ggacaccgggagtgggagagattggactgggagactcagcaggaacccttaacattcagggatgtggccatagaattctctccagaagagtggaaatgcc

SEQ ID NO: 818131 - DNA, 100 bp, Homo sapiens
gcagaagccatttcaggagtacctggaggctcaacggcagaagcttcaccacaaaagcgaaatgggcacaccacaggctttcatgagaaggacaagaagc

SEQ ID NO: 818132 - DNA, 101 bp, Homo sapiens
tctggacgcggatttttggcctcatactctgttatagataaacaagattaaagaagctaattgatcaagaaatcaagtctcaggaggagaaggagcaagaa

SEQ ID NO: 818133 - DNA, 98 bp, Homo sapiens
gcaagtacccgtccatcatagtcaactgcgtggaagagaaggccactgtgagcatgcatttcaggttgttggcgcagctctgctccatgatgtcgatc

SEQ ID NO: 818134 - DNA, 99 bp, Homo sapiens
ggcatgtgccagtattatgatgctcaatgtcaagtcatctttggctcaactgattggaatctttctcgcctactgcctctctcgtgccataacaaataa

SEQ ID NO: 818135 - DNA, 100 bp, Homo sapiens
gacggaaaaagtcgatctggagcttttcccctccccgggttggatttggtctagggagtcccagaaagaagtagaaaaagagagagaagcctaccgtcgg

SEQ ID NO: 818136 - DNA, 100 bp, Homo sapiens
ccgggattatcactttgagtgctaccactgtgaggttgataacactgatgctgaggggaggctcatactggctgatgcgctctgttacgcacacacgttt

SEQ ID NO: 818137 - DNA, 102 bp, Homo sapiens
cgagtatctccgtttcctggatgtgaacatgatgataattccgaagaaggcttccacactattcattcaggaaggcatgaatatgcattcagcttcgagctt

SEQ ID NO: 818138 - DNA, 100 bp, Homo sapiens
tttcgaaaatgtgtgtgaattggatttgatcttccatatggataaggtgtctttcaggttgcagaaaagatggaaaaaaggacatgtgcactctgcccca

SEQ ID NO: 818139 - DNA, 101 bp, Homo sapiens
agcgagttgcagatctacacttgtaacaaatgtggcaattattttggatctatcacctgtcatcataactggcttctgcttgtcatccacacaacaccagg

SEQ ID NO: 818140 - DNA, 124 bp, Homo sapiens
gatttacctataaatttaacttcaacaagctggtgatgcccaactacccattcatcaacattcggtcaagtgatcctacatggctttccaccaacctgggcatcctgacctgcatcgagtgttc

SEQ ID NO: 818141 - DNA, 100 bp, Homo sapiens
tgttcgggagtccttggaactgtggtccatggtaaagttttacagactatgcaatttgaagatgatgatcatggcccaccagctcctcctaacccattta

SEQ ID NO: 818142 - DNA, 100 bp, Homo sapiens
aacgcaaggactggactccatgccgaaggtatctggaagtcgtgacacggcatctgcaacaggccccagccaggcctgaagtcatcctcagaagggatgg

SEQ ID NO: 818143 - DNA, 100 bp, Homo sapiens
tccggacccactggctgctggagcttgtcaccaccaggttatgaagacagtatggagtttccagaccatagtagacatttgctacagtgtctgagcgagc

SEQ ID NO: 818144 - DNA, 100 bp, Homo sapiens
agacttggtggcaaattttttcccaaagaagttattagaacttgatagttttctgaaggctggcatggctctatataagattgtccccaaaaatccctac

SEQ ID NO: 818145 - DNA, 99 bp, Homo sapiens
tgaagttgaggtgactattgaaggtgtatgcaacagcgttattgcaacaggctaacgaaaacagacaaaattcaactggaaaagcatgttttggcacct

SEQ ID NO: 818146 - DNA, 100 bp, Homo sapiens
gaacaaaaacagggctctgatgagaacatgtcagaatggataagttctgaacgtcgaaaagaaaagtctcgagatgcagccagatctcggcgaagtaaag

SEQ ID NO: 818147 - DNA, 100 bp, Homo sapiens
cagagcccaagagcatttacgaatatcagcctggcaagtcttccgttctgaccaacgaaaagatggtgaccatccacggcaagatagcatggatttcagt

SEQ ID NO: 818148 - DNA, 100 bp, Homo sapiens
gccttctctgtggaactgctctggcagtcatcgtgcctgaaggagtacatgccctttatgaagatattcttgagggaacttcacagacagcgatccccag

SEQ ID NO: 818149 - DNA, 98 bp, Homo sapiens
tgggagaagagctccagagagttaaagctgaagctcaacaaagatatagtgatctctgtgggcatttataatctggtccagaaggctctcaagcctcc

SEQ ID NO: 818150 - DNA, 100 bp, Homo sapiens
ctcaaacaccagctactgtgaactctgccacttcaggtttgcagtcgagcgcaaacccaggccgttagtggaggtcaaaatgcagatcttcgtgaaaacc

SEQ ID NO: 818151 - DNA, 112 bp, Homo sapiens
tcataagaccgcgaccagacaggcggcgccatcttcgaacttagacttccggaaggactttggcgagggtgaaaggtgtagcagtcactcggcctacacccacagcatcgac

SEQ ID NO: 818152 - DNA, 98 bp, Homo sapiens
ggctggccaagttactggagccgatatggtatacctcaagtttactatttcggcccttgtggtaaatacaatgctatggtgctggaactgctgggacc

SEQ ID NO: 818153 - DNA, 98 bp, Homo sapiens
gggctacggcttcaaggaggaatacgaggggttgatagttcttggggaggtacctcccccagagcatacaacagacttatttcttccacttagttctg

SEQ ID NO: 818154 - DNA, 130 bp, Homo sapiens
tcgacaggctggtcctctactgcgggagccggctgggcaaatactacgtcaaggagaggtctaaggtccttccatagtgacgccccccaaggacatctggaatgtcactggtgcccaggtgtacttgagc

SEQ ID NO: 818155 - DNA, 101 bp, Homo sapiens
cgctggcaccccgaacgggttgcttcccccgctgcgagtttctgtgtttgaagaacatacgcaccttcctgaaagtctgccacgataaatttggattaagg

SEQ ID NO: 818156 - DNA, 138 bp, Homo sapiens
gttttcttccttatcaaccccaccaaaactttctactataaatcccggttttggctgcttaaactgctggttattaatgctgcactggctttagcagcaaaaccacagagtaaactggcccaagagaacatggatctt

SEQ ID NO: 818157 - DNA, 99 bp, Homo sapiens
ttggatgaagatagtttaaccaaacaaccagaagaagtatttgatgtcttagagaaacttggagaaggacattccacttcttccatctattacatctct

SEQ ID NO: 818158 - DNA, 100 bp, Homo sapiens
acatggctataatagaaggagcaaaatgtataaagggagattctagtatacagcccatctgcacaggggaactgaggagaaacaggaatgaagagtgggc

SEQ ID NO: 818159 - DNA, 100 bp, Homo sapiens
cctattttactgataagaaaacacatctttacacactaagcatagaatgtcaagctaaccaggcgtccgctacttcagaagagtgtactgtcgcatgggg

SEQ ID NO: 818160 - DNA, 100 bp, Homo sapiens
gacagtgggcaaagcgaggtgtttgtgtccaatgtggggcaggggtttcgggctggtggagcatgtgctgggacaggacagcatcctcaatcaatccaac

SEQ ID NO: 818161 - DNA, 98 bp, Homo sapiens
agagactcgccggccgagggtggccctaggggcagcgagcaagacagcaagcagacagccctcagcgcctttttccaggagaccaacatcccctacag

SEQ ID NO: 818162 - DNA, 101 bp, Homo sapiens
ccactgtcaccattggaggaatatttctcactatgtgcaatagacactttggcagtgttgtggcacaaaccattcggactcaaaaaacggatcagtttccg

SEQ ID NO: 818163 - DNA, 100 bp, Homo sapiens
gcagttggaaatgatggacttcaagaaagagacagaatggtccgagcatgcattgccattatctgtgaactaggactgactgcattgcacagatgatgga

SEQ ID NO: 818164 - DNA, 100 bp, Homo sapiens
caaaatgagctcttcagaagagtgagaaagatcagtctaaagaaaaggagaagaaagtgaaaaaaacaattccttcctgggctaccctttctgccagcca

SEQ ID NO: 818165 - DNA, 100 bp, Homo sapiens
agttattaatggactgcttggaaatatagtgttctggacttggtgcctctttctgttatatgctttcctatttagttgggagaccagttgtatacaaata

SEQ ID NO: 818166 - DNA, 100 bp, Homo sapiens
gagaattacaggaatcttctctcattgggtatttacttatgggatgtagaaggcagaaaatattttgacttcctgagttcttacagtgctgtcaaccaag

SEQ ID NO: 818167 - DNA, 98 bp, Homo sapiens
agtcacttcagatgagaccagaggtgcggaaggaacagaaaggttcgtgagccacacatctccccacaccaagctcctccatacaagacctcggactg

SEQ ID NO: 818168 - DNA, 100 bp, Homo sapiens
gaaggggtcccgaagccccctgcaggaactctacaacccaatccagggccaaacagcctttgatgtagcagatgaagacattttaggatatttagaagag

SEQ ID NO: 818169 - DNA, 99 bp, Homo sapiens
tttgctgatggtgtggttggagtttatgaatgtcacaatgctgggggaaaccaggtgggatgtgtgtgggctgaaattccgagctgcggttgtgcatga

SEQ ID NO: 818170 - DNA, 100 bp, Homo sapiens
ccctcaacagcaaaccggggtctccctcccaggacacaggagtcaagtttggaaattttagcattcaggtgccaggaatgcagatgggacagccagtgcc

SEQ ID NO: 818171 - DNA, 100 bp, Homo sapiens
tctcatcttggaaatgtcagctcttccgcagtgattgaagctttgataaatgaaatcttcctaagtatagtggacatcccagaaatacatgagagagaag

SEQ ID NO: 818172 - DNA, 99 bp, Homo sapiens
taactcttatttctccgttggcccaaccagtcccagcgctgtcgtgctcctctactcggaagccttgtgtgttgccaaagtgcaggtggaaatgggagc

SEQ ID NO: 818173 - DNA, 99 bp, Homo sapiens
tttccaccttggtgtgtctcagcaggctctacactgggatgcatacggtcctggtggcacgcactacccttcttcctggcctcctgaagaccatagcag

SEQ ID NO: 818174 - DNA, 98 bp, Homo sapiens
acgaatctgcccacccctcctgtaacccagcctgtttcacttcttggtgatgatcctgcaggaagtgcaggagagacccccgggtggctttcgagaga

SEQ ID NO: 818175 - DNA, 100 bp, Homo sapiens
aactttgtgattcaggagaactggtcgccatcaagaaagtattgcaggacaagagatttaagagctcgattcaggactggggtgaagaggtagaggaagg

SEQ ID NO: 818176 - DNA, 100 bp, Homo sapiens
agaggctgtggattcactgtctccagcgcctcttctttgagaaccaccctgcctccatccctgccaagggtggttctcttcccaaagtggaagccaaatt

SEQ ID NO: 818177 - DNA, 100 bp, Homo sapiens
ctaggatttttcatcatagctgtgctgatgagcgctcaggaatcatgggctatcaaagagtaaagccaatcccagctgaaggaatcaagtcaaatccttc

SEQ ID NO: 818178 - DNA, 100 bp, Homo sapiens
ccatccgccgatttggccgcctggattgtgttgtcaacaacgctggccacctacggaatcagagcccacgagtggatgttcccggtgtgaagctgcaggc

SEQ ID NO: 818179 - DNA, 100 bp, Homo sapiens
gtgaaaatgaagccagaccgagagtatcctgagctccagctggaccctaaattggatcctcttcctgctgagagtcccctaatgaacattgaggttgttg

SEQ ID NO: 818180 - DNA, 100 bp, Homo sapiens
agcctctgcgccgccggcaccatgagaaatgcatcttctgcagacaccgggttaagagggtctctggagcctgcatccagtgttcctacggtcgctgccc

SEQ ID NO: 818181 - DNA, 98 bp, Homo sapiens
ttgtacttacaaagtccatgctaacctactatgagggtcgagcagagggaaaacaaagtgcatgatgaagtcttcagactgtgtcataaagcatgctg

SEQ ID NO: 818182 - DNA, 100 bp, Homo sapiens
aaggatgtagacaggacccgtttagaggctacagaagaagtttccaaaaatctggttgccatgaaagaaattctgtatggcacaaatgaaaaagagcctc

SEQ ID NO: 818183 - DNA, 98 bp, Homo sapiens
attcccaagcccatatcatctctgctgatacgagggtggaacgcatgtcctgaaccacccacacagaatatgcctatgggtcctggagggatgaatca

SEQ ID NO: 818184 - DNA, 116 bp, Homo sapiens
tcagcgaggcggctttggagcaggcgctgggcgagccgtgcgatctggacgcggcgctgctgaccgacatcgaagaagttccacctggtgccaagcatcaacaccatgagtggcag

SEQ ID NO: 818185 - DNA, 100 bp, Homo sapiens
ggtcttcaaccttcccacaaactgatgttctttcaagttcacttgaggcagaacacaggattgccatatgaacttcaggactatgttgaagatacatcgg

SEQ ID NO: 818186 - DNA, 98 bp, Homo sapiens
cagtgtcagctgtacagccacactaactgtgacaggtggaatgaggtaccatctactgtctccagaggaccgagaagaacttgtagatggcacaagac

SEQ ID NO: 818187 - DNA, 98 bp, Homo sapiens
tgaaactatggctaaattacatattccagtaatggtggatgaagttgttcattgtttgtcaccacaaaaaggacaggaaagaccacagcaagattctt

SEQ ID NO: 818188 - DNA, 100 bp, Homo sapiens
tgtgtctctgaagaggctcgctcactcattcaacaggctcagccggagatgggccctgacgtgctggtgcagacgatgggggccccggccttgaagatct

SEQ ID NO: 818189 - DNA, 99 bp, Homo sapiens
tcctggtccaaggacacctacagccccgacgaacatttctgggtgacactcaacaggattcccggaataactcaagtcacctgtactggaaatcagttt

SEQ ID NO: 818190 - DNA, 100 bp, Homo sapiens
tactaaagtgtgctttgttggagatggctttacaagaaaaccacctaaatatgaaagattcatcaggccaatgataaacatgatgctggcaaacctgtac

SEQ ID NO: 818191 - DNA, 100 bp, Homo sapiens
acacttcgatggacctgttgaaaaaaatctgggaggttgaacttattaatgtgcctaagcctgtgcatcagcctgtaggttcttcctctacccttccgaa

SEQ ID NO: 818192 - DNA, 100 bp, Homo sapiens
gtggggagatgaacccaacctagtgggtgtaatacatcatgaactgcagggtcagcccaaggccaaccccactgtcactctgttcccgccctcctctgag

SEQ ID NO: 818193 - DNA, 100 bp, Homo sapiens
tgcctgatatcatgccaattgaatctgttattgcaagtaaaataaaacagggtctgttacctagcttggaagatttgctgttctatacaattgctgaagg

SEQ ID NO: 818194 - DNA, 100 bp, Homo sapiens
cgccgatcctccaggcatgccccgctacgagctggctttaatcctgaaagccatgcagcggttcacttcttcaactgagatggacatgatataatctcca

SEQ ID NO: 818195 - DNA, 100 bp, Homo sapiens
gaagaaactcaatgatcgtgtcatgagaatcgaatggagctgttagaaatagcaaaaaccaatgcagcgaaagctctaggaacaaccaacattgacttgc

SEQ ID NO: 818196 - DNA, 100 bp, Homo sapiens
gctcctccagctccagttcgtcagactccgactcagaggctgtggatgagatgaacggaaaggagctcaatggaaaacaaatttatgttggtcgagctca

SEQ ID NO: 818197 - DNA, 99 bp, Homo sapiens
ttctcgcggcgctcgagggaccatggccgatcctcgcgtgagacagatcaagatcaagaccggcgtggtgaagcgaattaaagctatagagagtcccaa

SEQ ID NO: 818198 - DNA, 50 bp, Homo sapiens
agccccgctccggccaacaatgatgtttatccatgcatcgttgagacttc

SEQ ID NO: 818199 - DNA, 100 bp, Homo sapiens
ccaccctggaaaccctgcattttgggaaactcgactttggagaaaccaccgtgctggaccgcttttacaatgcaggatatacgtggcatttcaagtgatc

SEQ ID NO: 818200 - DNA, 100 bp, Homo sapiens
gggatgtgaaaactctgttactgaaggatattggtatggtatagagcttgaaaaaccccatggcaagaatgatggttcagttggaggtgtgcagtatttt

SEQ ID NO: 818201 - DNA, 100 bp, Homo sapiens
gctgcagaatggagcctagaagtggaacgtgtactaccgcaactgaaagtcacgattaggactgacaataaggacagtggtgattatcctcttaccatgc

SEQ ID NO: 818202 - DNA, 100 bp, Homo sapiens
ggatatcttgaaaagttgcagataaacagtccaccatttgaccaaccaatgagtcgaaggtctcgtagagcttccttaggtgtcttttatgaataatcaa

SEQ ID NO: 818203 - DNA, 98 bp, Homo sapiens
agccaccccggtcaaaggatgctgagtccggagcgcctagccctaccggactacgagtatctggagatccagttgtcatcggtatccaggaagctctc

SEQ ID NO: 818204 - DNA, 98 bp, Homo sapiens
cttgagggcttgaatgtcttggtgacaatatctgaatatcctccgaatcctaaatctagagctccaaggatgctggtcattaagaaaggtaatacaaa

SEQ ID NO: 818205 - DNA, 100 bp, Homo sapiens
tttacagttcattttttgcttggtttggaaaaatttcattagagatggcagaaacggtggacacaagcgaaatggtcaacggcgctacagaacaaaggac

SEQ ID NO: 818206 - DNA, 100 bp, Homo sapiens
ccaaatctgtcgtccctgcccccagggtgaatctggattgggaaagtcgacattaatcaactcattattcctcacagatttgtattctccagagtatcca

SEQ ID NO: 818207 - DNA, 98 bp, Homo sapiens
tcttttacgtcggccttcgcgagcgtctgggcgggtggtagcaaaagactgttgaagtagagagcattttgcccagctcactcggattctttgctggc

SEQ ID NO: 818208 - DNA, 100 bp, Homo sapiens
acggccaatgatggctttgtacggcttagaggacttccctttggatgtagcaaggaagaaattgttcagttcttctcagtgaaatctattcgaagtatac

SEQ ID NO: 818209 - DNA, 100 bp, Homo sapiens
cactatcagagctaaacagatactagctactgtgaaaaacataatggattcagtaaacctggcagctgaagataaaagaaagatgttgtgtccctcctgg

SEQ ID NO: 818210 - DNA, 100 bp, Homo sapiens
ggaactttaccagcacctggaatctaaggagtggtttgtgcagctctattaccacgggaagtgaacagagtatctgccaagcccgggcttccgtgatggt

SEQ ID NO: 818211 - DNA, 101 bp, Homo sapiens
ggctgaggcgcggggatggagcccctgcgggtgctggagctatacagcggcgtgggcggcatgcaccacgcgctgagagtgtttctaagacctcagagaaa

SEQ ID NO: 818212 - DNA, 113 bp, Homo sapiens
atcaaagagcaaacagattcagtggcctgcattggaaggatgccatcctgttaactgatgcttttgacttcaccgatcagtgtttaaattcagcacttggctgttatgatgga

SEQ ID NO: 818213 - DNA, 99 bp, Homo sapiens
aaggatctagcgaaatatggctacagagagccctgctacgcgtcgggtccaggtggcagaacatcctagaacctgacagtattattgaaaaggcttctc

SEQ ID NO: 818214 - DNA, 100 bp, Homo sapiens
agaggtactgccggggacacctggcccgcagcttggattcctatccggtaacttctaagtaagaattgttttctatgtatgtcatatgttctgaaatata

SEQ ID NO: 818215 - DNA, 100 bp, Homo sapiens
caagtatgcgcccagcggattctacattgcctccggagggcagctggtggaatttttgaagaaaatggaatctcgaggccccctttcgtgcgacacggtt

SEQ ID NO: 818216 - DNA, 101 bp, Homo sapiens
cagacatattccttgagagcatttgagaaaccccctcaggtacagacccaggctcttcgagactttgagaaggcctcaggagtgcaagtagctgatgaagt

SEQ ID NO: 818217 - DNA, 98 bp, Homo sapiens
cgcgaatatcgtcatcgttagaagtgagggccgaggcaagttgacggtattttcagttaaagctatgttagcaaccatgtgtggtggaaaaatgctgg

SEQ ID NO: 818218 - DNA, 100 bp, Homo sapiens
ggagcatggcttggagcacttcctattccactggattgggaaagaccatggcaggttgtagcagataccaatataagcgccatagcagctcagcttgaaa

SEQ ID NO: 818219 - DNA, 100 bp, Homo sapiens
tacgctgcacctgaactgctcgccaggaagaaatacggccccaaaatcgatgtctggtccatgactatgatgatggatatggcactgcttatgatgaaca

SEQ ID NO: 818220 - DNA, 98 bp, Homo sapiens
ccaagggccccaatgagtggcacacagtctactatcaccgacaggtttcagcgttaaaaacaatggccagtcagggaggccccaagtatactctctca

SEQ ID NO: 818221 - DNA, 98 bp, Homo sapiens
cgccagctggtagaaattgcagccagggatattgagaaacttctgagcaacagatctaaagccctggtgcatgttacaccagacagctatattccatg

SEQ ID NO: 818222 - DNA, 100 bp, Homo sapiens
aaaatgaagatttaaccgagttacttaatggcatggatgaaggaggtacactcagtgaaatttgcaaactctcgaacaagtttaatagtgtaattcctgt

SEQ ID NO: 818223 - DNA, 98 bp, Homo sapiens
gggtgtggaaaaacccggtactgtgcactattctttcccaggaaccattggataaggataaagagtcgggccacaaaaagttaaaaagtaccatccag

SEQ ID NO: 818224 - DNA, 98 bp, Homo sapiens
aacgaaaggaacgcaagaacagaatgaagaaagtcagggggactgcaaaggccaatgttggtgctggcaaaaagagcatttccgacatgtggaccatg

SEQ ID NO: 818225 - DNA, 100 bp, Homo sapiens
tgtacagcagaagccatccacttcaggagtgatactgtccattcgagaactggagcacagcgactgcatttgcctccagacttgtcagacacagtgagcc

SEQ ID NO: 818226 - DNA, 98 bp, Homo sapiens
ccattcgccaggctcttcaggatctgctttcagagtacatgaacaacgtggaaagtggttggtttctgataacttcctaaacatcaccaatgtagctt

SEQ ID NO: 818227 - DNA, 100 bp, Homo sapiens
tgatgaagataacagtgaaatatcagattcagaggatgacagttgcaactaccatcgtccatgatgccaaaggttgagagaggaatcaacatggctgctt

SEQ ID NO: 818228 - DNA, 106 bp, Homo sapiens
tggaccactgtcccatcaaatcgcgcaaaggggatgtcctgcacatgcactacacgacttcccaagtaagaagcggaagaggagccgctggaaccaagacacaatg

SEQ ID NO: 818229 - DNA, 98 bp, Homo sapiens
tctcgaatgggcacacctgtgtaggaattactctgcttaatgtaagcaagctgaacattttgaagcttgctcctggtgggcatgtgggacgtttctgc

SEQ ID NO: 818230 - DNA, 100 bp, Homo sapiens
ccttgatgcccaccttcagcaggatcctgatgccaaagtagcttgtggtgctatacttggtagatcagaaactcaggagtgtcttttctttaatgctaat

SEQ ID NO: 818231 - DNA, 100 bp, Homo sapiens
agcagagaggagcagctggaagccgtggctgcgctctcttccctctgctgggcgtcctgttcttccagggtacaagaatattccacagatgtcctttgat

SEQ ID NO: 818232 - DNA, 100 bp, Homo sapiens
agttttctggaagacacaacaggggagcagttcctcacttatcgctatgatgaccagcaattctgtggtgttcttggtcacacatttatggagtttctga

SEQ ID NO: 818233 - DNA, 100 bp, Homo sapiens
gtggaacaggtgatgtgtctaaggattgtcctgagaagatcctgtattcttggggagagttgctaggaaaatgtatgaaagttttcaagacgcctacaag

SEQ ID NO: 818234 - DNA, 98 bp, Homo sapiens
ttggaaccaagctgcaagtcctgtggggctcactttgcaaacacggccaggaaggaaatttgcgagaatccccgatttatcattgatggagccaacag

SEQ ID NO: 818235 - DNA, 137 bp, Homo sapiens
ctgatggtgaggacggcaatgagatggtgttctgtgacaaatgcaacatctgtgtgcaccaggaaatgcaacctcaccacaagtacaaagaccatctttcatggactactttgataagcaagacttcaagaataaga

SEQ ID NO: 818236 - DNA, 98 bp, Homo sapiens
catggtgcaggtgggggtcatctctggattcaagctggagtgcaggaagaccacctgcaacccctgccccctggttatcccatcatcaggtagcaagt

SEQ ID NO: 818237 - DNA, 99 bp, Homo sapiens
agaaagcatttaaccagcatggctacttcatattttggaaagcagtttttaagacaaaattctgcttggtcagaatcgtgatggcattgtgttcagcac

SEQ ID NO: 818238 - DNA, 98 bp, Homo sapiens
aaaaatgtggtcagtgaacctatcgaaggacatgaagactaccacatgatgcttctcaaaagtgaaataagaagattggaaaggaatcaagagcgaga

SEQ ID NO: 818239 - DNA, 98 bp, Homo sapiens
aagatttggccttctactctagtacagtagtatctctattgaagaagctcattcacacagaagacccatttaatgatgaacatcaggagaggcaagag

SEQ ID NO: 818240 - DNA, 50 bp, Homo sapiens
ttcaaactggagccttattggaggccaacactggacaaattgatgacccc

SEQ ID NO: 818241 - DNA, 100 bp, Homo sapiens
agagccgctttagcaccattgacctccgcgccgtactcgcggagctgaatgctaggagtttgacctggacattgttgcagtcgtgaatgatacagtgggg

SEQ ID NO: 818242 - DNA, 98 bp, Homo sapiens
ctggacagagaacatccaaggttccattaaatacatcatgcttaaccctagttcacgaatcaaggaaatgagttctgggccatcagaggaaatgaggt

SEQ ID NO: 818243 - DNA, 100 bp, Homo sapiens
caatcttaaaagaaactgtgaagcaaattcgtcagatcaaagaacaaggtttgctgtggaatttgtcatctaatgacaaactcaagaatctcatgataac

SEQ ID NO: 818244 - DNA, 100 bp, Homo sapiens
acagaaggcatccacaaagaaactttatattgggttctctcaaacgtgtcttaaaggctttcatgttactctgtgatcttctgatgattttcagccacca

SEQ ID NO: 818245 - DNA, 99 bp, Homo sapiens
gagaggaagaaaatagttgcatcgtcacatgccaccaaggtgttccagggcgtcctggagctggagggcgtcgagggccaggagctgttctacacgccc

SEQ ID NO: 818246 - DNA, 98 bp, Homo sapiens
gagaccacatcagaggcagacaaaaacctttccaagcaagcatgggacaccaagaaggtcctagctggactgctgcaccttggcaatatccagtttgc

SEQ ID NO: 818247 - DNA, 108 bp, Homo sapiens
aaaggaaagaagtgcattgttttggtgactgaacttatgacgtctggaacacttaaaacgttcgatacaagaggctgttttcctagcgtggcttgctgcctttggtaa

SEQ ID NO: 818248 - DNA, 98 bp, Homo sapiens
cagtttccacttcccaagaaccttctggccaaggtgattcagattgcaacgtcatcctccacagctaaggatatcatcaactccatgagcaacagccc

SEQ ID NO: 818249 - DNA, 98 bp, Homo sapiens
gggacaaagccgctccacctcccatgtcggcacagatggacggagaggggttgcttaacgaagaattgccaaattgctgggaatgtccaaagtgctac

SEQ ID NO: 818250 - DNA, 98 bp, Homo sapiens
tcaggaccaggcaccttctgtggaagatgaacagactagccactttgcattgactggaaacaatggcatttacagaaagagtcaacagcagtggcaac

SEQ ID NO: 818251 - DNA, 98 bp, Homo sapiens
gcgctgcacacgcagagacaggccgaggagacgcgggccttcgagcagctcatgaccgacctcaccctgtcgcgggagctgatgaggatgtagagagt

SEQ ID NO: 818252 - DNA, 100 bp, Homo sapiens
gattccttagatgtggtgaacaaagatgatataatagagtggatttattccctgcaggtccttcccacagaagacagggctcctcatgatttgaagtgtg

SEQ ID NO: 818253 - DNA, 98 bp, Homo sapiens
gagcttcaggctcgctccgtgcggtgatggaatggggagaagatattaaagcagtttcaaaagatgaagcagtgatgttggtgaatcatcaggcaaca

SEQ ID NO: 818254 - DNA, 100 bp, Homo sapiens
cccaggaccctctcagagtcttggtctcaatgtccacaacatgaccccagctacctccccaataggtgcatcaggcattggaggtgatccttttaatgga

SEQ ID NO: 818255 - DNA, 101 bp, Homo sapiens
cgtgattctgaggcctccccaaccatgtgcaattcctccagggtcgtatagacctccccctcctatgggcaaaccaccaggttcaattgtaagaccctctg

SEQ ID NO: 818256 - DNA, 100 bp, Homo sapiens
agaattgcttttggcgtggccatgccggcggccctcacagcaaccagcaccagatgaaggagcattcctcttggaattcaaagaagctttttcactattt

SEQ ID NO: 818257 - DNA, 100 bp, Homo sapiens
gacaaacttctctcagccaagaacaaagactacatgagcatcattcgcatgtggctagctccatcaaggaacagtccctgtttcttacacagtaacaaca

SEQ ID NO: 818258 - DNA, 100 bp, Homo sapiens
tcatcggagagcccctggaggacctggaccccttctatagcacccaaaaggaaatcgatgattgtctggtccaagcaaaagaccgaagttacgatgccct

SEQ ID NO: 818259 - DNA, 100 bp, Homo sapiens
atcagccaggaccaatgctgaaaaacaggcaccatactggacataccttttatgtgcactgggactttttatttaccagtcactggatgctattgatggg

SEQ ID NO: 818260 - DNA, 106 bp, Homo sapiens
cgaagaactcccacaatgccacaggaggaggcagcaggtatatgaatgacctaaaggtacaaataaagacggagagagaacagtgccaactgggagcagggcaaga

SEQ ID NO: 818261 - DNA, 100 bp, Homo sapiens
ttgatgaatacatgaaggagctaggtgtatactcttgatgtaccagatgcattctattactgttatagtccagaccctggtaatgcaaagggaaaagatg

SEQ ID NO: 818262 - DNA, 100 bp, Homo sapiens
cacacagagtattggtcctaaagtccagagacagagcactaattagtaccatggggcgcaagttggaccctacgaaggagaagcgggggccaggccgaaa

SEQ ID NO: 818263 - DNA, 98 bp, Homo sapiens
ttgcttttctttggagtcatgttctatgtgccaaatgtgtcatggcttcagcaagaggccacaagaaagaagattggcccatgcacaagctggaatgt

SEQ ID NO: 818264 - DNA, 98 bp, Homo sapiens
tagagtacaagttgaagggattaattgacctaaccctggataagagataaccttctgttcggtgatgaaattatcactaatggttttcattcctgtga

SEQ ID NO: 818265 - DNA, 100 bp, Homo sapiens
cgcgaatatcgtcatcgttagaagggcctacttgaagaagtggtcagctaaaggaatccaggttgttggttggactgttaatacctttgatgaaaagagt

SEQ ID NO: 818266 - DNA, 99 bp, Homo sapiens
gcaaatcccctgctcagggtcttcatccagaaacgaggacatgtctcaggaaggctatggaactagatctcaacctcctctggcccccggaaaacctaa

SEQ ID NO: 818267 - DNA, 100 bp, Homo sapiens
ctcatgaagagactccagaaagggagtgtcaatccatatctacaaggacagagactggataatgttgttgcaaagaagtctgtcccccatttttcagatg

SEQ ID NO: 818268 - DNA, 100 bp, Homo sapiens
ggccgtggaagcggccaccgactactgtcagcagctgtgccagccgccaccggcaactaacctatgaccttctgacctctgaactcttcacccaatgatg

SEQ ID NO: 818269 - DNA, 98 bp, Homo sapiens
aatgccgggatgctgtgaacgagtgtgatattactgaatattgtactggagactctggtcagggccaaggagatctgttgaagaatgccaagaatgaa

SEQ ID NO: 818270 - DNA, 98 bp, Homo sapiens
tacaagggttatatatggaattatggtaccctccctcaggttttagctaaagaagatactgaggcagctattcaatcaatattatacaaagaaaattc

SEQ ID NO: 818271 - DNA, 99 bp, Homo sapiens
caaaaatgatgagaatgaggacccgggaagaaatgatattggtatcttgatggacaaacactactaataatcatatgtgttggcattgtgttccctctt

SEQ ID NO: 818272 - DNA, 99 bp, Homo sapiens
gacatcctgcggacctactcgggcgccttcgtctgcctggagattaaggacagaataacgggctcccagattcacaagccccaccaagaggatcacccc

SEQ ID NO: 818273 - DNA, 99 bp, Homo sapiens
cagaggacgcgggctctgaggatgagctggaggaggggcatttttgaaacgttggggttgttggagtggttggattttccctggaattgagtgagaaat

SEQ ID NO: 818274 - DNA, 100 bp, Homo sapiens
agccatgtcctcttccccgtgggagcctgcgaccctgcgccgggtgttcgtggtgggggttggcatgaccaaggtggtctgacccaggacctgaaagctg

SEQ ID NO: 818275 - DNA, 98 bp, Homo sapiens
ggcgcgggaggtgttcgagaacgaccccgagacgggtctgactcataccatggagcgacatgtggatcccgaagccctgcagaagatggccaaatgtg

SEQ ID NO: 818276 - DNA, 100 bp, Homo sapiens
aatcaagtagtgtttgccagagttgattgtgatcagcactattcagcgccctataaagaccagctgtcctcgaaggaacaacccagctttctagccagtc

SEQ ID NO: 818277 - DNA, 98 bp, Homo sapiens
cttcttaatgatatagaaagcagtcaccttttacaacaaacaattgcagctctccaggctaacaaatttgtgcagattagtatccaatggaattcgat

SEQ ID NO: 818278 - DNA, 100 bp, Homo sapiens
gagggtcagtttcccgagtacccaccagagggcgccactaaactgggtataagtgtgctagcggagtgtctagattgtcctgaattgaaagcaactgcag

SEQ ID NO: 818279 - DNA, 101 bp, Homo sapiens
ggcgtgggcaagtcggcgctcaccatccagttcatccagcattatgccagtacatacaggcttctaaagccagggatggtgccagccctttcatttcaagt

SEQ ID NO: 818280 - DNA, 100 bp, Homo sapiens
ttgggctacgcgtatgtgaacttccagcagccggcggacgtgagtgatggattggaactgagaccgaaatataatggaattttacattgcttgactacca

SEQ ID NO: 818281 - DNA, 98 bp, Homo sapiens
tgcaaaccaaagcagcttatgcatgaggcactcaaactgcggctcaacctgggcttcgtgctgtgtcactccatcgctgggggtacgggttctggcct

SEQ ID NO: 818282 - DNA, 100 bp, Homo sapiens
tcaaaaggaagcaaaacgttggggtacagctcatggcagtatcgttccttaccaggaaagagaatactgtgccaggcctagactggacatcatccagcca

SEQ ID NO: 818283 - DNA, 100 bp, Homo sapiens
ctggaccggcaaattaaagcaattatgaaagaagtcattccttttttgaagaattttcctgcatggagtgctacatcctcttgttccagtctcagctggc

SEQ ID NO: 818284 - DNA, 98 bp, Homo sapiens
gacaaacactttccttgactttgagaaataatttaagtcaaagaatctgctctatgctaaccaagtttgcagaaaaaacttcagcatgtgccaggaac

SEQ ID NO: 818285 - DNA, 100 bp, Homo sapiens
gaagccaggcaagagaatgaggctcgaagtgaggatccccccaccacacccatcaggtgaccttggagaaggtgctgggaattacagtgtctggaggcag

SEQ ID NO: 818286 - DNA, 98 bp, Homo sapiens
tgatgaaaagagggactgccataacattcccaaaggtaagaaccttgatgctgtccatgatatcactgtggcgtatcctcacaacattcctcaatcag

SEQ ID NO: 818287 - DNA, 100 bp, Homo sapiens
aagacaagggtcctaaaacaggatcagtaaagaaggaaaaagcagtaaagccagaggaagaaatgcactcggtgatggaaagagagccactattctgaag

SEQ ID NO: 818288 - DNA, 100 bp, Homo sapiens
gttcagtactgtgggtgatatttgcctttagtgcactcttctccttcacagtaaagtggctgtctattgcgtctgcagacatggatttcaaccagctgga

SEQ ID NO: 818289 - DNA, 100 bp, Homo sapiens
tatcaagatacaattgaataatcaaagggtggagcctggacaaaatgtttacttgtctggctggagcattggatttgctaaaggagcttaagaatattcc

SEQ ID NO: 818290 - DNA, 100 bp, Homo sapiens
aggacctcctgcaggtgaagaccggcctcagtctggaggtggcgacctaccgtgccggtggtggtgtgcacattgagccccggtatagacagttccccca

SEQ ID NO: 818291 - DNA, 100 bp, Homo sapiens
tacaactaaaccctctgtcaacgtggaaactatgttccaacttcctgtcaacaatcttggcagtttaagaaaagcccggaaaactgtgaaaaaaatactt

SEQ ID NO: 818292 - DNA, 98 bp, Homo sapiens
ctccggacctctctagctacaattttagatggaggagaagaaaaccttgaaaaaaatctccctgagtttgccgtgcagctcagtggaagatgatgaca

SEQ ID NO: 818293 - DNA, 99 bp, Homo sapiens
aacaaaggcgacccaagacacccagagagggacaggttgatgaaaagcccagaaccttgatgacagattgtctggttataaagcattttttacgtaaaa

SEQ ID NO: 818294 - DNA, 100 bp, Homo sapiens
cagctcctgtgaccctgtgtatggccactgcctggtggtctttgggaagaagcttcctgcctttgccaccatccccatccaccagctgcagcatgagaag

SEQ ID NO: 818295 - DNA, 98 bp, Homo sapiens
gatggccagctttcccccgagggtcaacgagaaagagatcgactctgtttgctggctacacggacaacctggtgcgagtgtggcaggtgaccattggc

SEQ ID NO: 818296 - DNA, 99 bp, Homo sapiens
ggagatggtatgccaggcctgcatgaaacgttgttcttttttgtgggcttatgctgcacaattggcaggcagagtggcatgattccgactggatactct

SEQ ID NO: 818297 - DNA, 99 bp, Homo sapiens
agggaaggaaatcatgtcaagcgaagccttgaaaaagctgccctgagacggtgtcccgccgaaaggggatcatcgtcttgctcttcttttatctcagtt

SEQ ID NO: 818298 - DNA, 100 bp, Homo sapiens
aggccaaggaccccaagctccgagaagaccggcggccaatcacagtccactttggacaggtactccaaagattcaggtttactcacgtcatccagcagag

SEQ ID NO: 818299 - DNA, 100 bp, Homo sapiens
gggcagatctggcccaacgatggcgagggcgccttccatggagacgcagaatttcgctaaggagtttgtgatcagtgatcggaaggagctggaggaagat

SEQ ID NO: 818300 - DNA, 100 bp, Homo sapiens
caaaaaaggaggaactcaatcaatctgtaaatcgtgtgaaagaacttgaggagatatgtcagtattgaattctcccagacatcagagctgtataatgcat

SEQ ID NO: 818301 - DNA, 122 bp, Homo sapiens
gtgccccgaagacataaatccctgagtgcccgggaggagccttaacaagcgcacggagccctcaaggtgactagcatgcagatacccatgctctgactttctgcccctccactgacatggcc

SEQ ID NO: 818302 - DNA, 100 bp, Homo sapiens
tagctctctcaatctctgtctgaactggatcataaatgacagatgacatctttatatttggcttcaaagaaagaagacccaatttaaaggaaataaaatt

SEQ ID NO: 818303 - DNA, 98 bp, Homo sapiens
gaattgaaaactgtgacgaacaacttgaagtcactggaggctcaggctgagaagctggcggctgacggcactgtcatgaacaccttcgctcacaagtg

SEQ ID NO: 818304 - DNA, 100 bp, Homo sapiens
attttgctgcattgtgaaaggacctctccagcaatgattacttcagaattaccagtgttacagttacttgaatttccactagaggagcagaaatgccacc

SEQ ID NO: 818305 - DNA, 132 bp, Homo sapiens
gggcaacgctgtgaccctgggagattactaccagggccggaggattaccatcaccggaaaagtttgcctgcaatggtactgtaattgagcatccggaatatggagaagtaattcagctacagggtgaccaac

SEQ ID NO: 818306 - DNA, 50 bp, Homo sapiens
gggcacggtgggcgcctacctgggcttatttcaaaacctttgtccctcag

SEQ ID NO: 818307 - DNA, 100 bp, Homo sapiens
cagtatttctttggcatcactgcagctagtaatttgccttctggattaatgcctgttattaaaccagacatagccaactgggagctctcagtaaaattgc

SEQ ID NO: 818308 - DNA, 107 bp, Homo sapiens
aaatgcaagaggctccagagtcagctacagttatatttgcaggagatacaaatctaagggatcgagagagaaactccagaaaatcttgccaaacttctgaccaggat

SEQ ID NO: 818309 - DNA, 98 bp, Homo sapiens
cgcaaatgtgccaacgacgtcttccaggtctgccatgtgaatctggaggggcagccgttctactccaagaaggacagacccctgtgcaagaagcacgc

SEQ ID NO: 818310 - DNA, 98 bp, Homo sapiens
ttgacattcaaccgtacccgccaagctgtcatcacaaaagagttgattgaaattatctctggtgctgcagctctcctggatttgtggtatcatttcta

SEQ ID NO: 818311 - DNA, 98 bp, Homo sapiens
ttggacaggaattggaagaactcacagctagtctatttgaggtgacatttagtgatgtggctatagacttctctcatgaagagtgggcatgcctagat

SEQ ID NO: 818312 - DNA, 98 bp, Homo sapiens
cccacaccccctggtgtggcatctgaagacagagagacttgccactggggtctccagactgtttttggtagagtacagagagatggatgaaagcttgg

SEQ ID NO: 818313 - DNA, 100 bp, Homo sapiens
ccagcatcgggggcatcatccacgtggaccagatcgtgcagatggccagtcagctgttcttgcaggaccagtccaacatgtttaccgtggctgatgtgtt

SEQ ID NO: 818314 - DNA, 99 bp, Homo sapiens
gcccttcaatgcctttccccatgctgcctccgtgtacgggcagttcacgggccaggccctcctctcagtgttggtagccttatatgaagaaccagagaa

SEQ ID NO: 818315 - DNA, 100 bp, Homo sapiens
atgcaagaccagtccatttggggaaatccttcggatggtgaactcattagaagctttcagtccagtgtaaagctgttggagcgcgggagcaaaggtaaag

SEQ ID NO: 818316 - DNA, 100 bp, Homo sapiens
acctcatggataattatttggcactgatactctctgcatttattcgtaatggacttttagaggtgctggaaacgtgcgtagcaacagtaggccgagtatc

SEQ ID NO: 818317 - DNA, 116 bp, Homo sapiens
ggctggattttgatgatgatggagaagggaacagtaaatttttgagcccttcaagaagaggtatgattgctaccacttttccccacaaagtgacgaaaggaaacagcgacggaagc

SEQ ID NO: 818318 - DNA, 50 bp, Homo sapiens
ggtctttctcaacctcatcttctgggaatacaaacagaagcttgcacgag

SEQ ID NO: 818319 - DNA, 100 bp, Homo sapiens
tgaaggaaaccgcactctcacactggccttgatttggcagctaatgagaagggacagagcagaatgggctgatatagatccggtgccgcagaatgatggc

SEQ ID NO: 818320 - DNA, 100 bp, Homo sapiens
aaattaagtgaattgatttggttggaatgctcttttaccgatgctttaacatacagccactagtgttttacctcaatcatatatccacacaagtgcttct

SEQ ID NO: 818321 - DNA, 99 bp, Homo sapiens
tggccaccagcaggatcataaaatacatgatctggcttatgtccctgatgccaaaaatgcacctactctttcctctaactctggtgaggtcattctgga

SEQ ID NO: 818322 - DNA, 100 bp, Homo sapiens
tgctgtagacatttctttgtggtttatctaaaaaccaaagttccagaaagctgagtctgatctggattacattcaatacaggctggaatatgaaatcaag

SEQ ID NO: 818323 - DNA, 51 bp, Homo sapiens
tagctctgaccacccggcgaagagacagggcagggcattgttcatgcactg

SEQ ID NO: 818324 - DNA, 98 bp, Homo sapiens
atcgcaagctggatgagcttctaggcaaggaccacacgcaggtggcagttccggcgaggggggagcctcagcaggattgctgtgtgaaaaccgagctg

SEQ ID NO: 818325 - DNA, 95 bp, Homo sapiens
cgtgatccagaagtccagagctgaggactgcctgtttgcagaaaagactgtatcttcaccattgacccatcaaccgcccgagacctcgatgatgc

SEQ ID NO: 818326 - DNA, 98 bp, Homo sapiens
tgggtccgctgagcggggcgacccgaggtgctgagggtgtaaatggaggagaggagtctgtaaacctgaatgatgcagatgaaggattttcatcaggg

SEQ ID NO: 818327 - DNA, 100 bp, Homo sapiens
tcagttttggtcatcggaagtggtgccttcagcacaggaggccagatgctccagtgcctgatggcgaaagtgagaaaactgtagaagaaagttcagatag

SEQ ID NO: 818328 - DNA, 99 bp, Homo sapiens
caggctcagtctgtccatcatcaaagaccaggttcaagggtctctccagaaaatcttgtggacaaatccaggggaagtttccagtgttgaatttgaatg

SEQ ID NO: 818329 - DNA, 100 bp, Homo sapiens
tgttctaacgctgcctttgctttaaaacagtattacttgcgatccataatgagatggcatcaacatcagataaaggtgcccaaggaagaaatgacaagaa

SEQ ID NO: 818330 - DNA, 98 bp, Homo sapiens
gaatttcagtcagcctcagaggttgacttctacattgataagggcaccccgctcaagtacgacaccggcgcgtccaccactggctccaaaaagcacga

SEQ ID NO: 818331 - DNA, 98 bp, Homo sapiens
aaggacttcgagcagcctctcgccatttcccggaaccatgatggcagcattgacttccgagagtatgtgattggcctggctgtcttgtgcaacccttc

SEQ ID NO: 818332 - DNA, 100 bp, Homo sapiens
atcaggaaaaggatccagcttccttctgaaaaggcgatcttcctgtttgtggataagacagtcccacagtccaggtatccagctcacatagaagacattg

SEQ ID NO: 818333 - DNA, 99 bp, Homo sapiens
tcagcccgccaggctgagcgctctgcgtattcaggcgttgaagttggagatcctgagtcatgtgttccagtggcttgggttcacagtgcatatacacaa

SEQ ID NO: 818334 - DNA, 100 bp, Homo sapiens
ctgccccaaatgcagaggggaagacctccagtctataagcccaggaagccgtcttcgaactcaggagaaggaggatacgaagcgttttcggcttcctgcc

SEQ ID NO: 818335 - DNA, 98 bp, Homo sapiens
gcaagcggcgtggacgaccgttgctgagctggtgtggaacgtctgtgatcagggatttgttcctgggctgtttggaacatcgcatggtgcccttcagt

SEQ ID NO: 818336 - DNA, 101 bp, Homo sapiens
ctccgggcgcggggaagtcatgctcgcttcacggaggcaatagctagccggagcctgcaggcctgaaccagggtgatgctgaagatgatgaccttcttcca

SEQ ID NO: 818337 - DNA, 100 bp, Homo sapiens
ctttcctggcccttttgaagaggaaatgaagggtattgccgctgttactgatatacctttaggagagttcccaggagaaaaaagcaaaaggctgcgctac

SEQ ID NO: 818338 - DNA, 137 bp, Homo sapiens
gctctcggcacaagcatgtacggcaaaggcaagagtaacagcagcgccgtcccgtccgacagccaggcccgggagaactgctaggggagctgatcctggaccgtcacaactttgccatcatgacaaagtatatcagc

SEQ ID NO: 818339 - DNA, 98 bp, Homo sapiens
acctgtggaaggcatggaagtcatcagaaggcatgaatgctttacagttgcagaacctggcgacgctggctgctgctgcagctgcggcccagacctca

SEQ ID NO: 818340 - DNA, 98 bp, Homo sapiens
ggaggctggtcctgctggctctgtgggtgtggcccagcacgcaagcttttctccatggaatccttctgtacatgatgaagccagagaaaagatgctga

SEQ ID NO: 818341 - DNA, 98 bp, Homo sapiens
aaccacctgggccagtattatcaggcatggagatgctactgatgtcaggaaaacctttccaacctatgagagaaagagatgtgaagaaagaagacggg

SEQ ID NO: 818342 - DNA, 100 bp, Homo sapiens
gggtattggatgattcgtagctaagactctacgacatccctgaagccgggaaatggttcggctttccagtttggcagcagcactacaaatttcaacttca

SEQ ID NO: 818343 - DNA, 98 bp, Homo sapiens
agccacaggattcggcaaagacggacacacaggacacattcagctaacgtattttagcaggtggagtgaggttgaagattcctgtgacagcgatgcca

SEQ ID NO: 818344 - DNA, 100 bp, Homo sapiens
cgcctcacctgcagaggggccgttccgggctcgaacccggcaccttccgggtcgttcatgcccaacttggtgcctcccaagatccccgatggagagagag

SEQ ID NO: 818345 - DNA, 98 bp, Homo sapiens
ttttgccggaggagcccctcaggccgttatcaatactctggctgaccatcatcatcgtgggactgactttggtggaagtccttggttacatgtcatta

SEQ ID NO: 818346 - DNA, 100 bp, Homo sapiens
ctgcaaattccaaagctgttggaataaataaaaatgactacttgcagtacttggtgtccttcaagtagtgaagcagagtgttcagatcccagtttttgtg

SEQ ID NO: 818347 - DNA, 100 bp, Homo sapiens
gcaagagctgggagcatttttcccctgggcctgatcaaggagaaggcagagcccccccaggctatgaatgccctgatgcggttgaaccagctgaagccag

SEQ ID NO: 818348 - DNA, 98 bp, Homo sapiens
aaaaactgttttctttacctgctcagcctttgtggaataacagactactgaaggtggtattaaagataatcaaacattatcaagaagaaggacaagga

SEQ ID NO: 818349 - DNA, 98 bp, Homo sapiens
attcggacagcaagcatgtggatgtacatctagttcaactaaaggagttccgattctgaagaggcatttgagaccccggagtcaacgacccctgtcaa

SEQ ID NO: 818350 - DNA, 134 bp, Homo sapiens
tacagttataccaagtggatagtagaacttatctactggatttccgtagtattgatgccttgcatccaagggtccttaagccgttgtcttcattgattcatcttcaggcaaattctaatccttgggaatgtaac

SEQ ID NO: 818351 - DNA, 101 bp, Homo sapiens
tggaccggcaaattaaagcaattatgaaagaagtcattccttttttgaagatttacactgactgggccaaccactacctagcaaaatcaggccacaagcgg

SEQ ID NO: 818352 - DNA, 99 bp, Homo sapiens
tcagcctcccgggtagctgggactacagactggtcttctgaggacctctgccctctacacagcggcctcttcaggtgcagggaggaaatggaagcacgt

SEQ ID NO: 818353 - DNA, 100 bp, Homo sapiens
gaatgtgaagacccagtggatcatgttggaaatgcaactgcatcccaggaacttggttatggttgtctcaagggggcacacagtatgatcaaaatcacat

SEQ ID NO: 818354 - DNA, 100 bp, Homo sapiens
ctagttaggattttattactggcagcatgtatatcttttggaatgaaagctactggttgattttaaagtgcctgggcctcacaggtttggagatgtccca

SEQ ID NO: 818355 - DNA, 98 bp, Homo sapiens
ctcgctccgtggccttagctgtgctcgcgctactctctctttctggcctggaggctatccagctttgctgatggccgccaaagttggagttcgtatgt

SEQ ID NO: 818356 - DNA, 100 bp, Homo sapiens
atttcatcacaagttgctgaacttaagggaccgacgtcatggttcggtgcctcaagctgctgaaggaatttaaacggaatgaccatgatgatgacgagga

SEQ ID NO: 818357 - DNA, 98 bp, Homo sapiens
caaaggctccttccggattctcaagctgattgtcaggagccccactgtgttctccttgcctcaaaagaaaactcggcacctgttaaacttggaggctt

SEQ ID NO: 818358 - DNA, 100 bp, Homo sapiens
ttggtattcaccatggtggtttacttcctattttgaaagaaactatagaaattctcttttctgaaggattgataaagatccaggatgagaagactgataa

SEQ ID NO: 818359 - DNA, 98 bp, Homo sapiens
gcggccaatgtgggatcgatgtttcaatattggaagcgctttgatttacagcagctgcaggcagttgtgaaaaacttcaggacaaaaatgtttcattt

SEQ ID NO: 818360 - DNA, 100 bp, Homo sapiens
ccgcccccaacgtccatgcctgagtgccccacctcaaccagaatgcctggaacaacctggagaaatatagccgcagcttgacccgcagctaccaaaacgt

SEQ ID NO: 818361 - DNA, 98 bp, Homo sapiens
gctggacaaatattttggaaatgcgaggattaaatccaccacacagggtgaaatctatctccatgacaacattcacacaacaggaaattgaattctta

SEQ ID NO: 818362 - DNA, 98 bp, Homo sapiens
tgctttcacctatcccgcttcactgcatgcccagattgagaaaatcatgagttctattggagaagggattgacttttctcaggaacggcagaagatct

SEQ ID NO: 818363 - DNA, 98 bp, Homo sapiens
ttacagctactcctgtgctctccattactggaacagattcctctgtggaagccagggagaagaggaggctgaccggttccctgatgtgttacctgctt

SEQ ID NO: 818364 - DNA, 98 bp, Homo sapiens
attgccatcatgcagccaatactgagatttcttcagttactgtgtgagaatcacaaccgggaattgcagggtgcatgtagtctttggactggttattt

SEQ ID NO: 818365 - DNA, 100 bp, Homo sapiens
cgcccggcccggagcccccagcgcagcggccgcggaaaagaatacttgagatccatttgtaaggaaagaaaaggaagcaacaacataatgcccagagttg

SEQ ID NO: 818366 - DNA, 100 bp, Homo sapiens
ccccggcaccgcgcctgctgccgggttgcgctccgtgcacctcttgcgggttttgtgatgaaggaacctgtacagataaagccaatattctgtatgcctg

SEQ ID NO: 818367 - DNA, 100 bp, Homo sapiens
ctccaaggagtactggtttgtgctgactgccgagtcactgtcctggtacaaggatgaggaggaaactgtggagatataaatttagtacgactgggtccag

SEQ ID NO: 818368 - DNA, 100 bp, Homo sapiens
aggagaacaacaacccattagttccccttgggatgtagtttttggaacatcagaaatttctacacccagaccatcttctccaggtggactacctgaagaa

SEQ ID NO: 818369 - DNA, 100 bp, Homo sapiens
tattgctgaaacaagcattaccataaacgatgttgtttatgtcattgactcctgcaatacgctggggaggaggaggaggaagggagcggcagcagtgaag

SEQ ID NO: 818370 - DNA, 119 bp, Homo sapiens
tggagtcctatccagggctggcctgagctgccaggatgggctccagccactcaacactctgaactgaaacaagaaggttatttcacagttgaggattttgggcagatccataacagctg

SEQ ID NO: 818371 - DNA, 100 bp, Homo sapiens
agatttgcgacagcaagggggttgtccacgaggaacaaattgtacatttgcccattctcaggaagagcttgaaaagaagctgcactgcaccaggaattac

SEQ ID NO: 818372 - DNA, 98 bp, Homo sapiens
ccgtggccttacggggtgctgtcacgctgcctttggcagcctaccagcactacatcctggccaaggtacatcaggaacgtctctatcaagaatacaat

SEQ ID NO: 818373 - DNA, 98 bp, Homo sapiens
agcagaagcagcccttacaagttgcaaaggtacccactgatggtaatgctggcctgctggctgaaccccagattgccatgttctgtggcagactgaac

SEQ ID NO: 818374 - DNA, 98 bp, Homo sapiens
ttcagcttcctaagagataccgctcagaagaaaatgcaaaaaaactaatggaattagcctgcaacatgaagctattgacctgaaaagtggttctggaa

SEQ ID NO: 818375 - DNA, 100 bp, Homo sapiens
ggcaaacatgaaatccaatcctgctatccaggctgccattgacctcacagcgggggctgcaggtgttggggcgatgtttcctgactgtggtgcaagtcca

SEQ ID NO: 818376 - DNA, 98 bp, Homo sapiens
tcctcctctccaaaaagaccatcggtggaaaggtatttgtaggcaaaataccaagggatttatatgaggatgagttggtgcccctttttgagaaggcc

SEQ ID NO: 818377 - DNA, 100 bp, Homo sapiens
ggcaacgtggacaggaagaagcggagggcgaggaggagcagaggagcacacagatgaagcaggcttcaacggaccacaccaaaatgccatctcaaatgga

SEQ ID NO: 818378 - DNA, 100 bp, Homo sapiens
gaaaaagttcttgggacaaacttcatttggagagacagcgtctggagaccatcctcagtctctgtgctgaatacacaaagcctgacagtcgcttatctac

SEQ ID NO: 818379 - DNA, 99 bp, Homo sapiens
ccgggagtaggagactcagaatcgaatctcttctccctccccttcttgggaatatccgatgtagcctggtcgtcagattctaaccttcttgtttctgcc

SEQ ID NO: 818380 - DNA, 100 bp, Homo sapiens
aagatgtttgagcatgacttccgttggactgatggcagcacactgcctttctgagaaaagtctacagcattctttctctgcaggttctcttaactacagt

SEQ ID NO: 818381 - DNA, 99 bp, Homo sapiens
gaccaccgaggctggagggggagaacacccaggactctccttcagcaactccagaagcttcagactttggtgatgggcaaggtttctcgaacctgcaag

SEQ ID NO: 818382 - DNA, 100 bp, Homo sapiens
tgaccttttccccaaagatgataaaggtaatgccatcggtggaaaagcaacgttcttggatgcctgggagattggccgcgtaatccaggttgctgctggg

SEQ ID NO: 818383 - DNA, 107 bp, Homo sapiens
gaccatctcatcactaagcgggatcttgccctcagtgaaggagatattcacactttgaggaagctggcgcgtatggcagccgaggagcacactctgcaggacactgg

SEQ ID NO: 818384 - DNA, 100 bp, Homo sapiens
tggagaagacttggaagctcatggacaaagtgactgctgtgattgcacctgccatcttatgcagaaatgacctgaagacagactgaaacaacgtgttcta

SEQ ID NO: 818385 - DNA, 100 bp, Homo sapiens
ccacaacagggacacctggttccagctgcagcacgtggacgctgactcggaagtgcaggctcatcggaacctgtcccagctccctaattttgccttctct

SEQ ID NO: 818386 - DNA, 100 bp, Homo sapiens
tatcagactcatttccgtttaagagaagctcaaggccgaagccgagcagaggatctaaatacaagagtggcctattggacaagcaggaggacatgaagac

SEQ ID NO: 818387 - DNA, 100 bp, Homo sapiens
aaaaaacaaaacaaatatgaactatgataagctgagcagagccctgcgatactattatgacaaggttagtggatgacagatgtgtggtgcacccagaggc

SEQ ID NO: 818388 - DNA, 100 bp, Homo sapiens
aacccagcctgtttcacttcttggcatcaagcatgatggaaccatgtgtgatacctgccgccagcaaccaatcattggcattcgatggaagtgtgcagag

SEQ ID NO: 818389 - DNA, 51 bp, Homo sapiens
ctcccagggccaggcgccgctcagaacgtatgagcccagaggacctggtcg

SEQ ID NO: 818390 - DNA, 100 bp, Homo sapiens
agtcactggtttgcagagtccaggtgctccagtgaaccacccagggaatgacgaggtggcgagtgaggatgaagccacagtaaagcggcttcgtcgggag

SEQ ID NO: 818391 - DNA, 98 bp, Homo sapiens
atgtagagagaaagtacttcaagctgaagtgctaccacaagaagttccgaagcccagcccgagacgtcatcttccgtgtgcagttccacacctgtgcc

SEQ ID NO: 818392 - DNA, 100 bp, Homo sapiens
aactttcctggcccttttgaagaggaaatgaagggtattgccgctgttactgatatacctttaggaattactctgcttaatgtaagcaagctgaacattt

SEQ ID NO: 818393 - DNA, 126 bp, Homo sapiens
ccctaccagtgggcgaagcccaagcccctgtcccctacgtcctacatgaggccaccagcccctcgggttccaagatgcagctactggagacagagttctcacacaccgtgggcgagctcatcgagg

SEQ ID NO: 818394 - DNA, 98 bp, Homo sapiens
cctctgtatagagcaactgttgaactcagctgcctgtagctcaaagcttggattctgccgtgccactcacgaatggcgacacagaagacgatgctgac

SEQ ID NO: 818395 - DNA, 100 bp, Homo sapiens
acatgtgtagaatgaattaagatttatgccagttgcaaagaagaatattggctcactatttttcctctgggcatagtgcagacatcctcagcaccatcgg

SEQ ID NO: 818396 - DNA, 100 bp, Homo sapiens
gacgtcgtgatccagaagtccagagctgaggactgcctgtttgcagagggagacgtggtgggcggtccttcctgtgacacgacccttgagtgacagttct

SEQ ID NO: 818397 - DNA, 99 bp, Homo sapiens
cagagaatacctccttcaacagatccacctgtattcacttgccgacctgcagcaggcctatatgaacccaatagcaatggcgagatcaaggggtccaat

SEQ ID NO: 818398 - DNA, 99 bp, Homo sapiens
ttgtacagagatgtgatgttggagaactatagcaatctggttttcttgggtttcagattatcttgaagtaatcaaggaaccaatggacttatcaacagt

SEQ ID NO: 818399 - DNA, 100 bp, Homo sapiens
gcgggcatcttgctgttcgtgattatatttcttggagttgtgttggtaatgaagaaaagccacagcgtcctgtgtttactcatgaaaatattcaaggtgg

SEQ ID NO: 818400 - DNA, 98 bp, Homo sapiens
aggatgatgccaagaaaaagaaggtgctgtccaacatgggggcccattttggcggctacctggtcaagattgcagatctgactcagaagatctttgac

SEQ ID NO: 818401 - DNA, 99 bp, Homo sapiens
tggcatcaaccgctacgactgtgtctgccaacctggcttcacagctgagatgccgcggcagtttcccaagctgaacatctctgaagtggatgagcaagt

SEQ ID NO: 818402 - DNA, 98 bp, Homo sapiens
catggaaagtcgggggctttcgcccgggtcctcctagaaattccccccgaagaagactcccccacatctggccatggctctaaaaggacaagaagatt

SEQ ID NO: 818403 - DNA, 98 bp, Homo sapiens
ctggccaagtcggggaccctggagaaagggactcacaccacccggcaagaactgctcactacggctccctgccccagaagtcacacggccggacccaa

SEQ ID NO: 818404 - DNA, 98 bp, Homo sapiens
atgtggccaagttgcgttacatgagccgagatgacttcagggtcttgaccgcggaatctaaggccgctgctccagctcctgtgtcggaggctgtgtgt

SEQ ID NO: 818405 - DNA, 100 bp, Homo sapiens
tggatagatactgtgaagctgctcgctcagaaatacaagttctggaacatctgaatacaacagaccccaacagtactttattcaaggcctcttccagatg

SEQ ID NO: 818406 - DNA, 100 bp, Homo sapiens
cagcacctcaccatgtgtctacattttgttgcttagaaaagcctaggcatttctgtaacatttgagttctaaagttcctgttgcttcagacaatggatga

SEQ ID NO: 818407 - DNA, 101 bp, Homo sapiens
cggagacgcagatgtggacttgaaagaagctgcagcggaggaaggcgaggtggttggaggcaaagtaaagaagcccggtaaacgtggtcggaagccagcca

SEQ ID NO: 818408 - DNA, 100 bp, Homo sapiens
aggaaaatgcttcatgtattgagcaaaataaagaaaatcagagttttgaaaatgaaactgatgagacgacaactgactttgattcctggtttgatacaaa

SEQ ID NO: 818409 - DNA, 100 bp, Homo sapiens
aggcgcggtggcaggagctgacagagtgatgggaaacgcgtgagccaggccgagagttatatgtggtcatttgagaaagctcacctcagcatggttcaga

SEQ ID NO: 818410 - DNA, 100 bp, Homo sapiens
atgaagatgtaaggaaaaaatcctacgctaacactgtcgcagtttgaaagggcagtctactttgttcggcataaagaatcccggcagaggtttgccatga

SEQ ID NO: 818411 - DNA, 100 bp, Homo sapiens
cgaagagttctacaacctggtgcgcttccggatcgggggcaagcggaaggtgatgcccaagatggaccaggttacagtcttcttcataccttgatgattc

SEQ ID NO: 818412 - DNA, 98 bp, Homo sapiens
gagaggtgttaccggaacggcggcgacaagggtgttcccgaactagagtggataatggattcatacccgattcacttctggaagatgtgatgaaagca

SEQ ID NO: 818413 - DNA, 100 bp, Homo sapiens
ccggatcccccggaccccccgaccgtgctacagaatattttagaaacagaaaatgaatattctaaagaacttcagactgtgctttcaacgtacctacggc

SEQ ID NO: 818414 - DNA, 100 bp, Homo sapiens
tttacagtaatttcaacagaagagtgagagatggaacccgaagaagaaaggattcgttacagccagagattggttcctctcctggctgaaatttatggta

SEQ ID NO: 818415 - DNA, 100 bp, Homo sapiens
acgggacggacggtgatggtggtcgccgcggcggcgtgtgcgcccctcaggagcatctttccttgaagaagtacattattgacattgtggttgaaagtac

SEQ ID NO: 818416 - DNA, 100 bp, Homo sapiens
ccagctcctgaacaagacatggaaggaaatgagggcaacttctgaagacttcaacaaggaagaaaaaatgctgggcatcttggtgcagcacaaagtccgg

SEQ ID NO: 818417 - DNA, 100 bp, Homo sapiens
agcccaagtggccccaggccccgtgggagagcaattctgtggtgttcttggtcacacatttatggagtttctgaagggcagtggagattactgccaggca

SEQ ID NO: 818418 - DNA, 100 bp, Homo sapiens
tctggtggaggtgactctgatatggaaattttggagccaagcataacaccagtaaccagcactatcccacctacctcgacatcaaatcaacagaaagaaa

SEQ ID NO: 818419 - DNA, 99 bp, Homo sapiens
atctcaacaccctgagtgcggatttctgctatgatgacagatacttggtgcttgaaaaactgaagaaggaagacgctgaccgaattcatatattcagtt

SEQ ID NO: 818420 - DNA, 99 bp, Homo sapiens
aacagtctgcactttcacccgtttcaggttcatgaaccatcgagctccagccaatggccgctacaagccaacttgctatgaacatgctgctaactgtta

SEQ ID NO: 818421 - DNA, 100 bp, Homo sapiens
acgtcacttttaaaaaataagtaatgccatctgttttcctaaaagactgaaatgggggcgaccattcttaggtataagtgtgctagcggagtgtctagat

SEQ ID NO: 818422 - DNA, 138 bp, Homo sapiens
cttctgtgcctttcacatctattttttctcagctttttatgactgttgtggttcctctcatcattggacaggtgctgactgggttacttttttaaacactaggaatggtaatttctactcttctggacttcaaactaa

SEQ ID NO: 818423 - DNA, 100 bp, Homo sapiens
ttacgcctggcttgaagaccccgacagtgaacagactaagccaaatttgtatcctactgtggggcttcaaacaccaggagaagtggtcgatgccaatttt

SEQ ID NO: 818424 - DNA, 101 bp, Homo sapiens
cctggccctgctggtgctgctggccctgctctctgtgacttcctggagactcacttcctagatgaggaagtgaagcttatcaagaagatgggtgaccacct

SEQ ID NO: 818425 - DNA, 100 bp, Homo sapiens
catcagaaggaaagcgcccatctgaaaatcttggtcaggtactattcggggaaagaattgaaccttcaccatataagcaatggcaccagcatgatatcat

SEQ ID NO: 818426 - DNA, 100 bp, Homo sapiens
agcaggcaccccagggccctccagtgggggccatgcttcccagagcggagacaacagcagtgagcaagcatgcagcagattggaataaatatgatgaccg

SEQ ID NO: 818427 - DNA, 100 bp, Homo sapiens
ctggccttggcacagacttttctcctgatgttgggtcatattgaacattccagatacctatcattactcgatgctgttgataacagcaagatggctttga

SEQ ID NO: 818428 - DNA, 100 bp, Homo sapiens
aagtttttacaaagaaaatgattgagtctatgggaccaatgagaatagggaaaattctcctgctggtagagcccagcctgtcccatgtgagactcactct

SEQ ID NO: 818429 - DNA, 100 bp, Homo sapiens
gaccttttttcatttccatttctaccttgtatgcctcaatttgctggatttaagcactgctgcactttatgagatgtccctggtagatttgggaaagaag

SEQ ID NO: 818430 - DNA, 100 bp, Homo sapiens
acccgtttgggttctccacgcattctagactcccgaagagcttggacgaaccttgacaggatgggtgcagcgaactttccagagcacccaggcagctacg

SEQ ID NO: 818431 - DNA, 99 bp, Homo sapiens
aaagggaagatggaaaagaagacatttcagatcctatggacccgaacccttgtagtgcaacatacagcaacttaggatgagaacaagttgagcagtgcc

SEQ ID NO: 818432 - DNA, 100 bp, Homo sapiens
cacaaaagcgaaatgggcacaccacagagccaggctttcgaggactgactcctccaattccttgggaacatgcaccgcgtccccatttcccccttgtccc

SEQ ID NO: 818433 - DNA, 100 bp, Homo sapiens
agttggttgtagccacagagaagaatgtgattgcagcattaaattcccgaactggggagatctgccagcgatctgtacatgagacccaggaattatttcc

SEQ ID NO: 818434 - DNA, 100 bp, Homo sapiens
attttagagtccaccagatcatccatgtgagtgaccatgcagcaaaagaaggagggtcctctcagtgattaagattgatgatggtctccagctgtcaaag

SEQ ID NO: 818435 - DNA, 99 bp, Homo sapiens
tgaatcagaaaattggaagctgtacacagcaagacgttgagttacatgttcagaaggtgaacggaagagtccttatgttgcagtatgctgtatagtaat

SEQ ID NO: 818436 - DNA, 100 bp, Homo sapiens
aaagctggccggggcctgggcctgagcatcgttgggaaacggcacagggtggtggtttcctatcctcctcagagtgaggcagaacttgaacttaaagaag

SEQ ID NO: 818437 - DNA, 100 bp, Homo sapiens
gaacatttttggagaaagccagcctaatccaaagactgtggaacttttaagtggagtggtggatcagaccaaagatgggaaattatgatgtgatgacccc

SEQ ID NO: 818438 - DNA, 99 bp, Homo sapiens
gaagctgtggatatgacctgccatggagagccatctctttataattccctaagcatggctatgcagactctaaactacatccgatactcccagatctgt

SEQ ID NO: 818439 - DNA, 100 bp, Homo sapiens
tcattgatgaaatttatggcattcagaacaaacgatttcgagatttactactgcctccatctagtcaagactccgaaattctgcccttcattcaatctag

SEQ ID NO: 818440 - DNA, 100 bp, Homo sapiens
ctgtgtcaatgccattgaattctccaacaatggaggccagtggctggtctcagaattcaaggaagccttctccctatttgataaagatggcgatggcacc

SEQ ID NO: 818441 - DNA, 100 bp, Homo sapiens
ccagttctactcaagccttattgaagagataggaactcttggttgggataagattgttaaaatgagtcttcggaagcaaacccctagtgacttcttaaag

SEQ ID NO: 818442 - DNA, 100 bp, Homo sapiens
ttcagatgctgccagagagtgaggatgaggagagctatgacacagagtcagagttcacggagttcacagaggacgaggaagatgttaccgagtacttcag

SEQ ID NO: 818443 - DNA, 100 bp, Homo sapiens
ttcttttgttagtgacaaagatgcaagcctggcattttttgatgattgtgtagataaaagtcttatcttaggagcattagcttgtttcatcatcacccaa

SEQ ID NO: 818444 - DNA, 100 bp, Homo sapiens
agacgatctgcacttcgcattttggcattgacatttaattttagggtcctttatatagaagggagagtgtctgacttccagcaactgctggcctgtgcca

SEQ ID NO: 818445 - DNA, 98 bp, Homo sapiens
aatacattgccagaacttggaatactctactggacaaacatttcctccaaggactctgaaaaggaatcttgcccaagcagtgatgaagttgatgagga

SEQ ID NO: 818446 - DNA, 100 bp, Homo sapiens
aactgggccaaagcagtgaaacgctccatgaattggttaatgttgaagaaggaaaatgcggaagtcgtcatttgacaagttttataaatgagtatttgaa

SEQ ID NO: 818447 - DNA, 141 bp, Homo sapiens
agacatttctggctctgaaggcgaacgcttcgctggccatttaggagctctgctcaaagccagacgtaatctatgccagcaattatgacaatgttagcagaccatgcagctcgtcagctgcttgatttcagccaaaaactg

SEQ ID NO: 818448 - DNA, 98 bp, Homo sapiens
gggaggggggcctgggtgagcacaactattgcaggtggcaatcactgggcagcttggtgtgaagccccaaacaggcaacagcattccactcacagcca

SEQ ID NO: 818449 - DNA, 98 bp, Homo sapiens
ttatctatggttatgtggatgcagcatataagccaggcatgtctcccgaggagtgcaggcgcttcaccacagacggtcctgcagacattcgctttgtc

SEQ ID NO: 818450 - DNA, 100 bp, Homo sapiens
ctgaccaggaggacagcaagcccatcacgctgggctacagcatgctggccatagggattggaaccctgatctacgggcactggagcataatgaagtggaa

SEQ ID NO: 818451 - DNA, 100 bp, Homo sapiens
ccaggtcttcagcacccacccaccgtggtacagatgtcagtattgaatatggtggtgaggcgtgaccctggcaacactgaacctgtgaaagccaaggaag

SEQ ID NO: 818452 - DNA, 100 bp, Homo sapiens
gccagggttttctttactctggggtcccggctgccctgtggcctcgctcctcggaggaaatacatgctacaggatttaactatcagaatgaagatgaaaa

SEQ ID NO: 818453 - DNA, 98 bp, Homo sapiens
gtaattcgaggtgttacagccaagggccctgtaaactcttgtcaaggcaaggtgcctgagatcatcagctccatccgtcaggcggggaagatcgcccg

SEQ ID NO: 818454 - DNA, 100 bp, Homo sapiens
agtaactttagaggaggatctggcccgatgagagaaagggaaagttaaggatgctggagcagaacaatggatttctctttctctttcatgcaagggatca

SEQ ID NO: 818455 - DNA, 98 bp, Homo sapiens
ttttcgaaagctgggtttcccgggagatcccaggcggtgacagagtggagccatggctagagatagcctgggctggaagctcttctacgtcacaggct

SEQ ID NO: 818456 - DNA, 119 bp, Homo sapiens
gccttctgcaccagcacacataaagttggccttacctcagagatcctgaactcttttgagcatgagccaccttctgggtgaaccctcagttcaagatccggctggatgagacggatgac

SEQ ID NO: 818457 - DNA, 98 bp, Homo sapiens
tctcgtcggcagtgaagctcaagttgctactcgggacgctgcacctcccgcgccgcacggtggacgagaatcattgatcagcgattcgagaaggtttc

SEQ ID NO: 818458 - DNA, 100 bp, Homo sapiens
cccagcgcttcctgcagaaggccgagaagctctacccactgccctcggcccgcggatccttcaaaccaaaaatgtggtggaagaaagaaaaccgtgtctt

SEQ ID NO: 818459 - DNA, 98 bp, Homo sapiens
ggaggccaccacacacacccagctaccagctttgcagttctcctggagttcgctgaggagcagctgcgagccgaccatgtcttcatttgcttccacaa

SEQ ID NO: 818460 - DNA, 100 bp, Homo sapiens
caagcatcttgatctagaaaatataacgggactctctttctgtggatgttttggcccagctttaactcggccattgctgaacctggagacaaacagtgca

SEQ ID NO: 818461 - DNA, 100 bp, Homo sapiens
cactaatgagctctccagaaaattgatgcaggcacaacgtgtttgattgctctgctatcagataaagacctcactgtggccaacgtgggtgactcgcgcg

SEQ ID NO: 818462 - DNA, 98 bp, Homo sapiens
tcatcgcgggcatcttgctgttcgtgattatatttcttggagttgtgttggtaatgaagaaaagtttgcagaaaaaacttcagcatgtgccaggaaca

SEQ ID NO: 818463 - DNA, 98 bp, Homo sapiens
tagaattgcacttggaggacaaggtggtcattgggactcccacacttaaacaaagaaaggaaattctgcaagtgattacctcgaagatgcccatctcc

SEQ ID NO: 818464 - DNA, 98 bp, Homo sapiens
gcgggcgggcgcggacgcggaacccggcgcggcggcggcacgatggtcatggcgtatttcgtcgagaatttttgggttgcagtattttacagagctag

SEQ ID NO: 818465 - DNA, 100 bp, Homo sapiens
catccaggagtcagtttattactggaaagggcactatgaacgaagaggagcagtttgtaaacattgatttgaatgatgacaacatttgcagtgtttgtaa

SEQ ID NO: 818466 - DNA, 100 bp, Homo sapiens
ggttctccacgcattctagactcccgaagagcttattgcaggagtgaccaggacactacctcctagaagtaatgcccacagaaagcgcaagttgttcgac

SEQ ID NO: 818467 - DNA, 99 bp, Homo sapiens
ggatccatttctcctattgaggagtcaactttaattggttggggtcagataagaagaggagtgacaatcaagccaacagtagatgatgactgaagaata

SEQ ID NO: 818468 - DNA, 100 bp, Homo sapiens
ctggagagaagagaatgcctgaagacttggatgaaaatatggattacaggttgatgtgggaggaaaatgttggggcttttcaggaagcataataagattc

SEQ ID NO: 818469 - DNA, 98 bp, Homo sapiens
gtggaccggctgcgctcctggcagaaggctgtcttctactgcgggtcaatgagtggtcattgaagataagaaaggaaatgagagttgttgacaggcaa

SEQ ID NO: 818470 - DNA, 128 bp, Homo sapiens
tcatcttgtgaaagcagtccttgttcctatggcctaatgaacaacttccagtacgcctgcctcacaccttgcgatgcgccaacatcaccatcattgagcaccagaagtgtgagaacgcctaccccggc

SEQ ID NO: 818471 - DNA, 100 bp, Homo sapiens
tcaccgccaaccccttcgagcaagacgtgggtcgtccttggtggaaggaaccatgaactggcatctccccctcttcctcttggcctctgtgacgctgcct

SEQ ID NO: 818472 - DNA, 98 bp, Homo sapiens
tttatcaaaggagcagggaagaaggaatcatcgaggcatgggggtccacactgcaatgtttttgtggaacatgtgccttctactcctgtgcatctcac

SEQ ID NO: 818473 - DNA, 100 bp, Homo sapiens
tcaggaaacatccaagaaaaatgtccttaaagcaattgagcaggctgatctactgcaggaggaaacctgtaggaagtgtcagggactctggaaagaacat

SEQ ID NO: 818474 - DNA, 99 bp, Homo sapiens
gctggaggagctccccagctggtggctggagcgaccccttgttctttggtggcgctgttacagaatgtctgaaggggacagtgtgggagaatccgtcca

SEQ ID NO: 818475 - DNA, 98 bp, Homo sapiens
agccccccgagatgcctccttgccgtcgaggtgtcaataacatatcagtctccctcaaagggttcagctccagagattgatccttcatctgatggttc

SEQ ID NO: 818476 - DNA, 100 bp, Homo sapiens
tttccaagccaatgcccaagacattataaaccctttgaagaagatggtggagagaattcgcaagttccagattctcaatgatgagatcatcaccatcctg

SEQ ID NO: 818477 - DNA, 101 bp, Homo sapiens
cccgaactcgccgtcttcctgtcggcggccggcactgtaggtggatacccttcgccatgttatcagccagacaggaggatacagtgatggactcgcagcca

SEQ ID NO: 818478 - DNA, 100 bp, Homo sapiens
ataacctgtcaccctctgtcgtgcccatgcagctagtgctcttccgagaggctattgaacacagccgctacctgtctgaggaacccgagccctacctggc

SEQ ID NO: 818479 - DNA, 51 bp, Homo sapiens
ggatgaagtggctccggagatgccctcgggaccaaggatcacgtcatgact

SEQ ID NO: 818480 - DNA, 99 bp, Homo sapiens
ttcaaccccgagccgctggtgctacagaacactgatatttgcatttaatggggaacaaaagatgaagaaggaaaaggaatatattcactaaggattcta

SEQ ID NO: 818481 - DNA, 100 bp, Homo sapiens
gctatgtagctggtgcgctgctcacggccattcactgcccatgctgagcgcctctcacacagattgtcactgctgttccaagggcacacgcagagggatt

SEQ ID NO: 818482 - DNA, 99 bp, Homo sapiens
ctaggaaaagacaagctttccagagaatgtttcagagaaagttacgtggagcgtgggcgtttcgcagactcctaagttacagcagatgaatggaacagc

SEQ ID NO: 818483 - DNA, 100 bp, Homo sapiens
cctcatcccctcttcagtgcaggaatatgttagcgttgtatcttgggagaaagacacagtctccatcatcccaggtgtcctagtggtcaatgtcacgtgg

SEQ ID NO: 818484 - DNA, 99 bp, Homo sapiens
cgcagtggcgtcctggagccctcctcaggaacatggaggagacatatttccacctatttctctccataagtataaaagaccataaaagaccatctaggg

SEQ ID NO: 818485 - DNA, 98 bp, Homo sapiens
catgtagaggctggcataacaggacaagagttggaaagacaggtgatgatgaacagtctacacagatggctgcaagttgggaagatgataaagttaca

SEQ ID NO: 818486 - DNA, 98 bp, Homo sapiens
agatgaaagaaacaatcatgaaccaggaaaaactcgccaaactgcaggcacaagtgcgcattggtgggaaagagctatgaagacatgattggtgagga

SEQ ID NO: 818487 - DNA, 100 bp, Homo sapiens
acttagtcatctccaaatccctcgaggcatctggtcgaatatatgtctaccggaaagacctggcggacactttgggtaagaaggtggatggctctgtaaa

SEQ ID NO: 818488 - DNA, 100 bp, Homo sapiens
gaaagcaattcagaaagccaaggaggtcaagtccaaactgagcaacccagagaagaaggaaaacttccgcggctcagcctgccaggagtgccaagacccc

SEQ ID NO: 818489 - DNA, 100 bp, Homo sapiens
agactggtgaaatcgcaaactgggcgtctgttccggcgccggacccctatttgcaaagacaaatgctgtgcttcatgaagttaaaagagaggggctcccc

SEQ ID NO: 818490 - DNA, 98 bp, Homo sapiens
acacctgattcagaacaatatgcctggtgaccaagaatatggcccaggtgaccaaagccctggacaaggccctgagcaccatggacctgcagaaggtc

SEQ ID NO: 818491 - DNA, 100 bp, Homo sapiens
tgaaggagcggaaggttaatgttcttcagaagaaggtattgttgcagcatctggcagtgagactgaggatgaggacagcatggacattcccttggacctt

SEQ ID NO: 818492 - DNA, 121 bp, Homo sapiens
gagcagcaccaaatccaagatggcggccagcaggaggctgatgaagtgccggtggtggtgtgcacattgagccccggtatagacagttcccccagctgaccagatcccaggtgttccagag

SEQ ID NO: 818493 - DNA, 100 bp, Homo sapiens
gacggtggtgggccaaatcactgtggacatgggttgctcctggacgccaccaacaactttagctatgttttctacatgtccagcttcttcctcatctcag

SEQ ID NO: 818494 - DNA, 100 bp, Homo sapiens
gcgggccgaccgggcgcaccgaccatggcctccaaatgccccaagtgcgacaagaccgtgtacttcggtgaccagaagtcagcagcttcccagaagcccc

SEQ ID NO: 818495 - DNA, 98 bp, Homo sapiens
aacggctcgatcgctgcccgccgccagcatgttgggcgccccggacgagagctccgtgcgggtggctgtcagcaagtgttcatcttccacgtattgga

SEQ ID NO: 818496 - DNA, 100 bp, Homo sapiens
tgcaggactgggcacagcatgagatccaaaggcagggcaaggaaactggccacaattaaacgagaagattcatcaccgctttgatggctgcctcacaaac

SEQ ID NO: 818497 - DNA, 99 bp, Homo sapiens
agcgactctgccagctcaagggacccacctgccagtacaggatgggtttgtggagttcttccatgtagaggacctagaaggtggcatcaggaatgtgct

SEQ ID NO: 818498 - DNA, 98 bp, Homo sapiens
ctgcaggtgcgcaccgggaagttcaggagcagggaaaacctgaggtgcttggaggtccagacacaagaagaggattggaaccagttccgatacagcac

SEQ ID NO: 818499 - DNA, 99 bp, Homo sapiens
caaggtacccaccaggccgattatgtccattgttctcttggagcagctggtcatcatgagtaattctgaggaagaagaggaggaaaaagaagaggagga

SEQ ID NO: 818500 - DNA, 99 bp, Homo sapiens
gagagtttgcctggcgtgatggccccttactggcagctttgaaggcaggccattgggtggtgttggatgagctcgagctaatccaagatatggggttcc

SEQ ID NO: 818501 - DNA, 98 bp, Homo sapiens
caggccttccagtacacagacgagcatggggaaggtgcagacgccagaagtgagatttcagcagcagctggagcagctcaactccatgggcttcatca

SEQ ID NO: 818502 - DNA, 100 bp, Homo sapiens
aaaaggcagactttttgatattcagagccttggaagtcaacactgtcaacatcaacgagtgtgcaacaccgtcgaaagtgtcatgcggaaaattctcgga

SEQ ID NO: 818503 - DNA, 100 bp, Homo sapiens
aaatattgaataaatgggaaatgctgaaaagagctgagaaatcaatgtggactgaacataaatcacctgatggaaggacttactactacaacactgaaac

SEQ ID NO: 818504 - DNA, 100 bp, Homo sapiens
tctcaactccccgaaagctttagagttccatatgatcctggactgaaagcaggagcgctggcaagccataagtgtgatccttggtgacaggtggaagaaa

SEQ ID NO: 818505 - DNA, 98 bp, Homo sapiens
ttcgtttcacagtaaccgacgtctcaagtcagtttcttcaggattgaatgaaaacctcactgtcaatggaggaggctggaatgaaaagtctgtaaaac

SEQ ID NO: 818506 - DNA, 100 bp, Homo sapiens
gcataagagctgaaacttcagagcaagttttcattgggcaaaatgggcgcttctctgaagtagctttggaaagtagagaagaaaatccagtttgcttctt

SEQ ID NO: 818507 - DNA, 98 bp, Homo sapiens
gcgcggcgtgccctgcttgtcacagcctgtggacatctctacagcaatgagtgaacgggcacttgctcagaaaagactcagtgagaatgcatttgatc

SEQ ID NO: 818508 - DNA, 100 bp, Homo sapiens
ttcagtggtgtttttctcaggtgaaaggagcagtagatgatgatgtagcagaaggttgcagatatcaagaaagtcaacaacttcatcagagaacaagact

SEQ ID NO: 818509 - DNA, 100 bp, Homo sapiens
gaagaacatcattaccacagaactgaacagcgcaacagataatcctttacctaatggtgtcctcagttgtgggcttctatagctctccactcttccggag

SEQ ID NO: 818510 - DNA, 100 bp, Homo sapiens
agaaattggcagcagtcaagatgaaaccaaaaaacttcttcatgatcatgaacttcttttggccaagctcaagagttttcttggtacgggatagtcagag

SEQ ID NO: 818511 - DNA, 99 bp, Homo sapiens
ccaatcaggctgccaattgtggataagtacaagatctcccttgagtttagaaatctggctgagaaataccaaacagtgattgccgacatttgccggaga

SEQ ID NO: 818512 - DNA, 50 bp, Homo sapiens
ctgagactgtgctcaatcaaatgaggatccagacacggggactgcagaga

SEQ ID NO: 818513 - DNA, 98 bp, Homo sapiens
ccgcgtctccgcgttcccagcccgggtccccgcgttcacagccccagcgcagccctgaaggatggctgccatattgggagacaccatcatggtggcta

SEQ ID NO: 818514 - DNA, 98 bp, Homo sapiens
cggacgcgactcgagggtgacgctcgctccgctcgtcccgctcgtcatggcctacccgggatacggaggaggggtcggattgtttgtgctgaacgaac

SEQ ID NO: 818515 - DNA, 100 bp, Homo sapiens
acaggaccattaaaggatttgaaactctcgtagaaaaggagtggataagctttggacacaggtttgcactgcagccgaatccagtggagcagcgttacat

SEQ ID NO: 818516 - DNA, 100 bp, Homo sapiens
tgggactctctgtggcctgcagctatttgtctccgaaggacagtcggcccctctgtcactgggcagttgacagggctttgtgaaggatgtccatgaagac

SEQ ID NO: 818517 - DNA, 100 bp, Homo sapiens
gctggacgtgctcctctccatggggttccccagagcccgcgcatgaatgatttcggaatcaagaatatggaccaggtagcccctgtggctaacagttaca

SEQ ID NO: 818518 - DNA, 98 bp, Homo sapiens
agccgctgttgtgacaagaaaagctgtggcaaccgaaatgagactccctcagatccagtgataattgacaggaagatctgcctgcactgcaagtgtcc

SEQ ID NO: 818519 - DNA, 98 bp, Homo sapiens
caggcctgcgtctggatacgtgccagaggagatctggaagaaagctgttccctgtattgaacactgatatacaaggaatgaatagaagtcaagaaaaa

SEQ ID NO: 818520 - DNA, 102 bp, Homo sapiens
ctcgaccctgagctctatctcagtgtacacgaccaagatcactccatggatgaaatgacagctgtggtgaaaattgaaaaaggagttggtggcaataatggg

SEQ ID NO: 818521 - DNA, 100 bp, Homo sapiens
ttattagtgtttatactatggaagcggggatctgatgagcttctttcttctggcatcattaacggaccttttaccatgaatagttctactccttctacag

SEQ ID NO: 818522 - DNA, 98 bp, Homo sapiens
acaggaactttaaatcttgacagatgcaggacaagtactccaaaagtggcattgcttgtttcttaaaagaagatgacagttattgggaccccaatgac

SEQ ID NO: 818523 - DNA, 98 bp, Homo sapiens
atgattcattattgcgactgcctgtttctcgagaaactaaggatgcggagatctctgcctttgagctgcagaccatcctgagaagggttctagcaaag

SEQ ID NO: 818524 - DNA, 98 bp, Homo sapiens
ggatctggtgtaccaggcgaagctggccgagcaggctgagcgatacgacgcgatggttggctgtcccaggctgtcacctttctagaccggcttctgat

SEQ ID NO: 818525 - DNA, 100 bp, Homo sapiens
gaaaacattcacaaaatgggtaaatgcacaattttctaaggagcttactccacgggaacagcctctagataatctgagttgttgaaaatacgaagcctgt

SEQ ID NO: 818526 - DNA, 100 bp, Homo sapiens
caaggatttatcctcttcatctttctccgatcccagttagcaggaatactttagcctggaaggtgttatgagatggagaaaaggctaaaaacaccagatc

SEQ ID NO: 818527 - DNA, 100 bp, Homo sapiens
tggccacaggcttagctgttaacgggaaagctcttttggtacaccagaaggccagaatggaacgacttcaaagagaacttgagattcaaaagaaaaagct

SEQ ID NO: 818528 - DNA, 101 bp, Homo sapiens
gccggtctctgttccgcaggatgttttcggctttgtgagaaaccttaccatcaaacacgatggccagcaacgttaccaacaagacagatcctcgctccatg

SEQ ID NO: 818529 - DNA, 99 bp, Homo sapiens
gcaccgccaagtcggccacctggacggactacaaatccctccaggatatcattgccatcctgggtatggatgaactttctgaggaagacaagttgaccg

SEQ ID NO: 818530 - DNA, 100 bp, Homo sapiens
ggtacttctcaaagtccacgaggacaaggacatctttccaccgaatgccacctggtttataacaaaagaaccaatttagaacttgaattgattcatcgag

SEQ ID NO: 818531 - DNA, 100 bp, Homo sapiens
gtggcgaaggagccggctccaagccatatcacaaccctgaaaattgatcagaaacctttgccaaccacagattctacagttacgtcaaccttctggagcc

SEQ ID NO: 818532 - DNA, 99 bp, Homo sapiens
gaagagcggggtcggggccggctgaccaggaacctgggcgagcagcggcgggggcccgagggttcaaggagcagggacaagttacaggaatgttctcca

SEQ ID NO: 818533 - DNA, 100 bp, Homo sapiens
ccgggcgctgcaggagatgctggctaacaccgtggagaaatcagaaggggactcagcccaggagagtgttattactcgagatattcatcgtacatttccc

SEQ ID NO: 818534 - DNA, 100 bp, Homo sapiens
tcaccatcatgcagcccatcctccgcttccttcagctcctgtgtgaaaaccacaaccgagacctgcagtttaaactcatatcccaggcatatgaagtgct

SEQ ID NO: 818535 - DNA, 100 bp, Homo sapiens
aggggctgaagctagaagagctctggctcgatggaaactccctgtgtgacaccttccgagaccagtccacctacatcagatgcagagaggtgttcataaa

SEQ ID NO: 818536 - DNA, 98 bp, Homo sapiens
gtcactatcatatgacaaaggctttgccgcagttcatcttcctccctgtgtactttccatttgccttcctgggaggatttgacagctaaggatattga

SEQ ID NO: 818537 - DNA, 100 bp, Homo sapiens
gagaacgtcccgctggatctgacccgagtgccggtggtggtgtgcacattgagccccggtatagacagttcccccagctgaccagatcccaggtgttcca

SEQ ID NO: 818538 - DNA, 98 bp, Homo sapiens
acgtcgtgcttcagcctcaccaactgcgggcacgtgtactgcgacgcctgcctcggcaaagagtgtgaacatggctacgcctcttcattcccgtccat

SEQ ID NO: 818539 - DNA, 98 bp, Homo sapiens
tgcttcatccttgtttaatgactttggtgccctcaacatctctcagagacgaaaggctgcagttcatggagctcgtttcaaagggcaagatctaaaac

SEQ ID NO: 818540 - DNA, 115 bp, Homo sapiens
ctcagatacctcaacagcagccgtgccagcaccgatgagccccccgcagacacccagggcatgaccattcggcccctggtagacctgttggctgtgaagaaaaagcaagagacga

SEQ ID NO: 818541 - DNA, 100 bp, Homo sapiens
aaggagctaaagcagcgtgcgttcagccctgggttatgccccgtggtgccctgcttgtcaaaatcttcaaccggaatgggaaagttttgctgaatgggga

SEQ ID NO: 818542 - DNA, 98 bp, Homo sapiens
cgggttatctgcgaacacagtagtggaagatgtaaagcaatatttcgagcagtttggcaaggttgttagcgacatgagtacagggtctggatcttacc

SEQ ID NO: 818543 - DNA, 100 bp, Homo sapiens
tccgtcagtcagcaccttggcggcccactacccaccgtccacctggtgagtgttgtgcaagattctgtcaacatttctggccagaataccatgaacatgg

SEQ ID NO: 818544 - DNA, 99 bp, Homo sapiens
caaggacctggccgacatcgcggccttcttccgatccgactgggactcttcaattaatctgacatttcacaaatccaaaattgccgtggatgaactctt

SEQ ID NO: 818545 - DNA, 100 bp, Homo sapiens
aagggttatatatggaattatggtaccctccctcaggaacttagtgatttggcccgtgaccctccagcacaatgttctgcaggtccagttggggatgata

SEQ ID NO: 818546 - DNA, 100 bp, Homo sapiens
gcccgacttcggaaggaccgggaggcaaaggagtccaaaactacttacctggaagaccttccaccaccccctgagtatgaattggccccgtccaagttag

SEQ ID NO: 818547 - DNA, 100 bp, Homo sapiens
taccaaatgggcgagacacacctgcactcttcaacttcaccactcaagattcccaaatgctggaaaatcctctttgctaagttgtgtttctcatgcaaaa

SEQ ID NO: 818548 - DNA, 100 bp, Homo sapiens
aggagacagagatgatggacccagagctagactacaccctcatgagggtctgcaagcagatgataaagttcgacatcagcgaggatgacattgatgatgg

SEQ ID NO: 818549 - DNA, 100 bp, Homo sapiens
agctaaggcgagggagcctgggaggagccctgactgattgttaaaggaaatgggctggcaggaagacagtgaaaatgatgaaacatgtgctcccttaact

SEQ ID NO: 818550 - DNA, 100 bp, Homo sapiens
gcaaagactggcaaaagcacaaggattctcgctgtgacagagacaacaccgagtatgagaagagtggaaacaaaatgtcagtcagtgtgcatgagaaccg

SEQ ID NO: 818551 - DNA, 98 bp, Homo sapiens
agccgccagcccaaacaggcgtgtcacagagaagagcgttcctctttgcatcctctatgagaaataccgtgactgccttacggagtccaacctcatca

SEQ ID NO: 818552 - DNA, 100 bp, Homo sapiens
tttgctactaccgcgactggctgctgcggcgcgaggtcatgcttctcatcgatatcgagctggcttacatgaacaccaaccatgaggacttcataggctt

SEQ ID NO: 818553 - DNA, 98 bp, Homo sapiens
ccttcattagaaaagtctatacagtttgcattgaggcagaatttacatgaaataggttgctccttgagggcaggacagttcttatggctttatccgtt

SEQ ID NO: 818554 - DNA, 100 bp, Homo sapiens
ctatgtttggatgttggatctacactttctcaagcactgtgatcttcaaatgactcaactaaagaagtttcttggaaaatcagtaaagagagcaaagcac

SEQ ID NO: 818555 - DNA, 98 bp, Homo sapiens
tttggatgcattgtgatccttatattcattatgacagggattgacctgaagttctggctctgatgaccgggattccaagcgggattcccttgaggagg

SEQ ID NO: 818556 - DNA, 100 bp, Homo sapiens
ggcagtacaagcttacgtctctgctcttcagtacaatcctagctccactggttcaacagcctctcctccagtttcgaccccagtcacaggacacaagaga

SEQ ID NO: 818557 - DNA, 100 bp, Homo sapiens
cccacagagggcccggctcctggagaagtggatccgcgtggcagaggatgaccattctgccccccttggagaaactgcggctgctgctggagaagctgag

SEQ ID NO: 818558 - DNA, 99 bp, Homo sapiens
tgatatgttccagttgcacatttcctgcaaggactccaaagtggtgagatgcaatgctcttggtggcagagcgactggaggggccattcaacattgagt

SEQ ID NO: 818559 - DNA, 127 bp, Homo sapiens
cttctccccagaggaactcaaagttaaggtgttgggagatgtgattgaggtgcatggaaaacatgaagagcgccagaactattttgctcgcaacttttacaacatgagaatgttagccttatttgtc

SEQ ID NO: 818560 - DNA, 100 bp, Homo sapiens
cggctgttgcctggacgtttgtccaatccacgttgacatttgagggatcacagcgtgtgaaagtgagtgagaaggttggaggagctgaaggaaccaagct

SEQ ID NO: 818561 - DNA, 99 bp, Homo sapiens
aactattggaaaggccttcactgcacaggttgggtatctacagccattggttgctgttcaggtcagctttgctcctaacaacactgggaaagaagtaac

SEQ ID NO: 818562 - DNA, 100 bp, Homo sapiens
cagcggcttgctgagactcaacatgacactcctggggtctgagcattccttgctgattaggagcaagttcagatcaggtttcatggggaagggtatcggg

SEQ ID NO: 818563 - DNA, 98 bp, Homo sapiens
atgagagttctgagaaggagaaagacacctatttttcagctctgtcgagaggagatccacttcctgtaaaggacagaatggaaatgcccacggcaacc

SEQ ID NO: 818564 - DNA, 98 bp, Homo sapiens
gttggaacatgctttcttcaagatggaacaaagactgttgagtatgctccatgtagatcacggaaaggaaaacctcttcagcgcaaggtgaaaccacc

SEQ ID NO: 818565 - DNA, 100 bp, Homo sapiens
gaaatgcctactgtgtgtaccactattaaggtgtcaaaagatggacagtacattttagcaactgtgctgctgcagcacggagctgacccaaacattcgga

SEQ ID NO: 818566 - DNA, 100 bp, Homo sapiens
tatcacgggcactagtgtggctctcctgttccagcaattggctctttcgacgtgtagcagcagctttgccgggaatggaaagcacacaggacagaagcag

SEQ ID NO: 818567 - DNA, 98 bp, Homo sapiens
actttgaaacggtcaccatcaaaattgcaccaaacacacctcagctggctgacattgttgcaacagggtttcccaggcagctgcagacttgaaacagt

SEQ ID NO: 818568 - DNA, 100 bp, Homo sapiens
ataaccttggctgctcatgtaacccttcggaaggtgggagtcaatcattttgacaagtctcctgaaaggaacagctagcaggaactgaaacctttttcca

SEQ ID NO: 818569 - DNA, 100 bp, Homo sapiens
ggccaatgtcttcctcgagtcacttttctatgatgtgaagttacaatacgctgttcccatcatcaaccagaaaggagagtttgacaaatggacagactct

SEQ ID NO: 818570 - DNA, 99 bp, Homo sapiens
cacaggcagtgtctggaattggtgtatagtgttgattggagccaaaccagaggtgaacagcttgtggtgtctggctcatgggatcaaactgtcaaattg

SEQ ID NO: 818571 - DNA, 100 bp, Homo sapiens
ggtcactgtcccaggagggacttcacctggaacaagagctggaggcagccgcttgcccaggaggcttgtcccctggcagcgggtggcatgagacgtggga

SEQ ID NO: 818572 - DNA, 100 bp, Homo sapiens
gggaacagcctgcgtacggctctcatcaactccactggggaaccaggatctgtcacaactcgagaggtggaaattccggtttccctggcctagagctccc

SEQ ID NO: 818573 - DNA, 100 bp, Homo sapiens
agatgacggatgaaaagaatgaacactgtccttcaaaacgatattgcctaagtgtaatcttgaacatgggcggtgctgtgagtgctggtgaagacaatga

SEQ ID NO: 818574 - DNA, 100 bp, Homo sapiens
acagctctggcgacggcgcttgacgtgggcttgtccaactggagcttcctgtatgtcaccgtctcgctgctcctgatggaaagggaaggcccctagtcct

SEQ ID NO: 818575 - DNA, 98 bp, Homo sapiens
ctgggaatcggtcgcctggaggaccagtatttcccatggagggtggaacacctgcagcaggagactgctgctctgaaaaagcaaatgcaaaaaataaa

SEQ ID NO: 818576 - DNA, 100 bp, Homo sapiens
aagggaagaagctgccacgcaccttctgccagctgatcctggaccccatcttcaaggtgttcttcaaggccgggctgctggggctgctggaggaaatgag

SEQ ID NO: 818577 - DNA, 100 bp, Homo sapiens
ggaggaagcaatacatccagtatgagggccaaggagatctgttgaagaatgccaagaatgaagctatagaaaacatgaagcagatccagctggcatgcct

SEQ ID NO: 818578 - DNA, 98 bp, Homo sapiens
tgcgcttggaaggggaatcagaatttttattcccattgtatgccaaagaaatacactccagagtggacgccaggaaagcatgtgcagatgcaactctc

SEQ ID NO: 818579 - DNA, 100 bp, Homo sapiens
taacagactactcagtaccattccaccatacgccaatatcaagcatgtcatcagatttgccagaggcctccagtttggttggcagagtggtgaccagctg

SEQ ID NO: 818580 - DNA, 100 bp, Homo sapiens
tgtgcaagctgtccatgaaaccccttggtgaaggccctccagacccaaaaaactggcgatggaatatgagaggagccctctggaaagaaaaggacagacc

SEQ ID NO: 818581 - DNA, 100 bp, Homo sapiens
tacaacacgattcttctaatggatgggaacatgggtatctggagtccatctttcaccatcttctcctgagattgtactggaccgtgaccactcttcttcc

SEQ ID NO: 818582 - DNA, 100 bp, Homo sapiens
aaaagccaaagccacagataaaccagtggaagcaggagaagcagcaattatcgtccgagcagccaaaagaatgcaatggtgtaaagattccagttgatgc

SEQ ID NO: 818583 - DNA, 100 bp, Homo sapiens
aaactgcgctgctccatgtcttcgccaaggactgcttccccgagatttaatccagagactgacttcactatagaacccacagttgtatcaatggttgggg

SEQ ID NO: 818584 - DNA, 100 bp, Homo sapiens
ctgcaggatggcctggaccagtatgagcgctactcagagcagcacaaggaagctgccttcttcaaagagctgaggtggtgggacacacgcaggggccact

SEQ ID NO: 818585 - DNA, 100 bp, Homo sapiens
ctatccttgagctccccgatgaaagggcttccctggaggccgccattgcagatgccgagcagcgtggagagctggccattaaggatgccaacgccaagtt

SEQ ID NO: 818586 - DNA, 100 bp, Homo sapiens
gagccggccgtcccgggccgggggacccgcccgccatggccaccaaggtcctgagggagtctaacaagttagcagaaatggaagaaccacccttgcttcc

SEQ ID NO: 818587 - DNA, 118 bp, Homo sapiens
tcatcattaaaaacaacttaaaggaatgtggactttattgagaagcatggatgttagtgaaagcatctaacattcacaagggaatttgattcagattctcttagacattacagctggg

SEQ ID NO: 818588 - DNA, 100 bp, Homo sapiens
aaattcatccagagggtccaggccatgaagagtcctgaccacaatggggaggacaacttcgcccgggacttcatgatgcagaaactgaggcccagcagag

SEQ ID NO: 818589 - DNA, 100 bp, Homo sapiens
gccaaagtgtcccttttaaaagagcccacaggcggttttgtgagctgcttccccaggagcagcggagcgtggagtcgtcacttcgggcacaagtgccctt

SEQ ID NO: 818590 - DNA, 99 bp, Homo sapiens
tgacgccgggaccgggaccgccgccgccgccgccaccatggtgcactacatcctccaggaggtggtgatgggtgggatggtgttggaaacaaacatgaa

SEQ ID NO: 818591 - DNA, 100 bp, Homo sapiens
actttcagatctctcaagattcagtagggaacagcggaggaaatatttgagagtgtaggagatcgagagctaagacaagtctttgaaggacagaatcgta

SEQ ID NO: 818592 - DNA, 100 bp, Homo sapiens
gctgggatgtcgacgactgggacaatgagaacagctctgcgcggctttttgagcggtcccgcatcaaggctctggcagttcctattatccttgccgtaaa

SEQ ID NO: 818593 - DNA, 100 bp, Homo sapiens
ctttgttcaccgccaaccccttcgagcaagacgtgggatgttgagaacgatgggcctgagccctcagactgggaccggtttgccgctgaggagtatgaga

SEQ ID NO: 818594 - DNA, 100 bp, Homo sapiens
ggacatggtggtgtcccacctttttgggaagtttcttatcaccacaggagaaaatctagattatcttgatggtgtccatacggtgtttggtgaggtgaca

SEQ ID NO: 818595 - DNA, 100 bp, Homo sapiens
atacctatttgggaaaatatgtcaataacctgaacactgaccagctctcagttgcacttctcaaagcaaaatgatgcttcaacacccaggccaggtctct

SEQ ID NO: 818596 - DNA, 100 bp, Homo sapiens
gttgattactcagtctctaaaaagctaaggatgttttcactccagaatgcaaattcaaggaatctgtgtttgaaaactactatgtgatctattcttccac

SEQ ID NO: 818597 - DNA, 98 bp, Homo sapiens
gggcgcgggggtcgcggtgaagggtccgagggtgaggggcgagattcttggaaaaggaagaacactgagctgaaggttgaagtggagagcttgaaacg

SEQ ID NO: 818598 - DNA, 100 bp, Homo sapiens
tggctgggtcctgcgtgcggccctggattcaggggccttccagagcacactagcaacttcagacgtcagcaggcggaaatggctgattccaggtgcagag

SEQ ID NO: 818599 - DNA, 100 bp, Homo sapiens
ttcaacaagataggcgatgccattgcccagaggatcctgaaagctcacaggcctaaagatattggaagacctaaggctgaagttgctgcagaatttctaa

SEQ ID NO: 818600 - DNA, 50 bp, Homo sapiens
cgagtatctccgtttcctggatgtgaacttccaggggaagtggtatgtgg

SEQ ID NO: 818601 - DNA, 100 bp, Homo sapiens
gaatagctggggctacaggcgtgtgtcactgcgcccaggaacagcaatgggcacttgcattgcaacatatctcaagacatctgactgtgaaacgacagca

SEQ ID NO: 818602 - DNA, 100 bp, Homo sapiens
gacatcgacgaagccaaactttctgtcttctcaaccgtagatgctcctgtcgctccttcagacaaaggtaaagattatagttcccaacagcacagcaggt

SEQ ID NO: 818603 - DNA, 100 bp, Homo sapiens
aaagatgagatttacctgtgagatgtttcatcccaacagtggatggagagagaaagaaaaagccagagaggagagctggggtccacctcgagaatcaagg

SEQ ID NO: 818604 - DNA, 98 bp, Homo sapiens
gctccttacccaagtgggtggtgaataaatcttctcagttcctggctcccaagagcgggaagctgagccgagagctggactttgtcagccaccacgtc

SEQ ID NO: 818605 - DNA, 99 bp, Homo sapiens
agatgctgggcgtggcggccgggatgacccacaggaccgtataatagacgctggccccaaaggaaactactctcgatttatgaatcacagctgccagcc

SEQ ID NO: 818606 - DNA, 100 bp, Homo sapiens
tgtggcaggcatctgtgggatctgtaatagaaatggcatccgcttcgatcctgaaattccgcaaacactacgactagagtttgctaaggcaaacacgaag

SEQ ID NO: 818607 - DNA, 131 bp, Homo sapiens
tgctgtgcctgctgggctgccacgtctggaaggcggtgaccaagacgctgcgggagcccggcgccggagcccaaggattttttatcaagcagaaatgcatcgaacaacgagaatcaagatcactgagctaa

SEQ ID NO: 818608 - DNA, 114 bp, Homo sapiens
tatcttacattcaacccaggacacaagaaactccttcacatctggaagaacttgaagttcctccaggagtgatccaaaatggagcgcgggtcctgagccgagggctgtttcctg

SEQ ID NO: 818609 - DNA, 139 bp, Homo sapiens
gacaactggagtccggctttaactatttctaaagttctcctctccatctgctcacttcttacagattgcaaccctggaggtatctttaaaatagcttcctgggcagatctagtaaatgctcacgtggtgccaggctcag

SEQ ID NO: 818610 - DNA, 100 bp, Homo sapiens
aagcagctcttccggaagatcaactgcagactgtcctattgcatctcaagccaacttttgcgactttcaggaccagtcatgcagcagtcccagcagcccc

SEQ ID NO: 818611 - DNA, 100 bp, Homo sapiens
aatggacaaaaccaccgtgttggaaaaggtcatcggatttttgcagaaacacaatggatattttggaactcttagaaaaaagagtgaagtcaagattttc

SEQ ID NO: 818612 - DNA, 98 bp, Homo sapiens
gtggctgaacaggaggagcggcagggcatgaaggtccaggcgctggccaggtcagggaagtcaaagatgcatccctgagttcttcctagcaggcaagc

SEQ ID NO: 818613 - DNA, 99 bp, Homo sapiens
cattgaggactttccttacctgtttttccagctcacccactgccagcagagtgtctccaagcagccagccatcatgcctggtcagtcatacgggttgga

SEQ ID NO: 818614 - DNA, 98 bp, Homo sapiens
agaggtttatataaaagtattcagaagacacttaaatttttccagacatttgccttgcttgaggcacctgaatggacagaagaggacctcagccaact

SEQ ID NO: 818615 - DNA, 100 bp, Homo sapiens
agcagcactgtgtgtcttggcttcggagcattcagcaggtgttacaggtcagttcaccgggacctggaggcccagattgcgatcgtgacggagaaccagg

SEQ ID NO: 818616 - DNA, 98 bp, Homo sapiens
cggttgccattgggtcggagatacagatctcgaggaagttctcgtcctgacagatctccagctattgaagggaattacatgaacgacagccttcgcac

SEQ ID NO: 818617 - DNA, 100 bp, Homo sapiens
ccgtggtgggaagggcgcgtcgcctcggacgtccactgcaccctgcgcgagaagtgttatccaagataaattctgtgggattataaacatttcagtagaa

SEQ ID NO: 818618 - DNA, 98 bp, Homo sapiens
ttagaggaccactagttggaccccatcctcgtgctggaggaacaggattttgacacttcatgacatgtcattatttagagcaataatgaatattgacc

SEQ ID NO: 818619 - DNA, 100 bp, Homo sapiens
ccagctcagctcttactgcgggccgctccgacggcggtccatcctggtggtctgagctcggcctatgggggcctcacaagccccggcctcagctacagcc

SEQ ID NO: 818620 - DNA, 100 bp, Homo sapiens
tcgaggaaacactggagatgttgctgttgagaccatccagtggaataagtgaggctttgatatctgaaaatgaaaacaaaaacctcgagcatctcacaca

SEQ ID NO: 818621 - DNA, 98 bp, Homo sapiens
gccgctcacccgtggaaagtacaggtcctgacagctgcacctgaaggggaagaacgtgatccacccattcctgtctcggagccttcccattgtcttcg

SEQ ID NO: 818622 - DNA, 100 bp, Homo sapiens
cgaataattccaggtggaattgctgatagacatgggggcctcaaacgtggagatcaactcctctctgttaatggagtggcctcaggagtgcaagtagctg

SEQ ID NO: 818623 - DNA, 99 bp, Homo sapiens
cctgtcgctggagcacaaaagagtctccgcggtggaggtctgcgttgctcttgcttttcctcgctggggtgtacgatttaacagaggctttggatgaag

SEQ ID NO: 818624 - DNA, 100 bp, Homo sapiens
aggtgccaagagcttagttgaactccttagcaaagtctgaaatggatgttacatgagtcattttaagggatgcacacaactatgaacatttctgaagatt

SEQ ID NO: 818625 - DNA, 141 bp, Homo sapiens
atcaagcccctgccttgctgcaagaaggccgtgtgcgaggagtgcctcaaagtctacctgagcgcccagagcgaaaagctgttgctatatgatacagtccagagtgaactagaggagaagataagaaggcttgaagaggat

SEQ ID NO: 818626 - DNA, 98 bp, Homo sapiens
atctctatactcccaacgtgaagctttcagcttatgtggagaagtcgctgtgaagccacctataaatccatttactgaatttatggagaaggctgtaa

SEQ ID NO: 818627 - DNA, 100 bp, Homo sapiens
cgccgccatgggctcctcgcaaagcgtcgagatcccgggcgggggcaccgagggctaccacgttctgcggcttccaccaacactttcttccaaatatcct

SEQ ID NO: 818628 - DNA, 99 bp, Homo sapiens
agtggtttgcaacatccttcttctggataacactgtacaagctttcaaagtcaatgtttgttggcatccaaagctgttggggttgatggtgctgaaaaa

SEQ ID NO: 818629 - DNA, 99 bp, Homo sapiens
ctatcagcaggctccgggctgaagattgcttctcttctctcctccaaggtcctagctggactgctgcaccttggcaatatccagtttgctgcctccgag

SEQ ID NO: 818630 - DNA, 98 bp, Homo sapiens
tgcctatgccatctgcaaatacgcctttctcatatccactgccaaagggaccattggtactagaggacccaaagtacaactttgtgacttgaagtctg

SEQ ID NO: 818631 - DNA, 100 bp, Homo sapiens
tgaagaggccatctccacattcagaaccaaggtgacttaagagattaaaattaatttggttgctgttggttctgaacaaataatgagttcttttatttga

SEQ ID NO: 818632 - DNA, 100 bp, Homo sapiens
ggactggcggtgagcgcgagggaggctactgagaagcccggcgacggaggaacgcaggtctgctgccaggttaaaaagatcaagtggcatgagcagcctt

SEQ ID NO: 818633 - DNA, 100 bp, Homo sapiens
atgcttcaagagccattccttttggaacaatggatcttcagcctgttaaacaagaaaacgaaaaaccccttccagaaaacatggatgcatttgaaaaagt

SEQ ID NO: 818634 - DNA, 99 bp, Homo sapiens
ttctccttcacagtaaagtggctggttctcccagcagagatgtgggtccttccctgggtctgaagaagtcaagctcgttggagagtctgcagaccgcag

SEQ ID NO: 818635 - DNA, 100 bp, Homo sapiens
tctgctacttcaagtaccaggtcctggcgatcagcaccaagaacccactgcaggtcagcaagactggagcagagggagccgtgctggacgaggcaaagaa

SEQ ID NO: 818636 - DNA, 98 bp, Homo sapiens
gccccgagccggcccgggtcgaggacatagctcgccttttgcaagaaaaggagttacaggaagagaaaaagagaaagaaacactttccagagttccct

SEQ ID NO: 818637 - DNA, 100 bp, Homo sapiens
tgagtcaaagaagatgcctcgaactaaacaaattcatcccagaaatctaagagtgacactggtacagtagctccagaaaaatgcttatttggggcaatgc

SEQ ID NO: 818638 - DNA, 100 bp, Homo sapiens
agaaaatgaagatgatgtagagattatgtcaacggactcctcaagcagtagtaattgcagcaggagagaagattcctttgagccaggaagaaataactct

SEQ ID NO: 818639 - DNA, 100 bp, Homo sapiens
aagtagatcttgtagatgagaattttacagaattaagaggagaaatagcaggacctccagacacaccatatgaaggaaattcgtacaagtttcaagctgg

SEQ ID NO: 818640 - DNA, 100 bp, Homo sapiens
tgatgaagtaatacagaactgccccatcgatgtgcggcgcccgctgtataaggtgtgcaactgaggaacatggctcaagaaactaatcacagccaagtgc

SEQ ID NO: 818641 - DNA, 100 bp, Homo sapiens
ctcagccctaacggtggtggagaacccaaagttggcactctatgtgctttcattcctggaacccaaagacctgctacaagcagctcagacatgtcgctac

SEQ ID NO: 818642 - DNA, 100 bp, Homo sapiens
gcggcagatgagagcatccaacgcttccaattgaagacttgtgcagtttaacatcccagtcactgcccattgaactgacttcagtagtgcctgaatctac

SEQ ID NO: 818643 - DNA, 100 bp, Homo sapiens
ggatctgtgagtcttctggcaaacagtgtttgcctctggttcagctcatacaacagcttcttagaactgccctcatgctaggttgcgaatatggttgcag

SEQ ID NO: 818644 - DNA, 98 bp, Homo sapiens
atatccttatttaggccccagcacactcagagacaggaattgtgggaacgtattctgctccagttgttgtaaccagaaggttccagttcccagccagc

SEQ ID NO: 818645 - DNA, 100 bp, Homo sapiens
atttgtgcaaatggcagtgaacaagacaaacccgtggtgctccagttcattgactggattctccggggcatatcccaagtggtgttcgtcaacaaccccg

SEQ ID NO: 818646 - DNA, 98 bp, Homo sapiens
tcaagccgaagccttcagtgggactcccccagcagatacattctcagtgtatgcaacagcgttattgcaacaggctaacgaaaacagacaaaattcaa

SEQ ID NO: 818647 - DNA, 100 bp, Homo sapiens
tttgtccaaagtccctggatatggcttacagatcaatgagctgagcaatgttcctgttcctgtcatgctaatgccagatgacttcaaagcctacagcaag

SEQ ID NO: 818648 - DNA, 123 bp, Homo sapiens
ccggagttcaagaccggcctgaacaacatagcgagaccctatctctaccataaaaaagctcaccatggatgatgatatcgccgcgctcgtcgtcgacaacggctccggcatgtgcaaggccgg

SEQ ID NO: 818649 - DNA, 100 bp, Homo sapiens
aacaaagctctgttggacatgattgaagaggattgtggtttgctgattcatccagaggaaacctgtgggttacagcctatttcttctgactacattgaag

SEQ ID NO: 818650 - DNA, 99 bp, Homo sapiens
gtaacctcaacagatggctctcgatgcatcgtatcttctcacagagaatctcttctacacctggctatgagatggggcctggctaaactttcccagttc

SEQ ID NO: 818651 - DNA, 98 bp, Homo sapiens
tatgggcagacagcggcatacagaatgcctatgaccggcgtcgagaatttcaactggttcatatccagctttcagagtggcaccgtgcaatttttctt

SEQ ID NO: 818652 - DNA, 100 bp, Homo sapiens
agtggtgtgcgggccaccctcagactgtacgcagagagctacgagagggatcccagcggccatgaccaggagccacaggaactccaggatggcattgggc

SEQ ID NO: 818653 - DNA, 99 bp, Homo sapiens
gtggctttggatcagattattcacgaagctctagaaaggaactctaatgaatcattgattgaccagcactattttaccagttggaatgaatgatcagaa

SEQ ID NO: 818654 - DNA, 100 bp, Homo sapiens
catgcggacgtgtcgcgtttgcccattgaatcagctgaaaccagaccacttgtcttatttccactttgtggggcggatcatggggctggctgtgttccat

SEQ ID NO: 818655 - DNA, 98 bp, Homo sapiens
cctctccgcctccatgtgccggatagcgggagcgctgcggaccctgctgccgctgctggcggccctgcttcagcagcccactcacccagtgtacaaca

SEQ ID NO: 818656 - DNA, 100 bp, Homo sapiens
gttttctcactgtacttctgggtaaactggagaagagcttcaactctgttcacctgcttgcaggagtaaaagtccctcgcaatttccgactgttggaaga

SEQ ID NO: 818657 - DNA, 100 bp, Homo sapiens
atctgagctcagacctgccaatttaccagagataattgataacaccctgtaacagctgagtggagtacatcctgctgcttcaagggtagaagactcctca

SEQ ID NO: 818658 - DNA, 98 bp, Homo sapiens
tgccctggagacggccttggccataggtgccaagtcctgccctgccaacttcttggcagctgccgacgacaaactcagtgggttccagggggacttcc
